(19) United States
(12) Patent Application Publication
(10) Pub. No.: US 2013/0267429 A1
(43) Pub. Date: Oct. 10, 2013

(54) BIOLOGICAL SAMPLE TARGET CLASSIFICATION, DETECTION AND SELECTION METHODS, AND RELATED ARRAYS AND OLIGONUCLEOTIDE PROBES

(71) Applicant: Lawrence Livermore National Security, LLC, Livermore, CA (US)

(72) Inventors: Shea GARDNER, Oakland, CA (US); Crystal J. JAING, Livermore, CA (US); Kevin MCLOUGHLIN, Oakland, CA (US); Thomas SLEZAK, San Francisco, CA (US); James B. THISSEN, Alameda, CA (US); Marisa Wailam TORRES, Pleasanton, CA (US)

(21) Appl. No.: 13/886,172

(22) Filed: May 2, 2013

Related U.S. Application Data
(63) Continuation-in-part of application No. 13/304,276, filed on Nov. 23, 2011.
Application No. 13/304,276 is a continuation-in-part of application No. 12/643,903, filed on Dec. 21, 2009.
(60) Provisional application No. 61/628,224, filed on Oct. 26, 2011.

(51) Int. Cl. G06F 19/20; C12Q 1/68

(52) U.S. Cl. CPC G06F 19/20; C12Q 1/6876
USPC 506/8; 506/16

(57) ABSTRACT

Biological sample target classification, detection and selection methods are described, together with related arrays and oligonucleotide probes.

### CROSS REFERENCE TO RELATED APPLICATIONS

[0001] This application is a continuation in part of U.S. application Ser. No. 13/304,276 entitled “Biological Sample Target Classification, Detection and Selection Methods, and Related Arrays and Oligonucleotide Probes” filed on Nov. 23, 2011 which is, in turn, a continuation in part of U.S. application Ser. No. 12/643,903 entitled “Biological Sample Target Classification, Detection and Selection Methods, and Related Arrays and Oligonucleotide Probes” filed on Dec. 21, 2009 and claims priority to U.S. provisional application No. 61/628,224 filed on Oct. 26, 2011, each of which is incorporated herein by reference in its entirety.

### STATEMENT OF GOVERNMENT GRANT

[0002] The United States Government has rights in this invention pursuant to Contract No. DE-AC52-07NA27344 between the U.S. Department of Energy and Lawrence Livermore National Security, LLC, for the operation of Lawrence Livermore National Security.

### FIELD

[0003] The present disclosure relates to arrays, methods and systems for pan microbial detection. In particular, the present disclosure relates to biological sample target classification, detection and selection methods, and related arrays and oligonucleotide probes.

### BACKGROUND

[0004] Various approaches for detecting microbial presence are based on use of arrays and in particular, probe microarrays.

[0005] Microarrays can be used for microbial surveillance, detection and discovery. These arrays probe species-specific or conserved regions to enable detection of novel organisms with some homology to the probes designed from sequenced organisms. Detection microarrays have proven useful in identifying, subtyping, or discovering viruses with homology to known viruses (see references 4, 10, 11, 15, 16, 18, 21, 23, 24 and 25).

[0006] Bacterial detection arrays to date have focused on highly conserved rRNA regions (16S or 23S) (see references 1, 5, 9, 14, 24) allowing specific rather than random PCR to amplify the target region with highly conserved primers. Virus diversity precludes the identification of a particular gene universally conserved at the nucleotide level for viruses, and viral probe design requires consideration of many genes or whole genomes.

[0007] The ViroChip discovery array played a role in characterizing SARS as a coronavirus (see references 16, 22 and 23). It was built using techniques for selecting probes from regions of conservation based on BLAST nucleotide sequence similarity to viruses in the respective viral family, such that all viruses sequenced at the time of design (2004) would be represented by 5-10 probes. Version 3 of the Virochip included approximately 22,000 probes. Chou et al. (see reference 4) designed conserved genus probes and species specific probes covering 53 viral families and 214 genera, requiring 2 probes per virus.

### SUMMARY

[0008] Provided herein in accordance with several embodiments of the present disclosure are biological sample target classification, detection and selection methods, and related arrays and oligonucleotide probes.

[0009] According to a first aspect, a method to obtain a plurality of oligonucleotide probes for detection of targets of a target group is provided, comprising: identifying group-specific candidate probes from an initial genomic collection by eliminating from the initial collection regions with matches to non-group targets above a match threshold and by selecting regions satisfying probe characteristics, said probe characteristics including at least one criterion selected from length, Tₘ, GC %, maximum homopolymer length, homodimer free energy prediction, hairpin free energy prediction, probe-target free energy prediction, and minimum trimer frequency entropy condition; ranking the group-specific candidate probes in decreasing order of number of targets of the target group represented by each group-specific candidate probe; and selecting probes from the ranked group-specific candidate probes.

[0010] According to a second aspect, a method of classifying an oligonucleotide probe sequence as detected or undetected in a biological sample is provided, comprising: incubating fluorescently labeled target DNA synthesized from templates extracted from a biological sample on an array comprising a plurality of probes, to allow for hybridization of target DNA to any probes of the array having sequences similar to those of the target DNA, producing a variable number of target-probe hybridization products for each probe sequence; scanning the array to measure an aggregate fluorescence intensity value for each feature comprising a set of target-probe hybridization products having probes of the same sequence; calculating the distribution of feature intensity values for target-probe hybridization products by way of negative control probes with randomly generated sequences, and setting a minimum detection threshold for the array; and comparing the observed feature intensity value for each probe sequence with the minimum detection threshold determined for the array, to classify each probe sequence on the array as either detected or undetected in the biological sample.

[0011] According to a third aspect, a method of predicting likelihood of presence of a target of known nucleotide sequence in a biological sample is provided, comprising: applying the method according to the above second aspect to classify probe sequences on an array as detected or undetected in the sample; estimating, for each detected probe sequence: i) a probability of observing the probe sequence as detected conditioned on presence of the target of known nucleotide sequence; ii) a probability of observing the probe sequence as detected conditioned on absence of the target of known nucleotide sequence; and iii) the detection log-odds, defined as the ratio of i) and ii); estimating, for each undetected probe sequence: iv) a probability of observing the probe sequence as undetected conditioned on presence of the target of known nucleotide sequence; v) a probability of observing the probe sequence as undetected conditioned on absence of the target of known nucleotide sequence; and vi) the nondetection log-odds, defined as the ratio of iv) and v); summing detection and nondetection log-odds values over the probes on the array to form an aggregate log-odds score for presence versus absence of the target of known nucleotide sequence, conditional on the observed detected and undetected probes; and based on the aggregate log-odds score, providing a prediction of the presence of at least one said target of known nucleotide sequence in the biological sample.

[0012] According to a fourth aspect, a selection method for selecting, from a list of candidate target sequences of known nucleotide sequence, a target sequence most likely to be present in a biological sample is provided, the selection method comprising: applying the method according to the above third aspect to each of the candidate target sequences, and choosing the target sequence that yields the maximum aggregate log-odds score.

[0013] According to a fifth aspect, a selection method for selecting, from a list of candidates, a set of targets whose presence in a biological sample would collectively provide the best explanation for observed detected and undetected probes on an array is provided, comprising: a) applying the above method to identify the target most likely to be present in the sample; b) removing the identified target from the list of candidates and adding the identified target to the “selected” list; c) repeating the method of claim 17 for the remaining candidates, wherein: c1) estimation of i), ii) and iii) is replaced with estimation of: i′) a probability of observing the probe sequence as detected conditioned on presence of the candidate target and presence of targets in the list of selected targets; ii′) a probability of observing the probe sequence as detected conditioned on absence of the candidate target and presence of targets in the list of selected targets; and iii′) the detection log-odds, defined as the ratio of i′) and ii′); c2) estimation of iv), v) and vi) is replaced with estimation of: iv′) a probability of observing the probe sequence as undetected conditioned on presence of the candidate target and presence of targets in the list of selected targets; v′) a probability of observing the probe sequence as undetected conditioned on absence of the candidate target and presence of the targets in the list of selected targets; and vi′) the nondetection log-odds, defined as the ratio of iv′) and v′); c3) the detection and nondetection log-odds values are summed over the probes on the array to form a conditional log-odds score for presence versus absence of the candidate target, conditioned on the observed detected and undetected probes and on the presence of the targets in the list of selected targets; d) choosing the candidate target yielding the maximum conditional log-odds score, removing it from the candidate list, and adding it to the list of selected targets; and e) repeating c) and d) until the conditional log-odds scores for all remaining candidate targets are less than zero.

[0014] According to a sixth aspect, an oligonucleotide probe for detection of targets in a target group is described, the oligonucleotide probe comprising a sequence selected from the group consisting of SEQ ID NO's 1-133,263, wherein: said detection occurs in combination with other oligonucleotide probes selected from the group consisting of SEQ ID NO's 1-133,263, and said target is a microorganism. In particular, the detection can be performed in combination with at least four other oligonucleotide probes selected from the group consisting of SEQ ID NO's 1-133,263.

[0015] According to a seventh aspect, a system for detection of at least one target in a target group is described, the system comprising at least two oligonucleotide probes, wherein: each oligonucleotide probe comprises a sequence selected from the group consisting of SEQ ID NO's 1-133,263, wherein the at least one target is a microorganism and wherein the detection occurs in combination with other oligonucleotide probes selected from the group consisting of SEQ ID NO's 1-133,263. In particular, the detection can be performed in combination with at least other three other oligonucleotide probes selected from the group consisting of SEQ ID NO's 1-133,263.

[0016] According to an eighth aspect, an array for detection of targets in a target group, is described, the array comprising a plurality of oligonucleotide probes wherein: at least one of the oligonucleotide probes comprises a sequence selected from the group consisting of SEQ ID NO. 1 to SEQ ID NO: 133,263; the detection occurs in combination with other oligonucleotide probes selected from the group consisting of SEQ ID NO's 1 to SEQ ID NO: 133,263, and wherein said target is a microorganism. In particular, the detection can be performed in combination with at least four other oligonucleotide probes selected from the group consisting of SEQ ID NO's 1 to SEQ ID NO: 133,263.

[0017] According to a ninth aspect, a computer-based method to obtain a plurality of oligonucleotide probes for detection of targets of a target group is provided. The computer based method comprises computer-operated steps, where a computer performs the steps in single-processor mode or multiple-processor mode. The computer operated steps comprises providing an initial genomic collection, identifying group-specific candidate probes from the initial genomic collection by eliminating from the initial collection regions with matches to non-group targets above a match threshold and by selecting regions satisfying probe characteristics, said probe characteristics including at least one criterion selected from length, Tm, GC %, maximum homopolymer length, homodimer free energy prediction, hairpin free energy prediction, probe-target free energy prediction, and minimum trimer frequency entropy condition, ranking the group-specific candidate probes in decreasing order of number of targets of the target group represented by each group-specific candidate probe, and selecting probes from the ranked group-specific candidate probes, thus obtaining the plurality of oligonucleotide probes for detection of targets of a target group, where a target is represented if a candidate probe matches with at least 85% sequence similarity over the total candidate probe length and has a perfectly matching subsequence of at least 29 contiguous bases spanning the middle of the probe.

[0018] According to a tenth aspect, a computer-based method to obtain a plurality of oligonucleotide probes for detection of targets of a target group is provided. The computer based method comprises computer-operated steps where a computer performs the steps in single-processor mode or multiple-processor mode. The computer operated steps comprises providing an initial genomic collection, identifying group-specific candidate probes from the initial genomic collection by eliminating from the initial collection regions with matches to non-group targets above a match threshold and by selecting regions satisfying probe characteristics, said probe characteristics including at least one criterion selected from length, Tm, GC %, maximum homopolymer length, homodimer free energy prediction, hairpin free energy prediction, probe-target free energy prediction, and minimum trimer frequency entropy condition, ranking the group-specific candidate probes in decreasing order of number of targets of the target group represented by each group-specific candidate probe, selecting probes from the ranked group-specific candidate probes, thus obtaining the plurality of oligonucleotide probes for detection of targets of a target group, where a target is represented if a candidate probe matches an at least 85% sequence identity to the target over the length of the probe and a detection probability of at least 85% derived from an alignment score, a predicted Tm, and the start position of the match on the probe.

[0019] According to an eleventh aspect, a computer-based method to obtain a plurality of oligonucleotide probes for detection of targets of a target group is provided. The computer based method comprises computer-operated steps where a computer performs the steps in single-processor mode or multiple-processor mode. The computer operated steps comprises providing an initial genomic collection, identifying group-specific candidate probes from the initial genomic collection by k-mer analysis. k-mer analysis comprises compiling sequences of targets independent of any alignment, enumerating all k-mers of a desired probe length range of the compiled sequences, where k is the desired number of bases in a family-unique region, ranking k-mers by the number of target sequences in which they occur, picking conserved k-mers from the ranked k-mers, filtering conserved k-mers for desired characteristics, aligning filtered conserved k-mers to targets, recording detected targets from the alignment as probes, where the recording is iterated to find another k-mer for remaining targets, aligning probes against target sequences, and selecting probes from the matches of the alignments that satisfy at least a minimum desired probe/oligo length, thus obtaining the plurality of oligonucleotide probes for detection of targets of a target group.

[0020] According to a twelveth aspect, an oligonucleotide probe for detection of at least one target in a target group is provided. The oligonucleotide probe comprises a sequence selected from a group consisting of SEQ ID NO's 491,463-495,658 and 534,157-661,081, where said detection occurs in combination with at least four other oligonucleotide probes selected from the group consisting of SEQ ID NO's 491,463-495,658 and 534,157-661,081; and said target is a microorganism.

[0021] According to a thirteenth aspect, a system for detection of at least one target in a target group is provided. The system comprises at least five oligonucleotide probes, where each oligonucleotide probe comprises a sequence selected from the group consisting of SEQ ID NO's 491,463-495,658 and 534,157-661,081, and where at least one target is a microorganism.

[0022] According to a fourteenth aspect, an oligonucleotide probe for detection of at least one target in a target group is provided. The oligonucleotide probe comprises a sequence selected from a group consisting of SEQ ID NO's 141, 125-267-772 and 491,511-492,337 and 496,379-512,129, where said detection occurs in combination with at least four other oligonucleotide probes selected from the group consisting of SEQ ID NO's 141, 125-267-772 and 491,511-492,337 and 496,379-512,129, and said target is a bacterium.

[0023] According to a fifteenth aspect, an oligonucleotide probe for detection of at least one target in a target group is provided. The oligonucleotide probe comprises a sequence selected from a group consisting of SEQ ID NO's 297,256-486,081 and 492,545-495,045 and 492,545-495,045 and 515,887-534,156, where said detection occurs in combination with at least four other oligonucleotide probes selected from the group consisting of SEQ ID NO's 297,256-486,081 and 492,545-495,045 and 492,545-495,045 and 515,887-534,156; and said target is a virus.

[0024] According to a sixteenth aspect, an oligonucleotide probe for detection of at least one target in a target group is provided. The oligonucleotide probe comprises a sequence selected from a group consisting of SEQ ID NO's 286,566-297,255 and 492,437-492,544 and 514,810-515,886, where said detection occurs in combination with at least four other oligonucleotide probes selected from the group consisting of SEQ ID NO's 286,566-297,255 and 492,437-492,544 and 514,810-515,886, and said target is a species of protozoa.

[0025] According to a seventeenth aspect, an oligonucleotide probe for detection of at least one target in a target group is provided. The oligonucleotide probe comprises a sequence selected from a group consisting of SEQ ID NO's 133,264-141,123 and 491,463-491,510 and 495,659-496,378; where said detection occurs in combination with at least four other oligonucleotide probes selected from the group consisting of SEQ ID NO's 133,264-141,123 and 491,463-491,510 and 495,659-496,378, and said target is an archaeon.

[0026] According to an eighteenth aspect, an oligonucleotide probe for detection of at least one target in a target group is provided. The oligonucleotide probe comprises a sequence selected from a group consisting of SEQ ID NO's 267,773-286,565 and 492,338-492,436 and 512,130-514,809, where said detection occurs in combination with at least four other oligonucleotide probes selected from the group consisting of SEQ ID NO's 267,773-286,565 and 492,338-492,436 and 512,130-514,809, and said target is a fungus.

[0027] According to a nineteenth aspect, an array for detection of targets in a target group is provided. The array comprises a plurality of oligonucleotide probes where at least one of the oligonucleotide probes comprises a sequence selected from a group consisting of 491,463-495,658 and 534,157-661,081. In the array for detection of targets, the detection occurs in combination with at least four other oligonucleotide probes selected from the group consisting of 491,463-495,658 and 534,157-661,081, and where said target is a microorganism.

[0028] The methods, arrays and probes herein provided are useful for the detection of viral and bacterial sequences from single or mixed DNA and RNA viruses derived from environmental or clinical samples.

[0029] The details of one or more embodiments of the disclosure are set forth in the accompanying drawings and the detailed description and examples below. Other features, objects, and advantages will be apparent from the detailed description, examples and drawings, and from the appended claims.

### BRIEF DESCRIPTION OF THE DRAWINGS

[0030] The accompanying drawings, which are incorporated into and constitute a part of this specification, illustrate one or more embodiments of the present disclosure and, together with the detailed description and the examples, serve to explain the principles and implementations of the disclosure.

[0031] FIGS. 1A and 1B show steps of a schematic illustration of a method that is suitable to produce oligonucleotide probes for use in microbial detection arrays.

[0032] FIG. 2 shows results of an array hybridization experiment and analysis according to the disclosure. The right-hand column of bar graphs shows the unconditional and conditional log-odds scores for each target genome listed at right. That is, the darker shaded part of the bar shows the contribution from a target that cannot be explained by another, more likely target above it, while the lighter shaded part of the bar illustrates that some very similar targets share a number of probes, so that multiple targets may be consistent with the hybridization signals. The left-hand column of bar graphs shows the expectation (mean) values of the numbers of probes expected to be present given the presence of the corresponding target genome. The larger “expected” score is obtained by summing the conditional detection probabilities for all probes; the smaller “detected” score is derived by limiting this sum to probes that were actually detected. Because probes often cross-hybridize to multiple related genome sequences, the numbers of “expected” and “detected” probes often greatly exceed the number of probes that were actually designed for a given target organism.

[0033] FIGS. 3-9 show results of an array hybridization experiment and analysis similar to FIG. 2 for the indicated target genome.

[0034] FIG. 10 shows a plot of intensity distributions for adenovirus target-specific probes and negative control probes in an adenovirus limit of detection experiment at selected DNA concentrations. Hybridization was conducted for 17 hours.

[0035] FIG. 11 shows a plot of intensity distributions similar to FIG. 10 at the indicated DNA concentrations. Hybridization was conducted for 1 hour.

[0036] FIG. 12 shows distributions for an MDA v.2 array hybridized to a spiked mixture of vaccinia virus and HHV6B, for probes with and without target-specific BLAST hits and for negative control probes. Vertical line: 99^{th} percentile of negative control distribution.

[0037] FIG. 13 shows dependence of nonspecific positive signal frequency on the trimer entropy of the probe sequences. Dashed line is a logistic regression fit to the probe entropy and signal data.

[0038] FIGS. 14A and 14B show steps of an array design process diagram, illustrating the probe selection algorithm described herein.

[0039] FIG. 15 shows a schematic illustration of a method that is suitable to produce oligonucleotide probes for use in microbial detection arrays using k-mers.

[0040] FIG. 16 shows a computer system that may be used to implement the methods described.

[0041] FIG. 17 shows plots, for a particular array experiment, of the observed fraction of probes detected and the corresponding log of odds as functions of predicted detection probability and log odds.

### DETAILED DESCRIPTION

[0042] According to an embodiment of the present disclosure, methods to obtain a plurality of oligonucleotide probe sequences for detection of one or more targets within a target group are provided.

[0043] The term “oligonucleotide” as used herein refers to a polynucleotide with three or more nucleotides. In the present disclosure, oligonucleotides serve as “probes”, often when attached to and immobilized on a substrate or support. The term “polynucleotide” as used herein indicates an organic polymer composed of two or more monomers including nucleotides, nucleosides or analogs thereof. The term “nucleotide” refers to any of several compounds that consist of a ribose or deoxyribose sugar joined to a purine or pyrimidine base and to a phosphate group and that is the basic structural unit of nucleic acids. The term “nucleoside” refers to a compound (such as guanosine or adenosine) that consists of a purine or pyrimidine base combined with deoxyribose or ribose and is found especially in nucleic acids. The term “nucleotide analog” or “nucleoside analog” refers respectively to a nucleotide or nucleoside in which one or more individual atoms have been replaced with a different atom or a with a different functional group. Accordingly, the term “polynucleotide” includes nucleic acids of any length, and in particular DNA, RNA, analogs and fragments thereof.

[0044] The term “target” as used herein refers to a genomic sequence of an organism or biological particle such as a virus. Thus a “target sequence” as used herein refers to the genomic sequence of a target organism or particle. In particular, a genomic sequence includes sequences of any fully sequenced elements, nuclear (e.g. chromosome), viral segment, mitochondrial, and plasmid DNA, as well as any other nucleic acids carried by the organism or particle.

[0045] The term “target group” as used herein refers to a group of organisms or viral particles with related genomic sequences. By way of example and not of limitation, a target group can be a viral family or a bacterial family. In particular, a target family comprises the family classification according to the NCBI (National Center for Biotechnology Information) taxonomy tree. A target group can also comprise a viral, bacterial, fungal, or protozoal sequence group classified under a taxonomic node other than family.

[0046] Embodiments of the present disclosure are directed to a method to obtain a pan-Microbial Detection Array (MDA) to detect all sequenced viruses (including phage), bacteria, fungi, protozoa, archaea and plasmids and the MDA thus obtained. Family-specific probes are selected for all sequenced viral, fungal, archaea, vertebrate-infecting protozoa, and bacterial complete genomes, segments, chromosomes, mitochondrial genomes, and plasmids. In some embodiments, bacteria are those under the superkingdom Bacteria (eubacteria) taxonomy node at NCBI, and do not include the Archaea. Probes are designed to tolerate some sequence variation to enable detection of divergent species with homology to sequenced organisms. One embodiment of the array of the present disclosure (Version 3 or v3) also contains family-specific probes for all known/sequenced fungi and species-specific probes for human-infecting protozoa and their near neighbors, including probes for partial sequences (e.g. genes and other partial sequences available in collections such as the NCBI nt database). One embodiment of the array of the present disclosure (Version 5 or v5) also contains family-specific probes for all fully sequenced elements (chromosomes, plasmids, mitochondria) from archaea, fungi and vertebrate-infecting protozoa. The probes can then be arranged on suitable substrates to form an array using procedures identifiable by a skilled person upon reading of the present disclosure.

[0047] In some embodiments, fungal, bacterial, protozoan, and archaeal sequences are used and family specific sequences can be determined within each viral, bacterial, archaeal, and fungal and protozoa family and from the family specific sequences, probes can be designed to meet desired ranges for length, Tm, entropy, GC %, and other thermodynamic and sequence features In some of those embodiments, the desired ranges can be relaxed as needed to obtain at least 5 (v4) or 30 (v5) probes per sequence. Candidate probes can then be clustered and ranked by the number of targets detected, and a greedy algorithm used to select a probe set to detect as many of the targets as possible with the fewest probes.

[0048] FIGS. 1A and 1B provide an illustration of a process used to obtain the oligonucleotide probe sequences in accordance with the present disclosure.

[0049] An initial genomic collection can be obtained, for example, by downloading a complete bacterial (e.g. eubacteria), fungal, archaea, protozoan, and viral genomes, segments, and plasmid sequences from public sources such as Baylor College of Medicine Human Genome Sequencing Center (BCM-HGSC), Broad Institute, Global Initiative on Sharing All Influenza Data (GISAID), Integrated Genomics, Microgen, University of Oklahoma, Poxvirus Bioinformatics Resource Center, Genome Institute of Singapore, Stanford Genome Technology Center (SGTC), The Institute for Genomic Research (TIGR), University of Minnesota, Washington University Genome Sequencing Center, NCBI Genbank, the Integrated Microbial Genomics (IMG) project at the Joint Genome Institute, the Comprehensive Microbial Resource (CMR) at the JC Venter Institute, RepBase, SILVA, and The Sanger Institute in the United Kingdom, as well as proprietary sequences from nonpublic sources. The sequence data is then organized by family for all organisms or targets. For the embodiment of Version 3 (v3) of the array of the present disclosure, all available partial sequences were included in the target sequence collection as well as complete genomes. For the embodiment Version 5 (v5) array, probes were screened for uniqueness relative to ribosomal RNA sequences of the SILVA database, repetitive sequence from the RepBase database, and human sequence data that includes all contigs assembled onto chromomes and contigs that have not been assembled onto chromosomes.

[0050] It has been shown that the length of longest perfect match (PM) is a strong predictor of hybridization intensity, and that for probes at least 50 nucleotide (nt) long, a PM≦20 base pairs (bp) have signal less than 20% of that with a PM over the entire length of the probe. Therefore, for each target family, regions with perfect matches to sequences outside the target family were eliminated. In particular, a match threshold was identified in accordance with the present disclosure. Using, e.g., the suffix array software vmatch (see reference 6), perfect match subsequences of, e.g., at least 17 nt long present in non-target viral families or, e.g., 25 nt long present in the human genome or non-target bacterial families were eliminated from consideration as possible probe subsequences or, e.g. 19 nt or 20 nt for all taxa. Sequence similarity of probes to non-target sequences below this threshold was allowed. As shown later in the present disclosure, such similarity can be accounted for using a statistical log likelihood algorithm, later described. According to an embodiment of the disclosure, from these family-specific regions, probes 50-66 bases long were designed for one family at a time or probes 40-60 bases long were designed for one family at a time. Candidate probes were generated using, for example, MIT's Primer3 software. See, e.g., Steve Rozen, Helen J. Skaletsky (1998) Primer3 with minor configuration modification to allow the design of probes up to 70 bp, up from the 36 bp program default.

[0051] According to several exemplary embodiments of the disclosure, the following Primer3 settings were modified from the default values:

PRIMER_TASK=pick_hyb_probe_only

### PRIMER_PICK_ANYWAY=1

### PRIMER_INTERNAL_OLIGO_OPT_SIZE=55

### PRIMER_INTERNAL_OLIGO_MIN_SIZE=50

### PRIMER_INTERNAL_OLIGO_MAX_SIZE=60 or 70

### PRIMER_INTERNAL_OLIGO_OPT_TM=90

### PRIMER_INTERNAL_OLIGO_MIN_TM=80

### PRIMER_INTERNAL_OLIGO_MAX_TM=110

### PRIMER_INTERNAL_OLIGO_MIN_GC=25

### PRIMER_INTERNAL_OLIGO_MAX_GC=75

### PRIMER_NUM_NS_ACCEPTED=0

### PRIMER_EXPLAIN_FLAG=0

### PRIMER_FILE_FLAG=1

### PRIMER_INTERNAL_OLIGO_SALT_CONC=450

### PRIMER_INTERNAL_OLIGO_DNA_CONC=100

### PRIMER_INTERNAL_OLIGO_MAX_POLY_X=4

[0052] These settings identify candidate probes in the desired length range, melting temperature (Tₘ) range, GC % range, and without homopolymer repeats longer than 4 (i.e. regions with AAAAA, GGGGG, etc. are not selected as probe candidates).

[0053] The above step was followed by Tₘ and homodimer, hairpin, and probe-target free energy (ΔG) prediction using, for example, Unafold (see, e.g., Markham, N. R. & Zuker, M. (2005) DINAMeIt web server for nucleic acid melting prediction. Nucleic Acids Res., 33, W577-W581). Homodimers occur when an oligo hybridizes to another copy of the same sequence, and hairpining occurs when an oligo folds so that one part of the oligo hybridizes with another part of the same oligo. According to an embodiment of the disclosure, candidate probes with unsuitable ΔG's, GC % or Tₘ's were excluded as described in reference 8. Desirable range for these parameters was 50≦length≦66, Tₘ≧80° C., 25%≦GC %≦75%, trimer entropy>4.5, ΔG_{homodimer}=ΔG of homodimer formation >15 kcal/mol, ΔGₕₐᵢᵣₚᵢₙ=ΔG of hairpin formation >−11 kcal/mol, and ΔG_{adjusted}=ΔG_{complement}−1.45 ΔGₕₐᵢᵣₚᵢₙ−0.33 ΔG_{homodimer}<−52 kcal/mol. In some cases, related for example to bacterial probes, an additional minimum sequence complexity constraint was enforced, requiring a trimer frequency entropy of at least 4.5.

[0054] More generally, in accordance with the above embodiments, probes with suitable annealing characteristics or preferred binding properties (e.g., polynucleotides from target specific regions with favored thermodynamic characteristics) were selected, in order to remove probes that are likely to bind to non-target sequences, whether the non-target sequence is the probe itself or a low complexity non-specific sequence. In some exemplary embodiments, candidate probes that can produce non-specific binding due to long stretches of G's, such as GGGGGGGG, in the candidate probe sequence are modified where another nucleotide, such as T, as an alternate candidate probe sequence, such as GGGGTGTG. If fewer than a user-specified minimum number of candidate probes per target sequence (the specific value of which can depend upon the particular application needs and available number of probes on a particular array platform) passed all the criteria, then those criteria were relaxed to allow a sufficient number of probes per target. For example, a skilled person can relax the number of mismatches in a sequence or the length of the probe. In accordance with a relaxation embodiment, candidates that passed the above mentioned first step but failed the above mentioned second step can be allowed. If no candidates passed the first step, then regions passing target-specificity (e.g. family specific) and minimum length constraints can be allowed.

[0055] From these candidates, probes were selected in decreasing order of the number of targets represented by that probe (i.e., probes detecting more targets in the family were chosen preferentially over those that detected fewer targets in the family), where a target was considered to be represented if, for example, a probe matched it with at least 85% sequence similarity over the total probe length, and a perfectly matching subsequence of at least 29 contiguous bases spanned the middle of the probe. It should be noted that the perfect-match stretch did not have to be centered, and in fact data gathered by the applicants indicate, in some embodiments, higher probe sensitivity if the match falls toward the 5′ end of the probe (for probes tethered to the solid support at the 3′ end), so long as it extends over the middle of the probe. In some embodiments, a target is considered represented if, for example, a probe matched it with at 85% sequence identity or similarity to the target over the length of the probe and is predicted to detect the target from an empirically driven predictor. An empirically driven predictor can be, for example, a linear predictor based on an alignment score (such as BLAST bit scores), the predicted Tm of the probe to its matching target sequence, and the start position of the match on the probe, also known as a “hit start”.

[0056] For probes that tie in the number of targets represented, a secondary ranking was used to favor probes most dispersed across the target from those probes which had already been selected to represent that target. The probe with the same conservation rank that occurs at the farthest distance from any probe already selected from the target sequence is the next probe to be chosen to represent that target. In some embodiments, candidate probes can be further refined or clustered based on the downstream applications of the probes. For example, to avoid providing many highly similar candidates from the same region of a genome, candidate probes can be clustered from a family that had been designed based on the uniqueness and thermodynamic methods, already described, by sequence similiarity. In one embodiment of this disclosure (v5), candidate probes were clustered so that probes with more than 90% sequence identity were in the same cluster allowing one a single representative of each cluster to be retained and removing the other near-identical candidate probes in that cluster.

[0057] According to an exemplary embodiment of this disclosure (v5), candidate probes can be a k-mer probe, generated by using k-mer statistics (see reference 33). The term “k-mer” as described herein refers to a specific n-tuple of nucleic acid sequences, such as DNA. Generation of candidate probes using k-mer statistics can be performed by the following (see FIG. 15): 1) compiling sequences of targets independent of any alignment; 2) enumerating all k-mers of a desired probe length range, where k is the desired number of bases of a probe in a family-unique region; 3) ranking k-mers by the number of target sequences in which they occur, 4) picking conserved k-mers and filtering for desired characteristics (Tₘ, hairpin avoidance, GC % etc); 5) aligning conserved k-mers to targets, and re-calculate conservation allowing mismatches, such as degenerate bases; 6) recording detected target and iterate to find another k-mer for remaining targets; 7) calculating conserved degenerate probes predicted by steps 1-6 for a target family, allowing up to a desired number of degenerate bases (e.g. 6 degenerate bases.); 8) aligning probes against target sequences (e.g. BLAST); and 9) selecting probes from the matches of step 8 that satistfy at least a minimum desired probe/oligo length and replacing degenerate bases with the most common non-degenerate base for each degenerate base position. Candidate probes from k-mer statistics, or k-mer probes or Primux k-mer probes, can be used in addition or in alternative to the methods to generate candidate probes based on PM described above. A candidate probe from one method can have the same sequence from another method. A person with ordinary skill can choose to eliminate repeats of the same candidate probe when generated probes for an array. Parameters, or desired characteristics, for candidates probes generated by k-mers in one exemplary embodiment of this disclosure (v5) include the following: A length 50-60 bp, a maximum homopolymer length 5, a targeted minimum 40 probes per target sequence, a minimum trimer entropy of 4.5, a minimum hairpin energy of G=−11 kcal/mol, minimum dimer energy of G=−15 kcal/mol, a Tₘ between 85° C. and 130° C., and a GC % in the range 20-80%. A person of ordinary skill can adjust or relax these exemplary parameters or other desired parameters based the downstream application of the candidate probes. For example, a person of ordinary skill can relax the targeted minimum number of probes per target sequence when there were insufficient probe candidates passing the specifications above. In an embodiment of the present disclosure (v5), k-mer probes, after filtering for desired characteristics, were BLASTed against target sequences and matches of at least 40 bases in length were identified as candidate probes. A consensus sequence was determined for candidate probes with up to 6 degenerate bases, where the most common non-degenerate base was replaced for each degenerate base position.

[0058] In several embodiments, arrays contained probes representing all complete viral genomes or segments associated with a known viral family, with at least 15 probes per target (Table 1). For example, a first exemplary array obtained by applicants (array v1) did not include unclassified targets not designated under a family. On a second example of array obtained by applicants (v2 array), every viral genome or segment was represented by at least 50 probes, totaling 170,399 probes, except for 1,084 viral genomes that were not associated under a family-ranked taxonomic node (“nonConforming sequences”). These had a minimum of 40 probes per sequence totaling 12,342 probes. There were a minimum of 15 probes per bacterial genome or plasmid sequence, totaling 7,864 probes on the v2 array. Bacterial genomes that were not associated under a family-ranked taxonomic node were not included in the v2 array design. In another example obtained by applications (array v5), every target sequence was represented by at least 30 probes selected from conservation-favoring probes and at least 5 probes selected from discriminating probes.

TABLE 1
Summary of v1 and v2 array design - Probe Counts

| Number of Probes | Probe Description |
|---|---|
| Version 1 | |
| 36497 | Viral detection probes (15 probes/target from each |
| | taxonomic family) |
| 20736 | Wang, deRisi Virochip probes |
| 1278 | human viral response genes |
| 3000 | random controls |
| Version 2 | |
| 170399 | Viral probes (50 probes/target from each taxonomic |
| | family) x 2 replicates |
| 12342 | nonConforming viruses (not associated w/taxonomic |
| | family, 40 probes/target) |
| 7864 | bacterial probes (15probes/target) |
| 20736 | Wang, deRisi Virochip probes |
| 1278 | human viral response genes |
| 2651 | random controls |

[0059] On both arrays v1 and v2, as controls for the presence of human DNA/mRNA from clinical samples, 1,278 probes to human immune response genes were designed. For targets, the genes for GO:0009615 (“response to virus”) were downloaded from the Gene Ontology AmiGO website (http://amigo.geneontology.org), filtering for Homo sapiens sequences. There were 58 protein sequences available at the time (Jul. 12, 2007), and from these, the gene sequences of length up to 4× the protein length were downloaded from the NCBI nucleotide database based on the EMBL ID number, resulting in 187 gene sequences. Fifteen probes per sequence were designed for these using the same specifications as for the bacterial and viral target probes.

[0060] To assess background hybridization intensity, ˜2,600 random control probe sequences were designed that were length and GC % matched to the target probes on arrays such as v1, v2, v3, or v5. These had no appreciable homology to known sequences based on BLAST similarity.

[0061] In addition, 21,888 probes from the Virochip version 3 from University of California San Francisco (see references 3, 21, 22, 23) were included on array v1 and v2.

[0062] In several embodiments including further exemplary arrays obtained by applicants (arrays v3.1, v3.2, v3.3, and v3.4), sequence data was downloaded as summarized in Table 2 for all viral, bacterial, and fungal sequences, and species of protozoa that infect humans and near neighbors of those protozoa species. All sequences from the LLNL KPATH, JCVI, IMG, and NCBI Genbank databases were included, whether it represented complete genomes, partial sequences, genes, noncoding fragments, etc.

[0063] In order to reduce the number of redundant viral sequences, cd-hit (see reference 26) was used to cluster the sequences within each group or family of viral sequences into clusters sharing 98% identity, and using only the longest sequence representative from each cluster for conserved probe design. This reduced the number of nonredundant viral targets by ˜70% compared to the full set with numerous duplicate and near-duplicate sequences. In order to reduce probe redundancy and biased coverage for species with large numbers of sequences for highly similar strain variants, duplicate and highly similar probes (e.g. ≧90%) from a complied list of conserved probes, discriminating probes, and k-mer probes were clustered and the total probe set was reduced by taking only the longest probe representing each cluster in an exemplary embodiment of this disclosure (v5). A skilled person can also reduce the number of probes based on the number of synthesis cycles required by a probe on a desired array. For example, Version 5 truncated probes requiring more than 148 synthesis cycles on the NimbleGen platform.

[0064] As in other embodiments, the vmatch software (see reference 6) can be used as described above, to eliminate non-unique regions of a target group (e.g. a viral or bacterial family) relative to other families and kingdoms, or species for the case of protozoa. Bacterial and viral probes were designed to be unique relative to one another and the human genome, but were not checked for uniqueness against fungal and protozoa sequences. In an exemplary embodiment of this disclosure, array v5, protozoa were not screened to eliminate non-unique regions relative to other families of protozoa but were screened relative to the other kingdoms, RepBase and SILVA databases, and the human genome. In one exemplary embodiment, protozoa probes can be screened to eliminate non-unique regions relative to other families of protozoa to obtain more specific probes for each genus and species. Uniqueness against sequences in the same kingdom was not required for groups without family classification. Fungal and protozoa sequences were checked against one another as well as against human, viral, and bacterial genomes for uniqueness. From the unique regions, a candidate pool of probes was designed that passed Tₘ, length, GC %, entropy, hairpin, and homodimer filters as for previously described embodiments, relaxing these constraints where necessary to obtain sufficient numbers of probes per target.

[0065] Some sequences did not contain enough unique subsequences from which to design probes, for example, many rRNA sequences are conserved across different families or even kingdoms so are not appropriate for family identification, and probes for these were not designed. Probes conserved within a family or within subclades of a family (e.g. genus, species, etc.), yet still unique relative to other families and kingdoms, were selected as described above for array v2, favoring probes conserved within a family or other grouping (e.g. a virus group without family classification or a protozoa species). That is, Applicants selected probes in decreasing order (i.e. probes detecting more targets in the family were chosen preferentially over those that detected fewer targets in the family) of the number of targets represented by that probe, where a target was considered to be represented if a probe matched it with at least 85% sequence similarity over the total probe length, and a perfectly matching subsequence of at least 29 contiguous bases spanned the middle of the probe. In another embodiment, Applicants selected probes in decreasing order (i.e. probes detecting more targets in the family were chosen preferentially over those that detected fewer targets in the family) of the number of targets represented by that probe, where a target was considered to be represented if a probe matched it 85% homology to the target over the length of the probe and is predicted to detect the target from an empirically driven predictor.

[0066] It should be noted that probes are unique relative to other non-target families and kingdoms, but are conserved to the extent possible within the target group (e.g. family grouping or in the case of protozoa, species group). The conserved, or “discovery” probes are aimed to detect novel unsequenced organisms that may be likely to share the same conserved regions as have been observed in previously sequenced organisms.

[0067] In some embodiments, in eliminating non-unique regions of a target group (e.g. a viral or bacterial family) relative to other target groups or subgroups (e.g. families and kingdoms, or species for target groups such as protozoa) can be performed using for example a suitable software such as vmatch software (see reference 6). For example a software such as vmatch can be used to provide bacterial and viral probes designed to be unique relative to one another and the human genome. In some embodiments, eliminating non-unique regions can comprise checking the sequence against additional groups and/or subgroups of target in accordance with a desired experimental design. In particular, the bacterial and viral probes designed to be unique relative to one another and the human genome can also be checked for uniqueness against additional fungal, bacterial, and archaeal sequences. The number and selection of target groups that can be used to perform eliminating non-unique sequence can vary and be selected in accordance with a desired specificity as will be understood by a skilled person.

[0068] For example, in some embodiments, in addition to eliminating non-unique regions of a target group (e.g. a viral or bacterial family) relative to other families and kingdoms, or species for the case of protozoa using vmatch software (see reference 6) to provide bacterial and viral probes designed to be unique relative to one another and the human genome, the groups were also checked for uniqueness against ribosomal sequences outside of the target domain. For example, probes for bacterial families could have matches to bacterial ribosomal RNA but not to ribosomal RNA sequences from human, fungal, etc.

[0069] In further exemplary embodiments, in addition to eliminating non-unique regions of a target group (e.g. a viral or bacterial family) relative to other families and kingdoms, or species for the case of protozoa using vmatch software (see reference 6) to provide bacterial and viral probes designed to be unique relative to one another and the human genome, the groups were also checked for uniqueness to ribosomal sequences and fungal bacterial, and archaeal sequences as seen in Example 11.

[0070] According to further embodiments of the present disclosure, probes can be chosen by other alternative criteria, for example, by selecting probes chosen from dispersed positions in each target sequence to represent regions in different parts of each genome, which could be useful, for example, in detecting chimeric sequences. Another criteria could be to select probes chosen to be shared across as many sequences as possible, regardless of family specificity, so that probes shared across multiple families and even kingdoms would be preferred. The above criteria are based on the fact that evolutionarily-related organisms contain sufficient nucleotide sequence conservation, in at least some genomic region(s), to be exploited at the desired taxonomic resolution level.

[0071] Several array designs of conserved probes were created with different probe densities, differing in the number of probes per target sequence, as indicated in the Table 2 and Table 2.1. Total probe counts (Table 3 and Table 3.1) indicate those remaining after removing duplicate probes. The design platform in Table 3 includes the company and the number of probes (probe density) on the array, although the list of platforms and companies is not an exclusive list because a skilled person can adapt the array with the probes based on the platform of choice. These are the platforms that that the applicants have worked with experimentally. The NimbleGen® 3×720K array by Roche can test 3 samples at a time with 720,000 probes, as it is essentially the 2.1 M probe density array divided into 3 areas. Other platforms known to a skilled person include arrays produced from Agilent® and Illumina®.

TABLE 2
Array versions 3.1, 3.2, 3.3., and 3.4 - Probe count breakdown

| Number | | |
|---|---|---|
| of | | |
| Probes | Target Type | Probes per sequence (pps) Minimum design goal |
| MDA | | |
| v3.1 | | |
| 893961 | Bacteria Family | 30 pps |
| 263586 | Bacteria Family | 30 pps |
| | Unclassified | |
| 346957 | Viral Family probes | 30 pps |
| 16686 | Viral Family Unclassified | 30 pps |
| 1875 | SFBB (novel sequences | Tiled adjacent, no overlap between probes |
| | from UCSF Blood Systems | |
| | Research Institute) | |
| 157050 | Fungal probes | 5 pps |
| 137939 | Protozoa probes | 5 pps |
| 1833 | Additional Hemorrhagic | |
| | fever virus probes, same as | |
| | MDA v2 | |
| 3438 | random controls (Len and | |
| | GC distribution matching | |
| | census and design3 MDA | |
| | probes) | |
| 1802110 | Total | MDA High Density Probes |
| MDA | | |
| v3.2 | | |
| and | | |
| v3.3 | | |
| 222574 | Bacteria Family | 10 pps for complete genomes and plasmids in every |
| | | family; plus 10 pps for genes and fragments in 248 |
| | | smaller families; plus 1 pps for genes and sequence |
| | | fragments in the 32 families with the most sequence |
| | | data |
| 49016 | Bacteria Family | 5 pps |
| | Unclassified | |
| 137855 | Viral Family probes | 10 pps for all sequences, both complete and |
| | | fragments |
| 5747 | Viral Family Unclassified | 10 pps for all sequences, both complete and |
| | | fragments |
| 1875 | SFBB | Tiled across each sequence with 0 overlap, i.e. each |
| | | base has probe coverage of 1. Unpublished sequence |
| | | targets of novel viruses provided by Eric Delwart's |
| | | group at the Blood Systems Research Institute, |
| | | University of California, San Francisco, CA (abbrev |
| | | SFBB = SF Blood Bank) |
| 157050 | Fungal probes | 5 pps |
| 137939 | Protozoa probes | 5 pps |
| 1833 | Additional Hemorrhagic | |
| | fever virus probes, same as | |
| | MDA v2 | |
| 3469 | random controls (Len and | |
| | GC distribution matching | |
| | census and design1 MDA | |
| | probes) | |
| 713743 | Total | MDA Medium Density Probes |
| v3.4 | | |
| 161451 | Bacteria Family | 10 pps for complete genomes and plasmids in every |
| | | family; plus 10 pps for genes and fragments in 248 |
| | | smaller families; |
| 49016 | Bacteria Family | 5 pps |
| | Unclassified | |
| 137855 | Viral Family probes | 10 pps for all sequences, both complete and fragments |
| 5747 | Viral Family Unclassified | 10 pps for all sequences, both complete and fragments |
| 1875 | SFBB | Tiled across each sequence with 0 overlap, i.e. each |
| | | base has probe coverage of 1 |
| 1833 | Additional Hemorrhagic | |
| | fever virus probes, same as | |
| | MDA v2 | |
| 2562 | random controls | |
| 357532 | Total | MDA Low Density Probes |

TABLE 2.1
Array version 5 (v5) - Probe count breakdown

| | | |
|---|---|---|
| Number of | Target | |
| Probes | Type | Minimum design goal |

360K format

| | | |
|---|---|---|
| 194207 | Viral | 30 from conserved algorithm |
| 126172 | Bacterial | 5 from discriminating algorithm (discriminating |
| 7860 | Archaeal | may be the same as conserved, so after removing |
| 10690 | Protozoa | duplicates there may be only 30 total) |
| 18793 | Fungi | |

135K format

| | | |
|---|---|---|
| 84586 | Viral | 15 from conserved algorithm |
| 35944 | Bacterial | 2 from discriminating algorithm (discriminating |
| 2811 | Archaeal | may be the same as conserved, so after removing |
| 3829 | Protozoa | duplicates there may be only 15 total) |
| 3951 | Fungi | |

TABLE 3
Array versions 3.1, 3.2, 3.3, and 3.4 - Total probe counts

| | | Array Platform (# | | |
|---|---|---|---|---|
| Probe | | indicates Probe | | MDA |
| Counts | | density) | Probes included | Version |
| 2062997 | Total | Nimblegen 2.1M | MDA High Density | 3.1 |
| | | | Probes + Census probes | |
| 937649 | Total | Agilent 1M | MDA Medium Density | 3.2 |
| | | | Probes + Census probes | |
| 713743 | Total | NimbleGen3 × | MDA Medium Density | 3.3 |
| | | 720K | Probes | |
| 357532 | Total | Nimblegen 388K | MDA Low Density | 3.4 |
| | | | Probes | |

TABLE 3.1
Array version 5 (v5) - Total probe counts

| | | Array Platform | | |
|---|---|---|---|---|
| | | (# | | |
| Probe | | indicates Probe | | MDA |
| Counts | | density) | Probes included | Version |
| 134896 | Total | Nimblegen | Subset of MDAv5 from | V5 |
| | | 12 × 135K Or | families in which there | Clinical |
| | | Agilent 4 × | are species known to | chip |
| | | 180K | infect vertebrates; random | |
| | | | negative controls; and | |
| | | | Thermotoga positive | |
| | | | controls | |
| 361863 | Total | Nimblegen 3 × | Probes for all families and | V5 |
| | | 720K Or | family unclassified | 360K |
| | | Nimblegen 1 × | sequences; random | |
| | | 388K Or | negative controls; and | |
| | | Agilent 2 × | Thermotoga positive | |
| | | 400K | controls | |

Probe counts represent numbers after removing duplicate probes, which may occur between census and discovery probes or between family unclassified and family classified viruses (or bacteria).

[0072] “Conserved” probes are probes conserved across multiple sequences from within a family or other (e.g. protozoa species, or family-unclassified viral group) target set, but not conserved across families or kingdoms. Such probes aim to detect known organisms or discovery novel organisms that have not been sequenced which possess some sequence homology to organisms that have been sequenced, particularly in those regions found to be conserved among previously sequenced members of that family or other target group. These conserved probes may identify an organism to the level of genus or species, for example, but may lack the specificity to pin the identification down to strain or isolate.

[0073] In several embodiments, an alternative method of selecting probes was used in order to select the least conserved, that is, the most strain or sequence specific probes. These probes were termed “census probes” or “discriminating probes”. Such census/discriminating probes, aim to fill the goal of providing higher level discrimination/identification of known species and strains, but may fail to detect novel organisms with limited homology to sequenced organisms. Census probes were designed to provide greater discrimination among targets to facilitate forensic resolution to the strain or isolate level. As in the foregoing description and similar to other embodiments, a greedy algorithm was employed, however in this case the probes matching the fewest target sequences were favored. Probes were selected from the pool of probe candidates passing the Tₘ, length, GC %, entropy, hairpin, and homodimer filters when possible.

[0074] As also mentioned above, these constraints were relaxed if necessary to obtain sufficient probes per sequence for targets with adequate unique regions. For every target sequence, probes were selected in ascending order of the number of targets represented by that probe, where a target was considered to be represented if a probe matched it with, for example, at least 85% sequence similarity over the total probe length, and, for example, a perfectly matching subsequence of at least 29 contiguous bases spanned the middle of the probe or if a probe matched it with, for example, at 85% homology to the target over the length of the probe and is predicted to detect the target from an empirically driven predictor. By ascending order, it is meant that probes were sorted in increasing order of the number of targets each represents, and for each target sequence probes were picked from the list in order of those that detected the fewest other target sequences. According to some embodiments, probes were continually selected for a target until at least suitable 10 probes per sequence were identified. According to some embodiments, probes were continually selected until at at least more than 10 probes were identified, such as 15, 30, or 40 probes per target sequence. According to some embodiments, probes were continually selected for a target for a ratio of conservation favoring probes to discriminating probes, for example 30 conservation favoring probes to 5 discriminating probes per target sequence. Due to the large number of Orthomyxoviridae sequences, only 5 probes per sequence were included for this family in some embodiments. In this way, the most sequence-specific probes were selected, accumulating probes in order of sequence-specificity until the desired number of probes per target was obtained.

[0075] Census probes were designed for all the viral and bacterial complete genomes, segments, and plasmids, as indicated in Table 4. Discriminating probes used in one embodiment of this disclosure (v5) was designed for all viral, bacterial, fungal, archaeal, and protozoan complete genomes, chromosomes, segments, and plasmids are included in the counts indiated in Table 2.1. Viral sequences were not clustered using cd-hit as in the foregoing description of conserved probes, since it was desired that the census probes discriminate every isolate, if possible, even if those isolates had more than 98% identity. For v3, census probes were also designed for sequence fragments for those bacterial families with less available sequence data, although not for the 32 families with the most available sequence data since they were already so well-represented by the probes for the large amount of complete sequences available and the additional probes representing the fragmentary and partial sequences was thought to be unnecessary for the goal of censusing for strain discrimination.

TABLE 4
Census Probe Counts

| | | |
|---|---|---|
| 307086 | Bacteria Family | 10 pps, whole genomes for all |
| | | families, fragments for 248 smaller |
| | | families, but not fragments for 32 |
| | | families with the most sequence |
| | | data |
| 1691 | Bacteria Family | 10 pps |
| | Unclassified | |
| 84597 | Viral Family probes except | 10 pps |
| | Orthomyxoviridae | |
| 9934 | Viral Family Unclassified | 10 pps |
| 15118 | Orthomyxoviridae | 5 pps |
| 418363 | Total | |

[0076] In several embodiments, a multiplex array was designed using the oligonucleotide probes designed according to the method herein disclosed. In particular, the NimbleGen platform supports a 4-plex configuration. This uses a gasket to divide a slide into 4 individual subarrays, enabling the testing of 4 samples at a time on a single slide and lowering the cost per sample. Up to 72,000 probe sequences can be tiled within each subarray.

[0077] To take advantage of this configuration, a modified version v2 of the array according to the present disclosure was built with 70,916 unique probe sequences. Array v2 as described above has 215,270 probe sequences, representing each virus genome or segment by at least 50 probes. In a smaller v2.1 array, each virus genome or segment is represented by 10-20 probes, as indicated in Table 5. The same process was used to downselect from the candidate pool of probes as was described in paragraph 0055, as before favoring probes that were more conserved within the target group and breaking ties by picking the most distant probe in a target genome from other probes that were already selected for that target, building up the total until all viral genomes and segments were represented by the user-specified (10 or 20) number of probes. The same bacterial probes were used as on the array v2, and the probes from the Virochip and human viral response genes were omitted.

TABLE 5
Reduced probe set multiplex array v2.1

| Number of | Probes per | |
|---|---|---|
| probes | sequence | Target Sequences |
| 48893 | 20 | All Viral families except Orthomyxoviridae and |
| | | family unclassified complete viral genomes |
| | | and segments |
| 7777 | 10 | Segments in the Orthopox family |
| 2972 | 10 | Family unclassified viral genomes and complete |
| | | segments |
| 7864 | 15 | Bacterial genomes and plasmids |
| 3410 | — | Random controls with GC % and length |
| | | distribution matched to target probes |
| 70916 | | Total |

[0078] In some embodiments, an oligonucleotide probe for detection of targets in a target group is described, the oligonucleotide probe being in combination with at least four other oligonucleotide probes, wherein: the oligonucleotide probe has a sequence selected from the group consisting of SEQ ID NO 1-133,263; and the target group comprises a group of microorganisms such as the microorganisms exemplified in Example 10. In some embodiments, an oligonucleotide probe for detection of targets in a target group is described, the oligonucleotide probe being in combination with at least four other oligonucleotide probes, wherein: the oligonucleotide probe has a sequence selected from the group consisting of SEQ ID NO 133,264-534,156; and the target group comprises a group of microorganisms such as the microorganisms exemplified in Example 16

[0079] In some embodiments the oligonucleotide probe has a sequence selected from the group consisting of SEQ ID NO's 1-63 and 446-5,722; and the group of microorganisms comprises a bacterial group such as the bacterial group exemplified in Example 10. In some embodiments the oligonucleotide probe has a sequence selected from the group consisting of SEQ ID NO's 141, 124-267, 772 and 491,511-492,337 and 496,379-512,129 and 615,629-650,745; and the group of microorganisms comprises a bacterial group such as the bacterial group exemplified in Example 16.

[0080] In some embodiments the oligonucleotide probe has a sequence selected from the group consisting of SEQ ID NO's 64-445; 5,723-133,263; 362-445; 17545-17929; and 48,275-91,627; and the group of microorganisms comprises a viral group such as the viral group exemplified in Examples 10 and 11. In some embodiments the oligonucleotide probe has a sequence selected from the group consisting of SEQ ID NO's 297,256-491,462 and 492,545-495,658 and 515,887-534,156 and 534,157-615,628; and the group of microorganisms comprises a viral group such as the viral group exemplified in Example 16.

[0081] In some embodiments the oligonucleotide probe has a sequence selected from the group consisting of SEQ ID NO's 362-445, 17,545-17,929 and 48,275-91,627; and the group of microorganisms comprises a flu group such as the flu group exemplified in Examples 10 and 11.

[0082] In some embodiments the oligonucleotide probe has a sequence selected from the group consisting of SEQ ID NO's 286,566-297,255 and 492,437-492,544 and 514, 810-515,886 and 657,361-661,081; and the group of microorganisms comprises a group of species of protozoa such as exemplified in Example 16.

[0083] In some embodiments the oligonucleotide probe has a sequence selected from the group consisting of SEQ ID NO's 133,264-141,123 and 491,463-491,510 and 495,659-496,378 and 650,746-653,508; and the group of microorganisms comprises an archaeal group such as exemplified in Example 16.

[0084] In some embodiments the oligonucleotide probe has a sequence selected from the group consisting of SEQ ID NO's 267, 773-286, 565 and 492,338-492, 436 and 512,130-514,809 and 653,509-657,360; and the group of microorganisms comprises fungal group such as exemplified in Example 16.

[0085] In some embodiments the oligonucleotide probe is capable of detecting at least one species selected from table 10 such as the species exemplified in Example 10 as seen in Examples 10 and 11.

[0086] In some embodiments the oligonucleotide probe is capable of detecting at least one species from a family of species selected from the following families, or closest taxonomically labeled group to family for sequences unclassified at the family level:

### Bacteria:

[0087] Acaryochloris, Acetobacteraceae, Acholeplasmataceae, Acidaminococcaceae, Acidimicrobiaceae, Acidithiobacillaceae, Acidobacteriaceae, Acidothermaceae, Actinomycetaceae, Actinosynnemataceae, Aerococcaceae, Aeromonadaceae, Alcaligenaceae, Alcanivoracaceae, Alicyclobacillaceae, Alteromonadaceae, Alteromonadales, Anaerolinaceae, Anaplasmataceae, Aquificaceae, Arthrospira, Aurantimonadaceae, BD1-7_clade, Bacillaceae, Bacteriovoracaceae, Bacteroidaceae, Bacteroidales, Bartonellaceae, Bdellovibrionaceae, Beijerinckiaceae, Beutenbergiaceae, Bhargavaea, Bifidobacteriaceae, Blattabacteriaceae, Blautia, Brachyspiraceae, Bradyrhizobiaceae, Brevibacteriaceae, Brucellaceae, Burkholderiaceae, Burkholderiales, Caldilineaceae, Caldisericaceae, Caldithrix, Campylobacteraceae, Campylobacterales, Candidatus_Accumulibacter, Candidatus_Amoebophilus, Candidatus_Azobacteroides, Candidatus_Baumannia, Candidatus_Cardinium, Candidatus_Carsonella, Candidatus_Chloracidobacterium, Candidatus_Cloacamonas, Candidatus_Hodgkinia, Candidatus_Koribacter, Candidatus_Midichloria, Candidatus_Odyssella, Candidatus_Pelagibacter, Candidatus_Puniceispirillum, Candidatus_Sulcia, Candidatus_Tremblaya, Cardiobacteriaceae, Carnobacteriaceae, Catenulisporaceae, Caulobacteraceae, Cellulomonadaceae, Chitinophaga, Chlamydiaceae, Chlorobiaceae, Chloroflexaceae, Chromatiaceae, Chroococcales, Chrysiogenaceae, Chthoniobacter, Clostridiaceae, Clostridiales, Clostridiales_Family_XI, Clostridiales_Family_XIII, Clostridiales_Family_XVII, Clostridiales_Family_XVIII, Colwelliaceae, Comamonadaceae, Conexibacteraceae, Congregibacter, Coriobacteriaceae, Corynebacteriaceae, Coxiellaceae, Crocosphaera, Cryomorphaceae, Cyanobium, Cyanothece, Cyclobacteriaceae, Cystobacteraceae, Cytophagaceae, Deferribacteraceae, Dehalococcoides, Dehalogenimonas, Deinococcaceae, Dermabacteraceae, Dermacoccaceae, Dermatophilaceae, Desulfarculaceae, Desulfobacteraceae, Desulfobulbaceae, Desulfohalobiaceae, Desulfomicrobiaceae, Desulfovibrionaceae, Desulfurellaceae, Desulfurobacteriaceae, Desulfuromonadaceae, Dictyoglomaceae, Dietziaceae, Ectothiorhodospiraceae, Elusimicrobiaceae, Endoriftia, Enterobacteriaceae, Enterococcaceae, Entomoplasmataceae, Epulopiscium, Erysipelotrichaceae, Erythrobacteraceae, Eubacteriaceae, Exiguobacterium, Fangia, Ferrimonadaceae, Fibrobacteraceae, Fischerella, Flammeovirgaceae, Flavobacteriaceae, Flavobacteriales, Francisellaceae, Frankiaceae, Fusobacteriaceae, Gallionellaceae, Gemella, Gemmatimonadaceae, Geobacteraceae, Geodermatophilaceae, Gloeobacter, Glycomycetaceae, Gordoniaceae, Hahellaceae, Halanaerobiaceae, Halobacteroidaceae, Halomonadaceae, Haloplasmataceae, Halothiobacillaceae, Helicobacteraceae, Heliobacteriaceae, Herpetosiphonaceae, Holophagaceae, Hydrogenophilaceae, Hydrogenothermaceae, Hyphomicrobiaceae, Hyphomonadaceae, Idiomarinaceae, Ignavibacteriaceae, Intrasporangiaceae, Jonesiaceae, Kineosporiaceae, Kofleriaceae, Ktedobacteraceae, Lachnospiraceae, Lactobacillaceae, Legionellaceae, Lentisphaeraceae, Leptolyngbya, Leptospiraceae, Leptothrix, Leuconostocaceae, Listeriaceae, Lyngbya, Magnetococcus, Marinilabiaceae, Mariprofundaceae, Methylacidiphilaceae, Methylibium, Methylobacteriaceae, Methylococcaceae, Methylocystaceae, Methylophilaceae, Methylophilales, Micavibrio, Microbacteriaceae, Micrococcaceae, Microcoleus, Microcystis, Micromonosporaceae, Mitsuaria, Moraxellaceae, Moritellaceae, Mycobacteriaceae, Mycoplasmataceae, Myxococcaceae, Nakamurellaceae, Nannocystaceae, Natranaerobiaceae, Nautiliaceae, Neisseriaceae, Niabella, Niastella, Nitratifractor, Nitratiruptor, Nitrosomonadaceae, Nitrospiraceae, Nocardiaceae, Nocardioidaceae, Nocardiopsaceae, Nodosilinea, Nostocaceae, OM60_clade, Oceanospirillaceae, Opitutaceae, Oscillatoria, Oscillochloridaceae, Oscillospiraceae, Oxalobacteraceae, Paenibacillaceae, Parachlamydiaceae, Parvularculaceae, Pasteurellaceae, Pasteuriaceae, Patulibacteraceae, Pelobacteraceae, Peptococcaceae, Peptostreptococcaceae, Phycisphaeraceae, Phyllobacteriaceae, Piscirickettsiaceae, Planctomycetaceae, Planococcaceae, Polyangiaceae, Polymorphum, Porphyromonadaceae, Prevotellaceae, Prochlorococcaceae, Promicromonosporaceae, Propionibacteriaceae, Pseudo alteromonadaceae, Pseudoflavonifractor, Pseudomonadaceae, Pseudonocardiaceae, Psychromonadaceae, Puniceicoccaceae, Reinekea, Rhizobiaceae, Rhodobacteraceae, Rhodobacterales, Rhodocyclaceae, Rhodospirillaceae, Rhodospirillales, Rhodothermaceae, Rickettsiaceae, Rickettsiales, Rikenellaceae, Rubrivivax, Rubrobacteraceae, Ruminococcaceae, SAR11_cluster, SAR324_cluster, SAR86_cluster, SAR92_clade, Salinisphaeraceae, Sanguibacteraceae, Saprospiraceae, Segniliparaceae, Shewanellaceae, Simidua, Simkaniaceae, Sinobacteraceae, Solibacteraceae, Sphaerobacteraceae, Sphingobacteriaceae, Sphingomonadaceae, Spirochaetaceae, Spiroplasmataceae, Sporolactobacillaceae, Staphylococcaceae, Streptococcaceae, Streptomycetaceae, Streptosporangiaceae, Succinivibrionaceae, Sulfurovum, Sutterellaceae, Synechococcus, Synechocystis, Synergistaceae, Syntrophaceae, Syntrophobacteraceae, Syntrophomonadaceae, Teredinibacter, Thermaceae, Thermoactinomycetaceae, Thermoanaerobacteraceae, Thermoanaerobacterales_Family_III, Thermoanaerobacterales_Family_IV, Thermobaculum, Thermodesulfobacteriaceae, Thermodesulfobiaceae, Thermomicrobiaceae, Thermomonosporaceae, Thermos ynechococcus, Thermotogaceae, Thermotogales, Thiomonas, Thiotrichaceae, Thiotrichales, Trichodesmium, Tropheryma, Trueperaceae, Tsukamurellaceae, Turicella, Veillonellaceae, Verrucomicrobia_subdivision_{—}3, Verrucomicrobiaceae, Verrucomicrobiales, Vibrionaceae, Vibrionales, Victivallaceae, Waddliaceae, Xanthobacteraceae, Xanthomonadaceae, candidate_division_TM7, environmental_samples, sulfur-oxidizing_symbionts, unclassified_Actinobacteria, unclassified_Alphaproteobacteria, unclassified_Bacteria, unclassified_Bacteroidetes, unclassified_Betaproteobacteria, unclassified_Deltaproteobacteria, unclassified_Flavobacteriia, unclassified_Gammaproteobacteria, unclassified_SAR116_cluster, unclassified_Synergistetes, unclassified_Verrucomicrobia, unclassified_pseudomonads

### Viruses:

[0088] Adenoviridae, Alloherpesviridae, Alphaflexiviridae, Alvernaviridae, Ampullaviridae, Anelloviridae, Arenaviridae, Arteriviridae, Ascoviridae, Asfarviridae, Astroviridae, Bacillariodnavirus, Bacillariornaviridae, Bacillariornavirus, Baculoviridae, Barnaviridae, Begomovirus-associated_DNA_beta-like, Begomovirus-associated_alphasatellites, Benyvirus, Betaflexiviridae, Bicaudaviridae, Birnaviridae, Bornaviridae, Bromoviridae, Bunyaviridae, Caliciviridae, Caudovirales, Caulimoviridae, Chrysoviridae, Cilevirus, Circoviridae, Closteroviridae, Coronaviridae, Corticoviridae, Cystoviridae, Deltavirus, Dicistroviridae, Emaravirus, Endornaviridae, Filoviridae, Flaviviridae, Fuselloviridae, Gammaflexiviridae, Geminiviridae, Globuloviridae, Haloviruses, Hepadnaviridae, Hepeviridae, Herpesvirales, Herpesviridae, Hypoviridae, Idaeovirus, Iflaviridae, Inoviridae, Iridoviridae, Labyrnaviridae, Large_single_stranded_RNA_satellites, Leviviridae, Lipothrixviridae, Luteoviridae, Malacoherpesviridae, Marnaviridae, Marseillevirusviridae, Microviridae, Mimiviridae, Mononegavirales, Myoviridae, Nanoviridae, Narnaviridae, Nidovirales, Nimaviridae, Nodaviridae, Nudivirus, Ophioviridae, Orthomyxoviridae, Ourmiavirus, Papillomaviridae, Paramyxoviridae, Partitiviridae, Parvoviridae, Phycodnaviridae, Picobirnaviridae, Picornavirales, Picornaviridae, Plasmaviridae, Podoviridae, Polemovirus, Polydnaviridae, Polyomaviridae, Potyviridae, Poxyiridae, Reoviridae, Retroviridae, Rhabdoviridae, Roniviridae, Rudiviridae, Salterprovirus, Secoviridae, Single_stranded_DNA_satellites, Single_stranded_RNA_satellites, Siphoviridae, Sobemovirus, Tectiviridae, Tenuivirus, Tetraviridae, Tobacco_necrosis_satellite_virus-like, Togaviridae, Tombusviridae, Totiviridae, Tymovirales, Tymoviridae, Umbravirus, Varicosavirus, Virgaviridae, environmental_samples, unclassified_archaeal_dsDNA_viruses, unclassified_archaeal_viruses, unclassified_bacteriophages, unclassified_dsDNA_phages, unclassified_dsDNA_viruses, unclassified_dsRNA_viruses, unclassified_ssDNA_viruses, unclassified_ssRNA_negative-strand_viruses, unclassified_ssRNA_positive-strand_viruses, unclassified_dsRNA_viruses, unclassified_virophages, unclassified_viruses

### Archaea:

[0089] Acidilobaceae, Aciduliprofundum, Archaeoglobaceae, Candidatus_Haloredivivus, Candidatus_Methanoregula, Candidatus_Methanosphaerula, Cenarchaeaceae, Desulfurococcaceae, Ferroplasmaceae, Fervidicoccaceae, Halobacteriaceae, Korarchaeum, Methanobacteriaceae, Methanocaldococcaceae, Methanocellaceae, Methanococcaceae, Methanocorpusculaceae, Methanomas siliicoccus, Methanomicrobiaceae, Methanopyraceae, Methanoregulaceae, Methanosaetaceae, Methanosarcinaceae, Methanospirillaceae, Methanothermaceae, Nanoarchaeum, Nitrosopumilaceae, Nitrososphaeraceae, Picrophilaceae, Pyrodictiaceae, Sulfolobaceae, Thermococcaceae, Thermofilaceae, Thermoplasmataceae, Thermoproteaceae, environmental_samples, unclassified_Archaea

### Fungi:

[0090] Agaricaceae, Ajellomycetaceae, Arthrodermataceae, Ascosphaeraceae, Auriculariaceae, Blastocladiaceae, Botryosphaeriaceae, Ceratobasidiaceae, Chaetomiaceae, Clavicipitaceae, Coniophoraceae, Cordycipitaceae, Coriolaceae, Corticiaceae, Cryphonectriaceae, Culicosporidae, Dacrymycetaceae, Davidiellaceae, Debaryomycetaceae, Dermateaceae, Dipodascaceae, Dothioraceae, Dubosqiidae, Enterocytozoonidae, Erysiphaceae, Ganodermataceae, Glomeraceae, Glomerellaceae, Gnomoniaceae, Harpochytriaceae, Helotiaceae, Herpotrichiellaceae, Hymenochaetaceae, Hypocreaceae, Lasiosphaeriaceae, Legeriomycetaceae, Leotiomycetes, Leptosphaeriaceae, Magnaporthaceae, Malasseziaceae, Marasmiaceae, Metschnikowiaceae, Microbotryaceae, Microsporidia, Mixiaceae, Monoblepharidaceae, Mortierellaceae, Mucoraceae, Mycosphaerellaceae, Nectriaceae, Nosematidae, Omphalotaceae, Onygenaceae, Ophiostomataceae, Orbiliaceae, Peltigeraceae, Phaeosphaeriaceae, Phaffomycetaceae, Phakopsoraceae, Pichiaceae, Plectosphaerellaceae, Pleistophoridae, Pleosporaceae, Pleurotaceae, Pneumocystidaceae, Polyporaceae, Psathyrellaceae, Pucciniaceae, Punctulariaceae, Rhizophydiaceae, Rhizophydiales, Rhodosporidium, Saccharomycetaceae, Saccharomycetales, Saccharomycodaceae, Schizophyllaceae, Schizosaccharomycetaceae, Sclerotiniaceae, Sebacinaceae, Selaginellaceae, Sordariaceae, Spizellomycetaceae, Stereaceae, Taphrinaceae, Taphrinomycotina, Tilletiaceae, Tremellaceae, Trichocomaceae, Tricholomataceae, Tuberaceae, Unikaryonidae, Ustilaginaceae, Wallemiales, Xylariaceae, mitosporic_Ascomycota, mitosporic_Onygenales, mitosporic_Saccharomycetales, mitosporic_Sporidiobolales, mitosporic_Tremellales, unclassified_Fungi, unclassified_Pleosporales

### Protozoa:

[0091] Amoebozoa, Apusomonadidae, Babesiidae, Blastocystidae, Capsaspora, Codonosigidae, Cryptomonadaceae, Cryptosporidiidae, Dictyosteliidae, Eimeriidae, Gregarimidae, Hemiselmidaceae, Hexamitidae, Lecudimidae, Monodopsidaceae, Ophryoglenina, Oxytrichidae, Parameciidae, Pelagomonadales, Perkinsidae, Peronosporaceae, Plasmodiidae, Pythiaceae, Saccammimidae, Salpingoecidae, Saprolegniaceae, Sarcocystidae, Tetrahymenidae, Theileriidae, Trichomonadidae, Trypanosomatidae

[0092] In some embodiments, the oligonucleotide probes herein described can be provided as a part of systems to perform any assay, including any of the assays described herein. The systems can be provided in the form of arrays or kits of parts. An array, sometimes referred to as a “microarray”, can include any one, two or three dimensional arrangement of addressable regions bearing a particular molecule associated to that region. Usually, the characteristic feature size is micrometers.

[0093] In some embodiments, the system can comprise at least two oligonucleotide probes selected for detection of one or more target groups. In those embodiments, the detection can be performed by at least two oligonucleotide probes in combination with other probes, and in particular three or more oligonucleotide probes herein described.

[0094] In some embodiments, the system can comprise five or more oligonucleotide probes herein described. In particular, in some embodiments, a system for detection of at least one target in a target group can comprise at least five oligonucleotide probes, having sequence selected from the group consisting of SEQ ID NO's 1-133,263, and wherein at least one target is a microorganism. In some embodiments, the system can comprise five or more oligonucleotide probes herein described. In particular, in some embodiments, a system for detection of at least one target in a target group can comprise at least five oligonucleotide probes, having sequence selected from the group consisting of SEQ ID NO's 133,264-534,156, and wherein at least one target is a microorganism. In some of those embodiments the target groups can comprise the target group exemplified in Example 10 and Example 11 and Example 16.

[0095] In other embodiments, oligonucleotide probes can be selected to detect more than one target and in particular more than one target within a target group. For example, targets for detection can comprise two or more selected from a flu virus, a non-flu virus, a virus, and a bacterium, a fungus, a species of protozoa, and an archaeon.

[0096] In some embodiments, oligonucleotide probes can be arranged in an array for detection of targets in a target group. In some of those embodiments, the array can comprise a plurality of oligonucleotide probes wherein: at least one of the oligonucleotide probes comprises a sequence selected from the group consisting of SEQ ID NO. 1-133,263. In some of those embodiments, the detection can occur in combination with at least four other oligonucleotide probes selected from the group consisting of SEQ ID NO's 1-133,263, and wherein said target is a microorganism. In some embodiments, oligonucleotide probes can be arranged in an array for detection of targets in a target group. In some of those embodiments, the array can comprise a plurality of oligonucleotide probes wherein: at least one of the oligonucleotide probes comprises a sequence selected from the group consisting of SEQ ID NO. 133,264-534,156. In some of those embodiments, the detection can occur in combination with at least four other oligonucleotide probes selected from the group consisting of SEQ ID NO's 133,264-534,156, and wherein said target is a microorganism.

[0097] Further embodiments of the present disclosure also provide: 1) methods of classifying an oligonucleotide probe sequence as detected or undetected in a biological sample; 2) methods of predicting the conditional probability of detecting a probe sequence, given the presence of a target of known nucleotide sequence in a biological sample; 3) methods of predicting likelihood of presence of a target of known nucleotide sequence in a biological sample; 4) selection methods for selecting, from a list of candidate target sequences of known nucleotide sequence, a target sequence most likely to be present in a biological sample; and 5) selection methods for selecting, from a list of candidates, a set of targets whose presence in a biological sample would collectively provide the best explanation for observed detected and undetected probes on an array.

[0098] In several embodiments, microarrays are constructed by synthesizing oligonucleotide molecules (denoted henceforth as “oligos”) with the required probe sequences directly upon a solid glass or silica substrate. In other embodiments, oligos are synthesized in a separate process, and then adhered to the substrate. Regardless of the technology used to produce the oligos, an array is partitioned into regions called “features”, each of which is assigned a single known probe sequence. Array construction results in the placement of a large number (on the order of 10⁵ to 10⁷) of identical oligos, all having the assigned probe sequence, within each feature.

[0099] In some embodiments a detection microarray for targeting clinically relevant pathogens in a cost effective format is described. The microarray can comprise any number of probes. For example, a microarray can comprise a few probes (i.e. 4 or more), thousands, tens of thousands, hundreds of thousands, or more than hundreds of thousands of probes. In some embodiments the array can comprise probes from families known to infect vertebrates. A skilled person will be able to identify a desired number of probes comprised in an array based on the number and type of target groups to be detected, the features of the oligonucleotide probes and corresponding targets to be included in the array and additional parameters identifiable by a skilled person upon reading of the present disclosure.

[0100] In particular, in an exemplary embodiment, complete viral and bacterial genome/segment/plasmid sequences can be gathered and organized by family and regions specific to a family can be identified. From these regions, candidate probes can be identified by base length (50-65 bases), Tm, entropy, GC %, and other thermodynamic and sequence features and desired parameter ranges can be relaxed as needed and candidate probes can be clustered and ranked and uniqueness can be calculated according embodiments herein described. In some embodiments, the base length of candidate probes is shorter than 50 bases, for example 40-49 bases, if no acceptable probes larger than 50 could be found for a target or to adapt the parameters of desired array platforms, such as a maximum probe length of 60 bases for some Agilent® arrays.

[0101] In several embodiments, negative control probes having randomly generated sequences are incorporated into the array design. The length and percent GC content distributions of the negative control probe sequences are chosen for each array design to be similar to that of the microbial target probe sequences. Between 1,000 and 10,000 negative control probes are included in each array design. The presence of negative control probes allows estimation of the expected distribution of intensities for probes that have no significant similarity to any target DNA sequence in a biological sample. The method disclosed below for classification of probe sequences as detected or undetected requires the presence of negative control probes. In some embodiments, positive controls are incorporated into the array design. Positive controls can be designed to bind to genomic DNA from an organism, which may be added to a sample for use as an internal quantitation standard. Positive controls can include perfect match probes and probes with a desired range of mismatches, such as 1-9 targeted mismatches. In one exemplary embodiment of this disclosure (v5), probes designed to bind to DNA of Thermotoga maritime were generated and synthesized.

[0102] In all embodiments, probe intensity data is generated for each biological sample to be analyzed, according to one of several protocols in common use in the field of this invention. In a typical embodiment, fluorescently labeled target DNA synthesized from templates extracted from a biological sample is incubated for several hours on an array comprising a plurality of probes, to allow for hybridization of target DNA to any probes of the array having sequences similar to those of the target DNA. This procedure produces a variable number of target-probe hybridization products for each probe sequence. Following the hybridization step, the array is washed to remove unhybridized target DNA. A standard microarray scanner is then used to measure an aggregate fluorescence intensity value for each feature on the array. The intensity measured for each feature increases according to the number of target-probe hybridization products involving probes of the sequence assigned to that feature.

[0103] In several embodiments of the present disclosure, a method for classifying a target oligonucleotide probe sequence as detected or undetected in a biological sample is provided. The method is as follows: a minimum threshold intensity is determined for each array, as some percentile of the observed distribution of intensities for the negative control probes. Typically the 99^{th} percentile is used, but other values may be selected at the experimenter's discretion. The target probe sequence is then classified as detected if its associated feature intensity exceeds the threshold intensity, and as undetected if not. In several embodiments, this classification determines the value of a binary response variable Yᵢ used in further analysis: 1 if probe i is detected and 0 if not.

[0104] Further embodiments provide methods of estimating the conditional detection probability for a particular probe sequence, given the presence of some target of known nucleotide sequence in a biological sample analyzed by a microarray. These methods are based on statistical models for the probability of classifying a probe sequence as detected in a sample, as a function of the nucleotide sequences of the probe itself and of the “most similar” portion of the target sequence. The “most similar” portion of the target sequence is identified by performing a BLAST search, using the probe and target as query and subject sequences respectively, and choosing the target subsequence (if any) having the highest-scoring gap-free alignment. If BLAST finds no alignments exceeding some minimum score threshold, the probe is considered to have no significant similarity to the target sequence; in this case the detection probability is estimated as a function of the probe sequence only.

[0105] Estimates of detection probability require choosing a statistical model, and performing a calibration step once for each microarray platform to estimate the parameters of the model. In one embodiment, the model contains four predictor covariates, three of which are determined from the highest-scoring BLAST alignment of probe i to target j. These include the BLAST bit score Bᵢⱼ, and the position Qᵢⱼ of the start of the alignment within the probe sequence. Both of these variables are obtained directly from the BLAST results. The third covariate is an approximate predicted melting temperature Tᵢⱼ, computed from the aligned nucleotides according to the formula Tᵢⱼ=69.4° C.+(41.0 N_{GC}−600.0)/L, where L is the length of the alignment and N_{GC} is the number of G and C nucleotides that are aligned to their complements. The fourth covariate, Sᵢ, depends on the probe sequence only. Sᵢ is the entropy of the trimer frequency table of the probe sequence, which serves as a measure of sequence complexity. It is obtained from the numbers of occurrences n_{AAA}, n_{AAC}, . . . , n_{TTT} of the 64 possible trimers (3-nucleotide subsequences) within the probe sequence, divided by the total number of trimers, yielding the corresponding frequencies f_{AAA}, . . . , f_{TTT}. The entropy is then given by:

$${S}_{i} = {\sum }_{t : {f}_{t} \neq 0} - {f}_{t} {log}_{2} {f}_{t} \qquad ( 1 )$$

Where, the sum is over the trimers t with fₜ≠0. Applicants have found empirically that the trimer entropy is a good predictor of non-specific hybridization; probes with low entropy (and thus low sequence complexity) resulting from direct or tandem repeats are more likely to give strong detection signals regardless of the target sequence.

[0106] A statistical model that estimates the detection probability for probe i, conditional on the presence of target j, is then described in terms of these four covariates by the following equations:

logit(P(Yᵢ=1|target j is present))=a₀+a₁Sᵢ+a₂Tᵢⱼ+a₃Bᵢⱼ+a₄Qᵢⱼ (2)

logit(P(Yᵢ=1|target j is absent))=a₀+a₁Sᵢ (3)

In equations (2) and (3), logit(x)=log [x/(1−x)] is the log-odds transformation function, and Yᵢ is the binary response variable indicating whether probe i was classified as detected. The parameters a₀ through a₄ are determined at calibration time, by performing several array hybridizations to individual targets with known genome sequences, measuring the probe intensities, classifying probes as detected or undetected, computing the covariates for all probes, and then fitting the model parameters by standard logistic regression methods. Given a set of fitted parameters and covariates computed for probe i and target j, the conditional detection probability is described by the following equation:

$$P ( {Y}_{i} = 1 \vert {X}_{j} ) = \frac{1}{1 + {e}^{- ( {a}_{0} + {a}_{1} {S}_{i} + {X}_{j} ( {a}_{2} {T}_{ij} + {a}_{3} {B}_{ij} + {a}_{3} {Q}_{ij} ) )}} \qquad ( 4 )$$

Where, Xⱼ is an indicator variable, with value 1 if target j is present and 0 if not.

[0107] Another embodiment of the present disclosure provides an alternative method for predicting conditional detection probabilities. This method is based on a logistic model, with two covariates in place of the four used in the previously described method. The two covariates are the trimer entropy Sᵢ described above, and the free energy ΔGᵢⱼ predicted for the highest-scoring probe-target alignment. The free energy is predicted from the aligned probe and target subsequences, using the nearest-neighbor stacking energy model described in reference 27, with an optional position-specific weight factor. The model is described by the equations:

logit(P(Yᵢ=1|target j is present))=b₀+b₁Sᵢ+b₂ΔGᵢⱼ (5)

logit(P(Yᵢ=1|target j is absent))=b₀+b₁Sᵢ (6)

where b₀, b₁ and b₂ are model parameters to be fitted at calibration time, and other variables are as described previously. In all other respects, this method is the same as the previously described method for estimating detection probabilities. The resulting conditional detection probability is described by the equation:

$$P ( {Y}_{i} = 1 \vert {X}_{j} ) = \frac{1}{1 + {e}^{- ( {b}_{0} + {b}_{1} {S}_{i} + {b}_{2} {X}_{j} Δ {G}_{ij} )}} \qquad ( 7 )$$

[0108] Further embodiments provide methods of predicting the likelihood of presence of a particular target, of known nucleotide sequence, in a biological sample. In several embodiments, target DNA from the biological sample is hybridized to an array, fluorescence intensities are measured for each probe sequence, and probe sequences are classified as detected or undetected using one of the methods described above. Let Yᵢ be the binary response variable indicating whether probe i was classified as detected (1) or undetected (O). The probe responses are used to compute a likelihood function, under the assumption that the responses for different probes are conditionally independent of one another, given the presence or absence of specified target j. If Y represents the vector of probe response variables Yᵢ, the likelihood of target j being present in the sample (Xⱼ=1) or absent (Xⱼ=0) given the observed response is given by the equation:

$$L ( {X}_{j } ; Y ) = {\prod }_{i : {Y}_{i} = 1} P ( {Y}_{i} = 1 \vert {X}_{j} ) {\prod }_{i : {Y}_{i} = 0} P ( {Y}_{i} = 0 \vert {X}_{j} ) \qquad ( 8 )$$

where P(Yᵢ=1|Xⱼ) is given by equation (4) or (7), and P(Yᵢ=0|Xⱼ)=1−P(Yᵢ=1|Xⱼ).

[0109] In several embodiments, a single target selection method is provided for choosing, from a list of candidate targets of known nucleotide sequence, the target that is most likely to be present in a biological sample. After hybridizing the sample to an array, scanning the array and classifying probe sequences as detected or undetected, the relative likelihoods of target presence versus absence are computed for each candidate target by evaluating the aggregate log-odds score:

$$log \frac{L ( {X}_{j} = 1 ; Y )}{L ( {X}_{j} = 0 ; Y )} = {\sum }_{i : {Y}_{i} = 1} log \frac{P ( {Y}_{i} = 1 \vert {X}_{j} = 1 )}{P ( {Y}_{i} = 1 \vert {X}_{j} = 0 )} + {\sum }_{i : {Y}_{i} = 0} log \frac{P ( {Y}_{i} = 0 \vert {X}_{j} = 1 )}{P ( {Y}_{i} = 0 \vert {X}_{j} = 0 )} \qquad ( 9 )$$

To choose the most likely target, an aggregate log-odds score is computed for each candidate target, and the target with the maximum score is selected.

[0110] In several embodiments of the present disclosure, a multiple target selection method is provided to select a combination of targets whose presence in a biological sample would best explain the observed pattern of probe responses on an array hybridized to the sample. The selection method employs a greedy algorithm to find a local maximum for the log-likelihood. The algorithm is initialized by placing all candidate targets in an “unselected” list U and an empty “selected” list S. The following steps are then iterated until the algorithm terminates:
[0111] 1. Compute the conditional log-odds score for each target jεU:

$${\sum }_{i : {Y}_{i} = 1} log \frac{P ( {Y}_{i} = 1 \vert {X}_{j} = 1 , {X}_{k} = 1 ∀ k ∈ S )}{P ( {Y}_{i} = 1 \vert {X}_{j} = 0 , {X}_{k} = 1 ∀ k ∈ S )} + {\sum }_{i : {Y}_{i} = 0} log \frac{P ( {Y}_{i} = 0 \vert {X}_{j} = 1 , {X}_{k} = 1 ∀ k ∈ S )}{P ( {Y}_{i} = 0 \vert {X}_{j} = 0 , {X}_{k} = 1 ∀ k ∈ S )} \qquad ( 10 )$$

When this step is performed for the first time, the selected list S will be empty, so the computed log-odds score for each target will not be conditioned on the presence of any other targets. Store this “initial” log-odds score for each target, for later display.
[0112] 2. Choose the target that yields the largest value of the score, remove it from list U, and add it to the selected list S. Store the value of this “final” score for each selected target.
[0113] 3. Repeat steps 1 and 2 until there is no target in U that yields a positive value for the conditional log-odds score.
   To compute the conditional probabilities in equation (10), the method uses the approximation:

$$P ( {Y}_{i} = 0 \vert X ) \approx {\prod }_{j : {X}_{j} = 1} P ( {Y}_{i} = 0 \vert {X}_{j} = 1 ) \qquad ( 11 )$$

Where, X represents a vector of binary Xₖ values. In other words, it assumes that the probability of obtaining an undetected response for a probe depends only on the set of targets that are assumed to be present, and that it can be estimated by multiplying the probabilities conditioned on the presence of the individual targets. The conditional detection probabilities are given by:

$$P ( {Y}_{i} = 1 \vert X ) \approx 1 - {\prod }_{j : {X}_{j} = 1} P ( {Y}_{i} = 0 \vert {X}_{j} = 1 ) \qquad ( 12 )$$

[0114] The output of the multiple target selection method is an ordered series of target genomes predicted to be present, together with of the initial and final scores for each selected target. The initial score is the log-odds from the first iteration; that is, the log-likelihood of the target being present assuming that no other targets are present. The final score for the n^{th} selected target is the log-odds conditional on the presence of the first through the (n−1)^{st} selected targets.

[0115] Conditioning on the previously selected targets has the effect of subtracting the contributions from the associated probes from the log-likelihood. Therefore, the multiple target selection algorithm can be visualized as an iterative process that first chooses the target that explains the greatest number of probes with positive detection signals, while minimizing the number of undetected probes that would also be expected to be present; then chooses the target that explains the largest number of probes not already explained by the first target, and so on until as many detected probes as possible are explained.

[0116] An example of the analysis results is shown in FIG. 2. The right-hand column of bar graphs shows the initial and final log-odds scores for each target genome listed at right. The initial log-odds is the larger of the two scores; thus the lighter and darker-shaded portions represent the initial and final scores respectively. That is, the darker shade on the left part of the bar shows the contribution from a target that cannot be explained by another, more likely target above it, while the lighter shaded part on the right of the bar illustrates that some very similar targets share a number of probes, so that multiple targets may be consistent with the hybridization signals. Targets are grouped by taxonomic family, indicated by the bracket to the side; they are listed within families in decreasing order of final log-odds scores.

[0117] The left-hand column of bar graphs shows the expectation (mean) values of the numbers of probes expected to be present given the presence of the corresponding target genome. The larger “expected” score is obtained by summing the conditional detection probabilities for all probes; the smaller “detected” score is derived by limiting this sum to probes that were actually detected. Because probes often cross-hybridize to multiple related genome sequences, the numbers of “expected” and “detected” probes often greatly exceed the number of probes that were actually designed for a given target organism. The probe count bar graphs are designed to provide some additional guidance for interpreting the prediction results.

[0118] In some embodiments, detection of a target can be performed by contacting a sample with any of the oligonucleotide probes, systems and array herein described for a time and under condition to allow formation of oligonucleotide probes-target sequences complex in the sample, In particular, the oligonucleotide probes-target sequence complex can provide a detectable signal. In some embodiments, the method can further comprise predicting a target sequence most likely to be present in the sample based on the detectable signal from the oligonucleotide probe-target sequence complex.

[0119] The wording “signal” or “labeling signal” as used herein indicates the signal emitted from a label that allows detection of the label, including but not limited to radioactivity, fluorescence, chemiluminescence, production of a compound in outcome of an enzymatic reaction and the like. The terms “label” and “labeled molecule” as used herein as a component of a complex or molecule referring to a molecule capable of detection, including but not limited to radioactive isotopes, fluorophores, chemiluminescent dyes, chromophores, enzymes, enzymes substrates, enzyme cofactors, enzyme inhibitors, dyes, metal ions, nanoparticles, metal sols, ligands (such as biotin, avidin, streptavidin or haptens) and the like. The term “fluorophore” refers to a substance or a portion thereof which is capable of exhibiting fluorescence in a detectable image.

[0120] In some embodiments, the target can be a microorganism, the sample can be contacted with at least one of the oligonucleotide probes having a sequence selected from the group consisting of SEQ ID NO. 1-133,263; in combination with at least four other oligonucleotide probes selected from SEQ ID NO's 1-133,263, with oligonucleotide probes presenting a label. In some embodiments, the target can be a microorganism, the sample can be contacted with at least one of the oligonucleotide probes having a sequence selected from the group consisting of SEQ ID NO. 133,264-534,156; in combination with at least four other oligonucleotide probes selected from SEQ ID NO's 133,264-534,156, with oligonucleotide probes presenting a label. In some embodiments, the target can be a microorganism, the sample can be contacted with at least one of the oligonucleotide probes having a sequence selected from the group consisting of SEQ ID NO. 491,463-495,658 and 534,157-661,081; in combination with at least four other oligonucleotide probes selected from SEQ ID NO's 491,463-495,658 and 534,157-661,081, with oligonucleotide probes presenting a label. In some of those embodiments, the target can be detected by contacting the sample with the array and predicting a target sequence most likely to be present in the sample based on one or more corresponding labeling signals according to methods herein described or identifiable by a skilled person upon reading of the present disclosure. In some of those embodiments, the sample can be a biological sample.

[0121] In some embodiments, the contacting of the oligonucleotide probes, systems and/or arrays herein described can be performed by hybridizing the sample to the oligonucleotide probes, systems and/or array.

[0122] In particular, in some embodiments hybridizing can be performed by incubating fluorescently labeled target DNA synthesized from templates extracted from a biological sample on an array comprising a plurality of probes, to allow for hybridization of target DNA to any probes of the array having sequences similar to those of the target DNA, producing a variable number of target-probe hybridization products for each probe sequence; scanning the array to measure an aggregate fluorescence intensity value.

[0123] In some of those embodiments, the intensity can be measured for each feature increases according to the number of target-probe hybridization products involving probes of the sequence assigned to that feature.

[0124] In some embodiments the predicting of a target sequence most likely to be present in the biological sample can comprise: classifying an oligonucleotide probe sequence as detected or undetected in a biological sample; predicting likelihood of presence of a target of known nucleotide sequence in a biological sample; and selecting, from a list of candidate target sequences of known nucleotide sequence, a target sequence most likely to be present in a biological sample.

[0125] In summary, in accordance with embodiments of the present disclosure, probes were selected to avoid sequences with high levels of similarity to human, bacterial and viral sequences not in the target family; low levels of sequence similarity across families were allowed selectively, on the basis of a statistical model predicting probe intensity from the similarity score, approximate melting temperature and sequence complexity. Favoring more conserved probes within a family enabled us to minimize the total number of probes needed to cover all existing genomes with a high probe density per target, enhancing the capability to identify the species of known organisms and to detect unsequenced or emerging organisms. Strain or subtype identification was not a goal of the MDA discovery probe design, although the ability of MDA v1, v2, v3.3, and v3.4 to discriminate between strains of certain organisms was an unexpected result of combining signals from multiple probes. The goal of the census probes on MDA v3.1 and v3.2 was to discriminate between strains or subtypes, so the combination of signals from both the conserved “discovery” probes and the census probes should reinforce and improve strain discrimination.

[0126] In accordance with some embodiments, probes were sufficiently long (50-66 bases) to tolerate some sequence variation (see reference 8), although slightly shorter than the 70-mer probes used on previous arrays (see references 4, 14 and 23) because of the additional synthesis cycles, and therefore cost, of making 70-mers on the NimbleGen platform. Long probes improve hybridization sensitivity and efficiency, alleviate sequence-dependent variation in hybridization, and improve the capability to detect unsequenced microbes. Probes were selected from whole genomes, without regard to gene locations or identities, letting the sequences themselves determine the best signature regions and preclude bias by pre-selection of genes. Applicants designed a version 1 (v1) with 36,000 distinct probe sequences for viruses (at least 15 probes per viral sequence), and then designed a version 2 (v2) that included 170,000 probe sequences for viruses (at least 50 probes/sequence) and 8,000 probe sequences for bacteria (at least 15 probes per sequence), and included the ViroChip v3 (see reference 23) probes for comparison. Applicants designed a version 5 (v5) to contain two sets of probes, a 360K set which included at least 30 probes per target sequence selected from conservation favoring probes, at least 5 probes per target sequence selected from discriminating probes, and Primux k-mer probes, and a 135K set, which included at least 15 conserved probes per target sequence and at least 2 discriminating probes per sequence. Applicates designed a 360K set to represent 5,434 microbial species, 3,111 viral species, 1,967 bacterial species, 126 archaeal species, 94 protozoa species, and 136 fungi species (SEQ ID NOs 133,264-491462 and 495,659-534,156). Applicants designed a 135K set to represent 3,521 microbial species represented with 1,856 viral species, 1,398 bacterial species, 125 archaeal species, 94 protozoa species, and 48 fungi species (SEQ ID NOs 491,463-495,658 and from 534,157-661,081). Arrays were built at NimbleGen using a NimbleGen Array Synthesizer (see reference 19). Applicants hybridized the arrays to a number of samples, including clinical fecal, sputum, and serum samples. In blinded clinical samples containing multiple viruses and bacteria and in known (spiked) mixtures of DNA and RNA viruses, the MDA has been able to detect viruses and bacteria as confirmed by PCR or culture.

[0127] In addition, a statistical method has been described that is based on likelihood maximization within a Bayesian network model. It incorporates a probabilistic model of DNA hybridization based on probe-target similarity scores and probe sequence complexity, with parameters fitted to experimental data from pure viral and bacterial samples with sequenced genomes. To accurately determine the organism(s) responsible for a given array result, the pattern of both present and absent probe signals is taken into account (see reference 8).

[0128] In some embodiments, the microarray and statistical analysis method described herein can detect viral and bacterial sequences from single DNA and RNA viruses and mixtures thereof, various clinical samples, and blinded cell culture samples. In particular, in some embodiments, results from clinical samples can be validated, for example by using PCR.

[0129] For example, the MDA v.2 as described herein can be applied to problems in target detection, with particular reference to viral and bacterial detection, from pure or complex environmental or clinical samples and can be particularly useful to widen a scope of search for microbial identification when specific PCR fails, as well as to identify co-infecting organisms. In some embodiments, the ability of the microarray to detect viral and bacterial sequences and to detect various clinical samples can be functional to probe density and phylogenetic representation of viral and bacterial sequenced genomes. In particular, in some embodiments, arrays can be provided that allow detection of viral and bacterial sequences with a higher and larger phylogenetic representation in comparison with certain array designs identifiable by a skilled person.

[0130] In some embodiments a method to obtain a plurality of oligonucleotide probes for detection of targets of a target group is provided, the method comprising: identifying group-specific candidate probes from an initial genomic collection by eliminating from the initial collection regions with matches to non-group targets above a match threshold and by selecting regions satisfying probe characteristics, said probe characteristics including at least one criterion selected from length, Tₘ, GC %, maximum homopolymer length, homodimer free energy prediction, hairpin free energy prediction, probe-target free energy prediction, and minimum trimer frequency entropy condition; ranking the group-specific candidate probes in decreasing order of number of targets of the target group represented by each group-specific candidate probe; and selecting probes from the ranked group-specific candidate probes.

[0131] In some embodiments, a method as described in paragraph 00121 is provided, wherein selecting probes from the ranked group-specific candidate probes comprises, for each target, selecting the most conserved or least conserved probes representing that target until each target genome is represented by a predetermined number of probes.

[0132] In some embodiments, a method as described in paragraph 00121 is provided, and the method further comprises clustering together candidate probes sharing at least 85% identity and selecting the longest sequence from each cluster as a target for probe design.

[0133] In some embodiments, a method as described in paragraph 00121 is provided, wherein at least one criterion is relaxed to obtain at least a minimum number of candidate probes for each target.

[0134] In some embodiments, a method as described in paragraph 00121 is provided, wherein a target is represented if a candidate probe matches with at least 85% sequence similarity over the total candidate probe length and a perfectly matching subsequence of at least 29 contiguous bases spans the middle of the probe.

[0135] In some embodiments, a method as described in paragraph 00121 is provided, wherein the group is selected between a viral family, a bacterial family, a viral sequence group classified under a taxonomic node other than family, and a bacterial sequence group classified under a taxonomic node other than family.

[0136] In some embodiments, a method as described in paragraph 00121 and 00120 is provided, wherein the group is a viral family and the probes are at least 50 per target.

[0137] In some embodiments, a method as described in paragraphs 00121 and 00120 is provided, wherein the group is a bacterial family and the probes are at least 15 per target.

[0138] In some embodiments, a method as described in paragraph 00121 is provided, wherein the probes are at least 50 bases long.

[0139] In some embodiments, a method as described in paragraphs 00121 and 00120 is provided, wherein group-specific regions are identified for probe selection that do not have a match of an oligonucleotide of x or more nucleotides long with sequences not part of the group, x being an integer.

[0140] In some embodiments, a method as described in paragraphs 00121 and 00120 and 00116 is provided, where the group is a viral family or a bacterial family and where x=17 nucleotides for a viral family and x=25 nucleotides for a bacterial family.

[0141] In some embodiments a plurality of oligonucleotide probes for detection of targets of a target group is described, the plurality obtained the method described in paragraphs 00121.

[0142] In some embodiments an array comprising the plurality of oligonucleotide probes as described in paragraph 00132 is described.

[0143] In some embodiments an array as described in paragraph 00133 is described, wherein the number of probes of the array differs according to the target.

[0144] In some embodiments, a method of classifying an oligonucleotide probe sequence as detected or undetected in a biological sample is provided, the method comprising: incubating fluorescently labeled target DNA synthesized from templates extracted from a biological sample on an array comprising a plurality of probes, to allow for hybridization of target DNA to any probes of the array having sequences similar to those of the target DNA, producing a variable number of target-probe hybridization products for each probe sequence; scanning the array to measure an aggregate fluorescence intensity value for each feature comprising a set of target-probe hybridization products having probes of the same sequence; calculating the distribution of feature intensity values for target-probe hybridization products by way of negative control probes with randomly generated sequences, and setting a minimum detection threshold for the array; and comparing the observed feature intensity value for each probe sequence with the minimum detection threshold determined for the array, to classify each probe sequence on the array as either detected or undetected in the biological sample.

[0145] In some embodiments, a method of predicting likelihood of presence of a target of known nucleotide sequence in a biological sample is provided, the method comprising: applying the method as described in paragraph 127 to classify probe sequences on an array as detected or undetected in the sample; estimating, for each detected probe sequence: i) a probability of observing the probe sequence as detected conditioned on presence of the target of known nucleotide sequence; ii) a probability of observing the probe sequence as detected conditioned on absence of the target of known nucleotide sequence; and iii) the detection log-odds, defined as the ratio of i) and ii); estimating, for each undetected probe sequence: iv) a probability of observing the probe sequence as undetected conditioned on presence of the target of known nucleotide sequence; v) a probability of observing the probe sequence as undetected conditioned on absence of the target of known nucleotide sequence; and vi) the nondetection log-odds, defined as the ratio of iv) and v); summing detection and nondetection log-odds values over the probes on the array to form an aggregate log-odds score for presence versus absence of the target of known nucleotide sequence, conditional on the observed detected and undetected probes; and based on the aggregate log-odds score, providing a prediction of the presence of at least one said target of known nucleotide sequence in the biological sample.

[0146] In some embodiments, a selection method for selecting, from a list of candidate target sequences of known nucleotide sequence, a target sequence most likely to be present in a biological sample is provided, the selection method comprising: applying the method as described in paragraph 00136 to each of the candidate target sequences, and choosing the target sequence that yields the maximum aggregate log-odds score.

[0147] In some embodiments, a method as described in paragraph 00136 is provided, wherein i) is estimated by performing a BLAST alignment of the probe sequence and target of known nucleotide sequence, and evaluating a logistic probability density function with BLAST bit score, predicted melting temperature, and position of an aligned portion of the target of known nucleotide sequence within the probe sequence as covariates, and coefficients fitted to data from arrays hybridized to targets of known nucleotide sequence.

[0148] In some embodiments a method as described in paragraph 00136 is provided, wherein i) is estimated by performing a BLAST alignment of the probe sequence and target of known nucleotide sequence, and evaluating a logistic probability density function with predicted free energy of the probe-target hybridization as covariate, and coefficients fitted to data from arrays hybridized to targets of known nucleotide sequence.

[0149] In some embodiments a method as described in paragraph 00136 is provided, wherein ii) is estimated as a logistic function of probe sequence entropy, computed from a frequency distribution of nucleotide trimers within the probe sequence.

[0150] In some embodiments a selection method for selecting, from a list of candidates, a set of targets whose presence in a biological sample would collectively provide the best explanation for observed detected and undetected probes on an array is described, the method comprising: a) applying the method as described in paragraph 00137 wherein to identify the target most likely to be present in the sample; b) removing the identified target from the list of candidates and adding the identified target to the “selected” list; c) repeating the method as described in paragraph 00137 for the remaining candidates, wherein: c1) estimation of i), ii) and iii) is replaced with estimation of: i′) a probability of observing the probe sequence as detected conditioned on presence of the candidate target and presence of targets in the list of selected targets; ii′) a probability of observing the probe sequence as detected conditioned on absence of the candidate target and presence of targets in the list of selected targets; and iii′) the detection log-odds, defined as the ratio of i′) and ii′); c2) estimation of iv), v) and vi) is replaced with estimation of: iv′) a probability of observing the probe sequence as undetected conditioned on presence of the candidate target and presence of targets in the list of selected targets; v′) a probability of observing the probe sequence as undetected conditioned on absence of the candidate target and presence of the targets in the list of selected targets; and vi′) the nondetection log-odds, defined as the ratio of iv′) and v′); c3) the detection and nondetection log-odds values are summed over the probes on the array to form a conditional log-odds score for presence versus absence of the candidate target, conditioned on the observed detected and undetected probes and on the presence of the targets in the list of selected targets; d) choosing the candidate target yielding the maximum conditional log-odds score, removing it from the candidate list, and adding it to the list of selected targets; and e) repeating c) and d) until the conditional log-odds scores for all remaining candidate targets are less than zero. In some embodiments of the present disclosure, a kit of parts is described. The kit of parts can comprise components suitable for preparing an array, including but not limited to a solid glass and/or silica substrate on which oligonucleotide probes can be arranged, primers, and/or reagents suitable for synthesizing oligonucleotide probes according to the present disclosure.

[0151] In some embodiments, the kit further comprises a set of instructions, the instructions providing a method to prepare an array according to the present disclosure. In particular, the instructions can provide a method to synthesize oligonucleotide probes for detecting targets in a target group and/or a species in a sample; a method to provide an array comprising the oligonucleotide probes; and a method to use the array for detection of a target, given a particular target group.

[0152] In a kit of parts, the oligonucleotide probes and other reagents to perform the assay can be comprised in the kit independently. The oligonucleotide probes can be included in one or more compositions, and each oligonucleotide probe can be in a composition together with a suitable vehicle.

[0153] Additional components can include labeled molecules and in particular, labeled polynucleotides, labeled antibodies, labels, microfluidic chip, reference standards, and additional components identifiable by a skilled person upon reading of the present disclosure.

[0154] In some embodiments, detection of a oligonucleotide probes can be carried either via fluorescent based readouts, in which the labeled antibody is labeled with fluorophore, which includes, but not exhaustively, small molecular dyes, protein chromophores, quantum dots, and gold nanoparticles. Additional techniques are identifiable by a skilled person upon reading of the present disclosure and will not be further discussed in detail.

[0155] In particular, the components of the kit can be provided, with suitable instructions and other necessary reagents, in order to perform the methods here described. The kit will normally contain the compositions in separate containers. Instructions, for example written or audio instructions, on paper or electronic support such as tapes or CD-ROMs, for carrying out the assay, will usually be included in the kit. The kit can also contain, depending on the particular method used, other packaged reagents and materials (i.e. wash buffers and the like).

[0156] In some embodiments, the instructions provide a method to directly synthesize oligonucleotide probes on the array. In other embodiments the instructions comprise steps to attach synthesized oligonucleotide probes to the array.

[0157] In an embodiment, steps in the methods to obtain a plurality of oligonucleotides of the present disclosure can be written in a variety of computer programming and scripting languages. In particular, the sequences of the oligonucleotides and the executable steps according to the methods and algorithms of the disclosure can be stored on a physical medium, a computer, or on a computer readable medium. All the software programs were developed, tested and installed on desktop PCs and multi-node clusters with Intel processors running the Linux operating system. The various steps can be performed in multiple-processor mode or single-processor mode. All programs should also be able to run with minimal modification on most PCs and clusters. The steps outlined in FIGS. 1A, 1B and 15 can be written as modules configured to perform the task. Additional steps to further optimize the method of the present disclosure can be written as additional modules to be performed in sequence or concurrently with other modules of the method.

[0158] FIG. 16 shows a computer system 1610 that may be used to implement the Method of the present disclosure. It should be understood that certain elements may be additionally incorporated into computer system 1610 and that the figure only shows certain basic elements (illustrated in the form of functional blocks). These functional blocks include a processor 1615, memory 1620, and one or more input and/or output (I/O) devices 1640 (or peripherals) that are communicatively coupled via a local interface 1635. The local interface 1635 can be, for example, metal tracks on a printed circuit board, or any other forms of wired, wireless, and/or optical connection media. Furthermore, the local interface 1635 is a symbolic representation of several elements such as controllers, buffers (caches), drivers, repeaters, and receivers that are generally directed at providing address, control, and/or data connections between multiple elements.

[0159] The processor 1615 is a hardware device for executing software, more particularly, software stored in memory 1620. The processor 1615 can be any commercially available processor or a custom-built device. Examples of suitable commercially available microprocessors include processors manufactured by companies such as Intel, AMD, and Motorola.

[0160] The memory 1620 can include any type of one or more volatile memory elements (e.g., random access memory (RAM, such as DRAM, SRAM, SDRAM, etc.)) and nonvolatile memory elements (e.g., ROM, hard drive, tape, CDROM, etc.). The memory elements may incorporate electronic, magnetic, optical, and/or other types of storage technology. It must be understood that the memory 1620 can be implemented as a single device or as a number of devices arranged in a distributed structure, wherein various memory components are situated remote from one another, but each accessible, directly or indirectly, by the processor 1615.

[0161] The software in memory 1620 may include one or more separate programs, each of which comprises an ordered listing of executable instructions for implementing logical functions. In the example of FIG. 16, the software in the memory 1620 includes an executable program 1630 that can be executed perform the method of the present disclosure. Memory 1620 further includes a suitable operating system (OS) 1625. The OS 1625 can be an operating system that is used in various types of commercially-available devices such as, for example, a personal computer running a Windows® OS, an Apple® product running an Apple-related OS, or an Android OS running in a smart phone. The operating system 1625 essentially controls the execution of executable program 1630 and also the execution of other computer programs, such as those providing scheduling, input-output control, file and data management, memory management, and communication control and related services.

[0162] Executable program 1630 is a source program, executable program (object code), script, or any other entity comprising a set of instructions to be executed in order to perform a functionality. When a source program, then the program may be translated via a compiler, assembler, interpreter, or the like, and may or may not also be included within the memory 1620, so as to operate properly in connection with the OS 1625.

[0163] The I/O devices 1640 may include input devices, for example but not limited to, a keyboard, mouse, scanner, microphone, etc. Furthermore, the I/O devices 1640 may also include output devices, for example but not limited to, a printer and/or a display. Finally, the I/O devices 1640 may further include devices that communicate both inputs and outputs, for instance but not limited to, a modulator/demodulator (modem; for accessing another device, system, or network), a radio frequency (RF) or other transceiver, a telephonic interface, a bridge, a router, etc.

[0164] If the computer system 1610 is a PC, workstation, smartdevice, or the like, the software in the memory 1620 may further include a basic input output system (BIOS) (omitted for simplicity). The BIOS is a set of essential software routines that initialize and test hardware at startup, start the OS 1625, and support the transfer of data among the hardware devices. The BIOS is stored in ROM so that the BIOS can be executed when the computer system 1610 is activated.

[0165] When the computer system 1610 is in operation, the processor 1615 is configured to execute software stored within the memory 1620, to communicate data to and from the memory 1620, and to generally control operations of the computer system 1610 pursuant to the software. Method of the present disclosureing and the OS 1625 are read by the processor 1615, perhaps buffered within the processor 1615, and then executed.

[0166] When the audio data spread spectrum embedding and detection system is implemented in software, as is shown in Figure. 16, it should be noted that the computer-executable steps of the method of the present disclosure can be stored on any computer readable storage medium for use by, or in connection with, any computer related system or method. In the context of this document, a computer readable storage medium is an electronic, magnetic, optical, or other physical device or means that can contain or store a computer program for use by, or in connection with, a computer related system or method.

[0167] Several steps of the method according to the present disclosure can be embodied in any computer-readable storage medium for use by or in connection with an instruction execution system, apparatus, or device, such as a computer-based system, processor-containing system, or other system that can fetch the instructions from the instruction execution system, apparatus, or device and execute the instructions. In the context of this document, a “computer-readable storage medium” can be any means that can store, communicate, propagate, or transport the program for use by or in connection with the instruction execution system, apparatus, or device. The computer readable storage medium can be, for example but not limited to, an electronic, magnetic, optical, electromagnetic, infrared, or semiconductor system, apparatus, or device. More specific examples (a non-exhaustive list) of the computer-readable storage medium would include the following: a portable computer diskette, a random access memory (RAM), a read-only memory (ROM), an erasable programmable read-only memory (EPROM, EEPROM, or Flash memory) an optical disk such as a DVD or a CD.

[0168] In an alternative embodiment, where some or all of the steps of a method of the present disclosure to the present disclosure are implemented in hardware, the audio data spread spectrum embedding and detection system can implemented with any one, or a combination, of the following technologies, which are each well known in the art: a discrete logic circuit(s) having logic gates for implementing logic functions upon data signals, an application specific integrated circuit (ASIC) having appropriate combinational logic gates, a programmable gate array(s) (PGA), a field programmable gate array (FPGA), etc.

### EXAMPLES

[0169] The arrays, methods and systems of several embodiments herein described are further illustrated in the following examples, which are provided by way of illustration and are not intended to be limiting. A person skilled in the art will appreciate the applicability of the features described in detail for methods.

### Example 1

### Sample Preparation and Microarray Hybridization

[0170] DNA microarrays were synthesized using the NimbleGen Maskless Array Synthesizer at Lawrence Livermore National Laboratory as described in reference 8. Adenovirus type 7 strain Gomen (Adenoviridae), respiratory syncytial virus (RSV) strain Long (Paramyxoviridae), respiratory syncytial virus strain B1, bluetongue virus (BTV) type 2 (Reoviridae) and bovine viral diarrhea virus (BVDV) strain Singer (Flaviviridae) were purchased from the National Veterinary lab and grown at LLNL. Purified DNA from human herpesvirus 6B (HHV6B) (Herpesviridae) and vaccinia virus strain Lister (Poxyiridae) were purchased from Advanced Biotechnologies (Maryland, Va.). Eleven blinded viral culture samples were received from Dr. Robert Tesh's lab at University of Texas Medical Branch at Galveston (UTMB). The viral cultures were sent to LLNL in the presence of Trizol reagent.

[0171] After treatment with Trizol reagent, RNA from cells was precipitated with isopropanol and washed with 70% ethanol. The RNA pellet was dried and reconstituted with RNase free water. 1 μg of RNA was transcribed into double-strand cDNA with random hexamers using Superscript™ double-stranded cDNA synthesis kit from Invitrogen (Carlsbad, Calif.). The DNA or cDNA was labeled using Cy-3 labeled nonamers from Trilink Biotechnologies and 4 μg of labeled sample was hybridized to the microarray for 16 hours as previously described (see reference 8). Clinical samples that had been extracted and partially purified using Round A and Round B protocols (see reference 23) were obtained from Dr. Joseph DeRisi's laboratory at University of California, San Francisco (UCSF). The samples were amplified for an additional 15 cycles to incorporate aminoallyl-dUTP and labeled with Cy3NHS ester (GE Healthcare (Piscataway, N.J.). The labeled samples were hybridized to NimbleGen arrays.

### Example 2

### Testing on Pure and Mixed Samples of Known Viruses for Array v1

[0172] Several of the viruses of Example 1 (adenovirus type 7, RSV, and BVDV) were hybridized on array v1 in single virus hybridization experiments and each was detected by array v1 (data not shown). Several mixtures of both RNA and DNA viruses were also tested (Table 6). PCR primers used to detect or confirm various samples before or after testing samples on the arrays of the present disclosure are provided in Table 9.

TABLE 6
Results of initial tests on array v1.

| Mixture tested | Detected | Additionally detected |
|---|---|---|
| Adenoviral type 7 strain | Yes | Human endogenous |
| Gomen | | retrovirus |
| Respiratory syncytial virus | Yes | K113 |
| strain Long | | |
| Bovine viral diarrhea type 1 | Yes | Leek yellow stripe |
| strain Singer | | potyvirus |
| Respiratory syncytial virus | Yes | none |
| strain B1 | | |
| Bluetongue virus type 2 | Yes | |
| | (segments | |
| | 2, 6, 8, 9, 10) | |
| Human herpesvirus 6B | Yes | Human endogenous |
| | | retrovirus |
| Vaccinia virus strain Lister | Yes | K113 |
| Respiratory syncytial virus | Yes | Influenza A segment 8 |
| strain B1 | | |
| Bluetongue virus type 2 | Yes | |
| | (segments | |
| | 2, 6, 7, 8, 9, 10) | |

[0173] All spiked species from Table 6 were detected in the mixture, including most of the segments of BTV. Strain discrimination was not expected, since probes were designed from regions conserved within viral families. Nevertheless, the highest scoring targets in the single virus experiments with adenovirus, BVDV, vaccinia and HHV 6B were in fact the strains hybridized to the arrays. Human endogenous retrovirus K113 was also detected in two of the three mixtures, possibly derived from host cell DNA.

[0174] For three particular samples tested, spiked strain identities were compared with those predicted by analyzing either 1) only the LLNL probes versus 2) analyzing only the Virochip probes that were also included on the MDA. The LLNL probes identified the correct Gomen strain of human adenovirus type 7 while the Virochip probes identified the correct species but the incorrect NHRC 1315 strain. In another example, when RSV Long group A (an unsequenced strain) was hybridized to the array, the related RSV strain ATCC VR-26 was predicted by MDA probes, but the Virochip probes failed to detect any RSV strain. For the detection of BVD Singer strain, both LLNL and Virochip probes were able to predict the exact strain hybridized.

### Example 3

### PCR to Confirm Microarray Results

[0175] Clinical samples from the DeRisi laboratory (Example 1) were tested by PCR to confirm the microarray results (Example 2). PCR primers were designed using either the KPATH system (see reference 20) or based on the probes that gave a positive signal for the organism identified as present, and the primer sequences are proved as supplementary information. PCR primers were synthesized by Biosearch Technologies Inc (Novato, Calif.). 1 μL of Round B material was re-amplified for 25 cycles and 2 μL of the PCR product was used in a subsequent PCR reaction containing Platinum Taq polymerase (Invitrogen), 200 mM primers for 35 cycles. The PCR condition is as follows: 96° C., 17 sec, 60° C., 30 sec and 72° C., 40 sec. The PCR products were visualized by running on a 3% agarose gel in the presence of ethidium bromide.

### Example 4

### False Negative Error Rates were Estimated for the v1 Array

[0176] To further analyze results of array v1 tests as described in Example 2, false negative error rates were estimated for the v1 array. False negative error rates were estimated for experiments in which some or all of the viruses in the sample had known genome sequences (Table 7), and for probes that met Applicants' design criteria (85% identity and a 29 nt perfect match to one of the target genome sequences). The RSV and BTV probes were excluded from this estimate, as sequences were not available for the exact strains used in the experiments. All 128 selected probes had signals above the 99^{th} percentile detection threshold, yielding a zero false negative error rate.

TABLE 7
True positive/false negative counts for probes in MDA v1
tests with sequenced viruses.

| | Number | | | |
|---|---|---|---|---|
| | of PM | TP | FN | Percent FN |
| Target | probes | probes | probes | error rate |
| Pure viral cultures: | | | | |
| Adenovirus type 7 Gomen | 52 | 52 | 0 | 0.0 |
| Bovine viral diarrhea virus | 25 | 25 | 0 | 0.0 |
| (BVDV) | | | | |
| Mixture of viral cultures: | | | | |
| Human herpesvirus 6B | 14 | 14 | 0 | 0.0 |
| Vaccinia virus Lister strain | 37 | 37 | 0 | 0.0 |
| Total | 51 | 51 | 0 | 0.0% |
| Overall | 128 | 128 | 0 | 0.0% |

### Example 5

### Validation of Array v2 with Known Spiked Viruses

[0177] To validate v2 of the array with known spiked viruses, BVD type 1 (FIG. 2) and a mixture of vaccinia Lister and HHV 6B (FIG. 3) were tested on array v2. These organisms were correctly identified to the species level. Virus sequences selected as likely to be present are highlighted in red in these figures. On the vaccinia+HHV 6B array, human endogenous retrovirus K113 was also detected.

[0178] In addition, several organisms that were unlikely to be present were predicted, probably because of non-specific probe binding or cross-hybridization. These organisms, Mariprofundus ferrooxydans (a deep sea bacterium collected near Hawaii), candidate division TM7 (collected from a subgingival plaque in the human mouth), and marine gamma-proteobacterium (collected in the coastal Pacific Ocean at 10 m depth) were detected with low log-odds scores on numerous experiments using different samples. Genome sequences for these were not included in the probe design because they became available only after Applicants designed the microarray probes or because they were not classified into a bacterial taxonomic family; therefore probes were not screened for cross-hybridization against these targets. Genome comparisons indicate that M. ferrooxydans, TM7b, and marine gamma proteobacterium HTCC2143 share 70%, 55%, and 61%, respectively, of their sequence with other bacteria and viruses, based on simply considering every oligo of size at least 18 nt is also present in other sequenced viruses or bacteria, so many of the probes designed for other organisms may also hybridize to these targets.

### Example 6

### Testing on Blinded Samples from Pure Culture

[0179] To further test array v2, blinded samples from pure culture were tested. Blinded samples were provided from University of Texas, Medical Branch (UTMB) for 11 viruses. Applicants hybridized each of those samples separately to the MDA and predicted the identities of each virus (Table 8). 10 of 11 blinded samples were confirmed to be correctly identified by the MDA v2. VSV NJ was not detected in the 11th sample using the MDA, but was confirmed to be present by TaqMan PCR.

TABLE 8
Testing of array v2 on blinded samples from pure culture

| ID | Culture results | Array results |
|---|---|---|
| — | Vero Cells not infected | Background signal |
| TVP-11180 | Punta Toro | Punta Toro virus strain |
| | | Adames |
| TVP-11181 | Thogoto | Thogoto virus strain IIA |
| TVP-11182 | Dengue 4 | Dengue 4 strain |
| | | ThD4_0734_00 |
| TVP-11183 | CTF | Colorado tick fever virus |
| TVP-11184 | Cache Valley | Cache Valley genomic RNA |
| | | for N and NSs proteins |
| TVP-11185 | IIheus | IIheus virus |
| TVP-11186 | EHD-NJ | Epizootic hemorrhagic |
| | | disease virus isolate |
| | | 1999_MS-B NS3 |
| TVP-11187 | La Cross | La Crosse virus strain LACV |
| TVP-11188 | SF Sicilian | Sandfly fever sicilian virus |
| TVP-11189 | VSV-NJ | Not detected |
| TVP-11191 | Ross River | Ross River virus |

[0180] Ten of 11 of the species predicted by the MDA were confirmed. In addition, endogenous retroviruses were also detected by array v2 in 7 of the samples as well as the uninfected Vero cell control, indicating the presence of host DNA from the culture cells. These included one or more of the following: Baboon endogenous virus strain M7 and Human endogenous retroviruses K113, K115, and HCML-ARV, with Human endogenous retrovirus K113 being the most common.

[0181] The one sample that was not detected on the array was vesicular stomatitis virus, NJ (VSV NJ). VSV NJ was confirmed to be present in the sample using two proprietary, unpublished TaqMan assays developed by colleagues at LLNL and tested by LLNL colleagues at Plum Island that specifically detect VSV NJ. VSV NJ is a member of the Rhabdoviridae family, for which no genomes were available. Consequently, no probes were designed for this species and it was not represented in any database for the statistical analyses. It is sufficiently different from the genomes available for VSV Indiana that none of those probes had BLAST similarity to the partial sequences available for VSV NJ. There were 7 probes from the Virochip corresponding to VSV NJ that were detected. These probes were designed from partial sequences (see reference 23).

### Example 7

### Detection of Viruses and Bacteria from Clinical Samples with Array v1

[0182] A clinical sputum sample provided from the UCSF DeRisi lab was tested on the MDA v1 (FIG. 4). Human respiratory syncytial virus and human coronavirus HKU1 were detected in this analysis. The length of a bar (FIG. 4) represents the log-likelihood contribution from probes with BLAST hits to the indicated sequence. The darker colored part of the bar represents the increase in log-likelihood that would result from adding the indicated target to the predicted set, not including contributions from previously predicted targets. Results were confirmed using specific PCR for these two viruses (Table 9). The results were also confirmed by the DeRisi lab using the ViroChip. The MDA results indicated small log-odds scores for influenza A, leek yellow stripe potyvirus, and HIV-1, although these low scores are a result of just a few probes and are likely due to nonspecific binding rather than true positives. Other samples tested using the MDA v1 also had a low likelihood predicted for Influenza A and Leek yellow stripe potyvirus (Table 6), and this is suspected to be due to non-specific binding, as discussed further in Example 8.

TABLE 9
Results from clinical samples - primer sequences, expected product sizes,
and results

| | | | | | Expected | |
|---|---|---|---|---|---|---|
| | SEQ | | SEQ | | Product | |
| | ID | Forward | ID | | Size | EPS |
| Sample | NO. | Primer | NO. | Reverse Primer | (EPS) | Detected |
| DeRset1_1 | | | | | | |
| Coronavirus | 133, | CTATGAA | 133, | GAACGGAACA | 287 | Yes |
| HKU1 | 264 | GTCAGAT | 265 | AGCCCATAAC | | |
| | | GAGGGTG | | ATA | | |
| | | GG | | | | |
| RSV | 133, | GGCAAAT | 133, | GACTCGTAGT | 224 | Yes |
| | 2663 | ATGGAAA | 267 | GAAGGTCCTT | | |
| | | CATACGTG | | TGG | | |
| | | AA | | | | |
| DeRsetDR210 | | | | | | |
| Human | 133, | AGATACC | 133, | GGGTTTGTTA | 180 | Yes |
| parechovirus 1 | 268 | ACGCTTGT | 269 | AACCTTGGCTT | | |
| isolate BNI-788St | | GGACCTTA | | TT | | |
| Streptococcus | 133, | CGTATCTG | 133, | CGCCCCAAAC | 265 | Yes |
| thermophilus | 270 | CCCGTATG | 271 | AAAGAATAGC | | |
| LMD9 | | CTTG | | | | |
| DeRsetDR220 | | | | | | |
| Escherichia coli | 133, | ATCCGTCA | 133, | AGAGAAAACG | 144 | Yes |
| CFT073 | 272 | TACGGAA | 273 | GAAGAGTATC | | |
| | | CATCAACT | | GCC | | |
| Norwalk virus 1 | 133, | GCTCCCAG | 133, | CACCATCATT | 60 | Yes |
| | 274 | TTTTGTGA | 275 | AGATGGAGCG | | |
| | | ATGAAGA | | G | | |
| Norwalk virus 2 | 133, | TTCACAAA | 133, | ATGGACTTTTA | 105 | Yes |
| | 276 | ACTGGGA | 277 | CGTGCC | | |
| | | GCC | | | | |
| DeRsetDR230 | | | | | | |
| Chicken anemia | 133, | GTTCAGGC | 133, | TTAGCTCGCTT | 258 | Yes |
| virus | 278 | CACCAAC | 279 | ACCCTGTACTC | | |
| | | AAGTTC | | G | | |
| Serratia | 133, | CCGCAGA | 133, | GCCGAATCAA | 203 | No |
| proteamaculans 1 | 280 | TCCTGGCT | 281 | CGAAGCCTAC | | |
| | | AAAA | | | | |
| Serratia | 133, | CCCTGGGT | 133, | CCCATAGCAC | 221 | No |
| proteamaculans 2 | 282 | AAGGTGA | 283 | CGCTTATCCT | | |
| | | AAACG | | | | |
| DeRsetDR240 | | | | | | |
| Staphylococcus | 133, | CATGCGTA | 133, | ATGCAAACGA | 281 | Yes |
| aureus | 284 | TTGCTATT | 285 | GTCCAAGCAG | | |
| | | GAGTTGC | | | | |
| Shigella & E. coli | 133, | CGTCTGCT | 133, | TCTCTTCTTCC | 239 | Yes |
| conserved region | 286 | GGATGGC | 287 | GGCACCATT | | |
| | | TTCTA | | | | |
| Shigella sonnei | 133, | GGGTGGA | 133, | GGCTCTGGAG | 287 | Yes |
| Ss046 plasmid | 288 | AAAGTTG | 289 | CAGGAAAAGA | | |
| pSS046_spB | | GGATCA | | | | |
| Lactococcus | 133, | AGGTGAC | 133, | TTCGCTTGTGT | 276 | Yes |
| lactis pGdh442 | 290 | CGTACTTT | 291 | TCGTCCTTG | | |
| plasmid | | ACACAAT | | | | |
| | | GG | | | | |
| Streptococcus | 133, | AACGAGC | 133, | TATGTACGGC | 300 | Yes |
| sanguinis | 292 | TGTTGAGG | 293 | GTCAAGGAGC | | |
| | | GCAAT | | | | |
| Lactococcus | 133, | TGGAAAA | 133, | TCGAGGGAAC | 232 | Yes |
| lactis pCI305 | 294 | TTGCGTCC | 295 | TGGGAATTTG | | |
| plasmid | | TTATTTG | | | | |
| E. coli pAPEC | 133, | CGGACGG | 133, | ATGCCTGCTC | 255 | No |
| O2-ColV plasmid | 296 | CTACTGAA | 297 | AACTCCATCA | | |
| 1 | | CCAAT | | | | |
| E. coli pAPEC | 133, | GCAGAAA | 133, | CTGAAGGCCA | 82 | No |
| O2-ColV plasmid | 298 | TGAAGCT | 299 | TCACCCGT | | |
| 2 | | GATGCG | | | | |

### Example 8

### Detection of Viruses and Bacteria from Clinical Samples with Array v2

[0183] Closer examination of probes giving high signal intensities that were not consistent with the “detected” organisms indicated the likelihood of some probes that bind non-specifically. On the MDA v2 array, 141 probes were detected in a majority (31 out of 60) of arrays hybridized to a wide variety of sample types. A small number of these probes were found to have significant BLAST hits to the human genome. Since most of the samples tested on the array were either human clinical samples or were grown in Vero cells (an African green monkey cell line), the frequent high signals for these few probes can be explained by the presence of primate DNA in the sample. The vast majority of spuriously binding probes, however, were not explained by cross-hybridization to host DNA. There were significant differences between non-specific and specific probes in the distributions of trimer entropy and hybridization free energy; non-specific probes had smaller entropies (mean 4.6 vs 4.8 bits, p=7.5×10⁻¹⁴) and more negative free energies (mean −70.5 vs −66.8 kcal/mol, p=3.8×10⁻¹³) compared to 1755 non-specific probes detected in 11 or fewer samples. Consequently, in v2 of the chip design, an entropy filter was imposed as described in the detailed description, and more probe sequences were designed at the expense of the number of replicates per probe.

[0184] Partially amplified clinical samples provided by the DeRisi laboratory at UCSF were tested on the MDA v2. The source (e.g. fecal or serum) was blinded during experimentation and analysis, but was provided later. No patient history was provided. The results are shown in FIGS. 5-9.

[0185] Hepatitis B virus was the only organism detected in sample 1_{—}5 (FIG. 5), and it produced a very strong signal. This was the only sample from a serum source. All the remaining samples (DR210, DR220, DR230, DR240) were from fecal sources. MDA v2 indicated that sample DR210 contained human parechovirus and a bacterium similar to Streptococcus thermophilus with a plasmid similar to one that has been sequenced from Lactococcus lactis (FIG. 6).

[0186] Other species of Streptococcaceae also had high log-odds ratios, consequently MDA v2 did not make a definitive call to the level of species. Streptococcus thermophilus is a gram-positive facultative anaerobe used as a fermenter for production of yogurt and mozzarella. It is also used as a probiotic to alleviate symptoms of lactose intolerance and gastrointestinal disturbances (see reference 12). Human parechoviruses cause mild gastrointestinal and respiratory illnesses. The presence of human parechovirus and Streptococcus thermophilus were confirmed by PCR (Table 9).

[0187] In sample DR220, Eschirichia coli CFT073 (or similar) and a Norwalk virus (FIG. 7) were identified. E. coli strain CFT073 is uropathogenic and is one of the most common causes of non-hospital acquired urinary tract infections, and Norwalk virus causes gastroenteritis. Since the probes were selected from conserved regions within a family, the array was not designed for stringent species or strain discrimination. A number of E. coli and Shigella genomes had nearly as high log-odds scores as E. coli CFT073. PCR confirmation was obtained for both E. coli and Norwalk virus (Table 9).

[0188] Sample DR230 was predicted to contain chicken anemia virus and Serratia proteamaculans or a related Enterobacteriaceae. S. proteamaculans has been associated with a severe form of pneumonia (see reference 2) (FIG. 8). The presence of chicken anemia was confirmed by PCR, but the presence of S. proteamaculans could not be confirmed.

[0189] In sample DR240 only bacterial organisms were identified (FIG. 9). In particular, Staphylococcus aureus and an associated plasmid, Shigella dysentariae/E. coli and Shigella and E. coli plasmids, and Streptococcus sanguinis and related Lactococcus lactis plasmids were detected. All of these were confirmed by PCR except the E. coli pAPEC plasmid (Table 9).

### Example 9

### Limits of Detection and Hybridization Time for 4-Plex Array v2.1

[0190] Experiments were performed with the MDA v2.1 4-plex array to determine the minimum detectable quantity of viral DNA using the standard 17 hour hybridization time. In addition, experiments were conducted to determine whether shorter hybridization times could be used if there were a sufficient quantity or concentration of sample.

[0191] To test this, DNA was extracted from adenovirus type 7, Gomen strain. Sample DNA quantities ranging from 0.5 ng to 2000 ng were tested with 17 hour hybridizations, and amounts from 15.6 ng to 2000 ng were tested with 1 hour hybridizations. Arrays were analyzed with our standard maximum likelihood protocol. At 17 hours, the correct adenovirus strain was the top-scoring target for all but the smallest sample quantity tested; that is, DNA amounts as low as 1 ng (5×10⁷ genome copies) could be detected without sample amplification. With 1 hour hybridizations, the correct virus strain was identified at every DNA quantity tested, as low as 15.6 ng.

[0192] FIG. 10 shows the distribution of target-specific and negative control probe intensities observed in 4 of the 13 arrays hybridized for 17 hours at selected DNA concentrations; FIG. 11 displays corresponding distributions for 4 of the 8 one hour hybridizations at selected DNA concentrations. Separate density curves are shown for the negative control probes and the probes predicted to hybridize to the target virus genome, with detection probabilities greater than 95%. The target probes are clearly distinguished from the control probes in all cases. The target probe intensity distribution with 2 ng of DNA at 17 hours is similar to that observed with 15.6 ng at 1 hour. These results show that very short hybridization times can be used successfully when a sufficient amount of sample DNA is available.

### Example 10

### 135 Thousand Viral and Bacterial Probes for Clinical Microbial Detection Array

[0193] A detection microarray for targeting clinically relevant pathogens in a cost effective format (12×135K Nimblegen format) according to embodiments of the present disclosure is now described. The following example describes the design of a microarray for detecting vertebrate-infecting viruses and bacteria. The array includes 135 thousand probes from families known to infect vertebrates.

[0194] Complete viral and bacterial genome/segment/plasmid sequences were gathered from publicly available sites (Genbank, JCVI, IMG, etc.) and from collaborators (CDC), and were organized by family. Regions that were specific to a family were identified in which there were no regions longer than 17-23 bases that matched bacterial/viral genomes not in the target family or the human genome.

[0195] From these family-unique regions, candidate probes were identified to meet desired ranges for length (50-65 bases), Tm, entropy, GC %, and other thermodynamic and sequence features to the extent possible given the unique sequence. Detailed thermodynamic parameters are described in reference 28. The desired parameter ranges were relaxed as needed when there were too few probes for a target sequence, as Applicant's aimed at having between 5-40 probes per target (15 for most bacteria, 40 for most viruses), although there was variation around these numbers due to differences in target length and uniqueness.

[0196] Candidate probes were clustered and ranked within each family by the number of targets detected, and a greedy algorithm, as described was used to select a probe set to detect as many of the targets as possible with the fewest probes.

[0197] Uniqueness was calculated relative to all bacterial and viral families. However, only the probes for the clinically relevant families known to infect vertebrate hosts were included on the 135K clinical array. The viral families were selected from lists compiled by the International Committee on Taxonomy of Viruses and are available from virology.net/Big_Virology/BVHostList.html#Vertebrates

[0198] The following 33 viral families were included:

[0199] Adenoviridae, Alloherpesviridae, Anelloviridae, Arenaviridae, Arteriviridae, A sfarviridae, Astroviridae, Birnaviridae, Bornaviridae, Bunyaviridae, Caliciviridae, Circoviridae, Coronaviridae, Flaviviridae, Filoviridae, Hepeviridae, Hepadnaviridae, Herpesviridae, Iridoviridae, Nodaviridae, Orthomyxoviridae, Papillomaviridae, Paramyxoviridae, Parvoviridae, Picobirnaviridae, Picornaviridae, Polyomaviridae, Poxyiridae, Reoviridae, Retroviridae, Rhabdoviridae, Roniviridae, Togaviridae as well as one additional group, which is a genus, but has no family classification: Deltavirus.

[0200] The following bacterial families were included and were determined from extensive literature (PubMed) searches to determine if members of a family have been known to infect vertebrates or involved in clinical infections: Acetobacteraceae, Acholeplasmataceae, Actinomycetaceae, Actinosynnemataceae, Aerococcaceae, Aeromonadaceae, Alcaligenaceae, Anaeroplasmataceae, Anaplasmataceae, Bacillaceae, Bacteroidaceae, Bartonellaceae, Bdellovibrionaceae, Bifidobacteriaceae, Brachyspiraceae, Bradyrhizobiaceae, Brevibacteriaceae, Brucellaceae, Burkholderiaceae, Campylobacteraceae, Cardiobacteriaceae, Carnobacteriaceae, Catabacteriaceae, Caulobacteraceae, Cellulomonadaceae, Chlamydiaceae, Clostridiaceae, Clostridiales Family XI. Incertae Sedis, Clostridiales Family XI, Clostridiales Family XII. Incertae Sedis, Clostridiales Family XIII Incertae Sedis, Clostridiales Family XIV. Incertae Sedis, Clostridiales Family XV. Incertae Sedis, Clostridiales Family XVI. Incertae Sedis, Clostridiales Family XVIII. Incertae Sedis, Comamonadaceae, Coriobacteriaceae, Corynebacteriaceae, Coxiellaceae, Criblamydiaceae, Dermabacteraceae, Dermatophilaceae, Enterobacteriaceae, Enterococcaceae, Eubacteriaceae, Family X. Incertae Sedis, Family XVII. Incertae Sedis, Francisellaceae, Fusobacteriaceae, Gordoniaceae, Halomonadaceae, Helicobacteraceae, Jonesiaceae, Lachnospiraceae, Lactobacillaceae, Legionellaceae, Leptospiraceae, Leuconostocaceae, Listeriaceae, Methylobacteriaceae, Micrococcaceae, Moraxellaceae, Mycobacteriaceae, Mycoplasmataceae, Neisseriaceae, Nocardiaceae, Oxalobacteraceae, Parachlamydiaceae, Pasteurellaceae, Peptococcaceae, Peptostreptococcaceae, Piscirickettsiaceae, Pseudomonadaceae, Rickettsiaceae, Staphylococcaceae, Streptococcaceae, Vibrionaceae, Spirochaetaceae, Porphyromonadaceae, Prevotellaceae, Propionibacteriaceae, Rikenellaceae, Ruminococcaceae, Segniliparaceae, Simkaniaceae, Spirillaceae, Spiroplasmataceae, Sporolactobacillaceae, Streptomycetaceae. Succinivibrionaceae, Synergistaceae, Veillonellaceae, Victivallaceae, and Waddliaceae.

### Example 11

### 15 Thousand Viral Probes for Clinical Microbial Detection Array

[0201] A detection microarray targeting clinically relevant pathogens in a cost effective format (12×135K Nimblegen format) was designed. A subset of the probes in MDA v2 were downselected for inclusion in a Clinical 135K array, selecting probes for families known to infect vertebrate hosts and an additional set of 15K probes were designed specifically for this array.

[0202] The following example describes a microarray for viral and bacterial detection of organisms from families known to infect vertebrates. Many of the probes are a subset of the MDAv2 probes for the vertebrate-infecting families. A set of 14,996 viral probes were designed for this array.

[0203] For this array, the following steps were performed:

[0204] 1) A complete viral genome and segment sequences were downloaded from the KPATH database in February 2011. These viral genomes and segment sequences were the target sequences for probe design.

[0205] 2) A current complete set of sequences of fungi, bacteria, and archae were downloaded from the KPATH database in February 2011 for eliminating non-unique viral regions with respect to fungal, bacterial, and archaeal sequences.

[0206] 3) In March 2011, current ribosomal sequences from the rRNA SILVA database were downloaded, human genome version 19 sequences, and repeat regions from the RepBase version 16.01 database, for eliminating non-unique viral regions with respect to rRNA, human, and repetitive sequences.

[0207] 4) Family specific sequences were determined within each viral family by: using Vmatch software (Stephan Kurtz: The Vmatch large scale sequence analysis software, http://www.vmatch.de) to eliminate non-unique regions from the sequences in each vertebrate-infecting viral family. Uniqueness was determined with respect to “non-target” sequences, that is, the sequences in steps 3) and 4) above, as well as relative to any virus not in the viral family under consideration. Any region of 19 bases or longer with a perfect match in any non-target sequence was eliminated from consideration as a probe.

[0208] 5) From the family specific sequences, probes were designed to meet desired ranges for length, Tm, entropy, GC %, and other thermodynamic and sequence features to the extent possible, relaxing the desired ranges as needed to obtain at least 5 probes per sequence, given sufficient unique regions exist for a sequence as described in Gardner et al., 2010, incorporated herein by reference in its entirety.

[0209] 6) Candidate probes were clustered and ranked by the number of targets detected, and a greedy algorithm was used to select a probe set to detect as many of the targets as possible with the fewest probes, aiming for all sequences with sufficient unique regions at least 50 bases long to be represented by 5 probes. Targets with too little family specific sequence could have fewer probes in the total set of 15K designed. The algorithm was used to rank and downselect a probe set from the pool of candidate probes and is further described in reference 28.

[0210] The following 33 viral families were included:

[0211] Adenoviridae, Alloherpesviridae, Anelloviridae, Arenaviridae, Arteriviridae, Asfarviridae, Astroviridae, Birnaviridae, Bornaviridae, Bunyaviridae, Caliciviridae, Circoviridae, Coronaviridae, Flaviviridae, Filoviridae, Hepeviridae, Hepadnaviridae, Herpesviridae, Iridoviridae, Nodaviridae, Orthomyxoviridae, Papillomaviridae, Paramyxoviridae, Parvoviridae, Picobirnaviridae, Picornaviridae, Polyomaviridae, Poxyiridae, Reoviridae, Retroviridae, Rhabdoviridae, Roniviridae, Togaviridae, and one additional group, which is a genus, but has no family classification: Deltavirus.

### Example 12

### An Array Design

[0212] An array design process is diagrammed in FIGS. 1A and 1B. In designing probes for the array, Applicants sought to balance the goals of conservation and uniqueness, prioritizing oligo sequences that were conserved, to the extent possible, within the family of the targeted organism, and unique relative to other families and kingdoms. The design process is detailed in Methods, and summarized here.

[0213] Applicants designed arrays with larger numbers of probes per sequence (50 or more for viruses, 15 or more for bacteria) than previous arrays having only 2-10 probes per target. The large number of probes per target was expected to improve sensitivity, an important consideration given possible amplification bias in the random PCR sample preparation protocol, which could result in nonamplification of genome regions targeted by some probes [25]. All bacteria and viruses with sequenced genomes available at the time Applicants began the MDA v.1 design (spring 2007) were represented: ˜38,000 virus sequences representing ˜2200 species, and ˜3500 bacterial sequences representing ˜900 species. Version 1 of the array had only viral probes. A second version of the array (MDA v.2) was designed using both viral and bacterial probes. Probes were selected to avoid sequences with high levels of similarity to human, bacterial and viral sequences not in the target family. Low levels of sequence similarity across families were allowed selectively, when the statistical model of probe hybridization used in our array analysis predicted a low likelihood of cross-hybridization.

[0214] Favoring more conserved probes within a family enabled Applicants to minimize the total number of probes needed to cover all existing genomes with a high probe density per target, enhancing the capability to identify the species of known organisms and to detect unsequenced or emerging organisms. Strain or subtype identification was not a goal of probe design for this array. Nevertheless, Applicants ability to combine information from multiple probes in our analysis made it possible to discriminate between strains of many organisms.

[0215] The array design also incorporated a set of 2,600 negative control probes. These probes had sequences that were randomly generated, but with length and GC content distributions chosen to match those of the target-specific probes.

### Example 13

### Modeling of Probe Target Hybridization

[0216] A novel statistical method was developed for detection array analysis, by modeling the likelihood of the observed probe intensities as a function of the combination of targets present in the sample, and performing greedy maximization to find a locally optimal set of targets; the details of the algorithm are shown in Methods. It incorporates a probabilistic model of probe-target hybridization based on probe-target similarity and probe sequence complexity, with parameters fitted to experimental data from samples with known genome sequences. To accurately determine the organism(s) responsible for a given array result, the pattern of both positive and negative probe signals is taken into account. The algorithm is designed to enable quantifiable predictions of likelihood for the presence of multiple organisms in a complex sample.

[0217] A key simplification used in this algorithm was to transform the probe intensities to binary signal values (“positive” or “negative”), representing whether or not the intensity exceeds an array-specific detection threshold. The threshold was typically calculated as the 99^{th} percentile of the intensities of the random control probes on the array. The outcome variables in the likelihood model are the positive signal probabilities for each probe, given the presence of a particular combination of targets in the sample. The resulting predictions are more robust in the presence of noisy data, since the outcome variable is a probability rather than the actual intensity. Discretizing the intensities also led to considerable savings of computation time and resources, which are significant for arrays containing hundreds of thousands of probes.

[0218] Although one might assume that reducing intensities to binary values means discarding valuable information, the log intensity distribution for a typical array (FIG. 13) shows that the actual information loss is much less than expected. FIG. 13 shows separate density curves for three classes of probes: those with BLAST hits to one of the known targets in the sample (“target-specific”), those without hits (“nonspecific”), and negative controls. A vertical dashed line is drawn at the 99^{th} percentile threshold intensity. Logₑ intensities for target-specific probes either cluster with the control and nonspecific probes (when they have low BLAST scores, usually), or approach the maximum possible value (16). This occurs because detection array probes are designed for high sensitivity to low target concentrations, so that probe intensities approach the saturation level whenever a probe has significant similarity to a target in the sample. Therefore, the information content of a probe signal is already reduced by saturation effects.

[0219] Certain probes were found to be more likely than others to yield positive signals, even when the sample on the array was known to lack any targets with sequences complementary to them. Applicants observed that this nonspecific hybridization occurs more often with probes having low sequence complexity, i.e. long homopolymers and tandem repeats. One measure of the complexity of a probe sequence is the entropy of its trimer frequency distribution.

[0220] To study whether the sequence entropy could be used as a predictor of nonspecific hybridization, Applicants selected data from nine MDA v2 arrays for which all sample components had known genome sequences. Applicants selected probes with no BLAST hits to any of the known targets, grouped them by entropy into equal sized bins, computed the positive signal frequency (the fraction of probes with positive signals), converted the frequency to a log-odds value, and plotted the log-odds against the trimer entropy, as shown in FIGS. 14A and 14B. Applicants also fit a logistic regression model for the probe signal as a function of entropy; a dashed line with the resulting slope and intercept is shown in the plot. FIGS. 14A and 14B show that the trimer entropy is an excellent predictor of the non-specific positive signal probability, and that probes with low entropy are more likely to give positive signals regardless of the target sequence.

[0221] While the nonspecific probe signal probability depends on the probe sequence only, the target-specific signal probability was assumed to be a function of both the probe sequence and probe-target sequence similarity. To determine an appropriate set of predictors for the specific signal probability, given the presence of a specific target, Applicants BLASTed the probe sequences against our database of target genomes, obtaining the best alignment (if any) for each probe-target pair. Applicants then derived various covariates from the probe-target alignment, including the alignment length, number of mismatches, bit score, E-value, predicted melting temperature, and alignment start and end positions.

[0222] Applicants tested all combinations of up to three covariates, using logistic regression to fit models to data from samples containing known targets, and performed leave-one-out validation to find the combination with the strongest predictive value. The best combination included three covariates: (1) The predicted melting temperature, computed as described in Methods; (2) the BLAST bit score and (3) the alignment start position relative to the 5′ end of the probe. Applicants expected the alignment start position to have a significant effect, because in previous work [8] that probe-target mismatches had a weaker effect on hybridization if the mismatch was closer to the 3′ end of the probe (nearer to the array surface).

### Example 14

### A Set of Highly Conserved Probes

[0223] Of the 135K viral and bacterial probes identified in Example 12, a set of highly conserved probes was selected. Most of the probes can detect more than one species because they are highly conserved and selected so as to hit the most targets with the fewest probes as possible. The scoring algorithm that includes a contribution of numerous probes enables species resolution, even if a single probe is not sufficient.

[0224] The species listed as matching a probe can have some mismatches, although it is not likely enough to prevent hybridization. The species are listed for each probe for which there was a match of at least 50 bp and 90% similarity. The set of highly conserved probes comprise probes 1-63 which can detect bacterial species, probes 64-361 which can detect viral species, and probes 362-445 which can detect flu species and shown below in tables 10-12.

TABLE 10
Bacterial, viral, and flu species which can be detected by probes
corresponding to SEQ. ID NO. 1-445.

| SEQ ID NO | Detectable Species |
|---|---|
| 1 | Salmonella enterica |
| 1 | Yersinia pestis |
| 2 | Acinetobacter baumannii |
| 2 | Acinetobacter calcoaceticus |
| 2 | Acinetobacter sp. ADP1 |
| 3 | Bacillus anthracis |
| 3 | Bacillus cereus |
| 3 | Bacillus thuringiensis |
| 4 | Escherichia fergusonii |
| 4 | Klebsiella pneumoniae |
| 4 | Salmonella enterica |
| 5 | Enterococcus durans |
| 5 | Enterococcus faecalis |
| 5 | Enterococcus faecium |
| 6 | Yersinia enterocolitica |
| 6 | Yersinia pestis |
| 6 | Yersinia pseudotuberculosis |
| 6 | synthetic construct |
| 7 | Listeria monocytogenes |
| 7 | Macrococcus caseolyticus |
| 7 | Plasmid pSBK203 |
| 7 | Staphylococcus aureus |
| 7 | Staphylococcus epidermidis |
| 7 | Staphylococcus simulans |
| 8 | Escherichia coli |
| 8 | Klebsiella pneumoniae |
| 8 | Salmonella enterica |
| 8 | Shigella boydii |
| 8 | Shigella dysenteriae |
| 8 | Shigella flexneri |
| 8 | Shigella sonnei |
| 9 | Azotobacter vinelandii |
| 9 | Pseudomonas aeruginosa |
| 9 | Pseudomonas alkylphenolia |
| 9 | Pseudomonas brassicacearum |
| 9 | Pseudomonas entomophila |
| 9 | Pseudomonas fluorescens |
| 9 | Pseudomonas mendocina |
| 9 | Pseudomonas putida |
| 9 | Pseudomonas savastanoi |
| 9 | Pseudomonas sp. QDA |
| 9 | Pseudomonas syringae |
| 10 | Chlamydia trachomatis |
| 10 | Plasmid pCHL1 |
| 11 | Acinetobacter baumannii |
| 11 | Aeromonas hydrophila |
| 11 | Enterobacter aerogenes |
| 11 | Enterobacter cloacae |
| 11 | Escherichia coli |
| 11 | Klebsiella pneumoniae |
| 11 | Plasmid R751 |
| 11 | Salmonella enterica |
| 11 | Serratia marcescens |
| 11 | Shigella boydii |
| 11 | Shigella sonnei |
| 11 | Vibrio cholerae |
| 12 | Burkholderia ambifaria |
| 12 | Burkholderia cenocepacia |
| 12 | Burkholderia gladioli |
| 12 | Burkholderia glumae |
| 12 | Burkholderia mallei |
| 12 | Burkholderia multivorans |
| 12 | Burkholderia phymatum |
| 12 | Burkholderia phytofirmans |
| 12 | Burkholderia pseudomallei |
| 12 | Burkholderia sp. 383 |
| 12 | Burkholderia thailandensis |
| 12 | Burkholderia vietnamiensis |
| 12 | Burkholderia xenovorans |
| 12 | Cupriavidus pinatubonensis |
| 12 | Ricinus communis |
| 13 | Enterococcus faecalis |
| 13 | Staphylococcus aureus |
| 13 | Staphylococcus cohnii |
| 13 | Staphylococcus epidermidis |
| 13 | Staphylococcus haemolyticus |
| 13 | Staphylococcus |
| | pseudintermedius |
| 13 | Staphylococcus saprophyticus |
| 13 | Staphylococcus sciuri |
| 13 | Staphylococcus simulans |
| 13 | Staphylococcus sp. 693-7 |
| 13 | Staphylococcus warneri |
| 13 | Stenotrophomonas maltophilia |
| 14 | Francisella novicida |
| 14 | Francisella philomiragia |
| 14 | Francisella sp. TX077308 |
| 14 | Francisella tularensis |
| 14 | synthetic construct |
| 15 | Staphylococcus aureus |
| 16 | Plasmid pE5 |
| 16 | Plasmid pIM13 |
| 16 | Plasmid pNE131 |
| 16 | Plasmid pT48 |
| 16 | Reporter vector pGUSA |
| 16 | Shuttle vector pMTL85151 |
| 16 | Staphylococcus aureus |
| 16 | Staphylococcus haemolyticus |
| 16 | Staphylococcus lentus |
| 17 | Expression vector mce3 |
| 17 | Mycobacterium africanum |
| 17 | Mycobacterium bovis |
| 17 | Mycobacterium canettii |
| 17 | Mycobacterium tuberculosis |
| 18 | Cronobacter turicensis |
| 18 | Dickeya dadantii |
| 18 | Edwardsiella tarda |
| 18 | Enterobacter aerogenes |
| 18 | Enterobacter cloacae |
| 18 | Erwinia billingiae |
| 18 | Escherichia coli |
| 18 | Klebsiella pneumoniae |
| 18 | Pantoea agglomerans |
| 18 | Pantoea sp. At-9b |
| 18 | Rahnella aquatilis |
| 18 | Rahnella sp. Y9602 |
| 18 | Salmonella enterica |
| 18 | Serratia proteamaculans |
| 18 | Yersinia enterocolitica |
| 18 | Yersinia pestis |
| 18 | synthetic construct |
| 19 | Listeria grayi |
| 19 | Listeria innocua |
| 19 | Listeria monocytogenes |
| 20 | Alkaliphilus metalliredigens |
| 20 | Alkaliphilus oremlandii |
| 20 | Anaerococcus prevotii |
| 20 | Candidatus Arthromitus sp. |
| | SFB-rat-Yit |
| 20 | Clostridium acetobutylicum |
| 20 | Clostridium beijerinckii |
| 20 | Clostridium botulinum |
| 20 | Clostridium kluyveri |
| 20 | Clostridium ljungdahlii |
| 20 | Clostridium novyi |
| 20 | Clostridium perfringens |
| 20 | Clostridium tetani |
| 20 | Desulfitobacterium hafniense |
| 20 | Desulfotomaculum |
| | acetoxidans |
| 20 | Desulfotomaculum ruminis |
| 20 | Eubacterium limosum |
| 20 | Finegoldia magna |
| 20 | Nephroselmis olivacea |
| 20 | Thermincola potens |
| 21 | Arsenophonus nasoniae |
| 21 | Candidatus Moranella endobia |
| 21 | Citrobacter koseri |
| 21 | Citrobacter rodentium |
| 21 | Cronobacter sakazakii |
| 21 | Cronobacter turicensis |
| 21 | Dickeya dadantii |
| 21 | Dickeya zeae |
| 21 | Edwardsiella ictaluri |
| 21 | Edwardsiella tarda |
| 21 | Enterobacter aerogenes |
| 21 | Enterobacter asburiae |
| 21 | Enterobacter cloacae |
| 21 | Enterobacter sp. 638 |
| 21 | Erwinia amylovora |
| 21 | Erwinia billingiae |
| 21 | Erwinia pyrifoliae |
| 21 | Erwinia sp. Ejp617 |
| 21 | Erwinia tasmaniensis |
| 21 | Escherichia coli |
| 21 | Escherichia fergusonii |
| 21 | Ferrimonas balearica |
| 21 | Klebsiella pneumoniae |
| 21 | Klebsiella variicola |
| 21 | Pantoea ananatis |
| 21 | Pantoea sp. At-9b |
| 21 | Pantoea vagans |
| 21 | Pectobacterium atrosepticum |
| 21 | Pectobacterium carotovorum |
| 21 | Pectobacterium wasabiae |
| 21 | Photorhabdus asymbiotica |
| 21 | Photorhabdus luminescens |
| 21 | Proteus mirabilis |
| 21 | Rahnella sp. Y9602 |
| 21 | Salmonella bongori |
| 21 | Salmonella enterica |
| 21 | Serratia marcescens |
| 21 | Serratia proteamaculans |
| 21 | Serratia sp. AS13 |
| 21 | Shigella boydii |
| 21 | Shigella dysenteriae |
| 21 | Shigella flexneri |
| 21 | Shigella sonnei |
| 21 | Sodalis glossinidius |
| 21 | Xenorhabdus bovienii |
| 21 | Xenorhabdus nematophila |
| 21 | Yersinia enterocolitica |
| 21 | Yersinia pestis |
| 21 | Yersinia pseudotuberculosis |
| 21 | synthetic construct |
| 22 | Neisseria gonorrhoeae |
| 22 | Neisseria lactamica |
| 22 | Neisseria meningitidis |
| 23 | Enterococcus faecalis |
| 23 | Enterococcus faecium |
| 23 | Enterococcus sp. 7L76 |
| 24 | Mariner transposase delivery |
| | vector pFA545 |
| 24 | Plasmid pNS1 |
| 24 | Plasmid pT181 |
| 24 | Single-copy integration vector |
| | pLL39 |
| 24 | Single-copy integtation vector |
| | pLL29 |
| 24 | Staphylococcus aureus |
| 24 | Staphylococcus epidermidis |
| 24 | Staphylococcus lentus |
| 25 | Bacteroides fragilis |
| 26 | Yersinia pestis |
| 27 | Yersinia enterocolitica |
| 28 | Enterococcus faecalis |
| 29 | Clostridium perfringens |
| 30 | Escherichia coli |
| 30 | Shigella sonnei |
| 30 | Yersinia pestis |
| 31 | Staphylococcus aureus |
| 31 | Staphylococcus carnosus |
| 31 | Staphylococcus epidermidis |
| 31 | Staphylococcus haemolyticus |
| 31 | Staphylococcus lugdunensis |
| 31 | Staphylococcus saprophyticus |
| 32 | Haemophilus ducreyi |
| 33 | Propionibacterium acnes |
| 34 | Burkholderia ambifaria |
| 34 | Burkholderia cenocepacia |
| 34 | Burkholderia gladioli |
| 34 | Burkholderia glumae |
| 34 | Burkholderia mallei |
| 34 | Burkholderia multivorans |
| 34 | Burkholderia pseudomallei |
| 34 | Burkholderia sp. 383 |
| 34 | Burkholderia thailandensis |
| 34 | Burkholderia vietnamiensis |
| 35 | Campylobacter jejuni |
| 35 | Campylobacter lari |
| 36 | Chlamydia muridarum |
| 36 | Chlamydia trachomatis |
| 36 | Chlamydophila abortus |
| 36 | Chlamydophila caviae |
| 36 | Chlamydophila felis |
| 36 | Chlamydophila pecorum |
| 36 | Chlamydophila pneumoniae |
| 36 | Chlamydophila psittaci |
| 37 | Coraliomargarita akajimensis |
| 37 | Orientia tsutsugamushi |
| 37 | Rickettsia africae |
| 37 | Rickettsia akari |
| 37 | Rickettsia bellii |
| 37 | Rickettsia canadensis |
| 37 | Rickettsia conorii |
| 37 | Rickettsia felis |
| 37 | Rickettsia heilongjiangensis |
| 37 | Rickettsia japonica |
| 37 | Rickettsia massiliae |
| 37 | Rickettsia peacockii |
| 37 | Rickettsia prowazekii |
| 37 | Rickettsia rickettsii |
| 37 | Rickettsia typhi |
| 38 | Cloning vector pKEK1140 |
| 38 | Francisella complementation |
| | plasmid pFNLTP23 |
| 38 | Francisella novicida |
| 38 | Francisella tularensis |
| 38 | Himar1-delivery and |
| | mutagenesis vector |
| | pFNLTP16 H3 |
| 38 | Shuttle vector pXB173-lux |
| 38 | Temperature-sensitive shuttle |
| | vector pFNLTP9 |
| 39 | Listonella anguillarum |
| 39 | Vibrio cholerae |
| 39 | Vibrio furnissii |
| 39 | Vibrio vulnificus |
| 39 | synthetic construct |
| 40 | Brucella abortus |
| 40 | Brucella canis |
| 40 | Brucella melitensis |
| 40 | Brucella microti |
| 40 | Brucella ovis |
| 40 | Brucella pinnipedialis |
| 40 | Brucella suis |
| 40 | Mesorhizobium ciceri |
| 40 | Mesorhizobium loti |
| 40 | Mesorhizobium opportunistum |
| 40 | Ochrobactrum anthropi |
| 41 | Escherichia coli |
| 41 | Klebsiella pneumoniae |
| 41 | Plasmid F |
| 41 | Plasmid R100 |
| 41 | Plasmid R65 |
| 41 | Salmonella enterica |
| 41 | Shigella boydii |
| 41 | Shigella dysenteriae |
| 41 | Shigella flexneri |
| 41 | Shigella sonnei |
| 41 | uncultured bacterium |
| 42 | Klebsiella pneumoniae |
| 42 | Kluyvera intermedia |
| 42 | Plasmid pYVe439-80 |
| 42 | Salmonella enterica |
| 42 | Yersinia enterocolitica |
| 42 | Yersinia pestis |
| 42 | Yersinia pseudotuberculosis |
| 43 | Escherichia coli |
| 43 | Plasmid ColE1 |
| 43 | Shigella boydii |
| 43 | Shigella sonnei |
| 43 | unidentified cloning vector |
| 44 | Campylobacter jejuni |
| 44 | Campylobacter lari |
| 45 | Brucella abortus |
| 45 | Brucella canis |
| 45 | Brucella melitensis |
| 45 | Brucella microti |
| 45 | Brucella ovis |
| 45 | Brucella pinnipedialis |
| 45 | Brucella suis |
| 45 | Ochrobactrum anthropi |
| 46 | Treponema pallidum |
| 46 | Treponema paraluiscuniculi |
| 47 | Clostridium botulinum |
| 48 | Streptococcus agalactiae |
| 48 | Streptococcus dysgalactiae |
| 48 | Streptococcus gallolyticus |
| 48 | Streptococcus gordonii |
| 48 | Streptococcus mitis |
| 48 | Streptococcus mutans |
| 48 | Streptococcus oralis |
| 48 | Streptococcus parauberis |
| 48 | Streptococcus pasteurianus |
| 48 | Streptococcus pneumoniae |
| 48 | Streptococcus |
| | pseudopneumoniae |
| 48 | Streptococcus pyogenes |
| 48 | Streptococcus salivarius |
| 48 | Streptococcus thermophilus |
| 48 | Streptococcus uberis |
| 48 | uncultured bacterium MID12 |
| 49 | Bursa aurealis delivery vector |
| | pBursa |
| 49 | Cloning vector pVLG6 |
| 49 | Expression vector pTSC |
| 49 | Plasmid pE194 |
| 49 | Shuttle vector pASD2 |
| 49 | Staphylococcus aureus |
| 49 | Tn10 delivery vector |
| | pHV1249 |
| 49 | synthetic construct |
| 50 | Chlamydia muridarum |
| 51 | Enterococcus caccae |
| 51 | Enterococcus casseliflavus |
| 51 | Enterococcus durans |
| 51 | Enterococcus faecalis |
| 51 | Enterococcus faecium |
| 51 | Enterococcus haemoperoxidus |
| 51 | Enterococcus hirae |
| 51 | Enterococcus moraviensis |
| 51 | Enterococcus mundtii |
| 51 | Enterococcus plantarum |
| 51 | Enterococcus quebecensis |
| 51 | Enterococcus ratti |
| 51 | Enterococcus silesiacus |
| 51 | Enterococcus sp. 7L76 |
| 51 | Enterococcus termitis |
| 51 | Enterococcus thailandicus |
| 51 | Enterococcus ureasiticus |
| 51 | Enterococcus villorum |
| 51 | Lactobacillus vaginalis |
| 52 | Escherichia coli |
| 52 | Klebsiella pneumoniae |
| 52 | Salmonella enterica |
| 52 | Shigella flexneri |
| 52 | Yersinia pestis |
| 53 | Citrobacter koseri |
| 53 | Enterobacter hormaechei |
| 53 | Escherichia coli |
| 53 | Klebsiella pneumoniae |
| 53 | Photorhabdus asymbiotica |
| 53 | Yersinia pestis |
| 54 | Enterococcus faecium |
| 54 | Macrococcus caseolyticus |
| 54 | Staphylococcus aureus |
| 54 | Staphylococcus epidermidis |
| 55 | Bacteroides fragilis |
| 55 | uncultured bacterium |
| 55 | uncultured organism |
| 56 | Staphylococcus aureus |
| 56 | Staphylococcus chromogenes |
| 56 | Staphylococcus epidermidis |
| 56 | Staphylococcus haemolyticus |
| 56 | Staphylococcus simulans |
| 56 | Staphylococcus sp. |
| 57 | Bacillus anthracis |
| 57 | Bacillus cereus |
| 57 | Bacillus thuringiensis |
| 57 | Bacillus weihenstephanensis |
| 57 | synthetic construct |
| 58 | Plasmid pKYM |
| 58 | Shigella boydii |
| 58 | Shigella sonnei |
| 59 | Listeria grayi |
| 59 | Listeria innocua |
| 59 | Listeria ivanovii |
| 59 | Listeria monocytogenes |
| 59 | Listeria seeligeri |
| 59 | Listeria welshimeri |
| 60 | Staphylococcus aureus |
| 60 | Staphylococcus epidermidis |
| 60 | Staphylococcus haemolyticus |
| 60 | Staphylococcus lugdunensis |
| 60 | Staphylococcus |
| | pseudintermedius |
| 60 | Staphylococcus simulans |
| 60 | Staphylococcus sp. CDC25 |
| 61 | Brucella abortus |
| 61 | Brucella canis |
| 61 | Brucella melitensis |
| 61 | Brucella microti |
| 61 | Brucella ovis |
| 61 | Brucella pinnipedialis |
| 61 | Brucella suis |
| 61 | Ochrobactrum anthropi |
| 62 | Enterococcus faecalis |
| 62 | Enterococcus faecium |
| 62 | Lactobacillus brevis |
| 62 | Lactobacillus fermentum |
| 62 | Lactobacillus plantarum |
| 62 | Lactobacillus rennini |
| 62 | Lactococcus lactis |
| 62 | Leuconostoc mesenteroides |
| 62 | Plasmid pCD4 |
| 62 | Shuttle vector pLES003 |
| 63 | Bacteroides fragilis |
| 63 | Bacteroides helcogenes |
| 63 | Bacteroides thetaiotaomicron |
| 63 | Bacteroides xylanisolvens |
| 64 | Lassa virus |
| 65 | Human papillomavirus type 148 |
| 66 | Camelpox virus |
| 66 | Cowpox virus |
| 66 | Ectromelia virus |
| 66 | Monkeypox virus |
| 66 | Taterapox virus |
| 66 | Vaccinia virus |
| 66 | Variola virus |
| 67 | Seoul virus |
| 68 | California sea lion astrovirus |
| | 11 |
| 68 | Human astrovirus |
| 69 | Guanarito virus |
| 70 | GB virus A |
| 71 | Human rotavirus B219 |
| 71 | Rotavirus B |
| 72 | Antwerp rhinovirus 98/99 |
| 72 | Chimpanzee enterovirus CPS- |
| | 2011 |
| 72 | Coxsackievirus |
| 72 | Enterovirus LaN/98/CH |
| 72 | Enterovirus sp. |
| 72 | Human echovirus AMS573 |
| 72 | Human enterovirus A |
| 72 | Human rhinovirus sp. |
| 72 | Porcine enterovirus B |
| 72 | Simian enterovirus SV19 |
| 72 | Simian picornavirus strain |
| | N125 |
| 72 | uncultured enterovirus |
| 73 | Machupo virus |
| 74 | Machupo virus |
| 75 | Rotavirus A |
| 75 | Rotavirus C |
| 75 | Rotavirus sp. |
| 76 | Human papillomavirus 109 |
| 77 | Rift Valley fever virus |
| 78 | Human herpesvirus 8 |
| 79 | Lassa virus |
| 80 | Human papillomavirus 50 |
| 81 | California encephalitis virus |
| 81 | Marituba virus |
| 82 | Hepatitis GB virus B |
| 82 | synthetic construct |
| 83 | Rift Valley fever virus |
| 84 | Chimeric Dengue virus vector |
| | p4(Delta30)-D2-CME |
| 84 | Chimeric Tick-borne |
| | encephalitis virus/Dengue |
| | virus 4 |
| 84 | Chimeric dengue virus type 1 |
| | vector p4(delta)30-D1L-CME |
| 84 | Dengue virus |
| 85 | Equine rotavirus |
| 85 | Rotavirus A |
| 85 | Rotavirus C |
| 85 | Rotavirus sp. |
| 86 | Rift Valley fever virus |
| 87 | Human papillomavirus 61 |
| 88 | Norwalk virus |
| 89 | Crane hepatitis B virus |
| 89 | Duck hepatitis B virus |
| 89 | Heron hepatitis B virus |
| 89 | Ross's goose hepatitis B virus |
| 89 | Sheldgoose hepatitis B virus |
| 90 | Rotavirus A |
| 91 | Human herpesvirus 4 |
| 92 | Human herpesvirus 2 |
| 93 | Murine norovirus |
| 93 | Norwalk virus |
| 94 | Bat coronavirus BM48- |
| | 31/BGR/2008 |
| 94 | Severe acute respiratory |
| | syndrome-related coronavirus |
| 94 | recombinant SARS |
| | coronavirus |
| 94 | recombinant coronavirus |
| 94 | synthetic construct |
| 95 | Eastern equine encephalitis |
| | virus |
| 96 | Amapari virus |
| 96 | Guanarito virus |
| 97 | Human respiratory syncytial |
| | virus |
| 97 | Respiratory syncytial virus |
| 98 | GB virus A |
| 99 | Feline rotavirus |
| 99 | Rotavirus A |
| 99 | Rotavirus C |
| 100 | AdEasy vector pShuttle |
| 100 | Adenoviral expression vector |
| | Ad-hiNOS |
| 100 | Adenoviral vector Ad-SAR1- |
| | x/ASX |
| 100 | Cloning vector |
| | pdeltaE1sp1A(CMV-GFP) |
| 100 | EGFP expression vector Ad- |
| | EGFP |
| 100 | Homo sapiens |
| 100 | Human adenovirus C |
| 100 | Recombination vector |
| | pAdHTS |
| 100 | Shuttle vector pSC- |
| | R1LambdaR2 |
| 100 | synthetic construct |
| 101 | Human herpesvirus 5 |
| 102 | Human papillomavirus 48 |
| 103 | Human herpesvirus 7 |
| 104 | Human papillomavirus 1 |
| 105 | Human papillomavirus 26 |
| 106 | Bovine enteric calicivirus |
| 106 | Caliciviridae |
| | bovine/DijonA058/05/FR |
| 106 | Caliciviridae |
| | bovine/DijonA386/08/FR |
| 106 | Calicivirus isolate TCG |
| 106 | Calicivirus strain CV23-OH |
| 106 | Newbury-1 virus |
| 107 | Human rotavirus ADRV-N |
| 107 | Rotavirus B |
| 108 | Human papillomavirus 92 |
| 109 | Human papillomavirus 32 |
| 110 | Human herpesvirus 3 |
| 111 | Hendra virus |
| 111 | Nipah virus |
| 112 | European brown hare |
| | syndrome virus |
| 113 | Bat picornavirus 3 |
| 113 | Chimpanzee enterovirus CPS- |
| | 2011 |
| 113 | EIAV-based lentiviral vector |
| 113 | Enterovirus sp. |
| 113 | Human echovirus AMS573 |
| 113 | Human enterovirus D |
| 113 | Human rhinovirus C |
| 113 | Porcine enterovirus B |
| 113 | Simian enterovirus SV19 |
| 113 | synthetic construct |
| 113 | uncultured enterovirus |
| 114 | Hantavirus Yakeshi-Mm-59 |
| 114 | Khabarovsk virus |
| 115 | California encephalitis virus |
| 116 | Rotavirus A |
| 117 | Measles virus |
| 118 | Lymphocytic choriomeningitis |
| | virus |
| 119 | Lassa virus |
| 120 | Kyasanur forest disease virus |
| 121 | Human papillomavirus 54 |
| 122 | Hepatitis C virus |
| 122 | synthetic construct |
| 123 | Human papillomavirus 63 |
| 124 | GB virus C |
| 125 | Hantaan virus |
| 126 | Human papillomavirus 60 |
| 127 | Human papillomavirus 16 |
| 128 | Crimean-Congo hemorrhagic |
| | fever virus |
| 129 | Rotavirus A |
| 130 | Rotavirus A |
| 131 | Reston ebolavirus |
| 132 | Human herpesvirus 6 |
| 133 | Norwalk virus |
| 134 | Homo sapiens |
| 134 | Human papillomavirus 18 |
| 135 | Sapporo virus |
| 136 | Rotavirus A |
| 136 | Rotavirus C |
| 137 | Human papillomavirus 7 |
| 138 | Hantavirus CGRn8316 |
| 138 | Hantavirus CGRn9415 |
| 138 | Seoul virus |
| 139 | Human papillomavirus type |
| | 128 |
| 140 | El Moro Canyon virus |
| 140 | Playa de Oro hantavirus |
| 140 | Prairie vole hantavirus |
| 140 | Rio Segundo virus |
| 141 | Rotavirus A |
| 141 | Rotavirus sp. |
| 142 | California encephalitis virus |
| 143 | Chikungunya virus |
| 143 | Cloning vector pCHIK-LR |
| | 5′GFP |
| 143 | O'nyong-nyong virus |
| 145 | Rotavirus A |
| 145 | Rotavirus sp. |
| 146 | Sapporo virus |
| 147 | Human papillomavirus 116 |
| 148 | Human papillomavirus 18 |
| 149 | Duck hepatitis A virus |
| 150 | Human papillomavirus 26 |
| 151 | Rotavirus A |
| 152 | St-Valerien swine virus |
| 153 | Rotavirus A |
| 154 | Human papillomavirus 2 |
| 155 | Human papillomavirus 34 |
| 156 | Rotavirus A |
| 156 | Rotavirus C |
| 157 | Zaire ebolavirus |
| 158 | Crimean-Congo hemorrhagic |
| | fever virus |
| 159 | Feline rotavirus |
| 159 | Rotavirus A |
| 160 | Rotavirus A |
| 161 | Lymphocytic choriomeningitis |
| | virus |
| 162 | Lake Victoria marburgvirus |
| 163 | Rotavirus A |
| 163 | Rotavirus sp. |
| 164 | Rotavirus A |
| 165 | Hepatitis A virus |
| 166 | Human papillomavirus 6 |
| 167 | Rotavirus A |
| 168 | Human papillomavirus 10 |
| 169 | Human papillomavirus 112 |
| 170 | Rotavirus A |
| 171 | Bagaza virus |
| 171 | Koutango virus |
| 171 | St. Louis encephalitis virus |
| 172 | Sapporo virus |
| 173 | Colobus monkey |
| | papillomavirus |
| 173 | Human papillomavirus 5 |
| 174 | Feline rotavirus |
| 174 | Rotavirus A |
| 174 | Rotavirus C |
| 175 | Human papillomavirus type |
| | 134 |
| 176 | Rotavirus A |
| 176 | Rotavirus sp. |
| 177 | Human papillomavirus 109 |
| 178 | Japanese encephalitis virus |
| 178 | Murray Valley encephalitis |
| | virus |
| 178 | Usutu virus |
| 178 | West Nile virus |
| 178 | synthetic construct |
| 179 | Mopeia Lassa reassortant 29 |
| 179 | Mopeia virus |
| 180 | Human papillomavirus 7 |
| 181 | Human papillomavirus 18 |
| 182 | Rotavirus A |
| 183 | Murine rotavirus |
| 183 | Rotavirus A |
| 183 | Rotavirus C |
| 184 | Norwalk virus |
| 185 | Crimean-Congo hemorrhagic |
| | fever virus |
| 186 | Feline rotavirus |
| 186 | Rotavirus A |
| 186 | Rotavirus C |
| 187 | Equine rotavirus |
| 187 | Rotavirus A |
| 187 | Rotavirus C |
| 188 | New York virus |
| 188 | Sin Nombre virus |
| 189 | Crimean-Congo hemorrhagic |
| | fever virus |
| 190 | Rotavirus A |
| 190 | Rotavirus C |
| 192 | Chimpanzee enterovirus CPS- |
| | 2011 |
| 192 | EIAV-based lentiviral vector |
| 192 | Enterovirus sp. |
| 192 | Human echovirus AMS573 |
| 192 | Human enterovirus A |
| 192 | Human rhinovirus C |
| 192 | Porcine enterovirus B |
| 192 | synthetic construct |
| 192 | uncultured enterovirus |
| 193 | Human immunodeficiency |
| | virus 2 |
| 193 | SIV vector pCLN8 |
| 193 | Simian immunodeficiency |
| | virus |
| 193 | Simian-Human |
| | immunodeficiency virus |
| 193 | synthetic construct |
| 194 | Bundibugyo ebolavirus |
| 195 | Human papillomavirus 121 |
| 196 | Rabbit vesivirus |
| 196 | Steller sea lion vesivirus |
| 196 | Vesicular exanthema of swine |
| | virus |
| 196 | Walrus calicivirus |
| 197 | Alto Paraguay hantavirus |
| 197 | Andes virus |
| 197 | Araucaria virus |
| 197 | Black Creek Canal virus |
| 197 | Catacamas virus |
| 197 | Hantavirus Akomo/RPR/07- |
| | 10028/BRA/2006 |
| 197 | Hantavirus Case Itapua |
| 197 | Hantavirus HMT 08-02 |
| 197 | Hantavirus Monongahela-1 |
| 197 | Hantavirus Olini/RPR/07- |
| | 10091/BRA/2007 |
| 197 | Hantavirus Oln6469 |
| 197 | Hantavirus Oln6470 |
| 197 | Hantavirus Oxyju/RPR/07- |
| | 10056/BRA/2006 |
| 197 | Hantavirus sp. |
| 197 | Hantavirus strain Oln8057 |
| 197 | Huitzilac virus |
| 197 | Itapua hantavirus |
| 197 | Juquitiba virus |
| 197 | Laguna Negra virus |
| 197 | Limestone Canyon virus |
| 197 | Montano virus |
| 197 | Newfound Gap hantavirus |
| 197 | Rio Mamore virus |
| 197 | Sin Nombre virus |
| 198 | Rotavirus A |
| 199 | Human papillomavirus 5 |
| 200 | GB virus A |
| 201 | Equine rotavirus |
| 201 | Feline rotavirus |
| 201 | Rotavirus A |
| 201 | Rotavirus C |
| 201 | Rotavirus sp. |
| 202 | Lymphocytic choriomeningitis |
| | virus |
| 203 | Human papillomavirus 16 |
| 204 | Human papillomavirus 4 |
| 205 | Rotavirus A |
| 206 | Lassa virus |
| 207 | Feline calicivirus |
| 208 | Human papillomavirus 16 |
| 209 | Junin virus |
| 210 | Crimean-Congo hemorrhagic |
| | fever virus |
| 211 | Human norovirus Saitama |
| 211 | Minireovirus |
| 211 | Norwalk virus |
| 211 | Swine norovirus |
| 212 | Equine rotavirus |
| 212 | Rotavirus A |
| 212 | Rotavirus C |
| 213 | Andes virus |
| 213 | Araucaria virus |
| 213 | Cano Delgadito virus |
| 213 | Hantavirus 2036 Biritiba |
| | Mirim |
| 213 | Hantavirus 2062 Biritiba |
| | Mirim |
| 213 | Hantavirus 2063 Biritiba |
| | Mirim |
| 213 | Hantavirus 2066 Biritiba |
| | Mirim |
| 213 | Hantavirus 2070 Biritiba |
| | Mirim |
| 213 | Hantavirus 2071 Biritiba |
| | Mirim |
| 213 | Hantavirus 2072 Biritiba |
| | Mirim |
| 213 | Hantavirus 2306 Biritiba |
| | Mirim |
| 213 | Hantavirus 2336 Biritiba |
| | Mirim |
| 213 | Hantavirus Monongahela-1 |
| 213 | Hantavirus R11 |
| 213 | Hantavirus R34 |
| 213 | Hantavirus sp. Paranoa |
| 213 | Juquitiba virus |
| 213 | Muleshoe virus |
| 213 | New York virus |
| 213 | Newfound Gap hantavirus |
| 213 | Playa de Oro hantavirus |
| 213 | Rio Mamore virus |
| 213 | Sin Nombre virus |
| 214 | Rotavirus A |
| 214 | Rotavirus B |
| 214 | Rotavirus C |
| 214 | Rotavirus sp. |
| 215 | Sapporo virus |
| 216 | Amur virus |
| 216 | Hantaan virus |
| 216 | Hantavirus A9 |
| 216 | Hantavirus CGRn8316 |
| 216 | Hantavirus CGRn9415 |
| 216 | Hantavirus HTN |
| 216 | Hantavirus KY |
| 216 | Hantavirus Liu |
| 216 | Hantavirus XAHu09011 |
| 216 | Hantavirus XAHu09027 |
| 216 | Hantavirus XAHu09041 |
| 216 | Hantavirus XAHu09047 |
| 216 | Hantavirus XAHu09066 |
| 216 | Hantavirus Z10 |
| 216 | Hantavirus Z5 |
| 216 | Soochong virus |
| 217 | Lake Victoria marburgvirus |
| 218 | Dandenong virus |
| 218 | Lymphocytic choriomeningitis |
| | virus |
| 218 | synthetic construct |
| 219 | Bovine respiratory syncytial |
| | virus |
| 219 | Human respiratory syncytial |
| | virus |
| 219 | Respiratory syncytial virus |
| 220 | Japanese encephalitis virus |
| 220 | Koutango virus |
| 220 | Usutu virus |
| 220 | West Nile virus |
| 220 | synthetic construct |
| 221 | Eastern equine encephalitis |
| | virus |
| 221 | Western equine |
| | encephalomyelitis virus |
| 222 | Rotavirus A |
| 224 | Human papillomavirus 18 |
| 225 | Human papillomavirus type |
| | 131 |
| 226 | Human papillomavirus 49 |
| 227 | Murine rotavirus |
| 227 | Rotavirus A |
| 227 | Rotavirus sp. |
| 228 | Rotavirus A |
| 229 | Human papillomavirus 101 |
| 230 | Rotavirus A |
| 231 | Lymphocytic choriomeningitis |
| | virus |
| 232 | Duck hepatitis B virus |
| 232 | Ground squirrel hepatitis virus |
| 232 | Hepatitis B virus |
| 232 | Homo sapiens |
| 232 | Woodchuck hepatitis virus |
| 232 | synthetic construct |
| 232 | uncultured organism |
| 233 | Hepatitis C virus |
| 233 | synthetic construct |
| 234 | Rotavirus A |
| 235 | Rabbit calicivirus Australia 1 |
| | MIC-07 |
| 235 | Rabbit hemorrhagic disease |
| | virus |
| 236 | Human norovirus Saitama |
| 236 | Norwalk virus |
| 237 | Feline rotavirus |
| 237 | Rotavirus A |
| 237 | Rotavirus C |
| 238 | Rotavirus A |
| 239 | Equine rotavirus |
| 239 | Feline rotavirus |
| 239 | Rotavirus A |
| 239 | Rotavirus C |
| 239 | Rotavirus sp. |
| 240 | Rotavirus A |
| 241 | Rotavirus A |
| 242 | Rotavirus A |
| 243 | Rotavirus A |
| 244 | Feline rotavirus |
| 244 | Rotavirus A |
| 244 | Rotavirus sp. |
| 245 | Duck hepatitis B virus |
| 245 | Expression vector pMCG50-S |
| 245 | Ground squirrel hepatitis virus |
| 245 | Hepatitis B virus |
| 245 | Homo sapiens |
| 245 | synthetic construct |
| 246 | El Moro Canyon virus |
| 247 | Murine rotavirus |
| 247 | Rotavirus A |
| 247 | Rotavirus C |
| 247 | Rotavirus sp. |
| 248 | Equine rotavirus |
| 248 | Feline rotavirus |
| 248 | Proteus vulgaris |
| 248 | Rotavirus A |
| 248 | Rotavirus C |
| 248 | Rotavirus sp. |
| 249 | VEEV replicon vector YFV- |
| | C3opt |
| 249 | Venezuelan equine |
| | encephalitis virus |
| 250 | Crimean-Congo hemorrhagic |
| | fever virus |
| 251 | Equine rotavirus |
| 251 | Feline rotavirus |
| 251 | Rotavirus A |
| 251 | Rotavirus B |
| 251 | Rotavirus C |
| 251 | Rotavirus sp. |
| 252 | Rotavirus A |
| 252 | Rotavirus sp. |
| 253 | Vesicular exanthema of swine |
| | virus |
| 254 | Liao ning virus |
| 255 | Amur virus |
| 255 | Hantaan virus |
| 255 | Hantavirus A9 |
| 255 | Hantavirus AH09 |
| 255 | Hantavirus AH211 |
| 255 | Hantavirus CGRn8316 |
| 255 | Hantavirus CGRn9415 |
| 255 | Hantavirus HTN |
| 255 | Hantavirus KY |
| 255 | Hantavirus Liu |
| 255 | Hantavirus XAHu09011 |
| 255 | Hantavirus XAHu09027 |
| 255 | Hantavirus XAHu09041 |
| 255 | Hantavirus XAHu09047 |
| 255 | Hantavirus XAHu09066 |
| 255 | Hantavirus Z10 |
| 255 | Hantavirus Z5 |
| 255 | Soochong virus |
| 256 | Norwalk virus |
| 257 | BK polyomavirus |
| 257 | JC polyomavirus |
| 257 | Simian agent 12 |
| 257 | Simian virus 12 |
| 258 | Feline rotavirus |
| 258 | Rotavirus A |
| 259 | Dengue virus |
| 260 | Rotavirus A |
| 260 | Rotavirus sp. |
| 261 | Lassa virus |
| 262 | Feline rotavirus |
| 262 | Murine rotavirus |
| 262 | Rotavirus A |
| 263 | Human papillomavirus 9 |
| 264 | Cloning vector p119L1e |
| 264 | Homo sapiens |
| 264 | Human papillomavirus 16 |
| 264 | synthetic construct |
| 265 | Crimean-Congo hemorrhagic |
| | fever virus |
| 266 | Lassa virus |
| 266 | Mopeia Lassa reassortant 29 |
| 267 | Crimean-Congo hemorrhagic |
| | fever virus |
| 269 | Chimpanzee enterovirus CPS- |
| | 2011 |
| 269 | EIAV-based lentiviral vector |
| 269 | Enterovirus sp. |
| 269 | Human echovirus AMS573 |
| 269 | Human enterovirus C |
| 269 | Human rhinovirus sp. |
| 269 | Porcine enterovirus B |
| 269 | Simian enterovirus SV6 |
| 269 | Simian picornavirus strain |
| | N125 |
| 269 | synthetic construct |
| 269 | uncultured enterovirus |
| 270 | Feline rotavirus |
| 270 | Rotavirus A |
| 271 | Aids-associated retrovirus |
| 271 | HIV whole-genome vector |
| | AA1305#18 |
| 271 | HIV-1 vector pNL4-3 |
| 271 | Human immunodeficiency |
| | virus 1 |
| 271 | Simian immunodeficiency |
| | virus |
| 271 | synthetic construct |
| 272 | Lassa virus |
| 272 | Mopeia Lassa reassortant 29 |
| 273 | Rotavirus A |
| 274 | Human papillomavirus 61 |
| 275 | Human papillomavirus 61 |
| 276 | Rotavirus A |
| 277 | Equine rotavirus |
| 277 | Rotavirus A |
| 277 | Rotavirus C |
| 277 | Rotavirus sp. |
| 278 | Human norovirus Saitama |
| 278 | Norwalk virus |
| 279 | Human papillomavirus 9 |
| 280 | Feline rotavirus |
| 280 | Murine rotavirus |
| 280 | Rotavirus A |
| 280 | Rotavirus B |
| 280 | Rotavirus C |
| 280 | Rotavirus sp. |
| 281 | Rotavirus A |
| 281 | Rotavirus sp. |
| 282 | Equine rotavirus |
| 282 | Rotavirus A |
| 282 | Rotavirus C |
| 282 | Rotavirus sp. |
| 283 | Rabies virus |
| 283 | Rabies virus-derived |
| | expression vector cSPBN- |
| | 4GFP |
| 284 | Human papillomavirus 5 |
| 285 | Hantaan virus |
| 285 | Hantavirus A9 |
| 285 | Hantavirus KY |
| 285 | Hantavirus Z10 |
| 286 | Human papillomavirus 9 |
| 286 | Macaca fascicularis |
| | papillomavirus |
| 287 | Homo sapiens |
| 287 | Human papillomavirus 18 |
| 288 | Rotavirus A |
| 288 | Rotavirus sp. |
| 289 | Human papillomavirus 90 |
| 290 | Hepatitis C virus |
| 290 | synthetic construct |
| 291 | Japanese encephalitis virus |
| 291 | Koutango virus |
| 291 | West Nile virus |
| 291 | synthetic construct |
| 292 | Equine rotavirus |
| 292 | Feline rotavirus |
| 292 | Rotavirus A |
| 292 | Rotavirus B |
| 292 | Rotavirus C |
| 292 | Rotavirus sp. |
| 293 | Calicivirus isolate 2117 |
| 293 | Canine calicivirus |
| 295 | Human papillomavirus 61 |
| 296 | Russian Spring-Summer |
| | encephalitis virus |
| 296 | Tick-borne encephalitis virus |
| 297 | Hepatitis C virus |
| 297 | synthetic construct |
| 298 | Andes virus |
| 298 | Araucaria virus |
| 298 | Bayou virus |
| 298 | Black Creek Canal virus |
| 298 | Carrizal virus |
| 298 | Catacamas virus |
| 298 | El Moro Canyon virus |
| 298 | Hantavirus Akomo/RPR/07- |
| | 10028/BRA/2006 |
| 298 | Hantavirus Case Itapua |
| 298 | Hantavirus HMT 08-02 |
| 298 | Hantavirus Monongahela-1 |
| 298 | Hantavirus Olini/RPR/07- |
| | 10091/BRA/2007 |
| 298 | Hantavirus Oln6469 |
| 298 | Hantavirus Oln6470 |
| 298 | Hantavirus Oxyju/RPR/07- |
| | 10056/BRA/2006 |
| 298 | Hantavirus YN06-862 |
| 298 | Hantavirus sp. |
| 298 | Hantavirus strain Oln8057 |
| 298 | Huitzilac virus |
| 298 | Itapua hantavirus |
| 298 | Juquitiba virus |
| 298 | Laguna Negra virus |
| 298 | Limestone Canyon virus |
| 298 | Montano virus |
| 298 | Muleshoe virus |
| 298 | New York virus |
| 298 | Newfound Gap hantavirus |
| 298 | Playa de Oro hantavirus |
| 298 | Rio Mamore virus |
| 298 | Rio Segundo virus |
| 298 | Sin Nombre virus |
| 298 | Tula virus |
| 299 | Rotavirus A |
| 299 | Rotavirus C |
| 300 | Lassa virus |
| 300 | Mopeia Lassa reassortant 29 |
| 301 | Hepatitis C virus |
| 301 | synthetic construct |
| 302 | Norwalk virus |
| 302 | Sapporo virus |
| 303 | Human papillomavirus 101 |
| 304 | Eastern equine encephalitis |
| | virus |
| 304 | Fort Morgan virus |
| 304 | Highlands J virus |
| 304 | VEEV replicon vector YFV- |
| | C3opt |
| 304 | Venezuelan equine |
| | encephalitis virus |
| 304 | Western equine |
| | encephalomyelitis virus |
| 305 | YFV replicon vector prME- |
| | def |
| 305 | Yellow fever virus |
| 306 | Equine rotavirus |
| 306 | Feline rotavirus |
| 306 | Rotavirus A |
| 306 | Rotavirus B |
| 306 | Rotavirus C |
| 306 | Rotavirus sp. |
| 307 | Homo sapiens |
| 307 | Human papillomavirus 53 |
| 308 | Hantaan virus |
| 308 | Hantavirus AH09 |
| 308 | Hantavirus KY |
| 309 | Human papillomavirus type |
| | 129 |
| 310 | Sapporo virus |
| 311 | Hantavirus Fusong-Mf-682 |
| 311 | Hantavirus Fusong-Mf-731 |
| 311 | Hantavirus Shenyang-Mf-136 |
| 311 | Hantavirus Yakeshi-Mm-182 |
| 311 | Hantavirus Yakeshi-Mm-31 |
| 311 | Hantavirus Yakeshi-Mm-59 |
| 311 | Hantavirus Yuanjiang-Mf-13 |
| 311 | Hantavirus Yuanjiang-Mf-15 |
| 311 | Hantavirus Yuanjiang-Mf-21 |
| 311 | Hantavirus Yuanjiang-Mf-78 |
| 311 | Hantavirus sp. |
| 311 | Isla Vista virus |
| 311 | Khabarovsk virus |
| 311 | Malacky virus |
| 311 | Prospect Hill virus |
| 311 | Puumala virus |
| 311 | Topografov virus |
| 311 | Tula virus |
| 312 | Feline rotavirus |
| 312 | Rotavirus A |
| 312 | Rotavirus sp. |
| 313 | Equine rotavirus |
| 313 | Feline rotavirus |
| 313 | Rotavirus A |
| 313 | Rotavirus sp. |
| 314 | Rotavirus A |
| 314 | Rotavirus sp. |
| 315 | Feline rotavirus |
| 315 | Rotavirus A |
| 315 | Rotavirus sp. |
| 316 | Human papillomavirus 5 |
| 317 | Feline rotavirus |
| 317 | Rotavirus A |
| 317 | Rotavirus C |
| 317 | Rotavirus sp. |
| 317 | synthetic construct |
| 318 | Feline rotavirus |
| 318 | Human rotavirus HRUKM I |
| 318 | Rotavirus A |
| 318 | Rotavirus C |
| 318 | Rotavirus sp. |
| 318 | synthetic construct |
| 319 | Rotavirus A |
| 320 | Rotavirus A |
| 320 | Rotavirus sp. |
| 321 | Rotavirus A |
| 322 | Human papillomavirus 96 |
| 323 | Rotavirus A |
| 324 | Rotavirus A |
| 324 | Rotavirus C |
| 325 | Rotavirus A |
| 325 | Rotavirus sp. |
| 326 | Human immunodeficiency |
| | virus 1 |
| 326 | Simian immunodeficiency |
| | virus |
| 327 | Rotavirus A |
| 328 | Duck hepatitis A virus |
| 329 | Hantaan virus |
| 329 | Hantavirus KY |
| 329 | Hantavirus Thailand 741 |
| 329 | Seoul virus |
| 329 | Thailand virus |
| 330 | Lymphocytic choriomeningitis |
| | virus |
| 331 | Equine rotavirus |
| 331 | Murine rotavirus |
| 331 | Proteus vulgaris |
| 331 | Rotavirus A |
| 331 | Rotavirus C |
| 331 | Rotavirus sp. |
| 332 | Eyach virus |
| 333 | Lymphocytic choriomeningitis |
| | virus |
| 334 | Rotavirus A |
| 335 | Crimean-Congo hemorrhagic |
| | fever virus |
| 336 | Equine rotavirus |
| 336 | Rotavirus A |
| 337 | Hantavirus Yakeshi-Mm-182 |
| 337 | Hantavirus Yakeshi-Mm-31 |
| 337 | Hantavirus Yakeshi-Mm-59 |
| 337 | Hantavirus sp. |
| 337 | Isla Vista virus |
| 337 | Khabarovsk virus |
| 337 | Malacky virus |
| 337 | Prairie vole hantavirus |
| 337 | Prospect Hill virus |
| 337 | Puumala virus |
| 337 | Topografov virus |
| 337 | Tula virus |
| 338 | Omsk hemorrhagic fever virus |
| 338 | Tick-borne encephalitis virus |
| 339 | Lymphocytic choriomeningitis |
| | virus |
| 339 | synthetic construct |
| 340 | Feline rotavirus |
| 340 | Rotavirus A |
| 340 | Rotavirus C |
| 340 | Rotavirus sp. |
| 341 | Human papillomavirus 90 |
| 342 | Amur virus |
| 342 | Hantaan virus |
| 342 | Hantavirus KY |
| 342 | Hantavirus XAHu09011 |
| 342 | Hantavirus XAHu09027 |
| 342 | Hantavirus XAHu09066 |
| 342 | Hantavirus Z10 |
| 342 | Puumala virus |
| 342 | Seoul virus |
| 342 | Tula virus |
| 343 | Equine rotavirus |
| 343 | Feline rotavirus |
| 343 | Murine rotavirus |
| 343 | Rotavirus A |
| 343 | Rotavirus C |
| 343 | Rotavirus sp. |
| 343 | Shuttle vector pMV361- |
| | Edim6 |
| 345 | Rotavirus A |
| 346 | Norwalk virus |
| 347 | Rotavirus A |
| 348 | Human papillomavirus 5 |
| 349 | Langat virus |
| 349 | Louping ill virus |
| 349 | Omsk hemorrhagic fever virus |
| 349 | Royal Farm virus |
| 349 | Tick-borne encephalitis virus |
| 350 | Rotavirus A |
| 351 | Rotavirus A |
| 352 | California encephalitis virus |
| 353 | Sapporo virus |
| 354 | Amur virus |
| 354 | Hantaan virus |
| 354 | Hantavirus KY |
| 354 | Hantavirus Liu |
| 354 | Hantavirus Z10 |
| 354 | Soochong virus |
| 355 | Rotavirus A |
| 356 | Cloning vector pDBR |
| 356 | HIV whole-genome vector |
| | AA1305#18 |
| 356 | HIV-1 vector pNL4-3 |
| 356 | Human immunodeficiency |
| | virus 1 |
| 356 | Lentiviral transfer vector |
| | pFTM3GW |
| 356 | Lentivirus shuttle vector |
| | pLV.FLPe |
| 356 | Self-inactivating lentivirus |
| | vector pLV.C-EF1a.cyt- |
| | bGal.dCpG |
| 356 | Shuttle vector |
| | pLV.hMyoD.eGFP |
| 356 | Simian immunodeficiency |
| | virus |
| 356 | Simian-Human |
| | immunodeficiency virus |
| 356 | synthetic construct |
| 357 | Amur virus |
| 357 | Hantaan virus |
| 357 | Hantavirus A9 |
| 357 | Hantavirus CGRn8316 |
| 357 | Hantavirus CGRn9415 |
| 357 | Hantavirus HTN |
| 357 | Hantavirus KY |
| 357 | Hantavirus Liu |
| 357 | Hantavirus XAHu09011 |
| 357 | Hantavirus XAHu09027 |
| 357 | Hantavirus XAHu09041 |
| 357 | Hantavirus XAHu09047 |
| 357 | Hantavirus XAHu09066 |
| 357 | Hantavirus Z10 |
| 357 | Hantavirus Z5 |
| 357 | Seoul virus |
| 357 | Soochong virus |
| 358 | Rotavirus A |
| 358 | Rotavirus sp. |
| 359 | Rotavirus A |
| 359 | Rotavirus sp. |
| 360 | GB virus A |
| 361 | Rotavirus A |
| 362 | Influenza C virus |
| 363 | Influenza B virus |
| 364 | Influenza A virus |
| 365 | Dhori virus |
| 366 | Influenza C virus |
| 367 | Influenza A virus |
| 368 | Thogoto virus |
| 369 | Dhori virus |
| 370 | Influenza B virus |
| 371 | Influenza C virus |
| 372 | Infectious salmon anemia |
| | virus |
| 373 | Influenza A virus |
| 374 | Influenza C virus |
| 375 | Influenza A virus |
| 376 | Expression vector |
| | pPICK9KH1N1HA |
| 376 | Influenza A virus |
| 376 | unidentified influenza virus |
| 377 | Influenza A virus |
| 378 | Influenza A virus |
| 379 | Infectious salmon anemia |
| | virus |
| 380 | Influenza A virus |
| 380 | unidentified influenza virus |
| 381 | Influenza A virus |
| 382 | Influenza A virus |
| 383 | Influenza A virus |
| 383 | unidentified influenza virus |
| 384 | Influenza A virus |
| 385 | Influenza A virus |
| 386 | Influenza A virus |
| 387 | Influenza A virus |
| 387 | unidentified influenza virus |
| 388 | Influenza A virus |
| 389 | Influenza A virus |
| 390 | Influenza A virus |
| 391 | Influenza C virus |
| 392 | Influenza A virus |
| 393 | Influenza A virus |
| 393 | synthetic construct |
| 394 | Infectious salmon anemia |
| | virus |
| 395 | Infectious salmon anemia |
| | virus |
| 396 | Influenza A virus |
| 397 | Influenza A virus |
| 398 | Influenza A virus |
| 399 | Expression vector |
| | pPICK9KH1N1HA |
| 399 | Influenza A virus |
| 399 | unidentified influenza virus |
| 400 | Dicistronic cloning vector |
| | pXL-Id |
| 400 | Fowl plague virus |
| 400 | Influenza A virus |
| 400 | unidentified influenza virus |
| 401 | Influenza A virus |
| 402 | Influenza A virus |
| 403 | Influenza A virus |
| 404 | Influenza A virus |
| 405 | Influenza A virus |
| 406 | Influenza A virus |
| 406 | unidentified influenza virus |
| 407 | Influenza A virus |
| 407 | Influenza B virus |
| 407 | synthetic construct |
| 407 | unidentified influenza virus |
| 408 | Influenza A virus |
| 409 | Influenza A virus |
| 410 | Influenza A virus |
| 411 | Influenza A virus |
| 411 | unidentified influenza virus |
| 412 | Influenza A virus |
| 413 | Influenza A virus |
| 414 | Influenza A virus |
| 415 | Influenza A virus |
| 416 | Fowl plague virus |
| 416 | Influenza A virus |
| 417 | Influenza A virus |
| 418 | Dicistronic cloning vector |
| | pXL-Id |
| 418 | Fowl plague virus |
| 418 | Influenza A virus |
| 418 | unidentified influenza virus |
| 419 | Influenza A virus |
| 420 | Influenza B virus |
| 421 | Infectious salmon anemia |
| | virus |
| 422 | Infectious salmon anemia |
| | virus |
| 423 | Influenza A virus |
| 423 | unidentified influenza virus |
| 424 | Infectious salmon anemia |
| | virus |
| 425 | Influenza A virus |
| 425 | unidentified influenza virus |
| 426 | Thogoto virus |
| 427 | Influenza A virus |
| 428 | Influenza B virus |
| 429 | Influenza A virus |
| 429 | unidentified influenza virus |
| 430 | Influenza A virus |
| 431 | Influenza C virus |
| 432 | Infectious salmon anemia |
| | virus |
| 433 | Influenza A virus |
| 433 | Influenza B virus |
| 434 | Influenza A virus |
| 435 | Influenza A virus |
| 435 | synthetic construct |
| 436 | Influenza A virus |
| 436 | synthetic construct |
| 437 | Influenza A virus |
| 438 | Influenza A virus |
| 438 | unidentified influenza virus |
| 439 | Influenza A virus |
| 439 | unidentified influenza virus |
| 440 | Influenza A virus |
| 440 | unidentified influenza virus |
| 441 | Influenza A virus |
| 442 | Influenza A virus |
| 443 | Influenza A virus |
| 443 | unidentified influenza virus |
| 444 | Influenza A virus |
| 445 | Influenza A virus |

[0225] Over a range of 133,263, table 11 shows a correspondence between probes having SEQ ID NO's 446-133,263 and a family of species that can be detected.

TABLE 11
Families of bacterial, viral, and flu species which can be detected
by probes corresponding to SEQ ID NO's 1-133, 263.

| Family | Start_SEQ_ID_NO | End_SEQ_ID_NO |
|---|---|---|
| Acetobacteraceae | 446 | 522 |
| Acholeplasmataceae | 523 | 550 |
| Aeromonadaceae | 551 | 580 |
| Alcaligenaceae | 581 | 778 |
| Anaplasmataceae | 779 | 816 |
| Bacillaceae | 817 | 1207 |
| Bacteroidaceae | 1208 | 1264 |
| Bartonellaceae | 1265 | 1279 |
| Bdellovibrionaceae | 1280 | 1430 |
| Bifidobacteriaceae | 1431 | 1460 |
| Bradyrhizobiaceae | 1461 | 1725 |
| Brevibacteriaceae | 1726 | 1740 |
| Brucellaceae | 1741 | 1769 |
| Burkholderiaceae | 1770 | 1991 |
| Campylobacteraceae | 1992 | 2031 |
| Cardiobacteriaceae | 2032 | 2046 |
| Caulobacteraceae | 2047 | 2061 |
| Cellulomonadaceae | 2062 | 2086 |
| Chlamydiaceae | 2087 | 2156 |
| Clostridiaceae | 2157 | 2357 |
| Comamonadaceae | 2358 | 2442 |
| Corynebacteriaceae | 2443 | 2612 |
| Coxiellaceae | 2613 | 2657 |
| Enterobacteriaceae | 2658 | 2992 |
| Enterococcaceae | 2993 | 3033 |
| Francisellaceae | 3034 | 3061 |
| Fusobacteriaceae | 3062 | 3076 |
| Gordoniaceae | 3077 | 3091 |
| Halomonadaceae | 3092 | 3106 |
| Helicobacteraceae | 3107 | 3203 |
| Lachnospiraceae | 3204 | 3218 |
| Lactobacillaceae | 3219 | 3434 |
| Legionellaceae | 3435 | 3475 |
| Leptospiraceae | 3476 | 3500 |
| Leuconostocaceae | 3501 | 3541 |
| Listeriaceae | 3542 | 3709 |
| Micrococcaceae | 3710 | 3739 |
| Moraxellaceae | 3740 | 3802 |
| Mycobacteriaceae | 3803 | 4016 |
| Mycoplasmataceae | 4017 | 4175 |
| Neisseriaceae | 4176 | 4200 |
| Nocardiaceae | 4201 | 4250 |
| Oxalobacteraceae | 4251 | 4265 |
| Parachlamydiaceae | 4266 | 4280 |
| Pasteurellaceae | 4281 | 4373 |
| Peptococcaceae | 4374 | 4432 |
| Piscirickettsiaceae | 4433 | 4447 |
| Pseudomonadaceae | 4448 | 4545 |
| Rickettsiaceae | 4546 | 4649 |
| Staphylococcaceae | 4650 | 4823 |
| Streptococcaceae | 4824 | 5053 |
| Vibrionaceae | 5054 | 5183 |
| Spirochaetaceae | 5184 | 5402 |
| Porphyromonadaceae | 5403 | 5431 |
| Prevotellaceae | 5432 | 5446 |
| Propionibacteriaceae | 5447 | 5460 |
| Streptomycetaceae | 5461 | 5722 |
| Adenoviridae | 5723 | 5808 |
| Alloherpesviridae | 5809 | 5823 |
| Anelloviridae | 5824 | 5972 |
| Arenaviridae | 5973 | 6303 |
| Arteriviridae | 6304 | 6353 |
| Asfarviridae | 6354 | 6359 |
| Astroviridae | 6360 | 6447 |
| Birnaviridae | 6448 | 6525 |
| Bornaviridae | 6526 | 6532 |
| Bunyaviridae | 6533 | 7290 |
| Caliciviridae | 7291 | 7553 |
| Circoviridae | 7554 | 7688 |
| Coronaviridae | 7689 | 7797 |
| Filoviridae | 7798 | 7827 |
| Flaviviridae | 7828 | 8476 |
| Hepadnaviridae | 8477 | 8607 |
| Hepeviridae | 8608 | 8770 |
| Herpesviridae | 8771 | 8921 |
| Iridoviridae | 8922 | 8950 |
| Nodaviridae | 8951 | 9020 |
| Orthomyxoviridae | 9021 | 10206 |
| Papillomaviridae | 10207 | 10690 |
| Paramyxoviridae | 10691 | 10980 |
| Parvoviridae | 10981 | 11127 |
| Picobirnaviridae | 11128 | 11134 |
| Picornaviridae | 11135 | 12036 |
| Polyomaviridae | 12037 | 12104 |
| Poxviridae | 12105 | 12153 |
| Reoviridae | 12154 | 14627 |
| Retroviridae | 14628 | 15559 |
| Rhabdoviridae | 15560 | 15759 |
| Roniviridae | 15760 | 15765 |
| Togaviridae | 15766 | 15861 |
| Adenoviridae | 15862 | 15958 |
| Alloherpesviridae | 15959 | 15960 |
| Anelloviridae | 15961 | 16096 |
| Arenaviridae | 16097 | 16175 |
| Arteriviridae | 16176 | 16212 |
| Astroviridae | 16214 | 16247 |
| Birnaviridae | 16248 | 16286 |
| Bornaviridae | 16287 | 16294 |
| Bunyaviridae | 16295 | 16462 |
| Caliciviridae | 16463 | 16637 |
| Circoviridae | 16638 | 16731 |
| Coronaviridae | 16732 | 16794 |
| Filoviridae | 16795 | 16808 |
| Flaviviridae | 16809 | 17224 |
| Hepadnaviridae | 17225 | 17331 |
| Hepeviridae | 17332 | 17436 |
| Herpesviridae | 17437 | 17494 |
| Iridoviridae | 17495 | 17503 |
| Nodaviridae | 17504 | 17544 |
| Orthomyxoviridae | 17545 | 17929 |
| Papillomaviridae | 17930 | 18248 |
| Paramyxoviridae | 18249 | 18376 |
| Parvoviridae | 18377 | 18468 |
| Picobirnaviridae | 18469 | 18471 |
| Picornaviridae | 18472 | 18961 |
| Polyomaviridae | 18962 | 18994 |
| Poxviridae | 18995 | 19022 |
| Reoviridae | 19023 | 19916 |
| Retroviridae | 19917 | 20371 |
| Rhabdoviridae | 20372 | 20513 |
| Roniviridae | 20514 | 20517 |
| Togaviridae | 20518 | 20592 |
| Adenoviridae | 20593 | 21733 |
| Arenaviridae | 21734 | 24355 |
| Arteriviridae | 24356 | 24634 |
| Asfarviridae | 24635 | 24684 |
| Astroviridae | 24685 | 25023 |
| Birnaviridae | 25024 | 25459 |
| Bornaviridae | 25460 | 25512 |
| Bunyaviridae | 25513 | 38302 |
| Caliciviridae | 38303 | 40182 |
| Circoviridae | 40183 | 40876 |
| Coronaviridae | 40877 | 41793 |
| Flaviviridae | 41794 | 44589 |
| Filoviridae | 44590 | 44832 |
| Hepeviridae | 44833 | 45133 |
| Hepadnaviridae | 45134 | 45509 |
| Herpesviridae | 45510 | 47218 |
| Iridoviridae | 47219 | 47568 |
| Nodaviridae | 47569 | 48274 |
| Orthomyxoviridae | 48275 | 91627 |
| Papillomaviridae | 91628 | 95180 |
| Paramyxoviridae | 95181 | 97035 |
| Parvoviridae | 97036 | 98745 |
| Picornaviridae | 98746 | 101837 |
| Polyomaviridae | 101838 | 102612 |
| Poxviridae | 102613 | 103348 |
| Reoviridae | 103349 | 124732 |
| Retroviridae | 124733 | 130081 |
| Rhabdoviridae | 130082 | 131448 |
| Roniviridae | 131449 | 131970 |
| Togaviridae | 131971 | 133263 |

### Example 15

### Detection Probability of a Target Based on Empirical Means

[0226] Using the empirical data of previous array versions, predictors can be formulated to determine the detection probability of a target probe (see Example 13). A linear predictor can be derived from parameters with desired predictive values such as an alignment score, a predicted Tₘ of the probe to its matching target sequence, and the start position of the match on the probe also known as a hit start. An exemplary alignment score is a BLAST bit score. For example, FIG. 17 shows plots, for a particular array experiment, in which the left panel of FIG. 17 shows observed vs predicted detected fraction, in 50 bins of approximately 280 probe-target pairs each, and the right panel of FIG. 17 observed fraction vs predicted log-odds from the logistic regression fit, over the same bins. In logistic regression the log-odds is a linear combination of the predictive variables, which in the exemplary case of FIG. 17 were the BLAST bitscore, melting temperature over matching bases, and the start position of the target alignment in the probe sequence.

[0227] An exemplary equation of detection probability based on common parameters across all arrays is derived from linear predictors derived from an alignment score, a predicted Tm of the probe to its matching target sequence, and the start position of the match on the probe is:

Detection probability of being present=1−1/(1+exp(−8.684612924+0.163626821×blast bit score+0.001882077×hit start on probe−0.029316625×predicted Tm of matching sequence to probe)),

wherein the predicted Tₘ of matching sequence is calculated as

Tₘ=69.4+(41×number of G and C bases in probe−600.0)/(probe length−number of mismatches between probe and target).

[0228] Exemplary equations, such as the one above, can be calculated for different brands or makes of arrays. For example, the equation above was derived from data and further use of Nimblegen arrays. A person of ordinary skill can use the same or similar method to derive an equation of detection probability but the parameters can be different.

### Example 16

### Probes for an Array of a 360K Design

[0229] A detection microarray for targeting pathogens in a cost effective format (388K Nimblegen format) according to embodiments of the present disclosure is now described. The following example describes the design of a microarray for detecting viruses, bacteria, fungi, archaea, and protozoa of importance to humans in term of health, agriculture, and economy. The array includes 361,863 probes from all families. Each oligonucleotide probe for detection of at least one target in a target group comprises a sequence selected from a group consisting of SEQ ID NO's 133,264-491,462 and 495,659-534,156, Detection can occur in combination with at least four other oligonucleotide probes selected from the group consisting of SEQ ID NO's 133,264-491,462; and said target is a microorganism, such a bacterium, virus, protozoa, archaeon, or fungus.

[0230] Complete viral, bacterial, fungal, archaeal, and protozoan genome/segment/plasmid sequences were gathered from publicly available sites (Genbank, JCVI, IMG, etc.) and from collaborators (CDC, USDA, USAMRIID, NBACC, LANL, etc), and were organized by family. Regions that were specific to a family were identified in which there were no regions longer than 19 bases (or k=19, where k represents the number of bases) or under relaxed conditions where k=20, 21, or 22 that matched viruses, bacteria, fungi, archaea, and protozoa genomes not in the target family, the human genome, the RepBase repeat database, or the SILVA ribosomal RNA database.

[0231] From these family-unique regions, candidate probes were identified to meet desired ranges for length (40-60 bases), Tm, entropy, GC %, and other thermodynamic and sequence features to the extent possible given the unique sequence. Detailed thermodynamic parameters are described in reference 28. The desired parameter ranges were relaxed as needed when there were too few probes for a target sequence including raising the length k for calculating family specific regions to 20, 21, or 22 if necessary, as Applicant's aimed at having at least 30 probes per target sequence selected from the conservation favoring probes and at least 5 probes per target sequence selected from the discriminating probes, although there was variation around these numbers due to differences in target length and uniqueness.

[0232] Candidate probes were clustered and ranked within each family by the number of targets detected, and a greedy algorithm, as described was used to select a probe set to detect as many of the targets as possible with the fewest probes. Conserved and discriminating probes were chosen as candidate probes.

[0233] Uniqueness for bacterial, viral, fungal, and archaeal sequences was calculated relative to all bacterial, viral, fungal, archaeal, and protozoa families, the human genome, repeat sequences in RepBase, and rRNA in the SILVA database. Within the protozoa, uniqueness was calculated relative to bacterial, viral, fungal, and archael sequences, the human genome, repeat sequences in RepBase, and rRNA in the SILVA database.

[0234] All 131 viral families and family unclassified groups of sequences were included, as listed in 0085. 338 bacteria families or groups of family unclassified sequences, 37 archaea, 101 fungi. Protozoa were not subgrouped by family. In particular, oligonucleotide probes comprising sequences from a group consisting of SEQ ID NO's 133,264-141,123 and 495,659-496,378 are directed to the detection of archaea, SEQ ID NO's 141, 125-267-772 and 496,379-512,129 are directed to the detection of bacteria, SEQ ID NO's 267,773-286,565 and 512,130-514,809 are directed to the detection of fungi, SEQ ID NO's 286,566-297,255 and 514,810-515,886 are directed to the detection of protozoa, and SEQ ID NO's 297,256-486,081 and 515,887-534,156 are directed to the detection of viruses. The probes described in this exemplary design can be arranged in an array, such as a microarray described in Example 12. Controls can be incorporated into arrays such as random negative controls and/or Thermotoga positive controls.

### Example 17

### Probes for a Clinical Microbial Array from 135K Design

[0235] The following example describes a microarray for microbial detection of organisms from families known to infect vertebrates. A detection microarray targeting clinically relevant pathogens in a cost effective format (135K Nimblegen format) was designed. A subset of the families in v5 were downselected for inclusion in a Clinical 135K array, designing probes for clinically relevant viral, bacterial, and fungal families or family unclassified groups with members known to infect vertebrate hosts. For this design, the goal was 15 conserved probes per sequence and 2 discriminating probes per sequence with no Primux-designed probes. Some probes of the 135K design overlap with probes of the 360K design. This smaller design allows testing at lower cost per sample than the larger design. Vertebrate infecting bacterial, viral, and fungal families or groups were selected based on extensive literature (PubMed), web searches, and lists compiled by the International Committee on Taxonomy of Viruses and are available from virology.net/Big_Virology/BVHostList.html#Vertebrates to determine whether any members of a family have been found to infect vertebrates or were involved in clinical infections, and all members of a family were included even if only some of them were vertebrate-infecting. Each oligonucleotide probe for detection of at least one target in a target group comprises a sequence selected from a group consisting of SEQ ID NO's 491,463-495,658 and 534,157-661,081, where said detection occurs in combination with at least four other oligonucleotide probes selected from the group consisting of SEQ ID NO's 491,463-495,658 and 534,157-661,081; and said target is a microorganism. In particular, oligonucleotide probes comprising sequences from a group consisting of SEQ ID NO's 491,463-491,510 and 650,746-653,508 are directed to the detection of archaea, SEQ ID NO's 491,511-492,337 and 615,629-650,745 are directed to the detection of bacteria, SEQ ID NO's 492,338-492,436 and 653,509-657,360 are directed to the detection of fungi, SEQ ID NO's 492,437-492,544 and 657,361-661,081 are directed to the detection of protozoa, and SEQ ID NO's 492,545-495,658 and 534,157-615,628 are directed to the detection of viruses. In particular, oligonucleotide probes comprising sequences from a group consisting of SEQ ID NO's 491,463-495,658 are not present in the 360K set.

[0236] A set of 84,586 viral probes were designed for this array including the following 38 viral families or family unclassified groups:

[0237] Adenoviridae, Alloherpesviridae, Anelloviridae, Arenaviridae, Arteriviridae, Asfarviridae, Astroviridae, Birnaviridae, Bornaviridae, Bunyaviridae, Caliciviridae, Circoviridae, Coronaviridae, Filoviridae, Flaviviridae, Hepadnaviridae, Hepeviridae, Herpesviridae, Iridoviridae, Nodaviridae, Orthomyxoviridae, Papillomaviridae, Paramyxoviridae, Parvoviridae, Picobirnaviridae, Picornaviridae, Polyomaviridae, Poxyiridae, Reoviridae, Retroviridae, Rhabdoviridae, Togaviridae, Deltavirus, Mononegavirales, Nidovirales, Picornavirales, unclassified_dsDNA_viruses, unclassified_ssDNA_viruses, unclassified_viruses

[0238] A set of 35,944 bacterial probes were designed for this array including the following 140 bacterial families or family unclassified groups:

[0239] Acetobacteraceae, Acholeplasmataceae, Acidaminococcaceae, Actinomycetaceae, Actinosynnemataceae, Aerococcaceae, Aeromonadaceae, Alcaligenaceae, Anaeroplasmataceae, Anaplasmataceae, Bacillaceae, Bacteroidaceae, Bartonellaceae, Bdellovibrionaceae, Bifidobacteriaceae, Brachyspiraceae, Bradyrhizobiaceae, Brevibacteriaceae, Brucellaceae, Burkholderiaceae, Campylobacteraceae, Cardiobacteriaceae, Carnobacteriaceae, Catabacteriaceae, Caulobacteraceae, Cellulomonadaceae, Chlamydiaceae, Clostridiaceae, Clostridiales_Family_XI, Clostridiales_Family_XII, Clostridiales_Family_XIII, Clostridiales_Family_XIV, Clostridiales_Family_XV, Clostridiales_Family_XVI, Clostridiales_Family_XVII, Clostridiales_Family_XVIII, Comamonadaceae, Coriobacteriaceae, Corynebacteriaceae, Coxiellaceae, Criblamydiaceae, Cyclobacteriaceae, Deferribacteraceae, Dermabacteraceae, Dermacoccaceae, Dermatophilaceae, Desulfohalobiaceae, Desulfomicrobiaceae, Desulfovibrionaceae, Dietziaceae, Enterobacteriaceae, Enterococcaceae, Entomoplasmataceae, Erysipelotrichaceae, Erythrobacteraceae, Eubacteriaceae, Family_X, Family_XVII, Fibrobacteraceae, Flavobacteriaceae, Francisellaceae, Fusobacteriaceae, Gordoniaceae, Halomonadaceae, Helicobacteraceae, Herpetosiphonaceae, Intrasporangiaceae, Jonesiaceae, Lachnospiraceae, Lactobacillaceae, Legionellaceae, Leptospiraceae, Leuconostocaceae, Listeriaceae, Methylobacteriaceae, Micrococcaceae, Moraxellaceae, Mycobacteriaceae, Mycoplasmataceae, Neisseriaceae, Nocardiaceae, Oxalobacteraceae, Parachlamydiaceae, Pasteurellaceae, Peptococcaceae, Peptostreptococcaceae, Piscirickettsiaceae, Porphyromonadaceae, Prevotellaceae, Propionibacteriaceae, Pseudomonadaceae, Pseudonocardiaceae, Rickettsiaceae, Rikenellaceae, Ruminococcaceae, Segniliparaceae, Simkaniaceae, Sphingomonadaceae, Spirillaceae, Spirochaetaceae, Spiroplasmataceae, Sporolactobacillaceae, Staphylococcaceae, Streptococcaceae, Streptomycetaceae, Succinivibrionaceae, Sutterellaceae, Synergistaceae, Tsukamurellaceae, Veillonellaceae, Verrucomicrobia_subdivision_{—}3, Verrucomicrobiaceae, Vibrionaceae, Victivallaceae, Waddliaceae, Xanthomonadaceae, Bhargavaea, Blautia, Burkholderiales, Campylobacterales, Candidatus_Midichloria, Chroococcales, Clostridiales, Epulopiscium, Fangia, Flavobacteriales, Gemella, Microcystis, Oscillatoria, Pseudoflavonifractor, Rickettsiales, Thiotrichales, Tropheryma, Verrucomicrobiales, Vibrionales, candidate_division_TM7, environmental_samples, unclassified_Bacteria, unclassified_Bacteroidetes, unclassified_pseudomonads

[0240] A set of 3,951 fungal probes were designed for this array including the following 16 fungi families:

[0241] Ajellomycetaceae, Arthrodermataceae, Chaetomiaceae, Debaryomycetaceae, Enterocytozoonidae, Malasseziaceae, Metschnikowiaceae, Mortierellaceae, Mucoraceae, Onygenaceae, Pleosporaceae, Pneumocystidaceae, Schizophyllaceae, Tremellaceae, Trichocomaceae, Unikaryonidae

[0242] A set of 2,811 archaeal probes were designed for this array to include all archael families (37 families). A set of 3,829 protozoan probes were designed for this array to include all protozoan families (36 families). The probes described in this exemplary design can be arranged in an array, such as a microarray described in Example 12. Controls can be incorporated into arrays such as random negative controls and/or Thermotoga positive controls.

### Example 18

### A Set of Well-Performing Probes

[0243] Of the 135K viral and bacterial probes identified in Example 12, a set of 10 well-performing probes with respect to a target genome sequence was selected shown below in Table 12. In this exemplary embodiment, probes were selected by looking at experimental results from hybridizing the 135 array with samples containing the indicated diseases/infections, such as cholera, or pathogens, such as acinetobacter. Probes selected were perfect matches to the target genome and had a high signal on the array (such as log 2 intensity >15).

TABLE 12
Set of well-performing probes with respect to a target genome sequence.

| | | Location in |
|---|---|---|
| | | target |
| | | genome |
| Probe sequence | Target genome sequence | sequence |
| SEQ ID 5071: | Vibrio cholerae M66-2 | 1898262 |
| GCGGCGGTTTCCTTGGTTGTATCGTAG | chromosome I, complete | |
| CGGGCTTCATCGCCGGTGGTGTGGTAT | genome | |
| TCCAAC | | |
| SEQ ID 5076: | Vibrio cholerae M66-2 | 1518725 |
| GGGCGAAGGGGAGTTTACGGCGGTGA | chromosome I, complete | |
| ACTGGGGCACATCGAATGTGGGCATTA | genome | |
| AAGTCGG | | |
| SEQ ID 5075: | Vibrio cholerae M66-2 | 1520278 |
| CCCGTGAAGATGTTTGACGTGCCTGTT | chromosome I, complete | |
| GCGTAGAACACATCATCGCCTCGTCCG | genome | |
| CCCCAG | | |
| SEQ ID 5072: | Vibrio cholerae M66-2 | 1575043 |
| GGTGGAGTGGCAAATACGCGCTTGGT | chromosome I, complete | |
| GGTCAACGTTGTTGGTGCCCCACAGGG | genome | |
| AAGCCAT | | |
| SEQ ID 5059: | Vibrio cholerae M66-2 | 97708 |
| CCAAGTGGGTCTGCCACTGGAAGGGA | chromosome II, complete | |
| TTGCGCTGATCATGGGTGTCGACCGTC | genome | |
| TACTGGA | | |
| SEQ ID 3789: | Acinetobacter baumannii, | 2840756 |
| GAACCGACCATCCCGCGCCAACCGAC | complete genome | |
| CAGACCTACTTTCATGTCATTTTGCCTC | | |
| GGTGCG | | |
| SEQ ID 35068: | Rift Valley fever virus strain | 2645 |
| GGGAGCATCATCTAGCCGTTTCACAAA | OS-1 segment M, complete | |
| CTGGGGCTCAGTTAGCCTCTCACTGGA | sequence | |
| TGCAGA | | |
| SEQ ID 43291: | Dengue virus type 4 strain | 7948 |
| GGGTTGACGTGTTCTACAAACCCACTG | ThD4_0087_77, complete | |
| AGCAAGTGGACACCCTGCTCTGTGATA | genome | |
| TCGGGG | | |
| SEQ ID 100138: | Foot-and-mouth disease virus - | 8109 |
| GAGATACCAAGCTACAGATCACTTTAC | type Asia 1 isolate IND 182- | |
| CTGCGTTGGGTGAACGCCGTGTGCGGT | 02, complete genome | |
| GACGCA | | |
| SEQ ID 2809: | Yersinia pestis biovar | 362737 |
| CGGGAGCGTTTTAAGCAGGTTTCCGGA | Orientalis str. MG05-1020, | |
| CAGGCGAAAGCTGCCAACAGACAGAG | whole genome | |
| CTGTGGC | | |

[0244] The examples set forth above are provided to give those of ordinary skill in the art a complete disclosure and description of how to make and use the embodiments of the pan microbial detection arrays, methods and systems of the disclosure, and are not intended to limit the scope of what the inventors regard as their disclosure. Modifications of the above-described modes for carrying out the disclosure that are obvious to persons of skill in the art are intended to be within the scope of the following claims.

[0245] It is to be understood that the disclosures are not limited to particular technical applications or fields of study, which can, of course, vary. It is also to be understood that the terminology used herein is for the purpose of describing particular embodiments only, and is not intended to be limiting. As used in this specification and the appended claims, the singular forms “a,” “an,” and “the” include plural referents unless the content clearly dictates otherwise. The term “plurality” includes two or more referents unless the content clearly dictates otherwise. Unless defined otherwise, all technical and scientific terms used herein have the same meaning as commonly understood by one of ordinary skill in the art to which the disclosure pertains. All references (including, but not limited to, articles, publications, patent applications and patents), mentioned in the present application are incorporated herein by reference in their entirety.

[0246] Further, the sequence listing submitted on compact disc concurrently with the present application in the txt file “IL-12080-P425-USCIP2-Sequence-List-text” (created on May 2, 2013) forms an integral part of the present application and is incorporated herein by reference in its entirety.

[0247] Although any methods and materials similar or equivalent to those described herein can be used in the practice for testing of the specific examples of appropriate materials and methods are described herein.

[0248] A number of embodiments of the disclosure have been described. Nevertheless, it will be understood that various modifications may be made without departing from the spirit and scope of the present disclosure. Accordingly, other embodiments are within the scope of the following claims.

### LIST OF REFERENCES

[0249] [1] Anthony, R. M., Brown, T. J. and French, G. L. (2000) Rapid Diagnosis of Bacteremia by Universal Amplification of 23S Ribosomal DNA Followed by Hybridization to an Oligonucleotide Array, J. Clin. Microbiol., 38, 781-788.
[0250] [2] Bollet, C., Grimont, P., Gainnier, M., Geissler, A., Sainty, J. M. and De Micco, P. (1993) Fatal pneumonia due to Serratia proteamaculans subsp. quinovora, J. Clin. Microbiol., 31, 444-445.
[0251] [3] Chiu, Charles Y., Rouskin, S., Koshy, A., Urisman, A., Fischer, K., Yagi, S., Schnurr, D., Eckburg, Paul B., Tompkins, Lucy S., Blackburn, Brian G., Merker, Jason D., Patterson, Bruce K., Ganem, D. and DeRisi, Joseph L. (2006) Microarray Detection of Human Parainfluenzavirus 4 Infection Associated with Respiratory Failure in an Immunocompetent Adult, Clinical Infectious Diseases, 43, e71-e76.
[0252] [4] Chou, C.-C., Lee, T.-T., Chen, C.-H., Hsiao, H.-Y., Lin, Y.-L., Ho, M.-S., Yang, P.-C. and Peck, K. (2006) Design of microarray probes for virus identification and detection of emerging viruses at the genus level, BMC Bioinformatics, 7, 232.
[0253] [5] DeSantis, T., Brodie, E., Moberg, J., Zubieta, I., Piceno, Y. and Andersen, G. (2007) High-Density Universal 16S rRNA Microarray Analysis Reveals Broader Diversity than Typical Clone Library When Sampling the Environment, Microbial Ecology, 53, 371-383.
[0254] [6] Giegerich, R., Kurtz, S, and Stoye, J. (2003) Efficient implementation of lazy suffix trees, Software-Practice and Experience, 33, 1035-1049.
[0255] [7] Jabado, O. J., Liu, Y., Conlan, S., Quan, P. L., Hegyi, H., Lussier, Y., Briese, T., Palacios, G. and Lipkin, W. I. (2008) Comprehensive viral oligonucleotide probe design using conserved protein regions, Nucl. Acids Res., 36, e3.
[0256] [8] Jaing, C., Gardner, S., McLoughlin, K., Mulakken, N., Alegria-Hartman, M., Banda, P., Williams, P., Gu, P., Wagner, M., Manohar, C. and Slezak, T. (2008) A Functional Gene Array for Detection of Bacterial Virulence Elements, PLoS ONE, 3, e2163.
[0257] [9] Jin, L.-Q., Li, J.-W., Wang, S.-Q., Chao, F.-H., Wang, X.-W. and Yuan, Z.-Q. (2005) Detection and identificatio of intestinal pathogenic bacteria by hybridization to oligonucleotide microarrays, World J Gastroenterol, 11, 7615-7619.
[0258] [10] Kessler, N., Ferraris, 0., Palmer, K., Marsh, W. and Steel, A. (2004) Use of the DNA Flow-Thru Chip, a Three-Dimensional Biochip, for Typing and Subtyping of Influenza Viruses, J. Clin. Microbiol, 42, 2173-2185.
[0259] [11] Lin, B., Blaney, K. M., Malanoski, A. P., Ligler, A. G., Schnur, J. M., Metzgar, D., Russell, K. L. and Stenger, D. A. (2007) Using a Resequencing Microarray as a Multiple Respiratory Pathogen Detection Assay, J. Clin. Microbiol., 45, 443-452.
[0260] [12] Makarova, K., Slesarev, A., Wolf, Y., Sorokin, A., Mirkin, B., Koonin, E., Pavlov, A., Pavlova, N., Karamychev, V., Polouchine, N., Shakhova, V., Grigoriev, I., Lou, Y., Rohksar, D., Lucas, S., Huang, K., Goodstein, D. M., Hawkins, T., Plengvidhya, V., Welker, D., Hughes, J., Goh, Y., Benson, A., Baldwin, K., Lee, J. H., Dosti, B., Smeianov, V., Wechter, W., Barabote, R., Lorca, G., Alternann, E., Barrangou, R., Ganesan, B., Xie, Y., Rawsthorne, H., Tamir, D., Parker, C., Breidt, F., Broadbent, J., Hutkins, R., O'Sullivan, D., Steele, J., Unlu, G., Saier, M., Klaenhammer, T., Richardson, P., Kozyavkin, S., Weimer, B. and Mills, D. (2006) Comparative genomics of the lactic acid bacteria, Proceedings of the National Academy of Sciences, 103, 15611-15616.
[0261] [13] Nakamura, S., Yang, C.-S., Sakon, N., Ueda, M., Tougan, T., Yamashita, A., Goto, N., Takahashi, K., Yasunaga, T., Ikuta, K., Mizutani, T., Okamoto, Y., Tagami, M., Morita, R., Maeda, N., Kawai, J., Hayashizaki, Y., Nagai, Y., Horii, T., Lida, T. and Nakaya, T. (2009) Direct Metagenomic Detection of Viral Pathogens in Nasal and Fecal Specimens Using an Unbiased High-Throughput Sequencing Approach, PLoS ONE, 4, e4219.
[0262] [14] Palacios, G., Quan, P.-L., Jabado, O., Conlan, S., Hirschberg, D. and Liu Y, e.a. (2007) Panmicrobial oligonucleotide array for diagnosis of infectious diseases, Emerg Infect Dis 13, http://www.cdc.govincidod/EID/13/11/73.htm.
[0263] [15] Quan, P.-L., Palacios, G., Jabado, O. J., Conlan, S., Hirschberg, D. L., Pozo, F., Jack, P. J. M., Cisterna, D., Renwick, N., Hui, J., Drysdale, A., Amos-Ritchie, R., Baumeister, E., Savy, V., Lager, K. M., Richt, J. A., Boyle, D. B., Garcia-Sastre, A., Casas, I., Perez-Brena, P., Briese, T. and Lipkin, W. I. (2007) Detection of Respiratory Viruses and Subtype Identification of Influenza A Viruses by GreeneChipResp Oligonucleotide Microarray, J. Clin. Microbiol., 45, 2359-2364.
[0264] [16] Rota, P. A., Oberste, M. S., Monroe, S. S., Nix, W. A., Campagnoli, R., Icenogle, J. P., Penaranda, S., Bankamp, B., Maher, K., Chen, M.-h., Tong, S., Tamin, A., Lowe, L., Frace, M., DeRisi, J. L., Chen, Q., Wang, D., Erdman, D. D., Peret, T. C. T., Burns, C., Ksiazek, T. G., Rollin, P. E., Sanchez, A., Liffick, S., Holloway, B., Limor, J., McCaustland, K., Olsen-Rasmussen, M., Fouchier, R., Gunther, S., Osterhaus, A. D. M. E., Drosten, C., Pallansch, M. A., Anderson, L. J. and Bellini, W. J. (2003) Characterization of a Novel Coronavirus Associated with Severe Acute Respiratory Syndrome, Science, 300, 1394-1399.
[0265] [17] Satya, R., Zavaljevski, N., Kumar, K. and Reifman, J. (2008) A high-throughput pipeline for designing microarray-based pathogen diagnostic assays, BMC Bioinformatics, 9, doi: 10.1186/1471-2105-1189-1185.
[0266] [18] Sengupta, S., Onodera, K., Lai, A. and Melcher, U. (2003) Molecular Detection and Identification of Influenza Viruses by Oligonucleotide Microarray Hybridization, J. Clin. Microbiol., 41, 4542-4550.
[0267] [19] Singh-Gasson, S., Green, R., Yue, Y., Nelson, C., Blattner, F., Sussman, M. and Cerrina, F. (1999) Maskless fabrication of light-directed oligonucleotide microarrays using a digital micromirror array, Nat Biotechnol 17, 974-978.
[0268] [20] Slezak, T., Kuczmarski, T., Ott, L., Tones, C., Medeiros, D., Smith, J., Truitt, B., Mulakken, N., Lam, M., Vitalis, E., Zemla, A., Zhou, C. E. and Gardner, S. (2003) Comparative genomics tools applied to bioterrorism defense, Briefings in Bioinformatics, 4, 133-149.
[0269] [21] Urisman, A., Molinaro, R. J., Fischer, N., Plummer, S. J., Casey, G., Klein, E. A., Malathi, K., Magi-Galluzzi, C., Tubbs, R. R., Ganem, D., Silverman, R. H. and DeRisi, J. L. (2006)

[0270] Identification of a Novel Gammaretrovirus in Prostate Tumors of Patients Homozygous for R462Q<italic>RNASEL</italic> Variant, PLoS Pathog, 2, e25.
[0271] [22] Wang, D., Coscoy, L., Zylberberg, M., Avila, P. C., Boushey, H. A., Ganem, D. and DeRisi, J. L. (2002) Microarray-based detection and genotyping of viral pathogens, Proceedings of the National Academy of Sciences of the United States of America, 99, 15687-15692.
[0272] [23] Wang, D., Urisman, A., Liu, Y., Springer, M., Ksiazek, T., Erdman, D., Mardis, E., Hickenbotham, M., Magrini, V., Eldred, J., Latreille, J., Wilson, R., Ganem, D. and DeRisi, J. (2003) Viral Discovery and Sequence Recovery Using DNA Microarrays, PLoS Biol., 1, e2.
[0273] [24] Wang, X.-W., Zhang, L., Jin, L.-Q., Jin, M., Shen, Z.-Q., An, S., Chao, F.-H. and Li, J.-W. (2007) Development and application of an oligonucleotide microarray for the detection of food-borne bacterial pathogens, Applied Microbiology and Biotechnology, 76, 225-233.
[0274] [25] Wong, C., Heng, C., Wan Yee, L., Soh, S., Kartasasmita, C., Simoes, E., Hibberd, M., Sung, W.-K. and Miller, L. (2007) Optimization and clinical validation of a pathogen detection microarray, Genome Biology, 8, R93.
[0275] [26] Li, W. and Godzik, A. (2006) Cd-hit: a fast program for clustering and comparing large sets of protein or nucleotide sequences. Bioinformatics, 22, 1658-1659.
[0276] [27] SantaLucia, J. and Hicks, D. (2004) The thermodynamics of DNA strucutural motifs. Ann. Rev. Biophys. Biomol. Struct., (33):415-440.
[0277] [28] Gardner S N, Jaing C J, McLoughlin K S, Slezak T. A microbial detection array (MDA) for viral and bacterial detection. 2010. BMC Genomics, 11:668.
[0278] [29] Victoria, J. G., Wang, C., Jones, M. S., Jaing, C., McLoughlin, K., Gardner, S., and Delwart, E. L. 2010. Viral nucleic acids in live-attenuated vaccines: detection of minority variants and an adventitious virus. Journal of Virology, 84(12) doi:10.1128/JVI.02690-09
[0279] [30] Erlandsson L, Rosenstierne M W, McLoughlin K, Jaing C, Formsgaard A 2011. The Microbial Detection Array Combined with Random Phi29-Amplification Used as a Diagnostic fool for Virus Detection in Clinical Samples. PLoS ONE 6(8): e22631. doi: 10.1371/journal.pone.
[0280] [31] McLoughlin, Kevin S. “Microarrays for pathogen detection and analysis.” Briefings in functional genomics 10.6 (2011): 342-353.
[0281] [32] Jaing, Crystal, et al. “Detection of Adventitious Viruses from Biologicals Using a Broad-Spectrum Microbial Detection Array,” PDA Journal of Pharmaceutical Science and Technology 65.6 (2011)-668-674.
[0282] [33] Hysom, David A., et al. “Skip the alignment: degenerate, multiplex primer and probe design using K-mer matching, instead of alignments.” PLoS One 7.4 (2012): e34560,

The application's sequence listing, which the Patent Office published only in electronic form, follows.

SEQUENCE LISTING (661117 sequences)

SEQ ID NO: 1 - DNA, 60 bp, Artificial
  Synthetic oligonucleotide
cggctggccctgtcgccgtgaaggagtccaaagaggttgttgaggctcgcctgaagaaaa

SEQ ID NO: 2 - DNA, 60 bp, Artificial
  Synthetic oligonucleotide
gcctgagcagagtttgccactcttgcactccttgaaatttggttggtctgggcgggctga

SEQ ID NO: 3 - DNA, 60 bp, Artificial
  Synthetic oligonucleotide
gcaagacgcaacttgcttctacaactcaaccacaacacaataaggtgtgggaataaacgg

SEQ ID NO: 4 - DNA, 60 bp, Artificial
  Synthetic oligonucleotide
gccatccagcctcggcagaaccatgtcgagcatatcggcaccgaatacctctttggcctg

SEQ ID NO: 5 - DNA, 60 bp, Artificial
  Synthetic oligonucleotide
gtcaaatgctgaagccgttagttcatattctcgaatgatttctacacgtggctttccagc

SEQ ID NO: 6 - DNA, 60 bp, Artificial
  Synthetic oligonucleotide
cttgggccgatgttgctcgtcagtccctgcagcgttttgacagtacccggcctgtagtga

SEQ ID NO: 7 - DNA, 60 bp, Artificial
  Synthetic oligonucleotide
ccggttaaaccgacatactatgtacacacccgaaccaaaattaagctttgacgctatgac

SEQ ID NO: 8 - DNA, 60 bp, Artificial
  Synthetic oligonucleotide
tggttccggtttatccatccccagagcacggtacacctgcggcagcttctctccacacac

SEQ ID NO: 9 - DNA, 60 bp, Artificial
  Synthetic oligonucleotide
tcaccggtgacgacaagtccagctggttcagcctgatgcgccttggctacgacaccttct

SEQ ID NO: 10 - DNA, 60 bp, Artificial
  Synthetic oligonucleotide
ggtgtgcaaatcaactccaacgttagagtaagttgtctattcagccttggaaaacatgtc

SEQ ID NO: 11 - DNA, 60 bp, Artificial
  Synthetic oligonucleotide
gaggttcatcaggcgcggaactcatcgaggcgcgggaataaaatcccattcagacgccgg

SEQ ID NO: 12 - DNA, 60 bp, Artificial
  Synthetic oligonucleotide
ttcgattgcggcagcaagctcggctatctgaaggcgacggtcgagttcgcgttgcgccac

SEQ ID NO: 13 - DNA, 60 bp, Artificial
  Synthetic oligonucleotide
aacaattcggtaaacctcaaatgataattacagatcaagcaccttcaacgaaggtagcca

SEQ ID NO: 14 - DNA, 60 bp, Artificial
  Synthetic oligonucleotide
ccgctgtaaaatactgacggtgaccttgttgcttcatgctgtgcttacgacgacggaact

SEQ ID NO: 15 - DNA, 60 bp, Artificial
  Synthetic oligonucleotide
ccaacttaaaaccggcaccaatcgccactgaagtggctatcatattcgcctttctttctc

SEQ ID NO: 16 - DNA, 60 bp, Artificial
  Synthetic oligonucleotide
ggggtgcagtatctgacgtcaatgccgagcgatagcgagccaaagggtagcatttacgtt

SEQ ID NO: 17 - DNA, 60 bp, Artificial
  Synthetic oligonucleotide
aagaccagaagcctgatgcgtgccgcgagcgaaaacgaccgcgatgtccgaacacggatc

SEQ ID NO: 18 - DNA, 60 bp, Artificial
  Synthetic oligonucleotide
ggcgtaagaagtatggcggtatggaggtgcccgaggttaagcgcctgaagtcgcttgagg

SEQ ID NO: 19 - DNA, 60 bp, Artificial
  Synthetic oligonucleotide
caggtagaagattacacccacgtcccctctcgcgatattctttgtgtcgatgtgaagtcg

SEQ ID NO: 20 - DNA, 60 bp, Artificial
  Synthetic oligonucleotide
ggactcgaacctccaacctatcggttaacagccgagtgctccaccattgagctaccgcgg

SEQ ID NO: 21 - DNA, 60 bp, Artificial
  Synthetic oligonucleotide
gcagagtgcagaccgcggttacgaatagcgataaccacgccctcgaatgcctgcagacgt

SEQ ID NO: 22 - DNA, 60 bp, Artificial
  Synthetic oligonucleotide
agcagcaccaaaatcccgccgccgacctgaaacgaaccgacgctgatgcccaaaaccttc

SEQ ID NO: 23 - DNA, 60 bp, Artificial
  Synthetic oligonucleotide
gccctgaaacaaccaatgaacctctagggcagccaacagaagttgcaccagctgaaaatg

SEQ ID NO: 24 - DNA, 60 bp, Artificial
  Synthetic oligonucleotide
gcattatggcgttgttccaataactgatgatggtcgtttaagtgctaaagaagttgtagg

SEQ ID NO: 25 - DNA, 60 bp, Artificial
  Synthetic oligonucleotide
tacccgttgaacttgacacaattgatccaatcacaggggcggacagttgggcggtgacag

SEQ ID NO: 26 - DNA, 60 bp, Artificial
  Synthetic oligonucleotide
ctggatgttcctgccaccaatccgcagacttggtttcttccccgcagccagaaagcagcg

SEQ ID NO: 27 - DNA, 60 bp, Artificial
  Synthetic oligonucleotide
gccaacacctcacggcagcacagtaaactgcgcacccgttcaccgtttcaggtaaggcga

SEQ ID NO: 28 - DNA, 60 bp, Artificial
  Synthetic oligonucleotide
ccgcaaccagcaattgcagctgggcaaccaaaagtgacgaataatggcaaaacatatacc

SEQ ID NO: 29 - DNA, 60 bp, Artificial
  Synthetic oligonucleotide
aaaatttgctccattttcctttacaattcgctccgatatgaagtcttaggctcaacaaaa

SEQ ID NO: 30 - DNA, 60 bp, Artificial
  Synthetic oligonucleotide
ggcaacgacaagtgcagccagcaggcgtttgtctgttttgctcagtcggtggcgaccaga

SEQ ID NO: 31 - DNA, 60 bp, Artificial
  Synthetic oligonucleotide
acagttgtatcgtcaacgcgctctattctcatatcatctcactccttacagtcgatgaat

SEQ ID NO: 32 - DNA, 60 bp, Artificial
  Synthetic oligonucleotide
cccagccatagtattccgcagcccaaccaacaaccgctgatgcagaaaccgtaccgccta

SEQ ID NO: 33 - DNA, 60 bp, Artificial
  Synthetic oligonucleotide
tgctgcgcgaagacggtctgacccacggcaagaagctgccccaagttaacccgatccagc

SEQ ID NO: 34 - DNA, 60 bp, Artificial
  Synthetic oligonucleotide
tcatgcgacatcaccttcaggccgagcgccttcgccttcttctcgaactcgttcgcgaga

SEQ ID NO: 35 - DNA, 60 bp, Artificial
  Synthetic oligonucleotide
cagtgggcagagaagttagatatggtggctttatgaaaatcgtttcactagcaccggagg

SEQ ID NO: 36 - DNA, 60 bp, Artificial
  Synthetic oligonucleotide
ttcttaaggaagaatggcagagcggtttaatgcacctgtcttgaaaacaggagacctgaa

SEQ ID NO: 37 - DNA, 60 bp, Artificial
  Synthetic oligonucleotide
gccgtggactgcaaatcctctattcgtcggttcgattccgaccctggcctccattcctac

SEQ ID NO: 38 - DNA, 60 bp, Artificial
  Synthetic oligonucleotide
ggtctagttcatcacttaacacaacttctctaagtctttcagatgcttcgattggtatgt

SEQ ID NO: 39 - DNA, 60 bp, Artificial
  Synthetic oligonucleotide
ctatgtgattggggtgaacgaacgtagccaacaccgctgcagcttcaagtaggaagggga

SEQ ID NO: 40 - DNA, 60 bp, Artificial
  Synthetic oligonucleotide
ggctctttatgaacatgtgcttcttgcccgccaggacatctcccagcagcaggtcgacgc

SEQ ID NO: 41 - DNA, 60 bp, Artificial
  Synthetic oligonucleotide
ggctttcatggcacacagatagctttctgaacgggtgatggccttcagcgccctgcgcag

SEQ ID NO: 42 - DNA, 60 bp, Artificial
  Synthetic oligonucleotide
cacgccgtaaggtggcagggaactggttctgatgaggtgtctacccgggaccagaaaagc

SEQ ID NO: 43 - DNA, 60 bp, Artificial
  Synthetic oligonucleotide
ctcccgtcgtccgtcctggctggtacggtaactgacaagacctgagcgcatatcacggta

SEQ ID NO: 44 - DNA, 60 bp, Artificial
  Synthetic oligonucleotide
atcccgaaccaagaagctaagcacatcgtgggtgatgatactacgccttactggcagggg

SEQ ID NO: 45 - DNA, 60 bp, Artificial
  Synthetic oligonucleotide
ggagtttaggatgaagaccgaaccgaacgaagtccataacaggccgaaactggtcaccgt

SEQ ID NO: 46 - DNA, 60 bp, Artificial
  Synthetic oligonucleotide
tcctgtgtgtcttgggttgccaggagcgttgcccgttgtgagtgaagagtacgtgcggct

SEQ ID NO: 47 - DNA, 60 bp, Artificial
  Synthetic oligonucleotide
cgaccgactaatcaatcggtgctgttgccgttagagggtaggaaaacttctcagaagaac

SEQ ID NO: 48 - DNA, 60 bp, Artificial
  Synthetic oligonucleotide
ctccatctgtacaattcgacgaaactactggagattactcacgttctcaccgtgtatccc

SEQ ID NO: 49 - DNA, 60 bp, Artificial
  Synthetic oligonucleotide
agacagcactggcatgctgcctatctatgactaaattttgttaagtgtattagcaccgtt

SEQ ID NO: 50 - DNA, 60 bp, Artificial
  Synthetic oligonucleotide
cggcaattttgtgataattgcagctcggccttctatagggaaaaccgcactcgctattga

SEQ ID NO: 51 - DNA, 60 bp, Artificial
  Synthetic oligonucleotide
ccacgtccaggtttcactgttaagcgagcatggaacgtagctccttcagagacactacag

SEQ ID NO: 52 - DNA, 60 bp, Artificial
  Synthetic oligonucleotide
gccatgtgtgaacgactgcacgaactcgcggaagaactccagaacagcatccaggctcgc

SEQ ID NO: 53 - DNA, 60 bp, Artificial
  Synthetic oligonucleotide
ttcgcacttctgggaacggttcggcggcgcgttaatggtcggcatgatccccgatattgg

SEQ ID NO: 54 - DNA, 60 bp, Artificial
  Synthetic oligonucleotide
ggggatattccccatcaagccggtatattcagaacgaagtggctagaatatacgacgctt

SEQ ID NO: 55 - DNA, 60 bp, Artificial
  Synthetic oligonucleotide
cccggaaaagtacggtatcaaataccttcccggtttctctccagtgcaggcagaaaaggt

SEQ ID NO: 56 - DNA, 60 bp, Artificial
  Synthetic oligonucleotide
cgaaaagtgggaaacaacgcccatggagagaaaagaaaatagataatgtaagctatgcag

SEQ ID NO: 57 - DNA, 60 bp, Artificial
  Synthetic oligonucleotide
gggtgcaaacattgtccgcgatttattcgcttctgttcgtgatgttgtcggtggtcgtgc

SEQ ID NO: 58 - DNA, 60 bp, Artificial
  Synthetic oligonucleotide
cgctggctctctttctaccgcctcgctttgctcgttgctcaacgcctcacagacacggat

SEQ ID NO: 59 - DNA, 60 bp, Artificial
  Synthetic oligonucleotide
gcgtccaagcagtgagtgtgagaagtaggcaaatccgcttcttgcgaagcatgagctgtg

SEQ ID NO: 60 - DNA, 60 bp, Artificial
  Synthetic oligonucleotide
ggaaaacaggtacaggtatagtaaacgggaagtataataatgggtggtttgtaggttacg

SEQ ID NO: 61 - DNA, 60 bp, Artificial
  Synthetic oligonucleotide
ttcgggaatcttgcaatgggcatgtcggtaggaaatcagggaatgcagtcgggcgggcgc

SEQ ID NO: 62 - DNA, 60 bp, Artificial
  Synthetic oligonucleotide
cttttagcgagtgaacgaagtgaacgctgcaagtaaaatgtgagcgtggttttcgctcac

SEQ ID NO: 63 - DNA, 60 bp, Artificial
  Synthetic oligonucleotide
ctccagaccgcggattaccgcgtcggtgttttctgtaatttgtttaatggtaagcatatc

SEQ ID NO: 64 - DNA, 60 bp, Artificial
  Synthetic oligonucleotide
ttgtgagactactgtgtagagcctcatagttgggtcccatctcacaaaatgggcaacaaa

SEQ ID NO: 65 - DNA, 51 bp, Artificial
  Synthetic oligonucleotide
agcccggagcatattgttgagaaatcgagtccgcggctgcaagcagttcac

SEQ ID NO: 66 - DNA, 59 bp, Artificial
  Synthetic oligonucleotide
ctgaacgttcaccaatgtctctagccactttggcactaatagcgatcattcgcttagca

SEQ ID NO: 67 - DNA, 60 bp, Artificial
  Synthetic oligonucleotide
gaatggtcagacaataaagacagcgaggagccaataagtaaggtgttgctatttgctggg

SEQ ID NO: 68 - DNA, 60 bp, Artificial
  Synthetic oligonucleotide
gaatcgctccatgggaagctcctatgctatcagttgcttgctgcgttcatggcagaagat

SEQ ID NO: 69 - DNA, 54 bp, Artificial
  Synthetic oligonucleotide
agtaccaatggtcttaacagagggcttcaagctcctatcatgcctggtcgagat

SEQ ID NO: 70 - DNA, 56 bp, Artificial
  Synthetic oligonucleotide
ggggtggatggtgagtgccagggttcgtaggtggtaaatcccggctcacttggtag

SEQ ID NO: 71 - DNA, 53 bp, Artificial
  Synthetic oligonucleotide
ggcaatttcttgctacaagtgactgtgaaggatggatctgattgagacgatta

SEQ ID NO: 72 - DNA, 60 bp, Artificial
  Synthetic oligonucleotide
ctattgagctagttagtagtcctccggcccctgaatgcggctaatcctaactgcggagca

SEQ ID NO: 73 - DNA, 60 bp, Artificial
  Synthetic oligonucleotide
tgtgagaagtaagacacatctcaactttgagaggtctttgaaagcatttttctcatggtc

SEQ ID NO: 74 - DNA, 59 bp, Artificial
  Synthetic oligonucleotide
agccctacccagtctctatggtcgctacaactgcaaatgttgttggtttgccgacacaa

SEQ ID NO: 75 - DNA, 55 bp, Artificial
  Synthetic oligonucleotide
ggctataaaatggcttcgctcatatacagacagctgctcgctaattcttacgcag

SEQ ID NO: 76 - DNA, 54 bp, Artificial
  Synthetic oligonucleotide
tagtgtggaaacttagaggtatagaggtaattagaggaggtcctttaggaatag

SEQ ID NO: 77 - DNA, 60 bp, Artificial
  Synthetic oligonucleotide
gagaagagacctgttttggtgactccaccaacccagagatgattgaaggagcttgggatt

SEQ ID NO: 78 - DNA, 60 bp, Artificial
  Synthetic oligonucleotide
tctgcagatgtgcctcagagaccgcgagaaccaacactccctcccattttcaggccaccg

SEQ ID NO: 79 - DNA, 55 bp, Artificial
  Synthetic oligonucleotide
attttggattgcgcatttctagagccaacgaaaagagcacttcacccaagtatgg

SEQ ID NO: 80 - DNA, 55 bp, Artificial
  Synthetic oligonucleotide
caacaattattagacatagagacgtgacaaccgactacggtgcatataaaagagc

SEQ ID NO: 81 - DNA, 60 bp, Artificial
  Synthetic oligonucleotide
ttagtcttttatgatgtcgcatccaccggtgcaaatggatttgatcctgatgcagggtat

SEQ ID NO: 82 - DNA, 56 bp, Artificial
  Synthetic oligonucleotide
accacaaacactccagtttgttacactccgctaggaatgctcctggagcacccccc

SEQ ID NO: 83 - DNA, 60 bp, Artificial
  Synthetic oligonucleotide
gcttcccattagaatccacaagcccaaaagctttcaagaattctctcctcttctcatggc

SEQ ID NO: 84 - DNA, 60 bp, Artificial
  Synthetic oligonucleotide
acaaaaaacagcatattgacgctgggaaagaccagagatcctgctgtctcctcagcatca

SEQ ID NO: 85 - DNA, 56 bp, Artificial
  Synthetic oligonucleotide
ttacgctccagttaattggggacctggtgaaacgaatgactcaactacagttgaac

SEQ ID NO: 86 - DNA, 60 bp, Artificial
  Synthetic oligonucleotide
gctggttgacaagactggttttgttagagtgccaatcaagcattatgactgtacaatgct

SEQ ID NO: 87 - DNA, 56 bp, Artificial
  Synthetic oligonucleotide
aggccggcgttaactgcacgtaggtcaggtgtacggttcagtcgcataggccaaag

SEQ ID NO: 88 - DNA, 54 bp, Artificial
  Synthetic oligonucleotide
ttgggtctcgccttatggcgaggctccgcggacgtataggtccgcagcgtggtg

SEQ ID NO: 89 - DNA, 60 bp, Artificial
  Synthetic oligonucleotide
ctagaagaagaaaagttaaaaccacagttgtctatgggagaagacgttcaaagtcccggg

SEQ ID NO: 90 - DNA, 60 bp, Artificial
  Synthetic oligonucleotide
ccagtgtcaatcagttcgaggagcatagtgcacactagagcacaagcgaatgaggatatc

SEQ ID NO: 91 - DNA, 55 bp, Artificial
  Synthetic oligonucleotide
aacgaagcactggcagtctccccgttgacaggaaagaatctcagcccacgccggt

SEQ ID NO: 92 - DNA, 57 bp, Artificial
  Synthetic oligonucleotide
ggggtgtggtacagggcgttaatcatccaccagcaatacaccacggtcgtgagtagg

SEQ ID NO: 93 - DNA, 60 bp, Artificial
  Synthetic oligonucleotide
gaggctgccatgcatggtgaaaagtattacaggactgtggcttcccgggtctccaaggag

SEQ ID NO: 94 - DNA, 60 bp, Artificial
  Synthetic oligonucleotide
ggtcatgtggtagtgttggttttaacattgattatgattgcgtgtctttctgctacatgc

SEQ ID NO: 95 - DNA, 60 bp, Artificial
  Synthetic oligonucleotide
gaggcagccacccgacctatcctatccaaaatggagaaagtacacgtagacttagacgca

SEQ ID NO: 96 - DNA, 60 bp, Artificial
  Synthetic oligonucleotide
ttttagttggtcactttctgacccaaagggtaatgacatgccaggtggttactgtcttga

SEQ ID NO: 97 - DNA, 60 bp, Artificial
  Synthetic oligonucleotide
gggtggggcaaatatggaaacatacgtgaacaagcttcacgaaggctccacatacacagc

SEQ ID NO: 98 - DNA, 60 bp, Artificial
  Synthetic oligonucleotide
ggttcgtaggtggtaaatcccagcacaggtggtaatcgctatagggcaggcttatcccgg

SEQ ID NO: 99 - DNA, 60 bp, Artificial
  Synthetic oligonucleotide
tgaaagtattagctttaagacacagtgtggctcaggtgtatgcagatacgcaaacctaca

SEQ ID NO: 100 - DNA, 60 bp, Artificial
  Synthetic oligonucleotide
acgtggcgcggggcgtgggaacggggcgggtgacgtagtagtgtggcggaagtgtgatgt

SEQ ID NO: 101 - DNA, 55 bp, Artificial
  Synthetic oligonucleotide
gccgtcgaaccaggtagctcgagacccacagtcctaagcatagacgaaacagggc

SEQ ID NO: 102 - DNA, 60 bp, Artificial
  Synthetic oligonucleotide
tctgacgcataataattgttggcaacaatcgtgcataataacttaggaaccgagacagta

SEQ ID NO: 103 - DNA, 60 bp, Artificial
  Synthetic oligonucleotide
agccaagttaacgacggctcctccgcgaacatccagagcgtagacagcacccaagcgatc

SEQ ID NO: 104 - DNA, 54 bp, Artificial
  Synthetic oligonucleotide
tcctcgtcggctgtactcctgcttcaggtgaacactggacaagtagtcgttgcc

SEQ ID NO: 105 - DNA, 60 bp, Artificial
  Synthetic oligonucleotide
gatctggtgccgcaacccgaaattgacctacgctgctacgaacaattggactatgaacaa

SEQ ID NO: 106 - DNA, 58 bp, Artificial
  Synthetic oligonucleotide
tggcatccaacatgtgagtatgccatgtaatagtgatttaattagagaaggaaacatg

SEQ ID NO: 107 - DNA, 60 bp, Artificial
  Synthetic oligonucleotide
attaaccgacaatttgactacatgtcaattaaagaactgtggatggcgaaatttccattg

SEQ ID NO: 108 - DNA, 60 bp, Artificial
  Synthetic oligonucleotide
ggcaaaacctccttcggtgcaggaacttagaagacagttagatattccattggaggacat

SEQ ID NO: 109 - DNA, 60 bp, Artificial
  Synthetic oligonucleotide
gtgtgtccattgtgtgcctgcgtggagtgactgcaatggcggatgatacaggtacagagg

SEQ ID NO: 110 - DNA, 60 bp, Artificial
  Synthetic oligonucleotide
cccgccagcctttaacaaaacccgcgccttttgcgtccacccctcgtttactgctcggat

SEQ ID NO: 111 - DNA, 60 bp, Artificial
  Synthetic oligonucleotide
acatacaactggacccagtggttacagacgttgtataccatgatcatggaggagaatgta

SEQ ID NO: 112 - DNA, 60 bp, Artificial
  Synthetic oligonucleotide
gaaaatgtggtaagtatgctaacggctttggtgtttttgatttaacggacctgggtgatg

SEQ ID NO: 113 - DNA, 60 bp, Artificial
  Synthetic oligonucleotide
gtcgtaacgagcaattctgtggcggaaccgactactttgggtgtccgtgtttccttttat

SEQ ID NO: 114 - DNA, 60 bp, Artificial
  Synthetic oligonucleotide
gagtagagtttatctgtgtctgctcttctcgggcctactactatggagggctgcagaact

SEQ ID NO: 115 - DNA, 60 bp, Artificial
  Synthetic oligonucleotide
ggctgcaagcccagtgtatcagagatgtttccaagatggggctatagtgaagcaaaaccc

SEQ ID NO: 116 - DNA, 52 bp, Artificial
  Synthetic oligonucleotide
tgagataaacgacaattcctggactgatacactttcgcagttatttctgaca

SEQ ID NO: 117 - DNA, 60 bp, Artificial
  Synthetic oligonucleotide
cgcatcaagaggtaccaacatggaggatgaggcggaccaatacttttcacatgatgatcc

SEQ ID NO: 118 - DNA, 60 bp, Artificial
  Synthetic oligonucleotide
ataccggaacgcttatcaacagtggtcttaagagactcacagagtctgaagtattcagac

SEQ ID NO: 119 - DNA, 60 bp, Artificial
  Synthetic oligonucleotide
atttaggattgcgcttttagagatctttgtgtgattgggcctcactgggtcatggggcaa

SEQ ID NO: 120 - DNA, 59 bp, Artificial
  Synthetic oligonucleotide
ctcaccggaagagggcacaagtggcttaaaggggactcagtcaagacacatctgacacg

SEQ ID NO: 121 - DNA, 60 bp, Artificial
  Synthetic oligonucleotide
atgatttataaaataagggagggaccgaaaacggttcgaccgaaagcggtacatataaaa

SEQ ID NO: 122 - DNA, 60 bp, Artificial
  Synthetic oligonucleotide
ccgggagagcgcccctccggcatgttcgactcgtccgtcctctgtgagtgctatgacgcg

SEQ ID NO: 123 - DNA, 55 bp, Artificial
  Synthetic oligonucleotide
gttaacaactatcaggcgattctctagttctaacacgaacgtttacggtcgttgc

SEQ ID NO: 124 - DNA, 60 bp, Artificial
  Synthetic oligonucleotide
gggcaaacgacgcccacgtacggtccacgtcgcccttcaatgtctctcttgaccaatagg

SEQ ID NO: 125 - DNA, 60 bp, Artificial
  Synthetic oligonucleotide
ttgtgtaattgatgcactaaaacaagtctataagacagacttttttatgtctaggaagct

SEQ ID NO: 126 - DNA, 60 bp, Artificial
  Synthetic oligonucleotide
tcggggggtgctacaggctatacacctcttggtactgcaagagtgccagcgtctacacct

SEQ ID NO: 127 - DNA, 55 bp, Artificial
  Synthetic oligonucleotide
cgcttagtttgggcctgtgttggtttagaggtaggtcgcgggcagccattaggtg

SEQ ID NO: 128 - DNA, 52 bp, Artificial
  Synthetic oligonucleotide
aataatgataccaaagggcactggagacatcctagttgactgttcaggtggg

SEQ ID NO: 129 - DNA, 60 bp, Artificial
  Synthetic oligonucleotide
aactattcgcaacatgggccattgctctccactccaaagttgtatggagtgatgaagcat

SEQ ID NO: 130 - DNA, 59 bp, Artificial
  Synthetic oligonucleotide
cagatcgatggttagctactatcttagttgaaccgaacgtgacatcagtaactagaact

SEQ ID NO: 131 - DNA, 60 bp, Artificial
  Synthetic oligonucleotide
ccattttgcgagaagttcatccaaacgacccagtgtctgaaaatacaaaaggttcccctt

SEQ ID NO: 132 - DNA, 60 bp, Artificial
  Synthetic oligonucleotide
aagaatctgccgatcaccaccgcgacgccgccgccgggtatgagccgccacctcttctcc

SEQ ID NO: 133 - DNA, 60 bp, Artificial
  Synthetic oligonucleotide
actggtcctctagccgcaaaagctagtgatccagattccaccttcgctaagctcaaagcg

SEQ ID NO: 134 - DNA, 60 bp, Artificial
  Synthetic oligonucleotide
ggatggcgatatggtagatacaggttatggtgccatggactttagtacattacaggatac

SEQ ID NO: 135 - DNA, 59 bp, Artificial
  Synthetic oligonucleotide
tccaagccactccaagttgagtcttgcgacttcacttttgaagtccacctcctccgaca

SEQ ID NO: 136 - DNA, 55 bp, Artificial
  Synthetic oligonucleotide
atggcttcgctcatttacagacagttgcttacaaattcgtacacaactgatctat

SEQ ID NO: 137 - DNA, 60 bp, Artificial
  Synthetic oligonucleotide
gctgaggtgctggcctttgcatttagagagttatatgtagtgtggcgcaacgactttcct

SEQ ID NO: 138 - DNA, 60 bp, Artificial
  Synthetic oligonucleotide
gcagtccacccttgtaatgtattctgtgtcttatcaggaccaggtgcttcatgtgaagcc

SEQ ID NO: 139 - DNA, 53 bp, Artificial
  Synthetic oligonucleotide
cgacaatcattcagtgtagacacatgctgtgaccattgtaaccgtcgagttag

SEQ ID NO: 140 - DNA, 60 bp, Artificial
  Synthetic oligonucleotide
agaaaacagttgaagtggaccccgatgatgttaacaagagtacattgcaaagcaggcggg

SEQ ID NO: 141 - DNA, 60 bp, Artificial
  Synthetic oligonucleotide
gcgacaagatcttgaacgtcaactaggtgatttaagggaggaattcaattctctatcaca

SEQ ID NO: 142 - DNA, 60 bp, Artificial
  Synthetic oligonucleotide
ggactaccaagagtatcaacaattcttggctaggattaatactgcaagggacgcatgtgt

SEQ ID NO: 143 - DNA, 60 bp, Artificial
  Synthetic oligonucleotide
gcaacgtgcgtaccccatgtttgaggtggaaccaaggcaggtcacaccgaatgaccatgc

SEQ ID NO: 144 - DNA, 50 bp, Artificial
  Synthetic oligonucleotide
taataaacgtaagagttgctttaacgaagctagaaaggtcacactatgac

SEQ ID NO: 145 - DNA, 60 bp, Artificial
  Synthetic oligonucleotide
ggcttcgctaatatacagacagctactctataactcatattcagtagatttatcagacga

SEQ ID NO: 146 - DNA, 60 bp, Artificial
  Synthetic oligonucleotide
atcacgcttgtgcgcagaagtaggcgtgctgccacctgacaatacaggttggcattcacg

SEQ ID NO: 147 - DNA, 53 bp, Artificial
  Synthetic oligonucleotide
caccgtgcgaaatggcagacgcttctaaaggtattgactcggtagatgacagt

SEQ ID NO: 148 - DNA, 55 bp, Artificial
  Synthetic oligonucleotide
agtagaaacctcgcaagacggattgcgagccttacagcagctgtttatggacaca

SEQ ID NO: 149 - DNA, 60 bp, Artificial
  Synthetic oligonucleotide
tgatagggtcgcggctggtcgagtcccacacactataataccagtagactttcatgcaat

SEQ ID NO: 150 - DNA, 53 bp, Artificial
  Synthetic oligonucleotide
ggaagacgtgtccttggtgtgccatcagtgtgctgcacagtaaacctgcaatg

SEQ ID NO: 151 - DNA, 60 bp, Artificial
  Synthetic oligonucleotide
agtggcgaatcaaataagtggatatctatgggtgaggaatgtactgtaaaggtgtgccca

SEQ ID NO: 152 - DNA, 60 bp, Artificial
  Synthetic oligonucleotide
cgacagacatggcagttcaaggagtcgcacgcgatgccttgaaacttgctggggccgcga

SEQ ID NO: 153 - DNA, 59 bp, Artificial
  Synthetic oligonucleotide
ggcagttttacacaacgtggtccacttttatcggatactaagttatatgctgtgatgaa

SEQ ID NO: 154 - DNA, 60 bp, Artificial
  Synthetic oligonucleotide
ggaaacactggcgagccgtttagatgcgtgccaggagacgttgctagaactgtatgaaaa

SEQ ID NO: 155 - DNA, 60 bp, Artificial
  Synthetic oligonucleotide
tagcggatcagtggaccggacgctgtacacagtgctggagaccatctgcaacagtggtgt

SEQ ID NO: 156 - DNA, 60 bp, Artificial
  Synthetic oligonucleotide
tataccacagttctattttatttgatatcgttcgttcttgtgagttatattctgaagact

SEQ ID NO: 157 - DNA, 60 bp, Artificial
  Synthetic oligonucleotide
gcggttcaagggcatacacacattgtttctgtttctactgccgacgtcttgataatgtgc

SEQ ID NO: 158 - DNA, 60 bp, Artificial
  Synthetic oligonucleotide
cactgtattggtggaggttgctgacatggagttacacacaaagaagattgaaatatcagg

SEQ ID NO: 159 - DNA, 53 bp, Artificial
  Synthetic oligonucleotide
aagaaatcgggtctacgaaaactcaaaatactaccattaatccaggtccattc

SEQ ID NO: 160 - DNA, 51 bp, Artificial
  Synthetic oligonucleotide
attcgttagcatcttcagtggaatggtatcttagatcaatggagttgcctg

SEQ ID NO: 161 - DNA, 54 bp, Artificial
  Synthetic oligonucleotide
caatcgataagagaaccaaccgaacccgaattgaaggtcagtcttaaacatagg

SEQ ID NO: 162 - DNA, 60 bp, Artificial
  Synthetic oligonucleotide
gggagtaaacttggtgacaggtcatgatgcctatgacagtatcatcagtaattcagtagg

SEQ ID NO: 163 - DNA, 60 bp, Artificial
  Synthetic oligonucleotide
cagaatgtaaccataaatccgggtccatttgcacagactagatatgctccagtcaattgg

SEQ ID NO: 164 - DNA, 60 bp, Artificial
  Synthetic oligonucleotide
atttgatcttaaacgatggatatacttacattcaacaggtaaagctagtattgaaggtgg

SEQ ID NO: 165 - DNA, 60 bp, Artificial
  Synthetic oligonucleotide
atgaatatgtccaggcaaggtattttccagactgttgggagtggccttgaccacatcctg

SEQ ID NO: 166 - DNA, 60 bp, Artificial
  Synthetic oligonucleotide
ggcgcacagctaggcgcggtttggcaactacacaatacattcctaatctatataacactg

SEQ ID NO: 167 - DNA, 53 bp, Artificial
  Synthetic oligonucleotide
ggagtggtagcggaagcaacgaataacgaaaatagatggctggctgttatatt

SEQ ID NO: 168 - DNA, 60 bp, Artificial
  Synthetic oligonucleotide
ggaggagcatggaaaccctagcgaaccgtttagatgcgtgccaggacaaaatgctagaac

SEQ ID NO: 169 - DNA, 60 bp, Artificial
  Synthetic oligonucleotide
ttttgggttgacacctgttgcggtacctgtaatgcaagtgttagattgtctatattagca

SEQ ID NO: 170 - DNA, 59 bp, Artificial
  Synthetic oligonucleotide
cgtaaaggatggtgtttagattgttgtcagcacacggatttgacttactgccaaggatg

SEQ ID NO: 171 - DNA, 60 bp, Artificial
  Synthetic oligonucleotide
gtctaaaaaaccaggaaaacccggtagaaaccgggttgtcaatatgctaaaacgcggtgt

SEQ ID NO: 172 - DNA, 60 bp, Artificial
  Synthetic oligonucleotide
catgatgcaggcacaccacaccaccttgcaagtgctcaccagtcaagaaccacacccacc

SEQ ID NO: 173 - DNA, 60 bp, Artificial
  Synthetic oligonucleotide
cctcaatttgagttaactgaccaaagctggaaatctttttttgaaaggctttggacacaa

SEQ ID NO: 174 - DNA, 60 bp, Artificial
  Synthetic oligonucleotide
tttattgggtaaagcagcgactattgatcaggcactgaatggaaaatttggctcagcagt

SEQ ID NO: 175 - DNA, 54 bp, Artificial
  Synthetic oligonucleotide
taggaactagagggacaatacgaacccgttcaggtactcaaattggtgaaagag

SEQ ID NO: 176 - DNA, 60 bp, Artificial
  Synthetic oligonucleotide
aacctatagagtgatggatgatgataccgcatttgagactggaatcgatggtacatttta

SEQ ID NO: 177 - DNA, 54 bp, Artificial
  Synthetic oligonucleotide
acgcagtggggtcacgacatcgatcgcttgaaagaacgggtcatacgagacttg

SEQ ID NO: 178 - DNA, 60 bp, Artificial
  Synthetic oligonucleotide
ggtagacggtgctgcctgcgaccaaccccaggaggactgggttaacaaagctgaactcca

SEQ ID NO: 179 - DNA, 56 bp, Artificial
  Synthetic oligonucleotide
tggttcgaaaggagggggttagtcaggtgcaacgatcactacctatgtttgaactg

SEQ ID NO: 180 - DNA, 60 bp, Artificial
  Synthetic oligonucleotide
agtgaatctacaagtttacagagttgtaacagagtgcacatcctgtctgtgtgtaattcg

SEQ ID NO: 181 - DNA, 55 bp, Artificial
  Synthetic oligonucleotide
gggctaagggtactgcctgtaagcccggtgctgtgcaaacaggtgactgtcctcc

SEQ ID NO: 182 - DNA, 51 bp, Artificial
  Synthetic oligonucleotide
cattttcgaaacggcatcataaagctatgtttgcaatatccgacacagaga

SEQ ID NO: 183 - DNA, 60 bp, Artificial
  Synthetic oligonucleotide
ggctattaaagctatacaatggggaagtataatctaatcttgtcagaatatttatcattt

SEQ ID NO: 184 - DNA, 60 bp, Artificial
  Synthetic oligonucleotide
aacacggataggatgccgctattcgcaaatttgcggcgctaatgttgtaatataatgcag

SEQ ID NO: 185 - DNA, 60 bp, Artificial
  Synthetic oligonucleotide
cctgactgtgcaagagagtgtgaggttctctttgatgacataagaaactctccaacgcac

SEQ ID NO: 186 - DNA, 60 bp, Artificial
  Synthetic oligonucleotide
aacatgaaagtactagctttaagacgcagtgtggctcaggtatatgcagacactcaagtc

SEQ ID NO: 187 - DNA, 57 bp, Artificial
  Synthetic oligonucleotide
aatagtaaaagaaaggtcacatttgccactacaagactccctgtactagagtagcgc

SEQ ID NO: 188 - DNA, 60 bp, Artificial
  Synthetic oligonucleotide
tagtagtagactccgcacgaagaagcaaacactgaataaaggagatacagaatggtaggg

SEQ ID NO: 189 - DNA, 60 bp, Artificial
  Synthetic oligonucleotide
tctcaaagaaacacgtgccgcttacgcccacagtgttcacttgagtgttggcaaaatgga

SEQ ID NO: 190 - DNA, 57 bp, Artificial
  Synthetic oligonucleotide
tgttacgataaacccaggaccatttgctcaaactggatacgctccagtgaactgggg

SEQ ID NO: 191 - DNA, 50 bp, Artificial
  Synthetic oligonucleotide
tctaagtgttcatcgcaaaattttggaattaacgtacctatcacgggatc

SEQ ID NO: 192 - DNA, 60 bp, Artificial
  Synthetic oligonucleotide
gtcgtaacgggcaactctgcagcggaaccgactactttgggtgtccgtgtttccttttat

SEQ ID NO: 193 - DNA, 60 bp, Artificial
  Synthetic oligonucleotide
cctaatggcagctcactgcatgaattttaaaagaaggggaggaataggggatatgactcc

SEQ ID NO: 194 - DNA, 60 bp, Artificial
  Synthetic oligonucleotide
cttacatcgggtctcgaacagaggacaagattgggcagccagcaatcaagcctaagtgtc

SEQ ID NO: 195 - DNA, 56 bp, Artificial
  Synthetic oligonucleotide
aggtacgacgaaagcaggaggggcccaagaatacctctgtgccctccagtgaggaa

SEQ ID NO: 196 - DNA, 60 bp, Artificial
  Synthetic oligonucleotide
gaattagccactatggctactactcacacgcttctgtcgtttgacgacctcgaatttctc

SEQ ID NO: 197 - DNA, 60 bp, Artificial
  Synthetic oligonucleotide
agtggaggtggacccggatgacgttaacaagagcacactacaaaatagacgggcagctgt

SEQ ID NO: 198 - DNA, 55 bp, Artificial
  Synthetic oligonucleotide
accagtgaattggggtcatggagaaataaacgactcaacgactgtagaacctacc

SEQ ID NO: 199 - DNA, 55 bp, Artificial
  Synthetic oligonucleotide
tgtgtgttcgcgaagaacaaatattggctgagcctcccaaaatacgtagtacagt

SEQ ID NO: 200 - DNA, 59 bp, Artificial
  Synthetic oligonucleotide
ggttctgcatattgggcttggaggctaggggattgggttgagctacaccgggagctgcc

SEQ ID NO: 201 - DNA, 60 bp, Artificial
  Synthetic oligonucleotide
gaagtcttcaacatggatgtcctgtattcattatcgaaaactcttaaagatgctagagac

SEQ ID NO: 202 - DNA, 56 bp, Artificial
  Synthetic oligonucleotide
gggaccagaccgcttcggtctactctatgtcctggaccggaggctctcccaaccag

SEQ ID NO: 203 - DNA, 54 bp, Artificial
  Synthetic oligonucleotide
caacaatccgtggacagtactacacggggactcgtcactgcaactgagtgcaca

SEQ ID NO: 204 - DNA, 60 bp, Artificial
  Synthetic oligonucleotide
acgaaagtataacaaaagtccagagcaggcagtcgctgaattgagtccgcagttgcaggc

SEQ ID NO: 205 - DNA, 60 bp, Artificial
  Synthetic oligonucleotide
taaactggggacatggtgagataaatgattccactactgttgagccagtattggatggac

SEQ ID NO: 206 - DNA, 60 bp, Artificial
  Synthetic oligonucleotide
ggagcaggttggtggtaacagggagttgtacattggtgaccttaggacaaagatgttcac

SEQ ID NO: 207 - DNA, 60 bp, Artificial
  Synthetic oligonucleotide
gtaaaagaaatttgagacaatgtctcaaactctgagcttcgtgcttaaaactcacagtgt

SEQ ID NO: 208 - DNA, 60 bp, Artificial
  Synthetic oligonucleotide
caggactatgttccaggacgcagaggagaaaccacggacattgcatgatttgtgtcaggc

SEQ ID NO: 209 - DNA, 59 bp, Artificial
  Synthetic oligonucleotide
ctgtggggcatgattggtatctagacccaccatttctgtgtaggaaccgtacaaagaca

SEQ ID NO: 210 - DNA, 60 bp, Artificial
  Synthetic oligonucleotide
tcctgttaatgcaatagatgctgaaatgcatgatcttaactgtagctacaacatatgccc

SEQ ID NO: 211 - DNA, 60 bp, Artificial
  Synthetic oligonucleotide
gagcacgtgggagggcgatcgcaatctggctcccagttttgtgaatgaagatggcgtcga

SEQ ID NO: 212 - DNA, 60 bp, Artificial
  Synthetic oligonucleotide
gatgaagcgaataaatggatatcgatgggacagtcttgtaccataaaagtatgtccattg

SEQ ID NO: 213 - DNA, 60 bp, Artificial
  Synthetic oligonucleotide
ttgatccaacagggcttgagcctgatgaccatttgaaggagaaatcatctttgagatatg

SEQ ID NO: 214 - DNA, 60 bp, Artificial
  Synthetic oligonucleotide
aaagcttcaattccaacaatgaaaatagcattaaaaacgtcaaaatgttcatacaaagtg

SEQ ID NO: 215 - DNA, 60 bp, Artificial
  Synthetic oligonucleotide
tgtccattcacgatttggcaaagttacagggtgagcttgtggatgcggcacgtaacccag

SEQ ID NO: 216 - DNA, 60 bp, Artificial
  Synthetic oligonucleotide
cactattattatcaggggaatcatcatatcagggtatgggtacatttatgggtgggaatc

SEQ ID NO: 217 - DNA, 60 bp, Artificial
  Synthetic oligonucleotide
caaatcacggatattacaaacccactatggctggactctgtcatacaatacctacctgaa

SEQ ID NO: 218 - DNA, 60 bp, Artificial
  Synthetic oligonucleotide
gaacagcgcctccctgactctccacctcgaaagaggtggagagtcagggaggcccagagg

SEQ ID NO: 219 - DNA, 60 bp, Artificial
  Synthetic oligonucleotide
ggcaatgctgcaggactaggtataatgggtgagtatagaggtacaccaagaaaccaagac

SEQ ID NO: 220 - DNA, 60 bp, Artificial
  Synthetic oligonucleotide
ttcagttgggccttctggtcgtgtttctggccacccaggaggtccttcgcaagaggtgga

SEQ ID NO: 221 - DNA, 60 bp, Artificial
  Synthetic oligonucleotide
catccgtcaacactccaactgacggtacgaagcgggagcgtatattttctcatcggaaac

SEQ ID NO: 222 - DNA, 60 bp, Artificial
  Synthetic oligonucleotide
gtttttgaactcggacgtcattgcaaaccaaattatatttcatcaaatcattggcagcca

SEQ ID NO: 223 - DNA, 50 bp, Artificial
  Synthetic oligonucleotide
gtaagaccgacaatcccattagaccctttgggacccactaatattcttcc

SEQ ID NO: 224 - DNA, 60 bp, Artificial
  Synthetic oligonucleotide
acgagcaattaggagattcagacgatgaaatagatgaacccgaccatgcagttaatcacc

SEQ ID NO: 225 - DNA, 56 bp, Artificial
  Synthetic oligonucleotide
aggccacgtttaactgccactgtagaaggcacagtacgtgttagtagactaggaac

SEQ ID NO: 226 - DNA, 60 bp, Artificial
  Synthetic oligonucleotide
gtcctaaagcagttcaacaacttagcccacggttgcagtctatgtcaatatctccgcgac

SEQ ID NO: 227 - DNA, 60 bp, Artificial
  Synthetic oligonucleotide
ttgacaatatgcgcatcatgaacgaattgtagacgccaaccccactgtggagatatgacc

SEQ ID NO: 228 - DNA, 60 bp, Artificial
  Synthetic oligonucleotide
ggcgactatagatcaggctctaagtggaaagacagcatctgcaaatagaaatgcgaattg

SEQ ID NO: 229 - DNA, 60 bp, Artificial
  Synthetic oligonucleotide
gtgtgtccagcctgtgcaaagcaacgccagcgaaatggaggacaaagacactaaaggtac

SEQ ID NO: 230 - DNA, 54 bp, Artificial
  Synthetic oligonucleotide
tatgcaaacttgttaaagatgtgagtgcttattttaatgtgctgaaaacgtcac

SEQ ID NO: 231 - DNA, 60 bp, Artificial
  Synthetic oligonucleotide
cgcaccgaggatcctaggctttttgatgcgcaatggatgaaatcatctcagaattgagag

SEQ ID NO: 232 - DNA, 60 bp, Artificial
  Synthetic oligonucleotide
ctcttgttcatgtcctactgttcaagcctccaagctgtgccttgggtggctttggggcat

SEQ ID NO: 233 - DNA, 60 bp, Artificial
  Synthetic oligonucleotide
ttacttgttgccgcgcaggggccccaggttgggtgtgcgcgcgacgaggaagacttccga

SEQ ID NO: 234 - DNA, 61 bp, Artificial
  Synthetic oligonucleotide
gcagctatgttaagccaacgtacaatgtcattagattttgtaactacgaattatatgtcac

SEQ ID NO: 235 - DNA, 60 bp, Artificial
  Synthetic oligonucleotide
ggttaagcaatatgcataatgatgctagtgtagttaatgcttataatgtatataatcctg

SEQ ID NO: 236 - DNA, 60 bp, Artificial
  Synthetic oligonucleotide
tgggagggcgatcgcaatcttgctcccgagggtgtgaatgaagatggcgtcgaatgacgc

SEQ ID NO: 237 - DNA, 60 bp, Artificial
  Synthetic oligonucleotide
agtgattactgacgttgtagatggagtcaatcataaattgaacgtgacaacaaacacttg

SEQ ID NO: 238 - DNA, 60 bp, Artificial
  Synthetic oligonucleotide
ccagttggtgcatggccagtgatgactggtggcgctgtgtcattacgacccgcaggagta

SEQ ID NO: 239 - DNA, 60 bp, Artificial
  Synthetic oligonucleotide
tcaggcaatgtccaaaagatcacgatcattaaattctgctgcgttttactatagagtata

SEQ ID NO: 240 - DNA, 54 bp, Artificial
  Synthetic oligonucleotide
cggggatgtggttactaacagttgtacctaacgatatgtttatacgcgaatcct

SEQ ID NO: 241 - DNA, 59 bp, Artificial
  Synthetic oligonucleotide
ctgtagagcctgtattagatggtccataccaaccagttgcatttaaacctccgaatgat

SEQ ID NO: 242 - DNA, 60 bp, Artificial
  Synthetic oligonucleotide
gcctgattctacgttagtgcagccagtacttgatggaccataccaaccaataaagttcaa

SEQ ID NO: 243 - DNA, 56 bp, Artificial
  Synthetic oligonucleotide
gtccattcgcacagacaagttacgcaccagttgattgggggtccggcgaaataaac

SEQ ID NO: 244 - DNA, 60 bp, Artificial
  Synthetic oligonucleotide
ggctataaaatggcttctttgatttataggcagttactgtcaaactcatacgtaacaaac

SEQ ID NO: 245 - DNA, 60 bp, Artificial
  Synthetic oligonucleotide
ttgacaaaaatcctcacaataccacagagtctagactcgtggtggacttctctcaatttt

SEQ ID NO: 246 - DNA, 57 bp, Artificial
  Synthetic oligonucleotide
ggtgttcactagaatggtattaaacccccatggagaagaccatgacgttgagttagc

SEQ ID NO: 247 - DNA, 60 bp, Artificial
  Synthetic oligonucleotide
ggcttttaaagcgtctcagtcgccgtttgagccttacggtgtagccatggctgagctagc

SEQ ID NO: 248 - DNA, 58 bp, Artificial
  Synthetic oligonucleotide
ctagatatgtcagaattagctgatttgatattgaatgaatggttatgtaatccaatgg

SEQ ID NO: 249 - DNA, 60 bp, Artificial
  Synthetic oligonucleotide
gaggaggatagccccttcctcagagcattacaacggagcttcccgcagtttgaggtagaa

SEQ ID NO: 250 - DNA, 60 bp, Artificial
  Synthetic oligonucleotide
tgagacaactcctgtaaatgcaatagatgctgaaatgcatgaccttaactgcagttacaa

SEQ ID NO: 251 - DNA, 60 bp, Artificial
  Synthetic oligonucleotide
tagaagtgactgcatctatgtgagaggttgagttgccgtcgtctgtcttcggaagcggcg

SEQ ID NO: 252 - DNA, 51 bp, Artificial
  Synthetic oligonucleotide
tacactatcagcgcgcaattttgatactattagactctcatttcagctcgt

SEQ ID NO: 253 - DNA, 60 bp, Artificial
  Synthetic oligonucleotide
ctccccgtgaccacctcatggcgcttgagggagagcgttggccttacgcctctgtcacca

SEQ ID NO: 254 - DNA, 56 bp, Artificial
  Synthetic oligonucleotide
acttgaataccatttggttggaagcgtgtcaaactgaatttgggatgacggagccc

SEQ ID NO: 255 - DNA, 60 bp, Artificial
  Synthetic oligonucleotide
tagtagtagactccctaaagagctactagaacaacgatggcaactatggaggaattgcag

SEQ ID NO: 256 - DNA, 60 bp, Artificial
  Synthetic oligonucleotide
cctccacatcagtgacacagctggtgagagacaagcaggcagccaaggcttacatgaaca

SEQ ID NO: 257 - DNA, 60 bp, Artificial
  Synthetic oligonucleotide
ctaggcctgtacgggactgtaacacctgctcttgaagcatatgaagatggccccaaccaa

SEQ ID NO: 258 - DNA, 59 bp, Artificial
  Synthetic oligonucleotide
aggttcttacagttttgcgttacctgtaggcaatcatccggtgatgagtggtggcgcag

SEQ ID NO: 259 - DNA, 60 bp, Artificial
  Synthetic oligonucleotide
tcaggccggattaagccatagtacggaaagagctatgctgcctgtgagccccgtccaagg

SEQ ID NO: 260 - DNA, 60 bp, Artificial
  Synthetic oligonucleotide
tcgctctgatgtcaccatttgtgaggacgcaaaattacggcatgtatttaccaataacgg

SEQ ID NO: 261 - DNA, 60 bp, Artificial
  Synthetic oligonucleotide
gagagatgatgcagacctaaagcgactgagggatctgaatcaagctgtcaacaatcttgt

SEQ ID NO: 262 - DNA, 60 bp, Artificial
  Synthetic oligonucleotide
actagtagtgtgttttacctctgatggtgtaaacatgaaagtactagctttaagacacag

SEQ ID NO: 263 - DNA, 60 bp, Artificial
  Synthetic oligonucleotide
aactgatgctaaagaaggatgtagtggttggtttatgttagaagctgcgtgctcagatga

SEQ ID NO: 264 - DNA, 60 bp, Artificial
  Synthetic oligonucleotide
ttatttacgaagggaacaaatgtttgttagacatttatttaatagggctggtgctgttgg

SEQ ID NO: 265 - DNA, 60 bp, Artificial
  Synthetic oligonucleotide
acctcaaacatgcattgtctgtgaatcaacccctgttaatgcaatagatgctgaaatgca

SEQ ID NO: 266 - DNA, 60 bp, Artificial
  Synthetic oligonucleotide
gctgcatcaaacatgatgcagtccatcagtgcacagtgaggggttatttcctctttgccg

SEQ ID NO: 267 - DNA, 60 bp, Artificial
  Synthetic oligonucleotide
cttgttgcaacaggccttgccaagcttgcagagactgaagggaaaggagtgttcgatgaa

SEQ ID NO: 268 - DNA, 50 bp, Artificial
  Synthetic oligonucleotide
tttcagactaaagttgccagaccctaatcgatttgcattagctgacatgt

SEQ ID NO: 269 - DNA, 60 bp, Artificial
  Synthetic oligonucleotide
gcttgtcgtaacgcgcaagtctgtggcggaaccgactactttgggtgtccgtgtttcctg

SEQ ID NO: 270 - DNA, 60 bp, Artificial
  Synthetic oligonucleotide
ctgtttattcagatctacttgcattcgtatcggctgatacagtagaacctataaatgcgg

SEQ ID NO: 271 - DNA, 66 bp, Artificial
  Synthetic oligonucleotide
ctaagtggagaaaattagtagatttcagagaactcaataaaagaactcaagacttttgggaagttc

SEQ ID NO: 272 - DNA, 60 bp, Artificial
  Synthetic oligonucleotide
catggagacactcaatatgaccatgcctctctcctgcacaaagaacaacagtcatcatta

SEQ ID NO: 273 - DNA, 60 bp, Artificial
  Synthetic oligonucleotide
ttaagaaaatacagtatggagccgtagcatcaggagaaaaacaaactaaagcagctaact

SEQ ID NO: 274 - DNA, 59 bp, Artificial
  Synthetic oligonucleotide
acacgccggactggatagtaagacaaacagttattggacatgcaatgggagaaacacaa

SEQ ID NO: 275 - DNA, 60 bp, Artificial
  Synthetic oligonucleotide
tggcggcctggtgacggcaaggtatacctgcctcccactcctgtgtctaaagttatcagt

SEQ ID NO: 276 - DNA, 60 bp, Artificial
  Synthetic oligonucleotide
gcatcagataaaattgcgcaaggtgttattattgcgtaccgcgatatgcaattggaaaga

SEQ ID NO: 277 - DNA, 60 bp, Artificial
  Synthetic oligonucleotide
ggctttaaaacgaagtcttcgacatggaggttctgtactcattgtcaaaaactcttaaag

SEQ ID NO: 278 - DNA, 60 bp, Artificial
  Synthetic oligonucleotide
caggctggcaggctatgttccgctggatgcgcttccatgatctcggattgtggacaggag

SEQ ID NO: 279 - DNA, 60 bp, Artificial
  Synthetic oligonucleotide
taaaacgaaagtatatcagttcacaagaggttttgcagcttagtcctcgtctgcagtcta

SEQ ID NO: 280 - DNA, 60 bp, Artificial
  Synthetic oligonucleotide
gatcgaatgcagttaagacaaatgcagatgctggcgtgtctatggattcatcaacgcaat

SEQ ID NO: 281 - DNA, 58 bp, Artificial
  Synthetic oligonucleotide
ttagatggtccttatcaacccactacattcaaaccacccaatgattattggctgctta

SEQ ID NO: 282 - DNA, 60 bp, Artificial
  Synthetic oligonucleotide
atggctggctgagaagccacagtcagccatatcgcgtatggctcaagccttaatcccgtt

SEQ ID NO: 283 - DNA, 60 bp, Artificial
  Synthetic oligonucleotide
aaaaatgtaacacctctacaatggatgccgacaagattgtattcaaagtcaataatcagg

SEQ ID NO: 284 - DNA, 57 bp, Artificial
  Synthetic oligonucleotide
tgtacctacccctgatactccaattcatgacacctacagatatattgattctcttgc

SEQ ID NO: 285 - DNA, 60 bp, Artificial
  Synthetic oligonucleotide
cttgacagttgaccaatcaactgttggtgcaagtgggatttatccctcatttatgtcacg

SEQ ID NO: 286 - DNA, 60 bp, Artificial
  Synthetic oligonucleotide
aagaagacgagggagaggatggaaactctcagcgcacgtttcaatgcactgcaagagact

SEQ ID NO: 287 - DNA, 60 bp, Artificial
  Synthetic oligonucleotide
ttttgtgaacaggcagagctagagacagcacaggcattgttccatgcgcaggaggtccac

SEQ ID NO: 288 - DNA, 60 bp, Artificial
  Synthetic oligonucleotide
ggacacggtgaattgtctgactcaacattagttcagccgacactagatggaccgtatcaa

SEQ ID NO: 289 - DNA, 60 bp, Artificial
  Synthetic oligonucleotide
gttgtgggctcggttagacttacacgagcaggacgaccaggaggacaatggagacattgg

SEQ ID NO: 290 - DNA, 60 bp, Artificial
  Synthetic oligonucleotide
aaggtcatcgataccctcacatgcggcttcgccgatctcatggggtacatcccgctcgtc

SEQ ID NO: 291 - DNA, 60 bp, Artificial
  Synthetic oligonucleotide
ccttttcagttgggccttctggtcgtgttcttggccacccaggaggtccttcgcaagagg

SEQ ID NO: 292 - DNA, 60 bp, Artificial
  Synthetic oligonucleotide
ggcttttaaaagttctgttccgagagagcgcgtgcggaaagatggataaacttaccgacc

SEQ ID NO: 293 - DNA, 60 bp, Artificial
  Synthetic oligonucleotide
cctaggagtgaagcaaagggcaagacaaagggaggacgtggagctatccgccatggaggg

SEQ ID NO: 294 - DNA, 50 bp, Artificial
  Synthetic oligonucleotide
cggggtcactagacgctgtatatacgaattcgactagtggagagccattt

SEQ ID NO: 295 - DNA, 59 bp, Artificial
  Synthetic oligonucleotide
gcatcgctagccgaccgtttagatgcgtgccaggagatgctaatagacctctatgaaaa

SEQ ID NO: 296 - DNA, 60 bp, Artificial
  Synthetic oligonucleotide
cacagccggctgggataccaaggtcactaacgcagacctagaggatgaagagcagctcct

SEQ ID NO: 297 - DNA, 60 bp, Artificial
  Synthetic oligonucleotide
cccctcccgggagagccatagtggtctgcggaaccggtgagtacaccggaattgccagga

SEQ ID NO: 298 - DNA, 60 bp, Artificial
  Synthetic oligonucleotide
taacaaaagcacattacagagcagacgggcagctgtgtctgcattggagaccaaactcgg

SEQ ID NO: 299 - DNA, 60 bp, Artificial
  Synthetic oligonucleotide
aaaatatgcatgttatggatgatattgcacacggaaggtatactccgggtgtcattcctc

SEQ ID NO: 300 - DNA, 60 bp, Artificial
  Synthetic oligonucleotide
gcatccacctggtcagacaatatccccctggtgtgtctttaccttcagaatctgacagtg

SEQ ID NO: 301 - DNA, 54 bp, Artificial
  Synthetic oligonucleotide
tctcaccgagaggctttatgtcgggggtcctcttaccaattcaaggggggagaa

SEQ ID NO: 302 - DNA, 60 bp, Artificial
  Synthetic oligonucleotide
gtccctgaggcaatacgcaactgctttgcagtctttcgtacttttgcttggaacgacagg

SEQ ID NO: 303 - DNA, 60 bp, Artificial
  Synthetic oligonucleotide
ggatggggatatgtgtgatattggctttggtgccatgaattttgctgccttgcaggctga

SEQ ID NO: 304 - DNA, 60 bp, Artificial
  Synthetic oligonucleotide
tgaggtagaagccaagcaggtcactgataatgaccatgctaatgccagagcgttttcgca

SEQ ID NO: 305 - DNA, 60 bp, Artificial
  Synthetic oligonucleotide
agtaaatcctgtgtgctaattgaggtgcattggtctgcaaatcgagttgctaggcaataa

SEQ ID NO: 306 - DNA, 60 bp, Artificial
  Synthetic oligonucleotide
ctgttccgagagagcgcgtgcggaaagatggaaaagcttaccgacctcaactacacattg

SEQ ID NO: 307 - DNA, 60 bp, Artificial
  Synthetic oligonucleotide
ggcgtcgtaaacgtattccctattttcttgcagatggcggtgtggcggcctagtgacagc

SEQ ID NO: 308 - DNA, 60 bp, Artificial
  Synthetic oligonucleotide
tcaagacatcctttcactgttacggagcatgcactaaatatgagtacccatggcatacag

SEQ ID NO: 309 - DNA, 51 bp, Artificial
  Synthetic oligonucleotide
cgcccttctattccactagaacctataggccctgtagatatattaccagtg

SEQ ID NO: 310 - DNA, 60 bp, Artificial
  Synthetic oligonucleotide
gcctggtacaaggtagccccagtgaagagaccaccaaattagtgtttgaaatggagggcc

SEQ ID NO: 311 - DNA, 60 bp, Artificial
  Synthetic oligonucleotide
ctcaaggaaagatcaagcctcagatatggaaatgtccttgatgtgaatgccattgatatt

SEQ ID NO: 312 - DNA, 60 bp, Artificial
  Synthetic oligonucleotide
ctcaaactaggagcaaatgatgaatggagaccagcaccagtgacaaagtataaaggatgg

SEQ ID NO: 313 - DNA, 60 bp, Artificial
  Synthetic oligonucleotide
aagtgttttatactgtagttgattatgtgaatcagataattcaattaatgtccaaaagat

SEQ ID NO: 314 - DNA, 60 bp, Artificial
  Synthetic oligonucleotide
ttgtcagctataattgattttaaaacattaaagaatctaaatgacaattatggaataacg

SEQ ID NO: 315 - DNA, 60 bp, Artificial
  Synthetic oligonucleotide
ctatgaaggatcatcatcgtgcattaatttaccatataggattgtaaattgtattgactt

SEQ ID NO: 316 - DNA, 52 bp, Artificial
  Synthetic oligonucleotide
gaaaaagtggaggtaccaagaactgacattactcctccgcctgcggaaagca

SEQ ID NO: 317 - DNA, 60 bp, Artificial
  Synthetic oligonucleotide
acatgaccctctatgagcacaatagttaaaagctaacactgtcaaaaacctaaatggcta

SEQ ID NO: 318 - DNA, 64 bp, Artificial
  Synthetic oligonucleotide
gcgatctcattcagcaatttaatcaaatgatagtaaccatgaatggaaatgactttcaaactgg

SEQ ID NO: 319 - DNA, 58 bp, Artificial
  Synthetic oligonucleotide
acagtgaatccaggaccattcgcgcaaactggatatgctccggttaattgggggccag

SEQ ID NO: 320 - DNA, 59 bp, Artificial
  Synthetic oligonucleotide
atttcatggtgaaacaccgagggctactactgatagctcaaacactgcaaatttgaacg

SEQ ID NO: 321 - DNA, 51 bp, Artificial
  Synthetic oligonucleotide
tagttcgtggaaggatactttatcacagttgttcttgacaaaaggatggcc

SEQ ID NO: 322 - DNA, 60 bp, Artificial
  Synthetic oligonucleotide
ggaagtgcgttttaacggggaaactatctttgctcctgttaccagctcctcgccgtcctc

SEQ ID NO: 323 - DNA, 59 bp, Artificial
  Synthetic oligonucleotide
tcataaagtatggaggtaaagtattcacatataacggcgaaactccgagtgcaacgtca

SEQ ID NO: 324 - DNA, 60 bp, Artificial
  Synthetic oligonucleotide
ctactatactaatcgaaccaaatgtcacgtcacaaagcagaacatacactctatttggac

SEQ ID NO: 325 - DNA, 60 bp, Artificial
  Synthetic oligonucleotide
cagccaacttgaatgatgtggtctgcagtggtggtgattacagtttcgcattgccagtag

SEQ ID NO: 326 - DNA, 60 bp, Artificial
  Synthetic oligonucleotide
gtctattacagagacagcagagaccctatttggaaaggaccggcacagctcctgtggaaa

SEQ ID NO: 327 - DNA, 59 bp, Artificial
  Synthetic oligonucleotide
atcacatgttgagttctatagcgtttccactagatgcagaatgttcacgcaacgtaaac

SEQ ID NO: 328 - DNA, 60 bp, Artificial
  Synthetic oligonucleotide
ccccttgatctacactgcctgatagggtcgcggctggtcgagtcccacacactataaacc

SEQ ID NO: 329 - DNA, 60 bp, Artificial
  Synthetic oligonucleotide
tgttcatggttgcatggggaaaagaggcagtggataacttccacctcggagacgacatgg

SEQ ID NO: 330 - DNA, 59 bp, Artificial
  Synthetic oligonucleotide
ctagcctttgaagcactctcaaaaatgatgcagtccatgagagcacagtgtggggtgat

SEQ ID NO: 331 - DNA, 60 bp, Artificial
  Synthetic oligonucleotide
gagaatttccgtctggctaacggatagctccttttgatgtatggtattgaatataccaca

SEQ ID NO: 332 - DNA, 55 bp, Artificial
  Synthetic oligonucleotide
gatgtgtttgcaaagaagcgtagtatcagcgagggtgcaacgtttgaagagcggg

SEQ ID NO: 333 - DNA, 60 bp, Artificial
  Synthetic oligonucleotide
gtgcatcttacacaaccaaccatacttgtcccatactttgtcttcatattctcttgaggc

SEQ ID NO: 334 - DNA, 54 bp, Artificial
  Synthetic oligonucleotide
ggaattggatgtacgacaaccgacgtcacaacatttgaagaggtagcaaacgcg

SEQ ID NO: 335 - DNA, 60 bp, Artificial
  Synthetic oligonucleotide
cacacaaagcgttgcttcagaagtgtcagacaggaggtcttatagctcaagcaagagtag

SEQ ID NO: 336 - DNA, 60 bp, Artificial
  Synthetic oligonucleotide
tcactctaatgaatagtacattgcacacaatactagaagatccagggatggcgtattttc

SEQ ID NO: 337 - DNA, 60 bp, Artificial
  Synthetic oligonucleotide
gagagatcaagcctcagatatggaaatgtccttgatgtgaatgccattgatattgaagaa

SEQ ID NO: 338 - DNA, 60 bp, Artificial
  Synthetic oligonucleotide
gggccaaccttgatgtgagccgtgtcatagatgggcgaacaaacatcaagccggaagagg

SEQ ID NO: 339 - DNA, 60 bp, Artificial
  Synthetic oligonucleotide
gtgtaatgttcatcccttttccacttaacaacatgagaaatgagtgacaaggattctgag

SEQ ID NO: 340 - DNA, 60 bp, Artificial
  Synthetic oligonucleotide
ctgagctagcttgcttttgttatccccatttggagaacgatagctatagatttattccat

SEQ ID NO: 341 - DNA, 60 bp, Artificial
  Synthetic oligonucleotide
taaaggggcctactactacatcccgcgcctctgctacaagctcactatatgggtccacgc

SEQ ID NO: 342 - DNA, 60 bp, Artificial
  Synthetic oligonucleotide
agaaatcatcattctatcaatcatacctcagacgcacacaatcaatgggaatacaactgg

SEQ ID NO: 343 - DNA, 60 bp, Artificial
  Synthetic oligonucleotide
tagtgatctaattcaacaatttaatcaaatgataattactatgaatggaaatgaatttca

SEQ ID NO: 344 - DNA, 50 bp, Artificial
  Synthetic oligonucleotide
tcaggagttaactattactgccgaaggtggggatatagtctttcagaacg

SEQ ID NO: 345 - DNA, 51 bp, Artificial
  Synthetic oligonucleotide
cgaaattttgatacgatcagactacgattccaattagttagaccaccaaat

SEQ ID NO: 346 - DNA, 60 bp, Artificial
  Synthetic oligonucleotide
gcctcaaaaatgccctgactggttacaccatcacaccctgcaccataaaatggcaagcta

SEQ ID NO: 347 - DNA, 54 bp, Artificial
  Synthetic oligonucleotide
attattgcataccgtgaaatgcaactagactatgatgaactatatggattcgtg

SEQ ID NO: 348 - DNA, 60 bp, Artificial
  Synthetic oligonucleotide
tgggaagtgaaagttaataaggaaactgtgtttgctcctgtcaccagctccacacctccc

SEQ ID NO: 349 - DNA, 60 bp, Artificial
  Synthetic oligonucleotide
gacagcttaggagaacaagagctggggatggccaggaaggccattctgaaaggaaagggg

SEQ ID NO: 350 - DNA, 60 bp, Artificial
  Synthetic oligonucleotide
aactactaattctacattcaaagtatttgactcagaagatttcattatagaatatggaac

SEQ ID NO: 351 - DNA, 60 bp, Artificial
  Synthetic oligonucleotide
tatattgatgacattgtttatcttcatgactattcatattatactaataatgagataagg

SEQ ID NO: 352 - DNA, 60 bp, Artificial
  Synthetic oligonucleotide
aaggtgtttccaagatggagctatagtgaagcaaaatccatcaaaggaagcagtgacaga

SEQ ID NO: 353 - DNA, 60 bp, Artificial
  Synthetic oligonucleotide
cttttcccccaaagcactagtcttcaagggcccaatgggaacgctggacgggccgtcaga

SEQ ID NO: 354 - DNA, 60 bp, Artificial
  Synthetic oligonucleotide
ccgcaaaagaaagcagtcaatcagcaacatggggatatggaagtggctagtaatggccag

SEQ ID NO: 355 - DNA, 60 bp, Artificial
  Synthetic oligonucleotide
caaacatacacgagaatacgctgagttttattcgcaatctaatcaattactttcatatgg

SEQ ID NO: 356 - DNA, 60 bp, Artificial
  Synthetic oligonucleotide
ggggtacagtgcaggggaaagaataatagacataatagcaacagacatacaaactaaaga

SEQ ID NO: 357 - DNA, 60 bp, Artificial
  Synthetic oligonucleotide
acaatcaatgggaatacaactggaccagaggattattgtgctctttatggttgcctgggg

SEQ ID NO: 358 - DNA, 60 bp, Artificial
  Synthetic oligonucleotide
tgttgccaatatacaaatctaacatactgtagaggatgtgctctatatcatgtgtgtcaa

SEQ ID NO: 359 - DNA, 59 bp, Artificial
  Synthetic oligonucleotide
cgcaattcacagatttcgtatcattgaattcactacgatttagatttagtttgacggtg

SEQ ID NO: 360 - DNA, 58 bp, Artificial
  Synthetic oligonucleotide
tgctgggagacggggggtcctgggttcgatgagtgcggtgtcggtactcggatgacga

SEQ ID NO: 361 - DNA, 60 bp, Artificial
  Synthetic oligonucleotide
tgcatgtaatggatgacatggctaatggaagatacacgccaggcataataccaccagtga

SEQ ID NO: 362 - DNA, 60 bp, Artificial
  Synthetic oligonucleotide
agcagaagcaggggattatggaaatcaacccatatttgatgtttctaaacaacgacgtta

SEQ ID NO: 363 - DNA, 60 bp, Artificial
  Synthetic oligonucleotide
aaaacacaatggcagaatttagtgaagatcctgaattacaaccagcaatgctattcaaca

SEQ ID NO: 364 - DNA, 60 bp, Artificial
  Synthetic oligonucleotide
aataatatatgcagggagaatgacagactccattaaatcatggagaaaggacatattgag

SEQ ID NO: 365 - DNA, 59 bp, Artificial
  Synthetic oligonucleotide
agcaataacaagcagtttcgaaaatgtcctcgacaactcccaaacgctcagagccagcc

SEQ ID NO: 366 - DNA, 60 bp, Artificial
  Synthetic oligonucleotide
gacgtcaaaacagaaagacgccagatgagcaacgcaaagccaatgctctcataataaatg

SEQ ID NO: 367 - DNA, 60 bp, Artificial
  Synthetic oligonucleotide
tcaagatgaatccaaatcagaagattctatgcacttctgccactgctatcgtaataggca

SEQ ID NO: 368 - DNA, 60 bp, Artificial
  Synthetic oligonucleotide
agcaaaaacaagcacttgacatgacagacaggcccgaccacatagacagcagagtatggg

SEQ ID NO: 369 - DNA, 60 bp, Artificial
  Synthetic oligonucleotide
agcaataacaagcagtactagaccataaagatggcccaccaaatggcagcaggtaattct

SEQ ID NO: 370 - DNA, 60 bp, Artificial
  Synthetic oligonucleotide
agatggagaaggcaaagcagaactagcagaaaaattacactgttggttcggtggaaaaga

SEQ ID NO: 371 - DNA, 60 bp, Artificial
  Synthetic oligonucleotide
attttaaagacgcccctgcaacaataacaatggcagatttaactacaaaattaggaagag

SEQ ID NO: 372 - DNA, 60 bp, Artificial
  Synthetic oligonucleotide
tactgttggcgcctgtttacagtcgtctatgtcttagaaaccatcctgacaccacctgga

SEQ ID NO: 373 - DNA, 60 bp, Artificial
  Synthetic oligonucleotide
aaattctcaccatttattcgactgtcgcctcatctcttgtgcttgcaatggggtttgctg

SEQ ID NO: 374 - DNA, 60 bp, Artificial
  Synthetic oligonucleotide
agcagaagcaggggatccgaaatgtcgaaaacttttgccgaaatagcagagacttttcta

SEQ ID NO: 375 - DNA, 60 bp, Artificial
  Synthetic oligonucleotide
ggggctatatgaagcaattgaggagtgcctgattaatgatccctgggttttgcttaatgc

SEQ ID NO: 376 - DNA, 60 bp, Artificial
  Synthetic oligonucleotide
atgcagacacactatgtataggttaccatgcaaataattcaactgacactgttgacacag

SEQ ID NO: 377 - DNA, 60 bp, Artificial
  Synthetic oligonucleotide
ggactttgaagattgcaaggatgtcagcgatttgagacagtatgacagcgatgagcctga

SEQ ID NO: 378 - DNA, 60 bp, Artificial
  Synthetic oligonucleotide
gcttcatagaaggagggtggcctgggctaattaatggatggtatggtttccagcatcaga

SEQ ID NO: 379 - DNA, 60 bp, Artificial
  Synthetic oligonucleotide
ggctatctaccatgcatgagagaagcaaacccaaaaccacgggagctgatcagacatgcc

SEQ ID NO: 380 - DNA, 60 bp, Artificial
  Synthetic oligonucleotide
cccagatatgttaagcaaaacactctgaaattggcaacagggatgcggaatgtgccaggg

SEQ ID NO: 381 - DNA, 60 bp, Artificial
  Synthetic oligonucleotide
cggttccagatcaagggtgtcgagctaaaatctggatacaaagactggatcctgtggatt

SEQ ID NO: 382 - DNA, 60 bp, Artificial
  Synthetic oligonucleotide
taatccgcgttctaatgatgggaaaggcaattgtggcccagtattttctaatggagcaaa

SEQ ID NO: 383 - DNA, 60 bp, Artificial
  Synthetic oligonucleotide
agggttcatagaaaacggatgggaaggaatgatagatggttggtatggtttcaggcatca

SEQ ID NO: 384 - DNA, 60 bp, Artificial
  Synthetic oligonucleotide
atggaccagcaacagtatagttactttctgtggactagacaatgaacctggatcgggcaa

SEQ ID NO: 385 - DNA, 60 bp, Artificial
  Synthetic oligonucleotide
ctccacggtattttgtggtgtttcaagtgaggtcccaggatggtcctgggatgatggagc

SEQ ID NO: 386 - DNA, 60 bp, Artificial
  Synthetic oligonucleotide
cagagggcctccgcaggccaaaccagtgtgcaacctacgttttctgtacaaagaaacctc

SEQ ID NO: 387 - DNA, 60 bp, Artificial
  Synthetic oligonucleotide
ttctgagcatctacagcagtgttgcctcaagcttagttctactgctcatgattattgggg

SEQ ID NO: 388 - DNA, 60 bp, Artificial
  Synthetic oligonucleotide
attctgataccacaagttggtcatggcccgatggcgctctgttgccatttgacatagaca

SEQ ID NO: 389 - DNA, 60 bp, Artificial
  Synthetic oligonucleotide
gggaaaattgtccatattagcccattgtcaggaagtgctcagcatatagaggaatgttcc

SEQ ID NO: 390 - DNA, 60 bp, Artificial
  Synthetic oligonucleotide
gtgaaaatgaatccaaatcagaagataatatgcatctcagcaacaggaatgacactatcc

SEQ ID NO: 391 - DNA, 60 bp, Artificial
  Synthetic oligonucleotide
aatgttgctcctgagaccaggacagcaataatttcagcaataacaggaggaaaatcagcc

SEQ ID NO: 392 - DNA, 60 bp, Artificial
  Synthetic oligonucleotide
cgggatagctcccctacaattggggaagtgcaatgtagcgggatggctccttggcaaccc

SEQ ID NO: 393 - DNA, 60 bp, Artificial
  Synthetic oligonucleotide
cggaacctgatgtcgcagtctcgcactcgcgagatactaacaaaaaccacagtggaccat

SEQ ID NO: 394 - DNA, 60 bp, Artificial
  Synthetic oligonucleotide
ggccgataaaggtatgacttattcttttgatgtcagagacaacaccttggttgtaagaag

SEQ ID NO: 395 - DNA, 60 bp, Artificial
  Synthetic oligonucleotide
agcagtgttcacagctggagtaccttggagggccttcatcttcgttctagaacagacaat

SEQ ID NO: 396 - DNA, 56 bp, Artificial
  Synthetic oligonucleotide
cagcgtgcagcccacattctctgtgcagagaaaccttccgtttgagagagcaacca

SEQ ID NO: 397 - DNA, 60 bp, Artificial
  Synthetic oligonucleotide
agtgaacaaccaaaactggtcaggatactcaggagcgttcatcgattattgggctgatag

SEQ ID NO: 398 - DNA, 60 bp, Artificial
  Synthetic oligonucleotide
ggctcgactcttcctagaaggtccggagctgcaggtgctgcagtcaaaggaatcgggaca

SEQ ID NO: 399 - DNA, 60 bp, Artificial
  Synthetic oligonucleotide
tggtctccctgggggcaatcagtttctggatgtgttctaatgggtctttgcagtgcagaa

SEQ ID NO: 400 - DNA, 60 bp, Artificial
  Synthetic oligonucleotide
ggatgtcaaaaatgcaattggggtcctcatcggaggacttgaatggaatgataacacagt

SEQ ID NO: 401 - DNA, 57 bp, Artificial
  Synthetic oligonucleotide
tacaaccgaatgggaacggtgaccacagaagtggcttttggcctagtatgtgccact

SEQ ID NO: 402 - DNA, 60 bp, Artificial
  Synthetic oligonucleotide
gaggactgtttggggcgattgcagggttcatagaaggtggttggccaggattaataaatg

SEQ ID NO: 403 - DNA, 60 bp, Artificial
  Synthetic oligonucleotide
ttccttctccatatcatgctttttgctcgttgcactacttttagccttcattttgtgggc

SEQ ID NO: 404 - DNA, 60 bp, Artificial
  Synthetic oligonucleotide
ctgggcttaggaatgtacctgccacatcaaacagaggactgtttggggcgattgcagggt

SEQ ID NO: 405 - DNA, 60 bp, Artificial
  Synthetic oligonucleotide
gcaaacaattcaacagagcaggttgatacaatcatggaaaagaatgtgacggtcacacat

SEQ ID NO: 406 - DNA, 60 bp, Artificial
  Synthetic oligonucleotide
acagctgcattgcaagcagtcttgtgttggcagcaatcattatggggttcatcttctggg

SEQ ID NO: 407 - DNA, 60 bp, Artificial
  Synthetic oligonucleotide
agtgatactgtagattggtcttggccagacggtgctgagttgccattcaccattgacaag

SEQ ID NO: 408 - DNA, 59 bp, Artificial
  Synthetic oligonucleotide
tgatggtaggtctcatactcgcatttataatgtgggcatgcagcagtggcaattgccgg

SEQ ID NO: 409 - DNA, 60 bp, Artificial
  Synthetic oligonucleotide
cagagttgattgcacctacttcttggggggcagtgaatgatggagtatcgtcggcctgtc

SEQ ID NO: 410 - DNA, 60 bp, Artificial
  Synthetic oligonucleotide
cctgagcaacaactcaacagagagagtggacacaataattgagagtaatgtcacggttac

SEQ ID NO: 411 - DNA, 60 bp, Artificial
  Synthetic oligonucleotide
ggggttcattatgtgggcctgccaaagaggcaacattaggtgcaacatttgcatttgagt

SEQ ID NO: 412 - DNA, 60 bp, Artificial
  Synthetic oligonucleotide
ggtttagcttcggggcatcatgcttccttcttcttgccattgcaatgggattggttttca

SEQ ID NO: 413 - DNA, 60 bp, Artificial
  Synthetic oligonucleotide
gaagataatatgcatttctgccacgggaatgacactatcggtagtaagcctgctgatagg

SEQ ID NO: 414 - DNA, 55 bp, Artificial
  Synthetic oligonucleotide
cccgaaacatactacggacacaagagtctgaatgtgtatgccacaacggtgtctg

SEQ ID NO: 415 - DNA, 60 bp, Artificial
  Synthetic oligonucleotide
taaaagcggttagaggtgacctgaatttcgtcaacagagcaaatcagcggttgaacccca

SEQ ID NO: 416 - DNA, 60 bp, Artificial
  Synthetic oligonucleotide
aagatgtgatactttggtttagcttcggggcatcatgtttcatacttctggccattgcaa

SEQ ID NO: 417 - DNA, 55 bp, Artificial
  Synthetic oligonucleotide
ggaccaaggattcaataaccgacatctggacttatcaagcagagctattggtagc

SEQ ID NO: 418 - DNA, 60 bp, Artificial
  Synthetic oligonucleotide
ataacatttatgcaagccttacaactattgcttgaagtggaacaagagataagaactttc

SEQ ID NO: 419 - DNA, 60 bp, Artificial
  Synthetic oligonucleotide
gctacagtagcaggttccctgtcactggcaatcatgatggctgggatctctttctggatg

SEQ ID NO: 420 - DNA, 60 bp, Artificial
  Synthetic oligonucleotide
gggatgggggcagctctgatgtcaatcaagctccagttttgggctccaatgaccagatct

SEQ ID NO: 421 - DNA, 60 bp, Artificial
  Synthetic oligonucleotide
gagaaacaatagaagaagttgaaacaggaggagatccctccttttcagtaaggagtgaag

SEQ ID NO: 422 - DNA, 60 bp, Artificial
  Synthetic oligonucleotide
cggaataccaatgaagataaatcaggtaggatccacgagaacaccaacaccgatcagcac

SEQ ID NO: 423 - DNA, 60 bp, Artificial
  Synthetic oligonucleotide
gcactgaacgtggctatgccaaacaatgaaaaatttgacaaattgtacatttggggggtt

SEQ ID NO: 424 - DNA, 60 bp, Artificial
  Synthetic oligonucleotide
aggagaaacaacttcatggacagattcattggaagctttgttcactgtacaccagtcatg

SEQ ID NO: 425 - DNA, 60 bp, Artificial
  Synthetic oligonucleotide
gtataaaatactgtcaatttacagctgcattgcaagcagtcttgtattggcagcactcat

SEQ ID NO: 426 - DNA, 60 bp, Artificial
  Synthetic oligonucleotide
ctcaagaacgtcagcaacaaagttgcacttctccgagaaagcatatggtgggttacagag

SEQ ID NO: 427 - DNA, 60 bp, Artificial
  Synthetic oligonucleotide
gtggaagcccattcccagttgggtccggttccttccccgatggggcacagatccaatact

SEQ ID NO: 428 - DNA, 60 bp, Artificial
  Synthetic oligonucleotide
gtgacataataagagctgcattaggactaaagatcagacaaagacaaagatttggacgac

SEQ ID NO: 429 - DNA, 60 bp, Artificial
  Synthetic oligonucleotide
ggaagattctacatacagatgtgcactgaactcaaactcagtgactacgaagggagactg

SEQ ID NO: 430 - DNA, 60 bp, Artificial
  Synthetic oligonucleotide
agggaaacttaataggttaattgaaaaaaccaacaaacagtttgaactcatagacaatga

SEQ ID NO: 431 - DNA, 60 bp, Artificial
  Synthetic oligonucleotide
gaagcttatatgctctcgcttagagaagctggaccataacctgagcaaagcaatcttggg

SEQ ID NO: 432 - DNA, 60 bp, Artificial
  Synthetic oligonucleotide
gagaaattgaagcagtgaggaggattgcctatatgaaccaagcatcaagtcttcagaacc

SEQ ID NO: 433 - DNA, 60 bp, Artificial
  Synthetic oligonucleotide
ttaaacacaatgacaaaagatgctgaaagaggcaaactaaaaagaagagcaattgccacc

SEQ ID NO: 434 - DNA, 60 bp, Artificial
  Synthetic oligonucleotide
aacaggtggaaggaagaattcaagacctggagaagtatgttgaggatacaaagattgatt

SEQ ID NO: 435 - DNA, 60 bp, Artificial
  Synthetic oligonucleotide
aaagcactaattccaggagcggctttgaaatgatttgggatccaaatgggtggactggaa

SEQ ID NO: 436 - DNA, 60 bp, Artificial
  Synthetic oligonucleotide
cgggactctagcatacttactgacagccagacagcgaccaaaagaattcggattgccatc

SEQ ID NO: 437 - DNA, 60 bp, Artificial
  Synthetic oligonucleotide
agcaaaagcaggagttcaaaatgaatccaaatcagaagataataaccattgggtcaatct

SEQ ID NO: 438 - DNA, 60 bp, Artificial
  Synthetic oligonucleotide
ggagccattgctggtttcattgaaggaggatggtctggaatgattgatgggtggtatgga

SEQ ID NO: 439 - DNA, 60 bp, Artificial
  Synthetic oligonucleotide
ttgaagacccaagccatgagggggaggggataccgctgtatgatgcaatcaaatgcatga

SEQ ID NO: 440 - DNA, 60 bp, Artificial
  Synthetic oligonucleotide
gaccattacatatacagagatgaagcattaaacaaccggtttcaaatcaaaggtgttgag

SEQ ID NO: 441 - DNA, 60 bp, Artificial
  Synthetic oligonucleotide
gaaattgccgattggtcatggcacgatggagctattcttccctttgacatcgataagatg

SEQ ID NO: 442 - DNA, 60 bp, Artificial
  Synthetic oligonucleotide
aatgtgagtcctctgtggataggagaatgccccaaatatgtgaaaagtgaaagtttgagg

SEQ ID NO: 443 - DNA, 60 bp, Artificial
  Synthetic oligonucleotide
ggaaatgggtgttttgagttctaccacaagtgtgacaataaatgcatggaaagtgtaaga

SEQ ID NO: 444 - DNA, 60 bp, Artificial
  Synthetic oligonucleotide
tatcaaattcttgctatttatagtacggtatcgagcagtctagttttggtaggactgatc

SEQ ID NO: 445 - DNA, 60 bp, Artificial
  Synthetic oligonucleotide
cagtttcgagcagataacattcttgcaagcattgcaactcttacttgaagttgagagtga

SEQ ID NO: 446 - DNA, 59 bp, Artificial
  Synthetic oligonucleotide
agcatgacggtcgccgctggacggtgctcaagcagcagatcatcaccccgggcaagggg

SEQ ID NO: 447 - DNA, 60 bp, Artificial
  Synthetic oligonucleotide
aagtgaagacctccaatctctgcgccgagatcacgctgccgaccggcattgaccatcacg

SEQ ID NO: 448 - DNA, 60 bp, Artificial
  Synthetic oligonucleotide
ttcgagatgtagccgaacatttccttcagcggcacctgggcgcggacgatcacggtcgaa

SEQ ID NO: 449 - DNA, 60 bp, Artificial
  Synthetic oligonucleotide
atcacgcgcgacggcttcatcaagcgcacgccgctggaggtcttccgctcccagaaccgt

SEQ ID NO: 450 - DNA, 60 bp, Artificial
  Synthetic oligonucleotide
gcgcgctgccatggcctgcaccgtcgccgtcgaggaaaccatcgatgcgcattacgccgc

SEQ ID NO: 451 - DNA, 60 bp, Artificial
  Synthetic oligonucleotide
tacggcttcttcgtcgtgccgctgacctcgcccatgcccttcaccttgtgggtgccggca

SEQ ID NO: 452 - DNA, 60 bp, Artificial
  Synthetic oligonucleotide
aaccgccgaccaagggattatgattcccctgctctaccgctgagctacaccgccaggttg

SEQ ID NO: 453 - DNA, 60 bp, Artificial
  Synthetic oligonucleotide
gtgcgccaccgcatcaatttcgacaacctcacccctctttaccccgatcagcgcctgaag

SEQ ID NO: 454 - DNA, 60 bp, Artificial
  Synthetic oligonucleotide
acatctcgatgcacacgctggaggcgatctgcgagctgttcccgatgttccgccgcatgc

SEQ ID NO: 455 - DNA, 60 bp, Artificial
  Synthetic oligonucleotide
cgggtggatgatctcggcgaagggactccaaaacacccctcgctgatcgaacgggttcaa

SEQ ID NO: 456 - DNA, 60 bp, Artificial
  Synthetic oligonucleotide
ggttatctgctgttgcccgatggcttgccggtggcgcggatcaagctgacgaatgaccat

SEQ ID NO: 457 - DNA, 60 bp, Artificial
  Synthetic oligonucleotide
tgttgcccgatggcttgccggtggcgcggatcaagctgacgaatgaccatatcatcgcgc

SEQ ID NO: 458 - DNA, 60 bp, Artificial
  Synthetic oligonucleotide
cgtagtcgccctcctgcaccgagacgtgcttgcccttcggcaccagatactcggtttcct

SEQ ID NO: 459 - DNA, 60 bp, Artificial
  Synthetic oligonucleotide
atgagcatggaatcgtcacggaggccccggtcgagctggtcaactggaccgatgaggaag

SEQ ID NO: 460 - DNA, 60 bp, Artificial
  Synthetic oligonucleotide
ttccacccgccagtccatgttgcgggccatccagtccgcgctggagatgaagaccttgtt

SEQ ID NO: 461 - DNA, 60 bp, Artificial
  Synthetic oligonucleotide
ccggttcattttggcccatggcaaacggtttactggtggttccgcaggctgatgcgccgt

SEQ ID NO: 462 - DNA, 60 bp, Artificial
  Synthetic oligonucleotide
gccgccttctcctggtccagctgacaacagccgatatttcggacagtgcaggaggacaga

SEQ ID NO: 463 - DNA, 60 bp, Artificial
  Synthetic oligonucleotide
cggatcatccaaccgaaggtccgttccacaacccaccgacgcggcaggatttcaaaccct

SEQ ID NO: 464 - DNA, 60 bp, Artificial
  Synthetic oligonucleotide
cccctgcgaaccggcgtggtcggaaacggacaaccgatttccgtgagatcatcaatgctc

SEQ ID NO: 465 - DNA, 60 bp, Artificial
  Synthetic oligonucleotide
ccacccgatggactggtttcgcgtcctgccgcttcacgatcgagcatcagacagacatca

SEQ ID NO: 466 - DNA, 60 bp, Artificial
  Synthetic oligonucleotide
gtttgccatgggccaaaatgaaccggaagcatctcccaaccgcagcctgagcgcacgaga

SEQ ID NO: 467 - DNA, 60 bp, Artificial
  Synthetic oligonucleotide
gtttggtcccggggtttgatgggttggattgatgatgaatctttctggctctgaagtcca

SEQ ID NO: 468 - DNA, 60 bp, Artificial
  Synthetic oligonucleotide
cgcaggcaagaagatcgtcggtcggaaacgtcacatcgcagttgatacggatggccgcct

SEQ ID NO: 469 - DNA, 60 bp, Artificial
  Synthetic oligonucleotide
gccatgcggcctcgttgtgctggcgtccacatcctgcctttgaatcacgctcaaaacctc

SEQ ID NO: 470 - DNA, 60 bp, Artificial
  Synthetic oligonucleotide
cgctggccttggatgaagcacctgtttgccgatgagcctatgaccgcctccagttgatgg

SEQ ID NO: 471 - DNA, 60 bp, Artificial
  Synthetic oligonucleotide
gccagcacaacgaggccgcatggccggaattacacgcaagacgaaacgctatccgtctga

SEQ ID NO: 472 - DNA, 60 bp, Artificial
  Synthetic oligonucleotide
tcgccttgtgaaggactacgaacagcggatcgacgtcgcagaggccatgatccacatcgc

SEQ ID NO: 473 - DNA, 60 bp, Artificial
  Synthetic oligonucleotide
gaggccatgatccacatcgccatgggaagcctcatgctacgccgaaacgctcatccgtga

SEQ ID NO: 474 - DNA, 60 bp, Artificial
  Synthetic oligonucleotide
atgtcaggccagatcctggatgccacgctggtagcggctccgaagcagcgcaataccaat

SEQ ID NO: 475 - DNA, 60 bp, Artificial
  Synthetic oligonucleotide
ggggttggtcagcgaactggatcccattgtcggtcagggtggtgtggatctggtaaggga

SEQ ID NO: 476 - DNA, 60 bp, Artificial
  Synthetic oligonucleotide
gtctgggcagacacagcctatcgctcaaaagccaacgaagacttcatggagaagcagggc

SEQ ID NO: 477 - DNA, 60 bp, Artificial
  Synthetic oligonucleotide
ccctctctcaatcgcgcaccatcactggcggcggcatcggttgttttccatttccggatc

SEQ ID NO: 478 - DNA, 60 bp, Artificial
  Synthetic oligonucleotide
cgtggcatccaggatctggcctgacatcggcagataaccggcgttccgcagagttgtatc

SEQ ID NO: 479 - DNA, 60 bp, Artificial
  Synthetic oligonucleotide
ggcgtgaggccactcagcgtcttgagccttcgcccgaaattataagctgccatgaagtcg

SEQ ID NO: 480 - DNA, 60 bp, Artificial
  Synthetic oligonucleotide
ggcggaacacttcaaaatccacagtccgggaaaacgcttcgagctgatcgccaagcccgc

SEQ ID NO: 481 - DNA, 60 bp, Artificial
  Synthetic oligonucleotide
agccgtcaaagctgtcccacaaggacaggcatgcgcgctggaccctgaagttcacgaaag

SEQ ID NO: 482 - DNA, 60 bp, Artificial
  Synthetic oligonucleotide
aggcataacgcgggccaccatgagggtcgggctggccaatatcgtctataatatgcgccg

SEQ ID NO: 483 - DNA, 60 bp, Artificial
  Synthetic oligonucleotide
gcttgtccggtcaatggcaacgaagaggtacagcttgccttcagcggtctggacttccgc

SEQ ID NO: 484 - DNA, 60 bp, Artificial
  Synthetic oligonucleotide
ccgttgagcgcggctctttaggacctgtcttctgatcttcgacactctgtcgcttccgcc

SEQ ID NO: 485 - DNA, 60 bp, Artificial
  Synthetic oligonucleotide
gtccctgggtttgatggtgtgatattttcacgagagtggaaggaagcattatgggacaga

SEQ ID NO: 486 - DNA, 60 bp, Artificial
  Synthetic oligonucleotide
gcgtctgacccaggctggtgcgattggtggtctgttcaatcgctttgatgcaaccctgcg

SEQ ID NO: 487 - DNA, 60 bp, Artificial
  Synthetic oligonucleotide
cggtcctgtgacagccggtgtgacgggcagtcggaaggcattgaagcaaagctgtcaaga

SEQ ID NO: 488 - DNA, 60 bp, Artificial
  Synthetic oligonucleotide
ggtctggaaaccgcgacggcatccgttacagcctgttttctgcttctgtgctgctcgcag

SEQ ID NO: 489 - DNA, 60 bp, Artificial
  Synthetic oligonucleotide
tgtcctcgcaccaggtgcaaccggaattgccccgttcgtcgcttcctgagccattttgtc

SEQ ID NO: 490 - DNA, 60 bp, Artificial
  Synthetic oligonucleotide
tagcccgccgaaggcgccggagcggtgtgacggtcaatcgacccactgcatcgctgaagc

SEQ ID NO: 491 - DNA, 60 bp, Artificial
  Synthetic oligonucleotide
tatatccgggagagaagcagctaccaaccggtcccggcctaccaccaccgtctcaacctt

SEQ ID NO: 492 - DNA, 60 bp, Artificial
  Synthetic oligonucleotide
agattccgatgtctgcacatggggttaggacgcggcatggcggcactgcgaaaattgccg

SEQ ID NO: 493 - DNA, 60 bp, Artificial
  Synthetic oligonucleotide
ggccgtccggatactccctgatcgtcaatccgtcaggcgtgtcgtcatcgctgtagtaga

SEQ ID NO: 494 - DNA, 60 bp, Artificial
  Synthetic oligonucleotide
aattgtctgatttgacctaggggtaggccatgaagtcgaagcaagttggattaacaaccg

SEQ ID NO: 495 - DNA, 60 bp, Artificial
  Synthetic oligonucleotide
cgatctggacggctgggaggcgtgagaaggggagacttcgtaaccgtcgccttgcaaggc

SEQ ID NO: 496 - DNA, 60 bp, Artificial
  Synthetic oligonucleotide
agtgacaccctcatgctggccgtcagccgggcactcgccctcttcctcggactggcctga

SEQ ID NO: 497 - DNA, 60 bp, Artificial
  Synthetic oligonucleotide
ctgcgccgctcccgtgggcttcggggacggcccaaagatcatagagagggactgcgaaaa

SEQ ID NO: 498 - DNA, 60 bp, Artificial
  Synthetic oligonucleotide
gccgccgccgtgatgatgcttatgacctcccaaatgggccgcaataatgctctcgtcgca

SEQ ID NO: 499 - DNA, 60 bp, Artificial
  Synthetic oligonucleotide
gccgctatggaacgctggtcaaaattagctgtatccaaccctagggccgccgccgtgatg

SEQ ID NO: 500 - DNA, 60 bp, Artificial
  Synthetic oligonucleotide
ggttgttcatagcctgcgccttccctgaatcgatcaatcggcctcattcccgaagggcgc

SEQ ID NO: 501 - DNA, 60 bp, Artificial
  Synthetic oligonucleotide
taatctgtagcggaaactcgtctgagtgccctgtacggccatcctgcggcctctgatggg

SEQ ID NO: 502 - DNA, 60 bp, Artificial
  Synthetic oligonucleotide
gcgctggtggctgaaaagcggagttatcggtggatcgcccgtgatctagggatcagcaag

SEQ ID NO: 503 - DNA, 60 bp, Artificial
  Synthetic oligonucleotide
ggggaggatcagaggatcgagattgcccagtgccggtttcattactgaaggaggagcgtc

SEQ ID NO: 504 - DNA, 60 bp, Artificial
  Synthetic oligonucleotide
atttctgagccgtggaaacctgcccctgaaccgcgtgtcctggcttggattgatgcgcag

SEQ ID NO: 505 - DNA, 60 bp, Artificial
  Synthetic oligonucleotide
ggtctgtcaaaaggcgagattgttgttgtcacccgcattgatcgtctggcgcggagcacg

SEQ ID NO: 506 - DNA, 60 bp, Artificial
  Synthetic oligonucleotide
caagacgcacggcccgagcaatggagcagctttatgtgggaggatcgattggtgcaggac

SEQ ID NO: 507 - DNA, 60 bp, Artificial
  Synthetic oligonucleotide
ttgcctgaaagaacgccgctccccgttcggtccacctcgcgacggcttcgggtttactat

SEQ ID NO: 508 - DNA, 60 bp, Artificial
  Synthetic oligonucleotide
ctgtcggggatcgcggcggaagggctggaagcggggtgtgggattgagagccggacgctg

SEQ ID NO: 509 - DNA, 60 bp, Artificial
  Synthetic oligonucleotide
aaagacgtttcgaccgggatggaggctgaggccggaaaggggaagagtgaggttgagcgt

SEQ ID NO: 510 - DNA, 60 bp, Artificial
  Synthetic oligonucleotide
gcacgcatgtacacttgccatcatgtgctggaatcagcgtattgggctgcgttcgtgccg

SEQ ID NO: 511 - DNA, 60 bp, Artificial
  Synthetic oligonucleotide
gggtgttcgcggacggggagcgtgtctacttcctgcgcaatgaccgggagctcggggtga

SEQ ID NO: 512 - DNA, 60 bp, Artificial
  Synthetic oligonucleotide
ccgtcaggagtggagtggttgtcgtactggtcatgctccctgtctttgcgcggacttcga

SEQ ID NO: 513 - DNA, 60 bp, Artificial
  Synthetic oligonucleotide
ggcggagtgtccggcctggttgttcgccgtgattcattttcgcaacgagctgagagatgc

SEQ ID NO: 514 - DNA, 60 bp, Artificial
  Synthetic oligonucleotide
aaagctcccatgtctcgcacctatcatcacagccgcaaacacggcagggaccatcgctgg

SEQ ID NO: 515 - DNA, 60 bp, Artificial
  Synthetic oligonucleotide
ccgcgctcgcccgacgcctgcaacaccagaagaaccgagcaaaaccacaatctgcttaag

SEQ ID NO: 516 - DNA, 60 bp, Artificial
  Synthetic oligonucleotide
acttgccaatgaacggctggccgagctggacctggacgtgcggatcgatcatcggtcgtt

SEQ ID NO: 517 - DNA, 60 bp, Artificial
  Synthetic oligonucleotide
attccccatctgacacgctcggccctgcatcgctgccttcagcgtcacgggatttcacga

SEQ ID NO: 518 - DNA, 60 bp, Artificial
  Synthetic oligonucleotide
acgttgctgccgctggatgactgcctttatgccctgcaggccagcattccccatctgaca

SEQ ID NO: 519 - DNA, 60 bp, Artificial
  Synthetic oligonucleotide
ccgagagcatcgaagccaactccgtgcatggttcggacagccttgagaacgcgaagaacg

SEQ ID NO: 520 - DNA, 60 bp, Artificial
  Synthetic oligonucleotide
tcgattgttgtcgtcacccagaacaagggtctgacggtggcagaggtgaccgagctgcgt

SEQ ID NO: 521 - DNA, 60 bp, Artificial
  Synthetic oligonucleotide
tccggaccgccagcctgaatcgaaagccgccgccgaagcaccctctatcacccaacccga

SEQ ID NO: 522 - DNA, 60 bp, Artificial
  Synthetic oligonucleotide
tgaccacaattccgccaccacaacccgtgcccagaatcacgccgaacacgacgctcattc

SEQ ID NO: 523 - DNA, 58 bp, Artificial
  Synthetic oligonucleotide
atctcgcttagcgagctaggcgtccagccgatgcatcttaattatattatgatacccc

SEQ ID NO: 524 - DNA, 60 bp, Artificial
  Synthetic oligonucleotide
cccgaatctcccaaagacaaagatttatataactaccatgaaaggatgcattaaatgcaa

SEQ ID NO: 525 - DNA, 60 bp, Artificial
  Synthetic oligonucleotide
ggtaaggagtagcgagaacgaaccaaccgcctttgccgtgagtatcggtaaaggagtagg

SEQ ID NO: 526 - DNA, 60 bp, Artificial
  Synthetic oligonucleotide
cagttgtaaaccctttctcacgactggcgcagttgtaattggttgtctatttctagctcc

SEQ ID NO: 527 - DNA, 60 bp, Artificial
  Synthetic oligonucleotide
gacgagcagagcgaactaggcggccagccgaagaacattacaattaatctattacacccc

SEQ ID NO: 528 - DNA, 60 bp, Artificial
  Synthetic oligonucleotide
cctgtgaactatcgggtaaggagtagcgagaacgaaacaaccgcctttgctgctttaggc

SEQ ID NO: 529 - DNA, 60 bp, Artificial
  Synthetic oligonucleotide
gttcaatcattaggcaaacgacctaaatccattgttattgaaggacctagtagactcggt

SEQ ID NO: 530 - DNA, 60 bp, Artificial
  Synthetic oligonucleotide
gtgcaatcattaggcaaacgacctaaatccattgtgattgaaggacctagtagactcggt

SEQ ID NO: 531 - DNA, 65 bp, Artificial
  Synthetic oligonucleotide
caaccctcttcgcaaaagaaacgatttatataactatcatgaaaggatgcattaaatgcaaaacc

SEQ ID NO: 532 - DNA, 60 bp, Artificial
  Synthetic oligonucleotide
gcagtggttagtaagttcgactggaaatcggaagcacaacaagatattttcctgcgtgaa

SEQ ID NO: 533 - DNA, 60 bp, Artificial
  Synthetic oligonucleotide
gcagagcgaactaggctgccagccgaagaacattacaattaatctattacaccctttcct

SEQ ID NO: 534 - DNA, 60 bp, Artificial
  Synthetic oligonucleotide
ggggtgtaatagattaattgtaatgttcttcggctggccgcctaattcgctctgctcgtc

SEQ ID NO: 535 - DNA, 60 bp, Artificial
  Synthetic oligonucleotide
ctgacctctccaccactgcttccgctatggcttcactgatgtcagaacgcttcccctacc

SEQ ID NO: 536 - DNA, 60 bp, Artificial
  Synthetic oligonucleotide
gtggcacaaagaggacaagaaatgcaagaagcctttgaatctcctggacgcgcaatggga

SEQ ID NO: 537 - DNA, 60 bp, Artificial
  Synthetic oligonucleotide
cccacgcatatcggcgccacaagccgccgcgttaaccacttcgccataaccgccaaataa

SEQ ID NO: 538 - DNA, 60 bp, Artificial
  Synthetic oligonucleotide
gtcccgaacttttatcgctaacgcccaatattgtagttgttgatcaccaccgcgctaccg

SEQ ID NO: 539 - DNA, 60 bp, Artificial
  Synthetic oligonucleotide
gcgcgaacaaggggatttatcggaaaacgctgattatgatgctgctagaaacgaacaagc

SEQ ID NO: 540 - DNA, 60 bp, Artificial
  Synthetic oligonucleotide
ctcttacgcaaacatcagctccagtttctcctaattccattgctccaccatgaagtcccc

SEQ ID NO: 541 - DNA, 60 bp, Artificial
  Synthetic oligonucleotide
ggattggaccaacccagattgctcggcattagtagaatcagaaagcaggcacaaaacgcc

SEQ ID NO: 542 - DNA, 60 bp, Artificial
  Synthetic oligonucleotide
gccccaaaagttcgaagacctaattgccttacttgccttaaacagaccaggacccatcga

SEQ ID NO: 543 - DNA, 60 bp, Artificial
  Synthetic oligonucleotide
cacaacgcctaaccgcttcttctttcgaactgcctgcaggagttaaaatcatcaaccccg

SEQ ID NO: 544 - DNA, 60 bp, Artificial
  Synthetic oligonucleotide
ccatgtgccctagctgccgctgacattccttccactcttacagctatttctaacctcact

SEQ ID NO: 545 - DNA, 60 bp, Artificial
  Synthetic oligonucleotide
cgtttcacgtatagaattcccgattgtagaacttcctaatccgcgaatcaccaccacttc

SEQ ID NO: 546 - DNA, 60 bp, Artificial
  Synthetic oligonucleotide
ggaaggcggcgaggcaaaagttattcctaatgctgaaggtggaagaacaactccgtctgt

SEQ ID NO: 547 - DNA, 60 bp, Artificial
  Synthetic oligonucleotide
cgtggtgctctagatgctactggtgttgctaaccgcaaacaagggcgttctaagtacggc

SEQ ID NO: 548 - DNA, 60 bp, Artificial
  Synthetic oligonucleotide
gctgttcttaatgctgcttctatctctgctttgatgattacaactgaggctgctgtggta

SEQ ID NO: 549 - DNA, 60 bp, Artificial
  Synthetic oligonucleotide
gatggtaaacatccagaaattgaaagagcacgcaccgttcaaggttcagttgattacgta

SEQ ID NO: 550 - DNA, 57 bp, Artificial
  Synthetic oligonucleotide
cttacccgtgaactatcgggtaaggagtagcgagaacgaaccaaccgcctttgccgt

SEQ ID NO: 551 - DNA, 60 bp, Artificial
  Synthetic oligonucleotide
cgcaggcccgtgccgaccttgcggataaaagacccggcctatcaggagaaaatggcgaat

SEQ ID NO: 552 - DNA, 60 bp, Artificial
  Synthetic oligonucleotide
ccgtgtctcctttccccgggaatggctatggcacagcgaaggtgtagcactattaggatc

SEQ ID NO: 553 - DNA, 60 bp, Artificial
  Synthetic oligonucleotide
ccatgctggaaaagctgcgccaccactaccgacgagccaaaaccatcacgctgatcctcg

SEQ ID NO: 554 - DNA, 60 bp, Artificial
  Synthetic oligonucleotide
gctgctcatgcagttttctccgcaagattttggttatcagcgcagccgttggtgtaccga

SEQ ID NO: 555 - DNA, 60 bp, Artificial
  Synthetic oligonucleotide
tgcgctagaagccttaccggctggccgtgccccagttttacctatcgccaagatggtcac

SEQ ID NO: 556 - DNA, 60 bp, Artificial
  Synthetic oligonucleotide
agcgcatctatgccttcatctcgataccaccgaagccaacgaccgatggtcgagcgcgca

SEQ ID NO: 557 - DNA, 60 bp, Artificial
  Synthetic oligonucleotide
cactcgggccagcaggtttgccatccctctgcattgatgattgcgcgtgatggtttcatg

SEQ ID NO: 558 - DNA, 60 bp, Artificial
  Synthetic oligonucleotide
ccccgggaatggctatggcacagcgaaggtgtagcactattaggatcagttatttagcct

SEQ ID NO: 559 - DNA, 60 bp, Artificial
  Synthetic oligonucleotide
gacctaaataactgatcctaatagtgctacaccttcgctgtgccatagccattccctggg

SEQ ID NO: 560 - DNA, 60 bp, Artificial
  Synthetic oligonucleotide
atcctaccacccctgccacgaccacaacggcgccgcattcacaaaatcatccatgccacc

SEQ ID NO: 561 - DNA, 60 bp, Artificial
  Synthetic oligonucleotide
taccacccctgccacgaccacaactgcgccgcattcacaaaatcatccatgccacccgtg

SEQ ID NO: 562 - DNA, 60 bp, Artificial
  Synthetic oligonucleotide
taccacccctgccacgaccataacggcgccgcattcacaaaatcatccatgccacccgtg

SEQ ID NO: 563 - DNA, 60 bp, Artificial
  Synthetic oligonucleotide
acatgaaggacgtacggtcaccgatgttcatcaccttaccggcgctgcgcgctcgaccat

SEQ ID NO: 564 - DNA, 60 bp, Artificial
  Synthetic oligonucleotide
aagcctctaaataactgatcctaatagtgctacaccttcgctgtgccatagccattcccg

SEQ ID NO: 565 - DNA, 60 bp, Artificial
  Synthetic oligonucleotide
gcagttgtggtcgtggcaggggtggtaggataggcatcaactcagtcctttgggtgtggc

SEQ ID NO: 566 - DNA, 60 bp, Artificial
  Synthetic oligonucleotide
ggcctttgcccgtgccgccatcctctccaacgagaaattccgtggggtgcgtctcaatct

SEQ ID NO: 567 - DNA, 60 bp, Artificial
  Synthetic oligonucleotide
tcgaggtggacgtgctgccgaccgcaccgaccctcgccaacctcaaccagcgcatcgata

SEQ ID NO: 568 - DNA, 60 bp, Artificial
  Synthetic oligonucleotide
ttcgatcagctcgcaggcatccaccagttcaccgtttacccgaccggcaatgcacgcctt

SEQ ID NO: 569 - DNA, 60 bp, Artificial
  Synthetic oligonucleotide
gactccgcgcccttgatgatctacgaaaatcccgagacccaggccgccgcatcagagtaa

SEQ ID NO: 570 - DNA, 60 bp, Artificial
  Synthetic oligonucleotide
tagcccagcagatcgagcagctcaaccaccgcctgcccgactatgcccgcatccatcact

SEQ ID NO: 571 - DNA, 60 bp, Artificial
  Synthetic oligonucleotide
tacagcaccaagcaagagcacaacgccgtcgctgccgccaaaactcccaacctcgaccgt

SEQ ID NO: 572 - DNA, 60 bp, Artificial
  Synthetic oligonucleotide
acaatgcaccgcaacaagctgaccacgctcattctcgccgccctcgcatcacacgcctat

SEQ ID NO: 573 - DNA, 60 bp, Artificial
  Synthetic oligonucleotide
tcggagagcactacgtccgggcgcgggtggaggaacagcggcagggagatgcgggactta

SEQ ID NO: 574 - DNA, 60 bp, Artificial
  Synthetic oligonucleotide
cagggaggcgcggggaaaagacagattggaagcgtcacatgggtgccacttgaatgaggg

SEQ ID NO: 575 - DNA, 60 bp, Artificial
  Synthetic oligonucleotide
actgccctcatcccagcacagctgccagtcaccgccgacgctgttgtctgccgccgagcc

SEQ ID NO: 576 - DNA, 60 bp, Artificial
  Synthetic oligonucleotide
aggcacatctcgccgctcgccttgctcaccgccacctgaatgctgtaacccttgctggtg

SEQ ID NO: 577 - DNA, 60 bp, Artificial
  Synthetic oligonucleotide
ccgcagcaccaccatatccagactcattctcaacatgccgatcgccctgctcgccttcga

SEQ ID NO: 578 - DNA, 60 bp, Artificial
  Synthetic oligonucleotide
tatcaccagcagattgaagaagaagacccggttacccaagccgaccgccgccactgccgt

SEQ ID NO: 579 - DNA, 60 bp, Artificial
  Synthetic oligonucleotide
atcaccaccacgtcgatgctcttgtccaccttcacatactcgccgatcatcgccagccgc

SEQ ID NO: 580 - DNA, 60 bp, Artificial
  Synthetic oligonucleotide
aaaggcgccgtggccgttgtgctcaatcagggatcgcttgccgtggacgatttcacccgc

SEQ ID NO: 581 - DNA, 60 bp, Artificial
  Synthetic oligonucleotide
atacccggtgccgccgacgatgccaaccttgatgcgcgaattcgatgcttgggccatggt

SEQ ID NO: 582 - DNA, 60 bp, Artificial
  Synthetic oligonucleotide
ggggttgaccgtactcgaccggctcaccgttctcgaccagaatttctttgatcacgccgg

SEQ ID NO: 583 - DNA, 60 bp, Artificial
  Synthetic oligonucleotide
gccagatcggccgcgtctcaaacatgcgacccgcgccgcgaattgtatatgattgaccct

SEQ ID NO: 584 - DNA, 60 bp, Artificial
  Synthetic oligonucleotide
atcaatcatatacaattcgcggcgcgggtcgcatgtttgagacgcggccgatcccggcgt

SEQ ID NO: 585 - DNA, 60 bp, Artificial
  Synthetic oligonucleotide
atggatgcggtacaggccggggtgcttgctgcgcaacatgaaatccgccgcgcaggtgtt

SEQ ID NO: 586 - DNA, 60 bp, Artificial
  Synthetic oligonucleotide
atccagccgtccgagatgatgaagatcgccgtgcccatgatgctggcctggtacttccag

SEQ ID NO: 587 - DNA, 60 bp, Artificial
  Synthetic oligonucleotide
tggaagtaccaggccagcatcatgggcacggcgatcttcatcatctcggacggctggatg

SEQ ID NO: 588 - DNA, 60 bp, Artificial
  Synthetic oligonucleotide
caaggtggtgctggtcaagttctgggctaccagttgcgtcacctgcgtcaagcagatgcc

SEQ ID NO: 589 - DNA, 60 bp, Artificial
  Synthetic oligonucleotide
aggagcatcagctgggcctggtgatcttcggcctggtggtcagcgtgcccatcatcatct

SEQ ID NO: 590 - DNA, 60 bp, Artificial
  Synthetic oligonucleotide
tacacgccgcccagcttgacgtcatcgacatccagcttcaccttgctgcccttgagcgtc

SEQ ID NO: 591 - DNA, 60 bp, Artificial
  Synthetic oligonucleotide
aggcacaccgctctacgccatgaacggttgactgccaagacggtatctgttccccgcgga

SEQ ID NO: 592 - DNA, 60 bp, Artificial
  Synthetic oligonucleotide
cgcgcatgcttatggttgttcatccagtgtcctgccctgagttgcgatggcgtggtaacc

SEQ ID NO: 593 - DNA, 60 bp, Artificial
  Synthetic oligonucleotide
ctcagggcaggacactggatgaacaaccataagcatgcgcgattgacccgcctaggtgtg

SEQ ID NO: 594 - DNA, 60 bp, Artificial
  Synthetic oligonucleotide
gctcgacctaggcgggtcaatcgcgcatgcttatggttgttcatccagtgtcctgccctg

SEQ ID NO: 595 - DNA, 60 bp, Artificial
  Synthetic oligonucleotide
ggcaggacactggatgaacaaccataagcatgcgcgattgacccgcctaggtcgagccct

SEQ ID NO: 596 - DNA, 60 bp, Artificial
  Synthetic oligonucleotide
aatcttcacacctaggcgggtcaatcgcgcatgcttatggttgttcatccagtgtcctgc

SEQ ID NO: 597 - DNA, 60 bp, Artificial
  Synthetic oligonucleotide
ttgcatgactgccactccttaccagcgacgctcggcatcggtgtccagcaaagggcgcaa

SEQ ID NO: 598 - DNA, 60 bp, Artificial
  Synthetic oligonucleotide
cgaagcctcaatcgaggagtcggtttccgcctggatggacggcgaaggatcagaggactt

SEQ ID NO: 599 - DNA, 60 bp, Artificial
  Synthetic oligonucleotide
ggacgccccgtgggccttcctggtgacccagaacaatgtgtacgtgaagtcgaagaacct

SEQ ID NO: 600 - DNA, 60 bp, Artificial
  Synthetic oligonucleotide
aaactgtggacgcggcttggcagctgagtcggacatgacggcctcggtgtttcggaacta

SEQ ID NO: 601 - DNA, 60 bp, Artificial
  Synthetic oligonucleotide
tcaccacccatgcagtctatagcgatgcgtatcacgggtgccaggtcagcgttctgccca

SEQ ID NO: 602 - DNA, 60 bp, Artificial
  Synthetic oligonucleotide
aagtcaccgcccatgcagtctatagcgatgcgtatcacgggtgccaggtcagcgttctgc

SEQ ID NO: 603 - DNA, 60 bp, Artificial
  Synthetic oligonucleotide
atcgtgacgggcaggccgaagtcaccgcccatgcagtctatagcgatgcgtatcacgggt

SEQ ID NO: 604 - DNA, 60 bp, Artificial
  Synthetic oligonucleotide
atcgtgacgggcaggccgaagtcaccacccatgcagtctatagcgatgcgtatcacgggt

SEQ ID NO: 605 - DNA, 60 bp, Artificial
  Synthetic oligonucleotide
ttgcgtgcttgccctgatctgcagctatgtgctgccctggtgggaggcccgctatatgaa

SEQ ID NO: 606 - DNA, 60 bp, Artificial
  Synthetic oligonucleotide
tggacgacgcctaccgcaccctgatccagcgccagtcgaccatgacggagaagcaccagg

SEQ ID NO: 607 - DNA, 60 bp, Artificial
  Synthetic oligonucleotide
aagccgtggtcgctgtcatgaattcattgccgcgccgccagtttgatgtggtggtcgtgg

SEQ ID NO: 608 - DNA, 60 bp, Artificial
  Synthetic oligonucleotide
gaggcggtcgacgacggtttgcaggtctttgcgcagcagtatcggatctagcatggtgtg

SEQ ID NO: 609 - DNA, 60 bp, Artificial
  Synthetic oligonucleotide
cgcattggccagatcgtgccgagttcgaatacgacgatggagacggagattccggcgatg

SEQ ID NO: 610 - DNA, 60 bp, Artificial
  Synthetic oligonucleotide
atccaggtgtccatgctcgattgcctgtcgtcctgggtggccgaggagcatttcgatgtg

SEQ ID NO: 611 - DNA, 60 bp, Artificial
  Synthetic oligonucleotide
aaatgctcctcggccacccaggacgacaggcaatcgagcatggacacctggatcttctgc

SEQ ID NO: 612 - DNA, 60 bp, Artificial
  Synthetic oligonucleotide
aatcgagcatggacacctggatcttctgccccttgcccgtcctgccccggtagatcagcg

SEQ ID NO: 613 - DNA, 60 bp, Artificial
  Synthetic oligonucleotide
tggagatgctggacgatccggacctgcaccgcagcggcgccatcaccgatttgcagaccc

SEQ ID NO: 614 - DNA, 60 bp, Artificial
  Synthetic oligonucleotide
tgctcgacaaaggcgaccgtcttgtcccgggtccactcggacaccagcgcagcgaggtcg

SEQ ID NO: 615 - DNA, 60 bp, Artificial
  Synthetic oligonucleotide
aggtgtctatgctcgattgcctgtcgtcctgggtggccgaggagcatttcgatgtgctgg

SEQ ID NO: 616 - DNA, 60 bp, Artificial
  Synthetic oligonucleotide
attgctgaaccgcgcccgcaacaagaagagcatcacgctcaacgtcaaggatccggaggg

SEQ ID NO: 617 - DNA, 60 bp, Artificial
  Synthetic oligonucleotide
agcaagtaccagaacctcaaaggcatggacatcctggtgcaggcgctgtcgggcctgatg

SEQ ID NO: 618 - DNA, 60 bp, Artificial
  Synthetic oligonucleotide
aagtaccagaacctcaaaggcatggacatcctggtgcaggcgttgtcgggcctgatggcg

SEQ ID NO: 619 - DNA, 60 bp, Artificial
  Synthetic oligonucleotide
atagatgatgcgatcgttgatttcccgcacacgggcatagtccacgcccaggcgctccga

SEQ ID NO: 620 - DNA, 60 bp, Artificial
  Synthetic oligonucleotide
cctgcaccaggatgtccatgcctttgaggttctggtacttgctgggctcgccaaaggcct

SEQ ID NO: 621 - DNA, 60 bp, Artificial
  Synthetic oligonucleotide
cgctgtacatggtcaacggcatcctggcggcgctgatctaccggggcaggacgggcaagg

SEQ ID NO: 622 - DNA, 60 bp, Artificial
  Synthetic oligonucleotide
tcttggccacctcccggcccacgaagcgcgacagccccgaatcggccaccgcatcgagcg

SEQ ID NO: 623 - DNA, 60 bp, Artificial
  Synthetic oligonucleotide
tcacctgaccatcgcccagctccaccttgctcgcaaacgtcgcctgcggccaatccagca

SEQ ID NO: 624 - DNA, 60 bp, Artificial
  Synthetic oligonucleotide
acgtttgcgagcaaggtggagctgggcgatggtcaggtgacggtgacgcgcgaggtcgat

SEQ ID NO: 625 - DNA, 60 bp, Artificial
  Synthetic oligonucleotide
tcccgaggggatcaaccgcttccctcctgcaattctggctttggcggacggtaccatttt

SEQ ID NO: 626 - DNA, 60 bp, Artificial
  Synthetic oligonucleotide
tcgggcgcaccacgttttcgttcttggcgaacagcaccgtggaggtttccaggtcctgta

SEQ ID NO: 627 - DNA, 60 bp, Artificial
  Synthetic oligonucleotide
tccccgctgggacaggcacactgccgtacgccatcgacgcttgacgactaagacagtatc

SEQ ID NO: 628 - DNA, 60 bp, Artificial
  Synthetic oligonucleotide
acaggcaccctgctgtacgccatcgacgcttgacggccaaggcggtatctgtctctgccg

SEQ ID NO: 629 - DNA, 60 bp, Artificial
  Synthetic oligonucleotide
atctacaacacgcgctacatcaaggccaacaagctgcccgcgccggtcgaatggaaggac

SEQ ID NO: 630 - DNA, 60 bp, Artificial
  Synthetic oligonucleotide
aacacgacctgcgccagccttgccgcctcgccacccgcatcgatggctcgctgcagcatg

SEQ ID NO: 631 - DNA, 60 bp, Artificial
  Synthetic oligonucleotide
tgcattggccgacctggagctcgcccatggccccgaaatccgcgccggcatcaacaccct

SEQ ID NO: 632 - DNA, 60 bp, Artificial
  Synthetic oligonucleotide
cttcaacgaacccgtagagctgggagccgcctggatcaccgtggccgccccttccgcgcc

SEQ ID NO: 633 - DNA, 60 bp, Artificial
  Synthetic oligonucleotide
tccgactccaacgcacgcaagcgcgccgccagccgggtactgacactgatccccaaggtt

SEQ ID NO: 634 - DNA, 60 bp, Artificial
  Synthetic oligonucleotide
agagataacgcacaccgatgacttcgtactcgcgcacgccagccggcaccttcacttcga

SEQ ID NO: 635 - DNA, 60 bp, Artificial
  Synthetic oligonucleotide
gacctgcccatccgactggacatcgcccaggttgacggagccgccgccgctgactgtgac

SEQ ID NO: 636 - DNA, 60 bp, Artificial
  Synthetic oligonucleotide
atgtcgatgacgtcaagttgggcggcgtgtacgaggcggggtccagctacgagaacaaga

SEQ ID NO: 637 - DNA, 60 bp, Artificial
  Synthetic oligonucleotide
aaagggcatcgctacgcgacagtggtggtcgatccgatcagcaggcaggtgctgtggatt

SEQ ID NO: 638 - DNA, 60 bp, Artificial
  Synthetic oligonucleotide
ccaggaatacttcttcctcaaaatccgtgccgccttccccggcaatgcgcgatgaacccg

SEQ ID NO: 639 - DNA, 60 bp, Artificial
  Synthetic oligonucleotide
gccttgaacaccttcgctcagcgcttgaaaggctatctgcacggcatcctggccagatgc

SEQ ID NO: 640 - DNA, 60 bp, Artificial
  Synthetic oligonucleotide
gtccggctcgacgaattgctgcaagccaaccagccgctgctgacggtctatgtcctgcgt

SEQ ID NO: 641 - DNA, 60 bp, Artificial
  Synthetic oligonucleotide
tcaactacgccaggatcgtcccgcacgcaggatcatcaaatcgagtcgctggctgctgct

SEQ ID NO: 642 - DNA, 60 bp, Artificial
  Synthetic oligonucleotide
agacccagggcgcacgctgtcgatctatttgaagccaacggccaaggtgatgctgtgcga

SEQ ID NO: 643 - DNA, 60 bp, Artificial
  Synthetic oligonucleotide
tcttcgaacaattgccgcctggggccgcccaacgcatcaaggccgttgccatcgacatga

SEQ ID NO: 644 - DNA, 60 bp, Artificial
  Synthetic oligonucleotide
agcctcccagcgactccagcaacttgcgatccagcatctccctgcactcctgatggcaaa

SEQ ID NO: 645 - DNA, 60 bp, Artificial
  Synthetic oligonucleotide
atgccaacccagctcgaagaacctcgccaccgcctgcacgttgctcgattgcagcaattg

SEQ ID NO: 646 - DNA, 60 bp, Artificial
  Synthetic oligonucleotide
atcgagcaacgtgcaggcggtggcgaggttcttcgaactgggttggcataccgtcaagac

SEQ ID NO: 647 - DNA, 60 bp, Artificial
  Synthetic oligonucleotide
ttcctcgtagaccttgcgcgcctgctcgcccaccaccttgtcgtccaggatggcggggaa

SEQ ID NO: 648 - DNA, 60 bp, Artificial
  Synthetic oligonucleotide
aaggtctggacggcctgcttgaccgcagttctcgcccgcaccgcagcccgaaggcctgtg

SEQ ID NO: 649 - DNA, 60 bp, Artificial
  Synthetic oligonucleotide
ttgcccgcttccgaagcgaaggtctggacggcctgcttgaccgcagttctcgcccgcacc

SEQ ID NO: 650 - DNA, 60 bp, Artificial
  Synthetic oligonucleotide
tgtgcacctggccatcgatgacttctcgcgcgtgtcctttgctcgcatcctcgacgatga

SEQ ID NO: 651 - DNA, 60 bp, Artificial
  Synthetic oligonucleotide
agcgaggcgagtcgactcaggccgatgcgttccatataccgcgccacggtggccaggctg

SEQ ID NO: 652 - DNA, 60 bp, Artificial
  Synthetic oligonucleotide
atgtgacggattcccagctccacgcacaccgcccgaaaggtcctggagacgtagccgctg

SEQ ID NO: 653 - DNA, 60 bp, Artificial
  Synthetic oligonucleotide
tacgtctccaggacctttcgggcggtgtgcgtggagctgggaatccgtcacatccgcacc

SEQ ID NO: 654 - DNA, 60 bp, Artificial
  Synthetic oligonucleotide
tcacccctgccgcctggctggcctgcctcatcgtccagttctgttgcatcaccctgttaa

SEQ ID NO: 655 - DNA, 60 bp, Artificial
  Synthetic oligonucleotide
cccgtatccgtcttcatcgactcgcgccgactactaaacgaacactttacgttgtgcttc

SEQ ID NO: 656 - DNA, 60 bp, Artificial
  Synthetic oligonucleotide
gcaggcgagaccaggaaggcgagagagcaacgcttagtgctgcgagtcagtgttaagcgt

SEQ ID NO: 657 - DNA, 60 bp, Artificial
  Synthetic oligonucleotide
ccggggttctggcaggtgttgttgcacgacggttaacgaatcgctgccttcgggttgcaa

SEQ ID NO: 658 - DNA, 60 bp, Artificial
  Synthetic oligonucleotide
agggttaaccctgatgtcgataggcgcgggtgctggggtttcgagaagtgccaggtgaga

SEQ ID NO: 659 - DNA, 58 bp, Artificial
  Synthetic oligonucleotide
ttttaaacctcacttcctttgagcaagcgatacggatcctggtttcggtcagggtcca

SEQ ID NO: 660 - DNA, 60 bp, Artificial
  Synthetic oligonucleotide
ggtgcgagcgcacggtggcggctacggtcgtcatcgaaagcaaagcattatcaagtgctc

SEQ ID NO: 661 - DNA, 60 bp, Artificial
  Synthetic oligonucleotide
gcgcccggatttgcctaagcgccatcttcaatgcagcaacagggacgtccaacaccctga

SEQ ID NO: 662 - DNA, 60 bp, Artificial
  Synthetic oligonucleotide
ttaaccgtcgtgcaacaacacctgccagaaccccgggaaccgccacatcggcataatccc

SEQ ID NO: 663 - DNA, 60 bp, Artificial
  Synthetic oligonucleotide
tcgattgggactggcagcgacgcgggttgcgtgtgtatgttgtgttggtatgaacggcgc

SEQ ID NO: 664 - DNA, 60 bp, Artificial
  Synthetic oligonucleotide
cgcgcttgtgccgttcataagttcaaagcatctgaccaaacgcttgcgcgcccagccagt

SEQ ID NO: 665 - DNA, 60 bp, Artificial
  Synthetic oligonucleotide
cccaatcgactgccaggcgcacgctgtgcttcttccagattcaagccgttgaccatgcgt

SEQ ID NO: 666 - DNA, 60 bp, Artificial
  Synthetic oligonucleotide
aatgctttgctttcgatgacgaccgtagccgccatcgtgcgctcgcaccaagtgcccaca

SEQ ID NO: 667 - DNA, 60 bp, Artificial
  Synthetic oligonucleotide
atgccgatgtggcggttcccggggttctggcaggtgttgttgcacgacggttaacgaatc

SEQ ID NO: 668 - DNA, 60 bp, Artificial
  Synthetic oligonucleotide
cgaccgtagccgccaccgtgcgctcgcaccaagtgcccacacttatcggttgttaaattg

SEQ ID NO: 669 - DNA, 60 bp, Artificial
  Synthetic oligonucleotide
cgggttgtgattgcatgattttgttccaagtctcaagaactggctgggcgcgcgagcgtt

SEQ ID NO: 670 - DNA, 60 bp, Artificial
  Synthetic oligonucleotide
agaaagtgtcgttcatcgtgcctgtgcgcaaccgcaaccgcaccatcggcgccatgctgt

SEQ ID NO: 671 - DNA, 60 bp, Artificial
  Synthetic oligonucleotide
acgcaataccatcctcaagctgcgcggcatcgacacgctgggcgaattcatggaacgcca

SEQ ID NO: 672 - DNA, 60 bp, Artificial
  Synthetic oligonucleotide
ttccatgaattcgcccagcgtgtcgatgccgcgcagcttgaggatggtattgcgtacggc

SEQ ID NO: 673 - DNA, 60 bp, Artificial
  Synthetic oligonucleotide
cggttcaggaactggtcgacgacaacgccgacaatatccccttcaactggatcgctgggc

SEQ ID NO: 674 - DNA, 60 bp, Artificial
  Synthetic oligonucleotide
ttacggtccaggaactggtcgacgacaacgccgacaaaatccccttcagctggatcgccg

SEQ ID NO: 675 - DNA, 60 bp, Artificial
  Synthetic oligonucleotide
aacatcgccaagaacgccaagttcgagttcggcacctcgaccctgccctactacagcgac

SEQ ID NO: 676 - DNA, 56 bp, Artificial
  Synthetic oligonucleotide
ctgtccccactgggacaggcacaccgctctacgccatgaacggttgacggccaaga

SEQ ID NO: 677 - DNA, 60 bp, Artificial
  Synthetic oligonucleotide
ttcgcgcagcatgccggagaagcgcacgctggcgaggtggccatcggaaaccgtctcgat

SEQ ID NO: 678 - DNA, 60 bp, Artificial
  Synthetic oligonucleotide
atcatcgtggccatcctggccgtgctgacctggaagtcctcacacgcgctcgacccctac

SEQ ID NO: 679 - DNA, 60 bp, Artificial
  Synthetic oligonucleotide
atcatcgtggccatcctggccgtgctgacctggaagtcctcgcacgcgctcgacccctac

SEQ ID NO: 680 - DNA, 60 bp, Artificial
  Synthetic oligonucleotide
tgccggggaaggcggcacggattttgaggaagaagtattcctggtcgcggtagccgtaag

SEQ ID NO: 681 - DNA, 60 bp, Artificial
  Synthetic oligonucleotide
cattgccggggaaggcggcacggattttgaggaagaagtattcctggtcgcggtagccgt

SEQ ID NO: 682 - DNA, 60 bp, Artificial
  Synthetic oligonucleotide
ttcatcgcgcattgccggggaaggcggcacggattttgaggaagaagtattcctggtcgc

SEQ ID NO: 683 - DNA, 60 bp, Artificial
  Synthetic oligonucleotide
tcgagcattgccggggaaggcggcgcggattttgaggaagaagtattcctggtcgcggta

SEQ ID NO: 684 - DNA, 60 bp, Artificial
  Synthetic oligonucleotide
cgcgaccaggaatacttcttcctcaaaatccgtgccgccttccccggcaatgcgcgatga

SEQ ID NO: 685 - DNA, 60 bp, Artificial
  Synthetic oligonucleotide
acgcgattcttgaaccgggtatcaaggcaaatcctcttcttgtgcgatgggccgcgcggg

SEQ ID NO: 686 - DNA, 60 bp, Artificial
  Synthetic oligonucleotide
acgcgattcttgaaccgggtatcaaggcaaatcctcttcttgagcgatgggccgcgcggg

SEQ ID NO: 687 - DNA, 60 bp, Artificial
  Synthetic oligonucleotide
atttgccttgatacccggttcaagaatcgcgtggctgctgtggccgaccgtgctgtgcag

SEQ ID NO: 688 - DNA, 60 bp, Artificial
  Synthetic oligonucleotide
tcgttcccgtaccccatctacgccaagtgggcctccgactacaaggctgccaccaacaac

SEQ ID NO: 689 - DNA, 60 bp, Artificial
  Synthetic oligonucleotide
ttgttggtggcagccttgtagtcggaggcccacttggcgtagatggggtacgggaacgac

SEQ ID NO: 690 - DNA, 60 bp, Artificial
  Synthetic oligonucleotide
ccaacgccgggccgaagacgctccttaccgttgatcgccagggtctgatccatgactttt

SEQ ID NO: 691 - DNA, 60 bp, Artificial
  Synthetic oligonucleotide
aggttctgcatctttccttccagcgtgccggcttcgatgcgcgtaccgtaatggttcgcg

SEQ ID NO: 692 - DNA, 60 bp, Artificial
  Synthetic oligonucleotide
gtatgcgcggcctcgaccgaaccgccctcgatctccaggttctgcatctttccttccagc

SEQ ID NO: 693 - DNA, 60 bp, Artificial
  Synthetic oligonucleotide
atccaccttgacgcgcttgccctggatcagcccgttgaccgaactgacgtcatggccgtt

SEQ ID NO: 694 - DNA, 60 bp, Artificial
  Synthetic oligonucleotide
ttacccttgccggcatccaccttgacgcgcttgccctggatcagcccgttgaccgaactg

SEQ ID NO: 695 - DNA, 60 bp, Artificial
  Synthetic oligonucleotide
tgacatccttgccgcgcagcttgccgccctcgatgccgatatcccggcctgagacgtcga

SEQ ID NO: 696 - DNA, 60 bp, Artificial
  Synthetic oligonucleotide
gcacacgcgaaccattacggtacgcgcatcgaagccggtacgctggaaggaaagatgcag

SEQ ID NO: 697 - DNA, 60 bp, Artificial
  Synthetic oligonucleotide
tacacgccgcccagcttgacgtcatcgacatccagcttcaccttgccgcccttgagcgtc

SEQ ID NO: 698 - DNA, 60 bp, Artificial
  Synthetic oligonucleotide
ggccgtcgatcacggtatccacgtaccagacgaaatcgcggtccgcctgcttgagctgct

SEQ ID NO: 699 - DNA, 60 bp, Artificial
  Synthetic oligonucleotide
cctcgaccgaaccgccctcgatctccaggttctgcatctttccttccagcgtgccggctt

SEQ ID NO: 700 - DNA, 60 bp, Artificial
  Synthetic oligonucleotide
tacgtggataccgtgatcgacggccagaaggttctcgctccccggctgtacctgaccgag

SEQ ID NO: 701 - DNA, 60 bp, Artificial
  Synthetic oligonucleotide
atcacggtatccacgtaccagacgaaatcgcgatccgcctgcttgagctgctgcgcggtc

SEQ ID NO: 702 - DNA, 60 bp, Artificial
  Synthetic oligonucleotide
gtgaactcgatcgacaggtgaaagccgcgcgtgatgatgaagaacacggccgccaggaac

SEQ ID NO: 703 - DNA, 60 bp, Artificial
  Synthetic oligonucleotide
ttcttccgcagacatgctgcccgagatctgcacctggccgccgccgatttcgctacggat

SEQ ID NO: 704 - DNA, 60 bp, Artificial
  Synthetic oligonucleotide
ttggccatgtgcgtcaggtactggttgccgcgctggcgcatcacgtcggtgtacaggatg

SEQ ID NO: 705 - DNA, 60 bp, Artificial
  Synthetic oligonucleotide
cgtcgccgttgatcacgacgtcctcgcccttgatcatcgccgccgtccacttcggaatca

SEQ ID NO: 706 - DNA, 60 bp, Artificial
  Synthetic oligonucleotide
atgttgacctcgttggtcgtgatcgggtctttcagcgaacgcggcaccgaacccagcgcg

SEQ ID NO: 707 - DNA, 60 bp, Artificial
  Synthetic oligonucleotide
ttggccatcgccttgaccagctgcgagaccacgtagccgcccatcgagtcgttcaggcgg

SEQ ID NO: 708 - DNA, 60 bp, Artificial
  Synthetic oligonucleotide
aaggtggaggagcgcatcggcaatccgctctcgccgtacgcggtgaccaagtacgtcaac

SEQ ID NO: 709 - DNA, 60 bp, Artificial
  Synthetic oligonucleotide
ctgggttcggtgccgcgttcgctgaaagacccgatcacgaccaacgaggtcaacatcggc

SEQ ID NO: 710 - DNA, 60 bp, Artificial
  Synthetic oligonucleotide
acgatcacaccctggaagtcgaggacgacgaactggcccaggccgcgcagctcagctaca

SEQ ID NO: 711 - DNA, 60 bp, Artificial
  Synthetic oligonucleotide
tcgttgatatcgaagccaatcaccgggcgcttcttgccgaactccacggccagcggcagc

SEQ ID NO: 712 - DNA, 60 bp, Artificial
  Synthetic oligonucleotide
gccaatgtgttcatcgttaccgtgcccacgccgatcgacgagtacaagcagcccgacctc

SEQ ID NO: 713 - DNA, 60 bp, Artificial
  Synthetic oligonucleotide
actgggcaaggccaatgtgttcatcgtcaccgtgcccacgccgatcgacgagtacaagca

SEQ ID NO: 714 - DNA, 60 bp, Artificial
  Synthetic oligonucleotide
tcgccgttgatcacgacgtcctcgcccttgatcatcgccgccgtccacttcggaatcacc

SEQ ID NO: 715 - DNA, 60 bp, Artificial
  Synthetic oligonucleotide
aacacgttgaagtagcgcagccccacgctggaaaacccgtacgagcgcgcgaacacgtcg

SEQ ID NO: 716 - DNA, 60 bp, Artificial
  Synthetic oligonucleotide
tcgttgatatcgaagccgatcaccgggcgtttcttgccgaactccacggccagcggcagc

SEQ ID NO: 717 - DNA, 60 bp, Artificial
  Synthetic oligonucleotide
tacatcgggaacgagggctacgaggtggtggattaccgggcgctggagattgcggacaac

SEQ ID NO: 718 - DNA, 60 bp, Artificial
  Synthetic oligonucleotide
ttcgtgggcgagcgttttggcgagcagttcgacacctacatcctggatgtgcgcgggcgg

SEQ ID NO: 719 - DNA, 60 bp, Artificial
  Synthetic oligonucleotide
tgacacaaggagagtggcgatgccggtgagcgattacgagatgatccgggcctggacgca

SEQ ID NO: 720 - DNA, 60 bp, Artificial
  Synthetic oligonucleotide
agtggtgcgcgagggcaaggtactggactgaggaaggggcagggacatgggcaatgatct

SEQ ID NO: 721 - DNA, 60 bp, Artificial
  Synthetic oligonucleotide
tgatgacgcatgacgaggcgctggcaaagacaaagtgacactcaggtgcctgtccccgca

SEQ ID NO: 722 - DNA, 60 bp, Artificial
  Synthetic oligonucleotide
ggcgtgcagaagacctaccgcattggccagatcgtgccgagttcgaatacgacgatggag

SEQ ID NO: 723 - DNA, 60 bp, Artificial
  Synthetic oligonucleotide
ccctcaacggtatcgcgtcggttgcccgtgacccggtgaccagggcgctggatacgtccc

SEQ ID NO: 724 - DNA, 60 bp, Artificial
  Synthetic oligonucleotide
cgcgccttcgccgcgctgtgccatgagctgggcatcaagcaccgctttacccgaccttac

SEQ ID NO: 725 - DNA, 60 bp, Artificial
  Synthetic oligonucleotide
ctgggccgcatgctagctgtgaagattcaataggttgtatgcatggttcatccgaaccgg

SEQ ID NO: 726 - DNA, 60 bp, Artificial
  Synthetic oligonucleotide
atccggttcggatgaaccatgcatacaacctattgaatcttcacagctaccccgccatgg

SEQ ID NO: 727 - DNA, 60 bp, Artificial
  Synthetic oligonucleotide
ccggttcggatgaaccatgcatacaacctattgaatcttcacagctaggcgggacggcgg

SEQ ID NO: 728 - DNA, 60 bp, Artificial
  Synthetic oligonucleotide
ccggttcggatgaaccatgcatacaacctattgaatcttcacagctagcggcgagcgcgc

SEQ ID NO: 729 - DNA, 60 bp, Artificial
  Synthetic oligonucleotide
caccaaggcatcgggcgcgctgtacccatctccagactcaacctggacaaatacaaccta

SEQ ID NO: 730 - DNA, 60 bp, Artificial
  Synthetic oligonucleotide
caaatccggttcggatgaaccatgcatacaacctattgaatcttcacacctaggcgcggt

SEQ ID NO: 731 - DNA, 60 bp, Artificial
  Synthetic oligonucleotide
aaatcctggctacaccactacaactggcatcgaccccaccaaggcatcgggcgcgctgta

SEQ ID NO: 732 - DNA, 60 bp, Artificial
  Synthetic oligonucleotide
gggtcggcgatttccagtttctcaaatccggttcggatgaaccatgcatacaacctattg

SEQ ID NO: 733 - DNA, 60 bp, Artificial
  Synthetic oligonucleotide
ttgtgtgcctgaagcggcccgcgcctatggggtcaccgcgccgactgtgcgcaaatggct

SEQ ID NO: 734 - DNA, 60 bp, Artificial
  Synthetic oligonucleotide
caaggagcccggccggatgaacacccataagcatgcccgattgaccttcctacgtcgact

SEQ ID NO: 735 - DNA, 60 bp, Artificial
  Synthetic oligonucleotide
gtgaccccataggcgcgggccgcttcaggcacacaaacttgatgagcgatcaattgctgg

SEQ ID NO: 736 - DNA, 60 bp, Artificial
  Synthetic oligonucleotide
ggcgggttagctgtgaactgtcaataggttgtattcgtccaggttgagtctggagatggg

SEQ ID NO: 737 - DNA, 60 bp, Artificial
  Synthetic oligonucleotide
tgcgtccttgaggaactggacggcgctggggaaacgctcgtcggggtggatgtcggtgaa

SEQ ID NO: 738 - DNA, 60 bp, Artificial
  Synthetic oligonucleotide
gcgaacgcaatgccgccaatgctcccattaccaacgagaagaccgcaacatgagcgcctc

SEQ ID NO: 739 - DNA, 60 bp, Artificial
  Synthetic oligonucleotide
atgggcgccttggtcacgtagaacgcgacagcggcggcgacgatcaggccgatcagcagg

SEQ ID NO: 740 - DNA, 60 bp, Artificial
  Synthetic oligonucleotide
acttgcctacccgaacatgaccgacgaatcccgccacatcgacaccctgctccagcacct

SEQ ID NO: 741 - DNA, 60 bp, Artificial
  Synthetic oligonucleotide
atcgaacgccatgcttatcgcccaaatcagcgacctgcacatccgcatgccgggccagaa

SEQ ID NO: 742 - DNA, 60 bp, Artificial
  Synthetic oligonucleotide
tccagcgtgcggttcattgatagtgtgtcctgcggtccagccagcggaacttgatgagcg

SEQ ID NO: 743 - DNA, 60 bp, Artificial
  Synthetic oligonucleotide
accgtcgccgccgccccacgccccgaagaggaaccctcaccatgaaacgcatcatccagg

SEQ ID NO: 744 - DNA, 60 bp, Artificial
  Synthetic oligonucleotide
agccgcacgacctccagccgccgctcgccgctgaccacctcgcggatttcgttggaaagc

SEQ ID NO: 745 - DNA, 60 bp, Artificial
  Synthetic oligonucleotide
ccagacctgccgccgccacttaccattctgccgattgcccatgctcctcgagcaacaaaa

SEQ ID NO: 746 - DNA, 60 bp, Artificial
  Synthetic oligonucleotide
agcgagatcaagctgctcaaggccatcgaacgcctgatcaagaagcccatcgaacgccgc

SEQ ID NO: 747 - DNA, 60 bp, Artificial
  Synthetic oligonucleotide
tactgatgatgctcgccaaccccgccaccaaatacgtaccgttccaaccctttgcgcgcg

SEQ ID NO: 748 - DNA, 60 bp, Artificial
  Synthetic oligonucleotide
tgcccgcgccgtcctgattaaccgcacccagccgcaatgcaaagggcgcaccgcatggtg

SEQ ID NO: 749 - DNA, 60 bp, Artificial
  Synthetic oligonucleotide
aagctggtcgaacaggggcccaccgccaagatactcggcaacccggaccacccctacacg

SEQ ID NO: 750 - DNA, 60 bp, Artificial
  Synthetic oligonucleotide
aacggcaggtgcacgcacggtacgccgaacaaggtccaggcccggcagaacagcggatcg

SEQ ID NO: 751 - DNA, 60 bp, Artificial
  Synthetic oligonucleotide
tgatcacttcggggaactgccgcaccagcacgttataggcctgcaccgagcgcacatagc

SEQ ID NO: 752 - DNA, 60 bp, Artificial
  Synthetic oligonucleotide
atctcttccaggggcgaatccaggtagccgttctcgtccagttcgtcgatcagcagaccg

SEQ ID NO: 753 - DNA, 60 bp, Artificial
  Synthetic oligonucleotide
acaggcacactgccgtacgccatcgacgcttgacgactaagacagtatctgtccccgcag

SEQ ID NO: 754 - DNA, 60 bp, Artificial
  Synthetic oligonucleotide
tggtggacacgcacgtcaatgaagaccccagcgccgagcagatcgccgagtacaccgtgg

SEQ ID NO: 755 - DNA, 60 bp, Artificial
  Synthetic oligonucleotide
acagataccgtcttggcagtcaaccgttcatgacgtagcgcggtgtgcctgtcccagtgg

SEQ ID NO: 756 - DNA, 60 bp, Artificial
  Synthetic oligonucleotide
acagataccgtcttggcagtcaaccgttcatggcgtagcgcggtgtgcctgtcccagtgg

SEQ ID NO: 757 - DNA, 60 bp, Artificial
  Synthetic oligonucleotide
gcatgtcgctgggcgtgctgctgctgatgttctattacggcatcaagatcaagcacccgg

SEQ ID NO: 758 - DNA, 60 bp, Artificial
  Synthetic oligonucleotide
aaccggccaacacatgcccaatgcccaaaccgatgctggaggcgttgaagcctgtccagg

SEQ ID NO: 759 - DNA, 60 bp, Artificial
  Synthetic oligonucleotide
ccacccgggtgcttgatcttgatgccgtaatagaacatcagcagcagcacgcccagcgac

SEQ ID NO: 760 - DNA, 60 bp, Artificial
  Synthetic oligonucleotide
tatttcccgaccaagcaggacatctacgacgccatcatcctggaaacgctggccggcctg

SEQ ID NO: 761 - DNA, 60 bp, Artificial
  Synthetic oligonucleotide
gcccaggccctcgatgcggcttttgagcagttcgctgatctcggagggattgagttgcat

SEQ ID NO: 762 - DNA, 60 bp, Artificial
  Synthetic oligonucleotide
atccgggaacgtcatggctgaactttccactgttgcccgtccctacgccgaagccctctt

SEQ ID NO: 763 - DNA, 60 bp, Artificial
  Synthetic oligonucleotide
gggcgggcaacagtggaaagttcagccatgacgttcccggattaaagctgcgccttgagc

SEQ ID NO: 764 - DNA, 60 bp, Artificial
  Synthetic oligonucleotide
tcgtcgcgttcagattcacggtcgttcctttaacaccttgcggctccggcaacccgacac

SEQ ID NO: 765 - DNA, 60 bp, Artificial
  Synthetic oligonucleotide
agaaggcttgatcgtgcattcaacaaagaaggaatcgactcatggcacacactcttcccc

SEQ ID NO: 766 - DNA, 60 bp, Artificial
  Synthetic oligonucleotide
ccgaccgggcctcgacaaaggccatatgcaggctgacttcaagctcttgggaaatcacgc

SEQ ID NO: 767 - DNA, 60 bp, Artificial
  Synthetic oligonucleotide
acagataccgtcttggcagtcaaccgttcatggcgtagcgcggtgtgccctgtcccagtg

SEQ ID NO: 768 - DNA, 60 bp, Artificial
  Synthetic oligonucleotide
atctggggcagcacgctggtgctcaagctgatcgaccgcttcccgatggtcgtcaccttc

SEQ ID NO: 769 - DNA, 60 bp, Artificial
  Synthetic oligonucleotide
cgccgaagccatcaagaagtacggcatcaacccgaacaaagccaacccgcatcacgcctg

SEQ ID NO: 770 - DNA, 60 bp, Artificial
  Synthetic oligonucleotide
tgttcatggattcgtacctgagcggcgagcagtcgtcgaactctggtgggctgatccgct

SEQ ID NO: 771 - DNA, 60 bp, Artificial
  Synthetic oligonucleotide
tggttctgtcgtggccggtgttcatggattcgtacctgagcggcgagcagtcgtcgaact

SEQ ID NO: 772 - DNA, 60 bp, Artificial
  Synthetic oligonucleotide
atgttcctgctgaccgcgggctacacgctgctgaagaacgaacacgtgcgggtggacatt

SEQ ID NO: 773 - DNA, 60 bp, Artificial
  Synthetic oligonucleotide
agttcgaacgcctggctggaactgcagtggtacatgttcggcgcgatgttcctgctgacc

SEQ ID NO: 774 - DNA, 60 bp, Artificial
  Synthetic oligonucleotide
tgctgatgctgatttcctcgctgtcggcctatgtgctggggcagtggctggagaacgaca

SEQ ID NO: 775 - DNA, 60 bp, Artificial
  Synthetic oligonucleotide
tccagctgttcatggtggccgccgtcatgctgtttcccggcatggtcatgcactacaagg

SEQ ID NO: 776 - DNA, 60 bp, Artificial
  Synthetic oligonucleotide
aatctggcgccgatcatgttcgcgacgctggtgctgttcttgctgctgggttttccggtg

SEQ ID NO: 777 - DNA, 60 bp, Artificial
  Synthetic oligonucleotide
ggccgctgatcatggagtttctgatagccaatctggcgccgatcatgttcgcgacgctgg

SEQ ID NO: 778 - DNA, 60 bp, Artificial
  Synthetic oligonucleotide
cgggacaggcacactgctgtacgccatcgacgcttgacggccaagacggtatctgtcccc

SEQ ID NO: 779 - DNA, 60 bp, Artificial
  Synthetic oligonucleotide
ggagtttgattggatttggtaagaggatgagtctccctagtccattcagtgctctacccc

SEQ ID NO: 780 - DNA, 60 bp, Artificial
  Synthetic oligonucleotide
gggtagagcactgaatggactagggagactcatcatcttaccaaatccaatcaaactccg

SEQ ID NO: 781 - DNA, 60 bp, Artificial
  Synthetic oligonucleotide
gtcgagcctgtttcatccccataacaacagtggagatgccgagcactgccctcgggtcca

SEQ ID NO: 782 - DNA, 60 bp, Artificial
  Synthetic oligonucleotide
gggtagagcactgaatggactagggagactcatcctcttaccaaatccaatcaaactccg

SEQ ID NO: 783 - DNA, 60 bp, Artificial
  Synthetic oligonucleotide
ggtcccaggaaatagcgcttaagttaataagtccgtaccgtaaaccgacactggtaggta

SEQ ID NO: 784 - DNA, 60 bp, Artificial
  Synthetic oligonucleotide
cgctacggctgctttatttctaacctgaccgacttcacgcgcaatctgctcgcaccgccc

SEQ ID NO: 785 - DNA, 60 bp, Artificial
  Synthetic oligonucleotide
ggtagcggagcgtttcgtaagcctgtgaaggtggcccgtgagggttgctggaggtatcga

SEQ ID NO: 786 - DNA, 60 bp, Artificial
  Synthetic oligonucleotide
atatatttgtggtagttatgactccttcgtctagtggtctaggaccccaccctttcacgg

SEQ ID NO: 787 - DNA, 50 bp, Artificial
  Synthetic oligonucleotide
aaaaccagatgtgcccttagccggactcgaaccagcacaccctcacgggc

SEQ ID NO: 788 - DNA, 60 bp, Artificial
  Synthetic oligonucleotide
ggatcgaacgcgcggcacggtgattaaaagccacctgctctaccactgagctacaggacc

SEQ ID NO: 789 - DNA, 60 bp, Artificial
  Synthetic oligonucleotide
gcaacagtggagatgccgagcactgccctcgggtccaaaacgcctattccaagaggcctt

SEQ ID NO: 790 - DNA, 60 bp, Artificial
  Synthetic oligonucleotide
gagggtgattagctcatttggttagagcgcttgcttgacgtgcaagaggtgactggttcg

SEQ ID NO: 791 - DNA, 60 bp, Artificial
  Synthetic oligonucleotide
ccctgaacctgctgcaacaacagcctgcctatatattttatcttgtacatcacctgcagc

SEQ ID NO: 792 - DNA, 60 bp, Artificial
  Synthetic oligonucleotide
ccatcgactactcctttacggcctcgccttaggatccgactaaccctgcgcagattgact

SEQ ID NO: 793 - DNA, 60 bp, Artificial
  Synthetic oligonucleotide
gaagccggtcaggttaggaataaagcagccgtagcattgtttctttgggttgtattgccc

SEQ ID NO: 794 - DNA, 60 bp, Artificial
  Synthetic oligonucleotide
cccacctaccagtgtcggtttacggtacggacttataaatttaagcgctatttcctggga

SEQ ID NO: 795 - DNA, 60 bp, Artificial
  Synthetic oligonucleotide
cctacctaccagtgtcggtttacggtacggacttataaacttaagcgctatttcctggga

SEQ ID NO: 796 - DNA, 60 bp, Artificial
  Synthetic oligonucleotide
cccaggaaatagcgcttaagtttataagtccgtaccgtaaaccgacactggtaggtaggt

SEQ ID NO: 797 - DNA, 60 bp, Artificial
  Synthetic oligonucleotide
cacctccgacagggattacctgtcaccattttcccttggagtccggactttcctctgtac

SEQ ID NO: 798 - DNA, 60 bp, Artificial
  Synthetic oligonucleotide
cgagcctgtttcatccccataataacaacagtggagatgccgagcactgccctcgggtcc

SEQ ID NO: 799 - DNA, 60 bp, Artificial
  Synthetic oligonucleotide
ccaggcatacccaagactcttcgcacaacagcaccaaagcccgcgccaatgcctctttgc

SEQ ID NO: 800 - DNA, 60 bp, Artificial
  Synthetic oligonucleotide
gagccacccagactgatcccgcgacaccatgacctaccaacttccctcaaaacgcaagag

SEQ ID NO: 801 - DNA, 60 bp, Artificial
  Synthetic oligonucleotide
tccggacaacgaaactcctagcaccagtcttccatctagcgacgtcaccacccctggcca

SEQ ID NO: 802 - DNA, 60 bp, Artificial
  Synthetic oligonucleotide
gcccagagtacccctcccaacaagcaattagaaaccgcccattccacccatgccaccacc

SEQ ID NO: 803 - DNA, 60 bp, Artificial
  Synthetic oligonucleotide
gctgcggcgagtggagcaacgttacacattccctttccaatgcgacctctagcgccagga

SEQ ID NO: 804 - DNA, 60 bp, Artificial
  Synthetic oligonucleotide
ccgcgccagcaacatcgtcaccctcgctgaacctgccatattcatcgactgtcttgccgt

SEQ ID NO: 805 - DNA, 60 bp, Artificial
  Synthetic oligonucleotide
aggctggtactgtggctgctaccgcgtaatgtccgagtttcgcacgtttgttctgtgtgg

SEQ ID NO: 806 - DNA, 60 bp, Artificial
  Synthetic oligonucleotide
cgtgtggaatgctgccctctcggatgcccgctttgctgctgaaaatatccttcgtgatgc

SEQ ID NO: 807 - DNA, 60 bp, Artificial
  Synthetic oligonucleotide
ccacacgccgcgcaagaaaacctgtctgttggacaaccaccacgttcctaccgtctgcca

SEQ ID NO: 808 - DNA, 60 bp, Artificial
  Synthetic oligonucleotide
ggccgggtatcctgcagcgattcgggcgagtaggagtggtcttaaggttgcgcttgttga

SEQ ID NO: 809 - DNA, 60 bp, Artificial
  Synthetic oligonucleotide
gccatcatactcgactacagcccagcccgtacgaaggagacccggatcaacccctaatgc

SEQ ID NO: 810 - DNA, 60 bp, Artificial
  Synthetic oligonucleotide
gtttcactctcctcctgtgggcatggttttgccgcttgcgccgctggttctcctttcgct

SEQ ID NO: 811 - DNA, 60 bp, Artificial
  Synthetic oligonucleotide
ccctcctccagcaccaccattacctgaaccacccgctaaagcagcacctaaggcagttgc

SEQ ID NO: 812 - DNA, 60 bp, Artificial
  Synthetic oligonucleotide
cctcagcaccaccggacaacctcacccttgcaaccttcctaagcgcagagttcggcttct

SEQ ID NO: 813 - DNA, 60 bp, Artificial
  Synthetic oligonucleotide
gcacgcaagacacctctcccagacagacgcgctttatcgccatcgagcaattcacaggcc

SEQ ID NO: 814 - DNA, 60 bp, Artificial
  Synthetic oligonucleotide
actccttcgtctagtggtctaggaccccaccctttcacggtggtaacgcgggttcgactc

SEQ ID NO: 815 - DNA, 60 bp, Artificial
  Synthetic oligonucleotide
cccgcgttaccaccgtgaaagggtggggtcctagaccactagacgaaggagtcacagcaa

SEQ ID NO: 816 - DNA, 60 bp, Artificial
  Synthetic oligonucleotide
gccgtgctcttgttgtaacaccacgcttaactctagccatctataacccctaagttcaca

SEQ ID NO: 817 - DNA, 60 bp, Artificial
  Synthetic oligonucleotide
gcagctggaaagttccaaggtgtaatcgcagcgacgaccccgacaggctgcttttgcacg

SEQ ID NO: 818 - DNA, 60 bp, Artificial
  Synthetic oligonucleotide
ctcttccgcccgccctgatgggagcatggaggtccataaagtgtactggtgggagcattc

SEQ ID NO: 819 - DNA, 60 bp, Artificial
  Synthetic oligonucleotide
ccccagtactttcaatggcactattaagtaatggacagcctccagcaataggaggattat

SEQ ID NO: 820 - DNA, 60 bp, Artificial
  Synthetic oligonucleotide
gccgaccgataatgaccgttgacagcccttcgcgtaatatcttcccctgctgcgccgtca

SEQ ID NO: 821 - DNA, 60 bp, Artificial
  Synthetic oligonucleotide
gcaaggaaatgtgaccctacccgctttgtacgctctccaccacgatatgcacgccaaacg

SEQ ID NO: 822 - DNA, 60 bp, Artificial
  Synthetic oligonucleotide
gcctcagccacacttccacccatttgaatcgctgccccttcccttcctgttgaaccaccg

SEQ ID NO: 823 - DNA, 60 bp, Artificial
  Synthetic oligonucleotide
ccgcagcctacaacgacccgcacgtctcctttcgccaattcgccaaccgtcttcagtaca

SEQ ID NO: 824 - DNA, 60 bp, Artificial
  Synthetic oligonucleotide
gccaaccgcggagaagacttacgtttccccataagttcttcctccggtttctcctctccc

SEQ ID NO: 825 - DNA, 60 bp, Artificial
  Synthetic oligonucleotide
gggagaggagaaaccggaggaagaacttatggggaaacgtaagtcttctccgcggttggc

SEQ ID NO: 826 - DNA, 60 bp, Artificial
  Synthetic oligonucleotide
cgcgccgtttgccacctcatcatcttcttcctcgatcttaaccagatcgccgtcctccgc

SEQ ID NO: 827 - DNA, 60 bp, Artificial
  Synthetic oligonucleotide
cgccttggcatagagaccgtcacagtccgcaaatattcaaagctgctcgagtctcacggc

SEQ ID NO: 828 - DNA, 60 bp, Artificial
  Synthetic oligonucleotide
cgcagccaccaaagccagctcctccagataaggataaccccggccatctttaagtggttc

SEQ ID NO: 829 - DNA, 60 bp, Artificial
  Synthetic oligonucleotide
ttcgattgacaacgagcctccgcaccctcaaactcccaaaggcaaccccgcagggcgaaa

SEQ ID NO: 830 - DNA, 60 bp, Artificial
  Synthetic oligonucleotide
gccgccaagcgaatgcaaggccgtctcgacaaggaaggcgctgaaaagatcagctctctc

SEQ ID NO: 831 - DNA, 60 bp, Artificial
  Synthetic oligonucleotide
ggttctgcatactggagacatgcaaataggggctgaatcttatctgcacgatgttctctg

SEQ ID NO: 832 - DNA, 60 bp, Artificial
  Synthetic oligonucleotide
ggagttaggttgctcgacttggattagcaattgtacctgccgaaccgcttcgatctatcg

SEQ ID NO: 833 - DNA, 60 bp, Artificial
  Synthetic oligonucleotide
ggacgctgcctctttacttgtcgcttgaatatccatggagcctcctgcgtgaataatcac

SEQ ID NO: 834 - DNA, 60 bp, Artificial
  Synthetic oligonucleotide
gacccataaacggtttgttaataaatacgctgtagccgccggtgtgataagcatagcgac

SEQ ID NO: 835 - DNA, 60 bp, Artificial
  Synthetic oligonucleotide
ggggtcgaatgtaccgctgacacgcacgccagatgcccatttcatgaccgaggtacgcta

SEQ ID NO: 836 - DNA, 60 bp, Artificial
  Synthetic oligonucleotide
tccggtacacagccatgccacgcacccgcatattcagcaccatcgccaaagctacgccaa

SEQ ID NO: 837 - DNA, 60 bp, Artificial
  Synthetic oligonucleotide
acatggctaaacggtttcggggctttccgcctccacacccaccacattgcccgccgaaaa

SEQ ID NO: 838 - DNA, 60 bp, Artificial
  Synthetic oligonucleotide
ccgtgtgttttcgtgccgcctgcgtcaagcccgatcacgtacatttgctcacccatccca

SEQ ID NO: 839 - DNA, 60 bp, Artificial
  Synthetic oligonucleotide
gtcgtccccaccgcttgtaaacccttctacgactgccgcttcctctgccttcgctgttaa

SEQ ID NO: 840 - DNA, 60 bp, Artificial
  Synthetic oligonucleotide
ctcggcccgttcccttgaccaccatgccttgcctgaccctgttgctgacaagattgctga

SEQ ID NO: 841 - DNA, 60 bp, Artificial
  Synthetic oligonucleotide
caattgctaggcccagacccgtaccgccattctgcctgctcctgcccttcttgacacgat

SEQ ID NO: 842 - DNA, 60 bp, Artificial
  Synthetic oligonucleotide
cggggcaccaactcgtccaaaatgtcagcatcaccgcacgccctgccgcttctttgctta

SEQ ID NO: 843 - DNA, 60 bp, Artificial
  Synthetic oligonucleotide
gccgaaggttttacgcagggtgtgagtcccgatggattctataccggcaaagtctccagc

SEQ ID NO: 844 - DNA, 60 bp, Artificial
  Synthetic oligonucleotide
gatcttgatgccggcacttcatacgtagatgtttctcctggtggtggttcagatggatat

SEQ ID NO: 845 - DNA, 60 bp, Artificial
  Synthetic oligonucleotide
ggagttgcagaaacaggtgtaataactgaagatggaagggcttgttcagcaagaacttgg

SEQ ID NO: 846 - DNA, 60 bp, Artificial
  Synthetic oligonucleotide
ggttaagttgctcgacttggaccagcaattatacccgccgaaccgctagttttatcgatt

SEQ ID NO: 847 - DNA, 60 bp, Artificial
  Synthetic oligonucleotide
cccaggtacttatagcgacaaattctagcgaggatgtggcgaagaaccaagggcgtgatg

SEQ ID NO: 848 - DNA, 60 bp, Artificial
  Synthetic oligonucleotide
gcttgctaggtgttgacgcatcttggaagatgagaggtaggcagatacttcgtgattttg

SEQ ID NO: 849 - DNA, 60 bp, Artificial
  Synthetic oligonucleotide
gtgtttccatgtggcgagtgtttgctgtcatttggacttcctccttggaatttgccacac

SEQ ID NO: 850 - DNA, 60 bp, Artificial
  Synthetic oligonucleotide
gcgcttggagaaaagcaggaaaggacgcagtgaaaatcgcaacgatgatggaagcaatca

SEQ ID NO: 851 - DNA, 60 bp, Artificial
  Synthetic oligonucleotide
cctgatcaattcgccactgactatcaaggttcaggtgggagtagtaataaggcaggcgtg

SEQ ID NO: 852 - DNA, 60 bp, Artificial
  Synthetic oligonucleotide
ctcccatctatttcgtcattcactttaccaacaggtccaacaggagaaacaggaacgtct

SEQ ID NO: 853 - DNA, 60 bp, Artificial
  Synthetic oligonucleotide
ctttgcgtaaatactgtcttgtcttggaggaagctgggtattctttcgagcgtggtaaca

SEQ ID NO: 854 - DNA, 60 bp, Artificial
  Synthetic oligonucleotide
ggatttgttgcaagaacaggtgttacatcactatcgctgagtggagttcgtgtttctgat

SEQ ID NO: 855 - DNA, 60 bp, Artificial
  Synthetic oligonucleotide
cagaaggtgctggacaaattattgaaaatggtcgcactgtaagccctagaacatgggtgg

SEQ ID NO: 856 - DNA, 60 bp, Artificial
  Synthetic oligonucleotide
caaggtgtcgaaggaaagggaagaaagttaattgcgcattggagagaagtggaaacgact

SEQ ID NO: 857 - DNA, 60 bp, Artificial
  Synthetic oligonucleotide
ccagcccctcacgaccttgccagctccagcgctttccgcatgtattcttcctcggtgatt

SEQ ID NO: 858 - DNA, 60 bp, Artificial
  Synthetic oligonucleotide
ccttcccacgcatccactgcaccatctacaaacccattagaaataccagtccacgcagca

SEQ ID NO: 859 - DNA, 60 bp, Artificial
  Synthetic oligonucleotide
ccttcccacgcatccactgcaccatctacaaacccagtagaaataccagtccacgcagca

SEQ ID NO: 860 - DNA, 60 bp, Artificial
  Synthetic oligonucleotide
cgagcccacacatgcatttgaattttgttccagtagcaagcgggtataaacgtggacttg

SEQ ID NO: 861 - DNA, 60 bp, Artificial
  Synthetic oligonucleotide
cggcgagcggtatccgatatggacaagttcgaccaatacaagggtgctacaagtttggct

SEQ ID NO: 862 - DNA, 60 bp, Artificial
  Synthetic oligonucleotide
gactttgttgggatgcaggaagtaaaagtacggggaaagttagtttcctttggagcccag

SEQ ID NO: 863 - DNA, 60 bp, Artificial
  Synthetic oligonucleotide
gttgcttagcttgttggttatccgtatcaagagcgaatccctctaagctagcttgtgcac

SEQ ID NO: 864 - DNA, 60 bp, Artificial
  Synthetic oligonucleotide
cctgtctcagctcatgtgcttttcggtgcttctgaaacccttgccttgcgacccgccagc

SEQ ID NO: 865 - DNA, 60 bp, Artificial
  Synthetic oligonucleotide
cctctccgcactttcgcgtcaaagttcaagccgccacgcccaaggccgccgttttgtaaa

SEQ ID NO: 866 - DNA, 60 bp, Artificial
  Synthetic oligonucleotide
ggatcgcccttggcgcggtgttctcggcgctcgaagttattccgctcacgctccttattt

SEQ ID NO: 867 - DNA, 60 bp, Artificial
  Synthetic oligonucleotide
ggccgatcgcttcaaacgttttgcgccccatcacgatggcatggcccattgtcacccgtt

SEQ ID NO: 868 - DNA, 60 bp, Artificial
  Synthetic oligonucleotide
agtagacgacgaccccggttgaggcgctgccaaaccaaatgatgctggtgatcggcccaa

SEQ ID NO: 869 - DNA, 60 bp, Artificial
  Synthetic oligonucleotide
atacagcacattttcgcgcacatctttgccgacgacaaaccacggttcgccgctgccgcc

SEQ ID NO: 870 - DNA, 60 bp, Artificial
  Synthetic oligonucleotide
cgccgacagtcaaaccacggcggaaactgaaacagcaccatcgccaatttccccgcttcc

SEQ ID NO: 871 - DNA, 60 bp, Artificial
  Synthetic oligonucleotide
gtcagcgctatgttctcgtgtacaatcccagcgaagccgaacgccaacgcaaggaacggg

SEQ ID NO: 872 - DNA, 60 bp, Artificial
  Synthetic oligonucleotide
cgacgtacgcccgcgtccatttgacaaacgaaacgtacaacaacccatccgagccgccga

SEQ ID NO: 873 - DNA, 60 bp, Artificial
  Synthetic oligonucleotide
gatactgtgtcttcttcgagcgctctcttcattacgaacggccagcattagcacaccatc

SEQ ID NO: 874 - DNA, 60 bp, Artificial
  Synthetic oligonucleotide
cgaggcgtgtcggaatggatagagccttgcaacaacaaggtgtagaaggaacgggaagaa

SEQ ID NO: 875 - DNA, 60 bp, Artificial
  Synthetic oligonucleotide
cgagagattttagcactcacacaggggtgtgtataagtgcgccattttcatgggtgtcct

SEQ ID NO: 876 - DNA, 60 bp, Artificial
  Synthetic oligonucleotide
gcgtggactggtatttctactgggtttgtagatggtgcagtggatgcgtgggaaggactg

SEQ ID NO: 877 - DNA, 60 bp, Artificial
  Synthetic oligonucleotide
ccaatggacaagcgtcgccaaggtgatgacaactggtacatgcttccgatggaggaacgt

SEQ ID NO: 878 - DNA, 60 bp, Artificial
  Synthetic oligonucleotide
gagcgacatgaagttgagcgctatgaagaactggatttcaacgctacaacgctacagacg

SEQ ID NO: 879 - DNA, 60 bp, Artificial
  Synthetic oligonucleotide
ccccgatccgcacggtacgtgccactttcacggcataccgcggtccatctatattgtagt

SEQ ID NO: 880 - DNA, 60 bp, Artificial
  Synthetic oligonucleotide
ccccgatccgcacggtacgtgccactttcacggcataccgcggtccacctatattgtagt

SEQ ID NO: 881 - DNA, 60 bp, Artificial
  Synthetic oligonucleotide
cggtcggttgctgggcttcatcgggccaaatccctccgcctgctctcgataagagttgaa

SEQ ID NO: 882 - DNA, 60 bp, Artificial
  Synthetic oligonucleotide
cagctacactcatgagcccagaaggactgaatcaacgctttaatccagcagctgtcgcat

SEQ ID NO: 883 - DNA, 60 bp, Artificial
  Synthetic oligonucleotide
cactggtgacggtggtgcttcacaaggtgacttctacgaaggtatgaactttgcgggtgc

SEQ ID NO: 884 - DNA, 60 bp, Artificial
  Synthetic oligonucleotide
gcgcccgcaaagttcataccttcgtagaagtcaccttgtgaagcaccaccgtcaccagtg

SEQ ID NO: 885 - DNA, 60 bp, Artificial
  Synthetic oligonucleotide
gcacccgcaaagttcataccttcgtagaagtcaccttgtgaagcaccaccgtcaccagtg

SEQ ID NO: 886 - DNA, 60 bp, Artificial
  Synthetic oligonucleotide
gccagcggcagttgccgtcaagcatatgaacccttgcggcgttgggacaggtgaaacgat

SEQ ID NO: 887 - DNA, 60 bp, Artificial
  Synthetic oligonucleotide
ggtgcttgttcgactaagcagtcaccgccaaacatgacaatgcgatccggcttatgagca

SEQ ID NO: 888 - DNA, 60 bp, Artificial
  Synthetic oligonucleotide
ggtggaccatagtgcgggatttgagggtcctcatgtaagtcttgcccgattccgtgacca

SEQ ID NO: 889 - DNA, 60 bp, Artificial
  Synthetic oligonucleotide
cgcgatttattcgcttctgttcgtgatgttgtcggtggtcgtgctggttcttacgaaagc

SEQ ID NO: 890 - DNA, 60 bp, Artificial
  Synthetic oligonucleotide
ccgcgatttattcgcttctgttcgtgatgttgtcggtggtcgtgctggttcttacgaaag

SEQ ID NO: 891 - DNA, 60 bp, Artificial
  Synthetic oligonucleotide
gggcctcctgcgtgaataatcacatccgttttcaataccctctccttatcttcagcactt

SEQ ID NO: 892 - DNA, 60 bp, Artificial
  Synthetic oligonucleotide
gatagcgagaatgagagagccaccagcaccgcaggtcgcacgtccaaatttgccatgggc

SEQ ID NO: 893 - DNA, 60 bp, Artificial
  Synthetic oligonucleotide
gaccgtagggaggattaaggagttgactcgctcagcgccacccgaaccctttcagcactc

SEQ ID NO: 894 - DNA, 60 bp, Artificial
  Synthetic oligonucleotide
cagcgagaatgagagagccaccagcaccgcaggtcgcacgtccaaatttgccatgggcat

SEQ ID NO: 895 - DNA, 60 bp, Artificial
  Synthetic oligonucleotide
tgaagtcggaaacgcaggaaaaggagcgctggcagtctatcgcccggcaggaagcagatc

SEQ ID NO: 896 - DNA, 60 bp, Artificial
  Synthetic oligonucleotide
cggcatccataccggattacgcgtgagtgatctactccaactcgaaacacaaaccatact

SEQ ID NO: 897 - DNA, 60 bp, Artificial
  Synthetic oligonucleotide
ctgaacgagactatattctgtttcttatcggcatccatactggattacgcgtgagcgatc

SEQ ID NO: 898 - DNA, 60 bp, Artificial
  Synthetic oligonucleotide
gtctcgtgcctttcttgctgtctcttttcgaattgctccatccgttctgccatgcggcgg

SEQ ID NO: 899 - DNA, 60 bp, Artificial
  Synthetic oligonucleotide
cggggtggcactcccgcatctccaacatagggtgatggctgcctgttccatcctcagaaa

SEQ ID NO: 900 - DNA, 60 bp, Artificial
  Synthetic oligonucleotide
gagactggaagcaggcaaaaggtcatgaatgcccttgaggcgttgagaacaggacaaggc

SEQ ID NO: 901 - DNA, 60 bp, Artificial
  Synthetic oligonucleotide
cgcgacttattcgcttccgttcgtgatgttgtcggtggtcgtgctggttcttacgaaagc

SEQ ID NO: 902 - DNA, 60 bp, Artificial
  Synthetic oligonucleotide
caccgctggatacatctacttcaccagtgccaataatattagaacggactgcggttccag

SEQ ID NO: 903 - DNA, 60 bp, Artificial
  Synthetic oligonucleotide
gcaggatctggaaccgcagtccgttctaatatcattggcactggtgaagtagatgtatcc

SEQ ID NO: 904 - DNA, 60 bp, Artificial
  Synthetic oligonucleotide
cccgcaagaattgaagcggaaaatttgaaaatgttacgtcgttctagtgcgttaaagggg

SEQ ID NO: 905 - DNA, 60 bp, Artificial
  Synthetic oligonucleotide
gtggatccagatcaggcgtctgatataatgtccagtctgtccaaggcggtgcagcatgat

SEQ ID NO: 906 - DNA, 60 bp, Artificial
  Synthetic oligonucleotide
gcggctgcacgtgtccattccttaatgctcctttcataggtcagcacaaaccgctgaccc

SEQ ID NO: 907 - DNA, 60 bp, Artificial
  Synthetic oligonucleotide
cgaccactgagggcaactggaagaccacagaacggctataaacgaccaccagacgaccac

SEQ ID NO: 908 - DNA, 60 bp, Artificial
  Synthetic oligonucleotide
gtggtcgtctggtggtcgtttatagccgttctgtggtcttccagttgccctcagtggtcg

SEQ ID NO: 909 - DNA, 60 bp, Artificial
  Synthetic oligonucleotide
cggaagaactggcggttcggctggtacaattcctggtccaagtcgaacaacttaaccccg

SEQ ID NO: 910 - DNA, 60 bp, Artificial
  Synthetic oligonucleotide
cggggttaagttgttcgacttggaccaggaattgtaccagccgaaccgccagttcttccg

SEQ ID NO: 911 - DNA, 60 bp, Artificial
  Synthetic oligonucleotide
ggtccgactggaccacaaggagtaccaggtattcagggagaacagggagatccaggtccg

SEQ ID NO: 912 - DNA, 60 bp, Artificial
  Synthetic oligonucleotide
ccccgtaggtcccgttggcccttcttgcaaaggaggaaacgcacaggggaagggaatatg

SEQ ID NO: 913 - DNA, 60 bp, Artificial
  Synthetic oligonucleotide
ctcggtgatgcggaggacggcgatctcgtcaagattgaggaagaagatgacgaggtggcg

SEQ ID NO: 914 - DNA, 60 bp, Artificial
  Synthetic oligonucleotide
ggcgtgtcggaatggatagagctttgcaacaacaaggcgtacaaggaaaagggacggagc

SEQ ID NO: 915 - DNA, 60 bp, Artificial
  Synthetic oligonucleotide
attacagggccaccgggaccacaaggacctgctggagatacgggtccacaaggagtacct

SEQ ID NO: 916 - DNA, 60 bp, Artificial
  Synthetic oligonucleotide
gcccagtgggccccgttggtcctgttactcctggttcaaaaggaggaaacgcacatggga

SEQ ID NO: 917 - DNA, 60 bp, Artificial
  Synthetic oligonucleotide
ccaggtactcgtggcccaacaggagctcaaggacctcagggtattcaaggtccaccaggt

SEQ ID NO: 918 - DNA, 60 bp, Artificial
  Synthetic oligonucleotide
gcggtggattgttgaggaataaaagaaggaggaggagctgttggagtttgtgaaccttcg

SEQ ID NO: 919 - DNA, 60 bp, Artificial
  Synthetic oligonucleotide
cctccttcttttattcctcaacaatccaccgcttctccatttgctgttgatccaggtgcg

SEQ ID NO: 920 - DNA, 60 bp, Artificial
  Synthetic oligonucleotide
cgatagaactggtggttcggctggtacaattgctagtccaagtcgagcaacttaaccccg

SEQ ID NO: 921 - DNA, 60 bp, Artificial
  Synthetic oligonucleotide
cggggttaagttgctcgacttggactagcaattgtaccagccgaaccaccagttctatcg

SEQ ID NO: 922 - DNA, 60 bp, Artificial
  Synthetic oligonucleotide
gcagttgcacaatcaggtgttacaactgaagatgggcgagtttgtactagccgtacatgg

SEQ ID NO: 923 - DNA, 60 bp, Artificial
  Synthetic oligonucleotide
ccgcgcccgtttcaaggagctgttcttggttctctggctgaccagttgctagaaaacgca

SEQ ID NO: 924 - DNA, 60 bp, Artificial
  Synthetic oligonucleotide
gcaactggtcagccagagaaccaagaacagctccttgaaacgggcgcggagatacctctt

SEQ ID NO: 925 - DNA, 60 bp, Artificial
  Synthetic oligonucleotide
ccgcgcctgtttcaaggagctgttcttggttctctggctgaccagttgctagtaaacgca

SEQ ID NO: 926 - DNA, 60 bp, Artificial
  Synthetic oligonucleotide
ccgcgcctgtttcaaggagctgttcttggttctctggctgaccagttgctagaaaacgca

SEQ ID NO: 927 - DNA, 60 bp, Artificial
  Synthetic oligonucleotide
ggtttcatagcgggttcacctctttatgattcattcgctacggtatacgctacgccctcc

SEQ ID NO: 928 - DNA, 60 bp, Artificial
  Synthetic oligonucleotide
gacgaggtttgaaagttggagacccaaacccacagtacaacacatataatccgcatgtgc

SEQ ID NO: 929 - DNA, 60 bp, Artificial
  Synthetic oligonucleotide
gtgaatctgtccgcaaagagggtaaagtcgttaccaaaactataaaatcgttaggcagcg

SEQ ID NO: 930 - DNA, 60 bp, Artificial
  Synthetic oligonucleotide
ccgtgcttggtcgaagtttgggcaagggatagcgacagaggttgctatgtacacgcgaaa

SEQ ID NO: 931 - DNA, 60 bp, Artificial
  Synthetic oligonucleotide
gttggagttgcgttgtaaggagttgatgcagtgtgagcatgaaacagcgtaaaatgcgcc

SEQ ID NO: 932 - DNA, 60 bp, Artificial
  Synthetic oligonucleotide
agatggtaacgaaggtctacccagtaagccgggagccggagaaggaaccgggaatggtgg

SEQ ID NO: 933 - DNA, 60 bp, Artificial
  Synthetic oligonucleotide
cgggttccgggtccggccatggatatggagctgtaatgggacgtgtagccagtgggttaa

SEQ ID NO: 934 - DNA, 60 bp, Artificial
  Synthetic oligonucleotide
cccaacattccgcgccaacggtctgtcgggtacgtccgataaatgtaggttatcaaacgc

SEQ ID NO: 935 - DNA, 60 bp, Artificial
  Synthetic oligonucleotide
cgccacacggtccgtacgagacggagcacctgttttgatttgtccagcgtttgttgcaac

SEQ ID NO: 936 - DNA, 60 bp, Artificial
  Synthetic oligonucleotide
gctggccgcttggcaaaagaatcatggctgcagaggctccatgtcaagcccttaatagcg

SEQ ID NO: 937 - DNA, 60 bp, Artificial
  Synthetic oligonucleotide
gtccaatgtcgtgggccggttacgtagccttgcaatttgaactcgttgaaaaggtgtaat

SEQ ID NO: 938 - DNA, 60 bp, Artificial
  Synthetic oligonucleotide
cgccagaaggagcagcatctatcctatggaaggacgctaagtatgctccagaagctgctg

SEQ ID NO: 939 - DNA, 60 bp, Artificial
  Synthetic oligonucleotide
cagcagcttctggagcatacttagcgtccttccataggatagatgctgctccttctggcg

SEQ ID NO: 940 - DNA, 60 bp, Artificial
  Synthetic oligonucleotide
cgatgctgctcataaagaaggcaaatgggctggcatgtgtggtgagatggcgggagattc

SEQ ID NO: 941 - DNA, 60 bp, Artificial
  Synthetic oligonucleotide
gatttaagcgtaccggcaagccgtcctttgcgaattagtgattaccttggagtgtttgct

SEQ ID NO: 942 - DNA, 60 bp, Artificial
  Synthetic oligonucleotide
gggataacaaattggttcctggggatatggccgattgtggcatttagtattgctattccg

SEQ ID NO: 943 - DNA, 60 bp, Artificial
  Synthetic oligonucleotide
gggaatgagttagcatgaacgtaatggtatttgaaggctttctcggtagcggtaaaacgt

SEQ ID NO: 944 - DNA, 60 bp, Artificial
  Synthetic oligonucleotide
cgagtggatcagaagaaagtagaagcggttggagttcagttgcttatgtctgagcgtttg

SEQ ID NO: 945 - DNA, 60 bp, Artificial
  Synthetic oligonucleotide
ggggttcccggctgttttgatatctacactatcccttgcctagactgggttcaagtcact

SEQ ID NO: 946 - DNA, 60 bp, Artificial
  Synthetic oligonucleotide
cgaacaagagaaaccacctgacaaacttcctgttgctcctgagcccgtcgaatgttgggg

SEQ ID NO: 947 - DNA, 60 bp, Artificial
  Synthetic oligonucleotide
ccgtcaaagcttggggtgatggctattagttttagcatggacgtgggaagaatcttgcag

SEQ ID NO: 948 - DNA, 60 bp, Artificial
  Synthetic oligonucleotide
ggtgcgaggtgaatcattttcgcgcctgcgtcctggtgttgtcctttaccagcgatggcg

SEQ ID NO: 949 - DNA, 60 bp, Artificial
  Synthetic oligonucleotide
gcccgatctgtgcttggagaaaagcaggaaaggacgcggtgaaaatcgcaacgatgatgg

SEQ ID NO: 950 - DNA, 60 bp, Artificial
  Synthetic oligonucleotide
cgtgcttcgaggaatagtagctagctccacgagtgccttcaccgaatatttatgccttaa

SEQ ID NO: 951 - DNA, 60 bp, Artificial
  Synthetic oligonucleotide
cccgagaagttcacaggtcgtccgaagtttccgaattattctcgttccactgacaagcga

SEQ ID NO: 952 - DNA, 60 bp, Artificial
  Synthetic oligonucleotide
cgccccatttcacaatggtattacggtcggttgctgggcttcatcgggccaaatccctcc

SEQ ID NO: 953 - DNA, 60 bp, Artificial
  Synthetic oligonucleotide
ggagggatttggcccgatgaagcccagcaaccgaccgtaataccattgtgaaatggggcg

SEQ ID NO: 954 - DNA, 60 bp, Artificial
  Synthetic oligonucleotide
cgctcgcttcttttcttgcctcttcaatggagggcgctattatggcaagtcgtgtatcta

SEQ ID NO: 955 - DNA, 60 bp, Artificial
  Synthetic oligonucleotide
cgacttgccataatagcgccctccattgaagaggcaagaaaagaagcgagcgatctaatg

SEQ ID NO: 956 - DNA, 60 bp, Artificial
  Synthetic oligonucleotide
actgtcttccctttccttcgacaccttgttgctgcaaagctctatccattccgacacgcc

SEQ ID NO: 957 - DNA, 60 bp, Artificial
  Synthetic oligonucleotide
caagaaggctgctgttgcaactgctgaccaactaatagatatccaatcaattccatcatg

SEQ ID NO: 958 - DNA, 60 bp, Artificial
  Synthetic oligonucleotide
cgaggcgtgtcggaatggatagagctttgcagcaacaaggtgtcgaaggaaagggaagac

SEQ ID NO: 959 - DNA, 60 bp, Artificial
  Synthetic oligonucleotide
cccttctgcgcttaacgctcgatggcattcatccacgacaaagacaatatgttgccccag

SEQ ID NO: 960 - DNA, 60 bp, Artificial
  Synthetic oligonucleotide
tacgcgggatttcctacacgcatagcgctacagcaagacacagaaatacactaatagggg

SEQ ID NO: 961 - DNA, 60 bp, Artificial
  Synthetic oligonucleotide
tacgagggatttcctacacgcatagcgctacagctagacatagaaacacattaatagggg

SEQ ID NO: 962 - DNA, 60 bp, Artificial
  Synthetic oligonucleotide
gcgggatttcctacacgcatagcgctacagctagacacagaaacacactaataggaggac

SEQ ID NO: 963 - DNA, 60 bp, Artificial
  Synthetic oligonucleotide
gcccggagttattaggtggttttgttacaccgagagaaccagctgaaatcttgggtggag

SEQ ID NO: 964 - DNA, 60 bp, Artificial
  Synthetic oligonucleotide
gcccggagttattaggtggttttgttacaccgagagaaccagctgaaatcttgggcggag

SEQ ID NO: 965 - DNA, 60 bp, Artificial
  Synthetic oligonucleotide
gcgggtttgggcagcgcccgaaaagagtcactagggaaccagtgcccacttatgcaccta

SEQ ID NO: 966 - DNA, 60 bp, Artificial
  Synthetic oligonucleotide
caaggcggagtacctgcgttcagtggaagggcagggacgaaagtttactggaatcctgga

SEQ ID NO: 967 - DNA, 60 bp, Artificial
  Synthetic oligonucleotide
gtcgcttatggcggctcattacgaaggacttgaaaagcgtactggtgcgccttactacgg

SEQ ID NO: 968 - DNA, 60 bp, Artificial
  Synthetic oligonucleotide
cagtacctggctctcctggttggaaatatcgtgttgagggaccacatgttaagggaacag

SEQ ID NO: 969 - DNA, 60 bp, Artificial
  Synthetic oligonucleotide
gcgatatctatccccaagcatccttcaacagctcgcacaggagacgggtttcgtaaaacg

SEQ ID NO: 970 - DNA, 60 bp, Artificial
  Synthetic oligonucleotide
cgcacaggagacgggtttcgtaaaacgtaaaagtaagtatggcgcacgagatttggacgc

SEQ ID NO: 971 - DNA, 60 bp, Artificial
  Synthetic oligonucleotide
gcggccaaatctcgtgcgccatacttacttttacgttttacgaaacccgtctcctgtgcg

SEQ ID NO: 972 - DNA, 60 bp, Artificial
  Synthetic oligonucleotide
gtccctcagttgcaccacaaatggcagcaacaatagtcccaagctttaaagcatcgccag

SEQ ID NO: 973 - DNA, 60 bp, Artificial
  Synthetic oligonucleotide
gccgaaagcgcctctccgaatgtcatccccgtctcatcccggctttgaagaacggtttgc

SEQ ID NO: 974 - DNA, 60 bp, Artificial
  Synthetic oligonucleotide
cggcatcttcttccctctccagcacgattgcccctgccgcttccgacattgcaaaccctt

SEQ ID NO: 975 - DNA, 60 bp, Artificial
  Synthetic oligonucleotide
tcgcagcaatttgtcccgcctcttccctgtccaacgcctccaacagcgtcagtgcctcat

SEQ ID NO: 976 - DNA, 60 bp, Artificial
  Synthetic oligonucleotide
attgtccggcacgcctttcacatcatatgcccagcgccgtgcagctttgaccgccgtttc

SEQ ID NO: 977 - DNA, 60 bp, Artificial
  Synthetic oligonucleotide
taagcaaccggcccaatccgccttgcgcgtgcgattttgagatgtttcccgtgcctgcct

SEQ ID NO: 978 - DNA, 60 bp, Artificial
  Synthetic oligonucleotide
ggcacgaaaacgaccgtccgtttaaaatagccgaccccttccccgttgatgccgagccgt

SEQ ID NO: 979 - DNA, 60 bp, Artificial
  Synthetic oligonucleotide
gccacattttcccgagcccgaccgcttccataccgcgcttcactgtcagctgatcaacca

SEQ ID NO: 980 - DNA, 60 bp, Artificial
  Synthetic oligonucleotide
cgcggctgcagatatccctcccttccagacatccacaatgccacacccgcacaagcatga

SEQ ID NO: 981 - DNA, 60 bp, Artificial
  Synthetic oligonucleotide
gcgagcaacagcacaagccctattgcacccagccccattccgccccatcctcctttgaaa

SEQ ID NO: 982 - DNA, 60 bp, Artificial
  Synthetic oligonucleotide
gcacgatggccgcccattccatccgcaacaatcgcaaggagatcaccgccggcattttca

SEQ ID NO: 983 - DNA, 60 bp, Artificial
  Synthetic oligonucleotide
tgccccatgtcgagttcatgttcgtaaatgcgcccctcccttttccccgacacgtaggcg

SEQ ID NO: 984 - DNA, 60 bp, Artificial
  Synthetic oligonucleotide
cggccgttcaaatccgggtatggtgctgtttcggcttcgtcctcttcctcatccccgtct

SEQ ID NO: 985 - DNA, 60 bp, Artificial
  Synthetic oligonucleotide
cccctgcttccgcctgtgacgacaaccacctgctcatccagtttcatttgtcccacccct

SEQ ID NO: 986 - DNA, 60 bp, Artificial
  Synthetic oligonucleotide
gtggaattgcataggtagaaacctgtggtgaaaacaaagggatttaaaaccagctccaac

SEQ ID NO: 987 - DNA, 60 bp, Artificial
  Synthetic oligonucleotide
ggatgtaggttgttcgacttggattagtaattatacccgccgaaccgccagttctatcgt

SEQ ID NO: 988 - DNA, 60 bp, Artificial
  Synthetic oligonucleotide
gctgcggatacaccggcgctcgttactttaaacatgccagtaataacaccaacgatgcca

SEQ ID NO: 989 - DNA, 60 bp, Artificial
  Synthetic oligonucleotide
cggctcaaagaagccctttcacaattgaaacaagacgcaacttgcttctacaactcaacc

SEQ ID NO: 990 - DNA, 60 bp, Artificial
  Synthetic oligonucleotide
gggtggttatcgttagcattacggtgctagggagtacattcagtttgtcgtgtagggacg

SEQ ID NO: 991 - DNA, 60 bp, Artificial
  Synthetic oligonucleotide
gcggtcacttataaggtatccgtatgtatagaccctgttcactcagcgattttcaccgca

SEQ ID NO: 992 - DNA, 60 bp, Artificial
  Synthetic oligonucleotide
ggaggcggatgggctgttcatttcccgccaggggaaagggaaacgggcgaaagaagagaa

SEQ ID NO: 993 - DNA, 60 bp, Artificial
  Synthetic oligonucleotide
cccatacatgggtctgaaagcggcgttgttcggtcgcccgacagtcgatcaaatgctcgg

SEQ ID NO: 994 - DNA, 60 bp, Artificial
  Synthetic oligonucleotide
cgccctttgacgcgaatatacgtctcgtccccgcaaaacgaaccggacagctcatacggg

SEQ ID NO: 995 - DNA, 60 bp, Artificial
  Synthetic oligonucleotide
cggcctgccgggagtattttgggaagcgggcgtgctttcagctggatcgatttcatgtgg

SEQ ID NO: 996 - DNA, 60 bp, Artificial
  Synthetic oligonucleotide
gccgtttgtctttcagctgataccggcgcttgtcccgcgcttccgccagttgttgatcga

SEQ ID NO: 997 - DNA, 60 bp, Artificial
  Synthetic oligonucleotide
tgctcaactacgccaacagcgtcgcgctttggatcaagccctttgtcgaccggttcccgt

SEQ ID NO: 998 - DNA, 60 bp, Artificial
  Synthetic oligonucleotide
caacacttcttcgcccagcacgggatttcgtttgacgtccgccaggtgatcggcctaacc

SEQ ID NO: 999 - DNA, 60 bp, Artificial
  Synthetic oligonucleotide
aaccgtcctgccttccgtttggcctgttcgatccgcttggactttgttgaggccgagacg

SEQ ID NO: 1000 - DNA, 60 bp, Artificial
  Synthetic oligonucleotide
agcaggccgttggaacatcacgcggcccatgaaagggaaaggagggagcgacatggaaga

SEQ ID NO: 1001 - DNA, 60 bp, Artificial
  Synthetic oligonucleotide
tctcgtggagctgaacagcgcggtcggcacgttggaggacgaagcgaaagagaagcagat

SEQ ID NO: 1002 - DNA, 60 bp, Artificial
  Synthetic oligonucleotide
tcagctgatgccggcgcttgtcccgcgcttccgccagttgttgatcgatctcctccaaaa

SEQ ID NO: 1003 - DNA, 60 bp, Artificial
  Synthetic oligonucleotide
aggtgcggaagaagctggcgaaacaagacgaagaggggcttctggtggagctgaacagcg

SEQ ID NO: 1004 - DNA, 60 bp, Artificial
  Synthetic oligonucleotide
cggagatgatgggcgtggcaaagggcatggctcgcctgcgtatacatcgggtatacggaa

SEQ ID NO: 1005 - DNA, 60 bp, Artificial
  Synthetic oligonucleotide
gtaagaagagggagcctggcagcgagggcaggtcaacgaatccggaacaaggtgtttcgc

SEQ ID NO: 1006 - DNA, 60 bp, Artificial
  Synthetic oligonucleotide
tcttgttggagaaacgcttgtgccatggcgatcagcttcgtccaccggcccggcatatgc

SEQ ID NO: 1007 - DNA, 60 bp, Artificial
  Synthetic oligonucleotide
gctgggcttcatagggcctgtccctccgccagctcgggataagagtatccgctcaatgaa

SEQ ID NO: 1008 - DNA, 60 bp, Artificial
  Synthetic oligonucleotide
cttccatctcgcgaaggcttgctttctatgttgcttagcgtacttcaagctccagttcgc

SEQ ID NO: 1009 - DNA, 60 bp, Artificial
  Synthetic oligonucleotide
gcgggccaaacaccattcgatatcttgcggctggccgaaatgagcttcgatctgtcttcc

SEQ ID NO: 1010 - DNA, 60 bp, Artificial
  Synthetic oligonucleotide
cggcgcactgagcggaatgttttggattctggctttcgggatgatcgttccttggcggat

SEQ ID NO: 1011 - DNA, 60 bp, Artificial
  Synthetic oligonucleotide
gcccactcatagtcggacatttacggtgcccggtagaaacttgcgtgccatatccacgcg

SEQ ID NO: 1012 - DNA, 60 bp, Artificial
  Synthetic oligonucleotide
ggttgagttgtagaagcaagttgcgtcttgtttcatttgtgaaagggcttctttgagccg

SEQ ID NO: 1013 - DNA, 60 bp, Artificial
  Synthetic oligonucleotide
cggctcaaagaagccctttcataaatgaaacaagacgcaacttgcttctacaactcaacc

SEQ ID NO: 1014 - DNA, 60 bp, Artificial
  Synthetic oligonucleotide
cggctcaaagaagccctttcacaaatgaaacaagacgcaacttgcttctacaactcaacc

SEQ ID NO: 1015 - DNA, 60 bp, Artificial
  Synthetic oligonucleotide
cggctcaaagaagccctttgacaaatgaaacaagacgcaacttgcttctacaactcaacc

SEQ ID NO: 1016 - DNA, 60 bp, Artificial
  Synthetic oligonucleotide
gccacctggtagaaaactggttggcattggtaacaagaaagatgcaagagtcatgatcag

SEQ ID NO: 1017 - DNA, 60 bp, Artificial
  Synthetic oligonucleotide
ctgcctctttacttgtcgcttgaatatccatggggcctcctgcgtgaataatcacatccg

SEQ ID NO: 1018 - DNA, 60 bp, Artificial
  Synthetic oligonucleotide
gattattcacgcaggaggccccatggatattcaagcgacaagtaaagaggcagcttccgt

SEQ ID NO: 1019 - DNA, 60 bp, Artificial
  Synthetic oligonucleotide
ggtcaacctgtatggatcttggatcttccaggtttgggacgttctccttttaaacgagag

SEQ ID NO: 1020 - DNA, 60 bp, Artificial
  Synthetic oligonucleotide
gtagaggtcgctggttcgagcccagtcggaatcatcgtttaaacccttgcctagcaaggg

SEQ ID NO: 1021 - DNA, 60 bp, Artificial
  Synthetic oligonucleotide
gcaagctggtgccgacggagcaatgatgagtggtagcgggccaacagtattcggtctggt

SEQ ID NO: 1022 - DNA, 60 bp, Artificial
  Synthetic oligonucleotide
gcaaggtggattgtcggtgctcgcgcagttgggacggcagaacgactattgcaaatggcg

SEQ ID NO: 1023 - DNA, 60 bp, Artificial
  Synthetic oligonucleotide
cactgcggcggccattcttgtaaacgtacctaatcctcctctggccttcccacctgctgc

SEQ ID NO: 1024 - DNA, 60 bp, Artificial
  Synthetic oligonucleotide
ccagccccatctcatctgcaagaacaccgccgaatcccatgtctgctaccgctctcatcc

SEQ ID NO: 1025 - DNA, 60 bp, Artificial
  Synthetic oligonucleotide
cctgttggatacccgctcgccatccccatcatccatccgaaactacctgctcccggtaca

SEQ ID NO: 1026 - DNA, 60 bp, Artificial
  Synthetic oligonucleotide
gggtggaaagtgggcgttgcctggaggctttgtggacgcaaaacagcaagagacagccca

SEQ ID NO: 1027 - DNA, 60 bp, Artificial
  Synthetic oligonucleotide
ctgcatctccgtctcctccagcagtttctccaccgccttcgccttcttcagattgctcgg

SEQ ID NO: 1028 - DNA, 60 bp, Artificial
  Synthetic oligonucleotide
ggtccgtcgtcatgccgcctcctccagcaccaactacaattccaccttcaagcgcaacaa

SEQ ID NO: 1029 - DNA, 60 bp, Artificial
  Synthetic oligonucleotide
ggtcatgtgacgagtccatcagggttctatgctggcggggtgcattgtgggctacgacga

SEQ ID NO: 1030 - DNA, 60 bp, Artificial
  Synthetic oligonucleotide
ccagcgcagtcggaaccgcctttgcatctcccgcacgtgtaaatccactaagccccaatg

SEQ ID NO: 1031 - DNA, 60 bp, Artificial
  Synthetic oligonucleotide
gaatgtgccccggcaattcgccctgccttatcgccaaatccgcctaccattccgcctgtt

SEQ ID NO: 1032 - DNA, 60 bp, Artificial
  Synthetic oligonucleotide
cgcggaagggaaatgagccctagtgaagcgtatggaaaggggaatctgccgaagcgagtg

SEQ ID NO: 1033 - DNA, 60 bp, Artificial
  Synthetic oligonucleotide
gttctgatgatttcgttttactactgtacgaggtgaaaacctaaggtgtgcgcatgaatt

SEQ ID NO: 1034 - DNA, 60 bp, Artificial
  Synthetic oligonucleotide
gcaggaagaatggttggaaatgtggcgagaagtaacagatatgccagagattacgcaagt

SEQ ID NO: 1035 - DNA, 60 bp, Artificial
  Synthetic oligonucleotide
cggtgctgcttgggataacccacctaaaagagaagagcttcgttgctccatcgaactatc

SEQ ID NO: 1036 - DNA, 60 bp, Artificial
  Synthetic oligonucleotide
ccattgcggtagctgatatcctggagggcctatatgtgaaacgaaagaactaacggctct

SEQ ID NO: 1037 - DNA, 60 bp, Artificial
  Synthetic oligonucleotide
gtcagtaatgcagctcctcctattcctgtcattccaactagcacccctacaaccatcccc

SEQ ID NO: 1038 - DNA, 60 bp, Artificial
  Synthetic oligonucleotide
gcgcatcccacactttcaacaagattttcctctcattttattttggagccatagaagcgg

SEQ ID NO: 1039 - DNA, 60 bp, Artificial
  Synthetic oligonucleotide
cgccgattccgccgcccaatatcgccacctctgtcttaagaaccatccagtccaccacct

SEQ ID NO: 1040 - DNA, 60 bp, Artificial
  Synthetic oligonucleotide
ccagcaagagtcattccgccccagacaagcataccgacgatccagaacccaccaagagcc

SEQ ID NO: 1041 - DNA, 60 bp, Artificial
  Synthetic oligonucleotide
agccgctacccgcagcctgtatgccattttcctccgcctccccgccagctctattataca

SEQ ID NO: 1042 - DNA, 60 bp, Artificial
  Synthetic oligonucleotide
gccagcgccaactccaaatccaaacccggaaccagcaccaaatccaggaccgtcagtggt

SEQ ID NO: 1043 - DNA, 60 bp, Artificial
  Synthetic oligonucleotide
cgctaacgcatcaaaatcgataggggtctgcgacgcttgtcggcttcgccgaaccatgct

SEQ ID NO: 1044 - DNA, 60 bp, Artificial
  Synthetic oligonucleotide
cggatgctgaagacggagatctgatccgtattgaagaagatgaggacgaggtggcgaatg

SEQ ID NO: 1045 - DNA, 60 bp, Artificial
  Synthetic oligonucleotide
ggtgagatcgtcgcttgtggcggctcattatgaaggacttgaaaagcgtaccggtgcacc

SEQ ID NO: 1046 - DNA, 60 bp, Artificial
  Synthetic oligonucleotide
gggcgcatcagattgtatgtttcctagtaataggtttccggtgcgtagcgtgttaaaagg

SEQ ID NO: 1047 - DNA, 60 bp, Artificial
  Synthetic oligonucleotide
ccggacgatccacccgcagcaggtacaatttcagacatatgtcacacctcctatatcccc

SEQ ID NO: 1048 - DNA, 60 bp, Artificial
  Synthetic oligonucleotide
cgatgaaaagacctggagggaatcccgtgtcacgttacccgcccagacacctatcacaca

SEQ ID NO: 1049 - DNA, 60 bp, Artificial
  Synthetic oligonucleotide
gatagggtcaacctttgcatcgtaaggcgtagcaatgttcccatatgaaagtgtattcac

SEQ ID NO: 1050 - DNA, 60 bp, Artificial
  Synthetic oligonucleotide
aaggtgtcggtcctgccggtaccacctctgtatggtctatggagtatgacaaaggcgggg

SEQ ID NO: 1051 - DNA, 60 bp, Artificial
  Synthetic oligonucleotide
catctaaagccattggctaccacgctccggtatgcgaccccggtttcggtgcatcgtttg

SEQ ID NO: 1052 - DNA, 60 bp, Artificial
  Synthetic oligonucleotide
ggaaaactggaaggtgtatggacgttacccgaactactggaagcggaacgaaatgggtgt

SEQ ID NO: 1053 - DNA, 60 bp, Artificial
  Synthetic oligonucleotide
ctggaaacgtcgtgctgtaggtggaggtgtcatgtggtgtcgggtagacgtgccggaaga

SEQ ID NO: 1054 - DNA, 60 bp, Artificial
  Synthetic oligonucleotide
ggaagacgacgaggaggaagaggaacccaagccggaaccaataccgcagaatccagtggg

SEQ ID NO: 1055 - DNA, 60 bp, Artificial
  Synthetic oligonucleotide
aagaagaatgtaacagggtgtaaagcgtacggtgtgccttttgggaactacgcattctgc

SEQ ID NO: 1056 - DNA, 60 bp, Artificial
  Synthetic oligonucleotide
ggtgacagtgcatccttttcgattgtccctgcatttgatttcagcgttgcaaccgcttga

SEQ ID NO: 1057 - DNA, 60 bp, Artificial
  Synthetic oligonucleotide
ccgacaaaatagcggttggtataggtaggtctggtagtacagatttaaacagaagcgctg

SEQ ID NO: 1058 - DNA, 60 bp, Artificial
  Synthetic oligonucleotide
gatagagggtggctcggttatagctgggaagacctttggaacgatgtaaaggggtggttt

SEQ ID NO: 1059 - DNA, 60 bp, Artificial
  Synthetic oligonucleotide
cagggaacgcttccggcataggtggaatggtaaacgtttctaacatcggtgtaatcttca

SEQ ID NO: 1060 - DNA, 60 bp, Artificial
  Synthetic oligonucleotide
ggcgggaatctctgccggacgttgtgtacaagcccatacagtcgcttctttactacgtcc

SEQ ID NO: 1061 - DNA, 60 bp, Artificial
  Synthetic oligonucleotide
cccttacctccaggaatcactggcatgagccctcttcgcatactcatcacaagcaaacct

SEQ ID NO: 1062 - DNA, 60 bp, Artificial
  Synthetic oligonucleotide
ggctatcattccagggctgacggcaaagtctatggaaggggcgacagcctactcgtaccc

SEQ ID NO: 1063 - DNA, 60 bp, Artificial
  Synthetic oligonucleotide
gggtacgagtaggctgtcgccccttccatagactttgccgtcagccctggaatgatagcc

SEQ ID NO: 1064 - DNA, 60 bp, Artificial
  Synthetic oligonucleotide
gtggtcatctctacgatcatctcttcgatcgtgacatctgttgaaatcacaacctccacc

SEQ ID NO: 1065 - DNA, 60 bp, Artificial
  Synthetic oligonucleotide
ccttgaacccggaacctttgaaattcaacgactatgggatgacgatctggataaacaagt

SEQ ID NO: 1066 - DNA, 60 bp, Artificial
  Synthetic oligonucleotide
ccctgaaagcatagtagaaggagctgcacgagaagtcaaagaagaaaccggactaactgt

SEQ ID NO: 1067 - DNA, 60 bp, Artificial
  Synthetic oligonucleotide
gtctcctgggtttcacggatcatagtcattaggttttgatcacgctcatccattctttga

SEQ ID NO: 1068 - DNA, 60 bp, Artificial
  Synthetic oligonucleotide
gcaatggttctcgacttggacaagcaagtatacgagccgaaccgcttagatcaatcgttt

SEQ ID NO: 1069 - DNA, 60 bp, Artificial
  Synthetic oligonucleotide
gctgttgcagaatctggaatgacaactgaagatggtcgcatttgtagttcacgtacttgg

SEQ ID NO: 1070 - DNA, 60 bp, Artificial
  Synthetic oligonucleotide
ggtcattaatccgtgcctgcctgtcaatagtcaaccctcggaaggtgacatctctattct

SEQ ID NO: 1071 - DNA, 60 bp, Artificial
  Synthetic oligonucleotide
gactatgagcagccacgtaaagcgatggtattcacaggttgggagaaaggccctgtcgag

SEQ ID NO: 1072 - DNA, 60 bp, Artificial
  Synthetic oligonucleotide
ttgcaatcactgaaggtgcggtgaagggactgtcctttaattcgagggtacgctgagggg

SEQ ID NO: 1073 - DNA, 60 bp, Artificial
  Synthetic oligonucleotide
gagctcttctgttttgcggcccgtttctaactggtcggacgatgaacgatggagatcacg

SEQ ID NO: 1074 - DNA, 60 bp, Artificial
  Synthetic oligonucleotide
ggggttgttctccccatttcggcatattaaagcgtgtttcacgattccttgtgggtccga

SEQ ID NO: 1075 - DNA, 60 bp, Artificial
  Synthetic oligonucleotide
ggtgtaagcacgcgtgatgacttcgttcccttttcggtctgccacctgaaggagatacag

SEQ ID NO: 1076 - DNA, 60 bp, Artificial
  Synthetic oligonucleotide
ctccgtgcccgagagttatgagggtagaggtcttcacataagtttgcatggcagctgcga

SEQ ID NO: 1077 - DNA, 60 bp, Artificial
  Synthetic oligonucleotide
atcataaagctactctaatgcgtcccgcatcttgcccggagtaaagaacctgcctacccc

SEQ ID NO: 1078 - DNA, 60 bp, Artificial
  Synthetic oligonucleotide
gcactcgtatatggagcagtagtcgcaacaggctatacggtcttatcccatggtacgagc

SEQ ID NO: 1079 - DNA, 60 bp, Artificial
  Synthetic oligonucleotide
gcatgcgatgccggggcgactgcgtatacaatgtgacagttggaagcaccgtatcattgc

SEQ ID NO: 1080 - DNA, 60 bp, Artificial
  Synthetic oligonucleotide
ggcatgagtggctgtcatagtatttagcgtaggtggggctgatacgagggaacagggcat

SEQ ID NO: 1081 - DNA, 60 bp, Artificial
  Synthetic oligonucleotide
caagccacaacagccaggcccatacgactgtagacgatggatgtatttgactggaatgca

SEQ ID NO: 1082 - DNA, 60 bp, Artificial
  Synthetic oligonucleotide
cttgcccgtatcatctccgtagaagatccgattatggctgttacagaacaacatgaggag

SEQ ID NO: 1083 - DNA, 60 bp, Artificial
  Synthetic oligonucleotide
cagccaaggtcgagcactggacgttcatacgattattgcgatgcagcgtcccgacgccga

SEQ ID NO: 1084 - DNA, 60 bp, Artificial
  Synthetic oligonucleotide
cggggttgactcctctgtcgttgcggtcttgatccataaagcgatcggcgaccagctgac

SEQ ID NO: 1085 - DNA, 60 bp, Artificial
  Synthetic oligonucleotide
gtgtggctgaagtttgcccgccacctactcatttagatatccgtgcatgggtccctgaac

SEQ ID NO: 1086 - DNA, 60 bp, Artificial
  Synthetic oligonucleotide
ggtgtggctgaagtttgcccgccacctactcatttagaatatccgtgcatgggtccctga

SEQ ID NO: 1087 - DNA, 60 bp, Artificial
  Synthetic oligonucleotide
ggcgcgtgaactgatggcaaacgaaatggaatgagtgagaagagcgtacggtcggcgagg

SEQ ID NO: 1088 - DNA, 60 bp, Artificial
  Synthetic oligonucleotide
cgcgccgtcgtgtcctttgagagtccactccgtcaccttaccttctgtctgcacttcact

SEQ ID NO: 1089 - DNA, 60 bp, Artificial
  Synthetic oligonucleotide
ggtgaagtgcagacagaaggtaaggtgacggagtggactctcaaaggacacgacggcgcg

SEQ ID NO: 1090 - DNA, 60 bp, Artificial
  Synthetic oligonucleotide
gccctacctctctttcatccttacggctccttgtccgtgccagtgtgaatcaggattgca

SEQ ID NO: 1091 - DNA, 60 bp, Artificial
  Synthetic oligonucleotide
cctgactcacactggcacggacaaggagccgtaaggatgaaagagaggtagggctttcat

SEQ ID NO: 1092 - DNA, 60 bp, Artificial
  Synthetic oligonucleotide
gcaatcctgattcacactggcacggacaaggagccgtaaggatgaaagagaggtagggct

SEQ ID NO: 1093 - DNA, 60 bp, Artificial
  Synthetic oligonucleotide
gccctacctctctttcatccttacggctccttgtccgtgccagtgtgaatcaggattgta

SEQ ID NO: 1094 - DNA, 60 bp, Artificial
  Synthetic oligonucleotide
gcgggttagctccaattggaacaagactatgaatctcaactttctctccgccaatttgct

SEQ ID NO: 1095 - DNA, 60 bp, Artificial
  Synthetic oligonucleotide
gcaaattggcggagagaaagttgagattcatagtcttgttccaattggagctaacccgca

SEQ ID NO: 1096 - DNA, 60 bp, Artificial
  Synthetic oligonucleotide
ggcaaatggtgcgccaccagcgttagaaactggttctagtgggttcgattcccaccccga

SEQ ID NO: 1097 - DNA, 60 bp, Artificial
  Synthetic oligonucleotide
gtccgatttgtgcttggagaaaagcagggaaggacgcggtgaaaatcgcaacaatgatgg

SEQ ID NO: 1098 - DNA, 60 bp, Artificial
  Synthetic oligonucleotide
gggaaaatcgcttccctgaagtagagcatgagaaacccaataggcacagtctatttcacc

SEQ ID NO: 1099 - DNA, 60 bp, Artificial
  Synthetic oligonucleotide
ggcccctcataagtatatggagctgctttctgcaagtacttttgaatacttccgactccc

SEQ ID NO: 1100 - DNA, 60 bp, Artificial
  Synthetic oligonucleotide
gttcaccagccataacgttatcaagaccatgagcacgcgcgataccgtcaccaacttgga

SEQ ID NO: 1101 - DNA, 60 bp, Artificial
  Synthetic oligonucleotide
ccgccgaccgaaccgtttgcacgggaagtcgtatcagcgccaaggttgacaccaaactct

SEQ ID NO: 1102 - DNA, 60 bp, Artificial
  Synthetic oligonucleotide
ggtttgctggtttgtgggtccgtgtggaattgtcctgtgtgtgcagccaaaatcagcgag

SEQ ID NO: 1103 - DNA, 60 bp, Artificial
  Synthetic oligonucleotide
cgagggagcccctcaagaagtgaggggttggggagttcgattaaatggggtctggggaag

SEQ ID NO: 1104 - DNA, 60 bp, Artificial
  Synthetic oligonucleotide
cgttgggaagtattctttggggatgaaacagagacttagaatagcccaagcaattatgga

SEQ ID NO: 1105 - DNA, 60 bp, Artificial
  Synthetic oligonucleotide
caaacgaatttaacatacaaacggagcgaagccagggagggcatcgcagatactcgaagg

SEQ ID NO: 1106 - DNA, 60 bp, Artificial
  Synthetic oligonucleotide
cgggattaagttgttcgacttggatcagcaattatacccgccgaaccgctagttctatcg

SEQ ID NO: 1107 - DNA, 60 bp, Artificial
  Synthetic oligonucleotide
gaactcggatggactattgaagcatatcgtgagaattggcttcaagaaggagctatatgg

SEQ ID NO: 1108 - DNA, 60 bp, Artificial
  Synthetic oligonucleotide
ttttgatagattttaaatatggggtaccgtcaggaaaatgcggatctacaacgttaagct

SEQ ID NO: 1109 - DNA, 60 bp, Artificial
  Synthetic oligonucleotide
ggttctggtacacttgatagaggtacaagagcttcattctctaatagtggaactgctggt

SEQ ID NO: 1110 - DNA, 60 bp, Artificial
  Synthetic oligonucleotide
gcctttgttgccggcctcggcctaaaaggcccaccgaattggtttcccttctgcaccaca

SEQ ID NO: 1111 - DNA, 60 bp, Artificial
  Synthetic oligonucleotide
gctggtacgagccagatcaggtccaaagggttaagaagttcacgcgcttctctctcagcc

SEQ ID NO: 1112 - DNA, 60 bp, Artificial
  Synthetic oligonucleotide
gcagccaaaaggcgtggaaacaatttatgttgattctggagcagatgctgcggattaccg

SEQ ID NO: 1113 - DNA, 60 bp, Artificial
  Synthetic oligonucleotide
cgcctagagtaccatttatatggacaactcatcggcattctcctctgttcttctacgatg

SEQ ID NO: 1114 - DNA, 60 bp, Artificial
  Synthetic oligonucleotide
ctccgcgaagtgccgttcggttctgacggcgtatttacaccggaaggatttgtcgagcgg

SEQ ID NO: 1115 - DNA, 60 bp, Artificial
  Synthetic oligonucleotide
gagcaaccggattgtaagtaccgatttcctcaatgaaacgtccgtcacgaggagaacgag

SEQ ID NO: 1116 - DNA, 60 bp, Artificial
  Synthetic oligonucleotide
cttcatagccgtattcgccttcaaggtaggcaatggtcggcagcacgcggcgctggtctt

SEQ ID NO: 1117 - DNA, 60 bp, Artificial
  Synthetic oligonucleotide
cccggaaacactttacatgacaaaggcgtacagataaaaggaactaacgattttggccgt

SEQ ID NO: 1118 - DNA, 60 bp, Artificial
  Synthetic oligonucleotide
ccggaccgaacccgaaagggtgcgggaggataaggagttgacacacttactatgcgaccc

SEQ ID NO: 1119 - DNA, 60 bp, Artificial
  Synthetic oligonucleotide
gcgtagaagactttgaagagctcaaaactaaggcgaaggcatcagaagcctttaaacgtg

SEQ ID NO: 1120 - DNA, 60 bp, Artificial
  Synthetic oligonucleotide
cagcggtgcatttggatgagaaaacacctcatatgcacgttggcatggttccagtaacgg

SEQ ID NO: 1121 - DNA, 60 bp, Artificial
  Synthetic oligonucleotide
gccgccatttgttctcgatctcaacagaagccctcagggacagaacgataccggacacgg

SEQ ID NO: 1122 - DNA, 60 bp, Artificial
  Synthetic oligonucleotide
ggccgcattcttgttcgtccatctggaacagagccgcttgtacgtgtcatggcagaggcg

SEQ ID NO: 1123 - DNA, 60 bp, Artificial
  Synthetic oligonucleotide
gccctacctctcttccatccttacggctccttgtccgtgccagtgtgaatcaggatacta

SEQ ID NO: 1124 - DNA, 60 bp, Artificial
  Synthetic oligonucleotide
ccgctagccacacccaatgcccatccggatccaccaacatcaccgggttgttgttcgcat

SEQ ID NO: 1125 - DNA, 60 bp, Artificial
  Synthetic oligonucleotide
gaagagggaagtgagtaggagtcgcggatatgacatggaacgttgaaaagcaaacacctg

SEQ ID NO: 1126 - DNA, 60 bp, Artificial
  Synthetic oligonucleotide
cctaaaccgccgcttcccgcaaataaatcaagcgcccatccgccatcaaaatacgggccg

SEQ ID NO: 1127 - DNA, 60 bp, Artificial
  Synthetic oligonucleotide
ggcatgttaggaggctctgtgtgagtctcttctctctttagacgtgtagcgttagcggga

SEQ ID NO: 1128 - DNA, 60 bp, Artificial
  Synthetic oligonucleotide
gcgggcaagcaccccgagccctttaatatggtcgctatgttcatgggtgacaagcagcgc

SEQ ID NO: 1129 - DNA, 60 bp, Artificial
  Synthetic oligonucleotide
gaaaggcaagaaacaacggtctttgctgacagcggaacacttcgaggtagcagggctgac

SEQ ID NO: 1130 - DNA, 60 bp, Artificial
  Synthetic oligonucleotide
gataccgccgcggtgagattgaccgtctctcgtataagcgattgaaccatccccgccgtg

SEQ ID NO: 1131 - DNA, 60 bp, Artificial
  Synthetic oligonucleotide
gagacggacgaacctcatggcggagcattacgaagcgttagagagtaagattggggcacc

SEQ ID NO: 1132 - DNA, 60 bp, Artificial
  Synthetic oligonucleotide
gggtgcaaatattgtccgcgatttattcgcttctgttcgtgatgttgtcggtggtcgtgc

SEQ ID NO: 1133 - DNA, 60 bp, Artificial
  Synthetic oligonucleotide
agcacgaccaccgacaacatcacgaacagaagcgaataaatcgcgtacaatgttggcccc

SEQ ID NO: 1134 - DNA, 60 bp, Artificial
  Synthetic oligonucleotide
gcacgaccaccgacaacatcacgaacagaagcgaataaatcgcggacaatatttgcaccc

SEQ ID NO: 1135 - DNA, 60 bp, Artificial
  Synthetic oligonucleotide
ctgcagcacatgacatacgaagaacgtattgcggatgtagaaggctttgtcgaacaagct

SEQ ID NO: 1136 - DNA, 60 bp, Artificial
  Synthetic oligonucleotide
gacaaagccttctacgtcagcaatacgttcttcgtatgtcatgtgctgcagaatatcttc

SEQ ID NO: 1137 - DNA, 60 bp, Artificial
  Synthetic oligonucleotide
ccaagtgtaccgacagttgcaaaaggcaggagatttcgcaggagtggaatctatcggtac

SEQ ID NO: 1138 - DNA, 60 bp, Artificial
  Synthetic oligonucleotide
gctggtacgagccagatcaggtccaaagggttaagaagttcacacgcttctctctcagcc

SEQ ID NO: 1139 - DNA, 60 bp, Artificial
  Synthetic oligonucleotide
cttcgacctggctccgactgacttgggagaaaactgccgccgcgatatcgtgcttgagct

SEQ ID NO: 1140 - DNA, 60 bp, Artificial
  Synthetic oligonucleotide
ctctcggctcgcagctcaagctcgatccatccctgtcgaatccgtaacgtccccttggta

SEQ ID NO: 1141 - DNA, 60 bp, Artificial
  Synthetic oligonucleotide
gttgcagagttggttaggatgacaggggtaagtcgtaactctatcaataagttgtggcgt

SEQ ID NO: 1142 - DNA, 60 bp, Artificial
  Synthetic oligonucleotide
cgcgcgcaaacacggcctgcacgcaacattcatgccaaaaccgttgttcggcgtaaacgg

SEQ ID NO: 1143 - DNA, 60 bp, Artificial
  Synthetic oligonucleotide
catcgtagaagaacagaggagaatgccgatgagttgtccatataaatggtactctaggcg

SEQ ID NO: 1144 - DNA, 60 bp, Artificial
  Synthetic oligonucleotide
cgcctagagtaccatttatatggacaactcatcggcattctcctctgttcttctacggtg

SEQ ID NO: 1145 - DNA, 60 bp, Artificial
  Synthetic oligonucleotide
ggatccgtgtcccgctgacaatacaaaacggtcacgattaaaccaattcgggttgcttgg

SEQ ID NO: 1146 - DNA, 60 bp, Artificial
  Synthetic oligonucleotide
gctgcagctgtctcattgccatcagccgggcgaattgtagagataccaggcattgcacgt

SEQ ID NO: 1147 - DNA, 60 bp, Artificial
  Synthetic oligonucleotide
gccgtcctggacgtattgcaccgatacagcgccaagtataccggcgttagttttctgcgc

SEQ ID NO: 1148 - DNA, 60 bp, Artificial
  Synthetic oligonucleotide
gccacctataaccgttcgtcgtgacccacccacgacaaacacttgctcgagaccctcggt

SEQ ID NO: 1149 - DNA, 60 bp, Artificial
  Synthetic oligonucleotide
ccccacctctaagcgaagcgtaggtggcgggtagttcacgtaaaaggttggtgaattagg

SEQ ID NO: 1150 - DNA, 60 bp, Artificial
  Synthetic oligonucleotide
cccatgcgattagcagaggattgagtgttcatgaagtagcgaatcaggcggggcattcca

SEQ ID NO: 1151 - DNA, 60 bp, Artificial
  Synthetic oligonucleotide
ggccggcatcagaacgcgctgtttaaaattaccatacgctggatagatatcctcggctcc

SEQ ID NO: 1152 - DNA, 60 bp, Artificial
  Synthetic oligonucleotide
ccgccgtttgctgcaactaaaccgattgctttagctgtatcgtgagagctacctccaccg

SEQ ID NO: 1153 - DNA, 60 bp, Artificial
  Synthetic oligonucleotide
ggtgcgatagcgctagtgaaagtgggagatgagtttcggttagacgtagcctaaaggcgt

SEQ ID NO: 1154 - DNA, 60 bp, Artificial
  Synthetic oligonucleotide
cctcttcgaacgaccgcacgaatagcagcgttcattcctggtgcatccccgccgctagtt

SEQ ID NO: 1155 - DNA, 60 bp, Artificial
  Synthetic oligonucleotide
cccgcacacattcctgcccatagagcgatgtctcctgcattgcggcccattacttcaacg

SEQ ID NO: 1156 - DNA, 60 bp, Artificial
  Synthetic oligonucleotide
gatccctctttgagggaaccgtttattgcatgatcgtctgctgttgtatcatcggaggtc

SEQ ID NO: 1157 - DNA, 60 bp, Artificial
  Synthetic oligonucleotide
ccccaaacacttcagtgcggttgcagcaattactccttctggagcaccgccagttcctac

SEQ ID NO: 1158 - DNA, 60 bp, Artificial
  Synthetic oligonucleotide
gctgcagtgcttaagccagcaacattctcacctaaaagctcagcaatgtgtgcgaagcgc

SEQ ID NO: 1159 - DNA, 60 bp, Artificial
  Synthetic oligonucleotide
cggcactgttgaaggacttccgagtgcagggtagttctttgatctacaagagtggcaact

SEQ ID NO: 1160 - DNA, 60 bp, Artificial
  Synthetic oligonucleotide
ggtgttcatgctgaagaggctaagagtccatctcgagtttcaaatgttgacccagctgaa

SEQ ID NO: 1161 - DNA, 60 bp, Artificial
  Synthetic oligonucleotide
gctgtggctgttgcgccggtttatggtttagcgacgcaagataacagcgtttctgttgct

SEQ ID NO: 1162 - DNA, 60 bp, Artificial
  Synthetic oligonucleotide
ccgacatgcgcaacatgcgaagaattcgctcctactcttaatgctacaatccaagacacg

SEQ ID NO: 1163 - DNA, 60 bp, Artificial
  Synthetic oligonucleotide
cagcaggaactctatgcataccatgccttggtacaattggggcagctagtggtggagtaa

SEQ ID NO: 1164 - DNA, 60 bp, Artificial
  Synthetic oligonucleotide
ccaccatatccgattaaccgccgagccgacagcgcatcgtccagatagtagaccgtgtcc

SEQ ID NO: 1165 - DNA, 60 bp, Artificial
  Synthetic oligonucleotide
gcggaggacggcgatctggtcaagattgaggaagaagatgacgaggttgcaaatggtgca

SEQ ID NO: 1166 - DNA, 60 bp, Artificial
  Synthetic oligonucleotide
gcggaggacggcgatctggtcaagattgaggaagaagatgacgaggttgcaaatggagcg

SEQ ID NO: 1167 - DNA, 60 bp, Artificial
  Synthetic oligonucleotide
gcggaggacggcgatctggtcaagattgaggaagaagatgacgaagttgcaaatggtgca

SEQ ID NO: 1168 - DNA, 60 bp, Artificial
  Synthetic oligonucleotide
gctcgaatcgcaaacccgtcgtatggagagcgatcaaaatgcgggacatcatgatctgca

SEQ ID NO: 1169 - DNA, 60 bp, Artificial
  Synthetic oligonucleotide
cacgttcgagcaggacttccgcccgtttgacagccgcatctttcgagagaccaagcacgt

SEQ ID NO: 1170 - DNA, 60 bp, Artificial
  Synthetic oligonucleotide
gattccttcctccgccaattcttcccgcaaggccgcgtcatcagccaacttcccgattcg

SEQ ID NO: 1171 - DNA, 60 bp, Artificial
  Synthetic oligonucleotide
gtgatgaaccgcccgtgtgtcaattccgcctcttccccgtcctcgcctttgattttcggg

SEQ ID NO: 1172 - DNA, 60 bp, Artificial
  Synthetic oligonucleotide
gccgcgacatctccgtcaccaatcaaacgaatccgggcccctgttgcgcgaatacgttga

SEQ ID NO: 1173 - DNA, 60 bp, Artificial
  Synthetic oligonucleotide
gcccttctccttcacaccaatccccgacaaacgccatcgtctcctttggtccgtcctgca

SEQ ID NO: 1174 - DNA, 60 bp, Artificial
  Synthetic oligonucleotide
cacctcctccgccaacaacagtcacctataccgtcaaagccggggacacgctctactcca

SEQ ID NO: 1175 - DNA, 60 bp, Artificial
  Synthetic oligonucleotide
cgtcgaagggcaggtcgtcgttgagtcgctttcctgtccaccgtttgttccgctcgttga

SEQ ID NO: 1176 - DNA, 60 bp, Artificial
  Synthetic oligonucleotide
gcgagcgttgccgtcgtaatcaatcctaccgcccctgtcttgatgccggttgcctgtttg

SEQ ID NO: 1177 - DNA, 60 bp, Artificial
  Synthetic oligonucleotide
cgtccggcctgttgtcccgcctgaaaacctgcttcgtacccttgttgtctcgcttcttcc

SEQ ID NO: 1178 - DNA, 60 bp, Artificial
  Synthetic oligonucleotide
gttcctccgacgctctgattgcctactcgcactgtaaccgccatctgaccgcctggaaac

SEQ ID NO: 1179 - DNA, 60 bp, Artificial
  Synthetic oligonucleotide
gcgggtataaacgtggacttgaaaagcaagtatcatttgaccgagcaattacgcaacaag

SEQ ID NO: 1180 - DNA, 60 bp, Artificial
  Synthetic oligonucleotide
aattaggtagaggtagctgcatagcgtgtgtcaacggtaccggaccgaacccgtaagggg

SEQ ID NO: 1181 - DNA, 60 bp, Artificial
  Synthetic oligonucleotide
ctactagcaaatggttgttttgtcattagccaacgtaattcaggcatattatcacgatac

SEQ ID NO: 1182 - DNA, 65 bp, Artificial
  Synthetic oligonucleotide
ccgttttcttcaaggactttaattgctctgtaaatcgtcattcttgattttccgaaataatcttc

SEQ ID NO: 1183 - DNA, 60 bp, Artificial
  Synthetic oligonucleotide
gcttggcgatagccaaaacagcctcgtagagccttttcattgtgtacatgaagcgtagcg

SEQ ID NO: 1184 - DNA, 60 bp, Artificial
  Synthetic oligonucleotide
gagagcattttaaagcatttagagggcttgttaagaatgatctggatatgaagggcgtag

SEQ ID NO: 1185 - DNA, 60 bp, Artificial
  Synthetic oligonucleotide
cccgccgaaccgccagctctatcgctctaagcaataagttcactctatattcaattacgt

SEQ ID NO: 1186 - DNA, 60 bp, Artificial
  Synthetic oligonucleotide
gcggggattggcatggcgccaagccgaacagaccgaaaacgaggatttaggttgctcgac

SEQ ID NO: 1187 - DNA, 60 bp, Artificial
  Synthetic oligonucleotide
aaaggcaacgaacaaaaccaacatcagacacaataacaggacaatgagcgagaaggaaaa

SEQ ID NO: 1188 - DNA, 61 bp, Artificial
  Synthetic oligonucleotide
cagctgatgatacattccaatcattaaaacctttatatatcaacacttttctcacttcccc

SEQ ID NO: 1189 - DNA, 60 bp, Artificial
  Synthetic oligonucleotide
ggaaaatgagaatagagaattgcgtaaggaaataagctcgttaaaagcccatataagaga

SEQ ID NO: 1190 - DNA, 60 bp, Artificial
  Synthetic oligonucleotide
gtgaacgattaccaggagaaatcaagattaaagctgagagagaaaagaaaacagaggttg

SEQ ID NO: 1191 - DNA, 60 bp, Artificial
  Synthetic oligonucleotide
gacaacgaggatttgacatggagcgatgaaaacataaataaagcgagtagacttcactac

SEQ ID NO: 1192 - DNA, 60 bp, Artificial
  Synthetic oligonucleotide
gcatctttctatacattcctattctggcgcgctttccggtctccccatagttccctattt

SEQ ID NO: 1193 - DNA, 60 bp, Artificial
  Synthetic oligonucleotide
ccacattcgtggtgtgtgcatattcaaggatgtaggtgctccctggctagagggagtgcc

SEQ ID NO: 1194 - DNA, 64 bp, Artificial
  Synthetic oligonucleotide
ctggttctttatcaacataagcgtctataatctcttcttcttcttgaatttctccagtattcac

SEQ ID NO: 1195 - DNA, 60 bp, Artificial
  Synthetic oligonucleotide
cgtgccaatgaacacgtccgaaataacgggcgtttacttgatatgtaccagtaccttttc

SEQ ID NO: 1196 - DNA, 60 bp, Artificial
  Synthetic oligonucleotide
gcgacactgaaaagaaagggcgtttgattctctataacctagagaatggacataagccta

SEQ ID NO: 1197 - DNA, 60 bp, Artificial
  Synthetic oligonucleotide
gttggaagagaagtattacaaggcggatctacgagcggataatgctgaatttcaatttgg

SEQ ID NO: 1198 - DNA, 60 bp, Artificial
  Synthetic oligonucleotide
ctctatcgggcttaaaacgtcaatcagagcaatctaaacaaacgagacgaccaaagacac

SEQ ID NO: 1199 - DNA, 60 bp, Artificial
  Synthetic oligonucleotide
ggaaaagaataaagaggagaagacaatccctcagaagcgtttagagggctttatagagcg

SEQ ID NO: 1200 - DNA, 60 bp, Artificial
  Synthetic oligonucleotide
gagttgctcgacttggactagcaattatacccgccgaaccgccagttttatcgctctaaa

SEQ ID NO: 1201 - DNA, 66 bp, Artificial
  Synthetic oligonucleotide
cggttcaagctatactctcccttctattctattatcttatgaaaatttgaaaggtgtatttagtcg

SEQ ID NO: 1202 - DNA, 60 bp, Artificial
  Synthetic oligonucleotide
gtttgaatcggaaggatgtaaaacaatgtgcgagttgggtcgtaacacttccagaagagt

SEQ ID NO: 1203 - DNA, 60 bp, Artificial
  Synthetic oligonucleotide
ggtacggtggcgagaagaatgttatttgtgctaacgtccataatgacgaaacaacaccgc

SEQ ID NO: 1204 - DNA, 60 bp, Artificial
  Synthetic oligonucleotide
gccatgcagggcatggatcggcgaatgccgaagagcctcgcagagcacgtccaaatgaaa

SEQ ID NO: 1205 - DNA, 60 bp, Artificial
  Synthetic oligonucleotide
aaatgaaaaggggtaattacatggtgtgtgtcaacggtaccggaccgaacccgtaagggg

SEQ ID NO: 1206 - DNA, 60 bp, Artificial
  Synthetic oligonucleotide
gcgaccgcagaaatgaaagtgtttaaagaaccaaaagaattactgaagaaaatcgaagcc

SEQ ID NO: 1207 - DNA, 60 bp, Artificial
  Synthetic oligonucleotide
ctcatatctatcaaggtgggattctaaacgacaaaacgattggcattgatacagttaagg

SEQ ID NO: 1208 - DNA, 60 bp, Artificial
  Synthetic oligonucleotide
ccgcgatggaaagagtgttgattctgctggtgtgataaacacgactaacactttcgttga

SEQ ID NO: 1209 - DNA, 60 bp, Artificial
  Synthetic oligonucleotide
ccgggatggtaagagcgttgattctgctggtgtgataaacacgactaacactttcgttga

SEQ ID NO: 1210 - DNA, 60 bp, Artificial
  Synthetic oligonucleotide
caggcataacagccagtacccacctatcgacatcaggacgtaccgggacagtcacgaccg

SEQ ID NO: 1211 - DNA, 60 bp, Artificial
  Synthetic oligonucleotide
gcggagcgttccaggagcgacgagcgaagcaaggagagagagaacgacggtttaccaaag

SEQ ID NO: 1212 - DNA, 60 bp, Artificial
  Synthetic oligonucleotide
ggggattttatgagaacgtgtgcaagccgtccccactggagaacgatatgcagaaccggg

SEQ ID NO: 1213 - DNA, 60 bp, Artificial
  Synthetic oligonucleotide
cggcggcaaaccagatcgtcgcagccatgagggaacaaggttacacgcaccaggtaagga

SEQ ID NO: 1214 - DNA, 60 bp, Artificial
  Synthetic oligonucleotide
cccgtcgcccgtcgtctgaatctggatttcgtcatcggtgtgggctattggggtggagaa

SEQ ID NO: 1215 - DNA, 60 bp, Artificial
  Synthetic oligonucleotide
ccggggcgttcgcctctgtggtcttgcggatcgtctttatcaacctttccatgcagcgca

SEQ ID NO: 1216 - DNA, 60 bp, Artificial
  Synthetic oligonucleotide
ttgcgcacccgttcggatcagaggaatacggcaaggaggaattaacggccgagttcgccg

SEQ ID NO: 1217 - DNA, 60 bp, Artificial
  Synthetic oligonucleotide
ggcaaacgggacgagtggtttaacggggcgttggggatattaaggggcgtttcgatccgg

SEQ ID NO: 1218 - DNA, 60 bp, Artificial
  Synthetic oligonucleotide
cgtcacgccgatagccgtaatactctacatggacgagaaaacgaggcattatacgcacgc

SEQ ID NO: 1219 - DNA, 60 bp, Artificial
  Synthetic oligonucleotide
ataatcctgttcgcatccctggggatcttcgtgctggtggtgctggccgttacgctggca

SEQ ID NO: 1220 - DNA, 60 bp, Artificial
  Synthetic oligonucleotide
gccaaccggaaaagtttcagcaagcagacgaccgtcagcgtggcgaccgagggaggtttt

SEQ ID NO: 1221 - DNA, 60 bp, Artificial
  Synthetic oligonucleotide
ttgccgaggaaatggggatcagccgccagcagctttgcaacatcgagcagtcggaaaccg

SEQ ID NO: 1222 - DNA, 60 bp, Artificial
  Synthetic oligonucleotide
tacacctgtgggtgcggctgtaacgtgtggggaaaatccgggctggtgttaaggtgcgga

SEQ ID NO: 1223 - DNA, 60 bp, Artificial
  Synthetic oligonucleotide
gcccaggggttgagcgtcagggctacccggtttgtgcctttgatgttgtgtaccgtcgtt

SEQ ID NO: 1224 - DNA, 60 bp, Artificial
  Synthetic oligonucleotide
ggacggacgatcggataaaccgggctttgctggagaacctggggattaaggtcgaacccg

SEQ ID NO: 1225 - DNA, 60 bp, Artificial
  Synthetic oligonucleotide
cggccattacgtctaacgatcttacattctggcgtacgtttctttaatgatgctcttact

SEQ ID NO: 1226 - DNA, 60 bp, Artificial
  Synthetic oligonucleotide
ccgggttatcccgaaggtatgatgcttgccatcctgctgatgaacatcttcgctccgctg

SEQ ID NO: 1227 - DNA, 60 bp, Artificial
  Synthetic oligonucleotide
ccccatcactccctcttctacaatggctgaatacgtagacgaatgggctgccgcaggacg

SEQ ID NO: 1228 - DNA, 60 bp, Artificial
  Synthetic oligonucleotide
ctacaccttcgcgaacatcatcggctccgtagcattttacttttgcacgaggaccgtcag

SEQ ID NO: 1229 - DNA, 60 bp, Artificial
  Synthetic oligonucleotide
gtaccaataattttatgtctttgccccggtgttgtgggcttaaatttacgtactgccatc

SEQ ID NO: 1230 - DNA, 60 bp, Artificial
  Synthetic oligonucleotide
cgggataataatatcacccaagttgaatgacagaccacccttgaacgccatatagtaacc

SEQ ID NO: 1231 - DNA, 60 bp, Artificial
  Synthetic oligonucleotide
caatcaattcacccaaagccaaacagccaaataaaatggcgcactgacgaatcatacctt

SEQ ID NO: 1232 - DNA, 60 bp, Artificial
  Synthetic oligonucleotide
gcatttgccgtatgtattccaaagaaaatccacagtatttccgtcttcctgtttctggcc

SEQ ID NO: 1233 - DNA, 60 bp, Artificial
  Synthetic oligonucleotide
cgggtaagtcctatacggccagctcccttcgaatcctccagggcttgatcgcagcaaagg

SEQ ID NO: 1234 - DNA, 60 bp, Artificial
  Synthetic oligonucleotide
cgaatctgctcccaagtaagctcggcaactttcttacggttaggctcagcagaaccactc

SEQ ID NO: 1235 - DNA, 60 bp, Artificial
  Synthetic oligonucleotide
ggaagccggttgccacttcggacaccttaagagaaagtggaaccctgcaatggctcctta

SEQ ID NO: 1236 - DNA, 60 bp, Artificial
  Synthetic oligonucleotide
ccacaccgattccttcgaaacctcccggtttggtacgcggtttccagataccggcacggt

SEQ ID NO: 1237 - DNA, 60 bp, Artificial
  Synthetic oligonucleotide
cagtacatttgcacatgtagcacctacgttacctgcgcctactacggttacttttgacat

SEQ ID NO: 1238 - DNA, 60 bp, Artificial
  Synthetic oligonucleotide
ggtgtggtattgttggatgttactccgttgtcaatgggtatcgaaacactgggtggtgtg

SEQ ID NO: 1239 - DNA, 60 bp, Artificial
  Synthetic oligonucleotide
gcgagacaagctgttgaagctgggcaaccaataggaattagtggaagtaccgggcgcagc

SEQ ID NO: 1240 - DNA, 60 bp, Artificial
  Synthetic oligonucleotide
cctcgctacgctgtgggctttccgctgcaagtcctaacgcattttcccacccacccttct

SEQ ID NO: 1241 - DNA, 60 bp, Artificial
  Synthetic oligonucleotide
caatggaagcctgaaacccttttctgttagctcctaaatctgctccaaaccgccatctta

SEQ ID NO: 1242 - DNA, 60 bp, Artificial
  Synthetic oligonucleotide
cagcccttttagcggatttcatctgtcggcatacagcgtatgcaagcccgcgcattcgtc

SEQ ID NO: 1243 - DNA, 60 bp, Artificial
  Synthetic oligonucleotide
cggctgcatcataaaagaaaagacaccgacaccattcaggaactaccgcccatcggcaaa

SEQ ID NO: 1244 - DNA, 60 bp, Artificial
  Synthetic oligonucleotide
ccggttgtagccgtaccctatccataaactccatgttattaagcacactccattttccct

SEQ ID NO: 1245 - DNA, 60 bp, Artificial
  Synthetic oligonucleotide
gatttgcctggtaagattgatgatgatgctctgggaactattcttaaagctgcggatata

SEQ ID NO: 1246 - DNA, 60 bp, Artificial
  Synthetic oligonucleotide
ccatgtaggttgcaagttcagagctggccgcatcaattcccgcagcaccttgtgcaaaag

SEQ ID NO: 1247 - DNA, 60 bp, Artificial
  Synthetic oligonucleotide
cggctgcatcataaaagaaacgataccgacaccattcaggaactatcgcccatcagcaaa

SEQ ID NO: 1248 - DNA, 60 bp, Artificial
  Synthetic oligonucleotide
gccatctgtccttctaattggtccactgctcctgatttatacgcagcttcaaatggggaa

SEQ ID NO: 1249 - DNA, 60 bp, Artificial
  Synthetic oligonucleotide
cctctgggcaacatgatgatggttgtcggtggtatagtggggttgattggtgcggttcgc

SEQ ID NO: 1250 - DNA, 60 bp, Artificial
  Synthetic oligonucleotide
ctctactttaagatggcgtgtcggtgctgatcttggagctaatagaggcggatttcaggc

SEQ ID NO: 1251 - DNA, 60 bp, Artificial
  Synthetic oligonucleotide
cccagcagctaattatttcaataccgttggtcaggaacatagaagtaatcagatcacggc

SEQ ID NO: 1252 - DNA, 60 bp, Artificial
  Synthetic oligonucleotide
cgtacgaaaatgcaggtcaagccagagcgatagcatcggagttgggatataatgaagatt

SEQ ID NO: 1253 - DNA, 60 bp, Artificial
  Synthetic oligonucleotide
caccttgtcccgtttgtggtgggaatgttgaaataatgctttctgggtatgcgtgcgaga

SEQ ID NO: 1254 - DNA, 60 bp, Artificial
  Synthetic oligonucleotide
gcctacctgatacctgtgttcttcctgatccgccagccatcgacaccagacacaattcat

SEQ ID NO: 1255 - DNA, 60 bp, Artificial
  Synthetic oligonucleotide
ctccacccaccccaatatggtatgtttcttattcacttcttgcattccgaacattccgct

SEQ ID NO: 1256 - DNA, 60 bp, Artificial
  Synthetic oligonucleotide
cggcaggcacgggaaaggttgctctcagaagaaggtatcaagcatagaggcaggaggtgt

SEQ ID NO: 1257 - DNA, 60 bp, Artificial
  Synthetic oligonucleotide
gatcagaaacttcaacagattaaaaccttagtgggagaaacaacggatacaggggcgatc

SEQ ID NO: 1258 - DNA, 60 bp, Artificial
  Synthetic oligonucleotide
gtgggtgtggttggtgctaatgctcaaaaggttgtttgggatgttgcttgcatggaaaag

SEQ ID NO: 1259 - DNA, 60 bp, Artificial
  Synthetic oligonucleotide
caactcacagcagcattactttgatcgaaaccatcgaggtggggatgttatagcttttgt

SEQ ID NO: 1260 - DNA, 60 bp, Artificial
  Synthetic oligonucleotide
gcctgcctgatacctctgttcttcctgatctgccagccatcgacaccaagcacaatgcat

SEQ ID NO: 1261 - DNA, 60 bp, Artificial
  Synthetic oligonucleotide
gaaccgacagtgccaacaaatgcagatgtgcgctatgaagccagcgttgcagacccggta

SEQ ID NO: 1262 - DNA, 60 bp, Artificial
  Synthetic oligonucleotide
gtgtcggtcaagccgtaggtggcatggtcggtggtggcgttatggctgcaaaagcagttg

SEQ ID NO: 1263 - DNA, 60 bp, Artificial
  Synthetic oligonucleotide
ggaaggatgatgcaggaattattcgcggtgaattaatgcggtactgtgtaactgttgaaa

SEQ ID NO: 1264 - DNA, 60 bp, Artificial
  Synthetic oligonucleotide
gacattgaatcaaccatcgaactgggatatgcgtgtacttctgccggagataatggagct

SEQ ID NO: 1265 - DNA, 60 bp, Artificial
  Synthetic oligonucleotide
gccagttgaggattatgaagaaaccgtagtgcataccatcctgcatgaaattcagcatcg

SEQ ID NO: 1266 - DNA, 60 bp, Artificial
  Synthetic oligonucleotide
ggatcgtcgtcgtggcaatattgttgtctcacgccgtaccgtcttagaagaaagtcgtgc

SEQ ID NO: 1267 - DNA, 60 bp, Artificial
  Synthetic oligonucleotide
ctcgctcttcaatcacaattagaaggaactgaaaaccgtatctctcttgctcgccgtgat

SEQ ID NO: 1268 - DNA, 60 bp, Artificial
  Synthetic oligonucleotide
ccgtcaccggacgatcaaaaggctctccagtacgaccatcataaagcacaacctgccctg

SEQ ID NO: 1269 - DNA, 60 bp, Artificial
  Synthetic oligonucleotide
ctgagctgcgctcgcggcgaaatgtttggtaagggtaatgctcaactacctgctccacca

SEQ ID NO: 1270 - DNA, 60 bp, Artificial
  Synthetic oligonucleotide
cgagagcgcgccgctttctgaatagcatcggccattgcagaaatgacaatttcccggtcg

SEQ ID NO: 1271 - DNA, 60 bp, Artificial
  Synthetic oligonucleotide
gactcgagcaaaatttgaatctctcgttgatgatttagtgaagcgcactgttgagccttg

SEQ ID NO: 1272 - DNA, 60 bp, Artificial
  Synthetic oligonucleotide
gcttcgtggacttgaaacaggtcttaccggtcttgatgaaattgttatccctgaacatgc

SEQ ID NO: 1273 - DNA, 60 bp, Artificial
  Synthetic oligonucleotide
cgacgcgtcctccaccatccactgaacaatatcgccataagtacgaccactcgcttttgc

SEQ ID NO: 1274 - DNA, 60 bp, Artificial
  Synthetic oligonucleotide
ctgaagaaatttcatgggttcaaacctcctatctcattgctgaagtcatcatgttacccc

SEQ ID NO: 1275 - DNA, 60 bp, Artificial
  Synthetic oligonucleotide
tcgccttgatgctgctgaaattgataaagatcctgcgcgattaggagatgaagcacgcac

SEQ ID NO: 1276 - DNA, 60 bp, Artificial
  Synthetic oligonucleotide
gcatccacatatcgccccaaaataagatccatttcacgaatacctcgatgccatgcacga

SEQ ID NO: 1277 - DNA, 60 bp, Artificial
  Synthetic oligonucleotide
ttggaacgtgtacgcttacctttcgtaggcttaccccaaggagacactggatgacgcccc

SEQ ID NO: 1278 - DNA, 60 bp, Artificial
  Synthetic oligonucleotide
caccaacagccgctgctgcaggaacagcaacaagcataccagtgaaaccaaagagtgaag

SEQ ID NO: 1279 - DNA, 60 bp, Artificial
  Synthetic oligonucleotide
ggcatgtatgcttaaagaagcaggagcaagtcatgtcattcttggacattcagagcgccg

SEQ ID NO: 1280 - DNA, 60 bp, Artificial
  Synthetic oligonucleotide
gtaagaagctaaccactttgattaataaacgctttgctggtgtttatagcagaggggcca

SEQ ID NO: 1281 - DNA, 60 bp, Artificial
  Synthetic oligonucleotide
ggtcaaggaactcggcaacttaacaccgtaacttcgggaaaaggtgtgcccgcgagagtg

SEQ ID NO: 1282 - DNA, 60 bp, Artificial
  Synthetic oligonucleotide
ggaacgagagactagctctctgaataagtaagagagtgaaatgtggaactaacagcgact

SEQ ID NO: 1283 - DNA, 60 bp, Artificial
  Synthetic oligonucleotide
ccgctggtcgtaactctgaggtgtgaatgcgagggacttgtcccggaagtgtgaaaagcc

SEQ ID NO: 1284 - DNA, 60 bp, Artificial
  Synthetic oligonucleotide
gctcgtaccgtaaaccgactcaggtgagtggggtgaatatcctaaggcgatggggtgaat

SEQ ID NO: 1285 - DNA, 60 bp, Artificial
  Synthetic oligonucleotide
ggtaggacagctggacgaactagaagtgatcatgctgacataagtagcgttgaactcggg

SEQ ID NO: 1286 - DNA, 60 bp, Artificial
  Synthetic oligonucleotide
cttcccagggttagtcgagccctaagacgaggccaagtggcgtagtcgatggcaaaacgg

SEQ ID NO: 1287 - DNA, 60 bp, Artificial
  Synthetic oligonucleotide
cgtagatatcaacaggaataccggaggcgaaggcgggtaactggccgaacactgacactg

SEQ ID NO: 1288 - DNA, 60 bp, Artificial
  Synthetic oligonucleotide
ctgtactggaatgcggtgtaagttagcgttttactttgaacgattttcgttctttgacaa

SEQ ID NO: 1289 - DNA, 60 bp, Artificial
  Synthetic oligonucleotide
ggcaagatagggtgatagccccgtactcgaaaacttcgaaggccctagcggcatcccgag

SEQ ID NO: 1290 - DNA, 60 bp, Artificial
  Synthetic oligonucleotide
gccccgtactcgaaaacttcgaaggccctagcggcatcccgagtaccacgaaacacgtga

SEQ ID NO: 1291 - DNA, 60 bp, Artificial
  Synthetic oligonucleotide
ggtaggggagcgttctagtgtaggatgaaggttgaccggtaggacagctggacgaactag

SEQ ID NO: 1292 - DNA, 60 bp, Artificial
  Synthetic oligonucleotide
ccttcgttgtcgggccttttgcttctcttcgacgtgcttggagcacgcctccgtttcgca

SEQ ID NO: 1293 - DNA, 60 bp, Artificial
  Synthetic oligonucleotide
gcggtgcgtttattttgtaggggtacaggacggcttgcatgttgagggtggggtggctga

SEQ ID NO: 1294 - DNA, 60 bp, Artificial
  Synthetic oligonucleotide
gcgttgctgaagtgtccgggtttgcgttgtgtgctggatgccttcgccgtggatctgtct

SEQ ID NO: 1295 - DNA, 60 bp, Artificial
  Synthetic oligonucleotide
aaagtcgtccatgcccgcttcatagcagctctttcgttcaccactggtgccctcggccgt

SEQ ID NO: 1296 - DNA, 60 bp, Artificial
  Synthetic oligonucleotide
ttccgtggcctttgccttccacatgcagacttccccgttcaagattcagcgccagcgtgc

SEQ ID NO: 1297 - DNA, 60 bp, Artificial
  Synthetic oligonucleotide
gcacgtctccgccagccaccatcgcgccattcagtttcgtctgcgccccagttaaaacat

SEQ ID NO: 1298 - DNA, 60 bp, Artificial
  Synthetic oligonucleotide
ttcaacacccgtgaacttcgcaccttccaacttactcacacccgaaacgtccgtgccctt

SEQ ID NO: 1299 - DNA, 60 bp, Artificial
  Synthetic oligonucleotide
ccttcctgccctgcccagtccacaaaaccggaaaactccagcggaaagacctcaccacca

SEQ ID NO: 1300 - DNA, 60 bp, Artificial
  Synthetic oligonucleotide
acgccgccacctgagcctcggtccccacctgcgctccgccaattttcgtcagaactttat

SEQ ID NO: 1301 - DNA, 60 bp, Artificial
  Synthetic oligonucleotide
cctgcggcccctgatggaattgtgtgcctttgacttcggcggcttcaaaccccaatccca

SEQ ID NO: 1302 - DNA, 60 bp, Artificial
  Synthetic oligonucleotide
gtccttatccgcagccgccgccacagaacctgacgtcatcacaaaacccgccaccaatag

SEQ ID NO: 1303 - DNA, 60 bp, Artificial
  Synthetic oligonucleotide
tactacagcaacccgcaatccactttgacgacggaactggccgactcgccttttgccgcc

SEQ ID NO: 1304 - DNA, 60 bp, Artificial
  Synthetic oligonucleotide
caggccgtcccatcatagaactgcacctttagcacacgcacatcgccgtccaaagccgtg

SEQ ID NO: 1305 - DNA, 60 bp, Artificial
  Synthetic oligonucleotide
gttccagttttgcccgcaaccatgaaaccatccacacgcgcattgccaccagtgccaccc

SEQ ID NO: 1306 - DNA, 60 bp, Artificial
  Synthetic oligonucleotide
gaccgcagccgccacctgtttgctttcagtgattcccgtgaacgcctgcttgaaacccag

SEQ ID NO: 1307 - DNA, 60 bp, Artificial
  Synthetic oligonucleotide
gattcgcccgccacacgcacgattgccagacttttcttcggacccaggtaatgctgctgc

SEQ ID NO: 1308 - DNA, 60 bp, Artificial
  Synthetic oligonucleotide
aagccaaaatcactggtcaccccaagcaccggaaccgaggtcgcagaagccgatgccatg

SEQ ID NO: 1309 - DNA, 60 bp, Artificial
  Synthetic oligonucleotide
cgcgatgttggtgacggtaccaccggaggaagtgtcagtatcagtaccgcactcccaacg

SEQ ID NO: 1310 - DNA, 60 bp, Artificial
  Synthetic oligonucleotide
gccgccgactttgggttccagcaccacagattcactccaccagttttcaagttccccgcg

SEQ ID NO: 1311 - DNA, 60 bp, Artificial
  Synthetic oligonucleotide
agattgacgcctgcgactttcacacgccccggccagatttcacccagtccgtccagcact

SEQ ID NO: 1312 - DNA, 60 bp, Artificial
  Synthetic oligonucleotide
cacagattcaggcttgcagcggcgaccaatgacaccaacaccgccacccaataacgccca

SEQ ID NO: 1313 - DNA, 60 bp, Artificial
  Synthetic oligonucleotide
gccgccgcattgccaccccagtattcagagcgcgcatttaaaatcactacaggccccgga

SEQ ID NO: 1314 - DNA, 60 bp, Artificial
  Synthetic oligonucleotide
gtgtcccgccccaaccgatgccgcacctgcttttccatctgcaagtacaggtctttccga

SEQ ID NO: 1315 - DNA, 60 bp, Artificial
  Synthetic oligonucleotide
catctgaaacgactccccgccggaatcccgcatgtccacaaccacccgatccagtccttt

SEQ ID NO: 1316 - DNA, 60 bp, Artificial
  Synthetic oligonucleotide
ccgccaccaccccaccttagctattccacagttcccagacggatctcggcatcaaggaca

SEQ ID NO: 1317 - DNA, 60 bp, Artificial
  Synthetic oligonucleotide
tttccttgaacgacagatcccgcaaagtccggcccaccagcgacgattccgccgcaatgt

SEQ ID NO: 1318 - DNA, 60 bp, Artificial
  Synthetic oligonucleotide
gccatggacagaagcatgcccacaccggcagcgccaaagccccaatgccagccgactttt

SEQ ID NO: 1319 - DNA, 60 bp, Artificial
  Synthetic oligonucleotide
tctgcagccacgcattcccaagggcatcatcaagccgcacttcctgcacgctcacgaaga

SEQ ID NO: 1320 - DNA, 60 bp, Artificial
  Synthetic oligonucleotide
ggcggcgtagaacccaccaaactcaggctccgctttccagttcagtgccaatgtcacagg

SEQ ID NO: 1321 - DNA, 60 bp, Artificial
  Synthetic oligonucleotide
acccatcaccgcaccaatggttaaagatggcgcaaacaagcctcctgcggctccggcgat

SEQ ID NO: 1322 - DNA, 60 bp, Artificial
  Synthetic oligonucleotide
cggataagaacgtggtttcccgcacagacgacagacacccagcgactcagtgccgtttgg

SEQ ID NO: 1323 - DNA, 60 bp, Artificial
  Synthetic oligonucleotide
agactgcagattgtcaccatcgcgccaccacatccacagccagcccgccagcagaaagat

SEQ ID NO: 1324 - DNA, 60 bp, Artificial
  Synthetic oligonucleotide
gcaaaactccgtcagagacatcccaaagcccctgcccgtcgcccagcttgtccacttgat

SEQ ID NO: 1325 - DNA, 60 bp, Artificial
  Synthetic oligonucleotide
cccttcacccacttcgtaccagcccaaagcacttccaacataggttcccaccaccgagcc

SEQ ID NO: 1326 - DNA, 60 bp, Artificial
  Synthetic oligonucleotide
ccatccgcaccattgaagccttccacgatctgtcccgcaagccgagcaaataggcagggt

SEQ ID NO: 1327 - DNA, 60 bp, Artificial
  Synthetic oligonucleotide
gcggccatgccaccaaaactgaaatctgacgacgaacgcaacattctggtccgcccgctg

SEQ ID NO: 1328 - DNA, 60 bp, Artificial
  Synthetic oligonucleotide
ctgatcaccccgagctttctgcctccgaccctgcagcacgccagtttgatttatgccgtc

SEQ ID NO: 1329 - DNA, 60 bp, Artificial
  Synthetic oligonucleotide
catcgcccaccccaagagggatgaaataaacgcaatcaaccccagacgaccgcccatccc

SEQ ID NO: 1330 - DNA, 60 bp, Artificial
  Synthetic oligonucleotide
gccaccgccaacaacctgccccgaatacccttgaaccacgccttcatctcttcctccgtt

SEQ ID NO: 1331 - DNA, 60 bp, Artificial
  Synthetic oligonucleotide
taacgacatcaaatacaagctccgcccgccttcccaaagccaggctccggtggccctgat

SEQ ID NO: 1332 - DNA, 60 bp, Artificial
  Synthetic oligonucleotide
catcgaagcgcccacaactcccctgatctacaccccgtactaactgccaccgcccacaaa

SEQ ID NO: 1333 - DNA, 60 bp, Artificial
  Synthetic oligonucleotide
gccgtcgtcgcccatcaaatctgccacatccgccgtctggatacgttcgcattcagtgtc

SEQ ID NO: 1334 - DNA, 60 bp, Artificial
  Synthetic oligonucleotide
gccacgctgactttcatcctcgtgactccaggccagcacatcccgcaaaagtcccatcga

SEQ ID NO: 1335 - DNA, 60 bp, Artificial
  Synthetic oligonucleotide
gcgggagcctgaatgcagcatcacccacaccgagccctcttcgtccgtgcagatttcaat

SEQ ID NO: 1336 - DNA, 60 bp, Artificial
  Synthetic oligonucleotide
ggccgacagaaagaacatcctcgccacccatattcagatcgcccgtcatcgtaccgccgt

SEQ ID NO: 1337 - DNA, 60 bp, Artificial
  Synthetic oligonucleotide
tgtaccaatccccaaagctgtttgtgcccctgcttgtgtcgtcgcgccggttccgccatt

SEQ ID NO: 1338 - DNA, 60 bp, Artificial
  Synthetic oligonucleotide
ccgtgttccatccactgccggttcccagctcgaacaccttttgaccaggacccagcttca

SEQ ID NO: 1339 - DNA, 60 bp, Artificial
  Synthetic oligonucleotide
caccgccaccaacaaaagcatcggcaccgcgatacgaatcaggctcatcccgctggcaaa

SEQ ID NO: 1340 - DNA, 60 bp, Artificial
  Synthetic oligonucleotide
ccatcataaaagccaggaacgaacccaccaggcccaccagcaaagaaatgcgcccgccca

SEQ ID NO: 1341 - DNA, 60 bp, Artificial
  Synthetic oligonucleotide
gtcgtcgtgccaatccccacattcccgttcaatacagtccgccccgttccactgggagtt

SEQ ID NO: 1342 - DNA, 60 bp, Artificial
  Synthetic oligonucleotide
caggccgactttgcctccaccagccgcactttcactccaatcaaacttcctgccctgcca

SEQ ID NO: 1343 - DNA, 60 bp, Artificial
  Synthetic oligonucleotide
acagatagtccatcgaaagacccgccgagtttctgccgccaaaggcaccaatccccgctg

SEQ ID NO: 1344 - DNA, 60 bp, Artificial
  Synthetic oligonucleotide
gcgacgttctggctggccttcccaaaattcttcaccgaacaaggagccttcgatgccgcc

SEQ ID NO: 1345 - DNA, 60 bp, Artificial
  Synthetic oligonucleotide
ggacttcaactcgcccgccgcagtcgcaaccgctctggtgatttgtgttctgttgtcctg

SEQ ID NO: 1346 - DNA, 60 bp, Artificial
  Synthetic oligonucleotide
ccgtttcctgcctgccaccaagactgtcccgaaagaaatgctgaccatcgtggacgctcc

SEQ ID NO: 1347 - DNA, 60 bp, Artificial
  Synthetic oligonucleotide
cgacgccttcttagccgcttgagccgacagactcatcgccacaacaccaaagacacctgc

SEQ ID NO: 1348 - DNA, 60 bp, Artificial
  Synthetic oligonucleotide
tcactgcccgagccgctgcccgatccgtctttgttggaccccgaaccactgccgctggaa

SEQ ID NO: 1349 - DNA, 60 bp, Artificial
  Synthetic oligonucleotide
agatcgccgccacgtccctgctgttttgctctttgcttctaagtgccctttccgcctcgg

SEQ ID NO: 1350 - DNA, 60 bp, Artificial
  Synthetic oligonucleotide
gcctccagtgccagccccgccgaccacaacatccacttttccatccatctgcttccagat

SEQ ID NO: 1351 - DNA, 60 bp, Artificial
  Synthetic oligonucleotide
acgaacatagtcacgtccctccaagaacgcccacgctttcgcagcccgcaccaaagccat

SEQ ID NO: 1352 - DNA, 60 bp, Artificial
  Synthetic oligonucleotide
ccggtcagcccagttccgcagcgccatgagcaccattcagacactgcacacaccatacta

SEQ ID NO: 1353 - DNA, 60 bp, Artificial
  Synthetic oligonucleotide
agccggagccgcattgaccgccgccgctcagtcgacacacccaatttctgccgtggtcag

SEQ ID NO: 1354 - DNA, 60 bp, Artificial
  Synthetic oligonucleotide
caaatgcccctcgaaggacaacgccgattcctctggtgcacgctggatgtcgccgctttt

SEQ ID NO: 1355 - DNA, 60 bp, Artificial
  Synthetic oligonucleotide
tgtaatcccgcagcacatcttcaatcagacccacccgcacaacctcagccgcactcgcag

SEQ ID NO: 1356 - DNA, 60 bp, Artificial
  Synthetic oligonucleotide
ggcccaatcgtccacctcttccaccgagtccgcacccaatgaaaacagcacttctccgga

SEQ ID NO: 1357 - DNA, 60 bp, Artificial
  Synthetic oligonucleotide
taacgatccacaaacacatcatccagcgccaccgcacacgaggtcgcatccgtgccatcg

SEQ ID NO: 1358 - DNA, 60 bp, Artificial
  Synthetic oligonucleotide
gggcgatcaaagggatgctgcgcgaactggatccacacacgaacttcatgccaccggaga

SEQ ID NO: 1359 - DNA, 60 bp, Artificial
  Synthetic oligonucleotide
ccgtgcttgggttcagcagcaaatagtgtcgcaatcacacccacggccatcaaagcgccc

SEQ ID NO: 1360 - DNA, 60 bp, Artificial
  Synthetic oligonucleotide
gaagcccgccaagacagacctcaacagcaaaaccaacaacgccgtgaattccgcccgcac

SEQ ID NO: 1361 - DNA, 60 bp, Artificial
  Synthetic oligonucleotide
caggccggggtggggcgaagaacgaatatgtcctatgtggaaggggagcgctgttcagtt

SEQ ID NO: 1362 - DNA, 60 bp, Artificial
  Synthetic oligonucleotide
ccgtaaaatttcacacccgtccaagcccactcgcgcggccattcatccaccacattgcgg

SEQ ID NO: 1363 - DNA, 60 bp, Artificial
  Synthetic oligonucleotide
ccgcagtgacttccatcgcggtttcaaaatcagagcaccagccgaagccgaacatgccgt

SEQ ID NO: 1364 - DNA, 60 bp, Artificial
  Synthetic oligonucleotide
aacgctttgaagaccgtgtgctgtgtgaactgacgccgccactgacagatgagggccgca

SEQ ID NO: 1365 - DNA, 60 bp, Artificial
  Synthetic oligonucleotide
tcagacagcacctgtgacgggaagaacatgcggcgataaaccagccacgctcctcccaga

SEQ ID NO: 1366 - DNA, 60 bp, Artificial
  Synthetic oligonucleotide
tcatgaagtgggtgcgaaggttctggtggatggggcgcagatcgtgtctcagttgccggt

SEQ ID NO: 1367 - DNA, 60 bp, Artificial
  Synthetic oligonucleotide
cccttgttcgccgccacaaccgccggagtcatcatttgcacaacttctttcgcgccacct

SEQ ID NO: 1368 - DNA, 60 bp, Artificial
  Synthetic oligonucleotide
ccaaggcgcagagctaggcacagcaaatggcaaaggtgacgcaagcacccttccaggcat

SEQ ID NO: 1369 - DNA, 60 bp, Artificial
  Synthetic oligonucleotide
aggatgacgacaccgccgccgagacggaggagccatgaaccgtctgttgccgctttccat

SEQ ID NO: 1370 - DNA, 60 bp, Artificial
  Synthetic oligonucleotide
gtaaagtcacgatgaaccccgcgccccacaaaattcccgagatcagaaccgccagcgcca

SEQ ID NO: 1371 - DNA, 60 bp, Artificial
  Synthetic oligonucleotide
attgccggattcgttgcgcacatattgccgcttccgccagagctgccattgccactgcct

SEQ ID NO: 1372 - DNA, 60 bp, Artificial
  Synthetic oligonucleotide
ggaagtcagatccgcccaggtcgccgtgattccgtgcttttccagaactttcagcaggcc

SEQ ID NO: 1373 - DNA, 60 bp, Artificial
  Synthetic oligonucleotide
aaggctcgccgaatcaagcccaaaaggcaacccacgaccgccaccccaattcctgaacct

SEQ ID NO: 1374 - DNA, 60 bp, Artificial
  Synthetic oligonucleotide
gcatcaccagccccaccactgacgttgcagtttgtaccgacacaccccttctgacttgcg

SEQ ID NO: 1375 - DNA, 60 bp, Artificial
  Synthetic oligonucleotide
cacggcggtacaggtcattcaggtcagacgtcgcgaaacggccaccatcaagaggtacca

SEQ ID NO: 1376 - DNA, 60 bp, Artificial
  Synthetic oligonucleotide
gccggagccacacagttcacgagcagccccgttgtctttgccgaagctggaaatgaagtc

SEQ ID NO: 1377 - DNA, 60 bp, Artificial
  Synthetic oligonucleotide
tcacccagtaacgcagctcccgaatccagatcagcgtccccaatgccaactccactgcca

SEQ ID NO: 1378 - DNA, 60 bp, Artificial
  Synthetic oligonucleotide
gcataaacgcccgccccaccgaacccagactgaacaagctgagcaatggaaaggccgcaa

SEQ ID NO: 1379 - DNA, 60 bp, Artificial
  Synthetic oligonucleotide
atcggacaccatgtgcctgatcgaaactggtgccacccacatcacgaaccaccgctgcca

SEQ ID NO: 1380 - DNA, 60 bp, Artificial
  Synthetic oligonucleotide
agcgttttcacccgtgctcattgctgccacggccgaattcaccacatcactcagacccgc

SEQ ID NO: 1381 - DNA, 60 bp, Artificial
  Synthetic oligonucleotide
atgggccgcgaaagacacgacgattgttcaagccgacttcaccctgcccgtgcgctatca

SEQ ID NO: 1382 - DNA, 60 bp, Artificial
  Synthetic oligonucleotide
ttcgagttgcagttaagccgcaccgctgatttccaaaccgtcaccgcttcacgcaccggc

SEQ ID NO: 1383 - DNA, 60 bp, Artificial
  Synthetic oligonucleotide
gcgatcttttgccagaacaccgcctcatccaaaccgaccattttcacacacaggaaccag

SEQ ID NO: 1384 - DNA, 60 bp, Artificial
  Synthetic oligonucleotide
ccgtaccagttccgccacccatacctgcagtgacgaacaccatgtccgcgccttccaatt

SEQ ID NO: 1385 - DNA, 60 bp, Artificial
  Synthetic oligonucleotide
cgtcgtggtgaagtattgccgcccgcttttggaagtctcccattgctccctccccgttga

SEQ ID NO: 1386 - DNA, 60 bp, Artificial
  Synthetic oligonucleotide
attttccatggactcaagaccgcgctccagattgctgccggcctctcccacgatcatgcg

SEQ ID NO: 1387 - DNA, 60 bp, Artificial
  Synthetic oligonucleotide
gcacgcccacagccttacccagacgcaaaaccacgccgcgttcccagtcattcaagatct

SEQ ID NO: 1388 - DNA, 60 bp, Artificial
  Synthetic oligonucleotide
cacagactgattcgccgccgtgccaccatcaccgaagttccagcgaacagcaccgacttt

SEQ ID NO: 1389 - DNA, 60 bp, Artificial
  Synthetic oligonucleotide
taacagcgcctgcatgcacagattccccaccaaggccaccagcgaacttcccaccagcat

SEQ ID NO: 1390 - DNA, 60 bp, Artificial
  Synthetic oligonucleotide
acagaagaccatgtcaaagtctgccccgccgtgcaaccgacccctgaaagagccgccgcg

SEQ ID NO: 1391 - DNA, 60 bp, Artificial
  Synthetic oligonucleotide
atggcgatcctatcaccttcctgacagcccacttcccgtcccaggccaacccgacttact

SEQ ID NO: 1392 - DNA, 60 bp, Artificial
  Synthetic oligonucleotide
acgtcaccatgaacgcatacttacgccccaccacatcgcccacccggccaaataccagag

SEQ ID NO: 1393 - DNA, 60 bp, Artificial
  Synthetic oligonucleotide
atgccaacaacgccaaagaagccgcccgcctgtcctcggactccaatcaaagtgcagagc

SEQ ID NO: 1394 - DNA, 60 bp, Artificial
  Synthetic oligonucleotide
gccgtcgcagccgcctgagcaccccacacatacatgtcttcatcttcagcaaacacctgg

SEQ ID NO: 1395 - DNA, 60 bp, Artificial
  Synthetic oligonucleotide
gccgtcgccctcacttccgcgcaagtcttatagccgcttggagtgtctttgccctgatca

SEQ ID NO: 1396 - DNA, 60 bp, Artificial
  Synthetic oligonucleotide
ccgccggtcgtcaacagcgcacacccaccgtcatcattcaatgccaccttgctgacatct

SEQ ID NO: 1397 - DNA, 60 bp, Artificial
  Synthetic oligonucleotide
cggccagccccaccagcaaaacgatcattaacgccgcgccttttcttccacaaactgcgg

SEQ ID NO: 1398 - DNA, 60 bp, Artificial
  Synthetic oligonucleotide
gatcatcagcgtcaatccggcgccaaagaccgacacccaacccacccaattcagaaccgc

SEQ ID NO: 1399 - DNA, 60 bp, Artificial
  Synthetic oligonucleotide
gtcatcatgctcggtcaataccagatcctcgccaccctttactgacgcccaatacacccg

SEQ ID NO: 1400 - DNA, 60 bp, Artificial
  Synthetic oligonucleotide
cgcgccgctgtcttccatcgccgttttggttttggccgtgtccgtgtgcatgaacttctg

SEQ ID NO: 1401 - DNA, 60 bp, Artificial
  Synthetic oligonucleotide
tgtggagagaacaccgaagccagcgacacccaacgccaaagctgtattgatgccgcccgt

SEQ ID NO: 1402 - DNA, 60 bp, Artificial
  Synthetic oligonucleotide
caccctctgtggcttccacgatcagcgcctcaccattaacagcaaattctgccgccggga

SEQ ID NO: 1403 - DNA, 60 bp, Artificial
  Synthetic oligonucleotide
gctggcgttgggcggtcgaggggttgtccgtggtttcgctggttttccctgagattgttt

SEQ ID NO: 1404 - DNA, 60 bp, Artificial
  Synthetic oligonucleotide
ccaacacggtggaggtcaaaagcagggtgaacagggcaggcagtacgacgggcagtttca

SEQ ID NO: 1405 - DNA, 60 bp, Artificial
  Synthetic oligonucleotide
atccagtcatcggcggcatcgaaaccggaagacgccaccaccatttccactcgctcgttg

SEQ ID NO: 1406 - DNA, 60 bp, Artificial
  Synthetic oligonucleotide
accccaaacaagaacgagcgaggactgtccgaagcgaaagggctaagctccgcgccaagg

SEQ ID NO: 1407 - DNA, 60 bp, Artificial
  Synthetic oligonucleotide
gccgcgccgtctttaccccagcccatggttccatgcagccactgatagttcataccgttg

SEQ ID NO: 1408 - DNA, 60 bp, Artificial
  Synthetic oligonucleotide
tctgaccaccccaacgaactgaaccttgcggagtgtcccacttcatcacttccggcccgt

SEQ ID NO: 1409 - DNA, 60 bp, Artificial
  Synthetic oligonucleotide
aaacgcacttcaccacggtcacccaaggcgcggcggtaaacggcattggcttcggcggaa

SEQ ID NO: 1410 - DNA, 60 bp, Artificial
  Synthetic oligonucleotide
aagctttcagggaacaggcatggacatggggcagggacaggggattatcggtgggaccac

SEQ ID NO: 1411 - DNA, 60 bp, Artificial
  Synthetic oligonucleotide
cgccgacaccaacaccgacgttgccgttttgatcgatgacgaccttttctgtggacccgg

SEQ ID NO: 1412 - DNA, 60 bp, Artificial
  Synthetic oligonucleotide
ggcgggcaagttgtatggcgtgacgatgcaggagcgcggtgtttccacgatggtttctgt

SEQ ID NO: 1413 - DNA, 60 bp, Artificial
  Synthetic oligonucleotide
tttgcgccgcttgcatcgcctgttcagcctgctcggttgttgccatctggatcttgccca

SEQ ID NO: 1414 - DNA, 60 bp, Artificial
  Synthetic oligonucleotide
tattcactcggtcaacggcgggcaggggctgaacacggggctggctgatgctttcaatct

SEQ ID NO: 1415 - DNA, 60 bp, Artificial
  Synthetic oligonucleotide
agaagcgcgcaagtcagccccttccccgttggtgttcattccatagatacgcacagcccc

SEQ ID NO: 1416 - DNA, 60 bp, Artificial
  Synthetic oligonucleotide
acagctttgcatcccgccgtacattccagtgccccacatcgaagtttgtgccgtggccag

SEQ ID NO: 1417 - DNA, 60 bp, Artificial
  Synthetic oligonucleotide
ttttgggtggcgctgggtttgttgactctgcactcggcccgcggtcgcaaaattcgctgg

SEQ ID NO: 1418 - DNA, 60 bp, Artificial
  Synthetic oligonucleotide
gctccaccgacacctactgcatcggcaactccaatttggacccggacaacagcacgcctt

SEQ ID NO: 1419 - DNA, 60 bp, Artificial
  Synthetic oligonucleotide
agggccgcgatgaacaggaacagcgggatcgccagaccccagaagccccagttgaagatt

SEQ ID NO: 1420 - DNA, 60 bp, Artificial
  Synthetic oligonucleotide
aaggatccatgtcggcggtgaaaagggcggtcagggtgtgggaaatcgggcggacgtttt

SEQ ID NO: 1421 - DNA, 60 bp, Artificial
  Synthetic oligonucleotide
gacggcgcagaccattttcacccatgttgtagcttgcggccaccaggtaccaagagccga

SEQ ID NO: 1422 - DNA, 60 bp, Artificial
  Synthetic oligonucleotide
cgaggatcccttggcgcggaatccagaacaagccgaaccccaactgaccacaccaacttg

SEQ ID NO: 1423 - DNA, 60 bp, Artificial
  Synthetic oligonucleotide
cggcagaagttcaggtgaaaatagacgagggaaggtgtggggatggggagcggtgcgaaa

SEQ ID NO: 1424 - DNA, 60 bp, Artificial
  Synthetic oligonucleotide
acgatactgtccggcgctgcccagaacttcagacaacgcgacaaagcctgccatcactcc

SEQ ID NO: 1425 - DNA, 60 bp, Artificial
  Synthetic oligonucleotide
ggacgaccgccacctttaccgcccataacacccgcaacctctttcagaagatcaccggct

SEQ ID NO: 1426 - DNA, 60 bp, Artificial
  Synthetic oligonucleotide
tggtctgaatgattcccggccgctgaaccttgatgacgacgctttcgccggtactgaggc

SEQ ID NO: 1427 - DNA, 60 bp, Artificial
  Synthetic oligonucleotide
aaagcgccgtccagatcagcatcccaccgccagagaagctgaccagatccttcgctgagt

SEQ ID NO: 1428 - DNA, 60 bp, Artificial
  Synthetic oligonucleotide
ccatttcgggacgcgggatgaaaaggtgccggggatgtcagtcagtatgtgggcgcagta

SEQ ID NO: 1429 - DNA, 60 bp, Artificial
  Synthetic oligonucleotide
aaagtgccgtcggaagaaccgccaccaccagaagagctgcctccacccgtgctgatgcca

SEQ ID NO: 1430 - DNA, 60 bp, Artificial
  Synthetic oligonucleotide
gccgtcgccaagcccgcaccgaaatcaattacatgtgaaaggccgttgaagaatccacgc

SEQ ID NO: 1431 - DNA, 60 bp, Artificial
  Synthetic oligonucleotide
tactccatgcgctgcttgagtttcgcccagccgcccgtcttcgggtcgatctgccggttg

SEQ ID NO: 1432 - DNA, 60 bp, Artificial
  Synthetic oligonucleotide
aggtcttcgcccaggattcgcgcagggactggagcttggccttccggtcgagcgggttca

SEQ ID NO: 1433 - DNA, 60 bp, Artificial
  Synthetic oligonucleotide
ttttccaccacgtctcgcggttcctcacgtcggccctcgcgtccatgagcctgccgcgca

SEQ ID NO: 1434 - DNA, 60 bp, Artificial
  Synthetic oligonucleotide
aacctgttggcctggtcccagtcggcgggaatctcggtgtcctcgagccatggcaccgcc

SEQ ID NO: 1435 - DNA, 60 bp, Artificial
  Synthetic oligonucleotide
agacggacagatggtagatcgccatcggcttcggctcctttcgtgatcggccagggcggc

SEQ ID NO: 1436 - DNA, 60 bp, Artificial
  Synthetic oligonucleotide
atggcgtaggtggccgcgtagccgtccgcgttcaggttctcccggatgtagccctccagg

SEQ ID NO: 1437 - DNA, 60 bp, Artificial
  Synthetic oligonucleotide
tcttcttggccggcctcgccgtccgtccggtctcgtgcagctcgaccgcgttgaacagca

SEQ ID NO: 1438 - DNA, 60 bp, Artificial
  Synthetic oligonucleotide
ttcccgctgttcggccatgcgcaatgcgaggtctttcacctgttcggggcttggccgctc

SEQ ID NO: 1439 - DNA, 60 bp, Artificial
  Synthetic oligonucleotide
ggtcccgcagccctactctcccaacgagtttcggacggaactgagtacaaaataggagcg

SEQ ID NO: 1440 - DNA, 60 bp, Artificial
  Synthetic oligonucleotide
gctgtggttatgtccaatgaaatcgtgaagttcagcaaccagttcaacaacgtcgccttg

SEQ ID NO: 1441 - DNA, 60 bp, Artificial
  Synthetic oligonucleotide
attcgagctggccgagttcgccgacctcaagagcaagtacgccaaggagttctaccgcag

SEQ ID NO: 1442 - DNA, 60 bp, Artificial
  Synthetic oligonucleotide
ataccagccgccctcatacgagcccgtcaaccccgaacgcaggactccccaaacgccctc

SEQ ID NO: 1443 - DNA, 60 bp, Artificial
  Synthetic oligonucleotide
atctgccgctgttcggcttcctgacggcctgtgcgcctgtctgcgcgctgtttgagttcc

SEQ ID NO: 1444 - DNA, 60 bp, Artificial
  Synthetic oligonucleotide
attggacgagtgtggcgggctatggcgaggtgttcacgaccactgagctgttcgacgtga

SEQ ID NO: 1445 - DNA, 60 bp, Artificial
  Synthetic oligonucleotide
atggtgaagagcctggatgagcagatcaagtccctgcaggagaggcaggcccagctcaag

SEQ ID NO: 1446 - DNA, 60 bp, Artificial
  Synthetic oligonucleotide
ttcgaacagggccttgcgcaccagggagaagccattggaatgcacgccggtggagggaag

SEQ ID NO: 1447 - DNA, 60 bp, Artificial
  Synthetic oligonucleotide
ctcatcgccgccaccaagtccgatcacctcgagtccgtcaaggccaccatcaacaactac

SEQ ID NO: 1448 - DNA, 60 bp, Artificial
  Synthetic oligonucleotide
ttcaccggcaaccgtccgaccacctccatcttcggcgtggctctgaccccgttcgcgctc

SEQ ID NO: 1449 - DNA, 60 bp, Artificial
  Synthetic oligonucleotide
aagaacgcgccgaacgtcaagctgcagaagtacgaccagtacgccgatgcctacaacgcg

SEQ ID NO: 1450 - DNA, 60 bp, Artificial
  Synthetic oligonucleotide
tttcctgccacttgaagccgaggccgaagcacacggtgtaggtgaagaacgcgttgaggc

SEQ ID NO: 1451 - DNA, 60 bp, Artificial
  Synthetic oligonucleotide
tccgggttcacggtggcgcgggacagtgccttgacttccttctcgaccagcaggccagcg

SEQ ID NO: 1452 - DNA, 60 bp, Artificial
  Synthetic oligonucleotide
atcgatgtcgaccggcacttcgagcttggcgcgcaccttgcccttgatctgcaccacggc

SEQ ID NO: 1453 - DNA, 60 bp, Artificial
  Synthetic oligonucleotide
acagcgccgggatcatgccccagtaggagatgtcacgcagggagtagaacacgtcgagca

SEQ ID NO: 1454 - DNA, 60 bp, Artificial
  Synthetic oligonucleotide
aagaaccgcttccagcagattttcgacgccgtcaaagccgcgcaccccgaaatcaccgtg

SEQ ID NO: 1455 - DNA, 60 bp, Artificial
  Synthetic oligonucleotide
catcgaccatgatctggccatcatccccgtgctcaacaaaatcgacctgcccagcgccga

SEQ ID NO: 1456 - DNA, 60 bp, Artificial
  Synthetic oligonucleotide
tgatggtttcgcacaggaactcgaagtccttgcccttggcctcgtcgagcgcgcgggaga

SEQ ID NO: 1457 - DNA, 60 bp, Artificial
  Synthetic oligonucleotide
aaggcttccgacgtgatcgtgtccgccggctcctgcaccaccaactccatggccgccatg

SEQ ID NO: 1458 - DNA, 60 bp, Artificial
  Synthetic oligonucleotide
acgcttgccgtcctcggcggtcttcatttccagctcgtccacgtcgaagcccagatcgtt

SEQ ID NO: 1459 - DNA, 60 bp, Artificial
  Synthetic oligonucleotide
cccaggatagccaccttcttgccatcgaacacggacagatcggcgtccttctcgtaccag

SEQ ID NO: 1460 - DNA, 60 bp, Artificial
  Synthetic oligonucleotide
tggaccaagcgaaggccaggccctgcgggaacaggtagttgcgggcgtagccggacttga

SEQ ID NO: 1461 - DNA, 60 bp, Artificial
  Synthetic oligonucleotide
tttccgaaaacccttgcgaatccaaagccgatcatggacccgacgcctccgcacatgcgc

SEQ ID NO: 1462 - DNA, 60 bp, Artificial
  Synthetic oligonucleotide
tttccgacagaaagaccagtcatgccccgcgacacccgtaaagacaacgactctgcgcgg

SEQ ID NO: 1463 - DNA, 60 bp, Artificial
  Synthetic oligonucleotide
acgatgtcggcgacgcaatggaagatctccggcgtttggtagttgtgcgccaggatcacg

SEQ ID NO: 1464 - DNA, 60 bp, Artificial
  Synthetic oligonucleotide
gagttgcgcttgtcggcgtatttcatctgctggccgagcgagtgcttgggattgcccaag

SEQ ID NO: 1465 - DNA, 60 bp, Artificial
  Synthetic oligonucleotide
atcacgaccaagcctacagccgcgatcaacagaccatagacgagccgaagccgaagctgc

SEQ ID NO: 1466 - DNA, 60 bp, Artificial
  Synthetic oligonucleotide
taggagatcgggctcggcggataataacagaagccactcgaatagcagagcggctgcggc

SEQ ID NO: 1467 - DNA, 60 bp, Artificial
  Synthetic oligonucleotide
tgctggtgaacacgaacggcacgcgattgtagatgtcggaggcgttgatccacaccgtcg

SEQ ID NO: 1468 - DNA, 60 bp, Artificial
  Synthetic oligonucleotide
attccaaccccaacacgatcaaggctgacctaagcacgcgcggaacctctgagcagcggt

SEQ ID NO: 1469 - DNA, 60 bp, Artificial
  Synthetic oligonucleotide
tccacatcaccatcggatacaggttttcattgccgtgccgaagctgctcgaagcgcgcgc

SEQ ID NO: 1470 - DNA, 60 bp, Artificial
  Synthetic oligonucleotide
ccatcggcaccccgaccaacacggcgatccagaaatatctcaacgccaagaaagtgccgc

SEQ ID NO: 1471 - DNA, 60 bp, Artificial
  Synthetic oligonucleotide
acagaaacgccatgccgccgagcgaggagatcaggccgtagtcgaggtgatcgaaatagg

SEQ ID NO: 1472 - DNA, 60 bp, Artificial
  Synthetic oligonucleotide
ggccgcgaagtgatctatctcgagaccaacgacgccggctctttcttccgcttttccgac

SEQ ID NO: 1473 - DNA, 60 bp, Artificial
  Synthetic oligonucleotide
gcgacgtagccgatcgccacgatgtagatcacgaacagcacgatgtgcgcgacatagagc

SEQ ID NO: 1474 - DNA, 60 bp, Artificial
  Synthetic oligonucleotide
gctgccgcatccgttcaccaaccagcagcgtggcttcgtcaccgtcatcatctatctgtc

SEQ ID NO: 1475 - DNA, 60 bp, Artificial
  Synthetic oligonucleotide
tcgctcgacgatcccaaagacccattcgcattggtccggcttgatggcgacgaactctcc

SEQ ID NO: 1476 - DNA, 60 bp, Artificial
  Synthetic oligonucleotide
acaagggatcgaaccttggacctctcccgtgtgaagggaacgctctcccgctgagctatg

SEQ ID NO: 1477 - DNA, 60 bp, Artificial
  Synthetic oligonucleotide
atagctcagcgggagagcgttcccttcacacgggagaggtccaaggttcgatcccttgtg

SEQ ID NO: 1478 - DNA, 60 bp, Artificial
  Synthetic oligonucleotide
gagcgttcccttcacacgggagaggtccaaggttcgatcccttgtgcgcccaccatagat

SEQ ID NO: 1479 - DNA, 60 bp, Artificial
  Synthetic oligonucleotide
gttgggaatttcccgcccgcacacctggcaatgaaggacaagccttttcagtagcccgcg

SEQ ID NO: 1480 - DNA, 60 bp, Artificial
  Synthetic oligonucleotide
acgccatatcaaggtaagacccttgacacatgagacagtcgccgggttcacgcgctggcg

SEQ ID NO: 1481 - DNA, 60 bp, Artificial
  Synthetic oligonucleotide
acaaggaccaccgttcgacgatgtacgacgacgcctggatgccgaacatgcagcgcatca

SEQ ID NO: 1482 - DNA, 60 bp, Artificial
  Synthetic oligonucleotide
agttcaagccgctcaacctcgacgtgctgccgctctacatcgtgctgatggggttcttcc

SEQ ID NO: 1483 - DNA, 60 bp, Artificial
  Synthetic oligonucleotide
atctccgaacgctacatcgcccagctcgaaagcggcaagggcaacgtctcgatcatgctg

SEQ ID NO: 1484 - DNA, 60 bp, Artificial
  Synthetic oligonucleotide
ccttggtgttggccgaataggcctgctgggtgacgatcagcttggtgaattcgtcggcga

SEQ ID NO: 1485 - DNA, 60 bp, Artificial
  Synthetic oligonucleotide
actgctgagcgcgctggggcgtggcttcaagacgtatatcggctggaaacgtgtcggtat

SEQ ID NO: 1486 - DNA, 60 bp, Artificial
  Synthetic oligonucleotide
tcaacaacctgctcgacggcatcggcaacggcattcagatcattcaggccgccaacaccg

SEQ ID NO: 1487 - DNA, 60 bp, Artificial
  Synthetic oligonucleotide
ttggcatcagaccaccgcgtattgcagcaggatggcgatcttcgacgccttgccgagctt

SEQ ID NO: 1488 - DNA, 60 bp, Artificial
  Synthetic oligonucleotide
atatttcagcttctggtgatcgtggctcatcagcgaataggccggcgacaccggcgcggt

SEQ ID NO: 1489 - DNA, 60 bp, Artificial
  Synthetic oligonucleotide
agttctcgggcttaccatcccggatgtagtcgatgtagcgcggcacgttgaccttggacg

SEQ ID NO: 1490 - DNA, 60 bp, Artificial
  Synthetic oligonucleotide
ataggacagcagcgccaggaagctgccgatgttggaggcggcgtacaggaagtaaggatc

SEQ ID NO: 1491 - DNA, 60 bp, Artificial
  Synthetic oligonucleotide
aggtggtagccctcggcgagcacagcatggacgttgcggaacttgaagacctgatcgatc

SEQ ID NO: 1492 - DNA, 60 bp, Artificial
  Synthetic oligonucleotide
ttgttctgcaactcgccgatgccgacgccgagcaccacgccgcatttgtccttgcagtag

SEQ ID NO: 1493 - DNA, 60 bp, Artificial
  Synthetic oligonucleotide
tactgtcgagaccttgtacgatgccaaagcgcacttcgcccgctgacaagaccccggttc

SEQ ID NO: 1494 - DNA, 60 bp, Artificial
  Synthetic oligonucleotide
atgtcgccgttctatcgcatccgcttcgacgacggcacgcacttcgattactccgacgac

SEQ ID NO: 1495 - DNA, 60 bp, Artificial
  Synthetic oligonucleotide
atattggcgtcggtgagaccggcgagatccttctcttccatgatcgcagtgccgaaccgc

SEQ ID NO: 1496 - DNA, 60 bp, Artificial
  Synthetic oligonucleotide
gcagcaaagcctcaatgaaactgtcctgcgccatcccgttcacctccgcctaagcgcaag

SEQ ID NO: 1497 - DNA, 60 bp, Artificial
  Synthetic oligonucleotide
atcctgtctttccgctccaaggatccgcagttcaagaccgatccaggcgtgctgcccgat

SEQ ID NO: 1498 - DNA, 60 bp, Artificial
  Synthetic oligonucleotide
gcaggttgtaggcgatcgagatcagatcgaggtggaatgcgttggcggtgatgcctgcgt

SEQ ID NO: 1499 - DNA, 60 bp, Artificial
  Synthetic oligonucleotide
tcaagacatatccagccgcttcgagctgccggagaacctcctgaaagagggcgtctccca

SEQ ID NO: 1500 - DNA, 60 bp, Artificial
  Synthetic oligonucleotide
cacgatcccgcttgatggtttcccaaaatggtcgcccgaaggccttctaccggaatgccg

SEQ ID NO: 1501 - DNA, 60 bp, Artificial
  Synthetic oligonucleotide
gatcagctcaatgaagtgctgccctccgacaccacgtcgccggagcagatcgaagacatc

SEQ ID NO: 1502 - DNA, 60 bp, Artificial
  Synthetic oligonucleotide
agtcgctgttgatccagatgccgaatttgcgctccttgcgccgtgtcaccatgttggcgc

SEQ ID NO: 1503 - DNA, 60 bp, Artificial
  Synthetic oligonucleotide
aagtccttcagatagacgtcgttggcgaccttgttgggcggcatgtagccggtggtctcc

SEQ ID NO: 1504 - DNA, 60 bp, Artificial
  Synthetic oligonucleotide
acgactatctgcaggaggaaatccggatcgagaccaatccgcgcggcatcatcggccaga

SEQ ID NO: 1505 - DNA, 60 bp, Artificial
  Synthetic oligonucleotide
ttggtgatccgcttcgacttgttgaaggtggtggggtcgaggcccgatcgtttggccagt

SEQ ID NO: 1506 - DNA, 60 bp, Artificial
  Synthetic oligonucleotide
tgtcgcccgagaaggcgccaccgatgtgaccaccgatgtagaagccggtccagttgtaaa

SEQ ID NO: 1507 - DNA, 60 bp, Artificial
  Synthetic oligonucleotide
ttgctcggcgtcgctggtgatcttgccgtcccaccaataatggctggtgatggcctggat

SEQ ID NO: 1508 - DNA, 60 bp, Artificial
  Synthetic oligonucleotide
gcaccagggcgcgcagcaccttcgccagatgattgagcgagatatcgtatttgtcggcga

SEQ ID NO: 1509 - DNA, 60 bp, Artificial
  Synthetic oligonucleotide
accatggacgtcgacgagaacggcggcctgttcgagggctatctgctcaagctcaattcc

SEQ ID NO: 1510 - DNA, 60 bp, Artificial
  Synthetic oligonucleotide
acgaggtcgttggagaccatgatggaaagcgcgacgcattcgacgatcaccatcgcggtc

SEQ ID NO: 1511 - DNA, 60 bp, Artificial
  Synthetic oligonucleotide
gccttgtcgccgagaccgtccttgaggcccttcagatagtccttgccgaaatcgtcgttc

SEQ ID NO: 1512 - DNA, 60 bp, Artificial
  Synthetic oligonucleotide
gcggccccggtttcggcttcgagcatttcaagcaactcgacttcctgcgtgacaaggaag

SEQ ID NO: 1513 - DNA, 60 bp, Artificial
  Synthetic oligonucleotide
tgaacatgtaggtcaggtcgcgcttgcgctgcagttcgcgaagcagatcgaccatctggg

SEQ ID NO: 1514 - DNA, 60 bp, Artificial
  Synthetic oligonucleotide
cgtcggacccgccagtcagcaccgtgccatataacgtcttgattcgctcggcatctgcaa

SEQ ID NO: 1515 - DNA, 60 bp, Artificial
  Synthetic oligonucleotide
acatcgtcgaagcgatcgatcagccctggaagttcttcgaaggcggcgtcggtccgtact

SEQ ID NO: 1516 - DNA, 60 bp, Artificial
  Synthetic oligonucleotide
tgttctcggcgctgatgggcatctcgctgtcgtcgatcttcctggtgttcacgcacacct

SEQ ID NO: 1517 - DNA, 60 bp, Artificial
  Synthetic oligonucleotide
aaccttggcgctgatcgaggtgctgttcgcgcagggcgtgtcgtactactcgttcaagca

SEQ ID NO: 1518 - DNA, 60 bp, Artificial
  Synthetic oligonucleotide
atttccagaccttcctgacgctgctgacgacgcagctgcagaaccagaacccgctcgatc

SEQ ID NO: 1519 - DNA, 60 bp, Artificial
  Synthetic oligonucleotide
tcgatgttgaagtacttcggatcgccgacgatggcgtggccgatatgcgccatatgggcg

SEQ ID NO: 1520 - DNA, 60 bp, Artificial
  Synthetic oligonucleotide
agatgccgtcgatcgagccttcgaacagcttgcggtagctttcctcggcgagccgttgtt

SEQ ID NO: 1521 - DNA, 60 bp, Artificial
  Synthetic oligonucleotide
agcctgcgggtgatggcgcaagaaaatcgcgacatgcggatgaacgaggccgagaagaag

SEQ ID NO: 1522 - DNA, 60 bp, Artificial
  Synthetic oligonucleotide
tcgatgttttcggtggattcgatccgctcgatcagatagcgcgacatgctggcgccgagc

SEQ ID NO: 1523 - DNA, 60 bp, Artificial
  Synthetic oligonucleotide
ttcttctccaactcgccgaacttcgaggtgatgacgccgaccaccacgaccttgttgccc

SEQ ID NO: 1524 - DNA, 60 bp, Artificial
  Synthetic oligonucleotide
tccaggccttcgatcgtgatcggatacatccgctccgagaacagccggcggatgatagtg

SEQ ID NO: 1525 - DNA, 60 bp, Artificial
  Synthetic oligonucleotide
ttccttcggcaggaaccagaacggcatctgcaactcgaccgatgcgccccagtagttggt

SEQ ID NO: 1526 - DNA, 60 bp, Artificial
  Synthetic oligonucleotide
atcatcgtcaaggtgctttatgaaaagcgcgagctcgacaccctgcccggccgcatcacc

SEQ ID NO: 1527 - DNA, 60 bp, Artificial
  Synthetic oligonucleotide
gtcatggccaaagcggtcaccatcaagatcaagctcgtgtcgaccgcggataccggcttc

SEQ ID NO: 1528 - DNA, 60 bp, Artificial
  Synthetic oligonucleotide
atggaatggaattgtgatgcgtgccgcttccgtgaaccgcaggcgcatactcggcctctg

SEQ ID NO: 1529 - DNA, 60 bp, Artificial
  Synthetic oligonucleotide
atttccggcctgggcgaagctcaccgccaagcagcgctccaacatcttgcgcaaatggtt

SEQ ID NO: 1530 - DNA, 60 bp, Artificial
  Synthetic oligonucleotide
caccttcattacccctttattcggggtggcggccggctatctgatcatgcacgacccgct

SEQ ID NO: 1531 - DNA, 60 bp, Artificial
  Synthetic oligonucleotide
aatgttctcggcaagctcgtattgcgacaccacccggccgcgatgcagcaccagatagga

SEQ ID NO: 1532 - DNA, 60 bp, Artificial
  Synthetic oligonucleotide
tggcgttggggttcaccagtttctcgtgctcgggcagataccattcgagctggccgatct

SEQ ID NO: 1533 - DNA, 60 bp, Artificial
  Synthetic oligonucleotide
tcgtctgcccgcattgtacgacatcctatgcgatcgatccggccaaactgggagatgccg

SEQ ID NO: 1534 - DNA, 60 bp, Artificial
  Synthetic oligonucleotide
tctgcttctgatccacgggaagcggaatgcgcggacttttcagatcgagcggccagtggt

SEQ ID NO: 1535 - DNA, 60 bp, Artificial
  Synthetic oligonucleotide
cgggcgtcgggcaggatttcggtgaccagtccttcgaactggatcagttcttctttcgcc

SEQ ID NO: 1536 - DNA, 60 bp, Artificial
  Synthetic oligonucleotide
atccacgttccgaatgcgtggctgtcgatgttcgtgtggggcgtgatgagcattgctgcg

SEQ ID NO: 1537 - DNA, 60 bp, Artificial
  Synthetic oligonucleotide
gaccatcgccaagattctcaacggcgaaagcaagaacctgtggccgccgatcatcgacgg

SEQ ID NO: 1538 - DNA, 60 bp, Artificial
  Synthetic oligonucleotide
cgtcctcggcctatgtgctgaagatcatccgcgaccatcccaccgacgactacaagttcg

SEQ ID NO: 1539 - DNA, 60 bp, Artificial
  Synthetic oligonucleotide
agcagttcgaggcgctgtatcaggacttcctcaagcacgccgaaggcatgaccctgttcg

SEQ ID NO: 1540 - DNA, 60 bp, Artificial
  Synthetic oligonucleotide
gccgactatctgaattccggctggatggagaacgtcgacaagagctccaccgaggagctg

SEQ ID NO: 1541 - DNA, 60 bp, Artificial
  Synthetic oligonucleotide
aagaacatggacctgcagtcgccgatcctggtgcggctgttcaagcaggaagctgagctc

SEQ ID NO: 1542 - DNA, 60 bp, Artificial
  Synthetic oligonucleotide
atccggcaggatttcgccaagaacctgatcaacgtgctgcagaccggctcgtcgaacctc

SEQ ID NO: 1543 - DNA, 60 bp, Artificial
  Synthetic oligonucleotide
tcatctgcacgtcgccgttcttgatgtgggtcagctcgtgcgccaacaccgcttcgatct

SEQ ID NO: 1544 - DNA, 60 bp, Artificial
  Synthetic oligonucleotide
aaacttccgcacgctgcgcaacgtcatgctgagttcactcggctgggacacattcgacgc

SEQ ID NO: 1545 - DNA, 60 bp, Artificial
  Synthetic oligonucleotide
tcttcagcgcacgcgtcaccacctgctcgtcggcattgaagctggcatagatcggatcga

SEQ ID NO: 1546 - DNA, 60 bp, Artificial
  Synthetic oligonucleotide
ttcgtacccgtccgacagaaagcccgaccactccacctgcggcggattgttcgacagaaa

SEQ ID NO: 1547 - DNA, 60 bp, Artificial
  Synthetic oligonucleotide
tgaatgggctttggcgcgatcaccgatcgacctctccgaacacgatgtcgagggaaccca

SEQ ID NO: 1548 - DNA, 60 bp, Artificial
  Synthetic oligonucleotide
aaactggatgggctcggggacgttcaccgatcgacctctccgaacacgatgtcgagcgaa

SEQ ID NO: 1549 - DNA, 60 bp, Artificial
  Synthetic oligonucleotide
ggccgagaaacatcacgatgaagaagttgccgacggcaccgatggtgccgaggatcagct

SEQ ID NO: 1550 - DNA, 60 bp, Artificial
  Synthetic oligonucleotide
gccaagccggattcgtccatctgcacgttcactcggcctattcgctgctgaaaggctcga

SEQ ID NO: 1551 - DNA, 60 bp, Artificial
  Synthetic oligonucleotide
tcagcgcaatttcggcgtcaacgtcacggaatggcggatcatgtcgctgctggcgatcga

SEQ ID NO: 1552 - DNA, 60 bp, Artificial
  Synthetic oligonucleotide
tggctgtactacttcgtgctggtggtctcgatggcgatctacgtcgcctcggtcaacctg

SEQ ID NO: 1553 - DNA, 60 bp, Artificial
  Synthetic oligonucleotide
agatcgcccaccgtcgcgttggtgaacttggtctggtcgccgagatagatcgtcgagttg

SEQ ID NO: 1554 - DNA, 60 bp, Artificial
  Synthetic oligonucleotide
tgaagcgctcgatcccggagttccctacgaaagtaggtgggcaccatatggccggatcca

SEQ ID NO: 1555 - DNA, 60 bp, Artificial
  Synthetic oligonucleotide
ccagcacatccgtataggacagcagcagatagaagctctcgaccagcaggatcggcagcg

SEQ ID NO: 1556 - DNA, 60 bp, Artificial
  Synthetic oligonucleotide
aaggtcaactcgttcacgctgtaccagggcatcgtgatcggcatttccggcctgttggcg

SEQ ID NO: 1557 - DNA, 60 bp, Artificial
  Synthetic oligonucleotide
agggagcagacctttacgtactcgacggctttcgccttcaacggaagatcagcggcccga

SEQ ID NO: 1558 - DNA, 60 bp, Artificial
  Synthetic oligonucleotide
cgcaagcacagcctgtggccgttcaatttcggtctgtcgtgctgctacgtcgaacaggtc

SEQ ID NO: 1559 - DNA, 60 bp, Artificial
  Synthetic oligonucleotide
atccgcaaatatccgacctccgaatacgccaccaccgccaagaagaagctggaaggcgcg

SEQ ID NO: 1560 - DNA, 60 bp, Artificial
  Synthetic oligonucleotide
tgaaattgaagaaggcggggcgggagtggaaggggctgtcgccgttccagcaggagaaat

SEQ ID NO: 1561 - DNA, 60 bp, Artificial
  Synthetic oligonucleotide
gcccgctatcacaatctgcatccgttccatcgcctgctgcacggcggcaagctcaacaaa

SEQ ID NO: 1562 - DNA, 60 bp, Artificial
  Synthetic oligonucleotide
tatctgccgctgttccacaccaatgcgctggcctattcgatgctgtcgacgctgtgggtc

SEQ ID NO: 1563 - DNA, 60 bp, Artificial
  Synthetic oligonucleotide
agagaagagcgcgcagatgttgccgatggctttccagagagcgtcgatggttctggctgc

SEQ ID NO: 1564 - DNA, 60 bp, Artificial
  Synthetic oligonucleotide
tctcggactcgtcatggccctgagcattccggcgattgcgtggattgagagttcggcctt

SEQ ID NO: 1565 - DNA, 60 bp, Artificial
  Synthetic oligonucleotide
cgtgacgtgggcaactggtttgatcgtcatgcgattgtggtgagcttgaagggccgctcg

SEQ ID NO: 1566 - DNA, 60 bp, Artificial
  Synthetic oligonucleotide
cgcgctccgccacgaggtcgcccacgcagcaaaataatatcacgaccggaaagaaactgc

SEQ ID NO: 1567 - DNA, 60 bp, Artificial
  Synthetic oligonucleotide
tcgcgatcaagcgcttgtatctggctcttctcgtcgacactgagcaccagggcccgattg

SEQ ID NO: 1568 - DNA, 60 bp, Artificial
  Synthetic oligonucleotide
atcttcgcgacaccggagaatttgcagacgttccgtgtccccaatgcactcgcgcgcatc

SEQ ID NO: 1569 - DNA, 60 bp, Artificial
  Synthetic oligonucleotide
gagattgcacggattccagctcctcatgctcttgagccacttggctaggtcgtccgccac

SEQ ID NO: 1570 - DNA, 60 bp, Artificial
  Synthetic oligonucleotide
aagcgcgttcggctggcttgtcgataattatccgcgtctggctgactggaatgcctgcgc

SEQ ID NO: 1571 - DNA, 60 bp, Artificial
  Synthetic oligonucleotide
atccgatgaatgggttggttccaggcagcaaggcgtgccagcgtttcggcttcatgtcgc

SEQ ID NO: 1572 - DNA, 60 bp, Artificial
  Synthetic oligonucleotide
gcagagtttcccggtccttcgtcaggcagacaaccgccttgtcgtacttggcgccgtatt

SEQ ID NO: 1573 - DNA, 60 bp, Artificial
  Synthetic oligonucleotide
gtcgacaatgccggcaacgtctccaagcggttctcttccggcaccttcccgttctcgaaa

SEQ ID NO: 1574 - DNA, 60 bp, Artificial
  Synthetic oligonucleotide
cgcagcttcggcctttgaacgtatccgccacaaatatcgggactggttggcccaccactc

SEQ ID NO: 1575 - DNA, 60 bp, Artificial
  Synthetic oligonucleotide
tcgtctttagcctggaaatcgtcggcgggctgacgttgaaaatcggggcgatctcgcgga

SEQ ID NO: 1576 - DNA, 60 bp, Artificial
  Synthetic oligonucleotide
catgcctgggttagccaggcggcgaatgggtcgatttcgaagccctgcagagatttggca

SEQ ID NO: 1577 - DNA, 60 bp, Artificial
  Synthetic oligonucleotide
ggtcggcgaattttcggcggctgtaatatcggcggaggcgcgagagggcgtctttatcaa

SEQ ID NO: 1578 - DNA, 60 bp, Artificial
  Synthetic oligonucleotide
tcgcggcgttttaatcgctgtggtggccgctggggctgttctgtgtcgccttggatcaaa

SEQ ID NO: 1579 - DNA, 60 bp, Artificial
  Synthetic oligonucleotide
gcgatcaaattcgctccagacatttgccagccagtgccggacatagccgcgcagcacgaa

SEQ ID NO: 1580 - DNA, 60 bp, Artificial
  Synthetic oligonucleotide
tacaggaacgccatgccgccgagcgacgagatcaggccgtagtcgaggtgatcgaaatac

SEQ ID NO: 1581 - DNA, 60 bp, Artificial
  Synthetic oligonucleotide
tcctatccggccggcacctggtacttcaacccgttctgctggcagctgttgttcgtgttc

SEQ ID NO: 1582 - DNA, 60 bp, Artificial
  Synthetic oligonucleotide
cagctgccagcagaacgggttgaagtaccaggtgccttccggaaacgcctgcagattcca

SEQ ID NO: 1583 - DNA, 60 bp, Artificial
  Synthetic oligonucleotide
tcgagatagggcgcattcggccgccagtaattgtcgttgcggtcggcgatgatgtactgg

SEQ ID NO: 1584 - DNA, 60 bp, Artificial
  Synthetic oligonucleotide
aacgtcgaagcttccaacctgtgggcgttcttccaggccaagagcatccgtcgaaccacg

SEQ ID NO: 1585 - DNA, 60 bp, Artificial
  Synthetic oligonucleotide
aggatcgcttcgcccatctgcgaggtcgagatcaccgttgagccttccgacttgatgtcg

SEQ ID NO: 1586 - DNA, 60 bp, Artificial
  Synthetic oligonucleotide
ttccgcaccgattgtgcgctgcacctcgattccggcatcacccttgaagccgagtccaat

SEQ ID NO: 1587 - DNA, 60 bp, Artificial
  Synthetic oligonucleotide
aaaggttcgcggatgatgcgcaagacttcggtaatcctcctcagcgccgttaccggtgcc

SEQ ID NO: 1588 - DNA, 60 bp, Artificial
  Synthetic oligonucleotide
agaagaagtgttcgaggttgatccactggcccaccaccaccggggctgccagcagattct

SEQ ID NO: 1589 - DNA, 60 bp, Artificial
  Synthetic oligonucleotide
acatgatatagcccgccggctcgacctccaggatgaacatgctcttgccgggcaggatca

SEQ ID NO: 1590 - DNA, 60 bp, Artificial
  Synthetic oligonucleotide
attcgaagactccttcatgcgcgcttttgcggtaagcgaacgacgggcgaggacctaccg

SEQ ID NO: 1591 - DNA, 60 bp, Artificial
  Synthetic oligonucleotide
ggagctacggcttcccctacggcattttcacgcatctcgattgggtgtcgaacaccggct

SEQ ID NO: 1592 - DNA, 60 bp, Artificial
  Synthetic oligonucleotide
aacttggcgaagttcttctggaacatgccgaccagggcgcgggcggtcttatcgaactcg

SEQ ID NO: 1593 - DNA, 60 bp, Artificial
  Synthetic oligonucleotide
aatctacgactggtgcatcgacgccgcccacaagccctacgccctttggattctggggat

SEQ ID NO: 1594 - DNA, 60 bp, Artificial
  Synthetic oligonucleotide
aggtcaggtgcccgagcgtcgaattgacgatggcgtcggcgcagatgttgaacagttgca

SEQ ID NO: 1595 - DNA, 60 bp, Artificial
  Synthetic oligonucleotide
aattgaacagccagaacggcagcttcagattgcgcggattgagcaccagcgcgtggtcgc

SEQ ID NO: 1596 - DNA, 60 bp, Artificial
  Synthetic oligonucleotide
ttggacatcctgtcgtcggactacatcccgtcgagcctgctgatggccgcactgcaattg

SEQ ID NO: 1597 - DNA, 60 bp, Artificial
  Synthetic oligonucleotide
tgattgtcgcagaagtggtcgcgggttgggcgggatcgagggcgctaaacacaacatgtg

SEQ ID NO: 1598 - DNA, 60 bp, Artificial
  Synthetic oligonucleotide
acatgatcttccggtcccgtcaggatctcaacatcgacacccgcaccgcgaccgaatacg

SEQ ID NO: 1599 - DNA, 60 bp, Artificial
  Synthetic oligonucleotide
atactctgccagcaatattgcggtcccgacgatctcgttctcaccgaggtccccgatccg

SEQ ID NO: 1600 - DNA, 60 bp, Artificial
  Synthetic oligonucleotide
tgttcctgcgacccgctatcttcgaaccatgagcagagcatccaatgccctcaagcgccc

SEQ ID NO: 1601 - DNA, 60 bp, Artificial
  Synthetic oligonucleotide
cgcaatctggtcgcgatgtcaggctggagaatgttgtacgtgcccgccgaaccacaacac

SEQ ID NO: 1602 - DNA, 60 bp, Artificial
  Synthetic oligonucleotide
ataactccggcggggagaacaaagccgtgaggcgtcaaacagcaacaggcgggcgtaatc

SEQ ID NO: 1603 - DNA, 60 bp, Artificial
  Synthetic oligonucleotide
aaatcggcttcctgaatgcggatggtcaccggaacggtcatcggatcatcccgtgcgtgc

SEQ ID NO: 1604 - DNA, 60 bp, Artificial
  Synthetic oligonucleotide
tttccgcaattcggtcgcggcctacaccgtcagcctgctcaatccgaaagtcatcgccga

SEQ ID NO: 1605 - DNA, 60 bp, Artificial
  Synthetic oligonucleotide
cattcgcgctcgcaagaacggcgatccgatcgtgatgctgacctcgtatcacgcccatac

SEQ ID NO: 1606 - DNA, 60 bp, Artificial
  Synthetic oligonucleotide
cttcgttgtaaacacagcagccgccgaacgcttccgacatgaaccaggagcccgggatct

SEQ ID NO: 1607 - DNA, 60 bp, Artificial
  Synthetic oligonucleotide
acgttcagctcgaggccaacacctacgtcatcaagatcaaggaagtcgacgccggcagcg

SEQ ID NO: 1608 - DNA, 60 bp, Artificial
  Synthetic oligonucleotide
ccgaagccacccagttcgacatcgccatcctcgacgtcaacgtcaacggcaaggtgatct

SEQ ID NO: 1609 - DNA, 60 bp, Artificial
  Synthetic oligonucleotide
ccgatgccgagcacgaacaggttgccgagccagaatgtcagtccggagatgaagcagatc

SEQ ID NO: 1610 - DNA, 60 bp, Artificial
  Synthetic oligonucleotide
gtgccggtgatgcagctcgaaatccgcaacgccgtggagcgtgacgggattatctacaac

SEQ ID NO: 1611 - DNA, 60 bp, Artificial
  Synthetic oligonucleotide
atcggacttatcccggccaattccacggcttcttcaccatgggcaagctgctgccgaagg

SEQ ID NO: 1612 - DNA, 60 bp, Artificial
  Synthetic oligonucleotide
tcgaggtgatcaggttcttgatgtcgacgcggtcgaacggggtaatgaaggtgcgccgca

SEQ ID NO: 1613 - DNA, 60 bp, Artificial
  Synthetic oligonucleotide
cagcgcttcttcatcaagatccggctgcttcatcagccagtgcgacatccgccgcaagag

SEQ ID NO: 1614 - DNA, 60 bp, Artificial
  Synthetic oligonucleotide
tgaagtacaagccggtcaatctcgacgtgctgccgctgtacatcgtgctggtggttgccg

SEQ ID NO: 1615 - DNA, 60 bp, Artificial
  Synthetic oligonucleotide
atcgccgtggtgcagataatacggcttgatccggcattccacgaagccgcgcatcaacgc

SEQ ID NO: 1616 - DNA, 60 bp, Artificial
  Synthetic oligonucleotide
agaagtggacccaggaggtcaacgacggcaaggcgaccaccgagcagtatttcgtcctga

SEQ ID NO: 1617 - DNA, 60 bp, Artificial
  Synthetic oligonucleotide
tcaagctgctgtttctggtcggctcgtgcccgtcggaagtgatcaagctcgatctgtcgc

SEQ ID NO: 1618 - DNA, 60 bp, Artificial
  Synthetic oligonucleotide
tggtgtcggccaaggtcaggttcgacgagccggtctgcagcacgttgatcaggttcttgt

SEQ ID NO: 1619 - DNA, 60 bp, Artificial
  Synthetic oligonucleotide
ccgttgaacgaagcgtcctgagccgtggtcttgatctggtcgagcacgtcgttgaactgc

SEQ ID NO: 1620 - DNA, 60 bp, Artificial
  Synthetic oligonucleotide
atgttcgaatcgatggcgtcgttcgtcctggtcgatcatctcggcggcctgacctacgag

SEQ ID NO: 1621 - DNA, 60 bp, Artificial
  Synthetic oligonucleotide
ttggcgatcgacttggcgctgtccaccagcttgttcagcgaggtgataccagtgttggcg

SEQ ID NO: 1622 - DNA, 60 bp, Artificial
  Synthetic oligonucleotide
ggcagtcgcatggtggacacctcgctccggaccaaactcaattcgatcaagcacgcgatg

SEQ ID NO: 1623 - DNA, 60 bp, Artificial
  Synthetic oligonucleotide
aacaccggcatcacctcgctgaacaagctgatcgacaccgccaagtcgatcgccaaccag

SEQ ID NO: 1624 - DNA, 60 bp, Artificial
  Synthetic oligonucleotide
acagattgccgagccagaaggtcaggccggagatgaagcagatcttggcgacgtcgatgg

SEQ ID NO: 1625 - DNA, 60 bp, Artificial
  Synthetic oligonucleotide
gcagcttcatcacctcgttggtgccgccgtagatcttctggatccgcgcatcgacgaaca

SEQ ID NO: 1626 - DNA, 60 bp, Artificial
  Synthetic oligonucleotide
agtatcccgaacgcaccacctgcctgtggacctggaccaagctcaccaatgatttcggcc

SEQ ID NO: 1627 - DNA, 60 bp, Artificial
  Synthetic oligonucleotide
tcgagatcttcgtactggccgctcttcagcgaccacagaaacgcgaccaatcccagcagg

SEQ ID NO: 1628 - DNA, 60 bp, Artificial
  Synthetic oligonucleotide
gtcgtggctcggaaacagatcggtgacttcgggcatgaacgggccggagaacgaatcctt

SEQ ID NO: 1629 - DNA, 60 bp, Artificial
  Synthetic oligonucleotide
aacacgttctcgaactatcaggaagccaaccgcagcttcgtgcgccagaccgtgttgccg

SEQ ID NO: 1630 - DNA, 60 bp, Artificial
  Synthetic oligonucleotide
ttgcttcagcttctcctgcatctcgatcgccatcatcacgcaggcgaccgcgtcctcctt

SEQ ID NO: 1631 - DNA, 60 bp, Artificial
  Synthetic oligonucleotide
accgacaagctcgaatccgaagacctgacggcgatgctcaaccgctatctcgccgagatg

SEQ ID NO: 1632 - DNA, 60 bp, Artificial
  Synthetic oligonucleotide
tggtcgatcgagaactgccaggacaggaattcatcgacggtcagcgtgtagcggctgcag

SEQ ID NO: 1633 - DNA, 60 bp, Artificial
  Synthetic oligonucleotide
ctgcatcaggaacacccagaaggcgtagatgccgaccgacaccgcgaccgaatagatcag

SEQ ID NO: 1634 - DNA, 60 bp, Artificial
  Synthetic oligonucleotide
tgcatcaggaacacccagaaggcgtagatgccgaccgacaccgcgaccgaatagatcagc

SEQ ID NO: 1635 - DNA, 60 bp, Artificial
  Synthetic oligonucleotide
acgcgcttgttggtcggaatgttcacgccggctatacgggccacagacttctctcctgtc

SEQ ID NO: 1636 - DNA, 60 bp, Artificial
  Synthetic oligonucleotide
gccagcggcatcaccgaatgggaccccgccaaagagaagatcttcaacaccggcatcatg

SEQ ID NO: 1637 - DNA, 60 bp, Artificial
  Synthetic oligonucleotide
acagaaagctgccgaacgtcatctgtccgatcgagagcgtccgtgtcctcacgctctgga

SEQ ID NO: 1638 - DNA, 60 bp, Artificial
  Synthetic oligonucleotide
gcgctgcatcgccgacttcaaccggatctacccgtcgatccagatcgaactgatcaccga

SEQ ID NO: 1639 - DNA, 60 bp, Artificial
  Synthetic oligonucleotide
ggatgcagatgggcgtagtacatcgaaatgtcgccgccgttggaatgcccgaccatggtg

SEQ ID NO: 1640 - DNA, 60 bp, Artificial
  Synthetic oligonucleotide
tgctggtcaacctgcgcaacatcttcacccggatggagccgaccaagcaggacatgcaca

SEQ ID NO: 1641 - DNA, 60 bp, Artificial
  Synthetic oligonucleotide
aacctgcgcaacatctttacccggatggagccgaccaagcaggacatgcacacgctgcac

SEQ ID NO: 1642 - DNA, 60 bp, Artificial
  Synthetic oligonucleotide
ttctacgtgctcatcgtctcggtcgacatcgcgctgatccacatcatgcatctggccgcg

SEQ ID NO: 1643 - DNA, 60 bp, Artificial
  Synthetic oligonucleotide
gcgatcgaggtaatcgcgatcaccatgggcgtgtatctgctgatctcgctggtcaccagc

SEQ ID NO: 1644 - DNA, 60 bp, Artificial
  Synthetic oligonucleotide
aaccgagttcgctcatgcgcccatgctccggttgatccgccaactgtacaggctcatcag

SEQ ID NO: 1645 - DNA, 60 bp, Artificial
  Synthetic oligonucleotide
tcgatctggtggtgatctcgcatttccacggcgaccacatcaacggcctgctcgatgcgt

SEQ ID NO: 1646 - DNA, 60 bp, Artificial
  Synthetic oligonucleotide
aacgaaaccggcaagtcgacgatctcgatccaaggcgtcagctacaatccgaccggcctc

SEQ ID NO: 1647 - DNA, 60 bp, Artificial
  Synthetic oligonucleotide
tatctcgattacgtccgcgctcccgccaatggctatttctcccggtcgctcgacatcgac

SEQ ID NO: 1648 - DNA, 60 bp, Artificial
  Synthetic oligonucleotide
aatgcagcaccgcatgagcgccgaactcctgcttgatccagcgatagaacgccgagaagg

SEQ ID NO: 1649 - DNA, 60 bp, Artificial
  Synthetic oligonucleotide
ctccgtgcgacaacggaaaatacggttcgatccggcgcatctgcgcctccgacagcaaaa

SEQ ID NO: 1650 - DNA, 60 bp, Artificial
  Synthetic oligonucleotide
gggcaactggtttgatcgtcatgcgatcgtggtgagcttgaagggccgctcgtagtaccg

SEQ ID NO: 1651 - DNA, 60 bp, Artificial
  Synthetic oligonucleotide
gtcccttatatgtggatcggcgatttcgtgcgctgtcacaccgtggtgcgggtgctgaag

SEQ ID NO: 1652 - DNA, 60 bp, Artificial
  Synthetic oligonucleotide
ccgacgcctcgcgaagcgcccctcacggacaggacgatgcggactataatcataatagga

SEQ ID NO: 1653 - DNA, 60 bp, Artificial
  Synthetic oligonucleotide
aagaaacttgccgctcgggctgtcatagacgttttccgagacctgggcggtgatcaggcc

SEQ ID NO: 1654 - DNA, 60 bp, Artificial
  Synthetic oligonucleotide
atatccgcgaagccgaacgaaatcttgccgccaccaatgcccagatcggacaggcggtag

SEQ ID NO: 1655 - DNA, 60 bp, Artificial
  Synthetic oligonucleotide
cggctccgttcgattattggaacgatcaacggccgggcgcgtcataaaggcctcgcttga

SEQ ID NO: 1656 - DNA, 60 bp, Artificial
  Synthetic oligonucleotide
acccagagcgacgtcaatttcatcgccgtcaacgggccggaactgctgtccaaatgggtc

SEQ ID NO: 1657 - DNA, 60 bp, Artificial
  Synthetic oligonucleotide
tctgggtgttaagagggcccaaccgatcttcagaaatctcagccacgatggcggtcgcgc

SEQ ID NO: 1658 - DNA, 60 bp, Artificial
  Synthetic oligonucleotide
acagtgtggccatccaccaattcaacttcacgcgctggctccgccgcttggatatcgagc

SEQ ID NO: 1659 - DNA, 60 bp, Artificial
  Synthetic oligonucleotide
gaagtttcggctcgcgacactggtggtctcaatggcgttggcgtcgtgcagttcgatcag

SEQ ID NO: 1660 - DNA, 60 bp, Artificial
  Synthetic oligonucleotide
tgtcgaaccagatccgcatcgaataattcagacggccgaacagcgacgccgatccgacgc

SEQ ID NO: 1661 - DNA, 60 bp, Artificial
  Synthetic oligonucleotide
accgccctgctggtgcgttccaccgaggcgctttccggaagctggatgttgatgaagaaa

SEQ ID NO: 1662 - DNA, 60 bp, Artificial
  Synthetic oligonucleotide
gacgacgccatgaggctttgctccgagttcgttccggatcgcgacaagatcacgctatgc

SEQ ID NO: 1663 - DNA, 60 bp, Artificial
  Synthetic oligonucleotide
ttctctatctaatttgggcctgccagttgaccgtccagatgtggcggcgcgagtccacgc

SEQ ID NO: 1664 - DNA, 60 bp, Artificial
  Synthetic oligonucleotide
agatacttcgccacatcccagccacggttgatggtaccgacgacgtgcgacttcggcact

SEQ ID NO: 1665 - DNA, 60 bp, Artificial
  Synthetic oligonucleotide
accaagccgtatggcgtcaagaccgtggcgagcctcaactcgatcatggtggatgcgaca

SEQ ID NO: 1666 - DNA, 60 bp, Artificial
  Synthetic oligonucleotide
aggagcagccaacggcctgcatgagcttcaactatcaccgcgagcatttcggcaccacct

SEQ ID NO: 1667 - DNA, 60 bp, Artificial
  Synthetic oligonucleotide
tggattttatcaacacgctgctgtcgccgctgtccgatgcgatccaggacgagctcggca

SEQ ID NO: 1668 - DNA, 60 bp, Artificial
  Synthetic oligonucleotide
tttgatatcgacgctgagcagcggcgtccggtacacgctgccgatgttcttgccggtgtt

SEQ ID NO: 1669 - DNA, 60 bp, Artificial
  Synthetic oligonucleotide
tgttcctgttgctgatgggcttcgcgctgctgtcggcgcatttcgagaagagcggcattc

SEQ ID NO: 1670 - DNA, 60 bp, Artificial
  Synthetic oligonucleotide
ttgcgcaaatacggcgtgcggttcggcgcctatcacatctatgtcccgtcgctgctgaag

SEQ ID NO: 1671 - DNA, 60 bp, Artificial
  Synthetic oligonucleotide
aactgcagctgatgcggttcgaaggcgagaactggaagctgttcggcgacgtgatcgacg

SEQ ID NO: 1672 - DNA, 60 bp, Artificial
  Synthetic oligonucleotide
tcgccaagaagtatccgatctacgattccgaggagatccccggcagcaccttctcgaccg

SEQ ID NO: 1673 - DNA, 60 bp, Artificial
  Synthetic oligonucleotide
ttcatctggtcgagattgccgcgcatctgctggatctggctgttgaccggaccgcattgc

SEQ ID NO: 1674 - DNA, 60 bp, Artificial
  Synthetic oligonucleotide
tcaacaatcagatccagcagatgcgcggcaatctcgaccagatgacctcgggcctcgagc

SEQ ID NO: 1675 - DNA, 60 bp, Artificial
  Synthetic oligonucleotide
ccatctgatccacgcctgccggcgcaatctcaagctcacctgcctgatgctcaacaacga

SEQ ID NO: 1676 - DNA, 60 bp, Artificial
  Synthetic oligonucleotide
aatcaggcccgcgacagctatatcatcacgctcgacgacatcaccgaactcgtctcggcg

SEQ ID NO: 1677 - DNA, 60 bp, Artificial
  Synthetic oligonucleotide
atcgctacatcaatcagccgagcccagatctgttcgccgagatcctgctgctgcgcgaag

SEQ ID NO: 1678 - DNA, 60 bp, Artificial
  Synthetic oligonucleotide
tcgctgttgcggacgatcatgtcgatcttgccgccgagattgcggatcgcttcgtcgaag

SEQ ID NO: 1679 - DNA, 60 bp, Artificial
  Synthetic oligonucleotide
tgtcgaagatcacggtgccgccctgcttcatgtaggcgtcgatcttgttgagcgcgtcct

SEQ ID NO: 1680 - DNA, 60 bp, Artificial
  Synthetic oligonucleotide
tctgaagatcgtcgcgagcaaccagggctaccaggtcaagggcgacgtcaagatcaacgg

SEQ ID NO: 1681 - DNA, 60 bp, Artificial
  Synthetic oligonucleotide
actgttggggccaatcgtcatcgaggtcttgtcgacgaacaggatctggaccgatcccgc

SEQ ID NO: 1682 - DNA, 60 bp, Artificial
  Synthetic oligonucleotide
gtagaagatgaacgtgccgacgaacaccatcagcaccgcgatggcgacgacgacgctcat

SEQ ID NO: 1683 - DNA, 60 bp, Artificial
  Synthetic oligonucleotide
gctctccggcaatcaggcggcgtcgctgtacgcaatctccatcttggtggtgttcttgtg

SEQ ID NO: 1684 - DNA, 60 bp, Artificial
  Synthetic oligonucleotide
aattttccgaggccaatgtcagcacctcgaccggcacggtgacgttacgcgcggtgtttc

SEQ ID NO: 1685 - DNA, 60 bp, Artificial
  Synthetic oligonucleotide
tcctgaaattcgctcaggtgctgcattccgacagtacggaagcgttcgcgtggggccaga

SEQ ID NO: 1686 - DNA, 60 bp, Artificial
  Synthetic oligonucleotide
ccgctgtcgctctatatcaactggcggctggcgatccttctgttcgcgctctgcatcgta

SEQ ID NO: 1687 - DNA, 60 bp, Artificial
  Synthetic oligonucleotide
attggagatttcgagattaccgagccggacgtcgtggccttcgaagcagcgcagcacgtc

SEQ ID NO: 1688 - DNA, 60 bp, Artificial
  Synthetic oligonucleotide
gagcgtttcgttgaccgtcggaccagtgtattgatgcgccgcctgcgggaaaacacgatg

SEQ ID NO: 1689 - DNA, 60 bp, Artificial
  Synthetic oligonucleotide
aggccggtttcggcgcttgcctagcatggggtttcttgccattcaatgcggcggaaaacg

SEQ ID NO: 1690 - DNA, 60 bp, Artificial
  Synthetic oligonucleotide
gtttcaccagatcgacattgacgtagacgatcggcagcgagatcgcgaacggcagcgcgt

SEQ ID NO: 1691 - DNA, 60 bp, Artificial
  Synthetic oligonucleotide
tctcacatccgtctcgatcgcgctggaagccgaaggctaccgcatcatgacctacaccga

SEQ ID NO: 1692 - DNA, 60 bp, Artificial
  Synthetic oligonucleotide
ttctgccagctgatcacggtgccgctgttcaaggatcacaagatcctgacccaggtcgcc

SEQ ID NO: 1693 - DNA, 60 bp, Artificial
  Synthetic oligonucleotide
tggtgcgcgacgagaagatcacgcagtcgcccttgttcagggtgatctcgggatgatcgt

SEQ ID NO: 1694 - DNA, 60 bp, Artificial
  Synthetic oligonucleotide
atcgagatccagccgcaatatcgcaacatgaagcaggtgctcgaccgccatcccgagctg

SEQ ID NO: 1695 - DNA, 60 bp, Artificial
  Synthetic oligonucleotide
agagtcaggctgccgaccagatgttcgatggtcttctgcgcacccagagcgatcgcgata

SEQ ID NO: 1696 - DNA, 60 bp, Artificial
  Synthetic oligonucleotide
attttgccggtttctggccacgacaccaacgcatcggtacgcgctgacgcctaacccgtt

SEQ ID NO: 1697 - DNA, 60 bp, Artificial
  Synthetic oligonucleotide
tcttggtctcgccgttgaggatcttgctgatcgtcttggcttcggtctcgagccgctgca

SEQ ID NO: 1698 - DNA, 60 bp, Artificial
  Synthetic oligonucleotide
atctcccgttgaaggccaaagcggtcgaatacgtgaaggtctgctcgatctacggcgccg

SEQ ID NO: 1699 - DNA, 60 bp, Artificial
  Synthetic oligonucleotide
accgggcccgaaaaggaatctcatggcgaagccagcagtgatcgtcgtaggcgcagacaa

SEQ ID NO: 1700 - DNA, 60 bp, Artificial
  Synthetic oligonucleotide
tgccaccgattccgaaatcatcgtgatgaacgcggccgggctgtcgccgtttcgactgtt

SEQ ID NO: 1701 - DNA, 60 bp, Artificial
  Synthetic oligonucleotide
caggcgatgagcgagtacatctccggcgtgatcctgtacgacgagacgatctggcagaac

SEQ ID NO: 1702 - DNA, 60 bp, Artificial
  Synthetic oligonucleotide
acctacggcaagaaggtctacacgctcgccgccgactataatttcggccagatctcggcc

SEQ ID NO: 1703 - DNA, 60 bp, Artificial
  Synthetic oligonucleotide
tgtcgaacaggccggtgacctcgagcagcagcgtcaagagcttggccatcgagatttcct

SEQ ID NO: 1704 - DNA, 60 bp, Artificial
  Synthetic oligonucleotide
cggatcacctttccctatctgctgctgatcacgctggtgacgctgtatggcgggatgctg

SEQ ID NO: 1705 - DNA, 60 bp, Artificial
  Synthetic oligonucleotide
atcgccggtcctgaatttcggcgtgatgatctcgtcgatgatgcgcttggccgtgacgtc

SEQ ID NO: 1706 - DNA, 60 bp, Artificial
  Synthetic oligonucleotide
atgatggcgcatcacgacgccacacggcagatggaccgcgacaatctgatcggcaacatc

SEQ ID NO: 1707 - DNA, 60 bp, Artificial
  Synthetic oligonucleotide
tgttcggcatcctgaccaacctgctgctgatcgcggtgtcgatcccgacccacaactatc

SEQ ID NO: 1708 - DNA, 60 bp, Artificial
  Synthetic oligonucleotide
tgaacatgaacagcacttcgtcgctctcgaccagcttgcgggtctgctcgaccgacttcg

SEQ ID NO: 1709 - DNA, 60 bp, Artificial
  Synthetic oligonucleotide
ccaggatggccagcttgcgctgcacgtccatgcttggaatctccttgattcagctcgcga

SEQ ID NO: 1710 - DNA, 60 bp, Artificial
  Synthetic oligonucleotide
aaatatggccccggcgccagcgacaccgaagtcaagatcggcaacatcgtgccttactcg

SEQ ID NO: 1711 - DNA, 60 bp, Artificial
  Synthetic oligonucleotide
agatcgagcagtgcatcgacaatctgatcggcgtcacccacgagatcggcgagatcaccg

SEQ ID NO: 1712 - DNA, 60 bp, Artificial
  Synthetic oligonucleotide
ggcgccaagatctggaccttcgtcacctattcgctgctccacgccaatctcagccacatc

SEQ ID NO: 1713 - DNA, 60 bp, Artificial
  Synthetic oligonucleotide
tcatcgaattcgccagctacggcgcgatgtggaaggggctgatcaacaacgacgtcgacg

SEQ ID NO: 1714 - DNA, 60 bp, Artificial
  Synthetic oligonucleotide
atcatctgcccgtattgctcgacgctgtatcgctacgcgcccgacctcaaatccggcgaa

SEQ ID NO: 1715 - DNA, 60 bp, Artificial
  Synthetic oligonucleotide
ttttcggcccatccggtcgaaaccatcgctgcctgcaccggtctgttcatgatcgtgctc

SEQ ID NO: 1716 - DNA, 60 bp, Artificial
  Synthetic oligonucleotide
gcgctcgaggaagtcatccgcaaatatccgacctccgaatacgccaaccaggccaagcag

SEQ ID NO: 1717 - DNA, 60 bp, Artificial
  Synthetic oligonucleotide
aaagactccaacgtgatgatctggctggcgcggaaagcgttcttcggtcgcgtcccgttc

SEQ ID NO: 1718 - DNA, 60 bp, Artificial
  Synthetic oligonucleotide
gggcgtggtctggcaggtcggcaagatctttcgccgcgacgagatggtctatcaattcga

SEQ ID NO: 1719 - DNA, 60 bp, Artificial
  Synthetic oligonucleotide
cctttgacgccatagctgccgtcattggtggtgtagatcagcgacagctggtcgccgaac

SEQ ID NO: 1720 - DNA, 60 bp, Artificial
  Synthetic oligonucleotide
atggctgaaggcagaactcgcgcgcggacaggccgacaatcagctgatgatcatcgccaa

SEQ ID NO: 1721 - DNA, 60 bp, Artificial
  Synthetic oligonucleotide
atggtgaagtcgatcgtcggcgacggcagcgcgacgtaaaatggcaccttgttgtcggca

SEQ ID NO: 1722 - DNA, 60 bp, Artificial
  Synthetic oligonucleotide
aattcggcgtcgcttccatctcacgtagcagcgcgttcatctcttccggcttgagcacgc

SEQ ID NO: 1723 - DNA, 60 bp, Artificial
  Synthetic oligonucleotide
agcaacacgggcgactgcgacttggcgatgatgctgaccttggccagcaatttgcggatc

SEQ ID NO: 1724 - DNA, 60 bp, Artificial
  Synthetic oligonucleotide
tcgtcgtgcacgtggctcatccgtcttgactacactgcgcacctgaccgaggaaaccgtt

SEQ ID NO: 1725 - DNA, 60 bp, Artificial
  Synthetic oligonucleotide
ttaaacacccgccatgacagaccttgcgctcgcctccgtcacctcgatctaccgctatcc

SEQ ID NO: 1726 - DNA, 60 bp, Artificial
  Synthetic oligonucleotide
acccattcccgcccgccgctctctcatcgcactcttcgccgtccttttggtcgcgtgggt

SEQ ID NO: 1727 - DNA, 60 bp, Artificial
  Synthetic oligonucleotide
aaggaacgcatctccgcgcaattcgacctcacgcccgccgcaaccgctcccgacctcatg

SEQ ID NO: 1728 - DNA, 60 bp, Artificial
  Synthetic oligonucleotide
tccgaacccagcgaaccgaccagctccgcacccacagaaaccaacacgccctcggattcg

SEQ ID NO: 1729 - DNA, 60 bp, Artificial
  Synthetic oligonucleotide
tcacagccacgacagacatcacccgccgagcagtcttcaacgaacaaaggacgccgcatg

SEQ ID NO: 1730 - DNA, 60 bp, Artificial
  Synthetic oligonucleotide
aaactcgacctgccacgatgaccgcgagccccgaccaagagccgccgatcaactctgaag

SEQ ID NO: 1731 - DNA, 60 bp, Artificial
  Synthetic oligonucleotide
atcgccgggttccgcaagtccatcgcccaggtcctccacattcccgccacccgtgatcag

SEQ ID NO: 1732 - DNA, 60 bp, Artificial
  Synthetic oligonucleotide
aaaggcagcagacacatggacgagacaaccgagcaaccccgatcaacgcggcaggactca

SEQ ID NO: 1733 - DNA, 60 bp, Artificial
  Synthetic oligonucleotide
accgtcgtcaccctgctgcccagcatcgaattctccacccgccagccctaccccgacgct

SEQ ID NO: 1734 - DNA, 60 bp, Artificial
  Synthetic oligonucleotide
tgagcggctgagggacctgaattactgcgcccgaccatgacgaaggcccgcttccccacg

SEQ ID NO: 1735 - DNA, 60 bp, Artificial
  Synthetic oligonucleotide
ttgccgttgccgcctctgaatctgctccctccgacgaggttccgttgcgccgtggtctgc

SEQ ID NO: 1736 - DNA, 60 bp, Artificial
  Synthetic oligonucleotide
acacttcgacctgcacgccatcgccgagggtctgcccgctgctgcgctcatcgaccagct

SEQ ID NO: 1737 - DNA, 60 bp, Artificial
  Synthetic oligonucleotide
tctcctgtccgtccgcaccgctcgacgccgtccccgcctcatcatcagcctgcacaacca

SEQ ID NO: 1738 - DNA, 60 bp, Artificial
  Synthetic oligonucleotide
ccccgcacacgccatagatggtcccgacgcccacgatcacgcgaccaagcaactggcccc

SEQ ID NO: 1739 - DNA, 60 bp, Artificial
  Synthetic oligonucleotide
ccgccgaccagatttccacccagcttcgaccacacatcgcaacttccgcaatcttacgcg

SEQ ID NO: 1740 - DNA, 60 bp, Artificial
  Synthetic oligonucleotide
tcaatcgaacccaggccctcgctgcatgtcgttcctcagctcatcgcggcccgcacgggt

SEQ ID NO: 1741 - DNA, 60 bp, Artificial
  Synthetic oligonucleotide
ttcaggcaacgctttccaacagcacccgccccgactgccttgtgcgaatgccgaacaatg

SEQ ID NO: 1742 - DNA, 60 bp, Artificial
  Synthetic oligonucleotide
tgaagaattacggcgtgcgcgacctgatcgaagctttctgcgatttcggcccctcacccc

SEQ ID NO: 1743 - DNA, 60 bp, Artificial
  Synthetic oligonucleotide
cgtggacagcggatgacggacggaacccagtaccttgccgcccttggattcgacgaattt

SEQ ID NO: 1744 - DNA, 60 bp, Artificial
  Synthetic oligonucleotide
cgcgcaattgaagctctgccatgaatacctaaccctttacgccgcctgccgtcagaccgg

SEQ ID NO: 1745 - DNA, 60 bp, Artificial
  Synthetic oligonucleotide
cgtcgagccagatgcgccttgcctggaaaccggaagccaatgaggtcttcgccatcatga

SEQ ID NO: 1746 - DNA, 60 bp, Artificial
  Synthetic oligonucleotide
cggccaccgtcgaaagagtttccgaatatgaccgccaagcatgccgctcttctcaccgtc

SEQ ID NO: 1747 - DNA, 60 bp, Artificial
  Synthetic oligonucleotide
tggtgccgttcgggcttgtcacctgttcgcgcagctttgaaggcgtgtccgtgctggcat

SEQ ID NO: 1748 - DNA, 60 bp, Artificial
  Synthetic oligonucleotide
ttaattcgaccagaaggggagcgcaatgccgctgagggcaaggatcgcgggcttagggat

SEQ ID NO: 1749 - DNA, 60 bp, Artificial
  Synthetic oligonucleotide
cggtgctgctcattctcctgccgacagccgccgtcattttctggagcctgaccaatttcg

SEQ ID NO: 1750 - DNA, 60 bp, Artificial
  Synthetic oligonucleotide
cgtacgtcgccttcacgccattcgcccttgtaataggtccacattgcccgtgtgtcggtc

SEQ ID NO: 1751 - DNA, 60 bp, Artificial
  Synthetic oligonucleotide
gcatgcaatccttctcgttctggctgcttgaaaacttcccggcactggggcgcttgggct

SEQ ID NO: 1752 - DNA, 60 bp, Artificial
  Synthetic oligonucleotide
gctgacgagcgccatgccgaccgtaaacgccaccagaatccagtgttcgccatagtcgta

SEQ ID NO: 1753 - DNA, 60 bp, Artificial
  Synthetic oligonucleotide
cgccgtcaccaacaattggaccctgaagtcggaatacctctacaccgacctcggcaagcg

SEQ ID NO: 1754 - DNA, 60 bp, Artificial
  Synthetic oligonucleotide
cgcttgccgaggtcggtgtagaggtattccgacttcagggtccaattgttggtgacggcg

SEQ ID NO: 1755 - DNA, 60 bp, Artificial
  Synthetic oligonucleotide
tgacggcaacatttcaacaatgtcaccgccacggacgaccgcgcctgaatacgccccgta

SEQ ID NO: 1756 - DNA, 60 bp, Artificial
  Synthetic oligonucleotide
aacagtttgagcatgatgccgacgaaagccacgctccacacgaacagcagcaggggcagc

SEQ ID NO: 1757 - DNA, 60 bp, Artificial
  Synthetic oligonucleotide
agcgtcgaggatcaggacagccatgttacggcccatcaccacgaggttgccatcggagtt

SEQ ID NO: 1758 - DNA, 60 bp, Artificial
  Synthetic oligonucleotide
tgctcccgaagcgatgccaaacagcgccgccgcacccaatacacccgtcatgagagtttt

SEQ ID NO: 1759 - DNA, 60 bp, Artificial
  Synthetic oligonucleotide
tatcgccagaaagagccacacgcgctgcatccatgatcgtatccttgccagccccactgg

SEQ ID NO: 1760 - DNA, 60 bp, Artificial
  Synthetic oligonucleotide
gcctgctttcagaagtagcctttgccgatatcaaccatctgctgcgccccggccatctgc

SEQ ID NO: 1761 - DNA, 60 bp, Artificial
  Synthetic oligonucleotide
gtcgatttgccggtcatcattgccatcgtctcgcctgccttcacattcgtacgcgccgtt

SEQ ID NO: 1762 - DNA, 60 bp, Artificial
  Synthetic oligonucleotide
ggcttgccattttgctgatcggttgcccttgtgcgctggtcatttccacgcctgctgcca

SEQ ID NO: 1763 - DNA, 60 bp, Artificial
  Synthetic oligonucleotide
tgatgtccgttcgccgtctcgcagatgatgccgtccagccagccactttcgcgtttaacg

SEQ ID NO: 1764 - DNA, 60 bp, Artificial
  Synthetic oligonucleotide
tgtcggcaagacccagatgacggagttcgccttcacgccggtcggcctcaatccgcatta

SEQ ID NO: 1765 - DNA, 60 bp, Artificial
  Synthetic oligonucleotide
aaattctcggtgccggacgcatggcgatcctgtttcgcatccgcatcccatccgcctttc

SEQ ID NO: 1766 - DNA, 60 bp, Artificial
  Synthetic oligonucleotide
tcggtcggagcggctcatcctccccgacgcgcccgctggctggacgcttgctgcttttgc

SEQ ID NO: 1767 - DNA, 60 bp, Artificial
  Synthetic oligonucleotide
gagccccaccagactaatgagccagacgaaggaacggagatagggaatgcccgccaggta

SEQ ID NO: 1768 - DNA, 60 bp, Artificial
  Synthetic oligonucleotide
cggttcgcctttatccgcccgaaaaccagcctcgccatgccgccgacgcaaaatagcaaa

SEQ ID NO: 1769 - DNA, 60 bp, Artificial
  Synthetic oligonucleotide
accagatcgcccgtatcgaagccgctttcgaccgccagcaccgccgccgtcaccttgtcg

SEQ ID NO: 1770 - DNA, 60 bp, Artificial
  Synthetic oligonucleotide
agaacggaatgttgttcaggtagtactgcgtgttttccggctcgaacgcgccccagccgc

SEQ ID NO: 1771 - DNA, 60 bp, Artificial
  Synthetic oligonucleotide
tgatcaacgcgtacatcatccagatcagcctgccgctgaacgcgctcggcttcgtgttcc

SEQ ID NO: 1772 - DNA, 60 bp, Artificial
  Synthetic oligonucleotide
atcaacgcgtacatcatccagatcagcctgccgctgaacgcgctcggcttcgtgtttcgc

SEQ ID NO: 1773 - DNA, 60 bp, Artificial
  Synthetic oligonucleotide
ccgcaacaggtcgccagcaaagagtgcgctttcatcaccaccagtgcccgcacgaatttc

SEQ ID NO: 1774 - DNA, 60 bp, Artificial
  Synthetic oligonucleotide
cgcccgatactgtcccgctgtataaaccgccagccaacaccccagaattccctacctcac

SEQ ID NO: 1775 - DNA, 60 bp, Artificial
  Synthetic oligonucleotide
gatccccgcccgaccagaaatcccgctcaaaacgctcggtatcttgcctaacccctcgta

SEQ ID NO: 1776 - DNA, 60 bp, Artificial
  Synthetic oligonucleotide
gacaaagcagcccttcgccctaccctccaatgactggctcagctcgacccaaagcagcta

SEQ ID NO: 1777 - DNA, 60 bp, Artificial
  Synthetic oligonucleotide
gcctgcacgcgcatcacgtctcgcatctttctcagtaagccagtcataccaaccgcgcca

SEQ ID NO: 1778 - DNA, 60 bp, Artificial
  Synthetic oligonucleotide
tgtagctgcacgcggccaacccaagtcccctccccaaagcgccaaattaccacccagtat

SEQ ID NO: 1779 - DNA, 60 bp, Artificial
  Synthetic oligonucleotide
cgtagtgacgtcccgctcctcttcccacttagcccaagcagtttgagttgagatcgcgca

SEQ ID NO: 1780 - DNA, 60 bp, Artificial
  Synthetic oligonucleotide
ccccgttgcttaccgaccgcctttacatccatataagccatcgtgacagcctgcccttgc

SEQ ID NO: 1781 - DNA, 60 bp, Artificial
  Synthetic oligonucleotide
cactgcggctaaagcggatcgtcagcgtgattccagcgactttgcccgttcccagcttca

SEQ ID NO: 1782 - DNA, 60 bp, Artificial
  Synthetic oligonucleotide
gcagtgccgtcttcaccgagcgccatgataattacgaaatctgccccttcggccccagtg

SEQ ID NO: 1783 - DNA, 60 bp, Artificial
  Synthetic oligonucleotide
gcgcttagcaggcttggtattgggtggctggcaaatggcgcgaggattattggctgcaga

SEQ ID NO: 1784 - DNA, 60 bp, Artificial
  Synthetic oligonucleotide
accagcaactacggcacctgtaacagcaccaaccgcaaaaggagcccaaccgccatgcca

SEQ ID NO: 1785 - DNA, 60 bp, Artificial
  Synthetic oligonucleotide
aggtaggcgcccatgctgttgctgaagaagctgctttcgtgcgggatgaagaaggcgtgg

SEQ ID NO: 1786 - DNA, 60 bp, Artificial
  Synthetic oligonucleotide
aattgtccgtgtagttgtccggcatgttctggtagaccttccagctcacgcccgcggcct

SEQ ID NO: 1787 - DNA, 60 bp, Artificial
  Synthetic oligonucleotide
agatccatcttcacgttcaggctcagcccgtggtagctgcagccgttgcggatcttcagg

SEQ ID NO: 1788 - DNA, 60 bp, Artificial
  Synthetic oligonucleotide
agcggcagcacgacctggtagctcagcgtcatctcgaagatcatcaggatcgccatcagc

SEQ ID NO: 1789 - DNA, 60 bp, Artificial
  Synthetic oligonucleotide
tcccggcgaacctgctgttcccggtgttcgtgatcgtgatcgtccacttccacctgaatg

SEQ ID NO: 1790 - DNA, 60 bp, Artificial
  Synthetic oligonucleotide
acgcgccggccgttggaaagcgcatccatcacgaaatcgattgaccacacctcgttgggt

SEQ ID NO: 1791 - DNA, 60 bp, Artificial
  Synthetic oligonucleotide
ttgaccttctcccgaatcgccaacactgcttcgcgtttggcttgcgggctcagggctttc

SEQ ID NO: 1792 - DNA, 60 bp, Artificial
  Synthetic oligonucleotide
ctttccaacggccggcgcgtgaagtgcctgaccgtcatcgacgatttcacgaaagaggct

SEQ ID NO: 1793 - DNA, 60 bp, Artificial
  Synthetic oligonucleotide
tcaggtttgtatgtcgctcgggcattggaccgtgcagctcgcttccgtggctatcgcaag

SEQ ID NO: 1794 - DNA, 60 bp, Artificial
  Synthetic oligonucleotide
aatcgtcgaacagcatcatgtcctcacctcagcgaagctaactccggtgcgctgccctgc

SEQ ID NO: 1795 - DNA, 60 bp, Artificial
  Synthetic oligonucleotide
tgaaagccgagctctgatcatggccgaacttgcaaccatcgcccgcccttacgcagaagc

SEQ ID NO: 1796 - DNA, 60 bp, Artificial
  Synthetic oligonucleotide
aacaggaacaggataaggaaccgtcatggctaactccgcacaagcacgcaagcgcgcccg

SEQ ID NO: 1797 - DNA, 60 bp, Artificial
  Synthetic oligonucleotide
acacgctgtccatcgctgcgccgaaccgcttcaagctggactgggtcaagagccagtttt

SEQ ID NO: 1798 - DNA, 60 bp, Artificial
  Synthetic oligonucleotide
tccttcgtcggtccagatgtacgtgatgtccgagctaaacacctgattcggcgcgtccgg

SEQ ID NO: 1799 - DNA, 60 bp, Artificial
  Synthetic oligonucleotide
tctatgtgctgacgcgctacaaccgcagcttcttctacgcgctcaccgtgtaccagctcg

SEQ ID NO: 1800 - DNA, 60 bp, Artificial
  Synthetic oligonucleotide
tcacgatgtgatcgctcatgaagtggtgccacgagttcggctgcgtccagaacgacaggc

SEQ ID NO: 1801 - DNA, 60 bp, Artificial
  Synthetic oligonucleotide
tcgtgcccttcccgccgatcgagaagaacgagatctatgtgatcgcgaagctcgacgagc

SEQ ID NO: 1802 - DNA, 60 bp, Artificial
  Synthetic oligonucleotide
atcacatagatctcgttcttctcgatcggcgggaagggcacgaagtagcgcgcctgctcg

SEQ ID NO: 1803 - DNA, 60 bp, Artificial
  Synthetic oligonucleotide
tctaccagaacatgccggacaacttcaccgacaacgcgcttgccggcttcaggcagtacc

SEQ ID NO: 1804 - DNA, 60 bp, Artificial
  Synthetic oligonucleotide
tcgtcgaccatggcatctcaggtttgtatgtcgctcgggcattggaccgtgcagctcgct

SEQ ID NO: 1805 - DNA, 60 bp, Artificial
  Synthetic oligonucleotide
ttctggttctacatgatgcggcagatgcagggaggcggcaaaggcggcgcattctcgttc

SEQ ID NO: 1806 - DNA, 60 bp, Artificial
  Synthetic oligonucleotide
ttcgaggccgactgcgtgatcccgtcgttcaccaacccgaacaacctgtcgatcgtgtgc

SEQ ID NO: 1807 - DNA, 60 bp, Artificial
  Synthetic oligonucleotide
ttccaggccgactgcgtgatcccgtcgttcaccaacccgaacaacctgtcgatcgtgtgc

SEQ ID NO: 1808 - DNA, 60 bp, Artificial
  Synthetic oligonucleotide
tgttcgtcaccggcgactggatcacgccgcgctacaacggctacaagtacttcgagaagc

SEQ ID NO: 1809 - DNA, 60 bp, Artificial
  Synthetic oligonucleotide
aaacggtcgacgagcgtctgcagccggtccgattccttgatgatcacctgcgtgtactcg

SEQ ID NO: 1810 - DNA, 60 bp, Artificial
  Synthetic oligonucleotide
tgagcgtcgaattcatcggcatgatccagagccagaagcagtcggaaatccacccgcccg

SEQ ID NO: 1811 - DNA, 60 bp, Artificial
  Synthetic oligonucleotide
aagcatgtgtttgcgaacctcggcgacggcacttacttccactcggggttgctggcgatc

SEQ ID NO: 1812 - DNA, 60 bp, Artificial
  Synthetic oligonucleotide
ttcatgatcatgccggtgttctccgtctacgcgaaaaccatcccgggcggcgacaacgtg

SEQ ID NO: 1813 - DNA, 60 bp, Artificial
  Synthetic oligonucleotide
gcctcgattacttacgcagacccagcttctcgatcagtgcgcggtaacggtcggcatcct

SEQ ID NO: 1814 - DNA, 60 bp, Artificial
  Synthetic oligonucleotide
cgacatgtacatgaagcgtgcgaacagcccttcgatcagcatgttgccgccgatcagccc

SEQ ID NO: 1815 - DNA, 60 bp, Artificial
  Synthetic oligonucleotide
cgacatgtacatgaagcgcgcgaacaacccttcgatcagcatgttgccgccgatcagccc

SEQ ID NO: 1816 - DNA, 60 bp, Artificial
  Synthetic oligonucleotide
gacatgcccgccaatgtagtaaccggccgtgaccgttatgtggcacgaccgtgtcctttc

SEQ ID NO: 1817 - DNA, 60 bp, Artificial
  Synthetic oligonucleotide
tttcaaacggacgtagcgccacgtctacatagtaggacatgccgacgcggacgcgaagcc

SEQ ID NO: 1818 - DNA, 60 bp, Artificial
  Synthetic oligonucleotide
cagtctgcacgcacacgtgaacgattgcacgcggagattgacccgatttgggcaagagcg

SEQ ID NO: 1819 - DNA, 60 bp, Artificial
  Synthetic oligonucleotide
tttcatcggcaatcgaatcgttcagtgaatcgaagcggcggcgcatgctgccgcgtcgtg

SEQ ID NO: 1820 - DNA, 60 bp, Artificial
  Synthetic oligonucleotide
ttcgacaaacttgcgctgggccagcactggcgggaaccacgtgacggtcaggacaaagta

SEQ ID NO: 1821 - DNA, 60 bp, Artificial
  Synthetic oligonucleotide
aaggagaacacccatgagcgaaccgaaagaccagagcatcgaggacgaactggacgcggc

SEQ ID NO: 1822 - DNA, 60 bp, Artificial
  Synthetic oligonucleotide
aatgagcgccaagaccaacgccaagaagaaggagcaggacaagccgcaatcgtccgggct

SEQ ID NO: 1823 - DNA, 60 bp, Artificial
  Synthetic oligonucleotide
tggctctggccgcccctggcgacgacattgccgacaagtatttcaacaagaccaacccga

SEQ ID NO: 1824 - DNA, 60 bp, Artificial
  Synthetic oligonucleotide
atgaccacagcgaaggagatcgaccatgaacgagcaaaccaccaccaacaccgccgccca

SEQ ID NO: 1825 - DNA, 60 bp, Artificial
  Synthetic oligonucleotide
gcccgccttgtctactttctgattcgtccaagcgccgtccttttcggcctgaacgatgcg

SEQ ID NO: 1826 - DNA, 60 bp, Artificial
  Synthetic oligonucleotide
tcgtgtccgacagcttgcgcttcgtgatgttgaagtaccgcgacagcgacggcgtgcatt

SEQ ID NO: 1827 - DNA, 60 bp, Artificial
  Synthetic oligonucleotide
aactcccctgccgctcctgcttgaatcgaccgacctggacaaagaagcccttgacaccct

SEQ ID NO: 1828 - DNA, 60 bp, Artificial
  Synthetic oligonucleotide
aatcatggcccaggtcgcgcaggacgtgtacgacacaccgaccggcaagcacctgttgat

SEQ ID NO: 1829 - DNA, 60 bp, Artificial
  Synthetic oligonucleotide
tccacatcgccatcaacaagattcacccgacgcggcacacgatgcacgagccgtactacc

SEQ ID NO: 1830 - DNA, 60 bp, Artificial
  Synthetic oligonucleotide
tcagcttcatgttgatggtctggaggatcaagatcggatcgtcgcggcccacggcgatgc

SEQ ID NO: 1831 - DNA, 60 bp, Artificial
  Synthetic oligonucleotide
aagcacacgaagcagcagatcaaggacatgcagctctcgctgttcgacctggctccctgg

SEQ ID NO: 1832 - DNA, 60 bp, Artificial
  Synthetic oligonucleotide
tcttgtgcgccaagtcgttgaagtcggtgtgctgcttcatcgtggacagcgccgcgatct

SEQ ID NO: 1833 - DNA, 60 bp, Artificial
  Synthetic oligonucleotide
ggcaggactccaatcagaagaacaggtagccggccttgctcatggggatgcggatcaacc

SEQ ID NO: 1834 - DNA, 60 bp, Artificial
  Synthetic oligonucleotide
tcctgaacctgcttctgctcgaaggccagcacgtagtcgtgaatcttctcggcatcggcg

SEQ ID NO: 1835 - DNA, 60 bp, Artificial
  Synthetic oligonucleotide
aggttgtcgtcaagggaaagccctgagcccgcaagccaaacgcgaagcagtgttggcgat

SEQ ID NO: 1836 - DNA, 60 bp, Artificial
  Synthetic oligonucleotide
gcttcgcgtttggcttgcgggctcagggctttcccttgacgacaaccttcaacgcttcca

SEQ ID NO: 1837 - DNA, 60 bp, Artificial
  Synthetic oligonucleotide
ttgtcgtcaagggaaagccctgagcccgcaagccaaacgcgaagcagtgttggcgattcg

SEQ ID NO: 1838 - DNA, 60 bp, Artificial
  Synthetic oligonucleotide
tcacatagatctcgttcttctcgatcggcgggaagggcacgaagtaacgcgcctggtcgc

SEQ ID NO: 1839 - DNA, 60 bp, Artificial
  Synthetic oligonucleotide
tgtcgatcctgctgatcgtgatgacgtcgatgatgggttcgtcgcgcacgctgtaccagg

SEQ ID NO: 1840 - DNA, 60 bp, Artificial
  Synthetic oligonucleotide
atggcttgtcggccagcatcttctcgttctggctgtggatgaaaggcatccggcacgtgc

SEQ ID NO: 1841 - DNA, 60 bp, Artificial
  Synthetic oligonucleotide
tacacagaggtcgctccatgcgcgtcgaacgggttccataccgcttactcactgtcgcga

SEQ ID NO: 1842 - DNA, 60 bp, Artificial
  Synthetic oligonucleotide
cttgatgtgggccaacaaggcatcgtcactgagtcggcctctatctggcctgtcggtgct

SEQ ID NO: 1843 - DNA, 60 bp, Artificial
  Synthetic oligonucleotide
agtcggtgtgaggtatgcgttcatcgagcgaaaccgacgttactggccggtctcggtcct

SEQ ID NO: 1844 - DNA, 60 bp, Artificial
  Synthetic oligonucleotide
tcaccagccgtaccgcttccagcttgaattccagcgtgtactgcgcccgctttgtcttgc

SEQ ID NO: 1845 - DNA, 60 bp, Artificial
  Synthetic oligonucleotide
ccagccgtaccgcttccagcttgaattccagcgtgtactgcgcccgctttgtcttgcttg

SEQ ID NO: 1846 - DNA, 60 bp, Artificial
  Synthetic oligonucleotide
gaccggccagtaacgtcggtttcgctcgatgaacgcatacctcacaccgactccttcgca

SEQ ID NO: 1847 - DNA, 60 bp, Artificial
  Synthetic oligonucleotide
aattcaagctggaagcggtacggctggtgaagagcgggcagagcatggcagtggttagcg

SEQ ID NO: 1848 - DNA, 60 bp, Artificial
  Synthetic oligonucleotide
gctaaccactgccatgctctgcccgctcttcaccagccgtaccgcttccagcttgaattc

SEQ ID NO: 1849 - DNA, 60 bp, Artificial
  Synthetic oligonucleotide
acaaagcgggcgcagtacacgctggaattcaagctggaagcggtacggctggtgaagagc

SEQ ID NO: 1850 - DNA, 60 bp, Artificial
  Synthetic oligonucleotide
cggcggtcgccacataggttatgtcgctcgtccagacttgattgggtgctgctgggctaa

SEQ ID NO: 1851 - DNA, 60 bp, Artificial
  Synthetic oligonucleotide
aacctatgtggcgaccgccgaaggctggctctacctggtggtcatcatcgacctgttcag

SEQ ID NO: 1852 - DNA, 60 bp, Artificial
  Synthetic oligonucleotide
aatcgtggttcgagttggttgtcgcgatgtacttgcgcttgtggcgggcacggatgccgt

SEQ ID NO: 1853 - DNA, 60 bp, Artificial
  Synthetic oligonucleotide
atccgtgcccgccacaagcgcaagtacatcgcgacaaccaactcgaaccacgatttgccg

SEQ ID NO: 1854 - DNA, 60 bp, Artificial
  Synthetic oligonucleotide
gcttttataatgccagccgactccactcgacgctgggctacgtcagccccatgacgttcg

SEQ ID NO: 1855 - DNA, 60 bp, Artificial
  Synthetic oligonucleotide
ccgggctgcctaattccctcggttatgggattcgtggaacaggggcaaggtcagagtgtc

SEQ ID NO: 1856 - DNA, 60 bp, Artificial
  Synthetic oligonucleotide
ttgatgtccgacaggcggaacagcgtcaggaaatcggcgcagttgaagtcgggatcccac

SEQ ID NO: 1857 - DNA, 60 bp, Artificial
  Synthetic oligonucleotide
tgatgacggagatcatcaacagccagcccgacatggaagtggttgggactgcgcccgatc

SEQ ID NO: 1858 - DNA, 60 bp, Artificial
  Synthetic oligonucleotide
ccgtaacgtggatgccgagacttgccaccgttgttgcaggccaatccgttcactctgcac

SEQ ID NO: 1859 - DNA, 60 bp, Artificial
  Synthetic oligonucleotide
ttcgtcgtgatcggcagattgcgggtgatctcgtagcccatcagcagcgtgatctcgcgc

SEQ ID NO: 1860 - DNA, 60 bp, Artificial
  Synthetic oligonucleotide
gcgcacacgggcgacttgaacaaggtcaagcgcatcgtcaaggtgatgagcctcgtgaac

SEQ ID NO: 1861 - DNA, 60 bp, Artificial
  Synthetic oligonucleotide
cgacgaccacgcgcatgatctacgcgatggagcgcaacaacacgatgccgaagatcttcg

SEQ ID NO: 1862 - DNA, 60 bp, Artificial
  Synthetic oligonucleotide
cgacgacgacccgcatgatctacgcgatggagcgcaacaacacgatgccgaagatcttcg

SEQ ID NO: 1863 - DNA, 60 bp, Artificial
  Synthetic oligonucleotide
gggctcgcgtacttgaccgtgttgttcacgcggaacgagttgtccgtgttgtcgttgtcg

SEQ ID NO: 1864 - DNA, 60 bp, Artificial
  Synthetic oligonucleotide
atgccgttcaagccgaccgacttcacgcaggtgaaccatcagatcaaccgcgtgctggtc

SEQ ID NO: 1865 - DNA, 60 bp, Artificial
  Synthetic oligonucleotide
tttaaggcaagcctccatgttcactccctgccccaccgaacgcagcaaggccattgccga

SEQ ID NO: 1866 - DNA, 60 bp, Artificial
  Synthetic oligonucleotide
atcgggcatctggaagccgagcggattctggaaattcggcatcaccatgcacgcggcgat

SEQ ID NO: 1867 - DNA, 60 bp, Artificial
  Synthetic oligonucleotide
ttcctctatttcgtcgcccgcaacgatgcgcagatcaagagctccggctaccggatcagc

SEQ ID NO: 1868 - DNA, 60 bp, Artificial
  Synthetic oligonucleotide
atccacatcgcgcacttgcccgatgccgtcagcgtcaggttctcgttgaagccgttcgaa

SEQ ID NO: 1869 - DNA, 60 bp, Artificial
  Synthetic oligonucleotide
aaatcccacgtgcccggatagatcgtgcccttcagcggaatcacgtcgccgaccttgaag

SEQ ID NO: 1870 - DNA, 60 bp, Artificial
  Synthetic oligonucleotide
gctcttgctgaaatggcacgccgactggaagccgcacgccatcgtgatgtgcatgatcga

SEQ ID NO: 1871 - DNA, 60 bp, Artificial
  Synthetic oligonucleotide
ctcttgctgaagtggcatgccgactggaagccgcacgccatcgtgatgtgcatgatcgac

SEQ ID NO: 1872 - DNA, 60 bp, Artificial
  Synthetic oligonucleotide
aaccgcgtcgacgagatcggcatgacgctgcgcacgatcaaccagctcggattgatgttc

SEQ ID NO: 1873 - DNA, 60 bp, Artificial
  Synthetic oligonucleotide
aaccgcgtcgacgagatcggcatgacgctgcgcacgatcaaccagctcgggctgatgttc

SEQ ID NO: 1874 - DNA, 60 bp, Artificial
  Synthetic oligonucleotide
tccggtgttcatgctgcagttcggcgacaccaacttcctgcgcgacgacctcacctacaa

SEQ ID NO: 1875 - DNA, 60 bp, Artificial
  Synthetic oligonucleotide
tgccgaggatgttgatgaacgtcgacagcgccttcgactggtcgccgtagaaggtctgct

SEQ ID NO: 1876 - DNA, 60 bp, Artificial
  Synthetic oligonucleotide
tgttgtgcatgaacacctcgacgccgaagcacgcgccgtacgtgacgaacagcatccaca

SEQ ID NO: 1877 - DNA, 60 bp, Artificial
  Synthetic oligonucleotide
acaggatcgcttccttgctctcgtaatagtgatagagccgcgccttcgacgtgccgctcg

SEQ ID NO: 1878 - DNA, 60 bp, Artificial
  Synthetic oligonucleotide
acgtgaagatcctgtcgatctgggaaggcacgaactacatccaggcgcaggacctcgtgc

SEQ ID NO: 1879 - DNA, 60 bp, Artificial
  Synthetic oligonucleotide
caggccgatgatgatgccgataccgatggcggtcagaccctggatgttggcgatgaaagc

SEQ ID NO: 1880 - DNA, 60 bp, Artificial
  Synthetic oligonucleotide
acatatacatgaagcgcgcgaacagcccttcgatcagcatgttgccgccgatcagcccgc

SEQ ID NO: 1881 - DNA, 60 bp, Artificial
  Synthetic oligonucleotide
aacgcatcgtcctggagatttctcaatggctaagcccgcaaagcgcgttgccgtcaccgg

SEQ ID NO: 1882 - DNA, 60 bp, Artificial
  Synthetic oligonucleotide
tttatcgaggcgaccgagtacctgtcggagatccgcccggctgtcagcatctacggttct

SEQ ID NO: 1883 - DNA, 60 bp, Artificial
  Synthetic oligonucleotide
tgtgagaggtcgctccatgcgcgtcgaacgggttccataccgcttaatcactgccgcaac

SEQ ID NO: 1884 - DNA, 60 bp, Artificial
  Synthetic oligonucleotide
tggtagaggtcgctccatgcgcgtcgaacgggttccataccgcttaatcactgtcgcgac

SEQ ID NO: 1885 - DNA, 60 bp, Artificial
  Synthetic oligonucleotide
acaaaaccttcagaccgagcgccttcgccttcttctcgaattcgttcgcgaggccctggc

SEQ ID NO: 1886 - DNA, 60 bp, Artificial
  Synthetic oligonucleotide
tacgatcaggaaagcctaatgcgagaactgccgacgcctacgctcccctttgcctcgctg

SEQ ID NO: 1887 - DNA, 60 bp, Artificial
  Synthetic oligonucleotide
aaagcctaatgcgagaactgccgacgcctacgctcccttttgcctcgcttcccctcgaca

SEQ ID NO: 1888 - DNA, 60 bp, Artificial
  Synthetic oligonucleotide
aagcctaatgcgagaactgccgacgcctacgctcccatttgcctcgctgcctcttgacct

SEQ ID NO: 1889 - DNA, 60 bp, Artificial
  Synthetic oligonucleotide
aagcctaatgcgagaactgccgacgcctacgctcccttttgcctcgctgcctcttgacct

SEQ ID NO: 1890 - DNA, 60 bp, Artificial
  Synthetic oligonucleotide
ttcgatttcggcggcgtgctgatcgactggagccccgagtacctttaccgggagctgatt

SEQ ID NO: 1891 - DNA, 60 bp, Artificial
  Synthetic oligonucleotide
tcgacttccgcgcgatcctgacgaagatcaagggcgaaaaccccgacgcgatcatgtacg

SEQ ID NO: 1892 - DNA, 60 bp, Artificial
  Synthetic oligonucleotide
cgcccgtgcgcttgaacgtgaagatctcctgcatgttgatgatgtcgccttccatcccgg

SEQ ID NO: 1893 - DNA, 60 bp, Artificial
  Synthetic oligonucleotide
cgtcgctgctgatcattgtcgtcgtcacgatggacttcatggcgcaggtgcagtcgtacg

SEQ ID NO: 1894 - DNA, 60 bp, Artificial
  Synthetic oligonucleotide
tgcatcgaaatgctgaacgcatcgaacctgtcgttcgcgctgtgtccgctgctgaccgac

SEQ ID NO: 1895 - DNA, 60 bp, Artificial
  Synthetic oligonucleotide
gtggtcccgccgacaggaatcgaacctgtatcccacgcttaggaggcatgtgcactatcc

SEQ ID NO: 1896 - DNA, 60 bp, Artificial
  Synthetic oligonucleotide
tggatagtgcacgcgcctcctaagcgtgagatacaggttcgattcctgtcggcgggacca

SEQ ID NO: 1897 - DNA, 60 bp, Artificial
  Synthetic oligonucleotide
taccttgttgaagcgcatgccctcgatgatgcccgcgtagtcggtcgcgaagaacgcctt

SEQ ID NO: 1898 - DNA, 60 bp, Artificial
  Synthetic oligonucleotide
tttctgtacggcggcgtcgtcaccggacaccactggctcaacgacaagcagttcgtcgat

SEQ ID NO: 1899 - DNA, 60 bp, Artificial
  Synthetic oligonucleotide
agtttccggacacgcgcttcctgaaggaactgttcgtgatcgaccgcgaccgcatcacgt

SEQ ID NO: 1900 - DNA, 60 bp, Artificial
  Synthetic oligonucleotide
tgccggtcaaggaactgtgcaggaagcatgggttcagtgacgcgtcgttctacacctggc

SEQ ID NO: 1901 - DNA, 60 bp, Artificial
  Synthetic oligonucleotide
tcgtgttgttgcgctccatcgcgtagatcatgcgggtggtcgtcgccatgtaggtcgtac

SEQ ID NO: 1902 - DNA, 60 bp, Artificial
  Synthetic oligonucleotide
ttctgacgaagatcaagggcgaaaacccggacgcgatcatgtacggcggcatggacgcca

SEQ ID NO: 1903 - DNA, 60 bp, Artificial
  Synthetic oligonucleotide
tcgaactgtacgaaggcgtgctgaaggaggaaggcgagatccgcacgttcctgcaggaag

SEQ ID NO: 1904 - DNA, 60 bp, Artificial
  Synthetic oligonucleotide
ttcgtgatgcacgcgaagaactacatgaacgtcgagccgaagctgccgccgccgatctac

SEQ ID NO: 1905 - DNA, 60 bp, Artificial
  Synthetic oligonucleotide
tcgtagatgttgttgatcacctggaagatcgacgtgaagatccgcgagccgcccggcgtg

SEQ ID NO: 1906 - DNA, 60 bp, Artificial
  Synthetic oligonucleotide
agttccgcaacccggtgatgttctgcgtgtacgtcggcagcatcctgaccacgatcctgt

SEQ ID NO: 1907 - DNA, 60 bp, Artificial
  Synthetic oligonucleotide
gccaacactgcttcgcgtttggcttgcgggctcagggctttcccttgacgacaaccttca

SEQ ID NO: 1908 - DNA, 60 bp, Artificial
  Synthetic oligonucleotide
ggcttgcgggctcagggctttcccttgacgacgaccttcaacgcttccatgtcgagcatt

SEQ ID NO: 1909 - DNA, 60 bp, Artificial
  Synthetic oligonucleotide
ttgaaggtcgtcgtcaagggaaagccctgagcccgcaagccaaacgcgaagcagtatcgg

SEQ ID NO: 1910 - DNA, 60 bp, Artificial
  Synthetic oligonucleotide
gcgttgaaggttgtcgtcaagggaaagccctgagcccgcaagccaaacgcgaagcagtgt

SEQ ID NO: 1911 - DNA, 60 bp, Artificial
  Synthetic oligonucleotide
agcgttgaaggttgtcgtcaagggaaagccctgagcccgcaagccaaacgcgaagcagtg

SEQ ID NO: 1912 - DNA, 60 bp, Artificial
  Synthetic oligonucleotide
tggaagcgttgaaggttgtcgtcaagggaaagccctgagcccgcaagccaaacgcgaagc

SEQ ID NO: 1913 - DNA, 60 bp, Artificial
  Synthetic oligonucleotide
cggtcgagcaggtcgaacaggatcgcttccttgctctcgtaatagtgatagagccgcgcc

SEQ ID NO: 1914 - DNA, 60 bp, Artificial
  Synthetic oligonucleotide
tacgccatcgatttcacggtgcggaaatcgtccgagccgccgccttcgaccatgtagcac

SEQ ID NO: 1915 - DNA, 60 bp, Artificial
  Synthetic oligonucleotide
atgcgacatcaccttcaggccgagcgccttcgccttcttctcgaattcgttcgcgagacc

SEQ ID NO: 1916 - DNA, 60 bp, Artificial
  Synthetic oligonucleotide
accactattacgagagcaaggaagcgatcctgttcgacctgctggaccgctacacgcgcc

SEQ ID NO: 1917 - DNA, 60 bp, Artificial
  Synthetic oligonucleotide
actggtcgttcatcagcacgatcatcacgttcgcgttttcctgcacggcggtcgcgagct

SEQ ID NO: 1918 - DNA, 60 bp, Artificial
  Synthetic oligonucleotide
ccgcgtactgcagcaccgggaaatacgacgggaagtgcagcgtgaatttccagccttcct

SEQ ID NO: 1919 - DNA, 60 bp, Artificial
  Synthetic oligonucleotide
gccatgcgccccttggttttgcgggaaatagccgatacactgggtctacacgagtccacg

SEQ ID NO: 1920 - DNA, 60 bp, Artificial
  Synthetic oligonucleotide
aacgacaggtcggcgaaggtctggaagttggtcgtcgagaacgacgcgaactccatcagc

SEQ ID NO: 1921 - DNA, 60 bp, Artificial
  Synthetic oligonucleotide
acatgtagcaaagcttgccttccttgcccggctgcgcgagcacgaacgacgaatgacgca

SEQ ID NO: 1922 - DNA, 60 bp, Artificial
  Synthetic oligonucleotide
atcagcccgagctggttgatcgtgcgcagcgtcatgccgatctcgtcgacgcggttcatc

SEQ ID NO: 1923 - DNA, 60 bp, Artificial
  Synthetic oligonucleotide
aaaacagcagcgccatcacgatcagcgccgcatacatgttcacgtacgacgcccagccct

SEQ ID NO: 1924 - DNA, 60 bp, Artificial
  Synthetic oligonucleotide
aatacacgcagcagggctacaagacgacgttccggatgatgacgtccgacacgcagcagg

SEQ ID NO: 1925 - DNA, 60 bp, Artificial
  Synthetic oligonucleotide
tatgatggacgacccagaatcgctttccctggcactgcccgacggcactaaggtctctgc

SEQ ID NO: 1926 - DNA, 60 bp, Artificial
  Synthetic oligonucleotide
gcgtctcgcagatcaacaactgcgcctattgcctcgacatgcatgcacgcgacctgctga

SEQ ID NO: 1927 - DNA, 60 bp, Artificial
  Synthetic oligonucleotide
tgttgtttggcccagccgagcagtgatatccgtcgagcgagagacatcgtcatcccgagc

SEQ ID NO: 1928 - DNA, 60 bp, Artificial
  Synthetic oligonucleotide
tcaaatgggtgtgccctcccaggacgcctttccgttcaagctctggtcacgcattcaggc

SEQ ID NO: 1929 - DNA, 60 bp, Artificial
  Synthetic oligonucleotide
acaggtcgatgaaggtccgaagcgtgtctaccatgccggcgaaagcttcttcgaggagcc

SEQ ID NO: 1930 - DNA, 60 bp, Artificial
  Synthetic oligonucleotide
ccccggaaaaggtgaaggcgatcaatagcccaagcagtgcgaatatcgcgcttgcgaccg

SEQ ID NO: 1931 - DNA, 60 bp, Artificial
  Synthetic oligonucleotide
aggtcaatctgagcatcggcatctatttcgacgacgacggccggattccggtgatgggcg

SEQ ID NO: 1932 - DNA, 60 bp, Artificial
  Synthetic oligonucleotide
atcacgatgttcttgaccgcctgcagcttcggcacgtagttgcgcgtctcgttcggcatc

SEQ ID NO: 1933 - DNA, 60 bp, Artificial
  Synthetic oligonucleotide
ttacgatgttcttgaccgcctgcagcttcggcacgtagttgcgcgtctcgttcggcatcc

SEQ ID NO: 1934 - DNA, 60 bp, Artificial
  Synthetic oligonucleotide
aaatccaacctcaagctgccggtagagcagatgttgcccgatggctcgtacctgagccgc

SEQ ID NO: 1935 - DNA, 60 bp, Artificial
  Synthetic oligonucleotide
atcgggcaacatctgctctaccggcagcttgaggttggatttgacccgccaggccagctt

SEQ ID NO: 1936 - DNA, 60 bp, Artificial
  Synthetic oligonucleotide
atggccagaacacgcaagacgctgccgtcgagagttgacgttgcgcatttgatcagcgcc

SEQ ID NO: 1937 - DNA, 60 bp, Artificial
  Synthetic oligonucleotide
tttcgacggcgagtgggagaagaaggtcgtcgagcggatcctgcacaacctgtcgatcct

SEQ ID NO: 1938 - DNA, 60 bp, Artificial
  Synthetic oligonucleotide
cgtggactgcgagccgtgtcggacttcgaatatgagttccagatggccggcatgaatcgc

SEQ ID NO: 1939 - DNA, 60 bp, Artificial
  Synthetic oligonucleotide
tcagaatcgcgcggaagtcgaccgccttgtcgttcgtcgcgtcatgcgacatcaccttca

SEQ ID NO: 1940 - DNA, 60 bp, Artificial
  Synthetic oligonucleotide
tgttgatcatggactggctgatcgaccagaacatcccgttcacggcggtcgcgcgcaatg

SEQ ID NO: 1941 - DNA, 60 bp, Artificial
  Synthetic oligonucleotide
tgtatcgctacctgaacaagccgtgggacgatcacgacctgctgctgaccatcgagcagg

SEQ ID NO: 1942 - DNA, 60 bp, Artificial
  Synthetic oligonucleotide
ccgtagcactggtcgttcatcagcacgatcatcacgttcgcgttttcctgcacggccgtg

SEQ ID NO: 1943 - DNA, 60 bp, Artificial
  Synthetic oligonucleotide
tgcagaagagcacgatcaacgatgccggcgtgccgttcaccggccataccgaatatctgg

SEQ ID NO: 1944 - DNA, 60 bp, Artificial
  Synthetic oligonucleotide
tgaacggattggcctgcaacaacggtggcaagtctcggcatccatgttacggacgacgcc

SEQ ID NO: 1945 - DNA, 60 bp, Artificial
  Synthetic oligonucleotide
tcaacttcagcgtgacgccgttcgcatacgcccactggtcaagcgcgcggctcgtaaatt

SEQ ID NO: 1946 - DNA, 60 bp, Artificial
  Synthetic oligonucleotide
tagaacgacgcgtcactgaacccatgcttcctgcacagttccttgaccggcataccgggc

SEQ ID NO: 1947 - DNA, 60 bp, Artificial
  Synthetic oligonucleotide
gcttcctgcacagttccttgaccggcataccggcctcggcttccttcagaaacccgatga

SEQ ID NO: 1948 - DNA, 60 bp, Artificial
  Synthetic oligonucleotide
ccatgcttcctgcacagttccttgaccggcataccggcctcggcttctttcagaaacccg

SEQ ID NO: 1949 - DNA, 60 bp, Artificial
  Synthetic oligonucleotide
tggttgttgaccgcgaggccctgcttcttcatctcggccttcatgatctgcgtgacgagc

SEQ ID NO: 1950 - DNA, 60 bp, Artificial
  Synthetic oligonucleotide
aactgctgcgcgagatcacgctgctgatgggctatgagatcacccgcaacctgccgatca

SEQ ID NO: 1951 - DNA, 60 bp, Artificial
  Synthetic oligonucleotide
cgtgcgatgtccgtgcgcaaacccttcttgatgttcagcaggatctggtcgtcgcccgat

SEQ ID NO: 1952 - DNA, 60 bp, Artificial
  Synthetic oligonucleotide
agtccctttaaaccaactcctggaaagcggcaggagcgtccgcggttgcccgatgtttcg

SEQ ID NO: 1953 - DNA, 60 bp, Artificial
  Synthetic oligonucleotide
gcaaagtccctttaaaccaactcctggaaagcggcaggagcgtccgcggttgcccgatgt

SEQ ID NO: 1954 - DNA, 60 bp, Artificial
  Synthetic oligonucleotide
tcgccacgtacctgtacaagctgaccaacaagctcggcgtgccgtcgtatcacctgatgg

SEQ ID NO: 1955 - DNA, 60 bp, Artificial
  Synthetic oligonucleotide
acaccgttttgccacgtaagcgtcacggccggttactacattggcgggcatgtcgtctcc

SEQ ID NO: 1956 - DNA, 60 bp, Artificial
  Synthetic oligonucleotide
tagatgctgccgttccacacgaccttcaggttcttgccttccttctgcgcggcgtcgatg

SEQ ID NO: 1957 - DNA, 60 bp, Artificial
  Synthetic oligonucleotide
tgtacttcctgggtttcaacatcctggaagcgtcgcagccgtcgctcgtgtcgaagctcg

SEQ ID NO: 1958 - DNA, 60 bp, Artificial
  Synthetic oligonucleotide
cgcatgcgctcgctgggacaaatccgtccgcagttgcagtaatcgcggtattgaagccga

SEQ ID NO: 1959 - DNA, 60 bp, Artificial
  Synthetic oligonucleotide
tcgtgcgcatgcgttcgctgggacaaatccgtccgcagttgcagtaatcgcggcaatgag

SEQ ID NO: 1960 - DNA, 60 bp, Artificial
  Synthetic oligonucleotide
agtcgagaatcgacgactgcagcgtgatcccgttcagctcgatgccgtcctcatgcagca

SEQ ID NO: 1961 - DNA, 60 bp, Artificial
  Synthetic oligonucleotide
tctcccacccgcacccaccaagctatgaatcaacccaacctgctggccttgtacggtctg

SEQ ID NO: 1962 - DNA, 60 bp, Artificial
  Synthetic oligonucleotide
agatgcggatgaagttcgaaccgaaccagtcctcgtcctcgccgcgatcgagcatcacct

SEQ ID NO: 1963 - DNA, 60 bp, Artificial
  Synthetic oligonucleotide
tgcagagtgaacggatcggcctgcaacaacggtggcaagtctcggcatccacgttacgga

SEQ ID NO: 1964 - DNA, 60 bp, Artificial
  Synthetic oligonucleotide
agagtgaacggattggcctgcaacaacggtggcaagtctcggcatccacgttacggacgg

SEQ ID NO: 1965 - DNA, 60 bp, Artificial
  Synthetic oligonucleotide
gccgtccgtaacgtggatgccgagacttgccaccgttgttgcaggccaatccgttcactt

SEQ ID NO: 1966 - DNA, 60 bp, Artificial
  Synthetic oligonucleotide
atcgtctacgtgttcgtgttcgtgccgacgctgatctccgcgctcgacgcactgaagatc

SEQ ID NO: 1967 - DNA, 60 bp, Artificial
  Synthetic oligonucleotide
tactgcgatcacttgcttgtgcgcgatctcgacacgctgaaggtcgtcggcacctatcgc

SEQ ID NO: 1968 - DNA, 60 bp, Artificial
  Synthetic oligonucleotide
aggtgccgacgaccttcagcgtgtcgagatcgcgcacaagcaagtgatcgcagtaagggt

SEQ ID NO: 1969 - DNA, 60 bp, Artificial
  Synthetic oligonucleotide
cggcgacacgtcaccgaatggacaccgttttgccacataagcgtcacggccggttactac

SEQ ID NO: 1970 - DNA, 60 bp, Artificial
  Synthetic oligonucleotide
tacaagcgtgcgcacaacggcgaaggcatgatccatcactggatggccgagcatcacctg

SEQ ID NO: 1971 - DNA, 60 bp, Artificial
  Synthetic oligonucleotide
tccagatcgtagatgctgccgctccacaccaccttcaggttcttgccttccttctgcgcg

SEQ ID NO: 1972 - DNA, 60 bp, Artificial
  Synthetic oligonucleotide
tttcacccttgatcttcgtcaggatcgcgcggaagtcgaccgccttgtcgttcgtcgcgt

SEQ ID NO: 1973 - DNA, 60 bp, Artificial
  Synthetic oligonucleotide
ttctacgtgctgacgcgctacaaccgcagcttcttctacgcgctcgccgtgtatcagctc

SEQ ID NO: 1974 - DNA, 60 bp, Artificial
  Synthetic oligonucleotide
acctgatagctcagcgtcatctcgaagatcatcaggatcgccatcagcggcgcctgcgtg

SEQ ID NO: 1975 - DNA, 60 bp, Artificial
  Synthetic oligonucleotide
tgttcttccgctacggcgtcacgcccaccgccaacaagctctacagcctggtgcgcaagg

SEQ ID NO: 1976 - DNA, 60 bp, Artificial
  Synthetic oligonucleotide
ttttccgctatggggtgacacccaccgccaacaagctctacagcctggtgcgcaagggca

SEQ ID NO: 1977 - DNA, 60 bp, Artificial
  Synthetic oligonucleotide
aagcttgccttccttgcccggctgcgcgagcacgaacgacgaatgacgcagttcgatctt

SEQ ID NO: 1978 - DNA, 60 bp, Artificial
  Synthetic oligonucleotide
tcaaaagcccaaagtcatctacgcagaccgtggctacgactccgagccgcatcgtcagcg

SEQ ID NO: 1979 - DNA, 60 bp, Artificial
  Synthetic oligonucleotide
ttgatgatgaactgtgggcactgatcgaacctttgctgccgccgccgaaaccgcgacgca

SEQ ID NO: 1980 - DNA, 60 bp, Artificial
  Synthetic oligonucleotide
ttccaagcatcacatcctcgtcgacgcaaatggcgtccccatcagcgcaatcctgaccgg

SEQ ID NO: 1981 - DNA, 60 bp, Artificial
  Synthetic oligonucleotide
aggatttctgacgatgaatccggccatcctgattaccgcgctgctgtggctgtcggtcgc

SEQ ID NO: 1982 - DNA, 60 bp, Artificial
  Synthetic oligonucleotide
atagcgcgttcacgatctactacatggcggtcaacatcggctccaccgcgtcgatgctcg

SEQ ID NO: 1983 - DNA, 60 bp, Artificial
  Synthetic oligonucleotide
tcttgaagccgtactgcttgccgtagtcgagaccgaagtcgtcgcggttgaactcgccga

SEQ ID NO: 1984 - DNA, 60 bp, Artificial
  Synthetic oligonucleotide
tcagccattcatgggaattttctcgttcggcaagaaagacgacgacgcgcccacccggcg

SEQ ID NO: 1985 - DNA, 60 bp, Artificial
  Synthetic oligonucleotide
tcgacaccgtcgagccgatgttgaccgccatgtagtagatcgtgaacgcgctgtcgatgc

SEQ ID NO: 1986 - DNA, 60 bp, Artificial
  Synthetic oligonucleotide
ttgatcacgaggcccacgtcgttcgacgcgatcagcagcaggaacaggccgatgccgatc

SEQ ID NO: 1987 - DNA, 60 bp, Artificial
  Synthetic oligonucleotide
cagcgggctcgtgtatttcaccgagttgctgacgcgcaggctgttgtcgtagttgtcgag

SEQ ID NO: 1988 - DNA, 60 bp, Artificial
  Synthetic oligonucleotide
acgggctcgtgtatttcaccgcgttgctgacgcgcaggctgttgtcgtagttgtcgaggt

SEQ ID NO: 1989 - DNA, 60 bp, Artificial
  Synthetic oligonucleotide
ttcaaccatccgatgaaccaggtcgcgcacaagatctgcccggcgatcgcgtcgaacaac

SEQ ID NO: 1990 - DNA, 60 bp, Artificial
  Synthetic oligonucleotide
atgatctgcccggtcagccagggcaccttgtacgagatcaccatcggcttcttcagcagc

SEQ ID NO: 1991 - DNA, 60 bp, Artificial
  Synthetic oligonucleotide
tcaatgtcctggagattttcaatggctaagcccgcaaagcgcgttgccgtcaccggcgcc

SEQ ID NO: 1992 - DNA, 60 bp, Artificial
  Synthetic oligonucleotide
ttaaagccttagcagcttttctaccgatactctctctaacgataccttctaacatctttt

SEQ ID NO: 1993 - DNA, 60 bp, Artificial
  Synthetic oligonucleotide
caccatccaagcatagacataaacatatctttcatagcaatagctaagcccgcagaggca

SEQ ID NO: 1994 - DNA, 60 bp, Artificial
  Synthetic oligonucleotide
gctttggcatgggcctacaagagcttttaaagatatggctttacagccttttggcgtgct

SEQ ID NO: 1995 - DNA, 60 bp, Artificial
  Synthetic oligonucleotide
caggtcgtcatccagtaactccatggggtaaaccaaccaaaggtgcgaaaactcgtcgta

SEQ ID NO: 1996 - DNA, 60 bp, Artificial
  Synthetic oligonucleotide
gccatacgcaaaatggctcttattgaaaagagtctagcttttgtgattttcccaggcggc

SEQ ID NO: 1997 - DNA, 60 bp, Artificial
  Synthetic oligonucleotide
ctgctaagggtgcagctcttaatcggggctcgagggttcaaatccctctctgtccgccac

SEQ ID NO: 1998 - DNA, 60 bp, Artificial
  Synthetic oligonucleotide
cccctgctaagggtgcagatcttaacgggtctcgagggttcaaatccctctctgtccgcc

SEQ ID NO: 1999 - DNA, 60 bp, Artificial
  Synthetic oligonucleotide
cctttaaaagtcaaatccgccttcggttttacccttagacatactgttatagactgcatc

SEQ ID NO: 2000 - DNA, 60 bp, Artificial
  Synthetic oligonucleotide
cgcacaagacccacaaatccctgcacgacaaacaaagtcaaaactcagatccgcatccat

SEQ ID NO: 2001 - DNA, 60 bp, Artificial
  Synthetic oligonucleotide
cgccgcaagaaaagagattttcgccgtctttggattgtgcgtatcaatgctgcttgcaga

SEQ ID NO: 2002 - DNA, 60 bp, Artificial
  Synthetic oligonucleotide
ggcaaaggacaagtaggatcaagcactatgccacacaaaagaaatcctgcagtaagtgaa

SEQ ID NO: 2003 - DNA, 60 bp, Artificial
  Synthetic oligonucleotide
cacaggagaagttttaggacaacgccctatgagtcaaagaagtgatgcgatggcaaaggt

SEQ ID NO: 2004 - DNA, 60 bp, Artificial
  Synthetic oligonucleotide
cctcgagacccgattaagatctgcacccttagcaggggtgtggtttcagccgctcaccca

SEQ ID NO: 2005 - DNA, 60 bp, Artificial
  Synthetic oligonucleotide
gcccgattaagacttgcacccttagcaggggtgtggtttcagccgctcacccatctgtcc

SEQ ID NO: 2006 - DNA, 60 bp, Artificial
  Synthetic oligonucleotide
gacccgttaagatctgcacccttagcaggggtgtggtttcagccgctcacccatctgtcc

SEQ ID NO: 2007 - DNA, 60 bp, Artificial
  Synthetic oligonucleotide
ggtgaggactgtgccaggaatcaaggtgcatcctaacgagtcttttgatgaagcgtatcg

SEQ ID NO: 2008 - DNA, 60 bp, Artificial
  Synthetic oligonucleotide
cttctatcaccgcactcccaacatctcgaatagcactctccatcccatccattaagcgca

SEQ ID NO: 2009 - DNA, 60 bp, Artificial
  Synthetic oligonucleotide
cgacgcaggagatccggtcgaagttgccaaacgctacaacgacgaaggcgctgatgagct

SEQ ID NO: 2010 - DNA, 60 bp, Artificial
  Synthetic oligonucleotide
ctcctaagccaaatccacagtgtccagcagccaaaaccgcagcatcatagtctcgtccgc

SEQ ID NO: 2011 - DNA, 60 bp, Artificial
  Synthetic oligonucleotide
ctcgatttctccccaactagcgtccgcacttcctactttaccgactaccacagcagccgc

SEQ ID NO: 2012 - DNA, 60 bp, Artificial
  Synthetic oligonucleotide
gctccaccccaaaccgcgtaactatcgtgaaatatcccaccgctcactccgcacgcacca

SEQ ID NO: 2013 - DNA, 60 bp, Artificial
  Synthetic oligonucleotide
gcccaagcccgctaaacttcacaccgccaaaaggagccacttcgttgctgatgagtccgg

SEQ ID NO: 2014 - DNA, 60 bp, Artificial
  Synthetic oligonucleotide
ccctcgagacccgttaagatctgcacccttagcaggggtgtggtttcagccactcaccca

SEQ ID NO: 2015 - DNA, 60 bp, Artificial
  Synthetic oligonucleotide
catcacccacgatgtgcttagcttcttggttcgggatggagcaaggcgtttccacatctg

SEQ ID NO: 2016 - DNA, 60 bp, Artificial
  Synthetic oligonucleotide
gcttagcttcttggttcgagatggagcaaggcgtttcctcgtctgtatagccacgggcag

SEQ ID NO: 2017 - DNA, 60 bp, Artificial
  Synthetic oligonucleotide
gacccagacctgccgtttgctttgccttccctccgccctttgtgacctcgctcgcattaa

SEQ ID NO: 2018 - DNA, 60 bp, Artificial
  Synthetic oligonucleotide
atctcgaaaacctgcgcgcccaaaacctccgccaaagtgcccgcgacctgcctagttatg

SEQ ID NO: 2019 - DNA, 60 bp, Artificial
  Synthetic oligonucleotide
ttctcgcccgctatcatgccaaagaccgccgcatcagccatccccatagtgccaagccta

SEQ ID NO: 2020 - DNA, 60 bp, Artificial
  Synthetic oligonucleotide
gcgccccactcttgcatgttgtgtccgtaccagtagagccagcccgtaaaagcacccatg

SEQ ID NO: 2021 - DNA, 60 bp, Artificial
  Synthetic oligonucleotide
gcatgcaagaagcacaggaccttatagcttagtaacacaacaaccagttggtggtaaagc

SEQ ID NO: 2022 - DNA, 60 bp, Artificial
  Synthetic oligonucleotide
ggatagagcgcagaattcctaattctgaggccgcaagttcaaaccttgctggggacacca

SEQ ID NO: 2023 - DNA, 60 bp, Artificial
  Synthetic oligonucleotide
gcgtgcaggagagcatggtaggggctttgcggttgtggctgatgaggttagaaaattagc

SEQ ID NO: 2024 - DNA, 60 bp, Artificial
  Synthetic oligonucleotide
ccagatgggtagtgcaaaagacggcgtggctaaaatttcaggcggacagcactgcagggc

SEQ ID NO: 2025 - DNA, 60 bp, Artificial
  Synthetic oligonucleotide
gctcaaagcgacgtgccaccgtacacactctgctcctgtcgaagccaagtcgctcccata

SEQ ID NO: 2026 - DNA, 60 bp, Artificial
  Synthetic oligonucleotide
ctcgagcgcagactggatgccacgaaatttagagcgccgcttggagctgatgacgccgat

SEQ ID NO: 2027 - DNA, 60 bp, Artificial
  Synthetic oligonucleotide
cgccaaggccctagctatcagcaccatttgccgctcgccgccgcttagatcggtgtaaat

SEQ ID NO: 2028 - DNA, 60 bp, Artificial
  Synthetic oligonucleotide
gtgcagctcttaatcggggctcgagggttcaaatccctctctgtccgccaccaaccccaa

SEQ ID NO: 2029 - DNA, 60 bp, Artificial
  Synthetic oligonucleotide
gcgcgtttgtaggcacttgcaaaaccactgcatggcggctgagggctggtataggtgtcc

SEQ ID NO: 2030 - DNA, 60 bp, Artificial
  Synthetic oligonucleotide
agatcaacgccgtgctaagccgccaagcctacgaggaggcgaaccactccaagtcctatg

SEQ ID NO: 2031 - DNA, 60 bp, Artificial
  Synthetic oligonucleotide
gctggatagagcgcagaattcctaattctgaggccgcaagttcaaaccttgctggggaca

SEQ ID NO: 2032 - DNA, 60 bp, Artificial
  Synthetic oligonucleotide
ccgcaccgcgcaaatgctccaaaatttccccgtgcaaagataacgcctgctccaccgtcc

SEQ ID NO: 2033 - DNA, 60 bp, Artificial
  Synthetic oligonucleotide
ggcaaaatgcgcatcatcgcctgcccaatcatcgctgccgccccgctattttccagtcct

SEQ ID NO: 2034 - DNA, 60 bp, Artificial
  Synthetic oligonucleotide
gttcttcctcctccaaacgcacaagccacgcgatcaactcctcaacccgcgcccaacgtt

SEQ ID NO: 2035 - DNA, 60 bp, Artificial
  Synthetic oligonucleotide
caacgccgcctcgcgcgcctcaactgccacttcgtgcatatgtttcattaacggctggct

SEQ ID NO: 2036 - DNA, 60 bp, Artificial
  Synthetic oligonucleotide
cgcctgccatcacggcaatagccaacgcccaaccaacaccgctccctactccataaacca

SEQ ID NO: 2037 - DNA, 60 bp, Artificial
  Synthetic oligonucleotide
cgcaaaacgcgctcgcagcagccgaaattatcgccatcgtgcccaaaatgcgcatcaccg

SEQ ID NO: 2038 - DNA, 60 bp, Artificial
  Synthetic oligonucleotide
caccacatcaataacgccaaattcatgaccgctgccgccgtgcaccacaatgcctgccgg

SEQ ID NO: 2039 - DNA, 60 bp, Artificial
  Synthetic oligonucleotide
ccacaacgcctgcaaccaatccgccgccgccaacgggcacaaatatcgcatcaatgggtt

SEQ ID NO: 2040 - DNA, 60 bp, Artificial
  Synthetic oligonucleotide
gtgacgcgttccatgccgagtgctgccaattgcgcgccacgaaataaattaccgccgcca

SEQ ID NO: 2041 - DNA, 60 bp, Artificial
  Synthetic oligonucleotide
gccccactctcgcccatgaaatcacttgagcaatttcttccagcgttcccagtccgcccg

SEQ ID NO: 2042 - DNA, 60 bp, Artificial
  Synthetic oligonucleotide
caccgcgcccatttatcaagcaccgctcatcattttgcagccgcctgattgcccacccac

SEQ ID NO: 2043 - DNA, 60 bp, Artificial
  Synthetic oligonucleotide
cgcgatgcctgccgttaataaatccgttcccacccacgttaaactgccttcgccgccctg

SEQ ID NO: 2044 - DNA, 60 bp, Artificial
  Synthetic oligonucleotide
gctacatgatcggttgtgccagcgtttgtttggaagacggcggcatcacggcaagcgcgt

SEQ ID NO: 2045 - DNA, 60 bp, Artificial
  Synthetic oligonucleotide
cgcagccgcacacctcgccgtggttgttaatgcctttactcgctggcatcggattgagca

SEQ ID NO: 2046 - DNA, 60 bp, Artificial
  Synthetic oligonucleotide
gtgcaccgaacacaccgccccaaacgtcgccttcgtgggtgtaaccatctttagcgaggt

SEQ ID NO: 2047 - DNA, 60 bp, Artificial
  Synthetic oligonucleotide
tgaagtccagaaacaccggcgcgcagtcgcccagcttcttttcctcgtagcgcgtagtca

SEQ ID NO: 2048 - DNA, 60 bp, Artificial
  Synthetic oligonucleotide
gcgcccgatgtcggcggaggcggctatctatccaacctcgaattccgtgtcaaaccgttt

SEQ ID NO: 2049 - DNA, 60 bp, Artificial
  Synthetic oligonucleotide
tatgtggtctgggccagcctgttctcgatcccgccgctgtttgcgatgtcgctatggctg

SEQ ID NO: 2050 - DNA, 60 bp, Artificial
  Synthetic oligonucleotide
atcgcagggattcgaccatggccaaaccggcttccatcaagatccgcctgaactcgacgg

SEQ ID NO: 2051 - DNA, 60 bp, Artificial
  Synthetic oligonucleotide
aacttcttcctcgaccttggtctcgacgatgcgcggcaggttctggtccagccactcctt

SEQ ID NO: 2052 - DNA, 60 bp, Artificial
  Synthetic oligonucleotide
ccggctgttcgtgcgctgctgctgcaacatggctttacgcctttcccacaaccatcactg

SEQ ID NO: 2053 - DNA, 60 bp, Artificial
  Synthetic oligonucleotide
tcctgcttttgagcgcggtccattgcggtctcctactcaatgacagcggccggaccattc

SEQ ID NO: 2054 - DNA, 60 bp, Artificial
  Synthetic oligonucleotide
aatgtcgaccgaggagcgcgagaaggtccgcaaccgcgtgatctacatcctttccaccca

SEQ ID NO: 2055 - DNA, 60 bp, Artificial
  Synthetic oligonucleotide
atctgctggaagttgaaggcccgcaccgagaccgaattgccgaactcgtacatgcccagg

SEQ ID NO: 2056 - DNA, 60 bp, Artificial
  Synthetic oligonucleotide
aaggtgctgtcgagcctgaaatacgccttccacttcgacgccggcctctatgcgcggttc

SEQ ID NO: 2057 - DNA, 60 bp, Artificial
  Synthetic oligonucleotide
agcaggaagccgttgacctcgttgtcgaacttgcgatcgaaccactgcaagagccggcga

SEQ ID NO: 2058 - DNA, 60 bp, Artificial
  Synthetic oligonucleotide
cgccgggtgggtttcgtcttccagcagtatgcgctgttcaagcacatgaccgtggccaaa

SEQ ID NO: 2059 - DNA, 60 bp, Artificial
  Synthetic oligonucleotide
ttgaagccagccgaggtcgagaagaagtggatcgtggtcgacgctgagaacgccgttgtc

SEQ ID NO: 2060 - DNA, 60 bp, Artificial
  Synthetic oligonucleotide
agatccagtcgctgttcctggcccagccgcgcctgttcgagctgatcgtcgaggtcatgg

SEQ ID NO: 2061 - DNA, 60 bp, Artificial
  Synthetic oligonucleotide
aggcgtcggcgattacattggagcgaggtactatggcgtttgagcgtgggtcggtgttgc

SEQ ID NO: 2062 - DNA, 60 bp, Artificial
  Synthetic oligonucleotide
gtaacacctggcagtgaatttgccacctgggtcaggcgtggcactgatacttggcacccc

SEQ ID NO: 2063 - DNA, 60 bp, Artificial
  Synthetic oligonucleotide
caagcagtacaaaacaaaccctgtcctgcaccccatctctcttaccccaaccacagacac

SEQ ID NO: 2064 - DNA, 60 bp, Artificial
  Synthetic oligonucleotide
gtgtctgtggttggggtaagagagatggggtgcaggacagggtttgttttgtactgcttg

SEQ ID NO: 2065 - DNA, 60 bp, Artificial
  Synthetic oligonucleotide
gtccaactggatctggtggtctacctaaaggactaacccttgatacaaccaaaggaacca

SEQ ID NO: 2066 - DNA, 60 bp, Artificial
  Synthetic oligonucleotide
cacccgccccttcacatatgcaactccgccgcaataaacgctcaaccacccaatctctca

SEQ ID NO: 2067 - DNA, 60 bp, Artificial
  Synthetic oligonucleotide
ggtgtcggagcgtttattgcggcggagttgcatatgtgaaggggcgggtgttacctgttg

SEQ ID NO: 2068 - DNA, 60 bp, Artificial
  Synthetic oligonucleotide
gcaggtgctgatgcagtcgtaaaggcaggtgtcaaggttgcccagcaagcagttgcccag

SEQ ID NO: 2069 - DNA, 60 bp, Artificial
  Synthetic oligonucleotide
gagcctgtgttaggtggtagccgtgtgggtatctctgccagcacctgcctgggtatatgg

SEQ ID NO: 2070 - DNA, 60 bp, Artificial
  Synthetic oligonucleotide
ctgccagagcctgtgtaggtggtagccgtgtgggtatctctgccagcacctgccttgata

SEQ ID NO: 2071 - DNA, 60 bp, Artificial
  Synthetic oligonucleotide
cggaggaatcaagggttagtcctttaggtagaccaccagatccagttggacttgtctctg

SEQ ID NO: 2072 - DNA, 60 bp, Artificial
  Synthetic oligonucleotide
ccaccatcatcagtcatatggaggacaccaacagggcggatatgtagggcaacaccgggg

SEQ ID NO: 2073 - DNA, 60 bp, Artificial
  Synthetic oligonucleotide
ccccggtgttgccctacatatccgccctgttggtgtcctccatatgactgatgatggtgg

SEQ ID NO: 2074 - DNA, 60 bp, Artificial
  Synthetic oligonucleotide
acctgtggcacctaagagtctgcctgtcagccttccctcatggcctagactgagacctgc

SEQ ID NO: 2075 - DNA, 60 bp, Artificial
  Synthetic oligonucleotide
cccgtcacccggttttagagatggaacagcgcctgagcctgcggtaatcgttagcttgcg

SEQ ID NO: 2076 - DNA, 60 bp, Artificial
  Synthetic oligonucleotide
gtctctgatgagccggggaagcgacctgtatccaggctgtcagcagacaccttcacacca

SEQ ID NO: 2077 - DNA, 60 bp, Artificial
  Synthetic oligonucleotide
gcctgcggggactctgttgggtcctggtgttgttgatgatgatgttccacgggcaaaggc

SEQ ID NO: 2078 - DNA, 60 bp, Artificial
  Synthetic oligonucleotide
cgggaaaggggcgctggtcatatgagacctgtgagccggggccaacagatatatcagcag

SEQ ID NO: 2079 - DNA, 60 bp, Artificial
  Synthetic oligonucleotide
gcgcgttttgccattggtgttaccggttgcgttggtggttgaagaaggggcttcagagcg

SEQ ID NO: 2080 - DNA, 60 bp, Artificial
  Synthetic oligonucleotide
ctactgcgatggcaaagccggtaagcagtaacacgggcttcaacaggtgcagcaaaagca

SEQ ID NO: 2081 - DNA, 60 bp, Artificial
  Synthetic oligonucleotide
ggccctgccctcccttccaaccccgctacatccgctttgatcccttcagaaccaaatgca

SEQ ID NO: 2082 - DNA, 60 bp, Artificial
  Synthetic oligonucleotide
cctgccctcccttccaaccccgctacatccgctttgatcccttcagaaccaagtgtggct

SEQ ID NO: 2083 - DNA, 60 bp, Artificial
  Synthetic oligonucleotide
ccggtcggagccacaactgtatctctctttataagaggaaggggagggcagccagtccag

SEQ ID NO: 2084 - DNA, 60 bp, Artificial
  Synthetic oligonucleotide
caacacgtagaactgaaagattggggcgcgtcggcttatacagaggtcggggtgattctc

SEQ ID NO: 2085 - DNA, 60 bp, Artificial
  Synthetic oligonucleotide
gagaatcaccccgacctctgtataagccgacgcgccccaatctttcagttctacgtgttg

SEQ ID NO: 2086 - DNA, 60 bp, Artificial
  Synthetic oligonucleotide
cgccaccgacctgcctaaaccaacgcccgcaacatttccatttgcaagagcccacactga

SEQ ID NO: 2087 - DNA, 60 bp, Artificial
  Synthetic oligonucleotide
gacttaaggaaagatgactgagtggtcgaaagtacgtccctgctaaggacgcgtacccct

SEQ ID NO: 2088 - DNA, 60 bp, Artificial
  Synthetic oligonucleotide
ttgctaaggaaagatgactgagtggtcgaaagtacgtccctgctaaggacgcgtacccct

SEQ ID NO: 2089 - DNA, 60 bp, Artificial
  Synthetic oligonucleotide
aggtttcgacttaggaatgaagtgttaatcgcatgcggagggcgttggctggcctcctaa

SEQ ID NO: 2090 - DNA, 60 bp, Artificial
  Synthetic oligonucleotide
gcctctgatcgctgatggtactatacacaagagtatgggagagtaggtcgttgccaagca

SEQ ID NO: 2091 - DNA, 60 bp, Artificial
  Synthetic oligonucleotide
cttttctggaaggaaaagcgggtgatgaggcttgaactcacgaccttcacgttggcaacg

SEQ ID NO: 2092 - DNA, 60 bp, Artificial
  Synthetic oligonucleotide
ccccggttcctgtaagagaacttctgatttcgaatcagatgcattcgaccactctgccac

SEQ ID NO: 2093 - DNA, 60 bp, Artificial
  Synthetic oligonucleotide
cgttccccaataacgatttctactgatagcccaatctctagctccttccaaccacttacc

SEQ ID NO: 2094 - DNA, 60 bp, Artificial
  Synthetic oligonucleotide
cagcactccaatttctgactgtgagaatatatcataaatagaccggcctctagcgctgcg

SEQ ID NO: 2095 - DNA, 60 bp, Artificial
  Synthetic oligonucleotide
gcccgggattggttgatcgcccagacaatgctccaaggaggtaaacgctcctctgaagtc

SEQ ID NO: 2096 - DNA, 60 bp, Artificial
  Synthetic oligonucleotide
gatctaccaagataggacatggctctacaacgaaccctttatgtttccgtgtagatggtg

SEQ ID NO: 2097 - DNA, 60 bp, Artificial
  Synthetic oligonucleotide
cgcctagggtgctcagactccgacataatgaaggtcacgggacacgcaaccgcaaagatg

SEQ ID NO: 2098 - DNA, 60 bp, Artificial
  Synthetic oligonucleotide
ccgagatacgatttgtccatatctttgatacgacgccgcaaaagctcttcccaagccgag

SEQ ID NO: 2099 - DNA, 60 bp, Artificial
  Synthetic oligonucleotide
cgcgcagggcttagaatcaccttctcgtaccaaagctagaacaacgccgccttccattct

SEQ ID NO: 2100 - DNA, 60 bp, Artificial
  Synthetic oligonucleotide
cagagccgctcaaggaccagcaaataatccttgggacaacatcaacacctgtcgcagcca

SEQ ID NO: 2101 - DNA, 60 bp, Artificial
  Synthetic oligonucleotide
cacatctgcgtcttgctctatttgaccgctgtctcgcaaatctgaaagcatgggaacttt

SEQ ID NO: 2102 - DNA, 60 bp, Artificial
  Synthetic oligonucleotide
cccttttgtgttccccttgtaattcgttgcggtcagtaatctttggatagctgctaatgc

SEQ ID NO: 2103 - DNA, 60 bp, Artificial
  Synthetic oligonucleotide
cctgtaacaacaagtcaggttgcgcataattttaggcttgcagagttccatagtgctatg

SEQ ID NO: 2104 - DNA, 60 bp, Artificial
  Synthetic oligonucleotide
cacccttatcgccgatgagttcgacattccacatactttccctatcacatcgaccttggt

SEQ ID NO: 2105 - DNA, 60 bp, Artificial
  Synthetic oligonucleotide
tccgacgcgtccccaaaagttaagaacaatctacttttatggaaagccatcgagcccatt

SEQ ID NO: 2106 - DNA, 60 bp, Artificial
  Synthetic oligonucleotide
gacactccacctagcctaaggagggttaacgaaagaagcttttgttgcaggagacaaatt

SEQ ID NO: 2107 - DNA, 60 bp, Artificial
  Synthetic oligonucleotide
gacctgcgctcatttctagagataggaaaccaactctacgctgttgagtaaccgcaagat

SEQ ID NO: 2108 - DNA, 60 bp, Artificial
  Synthetic oligonucleotide
cggtaaggaatgtctcgtaaagctcgagaccctattgtgctccctcaaggagtagaggtc

SEQ ID NO: 2109 - DNA, 60 bp, Artificial
  Synthetic oligonucleotide
gcctctgatcgctgatggtactatacacaagagtatgggagagtaggtcgtcgccaagca

SEQ ID NO: 2110 - DNA, 60 bp, Artificial
  Synthetic oligonucleotide
gcttggcgacgacctactctcccatactcttgtgtatagtaccatcagcgatcagaggct

SEQ ID NO: 2111 - DNA, 60 bp, Artificial
  Synthetic oligonucleotide
gcgaaagaggggactcgaacccctaaggaaagctccactaccacctcaagatagcgcgta

SEQ ID NO: 2112 - DNA, 60 bp, Artificial
  Synthetic oligonucleotide
cgcgctatcttgaggtggtagtggagctttccttaggggttcgagtcccctctttcgcaa

SEQ ID NO: 2113 - DNA, 60 bp, Artificial
  Synthetic oligonucleotide
gcggaagtggcggaattggtatacgcgctatcttgaggtggtagtggagctttccttagg

SEQ ID NO: 2114 - DNA, 60 bp, Artificial
  Synthetic oligonucleotide
tcgaaccggggatagaggctttgcaggcctcggccttaccgcttggctatgccaccaaaa

SEQ ID NO: 2115 - DNA, 60 bp, Artificial
  Synthetic oligonucleotide
gcgctatcttgaggtggtagtggagctttccttaggggttcgagtcccctctttcgcaag

SEQ ID NO: 2116 - DNA, 60 bp, Artificial
  Synthetic oligonucleotide
ggggtggctggatttgaaccaacgtatccgtaaggagccggatttacagtccgatgcaat

SEQ ID NO: 2117 - DNA, 60 bp, Artificial
  Synthetic oligonucleotide
ctcgtcttccctgggttagtcggcccctaagtcgaggcacaaatgcgtagacgatggagc

SEQ ID NO: 2118 - DNA, 60 bp, Artificial
  Synthetic oligonucleotide
gcaggagacaaactaatcgtatgtttgattcctgagccattttctattctcgggctgcag

SEQ ID NO: 2119 - DNA, 60 bp, Artificial
  Synthetic oligonucleotide
gggaaagtttgtggaatgtccaatgcatctgctatccgggttatggaccaacttcttcct

SEQ ID NO: 2120 - DNA, 60 bp, Artificial
  Synthetic oligonucleotide
gatcgacacccacaacttattcattacgaataggaggattagagagcggagttgtatggg

SEQ ID NO: 2121 - DNA, 60 bp, Artificial
  Synthetic oligonucleotide
ggggctagcatcgaaggcaaccataaaggccttcacgaagtgatgtgtgcctcaaatgat

SEQ ID NO: 2122 - DNA, 60 bp, Artificial
  Synthetic oligonucleotide
cttggcgaccaaatctttgatggaatcacaggatccatagttgagagtgctgtacaggac

SEQ ID NO: 2123 - DNA, 60 bp, Artificial
  Synthetic oligonucleotide
gtcccatcttggtagatcaaatagactcttatttcgtagtcaagcctgcgaacgtatacc

SEQ ID NO: 2124 - DNA, 60 bp, Artificial
  Synthetic oligonucleotide
gtaggctattcctaacttttggagaagcttcggaaatttggttgtcaacgttgtccccgc

SEQ ID NO: 2125 - DNA, 60 bp, Artificial
  Synthetic oligonucleotide
ctagctgcacgaacttgtttggtgccttctgtccatgaagcttttgacgatggaatcttt

SEQ ID NO: 2126 - DNA, 60 bp, Artificial
  Synthetic oligonucleotide
gtccgaacaccctaggcgtttgtactctgtcacagcggttgctctaagcacgtgaggggt

SEQ ID NO: 2127 - DNA, 60 bp, Artificial
  Synthetic oligonucleotide
cgctctgccaataactgtagattcagcttgggaagagctgttaagaaggcgtgtcaaaga

SEQ ID NO: 2128 - DNA, 60 bp, Artificial
  Synthetic oligonucleotide
ggacatcaacctttcttgatagtggcaaccagaactcgatggaataatgggacgcctatt

SEQ ID NO: 2129 - DNA, 60 bp, Artificial
  Synthetic oligonucleotide
gaaaagtcgaggatagagcaaacaaagttcctatgctgtcagacctaagagatagcggtc

SEQ ID NO: 2130 - DNA, 60 bp, Artificial
  Synthetic oligonucleotide
cccgctttagcaaaagtgcctgctagttgtttcagggaaaccccttttcctttcttggtt

SEQ ID NO: 2131 - DNA, 60 bp, Artificial
  Synthetic oligonucleotide
caagctgcacgcacctgctttgttccctccgaccaatgaactatttcttctgggacttgt

SEQ ID NO: 2132 - DNA, 60 bp, Artificial
  Synthetic oligonucleotide
gagagattctaaggagcatgaattctccggaaactacattttctgcttgggtcaacctag

SEQ ID NO: 2133 - DNA, 60 bp, Artificial
  Synthetic oligonucleotide
ggatggaaggaaatgtcgtcttagcattggtgaaagagggtgacactgctccttgcgcta

SEQ ID NO: 2134 - DNA, 60 bp, Artificial
  Synthetic oligonucleotide
cgttgttgttgctgcaaggcctgcaatggggaagacagcctttgctatagacatcgcact

SEQ ID NO: 2135 - DNA, 60 bp, Artificial
  Synthetic oligonucleotide
cccatcttctgttctggtggaggactttcggggtttaaataaagacgccagcttatcagt

SEQ ID NO: 2136 - DNA, 60 bp, Artificial
  Synthetic oligonucleotide
ggcggtacagggaaaacaaccctttcatttaatgtcggtagtaaccttgcccaaataagc

SEQ ID NO: 2137 - DNA, 60 bp, Artificial
  Synthetic oligonucleotide
caagtacttgttcaggaaagcctatttctgaggcttcaaaacaagctagggctgcctgtt

SEQ ID NO: 2138 - DNA, 60 bp, Artificial
  Synthetic oligonucleotide
cggatgctatggatttgtcataggcatatatcatcttcgaagaagaatgaccggtgactt

SEQ ID NO: 2139 - DNA, 60 bp, Artificial
  Synthetic oligonucleotide
gtgaggggtgggaggggcttacaccaaaagaaaacaaagctttggacgaagaaccttttc

SEQ ID NO: 2140 - DNA, 60 bp, Artificial
  Synthetic oligonucleotide
gacaggctgttaattatctagaacatgctcacactgttgtgcgtcgattgtctgagcatc

SEQ ID NO: 2141 - DNA, 60 bp, Artificial
  Synthetic oligonucleotide
ccaatatcgggacattagttggaggtactgagattgggaaattcacgattacaccggaaa

SEQ ID NO: 2142 - DNA, 60 bp, Artificial
  Synthetic oligonucleotide
gcgataaaagaccaatgctatcggatctcagggatagtggtcaaatagaacaggatgcgg

SEQ ID NO: 2143 - DNA, 60 bp, Artificial
  Synthetic oligonucleotide
gtgttccatcccggatcacctgtaaggtctgagcggatgacatcgttactgccgacgcgc

SEQ ID NO: 2144 - DNA, 60 bp, Artificial
  Synthetic oligonucleotide
gcgatgcatggcttcaccgcgacagaagaagaacccactagcgaagtacatcctggtgcg

SEQ ID NO: 2145 - DNA, 60 bp, Artificial
  Synthetic oligonucleotide
cttactcaagaagccttcctagctagccaatacttggttgtgtgtctaacaccagagccc

SEQ ID NO: 2146 - DNA, 60 bp, Artificial
  Synthetic oligonucleotide
gttgttgtcgctgcaagacctgccatggggaaaacagcttttgctatagatatagccctt

SEQ ID NO: 2147 - DNA, 60 bp, Artificial
  Synthetic oligonucleotide
caaacagacgttcaccgttcacgcttatagatcaatttaaagagcgtttggacgacatcc

SEQ ID NO: 2148 - DNA, 60 bp, Artificial
  Synthetic oligonucleotide
catgctgcacgcacttgtttcgttccttctgaccaaggaattatcttcataggcacttgt

SEQ ID NO: 2149 - DNA, 60 bp, Artificial
  Synthetic oligonucleotide
gccgtggctcttaaaacatggggcgtaactttaaatggtatacgtgcttttaccccagct

SEQ ID NO: 2150 - DNA, 60 bp, Artificial
  Synthetic oligonucleotide
gactcaaatgctatcagcatacgatacaggtatgactgacaatttaacatcgcaactgcc

SEQ ID NO: 2151 - DNA, 60 bp, Artificial
  Synthetic oligonucleotide
gactgcgcaagacttgtacattacaaaatatcgagactgagtatgagcggtttgagtcac

SEQ ID NO: 2152 - DNA, 60 bp, Artificial
  Synthetic oligonucleotide
gatctttattaaaagagacctcagtaataaatgcttacccaaactccagggcgtctcagg

SEQ ID NO: 2153 - DNA, 60 bp, Artificial
  Synthetic oligonucleotide
ggatctagatccacaagcaaacctaactacaggtcttggaattcagattcgtgacgaaca

SEQ ID NO: 2154 - DNA, 60 bp, Artificial
  Synthetic oligonucleotide
ggaagggaatgttgtcctagctctagttaaggaaggtgattctgctccttgcgctgttag

SEQ ID NO: 2155 - DNA, 60 bp, Artificial
  Synthetic oligonucleotide
gcaaaaccctttgcaggatcaacaacttatacttggaacaacctccacaccaacagctgc

SEQ ID NO: 2156 - DNA, 60 bp, Artificial
  Synthetic oligonucleotide
cgttaccaaacgttttctcccatcttacgtatctgtgaaggctgggaaggtctaactccc

SEQ ID NO: 2157 - DNA, 60 bp, Artificial
  Synthetic oligonucleotide
ggtactgcctgtgtggtattagctgttttagatgaaaactacaacccagtggcgggtgca

SEQ ID NO: 2158 - DNA, 60 bp, Artificial
  Synthetic oligonucleotide
cttcaaagtgggagtaaagagcggctacgtccctggataacgatttctaagcttcagggg

SEQ ID NO: 2159 - DNA, 60 bp, Artificial
  Synthetic oligonucleotide
caaagtgggagtaaagagcggctacgtccctggataacgagttctaagcttcagtgggcg

SEQ ID NO: 2160 - DNA, 60 bp, Artificial
  Synthetic oligonucleotide
gcaagatactctccagaatgtataggacactttggattagctgcaagatattactgtcac

SEQ ID NO: 2161 - DNA, 60 bp, Artificial
  Synthetic oligonucleotide
ctccctctgaagcttagaaatcgttatccagggacgtacccgctctttactcccacttta

SEQ ID NO: 2162 - DNA, 60 bp, Artificial
  Synthetic oligonucleotide
ggcacctgcctctggagcaggcatttgttggttcgaatccagcatgggcagccaaaagag

SEQ ID NO: 2163 - DNA, 60 bp, Artificial
  Synthetic oligonucleotide
ggcctccatggcatgtgtgattacatccattcctgtatccgcagttatagctttgggtac

SEQ ID NO: 2164 - DNA, 60 bp, Artificial
  Synthetic oligonucleotide
ccattgcatgcagtaccaagtcctgctccacacatactgtttccagcataccatgtcatg

SEQ ID NO: 2165 - DNA, 60 bp, Artificial
  Synthetic oligonucleotide
ctccctctgaagcttagaaatcgttatccagggacgtatccgctctttactcccactttg

SEQ ID NO: 2166 - DNA, 60 bp, Artificial
  Synthetic oligonucleotide
gacattgaaagcattaggtgaagctggtcttgacgagatacgtttcaacttgggtgcatc

SEQ ID NO: 2167 - DNA, 60 bp, Artificial
  Synthetic oligonucleotide
gaagttataacaggacaatcacatgccatagcttctataggtggtaatccaaaaccttcg

SEQ ID NO: 2168 - DNA, 60 bp, Artificial
  Synthetic oligonucleotide
ggcattctatccaggtccaggtcttggtggacactgcataccattagatcctttctactt

SEQ ID NO: 2169 - DNA, 60 bp, Artificial
  Synthetic oligonucleotide
ggatctaatggtatgcagtgtccaccaagacctggacccggatagaacgccataaatcca

SEQ ID NO: 2170 - DNA, 60 bp, Artificial
  Synthetic oligonucleotide
cagaaagtccaccaaccattgattttcttggtaatacagaagttctagttgagcctgcaa

SEQ ID NO: 2171 - DNA, 60 bp, Artificial
  Synthetic oligonucleotide
cagctacagtaattcctaacagaggtgcttggttggagtatgaaacagactctaacgata

SEQ ID NO: 2172 - DNA, 60 bp, Artificial
  Synthetic oligonucleotide
ggggaaatatcggagatgtaatagttgctagcgttaaaagtgcaacaccaggcggtgttg

SEQ ID NO: 2173 - DNA, 60 bp, Artificial
  Synthetic oligonucleotide
gaaaactagcgggctattcaatgggacgtagcgaccttgtaagaagggctatgtctaaga

SEQ ID NO: 2174 - DNA, 60 bp, Artificial
  Synthetic oligonucleotide
tttcgagtactcaattacttgcaaacataggaccatccttaaagcaggcatgtttaagta

SEQ ID NO: 2175 - DNA, 60 bp, Artificial
  Synthetic oligonucleotide
cccacaggcccaggaagaggctctggagcaggatctttagttgcatatactttaggaata

SEQ ID NO: 2176 - DNA, 60 bp, Artificial
  Synthetic oligonucleotide
gcccttcttacaaggtcgctacgtcccattgaatagcccgctagttttctaacaatttcc

SEQ ID NO: 2177 - DNA, 60 bp, Artificial
  Synthetic oligonucleotide
acatagctccatgatctgttatagctatactatccatacccagttctttagcactggcta

SEQ ID NO: 2178 - DNA, 60 bp, Artificial
  Synthetic oligonucleotide
cctaaagtatatgcaactaaagatcctgctccagagcctcttcctgggcctgtgggtatt

SEQ ID NO: 2179 - DNA, 60 bp, Artificial
  Synthetic oligonucleotide
aatattatcagaggtaggaaagcatctaggaatgtctgaggtgggtacacacactctcag

SEQ ID NO: 2180 - DNA, 60 bp, Artificial
  Synthetic oligonucleotide
cctgcaatttctcgtgtgattgagccaaggactctttcagcaaactgttctccagtccca

SEQ ID NO: 2181 - DNA, 60 bp, Artificial
  Synthetic oligonucleotide
gagtgcgcacagcacagcagcggcaagctccccgaatggatagccattaggctcccattt

SEQ ID NO: 2182 - DNA, 60 bp, Artificial
  Synthetic oligonucleotide
atttgtacgtgttggaagtggcggccccactattagtatatcatctttaaatgcaagggg

SEQ ID NO: 2183 - DNA, 60 bp, Artificial
  Synthetic oligonucleotide
gcagactttgcatattgccagatgccgtcagtatcggatctatggggttcaggaacagca

SEQ ID NO: 2184 - DNA, 60 bp, Artificial
  Synthetic oligonucleotide
gtatgtgctcctcattctaggaagtacctcgaatttgtaagatgctcttcttgctacacc

SEQ ID NO: 2185 - DNA, 60 bp, Artificial
  Synthetic oligonucleotide
gggactggagaacagtttgctgaaagagtccttggctcaatcacacgagaaattgcagga

SEQ ID NO: 2186 - DNA, 60 bp, Artificial
  Synthetic oligonucleotide
gaaccccatagatccgatactgacggcatctggcaatatgcaaagtctgctccacatgct

SEQ ID NO: 2187 - DNA, 60 bp, Artificial
  Synthetic oligonucleotide
ccatatggtttcccgtacgattttgagtcgtatgcgtctgccagttccgccacagcgacg

SEQ ID NO: 2188 - DNA, 60 bp, Artificial
  Synthetic oligonucleotide
cccatatggtttcccgtacgattttgagtcgtatgcgtatgccagttccgccacagcggc

SEQ ID NO: 2189 - DNA, 60 bp, Artificial
  Synthetic oligonucleotide
ccgtactgcaccgattttccaatcccgtccagccagttccacggcaaccacgaccagcta

SEQ ID NO: 2190 - DNA, 60 bp, Artificial
  Synthetic oligonucleotide
attctccaacacgttgtgcagcagcagctcctgcgtcagtagcagcttttacagctccta

SEQ ID NO: 2191 - DNA, 60 bp, Artificial
  Synthetic oligonucleotide
ggcacgtttccatccttcgacatcgccccaagaccagttaggtgcccagcttccgtcttc

SEQ ID NO: 2192 - DNA, 60 bp, Artificial
  Synthetic oligonucleotide
cgaaaccccaaacagcgagatagacagcgaacagacggaagccctgcctgctatttagcg

SEQ ID NO: 2193 - DNA, 60 bp, Artificial
  Synthetic oligonucleotide
caccgtgctttctactcctcctgctgcctgaaccgcacctgaaaatgccccagctagtat

SEQ ID NO: 2194 - DNA, 60 bp, Artificial
  Synthetic oligonucleotide
gcgctctaccccgtcctcatcctttgcaccatagtacttagatatcacgactcctgctcc

SEQ ID NO: 2195 - DNA, 60 bp, Artificial
  Synthetic oligonucleotide
gcccgttggtcaggcgatgtctattgttggtggcttagtggtcggtcaagctgctgtttc

SEQ ID NO: 2196 - DNA, 60 bp, Artificial
  Synthetic oligonucleotide
ggatagcccgactgcaccagcaagaccaccccaggagccaccaagtaaaagagctgcaac

SEQ ID NO: 2197 - DNA, 60 bp, Artificial
  Synthetic oligonucleotide
cagccgccaccaaagcaaccgccaccgaagcaaccgccaccgcaaccaaaattacaacca

SEQ ID NO: 2198 - DNA, 60 bp, Artificial
  Synthetic oligonucleotide
ccacctgctacgccaaggtccgcttcttttgcttctccagggccattaacagcgcaaccc

SEQ ID NO: 2199 - DNA, 60 bp, Artificial
  Synthetic oligonucleotide
aactcctgctctgtgctcgcccaaaccgttacgtccatgcgccgtaccacatactcacgc

SEQ ID NO: 2200 - DNA, 60 bp, Artificial
  Synthetic oligonucleotide
gtctctcgttccgctgccctttgactatcttcccctgccatcgcagcacctccgacagat

SEQ ID NO: 2201 - DNA, 60 bp, Artificial
  Synthetic oligonucleotide
ccaaccatcccattccagcctgccgaaaacgcatcagaaacgccatgcccatcgggacga

SEQ ID NO: 2202 - DNA, 60 bp, Artificial
  Synthetic oligonucleotide
cacccctcccttcaaagcctgatttcctattctcctttgttagcacccgccgtcaacccg

SEQ ID NO: 2203 - DNA, 60 bp, Artificial
  Synthetic oligonucleotide
gctctaccgatgctgatacgctgcttttgaccgcccgatagaccgacgccacgttctcca

SEQ ID NO: 2204 - DNA, 60 bp, Artificial
  Synthetic oligonucleotide
cagagcccgtaccacccattcaaatcccatgcagatccaaacgccttgtacaccaaagcc

SEQ ID NO: 2205 - DNA, 60 bp, Artificial
  Synthetic oligonucleotide
gtacccagaatcaatggctatatctgaaacacttgttgcttcagaggctggtggagattc

SEQ ID NO: 2206 - DNA, 60 bp, Artificial
  Synthetic oligonucleotide
ggcatccatgctctacgtccatttgctgtagctccagtcatttgtccaaatggagtattg

SEQ ID NO: 2207 - DNA, 60 bp, Artificial
  Synthetic oligonucleotide
ggtgctagcatcttacaaggtccacaccaagttgcaaagaaatcaacaacaactactcct

SEQ ID NO: 2208 - DNA, 60 bp, Artificial
  Synthetic oligonucleotide
gcagccagtaacaacctaaatcatagaacgcaccgccgcccctttccggaaatcttctat

SEQ ID NO: 2209 - DNA, 60 bp, Artificial
  Synthetic oligonucleotide
cacgatgcatgcaaatttctaccgtcattgactgctgctgttacaactgccatgcccagc

SEQ ID NO: 2210 - DNA, 60 bp, Artificial
  Synthetic oligonucleotide
gggacagctgatgcaggttgggcaaaaggattatggccccatcaagcttggtatggcggt

SEQ ID NO: 2211 - DNA, 60 bp, Artificial
  Synthetic oligonucleotide
gctggatgggcactcggcacactttcaactgctggtattgcaggatcacttcttggacca

SEQ ID NO: 2212 - DNA, 60 bp, Artificial
  Synthetic oligonucleotide
ctgcgcttccccagttataattgccacgaccatattcaattgcgccccacttagttgcat

SEQ ID NO: 2213 - DNA, 60 bp, Artificial
  Synthetic oligonucleotide
gctaggctttctccttgcttatagggccggatgggatgttagtttaggcgcaatagtctc

SEQ ID NO: 2214 - DNA, 60 bp, Artificial
  Synthetic oligonucleotide
cgaggccagccgtccattcgataaactccgagatggatttgttatgtctgaaggtgccgg

SEQ ID NO: 2215 - DNA, 60 bp, Artificial
  Synthetic oligonucleotide
gttgatgagcctgatgcggctacaaattactacgcttctactgttgctgcacctgtggca

SEQ ID NO: 2216 - DNA, 60 bp, Artificial
  Synthetic oligonucleotide
cagcaaagcatcctgagcttaattcagatccaaccttcgttaccatgcagcagacctcgc

SEQ ID NO: 2217 - DNA, 60 bp, Artificial
  Synthetic oligonucleotide
ccagcttgtagagcggcccagcgcatgccaaccactccgaacttctgatttgtctctacc

SEQ ID NO: 2218 - DNA, 60 bp, Artificial
  Synthetic oligonucleotide
gcgtatcaggttgaaggtgcatggaatgaggacggaaaagggatgtcggtgcaggatgca

SEQ ID NO: 2219 - DNA, 60 bp, Artificial
  Synthetic oligonucleotide
ccactgctgctccccacctgtagggcttacgttgagtgtaccaatgagttgtccatccgc

SEQ ID NO: 2220 - DNA, 60 bp, Artificial
  Synthetic oligonucleotide
cgcagcagccacaaatagcagcttcacgtggtagtctgtccttgccggggtggttaccaa

SEQ ID NO: 2221 - DNA, 60 bp, Artificial
  Synthetic oligonucleotide
ggcagaattgggttaatgatggcgcggaggcaggaacagacggacaggctcttagagttg

SEQ ID NO: 2222 - DNA, 60 bp, Artificial
  Synthetic oligonucleotide
cgctcatatcggcgatgtaatcgtttgttcggttaaaagtgcaacaccaggcggagttgt

SEQ ID NO: 2223 - DNA, 60 bp, Artificial
  Synthetic oligonucleotide
gaggggaatcgaacccctgtccgaaggcccttcaccatcagcttctacgagcgtagttgc

SEQ ID NO: 2224 - DNA, 60 bp, Artificial
  Synthetic oligonucleotide
cgaaggtctgtggttgaaagtccatgccagtcgcaggcaaaaggacccacgtaagatagc

SEQ ID NO: 2225 - DNA, 60 bp, Artificial
  Synthetic oligonucleotide
gacagaaggtagctgtagtaggtggcggaaatgttgctatggatgctgctagaacagccc

SEQ ID NO: 2226 - DNA, 60 bp, Artificial
  Synthetic oligonucleotide
ccagactcttttaaagaaagtatgacagcaaaggaagtggcatatgctatggaaagggga

SEQ ID NO: 2227 - DNA, 60 bp, Artificial
  Synthetic oligonucleotide
ctaagcctatgattaactcctgattttcctactggtggctctaacatctgtccaagttcc

SEQ ID NO: 2228 - DNA, 60 bp, Artificial
  Synthetic oligonucleotide
ggctgttctagcagcatccatagcaacatttccgccacctactacagctaccttctgtcc

SEQ ID NO: 2229 - DNA, 60 bp, Artificial
  Synthetic oligonucleotide
ggctgttctagcagcatccatagcaacatttccaccacctactacagctaccttctgtcc

SEQ ID NO: 2230 - DNA, 60 bp, Artificial
  Synthetic oligonucleotide
gtccgccatgtggtggtggtccaaatttaaatgcttctaataagaaaccaaatctttccc

SEQ ID NO: 2231 - DNA, 60 bp, Artificial
  Synthetic oligonucleotide
cccaccatgtggtggtggtccaaatttaaatgcttcaagtaagaacccaaatctttccca

SEQ ID NO: 2232 - DNA, 60 bp, Artificial
  Synthetic oligonucleotide
cggtggagacggttgggcttacgatatcggatatggtggagtagaccacgtacttgcttc

SEQ ID NO: 2233 - DNA, 60 bp, Artificial
  Synthetic oligonucleotide
cgagcaccaaatttgcacgaccaacgggagtgaacaaatttgagttgcgagactgcggcc

SEQ ID NO: 2234 - DNA, 60 bp, Artificial
  Synthetic oligonucleotide
ctgagaggaggaatttgtcatgcctaaaatgaaaactcatagaggtgcagcaaagagatt

SEQ ID NO: 2235 - DNA, 60 bp, Artificial
  Synthetic oligonucleotide
gctcaggggatgtgtggctcatcatcaggaagtataccaactaatgtaggccaacctatg

SEQ ID NO: 2236 - DNA, 60 bp, Artificial
  Synthetic oligonucleotide
gcaccgttttgaagcatgcaatcagtgaatccacctgtggatgcccctatatccatacac

SEQ ID NO: 2237 - DNA, 60 bp, Artificial
  Synthetic oligonucleotide
ggggagaaggttctgctcgtgctagaaactggcaaagatatgaccttggtggagataaga

SEQ ID NO: 2238 - DNA, 60 bp, Artificial
  Synthetic oligonucleotide
gctcaagggatgtgtggctcatcatcaggaagtattcctaccaacgtaggtcagcctatg

SEQ ID NO: 2239 - DNA, 60 bp, Artificial
  Synthetic oligonucleotide
gtccacagtcccacctataccaactccaattaccataggagggcatgggttaggtccagc

SEQ ID NO: 2240 - DNA, 60 bp, Artificial
  Synthetic oligonucleotide
gctggacctaacccatgccctcctatggtaattggagttggtataggtgggactgtggac

SEQ ID NO: 2241 - DNA, 60 bp, Artificial
  Synthetic oligonucleotide
ccgtttgttgccggagttgatgcaggcttttggggtgtcgctggtttggaagtcgctggt

SEQ ID NO: 2242 - DNA, 60 bp, Artificial
  Synthetic oligonucleotide
ccggggtaggtgcaaaggagaggcgtaaaagagctatgttggcattggagagggtcggac

SEQ ID NO: 2243 - DNA, 60 bp, Artificial
  Synthetic oligonucleotide
ctggataccggggacagaggaacatgggcattcgggcgggacttacggtaggattgcgaa

SEQ ID NO: 2244 - DNA, 60 bp, Artificial
  Synthetic oligonucleotide
ggcatcaggagagtatggcgacagttcaggaaaggatgagaaggcttgggccgctgcaga

SEQ ID NO: 2245 - DNA, 60 bp, Artificial
  Synthetic oligonucleotide
cgcctccgcctccgccgccttgcgtacccataaccgaaagatttattgctgatgcgtcga

SEQ ID NO: 2246 - DNA, 60 bp, Artificial
  Synthetic oligonucleotide
caatcacctccctcaaaatcgccccactcttctctcctccacccaaagcctgcagcggtt

SEQ ID NO: 2247 - DNA, 60 bp, Artificial
  Synthetic oligonucleotide
gccggtaaacgaaccaactcagcagcagttacaaaccgacttagcccagcaaacgccgcc

SEQ ID NO: 2248 - DNA, 60 bp, Artificial
  Synthetic oligonucleotide
ccctcctgaagcacaaccctgccgctgagtcctattctgtgtcctccgcgcaaagtaagg

SEQ ID NO: 2249 - DNA, 60 bp, Artificial
  Synthetic oligonucleotide
cgcagaggcaaacagagagggtgaagaggcgagaatccaggccgaaacccagatagccga

SEQ ID NO: 2250 - DNA, 60 bp, Artificial
  Synthetic oligonucleotide
cgctgcacttattgatggcccgaagtcaaaccccgccgctgccttgtctgaagccacagt

SEQ ID NO: 2251 - DNA, 60 bp, Artificial
  Synthetic oligonucleotide
gacccctcctgccagagccgtttcgcattctccgttccttattgcccgacaagccatgtg

SEQ ID NO: 2252 - DNA, 60 bp, Artificial
  Synthetic oligonucleotide
ccgccgaattgtccaagtccgaggccgaaccatggatgctgctgaagtgccgcaatacct

SEQ ID NO: 2253 - DNA, 60 bp, Artificial
  Synthetic oligonucleotide
cacacctgcgcctccacccgccaaagccattaatagcaaactcacctccttgatacgcca

SEQ ID NO: 2254 - DNA, 60 bp, Artificial
  Synthetic oligonucleotide
gaagacgttggatgccatgccatacttctcggccaagtcctcccgcgccaatcattgccg

SEQ ID NO: 2255 - DNA, 60 bp, Artificial
  Synthetic oligonucleotide
ggggtggcaatggcaaaagcacaaggacaagcgacgagtaaaacagcaaccgccgtccga

SEQ ID NO: 2256 - DNA, 60 bp, Artificial
  Synthetic oligonucleotide
ccgccgcaccgccgcctaattcgctgaagtccacagtaacgctgaccacgtctgcattat

SEQ ID NO: 2257 - DNA, 60 bp, Artificial
  Synthetic oligonucleotide
ggccgccttcacctgctgccaaatttccatccatagccagctgccattgatccgccagag

SEQ ID NO: 2258 - DNA, 60 bp, Artificial
  Synthetic oligonucleotide
gcccctgcaccaacacgagcgccacctctgttcgtaccgtcttttgccaatgatcacacc

SEQ ID NO: 2259 - DNA, 60 bp, Artificial
  Synthetic oligonucleotide
ccgccgccaaagccttgaggtccgccaccatttccattgacaccagcgtggccatattga

SEQ ID NO: 2260 - DNA, 60 bp, Artificial
  Synthetic oligonucleotide
ggaggctatgaagcgataaccccgtcccctcgtctttcccctcgtcttacatccccgcta

SEQ ID NO: 2261 - DNA, 60 bp, Artificial
  Synthetic oligonucleotide
ggttcttcgctacccgcagtcacccctaagaaacaacccatcccaagacgctccatatcc

SEQ ID NO: 2262 - DNA, 60 bp, Artificial
  Synthetic oligonucleotide
ccgcctgatctcctgcaccgccgacaacaagaatctcaccctccaagcccagttctgctt

SEQ ID NO: 2263 - DNA, 60 bp, Artificial
  Synthetic oligonucleotide
gatggggtcgtaacgcttcctccactgcttcctccgccgcttctctctctttccactgta

SEQ ID NO: 2264 - DNA, 60 bp, Artificial
  Synthetic oligonucleotide
ctcctcccaccggtaccagcagcacatccacatttccgatttccctgacctggctgtcac

SEQ ID NO: 2265 - DNA, 60 bp, Artificial
  Synthetic oligonucleotide
cggcgggaatttgcggaagcgggcttttggatatggttggtgagtttgcggcccatggag

SEQ ID NO: 2266 - DNA, 60 bp, Artificial
  Synthetic oligonucleotide
ttccggacagagacctgccgtaaatgtcgggctttcggtttcaagagtgggtggtgcggc

SEQ ID NO: 2267 - DNA, 60 bp, Artificial
  Synthetic oligonucleotide
cgccttcccaatagagcgctttcatccgatcccgccgccggccacaaaagagaaacagac

SEQ ID NO: 2268 - DNA, 60 bp, Artificial
  Synthetic oligonucleotide
ccgcagcctcgttaaccaaaacccacacactttcctcgtcacacaggcctgctccggcat

SEQ ID NO: 2269 - DNA, 60 bp, Artificial
  Synthetic oligonucleotide
cccgaaaccgccatgccgcgttgccgcccaagtgtttgcaaaggtgctcccgacaatttt

SEQ ID NO: 2270 - DNA, 60 bp, Artificial
  Synthetic oligonucleotide
gcctgccgccgccatcataatcgctccgatgcttcctataccgcacgccactcccaattt

SEQ ID NO: 2271 - DNA, 60 bp, Artificial
  Synthetic oligonucleotide
gcgcggactgagagatttggacggcaagggcgtgcttgtgggtttgacggagattggaga

SEQ ID NO: 2272 - DNA, 60 bp, Artificial
  Synthetic oligonucleotide
cgcatgcctcaaccaatccgtcatatcttcctccgccacataccgtaccctgtgcgccga

SEQ ID NO: 2273 - DNA, 60 bp, Artificial
  Synthetic oligonucleotide
ccgtatccgttccgcttcccgaagatccgcctgatgctccaccacttccacctgcactta

SEQ ID NO: 2274 - DNA, 60 bp, Artificial
  Synthetic oligonucleotide
gcctgtgtaacctcttccctgacatttgttgccgttgctcctgcccaccccgcttcatgg

SEQ ID NO: 2275 - DNA, 60 bp, Artificial
  Synthetic oligonucleotide
cagcgcctccctgttttctgtccaccacaacgacactccattttatcctgccgccgttgt

SEQ ID NO: 2276 - DNA, 60 bp, Artificial
  Synthetic oligonucleotide
gcgggaagggagcatacactggcattgcaggaagacggtactttgtgggcgtggggaaac

SEQ ID NO: 2277 - DNA, 60 bp, Artificial
  Synthetic oligonucleotide
cttgttccttatcccaaggacagccatcttctcctcttaattgctccattatatctagta

SEQ ID NO: 2278 - DNA, 60 bp, Artificial
  Synthetic oligonucleotide
ggctccaagtcttttggcagttcttgcagcatccatagcaacatttccaccaccaactac

SEQ ID NO: 2279 - DNA, 60 bp, Artificial
  Synthetic oligonucleotide
aagtagttcttggtcggggtgacagggctcgaacctgcgacctcatggtcccaaaccacg

SEQ ID NO: 2280 - DNA, 60 bp, Artificial
  Synthetic oligonucleotide
gcggttaagacgccaccctctcacggtggaatcatgggttcgattcccgtatgggtcacc

SEQ ID NO: 2281 - DNA, 60 bp, Artificial
  Synthetic oligonucleotide
ggagaagaattaggaattcctcaccacttagtatggagacagccattcccaggaccagga

SEQ ID NO: 2282 - DNA, 60 bp, Artificial
  Synthetic oligonucleotide
caacaccgcctggtgttgcacttttaacactagcaactattacatctccgatatttcccc

SEQ ID NO: 2283 - DNA, 60 bp, Artificial
  Synthetic oligonucleotide
ctgctacattgtaagcaactcttcttactgtgaaagtttctcttgctccaccattttgtc

SEQ ID NO: 2284 - DNA, 60 bp, Artificial
  Synthetic oligonucleotide
gacaaaatggtggagcaagagaaactttcacagtaagaagagttgcttacaatgtagcag

SEQ ID NO: 2285 - DNA, 60 bp, Artificial
  Synthetic oligonucleotide
cggtggagacggttgggcttatgacatcggatatggtggagtagaccacgtacttgcttc

SEQ ID NO: 2286 - DNA, 60 bp, Artificial
  Synthetic oligonucleotide
ctccagctgcacgaggcataaattgagatgtgataaatggcatcataacaggaactgcgc

SEQ ID NO: 2287 - DNA, 60 bp, Artificial
  Synthetic oligonucleotide
gcgcagttcctgttatgatgccatttatcacatctcaatttatgcctcgtgcagctggag

SEQ ID NO: 2288 - DNA, 60 bp, Artificial
  Synthetic oligonucleotide
gactgcaccaccaaagccatttcctccatctagtcttataccaaatcctgaactagttct

SEQ ID NO: 2289 - DNA, 60 bp, Artificial
  Synthetic oligonucleotide
gtgacctgggccacccattcctgtaccatttgggcatcctccttgtatcataaatcctgg

SEQ ID NO: 2290 - DNA, 60 bp, Artificial
  Synthetic oligonucleotide
ccacaggttgcagaagtaatagctgtaggacctggtggattagttgatggaaaagaagtt

SEQ ID NO: 2291 - DNA, 60 bp, Artificial
  Synthetic oligonucleotide
gctcctgggaaaattccattttccatacctaccataaatactactgggaattcaagtccc

SEQ ID NO: 2292 - DNA, 60 bp, Artificial
  Synthetic oligonucleotide
cgaacccgcggccaactggttcgtagccagctactctatccaactgagctaccgatgcaa

SEQ ID NO: 2293 - DNA, 60 bp, Artificial
  Synthetic oligonucleotide
cttcttttccatcaactaatccaccaggtcctacagctattacttctgcaacctgtggtt

SEQ ID NO: 2294 - DNA, 60 bp, Artificial
  Synthetic oligonucleotide
ctatagggcctaaacttgcatattatgctggatggacgtattgggtggttcatatgcctt

SEQ ID NO: 2295 - DNA, 60 bp, Artificial
  Synthetic oligonucleotide
ggatctaatggtatgcagtgtccaccaagacctggacctggatagaatgccataaatcca

SEQ ID NO: 2296 - DNA, 60 bp, Artificial
  Synthetic oligonucleotide
ggcatatgaaccacccaatacgtccatccagcataatatgcaagtttaggccctatagtt

SEQ ID NO: 2297 - DNA, 60 bp, Artificial
  Synthetic oligonucleotide
ggctcctcggagaggactcgaacctccaacctatcggttaacagccgagtgctccaccat

SEQ ID NO: 2298 - DNA, 60 bp, Artificial
  Synthetic oligonucleotide
ggctccgcgaagaggactcgaacctccaacctatcggttaacagccgagtgctccaccat

SEQ ID NO: 2299 - DNA, 60 bp, Artificial
  Synthetic oligonucleotide
cggtggagcactcggctgttaaccgataggttgaaggttcgaatccttttcacggagcca

SEQ ID NO: 2300 - DNA, 60 bp, Artificial
  Synthetic oligonucleotide
gatggtgggttaaaatcttcaggttttgtcccaaattcatacctttccggcactatccaa

SEQ ID NO: 2301 - DNA, 60 bp, Artificial
  Synthetic oligonucleotide
ccctatttggatcgttgcctatttgaccattatgggtacctactagtcctaaagatgcat

SEQ ID NO: 2302 - DNA, 60 bp, Artificial
  Synthetic oligonucleotide
gttcattaactaaagcccttgctattgccaccctttgttgttggccaccagataacttgg

SEQ ID NO: 2303 - DNA, 60 bp, Artificial
  Synthetic oligonucleotide
gttgacatggttggagaaaagggtgcaggggacatagtaatgggacttgttaatcaggag

SEQ ID NO: 2304 - DNA, 60 bp, Artificial
  Synthetic oligonucleotide
gctaagctttcagaagaagaaatatgggaaaggttacgggaaaattggattagggatggt

SEQ ID NO: 2305 - DNA, 60 bp, Artificial
  Synthetic oligonucleotide
ccagaggttagagcatcaaagtaaaaggtgtccctgtagtcctcagtatctaaagtagcc

SEQ ID NO: 2306 - DNA, 60 bp, Artificial
  Synthetic oligonucleotide
gacgctaaagtagaaatcgaagcaatacggggaatgggctatcgtttatttcaggtgtaa

SEQ ID NO: 2307 - DNA, 60 bp, Artificial
  Synthetic oligonucleotide
gtgcacaatacaaccaaccatgaccagtactacctgttattataactgaatgagtccaat

SEQ ID NO: 2308 - DNA, 60 bp, Artificial
  Synthetic oligonucleotide
ccaagtgaactatcaggagggcaacagcaaagggtagctatagcaagggctcttgtgaca

SEQ ID NO: 2309 - DNA, 60 bp, Artificial
  Synthetic oligonucleotide
gcagcaagggtaatgcgacttagtggaagtgtaaatcaaaagaatggacatgccgttgac

SEQ ID NO: 2310 - DNA, 60 bp, Artificial
  Synthetic oligonucleotide
gctccaatagttggtgcggttgttggtggaatcactgcggttatagctggacatcaatat

SEQ ID NO: 2311 - DNA, 60 bp, Artificial
  Synthetic oligonucleotide
cggaagtggcaaaactatattattcaaaatgatagcaggatttatggctccaactaatgg

SEQ ID NO: 2312 - DNA, 60 bp, Artificial
  Synthetic oligonucleotide
cgcgtggtttgggaccatgaggtcgcaggttcgatccctgtcaccccgaccaaaaggaat

SEQ ID NO: 2313 - DNA, 60 bp, Artificial
  Synthetic oligonucleotide
gtcgaacccctgattccaccgtgagagggtggcgtcttaaccgcttgaccaagaagcctc

SEQ ID NO: 2314 - DNA, 60 bp, Artificial
  Synthetic oligonucleotide
cgaactcctgatttcaccgtgagagggtggcgtcttaaccgcttgaccaatgggcctcac

SEQ ID NO: 2315 - DNA, 60 bp, Artificial
  Synthetic oligonucleotide
gcgcgcgtggtttgggaccatgaggtcgcaggttcaatccctgtcaccccgaccaaatat

SEQ ID NO: 2316 - DNA, 60 bp, Artificial
  Synthetic oligonucleotide
gcgcgcgtggtttgggaccatgaggtcgcaggttcaatccctgtcaccccgaccatttaa

SEQ ID NO: 2317 - DNA, 60 bp, Artificial
  Synthetic oligonucleotide
ctgggcaatcatgcctcccatagaagcaccacagatgtgagccttctttatattgagcgc

SEQ ID NO: 2318 - DNA, 60 bp, Artificial
  Synthetic oligonucleotide
cgtctgcaaatcaacaattagggcttctaagtgttcttctgtataacttgtgccaactcc

SEQ ID NO: 2319 - DNA, 60 bp, Artificial
  Synthetic oligonucleotide
cctgtatatgtcaataccccttttggttcatcttctccgaccccataaagtccagcttta

SEQ ID NO: 2320 - DNA, 60 bp, Artificial
  Synthetic oligonucleotide
cctgcaactatcacagaagtgttcaaaagcacctcatagccttccatgtcagagtagctg

SEQ ID NO: 2321 - DNA, 60 bp, Artificial
  Synthetic oligonucleotide
gaccatctgcccttgtttcccattgttgcaagtttccacgcaaggtcaatactataacta

SEQ ID NO: 2322 - DNA, 60 bp, Artificial
  Synthetic oligonucleotide
ccccttttggttcatcttctccgaccccataaagtccagctttatctattgcacttgcaa

SEQ ID NO: 2323 - DNA, 60 bp, Artificial
  Synthetic oligonucleotide
gcagtcattttagctatactgctcattgtaaaacgtgaaagctctgccatagcgacagca

SEQ ID NO: 2324 - DNA, 60 bp, Artificial
  Synthetic oligonucleotide
cacgtgctgtagccctatgcttttgctctccacaataaaactttgaactttgtgcctgtg

SEQ ID NO: 2325 - DNA, 60 bp, Artificial
  Synthetic oligonucleotide
ccctttctctttccaaaatgcaaaactccctactgctctagctcctctaaactgttcttc

SEQ ID NO: 2326 - DNA, 60 bp, Artificial
  Synthetic oligonucleotide
cttccaccaccccatacataaggtgactttcctacccatttcataccagcttcaattgcc

SEQ ID NO: 2327 - DNA, 60 bp, Artificial
  Synthetic oligonucleotide
ccctccaaatatttgaaagaatccacctataccaaaagctaaggctgctgccggagttcc

SEQ ID NO: 2328 - DNA, 60 bp, Artificial
  Synthetic oligonucleotide
catagcaccagctccaactgctccaccttttattgctgaatctactgttccaccagttgc

SEQ ID NO: 2329 - DNA, 60 bp, Artificial
  Synthetic oligonucleotide
gcctaataataacctcaccttctcgatctgcatcaccacaagccactatttcatctactc

SEQ ID NO: 2330 - DNA, 59 bp, Artificial
  Synthetic oligonucleotide
aaaattgctccattttcctttacaattcgctccgatatgaagtcttaggctcaacaaaa

SEQ ID NO: 2331 - DNA, 60 bp, Artificial
  Synthetic oligonucleotide
ccccaatctgatccatcctttgctggatatccccaataaagaattgtttctataccagca

SEQ ID NO: 2332 - DNA, 60 bp, Artificial
  Synthetic oligonucleotide
ggggagatgatgttaaagcttctcaaatggtgtatggtcaaaaccctgattctgctagac

SEQ ID NO: 2333 - DNA, 60 bp, Artificial
  Synthetic oligonucleotide
gacgagtatctctcattacggctttgggactgaatccatatccttgagacatgattccat

SEQ ID NO: 2334 - DNA, 60 bp, Artificial
  Synthetic oligonucleotide
ccttctgctttagatacaaacttaattccatctccaccttcaggttgtcctccaaaatca

SEQ ID NO: 2335 - DNA, 60 bp, Artificial
  Synthetic oligonucleotide
ggggctacttgtgttttgtgttgacggacttaagggttttaaagaagccataggagccgt

SEQ ID NO: 2336 - DNA, 60 bp, Artificial
  Synthetic oligonucleotide
ggcaaactgctggaaattggtgtggacctgcagctgcttataatgcaattataggggcta

SEQ ID NO: 2337 - DNA, 60 bp, Artificial
  Synthetic oligonucleotide
gggtaatgcacctatatgatcctcatgtccatgagtgagcacgatcccctttaccttgtc

SEQ ID NO: 2338 - DNA, 60 bp, Artificial
  Synthetic oligonucleotide
cgcagcaatagaagcagcacgagcaggagaagctggaaggggatttgctgtagtagcgga

SEQ ID NO: 2339 - DNA, 60 bp, Artificial
  Synthetic oligonucleotide
gcaggctcaactagaacttctgtattaccaagaaaatcaatggttggtggactttctcaa

SEQ ID NO: 2340 - DNA, 60 bp, Artificial
  Synthetic oligonucleotide
gcaggctcaactagaacttctgtattaccaagaaaatcaatggttggtggactttctgaa

SEQ ID NO: 2341 - DNA, 60 bp, Artificial
  Synthetic oligonucleotide
gcttgctgccttcaacactatctgaccacgtagatgtacgttttgccgagcttgaaagtc

SEQ ID NO: 2342 - DNA, 60 bp, Artificial
  Synthetic oligonucleotide
ctcggcaaaacgtacatctacgtggtcagatagtgttgaaagtagcaagtatggaactac

SEQ ID NO: 2343 - DNA, 60 bp, Artificial
  Synthetic oligonucleotide
cactttccactactggatgccaccaatgctgaacatctccctctttaaactgtcttgagg

SEQ ID NO: 2344 - DNA, 60 bp, Artificial
  Synthetic oligonucleotide
ggattcgaaccttcaacctatcggttaacagccgagtgctccaccgttgagctatcgcgg

SEQ ID NO: 2345 - DNA, 60 bp, Artificial
  Synthetic oligonucleotide
gggagcaattattatgtgaagtatggggatatgattacccaggcgattcaagaacagtag

SEQ ID NO: 2346 - DNA, 60 bp, Artificial
  Synthetic oligonucleotide
cctgggttacccattcctgtaccttctgggcatcctccttgtatcataaatcctggtata

SEQ ID NO: 2347 - DNA, 60 bp, Artificial
  Synthetic oligonucleotide
ctcagtagatgttaaaccagggcaaaaggtggctattgttggacctacaggagcaggtaa

SEQ ID NO: 2348 - DNA, 60 bp, Artificial
  Synthetic oligonucleotide
ggcgtcccggacaggaatcgaacccgtatcagtggaaccggaatccaccgtcttatccaa

SEQ ID NO: 2349 - DNA, 60 bp, Artificial
  Synthetic oligonucleotide
ggcgtcccggacaggaatcgaacccgtatcagtggaaccggaatccaccgtcttatccat

SEQ ID NO: 2350 - DNA, 60 bp, Artificial
  Synthetic oligonucleotide
gccaccgtctccaccgtttgcccatacgtctgaaagcacaacttctgcacccatctctgc

SEQ ID NO: 2351 - DNA, 60 bp, Artificial
  Synthetic oligonucleotide
gatgcctctccatcccgccatattctctcgccctttgcctcacccaccaatgccgctgta

SEQ ID NO: 2352 - DNA, 60 bp, Artificial
  Synthetic oligonucleotide
gctgttggtcctatcccctccacgcttccaaggatcgatcaccactaagccaccgccact

SEQ ID NO: 2353 - DNA, 60 bp, Artificial
  Synthetic oligonucleotide
gaaccagccatgccgaccattgccatctttgcagcgccagcgagtctttgcttagccggt

SEQ ID NO: 2354 - DNA, 60 bp, Artificial
  Synthetic oligonucleotide
cttcctaaagaagctgctgttattcctttccctaatgaagaaacaacgccacctgttaca

SEQ ID NO: 2355 - DNA, 60 bp, Artificial
  Synthetic oligonucleotide
cgtcctagagaagctgctgttattcctttccctaatgacgaaacaactccacctgttacg

SEQ ID NO: 2356 - DNA, 60 bp, Artificial
  Synthetic oligonucleotide
cctcatggtcccaaaccacgcgcgctcccatctgcgccacaccccggtgacatatattat

SEQ ID NO: 2357 - DNA, 60 bp, Artificial
  Synthetic oligonucleotide
ggtgttccagttgcaactatagttccacccttatctccgccttctggtcctaagtctatt

SEQ ID NO: 2358 - DNA, 60 bp, Artificial
  Synthetic oligonucleotide
ggcgcgagccgttacaccacgtttgacgcgaggcatgtcttactccttgttcgtcgttgg

SEQ ID NO: 2359 - DNA, 60 bp, Artificial
  Synthetic oligonucleotide
ttgctcttccaggggtttgagcatggtttcgcagaccacgtccacgccgcagatgtgcag

SEQ ID NO: 2360 - DNA, 60 bp, Artificial
  Synthetic oligonucleotide
accatccggagaacccagtgcttttgtctctcaagggaaccttccctcccgccatcctgg

SEQ ID NO: 2361 - DNA, 60 bp, Artificial
  Synthetic oligonucleotide
tcttcgctcaggatgctctggaacatcagcgccaccacctcgatgatggccttctcgctg

SEQ ID NO: 2362 - DNA, 60 bp, Artificial
  Synthetic oligonucleotide
gcgcggcgtcaaagtagctcgaaactggtagttggcttgcggcctgctgcagttgaagac

SEQ ID NO: 2363 - DNA, 60 bp, Artificial
  Synthetic oligonucleotide
gggttcatgctctttgtgacctggcagatgcaccttgcggtacttggccacgatctgccc

SEQ ID NO: 2364 - DNA, 60 bp, Artificial
  Synthetic oligonucleotide
cgtccgagcactggcttgaacgctcatcacaccccgaccttggattagcatgcatcgacc

SEQ ID NO: 2365 - DNA, 60 bp, Artificial
  Synthetic oligonucleotide
atctcaatcggcgccacattgccgacacccaacctaccgatgtcaacgtcgggcatggag

SEQ ID NO: 2366 - DNA, 60 bp, Artificial
  Synthetic oligonucleotide
cgctgcatgtgcgcaaccgcatggtgcaggcctacaccgacatcatgaacatgcaggtgt

SEQ ID NO: 2367 - DNA, 60 bp, Artificial
  Synthetic oligonucleotide
tggctcaagtgcaagtacatgcgcgagcatctgggcgaggagttcggtggcatggtctct

SEQ ID NO: 2368 - DNA, 60 bp, Artificial
  Synthetic oligonucleotide
tcattgatcagctgcagccctatgatttcgaccggctggctcgcaaggaacccgatgggc

SEQ ID NO: 2369 - DNA, 60 bp, Artificial
  Synthetic oligonucleotide
atcaagtcatacacaccgttcaggctgtaggccacgccaaactgcccggccagcaactgg

SEQ ID NO: 2370 - DNA, 60 bp, Artificial
  Synthetic oligonucleotide
ttgcgatcgaagacctgcggatcaagaacatgtcggccagcgccaagggaacgaaggacg

SEQ ID NO: 2371 - DNA, 60 bp, Artificial
  Synthetic oligonucleotide
aaacccgttcgggcacattgccatccgcgtcgacgacaccgtctacagcgccaactatgt

SEQ ID NO: 2372 - DNA, 60 bp, Artificial
  Synthetic oligonucleotide
gacggtcctgaatgcgcgcctgagccagttggaactcaagacgaagatcgcggcaaagca

SEQ ID NO: 2373 - DNA, 60 bp, Artificial
  Synthetic oligonucleotide
tcatcacgatgggtgtgttcatctggttcagctccgggcgaccaggtatagggtcgcgag

SEQ ID NO: 2374 - DNA, 60 bp, Artificial
  Synthetic oligonucleotide
cattctccgcaggcttgcgattcctggcagttgtgaggcacgtggatacgcctggccatt

SEQ ID NO: 2375 - DNA, 60 bp, Artificial
  Synthetic oligonucleotide
actggcgcagggattcaatggctggctcatttcgctcaaggggttgtccggtggagcttg

SEQ ID NO: 2376 - DNA, 60 bp, Artificial
  Synthetic oligonucleotide
ggtgatcgacttccgggtcagcaccttgcccaccttgtttggcgagaaagtcgtcatccg

SEQ ID NO: 2377 - DNA, 60 bp, Artificial
  Synthetic oligonucleotide
actttgctgacccagcacccacaccagccagaccacggtggcaaacattgggaacgccat

SEQ ID NO: 2378 - DNA, 60 bp, Artificial
  Synthetic oligonucleotide
atgcgagtagtagccctgcgtgccatcggcgttgaccatttgcgcaaacacctcaccacc

SEQ ID NO: 2379 - DNA, 60 bp, Artificial
  Synthetic oligonucleotide
tgatcacctccatcggcatggccaccaacaaggcgctctacgccaagttgagctacgacc

SEQ ID NO: 2380 - DNA, 60 bp, Artificial
  Synthetic oligonucleotide
tggtggacaaccaggccaaggccaacatccacaacgcgcaaagccgcaagttcatcgctc

SEQ ID NO: 2381 - DNA, 60 bp, Artificial
  Synthetic oligonucleotide
ctggtcgagatggtggacaaccaggccaaggccaacatccacaacgcgcaaagccgtaag

SEQ ID NO: 2382 - DNA, 60 bp, Artificial
  Synthetic oligonucleotide
tggtcaagcgctatacctccagcgtgttcttcgacaagcgcctgtggcaggccgacatca

SEQ ID NO: 2383 - DNA, 60 bp, Artificial
  Synthetic oligonucleotide
ccctgcgcggcttggtatatcaggtcggcgctgtcgatgaaatgctgttggatgcgttgc

SEQ ID NO: 2384 - DNA, 60 bp, Artificial
  Synthetic oligonucleotide
tgcctggccttcctgatcctgatccacaaggccgagtacgtgatcaacgccaaggtcgtg

SEQ ID NO: 2385 - DNA, 60 bp, Artificial
  Synthetic oligonucleotide
ttctgatcctgatccacaaggccgagtacgtgatcaacgccaaggtggtgggccagcgca

SEQ ID NO: 2386 - DNA, 60 bp, Artificial
  Synthetic oligonucleotide
cgtatctacaacacgctgtcgcgtgcattggaggagttttccccgctcgaacccggccat

SEQ ID NO: 2387 - DNA, 60 bp, Artificial
  Synthetic oligonucleotide
ccatgcaaaccgtcaagatgtacaccaccgccgtctgcccctactgcatgcaagccaagc

SEQ ID NO: 2388 - DNA, 60 bp, Artificial
  Synthetic oligonucleotide
ggctgcgcatcgtgcaccagcacaagatgctgcacctggacatcaagcccgccaacattt

SEQ ID NO: 2389 - DNA, 60 bp, Artificial
  Synthetic oligonucleotide
tgtccttggccttgaccgacagctggatgttgcgggtcttgcgatccacgttcaccacga

SEQ ID NO: 2390 - DNA, 60 bp, Artificial
  Synthetic oligonucleotide
gccgccgctggaccgacatcatcagcttcaccatcaacatggagcagatcggcgacatca

SEQ ID NO: 2391 - DNA, 60 bp, Artificial
  Synthetic oligonucleotide
gtccgccctgttttccgaacccatgagcgacctggtcaagcgctatacctccagcgtgtt

SEQ ID NO: 2392 - DNA, 60 bp, Artificial
  Synthetic oligonucleotide
tgttcgacgaacccatgagcgatctggtcaagcgctacaccgccagtgtgtccttcgacc

SEQ ID NO: 2393 - DNA, 60 bp, Artificial
  Synthetic oligonucleotide
cagcaagcaagcaccgattcgcgcctctggcggcgtcttccccagttgttccactaaatg

SEQ ID NO: 2394 - DNA, 60 bp, Artificial
  Synthetic oligonucleotide
gcgtggtgttcgctcaatgcctgcaaaacagccatatccaccgcatccgtgctgtcggca

SEQ ID NO: 2395 - DNA, 60 bp, Artificial
  Synthetic oligonucleotide
aaaacacatgggtctcactgctgcccgataccagcgccaacctgtcatcgtccagcgcct

SEQ ID NO: 2396 - DNA, 60 bp, Artificial
  Synthetic oligonucleotide
gcgcagagatgatccacgatgttccgtagacaaaagctccagactcccgccacacgccga

SEQ ID NO: 2397 - DNA, 60 bp, Artificial
  Synthetic oligonucleotide
acattgcgatatagcgttcatttccgccgatgagggtttgttcgcccgcgctgacccgcg

SEQ ID NO: 2398 - DNA, 60 bp, Artificial
  Synthetic oligonucleotide
agcaagtcgtgtaccccggcgttctgcgctcctgtttcatggaccaaacccgcctatctc

SEQ ID NO: 2399 - DNA, 60 bp, Artificial
  Synthetic oligonucleotide
ccgcctactgtcaatggtcccgccaaggctggatcgatcgtatctccgcgcagaacgtaa

SEQ ID NO: 2400 - DNA, 60 bp, Artificial
  Synthetic oligonucleotide
gagcgttgcgaaccaaaccccggccaacagcatgcgcggctcaaaagtcctgaagaccaa

SEQ ID NO: 2401 - DNA, 60 bp, Artificial
  Synthetic oligonucleotide
taagccatcccgaccgcattctttcgtccaagggccgcagtatcggcaattaccagggcc

SEQ ID NO: 2402 - DNA, 60 bp, Artificial
  Synthetic oligonucleotide
aaagccgccacgactggtttgctcgataggccgccattcccagtgaagcaccgcaaagtc

SEQ ID NO: 2403 - DNA, 60 bp, Artificial
  Synthetic oligonucleotide
ttccgcatccgagaggttgagcgcaatcacatgctgttggcccggctggacatgatgctg

SEQ ID NO: 2404 - DNA, 60 bp, Artificial
  Synthetic oligonucleotide
gcgccatgtcacccgcttgccctccaatctggcccaggcatcccttaattcggttttctg

SEQ ID NO: 2405 - DNA, 60 bp, Artificial
  Synthetic oligonucleotide
cggccgccggtcttgagatagttaaagcccaagcccgtctctcctcctaccgactttgtg

SEQ ID NO: 2406 - DNA, 60 bp, Artificial
  Synthetic oligonucleotide
taagcgagtttatttctgcttcgagcttcaccgcgaccctgcacgccgctcaagcctgcc

SEQ ID NO: 2407 - DNA, 60 bp, Artificial
  Synthetic oligonucleotide
cgcatcgtctgcaggttcacaaacgccccatggacatccgtttccccgtagcgaaacagc

SEQ ID NO: 2408 - DNA, 60 bp, Artificial
  Synthetic oligonucleotide
cgccgccgtcagtgaccagacaaatatcaagcaggtgcattggatcgcagaccatcgggc

SEQ ID NO: 2409 - DNA, 60 bp, Artificial
  Synthetic oligonucleotide
gcgcccttccaaaccaccttccaacctgcgtccttcgcccaacgacccagcatgttttca

SEQ ID NO: 2410 - DNA, 60 bp, Artificial
  Synthetic oligonucleotide
tttctgcacttgtccatgcacctgtccatcagcgagcagtgcagcattgaccagccgcgc

SEQ ID NO: 2411 - DNA, 60 bp, Artificial
  Synthetic oligonucleotide
cccgacatgcgctgctccatctcgatgacttcctcgcgcttgacgttcagtgttttggcc

SEQ ID NO: 2412 - DNA, 60 bp, Artificial
  Synthetic oligonucleotide
gggctgacggaactgctttcatcgccttcccaagcgcgtgttcaaaacgctcagtggctc

SEQ ID NO: 2413 - DNA, 60 bp, Artificial
  Synthetic oligonucleotide
aacgcccaactgatgttccccagcctctttaccgcccagccttatttgcgcagcggcaag

SEQ ID NO: 2414 - DNA, 60 bp, Artificial
  Synthetic oligonucleotide
gtggtgggccgcttcaaggtcttcatgatcgacgaggttcacatgctgacgaacacggcg

SEQ ID NO: 2415 - DNA, 60 bp, Artificial
  Synthetic oligonucleotide
ttccacaagaacaaggcagcgcgcgataaaagccgcctgtccgccaaggtgaaagccctg

SEQ ID NO: 2416 - DNA, 60 bp, Artificial
  Synthetic oligonucleotide
tacatcttcttgcgccaggtggagcaccgcatccagtacctggacgaccagcagacccat

SEQ ID NO: 2417 - DNA, 60 bp, Artificial
  Synthetic oligonucleotide
ctgctgggcaacatgggcaccgaagtcgtcttcaaggccgacgacaagatcgacaacgtg

SEQ ID NO: 2418 - DNA, 60 bp, Artificial
  Synthetic oligonucleotide
atcgcgatgcacgtggacgaagtgctgggcaaccaggaagtggtggtcaagaacctcggc

SEQ ID NO: 2419 - DNA, 60 bp, Artificial
  Synthetic oligonucleotide
aacagcatgcacgagatctcctcctccagccgcaagatcggcgacatcatcggcctgatc

SEQ ID NO: 2420 - DNA, 60 bp, Artificial
  Synthetic oligonucleotide
ggcaacggccgcaagctgatggatgcgttctacgccaagtacaacatcaagagccgcagc

SEQ ID NO: 2421 - DNA, 60 bp, Artificial
  Synthetic oligonucleotide
tttgcaaagccgcgatgcgctcttcaatcggcgggtgggtcgagaacagcttgccaatgc

SEQ ID NO: 2422 - DNA, 60 bp, Artificial
  Synthetic oligonucleotide
attcgctataccgggttcgaccagtacggcgacccgatcaaccgcacggtggagggtttt

SEQ ID NO: 2423 - DNA, 60 bp, Artificial
  Synthetic oligonucleotide
agaacgaattgaagaagacggagctgtgcgattcgtgcgccggcatccagcgcaactggc

SEQ ID NO: 2424 - DNA, 60 bp, Artificial
  Synthetic oligonucleotide
cgccgccaaaattcatcggtcaccacccacgattcgactcgcttgcgtgtcgccattcct

SEQ ID NO: 2425 - DNA, 60 bp, Artificial
  Synthetic oligonucleotide
atctacgtgcgcattgccaaccgtgatttcgacgtgatggcgtcccgggcggtacatgag

SEQ ID NO: 2426 - DNA, 60 bp, Artificial
  Synthetic oligonucleotide
gcaagacgcgccccgaaataaccacccacaccaccggttcccatgacagcgatacgcatt

SEQ ID NO: 2427 - DNA, 60 bp, Artificial
  Synthetic oligonucleotide
tgcagttggaggtacaggcggcattcggcctgcgcatgaaggaatccctgcagctcaatc

SEQ ID NO: 2428 - DNA, 60 bp, Artificial
  Synthetic oligonucleotide
cagggcaaggcccgaaacggtatcttgatggacggtgaacccggcaatggcaaaacggtc

SEQ ID NO: 2429 - DNA, 60 bp, Artificial
  Synthetic oligonucleotide
aaaatgcggtcgaagcgacccgcttgctctcgcagtccggattgaatccctccaatgccc

SEQ ID NO: 2430 - DNA, 60 bp, Artificial
  Synthetic oligonucleotide
aattgtgactgacttttacacccagcggccagctactgcagctcgtcgaagtggcggcgc

SEQ ID NO: 2431 - DNA, 60 bp, Artificial
  Synthetic oligonucleotide
aagtgaggctccagtaccagaccgtgcaccaggctgccgaaatccatggcttttgtggcc

SEQ ID NO: 2432 - DNA, 60 bp, Artificial
  Synthetic oligonucleotide
taaaccggtcagacgccacggtcgcgccctttatgttccaggtctcggcattacgtccgt

SEQ ID NO: 2433 - DNA, 60 bp, Artificial
  Synthetic oligonucleotide
gggcactggctgtgcttgctctaccgcttcacgctgggacagagcatgattcgacctgtt

SEQ ID NO: 2434 - DNA, 60 bp, Artificial
  Synthetic oligonucleotide
ttggccctcaagcaccatgctgtggctgttcatcaggatgcggtcgacatagaggagcgg

SEQ ID NO: 2435 - DNA, 60 bp, Artificial
  Synthetic oligonucleotide
ccgtctcgtttcgggccttgaaccagctcaacttgaagacaagccgggcctggtgcatca

SEQ ID NO: 2436 - DNA, 60 bp, Artificial
  Synthetic oligonucleotide
ttcaagctttcgctctggcaccaggtccagcacccgcgagcggtcaatgtcggtcagaat

SEQ ID NO: 2437 - DNA, 60 bp, Artificial
  Synthetic oligonucleotide
aaaagagttcggagaagggccacacctacgccagcatcctgaccgacattgaccgctcgc

SEQ ID NO: 2438 - DNA, 60 bp, Artificial
  Synthetic oligonucleotide
aaaagagttcggagagaggccacacctacgccagcatcctgaccgacattgaccgctcgc

SEQ ID NO: 2439 - DNA, 60 bp, Artificial
  Synthetic oligonucleotide
gctccgcccagggcaccatcaactcttcgacagtgccgtcactgaatttgagctggggaa

SEQ ID NO: 2440 - DNA, 60 bp, Artificial
  Synthetic oligonucleotide
atccatgaccgcacgcaaactcttcgtcaccaccgccctgccgtacgccaacggcaactt

SEQ ID NO: 2441 - DNA, 60 bp, Artificial
  Synthetic oligonucleotide
atctcgcaggacagtccgaagccggaggagttgatgaagcgcagcaggttgaaggacagc

SEQ ID NO: 2442 - DNA, 60 bp, Artificial
  Synthetic oligonucleotide
ggatgcgcagcttgccaaagcctgcaaaccatccatgcgttctctccaccacccagcgat

SEQ ID NO: 2443 - DNA, 60 bp, Artificial
  Synthetic oligonucleotide
gcgcatactctgtctacgtcaccgaatactcagctcacatcacgctcgttggccgatgcc

SEQ ID NO: 2444 - DNA, 60 bp, Artificial
  Synthetic oligonucleotide
cttgaaatcagagatgtactacggcgcgtctttcaccagtgtcgatgagctttgccaagc

SEQ ID NO: 2445 - DNA, 60 bp, Artificial
  Synthetic oligonucleotide
ccctgagctgtgaactgagccccgttttccggactgggttaattctaaacggttagggtc

SEQ ID NO: 2446 - DNA, 60 bp, Artificial
  Synthetic oligonucleotide
cgatattgcatcggagccagacccttgaatcgttcttggagtcggtacgtgttgtaccac

SEQ ID NO: 2447 - DNA, 60 bp, Artificial
  Synthetic oligonucleotide
gtgccggctacccggaactctgtgacgtcactaacccacactttgttcggtgcgtcttgg

SEQ ID NO: 2448 - DNA, 60 bp, Artificial
  Synthetic oligonucleotide
cctcggtgtcaggcgtgagcaagtacgtcatctcgaagaccggttccggttacatggcag

SEQ ID NO: 2449 - DNA, 60 bp, Artificial
  Synthetic oligonucleotide
cacgctgagcctgactgagtttactgcgtggatgcatagagaaactccccacaatctggt

SEQ ID NO: 2450 - DNA, 60 bp, Artificial
  Synthetic oligonucleotide
gaggcattcggcaacacctcaccaatcgcgtgctgaattcccaggtgggcatcactggtg

SEQ ID NO: 2451 - DNA, 60 bp, Artificial
  Synthetic oligonucleotide
ccagcagctcatccagggcttcttccaggtaatcggccacatccgggaacttctgctcac

SEQ ID NO: 2452 - DNA, 60 bp, Artificial
  Synthetic oligonucleotide
atgtaccgcttctgctgaatccaatcatcatgctgctccgccagcaccgccccgaccaga

SEQ ID NO: 2453 - DNA, 60 bp, Artificial
  Synthetic oligonucleotide
atgtaccgcttctgctgaatccaatcatcatgctgttccgccagcaccgccccgaccagg

SEQ ID NO: 2454 - DNA, 60 bp, Artificial
  Synthetic oligonucleotide
cagaagcggtacatgtcgttgacgagcttggagcagaccagggcgatgatgacggcgaac

SEQ ID NO: 2455 - DNA, 60 bp, Artificial
  Synthetic oligonucleotide
gcggacgttttgttagacactttcaacctcacgctaccgcagccatgcgataacgcgcga

SEQ ID NO: 2456 - DNA, 60 bp, Artificial
  Synthetic oligonucleotide
cccaggcagatggaccctgtataaatggctacgcgagcccaaaaccccaccacaaccacg

SEQ ID NO: 2457 - DNA, 60 bp, Artificial
  Synthetic oligonucleotide
cccgcccctcattcacagcgaaaacactaatatcagtcagccacaacgtattcgcagcag

SEQ ID NO: 2458 - DNA, 60 bp, Artificial
  Synthetic oligonucleotide
acaagaagaccagcattcatcccgtcgtcactaaacggctgggtctgccctcccacgcct

SEQ ID NO: 2459 - DNA, 60 bp, Artificial
  Synthetic oligonucleotide
cgctcatgtgcatgcagtgagacgtgatcgccaatgaaatctgggctgcgctcagcgcgt

SEQ ID NO: 2460 - DNA, 60 bp, Artificial
  Synthetic oligonucleotide
cgactggggaaagcatcaacgcttacgtctcggtcatccatgatcaagagttcagcagct

SEQ ID NO: 2461 - DNA, 60 bp, Artificial
  Synthetic oligonucleotide
cattccaatcggtgtggtgagtgtgtgtggagttggcaagttgcggaacgatcttgcctg

SEQ ID NO: 2462 - DNA, 60 bp, Artificial
  Synthetic oligonucleotide
ggcgtcatgatgcggagttgcggtggtgggagagctttgtcaacggctgttttgacgatt

SEQ ID NO: 2463 - DNA, 60 bp, Artificial
  Synthetic oligonucleotide
cgcacgcccaaccttgacatcaattccggtgtgctgcacaaagaactctaaccattcctg

SEQ ID NO: 2464 - DNA, 60 bp, Artificial
  Synthetic oligonucleotide
cgagggccacgcagcgagcacaatctagcgcattcgaggagtattgagatcacgtcgtgc

SEQ ID NO: 2465 - DNA, 60 bp, Artificial
  Synthetic oligonucleotide
gcatctacactaaaggccataaaacttccggatttcgctttatcgggccatcgctaagtc

SEQ ID NO: 2466 - DNA, 60 bp, Artificial
  Synthetic oligonucleotide
ttgcaaacacaacttcgccaaccacgctatggctgaggccgtagtagataaagcggtgat

SEQ ID NO: 2467 - DNA, 60 bp, Artificial
  Synthetic oligonucleotide
cgtcccatttggtcatactaaacgtcattgccttccggtacctattgaccgctttccgtt

SEQ ID NO: 2468 - DNA, 60 bp, Artificial
  Synthetic oligonucleotide
ggcagaacacaaccgtcattgccccacaaccacctacatgcaacccctgccgggtatcac

SEQ ID NO: 2469 - DNA, 60 bp, Artificial
  Synthetic oligonucleotide
cctccacacctcacagtgcttccagatctggcctatcaaccccataatctctagggaacc

SEQ ID NO: 2470 - DNA, 60 bp, Artificial
  Synthetic oligonucleotide
ccctgcgtcaccccatcacttagctactaccagatcaggtcccacgcaaccacacaccac

SEQ ID NO: 2471 - DNA, 60 bp, Artificial
  Synthetic oligonucleotide
ggcgtgcgtgggacctgatctggtagtagctaagtgatggggtgacgcagtgaggtagca

SEQ ID NO: 2472 - DNA, 60 bp, Artificial
  Synthetic oligonucleotide
tagaaggatcattgccgcggcttcggcggtgtacttaagccccactacattgtcggcgcg

SEQ ID NO: 2473 - DNA, 60 bp, Artificial
  Synthetic oligonucleotide
ttttccacaaccatggcttggctgggattggctggcgttggtgaacgttggtgcgcgagc

SEQ ID NO: 2474 - DNA, 60 bp, Artificial
  Synthetic oligonucleotide
cgcactgcgttggttggtaaccttcacccgtcagcgtcgtgagaacaccatgatcgagcg

SEQ ID NO: 2475 - DNA, 60 bp, Artificial
  Synthetic oligonucleotide
ggcttgcgatgattccatcccagacccagagcgtgagaccgacaagccattcctcatgcc

SEQ ID NO: 2476 - DNA, 60 bp, Artificial
  Synthetic oligonucleotide
aaaatggctcgttataccggcccagcaacccgtaaatcccgtcgccttcgcgtcgacctc

SEQ ID NO: 2477 - DNA, 60 bp, Artificial
  Synthetic oligonucleotide
ctgctcagatggccgctgaaaacgctgcccgcaaggcaatggatcacggcatgaagaagg

SEQ ID NO: 2478 - DNA, 60 bp, Artificial
  Synthetic oligonucleotide
cacacagttgttcacccgcgacgacggctgtgctggatttcccacaaccggcacaaagag

SEQ ID NO: 2479 - DNA, 60 bp, Artificial
  Synthetic oligonucleotide
cacacagttgttcacccgcgacgacggctgtgctggaaacccacaaccggcacacacaaa

SEQ ID NO: 2480 - DNA, 60 bp, Artificial
  Synthetic oligonucleotide
gaaagcttccagggcaaggatccaccacaaaccggccatcgccctttggaatcggtccga

SEQ ID NO: 2481 - DNA, 60 bp, Artificial
  Synthetic oligonucleotide
cggtggtcgcctcatgtgttcatggggtccctcaccggcagttacagatacaccacgcta

SEQ ID NO: 2482 - DNA, 60 bp, Artificial
  Synthetic oligonucleotide
gggccagaagaagatgcgtgccctgaagcgtctgaaggttgttgcagccttccagcgttc

SEQ ID NO: 2483 - DNA, 60 bp, Artificial
  Synthetic oligonucleotide
gagggtgctaacaaggacgacgctgaggctgcaaaggctaagctcgaagaggctggtgca

SEQ ID NO: 2484 - DNA, 60 bp, Artificial
  Synthetic oligonucleotide
agcttctcgactacaccgaggctggcgacaactgtggtctgcttctccgtggcgttaagc

SEQ ID NO: 2485 - DNA, 60 bp, Artificial
  Synthetic oligonucleotide
acacatcgcggctgagatcatggagctgcaccactccaagcaccacgcaacctacgttgc

SEQ ID NO: 2486 - DNA, 60 bp, Artificial
  Synthetic oligonucleotide
tctccttgtagaagccgttcagacgaccctcaacgatcttagggatagcctgctctggct

SEQ ID NO: 2487 - DNA, 60 bp, Artificial
  Synthetic oligonucleotide
agatcaccgcgaagaagaccgtcgaggctctgcagatttctgctcagctcacccagctgc

SEQ ID NO: 2488 - DNA, 60 bp, Artificial
  Synthetic oligonucleotide
ggtgctgccggtaacatgcgtcagatctggacccttgctggtatgaagggcatggttgtg

SEQ ID NO: 2489 - DNA, 60 bp, Artificial
  Synthetic oligonucleotide
ccggtgctgccggtaacatgcgtcagatctggacccttgctggtatgaagggcatggttg

SEQ ID NO: 2490 - DNA, 60 bp, Artificial
  Synthetic oligonucleotide
ggctcgtcagcttgtttcccacggtcacttcaccgtgaacggcaaggcaatcgacgttcc

SEQ ID NO: 2491 - DNA, 60 bp, Artificial
  Synthetic oligonucleotide
cgtacccgtcgtcaggctcgtcagcttgtttcccacggtcacttcaccgtgaacggtaag

SEQ ID NO: 2492 - DNA, 60 bp, Artificial
  Synthetic oligonucleotide
gtagagtgccagtaggttgtttgacacacagttgttcacccgcgacgacggctgtgctgg

SEQ ID NO: 2493 - DNA, 60 bp, Artificial
  Synthetic oligonucleotide
ggggtagagtgccagtaggttgtaactcacacagttgttcacccgcgacgacggctgtgc

SEQ ID NO: 2494 - DNA, 60 bp, Artificial
  Synthetic oligonucleotide
ctccgccaaagcgttgtcagcactggtgccaattgatcccatcgactgcctgatccctag

SEQ ID NO: 2495 - DNA, 60 bp, Artificial
  Synthetic oligonucleotide
acgttgaaagggatggaggcgatgcactcattgcggaaggggcagggcacgatgtttgcc

SEQ ID NO: 2496 - DNA, 60 bp, Artificial
  Synthetic oligonucleotide
gcgtagttccatgcccgaaccccagcgaactaatcaatgcactctaaaaccggaagagcc

SEQ ID NO: 2497 - DNA, 60 bp, Artificial
  Synthetic oligonucleotide
ccttccgcaatgagtgcatcgcctccatccctttcaacgtccggtaggcagacgttcggt

SEQ ID NO: 2498 - DNA, 60 bp, Artificial
  Synthetic oligonucleotide
acgtctgcctaccggacgttgaaagggatggaagcgatgcactcattgcggaaggggcag

SEQ ID NO: 2499 - DNA, 60 bp, Artificial
  Synthetic oligonucleotide
tgccaccggcgcgtagaatccaccacaaccagctcctcccgcacaacacgagtagcaaaa

SEQ ID NO: 2500 - DNA, 60 bp, Artificial
  Synthetic oligonucleotide
aaacaccaccatctctgcacccgcctccacgacagcatccacatcagccgtcagcttctc

SEQ ID NO: 2501 - DNA, 60 bp, Artificial
  Synthetic oligonucleotide
gccgctggatcaaagacatcgccgccaacaaagccaccaaaatcgtcgaccgcggatcca

SEQ ID NO: 2502 - DNA, 60 bp, Artificial
  Synthetic oligonucleotide
acgcctcaccgaataccccagattcacaggcttccttggacagtgtgaacagctccgccc

SEQ ID NO: 2503 - DNA, 60 bp, Artificial
  Synthetic oligonucleotide
actatcgacgcctcctccgccgccgctctcatcgccgcagccttggagggcattcaggcc

SEQ ID NO: 2504 - DNA, 60 bp, Artificial
  Synthetic oligonucleotide
agaactccttggtggtcgaagtggtacgtggaacctcagatcgtcgcgccggcacaggat

SEQ ID NO: 2505 - DNA, 60 bp, Artificial
  Synthetic oligonucleotide
cgctcaccaacccagaccatccactgttcgcaggacttagcatcgacgccacacccaaca

SEQ ID NO: 2506 - DNA, 60 bp, Artificial
  Synthetic oligonucleotide
tccgctagtccactttcgatacaccccacaccgcgtcttcatccatgtccacggccacgt

SEQ ID NO: 2507 - DNA, 60 bp, Artificial
  Synthetic oligonucleotide
tgcaattgttctacgcgggagtgggacgcaagccgcgctactgtagccaaacctgtcgca

SEQ ID NO: 2508 - DNA, 60 bp, Artificial
  Synthetic oligonucleotide
acagccgtttccagtgatgaacccgcgaagtagacttttagccgtttgcaacccagccac

SEQ ID NO: 2509 - DNA, 60 bp, Artificial
  Synthetic oligonucleotide
cacgattcactactagctgcgcgcacaagcaacacgaaccaacaagcaatacgaagggaa

SEQ ID NO: 2510 - DNA, 60 bp, Artificial
  Synthetic oligonucleotide
gcggcgttcggcactaaccccatccgctttcatggctacgacgatgtgtaccaagagatc

SEQ ID NO: 2511 - DNA, 60 bp, Artificial
  Synthetic oligonucleotide
ggcggccagaaagcttcagaacgatggaacgaccgcaacagcaactacgcacaagccgag

SEQ ID NO: 2512 - DNA, 60 bp, Artificial
  Synthetic oligonucleotide
gtctgtggagatcagggaacgacgctccccggaaaggctatcaattgttcctcgtgccac

SEQ ID NO: 2513 - DNA, 60 bp, Artificial
  Synthetic oligonucleotide
ctggggtggggtgtagcgctgcccgcaatgtatgtgaggataaatctgcgcagtctgacc

SEQ ID NO: 2514 - DNA, 60 bp, Artificial
  Synthetic oligonucleotide
cgccagaggtagcagacagtacgcattcaccatcgagcgccagcgtcaagagccactgtt

SEQ ID NO: 2515 - DNA, 60 bp, Artificial
  Synthetic oligonucleotide
ataccggacaactacgacaagcctgaactgcattgcaccaatcaagccaccgggccgccg

SEQ ID NO: 2516 - DNA, 60 bp, Artificial
  Synthetic oligonucleotide
cagcaccttcttgcccacgtaggccgtaaaacgctgcaaggcgctgtcacgcgcgatttt

SEQ ID NO: 2517 - DNA, 60 bp, Artificial
  Synthetic oligonucleotide
cgccagagaagagttccgatacatctgctatttcgccggccttgactttgtgagcactcg

SEQ ID NO: 2518 - DNA, 60 bp, Artificial
  Synthetic oligonucleotide
gttcagccactccaggatctttcccttgttgtcccagcaccacttcacagccttggaacc

SEQ ID NO: 2519 - DNA, 60 bp, Artificial
  Synthetic oligonucleotide
cacggctatgcgttccttcagtcacggcgggtagagagacagtggagagtggtcgatcag

SEQ ID NO: 2520 - DNA, 60 bp, Artificial
  Synthetic oligonucleotide
tgccgctgtaaccgaactgcacgccgctgtgtcgagactcgtgtgggagaagggtcaaca

SEQ ID NO: 2521 - DNA, 60 bp, Artificial
  Synthetic oligonucleotide
catgcaatgatgatgaacgtgatgttgtcatacggccggcaagtgtgccatggcttgtaa

SEQ ID NO: 2522 - DNA, 60 bp, Artificial
  Synthetic oligonucleotide
cgggccacacgcttacaccacaatccaataaatggctcggctacctcactgcgtcacccc

SEQ ID NO: 2523 - DNA, 60 bp, Artificial
  Synthetic oligonucleotide
ccacggtgacaggcgtgccatgccagacactgcacagcagacgcgaaacactctttactc

SEQ ID NO: 2524 - DNA, 60 bp, Artificial
  Synthetic oligonucleotide
cgcaacccctgccaggtatcacacgcatacggtttagcctcatccacgttcgttcgccac

SEQ ID NO: 2525 - DNA, 60 bp, Artificial
  Synthetic oligonucleotide
atcttctccggtcggcagttccctcgtgaaatcatcctgtgggcggtgcggtggtactgc

SEQ ID NO: 2526 - DNA, 60 bp, Artificial
  Synthetic oligonucleotide
ggcagggcacgatgtttgcctatggtcacccgaatccggatgcagtgattgttagccggg

SEQ ID NO: 2527 - DNA, 60 bp, Artificial
  Synthetic oligonucleotide
cccatggacctgattattccacgccggtcttcctactgccccaactttgcaacagcaccg

SEQ ID NO: 2528 - DNA, 60 bp, Artificial
  Synthetic oligonucleotide
aaagtggtgctacctctatcgggcaatcaccgccggtggccagaccctggacttctacct

SEQ ID NO: 2529 - DNA, 60 bp, Artificial
  Synthetic oligonucleotide
ttcacccgacgatgctcgaccgtcgatggacagacgccttccgccttcagctcagagatt

SEQ ID NO: 2530 - DNA, 60 bp, Artificial
  Synthetic oligonucleotide
catgcattttccgcggccggtaattcagcagatcctgtgcccgctgaacttcttcgtcac

SEQ ID NO: 2531 - DNA, 60 bp, Artificial
  Synthetic oligonucleotide
tatatccctatggcgcaaacaaggcccagacaagcttcgccaacgcgcagccaccttgcg

SEQ ID NO: 2532 - DNA, 60 bp, Artificial
  Synthetic oligonucleotide
gacgtaaaccgcagtcgaagttgccatcgagaggtaagccgtgggtggagggtgcgttga

SEQ ID NO: 2533 - DNA, 60 bp, Artificial
  Synthetic oligonucleotide
ccgaccggtacgaagaaatttctccaccttcaattcatcacgcaacgcccctttaccttg

SEQ ID NO: 2534 - DNA, 60 bp, Artificial
  Synthetic oligonucleotide
atgtcaggtcttgctgcgtctacagcggtcggggtcagtgaattcaccgggcgaaagtgg

SEQ ID NO: 2535 - DNA, 60 bp, Artificial
  Synthetic oligonucleotide
tctgccatctccacaccctgatcccacgtcaaactccgacgcaacgcctgcggcaaatca

SEQ ID NO: 2536 - DNA, 60 bp, Artificial
  Synthetic oligonucleotide
ccggctcgtgcgctccaccaacgtcaccaacgctgtcgcttggttttcaccaccaattac

SEQ ID NO: 2537 - DNA, 60 bp, Artificial
  Synthetic oligonucleotide
gcctgcggcaaatcacccatcatctccaccaacgcatccgtcacagtcgacgcctcatga

SEQ ID NO: 2538 - DNA, 60 bp, Artificial
  Synthetic oligonucleotide
cggctttcctctgggattgttctacgaatgcccacttcgcacccttcgggttgctcgtgg

SEQ ID NO: 2539 - DNA, 60 bp, Artificial
  Synthetic oligonucleotide
ctcgaccaccacagcccgaagcctacgattggcatcaagtttcggtgttttcggacgcgc

SEQ ID NO: 2540 - DNA, 60 bp, Artificial
  Synthetic oligonucleotide
cagggtgtggagatggcagagcatgcgcggtttagcgtggtgaccaagtgtccggtgttt

SEQ ID NO: 2541 - DNA, 60 bp, Artificial
  Synthetic oligonucleotide
agcatgctggctgcaatctcaagtttctcggcggtgtcaaaagcattgccacctcgcggg

SEQ ID NO: 2542 - DNA, 60 bp, Artificial
  Synthetic oligonucleotide
cagctgaattcatccacgccccggtgatgggcccttattatgggccacgcacactccatc

SEQ ID NO: 2543 - DNA, 60 bp, Artificial
  Synthetic oligonucleotide
ggtggtggagcaagatgaagtaaggccccacacacctgtgctggcaaccccaacgcagat

SEQ ID NO: 2544 - DNA, 60 bp, Artificial
  Synthetic oligonucleotide
gacccaggcgtcgaccgatttctgctgcactgaccccggtgtcatggaaacgttggatca

SEQ ID NO: 2545 - DNA, 60 bp, Artificial
  Synthetic oligonucleotide
gcggcaagaaaagccactgcggaagcaaaagcacttgccacgcttgaagcaagcctgccg

SEQ ID NO: 2546 - DNA, 60 bp, Artificial
  Synthetic oligonucleotide
cggctacgtcgctaaaggccagccagtcgtccctgctcgtcagacagagacgcagagcca

SEQ ID NO: 2547 - DNA, 60 bp, Artificial
  Synthetic oligonucleotide
tgagcgcctaaaagacaccaagggtcatcgagcctacgagcgtgcctacaccgtcgctca

SEQ ID NO: 2548 - DNA, 60 bp, Artificial
  Synthetic oligonucleotide
acgaggacgccgaaagcttcccagtaaatgtgccatctcgtaggcagaaaacggttcccc

SEQ ID NO: 2549 - DNA, 60 bp, Artificial
  Synthetic oligonucleotide
cgcttgaccattgcaggttggtttatgactgttgagggagagactggctcgtggccgaca

SEQ ID NO: 2550 - DNA, 60 bp, Artificial
  Synthetic oligonucleotide
ccccgcggaaatttcctccaccgagttcgtgcacacccctatgccaagcttctttcaccc

SEQ ID NO: 2551 - DNA, 60 bp, Artificial
  Synthetic oligonucleotide
ttccccaccggctcgcctcgtaagcgcacaaggactgctcccaaagatcttcaaagccac

SEQ ID NO: 2552 - DNA, 60 bp, Artificial
  Synthetic oligonucleotide
aggacgtgtcagcgccgccaccacctgcaccgaatcggcagcagcgtcgcgcgtcgaaaa

SEQ ID NO: 2553 - DNA, 60 bp, Artificial
  Synthetic oligonucleotide
aattttccgctgatctgttcgacacccatcccgagctcgcgctgcgatcacgtggctgga

SEQ ID NO: 2554 - DNA, 60 bp, Artificial
  Synthetic oligonucleotide
ttttagcacccctgagctgcgcaaagtcccgcttcgtgaaaattttcgtgccgcgtgatt

SEQ ID NO: 2555 - DNA, 60 bp, Artificial
  Synthetic oligonucleotide
atcacgagactgggccagtgccgcgagcgacctagaaactctcgtggcggatcttgagga

SEQ ID NO: 2556 - DNA, 60 bp, Artificial
  Synthetic oligonucleotide
aaatcgtcccctgatcgcccttgcgacgttggcgtcggtgccgctggttgcgcttggctt

SEQ ID NO: 2557 - DNA, 60 bp, Artificial
  Synthetic oligonucleotide
atctggctcattgatccggtgtatgccgcagcaggcatgagcagcccgaatatgcgcctg

SEQ ID NO: 2558 - DNA, 60 bp, Artificial
  Synthetic oligonucleotide
gatcgccgtagagcgcgcgtcgtcgattggaggcttcccctttggttgacggtcttcaat

SEQ ID NO: 2559 - DNA, 60 bp, Artificial
  Synthetic oligonucleotide
ccgcgacttcgccagcgcttggatcaaagacccggacacggagaaacacagccgaagtta

SEQ ID NO: 2560 - DNA, 60 bp, Artificial
  Synthetic oligonucleotide
atgatgccgtatgaatggagcattctcaccgacggccaatcctcctccgcgaccgtgcag

SEQ ID NO: 2561 - DNA, 60 bp, Artificial
  Synthetic oligonucleotide
actgatcatccgtgacccgcaagacgctgaggaccaggacgtcgagtggaccatcgtgct

SEQ ID NO: 2562 - DNA, 60 bp, Artificial
  Synthetic oligonucleotide
ttctaccattcccacaccggcctgcagcttgatcgcggcctccacgccccactgatcatc

SEQ ID NO: 2563 - DNA, 60 bp, Artificial
  Synthetic oligonucleotide
tgtcgacttccccgagttgtcgtccaccggactgctcctgtcctccctgaagccagcaga

SEQ ID NO: 2564 - DNA, 60 bp, Artificial
  Synthetic oligonucleotide
gacggtgtgcccggcatgacccaggaccccattgaacctggcgagtctttctcctatgtt

SEQ ID NO: 2565 - DNA, 60 bp, Artificial
  Synthetic oligonucleotide
taacgaactgcctgagagcacctccatccactggcatggcatcgcactccacaacgcagc

SEQ ID NO: 2566 - DNA, 60 bp, Artificial
  Synthetic oligonucleotide
actgggcggggatgtcggcgatgtgatgtatccgcactacctcatcaacggacgtatccc

SEQ ID NO: 2567 - DNA, 60 bp, Artificial
  Synthetic oligonucleotide
agggccaccttgaagatggtgtcaccgccggagttgataaaccgcaggcgggccttgtcg

SEQ ID NO: 2568 - DNA, 60 bp, Artificial
  Synthetic oligonucleotide
actgaccgcccggcccctctccctggatatcggcggcatcgaagccaagacgtggggata

SEQ ID NO: 2569 - DNA, 60 bp, Artificial
  Synthetic oligonucleotide
gcgacgtcctccaggtcgatatcaccaatgaactgcctgagagcacctccatccactggc

SEQ ID NO: 2570 - DNA, 60 bp, Artificial
  Synthetic oligonucleotide
gatcgccgacctgatcgctgacaaccccggtgagtgggcatttcactgccataacgccta

SEQ ID NO: 2571 - DNA, 60 bp, Artificial
  Synthetic oligonucleotide
attcatacggcatcatctgcccgcccaggtcgatgctgacttctcggtctggtgtgccct

SEQ ID NO: 2572 - DNA, 60 bp, Artificial
  Synthetic oligonucleotide
gccataacgcctatcacatggaaaccgggatgctcagctcgcttcgctacgagtaacccc

SEQ ID NO: 2573 - DNA, 60 bp, Artificial
  Synthetic oligonucleotide
attccgtcggcgtcgtggtcctgggtaactacgagctactgaaggaaggcgaccaggttc

SEQ ID NO: 2574 - DNA, 60 bp, Artificial
  Synthetic oligonucleotide
gcgcccgctgtcgaggatggacgttttatggttccgcagattctgggtgagggcgactaa

SEQ ID NO: 2575 - DNA, 60 bp, Artificial
  Synthetic oligonucleotide
ttcttgacaacctgcgcgacacccgcatctccggccagctcatcaacatcgaacgcgact

SEQ ID NO: 2576 - DNA, 60 bp, Artificial
  Synthetic oligonucleotide
gcgtccgctgcccacttttgttccagctcgttgttttcttggatcatgtttagtggcacg

SEQ ID NO: 2577 - DNA, 60 bp, Artificial
  Synthetic oligonucleotide
gagtaccaatgacctacacaatcgcacagccctgcgttgacgtcttggaccgtgcctgcg

SEQ ID NO: 2578 - DNA, 60 bp, Artificial
  Synthetic oligonucleotide
atcactgggatgaacacgttgagctcgaactggccctgggtgccggagaacgcaacagct

SEQ ID NO: 2579 - DNA, 60 bp, Artificial
  Synthetic oligonucleotide
tccacgagatcgggtgaggtggccacggatcttcggaagttggcggcatcgagtttgtgt

SEQ ID NO: 2580 - DNA, 60 bp, Artificial
  Synthetic oligonucleotide
aggagatccagcgcccggtgtcctcgtcgaagagtgcgtcggtgtactccattgtttccc

SEQ ID NO: 2581 - DNA, 58 bp, Artificial
  Synthetic oligonucleotide
aatcgcttccaaaccggccgtttgagcagatttggtgtgaagtgccgtcttttcgggg

SEQ ID NO: 2582 - DNA, 54 bp, Artificial
  Synthetic oligonucleotide
ttttctccgaacttcacaccaaatcgcttccaaaccggccgtttgactggattt

SEQ ID NO: 2583 - DNA, 60 bp, Artificial
  Synthetic oligonucleotide
cgaaggattttgcacagaacttcacaccaaatcgcttccaaaccggccgtttgagcagat

SEQ ID NO: 2584 - DNA, 60 bp, Artificial
  Synthetic oligonucleotide
ggcacgaggtctcacagtaatgtggatgccagcacgaagtatgtccgaccaaccccagcg

SEQ ID NO: 2585 - DNA, 60 bp, Artificial
  Synthetic oligonucleotide
aggtacctgattggcaggctaagttcctggcgggtggatgagacctatatccgggtcggc

SEQ ID NO: 2586 - DNA, 60 bp, Artificial
  Synthetic oligonucleotide
ggacaacccacgatggccgctggcccttattctatcgaccccaccacctaccttgacgaa

SEQ ID NO: 2587 - DNA, 60 bp, Artificial
  Synthetic oligonucleotide
aagtgttctcgatctcccaccgggtgtgatacgccgcgatcagatcctccaccgacacct

SEQ ID NO: 2588 - DNA, 60 bp, Artificial
  Synthetic oligonucleotide
ttgacgacaccatcatcgaagtccacggccaccagaaacaaggcgccggcttcggctact

SEQ ID NO: 2589 - DNA, 60 bp, Artificial
  Synthetic oligonucleotide
atctcctgacgcaccaactccggggactttgaccgcaacaccctttctcgtccacgctga

SEQ ID NO: 2590 - DNA, 60 bp, Artificial
  Synthetic oligonucleotide
gtgtccgtccatgtcgaggcatagcacaacactacacccactaacttaacggcattgggg

SEQ ID NO: 2591 - DNA, 60 bp, Artificial
  Synthetic oligonucleotide
atgtcgcggtcccgaaactacgcaccggatccttcttccccgactggctgttggaacgtc

SEQ ID NO: 2592 - DNA, 60 bp, Artificial
  Synthetic oligonucleotide
gagcaattcgtcaaggtaggtggtggggtcgatagaatagggtccagcggccatcgtggg

SEQ ID NO: 2593 - DNA, 60 bp, Artificial
  Synthetic oligonucleotide
gtgtccgtccatgtcgaggcatagcacaacactacacccactaacttaacggcattgcgc

SEQ ID NO: 2594 - DNA, 60 bp, Artificial
  Synthetic oligonucleotide
actgtctgccaccgcatcaccacctctggcatttacgttctgcagtgcggcgatccaagc

SEQ ID NO: 2595 - DNA, 60 bp, Artificial
  Synthetic oligonucleotide
gcccatggctgtgattatttcacgtcgctcttcctactgccccaactttgcaacagcacc

SEQ ID NO: 2596 - DNA, 60 bp, Artificial
  Synthetic oligonucleotide
cccgtgttggtggcgcagctcagaccaagggtatgaagaaggtttccggttcgttgcgtc

SEQ ID NO: 2597 - DNA, 60 bp, Artificial
  Synthetic oligonucleotide
cgcagctcagaccaagggtatgaagaaggttgccggttctctccgtctggatctggctgc

SEQ ID NO: 2598 - DNA, 60 bp, Artificial
  Synthetic oligonucleotide
gttggccattgcgagaacgttgaggcgcttgtccagctcttcctcggtgagcttttcgcc

SEQ ID NO: 2599 - DNA, 60 bp, Artificial
  Synthetic oligonucleotide
caagaacgtcgaggcgcttgtccagctcttcctcggtgagcttctcgccatcaaccaagc

SEQ ID NO: 2600 - DNA, 60 bp, Artificial
  Synthetic oligonucleotide
ggaagttggcgcgaagctgtgggtcgatatggctcacttcgctggtcttgttgctgctgg

SEQ ID NO: 2601 - DNA, 60 bp, Artificial
  Synthetic oligonucleotide
gctgtgggtcgatatggctcacttcgctggtcttgttgctgctggtttgcacccaagccc

SEQ ID NO: 2602 - DNA, 55 bp, Artificial
  Synthetic oligonucleotide
aaaagacggcacttcacaccaaatctgctcaaacgaccggtttggaagcgatttg

SEQ ID NO: 2603 - DNA, 59 bp, Artificial
  Synthetic oligonucleotide
aaatcgattccaaaccggctgtttgagcagatttggtgtgaagtgccgtcttttcgggg

SEQ ID NO: 2604 - DNA, 60 bp, Artificial
  Synthetic oligonucleotide
cccaccaacctgcgggagtaacagtcaatgaccgtggccaggtacatattcgacccatcc

SEQ ID NO: 2605 - DNA, 60 bp, Artificial
  Synthetic oligonucleotide
cgtcggggacattacctacctaccgatcgcggatgggtcgaatatgtacctggccacggt

SEQ ID NO: 2606 - DNA, 60 bp, Artificial
  Synthetic oligonucleotide
aagaccttcgggtatgtacgggtcaaaccctgggccggaaccccagcagcaggaccagca

SEQ ID NO: 2607 - DNA, 60 bp, Artificial
  Synthetic oligonucleotide
ttaggctggttctctcaggtcaagctggtgcagggtaactgggatccgacaccgtggcgt

SEQ ID NO: 2608 - DNA, 60 bp, Artificial
  Synthetic oligonucleotide
tctctaccagccagtcaacgatacgctgatcccagtcgtcgccaccgagctcgttatcgc

SEQ ID NO: 2609 - DNA, 60 bp, Artificial
  Synthetic oligonucleotide
agaggactgggagttcggtgtcgccgtgttcgccgatgatgtaggcgtggatggagcttg

SEQ ID NO: 2610 - DNA, 60 bp, Artificial
  Synthetic oligonucleotide
ctacttgaggagtccccatcagcgctgaagctcgcattaatgagcgcatccgagttcccg

SEQ ID NO: 2611 - DNA, 60 bp, Artificial
  Synthetic oligonucleotide
catcagcgctgaagctcgcattaatgagcgcatccgagttcccgaagtccgccttgtcgg

SEQ ID NO: 2612 - DNA, 60 bp, Artificial
  Synthetic oligonucleotide
gctccaacttggtgcgctcacgggtcagcatgagaacttccttcttggtgcgaccctcgt

SEQ ID NO: 2613 - DNA, 60 bp, Artificial
  Synthetic oligonucleotide
ggccgcagcgacaacaccgggtacaccaccgcgccctacgatttcctctcaatttgttca

SEQ ID NO: 2614 - DNA, 60 bp, Artificial
  Synthetic oligonucleotide
accatctgaaccaagaccaataacggagcctcccgccgcaataatcgctgcttccccgcc

SEQ ID NO: 2615 - DNA, 60 bp, Artificial
  Synthetic oligonucleotide
cgtcacgagtaaaccaaccagtaagcctcgcgcaaccccgcctgcaacaaatccagacaa

SEQ ID NO: 2616 - DNA, 60 bp, Artificial
  Synthetic oligonucleotide
ggaaaaccacgcttcccatgtcacgaccatcggcaactaaacccggcgcacgacgaaacg

SEQ ID NO: 2617 - DNA, 60 bp, Artificial
  Synthetic oligonucleotide
gccgccgtccatcccgttgctggatcattgagtcatgttgtggtgggtctcatcgtcagc

SEQ ID NO: 2618 - DNA, 60 bp, Artificial
  Synthetic oligonucleotide
cccagcggcaccttcccgggtcgaaatccatctaaacgcgtctttctggccagctcaaga

SEQ ID NO: 2619 - DNA, 60 bp, Artificial
  Synthetic oligonucleotide
cgccgtcgcccctaaaataaatccccgtgcttgcatatcgcccgcggcccagacaaaatc

SEQ ID NO: 2620 - DNA, 60 bp, Artificial
  Synthetic oligonucleotide
cccacaacgccacctcctaaaacaacaacgctggccgaagcaacaccaggaacacccgat

SEQ ID NO: 2621 - DNA, 60 bp, Artificial
  Synthetic oligonucleotide
cagccattgaacacgcaacaccaacctctccctgacaaccgacctctgcgcccgatatgg

SEQ ID NO: 2622 - DNA, 60 bp, Artificial
  Synthetic oligonucleotide
ccactaaagttgactgcaccgctaccaccacttgaataaccaaccgcactgcccgtcgca

SEQ ID NO: 2623 - DNA, 60 bp, Artificial
  Synthetic oligonucleotide
tcggtcttgtggcctgctccagtcattctcgcttaccccatccagtctctcaccaagctt

SEQ ID NO: 2624 - DNA, 60 bp, Artificial
  Synthetic oligonucleotide
ctcccatccccatacagattccgcgcgaccgattcataactctctcccgctccacacgtg

SEQ ID NO: 2625 - DNA, 60 bp, Artificial
  Synthetic oligonucleotide
gcacccacaggacgcgctaaataacccaccgcaaatacgccgtaactgagcaacaaccct

SEQ ID NO: 2626 - DNA, 60 bp, Artificial
  Synthetic oligonucleotide
cctgcgccaacatatgctcaagtgcattcccgccaccgccacccacaccaatcactttta

SEQ ID NO: 2627 - DNA, 60 bp, Artificial
  Synthetic oligonucleotide
cggcccaatgaccgttccgaacccctccaaaactaatccctaaaccacccacgacctgac

SEQ ID NO: 2628 - DNA, 60 bp, Artificial
  Synthetic oligonucleotide
ctacatggtgctttgttctgtcattccgctgcaatgttctcctatccgataccaggcccc

SEQ ID NO: 2629 - DNA, 60 bp, Artificial
  Synthetic oligonucleotide
gtccgcgcgcacttggagctcgaaacgaaccaatcctttgttggcttgcgaacgccggta

SEQ ID NO: 2630 - DNA, 60 bp, Artificial
  Synthetic oligonucleotide
aagcgctggcgaaagcatttaggcttgacctccctaccttcacccgctgatcagtcgcct

SEQ ID NO: 2631 - DNA, 60 bp, Artificial
  Synthetic oligonucleotide
gggacgccgtcgagtggggagcgtaagacttttggataatggtgttttcagggagcgtgg

SEQ ID NO: 2632 - DNA, 60 bp, Artificial
  Synthetic oligonucleotide
gcgttggcagtcactccagggttcgacgtattctttggccgccaccttaaccatttcgtc

SEQ ID NO: 2633 - DNA, 60 bp, Artificial
  Synthetic oligonucleotide
gtccgccagaacccaatggctttgtgcgcttcgttaaaactcaaattgtcacgcccgctg

SEQ ID NO: 2634 - DNA, 60 bp, Artificial
  Synthetic oligonucleotide
tattgaccgccttttgcgcccgcaccattcacttgctgtagccggcccaacgcgtcgtaa

SEQ ID NO: 2635 - DNA, 60 bp, Artificial
  Synthetic oligonucleotide
cgatcaggataacagtactcattgcccacatgcaccggcaccatgcactgcgcaccaccg

SEQ ID NO: 2636 - DNA, 60 bp, Artificial
  Synthetic oligonucleotide
gccgaaacctggccaatcaacaacctcccttctttcccaatccactgtccctgcgagatc

SEQ ID NO: 2637 - DNA, 60 bp, Artificial
  Synthetic oligonucleotide
taccgcaaacgtctcgctttatcctgcaaatgtcgcataccaacccgcaaacgtcgcttc

SEQ ID NO: 2638 - DNA, 60 bp, Artificial
  Synthetic oligonucleotide
ctcattgcctatctcgagcagatttccatcagtcacccaaacagctcacgatccacctcc

SEQ ID NO: 2639 - DNA, 60 bp, Artificial
  Synthetic oligonucleotide
gcgagcgcttttgttagtgggatttgtcggagcatgtcggcgcgatagtactaggccatt

SEQ ID NO: 2640 - DNA, 60 bp, Artificial
  Synthetic oligonucleotide
gcaacacatcaccgctcggcgattgtcgtgtcatcaactcgcctgacttcacgcgctctc

SEQ ID NO: 2641 - DNA, 60 bp, Artificial
  Synthetic oligonucleotide
caaataaacaactacagccagcccttattcggaaacaccctcacccacatgatgacgtta

SEQ ID NO: 2642 - DNA, 60 bp, Artificial
  Synthetic oligonucleotide
cgccgctatcattgcagccatctgatcatcctctccagctaaggcaactcgaaaaggggt

SEQ ID NO: 2643 - DNA, 60 bp, Artificial
  Synthetic oligonucleotide
cttcgacaatcgtctgctatctttggaacttcaaatacttgcacccctcctctattttca

SEQ ID NO: 2644 - DNA, 60 bp, Artificial
  Synthetic oligonucleotide
ggaaaagctgataacgtaatagcaagattttgaagaggttcatcagaagtctgtggtgtt

SEQ ID NO: 2645 - DNA, 60 bp, Artificial
  Synthetic oligonucleotide
cgcaccccaatgtgttgagcctagcttttccaaaatggtgccgtctccccattggcgcgc

SEQ ID NO: 2646 - DNA, 60 bp, Artificial
  Synthetic oligonucleotide
gcgcgccaatggggagacggcaccattttggaaaagctaggctcaacacattggggtgcg

SEQ ID NO: 2647 - DNA, 60 bp, Artificial
  Synthetic oligonucleotide
agatagcagacgattgtcgaagttatgtgggcaggggctatgacgcttatgaagatactg

SEQ ID NO: 2648 - DNA, 60 bp, Artificial
  Synthetic oligonucleotide
ggggtaattcttttggtggctcaatcaatactgcattttggtaagcttcaagaagctttt

SEQ ID NO: 2649 - DNA, 60 bp, Artificial
  Synthetic oligonucleotide
ggggtaattcttttggcggctcaatcaatggtgcattttggtaagcttcaagaagctttt

SEQ ID NO: 2650 - DNA, 60 bp, Artificial
  Synthetic oligonucleotide
tccccataaacgtccgataccaatggttcgctcctccacacgcttccatcaccacgcagc

SEQ ID NO: 2651 - DNA, 60 bp, Artificial
  Synthetic oligonucleotide
aaaacttaaagcccgccattccgcctctcgtcatccctgttccctcgtcatccccgcgca

SEQ ID NO: 2652 - DNA, 60 bp, Artificial
  Synthetic oligonucleotide
aatttataccatctcgacaaccgccccatcgtccgtcccctctcgccagtccagccaacc

SEQ ID NO: 2653 - DNA, 60 bp, Artificial
  Synthetic oligonucleotide
gagcataccacgctttccccgccccttgaccaacgacaacgccgcccattgaacgacaaa

SEQ ID NO: 2654 - DNA, 60 bp, Artificial
  Synthetic oligonucleotide
cgtgcgccagggactcatgccgtactctaaataatccacgccgcagacgtcgagcagcaa

SEQ ID NO: 2655 - DNA, 60 bp, Artificial
  Synthetic oligonucleotide
gtccccaacctgtccaccaactgaacaagccgagaatgagcagcccaagcgcccaaacga

SEQ ID NO: 2656 - DNA, 60 bp, Artificial
  Synthetic oligonucleotide
gcccgtcgccaccccgccagcactatcgacatagttccatccagcgcccgataataagtt

SEQ ID NO: 2657 - DNA, 60 bp, Artificial
  Synthetic oligonucleotide
cttgagcattgaaacgcacacccacgcagatcacatcaccgccgccgcctcgcttcaaga

SEQ ID NO: 2658 - DNA, 60 bp, Artificial
  Synthetic oligonucleotide
gctgtgctcatcgcaccacaccctgaaagggccagagtggaactgaccagtgcaaccatc

SEQ ID NO: 2659 - DNA, 60 bp, Artificial
  Synthetic oligonucleotide
gcaacggatgccgccggttttatggcgcggatggataccgttctgcagatgtacggagga

SEQ ID NO: 2660 - DNA, 60 bp, Artificial
  Synthetic oligonucleotide
gcgcgtcttccggcaactgatggacaggtcaaattccctgcctggtcgccgtatctgtga

SEQ ID NO: 2661 - DNA, 60 bp, Artificial
  Synthetic oligonucleotide
cagttgcgggttctccgcactctcatcatgaggtggctttaacttgggccggcggtagtg

SEQ ID NO: 2662 - DNA, 60 bp, Artificial
  Synthetic oligonucleotide
ctgaaatcccctgtgttctcacagaaccagacggtgaggcgtgccatggagcagctacgg

SEQ ID NO: 2663 - DNA, 60 bp, Artificial
  Synthetic oligonucleotide
agtacgtcgaacatggcctgccctccttatacggacatagccgccgggtacagctgcgat

SEQ ID NO: 2664 - DNA, 60 bp, Artificial
  Synthetic oligonucleotide
ggtcgtgattagcgtggtggtgattattatcccaccgtgcggggctgcacttggacgagg

SEQ ID NO: 2665 - DNA, 60 bp, Artificial
  Synthetic oligonucleotide
gtccaagtgcagccccgcacggtgggataataatcaccaccacgctaatcacgaccaggc

SEQ ID NO: 2666 - DNA, 60 bp, Artificial
  Synthetic oligonucleotide
cgtaaacgatttaataaaactgatcccaccatacctctccaccctacaaaacctactaat

SEQ ID NO: 2667 - DNA, 60 bp, Artificial
  Synthetic oligonucleotide
gtgcatgcagaatctccagaatgaattccagctggctcaacatgttccatgattccgcca

SEQ ID NO: 2668 - DNA, 60 bp, Artificial
  Synthetic oligonucleotide
ttttccagtacatcgtgcgtatccatctgccatatgtacagctgcttgttcatgacgtac

SEQ ID NO: 2669 - DNA, 65 bp, Artificial
  Synthetic oligonucleotide
cctaaagaattttctgaagatctttgttcattaaaaccacatgtaaagcgacctgtattagcatg

SEQ ID NO: 2670 - DNA, 60 bp, Artificial
  Synthetic oligonucleotide
gggtcgttattgtggagatttaacattatcagctgctattgccggtggttgtgaatttat

SEQ ID NO: 2671 - DNA, 60 bp, Artificial
  Synthetic oligonucleotide
ggtcatagagtacagcgtgttcctcaaacagaatctcaaggtcgtgtacatacttcagca

SEQ ID NO: 2672 - DNA, 60 bp, Artificial
  Synthetic oligonucleotide
ggaggagaagaaggtgcattaaaaggaccatctatcatgcctggtggtaataaagaagca

SEQ ID NO: 2673 - DNA, 60 bp, Artificial
  Synthetic oligonucleotide
ctccaagtccaactggtttacttcatatgggaggagttcgtactgcattgtattcatggc

SEQ ID NO: 2674 - DNA, 60 bp, Artificial
  Synthetic oligonucleotide
cctatagcaaccgcagcacatgctccgcttccacatgcattagtttctcctacatgtctt

SEQ ID NO: 2675 - DNA, 60 bp, Artificial
  Synthetic oligonucleotide
catctgaactaaattcagctcctggaaatggaatgggtggcggaatgggtggaatgatgt

SEQ ID NO: 2676 - DNA, 60 bp, Artificial
  Synthetic oligonucleotide
tagcataacgtctacgagaaccacctagaacttttatacacatcacaagacgagctccgg

SEQ ID NO: 2677 - DNA, 60 bp, Artificial
  Synthetic oligonucleotide
gtaccagaaggagcaacaccaaaagacggacctagtgcaggagtagcaatgtgtacagct

SEQ ID NO: 2678 - DNA, 60 bp, Artificial
  Synthetic oligonucleotide
gcacgaccagttctaccagctctaccagttctaccgattctatgcacatatgattctgca

SEQ ID NO: 2679 - DNA, 60 bp, Artificial
  Synthetic oligonucleotide
cgctcaccccagtcacatagttatctatgctcccggggattcactcccttgccgtcgcga

SEQ ID NO: 2680 - DNA, 60 bp, Artificial
  Synthetic oligonucleotide
cgagcgatgcaattaattgctgaatatgaaggggaagggagaggaagttacggcggcgct

SEQ ID NO: 2681 - DNA, 60 bp, Artificial
  Synthetic oligonucleotide
cacatccgattttaatgctgtcgcccggacctagtttgccgaaacacgcaggatgcatgt

SEQ ID NO: 2682 - DNA, 60 bp, Artificial
  Synthetic oligonucleotide
cgcgtctctgctgtcaagaattcagttaagattactgcgctctctgaaaacggagcagag

SEQ ID NO: 2683 - DNA, 60 bp, Artificial
  Synthetic oligonucleotide
tggtaaaggggaggagaagactagcggtgactgtcggatccaagagcatcatcaatcttc

SEQ ID NO: 2684 - DNA, 60 bp, Artificial
  Synthetic oligonucleotide
cggcctcccagcgcactatgcggatgccattcgttataatgctcgaacgcctctgcaagg

SEQ ID NO: 2685 - DNA, 60 bp, Artificial
  Synthetic oligonucleotide
gtcgcccttttctgatgaacgcccttcaagccgctttcgcggcatagccttgccgtcaga

SEQ ID NO: 2686 - DNA, 60 bp, Artificial
  Synthetic oligonucleotide
ccacacccagtagatccttgatcccttatatccccaccagctcctgtagaagaccctgaa

SEQ ID NO: 2687 - DNA, 60 bp, Artificial
  Synthetic oligonucleotide
gggatcattctcaaacaactcaattgctctattggctgatgtgtaggaccatcttcccct

SEQ ID NO: 2688 - DNA, 60 bp, Artificial
  Synthetic oligonucleotide
ctcctacgccaatcgctaaagctccgccagaaccgccttcccctattacagtgcaaataa

SEQ ID NO: 2689 - DNA, 60 bp, Artificial
  Synthetic oligonucleotide
ctcagattcagctggcaaaggcaataggaatagaacaaccttcgctggttagaacgcttg

SEQ ID NO: 2690 - DNA, 60 bp, Artificial
  Synthetic oligonucleotide
ctcttcgctcctggcctgctagattcacctcctacatcgattatacttgctccttcaagt

SEQ ID NO: 2691 - DNA, 60 bp, Artificial
  Synthetic oligonucleotide
cttgatgcccgctacgtatcgattttactcctttccctctcattctaaataaccttccag

SEQ ID NO: 2692 - DNA, 60 bp, Artificial
  Synthetic oligonucleotide
ctactcctacaggctcaacggcttattctttatctgcgggaggtccaatattaatgcctt

SEQ ID NO: 2693 - DNA, 60 bp, Artificial
  Synthetic oligonucleotide
caggaattagaccagccattaaccctggaatttcagtgtctagagttggaggatcagctc

SEQ ID NO: 2694 - DNA, 60 bp, Artificial
  Synthetic oligonucleotide
ctgtcgctgtaatgggagacatgagaaaatacgaatgggttatttctttgagggctatag

SEQ ID NO: 2695 - DNA, 60 bp, Artificial
  Synthetic oligonucleotide
ccaggtatatcataagcgatccatacactccatccagctctacgcattaaagcagcctct

SEQ ID NO: 2696 - DNA, 60 bp, Artificial
  Synthetic oligonucleotide
ccttgcagccatcacggaaagactccatcctgcgctcaggcattaattaacgcaaaagta

SEQ ID NO: 2697 - DNA, 60 bp, Artificial
  Synthetic oligonucleotide
cagctaggcctccggaagaagtaaaagctgctttcgacgatgcaattgctgctagagaaa

SEQ ID NO: 2698 - DNA, 60 bp, Artificial
  Synthetic oligonucleotide
ggacctcctgcttttggcccagtaccagataaaccttctccaccaaaaggctgaacccca

SEQ ID NO: 2699 - DNA, 60 bp, Artificial
  Synthetic oligonucleotide
ggtttaaaccttttctgattttcaagaccagcgccttcaaccactcgaccactcctcctt

SEQ ID NO: 2700 - DNA, 60 bp, Artificial
  Synthetic oligonucleotide
cggcataacgaccaagagccgtgttaatttccgcttcagtaccggcatcgaccgccgagg

SEQ ID NO: 2701 - DNA, 60 bp, Artificial
  Synthetic oligonucleotide
ccaagagccgtgttaatttccgcttcagtaccggcatcgaccgccgaggtggtgtcatcg

SEQ ID NO: 2702 - DNA, 60 bp, Artificial
  Synthetic oligonucleotide
cggcggcattcttggtaccggcggaggagttaatatcccagctgtcggcatcggttctgt

SEQ ID NO: 2703 - DNA, 60 bp, Artificial
  Synthetic oligonucleotide
gggagtgaatccccgggagcatagataacgatgtgaccgggatgagcgagtgcagccaac

SEQ ID NO: 2704 - DNA, 60 bp, Artificial
  Synthetic oligonucleotide
ccccggtcacatcgttatctatgctcccggggatttactcccttgccgtcgcgatgcatc

SEQ ID NO: 2705 - DNA, 60 bp, Artificial
  Synthetic oligonucleotide
cccggtcacatcgttatctatgctcccggggattcactcccttgccgtcgcgatccatct

SEQ ID NO: 2706 - DNA, 60 bp, Artificial
  Synthetic oligonucleotide
gcaagggagcgaatccccgggagcatagataacgatgtgaccagggtgagtgagtgcagc

SEQ ID NO: 2707 - DNA, 60 bp, Artificial
  Synthetic oligonucleotide
cccagtcacatcgttatctatgctcccggggattcgctcccttgccgtcgcgatgcatct

SEQ ID NO: 2708 - DNA, 60 bp, Artificial
  Synthetic oligonucleotide
cccgggagcatagataacgatgtgaccggggtgagcgagtgcagccaacaaagaggcaac

SEQ ID NO: 2709 - DNA, 60 bp, Artificial
  Synthetic oligonucleotide
cggtcacatcgttatctatgctcccggggattcgttcccttgccgccgcgatccatcttg

SEQ ID NO: 2710 - DNA, 60 bp, Artificial
  Synthetic oligonucleotide
ccccagtcacatcgttatctatgctcccggggattcgttcccttgccgtcgcgatgcatc

SEQ ID NO: 2711 - DNA, 60 bp, Artificial
  Synthetic oligonucleotide
cccggtcacatcgttatctatgctcccggggattcgctcccttgccgtcgcaatgcatct

SEQ ID NO: 2712 - DNA, 60 bp, Artificial
  Synthetic oligonucleotide
cggtcacatcgttatctatgctcccggggattcgctcacttgccgccgcgatgcatcttg

SEQ ID NO: 2713 - DNA, 60 bp, Artificial
  Synthetic oligonucleotide
cgcgagcaccctggtcatatgcggcaacttcgaaagagcatcgggtacgggtcgagtctt

SEQ ID NO: 2714 - DNA, 60 bp, Artificial
  Synthetic oligonucleotide
tatcaccttcacgccggcactgttctccgcgctcgacgtttctgacgtggctgttatggc

SEQ ID NO: 2715 - DNA, 60 bp, Artificial
  Synthetic oligonucleotide
gaagatcgttgccgaagcggcgttccaccgctcccagcatgacgtcctgtactgtttcac

SEQ ID NO: 2716 - DNA, 60 bp, Artificial
  Synthetic oligonucleotide
acgtcctgtactgtttcactgttgaagccgcccgtagtgaccgcccagtgcagtgcctca

SEQ ID NO: 2717 - DNA, 60 bp, Artificial
  Synthetic oligonucleotide
cgttccaccgctcccagcatgacgtcctgtactgtttcactgttgaagccgccggtagtc

SEQ ID NO: 2718 - DNA, 60 bp, Artificial
  Synthetic oligonucleotide
ctcccagcatgacgtcctgtactgtttcactgttgaagccgcccgtagtgaccgcccagt

SEQ ID NO: 2719 - DNA, 60 bp, Artificial
  Synthetic oligonucleotide
tacttcgggttccttgccaaccgtgtgtgtggagagaagctgccgcaggtgtaccgtgct

SEQ ID NO: 2720 - DNA, 60 bp, Artificial
  Synthetic oligonucleotide
gcagcaccgattgccgccagacccatcatcacagcggcagccatgtacagcagatccata

SEQ ID NO: 2721 - DNA, 60 bp, Artificial
  Synthetic oligonucleotide
gcccggaactggaagacatcgaagcatcggcacgtttctttgaagacgacgacggcctgc

SEQ ID NO: 2722 - DNA, 60 bp, Artificial
  Synthetic oligonucleotide
ggtatacgcctgtacggtcagcgtcggatctgagagtgcgcaatcatcagcggcaacagc

SEQ ID NO: 2723 - DNA, 60 bp, Artificial
  Synthetic oligonucleotide
gccgtcgtcgtcttcaaagaaacgtgccgatgcttcgatgtcttccagttccgggcgggt

SEQ ID NO: 2724 - DNA, 60 bp, Artificial
  Synthetic oligonucleotide
gctctggccaagttcagattgtacgcgcagtcgctcgtcgtcgtccggttcgacaagatc

SEQ ID NO: 2725 - DNA, 60 bp, Artificial
  Synthetic oligonucleotide
ggccgtcatcgtcttcaaagaaacgtgccgatgcttcgatgtcttccagttccgggcggg

SEQ ID NO: 2726 - DNA, 60 bp, Artificial
  Synthetic oligonucleotide
cccgcccggaactggaagacatcgaagcatcggcacgtttctttgaagacgatgacggcc

SEQ ID NO: 2727 - DNA, 60 bp, Artificial
  Synthetic oligonucleotide
gtcgtactcatcgccctgatgcccttccataatcacccggctcaactgctccaggtcgct

SEQ ID NO: 2728 - DNA, 60 bp, Artificial
  Synthetic oligonucleotide
ctgttgccgctgatgattgcgcactctcagatccgacgctgaccgtacaggcgtataccg

SEQ ID NO: 2729 - DNA, 60 bp, Artificial
  Synthetic oligonucleotide
gaactgaagtggagtttcggctacccaggcgcgattatctttatgatcctcgcgggcctg

SEQ ID NO: 2730 - DNA, 60 bp, Artificial
  Synthetic oligonucleotide
gcgcctcgtcgtactcatcgccctgatgcccttccataatcacccggctcaattgctcca

SEQ ID NO: 2731 - DNA, 60 bp, Artificial
  Synthetic oligonucleotide
ggcgcgattatctttatgatcctcgcgggcctggcaccgtatctgtactttaagcggaag

SEQ ID NO: 2732 - DNA, 60 bp, Artificial
  Synthetic oligonucleotide
tccgcttaaagtacagatacggtgccaggcccgcgaggatcataaagataatcgcgcctg

SEQ ID NO: 2733 - DNA, 60 bp, Artificial
  Synthetic oligonucleotide
cccaggctaaggtcaccagggcactgcaggcggcagcagtaccgcaagaattgatttctc

SEQ ID NO: 2734 - DNA, 60 bp, Artificial
  Synthetic oligonucleotide
ccgcctgcagtgccctggtgaccttagcctgggataacccctccagttcagcaatttcct

SEQ ID NO: 2735 - DNA, 60 bp, Artificial
  Synthetic oligonucleotide
gcgatacggggcttcaactgcaggcgcttaacggtgaactcgccatctgtttccgcgatg

SEQ ID NO: 2736 - DNA, 60 bp, Artificial
  Synthetic oligonucleotide
ggtcaccagggcactgcaggcggcagcagtaccgcaagaattgatttctctgttcccggt

SEQ ID NO: 2737 - DNA, 60 bp, Artificial
  Synthetic oligonucleotide
cccgctcaaccaggacctggtccgttaactgctcgctcatccgaggtaatgtctccccaa

SEQ ID NO: 2738 - DNA, 60 bp, Artificial
  Synthetic oligonucleotide
gctgctgctgccataacaggactcactaaatgcgttcgacctcctctaccttgacgacct

SEQ ID NO: 2739 - DNA, 60 bp, Artificial
  Synthetic oligonucleotide
cgttctcggtcacgatgacgtaactcaaaactaaattcttcttcttgtaccgctcgatca

SEQ ID NO: 2740 - DNA, 60 bp, Artificial
  Synthetic oligonucleotide
ggcaggtccaactcccgcgtctgcattaattcattcgtctacaatggttactgctggggt

SEQ ID NO: 2741 - DNA, 60 bp, Artificial
  Synthetic oligonucleotide
gaagcacatgctccactaccacaagcaagggtttctccaacaccccgttcatacacacgc

SEQ ID NO: 2742 - DNA, 60 bp, Artificial
  Synthetic oligonucleotide
ggaaacagtagcgctccttctgctggcggtatgggcggaatgggtggtatgatgtaaaga

SEQ ID NO: 2743 - DNA, 60 bp, Artificial
  Synthetic oligonucleotide
ggaaggcccatgagtatggaattattactggccgggtgtactactacaatcacgcacaga

SEQ ID NO: 2744 - DNA, 60 bp, Artificial
  Synthetic oligonucleotide
ccccgaatatatctccgtttgcgtttgtatctgctggcattgctaaagttcttaatacca

SEQ ID NO: 2745 - DNA, 60 bp, Artificial
  Synthetic oligonucleotide
ctcgatgatattgccgcctttcagaatgacctactaaaacataactcactcccacatctt

SEQ ID NO: 2746 - DNA, 60 bp, Artificial
  Synthetic oligonucleotide
ccataccatttaaccagacttcccatccttgtccccatgcgcctaatgttggattttccc

SEQ ID NO: 2747 - DNA, 60 bp, Artificial
  Synthetic oligonucleotide
cgcgcatgactgtttcacgagcagatgatcttcctccgcctcgtgggtctctgatgccgt

SEQ ID NO: 2748 - DNA, 60 bp, Artificial
  Synthetic oligonucleotide
gctgctggtaagccatatcccatagtccctagtcctcctgaattcacccatctccttggc

SEQ ID NO: 2749 - DNA, 60 bp, Artificial
  Synthetic oligonucleotide
gtgcagcaggtcgagtgtgtaatccgttaggtgttgtaattttaatgtctctctgaaaca

SEQ ID NO: 2750 - DNA, 60 bp, Artificial
  Synthetic oligonucleotide
cccatcttacatacatgcgcaataacatgcttgcccaatcttgagcctccaccccgcctg

SEQ ID NO: 2751 - DNA, 60 bp, Artificial
  Synthetic oligonucleotide
gcgcttttccttttctcccagctctgcctgttctcccaatcctatgcacatacgattcag

SEQ ID NO: 2752 - DNA, 60 bp, Artificial
  Synthetic oligonucleotide
gtaagtgttattttgcccagacgctcttccgatagtggtatttccgcctgatggcattag

SEQ ID NO: 2753 - DNA, 60 bp, Artificial
  Synthetic oligonucleotide
ggccgagaatggtaatttgcggcgtgccagcccgttgtggctgctggaagacgaatgtga

SEQ ID NO: 2754 - DNA, 60 bp, Artificial
  Synthetic oligonucleotide
ccggtttctcctggtacggctccaccccagcgatggcgagaatactcagggacgatgttt

SEQ ID NO: 2755 - DNA, 60 bp, Artificial
  Synthetic oligonucleotide
atttggcggctggtttgacggtaacggcgatgccaccctgcttgataacacccagaccgg

SEQ ID NO: 2756 - DNA, 60 bp, Artificial
  Synthetic oligonucleotide
ataggcggtctgtacctccagcgagccgctttgctcccagaaatactcaacgcgcggatc

SEQ ID NO: 2757 - DNA, 60 bp, Artificial
  Synthetic oligonucleotide
gggccctgacgttcctgtcagagctgggactgattacctaccagacggaatatgacccgc

SEQ ID NO: 2758 - DNA, 60 bp, Artificial
  Synthetic oligonucleotide
tcctgaccagagcgaacaggttccgggcatgatcgagcgttactctgctgccatcactgg

SEQ ID NO: 2759 - DNA, 60 bp, Artificial
  Synthetic oligonucleotide
atgatatcccgctgtccgggtgaccagaccagcaacgactgcaaccaggtatcggtccgt

SEQ ID NO: 2760 - DNA, 60 bp, Artificial
  Synthetic oligonucleotide
ctgaaggccatcacccgttcagaaagctatctgtgtgccatgaaagccggtgcctgccgg

SEQ ID NO: 2761 - DNA, 60 bp, Artificial
  Synthetic oligonucleotide
ctgtgccgccactgcaaaggcaaacaggatattcccctcataccagggaaagccggccag

SEQ ID NO: 2762 - DNA, 60 bp, Artificial
  Synthetic oligonucleotide
ccctggtatgaggggaatatcctgtttgcctttgcagtggcggcacaggtgctgacgtgg

SEQ ID NO: 2763 - DNA, 60 bp, Artificial
  Synthetic oligonucleotide
ccaccacctcatctgctttcacccacagcacacagtccacaggctcctgtgcaaaagggc

SEQ ID NO: 2764 - DNA, 60 bp, Artificial
  Synthetic oligonucleotide
cagcgcgtctggataaaatccgccgccagaaccggataaaggcagaacttcaggccgtgc

SEQ ID NO: 2765 - DNA, 60 bp, Artificial
  Synthetic oligonucleotide
tgcggcagcgcgtctggataaaatccgccgccagaaccggataaaggcagaacttcaggc

SEQ ID NO: 2766 - DNA, 60 bp, Artificial
  Synthetic oligonucleotide
ggtggccggtcttgtgatgacggtgctgaccgttggtctggtgtcgtgtgcaggaaaatc

SEQ ID NO: 2767 - DNA, 60 bp, Artificial
  Synthetic oligonucleotide
atcgtccagtcgctgcatgacggtttccagctcatcgtctgtcagactccagtcctgggc

SEQ ID NO: 2768 - DNA, 60 bp, Artificial
  Synthetic oligonucleotide
tgttccggtgacacaaacccgcagaaatcgggacaggatgtgggaatgtcggaccgcgca

SEQ ID NO: 2769 - DNA, 60 bp, Artificial
  Synthetic oligonucleotide
tatgaacttcacccgtttgagaaccttcgccgcaaggggcatcactgccacggcctgacg

SEQ ID NO: 2770 - DNA, 60 bp, Artificial
  Synthetic oligonucleotide
atcctgaccagagcgaacaggttccgggcatgatcgagcgctacactgctgccatcactg

SEQ ID NO: 2771 - DNA, 60 bp, Artificial
  Synthetic oligonucleotide
acacgctgacccgtctgggcttctgtggctacttcctgatggtgcgcgacctgatgaatc

SEQ ID NO: 2772 - DNA, 60 bp, Artificial
  Synthetic oligonucleotide
cgagcagctgccttacacgctacgttcgatttaccgccacccgtcgcaatctgggcaatc

SEQ ID NO: 2773 - DNA, 60 bp, Artificial
  Synthetic oligonucleotide
cgatttcacgggtcggacaacggtacacccagactatgtggacaatcggccatctcgccg

SEQ ID NO: 2774 - DNA, 60 bp, Artificial
  Synthetic oligonucleotide
ctgtggcataccaacggccagatcgtccgcgaagttacgcaagcgcctggacagttctct

SEQ ID NO: 2775 - DNA, 60 bp, Artificial
  Synthetic oligonucleotide
gctcgccgctatcctccagaacgactttggcctgacgacgaccgctatttccggaacctt

SEQ ID NO: 2776 - DNA, 60 bp, Artificial
  Synthetic oligonucleotide
cgcctcgccatcgcatgtttcctaagctgaagccaaccaccaataccaccgtggccaacc

SEQ ID NO: 2777 - DNA, 60 bp, Artificial
  Synthetic oligonucleotide
cccggctgccacacgtcagcacataggtcggacgcaccagattgagctcttcacgcataa

SEQ ID NO: 2778 - DNA, 60 bp, Artificial
  Synthetic oligonucleotide
tggcgctcgctcagaggctcgttggagatggaattggtgaatccggcacggcacatatgc

SEQ ID NO: 2779 - DNA, 60 bp, Artificial
  Synthetic oligonucleotide
ctgcaagctggcctccaaagaagagcatgacgccaaactgctgaaggtgcgcggtgcgat

SEQ ID NO: 2780 - DNA, 60 bp, Artificial
  Synthetic oligonucleotide
ggatgatggtggagatcgacaaccgggatttaccccagcgtcgacccgcacacaccactt

SEQ ID NO: 2781 - DNA, 60 bp, Artificial
  Synthetic oligonucleotide
cgagcaggctcatatggtgttttgcgagttgccggttggtagccagtccagtcgcgcaca

SEQ ID NO: 2782 - DNA, 60 bp, Artificial
  Synthetic oligonucleotide
cctgctcggggaaggtgtcattggcgggctggtggatggtgcaaagtcgatcttcgttga

SEQ ID NO: 2783 - DNA, 60 bp, Artificial
  Synthetic oligonucleotide
tggaagaagcacacgttacaggccagatcctcgctcgcgatggctccacctacttcgagc

SEQ ID NO: 2784 - DNA, 60 bp, Artificial
  Synthetic oligonucleotide
ttttgcatctgcgacctcgcgttctgcccgcgccagcttagagccgtactccatcaacag

SEQ ID NO: 2785 - DNA, 60 bp, Artificial
  Synthetic oligonucleotide
agaaatgaagctgatgcgctgcatggcgaaggtcagagcgtggacgccggagatacgtgc

SEQ ID NO: 2786 - DNA, 60 bp, Artificial
  Synthetic oligonucleotide
aagcagaaatgaagctgatgcgctgcatggcgaaggtcagagcgtggacgccggagatgc

SEQ ID NO: 2787 - DNA, 60 bp, Artificial
  Synthetic oligonucleotide
gctatctgtgtgccatgaaagccggtgcctgccggtatgacacggaagggtatgtgacgg

SEQ ID NO: 2788 - DNA, 60 bp, Artificial
  Synthetic oligonucleotide
gctgtccgttgcgcccctgctgctggactatctgcgccagcttcgaatcaaactgacagt

SEQ ID NO: 2789 - DNA, 60 bp, Artificial
  Synthetic oligonucleotide
caccggcacgcgcctttatctgctcagaaaccaccgtaaaggagggatggcgggcaagtt

SEQ ID NO: 2790 - DNA, 60 bp, Artificial
  Synthetic oligonucleotide
agaagacggtgtgttggttgatgagtctccggtgagtgcgccgctggattacctgcacgg

SEQ ID NO: 2791 - DNA, 60 bp, Artificial
  Synthetic oligonucleotide
gacagagatccttgaagagctagtcctatagctattccggcagcacctatcactgctatt

SEQ ID NO: 2792 - DNA, 60 bp, Artificial
  Synthetic oligonucleotide
atgccactgaacgcaccgataacctggctgatgccgcctgatgaacaaccacatcgcccc

SEQ ID NO: 2793 - DNA, 60 bp, Artificial
  Synthetic oligonucleotide
cccaagacataggcaattaaatgaacatagagcggctgcaatgagagttattgtccctgc

SEQ ID NO: 2794 - DNA, 60 bp, Artificial
  Synthetic oligonucleotide
aacagttcctgagtcgtgacccgttcgaatgcgtgctgtgtggcggccggatggtatacc

SEQ ID NO: 2795 - DNA, 60 bp, Artificial
  Synthetic oligonucleotide
gggcacacttagcctgtgtcaggccggcatatacctcagcagactgatatcccgcgcgtt

SEQ ID NO: 2796 - DNA, 60 bp, Artificial
  Synthetic oligonucleotide
tgaagcagttcctgagtcgtgacccgttcgaatgcgtgctgtgtggcggccggatggtat

SEQ ID NO: 2797 - DNA, 60 bp, Artificial
  Synthetic oligonucleotide
aagcagttcctgagtcgtgacccgttcgaatgcgtgctgtgtggcggccggatggtatac

SEQ ID NO: 2798 - DNA, 60 bp, Artificial
  Synthetic oligonucleotide
cctgcggcagcttctctccacacacacggttggcaaggaacccgaagtacctcaccatct

SEQ ID NO: 2799 - DNA, 60 bp, Artificial
  Synthetic oligonucleotide
gccgcaggtgtaccgtgctctggggatggataaaccggaaccagtggcgaaagtgtgcta

SEQ ID NO: 2800 - DNA, 60 bp, Artificial
  Synthetic oligonucleotide
aagatggtgaggtacttcgggttccttgccaaccgggtgtgtggagagaagctgccgcag

SEQ ID NO: 2801 - DNA, 60 bp, Artificial
  Synthetic oligonucleotide
cctgccgcagcttctcttcacacacccggttggcaaggaacccgaagtacctcaccatct

SEQ ID NO: 2802 - DNA, 60 bp, Artificial
  Synthetic oligonucleotide
ctgcggcagcttctctccacacacccggttggcaaggaacccgaagtacctcaccatctt

SEQ ID NO: 2803 - DNA, 60 bp, Artificial
  Synthetic oligonucleotide
gtctgctgaggtatatgccggcctgacacaggctaagtgtgcccgggaatcggtgcaagt

SEQ ID NO: 2804 - DNA, 60 bp, Artificial
  Synthetic oligonucleotide
gtcaacaaatcccgcgccccatgcccagccgaggattttgccgttacgcatcaccacttc

SEQ ID NO: 2805 - DNA, 60 bp, Artificial
  Synthetic oligonucleotide
cgcttcgcgaagtatgtcgcggccttttggaggatagccagctcttcatcccgttctgcc

SEQ ID NO: 2806 - DNA, 60 bp, Artificial
  Synthetic oligonucleotide
gaacggttgttaccgctcaccgggcgcttgccagtaacttggcagactcgggacatgtct

SEQ ID NO: 2807 - DNA, 60 bp, Artificial
  Synthetic oligonucleotide
gcttccatttccatcagatgtccttcctgctccgctactgaaggcgtggtgcgtaacggc

SEQ ID NO: 2808 - DNA, 60 bp, Artificial
  Synthetic oligonucleotide
cgccacagctttcacgctggcaaccacgccgacgtccttaaacataccgttcagagcctg

SEQ ID NO: 2809 - DNA, 60 bp, Artificial
  Synthetic oligonucleotide
cgggagcgttttaagcaggtttccggacaggcgaaagctgccaacagacagagctgtggc

SEQ ID NO: 2810 - DNA, 60 bp, Artificial
  Synthetic oligonucleotide
cctgtgactgtcccacaccgttactgatttcactgaccagatggcgcaggtcggcctgtg

SEQ ID NO: 2811 - DNA, 60 bp, Artificial
  Synthetic oligonucleotide
caagttgctgaggcgatgggtataagccagccagcagtaacaaagctggagcagcgcgga

SEQ ID NO: 2812 - DNA, 60 bp, Artificial
  Synthetic oligonucleotide
ccgcgctgctccagctttgttactgctggctggcttatacccatcgcctcagcaacttgt

SEQ ID NO: 2813 - DNA, 60 bp, Artificial
  Synthetic oligonucleotide
gccacagctctgtctgttggcagctttcgcctgtccggaaacctgcttaaaacgctcccg

SEQ ID NO: 2814 - DNA, 60 bp, Artificial
  Synthetic oligonucleotide
gggacaccgtcattcaataaatcctgtttgcttcgctgaccaaggtcaaccccggaaccg

SEQ ID NO: 2815 - DNA, 60 bp, Artificial
  Synthetic oligonucleotide
cggttccggggttgaccttggtcagcgaagcaaacaggatttattgaatgacggtgtccc

SEQ ID NO: 2816 - DNA, 60 bp, Artificial
  Synthetic oligonucleotide
ctgggtggcccttcccctgactacggtaaacggtgtctctcagtttcagccggagtggat

SEQ ID NO: 2817 - DNA, 60 bp, Artificial
  Synthetic oligonucleotide
cgctacacaacgttcatggcctgcagaatccctagtcaacacaatacggcctcgatatct

SEQ ID NO: 2818 - DNA, 60 bp, Artificial
  Synthetic oligonucleotide
cacgcatttgccccatagcatcaaaataaccccaacgaccttcaattccaacctcttctg

SEQ ID NO: 2819 - DNA, 60 bp, Artificial
  Synthetic oligonucleotide
gcgcatgtcgaggtaaaggagcgcaattcaacggataccgcataagacctcatcaccaca

SEQ ID NO: 2820 - DNA, 60 bp, Artificial
  Synthetic oligonucleotide
gttgtgattgtgtaccgtgtaaccatcccttcccggtgataccacctgaaccaatagcaa

SEQ ID NO: 2821 - DNA, 60 bp, Artificial
  Synthetic oligonucleotide
gctgggaattctaatggagcaaaatgttggctggctccgtcgtatctaacagcagcagtg

SEQ ID NO: 2822 - DNA, 60 bp, Artificial
  Synthetic oligonucleotide
gactcaagatgaacgcgaattaggagtgtgtgtggtggatttaggaggtgggaccatgga

SEQ ID NO: 2823 - DNA, 60 bp, Artificial
  Synthetic oligonucleotide
ggaaagcgtatgggtcatgccggagcaattatttctggaaaacacagtggagcgcacgaa

SEQ ID NO: 2824 - DNA, 60 bp, Artificial
  Synthetic oligonucleotide
ggttaagggaccagggccaggtagggaatctgcggttcgagctttaaatgcagcaggttt

SEQ ID NO: 2825 - DNA, 60 bp, Artificial
  Synthetic oligonucleotide
cattaccgattttcaagaccggcgccttcatcctctcggccactcctccaaaattgagta

SEQ ID NO: 2826 - DNA, 60 bp, Artificial
  Synthetic oligonucleotide
ctggtgttcgcccagcaattaaccctggaatttccgtttctagagtaggtggatcagctc

SEQ ID NO: 2827 - DNA, 60 bp, Artificial
  Synthetic oligonucleotide
cagggctgctgttgaagaaggtgttgtggctggaggtggtgtggctttaattcgagtagc

SEQ ID NO: 2828 - DNA, 60 bp, Artificial
  Synthetic oligonucleotide
ccaattgcaacagccgcgcaagcagcactaccgcaagctttagtttctcctgacccacgt

SEQ ID NO: 2829 - DNA, 60 bp, Artificial
  Synthetic oligonucleotide
gacgcaaacccactcatcccgcgcataatcattaaacccatcaataccaaaggcatccac

SEQ ID NO: 2830 - DNA, 60 bp, Artificial
  Synthetic oligonucleotide
ccagcatctattcgaaaagcatctatcaatttggcgtgggagaattgccgttggccttgg

SEQ ID NO: 2831 - DNA, 60 bp, Artificial
  Synthetic oligonucleotide
ctgcacggtttattgctccgggacgtaaatatccgcagccgtatgtggcactgccggcgt

SEQ ID NO: 2832 - DNA, 60 bp, Artificial
  Synthetic oligonucleotide
gcaggctgaagaggccatccgccgtgaaacggaacgccgcgcagatgaaattgtcaggaa

SEQ ID NO: 2833 - DNA, 60 bp, Artificial
  Synthetic oligonucleotide
aggatgaggccgtgaacaccctgaaaccctggtggccgggattatttgacggtgacacgc

SEQ ID NO: 2834 - DNA, 60 bp, Artificial
  Synthetic oligonucleotide
ccggcacgttcagcgacgacgtcaacaggtgttacctcatctcctacgttagccaggagc

SEQ ID NO: 2835 - DNA, 60 bp, Artificial
  Synthetic oligonucleotide
cggagggaacaaagagcaggtccccgcaaaacgtcaaaaccgcggctcccgaaactcaac

SEQ ID NO: 2836 - DNA, 60 bp, Artificial
  Synthetic oligonucleotide
ggcactactcaaccccacgattgaaaaccctacaaggaaagaacggacggtatcgttcac

SEQ ID NO: 2837 - DNA, 60 bp, Artificial
  Synthetic oligonucleotide
cgcggaactcaccgatttcctgacggtgtcagtcatattaccggacgcgctgtccagctc

SEQ ID NO: 2838 - DNA, 60 bp, Artificial
  Synthetic oligonucleotide
aacctgatacaggcagaaaagcgagccgaagccagagccgcccgtaaagcccgtgaccat

SEQ ID NO: 2839 - DNA, 60 bp, Artificial
  Synthetic oligonucleotide
cgaggctgacgctggtcagaccgacgctggttccggtagggatcagcataataatacggg

SEQ ID NO: 2840 - DNA, 60 bp, Artificial
  Synthetic oligonucleotide
gagctaaaacatggcgtggaatcagcccggtaataacggacaggaccgcgatccgtgggg

SEQ ID NO: 2841 - DNA, 60 bp, Artificial
  Synthetic oligonucleotide
cgattcaaaataacagaagcacagcctccattggcaggaccaacagcgcccaacacccct

SEQ ID NO: 2842 - DNA, 60 bp, Artificial
  Synthetic oligonucleotide
gtccaccgcgatctaatgcccaaatttcagagtcgctcatatcgtctaccaacgcgctag

SEQ ID NO: 2843 - DNA, 60 bp, Artificial
  Synthetic oligonucleotide
cgagcgaccaagtactactgcacctgctccatccccaaataaaatcaatgttccacggtc

SEQ ID NO: 2844 - DNA, 60 bp, Artificial
  Synthetic oligonucleotide
gcgttacatgcaactcgtgccgctgttgaagaaggtgtagttgcgggtggtggtgttgct

SEQ ID NO: 2845 - DNA, 60 bp, Artificial
  Synthetic oligonucleotide
gctaagccttgtgcgacgcttatcccaatacgtatcccagcaaaactacccggtcctcta

SEQ ID NO: 2846 - DNA, 60 bp, Artificial
  Synthetic oligonucleotide
ccccacaatcctacatgacttggaaaaggtggtttagcacgcggcactgctcgacgccct

SEQ ID NO: 2847 - DNA, 60 bp, Artificial
  Synthetic oligonucleotide
ccgggaatgaaaggcatgattggaatggccgctcgtgtgttttctgcaatgtctcaagcc

SEQ ID NO: 2848 - DNA, 60 bp, Artificial
  Synthetic oligonucleotide
cgtccggcgtattctggatgagtgtttagacctgtccctactgctgttccacctaacgct

SEQ ID NO: 2849 - DNA, 60 bp, Artificial
  Synthetic oligonucleotide
cgatagcagctggtgttgcaccccaatcttcatgcacctttaaaccaatcgcccctgcaa

SEQ ID NO: 2850 - DNA, 60 bp, Artificial
  Synthetic oligonucleotide
ggaagggttggcgtttatagcaggtgtggatagggttttagacatgggtcgtacagcgtt

SEQ ID NO: 2851 - DNA, 60 bp, Artificial
  Synthetic oligonucleotide
ctccgcaaaataaccagggtgcgctataaaacccgatatgccccggtgtatgcccaggta

SEQ ID NO: 2852 - DNA, 60 bp, Artificial
  Synthetic oligonucleotide
gcaacgggcggaacaattgcagcagcggtaaaattaatcagacggttaggaggagaagta

SEQ ID NO: 2853 - DNA, 60 bp, Artificial
  Synthetic oligonucleotide
ggttgcacgtaagcttcaatcatttctaacacttctgcagctaacttcccagagacgcgc

SEQ ID NO: 2854 - DNA, 60 bp, Artificial
  Synthetic oligonucleotide
cgcattccggcaagttgacgaatttgtgccgctgatccgcgagccccagaatctgccatc

SEQ ID NO: 2855 - DNA, 60 bp, Artificial
  Synthetic oligonucleotide
gacctgcccgtactacgccgcgaatagcagcattcattcctggagaatcccctccgcttg

SEQ ID NO: 2856 - DNA, 60 bp, Artificial
  Synthetic oligonucleotide
ctgccgcagatattcccgtggcgagcgataacccagcgcactatgcggatgccattcgtt

SEQ ID NO: 2857 - DNA, 60 bp, Artificial
  Synthetic oligonucleotide
gctccttatcatcccgatcctactatgatatttaatcatctttgcgcatcccgaccagga

SEQ ID NO: 2858 - DNA, 60 bp, Artificial
  Synthetic oligonucleotide
gaccagagcgaacaggttccgggcatgatcgagcgttactctgctgccatcactggtgca

SEQ ID NO: 2859 - DNA, 60 bp, Artificial
  Synthetic oligonucleotide
gccgcagatatccccgtggcgagcgataacccagcgcactatgcggatgccattcgttat

SEQ ID NO: 2860 - DNA, 60 bp, Artificial
  Synthetic oligonucleotide
tgcttcttcgtaggtcggcagagttgccaggcggtcgatctgagccgcagggattaactc

SEQ ID NO: 2861 - DNA, 60 bp, Artificial
  Synthetic oligonucleotide
gcagcagacggctgaactgcgggaagctcatttcgcccagaacttcattggcctttgcgg

SEQ ID NO: 2862 - DNA, 60 bp, Artificial
  Synthetic oligonucleotide
ggcagcagacggctgaactgcgggaagctcatttcgcccagaacttcattggcctttgcg

SEQ ID NO: 2863 - DNA, 60 bp, Artificial
  Synthetic oligonucleotide
ccgaagcacacggcggtgcggagtccggagagtaacggaatagcagagagcttcgtgaaa

SEQ ID NO: 2864 - DNA, 60 bp, Artificial
  Synthetic oligonucleotide
ccggatgttgggacttgaaccgaagaacacggcggtgcggagtccggagagtaacggaat

SEQ ID NO: 2865 - DNA, 60 bp, Artificial
  Synthetic oligonucleotide
attccgttactctccggactccgcaccgccgtgttcttcggttcaagtcccaacatccgg

SEQ ID NO: 2866 - DNA, 60 bp, Artificial
  Synthetic oligonucleotide
ctctctgctattccgttactctccggactccgcaccgccgtgttcttcggttcaagtccc

SEQ ID NO: 2867 - DNA, 60 bp, Artificial
  Synthetic oligonucleotide
gggacttgaaccgaagaacacggcggtgcggagtccggagagtaacggaatagcagagag

SEQ ID NO: 2868 - DNA, 60 bp, Artificial
  Synthetic oligonucleotide
ggacttgaaccgaagaacacggcggtgcggagtccggagagtaacggaatagcagagagc

SEQ ID NO: 2869 - DNA, 60 bp, Artificial
  Synthetic oligonucleotide
cacgaagctctctgctattccgttactctccggactccgcaccgccgtgttcttcggttc

SEQ ID NO: 2870 - DNA, 60 bp, Artificial
  Synthetic oligonucleotide
gaaccgaagaacacggcggtgcggagtccggagagtaacggaatagcagagagcttcgtg

SEQ ID NO: 2871 - DNA, 60 bp, Artificial
  Synthetic oligonucleotide
aagacaatgcggcctttgctcaggtcgtacggggtcagctcaacggtcactttgtcgccc

SEQ ID NO: 2872 - DNA, 60 bp, Artificial
  Synthetic oligonucleotide
aagacaatgcggcctttgctcaggtcgtacggggtcagctcgacagtcactttgtcgccc

SEQ ID NO: 2873 - DNA, 60 bp, Artificial
  Synthetic oligonucleotide
gttcagtacgcgccggtcctcattcagatgcgtgacaatcagcgtctgctcccgtgcttc

SEQ ID NO: 2874 - DNA, 60 bp, Artificial
  Synthetic oligonucleotide
gcggcggccacaccgatgcgttcagcgagtttcagggcttcgttacgaaattcaggcgta

SEQ ID NO: 2875 - DNA, 60 bp, Artificial
  Synthetic oligonucleotide
gccgagatacgtcgctggcgtttgaaacagtcgctgggccgtacctggcttagaagacct

SEQ ID NO: 2876 - DNA, 60 bp, Artificial
  Synthetic oligonucleotide
cccgatgttgaaccagcctggaagcggatcagggagttggctactcgtctcttcggggaa

SEQ ID NO: 2877 - DNA, 60 bp, Artificial
  Synthetic oligonucleotide
gcacccaactgaccttcctgcccttcacggtagcgctttctgatctctccacgctgacca

SEQ ID NO: 2878 - DNA, 60 bp, Artificial
  Synthetic oligonucleotide
ggtggagggattctggataaatacggttctgtgggagcactgagtcagtctgaccgggtg

SEQ ID NO: 2879 - DNA, 60 bp, Artificial
  Synthetic oligonucleotide
ttccatgacgcctttgggcgttctggccggtgcagttctggttactgatggagcgaacgg

SEQ ID NO: 2880 - DNA, 60 bp, Artificial
  Synthetic oligonucleotide
gccagtgcggctcttccatctccagccatgcgcgataggcattgagacgaaactccagca

SEQ ID NO: 2881 - DNA, 60 bp, Artificial
  Synthetic oligonucleotide
gcacccatagcatcaaattcacatgccatttcccaacataattcttctccacctccagca

SEQ ID NO: 2882 - DNA, 60 bp, Artificial
  Synthetic oligonucleotide
ccgagatacgtcgctggcgtttgaaacagtcgctgggccgtacctggcttagaagacctg

SEQ ID NO: 2883 - DNA, 60 bp, Artificial
  Synthetic oligonucleotide
gttaagcagttcgagcgcggttcggatcacggcctcgcgttggagcttgttcattcgcga

SEQ ID NO: 2884 - DNA, 60 bp, Artificial
  Synthetic oligonucleotide
ccgggagcatagataacgatgtgaccggggtttctgagcgcagccaacaaagaggcagcg

SEQ ID NO: 2885 - DNA, 60 bp, Artificial
  Synthetic oligonucleotide
cccgggagcatagataacgatgtgaccggggtttctgagcgcagccaacaaagaggcagc

SEQ ID NO: 2886 - DNA, 60 bp, Artificial
  Synthetic oligonucleotide
ccccgggagcatagataacgatgtgaccggggtttctgagcgcagccaacaaagaggcag

SEQ ID NO: 2887 - DNA, 60 bp, Artificial
  Synthetic oligonucleotide
tgcatcgcggcggcaagggaagaaatccccgggagcatagataacgatgtgaccggggtt

SEQ ID NO: 2888 - DNA, 60 bp, Artificial
  Synthetic oligonucleotide
cgggtcgcggtcttgtccgttgttcccgggctgattccacgccatgttttagctccattc

SEQ ID NO: 2889 - DNA, 60 bp, Artificial
  Synthetic oligonucleotide
aaagcggcttgaagggcgttcatcagaaaagggcgacgggctggcgtacactgtcaccga

SEQ ID NO: 2890 - DNA, 60 bp, Artificial
  Synthetic oligonucleotide
aagcggcttgaagggcgttcatcagaaaagggcgacgggctggcgtacactgtcaccaac

SEQ ID NO: 2891 - DNA, 60 bp, Artificial
  Synthetic oligonucleotide
aagcggcttgaagggcgttcatcagaaaagggctcccggctggcgtacactgtcaccaac

SEQ ID NO: 2892 - DNA, 60 bp, Artificial
  Synthetic oligonucleotide
ggtgatactgttcaagcagctcgataccgatataccggcgtccggactggagggcagcca

SEQ ID NO: 2893 - DNA, 60 bp, Artificial
  Synthetic oligonucleotide
ctgcgtggccgctcttcagtccggacgccggtatatcggtatcgagctgcttgaacagta

SEQ ID NO: 2894 - DNA, 60 bp, Artificial
  Synthetic oligonucleotide
atactgttcaagcagctcgataccgatataccggcgtccggactggagggcggccacaca

SEQ ID NO: 2895 - DNA, 59 bp, Artificial
  Synthetic oligonucleotide
ttttagaaagacgtttaatagctgatgctttagcacgttttcgttcagtagtgggtttt

SEQ ID NO: 2896 - DNA, 60 bp, Artificial
  Synthetic oligonucleotide
gccgggtatgttgttccacgctgccctttggggtacaggctgtgagagctactgttgctg

SEQ ID NO: 2897 - DNA, 60 bp, Artificial
  Synthetic oligonucleotide
ctgtacggtcagcgtcggatctgagggtgcgcaatcatcagcggcaacagcaaacaaggg

SEQ ID NO: 2898 - DNA, 60 bp, Artificial
  Synthetic oligonucleotide
cttccccgtgaggaaagaaagaacgccccgttctggttaaagtcggtggcgtgcgtgtcc

SEQ ID NO: 2899 - DNA, 60 bp, Artificial
  Synthetic oligonucleotide
cgccgccacctcccgttcctgtagagtgggataaagccgccgacccattaaacaccagtt

SEQ ID NO: 2900 - DNA, 60 bp, Artificial
  Synthetic oligonucleotide
ccgtaagctcacaccgacactcaccgcaaagcaatacagcggagggtttcgcccatgcgt

SEQ ID NO: 2901 - DNA, 60 bp, Artificial
  Synthetic oligonucleotide
ccgccctttgcctggctgacttttctggccgtgttgttcgggtcgtcgatggtgatactg

SEQ ID NO: 2902 - DNA, 60 bp, Artificial
  Synthetic oligonucleotide
acggggcaaagcaaccgcctttcttgccattgtcgcggtcgcgcttatcttcctggcatg

SEQ ID NO: 2903 - DNA, 60 bp, Artificial
  Synthetic oligonucleotide
ccgcaggcaagccgctatgactcccgcatgcagcaggttatctataacccgcagaacgtc

SEQ ID NO: 2904 - DNA, 60 bp, Artificial
  Synthetic oligonucleotide
gcagcgtcagccaccatctacatcatgtggcggggataccagactctggctggtaagctc

SEQ ID NO: 2905 - DNA, 60 bp, Artificial
  Synthetic oligonucleotide
gcggaggctggcacagtcgagagaatccgcggttaagaagttcaacagctaggccagacg

SEQ ID NO: 2906 - DNA, 60 bp, Artificial
  Synthetic oligonucleotide
gcaagctggtactcctcgaacctaaagatgacgcagcgccgcaggctgctcctgtcagtt

SEQ ID NO: 2907 - DNA, 60 bp, Artificial
  Synthetic oligonucleotide
accatcatggagaaggtatccagcgggctgcatggtctggcggctatcacgatcaccgtg

SEQ ID NO: 2908 - DNA, 60 bp, Artificial
  Synthetic oligonucleotide
cgggttatcagtggcgagcctacagggtggaatccgttctcactgcctgcaaccaaacgc

SEQ ID NO: 2909 - DNA, 60 bp, Artificial
  Synthetic oligonucleotide
tcccgtactggttgatgctgacccgctacgtgaggctgaatggctgaaagaggcacagcg

SEQ ID NO: 2910 - DNA, 60 bp, Artificial
  Synthetic oligonucleotide
gtcgtcagcccggcacggtcggccagcgtttcaaggttatgtatggtttgccagtccctt

SEQ ID NO: 2911 - DNA, 60 bp, Artificial
  Synthetic oligonucleotide
gggttcccagcatatccactccggctgaaactgagagacaccgtttaccgtggtcagggg

SEQ ID NO: 2912 - DNA, 60 bp, Artificial
  Synthetic oligonucleotide
acggtgtctctcagtttcagccggagtggatatgctgggagcctgatgtgacctgggtgc

SEQ ID NO: 2913 - DNA, 60 bp, Artificial
  Synthetic oligonucleotide
gcctccccgggattcggctgacccagacaggaggctgaataatccgtaaggagcaattcg

SEQ ID NO: 2914 - DNA, 60 bp, Artificial
  Synthetic oligonucleotide
tcactgactatccacagcgtgtcccggtcatctgaggctatcccctccgcctggggaata

SEQ ID NO: 2915 - DNA, 60 bp, Artificial
  Synthetic oligonucleotide
atttctttccggggttggacaacgagcaaagcgaggcgtcagtcaggaggccggtcagac

SEQ ID NO: 2916 - DNA, 60 bp, Artificial
  Synthetic oligonucleotide
acgtggctgttatggccgcccgccgcagtcgtgtcgaatgggaaaatcagcagcgcaaaa

SEQ ID NO: 2917 - DNA, 60 bp, Artificial
  Synthetic oligonucleotide
gtatcgttcccgcaaagctacacggtgacccgctatcagccccgcacggagagcagtttt

SEQ ID NO: 2918 - DNA, 60 bp, Artificial
  Synthetic oligonucleotide
atgagcttcccgcagttcagccgtctgctgccgtaccgtgattacaaccaggagtccggt

SEQ ID NO: 2919 - DNA, 60 bp, Artificial
  Synthetic oligonucleotide
gtgctgttggtgctccagctgaagccgttcacgttctccgtctgcatgttgccgtaggag

SEQ ID NO: 2920 - DNA, 60 bp, Artificial
  Synthetic oligonucleotide
gccgacgcagtcccttcgaacgggcatgtgccacatgaatggcgaaatcaaaacgggagg

SEQ ID NO: 2921 - DNA, 60 bp, Artificial
  Synthetic oligonucleotide
cctaccatgctgtcgctgatggggatggagatcccgcaagagatgactggtaagccgctg

SEQ ID NO: 2922 - DNA, 60 bp, Artificial
  Synthetic oligonucleotide
ggtgccctcccggtgccctctgtaagagaaggagtttggtatgtcccgttttgtcctcgg

SEQ ID NO: 2923 - DNA, 60 bp, Artificial
  Synthetic oligonucleotide
caccacaggggtgccctcccggtgccctctgtaagagaaggaggcttttatgtcccgttt

SEQ ID NO: 2924 - DNA, 60 bp, Artificial
  Synthetic oligonucleotide
ggctttgtgtccggttcccgcagtaatcgggcgtcatactccagtttgccgatgagacgg

SEQ ID NO: 2925 - DNA, 60 bp, Artificial
  Synthetic oligonucleotide
ctgtaggtggtaagaagtgggataaccttccagtagaacaacgtcctgaaagagccgctt

SEQ ID NO: 2926 - DNA, 60 bp, Artificial
  Synthetic oligonucleotide
ggcatggctgtgggaaattcaatatcagctatacaggcaggtgctagacaaatagaaggg

SEQ ID NO: 2927 - DNA, 60 bp, Artificial
  Synthetic oligonucleotide
atggtgaacgttgtgcgtctactagcaatcgaaattttgagggtcgccaggggagagggg

SEQ ID NO: 2928 - DNA, 60 bp, Artificial
  Synthetic oligonucleotide
gcctcgattcagacgattaaataaacatcgagcatgtgctatgagagctatagtacctgc

SEQ ID NO: 2929 - DNA, 60 bp, Artificial
  Synthetic oligonucleotide
ggtaaagcatagctaaaaccatggctctcatagcacatgctcggtgttcatttaatcttc

SEQ ID NO: 2930 - DNA, 60 bp, Artificial
  Synthetic oligonucleotide
catggagatattgcaagatatatggcaggtgatacaacagctgggaatttatcaggtgga

SEQ ID NO: 2931 - DNA, 60 bp, Artificial
  Synthetic oligonucleotide
catggagatattgcaagatatatggcaggtgattctactgctgggaatctatcaggaggt

SEQ ID NO: 2932 - DNA, 60 bp, Artificial
  Synthetic oligonucleotide
gttgcacctagagctggtttagcagatgctatttgtgatttagtgtctacaggagcaaca

SEQ ID NO: 2933 - DNA, 60 bp, Artificial
  Synthetic oligonucleotide
gcaaccggtcaagacactgtttccaaagacaaagtgacacggtagactccaagcgaacac

SEQ ID NO: 2934 - DNA, 60 bp, Artificial
  Synthetic oligonucleotide
ccagttgcaatagcagcacttgaagtggttttacctacacctcctttccctgaagtaact

SEQ ID NO: 2935 - DNA, 60 bp, Artificial
  Synthetic oligonucleotide
gggtcatttcagatcgtcatgatttatcttctttagcctatcaaggtggcgggttgggta

SEQ ID NO: 2936 - DNA, 60 bp, Artificial
  Synthetic oligonucleotide
gcagctgatttcccttttccaccgcgtctttgagcattataatcagaaagaggttgatat

SEQ ID NO: 2937 - DNA, 60 bp, Artificial
  Synthetic oligonucleotide
ggttggtcctactcctgtttctgctttaatacatgcagctactatggtaacagcaggtgt

SEQ ID NO: 2938 - DNA, 60 bp, Artificial
  Synthetic oligonucleotide
ggcagctcgctctgcaaccggtcaagacactgtttccaaagacaaagtgacacgctagac

SEQ ID NO: 2939 - DNA, 60 bp, Artificial
  Synthetic oligonucleotide
gcatcataaatatctaggacagcaccaccaggataaccaaatatatgctgtattccctga

SEQ ID NO: 2940 - DNA, 60 bp, Artificial
  Synthetic oligonucleotide
ggtccgccacctcatgcaggaatagctttaggattagatagaatagtcatgcttttaaca

SEQ ID NO: 2941 - DNA, 60 bp, Artificial
  Synthetic oligonucleotide
gggcagattctactaaatctttggcttcttttagtcctagaccggttgcactacgtacag

SEQ ID NO: 2942 - DNA, 60 bp, Artificial
  Synthetic oligonucleotide
gggcgctgattctactaaatctttggcttcttttagtcctagaccagttgcactacgaac

SEQ ID NO: 2943 - DNA, 60 bp, Artificial
  Synthetic oligonucleotide
ggggtgcgattggagctagaactactgaaagtcaaattcatagagaaatggcttcagctc

SEQ ID NO: 2944 - DNA, 60 bp, Artificial
  Synthetic oligonucleotide
ggttggaccgactcctgtttcagctttgatacatgcagctactatggtaacagcaggtgt

SEQ ID NO: 2945 - DNA, 60 bp, Artificial
  Synthetic oligonucleotide
gcgcccgtagggcttatccaacccttcgcctcagatgcaagctctgaacagactcacggt

SEQ ID NO: 2946 - DNA, 60 bp, Artificial
  Synthetic oligonucleotide
gcgttgccagtattggcggtaagtttgagtgaggccaatcccgcacagaaaggccgtgcg

SEQ ID NO: 2947 - DNA, 60 bp, Artificial
  Synthetic oligonucleotide
gccgtgctgcccgtgccgctgcccaaattataaacgacaatccgacagctacagttcgtg

SEQ ID NO: 2948 - DNA, 60 bp, Artificial
  Synthetic oligonucleotide
gaagcggtcacgatatcttgaatcaaatcccttggagtctcggcccctagcttcggcccc

SEQ ID NO: 2949 - DNA, 60 bp, Artificial
  Synthetic oligonucleotide
ggggttcgattgtgtagttcgtgtataacggggtgcctacaccatcggcgcggctttcgg

SEQ ID NO: 2950 - DNA, 60 bp, Artificial
  Synthetic oligonucleotide
gtgtcgttcggcgggagcgcggggtcaaatgagttttcggtcggctatcgcgctataact

SEQ ID NO: 2951 - DNA, 60 bp, Artificial
  Synthetic oligonucleotide
ctggggcggctttactttgcctcacgttcattattcccgcgccggtattcgcagcggatg

SEQ ID NO: 2952 - DNA, 60 bp, Artificial
  Synthetic oligonucleotide
caggcggaaccgacagaaaccgcaacacggactacacggaaaatacccgtgcggcatcag

SEQ ID NO: 2953 - DNA, 60 bp, Artificial
  Synthetic oligonucleotide
cgggccaaggtcagcgcgaagaatgaagctgacgcccctgccagtaatagcaaagtgggt

SEQ ID NO: 2954 - DNA, 60 bp, Artificial
  Synthetic oligonucleotide
ggccaaggttgacggcggtctgtccaaaatgtaacggggcagtggtgatttccgccaagg

SEQ ID NO: 2955 - DNA, 60 bp, Artificial
  Synthetic oligonucleotide
ccccaatcctgccagcatgacggtaaacgagcgtcaggtgtatcatgccattgccgcgca

SEQ ID NO: 2956 - DNA, 60 bp, Artificial
  Synthetic oligonucleotide
aatttcagcgagggcaaacgggatagggtgccgtggggcgaagcggtggctgtggtaaaa

SEQ ID NO: 2957 - DNA, 60 bp, Artificial
  Synthetic oligonucleotide
ccactgggatcatgagcctgatggtgggagccgtcacgctgtatatcctgtacgtgggct

SEQ ID NO: 2958 - DNA, 60 bp, Artificial
  Synthetic oligonucleotide
gcagcaagggccaaagccgccgtagaatccatgaaagcgttcagtgcaagccagtcgagc

SEQ ID NO: 2959 - DNA, 60 bp, Artificial
  Synthetic oligonucleotide
ccgagtgagagcagtcgccagcaacaacgtggttcagacgatgtcactggctaaccatac

SEQ ID NO: 2960 - DNA, 60 bp, Artificial
  Synthetic oligonucleotide
gcggggatacgcttgtcgccggtaccgtattaggggaggtaagttggctgttcagggtca

SEQ ID NO: 2961 - DNA, 60 bp, Artificial
  Synthetic oligonucleotide
gcggtacgagttccccgacctaacaggttccctgctttgccggaaagtgactgcatccct

SEQ ID NO: 2962 - DNA, 60 bp, Artificial
  Synthetic oligonucleotide
ctgcaatcgggcaagacactgctgccaaagcgaaagtgacacggcggactccactcgaac

SEQ ID NO: 2963 - DNA, 60 bp, Artificial
  Synthetic oligonucleotide
cccctcgcgttcggccttgtcgagtgccaccaacatggtatcaagatccgacaaaacccc

SEQ ID NO: 2964 - DNA, 60 bp, Artificial
  Synthetic oligonucleotide
ccagactccacgagttcttgagcgacggaactatcgacgaggagtcggccaagcagatcc

SEQ ID NO: 2965 - DNA, 60 bp, Artificial
  Synthetic oligonucleotide
gctgggttggaaagggaagcctttgtcaggagctccggatcttgaagggatgcgagtggc

SEQ ID NO: 2966 - DNA, 60 bp, Artificial
  Synthetic oligonucleotide
gccatgcaatccgtacaggatcacaggcaacacaagtcgccgttggtgtgggcagcggaa

SEQ ID NO: 2967 - DNA, 60 bp, Artificial
  Synthetic oligonucleotide
caggttcttgggccgatgttgctcgtcagtccctgcagcgttttgacagtacccagcctg

SEQ ID NO: 2968 - DNA, 60 bp, Artificial
  Synthetic oligonucleotide
ctgactcaccgccggagcagaaaccgagggctctgcattgctgattgcgggtttagcatc

SEQ ID NO: 2969 - DNA, 60 bp, Artificial
  Synthetic oligonucleotide
gctccgccggggtaggcactacgatgacatcagcagcgcacacgacattaatagtcccaa

SEQ ID NO: 2970 - DNA, 60 bp, Artificial
  Synthetic oligonucleotide
cagcaacctcgatgttcccgttatgttcacgtgcaaaggcggggatctgctgccctgacg

SEQ ID NO: 2971 - DNA, 60 bp, Artificial
  Synthetic oligonucleotide
ccctcggtttctgctccggcggtgagtcagcttgcttctcgagttagtggcatgaaaggc

SEQ ID NO: 2972 - DNA, 60 bp, Artificial
  Synthetic oligonucleotide
ggctggtgctagtcctttcaatgccgccggtgttagtggctgcggtggtaggaactttgg

SEQ ID NO: 2973 - DNA, 60 bp, Artificial
  Synthetic oligonucleotide
ccacgaggcggtagcaaacagtgtgaccaccacagcgatcaatttgataacgaagcccag

SEQ ID NO: 2974 - DNA, 60 bp, Artificial
  Synthetic oligonucleotide
ggttacgccgtgacgaacctgaatatcgagtgcgggaaggatctacctttatgaatcggc

SEQ ID NO: 2975 - DNA, 60 bp, Artificial
  Synthetic oligonucleotide
ggctcccctttccaacccagcggcagttcggtctgtggcttggctccaaagagattactg

SEQ ID NO: 2976 - DNA, 60 bp, Artificial
  Synthetic oligonucleotide
cgccctcggcaaacttatcggtttcagccactcgcatcccttcaagatccggagctcctg

SEQ ID NO: 2977 - DNA, 60 bp, Artificial
  Synthetic oligonucleotide
tttccgtcgccgtttctcccgttttgtggtccaggtaacggaagctcaggctagcccctc

SEQ ID NO: 2978 - DNA, 60 bp, Artificial
  Synthetic oligonucleotide
cggtatcttctgcgccatccacacgtatggccgtcgtctcaactggcatccgcatcaagc

SEQ ID NO: 2979 - DNA, 60 bp, Artificial
  Synthetic oligonucleotide
agttcctgagtcgtgaccccgtttggaaatgcgtgctgtgtggcggccggatggtatacc

SEQ ID NO: 2980 - DNA, 60 bp, Artificial
  Synthetic oligonucleotide
ttatctttcaccatgcgcatcaccgcacaccagcccgctttggcggtcactacctgctcg

SEQ ID NO: 2981 - DNA, 60 bp, Artificial
  Synthetic oligonucleotide
cccgatcgcgctctattgcggcttcgatcctaccgctgacagcttgcatttggggcatct

SEQ ID NO: 2982 - DNA, 60 bp, Artificial
  Synthetic oligonucleotide
cccggtagtactatagtttgtggcgattctcatacctctactcatggcgcatttggtgct

SEQ ID NO: 2983 - DNA, 60 bp, Artificial
  Synthetic oligonucleotide
gccgtgaataccgggtttcggttgtatacgtaattttctctagatgacatgttgcaatgc

SEQ ID NO: 2984 - DNA, 60 bp, Artificial
  Synthetic oligonucleotide
atcctgaccagagcgaacaggttccgggcatgatcgagcgttactctgccgccatcactg

SEQ ID NO: 2985 - DNA, 60 bp, Artificial
  Synthetic oligonucleotide
caccacatccgcttcttcaatcgccagcagcgactgttctgccatccgcgtttcaacgcc

SEQ ID NO: 2986 - DNA, 60 bp, Artificial
  Synthetic oligonucleotide
ggctacgggcacgcatacggtaaaggcgaaaagcgggcagttcacgctcacgcagagtaa

SEQ ID NO: 2987 - DNA, 60 bp, Artificial
  Synthetic oligonucleotide
cagttcatccagtggcaggccaaaccagcggctctggttggtcagtgtttccgggaaacg

SEQ ID NO: 2988 - DNA, 60 bp, Artificial
  Synthetic oligonucleotide
ggaaatatcgtttcccggaaacactgaccaaccagagccgctggtttggcctgccggtgg

SEQ ID NO: 2989 - DNA, 60 bp, Artificial
  Synthetic oligonucleotide
gttggatagagcactcggctacgaaccgagaggtcggaggttcaaatccttccggatgca

SEQ ID NO: 2990 - DNA, 60 bp, Artificial
  Synthetic oligonucleotide
ccacgtcggtggtatcaaacaagcgacctttgaagagatgattgcccgccgccctgagcg

SEQ ID NO: 2991 - DNA, 60 bp, Artificial
  Synthetic oligonucleotide
gccatgcgcgataggcgttgagacgaaactccagcatccactccggctcattacgcttcg

SEQ ID NO: 2992 - DNA, 60 bp, Artificial
  Synthetic oligonucleotide
ggggcagatgctctgatgataggacgtgccgctcagggaagaccctggatctttcgggaa

SEQ ID NO: 2993 - DNA, 60 bp, Artificial
  Synthetic oligonucleotide
ggacaagttgatggactgggcaggtctcattggcgaaaacagcttaaaatcgctcgtagc

SEQ ID NO: 2994 - DNA, 60 bp, Artificial
  Synthetic oligonucleotide
gtttggacgatctcccctatcactgaattttgcgggattggcaagcgtatggcagctcgt

SEQ ID NO: 2995 - DNA, 60 bp, Artificial
  Synthetic oligonucleotide
caggttatgggattgagataatgtcaaacgggcgactttattcagcaaacttccaaagat

SEQ ID NO: 2996 - DNA, 60 bp, Artificial
  Synthetic oligonucleotide
gctaccgcacaacaagcagaatcagacgcacaacaagcaagaagtgcaagtcagcaagcc

SEQ ID NO: 2997 - DNA, 60 bp, Artificial
  Synthetic oligonucleotide
ccagcaacagcagtggatcaaacaagtgttacattgttggccaacgtaatggaagggttg

SEQ ID NO: 2998 - DNA, 60 bp, Artificial
  Synthetic oligonucleotide
gcacgaaagaattacacgcgaagtggtcaggtggtcgaattcaaaactgggctatggtgc

SEQ ID NO: 2999 - DNA, 60 bp, Artificial
  Synthetic oligonucleotide
cggaggattgtctcgaacgtagcccctccttcgtgattgagtaatccccggacgttctca

SEQ ID NO: 3000 - DNA, 60 bp, Artificial
  Synthetic oligonucleotide
cgcagagtcccattttctgccactacttcgtctatcccaattcgattggcgatcatatca

SEQ ID NO: 3001 - DNA, 60 bp, Artificial
  Synthetic oligonucleotide
ccggtggtgattgccgaaacaaccgcaacgttggcgaacaaagagaaaactggaacttgg

SEQ ID NO: 3002 - DNA, 60 bp, Artificial
  Synthetic oligonucleotide
cctggaaatacttcccgaatgaacaacctaccttgccggctccaataaaaccaacgttca

SEQ ID NO: 3003 - DNA, 60 bp, Artificial
  Synthetic oligonucleotide
cgcgcattacacggaaaagcagctcgtatcaaagaaatcagaagataaacacggaaaact

SEQ ID NO: 3004 - DNA, 60 bp, Artificial
  Synthetic oligonucleotide
ctacgttcgcgatgttttccgtattttactacgtgtccagccaagctcttcacccctcta

SEQ ID NO: 3005 - DNA, 60 bp, Artificial
  Synthetic oligonucleotide
gattcaaccgatccaactccttggccatcttccacgtaggggcgacttgtctacctagcc

SEQ ID NO: 3006 - DNA, 60 bp, Artificial
  Synthetic oligonucleotide
gcgtggcacgaatactactttctgtggcaatttgtaaggcatggatcttgccttcacgat

SEQ ID NO: 3007 - DNA, 60 bp, Artificial
  Synthetic oligonucleotide
cgctttggctttgatttctttaaatttgctggatcagctgctgggactgccgaaactggc

SEQ ID NO: 3008 - DNA, 60 bp, Artificial
  Synthetic oligonucleotide
ccccaacatatcttgatatacagaatttgtccatcacaccctgcacctgctccaatacca

SEQ ID NO: 3009 - DNA, 60 bp, Artificial
  Synthetic oligonucleotide
gagattggcgcagcgaatccttgataatgagctcggatgtgataccggtggcgaggcacc

SEQ ID NO: 3010 - DNA, 60 bp, Artificial
  Synthetic oligonucleotide
cgacgcttgccttatttagaacgctattttctcggttttcattagcgactcgtgaagccg

SEQ ID NO: 3011 - DNA, 60 bp, Artificial
  Synthetic oligonucleotide
ggtatgtggaaccgagacaatgtagtaaataaaatagagtgtgattgtggccaacgggcc

SEQ ID NO: 3012 - DNA, 60 bp, Artificial
  Synthetic oligonucleotide
cgctttgctcaactggccttcaacgttttagtttggtttccctttcgtttagtcagctca

SEQ ID NO: 3013 - DNA, 60 bp, Artificial
  Synthetic oligonucleotide
aatgcttatagtgatgagtggtgcggataatgcaggcggacttgtacttgctgcttcgcc

SEQ ID NO: 3014 - DNA, 60 bp, Artificial
  Synthetic oligonucleotide
gtgatgagtggtgcggataatgcaggcggacttgtacttgctgcttcgccaatggcaaaa

SEQ ID NO: 3015 - DNA, 60 bp, Artificial
  Synthetic oligonucleotide
ggcgacagctgtgaatcgttcgggcttagttggtggtcatgcaggtggcaacgtcggtct

SEQ ID NO: 3016 - DNA, 60 bp, Artificial
  Synthetic oligonucleotide
gcctatgtgcagtgctcgtgtggctgtcttgcaagtagagtgtcgagtgatttagacaag

SEQ ID NO: 3017 - DNA, 60 bp, Artificial
  Synthetic oligonucleotide
cggctaaatctcccgtcttagctaatactctagtagcgtttccttgagggtctagatcaa

SEQ ID NO: 3018 - DNA, 60 bp, Artificial
  Synthetic oligonucleotide
ttctcgatgctgcaattgatctggaactgatgccaacgctaattttagaaactccagggg

SEQ ID NO: 3019 - DNA, 60 bp, Artificial
  Synthetic oligonucleotide
gccttcggtcgatttggggtgcaaccattttggtattgcacgtattcctagaacagacaa

SEQ ID NO: 3020 - DNA, 60 bp, Artificial
  Synthetic oligonucleotide
ctacccagcactgacacatgatatgcaacaactaatccagtggtccatgaaatttgagcc

SEQ ID NO: 3021 - DNA, 60 bp, Artificial
  Synthetic oligonucleotide
caaaagccggtaggggtggaggactagtagttgctactcggaaagcattaattcgtacgg

SEQ ID NO: 3022 - DNA, 60 bp, Artificial
  Synthetic oligonucleotide
gagatgttggcattgatgaatgaagacgcagactggtataggaatgaagataccgagcgt

SEQ ID NO: 3023 - DNA, 60 bp, Artificial
  Synthetic oligonucleotide
ggcattgatgaatgaagacgcagactggtataggaatgaagataccgagcgttttaaacg

SEQ ID NO: 3024 - DNA, 60 bp, Artificial
  Synthetic oligonucleotide
cacgttgcgcactcatggaaagcgttcattggtgtagaacgaattgcggcaggagacgtt

SEQ ID NO: 3025 - DNA, 60 bp, Artificial
  Synthetic oligonucleotide
ggtgcattggatcaaagtcaacaagcagtgactgaccaacaagcggtcgtagacgaagca

SEQ ID NO: 3026 - DNA, 60 bp, Artificial
  Synthetic oligonucleotide
gtcagccctgaaacaaccattgaacctctagggcagccaacagaagttgcaccagcagaa

SEQ ID NO: 3027 - DNA, 60 bp, Artificial
  Synthetic oligonucleotide
cggcaattctggcaccacacttgccttttctaccactaatggctctactggtgcttgcgg

SEQ ID NO: 3028 - DNA, 60 bp, Artificial
  Synthetic oligonucleotide
ccgcaagcaccagtagagccattagtggtagaaaaggcaagtgtagtgccagaattgccg

SEQ ID NO: 3029 - DNA, 60 bp, Artificial
  Synthetic oligonucleotide
gcgcactcatggaaagcgttcattggtgtagaacgaattgcggcaggagacgtttacaac

SEQ ID NO: 3030 - DNA, 60 bp, Artificial
  Synthetic oligonucleotide
cgcaagcaccagtagagccattagtggtagaaaaggcaagtgtggtgccagaattgccac

SEQ ID NO: 3031 - DNA, 60 bp, Artificial
  Synthetic oligonucleotide
cagtagagccattagtggtagaaaaggcaagtgtagagccagaattgccacaaacaggcg

SEQ ID NO: 3032 - DNA, 60 bp, Artificial
  Synthetic oligonucleotide
cgcaagcaccagtagagccattagtggtagaaaaggcaagtgtggtgccagaattgccgc

SEQ ID NO: 3033 - DNA, 60 bp, Artificial
  Synthetic oligonucleotide
cgctcggtatcttcattcctataccagtctgcgtcttcattcatcaatgccaacatctct

SEQ ID NO: 3034 - DNA, 60 bp, Artificial
  Synthetic oligonucleotide
gcactgcttttagggtctgcttcaatatatgcaaaccagttagctatcttcgtttgttct

SEQ ID NO: 3035 - DNA, 60 bp, Artificial
  Synthetic oligonucleotide
ggcttatcttatacctgtgaaactctttatcttctcttttaaccattgaggcaactaaga

SEQ ID NO: 3036 - DNA, 60 bp, Artificial
  Synthetic oligonucleotide
ggctatactttcctgcaacaagagtattagacatagctatttctttgccagcatttacat

SEQ ID NO: 3037 - DNA, 60 bp, Artificial
  Synthetic oligonucleotide
gtgttacaacgcaataaagatggctcttttgctacgcaagcaaatagaaagtctattctg

SEQ ID NO: 3038 - DNA, 60 bp, Artificial
  Synthetic oligonucleotide
cgtttagcttgtctaaggtggttaggcgagaaaatgggcaaagaactacccgataatcga

SEQ ID NO: 3039 - DNA, 60 bp, Artificial
  Synthetic oligonucleotide
ccttaactgataggcaagccctagcaatacaattacagcgcgaatttgggcttcgtagag

SEQ ID NO: 3040 - DNA, 60 bp, Artificial
  Synthetic oligonucleotide
catcgacatacaatacgcaatcaactatattagcataccctgcttgttcgcctaatttgc

SEQ ID NO: 3041 - DNA, 60 bp, Artificial
  Synthetic oligonucleotide
ggtggattaacatctaagcagctaacacctgagcaaaagcaacaagactatgaagctaga

SEQ ID NO: 3042 - DNA, 60 bp, Artificial
  Synthetic oligonucleotide
gcgaaaagtcttataagcaagcaatggaacatttcacgactcgctgtcaaagagcaggga

SEQ ID NO: 3043 - DNA, 60 bp, Artificial
  Synthetic oligonucleotide
gagcataaaatcgagcttaaaagctcttggacaaaggttggaagaccacgagaaatccca

SEQ ID NO: 3044 - DNA, 60 bp, Artificial
  Synthetic oligonucleotide
ttctatattcattcctacacttcctcaaatccaaatggtagcttatgattctcttctggt

SEQ ID NO: 3045 - DNA, 60 bp, Artificial
  Synthetic oligonucleotide
ctctatctttcgacctctttgatatacaacaataaagctatagccagtagtaacaacctg

SEQ ID NO: 3046 - DNA, 60 bp, Artificial
  Synthetic oligonucleotide
ccagtcctttaatagtctacctttagagtctcgtaaatagttatctttgtgacaggggcc

SEQ ID NO: 3047 - DNA, 65 bp, Artificial
  Synthetic oligonucleotide
gcttgtcagtctcttctctagaaatgtaccaaattttacctattttaggatacttttcatgaagc

SEQ ID NO: 3048 - DNA, 60 bp, Artificial
  Synthetic oligonucleotide
caacttctggcttccacttagcatccaagccttcagaaattcttgccgctacccaaccca

SEQ ID NO: 3049 - DNA, 60 bp, Artificial
  Synthetic oligonucleotide
ataccaagctccataccacccttgagattcatttcttcccgcgtctgactgcatataaaa

SEQ ID NO: 3050 - DNA, 60 bp, Artificial
  Synthetic oligonucleotide
ccgcagccactagtaccttgttgtaagcgattaactctgccaccttcttgatctgtagcg

SEQ ID NO: 3051 - DNA, 60 bp, Artificial
  Synthetic oligonucleotide
gacggcttagcatgtaagaaactacctgccgcatcagcactttcgtcaattggcatcggc

SEQ ID NO: 3052 - DNA, 60 bp, Artificial
  Synthetic oligonucleotide
ctagagcaacagggcgtgagtatgtgcgtatggctttaggtggcgtgcgtgatgaatcag

SEQ ID NO: 3053 - DNA, 60 bp, Artificial
  Synthetic oligonucleotide
gcatgagatgtcataccaccacgtagagttaagataccattacaagcattcatccccgcg

SEQ ID NO: 3054 - DNA, 60 bp, Artificial
  Synthetic oligonucleotide
gcctttaatcgcatcccaagccatccacttagcgcgttcaaccattttcaaagcagaagg

SEQ ID NO: 3055 - DNA, 60 bp, Artificial
  Synthetic oligonucleotide
ccaagagaaccttgtaagaaaccacgcacacttccccaaccacctccgtagaagttctcg

SEQ ID NO: 3056 - DNA, 60 bp, Artificial
  Synthetic oligonucleotide
ggggcgaatatggtttcgacatgaatgtcaaaatctaaggtgcatgccgaggaagtaccg

SEQ ID NO: 3057 - DNA, 60 bp, Artificial
  Synthetic oligonucleotide
gaggaggatgcgtattatatgtcttcaccggctgacgggtgatgttagcggataggagct

SEQ ID NO: 3058 - DNA, 60 bp, Artificial
  Synthetic oligonucleotide
ccccagtttgtatcatcaccttgccagtcgtcttctctaccaaaggcaaaaccaatcggc

SEQ ID NO: 3059 - DNA, 60 bp, Artificial
  Synthetic oligonucleotide
ctcgccaacgccacttcattgccataccgccaagcatagcagcctctgatgagccagtcg

SEQ ID NO: 3060 - DNA, 60 bp, Artificial
  Synthetic oligonucleotide
cgacagcaccacgccaaccatatattgactgatcatcatcgccaactgccatcatgtagt

SEQ ID NO: 3061 - DNA, 60 bp, Artificial
  Synthetic oligonucleotide
gatagtgccacctgatagctctttccattcccaaaccttgcttacaaagttctctcgccc

SEQ ID NO: 3062 - DNA, 60 bp, Artificial
  Synthetic oligonucleotide
gctgttgcaaggcattctgttcctctcatcattaccccttcaattacagcctgtcctcct

SEQ ID NO: 3063 - DNA, 60 bp, Artificial
  Synthetic oligonucleotide
ctttccaaagttcttctcctataccaccagctccaaccattcctaaaacacttgcccctc

SEQ ID NO: 3064 - DNA, 60 bp, Artificial
  Synthetic oligonucleotide
ctcccaggccgcttccagccaagtaccatcagcgtatatgggcttaacttctaggttcgg

SEQ ID NO: 3065 - DNA, 60 bp, Artificial
  Synthetic oligonucleotide
gccgctgcaacaacaggacctgcaagaggacctctgcctgcctcatctacacctataaca

SEQ ID NO: 3066 - DNA, 60 bp, Artificial
  Synthetic oligonucleotide
ccatcaggtggaggacaatgggcagttcaagctccaatagtaatgccagcaggacaagca

SEQ ID NO: 3067 - DNA, 60 bp, Artificial
  Synthetic oligonucleotide
ggttggtattccaccgatgactccgatacagctagcgccataccttcatagtctcccaac

SEQ ID NO: 3068 - DNA, 60 bp, Artificial
  Synthetic oligonucleotide
gagctaggaagaggaaaagcaaatgataaaggacaactacgttcaacagtagcaggagaa

SEQ ID NO: 3069 - DNA, 60 bp, Artificial
  Synthetic oligonucleotide
cagcgccaaccccatgacgacattagacccaaaacctcctggaagtagcggtaaggtcag

SEQ ID NO: 3070 - DNA, 60 bp, Artificial
  Synthetic oligonucleotide
gctctttcagcgattgcttttccaacggcttttgctgcttctatgtttccaccgttagca

SEQ ID NO: 3071 - DNA, 60 bp, Artificial
  Synthetic oligonucleotide
gtggcatcttctgtcatttgagcaagtcccatcataggacctcccataaccaatcttgcc

SEQ ID NO: 3072 - DNA, 60 bp, Artificial
  Synthetic oligonucleotide
gcgacaagcctgacttgctacctataacctcacaaccccgtcgaaacctttgcatcccca

SEQ ID NO: 3073 - DNA, 60 bp, Artificial
  Synthetic oligonucleotide
ggagcacaacgttcaggtggagtaactaccgctcttggttggggacttgcaggagcagca

SEQ ID NO: 3074 - DNA, 60 bp, Artificial
  Synthetic oligonucleotide
gctgctccatgtccacccaccatagatattgcacttgatagtaacgcataaggtgcttct

SEQ ID NO: 3075 - DNA, 60 bp, Artificial
  Synthetic oligonucleotide
gttcatcaacaagaccattttcttttgcctgacttccaagccatacacgaccaccagcaa

SEQ ID NO: 3076 - DNA, 60 bp, Artificial
  Synthetic oligonucleotide
ccagctagtcaccctcatgcagtaacacctgaaagattggctagatgggaagctgcgtct

SEQ ID NO: 3077 - DNA, 60 bp, Artificial
  Synthetic oligonucleotide
gtccgtgatcgccagcacaggccaagaagaagaagcgcagcagccgaacacacctggagc

SEQ ID NO: 3078 - DNA, 60 bp, Artificial
  Synthetic oligonucleotide
aagggttggccgagaggacgatcaggctcattgcgacgccccgctgaggaacggtggcag

SEQ ID NO: 3079 - DNA, 60 bp, Artificial
  Synthetic oligonucleotide
cgccacgcccgtcgaagccccggttggtgcggatcagggtgggcacgtcgaactggatgg

SEQ ID NO: 3080 - DNA, 60 bp, Artificial
  Synthetic oligonucleotide
ttcctcgcccgcatcgccatccgggtcccacctgctcttcctgcccacattgaaatacta

SEQ ID NO: 3081 - DNA, 60 bp, Artificial
  Synthetic oligonucleotide
atacgccgactacctgccctcagacggcttcaccacgctcaacatcatctccaccgccgg

SEQ ID NO: 3082 - DNA, 60 bp, Artificial
  Synthetic oligonucleotide
aatcagcgaccgccgcgctcccaaacgtgcacgagccgacctctccgacctcaccctgat

SEQ ID NO: 3083 - DNA, 60 bp, Artificial
  Synthetic oligonucleotide
atccctcccacagcgtcgccagcaccgtctcctccgccgagtaccgggcctgctgataca

SEQ ID NO: 3084 - DNA, 60 bp, Artificial
  Synthetic oligonucleotide
acctgctgctcacccacggcgacggcgggcacatcgggaccgcgctacacacctgcctga

SEQ ID NO: 3085 - DNA, 60 bp, Artificial
  Synthetic oligonucleotide
gcgcgtatccccgacctcgtcagcatcgtgtattccctttcgtaaccccagcctttgcca

SEQ ID NO: 3086 - DNA, 60 bp, Artificial
  Synthetic oligonucleotide
atgcggtcgcccaggtgctggactcccctaccgccacagccgaactcctcgcggggttga

SEQ ID NO: 3087 - DNA, 60 bp, Artificial
  Synthetic oligonucleotide
aatacgcccgcctgctcacctggcgcgtcgaactactcgtcacccacagcagccacgcca

SEQ ID NO: 3088 - DNA, 60 bp, Artificial
  Synthetic oligonucleotide
tgacgccgatgacgcaccgagtagctcaccaacgccccatcgcgaacgccactgaagcaa

SEQ ID NO: 3089 - DNA, 60 bp, Artificial
  Synthetic oligonucleotide
aaacgcacaaggtcggcaatcaccagcaccgtcagtacagccaccaacaggcccgcggcg

SEQ ID NO: 3090 - DNA, 60 bp, Artificial
  Synthetic oligonucleotide
tgagccagcagccggcccgccagcacacatagatgatccccagcagcgcgaacacggctg

SEQ ID NO: 3091 - DNA, 60 bp, Artificial
  Synthetic oligonucleotide
tcacaccctgtccttccaccgctccattcgcccactgccatgtcatccccgctgcaggta

SEQ ID NO: 3092 - DNA, 60 bp, Artificial
  Synthetic oligonucleotide
tctttcgtcacgcctttcttcgccagcacccgaggccactgccatgcacgaccacgcccc

SEQ ID NO: 3093 - DNA, 60 bp, Artificial
  Synthetic oligonucleotide
gccccgagccttgtccgccctcgatgccgcgatggaagggccgcagcaccagcagacgct

SEQ ID NO: 3094 - DNA, 60 bp, Artificial
  Synthetic oligonucleotide
acgtgccacccagcgccaccaacttcatcgccgtgcgcctgcccgacgcggaccttgccg

SEQ ID NO: 3095 - DNA, 60 bp, Artificial
  Synthetic oligonucleotide
tggtggtcgacgacgaggtgcgccagcctccccagcaagccacgacgttctcgctcaccg

SEQ ID NO: 3096 - DNA, 60 bp, Artificial
  Synthetic oligonucleotide
agacgactctccgccgagcgcgcatgtgccgtcaacgactctccacgcgccagcaccgac

SEQ ID NO: 3097 - DNA, 60 bp, Artificial
  Synthetic oligonucleotide
agaaagagccccggacccttgatgccgttgtcgtgagtgcctgtcatgtcgttgcctccg

SEQ ID NO: 3098 - DNA, 60 bp, Artificial
  Synthetic oligonucleotide
tagaccattgccggagaatgacatgaccgcccctgccgccgctcccgaatccaccaccag

SEQ ID NO: 3099 - DNA, 60 bp, Artificial
  Synthetic oligonucleotide
tatacaagtgacgtgcgacttccatgccacccaacgccacgctgccgccgagcaatgtca

SEQ ID NO: 3100 - DNA, 60 bp, Artificial
  Synthetic oligonucleotide
ttcgaggagcgcacgccccaccccgccgccgcgcgcttcctggctcacgcagaaagagta

SEQ ID NO: 3101 - DNA, 60 bp, Artificial
  Synthetic oligonucleotide
aacacgaacccgctcagcatcacgaccgacaacaccgcgcccgtccagtcgaaaccgtgc

SEQ ID NO: 3102 - DNA, 60 bp, Artificial
  Synthetic oligonucleotide
tcatctacgcgttacccaatctttaccccgccgaccccgccgttcagatcagcagcaccg

SEQ ID NO: 3103 - DNA, 60 bp, Artificial
  Synthetic oligonucleotide
tgatcgtcaactggccttcctgcatgccgacctcgatgcccacgccgctgaactcgccct

SEQ ID NO: 3104 - DNA, 60 bp, Artificial
  Synthetic oligonucleotide
acatgccgatccacgcccgagtcttgcccgaccccgaggccgagccctggaagatcgtcg

SEQ ID NO: 3105 - DNA, 60 bp, Artificial
  Synthetic oligonucleotide
aactccgcggggtcgggctgaaagtcgttcgccgcacgcaacggcacgcgcaccagggtc

SEQ ID NO: 3106 - DNA, 60 bp, Artificial
  Synthetic oligonucleotide
acaaggcattacccaggtcgccgtccaccgccgccctcgcatcgccctgctttccaccgg

SEQ ID NO: 3107 - DNA, 60 bp, Artificial
  Synthetic oligonucleotide
aaaagtcatggtcggagtagcgggattcaaacccacgacctcacccaccccaagggtgcg

SEQ ID NO: 3108 - DNA, 60 bp, Artificial
  Synthetic oligonucleotide
cacatttgtgctcgtagctcagctgaatagagcaacaggttgcggtcctgtaggtcgggg

SEQ ID NO: 3109 - DNA, 60 bp, Artificial
  Synthetic oligonucleotide
gccaaggataccaccctttcacggtggaaacggaagttcaaatctttcaagggtcgccac

SEQ ID NO: 3110 - DNA, 60 bp, Artificial
  Synthetic oligonucleotide
ccgtttcaatgggtacgagttcagtcctccacgcgctattacacgcgtttcaacttggcc

SEQ ID NO: 3111 - DNA, 60 bp, Artificial
  Synthetic oligonucleotide
ctgccccaatagggatattaataggcacaggattagctttcaaacgctgtttaatttgac

SEQ ID NO: 3112 - DNA, 60 bp, Artificial
  Synthetic oligonucleotide
cgaacccctgtagccaccgtgaaagggtggtatcctaaccgctagatgacggggccactt

SEQ ID NO: 3113 - DNA, 60 bp, Artificial
  Synthetic oligonucleotide
cgaacccctgtagccaccgtgaaagggtggtatcctgaccgctagatgaaggggccactt

SEQ ID NO: 3114 - DNA, 60 bp, Artificial
  Synthetic oligonucleotide
gcgacccctaggagatttgaactcctgtagccaccgtgaaagggtggtatccttggccac

SEQ ID NO: 3115 - DNA, 60 bp, Artificial
  Synthetic oligonucleotide
gcgacccttgaaagatttgaacttccgtttccaccgtgaaagggtggtatccttggccac

SEQ ID NO: 3116 - DNA, 60 bp, Artificial
  Synthetic oligonucleotide
cggcgatggagagcttaactgccaggttcggaatggagctgggtgtagcctctcctctat

SEQ ID NO: 3117 - DNA, 60 bp, Artificial
  Synthetic oligonucleotide
cttaactgccaggttcggaatggagctgggtgtagcctctcctctataggcacgagaaaa

SEQ ID NO: 3118 - DNA, 60 bp, Artificial
  Synthetic oligonucleotide
cccgatcgaagcgctgaagagacactcaatctcgccctaaatgccatggaagcggccaat

SEQ ID NO: 3119 - DNA, 60 bp, Artificial
  Synthetic oligonucleotide
ccaccgccactctcaagctcatcgaagccccaagcaatgccaaaacaagtggtgctgggg

SEQ ID NO: 3120 - DNA, 60 bp, Artificial
  Synthetic oligonucleotide
caggtgcgaatggcgtgagcgcagatggtgagtgaggtgtgttgcatcaaggtgacggtc

SEQ ID NO: 3121 - DNA, 60 bp, Artificial
  Synthetic oligonucleotide
gcgcaaccccgctaggaggagtgcccgtgaaatctctatatcgattgtcatagcgcggcg

SEQ ID NO: 3122 - DNA, 60 bp, Artificial
  Synthetic oligonucleotide
aacgccaatcccctctcctgcctcacctccactcgcttcatcggttatgggaaaatcccc

SEQ ID NO: 3123 - DNA, 60 bp, Artificial
  Synthetic oligonucleotide
ccgcccaaaatccctgcccttgcggaaatcttctcaatcccctccaagagtgccgctgca

SEQ ID NO: 3124 - DNA, 60 bp, Artificial
  Synthetic oligonucleotide
cggtctagcgcctgagatcaccctccaagagagcctcacttatgtccctggtttcgagct

SEQ ID NO: 3125 - DNA, 60 bp, Artificial
  Synthetic oligonucleotide
cccttctctcgctcaaacccgccctcatgcactcactccactccctagaactcgccaaag

SEQ ID NO: 3126 - DNA, 60 bp, Artificial
  Synthetic oligonucleotide
ccgctggaccgctagccaacctctttctcgccttcttgctctatgttgccatcgcccttc

SEQ ID NO: 3127 - DNA, 60 bp, Artificial
  Synthetic oligonucleotide
gcccaacagtcgaatcatgattcaccaacccctaggaggtgcacaggggcaggcaaccga

SEQ ID NO: 3128 - DNA, 60 bp, Artificial
  Synthetic oligonucleotide
aggcggtcgctgaatccgttggaattcccctcatgctctacaatgtccctggacgcacgg

SEQ ID NO: 3129 - DNA, 60 bp, Artificial
  Synthetic oligonucleotide
gctcgattccaatgcgcttcttgccgcccatatcagcgattgggccggtgatttcagcct

SEQ ID NO: 3130 - DNA, 60 bp, Artificial
  Synthetic oligonucleotide
ggcaggtgagtttgatgagattgtcaagcgctttggcggcatgaccaacgcctccacggg

SEQ ID NO: 3131 - DNA, 60 bp, Artificial
  Synthetic oligonucleotide
ccgcttcttgttgcttggagatgagattggccgcgatataccagtcgtcatagttgcccg

SEQ ID NO: 3132 - DNA, 60 bp, Artificial
  Synthetic oligonucleotide
cctctgacctctccaagcaaggaagtcacttcgacctccccatcgcccttctcattgccc

SEQ ID NO: 3133 - DNA, 60 bp, Artificial
  Synthetic oligonucleotide
cccacgctcgctggcactgaaatatactccccgaccgcaaacaacgcaataaggcctccg

SEQ ID NO: 3134 - DNA, 60 bp, Artificial
  Synthetic oligonucleotide
gagccaaaactcgcgccaaagccagcccatgcgtaactcacgatgctgaggatgctagcg

SEQ ID NO: 3135 - DNA, 60 bp, Artificial
  Synthetic oligonucleotide
caaaagtatcgcctaaccacgccacgcccaacacgcacacgcacgcttgcatgccggatt

SEQ ID NO: 3136 - DNA, 60 bp, Artificial
  Synthetic oligonucleotide
gcccacccttttcaaacaataaccccttaagcccacgccctctaaaagcctgcccgcata

SEQ ID NO: 3137 - DNA, 60 bp, Artificial
  Synthetic oligonucleotide
cacttgagctacaagaaagaacgccgaagccatgacaagcgcaaggtaacccacattgat

SEQ ID NO: 3138 - DNA, 60 bp, Artificial
  Synthetic oligonucleotide
gtgtatagagtgaaagataatgttttgaccttagtcaggcttggcagtcatagcgagttg

SEQ ID NO: 3139 - DNA, 60 bp, Artificial
  Synthetic oligonucleotide
cggcttccaatccaaccctactaaaaccgcctagcgagcgttagcgagcaaataagcggt

SEQ ID NO: 3140 - DNA, 60 bp, Artificial
  Synthetic oligonucleotide
gcgttagcgagcatagacaaaagcgcatcgcagtttgaaagcgtaggcgttagccgaagc

SEQ ID NO: 3141 - DNA, 60 bp, Artificial
  Synthetic oligonucleotide
gtgaggggtaaatacgctaaaacgctctatcgcttgctcaagcaatacaaaagcacaggg

SEQ ID NO: 3142 - DNA, 60 bp, Artificial
  Synthetic oligonucleotide
gctagtgggttgggagtttgtagcgggtagcactccgttaggaggcacaccatgaaagca

SEQ ID NO: 3143 - DNA, 60 bp, Artificial
  Synthetic oligonucleotide
cctaccacaacaacgctaataaggttaatctagggaaattgagcgaaagggaagccaatc

SEQ ID NO: 3144 - DNA, 60 bp, Artificial
  Synthetic oligonucleotide
gacaagcaacgcactcaaagagatattaagctcatagcgtgggacattaaaagacaaggc

SEQ ID NO: 3145 - DNA, 60 bp, Artificial
  Synthetic oligonucleotide
ctctctccaagatgtggataaacctgacaaactcctaaaacctttcatcgctaaagatga

SEQ ID NO: 3146 - DNA, 60 bp, Artificial
  Synthetic oligonucleotide
cgcatagcatccaccctatcactaacgaacccatcaaagagtttgcaaaatacataggca

SEQ ID NO: 3147 - DNA, 60 bp, Artificial
  Synthetic oligonucleotide
gggagtcaggcggtgggtgataaaatcaatcgtcaaaaggggaacaacccagactaccaa

SEQ ID NO: 3148 - DNA, 60 bp, Artificial
  Synthetic oligonucleotide
gggttgttccccttttgacgattgattttatcacccaccgcctgactcccaagatacggt

SEQ ID NO: 3149 - DNA, 60 bp, Artificial
  Synthetic oligonucleotide
ttggtagtctgggttgttccccttttgacgattgattttatcacccaccgcctgactccc

SEQ ID NO: 3150 - DNA, 60 bp, Artificial
  Synthetic oligonucleotide
ctgggttgttccccttttgacgattgattttatcacccaccgcctgactcccaagatacg

SEQ ID NO: 3151 - DNA, 60 bp, Artificial
  Synthetic oligonucleotide
cgagagcttgaaattaacagagccaatcaggtttggagtggagatattacctatatccca

SEQ ID NO: 3152 - DNA, 60 bp, Artificial
  Synthetic oligonucleotide
cgttttactgtgccaatcaataatggcgcacaaatacacgaaaccacccttgattgggat

SEQ ID NO: 3153 - DNA, 60 bp, Artificial
  Synthetic oligonucleotide
cgaaaccacccttgattgggatataggtaatatctccactccaaacctgattggctctgt

SEQ ID NO: 3154 - DNA, 60 bp, Artificial
  Synthetic oligonucleotide
cagaacttctcaagaaacacaacattcaaatctctatgaacggtaaaggcagatccattg

SEQ ID NO: 3155 - DNA, 60 bp, Artificial
  Synthetic oligonucleotide
ctccactccaaacctgattggctctgttaatttcaagctctcgtagtagatatggataga

SEQ ID NO: 3156 - DNA, 60 bp, Artificial
  Synthetic oligonucleotide
ccgaccaaggtagccaatataccagccatgaacatacagaacttctcaagaaacacaaca

SEQ ID NO: 3157 - DNA, 60 bp, Artificial
  Synthetic oligonucleotide
gatcttgtcacacccaagctaaagaatctctccatggcaagacaatgtgaaataatagat

SEQ ID NO: 3158 - DNA, 60 bp, Artificial
  Synthetic oligonucleotide
taatggcgcacaaatacacgaaaccacccttgattgggatataggtaatatctccactcc

SEQ ID NO: 3159 - DNA, 60 bp, Artificial
  Synthetic oligonucleotide
ccatcttccaaaagctgcctatgcataaaccgatagccataggttgaggatatatcagta

SEQ ID NO: 3160 - DNA, 60 bp, Artificial
  Synthetic oligonucleotide
ttatttacaccaattgaaaatccatcttccaaaagctgcctatgcataaaccgatagcca

SEQ ID NO: 3161 - DNA, 60 bp, Artificial
  Synthetic oligonucleotide
atttgataagcccaagctctttagctttcccactgcccaatccctctctatggttgtttt

SEQ ID NO: 3162 - DNA, 60 bp, Artificial
  Synthetic oligonucleotide
tttggtgtaatctcatatttactggcaatctgtgctacagtctcttcgccacctagtaat

SEQ ID NO: 3163 - DNA, 60 bp, Artificial
  Synthetic oligonucleotide
gtatgttcatggctggtatattggctaccttggtcggagttgaatattacaggaatgtca

SEQ ID NO: 3164 - DNA, 60 bp, Artificial
  Synthetic oligonucleotide
gatattttccatgagagtatcgttttactgtgccaatcaataatggcgcacaaatacacg

SEQ ID NO: 3165 - DNA, 60 bp, Artificial
  Synthetic oligonucleotide
ctggcaatctgtgctacagtctcttcgccacctagtaattctaagacaactctagtttta

SEQ ID NO: 3166 - DNA, 60 bp, Artificial
  Synthetic oligonucleotide
gcggtcgtgctcgtgctggttcacgtcgttctccagtctttgttggcggtggtaaagcgt

SEQ ID NO: 3167 - DNA, 60 bp, Artificial
  Synthetic oligonucleotide
aaaacacgcagccataccagttccacaagccaaagtctcatcttcaacgccacgctcata

SEQ ID NO: 3168 - DNA, 60 bp, Artificial
  Synthetic oligonucleotide
ccacctctatttccacgtgttgatgagccgcttatgcctgaagccccacttgctcaacca

SEQ ID NO: 3169 - DNA, 60 bp, Artificial
  Synthetic oligonucleotide
cactcacgccacttctgcatagacaatcaagacagtgtccgccaaccccaccaacgccta

SEQ ID NO: 3170 - DNA, 60 bp, Artificial
  Synthetic oligonucleotide
cgcagagccaactgctatcatatttgctactccgcccatccagctcccacttagcgcacc

SEQ ID NO: 3171 - DNA, 60 bp, Artificial
  Synthetic oligonucleotide
cggctcagtcaccttcacggcaactcatcccacaccagcaccaccgctcaacggttactt

SEQ ID NO: 3172 - DNA, 60 bp, Artificial
  Synthetic oligonucleotide
gtcactgtttccgcctagatgtgaagccgcctctgagcctgttgctacgacaaccgcgtc

SEQ ID NO: 3173 - DNA, 60 bp, Artificial
  Synthetic oligonucleotide
cccagcctgttccgccgctttcatgcttgcatctttaacatctactgtaaccgctgccgc

SEQ ID NO: 3174 - DNA, 60 bp, Artificial
  Synthetic oligonucleotide
cgaacatactcatccccataaacaccaaagccaatccctggagcaaccgcaacgccagcc

SEQ ID NO: 3175 - DNA, 60 bp, Artificial
  Synthetic oligonucleotide
caacatttgccatctcagcagccacttcaaccccgctaagccctgctccgccaatgacta

SEQ ID NO: 3176 - DNA, 60 bp, Artificial
  Synthetic oligonucleotide
gagatggaaggtgctgtatttgccaatggtacgacatcctcaggcagtgtgggcatccgc

SEQ ID NO: 3177 - DNA, 60 bp, Artificial
  Synthetic oligonucleotide
gtgcctgttgttggtgtggtaaatggtcttgcgtggacggctgttggcggagatgtctta

SEQ ID NO: 3178 - DNA, 60 bp, Artificial
  Synthetic oligonucleotide
tcgcaagtgatcatgaagaggttggaagcgagtcggcgagtggggcaggtgggagctttt

SEQ ID NO: 3179 - DNA, 60 bp, Artificial
  Synthetic oligonucleotide
cgccgacacccctgggcatgagcaatatacaagaaacatggcgacaggtgctagtacggc

SEQ ID NO: 3180 - DNA, 60 bp, Artificial
  Synthetic oligonucleotide
ccctcaatacgaagccctacttgataccccgccaactccgctgtcccataagctgctatg

SEQ ID NO: 3181 - DNA, 60 bp, Artificial
  Synthetic oligonucleotide
gagccatcaaatttgatcatgccctccaccaagactatgaagagagtgtctctccctctc

SEQ ID NO: 3182 - DNA, 60 bp, Artificial
  Synthetic oligonucleotide
tgagagtattgagagtattgaggggaaactaggagcctttgtagccaacctcacggatgg

SEQ ID NO: 3183 - DNA, 60 bp, Artificial
  Synthetic oligonucleotide
ggagcctttgtagccaacctcacggatggaagctctagagagtttgcccaaggagtcctc

SEQ ID NO: 3184 - DNA, 60 bp, Artificial
  Synthetic oligonucleotide
attgatcgagagaagttcccctctgagatgcatcttctcactctattgcaagagagcgga

SEQ ID NO: 3185 - DNA, 60 bp, Artificial
  Synthetic oligonucleotide
cgctggagtgctgtcctgattgcaaggtgaaggtgatggtaggctttagcagtgaagccg

SEQ ID NO: 3186 - DNA, 60 bp, Artificial
  Synthetic oligonucleotide
ccctctgcctctcttgcgtgggagcttgcaatgtcaatgccctcaccgccaactccaatg

SEQ ID NO: 3187 - DNA, 60 bp, Artificial
  Synthetic oligonucleotide
ccagccctctatcttgctcaagatattcccactctcctagaggcactccctaaggctcac

SEQ ID NO: 3188 - DNA, 60 bp, Artificial
  Synthetic oligonucleotide
gatccctgagcccttcctcaaagatctagaggaggtcactctccctaaaggaatcactcc

SEQ ID NO: 3189 - DNA, 60 bp, Artificial
  Synthetic oligonucleotide
gctccctatcccaaggaggctctctatgagattgcccgactctacaatgagacgacgatc

SEQ ID NO: 3190 - DNA, 60 bp, Artificial
  Synthetic oligonucleotide
catcgccgagagaagtcctgtagtaagtgcgccaccctctgtcctacctttggggtggtg

SEQ ID NO: 3191 - DNA, 60 bp, Artificial
  Synthetic oligonucleotide
cgctacaagaccaccatcacctataatcctgagatctgccaatatcatcatcgccgagag

SEQ ID NO: 3192 - DNA, 60 bp, Artificial
  Synthetic oligonucleotide
ggagagattaaagtggatcaagagaagtgcaccctctgcctctcttgcgtgggagcttgc

SEQ ID NO: 3193 - DNA, 60 bp, Artificial
  Synthetic oligonucleotide
gcctctatcgctacacgcctaagcccaacgagttaagacgcaagacctttggagagaggc

SEQ ID NO: 3194 - DNA, 60 bp, Artificial
  Synthetic oligonucleotide
gccatcacactagagctaagcggcatcactttggctccctcttggtttgagtccaaggtg

SEQ ID NO: 3195 - DNA, 60 bp, Artificial
  Synthetic oligonucleotide
cacccctctttgtgggtaacgccttcaagttaaagacgctggagtgctgtcctgattgca

SEQ ID NO: 3196 - DNA, 60 bp, Artificial
  Synthetic oligonucleotide
cgtcaaaaggggaacaacccagactaccaaataaggtcccaaagtcatacctgagtggaa

SEQ ID NO: 3197 - DNA, 60 bp, Artificial
  Synthetic oligonucleotide
gaccacgctttaagtggaacatacaaaggctgtagagagtgccacattaaacctgatgtt

SEQ ID NO: 3198 - DNA, 60 bp, Artificial
  Synthetic oligonucleotide
catcaggcttaatgtggcgctctctacagcctttgtatgttccacttaaagcatggtctt

SEQ ID NO: 3199 - DNA, 60 bp, Artificial
  Synthetic oligonucleotide
gctagtgaaatttggcaattcgctcttaattcttaggggattgaatgctagagattgagt

SEQ ID NO: 3200 - DNA, 60 bp, Artificial
  Synthetic oligonucleotide
ttctagcattcaagcccctaagaattaagagcgaattgccaaatttcactagcattctta

SEQ ID NO: 3201 - DNA, 60 bp, Artificial
  Synthetic oligonucleotide
gtggggtttgtgggagcgtatccaattcttctaataattttcgtaattccaattcttgtt

SEQ ID NO: 3202 - DNA, 60 bp, Artificial
  Synthetic oligonucleotide
cagccccaatagggatattaataggcacaggattagctttcaagcgttgcttgatctggt

SEQ ID NO: 3203 - DNA, 60 bp, Artificial
  Synthetic oligonucleotide
cagccccaatagggatattaataggcacaggattagctttcaagcgaagcttaatctggt

SEQ ID NO: 3204 - DNA, 60 bp, Artificial
  Synthetic oligonucleotide
ctgtctttaggagcttccctatacagcttcataaactgttcttctgtaagttctaatctg

SEQ ID NO: 3205 - DNA, 60 bp, Artificial
  Synthetic oligonucleotide
cgagctttctgtgtgcccttgaagaggatatccggattgataacatacactccattagcc

SEQ ID NO: 3206 - DNA, 60 bp, Artificial
  Synthetic oligonucleotide
ggctctgcgccaagctctgagaactgattaaggatattaagacgagctttctgtgtgccc

SEQ ID NO: 3207 - DNA, 60 bp, Artificial
  Synthetic oligonucleotide
ctggaaaacaggctgaagagatgttccaggagttcaagaatagcctggctaaaggctacg

SEQ ID NO: 3208 - DNA, 60 bp, Artificial
  Synthetic oligonucleotide
ccgctaagaaggttgaagacgttgaacgcgaggaatccttgctgaactacagagaacgcc

SEQ ID NO: 3209 - DNA, 60 bp, Artificial
  Synthetic oligonucleotide
gaagttccaagagcatatcgaagagattgaacatcaagcaagaagctggggtccagagct

SEQ ID NO: 3210 - DNA, 60 bp, Artificial
  Synthetic oligonucleotide
ccttagtgaagttgaaatcacgttcctcaatcttggtaacttggaactcttccgcctcgc

SEQ ID NO: 3211 - DNA, 60 bp, Artificial
  Synthetic oligonucleotide
cagtagcaagggagatacccgtctcctcagccataaggcgattagtacagataagctggt

SEQ ID NO: 3212 - DNA, 60 bp, Artificial
  Synthetic oligonucleotide
gtcacaatcaatgcggtaattcactttgatgaggctaccccacatatgcactgccagagc

SEQ ID NO: 3213 - DNA, 60 bp, Artificial
  Synthetic oligonucleotide
ggcgtaaggacgcagtagtctgcatagatgggctatatacagcctctcctgagttctttg

SEQ ID NO: 3214 - DNA, 60 bp, Artificial
  Synthetic oligonucleotide
ctcgaacgaggacaggttcaagacagagaggaacgtagggaacaccttgatactttggag

SEQ ID NO: 3215 - DNA, 60 bp, Artificial
  Synthetic oligonucleotide
ggagaagggttaagggtgaaagcctgtagttgtaggcacagacgcaagttcaagcgaagg

SEQ ID NO: 3216 - DNA, 60 bp, Artificial
  Synthetic oligonucleotide
gttcttgatacaatcaatgaacttgcagcaggacatcaagaaagaactcaaggagcacgg

SEQ ID NO: 3217 - DNA, 60 bp, Artificial
  Synthetic oligonucleotide
gtatacttatgggatatggaataatgcgctgtgagaagcgtaaaatacaggcttgcgggg

SEQ ID NO: 3218 - DNA, 60 bp, Artificial
  Synthetic oligonucleotide
gtgcaaagcttcaaggtaggatagagtccaaacagaacgatttagaagccgtagaaggcg

SEQ ID NO: 3219 - DNA, 60 bp, Artificial
  Synthetic oligonucleotide
cagttggttttactacatcctctaagccgcttcccatggcaattctttgtggtgcccacc

SEQ ID NO: 3220 - DNA, 60 bp, Artificial
  Synthetic oligonucleotide
cggctatcgccgtataatgccacttcttgagaaagctggatatcacatggctgaagctac

SEQ ID NO: 3221 - DNA, 60 bp, Artificial
  Synthetic oligonucleotide
gtagcttcagccatgtgatatccagctttctcaagaagtggcattatacggcgatagccg

SEQ ID NO: 3222 - DNA, 60 bp, Artificial
  Synthetic oligonucleotide
gagatggtgtcctttctttaattagattggcgtgtgggccatctcttttattttgccgca

SEQ ID NO: 3223 - DNA, 60 bp, Artificial
  Synthetic oligonucleotide
gagatggtgtcctttctttaattagattggcgttgtgggccatctcttttattttgccgc

SEQ ID NO: 3224 - DNA, 60 bp, Artificial
  Synthetic oligonucleotide
gagtccgcagcaatttcacacataggtctggatagacttaaatcacgtacaagtttggct

SEQ ID NO: 3225 - DNA, 60 bp, Artificial
  Synthetic oligonucleotide
gccaaacttgtacgtgatttaagtctatccagacctatgtgtgaaattgctgcggactct

SEQ ID NO: 3226 - DNA, 60 bp, Artificial
  Synthetic oligonucleotide
cgtttcaaagctcgatactcatgggttccagctccatattctttcataaccctagttcta

SEQ ID NO: 3227 - DNA, 60 bp, Artificial
  Synthetic oligonucleotide
cccacggaagagtgtgttagtagagccgaaaggcttgaacactcacaagccccatgtctt

SEQ ID NO: 3228 - DNA, 60 bp, Artificial
  Synthetic oligonucleotide
gcacttctgccttttagtgctttgattacgtctactgctgattttctcggtggaaatgag

SEQ ID NO: 3229 - DNA, 60 bp, Artificial
  Synthetic oligonucleotide
ggcattcgccaaattggtaaggcagtggactctgaatccataatttacaggttcgaaccc

SEQ ID NO: 3230 - DNA, 60 bp, Artificial
  Synthetic oligonucleotide
gccggtgaagtaacagctcattaacagtcacattaatcggcaattctagtgcggccaccc

SEQ ID NO: 3231 - DNA, 60 bp, Artificial
  Synthetic oligonucleotide
gcttcagccttagagcagagcggaatccccaaaatggggactcgataccaaaatgaagga

SEQ ID NO: 3232 - DNA, 60 bp, Artificial
  Synthetic oligonucleotide
cagaaccaagatttacttagtcacttaggagagacgctcacaggcgataaggaggcccct

SEQ ID NO: 3233 - DNA, 60 bp, Artificial
  Synthetic oligonucleotide
caggcgagccgatcgaccccgataatccaaacggacccacatatccagtggggactgact

SEQ ID NO: 3234 - DNA, 60 bp, Artificial
  Synthetic oligonucleotide
cggctgattcaacgagtgttgcgggtcgtgatacggtgagtgggacggatctcagtccag

SEQ ID NO: 3235 - DNA, 60 bp, Artificial
  Synthetic oligonucleotide
ccaagcccctcaccgggctttcacgcgagcgtagttcaacggtagaacagtactcctatg

SEQ ID NO: 3236 - DNA, 60 bp, Artificial
  Synthetic oligonucleotide
ggaagtgtagtacccaatcagcccctcatggaatataacgtgtcccagctcatgaccgag

SEQ ID NO: 3237 - DNA, 60 bp, Artificial
  Synthetic oligonucleotide
gcactcaagttggacatggtaagtctggttacgagccaacgggtaccttgcaagggtcgc

SEQ ID NO: 3238 - DNA, 60 bp, Artificial
  Synthetic oligonucleotide
gcccgtgaacttaactgttctccttctactatcagctatgaggttaagcgtggcactgta

SEQ ID NO: 3239 - DNA, 60 bp, Artificial
  Synthetic oligonucleotide
gctgtattgcctttggagttctttaaaggcctgcatgacactgacagaagtcttgtcagg

SEQ ID NO: 3240 - DNA, 60 bp, Artificial
  Synthetic oligonucleotide
cggctggtcgcttgatgtgtgcagtaatcgtgccactgctgttggcgaatttagcagcag

SEQ ID NO: 3241 - DNA, 60 bp, Artificial
  Synthetic oligonucleotide
cggctggtcgcttgatgtgtgcagtaatcgtgccactgctgttggcgcatttagcagcag

SEQ ID NO: 3242 - DNA, 60 bp, Artificial
  Synthetic oligonucleotide
cggttggtcgcttgatgtgtgcagtaatcgtgccactgctgttggcgcatttagcagcag

SEQ ID NO: 3243 - DNA, 60 bp, Artificial
  Synthetic oligonucleotide
cgtggaaattaccgatccactcgtggcaaagcggccgggtgtgtcgcaaccttccacatc

SEQ ID NO: 3244 - DNA, 60 bp, Artificial
  Synthetic oligonucleotide
ggaggtagagcaccgccgtggtaaggaggaggtcgccagttcaaatctggctagcagctt

SEQ ID NO: 3245 - DNA, 60 bp, Artificial
  Synthetic oligonucleotide
gacctctgaatcgtgtcaggaccggaaggtagcagcactaaggttgttcaggcatgtgcc

SEQ ID NO: 3246 - DNA, 60 bp, Artificial
  Synthetic oligonucleotide
ggaggtagagcaccgccgtggtaaggaggaggtccccagttcaaatctgggaaacggctt

SEQ ID NO: 3247 - DNA, 60 bp, Artificial
  Synthetic oligonucleotide
ggttcgtcctacatcgacctccaggcatttctgccaattgccggaacgtggtgggcacag

SEQ ID NO: 3248 - DNA, 60 bp, Artificial
  Synthetic oligonucleotide
cccaccacgttccggcaattggcagaaatgcctggaggtcggcgtaggacgaacgaacta

SEQ ID NO: 3249 - DNA, 60 bp, Artificial
  Synthetic oligonucleotide
gcgcagcggggctccttggcgtgatctacctgaacgctatggctcttggaaaacggtgta

SEQ ID NO: 3250 - DNA, 60 bp, Artificial
  Synthetic oligonucleotide
ccaagggattccctaatccgtcaacgagtgcgtgaatcttggtcgttcggccacctcgac

SEQ ID NO: 3251 - DNA, 60 bp, Artificial
  Synthetic oligonucleotide
gggagagcgcctgcttcgcatgcaggaggtcgtcggttcaaatccggtagggtccatttt

SEQ ID NO: 3252 - DNA, 60 bp, Artificial
  Synthetic oligonucleotide
ttgagggcggtacggttgtctaggcttgatggacggccagtccggtatggcgggaagtat

SEQ ID NO: 3253 - DNA, 60 bp, Artificial
  Synthetic oligonucleotide
cactgcccgttcgtttccggtctgttcggcttctgccatgcgtgtcaagataggctctgg

SEQ ID NO: 3254 - DNA, 60 bp, Artificial
  Synthetic oligonucleotide
gagtctgccgccccgctgacgttgactgctgaacaattaccagccgtgatgtgggccttt

SEQ ID NO: 3255 - DNA, 60 bp, Artificial
  Synthetic oligonucleotide
agtatcggcaggccccacggaagtatttgagcccactgacccaagtttagcagcgtcggc

SEQ ID NO: 3256 - DNA, 60 bp, Artificial
  Synthetic oligonucleotide
cggccttaatgtctcccgcgagccatgccgacagactaccgattgcttcgacgaccacaa

SEQ ID NO: 3257 - DNA, 60 bp, Artificial
  Synthetic oligonucleotide
ggtgagtgcgcggcttgtttggctggtttcgatggtacttgtgatcggcatccgggtcac

SEQ ID NO: 3258 - DNA, 60 bp, Artificial
  Synthetic oligonucleotide
cacgaggtcttactggtgctggatgccacgactgggcaaaacgcgctgaaccaagccaag

SEQ ID NO: 3259 - DNA, 60 bp, Artificial
  Synthetic oligonucleotide
gtcgtctttggattgcccggatcaacgcggcagcccggatcaacgacatcagctacagtc

SEQ ID NO: 3260 - DNA, 60 bp, Artificial
  Synthetic oligonucleotide
ccggaggacaacaccgagcaactggcaagcacaacagccatcaatgcgacgacgatccgt

SEQ ID NO: 3261 - DNA, 60 bp, Artificial
  Synthetic oligonucleotide
ggctgcaatcattaaacaagcccctgcccgaatttctccagcctcaacttcagcgcccgt

SEQ ID NO: 3262 - DNA, 60 bp, Artificial
  Synthetic oligonucleotide
cactgacttcgtatgaaggaatgtcaacacgcttgccatcaacagtgatgtgaccgtggt

SEQ ID NO: 3263 - DNA, 60 bp, Artificial
  Synthetic oligonucleotide
cattaacaccgcgtccccggcacacaatcgcagtccaccatttctggcgcatccttggct

SEQ ID NO: 3264 - DNA, 60 bp, Artificial
  Synthetic oligonucleotide
cccgatcaacaaagggtgtccgcaattcaaggctgtgggctaacgctgtccggtccgcat

SEQ ID NO: 3265 - DNA, 60 bp, Artificial
  Synthetic oligonucleotide
cggcgcgacgggaattgaaagaagagactgggctgacggtgggtgagttaacgctgatcg

SEQ ID NO: 3266 - DNA, 60 bp, Artificial
  Synthetic oligonucleotide
ggcccaacaagtgactgccgtgcttgccaagacccatcagcggccgattattgtgcatgc

SEQ ID NO: 3267 - DNA, 60 bp, Artificial
  Synthetic oligonucleotide
ggctaccagcgcttcatttccccgttgctgccgccgagctgccgatattatccgacatgt

SEQ ID NO: 3268 - DNA, 60 bp, Artificial
  Synthetic oligonucleotide
cgcgttcaccctcgccgctgtcattgcctgtgtcgccggtccaattctcttcaacacctt

SEQ ID NO: 3269 - DNA, 60 bp, Artificial
  Synthetic oligonucleotide
cgccacgataatcgcgccgatcaccagtagccgcaagtacaacccaagatactcaccgcc

SEQ ID NO: 3270 - DNA, 60 bp, Artificial
  Synthetic oligonucleotide
gccaaagccgcgacatagccccaaaagccagcagtcagcccagatgccgtgaattgatcc

SEQ ID NO: 3271 - DNA, 60 bp, Artificial
  Synthetic oligonucleotide
gctcgcccgctcaccacttccgaacaaacacaactagcgcagcgaccggtcaccattcat

SEQ ID NO: 3272 - DNA, 60 bp, Artificial
  Synthetic oligonucleotide
ccgcgcaagacaacattcggccacccaagatccagtgccagcaatcgacccggtgcaata

SEQ ID NO: 3273 - DNA, 60 bp, Artificial
  Synthetic oligonucleotide
gccgtcatcgccgcttgattaacaccgagtgcagagccagcgttgaatccataccagccg

SEQ ID NO: 3274 - DNA, 60 bp, Artificial
  Synthetic oligonucleotide
cgcaaacgcttcccatccccgccgttcacaaccagtaccttgcagcaggaagctaaccgt

SEQ ID NO: 3275 - DNA, 60 bp, Artificial
  Synthetic oligonucleotide
ggttgacccgtcgcagttgccgtttgagtaccagtcaacgaatatgacgccgccagccgt

SEQ ID NO: 3276 - DNA, 60 bp, Artificial
  Synthetic oligonucleotide
gcaacgctgaccacgctaccgacgcattttaacctcacgcaaccacggcaggcgaccaat

SEQ ID NO: 3277 - DNA, 60 bp, Artificial
  Synthetic oligonucleotide
cccgagtcacgccgaagatgtcgccacccacgatattacaacgttaaccgccgcttccga

SEQ ID NO: 3278 - DNA, 60 bp, Artificial
  Synthetic oligonucleotide
gtcgaaccggcgctcctcacggcacttatcaaccatcagcaagagacgcaccaacccact

SEQ ID NO: 3279 - DNA, 60 bp, Artificial
  Synthetic oligonucleotide
cagcggcgattcccagcaaccccattgaacaagctttagtcaaaacggcggtggcggctg

SEQ ID NO: 3280 - DNA, 60 bp, Artificial
  Synthetic oligonucleotide
cgacaaacccgccataaattgaacgcgtcgcagagcctgaaccccgccgtgcaagtctag

SEQ ID NO: 3281 - DNA, 60 bp, Artificial
  Synthetic oligonucleotide
cccagcaattttaccaacttcggtctgcatcccagtccccgtcacaaccccaacacctcg

SEQ ID NO: 3282 - DNA, 60 bp, Artificial
  Synthetic oligonucleotide
gggaccgcgttggccggcagtttgtgaatgttgattgtccgcccatggttgcccttcgtt

SEQ ID NO: 3283 - DNA, 60 bp, Artificial
  Synthetic oligonucleotide
ctgaaacgaccgaagctgaattgttggccttggtgaaaacgctgaatgacgatcgcaccg

SEQ ID NO: 3284 - DNA, 60 bp, Artificial
  Synthetic oligonucleotide
gccggcaccagtaacccgcgctcgtgataataacgcaacgtacgctcagaaacaccggtc

SEQ ID NO: 3285 - DNA, 60 bp, Artificial
  Synthetic oligonucleotide
gcgcattgaccaccacacccattgaaccagccgcttccgccaataagcccatgtacgctg

SEQ ID NO: 3286 - DNA, 60 bp, Artificial
  Synthetic oligonucleotide
gcgccctgatgctgccgtaacccttgacccaacctactcgatagacttgccaaccggtga

SEQ ID NO: 3287 - DNA, 60 bp, Artificial
  Synthetic oligonucleotide
gcccaaatcacgataaaacggcatcgctgttggatcaccaccgacctcgccgcaaacccc

SEQ ID NO: 3288 - DNA, 60 bp, Artificial
  Synthetic oligonucleotide
ccaactgaatcagcagtcaaagaagcagctaagcaggcagtagccgacgcagcaactgca

SEQ ID NO: 3289 - DNA, 60 bp, Artificial
  Synthetic oligonucleotide
ccgactgaatcagcagtcaaagaagcagctaagaaggcagtagccgacgcagcaactgta

SEQ ID NO: 3290 - DNA, 60 bp, Artificial
  Synthetic oligonucleotide
ggctccccttcaaattgactgatctacccaatcggaatgtccgccagcaccgagtgagcg

SEQ ID NO: 3291 - DNA, 60 bp, Artificial
  Synthetic oligonucleotide
gccgtcagcatcgaacgacgaccgcaattccgccttttgcgatctgcatcttgctgagct

SEQ ID NO: 3292 - DNA, 60 bp, Artificial
  Synthetic oligonucleotide
ggcgcactagcacaactggtcaatgaggggaataaatcttaccaagtaatggctgacgcc

SEQ ID NO: 3293 - DNA, 60 bp, Artificial
  Synthetic oligonucleotide
ccgcttggcgtcatagcgtagctaaccggaagtctcagcctgacccgaacacgtttcacc

SEQ ID NO: 3294 - DNA, 60 bp, Artificial
  Synthetic oligonucleotide
gtcccgccgaaaacaggacttcccgtgcaagccgcttcaaaggcggtggcctagattaca

SEQ ID NO: 3295 - DNA, 60 bp, Artificial
  Synthetic oligonucleotide
cttgcccgcttccaattcgcaatgactacagtcttccacttcttctttgttcccttctcc

SEQ ID NO: 3296 - DNA, 60 bp, Artificial
  Synthetic oligonucleotide
ccctttccatcttcatcccatgcaccttcaagttggtgagcagcaacagcgccgccccat

SEQ ID NO: 3297 - DNA, 60 bp, Artificial
  Synthetic oligonucleotide
gatccaaggtggtgatccaaagggtgacggtactggcggtgagagtatctggggacatcc

SEQ ID NO: 3298 - DNA, 60 bp, Artificial
  Synthetic oligonucleotide
gctaacggtattgctgtcttcattaactggttagttcatgcatctggctgggttggcgga

SEQ ID NO: 3299 - DNA, 60 bp, Artificial
  Synthetic oligonucleotide
gtcgaactcggatcatgaggaccgaaatctcatgtgctatccattacactaaggacgcct

SEQ ID NO: 3300 - DNA, 60 bp, Artificial
  Synthetic oligonucleotide
cgagctaaggggttatctatccgggctgttgcgttacggctggggcgaaatccaagcact

SEQ ID NO: 3301 - DNA, 60 bp, Artificial
  Synthetic oligonucleotide
ggcggcaccttgcccaatgttggccatcgaggcgactgggaagataaaggaaccaccagt

SEQ ID NO: 3302 - DNA, 60 bp, Artificial
  Synthetic oligonucleotide
cgggcgacggtggccgctttgaatggcagctttgaactcttactgacggttcccgctgat

SEQ ID NO: 3303 - DNA, 60 bp, Artificial
  Synthetic oligonucleotide
cgacgacctgatcagcgcttggcacgattgcggcgcctttacccatgatttcggctgaga

SEQ ID NO: 3304 - DNA, 60 bp, Artificial
  Synthetic oligonucleotide
gacgacctgatcagcgcttggcacgattgcggcgcctttccccatgatttcggctgagaa

SEQ ID NO: 3305 - DNA, 60 bp, Artificial
  Synthetic oligonucleotide
cacacgctggttcgccaacgaatggtcgccgtgaaggatatgaagcctacttgactgccc

SEQ ID NO: 3306 - DNA, 60 bp, Artificial
  Synthetic oligonucleotide
gacgcggcgccatggctcacggtcaatcccaactatcgtcaaatcaatgctgccgcagct

SEQ ID NO: 3307 - DNA, 60 bp, Artificial
  Synthetic oligonucleotide
ggttgtcgtggggatcgaaattcggtcgctaacttgcccgttttcagcgcccgtggcaca

SEQ ID NO: 3308 - DNA, 60 bp, Artificial
  Synthetic oligonucleotide
gcgataacagagtaagcggccagatcaagaagcagtccctttccccggtcatcccagcgc

SEQ ID NO: 3309 - DNA, 60 bp, Artificial
  Synthetic oligonucleotide
gcgggttgtctaggtgatcgcggtgaatcgcgacatcggccaccatgccttgatccacaa

SEQ ID NO: 3310 - DNA, 60 bp, Artificial
  Synthetic oligonucleotide
gactccaccttgtccttgtcgtaactcgccaggaaccaaggcatcttcggccgccactac

SEQ ID NO: 3311 - DNA, 60 bp, Artificial
  Synthetic oligonucleotide
cgcccggcgatacttggtggacgattgcctataagtatgccatgtcagtcgaggagctgt

SEQ ID NO: 3312 - DNA, 60 bp, Artificial
  Synthetic oligonucleotide
gactttcgctcgtagcaagggtttgcggggtgtcgtcaacggactttcgcgaaggtctat

SEQ ID NO: 3313 - DNA, 60 bp, Artificial
  Synthetic oligonucleotide
ccttggcacttggggcccttcgttagctggcatggcattgataccatcgatcatcggggc

SEQ ID NO: 3314 - DNA, 60 bp, Artificial
  Synthetic oligonucleotide
cgcagatactgcgtaagtcgcccgctgttttcgtcttaaccacggattctggggaccctc

SEQ ID NO: 3315 - DNA, 60 bp, Artificial
  Synthetic oligonucleotide
tgaccggccgaatgaataacctggggaacgtggttgggatcgcgaacgtggtgctttccg

SEQ ID NO: 3316 - DNA, 60 bp, Artificial
  Synthetic oligonucleotide
cagacgtgatgcttgtgtcagttggccggcacccagccactgctgcccttcacctagaaa

SEQ ID NO: 3317 - DNA, 60 bp, Artificial
  Synthetic oligonucleotide
gcgagtttccaagtcgaatttagcattgtagccatgttcactaggggtgatggggctaag

SEQ ID NO: 3318 - DNA, 60 bp, Artificial
  Synthetic oligonucleotide
cgggtcgggattatccgccgcttgctgccaaagttcctcaatatcaactgcccaggggtc

SEQ ID NO: 3319 - DNA, 60 bp, Artificial
  Synthetic oligonucleotide
gccttatgctagttgcgaggccgttgcccggggacttaaccccttaaaagtcccattagt

SEQ ID NO: 3320 - DNA, 60 bp, Artificial
  Synthetic oligonucleotide
cagcaattgtcacccagccccggaggtcggcatagaacgcacaccggctgacgaataaca

SEQ ID NO: 3321 - DNA, 60 bp, Artificial
  Synthetic oligonucleotide
ggatcgaacccgtaactccgccttgagagggcgacgtcttaaccaatttgaccaacgggc

SEQ ID NO: 3322 - DNA, 60 bp, Artificial
  Synthetic oligonucleotide
cgtccggtaggacggaatttggtcggcaattaaccacccagctggcttgttttcacgggc

SEQ ID NO: 3323 - DNA, 60 bp, Artificial
  Synthetic oligonucleotide
gtccggcgttgctgtttggctgggttcggggaaacctgcttagttgcttccacggtttca

SEQ ID NO: 3324 - DNA, 60 bp, Artificial
  Synthetic oligonucleotide
gcccgtgaaaacaagccagctgggtggttaattgccgaccaaattccgtcctaccggacg

SEQ ID NO: 3325 - DNA, 60 bp, Artificial
  Synthetic oligonucleotide
cgccagtattacgattccggcttccttggtgaccttgtcgaaacctcgcaccgagaatcg

SEQ ID NO: 3326 - DNA, 60 bp, Artificial
  Synthetic oligonucleotide
ccgtggaagcaactaagcaggtttccccgaacccagccaaacagcaacgccggactgtta

SEQ ID NO: 3327 - DNA, 60 bp, Artificial
  Synthetic oligonucleotide
cgacgacgacggagatctacctccaccagctaggcaagctcgaaaaccaagccgggaaag

SEQ ID NO: 3328 - DNA, 60 bp, Artificial
  Synthetic oligonucleotide
cttaatatctgccttgcggggcaaggattcgggcggttcgtgtctctgccacaagtggca

SEQ ID NO: 3329 - DNA, 60 bp, Artificial
  Synthetic oligonucleotide
gacccggcggagttcgaagaggagagagagcgcatattggctcgcatcaggaataagggc

SEQ ID NO: 3330 - DNA, 60 bp, Artificial
  Synthetic oligonucleotide
cgggcaaaacctcacttacgctcttgctcgcttacggccttgcggacactggacatacgg

SEQ ID NO: 3331 - DNA, 60 bp, Artificial
  Synthetic oligonucleotide
ggtgctcgctatcgtgtcattattcctcttgcacagccgctcacggagcatccctaccgg

SEQ ID NO: 3332 - DNA, 60 bp, Artificial
  Synthetic oligonucleotide
atctgggtcaacttcgagcaatgcccgagcaatcccatgacgagttgcgccggcttgacc

SEQ ID NO: 3333 - DNA, 60 bp, Artificial
  Synthetic oligonucleotide
ccacaacgtgcgcaaacagtaaccggatacgttagcttcgcaagcacttgtaagcttccg

SEQ ID NO: 3334 - DNA, 60 bp, Artificial
  Synthetic oligonucleotide
ggttaagacgtcggcctctcaagccggagttacgggttcgatccccgtgcgggtgatttt

SEQ ID NO: 3335 - DNA, 60 bp, Artificial
  Synthetic oligonucleotide
gtcgttggggttcacgttggagaaggcgtcatgggactgatttgggcgcgtgactgggaa

SEQ ID NO: 3336 - DNA, 60 bp, Artificial
  Synthetic oligonucleotide
cccaggtgccgaagccgccccgaccgttgcaaatgataaacaagagccgaacacttcacc

SEQ ID NO: 3337 - DNA, 60 bp, Artificial
  Synthetic oligonucleotide
ccgtgcttcgtccaacctgcaaacgttccctctgatacatccgcatacgccgccgctttc

SEQ ID NO: 3338 - DNA, 60 bp, Artificial
  Synthetic oligonucleotide
atgcgttagctcaaatcgatgtcggctgcgttccagcaattggcacccagccccggaggt

SEQ ID NO: 3339 - DNA, 60 bp, Artificial
  Synthetic oligonucleotide
gctggcgtgggcctgattggcttgctgttggcgttgacgttaccaaaggaagtcgcgaag

SEQ ID NO: 3340 - DNA, 60 bp, Artificial
  Synthetic oligonucleotide
cgttaacgccaacagcaagccaatcaggcccacgccagcaaacacagcgaaggtaaccgc

SEQ ID NO: 3341 - DNA, 60 bp, Artificial
  Synthetic oligonucleotide
cgtgcccatcacccgaccacgctcactatgcggcgtaattgtcagcaacacggtctggaa

SEQ ID NO: 3342 - DNA, 60 bp, Artificial
  Synthetic oligonucleotide
tttccagaccgtgttgctgacgattacgccgcatagtgagcgtggtcgggtgatgggcac

SEQ ID NO: 3343 - DNA, 60 bp, Artificial
  Synthetic oligonucleotide
ggcgggttcgcaagtacgattcctctaagggaccaaccggtaagaaagcgaagaataagc

SEQ ID NO: 3344 - DNA, 60 bp, Artificial
  Synthetic oligonucleotide
gccaagcgcgatgttggtaatgccagccttgatcagtgtgcagggttagttggtatccgg

SEQ ID NO: 3345 - DNA, 60 bp, Artificial
  Synthetic oligonucleotide
cggataccaactaaccctgcacactgatcaaggctggcattaccaacatcgcgcttggcg

SEQ ID NO: 3346 - DNA, 60 bp, Artificial
  Synthetic oligonucleotide
ggctgggtgacaattgctggaacgcagccgacgtcgatttgagctaacgcataacccgcg

SEQ ID NO: 3347 - DNA, 60 bp, Artificial
  Synthetic oligonucleotide
gcccaccacgttccggcagttggcagaaatgcctggaggtcggtgtaggacgaactaact

SEQ ID NO: 3348 - DNA, 60 bp, Artificial
  Synthetic oligonucleotide
tcgaattaacgattccttaggttgcatggcaacgtcctaccctcgcagggagcgatcccc

SEQ ID NO: 3349 - DNA, 60 bp, Artificial
  Synthetic oligonucleotide
ccgaggtctttcgtgtttgtgtcgttctcacagcagcccgtggtcgccgccttgcatctt

SEQ ID NO: 3350 - DNA, 60 bp, Artificial
  Synthetic oligonucleotide
cgcattgcgacactatcaaaccaaccaacgcgccgtggccgacccgtaaccgttccgtat

SEQ ID NO: 3351 - DNA, 60 bp, Artificial
  Synthetic oligonucleotide
cggcggcaaccacagccaccatatacgacctcgaccatgcaacaggatgctaaccgtcgt

SEQ ID NO: 3352 - DNA, 60 bp, Artificial
  Synthetic oligonucleotide
gcccagcccttttcagcagcgcgagatactacttgcagcccgtagccttgtccttccgat

SEQ ID NO: 3353 - DNA, 60 bp, Artificial
  Synthetic oligonucleotide
ctccacggcgaataaattcctgcgacccacgaccaccggccaacaacccgactgcatcaa

SEQ ID NO: 3354 - DNA, 60 bp, Artificial
  Synthetic oligonucleotide
ccggcagccaaatggagagcaatcaattacgccacccaagcggtcacgaagcaagccagc

SEQ ID NO: 3355 - DNA, 60 bp, Artificial
  Synthetic oligonucleotide
cccgttaattgtgccgccgcccttcataaagtcgtcaacaaccaagacattcgccccagc

SEQ ID NO: 3356 - DNA, 60 bp, Artificial
  Synthetic oligonucleotide
ggatcgaacccgtaactccgccttgagagggcgacgtcttaaccaatttgaccagcgggc

SEQ ID NO: 3357 - DNA, 60 bp, Artificial
  Synthetic oligonucleotide
ccgcaaccgtcccttctacccaggccagttcatcagccttcagcgagtcaaaatccccga

SEQ ID NO: 3358 - DNA, 60 bp, Artificial
  Synthetic oligonucleotide
tgccagacgacaaggggattgaactcctggaaactgatccgcacaaggctcacgcccgca

SEQ ID NO: 3359 - DNA, 60 bp, Artificial
  Synthetic oligonucleotide
ggtcccgctagccaacagtcacccatcgacatcgttttagagcaaactaccccacgcccc

SEQ ID NO: 3360 - DNA, 60 bp, Artificial
  Synthetic oligonucleotide
tcaccgtttctgacttgatgcagactttgagccgggccagcctcttgacccacgccaacc

SEQ ID NO: 3361 - DNA, 60 bp, Artificial
  Synthetic oligonucleotide
tcatcctggcttccgtcatcaacatgtcccgcctgctcaagatcgtcccggtcgtcaagg

SEQ ID NO: 3362 - DNA, 60 bp, Artificial
  Synthetic oligonucleotide
gcccgtcacagccacttccgacaaaacggttgcccacatcgccccatttaatccccagag

SEQ ID NO: 3363 - DNA, 60 bp, Artificial
  Synthetic oligonucleotide
gaagctgagtggtccttacctgctgcacgggtgttagttaagttcttacccttagttacg

SEQ ID NO: 3364 - DNA, 60 bp, Artificial
  Synthetic oligonucleotide
ctcagcttgtgcgtgcgtggactttcctcagctagtataagctaaccgcgatcgctcgaa

SEQ ID NO: 3365 - DNA, 60 bp, Artificial
  Synthetic oligonucleotide
gtgggcaatgtccgacctccaaattgtgtcaggaccggaaggtagcagcactaaggttgc

SEQ ID NO: 3366 - DNA, 60 bp, Artificial
  Synthetic oligonucleotide
ggtaacaaacactgttgcaatcaaggtggtaccgcgctgggagcgtccttgttttatgca

SEQ ID NO: 3367 - DNA, 60 bp, Artificial
  Synthetic oligonucleotide
cgggctcgaaccgaaacatccaggaaccagaatcctgtgccttaccaatttggctatatc

SEQ ID NO: 3368 - DNA, 60 bp, Artificial
  Synthetic oligonucleotide
gccgctggcggaactgttgaggtgatctaatgttctcgaccttgaagaacgcctttaagg

SEQ ID NO: 3369 - DNA, 60 bp, Artificial
  Synthetic oligonucleotide
ctcaacaacgcgacgaatagtagcaccctttggcatccagtacggaagacctgcaccaac

SEQ ID NO: 3370 - DNA, 60 bp, Artificial
  Synthetic oligonucleotide
gggctatggctcacagaaacggttatactgcttgtcacggtggtgaaaagtcattccact

SEQ ID NO: 3371 - DNA, 60 bp, Artificial
  Synthetic oligonucleotide
gttggacttgttccccaaaagcaccaactaaactcgtggccgtaacctgtgccaagcccc

SEQ ID NO: 3372 - DNA, 60 bp, Artificial
  Synthetic oligonucleotide
gcaacgctcgcaagtgggtccggtcgcccaaaatgttcacacagcaatgccagccgttca

SEQ ID NO: 3373 - DNA, 60 bp, Artificial
  Synthetic oligonucleotide
gtagcgggcgtgactggagcctgaacacaattcgcggcggcctattcttgtccccataca

SEQ ID NO: 3374 - DNA, 60 bp, Artificial
  Synthetic oligonucleotide
ccgggtgacaattactggaacgcagccgatgtcgatttgagctaacgcccaacccgcgtc

SEQ ID NO: 3375 - DNA, 60 bp, Artificial
  Synthetic oligonucleotide
cgccatcacccatgtccattggtgggaacatgtcatcacgatagtgtgcccagtgacctg

SEQ ID NO: 3376 - DNA, 60 bp, Artificial
  Synthetic oligonucleotide
ttggctactgagcattgtcacccagcccctccagtcgggaagccactcgaatggctgatg

SEQ ID NO: 3377 - DNA, 60 bp, Artificial
  Synthetic oligonucleotide
cggcgactaatcgtattggtcgagacattgtattgagccgcaatactcgccatcgtacgg

SEQ ID NO: 3378 - DNA, 60 bp, Artificial
  Synthetic oligonucleotide
ctcggacaaggtacccaaccagctttcaacggactaccaacgatgctttgtatcgacgag

SEQ ID NO: 3379 - DNA, 60 bp, Artificial
  Synthetic oligonucleotide
ccgcggttgaagttgctggtgggacgcctgaacaaagtgctgaggctttggcgatggcaa

SEQ ID NO: 3380 - DNA, 60 bp, Artificial
  Synthetic oligonucleotide
gagcaggccgcccgcaagcccgatttgactgcgagaaatgggcgtagatttggttggtgt

SEQ ID NO: 3381 - DNA, 60 bp, Artificial
  Synthetic oligonucleotide
gcgtcgaattggaagccgtgcaacacgccccgaatctcagcttggtagccgtacccgttt

SEQ ID NO: 3382 - DNA, 60 bp, Artificial
  Synthetic oligonucleotide
tcatcgtgcacatcgcaaagctaagcgcagagtcgtccaccgtaaagcaccgcatcggcg

SEQ ID NO: 3383 - DNA, 60 bp, Artificial
  Synthetic oligonucleotide
cggcattccaggtcttgtagccccaccagccacccgtaacgatcaacaggacaacgacga

SEQ ID NO: 3384 - DNA, 60 bp, Artificial
  Synthetic oligonucleotide
ccacccaccccaaccgctcgcatactttgccacaattgatagctttgatccgagacgcca

SEQ ID NO: 3385 - DNA, 60 bp, Artificial
  Synthetic oligonucleotide
cggtgcacagcaatcaccgccacactagccacgatcgccaagaccgctaccgtttcgatt

SEQ ID NO: 3386 - DNA, 60 bp, Artificial
  Synthetic oligonucleotide
ccccgagcagcacccgtcttttggcaaagcgtccggcaggcagattgtttatccgtggat

SEQ ID NO: 3387 - DNA, 60 bp, Artificial
  Synthetic oligonucleotide
cgtatccacccgaataggcgcttcaacaattgactgtgccatccgccgcccctccaatcc

SEQ ID NO: 3388 - DNA, 60 bp, Artificial
  Synthetic oligonucleotide
ggcaccaaccgaaagccgctcacacgtgcttcgactcgccaataagaccgcctgcatcat

SEQ ID NO: 3389 - DNA, 60 bp, Artificial
  Synthetic oligonucleotide
gtcacgaagccaacctgagccaatacccaagtccacaccgcacaccctgattaggccacg

SEQ ID NO: 3390 - DNA, 60 bp, Artificial
  Synthetic oligonucleotide
ccccgtcccgctagtcgtgagcttaacgcccgtcaacgtcgcaaaatcagccacttcact

SEQ ID NO: 3391 - DNA, 60 bp, Artificial
  Synthetic oligonucleotide
caccgagatgacttgctccggcatcgtttgttgcatccaggccaccaccgtttgaagccg

SEQ ID NO: 3392 - DNA, 60 bp, Artificial
  Synthetic oligonucleotide
ctaagaaaaccgcatggccgcgagcttgcacgtccgtcacaatactcggtcccgctgcat

SEQ ID NO: 3393 - DNA, 60 bp, Artificial
  Synthetic oligonucleotide
ccatgccctttgtacgccgagcttgtcactagccagacgccacggaatccttcaccgata

SEQ ID NO: 3394 - DNA, 60 bp, Artificial
  Synthetic oligonucleotide
gctccacctacgatgccagctccacagtgaacccagcgatttccactaccaccataacca

SEQ ID NO: 3395 - DNA, 60 bp, Artificial
  Synthetic oligonucleotide
gcaacctcgccatctggagtttgccatgtaccgaaaccgacaacaggaatctctacacca

SEQ ID NO: 3396 - DNA, 60 bp, Artificial
  Synthetic oligonucleotide
cgggaaagctagcaatgtacatacagtcggtggggattttcgtcaagcttgcagtcgcgc

SEQ ID NO: 3397 - DNA, 60 bp, Artificial
  Synthetic oligonucleotide
cttgccccttcttcaccaccgagaccaaatagacctgcgccccacataattgaggcaccg

SEQ ID NO: 3398 - DNA, 60 bp, Artificial
  Synthetic oligonucleotide
cccaggtgcatcagaacacggtcaacacgttgctggtatcattggtgctgacggccaacc

SEQ ID NO: 3399 - DNA, 60 bp, Artificial
  Synthetic oligonucleotide
cgacgaccgctaacccgcagacgccgttccaaccagctaaatcccataagacgttgccac

SEQ ID NO: 3400 - DNA, 60 bp, Artificial
  Synthetic oligonucleotide
gcaccggtcaccacaccaacccagccagctgaaacacaggccgcaactacgactcaaaca

SEQ ID NO: 3401 - DNA, 60 bp, Artificial
  Synthetic oligonucleotide
gcaacgtcgtcaaagaagccaccctcaccatagccaaccgtcgcaccgatcgtatccgtg

SEQ ID NO: 3402 - DNA, 60 bp, Artificial
  Synthetic oligonucleotide
ccgttgcagtcgttccatcatcagcccgagccaccagcgttgttgtgcccatcgtcaaga

SEQ ID NO: 3403 - DNA, 60 bp, Artificial
  Synthetic oligonucleotide
ccggaccataaggctacgtcaccagcgccacgacccataacttccacaacgaaagtccgg

SEQ ID NO: 3404 - DNA, 60 bp, Artificial
  Synthetic oligonucleotide
agccacagccattcgttaacgctcaagtgaacccaccagccagcaaacaaggccaccgcc

SEQ ID NO: 3405 - DNA, 60 bp, Artificial
  Synthetic oligonucleotide
gcggtaatcagcgtgccaattcccatcaaggtccctttctgccgtgccggtgcccaatca

SEQ ID NO: 3406 - DNA, 60 bp, Artificial
  Synthetic oligonucleotide
gcccgcaatacagtgattaccaacgatacacccgccgcccttgccaaggaattgccaggc

SEQ ID NO: 3407 - DNA, 60 bp, Artificial
  Synthetic oligonucleotide
cgagcgaccggcaacagatcggcgccagttactcattcatctcacgacgcagggtaagca

SEQ ID NO: 3408 - DNA, 60 bp, Artificial
  Synthetic oligonucleotide
cgctttgaccgggaatgtgttgacgatgccaggactgccaaaacatccggccgcactcga

SEQ ID NO: 3409 - DNA, 60 bp, Artificial
  Synthetic oligonucleotide
catacccatctgggcaccagcttcgccacgccacatattgccaccaccaacgacgattgc

SEQ ID NO: 3410 - DNA, 60 bp, Artificial
  Synthetic oligonucleotide
cttgccgaccaatcagccagtacgtcccacccaccccaatgcctaatgcgacgacaatgg

SEQ ID NO: 3411 - DNA, 60 bp, Artificial
  Synthetic oligonucleotide
ggaattgtttggtctgcaagcgcccggtagccagtcgtcgcatttcgcccctgaccatga

SEQ ID NO: 3412 - DNA, 60 bp, Artificial
  Synthetic oligonucleotide
caggtggtcgcgtcggatgcacatacgctgaagaatcggggctttgctatgaccaaggcc

SEQ ID NO: 3413 - DNA, 60 bp, Artificial
  Synthetic oligonucleotide
tcggtgctggtttcgccagtggcttgttgggaatcgggagtggcgcgttcaaagtgctag

SEQ ID NO: 3414 - DNA, 60 bp, Artificial
  Synthetic oligonucleotide
gggacgctgatcaaagggctcaaccatgcaccaaaagcacccaccagcaaagactgcccg

SEQ ID NO: 3415 - DNA, 60 bp, Artificial
  Synthetic oligonucleotide
cggcttgggacgcggtcatttctgcgacaccagaacaaactaaggacgtggaagcccgct

SEQ ID NO: 3416 - DNA, 60 bp, Artificial
  Synthetic oligonucleotide
cgacggtggctaatcaaccaatttcggcgcggactgttcggcaacggattcgaagcggca

SEQ ID NO: 3417 - DNA, 60 bp, Artificial
  Synthetic oligonucleotide
cgggccgccgcagcagattccgaagtgacgaacgattcagcatctcaacatgtgacgagc

SEQ ID NO: 3418 - DNA, 60 bp, Artificial
  Synthetic oligonucleotide
cggaacccacggttgactcgtgcatgaccagcatcgtcgagccaaggaacccggaattga

SEQ ID NO: 3419 - DNA, 60 bp, Artificial
  Synthetic oligonucleotide
tacggcgattggtgaaggctcccgtggtgtcagtggtggtcaggcgcaacggattgcttt

SEQ ID NO: 3420 - DNA, 60 bp, Artificial
  Synthetic oligonucleotide
ccaggcagcgccagcaatcctgtcacaaaagggctatacgactgcggctttccacggtga

SEQ ID NO: 3421 - DNA, 60 bp, Artificial
  Synthetic oligonucleotide
caacaggagcaatcggttctgtggaagttcccgcaaagacaacattttgggcagctgggg

SEQ ID NO: 3422 - DNA, 60 bp, Artificial
  Synthetic oligonucleotide
atttcttaactggtgggtaaacccgtggatgtttcgccgctgcatcagctgtgaaccacc

SEQ ID NO: 3423 - DNA, 60 bp, Artificial
  Synthetic oligonucleotide
ccggttccctgtttctccccagtctccttgggcgggcccagtaccaacaacgtataatcc

SEQ ID NO: 3424 - DNA, 60 bp, Artificial
  Synthetic oligonucleotide
gggacgaaaggcggttacgtggcaggaagttgccttttggcgcacatttccgctcggtaa

SEQ ID NO: 3425 - DNA, 60 bp, Artificial
  Synthetic oligonucleotide
gccaaacatggtcaccagttagacgatttgaggcatactgatcggggcatgctagccgct

SEQ ID NO: 3426 - DNA, 60 bp, Artificial
  Synthetic oligonucleotide
caagtgtccagtagggcggtccaagagcgggcacaaatcctaccagacagtacgattaca

SEQ ID NO: 3427 - DNA, 60 bp, Artificial
  Synthetic oligonucleotide
ccggtgttgtgctgcagaatccagctggtcaattgagtgggcttgccgatacggttgccg

SEQ ID NO: 3428 - DNA, 60 bp, Artificial
  Synthetic oligonucleotide
cacttccgcataagtccgctgatgagaccgctcaaacccttgatacaagcggaaatgtga

SEQ ID NO: 3429 - DNA, 60 bp, Artificial
  Synthetic oligonucleotide
ccccaactctttagcctctgccgccactaaggcacgtctagtttcctctgtcggttcgtc

SEQ ID NO: 3430 - DNA, 60 bp, Artificial
  Synthetic oligonucleotide
ctctgcgtggacccagcaccgttgaaacttcgcctgcgggtagttagcctcaatcgcaga

SEQ ID NO: 3431 - DNA, 60 bp, Artificial
  Synthetic oligonucleotide
gacggacctcgtgattagttcagcggggcggattccgaatgcggaccagttaggactcga

SEQ ID NO: 3432 - DNA, 60 bp, Artificial
  Synthetic oligonucleotide
cgacgtggcgggcacggcaaactaaagaccccaaaagttattggatgggacgcatgtggg

SEQ ID NO: 3433 - DNA, 60 bp, Artificial
  Synthetic oligonucleotide
gtgccagtgcccgagttcccgtaacccgcttggaatctgtaaaggtggccagttgttcgg

SEQ ID NO: 3434 - DNA, 60 bp, Artificial
  Synthetic oligonucleotide
gcgggtgtacgtcccgttccggtagttcacgtcgtcttttgatcggtcgatccgagtatg

SEQ ID NO: 3435 - DNA, 60 bp, Artificial
  Synthetic oligonucleotide
gacaatagtgtcgttgctgaatataaactgatcccctttgccgactgaaaattgatcccc

SEQ ID NO: 3436 - DNA, 60 bp, Artificial
  Synthetic oligonucleotide
ctgctaaataacccagagcaatcgctaaatgagtcttgcctaatccactaggaccaagta

SEQ ID NO: 3437 - DNA, 60 bp, Artificial
  Synthetic oligonucleotide
gcggctatgctcgacaggttgctccatcatgctcatgtcattcaatgcagaggcgacagt

SEQ ID NO: 3438 - DNA, 60 bp, Artificial
  Synthetic oligonucleotide
gcgttcaactttgccttttgtttgtgccctataaggttgacacactttaggacgaaatcc

SEQ ID NO: 3439 - DNA, 60 bp, Artificial
  Synthetic oligonucleotide
gcctcctctgtgcgctcgagtagtttctgataaattgacaattcatgttgcattgcagtg

SEQ ID NO: 3440 - DNA, 60 bp, Artificial
  Synthetic oligonucleotide
cctcttcggaattgagcccaatccacctgcatctgctgtccaggctctgtttcaaaccga

SEQ ID NO: 3441 - DNA, 60 bp, Artificial
  Synthetic oligonucleotide
ggatatttaccaatgaaccgagatcaggcaaatcatttcttccaagttattgcaaatcgc

SEQ ID NO: 3442 - DNA, 60 bp, Artificial
  Synthetic oligonucleotide
caacgagtacatgctacaacaggagcaattccattcgaacgacttcttgatgaacaagcg

SEQ ID NO: 3443 - DNA, 60 bp, Artificial
  Synthetic oligonucleotide
gggatcaattttcagtcggcaaaggggatcagtttatattcagcaacgacaggcaaatac

SEQ ID NO: 3444 - DNA, 60 bp, Artificial
  Synthetic oligonucleotide
cgcaaggacgaattgaattttccaaggtaaaatttcattaccaaggcggttactccctgt

SEQ ID NO: 3445 - DNA, 60 bp, Artificial
  Synthetic oligonucleotide
ccaagtgctcgcatggcagcattggctccatctactttgctaatatctaaaacaactgga

SEQ ID NO: 3446 - DNA, 60 bp, Artificial
  Synthetic oligonucleotide
aggcggaattggagcatcaggcaagatggaagccgcatggattgtggcgttcaattcccc

SEQ ID NO: 3447 - DNA, 60 bp, Artificial
  Synthetic oligonucleotide
aggcggaattggagcatcaggcaagatggaagtcacatggattgtggcgttcaattcccc

SEQ ID NO: 3448 - DNA, 60 bp, Artificial
  Synthetic oligonucleotide
ccgtgagttcaccgttcacagctgcaatgacaatgcgcccatccgaaggttctatgcttc

SEQ ID NO: 3449 - DNA, 57 bp, Artificial
  Synthetic oligonucleotide
aaaacccacgacagctggatatgtttcatcaaccaagtgacgagcatctaaaccaca

SEQ ID NO: 3450 - DNA, 60 bp, Artificial
  Synthetic oligonucleotide
gccagttgtgagcgtttgtttcgtcctgatttaaaggatgtccccatcgtggtgctatcc

SEQ ID NO: 3451 - DNA, 60 bp, Artificial
  Synthetic oligonucleotide
ggctcgcccatggcaatgcccaatgctttggcttcattcgagcgtgcgatacaacagcca

SEQ ID NO: 3452 - DNA, 60 bp, Artificial
  Synthetic oligonucleotide
gaagcgtttcttgatttaaggagtttaccggttgatagccatgattcgttttgcgagcag

SEQ ID NO: 3453 - DNA, 60 bp, Artificial
  Synthetic oligonucleotide
ggggagtagggcggcaatgggccaataaattaatttcgcgaggcattcatacggcttatg

SEQ ID NO: 3454 - DNA, 60 bp, Artificial
  Synthetic oligonucleotide
cgccgtgttgatgcgaactgctatggagcttcaaggaattgcttgtggcggtttagaggt

SEQ ID NO: 3455 - DNA, 60 bp, Artificial
  Synthetic oligonucleotide
gctggcgacgcattttctccaccgcacgggcacaatggctactgattgattcctcaatcg

SEQ ID NO: 3456 - DNA, 60 bp, Artificial
  Synthetic oligonucleotide
gcgcaaatcatctgtgggattaatcagcttaaattcgatggactgaaagtgctgtgccaa

SEQ ID NO: 3457 - DNA, 60 bp, Artificial
  Synthetic oligonucleotide
gggataatggtatacgaactgctttggtaggctcaccccttgggcgacctgccccttctc

SEQ ID NO: 3458 - DNA, 60 bp, Artificial
  Synthetic oligonucleotide
ggcaagctcatgtagaaccaaagtcaccactccccaaatcaccatctcactgtcctctgt

SEQ ID NO: 3459 - DNA, 60 bp, Artificial
  Synthetic oligonucleotide
ggtcatgaaattcaatgcgtattattgcgttggggattgattccttcctggacaacggac

SEQ ID NO: 3460 - DNA, 60 bp, Artificial
  Synthetic oligonucleotide
cgccattaattgtgctttatcacattgcgtgttgttaagccaaatagcttgagcctcttc

SEQ ID NO: 3461 - DNA, 60 bp, Artificial
  Synthetic oligonucleotide
ctacaaccgcaactatccctaaagctgcccctaacgccaaagagcccacatcgcccatga

SEQ ID NO: 3462 - DNA, 60 bp, Artificial
  Synthetic oligonucleotide
cttcttcctgatcgccatttccaccacccagaccgtcagtaattgcgactcttgccccgt

SEQ ID NO: 3463 - DNA, 60 bp, Artificial
  Synthetic oligonucleotide
ggccatagattcacagagtatcccgccaccgcaaccgacatccaacaccctcagcccctt

SEQ ID NO: 3464 - DNA, 60 bp, Artificial
  Synthetic oligonucleotide
aacgatccggcgcaactcccgctacaagacttcccaagcaggctcccatagagtgcccta

SEQ ID NO: 3465 - DNA, 60 bp, Artificial
  Synthetic oligonucleotide
cccagcgcccagagagcccaaaccaccactgttagaaaccgctgcaaccaactcaggagt

SEQ ID NO: 3466 - DNA, 60 bp, Artificial
  Synthetic oligonucleotide
atcaggacaacaaattcgcttggcaggacaaggaggcagtggaagcggaggaggggctcg

SEQ ID NO: 3467 - DNA, 60 bp, Artificial
  Synthetic oligonucleotide
tgtgcccctcccttgacatcgcccaatgcccaaatccctgccgctgtcgtttcgagaaac

SEQ ID NO: 3468 - DNA, 60 bp, Artificial
  Synthetic oligonucleotide
ccacaataagcccgccaccaacgcccagagcgcccgccattattcctgcaaaagcaccaa

SEQ ID NO: 3469 - DNA, 60 bp, Artificial
  Synthetic oligonucleotide
ggctcgctttccggaaggcatgatggtgtggggatgggagctcgttgtggatttctgcgt

SEQ ID NO: 3470 - DNA, 60 bp, Artificial
  Synthetic oligonucleotide
cagccatgcccacggtcaaaacaatccccgcaattcccggtaaagtcagtgtcgcatcaa

SEQ ID NO: 3471 - DNA, 60 bp, Artificial
  Synthetic oligonucleotide
gcacccaaccattatcaatccaccgctccatttcacgacgagatccgagtccggcctgac

SEQ ID NO: 3472 - DNA, 60 bp, Artificial
  Synthetic oligonucleotide
caaattattgaagacaagaaagcatcgattgaacaggagttatcaaggattgcacgacag

SEQ ID NO: 3473 - DNA, 60 bp, Artificial
  Synthetic oligonucleotide
cttggactttccatggaattggggcatatgatgtggtacaccatgtaccaagtggatcaa

SEQ ID NO: 3474 - DNA, 60 bp, Artificial
  Synthetic oligonucleotide
ctcggactgtccatggaattgggtcatatgatgtggtacaccatgtaccaagtggatcaa

SEQ ID NO: 3475 - DNA, 60 bp, Artificial
  Synthetic oligonucleotide
ttcaaactttgtcttgctttgcctaaggcttggttaaattgatccacttggtacatggtg

SEQ ID NO: 3476 - DNA, 60 bp, Artificial
  Synthetic oligonucleotide
ggttcctacaattttagaatttgttcgtaaaatcgtgacttgcgcagtagttcccacatt

SEQ ID NO: 3477 - DNA, 60 bp, Artificial
  Synthetic oligonucleotide
ccgacgttccgattgtatttgattttacccgcccgattatgcagacgtttcatagaagcg

SEQ ID NO: 3478 - DNA, 60 bp, Artificial
  Synthetic oligonucleotide
gtatgagttcctacaattttagaatttgttcgtgaaatccagatttgtggcagttcccac

SEQ ID NO: 3479 - DNA, 60 bp, Artificial
  Synthetic oligonucleotide
gtgggaactgccacaaatctggatttcacgaacaaattctaaaattgtaggaactcatac

SEQ ID NO: 3480 - DNA, 60 bp, Artificial
  Synthetic oligonucleotide
gtatgagctcctacaattttagaatttgttcgtaaaatcgggatttgcgggagttcccac

SEQ ID NO: 3481 - DNA, 60 bp, Artificial
  Synthetic oligonucleotide
ccttcacaaactccttcgttttaggtaggcttattcctgtcgcgtcgcaagctgcaacta

SEQ ID NO: 3482 - DNA, 60 bp, Artificial
  Synthetic oligonucleotide
cggctcaagatataaagacggacaagtcggaatcttggtcaccgatcttcccgattccga

SEQ ID NO: 3483 - DNA, 60 bp, Artificial
  Synthetic oligonucleotide
cggctcaagatataaagacggacaagtcggaatctttgtcaccgatcttcccgattccga

SEQ ID NO: 3484 - DNA, 60 bp, Artificial
  Synthetic oligonucleotide
cagttcactcccaaagactttagatatctgtaaagtggataaccggttactcctgcctcg

SEQ ID NO: 3485 - DNA, 60 bp, Artificial
  Synthetic oligonucleotide
ctcctgttgatcttccaagtcatttcgtaagtccagtgaaagctaggaactccccggttc

SEQ ID NO: 3486 - DNA, 60 bp, Artificial
  Synthetic oligonucleotide
gacaaaatggcgccccttctgggcttgaaaagcgtgggttagatgcgagcatttaccaca

SEQ ID NO: 3487 - DNA, 60 bp, Artificial
  Synthetic oligonucleotide
gacaaaatggcgccccttctgggcttgaaaagcgtgggttagatgcaagcatttaccaca

SEQ ID NO: 3488 - DNA, 60 bp, Artificial
  Synthetic oligonucleotide
gtggtaaatgctcgcatctaacccacgcttttcaagcccagaaggggcgccattttgtct

SEQ ID NO: 3489 - DNA, 60 bp, Artificial
  Synthetic oligonucleotide
gtggtaaatgctcgcatataacccacgcttttcaagcccagaaggggcgccattttgtct

SEQ ID NO: 3490 - DNA, 60 bp, Artificial
  Synthetic oligonucleotide
ggaagtcttagacaaaatggcgccccttctgggcttgaaaagcgtgggttagatgcgagc

SEQ ID NO: 3491 - DNA, 60 bp, Artificial
  Synthetic oligonucleotide
gaacatcccggctcctgacaaacgagcttaataatttctctcatggcgctaatgtctcga

SEQ ID NO: 3492 - DNA, 60 bp, Artificial
  Synthetic oligonucleotide
gcgcggaccgtattccacgatgtatgtccaacaaccttggaccattcgtcagtacgcagg

SEQ ID NO: 3493 - DNA, 60 bp, Artificial
  Synthetic oligonucleotide
gaagggtgtttgagaacctcgcgaaccgttcctccgtccccacctccaatcaccaaaacc

SEQ ID NO: 3494 - DNA, 60 bp, Artificial
  Synthetic oligonucleotide
cgggccaggtatgaatcgcaaaatgggattcactaacaacaaccacgccgctcactccat

SEQ ID NO: 3495 - DNA, 60 bp, Artificial
  Synthetic oligonucleotide
gaactccttggaatttccagcttaagcaaagaagaacttagatcctgcaaagaagcggga

SEQ ID NO: 3496 - DNA, 60 bp, Artificial
  Synthetic oligonucleotide
ccggagtttgggcgactttaggtgtgttggcggcggctcatggtgtttcacgatgttatc

SEQ ID NO: 3497 - DNA, 60 bp, Artificial
  Synthetic oligonucleotide
gggcccggtcagtttcgatttgatggataactcgatgtactgctccggtgtagatgctga

SEQ ID NO: 3498 - DNA, 60 bp, Artificial
  Synthetic oligonucleotide
tgagcattcgggttcatactggtgtttgggcgactttaggtgtgttggcggcggctcatg

SEQ ID NO: 3499 - DNA, 60 bp, Artificial
  Synthetic oligonucleotide
ggaccggtcagtttcgatttgatggataactcgatgtactgctccggtgtcgatgctgaa

SEQ ID NO: 3500 - DNA, 60 bp, Artificial
  Synthetic oligonucleotide
ggacgggtaggatcgttttgaatcttttccactaaaatttccgtgggtctggaaagacca

SEQ ID NO: 3501 - DNA, 60 bp, Artificial
  Synthetic oligonucleotide
ggcggccgtagacaagagcaagttgaaagttaccgtaatccagtcatcagtatgcgagaa

SEQ ID NO: 3502 - DNA, 60 bp, Artificial
  Synthetic oligonucleotide
gctgacgaattgggcgtttcaaagcaaagaatacaacaaattatcgccaaattatcgcca

SEQ ID NO: 3503 - DNA, 60 bp, Artificial
  Synthetic oligonucleotide
ggaggttttccttgcccaggattttcttctgctggaccaaggttgattgatgatccacgt

SEQ ID NO: 3504 - DNA, 60 bp, Artificial
  Synthetic oligonucleotide
gatgcaataggagacctgccaagtagtccaccagatgtatttgagggcgccttttctcca

SEQ ID NO: 3505 - DNA, 60 bp, Artificial
  Synthetic oligonucleotide
gcaaataggaaatgctgtaccagtacaactagcgcgtgtggttttacaacccattgcaag

SEQ ID NO: 3506 - DNA, 60 bp, Artificial
  Synthetic oligonucleotide
gcaacgctatcatcactacctattccggcacccatagcaactactggtttgttacattca

SEQ ID NO: 3507 - DNA, 60 bp, Artificial
  Synthetic oligonucleotide
ctaacgcttcagcaacacaagcagggtttcattaccaagatattgtgggtctaatactat

SEQ ID NO: 3508 - DNA, 60 bp, Artificial
  Synthetic oligonucleotide
cgaatggcgacaaatgattgtcaaaacgacagagtttcctcaaacaacgattactaaaga

SEQ ID NO: 3509 - DNA, 60 bp, Artificial
  Synthetic oligonucleotide
ctattttgagtattctgacaggagtaacgcaacctcaattattggataatctgctgggat

SEQ ID NO: 3510 - DNA, 60 bp, Artificial
  Synthetic oligonucleotide
ctgcttactcgcacatgctgtatcagaaaacaatgatatttgcgaaatttctgggtgtag

SEQ ID NO: 3511 - DNA, 60 bp, Artificial
  Synthetic oligonucleotide
cctcatgatagcgcgagaagatccagatacgaaaatatcgccaactagattagatcgcgg

SEQ ID NO: 3512 - DNA, 60 bp, Artificial
  Synthetic oligonucleotide
gctccgccaactgaccctggaattcctgcgccccactctaaaccactcagcccatgttca

SEQ ID NO: 3513 - DNA, 60 bp, Artificial
  Synthetic oligonucleotide
gctgcacgcgtttcaccactggcttgtccaacacccatcaaagcaggtccggcatcttgc

SEQ ID NO: 3514 - DNA, 60 bp, Artificial
  Synthetic oligonucleotide
cgccaggacgacgtaagatgaacccagccatcggaccagccattagccaaggacccaatg

SEQ ID NO: 3515 - DNA, 60 bp, Artificial
  Synthetic oligonucleotide
ggtgcgtggcgagcaatggaatctgcgtatcgatccggccagttaaaagctatcggggtc

SEQ ID NO: 3516 - DNA, 60 bp, Artificial
  Synthetic oligonucleotide
gcaattgctagtgccgccccttctgccgggtcagttccagcgcccagttcatcgaaaata

SEQ ID NO: 3517 - DNA, 60 bp, Artificial
  Synthetic oligonucleotide
gacagtgaaggtgcggttggagaagctattcgtcgttcaggtatcccacgctcgcaattt

SEQ ID NO: 3518 - DNA, 60 bp, Artificial
  Synthetic oligonucleotide
gtttgcgtgccactcgttcgcccatttcgcgttcaggttgtacgacgacatctgcgccta

SEQ ID NO: 3519 - DNA, 60 bp, Artificial
  Synthetic oligonucleotide
caccccgcaaacatcaaaagactgaaaaccctgaattcacctcaccatgggcggcagagg

SEQ ID NO: 3520 - DNA, 60 bp, Artificial
  Synthetic oligonucleotide
catgccgtcaccgccctagaagatgatcgcaacgcccctagttgacctaatgccgttcca

SEQ ID NO: 3521 - DNA, 60 bp, Artificial
  Synthetic oligonucleotide
gcccacggagcatttcaacttgggcggatgaatcgagccgaggcacaatcacacctatcg

SEQ ID NO: 3522 - DNA, 60 bp, Artificial
  Synthetic oligonucleotide
cgttcgtcagctacaccctgatttgccaacagtcgtacaaccagtgaagcaggcggcgaa

SEQ ID NO: 3523 - DNA, 60 bp, Artificial
  Synthetic oligonucleotide
cgcacttcatcaacaccatctacctcaatgcctcctccaccactaccgtgcccaccagtc

SEQ ID NO: 3524 - DNA, 60 bp, Artificial
  Synthetic oligonucleotide
gtccccatgttgcccataccaccttcagcggtcatacctgagccaccaccttgaccagca

SEQ ID NO: 3525 - DNA, 60 bp, Artificial
  Synthetic oligonucleotide
gcgccgtgtagctcgacgccatcaaaacctgcttcaatcgctcgcctagttgcttcgcca

SEQ ID NO: 3526 - DNA, 60 bp, Artificial
  Synthetic oligonucleotide
gagccttaacgcgcctgaattgcccattgccttggttgttgctgaggtttgtgatgcgcc

SEQ ID NO: 3527 - DNA, 60 bp, Artificial
  Synthetic oligonucleotide
gcgactccaaccggcaccagagcatttccaaccattcttgcatccgtgtgccaggctgga

SEQ ID NO: 3528 - DNA, 60 bp, Artificial
  Synthetic oligonucleotide
gccaccgacctgcctaatgttacttgccctggcgttgcttgtgtttgggatttgccgagc

SEQ ID NO: 3529 - DNA, 60 bp, Artificial
  Synthetic oligonucleotide
ccggtgcgggagaattgcgagtcaaggaaaccgatcgaatctcagtggtggcggctgaac

SEQ ID NO: 3530 - DNA, 60 bp, Artificial
  Synthetic oligonucleotide
gcgccgcttgatcgacttgttcaatcagggaaatggtttggctcatgatcccgcctcgca

SEQ ID NO: 3531 - DNA, 60 bp, Artificial
  Synthetic oligonucleotide
gcccggccacccaaaacagcacccatatcaatcattgtcgcctctcctatttcggccccg

SEQ ID NO: 3532 - DNA, 60 bp, Artificial
  Synthetic oligonucleotide
cgcttgggctccaggaatcgtctccgccaactcccatacgatagccatcaatcgacagcc

SEQ ID NO: 3533 - DNA, 60 bp, Artificial
  Synthetic oligonucleotide
cgaatcgcgacatgaccgtcacgctagcccattcaaagacaccggtcgatcaattgcggc

SEQ ID NO: 3534 - DNA, 60 bp, Artificial
  Synthetic oligonucleotide
cgattccgggaccaatttcgataaccgtgtcgtccggcccgatcgctgctccctgaacaa

SEQ ID NO: 3535 - DNA, 60 bp, Artificial
  Synthetic oligonucleotide
cagccgtaccgatgtttcccaaaccaagcacagccgacccatcagttacgaccgccacca

SEQ ID NO: 3536 - DNA, 60 bp, Artificial
  Synthetic oligonucleotide
gcgtgtccaccaagctaaagcagccggcaaaattccaatcgcaaacacaccccgccaacc

SEQ ID NO: 3537 - DNA, 60 bp, Artificial
  Synthetic oligonucleotide
gcccgcaaatcatcagcctgggcaacagtcaaaccacgcacgtcagcaacaaccgccgat

SEQ ID NO: 3538 - DNA, 60 bp, Artificial
  Synthetic oligonucleotide
gaaccccaacaacaatatcggccccagaaaccggctgttcgcgagctagacaacggccca

SEQ ID NO: 3539 - DNA, 60 bp, Artificial
  Synthetic oligonucleotide
gccgcccaccagccatagtcgccgctccagcccattgaaacaacattcggtaggacttta

SEQ ID NO: 3540 - DNA, 60 bp, Artificial
  Synthetic oligonucleotide
cggttcgcaaattcctctctcctttgaacacaccgacgccaaaagaaacatcgccgacgc

SEQ ID NO: 3541 - DNA, 60 bp, Artificial
  Synthetic oligonucleotide
gccttctcttaccctccaagcaccggttccgcatgaaagcatcaagataccaactcgccc

SEQ ID NO: 3542 - DNA, 60 bp, Artificial
  Synthetic oligonucleotide
cgtagcgacctttctgataaagtccgttccgagattgtcattgtggaggactacgcgcca

SEQ ID NO: 3543 - DNA, 60 bp, Artificial
  Synthetic oligonucleotide
caaggcaagcatcctcccttctacgctgttctgctaatatttcaagttcgcggtcagcca

SEQ ID NO: 3544 - DNA, 60 bp, Artificial
  Synthetic oligonucleotide
tcgggaggaagtacggggagaggcggcgtccttcgagagaatcgcgcgtgtggctgtttt

SEQ ID NO: 3545 - DNA, 60 bp, Artificial
  Synthetic oligonucleotide
ccggcccgtttagcaagcgtaacgtcttcgccaagctctcctgcaagaattcctgcaagt

SEQ ID NO: 3546 - DNA, 60 bp, Artificial
  Synthetic oligonucleotide
gcggataaggagtcagctgcaacagaaagtccagcgataccagttgccatagtacgtaat

SEQ ID NO: 3547 - DNA, 60 bp, Artificial
  Synthetic oligonucleotide
tcgccgtgatgccaaccgtaatgtagcccatatgactaactgtggccattacgtgcttta

SEQ ID NO: 3548 - DNA, 60 bp, Artificial
  Synthetic oligonucleotide
atcgcgcacatagatcatggtaaatctacactcgctgatcggattttagaacaaacgggt

SEQ ID NO: 3549 - DNA, 60 bp, Artificial
  Synthetic oligonucleotide
gcttatccctcctgcttcatttctggttctgtcgttttggaatccgcctgttcctcctgg

SEQ ID NO: 3550 - DNA, 60 bp, Artificial
  Synthetic oligonucleotide
ccttgcgcggtccaaccaagtggatcacttatcgctacgccgactgttttcgagccgaca

SEQ ID NO: 3551 - DNA, 60 bp, Artificial
  Synthetic oligonucleotide
gcacttcctcgtgtgaaggcatgtgcgccgcgccggaactccaagctccctaggtataaa

SEQ ID NO: 3552 - DNA, 60 bp, Artificial
  Synthetic oligonucleotide
cccaataggtcttttatggttatggagggcgcgagtgttgttgggagaaggaagatagtg

SEQ ID NO: 3553 - DNA, 56 bp, Artificial
  Synthetic oligonucleotide
ggcaagcagttaaaatgcatgtcaacaagggtggtaccgcgaatctcgtccctttt

SEQ ID NO: 3554 - DNA, 57 bp, Artificial
  Synthetic oligonucleotide
aaaagggacgagattcgcggtaccacccttgttgacatgcattttaactgcttgccc

SEQ ID NO: 3555 - DNA, 60 bp, Artificial
  Synthetic oligonucleotide
gggacgagattcgcggtaccacccttgttgacatgcattttaactgcttgcccacttcat

SEQ ID NO: 3556 - DNA, 60 bp, Artificial
  Synthetic oligonucleotide
gggacgagattcgcggtaccacccttgttgacatgcatgttaattgcttgcccacttcat

SEQ ID NO: 3557 - DNA, 60 bp, Artificial
  Synthetic oligonucleotide
ggtagatgttcccatttcttccgtaactattcatcaccgtttgcgtgattcgtcgccgtc

SEQ ID NO: 3558 - DNA, 60 bp, Artificial
  Synthetic oligonucleotide
gcaagaccacggcccatcacaacagactccttgccacttttaccctcggcgattacaaca

SEQ ID NO: 3559 - DNA, 60 bp, Artificial
  Synthetic oligonucleotide
cgttgctgatgcggacaaaacgctttcgcaacaaaagaaactgacctttgaaaactgaac

SEQ ID NO: 3560 - DNA, 60 bp, Artificial
  Synthetic oligonucleotide
gccaaggcccaattccactagcaagcggacgccttccaatcgctatcaacggcatcatcc

SEQ ID NO: 3561 - DNA, 60 bp, Artificial
  Synthetic oligonucleotide
cgccttgttcacttttcacagtatcaattccagtgaagcgctcgccaaactcggcaatcg

SEQ ID NO: 3562 - DNA, 60 bp, Artificial
  Synthetic oligonucleotide
gctggttttctctcgcccaattcgctataagtccaggtccttcgtgcggcacatgttgca

SEQ ID NO: 3563 - DNA, 60 bp, Artificial
  Synthetic oligonucleotide
ccgttcgcgcacgccaactcgtttgatttgtttactacgaagttgcccacacgcagcatc

SEQ ID NO: 3564 - DNA, 60 bp, Artificial
  Synthetic oligonucleotide
gatggttttggtggcttggcgcttggaatgatgttcccggttattgcagcatttatcggg

SEQ ID NO: 3565 - DNA, 60 bp, Artificial
  Synthetic oligonucleotide
ccgcgacctttgacgttttcaatcattcctaccatgaggtaattgggattgtcggcatcg

SEQ ID NO: 3566 - DNA, 60 bp, Artificial
  Synthetic oligonucleotide
cgcttccgttccgcgtgccattccactaagcaaatgcccagcaatcaaatcccgcaccgc

SEQ ID NO: 3567 - DNA, 60 bp, Artificial
  Synthetic oligonucleotide
gcggcgaaacatttcgaggatgatgcgcctggttggtgggatgattatattggtccaggg

SEQ ID NO: 3568 - DNA, 60 bp, Artificial
  Synthetic oligonucleotide
gccgccgtacaagctgcttcaagccctgctgttccgccgccaattacgacaacattggtc

SEQ ID NO: 3569 - DNA, 60 bp, Artificial
  Synthetic oligonucleotide
ggcgcagaaccaatcaacttcggtaaattcccaccagcacaacgcggcttactacaagta

SEQ ID NO: 3570 - DNA, 60 bp, Artificial
  Synthetic oligonucleotide
cttgcgtcttttgtgtttacgtctttcgcgtcgattcatttcatcactcctggtctagtc

SEQ ID NO: 3571 - DNA, 60 bp, Artificial
  Synthetic oligonucleotide
aaatcttgcacgagtcctaaatcgacactaatatctgctgcgtaagaaacagcgtccacg

SEQ ID NO: 3572 - DNA, 60 bp, Artificial
  Synthetic oligonucleotide
cgcgacatggaaagacgattttaaacacacttgatcgggtgcaaggctgggctgactcgc

SEQ ID NO: 3573 - DNA, 60 bp, Artificial
  Synthetic oligonucleotide
ggagattgtttacacttagaataactggaggtggcgaactttgagcgtaaaattggcaga

SEQ ID NO: 3574 - DNA, 60 bp, Artificial
  Synthetic oligonucleotide
cggaccaactgctggcgcaaacataattaccagcccgatcatccccattgccgagccacg

SEQ ID NO: 3575 - DNA, 60 bp, Artificial
  Synthetic oligonucleotide
cgccgcttcctaccgttccaaaccccaacacacctacttgtaactttgcttccacttgaa

SEQ ID NO: 3576 - DNA, 60 bp, Artificial
  Synthetic oligonucleotide
ccgcgtccagaagttttgccgttaccagagcctgttccacgaccaacacgattacgttct

SEQ ID NO: 3577 - DNA, 60 bp, Artificial
  Synthetic oligonucleotide
ggtgcgcaaaggtttgtatttctccgatgtcaattcggctcactgtaacaactccttttg

SEQ ID NO: 3578 - DNA, 60 bp, Artificial
  Synthetic oligonucleotide
ggctgtatgtagttggtacgcaaaggtttgtatttctccgatgtcaattcggctcactgt

SEQ ID NO: 3579 - DNA, 60 bp, Artificial
  Synthetic oligonucleotide
cagtgagccgaattgacatcggagaaatacaaacctttgcgcaccaactacatacagcta

SEQ ID NO: 3580 - DNA, 60 bp, Artificial
  Synthetic oligonucleotide
cgaaaggagttgtcacagtgagccgaattgacatcggagaaatacaaaccttcgcgtacc

SEQ ID NO: 3581 - DNA, 60 bp, Artificial
  Synthetic oligonucleotide
gagttgttacagtgagccgaattgacatcggagaaatacaaacctttgcgcaccaactac

SEQ ID NO: 3582 - DNA, 60 bp, Artificial
  Synthetic oligonucleotide
ccatatcgatgacctgctcagctgtcagattttgttctttcgccatttacattcaccctc

SEQ ID NO: 3583 - DNA, 60 bp, Artificial
  Synthetic oligonucleotide
gtcccaaacattgcgtcaggtaccaagaagaacaaatatcctcctggctttgtgtagcgc

SEQ ID NO: 3584 - DNA, 60 bp, Artificial
  Synthetic oligonucleotide
gttgcgcggacattttctacttccggcatttctggcatttataaactccccgtttctcta

SEQ ID NO: 3585 - DNA, 60 bp, Artificial
  Synthetic oligonucleotide
gcgctcgcaacttgtaaatgaacaaaccccactatcctctctcctttcaaaactctcttt

SEQ ID NO: 3586 - DNA, 60 bp, Artificial
  Synthetic oligonucleotide
caggatggctactagaacggtgaaaatggggattttacgcatagggaatttcgcgcctcc

SEQ ID NO: 3587 - DNA, 60 bp, Artificial
  Synthetic oligonucleotide
ggcataactgcttccatttcaaatcttggagcttgtgtgcctactaaacgttctgccact

SEQ ID NO: 3588 - DNA, 60 bp, Artificial
  Synthetic oligonucleotide
ccttccaactgatctttccattcataaatagtcattaaatccgctaacgcctggcatgga

SEQ ID NO: 3589 - DNA, 60 bp, Artificial
  Synthetic oligonucleotide
cgttcctgtcgctccaccaactaaaataatcggacggtgcccagcattttggaaacggcg

SEQ ID NO: 3590 - DNA, 60 bp, Artificial
  Synthetic oligonucleotide
gctttccgtacaacagcgcgagtggctgcattcattcctggagcgtctcctccacttgtt

SEQ ID NO: 3591 - DNA, 60 bp, Artificial
  Synthetic oligonucleotide
cgaatacaacgtctgctcctttaccgccgtcaccgccagcaggaccaccgtttggtacaa

SEQ ID NO: 3592 - DNA, 60 bp, Artificial
  Synthetic oligonucleotide
gggcgcatccggtaagctaaaggttgaattgccatataaccgctccttcttatttgcttg

SEQ ID NO: 3593 - DNA, 60 bp, Artificial
  Synthetic oligonucleotide
gggaaaagacgaagcatggcagtttatcaaagaaggaatggaataatagaaggagttgga

SEQ ID NO: 3594 - DNA, 60 bp, Artificial
  Synthetic oligonucleotide
cttctgcgtctaccgtttcacttgaaataattcgttcatccatgccacaagctcctctct

SEQ ID NO: 3595 - DNA, 60 bp, Artificial
  Synthetic oligonucleotide
gccaaatccaacaacatctttcacaaattgttccggccacgaagcattctcacgatcacg

SEQ ID NO: 3596 - DNA, 60 bp, Artificial
  Synthetic oligonucleotide
gcattccgcgcaaaattcatcaatatgtggttcaaaatgcgcaacaagtgcttcccggtg

SEQ ID NO: 3597 - DNA, 60 bp, Artificial
  Synthetic oligonucleotide
ggagccatttctacacttaaatctacatcatttggtagtacgtccgatttcgctggaaca

SEQ ID NO: 3598 - DNA, 60 bp, Artificial
  Synthetic oligonucleotide
ccagactcttttcctccacatgcagctagaaccgcacttagaaccaacacaacaacaagt

SEQ ID NO: 3599 - DNA, 60 bp, Artificial
  Synthetic oligonucleotide
gcctttccaccagtttgccagaagaagtgcaacgcgaaatgctaagaactattccgggac

SEQ ID NO: 3600 - DNA, 60 bp, Artificial
  Synthetic oligonucleotide
gtcctgcttcgttaacttccccgttaccatgcgggataacgcgactccatgcgacagaga

SEQ ID NO: 3601 - DNA, 60 bp, Artificial
  Synthetic oligonucleotide
cccaccatgtcaaggtgatactctcccaactgagctacaggaccgagtaaaatcagaaaa

SEQ ID NO: 3602 - DNA, 60 bp, Artificial
  Synthetic oligonucleotide
ggaggaaactggctcgcgcttctggtcggcttgctctgtcttgccgtcgcaacagtcatt

SEQ ID NO: 3603 - DNA, 60 bp, Artificial
  Synthetic oligonucleotide
gccacaacccgaaagcacagccattaatccgattacaagacttgcgatgagcaacttctg

SEQ ID NO: 3604 - DNA, 60 bp, Artificial
  Synthetic oligonucleotide
ccttgtttagccccgagtacccggccgatatctttaccgacagacggtttctctgccagt

SEQ ID NO: 3605 - DNA, 60 bp, Artificial
  Synthetic oligonucleotide
gtgtcgatttcccaacattaggaagcccgacaataccagctgtaagtgccattatatata

SEQ ID NO: 3606 - DNA, 60 bp, Artificial
  Synthetic oligonucleotide
gcatgcggataaacttcttgaaagccctctttaatatactctgccacctcgtgcgccgtc

SEQ ID NO: 3607 - DNA, 60 bp, Artificial
  Synthetic oligonucleotide
ccttcgcggagaattttcccttggcttgctgtttgtaaaagttgctcgacggaagcgcga

SEQ ID NO: 3608 - DNA, 60 bp, Artificial
  Synthetic oligonucleotide
cagtagctgtctttgtttatccatacatgctccctatctgtttggctaattcttggtcgg

SEQ ID NO: 3609 - DNA, 60 bp, Artificial
  Synthetic oligonucleotide
cgtgtaagttgtaactccgtagtaaaatcccgtctgctggctggtttgcatcaatcacat

SEQ ID NO: 3610 - DNA, 60 bp, Artificial
  Synthetic oligonucleotide
cgcgccgtccatatcagctgcctcataaagcgacttatcgaccgtttgcaaaatcgccaa

SEQ ID NO: 3611 - DNA, 60 bp, Artificial
  Synthetic oligonucleotide
ccagaacgtcgaagcgcagttgctttcacacaataaatctcacctaaaagtgccacattt

SEQ ID NO: 3612 - DNA, 60 bp, Artificial
  Synthetic oligonucleotide
gcgaacaagcgccaagcaccttctcagtctgtcaccgtgcgtgtgtgatttaacaccgtt

SEQ ID NO: 3613 - DNA, 60 bp, Artificial
  Synthetic oligonucleotide
cgttacgcttcactgatgtacttgctgctttcatattcaatctcgtgcaccttccctttc

SEQ ID NO: 3614 - DNA, 60 bp, Artificial
  Synthetic oligonucleotide
gccaaactcggaagcccttttgtaactggccgcgtcagtctcggatatgcttcacccatc

SEQ ID NO: 3615 - DNA, 60 bp, Artificial
  Synthetic oligonucleotide
aaataaactcggtgaaatggccaaagaagacccaggtcgcgccgcagcagtcatccaaaa

SEQ ID NO: 3616 - DNA, 60 bp, Artificial
  Synthetic oligonucleotide
gcttcatcgccgtcttgcactttccatacgccaaatcctaaacggggcatttctacacca

SEQ ID NO: 3617 - DNA, 60 bp, Artificial
  Synthetic oligonucleotide
cctcctttcgcctgtctgtccgtatcaccgtaccacctgggtcacactggctatgaatgt

SEQ ID NO: 3618 - DNA, 60 bp, Artificial
  Synthetic oligonucleotide
gtgttcctcctgcggtttcttgcgacgcttggccacgctcaatttcctccacttctctcg

SEQ ID NO: 3619 - DNA, 60 bp, Artificial
  Synthetic oligonucleotide
ggagcaacttaaatgaacggagggttgcccatcatgcgttatattagactacgtttcccc

SEQ ID NO: 3620 - DNA, 60 bp, Artificial
  Synthetic oligonucleotide
gagcggactggtgcgcctgcttttcgtccggtaaccattgtgtcgcggtcggaagcttta

SEQ ID NO: 3621 - DNA, 60 bp, Artificial
  Synthetic oligonucleotide
taccacaaaagaaagcagggataaaatggcaaaagaaattattcaaacctcgtcagcccc

SEQ ID NO: 3622 - DNA, 60 bp, Artificial
  Synthetic oligonucleotide
ggacggtgcgtttgccactcatccaaaatactacccataccactaatacatgatacgagg

SEQ ID NO: 3623 - DNA, 60 bp, Artificial
  Synthetic oligonucleotide
gcggttttcggtaggcatttccccacgtttcattttcccggtaagttcgaatctcgtcta

SEQ ID NO: 3624 - DNA, 60 bp, Artificial
  Synthetic oligonucleotide
gcacctcatcgtagctatcaagccgcttatcgaattcttcctccgtttccccaagacgca

SEQ ID NO: 3625 - DNA, 60 bp, Artificial
  Synthetic oligonucleotide
ggatgtccgcaacgatgggcttccaacaggtggctgatttaacgcatgcaatggaaaatg

SEQ ID NO: 3626 - DNA, 60 bp, Artificial
  Synthetic oligonucleotide
ggcgcaaatcaatatcgacatcctgaccatgttcgacactatcaacggaaaatcaaccct

SEQ ID NO: 3627 - DNA, 60 bp, Artificial
  Synthetic oligonucleotide
cgccaccacaatcactaccacgatacaaatgagcgacaccggcaaaataagcgccagccc

SEQ ID NO: 3628 - DNA, 60 bp, Artificial
  Synthetic oligonucleotide
gccgttaaatttatgcgtcataccgggcgaacagagcaggagaggtagaagtggagcaat

SEQ ID NO: 3629 - DNA, 60 bp, Artificial
  Synthetic oligonucleotide
gcagcactttcctgcgctaccgctttagcagctgcaacgatttccgcttctttgctcgga

SEQ ID NO: 3630 - DNA, 60 bp, Artificial
  Synthetic oligonucleotide
tggcgccgcactggcaattgggcttgcgactttaggagctgcaattggacagggaatcgc

SEQ ID NO: 3631 - DNA, 60 bp, Artificial
  Synthetic oligonucleotide
ctccggctggcgtggctgttgcgacttttacattagctgtaaatcgtacgttcactaacc

SEQ ID NO: 3632 - DNA, 60 bp, Artificial
  Synthetic oligonucleotide
cctggttgatatgtaagtgaatcaattcgactcgccgccgtataagccgcaacgaccgat

SEQ ID NO: 3633 - DNA, 60 bp, Artificial
  Synthetic oligonucleotide
ccgggagttgcaatatctttactcattttcttcctcctgcataatcttttggcacgcggc

SEQ ID NO: 3634 - DNA, 60 bp, Artificial
  Synthetic oligonucleotide
ggaggaacagcggaacttgtagcccattcaagcgtacgagcatcccacgggtcaccagta

SEQ ID NO: 3635 - DNA, 60 bp, Artificial
  Synthetic oligonucleotide
ggcgcggtgtttggatacttgtttggggatgtggatttattggtaaaagtgctggtgtgc

SEQ ID NO: 3636 - DNA, 60 bp, Artificial
  Synthetic oligonucleotide
gccatcgatcgtcgttgcagcttcattaaacgtcgctacagccattttaaccgagtcagc

SEQ ID NO: 3637 - DNA, 60 bp, Artificial
  Synthetic oligonucleotide
ggcgcaaactggatatttacccatctctgcaccaaggcggcgaggacgaacatcccgagt

SEQ ID NO: 3638 - DNA, 60 bp, Artificial
  Synthetic oligonucleotide
cgcctaagtttgtctttagatctccaagttgctgatacaattcgccaatttgctcctcca

SEQ ID NO: 3639 - DNA, 60 bp, Artificial
  Synthetic oligonucleotide
gcggtaatcagcgcattcggctcaagaaatatcgcgcccagtacagcttgttcggcttca

SEQ ID NO: 3640 - DNA, 60 bp, Artificial
  Synthetic oligonucleotide
gccgtcgccggagtatccttcttcaaaattcccgcgcatccccatgtatccattaccgag

SEQ ID NO: 3641 - DNA, 60 bp, Artificial
  Synthetic oligonucleotide
gcagtgttagggtcaaccgcacgacgccatgagtaaacatagtcatttgcagttacagga

SEQ ID NO: 3642 - DNA, 60 bp, Artificial
  Synthetic oligonucleotide
cgatagtcccatttgttacacctccatattatcgtcactcaccaaagctcttcctactcg

SEQ ID NO: 3643 - DNA, 60 bp, Artificial
  Synthetic oligonucleotide
ctggtggggcaattggagccgcagcctcggtattatttgctccaaaatccggcaatgagc

SEQ ID NO: 3644 - DNA, 60 bp, Artificial
  Synthetic oligonucleotide
gacttcacccactttcatacataccactttaccacatctccccacttcgcaccaccaaaa

SEQ ID NO: 3645 - DNA, 60 bp, Artificial
  Synthetic oligonucleotide
ggagacatttgcccgtttcgcaacatctgctaaagtcgccatctccaacctcctccattc

SEQ ID NO: 3646 - DNA, 60 bp, Artificial
  Synthetic oligonucleotide
gtgcagcggttcggccggtatcatcctgactataaagaagtaaccagaaagactcgtgct

SEQ ID NO: 3647 - DNA, 60 bp, Artificial
  Synthetic oligonucleotide
ctttgttggtctgacttacggtaaaaccagcttcaggtatcatcgtgctgccattcgtgt

SEQ ID NO: 3648 - DNA, 60 bp, Artificial
  Synthetic oligonucleotide
ttccgcgataaaatctttcatatccggcggcgttcttccgtagtcgactgtccatgcccc

SEQ ID NO: 3649 - DNA, 60 bp, Artificial
  Synthetic oligonucleotide
gaattccattacctcacccgtccatcattttctctacatatcataccacaaagacgcgcc

SEQ ID NO: 3650 - DNA, 60 bp, Artificial
  Synthetic oligonucleotide
gcgtcgtcggcatgtccttatttaattcaccaaatgactgtactcccagcaagttatcca

SEQ ID NO: 3651 - DNA, 60 bp, Artificial
  Synthetic oligonucleotide
cagagctgtatttacttgcagcctgcaccaatagagttgccgggcgtgcgtgaattcctg

SEQ ID NO: 3652 - DNA, 60 bp, Artificial
  Synthetic oligonucleotide
aactacgccgcctttccattcttgtgcttttgtgaaatctaagttcacgttgtccgctgt

SEQ ID NO: 3653 - DNA, 60 bp, Artificial
  Synthetic oligonucleotide
ggcagttaaaccgatagagaaaccaggatgcaaggaactgttagaaccaccgtatttcgc

SEQ ID NO: 3654 - DNA, 60 bp, Artificial
  Synthetic oligonucleotide
gttcttttaaacgttcaataatatatctggatccctcgtagcaagcggcgcggtgtggtg

SEQ ID NO: 3655 - DNA, 60 bp, Artificial
  Synthetic oligonucleotide
ggaatattaggcattaacgttcacctcgtttccagaaagtgcggccagaacagatccgcg

SEQ ID NO: 3656 - DNA, 60 bp, Artificial
  Synthetic oligonucleotide
ttatgcctgattgtcagtatctcgtgcacccatatccgcttgctactaagtccacaactg

SEQ ID NO: 3657 - DNA, 60 bp, Artificial
  Synthetic oligonucleotide
aatcacctgtatgaatacttcgatgtggaccagggtcacttgtcgtttgctgctcctttt

SEQ ID NO: 3658 - DNA, 60 bp, Artificial
  Synthetic oligonucleotide
gcgcctcgagttgtgtaataatcatttcaggagtagcccattcgtcgcggtcaaattcgg

SEQ ID NO: 3659 - DNA, 60 bp, Artificial
  Synthetic oligonucleotide
cgcttcttgttcttgcgtacttgccggacgaatgccatacgatacgattcgcgtcgaagg

SEQ ID NO: 3660 - DNA, 60 bp, Artificial
  Synthetic oligonucleotide
gcagcctctacaaccttccctgcttcacgaacagcatcaatggacacttccatgcctttg

SEQ ID NO: 3661 - DNA, 60 bp, Artificial
  Synthetic oligonucleotide
gccgttaccatcgccgtatttgtcgcaacatttatggcagctattgaaggtaccatcgtg

SEQ ID NO: 3662 - DNA, 60 bp, Artificial
  Synthetic oligonucleotide
cgcgtattcaccccaaatagaaacatccattcctcattcaccatccttctactctatcat

SEQ ID NO: 3663 - DNA, 60 bp, Artificial
  Synthetic oligonucleotide
cccgtactccatttgtaaccggagcatgttcgcttcaatattccaacagtcatcacaagc

SEQ ID NO: 3664 - DNA, 60 bp, Artificial
  Synthetic oligonucleotide
ggatgcggctatttggggcacacgagcggcttacatcggcggttgtgattcgacgagtaa

SEQ ID NO: 3665 - DNA, 60 bp, Artificial
  Synthetic oligonucleotide
cgcccttcaaaccaaacgcgcaagtatggctaggcaccgaccaagccggcaactccattc

SEQ ID NO: 3666 - DNA, 60 bp, Artificial
  Synthetic oligonucleotide
ctgctcctcgtgctgaagaagaaccaacgactacggaagcacctgaaccagaagctgtac

SEQ ID NO: 3667 - DNA, 60 bp, Artificial
  Synthetic oligonucleotide
cgcgcatccgccatactcgccgcctgttccaccaaccgcttctgctgcaacaccactttt

SEQ ID NO: 3668 - DNA, 60 bp, Artificial
  Synthetic oligonucleotide
cggtcttcctggaactttctccgctagactacaaccaaaccatccaaccgatgatcctga

SEQ ID NO: 3669 - DNA, 60 bp, Artificial
  Synthetic oligonucleotide
gcatccccaggccctgcaccaattaacataacttttcccattagtagacctccaattgac

SEQ ID NO: 3670 - DNA, 60 bp, Artificial
  Synthetic oligonucleotide
gcgatggcaggattaatcatttgatgcgagacatttgggatggtttgggtttctaggttt

SEQ ID NO: 3671 - DNA, 60 bp, Artificial
  Synthetic oligonucleotide
ggcttgcagcagcagtcgtactaatgtttattgcaccacccatggcagatcttgtacgcg

SEQ ID NO: 3672 - DNA, 60 bp, Artificial
  Synthetic oligonucleotide
gctagttcattatagttgccgccgtgagaagccgtcgttattttcacatcaaatcgctcc

SEQ ID NO: 3673 - DNA, 60 bp, Artificial
  Synthetic oligonucleotide
gcaatcatcgttacgcccatcattccagcaacaatcaaatgaattggtagtgtgagcgga

SEQ ID NO: 3674 - DNA, 60 bp, Artificial
  Synthetic oligonucleotide
cgcctaatgttccaccgccaacccatatataccaaggatttgaggcaatcatttctgaag

SEQ ID NO: 3675 - DNA, 60 bp, Artificial
  Synthetic oligonucleotide
ctcaagttccttcaaacgttctgcaagcacccgatcactcatttgtgggatctcagcggc

SEQ ID NO: 3676 - DNA, 60 bp, Artificial
  Synthetic oligonucleotide
cagccacaaatttcccaccaatcgaagcaccgagcgtcatgcgtttcaaatgaatagccg

SEQ ID NO: 3677 - DNA, 60 bp, Artificial
  Synthetic oligonucleotide
ccgctaaacttggcatgggtcggaaagcccgctccaccacaaccaacaacgccagcatct

SEQ ID NO: 3678 - DNA, 60 bp, Artificial
  Synthetic oligonucleotide
cggcttatttggcgagtatcctgacttggcttcatccaacaatcgaaccttcccatacgc

SEQ ID NO: 3679 - DNA, 60 bp, Artificial
  Synthetic oligonucleotide
ggtgtggtccttgccgcatggtggctccagttttagaagaaatacaagaagaacgcggcg

SEQ ID NO: 3680 - DNA, 60 bp, Artificial
  Synthetic oligonucleotide
ccctgcaatatacttcattcatttcaccgcatttcctacataatcgcgagcaaaaggaga

SEQ ID NO: 3681 - DNA, 60 bp, Artificial
  Synthetic oligonucleotide
ggggaggaaacaaaatgaaattattagtagttagcgacagccactcagaacgtgactgct

SEQ ID NO: 3682 - DNA, 60 bp, Artificial
  Synthetic oligonucleotide
gtccttctgcatttacattcattgttccaagccgttcaaacgtcacgccaatcccacctt

SEQ ID NO: 3683 - DNA, 60 bp, Artificial
  Synthetic oligonucleotide
caactggcaaccaccacacgcctcgtacactgggcaaggtgcggtaactcggtttggaga

SEQ ID NO: 3684 - DNA, 60 bp, Artificial
  Synthetic oligonucleotide
gccgcacctccagcacccgcaataataattttcaaaccacgttcccgcgcttgttctgca

SEQ ID NO: 3685 - DNA, 60 bp, Artificial
  Synthetic oligonucleotide
cgtggcgatgactttgctccggaacgtttgttgttttctgacaaactggctaggtggcaa

SEQ ID NO: 3686 - DNA, 60 bp, Artificial
  Synthetic oligonucleotide
ctttcgctggaactgatgtctgttttcctgttaatggatgagtaagcggacgatgagacc

SEQ ID NO: 3687 - DNA, 60 bp, Artificial
  Synthetic oligonucleotide
ctacagtggccatcgttgtggagcaagcgatacgacacgccttgacaaagaaagtggcag

SEQ ID NO: 3688 - DNA, 60 bp, Artificial
  Synthetic oligonucleotide
gtttgcataatgctttgctgaaatggtcttcccgacacctggattgccataacatatgcc

SEQ ID NO: 3689 - DNA, 60 bp, Artificial
  Synthetic oligonucleotide
cttcctggaatggttgactctgttcgtgttcccgatatcaaagctgtatgaaccccatct

SEQ ID NO: 3690 - DNA, 60 bp, Artificial
  Synthetic oligonucleotide
ggggaacaacgttttcaaagagattgtcctcaccaaatgtttcttttgcgacttccatta

SEQ ID NO: 3691 - DNA, 60 bp, Artificial
  Synthetic oligonucleotide
ggcgaaggagtacggtattgccctatcttcgatagcacgttgggtcaagcaattttcgga

SEQ ID NO: 3692 - DNA, 60 bp, Artificial
  Synthetic oligonucleotide
cgcactaattttggacggctcaatatcggttcgcctagaaagttctcccattgtcagctt

SEQ ID NO: 3693 - DNA, 60 bp, Artificial
  Synthetic oligonucleotide
gccgcctgtttatcccgattctttcgcaaccaaatatctaatgtcaaacctgtagaatcg

SEQ ID NO: 3694 - DNA, 60 bp, Artificial
  Synthetic oligonucleotide
cacggcgttccagccaccaccgctctgttcggaaagaaaacactaggaaaataatcacgc

SEQ ID NO: 3695 - DNA, 60 bp, Artificial
  Synthetic oligonucleotide
gctccgctaggtacgcttgcaccatttctatagataacgcttgatccaaacacataaagg

SEQ ID NO: 3696 - DNA, 60 bp, Artificial
  Synthetic oligonucleotide
gggcggtgcaggaacagatacggctctcgaaactgctgatgttgctctaatgggcgacga

SEQ ID NO: 3697 - DNA, 60 bp, Artificial
  Synthetic oligonucleotide
cttatggagcttggcgtaaattttaaagaagaggtgctagcatgagtgagaaaatgaccg

SEQ ID NO: 3698 - DNA, 60 bp, Artificial
  Synthetic oligonucleotide
atccagatattagccatgattgccgagcaagaacgagcagagagtaagagacggcaggca

SEQ ID NO: 3699 - DNA, 60 bp, Artificial
  Synthetic oligonucleotide
gcgtccaagcagtgagtgtgagaagtaggcaaatccgcttctcgcgaagcatgagctgtg

SEQ ID NO: 3700 - DNA, 60 bp, Artificial
  Synthetic oligonucleotide
gctttctgttttctgccctgcgattaccagtgagactttgcgtctcattgcttttcgtct

SEQ ID NO: 3701 - DNA, 60 bp, Artificial
  Synthetic oligonucleotide
ttttgttgaaaacagctttctgttttctgccctgcgattaccagtgagactttacgtctc

SEQ ID NO: 3702 - DNA, 60 bp, Artificial
  Synthetic oligonucleotide
ggcgtccaagcagtgagtgtgagaagtaggcaaatccgcttctcgcgaagccatgagctg

SEQ ID NO: 3703 - DNA, 60 bp, Artificial
  Synthetic oligonucleotide
ttaattgctagcgaagtcaatttgacgcaaggaatcttattcacggtgttgaataagtat

SEQ ID NO: 3704 - DNA, 60 bp, Artificial
  Synthetic oligonucleotide
cagctcatgcttcgcgagaagcggatttgcctacttctcacactcactgcttggacgcac

SEQ ID NO: 3705 - DNA, 60 bp, Artificial
  Synthetic oligonucleotide
cagctcatgcttcgcaagaagcggatttgcctacttctcacactcactgcttggacgcac

SEQ ID NO: 3706 - DNA, 60 bp, Artificial
  Synthetic oligonucleotide
ctcactggtaatcgcagggcagaaaacagaaagctgttttcaacaaaacaaactagtaat

SEQ ID NO: 3707 - DNA, 59 bp, Artificial
  Synthetic oligonucleotide
ttttgttgaaaacagctttctgttttctgccctgcgattaccagtgagactttacgtct

SEQ ID NO: 3708 - DNA, 60 bp, Artificial
  Synthetic oligonucleotide
gacgtaaagtctcactggtaatcgcagggcagaaaacagaaagctgttttcaacaaaaca

SEQ ID NO: 3709 - DNA, 59 bp, Artificial
  Synthetic oligonucleotide
ttttgttgaaaacagctttctgttttctgccctgcgattaccagtgagactttgcgtct

SEQ ID NO: 3710 - DNA, 60 bp, Artificial
  Synthetic oligonucleotide
tggctgctgtcattgacgacgctttcggctccttcgatgctttccgtgcccagttcagcg

SEQ ID NO: 3711 - DNA, 60 bp, Artificial
  Synthetic oligonucleotide
gccgaagcgcgcgaaaagaatgatttcgccaacatcaaccgcctctccaaggacctcgcg

SEQ ID NO: 3712 - DNA, 60 bp, Artificial
  Synthetic oligonucleotide
tgaccgagtacgtactgcctgaactcagctacgactacgcagcgctggagccccacatct

SEQ ID NO: 3713 - DNA, 60 bp, Artificial
  Synthetic oligonucleotide
atgcggcggaaggttggtctggatggagtcgagagtggagttgttcgcacggatccgaag

SEQ ID NO: 3714 - DNA, 60 bp, Artificial
  Synthetic oligonucleotide
atgcggcggaaggctggtctggatggagtcgagagtggagttgttcgcactgatccgaag

SEQ ID NO: 3715 - DNA, 60 bp, Artificial
  Synthetic oligonucleotide
atgcggcgtgatgaactggaacggcctcattgtgtgtctccttgcgtctcagtgagcggc

SEQ ID NO: 3716 - DNA, 60 bp, Artificial
  Synthetic oligonucleotide
tgatgacccttgccgacgccgttgtcatccttgcccatcccacacttccggacatcacgg

SEQ ID NO: 3717 - DNA, 60 bp, Artificial
  Synthetic oligonucleotide
cggcagctggctccaccttcaacaattcgatgccgccgtcaccagtcacctaaccatcca

SEQ ID NO: 3718 - DNA, 60 bp, Artificial
  Synthetic oligonucleotide
ttcaattgcacaaggctcaccgacacaccgctcgaggaaacccgcagcagccgcgcaaaa

SEQ ID NO: 3719 - DNA, 60 bp, Artificial
  Synthetic oligonucleotide
tacgtcgttaatgccgcgcatcagcactgcgttaatcttcaccggcccgagaccagcagc

SEQ ID NO: 3720 - DNA, 60 bp, Artificial
  Synthetic oligonucleotide
taacactcatgagccgctattacctggccccaaacccacaatccctgcacacacgcgccg

SEQ ID NO: 3721 - DNA, 60 bp, Artificial
  Synthetic oligonucleotide
tttgcgcgctcgtcacgaccgccgcgtcgatctggccgcccttcgccgcagacaagattt

SEQ ID NO: 3722 - DNA, 60 bp, Artificial
  Synthetic oligonucleotide
agtcaacgccgccgccgcactcgccgcccgccacgtcgcctaacccgccacagaaccacc

SEQ ID NO: 3723 - DNA, 60 bp, Artificial
  Synthetic oligonucleotide
tgcagccagcccaaatgaccggaccaggccctgcctcagatcgcgattccatacccctga

SEQ ID NO: 3724 - DNA, 60 bp, Artificial
  Synthetic oligonucleotide
atctcgatgaacgccacaacccgagcctggtccgaaaagaacagcaaccaccgcggcgta

SEQ ID NO: 3725 - DNA, 60 bp, Artificial
  Synthetic oligonucleotide
acaaagcagcttcgtcgccgccttcgccgcccttcacttcaaggatcacgttgcgggcat

SEQ ID NO: 3726 - DNA, 60 bp, Artificial
  Synthetic oligonucleotide
ttcagcttccactgcgggcggcatcaaagtgaccaccatcgccgtcatgttcctggccat

SEQ ID NO: 3727 - DNA, 60 bp, Artificial
  Synthetic oligonucleotide
agcggtggagcggcccacgaagatcatgcctgccaggccagccaggacggacatgttcat

SEQ ID NO: 3728 - DNA, 60 bp, Artificial
  Synthetic oligonucleotide
tccgcgccgcaacgctccacgacgcccttgaacttctcgcggtcttcgccgagttcgatc

SEQ ID NO: 3729 - DNA, 60 bp, Artificial
  Synthetic oligonucleotide
atcctggacatcggccgcaccacccggatcttcccgccccacatccgcaaagccctcacc

SEQ ID NO: 3730 - DNA, 60 bp, Artificial
  Synthetic oligonucleotide
actgggctgctcgtccatcagcttccgccaccaggatctacccaccgccctgcacaccat

SEQ ID NO: 3731 - DNA, 60 bp, Artificial
  Synthetic oligonucleotide
gcctcagtcacaacgccctcgatctcaatgaccccgtccttcttggccatatcctccgct

SEQ ID NO: 3732 - DNA, 60 bp, Artificial
  Synthetic oligonucleotide
acccggtcttcaacacgcaccgctccgaaacccagctgctgcgctacatccgcaagctct

SEQ ID NO: 3733 - DNA, 60 bp, Artificial
  Synthetic oligonucleotide
gcggagggtcaggagtctcatgcgttcttgcgtccttcggtgtagctgcggttgaagttc

SEQ ID NO: 3734 - DNA, 60 bp, Artificial
  Synthetic oligonucleotide
aacctgaccggccagaaccacgagctggacaagcacttcgaccagcggctcatcaccatg

SEQ ID NO: 3735 - DNA, 60 bp, Artificial
  Synthetic oligonucleotide
tttcgatgtcctcgcgcacgaacgcccgcaccacccggatgccggtgagctgctcgcgta

SEQ ID NO: 3736 - DNA, 60 bp, Artificial
  Synthetic oligonucleotide
atcgcccacaccaccatctcgctgccgctgtccatctggctgatgtccagcttcttcgaa

SEQ ID NO: 3737 - DNA, 60 bp, Artificial
  Synthetic oligonucleotide
aatcgcgatgccccagtcctgccagtcgatcttgcccacctgcgaaaccatcatgaagcc

SEQ ID NO: 3738 - DNA, 60 bp, Artificial
  Synthetic oligonucleotide
aatagcggccatccatctacgaacgccgttgccgacgccctccagcggcctacccggaca

SEQ ID NO: 3739 - DNA, 60 bp, Artificial
  Synthetic oligonucleotide
agtcgttgaccactacttcttccacgtgcttgatgccgccgtcgagctcttcctgccagc

SEQ ID NO: 3740 - DNA, 60 bp, Artificial
  Synthetic oligonucleotide
gcctttgtctaccaagaagatagtcatcgaacgcacaaacatcgcaccaatcgccagacc

SEQ ID NO: 3741 - DNA, 60 bp, Artificial
  Synthetic oligonucleotide
gcgaatgtgcgtgcgtcagtgttcacggtgccaaccgtttaggtaccaactcattgcttg

SEQ ID NO: 3742 - DNA, 60 bp, Artificial
  Synthetic oligonucleotide
gcagatggtagccgccagtaaaatgcgccgtgcccaagagcgtatggaagttggtcgtcc

SEQ ID NO: 3743 - DNA, 60 bp, Artificial
  Synthetic oligonucleotide
ggggacgcgtctcagacggtggctataactggctgacttattttccgcaagccgctgcct

SEQ ID NO: 3744 - DNA, 60 bp, Artificial
  Synthetic oligonucleotide
gcacactcaagaccgccgcccatcgcatagccattgatcactgcaatgctaacgccgcga

SEQ ID NO: 3745 - DNA, 60 bp, Artificial
  Synthetic oligonucleotide
ctgacgtcagtggctttgagctgatacagcgctaccgtgctgctgaaaagcatacgcctg

SEQ ID NO: 3746 - DNA, 60 bp, Artificial
  Synthetic oligonucleotide
aaaagctgatcacggctggtacggcggtcgatccactgcggttggcggatgagtcgattg

SEQ ID NO: 3747 - DNA, 60 bp, Artificial
  Synthetic oligonucleotide
cggcagatcgcgcgcttgtaagtccagttctcgaccgatcaaacgggtatagctacacgg

SEQ ID NO: 3748 - DNA, 60 bp, Artificial
  Synthetic oligonucleotide
gtcggcggcaacgataccacacgcaactcgatgacgggtggggtatacgcacttaacctg

SEQ ID NO: 3749 - DNA, 60 bp, Artificial
  Synthetic oligonucleotide
cggtgcacgagtcaggacggtgtcgctggctgggtctgatttggcaggtgtgcattatct

SEQ ID NO: 3750 - DNA, 60 bp, Artificial
  Synthetic oligonucleotide
ccccagagcgtgctgccacctcacgtttggcgtgttgtatccaagtgaccgatgcaatgg

SEQ ID NO: 3751 - DNA, 60 bp, Artificial
  Synthetic oligonucleotide
atggacccacccaagcacgatgtgcagcggcaggccgtacaggatgtagtcgcaccaaaa

SEQ ID NO: 3752 - DNA, 60 bp, Artificial
  Synthetic oligonucleotide
tcgcccaattgcgaatcacgcagacgcgataccgcatcgtactcatacagcccctgctca

SEQ ID NO: 3753 - DNA, 60 bp, Artificial
  Synthetic oligonucleotide
ctacgacgcacacggtcaaccagtcccgactgcccatgctgcttggtattccagtcatcc

SEQ ID NO: 3754 - DNA, 60 bp, Artificial
  Synthetic oligonucleotide
cgcgtgaagccattcaagatggctggatgcacaccggtgacttggcgaccatggacgaag

SEQ ID NO: 3755 - DNA, 60 bp, Artificial
  Synthetic oligonucleotide
catccgccctgaacttcacggttcatgggtccccatcttacagcggcacttcggtcctca

SEQ ID NO: 3756 - DNA, 60 bp, Artificial
  Synthetic oligonucleotide
cccacgccaagctcggtgccaaacgctgccaagcaacatggtcacgcataacgcctattg

SEQ ID NO: 3757 - DNA, 60 bp, Artificial
  Synthetic oligonucleotide
cccatgccaagctcggtgccaaacgctgccaagcaacatggtcacgcataacgcctatcg

SEQ ID NO: 3758 - DNA, 60 bp, Artificial
  Synthetic oligonucleotide
gcgacctttacgaatcaattggttagttgttgccatgaggcatccttctcccgtttggta

SEQ ID NO: 3759 - DNA, 60 bp, Artificial
  Synthetic oligonucleotide
ccactcccggagacaagtgacagcctgcacacatatccttatagtccgcgccaccagagc

SEQ ID NO: 3760 - DNA, 60 bp, Artificial
  Synthetic oligonucleotide
ccactcccggagacaagtgacagcctgcacacatatcattatagtccgcgccaccagagc

SEQ ID NO: 3761 - DNA, 60 bp, Artificial
  Synthetic oligonucleotide
ccagccaagcgcacctgagtgtacgtgacctactgtccagtcggtgttatgcgatagggc

SEQ ID NO: 3762 - DNA, 60 bp, Artificial
  Synthetic oligonucleotide
cccgctaaatacaaccagccctcaagcgtccaaatataggtgatgtcactggcccacgct

SEQ ID NO: 3763 - DNA, 60 bp, Artificial
  Synthetic oligonucleotide
ggggcgcgtatcagacggtggctataactggctgacctactttccgcaagctgctgcctt

SEQ ID NO: 3764 - DNA, 60 bp, Artificial
  Synthetic oligonucleotide
ggttcaatgagcggtaaaggcaactgctttgacaacgcacccatagaaagcttctggggc

SEQ ID NO: 3765 - DNA, 60 bp, Artificial
  Synthetic oligonucleotide
gctgcggcgaacgagcatggtatcgctatggtcttcaccggtatgcgtcatttccgccac

SEQ ID NO: 3766 - DNA, 60 bp, Artificial
  Synthetic oligonucleotide
cggtagtaagtgcgctactgcatcacgctcttcgctaagctcttgctcagtggctgccat

SEQ ID NO: 3767 - DNA, 60 bp, Artificial
  Synthetic oligonucleotide
cccctacctcagaccctattggcgcagcatggcttatccgtcatgcaagcatcgagctgg

SEQ ID NO: 3768 - DNA, 60 bp, Artificial
  Synthetic oligonucleotide
ctgctgcgctttggctacttctgacgagacagaatgctgtgtggttgagattctctccag

SEQ ID NO: 3769 - DNA, 60 bp, Artificial
  Synthetic oligonucleotide
ccctaatatatagttgtaagtttgagagactgcggatctaagatcttccctcccaagcgc

SEQ ID NO: 3770 - DNA, 60 bp, Artificial
  Synthetic oligonucleotide
gggctatacctccctctacggctaaggcttcgaataaagcttcattttcatgccaactat

SEQ ID NO: 3771 - DNA, 60 bp, Artificial
  Synthetic oligonucleotide
tgcacctcactcggggcggaaaaggttgaggtcttgcgtgccgctttcaggtcgcgatat

SEQ ID NO: 3772 - DNA, 60 bp, Artificial
  Synthetic oligonucleotide
gctgacggagccacgcatcggtcgtatccgcacatggttttgctgaccatgcagacaagg

SEQ ID NO: 3773 - DNA, 60 bp, Artificial
  Synthetic oligonucleotide
gctgtcagttctacatcaccattgagcacttgagcatgttcacgctctcgatcttcacct

SEQ ID NO: 3774 - DNA, 60 bp, Artificial
  Synthetic oligonucleotide
caagccattgcaccaattctgcgatcggcaacattcaccacaccattggcaaccgctcgg

SEQ ID NO: 3775 - DNA, 60 bp, Artificial
  Synthetic oligonucleotide
cgctgtgctttgctgtctggtcgcttgcatgtgctgatcgtcaaactgcctcccgatcgg

SEQ ID NO: 3776 - DNA, 60 bp, Artificial
  Synthetic oligonucleotide
gcatgaccatgcacgactggcgataaaagagattgttgagatgcccaacagctatgccga

SEQ ID NO: 3777 - DNA, 60 bp, Artificial
  Synthetic oligonucleotide
cgcagcagccaaggccgcttccgtacctgcgtgaccgccaccgataacgataacatcata

SEQ ID NO: 3778 - DNA, 60 bp, Artificial
  Synthetic oligonucleotide
gttgtggctggcattatcttgtcactgttcggtgtcggtagttaccatggcgcgggtggc

SEQ ID NO: 3779 - DNA, 60 bp, Artificial
  Synthetic oligonucleotide
ctgcttaactcgcttgcgacaagagctctctgataacgtctttgcgatgtggattcgccc

SEQ ID NO: 3780 - DNA, 60 bp, Artificial
  Synthetic oligonucleotide
gcaaagccacctgtcatacctgcaccgaagttatggcctacttttccaagcacagtcacg

SEQ ID NO: 3781 - DNA, 60 bp, Artificial
  Synthetic oligonucleotide
ccagcggatcaatgcacgaatacggcgttccatatcctgatcgcctggcatcgcaggttc

SEQ ID NO: 3782 - DNA, 60 bp, Artificial
  Synthetic oligonucleotide
gcgcattcgagtccatgacacgctcaatctcgcctgctcggtcaccgagagcacctgatt

SEQ ID NO: 3783 - DNA, 60 bp, Artificial
  Synthetic oligonucleotide
gccacgccattgccaccgtcgccagcctctacggtaatgactgcttcatcaacaaagcgc

SEQ ID NO: 3784 - DNA, 60 bp, Artificial
  Synthetic oligonucleotide
gggcatccgggtgctccaatggggatggcagatattgctgatgtcgtctggcgcgagttt

SEQ ID NO: 3785 - DNA, 60 bp, Artificial
  Synthetic oligonucleotide
cttgctgaagccgcgcgtaatggtaaagaagtgaccgcagtgattgagctacgtgcccgt

SEQ ID NO: 3786 - DNA, 60 bp, Artificial
  Synthetic oligonucleotide
cgccctcatccgcgagtgcgcgaacgagcatttcaccaccagataaaagttccaacgtga

SEQ ID NO: 3787 - DNA, 60 bp, Artificial
  Synthetic oligonucleotide
ggccgttcagcaaaaccgtaaaagtcgctctcgccgtgacatgcgccgttcacatgacgc

SEQ ID NO: 3788 - DNA, 60 bp, Artificial
  Synthetic oligonucleotide
ggatagagcagttgcctcctaagcgaccgacgtgggttcgagtcccgcagagcgcatatt

SEQ ID NO: 3789 - DNA, 60 bp, Artificial
  Synthetic oligonucleotide
gaaccgaccatcccgcgccaaccgaccagacctactttcatgtcattttgcctcggtgcg

SEQ ID NO: 3790 - DNA, 60 bp, Artificial
  Synthetic oligonucleotide
gacgcgcgtgttcgtaccatcgctggttctgcacgttctatgggcttggaagtggagcta

SEQ ID NO: 3791 - DNA, 60 bp, Artificial
  Synthetic oligonucleotide
ggtggctgtgccatgatgtagtcccataagtgcgaagcagggtcaatacgtgaggttcga

SEQ ID NO: 3792 - DNA, 60 bp, Artificial
  Synthetic oligonucleotide
ctcccgcaccttctacatcctctgtggaagcagggatttgatcttcagcctcggttgctg

SEQ ID NO: 3793 - DNA, 60 bp, Artificial
  Synthetic oligonucleotide
gggtgttgcatccctctctccgtggattacagtgcgttccgttttacctggcttttccga

SEQ ID NO: 3794 - DNA, 60 bp, Artificial
  Synthetic oligonucleotide
gcggaagcggcaaaacgacaatcgctactcaattagcccgaggtctacagctgcaagggc

SEQ ID NO: 3795 - DNA, 60 bp, Artificial
  Synthetic oligonucleotide
ggtcagtgtgccagtcgttagaatgaggtcatggcgctcagctaatatctcaaccacacc

SEQ ID NO: 3796 - DNA, 60 bp, Artificial
  Synthetic oligonucleotide
gcgccaacaaggcgtgcgtcacctaggacaagtggaagtaggattgctcgaaacagatgg

SEQ ID NO: 3797 - DNA, 60 bp, Artificial
  Synthetic oligonucleotide
gcatacgattgagctgtccatggcgtgacttactgccctgttttggcaattggtctagcg

SEQ ID NO: 3798 - DNA, 60 bp, Artificial
  Synthetic oligonucleotide
ggtcctgcatacacacccggaacactaacgaccccgccacgacgcacagctgcaatacat

SEQ ID NO: 3799 - DNA, 60 bp, Artificial
  Synthetic oligonucleotide
ggcaacatggcaagggtgatgggtaccgcaccgcgtaagccaacccaagagataaagccg

SEQ ID NO: 3800 - DNA, 60 bp, Artificial
  Synthetic oligonucleotide
cacggcgcacaggcaagggcgatattccgcttgatcctgagtcgctagcagagttgcaac

SEQ ID NO: 3801 - DNA, 60 bp, Artificial
  Synthetic oligonucleotide
ccctttatcagcgccaagcagcccatgaatatgagtggtgatttctggggcaaccgctct

SEQ ID NO: 3802 - DNA, 60 bp, Artificial
  Synthetic oligonucleotide
ggcaacggcccaaactactggcagctcacggtctgctttaacacctgaaacttgctctgc

SEQ ID NO: 3803 - DNA, 60 bp, Artificial
  Synthetic oligonucleotide
acaagaagatgcgcaccgaggaggtcgacgccgaacgggccgactacctacgttacctat

SEQ ID NO: 3804 - DNA, 60 bp, Artificial
  Synthetic oligonucleotide
atctcgttctggtgtcacctggttcgattcccatcaccaccagcggcaagatccggcggt

SEQ ID NO: 3805 - DNA, 60 bp, Artificial
  Synthetic oligonucleotide
agttggggatgacagcctcaagccgactttcgaccgaagccagcagcgcagacgtgtagc

SEQ ID NO: 3806 - DNA, 60 bp, Artificial
  Synthetic oligonucleotide
acttctggaaggtgatctcgtgagctgcctgccggtcagcgtgctggtggtcgctaaagc

SEQ ID NO: 3807 - DNA, 60 bp, Artificial
  Synthetic oligonucleotide
atccgagatgctggcggctggtttccttgtggtggcctgggccgggtggtggcgcacagt

SEQ ID NO: 3808 - DNA, 60 bp, Artificial
  Synthetic oligonucleotide
tggtgttcctgttgcgcaccctgaacgccgctgacgtcgcgctgctcaaacagatcggtg

SEQ ID NO: 3809 - DNA, 60 bp, Artificial
  Synthetic oligonucleotide
attgctgcccaggtttgccagcccaaggttcagagtcatcgtgcccataccgtcgcgcat

SEQ ID NO: 3810 - DNA, 60 bp, Artificial
  Synthetic oligonucleotide
ccatcgttttgggccttccccgccttgccgccgggccaccgacgttcagcatcaccatca

SEQ ID NO: 3811 - DNA, 60 bp, Artificial
  Synthetic oligonucleotide
taggtgcaggagacagcggaggcgtggagcgtgatgacattggcatggtggccgcttccc

SEQ ID NO: 3812 - DNA, 60 bp, Artificial
  Synthetic oligonucleotide
cggagagctgagccgcctcgacagtaaccagcaaagcagccagaatcaagccacagccaa

SEQ ID NO: 3813 - DNA, 60 bp, Artificial
  Synthetic oligonucleotide
ttgaccggtggcgaactcgccgatcgcatcagccagtacatccaggcgttcgaggcgctc

SEQ ID NO: 3814 - DNA, 60 bp, Artificial
  Synthetic oligonucleotide
cgccgaaggcagcggcaacatcgtcgacatcatcaagaacctgcagatcttcgtcaccgc

SEQ ID NO: 3815 - DNA, 60 bp, Artificial
  Synthetic oligonucleotide
tcgtagaagtaggacacccggttggcgatgatcgagctgctggtgccggtgatcgcatac

SEQ ID NO: 3816 - DNA, 60 bp, Artificial
  Synthetic oligonucleotide
tgagctggtggagatcgcgcacaagatggccgaacagcgagacagcgtcttcgaacagtc

SEQ ID NO: 3817 - DNA, 60 bp, Artificial
  Synthetic oligonucleotide
tctctgttcctaccgcacgccactgacaactaccgaccactcaacccgcaacagctggca

SEQ ID NO: 3818 - DNA, 60 bp, Artificial
  Synthetic oligonucleotide
tttctgcaggtcaacgcccgcctccaatcccgcacagccgcgaccaactcgggaacaaaa

SEQ ID NO: 3819 - DNA, 60 bp, Artificial
  Synthetic oligonucleotide
atcaagatcaccatggacgtggtgcccaaccacaccagctcggcgcatccgtggttccag

SEQ ID NO: 3820 - DNA, 60 bp, Artificial
  Synthetic oligonucleotide
acaccgtgatcgccaccaaagtagaagttgttgagccagttggtgcggcgctcgttgccg

SEQ ID NO: 3821 - DNA, 60 bp, Artificial
  Synthetic oligonucleotide
tgcgcagtggacggcacgatgcaggactttccgttgacgatcaccgcgatcatgcgtcac

SEQ ID NO: 3822 - DNA, 60 bp, Artificial
  Synthetic oligonucleotide
aggtcatcatcgctgccacgccatattccttggtgaggccgttgccgcccatcgactgta

SEQ ID NO: 3823 - DNA, 60 bp, Artificial
  Synthetic oligonucleotide
tcgccgcgtcggagttgcccaatattggccggttcgttaccgtcttgtgatcgaacgggt

SEQ ID NO: 3824 - DNA, 60 bp, Artificial
  Synthetic oligonucleotide
tcatgatggtatgcccgaagggtgacatcaccgagtgtccgggagtggcgtgacggtggc

SEQ ID NO: 3825 - DNA, 60 bp, Artificial
  Synthetic oligonucleotide
ttgacgatggagatcggaatattcctcatgccggcccatccaccggagcgcaccctctac

SEQ ID NO: 3826 - DNA, 60 bp, Artificial
  Synthetic oligonucleotide
tcacgtagtcgtagccgtagcggtccaggtaggccaggatgcccgcccacatcagcagca

SEQ ID NO: 3827 - DNA, 60 bp, Artificial
  Synthetic oligonucleotide
tcccgttggcgtccaacaacatcaacagcgcatcgccctcgcagccgcggaaggtgaagt

SEQ ID NO: 3828 - DNA, 60 bp, Artificial
  Synthetic oligonucleotide
aacagcacctgatcggtgtcgccgcccagcaccatcgggttgaagcagatcacccgcgac

SEQ ID NO: 3829 - DNA, 60 bp, Artificial
  Synthetic oligonucleotide
ggtcgctagacctccagcagctcgccttctttgtgcttgaccagctcgtcgatttgggtg

SEQ ID NO: 3830 - DNA, 60 bp, Artificial
  Synthetic oligonucleotide
aggatcgggcccgggacgaacaacgcgccgagcacggccgacactacgacataggtcagc

SEQ ID NO: 3831 - DNA, 60 bp, Artificial
  Synthetic oligonucleotide
accgcaccgagtaccgctactccgacgtggtgaccagctcctacggccggggtttcctga

SEQ ID NO: 3832 - DNA, 60 bp, Artificial
  Synthetic oligonucleotide
gctgctgttcaactggatgagatggggccgcgcgctggaatacctcaagatcacctacgg

SEQ ID NO: 3833 - DNA, 60 bp, Artificial
  Synthetic oligonucleotide
acggcaacatcagctcctatttccacgtcaccgaaccgcaccacagcctgacggtgacca

SEQ ID NO: 3834 - DNA, 60 bp, Artificial
  Synthetic oligonucleotide
tacggcaagggaaggcatcgtgcggggctcaactacggcgactgcttctcatacggcctc

SEQ ID NO: 3835 - DNA, 60 bp, Artificial
  Synthetic oligonucleotide
acccaacaatatgccgagtcccaccgtcacctcgccgcaagtagccgtcaacgacatagg

SEQ ID NO: 3836 - DNA, 60 bp, Artificial
  Synthetic oligonucleotide
aactccacgcggacctcgaagcccagcaccaccacccgatccacaacagcccgtagcaca

SEQ ID NO: 3837 - DNA, 60 bp, Artificial
  Synthetic oligonucleotide
aagtatcttggtagtactgtgatatacgcaaagggcgccaccgcagcgcgccgggcatcc

SEQ ID NO: 3838 - DNA, 60 bp, Artificial
  Synthetic oligonucleotide
taccggttccaacccactcgatctcaagcccgcaaccgtgcagccgccgactcaggaagt

SEQ ID NO: 3839 - DNA, 60 bp, Artificial
  Synthetic oligonucleotide
ttacggctcttgtcgccacgcctacagcggattcgcataccgccggggttcattgacaac

SEQ ID NO: 3840 - DNA, 60 bp, Artificial
  Synthetic oligonucleotide
tgccagcaggggacgggcggccaggatctgtttgggcatctcggctacgcctcggcgtgc

SEQ ID NO: 3841 - DNA, 60 bp, Artificial
  Synthetic oligonucleotide
ttcgacttcgccgcccagcatcacatcgaggtcaccacgccggagtacccgcttggccaa

SEQ ID NO: 3842 - DNA, 60 bp, Artificial
  Synthetic oligonucleotide
atcaccccggccaccattaccaccactgcgacaagggccacgatcacgccgatactgact

SEQ ID NO: 3843 - DNA, 60 bp, Artificial
  Synthetic oligonucleotide
ccttgacgtgatggtcgatgaacctcaacagctcgccgtcgtgatcgaagtcgggtctgc

SEQ ID NO: 3844 - DNA, 60 bp, Artificial
  Synthetic oligonucleotide
tagatcccgccgaagtgaccgtggtgaccttccagctgtccgaactgtgcgagcagatcg

SEQ ID NO: 3845 - DNA, 60 bp, Artificial
  Synthetic oligonucleotide
cgtttggtctcccacgtcggggtcggtaacgaacttgaaggtcttcacgcgatgcgactg

SEQ ID NO: 3846 - DNA, 60 bp, Artificial
  Synthetic oligonucleotide
atctagccactccatcggacaccaaccacacaatccacgcccgtgtcacctgccccacca

SEQ ID NO: 3847 - DNA, 60 bp, Artificial
  Synthetic oligonucleotide
tcgttggcgaacagcatgatccgctgggccggggaggctaggcgtttggtgtgatacagc

SEQ ID NO: 3848 - DNA, 60 bp, Artificial
  Synthetic oligonucleotide
agtagtggtgggcgtggctggtcatgcggatcacatcggccatgggtagcagggtgccgc

SEQ ID NO: 3849 - DNA, 60 bp, Artificial
  Synthetic oligonucleotide
taggccggtgcgtcacagccgggtttggtgcagccgcggtcgttggcgaacagcatgatc

SEQ ID NO: 3850 - DNA, 60 bp, Artificial
  Synthetic oligonucleotide
acaacatgaacagcccggacacgatctggccgacggagttctgcagcatcaggccgatca

SEQ ID NO: 3851 - DNA, 60 bp, Artificial
  Synthetic oligonucleotide
tgatgctgcagaactccgtcggccagatcgtgtccgggctgttcatgttgttcgagcagc

SEQ ID NO: 3852 - DNA, 60 bp, Artificial
  Synthetic oligonucleotide
actggtcgtaccactcgaacgccggggtgttgatgtcccagccgctgaagtcgtcctgcg

SEQ ID NO: 3853 - DNA, 60 bp, Artificial
  Synthetic oligonucleotide
atggagtatcggtcatgatcttgccagccgtgcctaaaagcttggccgcagggccgagtc

SEQ ID NO: 3854 - DNA, 60 bp, Artificial
  Synthetic oligonucleotide
gccgtggtgatgcgggtatgagagtcgtttcgaggtcttggtctcacgctggggttgtac

SEQ ID NO: 3855 - DNA, 60 bp, Artificial
  Synthetic oligonucleotide
tacttcccgagctggagagtctggacgggttctgcagcgccagcctgatggtcgaccacc

SEQ ID NO: 3856 - DNA, 60 bp, Artificial
  Synthetic oligonucleotide
tgagcaccccgactagcgagttgatcgcggtcagcgagccggtcttggcccgcaaccacc

SEQ ID NO: 3857 - DNA, 60 bp, Artificial
  Synthetic oligonucleotide
aatgtcgtaggcgccgttgttgtagatgacggtggtgacgtcgaggttctcccgcgcttg

SEQ ID NO: 3858 - DNA, 60 bp, Artificial
  Synthetic oligonucleotide
ttccagcggggcgtcgtacttcttgtggtaagtcgcgtggtctccgacaaccaccaccat

SEQ ID NO: 3859 - DNA, 60 bp, Artificial
  Synthetic oligonucleotide
gcactagccgagacgatcaacggcctatacaagaccgagctgatcaaacccggcaagccc

SEQ ID NO: 3860 - DNA, 60 bp, Artificial
  Synthetic oligonucleotide
acctatgtgtcgacctgggcagggttcgcctacgtggcctttgtcaccgacgcctacgct

SEQ ID NO: 3861 - DNA, 60 bp, Artificial
  Synthetic oligonucleotide
tcagcacgattcggagtgggcagcgatcagtgaggtcgcccgtctacttggtgttggctg

SEQ ID NO: 3862 - DNA, 60 bp, Artificial
  Synthetic oligonucleotide
ttcttggaaaggatggggtcatgtcaggtggttcatcgaggaggtacccgccggagctgc

SEQ ID NO: 3863 - DNA, 60 bp, Artificial
  Synthetic oligonucleotide
ccagcacacatgtctatctccgtacgcagctgcccacaacgctcaccttgccggccttta

SEQ ID NO: 3864 - DNA, 60 bp, Artificial
  Synthetic oligonucleotide
cccacaacgctcaccttgccggcctttaaagccactggcccactgctcactgcatagcta

SEQ ID NO: 3865 - DNA, 60 bp, Artificial
  Synthetic oligonucleotide
aaagcaacccgcaaacacgcgggccccacccttgctggtgatctcacgcacgatccccac

SEQ ID NO: 3866 - DNA, 60 bp, Artificial
  Synthetic oligonucleotide
acctgcaggtagggatcgtcgtcgcctaccgaatacaccacgaagccgtccaccccagcg

SEQ ID NO: 3867 - DNA, 60 bp, Artificial
  Synthetic oligonucleotide
tggtcagcgagtaccgctccatctcttcacgggacaggttccacttctcggcgatcagct

SEQ ID NO: 3868 - DNA, 60 bp, Artificial
  Synthetic oligonucleotide
ccgaggtgcgcagccaactggcgatgacctggggcaccgagacgttcatcgtgccgaaga

SEQ ID NO: 3869 - DNA, 60 bp, Artificial
  Synthetic oligonucleotide
cccgatcacgatctcgatgcggttgcggcagtacagaccgaccttgtcgtccttcttcac

SEQ ID NO: 3870 - DNA, 60 bp, Artificial
  Synthetic oligonucleotide
ggtgtccatggtgtcaccacatcgggacaaaactggcgcaccacacgggcgtttcttgct

SEQ ID NO: 3871 - DNA, 60 bp, Artificial
  Synthetic oligonucleotide
actcgtcggagcccagggtgtcgaaaacctcgtgatacagcaacgcatgcacctcccgca

SEQ ID NO: 3872 - DNA, 60 bp, Artificial
  Synthetic oligonucleotide
tcgggtcgtgtccccaaaggtcgtcgccgaagccgagattcacaccgatcaggtcgtctt

SEQ ID NO: 3873 - DNA, 60 bp, Artificial
  Synthetic oligonucleotide
tgttcgccggccagagctaccaggagcccgccgccaacgtcgccgagtattacgaccttc

SEQ ID NO: 3874 - DNA, 60 bp, Artificial
  Synthetic oligonucleotide
tgatctcgaacgaatacagccagccccgccgcagctccgacgacaggtacatcccggaca

SEQ ID NO: 3875 - DNA, 60 bp, Artificial
  Synthetic oligonucleotide
aagaggttcggatggcggtcggcgtagtcctggatgattcggggtgtggcatcggttgag

SEQ ID NO: 3876 - DNA, 60 bp, Artificial
  Synthetic oligonucleotide
gcgccggctgcctccacgcggtagagaaatatcctgtcatcgacgtgcgaacactgcatt

SEQ ID NO: 3877 - DNA, 60 bp, Artificial
  Synthetic oligonucleotide
tcgacggcgatctctacgaatccaccatccaggcgctcgacgcgctgtacccgcgactgt

SEQ ID NO: 3878 - DNA, 60 bp, Artificial
  Synthetic oligonucleotide
atggccgtctacgactggatgtgctggcggatgaacaagaaggccgaggacaggcagcgc

SEQ ID NO: 3879 - DNA, 60 bp, Artificial
  Synthetic oligonucleotide
ttccaggaggtcggcggtggtctcgatgctttcggcgggcttggtcatccgggcggccaa

SEQ ID NO: 3880 - DNA, 60 bp, Artificial
  Synthetic oligonucleotide
tgaacgacgcgccggatacaccaaacaggccgtctctcaagggtttcacggtcatgcgca

SEQ ID NO: 3881 - DNA, 60 bp, Artificial
  Synthetic oligonucleotide
accgacacgtgggaagacggcactaacggcggcctgctcgggatcaccgacctgttgctg

SEQ ID NO: 3882 - DNA, 60 bp, Artificial
  Synthetic oligonucleotide
acgaaagccttccgctatgtacgacccgctggggttgtcgatcgggaccacaaacctggt

SEQ ID NO: 3883 - DNA, 60 bp, Artificial
  Synthetic oligonucleotide
ttcgacggtgaatcccggtgtgccgctgggcacgatgatggtggagatctccttcttgtc

SEQ ID NO: 3884 - DNA, 60 bp, Artificial
  Synthetic oligonucleotide
agtagagggcgccgaagaaggagatgaggtagtccaggttctgcgggcacaggatggcga

SEQ ID NO: 3885 - DNA, 60 bp, Artificial
  Synthetic oligonucleotide
gggcgccggggtcatcttggtcttgggtatgtcgtagaactcgccgtggaactcgaagta

SEQ ID NO: 3886 - DNA, 60 bp, Artificial
  Synthetic oligonucleotide
aatcagcgcaacggctaccgccaccgtgatttcgacacccgtgccgcaaccatcgacgtc

SEQ ID NO: 3887 - DNA, 60 bp, Artificial
  Synthetic oligonucleotide
aacacctcgttgcgcaggtacaggctcttgcccatcttgcgatgctgggcgccgaatccg

SEQ ID NO: 3888 - DNA, 60 bp, Artificial
  Synthetic oligonucleotide
gaccttctcgatccacgccgcgaacacctcgttgcgcaggtacaggctcttgcccatctt

SEQ ID NO: 3889 - DNA, 60 bp, Artificial
  Synthetic oligonucleotide
tctaccttcggccaaggccagggacgtggtgtacgagtgaaggttcctcgcgtgatcctt

SEQ ID NO: 3890 - DNA, 60 bp, Artificial
  Synthetic oligonucleotide
atattgggcaacaactgattcggcgtcgggctggtcgtagatggagtgcagcagggtgcg

SEQ ID NO: 3891 - DNA, 60 bp, Artificial
  Synthetic oligonucleotide
ttacggccgcaatcattctcccgacgacatcgaggcaacgatccaggagatcactcgggg

SEQ ID NO: 3892 - DNA, 60 bp, Artificial
  Synthetic oligonucleotide
ttcgaggcgaagaacaggccgaggccacccaggccgccggtgatgatgtaggagccgtcg

SEQ ID NO: 3893 - DNA, 60 bp, Artificial
  Synthetic oligonucleotide
aacaaagtcatcctggtgctcgccaccgtcgtcggcatgttcatggccttcaacgtcggc

SEQ ID NO: 3894 - DNA, 60 bp, Artificial
  Synthetic oligonucleotide
actggcccaggcgcgacgaacggaacaccagccatgtcagtaagtgcggcactgcacgct

SEQ ID NO: 3895 - DNA, 60 bp, Artificial
  Synthetic oligonucleotide
aatccgaagcggccctcaccagcgtctcgggagcggcgattacaaacgacatgctttcct

SEQ ID NO: 3896 - DNA, 60 bp, Artificial
  Synthetic oligonucleotide
acgagatcatcgtcgagacaacagattccggcttgacggtgactgtagacggcgagggcg

SEQ ID NO: 3897 - DNA, 60 bp, Artificial
  Synthetic oligonucleotide
tggcagcagttcttcaccgaagccgagcacctgcgctactaccaccgcatcaaccagctg

SEQ ID NO: 3898 - DNA, 60 bp, Artificial
  Synthetic oligonucleotide
atcatgcccgcctacaccgtcaccgttctgttggcctacctcgtctatcacttccgcacg

SEQ ID NO: 3899 - DNA, 60 bp, Artificial
  Synthetic oligonucleotide
atcggtgtacgggttgaaattccgccgcacagacccctcggacagtgtggccagcatttc

SEQ ID NO: 3900 - DNA, 60 bp, Artificial
  Synthetic oligonucleotide
actcgtcgcagcggttgtactcgtgggcgcaagagcggccctacaccacgccatttgtca

SEQ ID NO: 3901 - DNA, 60 bp, Artificial
  Synthetic oligonucleotide
agatcaggaagcgatttcttgatcacttcgtgaaggcgggccacaccgaggtgccgagcg

SEQ ID NO: 3902 - DNA, 60 bp, Artificial
  Synthetic oligonucleotide
tttccttgtgtcacttggactcccggtcatcgtcgaccacctccgcgtccacaacgtcgt

SEQ ID NO: 3903 - DNA, 60 bp, Artificial
  Synthetic oligonucleotide
atttgaggagcttgacgaatggccgctgtgtgcgatatctgcgggaaaggccccggcttc

SEQ ID NO: 3904 - DNA, 60 bp, Artificial
  Synthetic oligonucleotide
cggtatcggagtcagcgaccgggaacacattgagccggttgatctcgtcgatgtggagga

SEQ ID NO: 3905 - DNA, 60 bp, Artificial
  Synthetic oligonucleotide
atcgacgaggagacagtcgatttcattcccaactacgacggccgggtgcaagagccgacg

SEQ ID NO: 3906 - DNA, 60 bp, Artificial
  Synthetic oligonucleotide
ggggccgccaggtaggggataacacgatcaacccatgaaaatcaccggaacccttgtcag

SEQ ID NO: 3907 - DNA, 60 bp, Artificial
  Synthetic oligonucleotide
ggggccgccaggtaggggataacacgatcaacccatgaaaatcaccggaaccctcgtcag

SEQ ID NO: 3908 - DNA, 60 bp, Artificial
  Synthetic oligonucleotide
aagatcgacggcgaccacatcgtggtgaagttctccatcggcaccaacaccatcggcacc

SEQ ID NO: 3909 - DNA, 60 bp, Artificial
  Synthetic oligonucleotide
tgggccagagcaccacgccgtaccagatttacgacgcgttcttcgacgtcaccaaggccg

SEQ ID NO: 3910 - DNA, 60 bp, Artificial
  Synthetic oligonucleotide
acatcaacatctcgctgacgctggacctgacctacagcgccgtcgacaacgcgttcctca

SEQ ID NO: 3911 - DNA, 60 bp, Artificial
  Synthetic oligonucleotide
acctgatcggccagcacatcggtgagaccgaggccaagaccaacgcgatcatcgacgccg

SEQ ID NO: 3912 - DNA, 60 bp, Artificial
  Synthetic oligonucleotide
aaccacctgccggatcagccgtgggatccgatgatcgactaccagatgatgagccgcttc

SEQ ID NO: 3913 - DNA, 60 bp, Artificial
  Synthetic oligonucleotide
tgtgcacgagcatcaccgcgatcgacatgacgatggcctgcaggaacgaccacagcagat

SEQ ID NO: 3914 - DNA, 60 bp, Artificial
  Synthetic oligonucleotide
ttagttgaacgccagccagctgggcagcgcccgctcatgggagtcacagagcacctgacg

SEQ ID NO: 3915 - DNA, 60 bp, Artificial
  Synthetic oligonucleotide
ttcatcacccagttgggtcgcaacttccaggtgatctacgagcaggccaacgcccacggc

SEQ ID NO: 3916 - DNA, 60 bp, Artificial
  Synthetic oligonucleotide
aatggccgctgtgtgcgatatctgcgggaaaggtcccggcttcggcaagtcggtatcaca

SEQ ID NO: 3917 - DNA, 60 bp, Artificial
  Synthetic oligonucleotide
tcaggcactggtacgtgacgatcccgcttcgtcttggtcgtcgactcaacgatgcccttg

SEQ ID NO: 3918 - DNA, 60 bp, Artificial
  Synthetic oligonucleotide
tccggatctaccggctcccctaaagccgtccagatcacccaccgcaacatctactccaac

SEQ ID NO: 3919 - DNA, 60 bp, Artificial
  Synthetic oligonucleotide
atcgatgaccgtcgcaccctgcgaatagccaccaagcacaatcctggtgttcgggcagct

SEQ ID NO: 3920 - DNA, 60 bp, Artificial
  Synthetic oligonucleotide
tgatgaggtatcggcggcggtggcagcgctgtttgccaggttcggtcaggaatatcaagc

SEQ ID NO: 3921 - DNA, 60 bp, Artificial
  Synthetic oligonucleotide
atggtgatcgaggcggaggggcggcgtgtcatttctggtcgtggttcccgagttcttgac

SEQ ID NO: 3922 - DNA, 60 bp, Artificial
  Synthetic oligonucleotide
ttcagcgccttgctggccgatccgacaacaactccgttcgaagcctatttcggtgccgtc

SEQ ID NO: 3923 - DNA, 60 bp, Artificial
  Synthetic oligonucleotide
actacatcttcgccacgtataccacgacggtggacttcgggaatggcatcgtcaccgcgc

SEQ ID NO: 3924 - DNA, 60 bp, Artificial
  Synthetic oligonucleotide
tgcgcccaacgtcgaggtcgtcggatcgccgatcaccaccctgtacgtaaagatcgatgg

SEQ ID NO: 3925 - DNA, 60 bp, Artificial
  Synthetic oligonucleotide
gccgcgaatgtcgccgcctggcttgtcatccccgactgaacatacgaaacatgcgccata

SEQ ID NO: 3926 - DNA, 60 bp, Artificial
  Synthetic oligonucleotide
tttccctgaccaccagcacctggccgacctgctgctccaacgacttgatgcgctgactga

SEQ ID NO: 3927 - DNA, 60 bp, Artificial
  Synthetic oligonucleotide
atgcgaacaaggctgcgtggagtcatctgcacatgctgacatactgccggcgaccgaggt

SEQ ID NO: 3928 - DNA, 60 bp, Artificial
  Synthetic oligonucleotide
tagccttaggcgatgaccgactctgtggtcgtccgcgtcaagcccggcagtcacaaagga

SEQ ID NO: 3929 - DNA, 60 bp, Artificial
  Synthetic oligonucleotide
cgccctcaccgtgtcggtaattcgcgcgatgatcggactgtccagtttccagcattgcca

SEQ ID NO: 3930 - DNA, 60 bp, Artificial
  Synthetic oligonucleotide
taagttcaacctgtttgaggaagcgggtccagcaaggccgggacatcgagaccaagccgc

SEQ ID NO: 3931 - DNA, 60 bp, Artificial
  Synthetic oligonucleotide
aaggccttacgcaccaacatgtcctgcagcccatcgtcacgattccacgccagtgacgga

SEQ ID NO: 3932 - DNA, 60 bp, Artificial
  Synthetic oligonucleotide
tgctgaggatctgctgggaggcctgctcttgctgttcgtagttgttggcgtcgcgaacca

SEQ ID NO: 3933 - DNA, 60 bp, Artificial
  Synthetic oligonucleotide
agaatcgttgttgccctgctcgattgagggcaccgaggtgatgtgcgtctggtcgctgac

SEQ ID NO: 3934 - DNA, 60 bp, Artificial
  Synthetic oligonucleotide
atctcgtcggcacggcgcagggtcaccgtgatggcagcggcaagcaggtcgatcagctcg

SEQ ID NO: 3935 - DNA, 60 bp, Artificial
  Synthetic oligonucleotide
aaccgtgaggccagcatgcgctgcaccaccagcacaccctcggcgatcaccaacgccttg

SEQ ID NO: 3936 - DNA, 60 bp, Artificial
  Synthetic oligonucleotide
ttccttttgggcagcgtggaaccgcccatcatcgaaagacctcgacccctaccccggcaa

SEQ ID NO: 3937 - DNA, 60 bp, Artificial
  Synthetic oligonucleotide
aatgtccagcagcgtcatgcccggcttgaggtccagcttgtccaggttgaggtcgacctt

SEQ ID NO: 3938 - DNA, 60 bp, Artificial
  Synthetic oligonucleotide
tctccagcgactggccgttcatggtgagcaaggactcggccgccgattacgcccgctacc

SEQ ID NO: 3939 - DNA, 60 bp, Artificial
  Synthetic oligonucleotide
aaaagaaccagaacgccacccacagcccgtggtcgacggtgtcgccgccgatgatgctgg

SEQ ID NO: 3940 - DNA, 60 bp, Artificial
  Synthetic oligonucleotide
tgaggcagcgtagtgctgcgcgtttggttttcccggcgtcttgcagcctttggtagtagg

SEQ ID NO: 3941 - DNA, 60 bp, Artificial
  Synthetic oligonucleotide
tttggtagtaggcctggccccggctgtcggtcatccggatttgggtcagtgcgatgcggt

SEQ ID NO: 3942 - DNA, 60 bp, Artificial
  Synthetic oligonucleotide
tgatgcgctgggctagggtgttgatctcgccggtgagccggatgatgtcggtcagctcgg

SEQ ID NO: 3943 - DNA, 60 bp, Artificial
  Synthetic oligonucleotide
tcgccgacgtgcgttgggccacaaggacatctcgacggtcagtcaacaacttcaactccc

SEQ ID NO: 3944 - DNA, 60 bp, Artificial
  Synthetic oligonucleotide
cgacccacttcgtcggtggccacaaaggtgtggctgtacttgtgcgcatcggttccaaca

SEQ ID NO: 3945 - DNA, 60 bp, Artificial
  Synthetic oligonucleotide
agcgggcgttgatcccctcgatgtcgagctcgtagtccacgtccatgtactcgagcaagt

SEQ ID NO: 3946 - DNA, 60 bp, Artificial
  Synthetic oligonucleotide
gcctgcgaggagaagccatgcgggaactcaaagtcgttgggctcgatgccgacggcaaaa

SEQ ID NO: 3947 - DNA, 60 bp, Artificial
  Synthetic oligonucleotide
cggccacgtgaatggacatcactcgttccatgatcggatgcagcgacttgccttcgcgca

SEQ ID NO: 3948 - DNA, 60 bp, Artificial
  Synthetic oligonucleotide
agtcccattgccggctgcgctaccgaccccagcaccactgccacccgggtccgcgacacc

SEQ ID NO: 3949 - DNA, 60 bp, Artificial
  Synthetic oligonucleotide
gtagacctcttcggaggtgacctcgatggccttgtccttattggactgcagcgtgtcccc

SEQ ID NO: 3950 - DNA, 60 bp, Artificial
  Synthetic oligonucleotide
tgatggtgttcggcgatgccaggtcaggaaagacgacgctgctgcgccacatcatccgca

SEQ ID NO: 3951 - DNA, 60 bp, Artificial
  Synthetic oligonucleotide
cccgacactgttcgtggtcgccgacgagttcaccttgatgctggccgatcacccggaata

SEQ ID NO: 3952 - DNA, 60 bp, Artificial
  Synthetic oligonucleotide
ggacctgcgcccggaactcctcgacgtcctgcatgccctgtaggctaacctaccaagcac

SEQ ID NO: 3953 - DNA, 60 bp, Artificial
  Synthetic oligonucleotide
tcggtcttggccaccgcgaagaactccgaatcgaagcccttgatgtccttcaggtagccg

SEQ ID NO: 3954 - DNA, 60 bp, Artificial
  Synthetic oligonucleotide
agtcactcgcggtcaacacatcagaaatgatggcctgatgctcggcctccagcaacccgg

SEQ ID NO: 3955 - DNA, 60 bp, Artificial
  Synthetic oligonucleotide
tttggaattggaccttgatgtcacggcccatcgacggcgacggcacctgcaggtactcca

SEQ ID NO: 3956 - DNA, 60 bp, Artificial
  Synthetic oligonucleotide
tagaaattgaggaaacatgcccaaggccaagacccacagcggggcctcgaagcggttccg

SEQ ID NO: 3957 - DNA, 60 bp, Artificial
  Synthetic oligonucleotide
tcgtagatcacctggaagttacggcccaactgggtaatgaacccctggcaggccgccgaa

SEQ ID NO: 3958 - DNA, 60 bp, Artificial
  Synthetic oligonucleotide
ccctcgatggaccagctcaggttgaaccgcttctcgacgatgtagccgacgtattctcgc

SEQ ID NO: 3959 - DNA, 60 bp, Artificial
  Synthetic oligonucleotide
tccaggtgaactgccagttggtgttcgaccacgacgtgcccttcggcggatacaagcagt

SEQ ID NO: 3960 - DNA, 60 bp, Artificial
  Synthetic oligonucleotide
tagaccagtcgccggttggtcggttacgaccccttggtgtagcggctcaggaacccgatt

SEQ ID NO: 3961 - DNA, 60 bp, Artificial
  Synthetic oligonucleotide
acagccagccgaatgtcatcccgaggtagacaagccagaacagccgaaagacgctccacg

SEQ ID NO: 3962 - DNA, 60 bp, Artificial
  Synthetic oligonucleotide
tgtcggaaggttcgccggtgaacgtgtcgcgagttgccctggtccccatcgccgtcctgg

SEQ ID NO: 3963 - DNA, 60 bp, Artificial
  Synthetic oligonucleotide
atcccttctgtgcgtagacaatccgtgggacaggcagatgcaccgggtgacgttcgacgg

SEQ ID NO: 3964 - DNA, 60 bp, Artificial
  Synthetic oligonucleotide
tgctataacgcacgtatgtcaggcccagggcacaccatcacccatgtttccgacacggcg

SEQ ID NO: 3965 - DNA, 60 bp, Artificial
  Synthetic oligonucleotide
atggactggctggaggacaacaaggccagcaccaaccacatcctcggcttcccgttcacc

SEQ ID NO: 3966 - DNA, 60 bp, Artificial
  Synthetic oligonucleotide
ttgcggtcaccggagagccggtagatcagcgcctggtcctcacgggtcagcatatcgatt

SEQ ID NO: 3967 - DNA, 60 bp, Artificial
  Synthetic oligonucleotide
tcacgagcattccggttgttcaaccacccgtccagttgccagcgcacccggtcggcggtg

SEQ ID NO: 3968 - DNA, 60 bp, Artificial
  Synthetic oligonucleotide
ggccggtcaacaagccgccgacaccgataccagcggcagaaatggtgcaagggataacat

SEQ ID NO: 3969 - DNA, 60 bp, Artificial
  Synthetic oligonucleotide
cgctagaaggttgccgtatgtgccgccgacggccggatcatcgatgcactgttcactaac

SEQ ID NO: 3970 - DNA, 60 bp, Artificial
  Synthetic oligonucleotide
agcaggcatgccgccgggtgcagcagtatcgtgttagtgaacagtgcatcgatgatccgg

SEQ ID NO: 3971 - DNA, 60 bp, Artificial
  Synthetic oligonucleotide
ggcatcatcaacatgtagaccaagcagcatccaccaccgacatgcttacgtgcgccgcgc

SEQ ID NO: 3972 - DNA, 60 bp, Artificial
  Synthetic oligonucleotide
cctgttcaggtgcggccacattgaccacgccgacacctcaaggccatgacatgcacacta

SEQ ID NO: 3973 - DNA, 60 bp, Artificial
  Synthetic oligonucleotide
ggtgtgaggatagttgttagcgccgcggggtaggggcgttttagtgtgcatgtcatggcc

SEQ ID NO: 3974 - DNA, 60 bp, Artificial
  Synthetic oligonucleotide
aactatcctcacactcacgcctgcatcgatatcgccttcagcacagcccaggtgcccagc

SEQ ID NO: 3975 - DNA, 60 bp, Artificial
  Synthetic oligonucleotide
acatgttgatgatgccaggggctgggcacctgggctgtgctgaaggcgatatcgatgcag

SEQ ID NO: 3976 - DNA, 60 bp, Artificial
  Synthetic oligonucleotide
aagcatgtcggtggtgggtgctgcttggtctacatgttgatgatgccaggggctgggcac

SEQ ID NO: 3977 - DNA, 60 bp, Artificial
  Synthetic oligonucleotide
tggtgagtggctgactgcctgctttcgatgaggcttcgtgtgctttgccgcagtggacac

SEQ ID NO: 3978 - DNA, 60 bp, Artificial
  Synthetic oligonucleotide
ccactgcggcaaagcacacgaagcctcatcgaaagcaggcagtcagccacccaccaacaa

SEQ ID NO: 3979 - DNA, 60 bp, Artificial
  Synthetic oligonucleotide
tgccggtaaccccatacctgttcgagcagcacatcacgagtaaacacctggcgcggcttg

SEQ ID NO: 3980 - DNA, 60 bp, Artificial
  Synthetic oligonucleotide
aagctcgacggcgtggtgcactccatcggtttcatgccgcagaccgggatgggcatcaac

SEQ ID NO: 3981 - DNA, 60 bp, Artificial
  Synthetic oligonucleotide
cacgttgacaaacgacatcgaaatcctcctgaccgcgacgatgttgagatgcgggcggcc

SEQ ID NO: 3982 - DNA, 60 bp, Artificial
  Synthetic oligonucleotide
ttgacaaacgacatcgaaatcctcctgaccgccacgatgttgagatgcgggcggcccacc

SEQ ID NO: 3983 - DNA, 60 bp, Artificial
  Synthetic oligonucleotide
ttgatagtgctggccgtggctgccgaacagcgccgcgatcgccgttgacacctcgtcttg

SEQ ID NO: 3984 - DNA, 60 bp, Artificial
  Synthetic oligonucleotide
ttcggcgaccgcgtaggtgctgccagcttggcttaaggccagcacgaaccgttcctgata

SEQ ID NO: 3985 - DNA, 60 bp, Artificial
  Synthetic oligonucleotide
taggtcgtagcggtcggcgacatcgagcaacacgtcacgggtgtgggtggttcgagagtc

SEQ ID NO: 3986 - DNA, 60 bp, Artificial
  Synthetic oligonucleotide
atgatccgcgcgtcgggttacatcccgcagatctcggtggtcgtcggtttcgccgcaggc

SEQ ID NO: 3987 - DNA, 60 bp, Artificial
  Synthetic oligonucleotide
aaccccgaggacctcaccgaacgccaaagcgccaaactggcctggatcgccaagaccgat

SEQ ID NO: 3988 - DNA, 60 bp, Artificial
  Synthetic oligonucleotide
atctcctgggcccagcgctgtcgcatcccggtattcgtcgagcttgccgcccgcatcaaa

SEQ ID NO: 3989 - DNA, 60 bp, Artificial
  Synthetic oligonucleotide
tgacgtggtcaccgagcgctgcccggatgcgattcaatgcgccgatccgtttcatgtggt

SEQ ID NO: 3990 - DNA, 60 bp, Artificial
  Synthetic oligonucleotide
ggctcttctgacacttccgtgggtgagtttgtgtcctgagtaggcgcacgtcgttgtggc

SEQ ID NO: 3991 - DNA, 60 bp, Artificial
  Synthetic oligonucleotide
tactccgtcgagaactcgaccagaacaggagacgacggatggaaggagatgctggcgcca

SEQ ID NO: 3992 - DNA, 60 bp, Artificial
  Synthetic oligonucleotide
ataggcctccagtagggtgaactccgggttgtggctgaagtcgacgccctcgttgcgaaa

SEQ ID NO: 3993 - DNA, 60 bp, Artificial
  Synthetic oligonucleotide
ttcagtgaaagggacagcgtggctgaccgcctgatcgtcaagggtgcgcgcgaacacaat

SEQ ID NO: 3994 - DNA, 60 bp, Artificial
  Synthetic oligonucleotide
aaagacagtggcgcgtaggcccaacgacggcaacagccacgactcgaggtagtggaattg

SEQ ID NO: 3995 - DNA, 60 bp, Artificial
  Synthetic oligonucleotide
taccgcaaagccaaagagcagcagctgcattcactgaactacgcctaccgtgaccgccgg

SEQ ID NO: 3996 - DNA, 60 bp, Artificial
  Synthetic oligonucleotide
tgaaacgatctcgtggctagcggtgggagtgggactccacttaactgtccctggccttcg

SEQ ID NO: 3997 - DNA, 60 bp, Artificial
  Synthetic oligonucleotide
tccactaccagaacaagtacaaggtgccggccaatgcctccgcggtgatcctcaacccga

SEQ ID NO: 3998 - DNA, 60 bp, Artificial
  Synthetic oligonucleotide
aaaatcgaggccgagatcgccgatctggaagacatcctggcaaaacccgagcggcagcgt

SEQ ID NO: 3999 - DNA, 60 bp, Artificial
  Synthetic oligonucleotide
ccttctggatgaacccggccttctccatcgtcggcaacagcaggtcgtagttcttgtcgc

SEQ ID NO: 4000 - DNA, 60 bp, Artificial
  Synthetic oligonucleotide
acatcacccgccggttggtcaccacgaaatgtgtggtcagccagctcaggaatggccaca

SEQ ID NO: 4001 - DNA, 60 bp, Artificial
  Synthetic oligonucleotide
cgtttcacaggctcaacagatgtcaatagtgtgagttcgctcgtgggctatctcactttg

SEQ ID NO: 4002 - DNA, 60 bp, Artificial
  Synthetic oligonucleotide
atcctgcacaacgcgtcgtcggtggcggtggtggccaacagttcccggttgatccgctac

SEQ ID NO: 4003 - DNA, 60 bp, Artificial
  Synthetic oligonucleotide
tgttccagggccagggcggcaccatcaacgacatcctcgaccagaccgcgcagctgacca

SEQ ID NO: 4004 - DNA, 60 bp, Artificial
  Synthetic oligonucleotide
tgatcgccggcatcgtcgccgtcatcgcgtcctacgtgttgaacagggagtggagcttcc

SEQ ID NO: 4005 - DNA, 60 bp, Artificial
  Synthetic oligonucleotide
atgacgttctcggcgaacatctccagattgcggatcttggtctgcagcggctcggtgtcg

SEQ ID NO: 4006 - DNA, 60 bp, Artificial
  Synthetic oligonucleotide
tgaacctggcccgggtacatgccaaggccgaagtcctcaagctgatcaactgggagttgg

SEQ ID NO: 4007 - DNA, 60 bp, Artificial
  Synthetic oligonucleotide
aacctcgggcatcaacgggtggttctacgtcggcaactacggggtgccgtggtatgacat

SEQ ID NO: 4008 - DNA, 60 bp, Artificial
  Synthetic oligonucleotide
gctcgcgatccccgacgatgtcctcgaactcatcgccagcagtatcgaacgcaatatccg

SEQ ID NO: 4009 - DNA, 60 bp, Artificial
  Synthetic oligonucleotide
ttgtagtgccagaagtagccggcgtcgaacatcgcgccccagccgttcaacaggatccgg

SEQ ID NO: 4010 - DNA, 60 bp, Artificial
  Synthetic oligonucleotide
tcaaggagtacggactgcaggacgccaacaccctggaggccacccagtcgatggtcgagt

SEQ ID NO: 4011 - DNA, 60 bp, Artificial
  Synthetic oligonucleotide
tgtgatgtagaagatgtcgtagagccaccagccgatgacggggaacacgaccccggcgta

SEQ ID NO: 4012 - DNA, 60 bp, Artificial
  Synthetic oligonucleotide
tggttcgccagatcccgtacacgatcgcgtgcgacctgctgctgaccggacggcacatca

SEQ ID NO: 4013 - DNA, 60 bp, Artificial
  Synthetic oligonucleotide
aatcgtcaaggtccaggaactggcgatcaagaccggccgtccgctcatcggcatcaacga

SEQ ID NO: 4014 - DNA, 60 bp, Artificial
  Synthetic oligonucleotide
tgccgacgcgctgcagtcgttgttcgacaagaccgggcatccgtttctgcaacatctgct

SEQ ID NO: 4015 - DNA, 60 bp, Artificial
  Synthetic oligonucleotide
tctacatcgcgcaacgtctgtaccgggagagtcatcggagggtctccaaaggggccacag

SEQ ID NO: 4016 - DNA, 60 bp, Artificial
  Synthetic oligonucleotide
cgtcaacgccgactccaggtcgtagacatcggttttcgggtaggtgcgcacggtcttgga

SEQ ID NO: 4017 - DNA, 57 bp, Artificial
  Synthetic oligonucleotide
ccccgaatcctaagaaagtgggttacagccacccgcatttggccgctttgctacccc

SEQ ID NO: 4018 - DNA, 60 bp, Artificial
  Synthetic oligonucleotide
ctgttggtattgaacaagcaacaacaccaaaagaagctactaatggcaacactgtgccta

SEQ ID NO: 4019 - DNA, 60 bp, Artificial
  Synthetic oligonucleotide
cttgattagcagcttgaatatttgcccttagttcagttggagcatgtgggtctgtttcta

SEQ ID NO: 4020 - DNA, 60 bp, Artificial
  Synthetic oligonucleotide
ccagccatttgtaatgctctaattgcagcatcacgccctggccctggacctttaacttca

SEQ ID NO: 4021 - DNA, 60 bp, Artificial
  Synthetic oligonucleotide
ctgctttaacacgagactcataatctcccatatacatagctccagccatcaaactaccca

SEQ ID NO: 4022 - DNA, 60 bp, Artificial
  Synthetic oligonucleotide
ctagtcttggtcctaaatcacgagccgggttaattgcatatccagttgttccacctagtg

SEQ ID NO: 4023 - DNA, 60 bp, Artificial
  Synthetic oligonucleotide
gacttccaccaactaattctccaatcccaggaactaataaatcaacagcagcaacagtct

SEQ ID NO: 4024 - DNA, 60 bp, Artificial
  Synthetic oligonucleotide
ccacctgtgttatctgctagtagtccagctacaacaccaggcattaatccttgtggtcct

SEQ ID NO: 4025 - DNA, 60 bp, Artificial
  Synthetic oligonucleotide
gcaccatctccacaagcaatagcaatttgtcgcaatggaacatctctaacatcaccagca

SEQ ID NO: 4026 - DNA, 60 bp, Artificial
  Synthetic oligonucleotide
ccttgtccagcagcttcttcgtatccactagttccattaatttgtccagcagtaaataga

SEQ ID NO: 4027 - DNA, 60 bp, Artificial
  Synthetic oligonucleotide
ctggtggtcttcatggggttggagctagtgttgttaatgctttatctttatatgttgaag

SEQ ID NO: 4028 - DNA, 60 bp, Artificial
  Synthetic oligonucleotide
caagcaggtctttctttaagtttagctggtgaagtgatttgaggaactgatattggagga

SEQ ID NO: 4029 - DNA, 60 bp, Artificial
  Synthetic oligonucleotide
caggaagcgatgaagctggtagaggttgtttagctggtcctttagttgttgctagtgtga

SEQ ID NO: 4030 - DNA, 60 bp, Artificial
  Synthetic oligonucleotide
cccagcagtataacttaaagctccaactaaagccccacccataggaccaaacaacatacc

SEQ ID NO: 4031 - DNA, 60 bp, Artificial
  Synthetic oligonucleotide
gcagctgactgtaaatcagttacctcgtgtttcggcggttcgaatccgtcactgcccacc

SEQ ID NO: 4032 - DNA, 60 bp, Artificial
  Synthetic oligonucleotide
tcactaacttctgaaactgttccagcagcaactacttcaccaccaaagtctccagcttta

SEQ ID NO: 4033 - DNA, 60 bp, Artificial
  Synthetic oligonucleotide
ccccacttgtctccccacttgtctccccactttctaaattggtgtgatgagaacaatgag

SEQ ID NO: 4034 - DNA, 60 bp, Artificial
  Synthetic oligonucleotide
gaaatgacttttcacagcaggggcagcatctacagttcttgcagagcttggggtgttagg

SEQ ID NO: 4035 - DNA, 60 bp, Artificial
  Synthetic oligonucleotide
cacgcacaattacagctttgcacacttgcccttttctaacaattccgtcaggttgagctt

SEQ ID NO: 4036 - DNA, 60 bp, Artificial
  Synthetic oligonucleotide
ggccaccttgattaccattgttattgtctccacttcctccattgttatcacctgtcgaag

SEQ ID NO: 4037 - DNA, 60 bp, Artificial
  Synthetic oligonucleotide
ctgataatgaacttccttggccaccactgcttctgttgtatgaaggaaacccagccatat

SEQ ID NO: 4038 - DNA, 60 bp, Artificial
  Synthetic oligonucleotide
ttcaagttgttatcggtaaagttaaatccccacctttcagcaaagttaattccccacccc

SEQ ID NO: 4039 - DNA, 60 bp, Artificial
  Synthetic oligonucleotide
ctatgtgtgttatcggtaaagttaaatccccacctttcggcaaagttaattccccacccc

SEQ ID NO: 4040 - DNA, 60 bp, Artificial
  Synthetic oligonucleotide
ctcactgcgcaaacaactatacctccaaataaatcgccaactccaacctcatcagaccca

SEQ ID NO: 4041 - DNA, 60 bp, Artificial
  Synthetic oligonucleotide
ctgcagcacttaataccccagcaatcaccccgccttgaatcgctaaccctccacttctaa

SEQ ID NO: 4042 - DNA, 60 bp, Artificial
  Synthetic oligonucleotide
gctaaagctaagaacccgatcccaccaacctcgcctgcaaatggagaacgtgatgcatac

SEQ ID NO: 4043 - DNA, 60 bp, Artificial
  Synthetic oligonucleotide
ccctgctacaattcctttagcttgacgaacaagattttcaatcgcagcaacagtccctcc

SEQ ID NO: 4044 - DNA, 60 bp, Artificial
  Synthetic oligonucleotide
gcctcctatcgctttaacgccttgatgtaaacttattccattcatcgctcctgccatagc

SEQ ID NO: 4045 - DNA, 60 bp, Artificial
  Synthetic oligonucleotide
gctggtacttgcttttgtgtaaagtcatcacggtactcttcaacttgtccgattacgcca

SEQ ID NO: 4046 - DNA, 60 bp, Artificial
  Synthetic oligonucleotide
gccatgtgctccccatcctattgcggcccagtcttcagttcgtcaataagctaagttatg

SEQ ID NO: 4047 - DNA, 60 bp, Artificial
  Synthetic oligonucleotide
ggaagctcatgtcgacaaaggtgggccggacggtggcgatggtggatgaggtggttcaat

SEQ ID NO: 4048 - DNA, 60 bp, Artificial
  Synthetic oligonucleotide
gctgctccgactccaactccacaaattgaagcctcagcaattggcgaatctcagacgcgt

SEQ ID NO: 4049 - DNA, 60 bp, Artificial
  Synthetic oligonucleotide
gtcgcctcgtccgggaatcgtgcttacctcgatctgtagagttgatccgccaagtggtga

SEQ ID NO: 4050 - DNA, 60 bp, Artificial
  Synthetic oligonucleotide
cgcgcccggaaggagtcgaaccctcaacctcttgggccgtaaccaaacactctgtccaat

SEQ ID NO: 4051 - DNA, 60 bp, Artificial
  Synthetic oligonucleotide
cgagagcattaatggcggatcagacaggatttgaacttgcgcgggcccgttgagacccct

SEQ ID NO: 4052 - DNA, 60 bp, Artificial
  Synthetic oligonucleotide
ccttgtaatgcttgcagttgctggcgcgggtgtaattatggcagtcgttggagctcttgg

SEQ ID NO: 4053 - DNA, 60 bp, Artificial
  Synthetic oligonucleotide
cagggtcccagggcgaacaacttgcggctttggatcgaatgtcaaacagaaaacatccaa

SEQ ID NO: 4054 - DNA, 60 bp, Artificial
  Synthetic oligonucleotide
ctagctcaacgccatcgccaatctttaacagcgcggtttccctgatgcctggcttgtcac

SEQ ID NO: 4055 - DNA, 60 bp, Artificial
  Synthetic oligonucleotide
cgccgaatcaagccctgaacaacgaaaacaagtaatcgaggaagtcgccggaactgcaaa

SEQ ID NO: 4056 - DNA, 60 bp, Artificial
  Synthetic oligonucleotide
gcgccacgagaagtcgcctccagcccaatcgctccagtaccggcaaataaatcaagcacc

SEQ ID NO: 4057 - DNA, 60 bp, Artificial
  Synthetic oligonucleotide
caggctcaatttcctatcttagttcctgcacgccttcgcttcagccagttgttgccccag

SEQ ID NO: 4058 - DNA, 60 bp, Artificial
  Synthetic oligonucleotide
ccgttccgattccgttatagtcataactccaaccgccaaaatcaagcccgccggtgcgcg

SEQ ID NO: 4059 - DNA, 60 bp, Artificial
  Synthetic oligonucleotide
cggggctagatcatcagctacttccttaacctcatccagggcgttttccattgcgatccc

SEQ ID NO: 4060 - DNA, 60 bp, Artificial
  Synthetic oligonucleotide
ccagattgacctttaccagcttgtttacctttaccagctgcatgtcctctacctttacgg

SEQ ID NO: 4061 - DNA, 60 bp, Artificial
  Synthetic oligonucleotide
tagggtagggccggtgattggagttaagtcgtaacaaggtacccctacgagaacgtgggg

SEQ ID NO: 4062 - DNA, 60 bp, Artificial
  Synthetic oligonucleotide
ggcaaatttaacaacatagttgccactgatgtaacttatattccaagccccaaagatgca

SEQ ID NO: 4063 - DNA, 60 bp, Artificial
  Synthetic oligonucleotide
gtgctaaagggcttaactactgagttcggaatggtatcaggtgcaaaccttcgctatggc

SEQ ID NO: 4064 - DNA, 60 bp, Artificial
  Synthetic oligonucleotide
gcgctaaagggcttaactactgagttcggaatggtatcaggtgcaaaccttcgctatggc

SEQ ID NO: 4065 - DNA, 60 bp, Artificial
  Synthetic oligonucleotide
cgctaaagggcttaactactgagttcggaatggtatcaggtgcaaaccttcgctatggcc

SEQ ID NO: 4066 - DNA, 60 bp, Artificial
  Synthetic oligonucleotide
ggacgtagctcaattgatagagcacctgatttgcactcaggaggtcgtgggtttgacccc

SEQ ID NO: 4067 - DNA, 60 bp, Artificial
  Synthetic oligonucleotide
ggacgtagctcaattgatagagcacctgatttgcactcaggaggtcgagggtttgacccc

SEQ ID NO: 4068 - DNA, 60 bp, Artificial
  Synthetic oligonucleotide
gatgcaatttgttcacttccatactcaggaaattgtgtggatgtcactagttttcctgac

SEQ ID NO: 4069 - DNA, 60 bp, Artificial
  Synthetic oligonucleotide
gagatgtaatttgttcgtttccttgctcaggaaattgtgtggatgtcactagttttcctg

SEQ ID NO: 4070 - DNA, 57 bp, Artificial
  Synthetic oligonucleotide
ccccgaatcctaagaaagtgggttacagccacccgcagttggccgctttgctacccc

SEQ ID NO: 4071 - DNA, 60 bp, Artificial
  Synthetic oligonucleotide
ggtagaacatctgtcttcaaaatagagtgttgtgggttcgagtcctgctacccctgccat

SEQ ID NO: 4072 - DNA, 60 bp, Artificial
  Synthetic oligonucleotide
cacgaagcttatcgcaggtaatcacgtccttcatcgactttcagacccaaggcatccacc

SEQ ID NO: 4073 - DNA, 60 bp, Artificial
  Synthetic oligonucleotide
cgcacgaattaccgtgatcaactcataggtataatctcagccttttacagcacccttgtc

SEQ ID NO: 4074 - DNA, 60 bp, Artificial
  Synthetic oligonucleotide
cctagacgacaagtgccacagagacgagaaaagtgaaacgcggtaaactccacgagctag

SEQ ID NO: 4075 - DNA, 60 bp, Artificial
  Synthetic oligonucleotide
ggagctgccattactcaagcaaaggttcaagaagccaaattagcaattagccatggagct

SEQ ID NO: 4076 - DNA, 60 bp, Artificial
  Synthetic oligonucleotide
ggatgagcccaccactgcccttgatcctaccgttcaggctctagttcttgatgttattag

SEQ ID NO: 4077 - DNA, 60 bp, Artificial
  Synthetic oligonucleotide
ggagtagcgggagttatttctattgcagcagtacttgattgaacttcgactaacttacca

SEQ ID NO: 4078 - DNA, 60 bp, Artificial
  Synthetic oligonucleotide
cgggcttaggaattggtttgggagctggtgctggaataacaactggtggaggagcaggtt

SEQ ID NO: 4079 - DNA, 60 bp, Artificial
  Synthetic oligonucleotide
caggcagagcacatccatggtaaggatggggtcgctggttcaagtccagttattggcacc

SEQ ID NO: 4080 - DNA, 60 bp, Artificial
  Synthetic oligonucleotide
ctagctccagttccggttccaccacccattcctgaggtgataataaccatatctgcgcct

SEQ ID NO: 4081 - DNA, 60 bp, Artificial
  Synthetic oligonucleotide
ccaactaaagctgcctctcctctgtgatcttttgcaagtccaaaggatataccaactgca

SEQ ID NO: 4082 - DNA, 60 bp, Artificial
  Synthetic oligonucleotide
gcttctttacctcttgcggctgctattattccttcatatcttttcattttgtctggttca

SEQ ID NO: 4083 - DNA, 60 bp, Artificial
  Synthetic oligonucleotide
gtgcttgtgccaaggctagaccaactgccattgcaagaccttgacctaaaggcccggttg

SEQ ID NO: 4084 - DNA, 60 bp, Artificial
  Synthetic oligonucleotide
gctgcattttccaggatgtgaaagcgttgttcttggtagttatcaatttgtgaagcatga

SEQ ID NO: 4085 - DNA, 60 bp, Artificial
  Synthetic oligonucleotide
ccatgtcaatgctgatgaatcagggatgtttagaaaagccgatgctgaagttgctgtgct

SEQ ID NO: 4086 - DNA, 60 bp, Artificial
  Synthetic oligonucleotide
aaacaggagcgccaattttagtccatacccagttaggaaccatggcctatgaagctgctc

SEQ ID NO: 4087 - DNA, 60 bp, Artificial
  Synthetic oligonucleotide
ggctaagttatattgacaagatggccaaaacataaactacgaccttcaagctgcccatga

SEQ ID NO: 4088 - DNA, 60 bp, Artificial
  Synthetic oligonucleotide
gcctccataccaccaagttcaggggcaacatcaagataatcaattacatcataaccatga

SEQ ID NO: 4089 - DNA, 60 bp, Artificial
  Synthetic oligonucleotide
ctgtaattgaagaggcaagagatccaccaaagtgacctcccataccatcacaaagaatta

SEQ ID NO: 4090 - DNA, 60 bp, Artificial
  Synthetic oligonucleotide
ccataaataatcatctcagctgctcgaccacccatgtatgaggctattgttgctagaagc

SEQ ID NO: 4091 - DNA, 60 bp, Artificial
  Synthetic oligonucleotide
cccaccttcaacactaacatttgagccattgacaccagctccaccagtaagtctttgatg

SEQ ID NO: 4092 - DNA, 60 bp, Artificial
  Synthetic oligonucleotide
gagtgcttggattttgcggactttcaggttgactctgcccagcatctggactacttggag

SEQ ID NO: 4093 - DNA, 60 bp, Artificial
  Synthetic oligonucleotide
ctaaagacacaacacttctcaatgcggatgctccatttctgtcctgaccgggttatgagg

SEQ ID NO: 4094 - DNA, 60 bp, Artificial
  Synthetic oligonucleotide
cgccaggattagttgctccatttgggtttaaagtggaaactgcaccaccaaattcaatgt

SEQ ID NO: 4095 - DNA, 60 bp, Artificial
  Synthetic oligonucleotide
gtccattcgcatcatggaattctcctccaactcataatgctgttccacatcccaaataag

SEQ ID NO: 4096 - DNA, 60 bp, Artificial
  Synthetic oligonucleotide
ctttcattagaaacagcagcagcagcactataatgcccaccaccacctacagcttctgcg

SEQ ID NO: 4097 - DNA, 60 bp, Artificial
  Synthetic oligonucleotide
cattccttcaattaccaaaactagaccttcgccacctgaatcatttactcctacttcttt

SEQ ID NO: 4098 - DNA, 60 bp, Artificial
  Synthetic oligonucleotide
caagttgatggtggaataaacgaagaatctggacctcaagcattcgaaagtggcgctgat

SEQ ID NO: 4099 - DNA, 60 bp, Artificial
  Synthetic oligonucleotide
gcttgagtttcacggtcacgtcccattttggcactacctccagctgaatttccctcaaca

SEQ ID NO: 4100 - DNA, 60 bp, Artificial
  Synthetic oligonucleotide
gcttgaactatacctgtggcatttccgtgagttgttccatcaaaagctgtcccaattcca

SEQ ID NO: 4101 - DNA, 60 bp, Artificial
  Synthetic oligonucleotide
cagccccaccaccacttattcttcttgctaattcgattccattttcttctatgaagttta

SEQ ID NO: 4102 - DNA, 60 bp, Artificial
  Synthetic oligonucleotide
tcgactttggtgtaatcttttccgctaaaagcacctccaccatgtcttgctcatccgcca

SEQ ID NO: 4103 - DNA, 60 bp, Artificial
  Synthetic oligonucleotide
gcaaggctcttccatctttcatcattgcttcaattgtgtatgttgtgtgggctccggcaa

SEQ ID NO: 4104 - DNA, 60 bp, Artificial
  Synthetic oligonucleotide
ccaagccctgtacctaaggccccaatcattgcaagtccagctccaactgcaactaagcca

SEQ ID NO: 4105 - DNA, 60 bp, Artificial
  Synthetic oligonucleotide
ccataacgtgaacgagactggtttctatttgcaaccccagctgcatcttgagttccacga

SEQ ID NO: 4106 - DNA, 60 bp, Artificial
  Synthetic oligonucleotide
gcaacaaggtggttctcgtcgtggcgctcaaatgatcatgttaggcgtttgacatcctga

SEQ ID NO: 4107 - DNA, 60 bp, Artificial
  Synthetic oligonucleotide
cctactgaagccgctaacacacctttgcctaatccactaacaactccaccagtaacgaaa

SEQ ID NO: 4108 - DNA, 60 bp, Artificial
  Synthetic oligonucleotide
ggaagcaacgccgctgaaccgcatcaccacccaacagcaagaaaacttgccgatggcgat

SEQ ID NO: 4109 - DNA, 60 bp, Artificial
  Synthetic oligonucleotide
gccctttcatttgcggcctttggttggcttccagcagcgattggtggcattgccggttac

SEQ ID NO: 4110 - DNA, 60 bp, Artificial
  Synthetic oligonucleotide
gccatcgcttgttgctgttgtaatttgacgcacatctttggccacgacatcaccagcggc

SEQ ID NO: 4111 - DNA, 60 bp, Artificial
  Synthetic oligonucleotide
gttaacgcatcgggttgtggctccgacatacgtgggttcgattcccatcgcacgccccat

SEQ ID NO: 4112 - DNA, 60 bp, Artificial
  Synthetic oligonucleotide
gctttcagcggcggcggttgagaaatgccctccaccattaacggcttctgcgatcacttg

SEQ ID NO: 4113 - DNA, 60 bp, Artificial
  Synthetic oligonucleotide
gtcttcaaacgatgccacagccaattcaccgcgttgcacataatccgaagatagggctac

SEQ ID NO: 4114 - DNA, 60 bp, Artificial
  Synthetic oligonucleotide
gggccaaagactcttccaccgccaacaaagattgggcttcgcattgatccggctctagca

SEQ ID NO: 4115 - DNA, 60 bp, Artificial
  Synthetic oligonucleotide
cccgagccaactttgattcctgaacgcccagtaaacgattgcacgcaacctacaagcccg

SEQ ID NO: 4116 - DNA, 60 bp, Artificial
  Synthetic oligonucleotide
ctcaggtgcattagccggagttgcgggtgctttctttgcccaaggatttccctcgtcatt

SEQ ID NO: 4117 - DNA, 60 bp, Artificial
  Synthetic oligonucleotide
gagagtctaataccgccgacaccacgtgcaacccgacccatttcacgcacatcagcaaca

SEQ ID NO: 4118 - DNA, 60 bp, Artificial
  Synthetic oligonucleotide
cgcgccacaatgtttccagcagttccaagcccctttagttcccctaatacacgaggtttc

SEQ ID NO: 4119 - DNA, 60 bp, Artificial
  Synthetic oligonucleotide
caagagtctcctgatgcttctaaacccgatccaaaaccaaacccagaaccagacgatcct

SEQ ID NO: 4120 - DNA, 60 bp, Artificial
  Synthetic oligonucleotide
cagtgtggttcttgctggccctgggtgaactctgagatcccgaaagacggagattgaacc

SEQ ID NO: 4121 - DNA, 60 bp, Artificial
  Synthetic oligonucleotide
gttgctatatcaataggatcatttggctctgcattaacactgactccacgtccaccgcgt

SEQ ID NO: 4122 - DNA, 60 bp, Artificial
  Synthetic oligonucleotide
ccggcgttgcacctgtaccagttccaccgccaaggcctgctgctaggatcaagacatttg

SEQ ID NO: 4123 - DNA, 60 bp, Artificial
  Synthetic oligonucleotide
gacccacccttagcacatctagctgccacaaaagacatagaaattgcagacagcggcgca

SEQ ID NO: 4124 - DNA, 60 bp, Artificial
  Synthetic oligonucleotide
gctacaactaacggccccgcacagcatcccctgcctgcttcatcaactcctgcaataagc

SEQ ID NO: 4125 - DNA, 60 bp, Artificial
  Synthetic oligonucleotide
catccattcctctctgtttcatagcactttgcgacgatctaccacttctagcaccgcctg

SEQ ID NO: 4126 - DNA, 60 bp, Artificial
  Synthetic oligonucleotide
ccttgcctctaataacgcctcagaagccacgagcccctaatgatgagttcccttttgact

SEQ ID NO: 4127 - DNA, 60 bp, Artificial
  Synthetic oligonucleotide
caagcttcacttccagaaataccagcgccaataactctcactcttttcattgctactcct

SEQ ID NO: 4128 - DNA, 60 bp, Artificial
  Synthetic oligonucleotide
ccgccttttccaccatcaccgccatcaggcccacctttatcaacgtgtgcttctcttcta

SEQ ID NO: 4129 - DNA, 60 bp, Artificial
  Synthetic oligonucleotide
cgaaccaagtggcccatagtctcaggtgttagataatccgccataaatttcgcttccttg

SEQ ID NO: 4130 - DNA, 60 bp, Artificial
  Synthetic oligonucleotide
cactcatggtgcatatgcaggaacagttaaatatgtaaatgaaaagttttccacaacaag

SEQ ID NO: 4131 - DNA, 60 bp, Artificial
  Synthetic oligonucleotide
gttgtggaaaacttttcatttacatatttaactgttcctgcatatgcaccatgagtggta

SEQ ID NO: 4132 - DNA, 60 bp, Artificial
  Synthetic oligonucleotide
cattacatattgaagaagaaggctcgtttgattgtatagtggccaatcctccttttagcc

SEQ ID NO: 4133 - DNA, 60 bp, Artificial
  Synthetic oligonucleotide
ggtagaacagcagactccaaatctgcgtgttgtgggttcgagtcctgttacccctgccat

SEQ ID NO: 4134 - DNA, 60 bp, Artificial
  Synthetic oligonucleotide
ccggaaaccgatctaacaccttagcagggtgccctcttaaccacttgagtacgtctccac

SEQ ID NO: 4135 - DNA, 60 bp, Artificial
  Synthetic oligonucleotide
gataatcctgccacgtgttaggtcgtatggacttaactcaacttctacagtatcaccttt

SEQ ID NO: 4136 - DNA, 60 bp, Artificial
  Synthetic oligonucleotide
ggcaagggtaacaggactcgaacccgcaacacgcagatttggagtctgctgttctaccaa

SEQ ID NO: 4137 - DNA, 60 bp, Artificial
  Synthetic oligonucleotide
gaacccacgcgccgcagaacgacctaacaccttagcagggtgccctcttaaccacttgag

SEQ ID NO: 4138 - DNA, 60 bp, Artificial
  Synthetic oligonucleotide
ccctggagtggcggaatggtagacgcggtggactcaaaacccactaggaaactgtaggag

SEQ ID NO: 4139 - DNA, 60 bp, Artificial
  Synthetic oligonucleotide
atgcgagggttcgaatccctcagtatccgccagggagatttacccaagtggctgaagggg

SEQ ID NO: 4140 - DNA, 60 bp, Artificial
  Synthetic oligonucleotide
catcacactcactgacaagtcttaatgctgctccatttctggcctgacatgattcgactc

SEQ ID NO: 4141 - DNA, 60 bp, Artificial
  Synthetic oligonucleotide
ggcgcgcccaataggacttgaacccataaccttctggtccgaagccagacactctatccg

SEQ ID NO: 4142 - DNA, 60 bp, Artificial
  Synthetic oligonucleotide
gtttagtggtagaacaacagtctccaaaactgtctgtgtgggttcgattccttccacccc

SEQ ID NO: 4143 - DNA, 60 bp, Artificial
  Synthetic oligonucleotide
gtttagtggcagaacaacagtctccaaaactgtctgtgtgggttcgattccttccacccc

SEQ ID NO: 4144 - DNA, 60 bp, Artificial
  Synthetic oligonucleotide
gtcgaactgttctctgatccttaccatggatctgttttgcccctaaaccaattcggcagc

SEQ ID NO: 4145 - DNA, 60 bp, Artificial
  Synthetic oligonucleotide
ggactcaaggcctggagctgcaacctccatatcgtcagttcgaatctgacaggcacctcc

SEQ ID NO: 4146 - DNA, 60 bp, Artificial
  Synthetic oligonucleotide
ctcaccaaatcaggacaaattaagcgcaaacacgcttatacttcccacctcgcgccccac

SEQ ID NO: 4147 - DNA, 60 bp, Artificial
  Synthetic oligonucleotide
cagcactaacacaaatcccaccaaaactatcacccttgccagattcatcactgccaatta

SEQ ID NO: 4148 - DNA, 60 bp, Artificial
  Synthetic oligonucleotide
gccttggcactaaaaggcgatgaaggacgtgttaacctgcgataagcttcggggaggtgg

SEQ ID NO: 4149 - DNA, 60 bp, Artificial
  Synthetic oligonucleotide
cctggagtggcggaatggtagacgcggtggactcaaaacccactaggaaactgtaggagt

SEQ ID NO: 4150 - DNA, 60 bp, Artificial
  Synthetic oligonucleotide
ctctacgacgtgataaatcaccaattacatcacccatgtgatcgctaggaacaactacag

SEQ ID NO: 4151 - DNA, 60 bp, Artificial
  Synthetic oligonucleotide
gccccaatattctttagaggcggtttaagtggtacgggagtagtagatgatagaggtaat

SEQ ID NO: 4152 - DNA, 60 bp, Artificial
  Synthetic oligonucleotide
ccccatgtgatcgctaggaacaactacagaaacatccataataggctctaacaatactgt

SEQ ID NO: 4153 - DNA, 60 bp, Artificial
  Synthetic oligonucleotide
ccaattacaacgcaaagtgttactagtcctatgggattaggtagcgactcgaaaccttat

SEQ ID NO: 4154 - DNA, 60 bp, Artificial
  Synthetic oligonucleotide
ctcttgagccgaagcgtcttgtccttcagctaaagtgtatccatcttgtgcttcaactgt

SEQ ID NO: 4155 - DNA, 60 bp, Artificial
  Synthetic oligonucleotide
ccttcaatcggtggttatcaagcaactttaaacagtcaaatttcgcaagcagaacaaaga

SEQ ID NO: 4156 - DNA, 60 bp, Artificial
  Synthetic oligonucleotide
cttgtccgcctactgttggtagatctgcatctaagacaatgcttggcccggtgtagttta

SEQ ID NO: 4157 - DNA, 60 bp, Artificial
  Synthetic oligonucleotide
ccgtgatgatgaaagcacaatccagcttcctacacaaggagcttcatcttcagcagcgcc

SEQ ID NO: 4158 - DNA, 60 bp, Artificial
  Synthetic oligonucleotide
gtgataccgtgatttctgctgcatcatgtactacaaactgccttgcgcctgtggtaaaag

SEQ ID NO: 4159 - DNA, 60 bp, Artificial
  Synthetic oligonucleotide
cccaaaagggatttacattgcattaggaatatcaaaaggatacggtaaagggattggtaa

SEQ ID NO: 4160 - DNA, 60 bp, Artificial
  Synthetic oligonucleotide
cctgtaaatgcgtgagataaataatttccttcaccgaaaattcctcctcattgctgagca

SEQ ID NO: 4161 - DNA, 60 bp, Artificial
  Synthetic oligonucleotide
cctacaaccaaaactgcttactataaagctgacgctggtcgtacactatactgagacggg

SEQ ID NO: 4162 - DNA, 60 bp, Artificial
  Synthetic oligonucleotide
gagggcaatagggcgtcaaggttcaggggtaaaaggataaagctatgttgtgacttagaa

SEQ ID NO: 4163 - DNA, 60 bp, Artificial
  Synthetic oligonucleotide
gccgtgctggttcaattccagttccgggtaccaatagagcgcctttagctcagcaggtag

SEQ ID NO: 4164 - DNA, 60 bp, Artificial
  Synthetic oligonucleotide
ccctcaccttttgaagctccagctaccaatcctgcaatgtcgacaaaatcaaaagttgca

SEQ ID NO: 4165 - DNA, 60 bp, Artificial
  Synthetic oligonucleotide
cacaactcctgaacgaatcattgaacatgtggctaattactacaaacttccaaagcatga

SEQ ID NO: 4166 - DNA, 60 bp, Artificial
  Synthetic oligonucleotide
cagggtttcttccaacagcctcagccgctcttccagccgaaagtccttgtcctagtcctg

SEQ ID NO: 4167 - DNA, 60 bp, Artificial
  Synthetic oligonucleotide
gggtcaacgcatcgggttgtggttccgacattcgcgggttcgaatcccgttattcacccc

SEQ ID NO: 4168 - DNA, 60 bp, Artificial
  Synthetic oligonucleotide
gcagccgatgatggagttaaacctcaaactaaagaagcaatagctcatgcccaagctgcc

SEQ ID NO: 4169 - DNA, 60 bp, Artificial
  Synthetic oligonucleotide
gcggaagtacaagtggaagcggttcaaaacaaactcctccacctcctgctgcaaatccag

SEQ ID NO: 4170 - DNA, 60 bp, Artificial
  Synthetic oligonucleotide
cccatctccgctgcatcacgctctgctaaatactcattaacagtagagacaattactccc

SEQ ID NO: 4171 - DNA, 60 bp, Artificial
  Synthetic oligonucleotide
cacatcgaatcggaagaacaggaagaggcacaagaatagggcaggcaatttcatttgtaa

SEQ ID NO: 4172 - DNA, 60 bp, Artificial
  Synthetic oligonucleotide
cctgataccattccgaactcagtagtcaagacttgtggtgccgacgatacccgctgggga

SEQ ID NO: 4173 - DNA, 60 bp, Artificial
  Synthetic oligonucleotide
cttcgtcttgcccttataggagagcttgcatctaagaaaattctcacctcagcatcgggg

SEQ ID NO: 4174 - DNA, 60 bp, Artificial
  Synthetic oligonucleotide
ccagttgaaagacccgttgttccaaagcttgaagtaacctcgaagatgatgtggctaaga

SEQ ID NO: 4175 - DNA, 60 bp, Artificial
  Synthetic oligonucleotide
ctcaaaccctcaacctcctgagtgcaaatcaggtgctctatcagttgagctacatcccca

SEQ ID NO: 4176 - DNA, 60 bp, Artificial
  Synthetic oligonucleotide
aggtcgcgttgaacaccgccagccagaacatcgccaaccagcagacgcccggctattccc

SEQ ID NO: 4177 - DNA, 60 bp, Artificial
  Synthetic oligonucleotide
ttgccgcgaccccaccatcatctcgtccaggccgcccacgctgaccacctggctttccag

SEQ ID NO: 4178 - DNA, 60 bp, Artificial
  Synthetic oligonucleotide
tgccctgttgtgcctgatcctttccccgctcgccctcgccgataccgtcaatgtcgccgt

SEQ ID NO: 4179 - DNA, 60 bp, Artificial
  Synthetic oligonucleotide
agctgttcaacatcgccgaggacctgcaccacaaccgccgccgccgagcccaccagctgg

SEQ ID NO: 4180 - DNA, 60 bp, Artificial
  Synthetic oligonucleotide
acctgctggccttcgaccaattgctcacccacctctcctacgacgccaccagccgcaacg

SEQ ID NO: 4181 - DNA, 60 bp, Artificial
  Synthetic oligonucleotide
gggtccgccacgcccagcttcaccgcctcgttcaccgccgcttctgcgtccatcttcagc

SEQ ID NO: 4182 - DNA, 60 bp, Artificial
  Synthetic oligonucleotide
tgattgccgcgaccgactacatccgcaactacgccgaccagatccgcgcctatgtgccgg

SEQ ID NO: 4183 - DNA, 60 bp, Artificial
  Synthetic oligonucleotide
accccagcctcccgcagcaggtccttgacttcgcgccgcccaacccgagccgacagtttt

SEQ ID NO: 4184 - DNA, 60 bp, Artificial
  Synthetic oligonucleotide
aggatgtccacctcgtgcgccgtcttccagcctatgcccttgccgccgttgccagctttt

SEQ ID NO: 4185 - DNA, 60 bp, Artificial
  Synthetic oligonucleotide
tccaccttgccgccgaggaagccggaagtcgcgccccacaccacgcccaggatgacggaa

SEQ ID NO: 4186 - DNA, 60 bp, Artificial
  Synthetic oligonucleotide
caaacgcccacacgaccgaaaacaccatcatcgccgccattgccgccagttcccaacctt

SEQ ID NO: 4187 - DNA, 60 bp, Artificial
  Synthetic oligonucleotide
cgttcagacagcattgcagaccgccgcccgccgtgtcgaaagctaccaccaacgccaaaa

SEQ ID NO: 4188 - DNA, 60 bp, Artificial
  Synthetic oligonucleotide
agactgccgatgatgccgcccaatacgtcgccactgcccgccgttgccaatcccgcattg

SEQ ID NO: 4189 - DNA, 60 bp, Artificial
  Synthetic oligonucleotide
aaaccgctggatgtggctcgccgtcaacctctgcaccgccttcctcgccagccgcgtcat

SEQ ID NO: 4190 - DNA, 60 bp, Artificial
  Synthetic oligonucleotide
taccaaaccgactccgcctaaagaagaacgcccgccgctcagccttcccgacagcataga

SEQ ID NO: 4191 - DNA, 60 bp, Artificial
  Synthetic oligonucleotide
tggcagagcgaaacccacaccgaccctgccacgctccgcatccccaaccccgccgccaaa

SEQ ID NO: 4192 - DNA, 60 bp, Artificial
  Synthetic oligonucleotide
tgtttcgttgatggtggaggcgggcaggggctctaggaggttggcggcggaaagggtggc

SEQ ID NO: 4193 - DNA, 60 bp, Artificial
  Synthetic oligonucleotide
cctcgtaacgacccacctgccgctgaaagacgttgccgccgccatcacgcaaccgctgat

SEQ ID NO: 4194 - DNA, 60 bp, Artificial
  Synthetic oligonucleotide
gaacgaaccgccgcccgtgcccgtcagcgcaaccaccatcgtcaaacagtccaaaatcaa

SEQ ID NO: 4195 - DNA, 60 bp, Artificial
  Synthetic oligonucleotide
ttggtcagcatcgcataaaacgacatccgcaaactcagccgcaccgccgccagcacgttc

SEQ ID NO: 4196 - DNA, 60 bp, Artificial
  Synthetic oligonucleotide
cgagaacctttaaaaccagcgccgccagaggtagcccaagacaacgcattgccttgacgg

SEQ ID NO: 4197 - DNA, 60 bp, Artificial
  Synthetic oligonucleotide
cgttgagcttggcggcgatgtagtagcgcatccactcggggttcaggccttgttccagat

SEQ ID NO: 4198 - DNA, 60 bp, Artificial
  Synthetic oligonucleotide
ccttaaaaccagcgccgccagaggtagcccaagacagtgcattgccttgacggtcggtga

SEQ ID NO: 4199 - DNA, 60 bp, Artificial
  Synthetic oligonucleotide
cctttaaaaccagcgccgccagaggtagcccaagacaacgcattgccttgacggtcagtg

SEQ ID NO: 4200 - DNA, 60 bp, Artificial
  Synthetic oligonucleotide
accttgcgcatccgcatcacgccgttgtcgttgacgtgggtatgcacttcggcgcgctct

SEQ ID NO: 4201 - DNA, 60 bp, Artificial
  Synthetic oligonucleotide
ttggtgaccgacgaggagctggccgattttgagctggatgtgctgtcggagttcgtgctc

SEQ ID NO: 4202 - DNA, 60 bp, Artificial
  Synthetic oligonucleotide
tcttcggcacaatcactggccgcgtcgagcacgaagttctggagcgactgttcgacacag

SEQ ID NO: 4203 - DNA, 60 bp, Artificial
  Synthetic oligonucleotide
ttcgtcgcgttgcgttcactgttccggttcgccaaacgacaccggctgatcttcctcgac

SEQ ID NO: 4204 - DNA, 60 bp, Artificial
  Synthetic oligonucleotide
agctcaccgagttcacccacgacgttctcacggactggctgacctaccggcaacagcgat

SEQ ID NO: 4205 - DNA, 60 bp, Artificial
  Synthetic oligonucleotide
aggacgtgtgggcccagttcgacgctgacgagaccttgccgcgcgcaccgttgttcccgt

SEQ ID NO: 4206 - DNA, 60 bp, Artificial
  Synthetic oligonucleotide
tgcatgctcgacctcgacgacattcgatgggagctgggcaggttcggcaagctcaacgtc

SEQ ID NO: 4207 - DNA, 60 bp, Artificial
  Synthetic oligonucleotide
cggatcgcgaaacacgttgggttcccgctgaaacaccttcactctccgtgaacccactgc

SEQ ID NO: 4208 - DNA, 60 bp, Artificial
  Synthetic oligonucleotide
tgcacctgacgatcatgttcgggctctccgagaagtccgcggccgactacgccaggcttg

SEQ ID NO: 4209 - DNA, 60 bp, Artificial
  Synthetic oligonucleotide
aactcgacgtgctctgcgcggtgctcaactgtgggatagccgaactcatcaccgccgaac

SEQ ID NO: 4210 - DNA, 60 bp, Artificial
  Synthetic oligonucleotide
aaggtggtgagcccgtccgagttcgccgccgccatccccgagatcgtgtggtacctcgac

SEQ ID NO: 4211 - DNA, 60 bp, Artificial
  Synthetic oligonucleotide
atctcggtgatcaacccggccgaaccgccgatgaacatgcgcgacaccgtctacgccaag

SEQ ID NO: 4212 - DNA, 60 bp, Artificial
  Synthetic oligonucleotide
agatgttgacgcgctgcgcccacggcacccgcaccaggtcccggtcgacctctcgatcga

SEQ ID NO: 4213 - DNA, 60 bp, Artificial
  Synthetic oligonucleotide
atgtcgtagttgcggccgttgatgttgacgatcttctgcacctgctgcggctcggtgagc

SEQ ID NO: 4214 - DNA, 60 bp, Artificial
  Synthetic oligonucleotide
atgcgtccgaccatcctcagcgcggtggccctgatgttcatcctgctgacccacgagttc

SEQ ID NO: 4215 - DNA, 60 bp, Artificial
  Synthetic oligonucleotide
aaggatggaagccgtgctgcgctggataactgccggagaatcccatggtcctgctctcgt

SEQ ID NO: 4216 - DNA, 60 bp, Artificial
  Synthetic oligonucleotide
tggacgtcgacatggagagctaccaggaacacggcgcctacctgtggggcacgctgctca

SEQ ID NO: 4217 - DNA, 60 bp, Artificial
  Synthetic oligonucleotide
acgcgaactcgacgacctgatcggcatgttcgtcaacaccgtcgtcttccgcacgcaggt

SEQ ID NO: 4218 - DNA, 60 bp, Artificial
  Synthetic oligonucleotide
gtcggagcgcttgccgatcagcaggtacgcctcgaccagccaggccgcgcacaggtggaa

SEQ ID NO: 4219 - DNA, 60 bp, Artificial
  Synthetic oligonucleotide
tcatcgaccactgcgagccgatcacgctgcccgcgaacgtcgaccagaacgtcgtccgct

SEQ ID NO: 4220 - DNA, 60 bp, Artificial
  Synthetic oligonucleotide
actacaccatcgagaccgaactgctgatgaacgagatcgccgactccaccgcgcgcatct

SEQ ID NO: 4221 - DNA, 60 bp, Artificial
  Synthetic oligonucleotide
acggcaggttgtacgcgggcgaggaggggtcgaactggttgatgaaccacatccgctgct

SEQ ID NO: 4222 - DNA, 60 bp, Artificial
  Synthetic oligonucleotide
atgagcgacccgaaactgctggtcctcggtgtgggcgtcacgctgggtgtggtggtgcag

SEQ ID NO: 4223 - DNA, 60 bp, Artificial
  Synthetic oligonucleotide
tgcggcgcagcgatttcgggcacatcagcatccgccccgaccacagcctggtggagttgc

SEQ ID NO: 4224 - DNA, 60 bp, Artificial
  Synthetic oligonucleotide
ttcactggctcctcaatccctctccggccccgtacttcgcgatcagcacccggttcagct

SEQ ID NO: 4225 - DNA, 60 bp, Artificial
  Synthetic oligonucleotide
acacaacttcgcggctgggcacgcagctcacccaacgggcggctcgctacagcaggtctt

SEQ ID NO: 4226 - DNA, 60 bp, Artificial
  Synthetic oligonucleotide
aagatcgccaccgaacagtccagccgccaccaggtccacaccggatacgccgacaagtac

SEQ ID NO: 4227 - DNA, 60 bp, Artificial
  Synthetic oligonucleotide
ttgacgttcggattcccgccactggttcctccgggctgctgaccgccgtcaccgccgcca

SEQ ID NO: 4228 - DNA, 60 bp, Artificial
  Synthetic oligonucleotide
ttatgcaggtggattgtcatttcccggcggggcgatggtctggggcacgcttttcaccga

SEQ ID NO: 4229 - DNA, 60 bp, Artificial
  Synthetic oligonucleotide
ttcggtgttcgaggatgaggtcgtgggcgctggcgagtccttcgatggtttcccggcaca

SEQ ID NO: 4230 - DNA, 60 bp, Artificial
  Synthetic oligonucleotide
acgtccttgttcgcctcgatttgggcgcggaacaccgcctccacccggcctgcctccaga

SEQ ID NO: 4231 - DNA, 60 bp, Artificial
  Synthetic oligonucleotide
agtgccgccgtcgcagaaccctgtccgcgtgaaccccgccgcagcgaccaacaccgacgc

SEQ ID NO: 4232 - DNA, 60 bp, Artificial
  Synthetic oligonucleotide
taagaagaagaactacgacgaggcagccgactgggccgaacacgagatgaccctgccgga

SEQ ID NO: 4233 - DNA, 60 bp, Artificial
  Synthetic oligonucleotide
agaaacgatgctgcaggcggtgtgcgttcccaaagcgtagtcactcccacccggcctcgc

SEQ ID NO: 4234 - DNA, 60 bp, Artificial
  Synthetic oligonucleotide
acacccaggcgctcgacctcgacatcgtccccgccgaccaaaaccgaatcgaccagttcc

SEQ ID NO: 4235 - DNA, 60 bp, Artificial
  Synthetic oligonucleotide
tgttgacgaccgtaaacagtaggtcttggccgccgccgaagcaccaccgcagatcgccgt

SEQ ID NO: 4236 - DNA, 60 bp, Artificial
  Synthetic oligonucleotide
tcgtcgtcgtcgaagtgaacactgcccgcgcccacgcctcgggttctgccagctagacgt

SEQ ID NO: 4237 - DNA, 60 bp, Artificial
  Synthetic oligonucleotide
agctgatcctgcgcgaacatgacctgccgaccgagttctacgaggcgtcgcacagcgagt

SEQ ID NO: 4238 - DNA, 60 bp, Artificial
  Synthetic oligonucleotide
atgaagtcgcgccgaacctttccccggtccatctgccgcaggtcaccgacgaacttctcg

SEQ ID NO: 4239 - DNA, 60 bp, Artificial
  Synthetic oligonucleotide
ggactgaaccagagtgcctcacccgaccgatcaaggaacctgcccatgtccagcgccgcc

SEQ ID NO: 4240 - DNA, 60 bp, Artificial
  Synthetic oligonucleotide
tcgacaccacgaatgtccgcagccagatcctcaccatgctcgtcgcgggccacgaaacca

SEQ ID NO: 4241 - DNA, 60 bp, Artificial
  Synthetic oligonucleotide
tgggccgagcacttcgccaacgatcccaccctgcgccacgccgaacaccgcgatcagcag

SEQ ID NO: 4242 - DNA, 60 bp, Artificial
  Synthetic oligonucleotide
ttcacagagacgaatccggcgcgcgaagagtccaccaccctcacggcagcaggcgtcgca

SEQ ID NO: 4243 - DNA, 60 bp, Artificial
  Synthetic oligonucleotide
atcctgtcccaacccgacccctggctgcacaccgccaaccacatcgcaatgttcgccctc

SEQ ID NO: 4244 - DNA, 60 bp, Artificial
  Synthetic oligonucleotide
gcgcccacctcacccgcacctgccgcgacctgatcggcatctctccgaccgaagcactca

SEQ ID NO: 4245 - DNA, 60 bp, Artificial
  Synthetic oligonucleotide
atggtgcctcacattggcgaccaacgccgtcatcgcctggaccacagagtattacgggct

SEQ ID NO: 4246 - DNA, 60 bp, Artificial
  Synthetic oligonucleotide
atcgacgacgaggtgctgacgcacatctccccggcccacagcgagaacatcaacttcttc

SEQ ID NO: 4247 - DNA, 60 bp, Artificial
  Synthetic oligonucleotide
atcgtgtcgctgctgatcgagctggacaaacgcaccggctacctggactgcttcacccat

SEQ ID NO: 4248 - DNA, 60 bp, Artificial
  Synthetic oligonucleotide
tatctgtccgacccgggctatcgacgcaagatctcccgccagctcaacaagggcgaatcc

SEQ ID NO: 4249 - DNA, 60 bp, Artificial
  Synthetic oligonucleotide
atcgacgacgaggtgctggcgcacatctccccggcccacagcgagaacatcaacttcttc

SEQ ID NO: 4250 - DNA, 60 bp, Artificial
  Synthetic oligonucleotide
atgctctacgaaacctgcgcccgcaccgaggaactgctccaggtcaacatcgaagacctc

SEQ ID NO: 4251 - DNA, 60 bp, Artificial
  Synthetic oligonucleotide
atcccgaaccctatccttctcccacaacacatccccgtcacccgcatgccgattcagcac

SEQ ID NO: 4252 - DNA, 60 bp, Artificial
  Synthetic oligonucleotide
cgccatgcacctttatctcgttcgccatccccgtcccatcgtcgctgccaatacctgcta

SEQ ID NO: 4253 - DNA, 60 bp, Artificial
  Synthetic oligonucleotide
aatcatgagcccactgttctcgccctacacccttcgcagcctcacccttcccaaccgcat

SEQ ID NO: 4254 - DNA, 60 bp, Artificial
  Synthetic oligonucleotide
ctccatggccgagttgtcccacacattacccgcacgactcatgctgcacgtcacacccaa

SEQ ID NO: 4255 - DNA, 60 bp, Artificial
  Synthetic oligonucleotide
tgccttctccatgccatttcgcctgtgccgtatcgtcactttcccgcgcgtctacccagc

SEQ ID NO: 4256 - DNA, 60 bp, Artificial
  Synthetic oligonucleotide
cgggttacagctttgaaacgtggttcatcgtctttgcgccagccagcacaccgaagccgc

SEQ ID NO: 4257 - DNA, 60 bp, Artificial
  Synthetic oligonucleotide
agcgcgacatcgagttcgacagccagccccttcacaccttcgacacgctgcaccgctttt

SEQ ID NO: 4258 - DNA, 60 bp, Artificial
  Synthetic oligonucleotide
atcgtttgccgccattgcctccgatgtcctgcctcctcccgaagccagcaacgaagaaca

SEQ ID NO: 4259 - DNA, 60 bp, Artificial
  Synthetic oligonucleotide
ggttgaaccatccgcacccgccaccacgccagacaacagaccgagcagaataaaaccgac

SEQ ID NO: 4260 - DNA, 60 bp, Artificial
  Synthetic oligonucleotide
cgacagggcgaaggcgatggagagggcgcgacgacgggaaaatttcatgctgacttcctt

SEQ ID NO: 4261 - DNA, 60 bp, Artificial
  Synthetic oligonucleotide
ccgaatcacccgccgcaacaacagaacattcacgcacacttatctccttccgtaccgccg

SEQ ID NO: 4262 - DNA, 60 bp, Artificial
  Synthetic oligonucleotide
agctggtgcacccgtttgcttccgccatcgacacccctttgccgacgccacccgaacata

SEQ ID NO: 4263 - DNA, 60 bp, Artificial
  Synthetic oligonucleotide
agcctcggccacaagcaccgcagcaacagccacatccacaaatctattccgcccctgttc

SEQ ID NO: 4264 - DNA, 60 bp, Artificial
  Synthetic oligonucleotide
ttgaataggccgcaaatgcacgccagtcgatcagcttccaccatgccatcacgcgcgcca

SEQ ID NO: 4265 - DNA, 60 bp, Artificial
  Synthetic oligonucleotide
gcagcatccgacaacacaaccgccattccgtccgccccgctaccaccatatgaatactgc

SEQ ID NO: 4266 - DNA, 60 bp, Artificial
  Synthetic oligonucleotide
gctttcgtcacccaccaaatcagtcccttcaaccaacccgcaaagtgagcctaatctccc

SEQ ID NO: 4267 - DNA, 60 bp, Artificial
  Synthetic oligonucleotide
caaaccacacgagctactcctcttcctcctattcccctgcaaccccgatttctccaacca

SEQ ID NO: 4268 - DNA, 60 bp, Artificial
  Synthetic oligonucleotide
ctgctagagccgctgctgttgctcccgtcccacaagctaatgtctctgcttctacccctc

SEQ ID NO: 4269 - DNA, 60 bp, Artificial
  Synthetic oligonucleotide
ccgcgacagttgacaacgctccggctgcgagaaaggaccagacgggaccgacgcttcctt

SEQ ID NO: 4270 - DNA, 60 bp, Artificial
  Synthetic oligonucleotide
ggatcaggccctttcccatggtgccgaaatgccaactgcccgccctccaattcctattgc

SEQ ID NO: 4271 - DNA, 60 bp, Artificial
  Synthetic oligonucleotide
gcgattccaaagacatccgccaacgattcctccaatgcgcccgattctccccgataatta

SEQ ID NO: 4272 - DNA, 60 bp, Artificial
  Synthetic oligonucleotide
ccgaatgcacttagccaggttaaagctcccgggcctgtcacaaaacgatgcacaaaccaa

SEQ ID NO: 4273 - DNA, 60 bp, Artificial
  Synthetic oligonucleotide
cgcaccacctccggccaacaccattcctcgttcaacaagatcagcagctaattcaggagg

SEQ ID NO: 4274 - DNA, 60 bp, Artificial
  Synthetic oligonucleotide
ccccggctaactctcggtatcccaggttttgtgtttcccgtgttgcttcatcgatccacc

SEQ ID NO: 4275 - DNA, 60 bp, Artificial
  Synthetic oligonucleotide
cgatcgccctcaaggatccgttgacttaccagatatcacccaaccaccagccaatcctca

SEQ ID NO: 4276 - DNA, 60 bp, Artificial
  Synthetic oligonucleotide
catggactctttccgctcctttcaatgttgatttgattcgcccaacccctgcccttctca

SEQ ID NO: 4277 - DNA, 60 bp, Artificial
  Synthetic oligonucleotide
atccagtcacacccttctagatgcgttggatcggttaaagttcgctgcccgtcccattct

SEQ ID NO: 4278 - DNA, 60 bp, Artificial
  Synthetic oligonucleotide
cgaccctgttgccaacttccatcgctccaggccctccacccgtgactaatgctaaaggag

SEQ ID NO: 4279 - DNA, 60 bp, Artificial
  Synthetic oligonucleotide
gctgcgccacggacgccacacttgtgataatttctccgcttgcttcgccgttactttgcc

SEQ ID NO: 4280 - DNA, 60 bp, Artificial
  Synthetic oligonucleotide
cgaagcgcgatggggttgatgggtacttggaataaaatctctcgcgtggccagggatcgg

SEQ ID NO: 4281 - DNA, 60 bp, Artificial
  Synthetic oligonucleotide
gcaatccaacaaggtggtacgacgctaaaagattttctccaaccggatgggcatccaggc

SEQ ID NO: 4282 - DNA, 60 bp, Artificial
  Synthetic oligonucleotide
gaccctaacacgctgctcatcaggcaccttacttaaacgttgactcactaattcacgctg

SEQ ID NO: 4283 - DNA, 60 bp, Artificial
  Synthetic oligonucleotide
cacgcggtgtcagtccttgaacttgatagcggcgtggcttcaaatcgaggttttctatga

SEQ ID NO: 4284 - DNA, 60 bp, Artificial
  Synthetic oligonucleotide
ggcggtcaacgccaacttgtgctcatcgctcgtgcacttgcgacagaatgtcaggtcctc

SEQ ID NO: 4285 - DNA, 60 bp, Artificial
  Synthetic oligonucleotide
ctcattgcacaacctatttcaccgactgtcagaggtttacgaacagcaaattgttgtggg

SEQ ID NO: 4286 - DNA, 60 bp, Artificial
  Synthetic oligonucleotide
cggagcccaagaacaccaccaagcccaataaagcacagtccatccgctaaaccagctagt

SEQ ID NO: 4287 - DNA, 60 bp, Artificial
  Synthetic oligonucleotide
cgcgccacccactgaaacggcttgcccaacttgaacattacgacgcgccacatagccatc

SEQ ID NO: 4288 - DNA, 60 bp, Artificial
  Synthetic oligonucleotide
ccgccaagaccgcctaagcctccgcccattaagccttgcattccacgcatcattttagcc

SEQ ID NO: 4289 - DNA, 60 bp, Artificial
  Synthetic oligonucleotide
cgcctccgctacaattcgccccgcaagacccgtcaaagcaacaccgtgaccagaataacc

SEQ ID NO: 4290 - DNA, 60 bp, Artificial
  Synthetic oligonucleotide
cgtcctgaacgcacagcataaatggcaaattcttcttttaagcgatccacctgttctgca

SEQ ID NO: 4291 - DNA, 60 bp, Artificial
  Synthetic oligonucleotide
cgctacaccgccttttgcacgagtacgattgccttcactgcgccggtcatgatcacgatc

SEQ ID NO: 4292 - DNA, 60 bp, Artificial
  Synthetic oligonucleotide
gctacaaaagccgccgtgcctaacccgactcctaaatattctcccgccatcacaagtgca

SEQ ID NO: 4293 - DNA, 60 bp, Artificial
  Synthetic oligonucleotide
ggcgtgccttctggtgcatttcgagggtagccatcaccatagcccattgccacgacacct

SEQ ID NO: 4294 - DNA, 60 bp, Artificial
  Synthetic oligonucleotide
ggtatccacccctcccatcgtcacttctgcggtgcgatagccctcagtgccattcggtaa

SEQ ID NO: 4295 - DNA, 60 bp, Artificial
  Synthetic oligonucleotide
caatccaccgcgaccccgacgcattacttgacgatttggagccgaccgccgagcaatatc

SEQ ID NO: 4296 - DNA, 60 bp, Artificial
  Synthetic oligonucleotide
cggcgcaatacagccaagccctctaccgtatataaccgcccaatgccaccaaaccgccgt

SEQ ID NO: 4297 - DNA, 60 bp, Artificial
  Synthetic oligonucleotide
cagcgactcccggcacccagaaattcaacccaagctgcttccttccggccctgactaagt

SEQ ID NO: 4298 - DNA, 60 bp, Artificial
  Synthetic oligonucleotide
gacagtccccggcgttacaatccgcactactttacgctcgaccggtccttttgaagcccc

SEQ ID NO: 4299 - DNA, 60 bp, Artificial
  Synthetic oligonucleotide
gccacgccgatttccgtgaagatccggaattgcacgcacttggcacaccgtccggcttta

SEQ ID NO: 4300 - DNA, 60 bp, Artificial
  Synthetic oligonucleotide
caccggttccttttgccatgactgtcgccattgccgcttcagccgcctttatgaccccga

SEQ ID NO: 4301 - DNA, 60 bp, Artificial
  Synthetic oligonucleotide
tttcgaagaagaccagcaacgcctcagccagccgcacgccattgccagcatttacgaccc

SEQ ID NO: 4302 - DNA, 60 bp, Artificial
  Synthetic oligonucleotide
gcccggtaaatttcacttcgcccacacccaatgcacggcctttaccctcaccgccaatcc

SEQ ID NO: 4303 - DNA, 60 bp, Artificial
  Synthetic oligonucleotide
cggcgtgccgtgcgcatcgtccgcacagacaaaatggattttattgccacgcatacgttg

SEQ ID NO: 4304 - DNA, 60 bp, Artificial
  Synthetic oligonucleotide
cccattgtgctcttcgcaccagccggtgcagccattaaaagtgcggtcagatttcgggcg

SEQ ID NO: 4305 - DNA, 60 bp, Artificial
  Synthetic oligonucleotide
cgcggcttgaaagagaacgtaatcgtaggtcgtttaatccctgcgggtaccggtttcgca

SEQ ID NO: 4306 - DNA, 60 bp, Artificial
  Synthetic oligonucleotide
ctgttgaggacgccagcgttcttgggtgggttcaactcccattcccctccgccaatccat

SEQ ID NO: 4307 - DNA, 60 bp, Artificial
  Synthetic oligonucleotide
cacttgctaatagcaccatcgcacccggcaccataccaccgacattatgtgcacaattcc

SEQ ID NO: 4308 - DNA, 60 bp, Artificial
  Synthetic oligonucleotide
gcaagggctttatcaatccggtgagggtatttgtacgcaatgtgaagcggaagggttccg

SEQ ID NO: 4309 - DNA, 60 bp, Artificial
  Synthetic oligonucleotide
cggaacccttccgcttcacattgcgtacaaataccctcaccggattgataaagcccttgc

SEQ ID NO: 4310 - DNA, 60 bp, Artificial
  Synthetic oligonucleotide
cggcgaactggctctgccgcaccccataataattggtcacccacggtaaaagctgccaaa

SEQ ID NO: 4311 - DNA, 60 bp, Artificial
  Synthetic oligonucleotide
ctacggcacaggtcgccgcaaaagctcttcagctcgtgtatttatcaaaccgggcagtgg

SEQ ID NO: 4312 - DNA, 60 bp, Artificial
  Synthetic oligonucleotide
cggggtgccaaacggtcgatttgcttgatatgtggaggctaaaccccaaacaaaaggaaa

SEQ ID NO: 4313 - DNA, 60 bp, Artificial
  Synthetic oligonucleotide
gcgtggtatttcagcaaatacaccgtgaattttacgagtaccttcgggcgttggttcggc

SEQ ID NO: 4314 - DNA, 60 bp, Artificial
  Synthetic oligonucleotide
gaaatgccctggctagttttgctttggaaggggaatatccctctaatgaggcggaggatc

SEQ ID NO: 4315 - DNA, 60 bp, Artificial
  Synthetic oligonucleotide
ggcggagcgaccagctcggtaggcattgccaccattcaaatcgccaaaatgcaaggggca

SEQ ID NO: 4316 - DNA, 60 bp, Artificial
  Synthetic oligonucleotide
ccaatcgcatcgtttcgggaacacacccacacactgcggacattgctgtcgccatcacga

SEQ ID NO: 4317 - DNA, 60 bp, Artificial
  Synthetic oligonucleotide
accacactagcgagagcatcacaggcacttccaccagcacaccgaccaccgttgccaatg

SEQ ID NO: 4318 - DNA, 60 bp, Artificial
  Synthetic oligonucleotide
cgtccgccgtatgcttcaccgtccatacctggtgaaccaattggcattcccggtgcagac

SEQ ID NO: 4319 - DNA, 60 bp, Artificial
  Synthetic oligonucleotide
gcgaaggctgttgcggaatggaatcacggtgaggcgcactggtacacgcctaatctcggt

SEQ ID NO: 4320 - DNA, 60 bp, Artificial
  Synthetic oligonucleotide
acgcgaaggctgttgcggaatggaatcacggtgaggcgcactggtacacgcctaatctcg

SEQ ID NO: 4321 - DNA, 60 bp, Artificial
  Synthetic oligonucleotide
cgccatcttgtgacagcggacaatcaggagaggattgcgttcttggacgagccaagatgg

SEQ ID NO: 4322 - DNA, 60 bp, Artificial
  Synthetic oligonucleotide
ctgcacgatcagcttgtcttgctctggcgttaagcgggaatttccttgttgccatccacg

SEQ ID NO: 4323 - DNA, 60 bp, Artificial
  Synthetic oligonucleotide
gaaatgtttggtcgagaagtcgttcaagaatggggctatgcggtatttggtgaagtggtt

SEQ ID NO: 4324 - DNA, 60 bp, Artificial
  Synthetic oligonucleotide
gtcgagaagtcgttcaagaatggggctatgcggtatttggtgaagtggttgaagggatgg

SEQ ID NO: 4325 - DNA, 60 bp, Artificial
  Synthetic oligonucleotide
cgcccggacgttatccggcactctgccctgtgtagctcggactttcctctcgtttacttg

SEQ ID NO: 4326 - DNA, 60 bp, Artificial
  Synthetic oligonucleotide
ggacgttatccggcactctgccctgtgtagctcggactttcctctcgtttacttgtcccc

SEQ ID NO: 4327 - DNA, 60 bp, Artificial
  Synthetic oligonucleotide
ccgtatgttgttggcgatggtggacgatttccgctgcgtgatcatcaaacttgccgaacg

SEQ ID NO: 4328 - DNA, 60 bp, Artificial
  Synthetic oligonucleotide
ccgccgtcgatttcacgcacggtgatcgacacaaaacggctttctcccggagtggaagac

SEQ ID NO: 4329 - DNA, 60 bp, Artificial
  Synthetic oligonucleotide
ccctgcaaatcgccgccgtgaaaagtcccgatttcctgcatgccgtctttatgccgtccg

SEQ ID NO: 4330 - DNA, 60 bp, Artificial
  Synthetic oligonucleotide
gtaaaagtcggtcttatggggccgttagccggtgtgggcgacccgattttctggggaacc

SEQ ID NO: 4331 - DNA, 60 bp, Artificial
  Synthetic oligonucleotide
ctgctgctgaccgccaatgcgattcacttcacagacgctacgggcacgtcctgtcctgat

SEQ ID NO: 4332 - DNA, 60 bp, Artificial
  Synthetic oligonucleotide
ctgctgctgaccgccaatgcgattcacttcacagacgctacaggcatgtcctgccctgat

SEQ ID NO: 4333 - DNA, 60 bp, Artificial
  Synthetic oligonucleotide
gcccgtagcgtctgtgaagtgaatcgcattggcggtcagcagcagaaacccaccgagagt

SEQ ID NO: 4334 - DNA, 60 bp, Artificial
  Synthetic oligonucleotide
ccgccaatgcgattcacttcacagacgctacgggcacgtcctgccctgattatgccgtca

SEQ ID NO: 4335 - DNA, 60 bp, Artificial
  Synthetic oligonucleotide
ggtcgctttagactctcaatgacggcataatcagggcaggacgtgcccgtagcgtctgtg

SEQ ID NO: 4336 - DNA, 60 bp, Artificial
  Synthetic oligonucleotide
gcgggtagtagcatttgggctcgccctgcaatccgtgtattcgacacttacgcacactgg

SEQ ID NO: 4337 - DNA, 60 bp, Artificial
  Synthetic oligonucleotide
cgaagcacctgaagactgcgaatactatatgtgtggtccaccggtgatgaatgctgcggt

SEQ ID NO: 4338 - DNA, 60 bp, Artificial
  Synthetic oligonucleotide
cgtggttgtggatcacgggttacccaagtgccgccttgttccggtgctttgcttgagcca

SEQ ID NO: 4339 - DNA, 60 bp, Artificial
  Synthetic oligonucleotide
gccatcgccaaaatttcgccggtttgcacatcaaccaacaccgccgtgccggattcggca

SEQ ID NO: 4340 - DNA, 60 bp, Artificial
  Synthetic oligonucleotide
ccaagcgccgcacaggtttcccactgccctttcggaatcgcttttaccgcaccgtggaat

SEQ ID NO: 4341 - DNA, 60 bp, Artificial
  Synthetic oligonucleotide
cggtgggaaacgtattcgcccgttaattgcggtgcttgcggctcgtgccttgggttatcg

SEQ ID NO: 4342 - DNA, 60 bp, Artificial
  Synthetic oligonucleotide
cggcgactcagaaaatgacgtgattgccgccaaagccgccggttgtgatgtggttggact

SEQ ID NO: 4343 - DNA, 60 bp, Artificial
  Synthetic oligonucleotide
ccggcactctgccctgtgtagctcggactttcctctcgtttacttgtcccaccaggtcgt

SEQ ID NO: 4344 - DNA, 60 bp, Artificial
  Synthetic oligonucleotide
tagaaagggcacgataaacccgccgccgcctatgcccgccccgctggataaaattccgat

SEQ ID NO: 4345 - DNA, 60 bp, Artificial
  Synthetic oligonucleotide
cgcccgtccattcacgctcgccgcataacgtgtcaaatcctggcgcaaatccgtcaacag

SEQ ID NO: 4346 - DNA, 60 bp, Artificial
  Synthetic oligonucleotide
gccgtgccgcaatgcatatccttaccgtcatgccaacccgatgttcccgcactgtccgtt

SEQ ID NO: 4347 - DNA, 60 bp, Artificial
  Synthetic oligonucleotide
cggcataattccgaaccgatggaaccgcccgcacccgtcaccataacgactttgccctga

SEQ ID NO: 4348 - DNA, 60 bp, Artificial
  Synthetic oligonucleotide
ctgccgcattccgccaaagtccgcacgctcgcgcctacatcaaagccgcaatcccataaa

SEQ ID NO: 4349 - DNA, 60 bp, Artificial
  Synthetic oligonucleotide
agttctcccgccatgccgatattacccgaatggactttgccgttgaacaccaggccgccg

SEQ ID NO: 4350 - DNA, 60 bp, Artificial
  Synthetic oligonucleotide
ctgccgccacttgttccgctttacgacgactgcccgccactccgacaaatgtacgatcca

SEQ ID NO: 4351 - DNA, 60 bp, Artificial
  Synthetic oligonucleotide
ggcgggaggatttcgccctggtggtcaaacattaaatattaatggaatgggtgatgctga

SEQ ID NO: 4352 - DNA, 60 bp, Artificial
  Synthetic oligonucleotide
ccgggaccggcaccgactgcggcaccgacacgtaaacgaccaaattcatctttacacgca

SEQ ID NO: 4353 - DNA, 60 bp, Artificial
  Synthetic oligonucleotide
cgtgcaggtggttacactcgcattttgaaatgtggtttccgtgcaggcgataatgcacca

SEQ ID NO: 4354 - DNA, 60 bp, Artificial
  Synthetic oligonucleotide
gcggtttatccgcttgccgttccgtctatcgcctctcccggtgcaatgatggcgatcgta

SEQ ID NO: 4355 - DNA, 60 bp, Artificial
  Synthetic oligonucleotide
gccgaacgtatggcgacattaggcgtagcgccgaacggtttatccggtaatttagttgcg

SEQ ID NO: 4356 - DNA, 60 bp, Artificial
  Synthetic oligonucleotide
gggtcgcaaagcgtgcaatgcccatatcaatgccgatttctccgcctttatgcatcggga

SEQ ID NO: 4357 - DNA, 60 bp, Artificial
  Synthetic oligonucleotide
ggcggaggggaatgggagttgaacccacccaagaacgctggcgtcctcaacaggatttga

SEQ ID NO: 4358 - DNA, 60 bp, Artificial
  Synthetic oligonucleotide
gcggcaggagatacgttccgtgctgcggctgttgagcagcttcaagtttggggagaacgt

SEQ ID NO: 4359 - DNA, 60 bp, Artificial
  Synthetic oligonucleotide
gcagcaggtgatactttccgcgcagcggctgttgagcagcttcaagtttggggagaacgc

SEQ ID NO: 4360 - DNA, 60 bp, Artificial
  Synthetic oligonucleotide
cttcgctggcttgctgagaagattggaaacccacgcatcgtagagcgcgctaattcgagc

SEQ ID NO: 4361 - DNA, 60 bp, Artificial
  Synthetic oligonucleotide
gctaaagcaacccctgtgcccacagggtaattgggtgccttttggcatagcgttctgccg

SEQ ID NO: 4362 - DNA, 60 bp, Artificial
  Synthetic oligonucleotide
ccggcttaacacatgatacattaacctacgctcaaccagactcattttctgcgttgtttc

SEQ ID NO: 4363 - DNA, 60 bp, Artificial
  Synthetic oligonucleotide
cgccctagcctgtactaggtaggtttaacttgagcttggcaagtcatccaagtggccctt

SEQ ID NO: 4364 - DNA, 60 bp, Artificial
  Synthetic oligonucleotide
gctgcggcagaacaccgatggaaacattacttgatggaaaacggatttgggcggaaaagc

SEQ ID NO: 4365 - DNA, 60 bp, Artificial
  Synthetic oligonucleotide
cagcaggtgatttgagggccaaaggtgggagaccagtcaaaatcaatgctggaatgaaag

SEQ ID NO: 4366 - DNA, 60 bp, Artificial
  Synthetic oligonucleotide
gcgcgcattcttgccatctgtaaatgttgccaaggcccgatagaatcgccaaaccacgca

SEQ ID NO: 4367 - DNA, 60 bp, Artificial
  Synthetic oligonucleotide
gcgtggtttggcgattctatcgggccttggcaacatttacagatggcaagaatgcgtgct

SEQ ID NO: 4368 - DNA, 60 bp, Artificial
  Synthetic oligonucleotide
gggcagcgaggatttaataaacagcctgttgggcgatcgtattttccagggacgacccct

SEQ ID NO: 4369 - DNA, 60 bp, Artificial
  Synthetic oligonucleotide
gagcagttaacgcaaactgcaagcgagagagttcaacaacgtctaacatctcagtcctct

SEQ ID NO: 4370 - DNA, 60 bp, Artificial
  Synthetic oligonucleotide
ccctctgctcctggcaagttagctttgaaacggccatctgcggacaccaattgtagcact

SEQ ID NO: 4371 - DNA, 60 bp, Artificial
  Synthetic oligonucleotide
ggatgaaggtggctggagaagagtttaggctctaccgacgaggtaaaatctttcaggtgc

SEQ ID NO: 4372 - DNA, 60 bp, Artificial
  Synthetic oligonucleotide
gcctgaaccgcacactctctggcacggcgacgtggagaaactttcataaaacctctgagt

SEQ ID NO: 4373 - DNA, 60 bp, Artificial
  Synthetic oligonucleotide
ggctcaattgatgctaatcgtggcgatccacaattaggctgggataccgaccaattccca

SEQ ID NO: 4374 - DNA, 60 bp, Artificial
  Synthetic oligonucleotide
aggaacactgcccaacgactggttttgaagaccaggagcaccaccaggcaccatccaccc

SEQ ID NO: 4375 - DNA, 60 bp, Artificial
  Synthetic oligonucleotide
ggctctagcgccgtgtttggccattttaactcccgccgccgccgcaataatagaagcagc

SEQ ID NO: 4376 - DNA, 60 bp, Artificial
  Synthetic oligonucleotide
gcccatcctacgcaggtttacagccattagtgccgttaccgaagatttacccacgccgcc

SEQ ID NO: 4377 - DNA, 60 bp, Artificial
  Synthetic oligonucleotide
gcttctgctaagagctaagacccacacctaacattccgccaagcccgccagccactacgg

SEQ ID NO: 4378 - DNA, 60 bp, Artificial
  Synthetic oligonucleotide
gccatgcagcctccgaaccagccaatcccgcaccaataactgtaaccctgtgctctgtca

SEQ ID NO: 4379 - DNA, 60 bp, Artificial
  Synthetic oligonucleotide
gctttcgggtctggaggatctccgcagtgttgtcggttggctgtggcttcggcttgtatc

SEQ ID NO: 4380 - DNA, 60 bp, Artificial
  Synthetic oligonucleotide
ccacctccactccgatgatgtttactgccgtccgttgacctgcccgagcctgctctactt

SEQ ID NO: 4381 - DNA, 60 bp, Artificial
  Synthetic oligonucleotide
ttctttactgacctccctgaccgccgccaccttgagagccctgttgctgtccttcctgtc

SEQ ID NO: 4382 - DNA, 60 bp, Artificial
  Synthetic oligonucleotide
catcctgccgtatcactttccagcgtctgccaccattacccacgtcccgttccaccctgt

SEQ ID NO: 4383 - DNA, 60 bp, Artificial
  Synthetic oligonucleotide
gggtgccacaaggattgccaaatcaaagccaacctcaagccgaaacgcaaacccagagcc

SEQ ID NO: 4384 - DNA, 60 bp, Artificial
  Synthetic oligonucleotide
cggcgcttcacctgctcctcccatgtcaccgtcatagctcccatacaactgcccttcgat

SEQ ID NO: 4385 - DNA, 60 bp, Artificial
  Synthetic oligonucleotide
cagagacagcactgattggcgagattggacgtgagcagcaacttcgggcggtgcttggag

SEQ ID NO: 4386 - DNA, 60 bp, Artificial
  Synthetic oligonucleotide
ccagtcaccccgccgccactaccatcactgccttgttccttgatacttctctcgctgacc

SEQ ID NO: 4387 - DNA, 60 bp, Artificial
  Synthetic oligonucleotide
cgctaaccctataggcttggtgatcggtcttattgcggggcttgttgcggctggcgtgct

SEQ ID NO: 4388 - DNA, 60 bp, Artificial
  Synthetic oligonucleotide
ccgcccctgcctgtcccctcttccgataaattcacctttaggatcgcagccttcacccgt

SEQ ID NO: 4389 - DNA, 60 bp, Artificial
  Synthetic oligonucleotide
gcccggagtccattcacctttatcgtcgccctgtcgttgtcgattacaagcacgtcgccc

SEQ ID NO: 4390 - DNA, 60 bp, Artificial
  Synthetic oligonucleotide
ttcggaagaaagactgtccagcgcatttcccatcccggccgccagctcttccagacgctt

SEQ ID NO: 4391 - DNA, 60 bp, Artificial
  Synthetic oligonucleotide
taccaccggcgtatcaggggcaattttccgcagttcctccagcgtctccagcccgttcat

SEQ ID NO: 4392 - DNA, 60 bp, Artificial
  Synthetic oligonucleotide
accgactttaccatttccgattttgttgccgacgcccgtgctgccaccccttcagcagcg

SEQ ID NO: 4393 - DNA, 60 bp, Artificial
  Synthetic oligonucleotide
cctcaacccaccgcacctttccctcaacaatgcccctcagacgcacagaaacggcccaaa

SEQ ID NO: 4394 - DNA, 60 bp, Artificial
  Synthetic oligonucleotide
gcgattgctgcctgacggttgtttatccccacgccctactgaacccacatccctgccaag

SEQ ID NO: 4395 - DNA, 60 bp, Artificial
  Synthetic oligonucleotide
tttgtatgtccgccgcaactgttcccgcctcaatgcccgccggccgaataagtacgtgac

SEQ ID NO: 4396 - DNA, 60 bp, Artificial
  Synthetic oligonucleotide
acaattaaactactggctccccttccgtcccaccaccttctccacgcacccgtacccctg

SEQ ID NO: 4397 - DNA, 60 bp, Artificial
  Synthetic oligonucleotide
gatgttttcccgtgcatcacttttcccgcctgcaccaccttgccgccaaaagcctgccca

SEQ ID NO: 4398 - DNA, 60 bp, Artificial
  Synthetic oligonucleotide
ccactgcctcgattacgcctgcttcttccagtgccccgaccaccacgaaaagcccaatga

SEQ ID NO: 4399 - DNA, 60 bp, Artificial
  Synthetic oligonucleotide
taacatccgttctggaagccgccgaaacagcaaccagcaccatgaccctgctcctggcca

SEQ ID NO: 4400 - DNA, 60 bp, Artificial
  Synthetic oligonucleotide
tcccaggcgcacaaactgttcatccgctgcgagcaccgtccctgttaccactcttccgtt

SEQ ID NO: 4401 - DNA, 60 bp, Artificial
  Synthetic oligonucleotide
ccggccagccaaaacctgcgctgcaactggtgcctgtactccctcttctccttcagcttt

SEQ ID NO: 4402 - DNA, 60 bp, Artificial
  Synthetic oligonucleotide
ccgaagcttgccgcactcatgatcagcccttccattctcagccccgtcttccattcgcca

SEQ ID NO: 4403 - DNA, 60 bp, Artificial
  Synthetic oligonucleotide
ccgtcggaataccataccgctccaagatccgccagccttcttcctgttcatgtccccgca

SEQ ID NO: 4404 - DNA, 60 bp, Artificial
  Synthetic oligonucleotide
cgccgccccaattccaatgccgcctttagttcagccgctttagccgttcccataccacga

SEQ ID NO: 4405 - DNA, 60 bp, Artificial
  Synthetic oligonucleotide
tgactgcgcccaatagtttcaccgccgagttccaggtcacaaagcaaagcgccgatgccc

SEQ ID NO: 4406 - DNA, 60 bp, Artificial
  Synthetic oligonucleotide
gagcagcccgcccgcttttataccctgttcttccgcttgaatcccacctccgccatttcc

SEQ ID NO: 4407 - DNA, 60 bp, Artificial
  Synthetic oligonucleotide
gattcatcacttcacggtactcccaaacccgcagccccgtcctttccaagtcccagtgcc

SEQ ID NO: 4408 - DNA, 60 bp, Artificial
  Synthetic oligonucleotide
acagtccctgtacaaacccagccggcaccaagtcaaccagcaccaacccaatccgttccg

SEQ ID NO: 4409 - DNA, 60 bp, Artificial
  Synthetic oligonucleotide
tttgtttcacttcccgcacccgaaccatcagccggctccagacatccccttcctgctcca

SEQ ID NO: 4410 - DNA, 60 bp, Artificial
  Synthetic oligonucleotide
gcccgatccatcccttgcttactccccgcgattcctctccagatgtttccaccaccaacc

SEQ ID NO: 4411 - DNA, 60 bp, Artificial
  Synthetic oligonucleotide
ccgtccgctccctcaaaatccagcccgtcctcccacatacctacatggcaatgagcgtca

SEQ ID NO: 4412 - DNA, 60 bp, Artificial
  Synthetic oligonucleotide
atcaatcccacaaagctgatgctgccgctgaccgccactgaggaagccgccaaagcaacg

SEQ ID NO: 4413 - DNA, 60 bp, Artificial
  Synthetic oligonucleotide
aaatcaaaatccttgggctgcttttcgggtctgagtgggcggggcggtgtgggagctgag

SEQ ID NO: 4414 - DNA, 60 bp, Artificial
  Synthetic oligonucleotide
gctcccgccagtatgatcacgtcagcaccatctttctcaaccgcctccatcgccagctct

SEQ ID NO: 4415 - DNA, 60 bp, Artificial
  Synthetic oligonucleotide
accgtagacttttcctgctcaaaccagcccagttccaccagccgctcaaacagccgtccc

SEQ ID NO: 4416 - DNA, 60 bp, Artificial
  Synthetic oligonucleotide
cacaaaagcaccgaactgagccagcctcttcaccacaccgctgaccacatccccttcctg

SEQ ID NO: 4417 - DNA, 60 bp, Artificial
  Synthetic oligonucleotide
ttcaagctgttggaagatttggcggacgttttaggggcagcggtaggggcttcccgggca

SEQ ID NO: 4418 - DNA, 60 bp, Artificial
  Synthetic oligonucleotide
ggccgcgaaccttccaagctaaccaccacagccgaaccgatacaatcatgctggcgatcc

SEQ ID NO: 4419 - DNA, 60 bp, Artificial
  Synthetic oligonucleotide
ctcaagtactgctttgccgcctcgtacccctcatttagtttcgcatacagtccccgcacc

SEQ ID NO: 4420 - DNA, 60 bp, Artificial
  Synthetic oligonucleotide
ggtttacccggagtcaccttaccgtcttgctccacctttgcccagcccacgattttcccc

SEQ ID NO: 4421 - DNA, 60 bp, Artificial
  Synthetic oligonucleotide
ggctgcagctacttccataatccccaccacaaccggagcggcaaaagcggtggccttagt

SEQ ID NO: 4422 - DNA, 60 bp, Artificial
  Synthetic oligonucleotide
cgcagccgccaccaaccgcaccccttccgccgtacttaaatgagcaacatgaagttttgc

SEQ ID NO: 4423 - DNA, 60 bp, Artificial
  Synthetic oligonucleotide
ttttacagcccgatactccaccaccaccaccggccagcccagttgcgggtcataaaggcg

SEQ ID NO: 4424 - DNA, 60 bp, Artificial
  Synthetic oligonucleotide
ccgagcagttgcaggagcttgataccgaaaacgttaaacccaccgcccacgtgctgccca

SEQ ID NO: 4425 - DNA, 60 bp, Artificial
  Synthetic oligonucleotide
ccgccagcaccaccacatccgccagaacttctccttctttccgcccggcaataactcctt

SEQ ID NO: 4426 - DNA, 60 bp, Artificial
  Synthetic oligonucleotide
cccgccccaccgtaccaaaacccagaagtccaattttgaccgctgccatttcctctcccc

SEQ ID NO: 4427 - DNA, 60 bp, Artificial
  Synthetic oligonucleotide
caactttcatcggcttctccctccgcatcaccgctcttcaagctctccagatacgcccgc

SEQ ID NO: 4428 - DNA, 60 bp, Artificial
  Synthetic oligonucleotide
gccccgccgcaagagccaacccacctgataactttaagccccgagggacgtttaagggaa

SEQ ID NO: 4429 - DNA, 60 bp, Artificial
  Synthetic oligonucleotide
accccaccgccgcacttctacattttcgctgctgtctttaccaaccggcaccgactcgtg

SEQ ID NO: 4430 - DNA, 60 bp, Artificial
  Synthetic oligonucleotide
cacccgcatgagtactgcccgcaaccataccgccacccacctgctccacaaagccttaaa

SEQ ID NO: 4431 - DNA, 60 bp, Artificial
  Synthetic oligonucleotide
accctggggcgctgacttctgcttcgtttggaaaagctgaggcaacggcaattctcgcgg

SEQ ID NO: 4432 - DNA, 60 bp, Artificial
  Synthetic oligonucleotide
ggagtaaacacaggcctcccgaatatgccagggtgtaacaaaatccggttcccctacccc

SEQ ID NO: 4433 - DNA, 60 bp, Artificial
  Synthetic oligonucleotide
cacgccgcacgccagcgctcaaccaaatccgccaccgtttgcatatgacgttcaacttgc

SEQ ID NO: 4434 - DNA, 60 bp, Artificial
  Synthetic oligonucleotide
cggccttcaccaagtccaacgccgcttctgccgtcgcaatattcccgcccacaacatcaa

SEQ ID NO: 4435 - DNA, 60 bp, Artificial
  Synthetic oligonucleotide
gcgccgaccaactcgcctgcaccatagactttaacgtgaatccgcccgcccgacatttca

SEQ ID NO: 4436 - DNA, 60 bp, Artificial
  Synthetic oligonucleotide
cgcgcaaactgaatggctgcaattttaccttccacgccacgctcgccaaaaccacccgga

SEQ ID NO: 4437 - DNA, 60 bp, Artificial
  Synthetic oligonucleotide
gatgcgttccgtgatgctgaaacagtccgaggggaaggggatgcaaaagccgccgggatt

SEQ ID NO: 4438 - DNA, 60 bp, Artificial
  Synthetic oligonucleotide
gagttgctcgcccgaatagaagtgctgttaaaacgccccacgcaaccgcaagcacgacgc

SEQ ID NO: 4439 - DNA, 60 bp, Artificial
  Synthetic oligonucleotide
gactgactggcttgttttgccatcaaccccaccactcgcaacgtcaacaacccggccacc

SEQ ID NO: 4440 - DNA, 60 bp, Artificial
  Synthetic oligonucleotide
gacggcctcttcgcgcaaaatcgtcacaggaaccccatctctttcagcggcccacaacga

SEQ ID NO: 4441 - DNA, 60 bp, Artificial
  Synthetic oligonucleotide
gccacccctgaagcacaatctctttccccaacgctcgaacccagcagttacatcacccag

SEQ ID NO: 4442 - DNA, 60 bp, Artificial
  Synthetic oligonucleotide
cgcacatcacccgacaccacttcgatttcgtccaggtaaggcgactgatccaaccacccc

SEQ ID NO: 4443 - DNA, 60 bp, Artificial
  Synthetic oligonucleotide
ggccctgacgctaatccgctttgcccgatatagccgatgacttgcccttgacgaacccac

SEQ ID NO: 4444 - DNA, 60 bp, Artificial
  Synthetic oligonucleotide
ggtggtggtggtgattttggctgtgcttgtctctgtcgctacttggacgctgaccccgag

SEQ ID NO: 4445 - DNA, 60 bp, Artificial
  Synthetic oligonucleotide
gcatttccagctgccgccgtcgccgcgatgtgatttgaataagcgccgccaaacgtcagt

SEQ ID NO: 4446 - DNA, 60 bp, Artificial
  Synthetic oligonucleotide
cgccgccgaaaaccgtcaaccccaccaaagccaaacgccgactttatgaagccatgtcgg

SEQ ID NO: 4447 - DNA, 60 bp, Artificial
  Synthetic oligonucleotide
aagcccgttgccaacccaaaagccagtgatgcgcgaaaacaaggtgaacaggccagtcgc

SEQ ID NO: 4448 - DNA, 60 bp, Artificial
  Synthetic oligonucleotide
cgtggcgttgaagatgttctgatcgccgtcacggatggcctcaaaggaataccggaggcg

SEQ ID NO: 4449 - DNA, 60 bp, Artificial
  Synthetic oligonucleotide
ggttgcgcaacatcaccgccaactggggtcatgcggcacacgactggaaagtggcaatga

SEQ ID NO: 4450 - DNA, 60 bp, Artificial
  Synthetic oligonucleotide
tcattgccactttccagtcgtgtgccgcatgaccccagttggcggtgatgttgcgcaacc

SEQ ID NO: 4451 - DNA, 60 bp, Artificial
  Synthetic oligonucleotide
tcgaccaatcagcgcaatggcaaaagcagcaagacggttctgaccgacgacgggccgctt

SEQ ID NO: 4452 - DNA, 60 bp, Artificial
  Synthetic oligonucleotide
gcctggtagatcggcttgagtgctttggccagtgcccgacgtttatcccaagcggcatag

SEQ ID NO: 4453 - DNA, 60 bp, Artificial
  Synthetic oligonucleotide
gggcccgcttcaaaggcgttaagctcttgctcagccacatcggcattgatcgcctggtag

SEQ ID NO: 4454 - DNA, 60 bp, Artificial
  Synthetic oligonucleotide
acggtataacccgatcccaggcgcgacgccatgcagcaactacagtcggatactgcttgc

SEQ ID NO: 4455 - DNA, 60 bp, Artificial
  Synthetic oligonucleotide
gtcgcagcctcatcggtcgggaagtgccctcgagtcttgatgatcttgcgtaactgggca

SEQ ID NO: 4456 - DNA, 60 bp, Artificial
  Synthetic oligonucleotide
gctcgatcagctcttggggaatcgagggcaactccctcgctgttgcattggcggacttct

SEQ ID NO: 4457 - DNA, 60 bp, Artificial
  Synthetic oligonucleotide
gcttcggcgctcatcgggcctttaacaaactgctcgatcagctcttggggaatcgagggc

SEQ ID NO: 4458 - DNA, 60 bp, Artificial
  Synthetic oligonucleotide
ccctcgattccccaagagctgatcgagcagtttgttaaaggcccgatgagcgccgaagcc

SEQ ID NO: 4459 - DNA, 60 bp, Artificial
  Synthetic oligonucleotide
cccggggcatgacggtgcgtgagatccgcgcttttctatctgagcagtatggaactgacg

SEQ ID NO: 4460 - DNA, 60 bp, Artificial
  Synthetic oligonucleotide
gatgcccgactgggccgaagcgcccgccactttagcaatggttatcggtccactcaagtt

SEQ ID NO: 4461 - DNA, 60 bp, Artificial
  Synthetic oligonucleotide
ccgtgactcagaagcccgaccagtgtcttggtgaatggatcgaccgtgaagcactcgcag

SEQ ID NO: 4462 - DNA, 60 bp, Artificial
  Synthetic oligonucleotide
ccggtgtgaccgaggctatgtaccccatgatgaaatcgaccgagaacctggcgtgcagct

SEQ ID NO: 4463 - DNA, 60 bp, Artificial
  Synthetic oligonucleotide
gcgagctgggttcgttcgagtcgttcatgcgctcgctcgatgcgtatgcgtacaaccaca

SEQ ID NO: 4464 - DNA, 60 bp, Artificial
  Synthetic oligonucleotide
aagctcaaagagccggccgagcgctacctgatgacgatcttcgccatgggctgcaatctc

SEQ ID NO: 4465 - DNA, 60 bp, Artificial
  Synthetic oligonucleotide
cccgggcaaacggccagtagacctgcggggcgatataatcaatgatgccgtcaatgaccc

SEQ ID NO: 4466 - DNA, 60 bp, Artificial
  Synthetic oligonucleotide
cggccacgtactttggcgatcgctgcgccgggcgtgacgcaggtgtaatagagatcaata

SEQ ID NO: 4467 - DNA, 60 bp, Artificial
  Synthetic oligonucleotide
gcgggtcgtcagatttattccgccagacgcctgccgggctgataccaaacaagacatccg

SEQ ID NO: 4468 - DNA, 60 bp, Artificial
  Synthetic oligonucleotide
ctgtcctcataaccctctggcggtgtgtagacggccatgatctcgtccttacgcagcacg

SEQ ID NO: 4469 - DNA, 60 bp, Artificial
  Synthetic oligonucleotide
attccctacaccgccgtagccgccgacctcaccaaccagcaggaaatctggttccaggaa

SEQ ID NO: 4470 - DNA, 60 bp, Artificial
  Synthetic oligonucleotide
cagtaggcgcagcactggaaagccataccagagcatgctcagcacagttgccgggtcttc

SEQ ID NO: 4471 - DNA, 60 bp, Artificial
  Synthetic oligonucleotide
ctcttattcaccgaacacgaccgcctagcagaccagaacacagcagcgatccgccgcgat

SEQ ID NO: 4472 - DNA, 60 bp, Artificial
  Synthetic oligonucleotide
cgtcgccgacaaactcggccaccgcaagctattggcgctggttggctacggattctagaa

SEQ ID NO: 4473 - DNA, 60 bp, Artificial
  Synthetic oligonucleotide
gccgacgcccctgtaggcagcgtgaatcgggcgctcagcaagggattttataatcgctct

SEQ ID NO: 4474 - DNA, 60 bp, Artificial
  Synthetic oligonucleotide
gcagaaacggctgcgctacaacgacatggtggcctcgtcggtgatcctgcagaacactgt

SEQ ID NO: 4475 - DNA, 60 bp, Artificial
  Synthetic oligonucleotide
gcccctgacgctcgggtgagacaggtcaagttcttcggctggtcgctcgataagtattgg

SEQ ID NO: 4476 - DNA, 60 bp, Artificial
  Synthetic oligonucleotide
acttccccagtgccatcctgctgggagccttgcatggcctagagccagggcattcgaaaa

SEQ ID NO: 4477 - DNA, 60 bp, Artificial
  Synthetic oligonucleotide
cgacggagacgatggtgcggattctggtgctcaagcggctgtacaacctgtcggatgaac

SEQ ID NO: 4478 - DNA, 60 bp, Artificial
  Synthetic oligonucleotide
tcatgccgaggggacgtatcgattaacgaagctggagaaccggtgttgcgccgagtagcg

SEQ ID NO: 4479 - DNA, 60 bp, Artificial
  Synthetic oligonucleotide
cgaggaaatcttgccggcctggatcgacaatgcgacctgcatcagatcctgccagtgggt

SEQ ID NO: 4480 - DNA, 60 bp, Artificial
  Synthetic oligonucleotide
aaatctgccaatcgttactcgacaggcacgtgcgcagcttggcgactgcctcttgggcgt

SEQ ID NO: 4481 - DNA, 60 bp, Artificial
  Synthetic oligonucleotide
tgctgcagttgccgcagttccagttgcagttgttgcacctgcgactcgtgtcgacgctgt

SEQ ID NO: 4482 - DNA, 60 bp, Artificial
  Synthetic oligonucleotide
gccaaggcggtttctgcgaggttgttgagcgtcgaataagccggaagctcatagccacgc

SEQ ID NO: 4483 - DNA, 60 bp, Artificial
  Synthetic oligonucleotide
tgtacatggtgtttgaaggcaatgtcgccggtgaacgcggctcgcacacagtaggggctg

SEQ ID NO: 4484 - DNA, 60 bp, Artificial
  Synthetic oligonucleotide
tacgcgaccaccaaagatccagtccttgccggtacgcgagtaccagtagcacatgcgtgc

SEQ ID NO: 4485 - DNA, 60 bp, Artificial
  Synthetic oligonucleotide
cgcggccgtatcgtgacctccgatcagggcgtggagttgaaagactttacccaggtcaag

SEQ ID NO: 4486 - DNA, 60 bp, Artificial
  Synthetic oligonucleotide
tgcagcaacaggtacatgttggtcagcgccttgatggtcatggtggtgccgttggaggcg

SEQ ID NO: 4487 - DNA, 60 bp, Artificial
  Synthetic oligonucleotide
cctccaacggcaccaccatgaccatcaaggcgctgaccaacatgtacctgttgctgcacc

SEQ ID NO: 4488 - DNA, 60 bp, Artificial
  Synthetic oligonucleotide
ccgcctccaatggcaccaccatgaccatcaaggcgctgaccaacatgtacctgttgctgc

SEQ ID NO: 4489 - DNA, 60 bp, Artificial
  Synthetic oligonucleotide
aacgtgatctacgacatcatcgaggacgtcaagaaggccctgaccggcatgctcggcagc

SEQ ID NO: 4490 - DNA, 60 bp, Artificial
  Synthetic oligonucleotide
atctacgacatcatcgaggacgtcaagaaggccctgaccggcatgctcggcagcgatctg

SEQ ID NO: 4491 - DNA, 60 bp, Artificial
  Synthetic oligonucleotide
accatcgaagacatgctgcgctacgtgcacctgtcgccggaggagttgatgacccactac

SEQ ID NO: 4492 - DNA, 60 bp, Artificial
  Synthetic oligonucleotide
ttacttcgtgctgaccctgcaccacatcgtcaccgaaggctgggccatggacatcttcgc

SEQ ID NO: 4493 - DNA, 60 bp, Artificial
  Synthetic oligonucleotide
cagcatgtccatggcacgctggagcaggcggatcgagtcgaagatcttgtaggcgatcag

SEQ ID NO: 4494 - DNA, 60 bp, Artificial
  Synthetic oligonucleotide
cgctgctgcaaccggtagccagaactgcggccagagccagagcagagaatttcagaacgt

SEQ ID NO: 4495 - DNA, 60 bp, Artificial
  Synthetic oligonucleotide
cagggccatggcatcaaattcatcgcccgtgagctgggtatttcgcgtaacaccgtgcgc

SEQ ID NO: 4496 - DNA, 60 bp, Artificial
  Synthetic oligonucleotide
cgcgaaatacccagctcacgggcgatgaatttgatgccatggccctgacgggccaacact

SEQ ID NO: 4497 - DNA, 60 bp, Artificial
  Synthetic oligonucleotide
tataagccttcagacgactgacgccgccgctgtaccccaatgccgtgatctcacgcagca

SEQ ID NO: 4498 - DNA, 60 bp, Artificial
  Synthetic oligonucleotide
tcgacccggatgatcgagttcgagctgtacatcgacggccagttcgtctgcagccagaag

SEQ ID NO: 4499 - DNA, 60 bp, Artificial
  Synthetic oligonucleotide
gtcaccagcccatctccatgaagaacagcgcggcgatggcatccagcaggatcaccatga

SEQ ID NO: 4500 - DNA, 60 bp, Artificial
  Synthetic oligonucleotide
tgcaatgcccgaagcgcgcgtcatgtcgcagtacatcgccagtaaccgcagcgtcgtttt

SEQ ID NO: 4501 - DNA, 60 bp, Artificial
  Synthetic oligonucleotide
gccaccccagtgccgcctgccgctttccagttttcgccttatttggtattcgagcttggg

SEQ ID NO: 4502 - DNA, 60 bp, Artificial
  Synthetic oligonucleotide
agatctggagtacggactggttgacccctgctcgaccttcactggaaaacgctgcctccc

SEQ ID NO: 4503 - DNA, 60 bp, Artificial
  Synthetic oligonucleotide
ccaacccgtcgactaccagcagacaaagccctcacacggccttcaactcgatctctctgc

SEQ ID NO: 4504 - DNA, 60 bp, Artificial
  Synthetic oligonucleotide
gcccttggctggaaagtcgcatccgcccgagacatggaaattagctgccttattgcccgg

SEQ ID NO: 4505 - DNA, 60 bp, Artificial
  Synthetic oligonucleotide
ggtcaggctatcccggtcaatcggtactccaggccactccccaattcagcccttgttgag

SEQ ID NO: 4506 - DNA, 60 bp, Artificial
  Synthetic oligonucleotide
cggctaggcagcaggcgaagaagctcgggaaaagcgaagtccgtgagattccagctgatc

SEQ ID NO: 4507 - DNA, 60 bp, Artificial
  Synthetic oligonucleotide
ccatctcttcccgctatacaacaccccagctcggcttcgatttccccagtggtatggccc

SEQ ID NO: 4508 - DNA, 60 bp, Artificial
  Synthetic oligonucleotide
cgcccaaagttgtcacgaacgatgagatcggtggcgttgtgctagcaggaggtccacgag

SEQ ID NO: 4509 - DNA, 60 bp, Artificial
  Synthetic oligonucleotide
aacgccgagatcccaaccgagccgaccacgatactctgcaactccgaatggggcctattc

SEQ ID NO: 4510 - DNA, 60 bp, Artificial
  Synthetic oligonucleotide
gagcccaagtgaaagcggtggccccggcattccctattgttgcagttacggattctgggg

SEQ ID NO: 4511 - DNA, 60 bp, Artificial
  Synthetic oligonucleotide
tcaccgtcaaatacagctacgtcgaaaacatcatcccgccccgctgtcgcaatccccgcc

SEQ ID NO: 4512 - DNA, 60 bp, Artificial
  Synthetic oligonucleotide
agccattgcgccgagtccttagtacttgatagtgcgcccagtgtaacccgcattcgcccg

SEQ ID NO: 4513 - DNA, 60 bp, Artificial
  Synthetic oligonucleotide
aggatgagcaagacgcccgactggaagccgctgaagaaatggccgatgcagccaatggtg

SEQ ID NO: 4514 - DNA, 60 bp, Artificial
  Synthetic oligonucleotide
tacgacacggttaactcctctggtggcgctgacactgtccggttgctgcgtgaagggttg

SEQ ID NO: 4515 - DNA, 60 bp, Artificial
  Synthetic oligonucleotide
tagtcgagcaagctttgtccgtttctccgagcgagaggacagcgaagcctggctgacagg

SEQ ID NO: 4516 - DNA, 60 bp, Artificial
  Synthetic oligonucleotide
aagggcagtttcattaccccgttggccgctacgctcaagagtgcgggtctgacgctggat

SEQ ID NO: 4517 - DNA, 60 bp, Artificial
  Synthetic oligonucleotide
gccgtacgagagcttgcagcatccgctgtcggtttatgagcaactgctggaggtgagagc

SEQ ID NO: 4518 - DNA, 60 bp, Artificial
  Synthetic oligonucleotide
aagagcagcaggtactattaccactgccaacacagagcctgcgcccacaacccgcccaag

SEQ ID NO: 4519 - DNA, 60 bp, Artificial
  Synthetic oligonucleotide
ttcgagacactgcccggcaagcagatacaggtggacttcaccaccattcgacgaggccgt

SEQ ID NO: 4520 - DNA, 60 bp, Artificial
  Synthetic oligonucleotide
tgcacgtaaatggcgtccgcgctcgttccgcgaaatggtcggccaggctcatgtgttgaa

SEQ ID NO: 4521 - DNA, 60 bp, Artificial
  Synthetic oligonucleotide
tgtactggctcatcccaacccacgtgacctttggtaggggtcaccactaggagaggaggc

SEQ ID NO: 4522 - DNA, 60 bp, Artificial
  Synthetic oligonucleotide
aagcgcgcctacgtcaaccgcatcaacttccgcggcaacaccaagaccgaagacgaagtg

SEQ ID NO: 4523 - DNA, 60 bp, Artificial
  Synthetic oligonucleotide
ccccatgctgatcgccgccaataaggctgtctccatcgactataccctgaccaacgacgc

SEQ ID NO: 4524 - DNA, 60 bp, Artificial
  Synthetic oligonucleotide
gaccagtgccaccatactgcccgcaatcatgcaaccgctcctgccgcgaaattaaagcgg

SEQ ID NO: 4525 - DNA, 60 bp, Artificial
  Synthetic oligonucleotide
ttaatttcgcggcaggagcggttgcatgattgcgggcagtatggtggcactggtcacccc

SEQ ID NO: 4526 - DNA, 60 bp, Artificial
  Synthetic oligonucleotide
gctcagcgaacggtgcacgatgaagctcttgttcaggcgcatcaggtcgctgacgaagga

SEQ ID NO: 4527 - DNA, 60 bp, Artificial
  Synthetic oligonucleotide
cggcgagtggaagctgcgcaacgtgatcatcaacggcatcaacatcggcaagctgttccg

SEQ ID NO: 4528 - DNA, 60 bp, Artificial
  Synthetic oligonucleotide
cagcatgtccatggcgcgttgcagcaggcggatcgagtcgaagatcttgtaggcgatcag

SEQ ID NO: 4529 - DNA, 60 bp, Artificial
  Synthetic oligonucleotide
cctgcttacccaccgctgctgcttcagatgagtcctgcctacacacctcgaccgctcaaa

SEQ ID NO: 4530 - DNA, 60 bp, Artificial
  Synthetic oligonucleotide
ggtcgaggtgtgtaggcaggactcatctgaagcagcagcggtgggtaagcaggcttcatg

SEQ ID NO: 4531 - DNA, 60 bp, Artificial
  Synthetic oligonucleotide
gggccacgttgagcttcacctacctggatcaccgcacacagacctatcagcaggaaacgc

SEQ ID NO: 4532 - DNA, 60 bp, Artificial
  Synthetic oligonucleotide
gttgcacaggtatttgacgtgcgggcagctgtggttgccgcaggtgtagtgtttgacgcc

SEQ ID NO: 4533 - DNA, 60 bp, Artificial
  Synthetic oligonucleotide
gatgtttctgctgctacgcgatcgtaagaacgggcgatttgcagccgcaggctgccctgt

SEQ ID NO: 4534 - DNA, 60 bp, Artificial
  Synthetic oligonucleotide
ctgggtaaacggcaagttactcgtgaggatcaggctgccttgctcgtagcgcttggcgac

SEQ ID NO: 4535 - DNA, 60 bp, Artificial
  Synthetic oligonucleotide
cgtgccagggcgaagatcacggtgaacatgctggttgggatgccgatcgccttcaggata

SEQ ID NO: 4536 - DNA, 60 bp, Artificial
  Synthetic oligonucleotide
cccggtgatcgagcgatgcacgatgaagctcttgttcaggcgcatcaggtcgctgacgaa

SEQ ID NO: 4537 - DNA, 60 bp, Artificial
  Synthetic oligonucleotide
cgccggactgggctgaagcgcccgccactttagcaatggttatcggtccgctcaagtttt

SEQ ID NO: 4538 - DNA, 60 bp, Artificial
  Synthetic oligonucleotide
cacgccggactgggctgaagcgcccgccactttagcaatggttatcggtccactcaagtt

SEQ ID NO: 4539 - DNA, 60 bp, Artificial
  Synthetic oligonucleotide
aagcctttccgccctggagcaagccatgcaagacctcgatcccgtcgaaacccaggaatg

SEQ ID NO: 4540 - DNA, 60 bp, Artificial
  Synthetic oligonucleotide
tcttcacccgcagcaacagcttcttgccttccaccgggaagcaggtctcgacacgcttgt

SEQ ID NO: 4541 - DNA, 60 bp, Artificial
  Synthetic oligonucleotide
gcacatcactcgcccctgcgctcagcggtttgggaattcgaaagagcgcctgatcgaaag

SEQ ID NO: 4542 - DNA, 60 bp, Artificial
  Synthetic oligonucleotide
gctgagaagcgtcgcagccacaacgccagcctgcgttccatggttcgtacctacatcaag

SEQ ID NO: 4543 - DNA, 60 bp, Artificial
  Synthetic oligonucleotide
accaccggcctggtattcggttcggtctactcgctgatcatgatccaccgcgcctacttc

SEQ ID NO: 4544 - DNA, 60 bp, Artificial
  Synthetic oligonucleotide
atgaggatgtggtggttgctcatcatgaaccagtagcgcgcctcgtccaggcggatcagg

SEQ ID NO: 4545 - DNA, 60 bp, Artificial
  Synthetic oligonucleotide
ttccagttccttcttgacccgctgcaccagcttcttgccttccaccgggaagcaggtctc

SEQ ID NO: 4546 - DNA, 60 bp, Artificial
  Synthetic oligonucleotide
cttgcaaccgatcctgatcgtgagggtgaatctatctcatggcatgttgcagaggtaata

SEQ ID NO: 4547 - DNA, 60 bp, Artificial
  Synthetic oligonucleotide
ctgagcaagccttttctggttacgcttacgtctagctgtaacacctgcatttaaccattc

SEQ ID NO: 4548 - DNA, 60 bp, Artificial
  Synthetic oligonucleotide
ccgaaaggggcaaaatcttccgatgggttattgaagttagcactttccttaggcgaacta

SEQ ID NO: 4549 - DNA, 60 bp, Artificial
  Synthetic oligonucleotide
cgccgaaaggggcaaaatcttccgatgggttattgaagttagcactttccttaggcgaac

SEQ ID NO: 4550 - DNA, 60 bp, Artificial
  Synthetic oligonucleotide
cggcttgaaaatcacgtaataattggctagaacccatatttgctcgtgttgcagctgcag

SEQ ID NO: 4551 - DNA, 60 bp, Artificial
  Synthetic oligonucleotide
cagcacaacaagcaagcccaaaagtcataggccataaggaattagctctcgcccagccta

SEQ ID NO: 4552 - DNA, 60 bp, Artificial
  Synthetic oligonucleotide
gcaagctgtgcaatcgcccacgatattgacatattatttgcaatacctgtaattaaacct

SEQ ID NO: 4553 - DNA, 60 bp, Artificial
  Synthetic oligonucleotide
gcattgcaagcttggcagcgacttactctcccatgccttatgacatagtaccattagcgc

SEQ ID NO: 4554 - DNA, 60 bp, Artificial
  Synthetic oligonucleotide
gcgctaatggtactatgtcataaggcatgggagagtaagtcgctgccaagcttgcaatgc

SEQ ID NO: 4555 - DNA, 60 bp, Artificial
  Synthetic oligonucleotide
cgaggaggaggaattactggcgtaataccacgattactcaatttctcaactcctcctact

SEQ ID NO: 4556 - DNA, 60 bp, Artificial
  Synthetic oligonucleotide
catataaggaccggaaagagcttgctggtgatttaaaacctatttatacactagcacaga

SEQ ID NO: 4557 - DNA, 60 bp, Artificial
  Synthetic oligonucleotide
ggtacttggtatgtcgttgccctcccagattctccctctacgtaaggttcgacattaatg

SEQ ID NO: 4558 - DNA, 60 bp, Artificial
  Synthetic oligonucleotide
gagtctttgttcattaatgcccaaccttacgtagagggagaatctgggagggcaacgaca

SEQ ID NO: 4559 - DNA, 60 bp, Artificial
  Synthetic oligonucleotide
gcttcgccattcttgatacgaccagcaagtttattgcaaaactgtttgacctctaatggt

SEQ ID NO: 4560 - DNA, 60 bp, Artificial
  Synthetic oligonucleotide
ggtacttggtatgtcgttgccctcccagattctccctctacgtaaggttgggcattaatg

SEQ ID NO: 4561 - DNA, 60 bp, Artificial
  Synthetic oligonucleotide
cattttggcaggtaagttagtcgaatccgcattccaatatagcaaatcaaaaggcattgg

SEQ ID NO: 4562 - DNA, 60 bp, Artificial
  Synthetic oligonucleotide
gaccttacgcactttatcaagcggcattgaaagacggttagcgatttccgttgccgtagg

SEQ ID NO: 4563 - DNA, 60 bp, Artificial
  Synthetic oligonucleotide
catgccgcattgataaccgatcctatatattcatcaaggaaattttgacgagtgactccg

SEQ ID NO: 4564 - DNA, 60 bp, Artificial
  Synthetic oligonucleotide
gccgatgcgttatgttgcttacaccccgtgctttagatcagaagcaggtagtagcggtag

SEQ ID NO: 4565 - DNA, 60 bp, Artificial
  Synthetic oligonucleotide
gcttacaccccgtgctttagatcagaagcaggtagtagcggtagagatacaagaggtatg

SEQ ID NO: 4566 - DNA, 60 bp, Artificial
  Synthetic oligonucleotide
gttgccgagagataagaaattttgtgctgcggtaagcggcattaatatcgttgtcaaatc

SEQ ID NO: 4567 - DNA, 60 bp, Artificial
  Synthetic oligonucleotide
cttcgccgccaagcccaatccctgtatctatacggatattaggactctttgcaggttcgg

SEQ ID NO: 4568 - DNA, 60 bp, Artificial
  Synthetic oligonucleotide
ctgtaaccgtcttatcagcttttgaacttataaccacgccttgtaacactctttgcggca

SEQ ID NO: 4569 - DNA, 60 bp, Artificial
  Synthetic oligonucleotide
cctctaatacctacgcatgagcctacgggatctatactactatccgaagcaaataccgct

SEQ ID NO: 4570 - DNA, 60 bp, Artificial
  Synthetic oligonucleotide
ccgtttacctcaagcgatctacccgcattacaagccggttagagataacccgggaacttg

SEQ ID NO: 4571 - DNA, 60 bp, Artificial
  Synthetic oligonucleotide
ccgacgcaaggagcataacaacgttttatttcatattgtaagcaagggcgagtacgtgaa

SEQ ID NO: 4572 - DNA, 60 bp, Artificial
  Synthetic oligonucleotide
gtcaaacatcgttttccttggctctttgttaatctcattactgcatgcatgacttcactg

SEQ ID NO: 4573 - DNA, 60 bp, Artificial
  Synthetic oligonucleotide
cagccattgtttccctcttacgttcttacttttctgctaacccttcgggctccacccaca

SEQ ID NO: 4574 - DNA, 60 bp, Artificial
  Synthetic oligonucleotide
atccgctccgctgaatgacttaaagcagctaacctttcatcctcacttaaccacctttca

SEQ ID NO: 4575 - DNA, 60 bp, Artificial
  Synthetic oligonucleotide
ccactaagggttggggcaagtgaaggcgcggtagttttgttatcacagtttccatcacct

SEQ ID NO: 4576 - DNA, 60 bp, Artificial
  Synthetic oligonucleotide
gctctgcgatgccccactaccagtaaaacctccgctgctacttgatgaagctgatggatc

SEQ ID NO: 4577 - DNA, 60 bp, Artificial
  Synthetic oligonucleotide
gccgaaacactagctccaaccaatggccatgcaagcaatacaaagcctattgaaccacga

SEQ ID NO: 4578 - DNA, 60 bp, Artificial
  Synthetic oligonucleotide
gccttaatagctctatcctcgccgctagcttctcctgttcccatcattgaccttcctcct

SEQ ID NO: 4579 - DNA, 60 bp, Artificial
  Synthetic oligonucleotide
ccctccagcgctttctgctgcctcttgtatggcacgccgctcaactggtgttgaacctga

SEQ ID NO: 4580 - DNA, 60 bp, Artificial
  Synthetic oligonucleotide
gtggggcagttgcgctcagattttggcacttcttcagcacgagctttacggcgccaaggt

SEQ ID NO: 4581 - DNA, 60 bp, Artificial
  Synthetic oligonucleotide
gggaggaggaaaagcgagttcagctatgaaaggtggaggagatggtgggcaatctatgag

SEQ ID NO: 4582 - DNA, 60 bp, Artificial
  Synthetic oligonucleotide
cagccgtctatgtcatgcggtcccttttcaccacatacagcgcgttctacactctccatg

SEQ ID NO: 4583 - DNA, 60 bp, Artificial
  Synthetic oligonucleotide
gttggtattggggatatgtctggggatgtatttggtaatgggatgcttagatcggacgca

SEQ ID NO: 4584 - DNA, 60 bp, Artificial
  Synthetic oligonucleotide
gcccctttgctcctcttccacatgtcttacctttaccactaccaataccacgacctatcc

SEQ ID NO: 4585 - DNA, 60 bp, Artificial
  Synthetic oligonucleotide
gaaccaatatccgccccaaccaagttctcgataggcccaccagcttcctaaagcaatgct

SEQ ID NO: 4586 - DNA, 60 bp, Artificial
  Synthetic oligonucleotide
ccacgattcctttaattccagaacgtccgtcttcgcctatcaaccagccttctacctgct

SEQ ID NO: 4587 - DNA, 60 bp, Artificial
  Synthetic oligonucleotide
gtaacctcttgccccattctaccacttgcaccacatacacctactcttataacagcacta

SEQ ID NO: 4588 - DNA, 60 bp, Artificial
  Synthetic oligonucleotide
ataaagatagaagcaatactggacgacatcctggttcttgatgcaaccgatgatcaagca

SEQ ID NO: 4589 - DNA, 60 bp, Artificial
  Synthetic oligonucleotide
gatagaagcaatactggacgacatcctggttcttgatgcaaccgatgaccaagcacaaag

SEQ ID NO: 4590 - DNA, 60 bp, Artificial
  Synthetic oligonucleotide
gctgtgcttggctgtcagttgcatcaagaaccaggatgtcgtccagtattgcttctatct

SEQ ID NO: 4591 - DNA, 60 bp, Artificial
  Synthetic oligonucleotide
gatagaagcaatactggacgacatcctggttcttgatgcaacagatcagcaagcacaaca

SEQ ID NO: 4592 - DNA, 60 bp, Artificial
  Synthetic oligonucleotide
cacgaggaaagtccggactctatagaggtatggtgccggttaacatccggcagagtatta

SEQ ID NO: 4593 - DNA, 60 bp, Artificial
  Synthetic oligonucleotide
gatcacgaggaaagtccggactctatagaggtatggtgccggttaacctccggcagagta

SEQ ID NO: 4594 - DNA, 60 bp, Artificial
  Synthetic oligonucleotide
gcagcaggtgttgatgtagtgattgaattagagagtggggagtaatgagaaccggaataa

SEQ ID NO: 4595 - DNA, 60 bp, Artificial
  Synthetic oligonucleotide
gcgatgttgcaacaactgaagccgaaatagcaggaatacgccatgctattaccgaaactc

SEQ ID NO: 4596 - DNA, 60 bp, Artificial
  Synthetic oligonucleotide
gtggtaatgctgtggactgcaaatccgctattcgtcggttcgattccgaccctggcctcc

SEQ ID NO: 4597 - DNA, 60 bp, Artificial
  Synthetic oligonucleotide
cgcaagagcaggcttcagcagattcgaggcatccattgcaccacttgttgctcctgctcc

SEQ ID NO: 4598 - DNA, 60 bp, Artificial
  Synthetic oligonucleotide
gcaaaagctcataaaggattttctgtgtttgccggggtaggggagagaacgcgtgaaggt

SEQ ID NO: 4599 - DNA, 60 bp, Artificial
  Synthetic oligonucleotide
caggaaggggataagagttccattttacgggttgcagtttcaggtggtggatgttctggc

SEQ ID NO: 4600 - DNA, 60 bp, Artificial
  Synthetic oligonucleotide
gcaccagatctccacccttttccatcgactacctgttcatttgcaagcactgtttggtct

SEQ ID NO: 4601 - DNA, 60 bp, Artificial
  Synthetic oligonucleotide
gggttggatcaaggtgctggagatcagggcataatgtatggctatgcaacaacagagaca

SEQ ID NO: 4602 - DNA, 60 bp, Artificial
  Synthetic oligonucleotide
cctcttactcaccctgcatggactggaagtttgacaagcgggttagcaagtaaaactagc

SEQ ID NO: 4603 - DNA, 60 bp, Artificial
  Synthetic oligonucleotide
attaccttgtaataggtgtattggacccgagggcagtactcggcgcctccaccatgtttt

SEQ ID NO: 4604 - DNA, 60 bp, Artificial
  Synthetic oligonucleotide
ccaaggcaccgctcctggccctcccattgaaactgcaattgcgactccagcaacagttcc

SEQ ID NO: 4605 - DNA, 60 bp, Artificial
  Synthetic oligonucleotide
cttgaaggatttaataccacgtcagcaatataaaatcgcgattcaagcggcagtgggcgg

SEQ ID NO: 4606 - DNA, 60 bp, Artificial
  Synthetic oligonucleotide
ctcaaggagcaatgcttgcaatacatacagcccttacccgccctcagtgttgtgcatcag

SEQ ID NO: 4607 - DNA, 60 bp, Artificial
  Synthetic oligonucleotide
ctgctgatgttaatgttgtcactgcttcgcgtccagcgcttaccaatattgaaaactgta

SEQ ID NO: 4608 - DNA, 60 bp, Artificial
  Synthetic oligonucleotide
cggttataggtagcggtcctggtggttatatagcggcaattagggcggcacagcttgggt

SEQ ID NO: 4609 - DNA, 60 bp, Artificial
  Synthetic oligonucleotide
cccaacttccccagtgatatgcaaccacaactgatgtccgcaatgtgcatcgctgacggg

SEQ ID NO: 4610 - DNA, 60 bp, Artificial
  Synthetic oligonucleotide
cgctgcatgcaacaagagctgcaattgaagaaggtatagttccaggtggtggggttgcgc

SEQ ID NO: 4611 - DNA, 60 bp, Artificial
  Synthetic oligonucleotide
gcaccggcaagttttgctaagcgacgagctatttcagttttaccaacccctgtatgaccg

SEQ ID NO: 4612 - DNA, 60 bp, Artificial
  Synthetic oligonucleotide
cgtgaaattgcaagctgttctaattgtggtgattttcaagcacgtagaatgaaagcaaga

SEQ ID NO: 4613 - DNA, 60 bp, Artificial
  Synthetic oligonucleotide
gtagagtacaggcaggcgacgagagctatgggacgctttgccatgcaggaagccattgag

SEQ ID NO: 4614 - DNA, 60 bp, Artificial
  Synthetic oligonucleotide
cgcgagtattactgatagaccttgatcctcaggctcattccagttgtatatattgcccag

SEQ ID NO: 4615 - DNA, 60 bp, Artificial
  Synthetic oligonucleotide
gcaagtacgctctctgcctcatgtagctccatttcttgcactaccttttgcccttctgca

SEQ ID NO: 4616 - DNA, 60 bp, Artificial
  Synthetic oligonucleotide
ggcattacttctttgtgcgatgtactcagcaacctgtacttgccccactcccaagtcagg

SEQ ID NO: 4617 - DNA, 60 bp, Artificial
  Synthetic oligonucleotide
gatgccgatactcttgctgaagcacctcccaagccgaaagcattgaaaccaacgctagca

SEQ ID NO: 4618 - DNA, 60 bp, Artificial
  Synthetic oligonucleotide
gggtctgggctccctgtttctatactggcctcatacgctgcttgcatgttggtagtattt

SEQ ID NO: 4619 - DNA, 60 bp, Artificial
  Synthetic oligonucleotide
cccgccactgaaactgaagctgactccaattgactctatcagcagcgttactgccgccca

SEQ ID NO: 4620 - DNA, 60 bp, Artificial
  Synthetic oligonucleotide
gcttggtggtcatagcatgagtgaaacacacgatcccatcccgaactcgaacgtgaaacc

SEQ ID NO: 4621 - DNA, 60 bp, Artificial
  Synthetic oligonucleotide
gccagttttcaagactagtgccttaaaccgctcggccacctatccaagaagattcatacc

SEQ ID NO: 4622 - DNA, 60 bp, Artificial
  Synthetic oligonucleotide
gtggtaatgccgtggactgcaaatcctctattcgtcggttcgattccgaccctggcctcc

SEQ ID NO: 4623 - DNA, 60 bp, Artificial
  Synthetic oligonucleotide
ggaggccagggtcggaatcgaaccgacgaatagaggatttgcagtccacggcattaccac

SEQ ID NO: 4624 - DNA, 60 bp, Artificial
  Synthetic oligonucleotide
ccttctacaccaactgaagctttatcgcaaactatcccttctgaagctaaagtgatctca

SEQ ID NO: 4625 - DNA, 60 bp, Artificial
  Synthetic oligonucleotide
gcggtcaggtagaatatagagcagagaaagcaggtataattcatgcagggcttggaaaat

SEQ ID NO: 4626 - DNA, 60 bp, Artificial
  Synthetic oligonucleotide
ggcggtagaatgctaccaagcaggatcacaaatgtttgtgcaaagaaacaaagaaagcta

SEQ ID NO: 4627 - DNA, 60 bp, Artificial
  Synthetic oligonucleotide
gcagccgcagctcttttaacatttgttttcaaagataccgttttaggattacttgcaagc

SEQ ID NO: 4628 - DNA, 60 bp, Artificial
  Synthetic oligonucleotide
gcagattcattcgtccgaagcccataaagaaatataaagcaataccgagcggagcaaaca

SEQ ID NO: 4629 - DNA, 60 bp, Artificial
  Synthetic oligonucleotide
cccacctatgcatttatgtaccgataatgctgcaatgattgcatatgcaggacttgagcg

SEQ ID NO: 4630 - DNA, 60 bp, Artificial
  Synthetic oligonucleotide
attttccaagccctgcatgaattatacctgctttctctgctctatattctacctgaccgc

SEQ ID NO: 4631 - DNA, 60 bp, Artificial
  Synthetic oligonucleotide
cgtttgcaggttcattcgtccgaagcccataaagaaatataaagcaataccgagcggagc

SEQ ID NO: 4632 - DNA, 60 bp, Artificial
  Synthetic oligonucleotide
ctctgaaggcggtagaatgttaccaagcaggatcacaaatgtttgtgcaaagaaacaaag

SEQ ID NO: 4633 - DNA, 60 bp, Artificial
  Synthetic oligonucleotide
ctctgaaggtggtagaatgctaccaagcaggatcacaaatgtttgtgcaaagaaacaaag

SEQ ID NO: 4634 - DNA, 60 bp, Artificial
  Synthetic oligonucleotide
ggggcagaaagtttgtgcacatggttttagagttggaccgactttaattaaaggttggga

SEQ ID NO: 4635 - DNA, 60 bp, Artificial
  Synthetic oligonucleotide
gtggtaatgccgtggactgcaaatcctctattcgtcggttcgattccgaccctagcctcc

SEQ ID NO: 4636 - DNA, 60 bp, Artificial
  Synthetic oligonucleotide
ggaggctagggtcggaatcgaaccgacgaatagaggatttgcagtccacggcattaccac

SEQ ID NO: 4637 - DNA, 60 bp, Artificial
  Synthetic oligonucleotide
gcccttatattctgacccacgatctgtaagaatacgcagcattggtatcccttgcgtctc

SEQ ID NO: 4638 - DNA, 60 bp, Artificial
  Synthetic oligonucleotide
cctgcactttctgctgcttcttggatagcacgacgctcaaccggcgtagaaccggaaggc

SEQ ID NO: 4639 - DNA, 60 bp, Artificial
  Synthetic oligonucleotide
gtagcggtattgcaagagcaaactggcttaaaatgtcaggaggcgttaatattcctgcaa

SEQ ID NO: 4640 - DNA, 60 bp, Artificial
  Synthetic oligonucleotide
cagcctctggtttagaattaagccttagcgtataatctatagcaagcatatttgcaatag

SEQ ID NO: 4641 - DNA, 60 bp, Artificial
  Synthetic oligonucleotide
ccccaagtgaaatttggtcgactttaattatgtcgtgtccgtttgaaacacctttaagtg

SEQ ID NO: 4642 - DNA, 60 bp, Artificial
  Synthetic oligonucleotide
gcaggaatattaacgcctcctgacattttaagccagtttgctcttgcaataccactactt

SEQ ID NO: 4643 - DNA, 60 bp, Artificial
  Synthetic oligonucleotide
ccgaaacttggaaagatcgcattaccagcgaacgaaaagaacgaactgaatggcatagag

SEQ ID NO: 4644 - DNA, 60 bp, Artificial
  Synthetic oligonucleotide
gtctgaagggtcagcacgtgatgcagtatctattttagatcaagcagctagtatgtctgc

SEQ ID NO: 4645 - DNA, 60 bp, Artificial
  Synthetic oligonucleotide
cgcttaaaggtctttcaaatggacacgacataattaaagtcgaccaaatttcacttggtg

SEQ ID NO: 4646 - DNA, 60 bp, Artificial
  Synthetic oligonucleotide
ggtgcttcaaatggacacgacataattaaagtcgaccaaatttcacttggggtagtagta

SEQ ID NO: 4647 - DNA, 60 bp, Artificial
  Synthetic oligonucleotide
ggtgcagccgcagctcttttaacatttgttttcaaagataccgttttagggttacttgca

SEQ ID NO: 4648 - DNA, 60 bp, Artificial
  Synthetic oligonucleotide
cgacaaatcaggacctgaaattctagtattcatctccgacacctcattcactgaaacgcc

SEQ ID NO: 4649 - DNA, 60 bp, Artificial
  Synthetic oligonucleotide
ccctgctaatgctactatatcacctgctgatgcttcttttacatcctcacggttattagc

SEQ ID NO: 4650 - DNA, 60 bp, Artificial
  Synthetic oligonucleotide
gatatcactttaaaataccttaaaacccctggaatttctggctttgccagacctatcatt

SEQ ID NO: 4651 - DNA, 60 bp, Artificial
  Synthetic oligonucleotide
cattgtacatccttcgaaaccatagtagctgcgattccagctaggtttccttttatccca

SEQ ID NO: 4652 - DNA, 60 bp, Artificial
  Synthetic oligonucleotide
gcgatagatggagatactttagaacaaagtttgaagcatctaactaaagcatttgatagg

SEQ ID NO: 4653 - DNA, 60 bp, Artificial
  Synthetic oligonucleotide
tcaagaagaatgggttaatttatggcaaagagcattacaagttgactatcgacctgttgc

SEQ ID NO: 4654 - DNA, 60 bp, Artificial
  Synthetic oligonucleotide
gcgatcaaaccgaatagaaaaggcgataaagacattgaatcggcaatcaaagagacctca

SEQ ID NO: 4655 - DNA, 60 bp, Artificial
  Synthetic oligonucleotide
ccggaggtgtagcatgtctcattcaattttgagggttgccagagttaaaggatcaagtaa

SEQ ID NO: 4656 - DNA, 60 bp, Artificial
  Synthetic oligonucleotide
ttttcgcaccagcgaaaactggtttaagccgactgcgcaaaagacataatcgattcacaa

SEQ ID NO: 4657 - DNA, 60 bp, Artificial
  Synthetic oligonucleotide
gcgtgtgacagtccttaaaatatacttagagcgtaagcgaaagtagtagcgacagctatt

SEQ ID NO: 4658 - DNA, 60 bp, Artificial
  Synthetic oligonucleotide
gtccagaaggtcgatagaaagcgtgagaaacagcgtacagacgatttagagatgtagagg

SEQ ID NO: 4659 - DNA, 60 bp, Artificial
  Synthetic oligonucleotide
gctagtacagtgactttatatcgtgctgcgagggcgaatttccctgggtttgagaaaggg

SEQ ID NO: 4660 - DNA, 60 bp, Artificial
  Synthetic oligonucleotide
ctggacgtgaagagactggtagaaagatattaactgctgatgaatttgaacgcctgcaag

SEQ ID NO: 4661 - DNA, 60 bp, Artificial
  Synthetic oligonucleotide
gcaatgaagtttaaatttgatgattggttcccgcttttatgtgataactcggcgtatgtt

SEQ ID NO: 4662 - DNA, 60 bp, Artificial
  Synthetic oligonucleotide
ccgcagattgcaggaagtgtgaaaggtcttgtgagatatatgcttcacatggacgatcct

SEQ ID NO: 4663 - DNA, 60 bp, Artificial
  Synthetic oligonucleotide
gaggacgtaattggacatttgttttatatccagaatcagcaaaagccgagtggttagagt

SEQ ID NO: 4664 - DNA, 60 bp, Artificial
  Synthetic oligonucleotide
ggttatgaacttgaaagaggcacgtccaaagaggttacagaacgagaacataaagcgatg

SEQ ID NO: 4665 - DNA, 60 bp, Artificial
  Synthetic oligonucleotide
gctgtatgcgactgtccatctggatgaaagagtcccacatatgcactttggttttgtccc

SEQ ID NO: 4666 - DNA, 60 bp, Artificial
  Synthetic oligonucleotide
cggtaaggaaaatatgctgtatgcgactgtccatctggatgaaagagtcccacatatgca

SEQ ID NO: 4667 - DNA, 60 bp, Artificial
  Synthetic oligonucleotide
cagggaaacgtaaaattcggtcagatgcaattcgacatgtggacggactggttacaagtg

SEQ ID NO: 4668 - DNA, 60 bp, Artificial
  Synthetic oligonucleotide
gcccctgttgcacctgatatcatcgccgctctaccacctacaatagcagtgacgacagca

SEQ ID NO: 4669 - DNA, 60 bp, Artificial
  Synthetic oligonucleotide
gcccatatagtaaatgaccttccagtgtattcatcagacacactgttcataatcgcggta

SEQ ID NO: 4670 - DNA, 60 bp, Artificial
  Synthetic oligonucleotide
gagaacgagcggaacaagcgtcacgaacaattattgacaacgatagagactatggccttg

SEQ ID NO: 4671 - DNA, 60 bp, Artificial
  Synthetic oligonucleotide
gtaagcgacaacctaaaatggcaaatgtagcccaacctaaacaatatatcagtcgtgaga

SEQ ID NO: 4672 - DNA, 60 bp, Artificial
  Synthetic oligonucleotide
aactgcttaaataccgttccttctgcgacatttgcacgctgcgcaatttctttagtactc

SEQ ID NO: 4673 - DNA, 60 bp, Artificial
  Synthetic oligonucleotide
atggcgttgacgatggtctaatatttgttgataaaggtgtatcgggtggcgttgcaccgg

SEQ ID NO: 4674 - DNA, 60 bp, Artificial
  Synthetic oligonucleotide
cagcgatggtgggatttgttgcatttgctgttgtgttgttgctattcacaacgcttgctg

SEQ ID NO: 4675 - DNA, 60 bp, Artificial
  Synthetic oligonucleotide
ggaaacactttggacaagctgggtttggttatgtaaaatttgagtttcccgaaaacgtca

SEQ ID NO: 4676 - DNA, 60 bp, Artificial
  Synthetic oligonucleotide
cattgggactgcttgccccagatttataaggggtgctatgcgttgagcgtagtgccctgc

SEQ ID NO: 4677 - DNA, 60 bp, Artificial
  Synthetic oligonucleotide
gacggtgtgattgcctcaacaacaactgcgcttgtacgaagtgtgttgggcttgattatg

SEQ ID NO: 4678 - DNA, 60 bp, Artificial
  Synthetic oligonucleotide
ctatcaccaaggcttatgattctaaagaagatcttgaaaagcgtttatccatggacttcg

SEQ ID NO: 4679 - DNA, 60 bp, Artificial
  Synthetic oligonucleotide
cgtcgaaattaatgaaactttaaacagacttcaacatcaatcgcgcaccgatgaacctac

SEQ ID NO: 4680 - DNA, 60 bp, Artificial
  Synthetic oligonucleotide
cagtaggaaatgacggtaaatcacagcgaggtgacatgaccaaatggacgaaactagctg

SEQ ID NO: 4681 - DNA, 60 bp, Artificial
  Synthetic oligonucleotide
ccgactatcacccgaaacaagccggaacacatggagtttacagttatcgacggtgtgaac

SEQ ID NO: 4682 - DNA, 60 bp, Artificial
  Synthetic oligonucleotide
gttgcggaaaatgaacgagcgtacatcaaagagcgtcagcgtgatggtatagagcttgct

SEQ ID NO: 4683 - DNA, 60 bp, Artificial
  Synthetic oligonucleotide
gcagtagcaaacgagctaaagacaaagacgcaggatttgaacttggatagcaaaacacac

SEQ ID NO: 4684 - DNA, 60 bp, Artificial
  Synthetic oligonucleotide
caacaaacagtctttaacacttggctttgatactgagtggtctggtgatgaacgtagtgc

SEQ ID NO: 4685 - DNA, 60 bp, Artificial
  Synthetic oligonucleotide
gacacgatgaagttggctcctccgggctctcctttggcttctctggggcaatctttagga

SEQ ID NO: 4686 - DNA, 60 bp, Artificial
  Synthetic oligonucleotide
agttacggggcaacggttgaatgaattggaaagtagttcagaagatacagaggtggaaaa

SEQ ID NO: 4687 - DNA, 60 bp, Artificial
  Synthetic oligonucleotide
cggtgattttaacagaaaggtggggtcattatcgcaacaatccaagtaagttcaacacgc

SEQ ID NO: 4688 - DNA, 60 bp, Artificial
  Synthetic oligonucleotide
gcacaaacaggtggaaacttcgtaaagatgtacatggaactgtttggacaaatgttggga

SEQ ID NO: 4689 - DNA, 60 bp, Artificial
  Synthetic oligonucleotide
gagcgttagcgaatgtttcagaggctccatgtcaatgccgagcgatagcgagccgaaggg

SEQ ID NO: 4690 - DNA, 51 bp, Artificial
  Synthetic oligonucleotide
gccacatcattcgcttatgctcattcgtggctgcacgcctgcttgttgggg

SEQ ID NO: 4691 - DNA, 60 bp, Artificial
  Synthetic oligonucleotide
atttagttaacaaggaaactagcatagatgcaccaatcccctcactacggcaatagtgag

SEQ ID NO: 4692 - DNA, 60 bp, Artificial
  Synthetic oligonucleotide
ctcactacggcaatagtgaggggattggtgcatctatgctagtttccttgttaactaaat

SEQ ID NO: 4693 - DNA, 60 bp, Artificial
  Synthetic oligonucleotide
ctgtggtcgtgatgtgaacaaggatttctagcatagattagcacctcctctctgcgtcgg

SEQ ID NO: 4694 - DNA, 60 bp, Artificial
  Synthetic oligonucleotide
ctcactattgccgtagtgaggggattggtgcatctatgctagtttccttgttaactaaat

SEQ ID NO: 4695 - DNA, 60 bp, Artificial
  Synthetic oligonucleotide
ccgacgcagagaggaggtgctaatctatgctagaaatccttgttcacatcacgaccacag

SEQ ID NO: 4696 - DNA, 60 bp, Artificial
  Synthetic oligonucleotide
tgtgctgttctactggggtatgtggtcctgaaccggatgaaacactaataaagacgaacc

SEQ ID NO: 4697 - DNA, 60 bp, Artificial
  Synthetic oligonucleotide
cgacatggattacgtaattgtagatacagctcctacaggccataccttgctgttacttga

SEQ ID NO: 4698 - DNA, 60 bp, Artificial
  Synthetic oligonucleotide
gggttctttgaatggtctgctatacatatggtgagagcatcaaaaggtaatggcttgaaa

SEQ ID NO: 4699 - DNA, 60 bp, Artificial
  Synthetic oligonucleotide
catcccattcagccatagatatttcaacttgcttattggccatttaaaacacccattcct

SEQ ID NO: 4700 - DNA, 60 bp, Artificial
  Synthetic oligonucleotide
catcccattcagccatagatatttcaacttgcttattggccatttaaaacacccatttct

SEQ ID NO: 4701 - DNA, 60 bp, Artificial
  Synthetic oligonucleotide
actagttttcttcggtacaggaacagcagtgtttatgagtttaagtccagataacagcgt

SEQ ID NO: 4702 - DNA, 60 bp, Artificial
  Synthetic oligonucleotide
cggtacaggaacagcagtgtttatgagtttaagtccagataacagcgtaggcacacttgg

SEQ ID NO: 4703 - DNA, 60 bp, Artificial
  Synthetic oligonucleotide
cgtaggcacacttggtgtcgcaatagcatttggtctaacaataattgcagctgcctatgc

SEQ ID NO: 4704 - DNA, 60 bp, Artificial
  Synthetic oligonucleotide
cctatgcaataggcgatatctctggaggtcatttaaaccctgcagtttctttaggaatgt

SEQ ID NO: 4705 - DNA, 60 bp, Artificial
  Synthetic oligonucleotide
ccgatcttgaccaatacggtgcaaaccttcctggagacctatctttatcaggtgcattct

SEQ ID NO: 4706 - DNA, 60 bp, Artificial
  Synthetic oligonucleotide
cccattaactggtacctctgtaaatccagcacgaagtattggacctgcattattcacagg

SEQ ID NO: 4707 - DNA, 60 bp, Artificial
  Synthetic oligonucleotide
ccatgttacgtcctagtctatctagtctccaaacaacaatcgtatctcctgacctcgcaa

SEQ ID NO: 4708 - DNA, 60 bp, Artificial
  Synthetic oligonucleotide
gcgttatttacgcattggctacgtaatcgcaacaataaataggcgactatagccacacct

SEQ ID NO: 4709 - DNA, 60 bp, Artificial
  Synthetic oligonucleotide
gttgatgttgacactatttgccgttttattgattagcgttgtcgctacattcatgggtgg

SEQ ID NO: 4710 - DNA, 60 bp, Artificial
  Synthetic oligonucleotide
gcggtcgcaaatgaacggagagaattcgagcaacaattatcagaatacgaaccgagagaa

SEQ ID NO: 4711 - DNA, 60 bp, Artificial
  Synthetic oligonucleotide
ccgttatgtcctgtaagaccacttgcactagtacttctagttgttaagacatcacctttt

SEQ ID NO: 4712 - DNA, 60 bp, Artificial
  Synthetic oligonucleotide
gtcgtccaccccaaaccgaccaaagtttacgtgaacgactagccaaaatataaaacagtc

SEQ ID NO: 4713 - DNA, 60 bp, Artificial
  Synthetic oligonucleotide
gtagagaacatggattgtctgtaactgaacgcaatgcaacaatgcgatatactcaagccg

SEQ ID NO: 4714 - DNA, 60 bp, Artificial
  Synthetic oligonucleotide
cgtttaagcaaacacgagctttatatggcaaagagaatggtgttcaagcacatacagtga

SEQ ID NO: 4715 - DNA, 60 bp, Artificial
  Synthetic oligonucleotide
ggagcttgagagagagttgaaccaattagacatcacaatcgatcgtgtcacaaacaaaac

SEQ ID NO: 4716 - DNA, 60 bp, Artificial
  Synthetic oligonucleotide
cgcgacaatcgattgctagagatttaagtaagttaggtgcaaacgccaatcagattgcta

SEQ ID NO: 4717 - DNA, 60 bp, Artificial
  Synthetic oligonucleotide
ggtggtaaccaaactccatgctcggggatcatatattgttttccagctttgtaataggaa

SEQ ID NO: 4718 - DNA, 60 bp, Artificial
  Synthetic oligonucleotide
ctccatttacaaagtgagaaaggtaaccaaaagcaattagtagtgtggcaaacagcaatg

SEQ ID NO: 4719 - DNA, 60 bp, Artificial
  Synthetic oligonucleotide
cctcttcgttaagcgtacctgcaaatacttcatcatctaccgttttggcaacagggacag

SEQ ID NO: 4720 - DNA, 60 bp, Artificial
  Synthetic oligonucleotide
acttaaatcatctcccattaatgcaatatcagctgtttcaattgcagtatccgttccagc

SEQ ID NO: 4721 - DNA, 60 bp, Artificial
  Synthetic oligonucleotide
ccgattgcatttgcagtaccttgattatcacctgtcagcataattgtttgcttgatacct

SEQ ID NO: 4722 - DNA, 60 bp, Artificial
  Synthetic oligonucleotide
cctcttcgttaagcgtacctgcaaatacttcgtcatctaccgctttggagacgggaacag

SEQ ID NO: 4723 - DNA, 60 bp, Artificial
  Synthetic oligonucleotide
cgtagccaatgcgtaaataacgcaacaatacaaccactgatgactgtggtcgtgatgtga

SEQ ID NO: 4724 - DNA, 60 bp, Artificial
  Synthetic oligonucleotide
ggaaatctcaaccgagacaacgctcaagccctttctaaatttatgagtgtagagccccaa

SEQ ID NO: 4725 - DNA, 60 bp, Artificial
  Synthetic oligonucleotide
cgaggatatgatttagaacgtgggcaatcaagacaagtaacaaatgctaaacatgagcaa

SEQ ID NO: 4726 - DNA, 60 bp, Artificial
  Synthetic oligonucleotide
gttagtacaaggagtaggatctgctgcattcccttcactgattatggtggttgtagctag

SEQ ID NO: 4727 - DNA, 60 bp, Artificial
  Synthetic oligonucleotide
caagtagtctttctgaagaagaagttgcttctggaatgagtttgctaaatttcacaagtt

SEQ ID NO: 4728 - DNA, 60 bp, Artificial
  Synthetic oligonucleotide
cgctcaagccctttctaaatttatgagtgtagagccccaaataagactttgggatattct

SEQ ID NO: 4729 - DNA, 60 bp, Artificial
  Synthetic oligonucleotide
gtgatttacatatcttgcaaccagattggaaaactatccaacgcactgcggatagagcaa

SEQ ID NO: 4730 - DNA, 60 bp, Artificial
  Synthetic oligonucleotide
gagcgtattgaaaacgcagacgataattttaaccaactttacgaaaatgcaaagccactt

SEQ ID NO: 4731 - DNA, 50 bp, Artificial
  Synthetic oligonucleotide
gccactcaatcgctatcgctcattcgtgactgctcgcctgcttgttgggg

SEQ ID NO: 4732 - DNA, 60 bp, Artificial
  Synthetic oligonucleotide
ctgttcacactcgcagaacaaagttatataaggtcaaaaccaacccaccttaaatggcac

SEQ ID NO: 4733 - DNA, 60 bp, Artificial
  Synthetic oligonucleotide
gcacaaacaggtggaaacttcgtgaagatgtatatggaactgtttggagaaatgttggga

SEQ ID NO: 4734 - DNA, 59 bp, Artificial
  Synthetic oligonucleotide
ttatcaaatcatgcgcaaaacctatgcgcgaatatagttgaggataacgagatagtttt

SEQ ID NO: 4735 - DNA, 60 bp, Artificial
  Synthetic oligonucleotide
gattatcaaattcatgcgcaaaacctatgcgcgaatatagttgaggataacgagatagtt

SEQ ID NO: 4736 - DNA, 60 bp, Artificial
  Synthetic oligonucleotide
cgataaatcgttgtacgtgaaacttgccactgctctgcaattgtcttaattggcgtgcca

SEQ ID NO: 4737 - DNA, 60 bp, Artificial
  Synthetic oligonucleotide
cgttttgcgaccactcgctttctcgctaaagatacgttcacaaccatattcctcaagtgt

SEQ ID NO: 4738 - DNA, 60 bp, Artificial
  Synthetic oligonucleotide
gttccgttcttttagttttacgaccactcgctttctcgctaaagatacgttcacaaccat

SEQ ID NO: 4739 - DNA, 60 bp, Artificial
  Synthetic oligonucleotide
gcgtcactcaatcagattgggataaattcgcccaagacacaaatgagcttgagcgtcgcc

SEQ ID NO: 4740 - DNA, 60 bp, Artificial
  Synthetic oligonucleotide
cttactgtgcgaatacgtgccgtttcttctaattgacctgtagctaactgaaagcgtagg

SEQ ID NO: 4741 - DNA, 60 bp, Artificial
  Synthetic oligonucleotide
gcaaatgagtgcaacgataatgtttgccacatacaaatattgtctagctcagagtgcccc

SEQ ID NO: 4742 - DNA, 60 bp, Artificial
  Synthetic oligonucleotide
gggagggcaaaactgagccctgtgaccacatcacgatatcaaggaggtgcacatcgtggc

SEQ ID NO: 4743 - DNA, 60 bp, Artificial
  Synthetic oligonucleotide
cgcgttacatactcaaattgctgatgaagcatattgcgttggtccaactcagtctaaaga

SEQ ID NO: 4744 - DNA, 60 bp, Artificial
  Synthetic oligonucleotide
gtttcatcaagcacgaacactacaatcatctcagactgtgtgagcatggactttcctcta

SEQ ID NO: 4745 - DNA, 60 bp, Artificial
  Synthetic oligonucleotide
ccacgtaactcgtagttttctggttgttgtgcagcgtgtggatgttcagcgccaccatat

SEQ ID NO: 4746 - DNA, 60 bp, Artificial
  Synthetic oligonucleotide
ccatgtacaccgtgttgtttaccagcgatgtcaaatgtgttacggaattgtctttcagtc

SEQ ID NO: 4747 - DNA, 60 bp, Artificial
  Synthetic oligonucleotide
ccatattcaagcatttgttttgtatggaaaagggcagttgaccctgtgataccttgtaca

SEQ ID NO: 4748 - DNA, 60 bp, Artificial
  Synthetic oligonucleotide
tttaggcgctgactcacttgatatcgctgaattagtaatggaattagaagacgagtttgg

SEQ ID NO: 4749 - DNA, 60 bp, Artificial
  Synthetic oligonucleotide
gagtcaaaggaggcagttaaccatggcaggtggaccaagaagaggcggacgtcgtcgtaa

SEQ ID NO: 4750 - DNA, 60 bp, Artificial
  Synthetic oligonucleotide
ctcggcaaccctacggcacatacgatgatccacttaatgctgcttccgtcaggacctgac

SEQ ID NO: 4751 - DNA, 60 bp, Artificial
  Synthetic oligonucleotide
gggcaactgccggtatcgcgttccttagtttcttagtttgggttcaccatttcttcacaa

SEQ ID NO: 4752 - DNA, 60 bp, Artificial
  Synthetic oligonucleotide
gaggggtgaatctgtttggcaggtcaagttgtccaatatggaagacatcgtaaacgtaga

SEQ ID NO: 4753 - DNA, 60 bp, Artificial
  Synthetic oligonucleotide
ctgttccagatggttcagggcaaaggagctgaaaattaatgagacaaggaatccatcctg

SEQ ID NO: 4754 - DNA, 60 bp, Artificial
  Synthetic oligonucleotide
gtggccaaagagaaagtatcgactaacaatatagcaaaatgccctgcttgcgataatggc

SEQ ID NO: 4755 - DNA, 60 bp, Artificial
  Synthetic oligonucleotide
gcgctggcgcctctgtaaaacccggtaactttggcgcaccaccaccgtatggacacatca

SEQ ID NO: 4756 - DNA, 60 bp, Artificial
  Synthetic oligonucleotide
ctctcaaatgttccaacagctatataggttaggggacgaaaacggtgctagacttccagt

SEQ ID NO: 4757 - DNA, 60 bp, Artificial
  Synthetic oligonucleotide
cagcccacataagagaggcattgaggcgctatattgaagaaataggggaaaaccctccaa

SEQ ID NO: 4758 - DNA, 60 bp, Artificial
  Synthetic oligonucleotide
cgtaattactggatatagagcgcataatgtgtttgatgtggcagatacgaaaggcaagcc

SEQ ID NO: 4759 - DNA, 59 bp, Artificial
  Synthetic oligonucleotide
ttcacttcttttctatataaatatgagcgaagcgaataagcgtcggaaaagcagcaaaa

SEQ ID NO: 4760 - DNA, 60 bp, Artificial
  Synthetic oligonucleotide
ctctactggaagtgggcgcatggcaactggaatggctggaagtggtgcaaaacttctagt

SEQ ID NO: 4761 - DNA, 60 bp, Artificial
  Synthetic oligonucleotide
ggcgttggaatggtattagctggtgtggctgttggggcagcacttgtttggttggttcca

SEQ ID NO: 4762 - DNA, 60 bp, Artificial
  Synthetic oligonucleotide
ctctcagaggctcatagacgaagaaagtggagaagtcatagaggtagacaagttataccg

SEQ ID NO: 4763 - DNA, 60 bp, Artificial
  Synthetic oligonucleotide
tatgaaacaatttatgaagaaccagcagacgtagagccgaattatgttgaacaactagga

SEQ ID NO: 4764 - DNA, 60 bp, Artificial
  Synthetic oligonucleotide
gtgactccttattgtacacatgatcaaaccgctttaagttctcatgaagtagcgcaaggc

SEQ ID NO: 4765 - DNA, 60 bp, Artificial
  Synthetic oligonucleotide
cagacacgaacttccagccaaaacgatcaacttcaaaccgtcatgaatcaactgaacgag

SEQ ID NO: 4766 - DNA, 60 bp, Artificial
  Synthetic oligonucleotide
tcctcctccttatcagaagacgagatagattcgaatagttcattgactgtcacatctaat

SEQ ID NO: 4767 - DNA, 60 bp, Artificial
  Synthetic oligonucleotide
caaatagcaagattatcattgtatgtgacacctcctttgtgcacggaagtgcttttccag

SEQ ID NO: 4768 - DNA, 60 bp, Artificial
  Synthetic oligonucleotide
gccaatcagattgcgaaatattgcaaccaacatcaacacgaagcaccgaactacgaagca

SEQ ID NO: 4769 - DNA, 60 bp, Artificial
  Synthetic oligonucleotide
cagacggtaatcaagggcatgtcattatccaatcgtttcaacctggcgaagtgacgcccg

SEQ ID NO: 4770 - DNA, 60 bp, Artificial
  Synthetic oligonucleotide
gccgaccctaacacgacgtcgacagcacaatactcatggaaagatgacatacgtgaggca

SEQ ID NO: 4771 - DNA, 60 bp, Artificial
  Synthetic oligonucleotide
cgctgagaaacgcattcacaataaacgacagccacaaatggcgaatatagataagtcacg

SEQ ID NO: 4772 - DNA, 60 bp, Artificial
  Synthetic oligonucleotide
gctatgaaaccgacgagtcgacagttttagggtttattaagggttcagaggctcaatgtc

SEQ ID NO: 4773 - DNA, 60 bp, Artificial
  Synthetic oligonucleotide
cacggcctcgaactttaatcaagccacagacttcacacaaaagcgttttataagcgcggc

SEQ ID NO: 4774 - DNA, 60 bp, Artificial
  Synthetic oligonucleotide
cgcgtgataccaatggcaacaactaaattaagtgcgactaaatcaacatcacgggccatc

SEQ ID NO: 4775 - DNA, 60 bp, Artificial
  Synthetic oligonucleotide
ccatgccacgaaattagcatcatgctagcaagttaaacgaacactgacatgatatattag

SEQ ID NO: 4776 - DNA, 60 bp, Artificial
  Synthetic oligonucleotide
cgtttctgacggaggagtcacagggattagtattgtaggttccactttgtttggtttacc

SEQ ID NO: 4777 - DNA, 60 bp, Artificial
  Synthetic oligonucleotide
gatgatacccgcgcatagcccacaatcatttagtttcacctcataattaatatacaccct

SEQ ID NO: 4778 - DNA, 60 bp, Artificial
  Synthetic oligonucleotide
gctggtgtggatccgatggtgggattgtatgcagcatttatcattgctactgttactgcc

SEQ ID NO: 4779 - DNA, 60 bp, Artificial
  Synthetic oligonucleotide
ggtcgtcctttatatacgcctttctctttcgcaacttgaatcccttgagcttgtcgacgt

SEQ ID NO: 4780 - DNA, 60 bp, Artificial
  Synthetic oligonucleotide
ctaaggtcggttttagtgacaaacaaacccaagtgcttaagaaagaaaacaaacgtcttt

SEQ ID NO: 4781 - DNA, 60 bp, Artificial
  Synthetic oligonucleotide
cgctgtctatcgtcagtccaattaggtgcattttgaggcgttaaaatcatgctttcaggc

SEQ ID NO: 4782 - DNA, 60 bp, Artificial
  Synthetic oligonucleotide
cggtggtgtagtcgttcaaatcccgatgccaattcttgcagggataatggttatggtttc

SEQ ID NO: 4783 - DNA, 60 bp, Artificial
  Synthetic oligonucleotide
gacaaacaaggtcaaatgacgagtacgacaaatacactatcaggatactttgggtctggt

SEQ ID NO: 4784 - DNA, 60 bp, Artificial
  Synthetic oligonucleotide
cttgtggcattgcttttctgcctcccatgttacctcttgctctagctgattctaaacctt

SEQ ID NO: 4785 - DNA, 60 bp, Artificial
  Synthetic oligonucleotide
ctatagactttgttaaatcaatagctgaattaggtttatcgggctgttcgcctcctaaat

SEQ ID NO: 4786 - DNA, 60 bp, Artificial
  Synthetic oligonucleotide
cgcaacagcacagccactgatgactggtgctatgatgtgaacgaaaatgattagcaaagt

SEQ ID NO: 4787 - DNA, 60 bp, Artificial
  Synthetic oligonucleotide
gcaccagtcatcagtggctgtgctgttgcgtattatacttattggcttagtaaacgcaac

SEQ ID NO: 4788 - DNA, 60 bp, Artificial
  Synthetic oligonucleotide
gcaccagtcatcagtggctgtgctgttgcgtattacacttattggcttagtaaacgcaac

SEQ ID NO: 4789 - DNA, 60 bp, Artificial
  Synthetic oligonucleotide
gggtcgacctccatagcgtcctctagcacgagctgcaattcgtcccgctgaagaacgttc

SEQ ID NO: 4790 - DNA, 60 bp, Artificial
  Synthetic oligonucleotide
ggaaccccaattaaaactattgcagagcaatggaaagtttcacgtacaacaatctatcgt

SEQ ID NO: 4791 - DNA, 60 bp, Artificial
  Synthetic oligonucleotide
ggtacgccaattaaaacaattgcagagcagtggcaagtttcacgtacaactatttatcgt

SEQ ID NO: 4792 - DNA, 60 bp, Artificial
  Synthetic oligonucleotide
gcgatgctgctacaaaagaatgaaaccgttgaagctatgcaaggatatttaatgcaatcg

SEQ ID NO: 4793 - DNA, 60 bp, Artificial
  Synthetic oligonucleotide
caacaatggtatctcctgacctcgcaaattcaattgctttatctaaaccaggtcttttac

SEQ ID NO: 4794 - DNA, 60 bp, Artificial
  Synthetic oligonucleotide
ctgcattaattggtgctgtagttgctataatcactggcgttgtaagcttttcagatgtac

SEQ ID NO: 4795 - DNA, 60 bp, Artificial
  Synthetic oligonucleotide
gtacgtctgaaaagcttacaacgccagtgattatagcaactacagcaccaattaatgcag

SEQ ID NO: 4796 - DNA, 60 bp, Artificial
  Synthetic oligonucleotide
ctctactgtttcacatatacatgggacagtactggaactcaatagagtcagtcgtgatgt

SEQ ID NO: 4797 - DNA, 60 bp, Artificial
  Synthetic oligonucleotide
ggccataattggtgggttgttaatcaatcgttagttacgctaaatcaacgtgatgacctt

SEQ ID NO: 4798 - DNA, 60 bp, Artificial
  Synthetic oligonucleotide
gatacagctccaacaggtcataccttgagaatgcttgaattaccttctgcatggacagat

SEQ ID NO: 4799 - DNA, 60 bp, Artificial
  Synthetic oligonucleotide
ttaaataatctgtccatgcagaaggtaattcaagcattctcaaggtgtgacctgttggag

SEQ ID NO: 4800 - DNA, 60 bp, Artificial
  Synthetic oligonucleotide
agaataccctcataaggttctatagattgtgctttataatcgtctgcagcagcaatcggg

SEQ ID NO: 4801 - DNA, 60 bp, Artificial
  Synthetic oligonucleotide
gtccatgcagaaggtaattcaagcattctcaaggtgtgacctgttggagctgtatcaaat

SEQ ID NO: 4802 - DNA, 60 bp, Artificial
  Synthetic oligonucleotide
cgtctgcagcagcaatcgggtcaaaattggctatagagagattaggtataggttgatatt

SEQ ID NO: 4803 - DNA, 60 bp, Artificial
  Synthetic oligonucleotide
cctaatctctctatagccaattttgacccgattgctgctgcagacgattataaagcacaa

SEQ ID NO: 4804 - DNA, 60 bp, Artificial
  Synthetic oligonucleotide
gtgtttcatccggttctggaccacatacgccagtagaacagcacatagcttcttcgtata

SEQ ID NO: 4805 - DNA, 60 bp, Artificial
  Synthetic oligonucleotide
cttttatagaaggcaatatagctaaaacgggcgcttatattacccaagaagaagccgatg

SEQ ID NO: 4806 - DNA, 60 bp, Artificial
  Synthetic oligonucleotide
ccgcgaccacgagggacaccaacttttgaaaacatcaagttaattttcaaatcaatagcg

SEQ ID NO: 4807 - DNA, 60 bp, Artificial
  Synthetic oligonucleotide
ggtgcttggactagcaatattttgttttaagtgttttcttctctgactacgtgcgtgttg

SEQ ID NO: 4808 - DNA, 60 bp, Artificial
  Synthetic oligonucleotide
cgcacgtagtcagagaagaaaacacttaaaacaaaatattgctagtccaagcaccactga

SEQ ID NO: 4809 - DNA, 60 bp, Artificial
  Synthetic oligonucleotide
cacactggccagttggtatcattcttattccatattgcttggtgtagtgttaatgctgtg

SEQ ID NO: 4810 - DNA, 60 bp, Artificial
  Synthetic oligonucleotide
ctctccatgggcgttgtttcccacttttcgtcatatctttaagtgtttcgttatcttgat

SEQ ID NO: 4811 - DNA, 60 bp, Artificial
  Synthetic oligonucleotide
gccatggctaccttcgttgaaggtgcttgatctgtaattatcatttgaggtttaccgaat

SEQ ID NO: 4812 - DNA, 60 bp, Artificial
  Synthetic oligonucleotide
gaaggtgcttgatctgtaattatcatttgaggtttaccgaattgtttaataaggcgctta

SEQ ID NO: 4813 - DNA, 60 bp, Artificial
  Synthetic oligonucleotide
cgaggtcaggagatacgattgttgtttggagattagatagactaggacggaacatggagg

SEQ ID NO: 4814 - DNA, 60 bp, Artificial
  Synthetic oligonucleotide
cacatttgtggctagcgacgaaactgttgggcgaaaccgtaaacccaaccgtaaggcgcc

SEQ ID NO: 4815 - DNA, 60 bp, Artificial
  Synthetic oligonucleotide
cacatttgtggctagcgacgaaactgttgggcgaaaccgtaaacccaaccgtaaggagcc

SEQ ID NO: 4816 - DNA, 60 bp, Artificial
  Synthetic oligonucleotide
gctagcgacgaaactgttgggcgaaaccgtaaacccaaccgtaaggcgccgaaacaaatt

SEQ ID NO: 4817 - DNA, 60 bp, Artificial
  Synthetic oligonucleotide
tactttcgaagaaagcgtggtgggattaaatgagcgaacaaaacacatttgtggctagcg

SEQ ID NO: 4818 - DNA, 60 bp, Artificial
  Synthetic oligonucleotide
cagaacaagaaagaaatgaaagtaaacgtcgacaagctcaagggattcaagtcgccaaag

SEQ ID NO: 4819 - DNA, 60 bp, Artificial
  Synthetic oligonucleotide
ctccatgttacgtcctagtctatctagtctccaaacaacaatggtatctcctgacctcgc

SEQ ID NO: 4820 - DNA, 60 bp, Artificial
  Synthetic oligonucleotide
cgaggtcaggagataccattgttgtttggagactagatagactaggacgtaacatggagg

SEQ ID NO: 4821 - DNA, 60 bp, Artificial
  Synthetic oligonucleotide
ccacgaccacgaggaacaccaactttcgaaaacatcaagttaattttcaaatcaatagcg

SEQ ID NO: 4822 - DNA, 52 bp, Artificial
  Synthetic oligonucleotide
ggagtcgctcacgccctgaccaaagtttgtgaacgacatcattcaaagaaaa

SEQ ID NO: 4823 - DNA, 60 bp, Artificial
  Synthetic oligonucleotide
gaggaggtgctaatctatgctagaaatccttgttcacatcacgaccacagtcatcagtgg

SEQ ID NO: 4824 - DNA, 60 bp, Artificial
  Synthetic oligonucleotide
cgacgaagtccaagagattggatcaactcacggtaacggttaacatctgtacgacgtagg

SEQ ID NO: 4825 - DNA, 60 bp, Artificial
  Synthetic oligonucleotide
gagcccacccctggattacatccagatgctctgcaaatggttttagaccaactacgctcc

SEQ ID NO: 4826 - DNA, 60 bp, Artificial
  Synthetic oligonucleotide
gggctctctgccgaacaaccttcggttggtatcattctgtcagaggcagctaagcatatc

SEQ ID NO: 4827 - DNA, 60 bp, Artificial
  Synthetic oligonucleotide
gtcggtgctttctagtgaatatgtcttatttgccagagcgcgtggggaaacacagtggca

SEQ ID NO: 4828 - DNA, 60 bp, Artificial
  Synthetic oligonucleotide
cccctgttcagtacaaagcgattgctcaccactatggtttggataagccagctccggtcc

SEQ ID NO: 4829 - DNA, 60 bp, Artificial
  Synthetic oligonucleotide
gggacgattgggatttctgtcaactgtgctgtaaatgtcgaatgcgcctcagtcaaatga

SEQ ID NO: 4830 - DNA, 60 bp, Artificial
  Synthetic oligonucleotide
ctgtccagctggggtggttcccgattggtatttcttctccgattgggactttgagtcaag

SEQ ID NO: 4831 - DNA, 60 bp, Artificial
  Synthetic oligonucleotide
ccaccctgcacattcgttcgtcttgttcagttttcaaaggtctttgcctctcttgagaca

SEQ ID NO: 4832 - DNA, 60 bp, Artificial
  Synthetic oligonucleotide
gtctcaagagaggcaaagacctttgaaaactgaacaagacgaacgaatgtgcagggtgga

SEQ ID NO: 4833 - DNA, 60 bp, Artificial
  Synthetic oligonucleotide
gtctcaagagaggcaaagacctttgaaaactgaacaagatgaacgaatgtgcagggtgga

SEQ ID NO: 4834 - DNA, 60 bp, Artificial
  Synthetic oligonucleotide
cgtggacataaacaatcatacgctgttttagtggctaatcccaaaacggattcggggaaa

SEQ ID NO: 4835 - DNA, 60 bp, Artificial
  Synthetic oligonucleotide
ccacgaccaacacgcccacgaagttgatgtaactggcttaatccaaaacgatcggcatcc

SEQ ID NO: 4836 - DNA, 60 bp, Artificial
  Synthetic oligonucleotide
gcttgtttagctatgcatttcccaaaagatatcacagagtataagcaagcgctccgtcgg

SEQ ID NO: 4837 - DNA, 60 bp, Artificial
  Synthetic oligonucleotide
gtatgcagcttatacagcaggttttcaatcggctttgatggttccaacggaaatcctagc

SEQ ID NO: 4838 - DNA, 60 bp, Artificial
  Synthetic oligonucleotide
cacagtccctagctgctcgtgtttcacccagcgtgtcataataggtttacgaccggcagg

SEQ ID NO: 4839 - DNA, 60 bp, Artificial
  Synthetic oligonucleotide
ccacgaccaacacgcccacgaagttgatgtagctggcttaatccaaaacgatcggcatcc

SEQ ID NO: 4840 - DNA, 60 bp, Artificial
  Synthetic oligonucleotide
ggatgccgatcgttttggattaagccagctacatcaacttcgtgggcgtgttggtcgtgg

SEQ ID NO: 4841 - DNA, 60 bp, Artificial
  Synthetic oligonucleotide
gagctacgcgataaacaggttgcatgtcatcttcaacttgagctaaaaccttcatcccag

SEQ ID NO: 4842 - DNA, 60 bp, Artificial
  Synthetic oligonucleotide
cgacggagcgcttgcttatactctgtgatatcttttgggaaatgcatagctaaacaagcc

SEQ ID NO: 4843 - DNA, 60 bp, Artificial
  Synthetic oligonucleotide
gccttctcgaaccatccaacccgagaatttctcacaacgaacaccacccgtacagtacac

SEQ ID NO: 4844 - DNA, 60 bp, Artificial
  Synthetic oligonucleotide
ccttctcgaaccatccaacccgagaatttctcacaacgaacaccaccggtacagtacaca

SEQ ID NO: 4845 - DNA, 60 bp, Artificial
  Synthetic oligonucleotide
gctatccgtcacggtatcgctcgtgcccttcttcaagtagacccagacttccgcgattca

SEQ ID NO: 4846 - DNA, 60 bp, Artificial
  Synthetic oligonucleotide
ctcaaattcgtgttgacgaccgtttgattcacgggcaagtggcagttgtatggactaaag

SEQ ID NO: 4847 - DNA, 60 bp, Artificial
  Synthetic oligonucleotide
gccaccgttaataagttcgtctgcttccgctttagccttagcacgttcctcctcacggcg

SEQ ID NO: 4848 - DNA, 60 bp, Artificial
  Synthetic oligonucleotide
gattcaacaacagttgcaccgttgtcagtcaagatagagtcaaagcgtgctaccaaagcg

SEQ ID NO: 4849 - DNA, 60 bp, Artificial
  Synthetic oligonucleotide
ggtctgcaatacggataccgacacgcgcagccttgtccatgtaggctggaccgataccct

SEQ ID NO: 4850 - DNA, 60 bp, Artificial
  Synthetic oligonucleotide
ccttgtgccagaagcgagcgtagagaaggtgaagcacggcatgctctgcaccaccgacat

SEQ ID NO: 4851 - DNA, 60 bp, Artificial
  Synthetic oligonucleotide
cggtggtgcagagcatgccgtgcttcaccttctctacgctcgcttctggcacaaggttct

SEQ ID NO: 4852 - DNA, 60 bp, Artificial
  Synthetic oligonucleotide
cgaaagctggacgtccaagagtagcttcaacagcttcaaggattgcaggtactttcattg

SEQ ID NO: 4853 - DNA, 60 bp, Artificial
  Synthetic oligonucleotide
cgtagttacgacgtgccaattctttacctgtgcctgtaagtgagaaaccaaggcgacgtg

SEQ ID NO: 4854 - DNA, 60 bp, Artificial
  Synthetic oligonucleotide
gaccgtgttgaccaggtacgtagttacgacgtgccaattctttacctgtgcctgtaagtg

SEQ ID NO: 4855 - DNA, 60 bp, Artificial
  Synthetic oligonucleotide
gaccgtgctgaccaggtacgtagttacgacgtgccaattctttacctgtgcctgtaagtg

SEQ ID NO: 4856 - DNA, 60 bp, Artificial
  Synthetic oligonucleotide
cgcgatacagacggcgaagcagtttcagaaggcttccttggtcttgacatcggtcctaag

SEQ ID NO: 4857 - DNA, 60 bp, Artificial
  Synthetic oligonucleotide
ctcctactgcgtggtattgtgttgccccagtacgactggcattcatcgtccatgagcgcc

SEQ ID NO: 4858 - DNA, 60 bp, Artificial
  Synthetic oligonucleotide
ccgtacagcggcaaatgtacgtacggcttacggtaagaacggtggcaatatgggagcttc

SEQ ID NO: 4859 - DNA, 60 bp, Artificial
  Synthetic oligonucleotide
gaagctcccatattgccaccgttcttaccgtaagccgtacgtacatttgccgctgtacgg

SEQ ID NO: 4860 - DNA, 60 bp, Artificial
  Synthetic oligonucleotide
ccgtacggcagcaaatgtacgtactgcttacggtaagaacggtggcaatatgggagcttc

SEQ ID NO: 4861 - DNA, 60 bp, Artificial
  Synthetic oligonucleotide
ccatgtgggcaccgacaccatgtgatgtgttagcagaggattggatcgaggtcaatgact

SEQ ID NO: 4862 - DNA, 60 bp, Artificial
  Synthetic oligonucleotide
gttgcgtgttcaccgataacattgtgaagggctgcatggagcaagtgagttgctgtgtgg

SEQ ID NO: 4863 - DNA, 60 bp, Artificial
  Synthetic oligonucleotide
cttgaaaagctacgacgtgtacggtgttttccgtactgaacttcatgtcctgccaagttt

SEQ ID NO: 4864 - DNA, 60 bp, Artificial
  Synthetic oligonucleotide
ctcaaattcgtgttgacgaccgtttgattcatgggcaagtggcagttgtatggactaaag

SEQ ID NO: 4865 - DNA, 60 bp, Artificial
  Synthetic oligonucleotide
ccaccacgtgtcaactgatgaagtttatggagatcttccacttcgtgaagaccttccagg

SEQ ID NO: 4866 - DNA, 60 bp, Artificial
  Synthetic oligonucleotide
ggtcgctttcacaccgaaggaacgtacccatgccttaacgataaggtcagaagctgcctt

SEQ ID NO: 4867 - DNA, 60 bp, Artificial
  Synthetic oligonucleotide
ctgccaaagcggatgctattgttcactatgcggctgagagccacaacgataactcattgg

SEQ ID NO: 4868 - DNA, 60 bp, Artificial
  Synthetic oligonucleotide
gggctattttgactaagggtcgtatcggtgaaacataccttattggtgccgacggcgaga

SEQ ID NO: 4869 - DNA, 60 bp, Artificial
  Synthetic oligonucleotide
ggcagcttctgaccttatcgttaaggcatgggtacgttccttcggtgtgaaagcgaccat

SEQ ID NO: 4870 - DNA, 60 bp, Artificial
  Synthetic oligonucleotide
ctcgccgtcggcaccaataaggtatgtttcaccgatacgacccttagtcaaaatagccca

SEQ ID NO: 4871 - DNA, 60 bp, Artificial
  Synthetic oligonucleotide
ggtcgcttttacgctgaaggaacgtacccatgccttaacgataaggtcagaagctgcctt

SEQ ID NO: 4872 - DNA, 60 bp, Artificial
  Synthetic oligonucleotide
ggtcgcttttacgccgaaggaacgtacccatgccttaacgataaggtcagaagctgcctt

SEQ ID NO: 4873 - DNA, 60 bp, Artificial
  Synthetic oligonucleotide
cgaagagataacgcagcttagagctgacgaacgccacgaagaaggtcgtattttacacgc

SEQ ID NO: 4874 - DNA, 60 bp, Artificial
  Synthetic oligonucleotide
gcggcaattgcggtttatgcagataaacgtggtggctggaaagcagcggtagctctatca

SEQ ID NO: 4875 - DNA, 60 bp, Artificial
  Synthetic oligonucleotide
gctgtgcagccttttgcatattacgcacccgagaataatagcctagtccctcccatgcct

SEQ ID NO: 4876 - DNA, 60 bp, Artificial
  Synthetic oligonucleotide
tcaaacaaacgagccatgacacgcatcacattgccatcaacggcaggctctggtaagttg

SEQ ID NO: 4877 - DNA, 60 bp, Artificial
  Synthetic oligonucleotide
cggtcgtggaaaatcaaggcgtttcctaatgtaagacaaagctataaagccaacagcagg

SEQ ID NO: 4878 - DNA, 60 bp, Artificial
  Synthetic oligonucleotide
cctcgctgtccatagctagtcactataatatcatcaccaattctaggggcacgagctgct

SEQ ID NO: 4879 - DNA, 60 bp, Artificial
  Synthetic oligonucleotide
gcatttgagcgtccaggaactccttgcataaagcgatatgtggggctaagcgtttctgca

SEQ ID NO: 4880 - DNA, 60 bp, Artificial
  Synthetic oligonucleotide
ggtgttgcaaagggatacagagaaaagtcctcaattgctacccactttaggtgaggagca

SEQ ID NO: 4881 - DNA, 60 bp, Artificial
  Synthetic oligonucleotide
gctttcagttggtctttagtatgaacacctgcaacttgtttaaccacttctccgtctttt

SEQ ID NO: 4882 - DNA, 60 bp, Artificial
  Synthetic oligonucleotide
gacgatgagtgccattagcgatacgagcaagtgctgccatagactcaccttgactacctg

SEQ ID NO: 4883 - DNA, 60 bp, Artificial
  Synthetic oligonucleotide
gtgcctttgaaagacggcgttatcactaacgacaaccgtatcactgcggctcttccaaca

SEQ ID NO: 4884 - DNA, 60 bp, Artificial
  Synthetic oligonucleotide
tcgtagtgtacaggaataatgactttggcacggagattttctgccatacgaagaagatcg

SEQ ID NO: 4885 - DNA, 60 bp, Artificial
  Synthetic oligonucleotide
cccctaccgcgtggtattgtgttgccccagtacgactagcattcatcgtccatgagcgcc

SEQ ID NO: 4886 - DNA, 60 bp, Artificial
  Synthetic oligonucleotide
ggcgctcatggacgatgaatgctagtcgtactggggcaacacaataccacgcagtagggg

SEQ ID NO: 4887 - DNA, 60 bp, Artificial
  Synthetic oligonucleotide
cgagcagtaccttcgatcatacgcattgcagcttcaagagatgcagcgttcaagtcaggc

SEQ ID NO: 4888 - DNA, 60 bp, Artificial
  Synthetic oligonucleotide
ggttgtgttggtatcaggtatgggaagtatgtcagtttctattcttggtggctacattgc

SEQ ID NO: 4889 - DNA, 60 bp, Artificial
  Synthetic oligonucleotide
ctcactatcagtcatacgacctaggtatttgctaaccaagattggactgtctgtttgacc

SEQ ID NO: 4890 - DNA, 60 bp, Artificial
  Synthetic oligonucleotide
ctcagaggttgagagttttgttgccgtagctaatatgtttcttggtcaaacagacagtcc

SEQ ID NO: 4891 - DNA, 60 bp, Artificial
  Synthetic oligonucleotide
cggcaacaaaactctcaacctctgaggatttcataattttaccaacgcccttacctatcc

SEQ ID NO: 4892 - DNA, 60 bp, Artificial
  Synthetic oligonucleotide
ccagttgaaacaacactaacaacttgttggcctagtgggatacgtactaagattagcgca

SEQ ID NO: 4893 - DNA, 60 bp, Artificial
  Synthetic oligonucleotide
gagaaagccatttgtgcacctgtgcttgcaccctcagcgattgcatcaatcacattggcg

SEQ ID NO: 4894 - DNA, 60 bp, Artificial
  Synthetic oligonucleotide
ctggtcccttccatacggatagctccagttgcaataacgatgtctccgcctttaacatca

SEQ ID NO: 4895 - DNA, 60 bp, Artificial
  Synthetic oligonucleotide
cacggaaaacaagtcgagctagggtgccacgtttctccgggcaaagaacagcaatacctg

SEQ ID NO: 4896 - DNA, 60 bp, Artificial
  Synthetic oligonucleotide
cgccacaaatggagacctgcgatctgcttataattccttggatctagcagtcatgtctac

SEQ ID NO: 4897 - DNA, 60 bp, Artificial
  Synthetic oligonucleotide
cccggagaaacgtggcaccctagctcgacttgttttccgtgcaatgattggcggtattgc

SEQ ID NO: 4898 - DNA, 60 bp, Artificial
  Synthetic oligonucleotide
caccttcgccgacatattttgccatcacttcaacatcttcaaatgtagcacctgctgtcg

SEQ ID NO: 4899 - DNA, 60 bp, Artificial
  Synthetic oligonucleotide
gtgtgcggagtgcttcaacagcaacttgaatagctgcttctgtgtcatgagccattgggt

SEQ ID NO: 4900 - DNA, 60 bp, Artificial
  Synthetic oligonucleotide
ggcaacggcttctgcttggtcagctgttgtaatagcatcaaccaaggcatgctcaggagc

SEQ ID NO: 4901 - DNA, 60 bp, Artificial
  Synthetic oligonucleotide
cgaatcacttgacgacgcacttcgtcgcttcaaacgttctgtgactaaagctggtactct

SEQ ID NO: 4902 - DNA, 60 bp, Artificial
  Synthetic oligonucleotide
gagtaccagctttagtcacagaacgtttgaaacgacgaagtgcatcgtcaagtgattcgt

SEQ ID NO: 4903 - DNA, 60 bp, Artificial
  Synthetic oligonucleotide
cgcttagggctgctggattcctcccctgacccgcttcacgcagaactgttgctccactat

SEQ ID NO: 4904 - DNA, 60 bp, Artificial
  Synthetic oligonucleotide
gcatcgcttagggctgctggattcctcccctgacccacttcacgagtaaatgttgctcca

SEQ ID NO: 4905 - DNA, 60 bp, Artificial
  Synthetic oligonucleotide
ggagcaacagttctgcgtgaagcgggtcaggggaggaatccagcagccctaagcgatttg

SEQ ID NO: 4906 - DNA, 60 bp, Artificial
  Synthetic oligonucleotide
gagcacacactcgatatcgcttagggctgctggattcctcccctgacccacttcacgcac

SEQ ID NO: 4907 - DNA, 60 bp, Artificial
  Synthetic oligonucleotide
ctcgcttagggctgctggattcctcccctgacccgcttcacgcacgaatgttgctccatt

SEQ ID NO: 4908 - DNA, 60 bp, Artificial
  Synthetic oligonucleotide
gcgtgaagcgggtcaggggaggaatccagcagccctaagcgatgtaagctgtgtgctcta

SEQ ID NO: 4909 - DNA, 60 bp, Artificial
  Synthetic oligonucleotide
cggtggatacactcgtattcttaaaacagaaccacgccgtggagatgctgctccaatggc

SEQ ID NO: 4910 - DNA, 60 bp, Artificial
  Synthetic oligonucleotide
cagatagaaaacggatggtaccgcgtgtcaacgctccgattaaggggtagtggcacgctt

SEQ ID NO: 4911 - DNA, 60 bp, Artificial
  Synthetic oligonucleotide
caacatctggatcactaagtaactcacctaactcttcataacgatcttcaactgcctgca

SEQ ID NO: 4912 - DNA, 60 bp, Artificial
  Synthetic oligonucleotide
cgcgccacttctctccagaatttgcttttgagtctgcacaggtcttggcacagcatggga

SEQ ID NO: 4913 - DNA, 60 bp, Artificial
  Synthetic oligonucleotide
ggttcagttcctgaagggcgaactgcaatccatgaatcatcagctaacgtgtacttcaaa

SEQ ID NO: 4914 - DNA, 60 bp, Artificial
  Synthetic oligonucleotide
ctgactgaccagaaaccatggcaaccacttctttaataccaccaacaccattaacggatg

SEQ ID NO: 4915 - DNA, 60 bp, Artificial
  Synthetic oligonucleotide
cggataaagtctgttagtgcatcagcatcagctggtggtagttgacctccgtcttgtccg

SEQ ID NO: 4916 - DNA, 60 bp, Artificial
  Synthetic oligonucleotide
gacgctattcaagcagttcttttggttgctgagatcgcggcttattaccgttcgcgtggt

SEQ ID NO: 4917 - DNA, 60 bp, Artificial
  Synthetic oligonucleotide
cctctccacggaactggtgagatgttgacacgccgtgcccttgcccaagccggttttgaa

SEQ ID NO: 4918 - DNA, 60 bp, Artificial
  Synthetic oligonucleotide
cgatttgtaccagcaccaatataaccacgcataccagcagtaccaaattctaagtttgtg

SEQ ID NO: 4919 - DNA, 60 bp, Artificial
  Synthetic oligonucleotide
gttgtccgtcaagcaaccgaaggattggcaaaattaatcgaaactaagggagaggaagct

SEQ ID NO: 4920 - DNA, 60 bp, Artificial
  Synthetic oligonucleotide
ccacgtgtaagcccatcagttgattccatagcgattgtacgaacgaggccgtcaccaagt

SEQ ID NO: 4921 - DNA, 60 bp, Artificial
  Synthetic oligonucleotide
ggccgtcttcccagcgttctgagtgccccatcttaccgatgatttgaccattcttgctgg

SEQ ID NO: 4922 - DNA, 60 bp, Artificial
  Synthetic oligonucleotide
gtccgtcttcccagcgttctgagtgccccatcttaccgatgatttgaccattcttgctgg

SEQ ID NO: 4923 - DNA, 60 bp, Artificial
  Synthetic oligonucleotide
gacctcagtgacggcattatcataaggatatccaggcttggagtaagaagcaagcaattc

SEQ ID NO: 4924 - DNA, 60 bp, Artificial
  Synthetic oligonucleotide
ggtgccaaagttcctgaattgcgatttgcggggtttgctgacgattgggaagagcgtaag

SEQ ID NO: 4925 - DNA, 60 bp, Artificial
  Synthetic oligonucleotide
ggtgccaaagttcctgaattgcgatttgcggggtttgttgacgattgggaacagcgtaag

SEQ ID NO: 4926 - DNA, 60 bp, Artificial
  Synthetic oligonucleotide
ggctgtagctttgatgcaagaggttgcgacacgctcggttgcattgccacgcaacacgtg

SEQ ID NO: 4927 - DNA, 60 bp, Artificial
  Synthetic oligonucleotide
ccatctgtacaattcgacgaaactactggagattactcacgttcacaccgtgtatcactc

SEQ ID NO: 4928 - DNA, 60 bp, Artificial
  Synthetic oligonucleotide
gccgtcggcaccaataaggtatgtttcaccgatacgacccttagtcaaaatagcccagac

SEQ ID NO: 4929 - DNA, 60 bp, Artificial
  Synthetic oligonucleotide
cagcaccgacataggcacgattgcaggtggaacgtttagaaatcaactctgcatttgcca

SEQ ID NO: 4930 - DNA, 60 bp, Artificial
  Synthetic oligonucleotide
cgggtatggctatgcctcatgctcgtccagaagcaggcgtgcagcgcgatgccttttcat

SEQ ID NO: 4931 - DNA, 60 bp, Artificial
  Synthetic oligonucleotide
gacgcaactgatgtgccacttgggcgtctttctgcagtagttgctagcgtacttcgcgga

SEQ ID NO: 4932 - DNA, 60 bp, Artificial
  Synthetic oligonucleotide
ctatgaggaaagtccatgctagcactggctgtgatgccagtagtgtttgtgctaggcgaa

SEQ ID NO: 4933 - DNA, 60 bp, Artificial
  Synthetic oligonucleotide
gtgggcggtggaacaccaagtacatcgaactctgaatactgggacggtgatattgactgg

SEQ ID NO: 4934 - DNA, 60 bp, Artificial
  Synthetic oligonucleotide
gaccttgaacaaccagaacgtgcaaaggttcgaggtaaaggtgcaagccatgagtgagaa

SEQ ID NO: 4935 - DNA, 60 bp, Artificial
  Synthetic oligonucleotide
gggcgggcggaacaagtggaagcctaccgtaacccctcaataccagtggaaagagttacg

SEQ ID NO: 4936 - DNA, 60 bp, Artificial
  Synthetic oligonucleotide
cttggcaggacatgaagttcagtacggaaaacaccgtacacgtcgtagcttttcaagaat

SEQ ID NO: 4937 - DNA, 60 bp, Artificial
  Synthetic oligonucleotide
ggcaggacatgaagttcgatacggaaaacaccgtacacgtcgtagcttttcaagaatcaa

SEQ ID NO: 4938 - DNA, 60 bp, Artificial
  Synthetic oligonucleotide
ggtcacctgccatctcaccacacatacctgcccatttaccttcagcgtgcgctgctttga

SEQ ID NO: 4939 - DNA, 60 bp, Artificial
  Synthetic oligonucleotide
cacgtgaatacggtactggaacatcttcacttgcaagacgcacgataggatgatcaaggt

SEQ ID NO: 4940 - DNA, 60 bp, Artificial
  Synthetic oligonucleotide
gtagcaggtcgtggtggaggtaaaccagacatggctatggcaggtggtagcgatgcaagt

SEQ ID NO: 4941 - DNA, 60 bp, Artificial
  Synthetic oligonucleotide
ctaccacctgccatagccatgtctggtttacctccaccacgacctgctacaattggtgcc

SEQ ID NO: 4942 - DNA, 60 bp, Artificial
  Synthetic oligonucleotide
gggccagacaacctaagtcgcaaggcgagaagttctcacttctgcttttctcattgcaac

SEQ ID NO: 4943 - DNA, 60 bp, Artificial
  Synthetic oligonucleotide
gttgggccagacaacctaagtcgcaaggcgagaagttctcacttctgcttttctcattgc

SEQ ID NO: 4944 - DNA, 60 bp, Artificial
  Synthetic oligonucleotide
cgtcttactttctcaatagtaggggcttaattgtcaacactcaatcagtttccggcttct

SEQ ID NO: 4945 - DNA, 60 bp, Artificial
  Synthetic oligonucleotide
gcattacagcaataagggcggacggagagccgaacaagtggaaagctaccgcgacccctc

SEQ ID NO: 4946 - DNA, 60 bp, Artificial
  Synthetic oligonucleotide
gaagaagactcctttgtgctgaaaatttcacttgaagctctacttaatggggcggtatcg

SEQ ID NO: 4947 - DNA, 60 bp, Artificial
  Synthetic oligonucleotide
tgattggtgacccttcacaccttatttcacaagcctttgaagtgcttggcgaagacggac

SEQ ID NO: 4948 - DNA, 60 bp, Artificial
  Synthetic oligonucleotide
gattggtgacccttcacaccttatttcacaagcctttgaagtgcttggcgaagacggact

SEQ ID NO: 4949 - DNA, 60 bp, Artificial
  Synthetic oligonucleotide
cagacccatgtgtgtcatgtacccagtcatcatgaatcttaaagacttcaacgcttccac

SEQ ID NO: 4950 - DNA, 60 bp, Artificial
  Synthetic oligonucleotide
gcttgtggatcttttgcagtccacatgtaaaactcaccaacaggactgattcctgcttct

SEQ ID NO: 4951 - DNA, 60 bp, Artificial
  Synthetic oligonucleotide
cccatagccgattgtcttcacaccatcgatcatatcatggttaaactcgaaacttccgtc

SEQ ID NO: 4952 - DNA, 60 bp, Artificial
  Synthetic oligonucleotide
gtcatgtacccagtcatcatgaatcttaaagacttcgacgttaccgctggaagcatgtgg

SEQ ID NO: 4953 - DNA, 60 bp, Artificial
  Synthetic oligonucleotide
cagcttgtgcatcagtagttgtcgcatgattaactgcagctgtggttgtaacagctacag

SEQ ID NO: 4954 - DNA, 60 bp, Artificial
  Synthetic oligonucleotide
ctgtgcgttagtcgcatctgctttagcttgtgcatctttattacgttgacgtacacctgc

SEQ ID NO: 4955 - DNA, 60 bp, Artificial
  Synthetic oligonucleotide
cggctctgcaaaagcttgatcgtcggttcaaatccgtctaccgccttaaatataaaagat

SEQ ID NO: 4956 - DNA, 60 bp, Artificial
  Synthetic oligonucleotide
cgcttagggctgctggattcctcccctgacccgcttcacgcacagatgttgctccgataa

SEQ ID NO: 4957 - DNA, 60 bp, Artificial
  Synthetic oligonucleotide
gcttagggctgctggattcctcccctgacccgcttcacgcacagatgttgctccgagaaa

SEQ ID NO: 4958 - DNA, 60 bp, Artificial
  Synthetic oligonucleotide
ggacgtaaaatcgctaaagctgcatcagctgaataatagaagggagataccatgcgcgta

SEQ ID NO: 4959 - DNA, 60 bp, Artificial
  Synthetic oligonucleotide
cggaggatacactcgtattcttaaaacagaaccacgccgtggcgatgctgccccaatggc

SEQ ID NO: 4960 - DNA, 60 bp, Artificial
  Synthetic oligonucleotide
gtgacagaccgccagccaacagaacaagaggcgactgcccttgagtttgcctggaaggct

SEQ ID NO: 4961 - DNA, 60 bp, Artificial
  Synthetic oligonucleotide
ccaccaactacgccagtgtactcagcttccacttcgctggcagcttgggcatcaaacggc

SEQ ID NO: 4962 - DNA, 60 bp, Artificial
  Synthetic oligonucleotide
gtgctggagttgccgctggtggtgctgttcgtgccgtcatcgaattagcaggtgttgcag

SEQ ID NO: 4963 - DNA, 60 bp, Artificial
  Synthetic oligonucleotide
ggcgtgacggtgtcggcggtgcgacaggttcatctaaggttcaaacggttgagtctgtgg

SEQ ID NO: 4964 - DNA, 60 bp, Artificial
  Synthetic oligonucleotide
gctgtcaccatgtgaccacgaatcacgcgcgctagccctgtcatgttctctgaaccgatt

SEQ ID NO: 4965 - DNA, 60 bp, Artificial
  Synthetic oligonucleotide
gcaacgccagacatgatggctatcgtaggtcgtcttggacgtgtccttggacctcgtaac

SEQ ID NO: 4966 - DNA, 60 bp, Artificial
  Synthetic oligonucleotide
gggccagacaacctaagtcgcaaggcgagaagctctcacttctgcttttctcattgctac

SEQ ID NO: 4967 - DNA, 60 bp, Artificial
  Synthetic oligonucleotide
gtccatacaactgccacttgcccgtgaatcaaacggtcgtcaacacgaatttgagtaatc

SEQ ID NO: 4968 - DNA, 60 bp, Artificial
  Synthetic oligonucleotide
ggcttccgtcttcgtgaaggtgtagcgatcggtgcaaaagttaccctccgtggcgaacgt

SEQ ID NO: 4969 - DNA, 60 bp, Artificial
  Synthetic oligonucleotide
gccagacaagcctgtcgattatgattgtggtgactgtcgtcgttgtctagatgcctgtcc

SEQ ID NO: 4970 - DNA, 60 bp, Artificial
  Synthetic oligonucleotide
cgatcctctatgactttatgttcaaatcctgaattgcgcccctcttccacagaagcacgc

SEQ ID NO: 4971 - DNA, 60 bp, Artificial
  Synthetic oligonucleotide
ctgctcaggctgcggttgataaactatcacctgaggatgctgttgcagttgtagcagatg

SEQ ID NO: 4972 - DNA, 60 bp, Artificial
  Synthetic oligonucleotide
gggtttggatagccaaccgttgtaaaatcaggatcgggcatttcctgctcaggtaccaca

SEQ ID NO: 4973 - DNA, 60 bp, Artificial
  Synthetic oligonucleotide
ggttatggagagatcattggcggctcaatgcgtgaagacaactacgatgctcttgtggct

SEQ ID NO: 4974 - DNA, 60 bp, Artificial
  Synthetic oligonucleotide
gcacgaaagactggaccaaagtcgaaaactcggcctagagccattgctccagcttcaagg

SEQ ID NO: 4975 - DNA, 60 bp, Artificial
  Synthetic oligonucleotide
gatgcgccacttgaccaaaatccggagctttagccaactgcttatccgtaatacctgtca

SEQ ID NO: 4976 - DNA, 60 bp, Artificial
  Synthetic oligonucleotide
gagcatcgccagtaacgactaattcatctgagtggaaaacaaacgagactcctccccaag

SEQ ID NO: 4977 - DNA, 60 bp, Artificial
  Synthetic oligonucleotide
gaaggccccaatgcttatggtttgttgaaatcagaaatgggagttcatcgcctcgttcgt

SEQ ID NO: 4978 - DNA, 60 bp, Artificial
  Synthetic oligonucleotide
cctacgtcctctaacgtacgcattttaccatcgtcaaggccaaagcgtaggcgaagaacg

SEQ ID NO: 4979 - DNA, 60 bp, Artificial
  Synthetic oligonucleotide
cgttcttcgcctacgctttggccttgacgatggtaaaatgcgtacgttagaggacgtagg

SEQ ID NO: 4980 - DNA, 60 bp, Artificial
  Synthetic oligonucleotide
gctaatcggagtgtagcgaacacgataggtgtaggttccgttagcaacaactttgccgtc

SEQ ID NO: 4981 - DNA, 60 bp, Artificial
  Synthetic oligonucleotide
gctggtgtatcagcagttttagcaggagcttgaggggctagatcattagcgtcatctgct

SEQ ID NO: 4982 - DNA, 60 bp, Artificial
  Synthetic oligonucleotide
ctacgacctggggctggtgtcgggcggtaatcagacggtctagcacctcgaccttgtttt

SEQ ID NO: 4983 - DNA, 60 bp, Artificial
  Synthetic oligonucleotide
ctgctgaacagatcgtagtcaaaattactgaccaaggctatgtgacctcacacggtgacc

SEQ ID NO: 4984 - DNA, 60 bp, Artificial
  Synthetic oligonucleotide
gcagaaggtcgttttgcaacaccagacggctatattttcgatccacgagatgttttggcc

SEQ ID NO: 4985 - DNA, 60 bp, Artificial
  Synthetic oligonucleotide
caacagtcccatgatacccgctaccaatggcgcagacatactagttccagaaagtttggc

SEQ ID NO: 4986 - DNA, 60 bp, Artificial
  Synthetic oligonucleotide
ggagcatttcctgacaagatccctgacacgtgtgtgccgtgctcttgatcgacagcggtt

SEQ ID NO: 4987 - DNA, 60 bp, Artificial
  Synthetic oligonucleotide
gaccgaacctgactcttcatgccctggcttagaccatacatccggacgaacttcggggtg

SEQ ID NO: 4988 - DNA, 60 bp, Artificial
  Synthetic oligonucleotide
ctgttaccgtccccatttggagagatcgcagcatatggtttgccattagcgtgacggtgg

SEQ ID NO: 4989 - DNA, 60 bp, Artificial
  Synthetic oligonucleotide
gccgctgcaggtgtcccaaccaccccataatcaggatgatctgctagaggtagacgggtc

SEQ ID NO: 4990 - DNA, 60 bp, Artificial
  Synthetic oligonucleotide
gcagcagcaagctcatcagcttgaccttttgctttcacccagttagcgacctcatccaac

SEQ ID NO: 4991 - DNA, 60 bp, Artificial
  Synthetic oligonucleotide
ccgtcagctgtcagaccccagcttgagaagcggcttagtttggtgccacttgctgttggc

SEQ ID NO: 4992 - DNA, 60 bp, Artificial
  Synthetic oligonucleotide
ggcgctcatggacgatgaatgccagtcgtactggggcaacacaataccacgcagtaggag

SEQ ID NO: 4993 - DNA, 60 bp, Artificial
  Synthetic oligonucleotide
cgtgttgcgtggcaatgcaaccgagcgtgtcgcaacctcttgcatcaaagctacagccgt

SEQ ID NO: 4994 - DNA, 60 bp, Artificial
  Synthetic oligonucleotide
cgtgctattcgtcgcaactatacaattttccaagttgggaaggcgaccttgttaagagta

SEQ ID NO: 4995 - DNA, 60 bp, Artificial
  Synthetic oligonucleotide
gggcgcaatgcttattacaaaatcaatgacaaagggcgagtgaggaatgagcgctgaggc

SEQ ID NO: 4996 - DNA, 60 bp, Artificial
  Synthetic oligonucleotide
ggtaccggaattgcgatttgcggggtttgctgacgattgggaagagcgtaagttatcatc

SEQ ID NO: 4997 - DNA, 60 bp, Artificial
  Synthetic oligonucleotide
cggactgcttggattaggttggtggtatttgaagaaccacaatccgtttaatggttcagc

SEQ ID NO: 4998 - DNA, 60 bp, Artificial
  Synthetic oligonucleotide
gggcgattgagaaatgagcgctggggcattttatctttgaggaagttcttgatggatcag

SEQ ID NO: 4999 - DNA, 60 bp, Artificial
  Synthetic oligonucleotide
gttggaagagccgcagtgatacggttgtcgttagtgataacgccatctttcaaaggcaca

SEQ ID NO: 5000 - DNA, 60 bp, Artificial
  Synthetic oligonucleotide
ggtttgcttcagctaaacgttgtttagccattaaatctccctcggcaaccgcaacagcca

SEQ ID NO: 5001 - DNA, 60 bp, Artificial
  Synthetic oligonucleotide
cctcgtcaatcttgaaccaaagatcagcaaaacgctcatcgctgtggacccaatccatat

SEQ ID NO: 5002 - DNA, 60 bp, Artificial
  Synthetic oligonucleotide
cgaagtatgttcgagggtgctcgcctgaatgtcgtgcacatgaacgtaatcgctatgtgc

SEQ ID NO: 5003 - DNA, 60 bp, Artificial
  Synthetic oligonucleotide
gcacatagcgattacgttcatgtgcacgacattcaggcgagcaccctcgaacatacttcg

SEQ ID NO: 5004 - DNA, 60 bp, Artificial
  Synthetic oligonucleotide
gtgtactgtacgggtggtgttcgctgtgagaaattctcgggttggatggttcgagaaggc

SEQ ID NO: 5005 - DNA, 60 bp, Artificial
  Synthetic oligonucleotide
gtttactgtacgggtggtgttcgctgtgagaaattctcgggttggatggttcgagaaggc

SEQ ID NO: 5006 - DNA, 60 bp, Artificial
  Synthetic oligonucleotide
gccttctcgaaccatccaacccgagaatttctcacagcgaacaccacccgtacagtacac

SEQ ID NO: 5007 - DNA, 60 bp, Artificial
  Synthetic oligonucleotide
gggtccacagcgatgagcgttttgctgatctttggttcaagattgacgaggaaaatcaac

SEQ ID NO: 5008 - DNA, 60 bp, Artificial
  Synthetic oligonucleotide
ggtttgcttcagctaaacgttgtttagccattaaatctccctcagcaaccgcaacagcca

SEQ ID NO: 5009 - DNA, 60 bp, Artificial
  Synthetic oligonucleotide
gaacgcggtaaacccctcaagctagcaacccaaactttggtcggggcatgggatggatgg

SEQ ID NO: 5010 - DNA, 60 bp, Artificial
  Synthetic oligonucleotide
catctgccgatgggacgcaaaacatgcctcataatgcctgtcgaatccgtaacaacccca

SEQ ID NO: 5011 - DNA, 60 bp, Artificial
  Synthetic oligonucleotide
ggggttgttacggattcgacaggcattatgagacatgttttgcgacccatcggcagatgt

SEQ ID NO: 5012 - DNA, 60 bp, Artificial
  Synthetic oligonucleotide
cacttgctccatgcagcccttcacaatgttatcggtgaacacgcaactcaggctggttca

SEQ ID NO: 5013 - DNA, 60 bp, Artificial
  Synthetic oligonucleotide
cccacgtgtaagcccatcagttgattccatagcgattgttcgcaccataccgtcaccaag

SEQ ID NO: 5014 - DNA, 60 bp, Artificial
  Synthetic oligonucleotide
ggacattccgttgagccttcagctaacttggttcctgtgaacgacccaacgcttctttgg

SEQ ID NO: 5015 - DNA, 60 bp, Artificial
  Synthetic oligonucleotide
cacttgctccatgcagctcttcacaatgttatcggtgaacacgcaactcaggctggttca

SEQ ID NO: 5016 - DNA, 60 bp, Artificial
  Synthetic oligonucleotide
cgatgtttaaagacttcaaactgcagttgacccacagcacccagcatgtattcgcctgtc

SEQ ID NO: 5017 - DNA, 60 bp, Artificial
  Synthetic oligonucleotide
gaagcgttgggtcgttcacaggaaccaagttagctgaaggctcaacggaatgtcctttgg

SEQ ID NO: 5018 - DNA, 60 bp, Artificial
  Synthetic oligonucleotide
gagcaatccagctttataagaattatcagacaggcgaatacatgctgggtgctgtgggtc

SEQ ID NO: 5019 - DNA, 60 bp, Artificial
  Synthetic oligonucleotide
cagctttataagaattatcagacaggcgaatacatgctgggtgctgtgggtcaacttcag

SEQ ID NO: 5020 - DNA, 60 bp, Artificial
  Synthetic oligonucleotide
ccaggtgttaaatcaatcatcggtggtggtgactcagcagcagcagctatcaacctcggt

SEQ ID NO: 5021 - DNA, 60 bp, Artificial
  Synthetic oligonucleotide
gcctcacaccatcttcgtaaactagccaatcaaaacatcttggacactagaagagagggg

SEQ ID NO: 5022 - DNA, 60 bp, Artificial
  Synthetic oligonucleotide
gcctcccaccatcttcgtaaactagccaatcaaaacatcttggactctagaagagagggg

SEQ ID NO: 5023 - DNA, 60 bp, Artificial
  Synthetic oligonucleotide
cccctctcttctagtgtccaagatgttttgattggctagtttacgaagatggtgggaggc

SEQ ID NO: 5024 - DNA, 60 bp, Artificial
  Synthetic oligonucleotide
gcctcccaccatcttcgtaaactagccaatcaaaacatcttggacactagaagagagggg

SEQ ID NO: 5025 - DNA, 60 bp, Artificial
  Synthetic oligonucleotide
gcctctcaccatcttcgtaaactagccaatcaaaacatcttggacactagaagagagggg

SEQ ID NO: 5026 - DNA, 60 bp, Artificial
  Synthetic oligonucleotide
ccttcttacgtggtttcctaggtcgtatgcttttctctggagatgaggttaacaaatctg

SEQ ID NO: 5027 - DNA, 60 bp, Artificial
  Synthetic oligonucleotide
ccttcttacgtggcttcctaggtcgtatgcttttctctggagatgaggttaacaaatctg

SEQ ID NO: 5028 - DNA, 60 bp, Artificial
  Synthetic oligonucleotide
gagagcgtacggtttcccagaacctgaatttccagcaatagcccagtgactccccttatc

SEQ ID NO: 5029 - DNA, 60 bp, Artificial
  Synthetic oligonucleotide
ccccatcgaaccacccttaacaacagctgcacgcgcacggtcttgttgttctttcatggc

SEQ ID NO: 5030 - DNA, 60 bp, Artificial
  Synthetic oligonucleotide
ccagccggcgttattcccgttatctttgctagctcgattacaactatcccaagtacgatt

SEQ ID NO: 5031 - DNA, 60 bp, Artificial
  Synthetic oligonucleotide
ccagctggtgttattcccgttatctttgctagctcgattacaacaattccaagtacgatt

SEQ ID NO: 5032 - DNA, 60 bp, Artificial
  Synthetic oligonucleotide
cgtcaagtcggtgctcaatctagcatgagtcgtaaaggaaatccctatgacaatgcaatg

SEQ ID NO: 5033 - DNA, 60 bp, Artificial
  Synthetic oligonucleotide
gaatatggagaaagtgcttttccaggcaatgggacagccctagctgatgcccaacataag

SEQ ID NO: 5034 - DNA, 60 bp, Artificial
  Synthetic oligonucleotide
cggcttcccttggcataaagtcccatcaagtgcatcagtttcccaacacgtttcgtgttg

SEQ ID NO: 5035 - DNA, 60 bp, Artificial
  Synthetic oligonucleotide
cacggctaagtataaggtgccttctttggtagggatataggtcatgtctcccagccatac

SEQ ID NO: 5036 - DNA, 60 bp, Artificial
  Synthetic oligonucleotide
ctcccttgatcagtatggacaatcaagccaggctgaggatgttctttcccacaagcttgt

SEQ ID NO: 5037 - DNA, 60 bp, Artificial
  Synthetic oligonucleotide
gcttgtgggaaagaacatcctcagcctggcttgattgtccatactgatcaagggagtcaa

SEQ ID NO: 5038 - DNA, 60 bp, Artificial
  Synthetic oligonucleotide
gaatatggagaaagtgcttttccaggcaatgggacagacctagctgatgcccaacataag

SEQ ID NO: 5039 - DNA, 60 bp, Artificial
  Synthetic oligonucleotide
caacacgaaacgtgttggaaaactgatgcacttgatgggactttatgccaagggaagccg

SEQ ID NO: 5040 - DNA, 60 bp, Artificial
  Synthetic oligonucleotide
gctgtcccattgcctggaaaagcactttctccatattcttcaacttcttgaacccagcga

SEQ ID NO: 5041 - DNA, 60 bp, Artificial
  Synthetic oligonucleotide
ggctgtcccattgcctggaaaagcactttatccatattcttcaacttcttgaacccagcg

SEQ ID NO: 5042 - DNA, 60 bp, Artificial
  Synthetic oligonucleotide
ggctgtcccattgcctggaaaagcactttctccatattcttcaacttcttgaacccagcg

SEQ ID NO: 5043 - DNA, 60 bp, Artificial
  Synthetic oligonucleotide
gttgaagaatatggagaaagtgcttttccaggcaatgggacagccctagctgatgcccaa

SEQ ID NO: 5044 - DNA, 60 bp, Artificial
  Synthetic oligonucleotide
gctgggttcaagaagttgaagaatatggagaaagtgcttttccaggcaatgggacagccc

SEQ ID NO: 5045 - DNA, 60 bp, Artificial
  Synthetic oligonucleotide
caacacgaaacgtgttgggaaactgatgcacttgatgggactttatgccaagggaagccg

SEQ ID NO: 5046 - DNA, 60 bp, Artificial
  Synthetic oligonucleotide
caacacgaaacgtgtggggaaactgatgcacttgatgggactttatgccaagggaagccg

SEQ ID NO: 5047 - DNA, 60 bp, Artificial
  Synthetic oligonucleotide
catggatttgaaggggccttaggctctacactcaaggcttacaggacctctgctaactca

SEQ ID NO: 5048 - DNA, 60 bp, Artificial
  Synthetic oligonucleotide
ggatgaatgggaagagcgtaagttaaaggatgtcgttgaaaagcagataaaaggtaaggc

SEQ ID NO: 5049 - DNA, 60 bp, Artificial
  Synthetic oligonucleotide
cccctcttgaaatgacggacacggcacttatggcaggtttgcaaaagaacgtctatccgc

SEQ ID NO: 5050 - DNA, 60 bp, Artificial
  Synthetic oligonucleotide
ccgaagaaccaccgaaggacaataccgtttatctctcaaagagagaccttttcgctttct

SEQ ID NO: 5051 - DNA, 60 bp, Artificial
  Synthetic oligonucleotide
cgaccgtttgattcacgggcaagtggcagttgtatggaccaaagagttaaatgcgccgct

SEQ ID NO: 5052 - DNA, 60 bp, Artificial
  Synthetic oligonucleotide
cggcgcatttaactctttggtccatacaactgccacttgcccgtgaatcaaacggtcgtc

SEQ ID NO: 5053 - DNA, 60 bp, Artificial
  Synthetic oligonucleotide
cgaccgtttgattcacgggcaagtggcagttgtatggaccaaagagttaaatgcaccgct

SEQ ID NO: 5054 - DNA, 60 bp, Artificial
  Synthetic oligonucleotide
cgatccacgcgtatggctacgtgctggtcaagcttcaatggtagctcgtctagagcaagc

SEQ ID NO: 5055 - DNA, 60 bp, Artificial
  Synthetic oligonucleotide
gaagccgctcgtgcaggtgaatatggtcgaggctttgccgtggttgctgatgaggttcgt

SEQ ID NO: 5056 - DNA, 60 bp, Artificial
  Synthetic oligonucleotide
gcggcggtgtactggttttaggccatcacgcacatctggaagagcacgacccacgatgac

SEQ ID NO: 5057 - DNA, 60 bp, Artificial
  Synthetic oligonucleotide
ggggtatcgtcggtatggctgtaggggttttgattgccgctcaattagtttggccacagc

SEQ ID NO: 5058 - DNA, 60 bp, Artificial
  Synthetic oligonucleotide
cgacctacggcatgggtgtgcatgtggaaaatgttcgccgctcgtgggaccaatttgccg

SEQ ID NO: 5059 - DNA, 60 bp, Artificial
  Synthetic oligonucleotide
ccaagtgggtctgccactggaagggattgcgctgatcatgggtgtcgaccgtctactgga

SEQ ID NO: 5060 - DNA, 60 bp, Artificial
  Synthetic oligonucleotide
cgacgcagaagtagtgagccaccagctcatgctacgtgcaggtatgatccgtaagctggc

SEQ ID NO: 5061 - DNA, 60 bp, Artificial
  Synthetic oligonucleotide
ccgccgcccatgtcagccatgatgccagaagagatcatcgcaggtgcaagtgctggtttg

SEQ ID NO: 5062 - DNA, 60 bp, Artificial
  Synthetic oligonucleotide
gcgcctgcagttttcgccatagaggctttgcgcacttcaaaacttcttcccatcgggatg

SEQ ID NO: 5063 - DNA, 60 bp, Artificial
  Synthetic oligonucleotide
cacggaagataccgccagtccaccacatgtcttggtcttcaatgtaagtggagtcagccc

SEQ ID NO: 5064 - DNA, 60 bp, Artificial
  Synthetic oligonucleotide
cggaaggtgagatccccttcttcgccacttttgacaatgacgttcgccgcaccaccaccg

SEQ ID NO: 5065 - DNA, 60 bp, Artificial
  Synthetic oligonucleotide
cgccgccgtgagatcattgcccactttggtcatgatattggcttggccgatcatcgccgc

SEQ ID NO: 5066 - DNA, 60 bp, Artificial
  Synthetic oligonucleotide
ctaagtggtcaatcgacacaccaccggcggcaccagcgaatgacacattgccatcgccac

SEQ ID NO: 5067 - DNA, 60 bp, Artificial
  Synthetic oligonucleotide
gcagtacggtcagagatacgacgcgcctgttgcattgagtgagtcacgataacgatggtg

SEQ ID NO: 5068 - DNA, 60 bp, Artificial
  Synthetic oligonucleotide
gcgcagcagaggttgactttgaccctggacgaagctgcaacgcagcgcctgcatactttc

SEQ ID NO: 5069 - DNA, 60 bp, Artificial
  Synthetic oligonucleotide
gcgctgcgttgcagcttcgtccagggtcaaagtcaacctctgctacgtggtgcctcatct

SEQ ID NO: 5070 - DNA, 60 bp, Artificial
  Synthetic oligonucleotide
ccaacgcggacatgcatggtaggacgcatgccaacgtactcttcgccaagcaaggcgact

SEQ ID NO: 5071 - DNA, 60 bp, Artificial
  Synthetic oligonucleotide
gcggcggtttccttggttgtatcgtagcgggcttcatcgccggtggtgtggtattccaac

SEQ ID NO: 5072 - DNA, 60 bp, Artificial
  Synthetic oligonucleotide
ggtggagtggcaaatacgcgcttggtggtcaacgttgttggtgccccacagggaagccat

SEQ ID NO: 5073 - DNA, 60 bp, Artificial
  Synthetic oligonucleotide
cggtgcagtacgtcgtgccaagttgtactacctacgtgagcgttctggtaaatcagctcg

SEQ ID NO: 5074 - DNA, 60 bp, Artificial
  Synthetic oligonucleotide
cgtcgtgccaagttgtactacctacgtgagcgttctggtaaatcagcacgtatccgtgag

SEQ ID NO: 5075 - DNA, 60 bp, Artificial
  Synthetic oligonucleotide
cccgtgaagatgtttgacgtgcctgttgcgtagaacacatcatcgcctcgtccgccccag

SEQ ID NO: 5076 - DNA, 60 bp, Artificial
  Synthetic oligonucleotide
gggcgaaggggagtttacggcggtgaactggggcacatcgaatgtgggcattaaagtcgg

SEQ ID NO: 5077 - DNA, 60 bp, Artificial
  Synthetic oligonucleotide
gtcaccagcaccaaggaagacatggttaatgcgtccagcaaccactgccgtgtcgttgcc

SEQ ID NO: 5078 - DNA, 60 bp, Artificial
  Synthetic oligonucleotide
ggtcgtcaccggcaccaaggaagacatggttaatgcgtccagcaaccactgccgtgtcgt

SEQ ID NO: 5079 - DNA, 60 bp, Artificial
  Synthetic oligonucleotide
gcgccacgagcaggctcatcaacgtcgctgacaccaatacgagagagatcgatgtcgcct

SEQ ID NO: 5080 - DNA, 60 bp, Artificial
  Synthetic oligonucleotide
cgagctggctcgtcaacgtcgctgacaccaatacgagagagatcgatgtcgccttccgca

SEQ ID NO: 5081 - DNA, 60 bp, Artificial
  Synthetic oligonucleotide
ccggttcaggccgtgactatgtggtgacttctggcaacttcaaccgtgtggatacgggag

SEQ ID NO: 5082 - DNA, 60 bp, Artificial
  Synthetic oligonucleotide
cgcaggtttgctgtcgtcttctgggtggtaacgcatgatgtccatacgcactttcccgcc

SEQ ID NO: 5083 - DNA, 60 bp, Artificial
  Synthetic oligonucleotide
ccgtgcaatgcagcagctttgaagccacgtgcagatagccaatcagctagacgctcagtg

SEQ ID NO: 5084 - DNA, 60 bp, Artificial
  Synthetic oligonucleotide
cgctggcatcactaacgaccgcatccttatcaaactggcttctacttgggaaggtatccg

SEQ ID NO: 5085 - DNA, 60 bp, Artificial
  Synthetic oligonucleotide
cctacgcggacatgcatagtaggacgcatgccaacgtactcttcgccaagcaaggcgact

SEQ ID NO: 5086 - DNA, 60 bp, Artificial
  Synthetic oligonucleotide
gcgtgatgaaggcatggctcgagtcttcacatttagctggcgctaatgcaacgtacgtag

SEQ ID NO: 5087 - DNA, 60 bp, Artificial
  Synthetic oligonucleotide
cttatataaggtggcttgggcttgtccaacacttcggataggtgtcggcttcgcgacaca

SEQ ID NO: 5088 - DNA, 60 bp, Artificial
  Synthetic oligonucleotide
gccaagagcttaagcagccagacactaaacgagatgcggcaagtccagatcacccagaac

SEQ ID NO: 5089 - DNA, 60 bp, Artificial
  Synthetic oligonucleotide
cgaccttgacggacttcaagcaaagcaggcaaacgatggtggacgatttgatcgccaacg

SEQ ID NO: 5090 - DNA, 60 bp, Artificial
  Synthetic oligonucleotide
ctcgactcgcttacacctacgcatcaacaggtgaacccattgccgccactgttttgcacg

SEQ ID NO: 5091 - DNA, 60 bp, Artificial
  Synthetic oligonucleotide
gttgcgcgcctagatgctatcgtagggttgtttgaatgagataggagaggcactaggatg

SEQ ID NO: 5092 - DNA, 60 bp, Artificial
  Synthetic oligonucleotide
gcctgacccttaacactaaccacatacacgtcagcatcacgaaaggcgtttagctcctgc

SEQ ID NO: 5093 - DNA, 60 bp, Artificial
  Synthetic oligonucleotide
ggaacgtgcctattaagtctatttgtagcccgtactgggcatcttgcgtcagctcagagc

SEQ ID NO: 5094 - DNA, 60 bp, Artificial
  Synthetic oligonucleotide
gcaccgctgtatcgttagtcacgccgtttcgtgcctaaaacgcctaaaacccaacgtttc

SEQ ID NO: 5095 - DNA, 60 bp, Artificial
  Synthetic oligonucleotide
caaaggttgctgcgattaacttccatcctgccccacctgaatacccgggaagtggatgcg

SEQ ID NO: 5096 - DNA, 60 bp, Artificial
  Synthetic oligonucleotide
ctacgaccgaattaagcggcaacgggtcgctgtcagaccagacattttctctaacgcacc

SEQ ID NO: 5097 - DNA, 60 bp, Artificial
  Synthetic oligonucleotide
gagcgtctagctgactggctatctgcacgtggcttcaaagctgctgcactgcacggtgac

SEQ ID NO: 5098 - DNA, 60 bp, Artificial
  Synthetic oligonucleotide
gcccacttcttcgcggatctcaacgtttgcaccgtccatcgtaccgatagttagcgcacc

SEQ ID NO: 5099 - DNA, 60 bp, Artificial
  Synthetic oligonucleotide
tcatgggtaacaaggtgcattcctgcgttctgtcccacgggcacacccacggcttaaccc

SEQ ID NO: 5100 - DNA, 60 bp, Artificial
  Synthetic oligonucleotide
cggactgactcttcgtggcagctcgatgaaacctacgtcaaagtgaaggggaagtggcac

SEQ ID NO: 5101 - DNA, 60 bp, Artificial
  Synthetic oligonucleotide
ccgctcgcagtcgtccctccttcttcaagcgggctatcgcattggcgtatgaggaatgct

SEQ ID NO: 5102 - DNA, 60 bp, Artificial
  Synthetic oligonucleotide
caggttgtcgggacgttatgccagtccatcattacggatgtcgagcacgtcagtgccgac

SEQ ID NO: 5103 - DNA, 60 bp, Artificial
  Synthetic oligonucleotide
ggtaaacaacctcaacattgaagagacgattcatgaaggcggatctctcccgcacaaggg

SEQ ID NO: 5104 - DNA, 60 bp, Artificial
  Synthetic oligonucleotide
ccacggcgaactcaccaagcgcactgaactccataccaaaactgcgcagtaaaacgtgtc

SEQ ID NO: 5105 - DNA, 60 bp, Artificial
  Synthetic oligonucleotide
caccaagcgcactgaactccataccaaaaccgcggagtaaaacgcatcaccttgattgct

SEQ ID NO: 5106 - DNA, 60 bp, Artificial
  Synthetic oligonucleotide
ccacgaccaactcaccaagcgcactgaactccataccaaaaccgcggagtaaaacgtgtc

SEQ ID NO: 5107 - DNA, 60 bp, Artificial
  Synthetic oligonucleotide
gcaccacggctaactcaccaagcgcactgaactccataccaaaaccgcggagtaaaacgc

SEQ ID NO: 5108 - DNA, 60 bp, Artificial
  Synthetic oligonucleotide
ctcagcggttttggtatggagttcagtgcgcttggtgagttagccgtggtgcaacttatg

SEQ ID NO: 5109 - DNA, 60 bp, Artificial
  Synthetic oligonucleotide
gccgcacgctctgccaaccgataatgccaagggcgaagcaacctatcaggttactcatcc

SEQ ID NO: 5110 - DNA, 60 bp, Artificial
  Synthetic oligonucleotide
ctccgcagttttggtatggagttcagtgcgcttggtgagttagccgtggtgcaacttatg

SEQ ID NO: 5111 - DNA, 60 bp, Artificial
  Synthetic oligonucleotide
gctacccagccagcaagaactgctgccgttgctgatgttaagaaccacatacccattgca

SEQ ID NO: 5112 - DNA, 60 bp, Artificial
  Synthetic oligonucleotide
cgtggccgtgctgcttaacaatacgcaccataccaggcttgatagcggtcagcagtggag

SEQ ID NO: 5113 - DNA, 60 bp, Artificial
  Synthetic oligonucleotide
gccactcacctgcagcaaaatcttcccaagctttagcaaattgctctgccatgacatacc

SEQ ID NO: 5114 - DNA, 60 bp, Artificial
  Synthetic oligonucleotide
ctcgcccgacatcaccacatcaagaatccaactttcgccaaccataccgcgatcggtaca

SEQ ID NO: 5115 - DNA, 60 bp, Artificial
  Synthetic oligonucleotide
cgcccgacatcaccacatcaagaatccaactttcaccgaccattccacgctcgtcacaca

SEQ ID NO: 5116 - DNA, 60 bp, Artificial
  Synthetic oligonucleotide
ggctgccttgccggagtctaactccttccaccatagctggttcatatcttggagcttggc

SEQ ID NO: 5117 - DNA, 60 bp, Artificial
  Synthetic oligonucleotide
gagataccgtgtgaatcaaactctgctcttggttgaagatgaccgcaaccttgctgatgg

SEQ ID NO: 5118 - DNA, 60 bp, Artificial
  Synthetic oligonucleotide
gctgccttgccggaatccaattccttccaccatagctggttcatatcttggagcttggca

SEQ ID NO: 5119 - DNA, 60 bp, Artificial
  Synthetic oligonucleotide
gccaagctccaagatatgaaccagctatggtggaaggagttagactccggcaaggcagcc

SEQ ID NO: 5120 - DNA, 60 bp, Artificial
  Synthetic oligonucleotide
ccaagctccaagatatgaaccagctatggtggaaggaattggatcccggcaaggcagctc

SEQ ID NO: 5121 - DNA, 60 bp, Artificial
  Synthetic oligonucleotide
gatatcgcgcacgcgcatttcggcgatttccatcacaccttcgagcatgtcgcgggtgtc

SEQ ID NO: 5122 - DNA, 60 bp, Artificial
  Synthetic oligonucleotide
gttgcattggcgccagccaagtgtgaagactcgagccatgccttcatcacgccgttgtgc

SEQ ID NO: 5123 - DNA, 60 bp, Artificial
  Synthetic oligonucleotide
gccacagctaaactttgatacgccgtggttgacgtacagtcgtttacgtcccctgcatac

SEQ ID NO: 5124 - DNA, 60 bp, Artificial
  Synthetic oligonucleotide
gctgtggccaaactaattgagcggcaatcaaaacaccaacagccataccaactatgcccc

SEQ ID NO: 5125 - DNA, 60 bp, Artificial
  Synthetic oligonucleotide
cgtggccgtgctgtttcacaatacgcaccataccaggcttgatagcggtcagcagcggtg

SEQ ID NO: 5126 - DNA, 60 bp, Artificial
  Synthetic oligonucleotide
gacttgcgtcgcgcccttaggtcttacttgcagcaatccggctactatggtgctccctgc

SEQ ID NO: 5127 - DNA, 60 bp, Artificial
  Synthetic oligonucleotide
cgcgacttgcgtcgcgcccttaggtcttacttgcagcattcccgctactatagtgctccc

SEQ ID NO: 5128 - DNA, 60 bp, Artificial
  Synthetic oligonucleotide
ctggcgaatctgcgccaaacaagaagtactacgatccacgcgtatggctacgtgctggtc

SEQ ID NO: 5129 - DNA, 60 bp, Artificial
  Synthetic oligonucleotide
ccacggctaactcaccaagcacactcaactccataccaaaactgcggagtaaaacgtgtc

SEQ ID NO: 5130 - DNA, 60 bp, Artificial
  Synthetic oligonucleotide
gagcaacggcgcataggtcccaacaaaactcgcccttcgggagtgactcaacgtgtctac

SEQ ID NO: 5131 - DNA, 60 bp, Artificial
  Synthetic oligonucleotide
ggaatcgccccttcagagataccgactaagcccattgcgcccgccgctttacctgcttca

SEQ ID NO: 5132 - DNA, 60 bp, Artificial
  Synthetic oligonucleotide
gccacagctaaactttgatacgccgtggttgacgtacagtcgcttacgtccactgcatac

SEQ ID NO: 5133 - DNA, 60 bp, Artificial
  Synthetic oligonucleotide
ccacggctaactcaccaagcgcactgaactccataccaaaactgcggagtaaaacgtgtc

SEQ ID NO: 5134 - DNA, 60 bp, Artificial
  Synthetic oligonucleotide
ccacgaccaactcaccaagcgcactgaactccataccaaaactgcggagtaaaacgtgtc

SEQ ID NO: 5135 - DNA, 60 bp, Artificial
  Synthetic oligonucleotide
cggctaactcaccaagcgcactgaactccataccaaaactgcggagtaaaacgtgtcaac

SEQ ID NO: 5136 - DNA, 60 bp, Artificial
  Synthetic oligonucleotide
gctatgtgattggggtgaacgaatgcatccaacaccgctgcagcttcaagtaggaagggt

SEQ ID NO: 5137 - DNA, 60 bp, Artificial
  Synthetic oligonucleotide
caccccaatcacatagtgtatctatgctcatggggatgaactcacttgccgcctacctgc

SEQ ID NO: 5138 - DNA, 60 bp, Artificial
  Synthetic oligonucleotide
gcgttatccccttcctacttgaagctgcagcggtgttggctacgttcgttcaccccaatc

SEQ ID NO: 5139 - DNA, 60 bp, Artificial
  Synthetic oligonucleotide
ctatgtgattggggtgaacgagcgtagccaacaccgctgcagcttcaagtaggaagggta

SEQ ID NO: 5140 - DNA, 60 bp, Artificial
  Synthetic oligonucleotide
ctatgtgattggggtgaacgaacgtagccaacacccctgcagcttcaagtaggaagggga

SEQ ID NO: 5141 - DNA, 60 bp, Artificial
  Synthetic oligonucleotide
gcgataaagccatactgactgcccgcccaaccttgcgacacccgtacccaacaggagctt

SEQ ID NO: 5142 - DNA, 60 bp, Artificial
  Synthetic oligonucleotide
caaaaccaaaaccgtgctgcgcaccgagacgcaccaaggggagggctttaacgagctcag

SEQ ID NO: 5143 - DNA, 60 bp, Artificial
  Synthetic oligonucleotide
cggtgcgccgccataatgcccaacggcacgccaattaatacggaaatcgttgtcgctgca

SEQ ID NO: 5144 - DNA, 60 bp, Artificial
  Synthetic oligonucleotide
ggcttaggcctaggtggtctgcaacttcagcgtaacgacgacgtgcttgtggacggtcgt

SEQ ID NO: 5145 - DNA, 60 bp, Artificial
  Synthetic oligonucleotide
ggaacaactccttcagcagcacgctcttcgacgtgtttacggtaggcttcaagcacgact

SEQ ID NO: 5146 - DNA, 60 bp, Artificial
  Synthetic oligonucleotide
ccgtccacaagcacgtcgtcgttacgcagaagttgctgaccacctaggcctaagccaagc

SEQ ID NO: 5147 - DNA, 60 bp, Artificial
  Synthetic oligonucleotide
ctaccgccccatgagaaagcgcactgcctaccatcaccacagtccagcaatcaaggccac

SEQ ID NO: 5148 - DNA, 60 bp, Artificial
  Synthetic oligonucleotide
catgacagcactcagcaaacacgacggacagtcacacacgttcgacccatccactcgggc

SEQ ID NO: 5149 - DNA, 60 bp, Artificial
  Synthetic oligonucleotide
cctatcccatgcaccacccgtaaggcaacgaacctcgtaacgcacacctgtaggccaagc

SEQ ID NO: 5150 - DNA, 60 bp, Artificial
  Synthetic oligonucleotide
gtgtgggcattgctggctttgaggttcctatccccgtcacccctgaaattggccgcacct

SEQ ID NO: 5151 - DNA, 60 bp, Artificial
  Synthetic oligonucleotide
gccaatgcccttattccgcagcacggtgaaggcgatccgttctgggtagattccgctcgt

SEQ ID NO: 5152 - DNA, 60 bp, Artificial
  Synthetic oligonucleotide
gcggctttctcttgtgattcaccgtagcaaacatgctcgatgacagcgcataaagttggc

SEQ ID NO: 5153 - DNA, 60 bp, Artificial
  Synthetic oligonucleotide
ggagggcttagtagtgaccatgcgactcaccctctgcgtcaccaccaaacaccaacaggg

SEQ ID NO: 5154 - DNA, 60 bp, Artificial
  Synthetic oligonucleotide
cagcatgacatcaccggtttcaactgtgcgggcccgagagaaattgaccagggcaacgca

SEQ ID NO: 5155 - DNA, 60 bp, Artificial
  Synthetic oligonucleotide
ggctctttcacggtcgatgaacagccagcgaggcccataagtgcgatgagagacagtgcc

SEQ ID NO: 5156 - DNA, 60 bp, Artificial
  Synthetic oligonucleotide
gccttcctttccccttagagcgtaaacattacacctgtgccaacagccacaaacacccaa

SEQ ID NO: 5157 - DNA, 60 bp, Artificial
  Synthetic oligonucleotide
ccaccaatgccagagcgagcgcggcagcatcaaccggtaatctggactttggcagtatgc

SEQ ID NO: 5158 - DNA, 60 bp, Artificial
  Synthetic oligonucleotide
ctcgacaccctccaagtgcaactctacggcaaactgcaaaagtacgtgggacggcgcgct

SEQ ID NO: 5159 - DNA, 60 bp, Artificial
  Synthetic oligonucleotide
ggtcgctgcctaccagagcaaccttgcgccgccacggactacgacattctttacggtaac

SEQ ID NO: 5160 - DNA, 60 bp, Artificial
  Synthetic oligonucleotide
ggccacgccgttgaccctatgatggaagcactcgacaacatcaccgcactctttgccacc

SEQ ID NO: 5161 - DNA, 60 bp, Artificial
  Synthetic oligonucleotide
gggttaaccaccacgaccaaccctcgcaccttttacgcagacccaagcatcaccatcccg

SEQ ID NO: 5162 - DNA, 60 bp, Artificial
  Synthetic oligonucleotide
gaccacgctgcgaagaaacttcttccatggatcgacggtctactagacgctggtgaagag

SEQ ID NO: 5163 - DNA, 60 bp, Artificial
  Synthetic oligonucleotide
ctgtcatatggccgtcttctgttgccatattttcccacgttgcacttctcatgaagcggt

SEQ ID NO: 5164 - DNA, 60 bp, Artificial
  Synthetic oligonucleotide
atccgtgctctaagcatggacggcgtacaacaagcaaactctggccaccctggcgcacct

SEQ ID NO: 5165 - DNA, 60 bp, Artificial
  Synthetic oligonucleotide
gtccttgatacttccagctcatacgagcatcttcaaggccaaaacactcacctaacccgc

SEQ ID NO: 5166 - DNA, 60 bp, Artificial
  Synthetic oligonucleotide
ctccaagcatacaggatgccaagacaaaggttgatacagaaccctgcaagcaggatgcgc

SEQ ID NO: 5167 - DNA, 60 bp, Artificial
  Synthetic oligonucleotide
cgaggtacttcgccctgtgggaactctacgtcgactaccgcaccgatgatctgtacgatc

SEQ ID NO: 5168 - DNA, 60 bp, Artificial
  Synthetic oligonucleotide
ggcttaggcctaggtggtcagcaacttcagcgtaacgacgacgtgcttgtggacggtcgt

SEQ ID NO: 5169 - DNA, 60 bp, Artificial
  Synthetic oligonucleotide
cctaggtcagccgccacaccataaatgcctgccgcttccatatcaacaccaaggatgcct

SEQ ID NO: 5170 - DNA, 60 bp, Artificial
  Synthetic oligonucleotide
ctgtttgtaatcacccgcatcaatggtgccgcgtaacgtagtcgctgcgccccagaggta

SEQ ID NO: 5171 - DNA, 60 bp, Artificial
  Synthetic oligonucleotide
ccattcttgatacactgttgcaaaacaagcttcttcgctactgactaaggagtcaggacg

SEQ ID NO: 5172 - DNA, 60 bp, Artificial
  Synthetic oligonucleotide
gcgccaaggggcccagaactctaatgggcaacggatagcaccatagaacagctctttgcc

SEQ ID NO: 5173 - DNA, 60 bp, Artificial
  Synthetic oligonucleotide
ctatggcgcaatccgttgcccattagagttctgggccccttggcgcactgaagaggacga

SEQ ID NO: 5174 - DNA, 60 bp, Artificial
  Synthetic oligonucleotide
cgcggatctcaacgtttgcaccatccatcgtaccaacagtcagcgcaccgtttagtgcca

SEQ ID NO: 5175 - DNA, 60 bp, Artificial
  Synthetic oligonucleotide
cacgacacccgcgacatgctcgaaggtgtgatggaaatagcagaaatgcgagtgcgtgac

SEQ ID NO: 5176 - DNA, 60 bp, Artificial
  Synthetic oligonucleotide
gccgcccatgtcagccatgatgccagaagagatcatcgctggcgctagtgctggtttgtc

SEQ ID NO: 5177 - DNA, 60 bp, Artificial
  Synthetic oligonucleotide
gggccagtgtgaaaccagccgcacgtcgtaacgcacgtcaattcgctctacaggcgatct

SEQ ID NO: 5178 - DNA, 60 bp, Artificial
  Synthetic oligonucleotide
gcaacatgttactgctacgatgtcgtactcgccttcgcctgctgctggagccgcttgagc

SEQ ID NO: 5179 - DNA, 60 bp, Artificial
  Synthetic oligonucleotide
ctggttgattcaggtgcatggactgcattacgtactcgtccgttcagcaaggttccagcg

SEQ ID NO: 5180 - DNA, 60 bp, Artificial
  Synthetic oligonucleotide
ctgggcatatacccttcctacttgaagctgcagcggtgttggctacgttcgttcacccca

SEQ ID NO: 5181 - DNA, 60 bp, Artificial
  Synthetic oligonucleotide
ggagtgaacgaacgtagccaacaccgctgcagcttcaagtaggaagggtatagctaagag

SEQ ID NO: 5182 - DNA, 60 bp, Artificial
  Synthetic oligonucleotide
cccgatgggaagaagttttgaagtgcgcaaagcctctatggcgaaaactgcaggcgcgaa

SEQ ID NO: 5183 - DNA, 60 bp, Artificial
  Synthetic oligonucleotide
gggcagagatccgcactgaaatgggtcacaccatggaagcgggttgtggtatctatcgcc

SEQ ID NO: 5184 - DNA, 60 bp, Artificial
  Synthetic oligonucleotide
ccatttatttctgcgatcttaccttctttgtccctatacttatctttacactctcttaac

SEQ ID NO: 5185 - DNA, 60 bp, Artificial
  Synthetic oligonucleotide
gcagcctcactgtccccagcatgagcagcatcaccaaccttcccaaacaacttccctgcc

SEQ ID NO: 5186 - DNA, 60 bp, Artificial
  Synthetic oligonucleotide
gcagcctcactgtccccatgagcattagcaccagccttcccaaacaacttccctgcccct

SEQ ID NO: 5187 - DNA, 60 bp, Artificial
  Synthetic oligonucleotide
gccgccttgctagcagcctcactgtccccatgagcattagcaccagccttcccaaacaac

SEQ ID NO: 5188 - DNA, 60 bp, Artificial
  Synthetic oligonucleotide
ctccccactaacagcaccagccgccttgctagcagcctcactgtccccagcattagcatt

SEQ ID NO: 5189 - DNA, 60 bp, Artificial
  Synthetic oligonucleotide
ccagccgccttgctagcagcctcactgtccccattagcagcatcaccagctttcccaaac

SEQ ID NO: 5190 - DNA, 60 bp, Artificial
  Synthetic oligonucleotide
ctagcagcctcactgtccccagcattaccagcaccagccttcccaaacaacttccctgcc

SEQ ID NO: 5191 - DNA, 60 bp, Artificial
  Synthetic oligonucleotide
ctcttcaagtctgggagttgcatggtccttcaaaataatcaacgcccacccctccatgac

SEQ ID NO: 5192 - DNA, 60 bp, Artificial
  Synthetic oligonucleotide
cccggacaagattctatatccaatacatggggcgaaggacttgaaattggtggtgatagc

SEQ ID NO: 5193 - DNA, 60 bp, Artificial
  Synthetic oligonucleotide
ccccgcgtaaatttcagctatttgatgcgcaagccttaattgatcctggtgtggtgtgta

SEQ ID NO: 5194 - DNA, 60 bp, Artificial
  Synthetic oligonucleotide
gctcttgtgattgcagataaagttataataccggttccacttgaaaggtgggcagttgaa

SEQ ID NO: 5195 - DNA, 60 bp, Artificial
  Synthetic oligonucleotide
cggtggagccgccagaatcatagtgtctcaagaatctgcccgacaacttgggtgctgaag

SEQ ID NO: 5196 - DNA, 60 bp, Artificial
  Synthetic oligonucleotide
tgtcttaactaatcaggatgttgacagtcgcaccacaatgtcgcgccactcgccaccggc

SEQ ID NO: 5197 - DNA, 60 bp, Artificial
  Synthetic oligonucleotide
ggggagtggaggtaaggggagcaagccggcgggaacaggaggataatattagttcacaaa

SEQ ID NO: 5198 - DNA, 60 bp, Artificial
  Synthetic oligonucleotide
gtcgtgccaaacctcgcgccttttgaagtcccatttgtaaactgtatctaaccagctagg

SEQ ID NO: 5199 - DNA, 60 bp, Artificial
  Synthetic oligonucleotide
ccccaaacaaaatcggtcaatccgtttataagctccgcaacagcttctccccaaggtcca

SEQ ID NO: 5200 - DNA, 60 bp, Artificial
  Synthetic oligonucleotide
cgagaatatacttcggctaatttctcaagcccctcgctacttccaccagcagcctcccca

SEQ ID NO: 5201 - DNA, 60 bp, Artificial
  Synthetic oligonucleotide
gatcgtaggaggtattggaggcgttacagaaagcacagcaacagtaataaccggaggagt

SEQ ID NO: 5202 - DNA, 60 bp, Artificial
  Synthetic oligonucleotide
ccacgaataggaccaactcccgctgttgcagttgcagcctttaccagtacttctcccatt

SEQ ID NO: 5203 - DNA, 60 bp, Artificial
  Synthetic oligonucleotide
ccgagtacctgcacgttacgagggtgctgctctgccgggtgagctaagttggcaagttga

SEQ ID NO: 5204 - DNA, 60 bp, Artificial
  Synthetic oligonucleotide
gaagattatactcagcggcggcatagctagcggcaaaacgtatcttgcatgttatctttt

SEQ ID NO: 5205 - DNA, 60 bp, Artificial
  Synthetic oligonucleotide
ggggtagtttaagctatgctcctcattggggactggactatttcttgcttttaaagctgt

SEQ ID NO: 5206 - DNA, 60 bp, Artificial
  Synthetic oligonucleotide
cggcgctagtgaagtaggcaatattcttgttggaggtgctgggctgaaagatttaatgat

SEQ ID NO: 5207 - DNA, 60 bp, Artificial
  Synthetic oligonucleotide
ggaaagacttgagagtgcattaaccccagcaataaatgcggcactcgctcctttaaatgc

SEQ ID NO: 5208 - DNA, 60 bp, Artificial
  Synthetic oligonucleotide
aatgaacttgaacttgattattatcctagtagcagtggaggcgaagaaggcggcgagggg

SEQ ID NO: 5209 - DNA, 60 bp, Artificial
  Synthetic oligonucleotide
catgccgctggctgctacaccacttgttgatgatactgtaattggaaagttgcgaactgc

SEQ ID NO: 5210 - DNA, 60 bp, Artificial
  Synthetic oligonucleotide
taagtcaccagattttgcccatgtaacataaccacctgcaagtaattcaagcacgtcccc

SEQ ID NO: 5211 - DNA, 60 bp, Artificial
  Synthetic oligonucleotide
cttgctttaagccctatttcacgatcacttctttgtaattcgaactctcgtcgaactatt

SEQ ID NO: 5212 - DNA, 60 bp, Artificial
  Synthetic oligonucleotide
ctgcaatctgcccaagctacataatctaataagctcttgacaaacaccctaacaaaagta

SEQ ID NO: 5213 - DNA, 60 bp, Artificial
  Synthetic oligonucleotide
gaaaccagttggccttttggcagttgtagttctaagtgatagaaatctaaattcaaatcc

SEQ ID NO: 5214 - DNA, 60 bp, Artificial
  Synthetic oligonucleotide
ccccgatcttatttggagaggattaataggggtgttggggactattggtagatcgttttc

SEQ ID NO: 5215 - DNA, 60 bp, Artificial
  Synthetic oligonucleotide
gctttcattaaagttggttttgttttgttcgtcgaagtgccttgctagtgcggcaattat

SEQ ID NO: 5216 - DNA, 60 bp, Artificial
  Synthetic oligonucleotide
gaaaatgaaagctttagaggcctttatacactcctttaccctgtagaaggttgttgcact

SEQ ID NO: 5217 - DNA, 60 bp, Artificial
  Synthetic oligonucleotide
ccttaagccacttaaagccctttatctggttatcatccatttggagcacataatgcttcc

SEQ ID NO: 5218 - DNA, 60 bp, Artificial
  Synthetic oligonucleotide
tttgtgagacagggcataagctcatcatttgtgtctatggttagtaactagtactcgggg

SEQ ID NO: 5219 - DNA, 60 bp, Artificial
  Synthetic oligonucleotide
gagacaaaagccgtgaatatagagatagtagtttgctagcttttaaggccacatcagatc

SEQ ID NO: 5220 - DNA, 60 bp, Artificial
  Synthetic oligonucleotide
gctttgggagcgaagaattattcttgcaatgtgtgaagttattactccactgaccccaga

SEQ ID NO: 5221 - DNA, 60 bp, Artificial
  Synthetic oligonucleotide
cggaactatcaacgccgccaaataccgctcatcctgcccgactaccactgcacgcgcaat

SEQ ID NO: 5222 - DNA, 60 bp, Artificial
  Synthetic oligonucleotide
gttttccgttcccctcccacgtgcgagctctcccttcatggccttctctgcgatgtctct

SEQ ID NO: 5223 - DNA, 60 bp, Artificial
  Synthetic oligonucleotide
accgccttccctttgcatcgtaactgtagcgaaccaacatctaccccgcccatcctcccc

SEQ ID NO: 5224 - DNA, 60 bp, Artificial
  Synthetic oligonucleotide
agtctcctctcaactccacgcacgcttctctgccgtcatgcgcacgtaccgttaccacct

SEQ ID NO: 5225 - DNA, 60 bp, Artificial
  Synthetic oligonucleotide
gcctcgtccatgccctcaagcgcacgcaagccttcctcgcccaaatctaccaaagtctgt

SEQ ID NO: 5226 - DNA, 60 bp, Artificial
  Synthetic oligonucleotide
aagcctcgagcgagtactgataacctgcaccccacacccacacgtcgaacccactgacca

SEQ ID NO: 5227 - DNA, 60 bp, Artificial
  Synthetic oligonucleotide
acaatctttacccgctgcactcgcaccccgtcctcctgctgccaacgatcctgcttgaga

SEQ ID NO: 5228 - DNA, 60 bp, Artificial
  Synthetic oligonucleotide
ggcggcgaactgtaggggcaagatgatgggcgagtaggacaacaagggcgattttcaggg

SEQ ID NO: 5229 - DNA, 60 bp, Artificial
  Synthetic oligonucleotide
acacgagaaagcccaatgactcctacaaatagcacgcccgccacgcccgtccatgcagtg

SEQ ID NO: 5230 - DNA, 60 bp, Artificial
  Synthetic oligonucleotide
gtctaccacgtcgacccttgcctgcatccaccgcgccagcctttctcgtcttcattccaa

SEQ ID NO: 5231 - DNA, 60 bp, Artificial
  Synthetic oligonucleotide
tcctccatacttgtgccttcttcgccgacgaccctcatcatctgctccacctctgcccca

SEQ ID NO: 5232 - DNA, 60 bp, Artificial
  Synthetic oligonucleotide
acgccgtacacagccacctcacagtcatgcccgaaatgagacgcgatcccctgagcaact

SEQ ID NO: 5233 - DNA, 60 bp, Artificial
  Synthetic oligonucleotide
attctgctcggtggtgtcttggtgggttgggttctgtacatgcacggcgcctctcgtcct

SEQ ID NO: 5234 - DNA, 60 bp, Artificial
  Synthetic oligonucleotide
ggccttcgcccattgcaagaattacggtagcagcacctaaaacaatgtcgccgcctgccc

SEQ ID NO: 5235 - DNA, 60 bp, Artificial
  Synthetic oligonucleotide
ccgaactccaccatcaccatagacggcagaataggggcgacaagcggcaattcgggcgaa

SEQ ID NO: 5236 - DNA, 60 bp, Artificial
  Synthetic oligonucleotide
gcctcggcagtatagctccctacgcctcccaaaccgaaaaccgcaatccgggcatcttca

SEQ ID NO: 5237 - DNA, 60 bp, Artificial
  Synthetic oligonucleotide
gcgccggtatacgcaggacacgccgaaagccacatactgagcattctcgaatcgctgcct

SEQ ID NO: 5238 - DNA, 60 bp, Artificial
  Synthetic oligonucleotide
cctcgtttgtgcccggatcttgaccgccgaattgattacatggaaaagctgcaacaagga

SEQ ID NO: 5239 - DNA, 60 bp, Artificial
  Synthetic oligonucleotide
cgattcactgccgaccgccataagccctgtaccgttttcaagaaatgagggtgccgccgg

SEQ ID NO: 5240 - DNA, 60 bp, Artificial
  Synthetic oligonucleotide
ccgcaccacctccgtccgttcccaaccacagcttgccgttcgagcttttaagcgcacata

SEQ ID NO: 5241 - DNA, 60 bp, Artificial
  Synthetic oligonucleotide
gaatggaaccgtcgcttaaaacccgtccctgccaaaccgactgagacgcccctatacatt

SEQ ID NO: 5242 - DNA, 60 bp, Artificial
  Synthetic oligonucleotide
gtccctgcctccgaagtcgttacccagctccgtggtagaacactcggtcatttccctgca

SEQ ID NO: 5243 - DNA, 60 bp, Artificial
  Synthetic oligonucleotide
cggggctaagggcagaggagtccgcgttgtaggcagaattaagcaggatagatgggtcgg

SEQ ID NO: 5244 - DNA, 60 bp, Artificial
  Synthetic oligonucleotide
ccgccgcaagggctgcatcattccccgagcaaaccgccattccccttatcagctcttcta

SEQ ID NO: 5245 - DNA, 60 bp, Artificial
  Synthetic oligonucleotide
agtaatagccgaaaacaaacccgcccgcctcatggccatcatccccgccggccttaaagc

SEQ ID NO: 5246 - DNA, 60 bp, Artificial
  Synthetic oligonucleotide
cccgttcgccccgatagaccgcgccgcaccattttcgaagtcgagtgttactatgccgta

SEQ ID NO: 5247 - DNA, 60 bp, Artificial
  Synthetic oligonucleotide
gccgcttccgtcatttccgcctccgaaagaacgcagtacagccagagccaaggccctata

SEQ ID NO: 5248 - DNA, 60 bp, Artificial
  Synthetic oligonucleotide
cgcccagggtcgccttgtcttccgctacgcccacgaagctgattgtctattcgccttgat

SEQ ID NO: 5249 - DNA, 60 bp, Artificial
  Synthetic oligonucleotide
gacccgtactatcaagtgttgccaaaccccgtcaggactggaaggtagcagcggtaggcg

SEQ ID NO: 5250 - DNA, 60 bp, Artificial
  Synthetic oligonucleotide
ggatcttgcaatgactggtgaggtgactttaaagggctttgttcttcctgtgggcggcat

SEQ ID NO: 5251 - DNA, 60 bp, Artificial
  Synthetic oligonucleotide
cctaccgccataacccaatcacctatttcaagcttatcactatccccaagatcagccact

SEQ ID NO: 5252 - DNA, 60 bp, Artificial
  Synthetic oligonucleotide
ccccaagcttttcgcagcttaccacgaccttcttcgccttaaagctcctaggcatccacc

SEQ ID NO: 5253 - DNA, 60 bp, Artificial
  Synthetic oligonucleotide
ggactttgggatattgcagcgtgtttagctattggtaataaattgggcatggttggcgaa

SEQ ID NO: 5254 - DNA, 60 bp, Artificial
  Synthetic oligonucleotide
cctaccgcaattccaaggtttgagggcaatgtccaaggggtggttgtccatgctagtagg

SEQ ID NO: 5255 - DNA, 60 bp, Artificial
  Synthetic oligonucleotide
ccttagtcttcccatgccttcacttcctggtattcctgctatttcttggcctgatccagc

SEQ ID NO: 5256 - DNA, 60 bp, Artificial
  Synthetic oligonucleotide
ccggagttcctgtttatgttgcagacaatccgcttctctctgtggctgttggtgctgggt

SEQ ID NO: 5257 - DNA, 60 bp, Artificial
  Synthetic oligonucleotide
gcagggccaaaatgcaaagtaataattccagatccacccgcaagaggccaaagagacgga

SEQ ID NO: 5258 - DNA, 60 bp, Artificial
  Synthetic oligonucleotide
ggctaagggagaagtctgcaaaactttgattcgccggttcgattccggtcagcgccttct

SEQ ID NO: 5259 - DNA, 60 bp, Artificial
  Synthetic oligonucleotide
ccactgaatctgagcaatctaaggttgatgagggtcgtaaagcgggcgctactggttggc

SEQ ID NO: 5260 - DNA, 60 bp, Artificial
  Synthetic oligonucleotide
cccagaaccaagttcttttgcaacctcaatagccccaattcctccaagacctgcggcatg

SEQ ID NO: 5261 - DNA, 60 bp, Artificial
  Synthetic oligonucleotide
cctcaagcttatgcagtattttgtcagaacgccaatcttttgcaaggtcaacagccgccc

SEQ ID NO: 5262 - DNA, 60 bp, Artificial
  Synthetic oligonucleotide
ctgactcaaagcaacaaacatagcaaaatcaccataaatcccatagtcctcatttgccac

SEQ ID NO: 5263 - DNA, 60 bp, Artificial
  Synthetic oligonucleotide
ggtgggtaaggagcatatatgaggattttggttggcgttttcataatagcagcattggct

SEQ ID NO: 5264 - DNA, 60 bp, Artificial
  Synthetic oligonucleotide
ctgatagtattttcctgtctgaggatatgattagacttatagggagttatccagattcga

SEQ ID NO: 5265 - DNA, 60 bp, Artificial
  Synthetic oligonucleotide
gaaggagaggcatttgaaatacttgcaagtggttatgttacatgggcaaaatctggtgat

SEQ ID NO: 5266 - DNA, 60 bp, Artificial
  Synthetic oligonucleotide
gaaggagaggtgtttgaaatacttgcaaatggttatgttacatgggcaaaatctggtgat

SEQ ID NO: 5267 - DNA, 60 bp, Artificial
  Synthetic oligonucleotide
ggtaggtaaggagcatatatgaggattttggttggcgtttgtataatagcagcattggct

SEQ ID NO: 5268 - DNA, 60 bp, Artificial
  Synthetic oligonucleotide
caactacaagacgcgctttctagtgcaacaacttctttaagtgcacttactaagagcagc

SEQ ID NO: 5269 - DNA, 60 bp, Artificial
  Synthetic oligonucleotide
gcagttcagaaactttagtgggctcaacaattgatggctggtttatcaataataatggcg

SEQ ID NO: 5270 - DNA, 60 bp, Artificial
  Synthetic oligonucleotide
gttcttatttgacccacaactatccccaccgctctcttcgcctccactaccactaggata

SEQ ID NO: 5271 - DNA, 60 bp, Artificial
  Synthetic oligonucleotide
gtccagccccaccaattagaacattgcccacttcactagcaccatatttgtcaagcttgt

SEQ ID NO: 5272 - DNA, 60 bp, Artificial
  Synthetic oligonucleotide
ccaagcgtgcagccacctccaatataatctccttggacaaaagaccccactccaaaaggt

SEQ ID NO: 5273 - DNA, 60 bp, Artificial
  Synthetic oligonucleotide
gcagattctacggagggcgccactacaggttctaaggggagggtggtcacgtctaaaccc

SEQ ID NO: 5274 - DNA, 60 bp, Artificial
  Synthetic oligonucleotide
caagctcttcttcagtacgaatgagataaatcccgtcttcaacaatacgatgaacagtag

SEQ ID NO: 5275 - DNA, 60 bp, Artificial
  Synthetic oligonucleotide
ggggcatctttatctgcgatgataaaccctaggagaaagaattgcctctaccctaaatta

SEQ ID NO: 5276 - DNA, 60 bp, Artificial
  Synthetic oligonucleotide
ggcatcctttctctcggcagcagaactaaatgcttcaccaccaccaacgctctcctaata

SEQ ID NO: 5277 - DNA, 60 bp, Artificial
  Synthetic oligonucleotide
gtcagaaacaagctttaacacaaaatatcaaaccgccttacccaacggactttatgcaca

SEQ ID NO: 5278 - DNA, 60 bp, Artificial
  Synthetic oligonucleotide
gccttgaatgttgcggattatattgtgattccagttcaggtagaaatatggtcaatagaa

SEQ ID NO: 5279 - DNA, 60 bp, Artificial
  Synthetic oligonucleotide
gagtggcccctcctattctgtaaatatcgcaagcctaataacgcacaatcccacatgttt

SEQ ID NO: 5280 - DNA, 60 bp, Artificial
  Synthetic oligonucleotide
gtcctgaattcttgaccaccgaatttactaagaaagaaacacttacaagaagagccctgg

SEQ ID NO: 5281 - DNA, 60 bp, Artificial
  Synthetic oligonucleotide
gcttttggaagaaatgtgttcttcaatagcagcccaataagaaccacccggtttcatttt

SEQ ID NO: 5282 - DNA, 60 bp, Artificial
  Synthetic oligonucleotide
gtattgtcacataaagcaggcataccccagtaaactcaatttctaattgatggagttgtt

SEQ ID NO: 5283 - DNA, 60 bp, Artificial
  Synthetic oligonucleotide
caactccatcaattagaaattgagtttactggggtatgcctgctttatgtgacaatacat

SEQ ID NO: 5284 - DNA, 60 bp, Artificial
  Synthetic oligonucleotide
caactccatcaattagaaattgagtttactggggtatgcctgctttatgtggcaatacat

SEQ ID NO: 5285 - DNA, 60 bp, Artificial
  Synthetic oligonucleotide
aagccttcatgcttccaatagcacttttaccagcagctggaattttattgggaattgggg

SEQ ID NO: 5286 - DNA, 60 bp, Artificial
  Synthetic oligonucleotide
cccacatatattaaagctgcagcagttgcgctagcaggaacggcaataaacaaaggggca

SEQ ID NO: 5287 - DNA, 60 bp, Artificial
  Synthetic oligonucleotide
cacaccagaaagcgcaagcttaaaagcactattggaattaggaatgcctgaaacagctgc

SEQ ID NO: 5288 - DNA, 60 bp, Artificial
  Synthetic oligonucleotide
cttcatgctttctatagcacttttaccagcagctggaattttattgggaatcggaggcgc

SEQ ID NO: 5289 - DNA, 60 bp, Artificial
  Synthetic oligonucleotide
gggctgaattccccatttagcagcatctccaccgtaaggtatccaatctgattgtccagc

SEQ ID NO: 5290 - DNA, 60 bp, Artificial
  Synthetic oligonucleotide
ggctgaattccccatttagcagcatctcctccgtaaggtatccaatctgattgtccagct

SEQ ID NO: 5291 - DNA, 61 bp, Artificial
  Synthetic oligonucleotide
caggacgacgtcctattgccattaaaactccataaaattttaatctaatatctcgactttg

SEQ ID NO: 5292 - DNA, 60 bp, Artificial
  Synthetic oligonucleotide
ctgcacattgaaaatcctacatatattagtgctgcagcagttgcactagcaggaacagca

SEQ ID NO: 5293 - DNA, 60 bp, Artificial
  Synthetic oligonucleotide
cctacatatattaatgctgcagcagttgcgctagcaggaacggcaataaacaatggggca

SEQ ID NO: 5294 - DNA, 60 bp, Artificial
  Synthetic oligonucleotide
ggcatatcttttaacacaccttttaaacgtaggggttggactaacattttctggaggatt

SEQ ID NO: 5295 - DNA, 60 bp, Artificial
  Synthetic oligonucleotide
ggcgcacatttacaaatagcaaaaggcggtggtagtgatctttatggggtttgcgtagac

SEQ ID NO: 5296 - DNA, 60 bp, Artificial
  Synthetic oligonucleotide
ggtactcttgagtacagtacagagcctaatgtaatggctaaagcaagcacagaagacaga

SEQ ID NO: 5297 - DNA, 60 bp, Artificial
  Synthetic oligonucleotide
gaaggtccgagtttaagaaaatccaaccaaaacccaataaaaccactaagatttcagctc

SEQ ID NO: 5298 - DNA, 60 bp, Artificial
  Synthetic oligonucleotide
ctgacacgcaatgtgtcgctcttaatataaggacctgttaccttaaagggtttattgggg

SEQ ID NO: 5299 - DNA, 60 bp, Artificial
  Synthetic oligonucleotide
ggcactcttgagtacagcacagagcctaatgtaatggctaaagcaagcacagaagacaga

SEQ ID NO: 5300 - DNA, 60 bp, Artificial
  Synthetic oligonucleotide
ttcaaacgaagacgctccaggcgaaataataataaaattgcttggaaacattaagtcccc

SEQ ID NO: 5301 - DNA, 60 bp, Artificial
  Synthetic oligonucleotide
gggatgactcaaggaagtttaaattcccttagcggtgaaagtggtgaattggaggagcct

SEQ ID NO: 5302 - DNA, 60 bp, Artificial
  Synthetic oligonucleotide
gctctcggcttgatgatcctctaatgactttgtcttttatgtctttaacggtggttcccc

SEQ ID NO: 5303 - DNA, 60 bp, Artificial
  Synthetic oligonucleotide
gccggattcgctccacaaactggaaggagtcaaataagttaagttgccgccgggcttcac

SEQ ID NO: 5304 - DNA, 60 bp, Artificial
  Synthetic oligonucleotide
gttgcatatcacgtccgttaaaactgccaccgaaccggtatgaattgccattgtatagtc

SEQ ID NO: 5305 - DNA, 60 bp, Artificial
  Synthetic oligonucleotide
ctggcgaggggagccatgagtataatcgtaatatgcctagacccactgcttatgaacaat

SEQ ID NO: 5306 - DNA, 60 bp, Artificial
  Synthetic oligonucleotide
ttgcaaattccaaagccgctaatttcgcatttctaattgaatctgctaacatttcgggct

SEQ ID NO: 5307 - DNA, 60 bp, Artificial
  Synthetic oligonucleotide
gtctagacaggctttaagtgacgcaagaagtgctttaagcagtttagaatcttttgcttt

SEQ ID NO: 5308 - DNA, 60 bp, Artificial
  Synthetic oligonucleotide
aaggtgctgttgttgcatcacaagaggcaactattgtggcaaagttttcaggaatggttg

SEQ ID NO: 5309 - DNA, 60 bp, Artificial
  Synthetic oligonucleotide
gcggtgtagcttgtacatttgttgctggacttgctactgggcttgcctgacttgctgagc

SEQ ID NO: 5310 - DNA, 60 bp, Artificial
  Synthetic oligonucleotide
ctacattgtcaagaagagaatctattaaaaccccacgaccaatggcgctacaagacatca

SEQ ID NO: 5311 - DNA, 60 bp, Artificial
  Synthetic oligonucleotide
cgctaaagaatcagaacccacagactcagcaaatagaagcgccaatttagctgctttaaa

SEQ ID NO: 5312 - DNA, 60 bp, Artificial
  Synthetic oligonucleotide
ttgacctagcctatctgactcatttcctccaataagtctgccaccctctttccctatttt

SEQ ID NO: 5313 - DNA, 60 bp, Artificial
  Synthetic oligonucleotide
gcaagccttccagaagagccatcatccccacaagagtcaacattaaaggccttaagctta

SEQ ID NO: 5314 - DNA, 60 bp, Artificial
  Synthetic oligonucleotide
gacgcaatgggtgttaatggtagagaaggcgatacaaaagctgagtatgagaaatcctat

SEQ ID NO: 5315 - DNA, 60 bp, Artificial
  Synthetic oligonucleotide
cttagttctttaaatttggacggtaatttgccaaacgaatatacagcggggcttgaatgc

SEQ ID NO: 5316 - DNA, 60 bp, Artificial
  Synthetic oligonucleotide
cttttgcttctcttagggctgatcctccagctgtcactttagaaccagttgcggtgcctg

SEQ ID NO: 5317 - DNA, 60 bp, Artificial
  Synthetic oligonucleotide
ggcctagttcaacaagttttagcatggctttaaaagaattaaatgggcttgtaggaggga

SEQ ID NO: 5318 - DNA, 60 bp, Artificial
  Synthetic oligonucleotide
cagccatgttcctaaaagtgctaagattttaatggaaaagtttagtccgggccctttaac

SEQ ID NO: 5319 - DNA, 60 bp, Artificial
  Synthetic oligonucleotide
accctcctatttggcaccttttgcaacttcggaagcacttttgacacagtgattaatcac

SEQ ID NO: 5320 - DNA, 60 bp, Artificial
  Synthetic oligonucleotide
ccacaagacccactactgtaggcaatatagagtccgcagtcctccctgtagggcatgtag

SEQ ID NO: 5321 - DNA, 60 bp, Artificial
  Synthetic oligonucleotide
cttgtcaacataattttctgctttcttccatattcccagcaccaaaacccggtgatctag

SEQ ID NO: 5322 - DNA, 60 bp, Artificial
  Synthetic oligonucleotide
gctttcattagcgccttcagattcactatggttatcttcgtttaaagaatctttggcctt

SEQ ID NO: 5323 - DNA, 60 bp, Artificial
  Synthetic oligonucleotide
ccaattacaacttcagtctggataaataaaggatcggtgtgacaatagtgccttgcatct

SEQ ID NO: 5324 - DNA, 60 bp, Artificial
  Synthetic oligonucleotide
gggagctgggatcaaactagcatggatttatgagctactccaaacgacggtttctttaag

SEQ ID NO: 5325 - DNA, 60 bp, Artificial
  Synthetic oligonucleotide
ggtgtttgtggtgagttgttgcagggtgctaagagtgcatcgggacagtttggcgagtca

SEQ ID NO: 5326 - DNA, 60 bp, Artificial
  Synthetic oligonucleotide
gctctgataaaggggaggcatatttggtttgctgaccataagacatgatcaacccattat

SEQ ID NO: 5327 - DNA, 60 bp, Artificial
  Synthetic oligonucleotide
gatagactggcagcagtagcaataaaatcagcgcaagctaggcaaagctgtttcagtggt

SEQ ID NO: 5328 - DNA, 60 bp, Artificial
  Synthetic oligonucleotide
gacaagccaagattccaattaaggtaagctcatcctataaagttaagggcgcatctgagc

SEQ ID NO: 5329 - DNA, 60 bp, Artificial
  Synthetic oligonucleotide
ctaggtcgttaagggcttgactacgccttgcagaagggccctcgctaaaacatccaatac

SEQ ID NO: 5330 - DNA, 60 bp, Artificial
  Synthetic oligonucleotide
ggggtgtttgcaaatgagttaaatgatgagctaggtgattttgtaatacgcggagtggat

SEQ ID NO: 5331 - DNA, 60 bp, Artificial
  Synthetic oligonucleotide
gacttcatcgaaaactcgaccaccttgatcaccctgcttcccagagaacatcttgcccgc

SEQ ID NO: 5332 - DNA, 60 bp, Artificial
  Synthetic oligonucleotide
gggacatggtttggatttcagggcctacggggagcggcaagacaactttaatgaatttgc

SEQ ID NO: 5333 - DNA, 60 bp, Artificial
  Synthetic oligonucleotide
caagcagcctatctttattagagggtgagcccattttccacgattctaatgcaggtgagt

SEQ ID NO: 5334 - DNA, 60 bp, Artificial
  Synthetic oligonucleotide
ctatacgcaaaatttaagtcgatccacgcactacaaagagccaaactatcaacttccttt

SEQ ID NO: 5335 - DNA, 60 bp, Artificial
  Synthetic oligonucleotide
gtccggttttaccaccttcttctattcctgtgcaactttcaatgtatgcggttacggttg

SEQ ID NO: 5336 - DNA, 60 bp, Artificial
  Synthetic oligonucleotide
gctgagacacgccttagcgaagttgttgaccgatttgacgttgttttacttgcaccacag

SEQ ID NO: 5337 - DNA, 60 bp, Artificial
  Synthetic oligonucleotide
ggcgctaatccaaatatcagagatggcgacaataaactgcccatagattactctgacaaa

SEQ ID NO: 5338 - DNA, 60 bp, Artificial
  Synthetic oligonucleotide
cataccgattataatgaaaggccgttgttatgtcatttggctcgtgccccaaaacttttg

SEQ ID NO: 5339 - DNA, 60 bp, Artificial
  Synthetic oligonucleotide
cgttattgaaaagtatgggcaaaggtggacagaccccgagaatatggttgttagtggtcc

SEQ ID NO: 5340 - DNA, 60 bp, Artificial
  Synthetic oligonucleotide
ccatctagccagaacaaatctttgaaagccagtattccgtattggcttgaggattcttct

SEQ ID NO: 5341 - DNA, 60 bp, Artificial
  Synthetic oligonucleotide
catatggtagcgtttctagacaatcgagtgtttcttgcacgtaattgattgccaaaggtc

SEQ ID NO: 5342 - DNA, 56 bp, Artificial
  Synthetic oligonucleotide
ttctctggccaaagaacctatataagccctgtttgcctctcataaaatgatcaaaa

SEQ ID NO: 5343 - DNA, 60 bp, Artificial
  Synthetic oligonucleotide
agcaaagacacagtcttatgaatatataaaattagccgctgcaattgaggcgggaatatt

SEQ ID NO: 5344 - DNA, 60 bp, Artificial
  Synthetic oligonucleotide
ggacggggtgttaatgacgatattatataggctcaagggccagcaaggactactattgat

SEQ ID NO: 5345 - DNA, 60 bp, Artificial
  Synthetic oligonucleotide
aactactctcaaattatctctttgtgctcagccgaaaactccgcgctttatatgtacccc

SEQ ID NO: 5346 - DNA, 60 bp, Artificial
  Synthetic oligonucleotide
tgtcttctaaatcttatagatctttcggtgttggcagatacatcttcagtccccggcccc

SEQ ID NO: 5347 - DNA, 60 bp, Artificial
  Synthetic oligonucleotide
ctgagatccaagcactgcgccaccaccaatataatctccttggacaaaggatcctattcc

SEQ ID NO: 5348 - DNA, 60 bp, Artificial
  Synthetic oligonucleotide
gcctgtgtgattattctctgatgggcgaccgttcttgtagagctgaaaagctagcgcgga

SEQ ID NO: 5349 - DNA, 60 bp, Artificial
  Synthetic oligonucleotide
gataacaatatcgatatccaaaccatgtaatagaaatcccaaacacatagagccagcccc

SEQ ID NO: 5350 - DNA, 60 bp, Artificial
  Synthetic oligonucleotide
ctggcgaagaggggagccctgagtattatcgtaatatgcctagacccactgcttatcaac

SEQ ID NO: 5351 - DNA, 60 bp, Artificial
  Synthetic oligonucleotide
gatttggcttttaaagcattaattgggtcgggctatgacgcctcatcaacagctaaaagt

SEQ ID NO: 5352 - DNA, 60 bp, Artificial
  Synthetic oligonucleotide
gaaaacgcaatcgcaatagacatggaaagcgccgcaatggctcaagtagcatacggcttt

SEQ ID NO: 5353 - DNA, 60 bp, Artificial
  Synthetic oligonucleotide
ccccagtttatttaaattttcgattttaattttgacagttttcagaatgctttcgggccg

SEQ ID NO: 5354 - DNA, 60 bp, Artificial
  Synthetic oligonucleotide
cctgcttttcaagtgcgactacaacttgcctgttagactcgttcagagtttcgaaacttt

SEQ ID NO: 5355 - DNA, 60 bp, Artificial
  Synthetic oligonucleotide
ccaccaatcttcagcatttaccttatcaacttcggcctgtgcttttattcgttcgggctc

SEQ ID NO: 5356 - DNA, 60 bp, Artificial
  Synthetic oligonucleotide
cggccttgcccaaattccaccaattttcatcatttaccttatcaacttcggcctgtgctt

SEQ ID NO: 5357 - DNA, 60 bp, Artificial
  Synthetic oligonucleotide
gcacttaaagaagttgttgcactagagagtgcatcttgtagttggactaaagattcgtct

SEQ ID NO: 5358 - DNA, 60 bp, Artificial
  Synthetic oligonucleotide
gccctaaaacttcctccatattgaattgcatctttaagtcgagaaatattcccatttgga

SEQ ID NO: 5359 - DNA, 60 bp, Artificial
  Synthetic oligonucleotide
ccaaatgggaatatttctcgacttaaagatgcaattcaatatggaggaagttttagggct

SEQ ID NO: 5360 - DNA, 60 bp, Artificial
  Synthetic oligonucleotide
gggaaatgctataagcctcaagcccagccatcttaacaagattagttaagtcagaagtag

SEQ ID NO: 5361 - DNA, 60 bp, Artificial
  Synthetic oligonucleotide
ctggtaaagtaattcatttatcctagatttactcttccacttctatacgtcccgtcctgc

SEQ ID NO: 5362 - DNA, 60 bp, Artificial
  Synthetic oligonucleotide
gtcatgcttgttgcaatagagcctactatctatcccgcgaggtatatttatttatattgc

SEQ ID NO: 5363 - DNA, 60 bp, Artificial
  Synthetic oligonucleotide
ctagcgcaacaacttctttaagtgcacttactcagagcaataatgataggggaagtggcc

SEQ ID NO: 5364 - DNA, 60 bp, Artificial
  Synthetic oligonucleotide
ccctgtcaataaagcgagagtggacattgattggatgatctattacagaaaccccattaa

SEQ ID NO: 5365 - DNA, 60 bp, Artificial
  Synthetic oligonucleotide
gcacttgtgcttttgccaacacctcctttaattgagcaaatggcaactattttagtgttt

SEQ ID NO: 5366 - DNA, 60 bp, Artificial
  Synthetic oligonucleotide
gaaggattgctaggtatcataacaaacaaatggataccttgacaaggtggcattcagagg

SEQ ID NO: 5367 - DNA, 60 bp, Artificial
  Synthetic oligonucleotide
caagctcttcttcagtacgaataaggtaaactccgtcttcaataatacgatgaacagtgg

SEQ ID NO: 5368 - DNA, 60 bp, Artificial
  Synthetic oligonucleotide
gtattgctctaattaggtaaaggggcttcaagaaagcccgggcgcattaattcatataat

SEQ ID NO: 5369 - DNA, 60 bp, Artificial
  Synthetic oligonucleotide
gacattaaacgtatgtgcaacatgccctattacgacaccttccatctcaataactattac

SEQ ID NO: 5370 - DNA, 60 bp, Artificial
  Synthetic oligonucleotide
ctttgtatttgtagggatttattaaccttcacttctgcctcctcaacttcggatggtttt

SEQ ID NO: 5371 - DNA, 60 bp, Artificial
  Synthetic oligonucleotide
gcatcaaaactaaatgttgggcgcttaacctctgctataatcaagatatcttcgatagga

SEQ ID NO: 5372 - DNA, 60 bp, Artificial
  Synthetic oligonucleotide
gcaaatgcaatagaagaaggactagcttgggagaaaggcataatcgaaaacggtatatag

SEQ ID NO: 5373 - DNA, 60 bp, Artificial
  Synthetic oligonucleotide
cgggttgaggcattgggcattgataaaggcatgattttagcacatttgaatcaacaaatc

SEQ ID NO: 5374 - DNA, 61 bp, Artificial
  Synthetic oligonucleotide
gctgccatttctcacttggtaaattattttcatgctttgaaactttagcatcttcaaatcc

SEQ ID NO: 5375 - DNA, 60 bp, Artificial
  Synthetic oligonucleotide
ggccccattcatgaacgtgaagacttgaacaaggggatagcatagaacgatactttcgat

SEQ ID NO: 5376 - DNA, 60 bp, Artificial
  Synthetic oligonucleotide
gcaaatatggaaagacttgagagtgcattaaccccagcaataaatgcggcactcgctcca

SEQ ID NO: 5377 - DNA, 60 bp, Artificial
  Synthetic oligonucleotide
gcaaatatggaaagacttgagagtgcattaaccccagcaataaataaagcactcgctcca

SEQ ID NO: 5378 - DNA, 60 bp, Artificial
  Synthetic oligonucleotide
gagctagtgttttagttattgttggggttaatgcactctcaagtctttccatatttgctg

SEQ ID NO: 5379 - DNA, 60 bp, Artificial
  Synthetic oligonucleotide
gcggcctctcaaggaaaaggacttgttgccaaaattgcaataggtagtgccctagggaat

SEQ ID NO: 5380 - DNA, 60 bp, Artificial
  Synthetic oligonucleotide
gcggcctctcaaggaaaaggacttgttgccaaaattgcaataggtagtgccctaaggaat

SEQ ID NO: 5381 - DNA, 60 bp, Artificial
  Synthetic oligonucleotide
gcggcctctcaaggaaaaggacttgttgccaaaattgctataggtagtgccctagggaat

SEQ ID NO: 5382 - DNA, 60 bp, Artificial
  Synthetic oligonucleotide
gcacaacgtagagaacttgtacgcaagttcgttccaattgagcaaattaaagctattgcc

SEQ ID NO: 5383 - DNA, 60 bp, Artificial
  Synthetic oligonucleotide
gttagcggcctctcaaggaaaaggacttgttgccaaaattgcaataggcagtgccctagg

SEQ ID NO: 5384 - DNA, 60 bp, Artificial
  Synthetic oligonucleotide
gcatggagtgcaataggactggtatttactccggctgatagagctattgagcgtattttg

SEQ ID NO: 5385 - DNA, 60 bp, Artificial
  Synthetic oligonucleotide
gcaacttcatcggcctcatcattaaggcctgagacactcataataagccaatttattctt

SEQ ID NO: 5386 - DNA, 60 bp, Artificial
  Synthetic oligonucleotide
gcaattcttgcaatagattaattagaaaatatgaccaaacttgtgtcgcttgtggggcta

SEQ ID NO: 5387 - DNA, 60 bp, Artificial
  Synthetic oligonucleotide
ggggagcaacaagttctacatgttgttagaactacgttttatagtacaaacactgggtat

SEQ ID NO: 5388 - DNA, 60 bp, Artificial
  Synthetic oligonucleotide
ttaaaacaaattgacccaatagctggatggtttgtacacctactggtaataagtgggtgt

SEQ ID NO: 5389 - DNA, 60 bp, Artificial
  Synthetic oligonucleotide
ggcggcaaggatacgttgacgctgtgattgttgatattggaaatcccgggcaagatgttg

SEQ ID NO: 5390 - DNA, 60 bp, Artificial
  Synthetic oligonucleotide
ccggcaatgacggcattttagctttcaaagaaggggttagtctctcaggcgatccgattg

SEQ ID NO: 5391 - DNA, 60 bp, Artificial
  Synthetic oligonucleotide
gcctttaaccagaagctttaatgagcaagtcaaagggcttggcagcagcggcaagggaga

SEQ ID NO: 5392 - DNA, 60 bp, Artificial
  Synthetic oligonucleotide
gtcctggcctgtatccacccgttttggggtcaccccttaaaagccctacaaatagttcgt

SEQ ID NO: 5393 - DNA, 60 bp, Artificial
  Synthetic oligonucleotide
caatggcttgtacttttgcttctcttaaggctagtccaccacttgttaccttggaaccgg

SEQ ID NO: 5394 - DNA, 60 bp, Artificial
  Synthetic oligonucleotide
ccgcccaacaaaaccctgcaacattgcaaagtctcttcttcttcgtctgttaaattgcgc

SEQ ID NO: 5395 - DNA, 60 bp, Artificial
  Synthetic oligonucleotide
gaggcatagaacggcaaggattaatgaagtttctggatgctacagcttggcaagagagga

SEQ ID NO: 5396 - DNA, 60 bp, Artificial
  Synthetic oligonucleotide
ctgcttctggtgtgttagagttaagctgtggcgcgtaacttctgtcataaactttagcac

SEQ ID NO: 5397 - DNA, 60 bp, Artificial
  Synthetic oligonucleotide
gagcagacggaaccagacttgaatacacaggaattaaaagcgatggatctggaaaagcta

SEQ ID NO: 5398 - DNA, 60 bp, Artificial
  Synthetic oligonucleotide
ggcaaacagctgttggtggggcaatggaaataaatggagaactcatatcaggagcacaaa

SEQ ID NO: 5399 - DNA, 60 bp, Artificial
  Synthetic oligonucleotide
caacaggacgacgccctattgccattaaaactccataaaatttcaatctaatatctcggt

SEQ ID NO: 5400 - DNA, 60 bp, Artificial
  Synthetic oligonucleotide
caatcccaacggccgcatttattagttctagcaatgcagaagagtgcgcacgaggaaaag

SEQ ID NO: 5401 - DNA, 60 bp, Artificial
  Synthetic oligonucleotide
cagcagcaactgcgctttctggattaaagatcgcatatatccaggctatggcagtgactg

SEQ ID NO: 5402 - DNA, 60 bp, Artificial
  Synthetic oligonucleotide
ctcttgcgttacttctccaattattcttatggctagtcctgggcctgggaatgggtgtct

SEQ ID NO: 5403 - DNA, 60 bp, Artificial
  Synthetic oligonucleotide
aacttccgacctccacgtcccgaacgtggcgcgctagccaactgtgctacatcccgtttt

SEQ ID NO: 5404 - DNA, 60 bp, Artificial
  Synthetic oligonucleotide
gccgtgacgaacgcctcgcggtcggaaagacgctgatagtgcttgatgatttgcgccttg

SEQ ID NO: 5405 - DNA, 60 bp, Artificial
  Synthetic oligonucleotide
ccgcactcaccacatactgtgtgatagatgtgccatgcgccacagttcgggcaaattgcc

SEQ ID NO: 5406 - DNA, 60 bp, Artificial
  Synthetic oligonucleotide
ggggataacccggcgaaagtcggactaataccgcatgaagcagggatcccgcatgggaat

SEQ ID NO: 5407 - DNA, 60 bp, Artificial
  Synthetic oligonucleotide
ggtgatcagatcttctcgaccaatctcttgaagatacttatccagcgaagcgctttcgcg

SEQ ID NO: 5408 - DNA, 60 bp, Artificial
  Synthetic oligonucleotide
cggatacggtcgggacgaatccggtaaatatccgtaatagccgagtagatatcccaacat

SEQ ID NO: 5409 - DNA, 60 bp, Artificial
  Synthetic oligonucleotide
ggatgcccgcgaccttttgaagaaaggtgtggatgagttggctaatgccgttaaggtaac

SEQ ID NO: 5410 - DNA, 60 bp, Artificial
  Synthetic oligonucleotide
ggccattacggatatttaccggattcgtcccgaccgactccgcgattgggtaagcagacc

SEQ ID NO: 5411 - DNA, 60 bp, Artificial
  Synthetic oligonucleotide
gaatgcccgcgaccttttgaagaaaggtgtggatgaattggcaaatgccgttaaggtaac

SEQ ID NO: 5412 - DNA, 60 bp, Artificial
  Synthetic oligonucleotide
cgcttcgacccgatctccgccagtttcggatacttcttgatctcgatacgccagccctga

SEQ ID NO: 5413 - DNA, 60 bp, Artificial
  Synthetic oligonucleotide
cgctccgagttcccttcggctgtgtcgtacaatcgctttgtggagcttgaaagccgcgtg

SEQ ID NO: 5414 - DNA, 60 bp, Artificial
  Synthetic oligonucleotide
gtcgtagctcgtggcatgggaaaatgctgcgtatcgggagcaggtgcattgaacatcgat

SEQ ID NO: 5415 - DNA, 60 bp, Artificial
  Synthetic oligonucleotide
cagacatgctgaaccaatcgcacccactctacaaattggccgacaaaatagattgggaga

SEQ ID NO: 5416 - DNA, 60 bp, Artificial
  Synthetic oligonucleotide
gtttctcctccacacacatcaggcgctcaaacagacgtttctgccagacatcatcgggat

SEQ ID NO: 5417 - DNA, 60 bp, Artificial
  Synthetic oligonucleotide
tacgatggccggttgcagcttcacggtcaccgccagagcagagcagataccaagcatctg

SEQ ID NO: 5418 - DNA, 60 bp, Artificial
  Synthetic oligonucleotide
ccaactccatcagccccgtaaggcgaagcaattcctcacgcagagcattcagttcctcgc

SEQ ID NO: 5419 - DNA, 60 bp, Artificial
  Synthetic oligonucleotide
cgtccgccacagaaccatcgtcgaatactaccgaaggtacgttctatcaagcagcgcgtc

SEQ ID NO: 5420 - DNA, 60 bp, Artificial
  Synthetic oligonucleotide
ccccgggagattatatatagggaacgcattccgaggacgaaatccggaaagattatccgt

SEQ ID NO: 5421 - DNA, 60 bp, Artificial
  Synthetic oligonucleotide
ggttccggcaacagaacggcccctgcttcgaatgccctcaccaccatcattttaccggct

SEQ ID NO: 5422 - DNA, 60 bp, Artificial
  Synthetic oligonucleotide
cccatcccctcatcgtcctatgcccatgagctcgtttgatatgacaagccttcaatgggg

SEQ ID NO: 5423 - DNA, 60 bp, Artificial
  Synthetic oligonucleotide
gagaaggcgaagatgcttatcgccaccgactacgcccgcaagatggctctcgatatgcgc

SEQ ID NO: 5424 - DNA, 60 bp, Artificial
  Synthetic oligonucleotide
cggtcgcccgagtaagccgattcgtttgatgtgtggcttgctgattctaaagcaccttcg

SEQ ID NO: 5425 - DNA, 60 bp, Artificial
  Synthetic oligonucleotide
gaggcttgcccgttaccgttttcttccaactccttctgaactcgatagactccacggctg

SEQ ID NO: 5426 - DNA, 60 bp, Artificial
  Synthetic oligonucleotide
ccgggaagcgctgcaaatttctcctgacggcctgtttgagcacttttgtctgcacaccgt

SEQ ID NO: 5427 - DNA, 60 bp, Artificial
  Synthetic oligonucleotide
aagccctgctccatcgtctcctcgtcaccctccttgtcgatcttgtactccgctctcacc

SEQ ID NO: 5428 - DNA, 60 bp, Artificial
  Synthetic oligonucleotide
aaccagctgatcgccgagaccaccgccgcctacaaccagcgcatggccgcctccaagaaa

SEQ ID NO: 5429 - DNA, 60 bp, Artificial
  Synthetic oligonucleotide
cgcccagataacgcatactcaacccgaaagtcaacccgccgacaccccagagcatgccat

SEQ ID NO: 5430 - DNA, 60 bp, Artificial
  Synthetic oligonucleotide
cagcaatccaagcccaacgactactaagcccatgaccgccccgcttcggaaagccacttg

SEQ ID NO: 5431 - DNA, 60 bp, Artificial
  Synthetic oligonucleotide
ctcgtcaccttcccagccgatacattccccgttcaactgtagccaagcgccgttgccgtt

SEQ ID NO: 5432 - DNA, 60 bp, Artificial
  Synthetic oligonucleotide
gcgcacggctacccacaccactttctgcttcttgtcgccaccgcaacccatcatttcgag

SEQ ID NO: 5433 - DNA, 60 bp, Artificial
  Synthetic oligonucleotide
aagacatcttgatagccgcccgcctcgacccagccgaacccatctattgtgccgaagcag

SEQ ID NO: 5434 - DNA, 60 bp, Artificial
  Synthetic oligonucleotide
cgctgccgcctgccaacacccaaccgagtgcgctgccaatccattttcctattgccatgt

SEQ ID NO: 5435 - DNA, 60 bp, Artificial
  Synthetic oligonucleotide
ccacgttgccgtattgcccaccatcgccccttaccttattccacgcttccttccacagct

SEQ ID NO: 5436 - DNA, 60 bp, Artificial
  Synthetic oligonucleotide
gccgccattgtgctgccgtccaaacccacgccacaacctctacaccttccacgacgtaaa

SEQ ID NO: 5437 - DNA, 60 bp, Artificial
  Synthetic oligonucleotide
ccgatgctttgcccgcctttgcaccaatcaccgcacacgcctcaaacaaagccgctgtct

SEQ ID NO: 5438 - DNA, 60 bp, Artificial
  Synthetic oligonucleotide
ccgttccatcgtgcccagtcgtcgccaaacaacgccagctcgcccgaaccttcaaaatct

SEQ ID NO: 5439 - DNA, 60 bp, Artificial
  Synthetic oligonucleotide
cggtccacagcgaaaagcctgcggtgcaatcttcacgtcgtcggctctgcggtaagtcat

SEQ ID NO: 5440 - DNA, 60 bp, Artificial
  Synthetic oligonucleotide
ccgcctcgccattgtcgtcgcgcttcagctttctgccgccttttcctttgccgaagttgt

SEQ ID NO: 5441 - DNA, 60 bp, Artificial
  Synthetic oligonucleotide
tctctgatagcacgcgcaccgcaaagtttccacctcgccgacattctttcagcccaccgc

SEQ ID NO: 5442 - DNA, 60 bp, Artificial
  Synthetic oligonucleotide
gccgccaacgccagttacttcgcctcccctgcccgacattgaagccgattttccagcaaa

SEQ ID NO: 5443 - DNA, 60 bp, Artificial
  Synthetic oligonucleotide
gccgagagagacagcgttgccaccgccaattgtccatgtaccactgaacttaccgccacc

SEQ ID NO: 5444 - DNA, 60 bp, Artificial
  Synthetic oligonucleotide
cccatcatagcagcaccgatttggcaaagtcctacgccgtgtccccagccagcccctttt

SEQ ID NO: 5445 - DNA, 60 bp, Artificial
  Synthetic oligonucleotide
ggacgcctgaagatgacgccgaccgatttgctgaacctgaaacgtgcgctggacaagctg

SEQ ID NO: 5446 - DNA, 60 bp, Artificial
  Synthetic oligonucleotide
tgagaatagggaatacggctttcagcacgccttccacgacagcccaacccacgcccgcaa

SEQ ID NO: 5447 - DNA, 60 bp, Artificial
  Synthetic oligonucleotide
tcagcgccacgaacaaacaccacctcgattacccgccccgcaccatcaaatccgatcgtg

SEQ ID NO: 5448 - DNA, 60 bp, Artificial
  Synthetic oligonucleotide
aaccacgagccaatcatgaccgatccggcgcctgcagcaagggcaagagcaacatcgcgg

SEQ ID NO: 5449 - DNA, 60 bp, Artificial
  Synthetic oligonucleotide
tggccccagccgtcgctacccgcctcatggctcgtatgcgctcgccacgaacgtcgctga

SEQ ID NO: 5450 - DNA, 60 bp, Artificial
  Synthetic oligonucleotide
tgacgatcggcctgggcacgcaagacggcagcctcacggtcgccttgggcacgcaggata

SEQ ID NO: 5451 - DNA, 60 bp, Artificial
  Synthetic oligonucleotide
atgtcctcgcctgcctcgccaagtcccgttccgtcgagtccagccttatcaaccccaact

SEQ ID NO: 5452 - DNA, 60 bp, Artificial
  Synthetic oligonucleotide
atccctcgcaccttcccgcggcccggccactcacccctcacggtcaggcaagcccagtct

SEQ ID NO: 5453 - DNA, 60 bp, Artificial
  Synthetic oligonucleotide
tggggaccgattcgtcgcgcagggcagtcatgatcggctcggagcacaccacgcagcatt

SEQ ID NO: 5454 - DNA, 60 bp, Artificial
  Synthetic oligonucleotide
ttccttcaaccgtcgcatgcccgaggagcacaaccgagttctcaccgaccacgccgcaga

SEQ ID NO: 5455 - DNA, 60 bp, Artificial
  Synthetic oligonucleotide
taccgaccgccaagcagcgcctgtgccgcgacatctggtgggcctgtacgaccccgaacg

SEQ ID NO: 5456 - DNA, 60 bp, Artificial
  Synthetic oligonucleotide
aactgaacgcagcacccgacgacgaccccgctgagccttcgtcagaccgctagcacccaa

SEQ ID NO: 5457 - DNA, 60 bp, Artificial
  Synthetic oligonucleotide
ttcacctcagccgtcgccgaccgagacaccctcatcgccacattgaaccgcaccaaccat

SEQ ID NO: 5458 - DNA, 60 bp, Artificial
  Synthetic oligonucleotide
gccttctcgacgcaccaaccatcacagcctgaccatgctcactttcccacgaccgaccaa

SEQ ID NO: 5459 - DNA, 60 bp, Artificial
  Synthetic oligonucleotide
aacacccagaaccacggattacgcaacgcacgctgccaccagggacgacgcgcaatgggc

SEQ ID NO: 5460 - DNA, 60 bp, Artificial
  Synthetic oligonucleotide
ggccatgacaaagacaacgacgccgatgaagaacgcacccgcacccaaaatccccagcag

SEQ ID NO: 5461 - DNA, 60 bp, Artificial
  Synthetic oligonucleotide
atgtcgtttccgaggaagaagctcgggtgcggtggctggttgtaggccgtgttctgccag

SEQ ID NO: 5462 - DNA, 60 bp, Artificial
  Synthetic oligonucleotide
acttggcgagcatcggcttcacgggcggcatgacggggaggtccatggtccgattctgta

SEQ ID NO: 5463 - DNA, 60 bp, Artificial
  Synthetic oligonucleotide
agagctacgccgtaccgaccatcaccggggagatcaagcgccacttccgcgaccacatgt

SEQ ID NO: 5464 - DNA, 60 bp, Artificial
  Synthetic oligonucleotide
tgctcttcctcaccctggtcccgtcgaccatccagtcgtcgatcgccttcacctccatcg

SEQ ID NO: 5465 - DNA, 60 bp, Artificial
  Synthetic oligonucleotide
acttcgagaccctcgtccgctacgacctccccttcgtcggcatcgtcggcaacaactcct

SEQ ID NO: 5466 - DNA, 60 bp, Artificial
  Synthetic oligonucleotide
agtccgtacgcgatgccgcccgcgccgaccgtctcctggcccagcacaccctccgccagc

SEQ ID NO: 5467 - DNA, 60 bp, Artificial
  Synthetic oligonucleotide
tgctgatcccggtgaacgaccaccgctggaccgcctgcctggccgcgctcaccctgcagt

SEQ ID NO: 5468 - DNA, 60 bp, Artificial
  Synthetic oligonucleotide
tactggtcgaagtacagcagggagttgtcgccgtagttgccacggtaggcgtcgggtatc

SEQ ID NO: 5469 - DNA, 60 bp, Artificial
  Synthetic oligonucleotide
atccactccgtcgcctccttcttcgtctcccgcgtcgacagcgagatcgacaagcgcctg

SEQ ID NO: 5470 - DNA, 60 bp, Artificial
  Synthetic oligonucleotide
tggcagcagatccgccgcatcaccctgccgtcgctgcgtccggtcaaccaggtcctggtc

SEQ ID NO: 5471 - DNA, 60 bp, Artificial
  Synthetic oligonucleotide
agcagggagaggttgatcagggcgcggacgttgtcggtgccgttgtggtgctcggtgatg

SEQ ID NO: 5472 - DNA, 60 bp, Artificial
  Synthetic oligonucleotide
aggaggagcaggagtgagtacgtacgtctacggcatcaccgccgccacgcatccgtcgct

SEQ ID NO: 5473 - DNA, 60 bp, Artificial
  Synthetic oligonucleotide
tgaacgcgatgccgtccacgtctccgtgctgtacgccctccaccatggacaacgacttgt

SEQ ID NO: 5474 - DNA, 60 bp, Artificial
  Synthetic oligonucleotide
aaggagcactcccgcacgccgttccgcgaggaggtctggcagcagctcatccaggggatg

SEQ ID NO: 5475 - DNA, 60 bp, Artificial
  Synthetic oligonucleotide
tatgtcctcttggcctggtcgaggaggcgtattcccacggcgttttcggagaggccggca

SEQ ID NO: 5476 - DNA, 60 bp, Artificial
  Synthetic oligonucleotide
atcctctacctgaaccgcaccggaatcccctggaaatacctcccacacgatttccccggc

SEQ ID NO: 5477 - DNA, 60 bp, Artificial
  Synthetic oligonucleotide
tcaccggtgccggcctctccgaaaacgccgtgggaatacgcctcctcgaccaggccaaga

SEQ ID NO: 5478 - DNA, 60 bp, Artificial
  Synthetic oligonucleotide
aaacccgtctgacgtagagatatggcagaacctcccaccctcctgcggaacggagccttc

SEQ ID NO: 5479 - DNA, 60 bp, Artificial
  Synthetic oligonucleotide
tccacatcgcatcgatcgacaacctcgccaagcgcataacggacgagaccacacccacct

SEQ ID NO: 5480 - DNA, 60 bp, Artificial
  Synthetic oligonucleotide
taagcggcttatgcgagtgccccgtttcagcatggttcaccccgtaggttccgaatgccg

SEQ ID NO: 5481 - DNA, 60 bp, Artificial
  Synthetic oligonucleotide
cggaacctacggggtgaaccatgctgaaacggggcactcgcataagccgcttacctgctt

SEQ ID NO: 5482 - DNA, 60 bp, Artificial
  Synthetic oligonucleotide
gtcgatttgcgcgacgtgttcaatgcgatcctctacctgaaccgcaccggaatcccctgg

SEQ ID NO: 5483 - DNA, 60 bp, Artificial
  Synthetic oligonucleotide
atccagccgatgctgcgctctaccacccagcgccttttcacgacatggaagccgcgtttt

SEQ ID NO: 5484 - DNA, 60 bp, Artificial
  Synthetic oligonucleotide
atgcccatgctcacgctgtgccgtgagtgagcgcaagccgtaccccagcgacctgtccga

SEQ ID NO: 5485 - DNA, 60 bp, Artificial
  Synthetic oligonucleotide
tgtcgatcgatgcgatgtggatcatggcttcggagctggtggtgagggtctcgtagtcgc

SEQ ID NO: 5486 - DNA, 60 bp, Artificial
  Synthetic oligonucleotide
gccatatctctacgtcagacgggtttcctagagcagaagtggatgagacgggcgacgggg

SEQ ID NO: 5487 - DNA, 60 bp, Artificial
  Synthetic oligonucleotide
tagaggatcgcattgaacacgtcgcgcaaatcgacttgggccggttttccggtgggacgg

SEQ ID NO: 5488 - DNA, 60 bp, Artificial
  Synthetic oligonucleotide
tcatcgagggcatcgcccgcgccaagcaggacatcatcaacaagggcggcacggacttca

SEQ ID NO: 5489 - DNA, 60 bp, Artificial
  Synthetic oligonucleotide
acgaactcgaactggtgctcctccccggaggccccgccgagccccgtcatcgcacgtaga

SEQ ID NO: 5490 - DNA, 60 bp, Artificial
  Synthetic oligonucleotide
aacatctgcgtcttcctctccgccgccgacctcgacgagcactacacgcgccccgccaag

SEQ ID NO: 5491 - DNA, 60 bp, Artificial
  Synthetic oligonucleotide
tcgcgcatgtcgatcagctggtacttcaccgacgaggagccggagttgaggacgaggaca

SEQ ID NO: 5492 - DNA, 60 bp, Artificial
  Synthetic oligonucleotide
aactcggtcaccaggttcgccgcccacatcaggctcgccaggtcctgcaccagcaccatc

SEQ ID NO: 5493 - DNA, 60 bp, Artificial
  Synthetic oligonucleotide
atcgaggaagcacgcaagcagttcgagcggatcgacacggacggtgacggcctcatcacc

SEQ ID NO: 5494 - DNA, 60 bp, Artificial
  Synthetic oligonucleotide
cgccctatgtcgccacagaaccttccttcgataggctgtacctaacccgcctgccgcata

SEQ ID NO: 5495 - DNA, 60 bp, Artificial
  Synthetic oligonucleotide
tacaggacctcgtagaccgccttgtccgtctcgtaggcgcgcagcagcaccgggtcggtg

SEQ ID NO: 5496 - DNA, 60 bp, Artificial
  Synthetic oligonucleotide
tcgacgaccgccggcactggcacaaggcgtgctggaacgcgaaggaccgccgcaccacgc

SEQ ID NO: 5497 - DNA, 60 bp, Artificial
  Synthetic oligonucleotide
tcctcgacgccctgctgccgcgctacgtcgaaagccgcatctacaacgcgctgctccagt

SEQ ID NO: 5498 - DNA, 60 bp, Artificial
  Synthetic oligonucleotide
tgcagatcgaggaagccaaggccgtctgccgccgctgccccgtcatggagcagtgcctgc

SEQ ID NO: 5499 - DNA, 60 bp, Artificial
  Synthetic oligonucleotide
ttcgaacatcactgcctcccgtacttcttgtgcacggcctgcctgctcactccgagttcc

SEQ ID NO: 5500 - DNA, 60 bp, Artificial
  Synthetic oligonucleotide
agtgaccacgacggccgtcaccccatcgcggcagcagcccgctccccatcgacccgagac

SEQ ID NO: 5501 - DNA, 60 bp, Artificial
  Synthetic oligonucleotide
tccagcgagcccacgagtcgcgaaagctccgcaagaagctgctcggcgcgtacatgaagg

SEQ ID NO: 5502 - DNA, 60 bp, Artificial
  Synthetic oligonucleotide
acttttcgagcacctggaggagcacgtgaccaaccagcagcaggaccaggagcagccgca

SEQ ID NO: 5503 - DNA, 60 bp, Artificial
  Synthetic oligonucleotide
tgaccacggaggtagagcccgtgaccaccgacccgaagcatctcaccgactccgaggctt

SEQ ID NO: 5504 - DNA, 60 bp, Artificial
  Synthetic oligonucleotide
tccatgcgcttcaagcggtccgcgccagtgatgacgatggggttcttctccacgaccgta

SEQ ID NO: 5505 - DNA, 60 bp, Artificial
  Synthetic oligonucleotide
tcggtccgcgcacggacgacgaggaatgcctgcccgactgcccgaagtgccgcgaatcca

SEQ ID NO: 5506 - DNA, 60 bp, Artificial
  Synthetic oligonucleotide
ttgccaagttcacctgcctgcgcctggccgtcgacctgacctgcacagggacggcgtcct

SEQ ID NO: 5507 - DNA, 60 bp, Artificial
  Synthetic oligonucleotide
aagtcaccgtgggccagatcaacggctggcacccgcacatccacgcgatcgtcctggtcg

SEQ ID NO: 5508 - DNA, 60 bp, Artificial
  Synthetic oligonucleotide
tcctcctggtgctcgtggcggtcgtgggtggcgtagaggggatgtctgcccaagcggaag

SEQ ID NO: 5509 - DNA, 60 bp, Artificial
  Synthetic oligonucleotide
cgacttcttgctgggagcggtgtcggcgggcgccttcggatcggaatgcaagggtgtgcg

SEQ ID NO: 5510 - DNA, 60 bp, Artificial
  Synthetic oligonucleotide
attagggcccctgaccgcttctgacgtccgcccggataccaaccaagggactcgtctgtt

SEQ ID NO: 5511 - DNA, 60 bp, Artificial
  Synthetic oligonucleotide
tcaagttctgagaggcggtaccgagatgggcaaggacgttcagcagcagcaggaagaccg

SEQ ID NO: 5512 - DNA, 60 bp, Artificial
  Synthetic oligonucleotide
tctacgacgacgcagcgacctggttctcccgctcctcgacgcgatccacctgctcgtcat

SEQ ID NO: 5513 - DNA, 60 bp, Artificial
  Synthetic oligonucleotide
aactgatatcgatccgcactaactcgctgcccgcccctactcccgcgccgacctctccgt

SEQ ID NO: 5514 - DNA, 60 bp, Artificial
  Synthetic oligonucleotide
tctccctggtcgtctccatgcagcgcgcctccggctaccagctctcgacggaccacgagg

SEQ ID NO: 5515 - DNA, 60 bp, Artificial
  Synthetic oligonucleotide
gcgcgcgtccgcagccgacgccttcaccgaggtgctgctcactgacttcactgctgagta

SEQ ID NO: 5516 - DNA, 60 bp, Artificial
  Synthetic oligonucleotide
acgaagtagtcttgagcccatgcctgaaagccgtaccgtcgcactcgtcacccttggctg

SEQ ID NO: 5517 - DNA, 60 bp, Artificial
  Synthetic oligonucleotide
agttttgggcccgggtaccgcaggacatcgatagtgaggtggtctccggtcaagaaaccg

SEQ ID NO: 5518 - DNA, 60 bp, Artificial
  Synthetic oligonucleotide
agatggtggacgggttcgtgcagcagtacaaggacggcggctggacctcgcggtggtcgt

SEQ ID NO: 5519 - DNA, 60 bp, Artificial
  Synthetic oligonucleotide
tcgtcgaagtcctcatccgcacccaccagatgcacaaggtcgccgaggccggtgtggtcg

SEQ ID NO: 5520 - DNA, 60 bp, Artificial
  Synthetic oligonucleotide
ccgctccaagatcgagtactcgtcgctggccaccgccttctgcccgcccgagttcaccgt

SEQ ID NO: 5521 - DNA, 60 bp, Artificial
  Synthetic oligonucleotide
ttggccttggtgcccttggcgcgggaacctcgtgccggaccgctcgccgtctctgtcatg

SEQ ID NO: 5522 - DNA, 60 bp, Artificial
  Synthetic oligonucleotide
tcgccgaacacgacctcacgcgtcacctgcttgcgccgcatcgaccgccatccggcccaa

SEQ ID NO: 5523 - DNA, 60 bp, Artificial
  Synthetic oligonucleotide
tgacgaccatgccctcaccaccgcgcccggtcatctccagccaccagtcgacgccggcct

SEQ ID NO: 5524 - DNA, 60 bp, Artificial
  Synthetic oligonucleotide
tcgctggagacgaagcgggagatgagccgcccgaagcggagggccacgaacaggacgagg

SEQ ID NO: 5525 - DNA, 60 bp, Artificial
  Synthetic oligonucleotide
atacgtgccgcatcaaggaaggttccgcatgaaccgcacacgcacgaacgaccgcttcga

SEQ ID NO: 5526 - DNA, 60 bp, Artificial
  Synthetic oligonucleotide
taggatggacggcatggccaagaccagtacgacgacccaggggctgcgagcggcgatcga

SEQ ID NO: 5527 - DNA, 60 bp, Artificial
  Synthetic oligonucleotide
aagtcatcccgccccaagtcaggttaggctcacctctgtgagtacgtgcgcgaccgtgtc

SEQ ID NO: 5528 - DNA, 60 bp, Artificial
  Synthetic oligonucleotide
aacgccacccagatcgtcctcggctcctcgcgccgcaaggcctggcagtacgtcttcgga

SEQ ID NO: 5529 - DNA, 60 bp, Artificial
  Synthetic oligonucleotide
agatcgagcacaccatcgaatacctggacctggtcggctcctgccaccagtacgtcgcca

SEQ ID NO: 5530 - DNA, 60 bp, Artificial
  Synthetic oligonucleotide
acggacgcaagagacacatcgccgtcgacaccctcggacttccagtgatgatcacggtga

SEQ ID NO: 5531 - DNA, 60 bp, Artificial
  Synthetic oligonucleotide
ttcacgagacggtacaaccccgtgctgggcgggtgggcctgttggtgcggcagcggcgtt

SEQ ID NO: 5532 - DNA, 60 bp, Artificial
  Synthetic oligonucleotide
agttatggcgtccggtgggatggttcgaaggtattgccgagaatgtggggcatcgctgcc

SEQ ID NO: 5533 - DNA, 60 bp, Artificial
  Synthetic oligonucleotide
acccaccgctcggcctcgtccgggatcgacgccaggatcttgtgaacggtccaggaaacg

SEQ ID NO: 5534 - DNA, 60 bp, Artificial
  Synthetic oligonucleotide
atgtcatcggcgaacatctgcagcgactcctcgaccgtgaacagctcctccgtgcccttg

SEQ ID NO: 5535 - DNA, 60 bp, Artificial
  Synthetic oligonucleotide
caaggacggctacctgttctccgacgagcccgccgactggatcgaatacgagaagaagca

SEQ ID NO: 5536 - DNA, 60 bp, Artificial
  Synthetic oligonucleotide
aggtggtggaggcagcatgtcggatcgggtcgggaacgtctcacggacgcgttacgaaca

SEQ ID NO: 5537 - DNA, 60 bp, Artificial
  Synthetic oligonucleotide
acgccggccagctcaccacctggtccgacgacttcctgaacatgaccctcaagaccgtct

SEQ ID NO: 5538 - DNA, 60 bp, Artificial
  Synthetic oligonucleotide
atagggagaagacaggacgttagtgacggatgtgagcgccccgaacaccaatccagccgc

SEQ ID NO: 5539 - DNA, 60 bp, Artificial
  Synthetic oligonucleotide
accggattgatcgccgctttggtcgtccctgtcggagctgctgtgcagatgacggtgatg

SEQ ID NO: 5540 - DNA, 60 bp, Artificial
  Synthetic oligonucleotide
aaggacacgacgctgacgccagaaccgatgaacagctaccgcagcagtcagcaccgcccc

SEQ ID NO: 5541 - DNA, 60 bp, Artificial
  Synthetic oligonucleotide
cgggtgagcctgcgcgtcatcagtgtaatgagtgcccaggtcagatgggcttctgagtgt

SEQ ID NO: 5542 - DNA, 60 bp, Artificial
  Synthetic oligonucleotide
acctcacgacagcgccgctacccctccgacaccaccgtcgcggaatgggccctgatcgaa

SEQ ID NO: 5543 - DNA, 60 bp, Artificial
  Synthetic oligonucleotide
aaagatccacaacgtagtacgagactgtcgcgcacgtcagcgccgccaccccacatgaag

SEQ ID NO: 5544 - DNA, 60 bp, Artificial
  Synthetic oligonucleotide
aagttccgcgcctccatggccgaccatctcgccgagcccgcctggaagatgctgctcaag

SEQ ID NO: 5545 - DNA, 60 bp, Artificial
  Synthetic oligonucleotide
tggtgcagcagttgacgatcttggcggtggcggaggcggtcaccaggtccaggtggagca

SEQ ID NO: 5546 - DNA, 60 bp, Artificial
  Synthetic oligonucleotide
aacgggaccatctcacgtactaccgcgaactcgcccgcaccaccgacccgttgctgcgcg

SEQ ID NO: 5547 - DNA, 60 bp, Artificial
  Synthetic oligonucleotide
aggacttcctcatcccctccgcctgcctcaactcgaccgtctccggcctgatttcgcgca

SEQ ID NO: 5548 - DNA, 60 bp, Artificial
  Synthetic oligonucleotide
tctcggcggcgatgcgcaggaacaggtcgaggtcgcggacaccggtgaagtcgtacgagc

SEQ ID NO: 5549 - DNA, 60 bp, Artificial
  Synthetic oligonucleotide
atggtgtcgttgtccgggaagccgccccgccaggccccgttggtccgctcgacgtcgaag

SEQ ID NO: 5550 - DNA, 60 bp, Artificial
  Synthetic oligonucleotide
tgtcgaggccctggacgtcgaggagtcggatctggtcggcgggcgcggctttcagttggg

SEQ ID NO: 5551 - DNA, 60 bp, Artificial
  Synthetic oligonucleotide
agctggtctccccggccttcgacgcgtacgggatcgacgagttcaccgccccgcagtacg

SEQ ID NO: 5552 - DNA, 60 bp, Artificial
  Synthetic oligonucleotide
ttcggggaagccgccggtccacatcgtgccgacctcgagcgcgtcgatccagtcccggta

SEQ ID NO: 5553 - DNA, 60 bp, Artificial
  Synthetic oligonucleotide
gtcatggcgaacgtcctcggcggcgactacccggacatgtactccgcgtacctgcactgc

SEQ ID NO: 5554 - DNA, 60 bp, Artificial
  Synthetic oligonucleotide
cctgctgcgcttctggaacctgggcagccccaaggcggtgatattcgacgagacgtacta

SEQ ID NO: 5555 - DNA, 60 bp, Artificial
  Synthetic oligonucleotide
tgttgccaacgggcgaacgctcaggcacggtgacctgaaggaccggctcacatccccttt

SEQ ID NO: 5556 - DNA, 60 bp, Artificial
  Synthetic oligonucleotide
tgatgaccaccgcggccgccttcgagtccgtcaccgacgagctgaccttcgtcctcggcc

SEQ ID NO: 5557 - DNA, 60 bp, Artificial
  Synthetic oligonucleotide
agggtggtggagtagcggcgggacttggtggagaagtggccgcggaagccgagcatgtgg

SEQ ID NO: 5558 - DNA, 60 bp, Artificial
  Synthetic oligonucleotide
agggtggtggagtagcggcgggacttggtggagaagtggccgcggaagccgagcatgtgc

SEQ ID NO: 5559 - DNA, 60 bp, Artificial
  Synthetic oligonucleotide
aagatgatgttcttctccggccgcgcccaccccgagcttgccgaggaggtcgcccacaag

SEQ ID NO: 5560 - DNA, 60 bp, Artificial
  Synthetic oligonucleotide
ccagcagggccagcgtgccgccgacgttgttgtcccagtacttctcgggcttcacgaccg

SEQ ID NO: 5561 - DNA, 60 bp, Artificial
  Synthetic oligonucleotide
tcgtaggcgagttcgtcgtggccccagttgcgctcgttgaacggcgggtggcacagcgcg

SEQ ID NO: 5562 - DNA, 60 bp, Artificial
  Synthetic oligonucleotide
tcggtgatcacgcgcagcggcagcagcggggccttgaccttggactcgacgaacacgaag

SEQ ID NO: 5563 - DNA, 60 bp, Artificial
  Synthetic oligonucleotide
tccgtacgacgccccagtccaggcagagccgctgcacgatgaacatgccgtgtccgccgg

SEQ ID NO: 5564 - DNA, 60 bp, Artificial
  Synthetic oligonucleotide
tctggatcttgccggggtcgcggggtctggcacgcccatctgcggcgttgtcgtcggttg

SEQ ID NO: 5565 - DNA, 60 bp, Artificial
  Synthetic oligonucleotide
acgacaacgccgcagatgtgcgtgccagaccccgcaaccccggcaagatccaaacgacac

SEQ ID NO: 5566 - DNA, 60 bp, Artificial
  Synthetic oligonucleotide
tgctggacgccatccgccgcacccgcccgcgctactccctcttcggccacgtccaccagc

SEQ ID NO: 5567 - DNA, 60 bp, Artificial
  Synthetic oligonucleotide
ttgtgtgctcgccatcaaccagcccgcggtcaccatcaagaacgtcgagtgcgcgatcgc

SEQ ID NO: 5568 - DNA, 60 bp, Artificial
  Synthetic oligonucleotide
aagatgatgccggccacgccacggtcgaccagcatctcggtcagctcgtcctccgtcgac

SEQ ID NO: 5569 - DNA, 57 bp, Artificial
  Synthetic oligonucleotide
ggggtgtcgtttggatcttgccggggtcgcggggtctggtacgcacatctgcggcgt

SEQ ID NO: 5570 - DNA, 60 bp, Artificial
  Synthetic oligonucleotide
aacgccgcagatgcgcgtaccagaccccgcgaccccggcaagatccaaacgacaccctca

SEQ ID NO: 5571 - DNA, 60 bp, Artificial
  Synthetic oligonucleotide
agacgagcagcacgaccagggcgatgcagaccgacagcatgtcgaccttgccgagcttgg

SEQ ID NO: 5572 - DNA, 60 bp, Artificial
  Synthetic oligonucleotide
acttctccggcatcaacgagaagggcgacttcatcaccctgccgatgcgcacgtactcct

SEQ ID NO: 5573 - DNA, 60 bp, Artificial
  Synthetic oligonucleotide
agtggcgttgccagtcgagcggccaggggcagttccagtccgggtcgatcgccgtcagtt

SEQ ID NO: 5574 - DNA, 60 bp, Artificial
  Synthetic oligonucleotide
acgggaccgaatccgaccgaccgcggcaagaagggatcgaaaatccacctcctcgtcgac

SEQ ID NO: 5575 - DNA, 60 bp, Artificial
  Synthetic oligonucleotide
ccgggttcgaaatgtaaccgggcgtttcccctacgctatgaccaccgaaaccctaatggt

SEQ ID NO: 5576 - DNA, 60 bp, Artificial
  Synthetic oligonucleotide
gccgagtagtcaacgttccacccatgagcaaccgtgcaggacatttgcctgcagtcggct

SEQ ID NO: 5577 - DNA, 60 bp, Artificial
  Synthetic oligonucleotide
agtcgtgtcattgcagcaatacggccaacgccggctgtgatgggtaggggagcgtcgtgt

SEQ ID NO: 5578 - DNA, 60 bp, Artificial
  Synthetic oligonucleotide
cctcgctgttgtgttacttcaaaggaacctcaacccgaacggagatccgatcaggtcggg

SEQ ID NO: 5579 - DNA, 60 bp, Artificial
  Synthetic oligonucleotide
tccaggtagacgtagtcgtcaagggtgccctggcggaccaggtagaccgtgagcgaccgg

SEQ ID NO: 5580 - DNA, 60 bp, Artificial
  Synthetic oligonucleotide
tcatctcccgcacccggatcaacctgcaccgcaagatcgtcaagcacgcggcgttcaccg

SEQ ID NO: 5581 - DNA, 60 bp, Artificial
  Synthetic oligonucleotide
tgcgatcgggtactgcccggtgaatgccgcgtgcttgacgatcttgcggtgcaggttgat

SEQ ID NO: 5582 - DNA, 60 bp, Artificial
  Synthetic oligonucleotide
acggatcaacctgcaccgcaagatcgtcaagcacgcggcgttcacgggccagtaccccat

SEQ ID NO: 5583 - DNA, 60 bp, Artificial
  Synthetic oligonucleotide
acaagacgctctgggtgccctcgtgcttgaccaggccggggttgatgccgagcttgaagc

SEQ ID NO: 5584 - DNA, 60 bp, Artificial
  Synthetic oligonucleotide
tcgctgatccgttccgccgtacgcaacgccgacgacaccaccgatgaccgctggagtgag

SEQ ID NO: 5585 - DNA, 60 bp, Artificial
  Synthetic oligonucleotide
ttttaagctcggcatcaaccccggcctggtcaagcacgagggcacccagtccgtcctatg

SEQ ID NO: 5586 - DNA, 60 bp, Artificial
  Synthetic oligonucleotide
accggggccgcgaggtcgaagtcgagcacctccatgtccacttgccgcgcgtgctcaaga

SEQ ID NO: 5587 - DNA, 60 bp, Artificial
  Synthetic oligonucleotide
agcgtctcagcgagacgggcgagatacgcgcgcagcgacagaccctcagcggcagctatg

SEQ ID NO: 5588 - DNA, 60 bp, Artificial
  Synthetic oligonucleotide
taccaccacgactacaggttcgcctggtgggtcatctacgccaccatccccatcgtcctc

SEQ ID NO: 5589 - DNA, 60 bp, Artificial
  Synthetic oligonucleotide
ttttggaggcgaggatgtggatgcccgcgaagaggttggcgagggtgtcctgaagggcga

SEQ ID NO: 5590 - DNA, 60 bp, Artificial
  Synthetic oligonucleotide
atgtagtcgcccggctgcacggtcttggaagcgaggatgtggatgcccgcgaagaggttg

SEQ ID NO: 5591 - DNA, 60 bp, Artificial
  Synthetic oligonucleotide
acgatcttccggggcaacaggctgaccaggtacgagtagcgcgacagccgggcgtctacg

SEQ ID NO: 5592 - DNA, 60 bp, Artificial
  Synthetic oligonucleotide
aggatgaggccatgtcactcccgcacgcgatcctcaccgccctggtcgaaaagccgtcgt

SEQ ID NO: 5593 - DNA, 60 bp, Artificial
  Synthetic oligonucleotide
tctctagcagggcggtgaggatcgcgtgcgggagtgacatgggctcatcctagggacggt

SEQ ID NO: 5594 - DNA, 60 bp, Artificial
  Synthetic oligonucleotide
tcacgatcgggatggtggcgtagatgacccaccaggcgaacttgtagtcgtggtggtgac

SEQ ID NO: 5595 - DNA, 60 bp, Artificial
  Synthetic oligonucleotide
acttgcaggcacacgaagggatctgtctcgcccatgtacacagcatcgtcctccgtgtcc

SEQ ID NO: 5596 - DNA, 60 bp, Artificial
  Synthetic oligonucleotide
tcgacgcacggctgtcgcgctactcgtacctggtcagcctgctgcccaagaagatcgtca

SEQ ID NO: 5597 - DNA, 60 bp, Artificial
  Synthetic oligonucleotide
tttggatcttgccggggtcgcggggtctggtacgcacatctgcggcgttgtcgtcggttg

SEQ ID NO: 5598 - DNA, 60 bp, Artificial
  Synthetic oligonucleotide
agagcagaccgtagaggacggccgggacgaccatgacgccgagcatgacctgccaggctt

SEQ ID NO: 5599 - DNA, 60 bp, Artificial
  Synthetic oligonucleotide
tacaacgagtacaagaagcaggactccgagcacctcctggagaccaccggcaaggagctg

SEQ ID NO: 5600 - DNA, 60 bp, Artificial
  Synthetic oligonucleotide
ttcgtcctgaagttcgtgaaggagaccaagggcaaggccctggaggaaatgggctgaccc

SEQ ID NO: 5601 - DNA, 60 bp, Artificial
  Synthetic oligonucleotide
gtcaacgccccgagccttttcaagcgaccgattccgcgccgttccgaggacggacacccc

SEQ ID NO: 5602 - DNA, 60 bp, Artificial
  Synthetic oligonucleotide
gtcaacgccccgagccttttcaagtgaccgattccgcgccgttccgaggacggacacccc

SEQ ID NO: 5603 - DNA, 50 bp, Artificial
  Synthetic oligonucleotide
ggggtgtccgtcctcggaacggcgcggaatcggtcacttgaaaaggctcg

SEQ ID NO: 5604 - DNA, 60 bp, Artificial
  Synthetic oligonucleotide
accccaggtgagcgttcgccgatgtgcccgacagggaggagagcgtcgccatgcccgacc

SEQ ID NO: 5605 - DNA, 60 bp, Artificial
  Synthetic oligonucleotide
ttggcgtcgttctccaccagcaccgggcacttgaaggaacggttcagccgctcgccgaga

SEQ ID NO: 5606 - DNA, 60 bp, Artificial
  Synthetic oligonucleotide
tcctcaccatcccgaacatcctcagcatggcgcggctcgtcggcgtacccgtcttcctgt

SEQ ID NO: 5607 - DNA, 60 bp, Artificial
  Synthetic oligonucleotide
acgacagcagcatgtagtcggtgatgttgtacgcgccgaccaggcagacgcacaggatca

SEQ ID NO: 5608 - DNA, 60 bp, Artificial
  Synthetic oligonucleotide
accgcgagatcgtcttccatctcaacaagcccgacgccaccttcccgttcgtgctggcca

SEQ ID NO: 5609 - DNA, 60 bp, Artificial
  Synthetic oligonucleotide
atcaccatgccgaaagtgatcagacccagcacgacccagccgaaccacagccagccgttg

SEQ ID NO: 5610 - DNA, 60 bp, Artificial
  Synthetic oligonucleotide
aaggcccagatcgcggtcagggacaccagcggcacgaggagcagcgccacgatcttccgg

SEQ ID NO: 5611 - DNA, 60 bp, Artificial
  Synthetic oligonucleotide
tgtccaccggcgacgtcgagaagatcggctggttcgtggaggccgtctcccgcttcaccg

SEQ ID NO: 5612 - DNA, 60 bp, Artificial
  Synthetic oligonucleotide
agcaggtccgtcgcctttcccttgccttcgtcaccccactgagcaccgagcagcacaagt

SEQ ID NO: 5613 - DNA, 60 bp, Artificial
  Synthetic oligonucleotide
acgtacgcgtacccgccgcgctctccggcctgctcctgctcgtgtggttcccgctgatca

SEQ ID NO: 5614 - DNA, 60 bp, Artificial
  Synthetic oligonucleotide
tcgtcgaggacgactgcctgctcgccaccaacacctcgtccctgtccgtcacggccatcg

SEQ ID NO: 5615 - DNA, 60 bp, Artificial
  Synthetic oligonucleotide
cggcttcctcgcgctgcacaacacccagcagcccgtgatcccgatgttcacctcgctcaa

SEQ ID NO: 5616 - DNA, 60 bp, Artificial
  Synthetic oligonucleotide
accacctcgtcgtacaggctcggctcgtgcagcgccttctccagctccgcgtggacgcgc

SEQ ID NO: 5617 - DNA, 60 bp, Artificial
  Synthetic oligonucleotide
tctccatgctgatcatgtccctcacggacgccccgcgcctggtcgtcgcgatgttcgccg

SEQ ID NO: 5618 - DNA, 60 bp, Artificial
  Synthetic oligonucleotide
agacgactcctagatgtctgacgccacgctgcacaacacgacgcaggaccccgacgactt

SEQ ID NO: 5619 - DNA, 60 bp, Artificial
  Synthetic oligonucleotide
ttgcccaacgtctcgctctcggcctccagttccgcgaagaatccctcgtccgcgtggttt

SEQ ID NO: 5620 - DNA, 60 bp, Artificial
  Synthetic oligonucleotide
actcgttcgcctccggcatgttcacccgtttcgacatcacgttcctcgtcgccgagccga

SEQ ID NO: 5621 - DNA, 60 bp, Artificial
  Synthetic oligonucleotide
tgcccggccaccttcgggttcacgatcttcatcacggcgcccatggcccgcggtccctcg

SEQ ID NO: 5622 - DNA, 60 bp, Artificial
  Synthetic oligonucleotide
acatacgtgcccgacccggaccggccctcgaccaggccctcggccatcagcaccttgcgg

SEQ ID NO: 5623 - DNA, 60 bp, Artificial
  Synthetic oligonucleotide
agtcacccctcgacgcgctgcttcgtggtctccggcggccaggtcctcatcgacgagacg

SEQ ID NO: 5624 - DNA, 60 bp, Artificial
  Synthetic oligonucleotide
tgaatcttctcggcgctctgtgcgactactgcctgctgcgcggcgacctgtaccggctgg

SEQ ID NO: 5625 - DNA, 60 bp, Artificial
  Synthetic oligonucleotide
aaggacctcatccggtcctcgccgctcaccaagcacatggaactcgtcgcctggctcaag

SEQ ID NO: 5626 - DNA, 60 bp, Artificial
  Synthetic oligonucleotide
acgaagtcaccacgatctacgtcaaggcgaccgactcgcagcggatcgacggcgtcaagt

SEQ ID NO: 5627 - DNA, 60 bp, Artificial
  Synthetic oligonucleotide
atcgtcgccaccatgtccagcacctgccgggtctccgccacctcgtgcacccggtacacc

SEQ ID NO: 5628 - DNA, 60 bp, Artificial
  Synthetic oligonucleotide
agaacggaactggcaggcgggaatcgtgaggatcttcggcaaggcacggcaccggccctc

SEQ ID NO: 5629 - DNA, 60 bp, Artificial
  Synthetic oligonucleotide
acaacgcctgggcctacagcaagaacacctggcggaacacctgccgcgacctggacatca

SEQ ID NO: 5630 - DNA, 60 bp, Artificial
  Synthetic oligonucleotide
ccaggcggagtctcccggtctcggtcagcggggcattacggtggaccacgagggcctcct

SEQ ID NO: 5631 - DNA, 60 bp, Artificial
  Synthetic oligonucleotide
tgggcatccgcatcgaacgggtcctgaccgacaacgcctgggcctacagcaagaacacct

SEQ ID NO: 5632 - DNA, 60 bp, Artificial
  Synthetic oligonucleotide
attgcgacatctccaccgagttcaggaggccctcgtggtccaccgtaatgccccgctgac

SEQ ID NO: 5633 - DNA, 60 bp, Artificial
  Synthetic oligonucleotide
tcagaccacgaacgcagggaagcgttcacccactggctgcactggtacaactaccaccga

SEQ ID NO: 5634 - DNA, 60 bp, Artificial
  Synthetic oligonucleotide
acgaacgcagggaagcgttcacccactggctgcactggtacaactaccaccgaccccaca

SEQ ID NO: 5635 - DNA, 60 bp, Artificial
  Synthetic oligonucleotide
gtcgaacgcttccaccgcaccctgctcgacgaatgggcctaccagaagccctacacctca

SEQ ID NO: 5636 - DNA, 60 bp, Artificial
  Synthetic oligonucleotide
tctggtaggcccattcgtcgagcagggtgcggtggaagcgttcgaccttgccgttggtct

SEQ ID NO: 5637 - DNA, 60 bp, Artificial
  Synthetic oligonucleotide
aatgggcctaccagaagccctacacctcagaccacgaacgcagggaagcgttcacccact

SEQ ID NO: 5638 - DNA, 60 bp, Artificial
  Synthetic oligonucleotide
agttcaggaggccctcgtggtccaccgtaatgccccgctgaccgagaccgggagactccg

SEQ ID NO: 5639 - DNA, 60 bp, Artificial
  Synthetic oligonucleotide
ttcttgctgtaggcccaggcgttgtcggtcaggacccgttcgatgcggatgcccagggat

SEQ ID NO: 5640 - DNA, 60 bp, Artificial
  Synthetic oligonucleotide
acggcttacttcgcatccctgggcatccgcatcgagcgggtcctgaccgacaacgcctgg

SEQ ID NO: 5641 - DNA, 60 bp, Artificial
  Synthetic oligonucleotide
tcgaacgggtcctgaccgacaacgcctgggcctacagcaagaacacctggcggaacacct

SEQ ID NO: 5642 - DNA, 60 bp, Artificial
  Synthetic oligonucleotide
attgcgaaatctccaccgagttcaggaggccctcgtggtccaccgtaatgccccgctgac

SEQ ID NO: 5643 - DNA, 60 bp, Artificial
  Synthetic oligonucleotide
ttcggtgtggattgcgacatctccaccgagttcaggaggccctcgtggtccaccgtaatg

SEQ ID NO: 5644 - DNA, 60 bp, Artificial
  Synthetic oligonucleotide
agatctgatagagtcggaaacgcaagaccgaagggaagcgcccggaggaaagcccgagag

SEQ ID NO: 5645 - DNA, 60 bp, Artificial
  Synthetic oligonucleotide
tgatagagtcggaaacgcaagaccgaagggaagcgcccggaggaaagcccacgagagtct

SEQ ID NO: 5646 - DNA, 60 bp, Artificial
  Synthetic oligonucleotide
tagagtcggaaacgcaagaccgaagggaagcgcccggaggaaagcctgagagagtctctc

SEQ ID NO: 5647 - DNA, 60 bp, Artificial
  Synthetic oligonucleotide
cgtccttgagctcccgcacgatattggagaccgtcgccgcggacaggcccgtcgtcctcg

SEQ ID NO: 5648 - DNA, 60 bp, Artificial
  Synthetic oligonucleotide
aacttcgcgccgccgtcacggaagttcttgacgatggagaacaggtagtcccagcgcccc

SEQ ID NO: 5649 - DNA, 60 bp, Artificial
  Synthetic oligonucleotide
tgcctacctcgacttcgccgcacgcaacccggcggtctacgacgccttgttccagctcga

SEQ ID NO: 5650 - DNA, 60 bp, Artificial
  Synthetic oligonucleotide
ttcctgcccgagttcgacaacctgctcctctcccacgccgaccgtgcccgcgtcgtcccg

SEQ ID NO: 5651 - DNA, 60 bp, Artificial
  Synthetic oligonucleotide
tgttcgggatgggcatgacggagaagcagggcggcagcgacgtacgcgccaacacgacgg

SEQ ID NO: 5652 - DNA, 60 bp, Artificial
  Synthetic oligonucleotide
ccggaagcagccagttcagcgatatgtcggtcaatctcatctggggtcccttgcagtggg

SEQ ID NO: 5653 - DNA, 60 bp, Artificial
  Synthetic oligonucleotide
tcgccgcgtgtgtgctgtgccaggagccgacggagtacccggagtcgtacaaggggatca

SEQ ID NO: 5654 - DNA, 60 bp, Artificial
  Synthetic oligonucleotide
tgggtcgctcaggtgtcatggaaccctacgtacccgccccgccgccattcctgtcaccgt

SEQ ID NO: 5655 - DNA, 60 bp, Artificial
  Synthetic oligonucleotide
cgtcgccgtacgcctgccccagctcgccgactccctcgaccacatcctggccgccatgga

SEQ ID NO: 5656 - DNA, 60 bp, Artificial
  Synthetic oligonucleotide
atcgtcacgcagcagctggaagtagtcaggatgcgaggccttgaagtcgtcgccgaccag

SEQ ID NO: 5657 - DNA, 60 bp, Artificial
  Synthetic oligonucleotide
tcctgccggtcagcatcgacgtctactgcgtcactgcgttccgcgccaagaaggacatcg

SEQ ID NO: 5658 - DNA, 60 bp, Artificial
  Synthetic oligonucleotide
atcaagttcgagcggggccagttcgtcctgtaccgcgacccggagatgttctggtccggg

SEQ ID NO: 5659 - DNA, 60 bp, Artificial
  Synthetic oligonucleotide
atcaagttcaagcagggtcagttcgtcctgtaccgcgacccggagatgttctggaccggg

SEQ ID NO: 5660 - DNA, 60 bp, Artificial
  Synthetic oligonucleotide
aaccgacgacaacgccgcagatgtgcgtgccagaccccgcgaccccggcaagatccaaac

SEQ ID NO: 5661 - DNA, 60 bp, Artificial
  Synthetic oligonucleotide
tttggatcttgccggggtcgcggggtctggcacgcacatctgcggcgttgtcgtcggttg

SEQ ID NO: 5662 - DNA, 60 bp, Artificial
  Synthetic oligonucleotide
atcgagtacagccagcccgtcctctacagccacttccgcggcaaacgcgagatcatcggc

SEQ ID NO: 5663 - DNA, 60 bp, Artificial
  Synthetic oligonucleotide
atcgagtacagccagcccgtcctctacagccacttccgcggcaagcgcgagatcatcggc

SEQ ID NO: 5664 - DNA, 60 bp, Artificial
  Synthetic oligonucleotide
actgtcctcggggagtgcgttgaggatcgggttcatgacgaaggcgacggagaactccac

SEQ ID NO: 5665 - DNA, 60 bp, Artificial
  Synthetic oligonucleotide
tgatctcgcgtttgccgcggaagtggctgtagaggacgggctggctgtactcgatgcgct

SEQ ID NO: 5666 - DNA, 60 bp, Artificial
  Synthetic oligonucleotide
accacccgccggctcgccgagcgcatcgagtacagccagcccgtcctctacagccacttc

SEQ ID NO: 5667 - DNA, 60 bp, Artificial
  Synthetic oligonucleotide
gcggcttcacggccttagcattaatgggctcgatgtttgacgcttcacagcgggtaccgg

SEQ ID NO: 5668 - DNA, 60 bp, Artificial
  Synthetic oligonucleotide
ggccgtgagacgagtcagaaaccgttgatgtaggcgaaggacatgcgaaaggtccggcgt

SEQ ID NO: 5669 - DNA, 60 bp, Artificial
  Synthetic oligonucleotide
tttctgactcgtctcacggccggcagaccgtaaaagagagatcccacaaccccgcacacg

SEQ ID NO: 5670 - DNA, 60 bp, Artificial
  Synthetic oligonucleotide
aagcccagatcaacgccctgctggaggcccaccctctttccccggtcctgacgtcgatgc

SEQ ID NO: 5671 - DNA, 60 bp, Artificial
  Synthetic oligonucleotide
atgttcctgtccgccttcgcctgcatgaacgccgaccccgcctcccgcacctactacgac

SEQ ID NO: 5672 - DNA, 60 bp, Artificial
  Synthetic oligonucleotide
acgaacagcgccgggccctggaagcccagatcaacgccctgctggaggcccaccctcttt

SEQ ID NO: 5673 - DNA, 60 bp, Artificial
  Synthetic oligonucleotide
tcgacgtcaggaccggggaaagagggtgggcctccagcagggcgttgatctgggcttcca

SEQ ID NO: 5674 - DNA, 60 bp, Artificial
  Synthetic oligonucleotide
aaggtcctcgacaagcagctgcccaacagcgagccgagactgcgggccgtcttcgacaag

SEQ ID NO: 5675 - DNA, 60 bp, Artificial
  Synthetic oligonucleotide
acctccaaccggatacgcggcctgctcacccagttccacccctcgctggagcgcgtcctg

SEQ ID NO: 5676 - DNA, 60 bp, Artificial
  Synthetic oligonucleotide
actcacctgaaagggcgcgatgttcgacaccgaagacgtgggcgtgttcctcggcctgga

SEQ ID NO: 5677 - DNA, 60 bp, Artificial
  Synthetic oligonucleotide
tgagcggtcttgccgacgtccaggccgaggaacacgcccacgtcttcggtgtcgaacatc

SEQ ID NO: 5678 - DNA, 60 bp, Artificial
  Synthetic oligonucleotide
acgtgcaactcacctgaaagggcgcgatgttcgacaccgaagacgtgggcgtgttcctcg

SEQ ID NO: 5679 - DNA, 60 bp, Artificial
  Synthetic oligonucleotide
aggaacacgcccacgtcttcggtgtcgaacatcgcgccctttcaggtgagttgcacgtgc

SEQ ID NO: 5680 - DNA, 60 bp, Artificial
  Synthetic oligonucleotide
atgcgggattcgtagaaggtgccgtctcggagcatggcgaacaggacgctgatgcgttgg

SEQ ID NO: 5681 - DNA, 60 bp, Artificial
  Synthetic oligonucleotide
aacgcatcagcgtcctgttcgccatgctccgagacggcaccttctacgaatcccgcatgc

SEQ ID NO: 5682 - DNA, 60 bp, Artificial
  Synthetic oligonucleotide
atgaccccagcaagaccgaatcaccccaaacccgacaggggcgccttgacgaaggacata

SEQ ID NO: 5683 - DNA, 60 bp, Artificial
  Synthetic oligonucleotide
tatgtccttcgtcaaggcgcccctgtcgggtttggggtgattcggtcttgctggggtcat

SEQ ID NO: 5684 - DNA, 60 bp, Artificial
  Synthetic oligonucleotide
gtcaacgccccgagcctccgtagccaaccgattccgcgccgttccgaggacggacacccc

SEQ ID NO: 5685 - DNA, 60 bp, Artificial
  Synthetic oligonucleotide
tgcaaggcggaggagggcgacagggcgaagccccggcaaccgacgacaacgccgcagatg

SEQ ID NO: 5686 - DNA, 60 bp, Artificial
  Synthetic oligonucleotide
tcatcagcccgcacaccgtggaatggcatctgcgcaaggtgttcgccaaactcggcatca

SEQ ID NO: 5687 - DNA, 60 bp, Artificial
  Synthetic oligonucleotide
cggcacctacgtgatctacacgatcttcgccgccctctccatccccttcgtcctgaagtt

SEQ ID NO: 5688 - DNA, 60 bp, Artificial
  Synthetic oligonucleotide
cggcacctacgtgatctacacgatcttcgccgccctctccatccccttcgtcctcaagtt

SEQ ID NO: 5689 - DNA, 60 bp, Artificial
  Synthetic oligonucleotide
agggtggtggagtagcggcgggacttggaggagaagtggccgcggaagccgagcatgtgg

SEQ ID NO: 5690 - DNA, 60 bp, Artificial
  Synthetic oligonucleotide
aggacgtcgtacatccggcggtccaggttgaagcccatcacgtactcgatgtgctgccag

SEQ ID NO: 5691 - DNA, 60 bp, Artificial
  Synthetic oligonucleotide
aggttgaagcccatcacgtactcgatgtgctgccaggcgccgatgaggctgtccttgttg

SEQ ID NO: 5692 - DNA, 60 bp, Artificial
  Synthetic oligonucleotide
aaggaggacgtgaagaaggtccggtacccgaagaacgtccgcgagatcgccaagttggag

SEQ ID NO: 5693 - DNA, 60 bp, Artificial
  Synthetic oligonucleotide
ttcttcgggtaccggaccttcttcacgtcctccttcatggccgcgacgagcccaccggcg

SEQ ID NO: 5694 - DNA, 60 bp, Artificial
  Synthetic oligonucleotide
tcacatgtttggcttccgcggccacttctcctccaagtcccgccgctactccaccaccct

SEQ ID NO: 5695 - DNA, 60 bp, Artificial
  Synthetic oligonucleotide
tcgtagatggtcttccacgagccatagcgttccggcagatcacgccacggaacaccggtc

SEQ ID NO: 5696 - DNA, 60 bp, Artificial
  Synthetic oligonucleotide
aaccaacgagcgaccagtcagaaggtcacatgatccgccggacagtgcctaagcgggtac

SEQ ID NO: 5697 - DNA, 60 bp, Artificial
  Synthetic oligonucleotide
accgaaccaacgagcgaccagtcagaaggtcacatgatccgccggacagtgcctagccat

SEQ ID NO: 5698 - DNA, 60 bp, Artificial
  Synthetic oligonucleotide
aggtcctcgatggtcacgacacggccgagacgctcggtgaacagggccgccagcactcgc

SEQ ID NO: 5699 - DNA, 60 bp, Artificial
  Synthetic oligonucleotide
agtcgaccttgaaggtggcgaagtcccactggaaccgtcgcagatcggccaggacctggg

SEQ ID NO: 5700 - DNA, 60 bp, Artificial
  Synthetic oligonucleotide
tcagagattgcggagtccaacgagcacctgctccaggatgtcgggatcggggacggctgc

SEQ ID NO: 5701 - DNA, 60 bp, Artificial
  Synthetic oligonucleotide
tcgtcagctcccagttgccgttggagttggagccgttgatgatctcgggcaggtagacgt

SEQ ID NO: 5702 - DNA, 60 bp, Artificial
  Synthetic oligonucleotide
tcgttgatgtccccgacgagaccgaagcgggtgccgtacatgaagccccacatcagggtg

SEQ ID NO: 5703 - DNA, 60 bp, Artificial
  Synthetic oligonucleotide
tggtcgccaccggcgaggtcgtcacggtctgccagcccagttcccagtcccgccccgaca

SEQ ID NO: 5704 - DNA, 60 bp, Artificial
  Synthetic oligonucleotide
actgctggacgccctcgacgaactggaagtcggctccatcgcctactccccgctggagca

SEQ ID NO: 5705 - DNA, 60 bp, Artificial
  Synthetic oligonucleotide
aacgcgccgtacgtctttgaggccgcccgtgatgatctcgttggcccggtcctggatcca

SEQ ID NO: 5706 - DNA, 60 bp, Artificial
  Synthetic oligonucleotide
tgaagtgggtgaagttgcgggcggtgtcgaacttggtgttggtccggatcgggcaggtct

SEQ ID NO: 5707 - DNA, 60 bp, Artificial
  Synthetic oligonucleotide
gcccaggtggtgtcccggaagaagcgcttgatctcgccgacgatgtagggcagcgcgaag

SEQ ID NO: 5708 - DNA, 60 bp, Artificial
  Synthetic oligonucleotide
acctgatcgtgatgggcggctcctgccagcggacgtgggaacacgccatccccaagagca

SEQ ID NO: 5709 - DNA, 60 bp, Artificial
  Synthetic oligonucleotide
aagcacctcatcccaacgggataagactttccctacttcatcaaggcccgcgcacggcgc

SEQ ID NO: 5710 - DNA, 60 bp, Artificial
  Synthetic oligonucleotide
acggcaagcgcctcatcccagcgggatagaactttccctacttcatcaaggcccgcgcac

SEQ ID NO: 5711 - DNA, 60 bp, Artificial
  Synthetic oligonucleotide
atcagaccgtaggccagggccaggttcccggagatgttgcggtaggtgccgggcgggaac

SEQ ID NO: 5712 - DNA, 60 bp, Artificial
  Synthetic oligonucleotide
acgacaacgccgcagatgcgcgtgccagaccccgcgaccccggcaagatccaaacgacac

SEQ ID NO: 5713 - DNA, 60 bp, Artificial
  Synthetic oligonucleotide
acctgtaccagccgtttcaccgccactacgccgacgccctggccgccgatgtccgcacgg

SEQ ID NO: 5714 - DNA, 60 bp, Artificial
  Synthetic oligonucleotide
tccggctcgtacacgccccaaccggcctcagtcatcgagtctctgacgcgccgccactca

SEQ ID NO: 5715 - DNA, 60 bp, Artificial
  Synthetic oligonucleotide
tacgcacatcaccacgaagagcagcatcggcagcaccttggacttcaccgagcggcccag

SEQ ID NO: 5716 - DNA, 60 bp, Artificial
  Synthetic oligonucleotide
gatccggtccagcgcctcggcaaccagttcctcgaactcctcgcgcgtcatctccagcac

SEQ ID NO: 5717 - DNA, 60 bp, Artificial
  Synthetic oligonucleotide
tctcgcggttgcttcctgctgtgcggcgtccattgcgtctccccatcgcttccccaagta

SEQ ID NO: 5718 - DNA, 60 bp, Artificial
  Synthetic oligonucleotide
ttcatattgctcgccgacatcttcccgaccggctaccacgggtgtgaactcgcccaagtc

SEQ ID NO: 5719 - DNA, 60 bp, Artificial
  Synthetic oligonucleotide
accaccttcacgccggccttctcggccttcttgatgttgcggcgccactgctggttgagg

SEQ ID NO: 5720 - DNA, 60 bp, Artificial
  Synthetic oligonucleotide
tgctcgtagccgccgtacgtgaatccgggcgccatcgtgcagccgaagagcgaccacgcc

SEQ ID NO: 5721 - DNA, 60 bp, Artificial
  Synthetic oligonucleotide
actccgccatagagaacgtccgcctcgagggcttcgccatccacctgccgctggaccgca

SEQ ID NO: 5722 - DNA, 60 bp, Artificial
  Synthetic oligonucleotide
cggacgagccggccaagcggaagatccgggactccatccccgtaccgccgaagtacacct

SEQ ID NO: 5723 - DNA, 55 bp, Artificial
  Synthetic oligonucleotide
gcgttttggacatggggagcacttactttgacattcggggcacgctggaccgggg

SEQ ID NO: 5724 - DNA, 60 bp, Artificial
  Synthetic oligonucleotide
gctcccacattaaagcctgagtaacagcaagcccagacatcgcggacgtacggtccataa

SEQ ID NO: 5725 - DNA, 60 bp, Artificial
  Synthetic oligonucleotide
cgcatgcaaggtgtggtttatgactcatgggcggggcttagtcctatataagtggtaaca

SEQ ID NO: 5726 - DNA, 52 bp, Artificial
  Synthetic oligonucleotide
cgtaggggatgtgccaacgggcagcaaactttctccacgtcctaaagggtat

SEQ ID NO: 5727 - DNA, 55 bp, Artificial
  Synthetic oligonucleotide
acactagccattgaacgcccgctagctctatccagtagcagagcagtgaccctta

SEQ ID NO: 5728 - DNA, 52 bp, Artificial
  Synthetic oligonucleotide
taaggtcaagtgttaaacgtaaatatcgtaaggtatgttgactttgcccagt

SEQ ID NO: 5729 - DNA, 53 bp, Artificial
  Synthetic oligonucleotide
caggtcccagagaacaaggcggaatacactggataacattagcattagaaccc

SEQ ID NO: 5730 - DNA, 55 bp, Artificial
  Synthetic oligonucleotide
cgaggaaccccggttcgaaaccggcaggatccgctatgagcgtaagtgaggcgct

SEQ ID NO: 5731 - DNA, 55 bp, Artificial
  Synthetic oligonucleotide
ttacgactctaacaaccgtcccgtgaccgcttatcggtcttggcttatcgcgtac

SEQ ID NO: 5732 - DNA, 55 bp, Artificial
  Synthetic oligonucleotide
gactctaacaaccgtcccgtgaccgcttatcgctcctggcttatcgcgtacaacc

SEQ ID NO: 5733 - DNA, 60 bp, Artificial
  Synthetic oligonucleotide
gcataatatggtgaagggctgcacggatgagcgcatgtacaacatgctgacctgcgattc

SEQ ID NO: 5734 - DNA, 55 bp, Artificial
  Synthetic oligonucleotide
gagtacgaaagtctgttgcgccgtagtgcgctagcggccactaaagaccgatgcg

SEQ ID NO: 5735 - DNA, 60 bp, Artificial
  Synthetic oligonucleotide
tatgtaattggcatagtccccgtcacagtagatgacctccccccagtggaacatgcgcaa

SEQ ID NO: 5736 - DNA, 60 bp, Artificial
  Synthetic oligonucleotide
ctttcacagcagtagccactgcaagcccagactgtataggaccatttgcttcctatgcac

SEQ ID NO: 5737 - DNA, 60 bp, Artificial
  Synthetic oligonucleotide
cgtagggactgcgcgcagagatctgatcgtgtcaagatccacgggatctgaaaacctttc

SEQ ID NO: 5738 - DNA, 55 bp, Artificial
  Synthetic oligonucleotide
actaaagggagagcttaacttgtatgtgccttaccgccagagaacgcgcgaagat

SEQ ID NO: 5739 - DNA, 55 bp, Artificial
  Synthetic oligonucleotide
gccatgcgagtcgagccgaacccccgcaggggctgcagcaacgctaggtcggcca

SEQ ID NO: 5740 - DNA, 60 bp, Artificial
  Synthetic oligonucleotide
tgtagggggccagtctgcagcgataccgtctgtcgcgttgcatcgtagaccaggaaccga

SEQ ID NO: 5741 - DNA, 57 bp, Artificial
  Synthetic oligonucleotide
aaagggcgccctctacagccatgcgtagacacaccatcatgactgcaagatatcggg

SEQ ID NO: 5742 - DNA, 55 bp, Artificial
  Synthetic oligonucleotide
accgctccgctgaaactcacgccggggttgtggacttccgcgtacctgcgcaaat

SEQ ID NO: 5743 - DNA, 60 bp, Artificial
  Synthetic oligonucleotide
cgcccccctctgatgcttgctcgcacatagtcatagagttcatgcgagggggcgagtaga

SEQ ID NO: 5744 - DNA, 55 bp, Artificial
  Synthetic oligonucleotide
ctacgtgtacaaaagcttgggggtcgttgtacctcgcgtgctgtccagtaaaaca

SEQ ID NO: 5745 - DNA, 55 bp, Artificial
  Synthetic oligonucleotide
aaaacgggatcgggcgattgtgtctcatcaaacccacaagcagccgctgtctgcg

SEQ ID NO: 5746 - DNA, 60 bp, Artificial
  Synthetic oligonucleotide
caatgtaagtgggataacagcgcccccctctgatgcttgctcgcacatagtcatagagtt

SEQ ID NO: 5747 - DNA, 56 bp, Artificial
  Synthetic oligonucleotide
cccatggctcacaacaccgcttccacccttgaagccatgctgcggaatgacaccaa

SEQ ID NO: 5748 - DNA, 53 bp, Artificial
  Synthetic oligonucleotide
caagtataggtctctacatcgtaggtgacaaagagacgctcggtgcgaggatg

SEQ ID NO: 5749 - DNA, 55 bp, Artificial
  Synthetic oligonucleotide
gggctgtggacttccgcctacctgcgcaaatttgtacctgaagactaccacgccc

SEQ ID NO: 5750 - DNA, 60 bp, Artificial
  Synthetic oligonucleotide
tgggataacatcgcccccctctgatgcttgctcgcacatagtcatagagttcatgtgagg

SEQ ID NO: 5751 - DNA, 60 bp, Artificial
  Synthetic oligonucleotide
aaggcaaccctcgcacacaacttacattgtgcatggacagggtatcgcaatcaggcagca

SEQ ID NO: 5752 - DNA, 60 bp, Artificial
  Synthetic oligonucleotide
gaccgcgtcctgggggcactccgcgcccgaatgcaaactggcagagtactctgaacagca

SEQ ID NO: 5753 - DNA, 55 bp, Artificial
  Synthetic oligonucleotide
ccgcggtacctggcgcctacagaggggcgaaacagcattcgttactcggagctga

SEQ ID NO: 5754 - DNA, 54 bp, Artificial
  Synthetic oligonucleotide
cgcctttgcagatatggctctcacatgccgcattcgcgtccccattacgggcta

SEQ ID NO: 5755 - DNA, 60 bp, Artificial
  Synthetic oligonucleotide
ctaccagctcaaatcagacatgcaccccagctggataattatcatgggaatcgtgaacat

SEQ ID NO: 5756 - DNA, 60 bp, Artificial
  Synthetic oligonucleotide
ccgcattgcggtttgacacccgtctatggcctgcgtattggaaacagtgacatgcgtgga

SEQ ID NO: 5757 - DNA, 60 bp, Artificial
  Synthetic oligonucleotide
catcatggattacgccgcgctttccccgcacgtcggtagttgggctctgcgagacggaca

SEQ ID NO: 5758 - DNA, 60 bp, Artificial
  Synthetic oligonucleotide
tgcacggggcacttgatatcgccaaccaggagttagcaaagcaaatagagcggcgtttgg

SEQ ID NO: 5759 - DNA, 60 bp, Artificial
  Synthetic oligonucleotide
ataacactgtacagccacgcccaagccacacctggaaactgtgcatgcctaacagagaag

SEQ ID NO: 5760 - DNA, 58 bp, Artificial
  Synthetic oligonucleotide
catcgttacagcaaacacattcacttcccgccgctgtggccattacacccaggccggc

SEQ ID NO: 5761 - DNA, 60 bp, Artificial
  Synthetic oligonucleotide
gaccacacatcagagttataggcacccgaaaaagatcgaggcagacaggacataagagtt

SEQ ID NO: 5762 - DNA, 60 bp, Artificial
  Synthetic oligonucleotide
tagtcgcactccatggcaggattctactactgccacttctgccgaagaaccgtctgcttc

SEQ ID NO: 5763 - DNA, 60 bp, Artificial
  Synthetic oligonucleotide
tgagctccttcctcacgcagtgcaacccctcgaacatcggtcaagggaccctagagccaa

SEQ ID NO: 5764 - DNA, 55 bp, Artificial
  Synthetic oligonucleotide
gcgccaatacgaccacccgtacaatcagcctcacgaccaccaagaagaatgcggg

SEQ ID NO: 5765 - DNA, 60 bp, Artificial
  Synthetic oligonucleotide
tggcggggaccacagaacccacgtggccatcataccacaagcgcaggtagattaagtggc

SEQ ID NO: 5766 - DNA, 60 bp, Artificial
  Synthetic oligonucleotide
atatctcagagcgagagtgctgaaggcagtgcggactcgggcgtttctggggttggaaac

SEQ ID NO: 5767 - DNA, 60 bp, Artificial
  Synthetic oligonucleotide
tgtgtgatcggcgttaagagccccaacagcccgctcaagatgacctactgctgcgcccgt

SEQ ID NO: 5768 - DNA, 60 bp, Artificial
  Synthetic oligonucleotide
atgtgcatattaacaatctgtctgtaccatggacaacgttggttaatcatgcaacccaat

SEQ ID NO: 5769 - DNA, 60 bp, Artificial
  Synthetic oligonucleotide
acaaatcattcaaggagcagccacgcagggaactccacccctatcttatcgctacgagaa

SEQ ID NO: 5770 - DNA, 59 bp, Artificial
  Synthetic oligonucleotide
ttcgtcagataattatggacgagaggtcacgctggggcggagatttgcatactatcact

SEQ ID NO: 5771 - DNA, 52 bp, Artificial
  Synthetic oligonucleotide
gcgctctttaatatgattggacttaacttacccacagctgggcgtttctcgc

SEQ ID NO: 5772 - DNA, 60 bp, Artificial
  Synthetic oligonucleotide
gctgttgtagtagtaagtagatcttaagtcattgcaggtatgaattgcggagtagattct

SEQ ID NO: 5773 - DNA, 60 bp, Artificial
  Synthetic oligonucleotide
tgagtactgagccattagtagagttgggtaatgttatagctagtcttggaccgagttatg

SEQ ID NO: 5774 - DNA, 53 bp, Artificial
  Synthetic oligonucleotide
tcctccaggttactgttatccaagcacaggcatgggcaactatcctaatactg

SEQ ID NO: 5775 - DNA, 60 bp, Artificial
  Synthetic oligonucleotide
acacaaggccagtagtcaatgttttccaagtcatacagtgcaatccgacgctctgtataa

SEQ ID NO: 5776 - DNA, 60 bp, Artificial
  Synthetic oligonucleotide
gcgtccaaacccacgcaatggttggatgagagccaagtccgctactacgcgctctgctag

SEQ ID NO: 5777 - DNA, 60 bp, Artificial
  Synthetic oligonucleotide
tagcagactccgaggcgcttctcagtaaatactgctctgcagctccgacacgattctcgc

SEQ ID NO: 5778 - DNA, 60 bp, Artificial
  Synthetic oligonucleotide
tgagctctaacctgactgcccgctcctgtgctcaatatatagccctaacctacactgacg

SEQ ID NO: 5779 - DNA, 56 bp, Artificial
  Synthetic oligonucleotide
tacaaatcttcgaatagattgtcctctttgacgcctcattgattcagttactgccc

SEQ ID NO: 5780 - DNA, 57 bp, Artificial
  Synthetic oligonucleotide
gcaagccttgagggcagaagaagttggtcctatatattctgatttacttatacgtgt

SEQ ID NO: 5781 - DNA, 58 bp, Artificial
  Synthetic oligonucleotide
atggagccacagcgtgaattttttcacattgcgggtagaaatgcgagggaatatctgt

SEQ ID NO: 5782 - DNA, 55 bp, Artificial
  Synthetic oligonucleotide
caggggccgcagtctgacaacaacaccgcaacaagtttcaggctcaccccagggc

SEQ ID NO: 5783 - DNA, 60 bp, Artificial
  Synthetic oligonucleotide
tgtctgcgacgattttgctccgtagtaagggcgtaatataaccactctcgcaaacacagc

SEQ ID NO: 5784 - DNA, 55 bp, Artificial
  Synthetic oligonucleotide
cttctgctgcccttttgacccctaacacacgtctcttgttgctcttaattgcccc

SEQ ID NO: 5785 - DNA, 60 bp, Artificial
  Synthetic oligonucleotide
acctgctgtactccaactccgctcacgcccttgacatgactttcgaggttgatgccatga

SEQ ID NO: 5786 - DNA, 60 bp, Artificial
  Synthetic oligonucleotide
gacattaccgagctccatggggcgcgcatacccgaggacgcactggtcgcaccactgtag

SEQ ID NO: 5787 - DNA, 60 bp, Artificial
  Synthetic oligonucleotide
tttgcatctcaccactgaaactcccttagttgtaaattctagcggtgccctatctgttgc

SEQ ID NO: 5788 - DNA, 60 bp, Artificial
  Synthetic oligonucleotide
ctcgtgagcacggatgtcacgtgtggggcggagcaggtgtactggagcgtccccggcatg

SEQ ID NO: 5789 - DNA, 60 bp, Artificial
  Synthetic oligonucleotide
tggctacgtgaagcaggcttgtaagatttcgaacgtggagctgcccaacctcgtctccta

SEQ ID NO: 5790 - DNA, 60 bp, Artificial
  Synthetic oligonucleotide
tgttcagcttaagaaggatgccggagaggctttcgtcccacccgccaatgtattcagaga

SEQ ID NO: 5791 - DNA, 55 bp, Artificial
  Synthetic oligonucleotide
cgaccctgtggccgatgtagtcaacgccattgctggtcagacacgccgccgacgc

SEQ ID NO: 5792 - DNA, 57 bp, Artificial
  Synthetic oligonucleotide
caacacgctagagccatcagtctctcacaatgccgcgagccgtcagaccgaccagtc

SEQ ID NO: 5793 - DNA, 60 bp, Artificial
  Synthetic oligonucleotide
aatctgacaattcttacatcgagcccacttgccgtgtcacaatctggtttaacgctgaac

SEQ ID NO: 5794 - DNA, 60 bp, Artificial
  Synthetic oligonucleotide
ccgctggtcaaaaatgtagtcgttgcacacgcgcaagacatattgatagccgatgagaaa

SEQ ID NO: 5795 - DNA, 60 bp, Artificial
  Synthetic oligonucleotide
ttcttgtcgcagactcggccaaggctccgagagttaacgccgcttctgaagaatcgccgc

SEQ ID NO: 5796 - DNA, 53 bp, Artificial
  Synthetic oligonucleotide
gggcggtgattaagctgttggtgttgagcgatgacctgggcatgtatcgcaac

SEQ ID NO: 5797 - DNA, 60 bp, Artificial
  Synthetic oligonucleotide
caaaatgtaacagagccagctaaccataacacctatgcctacatgaacattaggctgccg

SEQ ID NO: 5798 - DNA, 60 bp, Artificial
  Synthetic oligonucleotide
aaactaactcagcgctgcagacctaatattctgagaccctcggcccagcgtgtgtcatcc

SEQ ID NO: 5799 - DNA, 60 bp, Artificial
  Synthetic oligonucleotide
tttgcgtagtgacctcgggtcggagcgagctcagcgcttgaaaatccacgggatcggaga

SEQ ID NO: 5800 - DNA, 60 bp, Artificial
  Synthetic oligonucleotide
cgagatcaggggccttttgtaatcagcctactctgcacctgtaaccatgtcgaccttcac

SEQ ID NO: 5801 - DNA, 58 bp, Artificial
  Synthetic oligonucleotide
gttcccacggcaactatcactcgcaaggtgggacacacggaaacaatatgagcgccca

SEQ ID NO: 5802 - DNA, 52 bp, Artificial
  Synthetic oligonucleotide
tgcacataggtggtcgcaggggaatgtttatgccttaccagtgtaacctgaa

SEQ ID NO: 5803 - DNA, 60 bp, Artificial
  Synthetic oligonucleotide
gcagtcacgagcggtgcggaattcggacccggaatccagataaggactcgcgagtcggca

SEQ ID NO: 5804 - DNA, 60 bp, Artificial
  Synthetic oligonucleotide
ttttacgtagacaacaagctgagcgacatagacacgtacaacacggaggcgaaccacagc

SEQ ID NO: 5805 - DNA, 60 bp, Artificial
  Synthetic oligonucleotide
atcagatgctgacctgtgctggaggacattgcaatatgctggctactgtgcatattgttt

SEQ ID NO: 5806 - DNA, 60 bp, Artificial
  Synthetic oligonucleotide
tgctgacctgtgctggaggacattgcaatatgctggctaccgtgcatattgtttctcatg

SEQ ID NO: 5807 - DNA, 55 bp, Artificial
  Synthetic oligonucleotide
caaactggtacttgtggtctgcggctgtgagctttccacactcccaatcggcgaa

SEQ ID NO: 5808 - DNA, 59 bp, Artificial
  Synthetic oligonucleotide
caccaaccgccaacaccgcatccctactgagtactcgctcacaccacaagaggagcgca

SEQ ID NO: 5809 - DNA, 55 bp, Artificial
  Synthetic oligonucleotide
acacgctgagcaaacgaccttgtcccgccatgaaagccacacattcggccaccgt

SEQ ID NO: 5810 - DNA, 55 bp, Artificial
  Synthetic oligonucleotide
cgcgttatgtgccgactgtgcatggggagcccgtacatctggacagcacccgaga

SEQ ID NO: 5811 - DNA, 55 bp, Artificial
  Synthetic oligonucleotide
atctgcacgagaggtgacgtacaagtagccgcctgcccctccgtttgttcggccg

SEQ ID NO: 5812 - DNA, 55 bp, Artificial
  Synthetic oligonucleotide
tttggagccgctgcgccaaccttacccgcatgaggacgcgccgctgtccctatca

SEQ ID NO: 5813 - DNA, 57 bp, Artificial
  Synthetic oligonucleotide
gtcatccagttcctctggggcaccgcgccgtctcccctatgcagcagcttggcccac

SEQ ID NO: 5814 - DNA, 55 bp, Artificial
  Synthetic oligonucleotide
tacgatcaacagtacgcgtcgctcgtctctctcctgcgccggtatgggtgcgagc

SEQ ID NO: 5815 - DNA, 55 bp, Artificial
  Synthetic oligonucleotide
tttccagtcgtctacgcgccgcctgcctactacgccatgagccccatcaagccca

SEQ ID NO: 5816 - DNA, 55 bp, Artificial
  Synthetic oligonucleotide
tcggtctgccaattacaccgccaactgtaagcccctcgtccaacccacatacaaa

SEQ ID NO: 5817 - DNA, 55 bp, Artificial
  Synthetic oligonucleotide
gggtctggtgtaattcacgagcatgatccgcgtctgcttccacctcggggccgtg

SEQ ID NO: 5818 - DNA, 55 bp, Artificial
  Synthetic oligonucleotide
acccgcgagcaccagccccggtcgtctgatgatgaatgttcggacccctagggtt

SEQ ID NO: 5819 - DNA, 55 bp, Artificial
  Synthetic oligonucleotide
ggagcgccttccacgtccagtatcacgcgccctttcagtagcagttcggccagca

SEQ ID NO: 5820 - DNA, 52 bp, Artificial
  Synthetic oligonucleotide
ggagccccgcccgaaaagtccacagccaggtccgtctctctgcccaccacgt

SEQ ID NO: 5821 - DNA, 55 bp, Artificial
  Synthetic oligonucleotide
accttgccaacgtacgtcacacaaccacgtcacaccatagacacattccgctccc

SEQ ID NO: 5822 - DNA, 55 bp, Artificial
  Synthetic oligonucleotide
gccgtcatcgaagcggggtccagccgagtcagaaacacgaaacacctcctggcca

SEQ ID NO: 5823 - DNA, 55 bp, Artificial
  Synthetic oligonucleotide
gggccacgtgtttctgtccagtcccgtcgtttgagccagtaggccgcagcaagac

SEQ ID NO: 5824 - DNA, 59 bp, Artificial
  Synthetic oligonucleotide
acatcaatagaaggctaccacaaccttgactgccgctgcggagactggtacggacacct

SEQ ID NO: 5825 - DNA, 60 bp, Artificial
  Synthetic oligonucleotide
aagtgcgcagacgaatggctgagtttatgccgcaggtggtagacacgaacacccgctgag

SEQ ID NO: 5826 - DNA, 60 bp, Artificial
  Synthetic oligonucleotide
gcctagcatacatccaggtatgatggccctcaacaaaagagccaggtggatacctagctt

SEQ ID NO: 5827 - DNA, 54 bp, Artificial
  Synthetic oligonucleotide
acaagtagcaagtgcctcatagaaaacttacccctgtgggcctcagtatacgga

SEQ ID NO: 5828 - DNA, 55 bp, Artificial
  Synthetic oligonucleotide
ggctggagaaggcgctactaccgctacagaccgcgttactatcggagaagatggc

SEQ ID NO: 5829 - DNA, 53 bp, Artificial
  Synthetic oligonucleotide
aaaagaaactcgtactgactcagtggaacccggcagtagttaagaggtgcaac

SEQ ID NO: 5830 - DNA, 51 bp, Artificial
  Synthetic oligonucleotide
tttgccacagaagctcaactaggtagaatacctgcatttaaccctgatggc

SEQ ID NO: 5831 - DNA, 55 bp, Artificial
  Synthetic oligonucleotide
cccattatcatatacgtagatcagaaggaccagcaggcacgtaaaaaatactgcg

SEQ ID NO: 5832 - DNA, 59 bp, Artificial
  Synthetic oligonucleotide
gactttgttggccatcttaatcatctggcaactactctgggtcgtcctccacgtcctgg

SEQ ID NO: 5833 - DNA, 60 bp, Artificial
  Synthetic oligonucleotide
taagatgcccatacactgaacccatgctaatagaccactcagacccaaacaaaggcttcg

SEQ ID NO: 5834 - DNA, 55 bp, Artificial
  Synthetic oligonucleotide
ctgaacccatgctaatagaccactcagacccaaacaaaggcttcgtaccctactc

SEQ ID NO: 5835 - DNA, 60 bp, Artificial
  Synthetic oligonucleotide
aacggaggcccagctagcagggatattcaagcgtcctatgcgcttctatccctcagacac

SEQ ID NO: 5836 - DNA, 50 bp, Artificial
  Synthetic oligonucleotide
cccgaaagtgctatcatggccagtagaaggaaactggaccacgagtaaca

SEQ ID NO: 5837 - DNA, 57 bp, Artificial
  Synthetic oligonucleotide
ccctaggacaatgcatattattaggaacagtaacagactatacaccaggaacccaac

SEQ ID NO: 5838 - DNA, 55 bp, Artificial
  Synthetic oligonucleotide
gacttaaacgcgccgcaataaactcaaggcctgcaaaatttcactctcggtgtcc

SEQ ID NO: 5839 - DNA, 60 bp, Artificial
  Synthetic oligonucleotide
tgattatgtggcagcccccagtgcataatgtacccggcatcgagagaaactggtacgaga

SEQ ID NO: 5840 - DNA, 60 bp, Artificial
  Synthetic oligonucleotide
tgcacccttcacagaaagctaagccatctgtgagaggtatgtggagaccccccaggcgaa

SEQ ID NO: 5841 - DNA, 60 bp, Artificial
  Synthetic oligonucleotide
actgagatataggccgctgcagtgggacactgaaaaacagtggagagtaaaagcagatta

SEQ ID NO: 5842 - DNA, 60 bp, Artificial
  Synthetic oligonucleotide
ccaccaagtagagacacaacgcagtggcaatttcaaacagatttctgcaaacgaccgcta

SEQ ID NO: 5843 - DNA, 55 bp, Artificial
  Synthetic oligonucleotide
acgcagtggcaatttcaaacagatttctgcaaacgaccgctattcacctgggcgg

SEQ ID NO: 5844 - DNA, 55 bp, Artificial
  Synthetic oligonucleotide
cctcctagccggagaacgtgcactataactgggttctggccgttgagctacggac

SEQ ID NO: 5845 - DNA, 51 bp, Artificial
  Synthetic oligonucleotide
cagggcactctgcatactaagacaaaacatgaaactaggcccacaaccaat

SEQ ID NO: 5846 - DNA, 60 bp, Artificial
  Synthetic oligonucleotide
cccagacacagaaactacagctacgtagtgttcatcaccagagggccaaacgacatccta

SEQ ID NO: 5847 - DNA, 60 bp, Artificial
  Synthetic oligonucleotide
aatggctacatagactacgtcacaaaccacagcacacacagcccactaaactgggtagtc

SEQ ID NO: 5848 - DNA, 55 bp, Artificial
  Synthetic oligonucleotide
cacaaaccacagcacacacagcccactaaactgggtagtctcagtcttctgccct

SEQ ID NO: 5849 - DNA, 55 bp, Artificial
  Synthetic oligonucleotide
ctgggtagtctcagtcttctgcccttacacagacccgccaatgaccaacgtaatc

SEQ ID NO: 5850 - DNA, 55 bp, Artificial
  Synthetic oligonucleotide
gggaccccgctgggtgttccactcctttgactggcgaaggggctatcttagcgag

SEQ ID NO: 5851 - DNA, 60 bp, Artificial
  Synthetic oligonucleotide
gagtagtagtcagatgcccctacaccgagcccatgctaatagaccactcagaccccaaca

SEQ ID NO: 5852 - DNA, 60 bp, Artificial
  Synthetic oligonucleotide
caaatgtgtactatcagacttgccactgtggagcatgttttatggctatgtagattttat

SEQ ID NO: 5853 - DNA, 60 bp, Artificial
  Synthetic oligonucleotide
agctacaaagatgactctgtaatgactggcataaccgcaggctacaagtttaaattctca

SEQ ID NO: 5854 - DNA, 55 bp, Artificial
  Synthetic oligonucleotide
ctgtaatgactggcataaccgcaggctacaagtttaaattctcatggggcggtga

SEQ ID NO: 5855 - DNA, 59 bp, Artificial
  Synthetic oligonucleotide
ctatgcctaccactctgacgactccacaaagcagccggacccctttgggggcgcgctga

SEQ ID NO: 5856 - DNA, 60 bp, Artificial
  Synthetic oligonucleotide
taaggtcaccaagcactccgagcgcagcgaggagtgcgacccttctctctgtacaccccc

SEQ ID NO: 5857 - DNA, 56 bp, Artificial
  Synthetic oligonucleotide
tgctacgtcactaacccacgtgtcctctacaggccaatcgcagtctatgtcgtgca

SEQ ID NO: 5858 - DNA, 55 bp, Artificial
  Synthetic oligonucleotide
aaagtggtaccccacagtactacaccagcaacaggtaatggaggacataagcagg

SEQ ID NO: 5859 - DNA, 52 bp, Artificial
  Synthetic oligonucleotide
tttgagccccagggtcccaaacccatacagggctacaacgattggttagaag

SEQ ID NO: 5860 - DNA, 60 bp, Artificial
  Synthetic oligonucleotide
gatgggctacttagtacaatacggtggtggatggggcagcggacagataactctagagga

SEQ ID NO: 5861 - DNA, 51 bp, Artificial
  Synthetic oligonucleotide
cgtcataactaggcggggactaaaacctatataactaacagtacttccgaa

SEQ ID NO: 5862 - DNA, 50 bp, Artificial
  Synthetic oligonucleotide
ggaccatacacagctaaattaccagctggtacctcaatagaaggtcacat

SEQ ID NO: 5863 - DNA, 60 bp, Artificial
  Synthetic oligonucleotide
gccatacaaggaggatacgtagcatatgcaggcgctaaaataccaggagcgggatcaata

SEQ ID NO: 5864 - DNA, 57 bp, Artificial
  Synthetic oligonucleotide
gggatcaataacaaacttatttcacgatgcatggccaggagaccaaaactggccacc

SEQ ID NO: 5865 - DNA, 51 bp, Artificial
  Synthetic oligonucleotide
tggctgacggtagcgtactgcgcccacggattactctgcgactgtaaagac

SEQ ID NO: 5866 - DNA, 60 bp, Artificial
  Synthetic oligonucleotide
agagcactatgtatactcagagataacatgcacctaggaactcaagaattagacgatgaa

SEQ ID NO: 5867 - DNA, 55 bp, Artificial
  Synthetic oligonucleotide
ctcagagataacatgcacctaggaactcaagaattagacgatgaactagctatgt

SEQ ID NO: 5868 - DNA, 50 bp, Artificial
  Synthetic oligonucleotide
gctacgtcactaaccacgtgcacttcacaggccaaccagagcctatgtcg

SEQ ID NO: 5869 - DNA, 60 bp, Artificial
  Synthetic oligonucleotide
cactcctaacgatctttgcctctgcggcggatatgcaatatccgttcggctcaccactaa

SEQ ID NO: 5870 - DNA, 55 bp, Artificial
  Synthetic oligonucleotide
tctttgcctctgcggcggatatgcaatatccgttcggctcaccactaactgacac

SEQ ID NO: 5871 - DNA, 60 bp, Artificial
  Synthetic oligonucleotide
ggctgagtttactgcgtcagccggactggtgacaggacgtgcgaacggaggtgagtagtc

SEQ ID NO: 5872 - DNA, 58 bp, Artificial
  Synthetic oligonucleotide
tcctatcacgttacaaaagaaagtggggacgaagatcccgaagaggtcatggcatcta

SEQ ID NO: 5873 - DNA, 55 bp, Artificial
  Synthetic oligonucleotide
aattactagagataatccatgccctaagcggcccagacccctgggaatccgatgg

SEQ ID NO: 5874 - DNA, 55 bp, Artificial
  Synthetic oligonucleotide
ccagacctctttgtagacaagtggtacactcaagaggatctgtgttccgttaatc

SEQ ID NO: 5875 - DNA, 50 bp, Artificial
  Synthetic oligonucleotide
aaaccctatgttattaaaccagcgataaaccaggtgtacttgttcccaga

SEQ ID NO: 5876 - DNA, 52 bp, Artificial
  Synthetic oligonucleotide
tagggggcgcaattgggatcgttagaaaactatggccgagcatggggggggc

SEQ ID NO: 5877 - DNA, 56 bp, Artificial
  Synthetic oligonucleotide
ttataagacgctgctacgtcatagggtacttaccacttatattctgcggcgaaaat

SEQ ID NO: 5878 - DNA, 51 bp, Artificial
  Synthetic oligonucleotide
actcagacccaaacaaaggcttcgttccctactcatttaactttggcaacg

SEQ ID NO: 5879 - DNA, 50 bp, Artificial
  Synthetic oligonucleotide
taccccagaggtcacgtggcactcgtgggacattagacgaggactctttg

SEQ ID NO: 5880 - DNA, 56 bp, Artificial
  Synthetic oligonucleotide
taacgatgaactagaacttgtaaggtacctaggctgtagctttaccttgtacagag

SEQ ID NO: 5881 - DNA, 50 bp, Artificial
  Synthetic oligonucleotide
gtcaaaaggaaacgatggaatggacttagtgagatacttcggctgcatag

SEQ ID NO: 5882 - DNA, 56 bp, Artificial
  Synthetic oligonucleotide
aggaaatcatgtatacgtagtaatgctgtcagctgacgcagaggataacccaggag

SEQ ID NO: 5883 - DNA, 60 bp, Artificial
  Synthetic oligonucleotide
aacaggtatccgcgatccctgcattgatacaccagcctatcctgtgccacagtcaggaag

SEQ ID NO: 5884 - DNA, 55 bp, Artificial
  Synthetic oligonucleotide
cgtggatccacgagagtcactgcaagtgcggtaactggagaaaccacctgtggac

SEQ ID NO: 5885 - DNA, 60 bp, Artificial
  Synthetic oligonucleotide
ggatccacgaaactcactgcaagtgcggtaactggagaaaccacctctggacactatgcg

SEQ ID NO: 5886 - DNA, 60 bp, Artificial
  Synthetic oligonucleotide
ctatataactaactacacttccgaatggctgagtttatgccgccagacgaagacaggatc

SEQ ID NO: 5887 - DNA, 55 bp, Artificial
  Synthetic oligonucleotide
gtgagtggggccagacttcgccataaggcctttatcttctcgccattggatagtg

SEQ ID NO: 5888 - DNA, 52 bp, Artificial
  Synthetic oligonucleotide
gtggggccagacttcgccataaggcctttatcttctcgccatttgtcagtgt

SEQ ID NO: 5889 - DNA, 60 bp, Artificial
  Synthetic oligonucleotide
tccccatttagagtatataagtaagtgcgcagacgaatggctgagtttatgccgcaggtg

SEQ ID NO: 5890 - DNA, 55 bp, Artificial
  Synthetic oligonucleotide
ggcaacgggtacatacccatagcctacagatttcagtggtacccttgcatgttcc

SEQ ID NO: 5891 - DNA, 51 bp, Artificial
  Synthetic oligonucleotide
ttttacgcagacaggaacccgggaactacgtacagagtgaccctcctaagc

SEQ ID NO: 5892 - DNA, 55 bp, Artificial
  Synthetic oligonucleotide
ctagcacacatgttccggcgtttccctaggcagctgccctacccagacgagatac

SEQ ID NO: 5893 - DNA, 53 bp, Artificial
  Synthetic oligonucleotide
ggcgacatgtattacccacaggtcgttaaaaacccctgtggagactccggaat

SEQ ID NO: 5894 - DNA, 57 bp, Artificial
  Synthetic oligonucleotide
atgcaaatcggacatcggaatagagaaatcgaacatcgattatgcaaatgagcccgc

SEQ ID NO: 5895 - DNA, 60 bp, Artificial
  Synthetic oligonucleotide
gagcactaccaaactaccccacaataatgtccacagacctatatgaataccactcaggca

SEQ ID NO: 5896 - DNA, 60 bp, Artificial
  Synthetic oligonucleotide
tactttcagcacgacatttgcgacatgaccttacttaacataaatgccgttgcggctgac

SEQ ID NO: 5897 - DNA, 55 bp, Artificial
  Synthetic oligonucleotide
cgacatttgcgacatgaccttacttaacataaatgccgttgcggctgacttgcgg

SEQ ID NO: 5898 - DNA, 55 bp, Artificial
  Synthetic oligonucleotide
aaccgggcccccctcgatggaagaaagatggctgacggtagcgtactgcgcacac

SEQ ID NO: 5899 - DNA, 55 bp, Artificial
  Synthetic oligonucleotide
ggaccccacctcgcaatgatcaacagtaccttaactggcaatggtactcaagtgt

SEQ ID NO: 5900 - DNA, 60 bp, Artificial
  Synthetic oligonucleotide
taactggcaatggtactcaagtgtacttagcccccacgctgctatgtgcgggtgtcccga

SEQ ID NO: 5901 - DNA, 56 bp, Artificial
  Synthetic oligonucleotide
accgcattagcgcgtggaaccctaaggttctaagaaactgccgcatcacaggatgg

SEQ ID NO: 5902 - DNA, 60 bp, Artificial
  Synthetic oligonucleotide
cacttccgaatggctgagtttatgccgccagacggagacgggatcacttcagtgactcca

SEQ ID NO: 5903 - DNA, 60 bp, Artificial
  Synthetic oligonucleotide
gagcatgaaacaacttcgttacagagtccagggacagcccccgaaagcatcctatactca

SEQ ID NO: 5904 - DNA, 58 bp, Artificial
  Synthetic oligonucleotide
cctatactcatttgacttcagacatggagactacacaacaaaagctcttgcaagaatt

SEQ ID NO: 5905 - DNA, 50 bp, Artificial
  Synthetic oligonucleotide
tacgtcactaaccacgtgcgttccacagaccaaccctatactatgtcgtg

SEQ ID NO: 5906 - DNA, 60 bp, Artificial
  Synthetic oligonucleotide
acgtcctcatataaatgactgcacttccgaatggctgagtttatgctgcccgtccgcaga

SEQ ID NO: 5907 - DNA, 57 bp, Artificial
  Synthetic oligonucleotide
ggcaacatatacacagcacccatgatgcatccgggagccctaatgctcagcaaacac

SEQ ID NO: 5908 - DNA, 60 bp, Artificial
  Synthetic oligonucleotide
tacacttccgggttcaggaggctcaatttggctagcttcgctcgcaccacgtttgctgcc

SEQ ID NO: 5909 - DNA, 55 bp, Artificial
  Synthetic oligonucleotide
caagtgtacttagctcccacgctgctatgtgcgggtgtcccgacgctgtcgctca

SEQ ID NO: 5910 - DNA, 55 bp, Artificial
  Synthetic oligonucleotide
tttacactatataactaagtgtactgacgaatggctgagtttaccccgctagacg

SEQ ID NO: 5911 - DNA, 53 bp, Artificial
  Synthetic oligonucleotide
gtaaacctaatatggaacagccatgatcttatctgtggctgcaacaacccctg

SEQ ID NO: 5912 - DNA, 58 bp, Artificial
  Synthetic oligonucleotide
tagacgccctagaacatatatatttgacccccctgactataacctgtctgtaattgaa

SEQ ID NO: 5913 - DNA, 53 bp, Artificial
  Synthetic oligonucleotide
agatgacgtaggagggcgtactctgtaaacacggaagtaggccccgacacgtg

SEQ ID NO: 5914 - DNA, 50 bp, Artificial
  Synthetic oligonucleotide
atacaaggtggatatgtagcatatgcaggatccggggtcataggagcagg

SEQ ID NO: 5915 - DNA, 55 bp, Artificial
  Synthetic oligonucleotide
ctatataagtaagtggggtgtcgaatggctgagtttaccccgctagacggtgcag

SEQ ID NO: 5916 - DNA, 52 bp, Artificial
  Synthetic oligonucleotide
caacaagagccgtccctctcagcccatctcctacaaagtgtgcttcgatctg

SEQ ID NO: 5917 - DNA, 55 bp, Artificial
  Synthetic oligonucleotide
ctatataaccaactacagtgacgaatggctgagtttaccccgctagacggtgcag

SEQ ID NO: 5918 - DNA, 50 bp, Artificial
  Synthetic oligonucleotide
caacacatgcatattcatgggcaccaccctcaaaagataagcaactactt

SEQ ID NO: 5919 - DNA, 55 bp, Artificial
  Synthetic oligonucleotide
cccggcaatagttaagaggtgcaacattaagggcggacttccaataattatatgc

SEQ ID NO: 5920 - DNA, 60 bp, Artificial
  Synthetic oligonucleotide
aatatgctttggatacactgactatgtagagactcaactaggacccaatgtggaccatga

SEQ ID NO: 5921 - DNA, 52 bp, Artificial
  Synthetic oligonucleotide
aagtacgtcactaaccacgtgacttctttcagcgaaccaatgtgctatgtcg

SEQ ID NO: 5922 - DNA, 56 bp, Artificial
  Synthetic oligonucleotide
aaatctaggagcaggatcaataggaaatttgtaccaacaaggatggccatctaatc

SEQ ID NO: 5923 - DNA, 55 bp, Artificial
  Synthetic oligonucleotide
gccattggacactgaggggacatacagcaacgaaagtgagtggggccagacttcg

SEQ ID NO: 5924 - DNA, 55 bp, Artificial
  Synthetic oligonucleotide
gcaagtgcggtaactggagaaaccacctctggacactatgcgctttagacgacgc

SEQ ID NO: 5925 - DNA, 60 bp, Artificial
  Synthetic oligonucleotide
tattaaacagactccgagatgccattggacactgaggggacatacagcaacgaaagtgag

SEQ ID NO: 5926 - DNA, 55 bp, Artificial
  Synthetic oligonucleotide
cgagatgccattggacactgaggggacatacagcaacgaaagtgagtggggccag

SEQ ID NO: 5927 - DNA, 60 bp, Artificial
  Synthetic oligonucleotide
tttttgcggttgtggcgatcctgttaggcatctcgctagtatttctgctgctgtgggcta

SEQ ID NO: 5928 - DNA, 60 bp, Artificial
  Synthetic oligonucleotide
ttccggggtcaaaggttgctgctacgtcatcgagacacgtggtgccagcagctgtaaacc

SEQ ID NO: 5929 - DNA, 55 bp, Artificial
  Synthetic oligonucleotide
gctgctacgtcatcgagacacgtggtgccagcagctgtaaacccggaagtcgctg

SEQ ID NO: 5930 - DNA, 51 bp, Artificial
  Synthetic oligonucleotide
ttatagataaatggacatacatgcagtatcacccatacatgttactacaaa

SEQ ID NO: 5931 - DNA, 60 bp, Artificial
  Synthetic oligonucleotide
tatcagggatccctgctctgataacccagcctatcctgtgccacagtcaggaagtattac

SEQ ID NO: 5932 - DNA, 55 bp, Artificial
  Synthetic oligonucleotide
ctgctctgataacccagcctatcctgtgccacagtcaggaagtattacacacccc

SEQ ID NO: 5933 - DNA, 51 bp, Artificial
  Synthetic oligonucleotide
cctataactcagtggaacccctccgtggtcagaaaatgcgtggtaaccgga

SEQ ID NO: 5934 - DNA, 50 bp, Artificial
  Synthetic oligonucleotide
gaatggctgagtttatgccgccagacggagactggagcagttcactgatt

SEQ ID NO: 5935 - DNA, 60 bp, Artificial
  Synthetic oligonucleotide
ctccagtgcgacgtggatccacgagactcactgcaagtgcggtaactggagaaaccacct

SEQ ID NO: 5936 - DNA, 53 bp, Artificial
  Synthetic oligonucleotide
tccgggtcaaaggtcaccggcgccatattacatcacgtgacctttgacgttac

SEQ ID NO: 5937 - DNA, 51 bp, Artificial
  Synthetic oligonucleotide
ccctgcacttctaacccgacctatcctgtcagaatggtcggagcagttaca

SEQ ID NO: 5938 - DNA, 55 bp, Artificial
  Synthetic oligonucleotide
gtcacagtcacatgacagccgccatattgggtgcggctaggcgttaccaaaaaaa

SEQ ID NO: 5939 - DNA, 55 bp, Artificial
  Synthetic oligonucleotide
aacaaggccgtgggagtttcacttgtcggtgtctgcttattaaggtcaccaagca

SEQ ID NO: 5940 - DNA, 60 bp, Artificial
  Synthetic oligonucleotide
atcaggtccgtatgtagcaagacaagacggacctagatgcacatgggaactgcactgtga

SEQ ID NO: 5941 - DNA, 52 bp, Artificial
  Synthetic oligonucleotide
atctcggaccccccctcgacccgaatcgctcgcgcgattcggacctgcggcc

SEQ ID NO: 5942 - DNA, 55 bp, Artificial
  Synthetic oligonucleotide
agtaatgtggaccccacctcgcaatgatcaacactaccttaactggcaatggtac

SEQ ID NO: 5943 - DNA, 53 bp, Artificial
  Synthetic oligonucleotide
gaccctgttgggcgtattaaccgcattgctcaccgctttcctaacgccggtcc

SEQ ID NO: 5944 - DNA, 56 bp, Artificial
  Synthetic oligonucleotide
agactaagacggggcagacgcagagggcgacgaaagagacacagaccgaccctaat

SEQ ID NO: 5945 - DNA, 59 bp, Artificial
  Synthetic oligonucleotide
tcgggcttgggactggccgggctgtgggcaaggctctgtggacgctcttaatatgcacc

SEQ ID NO: 5946 - DNA, 60 bp, Artificial
  Synthetic oligonucleotide
tcccgtgttcctgcacccaggcagatcaaacattcaaatgtggacagcatacagggacat

SEQ ID NO: 5947 - DNA, 54 bp, Artificial
  Synthetic oligonucleotide
acgacttggtagtgtgcggaccgtgggcttacagggacgacgaaaagagcgtgc

SEQ ID NO: 5948 - DNA, 54 bp, Artificial
  Synthetic oligonucleotide
caatctatcattcctacaccccttcaaaatggcggcgggtcacaaaatggcgga

SEQ ID NO: 5949 - DNA, 55 bp, Artificial
  Synthetic oligonucleotide
tctaaactatataactaactacagtgacgaatggctgagtttaccccgctagacg

SEQ ID NO: 5950 - DNA, 53 bp, Artificial
  Synthetic oligonucleotide
aagacggacctttcgggggggggatgactaccatgcaatttagcctcagaata

SEQ ID NO: 5951 - DNA, 60 bp, Artificial
  Synthetic oligonucleotide
ggtacagccaaacagatatctgcgacgttattcttgcaacagtgtatgcaaccgcatgtg

SEQ ID NO: 5952 - DNA, 60 bp, Artificial
  Synthetic oligonucleotide
agagtatataagtaagtgcgcagacgaatggctgagtttatgccgcaggtggtagacacg

SEQ ID NO: 5953 - DNA, 60 bp, Artificial
  Synthetic oligonucleotide
gcagctgctgtaaacccggaagtagctgacccgcgtgactggtcacgtgacctgacgtca

SEQ ID NO: 5954 - DNA, 55 bp, Artificial
  Synthetic oligonucleotide
aaacccggaagtagctgacccgcgtgactggtcacgtgacctgacgtcacagccg

SEQ ID NO: 5955 - DNA, 54 bp, Artificial
  Synthetic oligonucleotide
gtgacttacaacccatacgctgacaaaggagtaggcaacagaatatgggtcgac

SEQ ID NO: 5956 - DNA, 54 bp, Artificial
  Synthetic oligonucleotide
atagctacgtttcttggtaggcctcacagaaagaaaaggcgtctgttactgtct

SEQ ID NO: 5957 - DNA, 60 bp, Artificial
  Synthetic oligonucleotide
acaatggcagccagccatgacgagacgctgttttataaggggacacatgcccgctttaat

SEQ ID NO: 5958 - DNA, 60 bp, Artificial
  Synthetic oligonucleotide
cagctagccaaacctgtactagcatttagatacaatgcacaactagacaatggcaaaggt

SEQ ID NO: 5959 - DNA, 60 bp, Artificial
  Synthetic oligonucleotide
cttgtcggtgtctacctctaaaggtcactaagcactccgagcgcaagcgaggagtgcgac

SEQ ID NO: 5960 - DNA, 60 bp, Artificial
  Synthetic oligonucleotide
ttagacacgcacctcaccgcggccagcatacacccgggcattatgatgctcagcaagaga

SEQ ID NO: 5961 - DNA, 50 bp, Artificial
  Synthetic oligonucleotide
gcatggacttagtgagatactttggctgtgtagtatacctctacccgctt

SEQ ID NO: 5962 - DNA, 53 bp, Artificial
  Synthetic oligonucleotide
cagacaaccaccatttatattagataagcttacatatccactatgtcacccac

SEQ ID NO: 5963 - DNA, 53 bp, Artificial
  Synthetic oligonucleotide
gaaaaatgaaccactggagtttcaggtataccctccagaaccaactaacttgt

SEQ ID NO: 5964 - DNA, 55 bp, Artificial
  Synthetic oligonucleotide
tacctctaaaggtcactaagcactccgagcgcaagcgaggagtgcgaccctcccc

SEQ ID NO: 5965 - DNA, 60 bp, Artificial
  Synthetic oligonucleotide
tgttcacttgtcagtgtctacctctataagtcactaagcactccaagcgtagcaaagagt

SEQ ID NO: 5966 - DNA, 55 bp, Artificial
  Synthetic oligonucleotide
cagtgtctacctctataagtcactaagcactccaagcgtagcaaagagtgcgacc

SEQ ID NO: 5967 - DNA, 60 bp, Artificial
  Synthetic oligonucleotide
aggcgagtacattagcaataggagatcttcaaggactagtactgcgtcagcttatgaatc

SEQ ID NO: 5968 - DNA, 50 bp, Artificial
  Synthetic oligonucleotide
acagcatcagagttcacggcagcattcagagcagactggtggcctccagg

SEQ ID NO: 5969 - DNA, 60 bp, Artificial
  Synthetic oligonucleotide
tgcggacacaccagagcaggtagaaactatgcccttcacagcgaggactttaccactcag

SEQ ID NO: 5970 - DNA, 52 bp, Artificial
  Synthetic oligonucleotide
acaccagacacctaaacaggtggtcgtaccccaacgaccagctagacctagc

SEQ ID NO: 5971 - DNA, 57 bp, Artificial
  Synthetic oligonucleotide
tagacagtggtactggactcaactaacatcctggacacaaacagtaccccacataaa

SEQ ID NO: 5972 - DNA, 60 bp, Artificial
  Synthetic oligonucleotide
gcacaagtggtacactcagtcagacctgtgttccgttagtctggtgcaacttaacctgac

SEQ ID NO: 5973 - DNA, 58 bp, Artificial
  Synthetic oligonucleotide
cgagtttaccttgtggaaggatgggtcaaattgtgacgatgtttgaggctttgcctca

SEQ ID NO: 5974 - DNA, 60 bp, Artificial
  Synthetic oligonucleotide
gttgagatcaatcctggtcgagcattctccacgtccttcaacaatatcccatggcagtac

SEQ ID NO: 5975 - DNA, 55 bp, Artificial
  Synthetic oligonucleotide
ctggtcgagcattctccacgtccttcaacaatatcccatggcagtacttgctctg

SEQ ID NO: 5976 - DNA, 55 bp, Artificial
  Synthetic oligonucleotide
cgacaggaccaactgggtcttgaagtttgtgcaaatctgctgcggactaagtccc

SEQ ID NO: 5977 - DNA, 60 bp, Artificial
  Synthetic oligonucleotide
gataggaccagctgggtcttgaagtttgtgcaaatctgctgcggactaagtcctaattcc

SEQ ID NO: 5978 - DNA, 60 bp, Artificial
  Synthetic oligonucleotide
aatcaaaagacagtccgagagccagcctgatcccagatgccacacatctagggccacagt

SEQ ID NO: 5979 - DNA, 51 bp, Artificial
  Synthetic oligonucleotide
gtctgactcagttttgcagaccctggaggtagtgaagctacggcatcaaag

SEQ ID NO: 5980 - DNA, 60 bp, Artificial
  Synthetic oligonucleotide
tcttaaaggatgatgcgcagccaagtttagccaagaatactcaaggtcagactcagatgg

SEQ ID NO: 5981 - DNA, 53 bp, Artificial
  Synthetic oligonucleotide
ttagagcgattgtccatcagaacatttaaactctccacccctgataatctacc

SEQ ID NO: 5982 - DNA, 60 bp, Artificial
  Synthetic oligonucleotide
ctgtcctctgttcatccagcccaaccatactcgacaactatactcaatgtataaaaggct

SEQ ID NO: 5983 - DNA, 53 bp, Artificial
  Synthetic oligonucleotide
ttgtgtaaaatcaagggagtctgcaatgagctttgcatcattgaggacacttg

SEQ ID NO: 5984 - DNA, 53 bp, Artificial
  Synthetic oligonucleotide
tatggtcttagtgggcctgacatctacaagggagtttaccaatttaagtcagt

SEQ ID NO: 5985 - DNA, 56 bp, Artificial
  Synthetic oligonucleotide
gagggtctcagagtgtcacgacatttggacctctgaagatcaggtcatgtggcaag

SEQ ID NO: 5986 - DNA, 55 bp, Artificial
  Synthetic oligonucleotide
aggtcctcactattgcttggcttaattaagatggattccaacatgttgcccccat

SEQ ID NO: 5987 - DNA, 53 bp, Artificial
  Synthetic oligonucleotide
gtactgcttacctgcaggttggaacaatgccatctcaacagggtcagtggctg

SEQ ID NO: 5988 - DNA, 57 bp, Artificial
  Synthetic oligonucleotide
atttaatcatctgtatgaaatctttacggtcctcagtcccaccaatgaaatctgaat

SEQ ID NO: 5989 - DNA, 52 bp, Artificial
  Synthetic oligonucleotide
gcgcaccggggatcctaggcttttaactaacgcattacagagggattcaacc

SEQ ID NO: 5990 - DNA, 60 bp, Artificial
  Synthetic oligonucleotide
ccacattaatggccttgtgaaactctctatcttaaggcacgaactggagcagtatgtgac

SEQ ID NO: 5991 - DNA, 55 bp, Artificial
  Synthetic oligonucleotide
aactctctatcttaaggcacgaactggagcagtatgtgacccctttccaccttgc

SEQ ID NO: 5992 - DNA, 53 bp, Artificial
  Synthetic oligonucleotide
aatcccctcaattgttagcgagtctgagttgtgagtgcagttgttagcttccg

SEQ ID NO: 5993 - DNA, 60 bp, Artificial
  Synthetic oligonucleotide
gggaggatctcatggtcattagtgagtcaacttccctattcaggtcccttaagctggtga

SEQ ID NO: 5994 - DNA, 60 bp, Artificial
  Synthetic oligonucleotide
tatcagcgaggaggtctgctttgacacttgtggtccagttagagagtccccttctcaggg

SEQ ID NO: 5995 - DNA, 60 bp, Artificial
  Synthetic oligonucleotide
cttctcagggattgggtccagcggaaggatgggatcagttggtcactcatgttgatcaat

SEQ ID NO: 5996 - DNA, 55 bp, Artificial
  Synthetic oligonucleotide
ggtccagcggaaggatgggatcagttggtcactcatgttgatcaatctgcgcggg

SEQ ID NO: 5997 - DNA, 55 bp, Artificial
  Synthetic oligonucleotide
agccattgcacacacaaggactttcagttgctaaacattaatcaacaggactgtc

SEQ ID NO: 5998 - DNA, 60 bp, Artificial
  Synthetic oligonucleotide
ccttccaggcatcagtcgcttcaggattcattgggttctgtgagagtgtcggaagcaagt

SEQ ID NO: 5999 - DNA, 51 bp, Artificial
  Synthetic oligonucleotide
ggaagcaagtgtgttagagatggcagtggaggattcttatacattagagag

SEQ ID NO: 6000 - DNA, 53 bp, Artificial
  Synthetic oligonucleotide
gaggattgtggaggacatcgactaacatgacagccgccaccgacggaggcccg

SEQ ID NO: 6001 - DNA, 60 bp, Artificial
  Synthetic oligonucleotide
agatcctgtgatggtgaatacaagatcgataggagacatgtcctgtcacatgtagagttt

SEQ ID NO: 6002 - DNA, 54 bp, Artificial
  Synthetic oligonucleotide
tgtagagtttaacctaactaggatgtttgacaatctgccacaatcctgctctat

SEQ ID NO: 6003 - DNA, 60 bp, Artificial
  Synthetic oligonucleotide
ccaattggggtgtgacatcgaggctccgtcaaggagttctagagctcaatcagtgaggct

SEQ ID NO: 6004 - DNA, 55 bp, Artificial
  Synthetic oligonucleotide
ccagtgtctgttaagtccacagtggtgttgtcccaagctctccctttgacctgtg

SEQ ID NO: 6005 - DNA, 53 bp, Artificial
  Synthetic oligonucleotide
agctctccctttgacctgtgatctagacccgatgtaaggccacccatcaccag

SEQ ID NO: 6006 - DNA, 60 bp, Artificial
  Synthetic oligonucleotide
tactgtcagagagcagattgcatgatgcaagagcacagctcacacttgaagtgcaactac

SEQ ID NO: 6007 - DNA, 55 bp, Artificial
  Synthetic oligonucleotide
gccgtaaagaagttagatcccactaatacactgtggcttgacatcgaaggacccc

SEQ ID NO: 6008 - DNA, 53 bp, Artificial
  Synthetic oligonucleotide
agcctcactgtgctctgctagattgcatcatgtatcagtcggtaatggacggc

SEQ ID NO: 6009 - DNA, 52 bp, Artificial
  Synthetic oligonucleotide
gccagtcatgtcctaaggcaattgagaaccagtggatggcccaacttgagtc

SEQ ID NO: 6010 - DNA, 53 bp, Artificial
  Synthetic oligonucleotide
gagaggttcacatagtcaagtctatcattctcctcacaattacaaggtgtagc

SEQ ID NO: 6011 - DNA, 60 bp, Artificial
  Synthetic oligonucleotide
accatgctctattaaggagtgagatctcaatgcctcttgcagttctagtctatccgtaga

SEQ ID NO: 6012 - DNA, 55 bp, Artificial
  Synthetic oligonucleotide
gagatctcaatgcctcttgcagttctagtctatccgtagatttgaagctctctgc

SEQ ID NO: 6013 - DNA, 54 bp, Artificial
  Synthetic oligonucleotide
ttgtactcccttaatatggcgttaactgtcttagatctgttgtggatgcaccta

SEQ ID NO: 6014 - DNA, 50 bp, Artificial
  Synthetic oligonucleotide
aagccgtgcccaaagcctcatcgtctcaaccatatgggtgtgtgtagctg

SEQ ID NO: 6015 - DNA, 60 bp, Artificial
  Synthetic oligonucleotide
ctgggagggcatctgcctacattacaaatgcgctcttggcttggaacactaatgtgtttg

SEQ ID NO: 6016 - DNA, 55 bp, Artificial
  Synthetic oligonucleotide
gggagggcatctgcctacattacaaatgcgctcttggcttggaacactagcgtgt

SEQ ID NO: 6017 - DNA, 59 bp, Artificial
  Synthetic oligonucleotide
tttgtctatcattgttcaacaatggctcactcgaagtgaaaccctcatcttcttgcgac

SEQ ID NO: 6018 - DNA, 60 bp, Artificial
  Synthetic oligonucleotide
tgcttgtgagctaggcaattgggtgtttcaaaaggctgaagtgccaaagatagtcactca

SEQ ID NO: 6019 - DNA, 58 bp, Artificial
  Synthetic oligonucleotide
gactgtgatggctatctactgttgaagcctcattctgtcgagtactatgttctcaatc

SEQ ID NO: 6020 - DNA, 60 bp, Artificial
  Synthetic oligonucleotide
gtgtccgcatatctcacagagatggcctctggagtgcatcttggttaagcatccaagaca

SEQ ID NO: 6021 - DNA, 60 bp, Artificial
  Synthetic oligonucleotide
ttaatctcaaatgggtcttacttgaatgagactaaattcagaactcagtggctgtcagag

SEQ ID NO: 6022 - DNA, 59 bp, Artificial
  Synthetic oligonucleotide
gtgcaattcccgaagggtcacacctatttctgaacccgacagatgctcaccggttctga

SEQ ID NO: 6023 - DNA, 55 bp, Artificial
  Synthetic oligonucleotide
attctcactgttcttccccatcacaggttccgccaggacccagacacccagctcg

SEQ ID NO: 6024 - DNA, 60 bp, Artificial
  Synthetic oligonucleotide
gccaagttaatagggtgctaacgtgatcctttccggagcgcacatactggtcatcaccca

SEQ ID NO: 6025 - DNA, 52 bp, Artificial
  Synthetic oligonucleotide
caaggtgcttagataatccatagtgttcaaaactgagtcccaccacagacag

SEQ ID NO: 6026 - DNA, 55 bp, Artificial
  Synthetic oligonucleotide
tttaactctaggtgaccacttcatcttagttgaagccaggtcgctcatgaatgga

SEQ ID NO: 6027 - DNA, 50 bp, Artificial
  Synthetic oligonucleotide
ttagttctaccgtctattaatgggagcattgtaattccaaccgtcatgag

SEQ ID NO: 6028 - DNA, 60 bp, Artificial
  Synthetic oligonucleotide
tacccactcgcatagcgactccagtcgagcccagcgcaccaccggaatgaggcagcagac

SEQ ID NO: 6029 - DNA, 55 bp, Artificial
  Synthetic oligonucleotide
agcgactccagtcgagcccagcgcaccaccggaatgaggcagcagacaaaccaca

SEQ ID NO: 6030 - DNA, 57 bp, Artificial
  Synthetic oligonucleotide
gttggtgaaggctgtccaaagccccacagacttagggcagattccacctgtgcatgt

SEQ ID NO: 6031 - DNA, 60 bp, Artificial
  Synthetic oligonucleotide
agacctccgttctttcctcatcactcgctgaacttgcgagacttgactgaagtcaagtcc

SEQ ID NO: 6032 - DNA, 51 bp, Artificial
  Synthetic oligonucleotide
caataagtctgactcaagctgggctgttcattggttctcaaatgctctagg

SEQ ID NO: 6033 - DNA, 51 bp, Artificial
  Synthetic oligonucleotide
catgtcacaaggcacattggtgcattatgcaggaccacttcaggtgcaggg

SEQ ID NO: 6034 - DNA, 52 bp, Artificial
  Synthetic oligonucleotide
acaggcaatcatgtccctggaggatattgtctagagcagtgggccattgttt

SEQ ID NO: 6035 - DNA, 50 bp, Artificial
  Synthetic oligonucleotide
acctccctgttcggccatacatgccaatgtgacagcaggcatagacccaa

SEQ ID NO: 6036 - DNA, 59 bp, Artificial
  Synthetic oligonucleotide
gtcagtgatgacatcagacttcacagggttagtccagttggaaagaccccgcctgagag

SEQ ID NO: 6037 - DNA, 60 bp, Artificial
  Synthetic oligonucleotide
ccacattgtcagaagtcatcctgggtttgtgcaaagcgtatccggatatgcctaggatcc

SEQ ID NO: 6038 - DNA, 60 bp, Artificial
  Synthetic oligonucleotide
acactctaataaaatgagggaattgtcaattagcttgtagccatcaggtatgataagtgg

SEQ ID NO: 6039 - DNA, 55 bp, Artificial
  Synthetic oligonucleotide
ggaattgtcaattagcttgtagccatcaggtatgataagtggtagtcctggacac

SEQ ID NO: 6040 - DNA, 60 bp, Artificial
  Synthetic oligonucleotide
tagagtccggagttgtgtgtccaggactaccacttatcatacctgatggctacaagctaa

SEQ ID NO: 6041 - DNA, 54 bp, Artificial
  Synthetic oligonucleotide
gtgtagcgctgcagatacaaactttgtgagaagagggacttcctccccccatac

SEQ ID NO: 6042 - DNA, 55 bp, Artificial
  Synthetic oligonucleotide
ttagtatacacaactggaatatagcaattgtgtgtatatcactttacccgacaac

SEQ ID NO: 6043 - DNA, 60 bp, Artificial
  Synthetic oligonucleotide
ccctctctaggtgtgaatccccccttagtcccatgatactgcagggctacacgctctcca

SEQ ID NO: 6044 - DNA, 56 bp, Artificial
  Synthetic oligonucleotide
gacaatgagtcgagtcctatgggtgtgctgtctcccttttttcgtcgacatatcca

SEQ ID NO: 6045 - DNA, 60 bp, Artificial
  Synthetic oligonucleotide
ggtgcactcgggcccgtaaatggcagaagtgcacctcctttgaataggacatagaggcga

SEQ ID NO: 6046 - DNA, 51 bp, Artificial
  Synthetic oligonucleotide
gacatggcctaatcactgctcttattcaccgatgtccactgtaaggatgat

SEQ ID NO: 6047 - DNA, 60 bp, Artificial
  Synthetic oligonucleotide
aagcctgggtccatctaaaggatgcaacgttatcggatgccatcacaagttcttgagcaa

SEQ ID NO: 6048 - DNA, 60 bp, Artificial
  Synthetic oligonucleotide
tcattggtccccatttgctgtgatccatactatagtttaagaacccttcccgcacattga

SEQ ID NO: 6049 - DNA, 55 bp, Artificial
  Synthetic oligonucleotide
cgagctgcaaacccttgagttgaatatggagactcttaatatgaccatgccgcta

SEQ ID NO: 6050 - DNA, 54 bp, Artificial
  Synthetic oligonucleotide
ccaaaggtttgattagtgcaaagcgcaatccaatagcctaggatccactgtgcg

SEQ ID NO: 6051 - DNA, 56 bp, Artificial
  Synthetic oligonucleotide
cacttatgagcatagtgtcaagcctgcacctgagcattagaggaaataccatctac

SEQ ID NO: 6052 - DNA, 51 bp, Artificial
  Synthetic oligonucleotide
atggctcatacctgaatgagacccattttagtgaccaaatagagcaggagg

SEQ ID NO: 6053 - DNA, 60 bp, Artificial
  Synthetic oligonucleotide
tggtggcacgaagcaattacttcctcataatggtttgagcgattgtccaatagtacattt

SEQ ID NO: 6054 - DNA, 60 bp, Artificial
  Synthetic oligonucleotide
tgacaccctggtggcacgaagcaatcacttcctcataatggtttgagcgattgtccaata

SEQ ID NO: 6055 - DNA, 55 bp, Artificial
  Synthetic oligonucleotide
cctgacataaccagcctccaacagtccaacaggacacatggattaactgccccag

SEQ ID NO: 6056 - DNA, 60 bp, Artificial
  Synthetic oligonucleotide
gttaaaataccgactcataggcatattgtgggcaagtcatgtcccaagcctcacaggttg

SEQ ID NO: 6057 - DNA, 55 bp, Artificial
  Synthetic oligonucleotide
aggcatattgtgggcaagtcatgtcccaagcctcacaggttgaatcacatgggca

SEQ ID NO: 6058 - DNA, 60 bp, Artificial
  Synthetic oligonucleotide
tctaggtgtcgatgttctgaacaccatgtctctgggtagcactgctctcaggaccaatgt

SEQ ID NO: 6059 - DNA, 60 bp, Artificial
  Synthetic oligonucleotide
taccattcattcctatcatacttagaagagctcgcctttggtcaagttgctgtgagctca

SEQ ID NO: 6060 - DNA, 55 bp, Artificial
  Synthetic oligonucleotide
ctatcatacttagaagagctcgcctttggtcaagttgctgtgagctcaggttgcc

SEQ ID NO: 6061 - DNA, 60 bp, Artificial
  Synthetic oligonucleotide
actcttcagacctaatatcgaaaacaccatcattcaccttgaagattgagtctgtcctca

SEQ ID NO: 6062 - DNA, 60 bp, Artificial
  Synthetic oligonucleotide
agggaagggtacttcaacaagcttatgcatgtgccaagttagcagagtgctgacatgatc

SEQ ID NO: 6063 - DNA, 53 bp, Artificial
  Synthetic oligonucleotide
cacaaagcgcattagacaaatagcttgacacaatgcctaggatcctcggtcgc

SEQ ID NO: 6064 - DNA, 55 bp, Artificial
  Synthetic oligonucleotide
ccttgaggtatgcctcaataacattgtaaggaacctcaactaacttgtgcaaatg

SEQ ID NO: 6065 - DNA, 60 bp, Artificial
  Synthetic oligonucleotide
catataagggccccattttgaatggtccatgctcaccgctagccctgagagtcgcaccac

SEQ ID NO: 6066 - DNA, 50 bp, Artificial
  Synthetic oligonucleotide
atctcagtgatcaaattgtcagcttgctgttcgatatcatcagagaagtg

SEQ ID NO: 6067 - DNA, 59 bp, Artificial
  Synthetic oligonucleotide
gatcagcattgataggagcttcagaccctcggttataactgaagagggattgacctgag

SEQ ID NO: 6068 - DNA, 60 bp, Artificial
  Synthetic oligonucleotide
tgggtaagttagccacaggtctctcatttgtgaggtcaattgttgtgttctcccatgctc

SEQ ID NO: 6069 - DNA, 55 bp, Artificial
  Synthetic oligonucleotide
cgtgggtctctcatttgtgaggtcaattgttgtgttctcccatgctctccccaca

SEQ ID NO: 6070 - DNA, 60 bp, Artificial
  Synthetic oligonucleotide
cctttgaaatcaacccaaccgtctgtccttgacatcacctcattgaggaaatctgcatga

SEQ ID NO: 6071 - DNA, 55 bp, Artificial
  Synthetic oligonucleotide
ctcggggatactgtctgtaagctcccttgtgtcccacaagtccacccctcctagc

SEQ ID NO: 6072 - DNA, 52 bp, Artificial
  Synthetic oligonucleotide
gtacctcttggtagtatgccctcaatgttcctcataattctgtaccctctgt

SEQ ID NO: 6073 - DNA, 51 bp, Artificial
  Synthetic oligonucleotide
cggtgaccaaggggtctttgaacccacctttgagatctcctccttttgtca

SEQ ID NO: 6074 - DNA, 60 bp, Artificial
  Synthetic oligonucleotide
acgacctgaatcaagggcaatgtaactcccgccccaagccatcctcatgaaggtctgcaa

SEQ ID NO: 6075 - DNA, 59 bp, Artificial
  Synthetic oligonucleotide
tattagctgatcagcttaacctgaggttgaagtgttgacacactcgccaacacatgggg

SEQ ID NO: 6076 - DNA, 53 bp, Artificial
  Synthetic oligonucleotide
tccattactgattgatacatgatgcaatccaatagagcacaatgaggttcacc

SEQ ID NO: 6077 - DNA, 53 bp, Artificial
  Synthetic oligonucleotide
gtgttgtcccaagatctcccaagaatttgcgatctagaaccaatataaggcca

SEQ ID NO: 6078 - DNA, 52 bp, Artificial
  Synthetic oligonucleotide
tggagccaaactgattattcagctttgatggatctgaaacatcccagattct

SEQ ID NO: 6079 - DNA, 50 bp, Artificial
  Synthetic oligonucleotide
gccgacacaaacttgattacatgtaacgaccactacttgtgcctgagatg

SEQ ID NO: 6080 - DNA, 53 bp, Artificial
  Synthetic oligonucleotide
tcctaattcccaatctgtgtagcttgactgccttatgtgtgctaaggcacaat

SEQ ID NO: 6081 - DNA, 57 bp, Artificial
  Synthetic oligonucleotide
tgtggtgctaaactgctggtccactgtggctacaccatcggtcctttcaacacagct

SEQ ID NO: 6082 - DNA, 54 bp, Artificial
  Synthetic oligonucleotide
acattgcacttgactcaggtcgaggaaactgggattgtataatgactagctacc

SEQ ID NO: 6083 - DNA, 55 bp, Artificial
  Synthetic oligonucleotide
caagggcaatgtaactcccgccccaagccatcctcatgaaggtctgcaaaacacc

SEQ ID NO: 6084 - DNA, 60 bp, Artificial
  Synthetic oligonucleotide
ttgtgtggatttcagctcgacaaggttattgactgcctgatttaagtctctgaggcgttt

SEQ ID NO: 6085 - DNA, 60 bp, Artificial
  Synthetic oligonucleotide
ccaaactgtgggtcttagtgcacttgggctcacaaggatgaatagcactcaaagcgcaat

SEQ ID NO: 6086 - DNA, 55 bp, Artificial
  Synthetic oligonucleotide
cttactaactgcgaggggagtacacactataaatacttaatcatccagaacacga

SEQ ID NO: 6087 - DNA, 60 bp, Artificial
  Synthetic oligonucleotide
ctttggacttgagccaccctgtcgaaatccagggctgctagtagagctctagcatcagtg

SEQ ID NO: 6088 - DNA, 60 bp, Artificial
  Synthetic oligonucleotide
atcccttaggaggggcttgtccaactggacccatcctgtgaaggctgatgtgctgtcaga

SEQ ID NO: 6089 - DNA, 59 bp, Artificial
  Synthetic oligonucleotide
atagtaatggtgtgtgttgttcttgctgcatgattgaggcagattgtcaaacattcgtg

SEQ ID NO: 6090 - DNA, 60 bp, Artificial
  Synthetic oligonucleotide
tgtcctgtgttcatccagcccacccgtactcgacaactacactcagtgcacagaaggctc

SEQ ID NO: 6091 - DNA, 60 bp, Artificial
  Synthetic oligonucleotide
atcccatgctctaccttttatctgtgatcgtgaggcaatgtagggccaaccgtcacccga

SEQ ID NO: 6092 - DNA, 60 bp, Artificial
  Synthetic oligonucleotide
attgagaacgtctgccttgacactagtcgtccaggcagagagccctctcctaagagattg

SEQ ID NO: 6093 - DNA, 56 bp, Artificial
  Synthetic oligonucleotide
tgctctgatggcagtcagcatcatagcaattctgaaagggattacaaatgtctgga

SEQ ID NO: 6094 - DNA, 55 bp, Artificial
  Synthetic oligonucleotide
cctctcctaagagattgagtccaacgaaaggatgggattggttggtcactcatgg

SEQ ID NO: 6095 - DNA, 60 bp, Artificial
  Synthetic oligonucleotide
gtgaaagtgagaatgcaacatggtgtgtagagattgctgcactggacatgtctgtcttgc

SEQ ID NO: 6096 - DNA, 55 bp, Artificial
  Synthetic oligonucleotide
gcaacatggtgtgtagagattgctgcactggacatgtctgtcttgctctcgccac

SEQ ID NO: 6097 - DNA, 60 bp, Artificial
  Synthetic oligonucleotide
cgcaccggggatcctaggctactctggagattgcgccatttgacgactttatcacaacaa

SEQ ID NO: 6098 - DNA, 59 bp, Artificial
  Synthetic oligonucleotide
cctgtgtctaaagtgtctcacattgatgctcagaaggtcagactactgcggaatctgtg

SEQ ID NO: 6099 - DNA, 59 bp, Artificial
  Synthetic oligonucleotide
gtgcaatgggattaggcccacaccatccaggcttatgtgatgcccttgtgacccgctaa

SEQ ID NO: 6100 - DNA, 60 bp, Artificial
  Synthetic oligonucleotide
gaatttagctgaaagccaccttcgagaggagttgagtctctcatgtgagccaatgataac

SEQ ID NO: 6101 - DNA, 51 bp, Artificial
  Synthetic oligonucleotide
gtggaagagcacctataactgatgaagtcaacccaggttgcgcattaaaga

SEQ ID NO: 6102 - DNA, 54 bp, Artificial
  Synthetic oligonucleotide
tctgactatagctcagacccacttgaggtgggcctgatgcaccaggcactggct

SEQ ID NO: 6103 - DNA, 60 bp, Artificial
  Synthetic oligonucleotide
tagcaaccattacatatgtctcaggtgcctaacctcaatgttaaacaggactgactactg

SEQ ID NO: 6104 - DNA, 53 bp, Artificial
  Synthetic oligonucleotide
cgtataaagcaggccaaggtctgtgagtgcttgcacaacatcattaagtgggg

SEQ ID NO: 6105 - DNA, 51 bp, Artificial
  Synthetic oligonucleotide
tgctgtgctgttaagttccccatgtaaaccccagaagcttgaggtctttca

SEQ ID NO: 6106 - DNA, 55 bp, Artificial
  Synthetic oligonucleotide
ctctctgacccaaggggcgttgacatgccaggtggttactgtcttgaaaggtgga

SEQ ID NO: 6107 - DNA, 54 bp, Artificial
  Synthetic oligonucleotide
acaaacgccattattaagtatctaaacccctgcaggtaaacctgaactcgctta

SEQ ID NO: 6108 - DNA, 51 bp, Artificial
  Synthetic oligonucleotide
ccggcaaggatactcctgggggctactgtctagaggagtggatgctcgtag

SEQ ID NO: 6109 - DNA, 60 bp, Artificial
  Synthetic oligonucleotide
gtgaagagctccccacatccattgtggtgcccatcgaaccaagtgctccacctccagaag

SEQ ID NO: 6110 - DNA, 55 bp, Artificial
  Synthetic oligonucleotide
ggggtcttgcatgactgccagaagtttaagttacggttctgcctaggatccactg

SEQ ID NO: 6111 - DNA, 57 bp, Artificial
  Synthetic oligonucleotide
tccagacttatatggtccccctcagagccactcacatagcaatcaatctcctcaaca

SEQ ID NO: 6112 - DNA, 54 bp, Artificial
  Synthetic oligonucleotide
tgagtcaacaactaaggggatttcaacatgctcaggccctatatgcgtgaaatc

SEQ ID NO: 6113 - DNA, 60 bp, Artificial
  Synthetic oligonucleotide
tctcgatcaactccctcttgcctataacggtcgtagtcaccatagagcgctgttaccata

SEQ ID NO: 6114 - DNA, 52 bp, Artificial
  Synthetic oligonucleotide
cgcaccgaggatcctaggcttattgatcttcgcgcatataggaaagtctaca

SEQ ID NO: 6115 - DNA, 53 bp, Artificial
  Synthetic oligonucleotide
accatctcggacacatttagatcccatactcttgcaaattccgacgaaccctg

SEQ ID NO: 6116 - DNA, 60 bp, Artificial
  Synthetic oligonucleotide
cagtttgcttcaattggctaatggactctaatccaagattctggttttccatagtagaca

SEQ ID NO: 6117 - DNA, 53 bp, Artificial
  Synthetic oligonucleotide
ttggttctcaaatgctttgggacatgactggcttatggatcctccaatgctat

SEQ ID NO: 6118 - DNA, 60 bp, Artificial
  Synthetic oligonucleotide
agttacgatctgcaagcattcgtgctctagagttagcttgtcaaggtcatttaaattcgg

SEQ ID NO: 6119 - DNA, 60 bp, Artificial
  Synthetic oligonucleotide
cccggcctccattgctgcaccccaatagggtgcagcaatggaggcctcccaatgcttaga

SEQ ID NO: 6120 - DNA, 56 bp, Artificial
  Synthetic oligonucleotide
ctcaggttggtagattgccagttctactgggtcgttaggtggtccttcaatgtcaa

SEQ ID NO: 6121 - DNA, 60 bp, Artificial
  Synthetic oligonucleotide
catacacaattctcggaggacccagtcaacctctgagctcattaaatgttcacctgttct

SEQ ID NO: 6122 - DNA, 56 bp, Artificial
  Synthetic oligonucleotide
cccacttactgtgatccatactataattcaggaacccttctcgcacattgatggtc

SEQ ID NO: 6123 - DNA, 52 bp, Artificial
  Synthetic oligonucleotide
gccaagacaacatttctcggcacatcttgaggatgacctcagaactcataat

SEQ ID NO: 6124 - DNA, 55 bp, Artificial
  Synthetic oligonucleotide
caacagtctgacaaaacgcacggactcaccgcacctgagtacataacggttacat

SEQ ID NO: 6125 - DNA, 60 bp, Artificial
  Synthetic oligonucleotide
tgtactcacagaatcacttccgttcctcattgactctgactctctggacccgacgaccag

SEQ ID NO: 6126 - DNA, 55 bp, Artificial
  Synthetic oligonucleotide
ccgatgactaatctagagacaagctttgagaccttatattcgtaatctgagtgtc

SEQ ID NO: 6127 - DNA, 60 bp, Artificial
  Synthetic oligonucleotide
tggtgtaaccatgcatggctcatacaaatacattggctctttttactgtgatccaaaaag

SEQ ID NO: 6128 - DNA, 60 bp, Artificial
  Synthetic oligonucleotide
gtccgaaaccattgacacaatctctgatcaatgtgtggctaatggagtttcagtggagat

SEQ ID NO: 6129 - DNA, 50 bp, Artificial
  Synthetic oligonucleotide
atgttaatagagctctcgtctttggtcacgatttgcaagcattcgtgctc

SEQ ID NO: 6130 - DNA, 53 bp, Artificial
  Synthetic oligonucleotide
catcaacacatctattgcacaatggggcagttcattagcttcatgcaagaaat

SEQ ID NO: 6131 - DNA, 60 bp, Artificial
  Synthetic oligonucleotide
tacactcatgagtatagtctcgagtctacacctcagtatcagagggaattccaactacaa

SEQ ID NO: 6132 - DNA, 55 bp, Artificial
  Synthetic oligonucleotide
tatagtctcgagtctacacctcagtatcagagggaattccaactacaaagcagtg

SEQ ID NO: 6133 - DNA, 60 bp, Artificial
  Synthetic oligonucleotide
catgaagttgtcaactgcatcactagtactcacaactctttcttcaaccatgggttcgtg

SEQ ID NO: 6134 - DNA, 55 bp, Artificial
  Synthetic oligonucleotide
cactagtactcacaactctttcttcaaccatgggttcgtgtgatctgctatggga

SEQ ID NO: 6135 - DNA, 60 bp, Artificial
  Synthetic oligonucleotide
gagcatagaagtctgatgtgttgtgcagtataccctgacccatgtcaagtatggagctaa

SEQ ID NO: 6136 - DNA, 55 bp, Artificial
  Synthetic oligonucleotide
gttgtgcagtataccctgacccatgtcaagtatggagctaacatgagagggtacc

SEQ ID NO: 6137 - DNA, 60 bp, Artificial
  Synthetic oligonucleotide
tggacacatcataggaccccatttactatgatccatgctgtaggagacgtgtgccaaaga

SEQ ID NO: 6138 - DNA, 60 bp, Artificial
  Synthetic oligonucleotide
gctttgcacctgttcaagacaacagtgaattctttgatctcagatcagttgttaatgagg

SEQ ID NO: 6139 - DNA, 60 bp, Artificial
  Synthetic oligonucleotide
ataacccagtcaggtaagcgttcaatgtagtagcttgatctgccatcaatcacaggtaca

SEQ ID NO: 6140 - DNA, 57 bp, Artificial
  Synthetic oligonucleotide
accacaccggctcaccagtaagggtatttgtagctgcggggcattcaaagtgccagg

SEQ ID NO: 6141 - DNA, 54 bp, Artificial
  Synthetic oligonucleotide
cccaacctggtctgacacaaacatattcagctttcgctttgcaccaagaactgc

SEQ ID NO: 6142 - DNA, 53 bp, Artificial
  Synthetic oligonucleotide
tccaccaaggaatggacagtctggttgaggctcctaagtctctgcagatcttt

SEQ ID NO: 6143 - DNA, 54 bp, Artificial
  Synthetic oligonucleotide
ttcacggttaatctcggaggtgtcttccatgaactaccttcactatgtagggtc

SEQ ID NO: 6144 - DNA, 55 bp, Artificial
  Synthetic oligonucleotide
tccacaggatcagttggcggaccctcaatatccatccagattgtgtctgatgagt

SEQ ID NO: 6145 - DNA, 60 bp, Artificial
  Synthetic oligonucleotide
acagatagtcctgagacccatcactataggagcaagattgaggtaggcatccgacattta

SEQ ID NO: 6146 - DNA, 60 bp, Artificial
  Synthetic oligonucleotide
gtccgacttggaaaagtgcaatttcacccgcctgcaagctgttgacagggtgatctttga

SEQ ID NO: 6147 - DNA, 51 bp, Artificial
  Synthetic oligonucleotide
caagggggagtctttccaacactgctgtggttagtccaggttgggtggagc

SEQ ID NO: 6148 - DNA, 60 bp, Artificial
  Synthetic oligonucleotide
tcatgagagacgcaccagctttgaccaatgaagcaagactcaagttgtaacctgaaatgt

SEQ ID NO: 6149 - DNA, 51 bp, Artificial
  Synthetic oligonucleotide
tcctgagaatgcaatgtatccccgctgtcaatgatagactgttgtcaattg

SEQ ID NO: 6150 - DNA, 60 bp, Artificial
  Synthetic oligonucleotide
tctgaatagtgaatctgagtttgagagggcgctccttgatctgaaatctgttgtcaggca

SEQ ID NO: 6151 - DNA, 51 bp, Artificial
  Synthetic oligonucleotide
gtggtttaagtcttgaacctcaagaagtgtgtaagaacttcctcttacaag

SEQ ID NO: 6152 - DNA, 59 bp, Artificial
  Synthetic oligonucleotide
taaacgagtactgaactcaaatatgcttgaggaccagtcacttctgattacaccacact

SEQ ID NO: 6153 - DNA, 60 bp, Artificial
  Synthetic oligonucleotide
tcacttagaggagaagagcatcgtatatccatgactgaatccaacctagttcaattaata

SEQ ID NO: 6154 - DNA, 60 bp, Artificial
  Synthetic oligonucleotide
cggactgcacactgagtttcagactgtgtccttctcaatggtgggcctcctttccaacag

SEQ ID NO: 6155 - DNA, 59 bp, Artificial
  Synthetic oligonucleotide
catgttgttgacaatccataattggactgaccagtgccccagggaccatctaagtacta

SEQ ID NO: 6156 - DNA, 60 bp, Artificial
  Synthetic oligonucleotide
ggagcatcctcatgggtttctcattggacactgatcctgatacaacggcactaaacatta

SEQ ID NO: 6157 - DNA, 60 bp, Artificial
  Synthetic oligonucleotide
caaattcgacaggatcatttggtggcccctcaatgtcaatccatgttgtgtcactggtag

SEQ ID NO: 6158 - DNA, 53 bp, Artificial
  Synthetic oligonucleotide
ctcctccagttgacattgatccaggtctttgtatgcccacaagctgtaaaatc

SEQ ID NO: 6159 - DNA, 55 bp, Artificial
  Synthetic oligonucleotide
gacccatcactataggagcaagattgaggtaggcatccgacatttattcgggaac

SEQ ID NO: 6160 - DNA, 50 bp, Artificial
  Synthetic oligonucleotide
gctgctctgagcaaattcaaggaggatgtggaatctgctttacacctgtt

SEQ ID NO: 6161 - DNA, 60 bp, Artificial
  Synthetic oligonucleotide
aggtttgggtacttgaccgtgtagagcaggccaagatctgtgagtgcctgtacaacatca

SEQ ID NO: 6162 - DNA, 60 bp, Artificial
  Synthetic oligonucleotide
ttgtaggatctgggatctttggtcaagctgctgtgctgttaagttccccatatagactcc

SEQ ID NO: 6163 - DNA, 60 bp, Artificial
  Synthetic oligonucleotide
tccatctaaaggatgccacattatcggaagtcatcctgagtttatgcaaagcgtttccgg

SEQ ID NO: 6164 - DNA, 60 bp, Artificial
  Synthetic oligonucleotide
tgcccaatgcatgttcagtcaacaattcccaccattacatcagtatggggagctctggac

SEQ ID NO: 6165 - DNA, 60 bp, Artificial
  Synthetic oligonucleotide
tgtgggggcattggggtcaatccctcccatgagatccttcagtaacattgtctgactgta

SEQ ID NO: 6166 - DNA, 55 bp, Artificial
  Synthetic oligonucleotide
caatccctcccatgagatccttcagtaacattgtctgactgtagctcaggcccac

SEQ ID NO: 6167 - DNA, 54 bp, Artificial
  Synthetic oligonucleotide
tagatctgtgagtccttgtacaacgtcattgagggtctcccctccttgctcggc

SEQ ID NO: 6168 - DNA, 55 bp, Artificial
  Synthetic oligonucleotide
agcggcctcaaacattagacagtccatcaaggcacaatggggagtcacttcctcc

SEQ ID NO: 6169 - DNA, 55 bp, Artificial
  Synthetic oligonucleotide
gaaggtcagagcttcactcggacgcctcccatctcggacctctgaactgcaaatc

SEQ ID NO: 6170 - DNA, 60 bp, Artificial
  Synthetic oligonucleotide
gtcaaagctctcatggcctgtgaacaatggtaggctagcgataaccagtgcaccatccaa

SEQ ID NO: 6171 - DNA, 60 bp, Artificial
  Synthetic oligonucleotide
ttgctgtacgctaatgtgtaggaactgagcttgacccatccgattacccctgagaaacag

SEQ ID NO: 6172 - DNA, 60 bp, Artificial
  Synthetic oligonucleotide
ctcgaatgggcccaaagaaggtgcaccctcaccctttggcatcatggaggcatgtgggaa

SEQ ID NO: 6173 - DNA, 53 bp, Artificial
  Synthetic oligonucleotide
agtcatggctagatctgcctaaaaatgggcccctttgtggaggttcagggtcc

SEQ ID NO: 6174 - DNA, 56 bp, Artificial
  Synthetic oligonucleotide
acactcttattgctagacagatcaagtgcagtcgaacaacgtgcatctttcaatgg

SEQ ID NO: 6175 - DNA, 60 bp, Artificial
  Synthetic oligonucleotide
ctatcagatgctcacaagaaagacctatatgatcacgcactcatgagcataatctcaact

SEQ ID NO: 6176 - DNA, 52 bp, Artificial
  Synthetic oligonucleotide
tgggcatttgttcttgcggcttatacaagcagcctggcgtccccgtgagatg

SEQ ID NO: 6177 - DNA, 55 bp, Artificial
  Synthetic oligonucleotide
gttagatggtgcactagttattgctagcctaccattgttcacaggccatgagagc

SEQ ID NO: 6178 - DNA, 53 bp, Artificial
  Synthetic oligonucleotide
ttatgtcttcggacccttggcaagtgataaccatattccgggggagcgcctca

SEQ ID NO: 6179 - DNA, 56 bp, Artificial
  Synthetic oligonucleotide
tccactacagtgttttcccaagcccttcctactattgatgtcctagatgcaatgta

SEQ ID NO: 6180 - DNA, 60 bp, Artificial
  Synthetic oligonucleotide
tcagatctgtgttgttcctgtacagcgtgtcaataggcaagcatctcatcggcttctggt

SEQ ID NO: 6181 - DNA, 55 bp, Artificial
  Synthetic oligonucleotide
tacagcgtgtcaataggcaagcatctcatcggcttctggtccctaacccagcctg

SEQ ID NO: 6182 - DNA, 55 bp, Artificial
  Synthetic oligonucleotide
ctaaatctacagtggtgttatcccaagccctcccttgaacttgagaccttgagcc

SEQ ID NO: 6183 - DNA, 53 bp, Artificial
  Synthetic oligonucleotide
atgggtccagttggatagacccctcctaagggactgtacccagcggaatgatg

SEQ ID NO: 6184 - DNA, 60 bp, Artificial
  Synthetic oligonucleotide
agatcaactgagtgctgaactctgccaagcagagagatgggccaaattgtgacaatgttc

SEQ ID NO: 6185 - DNA, 55 bp, Artificial
  Synthetic oligonucleotide
tctgccaagcagagagatgggccaaattgtgacaatgttcgaggctttgcctcac

SEQ ID NO: 6186 - DNA, 60 bp, Artificial
  Synthetic oligonucleotide
agaagacctttgaccacacactcatgagcatagtctcaagtctacacctcagcatcagag

SEQ ID NO: 6187 - DNA, 54 bp, Artificial
  Synthetic oligonucleotide
aacatgcgaagactggtgaaactagtgtacccaagtgttggcttgtcaccaatg

SEQ ID NO: 6188 - DNA, 57 bp, Artificial
  Synthetic oligonucleotide
aatctgccttcgatgtcaatccatgtaggggcattggggtcaatccctcccataaga

SEQ ID NO: 6189 - DNA, 55 bp, Artificial
  Synthetic oligonucleotide
accatctggcaccacaaagcataaagaaggggttaagatcccatggtcatgaagg

SEQ ID NO: 6190 - DNA, 52 bp, Artificial
  Synthetic oligonucleotide
tacccgaactcttcagatctagacatgctcactcagagtcaccctatactag

SEQ ID NO: 6191 - DNA, 56 bp, Artificial
  Synthetic oligonucleotide
tcttttttccacacaacccgggctgacaagtgctgtcatagaggcacttccccgca

SEQ ID NO: 6192 - DNA, 60 bp, Artificial
  Synthetic oligonucleotide
tgagcatagaagtagatctagattgggcttttccagtgaagttctgaaactaaaggatga

SEQ ID NO: 6193 - DNA, 51 bp, Artificial
  Synthetic oligonucleotide
gtactgtttggagcagtgggccgttgtttgggctgggatcaagtgttttga

SEQ ID NO: 6194 - DNA, 55 bp, Artificial
  Synthetic oligonucleotide
cagtctgtgtccagttggataggcctcttctgagagcttgagtccaacgaaacgc

SEQ ID NO: 6195 - DNA, 51 bp, Artificial
  Synthetic oligonucleotide
tactcacgcaataatttgtccacactattgttgggtgtgacctgacataat

SEQ ID NO: 6196 - DNA, 60 bp, Artificial
  Synthetic oligonucleotide
atagtttcgagcctacacctcagtatcagagggaactccaactataaggcagtatcctgc

SEQ ID NO: 6197 - DNA, 60 bp, Artificial
  Synthetic oligonucleotide
tgaccaaatggatgattcttgctgcagagcttaagtgtttcgggaacacagcagttgcga

SEQ ID NO: 6198 - DNA, 55 bp, Artificial
  Synthetic oligonucleotide
gaaccatcccctgcggaagagcacctataactgacgaggtcaacccgggttgcgc

SEQ ID NO: 6199 - DNA, 60 bp, Artificial
  Synthetic oligonucleotide
acacagggatcacgtcatacaagagatcgagtgcataacacaaaaattgctccgtaatta

SEQ ID NO: 6200 - DNA, 50 bp, Artificial
  Synthetic oligonucleotide
tgtaaactgcgtcacataactccttgtacatctcaggacgaagtacgtct

SEQ ID NO: 6201 - DNA, 60 bp, Artificial
  Synthetic oligonucleotide
gtgtggtattcaactgctggctcactgtatctgtgccatcggtcctttcaacatagctaa

SEQ ID NO: 6202 - DNA, 50 bp, Artificial
  Synthetic oligonucleotide
caggaatagttgttggacaaatgttaatgttagtcaatgacagacttcta

SEQ ID NO: 6203 - DNA, 53 bp, Artificial
  Synthetic oligonucleotide
tgcagaagggacagtttgacacatcactatctagatgagcacctaaacccgat

SEQ ID NO: 6204 - DNA, 51 bp, Artificial
  Synthetic oligonucleotide
gagccacaatgatcgaacagatgcaatgaaccactgtggcactgtagctaa

SEQ ID NO: 6205 - DNA, 54 bp, Artificial
  Synthetic oligonucleotide
tgcatgctatataaggccaaccgttgccagagagacatactttgtacagcagat

SEQ ID NO: 6206 - DNA, 54 bp, Artificial
  Synthetic oligonucleotide
tccgacccctgtagatgctcaccagttctaaatcgatgtagtagaagacttccg

SEQ ID NO: 6207 - DNA, 55 bp, Artificial
  Synthetic oligonucleotide
ggacacttgatttggttggttctgtgaacatccctagttccctccttagagattg

SEQ ID NO: 6208 - DNA, 60 bp, Artificial
  Synthetic oligonucleotide
ggtatgtaaatgacactatcacaggcagacatagtttacctcagtgttggcttgtacgta

SEQ ID NO: 6209 - DNA, 55 bp, Artificial
  Synthetic oligonucleotide
cactatcacaggcagacatagtttacctcagtgttggcttgtacgtaatggctcc

SEQ ID NO: 6210 - DNA, 53 bp, Artificial
  Synthetic oligonucleotide
cttcacctggtaggctttccaactcatagacacatacgtggtgaaccctgccc

SEQ ID NO: 6211 - DNA, 51 bp, Artificial
  Synthetic oligonucleotide
gacgaggttaagttccctccgtacacacctggtagcccacctccttctgtc

SEQ ID NO: 6212 - DNA, 58 bp, Artificial
  Synthetic oligonucleotide
tagacctcttctgagggattgagtccaacggaatgagggtacgttctcagaactcatg

SEQ ID NO: 6213 - DNA, 55 bp, Artificial
  Synthetic oligonucleotide
cctcagaacaaagggattgtacggtgtccgaaagtgacacattctcatagagctc

SEQ ID NO: 6214 - DNA, 60 bp, Artificial
  Synthetic oligonucleotide
tggggcagttcattagcttcatgcaagaaataccaacctttttgcaagaagctctgaaca

SEQ ID NO: 6215 - DNA, 56 bp, Artificial
  Synthetic oligonucleotide
ggttacagagtgattggatcaacgataatcttgttggaggctttcgttagggtaag

SEQ ID NO: 6216 - DNA, 54 bp, Artificial
  Synthetic oligonucleotide
tagtggtgaaactaggactgctatgttggacgagagacagtgcggttactgtag

SEQ ID NO: 6217 - DNA, 58 bp, Artificial
  Synthetic oligonucleotide
tgtgaaagaagtgcgtctttctggaaagatagctctactaattctgggacatactttc

SEQ ID NO: 6218 - DNA, 60 bp, Artificial
  Synthetic oligonucleotide
ggtttgaggtggttggcctgctatggctgactgaaacattagacaatcaagtagggcaca

SEQ ID NO: 6219 - DNA, 60 bp, Artificial
  Synthetic oligonucleotide
gacacttgtgttgtcccaagatctcccgagtatttgtgaccttgatccaatgtatggcca

SEQ ID NO: 6220 - DNA, 56 bp, Artificial
  Synthetic oligonucleotide
atgttcagtcaataactctcaccactacattagcatggggacatctggactggagc

SEQ ID NO: 6221 - DNA, 54 bp, Artificial
  Synthetic oligonucleotide
tcatacagaatagaacttgggaaaaccattgcagatatgcaggcccctttggga

SEQ ID NO: 6222 - DNA, 60 bp, Artificial
  Synthetic oligonucleotide
aaatgcaatgtcaatcatgacgaagagttctgtgatatgctccgactgattgattacaat

SEQ ID NO: 6223 - DNA, 55 bp, Artificial
  Synthetic oligonucleotide
tgacgaagagttctgtgatatgctccgactgattgattacaataaggctgccttg

SEQ ID NO: 6224 - DNA, 55 bp, Artificial
  Synthetic oligonucleotide
ttcaccagtgctgctctaaggaacttgtgcttttattcggaggaatccccaacag

SEQ ID NO: 6225 - DNA, 51 bp, Artificial
  Synthetic oligonucleotide
gggcctgagtgttccgattcccctctagtgctcgatggaggctctatctta

SEQ ID NO: 6226 - DNA, 55 bp, Artificial
  Synthetic oligonucleotide
cccaagatctcccgagtatttgtgaccttgatccaatgtatggccaaccttctcc

SEQ ID NO: 6227 - DNA, 60 bp, Artificial
  Synthetic oligonucleotide
cgtgttatcaatcaacttgtatccgtctggaacaatgagaggtagacctgggcagacgac

SEQ ID NO: 6228 - DNA, 55 bp, Artificial
  Synthetic oligonucleotide
acttgtatccgtctggaacaatgagaggtagacctgggcagacgacccctgattc

SEQ ID NO: 6229 - DNA, 60 bp, Artificial
  Synthetic oligonucleotide
ttataggtgagggctgcccaaaaccacacagattaacagggtcagggatctgctcatgtg

SEQ ID NO: 6230 - DNA, 58 bp, Artificial
  Synthetic oligonucleotide
ctacactttaatgtactacatgtgacacggcacattggtgcaaggtgcctaactacag

SEQ ID NO: 6231 - DNA, 55 bp, Artificial
  Synthetic oligonucleotide
acaatctgagatctcgacccaatgtaaggccaaccctctccactcagacaaagtt

SEQ ID NO: 6232 - DNA, 53 bp, Artificial
  Synthetic oligonucleotide
acaaagacagaaggcttcatctttcaagtcaatacctccaagactggtatcaa

SEQ ID NO: 6233 - DNA, 60 bp, Artificial
  Synthetic oligonucleotide
ccctcaatgtcaatccatgttgtcagagttgggtcaatcttacccattgcctctctcaca

SEQ ID NO: 6234 - DNA, 60 bp, Artificial
  Synthetic oligonucleotide
ttcttcacagcgtccctcttccttcacttggtgggcatacccacccataggcacatcaga

SEQ ID NO: 6235 - DNA, 52 bp, Artificial
  Synthetic oligonucleotide
acccttgagtggtcacaaccatgtccggaggcagcaagccaatcacgtaact

SEQ ID NO: 6236 - DNA, 60 bp, Artificial
  Synthetic oligonucleotide
tcttacttaaatgagacccattttagtgatcaaatagagcaggaggcggacaacatgata

SEQ ID NO: 6237 - DNA, 55 bp, Artificial
  Synthetic oligonucleotide
gagacccattttagtgatcaaatagagcaggaggcggacaacatgataacagaga

SEQ ID NO: 6238 - DNA, 60 bp, Artificial
  Synthetic oligonucleotide
ttgctatctccactggatcattgaacctgccttcaatgtcaatccatgtaggggcgttgg

SEQ ID NO: 6239 - DNA, 54 bp, Artificial
  Synthetic oligonucleotide
tgaccatctagcactgattggaacatgatgcaatccagaagagcacagtgaggc

SEQ ID NO: 6240 - DNA, 60 bp, Artificial
  Synthetic oligonucleotide
aggtgaccatatttctcccagacctgttgatcaaactgtctggcttgttcagatgtaagc

SEQ ID NO: 6241 - DNA, 55 bp, Artificial
  Synthetic oligonucleotide
tgtcagagttgggtcaatcttacccattgcctctctcacaactgactcttgcaac

SEQ ID NO: 6242 - DNA, 60 bp, Artificial
  Synthetic oligonucleotide
tcagacatttgttcggggactacataactaatgatagctatccgaagatgtctgtggtta

SEQ ID NO: 6243 - DNA, 53 bp, Artificial
  Synthetic oligonucleotide
cctagatcccccaccttgaagactgtgtttcgttgaacactcctcatggacat

SEQ ID NO: 6244 - DNA, 55 bp, Artificial
  Synthetic oligonucleotide
ccaagccatcctcatgaaggtctgcaaaacaccatttgccactgtaccacaatga

SEQ ID NO: 6245 - DNA, 53 bp, Artificial
  Synthetic oligonucleotide
tttacatggacttgacttctccgaagtcagtaatgttcaacggttgatgcgca

SEQ ID NO: 6246 - DNA, 60 bp, Artificial
  Synthetic oligonucleotide
ttcgctacacaaccgggcttgaccagtgctgtcattgatgcactcccccggaatatggtc

SEQ ID NO: 6247 - DNA, 55 bp, Artificial
  Synthetic oligonucleotide
agccttcacatctgatgtgaagctctgaagttccctcctcaatgcctgggtccac

SEQ ID NO: 6248 - DNA, 60 bp, Artificial
  Synthetic oligonucleotide
ctctctcacaactgactcttgcaactcagtcaagtgggagagtctaatgttctgacctgc

SEQ ID NO: 6249 - DNA, 60 bp, Artificial
  Synthetic oligonucleotide
tgctgggctttcctattctcagctcatgactctcaaagatgcaatgctacagcttgaccc

SEQ ID NO: 6250 - DNA, 50 bp, Artificial
  Synthetic oligonucleotide
tcaatcagcatccacctggtcaaacagtacccccctggtgtgtccttacc

SEQ ID NO: 6251 - DNA, 58 bp, Artificial
  Synthetic oligonucleotide
atgttcagccaataattcccaccactacatcagcatggggagttctggactggaactg

SEQ ID NO: 6252 - DNA, 55 bp, Artificial
  Synthetic oligonucleotide
ttcgaagctggcgggtgtgctcctaacaaaacactctaataaaatgagggaattg

SEQ ID NO: 6253 - DNA, 53 bp, Artificial
  Synthetic oligonucleotide
tggcatgcatgattaatcacacagattttctgctgaggggtccatttgaggcg

SEQ ID NO: 6254 - DNA, 60 bp, Artificial
  Synthetic oligonucleotide
agtgttgttgccacagtatgatgttgtaatacaacatccggcagatatgagctggtgttc

SEQ ID NO: 6255 - DNA, 60 bp, Artificial
  Synthetic oligonucleotide
cagacacagcttgtagagaagattctcataagggtttctattgcccggtctctcatctat

SEQ ID NO: 6256 - DNA, 60 bp, Artificial
  Synthetic oligonucleotide
caccattcgcaacagcttgatcggcgattgtgtctattgtctcgcaaagctgatgcggtt

SEQ ID NO: 6257 - DNA, 50 bp, Artificial
  Synthetic oligonucleotide
cttaacggacttaggactaatctacacagcaaagtaccccaattcatctg

SEQ ID NO: 6258 - DNA, 51 bp, Artificial
  Synthetic oligonucleotide
ttgggacatgactttttgagggatccaagaatctgctgtgagcctaaaaag

SEQ ID NO: 6259 - DNA, 60 bp, Artificial
  Synthetic oligonucleotide
tttaccattgacgacaggaccaactgggtcttgaagtttgtgcaaatctgctgcggacta

SEQ ID NO: 6260 - DNA, 50 bp, Artificial
  Synthetic oligonucleotide
acaatcctacaaagccagatgcaatggaactttggaatgcagatttgttg

SEQ ID NO: 6261 - DNA, 60 bp, Artificial
  Synthetic oligonucleotide
agtatgttcggctttgtgagtccctctctatgacatccggtagactttctggtgtggaga

SEQ ID NO: 6262 - DNA, 60 bp, Artificial
  Synthetic oligonucleotide
ggagggaagatctcagttcaatacaacctgtcccactcaaattatgtggatgccggcaac

SEQ ID NO: 6263 - DNA, 60 bp, Artificial
  Synthetic oligonucleotide
cactatctgtgtcttgggtgcttaaccaaaatgcactccagaggcaatctctgcgagata

SEQ ID NO: 6264 - DNA, 56 bp, Artificial
  Synthetic oligonucleotide
tcttgcatcaagatgccatgtgaatgtctgctaccatttttgaatcccttctcatc

SEQ ID NO: 6265 - DNA, 60 bp, Artificial
  Synthetic oligonucleotide
cacaagaggtgcacagaagctattgtcagaggcaatcaataagtcagcctttcaaagctg

SEQ ID NO: 6266 - DNA, 59 bp, Artificial
  Synthetic oligonucleotide
tgattcccttgatcttgaagggtcctgtctcgtctgcaatcataacagatcctagagtc

SEQ ID NO: 6267 - DNA, 58 bp, Artificial
  Synthetic oligonucleotide
ggcaaagataaccggcgacatgtgtggcccccattttgaatggtccattgacaccgca

SEQ ID NO: 6268 - DNA, 60 bp, Artificial
  Synthetic oligonucleotide
ttcttgtgcctgacatgaccttagtcctcaagaccaatcttaagtcaccatgagctctta

SEQ ID NO: 6269 - DNA, 57 bp, Artificial
  Synthetic oligonucleotide
aggagaacttacactctgaggttaaggattcaaagtaatcttcaatcagtctactag

SEQ ID NO: 6270 - DNA, 60 bp, Artificial
  Synthetic oligonucleotide
ggatcatgaattcattgtgtgttctaaaagtgttgagtacacttttgactgtcccaattg

SEQ ID NO: 6271 - DNA, 52 bp, Artificial
  Synthetic oligonucleotide
tattggggcaattgccccgagaacgaatgcgcttataacatatagtgggcat

SEQ ID NO: 6272 - DNA, 55 bp, Artificial
  Synthetic oligonucleotide
cgtgacaccgcactctatagagtattatgtctcccagtcatctggtaatcacatc

SEQ ID NO: 6273 - DNA, 60 bp, Artificial
  Synthetic oligonucleotide
tggctgatgagagaggtccctataggatcaaaggacaaaactgcagaagattgtttccaa

SEQ ID NO: 6274 - DNA, 60 bp, Artificial
  Synthetic oligonucleotide
aggttcccctaagacccatgcacccagctctattgcagttgacaaggagatgcacatgta

SEQ ID NO: 6275 - DNA, 60 bp, Artificial
  Synthetic oligonucleotide
agctagatttacagcctgtcttaaaccaggcagatgttctcgcaactctccaacagtccc

SEQ ID NO: 6276 - DNA, 55 bp, Artificial
  Synthetic oligonucleotide
gcctgtcttaaaccaggcagatgttctcgcaactctccaacagtccctaattgca

SEQ ID NO: 6277 - DNA, 52 bp, Artificial
  Synthetic oligonucleotide
tctgctcagtcatacctgaagctattaactgtcctaaattcaagaccgctgg

SEQ ID NO: 6278 - DNA, 60 bp, Artificial
  Synthetic oligonucleotide
aactctttcatcagtaattgggagatgtgacctctcatgggctactgttaactcagatga

SEQ ID NO: 6279 - DNA, 52 bp, Artificial
  Synthetic oligonucleotide
gagtcagaccgttgatgagagttaacgagatcagaaaacagcacagtgtaat

SEQ ID NO: 6280 - DNA, 59 bp, Artificial
  Synthetic oligonucleotide
cctcaacgagtttgtgcatgtgccaagttagcagagtgctaacatgatcctttccagaa

SEQ ID NO: 6281 - DNA, 53 bp, Artificial
  Synthetic oligonucleotide
cggaccccatttactgtggtccatgctgtaatttaacaatccttctcgtacgt

SEQ ID NO: 6282 - DNA, 60 bp, Artificial
  Synthetic oligonucleotide
ggtgagtcccgattttaacgaagttctcaaactcagcaaatggtatgtggcactcatgct

SEQ ID NO: 6283 - DNA, 60 bp, Artificial
  Synthetic oligonucleotide
tcatggttgtgtatgcagccacttttgtctgcactgtctatctctatacaacgagacaat

SEQ ID NO: 6284 - DNA, 54 bp, Artificial
  Synthetic oligonucleotide
cgcaccggggatcctaggcgtttagttgcgctgtttgatcgcacggttgtactc

SEQ ID NO: 6285 - DNA, 56 bp, Artificial
  Synthetic oligonucleotide
aaagaggtaggaacatgacaagaactcagctacacttgggccctttagctggcacc

SEQ ID NO: 6286 - DNA, 60 bp, Artificial
  Synthetic oligonucleotide
tgcagcattacatacagcatctcccacccggtaagagaaccatccgaaaccaaactgtaa

SEQ ID NO: 6287 - DNA, 54 bp, Artificial
  Synthetic oligonucleotide
gaggagaggtcttaagagactgatatgatcacggtgaacttccggatgtcctcg

SEQ ID NO: 6288 - DNA, 60 bp, Artificial
  Synthetic oligonucleotide
attgtatctattgtctcacaaagttgatgtggttctttgcacttaacgttgtgtagtgct

SEQ ID NO: 6289 - DNA, 55 bp, Artificial
  Synthetic oligonucleotide
ctcacaaagttgatgtggttctttgcacttaacgttgtgtagtgctgcggacacg

SEQ ID NO: 6290 - DNA, 50 bp, Artificial
  Synthetic oligonucleotide
ccattctggcatgaaactgttgtcatagtcacagcgaccatctactattg

SEQ ID NO: 6291 - DNA, 60 bp, Artificial
  Synthetic oligonucleotide
gagcacccactctcacagtcaagggcacaggctcccattcagggcctattctctcgaaat

SEQ ID NO: 6292 - DNA, 60 bp, Artificial
  Synthetic oligonucleotide
ctctcgaaatcaagagatccaacttcatctagtattctcttggagcccatcaactcaagc

SEQ ID NO: 6293 - DNA, 55 bp, Artificial
  Synthetic oligonucleotide
caacttcatctagtattctcttggagcccatcaactcaagctcaagtgaatcacc

SEQ ID NO: 6294 - DNA, 52 bp, Artificial
  Synthetic oligonucleotide
atatgccaagttaacagggtgctaacatggtcctttccagaacgtacgtatt

SEQ ID NO: 6295 - DNA, 53 bp, Artificial
  Synthetic oligonucleotide
gcagcacttcatccgagaaaattggtagaaagaaccttttcgggtctgcgtaa

SEQ ID NO: 6296 - DNA, 60 bp, Artificial
  Synthetic oligonucleotide
aggcaagggagcacccctttagcactaatggatttgctaatgttcagcacatcagcttac

SEQ ID NO: 6297 - DNA, 60 bp, Artificial
  Synthetic oligonucleotide
tgtatggccaaccctctccagatagacaaaccttgtacaggatgttctcatatgggtttc

SEQ ID NO: 6298 - DNA, 55 bp, Artificial
  Synthetic oligonucleotide
tccttccgcataattctctgtacattgctgacttcggagaagtcaagcccgttga

SEQ ID NO: 6299 - DNA, 52 bp, Artificial
  Synthetic oligonucleotide
ggggtcctccatatagtcctcaaactcttcagacctaatgtcaaatatgcca

SEQ ID NO: 6300 - DNA, 60 bp, Artificial
  Synthetic oligonucleotide
atggttgtgtgtacagccactcttgtcagcgctgtctatctctatgcaacgtgacaggag

SEQ ID NO: 6301 - DNA, 51 bp, Artificial
  Synthetic oligonucleotide
gggagtttgggttctactcaatgtcctccactgtgtttctcctagctagag

SEQ ID NO: 6302 - DNA, 60 bp, Artificial
  Synthetic oligonucleotide
aacttccttatctacgtaatcagactgcctaacgtgtgccatggcacagtcgctctgttt

SEQ ID NO: 6303 - DNA, 55 bp, Artificial
  Synthetic oligonucleotide
gaccagatatcttgttgagacctcctcaagattttagagcaattctccacccact

SEQ ID NO: 6304 - DNA, 60 bp, Artificial
  Synthetic oligonucleotide
taaagccatgtgcactctcactgatgtgtatctccccgaactccggccatacctgcaacc

SEQ ID NO: 6305 - DNA, 60 bp, Artificial
  Synthetic oligonucleotide
ctgagtcgcgtgtacaaaatcatgatagacttcaagccgtgtaggcttatggtgtggaga

SEQ ID NO: 6306 - DNA, 60 bp, Artificial
  Synthetic oligonucleotide
cgtgtacaaaatcatgatagacttcaagccgtgtaggcttatggtgtggagagacgcgac

SEQ ID NO: 6307 - DNA, 60 bp, Artificial
  Synthetic oligonucleotide
cacgtggttgcaatcgcatcccgacattgatgccctgtgcaaacgagcctgtgaggagca

SEQ ID NO: 6308 - DNA, 51 bp, Artificial
  Synthetic oligonucleotide
ctatgggagcagtagtcgcactcctttggggggtgtattcagccatagaaa

SEQ ID NO: 6309 - DNA, 60 bp, Artificial
  Synthetic oligonucleotide
gctcgaagtgtgtatggtgccatataaggctcaccgccatatacactgcaagaattacta

SEQ ID NO: 6310 - DNA, 55 bp, Artificial
  Synthetic oligonucleotide
ccatataaggctcaccaccatatacactgcaagaattactattcttgtgggcccc

SEQ ID NO: 6311 - DNA, 51 bp, Artificial
  Synthetic oligonucleotide
gaaggctctacaagtttatgaacggggttgccgctggtaccctatagtcgg

SEQ ID NO: 6312 - DNA, 60 bp, Artificial
  Synthetic oligonucleotide
gtctactcggatgatcttgtgctgtatgccgagtcccccaccatgccaaactaccactgg

SEQ ID NO: 6313 - DNA, 60 bp, Artificial
  Synthetic oligonucleotide
gactgtcttcgtggcgtgtgtggcgaatgcgaaatgggtatccacatcggcgctgacact

SEQ ID NO: 6314 - DNA, 60 bp, Artificial
  Synthetic oligonucleotide
cacaagacggggcgcggaggttgagttcatccactgcttgtgagatcaaggagagcgtac

SEQ ID NO: 6315 - DNA, 60 bp, Artificial
  Synthetic oligonucleotide
tgagcacgatgagtggctgctttgataagaggggtggattgtcatctggagatcctgtga

SEQ ID NO: 6316 - DNA, 58 bp, Artificial
  Synthetic oligonucleotide
atgttatgactcccaacgaggttcagatgtgtcgatcttcattggtgaccctttttaa

SEQ ID NO: 6317 - DNA, 55 bp, Artificial
  Synthetic oligonucleotide
gatcttgtgctgtatgccgagtctcccaccatgccaaactaccactggtgggttg

SEQ ID NO: 6318 - DNA, 55 bp, Artificial
  Synthetic oligonucleotide
attagactcctcacggcatctctcaaccgcaacaagctttctctggcgttctacg

SEQ ID NO: 6319 - DNA, 60 bp, Artificial
  Synthetic oligonucleotide
caagcctgcacccgacccagtcggcgctgcttgtgagtttgattcgccagagtgtagaga

SEQ ID NO: 6320 - DNA, 55 bp, Artificial
  Synthetic oligonucleotide
cctgtgtccgacccggtcggtactgcttgtgagtttgattcgccagagtgtagga

SEQ ID NO: 6321 - DNA, 60 bp, Artificial
  Synthetic oligonucleotide
ttcagagcacaaacagagttgcactcactatgggagcagtagtcgcgctcctttggggag

SEQ ID NO: 6322 - DNA, 60 bp, Artificial
  Synthetic oligonucleotide
ttacactgtggagtttagtttgcctacgcatcatactgtacgcctgatccgcgtcacagc

SEQ ID NO: 6323 - DNA, 55 bp, Artificial
  Synthetic oligonucleotide
ccgactggacctatcgtcatacagtacttctctgttaaggagagctggatccgcc

SEQ ID NO: 6324 - DNA, 55 bp, Artificial
  Synthetic oligonucleotide
tccatcattcgcattcaagcacccgttgggtatgttttggcatgtgcgagtctcc

SEQ ID NO: 6325 - DNA, 55 bp, Artificial
  Synthetic oligonucleotide
gcaccctcaagaagcagtattgcgggaagaagaaaaccaggaccatacttggcac

SEQ ID NO: 6326 - DNA, 60 bp, Artificial
  Synthetic oligonucleotide
ccctgattgtctactcggatgatcttgtgctgtatgccgagtctcccaccatgccaaact

SEQ ID NO: 6327 - DNA, 54 bp, Artificial
  Synthetic oligonucleotide
gcgccatttgtgcagatctggaagggtcgagctctccgctccccaaggtcgcac

SEQ ID NO: 6328 - DNA, 59 bp, Artificial
  Synthetic oligonucleotide
cccagcgtgccaggacgagcccctcgatttgtctgcgtccccgcaggctgaatatgagg

SEQ ID NO: 6329 - DNA, 60 bp, Artificial
  Synthetic oligonucleotide
aatggcactgattgacactgtgcctctaagtcacctattcaattagggcgaccgtgtggg

SEQ ID NO: 6330 - DNA, 54 bp, Artificial
  Synthetic oligonucleotide
acatccgagttcctgttaactctacggtgtatttggacccctgcatgggccctg

SEQ ID NO: 6331 - DNA, 60 bp, Artificial
  Synthetic oligonucleotide
gtgaatggccgcgattggcgtgtggcttctgagtcacctattcaattagggcgatcacat

SEQ ID NO: 6332 - DNA, 55 bp, Artificial
  Synthetic oligonucleotide
cgcgattgacgtgtggcctctaagtcacctattcaattagggcgatcacatgggg

SEQ ID NO: 6333 - DNA, 60 bp, Artificial
  Synthetic oligonucleotide
gataagttacactgtggagtttagtttgcctacgcatcatactgtgcgcctgatccgtgt

SEQ ID NO: 6334 - DNA, 60 bp, Artificial
  Synthetic oligonucleotide
ggtgtccctggcaagtacctacagcggaggctgcaagttaatggtctccgagcagtgacc

SEQ ID NO: 6335 - DNA, 55 bp, Artificial
  Synthetic oligonucleotide
gtgaacccgtgcggtaaccgtctatttcaaggagccactgggacagtggcccgca

SEQ ID NO: 6336 - DNA, 60 bp, Artificial
  Synthetic oligonucleotide
agtcacctattcaattagggcgatcacatgggggtcatacttaatcaggcaggaaccatg

SEQ ID NO: 6337 - DNA, 60 bp, Artificial
  Synthetic oligonucleotide
gcaggagtggctctctcgcatgtgggatagggttgacatgctgacttggcgcgacacgtc

SEQ ID NO: 6338 - DNA, 60 bp, Artificial
  Synthetic oligonucleotide
cgtctatgcatgctcgcagatttggccctttctcttgtttatgtggtgtcccaggggcgt

SEQ ID NO: 6339 - DNA, 60 bp, Artificial
  Synthetic oligonucleotide
ttcgatttggggcgcataagtggtatggcgctgccggtaaacgagctcgcgctaagcgtg

SEQ ID NO: 6340 - DNA, 55 bp, Artificial
  Synthetic oligonucleotide
tggagcgcataagtggtatggcgctgccggtaaacgggctcgtgccaagcgtacc

SEQ ID NO: 6341 - DNA, 55 bp, Artificial
  Synthetic oligonucleotide
ggtaggataagttacactgtggagtttagtttgccaacgcatcacactgtgcgtc

SEQ ID NO: 6342 - DNA, 55 bp, Artificial
  Synthetic oligonucleotide
gcctcgtacatccgagttcctgttaactctacggtgtacttggacccctgcatgg

SEQ ID NO: 6343 - DNA, 55 bp, Artificial
  Synthetic oligonucleotide
gggaggataagttacactgtggagtttagtttgcctacgcatcataccgtgcgcc

SEQ ID NO: 6344 - DNA, 60 bp, Artificial
  Synthetic oligonucleotide
cgacgcttgtgagcatggcgcgggattgtgctgtgaagtggacggctccaccttatgcgc

SEQ ID NO: 6345 - DNA, 60 bp, Artificial
  Synthetic oligonucleotide
ggatgattgtaggtatgatgcctcgtcttcggtccattttcaaccatcgccaactggtgg

SEQ ID NO: 6346 - DNA, 57 bp, Artificial
  Synthetic oligonucleotide
ccacaacgacaccaagtctgtgcctcagccactggcacgcctgttagagagtagcat

SEQ ID NO: 6347 - DNA, 60 bp, Artificial
  Synthetic oligonucleotide
ggggcgatgccttgaaactgatttggcctcgtgtgacagatccacacctgccattgtgag

SEQ ID NO: 6348 - DNA, 60 bp, Artificial
  Synthetic oligonucleotide
ttcgtccgcttgagcagtgatggggtctatcgcgtcgcccctgagctgacgcccatgatt

SEQ ID NO: 6349 - DNA, 60 bp, Artificial
  Synthetic oligonucleotide
tgcgttgcggtgggcttccatcataaccttgttcattgtgattgcgcgactccgctcctt

SEQ ID NO: 6350 - DNA, 55 bp, Artificial
  Synthetic oligonucleotide
tccgcgctatttgtgctgacctagaagggtcgagctctccgctccccaaggtcgc

SEQ ID NO: 6351 - DNA, 57 bp, Artificial
  Synthetic oligonucleotide
ttgttcggccagtctggaggggagctgtatgccactaccacaagtggcacataacct

SEQ ID NO: 6352 - DNA, 60 bp, Artificial
  Synthetic oligonucleotide
taagcgtgttgtagattctctccgcgccatttgtgctgatctagaagggtcgagctctcc

SEQ ID NO: 6353 - DNA, 55 bp, Artificial
  Synthetic oligonucleotide
acctattaccaacatcaggtcgacggcggcaattggtttcacctagaatggttgc

SEQ ID NO: 6354 - DNA, 52 bp, Artificial
  Synthetic oligonucleotide
gccggcctctatgccttctcgcagatagtagcgaaaggcaacgccgccaaaa

SEQ ID NO: 6355 - DNA, 55 bp, Artificial
  Synthetic oligonucleotide
gctcctcattatccacggtttcaatggggccgtaggttatttgcggccgcaaggg

SEQ ID NO: 6356 - DNA, 55 bp, Artificial
  Synthetic oligonucleotide
ggaatagatatcattaagcagggtcaaacaaaactcaccaaaacgataggtacgc

SEQ ID NO: 6357 - DNA, 55 bp, Artificial
  Synthetic oligonucleotide
ctggctgcccagtagggatttgcgaattcttccctccttgcgaggaagtcttcgc

SEQ ID NO: 6358 - DNA, 55 bp, Artificial
  Synthetic oligonucleotide
ctatatgccgggctaaaggtgcaacgttcctgtgaacagcttagtacgcgcgtcg

SEQ ID NO: 6359 - DNA, 60 bp, Artificial
  Synthetic oligonucleotide
tgttagcatttcggacgcgaagatgctgatcatacgggaacgcacatagtaggaggagcc

SEQ ID NO: 6360 - DNA, 51 bp, Artificial
  Synthetic oligonucleotide
actaacctgtaggttcatacgtatggcaacagttttcattggcactagatt

SEQ ID NO: 6361 - DNA, 60 bp, Artificial
  Synthetic oligonucleotide
gaatttgatttcctacaggacagtgttcttattgacataacatccacttcaaagaatgct

SEQ ID NO: 6362 - DNA, 55 bp, Artificial
  Synthetic oligonucleotide
tgtccaatatctagtttatgcatcattggcagacgcccaaaacaatagacctgta

SEQ ID NO: 6363 - DNA, 53 bp, Artificial
  Synthetic oligonucleotide
ggccgatacctccgacaggggtgccggttggtgacttttatgtctgtggcagg

SEQ ID NO: 6364 - DNA, 60 bp, Artificial
  Synthetic oligonucleotide
tcaaccgccactgccatggtccatggtaacactctttcctatgcagcacgcacccaggac

SEQ ID NO: 6365 - DNA, 60 bp, Artificial
  Synthetic oligonucleotide
ttgactggacccgctatgatggtactataccacctgcgctctttaggcatattaaagaga

SEQ ID NO: 6366 - DNA, 60 bp, Artificial
  Synthetic oligonucleotide
caacctagtttaggccatggtgagacgcctgcgacacttggcaggtctattccaacttca

SEQ ID NO: 6367 - DNA, 60 bp, Artificial
  Synthetic oligonucleotide
acagtggatcgcgcaaccatgatcacaagtcgcgctttccccacgccaaatcacaaatct

SEQ ID NO: 6368 - DNA, 56 bp, Artificial
  Synthetic oligonucleotide
caacgtgaaaagtacagacatgtccatgaatggtatgttgataacctccttaatcg

SEQ ID NO: 6369 - DNA, 60 bp, Artificial
  Synthetic oligonucleotide
tgcaacccccttatctgttagggcatcccaatataatctgtggaagctatccagactcca

SEQ ID NO: 6370 - DNA, 55 bp, Artificial
  Synthetic oligonucleotide
caagcttgcactagcaaacataaccattagtgataagctagatgctgtgaggcaa

SEQ ID NO: 6371 - DNA, 60 bp, Artificial
  Synthetic oligonucleotide
ttagaattaagctcgcactagcaaatataaccattagtgacaagctagatgccgtgaggc

SEQ ID NO: 6372 - DNA, 51 bp, Artificial
  Synthetic oligonucleotide
atgttaatgggaaggtcgtggctactgtaccaactaggatcaaaaatgttg

SEQ ID NO: 6373 - DNA, 50 bp, Artificial
  Synthetic oligonucleotide
atgatactgtggtctatggagacgatagactctccactacaccttcagta

SEQ ID NO: 6374 - DNA, 53 bp, Artificial
  Synthetic oligonucleotide
acttatggaggtaagttatgccgttgtgtacaccattggctttgttttatggt

SEQ ID NO: 6375 - DNA, 55 bp, Artificial
  Synthetic oligonucleotide
gcctatgatagtgaagccgagtatttggaagattgtgggtggcaagagtacctgg

SEQ ID NO: 6376 - DNA, 60 bp, Artificial
  Synthetic oligonucleotide
tgcaccctagaagtgctctaggacctagacaggggtggtggaatgttgatcccggtgaca

SEQ ID NO: 6377 - DNA, 55 bp, Artificial
  Synthetic oligonucleotide
gctctaggacctagacaggggtggtggaatgttgatcccggtgacagcccaactg

SEQ ID NO: 6378 - DNA, 59 bp, Artificial
  Synthetic oligonucleotide
tggcactgtcatgaggagcgctcgccccggtacagacttaattacacttgcaacatccc

SEQ ID NO: 6379 - DNA, 55 bp, Artificial
  Synthetic oligonucleotide
gtgcattatgcattatagacacccctgaagggaaaggaacaggcttcttttctgg

SEQ ID NO: 6380 - DNA, 60 bp, Artificial
  Synthetic oligonucleotide
ccaaagtgtgcatatgttgggaccatggccctagatagggtaaagctcatggatcgcaat

SEQ ID NO: 6381 - DNA, 55 bp, Artificial
  Synthetic oligonucleotide
atgcaaataacaaacagacttgggtcaataaaccccttgatgcgccttcgggcca

SEQ ID NO: 6382 - DNA, 60 bp, Artificial
  Synthetic oligonucleotide
cacgcaaatgtgttatgagatgctgacatctataccacgctccagggcatctggtcatgg

SEQ ID NO: 6383 - DNA, 60 bp, Artificial
  Synthetic oligonucleotide
agtctacgcaaatgtgttatgagatgctgacatctattccacgctccagagcatctggtt

SEQ ID NO: 6384 - DNA, 54 bp, Artificial
  Synthetic oligonucleotide
ccagaatcagtagataccatcaaagcaagaccccatgttgaagttcccataggg

SEQ ID NO: 6385 - DNA, 53 bp, Artificial
  Synthetic oligonucleotide
gcgctcatctttacaattggatatatcaatcctcagacatgagcttgagcgtg

SEQ ID NO: 6386 - DNA, 60 bp, Artificial
  Synthetic oligonucleotide
ctggatagttatttcagtgcttgtattcggcctgatttcactcgcagacgcgcagaactt

SEQ ID NO: 6387 - DNA, 55 bp, Artificial
  Synthetic oligonucleotide
cagtgcttgtattcggcctgatttcactcgcagacgcgcagaacttgactccacc

SEQ ID NO: 6388 - DNA, 50 bp, Artificial
  Synthetic oligonucleotide
aacagcgattggagagcgagtcaaggaagtcacgcttgcagttaacaccc

SEQ ID NO: 6389 - DNA, 60 bp, Artificial
  Synthetic oligonucleotide
atagagaccaacgtgaaaagtacagacacgtgcatgaatggtatgttgataacctcctta

SEQ ID NO: 6390 - DNA, 60 bp, Artificial
  Synthetic oligonucleotide
catacaagcctagtggcagtagtcactatgatccctatgatagggtactacaacatggta

SEQ ID NO: 6391 - DNA, 60 bp, Artificial
  Synthetic oligonucleotide
atgccccagcagaaagatgcccgtattggcatgtggtatcgtgctttaactagtgttgga

SEQ ID NO: 6392 - DNA, 60 bp, Artificial
  Synthetic oligonucleotide
gtaaggttgcacaacactcagaaggatcgtgatgattgggttcagagatgctccaggtta

SEQ ID NO: 6393 - DNA, 57 bp, Artificial
  Synthetic oligonucleotide
taagaaagtgcagggaccgccagtaaattccaggatgacaacagtagtcacacttgg

SEQ ID NO: 6394 - DNA, 59 bp, Artificial
  Synthetic oligonucleotide
agggccatataagatcaatagagtgcaccaactgtaagaagagtttcccaggaatcgag

SEQ ID NO: 6395 - DNA, 53 bp, Artificial
  Synthetic oligonucleotide
accccatgttgaagttcccatagggtcgaaaactgtttggaaagtgcacccta

SEQ ID NO: 6396 - DNA, 60 bp, Artificial
  Synthetic oligonucleotide
gggaatagggtgtcaaccgctgagactggggtattttgtctggcatccataccagccgca

SEQ ID NO: 6397 - DNA, 51 bp, Artificial
  Synthetic oligonucleotide
agagaatgggtagagatctacccaatagagcatctaaatctcatgtcatct

SEQ ID NO: 6398 - DNA, 56 bp, Artificial
  Synthetic oligonucleotide
tagcgacagtgatgttgttgaccttgtcagaactgcaatggaacgtgagatgaagg

SEQ ID NO: 6399 - DNA, 59 bp, Artificial
  Synthetic oligonucleotide
tactcctgattttcaaccttcgcgtgacccaacccctattgctggcatgtcagtgatgg

SEQ ID NO: 6400 - DNA, 54 bp, Artificial
  Synthetic oligonucleotide
ccaccactttgtaccaggccggaacgagtgggtagagactgatgcttcaaccca

SEQ ID NO: 6401 - DNA, 51 bp, Artificial
  Synthetic oligonucleotide
aacccttaaaaacaccagtgatggggctgtagcaatacaactctcaggagc

SEQ ID NO: 6402 - DNA, 53 bp, Artificial
  Synthetic oligonucleotide
gcacaatggcacgtagacaaatgacacctaccatggttgcaaaacttcccaac

SEQ ID NO: 6403 - DNA, 55 bp, Artificial
  Synthetic oligonucleotide
gtggttgtgaataccctacccaaggatctagtgtttaagtacagcttagacaatt

SEQ ID NO: 6404 - DNA, 50 bp, Artificial
  Synthetic oligonucleotide
tatttacatccagagaagagcatggatgaacttaggaaggactgggagag

SEQ ID NO: 6405 - DNA, 55 bp, Artificial
  Synthetic oligonucleotide
agggtggccaatcttgtggcccaatgctagaggtgcatggactcggtaagacaac

SEQ ID NO: 6406 - DNA, 60 bp, Artificial
  Synthetic oligonucleotide
gtcactgtggacatcccactatagttgccgcggatgttggggaatacatacttgcactag

SEQ ID NO: 6407 - DNA, 54 bp, Artificial
  Synthetic oligonucleotide
tggtgagtggtggaccgaaatattatgtcggctccggctggcaaagctgggcct

SEQ ID NO: 6408 - DNA, 54 bp, Artificial
  Synthetic oligonucleotide
ctaatgagatgtttggtgtggagaataataccatgtcacgagcaaatatagaca

SEQ ID NO: 6409 - DNA, 52 bp, Artificial
  Synthetic oligonucleotide
cggtagagcacctatcaccgccgggttaaatttcacaacagcaatgaccgag

SEQ ID NO: 6410 - DNA, 55 bp, Artificial
  Synthetic oligonucleotide
ggatgtaactcagactggagtgctcttcggacaaccaagattgggtgttggtgtc

SEQ ID NO: 6411 - DNA, 60 bp, Artificial
  Synthetic oligonucleotide
tcgtcacaatatacaccacacatggtgtatgactttcgcggccaaagaattagtaccaca

SEQ ID NO: 6412 - DNA, 55 bp, Artificial
  Synthetic oligonucleotide
caccacacatggtgtatgactttcgcggccaaagaattagtaccacagagtcagc

SEQ ID NO: 6413 - DNA, 50 bp, Artificial
  Synthetic oligonucleotide
aacattgggtcgatccatcccagagcctggtgaccagttcaaagttatca

SEQ ID NO: 6414 - DNA, 60 bp, Artificial
  Synthetic oligonucleotide
gttaaggacgctactgggagtactcaatttggcccagtgcaggcgctaggagcgcagtat

SEQ ID NO: 6415 - DNA, 60 bp, Artificial
  Synthetic oligonucleotide
gacgctactgggagtactcagtttggcccagtgcaggcgctaggagcgcagtattcaatg

SEQ ID NO: 6416 - DNA, 60 bp, Artificial
  Synthetic oligonucleotide
tcagtggtgttcttagatctagagcaggaagccaatacagctggaccagagtctgtggat

SEQ ID NO: 6417 - DNA, 51 bp, Artificial
  Synthetic oligonucleotide
gaatgacgcaaatagcacctacctgttgtattcatcggtagctgatgcaca

SEQ ID NO: 6418 - DNA, 60 bp, Artificial
  Synthetic oligonucleotide
gtacagacatgtgcatgaatggtatgttgataacctccttaatcgccatgtactcttacc

SEQ ID NO: 6419 - DNA, 50 bp, Artificial
  Synthetic oligonucleotide
tctatcaggtattctacaagatggcacacggtgagccatattatagttct

SEQ ID NO: 6420 - DNA, 55 bp, Artificial
  Synthetic oligonucleotide
gcaaggcgcgcattccccacgctttccgataggatcaagcgtggagtatacatgg

SEQ ID NO: 6421 - DNA, 55 bp, Artificial
  Synthetic oligonucleotide
gacacagtgctccggtttggggaccccgatgcacgtcgcaggggtttccaattgg

SEQ ID NO: 6422 - DNA, 60 bp, Artificial
  Synthetic oligonucleotide
ttaaggagtcgcgccgtgagttgtcccagctcaagttggagcactcactgttgagacatg

SEQ ID NO: 6423 - DNA, 57 bp, Artificial
  Synthetic oligonucleotide
gaggagattgatcgtgactggttcggacagaaccttcccacgtggagctccgcatgg

SEQ ID NO: 6424 - DNA, 60 bp, Artificial
  Synthetic oligonucleotide
tcgtcaaccacaggttcgtagtggcacctttatgctggtctattcgattggcactaacac

SEQ ID NO: 6425 - DNA, 60 bp, Artificial
  Synthetic oligonucleotide
tgtcagataaagttatgaacctgggttcagctcgttcacgtgagtggcttaacgagctac

SEQ ID NO: 6426 - DNA, 60 bp, Artificial
  Synthetic oligonucleotide
gacttcagcccctggtgggtaactcagctgtgagtggtactgtggctcgtgtcagcctta

SEQ ID NO: 6427 - DNA, 60 bp, Artificial
  Synthetic oligonucleotide
gtccagatatcaattgggtactggtgtcacacttgcagtccaaggtatggttacattggg

SEQ ID NO: 6428 - DNA, 55 bp, Artificial
  Synthetic oligonucleotide
tgggtactggtgtcacacttgcagtccaaggtatggttacattgggttgctacag

SEQ ID NO: 6429 - DNA, 58 bp, Artificial
  Synthetic oligonucleotide
ttgcaactgactcgccatgaattggagaggtgtaggccaaccatcattcgaccgcaaa

SEQ ID NO: 6430 - DNA, 53 bp, Artificial
  Synthetic oligonucleotide
gttagctatggagcgttcctataaaccaaggggtcttaatatctatgaccctt

SEQ ID NO: 6431 - DNA, 50 bp, Artificial
  Synthetic oligonucleotide
gtgcatttgctaaggttgtttatatacatcctagcaaggatgtggcatat

SEQ ID NO: 6432 - DNA, 54 bp, Artificial
  Synthetic oligonucleotide
atggcctctctgaagttgatacataagagtaacgctctacaggagagacttcgc

SEQ ID NO: 6433 - DNA, 59 bp, Artificial
  Synthetic oligonucleotide
caacatatcgtgaatttcggtatctagaggatactagagtgatacacataactgcaact

SEQ ID NO: 6434 - DNA, 50 bp, Artificial
  Synthetic oligonucleotide
gacctctggaagacttatgataccgtagtctatggagatgacaggctctc

SEQ ID NO: 6435 - DNA, 52 bp, Artificial
  Synthetic oligonucleotide
aaaaccgtctggaaagtgcaccctagaagtgctctaggacctagacaggggt

SEQ ID NO: 6436 - DNA, 53 bp, Artificial
  Synthetic oligonucleotide
atcgcctatggaaggacaccggcttggacggccctcatgaagtgtaacgccat

SEQ ID NO: 6437 - DNA, 60 bp, Artificial
  Synthetic oligonucleotide
ctaccactcattagatgcatggaaattgctgttagagcctccgcgggagcggaggtgcgt

SEQ ID NO: 6438 - DNA, 55 bp, Artificial
  Synthetic oligonucleotide
acaatggccgcaacaggagtaaatcaagggcccgctcacaatctagagggcggga

SEQ ID NO: 6439 - DNA, 55 bp, Artificial
  Synthetic oligonucleotide
acaatggccgcaacaggagtaaatcaagggcccgatcacaatctaggggccgaga

SEQ ID NO: 6440 - DNA, 58 bp, Artificial
  Synthetic oligonucleotide
tggtcacaaatcatggaggctatagatgctagtagaagttttttccagtcagttaaga

SEQ ID NO: 6441 - DNA, 54 bp, Artificial
  Synthetic oligonucleotide
cagtggtgcgctgttgagagacctggaggctgttgaaccgaaatacagacatcc

SEQ ID NO: 6442 - DNA, 60 bp, Artificial
  Synthetic oligonucleotide
ccggcagatagtgtgtgccgaccccatttacaccaggataggggcgtgcttagaggcaca

SEQ ID NO: 6443 - DNA, 60 bp, Artificial
  Synthetic oligonucleotide
ctgatatccggcagatagtgtgtgccgaccccatttacaccaggataggggcgtgcttag

SEQ ID NO: 6444 - DNA, 60 bp, Artificial
  Synthetic oligonucleotide
cgcgcattccccacgcttacagataggattaagcgtggagtatacatggacctgcttgtt

SEQ ID NO: 6445 - DNA, 60 bp, Artificial
  Synthetic oligonucleotide
tggcatacagcagcgttccttgttggtaccgcacatgttgtggcggctgaacggccgatt

SEQ ID NO: 6446 - DNA, 60 bp, Artificial
  Synthetic oligonucleotide
cgtttgaggaacatcagaacactctcatgaaacatcgcactgcgacacgcatgccacaat

SEQ ID NO: 6447 - DNA, 60 bp, Artificial
  Synthetic oligonucleotide
acaccgaggctaaaatttgccaaggagatgatgtatgaggctctccgtgattccgattgg

SEQ ID NO: 6448 - DNA, 50 bp, Artificial
  Synthetic oligonucleotide
cgggaggctgatctcacggaaatacgacgtccagagctcaaccctacccg

SEQ ID NO: 6449 - DNA, 57 bp, Artificial
  Synthetic oligonucleotide
ccagatactcccagacctagcatggatgcggcagatagagggggctgtcttgaagcc

SEQ ID NO: 6450 - DNA, 55 bp, Artificial
  Synthetic oligonucleotide
tactgcaggctagtgagtcggagtctcacagtgaggtcaagcacactccctggtg

SEQ ID NO: 6451 - DNA, 55 bp, Artificial
  Synthetic oligonucleotide
atctctccattggagaccaggagtacttcccaaagtactacccaacacaccgccc

SEQ ID NO: 6452 - DNA, 50 bp, Artificial
  Synthetic oligonucleotide
acgctcttgaagcagttcagtcgacttccgtgtacacccccaagtaccca

SEQ ID NO: 6453 - DNA, 60 bp, Artificial
  Synthetic oligonucleotide
acatgggcaacctttgcaatgaacatagccccggctctagttgtagactcgtcatgtctg

SEQ ID NO: 6454 - DNA, 60 bp, Artificial
  Synthetic oligonucleotide
attcagcgctcgtggaaacaagcgacgctcttgaagcggttcagtcaacctcagtgtaca

SEQ ID NO: 6455 - DNA, 52 bp, Artificial
  Synthetic oligonucleotide
taggctacacaaacgagcagctagcaaaactgctggagcagacactaccgat

SEQ ID NO: 6456 - DNA, 60 bp, Artificial
  Synthetic oligonucleotide
gccaacaatctgctgaagagcagcctgacggagacaagagaagcactggagaccatccag

SEQ ID NO: 6457 - DNA, 55 bp, Artificial
  Synthetic oligonucleotide
gctgaagagcagcctgacggagacaagagaagcactggagaccatccagtcagac

SEQ ID NO: 6458 - DNA, 60 bp, Artificial
  Synthetic oligonucleotide
gggagcctagcagtgactatccacggtggcaactatccaggggccctccgtcctgtcaca

SEQ ID NO: 6459 - DNA, 60 bp, Artificial
  Synthetic oligonucleotide
gcttcccgagaatggaccagcaagcattccggacgacataacagagagacacatactaaa

SEQ ID NO: 6460 - DNA, 60 bp, Artificial
  Synthetic oligonucleotide
ctccggctctagttgtggactcgtcgtgtctgataatgaacctgcaaatcaagacctacg

SEQ ID NO: 6461 - DNA, 60 bp, Artificial
  Synthetic oligonucleotide
ggagacacgactgcagaggcgctcgtactggctgactccttcatacgtgacctcggaaaa

SEQ ID NO: 6462 - DNA, 60 bp, Artificial
  Synthetic oligonucleotide
ctacctcgaattgggtgtttgatcagtacatctacacagctcaggagttgaaggactcat

SEQ ID NO: 6463 - DNA, 60 bp, Artificial
  Synthetic oligonucleotide
aaggactcatatgactatggcagactgatttcaggctcgctaagcattaagtccagcacc

SEQ ID NO: 6464 - DNA, 60 bp, Artificial
  Synthetic oligonucleotide
aacatctctggcacgctaattgcaaacagtcagcgaaccctaacatggtccaacactggt

SEQ ID NO: 6465 - DNA, 60 bp, Artificial
  Synthetic oligonucleotide
cctcaatgacatgccatactatgagatgggtggccatagggtgtacaactccgtttcctc

SEQ ID NO: 6466 - DNA, 60 bp, Artificial
  Synthetic oligonucleotide
gaatctatagcaataacgcctcgatccaagagtcgtacactgtggatgactttgtatcct

SEQ ID NO: 6467 - DNA, 60 bp, Artificial
  Synthetic oligonucleotide
ggctagtgagtcggagtctcacagtgaggtcaagcacactccctggtggcgtttatgcac

SEQ ID NO: 6468 - DNA, 60 bp, Artificial
  Synthetic oligonucleotide
agtgagcaggagcctaaccgtgcggtcaagcacactccctggtggcgtttatgctctaaa

SEQ ID NO: 6469 - DNA, 55 bp, Artificial
  Synthetic oligonucleotide
ggtgggctaaacaggatcgtggagtggataatggctccggatgaacccaaggcct

SEQ ID NO: 6470 - DNA, 55 bp, Artificial
  Synthetic oligonucleotide
cgacccaaagtcccaatccatgtggctatgacgggagccctcaatgcttgtggcg

SEQ ID NO: 6471 - DNA, 60 bp, Artificial
  Synthetic oligonucleotide
tggcacccgacataccacgactgtttatgtatgcacgcaagtgccccctaacaaatctct

SEQ ID NO: 6472 - DNA, 60 bp, Artificial
  Synthetic oligonucleotide
gcttacatggatgtgtttcgacccaaagtcccaatccatgtggctatgacgggagccctc

SEQ ID NO: 6473 - DNA, 50 bp, Artificial
  Synthetic oligonucleotide
ccaaatactcccagacctagcttggatgcgacagatagagggggcggttc

SEQ ID NO: 6474 - DNA, 60 bp, Artificial
  Synthetic oligonucleotide
ggccagctacaactactgcaggctagtgagtcggagtctcacagtgaggtcaagcacact

SEQ ID NO: 6475 - DNA, 55 bp, Artificial
  Synthetic oligonucleotide
ggctactaggggcgatacccgccgctagctgccacgttagtggctcctcttcttg

SEQ ID NO: 6476 - DNA, 60 bp, Artificial
  Synthetic oligonucleotide
ctaggggcgatgcccgccgctagctgccacgttagtggctcctcttcttgatgattctgc

SEQ ID NO: 6477 - DNA, 60 bp, Artificial
  Synthetic oligonucleotide
tccgaaatgacccagctggactcatatgcaagctccgcgccgtaaggcaagctgaaccaa

SEQ ID NO: 6478 - DNA, 60 bp, Artificial
  Synthetic oligonucleotide
cccaattatgggcccatcagctcagctaggactgtccctgctcgtgaacagcattgaaga

SEQ ID NO: 6479 - DNA, 58 bp, Artificial
  Synthetic oligonucleotide
actcatcgcccgagcaaggagaagcctaatgcgtacccaccagacattgcattactca

SEQ ID NO: 6480 - DNA, 60 bp, Artificial
  Synthetic oligonucleotide
ggactcctcgtgtctgataatgaacctgcaaattaagacctatggtcaaggcagtgggaa

SEQ ID NO: 6481 - DNA, 59 bp, Artificial
  Synthetic oligonucleotide
gttgggatcgagcaagcatacaaggtagttaggtatgaggcgttgagactggtaggtgg

SEQ ID NO: 6482 - DNA, 60 bp, Artificial
  Synthetic oligonucleotide
acacaagtatcgcatacttaggccgcgagccatacccactatggtcgaactagagacgga

SEQ ID NO: 6483 - DNA, 60 bp, Artificial
  Synthetic oligonucleotide
ggggccagagacgctaaggcaggtgagagaggcaatcgcaaccctgcaatatgggtccgg

SEQ ID NO: 6484 - DNA, 60 bp, Artificial
  Synthetic oligonucleotide
ttgatgtccacactcgttgtggctgagtggcacaaagccggaaggccaaacccgatgtcc

SEQ ID NO: 6485 - DNA, 60 bp, Artificial
  Synthetic oligonucleotide
cctactcggctggtcagccgtgtacagccgacagctcgagatgttcgttcccgttctcga

SEQ ID NO: 6486 - DNA, 60 bp, Artificial
  Synthetic oligonucleotide
acaaggacccgaagagtgccgtgtggaggctactcgaccagcggaccaagctcagagtga

SEQ ID NO: 6487 - DNA, 60 bp, Artificial
  Synthetic oligonucleotide
caagtgagctctacatcgcagtaaggggcgaccacagagacctaatgtcgcccgacgtgc

SEQ ID NO: 6488 - DNA, 55 bp, Artificial
  Synthetic oligonucleotide
gtaaggggcgaccacagagacctaatgtcgcccgacgtgcgagactcatatgccc

SEQ ID NO: 6489 - DNA, 60 bp, Artificial
  Synthetic oligonucleotide
agtcaacagtcacccgcccagagagcgtcggacaccaggctgcatttcagggctggttct

SEQ ID NO: 6490 - DNA, 55 bp, Artificial
  Synthetic oligonucleotide
cccaggagccatgaactacacaaaattgatactgagtgagagggaccgtcttggc

SEQ ID NO: 6491 - DNA, 53 bp, Artificial
  Synthetic oligonucleotide
atacgacatccaaagctccacactaccggccggtctctatgctctgaacggga

SEQ ID NO: 6492 - DNA, 60 bp, Artificial
  Synthetic oligonucleotide
cccctcaaaaggagtcatcgtccctgtggtgcacacagtcaagagtgcaccaggcgaggc

SEQ ID NO: 6493 - DNA, 55 bp, Artificial
  Synthetic oligonucleotide
tcgtccctgtggtgcacacagtcaagagtgcaccaggcgaggcattcgggtccct

SEQ ID NO: 6494 - DNA, 50 bp, Artificial
  Synthetic oligonucleotide
gatccctaaagtttgggtgccacctgaggatccgcttgccagccctagtc

SEQ ID NO: 6495 - DNA, 60 bp, Artificial
  Synthetic oligonucleotide
cctaccagcgagctacaactattgcaggctagtgagtcggagtctaacagtaaggtcaag

SEQ ID NO: 6496 - DNA, 55 bp, Artificial
  Synthetic oligonucleotide
agatgtcctggttggcaagtgggaacctagcagtgacaattcatggtggaaacta

SEQ ID NO: 6497 - DNA, 54 bp, Artificial
  Synthetic oligonucleotide
cgagcgactaattgcatcagctgcctacccaaagggtctcgagaacaagaccct

SEQ ID NO: 6498 - DNA, 60 bp, Artificial
  Synthetic oligonucleotide
tctgccaccatgagtgacgtattcaacagtccacaggcgcgaacgaagatatcagcagcg

SEQ ID NO: 6499 - DNA, 59 bp, Artificial
  Synthetic oligonucleotide
gcccgagcaaggaaaagcccaatgcgtacccaccagacattgcactactcaagcagata

SEQ ID NO: 6500 - DNA, 57 bp, Artificial
  Synthetic oligonucleotide
ctctacaaattcaatccgtttagaggggggctgaataggattgttgagtggatacta

SEQ ID NO: 6501 - DNA, 60 bp, Artificial
  Synthetic oligonucleotide
aggatgacaagccctgggtgccgctcacaagagtgccgtcaaggatgctagtgctgacgg

SEQ ID NO: 6502 - DNA, 60 bp, Artificial
  Synthetic oligonucleotide
cgtaggatcaggggcatttggcacctcgacactggtcccggctgggagcactgagtacat

SEQ ID NO: 6503 - DNA, 60 bp, Artificial
  Synthetic oligonucleotide
tccctggtagtggactcaagctgcctgttcatgaacctgcaactaaagacatacgggcaa

SEQ ID NO: 6504 - DNA, 52 bp, Artificial
  Synthetic oligonucleotide
ggaattctcagacatcttcgaagacctaccaatagataccaaactagaggtg

SEQ ID NO: 6505 - DNA, 60 bp, Artificial
  Synthetic oligonucleotide
tgccacgttagtggctcctcttcttgatgattctgccaccatgagtgacgtattcaacag

SEQ ID NO: 6506 - DNA, 50 bp, Artificial
  Synthetic oligonucleotide
tcctaagtctaccaacctcatatgacctcagttatgtgaggcttggcgac

SEQ ID NO: 6507 - DNA, 60 bp, Artificial
  Synthetic oligonucleotide
ggctcctcttcttgatgattctgccaccatgagtgacgtattcaatagtccacaggcgcg

SEQ ID NO: 6508 - DNA, 59 bp, Artificial
  Synthetic oligonucleotide
ctctagtggtagactcatcgtgtctgataatgaacctgcaaattaagacctatggtcaa

SEQ ID NO: 6509 - DNA, 54 bp, Artificial
  Synthetic oligonucleotide
tatatgcggacaacatatacattgtccactcaaacacgtggtactcaattgacc

SEQ ID NO: 6510 - DNA, 55 bp, Artificial
  Synthetic oligonucleotide
caagtcagagaagcaatcgcaaccctgcaatacgggtccggcagctactcaggac

SEQ ID NO: 6511 - DNA, 60 bp, Artificial
  Synthetic oligonucleotide
ttacctaactcgctttcctatgagtacatgcattacatagctaactcagctaatgacacg

SEQ ID NO: 6512 - DNA, 60 bp, Artificial
  Synthetic oligonucleotide
tactcttacacaatgatgggtctacttttcccgaaaggagagcggtatgccatagctgac

SEQ ID NO: 6513 - DNA, 60 bp, Artificial
  Synthetic oligonucleotide
cgatatcatggacagtgagcgggacactagctgtgacagtgcacggtggcaactatcctg

SEQ ID NO: 6514 - DNA, 55 bp, Artificial
  Synthetic oligonucleotide
acgactattcaaatcaatagcctgcccacaaccaccaagtagcacctttcaaacg

SEQ ID NO: 6515 - DNA, 60 bp, Artificial
  Synthetic oligonucleotide
accactccatggccgcaggagggcgccacaaagacgtgctcgagtcctgggcaagcggag

SEQ ID NO: 6516 - DNA, 58 bp, Artificial
  Synthetic oligonucleotide
gctcgagaacaagacccttgccagaaaacccggagccgagattgcatatcaaatagta

SEQ ID NO: 6517 - DNA, 58 bp, Artificial
  Synthetic oligonucleotide
gccaacccagtggtcggctatggggaattcagcgaaaagattcctctgactcccacgc

SEQ ID NO: 6518 - DNA, 55 bp, Artificial
  Synthetic oligonucleotide
agcgggacactagctgtgacagtgcacggtggcaactatcctggggctctccgtc

SEQ ID NO: 6519 - DNA, 59 bp, Artificial
  Synthetic oligonucleotide
ccaaatactcccagacttagcatggatgcgacagatagaacgggctgtcttgaaaccta

SEQ ID NO: 6520 - DNA, 56 bp, Artificial
  Synthetic oligonucleotide
gtgggtcaacgttggtggcacccgacataccacgactgtttatgtatgcacgcgag

SEQ ID NO: 6521 - DNA, 60 bp, Artificial
  Synthetic oligonucleotide
ttgatacagtacaccggagacgcatcaactgacaagtcatatctccctcatgtgacagct

SEQ ID NO: 6522 - DNA, 60 bp, Artificial
  Synthetic oligonucleotide
gagtcggagtctcacagtgaggtcaagcacactccctggtggcgtttatgcactaaacgg

SEQ ID NO: 6523 - DNA, 60 bp, Artificial
  Synthetic oligonucleotide
agaccagagcaccgacaagtcatatctgccacaggtgactgtcaagtcctcagcccgcct

SEQ ID NO: 6524 - DNA, 55 bp, Artificial
  Synthetic oligonucleotide
attatgcttcccgagaatgggccagcaagcattccggacgacataacagagaggc

SEQ ID NO: 6525 - DNA, 57 bp, Artificial
  Synthetic oligonucleotide
tgaggccatagctaaactccagtatggatcaggcagctactccggacagctaaacag

SEQ ID NO: 6526 - DNA, 59 bp, Artificial
  Synthetic oligonucleotide
gtcttcttatcacgctctgtctagttggtccatcactcggtggtcttcctacacctgcg

SEQ ID NO: 6527 - DNA, 60 bp, Artificial
  Synthetic oligonucleotide
ccatgcatcagtgcctcactagcgcttggtgtgttgataggcaaatccctcttagtagac

SEQ ID NO: 6528 - DNA, 55 bp, Artificial
  Synthetic oligonucleotide
gcagtggcattgttagaccagtcacggcgcgatatgtttcacacagtaacgccta

SEQ ID NO: 6529 - DNA, 60 bp, Artificial
  Synthetic oligonucleotide
tcaaccacacgactattagcctcccggcagtccacacatcatgcctcaagtaccactgca

SEQ ID NO: 6530 - DNA, 54 bp, Artificial
  Synthetic oligonucleotide
cccccgaggcaaggccagggcttaagcgggtcatgtggttcggcaggtacttcc

SEQ ID NO: 6531 - DNA, 55 bp, Artificial
  Synthetic oligonucleotide
ccgggcccaacttgagctccacattgcctaccagcgcatagtgggtcaggtctcg

SEQ ID NO: 6532 - DNA, 56 bp, Artificial
  Synthetic oligonucleotide
cattcgatcttcagggccttagctgcaacactgattcgactccgggactgattgac

SEQ ID NO: 6533 - DNA, 51 bp, Artificial
  Synthetic oligonucleotide
atcaacagtcatatccaactggtagtaatcagtctgtatcggtgctctgtc

SEQ ID NO: 6534 - DNA, 60 bp, Artificial
  Synthetic oligonucleotide
tcacatgtctgtgattactctttagacactgacgggccagtgaggcttcctcgcattcac

SEQ ID NO: 6535 - DNA, 60 bp, Artificial
  Synthetic oligonucleotide
catcgacatgcaccgtgtgataaaagatggaatggatgtcaacttcatgagaaaggtctt

SEQ ID NO: 6536 - DNA, 55 bp, Artificial
  Synthetic oligonucleotide
ccgtgtgataaaagatggaatggatgtcaacttcatgagaaaggtcttacgccag

SEQ ID NO: 6537 - DNA, 60 bp, Artificial
  Synthetic oligonucleotide
ttcaaggatgacagctcctttgaggatgtgaacggaatccggaagccaaaacatctctat

SEQ ID NO: 6538 - DNA, 55 bp, Artificial
  Synthetic oligonucleotide
cctttgaggatgtgaacggaatccggaagccaaaacatctctatgtgtccttgcc

SEQ ID NO: 6539 - DNA, 60 bp, Artificial
  Synthetic oligonucleotide
gtggccagacagcagactggtatactataggagtatatgtaatagggttcacactaccta

SEQ ID NO: 6540 - DNA, 51 bp, Artificial
  Synthetic oligonucleotide
ttaaggaaaggctgtcccaatgaagtaataccttttgcttatggagctgtg

SEQ ID NO: 6541 - DNA, 56 bp, Artificial
  Synthetic oligonucleotide
gcagaacatatgccacattcgggaggggaataagattgaaccatgatctggacttg

SEQ ID NO: 6542 - DNA, 60 bp, Artificial
  Synthetic oligonucleotide
tatggatttgtccaaccataccagaccctacaggcaagctcttaatagcattaattgatc

SEQ ID NO: 6543 - DNA, 60 bp, Artificial
  Synthetic oligonucleotide
attgtgctacttgtgcttctcacagtttcattgtcaccagtacaatcagcacctatcggt

SEQ ID NO: 6544 - DNA, 60 bp, Artificial
  Synthetic oligonucleotide
cacaagcaactttaatgagaattggtatgtctataaggatgtggcagacaagaactacac

SEQ ID NO: 6545 - DNA, 60 bp, Artificial
  Synthetic oligonucleotide
gagtgtatccctctcttatgtcaagggttgtttataagcattatcgcagtttaatatcag

SEQ ID NO: 6546 - DNA, 54 bp, Artificial
  Synthetic oligonucleotide
catctcttaattaacacactttaataatatgcatctctgaatcagccttaaaga

SEQ ID NO: 6547 - DNA, 60 bp, Artificial
  Synthetic oligonucleotide
gattggcaaggcatcaaccggctctagaagattgctctccgaggagtctagcgacgactg

SEQ ID NO: 6548 - DNA, 50 bp, Artificial
  Synthetic oligonucleotide
ttgttgcccatattgtaggcactgctctgctaataaagaaattcatcagc

SEQ ID NO: 6549 - DNA, 55 bp, Artificial
  Synthetic oligonucleotide
ggtcttacaagacatgcggaacacgattatggcatcaaagacagtagggacatct

SEQ ID NO: 6550 - DNA, 54 bp, Artificial
  Synthetic oligonucleotide
ctcacctgcagctagagctttcctggcccaatttggtatccagatctaatctta

SEQ ID NO: 6551 - DNA, 50 bp, Artificial
  Synthetic oligonucleotide
catagtatatcttcagctgtctaatgggtgggtggtaggggcagctcaat

SEQ ID NO: 6552 - DNA, 60 bp, Artificial
  Synthetic oligonucleotide
atcgatatgcatagagttttaaaagatggcatggatgtaaactttatgcggaaagctctt

SEQ ID NO: 6553 - DNA, 59 bp, Artificial
  Synthetic oligonucleotide
gcagatctagagaaaagctgcacaatgtttcctctaaacagagctattagagctagatc

SEQ ID NO: 6554 - DNA, 60 bp, Artificial
  Synthetic oligonucleotide
ccaagtctggaggacatacgatctgctgaagttgtcagtaggatgcttgtacaccctata

SEQ ID NO: 6555 - DNA, 58 bp, Artificial
  Synthetic oligonucleotide
gcttgcttcaatcagcatatgtcttgtgtgcgattcttacatagaacgatactaccag

SEQ ID NO: 6556 - DNA, 60 bp, Artificial
  Synthetic oligonucleotide
tccctgagagttcttgtaacatggataatcaccagtcactttcgactatcaataaactga

SEQ ID NO: 6557 - DNA, 55 bp, Artificial
  Synthetic oligonucleotide
cttgtaacatggataatcaccagtcactttcgactatcaataaactgaccaaggt

SEQ ID NO: 6558 - DNA, 60 bp, Artificial
  Synthetic oligonucleotide
gcacttcttgagtatgctgcttcaggtgacccaactctgccagactctttagagacccca

SEQ ID NO: 6559 - DNA, 60 bp, Artificial
  Synthetic oligonucleotide
ttgaccataattgtctatttgacgtcatttgtggtcccgatcatcttgaaggcactgtac

SEQ ID NO: 6560 - DNA, 58 bp, Artificial
  Synthetic oligonucleotide
ggcactgtacatgttaacaacaagaggcaggcagacttcaaaggacaacaaggggata

SEQ ID NO: 6561 - DNA, 56 bp, Artificial
  Synthetic oligonucleotide
cttcttaagtgagatggaactagcagtaccagggttgctttcactaagcaacttga

SEQ ID NO: 6562 - DNA, 58 bp, Artificial
  Synthetic oligonucleotide
agaactattaagtaggtcgcactctggcaggcaggagtctatgtccaatgcaattcag

SEQ ID NO: 6563 - DNA, 60 bp, Artificial
  Synthetic oligonucleotide
ctaggcatgggtacagtcaaatttgattatgtctgccacggcgctagtaggaaagatgtg

SEQ ID NO: 6564 - DNA, 51 bp, Artificial
  Synthetic oligonucleotide
tttagatcccttaagtactgcgagttaatccgaactagataatcagttccg

SEQ ID NO: 6565 - DNA, 60 bp, Artificial
  Synthetic oligonucleotide
atgagcgagattatcagtatgaaacaagttggggctgtaatccatctgactgccctgggg

SEQ ID NO: 6566 - DNA, 55 bp, Artificial
  Synthetic oligonucleotide
gaaacaagttggggctgtaatccatctgactgccctggggtaggtacgggctgta

SEQ ID NO: 6567 - DNA, 60 bp, Artificial
  Synthetic oligonucleotide
tttgttacaaagtttgctctcatgctatgtgagttcacctctcctaaatggtggccactg

SEQ ID NO: 6568 - DNA, 58 bp, Artificial
  Synthetic oligonucleotide
ggacactggacgtcctgagttcaacttcttggaggattctaaatacagcttgctacaa

SEQ ID NO: 6569 - DNA, 52 bp, Artificial
  Synthetic oligonucleotide
aaattggcagcaaatagggaggttatcgagtcaagtatgtcgtactacagat

SEQ ID NO: 6570 - DNA, 55 bp, Artificial
  Synthetic oligonucleotide
ctttaatctggaggggcctaattgatttaacaggatactatgaggcagtccaccc

SEQ ID NO: 6571 - DNA, 50 bp, Artificial
  Synthetic oligonucleotide
aagcctatggtctacactttccaagggatggctagtgacttgtctcggtt

SEQ ID NO: 6572 - DNA, 59 bp, Artificial
  Synthetic oligonucleotide
agatcagacctgtgaacacctcaaagtttcctgcggcccaaaatctgtacagttccatg

SEQ ID NO: 6573 - DNA, 55 bp, Artificial
  Synthetic oligonucleotide
ggtagctactaagttgattattgcattacagcttggtcattgaccactcaggtaa

SEQ ID NO: 6574 - DNA, 60 bp, Artificial
  Synthetic oligonucleotide
gctgctagtgcatcggaaatacccttaaaccctgtatggaatgacaacgcccatggagta

SEQ ID NO: 6575 - DNA, 60 bp, Artificial
  Synthetic oligonucleotide
acatagattgctacccttattacccagccaacttagttgactgctcttggagtgaatcga

SEQ ID NO: 6576 - DNA, 60 bp, Artificial
  Synthetic oligonucleotide
tcccataagtgctattgcagcttattctgttgcccctattgtaggcactgctctaccgat

SEQ ID NO: 6577 - DNA, 60 bp, Artificial
  Synthetic oligonucleotide
tgccgactgcccaatcgactatgaaggcagaggagttgacccctggtcgattccgcacca

SEQ ID NO: 6578 - DNA, 50 bp, Artificial
  Synthetic oligonucleotide
cgatataaatcatgagggcatcctagcacctaagacatatgcttgtagag

SEQ ID NO: 6579 - DNA, 58 bp, Artificial
  Synthetic oligonucleotide
tgatctagaggactcctttgttggcttacacaggataatagtgaccgaggctatcctc

SEQ ID NO: 6580 - DNA, 51 bp, Artificial
  Synthetic oligonucleotide
cacgggtatacgggtggttttcatatggggaacagggtgggcttagggccg

SEQ ID NO: 6581 - DNA, 56 bp, Artificial
  Synthetic oligonucleotide
gctttatatctgatccgaccaagccctgagtctgagattgggctggttcggtctac

SEQ ID NO: 6582 - DNA, 51 bp, Artificial
  Synthetic oligonucleotide
tcagagtgtagtcggcattgtcaagcacggtatctttgacattgcaagtgt

SEQ ID NO: 6583 - DNA, 60 bp, Artificial
  Synthetic oligonucleotide
ccttaagccctacgtggaatgataatgctcatggggttggatccatacccatgcatacag

SEQ ID NO: 6584 - DNA, 60 bp, Artificial
  Synthetic oligonucleotide
gtggtcccgatcatcttgaaggcactgtacatgttaacaacaagaggtaggcagacttca

SEQ ID NO: 6585 - DNA, 59 bp, Artificial
  Synthetic oligonucleotide
tcgggaattgctctggcagcaaccggtatggcaaagctaatagagctagacggtcctaa

SEQ ID NO: 6586 - DNA, 50 bp, Artificial
  Synthetic oligonucleotide
ttcacaaggttccccaatctgaaagaggccatatcctggcctcttggaga

SEQ ID NO: 6587 - DNA, 60 bp, Artificial
  Synthetic oligonucleotide
ctatgctgtgagacatgatgtggtcgatcaaatgataaaacacgactggtcagacaataa

SEQ ID NO: 6588 - DNA, 60 bp, Artificial
  Synthetic oligonucleotide
gtctggttcattgcaagaggacaaccacctatctgcgagtgtaaccttaattgaggctat

SEQ ID NO: 6589 - DNA, 55 bp, Artificial
  Synthetic oligonucleotide
caagaggacaaccacctatctgcgagtgtaaccttaattgaggctatacggtacc

SEQ ID NO: 6590 - DNA, 60 bp, Artificial
  Synthetic oligonucleotide
ttcacagctctccgctgcctatagctgcctgaagctcttcatatttcgaagactggtccc

SEQ ID NO: 6591 - DNA, 56 bp, Artificial
  Synthetic oligonucleotide
cctcagatttgagagtgactacggttcccaattggagtccgctattgttcgagtct

SEQ ID NO: 6592 - DNA, 50 bp, Artificial
  Synthetic oligonucleotide
gattcgaaagtgcatacggcagccaattggtttctgccgtcgtacgagtc

SEQ ID NO: 6593 - DNA, 51 bp, Artificial
  Synthetic oligonucleotide
taggaccttaccggattcaggttgtttatgagagaacatactgcacaactg

SEQ ID NO: 6594 - DNA, 56 bp, Artificial
  Synthetic oligonucleotide
tgggcttaactacgactacatacgaatcttctacattaaaggacgcgagattaaaa

SEQ ID NO: 6595 - DNA, 56 bp, Artificial
  Synthetic oligonucleotide
ggttgactggaattatggcattatacatgttactcaggttaataacagtgaatact

SEQ ID NO: 6596 - DNA, 50 bp, Artificial
  Synthetic oligonucleotide
acacatataaaagacatctcacaaacccagttaatgaccaacagagtgtc

SEQ ID NO: 6597 - DNA, 58 bp, Artificial
  Synthetic oligonucleotide
catctaatattgcccttagatagtcttctggtagagaagggtccaccatgccagcaaa

SEQ ID NO: 6598 - DNA, 60 bp, Artificial
  Synthetic oligonucleotide
attgttctttggaccacttgagggtggtggtctaatattcaagcactggtgcacatctac

SEQ ID NO: 6599 - DNA, 60 bp, Artificial
  Synthetic oligonucleotide
gcacatctacatgccagtttggtgaccctggtgatataatgagtccgagagataaaggat

SEQ ID NO: 6600 - DNA, 56 bp, Artificial
  Synthetic oligonucleotide
tactggctttacaaggccggtgtgactccagagaccttcccaactatctcacagtt

SEQ ID NO: 6601 - DNA, 60 bp, Artificial
  Synthetic oligonucleotide
gaatgctgaaacctgagaggtctattcgactcctcaaaacaggcgaatgtaagatagcag

SEQ ID NO: 6602 - DNA, 50 bp, Artificial
  Synthetic oligonucleotide
cctagtcgtaggaatgatggggtagttcagcacatgcgtctagtccaagc

SEQ ID NO: 6603 - DNA, 60 bp, Artificial
  Synthetic oligonucleotide
caaaccgaagagcctattcaggtaagcagtatgatgcatactgtgtgcaaacatataacg

SEQ ID NO: 6604 - DNA, 54 bp, Artificial
  Synthetic oligonucleotide
ccccaagacccgtgcttagtgcatggctgcatagtgtgtgctcatggcctgata

SEQ ID NO: 6605 - DNA, 60 bp, Artificial
  Synthetic oligonucleotide
tatctgtgctcatgaaatcattgtgtagatctacagtcatgtctaactggtagtattcag

SEQ ID NO: 6606 - DNA, 60 bp, Artificial
  Synthetic oligonucleotide
atatgggtcctgttccaaaggatcacatgtattgtgataagagcataggtgcaagaattg

SEQ ID NO: 6607 - DNA, 60 bp, Artificial
  Synthetic oligonucleotide
tgggttgacgcacgctggaatactaggacagtgttccattgctatggggcctgctctaaa

SEQ ID NO: 6608 - DNA, 52 bp, Artificial
  Synthetic oligonucleotide
tatggtcttgcaaccacagatttgaaatcctgtgtcttgggtgttctcttag

SEQ ID NO: 6609 - DNA, 56 bp, Artificial
  Synthetic oligonucleotide
ggcctctgtctgaaactgaactacagttcattaaagcactaagtagtctcaagtca

SEQ ID NO: 6610 - DNA, 51 bp, Artificial
  Synthetic oligonucleotide
taaatttcgttccaactaattatgcttgcttacgctactaactcaacatac

SEQ ID NO: 6611 - DNA, 60 bp, Artificial
  Synthetic oligonucleotide
gaagtcaggatggttcagaagcacgacatatataactcttgatcaaacttgcgaacacct

SEQ ID NO: 6612 - DNA, 55 bp, Artificial
  Synthetic oligonucleotide
gaacccagtccattccactgcctgactacggacttaccatacataggttgtccgg

SEQ ID NO: 6613 - DNA, 60 bp, Artificial
  Synthetic oligonucleotide
tcattgctaagagcttgaaggatgtcgagcagctcaaatggggaagaggaggacttagtg

SEQ ID NO: 6614 - DNA, 60 bp, Artificial
  Synthetic oligonucleotide
gttgttagtaggatgcttgtacaccctaggggagaagaccatgatgccatacagaattca

SEQ ID NO: 6615 - DNA, 60 bp, Artificial
  Synthetic oligonucleotide
ggcttaggaatgtcacaactaactgtcagagcagcccatgggatctgagtgtcccaataa

SEQ ID NO: 6616 - DNA, 51 bp, Artificial
  Synthetic oligonucleotide
cattatactctgacgattcttcaggaatgtcagacacgaaataacactcat

SEQ ID NO: 6617 - DNA, 55 bp, Artificial
  Synthetic oligonucleotide
gtgtccttaagttggctgaagcaagtgctcagattgtcatgcctcttgctgaggt

SEQ ID NO: 6618 - DNA, 60 bp, Artificial
  Synthetic oligonucleotide
tcgcctcaaatctcacaacttgcagtctcacttagtacgagtaaggttgagagattatat

SEQ ID NO: 6619 - DNA, 50 bp, Artificial
  Synthetic oligonucleotide
ttggtaggctgtttgtaccaacctactctgggttagttagctcagcggtt

SEQ ID NO: 6620 - DNA, 54 bp, Artificial
  Synthetic oligonucleotide
agtctagacctgcggaatctgagctagaggcgaaccgtgcagtaattgtcaaga

SEQ ID NO: 6621 - DNA, 54 bp, Artificial
  Synthetic oligonucleotide
caaggatggcagcgcactatcggtcatacctgacagcagcaacccccgactact

SEQ ID NO: 6622 - DNA, 52 bp, Artificial
  Synthetic oligonucleotide
ggaagtagctctgagccattgtatgtcccaacattggatgattaccggtcag

SEQ ID NO: 6623 - DNA, 60 bp, Artificial
  Synthetic oligonucleotide
acagctcatatgaggatgtcaatgggatcagaaagcctaaacatctgtatgtgtcaatgc

SEQ ID NO: 6624 - DNA, 55 bp, Artificial
  Synthetic oligonucleotide
caatgggatcagaaagcctaaacatctgtatgtgtcaatgccaaacgcccaatcc

SEQ ID NO: 6625 - DNA, 56 bp, Artificial
  Synthetic oligonucleotide
tgagtacaatcaaactgagaaggcattgacagagtcatctcagaaactgattcaag

SEQ ID NO: 6626 - DNA, 52 bp, Artificial
  Synthetic oligonucleotide
agcttaaggatgactcatgcatggaggaccggaatgggataaaacaacacaa

SEQ ID NO: 6627 - DNA, 60 bp, Artificial
  Synthetic oligonucleotide
ggaatagtgggaggagattcatgcatatatctagactcatattgtgggttgtcccaacta

SEQ ID NO: 6628 - DNA, 60 bp, Artificial
  Synthetic oligonucleotide
tttagggttttgctttctacagtctgcacaattgcctgtgcatgtgaccaaataatctgc

SEQ ID NO: 6629 - DNA, 60 bp, Artificial
  Synthetic oligonucleotide
tacacagatctgagcctaaaacacaatcgtttagcgatgttgctctggacatgggtacac

SEQ ID NO: 6630 - DNA, 55 bp, Artificial
  Synthetic oligonucleotide
acacaatcgtttagcgatgttgctctggacatgggtacaccagatctgtacaccg

SEQ ID NO: 6631 - DNA, 52 bp, Artificial
  Synthetic oligonucleotide
tcttcattcagtgtccttacagggtctacagatgcccgatatgtatttagtc

SEQ ID NO: 6632 - DNA, 55 bp, Artificial
  Synthetic oligonucleotide
gggttagcatctctgaagtaaccgaaacaacaagtatagttgcatcacctagaac

SEQ ID NO: 6633 - DNA, 51 bp, Artificial
  Synthetic oligonucleotide
ccctgattacccacccctctgattacccacccactattaacccaattcaag

SEQ ID NO: 6634 - DNA, 60 bp, Artificial
  Synthetic oligonucleotide
tctaggctcaaacaaacactaacagctcgaaatgtcttgcacgggttagctggaggaata

SEQ ID NO: 6635 - DNA, 55 bp, Artificial
  Synthetic oligonucleotide
gaaaatggttggtcgcagattggcatgactgtaggccccaaaagtcatcaggtgg

SEQ ID NO: 6636 - DNA, 53 bp, Artificial
  Synthetic oligonucleotide
tgagattaaagttggacaaatcaatgacttaggtgtctactcaaaaggatgtg

SEQ ID NO: 6637 - DNA, 57 bp, Artificial
  Synthetic oligonucleotide
taacacggaatctttatgagttaaagatagaatgcccacatactgtgggtttaggcc

SEQ ID NO: 6638 - DNA, 52 bp, Artificial
  Synthetic oligonucleotide
gtacagtcttttgcacacttgctggaccaggtgcaagttgtgaagcctactc

SEQ ID NO: 6639 - DNA, 51 bp, Artificial
  Synthetic oligonucleotide
gtgacagaaccgcatatcaccagtaaccgattagaatggattgaccctgac

SEQ ID NO: 6640 - DNA, 53 bp, Artificial
  Synthetic oligonucleotide
tagtgaggtgaatttaagaggtttgtgtctaattccatccctagtggttgaaa

SEQ ID NO: 6641 - DNA, 57 bp, Artificial
  Synthetic oligonucleotide
ctgacacaatacaaggtatagcattctcaggtagccctctttacacatctacagggg

SEQ ID NO: 6642 - DNA, 56 bp, Artificial
  Synthetic oligonucleotide
gcttatgaaccaaagcaaggatgttatcgaacattatcccttttccgttatcggag

SEQ ID NO: 6643 - DNA, 53 bp, Artificial
  Synthetic oligonucleotide
ggtactgaacagacttgtaagagtgttgacagtaatgattgtctggttaccac

SEQ ID NO: 6644 - DNA, 60 bp, Artificial
  Synthetic oligonucleotide
caaggcatgtgattctgcgatgtgttatgggtctaccacgactaacctaatgagagggca

SEQ ID NO: 6645 - DNA, 55 bp, Artificial
  Synthetic oligonucleotide
agcggagacaccacatccctttctagacttgtcgagctaccagtgatcaccgggg

SEQ ID NO: 6646 - DNA, 60 bp, Artificial
  Synthetic oligonucleotide
ccacactggagacatctgatgcatacctccaaaagatccacagagggtaccatgggagtc

SEQ ID NO: 6647 - DNA, 52 bp, Artificial
  Synthetic oligonucleotide
tacactacactctattaggcatgacagtttccccactgttccttgagtacat

SEQ ID NO: 6648 - DNA, 57 bp, Artificial
  Synthetic oligonucleotide
gctcctataaagaagtctagtggtgtgagcaacgtctctacagccattagggacaac

SEQ ID NO: 6649 - DNA, 60 bp, Artificial
  Synthetic oligonucleotide
ggttgaggaatggcttgatctcccatgcaagctactatctgagccatctcccacgtcttt

SEQ ID NO: 6650 - DNA, 60 bp, Artificial
  Synthetic oligonucleotide
gatgctatgtgaattcactcctcaagagtggtggcctttaatcatcagaggttgctcgat

SEQ ID NO: 6651 - DNA, 60 bp, Artificial
  Synthetic oligonucleotide
tgaaaaggtgcatagtcctggagtggtttcgtcattaagcaccgggaatgctgtctgtaa

SEQ ID NO: 6652 - DNA, 57 bp, Artificial
  Synthetic oligonucleotide
caatggagttcttgaggagccttgactggacccaagtgctggctggtcagtatgtga

SEQ ID NO: 6653 - DNA, 53 bp, Artificial
  Synthetic oligonucleotide
tcgggtatcgattgtataaaatacccaacaggacaacttatcacacacgggaa

SEQ ID NO: 6654 - DNA, 60 bp, Artificial
  Synthetic oligonucleotide
gtgtctacagaaacataaggacggtagcgcaatgtcagtcatacctgataacagcaatcc

SEQ ID NO: 6655 - DNA, 60 bp, Artificial
  Synthetic oligonucleotide
aatggcgtgtgacataacagtggtgcaaccagacagagaggcggaggcactcaagactgg

SEQ ID NO: 6656 - DNA, 58 bp, Artificial
  Synthetic oligonucleotide
ctcagatttgagagtgcttacgggtctcaattggaatccgctattgttcgagtcttct

SEQ ID NO: 6657 - DNA, 60 bp, Artificial
  Synthetic oligonucleotide
cagctagtgacgaagtagaagcaggcataaagtttggagacggtgatgtgtttacagccg

SEQ ID NO: 6658 - DNA, 60 bp, Artificial
  Synthetic oligonucleotide
tcagatattggtctggtgcgatctactttcatagtacccctggccgaagagaatggtatt

SEQ ID NO: 6659 - DNA, 60 bp, Artificial
  Synthetic oligonucleotide
tcgcttagtctgaatgacggaggcttggaccttgatttgcacaaaaccactgacgagaag

SEQ ID NO: 6660 - DNA, 60 bp, Artificial
  Synthetic oligonucleotide
ctgctatcggatgcctgcctctgagtcaagcagacaagtcttcactactcatgagtttcc

SEQ ID NO: 6661 - DNA, 58 bp, Artificial
  Synthetic oligonucleotide
tagtcttagagactgcgtcacggacaagaaagacagtcacttgttttgacttgtcatg

SEQ ID NO: 6662 - DNA, 53 bp, Artificial
  Synthetic oligonucleotide
cagggctattatgtgtgtatcatcggaagcagctctgaagcattatatgtccc

SEQ ID NO: 6663 - DNA, 60 bp, Artificial
  Synthetic oligonucleotide
ggcaggacccggaacagactgtgaggcatactcagatacagggatcttcaatataagctc

SEQ ID NO: 6664 - DNA, 55 bp, Artificial
  Synthetic oligonucleotide
taattattgcctagtttgtgtctgctcaaaggataaaggtctaacataccacaaa

SEQ ID NO: 6665 - DNA, 55 bp, Artificial
  Synthetic oligonucleotide
atctactttcatagtacccctggccgaagagaatggtattacttggagcgacggg

SEQ ID NO: 6666 - DNA, 58 bp, Artificial
  Synthetic oligonucleotide
ctgtcaagagcagtacatggtcatttgcagtatgccaaggcttatattattacacaag

SEQ ID NO: 6667 - DNA, 52 bp, Artificial
  Synthetic oligonucleotide
gaatggggatgtatggctataaatgatgggtgtgtttacgggtcgtgtcagg

SEQ ID NO: 6668 - DNA, 51 bp, Artificial
  Synthetic oligonucleotide
atatctgtttagtaggaagtagttctgaacccctatatattccaacattgg

SEQ ID NO: 6669 - DNA, 51 bp, Artificial
  Synthetic oligonucleotide
ggacgtgatctctcttttcaagacctaagtgaaacaccctgtcaggtagac

SEQ ID NO: 6670 - DNA, 52 bp, Artificial
  Synthetic oligonucleotide
gtttgccctgctaacaacaggaactgaggatgagcattgcaaaaagatcgat

SEQ ID NO: 6671 - DNA, 60 bp, Artificial
  Synthetic oligonucleotide
tattacggaggagtctggatacagcccatgtgcttagggtatgaaagggctatggtgtta

SEQ ID NO: 6672 - DNA, 60 bp, Artificial
  Synthetic oligonucleotide
gcaccatctcaggactgattaatgtgaaagcaggccctattggctctgaaacttgtgtca

SEQ ID NO: 6673 - DNA, 60 bp, Artificial
  Synthetic oligonucleotide
gctacggaagaaatcatcattctatcagtcttatctcaggcgaacccaatcaatgggaat

SEQ ID NO: 6674 - DNA, 55 bp, Artificial
  Synthetic oligonucleotide
tctatcagtcttatctcaggcgaacccaatcaatgggaatacaactggaccaaag

SEQ ID NO: 6675 - DNA, 55 bp, Artificial
  Synthetic oligonucleotide
caatgggaatacaactggatcaaagaatcatagtgctctttatggttgcctgggg

SEQ ID NO: 6676 - DNA, 60 bp, Artificial
  Synthetic oligonucleotide
gcacttggcccatttagggttcaagtggtctatgagagaacttattgcatgtcgggcata

SEQ ID NO: 6677 - DNA, 55 bp, Artificial
  Synthetic oligonucleotide
tcaagtggtctatgagagaacttattgcatgtcgggcatactcacagaagggcgg

SEQ ID NO: 6678 - DNA, 60 bp, Artificial
  Synthetic oligonucleotide
gtcgggcatactcacagaagggcggtgcttcgtaccataccagagtgtagtgagtattat

SEQ ID NO: 6679 - DNA, 53 bp, Artificial
  Synthetic oligonucleotide
agggcactggtttgatggccgtttaaatctcaagacatcctttcactgttacg

SEQ ID NO: 6680 - DNA, 60 bp, Artificial
  Synthetic oligonucleotide
ctatatctgtattgcaggagggaactcagcacctatatatgtgcctacacttgatgattt

SEQ ID NO: 6681 - DNA, 55 bp, Artificial
  Synthetic oligonucleotide
ggagggaactcagcacctatatatgtgcctacacttgatgattttaggtctatgg

SEQ ID NO: 6682 - DNA, 52 bp, Artificial
  Synthetic oligonucleotide
ctagctcagatacactaagcctaactgcttactcaggtataccatcttattc

SEQ ID NO: 6683 - DNA, 53 bp, Artificial
  Synthetic oligonucleotide
cactgctatggtgcttgtacaaagtatgaatatccatggcatactgccaaatg

SEQ ID NO: 6684 - DNA, 50 bp, Artificial
  Synthetic oligonucleotide
cctcacttcagattgattgtcaacaaatcctttcctaagcctattagcaa

SEQ ID NO: 6685 - DNA, 60 bp, Artificial
  Synthetic oligonucleotide
tagctgtctaaccatataacttagatttcacctctgtacgatgtcttaacatcttgcgga

SEQ ID NO: 6686 - DNA, 56 bp, Artificial
  Synthetic oligonucleotide
tatggtattatacatgttactcaggttaataacagtgaatactaatggcagtcatg

SEQ ID NO: 6687 - DNA, 60 bp, Artificial
  Synthetic oligonucleotide
tgatcagtgcagttcgaaccagactttacgagccaactatgagagagctctaccaggaat

SEQ ID NO: 6688 - DNA, 55 bp, Artificial
  Synthetic oligonucleotide
cgaaccagactttacgagccaactatgagagagctctaccaggaatcgattcacc

SEQ ID NO: 6689 - DNA, 60 bp, Artificial
  Synthetic oligonucleotide
aagaaaccttgactggactcaggtgattgctggtcagcatgtgaccaatcccaggttcaa

SEQ ID NO: 6690 - DNA, 58 bp, Artificial
  Synthetic oligonucleotide
tccattaagcgaggtgcattcaatagagcgcatcatggaaaatttcactcgcctcatg

SEQ ID NO: 6691 - DNA, 55 bp, Artificial
  Synthetic oligonucleotide
gctggtaatagtacattctgtaagccaactgtttacatgatcgttcctatacatg

SEQ ID NO: 6692 - DNA, 60 bp, Artificial
  Synthetic oligonucleotide
tctgtactatgtgttctgatagcgggatactacagatcatttggcggggaagggaccgag

SEQ ID NO: 6693 - DNA, 60 bp, Artificial
  Synthetic oligonucleotide
tgtacttgagccagtactgggagagcatatgcagtttgaagtccacagtgtacaaactaa

SEQ ID NO: 6694 - DNA, 58 bp, Artificial
  Synthetic oligonucleotide
agttgtaatagcatttttcaacacacaagttggattgtttaagtgcaatacttgatgg

SEQ ID NO: 6695 - DNA, 60 bp, Artificial
  Synthetic oligonucleotide
gctctctcttgattgcaaacacatttttctgcgcaggatgagtcagatgatacgcagcgc

SEQ ID NO: 6696 - DNA, 51 bp, Artificial
  Synthetic oligonucleotide
cccgatatgtcgtacatatgctcagagcatttatgttcgaatgaatcatgg

SEQ ID NO: 6697 - DNA, 60 bp, Artificial
  Synthetic oligonucleotide
cacattagctggccctggggcaagttgtgaggcttactctgaaagcggtatattcaacat

SEQ ID NO: 6698 - DNA, 50 bp, Artificial
  Synthetic oligonucleotide
atgcccaagctttatgacatcaattaaagcatgtgatctagcaatgtgtt

SEQ ID NO: 6699 - DNA, 60 bp, Artificial
  Synthetic oligonucleotide
cagtaatctattatgatctagctggtaatagtacattctgtaagccaactgtttacatga

SEQ ID NO: 6700 - DNA, 55 bp, Artificial
  Synthetic oligonucleotide
ctgtaacagtacattctgtaagccaactgtttacatgattgttcctatacatgcc

SEQ ID NO: 6701 - DNA, 60 bp, Artificial
  Synthetic oligonucleotide
cagttcaagactacatggggacattcatggtactagatataaatccacagggtttgctag

SEQ ID NO: 6702 - DNA, 55 bp, Artificial
  Synthetic oligonucleotide
ggggacattcatggtactagatataaatccacagggtttgctagtacctaaaacg

SEQ ID NO: 6703 - DNA, 60 bp, Artificial
  Synthetic oligonucleotide
atgctagcaatgcatccgttctcaaattgccccactacatgcatatgcggcatggtctat

SEQ ID NO: 6704 - DNA, 60 bp, Artificial
  Synthetic oligonucleotide
gaagagtggggttgcatagcaataggcactggctgtgtatatggttcgtgccaagatgtt

SEQ ID NO: 6705 - DNA, 60 bp, Artificial
  Synthetic oligonucleotide
ggaaaccagcagtcagcactcagccatgagcagaataccaaccccccacacagcaacccg

SEQ ID NO: 6706 - DNA, 60 bp, Artificial
  Synthetic oligonucleotide
gaattccttggattgtcagaaagctattgcaggtgtcagagtccactggtgtggcattga

SEQ ID NO: 6707 - DNA, 51 bp, Artificial
  Synthetic oligonucleotide
gactggctgataggaaaattgctgagctgttctccacaaaaacacacattg

SEQ ID NO: 6708 - DNA, 59 bp, Artificial
  Synthetic oligonucleotide
ggaataggctagacatagcagacagaattgcagctgcggaggtttatgtgagacagtct

SEQ ID NO: 6709 - DNA, 60 bp, Artificial
  Synthetic oligonucleotide
agtggcacagtgctgactgaagaggcacaattagaaaagagacagttactctttattgaa

SEQ ID NO: 6710 - DNA, 53 bp, Artificial
  Synthetic oligonucleotide
gtgctgtaccaaggttgtggctagaaacactaatcagagacttgagggttcct

SEQ ID NO: 6711 - DNA, 60 bp, Artificial
  Synthetic oligonucleotide
accttgtccgacacccagagatacttgaaacagagtgcatcaaagaaaatgacatacctc

SEQ ID NO: 6712 - DNA, 60 bp, Artificial
  Synthetic oligonucleotide
ttgtctgagtcatgtgattggttgcttgacggtaagaagaggggtctgcttgaattatca

SEQ ID NO: 6713 - DNA, 60 bp, Artificial
  Synthetic oligonucleotide
caaaagtgccccacagtgctagctcagacacattaagcctgattgcctattctggtatcc

SEQ ID NO: 6714 - DNA, 60 bp, Artificial
  Synthetic oligonucleotide
ctacacaagtttgcccagtactcccagcgagccaactacaccacagggtacacatcatac

SEQ ID NO: 6715 - DNA, 52 bp, Artificial
  Synthetic oligonucleotide
aagtatttgcctctttgtactaggaagcatcttatttatagtctcttgccta

SEQ ID NO: 6716 - DNA, 51 bp, Artificial
  Synthetic oligonucleotide
ttagcttatcatccatttacaaactgtggctcccattgtgtctgtgggctc

SEQ ID NO: 6717 - DNA, 60 bp, Artificial
  Synthetic oligonucleotide
gcctggcaattaatactgggtgtgtttttggctcatgccaggacattattcatcccgagg

SEQ ID NO: 6718 - DNA, 54 bp, Artificial
  Synthetic oligonucleotide
agtaaccacaaatttattaggatgaagcgtaaactcatgtatgttagtgcagat

SEQ ID NO: 6719 - DNA, 50 bp, Artificial
  Synthetic oligonucleotide
ggtacagcgccaggcatggtaaaccaccctgcagcatacttgcaggttaa

SEQ ID NO: 6720 - DNA, 60 bp, Artificial
  Synthetic oligonucleotide
ttgcacgaacattcacagtcagagaaaaggatcagatcatacaaaatagtattcctgctg

SEQ ID NO: 6721 - DNA, 55 bp, Artificial
  Synthetic oligonucleotide
cacagtcagagaaaaggatcagatcatacaaaatagtattcctgctgtcattggg

SEQ ID NO: 6722 - DNA, 57 bp, Artificial
  Synthetic oligonucleotide
attcctgctgtcattgggtacaaatttgctgtaactgtagaggaaatgtcagatgta

SEQ ID NO: 6723 - DNA, 58 bp, Artificial
  Synthetic oligonucleotide
ctcaaagcacacgccacactgcaagagagctcctctcagtaacaggcacggaggcaga

SEQ ID NO: 6724 - DNA, 51 bp, Artificial
  Synthetic oligonucleotide
gcttccccagataactcacgagggaacttttatacctggaacttataagat

SEQ ID NO: 6725 - DNA, 53 bp, Artificial
  Synthetic oligonucleotide
gtgcaaccccacgtggtgttggggagttggaactggttgcacttgctgtggat

SEQ ID NO: 6726 - DNA, 60 bp, Artificial
  Synthetic oligonucleotide
cctacacattttatcttacactgcatcagacaatgatctcagtccaggcattttcaagtc

SEQ ID NO: 6727 - DNA, 60 bp, Artificial
  Synthetic oligonucleotide
gcagcctcaggggacccaacatcacctgacaacatagaatcccctaatgcaccatgggta

SEQ ID NO: 6728 - DNA, 55 bp, Artificial
  Synthetic oligonucleotide
acgagatggagtcttttgatacatctgatgtcaacctctttgggccagcccatta

SEQ ID NO: 6729 - DNA, 57 bp, Artificial
  Synthetic oligonucleotide
taaggttggtaatgtcctctcctatgcacacaacctctatctgagtaagtctagtct

SEQ ID NO: 6730 - DNA, 60 bp, Artificial
  Synthetic oligonucleotide
gcagctccgatgattatgcaaagtgcatagtggtgactggcgtgctatctaaagagctat

SEQ ID NO: 6731 - DNA, 60 bp, Artificial
  Synthetic oligonucleotide
ttagagcagtggaggacctagttctgatgttgacaggcaggtccaccaaacctagcaccg

SEQ ID NO: 6732 - DNA, 60 bp, Artificial
  Synthetic oligonucleotide
ctttcaggatctaagtgataacccatgcaaggttgacctgcatacacaatcaattgacgg

SEQ ID NO: 6733 - DNA, 57 bp, Artificial
  Synthetic oligonucleotide
tgtgattctgccatgtgttatggagccacagtgacaaatctgcttagagggtctaac

SEQ ID NO: 6734 - DNA, 60 bp, Artificial
  Synthetic oligonucleotide
atggtccaaggaacaaaggcagctgagactctagataatgtgatggtatctctaccagga

SEQ ID NO: 6735 - DNA, 57 bp, Artificial
  Synthetic oligonucleotide
ctaggagattgctttccgaagaatctggtgatgactgcatatcaagaactcagctat

SEQ ID NO: 6736 - DNA, 55 bp, Artificial
  Synthetic oligonucleotide
aaggcagctgagactctagataatgtgatggtatctctaccaggattcccttctc

SEQ ID NO: 6737 - DNA, 51 bp, Artificial
  Synthetic oligonucleotide
gttaacaagagcacactacaaagcagacgggcagctgtgtctgcattggag

SEQ ID NO: 6738 - DNA, 60 bp, Artificial
  Synthetic oligonucleotide
tatgttcgaacaagaatgtgcataaagctacggaagactgcttatcgcacagccatatga

SEQ ID NO: 6739 - DNA, 57 bp, Artificial
  Synthetic oligonucleotide
agccatatgaaatcatataggtactcacacatcttgattctaactttagtagcaatg

SEQ ID NO: 6740 - DNA, 60 bp, Artificial
  Synthetic oligonucleotide
agcaatttcagtgctcgatatgcccatgatagcaagcatcccagaggatatagcaggggc

SEQ ID NO: 6741 - DNA, 60 bp, Artificial
  Synthetic oligonucleotide
attcaagctgtgaagtgatgatacctaagggcactggtgacattctagtagattgttcag

SEQ ID NO: 6742 - DNA, 57 bp, Artificial
  Synthetic oligonucleotide
aaatgggacagtatatggcaatggggttcccaaattcgattatttgtgtcacctagc

SEQ ID NO: 6743 - DNA, 54 bp, Artificial
  Synthetic oligonucleotide
gcaactatgggatgctaagggaggctatgccaaattacactgattatatttcga

SEQ ID NO: 6744 - DNA, 55 bp, Artificial
  Synthetic oligonucleotide
tgacggcctagaattcttatctgatgaccctatgaactttactgagggtgaggct

SEQ ID NO: 6745 - DNA, 60 bp, Artificial
  Synthetic oligonucleotide
ctctagtggaggcaaccaaattttgcgcacccatatacgagtgtgcttgggttagctcca

SEQ ID NO: 6746 - DNA, 55 bp, Artificial
  Synthetic oligonucleotide
ggcaaccaaattttgcgcacccatatacgagtgtgcctgggttagctccactggc

SEQ ID NO: 6747 - DNA, 55 bp, Artificial
  Synthetic oligonucleotide
ggaacttaattctcaacagaggtggcgatgaaaatccacgaggcccggtgagccg

SEQ ID NO: 6748 - DNA, 55 bp, Artificial
  Synthetic oligonucleotide
attctcaacagaggtggcgatgaaaatccacgaggcccggtgagccgtgaacatg

SEQ ID NO: 6749 - DNA, 55 bp, Artificial
  Synthetic oligonucleotide
gcttgattgaggcgggcacaagattcaatttaggttctgtgactattacattgtc

SEQ ID NO: 6750 - DNA, 60 bp, Artificial
  Synthetic oligonucleotide
gtgtcaacaaagcgacaatgctttccttagtgagcttaaccttagacatgatgatcgtag

SEQ ID NO: 6751 - DNA, 55 bp, Artificial
  Synthetic oligonucleotide
gcgacaatgctttccttagtgagcttaaccttagacatgatgatcgtagaagttg

SEQ ID NO: 6752 - DNA, 60 bp, Artificial
  Synthetic oligonucleotide
ccatgggtacactcaccacgagtctggaggacactgcgctgatgactctgaccggcagaa

SEQ ID NO: 6753 - DNA, 60 bp, Artificial
  Synthetic oligonucleotide
ctcatattactgatagtctctatgtcaccggttcaatctgcaccaataagtcaggagaga

SEQ ID NO: 6754 - DNA, 55 bp, Artificial
  Synthetic oligonucleotide
agatcgctgaacttttctcaactaagacacacattggataatggagttggtggag

SEQ ID NO: 6755 - DNA, 54 bp, Artificial
  Synthetic oligonucleotide
taattgagcacaaagggacgataattggaaagcagaatgatacttgcacagcca

SEQ ID NO: 6756 - DNA, 56 bp, Artificial
  Synthetic oligonucleotide
ggctcagtctcatcgtgtggtgctttactactatggtaacagggcacacaaaaacc

SEQ ID NO: 6757 - DNA, 51 bp, Artificial
  Synthetic oligonucleotide
attgccccaattcaaacctgcacaaccatgaggagctgcatggtaggcttg

SEQ ID NO: 6758 - DNA, 50 bp, Artificial
  Synthetic oligonucleotide
caacattcagagcctttagtggtgcctgctttggaagacttccgttcagc

SEQ ID NO: 6759 - DNA, 56 bp, Artificial
  Synthetic oligonucleotide
agcagacgggcagctgtgtctgcattggagactaaactcggagagctcaagagaca

SEQ ID NO: 6760 - DNA, 50 bp, Artificial
  Synthetic oligonucleotide
cacttactagcttgttttcactgttgcctggtgtagcccactcattggca

SEQ ID NO: 6761 - DNA, 51 bp, Artificial
  Synthetic oligonucleotide
tatcaacaattcttggctaggatcaatactgcaagggacgcatgtgtagcc

SEQ ID NO: 6762 - DNA, 60 bp, Artificial
  Synthetic oligonucleotide
ttaatggtccttacgagatggagtcttttgatacatctgatgtcaacctctttgggccag

SEQ ID NO: 6763 - DNA, 53 bp, Artificial
  Synthetic oligonucleotide
ggttctttgtgggtctagtctggtgcgtgttattggttctagagttaattgta

SEQ ID NO: 6764 - DNA, 60 bp, Artificial
  Synthetic oligonucleotide
caaaatgttctagcaccggtctagttgcagctgcaccacacttagatcgtgtgacaggat

SEQ ID NO: 6765 - DNA, 55 bp, Artificial
  Synthetic oligonucleotide
ccggtctagttgcagctgcaccacacttagatcgtgtgacaggatacaatcaggc

SEQ ID NO: 6766 - DNA, 52 bp, Artificial
  Synthetic oligonucleotide
ttaacatggacattagagtatctgactgtccactgtctagtcatgaggcaag

SEQ ID NO: 6767 - DNA, 60 bp, Artificial
  Synthetic oligonucleotide
gggcatgcaacccacctgattgtcctggggtgggtacaggttgcactgcatgtgggatct

SEQ ID NO: 6768 - DNA, 60 bp, Artificial
  Synthetic oligonucleotide
gtggagttcagaaggtattcatggactgtccaacgaaacccaacatggtaatgcaagcac

SEQ ID NO: 6769 - DNA, 57 bp, Artificial
  Synthetic oligonucleotide
atgtccaatcaactttcaaacctactatgtcagctgcgaacatagcgctaagttgga

SEQ ID NO: 6770 - DNA, 60 bp, Artificial
  Synthetic oligonucleotide
ctttggcgacccaggtgacattatgtcaactacctctgggatgcgttgccctgaacacac

SEQ ID NO: 6771 - DNA, 60 bp, Artificial
  Synthetic oligonucleotide
gttacttcaaggggtcaatcctccccgaaatcatgatcgagtcaatctgtacaaatgcag

SEQ ID NO: 6772 - DNA, 60 bp, Artificial
  Synthetic oligonucleotide
tgtgaagtaatgatacctaagggcacaggtgacatcctagtggactgttcaggtgggcag

SEQ ID NO: 6773 - DNA, 55 bp, Artificial
  Synthetic oligonucleotide
gtgaagtaatgatacctaagggcacaggtgacatctcagtagactgttcaggagg

SEQ ID NO: 6774 - DNA, 60 bp, Artificial
  Synthetic oligonucleotide
gagatagctctaaatattcacaacctaacctgcactttatgaaagtgtccatagggctgc

SEQ ID NO: 6775 - DNA, 55 bp, Artificial
  Synthetic oligonucleotide
cacaacctaacctgcactttatgaaagtgtccatagggctgctttccaagcaatc

SEQ ID NO: 6776 - DNA, 60 bp, Artificial
  Synthetic oligonucleotide
ttctggatctatcagagtgtgctttgaggtttccgggaagaacctctggcactgttctgc

SEQ ID NO: 6777 - DNA, 55 bp, Artificial
  Synthetic oligonucleotide
ggtgacattatgtcaactacctctgggatgcgttgccctgaacacacaggttcct

SEQ ID NO: 6778 - DNA, 56 bp, Artificial
  Synthetic oligonucleotide
gacaccaggtaggtttagaacgattgtttgtggactctttcctgctcaaattatgc

SEQ ID NO: 6779 - DNA, 55 bp, Artificial
  Synthetic oligonucleotide
gtatgtgggttattccctgcacagattaaagcacggaatattataagccctgtca

SEQ ID NO: 6780 - DNA, 51 bp, Artificial
  Synthetic oligonucleotide
agtgcttaatctaacatggagtggctctgttataactgaatgttatttcgg

SEQ ID NO: 6781 - DNA, 60 bp, Artificial
  Synthetic oligonucleotide
tttagcatgcaatcaaactcattgtcagccaactgttcatttgctagcaccaatacaaac

SEQ ID NO: 6782 - DNA, 55 bp, Artificial
  Synthetic oligonucleotide
actcattgtcagccaactgttcatttgctagcaccaatacaaacatgcatgtctg

SEQ ID NO: 6783 - DNA, 53 bp, Artificial
  Synthetic oligonucleotide
gatacagctcatggggtaggtgatattccgatgaagacagacctagagttaga

SEQ ID NO: 6784 - DNA, 52 bp, Artificial
  Synthetic oligonucleotide
atgtgacatggctatgtgttatggagcctcagtagtaaacctagttagaggc

SEQ ID NO: 6785 - DNA, 55 bp, Artificial
  Synthetic oligonucleotide
gtcggtttcgcacaatagtatgtggcttattccctacacaaattcaagttcgaaa

SEQ ID NO: 6786 - DNA, 55 bp, Artificial
  Synthetic oligonucleotide
gcccttattgtgcatcaagattgacctccgatgggctagctaggcatgtaaagca

SEQ ID NO: 6787 - DNA, 51 bp, Artificial
  Synthetic oligonucleotide
gttcctaggaactttcagattctatcccttggcaattgggatctacaaagt

SEQ ID NO: 6788 - DNA, 57 bp, Artificial
  Synthetic oligonucleotide
atgtccagtcaaccttcaaaccaacagtgtcgactgcgaacatagcactcagttgga

SEQ ID NO: 6789 - DNA, 58 bp, Artificial
  Synthetic oligonucleotide
tttacagacactgcaacacactgcatctagcctgcctcattatatccacaaataggct

SEQ ID NO: 6790 - DNA, 60 bp, Artificial
  Synthetic oligonucleotide
ggtctagatgactcgttattctttacctactcaaagatcttgagcgaactatcactgcgc

SEQ ID NO: 6791 - DNA, 55 bp, Artificial
  Synthetic oligonucleotide
ctcgttattctttacctactcaaagatcttgagcgaactatcactgcgccagatc

SEQ ID NO: 6792 - DNA, 59 bp, Artificial
  Synthetic oligonucleotide
actcatttgagacaacatcaagcgaggttaatctgaaggggacatgcacattgagtcat

SEQ ID NO: 6793 - DNA, 55 bp, Artificial
  Synthetic oligonucleotide
cctgtaggcagtgcatacaagctaatcacagtccgttacagccgtaaagtatgtg

SEQ ID NO: 6794 - DNA, 60 bp, Artificial
  Synthetic oligonucleotide
aaagcatgtgacatggcaatctgttatggtgcacaaagtgtcacactcattagaggccaa

SEQ ID NO: 6795 - DNA, 54 bp, Artificial
  Synthetic oligonucleotide
caagggacagattgctctcagcaggggctacaagcaagcgcaccacacctagac

SEQ ID NO: 6796 - DNA, 60 bp, Artificial
  Synthetic oligonucleotide
ctcatggatcatacaatgaaactggacacaataaaacagacgttatgacaacgcccggtg

SEQ ID NO: 6797 - DNA, 60 bp, Artificial
  Synthetic oligonucleotide
gggttgtcctcctcatcattgagtcaatcttatgggctgctagtgcatcagaacttgtac

SEQ ID NO: 6798 - DNA, 55 bp, Artificial
  Synthetic oligonucleotide
cctgttggaagtgcctataaactgataacagttcgctatagtcgaaaagtgtgtg

SEQ ID NO: 6799 - DNA, 52 bp, Artificial
  Synthetic oligonucleotide
gcatttggggaccccggtgatatcatgtctactcctagtggtatgaggtgtc

SEQ ID NO: 6800 - DNA, 58 bp, Artificial
  Synthetic oligonucleotide
cataggtttccgtgtcaatgcaaatacgacagccttaagccacaaagtcctcgcagag

SEQ ID NO: 6801 - DNA, 60 bp, Artificial
  Synthetic oligonucleotide
gcacagattgacactgctttcagctcatactactggctctataaggccggcgtgactcca

SEQ ID NO: 6802 - DNA, 55 bp, Artificial
  Synthetic oligonucleotide
cagctcatactactggctctataaggccggcgtgactccagaaaccttcccgact

SEQ ID NO: 6803 - DNA, 60 bp, Artificial
  Synthetic oligonucleotide
ccgttagaacagatggttctaatatctctacacaatggcctagccggaggaatgatggtg

SEQ ID NO: 6804 - DNA, 55 bp, Artificial
  Synthetic oligonucleotide
actggacacaataaaacagacgttatgacaacgcccggtgataacctgagctctg

SEQ ID NO: 6805 - DNA, 59 bp, Artificial
  Synthetic oligonucleotide
ctactgtcatcctacaacccagctacaatcctttctgatcaggtcgacagcagacgggc

SEQ ID NO: 6806 - DNA, 60 bp, Artificial
  Synthetic oligonucleotide
atgtggagggcacagcagaggctatctgtggttactggttacgtaccatgtcccttgtga

SEQ ID NO: 6807 - DNA, 50 bp, Artificial
  Synthetic oligonucleotide
tgcactacgtacaggtttaagagcaaaccaaactgttaaccacaaattca

SEQ ID NO: 6808 - DNA, 60 bp, Artificial
  Synthetic oligonucleotide
gtgtttacagccgtgaatcttctgcactccggacagacacactttgatgccctcagaata

SEQ ID NO: 6809 - DNA, 60 bp, Artificial
  Synthetic oligonucleotide
ctgcacggaattcaatagatcaggggttaagctagtcaaggtgagacactgtgatattaa

SEQ ID NO: 6810 - DNA, 60 bp, Artificial
  Synthetic oligonucleotide
aatgagctgggtgacgtgtcactgaaggtcaatattgtactggtgcccctcaaggacatg

SEQ ID NO: 6811 - DNA, 60 bp, Artificial
  Synthetic oligonucleotide
ccactctctttgctgctcatgtcagttctgtcaatttcagggtgtggggggaacgatttc

SEQ ID NO: 6812 - DNA, 60 bp, Artificial
  Synthetic oligonucleotide
tagctgcgacagaccaatcagatggaatgctgaaacctgagaggtctattcgactcctca

SEQ ID NO: 6813 - DNA, 55 bp, Artificial
  Synthetic oligonucleotide
ctaagttgattattgcactacagcttgaccaatggtcactcaggtaatcagctgc

SEQ ID NO: 6814 - DNA, 60 bp, Artificial
  Synthetic oligonucleotide
tgtcctgggatggttgtgacctggactactactgcaacatgggagattggccttcttgca

SEQ ID NO: 6815 - DNA, 53 bp, Artificial
  Synthetic oligonucleotide
aaccaacacctgaaccccacgcaccctcaatggactgtgtgtgaaggtctact

SEQ ID NO: 6816 - DNA, 60 bp, Artificial
  Synthetic oligonucleotide
acataggcaatccagcaaaggcaacaccctgcattgtatcagaagcactagagctcggga

SEQ ID NO: 6817 - DNA, 51 bp, Artificial
  Synthetic oligonucleotide
gagctcgggactttagccttaacaggccctactacacgtaatgagccttgt

SEQ ID NO: 6818 - DNA, 60 bp, Artificial
  Synthetic oligonucleotide
caactcctaatggacatacaagttaggataggagcaatcagatgtagtgtaggacggcaa

SEQ ID NO: 6819 - DNA, 60 bp, Artificial
  Synthetic oligonucleotide
ataagactgccatcccacttacgtggacagggatgattgacttgccaggatactatgagg

SEQ ID NO: 6820 - DNA, 60 bp, Artificial
  Synthetic oligonucleotide
tgcccaacaaaacagatcactcataccataacatcaagcacctaactgaggtggcagcac

SEQ ID NO: 6821 - DNA, 57 bp, Artificial
  Synthetic oligonucleotide
cttacctggtgagacatccagagatacttgactgtggatctaaggaggattgcagac

SEQ ID NO: 6822 - DNA, 53 bp, Artificial
  Synthetic oligonucleotide
caaccttgtttgatgacatcgcaagtccccattcggcttgggtattttcatgt

SEQ ID NO: 6823 - DNA, 60 bp, Artificial
  Synthetic oligonucleotide
gcgattcaagctgtgaagtaatgatacctaagggcacaggtgacatctcagtagactgtt

SEQ ID NO: 6824 - DNA, 60 bp, Artificial
  Synthetic oligonucleotide
gctatgcggcctagtgtatcatccattcacagagtgtggcacgcattgtgtctgtggtgc

SEQ ID NO: 6825 - DNA, 60 bp, Artificial
  Synthetic oligonucleotide
gaataactgatgaattcgagcgaacaaaatttaaacatgagcttacacagaacatcacta

SEQ ID NO: 6826 - DNA, 60 bp, Artificial
  Synthetic oligonucleotide
ctattctacttatgcaagaggtgtgatctcaaattcgcttaagaacctctcgaagcaagg

SEQ ID NO: 6827 - DNA, 60 bp, Artificial
  Synthetic oligonucleotide
cttaggtcatagtcagacaagctctacggctgaagatagtagtagtgtgagcgacactac

SEQ ID NO: 6828 - DNA, 60 bp, Artificial
  Synthetic oligonucleotide
tttggtgcctctcaaggacatgtctaagccgaaacctgagagagtgatcatagctaggag

SEQ ID NO: 6829 - DNA, 57 bp, Artificial
  Synthetic oligonucleotide
cacaagtccacctaacagccctaacacaccacctacatcacaagacacgcaccatcc

SEQ ID NO: 6830 - DNA, 60 bp, Artificial
  Synthetic oligonucleotide
acagtctctgttatggacttgtctcagatgtactcccctgtcttcgagtacttatcaggt

SEQ ID NO: 6831 - DNA, 50 bp, Artificial
  Synthetic oligonucleotide
acgatgtcggcaacattggatgcaagttctctcagcataatctgatcttc

SEQ ID NO: 6832 - DNA, 60 bp, Artificial
  Synthetic oligonucleotide
cgaatgcagactagcaagcaaagatagaggtcctccaatgcatagcattaatctcaaagc

SEQ ID NO: 6833 - DNA, 55 bp, Artificial
  Synthetic oligonucleotide
acctaagggcacaggtgacatcctagtggactgttcaggtgggcagcaacatttc

SEQ ID NO: 6834 - DNA, 60 bp, Artificial
  Synthetic oligonucleotide
tattgtgcatctagactaacctcagatgggcttgctaggcatgtaactcattgccctaag

SEQ ID NO: 6835 - DNA, 60 bp, Artificial
  Synthetic oligonucleotide
cattaagacagaggccatagtgtgtgtagaacttaccagtcaggaaaggcagtgtagctt

SEQ ID NO: 6836 - DNA, 60 bp, Artificial
  Synthetic oligonucleotide
taggcacaactacaaaatgatatgtcagtgtattaatgcacactctatgtgtaagaatac

SEQ ID NO: 6837 - DNA, 60 bp, Artificial
  Synthetic oligonucleotide
gcctggctattatgaaacagttcacccatgtaatgtcttttgtgtgttatctggcccagg

SEQ ID NO: 6838 - DNA, 53 bp, Artificial
  Synthetic oligonucleotide
acagtgtccttattgctttacacactgtgagcctacagaatctgcctttcaag

SEQ ID NO: 6839 - DNA, 57 bp, Artificial
  Synthetic oligonucleotide
ttggtactggctgtactgcatgcgggctatacattgaccagcttaaacctgtaggca

SEQ ID NO: 6840 - DNA, 50 bp, Artificial
  Synthetic oligonucleotide
acagtttcaaagttctcgcaaggtgataccctagtattcctaggccctat

SEQ ID NO: 6841 - DNA, 60 bp, Artificial
  Synthetic oligonucleotide
tgtgctagcggagtttgcgtcacaggatcgcagagcccttctactgagattacactcaag

SEQ ID NO: 6842 - DNA, 55 bp, Artificial
  Synthetic oligonucleotide
tggccttttcccgacacaaattcaagttcggaatataatgagtcctgtcatgggg

SEQ ID NO: 6843 - DNA, 60 bp, Artificial
  Synthetic oligonucleotide
cattaagagacgtagccctggacatcgggactccagatctgtatactgtctctgttataa

SEQ ID NO: 6844 - DNA, 51 bp, Artificial
  Synthetic oligonucleotide
aaacgagaaacaaccacaaattctacacttcaaggggaaatatggccacaa

SEQ ID NO: 6845 - DNA, 52 bp, Artificial
  Synthetic oligonucleotide
tggccgcactcgagaaactggcgatgcaaccccacttggtgttggggagtag

SEQ ID NO: 6846 - DNA, 60 bp, Artificial
  Synthetic oligonucleotide
aacaattcttggctaggattaatactgcaagggatgcatgtgtagccaaggacatcgatg

SEQ ID NO: 6847 - DNA, 60 bp, Artificial
  Synthetic oligonucleotide
cccatggaagagtgagtgcaaaacataacgatgggaacctgaaagatagaagcgatgacg

SEQ ID NO: 6848 - DNA, 51 bp, Artificial
  Synthetic oligonucleotide
gtggccgctgtcgtccgagtcttctacatcaacgcagcgaaggtcaaagct

SEQ ID NO: 6849 - DNA, 60 bp, Artificial
  Synthetic oligonucleotide
tacttctcgagatgggccttgtatctaatagcgactaaccctgagtcagatatcgctctg

SEQ ID NO: 6850 - DNA, 55 bp, Artificial
  Synthetic oligonucleotide
cgatcgggatgtatagggtccgacggtggtcaatggaccccaactgcctcgagaa

SEQ ID NO: 6851 - DNA, 54 bp, Artificial
  Synthetic oligonucleotide
ggacagcgttcacaagtgcagctagagagttcgtgatccaatttggtatacgct

SEQ ID NO: 6852 - DNA, 52 bp, Artificial
  Synthetic oligonucleotide
gcactagggttaagggtcattatcttatagttgcactacaggggatcgggat

SEQ ID NO: 6853 - DNA, 50 bp, Artificial
  Synthetic oligonucleotide
tcttgaactggagagtgaacatggacattagaactactgactgtccacta

SEQ ID NO: 6854 - DNA, 60 bp, Artificial
  Synthetic oligonucleotide
gtgtgtaaactcacatcaaggtttcaggacaatctaaggaagtcattaggggcatatgaa

SEQ ID NO: 6855 - DNA, 55 bp, Artificial
  Synthetic oligonucleotide
ggtttcaggacaatctaaggaagtcattaggggcatatgaacccaaacagggttg

SEQ ID NO: 6856 - DNA, 59 bp, Artificial
  Synthetic oligonucleotide
cggtgatccaggggatataatgagcactccggtagggatgaagtgccctgaattgagcg

SEQ ID NO: 6857 - DNA, 56 bp, Artificial
  Synthetic oligonucleotide
cgtgggattagactgtcttgctaacatgcgaaaccttgacggtaagcccataagtg

SEQ ID NO: 6858 - DNA, 60 bp, Artificial
  Synthetic oligonucleotide
gcagagagtgtaacattgacaagaggacaaaatacagtcaaggtatcagggaaaggtggc

SEQ ID NO: 6859 - DNA, 60 bp, Artificial
  Synthetic oligonucleotide
cagctcaaacacttcatatgaacagtgtatcaatacagtcaagtagcttgaccacattag

SEQ ID NO: 6860 - DNA, 53 bp, Artificial
  Synthetic oligonucleotide
gggattagactgccttaccaacatgcgaaatcttgatggaaagcccataagtg

SEQ ID NO: 6861 - DNA, 55 bp, Artificial
  Synthetic oligonucleotide
aagtacactcactggttggacacctttctaggctgctcggtctccattaacaggc

SEQ ID NO: 6862 - DNA, 55 bp, Artificial
  Synthetic oligonucleotide
cccggaggttgggtatgtggcatttattggtaagtatgggcagcaactcaacttc

SEQ ID NO: 6863 - DNA, 58 bp, Artificial
  Synthetic oligonucleotide
gcacgtcagtacgtaagtgttaactttgagtgtgtgtgaaaagcgatttgtgaggaac

SEQ ID NO: 6864 - DNA, 55 bp, Artificial
  Synthetic oligonucleotide
cgggacactaggaaaaaggctgaaacagtacagagagctaaagcctcaaacatgt

SEQ ID NO: 6865 - DNA, 59 bp, Artificial
  Synthetic oligonucleotide
tcactgtttctgttatggatctgtctcaaatgtattctcctgttttcgagtacctgtca

SEQ ID NO: 6866 - DNA, 55 bp, Artificial
  Synthetic oligonucleotide
caagaggacaaaatacagtcaaggtatcagggaaaggtggccatagtggttcaac

SEQ ID NO: 6867 - DNA, 54 bp, Artificial
  Synthetic oligonucleotide
cttgacttcacttagacctaaccttgactgcgtgccgccactatatctttgaga

SEQ ID NO: 6868 - DNA, 50 bp, Artificial
  Synthetic oligonucleotide
tgccgggagcttatccgggaatcctgtaaaccgtgattacatccgacaaa

SEQ ID NO: 6869 - DNA, 57 bp, Artificial
  Synthetic oligonucleotide
gagtacagagtccctggttcaattgtagtaaacgtcaaggacatgctatccgacatg

SEQ ID NO: 6870 - DNA, 60 bp, Artificial
  Synthetic oligonucleotide
ggatttacatgcaccctggagtcttgacagcgggaagaatgtcggagcttggcgtttgct

SEQ ID NO: 6871 - DNA, 55 bp, Artificial
  Synthetic oligonucleotide
ccctggagtcttgacagcgggaagaatgtcggagcttggcgtttgctttggggca

SEQ ID NO: 6872 - DNA, 60 bp, Artificial
  Synthetic oligonucleotide
cacaggatgtcgggatatctagcacgctggattgctgacacatgcaaggctagtgtcctc

SEQ ID NO: 6873 - DNA, 60 bp, Artificial
  Synthetic oligonucleotide
tagtgtcctcaagctagccgaagctagtgctcagattgtcatgcctcttgccgaggttaa

SEQ ID NO: 6874 - DNA, 60 bp, Artificial
  Synthetic oligonucleotide
caatatgtctatgtattgcacaccattatactgcaaggcttctgttaagatagttaataa

SEQ ID NO: 6875 - DNA, 50 bp, Artificial
  Synthetic oligonucleotide
gcaactcctcactcagtgtgggtctttgcatgtgcacctgaccgatgtcc

SEQ ID NO: 6876 - DNA, 56 bp, Artificial
  Synthetic oligonucleotide
gtttgagccattgattagaaagttctttgagcgaccgtttaaaagtgcactagaag

SEQ ID NO: 6877 - DNA, 60 bp, Artificial
  Synthetic oligonucleotide
ctaataaggttatcaagatctgtccaacttgggacagcagaaaacaatacatgatgattt

SEQ ID NO: 6878 - DNA, 55 bp, Artificial
  Synthetic oligonucleotide
caattgtttgcggcctatttcctacacagattcaagtgagaaataccatgagccc

SEQ ID NO: 6879 - DNA, 52 bp, Artificial
  Synthetic oligonucleotide
catgggaattaactggaccgtatagcattaccactaatcggacaatactact

SEQ ID NO: 6880 - DNA, 56 bp, Artificial
  Synthetic oligonucleotide
gcatggcatatcgggcatttagttagggatattactgagagcttgattgcacattc

SEQ ID NO: 6881 - DNA, 60 bp, Artificial
  Synthetic oligonucleotide
tgtggttcacacataaggggataaagctatacttgaacccgatcatttcatcaggactgc

SEQ ID NO: 6882 - DNA, 55 bp, Artificial
  Synthetic oligonucleotide
cgttgttttcctttagacatactatggtcctattacgccggctgtttggacagga

SEQ ID NO: 6883 - DNA, 56 bp, Artificial
  Synthetic oligonucleotide
ccacacagtaagcttcggggaaaatagtgtgataggctatgtggaattacccccca

SEQ ID NO: 6884 - DNA, 60 bp, Artificial
  Synthetic oligonucleotide
ggacctgccaatgcaaaagttcctcacagtgctagctcagatacattgagcctgattgcc

SEQ ID NO: 6885 - DNA, 54 bp, Artificial
  Synthetic oligonucleotide
gccatactttagtcaaaccagaaatataagccttaagggtatgtcaggggcatt

SEQ ID NO: 6886 - DNA, 52 bp, Artificial
  Synthetic oligonucleotide
gataccttctgatgacacctggtttgaagtcctgaactaccatggggagtct

SEQ ID NO: 6887 - DNA, 60 bp, Artificial
  Synthetic oligonucleotide
ctacattgacactggcaatgcctagaaccatctatgaactcaggatggaatgcccgcata

SEQ ID NO: 6888 - DNA, 60 bp, Artificial
  Synthetic oligonucleotide
ttatattatagggtcaactgagctcgggctgattccgattgagactgtatcggatttgaa

SEQ ID NO: 6889 - DNA, 51 bp, Artificial
  Synthetic oligonucleotide
tgatccaattcaaaactcacagggattcttacggatagttggcccaataac

SEQ ID NO: 6890 - DNA, 60 bp, Artificial
  Synthetic oligonucleotide
ttgtctactgacctacaactcatgagggagggtgtgtatagagaattaggcctggatatc

SEQ ID NO: 6891 - DNA, 50 bp, Artificial
  Synthetic oligonucleotide
gtgcctactactcacaatggagctaatagtctgggctgctagtgctgaag

SEQ ID NO: 6892 - DNA, 55 bp, Artificial
  Synthetic oligonucleotide
catgttaaaagtgatgatccagatgtggttgcagctagctcaagtctcatggcaa

SEQ ID NO: 6893 - DNA, 60 bp, Artificial
  Synthetic oligonucleotide
ataaaagcttaagggctgcaagatctatgtgcaaatcaaaaggaccagctcccatactat

SEQ ID NO: 6894 - DNA, 53 bp, Artificial
  Synthetic oligonucleotide
gcagacagggctgaacattttcaaatacaggaagacaagcaatctaccacaca

SEQ ID NO: 6895 - DNA, 53 bp, Artificial
  Synthetic oligonucleotide
gagagaacaagcacctggggacgtgaagaatatggatgcttggcaattagtga

SEQ ID NO: 6896 - DNA, 60 bp, Artificial
  Synthetic oligonucleotide
ggtgtcaatctgctttggtgcagttctctggccagaagcaagttgcactactggtctaac

SEQ ID NO: 6897 - DNA, 60 bp, Artificial
  Synthetic oligonucleotide
tagtggatagtacactggctctgctgaaccatagctgcaagtgagaaagaccctccccct

SEQ ID NO: 6898 - DNA, 60 bp, Artificial
  Synthetic oligonucleotide
actgtaggcctaacatgctgcgagtggaagaaaaattctgagttgtattccatcacaaag

SEQ ID NO: 6899 - DNA, 60 bp, Artificial
  Synthetic oligonucleotide
ctgcaagatcggctgagttggcatcacccattgtagtggtaaactccaccacataaacgt

SEQ ID NO: 6900 - DNA, 54 bp, Artificial
  Synthetic oligonucleotide
ctgtgtcagcattggaggacaaattggcagaattcaagagacaacttgccgatt

SEQ ID NO: 6901 - DNA, 60 bp, Artificial
  Synthetic oligonucleotide
caatcctttccagttggatcattgacagcagtggaatgtatagactatctggaccgtctt

SEQ ID NO: 6902 - DNA, 53 bp, Artificial
  Synthetic oligonucleotide
tctgacgagaaaagagatgctagaaccgcaagactgctactaggctgcccaaa

SEQ ID NO: 6903 - DNA, 60 bp, Artificial
  Synthetic oligonucleotide
actaatcgtaaggtagctactaagttgattattgcactacagcttgaccaatggtcactc

SEQ ID NO: 6904 - DNA, 60 bp, Artificial
  Synthetic oligonucleotide
actaatcgtaaggtagctactaagttgattattgcactacagcttggtcatggaccactc

SEQ ID NO: 6905 - DNA, 60 bp, Artificial
  Synthetic oligonucleotide
gcagttcagatgattacgcaaagtgtatagtggtaactggtatactatccaaagagctct

SEQ ID NO: 6906 - DNA, 50 bp, Artificial
  Synthetic oligonucleotide
actaaggacagtcggtctgtaaatgactgctattcagtctattctggaac

SEQ ID NO: 6907 - DNA, 50 bp, Artificial
  Synthetic oligonucleotide
atatgatctatctggaagatcactaagctaccagaaagattcttcaggta

SEQ ID NO: 6908 - DNA, 54 bp, Artificial
  Synthetic oligonucleotide
gaggtcgcaggttcatatataagatttgtgacagtctttcgaatgggccctggg

SEQ ID NO: 6909 - DNA, 52 bp, Artificial
  Synthetic oligonucleotide
cccacgcttcaactgaccgtcatgatagaactaatatttaaagatgtaccct

SEQ ID NO: 6910 - DNA, 55 bp, Artificial
  Synthetic oligonucleotide
gcctgactacggactcacgttgcaccgcatatcgggttacctcaccagatgggcc

SEQ ID NO: 6911 - DNA, 53 bp, Artificial
  Synthetic oligonucleotide
cgtaaaaagtgcacgcgtgattgcaacatataaccatgaatacaaaacagggc

SEQ ID NO: 6912 - DNA, 52 bp, Artificial
  Synthetic oligonucleotide
accgcttgtacgaaatgctggacacagaccaagtttctgacaaacctactat

SEQ ID NO: 6913 - DNA, 53 bp, Artificial
  Synthetic oligonucleotide
agtaagcctccatggtggtcctgcaactaatagagattatctccggcaaaggc

SEQ ID NO: 6914 - DNA, 53 bp, Artificial
  Synthetic oligonucleotide
tcacacttcctattatcctgaaggctctatatatgttgtcaacacgtgggaga

SEQ ID NO: 6915 - DNA, 60 bp, Artificial
  Synthetic oligonucleotide
acagtagatcaatcaactgttggtgctagtggaatttacccctcattcatgtctcgtgtc

SEQ ID NO: 6916 - DNA, 58 bp, Artificial
  Synthetic oligonucleotide
ggcgtactcagtcaatggggatacaactggatcagaggattattctgctgttcatgac

SEQ ID NO: 6917 - DNA, 60 bp, Artificial
  Synthetic oligonucleotide
atggatccatcctagtaaactcgttagtgcactctgacgacaaccaaacatctataacta

SEQ ID NO: 6918 - DNA, 60 bp, Artificial
  Synthetic oligonucleotide
agattcttattgacatctgtaggagattgcgcatacatagggccgtatgaagatctagcg

SEQ ID NO: 6919 - DNA, 55 bp, Artificial
  Synthetic oligonucleotide
ctgtaggagattgcgcatacatagggccgtatgaagatctagcgagtaggatctc

SEQ ID NO: 6920 - DNA, 55 bp, Artificial
  Synthetic oligonucleotide
tgacacccctttcagctcgttttactggctttacaaggccggtgtgactccagag

SEQ ID NO: 6921 - DNA, 58 bp, Artificial
  Synthetic oligonucleotide
tgactggtctgacaacaaagataaggagcaacctattggtctagtattattgatggca

SEQ ID NO: 6922 - DNA, 60 bp, Artificial
  Synthetic oligonucleotide
ttagtcaggaaattaaatgaccctagtatagttactgcaatgacaatgcagtcaccttta

SEQ ID NO: 6923 - DNA, 60 bp, Artificial
  Synthetic oligonucleotide
ccttagtgagcttaaccttagacatgatgatcgtagaagttgttatatgctttgaccgta

SEQ ID NO: 6924 - DNA, 53 bp, Artificial
  Synthetic oligonucleotide
gatattggccaacaaaaggaccttgctgcattaaggttatgtattgaagtttg

SEQ ID NO: 6925 - DNA, 59 bp, Artificial
  Synthetic oligonucleotide
cttgcagatggtgatatcttgtggggtgtctcaaaagttatgagtctagatctaaacag

SEQ ID NO: 6926 - DNA, 59 bp, Artificial
  Synthetic oligonucleotide
accccgagtatcaccatattgagtgcatcaaatactagcttgcccatatcatcagtgca

SEQ ID NO: 6927 - DNA, 57 bp, Artificial
  Synthetic oligonucleotide
ttcacctacagctgtacccttcaaatcttactatgccaaagggtctctaacctttga

SEQ ID NO: 6928 - DNA, 60 bp, Artificial
  Synthetic oligonucleotide
tcaactgacaaagaacatagtgagcttgaggtcaacgtgcttctacctcaggttgccgtt

SEQ ID NO: 6929 - DNA, 53 bp, Artificial
  Synthetic oligonucleotide
tgatatcgattaaagacaatggtcttagagccattgcccaatatgatgatgaa

SEQ ID NO: 6930 - DNA, 50 bp, Artificial
  Synthetic oligonucleotide
cagttacggtgggcctggtgagaaaataacaatctgcaatggttccacaa

SEQ ID NO: 6931 - DNA, 60 bp, Artificial
  Synthetic oligonucleotide
gactgtccattgtctagccatgaagcaagtatacttagtgagtttgacggacaagtcatt

SEQ ID NO: 6932 - DNA, 50 bp, Artificial
  Synthetic oligonucleotide
gcgaagtacccatttaagtagttggaagaacgattccttagttgggaacg

SEQ ID NO: 6933 - DNA, 60 bp, Artificial
  Synthetic oligonucleotide
atggtgctttgacccagtcccagaaagtagccaacgatgtgtcagagtgatgtttgttct

SEQ ID NO: 6934 - DNA, 60 bp, Artificial
  Synthetic oligonucleotide
gcaactagtcgcgcagagaaagtagtgtctgatgtgtacgagatattgcaatctatcccc

SEQ ID NO: 6935 - DNA, 60 bp, Artificial
  Synthetic oligonucleotide
cattgcctgtcattggacctctatctattgtaagagcgcttagatccgtattgtacctac

SEQ ID NO: 6936 - DNA, 55 bp, Artificial
  Synthetic oligonucleotide
ttgacccagagtcaggatacactaactttcagcgtaactacctgccaggggttac

SEQ ID NO: 6937 - DNA, 60 bp, Artificial
  Synthetic oligonucleotide
cacaagatggtagaggattcctatcgcagccgtaagtcaataatctgttatgatctttca

SEQ ID NO: 6938 - DNA, 57 bp, Artificial
  Synthetic oligonucleotide
ctaagtacacttatcgacggaagctcacaaacccacttgagaagactcaagcagtag

SEQ ID NO: 6939 - DNA, 50 bp, Artificial
  Synthetic oligonucleotide
tgacaccaggtcggttccgtacaatagtttgtgggttgtttccgacacag

SEQ ID NO: 6940 - DNA, 54 bp, Artificial
  Synthetic oligonucleotide
acctttaaatgctgtcatggggaagagtgctcacaaattgggctccatgctgcc

SEQ ID NO: 6941 - DNA, 50 bp, Artificial
  Synthetic oligonucleotide
ggaaacagtatgtttctagtggagattccagtgtactgggcacatactct

SEQ ID NO: 6942 - DNA, 60 bp, Artificial
  Synthetic oligonucleotide
gcttgttgctgttttcatctaagtgagacacatctttcgatggagataaaacataaatag

SEQ ID NO: 6943 - DNA, 57 bp, Artificial
  Synthetic oligonucleotide
gacaggtgattgtgttgtgacttcatcatttctaagaatccgggacaatttcttttg

SEQ ID NO: 6944 - DNA, 60 bp, Artificial
  Synthetic oligonucleotide
gcggattagtttaccatcccttcactgagtgcggcacccattgcgtatgtggtgctagat

SEQ ID NO: 6945 - DNA, 55 bp, Artificial
  Synthetic oligonucleotide
cccttcactgagtgcggcacccattgcgtatgtggtgctagatacgagacatcgg

SEQ ID NO: 6946 - DNA, 51 bp, Artificial
  Synthetic oligonucleotide
ttgtgtccaggttataaaagtctcagggctgcaagagtcatgtgcaaatcc

SEQ ID NO: 6947 - DNA, 52 bp, Artificial
  Synthetic oligonucleotide
acaattctggatacagtcagaccacatggagggtttacttgagatcccacga

SEQ ID NO: 6948 - DNA, 60 bp, Artificial
  Synthetic oligonucleotide
catagtgtgtgctcatggcctgataaattaccagtgtcacactgctctcagtgcctttgt

SEQ ID NO: 6949 - DNA, 50 bp, Artificial
  Synthetic oligonucleotide
atggagcattcacatgtttcatatccgttatctgtcatcccgaatttgtc

SEQ ID NO: 6950 - DNA, 60 bp, Artificial
  Synthetic oligonucleotide
ttggcaagtacttgctaggcttaagtcatgcaagcacatacgagttgcaacagagacaac

SEQ ID NO: 6951 - DNA, 56 bp, Artificial
  Synthetic oligonucleotide
gggttgttcccaaagcttaaccatacaaactgtgataagagtgccataccgctcac

SEQ ID NO: 6952 - DNA, 57 bp, Artificial
  Synthetic oligonucleotide
cctgtttggaatgacaatgcccatggtgttggttctgtgcctatgcacacagatctg

SEQ ID NO: 6953 - DNA, 59 bp, Artificial
  Synthetic oligonucleotide
aggtcttatgaccataaacatagcagcacaatgggtgggtggtaggggacagcaactta

SEQ ID NO: 6954 - DNA, 60 bp, Artificial
  Synthetic oligonucleotide
aggtccatggaggcattctcaggaatattcagatcaccacatggagaagatcatgaccta

SEQ ID NO: 6955 - DNA, 60 bp, Artificial
  Synthetic oligonucleotide
aatgccttttctcaaagatatcacagcttagttcagagacagatgattgtgttgtgactt

SEQ ID NO: 6956 - DNA, 56 bp, Artificial
  Synthetic oligonucleotide
ggtccatacccatgcacacagatttagagctagacttttctctaacatcaagttct

SEQ ID NO: 6957 - DNA, 60 bp, Artificial
  Synthetic oligonucleotide
gggttgtaacccatcagattgcccaggagtgggtacaggatgcacagcatgtgggttata

SEQ ID NO: 6958 - DNA, 60 bp, Artificial
  Synthetic oligonucleotide
cccttgtaagattggcttacagacatcctccatcgaaggcgcatggggctcaggtgtagg

SEQ ID NO: 6959 - DNA, 60 bp, Artificial
  Synthetic oligonucleotide
tgtcatgttggccgtctgcaagcgcatgtgctttagagcaaccatagaagttagcaatag

SEQ ID NO: 6960 - DNA, 59 bp, Artificial
  Synthetic oligonucleotide
gaaggccagaccaacttatggtgcaggggaggttactgtactagtggaggttgctgaca

SEQ ID NO: 6961 - DNA, 60 bp, Artificial
  Synthetic oligonucleotide
gggatggttgtgatctagactattattgcaacatgggagattggccttcttgcacataca

SEQ ID NO: 6962 - DNA, 60 bp, Artificial
  Synthetic oligonucleotide
ctgtatgcagttagacatgacattgtagatcagatgattaagcatgactggtctgataac

SEQ ID NO: 6963 - DNA, 55 bp, Artificial
  Synthetic oligonucleotide
tattattgcaacatgggagattggccttcttgcacatacacaggagttacccagc

SEQ ID NO: 6964 - DNA, 60 bp, Artificial
  Synthetic oligonucleotide
tcgctgctaactccagcagtacttttgacccagaggtcgcatacgctagttttaagcgtg

SEQ ID NO: 6965 - DNA, 60 bp, Artificial
  Synthetic oligonucleotide
gatgacctatcgctgcatactgaatcatatgtttgcagcgcagattgtacaataggtgta

SEQ ID NO: 6966 - DNA, 55 bp, Artificial
  Synthetic oligonucleotide
tacaataagtcgtgcaaaaaatgcaaactatgcggcctagtgtatcatccattca

SEQ ID NO: 6967 - DNA, 56 bp, Artificial
  Synthetic oligonucleotide
cgaacctaatgggccaagtgtgtatagaaaaccatcaggtggtgtattccaatcta

SEQ ID NO: 6968 - DNA, 50 bp, Artificial
  Synthetic oligonucleotide
gcaatgttgcaactaacagatggccagtgatacaatgcgagaatgacaaa

SEQ ID NO: 6969 - DNA, 56 bp, Artificial
  Synthetic oligonucleotide
tggggatgtgaagaatttggttgcctagctgtaagtgatgggtgtgtatttgggtc

SEQ ID NO: 6970 - DNA, 60 bp, Artificial
  Synthetic oligonucleotide
aggtattccgatagaaatagtcatcatccgtatagaccctgtgagcaaagatttacatat

SEQ ID NO: 6971 - DNA, 56 bp, Artificial
  Synthetic oligonucleotide
atgttaaagattatatagcagagaagttttccccttatacaaagacactatttagc

SEQ ID NO: 6972 - DNA, 55 bp, Artificial
  Synthetic oligonucleotide
gagtggtacacagtccactacttgaagcagatattgtctggtggtcacaaagcca

SEQ ID NO: 6973 - DNA, 60 bp, Artificial
  Synthetic oligonucleotide
agatctgtccaacttgggacagcagaaaacaatacatgatgatttccaggattgtgatat

SEQ ID NO: 6974 - DNA, 57 bp, Artificial
  Synthetic oligonucleotide
actgagccatcaacccaggagtacacaacgactaagcacacttatgttgacacagtc

SEQ ID NO: 6975 - DNA, 56 bp, Artificial
  Synthetic oligonucleotide
aagacccgacaggagttgagcccggagaccacctaaaagagagatcaatgctcagc

SEQ ID NO: 6976 - DNA, 60 bp, Artificial
  Synthetic oligonucleotide
acttggccagatgggctctatatctgatccgtccaagccctgagtctgatattggtctgg

SEQ ID NO: 6977 - DNA, 55 bp, Artificial
  Synthetic oligonucleotide
gggctctatatctgatccgtccaagccctgagtctgatattggtctggttcggtc

SEQ ID NO: 6978 - DNA, 52 bp, Artificial
  Synthetic oligonucleotide
agcgcagatgctactaagtggtcaccaggagacaactcagctaaatttcgta

SEQ ID NO: 6979 - DNA, 60 bp, Artificial
  Synthetic oligonucleotide
cgaagatggtccatggacccaaattgccttgagaaagcgatttggcagcggtacatgggc

SEQ ID NO: 6980 - DNA, 55 bp, Artificial
  Synthetic oligonucleotide
aaattgccttgagaaagcgatttggcagcggtacatgggcataggggctgatcag

SEQ ID NO: 6981 - DNA, 55 bp, Artificial
  Synthetic oligonucleotide
tcactcagatgataaccacacttcaataacaatgattcaagacaaattcccagat

SEQ ID NO: 6982 - DNA, 50 bp, Artificial
  Synthetic oligonucleotide
tatctatggagaaccgttctcagtgtacggtcgatttttactcaccgcag

SEQ ID NO: 6983 - DNA, 58 bp, Artificial
  Synthetic oligonucleotide
ctgagatactttaacatccctgattatagaccacagcagctatgtgaaccacggattg

SEQ ID NO: 6984 - DNA, 60 bp, Artificial
  Synthetic oligonucleotide
tgtaaagtcactagatttgggtgcttgcccacaattagctcaactagctatagtattatg

SEQ ID NO: 6985 - DNA, 54 bp, Artificial
  Synthetic oligonucleotide
cctgatcatccgagtggtaaaacactgcggtctttctttaagatgacacctgac

SEQ ID NO: 6986 - DNA, 58 bp, Artificial
  Synthetic oligonucleotide
ggcatttggttagggatattactgagagcttgattgcacattctggtttgaggaggtc

SEQ ID NO: 6987 - DNA, 55 bp, Artificial
  Synthetic oligonucleotide
cacaacttgcagtctcacttagtacgagtaaggttgagagattatatgggacatc

SEQ ID NO: 6988 - DNA, 57 bp, Artificial
  Synthetic oligonucleotide
gaccggtttacaagagtaggtgtaccaccaattgacccagagattcaatgtgcagca

SEQ ID NO: 6989 - DNA, 51 bp, Artificial
  Synthetic oligonucleotide
caaattcatgggaagtaggataggttcatggtgccaaatggtcagtttgat

SEQ ID NO: 6990 - DNA, 55 bp, Artificial
  Synthetic oligonucleotide
gtgcattgtttataagaactgtgtcctccgtacaagcttgcggacaacacaagcc

SEQ ID NO: 6991 - DNA, 60 bp, Artificial
  Synthetic oligonucleotide
gctacaagagcaggtgctatgttggcttagtatgggggatcctcttgacgacagagctga

SEQ ID NO: 6992 - DNA, 60 bp, Artificial
  Synthetic oligonucleotide
gataagcaagtagtgcatgcagagatacagaacctagggcattggatggatggcacattc

SEQ ID NO: 6993 - DNA, 60 bp, Artificial
  Synthetic oligonucleotide
tgtttggtcaccccgtctgttaaagtttgcatgataggtaccatctcgaagcttcagcca

SEQ ID NO: 6994 - DNA, 60 bp, Artificial
  Synthetic oligonucleotide
taaatcgcatgtctgtgactattctttagccactgatgggatggtgagattacctcgtat

SEQ ID NO: 6995 - DNA, 56 bp, Artificial
  Synthetic oligonucleotide
aatacatactagctgttataatgaaccctatattgaccactggagagataaacttg

SEQ ID NO: 6996 - DNA, 51 bp, Artificial
  Synthetic oligonucleotide
aatacttttcatcgattgagatctccaataattccttatgcatgttgatag

SEQ ID NO: 6997 - DNA, 60 bp, Artificial
  Synthetic oligonucleotide
gattgtcgaagagagatatggagcatcagctagattggacaatgcagtggataaactaac

SEQ ID NO: 6998 - DNA, 51 bp, Artificial
  Synthetic oligonucleotide
tccagagcagacgggcagctgtgtcagcattggaggacaaattggcagaat

SEQ ID NO: 6999 - DNA, 55 bp, Artificial
  Synthetic oligonucleotide
ctaagttgattattgcactacagcttggtcatggaccactcaggtaatctgctgc

SEQ ID NO: 7000 - DNA, 50 bp, Artificial
  Synthetic oligonucleotide
acgcactaagaggtctgctttaaacggctccaaaaaggggtgatctggaa

SEQ ID NO: 7001 - DNA, 60 bp, Artificial
  Synthetic oligonucleotide
gcatagttacgtgtgtggacaacgacattaggtcatcgaaatagctattatgtgaacttt

SEQ ID NO: 7002 - DNA, 55 bp, Artificial
  Synthetic oligonucleotide
ggacaacgacattaggtcatcgaaatagctattatgtgaactttccgtgctgcag

SEQ ID NO: 7003 - DNA, 53 bp, Artificial
  Synthetic oligonucleotide
caaagacaagtgttgcactgtcatacctttgaacagagctatccgggctagat

SEQ ID NO: 7004 - DNA, 56 bp, Artificial
  Synthetic oligonucleotide
tttgtgatgacatagccaagctttcgtttgtggacgaaatataatatcatactgtt

SEQ ID NO: 7005 - DNA, 60 bp, Artificial
  Synthetic oligonucleotide
catcaccgaccccacaagcaactccaacacccagctacagcgagacacctacactgccga

SEQ ID NO: 7006 - DNA, 60 bp, Artificial
  Synthetic oligonucleotide
gcacgagctcaattgtaattacaacatatgcccatactgcgcgtccagactaacttcaga

SEQ ID NO: 7007 - DNA, 60 bp, Artificial
  Synthetic oligonucleotide
ccataccataaacagctgacattacaataagtcctggagaaccctctatcacactaggaa

SEQ ID NO: 7008 - DNA, 60 bp, Artificial
  Synthetic oligonucleotide
tccaacttacatggcctaggagctatgatgcacaactatggtgatgacaagagggttgag

SEQ ID NO: 7009 - DNA, 56 bp, Artificial
  Synthetic oligonucleotide
cccatgtgaaactgcaaatgttgaagctcattgcattttacgaaggcatagtgcag

SEQ ID NO: 7010 - DNA, 56 bp, Artificial
  Synthetic oligonucleotide
tgagcagagcggtggaataggctacggatgctttaatgtgaacccttcttgtctct

SEQ ID NO: 7011 - DNA, 50 bp, Artificial
  Synthetic oligonucleotide
taaaacagtttcacaacatgatggagatagacctagattctgttatgaac

SEQ ID NO: 7012 - DNA, 57 bp, Artificial
  Synthetic oligonucleotide
tcgtgaacggagcgattattcctctctattgcaggcatttagcaaactgttgcacag

SEQ ID NO: 7013 - DNA, 60 bp, Artificial
  Synthetic oligonucleotide
ttagtgcatggctgcatagtgtgtgctcatggcctgataaattaccagtgtcacactgct

SEQ ID NO: 7014 - DNA, 60 bp, Artificial
  Synthetic oligonucleotide
tcgcgatgtatcatttcaggacttatctgaaaatccctgtcaagttggtgtggccgtgtc

SEQ ID NO: 7015 - DNA, 53 bp, Artificial
  Synthetic oligonucleotide
acttggagtgacgggtatgcaatgtacctagggtttgcccctggtgctgagat

SEQ ID NO: 7016 - DNA, 60 bp, Artificial
  Synthetic oligonucleotide
ggaatgtactggacttaaaccatctagacattgatgaaccaacaggacagactgcagatt

SEQ ID NO: 7017 - DNA, 55 bp, Artificial
  Synthetic oligonucleotide
catctagacattgatgaaccaacaggacagactgcagattggctgagcattgttg

SEQ ID NO: 7018 - DNA, 60 bp, Artificial
  Synthetic oligonucleotide
gtgctttaaggacgatgctctgcattggaggtcctctgcctctcttgtctagcatgacag

SEQ ID NO: 7019 - DNA, 60 bp, Artificial
  Synthetic oligonucleotide
cctaccaacaggctcctatctacatcaactgtaaaaggtatccagctaggatctgaacta

SEQ ID NO: 7020 - DNA, 55 bp, Artificial
  Synthetic oligonucleotide
ctacatcaactgtaaaaggtatccagctaggatctgaactagccccagacaccac

SEQ ID NO: 7021 - DNA, 60 bp, Artificial
  Synthetic oligonucleotide
tccacaccaacagtacgcacaagtccacctaacagccctagcacaccacccacatcacaa

SEQ ID NO: 7022 - DNA, 60 bp, Artificial
  Synthetic oligonucleotide
caccaacagcacgcacaagtctacctgacagccctagcacaccacccacatcacaagata

SEQ ID NO: 7023 - DNA, 54 bp, Artificial
  Synthetic oligonucleotide
cacagtgtgtaagttgcagagttgcacacacggtgtgccaggtgatctacaggt

SEQ ID NO: 7024 - DNA, 53 bp, Artificial
  Synthetic oligonucleotide
tctgaggagaagctacgaaagaaatcttcattctatcagtcttatctcaggag

SEQ ID NO: 7025 - DNA, 54 bp, Artificial
  Synthetic oligonucleotide
cgctgcaatgtgttacggtgcaacaacagctaatctagtgagagggcaaaatac

SEQ ID NO: 7026 - DNA, 60 bp, Artificial
  Synthetic oligonucleotide
gacgtaaatcatgagggcatcttagcacctaagacatatgcttgtagagctacgtgttca

SEQ ID NO: 7027 - DNA, 55 bp, Artificial
  Synthetic oligonucleotide
gagggcatcttagcacctaagacatatgcttgtagagctacgtgttcaataagct

SEQ ID NO: 7028 - DNA, 59 bp, Artificial
  Synthetic oligonucleotide
gagatactgtacacagttatatcaagggcaatcccaggattggtcggtaatttactgcg

SEQ ID NO: 7029 - DNA, 60 bp, Artificial
  Synthetic oligonucleotide
atcgactgtataaagtatcccacaggccagcttatcacccatggaagagtgagtgcaaaa

SEQ ID NO: 7030 - DNA, 60 bp, Artificial
  Synthetic oligonucleotide
gattgtataaaatatcccacaggacagcttatcacccatggaagagtgagtgcaaaacat

SEQ ID NO: 7031 - DNA, 55 bp, Artificial
  Synthetic oligonucleotide
tcccacaggacagcttatcacccatggaagagtgagtgcaaaacataacgatgga

SEQ ID NO: 7032 - DNA, 60 bp, Artificial
  Synthetic oligonucleotide
aaggaagcagtgacggaagtgtgcctcaaagatgacgtaagcatgataaaaactgaggcc

SEQ ID NO: 7033 - DNA, 60 bp, Artificial
  Synthetic oligonucleotide
cacatcagataggatgaaactccatagagcatcaggtctttgccctgggtacaaaagtct

SEQ ID NO: 7034 - DNA, 60 bp, Artificial
  Synthetic oligonucleotide
caatgtacatgcggacagtacgaagatgcatccggactcttggtgcaccgaaaaacatac

SEQ ID NO: 7035 - DNA, 60 bp, Artificial
  Synthetic oligonucleotide
gagcttacaatacacacaactatagaggccagttgtccagttactagtccttgcactttg

SEQ ID NO: 7036 - DNA, 55 bp, Artificial
  Synthetic oligonucleotide
ggtcctcctcataaaaagcgggtggggatagttcggtgtgagagacgaagagatg

SEQ ID NO: 7037 - DNA, 55 bp, Artificial
  Synthetic oligonucleotide
tagcccatgtccaacaatatgtatctgcgggatggtttataattctagtgaagcc

SEQ ID NO: 7038 - DNA, 60 bp, Artificial
  Synthetic oligonucleotide
cagggactttctctaacaacgtagcaatcaggaaatggattgtctcggattggcatgatt

SEQ ID NO: 7039 - DNA, 60 bp, Artificial
  Synthetic oligonucleotide
tgtggactagtgtatcatccgttcacagaatgtgggacgcattgtgtatgcggtgcccgc

SEQ ID NO: 7040 - DNA, 50 bp, Artificial
  Synthetic oligonucleotide
tcatgcgattttgacttatacaccacgccaatgacccaaaaaagctatac

SEQ ID NO: 7041 - DNA, 55 bp, Artificial
  Synthetic oligonucleotide
ctttaacataagttccccaacatgccttgtcaataaagtgcagaaattccggggc

SEQ ID NO: 7042 - DNA, 60 bp, Artificial
  Synthetic oligonucleotide
gattagtttggtgtgtgcttttaacatgtgagcttattgtctgggcagctagtgcggaaa

SEQ ID NO: 7043 - DNA, 58 bp, Artificial
  Synthetic oligonucleotide
agggcttgttgcatcggctccacaccttgagagggtcacagggttcaatcagattgac

SEQ ID NO: 7044 - DNA, 51 bp, Artificial
  Synthetic oligonucleotide
agaagaacaacactggcttatttgcacataacaaagttttacgaaactgga

SEQ ID NO: 7045 - DNA, 50 bp, Artificial
  Synthetic oligonucleotide
tggagtggattcagcatatataactgctagtatgccagctttaagcggaa

SEQ ID NO: 7046 - DNA, 54 bp, Artificial
  Synthetic oligonucleotide
tacagaccaactgatgttaaccctaaagagcttcctgtataatccgaaaaccca

SEQ ID NO: 7047 - DNA, 53 bp, Artificial
  Synthetic oligonucleotide
aagcaatttatgagcaataagacagggtatgtaatcaagcccataagatcata

SEQ ID NO: 7048 - DNA, 50 bp, Artificial
  Synthetic oligonucleotide
gaatccccagcattaaaccattataccatacatgggacaactatcaagaa

SEQ ID NO: 7049 - DNA, 50 bp, Artificial
  Synthetic oligonucleotide
atgcaatgttcggagtaaggaaagaagccaagattgctggtgttgcatga

SEQ ID NO: 7050 - DNA, 60 bp, Artificial
  Synthetic oligonucleotide
tagctcagttgcccaaatatcctgggccaaatctggcttctcacctgcagctagagcttt

SEQ ID NO: 7051 - DNA, 57 bp, Artificial
  Synthetic oligonucleotide
actcccgaaagcagtctatgagcttaagatggaatgtccacataccgttggtctagg

SEQ ID NO: 7052 - DNA, 51 bp, Artificial
  Synthetic oligonucleotide
ataaagtaatctcactaagatatactcgtaaagtgtgcatacagctgggta

SEQ ID NO: 7053 - DNA, 55 bp, Artificial
  Synthetic oligonucleotide
gacgcaaatgactgccttgttaccccgtctgtaaaagtctgcatgatcgggacag

SEQ ID NO: 7054 - DNA, 60 bp, Artificial
  Synthetic oligonucleotide
tgacccagaggcagcatacgctaactttaagcgtgtccacaccactgggcttagttacga

SEQ ID NO: 7055 - DNA, 56 bp, Artificial
  Synthetic oligonucleotide
tacaagtatatgactaatgtaggactaatcatgtatctcctataagcggaacatta

SEQ ID NO: 7056 - DNA, 60 bp, Artificial
  Synthetic oligonucleotide
gtacagaacagcaatctgtggactctatcctgcacagatcaaagccagacaaatgattag

SEQ ID NO: 7057 - DNA, 51 bp, Artificial
  Synthetic oligonucleotide
cttaggcagaaatcaaaaagagggtcaggaaacacgcagttgcactgccag

SEQ ID NO: 7058 - DNA, 50 bp, Artificial
  Synthetic oligonucleotide
gaacagtccatggcacgaaagcagcggaaactctagacaaggtgatggtg

SEQ ID NO: 7059 - DNA, 52 bp, Artificial
  Synthetic oligonucleotide
ggtcaaacccttggtaagcaaactcattgacccaggcattaatggtagttga

SEQ ID NO: 7060 - DNA, 55 bp, Artificial
  Synthetic oligonucleotide
tggtgccagacctgtcatgctagacaagagaggcagaggacctccaatgcagagc

SEQ ID NO: 7061 - DNA, 53 bp, Artificial
  Synthetic oligonucleotide
ggtcaatggcatccgaaagcccaagcacttgtatgtgtccatgccaacagcac

SEQ ID NO: 7062 - DNA, 59 bp, Artificial
  Synthetic oligonucleotide
gccttctaccagtcatacttgagaaggacacaatctatggggattcaactggaccagaa

SEQ ID NO: 7063 - DNA, 53 bp, Artificial
  Synthetic oligonucleotide
gttataagtctctaagcaaagctagacagatgtgtaaatcgaaaagctggtcc

SEQ ID NO: 7064 - DNA, 55 bp, Artificial
  Synthetic oligonucleotide
cagtatattgcttgttccaatggaggtgttaagctataccagcgaccaaacaaac

SEQ ID NO: 7065 - DNA, 53 bp, Artificial
  Synthetic oligonucleotide
cctcgttctatcagtcttatctgaggcgcacccaatctatgggaatacaactg

SEQ ID NO: 7066 - DNA, 60 bp, Artificial
  Synthetic oligonucleotide
ccaacaggacagactgcagattggctgagcattgttgtttaccttacatccttcgtggtt

SEQ ID NO: 7067 - DNA, 58 bp, Artificial
  Synthetic oligonucleotide
actgcagattggctgagcattgttgtttaccttacatccttcgtggttccaatactcc

SEQ ID NO: 7068 - DNA, 54 bp, Artificial
  Synthetic oligonucleotide
tctatgcatcggctctggtggaagcaaccaagttctgtgcacccatatatgaat

SEQ ID NO: 7069 - DNA, 60 bp, Artificial
  Synthetic oligonucleotide
caatccagtactgaccggtctatatattgtttgctagacagccattgtctagaggagttt

SEQ ID NO: 7070 - DNA, 57 bp, Artificial
  Synthetic oligonucleotide
tggggatgcgaagagtttggttgcctggctgtaagtgatgggtgcgtgttcgggtca

SEQ ID NO: 7071 - DNA, 60 bp, Artificial
  Synthetic oligonucleotide
tctaaagatcttcatagtgccaccatccatgagtttatagctgctaatctataccccaac

SEQ ID NO: 7072 - DNA, 53 bp, Artificial
  Synthetic oligonucleotide
ataatgcccatggggtagggtctgtaccgatgcatactgacttagagctcgac

SEQ ID NO: 7073 - DNA, 60 bp, Artificial
  Synthetic oligonucleotide
ttactcacagtttcattgtcaccggttcaatcagcacccgttggtcatggtaagacaatc

SEQ ID NO: 7074 - DNA, 55 bp, Artificial
  Synthetic oligonucleotide
ttgtcactagacacgttaaagtatgcataattggcacagtctctaaattttccca

SEQ ID NO: 7075 - DNA, 55 bp, Artificial
  Synthetic oligonucleotide
gacatgatgatcgtagaagttgttatatgctttgaccgtatgcaactcaaggtgc

SEQ ID NO: 7076 - DNA, 60 bp, Artificial
  Synthetic oligonucleotide
ctgcgaagtgggggtccaagcactcaaaaagtgtgatggccaactcagcaccgcacatga

SEQ ID NO: 7077 - DNA, 50 bp, Artificial
  Synthetic oligonucleotide
tacaaccatagataggatatcagaattggacattaagacttgtctacgat

SEQ ID NO: 7078 - DNA, 58 bp, Artificial
  Synthetic oligonucleotide
agtccagtcctcgatgattcattcacacttcatagagtaagtggttacctggcaaggt

SEQ ID NO: 7079 - DNA, 53 bp, Artificial
  Synthetic oligonucleotide
agcaggaagagacttcttgcgccaattcggaattggcatatagtggaattcac

SEQ ID NO: 7080 - DNA, 52 bp, Artificial
  Synthetic oligonucleotide
ggtcctacataagacggcacaaccaagtgtcgatcttacttttggtggggtc

SEQ ID NO: 7081 - DNA, 60 bp, Artificial
  Synthetic oligonucleotide
actgccacaagtacgccaagcacagacaacacgaattccaccacacatgtgaccgacaac

SEQ ID NO: 7082 - DNA, 55 bp, Artificial
  Synthetic oligonucleotide
cgccaagcacagacaacacgaattccaccacacatgtgaccgacaacaaccctac

SEQ ID NO: 7083 - DNA, 51 bp, Artificial
  Synthetic oligonucleotide
tgtactatatgtgagacagctcctgtcaatgcaatagacgctgaaatgcat

SEQ ID NO: 7084 - DNA, 51 bp, Artificial
  Synthetic oligonucleotide
tccagatgagttgaacaagagtgcattaactaaccgagagggcgttgcagt

SEQ ID NO: 7085 - DNA, 56 bp, Artificial
  Synthetic oligonucleotide
agctctgcttactctgaccttaactttgactgcgtgccgccactatatctttgaga

SEQ ID NO: 7086 - DNA, 60 bp, Artificial
  Synthetic oligonucleotide
ttcagcataatgagcaatgcacggggtcttgtcccagcagtatacctaaaaaggataatt

SEQ ID NO: 7087 - DNA, 60 bp, Artificial
  Synthetic oligonucleotide
cggattcgattcaaagatgatagctccttcgaggatgtcaatggcattcggaagcccaaa

SEQ ID NO: 7088 - DNA, 60 bp, Artificial
  Synthetic oligonucleotide
ctgttatgatctagcctgtaacagtacattctgtaagccaactgtttacatgattgttcc

SEQ ID NO: 7089 - DNA, 60 bp, Artificial
  Synthetic oligonucleotide
tataggtacagacttgctcttagtgtgatggatgagctaaggaccttgttcccagaactg

SEQ ID NO: 7090 - DNA, 55 bp, Artificial
  Synthetic oligonucleotide
ttgctcttagtgtgatggatgagctaaggaccttgttcccagaactgtcatccac

SEQ ID NO: 7091 - DNA, 53 bp, Artificial
  Synthetic oligonucleotide
gcttgctccaacgggggtgtcaagttataccagcgaccaaacaagcctctagc

SEQ ID NO: 7092 - DNA, 52 bp, Artificial
  Synthetic oligonucleotide
ggtggagcctggagaccatctgaaagagaggtcaatgctcagttatggtaat

SEQ ID NO: 7093 - DNA, 55 bp, Artificial
  Synthetic oligonucleotide
cattccgatggggtccaggttgcttcaactcacgagttgattctcagacctgccc

SEQ ID NO: 7094 - DNA, 60 bp, Artificial
  Synthetic oligonucleotide
atgtaccaacacttgatgatttcaggtcaatggaggcattctcagggatctttaggtcac

SEQ ID NO: 7095 - DNA, 55 bp, Artificial
  Synthetic oligonucleotide
catcaccggggatagaaccgtctctgagtggccaaaagccacctgtactggagac

SEQ ID NO: 7096 - DNA, 60 bp, Artificial
  Synthetic oligonucleotide
gtcaatttgtcattgggcctgtgagggtggtagtctctgacccccagaatgttcagacta

SEQ ID NO: 7097 - DNA, 58 bp, Artificial
  Synthetic oligonucleotide
cctgggaaggatgtgatctagattactactgcactacgggtagttggccgagctgcac

SEQ ID NO: 7098 - DNA, 50 bp, Artificial
  Synthetic oligonucleotide
gaccatagccagctagagcatgtctaccgatatgttaaccctttgtgtaa

SEQ ID NO: 7099 - DNA, 60 bp, Artificial
  Synthetic oligonucleotide
cagcgatacatccactgacacacaaagcgttgcttctgaagtgtcagacaggaggtccta

SEQ ID NO: 7100 - DNA, 55 bp, Artificial
  Synthetic oligonucleotide
ggggctgttatagaacattaggggtattcagatacaagagcaggtgttatgtagg

SEQ ID NO: 7101 - DNA, 58 bp, Artificial
  Synthetic oligonucleotide
tcagcatatgtcttgtgttagatttctacatagaacaatattgccaggatctattgct

SEQ ID NO: 7102 - DNA, 60 bp, Artificial
  Synthetic oligonucleotide
gtgtggcactcattgtgtatgcggtgcaagatatgatacatctgataggatgaaactgca

SEQ ID NO: 7103 - DNA, 54 bp, Artificial
  Synthetic oligonucleotide
caactgttgctcaaccaatatcggaataggatattgcactgccgtgaacctgag

SEQ ID NO: 7104 - DNA, 60 bp, Artificial
  Synthetic oligonucleotide
ccaacgcatagtatcctctccaggcttgttcctcatgacaagctgcctattattcaacgg

SEQ ID NO: 7105 - DNA, 55 bp, Artificial
  Synthetic oligonucleotide
gatcacggaaacgatacttctattctatattacccacccaagtaattgaggacca

SEQ ID NO: 7106 - DNA, 60 bp, Artificial
  Synthetic oligonucleotide
ctactgacccgactgggattgaacctgatgatcacctcaaggagagatcaagccttaggt

SEQ ID NO: 7107 - DNA, 58 bp, Artificial
  Synthetic oligonucleotide
cctaagaggaaattatcaagagtgtgatgtcggatttggtgttttatgatgtcgcatc

SEQ ID NO: 7108 - DNA, 60 bp, Artificial
  Synthetic oligonucleotide
caacgctatggcaccctcacagcagataagtggatgtcacagaaggttgcagcaattgct

SEQ ID NO: 7109 - DNA, 55 bp, Artificial
  Synthetic oligonucleotide
attccctatggaacaatcacaggactcatacccgttggatggcattccaaactta

SEQ ID NO: 7110 - DNA, 60 bp, Artificial
  Synthetic oligonucleotide
gagttagcttatgccattcaactttgtcctttatgctaagataacattcctcagcatgat

SEQ ID NO: 7111 - DNA, 53 bp, Artificial
  Synthetic oligonucleotide
tctatttactctgacctaaaccttaactgcgtgccgccactatatctttgaga

SEQ ID NO: 7112 - DNA, 56 bp, Artificial
  Synthetic oligonucleotide
aagcactacgtatattacattagaccaaacttgcgagcacttgaaagtatcttgcg

SEQ ID NO: 7113 - DNA, 52 bp, Artificial
  Synthetic oligonucleotide
cttgtgtcaggttcctgcatagaaccatactacctggttccatggctaactc

SEQ ID NO: 7114 - DNA, 60 bp, Artificial
  Synthetic oligonucleotide
aaaagtgtcagctatgcggcctagtgtatcatccatttactgagtgcggcacccactgtg

SEQ ID NO: 7115 - DNA, 52 bp, Artificial
  Synthetic oligonucleotide
ctgtgggctctaccctgcacagattaaggcacggcagatgatcagtccagtt

SEQ ID NO: 7116 - DNA, 60 bp, Artificial
  Synthetic oligonucleotide
atcgaatctatcagaactcatcatgcgcaacttaccgctgaatatgcaatgttgactaga

SEQ ID NO: 7117 - DNA, 60 bp, Artificial
  Synthetic oligonucleotide
acatcattcgtggtcccgatcatcttgaaggcactgtacatgttaacaacaagaggtagg

SEQ ID NO: 7118 - DNA, 60 bp, Artificial
  Synthetic oligonucleotide
aatcagtcagtctgtgataacaatgcactccctttaatctggaggggcctaattgattta

SEQ ID NO: 7119 - DNA, 60 bp, Artificial
  Synthetic oligonucleotide
ctcttaggatgatgctatgcattgggggacctctacctcttttgtccagcattaaaggcc

SEQ ID NO: 7120 - DNA, 51 bp, Artificial
  Synthetic oligonucleotide
ggggacctctacctcttttgtccagcattaaaggccttgcaccgatcatct

SEQ ID NO: 7121 - DNA, 53 bp, Artificial
  Synthetic oligonucleotide
agagagtcaaggccccatgtcgcctgcgagcacagcagtgcccctcacaccgg

SEQ ID NO: 7122 - DNA, 53 bp, Artificial
  Synthetic oligonucleotide
gaactggaaagctcgggggaagggcacacctcccttttagccaccacacaagg

SEQ ID NO: 7123 - DNA, 60 bp, Artificial
  Synthetic oligonucleotide
agtgtgcgttgagctcaatagccaagaaaggcagtgcagcttgattgaggcaggcacaag

SEQ ID NO: 7124 - DNA, 56 bp, Artificial
  Synthetic oligonucleotide
aaagctagaccaacttacggtgcgggtgaaatcactgtactagtggaggttgctga

SEQ ID NO: 7125 - DNA, 60 bp, Artificial
  Synthetic oligonucleotide
ctcaaaaggatgacggcagtatgttgactaatactattgcttacgctggtctcattaacc

SEQ ID NO: 7126 - DNA, 60 bp, Artificial
  Synthetic oligonucleotide
ctcgagagatacccataatctcgcactcagtgggtcctcttcacagagtttcagttgact

SEQ ID NO: 7127 - DNA, 60 bp, Artificial
  Synthetic oligonucleotide
ttacctagcaagatgggcactctacctaatttgccctagcccagactcgagcataggtct

SEQ ID NO: 7128 - DNA, 55 bp, Artificial
  Synthetic oligonucleotide
gggcactctacctaatttgccctagcccagactcgagcataggtctcgtacgggc

SEQ ID NO: 7129 - DNA, 60 bp, Artificial
  Synthetic oligonucleotide
tgagtaaattcggaatcaggttagcgtaaattatataattgcgatactcagagctccgca

SEQ ID NO: 7130 - DNA, 60 bp, Artificial
  Synthetic oligonucleotide
cttctgtgctaaacatggggaatcaattaaccttgctgcagttaggatcttcttcctcaa

SEQ ID NO: 7131 - DNA, 50 bp, Artificial
  Synthetic oligonucleotide
aatgaatattacaatcgcatacattattgcactgacaagtgcagtgcttg

SEQ ID NO: 7132 - DNA, 56 bp, Artificial
  Synthetic oligonucleotide
cccaatgagtgagatatgcatcagagatgacatctccctaattaaatcaatcggct

SEQ ID NO: 7133 - DNA, 55 bp, Artificial
  Synthetic oligonucleotide
gtaagttaagtgtaacgtccaatgggatataccaatgtccagttgcatcaagctg

SEQ ID NO: 7134 - DNA, 60 bp, Artificial
  Synthetic oligonucleotide
gtgacaagactagttgctaaaacattctctaagatgaccagagacacccatctgatgata

SEQ ID NO: 7135 - DNA, 53 bp, Artificial
  Synthetic oligonucleotide
accagtgtgacacaagaattggctgtttggaggtgttaaaagtacatccagag

SEQ ID NO: 7136 - DNA, 54 bp, Artificial
  Synthetic oligonucleotide
aggcccatgtacccatacctttaggaggtgatggctcaatgtctattatggagc

SEQ ID NO: 7137 - DNA, 52 bp, Artificial
  Synthetic oligonucleotide
catgttgtaccaaggtatcatagtatagatgtacaaggtacagaatcaacag

SEQ ID NO: 7138 - DNA, 60 bp, Artificial
  Synthetic oligonucleotide
atgtcacaactaactgtcagagcagcccatgggacctgagtattccaataagacagtggg

SEQ ID NO: 7139 - DNA, 52 bp, Artificial
  Synthetic oligonucleotide
ctccacaatgattatacagaagtttccgggagaatcctgaattaccagatag

SEQ ID NO: 7140 - DNA, 60 bp, Artificial
  Synthetic oligonucleotide
gatgatggacctaatagtgacaatgattccacatttgcagttaaccatccacctagattt

SEQ ID NO: 7141 - DNA, 52 bp, Artificial
  Synthetic oligonucleotide
cacacactaaactgctcagatagagtctcttccaccatgtggactagtatgt

SEQ ID NO: 7142 - DNA, 56 bp, Artificial
  Synthetic oligonucleotide
ctgagactctagacaatgtaatggtgtctctaccaggattcccttctctaagctga

SEQ ID NO: 7143 - DNA, 54 bp, Artificial
  Synthetic oligonucleotide
ctacaatgaaggcagaggaacttacacctgggcgatttcggacaatagtatgtg

SEQ ID NO: 7144 - DNA, 60 bp, Artificial
  Synthetic oligonucleotide
ggggaggatctacacggcacaaagttccacacagtctgcaacagaaggactgattacact

SEQ ID NO: 7145 - DNA, 60 bp, Artificial
  Synthetic oligonucleotide
atcacacgtggaggccaagtgctactttcggtgccctaactctgagagtcagctaactat

SEQ ID NO: 7146 - DNA, 50 bp, Artificial
  Synthetic oligonucleotide
gggggaaactctgcacctatatatgtgccaacacttgatgactttagatc

SEQ ID NO: 7147 - DNA, 60 bp, Artificial
  Synthetic oligonucleotide
ttggacctgccaatgcaaaagtacctcatagtgccagttcagacacattgagtctgactg

SEQ ID NO: 7148 - DNA, 51 bp, Artificial
  Synthetic oligonucleotide
acccttaaaccctgtatggaatgacaacgcccatggagtaggttctgtacc

SEQ ID NO: 7149 - DNA, 60 bp, Artificial
  Synthetic oligonucleotide
ctatatgtttccatgcctactgctcaatcaaccatgaaggctgaagaactgacccctggg

SEQ ID NO: 7150 - DNA, 56 bp, Artificial
  Synthetic oligonucleotide
cctaaatatgacctctgaagacatctcacagcttttgatcgagattaagcgattgt

SEQ ID NO: 7151 - DNA, 60 bp, Artificial
  Synthetic oligonucleotide
gattattcctctctattgcaggcatttagcaaactgttgcacagaatcttcgcatataag

SEQ ID NO: 7152 - DNA, 50 bp, Artificial
  Synthetic oligonucleotide
gatggatgaattcttaatgaacatccgggatacctgcttagaaggtttgg

SEQ ID NO: 7153 - DNA, 60 bp, Artificial
  Synthetic oligonucleotide
tccttacttaccgtcaactattagctctgatcagtgtgatacaagaattggctgtctaga

SEQ ID NO: 7154 - DNA, 50 bp, Artificial
  Synthetic oligonucleotide
tgtatgtgagtgctgatgccacaaagtggtctcctggagacaactcagca

SEQ ID NO: 7155 - DNA, 55 bp, Artificial
  Synthetic oligonucleotide
tagtagagggtaatgtggagggtacagctgagtcaatttgcagctattggcttag

SEQ ID NO: 7156 - DNA, 51 bp, Artificial
  Synthetic oligonucleotide
cggttacctagcacgatgggcattgtaccttatcgcccctagtccatattc

SEQ ID NO: 7157 - DNA, 51 bp, Artificial
  Synthetic oligonucleotide
agttcgtggcccagttcggaatcaagttagcgtaatatcattgagcacagt

SEQ ID NO: 7158 - DNA, 60 bp, Artificial
  Synthetic oligonucleotide
ctcatgcaccatcgtcctagttacgaggttcgcttgcgattctctgatttctacaatgtc

SEQ ID NO: 7159 - DNA, 55 bp, Artificial
  Synthetic oligonucleotide
catcgttctagtcacgaggttcgcttgcgattctctgatttctacaatgtcggag

SEQ ID NO: 7160 - DNA, 58 bp, Artificial
  Synthetic oligonucleotide
ccatactcggtgaggccagtagaagggtcacttgctctataggatctaatcactgttc

SEQ ID NO: 7161 - DNA, 60 bp, Artificial
  Synthetic oligonucleotide
tgtgcctgaactatgcactcatccaagctatgtgaatcccccattctcagaatgtaagac

SEQ ID NO: 7162 - DNA, 60 bp, Artificial
  Synthetic oligonucleotide
gcacgtcagtacgtaagtgttaactttgagtgagtggcttgagcattttggattcagcat

SEQ ID NO: 7163 - DNA, 60 bp, Artificial
  Synthetic oligonucleotide
tcaccgtctctgtcatggacttgtcacagatgtattcccccgtctttgagtacctgtcag

SEQ ID NO: 7164 - DNA, 51 bp, Artificial
  Synthetic oligonucleotide
caggggaggtatctgcagtagagtgcctggatctattagatcggttttacg

SEQ ID NO: 7165 - DNA, 60 bp, Artificial
  Synthetic oligonucleotide
acgaggcgactacattgtggactgtgtgactggattataccagtcagacattggagtcgg

SEQ ID NO: 7166 - DNA, 60 bp, Artificial
  Synthetic oligonucleotide
aatgtgttggctacgagagagtcttagtagatagggaggttaagcagccattgcttgtac

SEQ ID NO: 7167 - DNA, 55 bp, Artificial
  Synthetic oligonucleotide
attcaagacaactctattgctaactctgataatggtgacaggaggaaatgcctgc

SEQ ID NO: 7168 - DNA, 60 bp, Artificial
  Synthetic oligonucleotide
aagcagtcagggtattctcatgttctgactgggtgcacagagtttcctttgaggtcaaag

SEQ ID NO: 7169 - DNA, 56 bp, Artificial
  Synthetic oligonucleotide
ggatctgagcctaagctgatagtgattaagggaacattagtttacatgggtgtcta

SEQ ID NO: 7170 - DNA, 54 bp, Artificial
  Synthetic oligonucleotide
ctagtggaggcaaccaagttttgtgcacctatatacgagtgtgcatgggtcagc

SEQ ID NO: 7171 - DNA, 56 bp, Artificial
  Synthetic oligonucleotide
ggttccaatactcctaaaggccctttatatgctgacaacaagagggagacagacaa

SEQ ID NO: 7172 - DNA, 50 bp, Artificial
  Synthetic oligonucleotide
agtccagtcatgagtgtgatagggtttcttgccttggcaaaggattggag

SEQ ID NO: 7173 - DNA, 56 bp, Artificial
  Synthetic oligonucleotide
atgtggctgacatcgataagttgattgactatgctgcctctggtgaccctacatcg

SEQ ID NO: 7174 - DNA, 52 bp, Artificial
  Synthetic oligonucleotide
aggtacacttaagagggttgtaaggttatgcacatgggtatggagtgattta

SEQ ID NO: 7175 - DNA, 60 bp, Artificial
  Synthetic oligonucleotide
gcagaaaacaatacatgatgatttccaggattgtgatatgggtctgccccactataccaa

SEQ ID NO: 7176 - DNA, 51 bp, Artificial
  Synthetic oligonucleotide
ccaatcatatctcaggcggacacaatcaatggggatacaactggatcagag

SEQ ID NO: 7177 - DNA, 60 bp, Artificial
  Synthetic oligonucleotide
tcaggccgctcggggatagctcttgtcgcaacaggtcttgccaagcttgcagagactgag

SEQ ID NO: 7178 - DNA, 60 bp, Artificial
  Synthetic oligonucleotide
tgtacacagtcatatcaagggcaatcccaggactggtcggtaatttactgcgacaagttc

SEQ ID NO: 7179 - DNA, 55 bp, Artificial
  Synthetic oligonucleotide
caagggcaatcccaggactggtcggtaatttactgcgacaagttctaaagtctca

SEQ ID NO: 7180 - DNA, 60 bp, Artificial
  Synthetic oligonucleotide
cacaaagtgtgacaagactgccatcccgcttacttggacagggatgattgacttgcctgg

SEQ ID NO: 7181 - DNA, 55 bp, Artificial
  Synthetic oligonucleotide
ctgccatcccgcttacttggacagggatgattgacttgcctggatactacgaagc

SEQ ID NO: 7182 - DNA, 55 bp, Artificial
  Synthetic oligonucleotide
caattaaggcgtgtgacaaagccatatgctatggtgcagaaagtgtgacattaac

SEQ ID NO: 7183 - DNA, 60 bp, Artificial
  Synthetic oligonucleotide
caaccctggctacacaatggggtcatttgagcttatacaggcagtgactgaatttgccag

SEQ ID NO: 7184 - DNA, 55 bp, Artificial
  Synthetic oligonucleotide
cccggacacggggtatgtggcgtttatcagtaagtatgggcaacatctcaacttc

SEQ ID NO: 7185 - DNA, 60 bp, Artificial
  Synthetic oligonucleotide
atgtctaccgtcaaaacaacagcagtggaattcttctcaaactatgggatatcctgtgac

SEQ ID NO: 7186 - DNA, 55 bp, Artificial
  Synthetic oligonucleotide
aacagcagtggaattcttctcaaactatgggatatcctgtgactctcgttctagc

SEQ ID NO: 7187 - DNA, 58 bp, Artificial
  Synthetic oligonucleotide
gcctgtcatctttagaatggcaggactaggtgatccagaagtagaggttggctactta

SEQ ID NO: 7188 - DNA, 60 bp, Artificial
  Synthetic oligonucleotide
aaatgaactcacaacaacactcttgggttgtcctcgcatattcctgttgatgaccctaga

SEQ ID NO: 7189 - DNA, 55 bp, Artificial
  Synthetic oligonucleotide
ctcttgggttgtcctcgcatattcctgttgatgaccctagagaactgcagcaggt

SEQ ID NO: 7190 - DNA, 50 bp, Artificial
  Synthetic oligonucleotide
actgctcaggaggccgtcagcactatttggaggtgaacatcgttgatatc

SEQ ID NO: 7191 - DNA, 60 bp, Artificial
  Synthetic oligonucleotide
ggtcaattggtagagggattgtgttttatacctactcatacaatagcactgacacaacca

SEQ ID NO: 7192 - DNA, 57 bp, Artificial
  Synthetic oligonucleotide
catcatcatcctcatacagctatagaaggaagctcgtaaaccctgccaatacagagg

SEQ ID NO: 7193 - DNA, 51 bp, Artificial
  Synthetic oligonucleotide
ttgaccatatagactcaccatcatcaatttgggtcttcgcaggagcacccg

SEQ ID NO: 7194 - DNA, 55 bp, Artificial
  Synthetic oligonucleotide
gaccccggaaggttgatgtgactaagggtttggctaggatgaattgcgaggattc

SEQ ID NO: 7195 - DNA, 60 bp, Artificial
  Synthetic oligonucleotide
gacgggtctatattagtcaactcattagtccattcggatgataaccaaacatcgataaca

SEQ ID NO: 7196 - DNA, 60 bp, Artificial
  Synthetic oligonucleotide
aagcatggttgtccacccagtctagcatgggtgtccatagcaataagtcattggatgacc

SEQ ID NO: 7197 - DNA, 55 bp, Artificial
  Synthetic oligonucleotide
tccacccagtctagcatgggtgtccatagcaataagtcattggatgacctctctg

SEQ ID NO: 7198 - DNA, 55 bp, Artificial
  Synthetic oligonucleotide
ttcatcctatgaggaagtcaatggaatacgtaagccaagacacctgtatgtttct

SEQ ID NO: 7199 - DNA, 60 bp, Artificial
  Synthetic oligonucleotide
cttaggagcatcatctagccgtttcacaaactggggttcagttagcctctcactggacgc

SEQ ID NO: 7200 - DNA, 56 bp, Artificial
  Synthetic oligonucleotide
gggcccatggaaggaggtggtataatctttaaacactggtgtacatctacctgtca

SEQ ID NO: 7201 - DNA, 58 bp, Artificial
  Synthetic oligonucleotide
ggttgtgaagaatggggttgcttagcaataggcacggggtgtgtatatgggtcttgcc

SEQ ID NO: 7202 - DNA, 59 bp, Artificial
  Synthetic oligonucleotide
tagtagtagactccttgagaagctactactgcgaaagctggaatgagcaccctccaaga

SEQ ID NO: 7203 - DNA, 55 bp, Artificial
  Synthetic oligonucleotide
cagaagcaaaatagcatctagtggactacttccttcagggtggtgtttggatgaa

SEQ ID NO: 7204 - DNA, 60 bp, Artificial
  Synthetic oligonucleotide
agaggattcatatcgtagccgtaagtcaataatctgctatgatctttcatgcaatagtac

SEQ ID NO: 7205 - DNA, 60 bp, Artificial
  Synthetic oligonucleotide
ccatcttgtcggggaatgtcatgtgaataggtgtctgtcttggagggacaatgaaacttc

SEQ ID NO: 7206 - DNA, 50 bp, Artificial
  Synthetic oligonucleotide
tgtgatgttataccaacaaaacaaatccgaagggctaaagttgccagaac

SEQ ID NO: 7207 - DNA, 51 bp, Artificial
  Synthetic oligonucleotide
ggacggggtttaccgagaattgggtttagacatatcattaccagacgtgat

SEQ ID NO: 7208 - DNA, 60 bp, Artificial
  Synthetic oligonucleotide
actctattgttggacctgccaatgcaaaagtgcctcacagtgctagctcagacacattaa

SEQ ID NO: 7209 - DNA, 60 bp, Artificial
  Synthetic oligonucleotide
gagtgtcccactttcttgacatcaattaaggcttgcgataaagccatttgttatggtgca

SEQ ID NO: 7210 - DNA, 55 bp, Artificial
  Synthetic oligonucleotide
tacgacaacatacgaatcttctacattaaaggacgcgagattaaaactagtctcg

SEQ ID NO: 7211 - DNA, 55 bp, Artificial
  Synthetic oligonucleotide
gtgttaactttgagtgtgcattaagggcaacttgtaggcaacacgatgttctgcc

SEQ ID NO: 7212 - DNA, 60 bp, Artificial
  Synthetic oligonucleotide
ggtagcaatgttatgctggctgtctgtaagcgtatgtgctttaaggcgactgttgaagca

SEQ ID NO: 7213 - DNA, 60 bp, Artificial
  Synthetic oligonucleotide
aacagctcagtgacttcgccgcagagtctctctcaggcgtgccatgtgtcatcgcaacag

SEQ ID NO: 7214 - DNA, 50 bp, Artificial
  Synthetic oligonucleotide
aagccgaatccaagttatttatgagaagacatactgtgttacaggtcaac

SEQ ID NO: 7215 - DNA, 60 bp, Artificial
  Synthetic oligonucleotide
ggagctgtagaataaaagacacaggaacctgcgatgtattaggcaatgaatggactatag

SEQ ID NO: 7216 - DNA, 53 bp, Artificial
  Synthetic oligonucleotide
attgtgagttcacaattcatagcacagtggaaaccagttgtcaaattgaaagc

SEQ ID NO: 7217 - DNA, 59 bp, Artificial
  Synthetic oligonucleotide
gatgtaaatgccattgacatcgaagaaccaagtggtcagacagcagattggtatactat

SEQ ID NO: 7218 - DNA, 56 bp, Artificial
  Synthetic oligonucleotide
caactacattgacgggatgactcaggaggatgccacatgtaaacctgtgacatatg

SEQ ID NO: 7219 - DNA, 60 bp, Artificial
  Synthetic oligonucleotide
tactactgcaactgctgggttaacacggaatctttatgagttgaagatagaatgtccaca

SEQ ID NO: 7220 - DNA, 60 bp, Artificial
  Synthetic oligonucleotide
tactacttccacggctggattaacacggaatctttatgagttgaagatagaatgcccgca

SEQ ID NO: 7221 - DNA, 55 bp, Artificial
  Synthetic oligonucleotide
ctgggttaacacggaatctttatgagttgaagatagaatgtccacatactgtggg

SEQ ID NO: 7222 - DNA, 60 bp, Artificial
  Synthetic oligonucleotide
ataattgtctatctaacatcattcgtggtcccgatcatcttgaaggcactgtacatgtta

SEQ ID NO: 7223 - DNA, 60 bp, Artificial
  Synthetic oligonucleotide
ctggatgttaactcaatcgatttggaagaaccgagtggacagactgctgattggaaggct

SEQ ID NO: 7224 - DNA, 55 bp, Artificial
  Synthetic oligonucleotide
caatcgatttggaagaaccgagtggacagactgctgattggaaggctataggagc

SEQ ID NO: 7225 - DNA, 52 bp, Artificial
  Synthetic oligonucleotide
aggacaattgcttgtggcctctttccagcacaggtcaaagctcgaaatataa

SEQ ID NO: 7226 - DNA, 60 bp, Artificial
  Synthetic oligonucleotide
gtgtaacacaattagataccctatcagtccgcgacatatcaactcatgtaaatggcaaat

SEQ ID NO: 7227 - DNA, 55 bp, Artificial
  Synthetic oligonucleotide
ccctatcagtccgcgacatatcaactcatgtaaatggcaaatctcacattctaca

SEQ ID NO: 7228 - DNA, 58 bp, Artificial
  Synthetic oligonucleotide
tgcatgctttaatcaacatatgtcatgtgttagatttttacatcgtactatattacta

SEQ ID NO: 7229 - DNA, 60 bp, Artificial
  Synthetic oligonucleotide
atatggttccaaacactactatataccagtccaacattgagaggagccattactgtatag

SEQ ID NO: 7230 - DNA, 60 bp, Artificial
  Synthetic oligonucleotide
gtctagctgtaagtgatggttgtgtctttggttcatgtcaagacatcataaaagaggaac

SEQ ID NO: 7231 - DNA, 58 bp, Artificial
  Synthetic oligonucleotide
gtcctgttagagctttcgtggatacagaattcattgggcaatagatcgcctctcatgc

SEQ ID NO: 7232 - DNA, 60 bp, Artificial
  Synthetic oligonucleotide
atcatggattggaatttcatccctatgctcaagctgtcgcaatcttcagacatcaaacta

SEQ ID NO: 7233 - DNA, 50 bp, Artificial
  Synthetic oligonucleotide
gaaggagtcaatgatagcattgttgtagttcatctcctccattattagat

SEQ ID NO: 7234 - DNA, 50 bp, Artificial
  Synthetic oligonucleotide
ggcaggcgtgactccagaaaccttcccgacggtgtcacagttcctcttcg

SEQ ID NO: 7235 - DNA, 60 bp, Artificial
  Synthetic oligonucleotide
acaaaccgctgactggaaggctattggagcatacatactgggttttgcaattccgatcat

SEQ ID NO: 7236 - DNA, 60 bp, Artificial
  Synthetic oligonucleotide
tatatgcaccctgctgtgttgacagccggtagaatcagtgagatgggtgtctgctttgga

SEQ ID NO: 7237 - DNA, 60 bp, Artificial
  Synthetic oligonucleotide
taagtgaatttgatggacaagtcattgctaatatacttgccagtgaattgagttctgtaa

SEQ ID NO: 7238 - DNA, 55 bp, Artificial
  Synthetic oligonucleotide
gatggacaagtcattgctaatatacttgccagtgaactaagttctgtgaagcgag

SEQ ID NO: 7239 - DNA, 60 bp, Artificial
  Synthetic oligonucleotide
ccctctgcaaggctagtgggactgtgattatgaagctagggcctataggctcagagtcct

SEQ ID NO: 7240 - DNA, 59 bp, Artificial
  Synthetic oligonucleotide
gtggatgacatctaagttggatgcagtcaaggctgcatttagctcagttgcccagatat

SEQ ID NO: 7241 - DNA, 51 bp, Artificial
  Synthetic oligonucleotide
atgtacagggttcgcaggtggagcatggaccctaactgtttggagaaagcg

SEQ ID NO: 7242 - DNA, 53 bp, Artificial
  Synthetic oligonucleotide
atgtcgggagatctagttttttatgatgtcgactccgtcaattccaatgcgtt

SEQ ID NO: 7243 - DNA, 55 bp, Artificial
  Synthetic oligonucleotide
gataagactagaggcttggccagaatgagtagtgatgagtcatatagattctttc

SEQ ID NO: 7244 - DNA, 55 bp, Artificial
  Synthetic oligonucleotide
aatctggaggggcctaattgacttaacgggatactatgaggcagtccacccttgc

SEQ ID NO: 7245 - DNA, 53 bp, Artificial
  Synthetic oligonucleotide
cacctgataggtgcccccctacctgcctgtttattgcaggcatggcagagtta

SEQ ID NO: 7246 - DNA, 50 bp, Artificial
  Synthetic oligonucleotide
tggctcggtgcaccctgcaaattcatggcggagtctcttattgccgggag

SEQ ID NO: 7247 - DNA, 50 bp, Artificial
  Synthetic oligonucleotide
gacggggtgggaatgtaccttgccttcttgccgggtgctgagatgtttat

SEQ ID NO: 7248 - DNA, 57 bp, Artificial
  Synthetic oligonucleotide
gccaactgcccagtccacaatgaaagcagacgagttaacaccaggtcggtttaggac

SEQ ID NO: 7249 - DNA, 60 bp, Artificial
  Synthetic oligonucleotide
tgcgtttcagaacctacaagcacaatgtgcaatactatcaatgtacttgaaccagtattg

SEQ ID NO: 7250 - DNA, 55 bp, Artificial
  Synthetic oligonucleotide
cctacaagcacaatgtgcaatactatcaatgtacttgaaccagtattgggagaac

SEQ ID NO: 7251 - DNA, 60 bp, Artificial
  Synthetic oligonucleotide
gtcttggacgcctgtgattcaagctgtgagataatgataccaaagggcactggagacatc

SEQ ID NO: 7252 - DNA, 60 bp, Artificial
  Synthetic oligonucleotide
ccttcaaacctactgtgtccgctgcgaacatagctcttagttggagctcagtggaacaca

SEQ ID NO: 7253 - DNA, 54 bp, Artificial
  Synthetic oligonucleotide
tgaaggagttctctcctggtacactaactgcagtagagtgtatagactacctag

SEQ ID NO: 7254 - DNA, 57 bp, Artificial
  Synthetic oligonucleotide
ctactggaaaagtttctcagatcaggcggtgtacagtttagaagctgttgcactagc

SEQ ID NO: 7255 - DNA, 53 bp, Artificial
  Synthetic oligonucleotide
cccaattctcagacaattcaggatacagtcagacaacatggagagtgtactta

SEQ ID NO: 7256 - DNA, 50 bp, Artificial
  Synthetic oligonucleotide
ttgttagggagatccgagacagagattattttttgcgtagtcgactcagc

SEQ ID NO: 7257 - DNA, 60 bp, Artificial
  Synthetic oligonucleotide
gcgataagctccaattaagatcaaccctcacaaactccgcatctctctgtgatagagtgc

SEQ ID NO: 7258 - DNA, 56 bp, Artificial
  Synthetic oligonucleotide
ctaactcctggtcgaatgagtgagatgggtgcatgcttcggggttattcctgttgc

SEQ ID NO: 7259 - DNA, 60 bp, Artificial
  Synthetic oligonucleotide
gacatgcatagagtgctaaaggacggaatggatgtcaactttatgagaaaagtcctccgt

SEQ ID NO: 7260 - DNA, 51 bp, Artificial
  Synthetic oligonucleotide
ttgggaagaaccttactttagccagactaggaacataagcctaaagggtat

SEQ ID NO: 7261 - DNA, 60 bp, Artificial
  Synthetic oligonucleotide
ttcaagagacaacttgccgatttggtatcaagtcagaagatgggtgaaaagcctgtggac

SEQ ID NO: 7262 - DNA, 60 bp, Artificial
  Synthetic oligonucleotide
taatatttaaacactggtgcacatctacatgccagtttggagacccaggagatattatga

SEQ ID NO: 7263 - DNA, 60 bp, Artificial
  Synthetic oligonucleotide
ttccactgcctgactacggactcacgttgcatcgcatatcaggttacttggccagatggg

SEQ ID NO: 7264 - DNA, 56 bp, Artificial
  Synthetic oligonucleotide
aatcctgatagccagcccaagaagtccactccatgtcctttagggttgacaacagt

SEQ ID NO: 7265 - DNA, 60 bp, Artificial
  Synthetic oligonucleotide
tcacccatcagatggcatcgtcgagaacttaggcacaccggggtgtataatgaggtccaa

SEQ ID NO: 7266 - DNA, 60 bp, Artificial
  Synthetic oligonucleotide
aatcacaccagtgagtgccagaatagtagcaactactgttgacagaaggatcgctgatgc

SEQ ID NO: 7267 - DNA, 55 bp, Artificial
  Synthetic oligonucleotide
gccagaatagtagcaactactgttgacagaaggatcgctgatgctacgctatggc

SEQ ID NO: 7268 - DNA, 57 bp, Artificial
  Synthetic oligonucleotide
tgtggccagcagagatgtgagtaccacagtcgctagagttgtggacacattaggagc

SEQ ID NO: 7269 - DNA, 60 bp, Artificial
  Synthetic oligonucleotide
agcggagtttgcgtcacaggatcgcagagtccttccaccgagattacactcaagtatcca

SEQ ID NO: 7270 - DNA, 50 bp, Artificial
  Synthetic oligonucleotide
aaaacccatctaaggaagcagtgacagaggtgtgcttaaaggatgacgtg

SEQ ID NO: 7271 - DNA, 55 bp, Artificial
  Synthetic oligonucleotide
caaacttgcgaacaccttaaagtttcctgcggcccaaaatctgtacagttccatg

SEQ ID NO: 7272 - DNA, 51 bp, Artificial
  Synthetic oligonucleotide
ccccacaccgacagtccaaacaagtccacctagcactcccgacgcatctac

SEQ ID NO: 7273 - DNA, 55 bp, Artificial
  Synthetic oligonucleotide
tattcgactcttcaaaacaggcgaatgtaaaatagcaggggcattatctagaatt

SEQ ID NO: 7274 - DNA, 55 bp, Artificial
  Synthetic oligonucleotide
ggtttaaagatgactcatcctttgaagaggtcaacggaatccggaaaccaaagca

SEQ ID NO: 7275 - DNA, 50 bp, Artificial
  Synthetic oligonucleotide
tatacagatgcactagagagacgtgatccagctagcatagtgggttccaa

SEQ ID NO: 7276 - DNA, 60 bp, Artificial
  Synthetic oligonucleotide
acatggtggcacactgccctgcgaaggactcctgtgaggttagcagctgcctattctgtg

SEQ ID NO: 7277 - DNA, 55 bp, Artificial
  Synthetic oligonucleotide
cctgcgaaggactcctgtgaggttagcagctgcctattctgtgtgcacggactgc

SEQ ID NO: 7278 - DNA, 60 bp, Artificial
  Synthetic oligonucleotide
gggagctaaggatcttgttaagagattgttctactggctaatgacacccctgtgctggct

SEQ ID NO: 7279 - DNA, 60 bp, Artificial
  Synthetic oligonucleotide
ctggcgggttccaggagtctgagattctagcatcagattagttaaagtctccaagatagc

SEQ ID NO: 7280 - DNA, 55 bp, Artificial
  Synthetic oligonucleotide
aacatggggaatcaattaaccttgctgcagttaggatcttcttcctcaatgccgc

SEQ ID NO: 7281 - DNA, 60 bp, Artificial
  Synthetic oligonucleotide
ctccagacagctcgtgctctcaacacaaccagcaacctcaagcccagtgacctctccagc

SEQ ID NO: 7282 - DNA, 55 bp, Artificial
  Synthetic oligonucleotide
cagccaatacatgtttgactacccggcaattaacattgatgtgaggtgtcataga

SEQ ID NO: 7283 - DNA, 58 bp, Artificial
  Synthetic oligonucleotide
accttccaaggcatggcaagtgacctctctagatttgatcttacaagcttctctagga

SEQ ID NO: 7284 - DNA, 55 bp, Artificial
  Synthetic oligonucleotide
agatttaagcctgcctacggctccgaattggagtcggctattgttcgagtcttct

SEQ ID NO: 7285 - DNA, 55 bp, Artificial
  Synthetic oligonucleotide
tgcctgactacggacttaccatacaccggttgtcaggttacctggccagatgggc

SEQ ID NO: 7286 - DNA, 60 bp, Artificial
  Synthetic oligonucleotide
gctacatcagttctgttaagcctatggtgtacaccttccaaggcatggcaagtgacctct

SEQ ID NO: 7287 - DNA, 60 bp, Artificial
  Synthetic oligonucleotide
gaaagcactcagctggccactaggtatccccgactgtgagatcttcagcatatgcagtga

SEQ ID NO: 7288 - DNA, 60 bp, Artificial
  Synthetic oligonucleotide
gttacaatatatgcccttattgtgcatcaagattgacctccgatgggctagctaggcatg

SEQ ID NO: 7289 - DNA, 51 bp, Artificial
  Synthetic oligonucleotide
tccaagggcgtctaactcagggcttcagttaatcaatgtcactcaacattc

SEQ ID NO: 7290 - DNA, 60 bp, Artificial
  Synthetic oligonucleotide
tgacactacctgcaagtctagaacaggcaatgcgtaaaggattggtcgaaggtgtggtca

SEQ ID NO: 7291 - DNA, 59 bp, Artificial
  Synthetic oligonucleotide
gccaccactgcacagaccatcgtagcatcctgcatgtgctggttcactgctactaacac

SEQ ID NO: 7292 - DNA, 51 bp, Artificial
  Synthetic oligonucleotide
ctagttatgacacttgtcctaactgcacatctaatgatattcccgacgacg

SEQ ID NO: 7293 - DNA, 60 bp, Artificial
  Synthetic oligonucleotide
aacagctaacatcgttactggttgtggccgaggctatgctaccccaacgatctagatcat

SEQ ID NO: 7294 - DNA, 55 bp, Artificial
  Synthetic oligonucleotide
cgttactggttgtggccgaggctatgctaccccaacgatctagatcatcaatccc

SEQ ID NO: 7295 - DNA, 58 bp, Artificial
  Synthetic oligonucleotide
tccaaagggcttggggggacaaagatatttccaacactgcattcatcacaactggcac

SEQ ID NO: 7296 - DNA, 52 bp, Artificial
  Synthetic oligonucleotide
gagcccatcttacctccgttcgtcatcgaaggaacccaccactactacgcca

SEQ ID NO: 7297 - DNA, 55 bp, Artificial
  Synthetic oligonucleotide
gcaggagagttcacacagttccgtttctcaaggaagatacggccagatctaacag

SEQ ID NO: 7298 - DNA, 57 bp, Artificial
  Synthetic oligonucleotide
agcccccacatcgagcgccactactttaaaatctggtgggttcatgcctgttcctat

SEQ ID NO: 7299 - DNA, 57 bp, Artificial
  Synthetic oligonucleotide
actcgacttggtctggcggtatcgatgtcaggttcaccgtctctggttcaggagtgt

SEQ ID NO: 7300 - DNA, 52 bp, Artificial
  Synthetic oligonucleotide
gcttatgtccctggtgacagagcggccccacttggctaccccgatttttctg

SEQ ID NO: 7301 - DNA, 52 bp, Artificial
  Synthetic oligonucleotide
gacaacaggccgaacacttaaacaataatggctggtgccctttttggagcaa

SEQ ID NO: 7302 - DNA, 60 bp, Artificial
  Synthetic oligonucleotide
tccaaaatttatggtccaggccactaaccgaagatgcagatgaggccactatgaaagagg

SEQ ID NO: 7303 - DNA, 60 bp, Artificial
  Synthetic oligonucleotide
cccgagtcaaaggtgggccatctctgcaacaagttatgcgagaccaactgaagccattca

SEQ ID NO: 7304 - DNA, 59 bp, Artificial
  Synthetic oligonucleotide
ctaatggtgaatttacagtctctccccgtaatgcccctggtgaagtgctattgaatcta

SEQ ID NO: 7305 - DNA, 57 bp, Artificial
  Synthetic oligonucleotide
agcacaaacctctcccaatcaacggtctctagggccacatctaggactggtgagtgg

SEQ ID NO: 7306 - DNA, 60 bp, Artificial
  Synthetic oligonucleotide
tgacctaacctttcctcttacctcgaccttcatgggagtgcagctagcacgtgtcaagct

SEQ ID NO: 7307 - DNA, 55 bp, Artificial
  Synthetic oligonucleotide
ggaaagccctcgctacccagcgcgtggctcccgtttgcatcattcttactggtcc

SEQ ID NO: 7308 - DNA, 60 bp, Artificial
  Synthetic oligonucleotide
cgtcacagttcactctgtatacgatatggcttgggctctgaaccgccacttgtcattaac

SEQ ID NO: 7309 - DNA, 60 bp, Artificial
  Synthetic oligonucleotide
actgagtggaaacacgaggtctacaacacttccgcagggaagatgtgtggatcaatcgct

SEQ ID NO: 7310 - DNA, 60 bp, Artificial
  Synthetic oligonucleotide
ccatgtgtcaccagcacacgtggatgattaccatgaatgttcacatcagcccgcaaacct

SEQ ID NO: 7311 - DNA, 60 bp, Artificial
  Synthetic oligonucleotide
ggtgttcacaagccagcagccgctatttgcctagcgaccattgagttgaccccgatttcc

SEQ ID NO: 7312 - DNA, 60 bp, Artificial
  Synthetic oligonucleotide
caccacggaaaaggttgggcgtatgctgtcatccgctgcttcaactctgcgtgcctgtaa

SEQ ID NO: 7313 - DNA, 60 bp, Artificial
  Synthetic oligonucleotide
gtggtctggagttttacgtgcccagacatgaagccatgttccgctggatgcggttctcag

SEQ ID NO: 7314 - DNA, 55 bp, Artificial
  Synthetic oligonucleotide
taacgatcatgttaggggtgtggtggccggactgtggtgtaagcatttgcaccgt

SEQ ID NO: 7315 - DNA, 59 bp, Artificial
  Synthetic oligonucleotide
agatacttttctctctgctggctacctccccgctgacgcggctagaggctctcttggcg

SEQ ID NO: 7316 - DNA, 60 bp, Artificial
  Synthetic oligonucleotide
gaggtggtcattcacgcaagcctgcgcgtccctcgacaagactacttccagtggccatcc

SEQ ID NO: 7317 - DNA, 52 bp, Artificial
  Synthetic oligonucleotide
tggatgggttggtaatatgaaagttagggtgctgctcgctggtaatgccttc

SEQ ID NO: 7318 - DNA, 60 bp, Artificial
  Synthetic oligonucleotide
aatatgctaactaatgctggcctatcctcctcagatgcggcacggttggtggttggtgct

SEQ ID NO: 7319 - DNA, 54 bp, Artificial
  Synthetic oligonucleotide
tcttctcaatcccctggcgacatcccacactggactcaccacaagattgcatcc

SEQ ID NO: 7320 - DNA, 60 bp, Artificial
  Synthetic oligonucleotide
gcgcgacaacacttgtcgctggaataaccgctatacagaaattggccgcaatgttttcag

SEQ ID NO: 7321 - DNA, 60 bp, Artificial
  Synthetic oligonucleotide
tcaagtttgttacacgcggcggcctaccatctgggatgccatttacatctgttgtcaatt

SEQ ID NO: 7322 - DNA, 53 bp, Artificial
  Synthetic oligonucleotide
gactttgtcatctcagttcaggaaggcctaccatcaggagtcccgtgcacgtc

SEQ ID NO: 7323 - DNA, 60 bp, Artificial
  Synthetic oligonucleotide
caggcgacgccataacaaatggtgtcgggtccctgatcaacgctggggccaatgcaatta

SEQ ID NO: 7324 - DNA, 55 bp, Artificial
  Synthetic oligonucleotide
tagaaacaatcattggcacgcaccggtcccctgtactaacataccaccaagcatg

SEQ ID NO: 7325 - DNA, 60 bp, Artificial
  Synthetic oligonucleotide
tcaggtgagcgcgtgatatgggggaacttggatcgacccatcatgcacgctggcactatg

SEQ ID NO: 7326 - DNA, 60 bp, Artificial
  Synthetic oligonucleotide
gttgcttactttgtgtgccctttctgaagtgacaggactaggccccgacatcatacaagc

SEQ ID NO: 7327 - DNA, 59 bp, Artificial
  Synthetic oligonucleotide
tggacatctgcgtttaacacgcgcagacagccgctgtttgcacaccttcgtagaagggg

SEQ ID NO: 7328 - DNA, 60 bp, Artificial
  Synthetic oligonucleotide
tgggcatgcttctgacaggatccaacgccaaaagtatggatctaggcaccacaccaggtg

SEQ ID NO: 7329 - DNA, 51 bp, Artificial
  Synthetic oligonucleotide
atgcgagatcagctcaagccctattcagaaccacgcggtctgctccccccc

SEQ ID NO: 7330 - DNA, 60 bp, Artificial
  Synthetic oligonucleotide
gtctggctgcccctgcactacacagttaaacagcttggcccattggattttgaccctctg

SEQ ID NO: 7331 - DNA, 55 bp, Artificial
  Synthetic oligonucleotide
tatgcgcctggtctgcatgctgtatacaccactccgcacgaacagtccgggtgat

SEQ ID NO: 7332 - DNA, 60 bp, Artificial
  Synthetic oligonucleotide
caatcctaagaaatctgatgtctgcacttgacaacgtgatatcatgctgcacacggcgca

SEQ ID NO: 7333 - DNA, 55 bp, Artificial
  Synthetic oligonucleotide
cgtgcaagtgacgtggaacatcttcgactcgatggatctgttcacgtacggtgat

SEQ ID NO: 7334 - DNA, 60 bp, Artificial
  Synthetic oligonucleotide
agcactcgtggaagtgtactcaaatctgtttgacgacttgcgcaaatcatcggttgccat

SEQ ID NO: 7335 - DNA, 54 bp, Artificial
  Synthetic oligonucleotide
aattgacccgagacctctccatcaatggtccagctgcccgggtgcaatcagcac

SEQ ID NO: 7336 - DNA, 60 bp, Artificial
  Synthetic oligonucleotide
ccttcctagccaactatggggtggccatagccgggttgactctttccatagctgcattca

SEQ ID NO: 7337 - DNA, 60 bp, Artificial
  Synthetic oligonucleotide
gtgtgccaaacactcaagactcgtcccacagctttggtcgagggcgttgcagtacccaca

SEQ ID NO: 7338 - DNA, 60 bp, Artificial
  Synthetic oligonucleotide
catcaaacccatctgtcaaccgagtctatgacgtgcagtcccgcacacgcgggtggagct

SEQ ID NO: 7339 - DNA, 55 bp, Artificial
  Synthetic oligonucleotide
ttctgggttagcggccatgtgttcatcaccgccaagcacgtggcgccacccaagg

SEQ ID NO: 7340 - DNA, 52 bp, Artificial
  Synthetic oligonucleotide
tgggtctgcctatgtccccggtgatagggcggctcccctcgggtatcccgac

SEQ ID NO: 7341 - DNA, 50 bp, Artificial
  Synthetic oligonucleotide
gatccgcctatgtccctggtgatagggcggctcccctcgggtatcccgac

SEQ ID NO: 7342 - DNA, 60 bp, Artificial
  Synthetic oligonucleotide
tctaccattactctgtctacattggcaacggtcaggtgatgggtgtcaacaatcctggcg

SEQ ID NO: 7343 - DNA, 50 bp, Artificial
  Synthetic oligonucleotide
tcaagagggcctctggcgagatgcttgctctggcagttaggatgggttca

SEQ ID NO: 7344 - DNA, 60 bp, Artificial
  Synthetic oligonucleotide
gtaaccttcagcatgattgagcaggacggatccgcctatgtccctggtgacagggcggct

SEQ ID NO: 7345 - DNA, 55 bp, Artificial
  Synthetic oligonucleotide
gagtcttgcgacttcacttttgaagtccacctcctccgacagtgctacctcaggg

SEQ ID NO: 7346 - DNA, 60 bp, Artificial
  Synthetic oligonucleotide
tgccatatttgtggcgcgctctggtctcccctcgggcatgcctttcactagtgtcatcaa

SEQ ID NO: 7347 - DNA, 60 bp, Artificial
  Synthetic oligonucleotide
gattcgccgtgatggttatatggtgacatctggcactattggcactcggcaggagcttga

SEQ ID NO: 7348 - DNA, 55 bp, Artificial
  Synthetic oligonucleotide
tggtgacatctggcactattggcactcggcaggagcttgatcccgacaccacttt

SEQ ID NO: 7349 - DNA, 60 bp, Artificial
  Synthetic oligonucleotide
ctagttatgacgtctgtcctaactgcacatctaccgacatccccgatgatggatcgtcaa

SEQ ID NO: 7350 - DNA, 60 bp, Artificial
  Synthetic oligonucleotide
ttggatcagtcactgatgtgtgtggggaacacaagggatactgcatccatatgggtcacg

SEQ ID NO: 7351 - DNA, 60 bp, Artificial
  Synthetic oligonucleotide
ttgggaacctttctgcatatggtctgaaacccactcgtgttgataagtctgttggagcaa

SEQ ID NO: 7352 - DNA, 60 bp, Artificial
  Synthetic oligonucleotide
ccaggagtgacaacacaattacaccatccaatgtgatagaccccaccaagattgctgtgt

SEQ ID NO: 7353 - DNA, 60 bp, Artificial
  Synthetic oligonucleotide
ggattggaacatcgacccccaggagcctttcatcccatccaagctcaggatggtctctga

SEQ ID NO: 7354 - DNA, 60 bp, Artificial
  Synthetic oligonucleotide
atcttggcactatccccggggactgtggctgtccttatgtgtacaagagaggcaatgatt

SEQ ID NO: 7355 - DNA, 60 bp, Artificial
  Synthetic oligonucleotide
agccatctcaaacctgcagtacatgctgtagttaggagtggcaccaacccctgctgtgaa

SEQ ID NO: 7356 - DNA, 60 bp, Artificial
  Synthetic oligonucleotide
ctccgcgttctacatgctcaaccatgacacatcatgcggtccctacatcggtggacgcaa

SEQ ID NO: 7357 - DNA, 55 bp, Artificial
  Synthetic oligonucleotide
gggagtgcagctagcgcgtgtcaagctagcgtctaaggtcagagtgaacaggacg

SEQ ID NO: 7358 - DNA, 51 bp, Artificial
  Synthetic oligonucleotide
atctaaggtgcgccagaattaggtactatgtcaagtgtgtccaggaggccc

SEQ ID NO: 7359 - DNA, 60 bp, Artificial
  Synthetic oligonucleotide
atcatgatgaccccaatgagacaatgatcccacactctcagaggcccatacaactgatgt

SEQ ID NO: 7360 - DNA, 60 bp, Artificial
  Synthetic oligonucleotide
gtacactcccctcaagcagccttctcaataacgaggatcaccatacagcccatatcagct

SEQ ID NO: 7361 - DNA, 60 bp, Artificial
  Synthetic oligonucleotide
ggataattactctctgtgcactgtctgaggccactggtttatcacctgatgtggtgcaat

SEQ ID NO: 7362 - DNA, 60 bp, Artificial
  Synthetic oligonucleotide
ctgatggtttcctcacttgtgtccccaatggggctagctcgggtccacaacagctgccga

SEQ ID NO: 7363 - DNA, 60 bp, Artificial
  Synthetic oligonucleotide
agagtgtctgctcccgagtcctctgctaccacattgagatccggtggcttcatgtcagtt

SEQ ID NO: 7364 - DNA, 60 bp, Artificial
  Synthetic oligonucleotide
cagagccacacttagcccagatagttgcagaagaccttctatcccccagcgtgatggacg

SEQ ID NO: 7365 - DNA, 50 bp, Artificial
  Synthetic oligonucleotide
gcaggcagcctctcttcgcacacattcgtaagcgaggggagtcacgggtg

SEQ ID NO: 7366 - DNA, 55 bp, Artificial
  Synthetic oligonucleotide
cagtggacgcctatggaaccctggtcaggaccctcaccggggctgctaccttttc

SEQ ID NO: 7367 - DNA, 54 bp, Artificial
  Synthetic oligonucleotide
gtgctctgagcttgaatccaccttaaccaacaggtgcacactcccgtcgtacaa

SEQ ID NO: 7368 - DNA, 52 bp, Artificial
  Synthetic oligonucleotide
ccctcccaaaccagtgttgctctgattaggtatgtaaaccctgatacaggac

SEQ ID NO: 7369 - DNA, 60 bp, Artificial
  Synthetic oligonucleotide
gctggccctgggtccgccaatggcacacagtatggcgttggctcgcagccactgtcagta

SEQ ID NO: 7370 - DNA, 60 bp, Artificial
  Synthetic oligonucleotide
agggccgacgactgacgaaaatgtacatggcacggggggctgctctcatagaactggcag

SEQ ID NO: 7371 - DNA, 60 bp, Artificial
  Synthetic oligonucleotide
cttgaccgccccataatgcatgctggcacaatggaagggattcggaacaccaggcatctt

SEQ ID NO: 7372 - DNA, 54 bp, Artificial
  Synthetic oligonucleotide
aggagcccttgacaggttcgatacttgagatgtgggacggtgagatctaccatt

SEQ ID NO: 7373 - DNA, 60 bp, Artificial
  Synthetic oligonucleotide
caatgagacaatgattccacactctcagaggcccgtacaactaatgtcattgctggggga

SEQ ID NO: 7374 - DNA, 60 bp, Artificial
  Synthetic oligonucleotide
ctgcctgctaccacaggaatgggtgcaacacttttatcaggaggccgccccttcaatgag

SEQ ID NO: 7375 - DNA, 58 bp, Artificial
  Synthetic oligonucleotide
cacaggcccacaccaaatttcaaaacctcccagacatctagacctgctctcagtagtg

SEQ ID NO: 7376 - DNA, 51 bp, Artificial
  Synthetic oligonucleotide
atcatggtgcgcctctcccctgagccagacttagctcgggtggtgatggat

SEQ ID NO: 7377 - DNA, 51 bp, Artificial
  Synthetic oligonucleotide
ctggtttcttcaagccttatcagtcctggaacaagaagccactcccgacgg

SEQ ID NO: 7378 - DNA, 60 bp, Artificial
  Synthetic oligonucleotide
tcaaccacagaatggtagggtgacacttgatggagagctacagggcacaaccacactaca

SEQ ID NO: 7379 - DNA, 52 bp, Artificial
  Synthetic oligonucleotide
accaagagacccgatatcaacttcttgcgcaaagaggccggtcagagaagca

SEQ ID NO: 7380 - DNA, 60 bp, Artificial
  Synthetic oligonucleotide
cccgaactctctgcagcctacttcgaccacatgagggcactaggcttctgtccaactggc

SEQ ID NO: 7381 - DNA, 55 bp, Artificial
  Synthetic oligonucleotide
ctatgccccgggtgcgcaactcaatggccgctacactgccccaactacttcgacc

SEQ ID NO: 7382 - DNA, 60 bp, Artificial
  Synthetic oligonucleotide
ttgtccatgggcaatctggcatgttactcaccggggcaaatgctaagggcatggaccttg

SEQ ID NO: 7383 - DNA, 55 bp, Artificial
  Synthetic oligonucleotide
gagttaggggagcaggcggcacacgctaataacatgtatgagcaggctaaaagta

SEQ ID NO: 7384 - DNA, 50 bp, Artificial
  Synthetic oligonucleotide
gggcagttagaaaacacctcaaaggactcagcggtgtgaccaaggtggcc

SEQ ID NO: 7385 - DNA, 60 bp, Artificial
  Synthetic oligonucleotide
gcgcggggattgcgggacgccatatttcgacgcctgccgcagactggtgggtttgcacgc

SEQ ID NO: 7386 - DNA, 55 bp, Artificial
  Synthetic oligonucleotide
tcacgtgttgagaacgcttttgcgtggaaaggtctggcggtcatacgtggtcctg

SEQ ID NO: 7387 - DNA, 60 bp, Artificial
  Synthetic oligonucleotide
ttgcgtggaaaggtctggcggtcatacgtggtcctgattgcgggggcatgcccactggca

SEQ ID NO: 7388 - DNA, 56 bp, Artificial
  Synthetic oligonucleotide
ggtctggcggtcatacgtggtcctgattgcgggggcatgcccactggcactcgtta

SEQ ID NO: 7389 - DNA, 60 bp, Artificial
  Synthetic oligonucleotide
cctcaaccacactcattgacttgactgaactcattgacgtacgccctgtgggacccaggc

SEQ ID NO: 7390 - DNA, 60 bp, Artificial
  Synthetic oligonucleotide
cactattcattgggttcagatctgaggatgtggctaactcattctggtacatggctgcgg

SEQ ID NO: 7391 - DNA, 60 bp, Artificial
  Synthetic oligonucleotide
ccgtgtacgatatggcctgggctcttcggagacacctgaaatggactggacagtggcaac

SEQ ID NO: 7392 - DNA, 60 bp, Artificial
  Synthetic oligonucleotide
tagatatggttttgtttgcccgcaaagcgaagtagaaactgtgcggcgcctgctgaatgc

SEQ ID NO: 7393 - DNA, 60 bp, Artificial
  Synthetic oligonucleotide
caaatccttgaccgctattgttgtggattcactcaagccatactgtgacactgtcgaagg

SEQ ID NO: 7394 - DNA, 60 bp, Artificial
  Synthetic oligonucleotide
atggtgtggaagcgcggttcgatcagatcaatatgagtgatgcaaccgccctccactgtg

SEQ ID NO: 7395 - DNA, 60 bp, Artificial
  Synthetic oligonucleotide
ggatgcgactaatgggcatgctctacaccccacttcgcgccaattctggtgcggacccat

SEQ ID NO: 7396 - DNA, 60 bp, Artificial
  Synthetic oligonucleotide
ctcacaggggcaaacgcgaagaacatggatcttggcaccggtcctggtgactgcggttgc

SEQ ID NO: 7397 - DNA, 60 bp, Artificial
  Synthetic oligonucleotide
ccagtgggcatgggtgataacaattggaggcagtgggaattacctgattattctggcaga

SEQ ID NO: 7398 - DNA, 55 bp, Artificial
  Synthetic oligonucleotide
taactctgtgcgccctttctgaagtgactggcctgtcgccagacgttatccaatc

SEQ ID NO: 7399 - DNA, 55 bp, Artificial
  Synthetic oligonucleotide
ggctatcttccgccgctatccccatctgcgacctaaggaggataagcctgacgcg

SEQ ID NO: 7400 - DNA, 59 bp, Artificial
  Synthetic oligonucleotide
gatggcttttggcctgacctctgaaaccatcgggcgcaagcttgcttccaccaattcgg

SEQ ID NO: 7401 - DNA, 54 bp, Artificial
  Synthetic oligonucleotide
gatggccccttcatcttcgcaaggcacgccaattttaggtaccacatggatgct

SEQ ID NO: 7402 - DNA, 59 bp, Artificial
  Synthetic oligonucleotide
tgtactactctgcccgcttgcaccccgtcacaacacttgctgaaggcacctacgagact

SEQ ID NO: 7403 - DNA, 59 bp, Artificial
  Synthetic oligonucleotide
gtggggtcttgtactgcttggactatagcaaatgggactcaacacagcaccctgcggtc

SEQ ID NO: 7404 - DNA, 58 bp, Artificial
  Synthetic oligonucleotide
catggaccaaaatgtcaagtcatgggaggagcttgacaccacaaccaaggaagagatc

SEQ ID NO: 7405 - DNA, 60 bp, Artificial
  Synthetic oligonucleotide
aaatcactggttaataaccttatgtgccctctctgaagtgactggtctatcaccagatgt

SEQ ID NO: 7406 - DNA, 53 bp, Artificial
  Synthetic oligonucleotide
aaggcttggactgcggcgcatataatgggcccagctgtcatcggtgccatagc

SEQ ID NO: 7407 - DNA, 58 bp, Artificial
  Synthetic oligonucleotide
acactactcatcaaaaggtctactggagaactcatgcccctagcagctagaatgggga

SEQ ID NO: 7408 - DNA, 60 bp, Artificial
  Synthetic oligonucleotide
actactggttccctcatcgctcgagcatcagggctactccatgagaggttagatgagtac

SEQ ID NO: 7409 - DNA, 60 bp, Artificial
  Synthetic oligonucleotide
gtggacagatgggcatgctactcacagggtctaacgctaagagcatggatttgggcacaa

SEQ ID NO: 7410 - DNA, 60 bp, Artificial
  Synthetic oligonucleotide
cttgtagagtgctgactaggcctagccctgacttctcattcaatttccttgtgccaccca

SEQ ID NO: 7411 - DNA, 53 bp, Artificial
  Synthetic oligonucleotide
ttgctgtggaacttgtaccgatagtaatgggggggataggattggtgttgggg

SEQ ID NO: 7412 - DNA, 50 bp, Artificial
  Synthetic oligonucleotide
aaatcaggggagttctgccgcctgagattccctaaatcaatcagaactgc

SEQ ID NO: 7413 - DNA, 56 bp, Artificial
  Synthetic oligonucleotide
caggggacacgatgctgtggtccccacttacacagcccagtataccccaaaattgg

SEQ ID NO: 7414 - DNA, 60 bp, Artificial
  Synthetic oligonucleotide
ccattcaactccaaaatgtcctgattgagttggcgtggcatcagccccgggactttgatc

SEQ ID NO: 7415 - DNA, 60 bp, Artificial
  Synthetic oligonucleotide
atcggtcacagtgcagctcgagaccaggcccggccgtgattgggtcttcttttcactgct

SEQ ID NO: 7416 - DNA, 55 bp, Artificial
  Synthetic oligonucleotide
aggagtcgcacgcgatgccttgaaacttgctggggccgcgaaggccccaagaatc

SEQ ID NO: 7417 - DNA, 60 bp, Artificial
  Synthetic oligonucleotide
tgactggcacagtagtcgttcgcaccatctcacacccatggcgggacacacgttttagga

SEQ ID NO: 7418 - DNA, 55 bp, Artificial
  Synthetic oligonucleotide
acctagccaagaggattgctgcgtccctgggtgatgagacctctgttggcatcat

SEQ ID NO: 7419 - DNA, 60 bp, Artificial
  Synthetic oligonucleotide
attgggtgcaaagcaatggggtgcacctgtgtagaggaggccatgcatttacttaaggat

SEQ ID NO: 7420 - DNA, 60 bp, Artificial
  Synthetic oligonucleotide
ttgtgattggggtgcacgtggcggccactaggtctggtaacacagtcattgccgccactc

SEQ ID NO: 7421 - DNA, 60 bp, Artificial
  Synthetic oligonucleotide
ataagatcgttgtcgaggaggggctcccatccggctgcccttgcaccacacagctgaata

SEQ ID NO: 7422 - DNA, 60 bp, Artificial
  Synthetic oligonucleotide
tgaatagtctggcccactggatcttgaccctctgtgcaatggttgaagtcacccgggttg

SEQ ID NO: 7423 - DNA, 55 bp, Artificial
  Synthetic oligonucleotide
cgccctcccacaagagtttatctcgtggtttgcgagtaacgcattcacggtgcag

SEQ ID NO: 7424 - DNA, 54 bp, Artificial
  Synthetic oligonucleotide
ccatagcttcggacaataccatacgtgcgaagctagaagaggagtatggtgttg

SEQ ID NO: 7425 - DNA, 60 bp, Artificial
  Synthetic oligonucleotide
ggtctgattcgagattgcgcttagttgcaatgctgtatacacctcttagggcaaataatt

SEQ ID NO: 7426 - DNA, 55 bp, Artificial
  Synthetic oligonucleotide
gagattgcgcctaattgcaatgctgtatacacctcttagggcaaataattctggg

SEQ ID NO: 7427 - DNA, 60 bp, Artificial
  Synthetic oligonucleotide
actccatcatccaaattgcaggggccgcatttgtcaccacgcgcattgtcaagcgcatga

SEQ ID NO: 7428 - DNA, 60 bp, Artificial
  Synthetic oligonucleotide
caaccatgagaacacagtatcaggatgggtaataacactcactgctattatggaactcta

SEQ ID NO: 7429 - DNA, 60 bp, Artificial
  Synthetic oligonucleotide
tctgaaactccagtcaagccttcttctaagcgtgctggcgcattctaccggagggtcaca

SEQ ID NO: 7430 - DNA, 60 bp, Artificial
  Synthetic oligonucleotide
ctgcactttgatcctccatcttatagctcagctttggaacattacaacagccagttcaat

SEQ ID NO: 7431 - DNA, 60 bp, Artificial
  Synthetic oligonucleotide
tacactggaatcggtgaggaggcaattggattggacagagacaaagtggtacgcatcagc

SEQ ID NO: 7432 - DNA, 58 bp, Artificial
  Synthetic oligonucleotide
ctcaggatttatgaccgtgccggcaacaacggtagtgcgccgctgggactccggtggc

SEQ ID NO: 7433 - DNA, 60 bp, Artificial
  Synthetic oligonucleotide
ctcctgtggggttcagacctatcaaccatgatacggtgtgcacgagccttcggtgggcta

SEQ ID NO: 7434 - DNA, 60 bp, Artificial
  Synthetic oligonucleotide
cacacacgtgcgatcatacatagaaacaatcattggcacgcaccggtcccctgtactaac

SEQ ID NO: 7435 - DNA, 55 bp, Artificial
  Synthetic oligonucleotide
cacatgtgcgatcatacatagaaacaatcattggcacacaccggtctcctgtgct

SEQ ID NO: 7436 - DNA, 60 bp, Artificial
  Synthetic oligonucleotide
agtctggtgcactttggccccttcctactcatgatgcacaatgtttcatacctcgccacc

SEQ ID NO: 7437 - DNA, 54 bp, Artificial
  Synthetic oligonucleotide
tgaagccactcccattacaacgtcagctgtcgagttgctatcctcccctgctag

SEQ ID NO: 7438 - DNA, 60 bp, Artificial
  Synthetic oligonucleotide
atatgatgtgcttactgcccctgacaaggttcctgcaatgttgcgacactggatggatga

SEQ ID NO: 7439 - DNA, 60 bp, Artificial
  Synthetic oligonucleotide
tagttgactcactaaaaccatattgtgacaaggtagaagggccaccacatgacatcctgc

SEQ ID NO: 7440 - DNA, 55 bp, Artificial
  Synthetic oligonucleotide
cttgaggctcgtggtgtacctgtcacttggaatctcttctcgaccttcgacatga

SEQ ID NO: 7441 - DNA, 58 bp, Artificial
  Synthetic oligonucleotide
ttgcagatcaggcatccaaagccaacctcatgtatgaacaggctaaacatgtgcagcc

SEQ ID NO: 7442 - DNA, 57 bp, Artificial
  Synthetic oligonucleotide
gcctgcccctcttggcacaccagacttccaggccatgttatatggcgttgcaagcca

SEQ ID NO: 7443 - DNA, 60 bp, Artificial
  Synthetic oligonucleotide
gctcactactgtcaggcagccgggtgaagccaacacggcgttcagtgttcccccactcaa

SEQ ID NO: 7444 - DNA, 55 bp, Artificial
  Synthetic oligonucleotide
gccgctctatgcgcgctgaggcctgtccttcttgtgctagttatgacgtatgtcc

SEQ ID NO: 7445 - DNA, 60 bp, Artificial
  Synthetic oligonucleotide
cgtctgtgaggggtgtgacagtgtgtacataaagctccaggatgtaaagcgcaagatgcc

SEQ ID NO: 7446 - DNA, 55 bp, Artificial
  Synthetic oligonucleotide
caccacaccaccttgcaagtgctcaccaaccaggaaccacacccaccaaatttgc

SEQ ID NO: 7447 - DNA, 53 bp, Artificial
  Synthetic oligonucleotide
gcttgcccgaatgtccctcgggccaagtctgaacccttacacgcttcacttgt

SEQ ID NO: 7448 - DNA, 60 bp, Artificial
  Synthetic oligonucleotide
atacaaggcgcaataacaactatcctgcagatggctggatcggccatcgttataaatcgt

SEQ ID NO: 7449 - DNA, 50 bp, Artificial
  Synthetic oligonucleotide
gaatatggattgagacccacccggccagacaaatcagaaggacccattat

SEQ ID NO: 7450 - DNA, 59 bp, Artificial
  Synthetic oligonucleotide
ggttgggtgggcaacatgcgagtgcgtgttgtcttggctggtaatgctttcacggctgg

SEQ ID NO: 7451 - DNA, 60 bp, Artificial
  Synthetic oligonucleotide
cgggatccaacgccaagagcatggatttgggtaccacaccaggtgactgtggatgcccat

SEQ ID NO: 7452 - DNA, 60 bp, Artificial
  Synthetic oligonucleotide
accagaggtcaacaatgagaccatggcacttgaaccggtggctggggcttcaatagccgc

SEQ ID NO: 7453 - DNA, 60 bp, Artificial
  Synthetic oligonucleotide
gagtcactggactgcacacaggatctgcggggcccaaaactcctagcgcaaagctggttg

SEQ ID NO: 7454 - DNA, 51 bp, Artificial
  Synthetic oligonucleotide
ttgagaacaagggcatgaccttcacctcagaggccatagtcatcaccacta

SEQ ID NO: 7455 - DNA, 54 bp, Artificial
  Synthetic oligonucleotide
gtccatactccggcagctttactggactcgtgggcctaaccatgatgacccgag

SEQ ID NO: 7456 - DNA, 52 bp, Artificial
  Synthetic oligonucleotide
tctctaacttttgtggttgctagcgcgacgaccgttggagagcgcactgtga

SEQ ID NO: 7457 - DNA, 60 bp, Artificial
  Synthetic oligonucleotide
cggccccctcacaatcagatgtagcactgattaggtttacaaatccagacacaggacgtg

SEQ ID NO: 7458 - DNA, 60 bp, Artificial
  Synthetic oligonucleotide
tgtgtgtgttggtccagaagcctccagctcaataggttgcacggcacacgttcttactcc

SEQ ID NO: 7459 - DNA, 52 bp, Artificial
  Synthetic oligonucleotide
tacattacagtggccaatactggtagcagaccgattgtggtaccagctaatg

SEQ ID NO: 7460 - DNA, 60 bp, Artificial
  Synthetic oligonucleotide
tcggtgatggtgctcctgtctattactcggcgcgcctgcatcctgtgaccacgcttgcag

SEQ ID NO: 7461 - DNA, 59 bp, Artificial
  Synthetic oligonucleotide
gggattccactcaacacccggccgttacagctgcgtccttggcaatccttgagcggctg

SEQ ID NO: 7462 - DNA, 55 bp, Artificial
  Synthetic oligonucleotide
atcgctcgagcatcagggctactccatgagaggttagatgagtacgagctgcagg

SEQ ID NO: 7463 - DNA, 60 bp, Artificial
  Synthetic oligonucleotide
tgcaagtctctatgccagtcaacatgggaggaatctatacccgcaagattgtcccactcc

SEQ ID NO: 7464 - DNA, 59 bp, Artificial
  Synthetic oligonucleotide
gggcaactacaacttgcctcctgactctctcgctgtctacagaatcactgattctgctt

SEQ ID NO: 7465 - DNA, 60 bp, Artificial
  Synthetic oligonucleotide
cgcactatacgtgctgaggcttgcccttcttgtgctagttacgacgtatgtcctaactgc

SEQ ID NO: 7466 - DNA, 60 bp, Artificial
  Synthetic oligonucleotide
tagggcaaggatgaatgctaccttcactgtgtgtgttggacccgagacctcgcactcgat

SEQ ID NO: 7467 - DNA, 57 bp, Artificial
  Synthetic oligonucleotide
acagagttcaaaagatgcttatcgaccacctttcaggctttgtccctatgaacattt

SEQ ID NO: 7468 - DNA, 51 bp, Artificial
  Synthetic oligonucleotide
aattggctctccagcgcattggcttggaccgccaagccttaaacaaccaag

SEQ ID NO: 7469 - DNA, 60 bp, Artificial
  Synthetic oligonucleotide
aaccctgagtgcaccttgatacgtctcccgctgttggacgtgctgttttacacatgttca

SEQ ID NO: 7470 - DNA, 60 bp, Artificial
  Synthetic oligonucleotide
gtaatccagagagcgactatgtggagcggtacaatgcgtgggccaacctccgacaactga

SEQ ID NO: 7471 - DNA, 54 bp, Artificial
  Synthetic oligonucleotide
atacagaacgccgtgtggaggagtgctgcgtggggtcctgagtacttccaacac

SEQ ID NO: 7472 - DNA, 60 bp, Artificial
  Synthetic oligonucleotide
ccagggagtacagctatccacacttgttggacatgataaagaacgaacaccctgatgctt

SEQ ID NO: 7473 - DNA, 60 bp, Artificial
  Synthetic oligonucleotide
gagaaacgaggtcatccgcaccagagctaggcaggcaccaaaggggcgcaagacccttga

SEQ ID NO: 7474 - DNA, 56 bp, Artificial
  Synthetic oligonucleotide
agtgacttcttgtgcctggactactcaaagtgggactcgacaatgtcaccgtgtgt

SEQ ID NO: 7475 - DNA, 54 bp, Artificial
  Synthetic oligonucleotide
gtcctgggctgatgacgaccgtcaggttgactatggtgagaagatcagttttga

SEQ ID NO: 7476 - DNA, 55 bp, Artificial
  Synthetic oligonucleotide
cctctggcacctatgcgggtctccccatcgctgattacggcgatgccccgccttt

SEQ ID NO: 7477 - DNA, 60 bp, Artificial
  Synthetic oligonucleotide
ccacctactctctactgttatctgaggacacttctgacgaactctgccccgatgatttgg

SEQ ID NO: 7478 - DNA, 60 bp, Artificial
  Synthetic oligonucleotide
acatacttctaggcaactatctcttaaccactaccttctatcacctgactcatttgctgt

SEQ ID NO: 7479 - DNA, 60 bp, Artificial
  Synthetic oligonucleotide
ttcttgagtcgtgtggcggtgcgcgcatctgggcacttggtaacaatgttatcagggctg

SEQ ID NO: 7480 - DNA, 55 bp, Artificial
  Synthetic oligonucleotide
gggctattgtgttcacatgggtcacggggtctacgcctcagtagcacacgtggtt

SEQ ID NO: 7481 - DNA, 60 bp, Artificial
  Synthetic oligonucleotide
gagtggccaccgactacattgttcccggcataccagatggatggcccgacacaacaatcc

SEQ ID NO: 7482 - DNA, 60 bp, Artificial
  Synthetic oligonucleotide
gagagccatcctgaaacgtgctggtgacatcatggtgcgcctctcccctgagccagactt

SEQ ID NO: 7483 - DNA, 60 bp, Artificial
  Synthetic oligonucleotide
atgaggggggctcacaacatatcgtttgtcaccccaccatctagcagatcctctagccag

SEQ ID NO: 7484 - DNA, 60 bp, Artificial
  Synthetic oligonucleotide
catgttgatgggaccctgcttggcaccactccgatctctggttcgtgggtgtcctgcttt

SEQ ID NO: 7485 - DNA, 55 bp, Artificial
  Synthetic oligonucleotide
ttagaggaaatcttacatgattcctgtgcggccgagttggcagacccggccacac

SEQ ID NO: 7486 - DNA, 53 bp, Artificial
  Synthetic oligonucleotide
ggctaccctctggcattccgatgaccagcatactcaactgtgtggcacactgg

SEQ ID NO: 7487 - DNA, 60 bp, Artificial
  Synthetic oligonucleotide
caggggctgcgtttgtcaccacgcgcattgtcaagcgcatgaacatacaggatctatggt

SEQ ID NO: 7488 - DNA, 60 bp, Artificial
  Synthetic oligonucleotide
gcaaggccccacatacgactttgacgctgaccggatttcagccttcactagtctagctcg

SEQ ID NO: 7489 - DNA, 55 bp, Artificial
  Synthetic oligonucleotide
agtcaggttaaagcgttgttcacaggtttccgatcagaggacgtggcaaactcgt

SEQ ID NO: 7490 - DNA, 58 bp, Artificial
  Synthetic oligonucleotide
attttgaagagtgctcacaccaacctgcttcgctgggcagtggcgacccgcggtgccc

SEQ ID NO: 7491 - DNA, 60 bp, Artificial
  Synthetic oligonucleotide
tgctccccctggctgttcgtatgggggccattgcttcaatgaagatacaggggcgactag

SEQ ID NO: 7492 - DNA, 60 bp, Artificial
  Synthetic oligonucleotide
agcgacgcaatcacggcaaaccaccagtatggcccaattcaagttggcataaacatggac

SEQ ID NO: 7493 - DNA, 50 bp, Artificial
  Synthetic oligonucleotide
gcagattactcccgctgggactcaacacaacagagggctgttctagcagc

SEQ ID NO: 7494 - DNA, 60 bp, Artificial
  Synthetic oligonucleotide
ctctcaaagacccatacagctcatggcactgcttggtgaggcctcccttcacggaccctc

SEQ ID NO: 7495 - DNA, 55 bp, Artificial
  Synthetic oligonucleotide
gtgcaatagttggtgatcaatttggctggtatggtcgcctagaccgtgccagtat

SEQ ID NO: 7496 - DNA, 52 bp, Artificial
  Synthetic oligonucleotide
ccactggactatgtcaactttgaagcatgctcgaggcgcatcgatttcctcg

SEQ ID NO: 7497 - DNA, 52 bp, Artificial
  Synthetic oligonucleotide
ggacgtgagccgtcaacagaagtcgtacttttatgccatgtggcgtcaggtg

SEQ ID NO: 7498 - DNA, 56 bp, Artificial
  Synthetic oligonucleotide
gcggtctgaccagatcgattcgagtggcatgaccgccctacactgtgatgtgttcg

SEQ ID NO: 7499 - DNA, 57 bp, Artificial
  Synthetic oligonucleotide
ctctccagacactctcaggagactgcatggagagtcgttcccctacacagcctttga

SEQ ID NO: 7500 - DNA, 55 bp, Artificial
  Synthetic oligonucleotide
aacagaagcacaagtttggacctgtctgcctgtgcaatcgtgtttacatacacga

SEQ ID NO: 7501 - DNA, 60 bp, Artificial
  Synthetic oligonucleotide
ggaactcactaaaagtgtcgtgctcacactgaagtcccaccccatgaccatactcgacgc

SEQ ID NO: 7502 - DNA, 58 bp, Artificial
  Synthetic oligonucleotide
tcctgaatgctgttagaaccaggctcaatgcaacattcaccgtttgtgtggggcctga

SEQ ID NO: 7503 - DNA, 58 bp, Artificial
  Synthetic oligonucleotide
gaaccacgacacttcttgtgggccatatctaggtggtagaaagaaggaccacatgata

SEQ ID NO: 7504 - DNA, 59 bp, Artificial
  Synthetic oligonucleotide
gaccccacttctcgaggtcagcagttgtggaatgcatgtctctatgctagtcaacatgg

SEQ ID NO: 7505 - DNA, 60 bp, Artificial
  Synthetic oligonucleotide
ttcataacatcaactcatgtcataccccagggcgcacaggagtttttcggagtccccatc

SEQ ID NO: 7506 - DNA, 55 bp, Artificial
  Synthetic oligonucleotide
acatcaactcatgtcataccccagggcgcacaagagttcttcggggtccccgtca

SEQ ID NO: 7507 - DNA, 55 bp, Artificial
  Synthetic oligonucleotide
gtgacagtaagggaacatactgtggtgcaccaatcctaggcccagggagcgcccc

SEQ ID NO: 7508 - DNA, 58 bp, Artificial
  Synthetic oligonucleotide
tcccctagaaacgctccaggtgaaatactatggagcgcgcccttaggccctgatctga

SEQ ID NO: 7509 - DNA, 60 bp, Artificial
  Synthetic oligonucleotide
tggtgaccgttcacaccgtgtacgatatggcctgggctcttcggagacacctgaaatgga

SEQ ID NO: 7510 - DNA, 60 bp, Artificial
  Synthetic oligonucleotide
agccacccatgccaacaacatgtatgagatgggtaagtccatgcggcccgtttacacggc

SEQ ID NO: 7511 - DNA, 60 bp, Artificial
  Synthetic oligonucleotide
cacccatgccaacaacatgtatgagatgggcaagtctatgcggcccgtctacacagctgc

SEQ ID NO: 7512 - DNA, 60 bp, Artificial
  Synthetic oligonucleotide
catacacccagtttagtgtttacagctacgatgctgctaggaagatacttgcagatcgta

SEQ ID NO: 7513 - DNA, 60 bp, Artificial
  Synthetic oligonucleotide
gaagataagcctgacgcgccctcccatgcggaggacgctatggatgcaagggagcccgtg

SEQ ID NO: 7514 - DNA, 60 bp, Artificial
  Synthetic oligonucleotide
tacagttacgatgctgctagaaaggtccttgcagatcgtaagagagtcgtctcggtagta

SEQ ID NO: 7515 - DNA, 60 bp, Artificial
  Synthetic oligonucleotide
gcttaaggattatgaagtggcaccatgccaggtgatttacaatggagccacctataatgt

SEQ ID NO: 7516 - DNA, 55 bp, Artificial
  Synthetic oligonucleotide
gtggcaccatgccaggtgatttacaatggagccacctataatgtcagctgcatca

SEQ ID NO: 7517 - DNA, 54 bp, Artificial
  Synthetic oligonucleotide
cttcaagtcccgtgggctcacggatgaggagtacgatgagttcaagaaacgccg

SEQ ID NO: 7518 - DNA, 60 bp, Artificial
  Synthetic oligonucleotide
tggcgagccgatcgactacaggggaatcaccgcacacaggcttgttggcgcagaacccag

SEQ ID NO: 7519 - DNA, 55 bp, Artificial
  Synthetic oligonucleotide
gcctgggctcttcgccgtcaccttacactaactggacagtttcaagcgatcagag

SEQ ID NO: 7520 - DNA, 55 bp, Artificial
  Synthetic oligonucleotide
gggctcttcgccgacacctgacactaactggacagtttcaagcgatcagagccgc

SEQ ID NO: 7521 - DNA, 52 bp, Artificial
  Synthetic oligonucleotide
ccccagtctgttcataacatcaacccatgtcataccccagggcgcaaaggag

SEQ ID NO: 7522 - DNA, 60 bp, Artificial
  Synthetic oligonucleotide
ggcgcactgttggaggtcagatgggcatgcttctgacaggatccaacgccaaaagcatgg

SEQ ID NO: 7523 - DNA, 55 bp, Artificial
  Synthetic oligonucleotide
tcgggtgggcgcatgccgtcccttcgtggaggttcctggtctccgcgtgatcaca

SEQ ID NO: 7524 - DNA, 54 bp, Artificial
  Synthetic oligonucleotide
aggcgggcgcttgccgtcccttcgtggaggttcctggtctccgcgtgattacac

SEQ ID NO: 7525 - DNA, 60 bp, Artificial
  Synthetic oligonucleotide
gactatgtcaactttgaagcatgctcgaggcgcatcgatttcctcgtgtatgcagaagcc

SEQ ID NO: 7526 - DNA, 55 bp, Artificial
  Synthetic oligonucleotide
tccaacgccaaggcccaagatctcgggaccatcccgggcgattgtggctgccctt

SEQ ID NO: 7527 - DNA, 55 bp, Artificial
  Synthetic oligonucleotide
ccaatgctaaggcccaagatctcgggaccatcccgggtgattgtggttgccccta

SEQ ID NO: 7528 - DNA, 60 bp, Artificial
  Synthetic oligonucleotide
ttggaggtcagatgggcatgcttctgacaggatccaacgccaaaagcatggatctaggca

SEQ ID NO: 7529 - DNA, 54 bp, Artificial
  Synthetic oligonucleotide
agctgacccctttgtctttgtattggagaccagtgtacaccccacagtacctca

SEQ ID NO: 7530 - DNA, 58 bp, Artificial
  Synthetic oligonucleotide
gactcagtcacgttatgcgtgctgaggcctgtccttcttgtgctagttacgacgtatg

SEQ ID NO: 7531 - DNA, 60 bp, Artificial
  Synthetic oligonucleotide
tgtgactcgcatcgttgattggaatggcactaggattgcagccccgaattcatcagcaac

SEQ ID NO: 7532 - DNA, 53 bp, Artificial
  Synthetic oligonucleotide
ccgctattcgcaaatttgcggcgctaatgttgtaatataatgcagcagtgggc

SEQ ID NO: 7533 - DNA, 60 bp, Artificial
  Synthetic oligonucleotide
atacaaataccactatgatgctgattactctcggtgggattcaacacaacagagggccgt

SEQ ID NO: 7534 - DNA, 57 bp, Artificial
  Synthetic oligonucleotide
tgctcgagcatcagggctactccatgagaggttggacgagtacgagctacagggccc

SEQ ID NO: 7535 - DNA, 59 bp, Artificial
  Synthetic oligonucleotide
cttaggcagatgtactggactaggggccccaaccatgaggatccatctgaaacaatgat

SEQ ID NO: 7536 - DNA, 60 bp, Artificial
  Synthetic oligonucleotide
cttaggatggtctctgatggcatcctagtggctcttgcaacggtgattggtcggccgatc

SEQ ID NO: 7537 - DNA, 51 bp, Artificial
  Synthetic oligonucleotide
tgcagacaccgccccagtctcactcaattgtgaccgaattgagaacaaggg

SEQ ID NO: 7538 - DNA, 60 bp, Artificial
  Synthetic oligonucleotide
cactgggatgcttacaagggagccagagttgtcctttgggatgacttcggcatggacaat

SEQ ID NO: 7539 - DNA, 52 bp, Artificial
  Synthetic oligonucleotide
cccaaaaatgttttggactcctggacatctgcgtttaacacgcgcagacaac

SEQ ID NO: 7540 - DNA, 60 bp, Artificial
  Synthetic oligonucleotide
atgtgcgtcgagtcctttggcatgctacccaggatcaagaggaatctatgcgcctggttt

SEQ ID NO: 7541 - DNA, 51 bp, Artificial
  Synthetic oligonucleotide
cgcaaccatgaagatccaaggtcgcactgttgggggccaaatgggtatgct

SEQ ID NO: 7542 - DNA, 60 bp, Artificial
  Synthetic oligonucleotide
atggtatggtgcgctcaaccacagacctcctgatcgacggacttagctggttcatagact

SEQ ID NO: 7543 - DNA, 59 bp, Artificial
  Synthetic oligonucleotide
tttcatgaggggggctcacaacatatcgtttgtcaccccaccatctagcagatcctcca

SEQ ID NO: 7544 - DNA, 60 bp, Artificial
  Synthetic oligonucleotide
cggctggacatgtctgacaaggctatcttccgccgctatccccatctgcgacctaaggag

SEQ ID NO: 7545 - DNA, 60 bp, Artificial
  Synthetic oligonucleotide
acgatgctgctaggaagatacttgcagatcgtaagagagtcgtctcggtagtacctgacg

SEQ ID NO: 7546 - DNA, 60 bp, Artificial
  Synthetic oligonucleotide
ttgcagccgcggctgtgcacgcacgctcgttggccagcaccggtctatggcctcttggtg

SEQ ID NO: 7547 - DNA, 55 bp, Artificial
  Synthetic oligonucleotide
tgtgcacgcacgctcgttggccagcaccggtctatggcctcttggtggacccatc

SEQ ID NO: 7548 - DNA, 59 bp, Artificial
  Synthetic oligonucleotide
ctcggtagtacctgacgacgaatttgtgaatgttatggagggcaaagcccgcacagcgc

SEQ ID NO: 7549 - DNA, 60 bp, Artificial
  Synthetic oligonucleotide
gagcagagctcaatactcaggcaaatgtactggactagaggccccaaccatgaagaccca

SEQ ID NO: 7550 - DNA, 60 bp, Artificial
  Synthetic oligonucleotide
tagtgtttacagctacgatgctgctagaaagatacttgcagatcgtaagagagtcgtctc

SEQ ID NO: 7551 - DNA, 60 bp, Artificial
  Synthetic oligonucleotide
ccgctaacctcgaccttcatgggagtgcagctagcgcgtgtcaagctagcgtctaaggtc

SEQ ID NO: 7552 - DNA, 52 bp, Artificial
  Synthetic oligonucleotide
tggctctaatgctaaagcccaagatctcgggaccatcccgggtgattgtggg

SEQ ID NO: 7553 - DNA, 60 bp, Artificial
  Synthetic oligonucleotide
gcaactcacctccatcagtgggctgccaggcgaggtatcccgcttcccatctatgacggg

SEQ ID NO: 7554 - DNA, 60 bp, Artificial
  Synthetic oligonucleotide
agtaccttctgtgcactcgtgcggggtcccatgttctcctgctgctcgtagagccgtacg

SEQ ID NO: 7555 - DNA, 52 bp, Artificial
  Synthetic oligonucleotide
cagactggtttgaagtgttcaggtcctctatcgttatttgaggtttcggtct

SEQ ID NO: 7556 - DNA, 60 bp, Artificial
  Synthetic oligonucleotide
attgggggcaaactgacggaattgaacatacagagttggctggcattcataagtgattgc

SEQ ID NO: 7557 - DNA, 55 bp, Artificial
  Synthetic oligonucleotide
cccttctgtgagctactgcgtgtgactgaccggtacccgcataaggtgcccgtga

SEQ ID NO: 7558 - DNA, 54 bp, Artificial
  Synthetic oligonucleotide
gagagatccgtgagtgtgatttgaggctttggccttatgagccgtttgaatccc

SEQ ID NO: 7559 - DNA, 56 bp, Artificial
  Synthetic oligonucleotide
agacagccggagatatttgcagtaggtatccagttttgccctctaccggagcaacg

SEQ ID NO: 7560 - DNA, 55 bp, Artificial
  Synthetic oligonucleotide
aaacgcggttagctctgtgccgacgtggccggtagaggcgtgtccttcgtctcct

SEQ ID NO: 7561 - DNA, 51 bp, Artificial
  Synthetic oligonucleotide
gcgtcaatgaacctgacatacgtgagcaaaataggaggacccatcgccggt

SEQ ID NO: 7562 - DNA, 55 bp, Artificial
  Synthetic oligonucleotide
gatctcgtttatgcctagaagcccgtgaattgtccaaacttaatgtagaacgtga

SEQ ID NO: 7563 - DNA, 55 bp, Artificial
  Synthetic oligonucleotide
ccgtagtgcctgaccttcgttcctgctgtgttgggtcctccttgtagtgggatcc

SEQ ID NO: 7564 - DNA, 60 bp, Artificial
  Synthetic oligonucleotide
gccatctctgtcgctatgcacggagcatgtctatatatagatcgggcgcggagtggggga

SEQ ID NO: 7565 - DNA, 59 bp, Artificial
  Synthetic oligonucleotide
aggcacaaataaatcgcagcagtacaagttcggcacagctacatacgcgttaaaggaac

SEQ ID NO: 7566 - DNA, 58 bp, Artificial
  Synthetic oligonucleotide
tggcccatcctgtagttgatgtcctcacgatttgcccgtccttgtcaatgatcgttga

SEQ ID NO: 7567 - DNA, 52 bp, Artificial
  Synthetic oligonucleotide
attcatccgcccaacattgaggacaattaccatcacatacatgcattaattc

SEQ ID NO: 7568 - DNA, 57 bp, Artificial
  Synthetic oligonucleotide
catgacctaaatatagcgctacgtcatttccgtggctccaagtcgcggcttagtatt

SEQ ID NO: 7569 - DNA, 59 bp, Artificial
  Synthetic oligonucleotide
ttgggggtaaactgacggaattgaacatacacagtgagcatgcattcataagtgatcgt

SEQ ID NO: 7570 - DNA, 55 bp, Artificial
  Synthetic oligonucleotide
cggcttgtaggaagtcgtccaacgcaaaggtaatgtagtcagcattaaagattag

SEQ ID NO: 7571 - DNA, 52 bp, Artificial
  Synthetic oligonucleotide
gatacgagatattgccaccgaacatcctacgacatacatacgctacttccgt

SEQ ID NO: 7572 - DNA, 57 bp, Artificial
  Synthetic oligonucleotide
ttctacggatggatcaaatacgacgaaatgctgaaaataatggaccgctacccatac

SEQ ID NO: 7573 - DNA, 57 bp, Artificial
  Synthetic oligonucleotide
gtactctcgggcctgacgaattccactatgccatcgttggacgggaaaagggcgagc

SEQ ID NO: 7574 - DNA, 55 bp, Artificial
  Synthetic oligonucleotide
gagatgctccgcctctgcgaccgttacccacataaggtgccagttaagggcgcct

SEQ ID NO: 7575 - DNA, 55 bp, Artificial
  Synthetic oligonucleotide
gttagccgtgtcagtgtccgtaacggacagctgtggtcgggggcgaaacagccgc

SEQ ID NO: 7576 - DNA, 58 bp, Artificial
  Synthetic oligonucleotide
aatactagcccgccacttcgttgcctatataatcgcataatattcgtgctaagcccaa

SEQ ID NO: 7577 - DNA, 57 bp, Artificial
  Synthetic oligonucleotide
cgtcagccgggtcttcttaaagaagtctcgaaggtgctgatcctgtattgggacagt

SEQ ID NO: 7578 - DNA, 55 bp, Artificial
  Synthetic oligonucleotide
ccaaggggacaatggtgggacggctacgaacagcaatcctgcgtcatcatagacg

SEQ ID NO: 7579 - DNA, 52 bp, Artificial
  Synthetic oligonucleotide
gcgccgttatacggcgccgtaatttccggaggatcatactcctcccgtaact

SEQ ID NO: 7580 - DNA, 60 bp, Artificial
  Synthetic oligonucleotide
ttgatagtcctcaaatggcacttttagcgtcggcgcgttgagaccaacggtcagtacatc

SEQ ID NO: 7581 - DNA, 60 bp, Artificial
  Synthetic oligonucleotide
gcttcaacagtgaggggcgctgccgtgtcttctgcttgtcttagtgacatgcccattccg

SEQ ID NO: 7582 - DNA, 60 bp, Artificial
  Synthetic oligonucleotide
agggagcctcgtgattggtataaatgcgagtgtgatgtgtccgcattgtatcggagaatt

SEQ ID NO: 7583 - DNA, 60 bp, Artificial
  Synthetic oligonucleotide
gaagcaatgcgagagctgccgcccttgaagagtcgctgggaggaagagcctggctctctc

SEQ ID NO: 7584 - DNA, 60 bp, Artificial
  Synthetic oligonucleotide
ggcgtctgcggaagtgtctacgtcgccggcggtatctcctgatgtgacgtctgcggtagt

SEQ ID NO: 7585 - DNA, 55 bp, Artificial
  Synthetic oligonucleotide
gacatgggcggggtttgcataacctttcgctattggttggttcccgcccacgtga

SEQ ID NO: 7586 - DNA, 53 bp, Artificial
  Synthetic oligonucleotide
gtggggccacctgggtgtggtaaaagcaaatgggctgctaattttgcaaaccc

SEQ ID NO: 7587 - DNA, 54 bp, Artificial
  Synthetic oligonucleotide
cagttaaacaaggggacagaagcgaccttaaatctgtcgtttcaaccattgcgg

SEQ ID NO: 7588 - DNA, 53 bp, Artificial
  Synthetic oligonucleotide
ggttggatcaaatacgacgaactcctgaaaataacggaccgctacccatacaa

SEQ ID NO: 7589 - DNA, 60 bp, Artificial
  Synthetic oligonucleotide
ggctttattcataatccacagctgagtctgggtctaattgttcatccgcccaacattgca

SEQ ID NO: 7590 - DNA, 55 bp, Artificial
  Synthetic oligonucleotide
ccacagctgagtctgggtctaattgttcatccgcccaacattgcatacagtcacc

SEQ ID NO: 7591 - DNA, 60 bp, Artificial
  Synthetic oligonucleotide
caacattgcatacagtcaccatcacatacatgaagcatttctaggccctcaatattgggg

SEQ ID NO: 7592 - DNA, 55 bp, Artificial
  Synthetic oligonucleotide
atgtttaagccgcatatattgttgccacgggccggtgggtctgtgtattgtgcgc

SEQ ID NO: 7593 - DNA, 54 bp, Artificial
  Synthetic oligonucleotide
ttatctgcggaagtgtgacgtcacttccgtggctccaagtcgcggcttagtatt

SEQ ID NO: 7594 - DNA, 57 bp, Artificial
  Synthetic oligonucleotide
gtctccggttggttgcccgcctacgacgataatatagactccgcggtctcgcgcgat

SEQ ID NO: 7595 - DNA, 60 bp, Artificial
  Synthetic oligonucleotide
gttgtattgggcgacttttatgggtggctaccttattgcgagatgctccggctctgcgac

SEQ ID NO: 7596 - DNA, 50 bp, Artificial
  Synthetic oligonucleotide
cctggctgggggaagctgaatgcaatgccgtagtgccggactttcgctcc

SEQ ID NO: 7597 - DNA, 60 bp, Artificial
  Synthetic oligonucleotide
tatctgatagtcctcaaaagggactttcagcgttggtgcgttgaggcccactgtgagtac

SEQ ID NO: 7598 - DNA, 55 bp, Artificial
  Synthetic oligonucleotide
cctcaaaagggactttcagcgttggtgcgttgaggcccactgtgagtacatccgc

SEQ ID NO: 7599 - DNA, 60 bp, Artificial
  Synthetic oligonucleotide
gtcctccttgtagtgggatccagccggttctggcactgtttagccacaatgccgcagact

SEQ ID NO: 7600 - DNA, 56 bp, Artificial
  Synthetic oligonucleotide
ttatacttacccttggcattgtggcgagagacggtcaccgcgctttcgacggagct

SEQ ID NO: 7601 - DNA, 60 bp, Artificial
  Synthetic oligonucleotide
tcttctgcttgtcttagtgacatgcccattccgtagaatactacgttgtcttgaattgag

SEQ ID NO: 7602 - DNA, 60 bp, Artificial
  Synthetic oligonucleotide
atggctggctgcccttctgtgagctgctgcgtgtgaccgaccggtacccgcataaggtgc

SEQ ID NO: 7603 - DNA, 60 bp, Artificial
  Synthetic oligonucleotide
ctttacgtagcgcaaggcacaaataagtcgcagcagtacaagttcggcacagctacatac

SEQ ID NO: 7604 - DNA, 59 bp, Artificial
  Synthetic oligonucleotide
tcgcaatctgattcatgatgcagataagtacgcgtttgcgataatcggcaaagaagttg

SEQ ID NO: 7605 - DNA, 55 bp, Artificial
  Synthetic oligonucleotide
ggaacaagtccggcctgatttcctcgcccaccccatcaatttctgatcgtttcgg

SEQ ID NO: 7606 - DNA, 60 bp, Artificial
  Synthetic oligonucleotide
tctgaatagaatccaatgttgaaggaacgtaatgctgaatccccacttgcgttccacgaa

SEQ ID NO: 7607 - DNA, 52 bp, Artificial
  Synthetic oligonucleotide
ctgacggaattgaacatatatagttagctggcatacataagggatcggtatt

SEQ ID NO: 7608 - DNA, 55 bp, Artificial
  Synthetic oligonucleotide
ggcatactgttctaaatctggcgaggtatggatgcacggagaacctagttctcaa

SEQ ID NO: 7609 - DNA, 52 bp, Artificial
  Synthetic oligonucleotide
ccgtctgctgaaaggtttttatgcgggcgtcatacatcgggcaagtgtgccc

SEQ ID NO: 7610 - DNA, 60 bp, Artificial
  Synthetic oligonucleotide
ttatcggagcgcgtgaccgtaccactcgacgtctgaaggccatctctgacgtcacgcgat

SEQ ID NO: 7611 - DNA, 60 bp, Artificial
  Synthetic oligonucleotide
cacataagtgatcgtttgttctggctgggggaagctgaatgcaatgccgtagtgccggac

SEQ ID NO: 7612 - DNA, 60 bp, Artificial
  Synthetic oligonucleotide
aagagcaatgacggaagtcgcgcgagacttcagtgagatacacgtcaaatatgggcgtgg

SEQ ID NO: 7613 - DNA, 55 bp, Artificial
  Synthetic oligonucleotide
tagacggaagtagtatatccggctactcctcctgtggccacgtaggttcctggag

SEQ ID NO: 7614 - DNA, 50 bp, Artificial
  Synthetic oligonucleotide
tacgcctatatacggccctgaatcgcgccatgcctttcacttttacgctc

SEQ ID NO: 7615 - DNA, 57 bp, Artificial
  Synthetic oligonucleotide
gggtggctaccttattgcgagatgctccgcctatgcgaccgttacccgcacaaagtg

SEQ ID NO: 7616 - DNA, 51 bp, Artificial
  Synthetic oligonucleotide
tgctcgctggtctaccgctgactgacgttgcccggaagtatccgacgactt

SEQ ID NO: 7617 - DNA, 54 bp, Artificial
  Synthetic oligonucleotide
atgacggggaagatgtcgtcgtcttggacgatttttatgggtggctaccttatt

SEQ ID NO: 7618 - DNA, 52 bp, Artificial
  Synthetic oligonucleotide
tagcaacatggttaataattaaccagtggctccaagtggccgtttcagtatt

SEQ ID NO: 7619 - DNA, 60 bp, Artificial
  Synthetic oligonucleotide
taagaggatcattatcacgagcaataagccccccgcagactggtacaaggaggactgtga

SEQ ID NO: 7620 - DNA, 50 bp, Artificial
  Synthetic oligonucleotide
tgataacgaggagtattgtagtaaggaaaacgacgtgatactcaccattg

SEQ ID NO: 7621 - DNA, 55 bp, Artificial
  Synthetic oligonucleotide
gtctaagaagattgtcataacgagcaacacgcacccggaaagttggtactgtccc

SEQ ID NO: 7622 - DNA, 53 bp, Artificial
  Synthetic oligonucleotide
tcccaataccgggacacaccatctgcaggggttttgcaatctcgagaaaccca

SEQ ID NO: 7623 - DNA, 52 bp, Artificial
  Synthetic oligonucleotide
cccttaacaaccctacagacggcgagattgaattcgtccgtactctcgggcc

SEQ ID NO: 7624 - DNA, 60 bp, Artificial
  Synthetic oligonucleotide
atgtgacgtctgcggtagtatgggcggacatatcttcgcctaatctgaaatatagcgcat

SEQ ID NO: 7625 - DNA, 50 bp, Artificial
  Synthetic oligonucleotide
tggctggttaccttgggatgatctactgagactgtgtgaccggtatccgt

SEQ ID NO: 7626 - DNA, 60 bp, Artificial
  Synthetic oligonucleotide
tggctaccttattgtgagatgctccgcctctgcgaccgttacccacataaggtgccagtt

SEQ ID NO: 7627 - DNA, 55 bp, Artificial
  Synthetic oligonucleotide
cggagttgaacatacaaagtgagctgacatacataagtgatcgttacttctggct

SEQ ID NO: 7628 - DNA, 51 bp, Artificial
  Synthetic oligonucleotide
tgccgcctagggatataccgactgaactgcgggtgtattggggaccacccg

SEQ ID NO: 7629 - DNA, 55 bp, Artificial
  Synthetic oligonucleotide
cttatggagtgtggagctccgagatctcaaggacaacggagtgacctgtctactg

SEQ ID NO: 7630 - DNA, 56 bp, Artificial
  Synthetic oligonucleotide
tagaagctctctatcggaggattacttccttggtattttggaagactgctacagaa

SEQ ID NO: 7631 - DNA, 54 bp, Artificial
  Synthetic oligonucleotide
tagaataacaacagtggagcccactcccctatcaccctgggtgatcggggagca

SEQ ID NO: 7632 - DNA, 58 bp, Artificial
  Synthetic oligonucleotide
taaagaaaatgctgccgcgagcgcattttgagcgagctaagggcagtgatgcggataa

SEQ ID NO: 7633 - DNA, 55 bp, Artificial
  Synthetic oligonucleotide
gagtcttggattactgctgtgtggccgaatccctctgaagaaatggagtagtggc

SEQ ID NO: 7634 - DNA, 55 bp, Artificial
  Synthetic oligonucleotide
gtttgtgagccgaaaaagccgaatacggtgttccttgtgaccttatatgtcacta

SEQ ID NO: 7635 - DNA, 50 bp, Artificial
  Synthetic oligonucleotide
agctgccacgttgcgaaagtgacgtttcgaaaatgggcggcgcaagcctc

SEQ ID NO: 7636 - DNA, 51 bp, Artificial
  Synthetic oligonucleotide
cggagagtgtaaactctattggttgtgaaacggcgtctgcggacgtgtcta

SEQ ID NO: 7637 - DNA, 60 bp, Artificial
  Synthetic oligonucleotide
gatatgacgtctgcgtaagtatgggcggggccttcgtctaatctgaaatacagcgcatgc

SEQ ID NO: 7638 - DNA, 55 bp, Artificial
  Synthetic oligonucleotide
gggatccagccggttctggcactgtttagccacaatgccgcagactggttcgctg

SEQ ID NO: 7639 - DNA, 54 bp, Artificial
  Synthetic oligonucleotide
ggcttgtcttagtgacatacccattccgtagaataccacgttgtcttgaatgga

SEQ ID NO: 7640 - DNA, 60 bp, Artificial
  Synthetic oligonucleotide
ttgtcatattggacgacttttatgggtggctaccttattgtgagatgctccgcctttgcg

SEQ ID NO: 7641 - DNA, 55 bp, Artificial
  Synthetic oligonucleotide
cacgtactctgggaggaagcatctactacaaaccacgaggtctctggtgggacgg

SEQ ID NO: 7642 - DNA, 59 bp, Artificial
  Synthetic oligonucleotide
ttgcttctactgttagaggggctgccgtgtcctcggcttgtcttagtgacatacccatt

SEQ ID NO: 7643 - DNA, 60 bp, Artificial
  Synthetic oligonucleotide
ggttggctgccgtgggatgatctactgagactgtgtgatcgatatccattgactgtaaag

SEQ ID NO: 7644 - DNA, 60 bp, Artificial
  Synthetic oligonucleotide
atatgacgtctgcggtagtatgggcgggcgtatcttcgtctaacctggaatatagcgcat

SEQ ID NO: 7645 - DNA, 57 bp, Artificial
  Synthetic oligonucleotide
acctctcgctattggttggttcccgcccacgtgatttcaagactgaggttgacgtca

SEQ ID NO: 7646 - DNA, 55 bp, Artificial
  Synthetic oligonucleotide
cgctatagagcgtcgtattacaataaaggagtacatggactaatgttccaatgta

SEQ ID NO: 7647 - DNA, 53 bp, Artificial
  Synthetic oligonucleotide
ctgtgccgtagttgagttctgcaatctggataactgcaagttcgcgatagtcg

SEQ ID NO: 7648 - DNA, 51 bp, Artificial
  Synthetic oligonucleotide
tactctttggaaggggttaaatgcgggacggagttccacctttaccatgcg

SEQ ID NO: 7649 - DNA, 58 bp, Artificial
  Synthetic oligonucleotide
ttactgatcgagtgtggagctcctagatctcagggacaacggagtgacctgtctactg

SEQ ID NO: 7650 - DNA, 53 bp, Artificial
  Synthetic oligonucleotide
tggattaaatacgacgaactgctaaagatcacagaccgctacccatacaaggt

SEQ ID NO: 7651 - DNA, 51 bp, Artificial
  Synthetic oligonucleotide
ggttttgtaacttacgtaaacccacacgcttcagtaccatcaagaagcatc

SEQ ID NO: 7652 - DNA, 54 bp, Artificial
  Synthetic oligonucleotide
cgccaatcggtacgtatagtttggttcgcaggcgtagcgtcagcatctagacgt

SEQ ID NO: 7653 - DNA, 60 bp, Artificial
  Synthetic oligonucleotide
gagaaacggcgtctgcggaagtatctacgtcgccggtggtatcgcctgatgtgacgtctg

SEQ ID NO: 7654 - DNA, 55 bp, Artificial
  Synthetic oligonucleotide
ccgtcgtggaggtcttcactatttgcccgtccttgtctatcaccgttgagccttg

SEQ ID NO: 7655 - DNA, 50 bp, Artificial
  Synthetic oligonucleotide
ccagatccgcgattgttagttgaggtcgtggccttatgaggcgtttaaac

SEQ ID NO: 7656 - DNA, 60 bp, Artificial
  Synthetic oligonucleotide
gcatcatacatcgggacagtgtgcccgaatcctttccatgtcgtgatgtcaacgcctagt

SEQ ID NO: 7657 - DNA, 55 bp, Artificial
  Synthetic oligonucleotide
cgggacagtgtgcccgaatcctttccatgtcgtgatgtcaacgcctagtggtctc

SEQ ID NO: 7658 - DNA, 55 bp, Artificial
  Synthetic oligonucleotide
ctttcgcggcattcgagaactacaacgattggtcaacccgatctctcctcgagac

SEQ ID NO: 7659 - DNA, 60 bp, Artificial
  Synthetic oligonucleotide
ttttatggctggctaccctattgtgagatgctccgcctctgcgaccgttacccacataaa

SEQ ID NO: 7660 - DNA, 50 bp, Artificial
  Synthetic oligonucleotide
cttttaaggatatgtgatcgttatcctttaagggttgagtacaagggtgg

SEQ ID NO: 7661 - DNA, 55 bp, Artificial
  Synthetic oligonucleotide
ccgtgtgtccgaatccggctgaactaatagagtagtggccccatgtgggtctcag

SEQ ID NO: 7662 - DNA, 60 bp, Artificial
  Synthetic oligonucleotide
tctatcaccgttgagccttgagtcttgctcttctggtaaatgttgtacgccggtctgaga

SEQ ID NO: 7663 - DNA, 50 bp, Artificial
  Synthetic oligonucleotide
ctgtgctgttgttgaattctgcaatctagataattgcaagttcgcgatag

SEQ ID NO: 7664 - DNA, 54 bp, Artificial
  Synthetic oligonucleotide
tggtctgggtctgttttacgttgaagatcgtgtatcttgaccttattcgtccga

SEQ ID NO: 7665 - DNA, 60 bp, Artificial
  Synthetic oligonucleotide
gtgtctccgaacatcgcccatctcatgtttaagccgcatatattgttgccacgggccggt

SEQ ID NO: 7666 - DNA, 55 bp, Artificial
  Synthetic oligonucleotide
cgcccatctcatgtttaagccgcatatattgttgccacgggccggtgggtctgtg

SEQ ID NO: 7667 - DNA, 55 bp, Artificial
  Synthetic oligonucleotide
gcagttcgttgctaagacccttattatcacgtctaaccgtgaaccccgcgagtgg

SEQ ID NO: 7668 - DNA, 51 bp, Artificial
  Synthetic oligonucleotide
gtctaaccgtgaaccccgcgagtggtataaatgtgaggtggattgtaccgc

SEQ ID NO: 7669 - DNA, 55 bp, Artificial
  Synthetic oligonucleotide
ggggagagacccgtccactggccgaagcgtatatagtatgttatggttgcctcta

SEQ ID NO: 7670 - DNA, 60 bp, Artificial
  Synthetic oligonucleotide
gttgggtcctccttgtagtgggatccagccggttctgacgctgttcagccacaatgctgc

SEQ ID NO: 7671 - DNA, 60 bp, Artificial
  Synthetic oligonucleotide
agacgttgatcacaactagcaacaaagagccccgtgattggtatagaagtgagttcgatc

SEQ ID NO: 7672 - DNA, 55 bp, Artificial
  Synthetic oligonucleotide
ctagcaacaaagagccccgtgattggtatagaagtgagttcgatctgtccgcctt

SEQ ID NO: 7673 - DNA, 53 bp, Artificial
  Synthetic oligonucleotide
caccacttatataatgttcgggcgtggcttggaacgcctccgtcagctgatcg

SEQ ID NO: 7674 - DNA, 59 bp, Artificial
  Synthetic oligonucleotide
cggtcaggcgtccaggtcttacgtgagctcattgctgcatatggatctacagaccacgg

SEQ ID NO: 7675 - DNA, 55 bp, Artificial
  Synthetic oligonucleotide
tgtctgtttaacgtggaatactgtaaagcggcgtcttattcttgggatcctaagc

SEQ ID NO: 7676 - DNA, 60 bp, Artificial
  Synthetic oligonucleotide
gtcatatattggcactgtgtgcccgaatcctttccatgttgttatctcggcccctattgg

SEQ ID NO: 7677 - DNA, 53 bp, Artificial
  Synthetic oligonucleotide
aatttgaagtcgtttgcattcgtaggcaatgttatcttgtccttgcgacgtag

SEQ ID NO: 7678 - DNA, 60 bp, Artificial
  Synthetic oligonucleotide
tgtcttgaatgggcacattgtgccctataccatgccatgatccccagttctcgtttagtg

SEQ ID NO: 7679 - DNA, 55 bp, Artificial
  Synthetic oligonucleotide
ggcacattgtgccctataccatgccatgatccccagttctcgtttagtggacgca

SEQ ID NO: 7680 - DNA, 60 bp, Artificial
  Synthetic oligonucleotide
gccgtcggtagcccatttcagggtagtgtcacctgagccggcgcattcttgtctgtacat

SEQ ID NO: 7681 - DNA, 52 bp, Artificial
  Synthetic oligonucleotide
cagactggttcgctgtggtgaggtcgtttattgttatctgtggtttcggcct

SEQ ID NO: 7682 - DNA, 52 bp, Artificial
  Synthetic oligonucleotide
agcctcaatgaacctgacatacgtgagcaaactcggaggccccatcgccggt

SEQ ID NO: 7683 - DNA, 53 bp, Artificial
  Synthetic oligonucleotide
actgttctaaatctggtgaggtttggtcacacggagaaccatgtaatcaagga

SEQ ID NO: 7684 - DNA, 59 bp, Artificial
  Synthetic oligonucleotide
taggggccacctcattcgcagtggacaggtcagtactgactaactggggcctaggcctc

SEQ ID NO: 7685 - DNA, 60 bp, Artificial
  Synthetic oligonucleotide
tacttgaaagctccagactcatctctctgtagggttaccttcacggagtgtctcagcctg

SEQ ID NO: 7686 - DNA, 51 bp, Artificial
  Synthetic oligonucleotide
aattaaaagcctggactcgtggttgctaagtgagttccattatgctatagt

SEQ ID NO: 7687 - DNA, 51 bp, Artificial
  Synthetic oligonucleotide
tctggccccgtcaaagtccatgagggggtcgtcacccaagtcagtctgggc

SEQ ID NO: 7688 - DNA, 54 bp, Artificial
  Synthetic oligonucleotide
catttccaccttcactaatgctatctgatagtcctcaaacgggacttttagcgt

SEQ ID NO: 7689 - DNA, 58 bp, Artificial
  Synthetic oligonucleotide
acagtcgctattcctgtactgacacctccgactggcattacgttgacagttcttagtg

SEQ ID NO: 7690 - DNA, 60 bp, Artificial
  Synthetic oligonucleotide
aaacgctacaaagcgctcagacatggcatctgttgcacgtgcagtctacgaagttgatct

SEQ ID NO: 7691 - DNA, 60 bp, Artificial
  Synthetic oligonucleotide
gactcatctgcgcacccgaaccaacacctcaggataaactcatctggaaacttgtagcaa

SEQ ID NO: 7692 - DNA, 60 bp, Artificial
  Synthetic oligonucleotide
actcaaagcttcaccacacgcatttagttcaatcacagcaggctattacatctacaccac

SEQ ID NO: 7693 - DNA, 59 bp, Artificial
  Synthetic oligonucleotide
cgccaaggtaagtgtttctataacggacacgacctgggctcatgctcggcagactcctg

SEQ ID NO: 7694 - DNA, 60 bp, Artificial
  Synthetic oligonucleotide
ttattgttgtcgtcgcaataagacactcaattccagacttagagcagttcaaccaagatt

SEQ ID NO: 7695 - DNA, 60 bp, Artificial
  Synthetic oligonucleotide
ataggcatgtagcttagcacctacatgtctatcgccagggaaatgtctaatctgtctact

SEQ ID NO: 7696 - DNA, 60 bp, Artificial
  Synthetic oligonucleotide
gtagcttagcacctacatgtctatcgccagggaaatgtctaatctgtctactgagtagcc

SEQ ID NO: 7697 - DNA, 55 bp, Artificial
  Synthetic oligonucleotide
cgttggtgagtgcttgaaatctaaggctggtgtatgctttggtgctaataggttc

SEQ ID NO: 7698 - DNA, 57 bp, Artificial
  Synthetic oligonucleotide
tatgttgctgaacgtgccgttatccggccgtactgtaacgagacccattctcacaga

SEQ ID NO: 7699 - DNA, 60 bp, Artificial
  Synthetic oligonucleotide
tgctaaggctctggatgatcttactaagggtgaattgcaggtgttgtctaaccagtatgt

SEQ ID NO: 7700 - DNA, 60 bp, Artificial
  Synthetic oligonucleotide
tgacacaagaatgcgttcaaccctcaatctagaaggctgtaatggtggttcgttgtatgt

SEQ ID NO: 7701 - DNA, 60 bp, Artificial
  Synthetic oligonucleotide
acattggattgggtgctcactaagatgacattggctaagggtgtgtggcttcgctatgct

SEQ ID NO: 7702 - DNA, 60 bp, Artificial
  Synthetic oligonucleotide
tatcataggtggcactgcagaggtcaatcctactcggttcgaatattcaactgcaaacct

SEQ ID NO: 7703 - DNA, 60 bp, Artificial
  Synthetic oligonucleotide
aggtgaagttgtacgtcaaatgtatggcgttaatcttcagggtggctatgtgtcacgcgc

SEQ ID NO: 7704 - DNA, 60 bp, Artificial
  Synthetic oligonucleotide
tagagctgtccaatcacatgtggttcgtgccgctattaaagcgcttaatcctagtgctat

SEQ ID NO: 7705 - DNA, 60 bp, Artificial
  Synthetic oligonucleotide
ttaatgaagctaaggtaatgacgcctacgtcgcagtcggccggtcctgactatacagcat

SEQ ID NO: 7706 - DNA, 59 bp, Artificial
  Synthetic oligonucleotide
cgttcttaatggtgtcatctcaaacgctaggaatggctgtgtgcctcttagtgttgtgc

SEQ ID NO: 7707 - DNA, 60 bp, Artificial
  Synthetic oligonucleotide
cacgtactcatcgctatcctattgatcgtgacactactactgctcacgacacctcttacg

SEQ ID NO: 7708 - DNA, 60 bp, Artificial
  Synthetic oligonucleotide
gtttaaagactgtcacctctgcgagattgcaagtgaacagtgccccctgggaagagctct

SEQ ID NO: 7709 - DNA, 53 bp, Artificial
  Synthetic oligonucleotide
gaaggtggtgattccggtgctcccttggtttggcgcgattctgtaattggtgt

SEQ ID NO: 7710 - DNA, 60 bp, Artificial
  Synthetic oligonucleotide
gggttaagttgcaccggtattcgcaccgcccgtcagcggacgcattatccagcatagcac

SEQ ID NO: 7711 - DNA, 60 bp, Artificial
  Synthetic oligonucleotide
ccgggcctccattcgagttatcggcgcggataatactacctatatgttcgtctgctctga

SEQ ID NO: 7712 - DNA, 60 bp, Artificial
  Synthetic oligonucleotide
tccgccacgattttctatcgcaacaaccgtgcaaagataagccgtgcgtatatcatgcca

SEQ ID NO: 7713 - DNA, 60 bp, Artificial
  Synthetic oligonucleotide
tgtgtcaattcttagctcgatgacaaaccgccaatttcatcagaagtgcctcaaatctat

SEQ ID NO: 7714 - DNA, 60 bp, Artificial
  Synthetic oligonucleotide
taggtcttggcacggttgatgcagactatgacaagtgtactaagggattgtcagtggcag

SEQ ID NO: 7715 - DNA, 60 bp, Artificial
  Synthetic oligonucleotide
tagggcgctgtgacataaaggacctgccaaaagagattacggtggctacatcacgaacgc

SEQ ID NO: 7716 - DNA, 55 bp, Artificial
  Synthetic oligonucleotide
gccggtggtcacttgtacggcgccgatctaaggttttacgatctaggtgacgaac

SEQ ID NO: 7717 - DNA, 60 bp, Artificial
  Synthetic oligonucleotide
caggtgtcttttgtggtgctgatgcttcagacttactctttaacatcttcacacctcttg

SEQ ID NO: 7718 - DNA, 60 bp, Artificial
  Synthetic oligonucleotide
acatgttgctagttgtgatgccatcatgactcgttgtcttgccattcacgagtgctttgt

SEQ ID NO: 7719 - DNA, 57 bp, Artificial
  Synthetic oligonucleotide
tgggtcgctacagaaggagccctaaacacgcctaaagatcacattggcacgcgcaat

SEQ ID NO: 7720 - DNA, 60 bp, Artificial
  Synthetic oligonucleotide
tacttggcgctttgctaaagagcgttgtacacattggtgcacttatttgttctcactcat

SEQ ID NO: 7721 - DNA, 51 bp, Artificial
  Synthetic oligonucleotide
ggatccaagtagcgatgaggctattccgactaggtttccgcctggcacggt

SEQ ID NO: 7722 - DNA, 54 bp, Artificial
  Synthetic oligonucleotide
tcactgcttattgtggaagcaacgttctgtcgttgtggaaaccaataactgcta

SEQ ID NO: 7723 - DNA, 55 bp, Artificial
  Synthetic oligonucleotide
gtgcagctcgactagaaccctgtaatggcacggacatcgataagtgtgttcgtgc

SEQ ID NO: 7724 - DNA, 50 bp, Artificial
  Synthetic oligonucleotide
ccccttcgcgctagtagttgtgttacccgttgtaatataggtggtgctgt

SEQ ID NO: 7725 - DNA, 60 bp, Artificial
  Synthetic oligonucleotide
ctagcgctgcgacgggacttgttgtgttcatacaatactacctgtgcaacccactcattt

SEQ ID NO: 7726 - DNA, 54 bp, Artificial
  Synthetic oligonucleotide
tggtgtgtgataagattctttaggcatttggcgcgtgggtgtaaaacacctacg

SEQ ID NO: 7727 - DNA, 60 bp, Artificial
  Synthetic oligonucleotide
atgctagatatgtgctatcgttgtccaaaagaaatcgtagagacggtgtctaaacttgtc

SEQ ID NO: 7728 - DNA, 53 bp, Artificial
  Synthetic oligonucleotide
ctggtagcacctactacttaaactgcagcacatcacaacgtccagttggattt

SEQ ID NO: 7729 - DNA, 60 bp, Artificial
  Synthetic oligonucleotide
cgttctcgcaccggtgccaatgttggttcagctgatactgagaaatcaggaatggcagac

SEQ ID NO: 7730 - DNA, 54 bp, Artificial
  Synthetic oligonucleotide
ccgtgtgttgcctattgctacagttcaatctaaattgagtgatgtaaagtgtac

SEQ ID NO: 7731 - DNA, 60 bp, Artificial
  Synthetic oligonucleotide
tgctagttgggtgatgcgtataatgacatggcttgaattggccgacactagcctgtctgg

SEQ ID NO: 7732 - DNA, 55 bp, Artificial
  Synthetic oligonucleotide
cacttttgggtctgtttactatcataattctatggattgccctattgtagtggcg

SEQ ID NO: 7733 - DNA, 60 bp, Artificial
  Synthetic oligonucleotide
ctataggtctagctgtttattactacacagcacgtgtagtttatactgctgctagtcatg

SEQ ID NO: 7734 - DNA, 53 bp, Artificial
  Synthetic oligonucleotide
gcagagagcttaattgtaatgtgtgttctaatcgtgctacatgctacaattct

SEQ ID NO: 7735 - DNA, 60 bp, Artificial
  Synthetic oligonucleotide
acatgtggctagttgtgatgctatcatgactagatgtttagcagtccatgagtgctttgt

SEQ ID NO: 7736 - DNA, 55 bp, Artificial
  Synthetic oligonucleotide
actggaacaggaccagccgctgacctgaattggggtgatagccaagatggtatag

SEQ ID NO: 7737 - DNA, 60 bp, Artificial
  Synthetic oligonucleotide
acaagcatgcctgggaagtcgcacgtgatatggacgttccccatgctaaacagactgctc

SEQ ID NO: 7738 - DNA, 60 bp, Artificial
  Synthetic oligonucleotide
agcttgtgtagtgcaacaggcagttcatgagaagttgtcagaattgctttcggagtgccc

SEQ ID NO: 7739 - DNA, 54 bp, Artificial
  Synthetic oligonucleotide
cagccagggacgtgttgtatcctaggcagtggccctcccataggtcacaatgtc

SEQ ID NO: 7740 - DNA, 60 bp, Artificial
  Synthetic oligonucleotide
cactagccatccttactgcgcttcgattgtgtgcgtactgctgcaatattgttaacgtga

SEQ ID NO: 7741 - DNA, 56 bp, Artificial
  Synthetic oligonucleotide
gtggcagcgctgttagaggttacgctagttccgactttgacaagagtaagttttgc

SEQ ID NO: 7742 - DNA, 60 bp, Artificial
  Synthetic oligonucleotide
catgttgatcacccagctatggatggtgcatgtcgctttaagggtaagtatgtgcaaata

SEQ ID NO: 7743 - DNA, 60 bp, Artificial
  Synthetic oligonucleotide
tgatcacaggaagacttacagcacttaatgcatttgtgtctcagactctaaccagacaag

SEQ ID NO: 7744 - DNA, 55 bp, Artificial
  Synthetic oligonucleotide
cagcacttaatgcatttgtgtctcagactctaaccagacaagcggaggttagggc

SEQ ID NO: 7745 - DNA, 56 bp, Artificial
  Synthetic oligonucleotide
cacgcattggcatggaagtcacaccttcgggaacatggctgacttatcatggagcc

SEQ ID NO: 7746 - DNA, 60 bp, Artificial
  Synthetic oligonucleotide
gagtgcggggttctagtgcagctcgactagaaccctgtaatggtactgatccagaccacg

SEQ ID NO: 7747 - DNA, 57 bp, Artificial
  Synthetic oligonucleotide
taaaggttgctcgcttggttgaggccgaagtcattgttaaccctgctaatgggcgga

SEQ ID NO: 7748 - DNA, 57 bp, Artificial
  Synthetic oligonucleotide
taaaggttgttcgcttagttaatgctgaagtcattgttaaccctgctaatgggcgta

SEQ ID NO: 7749 - DNA, 55 bp, Artificial
  Synthetic oligonucleotide
caactcagtttgcctgttctacaggttagagacgtgctagtgcgtggcttcgggg

SEQ ID NO: 7750 - DNA, 55 bp, Artificial
  Synthetic oligonucleotide
tcagtttgcctgtccttcaggttagagacgtgctagtgcgtggcttcggggactc

SEQ ID NO: 7751 - DNA, 60 bp, Artificial
  Synthetic oligonucleotide
ggctactaattatgacttgagtgtcgtcaatgctagacttcgtgcaaaacactacgtcta

SEQ ID NO: 7752 - DNA, 58 bp, Artificial
  Synthetic oligonucleotide
acagaatggtaagcacgtgtaataggaggtacaagcaaccctattgcatattaggaag

SEQ ID NO: 7753 - DNA, 60 bp, Artificial
  Synthetic oligonucleotide
ttgaccgtcttattactggtagactctcttctctctcagtgctagcctctgctaagcagt

SEQ ID NO: 7754 - DNA, 54 bp, Artificial
  Synthetic oligonucleotide
ataatgcgagttatgaaaaggtacgtgaccatttagtaaaccatggctttgtgg

SEQ ID NO: 7755 - DNA, 54 bp, Artificial
  Synthetic oligonucleotide
ctatgatggatttagtatatgctttgcgccactttgaccagaataattgtgaag

SEQ ID NO: 7756 - DNA, 56 bp, Artificial
  Synthetic oligonucleotide
gcgttctacatctataatactgggcgcaacgcctattttaagtttcaagagaatcg

SEQ ID NO: 7757 - DNA, 54 bp, Artificial
  Synthetic oligonucleotide
tgctagtgcgtggcttcggggactctgtggaagaggccctatcggaggcacgtg

SEQ ID NO: 7758 - DNA, 59 bp, Artificial
  Synthetic oligonucleotide
ctagtgcactgcttgatttgcgcacatgttgttttagcgttgcagctatcacaagtggc

SEQ ID NO: 7759 - DNA, 60 bp, Artificial
  Synthetic oligonucleotide
ctcacgttgcattttgtagaccctatgcttgtaagcatagcaatacgtggcttagctcat

SEQ ID NO: 7760 - DNA, 55 bp, Artificial
  Synthetic oligonucleotide
ggtatgaggcgtagtggctatggtcaacccgtagcatcatcattaagtaatatct

SEQ ID NO: 7761 - DNA, 60 bp, Artificial
  Synthetic oligonucleotide
gtctatggagaaaattattgtgctatgaattccactgcgcagacttcatgtctcattagt

SEQ ID NO: 7762 - DNA, 55 bp, Artificial
  Synthetic oligonucleotide
gcagtcagtagacactggcgagctagaaagtgtagcaacaggaggaagtagcctt

SEQ ID NO: 7763 - DNA, 60 bp, Artificial
  Synthetic oligonucleotide
gcgctaccatgcaaactagggctggctactcttgcacagaatcacatctcgataattgtc

SEQ ID NO: 7764 - DNA, 60 bp, Artificial
  Synthetic oligonucleotide
gcgctaccatgcaaactagggctggctactcttgcacagaatcacctttctataataacc

SEQ ID NO: 7765 - DNA, 58 bp, Artificial
  Synthetic oligonucleotide
taacatctgtcaaagctaaggctccacctggtgaacagttcgcacatcttattcaact

SEQ ID NO: 7766 - DNA, 60 bp, Artificial
  Synthetic oligonucleotide
tcctaaggtcatacatgacattggaaatcctaagggcatacgttgtgctgtaaccaatgc

SEQ ID NO: 7767 - DNA, 59 bp, Artificial
  Synthetic oligonucleotide
caaagctatatgcattagtacctctatgttctggagtaatcaaagatccgcttagacga

SEQ ID NO: 7768 - DNA, 60 bp, Artificial
  Synthetic oligonucleotide
tcttacgttgcattttgtagaccctatgcttgtaggcatagctatacgtggcctagttcg

SEQ ID NO: 7769 - DNA, 60 bp, Artificial
  Synthetic oligonucleotide
attgtatctaggtggtatgtcatattattgtgaagatcataagccacaatattcgtttaa

SEQ ID NO: 7770 - DNA, 60 bp, Artificial
  Synthetic oligonucleotide
gtacttctattacactggaacaggaccagccgctgacctgaattggggtgatagccaaga

SEQ ID NO: 7771 - DNA, 60 bp, Artificial
  Synthetic oligonucleotide
gggtcagtggcttgctaaatgtgaaccagaccacttgcctaaagacatatttgtatgcac

SEQ ID NO: 7772 - DNA, 60 bp, Artificial
  Synthetic oligonucleotide
tgtgaaccagaccacttgcctaaagacatatttgtatgcacaccggatagacgtaatatc

SEQ ID NO: 7773 - DNA, 57 bp, Artificial
  Synthetic oligonucleotide
tgtcttatcaaatgcagggttgtatgcttgttcttacagtgaccctgcaaaattctc

SEQ ID NO: 7774 - DNA, 52 bp, Artificial
  Synthetic oligonucleotide
tcgccagggaaatgtctaatctgtctacttagtagcctggaaacgaacggta

SEQ ID NO: 7775 - DNA, 60 bp, Artificial
  Synthetic oligonucleotide
tttgtctatgcaaagcagtcagtagacaccggcgagctagaaagtgtagcaacgtctgga

SEQ ID NO: 7776 - DNA, 60 bp, Artificial
  Synthetic oligonucleotide
tttgtctatgcaaagcagtcagtagacactggcgagctagaaagtgtagcaacaggagga

SEQ ID NO: 7777 - DNA, 53 bp, Artificial
  Synthetic oligonucleotide
tgtcacgtgaacgccttactaagtatacaatggcagacttagtttatagtttg

SEQ ID NO: 7778 - DNA, 60 bp, Artificial
  Synthetic oligonucleotide
gtcattggctactgctaaggtcattgctaaatggttggctgtgaatgtcttgtacttcac

SEQ ID NO: 7779 - DNA, 60 bp, Artificial
  Synthetic oligonucleotide
agcatgcctacactttacaaaatacagcgtatgtgtctcgaacggtgtaatctctacaat

SEQ ID NO: 7780 - DNA, 55 bp, Artificial
  Synthetic oligonucleotide
caatggggttatgtaggtaatttacaggtaaaccatgataatgtctgcgatgtcc

SEQ ID NO: 7781 - DNA, 50 bp, Artificial
  Synthetic oligonucleotide
tagtgctaagagtgttgccactagttataagcgtgtgttgtgtaaggtgg

SEQ ID NO: 7782 - DNA, 60 bp, Artificial
  Synthetic oligonucleotide
aaatacagcgtatgtgtctcgaacggtgtaatctctacaattatggtgcacaagtgaagt

SEQ ID NO: 7783 - DNA, 59 bp, Artificial
  Synthetic oligonucleotide
tgccgtacgactctagcattcattcgtactttatcactgacgagaacagtggtagtagt

SEQ ID NO: 7784 - DNA, 59 bp, Artificial
  Synthetic oligonucleotide
tctcatacgactctagcatccactcatactttatcactgacgagaacagtggtagtagt

SEQ ID NO: 7785 - DNA, 55 bp, Artificial
  Synthetic oligonucleotide
gtacggggctctagtgcagctcgactagagccctgtaatggtactgatacacaac

SEQ ID NO: 7786 - DNA, 59 bp, Artificial
  Synthetic oligonucleotide
ggttagcttatgctttggaccaatatagaaatagtggtgtggaaattgtgtatactcca

SEQ ID NO: 7787 - DNA, 60 bp, Artificial
  Synthetic oligonucleotide
ctacactgtacaaaatccagcgtatgtgtctcgaacggtgtaatctctacaattatggtg

SEQ ID NO: 7788 - DNA, 60 bp, Artificial
  Synthetic oligonucleotide
acgaacttaaaattgcatcatacgtcacagtgggtttcgtctcgctgtgcgtaagttgca

SEQ ID NO: 7789 - DNA, 56 bp, Artificial
  Synthetic oligonucleotide
aaaaacaaaggcttgcgtagcaggtgtagatcaagcacattgtagcgttgagtcta

SEQ ID NO: 7790 - DNA, 59 bp, Artificial
  Synthetic oligonucleotide
ttgacggatgaaagttgtaataacttggtgccaacatatttgaagagtgacaacattgt

SEQ ID NO: 7791 - DNA, 60 bp, Artificial
  Synthetic oligonucleotide
gctagtcacactagccatccttactgcgcttcgattgtgtgcgtactgctgcaatattgt

SEQ ID NO: 7792 - DNA, 54 bp, Artificial
  Synthetic oligonucleotide
ttgtgggaagcactctttacattacaacacatcagatcttagcattaccgcttg

SEQ ID NO: 7793 - DNA, 52 bp, Artificial
  Synthetic oligonucleotide
ttttctgtagatcctaagaaaacgtacctggactatatacaacagggtggag

SEQ ID NO: 7794 - DNA, 51 bp, Artificial
  Synthetic oligonucleotide
ttactatcagaccatcaagatctcaagtgggctagattccctaagagtgac

SEQ ID NO: 7795 - DNA, 57 bp, Artificial
  Synthetic oligonucleotide
gggctctagtgcagctcgactagagccctgtaatggtactgaaccggagcatgttgt

SEQ ID NO: 7796 - DNA, 55 bp, Artificial
  Synthetic oligonucleotide
ctctcggctggcttttgtggacgtactataatgggctcatgtgcgctagaggatg

SEQ ID NO: 7797 - DNA, 60 bp, Artificial
  Synthetic oligonucleotide
gtcgcgtttgcagtagttcctagcgatggcgacgtccaatatgtcaagaatgtcaagcgt

SEQ ID NO: 7798 - DNA, 60 bp, Artificial
  Synthetic oligonucleotide
ctgactctcaggaaagtattgaccagccaggatccgacaatgaacaaggggttgatcttc

SEQ ID NO: 7799 - DNA, 60 bp, Artificial
  Synthetic oligonucleotide
atcaatcgcgttgctgaattactcatacgattggccatgaaagaatgaggactgtattga

SEQ ID NO: 7800 - DNA, 60 bp, Artificial
  Synthetic oligonucleotide
aaatcaacatggtataactccgaattatgtgggcgacttgaatctagatgatcagtccaa

SEQ ID NO: 7801 - DNA, 60 bp, Artificial
  Synthetic oligonucleotide
cctctaaacctcagtacattaaccatcatccacgtgcaagatcaatgagttcaacccgta

SEQ ID NO: 7802 - DNA, 57 bp, Artificial
  Synthetic oligonucleotide
ctcaaggatcgtggtacaaaaccacacatgatctacatttgaccccatatctacggc

SEQ ID NO: 7803 - DNA, 51 bp, Artificial
  Synthetic oligonucleotide
caacatctactaatcacttcaacatgagaactcaacgagtaaaggaccaac

SEQ ID NO: 7804 - DNA, 60 bp, Artificial
  Synthetic oligonucleotide
ctacaggggatggacaccaagatgccactctcagagcaaaatctagtcgaaaattgtcga

SEQ ID NO: 7805 - DNA, 50 bp, Artificial
  Synthetic oligonucleotide
gatagggctactgctgtgaaccaggagtgttgggacagtgtcttcgatag

SEQ ID NO: 7806 - DNA, 58 bp, Artificial
  Synthetic oligonucleotide
cggcaaggcaaccaatccacttgtcagagtcaatcggctgggtcctggaatcccggat

SEQ ID NO: 7807 - DNA, 54 bp, Artificial
  Synthetic oligonucleotide
tcacaagtgcctgtgggatattcctcaagcctgatgagactttcgtacactcag

SEQ ID NO: 7808 - DNA, 60 bp, Artificial
  Synthetic oligonucleotide
aacagcaggattgtcagtccaacaaggcattgtgagacaacgggtcattcaagtccacca

SEQ ID NO: 7809 - DNA, 60 bp, Artificial
  Synthetic oligonucleotide
tgcatgagcctgccaacatgaccacggatccctccagttactatcacacgacaacaataa

SEQ ID NO: 7810 - DNA, 54 bp, Artificial
  Synthetic oligonucleotide
aaccaaacatgtgctccgtccaaaaaacctttaccactgcccacagcccatccg

SEQ ID NO: 7811 - DNA, 60 bp, Artificial
  Synthetic oligonucleotide
tcaaactccatgagaccagtggctgatgataacattgatcactcaagccatactccaagc

SEQ ID NO: 7812 - DNA, 60 bp, Artificial
  Synthetic oligonucleotide
agacacctgtactcgataagctgaggaagatcaccctacaaagatggaatctgtggttca

SEQ ID NO: 7813 - DNA, 60 bp, Artificial
  Synthetic oligonucleotide
agttgcacggtggatttggcccagattttgcgtgagtatacatggtcacacatcttagag

SEQ ID NO: 7814 - DNA, 55 bp, Artificial
  Synthetic oligonucleotide
tgatcggggcgacattaccatgtatggtggagcaattcaaagttaagtggctagg

SEQ ID NO: 7815 - DNA, 57 bp, Artificial
  Synthetic oligonucleotide
tcccctatataggatcaagaaccgaggataaaatcggacagcctgctatcaagccgc

SEQ ID NO: 7816 - DNA, 60 bp, Artificial
  Synthetic oligonucleotide
aatgtctgccacgctttcactttagaggcgataattgacatatctgcgtataacgagcga

SEQ ID NO: 7817 - DNA, 56 bp, Artificial
  Synthetic oligonucleotide
acaccggagtcagtcaatggggacactccatcgaatccactcaggccaattgccga

SEQ ID NO: 7818 - DNA, 60 bp, Artificial
  Synthetic oligonucleotide
gactcaactacagctgcaattatgctcgcatcgtacaccatcactcactttggcaaaacc

SEQ ID NO: 7819 - DNA, 55 bp, Artificial
  Synthetic oligonucleotide
tttccaatcgccaccactacatgaaccggccaatatgacaacagacccatccagc

SEQ ID NO: 7820 - DNA, 60 bp, Artificial
  Synthetic oligonucleotide
tcaggtttgaggtccgagaaaaggagaatgtgcaccgtctggatgaattgttgcccaatg

SEQ ID NO: 7821 - DNA, 60 bp, Artificial
  Synthetic oligonucleotide
cgtatttcctctagagacagattccaatgagcaagagcatagctccgaggacaatgctgc

SEQ ID NO: 7822 - DNA, 58 bp, Artificial
  Synthetic oligonucleotide
acatcacttcgtgcagcattaagtttgacgtgtgctggaattcgaaagacgaatagat

SEQ ID NO: 7823 - DNA, 60 bp, Artificial
  Synthetic oligonucleotide
gttaatcgtctagcttggacgataggaaatcgagcaccgtatattggctcacggacagaa

SEQ ID NO: 7824 - DNA, 60 bp, Artificial
  Synthetic oligonucleotide
cagcacacggcagtacattggctggtgtcaatgttggcgaacagtatcaacagctacgag

SEQ ID NO: 7825 - DNA, 51 bp, Artificial
  Synthetic oligonucleotide
aagtaacagagattgaccagctagtctgcaaggatcatcttgcatccactg

SEQ ID NO: 7826 - DNA, 60 bp, Artificial
  Synthetic oligonucleotide
taaagggagattaggcagagtatcccgatcaacactctcgttgagtttgaatgtcagtga

SEQ ID NO: 7827 - DNA, 56 bp, Artificial
  Synthetic oligonucleotide
gtctatgctttaccagagcggagattacttactctccatattagggtctgatgggt

SEQ ID NO: 7828 - DNA, 60 bp, Artificial
  Synthetic oligonucleotide
tgtatggcaatggagtggtcacaaagaatggtggctatgtcagtggaatagcgcaaacaa

SEQ ID NO: 7829 - DNA, 60 bp, Artificial
  Synthetic oligonucleotide
gcacactcatagccatggatttgggagagatgtgtgatgacacggtcacttataaatgcc

SEQ ID NO: 7830 - DNA, 55 bp, Artificial
  Synthetic oligonucleotide
ccttctatgggagggcgatccccctagagtacatcaagggtggacgacatctcat

SEQ ID NO: 7831 - DNA, 60 bp, Artificial
  Synthetic oligonucleotide
gaccaggtattcagcgacccccggagatgagcccagccctacatacgacctagagctgat

SEQ ID NO: 7832 - DNA, 60 bp, Artificial
  Synthetic oligonucleotide
ttggctgagttccatagtggttgatacgccaactcttgtgaggaaagtttgctatgcgag

SEQ ID NO: 7833 - DNA, 59 bp, Artificial
  Synthetic oligonucleotide
gagttctgtcagcgacctggaacatcgaatgtggtattctagagtcgacgagataaacg

SEQ ID NO: 7834 - DNA, 56 bp, Artificial
  Synthetic oligonucleotide
gacacaggtgagttcaagttacgaaatgaagaacccgccccctggattcaggtggc

SEQ ID NO: 7835 - DNA, 60 bp, Artificial
  Synthetic oligonucleotide
tgtcaagttcaaagataagtcaaatgtgttcaccatgccaactgaaccaagtgacacctt

SEQ ID NO: 7836 - DNA, 60 bp, Artificial
  Synthetic oligonucleotide
gatggacggtcgataatagcaccatgccgtgatcaggatgagctcatagggagggcccgt

SEQ ID NO: 7837 - DNA, 55 bp, Artificial
  Synthetic oligonucleotide
gactgggtgaacaaagccgcgaagtgatccatgtaagccctcagaaccgtctcgg

SEQ ID NO: 7838 - DNA, 60 bp, Artificial
  Synthetic oligonucleotide
atggcatcttacagttgtggccactcctgctattgctcctagtgttgcctcagcgggcgt

SEQ ID NO: 7839 - DNA, 60 bp, Artificial
  Synthetic oligonucleotide
tccatgtatctcctccaagaaagccttctgcgggtcccgtactttgtgcgtgcacatgca

SEQ ID NO: 7840 - DNA, 60 bp, Artificial
  Synthetic oligonucleotide
gcccattgagttacctcaaagggtcctcaggcggtccgcttctgtgtccatcaggccatg

SEQ ID NO: 7841 - DNA, 55 bp, Artificial
  Synthetic oligonucleotide
cgcctgtcttgtgcgacgaggggcacgcagtaggaatgctcgtgtccgtgctcca

SEQ ID NO: 7842 - DNA, 53 bp, Artificial
  Synthetic oligonucleotide
ctgcaggagtggcaaccatctaggcccggttagcgggatatatgtaaagcccg

SEQ ID NO: 7843 - DNA, 60 bp, Artificial
  Synthetic oligonucleotide
cagcgtaggggccgcacaggccgtgggagagctggcatatactactatgtagacgggagt

SEQ ID NO: 7844 - DNA, 60 bp, Artificial
  Synthetic oligonucleotide
tagatccacgtacccgtgtcaagcgtctgttgtcgatgtggtcacccgatgcagtcggag

SEQ ID NO: 7845 - DNA, 56 bp, Artificial
  Synthetic oligonucleotide
tgcagagcgtagtaccaagggctgcaccccggtttttgttccaagcggagggcaac

SEQ ID NO: 7846 - DNA, 60 bp, Artificial
  Synthetic oligonucleotide
gtatggaggtggccttgttagaaacccgctatcacgcaattccacacatgagatgtactg

SEQ ID NO: 7847 - DNA, 60 bp, Artificial
  Synthetic oligonucleotide
ggtatgagctcacgcccgccgagactacagttaggctacgagcgtacatgaacactccgg

SEQ ID NO: 7848 - DNA, 60 bp, Artificial
  Synthetic oligonucleotide
tacctatgccatattgcagttgtggcccctccttttgttagtattggctctgccccgcag

SEQ ID NO: 7849 - DNA, 60 bp, Artificial
  Synthetic oligonucleotide
catggcaccttccccatcaacgcgacaacgactggtcctagcgtgcccatcccagagccc

SEQ ID NO: 7850 - DNA, 60 bp, Artificial
  Synthetic oligonucleotide
aggctaatagcctttgcatcaagaggcaaccacgtgtccccgacgcactacgtgcctgag

SEQ ID NO: 7851 - DNA, 55 bp, Artificial
  Synthetic oligonucleotide
cctgaggcgattacaccagtggataagctcggagtgcaccactccatgctccgac

SEQ ID NO: 7852 - DNA, 58 bp, Artificial
  Synthetic oligonucleotide
agactacatgggcttgaagctttctcactgcacggttactctcccaccgaactcactc

SEQ ID NO: 7853 - DNA, 53 bp, Artificial
  Synthetic oligonucleotide
ggatcaatcaccacaccccacgctaacatagaggaggtcgccctgccaacgac

SEQ ID NO: 7854 - DNA, 60 bp, Artificial
  Synthetic oligonucleotide
tactcctgctcaccgtaggggtaggcatcttcctgcttcctgctcggtaagcaggaggcc

SEQ ID NO: 7855 - DNA, 60 bp, Artificial
  Synthetic oligonucleotide
atcggataatgctatcagtgcatggctcccagcatagcgggatgattggatatgaaactg

SEQ ID NO: 7856 - DNA, 59 bp, Artificial
  Synthetic oligonucleotide
ctttcgcagaaatgaacactggaggagatgtagctcacttggcattggtagcggcattt

SEQ ID NO: 7857 - DNA, 60 bp, Artificial
  Synthetic oligonucleotide
ctgctaggttcaacacaggttggagtgggagtcatgcaagagggagtcttccacaccatg

SEQ ID NO: 7858 - DNA, 53 bp, Artificial
  Synthetic oligonucleotide
ctttgggagtaatggaggccctgggaacactgccaggacacatgacagagagg

SEQ ID NO: 7859 - DNA, 60 bp, Artificial
  Synthetic oligonucleotide
gagcgactgcaacgtaggcatgggggaggattagtcagagtgccattgtgtcgcaactcc

SEQ ID NO: 7860 - DNA, 54 bp, Artificial
  Synthetic oligonucleotide
atagggctgtcatctaggaaacgccgctctaatgagatggccatgatgccactt

SEQ ID NO: 7861 - DNA, 60 bp, Artificial
  Synthetic oligonucleotide
tgctagtgggacaagtcacggtgctagatctagtgaaactcattgtggcagtaggcttgc

SEQ ID NO: 7862 - DNA, 60 bp, Artificial
  Synthetic oligonucleotide
cgggccagtgtcacaacacaactacagaccaggctactatacacaaacagcaggaccttg

SEQ ID NO: 7863 - DNA, 60 bp, Artificial
  Synthetic oligonucleotide
gctaagcatgaatggatgacgacggaagacatgctggcagtctggaatagggtgtggatc

SEQ ID NO: 7864 - DNA, 60 bp, Artificial
  Synthetic oligonucleotide
tacggaaatgccttgagcggcggctgcggaccttagtgctggctccgaccaaggtggtgc

SEQ ID NO: 7865 - DNA, 60 bp, Artificial
  Synthetic oligonucleotide
ttatactacttggagcaatgctagtgggacaagtcacgatgctagacctagtgaaactca

SEQ ID NO: 7866 - DNA, 52 bp, Artificial
  Synthetic oligonucleotide
caatatctaggctatgtaatcaaggacctatccaccaaagaagggggaggat

SEQ ID NO: 7867 - DNA, 55 bp, Artificial
  Synthetic oligonucleotide
tgccctaactcgagtattgtgtacgagacggctggtgccatcctgcacactccgg

SEQ ID NO: 7868 - DNA, 60 bp, Artificial
  Synthetic oligonucleotide
tggacgttggacatccgtgtgaagacacaattgagtatgaatgcccctctttggacattg

SEQ ID NO: 7869 - DNA, 60 bp, Artificial
  Synthetic oligonucleotide
ggtttttcatatgacacccgctgcttcgactcaacagtgacggagagagacatcagaacc

SEQ ID NO: 7870 - DNA, 60 bp, Artificial
  Synthetic oligonucleotide
tatgacaatcgagtccaagtcttggctagtgaatagggactggtatcatgacctacacct

SEQ ID NO: 7871 - DNA, 60 bp, Artificial
  Synthetic oligonucleotide
gacggctagtggaaaagtgatagccgattggtgctgcagggattgcatactaccaccact

SEQ ID NO: 7872 - DNA, 53 bp, Artificial
  Synthetic oligonucleotide
acacctgggatagaccggagaatttgctgcctcgcaacacctcccacccggca

SEQ ID NO: 7873 - DNA, 57 bp, Artificial
  Synthetic oligonucleotide
acgtgtggcttcgccgacctcatgggatacattccgctcgtaggcgcccctgtgggt

SEQ ID NO: 7874 - DNA, 58 bp, Artificial
  Synthetic oligonucleotide
tgggcagagaaatactgcttggcccggctgacacggagcgcgaggcaggttggaggct

SEQ ID NO: 7875 - DNA, 60 bp, Artificial
  Synthetic oligonucleotide
tggtagagggagtgttccacacactatggcacaccactaagggagctgctctcatgagtg

SEQ ID NO: 7876 - DNA, 60 bp, Artificial
  Synthetic oligonucleotide
ttgtgctggaacatggtggatgtgtaactttgtccgctaaagacaagccaagtgttgacg

SEQ ID NO: 7877 - DNA, 54 bp, Artificial
  Synthetic oligonucleotide
ctcacccactttgatgagccacacgctacaacagtcaccgtcacgagcatgggg

SEQ ID NO: 7878 - DNA, 59 bp, Artificial
  Synthetic oligonucleotide
ctgttagcgctcctaaccgtgttcggaggagtttccatgcgtgatcttgcacgatgttt

SEQ ID NO: 7879 - DNA, 58 bp, Artificial
  Synthetic oligonucleotide
gcggaggggcaggataggaagaaacccagatcgcaacacggactcttacatgtatgaa

SEQ ID NO: 7880 - DNA, 60 bp, Artificial
  Synthetic oligonucleotide
tcttgacttacatgagactagagcaccgaatcctggccgaagctgtaatgaacctggcat

SEQ ID NO: 7881 - DNA, 60 bp, Artificial
  Synthetic oligonucleotide
cgtcttgtgcgaggcatacgacacaggttgcgcatggtacgagttgactccatccgaaac

SEQ ID NO: 7882 - DNA, 60 bp, Artificial
  Synthetic oligonucleotide
gcgactgcaccagtggataagctcggagtgtaccactccgtgctccggttcctggctaag

SEQ ID NO: 7883 - DNA, 60 bp, Artificial
  Synthetic oligonucleotide
caagggcggctgtcctgtaaggaagactacaggtatgcgatatcatcaaccaatgagata

SEQ ID NO: 7884 - DNA, 55 bp, Artificial
  Synthetic oligonucleotide
gaagactacaggtatgcgatatcttcaaccaatgagatagggccgctaggggctg

SEQ ID NO: 7885 - DNA, 60 bp, Artificial
  Synthetic oligonucleotide
tagcattcatagccactcaagaagtactgaaacgcagatggactgggaagttgaccctga

SEQ ID NO: 7886 - DNA, 55 bp, Artificial
  Synthetic oligonucleotide
caagaagtactgaaacgcagatggactgggaagttgaccctgacctcactagcgg

SEQ ID NO: 7887 - DNA, 60 bp, Artificial
  Synthetic oligonucleotide
ggcacgcgactgaaggagcagtcctgcgaaacggagaagggagactagatccgtatgcag

SEQ ID NO: 7888 - DNA, 58 bp, Artificial
  Synthetic oligonucleotide
gagagtttctgcttgcctatggatgatgtttatggtatcccaggttgaggcggctctg

SEQ ID NO: 7889 - DNA, 57 bp, Artificial
  Synthetic oligonucleotide
gacgcgagagtttctgcttgcctatggatgatgtttatggtgtctcaggttgaggcg

SEQ ID NO: 7890 - DNA, 60 bp, Artificial
  Synthetic oligonucleotide
gcaaataacatggagagacatggcgcacacactcataatgatagggtccaacgcctctga

SEQ ID NO: 7891 - DNA, 60 bp, Artificial
  Synthetic oligonucleotide
gttagtagtagggccgacacggaggatgtcgtgtgctgctcaatgtcttattcctggaca

SEQ ID NO: 7892 - DNA, 60 bp, Artificial
  Synthetic oligonucleotide
cctctacgactgtgccctgaggaggaattggacttgtgtgccgggggatgcattacgata

SEQ ID NO: 7893 - DNA, 55 bp, Artificial
  Synthetic oligonucleotide
ccgggaaaggacccttacggatggtgctagcattcatcacgtttctgcgagtcct

SEQ ID NO: 7894 - DNA, 60 bp, Artificial
  Synthetic oligonucleotide
cgtattttgtcagggcgcatgccatcctgagggcctgtgctatggtaaggaacatcgtgg

SEQ ID NO: 7895 - DNA, 60 bp, Artificial
  Synthetic oligonucleotide
aatcacgtatcgcccacacattacgtgcctgaaactgacacatctcgccagatcacaacc

SEQ ID NO: 7896 - DNA, 55 bp, Artificial
  Synthetic oligonucleotide
gctgaaacgcgagagaaaccgcgtgtcaacgattcaacagttgacgaagagattc

SEQ ID NO: 7897 - DNA, 60 bp, Artificial
  Synthetic oligonucleotide
gctgagatatcaggaagcagtccaattctatcagtcactatatcagaggatggtagcatg

SEQ ID NO: 7898 - DNA, 60 bp, Artificial
  Synthetic oligonucleotide
cagcttatgctagcacctgtgttagtgtggccaaaagggatatgatccgtggtgacctcg

SEQ ID NO: 7899 - DNA, 60 bp, Artificial
  Synthetic oligonucleotide
tatggaaggacttgctggaggacaaacagaccccaattcctacaaccatcatggcaaaga

SEQ ID NO: 7900 - DNA, 60 bp, Artificial
  Synthetic oligonucleotide
ctttcactggtgctcatgactgccacaccacctggaactgatgatccctggcctcaaagc

SEQ ID NO: 7901 - DNA, 60 bp, Artificial
  Synthetic oligonucleotide
tcgatcacagcggttacaacccaacttatgcgcagattcacccttgaggctgggcctagg

SEQ ID NO: 7902 - DNA, 60 bp, Artificial
  Synthetic oligonucleotide
gaggcagcatgcaattggaccaggggagaaccttgcgggttggagcacagggaccgcgca

SEQ ID NO: 7903 - DNA, 60 bp, Artificial
  Synthetic oligonucleotide
gcttacttcaacacaccaggcctccccgtctgccaggaccatcttgagttctgggagagc

SEQ ID NO: 7904 - DNA, 60 bp, Artificial
  Synthetic oligonucleotide
aagggagacaatttgtgtaccgtccgagcgatggatgtgggatatatgtgccagaatgac

SEQ ID NO: 7905 - DNA, 60 bp, Artificial
  Synthetic oligonucleotide
gccgaatgggactcatgtgcatggcagcgtacaacccagtgctgatccctgtttccgtgg

SEQ ID NO: 7906 - DNA, 60 bp, Artificial
  Synthetic oligonucleotide
cgtatgccagactatttctggacaaaaaccatgaacgcagctgacaatctctacgtcctt

SEQ ID NO: 7907 - DNA, 58 bp, Artificial
  Synthetic oligonucleotide
ccctggcttcgaactgccaaccagtattgcgtgaaagtgctgtgcccctacaccccta

SEQ ID NO: 7908 - DNA, 60 bp, Artificial
  Synthetic oligonucleotide
gacaccaatgggactgaaaggctcactccgatggcagtaagtggggatgattgcgtggtc

SEQ ID NO: 7909 - DNA, 60 bp, Artificial
  Synthetic oligonucleotide
gacaaactgcctaacatcatcgtggccctccacggaccagcagcgttgagggttaccgca

SEQ ID NO: 7910 - DNA, 60 bp, Artificial
  Synthetic oligonucleotide
catcagctgaggagtctcgagatgccatgtggacgagggcatgcccacggcacatcttaa

SEQ ID NO: 7911 - DNA, 60 bp, Artificial
  Synthetic oligonucleotide
gtggacgagggcatgcccacggcacatcttaacctatgcgggggttgcataggcgaaagc

SEQ ID NO: 7912 - DNA, 60 bp, Artificial
  Synthetic oligonucleotide
gtcagaggggtagtggccagcctgatacaagtgctggtaatagtatgttgaatgtcctaa

SEQ ID NO: 7913 - DNA, 60 bp, Artificial
  Synthetic oligonucleotide
gactgacaacgtgcacacttggacagagcagtaccaatttcaaccagagtccccagcgag

SEQ ID NO: 7914 - DNA, 60 bp, Artificial
  Synthetic oligonucleotide
actcttgggcttagcgctcacatccactggatggttttcgcccaccactatagctgccgg

SEQ ID NO: 7915 - DNA, 60 bp, Artificial
  Synthetic oligonucleotide
gtaatactaaaagatggtccagagcgtgtcattctagccggaccgatgccagtgactgtg

SEQ ID NO: 7916 - DNA, 55 bp, Artificial
  Synthetic oligonucleotide
tatgcccgaccccgctatttgctcctgtgcctactcctactttccgtaggggtag

SEQ ID NO: 7917 - DNA, 60 bp, Artificial
  Synthetic oligonucleotide
cacttcggtgctctgtgagtgctatgacgctggctgcgcttggtacgagctaacgccggc

SEQ ID NO: 7918 - DNA, 60 bp, Artificial
  Synthetic oligonucleotide
cgtggggcctggcgagggggccgtgcagtggatgaaccgtctcattgctttcgcatcgcg

SEQ ID NO: 7919 - DNA, 54 bp, Artificial
  Synthetic oligonucleotide
cgggactccaggactgcaccatgctcgtgtgtggcgacgacctagtcgttatct

SEQ ID NO: 7920 - DNA, 54 bp, Artificial
  Synthetic oligonucleotide
caaggctccgggactgcaccatgctcgtgtgtggcgacgacctagtcgttatct

SEQ ID NO: 7921 - DNA, 60 bp, Artificial
  Synthetic oligonucleotide
atggagacatctctctcacgtgccgggtgactagtggagtggatcctgcccaaactgtgg

SEQ ID NO: 7922 - DNA, 60 bp, Artificial
  Synthetic oligonucleotide
tgagatcaaggatggagcctaccgcatctacagtcccggtttgctgtggggacatcgcca

SEQ ID NO: 7923 - DNA, 51 bp, Artificial
  Synthetic oligonucleotide
ggggtgtctgtggtcatatgtgatgagtgccacagtcatgactctactgtg

SEQ ID NO: 7924 - DNA, 53 bp, Artificial
  Synthetic oligonucleotide
tgtgggaaacaggagggctcacggacaagacgctcggtgctgatcccaaccca

SEQ ID NO: 7925 - DNA, 60 bp, Artificial
  Synthetic oligonucleotide
catggatgaggcccattggactgatccccacagcatagcagctagaggccacttgtacac

SEQ ID NO: 7926 - DNA, 50 bp, Artificial
  Synthetic oligonucleotide
ctactatgcggcttctcgaccggcagtcatgagtgttagggcatatacca

SEQ ID NO: 7927 - DNA, 60 bp, Artificial
  Synthetic oligonucleotide
ccgctgctttgactcaacggtcactgagaatgacatccgtgttgaggagtcaatctacca

SEQ ID NO: 7928 - DNA, 60 bp, Artificial
  Synthetic oligonucleotide
caccggcatccgctgtgcactaccggaatgcctcgggcatttaccatcttaccaatgatt

SEQ ID NO: 7929 - DNA, 60 bp, Artificial
  Synthetic oligonucleotide
cagactgggctgctgacggcctcaaggacctagcggtggccctagagcccgtcgtgttca

SEQ ID NO: 7930 - DNA, 59 bp, Artificial
  Synthetic oligonucleotide
gcaccgctcaccatgattctcctgacgccgacctcattgaagccaacctcctgtggcga

SEQ ID NO: 7931 - DNA, 60 bp, Artificial
  Synthetic oligonucleotide
tgcgtggaaactactatgcctttgtgggagtcatgtacaatctgtggaagatggagactg

SEQ ID NO: 7932 - DNA, 55 bp, Artificial
  Synthetic oligonucleotide
gagaattcggggggaggagtagaaggcattggtttacagtacctaggatatgtga

SEQ ID NO: 7933 - DNA, 60 bp, Artificial
  Synthetic oligonucleotide
gggggccattgttgatgtcatgtgccacgccacttatgtcaatcgccgactcttgccaca

SEQ ID NO: 7934 - DNA, 60 bp, Artificial
  Synthetic oligonucleotide
ctccagtcaattcctggctaggcaacataatcatgtttgcccccacattgtgggcgagga

SEQ ID NO: 7935 - DNA, 60 bp, Artificial
  Synthetic oligonucleotide
ctgctgtgccccgcgggacacgccgtaggcatattcagagccgcggtatgtacccgtgga

SEQ ID NO: 7936 - DNA, 60 bp, Artificial
  Synthetic oligonucleotide
agctgtatgttagctaatagagacaccctagacacagcagtagtacggacgtatagaagg

SEQ ID NO: 7937 - DNA, 60 bp, Artificial
  Synthetic oligonucleotide
tctgtccggggtttgcatggctatcctcgggcaggcctgatgggttcatacatgtccagg

SEQ ID NO: 7938 - DNA, 55 bp, Artificial
  Synthetic oligonucleotide
gcatggctatcctcgggcaggcctgatgggttcatacatgtccagggccacttgc

SEQ ID NO: 7939 - DNA, 60 bp, Artificial
  Synthetic oligonucleotide
gactagccgtagtggcgagctccctgggtggtctaagtcctgagtacaggacagtcgtca

SEQ ID NO: 7940 - DNA, 60 bp, Artificial
  Synthetic oligonucleotide
gttaggccacatgctgccatgggctggggatctaaggtgtcggtcaaggacttggccacc

SEQ ID NO: 7941 - DNA, 55 bp, Artificial
  Synthetic oligonucleotide
gcccaacatcatcgtggctctccacggaccagcagcgttgagagttaccgcagac

SEQ ID NO: 7942 - DNA, 60 bp, Artificial
  Synthetic oligonucleotide
tgtctctcacccccaccgtggctgcgccatacctgaatgctccgcttgagtctttgagac

SEQ ID NO: 7943 - DNA, 54 bp, Artificial
  Synthetic oligonucleotide
ttggtggtggactcgtcagggtgccgctatccaggaactctacacacgagatgt

SEQ ID NO: 7944 - DNA, 54 bp, Artificial
  Synthetic oligonucleotide
caaaaggtctcgctccctgggacttcaagctccatcggatcggaccgtggcaaa

SEQ ID NO: 7945 - DNA, 60 bp, Artificial
  Synthetic oligonucleotide
acagtggggttgttatcaccacgctgttgcaaccaacgaacgagagctgctcactcaaca

SEQ ID NO: 7946 - DNA, 60 bp, Artificial
  Synthetic oligonucleotide
aggagcttgtgtctactgggagggcagagcggttcgtatgcactcggctgacatctaccg

SEQ ID NO: 7947 - DNA, 60 bp, Artificial
  Synthetic oligonucleotide
acacaatcgaaaacctgcatgtcatatcaaatgtggacgacccttacgtctctgatttca

SEQ ID NO: 7948 - DNA, 60 bp, Artificial
  Synthetic oligonucleotide
tgatcgtgaacatccttaccagtccttcaactaccacggatcattcgccactgacgacat

SEQ ID NO: 7949 - DNA, 60 bp, Artificial
  Synthetic oligonucleotide
aataacatggagagatatggcgcacacactaataatgattgggtccaatgcaactgacag

SEQ ID NO: 7950 - DNA, 55 bp, Artificial
  Synthetic oligonucleotide
gagagacatggcgcacacactaataatgattgggtccaacgcatctgacaggatg

SEQ ID NO: 7951 - DNA, 50 bp, Artificial
  Synthetic oligonucleotide
atcgacgtcacgtttggagcacttgatgtgggagaacatacagagagagc

SEQ ID NO: 7952 - DNA, 53 bp, Artificial
  Synthetic oligonucleotide
gtcaatatgctaaagcgcggtgcatcccgcggaaatccgatatctcggatcaa

SEQ ID NO: 7953 - DNA, 53 bp, Artificial
  Synthetic oligonucleotide
tcttagaatttgaggcccttgggtttctgaacgaggatcactggatgagcaga

SEQ ID NO: 7954 - DNA, 60 bp, Artificial
  Synthetic oligonucleotide
ttgcgccaccgacgcccttatgaccgggtacacaggcgatttcgactctgtcatagactg

SEQ ID NO: 7955 - DNA, 60 bp, Artificial
  Synthetic oligonucleotide
gcgaggcctatgacacagggtgcgcgtggtatgagctcacgccgtctgagaccaccgtca

SEQ ID NO: 7956 - DNA, 60 bp, Artificial
  Synthetic oligonucleotide
cttggacctgtcaacaatgagatcacgaccacccatccgatcaccaaatacatcatgacc

SEQ ID NO: 7957 - DNA, 60 bp, Artificial
  Synthetic oligonucleotide
tccatggttattcgccaggggaactcaatcgcgtggcagcaggcctcagaaagcttgggg

SEQ ID NO: 7958 - DNA, 57 bp, Artificial
  Synthetic oligonucleotide
gtccttcgcaagaggtggacggccagattgacgattcctgcggttttgggggctcta

SEQ ID NO: 7959 - DNA, 60 bp, Artificial
  Synthetic oligonucleotide
cactaccatactcagcagcctcactgtgacccagctcctgaggcgactacaccagtggat

SEQ ID NO: 7960 - DNA, 51 bp, Artificial
  Synthetic oligonucleotide
aaacacgcgagtactgtctgcatgccaagctatcggacaccaaggttgcgg

SEQ ID NO: 7961 - DNA, 60 bp, Artificial
  Synthetic oligonucleotide
ggaggaggcttcatagagatgcagctacccccaggggacaacatcatttatgtcggggag

SEQ ID NO: 7962 - DNA, 60 bp, Artificial
  Synthetic oligonucleotide
ctcagagtggtacgacaactacgcatactacccggaaacgccaggagcgctagcatcggc

SEQ ID NO: 7963 - DNA, 54 bp, Artificial
  Synthetic oligonucleotide
ttgctggtgtgataatcaagaggtctacatccaatacggtcgatgcacgcggac

SEQ ID NO: 7964 - DNA, 60 bp, Artificial
  Synthetic oligonucleotide
gtcaggccagcaaacgctgccaccggatactgggtagacggtgctgcctgcgtctcagtt

SEQ ID NO: 7965 - DNA, 60 bp, Artificial
  Synthetic oligonucleotide
ctcggtcgtcctctgtgagtgctatgacgcgggctgctcatggtacgatctgcagcccgc

SEQ ID NO: 7966 - DNA, 59 bp, Artificial
  Synthetic oligonucleotide
actatcaattgtgtctctcctccctttgtgcctgtccacgacatctcaaaaaacgacat

SEQ ID NO: 7967 - DNA, 60 bp, Artificial
  Synthetic oligonucleotide
gctgggtcgcatgctcagccgccgactctctaccctgttcccgcgcattaaggttcctct

SEQ ID NO: 7968 - DNA, 60 bp, Artificial
  Synthetic oligonucleotide
tgagccgttgtataccatctcggcaactggaacctcgctgactcatgctcgtttgctctc

SEQ ID NO: 7969 - DNA, 55 bp, Artificial
  Synthetic oligonucleotide
tggtcaaccctcccttcagtagactcgcgaccagcgtatggtggctggcgtccta

SEQ ID NO: 7970 - DNA, 60 bp, Artificial
  Synthetic oligonucleotide
gtttggggcatatgcagcctctccctactgtgaggtagaacggaagcttggttacatctg

SEQ ID NO: 7971 - DNA, 60 bp, Artificial
  Synthetic oligonucleotide
gacatggtttggggcatatgcagcctctccctactgtgaggtagaacggaggctcggtta

SEQ ID NO: 7972 - DNA, 60 bp, Artificial
  Synthetic oligonucleotide
gatgttgaggcccaggttccggataaggcgtggagcactgggtatgagtggatcaccaac

SEQ ID NO: 7973 - DNA, 60 bp, Artificial
  Synthetic oligonucleotide
gacatttatcacagcgtgtcccgtgcccgaccccgctatttgctcctgtgcctactccta

SEQ ID NO: 7974 - DNA, 55 bp, Artificial
  Synthetic oligonucleotide
catactggggtagcgtgaaagaagaccgcatagcttacggaggcccatggagatt

SEQ ID NO: 7975 - DNA, 60 bp, Artificial
  Synthetic oligonucleotide
ggagtgatgttggacggccagttcgagttagcacaggctactgcatgttctccgctatgg

SEQ ID NO: 7976 - DNA, 54 bp, Artificial
  Synthetic oligonucleotide
tacactctaggttatggtggacatgagaaaccacgactagtggagaccctggga

SEQ ID NO: 7977 - DNA, 53 bp, Artificial
  Synthetic oligonucleotide
ccatactttgtgacataggggagtcaaacccaagctatgcagtggaagcgcag

SEQ ID NO: 7978 - DNA, 50 bp, Artificial
  Synthetic oligonucleotide
tgagatgggaggcccgaagcaaagctgaaaggactagcggttagaggaga

SEQ ID NO: 7979 - DNA, 60 bp, Artificial
  Synthetic oligonucleotide
gcattccgtatgagcccggccctagtcagtgtgaacgacaccctatcccgcactcgacag

SEQ ID NO: 7980 - DNA, 60 bp, Artificial
  Synthetic oligonucleotide
tactgtaatggcgtttcacttgtcaacgagagatggtgaacccctcatgatagtggcgaa

SEQ ID NO: 7981 - DNA, 60 bp, Artificial
  Synthetic oligonucleotide
ctcatcccaaaagcatatgcaggccctatttcacagcacaactatcgccagggctatgcc

SEQ ID NO: 7982 - DNA, 60 bp, Artificial
  Synthetic oligonucleotide
gttgcccggagtccatgcacggtcgtgggtctgtgatgtgcgtgtggggctctgcccact

SEQ ID NO: 7983 - DNA, 60 bp, Artificial
  Synthetic oligonucleotide
gtatgggcttgggaggactcaatcgcggtcttcatccttatggcagctaacatctgggcc

SEQ ID NO: 7984 - DNA, 60 bp, Artificial
  Synthetic oligonucleotide
ggtggagtgcaacaggttacacgcggccttgtcaacagctggctgcaacgcggtggttta

SEQ ID NO: 7985 - DNA, 60 bp, Artificial
  Synthetic oligonucleotide
ccagtcaactcctggttgggaaacatcataatctacgcgcccaccatatgggtgcgcatg

SEQ ID NO: 7986 - DNA, 55 bp, Artificial
  Synthetic oligonucleotide
cagtccgacacactccagtcaattcctggctagggaacatcatagtttacgcccc

SEQ ID NO: 7987 - DNA, 54 bp, Artificial
  Synthetic oligonucleotide
tgacccccaactccactacactcctaaccactgcccgaagtgtactggtctcca

SEQ ID NO: 7988 - DNA, 51 bp, Artificial
  Synthetic oligonucleotide
ccatggattaggggacctataggagagggattaaacaattatggcgtagtc

SEQ ID NO: 7989 - DNA, 51 bp, Artificial
  Synthetic oligonucleotide
taccatatgttcgccactccttggacatggagcgtggttccacaattcaca

SEQ ID NO: 7990 - DNA, 55 bp, Artificial
  Synthetic oligonucleotide
tggcgcacacactcataatgatagggtccaacgcctctgacaggatgggaatggg

SEQ ID NO: 7991 - DNA, 60 bp, Artificial
  Synthetic oligonucleotide
gatccttatcgtcatgggactgtggaccatttcggagatgcttggctcacccaggagaac

SEQ ID NO: 7992 - DNA, 53 bp, Artificial
  Synthetic oligonucleotide
gtcttggctccttatcgtcccgaggtaatagaggcactgcacaggttccaact

SEQ ID NO: 7993 - DNA, 60 bp, Artificial
  Synthetic oligonucleotide
cgcccttgttgtacaggcttggggccgtgcaaaatgagatcaccaccacacatccaatca

SEQ ID NO: 7994 - DNA, 60 bp, Artificial
  Synthetic oligonucleotide
gctttctcactccacggttactccccaggcgaactcaatagagtggcgtcgtgcctcaga

SEQ ID NO: 7995 - DNA, 60 bp, Artificial
  Synthetic oligonucleotide
acctcgaatgggacacaagaaagctgtccattgaattctatctcaactgccgtagctcgc

SEQ ID NO: 7996 - DNA, 60 bp, Artificial
  Synthetic oligonucleotide
ctttcaatatgctgaaacgcgagagaaaccgcgtgtcgactgtgcaacagctgacaaaga

SEQ ID NO: 7997 - DNA, 60 bp, Artificial
  Synthetic oligonucleotide
tttacgctacatggagggtgaacacaagcaactggcggctacaataatgcagaaggcata

SEQ ID NO: 7998 - DNA, 60 bp, Artificial
  Synthetic oligonucleotide
gttacatggagggtgaacacaagcaactggcggctacaataatgcagaaggcataccacg

SEQ ID NO: 7999 - DNA, 60 bp, Artificial
  Synthetic oligonucleotide
gctttgactccacagtcactgagggcgatatccgtacggaggaggcaatctaccagtgtt

SEQ ID NO: 8000 - DNA, 60 bp, Artificial
  Synthetic oligonucleotide
ctatagccacagtgtcggtagctttgctaacctggacttatatcagtgactactacaaat

SEQ ID NO: 8001 - DNA, 50 bp, Artificial
  Synthetic oligonucleotide
gactcctatggggttctcttatgatacccgctgctttgactccactgtaa

SEQ ID NO: 8002 - DNA, 60 bp, Artificial
  Synthetic oligonucleotide
ggggttgatgtgttctacaaacccactgagcaggtggacaccctgctctgtgacattggg

SEQ ID NO: 8003 - DNA, 56 bp, Artificial
  Synthetic oligonucleotide
atgtcatattcatggacgggggcgcttgtgacaccttgtgcggctgaagaatccaa

SEQ ID NO: 8004 - DNA, 60 bp, Artificial
  Synthetic oligonucleotide
tccacggggctctaccatgtcaccaatgattgccctaactcgagtattgtgtacgaggcg

SEQ ID NO: 8005 - DNA, 55 bp, Artificial
  Synthetic oligonucleotide
agggtacctgagatctgtgcgagtgtgatatttggtggccattgggggatactac

SEQ ID NO: 8006 - DNA, 55 bp, Artificial
  Synthetic oligonucleotide
cgtcggaaatacagctgaccgactacggagccctcacattggactgctcacctag

SEQ ID NO: 8007 - DNA, 57 bp, Artificial
  Synthetic oligonucleotide
ccgctcactaacaccctgcacttgcggctcctcggacctttacctggtcacgaggca

SEQ ID NO: 8008 - DNA, 60 bp, Artificial
  Synthetic oligonucleotide
tagtgaggccggcacggaggatgtcgtgtgttgctcaatgtcctactcctggacaggcgc

SEQ ID NO: 8009 - DNA, 55 bp, Artificial
  Synthetic oligonucleotide
gggagggagagcggccatttgtggccgctacctcttcaactgggcggtgaagaca

SEQ ID NO: 8010 - DNA, 60 bp, Artificial
  Synthetic oligonucleotide
caatgattgccctaactcgagtattgtgtacgagacggctgatgccatcctacacgcccc

SEQ ID NO: 8011 - DNA, 56 bp, Artificial
  Synthetic oligonucleotide
gagctatatggtacatgtggttgggagccaggtaccttgagttcgaggcactagga

SEQ ID NO: 8012 - DNA, 51 bp, Artificial
  Synthetic oligonucleotide
aagccctcagaaccgtctcggaaagaggaccccacgtgttttagcctcaag

SEQ ID NO: 8013 - DNA, 55 bp, Artificial
  Synthetic oligonucleotide
caccagatgctttgactcaacggtcacggagcgcgacatacgtactgagcaggac

SEQ ID NO: 8014 - DNA, 53 bp, Artificial
  Synthetic oligonucleotide
cacgagccgcctgggaaacagtgcgacacactccagtcaactcctggttggga

SEQ ID NO: 8015 - DNA, 56 bp, Artificial
  Synthetic oligonucleotide
agcgtgcctacgcatggacgggcgaggatagtgcgactcttggagctgggatccta

SEQ ID NO: 8016 - DNA, 60 bp, Artificial
  Synthetic oligonucleotide
tcctactgagctcaacagggtggctggcgctctcagaaagcttgggagccctcccctacg

SEQ ID NO: 8017 - DNA, 60 bp, Artificial
  Synthetic oligonucleotide
ggcgactgggtgccattgtatgatgagctgcccaggagtgctctttgcaccttctatgcg

SEQ ID NO: 8018 - DNA, 60 bp, Artificial
  Synthetic oligonucleotide
tctgtgtactgtggtcatgacactactgcttattctaggactactcaatctaacctgact

SEQ ID NO: 8019 - DNA, 60 bp, Artificial
  Synthetic oligonucleotide
agctgcacgacatggtctactccaccttcttctgctcacactacctgaggaagactgttc

SEQ ID NO: 8020 - DNA, 60 bp, Artificial
  Synthetic oligonucleotide
tcatagctggtgacgattgtcttatcatctatgagaacgacggcactgatccctgtgccc

SEQ ID NO: 8021 - DNA, 60 bp, Artificial
  Synthetic oligonucleotide
ggatgcacgcaccaccaccgtgggacacgcgatgggccataccgtgggcagactcaccgg

SEQ ID NO: 8022 - DNA, 60 bp, Artificial
  Synthetic oligonucleotide
ctcatacatgacaccttgaaaccccacccgtgacagcatgggctggcctctaaccctctg

SEQ ID NO: 8023 - DNA, 60 bp, Artificial
  Synthetic oligonucleotide
ttgacaccttcagagaccactgtccggctacgcgcatacctcaacacgcctgggctccct

SEQ ID NO: 8024 - DNA, 51 bp, Artificial
  Synthetic oligonucleotide
tggcattccacctgactacacgcaacggggagccacacatgattgtcagca

SEQ ID NO: 8025 - DNA, 60 bp, Artificial
  Synthetic oligonucleotide
aatgtcaataaacaagactgacgctcaaagcgccataaacattcccagcgccaacggagc

SEQ ID NO: 8026 - DNA, 60 bp, Artificial
  Synthetic oligonucleotide
gcttacggcttccaatattcacctaatcagagagtggaatatctcctcaaagtgtggcgc

SEQ ID NO: 8027 - DNA, 60 bp, Artificial
  Synthetic oligonucleotide
tggcgccttatctcatatttagctagctggtggactcaagcacccccccccatggaatgg

SEQ ID NO: 8028 - DNA, 56 bp, Artificial
  Synthetic oligonucleotide
ggaggacatcttatacggagaccatgagtgtggcagtctgctccaggacacggccc

SEQ ID NO: 8029 - DNA, 60 bp, Artificial
  Synthetic oligonucleotide
tcaatatgctaaaacgcggtatgccccgcggattgtccttgattggactgaagagggcta

SEQ ID NO: 8030 - DNA, 55 bp, Artificial
  Synthetic oligonucleotide
cgcggtatgccccgcggattgtccttgattggactgaagagggctatgctgagtc

SEQ ID NO: 8031 - DNA, 60 bp, Artificial
  Synthetic oligonucleotide
tccgtagttactgctatctggctaccgtcagcgatctctccaccaaagctgcgtgcccga

SEQ ID NO: 8032 - DNA, 60 bp, Artificial
  Synthetic oligonucleotide
tatgttcgactcgtccgtcctctgtgagtgctatgacgcgggctgcgcttggtatgagct

SEQ ID NO: 8033 - DNA, 60 bp, Artificial
  Synthetic oligonucleotide
atgtgctgttcaaagagcatgattgcactagtgtgattcaagacacagctcactacctcg

SEQ ID NO: 8034 - DNA, 55 bp, Artificial
  Synthetic oligonucleotide
gcactagtgtgattcaagacacagctcactacctcgtagacgggatgaccaactc

SEQ ID NO: 8035 - DNA, 55 bp, Artificial
  Synthetic oligonucleotide
ggtaaggtcatcgataccctaacgtgcgggttcgccgatctcatggggtacattc

SEQ ID NO: 8036 - DNA, 60 bp, Artificial
  Synthetic oligonucleotide
gtgacacattgttgtgtgacataggggagtcatcaccaaatcccacagtggaagcaggac

SEQ ID NO: 8037 - DNA, 52 bp, Artificial
  Synthetic oligonucleotide
gccccccgcctcattgtgttcccccccctggacttccggatagctgaaaagc

SEQ ID NO: 8038 - DNA, 60 bp, Artificial
  Synthetic oligonucleotide
gcatcaacggggtatgctggactgtctaccacggggccggaacgaggaccatcgcatcgc

SEQ ID NO: 8039 - DNA, 59 bp, Artificial
  Synthetic oligonucleotide
ggggtttcatggactatgaagatcctcataggggtggttataacatggataggaatgaa

SEQ ID NO: 8040 - DNA, 60 bp, Artificial
  Synthetic oligonucleotide
tgatgaggactacatgggctctgtgtgaggctttaaccttagcgacagggcccatctcca

SEQ ID NO: 8041 - DNA, 55 bp, Artificial
  Synthetic oligonucleotide
ggggactagccatcgtggtgagatccctgagcggtctaagtcctgagtacaggac

SEQ ID NO: 8042 - DNA, 50 bp, Artificial
  Synthetic oligonucleotide
gtggcgttggggttacagcctgatagggtgctgcagaggcccacgcatag

SEQ ID NO: 8043 - DNA, 60 bp, Artificial
  Synthetic oligonucleotide
tcggctgcgctgtggacacagagcgaatggagctccgctgcggtgagggactagttgttt

SEQ ID NO: 8044 - DNA, 60 bp, Artificial
  Synthetic oligonucleotide
caatcattttgctactgctccccctaatggcatactcagctagtgtgacacgtcagcatg

SEQ ID NO: 8045 - DNA, 60 bp, Artificial
  Synthetic oligonucleotide
cttttgtcaaacaaccagtggagacagaccatgggacagctgtgatgcaggtgaaggtga

SEQ ID NO: 8046 - DNA, 60 bp, Artificial
  Synthetic oligonucleotide
tgtggaagaaacatgtgatgatagggggaagtcagtccgctcaacgacggatagtgggaa

SEQ ID NO: 8047 - DNA, 56 bp, Artificial
  Synthetic oligonucleotide
gtctccgcaaagccgagagaacggttgtggttctcaatagaaagacattcgagaag

SEQ ID NO: 8048 - DNA, 55 bp, Artificial
  Synthetic oligonucleotide
ggggccctcataacaccatgtgggcccgaggaggagaagttgccaatcaaccctc

SEQ ID NO: 8049 - DNA, 60 bp, Artificial
  Synthetic oligonucleotide
aagctaacactacactcaatgcacacagcactttagctgtatgagggtacacccgacgtc

SEQ ID NO: 8050 - DNA, 60 bp, Artificial
  Synthetic oligonucleotide
aagtagacactacactcaatgcacacagcactttagctgtatgagggaacacccgacgtc

SEQ ID NO: 8051 - DNA, 60 bp, Artificial
  Synthetic oligonucleotide
tccaggactgcaccatgctcgtgtgtggcgacgacttggtcgtcatctgtgaaagcgcgg

SEQ ID NO: 8052 - DNA, 55 bp, Artificial
  Synthetic oligonucleotide
ggaattttggctagatggggctcattcaagaagaatggagcgatcaaagtactac

SEQ ID NO: 8053 - DNA, 57 bp, Artificial
  Synthetic oligonucleotide
ggaattttggctagatggagctcattcaagaagaatggagcgatcaaagtgttacgg

SEQ ID NO: 8054 - DNA, 55 bp, Artificial
  Synthetic oligonucleotide
gcggcacgacgaaaagaccctcgtgcaatcgagagtgaatgcacacaacgccgac

SEQ ID NO: 8055 - DNA, 60 bp, Artificial
  Synthetic oligonucleotide
cgataaaccaacactggacgtgcgcatgataaacattgaagccacgcaactggctgaagt

SEQ ID NO: 8056 - DNA, 60 bp, Artificial
  Synthetic oligonucleotide
gtccacttggctctgatcgccgtttttaagattcagccggcattcctagtcatgagcata

SEQ ID NO: 8057 - DNA, 60 bp, Artificial
  Synthetic oligonucleotide
caggccggctcactctttgttctaccaagaggcatgcccttcacagatttggatctgacg

SEQ ID NO: 8058 - DNA, 55 bp, Artificial
  Synthetic oligonucleotide
gagaaaactatgctacctgtgagccccgtccaaggacgttaaaagaagtcaggcc

SEQ ID NO: 8059 - DNA, 60 bp, Artificial
  Synthetic oligonucleotide
gggggcagcgttaccgctaactggctgagtatcattgtggctctaatcggaggctgggag

SEQ ID NO: 8060 - DNA, 60 bp, Artificial
  Synthetic oligonucleotide
cgcgccgactgttgccctgtgacttagcacagggagcgcgccaccccccggtatctggca

SEQ ID NO: 8061 - DNA, 60 bp, Artificial
  Synthetic oligonucleotide
cagtgctttagggaccatcttgatgtatccccggcatccaatcgtgcggtatgttctaat

SEQ ID NO: 8062 - DNA, 60 bp, Artificial
  Synthetic oligonucleotide
tgtggtcagcaggaggtacctggcatcattacacaagagggctttgcccacctcagtaac

SEQ ID NO: 8063 - DNA, 60 bp, Artificial
  Synthetic oligonucleotide
atacagggagaaggataggggcagtgccaattgatctggcaaaagggacatctggcagcc

SEQ ID NO: 8064 - DNA, 60 bp, Artificial
  Synthetic oligonucleotide
tggatgtgtcacgatcactgctgaggggaagccctcaatggacgtgtggcttgattccat

SEQ ID NO: 8065 - DNA, 60 bp, Artificial
  Synthetic oligonucleotide
ttatgtgatgacacgatgacctacaaatgcccccggatcactgagacggaaccagatgac

SEQ ID NO: 8066 - DNA, 51 bp, Artificial
  Synthetic oligonucleotide
taaacaggcgggtgacaactacccttacctagtggcttatcaagccacagt

SEQ ID NO: 8067 - DNA, 57 bp, Artificial
  Synthetic oligonucleotide
ctcatgaggaggggtgacctcccagtttggctagcccataaagtagcctcagaaggg

SEQ ID NO: 8068 - DNA, 55 bp, Artificial
  Synthetic oligonucleotide
caacagggccgtccacgccgatatgggttattggatagaaagcgcactcaatgac

SEQ ID NO: 8069 - DNA, 52 bp, Artificial
  Synthetic oligonucleotide
aggtctctaccccttggcaattccagtcacaatgaccctatggtacatgtgg

SEQ ID NO: 8070 - DNA, 53 bp, Artificial
  Synthetic oligonucleotide
aggacccttacggatggtgttagcattcatcacgttcttgcgagtcctttcca

SEQ ID NO: 8071 - DNA, 57 bp, Artificial
  Synthetic oligonucleotide
acggaccagacacctccgaatgccccaatgaacggagagcatggaattttctcgagg

SEQ ID NO: 8072 - DNA, 54 bp, Artificial
  Synthetic oligonucleotide
actcccggagtcactagaaacactcatgcttgtagctctactgggtgctatgac

SEQ ID NO: 8073 - DNA, 60 bp, Artificial
  Synthetic oligonucleotide
cggagcaaacacctgtattgtgagggctctagatgtgggggtcatgtgcaaagatgatat

SEQ ID NO: 8074 - DNA, 54 bp, Artificial
  Synthetic oligonucleotide
tttgaggccctcgggttcctaaatgaagatcactggatgagccgcgagaactcc

SEQ ID NO: 8075 - DNA, 60 bp, Artificial
  Synthetic oligonucleotide
gtcaatctaccaatgttgtgacttggcccccgaagccagacgagccataaggtcgctcac

SEQ ID NO: 8076 - DNA, 60 bp, Artificial
  Synthetic oligonucleotide
ctcaagctcctacgtcggaaatacagctgaccgactacggagccctcacattggactgct

SEQ ID NO: 8077 - DNA, 60 bp, Artificial
  Synthetic oligonucleotide
tcggaggccgttcgctcgcatgtcgagcgagtacagtgacccgatggcttcggctatggg

SEQ ID NO: 8078 - DNA, 56 bp, Artificial
  Synthetic oligonucleotide
tggaaacatgagggagcacaaaactggaacaacgcggaacggctggttgagtttgg

SEQ ID NO: 8079 - DNA, 51 bp, Artificial
  Synthetic oligonucleotide
ggggtagcaacagtggtgagttcgttggatggcttaagccctgagtacagg

SEQ ID NO: 8080 - DNA, 60 bp, Artificial
  Synthetic oligonucleotide
cagtgatcgactgtaatacatgtgtcacccagacagtcgacttcagcttagaccctacct

SEQ ID NO: 8081 - DNA, 54 bp, Artificial
  Synthetic oligonucleotide
acctgcccctaataggggcgacactccgccatgaatcactcccctgtgaggaac

SEQ ID NO: 8082 - DNA, 60 bp, Artificial
  Synthetic oligonucleotide
tccacacactatggcacaccactaagggagccgctctcatgagtggtgaaggacgtctgg

SEQ ID NO: 8083 - DNA, 55 bp, Artificial
  Synthetic oligonucleotide
actactggggagaaggtgtgggaccgtgggaacgtcacgctcctgtgtgactgcc

SEQ ID NO: 8084 - DNA, 60 bp, Artificial
  Synthetic oligonucleotide
tgtgggaagcaacatgacgcaacgagtcgtgattgccctactggtcttggctgttggtcc

SEQ ID NO: 8085 - DNA, 55 bp, Artificial
  Synthetic oligonucleotide
cgcaacgagtcgtgattgccctactggtcttggctgttggtccggcctactcagc

SEQ ID NO: 8086 - DNA, 60 bp, Artificial
  Synthetic oligonucleotide
agactgcgatggatctatcttgggtgcagcggtgaacggaaaaaagagtgcccatggctc

SEQ ID NO: 8087 - DNA, 60 bp, Artificial
  Synthetic oligonucleotide
aaagcctacatggatgtcataagtcgacgagaccagagaggatccgggcaggtagtgact

SEQ ID NO: 8088 - DNA, 60 bp, Artificial
  Synthetic oligonucleotide
cagacgctctgatgacgggctttaccggcgactttgactcagtgatcgactgtaacacat

SEQ ID NO: 8089 - DNA, 60 bp, Artificial
  Synthetic oligonucleotide
gcactgaggagtcaatttaccaatgttgtgacttggcccccgaagccaggcaggctataa

SEQ ID NO: 8090 - DNA, 52 bp, Artificial
  Synthetic oligonucleotide
gagtggtgatgactgtgtggtgaggccggtggatgacagatttggtagagcc

SEQ ID NO: 8091 - DNA, 55 bp, Artificial
  Synthetic oligonucleotide
gcaaacggagggactagccgtagtggcgagctccctgggtggtctaagtcctgag

SEQ ID NO: 8092 - DNA, 58 bp, Artificial
  Synthetic oligonucleotide
agaactgcaccatgctcgtgtgtggcgacgacttagtcgttatctgtgaaagcgcggg

SEQ ID NO: 8093 - DNA, 60 bp, Artificial
  Synthetic oligonucleotide
cgacgtggcaccacgatgagaaccacccatatagaacctggaactatcacggcagttatg

SEQ ID NO: 8094 - DNA, 55 bp, Artificial
  Synthetic oligonucleotide
ggagccctcctagcgacggccgaaccgtgttagccatacacgtagtaggactagc

SEQ ID NO: 8095 - DNA, 60 bp, Artificial
  Synthetic oligonucleotide
ctctgtgagtgctatgacgcgggctgcgcttggtatgagctcacgcccgccgagaccaca

SEQ ID NO: 8096 - DNA, 60 bp, Artificial
  Synthetic oligonucleotide
gacggtacaggactgcaattgttcaatctatcccggccacgtaacaggtcaccgcatggc

SEQ ID NO: 8097 - DNA, 51 bp, Artificial
  Synthetic oligonucleotide
ggccactaaagctatttatggccctagtagcgttcctccgtttcctaacca

SEQ ID NO: 8098 - DNA, 60 bp, Artificial
  Synthetic oligonucleotide
gacactgtatgcagtggctactacgtttatcacgccaatgctgaggcacagtatagaaaa

SEQ ID NO: 8099 - DNA, 57 bp, Artificial
  Synthetic oligonucleotide
agtccgcaatccactctcaaggaattctacgcatgagatgtattgggtgtccaacgc

SEQ ID NO: 8100 - DNA, 56 bp, Artificial
  Synthetic oligonucleotide
agacaatccatggatggaagacaaaacccccgtggaatcatgggaagacataccat

SEQ ID NO: 8101 - DNA, 60 bp, Artificial
  Synthetic oligonucleotide
agaagtcacgctggactgtgagccaaggagtggactgaacactgaagcgttttacgtcat

SEQ ID NO: 8102 - DNA, 53 bp, Artificial
  Synthetic oligonucleotide
cgacccccgacgtaggtcgcgcaatttgggtaaggtcatcgataccttcacgt

SEQ ID NO: 8103 - DNA, 59 bp, Artificial
  Synthetic oligonucleotide
taccggtgactttgacacagtgatagactgcaacacgtctgtcatacaaacagttgact

SEQ ID NO: 8104 - DNA, 60 bp, Artificial
  Synthetic oligonucleotide
tggctggggcgaccctatcactcattggagccacggacaaaatcagtggcccctgtcatg

SEQ ID NO: 8105 - DNA, 60 bp, Artificial
  Synthetic oligonucleotide
gaatgccccgggacaacagtcgcaattcgggaggattgtgatcacagaggcccatctttg

SEQ ID NO: 8106 - DNA, 60 bp, Artificial
  Synthetic oligonucleotide
tgctgacaaaaccctgggatgtgattccaatggtgacccagttggccatgacagacacaa

SEQ ID NO: 8107 - DNA, 60 bp, Artificial
  Synthetic oligonucleotide
gggtgccgtacttcgtgcgcgctcaagggctcattcgtgcatgcatgctggtgcggaaag

SEQ ID NO: 8108 - DNA, 60 bp, Artificial
  Synthetic oligonucleotide
tactcttggggtcgtctggtgctttgttgttcgcacctcaatcagtcgcatgatgcttgg

SEQ ID NO: 8109 - DNA, 60 bp, Artificial
  Synthetic oligonucleotide
caactgagggagctgctcagtggatgaacaggctcatagcgttcgcctccagaggcaacc

SEQ ID NO: 8110 - DNA, 59 bp, Artificial
  Synthetic oligonucleotide
ggggatcttctgctctgcacaaccagccacacggcacagtgcgccgatataggtggctg

SEQ ID NO: 8111 - DNA, 57 bp, Artificial
  Synthetic oligonucleotide
gtcagaccaattagttttgccaccggatgtcaggtaaacggtgctgtctgtaacctg

SEQ ID NO: 8112 - DNA, 57 bp, Artificial
  Synthetic oligonucleotide
tgacacgatgacctacaaatgcccccggatctctgagacggaaccagatgacgttga

SEQ ID NO: 8113 - DNA, 60 bp, Artificial
  Synthetic oligonucleotide
gtgggaaacagccagacacactccagtcaactcctggttgggaaacatcatagtctacgc

SEQ ID NO: 8114 - DNA, 60 bp, Artificial
  Synthetic oligonucleotide
tgccatctaaggtggccggccatcacatagtggacgacctggtccgaagactcggtgtgg

SEQ ID NO: 8115 - DNA, 60 bp, Artificial
  Synthetic oligonucleotide
ttggaggacagggatagatcagagcttagcccgctgctgctgtctacaacagagtggcag

SEQ ID NO: 8116 - DNA, 52 bp, Artificial
  Synthetic oligonucleotide
gtcgggggtacccgagcttctgcgtcacagatgtgttagcgccctggatgtc

SEQ ID NO: 8117 - DNA, 55 bp, Artificial
  Synthetic oligonucleotide
gggtgtcatctggtgcttcgttgtccgaacttcgataagccgcatgatgctcggg

SEQ ID NO: 8118 - DNA, 51 bp, Artificial
  Synthetic oligonucleotide
actgtgtggtgagaccaattgatgacaggtttgggaaagcgctttactttc

SEQ ID NO: 8119 - DNA, 60 bp, Artificial
  Synthetic oligonucleotide
actagcacctgggtgctagtaggcggagtccttgcagctttggccgcatattgcttgaca

SEQ ID NO: 8120 - DNA, 60 bp, Artificial
  Synthetic oligonucleotide
gggaccacacgtgtgactctggtattggagctggggggatgtgtcaccataacagctgag

SEQ ID NO: 8121 - DNA, 59 bp, Artificial
  Synthetic oligonucleotide
ttcgcagttattgctatttggctaccgtcagcgatctctccaccaaagctgcgtgcccg

SEQ ID NO: 8122 - DNA, 60 bp, Artificial
  Synthetic oligonucleotide
gtgtggcttggagcacagagatcgcactgagctttcgccgctactgctttccaccacgca

SEQ ID NO: 8123 - DNA, 54 bp, Artificial
  Synthetic oligonucleotide
cacacatgagatgtactgggtatccaatgcctccgggaacatagtgtcatcagt

SEQ ID NO: 8124 - DNA, 60 bp, Artificial
  Synthetic oligonucleotide
gttgtggactgtttgggaagggcagtattcacacatgcgccaaatttgagtgcaccaata

SEQ ID NO: 8125 - DNA, 54 bp, Artificial
  Synthetic oligonucleotide
tgcccaaatcaccggaagttcacagcggtatgacgttgagatagactgtgatgg

SEQ ID NO: 8126 - DNA, 53 bp, Artificial
  Synthetic oligonucleotide
taaagagatagtggggatgatggacgcgagtgagaagaccaactacacgtgtt

SEQ ID NO: 8127 - DNA, 53 bp, Artificial
  Synthetic oligonucleotide
tcaaggagatagtgggaatgatggacgcgagtgagaagaccaactacacatgt

SEQ ID NO: 8128 - DNA, 54 bp, Artificial
  Synthetic oligonucleotide
atagactgttggtgcaactctacgtctacatgggtaacttatgggacatgcacc

SEQ ID NO: 8129 - DNA, 60 bp, Artificial
  Synthetic oligonucleotide
cttagagacctgggaagagtgatggttatggtgggcgctaccatgacggatgacataggt

SEQ ID NO: 8130 - DNA, 60 bp, Artificial
  Synthetic oligonucleotide
gctctatgcctggagatttgggcgtgcccccgcgagactgctagccgagtagtgttgggt

SEQ ID NO: 8131 - DNA, 60 bp, Artificial
  Synthetic oligonucleotide
cctgggaggcctcacatggatggacttactacgagccctcatcatgttgggggacactat

SEQ ID NO: 8132 - DNA, 55 bp, Artificial
  Synthetic oligonucleotide
tcatcatggaggactgcagtacaccctctctctgtggtagtagccgagagatgcc

SEQ ID NO: 8133 - DNA, 55 bp, Artificial
  Synthetic oligonucleotide
ccgtcgtgtcactaccactgtggcattgcggggaggggtggtccggagaatggtt

SEQ ID NO: 8134 - DNA, 60 bp, Artificial
  Synthetic oligonucleotide
acgttaagctaagggagttggtagatgaacataagatgaaggcattatgtggcggatcag

SEQ ID NO: 8135 - DNA, 60 bp, Artificial
  Synthetic oligonucleotide
gcagttgggacaagtaatgctcctagtcctctgcgtgacccaagtattgatgatgaggac

SEQ ID NO: 8136 - DNA, 60 bp, Artificial
  Synthetic oligonucleotide
gcttgtgacaccctgtgcggctgaggaatcaaagctgccaattagccccctgagcaactc

SEQ ID NO: 8137 - DNA, 58 bp, Artificial
  Synthetic oligonucleotide
agaagtttatctgtgtgaacttcttgacttagtatcgttgagaggaatcgagagatta

SEQ ID NO: 8138 - DNA, 60 bp, Artificial
  Synthetic oligonucleotide
tggaacaaaaggagtcctacacaccatgtggcatgtgacaagaggagcggctcttagtgt

SEQ ID NO: 8139 - DNA, 55 bp, Artificial
  Synthetic oligonucleotide
agtcctacacaccatgtggcatgtgacaagaggagcggctcttagtgtggagggg

SEQ ID NO: 8140 - DNA, 60 bp, Artificial
  Synthetic oligonucleotide
acacaccatgtggcatgtgacaagaggagcggctctcagtgtggaaggagccgtttcagg

SEQ ID NO: 8141 - DNA, 60 bp, Artificial
  Synthetic oligonucleotide
aatgtgcactatggtgaggcacctcgcggggggtaggtacgtccagatggcgctattagc

SEQ ID NO: 8142 - DNA, 60 bp, Artificial
  Synthetic oligonucleotide
ctaagatttctagccatacccccaacagcaggaattttggctagatggagctcattcaag

SEQ ID NO: 8143 - DNA, 51 bp, Artificial
  Synthetic oligonucleotide
cttagaccccgctgggcagacgcgagagtgtactcagaccatcaggctcta

SEQ ID NO: 8144 - DNA, 60 bp, Artificial
  Synthetic oligonucleotide
tgctcctagtcctctgcgtgactcaagtattaatgatgaggactacatgggctctgtgtg

SEQ ID NO: 8145 - DNA, 55 bp, Artificial
  Synthetic oligonucleotide
tatgaggatacgcccgacgtctatagttggactagggaagacctctaacagcccc

SEQ ID NO: 8146 - DNA, 56 bp, Artificial
  Synthetic oligonucleotide
caccgagaatgacatccgtgttgaggagtcaatttaccaatgttgtgacttggccc

SEQ ID NO: 8147 - DNA, 55 bp, Artificial
  Synthetic oligonucleotide
ctaattgcgttcgcatcgcgaggcaatcacgtatctccaacgcattacgtccctg

SEQ ID NO: 8148 - DNA, 60 bp, Artificial
  Synthetic oligonucleotide
cgagatgccatgtggacgagggcatgcccacggcacaccttaacctatgcgggggttgcg

SEQ ID NO: 8149 - DNA, 60 bp, Artificial
  Synthetic oligonucleotide
gcacaccgcatggctcttgaagaactgcccgacgcattggagaccatcacactcatcgtt

SEQ ID NO: 8150 - DNA, 55 bp, Artificial
  Synthetic oligonucleotide
agggatcgtggaccccactatgctggtgtgtggagacgacctggtcgtcatctca

SEQ ID NO: 8151 - DNA, 60 bp, Artificial
  Synthetic oligonucleotide
aatggggttctcttatgacaccagatgctttgactcaacagtcacggagcgcgatatacg

SEQ ID NO: 8152 - DNA, 60 bp, Artificial
  Synthetic oligonucleotide
gattgtgaaccaaggagtggactgaacactgaagcgttctatgtcatgaccgtgggttcg

SEQ ID NO: 8153 - DNA, 60 bp, Artificial
  Synthetic oligonucleotide
ttcaaaagagctgatgatggccactataggaatagtcctactctcccagagcgcactacc

SEQ ID NO: 8154 - DNA, 55 bp, Artificial
  Synthetic oligonucleotide
cctcaagctcccacgacagaaatacagctgaccgactacggagctcttacattgg

SEQ ID NO: 8155 - DNA, 59 bp, Artificial
  Synthetic oligonucleotide
ctcaccgatccctcccatataacagcagaggcagctgcgaggaggttaggaaggggatc

SEQ ID NO: 8156 - DNA, 52 bp, Artificial
  Synthetic oligonucleotide
aaaaggcgagaagtacgcctttcaatatgctgaaacgcgagagaaaccgcgt

SEQ ID NO: 8157 - DNA, 57 bp, Artificial
  Synthetic oligonucleotide
tgcagttagggcgtccctcatctcccgtggagggagagcggccatttgcggtcggta

SEQ ID NO: 8158 - DNA, 60 bp, Artificial
  Synthetic oligonucleotide
tagtggggctgacacggaggatgtcgtgtgctgctcaatgtcttacacctggacaggcgc

SEQ ID NO: 8159 - DNA, 60 bp, Artificial
  Synthetic oligonucleotide
gtggaaggagtctcaggtggagcatgggtcgatttggtgctagaacatggaggatgtgtc

SEQ ID NO: 8160 - DNA, 60 bp, Artificial
  Synthetic oligonucleotide
ggactctacggaaatggagtagtcactaaatcaggtgattacgtcagtgctataacgcaa

SEQ ID NO: 8161 - DNA, 60 bp, Artificial
  Synthetic oligonucleotide
cagctcctgaggcgactgcaccagtggataagctcggagtgcaccactccatgctctgat

SEQ ID NO: 8162 - DNA, 50 bp, Artificial
  Synthetic oligonucleotide
cagatgcacgcgcatgggacattcgaggcgtagccgacggtcaatctctg

SEQ ID NO: 8163 - DNA, 60 bp, Artificial
  Synthetic oligonucleotide
gactccacgtcacatggcaattactctgagcagattgggaaaaaccaagcggctagattc

SEQ ID NO: 8164 - DNA, 60 bp, Artificial
  Synthetic oligonucleotide
agacaatcaactcgcatatgtcgtgataggcatactcacactggctgcaatagtagcagc

SEQ ID NO: 8165 - DNA, 55 bp, Artificial
  Synthetic oligonucleotide
ttgaggaaccacacgccacaaagcagtctgtgatagcattgggctcacaagaggg

SEQ ID NO: 8166 - DNA, 58 bp, Artificial
  Synthetic oligonucleotide
ggaaacagctagacacactccagttaactcctggctaggcaacattatcatgtatgcg

SEQ ID NO: 8167 - DNA, 60 bp, Artificial
  Synthetic oligonucleotide
ctcggaaaaatgctcgtgagcggcgatgactgtgtggtgaggccaggggatgttaggttc

SEQ ID NO: 8168 - DNA, 60 bp, Artificial
  Synthetic oligonucleotide
gcttggaccccaccttcactataaccacacagactgtccctcaagacgctgtctcacgta

SEQ ID NO: 8169 - DNA, 56 bp, Artificial
  Synthetic oligonucleotide
ggtactgatagggaacttaatcacccacacggacaatgaggtagtggtgtacttct

SEQ ID NO: 8170 - DNA, 60 bp, Artificial
  Synthetic oligonucleotide
ggtgcacaaaatcagcagtctacgtcaggtatggaagatgcaccaagacacgccactcaa

SEQ ID NO: 8171 - DNA, 60 bp, Artificial
  Synthetic oligonucleotide
gaggagtctcgagatgccatgtggacgagggcatgcccacggcacatcttaacccatgcg

SEQ ID NO: 8172 - DNA, 50 bp, Artificial
  Synthetic oligonucleotide
ttcctgcagaaagcgtctagccatggcgttagtatgagtgctgtacagcc

SEQ ID NO: 8173 - DNA, 60 bp, Artificial
  Synthetic oligonucleotide
gattaagccatagcacggtaagagctatgctgcctgtgagccccgtctaaggacgtaaaa

SEQ ID NO: 8174 - DNA, 60 bp, Artificial
  Synthetic oligonucleotide
ctatattgatgggacttgacaagggatggccaatatcgaagatggacataggagttccac

SEQ ID NO: 8175 - DNA, 60 bp, Artificial
  Synthetic oligonucleotide
catggatggacttgctacgagccctcatcatgttgggggacactatgtctggtagaatag

SEQ ID NO: 8176 - DNA, 60 bp, Artificial
  Synthetic oligonucleotide
accacaattctgactcccatgctgagacacaccatagaaaatacgtcggccaacctatct

SEQ ID NO: 8177 - DNA, 60 bp, Artificial
  Synthetic oligonucleotide
tgctgctcaatgtcttattcctggacaggcgcacttgtcaccccgtgcgctgcggaagaa

SEQ ID NO: 8178 - DNA, 55 bp, Artificial
  Synthetic oligonucleotide
cgtggtgacgactgacatctcggaaatgggagccaaccttgacgtgagccgcgtc

SEQ ID NO: 8179 - DNA, 50 bp, Artificial
  Synthetic oligonucleotide
acggggaaccgcgaaattacggtggttagtggaaaggcgtttcctcgagc

SEQ ID NO: 8180 - DNA, 51 bp, Artificial
  Synthetic oligonucleotide
gcctcattgtgttcccccccctggacttccggatagctgaaaagcttattc

SEQ ID NO: 8181 - DNA, 56 bp, Artificial
  Synthetic oligonucleotide
gtggaagtcaaattaccggactatggagaactaacactcgattgtgaacccagatc

SEQ ID NO: 8182 - DNA, 57 bp, Artificial
  Synthetic oligonucleotide
gttgaagtcaaactgccggactatggagaactaacactcgattgtgaacccaggtct

SEQ ID NO: 8183 - DNA, 51 bp, Artificial
  Synthetic oligonucleotide
cccccagcgggcgtatgcttggtcgggtgaagacagtgccaccctcggcgc

SEQ ID NO: 8184 - DNA, 60 bp, Artificial
  Synthetic oligonucleotide
cccgaattcaagcatagtttatgaggccgaccatcacatcttgcaccttccaggttgcgt

SEQ ID NO: 8185 - DNA, 55 bp, Artificial
  Synthetic oligonucleotide
ccgcgagatcactagccgagtagtgttgggtcgcgaaaggccttgtggtactgcc

SEQ ID NO: 8186 - DNA, 60 bp, Artificial
  Synthetic oligonucleotide
ctcattgacaccttgcacctgcggctcctcggacctttacctggtcacgaggcacgccga

SEQ ID NO: 8187 - DNA, 60 bp, Artificial
  Synthetic oligonucleotide
acaccatagggacgacacatttccagagagccctgattttcatcctactgacagctgtcg

SEQ ID NO: 8188 - DNA, 55 bp, Artificial
  Synthetic oligonucleotide
cgacacatttccagagagccctgattttcatcctactgacagctgtcgctccctc

SEQ ID NO: 8189 - DNA, 60 bp, Artificial
  Synthetic oligonucleotide
atgaaccgtctaattgcgttcgcatcgcgaggcaatcacgtgtctcccacgcattatgtc

SEQ ID NO: 8190 - DNA, 55 bp, Artificial
  Synthetic oligonucleotide
ttttgtggactgtttaccacggagctggcaacaagactctagccggcttacgggg

SEQ ID NO: 8191 - DNA, 60 bp, Artificial
  Synthetic oligonucleotide
tccctggcagccatagctaaccaggcagtggtcctgatgggtttagacaaaggatggcca

SEQ ID NO: 8192 - DNA, 60 bp, Artificial
  Synthetic oligonucleotide
tagttagcatcctactaagttcactcctcaaaaatgatgtgccgctagccggcccactaa

SEQ ID NO: 8193 - DNA, 53 bp, Artificial
  Synthetic oligonucleotide
ctgctgtgccccgcgggacacgccgtaggcatattcagagccgcggtgtgcac

SEQ ID NO: 8194 - DNA, 55 bp, Artificial
  Synthetic oligonucleotide
cggagctggcaacaagactctagccggctcacggggtccggtcacacagatgtac

SEQ ID NO: 8195 - DNA, 55 bp, Artificial
  Synthetic oligonucleotide
gggctgacacagaggatgtcgtgtgctgctcaatgtcttattcctggacaggtgc

SEQ ID NO: 8196 - DNA, 57 bp, Artificial
  Synthetic oligonucleotide
ggctacctactcagtcactccactggacttaccagctatcattgaaagactccatgg

SEQ ID NO: 8197 - DNA, 55 bp, Artificial
  Synthetic oligonucleotide
ccgagactacagttaggctgcgagcgtacatgaacaccccgggccttcccgtgtg

SEQ ID NO: 8198 - DNA, 60 bp, Artificial
  Synthetic oligonucleotide
tagccagatccgtgattgagctcacataccgccacaaggttgtgaaggtaatgcgccctg

SEQ ID NO: 8199 - DNA, 60 bp, Artificial
  Synthetic oligonucleotide
cacgcgtgccatactttgtcagagctcacgctctgctgaggatgtgcaccatggtgaggc

SEQ ID NO: 8200 - DNA, 60 bp, Artificial
  Synthetic oligonucleotide
cgtggactctatcgagcgagccaagagggctgctcaagcctgcctaagcatgggttacac

SEQ ID NO: 8201 - DNA, 60 bp, Artificial
  Synthetic oligonucleotide
cctactttctgtaggggtaggcatcttcctgctgcctgcccgataggcaggctaacactc

SEQ ID NO: 8202 - DNA, 60 bp, Artificial
  Synthetic oligonucleotide
atacccccaacagcaggaattttggctagatggggctcattcaagaagaatggagcgatc

SEQ ID NO: 8203 - DNA, 58 bp, Artificial
  Synthetic oligonucleotide
ggtgtgcgcgcgactaggaagacttccgagcgatcacaacctcgtggaaggcgacaac

SEQ ID NO: 8204 - DNA, 53 bp, Artificial
  Synthetic oligonucleotide
acctgcctcttacgaggcgacactccaccatggatcactcccctgtgaggaac

SEQ ID NO: 8205 - DNA, 60 bp, Artificial
  Synthetic oligonucleotide
ggactccattgagcgtgctaagaagagtgctcaagcctgcctaagcatgggttacactta

SEQ ID NO: 8206 - DNA, 55 bp, Artificial
  Synthetic oligonucleotide
tcgaagaagaccccttgcgccatctgtgtggacgccacgtgcttcgacagtagca

SEQ ID NO: 8207 - DNA, 60 bp, Artificial
  Synthetic oligonucleotide
tgtggcgggcctatgtacaactcaagaggccagtcatgcggctaccgcaggtgtcgtgct

SEQ ID NO: 8208 - DNA, 60 bp, Artificial
  Synthetic oligonucleotide
ggtgggagtcgtgacactgtacctgggagctatggtgcaggctgatagtggttgcgtcgt

SEQ ID NO: 8209 - DNA, 59 bp, Artificial
  Synthetic oligonucleotide
cagatgctaaggggggtctcggtggtcatatgtgatgagtgccacagtcatgactcaac

SEQ ID NO: 8210 - DNA, 60 bp, Artificial
  Synthetic oligonucleotide
cggtggcccctctcatgcccccagtatgtctatgggtctgtttcagtcacttgcgtgtgg

SEQ ID NO: 8211 - DNA, 57 bp, Artificial
  Synthetic oligonucleotide
cctttcatgcccccagtatgtctatgggtctgtttcagtcacttgcgtgtggggttc

SEQ ID NO: 8212 - DNA, 60 bp, Artificial
  Synthetic oligonucleotide
actctctcatacgccaccacaatctggtgtatgccaccacctcacgtagtgctcccctcc

SEQ ID NO: 8213 - DNA, 55 bp, Artificial
  Synthetic oligonucleotide
tatggggggcacacgaatgaagacgactcgaacttcgcccattggactgaggcac

SEQ ID NO: 8214 - DNA, 60 bp, Artificial
  Synthetic oligonucleotide
cccttcctctcgtgccagaggggttacaggggagagtggcgtggagatggcgtgatgcac

SEQ ID NO: 8215 - DNA, 59 bp, Artificial
  Synthetic oligonucleotide
gcttgacacaccccatcacaaaatacctcatggcatgcatgtcagccgatctggaagta

SEQ ID NO: 8216 - DNA, 60 bp, Artificial
  Synthetic oligonucleotide
tcctgagtacaggacagtcgtcagtagttcgacgtgagcactagcccacctcgagatgct

SEQ ID NO: 8217 - DNA, 55 bp, Artificial
  Synthetic oligonucleotide
cgcctaggtgcatagttgactacccatacaggctttggcactacccctgcaccgt

SEQ ID NO: 8218 - DNA, 52 bp, Artificial
  Synthetic oligonucleotide
agaagcctgcacggctgatagtctaccccgaccttggagtccgcgtctgcga

SEQ ID NO: 8219 - DNA, 60 bp, Artificial
  Synthetic oligonucleotide
caatgattgccctaactcgagtattgtgtacgaggcgcccgatgccatcctgcacgctcc

SEQ ID NO: 8220 - DNA, 55 bp, Artificial
  Synthetic oligonucleotide
gggtaggtacgtccagatggcgctattagcccttggtaggtggaccggcacttac

SEQ ID NO: 8221 - DNA, 59 bp, Artificial
  Synthetic oligonucleotide
tcgattaatgtcagctgccatcaaggatagcaaagcagtccatgctgacatggggtact

SEQ ID NO: 8222 - DNA, 60 bp, Artificial
  Synthetic oligonucleotide
cagctcctgaggcgactgcaccagtggataagctcggagtgtaccactccatgcagtggt

SEQ ID NO: 8223 - DNA, 55 bp, Artificial
  Synthetic oligonucleotide
ctttcgcgggctgcgtgggagacagctagacacactccagtcaactcctggctag

SEQ ID NO: 8224 - DNA, 60 bp, Artificial
  Synthetic oligonucleotide
gccacacatagatgtcatcatggaggactgcagtacaccctctctctgtggtagtagccg

SEQ ID NO: 8225 - DNA, 60 bp, Artificial
  Synthetic oligonucleotide
agctacaggcctcaccactcagtggtacgaatactcggatgggatgcggctgcaggactc

SEQ ID NO: 8226 - DNA, 60 bp, Artificial
  Synthetic oligonucleotide
ggctgaaggcctcaccactcagtggtatgaatactcggatgggatgcggctgcaggactc

SEQ ID NO: 8227 - DNA, 55 bp, Artificial
  Synthetic oligonucleotide
ggatacggctgtcacctaagatgcccttcatagtgacgggcctgaagagaatggc

SEQ ID NO: 8228 - DNA, 60 bp, Artificial
  Synthetic oligonucleotide
gacaagggatggccaatatcgaagatggacataggagttccacttctcgccttagggtgc

SEQ ID NO: 8229 - DNA, 55 bp, Artificial
  Synthetic oligonucleotide
gctgacgcggaggatgtcgtgtgctgctcaatgtcttattcatggacaggcgcgc

SEQ ID NO: 8230 - DNA, 50 bp, Artificial
  Synthetic oligonucleotide
ccaagagacactccataaagtacttgacttcgacatgtacggagtcactt

SEQ ID NO: 8231 - DNA, 60 bp, Artificial
  Synthetic oligonucleotide
agacagcttctggaatcaacatgtgcacactcatagccatggacttgggagagatgtgtg

SEQ ID NO: 8232 - DNA, 60 bp, Artificial
  Synthetic oligonucleotide
tatcacagcgtgtcttatgcccgaccccgctatttgctcctgtgcctactcctactttcc

SEQ ID NO: 8233 - DNA, 60 bp, Artificial
  Synthetic oligonucleotide
tctaccatatcaccaatgactgcccgaattcaagcatagtttatgaggccgaccaccaca

SEQ ID NO: 8234 - DNA, 60 bp, Artificial
  Synthetic oligonucleotide
acccgaggagagcgttgtgacttggaggacagggatagatcagagcttagcccgctattg

SEQ ID NO: 8235 - DNA, 60 bp, Artificial
  Synthetic oligonucleotide
acgttgatggagtttgaggaaccacacgccacgaagcagtctgtgatagcattgggctca

SEQ ID NO: 8236 - DNA, 60 bp, Artificial
  Synthetic oligonucleotide
ggtcatttgtgatgagtgccacagtcatgactcaaccgtgtttctcgggattagacgagt

SEQ ID NO: 8237 - DNA, 55 bp, Artificial
  Synthetic oligonucleotide
gaggagaccccgcgtaaggaagcgcacggcccaacttggctgaagctgtaagcca

SEQ ID NO: 8238 - DNA, 60 bp, Artificial
  Synthetic oligonucleotide
tagagaagttcttcttctcacggttggattgagtctggtggcatctgtagaactaccaaa

SEQ ID NO: 8239 - DNA, 55 bp, Artificial
  Synthetic oligonucleotide
acggttggattgagtctggtggcatctgtagaactaccaaattccctagacgagc

SEQ ID NO: 8240 - DNA, 55 bp, Artificial
  Synthetic oligonucleotide
gcccgccccctgatgggggcgacactccgccatgaatcactcccctgtgaggaac

SEQ ID NO: 8241 - DNA, 55 bp, Artificial
  Synthetic oligonucleotide
tagaggagacccctccctagacataacgcagcagcggggcccaacaccaggggaa

SEQ ID NO: 8242 - DNA, 60 bp, Artificial
  Synthetic oligonucleotide
ggggccgacaaggaggatgtcgtgtgctgctcaatgtcttattcctggacaggcgcactc

SEQ ID NO: 8243 - DNA, 60 bp, Artificial
  Synthetic oligonucleotide
tgtggagcaatggagtgctggaaagtcagatgctcattccaagatcatatgcaggccctt

SEQ ID NO: 8244 - DNA, 57 bp, Artificial
  Synthetic oligonucleotide
ggcacacgaatgattatgaccacgacagccaattggctgtgggctctcctcgggaag

SEQ ID NO: 8245 - DNA, 60 bp, Artificial
  Synthetic oligonucleotide
cagctggtgcttatggtggcttcagtatttcctgaccagagcagaagcgctattgcacat

SEQ ID NO: 8246 - DNA, 55 bp, Artificial
  Synthetic oligonucleotide
cgtgaggatacaccgttacgcgccaccttgcaagcccttgctcagggacgaagtg

SEQ ID NO: 8247 - DNA, 60 bp, Artificial
  Synthetic oligonucleotide
ggaggaccaggacatgaggagcctatacctatgtcaacatacgggtggaatctagtgcga

SEQ ID NO: 8248 - DNA, 60 bp, Artificial
  Synthetic oligonucleotide
gctatggcactgtcacgatggagtgctctccgagaacgggcctcgacttcaatgagatgg

SEQ ID NO: 8249 - DNA, 57 bp, Artificial
  Synthetic oligonucleotide
tggcgggaccaacttcgtttcaagactagtggcagccttgattgaagttaattgggc

SEQ ID NO: 8250 - DNA, 52 bp, Artificial
  Synthetic oligonucleotide
gaaatcactggacatgtcaaaaacgggacgatgaggatcgtcggtcctaaga

SEQ ID NO: 8251 - DNA, 51 bp, Artificial
  Synthetic oligonucleotide
cctgtcccccccctatatgggggtggttcatcaattggattttacagccca

SEQ ID NO: 8252 - DNA, 55 bp, Artificial
  Synthetic oligonucleotide
tttgtgagggctcacgccctactacgagtgtgcaccctggtgagacacctcgcag

SEQ ID NO: 8253 - DNA, 60 bp, Artificial
  Synthetic oligonucleotide
acgctgggagagaccagagatcctgctgtctcctcagcatcattccaggcacagaacgcc

SEQ ID NO: 8254 - DNA, 60 bp, Artificial
  Synthetic oligonucleotide
accagtgttgtgacttggcccccgaggctagacaggccataaggtcgctcacagagcggc

SEQ ID NO: 8255 - DNA, 60 bp, Artificial
  Synthetic oligonucleotide
cggagggaaagactggtgttggactcctgctcatggctctcatgacacagcaggacctcg

SEQ ID NO: 8256 - DNA, 60 bp, Artificial
  Synthetic oligonucleotide
gaaagactggtgttggactcctgctcatggctctcatgacacagcaagacctggcgattg

SEQ ID NO: 8257 - DNA, 55 bp, Artificial
  Synthetic oligonucleotide
ggtgttggactcctgctcatggctctcatgacacagcaggacctcgcgatcgcac

SEQ ID NO: 8258 - DNA, 60 bp, Artificial
  Synthetic oligonucleotide
ttgcttgcaactggacgcggggcgagcgttgtgatctggacgacagggacaggtccgagc

SEQ ID NO: 8259 - DNA, 56 bp, Artificial
  Synthetic oligonucleotide
atggggttttcatatgacacccgctgctttgactccactgtgaccgaaagagacat

SEQ ID NO: 8260 - DNA, 50 bp, Artificial
  Synthetic oligonucleotide
caaaggtgtcctacacacgatgtggcatgtgacgagaggggcggcgttgt

SEQ ID NO: 8261 - DNA, 60 bp, Artificial
  Synthetic oligonucleotide
gggtgaacacaggcaactggcggctacaataatgcagaaggcataccacgctaaagtggt

SEQ ID NO: 8262 - DNA, 60 bp, Artificial
  Synthetic oligonucleotide
ggttaccttaacgcaccccgtgacgaaatacatcgccacgtgcatgcaagctgacctcga

SEQ ID NO: 8263 - DNA, 60 bp, Artificial
  Synthetic oligonucleotide
ggatactgagtagacggtgctgcctgcgtctcagttccaggaggactgggttaacaaatc

SEQ ID NO: 8264 - DNA, 55 bp, Artificial
  Synthetic oligonucleotide
gacataggggagtcatcaccaaatcccacagtggaagcaggacgaacactcagag

SEQ ID NO: 8265 - DNA, 60 bp, Artificial
  Synthetic oligonucleotide
cgtgactcaagtattaatgatgaggactacatgggctctgtgtgaggctctaaccttagc

SEQ ID NO: 8266 - DNA, 60 bp, Artificial
  Synthetic oligonucleotide
attgtgagggctatggacgtgggatacctttgtgaggatactatcacttatgaatgtccg

SEQ ID NO: 8267 - DNA, 60 bp, Artificial
  Synthetic oligonucleotide
ttttcactgcacacatactctccccacgaactctcacgggtggcagcgactctcagaaaa

SEQ ID NO: 8268 - DNA, 50 bp, Artificial
  Synthetic oligonucleotide
gagggcgtcttcacggggttgacccatatagacgcccacttcctatctca

SEQ ID NO: 8269 - DNA, 60 bp, Artificial
  Synthetic oligonucleotide
ggtgtgcgcgcgactcggaagacttcggagcggtcacaacctcgtggcaggcgtcagcct

SEQ ID NO: 8270 - DNA, 60 bp, Artificial
  Synthetic oligonucleotide
ttcacgtagcacctcactgtctgtgtcgctagtattggtgggagtcgtgacactgtacct

SEQ ID NO: 8271 - DNA, 60 bp, Artificial
  Synthetic oligonucleotide
ccgtgctcttgggattagctctcacatccactggatggttctcgcccaccactatcgcgg

SEQ ID NO: 8272 - DNA, 55 bp, Artificial
  Synthetic oligonucleotide
cctcctatacccctggcatcccatcacacggtgggtcatcatccctcacgtgcta

SEQ ID NO: 8273 - DNA, 51 bp, Artificial
  Synthetic oligonucleotide
ccccttggggttctcatatgacacccgctgctttgactcaactgtcactga

SEQ ID NO: 8274 - DNA, 60 bp, Artificial
  Synthetic oligonucleotide
tggcgtcgctagagctctggcgcatggcgtcagggccctagaggacgggattaactatgc

SEQ ID NO: 8275 - DNA, 60 bp, Artificial
  Synthetic oligonucleotide
cataccggtatgtcaccccaggggagagaccatcaggcatgttcgacacttcagtactct

SEQ ID NO: 8276 - DNA, 56 bp, Artificial
  Synthetic oligonucleotide
cctggctgaagctgtaggtcaggggaaggactagaggttagtggagaccccgtgcc

SEQ ID NO: 8277 - DNA, 60 bp, Artificial
  Synthetic oligonucleotide
gaggcgactacaccaatggataagctcggagtgtaccactccatgctccggctcttggct

SEQ ID NO: 8278 - DNA, 51 bp, Artificial
  Synthetic oligonucleotide
ctggggacgtgttaaatgggcaactcaaagatccagtttactcaaccaagc

SEQ ID NO: 8279 - DNA, 60 bp, Artificial
  Synthetic oligonucleotide
agttcactcctcaaaaatgatgtgccgctagctgggccactaatagctggaggcatgcta

SEQ ID NO: 8280 - DNA, 58 bp, Artificial
  Synthetic oligonucleotide
aggactgttaggccacatgctgccatgggctggggatctaaggtgtcggtcaaggact

SEQ ID NO: 8281 - DNA, 56 bp, Artificial
  Synthetic oligonucleotide
aggagcaatgtacgcagatgacactgctggttgggacacaaggatcacatctgagg

SEQ ID NO: 8282 - DNA, 56 bp, Artificial
  Synthetic oligonucleotide
gtaatcgactgtaacacatgtgtcacccagacagtcgatttcagcttggaccctac

SEQ ID NO: 8283 - DNA, 60 bp, Artificial
  Synthetic oligonucleotide
cccatggctctccaacattttggatgggaagtcatgaagtaaatgggacatggatgatcc

SEQ ID NO: 8284 - DNA, 54 bp, Artificial
  Synthetic oligonucleotide
tatgtcaagaccacctggagttctgggaagcggtctttacaggtctcacacaca

SEQ ID NO: 8285 - DNA, 59 bp, Artificial
  Synthetic oligonucleotide
tggagcatggagtcttgagagccggtggaggggtgagaccgttcaggtgcacgcgtttc

SEQ ID NO: 8286 - DNA, 53 bp, Artificial
  Synthetic oligonucleotide
cctactcctgctcgctgcaggggtaggcatctacctcctccccaaccgatgaa

SEQ ID NO: 8287 - DNA, 60 bp, Artificial
  Synthetic oligonucleotide
accagtggatgaacaggctaatagcctttgcatcaagaggcaaccacgtgtccccgacgc

SEQ ID NO: 8288 - DNA, 56 bp, Artificial
  Synthetic oligonucleotide
gcacacgacgggactggcaaaagggtatactacctgacccgtgaccctgagactcc

SEQ ID NO: 8289 - DNA, 55 bp, Artificial
  Synthetic oligonucleotide
aacacctcaagctcctacgtcggaaatacagttgacagactacggaacccttaca

SEQ ID NO: 8290 - DNA, 59 bp, Artificial
  Synthetic oligonucleotide
cttcatacggttacttctgtcagatgccacaacctaagttgcgagccgcaatggttgag

SEQ ID NO: 8291 - DNA, 52 bp, Artificial
  Synthetic oligonucleotide
cctgagagtcttcacggaggctatgaccaggtactccgccccccccggcgat

SEQ ID NO: 8292 - DNA, 60 bp, Artificial
  Synthetic oligonucleotide
gtgacccagctcctgaggcgactgcaccagtggataagctcggagtctaccactccatgc

SEQ ID NO: 8293 - DNA, 55 bp, Artificial
  Synthetic oligonucleotide
catcatcgtggccctccacggaccagcagcgttgagggttaccgcagacacaacc

SEQ ID NO: 8294 - DNA, 60 bp, Artificial
  Synthetic oligonucleotide
tcattatgtccaaatggccttcgtgaagctggccgcactgacaggtacgtacgtttatga

SEQ ID NO: 8295 - DNA, 60 bp, Artificial
  Synthetic oligonucleotide
gtgtgctgctccatgtcatactcctggaccggggctctaataactccctgtagccccgaa

SEQ ID NO: 8296 - DNA, 60 bp, Artificial
  Synthetic oligonucleotide
cctcactgtgacccagctcctgaggcgactgcaccagtggataagctcggagactaccac

SEQ ID NO: 8297 - DNA, 60 bp, Artificial
  Synthetic oligonucleotide
gaccccccgcaaacaaaaacagcatattgacgctgggagagaccagagatcctgctgtct

SEQ ID NO: 8298 - DNA, 55 bp, Artificial
  Synthetic oligonucleotide
tccctcactggcctatggcccttctgcctactgctcctagcactgccccaacagg

SEQ ID NO: 8299 - DNA, 60 bp, Artificial
  Synthetic oligonucleotide
acaaaagccacgagatatctggtgaagacagaatcatggatactgagaaacccgggctat

SEQ ID NO: 8300 - DNA, 60 bp, Artificial
  Synthetic oligonucleotide
cacgagatatctggtgaagacagaatcatggatactgagaaacccgggctacgccctcgt

SEQ ID NO: 8301 - DNA, 55 bp, Artificial
  Synthetic oligonucleotide
tcccgctcattgacaccatgcacctgcggctcctcggacctttacctggtcacga

SEQ ID NO: 8302 - DNA, 60 bp, Artificial
  Synthetic oligonucleotide
cactggcgactttgactcagtgatcgactgtaatacatgtgtcacccagacagtcgattt

SEQ ID NO: 8303 - DNA, 60 bp, Artificial
  Synthetic oligonucleotide
cgtccgtcctctgtgagtgctatgacgcgggctgcgcttggtatgagctcacgcccgccg

SEQ ID NO: 8304 - DNA, 60 bp, Artificial
  Synthetic oligonucleotide
gagggtgctaaccagtggatgaacaggctaatagcctttgcatcaagaggcaaccatgtg

SEQ ID NO: 8305 - DNA, 55 bp, Artificial
  Synthetic oligonucleotide
gtcagtagttcgacgtgagcagaagcccacctcgagatgctatgtggacgagggc

SEQ ID NO: 8306 - DNA, 60 bp, Artificial
  Synthetic oligonucleotide
tgagcagaagcccacctcgagatgctatgtggacgagggcatgcccaagacgcaccttaa

SEQ ID NO: 8307 - DNA, 59 bp, Artificial
  Synthetic oligonucleotide
cgtgggagacagctagacacactccagtcaattcctggctaggcaacataatcatgttt

SEQ ID NO: 8308 - DNA, 55 bp, Artificial
  Synthetic oligonucleotide
tagaggagaccctcccaagacacaacgcagcagcggggcccaacaccagggaaag

SEQ ID NO: 8309 - DNA, 60 bp, Artificial
  Synthetic oligonucleotide
cccaagaggatgcggcgagcctacgagtcttcacggaggctatgactaggtactctgccc

SEQ ID NO: 8310 - DNA, 55 bp, Artificial
  Synthetic oligonucleotide
caggggtgtatgggctggcacgggagtcatgactactcggtgtccatgcggagca

SEQ ID NO: 8311 - DNA, 54 bp, Artificial
  Synthetic oligonucleotide
gtccacgccgatatgggttattggatagaaagcgcactcaatgacacatggaag

SEQ ID NO: 8312 - DNA, 60 bp, Artificial
  Synthetic oligonucleotide
ccccagccatcagagctgagcacactgggcgagaaatcgtggatttaatgtgtcatgcca

SEQ ID NO: 8313 - DNA, 60 bp, Artificial
  Synthetic oligonucleotide
cagctatagctaaccaggcagtggtcctgatgggtttagacaaaggatggccgatatcga

SEQ ID NO: 8314 - DNA, 59 bp, Artificial
  Synthetic oligonucleotide
ccgatctcagcgacgggtcttggtctaccgtgagcgaagaggctagtgaggacgttgtc

SEQ ID NO: 8315 - DNA, 60 bp, Artificial
  Synthetic oligonucleotide
cccttgcacgggctgcgtgggagacagctagacacactccagttaattcctggctaggca

SEQ ID NO: 8316 - DNA, 55 bp, Artificial
  Synthetic oligonucleotide
atccaccctcaatcgacgctaaagctcccacacaagagaggggaacgcaatgtcc

SEQ ID NO: 8317 - DNA, 54 bp, Artificial
  Synthetic oligonucleotide
gatctgggagagatgtgtgatgacacggtcacttacaaatgcccccacattacc

SEQ ID NO: 8318 - DNA, 50 bp, Artificial
  Synthetic oligonucleotide
gagtcctcccggagctcattcgccaatgcattgatagacgcctaaggaca

SEQ ID NO: 8319 - DNA, 58 bp, Artificial
  Synthetic oligonucleotide
cggttagtagtggggctgacgaagaggatgtcgtgtgctgctcaatgtcttattcctg

SEQ ID NO: 8320 - DNA, 59 bp, Artificial
  Synthetic oligonucleotide
ccagtggataagctcggagtgcaccactccatgctccggttcctggctaagggacgtct

SEQ ID NO: 8321 - DNA, 54 bp, Artificial
  Synthetic oligonucleotide
ctctttcgtgacattgatcacagggaacatgtcctttcgagatttggggagagt

SEQ ID NO: 8322 - DNA, 60 bp, Artificial
  Synthetic oligonucleotide
ataccccgggactaatccacagagggcaagcctgcacgaagccatacaaggtgcagatga

SEQ ID NO: 8323 - DNA, 55 bp, Artificial
  Synthetic oligonucleotide
gccacccaagaagtgctgaaacgcagatggactgggaagttgaccctgacctcac

SEQ ID NO: 8324 - DNA, 58 bp, Artificial
  Synthetic oligonucleotide
acttggtccatacatgctagtcatgaatggatgacgacggaagacatgttagcagttt

SEQ ID NO: 8325 - DNA, 52 bp, Artificial
  Synthetic oligonucleotide
gtgagtatgatcctaggtctcgcaaacctggtgttgtacttccgttggatgg

SEQ ID NO: 8326 - DNA, 55 bp, Artificial
  Synthetic oligonucleotide
tatcgagtaattacatattagagctcctgtataagttccgtgacagtatcagatc

SEQ ID NO: 8327 - DNA, 60 bp, Artificial
  Synthetic oligonucleotide
agtggccgggggcttgctgatagcgtgctacgtcataactggcacgtcagcagacctcac

SEQ ID NO: 8328 - DNA, 57 bp, Artificial
  Synthetic oligonucleotide
gggccagcccccgattgggggcgacactccaccatagatcactcccctgtgaggaac

SEQ ID NO: 8329 - DNA, 60 bp, Artificial
  Synthetic oligonucleotide
tccgtgtcgaggagtcaatttaccaatgttgtgacttagctcccgaagccagacaagtca

SEQ ID NO: 8330 - DNA, 51 bp, Artificial
  Synthetic oligonucleotide
cctgctcactgcaggggtaggcatctacctcctccccaaccggtgagttgt

SEQ ID NO: 8331 - DNA, 56 bp, Artificial
  Synthetic oligonucleotide
aatcaactaacacggcaggaattcatggaataccggaaggacggtatcatagaggt

SEQ ID NO: 8332 - DNA, 54 bp, Artificial
  Synthetic oligonucleotide
tacattccgctcgtcggcgcccccctagggggcgttgccagggccctggcacat

SEQ ID NO: 8333 - DNA, 60 bp, Artificial
  Synthetic oligonucleotide
cggcatatgacagtacaggactgcaattgttcaatctatcctggccacgtatcaggtcac

SEQ ID NO: 8334 - DNA, 60 bp, Artificial
  Synthetic oligonucleotide
gagacagctaaacacactccaatcaactcctggctaggcaacataatcatgtttgccccc

SEQ ID NO: 8335 - DNA, 60 bp, Artificial
  Synthetic oligonucleotide
tttcagcagttgggttgatgtttgccattgtgggaggtctagccgagttggacatcgaat

SEQ ID NO: 8336 - DNA, 60 bp, Artificial
  Synthetic oligonucleotide
tagccatggacttgggagagatgtgtgatgacacggtcacttacaaatgcccccacatca

SEQ ID NO: 8337 - DNA, 55 bp, Artificial
  Synthetic oligonucleotide
ggattcggaattttcacgacaaacatatggctgaaattgcgtgactcctacaccc

SEQ ID NO: 8338 - DNA, 53 bp, Artificial
  Synthetic oligonucleotide
ctccagtcaattcctggctaggcaacataatcatgtttgcccccacgctatgg

SEQ ID NO: 8339 - DNA, 60 bp, Artificial
  Synthetic oligonucleotide
ttgtgacttggaggacagggatagatcagagcttagcccgctgctgctgtctacaacaga

SEQ ID NO: 8340 - DNA, 55 bp, Artificial
  Synthetic oligonucleotide
tgcccgcccctaaatggggcgacactccgccatgaatcactcccctgtgaggaac

SEQ ID NO: 8341 - DNA, 60 bp, Artificial
  Synthetic oligonucleotide
gtatcacatctacgtctgcatagatgggtgcgtcctcctgaagcgagcgagtaggggtca

SEQ ID NO: 8342 - DNA, 60 bp, Artificial
  Synthetic oligonucleotide
ggtaagtgtatgctcaacaatgagagtgggtacaggtacgtagatgacaccccttgtgac

SEQ ID NO: 8343 - DNA, 55 bp, Artificial
  Synthetic oligonucleotide
gcgtgcgacctcacacctgcccactctgcccgttccaagtttggatacggtgcga

SEQ ID NO: 8344 - DNA, 54 bp, Artificial
  Synthetic oligonucleotide
gttttacatcccaggcgccggtgtcactctgttagggaaacattatgaagagat

SEQ ID NO: 8345 - DNA, 55 bp, Artificial
  Synthetic oligonucleotide
gcatgcgacctcacgccagctcactctgcccgttccaagtttggatacggtgcga

SEQ ID NO: 8346 - DNA, 52 bp, Artificial
  Synthetic oligonucleotide
aaccattgcggtggctagcggcttgctctgggtagcagaacttcaacctcag

SEQ ID NO: 8347 - DNA, 60 bp, Artificial
  Synthetic oligonucleotide
tgtcacaacacaactacagaccaggctattatacacaaacagcaggaccttggcatctag

SEQ ID NO: 8348 - DNA, 55 bp, Artificial
  Synthetic oligonucleotide
actacagaccaggctattatacacaaacagcaggaccttggcatctaggtaagct

SEQ ID NO: 8349 - DNA, 60 bp, Artificial
  Synthetic oligonucleotide
actgacccccactgtggcagcgccctacgctaatgctccgcttgactccatgcggcgtca

SEQ ID NO: 8350 - DNA, 55 bp, Artificial
  Synthetic oligonucleotide
gctatgacgaggtactcagcgccccccggagacgcccctcaaccagcttatgacc

SEQ ID NO: 8351 - DNA, 55 bp, Artificial
  Synthetic oligonucleotide
ccaacctttatgactcagaaagcaaggaacgcactggacaacttagcagtcctgc

SEQ ID NO: 8352 - DNA, 60 bp, Artificial
  Synthetic oligonucleotide
atctgagacttcaagaggccctagacactgctgccattttgagccgctctgagccaggga

SEQ ID NO: 8353 - DNA, 60 bp, Artificial
  Synthetic oligonucleotide
actcacgaggatggctgttagtggagatgactgcgtggtggctgctcctgatgcaaggtt

SEQ ID NO: 8354 - DNA, 52 bp, Artificial
  Synthetic oligonucleotide
ccttgtggcattgcggggaggggtggtccggagaatggttgttagacggcca

SEQ ID NO: 8355 - DNA, 60 bp, Artificial
  Synthetic oligonucleotide
tgagtagacggtgctgcctgcgtctcaaccccaggaggactgggtgaacaaagctgcgga

SEQ ID NO: 8356 - DNA, 60 bp, Artificial
  Synthetic oligonucleotide
ctgcagacctgccagtgtggcttgcctacaaagtggcttcaaatggtatacagtacaccg

SEQ ID NO: 8357 - DNA, 60 bp, Artificial
  Synthetic oligonucleotide
tgcagccacactcaaaggcgtccaagaagttagaggctatacgaaaggaggacctggaca

SEQ ID NO: 8358 - DNA, 50 bp, Artificial
  Synthetic oligonucleotide
cgtgtcatggagcgcttggaagttctacaacggaggtatggaggaggatt

SEQ ID NO: 8359 - DNA, 60 bp, Artificial
  Synthetic oligonucleotide
gtgttacgacgctggcgccgcttggtacgagctcacaccggcagagaccactgtcaggct

SEQ ID NO: 8360 - DNA, 60 bp, Artificial
  Synthetic oligonucleotide
tcatggaagaggccccccacggatagcggtcatgacacagtggttatggaggtgagctat

SEQ ID NO: 8361 - DNA, 60 bp, Artificial
  Synthetic oligonucleotide
tgtcacacggggagcagccattcgaatcggtgatggagtgtgtggacctcattgggcaga

SEQ ID NO: 8362 - DNA, 60 bp, Artificial
  Synthetic oligonucleotide
ggtaagtggtgatgactgcgtcgtcaagcccatagatgaccgttttgcaggggccttgta

SEQ ID NO: 8363 - DNA, 60 bp, Artificial
  Synthetic oligonucleotide
accattagtggctgggggcttgctgatagcgtgctacgtcataactggcacgtcagcaga

SEQ ID NO: 8364 - DNA, 60 bp, Artificial
  Synthetic oligonucleotide
aggctacacttgcgcttatgacacaacttacgagtgccctcacctggaagtgaccatgga

SEQ ID NO: 8365 - DNA, 60 bp, Artificial
  Synthetic oligonucleotide
catacccgtggaagtctcaagcacgactctcactttgaactctggacacctcaagtgcag

SEQ ID NO: 8366 - DNA, 60 bp, Artificial
  Synthetic oligonucleotide
catggcgtaccgaagagatgggatcctcgaagtggacaggacacaggcgcggagagcacg

SEQ ID NO: 8367 - DNA, 60 bp, Artificial
  Synthetic oligonucleotide
ctaggttggatgctgggaacgagcaaaacccagaaagttctcatagccggcttgctgctc

SEQ ID NO: 8368 - DNA, 60 bp, Artificial
  Synthetic oligonucleotide
ccgggagctctatagggagagccttcgagtcgatcatgaaaggagcaagacgcatggcca

SEQ ID NO: 8369 - DNA, 55 bp, Artificial
  Synthetic oligonucleotide
caactgtcagcggccagcttccatgcatacaaaagagcggggataaccgaagtgg

SEQ ID NO: 8370 - DNA, 60 bp, Artificial
  Synthetic oligonucleotide
tgctgaaggaagctgcatgtttggcaaagtcgtacgcacagatgtggagcctgatgtact

SEQ ID NO: 8371 - DNA, 54 bp, Artificial
  Synthetic oligonucleotide
ttgacctgtcggggtggtttgtgtcgggcggtagcgggggggacatatttcaca

SEQ ID NO: 8372 - DNA, 60 bp, Artificial
  Synthetic oligonucleotide
ggtgaatatggagacgtgtcattgatgtgtagagtcgctagtggcgttgacttggcacag

SEQ ID NO: 8373 - DNA, 56 bp, Artificial
  Synthetic oligonucleotide
cactgtggtggtggacagacatgatcccactgactatcgaggtggtgtccctgggt

SEQ ID NO: 8374 - DNA, 56 bp, Artificial
  Synthetic oligonucleotide
ttgtgtggaatggcacccagatctagtagatgagggtggagagattagcttgcggg

SEQ ID NO: 8375 - DNA, 56 bp, Artificial
  Synthetic oligonucleotide
ttgtgatttcacaccatggctggcatggcatgttgcagccaatgtgcccaacgtga

SEQ ID NO: 8376 - DNA, 60 bp, Artificial
  Synthetic oligonucleotide
gggcgacatatatcacagcgtgtcgcgagcccaccccgcatcttactcttggctatccta

SEQ ID NO: 8377 - DNA, 53 bp, Artificial
  Synthetic oligonucleotide
atagaggccacagactcacacaaccctaggttgctacgagtggagaggtggct

SEQ ID NO: 8378 - DNA, 51 bp, Artificial
  Synthetic oligonucleotide
accaacacaacaacggaatctcgctgcccaacccaaggtgaacccagccta

SEQ ID NO: 8379 - DNA, 60 bp, Artificial
  Synthetic oligonucleotide
acgcacagatacagccccactggatagcagcttcaataatactagagttctttctcatag

SEQ ID NO: 8380 - DNA, 60 bp, Artificial
  Synthetic oligonucleotide
ttgccatggacgtgggtgaaatgtgtgaggacaccgtcacatataaatgccccctactgg

SEQ ID NO: 8381 - DNA, 60 bp, Artificial
  Synthetic oligonucleotide
acgtgattccaatggtgacccagttagctatgacagacacaactccctttgggcaacaga

SEQ ID NO: 8382 - DNA, 60 bp, Artificial
  Synthetic oligonucleotide
tgacatccgtgttgaggagtcaatctaccaatgttgtgacttggcccccgaagccagaca

SEQ ID NO: 8383 - DNA, 50 bp, Artificial
  Synthetic oligonucleotide
caaacgttctgtcgcactagcaccacacgtagggcttggtctagaaacaa

SEQ ID NO: 8384 - DNA, 51 bp, Artificial
  Synthetic oligonucleotide
ccagggaaagctgtaccctggtggtaaggactagcggttagaggagacccc

SEQ ID NO: 8385 - DNA, 60 bp, Artificial
  Synthetic oligonucleotide
cagctcctgaggcgactgcaccagtggataagctcggagtatgccactccgtgctccggt

SEQ ID NO: 8386 - DNA, 60 bp, Artificial
  Synthetic oligonucleotide
gcagcggtaaatggaaagaagagtgcccatggatcacccacattttggatgggaagtcat

SEQ ID NO: 8387 - DNA, 60 bp, Artificial
  Synthetic oligonucleotide
cgatgccatgggcgaatgcacgcccaggtaattggaccgaatgacacggaatcttggtgt

SEQ ID NO: 8388 - DNA, 55 bp, Artificial
  Synthetic oligonucleotide
aagtcacagtcttagaccttgtgaagtttgttgtggcagtgggattgcacttcca

SEQ ID NO: 8389 - DNA, 55 bp, Artificial
  Synthetic oligonucleotide
atctatggcatattccagtcaaccttccttggagcctcgcagcgaggtgttggag

SEQ ID NO: 8390 - DNA, 53 bp, Artificial
  Synthetic oligonucleotide
tggccgtgtcgagagggactgcaaagctgagatggttccacgagcgtggctat

SEQ ID NO: 8391 - DNA, 60 bp, Artificial
  Synthetic oligonucleotide
cggaagcttgcttaacgtagtgctaacagtttttattagagagcagatctctgatgaaca

SEQ ID NO: 8392 - DNA, 56 bp, Artificial
  Synthetic oligonucleotide
agtggtccacgcgtggtgttcaccattctgttgctactggtcgctccggcatacag

SEQ ID NO: 8393 - DNA, 60 bp, Artificial
  Synthetic oligonucleotide
tctcagcgtagtagtcaacaagcctgtgggcaggtatcgctcagccccgaaacgtctgtc

SEQ ID NO: 8394 - DNA, 60 bp, Artificial
  Synthetic oligonucleotide
ttggcacttaccaagccggtgttggagtcatgtatgagagtgtgttccacacgttatggc

SEQ ID NO: 8395 - DNA, 60 bp, Artificial
  Synthetic oligonucleotide
cgcagccgggaaaaggtcagccattagcttcatagaagtgcttggacgcatgcctgaaca

SEQ ID NO: 8396 - DNA, 60 bp, Artificial
  Synthetic oligonucleotide
ccaacgtcaggccacaatcttgtgccactccgctgaggagtgcggcctgtacagccccag

SEQ ID NO: 8397 - DNA, 60 bp, Artificial
  Synthetic oligonucleotide
gtcccagacctgttacgcttgcgttgcacggcagcatgggatgtcgtttacacattgctc

SEQ ID NO: 8398 - DNA, 55 bp, Artificial
  Synthetic oligonucleotide
cagacacactccagtcaactcctggttgggaaacatcatagtctacgcgcccacc

SEQ ID NO: 8399 - DNA, 52 bp, Artificial
  Synthetic oligonucleotide
tcgagcgtgctaagagggccgctcaagcctgcctaagcatgggttacactta

SEQ ID NO: 8400 - DNA, 58 bp, Artificial
  Synthetic oligonucleotide
gacttgcacctggcccgaaacacacacgctatggggggacggagtcgaggagacagaa

SEQ ID NO: 8401 - DNA, 60 bp, Artificial
  Synthetic oligonucleotide
tagtgagagtcccgctctccaggaattcgagtcacgagatgtactgggtaagtggagcat

SEQ ID NO: 8402 - DNA, 60 bp, Artificial
  Synthetic oligonucleotide
tattgcttagcgactggctgcgtgtccatcatcggccgtgtgcacatcaaccaaagggcc

SEQ ID NO: 8403 - DNA, 60 bp, Artificial
  Synthetic oligonucleotide
tgaggtctcgttcagcgtgggcctcaactccttcgtagtcgggtctcagctcccctgcga

SEQ ID NO: 8404 - DNA, 60 bp, Artificial
  Synthetic oligonucleotide
gttcgcctatgacactcgctgctttgactcaacggtcacagagagagacattagaacaga

SEQ ID NO: 8405 - DNA, 60 bp, Artificial
  Synthetic oligonucleotide
cggctatgggttacatcctcctatacccctggcatcccatcacacggtgggtcatcatcc

SEQ ID NO: 8406 - DNA, 60 bp, Artificial
  Synthetic oligonucleotide
tccaccagtatcacgaatggatgaccactgatgatatgcttcgggtttggaatgacgtgt

SEQ ID NO: 8407 - DNA, 60 bp, Artificial
  Synthetic oligonucleotide
tcgtggacaagcgaatggcaagacgataatatttgttcccacgcagcaccaggctaacac

SEQ ID NO: 8408 - DNA, 59 bp, Artificial
  Synthetic oligonucleotide
gacgagacggagtcacgcgagggcggccaactttctacgctctgcaaatatgttgttcc

SEQ ID NO: 8409 - DNA, 60 bp, Artificial
  Synthetic oligonucleotide
ggtacatcaggggtcgtttcgtcccagcagtcacatacgggctcttgcagatatggccgc

SEQ ID NO: 8410 - DNA, 60 bp, Artificial
  Synthetic oligonucleotide
gggtcacagctcccttgcgagcctgagcccgatgtgacggtgctcacgtccatgctctct

SEQ ID NO: 8411 - DNA, 60 bp, Artificial
  Synthetic oligonucleotide
ataccggtatgtcaccccaggggagagaccatcgggcatatttgacacctcagtgatctg

SEQ ID NO: 8412 - DNA, 60 bp, Artificial
  Synthetic oligonucleotide
acacttggcgttggggcagaccaaggatgttccattgacagtgagagaatggagctcaga

SEQ ID NO: 8413 - DNA, 60 bp, Artificial
  Synthetic oligonucleotide
gcgtatgtcttgggtggcatgctgacagcccgtgaggtggtggcagtgtactttttgctg

SEQ ID NO: 8414 - DNA, 60 bp, Artificial
  Synthetic oligonucleotide
ttcggtcaggagtcaggactatcaccacgggtgcgccaatcacgtactccacgtatggca

SEQ ID NO: 8415 - DNA, 55 bp, Artificial
  Synthetic oligonucleotide
cgataccacagttaggctacgagcgtacatgaacaccccggggctccccgtgtgc

SEQ ID NO: 8416 - DNA, 60 bp, Artificial
  Synthetic oligonucleotide
ctttctagcgactagcgtgcaagctgattcgggatgtgcaattgatctacagcgacgtga

SEQ ID NO: 8417 - DNA, 58 bp, Artificial
  Synthetic oligonucleotide
ccgaacggctgagtagaatggcagtgagtggggacgattgtgttgtaaaaccaattga

SEQ ID NO: 8418 - DNA, 60 bp, Artificial
  Synthetic oligonucleotide
tggtgcttatggtggcttcagtatttcctgaccagagtggaagcgcaactgcacgtgtgg

SEQ ID NO: 8419 - DNA, 60 bp, Artificial
  Synthetic oligonucleotide
caagtaatgctcctagtcctctgcgtgactcaagtactgatgatgaggactacatgggct

SEQ ID NO: 8420 - DNA, 60 bp, Artificial
  Synthetic oligonucleotide
agtgacacatggcgtctagagagggcttttctgatcgagacaaaaacatgtgaatggccg

SEQ ID NO: 8421 - DNA, 60 bp, Artificial
  Synthetic oligonucleotide
agacggggaagagagaatcgtcatgaatggaccagccctcataacttcagccagtgcggc

SEQ ID NO: 8422 - DNA, 60 bp, Artificial
  Synthetic oligonucleotide
gaggacacattgcagtgcgccgccctgagacgagccgcagtcgccgcaagaattgctatg

SEQ ID NO: 8423 - DNA, 60 bp, Artificial
  Synthetic oligonucleotide
catatgaaacaactgtggcactgctgtttgaggaggcagggcaagtactcaaactagccc

SEQ ID NO: 8424 - DNA, 58 bp, Artificial
  Synthetic oligonucleotide
taaatggattggcgggttggagctacatacaccagagttgccatcctataggcccttg

SEQ ID NO: 8425 - DNA, 60 bp, Artificial
  Synthetic oligonucleotide
gggatagcggtgatgttaggggttggagctgtggcagcacacaacgcaatagagtccagt

SEQ ID NO: 8426 - DNA, 60 bp, Artificial
  Synthetic oligonucleotide
tgctctgcgaggcatatgacgtggggtgtgcatggtatgagttgacaccacctgagacta

SEQ ID NO: 8427 - DNA, 60 bp, Artificial
  Synthetic oligonucleotide
cgacgaaaagaccctcgtgcaatcgagagtgaatgcatacaacgccgacatgattgatcc

SEQ ID NO: 8428 - DNA, 60 bp, Artificial
  Synthetic oligonucleotide
gccccgagcgcttagccgcttgtcggagcatcgagtccttccgcataggatggggctccc

SEQ ID NO: 8429 - DNA, 55 bp, Artificial
  Synthetic oligonucleotide
aatatgcgacgagtgccattcagtggattctacgaccatccttggcatcgggaca

SEQ ID NO: 8430 - DNA, 55 bp, Artificial
  Synthetic oligonucleotide
gacgaggtatcattcagcgtgggtctcaactcctacgtggtcgggtcacagctcc

SEQ ID NO: 8431 - DNA, 60 bp, Artificial
  Synthetic oligonucleotide
gagagactacatgggcttgaagccttttcactgcactcatactctccccacgaactcact

SEQ ID NO: 8432 - DNA, 57 bp, Artificial
  Synthetic oligonucleotide
gctaacgcagcactgggagcctggtctgatgagcaaaacaaatgggcaagtgcgaag

SEQ ID NO: 8433 - DNA, 58 bp, Artificial
  Synthetic oligonucleotide
gtcaggcatacaacacgccatgtatctcagaggggtgaacaggagcttacacggaata

SEQ ID NO: 8434 - DNA, 59 bp, Artificial
  Synthetic oligonucleotide
ctgtaggagatatagacaggtgcactgaagccatagcagactacaccaacaagggtatc

SEQ ID NO: 8435 - DNA, 60 bp, Artificial
  Synthetic oligonucleotide
ttgcagtgacggctttgactattgcctaccttgtgggaagcaacatgacgcaacgggtcg

SEQ ID NO: 8436 - DNA, 60 bp, Artificial
  Synthetic oligonucleotide
tgccccagcaccggagaggctcacctagctgaagagaacgagggggacaatgcgtgcaag

SEQ ID NO: 8437 - DNA, 54 bp, Artificial
  Synthetic oligonucleotide
gcaaagaagcctctgcgcccaaggtggtgtgatgaaagggtgtcatctgaccag

SEQ ID NO: 8438 - DNA, 51 bp, Artificial
  Synthetic oligonucleotide
gctgtcctacgcaaggtgaagccaccatgcgtgaggaacatctcgacggat

SEQ ID NO: 8439 - DNA, 51 bp, Artificial
  Synthetic oligonucleotide
cattggacagacccgagtagcattgcagctcgtggatacatcactagccag

SEQ ID NO: 8440 - DNA, 60 bp, Artificial
  Synthetic oligonucleotide
ttggtaccagaggaaggaatgcaacgcactcaaattgactccacattggcaaccatttta

SEQ ID NO: 8441 - DNA, 55 bp, Artificial
  Synthetic oligonucleotide
gtgccaagggtagccggaccatatggtacatgtggttaggtagcaggttcctaga

SEQ ID NO: 8442 - DNA, 60 bp, Artificial
  Synthetic oligonucleotide
tcgcacgggctgcgtgggagacagctagacacactccagtcaactcttggctaggcaaca

SEQ ID NO: 8443 - DNA, 60 bp, Artificial
  Synthetic oligonucleotide
gggaagagtgatggttatggtgggcgctaccatgacggatgacataggtatgggagtgac

SEQ ID NO: 8444 - DNA, 60 bp, Artificial
  Synthetic oligonucleotide
gtgatggttatggtgggcgctaccatgacggatgacataggtatgggagtgacttatctt

SEQ ID NO: 8445 - DNA, 55 bp, Artificial
  Synthetic oligonucleotide
gtgggcgctaccatgacggatgacataggtatgggagtgacttatcttgccctac

SEQ ID NO: 8446 - DNA, 60 bp, Artificial
  Synthetic oligonucleotide
atggagatgtgtcgctgacgtgtaaagtggcaagtgggattgatgtcgcccaaactgtgg

SEQ ID NO: 8447 - DNA, 55 bp, Artificial
  Synthetic oligonucleotide
cgctgacgtgtaaagtggcaagtgggattgatgtcgcccaaactgtggtgatgtc

SEQ ID NO: 8448 - DNA, 60 bp, Artificial
  Synthetic oligonucleotide
cgcattggagccttgagggaacagtactcagagtcgtggcacgaagacaaagaacatccc

SEQ ID NO: 8449 - DNA, 60 bp, Artificial
  Synthetic oligonucleotide
tctctcatagtgccatgcagagaccaagatgagctggttggcagggcaagggtgtccccg

SEQ ID NO: 8450 - DNA, 60 bp, Artificial
  Synthetic oligonucleotide
tacatggtatatggcctagcaagatctgctcaggagtacccacccacttggccacggatg

SEQ ID NO: 8451 - DNA, 60 bp, Artificial
  Synthetic oligonucleotide
taggtgttacgtgctgaatccagaggcacagaacatagccgggaccagaggggcaatggt

SEQ ID NO: 8452 - DNA, 55 bp, Artificial
  Synthetic oligonucleotide
gccctgttttcatacgtgggctaccaagcgttgtctaagaggcacatacccgtgg

SEQ ID NO: 8453 - DNA, 58 bp, Artificial
  Synthetic oligonucleotide
aaagagcattgtggtacttatccagcaaacgccttggaactagcaatgtggcagaagc

SEQ ID NO: 8454 - DNA, 55 bp, Artificial
  Synthetic oligonucleotide
gcagaaccttaactgtgttaaacgtgatttcaagatggctggaatacaatcaagg

SEQ ID NO: 8455 - DNA, 55 bp, Artificial
  Synthetic oligonucleotide
caagtcatgtggtagcctaattgggactactgctagggcagaatgggccaagttg

SEQ ID NO: 8456 - DNA, 60 bp, Artificial
  Synthetic oligonucleotide
gctacggacattgctgatgtgatcgccattccaaccccgaagggacccaatcaatgctgg

SEQ ID NO: 8457 - DNA, 60 bp, Artificial
  Synthetic oligonucleotide
gcagctcttggagacacggcgtgggactttggatcagtaggcggagtcttcaattcaatc

SEQ ID NO: 8458 - DNA, 56 bp, Artificial
  Synthetic oligonucleotide
gcaccacaactgacagcgggaaactcgtcacggactggtgttgtaggagctgcacg

SEQ ID NO: 8459 - DNA, 60 bp, Artificial
  Synthetic oligonucleotide
cgtctgtgtccattgtcaccccaggagcttgctagcataatacaggcaacgagtgagcgt

SEQ ID NO: 8460 - DNA, 60 bp, Artificial
  Synthetic oligonucleotide
agcctggagggaaaatttatgccgatgacacagctggttgggacacccgcatcacacaag

SEQ ID NO: 8461 - DNA, 60 bp, Artificial
  Synthetic oligonucleotide
actcatattgcgcaccgaagggaaagatgcagctacccaggcacgtgtggggaatgggtc

SEQ ID NO: 8462 - DNA, 60 bp, Artificial
  Synthetic oligonucleotide
gtgttgtagaacctgcacaatgcccccagtcacctttcgcagtggaacagactgttggta

SEQ ID NO: 8463 - DNA, 60 bp, Artificial
  Synthetic oligonucleotide
tggagtgtatcgcatctttcgcccaggcctgttctggggtgcgtctcagattggtgtggg

SEQ ID NO: 8464 - DNA, 55 bp, Artificial
  Synthetic oligonucleotide
gagtgggactacatgagtacccggtggggtcgcaattaccttgcgagcctgaacc

SEQ ID NO: 8465 - DNA, 60 bp, Artificial
  Synthetic oligonucleotide
tctgtgagaaacgcgccctatatgatgtgatacagaagttgtcaattgagacgatgggtt

SEQ ID NO: 8466 - DNA, 55 bp, Artificial
  Synthetic oligonucleotide
cgcgccctatatgatgtgatacagaagttgtcaattgagacgatgggttccgctt

SEQ ID NO: 8467 - DNA, 60 bp, Artificial
  Synthetic oligonucleotide
ctggggcggatgcagcggcgtgtggcgacatcatccaaggcctgcccgtctctgcccgca

SEQ ID NO: 8468 - DNA, 60 bp, Artificial
  Synthetic oligonucleotide
acccacgcacttagcaacagatacagagctgaggggaattcaagggatgatggacgctag

SEQ ID NO: 8469 - DNA, 60 bp, Artificial
  Synthetic oligonucleotide
tagaattttgctctcatacccctgtacctgtgaggtggtcagacaacaccactagctaca

SEQ ID NO: 8470 - DNA, 60 bp, Artificial
  Synthetic oligonucleotide
tgacaagcctcaccggcagggacaccaacgataactgtggcgaggtccaagtactgtcca

SEQ ID NO: 8471 - DNA, 60 bp, Artificial
  Synthetic oligonucleotide
agtaaccgccatcctatcatccctcactgtgacatcccttctcagacgccttcacaagtg

SEQ ID NO: 8472 - DNA, 55 bp, Artificial
  Synthetic oligonucleotide
gctggggttcctgtggcacacattgagggaaccaagtaccacctgaagagtggcc

SEQ ID NO: 8473 - DNA, 57 bp, Artificial
  Synthetic oligonucleotide
acattgagggaaccaagtaccacctgaagagtggccatgtgacctgcgaagtgggac

SEQ ID NO: 8474 - DNA, 60 bp, Artificial
  Synthetic oligonucleotide
acagtgataggagagcacgcctgggacttcggttctgctggaggctttctgagttcaatt

SEQ ID NO: 8475 - DNA, 60 bp, Artificial
  Synthetic oligonucleotide
agcctgactttgtggtgacgactgatatctcggagatgggagccaaccttgacgtgagcc

SEQ ID NO: 8476 - DNA, 55 bp, Artificial
  Synthetic oligonucleotide
tcctattgcctcagatctactgttgcaacgcagcgcagggcatgaaaatgtcggg

SEQ ID NO: 8477 - DNA, 60 bp, Artificial
  Synthetic oligonucleotide
tcggaaatacacctcctttccatggctgctaggatgtgctgccaactggatcctgcgcgg

SEQ ID NO: 8478 - DNA, 52 bp, Artificial
  Synthetic oligonucleotide
ctgtccttgagtatttggtgtcttttggagtgtggattcgcactcctaccgc

SEQ ID NO: 8479 - DNA, 60 bp, Artificial
  Synthetic oligonucleotide
gagaactcttggactctctgcaatgtcaacgaccgaccttgaggcatacttcagagactg

SEQ ID NO: 8480 - DNA, 51 bp, Artificial
  Synthetic oligonucleotide
ggagactagattaatgatctatgtactaggaggctgtaggcataaattggt

SEQ ID NO: 8481 - DNA, 55 bp, Artificial
  Synthetic oligonucleotide
gcctcagctctctatcgggaagccttagagtctcctgagcatgtttcagctcacc

SEQ ID NO: 8482 - DNA, 60 bp, Artificial
  Synthetic oligonucleotide
cggcccgtgtgcacttcgcttcacctctgcacgttgcatggagaccaccgtgaacgctcc

SEQ ID NO: 8483 - DNA, 59 bp, Artificial
  Synthetic oligonucleotide
cgagatcttctcgacaccgcctctgctctgtaccgggaggccttagagtctccggagca

SEQ ID NO: 8484 - DNA, 56 bp, Artificial
  Synthetic oligonucleotide
actcaaacaatccagattgggacttcaaccccaacaaggatcactggccggacgcc

SEQ ID NO: 8485 - DNA, 59 bp, Artificial
  Synthetic oligonucleotide
acaactctgttgtcctctctcggaaatacacctcctttccatggctgctaggatgtgat

SEQ ID NO: 8486 - DNA, 60 bp, Artificial
  Synthetic oligonucleotide
catactgcggaactccttgcagcttgttttgctcgcagccggtctggagcgaaacttatt

SEQ ID NO: 8487 - DNA, 60 bp, Artificial
  Synthetic oligonucleotide
ttaatttggaagatccagcatctagggacctagtagtcagttatgtcaacactaatatgg

SEQ ID NO: 8488 - DNA, 53 bp, Artificial
  Synthetic oligonucleotide
cggagacgatccgctcctgggaaaccactctctgctggacacgcatccgcttt

SEQ ID NO: 8489 - DNA, 55 bp, Artificial
  Synthetic oligonucleotide
cctagccgcttgttttgctcgcagcaggtctggagcaaacctcatcgggactgac

SEQ ID NO: 8490 - DNA, 55 bp, Artificial
  Synthetic oligonucleotide
acttgtattcccatcccatcatcttgggctttcgcaagattcctatgggagtggg

SEQ ID NO: 8491 - DNA, 60 bp, Artificial
  Synthetic oligonucleotide
ttggtgtcttttggagtgtggattcgcactcctcctgcatatagaccaaccaatgcccct

SEQ ID NO: 8492 - DNA, 60 bp, Artificial
  Synthetic oligonucleotide
ttacgcggcctccccgtctgtgccttgtcatctgccggaccgtgtgcacttcgcttcacc

SEQ ID NO: 8493 - DNA, 55 bp, Artificial
  Synthetic oligonucleotide
ccgcttacagaccaccaaatgcccctatcttatcaacacttccggaaacttgtgt

SEQ ID NO: 8494 - DNA, 60 bp, Artificial
  Synthetic oligonucleotide
taaggcaagctattctgtgttggggtgagttgatgaatctggccacctgggtgggaagta

SEQ ID NO: 8495 - DNA, 57 bp, Artificial
  Synthetic oligonucleotide
cgcagtggaaactgcaacccggggacgatccactcctgggaaacaagtctctgctcg

SEQ ID NO: 8496 - DNA, 60 bp, Artificial
  Synthetic oligonucleotide
taaggtcttacataagaggactcttggactctcagcaatgtcaacgaccgaccttgaggc

SEQ ID NO: 8497 - DNA, 55 bp, Artificial
  Synthetic oligonucleotide
attgggacttcaaccccatcaaggaccactggccagaagccaaccaggtaggagt

SEQ ID NO: 8498 - DNA, 55 bp, Artificial
  Synthetic oligonucleotide
ctactcccgtaactccacctctaagggacactcatcctcaggccacgcagtggaa

SEQ ID NO: 8499 - DNA, 60 bp, Artificial
  Synthetic oligonucleotide
tgagttgatgaatctagccacctgggtgggaagtaatttggaagatccagcatccaggga

SEQ ID NO: 8500 - DNA, 60 bp, Artificial
  Synthetic oligonucleotide
tgtgctgccaactggatcctgcgcgggacgtcctttgtctacgtcccgtcagcgctgaat

SEQ ID NO: 8501 - DNA, 60 bp, Artificial
  Synthetic oligonucleotide
ctgcaccgaacatggagaacacagcgtcaggattcctaggacccctgctcgtgttacagg

SEQ ID NO: 8502 - DNA, 58 bp, Artificial
  Synthetic oligonucleotide
tcttatataagaggactcttggactcccagcaatgtcaatgaccgaccttgaggctta

SEQ ID NO: 8503 - DNA, 53 bp, Artificial
  Synthetic oligonucleotide
gcgggctcccctctcccacgtccttcaactagtcaccaccgatctccctcgcc

SEQ ID NO: 8504 - DNA, 60 bp, Artificial
  Synthetic oligonucleotide
ccctgcaccgaatatggaaagcatcacatcaggattcctaggacccctgctcgtgttaca

SEQ ID NO: 8505 - DNA, 60 bp, Artificial
  Synthetic oligonucleotide
acaaaacctatggacggaaactgcacatgtattcccatcccatcatcttgggctttcgca

SEQ ID NO: 8506 - DNA, 52 bp, Artificial
  Synthetic oligonucleotide
ccgcatcgtgtgcacttcgcttcacctctgcacgtcgcatggagaccaccgt

SEQ ID NO: 8507 - DNA, 60 bp, Artificial
  Synthetic oligonucleotide
caggtagggaacattgctctccgcaccatacagctattagacaagctttagtatgctggg

SEQ ID NO: 8508 - DNA, 50 bp, Artificial
  Synthetic oligonucleotide
agcaggccgcatgatcccaaaagggactgtcacatggtcgggcaagtttc

SEQ ID NO: 8509 - DNA, 54 bp, Artificial
  Synthetic oligonucleotide
agcctagatacatactaaccgattctacttttgtttgccacaaacgttatcaga

SEQ ID NO: 8510 - DNA, 52 bp, Artificial
  Synthetic oligonucleotide
cccctatcttatcaacacttccggaaactactgttgttagacgacgcaaccg

SEQ ID NO: 8511 - DNA, 54 bp, Artificial
  Synthetic oligonucleotide
ggaagctcccatgtgtcctggccaaaattcgcagtccccaacctccaatcactc

SEQ ID NO: 8512 - DNA, 60 bp, Artificial
  Synthetic oligonucleotide
tcagaccaccaaatgcccctatcttatcaacacttccggaaactactgttgttagatgca

SEQ ID NO: 8513 - DNA, 60 bp, Artificial
  Synthetic oligonucleotide
cgggccgtgtgcacttcgcttcacctctgcacgtcgcatggaaacctccgtgaacgccca

SEQ ID NO: 8514 - DNA, 60 bp, Artificial
  Synthetic oligonucleotide
cacctgccggaccgtgtgcacttcgcttcacctctgcacgttgcatggagaccaccgtga

SEQ ID NO: 8515 - DNA, 52 bp, Artificial
  Synthetic oligonucleotide
ctaagagccgtgattcctgccactactgctccagtgcctcagggatttctta

SEQ ID NO: 8516 - DNA, 60 bp, Artificial
  Synthetic oligonucleotide
ttgttcacctcaccatactgctctcaggcaagccattctttgctggggggatcttatgaa

SEQ ID NO: 8517 - DNA, 60 bp, Artificial
  Synthetic oligonucleotide
gcctctgctctgtatcgggaagccttagagtctcctgaacattgctcgcctcaccataca

SEQ ID NO: 8518 - DNA, 60 bp, Artificial
  Synthetic oligonucleotide
cttctcatctgccggaccgtgtgcacttcgcttcacctctgcacgtcgcatggagaccac

SEQ ID NO: 8519 - DNA, 55 bp, Artificial
  Synthetic oligonucleotide
ctgtatcgggatgccttagagtctcctgagcactgttcacctcaccatactgcac

SEQ ID NO: 8520 - DNA, 53 bp, Artificial
  Synthetic oligonucleotide
ggttaaaggtctttgtactaggaggctgtaggcataaattggtcagttctcca

SEQ ID NO: 8521 - DNA, 55 bp, Artificial
  Synthetic oligonucleotide
cccctcgacaccgccactgctctgcatcgggaggccttagagtctccggaacatt

SEQ ID NO: 8522 - DNA, 55 bp, Artificial
  Synthetic oligonucleotide
gcctgctgacttctttccttcggtacgagatcttctagataccgccgccgctctg

SEQ ID NO: 8523 - DNA, 55 bp, Artificial
  Synthetic oligonucleotide
gcgtggaacctttatggctcctctgccgatccatactgcggaactcttagcagcg

SEQ ID NO: 8524 - DNA, 60 bp, Artificial
  Synthetic oligonucleotide
ctaatgactctagctacctgggtgggtgctaatttggaagatccagcatctagagaccta

SEQ ID NO: 8525 - DNA, 50 bp, Artificial
  Synthetic oligonucleotide
ggtgtctttcggagtgtggattcgcactcctccggcctatagaccttcaa

SEQ ID NO: 8526 - DNA, 55 bp, Artificial
  Synthetic oligonucleotide
aacgtgcgggctcccctctcccacgtagttcgagcagccaccacagatctccctc

SEQ ID NO: 8527 - DNA, 60 bp, Artificial
  Synthetic oligonucleotide
atataagaggactcttggactcccagcaatgtcaacgaccgaccttgaggcatacttcaa

SEQ ID NO: 8528 - DNA, 59 bp, Artificial
  Synthetic oligonucleotide
cgaacatggagagcacaacatcaggattcctaggacccctgctcgtgttacaggcgggg

SEQ ID NO: 8529 - DNA, 55 bp, Artificial
  Synthetic oligonucleotide
aatctagctacctgggtgggtgcaaatttggaagatcccacatccagggaccttg

SEQ ID NO: 8530 - DNA, 60 bp, Artificial
  Synthetic oligonucleotide
tggggaccctgcaccgaacatggagagcacaacatcaggattcctaggacccctgctcgt

SEQ ID NO: 8531 - DNA, 60 bp, Artificial
  Synthetic oligonucleotide
cttagagtctcctgagcattgttcacctcaccatactgcactcaggcaagcaatactatg

SEQ ID NO: 8532 - DNA, 60 bp, Artificial
  Synthetic oligonucleotide
accgcctcagctctgtatcgggaagccttagagtctcctgagcattgttcacctcatcat

SEQ ID NO: 8533 - DNA, 54 bp, Artificial
  Synthetic oligonucleotide
tacacccatatcgccaccactgagagacactcatcctcaggccatgcagtggaa

SEQ ID NO: 8534 - DNA, 55 bp, Artificial
  Synthetic oligonucleotide
gcttcagctctgtatcgggatgccttagagtctcctgagcattgttcacctcacc

SEQ ID NO: 8535 - DNA, 51 bp, Artificial
  Synthetic oligonucleotide
caactaccaccagcgtgggaacatgcagaacctgcacgatttctgctccag

SEQ ID NO: 8536 - DNA, 60 bp, Artificial
  Synthetic oligonucleotide
aggcttgctatatctgacggacaacatgtctactattttcgcaaagctccaatgggagtc

SEQ ID NO: 8537 - DNA, 52 bp, Artificial
  Synthetic oligonucleotide
tgggactcaccccaccgcacggaggccttttggggtggagccctcaggcaca

SEQ ID NO: 8538 - DNA, 60 bp, Artificial
  Synthetic oligonucleotide
gagtctcctgagcattgttcacctcaccatactgcactcaggcaagcaatactttgctgg

SEQ ID NO: 8539 - DNA, 60 bp, Artificial
  Synthetic oligonucleotide
tagggctcctctgccgatccatacggcggaactcctagccgcttgttttgctcgcagccg

SEQ ID NO: 8540 - DNA, 60 bp, Artificial
  Synthetic oligonucleotide
ctcgagacacatcctctctaccagaatccggagccagccgtgcctgtgataaaaactcct

SEQ ID NO: 8541 - DNA, 54 bp, Artificial
  Synthetic oligonucleotide
caggagacgatccactcctgggaaacaagtctctgttggagacacatccgcttt

SEQ ID NO: 8542 - DNA, 60 bp, Artificial
  Synthetic oligonucleotide
tctgccgatccatactgcggaactcctagccgcttgttttgctcgcagccggtctggagc

SEQ ID NO: 8543 - DNA, 60 bp, Artificial
  Synthetic oligonucleotide
tctttcggagtgtggattcgcactcctcaagcttatagaccaccaaatgcccctatctta

SEQ ID NO: 8544 - DNA, 60 bp, Artificial
  Synthetic oligonucleotide
gatgaatctggccacctgggtgggaagtaatttggaagatccagcatccagggaagcagt

SEQ ID NO: 8545 - DNA, 60 bp, Artificial
  Synthetic oligonucleotide
gtcgtcctcgctcggaaatacacctcctttccatggctgctagggtgtgctgccaactgg

SEQ ID NO: 8546 - DNA, 60 bp, Artificial
  Synthetic oligonucleotide
gcactcctccagcttatagaccaccaaatgcccctatcttatcaacacttccggagacta

SEQ ID NO: 8547 - DNA, 57 bp, Artificial
  Synthetic oligonucleotide
ccttttacacaatgtggctatcctgccttgatgccgttatatgcatgtatacactct

SEQ ID NO: 8548 - DNA, 50 bp, Artificial
  Synthetic oligonucleotide
agccttgtatcgggaggccttagagtctccggaacattgctcacctcacc

SEQ ID NO: 8549 - DNA, 51 bp, Artificial
  Synthetic oligonucleotide
tagggaccaccacagatctccctcgcctaggaaataaagaccccgctcgtc

SEQ ID NO: 8550 - DNA, 58 bp, Artificial
  Synthetic oligonucleotide
ttccacaacattccaccaaaatctgcaggatcccagagtaagaggcctgtattttcct

SEQ ID NO: 8551 - DNA, 60 bp, Artificial
  Synthetic oligonucleotide
gagtgtggattcgcactcctcttgcttacagaccaccaaatgcccctatcttatcaacac

SEQ ID NO: 8552 - DNA, 55 bp, Artificial
  Synthetic oligonucleotide
gcacgggaccatgcagaacctgcacgactcctgctcaaggaaactctattcatcc

SEQ ID NO: 8553 - DNA, 55 bp, Artificial
  Synthetic oligonucleotide
agcatcatgcccctatcttatcaacacttccggaaactactgttgttagacgacg

SEQ ID NO: 8554 - DNA, 55 bp, Artificial
  Synthetic oligonucleotide
gtccgtgtgcacttcgcttcacctctgcacgacacgtggagaccaccgtgaacgc

SEQ ID NO: 8555 - DNA, 56 bp, Artificial
  Synthetic oligonucleotide
gctatatcgggatgcgttagagtctcctgagcattgttcacctcaccataatgcac

SEQ ID NO: 8556 - DNA, 56 bp, Artificial
  Synthetic oligonucleotide
gttccgactactgtctctcacacctcgtcaatcttctcgaggactggggaccctgc

SEQ ID NO: 8557 - DNA, 59 bp, Artificial
  Synthetic oligonucleotide
gatctactcgacaccgcctcagctctgtaccgggaggccttagagtctccggaacattg

SEQ ID NO: 8558 - DNA, 55 bp, Artificial
  Synthetic oligonucleotide
ggtctccccgtctgtgccttatcatccgccggaccgtgtgcacttcgcttcacct

SEQ ID NO: 8559 - DNA, 59 bp, Artificial
  Synthetic oligonucleotide
gcattcggagccaactcaaacaatccagattgggacttcaaccccatcaaggaccactg

SEQ ID NO: 8560 - DNA, 60 bp, Artificial
  Synthetic oligonucleotide
ccatactgcggaactcctagccgcttgttttgctcgcagccggtctggagcaaacattct

SEQ ID NO: 8561 - DNA, 60 bp, Artificial
  Synthetic oligonucleotide
tggaacctttctgtctccactgccgatccatactgcggaactcctagccgcttgttttgc

SEQ ID NO: 8562 - DNA, 60 bp, Artificial
  Synthetic oligonucleotide
tatttggtgtctttcggagtgtggattcgcactcctcccgcatacagaccaccaaatgcc

SEQ ID NO: 8563 - DNA, 60 bp, Artificial
  Synthetic oligonucleotide
ctagatgccgcctcagctctgtatcgggaagccttagagtctcctgagcattgttcacct

SEQ ID NO: 8564 - DNA, 60 bp, Artificial
  Synthetic oligonucleotide
ggttaatgatctttgtactaggaggctgtaggcataaattggtctgcgtaccagcaccat

SEQ ID NO: 8565 - DNA, 55 bp, Artificial
  Synthetic oligonucleotide
atcaccgagttgcacgctgcagaacctcctcagtggaagatttcaccagaagacc

SEQ ID NO: 8566 - DNA, 53 bp, Artificial
  Synthetic oligonucleotide
gggaagccctagaatcgccagaacattgttcacctaaccacacagcactcagg

SEQ ID NO: 8567 - DNA, 60 bp, Artificial
  Synthetic oligonucleotide
gatccatactgcggaattcctagccgcttgttttgctcgcagccggtctggagcaaagct

SEQ ID NO: 8568 - DNA, 60 bp, Artificial
  Synthetic oligonucleotide
aactctgttgtcctctctcggaagtacacctccttcccatggctgctaggttgtgctgcc

SEQ ID NO: 8569 - DNA, 51 bp, Artificial
  Synthetic oligonucleotide
ctacatcaaacctcgcaaaggcatggggacgaatctttctgttcccaaccc

SEQ ID NO: 8570 - DNA, 55 bp, Artificial
  Synthetic oligonucleotide
ccgtctgtgccttcacatctgccggaccgtgtgcacttcgcttcacctctgcacg

SEQ ID NO: 8571 - DNA, 60 bp, Artificial
  Synthetic oligonucleotide
ctctagctacctgggtgggtgctaatttggaagatccagcatctagagacctagtagtca

SEQ ID NO: 8572 - DNA, 55 bp, Artificial
  Synthetic oligonucleotide
gtgtgccttctcatctgccggaccgtgtgcacttcgcttcacctctgcacgtcgc

SEQ ID NO: 8573 - DNA, 60 bp, Artificial
  Synthetic oligonucleotide
cagcgcatgcgtggaacctttcaggctcctctgccgatccatactgcggaactcctagcc

SEQ ID NO: 8574 - DNA, 60 bp, Artificial
  Synthetic oligonucleotide
ttctagagtatttggtgtcttttggagtgtggattcgcactcctgccgcttacagaccac

SEQ ID NO: 8575 - DNA, 55 bp, Artificial
  Synthetic oligonucleotide
tcttctgccgatccatacggcggaactcctagccgcttgttttgctcgcagcagg

SEQ ID NO: 8576 - DNA, 55 bp, Artificial
  Synthetic oligonucleotide
gccgcagctctgtttcgggaggccttagagtctcctgagcattgctcacctcacc

SEQ ID NO: 8577 - DNA, 54 bp, Artificial
  Synthetic oligonucleotide
cttagagtctccggaacattgttcacctcatcatacagcactcaggcaagccgt

SEQ ID NO: 8578 - DNA, 50 bp, Artificial
  Synthetic oligonucleotide
cgcctcttgcctccaccaatcggcagtcaagaaggcagcctaccccactc

SEQ ID NO: 8579 - DNA, 51 bp, Artificial
  Synthetic oligonucleotide
agaaggcatcacatcaggattcctaagacccctgctcgtgttacaggcgag

SEQ ID NO: 8580 - DNA, 51 bp, Artificial
  Synthetic oligonucleotide
caccttattcttaagaacaagagctacatcatgaggctttcttagacggtc

SEQ ID NO: 8581 - DNA, 60 bp, Artificial
  Synthetic oligonucleotide
catggctgctaggttgtgctgccaactggatcctgcgcgggacgtcctttgtctacgtcc

SEQ ID NO: 8582 - DNA, 57 bp, Artificial
  Synthetic oligonucleotide
gcacgggaccatgcagaacctgcacgactcctgctcaaggaacctctatgtatccct

SEQ ID NO: 8583 - DNA, 60 bp, Artificial
  Synthetic oligonucleotide
ctttccatggctgctcgcctgtgttgccacctggattctgcgcgggacgtccttctgcta

SEQ ID NO: 8584 - DNA, 60 bp, Artificial
  Synthetic oligonucleotide
tgtgcggaattgcgaaccatggattccaccgtgaactttgtctcctggcatgcaaatcgt

SEQ ID NO: 8585 - DNA, 60 bp, Artificial
  Synthetic oligonucleotide
ttgcgaaccatggattccaccgtgaactttgtctcctggcatgcaaatcgtcaacttggc

SEQ ID NO: 8586 - DNA, 60 bp, Artificial
  Synthetic oligonucleotide
cagagtatttggtgtcttttggagtgtggattcgcactcctccagcttatagaccaccaa

SEQ ID NO: 8587 - DNA, 60 bp, Artificial
  Synthetic oligonucleotide
ttctcacttccgattgctaccgcggagcttatagccgcctgccttgctcgctgctggaca

SEQ ID NO: 8588 - DNA, 60 bp, Artificial
  Synthetic oligonucleotide
ggaccctgctccgaccatggagaacatcacatcaggattcctaggacccctgctcgtgtt

SEQ ID NO: 8589 - DNA, 60 bp, Artificial
  Synthetic oligonucleotide
ttgtgtctcctctgccgatccatactgcggaactcctagccgcttgttttgctcgcagca

SEQ ID NO: 8590 - DNA, 55 bp, Artificial
  Synthetic oligonucleotide
ggttacatttaaaggtcagccttataagtgggaacatcaataccttgtcaagcaa

SEQ ID NO: 8591 - DNA, 57 bp, Artificial
  Synthetic oligonucleotide
tatgtttagccaagctaatgattaaacccagatgtatactcaccgattctacctttg

SEQ ID NO: 8592 - DNA, 60 bp, Artificial
  Synthetic oligonucleotide
tgcacttcgcttcacctctccacgtcgcatggagaccacagtgaacgctcaccaactctc

SEQ ID NO: 8593 - DNA, 55 bp, Artificial
  Synthetic oligonucleotide
ccacgtcgcatggagaccacagtgaacgctcaccaactctcgcccaaggtcggtc

SEQ ID NO: 8594 - DNA, 54 bp, Artificial
  Synthetic oligonucleotide
caccatactgcactcaggcacgtcattctttgctggggggacctaatgactcta

SEQ ID NO: 8595 - DNA, 60 bp, Artificial
  Synthetic oligonucleotide
ggatcccctcctgggaaatcaatcactgctggagacacatccgcgataccagaatcccga

SEQ ID NO: 8596 - DNA, 55 bp, Artificial
  Synthetic oligonucleotide
caatcactgctggagacacatccgcgataccagaatcccgagccagcggttcctg

SEQ ID NO: 8597 - DNA, 51 bp, Artificial
  Synthetic oligonucleotide
agtttacctttgccacgtgtagcaactgatgctaccctaacacatggcgca

SEQ ID NO: 8598 - DNA, 55 bp, Artificial
  Synthetic oligonucleotide
ggttaatgatctttgtactaggaggctgtaggcataaattggtctgttcacctgc

SEQ ID NO: 8599 - DNA, 60 bp, Artificial
  Synthetic oligonucleotide
aagtatacatcctttccatggctgctcggttgtgctgccaactggatcctgcgcgggacg

SEQ ID NO: 8600 - DNA, 60 bp, Artificial
  Synthetic oligonucleotide
gatacacctcctttccatggctgctcggttgtgctgccaactggatcctgcgcgggacgt

SEQ ID NO: 8601 - DNA, 57 bp, Artificial
  Synthetic oligonucleotide
ccttttaggctccgctgccgatccatactgcggaactcctagcagcttgtttcgctc

SEQ ID NO: 8602 - DNA, 55 bp, Artificial
  Synthetic oligonucleotide
ctctccgattctacctttgtttgccacaaacgttatcagacgttaccatggcatt

SEQ ID NO: 8603 - DNA, 60 bp, Artificial
  Synthetic oligonucleotide
actgttcttgagtatttggtgtcttttggagtgtggattcgcactcctcctgcttacaga

SEQ ID NO: 8604 - DNA, 55 bp, Artificial
  Synthetic oligonucleotide
agggactgtaacatggtcaggcaaatttccaacaatagatcatctattagaccat

SEQ ID NO: 8605 - DNA, 54 bp, Artificial
  Synthetic oligonucleotide
tactcccatctctcccccgttgagagacactcatcctcaggccatgcagtggaa

SEQ ID NO: 8606 - DNA, 58 bp, Artificial
  Synthetic oligonucleotide
tacgaattaactttgacaaaactactccatcacctgtcaatgagatcagattcctcgg

SEQ ID NO: 8607 - DNA, 60 bp, Artificial
  Synthetic oligonucleotide
tcaccatactgcactcaggcaagcaatttcgtgctggggggatctacttaatttatctac

SEQ ID NO: 8608 - DNA, 50 bp, Artificial
  Synthetic oligonucleotide
tacacattaactccccggccgataattcatgccgtcgcccctgactatag

SEQ ID NO: 8609 - DNA, 50 bp, Artificial
  Synthetic oligonucleotide
ctcccattctgatgtccgcgactctctcgcccgtttcatcccgaccattg

SEQ ID NO: 8610 - DNA, 60 bp, Artificial
  Synthetic oligonucleotide
tgcgggcttctgggagtcgtctcccgcttccacacttgagggctctctgagtcgtcacac

SEQ ID NO: 8611 - DNA, 55 bp, Artificial
  Synthetic oligonucleotide
cgtgatctgagggtggcagcgtttaaaggggatgattcagtggtcctctgcactg

SEQ ID NO: 8612 - DNA, 55 bp, Artificial
  Synthetic oligonucleotide
agtggcagcgtttaaaggggatgattcagtggttctttgtagtgactaccgtcag

SEQ ID NO: 8613 - DNA, 60 bp, Artificial
  Synthetic oligonucleotide
cgagaggcctcatccagtcatcccgggcgcatgcaattgtcgcgttaacccggcacacag

SEQ ID NO: 8614 - DNA, 60 bp, Artificial
  Synthetic oligonucleotide
gccacaagagcttacagtgtccgatagtgtgttggtctttgaactcacggatatagtcca

SEQ ID NO: 8615 - DNA, 59 bp, Artificial
  Synthetic oligonucleotide
ggtcacccgtgtgaaggtgacggccccacataccatcaaggctgacccatctggtgcta

SEQ ID NO: 8616 - DNA, 60 bp, Artificial
  Synthetic oligonucleotide
aggctcatgacctatctacgcggtatcagctacaaggtcacggtcggcgctctagtcgcc

SEQ ID NO: 8617 - DNA, 60 bp, Artificial
  Synthetic oligonucleotide
tcatgctgttgctcccgactatcgagttgagcaaaaccctaagcggcttgaggctgctta

SEQ ID NO: 8618 - DNA, 60 bp, Artificial
  Synthetic oligonucleotide
cctggagcttgatttgtgctgccgtgatgtgtcccggataacattcttccagaaggactg

SEQ ID NO: 8619 - DNA, 60 bp, Artificial
  Synthetic oligonucleotide
tctgacacctggtaatacgaacacgcgtgtctcccgttattcgagtagcgcgcgtcataa

SEQ ID NO: 8620 - DNA, 54 bp, Artificial
  Synthetic oligonucleotide
acctgtgccccctgttcctaagactgttggattgcctagccccattgtacttgc

SEQ ID NO: 8621 - DNA, 56 bp, Artificial
  Synthetic oligonucleotide
caagacggctctgcagtcctggagcttgacctatgtaatcgtgatgtgtcccgaat

SEQ ID NO: 8622 - DNA, 60 bp, Artificial
  Synthetic oligonucleotide
tgtagtgattatcggcagagtcgcaatgcggccgctttaattgccggctgtggactgaag

SEQ ID NO: 8623 - DNA, 60 bp, Artificial
  Synthetic oligonucleotide
gttacccgtgtgaaggtgacggctccacatactatcaaggccgatccatctggtgctacg

SEQ ID NO: 8624 - DNA, 60 bp, Artificial
  Synthetic oligonucleotide
ccctgttcccatcagcctgctctacaaaatccacatttcacgctgtcccggttcatatct

SEQ ID NO: 8625 - DNA, 60 bp, Artificial
  Synthetic oligonucleotide
agctacagctgacgccaggggtctcatacagtcgtcccgggcccacgccatagttgcact

SEQ ID NO: 8626 - DNA, 55 bp, Artificial
  Synthetic oligonucleotide
gttttgcaccgatgtttcctcaggccggtcggtagggacgtccagcgctggtatt

SEQ ID NO: 8627 - DNA, 60 bp, Artificial
  Synthetic oligonucleotide
ggctggcgctcagttgagacctctggtgtcgctgaggaggaggctacttccggtctcgtt

SEQ ID NO: 8628 - DNA, 55 bp, Artificial
  Synthetic oligonucleotide
ctagtcagcgcaaggcagtcctgtcgactcttgtcggtaggtatggccgccgtac

SEQ ID NO: 8629 - DNA, 59 bp, Artificial
  Synthetic oligonucleotide
tcaggatgggtcggctgtgctcgagcttgacctttgtaaccgagatgtgtcgcgaataa

SEQ ID NO: 8630 - DNA, 56 bp, Artificial
  Synthetic oligonucleotide
atatagtccactgccgtatggccgccccaaaccagcggaaggccgtcctctcaaca

SEQ ID NO: 8631 - DNA, 60 bp, Artificial
  Synthetic oligonucleotide
agtgtgaggtaggaattgccctgtatagtctgcacgacatgcgtcctgcggatgtggcgt

SEQ ID NO: 8632 - DNA, 60 bp, Artificial
  Synthetic oligonucleotide
gacctgcaacctactagctggcgcactgtttctcaccgctgcccctgggacgtctgcatg

SEQ ID NO: 8633 - DNA, 60 bp, Artificial
  Synthetic oligonucleotide
tgttgggccagaagtctgacacgtcgatcctctttgaggtacggccaattcaggctagcg

SEQ ID NO: 8634 - DNA, 60 bp, Artificial
  Synthetic oligonucleotide
tttacagagaccacaatcatagctacggctgatgccaggggccttatccagtcgtcccgt

SEQ ID NO: 8635 - DNA, 55 bp, Artificial
  Synthetic oligonucleotide
agctacggctgatgccaggggccttatccagtcgtcccgtgctcatgccatagtt

SEQ ID NO: 8636 - DNA, 60 bp, Artificial
  Synthetic oligonucleotide
cagcccggtattgcctccgagttagtcatccctagtgagcgcctccactaccgcaatcaa

SEQ ID NO: 8637 - DNA, 60 bp, Artificial
  Synthetic oligonucleotide
catgacggggaccgtgctgtgattacatatgagggggactctagtgccgggtacaatcat

SEQ ID NO: 8638 - DNA, 58 bp, Artificial
  Synthetic oligonucleotide
attgcctggaagttggtgctcatccccgctctattaatagacatcaggcctcgcaccg

SEQ ID NO: 8639 - DNA, 60 bp, Artificial
  Synthetic oligonucleotide
tgacccgcatcaaataccggcgttggacttcgatgaccgctgcttgacgggcgcagttaa

SEQ ID NO: 8640 - DNA, 55 bp, Artificial
  Synthetic oligonucleotide
cgctagggtgactcgcgtcaaggttacagccccgcacactattaaggccgacccg

SEQ ID NO: 8641 - DNA, 54 bp, Artificial
  Synthetic oligonucleotide
tgccgtaatctcggcttacagggttgtgctttccaatctactattgctgagctt

SEQ ID NO: 8642 - DNA, 55 bp, Artificial
  Synthetic oligonucleotide
gtgtccgatagtgtgctggtctttgaactcacggatatagtccactgccgtatgg

SEQ ID NO: 8643 - DNA, 55 bp, Artificial
  Synthetic oligonucleotide
attgagcgagtccgggcggtggggtgccatttcgtactcctcctcacagctgcac

SEQ ID NO: 8644 - DNA, 60 bp, Artificial
  Synthetic oligonucleotide
tgccgtccctgtgcatatatgggataggcttatgctttttggtgcgactcttgacgacca

SEQ ID NO: 8645 - DNA, 60 bp, Artificial
  Synthetic oligonucleotide
cagtatgttctctcgtttgatgcctctcgtcagtctatgggagccgggccgcataacctc

SEQ ID NO: 8646 - DNA, 57 bp, Artificial
  Synthetic oligonucleotide
ttatgagggggatactagtgcgggctataatcatgatgtgtctattctccgtgcatg

SEQ ID NO: 8647 - DNA, 60 bp, Artificial
  Synthetic oligonucleotide
cagcggttcccagagtcattcgaccccgccgagtttgtcatgtcagatgggcttgcagcc

SEQ ID NO: 8648 - DNA, 60 bp, Artificial
  Synthetic oligonucleotide
tggtgagcccggcaccctactatggaatactgtctggaacatggctgtcatagcacattg

SEQ ID NO: 8649 - DNA, 60 bp, Artificial
  Synthetic oligonucleotide
tgcctcggaggatgcgcttaccgctgtgatcactgcagcgtacctgactatttgtcatca

SEQ ID NO: 8650 - DNA, 60 bp, Artificial
  Synthetic oligonucleotide
gtctgagaacggtgagccctctgtcaaactctatacctctgttgaagccgcccaattaga

SEQ ID NO: 8651 - DNA, 60 bp, Artificial
  Synthetic oligonucleotide
tactagtgcaggttacaaccatgacgtctctatacttcgtgcgtggattcgtacgactaa

SEQ ID NO: 8652 - DNA, 60 bp, Artificial
  Synthetic oligonucleotide
tgtgcattccagtctactattgctgagcttcagcgtcttaaaatgaaggtaggtaaaacc

SEQ ID NO: 8653 - DNA, 55 bp, Artificial
  Synthetic oligonucleotide
gtctactattgctgagcttcagcgtcttaaaatgaaggtaggtaaaacccgggag

SEQ ID NO: 8654 - DNA, 60 bp, Artificial
  Synthetic oligonucleotide
gggatgagctctatctacctgagcttgctgctaaatggttcgaggccaataagccgaccc

SEQ ID NO: 8655 - DNA, 55 bp, Artificial
  Synthetic oligonucleotide
tcgtcggccggtggccaactgttctattcacgcccagtcgtctcagccaatggcg

SEQ ID NO: 8656 - DNA, 52 bp, Artificial
  Synthetic oligonucleotide
ggcccctggcgaggtcaccgccttttgctctgccctatacaggtttaatcgt

SEQ ID NO: 8657 - DNA, 58 bp, Artificial
  Synthetic oligonucleotide
acctatacagagaccaccattatcgctacggcagatgcccgaggcctcattcagtcgt

SEQ ID NO: 8658 - DNA, 60 bp, Artificial
  Synthetic oligonucleotide
agagtgcgctatcatggaggagtgcgggatgccgcagtggctcatccgcttgtaccacct

SEQ ID NO: 8659 - DNA, 60 bp, Artificial
  Synthetic oligonucleotide
acactgcgcctgtccctgatgttgattctcgtggcgccattttacgtcgccagtacaatc

SEQ ID NO: 8660 - DNA, 55 bp, Artificial
  Synthetic oligonucleotide
tttaccaattcagcctacaccggtgcattaggtttacttgacatcgccctccagg

SEQ ID NO: 8661 - DNA, 60 bp, Artificial
  Synthetic oligonucleotide
gattggcgactgtggtcatgataacgaggcctatgagggttccgaagtagatcctgctga

SEQ ID NO: 8662 - DNA, 60 bp, Artificial
  Synthetic oligonucleotide
gcactgctatgaatttcgtgacctgaggatggcagcgttcaaaggagatgattcagtggt

SEQ ID NO: 8663 - DNA, 60 bp, Artificial
  Synthetic oligonucleotide
ccccaaccagatccctgccattgattttgagcatgctggccttgttccggcgatccggcc

SEQ ID NO: 8664 - DNA, 55 bp, Artificial
  Synthetic oligonucleotide
cccgccattgattttgagcatgctggccttgttcctgctatccggcccgagctgg

SEQ ID NO: 8665 - DNA, 59 bp, Artificial
  Synthetic oligonucleotide
ccccggtttggtacataacctgattgggatgctccagaccattgctgatggcaaggcgc

SEQ ID NO: 8666 - DNA, 60 bp, Artificial
  Synthetic oligonucleotide
cccagacgacattgtggctcgtgcgtcacgtctgacggctactgtagaacttgccgccag

SEQ ID NO: 8667 - DNA, 60 bp, Artificial
  Synthetic oligonucleotide
gactgtaataaattcacaacaggcgagacaatagcgcacggcaaagttgggcaggggata

SEQ ID NO: 8668 - DNA, 60 bp, Artificial
  Synthetic oligonucleotide
acggctggccgtctgtgattttctgcgaaagttaacgaatgtggctcaggtctgtgtgga

SEQ ID NO: 8669 - DNA, 58 bp, Artificial
  Synthetic oligonucleotide
tgtggctcaggtctgtgtggatgttgtttcgcaggtttacggtgtcagccccggttta

SEQ ID NO: 8670 - DNA, 54 bp, Artificial
  Synthetic oligonucleotide
tctgtgtggatgttgtttcgcaggtttacggtgtcagccccggtttagtacata

SEQ ID NO: 8671 - DNA, 60 bp, Artificial
  Synthetic oligonucleotide
tactagctggtggcacgttacccatcgttgccccgccgatgtgtgtgagctcatacgtgg

SEQ ID NO: 8672 - DNA, 51 bp, Artificial
  Synthetic oligonucleotide
cgtctcctatgccttatgttccgtaccctcgctcaacagaggtgtatgtta

SEQ ID NO: 8673 - DNA, 60 bp, Artificial
  Synthetic oligonucleotide
gcgctacggacgacgcacaaagctgtacaatacttctcactctgatagtcgcgaatctct

SEQ ID NO: 8674 - DNA, 50 bp, Artificial
  Synthetic oligonucleotide
acttacgaaggtgatactagtgcaggctacaaccatgatgtctctatact

SEQ ID NO: 8675 - DNA, 54 bp, Artificial
  Synthetic oligonucleotide
ctagctgtttttctccattcgagccccccgctctggactcaccaccccccgccg

SEQ ID NO: 8676 - DNA, 60 bp, Artificial
  Synthetic oligonucleotide
atgtccgatgggtttgcagcctataccttgacgccccgacctattatccatgctgttgct

SEQ ID NO: 8677 - DNA, 55 bp, Artificial
  Synthetic oligonucleotide
ctagctgatacgcttctcggtggtttaccgacagaattgatttcgtcggctgggg

SEQ ID NO: 8678 - DNA, 60 bp, Artificial
  Synthetic oligonucleotide
ggcgatactagtgcgggctataaccatgatgtctccatactccgtgcgtggatccgtacc

SEQ ID NO: 8679 - DNA, 60 bp, Artificial
  Synthetic oligonucleotide
acggctgatgccaggggccttatccaatcatcccgagctcatgctatagttgcacttacc

SEQ ID NO: 8680 - DNA, 60 bp, Artificial
  Synthetic oligonucleotide
ttgccacgttagacgctcgcggccttatagcttcatctcgcgcgcatgccatagtcgcgc

SEQ ID NO: 8681 - DNA, 60 bp, Artificial
  Synthetic oligonucleotide
tacggatatagtccactgccgtatggccgctccaagccagcgaaaggctgttctctcaac

SEQ ID NO: 8682 - DNA, 57 bp, Artificial
  Synthetic oligonucleotide
tatcttactatctgccatcagagatatcttcgcacgcaggctatctcgaaaggtatg

SEQ ID NO: 8683 - DNA, 60 bp, Artificial
  Synthetic oligonucleotide
ggagctcgaacagggcttactttacatgccccaagaactagccacatctgacagcgtgct

SEQ ID NO: 8684 - DNA, 60 bp, Artificial
  Synthetic oligonucleotide
cctggcaatacgaatacgcgcgtctcccgctattcgagtagcgcacgccacaagttacgc

SEQ ID NO: 8685 - DNA, 54 bp, Artificial
  Synthetic oligonucleotide
attctgccctggcgaatgctgtggtggttcggccgtttttatcccgtgttcaga

SEQ ID NO: 8686 - DNA, 54 bp, Artificial
  Synthetic oligonucleotide
gggtatatcggcctggagtaagaccttctgtgccctatttggcccctggtttcg

SEQ ID NO: 8687 - DNA, 60 bp, Artificial
  Synthetic oligonucleotide
tacctatggctcttctaccaatcctatgtatgtttctgacactgtgacatttgttaatgt

SEQ ID NO: 8688 - DNA, 55 bp, Artificial
  Synthetic oligonucleotide
ccaccaatcctatgtatgtttctgacactgtgacatttgttaatgtagcgaccgg

SEQ ID NO: 8689 - DNA, 55 bp, Artificial
  Synthetic oligonucleotide
atgttgcgcaggtttgtgttgatgttgtgtcccgtgtctatggagttagccctgg

SEQ ID NO: 8690 - DNA, 54 bp, Artificial
  Synthetic oligonucleotide
cgagtttatggagttagccctgggctggtacataaccttattggcatgttgcaa

SEQ ID NO: 8691 - DNA, 60 bp, Artificial
  Synthetic oligonucleotide
gtgatgattcggttgtgctctgtagtgattaccgacagagtcgtaatgcagcggccttga

SEQ ID NO: 8692 - DNA, 60 bp, Artificial
  Synthetic oligonucleotide
cagtgattacatatgagggggattccagtgccgggtacaatcatgatgtgtctatcttac

SEQ ID NO: 8693 - DNA, 55 bp, Artificial
  Synthetic oligonucleotide
cggtagtcctctgtagtgattaccgacagagtcgtaacgcggcagccttaatcgc

SEQ ID NO: 8694 - DNA, 60 bp, Artificial
  Synthetic oligonucleotide
atggtatgacgcggctttatgctgccctccatcttccgcctgaggtcttgcttccccctg

SEQ ID NO: 8695 - DNA, 60 bp, Artificial
  Synthetic oligonucleotide
atactgccccggtccctgatgttgactcgcgtggtgcgatattgcgccgtcagtataacc

SEQ ID NO: 8696 - DNA, 55 bp, Artificial
  Synthetic oligonucleotide
gggattccagtgccgggtacaatcatgatgtgtctatcttacgcgcttggatccg

SEQ ID NO: 8697 - DNA, 52 bp, Artificial
  Synthetic oligonucleotide
tctgacgggtttgcggcctacaccttgacaccccgacccattatccatgctg

SEQ ID NO: 8698 - DNA, 60 bp, Artificial
  Synthetic oligonucleotide
atcttagttataccttgacatctgcaggccttgaaatacatgtcgtctctgccgggcttg

SEQ ID NO: 8699 - DNA, 60 bp, Artificial
  Synthetic oligonucleotide
gactaagtctacatttcatgccgtccctgtgcatatctgggacaggcttatgctttttgg

SEQ ID NO: 8700 - DNA, 60 bp, Artificial
  Synthetic oligonucleotide
cttgctcgactaagtctacatttcatgccgtccctgtgcatatctgggacaggcttatgc

SEQ ID NO: 8701 - DNA, 53 bp, Artificial
  Synthetic oligonucleotide
ctactaaatccacatttcatgccgtccctgtgcacatatgggacaggcttatg

SEQ ID NO: 8702 - DNA, 60 bp, Artificial
  Synthetic oligonucleotide
gttctgtatgccgccccgctgagccccttgctcccgcttcaggatggaactaacactcat

SEQ ID NO: 8703 - DNA, 54 bp, Artificial
  Synthetic oligonucleotide
tgatttcgtcggctggtggacaattgttctattctcgccccgtcgtctcagcca

SEQ ID NO: 8704 - DNA, 52 bp, Artificial
  Synthetic oligonucleotide
tatgttccgccatggtatgacgcggctttacgctgccctccacctcccgcct

SEQ ID NO: 8705 - DNA, 51 bp, Artificial
  Synthetic oligonucleotide
tgttacccatcgctgccctgcggatgtatgtgagctaatccgtggcgcata

SEQ ID NO: 8706 - DNA, 55 bp, Artificial
  Synthetic oligonucleotide
aagcttctaattatgcccagtaccgggttgctcgtgctacaattcgctaccgccc

SEQ ID NO: 8707 - DNA, 60 bp, Artificial
  Synthetic oligonucleotide
gcaagtatatggtgttagtcctggcctggtacataacctgattggaatgcttcagactat

SEQ ID NO: 8708 - DNA, 55 bp, Artificial
  Synthetic oligonucleotide
ggtgtcagccctggattggtacataacctgattggaatgcttcagaccattgccg

SEQ ID NO: 8709 - DNA, 56 bp, Artificial
  Synthetic oligonucleotide
gctagtgatatctgggtgttaccaccgccctcagaggagtctcaggttgacgcagc

SEQ ID NO: 8710 - DNA, 50 bp, Artificial
  Synthetic oligonucleotide
atcccgagctcatgctatagttgcacttacccgtcacacagagaaatgcg

SEQ ID NO: 8711 - DNA, 60 bp, Artificial
  Synthetic oligonucleotide
ttgaagtgcgtattatttctgctgggctcgactgcaaggctgtctttccgcctggtgtcg

SEQ ID NO: 8712 - DNA, 51 bp, Artificial
  Synthetic oligonucleotide
attcaaccttgctgatacacttcttggcggtctgccgacagaattgatttc

SEQ ID NO: 8713 - DNA, 55 bp, Artificial
  Synthetic oligonucleotide
tttaatcttgctgacacacttcttggcggtctgccgacagaattgatttcgtcgg

SEQ ID NO: 8714 - DNA, 55 bp, Artificial
  Synthetic oligonucleotide
gggaggtttatccctactatcggtccggtccaggctaccacgtgcgagctatatg

SEQ ID NO: 8715 - DNA, 53 bp, Artificial
  Synthetic oligonucleotide
cgccttggcgaatgctgtggtggttcggccgtttttgtctcgcgttcaaaccg

SEQ ID NO: 8716 - DNA, 60 bp, Artificial
  Synthetic oligonucleotide
attatggctactgaggcatccaattatgcccagtatcgggttgtccgagctacaatccgt

SEQ ID NO: 8717 - DNA, 55 bp, Artificial
  Synthetic oligonucleotide
gcctcggaggatgcgcttaccgctgtgattactgcagcgtatctgactatctgcc

SEQ ID NO: 8718 - DNA, 55 bp, Artificial
  Synthetic oligonucleotide
actttggattaccctgcccgcgcccatacttttgatgacttctgcccagagtgcc

SEQ ID NO: 8719 - DNA, 52 bp, Artificial
  Synthetic oligonucleotide
taggggtgatgattcggtggtcctctgtagtgactaccgacagagtcgtaat

SEQ ID NO: 8720 - DNA, 60 bp, Artificial
  Synthetic oligonucleotide
ggcagctctagcagcggccaactccgccctggcgaatgctgtggtggttcggcctttctt

SEQ ID NO: 8721 - DNA, 55 bp, Artificial
  Synthetic oligonucleotide
ggccaactccgccctggcgaatgctgtggtggttcggcctttcctatctcggcta

SEQ ID NO: 8722 - DNA, 54 bp, Artificial
  Synthetic oligonucleotide
ccctatgttccatacccacgctcaaccgaggtctatgttcggtctattttcggc

SEQ ID NO: 8723 - DNA, 55 bp, Artificial
  Synthetic oligonucleotide
gtcatcccgggcccatgctatagttgcacttacccgccacaccgagaagtgcgtc

SEQ ID NO: 8724 - DNA, 50 bp, Artificial
  Synthetic oligonucleotide
ggcatatcggcctggagcaagaccttctgtgctctgtttggcccgtggtt

SEQ ID NO: 8725 - DNA, 60 bp, Artificial
  Synthetic oligonucleotide
cgatgtatgtgagctcatacgcggggcttatcctaaaatccagaccacgagtcgtgtgct

SEQ ID NO: 8726 - DNA, 60 bp, Artificial
  Synthetic oligonucleotide
tgcgagctcatacgcggggcttatcctaaaattcagaccacgagtcgtgtgctacggtct

SEQ ID NO: 8727 - DNA, 60 bp, Artificial
  Synthetic oligonucleotide
agcagtttgtgacttcctccgaaggctgacgaatgttgcgcaggtttgtgttgatgttgt

SEQ ID NO: 8728 - DNA, 60 bp, Artificial
  Synthetic oligonucleotide
gtgacctatgagggtgatactagtgcaggctataaccatgatgtttctatacttcgtgcg

SEQ ID NO: 8729 - DNA, 60 bp, Artificial
  Synthetic oligonucleotide
tggcacttaccatactacctcatatctcctaatccatgatggggaccgtgcagtgattac

SEQ ID NO: 8730 - DNA, 52 bp, Artificial
  Synthetic oligonucleotide
ttctgttgctctaggcttatgacataccttcgcggcattagttataaggtca

SEQ ID NO: 8731 - DNA, 60 bp, Artificial
  Synthetic oligonucleotide
tgtcatgtcggatgggcttgcagcctatactttaactccccggcctattattcatgctgt

SEQ ID NO: 8732 - DNA, 54 bp, Artificial
  Synthetic oligonucleotide
ctaagatagtcggagatcatccgttggtcatagaacgtgtgcgggccatcggat

SEQ ID NO: 8733 - DNA, 51 bp, Artificial
  Synthetic oligonucleotide
aactagtgttcacccaggcggctaaggctgccaaccccggctcagtgacgg

SEQ ID NO: 8734 - DNA, 55 bp, Artificial
  Synthetic oligonucleotide
gctgatacgcttctcggtgggctaccgacagaattgatttcgtcggctggtggac

SEQ ID NO: 8735 - DNA, 60 bp, Artificial
  Synthetic oligonucleotide
tatccagtcatcccgggctcatgctatagttgcacttactcgccatactgagaagtgtgt

SEQ ID NO: 8736 - DNA, 55 bp, Artificial
  Synthetic oligonucleotide
ggtccagcctggtattgcctccgagttagtcatccctagtgagcgccttcattac

SEQ ID NO: 8737 - DNA, 54 bp, Artificial
  Synthetic oligonucleotide
gccagctgcagcccctctaccaagcactcggcataccttctgatcttgccgctc

SEQ ID NO: 8738 - DNA, 55 bp, Artificial
  Synthetic oligonucleotide
ccttcgagggttaacgaatgttgcgcaggtttgtgttgatgttgtgtcccgtgtc

SEQ ID NO: 8739 - DNA, 60 bp, Artificial
  Synthetic oligonucleotide
gatgctaggggtctcatccagtcatcccgagctcatgctatagttgcacttacccgtcac

SEQ ID NO: 8740 - DNA, 60 bp, Artificial
  Synthetic oligonucleotide
ggcagctctagcagcggccaactctgccttggcgaatgctgtggtggttcggcccttttt

SEQ ID NO: 8741 - DNA, 52 bp, Artificial
  Synthetic oligonucleotide
tggccctaacccgtcatacggagaaatgtgtggtcgttgatgccccgggact

SEQ ID NO: 8742 - DNA, 60 bp, Artificial
  Synthetic oligonucleotide
cagttggtgcgcttgttgctaatgaggggtggaatgcatccgaggacgctcttaccgcag

SEQ ID NO: 8743 - DNA, 60 bp, Artificial
  Synthetic oligonucleotide
ttattcaatcttcccgggcccatgctatagttgcactcacccgccacacagagaagtgcg

SEQ ID NO: 8744 - DNA, 50 bp, Artificial
  Synthetic oligonucleotide
gcatatctgggagtctgctaaccccttttgcggggagggtaccctgtaca

SEQ ID NO: 8745 - DNA, 60 bp, Artificial
  Synthetic oligonucleotide
gctgtagctccggcccccgatactgccccggtccctgatgttgattcgcgtggcgctata

SEQ ID NO: 8746 - DNA, 60 bp, Artificial
  Synthetic oligonucleotide
cacacgatatagatttaggggattcccgtgtggtcatccaggactatgataaccaacatg

SEQ ID NO: 8747 - DNA, 56 bp, Artificial
  Synthetic oligonucleotide
tacgtcaccgcttacatccaccattgctactggcactaatcttgtactatatgctg

SEQ ID NO: 8748 - DNA, 54 bp, Artificial
  Synthetic oligonucleotide
atggacgtctcgcagtttgcagagtccaagggggttaaaactgcgctagaagcg

SEQ ID NO: 8749 - DNA, 60 bp, Artificial
  Synthetic oligonucleotide
tactgtcgagctcgtcactggtccagggcgacttgagtgccgcactattttaggtaacaa

SEQ ID NO: 8750 - DNA, 60 bp, Artificial
  Synthetic oligonucleotide
cttgcaccaacgagttggtggcacgttacacatcgctgcccggccgatgtatgtgagctc

SEQ ID NO: 8751 - DNA, 55 bp, Artificial
  Synthetic oligonucleotide
cgagttggtggcacgttacacatcgctgcccggccgatgtgtgcgagctcatacg

SEQ ID NO: 8752 - DNA, 50 bp, Artificial
  Synthetic oligonucleotide
atgccttatgttccataccctcgctccaccgaggtctatgtccggtctat

SEQ ID NO: 8753 - DNA, 60 bp, Artificial
  Synthetic oligonucleotide
tggcaatacgaatacgcgcgtctctcgttactctagtagtgcgcgccacaagttatgccg

SEQ ID NO: 8754 - DNA, 53 bp, Artificial
  Synthetic oligonucleotide
ggatgagctgtacttaaccgagccagctatagcttggtttgaggccaaccggc

SEQ ID NO: 8755 - DNA, 52 bp, Artificial
  Synthetic oligonucleotide
acacttcttggcggtctgccgacagaattgatttcgtcggccgggggtcagt

SEQ ID NO: 8756 - DNA, 60 bp, Artificial
  Synthetic oligonucleotide
taagacgaagctatatgaggcagcccattcagatgttcgtgaatctctagctaggtttat

SEQ ID NO: 8757 - DNA, 57 bp, Artificial
  Synthetic oligonucleotide
attctgccctggcgaatgctgtggtggttcggccgtttttatctcgtgtgcaaactg

SEQ ID NO: 8758 - DNA, 60 bp, Artificial
  Synthetic oligonucleotide
gtgcccaaactactcacacttaaagaactcgccgctgcagcaatacgcaagcaaccgtcc

SEQ ID NO: 8759 - DNA, 55 bp, Artificial
  Synthetic oligonucleotide
ttgtggctcgtgcgtcacgtctgacggctactgtagaacttgccgccagcccagg

SEQ ID NO: 8760 - DNA, 55 bp, Artificial
  Synthetic oligonucleotide
actccgccctggcgaatgctgtggtggttcggcctttcttgtcccggcttcagac

SEQ ID NO: 8761 - DNA, 55 bp, Artificial
  Synthetic oligonucleotide
gccgtccctgtgcatatatgggacaggcttatgcttttcggagcgacccttgatg

SEQ ID NO: 8762 - DNA, 55 bp, Artificial
  Synthetic oligonucleotide
ccgacagaattgatttcgtcggccggtggtcagctgttttactctcgccccgtcg

SEQ ID NO: 8763 - DNA, 60 bp, Artificial
  Synthetic oligonucleotide
ctcgccccgtcgtctcagccaatggcgagccgactgtgaaactttacacctcagtcgaga

SEQ ID NO: 8764 - DNA, 60 bp, Artificial
  Synthetic oligonucleotide
tgactcgcgcggcgccatattgcgacggcagtataatctgtccacgtccccgcttacgtc

SEQ ID NO: 8765 - DNA, 58 bp, Artificial
  Synthetic oligonucleotide
gagtgcgggatgccgcagtggctcatccgcttgtatcaccttataaggtctgcgcgga

SEQ ID NO: 8766 - DNA, 60 bp, Artificial
  Synthetic oligonucleotide
cgcttatgaggtttatccccaccattggccctgtgcaggctacaacgtgcgagctctatg

SEQ ID NO: 8767 - DNA, 60 bp, Artificial
  Synthetic oligonucleotide
tcccgccccgtcgtctcagccaatggcgagccggctgtcaagttgtatacaccagttgag

SEQ ID NO: 8768 - DNA, 55 bp, Artificial
  Synthetic oligonucleotide
cactccggtgagcccggcactcttctatggaatactgtctggaatatggccgtta

SEQ ID NO: 8769 - DNA, 55 bp, Artificial
  Synthetic oligonucleotide
accattctgtggcgagagcacactttacacccgtacttggtcggaggttgatgcc

SEQ ID NO: 8770 - DNA, 60 bp, Artificial
  Synthetic oligonucleotide
gtcccgtgtctatggagttagccccgggctggtacataaccttattggcatgctgcagac

SEQ ID NO: 8771 - DNA, 55 bp, Artificial
  Synthetic oligonucleotide
ggttgtgggtttctgcgcgggcccctcaccttgttgacgtatctacgcgccttgg

SEQ ID NO: 8772 - DNA, 55 bp, Artificial
  Synthetic oligonucleotide
gacgtgacccgcccacggctaggagagcacttttatacggacctcgggcacaaaa

SEQ ID NO: 8773 - DNA, 55 bp, Artificial
  Synthetic oligonucleotide
gatacgacaacactacagcacagccaaatcgtccacgcagtacctcaagcgcagc

SEQ ID NO: 8774 - DNA, 55 bp, Artificial
  Synthetic oligonucleotide
ggctttcttcgagactgcaaacacatcatacttcgacccacaacagcgtccgtgg

SEQ ID NO: 8775 - DNA, 55 bp, Artificial
  Synthetic oligonucleotide
ggcatcggttcgtctcttggatcctgctacgcgtctacaaggccgctgttccgcg

SEQ ID NO: 8776 - DNA, 55 bp, Artificial
  Synthetic oligonucleotide
ttagcaagccccgcatcacggtacaattcgtccctcctgcctatgccctgtgtag

SEQ ID NO: 8777 - DNA, 55 bp, Artificial
  Synthetic oligonucleotide
gttgccggcggtactataagcgatgctagatgagcgtggttggcgcatgctgacg

SEQ ID NO: 8778 - DNA, 55 bp, Artificial
  Synthetic oligonucleotide
gcaaatcttcgtggctgttctcccttcccgttggcccgctcagacccaggtatct

SEQ ID NO: 8779 - DNA, 55 bp, Artificial
  Synthetic oligonucleotide
tcgagcgccgtgcagtcaaagggtgcctcttgccgaccccaagcgatgttatgga

SEQ ID NO: 8780 - DNA, 55 bp, Artificial
  Synthetic oligonucleotide
gcgagctcccgtttgctttcccacgccccacaatccgtctagcaggcgcgtaact

SEQ ID NO: 8781 - DNA, 55 bp, Artificial
  Synthetic oligonucleotide
gagccgcttcatagaccaaccccacccgtcggaccggactacagcaaggtcgcgt

SEQ ID NO: 8782 - DNA, 55 bp, Artificial
  Synthetic oligonucleotide
tctgtcaggtctaccgctataacgcccatgtttataacgccatgactctcgccgt

SEQ ID NO: 8783 - DNA, 55 bp, Artificial
  Synthetic oligonucleotide
gcaccaccttcataccaaccattgtgttccggtgtaaaacgtcctagagatgacg

SEQ ID NO: 8784 - DNA, 55 bp, Artificial
  Synthetic oligonucleotide
ggtgcagccgatcaactactgggtgttttgttagataaagccccaccgttgtctc

SEQ ID NO: 8785 - DNA, 55 bp, Artificial
  Synthetic oligonucleotide
cgtgcatgtcggaggcccgcgaaagtctcccgcccattcccagaattttgtggcc

SEQ ID NO: 8786 - DNA, 55 bp, Artificial
  Synthetic oligonucleotide
gacggacaaccaggtggaggcgtgcaaagagacgtgcgaacactacttcatagcg

SEQ ID NO: 8787 - DNA, 55 bp, Artificial
  Synthetic oligonucleotide
cgtttgctctttgaccactccatcccggattctgcctacgaataccgcactacgg

SEQ ID NO: 8788 - DNA, 55 bp, Artificial
  Synthetic oligonucleotide
gagagggcgcgtgttctaaaagaccgtccgcgtgccgtaaacgctcggctgcact

SEQ ID NO: 8789 - DNA, 55 bp, Artificial
  Synthetic oligonucleotide
ataagaaacgccgagatggtgcacggtacatccacctgccgcgagagccaggccg

SEQ ID NO: 8790 - DNA, 55 bp, Artificial
  Synthetic oligonucleotide
actgcatacaccggggtgtcgccaggaaaccgcgtctcccctttatgtccgctcg

SEQ ID NO: 8791 - DNA, 55 bp, Artificial
  Synthetic oligonucleotide
atcgctctcttggtggaccgctgctatccaaggctgttcaggttcctccgcgttg

SEQ ID NO: 8792 - DNA, 55 bp, Artificial
  Synthetic oligonucleotide
cccaccgtgctgactaggttggtgatggactgacccacgctacccagactgtcca

SEQ ID NO: 8793 - DNA, 55 bp, Artificial
  Synthetic oligonucleotide
cggcggttgcgaggttccttctctcttcgcgatgctctctcagaatggcacggcc

SEQ ID NO: 8794 - DNA, 55 bp, Artificial
  Synthetic oligonucleotide
agcccggagttcaggagcagtcaaaacacgcccttcgacaataactacgccatgg

SEQ ID NO: 8795 - DNA, 55 bp, Artificial
  Synthetic oligonucleotide
tctccgaggtatctgggtgccgccagggttcctccgcgtgtactgagatccctga

SEQ ID NO: 8796 - DNA, 55 bp, Artificial
  Synthetic oligonucleotide
tctgtacgcagtctagccaggaccatattaaccgccgctacgatctcccaggctg

SEQ ID NO: 8797 - DNA, 55 bp, Artificial
  Synthetic oligonucleotide
ccggctgcgcactaccattatccctcagggcacccctatcgccgcgttgtatcag

SEQ ID NO: 8798 - DNA, 55 bp, Artificial
  Synthetic oligonucleotide
ggatgcggcggacccacttgccacgacaacggtccagacgaccggcagtagcagc

SEQ ID NO: 8799 - DNA, 55 bp, Artificial
  Synthetic oligonucleotide
cagacacgtcacaatcatactgcgtcaatcacctgcccgcgagccattcacacgg

SEQ ID NO: 8800 - DNA, 55 bp, Artificial
  Synthetic oligonucleotide
gcaatgtacccgcgaaaacacgtatcgttaccctccgccctacaacaccacacgc

SEQ ID NO: 8801 - DNA, 55 bp, Artificial
  Synthetic oligonucleotide
ccctgataaacggacctatgcagtcctcacgaaacccaaacagacaccgacacac

SEQ ID NO: 8802 - DNA, 55 bp, Artificial
  Synthetic oligonucleotide
taccgctccatgattccggcccctctctctccgcgccgcccgagtgccaacgtac

SEQ ID NO: 8803 - DNA, 55 bp, Artificial
  Synthetic oligonucleotide
tgtgcgtgtgtctctccttcagtttccaaacgtctctcgccgtgccgttgcaggc

SEQ ID NO: 8804 - DNA, 55 bp, Artificial
  Synthetic oligonucleotide
cgcgcggtgtagtgataggaattgctggtgctatcgtaccacgccacgtgcggct

SEQ ID NO: 8805 - DNA, 55 bp, Artificial
  Synthetic oligonucleotide
aacacagacagtgccgcgaagacagcgaagggagcggtttgcgcagaggaggcca

SEQ ID NO: 8806 - DNA, 55 bp, Artificial
  Synthetic oligonucleotide
tgcaacgctcccgctcgagctcgccttacgtcatcaaagtagccttctcgcacgc

SEQ ID NO: 8807 - DNA, 55 bp, Artificial
  Synthetic oligonucleotide
tccccgcgcttttgttcgccgctgtgccttccacgtgcccctcctaacgtattgg

SEQ ID NO: 8808 - DNA, 55 bp, Artificial
  Synthetic oligonucleotide
cccctgcgccatcttccaagaggcctaccctattctctgcgccagcgataaggcc

SEQ ID NO: 8809 - DNA, 55 bp, Artificial
  Synthetic oligonucleotide
tttccagacgcctccgttctcgggcaacgtgtgaggggtcgtcgcagtagtccgg

SEQ ID NO: 8810 - DNA, 55 bp, Artificial
  Synthetic oligonucleotide
tgacagtgttgcggggtgggcgtacacagaactgatggcagaggggtcgtctccg

SEQ ID NO: 8811 - DNA, 55 bp, Artificial
  Synthetic oligonucleotide
ccccgctgccgacaaacactcatccggtaagaggacatgcgtcagtacgtgccga

SEQ ID NO: 8812 - DNA, 55 bp, Artificial
  Synthetic oligonucleotide
cggaacaccgcaccacagagtcatcatcggcgccactacatcgcgcgagactgca

SEQ ID NO: 8813 - DNA, 55 bp, Artificial
  Synthetic oligonucleotide
gacttcaacatcgccctccacatctctctcgcctgtttatcgcaaaagcgccgca

SEQ ID NO: 8814 - DNA, 55 bp, Artificial
  Synthetic oligonucleotide
aacaaccacatcttgcaggccgcccagtcattccccagctcgttcggagggcacg

SEQ ID NO: 8815 - DNA, 55 bp, Artificial
  Synthetic oligonucleotide
cccggcgctaccaacaactctccgtgacaagatttcaggtctccccgtgtgccag

SEQ ID NO: 8816 - DNA, 55 bp, Artificial
  Synthetic oligonucleotide
ggcttcctacatcccacgagcgccaaacagacaccacgccagtctggacctggtc

SEQ ID NO: 8817 - DNA, 55 bp, Artificial
  Synthetic oligonucleotide
tgcctacaatgctcaaccgtcccaccgatttggatctcagcacaccaccaattcg

SEQ ID NO: 8818 - DNA, 60 bp, Artificial
  Synthetic oligonucleotide
ggtcatctgtgttggccatgtcactgtctgttgcccccactctataaaacacaagtccgg

SEQ ID NO: 8819 - DNA, 52 bp, Artificial
  Synthetic oligonucleotide
ggggacaccgccagcaaacgcgagcaacgggccacggggatgaagcagctgc

SEQ ID NO: 8820 - DNA, 55 bp, Artificial
  Synthetic oligonucleotide
ggacaaggggacggactatggggaacgccgctacaccgccatgagacacacagca

SEQ ID NO: 8821 - DNA, 55 bp, Artificial
  Synthetic oligonucleotide
cttgacaagtacagcgtcctgaacacaatacttgcccacctgcgcccgtccctcg

SEQ ID NO: 8822 - DNA, 55 bp, Artificial
  Synthetic oligonucleotide
ggacagcttgctccacatgccccatgactccgtgtcgttccaaaccgccgtgacg

SEQ ID NO: 8823 - DNA, 55 bp, Artificial
  Synthetic oligonucleotide
ggtgcttcctggtagagcgatgtgaggttcagggttccgtagatggtggacgggg

SEQ ID NO: 8824 - DNA, 55 bp, Artificial
  Synthetic oligonucleotide
ccgcagacgccccgccaataaacacacgcacgacatgagggcctggatcgagatt

SEQ ID NO: 8825 - DNA, 55 bp, Artificial
  Synthetic oligonucleotide
ggcacgaggatccggggctccgcgttgtgcgacgggccgctacactggtgggtgg

SEQ ID NO: 8826 - DNA, 56 bp, Artificial
  Synthetic oligonucleotide
tccctgttggcccgaagccattgggtatgaaccagctgcgcctcctgtccgaccct

SEQ ID NO: 8827 - DNA, 55 bp, Artificial
  Synthetic oligonucleotide
ctcttcagcccgtgttgaccccaaaacagacgcaagatgtacaacgcacaacccc

SEQ ID NO: 8828 - DNA, 55 bp, Artificial
  Synthetic oligonucleotide
cgcaggccgggatgttggctgtgaccctgcgagttgaagttttgtctgtacgtgc

SEQ ID NO: 8829 - DNA, 55 bp, Artificial
  Synthetic oligonucleotide
taacgcgctacaacaaccgtcgtctatcgcacatcatccgtccaaacagtgcgct

SEQ ID NO: 8830 - DNA, 55 bp, Artificial
  Synthetic oligonucleotide
cctccccacatacaacgggcggccacacgaccaaacactctcccttcatgcccgt

SEQ ID NO: 8831 - DNA, 55 bp, Artificial
  Synthetic oligonucleotide
ctcgtggttttgactacactgcctggttgcggagggcggggtacgacgcgggaca

SEQ ID NO: 8832 - DNA, 55 bp, Artificial
  Synthetic oligonucleotide
ctacgtgtttgtatcatcccaacgcaccccaatgcctctctcatatgaattccgg

SEQ ID NO: 8833 - DNA, 55 bp, Artificial
  Synthetic oligonucleotide
gtgtgccctctgtccgagagccttgcgccccagtggaagggtagagaggattgtc

SEQ ID NO: 8834 - DNA, 60 bp, Artificial
  Synthetic oligonucleotide
gtcatctggcaatgtagctatacctgtctgtgaggacccacttgcccccccatgtaagaa

SEQ ID NO: 8835 - DNA, 60 bp, Artificial
  Synthetic oligonucleotide
tgtacgggcatcacagagccatttaaaagcctgttacagacaccaatcaacccaccacgc

SEQ ID NO: 8836 - DNA, 55 bp, Artificial
  Synthetic oligonucleotide
cgcaggtaggtagttgtcggtgtctatctgtccgcgcgtaaacactccaccaccg

SEQ ID NO: 8837 - DNA, 55 bp, Artificial
  Synthetic oligonucleotide
cgagagctgtgtcttggcgtagaggacccggttgatggcattgagaagcaggtgg

SEQ ID NO: 8838 - DNA, 53 bp, Artificial
  Synthetic oligonucleotide
acgacggccctcctggttccacgcaacagtctcccaaaacgtccatacaccgt

SEQ ID NO: 8839 - DNA, 54 bp, Artificial
  Synthetic oligonucleotide
cgctcgaatcacgccgtgcccgccgttaccccaaggcgcaccgtagcccgcgaa

SEQ ID NO: 8840 - DNA, 55 bp, Artificial
  Synthetic oligonucleotide
cacctagactccacccacacctagactccacccacacctagactccacccacacc

SEQ ID NO: 8841 - DNA, 55 bp, Artificial
  Synthetic oligonucleotide
gcgatcggtagcaagtgcccatccactaggacgcaatccacccagactcacaacc

SEQ ID NO: 8842 - DNA, 55 bp, Artificial
  Synthetic oligonucleotide
ctcgcccgttcacgcatagcagggatgaccagcgcatatcaaagacccgagcgtc

SEQ ID NO: 8843 - DNA, 55 bp, Artificial
  Synthetic oligonucleotide
ccagtagcccaggcgagggaaatgttagcacgagtggttgctagggccgctgaga

SEQ ID NO: 8844 - DNA, 55 bp, Artificial
  Synthetic oligonucleotide
gtgcgaggtgtggggattgagtgttgaaacaggcttagacatagacggtgggagc

SEQ ID NO: 8845 - DNA, 60 bp, Artificial
  Synthetic oligonucleotide
cgaggtctctgttatcctggccacggcgtctaagagcacagtggagattgccccgggcca

SEQ ID NO: 8846 - DNA, 54 bp, Artificial
  Synthetic oligonucleotide
ggagcgcgacacagcagacgtccgtccagtaacgtggcagggcgcagaatgaca

SEQ ID NO: 8847 - DNA, 60 bp, Artificial
  Synthetic oligonucleotide
agcacagggcctccctcatgtggaacgagctgagtaagatcaaccctaccagcgtgatga

SEQ ID NO: 8848 - DNA, 60 bp, Artificial
  Synthetic oligonucleotide
gctacacgacagccacagtgacgggtaagcagccgaggaccatgaaatacagcctgtcgt

SEQ ID NO: 8849 - DNA, 55 bp, Artificial
  Synthetic oligonucleotide
gatcattgataccagtgccgccaacctacgcaccctccgggacactaagggcccc

SEQ ID NO: 8850 - DNA, 60 bp, Artificial
  Synthetic oligonucleotide
cgactccgactgtgccgagctactggctgatatactgacggggcagcgaacctacagcac

SEQ ID NO: 8851 - DNA, 55 bp, Artificial
  Synthetic oligonucleotide
gccgtccgcactgtaagagagtcccaggtatttgccctggacccagcaaggcagg

SEQ ID NO: 8852 - DNA, 55 bp, Artificial
  Synthetic oligonucleotide
cgtttgaaagccctacatggattcaacgccctactagctcctcatgccgccgctc

SEQ ID NO: 8853 - DNA, 55 bp, Artificial
  Synthetic oligonucleotide
ggtcctttggcgctgcttcaatccttcgtagcatagacactaggtggcgagatgg

SEQ ID NO: 8854 - DNA, 55 bp, Artificial
  Synthetic oligonucleotide
ttggccggctgaccccttactccaccccgtttcctagtagtagcgccacctggca

SEQ ID NO: 8855 - DNA, 55 bp, Artificial
  Synthetic oligonucleotide
gccgcacgccaatgtctcctaccaaccctcacggccacttgccattttcagcccc

SEQ ID NO: 8856 - DNA, 55 bp, Artificial
  Synthetic oligonucleotide
acaacagcagacacccggccatggacagaaacccggaaataccacagtcgtccac

SEQ ID NO: 8857 - DNA, 55 bp, Artificial
  Synthetic oligonucleotide
ggcagtcccaggctcgagttcacgtctcattcgcgccgcattatcccacgctgtg

SEQ ID NO: 8858 - DNA, 55 bp, Artificial
  Synthetic oligonucleotide
tcctcctcaccggtacatcgtcgccacgcggtcaccagagcggctctacgaggtt

SEQ ID NO: 8859 - DNA, 55 bp, Artificial
  Synthetic oligonucleotide
gcacctgaccacgagcttcggggagacggaccacatgctctcgcgtccctttaac

SEQ ID NO: 8860 - DNA, 55 bp, Artificial
  Synthetic oligonucleotide
aggcgtctcgtttcgggcgcgttcagtctgcaccaagcacgctttccgggtgtgc

SEQ ID NO: 8861 - DNA, 55 bp, Artificial
  Synthetic oligonucleotide
ccgcgcacagacaaccccgaacggcgatacagacaccgctacgttacaccgtgat

SEQ ID NO: 8862 - DNA, 55 bp, Artificial
  Synthetic oligonucleotide
aaggcttggacgcgaatggtctcacggtagcggatgtagtcggtatatctctgca

SEQ ID NO: 8863 - DNA, 55 bp, Artificial
  Synthetic oligonucleotide
tccattggtccccgctgctgaactgttaacactgccggttgcgacgacccgtacg

SEQ ID NO: 8864 - DNA, 55 bp, Artificial
  Synthetic oligonucleotide
ggtcggaggtccgtccgcacagacccaacgggatcagggcctcttcgcaacacag

SEQ ID NO: 8865 - DNA, 60 bp, Artificial
  Synthetic oligonucleotide
gaacgggggaggtgccgcgatccgatgcgtctagcccaggagcatgcgcacgtgatacaa

SEQ ID NO: 8866 - DNA, 60 bp, Artificial
  Synthetic oligonucleotide
tgcccctcacacctgcaaacttatccctgcatgcacctatacccccatgacccccatgca

SEQ ID NO: 8867 - DNA, 55 bp, Artificial
  Synthetic oligonucleotide
ccactctgtcccaccactctgtcccaccactctgtcccaccactctgtcccacca

SEQ ID NO: 8868 - DNA, 55 bp, Artificial
  Synthetic oligonucleotide
tctatcaccccaaacacaacacacaactttacattacagcagacctcaacacccc

SEQ ID NO: 8869 - DNA, 60 bp, Artificial
  Synthetic oligonucleotide
cttcacggagcggcgagaggtcatggttccacgaacacgctagggtcggatgcgcggaca

SEQ ID NO: 8870 - DNA, 55 bp, Artificial
  Synthetic oligonucleotide
gcgaacactacagaaggaggtgcaagtattgtagcatctgcgatagtcaacactc

SEQ ID NO: 8871 - DNA, 60 bp, Artificial
  Synthetic oligonucleotide
ctagtacggcgcacaaataatatgtctcaagctccaattagaatgatttacccagatgtt

SEQ ID NO: 8872 - DNA, 60 bp, Artificial
  Synthetic oligonucleotide
gtttgggagctccataaggtgcatagcggaagtatgaagcatgtcctggatcaagtgaat

SEQ ID NO: 8873 - DNA, 57 bp, Artificial
  Synthetic oligonucleotide
gagtcaactatcgtcaacacatgccacaatacttcactgtgtgcaatgcctcttggg

SEQ ID NO: 8874 - DNA, 60 bp, Artificial
  Synthetic oligonucleotide
tgaacttggagacatgctaattgtatcagaacttttagactgcacagggacaactgaacc

SEQ ID NO: 8875 - DNA, 60 bp, Artificial
  Synthetic oligonucleotide
tcggcattctattgggcaacagcgagcaaggagaacgcctcggcacggagagcgccctaa

SEQ ID NO: 8876 - DNA, 60 bp, Artificial
  Synthetic oligonucleotide
ggcggtcaactcgtcttctctcgcgtgccttctctcggccctctgccctcgctctagtcc

SEQ ID NO: 8877 - DNA, 52 bp, Artificial
  Synthetic oligonucleotide
taccccgccgctcaataaacgtcgcaacgcaagttctcacgggcaccgagtg

SEQ ID NO: 8878 - DNA, 50 bp, Artificial
  Synthetic oligonucleotide
tcacgcagtactacccacaagaggcacacaaggccatcgttgactactgg

SEQ ID NO: 8879 - DNA, 55 bp, Artificial
  Synthetic oligonucleotide
gagtcgcaaaacataacgctacttcattttacgtcatcacactctttgctagcga

SEQ ID NO: 8880 - DNA, 55 bp, Artificial
  Synthetic oligonucleotide
cagtccttagcggctaccgtacgtaaactacacgacgtcttgattacagcacaca

SEQ ID NO: 8881 - DNA, 55 bp, Artificial
  Synthetic oligonucleotide
ccaaaagcgcctgcctacactgcgaatccgtctccgttccaacctcctcagatgc

SEQ ID NO: 8882 - DNA, 55 bp, Artificial
  Synthetic oligonucleotide
cgatgcagatgcctgtagggatgtagatagttttgcgtgtggagttgaagatctt

SEQ ID NO: 8883 - DNA, 55 bp, Artificial
  Synthetic oligonucleotide
cgacgcccaggcaagtagtaatgccgagaaacatcgtagagtaacctagcatgag

SEQ ID NO: 8884 - DNA, 60 bp, Artificial
  Synthetic oligonucleotide
accctcacctgcaagcaaccatggccgactcatctaactcctcgcttaactgcacggcaa

SEQ ID NO: 8885 - DNA, 55 bp, Artificial
  Synthetic oligonucleotide
gtgatggctgtagttggatcgccctgttgacacttctcgatgaactgcgcttgat

SEQ ID NO: 8886 - DNA, 55 bp, Artificial
  Synthetic oligonucleotide
cggcgcgtagaaggcaaccagatcctcctacacgtaccgacgcacggactgctct

SEQ ID NO: 8887 - DNA, 55 bp, Artificial
  Synthetic oligonucleotide
ccgtccttgacacgatggagtcctctgccaagagaaagatggaccctgacaaccc

SEQ ID NO: 8888 - DNA, 55 bp, Artificial
  Synthetic oligonucleotide
ctcgccctgcttaaatcgaccgttacacacccagcgtccgactcacacctccccg

SEQ ID NO: 8889 - DNA, 55 bp, Artificial
  Synthetic oligonucleotide
gcggcgaggtatcttaggtgcccttaccccatatgtcgctcggttctgaggctcc

SEQ ID NO: 8890 - DNA, 58 bp, Artificial
  Synthetic oligonucleotide
gacgtgcacacggaagcttccccgaaaatcatctgattggctcgctagcaccacgggg

SEQ ID NO: 8891 - DNA, 55 bp, Artificial
  Synthetic oligonucleotide
gagttttgagatcttgacataacggtgattgtatggtaaggtattgagggacatt

SEQ ID NO: 8892 - DNA, 60 bp, Artificial
  Synthetic oligonucleotide
gtgctcctaaacactgagtctgatccactgctagtagacatcccatcttcttcgctactg

SEQ ID NO: 8893 - DNA, 55 bp, Artificial
  Synthetic oligonucleotide
cgcctagatggcgtcgggagggatcacttcgaacgattccagatgtctgcgccag

SEQ ID NO: 8894 - DNA, 60 bp, Artificial
  Synthetic oligonucleotide
caacagcgcaaagaaattcgtctgctcctaccaaattactccaatcataagtgatgacac

SEQ ID NO: 8895 - DNA, 55 bp, Artificial
  Synthetic oligonucleotide
cggagagcgcatcggggagagacagggattccgcacgcgtgaaggttttaggcca

SEQ ID NO: 8896 - DNA, 60 bp, Artificial
  Synthetic oligonucleotide
ccattgacacaaggaatagatgcttgtgcacaaatatctgatgccgtgactaaaaaccgc

SEQ ID NO: 8897 - DNA, 60 bp, Artificial
  Synthetic oligonucleotide
ctgtactgaaaccaaagcatcgatgttttatctaacactgcaagctgattcaacactcga

SEQ ID NO: 8898 - DNA, 60 bp, Artificial
  Synthetic oligonucleotide
ttgctggccggcgtgagaagccatgtgcgtttctaccgagcgctggcgggggagattcgg

SEQ ID NO: 8899 - DNA, 55 bp, Artificial
  Synthetic oligonucleotide
tgatgggccctgcctcatatcctatcaactgcaaccgggccacaccagacagata

SEQ ID NO: 8900 - DNA, 51 bp, Artificial
  Synthetic oligonucleotide
attaagaaggacctagacaacaccatcgactacaatagagacagactggtt

SEQ ID NO: 8901 - DNA, 55 bp, Artificial
  Synthetic oligonucleotide
ctctccgctcgttagctggtagaatatccgcccggcgtctaggttgtcacttcgc

SEQ ID NO: 8902 - DNA, 55 bp, Artificial
  Synthetic oligonucleotide
ggagctctccgctcgttagctggtagaatatccgtccggcgtctagactgtcgct

SEQ ID NO: 8903 - DNA, 51 bp, Artificial
  Synthetic oligonucleotide
gtaaaactccgccgacaggagacgacgagcacactcgtgtccggggagtgg

SEQ ID NO: 8904 - DNA, 55 bp, Artificial
  Synthetic oligonucleotide
caccgtcacttaggctggcagacgctgagtaaccatgtgatccggaggctgtcag

SEQ ID NO: 8905 - DNA, 55 bp, Artificial
  Synthetic oligonucleotide
cgtaaatgtacacgggaaccaccggatgtgtacgtccgtccgacgatcgcgtgta

SEQ ID NO: 8906 - DNA, 55 bp, Artificial
  Synthetic oligonucleotide
tcaccttgctttaaacttggacgcgtcatcagacgtttggctatttagtgagccg

SEQ ID NO: 8907 - DNA, 55 bp, Artificial
  Synthetic oligonucleotide
ccgatgggccctatgactcttggtcccagtgcgagatctgccccggtcgctttgt

SEQ ID NO: 8908 - DNA, 60 bp, Artificial
  Synthetic oligonucleotide
atgtaagcaggcccatgagtcagagctgtcactctgttcaggaaagagctgtcattgttt

SEQ ID NO: 8909 - DNA, 53 bp, Artificial
  Synthetic oligonucleotide
agtcccgccggtctcctctaagcccttctacctaaaaacgagccagctcagag

SEQ ID NO: 8910 - DNA, 55 bp, Artificial
  Synthetic oligonucleotide
cctcctgctgaagctgagccgcctgtgcgaactgagctacgtggcgtacacccag

SEQ ID NO: 8911 - DNA, 55 bp, Artificial
  Synthetic oligonucleotide
tcgcggcgttccagaggaccgtgttggccgacctgatctcgaggtttccggggaa

SEQ ID NO: 8912 - DNA, 55 bp, Artificial
  Synthetic oligonucleotide
gcgcggtccgataacatctgccaacccaggtcgttgtgtgatcccgggcggtctt

SEQ ID NO: 8913 - DNA, 55 bp, Artificial
  Synthetic oligonucleotide
gcggttcgctcacggcagggaccacgcaactgggcacgagaaaacgacagctgta

SEQ ID NO: 8914 - DNA, 55 bp, Artificial
  Synthetic oligonucleotide
cctgtctcgccaaccaagctgccggcgtcgaaccttgataggctccaccatgcgt

SEQ ID NO: 8915 - DNA, 55 bp, Artificial
  Synthetic oligonucleotide
cgcgaaatcttcttctcttcacacacgccctgtatttcggctttgctggcaccgg

SEQ ID NO: 8916 - DNA, 55 bp, Artificial
  Synthetic oligonucleotide
cctccaacgactcccgatgacttagttccgatgactgctgcgacgtttggcttga

SEQ ID NO: 8917 - DNA, 55 bp, Artificial
  Synthetic oligonucleotide
tcgcggcgactaatccaaccgttagtctggacagaaaccatcaggcccttccacg

SEQ ID NO: 8918 - DNA, 55 bp, Artificial
  Synthetic oligonucleotide
gcggctgtcaggataaaataggcatgcgtgtttgtattcccgtcccaccacctta

SEQ ID NO: 8919 - DNA, 55 bp, Artificial
  Synthetic oligonucleotide
cgatacgcccctgccaaatccacccgtcgagtcgcccacacctgaacctctcgaa

SEQ ID NO: 8920 - DNA, 55 bp, Artificial
  Synthetic oligonucleotide
cgcggggctgtctcccaaacagatcatcgagctctgaactccagtcgtagcttat

SEQ ID NO: 8921 - DNA, 55 bp, Artificial
  Synthetic oligonucleotide
acagtagaccctacgctgctccccacagaaacgcccgacccactcagactggctg

SEQ ID NO: 8922 - DNA, 55 bp, Artificial
  Synthetic oligonucleotide
gagcggcttccaatgcggatctggtagcggttatctgaacaagcatctccgcgga

SEQ ID NO: 8923 - DNA, 55 bp, Artificial
  Synthetic oligonucleotide
gcggcacctcagaaacggggtgtcaagtccaagtcgccaaccgtcatcccttcgg

SEQ ID NO: 8924 - DNA, 55 bp, Artificial
  Synthetic oligonucleotide
cgccccgatcctactttcttgtcctgcgagcccaagaaccgtgcgagtgtaccgt

SEQ ID NO: 8925 - DNA, 55 bp, Artificial
  Synthetic oligonucleotide
cgctactcgctacgctcgctactcgctacgctcactgctatcggactcgttgcgc

SEQ ID NO: 8926 - DNA, 55 bp, Artificial
  Synthetic oligonucleotide
cactccctctacgtgtatgttttcgtccctgacgctccactcgaccacttttccc

SEQ ID NO: 8927 - DNA, 55 bp, Artificial
  Synthetic oligonucleotide
ccatatctgtccccatcgaccccgcactaatctggtcccgaaaggccatcatgcg

SEQ ID NO: 8928 - DNA, 60 bp, Artificial
  Synthetic oligonucleotide
gttcgtgataatgcagtgtaaacttgtccatgttcaaatgtatcagataaatcaacttcg

SEQ ID NO: 8929 - DNA, 60 bp, Artificial
  Synthetic oligonucleotide
agttgacccagctggtacagaaactgcaaacgccccgctagatagtgtccatcctgcaaa

SEQ ID NO: 8930 - DNA, 55 bp, Artificial
  Synthetic oligonucleotide
gccggggcatgtaacagagtcgcacgtcacacagcgctggtcatacacaggctcg

SEQ ID NO: 8931 - DNA, 55 bp, Artificial
  Synthetic oligonucleotide
gccatcgtcagacaggtccaacagccgcacgtgtgcagacagggtagacatgagt

SEQ ID NO: 8932 - DNA, 55 bp, Artificial
  Synthetic oligonucleotide
atctgacgctcccacatgtcatgacacacggtcgcattaaacttttcgggacatt

SEQ ID NO: 8933 - DNA, 60 bp, Artificial
  Synthetic oligonucleotide
ctttcctcaaacgctgctctacttaaagggcctacttgatgagtgcgcattgtataccga

SEQ ID NO: 8934 - DNA, 60 bp, Artificial
  Synthetic oligonucleotide
cgatttacagaaagtggatgttctacgcaaatagacgggcgtgaattatgctcgacggca

SEQ ID NO: 8935 - DNA, 60 bp, Artificial
  Synthetic oligonucleotide
ggccggtacatttttaagcgtttgctgtaatagcgtagcaaaatcatgcgcctctgtagc

SEQ ID NO: 8936 - DNA, 55 bp, Artificial
  Synthetic oligonucleotide
cagcgtctccgtctgctggcgacattcgacaggcgcaccaactctcacagctacg

SEQ ID NO: 8937 - DNA, 55 bp, Artificial
  Synthetic oligonucleotide
agagatagagagccccaacgggacatcgcagagccccaacgggacatcgcagagc

SEQ ID NO: 8938 - DNA, 55 bp, Artificial
  Synthetic oligonucleotide
cctagcaatcttccaggcaaagggttcgtcgggcttgctggccccgtacaccagc

SEQ ID NO: 8939 - DNA, 59 bp, Artificial
  Synthetic oligonucleotide
actgtcaatctattgttcaagtaatgcaagctagagatgtgtctattaaagatgtatcg

SEQ ID NO: 8940 - DNA, 60 bp, Artificial
  Synthetic oligonucleotide
gcaagtatatagcataggtgtttaacccttttcatcaagcttatacgtgtttgctatgct

SEQ ID NO: 8941 - DNA, 55 bp, Artificial
  Synthetic oligonucleotide
atgagcatcgttgacaatgccttaggagtgggggttaagtattgaagcagtattc

SEQ ID NO: 8942 - DNA, 60 bp, Artificial
  Synthetic oligonucleotide
tatcactgtaatgctttgagagttaaagggttaactccaaacgtgccactgatagcaata

SEQ ID NO: 8943 - DNA, 55 bp, Artificial
  Synthetic oligonucleotide
atgaacagcattgtgttatgaaggaacggcattttaaattgggaagagttccgcc

SEQ ID NO: 8944 - DNA, 54 bp, Artificial
  Synthetic oligonucleotide
gcattgtgttataaaggaacggcattttaaattgggaagagttccgccgagtgt

SEQ ID NO: 8945 - DNA, 55 bp, Artificial
  Synthetic oligonucleotide
tgcgcacaggcacgcggtgcacccacatgtaccacaattgcggcacgtcttcctc

SEQ ID NO: 8946 - DNA, 55 bp, Artificial
  Synthetic oligonucleotide
gcccatgtcccagtaggaccgttgcacaaaggcaaccaggtctgacacaacatcg

SEQ ID NO: 8947 - DNA, 55 bp, Artificial
  Synthetic oligonucleotide
ctcatctgacgctcccacatgtcatgacacacggtggcgttaaacttttcggggc

SEQ ID NO: 8948 - DNA, 55 bp, Artificial
  Synthetic oligonucleotide
cgcgagtgtgtcggggcattgttttatctgttgcgagccaaactgcgccatggga

SEQ ID NO: 8949 - DNA, 55 bp, Artificial
  Synthetic oligonucleotide
ggccgttatctcttctctaggagtgtagtccgaaacagccgcgctctccgccatg

SEQ ID NO: 8950 - DNA, 55 bp, Artificial
  Synthetic oligonucleotide
ggatcctgcgcgtccaagagcctgaccaaagggtgttggtatccgcagttttcgc

SEQ ID NO: 8951 - DNA, 60 bp, Artificial
  Synthetic oligonucleotide
ccaaatgtcaactacacagtatccgttggataccacacctgagtcgtcccaactagtgca

SEQ ID NO: 8952 - DNA, 60 bp, Artificial
  Synthetic oligonucleotide
gagcagggcaagtgttacgcccgtgagtacgctcctggaccgttgactcaaactgctgta

SEQ ID NO: 8953 - DNA, 55 bp, Artificial
  Synthetic oligonucleotide
gtgtggatcccggtaagggtattccggacaattttcatggtcgcacactcgccat

SEQ ID NO: 8954 - DNA, 50 bp, Artificial
  Synthetic oligonucleotide
catggtcgcacactcgccattaaggattgcaacaccacgtcggtggtgtt

SEQ ID NO: 8955 - DNA, 54 bp, Artificial
  Synthetic oligonucleotide
tcgcacgtcgtaaaactgcgcgctcgaaagctcataaaagaaacaaccatggcc

SEQ ID NO: 8956 - DNA, 60 bp, Artificial
  Synthetic oligonucleotide
taacatcaccttcttgctctgttgagtaatcacttacgcaaggttaccgttcagcttaga

SEQ ID NO: 8957 - DNA, 60 bp, Artificial
  Synthetic oligonucleotide
tgccacgcgtccattggccagtcaccagtgacgcagatgtgcccgaagtgagtgcacgac

SEQ ID NO: 8958 - DNA, 60 bp, Artificial
  Synthetic oligonucleotide
gcaaagcaagccattacagcgggctcgcaacgatgctaaccgatatcacgatgagttcac

SEQ ID NO: 8959 - DNA, 60 bp, Artificial
  Synthetic oligonucleotide
ttgcgctttatgcgtgagtgcgtcgagtttgcaatctacaagcggtgggtgcatctggac

SEQ ID NO: 8960 - DNA, 60 bp, Artificial
  Synthetic oligonucleotide
accactagctgatgcggcttgcgaccgcgtcgaaggttatctttgtaccgatgcgcttac

SEQ ID NO: 8961 - DNA, 60 bp, Artificial
  Synthetic oligonucleotide
aggctgggctaagacgcaggcgtatctagtgactgattgcaagacaccgtttattggcca

SEQ ID NO: 8962 - DNA, 53 bp, Artificial
  Synthetic oligonucleotide
ggttggcgtttctcaagtgtgccttcgcaccacctgacttcaacaccgatccc

SEQ ID NO: 8963 - DNA, 58 bp, Artificial
  Synthetic oligonucleotide
gcattgttggttggggtaatatggacaccattgtcatccgtgtctctgcccccactgg

SEQ ID NO: 8964 - DNA, 60 bp, Artificial
  Synthetic oligonucleotide
cttgcattgagtacagacccaatcctaacgctatgctgtatcatttcggccatgactcgc

SEQ ID NO: 8965 - DNA, 55 bp, Artificial
  Synthetic oligonucleotide
cccaatcctaacgctatgctgtatcatttcggccatgactcgccacctcttgatg

SEQ ID NO: 8966 - DNA, 60 bp, Artificial
  Synthetic oligonucleotide
catgactcgccacctcttgatgaggtagcacttcaagaataccgtacggttgccagatct

SEQ ID NO: 8967 - DNA, 54 bp, Artificial
  Synthetic oligonucleotide
tcgtgggaacggcaatggactccgccgggtgcgtggcggaagggtatctcgccg

SEQ ID NO: 8968 - DNA, 55 bp, Artificial
  Synthetic oligonucleotide
attgggaacgctataagtggttatcagctgtagcccgttacgtcccagcggtgcc

SEQ ID NO: 8969 - DNA, 52 bp, Artificial
  Synthetic oligonucleotide
ggttactggtctttcacctagtaccagttaccttctaacacctgcttttcta

SEQ ID NO: 8970 - DNA, 56 bp, Artificial
  Synthetic oligonucleotide
ctcacctggtggccataccgtcgatgaacagtttgcaagtcatcgacattatgccg

SEQ ID NO: 8971 - DNA, 53 bp, Artificial
  Synthetic oligonucleotide
gtgctcgtcctggttggaattgccttgttgatcatactaagggcaaactcact

SEQ ID NO: 8972 - DNA, 50 bp, Artificial
  Synthetic oligonucleotide
tcctcgggcttagtactcaacagtctgttacatccagacttattgcaatg

SEQ ID NO: 8973 - DNA, 56 bp, Artificial
  Synthetic oligonucleotide
tagaattatcagagctatcgtcggcaataactaggttgtcatatctagcacatgat

SEQ ID NO: 8974 - DNA, 60 bp, Artificial
  Synthetic oligonucleotide
acagcgggctcgcaatgatgctaatcgatatcacgatgagttcactatgatcgttaaggc

SEQ ID NO: 8975 - DNA, 60 bp, Artificial
  Synthetic oligonucleotide
tgagccatatgtcatttcaccatcaccccgtgaggttggataccacgggtcacgtcagtt

SEQ ID NO: 8976 - DNA, 60 bp, Artificial
  Synthetic oligonucleotide
caacaatcgccggcgtagtaatcgcactgatgcgcctgtgtctaaggcctcgactgtgac

SEQ ID NO: 8977 - DNA, 56 bp, Artificial
  Synthetic oligonucleotide
ctggtcggctgatactcctgtgtgtcggcaacaacactgatgtggtcaacgtgtca

SEQ ID NO: 8978 - DNA, 50 bp, Artificial
  Synthetic oligonucleotide
ggtaccagaatttctggtctatcgcaattttgggagcgttatagatggca

SEQ ID NO: 8979 - DNA, 52 bp, Artificial
  Synthetic oligonucleotide
ccactagatgaccctaacgttatcctcgatgttgatcagttacttaggcagg

SEQ ID NO: 8980 - DNA, 60 bp, Artificial
  Synthetic oligonucleotide
acgcccgtgagtatgctcctggaccgttgactcaaactgctgtatttccaagtgagtcac

SEQ ID NO: 8981 - DNA, 60 bp, Artificial
  Synthetic oligonucleotide
gttacagcgggctcggaatgatgccaaccgatatcacgatgagttcactatgatggttaa

SEQ ID NO: 8982 - DNA, 60 bp, Artificial
  Synthetic oligonucleotide
gtcgtatagcgggtccgcaggctaaggcaaagagccgcgagcacatcactccaaagatgc

SEQ ID NO: 8983 - DNA, 60 bp, Artificial
  Synthetic oligonucleotide
gagtttggccgcaagttccactgagctggttgagactgactatagcaaattcgacggcac

SEQ ID NO: 8984 - DNA, 55 bp, Artificial
  Synthetic oligonucleotide
gcggacttccccgtctgacaacatcactcgacttggaaccgaagatgcctgtcgc

SEQ ID NO: 8985 - DNA, 55 bp, Artificial
  Synthetic oligonucleotide
atccgttggataccacacctgagtcgtcccaactagtgcacgctatcactggtct

SEQ ID NO: 8986 - DNA, 55 bp, Artificial
  Synthetic oligonucleotide
ccaatgttaaacgatgccaagcaaactcgcgctaatccaggaacttcccgaccgc

SEQ ID NO: 8987 - DNA, 58 bp, Artificial
  Synthetic oligonucleotide
ggaaagcggataatgggcatccgatctccgggggaacgcgtgatgtcgcgagggagac

SEQ ID NO: 8988 - DNA, 55 bp, Artificial
  Synthetic oligonucleotide
gccgctggttttcgtcattacgaaatcagccccgcgaggcaatcaccagctgagg

SEQ ID NO: 8989 - DNA, 60 bp, Artificial
  Synthetic oligonucleotide
tggcgcttcactttcattccgacggacctgcatacgcgcacgcttcggcgtgtgcgttat

SEQ ID NO: 8990 - DNA, 57 bp, Artificial
  Synthetic oligonucleotide
tagacctcgagacacttcggtctctggatcagcgtctaggagaaatcactgacgtct

SEQ ID NO: 8991 - DNA, 54 bp, Artificial
  Synthetic oligonucleotide
tcaatacggccaccattaaaacatgggcttgtattgagtaccgcccaaacacta

SEQ ID NO: 8992 - DNA, 55 bp, Artificial
  Synthetic oligonucleotide
tccaaaatggttaataacaacagaccaagacgtcaacgagctcaacgcgttgtcg

SEQ ID NO: 8993 - DNA, 55 bp, Artificial
  Synthetic oligonucleotide
gggttttacatcgatgttcggaacaacttcaacatctaggtccgatcaggtgtcc

SEQ ID NO: 8994 - DNA, 52 bp, Artificial
  Synthetic oligonucleotide
ctaggtccgatcaggtgtcctcattcaggtacgcttccatgaacgtgggtat

SEQ ID NO: 8995 - DNA, 60 bp, Artificial
  Synthetic oligonucleotide
tcggaatccacgcattctcgttgtatctggtctacaagttcgcgagaatcgtgtaccatt

SEQ ID NO: 8996 - DNA, 60 bp, Artificial
  Synthetic oligonucleotide
tccagatccacggagaagtgaaagctcggatgtttagaccactgctacccgccaaccaca

SEQ ID NO: 8997 - DNA, 60 bp, Artificial
  Synthetic oligonucleotide
gagatcgtcctcactcaggacatctgcttcccgctccatgtaagttgttccagaaggcca

SEQ ID NO: 8998 - DNA, 57 bp, Artificial
  Synthetic oligonucleotide
cccgatgcgactcctatccaaactccacctctccatagcaccaatgtacatcccgga

SEQ ID NO: 8999 - DNA, 51 bp, Artificial
  Synthetic oligonucleotide
aacagtccggccccaatatgctcgaacgcttctctggacctcaaccggcaa

SEQ ID NO: 9000 - DNA, 58 bp, Artificial
  Synthetic oligonucleotide
ttctgggtttcgttccatcctccttggctctggtcagcttgacatcgctcctccaggc

SEQ ID NO: 9001 - DNA, 60 bp, Artificial
  Synthetic oligonucleotide
gatggcttaggtcgttgcgcccacggctagccaactcttgtctcgcgctaaagatccgtg

SEQ ID NO: 9002 - DNA, 60 bp, Artificial
  Synthetic oligonucleotide
gatacgagccttataatgtgtcaatgagcaaccacgacatagagagaggaaaccggtatt

SEQ ID NO: 9003 - DNA, 60 bp, Artificial
  Synthetic oligonucleotide
tcctgatgaccctgtatccttttgcggacgtatttatccacgtcttagtgattgcataac

SEQ ID NO: 9004 - DNA, 60 bp, Artificial
  Synthetic oligonucleotide
tagtcggacctgggcctcgtgttgagacagtggaacctaaccatgagcaatcgagcggaa

SEQ ID NO: 9005 - DNA, 60 bp, Artificial
  Synthetic oligonucleotide
ttgcgccctatcctcagagtggagggaaccgagttacacgcgcattgcaacgggctgtca

SEQ ID NO: 9006 - DNA, 60 bp, Artificial
  Synthetic oligonucleotide
attcaagatgggtgagcatcgtaacatcgtgtcgattgtgccctttgcaacttgccgttc

SEQ ID NO: 9007 - DNA, 60 bp, Artificial
  Synthetic oligonucleotide
gtcattggtgccgggcttatcagagaaattgcactgcacgtgtggtacagtatgcagact

SEQ ID NO: 9008 - DNA, 60 bp, Artificial
  Synthetic oligonucleotide
gtggcatgagagcggatgcacctttagctaaggcctcgactatcacgggatttggacgtg

SEQ ID NO: 9009 - DNA, 60 bp, Artificial
  Synthetic oligonucleotide
ttgatactcctgtgtgtcggcaacaacactgacgtcgtcaacgtgtcagtgctatgtcgc

SEQ ID NO: 9010 - DNA, 51 bp, Artificial
  Synthetic oligonucleotide
agtgtacgccatgcgttctttcgggtttcacctcgcacgcatgtctggagc

SEQ ID NO: 9011 - DNA, 60 bp, Artificial
  Synthetic oligonucleotide
tatggtgctgagctggagtatatgcgttaccaacaacgtaataacgtcgcaaacttcaac

SEQ ID NO: 9012 - DNA, 60 bp, Artificial
  Synthetic oligonucleotide
acaatgccacgcgtccattggccaataaccagtgacgcagacgtaccagaagtgagcgca

SEQ ID NO: 9013 - DNA, 53 bp, Artificial
  Synthetic oligonucleotide
tatgctttcaaagctagtactctccagcatgttccgtggtacatgccaacgca

SEQ ID NO: 9014 - DNA, 60 bp, Artificial
  Synthetic oligonucleotide
tagtgaatcgcgctccccgtggctctcctgtgacattcctcgcacgagtttacctcgatc

SEQ ID NO: 9015 - DNA, 57 bp, Artificial
  Synthetic oligonucleotide
gtcaccgcaacgcatttctccgctgtgcttaccgacagcgcagtccaatcgttcatg

SEQ ID NO: 9016 - DNA, 60 bp, Artificial
  Synthetic oligonucleotide
ccacgagcagtcactactgacggctatgtttgggccgactcgcagtacgccagactacct

SEQ ID NO: 9017 - DNA, 60 bp, Artificial
  Synthetic oligonucleotide
acgtaaccaatgctcaagctagcatgttcaccaatctaaccttctcaggcgcagcatata

SEQ ID NO: 9018 - DNA, 55 bp, Artificial
  Synthetic oligonucleotide
gctagcatgttcaccaatctaaccttctcaggcgcagcatataccggtcttggcg

SEQ ID NO: 9019 - DNA, 60 bp, Artificial
  Synthetic oligonucleotide
gcagcatataccggtcttggcgacatggacgcaattgcgatccttgtgactacgcccacc

SEQ ID NO: 9020 - DNA, 60 bp, Artificial
  Synthetic oligonucleotide
tgggcctgcgtagagtatcgtccgaatccaaattccaccctctatgagttcgctcgtgag

SEQ ID NO: 9021 - DNA, 55 bp, Artificial
  Synthetic oligonucleotide
ttacccgacatgactccaagtaccgagatgtcaatgagaggagtgagagtcagca

SEQ ID NO: 9022 - DNA, 55 bp, Artificial
  Synthetic oligonucleotide
caccccagctaaacccgatcgatggaccactacctgaggacaatgaaccaagcgg

SEQ ID NO: 9023 - DNA, 60 bp, Artificial
  Synthetic oligonucleotide
cgctcagagggagacatgcgaacgggactatacatgataggagcccgttcagggccctca

SEQ ID NO: 9024 - DNA, 60 bp, Artificial
  Synthetic oligonucleotide
cttatataatatccggaatctccacatcccggaagtctgcttgaaatgggagcaaatgga

SEQ ID NO: 9025 - DNA, 55 bp, Artificial
  Synthetic oligonucleotide
cacccacgatagaacagccttcagaggacttatctctaccccattaggcaacccc

SEQ ID NO: 9026 - DNA, 60 bp, Artificial
  Synthetic oligonucleotide
tacagagtcgggtacttgtgtgcaggtctccccagcgacactccaagaggagaggacagt

SEQ ID NO: 9027 - DNA, 55 bp, Artificial
  Synthetic oligonucleotide
gtgcaggtctccccagcgacactccaagaggagaggacagtcagttcacggggtc

SEQ ID NO: 9028 - DNA, 55 bp, Artificial
  Synthetic oligonucleotide
ggggacggtgaccacagaagtggcttttggtctagtatgtgccacttgtgaacag

SEQ ID NO: 9029 - DNA, 51 bp, Artificial
  Synthetic oligonucleotide
ccaggagggaataaattaactgagtctaggtctcaatcaatgatagtagct

SEQ ID NO: 9030 - DNA, 57 bp, Artificial
  Synthetic oligonucleotide
aaacacaataggagactgccccaagtatgtgaatgttaaatccctaaagcttgctac

SEQ ID NO: 9031 - DNA, 55 bp, Artificial
  Synthetic oligonucleotide
caaatcaatgggaaactgaatagggtaatcgagaagacgaacgagaaattccatc

SEQ ID NO: 9032 - DNA, 59 bp, Artificial
  Synthetic oligonucleotide
agcagctccattgtgatgtgtggagtagatcataaagttgccagttggtcatggcacga

SEQ ID NO: 9033 - DNA, 52 bp, Artificial
  Synthetic oligonucleotide
atcaacactgaaccagagatcggtcccagaaatagctaccaggcccaaagta

SEQ ID NO: 9034 - DNA, 60 bp, Artificial
  Synthetic oligonucleotide
tagaagtcgtcactgcccaggaattagtggaatcgcaacatctaccggaattgtgtccta

SEQ ID NO: 9035 - DNA, 60 bp, Artificial
  Synthetic oligonucleotide
ggggactgtcacaactgaggtggcctttggactagtgtgtgcaacctgtgaacagattgc

SEQ ID NO: 9036 - DNA, 55 bp, Artificial
  Synthetic oligonucleotide
gagagcataaggaacaacacttatgaccatactcaatacagaacagagtcattgc

SEQ ID NO: 9037 - DNA, 55 bp, Artificial
  Synthetic oligonucleotide
gagcctggagacacaataacattcgaggcaactggaaacctagtggtaccaagat

SEQ ID NO: 9038 - DNA, 55 bp, Artificial
  Synthetic oligonucleotide
cgaaattgagaatggctacaggattaagaaatatcccgtctattcaatctagagg

SEQ ID NO: 9039 - DNA, 55 bp, Artificial
  Synthetic oligonucleotide
aagtccctaaggggaagaggcagcactcttggccttaacattgaaacagccactc

SEQ ID NO: 9040 - DNA, 55 bp, Artificial
  Synthetic oligonucleotide
tggacccaggaacgttcctcaaagggagacaagaggtctatttggagctatagcg

SEQ ID NO: 9041 - DNA, 53 bp, Artificial
  Synthetic oligonucleotide
gttgcaatcaaaggaggtggaactttagtggctgaagccattcgatttatagg

SEQ ID NO: 9042 - DNA, 59 bp, Artificial
  Synthetic oligonucleotide
agcatggttgcatgtctgtgtcactggggatgatagaaatgcgactgctagtttcattt

SEQ ID NO: 9043 - DNA, 60 bp, Artificial
  Synthetic oligonucleotide
cttcagcgtgtcacatggtgtgcttgacatgggtctagtcgaaacaggagttaatgcagt

SEQ ID NO: 9044 - DNA, 50 bp, Artificial
  Synthetic oligonucleotide
cgcactacaacaggaggttcaccccagaaattcgaaaaagacccaaagta

SEQ ID NO: 9045 - DNA, 53 bp, Artificial
  Synthetic oligonucleotide
tgaccgctttctaagggttcgggatcaacgaggaaatgtactattgtcacctg

SEQ ID NO: 9046 - DNA, 60 bp, Artificial
  Synthetic oligonucleotide
taatggatgaagattatcagggcaggctttgcaaccccctgaatccatttgtcagccata

SEQ ID NO: 9047 - DNA, 55 bp, Artificial
  Synthetic oligonucleotide
gggctcattactcaatgacaaacattctaacggcacagtaaaggaccgaagtcca

SEQ ID NO: 9048 - DNA, 55 bp, Artificial
  Synthetic oligonucleotide
cggaatatccagtatggtggaggctatggtttcaagagcccgaattgatgcacgg

SEQ ID NO: 9049 - DNA, 55 bp, Artificial
  Synthetic oligonucleotide
ccagcagagggcatctgcaggacaaatcagcgtacaacccactttctctgtacag

SEQ ID NO: 9050 - DNA, 60 bp, Artificial
  Synthetic oligonucleotide
ggcgaatctggcgccaagctaacaatggtgatgatgcaacggctggtttgactcacatga

SEQ ID NO: 9051 - DNA, 60 bp, Artificial
  Synthetic oligonucleotide
ttcaaagccaattcgagcagctgaaactgcggtgggagtcttatcccaatttggtcaaga

SEQ ID NO: 9052 - DNA, 57 bp, Artificial
  Synthetic oligonucleotide
cacttcaacagggaaaatatgcaacaacccatatagggtcctagatggaagaaactg

SEQ ID NO: 9053 - DNA, 60 bp, Artificial
  Synthetic oligonucleotide
ggggaactgcaacgtagcaggatggatccttggcaacccagaatgtgacttgttgctcac

SEQ ID NO: 9054 - DNA, 60 bp, Artificial
  Synthetic oligonucleotide
tcagaagacaacgtttacaaagcattatcaatatacagctgcattgcaagcagtgttgtg

SEQ ID NO: 9055 - DNA, 60 bp, Artificial
  Synthetic oligonucleotide
agtgatcgaaatagatatgagtgccatggagcatacaagtcagtatctgtgtacaggggt

SEQ ID NO: 9056 - DNA, 55 bp, Artificial
  Synthetic oligonucleotide
gagtgccatggagcatacaagtcagtatctgtgtacaggggtcctcacagacacg

SEQ ID NO: 9057 - DNA, 60 bp, Artificial
  Synthetic oligonucleotide
ggcggaagacaaatctgtacggattcatcataaaaggaagatcccatttgaggaatgaca

SEQ ID NO: 9058 - DNA, 51 bp, Artificial
  Synthetic oligonucleotide
cactcttggtctggacattgaaacagctacttgtgcgggaaagctaatagt

SEQ ID NO: 9059 - DNA, 60 bp, Artificial
  Synthetic oligonucleotide
attcctatgtagcagtgggttcagagagttataacaggaggttcacccctgagatcagca

SEQ ID NO: 9060 - DNA, 60 bp, Artificial
  Synthetic oligonucleotide
tagcagtgggttcagagagttataacaggaggttcacccctgagatcagcacaaggccta

SEQ ID NO: 9061 - DNA, 60 bp, Artificial
  Synthetic oligonucleotide
ctcaggttatgagactttcaaggtcattggtggttggaccacagctaacgccaaatcaca

SEQ ID NO: 9062 - DNA, 52 bp, Artificial
  Synthetic oligonucleotide
cgttctttaactggtggatctttgatgttgagtatgtttggccctcctggga

SEQ ID NO: 9063 - DNA, 60 bp, Artificial
  Synthetic oligonucleotide
ctcatttttctggcacggtctgcactcatcctgagaggatcagtggcccataagtcctgc

SEQ ID NO: 9064 - DNA, 60 bp, Artificial
  Synthetic oligonucleotide
tggcgactaccaccaacccactaatcaggcatgagaacagaatggtactagccagcacta

SEQ ID NO: 9065 - DNA, 60 bp, Artificial
  Synthetic oligonucleotide
cacccagcccatataacgctaagatcgaatgtatagggtggtcaagcacatcatgccatg

SEQ ID NO: 9066 - DNA, 60 bp, Artificial
  Synthetic oligonucleotide
aggagatcagaaggatctggcgccaagcgaacaatggagaagacgcaactgccggtctca

SEQ ID NO: 9067 - DNA, 55 bp, Artificial
  Synthetic oligonucleotide
cagaagtgtgttcctacaatcccgaaattttagtggcaatggggaatcagcacac

SEQ ID NO: 9068 - DNA, 53 bp, Artificial
  Synthetic oligonucleotide
ctggccacaggattgaggaatatcccgtctattcaatctagaggcctatttgg

SEQ ID NO: 9069 - DNA, 58 bp, Artificial
  Synthetic oligonucleotide
gtattcatagagaggcccaacacaatagacacttgctacccattcgacgtgccagatt

SEQ ID NO: 9070 - DNA, 60 bp, Artificial
  Synthetic oligonucleotide
gcactcgggcagggaaccacgctagataacaaacactcaaatgggacaatacatgatcga

SEQ ID NO: 9071 - DNA, 57 bp, Artificial
  Synthetic oligonucleotide
gcattgattccagttatgtgtgctcgggacttgttggcgatacaccaagggatgatg

SEQ ID NO: 9072 - DNA, 55 bp, Artificial
  Synthetic oligonucleotide
tttcaaagaggggagaatcctcaaatgggagcctctaactggaacagccaagcac

SEQ ID NO: 9073 - DNA, 60 bp, Artificial
  Synthetic oligonucleotide
gaaaatgccagatcagaagatgtgtctttccaggggcggggagtcttcgagctctcggac

SEQ ID NO: 9074 - DNA, 60 bp, Artificial
  Synthetic oligonucleotide
gggaaagtatgcaggaccttactggcaaagtctgtattcaacagcctatacgcatctcca

SEQ ID NO: 9075 - DNA, 52 bp, Artificial
  Synthetic oligonucleotide
gtagtaatgactgatggaagtgcgtcaggaaaagccgatactagagtattgt

SEQ ID NO: 9076 - DNA, 53 bp, Artificial
  Synthetic oligonucleotide
ggagggactgcacactaatagatgccctactaggggacccgcactgtgatgtc

SEQ ID NO: 9077 - DNA, 60 bp, Artificial
  Synthetic oligonucleotide
atgatcggaatattacccgacatgaccccaagtactgagatgtcgctgaggggaataaga

SEQ ID NO: 9078 - DNA, 55 bp, Artificial
  Synthetic oligonucleotide
ccgtttcttaagggttcgagatcaacgtgggaatgtgctgttgtctcccgaagag

SEQ ID NO: 9079 - DNA, 56 bp, Artificial
  Synthetic oligonucleotide
tatacaataagatggagttcgaaccttttcagtccttagtactcaaagctgctaga

SEQ ID NO: 9080 - DNA, 52 bp, Artificial
  Synthetic oligonucleotide
aacaaggcaaccaagaggcttactgtcctcgggaaggacgcaggtgcactga

SEQ ID NO: 9081 - DNA, 50 bp, Artificial
  Synthetic oligonucleotide
aacacgagccaaaggggagtactcgaagatgagcagatgtaccagaaatg

SEQ ID NO: 9082 - DNA, 60 bp, Artificial
  Synthetic oligonucleotide
actggtggagagcgccagaatgctaccgaaatcagagcatctgttggaagaatggtcggt

SEQ ID NO: 9083 - DNA, 55 bp, Artificial
  Synthetic oligonucleotide
gctgttgccagtggatatgactttgagagagagggatactctctggtagggatag

SEQ ID NO: 9084 - DNA, 60 bp, Artificial
  Synthetic oligonucleotide
ctcatctacaataggatgggaactgtgaccacagaagtagcgtttggtctggtatgcgcc

SEQ ID NO: 9085 - DNA, 55 bp, Artificial
  Synthetic oligonucleotide
aggatgggaactgtgaccacagaagtagcgtttggtctggtatgcgccacctgcg

SEQ ID NO: 9086 - DNA, 53 bp, Artificial
  Synthetic oligonucleotide
gcaggatggatccttggcaacccagagtgtgacttgttgctcacagcgaactc

SEQ ID NO: 9087 - DNA, 55 bp, Artificial
  Synthetic oligonucleotide
ggattcgtgtattttgtcgaaacactagcaaggagcatttgtgagaagcttgagc

SEQ ID NO: 9088 - DNA, 56 bp, Artificial
  Synthetic oligonucleotide
caagcggatatgcacaaacagattgtgtgttggaagcaatggctttccttgaagaa

SEQ ID NO: 9089 - DNA, 50 bp, Artificial
  Synthetic oligonucleotide
gggttacaccatccagtctcaacagacgagaccaaatcattgtacgtcaa

SEQ ID NO: 9090 - DNA, 60 bp, Artificial
  Synthetic oligonucleotide
gcagcaacctatcgaataatcaagtagtgccatgtgaaccaatcataatagagaggaaca

SEQ ID NO: 9091 - DNA, 60 bp, Artificial
  Synthetic oligonucleotide
cacatgtgaacagattgctgattcccagcatcgatctcacaggcagatggtgacaacaac

SEQ ID NO: 9092 - DNA, 60 bp, Artificial
  Synthetic oligonucleotide
tccattcaatccagaggactatttggagcgattgccggattcattgaaggaggatggaca

SEQ ID NO: 9093 - DNA, 60 bp, Artificial
  Synthetic oligonucleotide
cgtagcagagaactcttctcagagctacacaggaaaccctgtgatatgcatgggacatca

SEQ ID NO: 9094 - DNA, 55 bp, Artificial
  Synthetic oligonucleotide
cacggagcagaccaatttgtacaagaacaaccctggaagagtcactgtgtctacc

SEQ ID NO: 9095 - DNA, 60 bp, Artificial
  Synthetic oligonucleotide
ttggagagtgtcccaagtatgtcaaacagggctctctgaaacttgcaacaggaatgagga

SEQ ID NO: 9096 - DNA, 60 bp, Artificial
  Synthetic oligonucleotide
gacacattcctttcggtgggaactgagaggcttgagtcaattggcgtgtgcgtaggtgct

SEQ ID NO: 9097 - DNA, 55 bp, Artificial
  Synthetic oligonucleotide
gggaactgagaggcttgagtcaattggcgtgtgcgtaggtgctttacacagggcg

SEQ ID NO: 9098 - DNA, 60 bp, Artificial
  Synthetic oligonucleotide
caccgaatcatgagggaatacaagcaggagtagatagattctacaggacctgcaagctag

SEQ ID NO: 9099 - DNA, 60 bp, Artificial
  Synthetic oligonucleotide
tagagtcaatcaggaatgggacttatgatcatgacatatacagagatgaagcactaaaca

SEQ ID NO: 9100 - DNA, 60 bp, Artificial
  Synthetic oligonucleotide
atcaggaatgggacttatgatcatgacatatacagagatgaagcactaaacaatcgattt

SEQ ID NO: 9101 - DNA, 60 bp, Artificial
  Synthetic oligonucleotide
aaggaactacttcacagcggaagtgtctcattgcagggccactgagtacataatgaaggg

SEQ ID NO: 9102 - DNA, 57 bp, Artificial
  Synthetic oligonucleotide
ttcggagacaatcctcgccctaatgatagaaaaggcagttgtggtccagtatcctct

SEQ ID NO: 9103 - DNA, 58 bp, Artificial
  Synthetic oligonucleotide
ttccgaagccacatcaacattgaacaaaaggtcaacccctgaaatagcagcaaggcct

SEQ ID NO: 9104 - DNA, 53 bp, Artificial
  Synthetic oligonucleotide
cttggatgtgtgggacaccataagtttcgagagcactggtaatctaattgcac

SEQ ID NO: 9105 - DNA, 60 bp, Artificial
  Synthetic oligonucleotide
ttaagaggatcagttgcacacaagtcttgtctgcctacctgtgtgtatggacttgctgta

SEQ ID NO: 9106 - DNA, 54 bp, Artificial
  Synthetic oligonucleotide
caatatccggaatctccacattccggaagtctgcctaaagtgggagctaatgga

SEQ ID NO: 9107 - DNA, 60 bp, Artificial
  Synthetic oligonucleotide
gaactagggtcaccactagtgcttgatgactgctctctggagggtttgattctaggtaat

SEQ ID NO: 9108 - DNA, 60 bp, Artificial
  Synthetic oligonucleotide
tcagggcaattcccggtgcaaactgatgagtataagaacactagggactcggacattgta

SEQ ID NO: 9109 - DNA, 55 bp, Artificial
  Synthetic oligonucleotide
gcaatgggtctttggatgtgttcgaatggttcaatgcaatgcaggatatgatagt

SEQ ID NO: 9110 - DNA, 60 bp, Artificial
  Synthetic oligonucleotide
ggacattgtattcacatgggctatccatcacccacccacttctgacgagcaggtgaagct

SEQ ID NO: 9111 - DNA, 60 bp, Artificial
  Synthetic oligonucleotide
gtcctaaagccagggcaaacagtgaagatacagactaatgggaacctgattgcacctgaa

SEQ ID NO: 9112 - DNA, 60 bp, Artificial
  Synthetic oligonucleotide
aatgatgctacataccaaagaacaagagcccttgtgcggactggaatggaccccagaatg

SEQ ID NO: 9113 - DNA, 52 bp, Artificial
  Synthetic oligonucleotide
attctcaggggatcagtggctcataagtcttgtttgcctgcttgtgtgtatg

SEQ ID NO: 9114 - DNA, 57 bp, Artificial
  Synthetic oligonucleotide
gactgcaataggccaagtatcaaggcccatgttcctgtatgttaggaccaatggaac

SEQ ID NO: 9115 - DNA, 60 bp, Artificial
  Synthetic oligonucleotide
tatccctatgatgtaccagactatgcatcgctcaggtctctagttgcttcctcagggacc

SEQ ID NO: 9116 - DNA, 55 bp, Artificial
  Synthetic oligonucleotide
gttacacatgctcaagacatattggaaaagacacacaacgggaagctctgcagtc

SEQ ID NO: 9117 - DNA, 60 bp, Artificial
  Synthetic oligonucleotide
ggaaggacaataagcacagcttcaagatcggggtacgagatgctaaaggtgccaaatgca

SEQ ID NO: 9118 - DNA, 60 bp, Artificial
  Synthetic oligonucleotide
caaccgctggtctaacccatatgatgatctggcattccaatttgaatgatgccacatatc

SEQ ID NO: 9119 - DNA, 55 bp, Artificial
  Synthetic oligonucleotide
aacactatagaagtgttcagatcaaacggcctcatagcaaatgaatctgggaggc

SEQ ID NO: 9120 - DNA, 60 bp, Artificial
  Synthetic oligonucleotide
acgagtcagtaagatgggagtggatgaatactccagcacagagagggtggtagtgagcat

SEQ ID NO: 9121 - DNA, 52 bp, Artificial
  Synthetic oligonucleotide
acccactaatcaggcatgagaacagaatggtactagccagcactacagctaa

SEQ ID NO: 9122 - DNA, 60 bp, Artificial
  Synthetic oligonucleotide
gccagttgcatgggcctcatttacaacagaatgggtactgtcactaccgaagtggcattt

SEQ ID NO: 9123 - DNA, 51 bp, Artificial
  Synthetic oligonucleotide
gtcagtttaaatacggtctgaaaagagggccttctacggaaggagtgccgg

SEQ ID NO: 9124 - DNA, 50 bp, Artificial
  Synthetic oligonucleotide
cattgatcgttttctaagggtccgagatcagaggggaaatgtgctcttat

SEQ ID NO: 9125 - DNA, 60 bp, Artificial
  Synthetic oligonucleotide
ctccgtctctctaactattgcaacagtgtgtttcctcatgcagattgccattctaacaac

SEQ ID NO: 9126 - DNA, 60 bp, Artificial
  Synthetic oligonucleotide
cagatacacgtaccggtgccacagaggggacacacaaatccagacgaggaggtcattcga

SEQ ID NO: 9127 - DNA, 60 bp, Artificial
  Synthetic oligonucleotide
cattccatggggccaaagaagtggcactcagttattcaactggtgcacttgccagttgca

SEQ ID NO: 9128 - DNA, 60 bp, Artificial
  Synthetic oligonucleotide
tgcgtatatggacttgctgttgccagtggatatgactttgagagagagggatactctctg

SEQ ID NO: 9129 - DNA, 55 bp, Artificial
  Synthetic oligonucleotide
caccacaggggtcgagaagcccaaattcctcccggacttgtatgactacaaggag

SEQ ID NO: 9130 - DNA, 57 bp, Artificial
  Synthetic oligonucleotide
ctgagcattgaggacccaagtcatgagggggaggggataccactgtatgatgcaatc

SEQ ID NO: 9131 - DNA, 55 bp, Artificial
  Synthetic oligonucleotide
agaagctgtgggagcaaacccgctcaaaggcaggactgttagtttcagatggagg

SEQ ID NO: 9132 - DNA, 55 bp, Artificial
  Synthetic oligonucleotide
tagcggactatagaaattggtcaaagccgcagtgtcaaattacaggatttgcgcc

SEQ ID NO: 9133 - DNA, 55 bp, Artificial
  Synthetic oligonucleotide
taaagggagttggaacgatggtaatggaactgattcggatgataaagcgaggaat

SEQ ID NO: 9134 - DNA, 51 bp, Artificial
  Synthetic oligonucleotide
gagactctgacattactaagggctttcaccgaagagggagcaattgtaggc

SEQ ID NO: 9135 - DNA, 60 bp, Artificial
  Synthetic oligonucleotide
tcgaacccattgacaatgtcatgggaatgatcggaatattacctgacatgacccccagca

SEQ ID NO: 9136 - DNA, 55 bp, Artificial
  Synthetic oligonucleotide
gagggattttcagctgagtcgagaaaattgcttctcattgttcaggcgcttaggg

SEQ ID NO: 9137 - DNA, 52 bp, Artificial
  Synthetic oligonucleotide
tgacgtccctaactatgcattgctccggtctattgtggcatcttcaggaacg

SEQ ID NO: 9138 - DNA, 55 bp, Artificial
  Synthetic oligonucleotide
agaggtaactcccctgtgttcaactataacaaggcaaccaagaggcttacagtcc

SEQ ID NO: 9139 - DNA, 55 bp, Artificial
  Synthetic oligonucleotide
gctgtgggagcaaacccgctcaaaggcaggacttttggtgtcggatggaggatca

SEQ ID NO: 9140 - DNA, 60 bp, Artificial
  Synthetic oligonucleotide
cacatgtgagcaaattgctgattcccagcatcggtctcacagacaaatggtaacaacgac

SEQ ID NO: 9141 - DNA, 60 bp, Artificial
  Synthetic oligonucleotide
gctctgcacaataaattcgtggcatatattcgggaaggacaatgctataagaatagggga

SEQ ID NO: 9142 - DNA, 55 bp, Artificial
  Synthetic oligonucleotide
cgtggcatatattcgggaaggacaatgctataagaataggggagaactctgatgt

SEQ ID NO: 9143 - DNA, 51 bp, Artificial
  Synthetic oligonucleotide
ccagtagtgttcactgacggttctgctactggcccagcagaaactaggata

SEQ ID NO: 9144 - DNA, 60 bp, Artificial
  Synthetic oligonucleotide
gtcgcactggagaaccagcacactatagatgtgactgactcggagatgaacaagcttttt

SEQ ID NO: 9145 - DNA, 51 bp, Artificial
  Synthetic oligonucleotide
ttcgcactgggatggatcccagaatgtgctccctaatgcagggttcaacac

SEQ ID NO: 9146 - DNA, 60 bp, Artificial
  Synthetic oligonucleotide
acataccagagaacaagggcacttgttcgtactgggatggatcccaggatgtgctctcta

SEQ ID NO: 9147 - DNA, 60 bp, Artificial
  Synthetic oligonucleotide
atgtcacgagattgggtcatactcatgcctaagcaaaaggtgacaggccctctttgtgtg

SEQ ID NO: 9148 - DNA, 58 bp, Artificial
  Synthetic oligonucleotide
actgaggtggcatttggtttagtatgcgcaacctgtgaacagattgctgattcccagc

SEQ ID NO: 9149 - DNA, 53 bp, Artificial
  Synthetic oligonucleotide
acatgttcgaaagtaagagtatgaagcttcgaacacagataccggcagagatg

SEQ ID NO: 9150 - DNA, 52 bp, Artificial
  Synthetic oligonucleotide
attgggtaatgacggacgggccagcgaacaggcaagcacaatacagggcgtt

SEQ ID NO: 9151 - DNA, 51 bp, Artificial
  Synthetic oligonucleotide
cactgcctgaggataatgagccgagtgggtatgcacaaacggattgtgtat

SEQ ID NO: 9152 - DNA, 60 bp, Artificial
  Synthetic oligonucleotide
gcacccaatcatgaggggatccaagctggagttgacaggttttatagaacctgcaaacta

SEQ ID NO: 9153 - DNA, 60 bp, Artificial
  Synthetic oligonucleotide
taagcaaagattcaagatcagggtatgagatgctgaaggtcccgaatgcggaaacagaca

SEQ ID NO: 9154 - DNA, 60 bp, Artificial
  Synthetic oligonucleotide
attacagatatacttatcggtgtcacagaggggacacacaaatccagacgaggagatcat

SEQ ID NO: 9155 - DNA, 55 bp, Artificial
  Synthetic oligonucleotide
cgtaccagactatgcatcgctcaggtctctagttgcctcctcaggaaccctagag

SEQ ID NO: 9156 - DNA, 53 bp, Artificial
  Synthetic oligonucleotide
tggtcggaatagaccctttcagactgcttcaaaacagccaagtatacagtcta

SEQ ID NO: 9157 - DNA, 60 bp, Artificial
  Synthetic oligonucleotide
tgaatgtatatgaccagagtggaaggcttgttgctaaacttgttgctactgatgatctta

SEQ ID NO: 9158 - DNA, 50 bp, Artificial
  Synthetic oligonucleotide
aaaggtaacttgtgtatgcagggacaactggcaaggggctaatagaccag

SEQ ID NO: 9159 - DNA, 55 bp, Artificial
  Synthetic oligonucleotide
aggtcattggtggttggaccacagctaacgccaaatcacaggtgaacagacaagt

SEQ ID NO: 9160 - DNA, 60 bp, Artificial
  Synthetic oligonucleotide
atacgtttgcatgacgcttggggcaatcagcttaacactgcaattagggaacataatttc

SEQ ID NO: 9161 - DNA, 60 bp, Artificial
  Synthetic oligonucleotide
aacactcagagggcggcatgcaaatgggactatacatgataggagcccatacagagctct

SEQ ID NO: 9162 - DNA, 60 bp, Artificial
  Synthetic oligonucleotide
aacactcagagggcgacatgcaaatgggactatacatgataggagtccgttcagagccct

SEQ ID NO: 9163 - DNA, 60 bp, Artificial
  Synthetic oligonucleotide
gtggttgcacatctgcgtcactggggatgatagaaatgcgactgctagtttcatttatga

SEQ ID NO: 9164 - DNA, 60 bp, Artificial
  Synthetic oligonucleotide
actccaatcctctgatgatttcgccctcatagtgaatgcaccgaatcatgagggaataca

SEQ ID NO: 9165 - DNA, 55 bp, Artificial
  Synthetic oligonucleotide
gtctttccaaatgaagtgggagcgagaatactgacgtcggagttacaactgacga

SEQ ID NO: 9166 - DNA, 52 bp, Artificial
  Synthetic oligonucleotide
ccaaggaaagttcatggcccaaccacaacgtaaccaaaggagtaacggcatc

SEQ ID NO: 9167 - DNA, 55 bp, Artificial
  Synthetic oligonucleotide
ctgtccagataataaaactcctcccctttgctgctgccccaccggaacaaagtag

SEQ ID NO: 9168 - DNA, 52 bp, Artificial
  Synthetic oligonucleotide
atggcgtctcagggcaccaaacgatcatatgaacaaatggagacaggtgggg

SEQ ID NO: 9169 - DNA, 60 bp, Artificial
  Synthetic oligonucleotide
ttggcattccaacctgaatgatgccacgtaccagagaacaagagcgcttgttcgcaccgg

SEQ ID NO: 9170 - DNA, 60 bp, Artificial
  Synthetic oligonucleotide
gatagtgagtgggagagacgagcagtcaattgctgaagcgatcatagtggcaatggtgtt

SEQ ID NO: 9171 - DNA, 60 bp, Artificial
  Synthetic oligonucleotide
cagagtgggcggattgattttcactggacactggtgcgaccgggcgataacatcactttc

SEQ ID NO: 9172 - DNA, 60 bp, Artificial
  Synthetic oligonucleotide
gagcactgacattaaatacgatgaccaaagatgcagagagaggcaagttaaaaagaaggg

SEQ ID NO: 9173 - DNA, 51 bp, Artificial
  Synthetic oligonucleotide
tgctatacaataagatggagtttgagccgttccaatccttggtacctaaag

SEQ ID NO: 9174 - DNA, 54 bp, Artificial
  Synthetic oligonucleotide
agggaatcaggagggattaacaaggagacaacgggattcacatacagtgggata

SEQ ID NO: 9175 - DNA, 50 bp, Artificial
  Synthetic oligonucleotide
ctggcatggctcgaatcggccgtgggtatctttcaatcaaaatctggagt

SEQ ID NO: 9176 - DNA, 55 bp, Artificial
  Synthetic oligonucleotide
cagcaatcctttgtaccgagtccgggagcaagaccacaagtaaatggtcagtcag

SEQ ID NO: 9177 - DNA, 54 bp, Artificial
  Synthetic oligonucleotide
ctaacatcgggtccaggccttgggtcagaggccaatcagggagaataagcatct

SEQ ID NO: 9178 - DNA, 60 bp, Artificial
  Synthetic oligonucleotide
aaatgtgccatagcacacagatcggaggaataaggatggtggacatccttaggcagaatc

SEQ ID NO: 9179 - DNA, 55 bp, Artificial
  Synthetic oligonucleotide
gttgcatacatgttggaaagggaactggtccgcaaaaccagattcctaccggtag

SEQ ID NO: 9180 - DNA, 55 bp, Artificial
  Synthetic oligonucleotide
ccccgagaggaatgagcaaggacaaaccctatggagcaggacgagcgatgccggc

SEQ ID NO: 9181 - DNA, 60 bp, Artificial
  Synthetic oligonucleotide
cgagaggaatgagcaaggacaaaccctatggagtagaacgagcgatgctggatcagatcg

SEQ ID NO: 9182 - DNA, 60 bp, Artificial
  Synthetic oligonucleotide
cgagagagcgaccattatggcggcattcacagggaacactgaaggcaggacatccgacat

SEQ ID NO: 9183 - DNA, 60 bp, Artificial
  Synthetic oligonucleotide
gagagccacggaagaatcctgaagactgacttaaccaatggtagctgtgtagtgcaatgt

SEQ ID NO: 9184 - DNA, 60 bp, Artificial
  Synthetic oligonucleotide
cgcataatgggaagttgtgcagattaagcgggatccctccattggaactgggggattgca

SEQ ID NO: 9185 - DNA, 50 bp, Artificial
  Synthetic oligonucleotide
catgaaaaaccggaattacaaggacctaggtaattgccacccgataggga

SEQ ID NO: 9186 - DNA, 50 bp, Artificial
  Synthetic oligonucleotide
ggtcaaactacccaattgctaaaagatcatacaacaacacaagcggggag

SEQ ID NO: 9187 - DNA, 55 bp, Artificial
  Synthetic oligonucleotide
ggggacagtaaccgcagaagtagctttcggcctagtgtgtgccacgtgcgagcag

SEQ ID NO: 9188 - DNA, 60 bp, Artificial
  Synthetic oligonucleotide
cctagtgtgtgccacgtgcgagcagatagctgactcacagcataggtctcacagacagat

SEQ ID NO: 9189 - DNA, 60 bp, Artificial
  Synthetic oligonucleotide
agtgacaagggagccatatgtgtcatgtgacccattaggatgtaggatgtacgcactgca

SEQ ID NO: 9190 - DNA, 55 bp, Artificial
  Synthetic oligonucleotide
cacgtgcgagcagatagctgactcacagcataggtctcacagacagatggtgacc

SEQ ID NO: 9191 - DNA, 60 bp, Artificial
  Synthetic oligonucleotide
tgttctcaaataagatggcgaggttagggaaaggatacatgttcgaaagcaagagcatga

SEQ ID NO: 9192 - DNA, 55 bp, Artificial
  Synthetic oligonucleotide
cagcttcaagatcggggtacgagatgctaaaggtgccaaatgcattgaccgacga

SEQ ID NO: 9193 - DNA, 60 bp, Artificial
  Synthetic oligonucleotide
aactcgatgaaataggggaggatgttgccccaatcgaacacattgcaagcatgagaagga

SEQ ID NO: 9194 - DNA, 58 bp, Artificial
  Synthetic oligonucleotide
tgaagactcttacaaatgaacaggaagaggtgaccaatgctactgaaacagtggagag

SEQ ID NO: 9195 - DNA, 60 bp, Artificial
  Synthetic oligonucleotide
agacctacgattggacattaaacaggaatcagccggctgcgactgcattagctaatacta

SEQ ID NO: 9196 - DNA, 52 bp, Artificial
  Synthetic oligonucleotide
gacactagtacaaccaggcgataatatcaccttctcacacaatggaggtctg

SEQ ID NO: 9197 - DNA, 60 bp, Artificial
  Synthetic oligonucleotide
ggtaacgtcatcaattggaccaaggattcaataaccgacatctggacttatcaagcagag

SEQ ID NO: 9198 - DNA, 51 bp, Artificial
  Synthetic oligonucleotide
ttgactccagttatgtgtgctcaggacttgttggggacacaccaaggaatg

SEQ ID NO: 9199 - DNA, 60 bp, Artificial
  Synthetic oligonucleotide
ggtgccgtgaacagtagcctccctttccagaacgtgcatcctatcactattggagaatgc

SEQ ID NO: 9200 - DNA, 55 bp, Artificial
  Synthetic oligonucleotide
gatgccacatatcagaggacaagggcacttgtacgtactgggatggatcccagaa

SEQ ID NO: 9201 - DNA, 60 bp, Artificial
  Synthetic oligonucleotide
agaacgacccactgctgtggacacttgctacccatttgatgtgccagattatcaaagcct

SEQ ID NO: 9202 - DNA, 52 bp, Artificial
  Synthetic oligonucleotide
atccgaggcacacgagtgctaccaaggggacaattgtcgaccaggggtgttc

SEQ ID NO: 9203 - DNA, 57 bp, Artificial
  Synthetic oligonucleotide
gaaacactgaaggcagaacttcagacatgagaactgagatcataaggatgatggaaa

SEQ ID NO: 9204 - DNA, 60 bp, Artificial
  Synthetic oligonucleotide
aaccacagaagtggcttttggtctagtgtgtgccacttgtgagcagattgctgattcaca

SEQ ID NO: 9205 - DNA, 60 bp, Artificial
  Synthetic oligonucleotide
gttgtgtgcaacagatctggggcatcctctaattctagacacctgtactatcgaagggct

SEQ ID NO: 9206 - DNA, 55 bp, Artificial
  Synthetic oligonucleotide
ctggggcatcctctaattctagacacctgtactatcgaagggctagtctatggca

SEQ ID NO: 9207 - DNA, 55 bp, Artificial
  Synthetic oligonucleotide
ggtcaaacgttgcgagtgagatccaatgggaatctaattgccccatggtatggcc

SEQ ID NO: 9208 - DNA, 55 bp, Artificial
  Synthetic oligonucleotide
atctgcacccaagggaaaaggccaaccgacctgggacaatgtggactcctaggaa

SEQ ID NO: 9209 - DNA, 52 bp, Artificial
  Synthetic oligonucleotide
attttcgatagactggagacactaatactactcagggctttcactgaagaag

SEQ ID NO: 9210 - DNA, 59 bp, Artificial
  Synthetic oligonucleotide
cattaaggcagatccttcgaaggtcaggaggaatcgataaagagtcgatgggtttcaca

SEQ ID NO: 9211 - DNA, 55 bp, Artificial
  Synthetic oligonucleotide
gtctatacgcatctccacaacttgaggggttttcagctgaatcgaggaaattact

SEQ ID NO: 9212 - DNA, 57 bp, Artificial
  Synthetic oligonucleotide
acattgtagcaataactgattggtcaggatatagtgggagttttgttcaacacccag

SEQ ID NO: 9213 - DNA, 58 bp, Artificial
  Synthetic oligonucleotide
attgagcttatacgggggagacccaataagaatgatgacgtttcgtggacaggcaata

SEQ ID NO: 9214 - DNA, 60 bp, Artificial
  Synthetic oligonucleotide
cccttatgatataccagattatgcatcccttaggtccctagttgcctcatcaggcacatt

SEQ ID NO: 9215 - DNA, 55 bp, Artificial
  Synthetic oligonucleotide
ccagattatgcatcccttaggtccctagttgcctcatcaggcacattggagttca

SEQ ID NO: 9216 - DNA, 60 bp, Artificial
  Synthetic oligonucleotide
tgccctcagccaaggcactacactaaggggtcgacatgcaaatgggactatacatgacag

SEQ ID NO: 9217 - DNA, 60 bp, Artificial
  Synthetic oligonucleotide
caatcgctgaggcaatcattgtagcaatggtgttctcacaggaggattgcatgataaagg

SEQ ID NO: 9218 - DNA, 60 bp, Artificial
  Synthetic oligonucleotide
caggaacaagcattcgaatgggactatccatgatagaacagctttccgaggtcttatatc

SEQ ID NO: 9219 - DNA, 55 bp, Artificial
  Synthetic oligonucleotide
gttgcctcgtcaggcaccctggagttcattacggagggtttcacttggacaggag

SEQ ID NO: 9220 - DNA, 60 bp, Artificial
  Synthetic oligonucleotide
tgggtctagaccttgggtaagaggtcaatctggcagaataagcatatattggacgatagt

SEQ ID NO: 9221 - DNA, 55 bp, Artificial
  Synthetic oligonucleotide
acattcatggatccctaaaaggaatcgttccattctcaatacgagtcaaagggga

SEQ ID NO: 9222 - DNA, 60 bp, Artificial
  Synthetic oligonucleotide
tcggtgccacaggggggacacgcaaatccaaacgaggagatcattcgagctgaagaagct

SEQ ID NO: 9223 - DNA, 60 bp, Artificial
  Synthetic oligonucleotide
agtcagatttaccaatagagaactgtgatgccacatgtcagactattgcaggggtcttaa

SEQ ID NO: 9224 - DNA, 60 bp, Artificial
  Synthetic oligonucleotide
cgtcttcaagtcagatttaccaatcgagaactgtgatgccacatgtcagactattgcagg

SEQ ID NO: 9225 - DNA, 56 bp, Artificial
  Synthetic oligonucleotide
tgcgttttggaagcaatggctttccttgaagaatcccacccaggaatctttgaaaa

SEQ ID NO: 9226 - DNA, 50 bp, Artificial
  Synthetic oligonucleotide
tgagagtccgggaccaaagaggaaatgtactactgtctccagaagaggtc

SEQ ID NO: 9227 - DNA, 53 bp, Artificial
  Synthetic oligonucleotide
cagcgtacaacctactttctcggtacagagaagccttcctttcgagagagcaa

SEQ ID NO: 9228 - DNA, 60 bp, Artificial
  Synthetic oligonucleotide
gtactttgtcgaaacgctagcaaggagcatatgtgagaaacttgaacaatctggccttcc

SEQ ID NO: 9229 - DNA, 58 bp, Artificial
  Synthetic oligonucleotide
attacagatacacatatcgatgccacaggggtgacactcaaatccaaacaaggagatc

SEQ ID NO: 9230 - DNA, 60 bp, Artificial
  Synthetic oligonucleotide
ggcctcatatacaacagaatggggactgtcaccactgaggtggcatttggcctagtatgc

SEQ ID NO: 9231 - DNA, 60 bp, Artificial
  Synthetic oligonucleotide
gaaacattgttagaagagcaacagtatcggctgatccactagcatcactgctagagatgt

SEQ ID NO: 9232 - DNA, 56 bp, Artificial
  Synthetic oligonucleotide
aggcattaaagggaagaggcagcacacttggactcgacctgcgagcggccacaata

SEQ ID NO: 9233 - DNA, 60 bp, Artificial
  Synthetic oligonucleotide
cctttgctcttgcacaaggagcattgctaggaactaaacatagcaatgggaccattaaag

SEQ ID NO: 9234 - DNA, 60 bp, Artificial
  Synthetic oligonucleotide
ctctcgcacaaggagcattgctaggaactaaacatagcaatgggaccattaaagacagaa

SEQ ID NO: 9235 - DNA, 57 bp, Artificial
  Synthetic oligonucleotide
tgcgtaccggaatggaccctagaatgtgctctttgatgcaaggctcaactctcccaa

SEQ ID NO: 9236 - DNA, 60 bp, Artificial
  Synthetic oligonucleotide
cacaagggagccttatgttagctgcgataatgacaattgctggtcctttgctctcgcaca

SEQ ID NO: 9237 - DNA, 60 bp, Artificial
  Synthetic oligonucleotide
cacattagcccattgtcgggaaatgctcagcatatagaggaatgttcctgttatccccga

SEQ ID NO: 9238 - DNA, 60 bp, Artificial
  Synthetic oligonucleotide
tccctaaggcagccagaagtcaatacagcggattcgtgaggacactgttccagcagatgc

SEQ ID NO: 9239 - DNA, 55 bp, Artificial
  Synthetic oligonucleotide
gcaacagtatcggctgatccactagcatcactgctagagatgtgctacagcacac

SEQ ID NO: 9240 - DNA, 58 bp, Artificial
  Synthetic oligonucleotide
tctgagaggatcagtagctcataaatcctgcctgcctgcttgtatatatggactcatt

SEQ ID NO: 9241 - DNA, 55 bp, Artificial
  Synthetic oligonucleotide
tactttcacaagggattagtgattaaagaggaaccgctaaaaggatcagccaaac

SEQ ID NO: 9242 - DNA, 60 bp, Artificial
  Synthetic oligonucleotide
ccatggggcaaaagaagttgcacttagttattcaactggtgcacttgccagttgcatggg

SEQ ID NO: 9243 - DNA, 58 bp, Artificial
  Synthetic oligonucleotide
taggtgagtgccccaaatacgtaaagtcaaatagactagtcttggcaacaggactcag

SEQ ID NO: 9244 - DNA, 60 bp, Artificial
  Synthetic oligonucleotide
tggcgccaagcgaacaatggagaagacgcaaccgctggtctaacccacatgatgatctgg

SEQ ID NO: 9245 - DNA, 60 bp, Artificial
  Synthetic oligonucleotide
tggttgcatacatgctagaaagagagttggtccgcaaaacgaggttcctcccagtagctg

SEQ ID NO: 9246 - DNA, 53 bp, Artificial
  Synthetic oligonucleotide
aacgggtcatgttttaccataatgaccgatggcccgagtaatggggccgcctc

SEQ ID NO: 9247 - DNA, 60 bp, Artificial
  Synthetic oligonucleotide
ggggggttcaccacccgggtacagacagtgaccaaatcagcctatatgctcaagcatcag

SEQ ID NO: 9248 - DNA, 60 bp, Artificial
  Synthetic oligonucleotide
gagccgcacaagtgggaaaagtactgcgttctcgagataggagacatgctcctacggact

SEQ ID NO: 9249 - DNA, 60 bp, Artificial
  Synthetic oligonucleotide
attgaagtgactaatgctactgagctggttcagagttcctcaacaggtagaatatgcgac

SEQ ID NO: 9250 - DNA, 60 bp, Artificial
  Synthetic oligonucleotide
ctcaaactcagtaaccatgaagggcgactgatccagaacagcataacaatagagaggatg

SEQ ID NO: 9251 - DNA, 60 bp, Artificial
  Synthetic oligonucleotide
catcagaatgatcaaacgtgggataaacgatcggaatttctggagaggtgagaatggtcg

SEQ ID NO: 9252 - DNA, 55 bp, Artificial
  Synthetic oligonucleotide
cgtgggataaacgatcggaatttctggagaggtgagaatggtcgaaggaccagaa

SEQ ID NO: 9253 - DNA, 60 bp, Artificial
  Synthetic oligonucleotide
actcattctgagagggtcagtagcccacaaatcgtgtctacctgcttgtgtgtatggcct

SEQ ID NO: 9254 - DNA, 55 bp, Artificial
  Synthetic oligonucleotide
gagtcattacagaatagaatacagatagacccagtgaaattgagtagtgggtaca

SEQ ID NO: 9255 - DNA, 55 bp, Artificial
  Synthetic oligonucleotide
ccaagcactgagatgtcaatgaggggagtgagaatcagcaagatgggagtggatg

SEQ ID NO: 9256 - DNA, 50 bp, Artificial
  Synthetic oligonucleotide
tgctaccaagggggcaactgtcgaccaggggtgttcaaattgcgtctaat

SEQ ID NO: 9257 - DNA, 57 bp, Artificial
  Synthetic oligonucleotide
actaaaatagatctctggtcttacaacgcagagcttcttgtcgctctggagaaccaa

SEQ ID NO: 9258 - DNA, 60 bp, Artificial
  Synthetic oligonucleotide
tggcacggtctgcactcatcctgagaggatcagtggcccataagtcctgcttgcctgctt

SEQ ID NO: 9259 - DNA, 55 bp, Artificial
  Synthetic oligonucleotide
ccttactggcaaggtctgtattcaatagcctgtacgcatccccacaactcgaggg

SEQ ID NO: 9260 - DNA, 60 bp, Artificial
  Synthetic oligonucleotide
catatgacatccctgactatgcatcgctccggtccattgtagcatcctcaggaacattgg

SEQ ID NO: 9261 - DNA, 55 bp, Artificial
  Synthetic oligonucleotide
gcatcgctccggtccattgtagcatcctcaggaacattggaattcacagcagagg

SEQ ID NO: 9262 - DNA, 59 bp, Artificial
  Synthetic oligonucleotide
aacatcggatctagaccgtgggtcaggggtcaatcaggcaggataagcatatactggac

SEQ ID NO: 9263 - DNA, 60 bp, Artificial
  Synthetic oligonucleotide
catcgcaatagcaatgctcttggcgagcacaaatgcatacgatagaatatgcattggata

SEQ ID NO: 9264 - DNA, 55 bp, Artificial
  Synthetic oligonucleotide
gcttagcattgaagacccgagtcatgaaggcgagggaataccactgtatgatgca

SEQ ID NO: 9265 - DNA, 55 bp, Artificial
  Synthetic oligonucleotide
ggggtaagggtcagtaagatgggagtagatgaatactccagtacagagagggtag

SEQ ID NO: 9266 - DNA, 60 bp, Artificial
  Synthetic oligonucleotide
gtggccatggtattttcacaagaggattgcatgattaaggcagtccggggcgatctgaac

SEQ ID NO: 9267 - DNA, 60 bp, Artificial
  Synthetic oligonucleotide
aacactagcaaggagcatttgtgagaagcttgagcaatctggactcccagttggagggaa

SEQ ID NO: 9268 - DNA, 60 bp, Artificial
  Synthetic oligonucleotide
gattggactgtatgaggccttgcttctgggttgaattaatcagaggacgacctagagaaa

SEQ ID NO: 9269 - DNA, 52 bp, Artificial
  Synthetic oligonucleotide
ctcaagggacatgctgggaacagctatacactccagggggggaagtgaggaa

SEQ ID NO: 9270 - DNA, 60 bp, Artificial
  Synthetic oligonucleotide
catattcatcgtccatgatgtgggagattaatggtccggaatcagtgctagttaacacat

SEQ ID NO: 9271 - DNA, 60 bp, Artificial
  Synthetic oligonucleotide
agaccagtaatcactatagaccccgagatgatgacccatacaagcaagtatttatgctca

SEQ ID NO: 9272 - DNA, 60 bp, Artificial
  Synthetic oligonucleotide
tgaggtcagatgcacccattgacaactgcaattctgaatgcatcactccaaatggaagca

SEQ ID NO: 9273 - DNA, 60 bp, Artificial
  Synthetic oligonucleotide
tgataggagcccattcagagctctcataagctgggaaatgggtcaggcacccagtccata

SEQ ID NO: 9274 - DNA, 60 bp, Artificial
  Synthetic oligonucleotide
atgcaacaatcctcacaggattcttgatggaagggactgcacactaatagatgccctact

SEQ ID NO: 9275 - DNA, 55 bp, Artificial
  Synthetic oligonucleotide
aatgaccgatggcccgagtaatggggctgcatcgtacagaatcttcaagatcgag

SEQ ID NO: 9276 - DNA, 55 bp, Artificial
  Synthetic oligonucleotide
caatggtctcaagaccccacaatgctatacaataagatggagtttgagccgttcc

SEQ ID NO: 9277 - DNA, 60 bp, Artificial
  Synthetic oligonucleotide
gctgatccaattgatagtgagtgggagagacgagcagtcaatcgccgaagcgatcatagt

SEQ ID NO: 9278 - DNA, 50 bp, Artificial
  Synthetic oligonucleotide
gtacaatgatagacccaacaaatgggccattacccgaggacaatgagccg

SEQ ID NO: 9279 - DNA, 60 bp, Artificial
  Synthetic oligonucleotide
cattgctggatggctcctagggaacccagagtgtggatcactattcacagcaagctcatg

SEQ ID NO: 9280 - DNA, 60 bp, Artificial
  Synthetic oligonucleotide
attatcatttcagatgcatcaatccacgattgtaatacgacttgtcaaacacccaaaggt

SEQ ID NO: 9281 - DNA, 58 bp, Artificial
  Synthetic oligonucleotide
cactcatcctgagaggatcagtggcccataagtcctgcttgcctgcttgtgtatatgg

SEQ ID NO: 9282 - DNA, 55 bp, Artificial
  Synthetic oligonucleotide
gtgccggagtatacctcccttagatcactaattgcctcgtcaggtaccttggagt

SEQ ID NO: 9283 - DNA, 60 bp, Artificial
  Synthetic oligonucleotide
ttcagacaccaaaattctgagggcacgggacaagcggcagatctcaaaagtacccaagca

SEQ ID NO: 9284 - DNA, 53 bp, Artificial
  Synthetic oligonucleotide
ttcttgagataggagacatgctcctacggactgcaataggccaagtatcaagg

SEQ ID NO: 9285 - DNA, 55 bp, Artificial
  Synthetic oligonucleotide
gacacaaaatgtcagactccaatgggtgctataaattccagtatgcctttccaca

SEQ ID NO: 9286 - DNA, 57 bp, Artificial
  Synthetic oligonucleotide
ttagggtgcatgaaggatatgaggagttcacaatggttgggcgaagagcaacagcca

SEQ ID NO: 9287 - DNA, 60 bp, Artificial
  Synthetic oligonucleotide
tctattaaccatgaagactatcattgctttgagctacattctatgtctggctttcgctca

SEQ ID NO: 9288 - DNA, 60 bp, Artificial
  Synthetic oligonucleotide
cagcagagagcatctgcaggacaaatcagcgtgcagcccacattctccgtgcagagaaac

SEQ ID NO: 9289 - DNA, 59 bp, Artificial
  Synthetic oligonucleotide
tggtagacatccttaggcagaatccaacagaggaacaagccgtagacatatgcaaggcc

SEQ ID NO: 9290 - DNA, 59 bp, Artificial
  Synthetic oligonucleotide
atcggaagattctacatccaaatgtgcactgaactcaaacttagtgattatgagggacg

SEQ ID NO: 9291 - DNA, 54 bp, Artificial
  Synthetic oligonucleotide
tgggagactgtaaagattcaatggtctcaagaccccacaatgttgtacaataag

SEQ ID NO: 9292 - DNA, 60 bp, Artificial
  Synthetic oligonucleotide
tcttacagacagatggtgacaacaaccaacccactaatcagacacgagaacagaatggta

SEQ ID NO: 9293 - DNA, 55 bp, Artificial
  Synthetic oligonucleotide
gacaacaaccaacccactaatcagacacgagaacagaatggtactagccagtacc

SEQ ID NO: 9294 - DNA, 60 bp, Artificial
  Synthetic oligonucleotide
agcggaggaaacaccaaccaacagagagcatctgcaggacaaatcagcgtgcaacctact

SEQ ID NO: 9295 - DNA, 50 bp, Artificial
  Synthetic oligonucleotide
actaggttcctaccagtagcaggcgggacaagtagtgtatacattgaggt

SEQ ID NO: 9296 - DNA, 60 bp, Artificial
  Synthetic oligonucleotide
accttcaatggtgcattcatagccccagatagagccacctttctccgctctaatgcccca

SEQ ID NO: 9297 - DNA, 55 bp, Artificial
  Synthetic oligonucleotide
gcattcatagccccagatagagccacctttctccgctctaatgccccatcgggag

SEQ ID NO: 9298 - DNA, 53 bp, Artificial
  Synthetic oligonucleotide
cgtcaagcgaacaatggagaagatgcaaccgctggtcttacccatatgatgat

SEQ ID NO: 9299 - DNA, 60 bp, Artificial
  Synthetic oligonucleotide
acacccgggatgcagatcagaggattcgtgtattttgtcgaaacactagcgaggagcatt

SEQ ID NO: 9300 - DNA, 60 bp, Artificial
  Synthetic oligonucleotide
tcaagctagccactggactcagaaatgtgccagctatatcgaatagaggattgttcggag

SEQ ID NO: 9301 - DNA, 55 bp, Artificial
  Synthetic oligonucleotide
cttgccagggctcaacctttcagaaagcgctcctaattagccctcataggttcgg

SEQ ID NO: 9302 - DNA, 60 bp, Artificial
  Synthetic oligonucleotide
tgaaataggggatatgctcctacgaactgcaataggccaagtgtcgagacccatgtttct

SEQ ID NO: 9303 - DNA, 60 bp, Artificial
  Synthetic oligonucleotide
taggggatatgctcctacgaactgcaataggccaagtttcaagacccatgtttctgtatg

SEQ ID NO: 9304 - DNA, 60 bp, Artificial
  Synthetic oligonucleotide
ttcaaaatgcccttaatgggaatggagatccgagcaacatggacagagcagttaagctgt

SEQ ID NO: 9305 - DNA, 55 bp, Artificial
  Synthetic oligonucleotide
gggaatggagatccgagcaacatggacagagcagttaagctgtataggaaactca

SEQ ID NO: 9306 - DNA, 55 bp, Artificial
  Synthetic oligonucleotide
cgtcggaacatcaacactgaaccagagatcagtcccagaaatagccactaggccc

SEQ ID NO: 9307 - DNA, 60 bp, Artificial
  Synthetic oligonucleotide
attacagatacacatatcggtgtcacaggggtgatacacaaatccaaacgagaagatcat

SEQ ID NO: 9308 - DNA, 55 bp, Artificial
  Synthetic oligonucleotide
catcgacaatgtcatggggatgattgggatattgcctgacatgacccccagcacg

SEQ ID NO: 9309 - DNA, 60 bp, Artificial
  Synthetic oligonucleotide
ccaacctcaatgatgccacttaccagaggacaagagcccttgtgcgtactgggatggacc

SEQ ID NO: 9310 - DNA, 55 bp, Artificial
  Synthetic oligonucleotide
tgatgccacttaccagaggacaagagcccttgtgcgtactgggatggatcctaga

SEQ ID NO: 9311 - DNA, 60 bp, Artificial
  Synthetic oligonucleotide
ccattggaaaggtctgcaggactttattagcaaagtcggtattcaatagcttgtatgcat

SEQ ID NO: 9312 - DNA, 55 bp, Artificial
  Synthetic oligonucleotide
ggattcgcggtcaggctatgagacatttagggtcattggtggttggaccactgcc

SEQ ID NO: 9313 - DNA, 60 bp, Artificial
  Synthetic oligonucleotide
gcggtcaggctatgagacatttagggtcattggtggttggaccactgccaattccaaatc

SEQ ID NO: 9314 - DNA, 53 bp, Artificial
  Synthetic oligonucleotide
gagatgttttggttatatggggtatacatcaccctgtttccacagacgaagcg

SEQ ID NO: 9315 - DNA, 55 bp, Artificial
  Synthetic oligonucleotide
taggatacagatagacccagtgaaattgagtagtgggtacaaagacataatctta

SEQ ID NO: 9316 - DNA, 56 bp, Artificial
  Synthetic oligonucleotide
gcaaattaaacaggcaggaaatagaatcggtaaagctagagagccttggtgtctat

SEQ ID NO: 9317 - DNA, 55 bp, Artificial
  Synthetic oligonucleotide
ctggacaataaacattcaaatggcacaatacatgatagaacccctcaccggaccc

SEQ ID NO: 9318 - DNA, 60 bp, Artificial
  Synthetic oligonucleotide
acgaatgaccatttgtgtgcagggaaataatgataacgcaacagctacagtatactatga

SEQ ID NO: 9319 - DNA, 55 bp, Artificial
  Synthetic oligonucleotide
tccaaaatgccctaaatggaaatggggacccgaataatatggatagagcagtcaa

SEQ ID NO: 9320 - DNA, 60 bp, Artificial
  Synthetic oligonucleotide
ttcagcaactgttacccttatgatatgcaggattatgtgtcccttaggtcactagttgcc

SEQ ID NO: 9321 - DNA, 55 bp, Artificial
  Synthetic oligonucleotide
ttacccttatgatatgcaggattatgtgtcccttaggtcactagttgcctcgtcg

SEQ ID NO: 9322 - DNA, 60 bp, Artificial
  Synthetic oligonucleotide
agcaaaagcagggtatataatcactcaccgagtgacatccacatcatggcgtctcaaggc

SEQ ID NO: 9323 - DNA, 60 bp, Artificial
  Synthetic oligonucleotide
ctggcatcactattggagatgtgccatagcacacaaattggtggggtaaggatggtggac

SEQ ID NO: 9324 - DNA, 60 bp, Artificial
  Synthetic oligonucleotide
tcactattggagatgtgccatagcacacaaattggtgggacaaggatggtggacatcctt

SEQ ID NO: 9325 - DNA, 56 bp, Artificial
  Synthetic oligonucleotide
acatcggactccattataaggtaggcgatacaccagatgtgaatactccaaatgtg

SEQ ID NO: 9326 - DNA, 53 bp, Artificial
  Synthetic oligonucleotide
cagtgcagaccatagggtttactggatacgagaggggagggttttgaagtatg

SEQ ID NO: 9327 - DNA, 53 bp, Artificial
  Synthetic oligonucleotide
cagcacctggaagagtgttcttgctacgtggacattgatgtgtactgcatatg

SEQ ID NO: 9328 - DNA, 60 bp, Artificial
  Synthetic oligonucleotide
gatgaggattaacaacgaaaccatattagagacaggatacgtgtgtagcaaatttcactc

SEQ ID NO: 9329 - DNA, 59 bp, Artificial
  Synthetic oligonucleotide
accgtgcttttatgttgaactcatacgagggagacctaataagaatgatgatgtctctt

SEQ ID NO: 9330 - DNA, 60 bp, Artificial
  Synthetic oligonucleotide
gcaaaagaggtggcactcagctattccactggtgcactagccagctgcatgggacttata

SEQ ID NO: 9331 - DNA, 55 bp, Artificial
  Synthetic oligonucleotide
gccatgatggtaaggaatggacatatatcggagttgatggacctgacaataatgc

SEQ ID NO: 9332 - DNA, 55 bp, Artificial
  Synthetic oligonucleotide
cacattgcaagtatgagaaggaactacttcacagcggaagtatcccattgcagag

SEQ ID NO: 9333 - DNA, 60 bp, Artificial
  Synthetic oligonucleotide
tgcagaacaactataccacaataattgaaccctcagcccccaatgtggttcactactcta

SEQ ID NO: 9334 - DNA, 55 bp, Artificial
  Synthetic oligonucleotide
gcatctactggacaatagttaaaccaggggacatcctgataatcaacagtaatgg

SEQ ID NO: 9335 - DNA, 55 bp, Artificial
  Synthetic oligonucleotide
catacataacaagaaaccaacctgaatggtttaggaatgttttgagcgttgcacc

SEQ ID NO: 9336 - DNA, 54 bp, Artificial
  Synthetic oligonucleotide
tgcaggacaaatcagtgtgcagcctactttctcggtacaaagaaatcttccctt

SEQ ID NO: 9337 - DNA, 51 bp, Artificial
  Synthetic oligonucleotide
gtatgggtctcatatacaacaggatgggaacggtgaccacagaagtggctt

SEQ ID NO: 9338 - DNA, 60 bp, Artificial
  Synthetic oligonucleotide
tcatgcgatcctggtaaatgttaccaatttgcactcgggcaggggaccacgctagacaac

SEQ ID NO: 9339 - DNA, 60 bp, Artificial
  Synthetic oligonucleotide
atattaaccaaaactgagaacagcttcgagcaaataacattcttgcaggcattgcaactc

SEQ ID NO: 9340 - DNA, 60 bp, Artificial
  Synthetic oligonucleotide
agtactgtgttctcgaaataggagatatgctcctgaggactgcgataggccaagtgtcga

SEQ ID NO: 9341 - DNA, 60 bp, Artificial
  Synthetic oligonucleotide
taaggaaagcaaccaggaggctgattcaactgatagtgagtgggagagacgaacaatcaa

SEQ ID NO: 9342 - DNA, 55 bp, Artificial
  Synthetic oligonucleotide
gaggctgattcaactgatagtgagtgggagagacgaacaatcaatcgctgaggcg

SEQ ID NO: 9343 - DNA, 50 bp, Artificial
  Synthetic oligonucleotide
tcaatagtgtcatgcgattccccaagtaatgtcaatggaggacccggagt

SEQ ID NO: 9344 - DNA, 60 bp, Artificial
  Synthetic oligonucleotide
gggtacatgttcgagagtaagagcatgaagcttcggacacaaataccagcagaaatgctc

SEQ ID NO: 9345 - DNA, 60 bp, Artificial
  Synthetic oligonucleotide
atggattcaaacactgtgtcaagttttcaggtagactgctttctttggcatgtccgcaaa

SEQ ID NO: 9346 - DNA, 60 bp, Artificial
  Synthetic oligonucleotide
aagtggcatttggcctggtatgcgccacatgtgagcagattgctgattcccagcaccggt

SEQ ID NO: 9347 - DNA, 55 bp, Artificial
  Synthetic oligonucleotide
cgcacaggaatggatcccagaatgtgttctctcatgcagggctcaaccctcccta

SEQ ID NO: 9348 - DNA, 58 bp, Artificial
  Synthetic oligonucleotide
cctaagaggatcagtagcccacaaatcctgcctacctgcttgtgtgtatggattggcc

SEQ ID NO: 9349 - DNA, 60 bp, Artificial
  Synthetic oligonucleotide
atctgaatgatgccacctatcaaaggacaagggcacttgtgcgtactggaatggacccca

SEQ ID NO: 9350 - DNA, 55 bp, Artificial
  Synthetic oligonucleotide
ccacctatcaaaggacaagggcacttgtgcgtactggaatggaccccaggatgtg

SEQ ID NO: 9351 - DNA, 60 bp, Artificial
  Synthetic oligonucleotide
ctaattgcagagtgcagacacatactaaccgaaactgagaacagcttcgagcagataacg

SEQ ID NO: 9352 - DNA, 60 bp, Artificial
  Synthetic oligonucleotide
taatgctactgagctagtccagagctcctcaacggggaaaatatgcaacaatcctcataa

SEQ ID NO: 9353 - DNA, 60 bp, Artificial
  Synthetic oligonucleotide
aaggaagtggcactcagttactctactggagcacttgccagttgtatgggcctcatatac

SEQ ID NO: 9354 - DNA, 54 bp, Artificial
  Synthetic oligonucleotide
agggtaatggtgtctcccctagctgtaacttggtggaacaggaatgggccggca

SEQ ID NO: 9355 - DNA, 56 bp, Artificial
  Synthetic oligonucleotide
ttactttacagctgaagtgtctcactgcagggcaacggaatacataatgaagggag

SEQ ID NO: 9356 - DNA, 56 bp, Artificial
  Synthetic oligonucleotide
tggaatttccagtatggtggaggccatggtgtctagggcccggattgatgccagga

SEQ ID NO: 9357 - DNA, 55 bp, Artificial
  Synthetic oligonucleotide
caggggaaaccttgaatgtggaatctaacggaaatctaatcgctccttggtatgc

SEQ ID NO: 9358 - DNA, 60 bp, Artificial
  Synthetic oligonucleotide
ttgagcacattgcaagtatgaggaggaactattttacagcggaagtttcccattgcaggg

SEQ ID NO: 9359 - DNA, 60 bp, Artificial
  Synthetic oligonucleotide
ccaattgagcacattgcaagtatgagaagggactacttcacagcggaagtgtcccattgc

SEQ ID NO: 9360 - DNA, 51 bp, Artificial
  Synthetic oligonucleotide
acataccagagaacaagagctctcgtgcgtactgggatggaccctaggatg

SEQ ID NO: 9361 - DNA, 57 bp, Artificial
  Synthetic oligonucleotide
cgctgttgcaactacacactcctggattcctaagaggaaccgctctatcctcaacac

SEQ ID NO: 9362 - DNA, 60 bp, Artificial
  Synthetic oligonucleotide
gcaataactcttcagacacagtagacacactaacagagaatggagtacctgtgacaagct

SEQ ID NO: 9363 - DNA, 54 bp, Artificial
  Synthetic oligonucleotide
agtgactgacatttggtcttacaatgctaagcttcttgtgttaattgagaatga

SEQ ID NO: 9364 - DNA, 51 bp, Artificial
  Synthetic oligonucleotide
agcaatcttgcgaagggggagaaagctaacgtgttgatagggcaaggagac

SEQ ID NO: 9365 - DNA, 55 bp, Artificial
  Synthetic oligonucleotide
cacattgcgagtatgagaagaaactatttcacagcggaagtgtctcattgcaggg

SEQ ID NO: 9366 - DNA, 60 bp, Artificial
  Synthetic oligonucleotide
tcacgaaggagaggggataccactatatgatgcgatcaagtgcatgagaacattctttgg

SEQ ID NO: 9367 - DNA, 55 bp, Artificial
  Synthetic oligonucleotide
cggtgggagtcttatcccaatttggtcaagagcaccgattatcacccgaagaggg

SEQ ID NO: 9368 - DNA, 60 bp, Artificial
  Synthetic oligonucleotide
acctcaagtagctccattgtgatgtgtggagtagaccatgagattgccgactggtcatgg

SEQ ID NO: 9369 - DNA, 60 bp, Artificial
  Synthetic oligonucleotide
gatgggaatgatcggaatattgcccgatatgaccccaagtacagagatgtcgctgagggg

SEQ ID NO: 9370 - DNA, 50 bp, Artificial
  Synthetic oligonucleotide
acctgacatgacccccagcacagagatgtcactaagaggaatgagagtca

SEQ ID NO: 9371 - DNA, 60 bp, Artificial
  Synthetic oligonucleotide
cagtgtgtacatcgaagtattgcatctaactcaaggaacctgctgggaacaaatgtacac

SEQ ID NO: 9372 - DNA, 53 bp, Artificial
  Synthetic oligonucleotide
ccggagtcccttccgcacattaatgagttgtcccataggagttgccccctctc

SEQ ID NO: 9373 - DNA, 51 bp, Artificial
  Synthetic oligonucleotide
ggcacttcaggtacctatgggacaggctcatggcctgatggggcgaatatc

SEQ ID NO: 9374 - DNA, 60 bp, Artificial
  Synthetic oligonucleotide
tgtgtctgtcgggacaattggcggggaagcaatcgaccatggataagattcaacagtgat

SEQ ID NO: 9375 - DNA, 60 bp, Artificial
  Synthetic oligonucleotide
ctatttcacggcagaagtgtcccattgcagggccactgagtacataatgaagggggtgta

SEQ ID NO: 9376 - DNA, 60 bp, Artificial
  Synthetic oligonucleotide
gtcacgagactggttcatgctcatgcctaggcaaaaggtaataggctctctttgtgtgcg

SEQ ID NO: 9377 - DNA, 53 bp, Artificial
  Synthetic oligonucleotide
catctttcttgcacggtctgctctcattctgaggggatcagtggcccataagt

SEQ ID NO: 9378 - DNA, 60 bp, Artificial
  Synthetic oligonucleotide
gtctgtctagtagaataagcatctactggacaatagttaaaccaggggacatcctgataa

SEQ ID NO: 9379 - DNA, 60 bp, Artificial
  Synthetic oligonucleotide
gccctctcaaattacctgatgggcctccttgctttcagcgatcaaaattcttgctgatgg

SEQ ID NO: 9380 - DNA, 60 bp, Artificial
  Synthetic oligonucleotide
aggacaatgagccaagcgggtatgcacaaacagactgcgttttggaagcaatggctttcc

SEQ ID NO: 9381 - DNA, 60 bp, Artificial
  Synthetic oligonucleotide
gggagactgtgaagattcaatggtcccaagaccctacaatgctatacaataagatggagt

SEQ ID NO: 9382 - DNA, 51 bp, Artificial
  Synthetic oligonucleotide
cgatcaggttcgactacagcttaaggataatgcaagggaactgggtaatgg

SEQ ID NO: 9383 - DNA, 52 bp, Artificial
  Synthetic oligonucleotide
agatccagatgagggaacggctggagtggaatctgcggtactgagaggcttc

SEQ ID NO: 9384 - DNA, 58 bp, Artificial
  Synthetic oligonucleotide
aaggagacatttttgtcataagagaaccattcatttcatgctctcacttggagtgcag

SEQ ID NO: 9385 - DNA, 50 bp, Artificial
  Synthetic oligonucleotide
cggaagaatggtaggcggaattggaaggttttatatacagatgtgcactg

SEQ ID NO: 9386 - DNA, 60 bp, Artificial
  Synthetic oligonucleotide
taatggacgaagactatcagggcaggctgtgcaatcccctgaatccgtttgtcagtcata

SEQ ID NO: 9387 - DNA, 55 bp, Artificial
  Synthetic oligonucleotide
caaggacaaaccctatggagtagaacgagcgatgctggatcagatcgggttatgg

SEQ ID NO: 9388 - DNA, 60 bp, Artificial
  Synthetic oligonucleotide
gtctcaaactggcagttggtatgaggaatgtacctgctagatcaagtagaggactatttg

SEQ ID NO: 9389 - DNA, 55 bp, Artificial
  Synthetic oligonucleotide
cctgatgggcctccttgctttcagcgatcaaaattcttgctgatggatgctctga

SEQ ID NO: 9390 - DNA, 55 bp, Artificial
  Synthetic oligonucleotide
gagcataaggaacaacacttatgaccatacccaatacagaacagagtcactacag

SEQ ID NO: 9391 - DNA, 55 bp, Artificial
  Synthetic oligonucleotide
cggtggaattgggagattctacatacaaatgtgcactgaactcaagctcagtgac

SEQ ID NO: 9392 - DNA, 59 bp, Artificial
  Synthetic oligonucleotide
tcctgaatatgcgtacaagattgttaaaaagggagattcagcaatcataaaaagcgaac

SEQ ID NO: 9393 - DNA, 55 bp, Artificial
  Synthetic oligonucleotide
atcaccctccaactaccagtgagcaacaaagtctataccagaacgctgatgcata

SEQ ID NO: 9394 - DNA, 57 bp, Artificial
  Synthetic oligonucleotide
gcaccaccctccaattgtcaatgagcaacaaagtctataccagaacgctgatgcata

SEQ ID NO: 9395 - DNA, 60 bp, Artificial
  Synthetic oligonucleotide
gacgaacgatgctggatcggacagggtgatggtgtctcccctagctgtaacttggtggaa

SEQ ID NO: 9396 - DNA, 55 bp, Artificial
  Synthetic oligonucleotide
gtcaatacagcggattcgtgaggacactgttccagcagatgcgagatgtgctcgg

SEQ ID NO: 9397 - DNA, 56 bp, Artificial
  Synthetic oligonucleotide
atacagcggattcgtgaggacactgttccaacagatgcgagatgtgtttggaacat

SEQ ID NO: 9398 - DNA, 54 bp, Artificial
  Synthetic oligonucleotide
gacaataggtgagtgccccaaatatgtaaagtcagatagattggttttggcgac

SEQ ID NO: 9399 - DNA, 50 bp, Artificial
  Synthetic oligonucleotide
ttaatcgagcaggccaacttttatcccccatgtaccaactccaacgatac

SEQ ID NO: 9400 - DNA, 51 bp, Artificial
  Synthetic oligonucleotide
ctggttcatgctcgtgcccaagcagaaagtggctggttccctttgcatcag

SEQ ID NO: 9401 - DNA, 60 bp, Artificial
  Synthetic oligonucleotide
cgggagattctacatacagatgtgcactgaactcaagctcagtgaccacgaagggaggct

SEQ ID NO: 9402 - DNA, 60 bp, Artificial
  Synthetic oligonucleotide
atgatagaaatgcgaccgctagtttcatttatgatgggatgcttgtcgacagtatcggtt

SEQ ID NO: 9403 - DNA, 60 bp, Artificial
  Synthetic oligonucleotide
ccatggggccaaagaggtatcactcagttattccactggtgcactcgcaagttgcatggg

SEQ ID NO: 9404 - DNA, 54 bp, Artificial
  Synthetic oligonucleotide
gaaaggaacatagtgcatttgaatagtactaccatagagaaggaaatttgtcct

SEQ ID NO: 9405 - DNA, 60 bp, Artificial
  Synthetic oligonucleotide
cgcaagtcaggctaggcaaatggtgcaggctatgaggacaattgggactcaccctagctc

SEQ ID NO: 9406 - DNA, 60 bp, Artificial
  Synthetic oligonucleotide
tcacactcaatacagagccgaatcgctacagaacagaatacagatagacccagtgaaatt

SEQ ID NO: 9407 - DNA, 55 bp, Artificial
  Synthetic oligonucleotide
gccgaatcgctacagaacagaatacagatagacccagtgaaattgagtggcgggt

SEQ ID NO: 9408 - DNA, 54 bp, Artificial
  Synthetic oligonucleotide
tggcctggacatcgaaacagccactcgtgcaggaaagcaaatagtggagcggat

SEQ ID NO: 9409 - DNA, 56 bp, Artificial
  Synthetic oligonucleotide
atcgtgccttcctttgacatgagtaatgagggatcttatttcttcggagacaatgc

SEQ ID NO: 9410 - DNA, 55 bp, Artificial
  Synthetic oligonucleotide
catacattacgagaaaccaacctgaatggtttaggaatgtcttgagcgttgcccc

SEQ ID NO: 9411 - DNA, 58 bp, Artificial
  Synthetic oligonucleotide
tgttctgagaggattcctcattttgggcaaggaagacaagagatatggtccagcatta

SEQ ID NO: 9412 - DNA, 60 bp, Artificial
  Synthetic oligonucleotide
tgtcctgcggggattcctcattttgggcaaggaagacaagagatatggcccagcgttgag

SEQ ID NO: 9413 - DNA, 60 bp, Artificial
  Synthetic oligonucleotide
ataatggggaggacgcaactgctggtctaacccatctaatgatatggcattccaacctca

SEQ ID NO: 9414 - DNA, 60 bp, Artificial
  Synthetic oligonucleotide
caagagtcaactagtgtggatggcatgtcactctgcggcatttgaagacctgagagtttc

SEQ ID NO: 9415 - DNA, 55 bp, Artificial
  Synthetic oligonucleotide
tggcatgtcactctgcggcatttgaagacctgagagtttcgagtttcatcagagg

SEQ ID NO: 9416 - DNA, 60 bp, Artificial
  Synthetic oligonucleotide
gaatccagcgagacacttaagatgaccattgcatctgtacatacttcgcgctacctagct

SEQ ID NO: 9417 - DNA, 55 bp, Artificial
  Synthetic oligonucleotide
tggcaagactaggaaaaggatacatgttcgaaagtaagagtatgaagcttcggac

SEQ ID NO: 9418 - DNA, 56 bp, Artificial
  Synthetic oligonucleotide
gattcatcatgtgggcctgccagagaggcaacattaggtgcaacatttgcatttga

SEQ ID NO: 9419 - DNA, 60 bp, Artificial
  Synthetic oligonucleotide
attgcaatcattgtaatagtgatactggtaacggccggaaagtcagacaagatctgcatc

SEQ ID NO: 9420 - DNA, 55 bp, Artificial
  Synthetic oligonucleotide
gtaatagtgatactggtaacggccggaaagtcagacaagatctgcatcggatatc

SEQ ID NO: 9421 - DNA, 54 bp, Artificial
  Synthetic oligonucleotide
agacaccggaactctgagggtacaggacaagctgcagacctaaaaagcacgcag

SEQ ID NO: 9422 - DNA, 60 bp, Artificial
  Synthetic oligonucleotide
cgcttagttactctgctggtgcacttgccagttgcatgggcctcatatacaacaggatgg

SEQ ID NO: 9423 - DNA, 60 bp, Artificial
  Synthetic oligonucleotide
aggataatgctcaaagcaaatttctccgttctattcgatcaactggagacattggtctca

SEQ ID NO: 9424 - DNA, 55 bp, Artificial
  Synthetic oligonucleotide
gggacagtaaaagataggagtccttttcgcacactaatgagttgccctatagggg

SEQ ID NO: 9425 - DNA, 59 bp, Artificial
  Synthetic oligonucleotide
tattgcttgaagtggagcaagagataagaactttcgcgtttcagcttatttaatgataa

SEQ ID NO: 9426 - DNA, 51 bp, Artificial
  Synthetic oligonucleotide
aaaagtattgtgtcctcgagataggagacatgctcctacgaacagcagtag

SEQ ID NO: 9427 - DNA, 55 bp, Artificial
  Synthetic oligonucleotide
gcaatggtgttctcacaggaggattgcatgataaaggcagtccgaggcgatttga

SEQ ID NO: 9428 - DNA, 60 bp, Artificial
  Synthetic oligonucleotide
ctggggaactacaaggagatatgcattgcttggtcgagtagcagttgctttgacgggaaa

SEQ ID NO: 9429 - DNA, 54 bp, Artificial
  Synthetic oligonucleotide
cctacatagtggagagaccaaatcccgccaatggaatatgttatccgggtactc

SEQ ID NO: 9430 - DNA, 55 bp, Artificial
  Synthetic oligonucleotide
tgtgtgcagggaaataatgataacgcaacagctacagtatactatgaccgaagac

SEQ ID NO: 9431 - DNA, 55 bp, Artificial
  Synthetic oligonucleotide
catttaggaaccaaacaagtatgcatagcatggtctagctcaagttgccacgatg

SEQ ID NO: 9432 - DNA, 60 bp, Artificial
  Synthetic oligonucleotide
ccccaattgagcatattgcgagcatgaggaggaactatttcacagcagaagtgtcccatt

SEQ ID NO: 9433 - DNA, 60 bp, Artificial
  Synthetic oligonucleotide
gagtagaccatgagattgccgactggtcatggcacgatggagctatccttccttttgaca

SEQ ID NO: 9434 - DNA, 57 bp, Artificial
  Synthetic oligonucleotide
ccaatagtggagttacgagcgcttgcccctacactggtgaatcgtccttttacagga

SEQ ID NO: 9435 - DNA, 53 bp, Artificial
  Synthetic oligonucleotide
cattgaagaactcagacggcagaaatagtgaatttagcttgtccttcatgaaa

SEQ ID NO: 9436 - DNA, 58 bp, Artificial
  Synthetic oligonucleotide
tggtgcagaatgggacgtcttcatagagcgacccactgctatggacacttgttatcca

SEQ ID NO: 9437 - DNA, 60 bp, Artificial
  Synthetic oligonucleotide
agaatctgggtgtatatcagatccttgctatttatagtacggtatcgagcagtctagttt

SEQ ID NO: 9438 - DNA, 53 bp, Artificial
  Synthetic oligonucleotide
tttgggtaacaagggaaccttatgtgtcatgcggccccgataagtgttatcag

SEQ ID NO: 9439 - DNA, 60 bp, Artificial
  Synthetic oligonucleotide
ccacgctggataacaaacactcgaatggcacaatacatgataggattccccatcgaaccc

SEQ ID NO: 9440 - DNA, 60 bp, Artificial
  Synthetic oligonucleotide
ttagctactcaaccggtgcacttgccagctgtatgggcctcatatacaacagaatgggaa

SEQ ID NO: 9441 - DNA, 60 bp, Artificial
  Synthetic oligonucleotide
gggtggaccgaaacagacagtagcttctcgttgaagcaagacatcatagcgataactgat

SEQ ID NO: 9442 - DNA, 53 bp, Artificial
  Synthetic oligonucleotide
gcgatacacttaagatgactattgcatccgtacctacttcgcgctatttagct

SEQ ID NO: 9443 - DNA, 54 bp, Artificial
  Synthetic oligonucleotide
tgaccggctggagactctaatattgctaagggctttcaccgaagagggagcaat

SEQ ID NO: 9444 - DNA, 53 bp, Artificial
  Synthetic oligonucleotide
gactgcaataggccaagtgtcgaggcccatgttcctatatattagaaccaacg

SEQ ID NO: 9445 - DNA, 60 bp, Artificial
  Synthetic oligonucleotide
actcagctactcaaccggtgcactcgccagttgcatgggtctctcatatacaacaggatg

SEQ ID NO: 9446 - DNA, 60 bp, Artificial
  Synthetic oligonucleotide
gctcctgaggactgcaataggccaagtatcaaggcccatgttcctgtacattagaaccaa

SEQ ID NO: 9447 - DNA, 57 bp, Artificial
  Synthetic oligonucleotide
gggatcaagtactcttgaactgagaagcgggtactgggccataaggaccaggagtgg

SEQ ID NO: 9448 - DNA, 60 bp, Artificial
  Synthetic oligonucleotide
gttggtgggatcgggagattctacatacagatgtgcactgaactcaaactcagcgactat

SEQ ID NO: 9449 - DNA, 60 bp, Artificial
  Synthetic oligonucleotide
gctgatggatgctctgaaactaagtattgaagacccgagtcatgagggagaggggatacc

SEQ ID NO: 9450 - DNA, 58 bp, Artificial
  Synthetic oligonucleotide
ttacgggcaaccttcaaacattgagaataagagtacatgaggggtatgaagagttcac

SEQ ID NO: 9451 - DNA, 57 bp, Artificial
  Synthetic oligonucleotide
atctatatgactacaaggagaacaggttcattgagattggagtgacaaggagagaag

SEQ ID NO: 9452 - DNA, 55 bp, Artificial
  Synthetic oligonucleotide
gcgaggttaggaaaaggatacatgttcgagagtaagagtatgaaactgcggacac

SEQ ID NO: 9453 - DNA, 60 bp, Artificial
  Synthetic oligonucleotide
aagggcaacggtatcagcagacccactagcgtctctattggagatgtgccacagcacaca

SEQ ID NO: 9454 - DNA, 60 bp, Artificial
  Synthetic oligonucleotide
tgccacttgtgagcagattgctgattcacagcatcggtctcacagacagatggtgactac

SEQ ID NO: 9455 - DNA, 60 bp, Artificial
  Synthetic oligonucleotide
gggactgtacactgatagatgccctcttgggagacccccactgtgatgtgttccaagatg

SEQ ID NO: 9456 - DNA, 60 bp, Artificial
  Synthetic oligonucleotide
ccgttggcttcgctcttagagatgtgccatagtacacaaattggcgggataaggatggtg

SEQ ID NO: 9457 - DNA, 55 bp, Artificial
  Synthetic oligonucleotide
gcctctctcttggagatgtgccatagtacacaaattggcgggataaggatggtgg

SEQ ID NO: 9458 - DNA, 60 bp, Artificial
  Synthetic oligonucleotide
tacatgttcgagagtaagagcatgaagattcgaacacaaataccggcagaaacgctagca

SEQ ID NO: 9459 - DNA, 59 bp, Artificial
  Synthetic oligonucleotide
cttaagcggagttatgtccaatctctgtctactgggacttcctgcgaatttctgagatc

SEQ ID NO: 9460 - DNA, 50 bp, Artificial
  Synthetic oligonucleotide
gggttcgcccctttctccaaggacaactcaattaggctttctgcaggcgg

SEQ ID NO: 9461 - DNA, 57 bp, Artificial
  Synthetic oligonucleotide
cacatatccacatcttctcgttcacaggagaagagatggccacaaaggctgactaca

SEQ ID NO: 9462 - DNA, 60 bp, Artificial
  Synthetic oligonucleotide
gcatctccacaactcgagggattttcagctgagtcgagaaaattgcttctcattgttcag

SEQ ID NO: 9463 - DNA, 60 bp, Artificial
  Synthetic oligonucleotide
gatgccctgaaactaagcattgaagacccgagtcatgagggagaggggataccgctatac

SEQ ID NO: 9464 - DNA, 53 bp, Artificial
  Synthetic oligonucleotide
ttggagaaacgatatattgagaacacaagagtctgaatgtgcctgcattaacg

SEQ ID NO: 9465 - DNA, 60 bp, Artificial
  Synthetic oligonucleotide
cacacagattggaggagtaaggatggtggacatccttagacagaatccaactgaggaaca

SEQ ID NO: 9466 - DNA, 55 bp, Artificial
  Synthetic oligonucleotide
ggacctaataacaatgcttcggcagtggtctggtacaatggaagaccagtcaccg

SEQ ID NO: 9467 - DNA, 60 bp, Artificial
  Synthetic oligonucleotide
tgcaaaattgctcccttgatggttgcatacatgctagaaagagagttggtccgcaaaacg

SEQ ID NO: 9468 - DNA, 51 bp, Artificial
  Synthetic oligonucleotide
tacgtatcggtgccatagaggggacactcaaattcaaacgaggagatcttt

SEQ ID NO: 9469 - DNA, 57 bp, Artificial
  Synthetic oligonucleotide
gccggaagcacactacccagaagatcaggtacaactggtgttgcaatcaaaggaggt

SEQ ID NO: 9470 - DNA, 55 bp, Artificial
  Synthetic oligonucleotide
aagatctaagagtgttatctgcactaacgggcaccgaatttaagcctagatcagc

SEQ ID NO: 9471 - DNA, 60 bp, Artificial
  Synthetic oligonucleotide
acgattgggtgagaacaaggacgtcatagtcacaagggagccttatgttagctgcgataa

SEQ ID NO: 9472 - DNA, 60 bp, Artificial
  Synthetic oligonucleotide
cccaactcaatccaattgatggcccattacctgaggataacgaaccaagcggatatgcac

SEQ ID NO: 9473 - DNA, 55 bp, Artificial
  Synthetic oligonucleotide
tggcccattacctgaggataacgaaccaagcggatatgcacaaacagattgtgtg

SEQ ID NO: 9474 - DNA, 60 bp, Artificial
  Synthetic oligonucleotide
tccatcaccctaatgatgcagcggaacaaacggaactctatcagaactcgaacacttatg

SEQ ID NO: 9475 - DNA, 60 bp, Artificial
  Synthetic oligonucleotide
aacccagaatgtgaccgtctactcactgcaaactcatggtcctatataatagagacgtcc

SEQ ID NO: 9476 - DNA, 53 bp, Artificial
  Synthetic oligonucleotide
gagtcaatcagaaacgggacctatgatcacgacatataccgagatgaagcatt

SEQ ID NO: 9477 - DNA, 53 bp, Artificial
  Synthetic oligonucleotide
tcggatgggaacagtgaccacagaagtggctcttggcctagtatgtgccactt

SEQ ID NO: 9478 - DNA, 50 bp, Artificial
  Synthetic oligonucleotide
ttttcctggcacggtcagcacttattctaagggggtcagttgcacataag

SEQ ID NO: 9479 - DNA, 60 bp, Artificial
  Synthetic oligonucleotide
agtcagtgatcatagagtctggtgatccaaatgctctcttgaagcacagatttgagataa

SEQ ID NO: 9480 - DNA, 60 bp, Artificial
  Synthetic oligonucleotide
tggcctagtatgtgcaacttgtgagcagattgctgattcacaccataggtctcacagaca

SEQ ID NO: 9481 - DNA, 53 bp, Artificial
  Synthetic oligonucleotide
agggattgcaccatagagggttggatcctagggaatcctaaatgcgacttatt

SEQ ID NO: 9482 - DNA, 60 bp, Artificial
  Synthetic oligonucleotide
aagtatcccattgcagagccactgaatacataatgaagggagtgtacataagcacagccc

SEQ ID NO: 9483 - DNA, 51 bp, Artificial
  Synthetic oligonucleotide
atgtcgcagtcccgcactcgcgagatactaacaaaaaccactgtggatcat

SEQ ID NO: 9484 - DNA, 60 bp, Artificial
  Synthetic oligonucleotide
gctctaatagtttggggaattcatcattctggatcgactactgaacagaccaaactctat

SEQ ID NO: 9485 - DNA, 58 bp, Artificial
  Synthetic oligonucleotide
atcttgactatgaggtgggttatttatgtgctggaattccgacagacactccacgggt

SEQ ID NO: 9486 - DNA, 55 bp, Artificial
  Synthetic oligonucleotide
actcatgcctaagcaaaaggtgacaggccctctttgtgtgcgaatggaccaggcg

SEQ ID NO: 9487 - DNA, 60 bp, Artificial
  Synthetic oligonucleotide
ccaagctacctgctgttgaacaagagcctatgcaacgttggagggtgggtcgtgatagcg

SEQ ID NO: 9488 - DNA, 54 bp, Artificial
  Synthetic oligonucleotide
tctcatagtgaatgcgccgaatcatgaggggatacaagccggagtagataggtt

SEQ ID NO: 9489 - DNA, 60 bp, Artificial
  Synthetic oligonucleotide
attgctgactcacagcaccggtctcacagacaaatggtgactactaccaacccactaatc

SEQ ID NO: 9490 - DNA, 60 bp, Artificial
  Synthetic oligonucleotide
gtaagccagaagagaagacgatatggacctccagtagctccattgtgatgtgtggagtag

SEQ ID NO: 9491 - DNA, 55 bp, Artificial
  Synthetic oligonucleotide
gaccagactattcaccataagacaagaaatggccagcagaggtctctgggattcc

SEQ ID NO: 9492 - DNA, 60 bp, Artificial
  Synthetic oligonucleotide
gtatcactggggatgatagaaatgcgactgctagcttcatttatgacgggaggcttgtgg

SEQ ID NO: 9493 - DNA, 55 bp, Artificial
  Synthetic oligonucleotide
ggacaacgcttaccctattcaagacgcccaatacacaaataatagaggaaagagc

SEQ ID NO: 9494 - DNA, 56 bp, Artificial
  Synthetic oligonucleotide
cagcgtacagcccacgttctctgtacagaggaacctcccattcgagagagcaacca

SEQ ID NO: 9495 - DNA, 55 bp, Artificial
  Synthetic oligonucleotide
ttggaccagcaacagcatagttactttctgtggactagacaatgaacctggatcg

SEQ ID NO: 9496 - DNA, 60 bp, Artificial
  Synthetic oligonucleotide
gagttaagagtctcaaactggcagtcggcctgaggaatgtacctgctgcatcaaatagag

SEQ ID NO: 9497 - DNA, 55 bp, Artificial
  Synthetic oligonucleotide
ctggcagtcggcctgaggaatgtacctgctgcatcaaatagagggctatttggtg

SEQ ID NO: 9498 - DNA, 60 bp, Artificial
  Synthetic oligonucleotide
tggtccatacctaattccaaatcgcagatcaatagacaagtcatagttgacagcgataat

SEQ ID NO: 9499 - DNA, 55 bp, Artificial
  Synthetic oligonucleotide
tatacataccggtgccacagaggggacacacaaatccagacaaggagatcattcg

SEQ ID NO: 9500 - DNA, 60 bp, Artificial
  Synthetic oligonucleotide
actaagcattgaagacccgagtcatgagggagaggggataccgctatacgatgcaatcaa

SEQ ID NO: 9501 - DNA, 59 bp, Artificial
  Synthetic oligonucleotide
ctattttacagcggaagtgtcccattgcagggctactgagtacatgatgaagggagtgt

SEQ ID NO: 9502 - DNA, 56 bp, Artificial
  Synthetic oligonucleotide
cctagtatgtgccacttgtgagcagattgctgactcacaacaccgatctcacaggc

SEQ ID NO: 9503 - DNA, 50 bp, Artificial
  Synthetic oligonucleotide
atgtggaccacatgagtgcagaatgtttgccctcagccaaggtaccacac

SEQ ID NO: 9504 - DNA, 51 bp, Artificial
  Synthetic oligonucleotide
gtcggaattacaaggacctaggtaattgccacccgatagggatggtaatag

SEQ ID NO: 9505 - DNA, 53 bp, Artificial
  Synthetic oligonucleotide
aaacaaacctctaccagaattcgaacacttatgtgtctgtaggaacatcaaca

SEQ ID NO: 9506 - DNA, 60 bp, Artificial
  Synthetic oligonucleotide
ctcagttattcaactggtgcacttgccagttgcatgggccttatatacaacaggatgggg

SEQ ID NO: 9507 - DNA, 55 bp, Artificial
  Synthetic oligonucleotide
gaatgatcgggatactgcctgacatgaccccaagtactgagatgtcactgagggg

SEQ ID NO: 9508 - DNA, 55 bp, Artificial
  Synthetic oligonucleotide
cgcactcatggatccctaagaggaaccgttccattctcaataccagtcaaagggg

SEQ ID NO: 9509 - DNA, 60 bp, Artificial
  Synthetic oligonucleotide
gcctgattccaaggcagtagcagtagtccattatgggggagtgcctactgacgtcattaa

SEQ ID NO: 9510 - DNA, 60 bp, Artificial
  Synthetic oligonucleotide
ggacaacaaacactgagactggagcaccccaactcaatccaattgatggaccattacctg

SEQ ID NO: 9511 - DNA, 55 bp, Artificial
  Synthetic oligonucleotide
gggcaacagctatactcagaaaagcaaccaggagattgattcaactgatagtgag

SEQ ID NO: 9512 - DNA, 54 bp, Artificial
  Synthetic oligonucleotide
ccatggaggtcgcaaatcaggctaggaaaatggtgcaggctatgaggacaattg

SEQ ID NO: 9513 - DNA, 51 bp, Artificial
  Synthetic oligonucleotide
gtacaccatcctcctgacaccaatgcgcaaaataacctgtacggctctggt

SEQ ID NO: 9514 - DNA, 56 bp, Artificial
  Synthetic oligonucleotide
cttattggtgggacggtctccaatcgtctgatgattttgctctgattgtaaacgca

SEQ ID NO: 9515 - DNA, 55 bp, Artificial
  Synthetic oligonucleotide
cccttaatggtagcatacatgctagaaagagaattggtccgcaaaacaagattcc

SEQ ID NO: 9516 - DNA, 58 bp, Artificial
  Synthetic oligonucleotide
ggtcggcaagtgcttgccacgatggcattagttggttgacaattggtatttccggccc

SEQ ID NO: 9517 - DNA, 60 bp, Artificial
  Synthetic oligonucleotide
ccactttctctgtacagagaaatctccctttcgagagagcgacaatcatggcagcattta

SEQ ID NO: 9518 - DNA, 55 bp, Artificial
  Synthetic oligonucleotide
acagagaaatctccctttcgagagagcgacaatcatggcagcatttacagggaac

SEQ ID NO: 9519 - DNA, 50 bp, Artificial
  Synthetic oligonucleotide
gtaagagtatgaaactccggacacaaataccagcagaaatgctcgcaaat

SEQ ID NO: 9520 - DNA, 60 bp, Artificial
  Synthetic oligonucleotide
gcaccgagtccatacaatatcagagtagaatgtgttggatggtccagcacttcatgccat

SEQ ID NO: 9521 - DNA, 59 bp, Artificial
  Synthetic oligonucleotide
acaaaacgaatgtagcatccccgcgaataaccaagtagtgccatgtgaaccaatcataa

SEQ ID NO: 9522 - DNA, 60 bp, Artificial
  Synthetic oligonucleotide
tatcgagcagtctagtactggtggggctgatcatagcaatgggtctttggatgtgttcga

SEQ ID NO: 9523 - DNA, 60 bp, Artificial
  Synthetic oligonucleotide
tcacgcagtgtcaaatggaacagtagtgaagacaatcacagatgaccgggttgaagtgac

SEQ ID NO: 9524 - DNA, 55 bp, Artificial
  Synthetic oligonucleotide
ggaacagtagtgaagacaatcacagatgaccgggttgaagtgaccaatgctacag

SEQ ID NO: 9525 - DNA, 60 bp, Artificial
  Synthetic oligonucleotide
gatcctctcctaatgcttatcaagcccaattcgagtctgtaggatggtctgcaacggcct

SEQ ID NO: 9526 - DNA, 55 bp, Artificial
  Synthetic oligonucleotide
cgaaaggctggagacactaatactacttagggctttcaccgaagaaggagcagtc

SEQ ID NO: 9527 - DNA, 55 bp, Artificial
  Synthetic oligonucleotide
caagcccaattcgagtctgtaggatggtctgcaacggcctgtcatgacgggaaag

SEQ ID NO: 9528 - DNA, 60 bp, Artificial
  Synthetic oligonucleotide
tgtactggtatcggccaaatgcaatgaaatttcgttcagagtagtgccgttccattctgt

SEQ ID NO: 9529 - DNA, 55 bp, Artificial
  Synthetic oligonucleotide
gcaatgaaatttcgttcagagtagtgccgttccattctgtaccagacaggctagg

SEQ ID NO: 9530 - DNA, 60 bp, Artificial
  Synthetic oligonucleotide
ggttccgtctctctaaccattgcaacagtacgtttccttatgcagattgccatcctagca

SEQ ID NO: 9531 - DNA, 58 bp, Artificial
  Synthetic oligonucleotide
acttgactggaataataactcaattcgagcgtctgaaaacatacagagattcgcttgg

SEQ ID NO: 9532 - DNA, 55 bp, Artificial
  Synthetic oligonucleotide
atcaattggggattgtcccaagtatgtcaaacagggatctttgaaacttgctacg

SEQ ID NO: 9533 - DNA, 55 bp, Artificial
  Synthetic oligonucleotide
gctggagacactaatactacttagggctttcaccgaagaaggagcagtcgttggc

SEQ ID NO: 9534 - DNA, 55 bp, Artificial
  Synthetic oligonucleotide
ctaaggccgaacgactcaatcacctttgagagtactgggaactttatagctcccg

SEQ ID NO: 9535 - DNA, 51 bp, Artificial
  Synthetic oligonucleotide
tggtaccaagatatgccttcgcaatgaaaaggggctctggatctggtatta

SEQ ID NO: 9536 - DNA, 55 bp, Artificial
  Synthetic oligonucleotide
ctgtgtttaacagtttatatgcatctccacaactcgaagggttttcagctgaatc

SEQ ID NO: 9537 - DNA, 55 bp, Artificial
  Synthetic oligonucleotide
ggcgagcgattgcaacacccggaatgcaaatcaggggattcgtgtactttgttga

SEQ ID NO: 9538 - DNA, 53 bp, Artificial
  Synthetic oligonucleotide
gggggtagccccattgcatttgggcaaatgtaacattgctggatggctcctgg

SEQ ID NO: 9539 - DNA, 60 bp, Artificial
  Synthetic oligonucleotide
tacccaaggctgccaggggcaaatatagtggatttgtgagaacgctatttcagcagatgc

SEQ ID NO: 9540 - DNA, 60 bp, Artificial
  Synthetic oligonucleotide
tgtactgagtataattctaacaactggtcttgcttatgataagatttgcatcggctatca

SEQ ID NO: 9541 - DNA, 60 bp, Artificial
  Synthetic oligonucleotide
cacatatgactatcctaagtattcagaggagtccaagctaaacagagaagagatagacgg

SEQ ID NO: 9542 - DNA, 55 bp, Artificial
  Synthetic oligonucleotide
tcctaagtattcagaggagtccaagctaaacagagaagagatagacggagtgaag

SEQ ID NO: 9543 - DNA, 60 bp, Artificial
  Synthetic oligonucleotide
agggcaacagtctctgcggaccccttggcctcactattagagatgtgtcacagtactcaa

SEQ ID NO: 9544 - DNA, 55 bp, Artificial
  Synthetic oligonucleotide
tgttcgaaacctccatgaaaaggtcagacgaatgctgaaggacaatgctaaagac

SEQ ID NO: 9545 - DNA, 60 bp, Artificial
  Synthetic oligonucleotide
agagcatctgttggaagaatggttggtggaatcgggagattctacatacagatgtgcact

SEQ ID NO: 9546 - DNA, 60 bp, Artificial
  Synthetic oligonucleotide
aagaccagtcggaatatccagtatggtagaggctatgatttccagagcccgaattgatgc

SEQ ID NO: 9547 - DNA, 55 bp, Artificial
  Synthetic oligonucleotide
tcaatttattcaacagtagcgagttccctagtactggcaatcatgatagctggtc

SEQ ID NO: 9548 - DNA, 60 bp, Artificial
  Synthetic oligonucleotide
tccgaatgcgtgtgtcaggatgaattttgttatactctgataacagacggaccatctgac

SEQ ID NO: 9549 - DNA, 59 bp, Artificial
  Synthetic oligonucleotide
tgacacgcaaatccaaacgaggagatcattcgagctgaagaagctatgggagcagaccc

SEQ ID NO: 9550 - DNA, 50 bp, Artificial
  Synthetic oligonucleotide
ttgacgggaaagagtggatgcatgtgtgcacgacagggaacgataatgat

SEQ ID NO: 9551 - DNA, 60 bp, Artificial
  Synthetic oligonucleotide
ctcataagctgggagatgggtcaagcacccagcccatataatactagggtcgagtgcata

SEQ ID NO: 9552 - DNA, 50 bp, Artificial
  Synthetic oligonucleotide
ccagcaggggtctatgggattcctttcgtcagtccgaaagaggcgaggag

SEQ ID NO: 9553 - DNA, 55 bp, Artificial
  Synthetic oligonucleotide
aagggctgataccagagtactattcattagagaggggaaaattgtccatagtagc

SEQ ID NO: 9554 - DNA, 55 bp, Artificial
  Synthetic oligonucleotide
gagagcgaccatcatggcagcatttacagggaacactgaaggcagaacgtctgac

SEQ ID NO: 9555 - DNA, 60 bp, Artificial
  Synthetic oligonucleotide
agggtactcaggagcgttcatcgattattgggctgatagagagtgcttcaacccttgctt

SEQ ID NO: 9556 - DNA, 55 bp, Artificial
  Synthetic oligonucleotide
ctgacaataacatattcatcgtccatgatgtgggaaatcaatggcccggaatcag

SEQ ID NO: 9557 - DNA, 60 bp, Artificial
  Synthetic oligonucleotide
gttggaagaatggttggtggaatcgggagattctacatacagatgtgcactgaactcaaa

SEQ ID NO: 9558 - DNA, 60 bp, Artificial
  Synthetic oligonucleotide
attagtccactgtcaggaagtgctcagcatgtggaggaatgctcctgttacccccggtat

SEQ ID NO: 9559 - DNA, 57 bp, Artificial
  Synthetic oligonucleotide
ggatagggagaactaagagcactagttccaggagtggctttgagatggtttgggatc

SEQ ID NO: 9560 - DNA, 60 bp, Artificial
  Synthetic oligonucleotide
cgaggttggagccacacaagtgggaaaagtactgcgttctagagataggagacatgctcc

SEQ ID NO: 9561 - DNA, 60 bp, Artificial
  Synthetic oligonucleotide
ggatatgagatgctaaaggtgccaaatgcattgaccgacgataggtcaaaacccacccaa

SEQ ID NO: 9562 - DNA, 60 bp, Artificial
  Synthetic oligonucleotide
cagagaaatctcccattcgagagagcaaccattatggcggcattcacgggaaacactgaa

SEQ ID NO: 9563 - DNA, 60 bp, Artificial
  Synthetic oligonucleotide
acttgaatgatgccacataccagagaacaagagctctcgtacgtactgggatggatccca

SEQ ID NO: 9564 - DNA, 54 bp, Artificial
  Synthetic oligonucleotide
tgtgacattgtcaatggagcattggggagcccaggatgcgaccacttaaatggc

SEQ ID NO: 9565 - DNA, 50 bp, Artificial
  Synthetic oligonucleotide
atggtaatggaactgattcgaatgataaagcgggggatcaatgaccggaa

SEQ ID NO: 9566 - DNA, 60 bp, Artificial
  Synthetic oligonucleotide
gttcctaaggctgctagaggccaatacagtggattcgtgaggacactgttccaacagatg

SEQ ID NO: 9567 - DNA, 51 bp, Artificial
  Synthetic oligonucleotide
gaagaggctcgaagcaaccctgatgagacagaccataggccaatctcagaa

SEQ ID NO: 9568 - DNA, 50 bp, Artificial
  Synthetic oligonucleotide
ggagtacgatgctgttgcaactacacactcctgggtccctaaaaggaatc

SEQ ID NO: 9569 - DNA, 60 bp, Artificial
  Synthetic oligonucleotide
tgctagcaaaatccgtattcaacagtctatatgcatctccacaactcgaggggttctcag

SEQ ID NO: 9570 - DNA, 60 bp, Artificial
  Synthetic oligonucleotide
gttcggaccgggatggatcctagaatgtgctctctgatgcaggggtcgactctcccacgg

SEQ ID NO: 9571 - DNA, 54 bp, Artificial
  Synthetic oligonucleotide
acatcactctgaatcggttagcgagcagaccaaactctatgggagtggaaacaa

SEQ ID NO: 9572 - DNA, 60 bp, Artificial
  Synthetic oligonucleotide
atctgaatgatgccacttatcagagaacaagagcgcttgtccgcactgggatggatccca

SEQ ID NO: 9573 - DNA, 55 bp, Artificial
  Synthetic oligonucleotide
cagagaacaagagcgcttgtccgcactgggatggatcccagaatgtgttccctaa

SEQ ID NO: 9574 - DNA, 60 bp, Artificial
  Synthetic oligonucleotide
gctataaggaccaagagcggaggaaacaccaaccaacagagagcatctgcaggacaaatc

SEQ ID NO: 9575 - DNA, 60 bp, Artificial
  Synthetic oligonucleotide
ggcacccagtccatataatgttagggtcgagtgcataggatggtcaagcacgtcatgcca

SEQ ID NO: 9576 - DNA, 55 bp, Artificial
  Synthetic oligonucleotide
gggaacgtattattgtcacctgaagaagtcagcgagacacaaggaacagagaggc

SEQ ID NO: 9577 - DNA, 60 bp, Artificial
  Synthetic oligonucleotide
gaggtgtcactaagctactcaactggtgcacttgccagttgcatgggcctcatatacaac

SEQ ID NO: 9578 - DNA, 60 bp, Artificial
  Synthetic oligonucleotide
cacttattctaagggggtcagttgcacataaatcttgcctgcctgcttgtgtgtacgggc

SEQ ID NO: 9579 - DNA, 55 bp, Artificial
  Synthetic oligonucleotide
ggtcagttgcacataaatcttgcctgcctgcttgtgtgtacgggcttgcagtagc

SEQ ID NO: 9580 - DNA, 60 bp, Artificial
  Synthetic oligonucleotide
catcctcctgacaccaatgagcaaaacaaattgtatggctctggtgatcgatatgtcagg

SEQ ID NO: 9581 - DNA, 53 bp, Artificial
  Synthetic oligonucleotide
ttgcagatagggaatataatctcgttatggataagccattcaattcagactag

SEQ ID NO: 9582 - DNA, 55 bp, Artificial
  Synthetic oligonucleotide
gcaaaacaaattgtatggctctggtgatcgatatgtcaggatgggaactgaaagc

SEQ ID NO: 9583 - DNA, 58 bp, Artificial
  Synthetic oligonucleotide
tacacactcctggatacctaagaggaaccgctctatcctcaacacgagccaaagggga

SEQ ID NO: 9584 - DNA, 60 bp, Artificial
  Synthetic oligonucleotide
gcactgagaggatagtagtgagcattgatcgcttcttaagggtccgagaccagcggggaa

SEQ ID NO: 9585 - DNA, 59 bp, Artificial
  Synthetic oligonucleotide
tagcaagctgggtccagagcgaattcaacaaagcatgcgaattgacagattcgagttgg

SEQ ID NO: 9586 - DNA, 60 bp, Artificial
  Synthetic oligonucleotide
gaacataggactacatctgaaaccgagctgcaattgctcacactcacaacccgaagcaac

SEQ ID NO: 9587 - DNA, 60 bp, Artificial
  Synthetic oligonucleotide
gtgatgggaatgatcggaatactacccgacatgaccccaagtactgagatgtcattgagg

SEQ ID NO: 9588 - DNA, 52 bp, Artificial
  Synthetic oligonucleotide
attacaaccagcaatgctattcaacatctgcgtccatctagaggtctgctat

SEQ ID NO: 9589 - DNA, 54 bp, Artificial
  Synthetic oligonucleotide
gaagctccatccccgtacaattcaaggttcgaatcggttgcttggtcagcaagt

SEQ ID NO: 9590 - DNA, 55 bp, Artificial
  Synthetic oligonucleotide
ggttatatggggtatacatcaccctgtttctacagacgaagcgagaaaactatat

SEQ ID NO: 9591 - DNA, 54 bp, Artificial
  Synthetic oligonucleotide
cgtgtggggcatacatcatccacccaccgatactgaacagacaaatttgtacat

SEQ ID NO: 9592 - DNA, 60 bp, Artificial
  Synthetic oligonucleotide
aacccatcgaataatcaagtggtgccatgtgaaccgatcataatagagagaaacatagtg

SEQ ID NO: 9593 - DNA, 55 bp, Artificial
  Synthetic oligonucleotide
acagaatggggactgtgacgaccgagagcgcatttggcctggtgtgcgccacatg

SEQ ID NO: 9594 - DNA, 55 bp, Artificial
  Synthetic oligonucleotide
acggactgcaataggccaagtatcacgacctatgttcctgtatgtgagaaccaat

SEQ ID NO: 9595 - DNA, 55 bp, Artificial
  Synthetic oligonucleotide
gggactatacatgataggagcccgttcagagccctcataagctgggagatgggtc

SEQ ID NO: 9596 - DNA, 60 bp, Artificial
  Synthetic oligonucleotide
ggaatgcagatcagaggattcgtgtattttgtcgaaacactagcaaggagcatttgtgag

SEQ ID NO: 9597 - DNA, 50 bp, Artificial
  Synthetic oligonucleotide
attaattggacaagagacgcaatgactgagatatggtcgtataatgctga

SEQ ID NO: 9598 - DNA, 60 bp, Artificial
  Synthetic oligonucleotide
atcgtaataggcacgattgcagtactcataggaatagcgaacttaggattgaatatagga

SEQ ID NO: 9599 - DNA, 56 bp, Artificial
  Synthetic oligonucleotide
agaatggggactgtcaccactgaggtggcatttggcctagtatgcgcaacctgtga

SEQ ID NO: 9600 - DNA, 60 bp, Artificial
  Synthetic oligonucleotide
gtagattgctttctttggcatgtccgcaaaagatttgcagaccaagatatgggtgatgcc

SEQ ID NO: 9601 - DNA, 59 bp, Artificial
  Synthetic oligonucleotide
ctgagttatggtaactgtgataccaaatgtcagaccccagtgggtgctataaattccag

SEQ ID NO: 9602 - DNA, 60 bp, Artificial
  Synthetic oligonucleotide
ttcttgagataggggacatgcttctaagaactgctataggccaagtttcgaggcccatgt

SEQ ID NO: 9603 - DNA, 60 bp, Artificial
  Synthetic oligonucleotide
accgagtgacatccacatcatggcgtctcaaggcaccaaacgatcttacgagcagatgga

SEQ ID NO: 9604 - DNA, 56 bp, Artificial
  Synthetic oligonucleotide
gccactgcatgtagcgatggacccggttggctaacactaggaatcactggcccaga

SEQ ID NO: 9605 - DNA, 51 bp, Artificial
  Synthetic oligonucleotide
ggaggttgatccagctaatagtaagtgggagggatgagcagtcaattgcgg

SEQ ID NO: 9606 - DNA, 60 bp, Artificial
  Synthetic oligonucleotide
gcatagattgaatacatatgaccagagtggaaggcttgttgctaaacttgttgctactga

SEQ ID NO: 9607 - DNA, 55 bp, Artificial
  Synthetic oligonucleotide
gttcgaaagtaagagcatgaagcttcggacacagataccggcagagatgctagca

SEQ ID NO: 9608 - DNA, 60 bp, Artificial
  Synthetic oligonucleotide
ttgctccgattgaacacattgcaagtatgaggaggaactatttcacagcagaagtgtccc

SEQ ID NO: 9609 - DNA, 59 bp, Artificial
  Synthetic oligonucleotide
cccagcttaacccaattgatgggccactacctgaggacaatgaaccaagcggatatgca

SEQ ID NO: 9610 - DNA, 51 bp, Artificial
  Synthetic oligonucleotide
cgaccactcaaaatgccaggtggtccaccctgccatcagcgatctaaattc

SEQ ID NO: 9611 - DNA, 60 bp, Artificial
  Synthetic oligonucleotide
cgccctctcagattacctgatggacctccctgctcgcagcggtcaaaattcttgctgatg

SEQ ID NO: 9612 - DNA, 55 bp, Artificial
  Synthetic oligonucleotide
tggagaatgccagacctgaagacgtgtctttccaggggcggggagtcttcgagct

SEQ ID NO: 9613 - DNA, 55 bp, Artificial
  Synthetic oligonucleotide
gacaggaaatggccagcaggggtctatgggattcctttcgtcagtccgaaagagg

SEQ ID NO: 9614 - DNA, 60 bp, Artificial
  Synthetic oligonucleotide
taatctggggaatccatcattctggatcaaccacagaacagaccaaattatatggaagtg

SEQ ID NO: 9615 - DNA, 60 bp, Artificial
  Synthetic oligonucleotide
cgtactggtgggatggactccaatcctccgatgatttcgctctcatagtgaatgcaccga

SEQ ID NO: 9616 - DNA, 55 bp, Artificial
  Synthetic oligonucleotide
ccacgccccctcagactgcctgatggacctccttgctcccagcggtcaaaattct

SEQ ID NO: 9617 - DNA, 60 bp, Artificial
  Synthetic oligonucleotide
gccatcctaagaagagcaaccagaaggctgatccaactgatagttagtgggagagacgaa

SEQ ID NO: 9618 - DNA, 60 bp, Artificial
  Synthetic oligonucleotide
gacgataacatactcatcgtctatgatgtgggagatcaacggtccggaatcagtgctggt

SEQ ID NO: 9619 - DNA, 53 bp, Artificial
  Synthetic oligonucleotide
cctgacgatgtgtctttccaggggcggggagtcttcgagctctcggacgaaaa

SEQ ID NO: 9620 - DNA, 52 bp, Artificial
  Synthetic oligonucleotide
tgaatcaaagtacatggattggctttggagattcaaggactgacaaaaccaa

SEQ ID NO: 9621 - DNA, 57 bp, Artificial
  Synthetic oligonucleotide
ccataagacaagagatggccagtagaggtctctgggattcctttcgtcagtccgaga

SEQ ID NO: 9622 - DNA, 55 bp, Artificial
  Synthetic oligonucleotide
agtaaccacagaagtggcttttggtctagtgtgtgccacttgtgagcagatcgcc

SEQ ID NO: 9623 - DNA, 60 bp, Artificial
  Synthetic oligonucleotide
gtgtgtatggacttgctgtggcaagcggatacgactttgagagagagggatactctctag

SEQ ID NO: 9624 - DNA, 53 bp, Artificial
  Synthetic oligonucleotide
agttggtcatacatagtggaaaggcccactgctcgaaatgggatctgctaccc

SEQ ID NO: 9625 - DNA, 53 bp, Artificial
  Synthetic oligonucleotide
gcttcttgatcccaacgacacagtgactttcaccttcaatggggcattcatag

SEQ ID NO: 9626 - DNA, 55 bp, Artificial
  Synthetic oligonucleotide
gcaactacacactcctggattccaaagaggaaccgctccattctcaatactagcc

SEQ ID NO: 9627 - DNA, 60 bp, Artificial
  Synthetic oligonucleotide
ggagctgcccagcttcggagtatctgggatcaatgaatctgcagacatgagcattggagt

SEQ ID NO: 9628 - DNA, 60 bp, Artificial
  Synthetic oligonucleotide
ccgcaccggaatggatcccaggatgtgctctctgatgcagggttcaactctccctaggag

SEQ ID NO: 9629 - DNA, 60 bp, Artificial
  Synthetic oligonucleotide
gtgggaactaatggatgaagattatcagggcaggctttgcaatcctctgaatccgtttgt

SEQ ID NO: 9630 - DNA, 52 bp, Artificial
  Synthetic oligonucleotide
cggagtcaaattggaatcaatgggcacctatcagatactatcaatctactca

SEQ ID NO: 9631 - DNA, 55 bp, Artificial
  Synthetic oligonucleotide
gaaccaaacaagtatgcatagcatggtctagctcaagttgccatgatggaagggc

SEQ ID NO: 9632 - DNA, 60 bp, Artificial
  Synthetic oligonucleotide
agcatccccgcgaacaaccaagtagtgccatgtgaaccaatcataatagagaggaacgta

SEQ ID NO: 9633 - DNA, 52 bp, Artificial
  Synthetic oligonucleotide
tacataactgacatgactcttgaagaaatgtcaagggactggttaatgctca

SEQ ID NO: 9634 - DNA, 52 bp, Artificial
  Synthetic oligonucleotide
acttcaatgatactagccggcaattcctctctttgccccatcagtgggtggg

SEQ ID NO: 9635 - DNA, 60 bp, Artificial
  Synthetic oligonucleotide
gctctctttgtgtgcgaatggaccaggcgatcatgggaaagaacatcatactgaaagcga

SEQ ID NO: 9636 - DNA, 53 bp, Artificial
  Synthetic oligonucleotide
tactgcttgaagtagaacaagagataagaactctctcgtttcagcttatttaa

SEQ ID NO: 9637 - DNA, 51 bp, Artificial
  Synthetic oligonucleotide
gagaaggccaaaggatctgggacactgtggacttctaggaaccctagtagg

SEQ ID NO: 9638 - DNA, 54 bp, Artificial
  Synthetic oligonucleotide
atgaggtcagatgcacccatagacacttgtgtgtccgagtgtattacaccaaat

SEQ ID NO: 9639 - DNA, 55 bp, Artificial
  Synthetic oligonucleotide
tcatggaagtcgttttcccaaatgaagtgggagctagaatactaacatcggagtc

SEQ ID NO: 9640 - DNA, 53 bp, Artificial
  Synthetic oligonucleotide
actaatttgtacggattcatcataaaaggaagatctcacttaaggaatgacac

SEQ ID NO: 9641 - DNA, 60 bp, Artificial
  Synthetic oligonucleotide
ccaggtagaagttgtcactgcccaagaattagtggaatcgcaacatctgccggaattgtg

SEQ ID NO: 9642 - DNA, 60 bp, Artificial
  Synthetic oligonucleotide
agtatgatgctgttgcaactacacactcctggattccaaagaggaaccgctccattctca

SEQ ID NO: 9643 - DNA, 56 bp, Artificial
  Synthetic oligonucleotide
cattacaagaaatcagcctgaatggtttagaaacatcttgagcatcgcacctataa

SEQ ID NO: 9644 - DNA, 55 bp, Artificial
  Synthetic oligonucleotide
tcaccacccgagtacggacagtgaccaaatcagcgtatatgcccaagcatcaggg

SEQ ID NO: 9645 - DNA, 60 bp, Artificial
  Synthetic oligonucleotide
cagtccggtccagttgcacatcaggtgatagtgaacaaccaaaactggtcagggtactca

SEQ ID NO: 9646 - DNA, 60 bp, Artificial
  Synthetic oligonucleotide
cttgtgagcagattgctgattcacaccataggtctcacaggcagatggcgactaccacca

SEQ ID NO: 9647 - DNA, 60 bp, Artificial
  Synthetic oligonucleotide
agatgagaactggtttcacttatggaccttccatcaactcagctgggaccactaggtcat

SEQ ID NO: 9648 - DNA, 55 bp, Artificial
  Synthetic oligonucleotide
tatggaccttccatcaactcagctgggaccactaggtcatgcatgagaaatggag

SEQ ID NO: 9649 - DNA, 54 bp, Artificial
  Synthetic oligonucleotide
tttcaggtagattgctatctatggcacataaggaagctgctcagcatgagagac

SEQ ID NO: 9650 - DNA, 60 bp, Artificial
  Synthetic oligonucleotide
tggagtctgctgtcctgcggggattcctcattttgggcaaggaagacaagagatatggcc

SEQ ID NO: 9651 - DNA, 57 bp, Artificial
  Synthetic oligonucleotide
tatgtatcatgcagccccgataaatgttatcaattcgcacttgggcagggaaccacg

SEQ ID NO: 9652 - DNA, 56 bp, Artificial
  Synthetic oligonucleotide
attagcgaatgttgtgaggaaaatgatgactaactcacaagatacagagctctctt

SEQ ID NO: 9653 - DNA, 59 bp, Artificial
  Synthetic oligonucleotide
caacactatagaggtcttcagatcgaacggtctaacagctaatgaatcggggaggctaa

SEQ ID NO: 9654 - DNA, 55 bp, Artificial
  Synthetic oligonucleotide
ggaaatgggtcaagcacccagtccatataatactagggttgagtgcatagggtgg

SEQ ID NO: 9655 - DNA, 55 bp, Artificial
  Synthetic oligonucleotide
gcttacagagttgggtacttatgtgcggggctgcccagtgatactccaagagggg

SEQ ID NO: 9656 - DNA, 52 bp, Artificial
  Synthetic oligonucleotide
cactcgtgtgggaaagcagatagtggagcggattctagaagaagagtccgat

SEQ ID NO: 9657 - DNA, 60 bp, Artificial
  Synthetic oligonucleotide
gtactttgttgaaacgctagctaggagcatttgtgagaagctagaacaatctggacttcc

SEQ ID NO: 9658 - DNA, 53 bp, Artificial
  Synthetic oligonucleotide
tcaggtatggagatggggtctggatagggaggacaaaaagcttggagtccagg

SEQ ID NO: 9659 - DNA, 60 bp, Artificial
  Synthetic oligonucleotide
acccgaggataatgagccaagcggatacgcacaaacagattgtgtgttggaagcaatggc

SEQ ID NO: 9660 - DNA, 55 bp, Artificial
  Synthetic oligonucleotide
ctaactattgcaacagtgtgtttcctcatgcagattgccatcctagcaacgactg

SEQ ID NO: 9661 - DNA, 60 bp, Artificial
  Synthetic oligonucleotide
taccagtgagcaacaaagtctataccagaacgctgatgcatatgtctcagttggatcatc

SEQ ID NO: 9662 - DNA, 60 bp, Artificial
  Synthetic oligonucleotide
gcaagtatgaggaggaactacttcacagcagaagtgtcccattgcagggccactgagtac

SEQ ID NO: 9663 - DNA, 55 bp, Artificial
  Synthetic oligonucleotide
gttgggtatttatgtgcggggctgcccagtgatactccaaggggagaagatgccc

SEQ ID NO: 9664 - DNA, 55 bp, Artificial
  Synthetic oligonucleotide
cagaggggtggatcaactcccccaatcatgccaaatcagttacacaaacattagt

SEQ ID NO: 9665 - DNA, 60 bp, Artificial
  Synthetic oligonucleotide
caaggacgtcatagtcacaagggagccctatgttagctgcgataatgacaattgctggtc

SEQ ID NO: 9666 - DNA, 55 bp, Artificial
  Synthetic oligonucleotide
agcaatagccggttttatagaaggcggatggcaagggatgattgatggctggtat

SEQ ID NO: 9667 - DNA, 53 bp, Artificial
  Synthetic oligonucleotide
gagtaatggtgtctcccttagctgtgacctggtggaataggaatggacccacg

SEQ ID NO: 9668 - DNA, 60 bp, Artificial
  Synthetic oligonucleotide
gctccaattgagcacattgcgagtatgagaagaaactatttcacagcggaagtatcccat

SEQ ID NO: 9669 - DNA, 60 bp, Artificial
  Synthetic oligonucleotide
tagaggtgatctgaatttcgtcaacagggcgaaccaacgattgaatccaatgcaccaact

SEQ ID NO: 9670 - DNA, 59 bp, Artificial
  Synthetic oligonucleotide
ctccaagtccgggagcacggagaatcgattttcactggctactccttgatcccaatgac

SEQ ID NO: 9671 - DNA, 50 bp, Artificial
  Synthetic oligonucleotide
gaacaccaaccaacagagagcatctgcaggacaaatcagtgtacagccaa

SEQ ID NO: 9672 - DNA, 55 bp, Artificial
  Synthetic oligonucleotide
actaaagccaggccagacattgcgaataagatccaatggaaatctaattgctcca

SEQ ID NO: 9673 - DNA, 60 bp, Artificial
  Synthetic oligonucleotide
cgtctccatacaattcaaggttcgaatcagttgcttggtcagcaaccgcatgccatgatg

SEQ ID NO: 9674 - DNA, 60 bp, Artificial
  Synthetic oligonucleotide
gcgaacttcagtgtgatcttcgaacggctggagacactgatactgcttagggctttcacc

SEQ ID NO: 9675 - DNA, 60 bp, Artificial
  Synthetic oligonucleotide
tgtgatgatcagtgtatggagagcataaggaacaacacttatgaccatactcaatacaga

SEQ ID NO: 9676 - DNA, 60 bp, Artificial
  Synthetic oligonucleotide
tgctcctccggactgcagtaggtcaagtttcgaggcccatgttcctgtatgtgagaacca

SEQ ID NO: 9677 - DNA, 52 bp, Artificial
  Synthetic oligonucleotide
acttcatggtcttacattgtggaaaaacccaatccaacaaatggaatctgtt

SEQ ID NO: 9678 - DNA, 55 bp, Artificial
  Synthetic oligonucleotide
taagagtccgagaccaacgagggaatgtgctattgtcacctgaagaagtcagcga

SEQ ID NO: 9679 - DNA, 60 bp, Artificial
  Synthetic oligonucleotide
tacaaccgaaggttcacaccagaaatagcagctagacctaaagtcagagaacaagcaggc

SEQ ID NO: 9680 - DNA, 55 bp, Artificial
  Synthetic oligonucleotide
ggcaaatggtgcaggctatgaggacaattgggactcaccctagctccagtgcagg

SEQ ID NO: 9681 - DNA, 59 bp, Artificial
  Synthetic oligonucleotide
ggttgagaccaaccacacagggacatattgttctctgaacggaatcagtccagtgcatc

SEQ ID NO: 9682 - DNA, 60 bp, Artificial
  Synthetic oligonucleotide
cccattgcagagccactgaatacataatgaagggagtgtacataaacacagccctgttga

SEQ ID NO: 9683 - DNA, 58 bp, Artificial
  Synthetic oligonucleotide
ctacacccttgatgaagagagcagagcaagaataaaaaccaggctgttcactataaga

SEQ ID NO: 9684 - DNA, 55 bp, Artificial
  Synthetic oligonucleotide
cttcgaacggctggagacactgatactgcttagggctttcaccgaagaaggggca

SEQ ID NO: 9685 - DNA, 58 bp, Artificial
  Synthetic oligonucleotide
catccccgcgaagaaccaagtggtgccatgtgagccaaccacagcagagaggcccaaa

SEQ ID NO: 9686 - DNA, 60 bp, Artificial
  Synthetic oligonucleotide
aatgatttggcattccaacctgaatgatgccacatatcagagaacaagggctcttgtgcg

SEQ ID NO: 9687 - DNA, 55 bp, Artificial
  Synthetic oligonucleotide
gctctggtgataggtacgttagaatggggactgaaagcatgaattttgccaagag

SEQ ID NO: 9688 - DNA, 60 bp, Artificial
  Synthetic oligonucleotide
cttgaaccgcacaaatgggaaaagtactgtgttcttgagataggagacatgcttctaaga

SEQ ID NO: 9689 - DNA, 53 bp, Artificial
  Synthetic oligonucleotide
ccttcgagggtcaggaggaattgataaggagtcaatgggtttcacctatagcg

SEQ ID NO: 9690 - DNA, 54 bp, Artificial
  Synthetic oligonucleotide
cttctagaagacaggcacaatgggaagctatgtaacctaaggggggaagcccca

SEQ ID NO: 9691 - DNA, 55 bp, Artificial
  Synthetic oligonucleotide
gatatcatcgagaatgcagtgcctggttccgaaaggtacagatccaacatcaagg

SEQ ID NO: 9692 - DNA, 56 bp, Artificial
  Synthetic oligonucleotide
gggagtgtacataaacacagctctgctcaatgcatcttgtgcggccatggatgatt

SEQ ID NO: 9693 - DNA, 53 bp, Artificial
  Synthetic oligonucleotide
cctatacaagaacaaccctggaagagtcactgtgtctaccaaaactagtcaaa

SEQ ID NO: 9694 - DNA, 60 bp, Artificial
  Synthetic oligonucleotide
aggctaccatgcaaacaattctacagacactgtcgacacagtgctagagaagaatgtaac

SEQ ID NO: 9695 - DNA, 60 bp, Artificial
  Synthetic oligonucleotide
tgtcgcttttgaccggctggagactctcatactactgagggctttcaccagcgaaggagc

SEQ ID NO: 9696 - DNA, 56 bp, Artificial
  Synthetic oligonucleotide
gggactgcaacgtagacgctttgtccaaaatgctcttaatgggaatggggatccaa

SEQ ID NO: 9697 - DNA, 59 bp, Artificial
  Synthetic oligonucleotide
acagtctatacgcatctccacaactagagggattttcagcagagtcgaggaaattgctt

SEQ ID NO: 9698 - DNA, 57 bp, Artificial
  Synthetic oligonucleotide
ctggatcagacagagtgatggtgtcacctctggctgtgacgtggtggaacagaaatg

SEQ ID NO: 9699 - DNA, 55 bp, Artificial
  Synthetic oligonucleotide
gaagtatgagatggctgacacacaagagcaattcttaccctattcaagacgccca

SEQ ID NO: 9700 - DNA, 60 bp, Artificial
  Synthetic oligonucleotide
gttggcaagtgaacgtgactgacagcttcggaggacttgctgtgttcaaccaaggggcaa

SEQ ID NO: 9701 - DNA, 58 bp, Artificial
  Synthetic oligonucleotide
ccacggaagaatcctgaagactgatttaaacagtggtaactgtgtagtgcaatgtcag

SEQ ID NO: 9702 - DNA, 60 bp, Artificial
  Synthetic oligonucleotide
tattggagatgtgccacagcacacagattggtggaacaaggatggtggacatccttaggc

SEQ ID NO: 9703 - DNA, 60 bp, Artificial
  Synthetic oligonucleotide
gactacagatacacctaccgatgccacagaggtgatacacaaattcaaactagaagatca

SEQ ID NO: 9704 - DNA, 60 bp, Artificial
  Synthetic oligonucleotide
tgcaaggatgttagcgatctaaaacagtatgatagtgatgagccagagtctagatcgcta

SEQ ID NO: 9705 - DNA, 55 bp, Artificial
  Synthetic oligonucleotide
aggacattagcgatctaaaacagtatgatagtgatgagccagagcctagatcgct

SEQ ID NO: 9706 - DNA, 54 bp, Artificial
  Synthetic oligonucleotide
tgttggcgatctaaggcagtatgacagtgatgaaccagagtctagatcgctagc

SEQ ID NO: 9707 - DNA, 59 bp, Artificial
  Synthetic oligonucleotide
caaggggcaattagagaaatgctaggagacggaacatcagagacaactagtgtgaacgt

SEQ ID NO: 9708 - DNA, 60 bp, Artificial
  Synthetic oligonucleotide
gatgagaatccttgtgagaggcaactctcctgtgtttaactataacaaggcaactaagag

SEQ ID NO: 9709 - DNA, 60 bp, Artificial
  Synthetic oligonucleotide
gcaaaacgaggttcctcccagtggctggtggaacgagcagtgtctatattgaggtgctgc

SEQ ID NO: 9710 - DNA, 60 bp, Artificial
  Synthetic oligonucleotide
ggtgcacttgccagttgcatgggcctcatatacaacaggatgggaactgtgaccaccgaa

SEQ ID NO: 9711 - DNA, 56 bp, Artificial
  Synthetic oligonucleotide
aagtggcactcagctactcagctggtgcacttgctagctgcatgggcctcatatac

SEQ ID NO: 9712 - DNA, 60 bp, Artificial
  Synthetic oligonucleotide
agaaccatatctctcatgtggaccacgtgagtgcagaatgtttgccctcagccaaggtac

SEQ ID NO: 9713 - DNA, 50 bp, Artificial
  Synthetic oligonucleotide
ccaatccttggtacccaaagctgcaaggagtctatacagtggatttgtga

SEQ ID NO: 9714 - DNA, 60 bp, Artificial
  Synthetic oligonucleotide
gccatggaggcactaatggtcacaacagtggacaaattgactcaggggagacagaccttt

SEQ ID NO: 9715 - DNA, 60 bp, Artificial
  Synthetic oligonucleotide
tgaactaatcagagggcgacccaaagagaacacaatctggactagtgggagcagcatatc

SEQ ID NO: 9716 - DNA, 53 bp, Artificial
  Synthetic oligonucleotide
cagaatatgcgtaggttatctgagcaccaattcatcagaaagggtcgacacgc

SEQ ID NO: 9717 - DNA, 60 bp, Artificial
  Synthetic oligonucleotide
cagaatgggaactgtgaccacagaggtggcattaggcctagtgtgtgccacttgtgagca

SEQ ID NO: 9718 - DNA, 55 bp, Artificial
  Synthetic oligonucleotide
ctgctggtgcacttgccagttgcatgggcctcatatacaacaggatggggactgt

SEQ ID NO: 9719 - DNA, 60 bp, Artificial
  Synthetic oligonucleotide
tcaggtagtgccatgtgaaccaactacagagaaagaggtctgttcgaaaatagtagacta

SEQ ID NO: 9720 - DNA, 53 bp, Artificial
  Synthetic oligonucleotide
ctatggggtgcaagcaggtattacttgcacgtgcagggataattggcagggtt

SEQ ID NO: 9721 - DNA, 60 bp, Artificial
  Synthetic oligonucleotide
ggtgtcgctgagagggataagagtcagcaagatgggagtagatgaatactccagcacaga

SEQ ID NO: 9722 - DNA, 55 bp, Artificial
  Synthetic oligonucleotide
ggtcacaacagtggacaaattgactcaggggagacagacctttgattggacggtg

SEQ ID NO: 9723 - DNA, 59 bp, Artificial
  Synthetic oligonucleotide
ccatgccaggacattctacagaggatgtcaagaatgcaattggaatcctcatcggcgga

SEQ ID NO: 9724 - DNA, 60 bp, Artificial
  Synthetic oligonucleotide
gaaggccacaagagaccagagtatggtggacatcaaatagtatcgtcgtgttttgtggca

SEQ ID NO: 9725 - DNA, 58 bp, Artificial
  Synthetic oligonucleotide
agcaacggtatcggcagacccattagcatctttgttggaaatgtgccacagcacacag

SEQ ID NO: 9726 - DNA, 60 bp, Artificial
  Synthetic oligonucleotide
cagagccacagaatacataatgaagggggtatacattaatactgccttgcttaatgcatc

SEQ ID NO: 9727 - DNA, 51 bp, Artificial
  Synthetic oligonucleotide
agtactggtaatctaattgcaccagagtatggattcaaaatatcgaaaaga

SEQ ID NO: 9728 - DNA, 52 bp, Artificial
  Synthetic oligonucleotide
ggaaaaggccaacagacttgggacaatgtggactcctaggaacactaatagg

SEQ ID NO: 9729 - DNA, 58 bp, Artificial
  Synthetic oligonucleotide
tcatgaaggaatacaggctggagtagacagattctataggacttgcaaactggtcggg

SEQ ID NO: 9730 - DNA, 58 bp, Artificial
  Synthetic oligonucleotide
agatccagctgtacctagaaggcgctcagagggggatgactctctaccaacgggtccg

SEQ ID NO: 9731 - DNA, 56 bp, Artificial
  Synthetic oligonucleotide
ggaactcccttcatttggagtcgctggagtgaatgaatcagcagacatggcaatag

SEQ ID NO: 9732 - DNA, 58 bp, Artificial
  Synthetic oligonucleotide
atgcaagccttacaactactgcttgaagtggagcaagagatgagaactttctcgtttc

SEQ ID NO: 9733 - DNA, 60 bp, Artificial
  Synthetic oligonucleotide
tccgtcaacaatgctgtagtaatgccagctcatggtccagccaagagcatggaatatgat

SEQ ID NO: 9734 - DNA, 57 bp, Artificial
  Synthetic oligonucleotide
tggaaatgacgtttggatgggaagaacgatcagcaaggattcacgctcaggttatga

SEQ ID NO: 9735 - DNA, 52 bp, Artificial
  Synthetic oligonucleotide
ctccgggagcaaaagcagggtgacaaaaacataatggattccaacactgtgt

SEQ ID NO: 9736 - DNA, 56 bp, Artificial
  Synthetic oligonucleotide
atcagcgatttgagacagtatgacagcgatgagcctgaacaaagatcactagcaag

SEQ ID NO: 9737 - DNA, 60 bp, Artificial
  Synthetic oligonucleotide
catcactctggatcgactactgagcagaccaaactctatgggagtggaaacaagttgata

SEQ ID NO: 9738 - DNA, 60 bp, Artificial
  Synthetic oligonucleotide
cctggcacggtcagcacttatcctaagaggggcggttgcacataagtcctgtctgcctgc

SEQ ID NO: 9739 - DNA, 60 bp, Artificial
  Synthetic oligonucleotide
gggagattctacatccaaatgtgcactgaactcaagctcagtgactatgaggggcgatta

SEQ ID NO: 9740 - DNA, 50 bp, Artificial
  Synthetic oligonucleotide
cacagcaacgctgtgcctggggcatcatgcagtgccaaacggaactctag

SEQ ID NO: 9741 - DNA, 54 bp, Artificial
  Synthetic oligonucleotide
catcatggcggcattcacagggaacactgagggcagaacatccgacatgaggac

SEQ ID NO: 9742 - DNA, 60 bp, Artificial
  Synthetic oligonucleotide
tggtccacacctaattccaaatcgcaggtcaatagacaagtcatagttgacaataataac

SEQ ID NO: 9743 - DNA, 60 bp, Artificial
  Synthetic oligonucleotide
tgtagggacaactggactggaaccaacaggccagtactggtgatttctcctgatctgtct

SEQ ID NO: 9744 - DNA, 60 bp, Artificial
  Synthetic oligonucleotide
ttggtcaggctatagtgggagcttcgtgcagcatccagagctgacagggctggactgcat

SEQ ID NO: 9745 - DNA, 56 bp, Artificial
  Synthetic oligonucleotide
ccgtttctctaactattgcgacaatatgcctcctcatgcagattgccatcttagtt

SEQ ID NO: 9746 - DNA, 60 bp, Artificial
  Synthetic oligonucleotide
aaggatacatgttcgaaagcaagagcatgaagatacggacacaaataccagcagaaatgc

SEQ ID NO: 9747 - DNA, 55 bp, Artificial
  Synthetic oligonucleotide
ctatatgggagtgggagtaaactaataacagttgggagttccaactaccagcaat

SEQ ID NO: 9748 - DNA, 60 bp, Artificial
  Synthetic oligonucleotide
catcagatgcacattaggcatgtttatgggaatgttcaatcttagttctactctactagc

SEQ ID NO: 9749 - DNA, 53 bp, Artificial
  Synthetic oligonucleotide
aaatggaaagaatagtgattgcccttgcaataattagcgttgtcaaaggtgac

SEQ ID NO: 9750 - DNA, 60 bp, Artificial
  Synthetic oligonucleotide
tactttctcggtacagagaagccttcctttcgagagagcaaccatcatggcggcattcac

SEQ ID NO: 9751 - DNA, 60 bp, Artificial
  Synthetic oligonucleotide
gcagatggtgacaacgaccaacccactgataagacatgagaacaggatggtactggctag

SEQ ID NO: 9752 - DNA, 60 bp, Artificial
  Synthetic oligonucleotide
cccaggaatcatcatgcacttgcattcaaggtgagtgttattgggtaatgacggatggac

SEQ ID NO: 9753 - DNA, 59 bp, Artificial
  Synthetic oligonucleotide
tccccgcgaataaccaagtagtgccatgtgaaccaatcataatagagaggaatataacg

SEQ ID NO: 9754 - DNA, 56 bp, Artificial
  Synthetic oligonucleotide
gctttcagcgggaacaatgagggacggacatcagacatgcgaacggaagttataag

SEQ ID NO: 9755 - DNA, 55 bp, Artificial
  Synthetic oligonucleotide
ccatacccaatacagagcaaagtcattacagaatagaatacagatagacccagtg

SEQ ID NO: 9756 - DNA, 55 bp, Artificial
  Synthetic oligonucleotide
tggtgaggatgcgacagctggtctaactcacatgatgatctggcattccaatttg

SEQ ID NO: 9757 - DNA, 50 bp, Artificial
  Synthetic oligonucleotide
gaaataggggacatgcttctaagaactgctataggccaagtctcaagacc

SEQ ID NO: 9758 - DNA, 60 bp, Artificial
  Synthetic oligonucleotide
cagtccgaggtgatctgaatttcgtcaacagagcgaaccaacggctgaaccccatgcacc

SEQ ID NO: 9759 - DNA, 60 bp, Artificial
  Synthetic oligonucleotide
ttgtatcagaatggaccaggcgatcatggataagagcatcatactgaaagcgaacttcag

SEQ ID NO: 9760 - DNA, 58 bp, Artificial
  Synthetic oligonucleotide
gagaagatcattcgagctaaagaagctgtgggatcaaacccaatcaagggcaggacta

SEQ ID NO: 9761 - DNA, 60 bp, Artificial
  Synthetic oligonucleotide
agaagagcaattgcaacacccgggatgcaaatcagaggattcgtgtattttgtcgaaaca

SEQ ID NO: 9762 - DNA, 57 bp, Artificial
  Synthetic oligonucleotide
cactgcccaagaattggtggaatcgcaacatctaccggagttgtgtcctagcccttt

SEQ ID NO: 9763 - DNA, 60 bp, Artificial
  Synthetic oligonucleotide
catatacaacaggatgggggctgcgaccactgaagtggcatttggcctggtatgcgcaac

SEQ ID NO: 9764 - DNA, 60 bp, Artificial
  Synthetic oligonucleotide
gatggggactgtgaccactgaagtggcatttggactggtatgcgccacatgtgagcaaat

SEQ ID NO: 9765 - DNA, 60 bp, Artificial
  Synthetic oligonucleotide
cccaatgcaatggacacttgctacccattcgatgtgccagattaccagagcctaaggagc

SEQ ID NO: 9766 - DNA, 51 bp, Artificial
  Synthetic oligonucleotide
atacagcgggtttgtgagaacactattccagcaaatgcgtgacgtgctggg

SEQ ID NO: 9767 - DNA, 60 bp, Artificial
  Synthetic oligonucleotide
ttgttgcgatggtctctaaaactcgttggaataaacatgtcaccgagtaaatgcattctg

SEQ ID NO: 9768 - DNA, 60 bp, Artificial
  Synthetic oligonucleotide
ttgctgtgtgttgttctattgggattcatcatgtgggcctgccagagaggcaacattagg

SEQ ID NO: 9769 - DNA, 60 bp, Artificial
  Synthetic oligonucleotide
gttaatagacaatgaattcactgaggttgagaagcaaattggtaatgtgataaattggac

SEQ ID NO: 9770 - DNA, 60 bp, Artificial
  Synthetic oligonucleotide
ctctgactggaactgctaagcacatcgaggaatgctcatgctacggggagcaggcaggga

SEQ ID NO: 9771 - DNA, 60 bp, Artificial
  Synthetic oligonucleotide
catttcagtctctggtccctaaggcagccagaggtcaatacagtggattcgtgagaacac

SEQ ID NO: 9772 - DNA, 60 bp, Artificial
  Synthetic oligonucleotide
agatgctaaaggtgccaaatgcattgacagacgatagatcaaagcccactcaaggtcaga

SEQ ID NO: 9773 - DNA, 54 bp, Artificial
  Synthetic oligonucleotide
cctacatagtagagaaaccgaatcccatcaatggaatatgttacccgggtactc

SEQ ID NO: 9774 - DNA, 60 bp, Artificial
  Synthetic oligonucleotide
gtatacatcaacactgctctactcaatgcatcctgcgctgcgatggatgacttccaatta

SEQ ID NO: 9775 - DNA, 55 bp, Artificial
  Synthetic oligonucleotide
cactgctctactcaatgcatcctgcgctgcgatggatgacttccaattaattccg

SEQ ID NO: 9776 - DNA, 55 bp, Artificial
  Synthetic oligonucleotide
gtaatatggggagtgcatcaccctccgactaacaatgtccaacaaagcctctatc

SEQ ID NO: 9777 - DNA, 60 bp, Artificial
  Synthetic oligonucleotide
gatgtgggagattaatggtccggaatcagtgctagttaacacataccaatggatcattag

SEQ ID NO: 9778 - DNA, 60 bp, Artificial
  Synthetic oligonucleotide
agctcgtcagaagagatgctaactggaaattcgcataccatatgtgcaacatcgactgga

SEQ ID NO: 9779 - DNA, 55 bp, Artificial
  Synthetic oligonucleotide
ctgttgcaaaacagccaggtcttcagtctaattagaccaaatgagaatccagcac

SEQ ID NO: 9780 - DNA, 55 bp, Artificial
  Synthetic oligonucleotide
ggagtaaggatggtagacatccttaggcagaatccaacagaggaacaagccgtgg

SEQ ID NO: 9781 - DNA, 51 bp, Artificial
  Synthetic oligonucleotide
caccaaccgtaagtaacagcgattttatgtgtgttggatggtcaagcacaa

SEQ ID NO: 9782 - DNA, 60 bp, Artificial
  Synthetic oligonucleotide
acaatagaggtgttcagattgaacggtctcacggccagcgagtctggaagactcatagac

SEQ ID NO: 9783 - DNA, 60 bp, Artificial
  Synthetic oligonucleotide
gtcatgcgatcctagcaggtgttaccagtttgcgctcggacaggggaccacactagacaa

SEQ ID NO: 9784 - DNA, 51 bp, Artificial
  Synthetic oligonucleotide
actgctagctttatttacgacgggaagcttgtagacagtattggttcatgg

SEQ ID NO: 9785 - DNA, 60 bp, Artificial
  Synthetic oligonucleotide
gaaggtatgtaggaccttactggcaaagtctgtcttcaacagtctatatgcatctccaca

SEQ ID NO: 9786 - DNA, 60 bp, Artificial
  Synthetic oligonucleotide
tgtctatattgaggtgctgcatttaacccaggggacgtgctgggagcagatgtacactcc

SEQ ID NO: 9787 - DNA, 60 bp, Artificial
  Synthetic oligonucleotide
agtagtgtattgtggacatccaacagtatagtagcgctttgtggatccaaagaacgatta

SEQ ID NO: 9788 - DNA, 55 bp, Artificial
  Synthetic oligonucleotide
gggagtctcaatcctaaatctaggacagaagaggtacaccaaaacaacatactgg

SEQ ID NO: 9789 - DNA, 60 bp, Artificial
  Synthetic oligonucleotide
ttctgagggcacgggacaagcagcagatcttaagagtacccaagcagctatcaaccaaat

SEQ ID NO: 9790 - DNA, 60 bp, Artificial
  Synthetic oligonucleotide
gaattatgactctatacgaggtgaattcagccaagtagaacaacgaataaacatgcttgc

SEQ ID NO: 9791 - DNA, 60 bp, Artificial
  Synthetic oligonucleotide
gtcaatatacagttgcattgcaagcagtgttgtgctagtagggctcatacttgcattcat

SEQ ID NO: 9792 - DNA, 60 bp, Artificial
  Synthetic oligonucleotide
ccacagcacacagattggtggaataaggatgatagacatccttaggcagaatccaacaga

SEQ ID NO: 9793 - DNA, 55 bp, Artificial
  Synthetic oligonucleotide
gtagacgcttcgtccaaaatgcccttaatgggaatggggatccaaataacatgga

SEQ ID NO: 9794 - DNA, 60 bp, Artificial
  Synthetic oligonucleotide
acttgccagttgcatgggcctcatatacaacagaatgggaacggtgaccacagaagtggc

SEQ ID NO: 9795 - DNA, 50 bp, Artificial
  Synthetic oligonucleotide
agagaaagtagattttgatgactgcaaagatgtcggtgatcttaaacagt

SEQ ID NO: 9796 - DNA, 55 bp, Artificial
  Synthetic oligonucleotide
ggtggacaagtaatagtctaattgccctgtgtggaagcccattctcagttgggtc

SEQ ID NO: 9797 - DNA, 60 bp, Artificial
  Synthetic oligonucleotide
tctcatagtgaatgcaccgaatcatgagggaatacaagcaggagtagatagattctatag

SEQ ID NO: 9798 - DNA, 60 bp, Artificial
  Synthetic oligonucleotide
gagtctctgaagctctacagagattcgctcggagaagcattaatgaggatgggagacctc

SEQ ID NO: 9799 - DNA, 54 bp, Artificial
  Synthetic oligonucleotide
agctttggagtgtctgggatcaatgaatcggccgacatgagcattggagtaaca

SEQ ID NO: 9800 - DNA, 55 bp, Artificial
  Synthetic oligonucleotide
ggaagaactaaaagtactagttcaaggagtgggtttgagatgatctgggatccta

SEQ ID NO: 9801 - DNA, 58 bp, Artificial
  Synthetic oligonucleotide
cacccggaccttctcacaactgcacaccgatcgtagcagaattacagcttgccccata

SEQ ID NO: 9802 - DNA, 60 bp, Artificial
  Synthetic oligonucleotide
gcatttggccttatatgcgcaacctgtgaacagattgccgactcccagcataagtctcat

SEQ ID NO: 9803 - DNA, 54 bp, Artificial
  Synthetic oligonucleotide
ttaagagatctaatgtcgcggtcccgcactcgcgagatactaacaaaaaccact

SEQ ID NO: 9804 - DNA, 60 bp, Artificial
  Synthetic oligonucleotide
ccacacagagcacaatgggatgttgtgtgcaacaaatctgggacatcctcttattctaga

SEQ ID NO: 9805 - DNA, 60 bp, Artificial
  Synthetic oligonucleotide
cggggtgatctgaactttgtcaatagggcaaaccagcggctgaaccccatgcatcaactc

SEQ ID NO: 9806 - DNA, 55 bp, Artificial
  Synthetic oligonucleotide
atgatcggaatattgcccgatatgaccccaagcacagaggtgtcgctgagaggga

SEQ ID NO: 9807 - DNA, 50 bp, Artificial
  Synthetic oligonucleotide
gatacagattgatccagtcaaactgagcagcggctacaaagatgtgatac

SEQ ID NO: 9808 - DNA, 50 bp, Artificial
  Synthetic oligonucleotide
tgagagtccgagaccaaagaggaaatgtactgctgtccccagaggaagtc

SEQ ID NO: 9809 - DNA, 52 bp, Artificial
  Synthetic oligonucleotide
gaccggttggaatttccagtatggtggaggccatggtatctagggcccggat

SEQ ID NO: 9810 - DNA, 55 bp, Artificial
  Synthetic oligonucleotide
gattgctgattcacagcatcggtctcacagacaaatagcgactaccaccaaccca

SEQ ID NO: 9811 - DNA, 60 bp, Artificial
  Synthetic oligonucleotide
gtttgcatcaatgggacttgtacagtagtgatgactgatggaagtgcatcaggaagagcc

SEQ ID NO: 9812 - DNA, 60 bp, Artificial
  Synthetic oligonucleotide
gtttgcgtcaacgggacttgtacagtagtgatgactgatggaagtgcatcagggaaggcc

SEQ ID NO: 9813 - DNA, 60 bp, Artificial
  Synthetic oligonucleotide
ctcactgagtgacatcaaaatcatggcgtcccaaggcaccaaacggtcatatgaacagat

SEQ ID NO: 9814 - DNA, 54 bp, Artificial
  Synthetic oligonucleotide
gagggccaaacttatacaatatccggaatctccacatcccggaagtctgtctga

SEQ ID NO: 9815 - DNA, 60 bp, Artificial
  Synthetic oligonucleotide
atgaacagatggagactgatggggaacgccagaatgcaactgagatcagggcatccgtcg

SEQ ID NO: 9816 - DNA, 60 bp, Artificial
  Synthetic oligonucleotide
ggcgaatctggcgtcaagccaacaatggtgaggatgcgacagctggtctaactcacatga

SEQ ID NO: 9817 - DNA, 54 bp, Artificial
  Synthetic oligonucleotide
atcaatgatcgaaatttctggagaggtgagaatgggcggaaaacaaggagtgct

SEQ ID NO: 9818 - DNA, 50 bp, Artificial
  Synthetic oligonucleotide
aggggatcagccgatagtttctttaatcgactgaattggctaacaaaatc

SEQ ID NO: 9819 - DNA, 55 bp, Artificial
  Synthetic oligonucleotide
agtactttaaagctggctaccgggatgaggaatgtaccagaaaggcgactcagag

SEQ ID NO: 9820 - DNA, 55 bp, Artificial
  Synthetic oligonucleotide
caggagccgagaagcctaaattccttccggatttgtatgattacaaggagagccg

SEQ ID NO: 9821 - DNA, 55 bp, Artificial
  Synthetic oligonucleotide
tctggcgatctattcaaccgtcgccagttcactagtgctgtcagtctccctgggg

SEQ ID NO: 9822 - DNA, 55 bp, Artificial
  Synthetic oligonucleotide
gtgggaacctatgtttccgcaagcacttcaacattgaacaaaaggtcaatccctg

SEQ ID NO: 9823 - DNA, 57 bp, Artificial
  Synthetic oligonucleotide
ctacaacaagacaactaagaggcttgcaatacttgggaaggacgcaggtgcaattac

SEQ ID NO: 9824 - DNA, 60 bp, Artificial
  Synthetic oligonucleotide
aggtgactaatgctactgagctagtccaaagctcttcaacagggaaaatatgcaacaacc

SEQ ID NO: 9825 - DNA, 60 bp, Artificial
  Synthetic oligonucleotide
ttgacgggacctgtgttgtcgctgttacagatggccctgcggctaatagtgcggaccatc

SEQ ID NO: 9826 - DNA, 56 bp, Artificial
  Synthetic oligonucleotide
cagagttgcggaggggtggatcaactctcccaatcatgccaaatcagttacacaaa

SEQ ID NO: 9827 - DNA, 60 bp, Artificial
  Synthetic oligonucleotide
cagcggaagtatcccattgcagagccactgaatacataatgaagggagtgtacataaaca

SEQ ID NO: 9828 - DNA, 50 bp, Artificial
  Synthetic oligonucleotide
tgtcttaagaggattcctcattttgggcagagaagacaagagatatgggc

SEQ ID NO: 9829 - DNA, 60 bp, Artificial
  Synthetic oligonucleotide
acttactcgtcatcaatgatgtgggaaattaatggtcctgagtcagtgttggtcaatact

SEQ ID NO: 9830 - DNA, 59 bp, Artificial
  Synthetic oligonucleotide
gaccactgaagtggcatttggcctggtatgcgcaacctgtgaacagattgccgactccc

SEQ ID NO: 9831 - DNA, 54 bp, Artificial
  Synthetic oligonucleotide
tgagggtcagcaagatgggggtggatgaatattccagcactgaaagagtggtcg

SEQ ID NO: 9832 - DNA, 60 bp, Artificial
  Synthetic oligonucleotide
gccggaagaaaagacgatatggacctcaagtagctccattgtgatgtgtggagtagacca

SEQ ID NO: 9833 - DNA, 60 bp, Artificial
  Synthetic oligonucleotide
gttgcttcctcaggaactctagagttcatcacagaagggtttgcatggacaggagtcact

SEQ ID NO: 9834 - DNA, 52 bp, Artificial
  Synthetic oligonucleotide
cgaattgagcaatcttgcgaaaggggagaaggctaacgtgctgatagggcaa

SEQ ID NO: 9835 - DNA, 55 bp, Artificial
  Synthetic oligonucleotide
ctctagagttcatcacagaagggtttgcatggacaggagtcactcaaaatggagg

SEQ ID NO: 9836 - DNA, 55 bp, Artificial
  Synthetic oligonucleotide
caaggccccactcgacttaggaggatgcaccatggagggttggatattggggaac

SEQ ID NO: 9837 - DNA, 60 bp, Artificial
  Synthetic oligonucleotide
ttggtgatcagagttggtcatacatagtggaacggcctacagctcgaaatgggatctgct

SEQ ID NO: 9838 - DNA, 60 bp, Artificial
  Synthetic oligonucleotide
gcaatgaaacaattatcagggaatacaatgagacagtaaggatcgagagagtaacacaat

SEQ ID NO: 9839 - DNA, 60 bp, Artificial
  Synthetic oligonucleotide
gcagagacaactggactggaactaacaggccggtattggtaatatcctcagatttgtcat

SEQ ID NO: 9840 - DNA, 55 bp, Artificial
  Synthetic oligonucleotide
gtcaattcacgggatcatgcactagtccaatgggaaatcagggatatggggttaa

SEQ ID NO: 9841 - DNA, 51 bp, Artificial
  Synthetic oligonucleotide
gggccaaacctatacaatatccggaatctccacattcaggaggtctgcttg

SEQ ID NO: 9842 - DNA, 60 bp, Artificial
  Synthetic oligonucleotide
gtatgcgccacatgtgaacagattgctgattcccagcatcgatctcacaggcagatggtg

SEQ ID NO: 9843 - DNA, 55 bp, Artificial
  Synthetic oligonucleotide
ggacaggtgtcaatcaaaacgggagaagtagcgcctgcagaaggggatcagccga

SEQ ID NO: 9844 - DNA, 51 bp, Artificial
  Synthetic oligonucleotide
tgtgtgatgagttcctaaacgcaccggagtggtcatatattgtggagaaga

SEQ ID NO: 9845 - DNA, 60 bp, Artificial
  Synthetic oligonucleotide
tacgagacctgatgtcgcaatcccgcactcgcgagatactcacaaagaccactgtagacc

SEQ ID NO: 9846 - DNA, 60 bp, Artificial
  Synthetic oligonucleotide
acattgtcagaagggcaacagtctctgcggaccccttggcctcactattagagatgtgtc

SEQ ID NO: 9847 - DNA, 60 bp, Artificial
  Synthetic oligonucleotide
gagatgtgtcacagtactcaaataggaggagtaagaatggttgacatactcaggcagaac

SEQ ID NO: 9848 - DNA, 54 bp, Artificial
  Synthetic oligonucleotide
cggtcagagatgagtctacgtacggcacggacgagttgatacaagtggctctcg

SEQ ID NO: 9849 - DNA, 52 bp, Artificial
  Synthetic oligonucleotide
cccagttttggggtgtctgggatcaacgagtcagcggacatgagtattggag

SEQ ID NO: 9850 - DNA, 55 bp, Artificial
  Synthetic oligonucleotide
cagggatgagaatactcgtaagaggtaactctcctgtgtttaactacaacaaggc

SEQ ID NO: 9851 - DNA, 60 bp, Artificial
  Synthetic oligonucleotide
ggggaattgaacccatcgacaatgtgatgggaatgatcggaatattgcccgatatgaccc

SEQ ID NO: 9852 - DNA, 60 bp, Artificial
  Synthetic oligonucleotide
aatcagagcatctgttggaagaatggttggtgggatcggaagattctacatccaaatgtg

SEQ ID NO: 9853 - DNA, 60 bp, Artificial
  Synthetic oligonucleotide
tgggctcgaaacatactgcgtacacaggaatctgaatgcgtatgccacaacggtgtctgc

SEQ ID NO: 9854 - DNA, 60 bp, Artificial
  Synthetic oligonucleotide
tacggtaattgtgacacaaaatgtcagactccaatgggtgctataaattccagtatgcct

SEQ ID NO: 9855 - DNA, 55 bp, Artificial
  Synthetic oligonucleotide
gcgtacacaggaatctgaatgcgtatgccacaacggtgtctgcccggtagtgttc

SEQ ID NO: 9856 - DNA, 60 bp, Artificial
  Synthetic oligonucleotide
cctgaatgatgccacgtatcagagaacaagagctttagtgcgtactgggatggatcccag

SEQ ID NO: 9857 - DNA, 60 bp, Artificial
  Synthetic oligonucleotide
gtgtccatcacccgtctaacagtaataatcaacagactctctatcataatgcaaatgctt

SEQ ID NO: 9858 - DNA, 53 bp, Artificial
  Synthetic oligonucleotide
gggagttcaccacccgagcacaaatcaagaacaaaccgaattgtatgttcaag

SEQ ID NO: 9859 - DNA, 54 bp, Artificial
  Synthetic oligonucleotide
ggcaacgatgtatggatgggaaggaccattagcagaacatcaagatcagggttt

SEQ ID NO: 9860 - DNA, 55 bp, Artificial
  Synthetic oligonucleotide
caaccgacactgttgacacagtactcgaaaagaatgtgaccgtgacacactctgt

SEQ ID NO: 9861 - DNA, 60 bp, Artificial
  Synthetic oligonucleotide
cagtcacaataggagagtgcccaaaatacgtcaggagtaccaaattgaggatggctacag

SEQ ID NO: 9862 - DNA, 60 bp, Artificial
  Synthetic oligonucleotide
aacattctcagaacccaagagtcggagtgcgtatgccacaaaggaatctgtccagtagtc

SEQ ID NO: 9863 - DNA, 55 bp, Artificial
  Synthetic oligonucleotide
gagagtgcccaaaatacgtcaggagtaccaaattgaggatggctacaggactaag

SEQ ID NO: 9864 - DNA, 60 bp, Artificial
  Synthetic oligonucleotide
actggcaaaatctgtgttcaacagtctatatgcatctccacaactcgaggggtttcagct

SEQ ID NO: 9865 - DNA, 60 bp, Artificial
  Synthetic oligonucleotide
tgcatcctgtgcggctatggatgatttccaactaattccaatgatcagcaagtgtagaac

SEQ ID NO: 9866 - DNA, 50 bp, Artificial
  Synthetic oligonucleotide
caagttggatagaactcgatgagataggggaggatgttgccccaatcgaa

SEQ ID NO: 9867 - DNA, 60 bp, Artificial
  Synthetic oligonucleotide
aaatctgtgttcaacagtctatatgcatctccacaactagagggattttcagcagagtcg

SEQ ID NO: 9868 - DNA, 60 bp, Artificial
  Synthetic oligonucleotide
ttcaatctctacaactaagccctttcagaacatctcgagaatatcaatcggggactgtcc

SEQ ID NO: 9869 - DNA, 53 bp, Artificial
  Synthetic oligonucleotide
gtgggcacttggtgagaacatggcaccagagaaagtagactttgaggattgca

SEQ ID NO: 9870 - DNA, 60 bp, Artificial
  Synthetic oligonucleotide
ccaacacgataacctcgtttcaggtagattgctatctatggcatataagaaagctactca

SEQ ID NO: 9871 - DNA, 52 bp, Artificial
  Synthetic oligonucleotide
gccggattattcctcccttaggtcactagttgcctcatcaggcaccctggag

SEQ ID NO: 9872 - DNA, 52 bp, Artificial
  Synthetic oligonucleotide
acacaagatctaagcgacacgcgctccatagacaatctatgcggagaacttg

SEQ ID NO: 9873 - DNA, 57 bp, Artificial
  Synthetic oligonucleotide
tcattgagcccggatgtgcaagtgaccataccttataggagattcaaagggaaagcg

SEQ ID NO: 9874 - DNA, 51 bp, Artificial
  Synthetic oligonucleotide
ccgtgtgacagagctagacagcaccgtacagccgtacacctctgccactag

SEQ ID NO: 9875 - DNA, 50 bp, Artificial
  Synthetic oligonucleotide
ttgtcgatgggcctctccagattctgtgtacactctcaaggtcggtactt

SEQ ID NO: 9876 - DNA, 60 bp, Artificial
  Synthetic oligonucleotide
ccagcgaaacacttaagatgaccactgcgtctgtacccacttcgcgctacctagctgaca

SEQ ID NO: 9877 - DNA, 55 bp, Artificial
  Synthetic oligonucleotide
gaccactgcgtctgtacccacttcgcgctacctagctgacataaccctcgaggaa

SEQ ID NO: 9878 - DNA, 55 bp, Artificial
  Synthetic oligonucleotide
gcccctaattaccactatgaggagtgttcctgttatcctgatgctagcgaggtaa

SEQ ID NO: 9879 - DNA, 55 bp, Artificial
  Synthetic oligonucleotide
ggcagttggtctaagaaatgtgcctgccagatcaagtagaggactatttggggcc

SEQ ID NO: 9880 - DNA, 54 bp, Artificial
  Synthetic oligonucleotide
ccaaattaccactatgaggagtgttcctgttatcctgatgctagtgaggtaatg

SEQ ID NO: 9881 - DNA, 56 bp, Artificial
  Synthetic oligonucleotide
tgattatcgctgctaggaacatagtaagaagagcaacggtatcggcagacccacta

SEQ ID NO: 9882 - DNA, 60 bp, Artificial
  Synthetic oligonucleotide
ttagcaatagtgacttcctttgcgtgggatggtccagcactagttgccatgacggcattg

SEQ ID NO: 9883 - DNA, 52 bp, Artificial
  Synthetic oligonucleotide
cgccaggattgagccatttctgaagacaacaccacgccctctcagattacct

SEQ ID NO: 9884 - DNA, 60 bp, Artificial
  Synthetic oligonucleotide
gacggcattggacgaatgaccatttgtgtgcagggaaataatgataacgcaacagctaca

SEQ ID NO: 9885 - DNA, 60 bp, Artificial
  Synthetic oligonucleotide
gcacaatgggatgctgtgtgcaacaaatctgggacatcctcttattctagacacctgtac

SEQ ID NO: 9886 - DNA, 55 bp, Artificial
  Synthetic oligonucleotide
cggtagtaagcctcctaataggaatagccaacttaggtttgaacatcggactcca

SEQ ID NO: 9887 - DNA, 56 bp, Artificial
  Synthetic oligonucleotide
cggcctggtgtgcgccacatgtgagcagattgctgattcccagcatcggtctcaca

SEQ ID NO: 9888 - DNA, 51 bp, Artificial
  Synthetic oligonucleotide
gcaacccgaaggttgattcagttgatagtgagtggaagagatgagcagtca

SEQ ID NO: 9889 - DNA, 60 bp, Artificial
  Synthetic oligonucleotide
gcgaacttcagtgtgatcttcaaccggttggatacactaatactgctcagggctttcacc

SEQ ID NO: 9890 - DNA, 58 bp, Artificial
  Synthetic oligonucleotide
tcaatcccaccaccactcaggagctactatacgcctacacaggaccggcgcccgttgc

SEQ ID NO: 9891 - DNA, 53 bp, Artificial
  Synthetic oligonucleotide
accatttatggtattcaagtcaaagttagcagacatgggagaaggattagtat

SEQ ID NO: 9892 - DNA, 60 bp, Artificial
  Synthetic oligonucleotide
gcctaaatgtgatcaagcattctgtcaacaccggtcaaatgaacctatgcactggagcat

SEQ ID NO: 9893 - DNA, 60 bp, Artificial
  Synthetic oligonucleotide
gatattgccccaattgagcacattgcaagtatgaggaggaactattttacagcggaagta

SEQ ID NO: 9894 - DNA, 54 bp, Artificial
  Synthetic oligonucleotide
ggagtatgaggtggctgactcacaagaacagtgcttaccctgttcaggacgccc

SEQ ID NO: 9895 - DNA, 60 bp, Artificial
  Synthetic oligonucleotide
tgtattcaacagtctgtacgcatctccacaacttgaggggttttcagctgaatcgaggaa

SEQ ID NO: 9896 - DNA, 55 bp, Artificial
  Synthetic oligonucleotide
gacacatactaaccgaaactgagaacagcttcgagcagataacgttcttgcaggc

SEQ ID NO: 9897 - DNA, 50 bp, Artificial
  Synthetic oligonucleotide
atcctaggatgtttctggcaatgataacgtacctcacaaggaaccaacca

SEQ ID NO: 9898 - DNA, 55 bp, Artificial
  Synthetic oligonucleotide
ggcgggcaattgcaacacccggaatgcaaattagagggttcgtatactttgtcga

SEQ ID NO: 9899 - DNA, 60 bp, Artificial
  Synthetic oligonucleotide
ctaggagtccagagtgatgctcctttggattctaattgtggaggagattgctttcacagt

SEQ ID NO: 9900 - DNA, 55 bp, Artificial
  Synthetic oligonucleotide
ccttgtgctatggggtgttcatcacccgtctaacatagaggatcaaaggaccctc

SEQ ID NO: 9901 - DNA, 60 bp, Artificial
  Synthetic oligonucleotide
aacactaagagggagccagctctgataatctggggaatccaccactcaggatcaaccgct

SEQ ID NO: 9902 - DNA, 55 bp, Artificial
  Synthetic oligonucleotide
cccgggatgcaaattagagggttcgtgtacttcgttgaaactttagctaggagca

SEQ ID NO: 9903 - DNA, 55 bp, Artificial
  Synthetic oligonucleotide
ggagccagctctgataatctggggaatccaccactcaggatcaaccgctgaacag

SEQ ID NO: 9904 - DNA, 59 bp, Artificial
  Synthetic oligonucleotide
agggtagataatcactcaccgagtgacatccacatcatggcgtctcaaggcaccaaacg

SEQ ID NO: 9905 - DNA, 60 bp, Artificial
  Synthetic oligonucleotide
agcatggagctgcccagtttcggagtatctgggatcaatgaatctgctgacatgagcatt

SEQ ID NO: 9906 - DNA, 56 bp, Artificial
  Synthetic oligonucleotide
tgataggaacttctggagaggcgaaaatgggcggaggacgagaattgcttacgaaa

SEQ ID NO: 9907 - DNA, 52 bp, Artificial
  Synthetic oligonucleotide
ttctaacggcacagtgaaggaccgaagtccatataggactttcatgagtgtc

SEQ ID NO: 9908 - DNA, 51 bp, Artificial
  Synthetic oligonucleotide
acggagggtcgacataaacccgggccacgcagacctcagtgctaaagaggc

SEQ ID NO: 9909 - DNA, 57 bp, Artificial
  Synthetic oligonucleotide
tgactgtcaatgtgagaggatcgggaatgaggatacttgtaagaggcaattccccag

SEQ ID NO: 9910 - DNA, 59 bp, Artificial
  Synthetic oligonucleotide
ccgcgaggaaccaagtagtgctatgtgagccaactatagcagagaggcctaaagcagta

SEQ ID NO: 9911 - DNA, 51 bp, Artificial
  Synthetic oligonucleotide
cgtcgggaagatgattgatggaattggacgattctacatccaaatgtgcac

SEQ ID NO: 9912 - DNA, 53 bp, Artificial
  Synthetic oligonucleotide
atgacgggaaagcatggttgcacgtctgtgttactggggatgatagaaatgcg

SEQ ID NO: 9913 - DNA, 60 bp, Artificial
  Synthetic oligonucleotide
cactgcccgaagacaatgaaccgagcggttatgctcaaacagactgtgtgttggaagcaa

SEQ ID NO: 9914 - DNA, 60 bp, Artificial
  Synthetic oligonucleotide
tgtactttgttgagacattggcgaggagtatatgtgagaaacttgagcaatcaggactgc

SEQ ID NO: 9915 - DNA, 56 bp, Artificial
  Synthetic oligonucleotide
ttagcattgaagacccgagtcatgagggcgaagggataccgctgtatgatgcaatc

SEQ ID NO: 9916 - DNA, 60 bp, Artificial
  Synthetic oligonucleotide
catcctatctaaggacaatgcgattagaataggggaggatgcccatatcctagtcacaag

SEQ ID NO: 9917 - DNA, 60 bp, Artificial
  Synthetic oligonucleotide
tagtagacggccagacttgtgacattgtcaatggagcactaggaagtccaggatgcgacc

SEQ ID NO: 9918 - DNA, 60 bp, Artificial
  Synthetic oligonucleotide
ggatgcgaccacttaaatggcgcagaatgggacgttttcatagagaggcccagtgcggta

SEQ ID NO: 9919 - DNA, 52 bp, Artificial
  Synthetic oligonucleotide
gggaaacactcaaacggaacaatacacgataggtcccagtatcgcgccctaa

SEQ ID NO: 9920 - DNA, 54 bp, Artificial
  Synthetic oligonucleotide
ggatggggttaacacttggctagggaggacaataagcacagcttcaaggtctgg

SEQ ID NO: 9921 - DNA, 60 bp, Artificial
  Synthetic oligonucleotide
tgtgagcagattgcagattcacagcatcggtctcacagacagatggtgactaccagcaac

SEQ ID NO: 9922 - DNA, 50 bp, Artificial
  Synthetic oligonucleotide
ttggactggagtcgctcagagtgggggaagctatgcttgcaaaaggggat

SEQ ID NO: 9923 - DNA, 55 bp, Artificial
  Synthetic oligonucleotide
cgattagaataggggaggatgcccatatcctagtcacaagagaaccatacctctc

SEQ ID NO: 9924 - DNA, 55 bp, Artificial
  Synthetic oligonucleotide
gaaaatctacagagattcgcttggggaagccgtaatgaggatgggagaccttcac

SEQ ID NO: 9925 - DNA, 60 bp, Artificial
  Synthetic oligonucleotide
catcacctcaaacgcatcaatgggtgaatgtgacgctaagtgtcaaacaccccaaggagc

SEQ ID NO: 9926 - DNA, 60 bp, Artificial
  Synthetic oligonucleotide
gcgccatggtatgctttcgcactgagtagagactttggatcaggaatcatcacctcaaac

SEQ ID NO: 9927 - DNA, 60 bp, Artificial
  Synthetic oligonucleotide
tcgggaaagtgtgcagaaccttactggcaaaatctgtgttcaacagtctatatgcatctc

SEQ ID NO: 9928 - DNA, 60 bp, Artificial
  Synthetic oligonucleotide
tgatctgaactttgtcaatagggcaaaccagcggctaaacccaatgcatcaactcttgag

SEQ ID NO: 9929 - DNA, 60 bp, Artificial
  Synthetic oligonucleotide
cacattgcaagcatgagaaggaattacttcacagcagaggtgtctcattgcagagccaca

SEQ ID NO: 9930 - DNA, 60 bp, Artificial
  Synthetic oligonucleotide
atctgtgtaggctaccatgcaaacaattctacagacactgttgacacagtgctggagaag

SEQ ID NO: 9931 - DNA, 60 bp, Artificial
  Synthetic oligonucleotide
gctggagaagaatgtgactgtgactcattcagtcaatttactcgaaagcagccataatgg

SEQ ID NO: 9932 - DNA, 60 bp, Artificial
  Synthetic oligonucleotide
tagtcacaagagaaccatacctctcatgtggaccacatgagtgcagaatgtttgccctca

SEQ ID NO: 9933 - DNA, 54 bp, Artificial
  Synthetic oligonucleotide
tttcacctggacaggggtcactcagaatgggggaagcggtgcatgcaaaagggg

SEQ ID NO: 9934 - DNA, 60 bp, Artificial
  Synthetic oligonucleotide
tctttagtctcattagaccaaatgagaatccagcacataagagtcaattagtatggatgg

SEQ ID NO: 9935 - DNA, 60 bp, Artificial
  Synthetic oligonucleotide
tggacaaaaggagtatacgaagactgcttactggtgggacggtctccaatcgtctgatga

SEQ ID NO: 9936 - DNA, 53 bp, Artificial
  Synthetic oligonucleotide
ccagaggtcaagacagtggatttgtgagaacactattccaacagatgcgagac

SEQ ID NO: 9937 - DNA, 56 bp, Artificial
  Synthetic oligonucleotide
gtttggatagggaggacaaaaagcttggaatccagaagcggttttgagatggtctg

SEQ ID NO: 9938 - DNA, 59 bp, Artificial
  Synthetic oligonucleotide
aacattccatggagctaaagaggttgcactcagttactcaaccggtgcacttgccagct

SEQ ID NO: 9939 - DNA, 60 bp, Artificial
  Synthetic oligonucleotide
ttccatggagctaaagaggttgcactcagctactcaaccggtgcacttgctagttgcatg

SEQ ID NO: 9940 - DNA, 60 bp, Artificial
  Synthetic oligonucleotide
tcatcgtcaatgatgtgggaggttaatggacctgaatcggtattggtgaatacctaccag

SEQ ID NO: 9941 - DNA, 55 bp, Artificial
  Synthetic oligonucleotide
gatgtgggaggttaatggacctgaatcggtattggtgaatacctaccagtggatc

SEQ ID NO: 9942 - DNA, 50 bp, Artificial
  Synthetic oligonucleotide
agtgagcattgaccgatttttgagggttcgggaccaacaggggaacgtac

SEQ ID NO: 9943 - DNA, 52 bp, Artificial
  Synthetic oligonucleotide
ggttcgggtttctgaacggagataacacatggctcggtaggaccatcagccc

SEQ ID NO: 9944 - DNA, 60 bp, Artificial
  Synthetic oligonucleotide
gattcacatggacaggtgtcactcaaaacggaggaagtagcgcctgcagaaggggatcag

SEQ ID NO: 9945 - DNA, 55 bp, Artificial
  Synthetic oligonucleotide
gggtggtatggattccgatatcagaattcggaagggacagggcaagctgcagatc

SEQ ID NO: 9946 - DNA, 60 bp, Artificial
  Synthetic oligonucleotide
gtctgtatgcatctccacaactcgagggattttcagctgaatcgaggaaattgcttctca

SEQ ID NO: 9947 - DNA, 60 bp, Artificial
  Synthetic oligonucleotide
agcagatactgggcaataaggaccaggagcggaggaaacaccaaccaacagagagcatct

SEQ ID NO: 9948 - DNA, 60 bp, Artificial
  Synthetic oligonucleotide
atactgggctataagaacaaggagcggaggaaacaccaaccaacagagagcatctgcagg

SEQ ID NO: 9949 - DNA, 55 bp, Artificial
  Synthetic oligonucleotide
ggatggagagaactcatggctcgggaggacaattagcaaagactccagatcaggc

SEQ ID NO: 9950 - DNA, 53 bp, Artificial
  Synthetic oligonucleotide
cagggagaactcatggctcggaaggacaattagcaaagactccagatcaggct

SEQ ID NO: 9951 - DNA, 60 bp, Artificial
  Synthetic oligonucleotide
caagccagaggggaatacttgaagatgagcagatgtatcagaagtgctgcaacctgttcg

SEQ ID NO: 9952 - DNA, 55 bp, Artificial
  Synthetic oligonucleotide
gaagatgagcagatgtatcagaagtgctgcaacctgttcgagaaattcttcccca

SEQ ID NO: 9953 - DNA, 60 bp, Artificial
  Synthetic oligonucleotide
tctgaacccgtttgtcagtcataaggaaattgagtccgtcaacaatgctgtagtaatgcc

SEQ ID NO: 9954 - DNA, 50 bp, Artificial
  Synthetic oligonucleotide
caaggtacaacactcagagggcgacatgcgaatgggactatacatgatag

SEQ ID NO: 9955 - DNA, 57 bp, Artificial
  Synthetic oligonucleotide
ctgacgataacatattcatcgtcaatgatgtgggagattaatggcccggagtcggtg

SEQ ID NO: 9956 - DNA, 60 bp, Artificial
  Synthetic oligonucleotide
gcacaccggatctttttgctcaattgacgggaaagcaccgataagtcttggtgactgctc

SEQ ID NO: 9957 - DNA, 55 bp, Artificial
  Synthetic oligonucleotide
ggtatggggagtccaccaccctgcaactctaaaggaacaccaagacttgtacaaa

SEQ ID NO: 9958 - DNA, 55 bp, Artificial
  Synthetic oligonucleotide
gacaagggaaccgtatgtatcatgtgacccattagggtgtagaatgtatgcgttg

SEQ ID NO: 9959 - DNA, 55 bp, Artificial
  Synthetic oligonucleotide
cgcacaagtgggaaaagtattgtgttcttgagataggagacatgctcctacgaac

SEQ ID NO: 9960 - DNA, 55 bp, Artificial
  Synthetic oligonucleotide
aggtttgcaggaccttactggcaaaatccgtgttcaacagtctgtatgcatcccc

SEQ ID NO: 9961 - DNA, 60 bp, Artificial
  Synthetic oligonucleotide
aggaaacactaaccagcagagggcatctgcaggacaaatcagcgtacaacccactttctc

SEQ ID NO: 9962 - DNA, 53 bp, Artificial
  Synthetic oligonucleotide
gagggccaaacctatataacattcgaaacctccacattccagaggtctgcttg

SEQ ID NO: 9963 - DNA, 60 bp, Artificial
  Synthetic oligonucleotide
cacaatggttgggcggagggcaacagctatcctaaggaaagcaactagaaggctgattca

SEQ ID NO: 9964 - DNA, 55 bp, Artificial
  Synthetic oligonucleotide
gattggacggagggcaacagctatcctaaggaaagcaactagaaggctgatccag

SEQ ID NO: 9965 - DNA, 60 bp, Artificial
  Synthetic oligonucleotide
gtgtgcgccacatgtgagcaaattgctgactcccagcatcggtctcacaggcagatggtg

SEQ ID NO: 9966 - DNA, 55 bp, Artificial
  Synthetic oligonucleotide
tatgttgcaagtatgaggaggaactattttacagcggaagtgtcccattgtaggg

SEQ ID NO: 9967 - DNA, 55 bp, Artificial
  Synthetic oligonucleotide
caattataacaaggcaaccaagaggcttacagtcctcgggaaggacgcgggtgcg

SEQ ID NO: 9968 - DNA, 60 bp, Artificial
  Synthetic oligonucleotide
gcgcccaatcatgaggggatacaggctggggtcgacagattctataggacatgcaaactg

SEQ ID NO: 9969 - DNA, 55 bp, Artificial
  Synthetic oligonucleotide
aataactcaaccgacactgttgacacagtactcgagaagaacgtaaccgtgacac

SEQ ID NO: 9970 - DNA, 55 bp, Artificial
  Synthetic oligonucleotide
gcatgagaccttgcttttgggttgaactaatcagagggcggcccaaagagaacac

SEQ ID NO: 9971 - DNA, 55 bp, Artificial
  Synthetic oligonucleotide
ccccttacaattggggaattgcaacgtagcaggatggatccttggcaacccagaa

SEQ ID NO: 9972 - DNA, 60 bp, Artificial
  Synthetic oligonucleotide
ccagaatgcaactgagatcagggcatccgtcgggaagatgattgatggaattggacgatt

SEQ ID NO: 9973 - DNA, 55 bp, Artificial
  Synthetic oligonucleotide
gagatcagggcatccgtcgggaagatgattgatggaattggacgattctacatcc

SEQ ID NO: 9974 - DNA, 60 bp, Artificial
  Synthetic oligonucleotide
atcgaatctgcactgggataacatcgtcaaactcaccccatgtggtcaaaactgctactc

SEQ ID NO: 9975 - DNA, 55 bp, Artificial
  Synthetic oligonucleotide
tgggataacatcgtcaaactcaccccatgtggtcaaaactgctactcaaggggag

SEQ ID NO: 9976 - DNA, 60 bp, Artificial
  Synthetic oligonucleotide
gtgtgcagaaccttactggcaaaatctgtgttcaacagtctatatgcgtcaccacaactc

SEQ ID NO: 9977 - DNA, 59 bp, Artificial
  Synthetic oligonucleotide
gtcctataatgctgaactcttagtggcaatggagaaccaacacactatcgatctggccg

SEQ ID NO: 9978 - DNA, 55 bp, Artificial
  Synthetic oligonucleotide
gataacttactcggtgatcgaagttggtcatacatagtagagaggcctggcgccc

SEQ ID NO: 9979 - DNA, 50 bp, Artificial
  Synthetic oligonucleotide
gcattactaggggctagacatagcaatgggaccattaaagacagaacacc

SEQ ID NO: 9980 - DNA, 58 bp, Artificial
  Synthetic oligonucleotide
agttttgttcaacatccagaattgacggggctggactgcatgaggccttgcttctggg

SEQ ID NO: 9981 - DNA, 50 bp, Artificial
  Synthetic oligonucleotide
ggttcgtaaggaccctgttccaacagatgcgtgatgtacttggaacgttt

SEQ ID NO: 9982 - DNA, 60 bp, Artificial
  Synthetic oligonucleotide
gaaagttgtccacattagcccattgtcgggaagtgctcagcatatagaggaatgttcctg

SEQ ID NO: 9983 - DNA, 50 bp, Artificial
  Synthetic oligonucleotide
ctgcgaggttatcgggtccatcataatggctgcctgtacaaacaacagag

SEQ ID NO: 9984 - DNA, 59 bp, Artificial
  Synthetic oligonucleotide
taatggatgaagattaccagggcagactgtgtaatcctctgaacccgttcgtcagtcat

SEQ ID NO: 9985 - DNA, 55 bp, Artificial
  Synthetic oligonucleotide
cctctctgctggcaataaagcctcggatcgagaaccacttcgtgctgacgtaccc

SEQ ID NO: 9986 - DNA, 52 bp, Artificial
  Synthetic oligonucleotide
gggtcagaggccaatctaggagaataagtatctactggacaatagttaagcc

SEQ ID NO: 9987 - DNA, 50 bp, Artificial
  Synthetic oligonucleotide
gactagcgggagcagcatatccttttgtggtgtaaacagtgacactgtgg

SEQ ID NO: 9988 - DNA, 60 bp, Artificial
  Synthetic oligonucleotide
gcatacttactgacagtcagacagcgaccaaaaggattcggatggccatcaattagtgta

SEQ ID NO: 9989 - DNA, 55 bp, Artificial
  Synthetic oligonucleotide
gagaccgtaatatggcctggaccgtggtgaatagcatttgcaacaccacaggggt

SEQ ID NO: 9990 - DNA, 60 bp, Artificial
  Synthetic oligonucleotide
gatgctctaaagcttagcattgaagacccgagtcatgaaggcgagggaataccactgtat

SEQ ID NO: 9991 - DNA, 58 bp, Artificial
  Synthetic oligonucleotide
attaagcatcgaagacccaagccatgagggggaggggataccgctgtatgatgcaatc

SEQ ID NO: 9992 - DNA, 58 bp, Artificial
  Synthetic oligonucleotide
ccgaagaagtcagcgagacacaaggaacggagaagctgacaataacttactcgtcatc

SEQ ID NO: 9993 - DNA, 56 bp, Artificial
  Synthetic oligonucleotide
cacaacatacaccctctcaccattggggaatgccccagatacgtgaagtcagatag

SEQ ID NO: 9994 - DNA, 60 bp, Artificial
  Synthetic oligonucleotide
tctgatgatttcgctctcatagtgaatgcaccgaatcatgagggaatacaagcgggagtg

SEQ ID NO: 9995 - DNA, 60 bp, Artificial
  Synthetic oligonucleotide
ctacatacagatgtgcactgaactcaaactcagcgactatgaagggaggctgatccagaa

SEQ ID NO: 9996 - DNA, 55 bp, Artificial
  Synthetic oligonucleotide
gagttgggtacttatgtgcagggctgcccagtgatactccaagaggggaagatgc

SEQ ID NO: 9997 - DNA, 60 bp, Artificial
  Synthetic oligonucleotide
aataggggatatgctcctgcggactgcaataggacaagtatcgagacccatgtttctata

SEQ ID NO: 9998 - DNA, 55 bp, Artificial
  Synthetic oligonucleotide
gtgacaaagacataatggattccaacactgtgtcaagttttcaggtagattgctt

SEQ ID NO: 9999 - DNA, 50 bp, Artificial
  Synthetic oligonucleotide
gatcgggaatgagaatccttgtaagaggcaactctccggtgttcaactac

SEQ ID NO: 10000 - DNA, 55 bp, Artificial
  Synthetic oligonucleotide
aactgtctcaactgcacagatctggacgtggccttaggcagaccaaagtgtatgg

SEQ ID NO: 10001 - DNA, 56 bp, Artificial
  Synthetic oligonucleotide
gaaacattgttagaagagcgatagtatccgcagatccactggcatcactattggag

SEQ ID NO: 10002 - DNA, 58 bp, Artificial
  Synthetic oligonucleotide
caatggtgttctcacaagaggattgtatgataaaggctgtccgaggtgatctgaattt

SEQ ID NO: 10003 - DNA, 60 bp, Artificial
  Synthetic oligonucleotide
gtgcattaacagaagatccagatgagggaacggctggagtggaatctgcggtactaagag

SEQ ID NO: 10004 - DNA, 59 bp, Artificial
  Synthetic oligonucleotide
gcacggtaaaagacaggagtccctataggactctaatgagtgtagagatagggcagtca

SEQ ID NO: 10005 - DNA, 60 bp, Artificial
  Synthetic oligonucleotide
gagggagacatgcgaatgggactatacatgataggagcccgttcagagccctcataagct

SEQ ID NO: 10006 - DNA, 50 bp, Artificial
  Synthetic oligonucleotide
tacgctaacagaaaccagtgttcctgtgacacataccaaagagttgctcc

SEQ ID NO: 10007 - DNA, 55 bp, Artificial
  Synthetic oligonucleotide
gctgccaggaacatagtgaggagggcaacggtatcagcagacccactagcatctc

SEQ ID NO: 10008 - DNA, 53 bp, Artificial
  Synthetic oligonucleotide
ggccaggtgataacatcactttttcacataacggtggactaatagcacctagt

SEQ ID NO: 10009 - DNA, 60 bp, Artificial
  Synthetic oligonucleotide
gaagtggctcttggcctagtatgtgccacttgtgagcagattgctgattcacaccatagg

SEQ ID NO: 10010 - DNA, 55 bp, Artificial
  Synthetic oligonucleotide
ctcccaccaaacttctccagccttgaaaactttagagcctatgtggatggattcg

SEQ ID NO: 10011 - DNA, 52 bp, Artificial
  Synthetic oligonucleotide
accaaagatgcagagagaggcaaattgaagaggcgggcaattgcaacacccg

SEQ ID NO: 10012 - DNA, 55 bp, Artificial
  Synthetic oligonucleotide
ctcccctagctgtaacttggtggaacaggaatgggccaacaacaagtacagtcca

SEQ ID NO: 10013 - DNA, 55 bp, Artificial
  Synthetic oligonucleotide
cagggtgatggtgtctcctctagctataacttggtggaacaggaatgggccaaca

SEQ ID NO: 10014 - DNA, 55 bp, Artificial
  Synthetic oligonucleotide
ggatatcaatcggggactgtcccaagtatgtcaaacaggggtcgttgaaactggc

SEQ ID NO: 10015 - DNA, 55 bp, Artificial
  Synthetic oligonucleotide
atcaatcggggactgtcccaagtatgtcaaacagggatccttgaaattggctaca

SEQ ID NO: 10016 - DNA, 50 bp, Artificial
  Synthetic oligonucleotide
aggaagaggcagcactcttggtctggacattagaaccgcaactcgtgaag

SEQ ID NO: 10017 - DNA, 55 bp, Artificial
  Synthetic oligonucleotide
ctatcggtagtaagcctcctgataggaattgccaacttaggtttgaacatcggac

SEQ ID NO: 10018 - DNA, 54 bp, Artificial
  Synthetic oligonucleotide
ttgctactactcactcctggatccctaagaggaaccgctcaatcctcaacacaa

SEQ ID NO: 10019 - DNA, 60 bp, Artificial
  Synthetic oligonucleotide
ttttggtctagtgtgtgccacttgtgagcagattgctgattcacagcatcggtctcacag

SEQ ID NO: 10020 - DNA, 60 bp, Artificial
  Synthetic oligonucleotide
ctggggaattgagcccatcgacaatgtcatggggatgatcgggatactgcctgacatgac

SEQ ID NO: 10021 - DNA, 60 bp, Artificial
  Synthetic oligonucleotide
catccacatcatggcgtctcaaggcaccaaacgatcttacgaacagatggaaactggtgg

SEQ ID NO: 10022 - DNA, 60 bp, Artificial
  Synthetic oligonucleotide
aatcctgtatgacaaagaggagatcagaaggatctggcgtcaagcgaacaatggagaaga

SEQ ID NO: 10023 - DNA, 58 bp, Artificial
  Synthetic oligonucleotide
tgacagaagcccgtttagagcattaataagttgggaaatggggcaggcaccaagtcca

SEQ ID NO: 10024 - DNA, 59 bp, Artificial
  Synthetic oligonucleotide
acgaaatgctgaaagtcccaaatgcggagacagataatcaatcaggtcctgttgcgcat

SEQ ID NO: 10025 - DNA, 59 bp, Artificial
  Synthetic oligonucleotide
atgatcgggatattgcctgacatgacccctagtactgaaatgtcgctgagggggataag

SEQ ID NO: 10026 - DNA, 55 bp, Artificial
  Synthetic oligonucleotide
catccaacagtatagtagcactttgtggatccaaagaacgattgggatcgtggtc

SEQ ID NO: 10027 - DNA, 60 bp, Artificial
  Synthetic oligonucleotide
taagagtacatgaggggtatgaggaattcacaatggttgggcggagggcaacagccatcc

SEQ ID NO: 10028 - DNA, 60 bp, Artificial
  Synthetic oligonucleotide
acagtgtcagcggacccgctgctgtcactactggagatgtgccacagcacacaaattggt

SEQ ID NO: 10029 - DNA, 60 bp, Artificial
  Synthetic oligonucleotide
caaacattgaggattaaggtgcatgaggggtatgaggaattcacaatggttggacgaaga

SEQ ID NO: 10030 - DNA, 50 bp, Artificial
  Synthetic oligonucleotide
ggtattcagatcgaatggtctaacggctaatgaatcaggaaggctaatag

SEQ ID NO: 10031 - DNA, 51 bp, Artificial
  Synthetic oligonucleotide
tgatcgtttcttaagggtccgagatcagagaggaaacgtgctattgtctcc

SEQ ID NO: 10032 - DNA, 52 bp, Artificial
  Synthetic oligonucleotide
ggagatcattcgagctgaagaaactgtgggaacagacccgttcaaaggctgg

SEQ ID NO: 10033 - DNA, 60 bp, Artificial
  Synthetic oligonucleotide
acaagcagtgtgtatatcgaagtcttgcacttgacccagggaacatgctgggaacagatg

SEQ ID NO: 10034 - DNA, 55 bp, Artificial
  Synthetic oligonucleotide
tatcgaagtcttgcacttgacccagggaacatgctgggaacagatgtacgccccg

SEQ ID NO: 10035 - DNA, 59 bp, Artificial
  Synthetic oligonucleotide
ccaatcatgacgccacatcgggagtgagttcagcgtgcccacacaatggtaggtcttcc

SEQ ID NO: 10036 - DNA, 59 bp, Artificial
  Synthetic oligonucleotide
tatcagataggatacatttgcagtggagtatttggtgataatcctcgtcctaatgatgg

SEQ ID NO: 10037 - DNA, 59 bp, Artificial
  Synthetic oligonucleotide
gtgccatgtgaaccaactacagagaaagaggtctactcgaaaatagtagactacaggag

SEQ ID NO: 10038 - DNA, 60 bp, Artificial
  Synthetic oligonucleotide
tacagcggaagtttcgttcaacatcctgagctaacaggattggactgtatgaggccttgc

SEQ ID NO: 10039 - DNA, 57 bp, Artificial
  Synthetic oligonucleotide
catgctacggggaacaagcaggtattacttgcacgtgcagggacaattggcagggct

SEQ ID NO: 10040 - DNA, 52 bp, Artificial
  Synthetic oligonucleotide
cagaatgggaacggtgacctcagaggtagctttaggcctggtgtgtgccact

SEQ ID NO: 10041 - DNA, 60 bp, Artificial
  Synthetic oligonucleotide
atgatgctgttgcgactacgcactcatggatccctaagaggaaccgttccattctcaata

SEQ ID NO: 10042 - DNA, 60 bp, Artificial
  Synthetic oligonucleotide
atgtcaacagtgatccgtacacgctggtttccaccaaatcatggagcgagaagtataaac

SEQ ID NO: 10043 - DNA, 60 bp, Artificial
  Synthetic oligonucleotide
tcgaaacgaacaagtttgcggcaatatgcacccatttggaagtctgcttcatgtattcag

SEQ ID NO: 10044 - DNA, 60 bp, Artificial
  Synthetic oligonucleotide
aacatggcaccggaaaaggtagactttgaggattgcaaggatattagcgatctgaagcaa

SEQ ID NO: 10045 - DNA, 51 bp, Artificial
  Synthetic oligonucleotide
actagaaaaagagcacaacgggaaactctgcagtctcaaaggagtgaggcc

SEQ ID NO: 10046 - DNA, 51 bp, Artificial
  Synthetic oligonucleotide
ggaatgcagatcagaggatttgtctactttgttgaaacattagcgaggagc

SEQ ID NO: 10047 - DNA, 59 bp, Artificial
  Synthetic oligonucleotide
atcgatccattttgaacacgagccaaagggggatacttgaagatgagcaaatgtatcag

SEQ ID NO: 10048 - DNA, 60 bp, Artificial
  Synthetic oligonucleotide
tacaacaacactggaaatcagccaatcctttatttctggggtgtgcaccatcctcctgac

SEQ ID NO: 10049 - DNA, 54 bp, Artificial
  Synthetic oligonucleotide
acaatgccaatgacctggggaatggatgctttgagttctggcataagtgtgaca

SEQ ID NO: 10050 - DNA, 54 bp, Artificial
  Synthetic oligonucleotide
accctgcttgctcgtagtatggtcgttgttaggccctctgtggcgagcaaagta

SEQ ID NO: 10051 - DNA, 60 bp, Artificial
  Synthetic oligonucleotide
cagtgtatggagagcataaggaacaacacgtatgaccatacccaatacagaacagagtca

SEQ ID NO: 10052 - DNA, 52 bp, Artificial
  Synthetic oligonucleotide
cttgtgctatggggtgttcaccacccgtctaacatagaggaccaaaaagcca

SEQ ID NO: 10053 - DNA, 60 bp, Artificial
  Synthetic oligonucleotide
gtttgcatcaatggaacttgtacagtggtaatgactgatggaagcgcatcaggacatgct

SEQ ID NO: 10054 - DNA, 60 bp, Artificial
  Synthetic oligonucleotide
gtttgcatcaatggaacttgcacagtggtaatgactgatggaagcgcatcaggaagggcc

SEQ ID NO: 10055 - DNA, 55 bp, Artificial
  Synthetic oligonucleotide
ggggaagatgcccaatttactggttcgtgcactagtcccatggggaatcaggggt

SEQ ID NO: 10056 - DNA, 60 bp, Artificial
  Synthetic oligonucleotide
cgttactgtcacacatgcccaagacctacttgaaaagacacacaacgggaagctctgcag

SEQ ID NO: 10057 - DNA, 60 bp, Artificial
  Synthetic oligonucleotide
cgagaatagcaattggagattgccccaagtatgtcaaacagggctctctgaaacttgcaa

SEQ ID NO: 10058 - DNA, 56 bp, Artificial
  Synthetic oligonucleotide
ttctcacagataatccccgaccgaatgacccaactgtaggtaagtgtaatgatcct

SEQ ID NO: 10059 - DNA, 60 bp, Artificial
  Synthetic oligonucleotide
cgtatcagagaactagagccctagtgcgcactgggatggaccccaggatgtgttccctta

SEQ ID NO: 10060 - DNA, 54 bp, Artificial
  Synthetic oligonucleotide
actattattggacactattagaccaaggagacaccataacattcgaggccactg

SEQ ID NO: 10061 - DNA, 55 bp, Artificial
  Synthetic oligonucleotide
agccctagtgcgcactgggatggaccccaggatgtgttcccttatgcaaggatcg

SEQ ID NO: 10062 - DNA, 55 bp, Artificial
  Synthetic oligonucleotide
gtgtcaagttttcaggtagactgctttctttggcatgtccgcaaacggtttgcag

SEQ ID NO: 10063 - DNA, 60 bp, Artificial
  Synthetic oligonucleotide
acaagcagtgtctatattgaggtgctgcatttaacccaggggacatgctgggagcaaatg

SEQ ID NO: 10064 - DNA, 55 bp, Artificial
  Synthetic oligonucleotide
cctaaggctgctagaggccaatatagtggatttgtgagaacactattccagcaga

SEQ ID NO: 10065 - DNA, 59 bp, Artificial
  Synthetic oligonucleotide
agaggatttgtatatttcgttgaaacactagcgaggagcatttgtgagaaacttgaaca

SEQ ID NO: 10066 - DNA, 60 bp, Artificial
  Synthetic oligonucleotide
ctcaatatgggtcagtcattcaattcagactgggaatcaacgccaagctgaaccatgcag

SEQ ID NO: 10067 - DNA, 51 bp, Artificial
  Synthetic oligonucleotide
gactcagggagctttgctaaatgacaagcactccaatgggacagtcaaaga

SEQ ID NO: 10068 - DNA, 56 bp, Artificial
  Synthetic oligonucleotide
aactaattcggatgataaagcgagggatcaatgaccggaatttctggagaggcgac

SEQ ID NO: 10069 - DNA, 60 bp, Artificial
  Synthetic oligonucleotide
gggaagacgtagctccaattgagcacattgcgagtatgagaagaaactatttcacagcgg

SEQ ID NO: 10070 - DNA, 60 bp, Artificial
  Synthetic oligonucleotide
gaagtggcttttggtctagtgtgtgccacttgtgagcagattgctgattcacagcatcgg

SEQ ID NO: 10071 - DNA, 60 bp, Artificial
  Synthetic oligonucleotide
gtgtgtatcaaattctcgccatctatagtacggtatcgagcagtctagtcttggtagggc

SEQ ID NO: 10072 - DNA, 60 bp, Artificial
  Synthetic oligonucleotide
cagtcctctgatgactttgctctcatagtgaatgcaccgaatcatgaggggatacaggca

SEQ ID NO: 10073 - DNA, 53 bp, Artificial
  Synthetic oligonucleotide
gatgagtactccagcacggaaagagtggtggtgagcattgaccgatttttgag

SEQ ID NO: 10074 - DNA, 55 bp, Artificial
  Synthetic oligonucleotide
tgggagtagatgagtactccagcacggaaagagtggtggtgagcattgaccgatt

SEQ ID NO: 10075 - DNA, 55 bp, Artificial
  Synthetic oligonucleotide
gggaaatgcaacgtggcggggtggctccttggcaacctagaatgtgacctgttgc

SEQ ID NO: 10076 - DNA, 60 bp, Artificial
  Synthetic oligonucleotide
gtgatgaattcctcaatgtgcctgaatggtcttatatagtggagaaggacaacccagtca

SEQ ID NO: 10077 - DNA, 60 bp, Artificial
  Synthetic oligonucleotide
agggcatctgtcgggagaatggttgggggaatcggaagattctacatacagatgtgcact

SEQ ID NO: 10078 - DNA, 60 bp, Artificial
  Synthetic oligonucleotide
tctgcatatcaggacctaataacaatgcttcggcagtggtctggtacaatggaagaccag

SEQ ID NO: 10079 - DNA, 51 bp, Artificial
  Synthetic oligonucleotide
ggaacctttggtcccgttcatttccgaaaccaggtcaaaatacgacgaaga

SEQ ID NO: 10080 - DNA, 55 bp, Artificial
  Synthetic oligonucleotide
gggaagaggcagcacacttgggctcgacctaagaatggctacaatggaagggaaa

SEQ ID NO: 10081 - DNA, 55 bp, Artificial
  Synthetic oligonucleotide
atacataatggactccaacacgataacctcgtttcaggtagattgctatttatgg

SEQ ID NO: 10082 - DNA, 60 bp, Artificial
  Synthetic oligonucleotide
gaccacggctaattccaagtcacaggtcaatagacaagtcatagttgacaataataactg

SEQ ID NO: 10083 - DNA, 60 bp, Artificial
  Synthetic oligonucleotide
cactcatcctgagaggatcagtggcccataagtcctgtttgcctgcttgtgtgtacggac

SEQ ID NO: 10084 - DNA, 53 bp, Artificial
  Synthetic oligonucleotide
cgcaaaaccagattcttaccagtagccggcgggacaagcagtgtgtacatcga

SEQ ID NO: 10085 - DNA, 60 bp, Artificial
  Synthetic oligonucleotide
gcaacaatcctcacagaattctcgatggaagagactgcacattaatggatgctctattag

SEQ ID NO: 10086 - DNA, 55 bp, Artificial
  Synthetic oligonucleotide
cagaattctcgatggaagagactgcacattaatggatgctctattaggggaccct

SEQ ID NO: 10087 - DNA, 52 bp, Artificial
  Synthetic oligonucleotide
cgagtcaactaaagtgggctcttggtgagaacatggcaccagagaaagtaga

SEQ ID NO: 10088 - DNA, 53 bp, Artificial
  Synthetic oligonucleotide
agcgatttgaagcaatatgatagtgacgaacctgaattgaggtcactttcaag

SEQ ID NO: 10089 - DNA, 53 bp, Artificial
  Synthetic oligonucleotide
tccaaaatgctcttaatgggaatggagatccaaataacatggacagggcagtc

SEQ ID NO: 10090 - DNA, 51 bp, Artificial
  Synthetic oligonucleotide
tcggatgatcaaacgtggaatcaatgatcgtaacttttggagaggcgaaaa

SEQ ID NO: 10091 - DNA, 50 bp, Artificial
  Synthetic oligonucleotide
gcactcattctgagaggatcagtagcccataagtcatgcctgcctgcgtg

SEQ ID NO: 10092 - DNA, 60 bp, Artificial
  Synthetic oligonucleotide
catcgacaatgtgatgggaatgatcggaatattgcccgatatgaccccaagtacagaaat

SEQ ID NO: 10093 - DNA, 51 bp, Artificial
  Synthetic oligonucleotide
gacttcagcgtatcacacggagtgctagacatgggacttgtggaaacaggg

SEQ ID NO: 10094 - DNA, 51 bp, Artificial
  Synthetic oligonucleotide
cgaccacaaccaggataattagacctatgattcaaggagggaaatgttggg

SEQ ID NO: 10095 - DNA, 60 bp, Artificial
  Synthetic oligonucleotide
agggcttgtattcctcaacgtcattctccatgtggtcagcattacagtaacagtactggt

SEQ ID NO: 10096 - DNA, 60 bp, Artificial
  Synthetic oligonucleotide
cttagacagaatccaacagaggaacaagccgtcgacatatgcaaggcagcaatgggcctg

SEQ ID NO: 10097 - DNA, 53 bp, Artificial
  Synthetic oligonucleotide
cagaatcgacttcgagtctggacggattaagaaagaagagttctctgagatca

SEQ ID NO: 10098 - DNA, 60 bp, Artificial
  Synthetic oligonucleotide
agcagtgttgttctggtaggactcatactcgcatttatactgtgggcatgcagcagtgga

SEQ ID NO: 10099 - DNA, 55 bp, Artificial
  Synthetic oligonucleotide
cgaaagcaagagcatgaagatacggacacaaataccagcagaaatgctcgcaaac

SEQ ID NO: 10100 - DNA, 60 bp, Artificial
  Synthetic oligonucleotide
gctgacaataacttactcgtcatcaatgatgtgggaaattaatggtcctgagtcagtgtt

SEQ ID NO: 10101 - DNA, 60 bp, Artificial
  Synthetic oligonucleotide
tgtggtaatgccagctcatggtccagccaagagcatggaatatgacgctgttgcaactac

SEQ ID NO: 10102 - DNA, 56 bp, Artificial
  Synthetic oligonucleotide
tagtaatgccagctcatggtccagccaagagcatggaatatgatgccgttgcgacc

SEQ ID NO: 10103 - DNA, 55 bp, Artificial
  Synthetic oligonucleotide
cgctctcatagtgaatgcaccgaatcatgagggaatacaagcgggagtggatagg

SEQ ID NO: 10104 - DNA, 55 bp, Artificial
  Synthetic oligonucleotide
gggaccagatatgcattgggtaccatgccaataactctaccgagacggtcgacac

SEQ ID NO: 10105 - DNA, 50 bp, Artificial
  Synthetic oligonucleotide
acaaggcctaaagtaaatggtcaggctggaagaatgaccttctactggac

SEQ ID NO: 10106 - DNA, 60 bp, Artificial
  Synthetic oligonucleotide
ggtcaaagttcctactgatggatgctcttaaattaagcatcgaagacccaagccatgagg

SEQ ID NO: 10107 - DNA, 59 bp, Artificial
  Synthetic oligonucleotide
ctacggactgcaataggccaaatgtcaaggcccatattcctgtatgtgaggaccaatgg

SEQ ID NO: 10108 - DNA, 55 bp, Artificial
  Synthetic oligonucleotide
cacggaaactggagcgccccaactcaacccaattgatggaccactacctaaggac

SEQ ID NO: 10109 - DNA, 55 bp, Artificial
  Synthetic oligonucleotide
gctcgtggaaacagagaaacatcccgcttattgcaatactgatttaggtgcccca

SEQ ID NO: 10110 - DNA, 54 bp, Artificial
  Synthetic oligonucleotide
atactgatttaggtgccccattggaactgcgagactgcaagatcgaggcagtaa

SEQ ID NO: 10111 - DNA, 60 bp, Artificial
  Synthetic oligonucleotide
ccaatctcaatgacaccacttaccagagaacaagggctcttgttcggactgggatggatc

SEQ ID NO: 10112 - DNA, 60 bp, Artificial
  Synthetic oligonucleotide
gtcagtagcccataaatcgtgtctacctgcctgtgtgtatgcccttgcagtggccagtgg

SEQ ID NO: 10113 - DNA, 60 bp, Artificial
  Synthetic oligonucleotide
caagagccagctagtgtggatggcatgtcattccgcagcatttgaagatctgagagtctt

SEQ ID NO: 10114 - DNA, 60 bp, Artificial
  Synthetic oligonucleotide
aagagcatcggcaggacagataagcgtgcagcccactttctcggtgcaaagaaaccttcc

SEQ ID NO: 10115 - DNA, 60 bp, Artificial
  Synthetic oligonucleotide
cctatgtgaggtgaattcatggcacatcctatcaaaggacaacgcaataaggataggaga

SEQ ID NO: 10116 - DNA, 55 bp, Artificial
  Synthetic oligonucleotide
catttgtgagaagcttgagcaatctggactcccagttggagggaacgagaagaag

SEQ ID NO: 10117 - DNA, 55 bp, Artificial
  Synthetic oligonucleotide
gtggcccataagtcctgcttgcctgcttgtgtgtacggacttgccgtggccagtg

SEQ ID NO: 10118 - DNA, 60 bp, Artificial
  Synthetic oligonucleotide
caagagtcatcttgcacttgcatccaaggtgattgctattgggtaatgactgacggcccc

SEQ ID NO: 10119 - DNA, 55 bp, Artificial
  Synthetic oligonucleotide
cttgcatccaaggtgattgctattgggtaatgactgacggccccgccaataggca

SEQ ID NO: 10120 - DNA, 55 bp, Artificial
  Synthetic oligonucleotide
ccaaggtgattgctattgggtaatgactgacggccccgccaataggcaggcacag

SEQ ID NO: 10121 - DNA, 60 bp, Artificial
  Synthetic oligonucleotide
tgtgagcagattgctgactcacagcatcggtctcacagacaaatggtgactactaccaat

SEQ ID NO: 10122 - DNA, 60 bp, Artificial
  Synthetic oligonucleotide
gcagtggagttttcggagataatccacgccccagtgatggggcaggcagttgtggtccag

SEQ ID NO: 10123 - DNA, 60 bp, Artificial
  Synthetic oligonucleotide
gtttcatggggccaaagaggtgtcactaagctactcaactggtgcacttgccagttgcat

SEQ ID NO: 10124 - DNA, 55 bp, Artificial
  Synthetic oligonucleotide
aatccacgccccagtgatggggcaggcagttgtggtccagtgtcccctaaagggg

SEQ ID NO: 10125 - DNA, 60 bp, Artificial
  Synthetic oligonucleotide
ggtcaaaattcttgctgatggatgctctgaaactaagcattgaggacccgagtcatgaag

SEQ ID NO: 10126 - DNA, 60 bp, Artificial
  Synthetic oligonucleotide
aattcttgctgatggatgctctgaaactaagcattgaggacccgagtcacgaaggggagg

SEQ ID NO: 10127 - DNA, 55 bp, Artificial
  Synthetic oligonucleotide
tactgcaatccccataggatcttgcgttagtaaatgtcacaccgataggggttca

SEQ ID NO: 10128 - DNA, 55 bp, Artificial
  Synthetic oligonucleotide
gagccaagcgggtatgcacaaacagattgtgtcttggaagctatggctttccttg

SEQ ID NO: 10129 - DNA, 60 bp, Artificial
  Synthetic oligonucleotide
aacagaatggggactgtgacaactgaagtggcatttggcctggtatgcgccacatgtgaa

SEQ ID NO: 10130 - DNA, 60 bp, Artificial
  Synthetic oligonucleotide
catagtgaatgcaccgaatcacgagggaatacaagctggagtggataggttctacaggac

SEQ ID NO: 10131 - DNA, 50 bp, Artificial
  Synthetic oligonucleotide
ctacacaatagacaccgtgatcagaacacatgagtactcaaacaagggaa

SEQ ID NO: 10132 - DNA, 60 bp, Artificial
  Synthetic oligonucleotide
acggtatcgagcagtctagtcttggtagggctgattatagcaatgggtctttggatgtgt

SEQ ID NO: 10133 - DNA, 52 bp, Artificial
  Synthetic oligonucleotide
tgaggggtcttatttcttcggagacaatgcagaggagtatgacaattgaaga

SEQ ID NO: 10134 - DNA, 60 bp, Artificial
  Synthetic oligonucleotide
gaagaatcactgaagcagatccttcgagggtcaggaggaattgataaggagtcaatgggt

SEQ ID NO: 10135 - DNA, 54 bp, Artificial
  Synthetic oligonucleotide
gccaaggtaccacactacggggtcggcacgcaaatgggactatacatgacagaa

SEQ ID NO: 10136 - DNA, 53 bp, Artificial
  Synthetic oligonucleotide
caaggagcgattgggatcttggtcatggcacgatggggctgaaatcatctact

SEQ ID NO: 10137 - DNA, 60 bp, Artificial
  Synthetic oligonucleotide
ctaccagaatgctgatgcatatgtttcagttgggtcgtcaaaatacaatcgaagattcac

SEQ ID NO: 10138 - DNA, 55 bp, Artificial
  Synthetic oligonucleotide
atgtttcagttgggtcgtcaaaatacaatcgaagattcacacctgagatagcagc

SEQ ID NO: 10139 - DNA, 55 bp, Artificial
  Synthetic oligonucleotide
gaagcagatccttcgagggtcaggaggaattgataaggagtcaatgggtttcacc

SEQ ID NO: 10140 - DNA, 51 bp, Artificial
  Synthetic oligonucleotide
caggggtcggaaagcctaaattcctcccggatctgtatgattacaaggaga

SEQ ID NO: 10141 - DNA, 60 bp, Artificial
  Synthetic oligonucleotide
tccattgggaaagtatgcaggacactactggctaagtcagtattcaatagtctgtatgca

SEQ ID NO: 10142 - DNA, 55 bp, Artificial
  Synthetic oligonucleotide
gactttgctctcatagtgaatgcaccgaatcatgaggggatacaggcaggagtag

SEQ ID NO: 10143 - DNA, 60 bp, Artificial
  Synthetic oligonucleotide
gaacaacacttatgaccatactcaatacagaacagagtcgttgcagaatagaatacagat

SEQ ID NO: 10144 - DNA, 60 bp, Artificial
  Synthetic oligonucleotide
cccctcgaggttattttaagatgcgcactggaaaaagctcgataatgagatcagatgcac

SEQ ID NO: 10145 - DNA, 53 bp, Artificial
  Synthetic oligonucleotide
gcatgtcccaaatacgtcaaacagagcaccctaaagttggcaactgggatgcg

SEQ ID NO: 10146 - DNA, 51 bp, Artificial
  Synthetic oligonucleotide
cagaccaaactctatggaagtgggaacaagttgataacagtaggaagctcg

SEQ ID NO: 10147 - DNA, 59 bp, Artificial
  Synthetic oligonucleotide
cgttcatcgattattgggctgatagagagtgcttcaacccttgcttttatgtggaattg

SEQ ID NO: 10148 - DNA, 53 bp, Artificial
  Synthetic oligonucleotide
gtgctaaagcagagctctatgggaaattcagctctcgtgaagaaatacctatg

SEQ ID NO: 10149 - DNA, 55 bp, Artificial
  Synthetic oligonucleotide
gaggggtatgaggaattcacaatggttgggcggagggcaacagccatcctgagga

SEQ ID NO: 10150 - DNA, 54 bp, Artificial
  Synthetic oligonucleotide
tcgaacggtctaacagccaatgaatcggggagactaatagatttcctcaaggac

SEQ ID NO: 10151 - DNA, 55 bp, Artificial
  Synthetic oligonucleotide
ggacactagtagaacctggggatactataacattcgaagcaactggaaacctagt

SEQ ID NO: 10152 - DNA, 55 bp, Artificial
  Synthetic oligonucleotide
ggtcacaggatcccacaatgttgtacaataagatggaattcgagccatttcagtc

SEQ ID NO: 10153 - DNA, 55 bp, Artificial
  Synthetic oligonucleotide
caggatcccacaatgctgtacaataagatggaattcgagccatttcagtctctgg

SEQ ID NO: 10154 - DNA, 60 bp, Artificial
  Synthetic oligonucleotide
atgctcctgcggactgcaataggccaggtatcaagacccatgttcctgtatgtgagaacc

SEQ ID NO: 10155 - DNA, 60 bp, Artificial
  Synthetic oligonucleotide
gattgcaagaacattagcgatctaaaacagtatgatagtgatgagccggagcctagatcg

SEQ ID NO: 10156 - DNA, 50 bp, Artificial
  Synthetic oligonucleotide
gggagaattgattactattggtcagtactaaagccaggtcaaacattgcg

SEQ ID NO: 10157 - DNA, 59 bp, Artificial
  Synthetic oligonucleotide
gggggttggaatggctgcagacagagaatcgactcaagaggcagtcgacaaaataacat

SEQ ID NO: 10158 - DNA, 50 bp, Artificial
  Synthetic oligonucleotide
cctcaatctagggcaaaagaggtacaccaaaacaacatactggtgggacg

SEQ ID NO: 10159 - DNA, 52 bp, Artificial
  Synthetic oligonucleotide
gggaatttacaacaacactggaacccagccaatcctctatttctggggtgtg

SEQ ID NO: 10160 - DNA, 52 bp, Artificial
  Synthetic oligonucleotide
caaatgaagtaggagctagaatactaacatcggagtcacagctgacaataac

SEQ ID NO: 10161 - DNA, 55 bp, Artificial
  Synthetic oligonucleotide
gatcttgccaaatgcggactactggggaccattaccggaccacctcaatgtgacc

SEQ ID NO: 10162 - DNA, 60 bp, Artificial
  Synthetic oligonucleotide
gagcaatcgtaatctcgttacttattagcacatgcgtacaggcagacagaatctgtgtag

SEQ ID NO: 10163 - DNA, 55 bp, Artificial
  Synthetic oligonucleotide
cttattagcacatgcgtacaggcagacagaatctgtgtaggatacttaagcacca

SEQ ID NO: 10164 - DNA, 55 bp, Artificial
  Synthetic oligonucleotide
ctggtgggacggacttcaatcctccgacgactttgctctaatagtgaatgcccca

SEQ ID NO: 10165 - DNA, 54 bp, Artificial
  Synthetic oligonucleotide
caaaggcagggctactggtttctgacggagggccaaatttatacaatatccgga

SEQ ID NO: 10166 - DNA, 53 bp, Artificial
  Synthetic oligonucleotide
gggttgaacataggactgcatctaaaaccgagctgcaattgctcacactcaca

SEQ ID NO: 10167 - DNA, 52 bp, Artificial
  Synthetic oligonucleotide
aacgctgagttgctcattttgctcgagaatgaaaggactctagatttccatg

SEQ ID NO: 10168 - DNA, 60 bp, Artificial
  Synthetic oligonucleotide
cagaaggatctggcgtcaagcgaacaatggagaagatgcaaccgctggtctaacccacat

SEQ ID NO: 10169 - DNA, 50 bp, Artificial
  Synthetic oligonucleotide
gaatgagaacatggagacaatggactccagcactcttgagctaagaagca

SEQ ID NO: 10170 - DNA, 60 bp, Artificial
  Synthetic oligonucleotide
tgctacacacagagcacaatgggatgctgtgtgcaacaaacctggggcaccctctcatcc

SEQ ID NO: 10171 - DNA, 53 bp, Artificial
  Synthetic oligonucleotide
tttactgtttgatgggctcaggacaattgctatgggacactgtcacaggcgtt

SEQ ID NO: 10172 - DNA, 60 bp, Artificial
  Synthetic oligonucleotide
acggctaggtgagaacaaagacgtcatagtcacaagggagccttatgttagctgcgataa

SEQ ID NO: 10173 - DNA, 53 bp, Artificial
  Synthetic oligonucleotide
acaatggcttggacagtagtgaatagcatctgcaacactacaggagtcgaaaa

SEQ ID NO: 10174 - DNA, 55 bp, Artificial
  Synthetic oligonucleotide
tgtgcatgcactgaaatagttgtggcaatgctactactttctatccatactgtcc

SEQ ID NO: 10175 - DNA, 58 bp, Artificial
  Synthetic oligonucleotide
gagcatggagtatgatgctgttgcaactacacactcctggactcctaagaggaaccgt

SEQ ID NO: 10176 - DNA, 60 bp, Artificial
  Synthetic oligonucleotide
aacagagagcatccgcagggcaaatcagtgtacagcctactttctcggtacagaggaatc

SEQ ID NO: 10177 - DNA, 60 bp, Artificial
  Synthetic oligonucleotide
tcccagtggccggtggaacaagcagtgtttacattgaggtgctgcatttaactcagggga

SEQ ID NO: 10178 - DNA, 55 bp, Artificial
  Synthetic oligonucleotide
gggatgctgtgtgcaacaaacctggggcaccctctcatcctagacacctgcacca

SEQ ID NO: 10179 - DNA, 60 bp, Artificial
  Synthetic oligonucleotide
tcgggaaagtttgcaggacactactggcgaaatctgtattcaacagtctatacgcatctc

SEQ ID NO: 10180 - DNA, 60 bp, Artificial
  Synthetic oligonucleotide
aacaagagaaccctacatcagctgcgacaatgaagtctgttggtcttttgcactagctca

SEQ ID NO: 10181 - DNA, 55 bp, Artificial
  Synthetic oligonucleotide
gctgcgacaatgaagtctgttggtcttttgcactagctcagggcgcactcctggg

SEQ ID NO: 10182 - DNA, 60 bp, Artificial
  Synthetic oligonucleotide
gtatgcagcaaattccattcagacacacccaggcctagtgatccctctacagtttcatgt

SEQ ID NO: 10183 - DNA, 58 bp, Artificial
  Synthetic oligonucleotide
ccctgtgatatgcatgggacatcatgctgtggccaatgggactatggtaaagacccta

SEQ ID NO: 10184 - DNA, 59 bp, Artificial
  Synthetic oligonucleotide
tagaatcacaaaatctcccggaactatgtcctagccctctgagactagttgacggccag

SEQ ID NO: 10185 - DNA, 60 bp, Artificial
  Synthetic oligonucleotide
gagcattggggagcccagggtgtgaccatttgaatggtgcagaatgggacgttttcatag

SEQ ID NO: 10186 - DNA, 60 bp, Artificial
  Synthetic oligonucleotide
tctaccaaaactagtcaaacaagtgtagtgcctaacattggcagcagacccttggtgaga

SEQ ID NO: 10187 - DNA, 55 bp, Artificial
  Synthetic oligonucleotide
caagtgtagtgcctaacattggcagcagacccttggtgagaggacaaagcggcag

SEQ ID NO: 10188 - DNA, 60 bp, Artificial
  Synthetic oligonucleotide
aaaagtactgcgttctcgagataggagacatgctcctacggactgcaataggccaagtat

SEQ ID NO: 10189 - DNA, 60 bp, Artificial
  Synthetic oligonucleotide
cagcgcaaaatgctataagcacaacgttcccttacactggagaccctccttacagccatg

SEQ ID NO: 10190 - DNA, 55 bp, Artificial
  Synthetic oligonucleotide
gcacaacgttcccttacactggagaccctccttacagccatgggacaggaacagg

SEQ ID NO: 10191 - DNA, 60 bp, Artificial
  Synthetic oligonucleotide
acgacttcgttacaggtagctgtggaagagacgtgcaacacgcaagacaaaggctagaga

SEQ ID NO: 10192 - DNA, 55 bp, Artificial
  Synthetic oligonucleotide
caggtagctgtggaagagacgtgcaacacgcaagacaaaggctagagatggctct

SEQ ID NO: 10193 - DNA, 60 bp, Artificial
  Synthetic oligonucleotide
tgtgatctactgctgggaggaagagaatggtcctatatcgtcgaaagaccatcggctgtt

SEQ ID NO: 10194 - DNA, 50 bp, Artificial
  Synthetic oligonucleotide
attcttgagggaaacaccacgccctctcagattgcctgatggacctccct

SEQ ID NO: 10195 - DNA, 60 bp, Artificial
  Synthetic oligonucleotide
tggcactccaatctgaatgatgccacctatcagagaacgagggcacttgtgcgtactggg

SEQ ID NO: 10196 - DNA, 55 bp, Artificial
  Synthetic oligonucleotide
caatcctgaatcttgggcaaaagaggtacaccaaaaccacatattggtgggatgg

SEQ ID NO: 10197 - DNA, 59 bp, Artificial
  Synthetic oligonucleotide
ccagagtctgatcattgctgccaggaacattgtaaggagagcaacagtgtcagcagacc

SEQ ID NO: 10198 - DNA, 52 bp, Artificial
  Synthetic oligonucleotide
tgctagtttcatttatgatgggaggcttattgacagtattggttcgtggtcc

SEQ ID NO: 10199 - DNA, 60 bp, Artificial
  Synthetic oligonucleotide
tggggctaaggaggtcgcactcagctactcaaccggtgcacttgccagctgtatgggtct

SEQ ID NO: 10200 - DNA, 55 bp, Artificial
  Synthetic oligonucleotide
gagcattgaagacccaagtcacgaaggagaagggatcccactatatgatgcgatc

SEQ ID NO: 10201 - DNA, 51 bp, Artificial
  Synthetic oligonucleotide
tgcatctgaatagcactaccatagagaaggaaatttgtcctaaagtggcgg

SEQ ID NO: 10202 - DNA, 53 bp, Artificial
  Synthetic oligonucleotide
cgctccattctctaaggacaactcaattaggctttccgcaggtggggatatat

SEQ ID NO: 10203 - DNA, 60 bp, Artificial
  Synthetic oligonucleotide
atcagttgagttgaatgcccctaattaccactatgaggagtgttcctgttatcctgatgc

SEQ ID NO: 10204 - DNA, 55 bp, Artificial
  Synthetic oligonucleotide
cagcgaccaaaagaattcgaatggccatcaattagtgtcgaattgttaaaaacga

SEQ ID NO: 10205 - DNA, 60 bp, Artificial
  Synthetic oligonucleotide
gaggacgacacgcgaatgggactatacatgatcggagcccgttcagagccctcataagct

SEQ ID NO: 10206 - DNA, 53 bp, Artificial
  Synthetic oligonucleotide
ggggtgaatcaatagtcgtagagtctggcgacccgaatgcactattgaaacac

SEQ ID NO: 10207 - DNA, 60 bp, Artificial
  Synthetic oligonucleotide
aagctgaaactcttcgtgctagctacagattttggaatccgagcgtttcaggcatctttg

SEQ ID NO: 10208 - DNA, 60 bp, Artificial
  Synthetic oligonucleotide
cagttgtcacatccagcattggctccagtgccgtgcttgaagtcgctcctgagcctacgc

SEQ ID NO: 10209 - DNA, 55 bp, Artificial
  Synthetic oligonucleotide
gcattggctccagtgccgtgcttgaagtcgctcctgagcctacgcctcctacacg

SEQ ID NO: 10210 - DNA, 55 bp, Artificial
  Synthetic oligonucleotide
gaggggcccaagaatacctctgtgccctccagtgaggaaacacctggacttcgac

SEQ ID NO: 10211 - DNA, 54 bp, Artificial
  Synthetic oligonucleotide
caatagaatacgtgtaagtagattaggtagacgaggcacaatacgtactcgaag

SEQ ID NO: 10212 - DNA, 55 bp, Artificial
  Synthetic oligonucleotide
ggctgtacaggtcctaaaacgaaagtatgctagtagtccacttagcagcgtgagc

SEQ ID NO: 10213 - DNA, 60 bp, Artificial
  Synthetic oligonucleotide
atgataatcctgcatatgaaggccttaaccctgatacaaccttacaatttgagcatgagg

SEQ ID NO: 10214 - DNA, 55 bp, Artificial
  Synthetic oligonucleotide
ggccttaaccctgatacaaccttacaatttgagcatgaggatattagcttagctc

SEQ ID NO: 10215 - DNA, 52 bp, Artificial
  Synthetic oligonucleotide
gtggcggtctaacgaagccactgtctacctgcctccagtgtcagtgtctaag

SEQ ID NO: 10216 - DNA, 51 bp, Artificial
  Synthetic oligonucleotide
acgcacccgacagcacacaggaccagaagacactcgcaccctccgtgtact

SEQ ID NO: 10217 - DNA, 60 bp, Artificial
  Synthetic oligonucleotide
tgtagttacaggcgaaatgccagtatggatactcaagcaagtgagcatacaggaccagtt

SEQ ID NO: 10218 - DNA, 51 bp, Artificial
  Synthetic oligonucleotide
cctagggtaccctctcacacaaccacatctgtgtatgtcaaccctacctat

SEQ ID NO: 10219 - DNA, 60 bp, Artificial
  Synthetic oligonucleotide
gctctagggcagcattgggacgttgccagtgcctgtgagaatgcaccactttccccaggc

SEQ ID NO: 10220 - DNA, 60 bp, Artificial
  Synthetic oligonucleotide
cccttgtgttgcagttgggccgtgtatctctaaccgctgaggcactagcacaccttaatg

SEQ ID NO: 10221 - DNA, 60 bp, Artificial
  Synthetic oligonucleotide
cgtagactgtttgagctgcaagacagtgggtatggcaatacgcaagtggatattgacgcg

SEQ ID NO: 10222 - DNA, 55 bp, Artificial
  Synthetic oligonucleotide
tagcacccaggacaccgaccaagaaccgctatcctctactagacctactgacccc

SEQ ID NO: 10223 - DNA, 50 bp, Artificial
  Synthetic oligonucleotide
atggactcatctgtgtatgctcacggaacgtatcctgattggattgtgaa

SEQ ID NO: 10224 - DNA, 50 bp, Artificial
  Synthetic oligonucleotide
atggactcatctgtgtatgctcacggaacctatcctgattggatagtaaa

SEQ ID NO: 10225 - DNA, 55 bp, Artificial
  Synthetic oligonucleotide
catgtgggcattgggtggtagcagcattcggggtacatcatagtgtagcagacgc

SEQ ID NO: 10226 - DNA, 58 bp, Artificial
  Synthetic oligonucleotide
ggcattggaccagtcccactatacccacaaaacatgcactagtaacactaacatatgc

SEQ ID NO: 10227 - DNA, 59 bp, Artificial
  Synthetic oligonucleotide
tccgttggaagagagtagcgtggacagagagttaagtcctagattgcacgctatctgct

SEQ ID NO: 10228 - DNA, 59 bp, Artificial
  Synthetic oligonucleotide
ctgtttgccaaggtcatactgtgttgccaagtacacacctggtgcacaattaggcgcgg

SEQ ID NO: 10229 - DNA, 53 bp, Artificial
  Synthetic oligonucleotide
agaaaccttctggatggtaaccctgtgtccctagatgccaagcacagggcccc

SEQ ID NO: 10230 - DNA, 60 bp, Artificial
  Synthetic oligonucleotide
ctcacgaccttttctgggcctggtggcgagggtgactacacagtatctcgtgtctcgcag

SEQ ID NO: 10231 - DNA, 58 bp, Artificial
  Synthetic oligonucleotide
acgctgtgagactgacccccctgcgcaggctggggactgtccgcccatagaattggtc

SEQ ID NO: 10232 - DNA, 60 bp, Artificial
  Synthetic oligonucleotide
tgtgagaggccaggttagaggacgctgtggtttgtgtcgcctatctgtggaagtatgatt

SEQ ID NO: 10233 - DNA, 56 bp, Artificial
  Synthetic oligonucleotide
tgtagagtttaggcacatatagaataagccgttagccaagatacaaaggggtccag

SEQ ID NO: 10234 - DNA, 56 bp, Artificial
  Synthetic oligonucleotide
gggtcttcacatccaggcggctggagcaaattccagtgcgtgaccccggtttcata

SEQ ID NO: 10235 - DNA, 60 bp, Artificial
  Synthetic oligonucleotide
tgcattttcgaggtacggtaatacaatattccgactctatgtctagcactgccgtctgcg

SEQ ID NO: 10236 - DNA, 55 bp, Artificial
  Synthetic oligonucleotide
gtagattgggacaacgtgcaacactttctactagaagtggcaaacgtataggtgc

SEQ ID NO: 10237 - DNA, 60 bp, Artificial
  Synthetic oligonucleotide
cggtgacatgtgtgatatagggtttggagctatgaactttaatgcactccagcaggatag

SEQ ID NO: 10238 - DNA, 55 bp, Artificial
  Synthetic oligonucleotide
gggtttggagctatgaactttaatgcactccagcaggatagatccggtgctccat

SEQ ID NO: 10239 - DNA, 56 bp, Artificial
  Synthetic oligonucleotide
agcaggatagatccggtgctccattagatatagttgccacaacctgtaagtggcca

SEQ ID NO: 10240 - DNA, 60 bp, Artificial
  Synthetic oligonucleotide
caattgccatgcaggtggtaccccacccttcataggtatatcctggactcacagccaacc

SEQ ID NO: 10241 - DNA, 60 bp, Artificial
  Synthetic oligonucleotide
cgatgtttatttgaggaatgccctggacggtaaccctgtatgtatagatgcgaagcacaa

SEQ ID NO: 10242 - DNA, 60 bp, Artificial
  Synthetic oligonucleotide
ttgctccaaactctgtgtacgaacatgatcactagtacaaatcacttgtgacttaatttt

SEQ ID NO: 10243 - DNA, 51 bp, Artificial
  Synthetic oligonucleotide
ggcagacgcatccagcaggtccgtgtgcacgaccccagcttcttggacaga

SEQ ID NO: 10244 - DNA, 60 bp, Artificial
  Synthetic oligonucleotide
aagtatttcagttcacaagagattctgcagttaagtcctcgtctgcagtctattactatt

SEQ ID NO: 10245 - DNA, 52 bp, Artificial
  Synthetic oligonucleotide
tacagcacaatagtcaagccagattcgttagagaatgtgcactaatggttag

SEQ ID NO: 10246 - DNA, 60 bp, Artificial
  Synthetic oligonucleotide
agcacaccagtacaaagagcagtacaatcactctctagtttaagacgggcattgtataat

SEQ ID NO: 10247 - DNA, 60 bp, Artificial
  Synthetic oligonucleotide
ttcgcgaccattagcagatgttctgcgggacgaaaatcttacactccacggactgaaagc

SEQ ID NO: 10248 - DNA, 52 bp, Artificial
  Synthetic oligonucleotide
tgcggcatgttccactcagatccgctactctgcctgtgtgatccccccaagg

SEQ ID NO: 10249 - DNA, 60 bp, Artificial
  Synthetic oligonucleotide
caccaacaaccacaattaacacatcaggctcaggggatgcagccatattagaggtagctc

SEQ ID NO: 10250 - DNA, 60 bp, Artificial
  Synthetic oligonucleotide
ctcagatgtttattgtcggttgtgtacctgcacagggtgagcactggagtagagcactta

SEQ ID NO: 10251 - DNA, 51 bp, Artificial
  Synthetic oligonucleotide
ccgaaagcggtcgcgtgcagtacagtagactaggccaaagggcttctatgc

SEQ ID NO: 10252 - DNA, 60 bp, Artificial
  Synthetic oligonucleotide
gcagtgggcatgggataacgaagtgtgtgacgaggcaacggcagcatacgagtatgcaaa

SEQ ID NO: 10253 - DNA, 58 bp, Artificial
  Synthetic oligonucleotide
cggcccgcctaactcgctaaagtgctacaggtatagggtgcttcgcaactatagcggc

SEQ ID NO: 10254 - DNA, 60 bp, Artificial
  Synthetic oligonucleotide
tgacgagacaccttttagcagcagcactcctaggtctggggtgcaagtgactactcggtt

SEQ ID NO: 10255 - DNA, 60 bp, Artificial
  Synthetic oligonucleotide
cagtacagtgacagcgacctcctagacataatagagcctgtaggtgaggacctgcactta

SEQ ID NO: 10256 - DNA, 60 bp, Artificial
  Synthetic oligonucleotide
cattctacttgcctcaaagtgcagtcactcgcatactcagtacgaacgaatacgtccaag

SEQ ID NO: 10257 - DNA, 60 bp, Artificial
  Synthetic oligonucleotide
atgttttgacagcacagttatatgttctcctgcatctgtatctagtactgtgcaagaagt

SEQ ID NO: 10258 - DNA, 60 bp, Artificial
  Synthetic oligonucleotide
tgagggtcagccgactcgggacgagagctaccatgcgtacacgcagtgggctggtcattg

SEQ ID NO: 10259 - DNA, 57 bp, Artificial
  Synthetic oligonucleotide
cagcacagctggcctatagggtggtaacagagtgtgggttgtgtagccgtccagtta

SEQ ID NO: 10260 - DNA, 52 bp, Artificial
  Synthetic oligonucleotide
ccactaacagcggggggggagacgtaacacaggacgttgtagaggaggaacg

SEQ ID NO: 10261 - DNA, 60 bp, Artificial
  Synthetic oligonucleotide
agaagtggtccagctgcgctgtactggtacaagaccggcatgtctagctgtagtgatgtg

SEQ ID NO: 10262 - DNA, 52 bp, Artificial
  Synthetic oligonucleotide
gtgcgtttgcatcgccctgcattaacatctcgcaggggtgctgtgcgtttca

SEQ ID NO: 10263 - DNA, 60 bp, Artificial
  Synthetic oligonucleotide
tagcccagcaagcagctcgtgtgtgtctttggtggacagtgagttaagtccccgactgga

SEQ ID NO: 10264 - DNA, 60 bp, Artificial
  Synthetic oligonucleotide
ggtgacacaacaaaatgtgcatttgtaacactgtggtatgtggatactgaccaacggaca

SEQ ID NO: 10265 - DNA, 51 bp, Artificial
  Synthetic oligonucleotide
acaggtggaggatacatggacaaaggttgaaggccaggtggaccacagagg

SEQ ID NO: 10266 - DNA, 52 bp, Artificial
  Synthetic oligonucleotide
ccacacaaccagccaaactgctgttattggtgttaatagagtcaacgcttgg

SEQ ID NO: 10267 - DNA, 53 bp, Artificial
  Synthetic oligonucleotide
cactgtccagtacacctgtgcctggtgtgtcagcgcggcctaaagttgggcta

SEQ ID NO: 10268 - DNA, 57 bp, Artificial
  Synthetic oligonucleotide
tatcggtgcctaaagtgtctggacatcaatacagagtgtttagagtacgcttgcccg

SEQ ID NO: 10269 - DNA, 60 bp, Artificial
  Synthetic oligonucleotide
gtgtgcgcgcgccttgcttttttgcaccggtgccagacatgcacttagacttggctgcct

SEQ ID NO: 10270 - DNA, 56 bp, Artificial
  Synthetic oligonucleotide
acaaaccaagcgcgtttagtaaaggactgctgtactatggtcagacattatttgcg

SEQ ID NO: 10271 - DNA, 60 bp, Artificial
  Synthetic oligonucleotide
aattaccatgcatttagactattaacagacaatcttgcattgcacctgcagtgaaggaca

SEQ ID NO: 10272 - DNA, 50 bp, Artificial
  Synthetic oligonucleotide
gttgtcacagcccagaaccagtacacctgagattccaataaaacgtgcaa

SEQ ID NO: 10273 - DNA, 56 bp, Artificial
  Synthetic oligonucleotide
cacgtagtggtgtcagagtaggacctctgtatcacttaagacagtcattcagcact

SEQ ID NO: 10274 - DNA, 51 bp, Artificial
  Synthetic oligonucleotide
caggtacccggggaaaatgaaggcgtggggggggctgtggcggcacaggaa

SEQ ID NO: 10275 - DNA, 60 bp, Artificial
  Synthetic oligonucleotide
gccttcctgatacgtccctatataatcctgacacggaacgcatggtatgggcatgccgcg

SEQ ID NO: 10276 - DNA, 50 bp, Artificial
  Synthetic oligonucleotide
aactgttaaacataccggaaagacagatgctaattgaaccaccaaagatt

SEQ ID NO: 10277 - DNA, 56 bp, Artificial
  Synthetic oligonucleotide
ggtggacagtactgaccagtggatcaacggtcaccgtaacagcacagaaacagggg

SEQ ID NO: 10278 - DNA, 52 bp, Artificial
  Synthetic oligonucleotide
ggggaacactggacaaagggtactgcttgtgctaaccccgcgccccggccca

SEQ ID NO: 10279 - DNA, 60 bp, Artificial
  Synthetic oligonucleotide
cctttgaaatgcgggggtcagagtctgatgtgagggacattgtgctggacttgcatgaat

SEQ ID NO: 10280 - DNA, 60 bp, Artificial
  Synthetic oligonucleotide
agtgctggaggcgtagactgaggataagacactcctcacgatacatgtgtgcaagcacgg

SEQ ID NO: 10281 - DNA, 60 bp, Artificial
  Synthetic oligonucleotide
agcacgttataggaaccagtggcaagtctatagcagttttcacacaacatacgtcagtaa

SEQ ID NO: 10282 - DNA, 53 bp, Artificial
  Synthetic oligonucleotide
ggcgacacattaagtgccgcatgtaatagtattttaaacagcaaatgtaagcg

SEQ ID NO: 10283 - DNA, 60 bp, Artificial
  Synthetic oligonucleotide
tggttctctagatgctttgtaataatgatgcgaatacgtaggaaacgggcatctcctaca

SEQ ID NO: 10284 - DNA, 56 bp, Artificial
  Synthetic oligonucleotide
gccattatctgaagccaaaataggactgttagatgatgcaactagtcagtgttgga

SEQ ID NO: 10285 - DNA, 54 bp, Artificial
  Synthetic oligonucleotide
aagtcagatatgatggagacgaatctaaagccatgtgctatgtacaatggaggg

SEQ ID NO: 10286 - DNA, 59 bp, Artificial
  Synthetic oligonucleotide
tatagacatcttggtgtattgtaacataatatgtggtagcctgtacggatcccacatag

SEQ ID NO: 10287 - DNA, 51 bp, Artificial
  Synthetic oligonucleotide
ttgcccctgtcactagtttttcgccacctcctggagacggggccagtggag

SEQ ID NO: 10288 - DNA, 55 bp, Artificial
  Synthetic oligonucleotide
cataggtggaactcccactgtggttcgccctggggtcattccagaggtaataggc

SEQ ID NO: 10289 - DNA, 55 bp, Artificial
  Synthetic oligonucleotide
attagatttggtgccgcaacccgaaattgacctacagtgttacgaacaattggac

SEQ ID NO: 10290 - DNA, 60 bp, Artificial
  Synthetic oligonucleotide
tgcctcatcacagccacgcacattataccaattgtgtaaggaatttgggctgacattgcg

SEQ ID NO: 10291 - DNA, 53 bp, Artificial
  Synthetic oligonucleotide
cagtggacgggtcggtgtacgcattgcagaggacaatgcgtggagagacgcct

SEQ ID NO: 10292 - DNA, 53 bp, Artificial
  Synthetic oligonucleotide
gatatctcccctcccactaatactatacgtgtcacaacaactacatctaccaa

SEQ ID NO: 10293 - DNA, 60 bp, Artificial
  Synthetic oligonucleotide
cgaaagtatttcagttcacaagaggttttgcagcttagcccacgactgcagtctatcagt

SEQ ID NO: 10294 - DNA, 60 bp, Artificial
  Synthetic oligonucleotide
ccatggctcgtgcacgtagaacaaagcgtgcatctgtaacagacatctacaggggctgca

SEQ ID NO: 10295 - DNA, 55 bp, Artificial
  Synthetic oligonucleotide
acctttggacacagtcaaccctattgatccagcagcaccctcaattgtgcctctt

SEQ ID NO: 10296 - DNA, 60 bp, Artificial
  Synthetic oligonucleotide
gcaaaggatctagtgctgtgttagaggttgctgacccaagccctcccacacgctcgcgtg

SEQ ID NO: 10297 - DNA, 60 bp, Artificial
  Synthetic oligonucleotide
cgtcacggtacccattgttgagactcctgcgagactgcagcacaccccacaaacacagcc

SEQ ID NO: 10298 - DNA, 60 bp, Artificial
  Synthetic oligonucleotide
gttgcaacgtgcgcagggacataacaatggcatatgctggggcaatcaagtgtttttgac

SEQ ID NO: 10299 - DNA, 55 bp, Artificial
  Synthetic oligonucleotide
cgaggagcacatacgcactacaaagcgaaagttaaatcttgcatcccgtaagcct

SEQ ID NO: 10300 - DNA, 60 bp, Artificial
  Synthetic oligonucleotide
agggtcctaatgttgcaagaccaactgtaatagtagatgcacttggtcctgcaggagcac

SEQ ID NO: 10301 - DNA, 60 bp, Artificial
  Synthetic oligonucleotide
cggaccttcaggtacttacgatgagttgtttgcggagagtgcttcattgtgcgacagcgg

SEQ ID NO: 10302 - DNA, 53 bp, Artificial
  Synthetic oligonucleotide
caatgtgtacataatgcatggctttaatggggactatgtagggcctgcaacca

SEQ ID NO: 10303 - DNA, 57 bp, Artificial
  Synthetic oligonucleotide
ggaggagcctgctattgacagaactccatacaaagttgttgcgccttgtggttgctg

SEQ ID NO: 10304 - DNA, 51 bp, Artificial
  Synthetic oligonucleotide
ttataactgaatccacacctgctcaaggtgaaagttcactggctgatcaca

SEQ ID NO: 10305 - DNA, 57 bp, Artificial
  Synthetic oligonucleotide
aactccggctggctatgtacgggtcagtcgccttggtcaaagacgtaccattcgcac

SEQ ID NO: 10306 - DNA, 60 bp, Artificial
  Synthetic oligonucleotide
gagtcctctgcactcacatacctcctttgccaccacacgtaccagtaatgtgtccatacc

SEQ ID NO: 10307 - DNA, 60 bp, Artificial
  Synthetic oligonucleotide
gggcaatcagttatttgttaccgtggttgataccactcgtagcactaatatgacattatg

SEQ ID NO: 10308 - DNA, 60 bp, Artificial
  Synthetic oligonucleotide
acattagtgatgccgtagagtactggaagctaatgcgtaaggagcatagcctgctcttcc

SEQ ID NO: 10309 - DNA, 55 bp, Artificial
  Synthetic oligonucleotide
gacagaacgccttattaccataggcaacccatattatcgggtgaagggggaatct

SEQ ID NO: 10310 - DNA, 60 bp, Artificial
  Synthetic oligonucleotide
cgctttgtcagcacaacatggccatggataggagatgcatcaaatgatcgcatagggcgc

SEQ ID NO: 10311 - DNA, 51 bp, Artificial
  Synthetic oligonucleotide
agatcacgtattagtgtctgaagggtctggtggccagcagataggaggtac

SEQ ID NO: 10312 - DNA, 56 bp, Artificial
  Synthetic oligonucleotide
tcgccacagaagatagtgtgcaagcgccgccctataaacgacttcgaggaccctcc

SEQ ID NO: 10313 - DNA, 60 bp, Artificial
  Synthetic oligonucleotide
tgtaagtgtacaagatggcgattgtcctccattggaattagttactagtgtaattcagga

SEQ ID NO: 10314 - DNA, 60 bp, Artificial
  Synthetic oligonucleotide
ttcaaatgctcgcgcctttttagctcataacagtcaggcaaaatttgttagagaatgtgg

SEQ ID NO: 10315 - DNA, 52 bp, Artificial
  Synthetic oligonucleotide
gtggtagcactggatatgggccattaggtgaagggacgagtgtaagagttgg

SEQ ID NO: 10316 - DNA, 60 bp, Artificial
  Synthetic oligonucleotide
tgtcagacaggcacaacaaatggcctcagcattacggagggctttatacaatagaaggtt

SEQ ID NO: 10317 - DNA, 55 bp, Artificial
  Synthetic oligonucleotide
ggaacattctggcgatgctacaatagtccagggtcctgtggaaagtacgttcgta

SEQ ID NO: 10318 - DNA, 50 bp, Artificial
  Synthetic oligonucleotide
aggactagcttgttaacaccttaaggtgttggccacttataatagctgac

SEQ ID NO: 10319 - DNA, 52 bp, Artificial
  Synthetic oligonucleotide
ttagacatgaacaggctttatactattatgccaggcgacaaggtatactgag

SEQ ID NO: 10320 - DNA, 55 bp, Artificial
  Synthetic oligonucleotide
tgtttgtggggcatccatactttgacattaaacgtgaggacaaggttctggtacc

SEQ ID NO: 10321 - DNA, 54 bp, Artificial
  Synthetic oligonucleotide
cctcgtcgtataccatacaagattgtagctccgtgctgcttttgtggttctaag

SEQ ID NO: 10322 - DNA, 60 bp, Artificial
  Synthetic oligonucleotide
cgaaagtatttgagttcacaagaggttttgcagctcagtccgcgcctgcagtctatcact

SEQ ID NO: 10323 - DNA, 60 bp, Artificial
  Synthetic oligonucleotide
aaggtagctatgctagatgatgttacagcggcatgctgggggtatatggatacacacatg

SEQ ID NO: 10324 - DNA, 60 bp, Artificial
  Synthetic oligonucleotide
cctgcgtttatggacatcattaccttgcacaggcctgcattaacgtctcggcggggtgtc

SEQ ID NO: 10325 - DNA, 60 bp, Artificial
  Synthetic oligonucleotide
gtgtgtcttaccattgagagcacacacgctgacctattagtgttagaagacctgcttatg

SEQ ID NO: 10326 - DNA, 52 bp, Artificial
  Synthetic oligonucleotide
gcagtatcacgatccaaagggcataatgcaattgaactacaattagccctag

SEQ ID NO: 10327 - DNA, 50 bp, Artificial
  Synthetic oligonucleotide
gtgtgccaacacggaaacggcatagacagtgtgacccagacgaggggccc

SEQ ID NO: 10328 - DNA, 50 bp, Artificial
  Synthetic oligonucleotide
ggtatgcgtgcccgtcctaggttacaggcctctaaacggtctgcaccttc

SEQ ID NO: 10329 - DNA, 60 bp, Artificial
  Synthetic oligonucleotide
ctacgcaaggtcatacacgtttaaggcgccacctggcagttactcatgtgtctgcaattg

SEQ ID NO: 10330 - DNA, 60 bp, Artificial
  Synthetic oligonucleotide
caacgcatacatgctggacatatatggacacgtatcttagaaatgcattagatggcaacc

SEQ ID NO: 10331 - DNA, 53 bp, Artificial
  Synthetic oligonucleotide
aaacgcatgccgctagactctaaggggcaaccggagtttgtgctctcagcagc

SEQ ID NO: 10332 - DNA, 60 bp, Artificial
  Synthetic oligonucleotide
tttgggtatggatcaatcaatcctggagggggtaggataactggcacaggcacggtcatg

SEQ ID NO: 10333 - DNA, 60 bp, Artificial
  Synthetic oligonucleotide
ccagccagtctcgcctacttctttccgcatctgagaatcagttcacgccaggacagcaac

SEQ ID NO: 10334 - DNA, 60 bp, Artificial
  Synthetic oligonucleotide
gtgagaagaagtacttatctgtgtgggaacgaaagcggtacatgacagtttggcagagcc

SEQ ID NO: 10335 - DNA, 60 bp, Artificial
  Synthetic oligonucleotide
gacatctatattgtgtgttcgcgaagaacaaatattggctgagcctcccaaaatacgtag

SEQ ID NO: 10336 - DNA, 54 bp, Artificial
  Synthetic oligonucleotide
tgcacggttagcaccggaagatgtaaatgcattagcttggctagcgcacaacag

SEQ ID NO: 10337 - DNA, 52 bp, Artificial
  Synthetic oligonucleotide
gccagtggtaaagtatatctaccaccttcaacacctgtggcgagggtacaaa

SEQ ID NO: 10338 - DNA, 60 bp, Artificial
  Synthetic oligonucleotide
gtaagcttggattcttagatgatgctacatttcaatgttggcaatacatggatgtaaata

SEQ ID NO: 10339 - DNA, 58 bp, Artificial
  Synthetic oligonucleotide
gtgttacaagatcaactaatgaacatttatgaagttgctagtgataccctagaagcac

SEQ ID NO: 10340 - DNA, 56 bp, Artificial
  Synthetic oligonucleotide
gagcacacagggaccacgcgggtgttagaactccttaaatgtaaggatgtaagggc

SEQ ID NO: 10341 - DNA, 60 bp, Artificial
  Synthetic oligonucleotide
ttgcagagtcactttgactgccgagaatctagggtccatctataggatgaaccccgacat

SEQ ID NO: 10342 - DNA, 51 bp, Artificial
  Synthetic oligonucleotide
cgcttagtgtgggcctgtacaggtttagaggttggtaggggtcaaccctta

SEQ ID NO: 10343 - DNA, 50 bp, Artificial
  Synthetic oligonucleotide
aggcccagttgtttaataaaccttattggttacaaaaggcccagggacac

SEQ ID NO: 10344 - DNA, 58 bp, Artificial
  Synthetic oligonucleotide
tattgtttctgcgaccgatttgttgcagcacgctgtttatataatcttacctaccgcc

SEQ ID NO: 10345 - DNA, 60 bp, Artificial
  Synthetic oligonucleotide
agctgtcgcacagctcagtccgcgactcgaaagtataacgctgtcacctcagcagaagtc

SEQ ID NO: 10346 - DNA, 60 bp, Artificial
  Synthetic oligonucleotide
gttggcaatgctcctacggtcattagacctgcattggtccctgacaccattggcccgtct

SEQ ID NO: 10347 - DNA, 51 bp, Artificial
  Synthetic oligonucleotide
gggtggcgggctcacaaataggcgtttggttcaacaggttaatgtagagaa

SEQ ID NO: 10348 - DNA, 52 bp, Artificial
  Synthetic oligonucleotide
tattcgtactcgttcaggaacacaaattggttctcaggtccatttttacagg

SEQ ID NO: 10349 - DNA, 58 bp, Artificial
  Synthetic oligonucleotide
gcaggacaaattgatgagggtagtatgaagaatgcatattacattccaccaatgaatg

SEQ ID NO: 10350 - DNA, 51 bp, Artificial
  Synthetic oligonucleotide
ccactgacgcgtgtagaggtatatgattttgcacggtgggatttgcgaata

SEQ ID NO: 10351 - DNA, 60 bp, Artificial
  Synthetic oligonucleotide
tgcagatccagtgcgggccttggacggtaacagccggtcactactcgctggccctccgca

SEQ ID NO: 10352 - DNA, 60 bp, Artificial
  Synthetic oligonucleotide
gttccacgcacaacaacacgccacatgcactgcgtaaacgtgcttcggccacacaactat

SEQ ID NO: 10353 - DNA, 60 bp, Artificial
  Synthetic oligonucleotide
tctgtgcctaaggcttcggggttgcaatatcgggtgtttcgtgtgcgcctgcctgatcct

SEQ ID NO: 10354 - DNA, 51 bp, Artificial
  Synthetic oligonucleotide
cttgctgtcataagtatcacacctcggaagcgaatcccgttgttagacgca

SEQ ID NO: 10355 - DNA, 56 bp, Artificial
  Synthetic oligonucleotide
ggtgcttttcgccctggcatcatagaggaggttgctccgacactggaaggtgtcct

SEQ ID NO: 10356 - DNA, 55 bp, Artificial
  Synthetic oligonucleotide
ccaggacaccgagcaagaacccctatccactactagacctactgacccatcgcac

SEQ ID NO: 10357 - DNA, 53 bp, Artificial
  Synthetic oligonucleotide
aacttctaggggggctcatgtctgttgaaaagcatcagatggtcctagaaccc

SEQ ID NO: 10358 - DNA, 60 bp, Artificial
  Synthetic oligonucleotide
acaatgtgatggacagggcataactgattgtgcacttgtatctagcaccagcaccccttc

SEQ ID NO: 10359 - DNA, 60 bp, Artificial
  Synthetic oligonucleotide
ggcatataggtcatgctccacaacatggtcttggataggggatgatctacaggaccacac

SEQ ID NO: 10360 - DNA, 53 bp, Artificial
  Synthetic oligonucleotide
cggtctgtgagacgtgcatatagtaggcgtacaggtgctttacgaaggttgta

SEQ ID NO: 10361 - DNA, 58 bp, Artificial
  Synthetic oligonucleotide
actccacaggcctatatattctactgagggtggatatgtccgtgtaagccgctttggg

SEQ ID NO: 10362 - DNA, 55 bp, Artificial
  Synthetic oligonucleotide
aattgctaaaacgaaagtatatcagtcccacagctgtttcgcagcttagcccacg

SEQ ID NO: 10363 - DNA, 60 bp, Artificial
  Synthetic oligonucleotide
tgctgcgccctggggtcattcctgaggtaattgggcctgcagacataatacctattgaca

SEQ ID NO: 10364 - DNA, 55 bp, Artificial
  Synthetic oligonucleotide
gtagactgggacgacgagccacaattagaacccgtagtggggcacaggttggcac

SEQ ID NO: 10365 - DNA, 60 bp, Artificial
  Synthetic oligonucleotide
cactgggtatattccattaggaacaaggcctcccacagctacagatacacttgctcctgt

SEQ ID NO: 10366 - DNA, 55 bp, Artificial
  Synthetic oligonucleotide
ccattaggaacaaggcctcccacagctacagatacacttgctcctgtaagacccc

SEQ ID NO: 10367 - DNA, 52 bp, Artificial
  Synthetic oligonucleotide
acgcagagcattatataatagaaggctaactgagcaagtgggtgtcactgac

SEQ ID NO: 10368 - DNA, 58 bp, Artificial
  Synthetic oligonucleotide
atgtttgttacagtcgctgataatacccgaaatacaaactttacaatcagtgtatcca

SEQ ID NO: 10369 - DNA, 50 bp, Artificial
  Synthetic oligonucleotide
tcatctagcacctgcagcaaccgccaagactttgccaggacttggcagaa

SEQ ID NO: 10370 - DNA, 60 bp, Artificial
  Synthetic oligonucleotide
tactccagctcgggttttagactcagctgtgaaacgagtcagaggcctatacaataggat

SEQ ID NO: 10371 - DNA, 53 bp, Artificial
  Synthetic oligonucleotide
gcccaatttcgactattgttgaagagatagaattacagcccatacatgacact

SEQ ID NO: 10372 - DNA, 55 bp, Artificial
  Synthetic oligonucleotide
acatcaggccatccgttgtttaataaagtggccgatacagaaaatcccaccactt

SEQ ID NO: 10373 - DNA, 51 bp, Artificial
  Synthetic oligonucleotide
taataataatgtaagctttagaaaagaggagggaccgaattcggttccaac

SEQ ID NO: 10374 - DNA, 60 bp, Artificial
  Synthetic oligonucleotide
tgcacgcttggtgacatataacaaccctgcctatgagggtgtgggtgaagctagcttgca

SEQ ID NO: 10375 - DNA, 60 bp, Artificial
  Synthetic oligonucleotide
gtttaccatgctagcagttctagacttcttgctgtaggcaacccttattttgccatacga

SEQ ID NO: 10376 - DNA, 60 bp, Artificial
  Synthetic oligonucleotide
cagacccaacacatgcgtattacattcagccagctgatggtactcctccacacaacagta

SEQ ID NO: 10377 - DNA, 60 bp, Artificial
  Synthetic oligonucleotide
aattcccttgcgctgtacaatgcacaaataaatgaggattgtgacaatgcactagcacac

SEQ ID NO: 10378 - DNA, 50 bp, Artificial
  Synthetic oligonucleotide
gtactgtttggaactgggttggagattgctcacataatcatagtcgcatg

SEQ ID NO: 10379 - DNA, 56 bp, Artificial
  Synthetic oligonucleotide
tgtgcctttgcatcggcctatcacgagtttacacagtatcatcaggagaccgtggt

SEQ ID NO: 10380 - DNA, 59 bp, Artificial
  Synthetic oligonucleotide
gtgtcagcactatactggtacaaaggcagtatggactcatctgtgtatgctcatggagc

SEQ ID NO: 10381 - DNA, 60 bp, Artificial
  Synthetic oligonucleotide
tgctcaaatggttagacattacagacggggagaaatgagggatatgagtatgtctgagtg

SEQ ID NO: 10382 - DNA, 52 bp, Artificial
  Synthetic oligonucleotide
aatgttgtaagtgtggattgcaaacataaaacccctatgcaaattaggttcc

SEQ ID NO: 10383 - DNA, 54 bp, Artificial
  Synthetic oligonucleotide
agatatgggacatctggacaatatgaagtccgcattaacaacgaaactgtgttt

SEQ ID NO: 10384 - DNA, 60 bp, Artificial
  Synthetic oligonucleotide
gtcacctcagcagaagtctaaacgaaggctctttgcagagcaggacagcgggttggagtt

SEQ ID NO: 10385 - DNA, 55 bp, Artificial
  Synthetic oligonucleotide
atccagtgatgctcaactgttcaatagaccattttggttacagcgcgcacaaggc

SEQ ID NO: 10386 - DNA, 56 bp, Artificial
  Synthetic oligonucleotide
ctttggtgacgaggcagccagatttagtacaacagggcattactctgtaagagatc

SEQ ID NO: 10387 - DNA, 58 bp, Artificial
  Synthetic oligonucleotide
gactgttcacaacccaagtaaagagcggctggtgtgggcagtcataggtgtgcaggtg

SEQ ID NO: 10388 - DNA, 60 bp, Artificial
  Synthetic oligonucleotide
agttagcaggttaggcacacgtggcaccattcgcacacgttctggtgcacaaattgggtc

SEQ ID NO: 10389 - DNA, 55 bp, Artificial
  Synthetic oligonucleotide
ccggacagtgggtatggccaaacacaggtggatacggacacgggaccaagccagg

SEQ ID NO: 10390 - DNA, 60 bp, Artificial
  Synthetic oligonucleotide
ccagcgggatatgttagagtaagcaggttggggactcgagccactattcgcactcgctct

SEQ ID NO: 10391 - DNA, 55 bp, Artificial
  Synthetic oligonucleotide
aagcaggttggggactcgagccactattcgcactcgctctggtgcacagataggg

SEQ ID NO: 10392 - DNA, 60 bp, Artificial
  Synthetic oligonucleotide
ggtgatatggcagacataggttttgggaacatgaattttaaggcacttcaagatagtaga

SEQ ID NO: 10393 - DNA, 60 bp, Artificial
  Synthetic oligonucleotide
ctgtagatcttcattgtgatgaaagtctagatcaagaggcggagcaacagaccttttaca

SEQ ID NO: 10394 - DNA, 60 bp, Artificial
  Synthetic oligonucleotide
tggtttgtgtgagccatactatataactcttacaggggtcttgcccgaccactgctgcta

SEQ ID NO: 10395 - DNA, 56 bp, Artificial
  Synthetic oligonucleotide
gcccctatccaggcaacgtgtccgccgctgctgatcacatccaacatagacatcac

SEQ ID NO: 10396 - DNA, 60 bp, Artificial
  Synthetic oligonucleotide
cacaatgcatttgaccctgtatctagcacacgagaagtacccgctactggacctttgtac

SEQ ID NO: 10397 - DNA, 54 bp, Artificial
  Synthetic oligonucleotide
cgcaaacctggagttccgcacaagcaccccacagtcaggccggcgtcctaaccc

SEQ ID NO: 10398 - DNA, 60 bp, Artificial
  Synthetic oligonucleotide
cggggcctgtatatatgggcacacctagcggctccattgtaagcactgaggggcaagtac

SEQ ID NO: 10399 - DNA, 60 bp, Artificial
  Synthetic oligonucleotide
agtggacatcctctctataacaagctagatgacactgaaaactctaacatagcacatggg

SEQ ID NO: 10400 - DNA, 55 bp, Artificial
  Synthetic oligonucleotide
caagctagatgacactgaaaactctaacatagcacatggggacattggacaggat

SEQ ID NO: 10401 - DNA, 57 bp, Artificial
  Synthetic oligonucleotide
atatacagagttggtgcgaacatttaaaagcgatagtacatgttgtaacgattggat

SEQ ID NO: 10402 - DNA, 60 bp, Artificial
  Synthetic oligonucleotide
ggcgcacagctaggcgcggtttggcaactacacaatacattcctaatctctatactactg

SEQ ID NO: 10403 - DNA, 60 bp, Artificial
  Synthetic oligonucleotide
tatgtgcagtaccagtgacgacacggtatccgctactcagcttgttaaacagctacagca

SEQ ID NO: 10404 - DNA, 55 bp, Artificial
  Synthetic oligonucleotide
ccagtgacgacacggtatccgctactcagcttgttaaacagctacagcacacccc

SEQ ID NO: 10405 - DNA, 60 bp, Artificial
  Synthetic oligonucleotide
gagccttcgcagacgacgtaaacgtatgcaccgtttctttgcagatgtccttgtggcggc

SEQ ID NO: 10406 - DNA, 60 bp, Artificial
  Synthetic oligonucleotide
agcagataccatcagcacctggagcgaccgccaagacttcgccaacttggcagaacattt

SEQ ID NO: 10407 - DNA, 60 bp, Artificial
  Synthetic oligonucleotide
tctaggccttctactatagttgatgtcactcctgcacgaccacctattgtggtggagtca

SEQ ID NO: 10408 - DNA, 60 bp, Artificial
  Synthetic oligonucleotide
cattatttaagtaggatgtgctacaccaaattattgatggactcgacgcgaccactgacg

SEQ ID NO: 10409 - DNA, 55 bp, Artificial
  Synthetic oligonucleotide
ggatgtgctacaccaaattattgatggactcgacgcgaccactgacggtacagca

SEQ ID NO: 10410 - DNA, 60 bp, Artificial
  Synthetic oligonucleotide
tgcttaggtgaatattgggatacagctcctgtctgtaaagatgcaggtagccaactaggg

SEQ ID NO: 10411 - DNA, 55 bp, Artificial
  Synthetic oligonucleotide
cagttcacaagaggttttgcagcttagcccacgactgcagtctatcagtatatcg

SEQ ID NO: 10412 - DNA, 55 bp, Artificial
  Synthetic oligonucleotide
acgttagggaggaggagcgtcaagggggggacggagaggcagatctaactgtaca

SEQ ID NO: 10413 - DNA, 54 bp, Artificial
  Synthetic oligonucleotide
ccgtgcggttgcagacactgtgaggtcaagcttcgcatttttgtccacgccaca

SEQ ID NO: 10414 - DNA, 56 bp, Artificial
  Synthetic oligonucleotide
tcctacacctgacattcctgtggtcattatacacactcatgacaatacaggggact

SEQ ID NO: 10415 - DNA, 56 bp, Artificial
  Synthetic oligonucleotide
gtacactcagtcaggttgttgccaatatagaatcagatcggtgccaaacacaccgt

SEQ ID NO: 10416 - DNA, 60 bp, Artificial
  Synthetic oligonucleotide
ttacttcggatgcacaactatttaataagccatactggttacaacgtgcacagggtcata

SEQ ID NO: 10417 - DNA, 60 bp, Artificial
  Synthetic oligonucleotide
gcagtactccattgccacgcaatcaatctgtaggccgtaggaggggtttctctttgacta

SEQ ID NO: 10418 - DNA, 50 bp, Artificial
  Synthetic oligonucleotide
cttggttttaactagcagtagacgtggatcttcattcagtatccccacta

SEQ ID NO: 10419 - DNA, 60 bp, Artificial
  Synthetic oligonucleotide
attaggtactcgtgcaaccattcgcacgcggtctggtgcacaaatagggtcacaggtgca

SEQ ID NO: 10420 - DNA, 55 bp, Artificial
  Synthetic oligonucleotide
ggtgtggagctgtaggggccttgaaataggtagaggacaaccgttaggtgttggc

SEQ ID NO: 10421 - DNA, 55 bp, Artificial
  Synthetic oligonucleotide
cctggggttagtcgtgtggcagggccacgtttatatagtagggcacatcaacagg

SEQ ID NO: 10422 - DNA, 55 bp, Artificial
  Synthetic oligonucleotide
ctccacacctagtggctctctggtttctagtgagggacaactgtttaacaggcct

SEQ ID NO: 10423 - DNA, 58 bp, Artificial
  Synthetic oligonucleotide
tgcattgcataggcctgcatttactacacgtagaacaggtgtgcgttttagtaggcta

SEQ ID NO: 10424 - DNA, 55 bp, Artificial
  Synthetic oligonucleotide
ggtcgtggtacaggcggtgctacaggctatgtgcctttggggcaaggacctggag

SEQ ID NO: 10425 - DNA, 53 bp, Artificial
  Synthetic oligonucleotide
gtgcttccaaatctccaccaagacacacctaatccggtcgctgcttgctttct

SEQ ID NO: 10426 - DNA, 60 bp, Artificial
  Synthetic oligonucleotide
accactgtatttcgaaaatagagggcgatggacactggcaggacattgtgagatttttgc

SEQ ID NO: 10427 - DNA, 60 bp, Artificial
  Synthetic oligonucleotide
aagtatatcagttcacaagaggttttgcagcttagccctcgcctgcagtgtatatctatt

SEQ ID NO: 10428 - DNA, 60 bp, Artificial
  Synthetic oligonucleotide
atttgcctgtgtcaccttctatacctgccatatctgtactgattcgcggtactgattatt

SEQ ID NO: 10429 - DNA, 60 bp, Artificial
  Synthetic oligonucleotide
tgggatgtgcaccagcattaggtgaacattggactaagggcgcggtgtgtaagtctacac

SEQ ID NO: 10430 - DNA, 50 bp, Artificial
  Synthetic oligonucleotide
gtatataatactgtgcttgagagtgcgcggtaaataaacattagacacgg

SEQ ID NO: 10431 - DNA, 60 bp, Artificial
  Synthetic oligonucleotide
tcaacaagcggtgtgggatccgtcgggcctgcaagctgttgcgagacgcagaagccacat

SEQ ID NO: 10432 - DNA, 60 bp, Artificial
  Synthetic oligonucleotide
tccccacacccaggagaacattatacctggtagagagtcagtgtccattttgccaggcta

SEQ ID NO: 10433 - DNA, 55 bp, Artificial
  Synthetic oligonucleotide
cctgacaaggagcgtctggtctggggtattcgtgggattgaggtttctaggggac

SEQ ID NO: 10434 - DNA, 60 bp, Artificial
  Synthetic oligonucleotide
attctgtactggaggatcattataggtacatactgtccattgcaactaaatgtccctcta

SEQ ID NO: 10435 - DNA, 55 bp, Artificial
  Synthetic oligonucleotide
cgataaaggtagcaattgggattcggcattgggatgctcatatctgctgacagag

SEQ ID NO: 10436 - DNA, 60 bp, Artificial
  Synthetic oligonucleotide
ttgtcgcccgctactctgaagcatggtgctttacctgagtggatacgggcgcaaactaca

SEQ ID NO: 10437 - DNA, 60 bp, Artificial
  Synthetic oligonucleotide
ttcttagcaactaacagccaagctaagcatgtaaaggactgtgcaactatggtgaggcac

SEQ ID NO: 10438 - DNA, 51 bp, Artificial
  Synthetic oligonucleotide
acgaaatggattggggctccccaagggattgacgggatgacagctttagtg

SEQ ID NO: 10439 - DNA, 60 bp, Artificial
  Synthetic oligonucleotide
cggcgacgactgcactgcatagctggctactggagagggagctgtcaatactgctggtta

SEQ ID NO: 10440 - DNA, 60 bp, Artificial
  Synthetic oligonucleotide
cgggctggacaggctacgtgttacagaattgaagctccgtgttgcaggtgttcaagtgta

SEQ ID NO: 10441 - DNA, 52 bp, Artificial
  Synthetic oligonucleotide
aaacattagcaatacatatggagagacacctgaatggattacacgacaaacg

SEQ ID NO: 10442 - DNA, 57 bp, Artificial
  Synthetic oligonucleotide
gcactgcgtaccaaaaaaatgttgcattgcgtttgttggggtcccagatagcggtaa

SEQ ID NO: 10443 - DNA, 60 bp, Artificial
  Synthetic oligonucleotide
gcgcttcaacagctgttactgggcacactgacaatagtgtgtcccatctgcgtgtagctg

SEQ ID NO: 10444 - DNA, 60 bp, Artificial
  Synthetic oligonucleotide
acagcagctggcacgtgtcaaccttaggacccagtgtgacactgacggcgcacacgagca

SEQ ID NO: 10445 - DNA, 60 bp, Artificial
  Synthetic oligonucleotide
agcagctgtttatggactcactaggatttgtgtgtccgtggtgtgcaactgcaaaccagt

SEQ ID NO: 10446 - DNA, 60 bp, Artificial
  Synthetic oligonucleotide
gcgcagccctgtagcagcactatattggtatcgcacaggtatatccaatattagtgtggt

SEQ ID NO: 10447 - DNA, 56 bp, Artificial
  Synthetic oligonucleotide
gttatacaagtgactaatgtagcacacaatagtttatgcaaccgaaataggttggg

SEQ ID NO: 10448 - DNA, 55 bp, Artificial
  Synthetic oligonucleotide
cccatggtgtatgtgcaccgtgcttaagtagagccgccaagacacgggagctacg

SEQ ID NO: 10449 - DNA, 60 bp, Artificial
  Synthetic oligonucleotide
aatcacagccgtctgcaaatttacaacagacgcaggagggaacgcaaggtgtgctggagc

SEQ ID NO: 10450 - DNA, 60 bp, Artificial
  Synthetic oligonucleotide
tgacccaccctgtgcggcgtcgtaaacgggcttcggtcacagacctgtatcgcacatgta

SEQ ID NO: 10451 - DNA, 60 bp, Artificial
  Synthetic oligonucleotide
attgggacgcgagcataaggtgcactgaggataatgacaaagagatgtgtcctcccttag

SEQ ID NO: 10452 - DNA, 60 bp, Artificial
  Synthetic oligonucleotide
gtagtgtgtgtcctctatgtacccctgtgtagtgtgtgtcctgtatgtaacccctatgta

SEQ ID NO: 10453 - DNA, 57 bp, Artificial
  Synthetic oligonucleotide
agaggatttgcgattgctctgtgtatggtgcaaacggccgttatcagaggctgacat

SEQ ID NO: 10454 - DNA, 60 bp, Artificial
  Synthetic oligonucleotide
gtgccagggcaggtggacgaactgggattatattatgtgcacgatggtgtacgtgttaac

SEQ ID NO: 10455 - DNA, 60 bp, Artificial
  Synthetic oligonucleotide
taactgtacgttctggtgcacagatttctgcaccccatcgccttgtgtgtagcccccagt

SEQ ID NO: 10456 - DNA, 60 bp, Artificial
  Synthetic oligonucleotide
tgcagcggttcctaaggtgtctggtaatcaatatagggtgttcagattgaagcttcctga

SEQ ID NO: 10457 - DNA, 60 bp, Artificial
  Synthetic oligonucleotide
atgtccccctgacattattcccaaagtggaaaatgacacatgggctgacagactgctaaa

SEQ ID NO: 10458 - DNA, 60 bp, Artificial
  Synthetic oligonucleotide
tttgcaatacgggagctacacgtggtgcggcgaaaggactggccatttggagtatgcgca

SEQ ID NO: 10459 - DNA, 53 bp, Artificial
  Synthetic oligonucleotide
ttgtaagcgacagcgagtccacggacacggagcggagcggcagcccaccgtta

SEQ ID NO: 10460 - DNA, 57 bp, Artificial
  Synthetic oligonucleotide
actatgtccactgacatagaactgaccgatctctcagctaggcctggtcccgcagtg

SEQ ID NO: 10461 - DNA, 60 bp, Artificial
  Synthetic oligonucleotide
ctaatgatgacagtcgggacaatatctctgtggattataagcagacccagttgttaattg

SEQ ID NO: 10462 - DNA, 60 bp, Artificial
  Synthetic oligonucleotide
aatggcgcggccactgagcatacgcagtctttgcttatcctgggacctaaactttgagag

SEQ ID NO: 10463 - DNA, 57 bp, Artificial
  Synthetic oligonucleotide
caaacataaagctccgatccaaattaaattgcctcctatgctggtcacttctaatgt

SEQ ID NO: 10464 - DNA, 52 bp, Artificial
  Synthetic oligonucleotide
tactcagcttgtcataggtagtgggtcaaggggtaacaaggcaattgacata

SEQ ID NO: 10465 - DNA, 56 bp, Artificial
  Synthetic oligonucleotide
tgttaagcgacagcgacttggaggagactgcacccagcagcccgattctacacagg

SEQ ID NO: 10466 - DNA, 60 bp, Artificial
  Synthetic oligonucleotide
ccatgccaaaatcccgtcgcaaacgtgcctctgcaacagacctgtaccgcacctgcaagg

SEQ ID NO: 10467 - DNA, 52 bp, Artificial
  Synthetic oligonucleotide
gcctgcttactgtgggtcacccttactatccagttactgttaccacccctgg

SEQ ID NO: 10468 - DNA, 52 bp, Artificial
  Synthetic oligonucleotide
tacaactttcccttaagtgcatagttggctgccttagtacattgtactgcca

SEQ ID NO: 10469 - DNA, 58 bp, Artificial
  Synthetic oligonucleotide
tacttcctttgcacctgggttcagtcggcgccagctcttggatcaggatagaaggtaa

SEQ ID NO: 10470 - DNA, 54 bp, Artificial
  Synthetic oligonucleotide
gcatagccgcctgcaatgctttgagtttgctaagcctatgccattagactcaca

SEQ ID NO: 10471 - DNA, 60 bp, Artificial
  Synthetic oligonucleotide
ctctgttggccctggagagtcaagcattgtccctttactagaagctacaccagatgtccc

SEQ ID NO: 10472 - DNA, 52 bp, Artificial
  Synthetic oligonucleotide
agttccattgactccttccgtgctggctcatattaatgtcatgaacccaact

SEQ ID NO: 10473 - DNA, 55 bp, Artificial
  Synthetic oligonucleotide
atgggtcatgttcaacgacattagatgcatgtattgtggtggatgcctaacccgc

SEQ ID NO: 10474 - DNA, 53 bp, Artificial
  Synthetic oligonucleotide
cagacgggagtatgggtaacggggggggcatgggcagtgtacatggggtgcag

SEQ ID NO: 10475 - DNA, 53 bp, Artificial
  Synthetic oligonucleotide
ctgctaaagcgaaagtacatgtccccaagcccagataaagaattaagcccgag

SEQ ID NO: 10476 - DNA, 60 bp, Artificial
  Synthetic oligonucleotide
tacccgtagtactaacatgactgtgtgtgctactgtaacaactgaagacacatacaagtc

SEQ ID NO: 10477 - DNA, 58 bp, Artificial
  Synthetic oligonucleotide
atcaagccagacaagttcatctgttacatcaggtcgcagagacgacaatttaagcgat

SEQ ID NO: 10478 - DNA, 60 bp, Artificial
  Synthetic oligonucleotide
accaagaatacgatgtcctgctgcagctatgttctggtataaaaagtcaatgtgtaatgg

SEQ ID NO: 10479 - DNA, 59 bp, Artificial
  Synthetic oligonucleotide
ttgatagtgtgcagcctacagagaagttcttttgctacacaaacatggtttttaagcga

SEQ ID NO: 10480 - DNA, 60 bp, Artificial
  Synthetic oligonucleotide
gaactatatggactgttatatgaggacagctttagatggaaacgcagtgtctgtagatag

SEQ ID NO: 10481 - DNA, 60 bp, Artificial
  Synthetic oligonucleotide
ctacagtgcccgcagaggacgcgttattacatgacatcgccgtgtccggttggacctgtg

SEQ ID NO: 10482 - DNA, 60 bp, Artificial
  Synthetic oligonucleotide
agacactgtacacaggcctacgagcatttcattgcgcagagggggaactgttttgcgtgc

SEQ ID NO: 10483 - DNA, 60 bp, Artificial
  Synthetic oligonucleotide
cgagcaccgatgcaaataaagtgtccacctctgctactaacaagcaatgtggatccgcgg

SEQ ID NO: 10484 - DNA, 60 bp, Artificial
  Synthetic oligonucleotide
ccgaccgattatgtgtactcctgctctacggacagactattgactgtgggacatccttac

SEQ ID NO: 10485 - DNA, 56 bp, Artificial
  Synthetic oligonucleotide
cctgtcccgggtgtgctaggagaaatatacagcatgggagatccaactaaaggtac

SEQ ID NO: 10486 - DNA, 60 bp, Artificial
  Synthetic oligonucleotide
tggacagcttataacatgcctataagaagaaagcgagcatcaccggaggacttatatagg

SEQ ID NO: 10487 - DNA, 60 bp, Artificial
  Synthetic oligonucleotide
cgcgcacactgaggccagtaggccctgtagagcctattggacctggcacacccactgtca

SEQ ID NO: 10488 - DNA, 57 bp, Artificial
  Synthetic oligonucleotide
ggtaggaaatttttgtatcagataggcctgctaaatggcaaacgtcctcgcactgtt

SEQ ID NO: 10489 - DNA, 60 bp, Artificial
  Synthetic oligonucleotide
ctatgcacacgaatcgtggacgttgagagaaacttcacgtgaaatgtgggacactgctcc

SEQ ID NO: 10490 - DNA, 54 bp, Artificial
  Synthetic oligonucleotide
ttggctgatcgaattttacagtggggtagcctcggtgtatatttagggggtcta

SEQ ID NO: 10491 - DNA, 55 bp, Artificial
  Synthetic oligonucleotide
gcgtttgatgaggaagttacacagattttcgaaagagatgttgctgcagtagagg

SEQ ID NO: 10492 - DNA, 59 bp, Artificial
  Synthetic oligonucleotide
ctagcatgcgtacacgcagtggcaagggtattggggcccgggtgcattactatcatgac

SEQ ID NO: 10493 - DNA, 60 bp, Artificial
  Synthetic oligonucleotide
gcacgagcactagacatcctgtcttcacctactatccagatgtgcaccctgcgtgcatag

SEQ ID NO: 10494 - DNA, 60 bp, Artificial
  Synthetic oligonucleotide
cttcaacatatttcacagttcctagtggctccctggtaagtagtgagtctcagctcttta

SEQ ID NO: 10495 - DNA, 50 bp, Artificial
  Synthetic oligonucleotide
tgtaaaacatcctccttatctttgaacgataaagggaattcatctgttac

SEQ ID NO: 10496 - DNA, 60 bp, Artificial
  Synthetic oligonucleotide
acggcagaattgagcttacagtagagagctcggcagaggaccttagaacactacagcagc

SEQ ID NO: 10497 - DNA, 55 bp, Artificial
  Synthetic oligonucleotide
cgacacggtatccgctactcagattgttagacagctacaacacgcctccacgtcg

SEQ ID NO: 10498 - DNA, 59 bp, Artificial
  Synthetic oligonucleotide
gcaggtgttatgggtgacacagtacctacggacctatatattaaaggcactagcgctaa

SEQ ID NO: 10499 - DNA, 53 bp, Artificial
  Synthetic oligonucleotide
ccctgacatcccacagtggtcgcgggacaacagtaacagtcacggtgcacctg

SEQ ID NO: 10500 - DNA, 55 bp, Artificial
  Synthetic oligonucleotide
actgcgtgttcttcgactgcacccacccataagtggtcgcacctaattcgtttgg

SEQ ID NO: 10501 - DNA, 56 bp, Artificial
  Synthetic oligonucleotide
cgtcagtgatcgttctctctggacctagcaacgtgcttaagtgcttcaggtaccgg

SEQ ID NO: 10502 - DNA, 60 bp, Artificial
  Synthetic oligonucleotide
ttgatgccggtcctgtgcgtgtcacggtacacgcagtggtagagccagtaccaagcaccc

SEQ ID NO: 10503 - DNA, 58 bp, Artificial
  Synthetic oligonucleotide
gcattgtccccctaactccggatgtgattgcccagttacatagcctgaatcctcttat

SEQ ID NO: 10504 - DNA, 55 bp, Artificial
  Synthetic oligonucleotide
ggtaaagtctacttacctccagctcaacctgtggcaagagttttggaaactgacg

SEQ ID NO: 10505 - DNA, 60 bp, Artificial
  Synthetic oligonucleotide
tacagaacctatcagtagcactcctattccaggctttaggcgtattgcagctcctagatt

SEQ ID NO: 10506 - DNA, 60 bp, Artificial
  Synthetic oligonucleotide
gccagtcagttgctacaccttctgcacacttacctataaagccttccacattgtcttttg

SEQ ID NO: 10507 - DNA, 60 bp, Artificial
  Synthetic oligonucleotide
caaaggagctgcgtgccctacaacagatgcttatgggcgcactggagctagtgtgtcccc

SEQ ID NO: 10508 - DNA, 51 bp, Artificial
  Synthetic oligonucleotide
tcatttacggggagagggattctagaagtttatatgcgttgctgggagtgt

SEQ ID NO: 10509 - DNA, 56 bp, Artificial
  Synthetic oligonucleotide
tgacgctacagatgcatgttggagctatatagatacttacctcaggggaggattag

SEQ ID NO: 10510 - DNA, 60 bp, Artificial
  Synthetic oligonucleotide
agcagcacgctatgctgagtcacttcccctagcagcgccccatcttctgtctatctcgaa

SEQ ID NO: 10511 - DNA, 52 bp, Artificial
  Synthetic oligonucleotide
agtttcctactagcagcactcctctgcagtctgttaccaggggcgccactgc

SEQ ID NO: 10512 - DNA, 55 bp, Artificial
  Synthetic oligonucleotide
tagcaacaacaaagtatacctgcctccaacctccgtttctcgtgttttgagcacg

SEQ ID NO: 10513 - DNA, 60 bp, Artificial
  Synthetic oligonucleotide
ggagcatccgtaaccctgacagcacagacctccggcggggccacagtgactctgacgctg

SEQ ID NO: 10514 - DNA, 60 bp, Artificial
  Synthetic oligonucleotide
agacacctacaggtatctgcagtcccaagcgataacatgtcagaagcccacaccccctaa

SEQ ID NO: 10515 - DNA, 58 bp, Artificial
  Synthetic oligonucleotide
gcgtctacggatagacataggacagctacatgtgtcttgcgtttactgtaagaaacaa

SEQ ID NO: 10516 - DNA, 60 bp, Artificial
  Synthetic oligonucleotide
ttggcgtgccagacagtgggaaaagtatgctttgcatgagcttaatcgagttcttagaag

SEQ ID NO: 10517 - DNA, 60 bp, Artificial
  Synthetic oligonucleotide
gctcatttaacggcctatgatgtctaaacgtcgccgtgtaaccagagcgagtccagatga

SEQ ID NO: 10518 - DNA, 55 bp, Artificial
  Synthetic oligonucleotide
catacggaatggcgcgatttcccaatcctgcagaacggccatacaaattgcctga

SEQ ID NO: 10519 - DNA, 56 bp, Artificial
  Synthetic oligonucleotide
catagccaactaattattggagagcggaaggcaaatcaggtcagtctacctgactt

SEQ ID NO: 10520 - DNA, 54 bp, Artificial
  Synthetic oligonucleotide
gggaggagtgcagtagtgtagacagtgctattgatagtgagaatcaagatccac

SEQ ID NO: 10521 - DNA, 60 bp, Artificial
  Synthetic oligonucleotide
cacaggacagtagggacaatgtgtctgtggactataagcaaacacagttatgtattatag

SEQ ID NO: 10522 - DNA, 55 bp, Artificial
  Synthetic oligonucleotide
caagaggttttgcagcttagccctcgcctgcagtgtatatctatttcgccacagc

SEQ ID NO: 10523 - DNA, 55 bp, Artificial
  Synthetic oligonucleotide
caggaaacatggagttatgcgtttagatatcagcctgtaccccctttagccacca

SEQ ID NO: 10524 - DNA, 60 bp, Artificial
  Synthetic oligonucleotide
cacggggtggcatctcgcctgcagacgtgggaagctcagttcgatcacttggtagaaaac

SEQ ID NO: 10525 - DNA, 52 bp, Artificial
  Synthetic oligonucleotide
gagagcaactgtacgctagacactttttcacacgagcaggtacagtagggga

SEQ ID NO: 10526 - DNA, 60 bp, Artificial
  Synthetic oligonucleotide
cacagttcgtttatgtgtcaacagtacagcaagtgacctacgaaccatacagcaactact

SEQ ID NO: 10527 - DNA, 58 bp, Artificial
  Synthetic oligonucleotide
tgcaactaactgcacaaacaagcagcggactgtgtgtagttctaacgttgcacctata

SEQ ID NO: 10528 - DNA, 51 bp, Artificial
  Synthetic oligonucleotide
acctttgttgtttccacagacagtagtaatgtaacatcaagcacgcccatt

SEQ ID NO: 10529 - DNA, 60 bp, Artificial
  Synthetic oligonucleotide
ggcctgctattacatctcgtagacatactgtgcgttttagtagagtaggtcaaaaagcca

SEQ ID NO: 10530 - DNA, 54 bp, Artificial
  Synthetic oligonucleotide
gattagtatgggcatgtgtaggccttgaaataggtagagggcagccattaggcg

SEQ ID NO: 10531 - DNA, 60 bp, Artificial
  Synthetic oligonucleotide
acggttggtagagcagtgctgcagcctgtgaaccacagcaccccagcagctaaaaggcgc

SEQ ID NO: 10532 - DNA, 60 bp, Artificial
  Synthetic oligonucleotide
taggcaggaggcggatgctcattatgcgactgtgcaggacctaaaacgaaagtatttagg

SEQ ID NO: 10533 - DNA, 60 bp, Artificial
  Synthetic oligonucleotide
tctgcactatggtacatcattatcagagagctataatgcgtagcatgacaatgtcagcat

SEQ ID NO: 10534 - DNA, 51 bp, Artificial
  Synthetic oligonucleotide
gggtataggcagtacacaagctaggccagggcttggaacctattccccact

SEQ ID NO: 10535 - DNA, 50 bp, Artificial
  Synthetic oligonucleotide
ggtacaatgggcctatgacaatgactatatcgaagattctgacattgcat

SEQ ID NO: 10536 - DNA, 60 bp, Artificial
  Synthetic oligonucleotide
ctgaaccagcgtttcaatgctctagaagaccagctcatggacatatatgaacaagggagt

SEQ ID NO: 10537 - DNA, 55 bp, Artificial
  Synthetic oligonucleotide
tttgctcctgttaccagctcctcgccgtcctcatacgaagaggtcagagaacggg

SEQ ID NO: 10538 - DNA, 60 bp, Artificial
  Synthetic oligonucleotide
cctacatacccaatgggttacatgccgatgggggatggtgttgcttgcattgtgtagata

SEQ ID NO: 10539 - DNA, 60 bp, Artificial
  Synthetic oligonucleotide
ctcctgcatctgtatctagcactgtacgagaagtatccattgctgaacctactacataca

SEQ ID NO: 10540 - DNA, 52 bp, Artificial
  Synthetic oligonucleotide
aatgacacgtgggtaaaagtacatggccatgtggactataaaggcctttcat

SEQ ID NO: 10541 - DNA, 59 bp, Artificial
  Synthetic oligonucleotide
tcctgcatctgtatctagtactgtcaccgaagtatcctctgttgcgtctactgaacccg

SEQ ID NO: 10542 - DNA, 52 bp, Artificial
  Synthetic oligonucleotide
tgctgtgaaaggggctcttgacgggttatagcaaatgctattaaaatggttc

SEQ ID NO: 10543 - DNA, 59 bp, Artificial
  Synthetic oligonucleotide
ataaaatagcaggggagtggacaggaaagtgctgcaactgtagggtatcatgcacggcc

SEQ ID NO: 10544 - DNA, 55 bp, Artificial
  Synthetic oligonucleotide
ttggaggaccagttgttgcattggcaatgtgtgcgtcgggaacatgcaatattat

SEQ ID NO: 10545 - DNA, 60 bp, Artificial
  Synthetic oligonucleotide
catcccaacatgtagaagacattccactagacacttttgttgtatcctctagtgatagtg

SEQ ID NO: 10546 - DNA, 56 bp, Artificial
  Synthetic oligonucleotide
gtgttattgaggccggggctactgtgcctacatttacaggcacacatgggtttgag

SEQ ID NO: 10547 - DNA, 53 bp, Artificial
  Synthetic oligonucleotide
gccgggccacgcttcgcacgcgtagtggtaaacacattggggctagggtacac

SEQ ID NO: 10548 - DNA, 60 bp, Artificial
  Synthetic oligonucleotide
gtgtgtgtaactgaggtagaatccgtgacaggtattgcgtttcgggacatcaatgtgcgt

SEQ ID NO: 10549 - DNA, 58 bp, Artificial
  Synthetic oligonucleotide
agcgacaagacactggcaggagttctgcgtacgttgtaggtgctagctacccatggcg

SEQ ID NO: 10550 - DNA, 55 bp, Artificial
  Synthetic oligonucleotide
ggccttgaagtagagagaggtcagcctcttaatgttggcagtactgggaatgtac

SEQ ID NO: 10551 - DNA, 60 bp, Artificial
  Synthetic oligonucleotide
actagttggttgtaagccagctacaggtgaacactgggatgctgctaagacatgtgctga

SEQ ID NO: 10552 - DNA, 55 bp, Artificial
  Synthetic oligonucleotide
gtaagccagctacaggtgaacactgggatgctgctaagacatgtgctgacagacc

SEQ ID NO: 10553 - DNA, 60 bp, Artificial
  Synthetic oligonucleotide
tgctacgagaacttaccagctgaagtgccagctgaacaagacacagaggaggagcttatc

SEQ ID NO: 10554 - DNA, 60 bp, Artificial
  Synthetic oligonucleotide
agtgtatggtgcaggcagacggtccattacatacacagtgcctagatttacaacaccccg

SEQ ID NO: 10555 - DNA, 52 bp, Artificial
  Synthetic oligonucleotide
aatccagctacccgaccctacaaactaccagacctatgcaacacactggaca

SEQ ID NO: 10556 - DNA, 60 bp, Artificial
  Synthetic oligonucleotide
aacggtcacgaagacagtcagggtcttctaggctccatggcgtctctgctgacgcagtgg

SEQ ID NO: 10557 - DNA, 60 bp, Artificial
  Synthetic oligonucleotide
tcaggccttcgttggttccagacaccattggaccatcagacataatacctgtggacaccc

SEQ ID NO: 10558 - DNA, 60 bp, Artificial
  Synthetic oligonucleotide
gatctgatcttcgttgttttaacacgctcggattaggactctcgccaatggaatcataat

SEQ ID NO: 10559 - DNA, 51 bp, Artificial
  Synthetic oligonucleotide
gactataggccccgtgaggtagcgcaggaggtgggacggtccctctgtgat

SEQ ID NO: 10560 - DNA, 55 bp, Artificial
  Synthetic oligonucleotide
gacctgtggcataaaacacatgcacaggtagatgcgaaaggcctgtatttcgtag

SEQ ID NO: 10561 - DNA, 55 bp, Artificial
  Synthetic oligonucleotide
aagctgtacttaatttaagtccgcggttgcaggctgttagtatctcaccgcagac

SEQ ID NO: 10562 - DNA, 60 bp, Artificial
  Synthetic oligonucleotide
gtcttctggactctaagtatgcagatgagccctggacactgatggataccagtagggagc

SEQ ID NO: 10563 - DNA, 50 bp, Artificial
  Synthetic oligonucleotide
gagcattatccatactctggcaccattgctccaaactctgtgaaacatga

SEQ ID NO: 10564 - DNA, 60 bp, Artificial
  Synthetic oligonucleotide
tcggacacaagaaggcagggtgagggtcagtcgattgggaacaaaagccagcatgcgcac

SEQ ID NO: 10565 - DNA, 54 bp, Artificial
  Synthetic oligonucleotide
attagttccactagacgggcaccacggatcctaccgatgcccaagttatttgcc

SEQ ID NO: 10566 - DNA, 60 bp, Artificial
  Synthetic oligonucleotide
aagatagacaggtgtacagagataggccctatgcagtgtccgtgccatgtaagagctgta

SEQ ID NO: 10567 - DNA, 60 bp, Artificial
  Synthetic oligonucleotide
agcaagcactcctcactattcgactgcataagcactacttggagctgggttgacacaacg

SEQ ID NO: 10568 - DNA, 57 bp, Artificial
  Synthetic oligonucleotide
gctgcgttcgccccaatagtcatctttcaagggggtacgaatcaatgcaagtgctat

SEQ ID NO: 10569 - DNA, 60 bp, Artificial
  Synthetic oligonucleotide
ggcttgtgtggtgccttagaggtattgaggtcaatcgaggccagcctttaggagtcagtg

SEQ ID NO: 10570 - DNA, 59 bp, Artificial
  Synthetic oligonucleotide
cgactacggtgcatataaaagagctgatcagcacagatttgaaggagactgatggagcc

SEQ ID NO: 10571 - DNA, 60 bp, Artificial
  Synthetic oligonucleotide
tctatgagtgttgtagctctgcatggaagtggttgggcccaaaatcagagggatacaggg

SEQ ID NO: 10572 - DNA, 55 bp, Artificial
  Synthetic oligonucleotide
tgtagctctgcatggaagtggttgggcccaaaatcagagggatacaggggtgatg

SEQ ID NO: 10573 - DNA, 51 bp, Artificial
  Synthetic oligonucleotide
ttcgcagagctcagggtacgaacaattgtatttgttggggtaatgaggtat

SEQ ID NO: 10574 - DNA, 60 bp, Artificial
  Synthetic oligonucleotide
cactacaaaagagccgaacaggcacgcatgtctatggcacagtggatagcacatagaagc

SEQ ID NO: 10575 - DNA, 60 bp, Artificial
  Synthetic oligonucleotide
tacacgccaacaatatgtcatgtaaacttaggcaagctttgtgcaaacctgttaaacata

SEQ ID NO: 10576 - DNA, 60 bp, Artificial
  Synthetic oligonucleotide
agcctgtacagtgagtcagagctactcgatgaggaggtgatagaaccatccggccatcta

SEQ ID NO: 10577 - DNA, 60 bp, Artificial
  Synthetic oligonucleotide
atttaagcccacgacttgaagcgctgtgtgtgtcgccacgaggatccagcagtaaaagac

SEQ ID NO: 10578 - DNA, 57 bp, Artificial
  Synthetic oligonucleotide
ggatttcatagatgacacacatgtggaattgcaggtaggggatgaggcgcatggggc

SEQ ID NO: 10579 - DNA, 55 bp, Artificial
  Synthetic oligonucleotide
gcagatggctttagagagcctgcaaaaatcggcctatagttcagaggagtggaca

SEQ ID NO: 10580 - DNA, 60 bp, Artificial
  Synthetic oligonucleotide
ttactggtgacaccatgttttttagtgctaggcgggagcagagctatcttagacacatga

SEQ ID NO: 10581 - DNA, 55 bp, Artificial
  Synthetic oligonucleotide
accaccaggagcacaaatatgacgttgtgtgcggccactggaaccgatagcacgt

SEQ ID NO: 10582 - DNA, 60 bp, Artificial
  Synthetic oligonucleotide
tagattgcttgtaatatggaaactaaatctagacgcaagcgtgctgcaccagatcaatta

SEQ ID NO: 10583 - DNA, 60 bp, Artificial
  Synthetic oligonucleotide
taaatacaagtgattcacaactatttaacagaccatattggcttcgcagagctcagggca

SEQ ID NO: 10584 - DNA, 54 bp, Artificial
  Synthetic oligonucleotide
acagattatactgtaaacaccaaaagatctgtgaaacgaaaacgtaccaaataa

SEQ ID NO: 10585 - DNA, 60 bp, Artificial
  Synthetic oligonucleotide
agatggtacagtgattagaccaagcattgtggtagaaccagtaggtccttcagatattat

SEQ ID NO: 10586 - DNA, 52 bp, Artificial
  Synthetic oligonucleotide
tgcgacaggtcatgacccgtaacactgacttccttacgcgggccccgcaggc

SEQ ID NO: 10587 - DNA, 60 bp, Artificial
  Synthetic oligonucleotide
gtgcaaacctacagacgccatgttcaaaaatcctgcagaaagacctcggaaattgcatga

SEQ ID NO: 10588 - DNA, 54 bp, Artificial
  Synthetic oligonucleotide
aaccggacacatccaattacaatatcgttaccttttgttgtcagtgtaagtcta

SEQ ID NO: 10589 - DNA, 52 bp, Artificial
  Synthetic oligonucleotide
accaccccaacaagttgttgcgaggcgactccgtggacagtgtcaactgtgg

SEQ ID NO: 10590 - DNA, 50 bp, Artificial
  Synthetic oligonucleotide
ggcggcctagcgaggctactgtctacttaccacctgtcccagtgtctaaa

SEQ ID NO: 10591 - DNA, 60 bp, Artificial
  Synthetic oligonucleotide
tgtgtgcggactgcgcgtcacaagaggggcacaatggacacggacaatgacccaggtact

SEQ ID NO: 10592 - DNA, 57 bp, Artificial
  Synthetic oligonucleotide
gccgcctggtgtgacagcccagccatgcttcggctaggctatgatggacagccggtg

SEQ ID NO: 10593 - DNA, 60 bp, Artificial
  Synthetic oligonucleotide
cacctaatctgatcttgacaccgggccatggacagctaatctccagttgactttctgcca

SEQ ID NO: 10594 - DNA, 60 bp, Artificial
  Synthetic oligonucleotide
cacgggaccaagccaggtacaagatggttgcgagacgggtgatcaaaatggccgacagca

SEQ ID NO: 10595 - DNA, 60 bp, Artificial
  Synthetic oligonucleotide
gattcggactgtggttcatacccgtgcgctgtcccatctgcctgtcgctggtgtcagcta

SEQ ID NO: 10596 - DNA, 60 bp, Artificial
  Synthetic oligonucleotide
acaccacacgcagcaccaatatgtcgttgtgtgctaccacagagtctcaaccgttgacca

SEQ ID NO: 10597 - DNA, 51 bp, Artificial
  Synthetic oligonucleotide
gaccgtcggggaggattggtgtgagcagagtgtccagacccacgtctattg

SEQ ID NO: 10598 - DNA, 57 bp, Artificial
  Synthetic oligonucleotide
actatccctttttctaccacatatcatgtccctatacatacgggtcctgatgtagta

SEQ ID NO: 10599 - DNA, 60 bp, Artificial
  Synthetic oligonucleotide
ggatggcgatatgatagacactggttttggagccatggactttgctaatttgcaagctac

SEQ ID NO: 10600 - DNA, 50 bp, Artificial
  Synthetic oligonucleotide
tatagccgaggcagtggaaagtgaaataagtccacgattggacgccatta

SEQ ID NO: 10601 - DNA, 50 bp, Artificial
  Synthetic oligonucleotide
ggtttacaattacatcctctgaaacaactacccctgcaatattggatgta

SEQ ID NO: 10602 - DNA, 60 bp, Artificial
  Synthetic oligonucleotide
tgtgcggtacagtcgcattggacaacgggggtctatgcacactcgcagcggaaagcacat

SEQ ID NO: 10603 - DNA, 58 bp, Artificial
  Synthetic oligonucleotide
tgtaagtgtaacaacctactgcaactagtagtagaagcgtcgcgggagaacctgcgga

SEQ ID NO: 10604 - DNA, 57 bp, Artificial
  Synthetic oligonucleotide
gtcacgaggggagtcagagtctgttaggcaacatggcatctctccttctgacgtggg

SEQ ID NO: 10605 - DNA, 51 bp, Artificial
  Synthetic oligonucleotide
tgattttagttaggggagagcctaatacgcttaagtgctttcgcaataggg

SEQ ID NO: 10606 - DNA, 59 bp, Artificial
  Synthetic oligonucleotide
tggttcatttgacagcttatagcaacctaaccttctaaccactgcatgctactaacaca

SEQ ID NO: 10607 - DNA, 53 bp, Artificial
  Synthetic oligonucleotide
accaactgatacaccagttacatctactaccagtggttctagtgcagttctag

SEQ ID NO: 10608 - DNA, 51 bp, Artificial
  Synthetic oligonucleotide
gagtctttgcagcaacccacgtttcacttaccttccacactttctacccat

SEQ ID NO: 10609 - DNA, 51 bp, Artificial
  Synthetic oligonucleotide
ccactatgtccattgagtcaggtcctgacattccattaccttcgttaccca

SEQ ID NO: 10610 - DNA, 52 bp, Artificial
  Synthetic oligonucleotide
acccaaaggttggtgtgggcctgtacaggcttggaaattggtaggggacagc

SEQ ID NO: 10611 - DNA, 60 bp, Artificial
  Synthetic oligonucleotide
tggcaaccctatgagcatagataggaaacacaagaacctcatacagatgaagtgcccccc

SEQ ID NO: 10612 - DNA, 60 bp, Artificial
  Synthetic oligonucleotide
aaatgtaaacagaagcagctaagacgacgtcgcagaaaataaacgtcatgaggcatgcac

SEQ ID NO: 10613 - DNA, 57 bp, Artificial
  Synthetic oligonucleotide
cccgtcagtgattgtgctttctggaccctgcaacacgcttaagtgcctcaggtacag

SEQ ID NO: 10614 - DNA, 50 bp, Artificial
  Synthetic oligonucleotide
atggataatgacgcagacaatgataagccatcatacagcagaagctacac

SEQ ID NO: 10615 - DNA, 52 bp, Artificial
  Synthetic oligonucleotide
aggttgctgatcccagtcctcctgcacgaacaagagtgtctcgcacacaata

SEQ ID NO: 10616 - DNA, 58 bp, Artificial
  Synthetic oligonucleotide
aggagccacctgatagacagtttctagatgtagttcgtttgggtagacctacatattc

SEQ ID NO: 10617 - DNA, 56 bp, Artificial
  Synthetic oligonucleotide
gttggtgacgaggactagtttaggtgtggacatttaagagcaatcttgacctgtgt

SEQ ID NO: 10618 - DNA, 53 bp, Artificial
  Synthetic oligonucleotide
tgtagatgagacggacacttggcataaagcacaaagtaaggtagactatgatg

SEQ ID NO: 10619 - DNA, 53 bp, Artificial
  Synthetic oligonucleotide
cccaccgcacacaccttttactccattagatcctgcactgcctgacatcatag

SEQ ID NO: 10620 - DNA, 60 bp, Artificial
  Synthetic oligonucleotide
agacctgactgatcaaattgagcactggcacctcaacaggagggagcagaccttgtacca

SEQ ID NO: 10621 - DNA, 60 bp, Artificial
  Synthetic oligonucleotide
tgcatacattaagagaactaatatcttttgccatgctgacacagagcggctcctgaccgt

SEQ ID NO: 10622 - DNA, 52 bp, Artificial
  Synthetic oligonucleotide
aagtgcgtgtcaggacgcaatcctagaactgtatgaacgtgacagtgtacac

SEQ ID NO: 10623 - DNA, 60 bp, Artificial
  Synthetic oligonucleotide
gggtcacacagataatagtcagccaacagtcaagttagcatgtagttttaaggcgtgttc

SEQ ID NO: 10624 - DNA, 53 bp, Artificial
  Synthetic oligonucleotide
ggggacatggttgatacagggtatggcgctatggactttaatgcactgcaggc

SEQ ID NO: 10625 - DNA, 58 bp, Artificial
  Synthetic oligonucleotide
tggactgcaaacataaagcaccctcgcaaattaagtgcccaccccttctcattacaac

SEQ ID NO: 10626 - DNA, 60 bp, Artificial
  Synthetic oligonucleotide
atataagcctctgataacgtgcttctctgtaaatagacatcacgatccaacctatctagc

SEQ ID NO: 10627 - DNA, 60 bp, Artificial
  Synthetic oligonucleotide
agacacctcagcactcatagaggttactcctgaaacgaggcctcccagaataatatccag

SEQ ID NO: 10628 - DNA, 58 bp, Artificial
  Synthetic oligonucleotide
tactgtaaggtgtgtttcttgcctgggattgttgtcagcaactgagaagttaatagct

SEQ ID NO: 10629 - DNA, 60 bp, Artificial
  Synthetic oligonucleotide
ggcgcctttgcaactaaagctgcccccgctactaataaccactaatgtagatgtgatgca

SEQ ID NO: 10630 - DNA, 60 bp, Artificial
  Synthetic oligonucleotide
tggatcctaagcagacccagatgtttattgtgggctgtgtaccttgcacgggggagcact

SEQ ID NO: 10631 - DNA, 60 bp, Artificial
  Synthetic oligonucleotide
atgagtgaggggcacccagatcgtgcagtgaccctatacgatttgtgtgagcaacgtgaa

SEQ ID NO: 10632 - DNA, 60 bp, Artificial
  Synthetic oligonucleotide
aaacgtgtctccgcaacagatgttaattgaaccgccaaaattgcgaagcactgctgctgc

SEQ ID NO: 10633 - DNA, 60 bp, Artificial
  Synthetic oligonucleotide
tctaccagtggctacacggtacccactgttgaaactgctgcaagactgcacaccccccaa

SEQ ID NO: 10634 - DNA, 59 bp, Artificial
  Synthetic oligonucleotide
taggagaatatgacatattgaccactgtagatccaaatgagaccctcggagctacaggg

SEQ ID NO: 10635 - DNA, 60 bp, Artificial
  Synthetic oligonucleotide
agtgaaggctacttatttctcagaggcaagccgagaggtcgctgttacgcctgtgctagt

SEQ ID NO: 10636 - DNA, 57 bp, Artificial
  Synthetic oligonucleotide
gtgcgctttgttttggtataaaatgagcttaagtcctcacacttacacctgtggcac

SEQ ID NO: 10637 - DNA, 57 bp, Artificial
  Synthetic oligonucleotide
agcagatgttgtggctttattgcctgactccccctctgtagtgacccctgacagcat

SEQ ID NO: 10638 - DNA, 55 bp, Artificial
  Synthetic oligonucleotide
tattacacacaggtttctgtacgcgaccctaaattcttagaacagcctcgtgagt

SEQ ID NO: 10639 - DNA, 50 bp, Artificial
  Synthetic oligonucleotide
accagaagcggtaccataataggtcctcgtgtgcactactactttgatct

SEQ ID NO: 10640 - DNA, 52 bp, Artificial
  Synthetic oligonucleotide
cacctgcagtgctcgcaaacgcccctcttcctcaagtaagtctgcaacccct

SEQ ID NO: 10641 - DNA, 58 bp, Artificial
  Synthetic oligonucleotide
gaaaaagtagcacaccattacaaactgtagcctctgcagtaaggcgacggggcttctc

SEQ ID NO: 10642 - DNA, 54 bp, Artificial
  Synthetic oligonucleotide
tggctcactagtctctagtgatgctcaactgtttaacaggccattctggctcca

SEQ ID NO: 10643 - DNA, 55 bp, Artificial
  Synthetic oligonucleotide
cagagttgtaacagagtgcacatcctgtctgtgtgtaattcgacttgttgtgcag

SEQ ID NO: 10644 - DNA, 52 bp, Artificial
  Synthetic oligonucleotide
ttgagtcatggggtcgtcatttatggtctccacccgtccactcgaccttata

SEQ ID NO: 10645 - DNA, 55 bp, Artificial
  Synthetic oligonucleotide
ccctatacctacatacccagtgggtgacctgtagatggggaatggtattgcttgc

SEQ ID NO: 10646 - DNA, 54 bp, Artificial
  Synthetic oligonucleotide
tatttgcctccaatgttactactggtaaggaacccattagcagtacacccaccc

SEQ ID NO: 10647 - DNA, 60 bp, Artificial
  Synthetic oligonucleotide
cacccactgtgtggccctttattccacacacatctattgacacacaacatgctattgtta

SEQ ID NO: 10648 - DNA, 50 bp, Artificial
  Synthetic oligonucleotide
aacgtacctgtacctcagggtgactgtccacctttggaacttgtgtctac

SEQ ID NO: 10649 - DNA, 50 bp, Artificial
  Synthetic oligonucleotide
cggaagcggtacaaaatgtgccctaaaggccttttaataaccgtctctgg

SEQ ID NO: 10650 - DNA, 60 bp, Artificial
  Synthetic oligonucleotide
tccttcggggagcgaggtacctatgagcatatctgggtctagttcagccaattcaagcat

SEQ ID NO: 10651 - DNA, 60 bp, Artificial
  Synthetic oligonucleotide
tctttgtataacacagaggaatggacattgcaacatacaagttgggaactgtgggttaca

SEQ ID NO: 10652 - DNA, 51 bp, Artificial
  Synthetic oligonucleotide
acaacatgtggggactgggtaattgcagcctttggggtgcaccatagtgtg

SEQ ID NO: 10653 - DNA, 60 bp, Artificial
  Synthetic oligonucleotide
gctagacgatgctacaacacaatgctggaactatatggacatttatatgcgcaatgcatt

SEQ ID NO: 10654 - DNA, 55 bp, Artificial
  Synthetic oligonucleotide
cacaatgctggaactatatggacatttatatgcgcaatgcattagatggcaatcc

SEQ ID NO: 10655 - DNA, 51 bp, Artificial
  Synthetic oligonucleotide
ttttggaggactggaactttggtataacccccccagctacaagtagtttgg

SEQ ID NO: 10656 - DNA, 55 bp, Artificial
  Synthetic oligonucleotide
gctgtcgcgcagcttagtccgcgtctcgagtcgatatcgttgtcacctcagcaga

SEQ ID NO: 10657 - DNA, 59 bp, Artificial
  Synthetic oligonucleotide
gcgggaaaaaatcgcggtactgtgcataagttaatgacatcaatgctaaatgtgcaaga

SEQ ID NO: 10658 - DNA, 60 bp, Artificial
  Synthetic oligonucleotide
ttaatcctgtttcagagggccctacgattgattcacctgttgtgacaacaagcagaggct

SEQ ID NO: 10659 - DNA, 59 bp, Artificial
  Synthetic oligonucleotide
agcagaggctccagtgcaatattggaagttgcaccagaccctatacctccaacacgtgt

SEQ ID NO: 10660 - DNA, 60 bp, Artificial
  Synthetic oligonucleotide
gaagcaacagtgcaggccctaaaacgaaagttcgtggctagtcctttgtctgcatgctca

SEQ ID NO: 10661 - DNA, 60 bp, Artificial
  Synthetic oligonucleotide
ggaaggtggacgaactgggattatattatgagcacgatggtgtgcgtgttaattatgtgg

SEQ ID NO: 10662 - DNA, 60 bp, Artificial
  Synthetic oligonucleotide
gtgacactgcccaagggctgctcatacaccagtggcttcttagacggactctgatagtgg

SEQ ID NO: 10663 - DNA, 60 bp, Artificial
  Synthetic oligonucleotide
tacggatgtctatgtcacgcggacgaatgtctattaccatggtggcagttctaggctcct

SEQ ID NO: 10664 - DNA, 60 bp, Artificial
  Synthetic oligonucleotide
gccctcggctaagagccataaagatttcaccacctaagcagagtgcaaagcgcagacttt

SEQ ID NO: 10665 - DNA, 56 bp, Artificial
  Synthetic oligonucleotide
atgtcgaccgcagtgcaaagccacggtccacttccagactgggttgcacggcagac

SEQ ID NO: 10666 - DNA, 53 bp, Artificial
  Synthetic oligonucleotide
agcactgctgtttactatggggcgcccagtggatcgttgacctctacggattc

SEQ ID NO: 10667 - DNA, 56 bp, Artificial
  Synthetic oligonucleotide
tggcgaaggtggggcaatagatttaggaccacccgaagatacaggagtcacatctc

SEQ ID NO: 10668 - DNA, 51 bp, Artificial
  Synthetic oligonucleotide
tcaacgccacacataagtgtcatatcaggctcgaccgatatcggtcagtct

SEQ ID NO: 10669 - DNA, 58 bp, Artificial
  Synthetic oligonucleotide
gataaatccagtgcaccattagatgtagttggtactttgtgtaaatggcctgacttct

SEQ ID NO: 10670 - DNA, 51 bp, Artificial
  Synthetic oligonucleotide
ccaggcgctaaaggtgactgtccaccaatacagttggttaatgcacctata

SEQ ID NO: 10671 - DNA, 52 bp, Artificial
  Synthetic oligonucleotide
gccaaagggcaaatagcaaccgttttcggtttgcagacaggcacaaacacag

SEQ ID NO: 10672 - DNA, 54 bp, Artificial
  Synthetic oligonucleotide
cctgtaagcttagatagaaaacataagcaactagtacaaataaagtgtccacct

SEQ ID NO: 10673 - DNA, 60 bp, Artificial
  Synthetic oligonucleotide
acagtaccgactccaccacacagtccactaccacagccagagagtcctacgcacagtgtg

SEQ ID NO: 10674 - DNA, 56 bp, Artificial
  Synthetic oligonucleotide
tttattcaggtcccgatgtagtgttgcccacaggaccccctacatggccttatgca

SEQ ID NO: 10675 - DNA, 60 bp, Artificial
  Synthetic oligonucleotide
gatgcctatgtaaaacgcaccactatattttatcatgctggaagctctcgcttgcttacc

SEQ ID NO: 10676 - DNA, 60 bp, Artificial
  Synthetic oligonucleotide
tttaagtgaagcgagggtggctctaatagatgatgccacgtatgcatgttggaagtactt

SEQ ID NO: 10677 - DNA, 60 bp, Artificial
  Synthetic oligonucleotide
gaatatgtgtaccctacgtctctcttctgtcatgcacacacggaccgtttgctaacagtg

SEQ ID NO: 10678 - DNA, 60 bp, Artificial
  Synthetic oligonucleotide
ggacctttgtatcaccttagacactccttcagcactattgcaccgtcagcagaatctgtg

SEQ ID NO: 10679 - DNA, 60 bp, Artificial
  Synthetic oligonucleotide
gtatcagaccgtgtggacgctggatcatgccctccactagagcttaagcataaacctata

SEQ ID NO: 10680 - DNA, 59 bp, Artificial
  Synthetic oligonucleotide
gatattgatcagtttcccctcgggagacggtttctagctcagcagggcttaggatgcac

SEQ ID NO: 10681 - DNA, 53 bp, Artificial
  Synthetic oligonucleotide
atggcgcgatttgaagatccaagcaaacggccctacaagttgccagacctgtg

SEQ ID NO: 10682 - DNA, 51 bp, Artificial
  Synthetic oligonucleotide
tatgtgcagtaccagtgacgaagtatccgctactcagattgttagaccact

SEQ ID NO: 10683 - DNA, 54 bp, Artificial
  Synthetic oligonucleotide
tacagggtatattcctttaggtgggcgtcctaatactgttgtggatgtaggtcc

SEQ ID NO: 10684 - DNA, 54 bp, Artificial
  Synthetic oligonucleotide
actatttacaatcccgaaacacaacgtcttgtgtgggcctgtgttggtgttgaa

SEQ ID NO: 10685 - DNA, 57 bp, Artificial
  Synthetic oligonucleotide
tataagcatacaacttgcatagataccatccaccactaactaactcttaaacttgtc

SEQ ID NO: 10686 - DNA, 55 bp, Artificial
  Synthetic oligonucleotide
gttccaaatctcattaagccaagccctcaggtctttccagactttgaaggtgtgc

SEQ ID NO: 10687 - DNA, 60 bp, Artificial
  Synthetic oligonucleotide
aactcagctatttttagtaggctgcaagcctgcaataggtgagcactggatacaagctcg

SEQ ID NO: 10688 - DNA, 55 bp, Artificial
  Synthetic oligonucleotide
tagtaggctgcaagcctgcaataggtgagcactggatacaagctcgttggtgtgt

SEQ ID NO: 10689 - DNA, 60 bp, Artificial
  Synthetic oligonucleotide
tggcagccttgttaggtcttcagctacaggagttatcactgccgtgtaacttttgcggta

SEQ ID NO: 10690 - DNA, 60 bp, Artificial
  Synthetic oligonucleotide
ctataggcactattatgtgagatttgcggatgatgctgctagatatagcacatcaggact

SEQ ID NO: 10691 - DNA, 50 bp, Artificial
  Synthetic oligonucleotide
ccaaccaagatgcagacacagtgacaatagacaacactgtatatcagcta

SEQ ID NO: 10692 - DNA, 60 bp, Artificial
  Synthetic oligonucleotide
gccaaccaaaatgctgccaacatcctccggcttaaggagagcattgctgcaaccaatgac

SEQ ID NO: 10693 - DNA, 60 bp, Artificial
  Synthetic oligonucleotide
acttaaatatggacttggaacaagatggcctacattggctcttgcagcattctctgggga

SEQ ID NO: 10694 - DNA, 60 bp, Artificial
  Synthetic oligonucleotide
cagccaactgatttagttcacattgttgacacacgatctggtctaatagttatcacccct

SEQ ID NO: 10695 - DNA, 60 bp, Artificial
  Synthetic oligonucleotide
ctcaatctatctgtcgggctcagtgatgtgctcggaccctccgtgcttgtgaaggcgaga

SEQ ID NO: 10696 - DNA, 53 bp, Artificial
  Synthetic oligonucleotide
ctccttaaacagattcgaattaggtatctaaatgagcctaattctcgccatac

SEQ ID NO: 10697 - DNA, 60 bp, Artificial
  Synthetic oligonucleotide
ttgaccggatccatctaatacgtagtagctattctgatcctcacagtcatgaggtttatc

SEQ ID NO: 10698 - DNA, 51 bp, Artificial
  Synthetic oligonucleotide
cccagctaacattgggctgttaggttcaaagatcagccagtcgactgcaag

SEQ ID NO: 10699 - DNA, 60 bp, Artificial
  Synthetic oligonucleotide
tttggccacgtgtcaaagtagatacgatatacgggaaggtcattgggcagctacacgctg

SEQ ID NO: 10700 - DNA, 60 bp, Artificial
  Synthetic oligonucleotide
ggttcagggcgataaccaagcaattgcaatcaccactagagtagtacgttcgctcagtca

SEQ ID NO: 10701 - DNA, 60 bp, Artificial
  Synthetic oligonucleotide
aagtccagcctggtattgagcggtgatgcagtggagcagattggatctattatgaggtct

SEQ ID NO: 10702 - DNA, 60 bp, Artificial
  Synthetic oligonucleotide
gccacgtgcacctttcatatgcattttgagggatcctgtacacggtgaatttgcaccggg

SEQ ID NO: 10703 - DNA, 60 bp, Artificial
  Synthetic oligonucleotide
ccaagagctccaacaagccagcacagggaccgaacaacacaacaggatcaaacagaccag

SEQ ID NO: 10704 - DNA, 55 bp, Artificial
  Synthetic oligonucleotide
gcacagggaccgaacaacacaacaggatcaaacagaccagccctcgagccacgga

SEQ ID NO: 10705 - DNA, 60 bp, Artificial
  Synthetic oligonucleotide
gtatgcatcaactgtcgcaatgatagtggagactctgaaatttgtagttagcaggttaga

SEQ ID NO: 10706 - DNA, 60 bp, Artificial
  Synthetic oligonucleotide
tgcgaatgataaagacagttccgaatccgtatgtaatgcaagcaaagtcgccgggaagtg

SEQ ID NO: 10707 - DNA, 56 bp, Artificial
  Synthetic oligonucleotide
acccttaggagaggatgatcaaatgatcactgggcctctgcgctttgaccttgaac

SEQ ID NO: 10708 - DNA, 60 bp, Artificial
  Synthetic oligonucleotide
tctttaggcaggcttaggggtgagctctattcgccatcgtgtagcattccgcagtcggct

SEQ ID NO: 10709 - DNA, 60 bp, Artificial
  Synthetic oligonucleotide
tctaagggcatcatccgtgttgatctgggcttatggagacaacgaagtaaattggactgc

SEQ ID NO: 10710 - DNA, 60 bp, Artificial
  Synthetic oligonucleotide
gaattgagactagaatggcagctttgactctatccactctcagaccggatatcaatagat

SEQ ID NO: 10711 - DNA, 60 bp, Artificial
  Synthetic oligonucleotide
ctcaatcccacaggaagcattgtatcatctgtcatattggactcacaaaaatcgagagtc

SEQ ID NO: 10712 - DNA, 54 bp, Artificial
  Synthetic oligonucleotide
atctggatattgaaatgttccaactgggtcaagcagtggcacgtgacgccgagt

SEQ ID NO: 10713 - DNA, 60 bp, Artificial
  Synthetic oligonucleotide
tcatctgacatctcatcggccctcgacatcattgaattcatactcaacaccgactcccaa

SEQ ID NO: 10714 - DNA, 60 bp, Artificial
  Synthetic oligonucleotide
gacactgaatcccacagcggcacaacatctgacattctgtaccctgaatgtcacctcaat

SEQ ID NO: 10715 - DNA, 54 bp, Artificial
  Synthetic oligonucleotide
ggggagtcaaactactaggaattcccaaacagtacaaagagttagaggatcgat

SEQ ID NO: 10716 - DNA, 60 bp, Artificial
  Synthetic oligonucleotide
tctatctgtcgggctcagtgatgtgctcggaccttctgtgcttgtgaaggcaagaggtgc

SEQ ID NO: 10717 - DNA, 55 bp, Artificial
  Synthetic oligonucleotide
cctgagcttgtcattgtgacacatacagatgagaacaagttcacgtgtcttaccc

SEQ ID NO: 10718 - DNA, 60 bp, Artificial
  Synthetic oligonucleotide
gtgcaattcaactcacaatcagacattctctggcagtccgtatcttcctagttagtgagc

SEQ ID NO: 10719 - DNA, 60 bp, Artificial
  Synthetic oligonucleotide
tgcgattcctacctgtgctcccggataatatgactacctgtcttagagaaacaatcacta

SEQ ID NO: 10720 - DNA, 60 bp, Artificial
  Synthetic oligonucleotide
cgtcatgtaggcaactcaaaatctcagattgcaaccagcaacccatctcggcatcactcg

SEQ ID NO: 10721 - DNA, 55 bp, Artificial
  Synthetic oligonucleotide
caactcaaaatctcagattgcaaccagcaacccatctcggcatcactcgacagcc

SEQ ID NO: 10722 - DNA, 53 bp, Artificial
  Synthetic oligonucleotide
agatggggatcttactccaaaaatggaacagtatcttgcaaggagggcatgcc

SEQ ID NO: 10723 - DNA, 55 bp, Artificial
  Synthetic oligonucleotide
agcacctatcagctaatcccgtattggttgcgctatgagtactctattaatccga

SEQ ID NO: 10724 - DNA, 52 bp, Artificial
  Synthetic oligonucleotide
acaattaccactatatggtgttatagatacaccctgttggaaactacacaca

SEQ ID NO: 10725 - DNA, 55 bp, Artificial
  Synthetic oligonucleotide
ctgacctcacaaaatactgcttaaattggaggtaccaagtcatcatcccctttgc

SEQ ID NO: 10726 - DNA, 60 bp, Artificial
  Synthetic oligonucleotide
cacacggaattggatcagcgaagctcagaattcagatgtggtccgcctattcgagtatgc

SEQ ID NO: 10727 - DNA, 50 bp, Artificial
  Synthetic oligonucleotide
ctactggaaactgaccggcctacccctaccagatgagtgtgactttgacc

SEQ ID NO: 10728 - DNA, 60 bp, Artificial
  Synthetic oligonucleotide
cgtagcatgtatggtccaaggggataaccaagtcatagctgtcactagagaggtccgacc

SEQ ID NO: 10729 - DNA, 55 bp, Artificial
  Synthetic oligonucleotide
gcgctaggtgtacttcggacatccgcaacagggagggtattcttttctactctgc

SEQ ID NO: 10730 - DNA, 55 bp, Artificial
  Synthetic oligonucleotide
aaagtttgtggctctggatcattaccaatcggactggccaaatacactgggaatg

SEQ ID NO: 10731 - DNA, 55 bp, Artificial
  Synthetic oligonucleotide
cagtcagttcagagctccatagggaatctaatagtagcaatcaaatcagtccaag

SEQ ID NO: 10732 - DNA, 60 bp, Artificial
  Synthetic oligonucleotide
ggtcccaatcgagctacaagtggaatgcttcacatgggaccaaaaactctggtgccgtca

SEQ ID NO: 10733 - DNA, 60 bp, Artificial
  Synthetic oligonucleotide
aatgcttcacatgggaccaaaaactctggtgccgtcacttctgtgtgcttgcggactcag

SEQ ID NO: 10734 - DNA, 58 bp, Artificial
  Synthetic oligonucleotide
ctccaatcctcataggaataactacactgagcatagccctcaatatctatctgatcat

SEQ ID NO: 10735 - DNA, 58 bp, Artificial
  Synthetic oligonucleotide
agttcaaattatgctaaagggaagctaacaagaaattacatgatactattgccatggc

SEQ ID NO: 10736 - DNA, 55 bp, Artificial
  Synthetic oligonucleotide
ctctagtgtagtattaggcaatgctgctggcctaggcataatgggagaatacaga

SEQ ID NO: 10737 - DNA, 57 bp, Artificial
  Synthetic oligonucleotide
acaaggctgtagtcagcttatcaaatggagtcagtgtcttaaccagcaaagtgttag

SEQ ID NO: 10738 - DNA, 54 bp, Artificial
  Synthetic oligonucleotide
ggcatgcacccccctatataagggatcatattgtagatcttaacaatgtagatg

SEQ ID NO: 10739 - DNA, 59 bp, Artificial
  Synthetic oligonucleotide
tacagaagtctgaaagattgtaatgatcatagtttaccaattgagtttttaaggctgta

SEQ ID NO: 10740 - DNA, 56 bp, Artificial
  Synthetic oligonucleotide
tcatccacaattagtcaccctcgtatactcagaagatgcatcaatttggatgtcat

SEQ ID NO: 10741 - DNA, 60 bp, Artificial
  Synthetic oligonucleotide
gctacctaatcttcccccaagcaatggaacatgcaacatcaccagtctagatgcatataa

SEQ ID NO: 10742 - DNA, 60 bp, Artificial
  Synthetic oligonucleotide
atcttcccccaagcaatggaacatgcaacatcaccagtctagatgcatataatgttaccc

SEQ ID NO: 10743 - DNA, 55 bp, Artificial
  Synthetic oligonucleotide
cgggctcagtgatgtgctcggaccttctgtgcttgtgaagccgagaggtgcacgg

SEQ ID NO: 10744 - DNA, 52 bp, Artificial
  Synthetic oligonucleotide
ctaaggggatcttcaaaaaactgggtgcaggagttcaggtaatagtggagtt

SEQ ID NO: 10745 - DNA, 60 bp, Artificial
  Synthetic oligonucleotide
agtatgctagcgatgagtcaactgtcctttaacagcaataagaaacgtatcactgactgc

SEQ ID NO: 10746 - DNA, 55 bp, Artificial
  Synthetic oligonucleotide
tcacgtgccagattcactggggcaatctatccaagatcgggattgtaggaacggg

SEQ ID NO: 10747 - DNA, 58 bp, Artificial
  Synthetic oligonucleotide
tcgcgtgccagattcactggggcaatctatccaagatcgggattgtaggaacagggag

SEQ ID NO: 10748 - DNA, 60 bp, Artificial
  Synthetic oligonucleotide
atcgcaatatgggctccaaaccttctaccaggatcctagtacccctgatgctgatcactc

SEQ ID NO: 10749 - DNA, 57 bp, Artificial
  Synthetic oligonucleotide
aggcgcaatatgggctccaaaccttctaccaggatctcagtacctctgatgctgatc

SEQ ID NO: 10750 - DNA, 60 bp, Artificial
  Synthetic oligonucleotide
atcacttgcactcacatcagtacctagcacttggcgtgcttcggacatctgcaacaggga

SEQ ID NO: 10751 - DNA, 56 bp, Artificial
  Synthetic oligonucleotide
tatggtagctctgtggtctatatggtgcagcttcctattttcggtgtgatagacac

SEQ ID NO: 10752 - DNA, 60 bp, Artificial
  Synthetic oligonucleotide
gtctcaatgatgttggagaatctagggttgctctctaggatactatctgtgtgccaagat

SEQ ID NO: 10753 - DNA, 50 bp, Artificial
  Synthetic oligonucleotide
cccgattttaaccagtcgtggattgaagacatctcttttgtgcacgcata

SEQ ID NO: 10754 - DNA, 55 bp, Artificial
  Synthetic oligonucleotide
cactaatctagcacatagacttagggatcggagtacccaggttaagtattcaggg

SEQ ID NO: 10755 - DNA, 55 bp, Artificial
  Synthetic oligonucleotide
ggtgcacggaaggctaggatttgacggtcaataccatgagaaggacttagacacc

SEQ ID NO: 10756 - DNA, 60 bp, Artificial
  Synthetic oligonucleotide
ctcagcgtcagtggagggtgcacaaaatgtgacagcggagatgagcagtttacttggttc

SEQ ID NO: 10757 - DNA, 60 bp, Artificial
  Synthetic oligonucleotide
ggccacgatatcccaccctatcattcactcaaggttgaatgcagtaggcctaattaacca

SEQ ID NO: 10758 - DNA, 58 bp, Artificial
  Synthetic oligonucleotide
ttcaaactcgcagccctttgtcacgggggagattctatcacaattccctatcagggat

SEQ ID NO: 10759 - DNA, 50 bp, Artificial
  Synthetic oligonucleotide
tactatccctaaatatgtagccactcaggggtatctgatatcgaactttg

SEQ ID NO: 10760 - DNA, 58 bp, Artificial
  Synthetic oligonucleotide
agggagagcctgcttgcctatccgagatatagtaacttcatctcgactgagtgttacc

SEQ ID NO: 10761 - DNA, 60 bp, Artificial
  Synthetic oligonucleotide
caacatcgccacgactatagccaagagcatagagagagggtttgacaggtaccttgctta

SEQ ID NO: 10762 - DNA, 58 bp, Artificial
  Synthetic oligonucleotide
tacctcacctcaagtcagaacataactgaggagttttaccaatcgacatgtagtgcag

SEQ ID NO: 10763 - DNA, 60 bp, Artificial
  Synthetic oligonucleotide
ggctggtgtcaaaaactgtggaccattgaagctatatcattattagatctaatatctctc

SEQ ID NO: 10764 - DNA, 60 bp, Artificial
  Synthetic oligonucleotide
acagtggttggatagaccttgcgtcgatagccctcactgttggcactgcgtcgtccctat

SEQ ID NO: 10765 - DNA, 55 bp, Artificial
  Synthetic oligonucleotide
gctcagtgatgtgctcggaccctccgtgcttgtgaaggcgagaggtgcacggact

SEQ ID NO: 10766 - DNA, 60 bp, Artificial
  Synthetic oligonucleotide
cagttatgccatgggagtcggtaccgtcctagatgtccaaatgcgaaattacacttatgc

SEQ ID NO: 10767 - DNA, 60 bp, Artificial
  Synthetic oligonucleotide
gtccagtacaagacattggtgctcgagtgagagatccatttactcgacaacctgcatcat

SEQ ID NO: 10768 - DNA, 50 bp, Artificial
  Synthetic oligonucleotide
ttcgaactccagttggcaagacggcaggggttgctatcaaacagatacta

SEQ ID NO: 10769 - DNA, 55 bp, Artificial
  Synthetic oligonucleotide
cgtccaaccaatatgtttccatggggattctcgttcagaccgcgtcagggtatcc

SEQ ID NO: 10770 - DNA, 51 bp, Artificial
  Synthetic oligonucleotide
gtataccccagatgtcaacggctccgaatggagtgaatcacgctatgatac

SEQ ID NO: 10771 - DNA, 60 bp, Artificial
  Synthetic oligonucleotide
aggaaatcaatggaagcaatcgccaagatgagaatgcttaccaagatgctcagtcaacct

SEQ ID NO: 10772 - DNA, 60 bp, Artificial
  Synthetic oligonucleotide
tttcgagttgcgcgcccattgcttgctgcacgatctagattagtaagagcagttcagatg

SEQ ID NO: 10773 - DNA, 60 bp, Artificial
  Synthetic oligonucleotide
agtctttgttactcctgagcttgtcattgtgacacatacagatgagaacaagttcacgtg

SEQ ID NO: 10774 - DNA, 50 bp, Artificial
  Synthetic oligonucleotide
cggtcacatcagacattgttccaaggtatgcattcgtcaatggaggagtg

SEQ ID NO: 10775 - DNA, 54 bp, Artificial
  Synthetic oligonucleotide
ctaagagcatcgtccgtgttaatctgggcttatggggacaacgaagtaaactgg

SEQ ID NO: 10776 - DNA, 51 bp, Artificial
  Synthetic oligonucleotide
tggtctctcgatcaatggcacaaaaatctgtagagatctaatccaccatga

SEQ ID NO: 10777 - DNA, 60 bp, Artificial
  Synthetic oligonucleotide
gcgcactcactacgccgtatatggcccttaaaggctcagttattgccaattgtaagataa

SEQ ID NO: 10778 - DNA, 55 bp, Artificial
  Synthetic oligonucleotide
ggtgttgtctcttcacttgagagttttgtctacgcccaattacagtatggtgacc

SEQ ID NO: 10779 - DNA, 60 bp, Artificial
  Synthetic oligonucleotide
caccccgtatgcaggagtgcaattcaactcacaatcagacattctctggcagtccgcatt

SEQ ID NO: 10780 - DNA, 54 bp, Artificial
  Synthetic oligonucleotide
gggggggtattgagggattatgtcagaagctatggacaatgatctcaattgctg

SEQ ID NO: 10781 - DNA, 50 bp, Artificial
  Synthetic oligonucleotide
ccttaaattaattaagcttgcaggtgacaataaccttaacaatctgagtg

SEQ ID NO: 10782 - DNA, 60 bp, Artificial
  Synthetic oligonucleotide
tttatcccggcgcctactacaggatcaggttgcactcgaataccctcatttgacatgagt

SEQ ID NO: 10783 - DNA, 60 bp, Artificial
  Synthetic oligonucleotide
aagataggccaagtctttgttactcctgagcttgtcattgtgactcatacagacgagaac

SEQ ID NO: 10784 - DNA, 53 bp, Artificial
  Synthetic oligonucleotide
gagtcaactgtcttttaacagcaataagaaacgtatcaccgactgtaaagaga

SEQ ID NO: 10785 - DNA, 60 bp, Artificial
  Synthetic oligonucleotide
gggagagattctcagcgtcagtggagggtgcacaaaatgtgacagcggagatgagcagtt

SEQ ID NO: 10786 - DNA, 60 bp, Artificial
  Synthetic oligonucleotide
cagtgacccgagaagtaaatccagatgactcagaagatgcggtcttagatgaattacata

SEQ ID NO: 10787 - DNA, 52 bp, Artificial
  Synthetic oligonucleotide
tgacaaccaagcaattgcaatcaccactagagtagtacgctcgctcagtcat

SEQ ID NO: 10788 - DNA, 50 bp, Artificial
  Synthetic oligonucleotide
agcaagtgcaggacctacatctgctagggatggtataagagatgccatgg

SEQ ID NO: 10789 - DNA, 60 bp, Artificial
  Synthetic oligonucleotide
cgctacttgcagcatactattgatatggcattgattgaagcgggaggccaacctgtaaga

SEQ ID NO: 10790 - DNA, 60 bp, Artificial
  Synthetic oligonucleotide
actcataaggtaggccaagtctttgttactcctgagcttgtcattgtgacacatacagat

SEQ ID NO: 10791 - DNA, 60 bp, Artificial
  Synthetic oligonucleotide
atcaagagctctatggacccagaagaggatagcttgttcttaggggaaggatcagggtca

SEQ ID NO: 10792 - DNA, 59 bp, Artificial
  Synthetic oligonucleotide
tgatctcctatgatgctctctctgcttccgtatacaattattccagtgagggattcggt

SEQ ID NO: 10793 - DNA, 60 bp, Artificial
  Synthetic oligonucleotide
agcatcaggttgtcaagatataggcaaatcataccagaacgtacaaatcggtgtactaga

SEQ ID NO: 10794 - DNA, 60 bp, Artificial
  Synthetic oligonucleotide
atcatactaggcaaaatcgtacagtgtcatgtcgcaatgggggtacatcagccttacatg

SEQ ID NO: 10795 - DNA, 52 bp, Artificial
  Synthetic oligonucleotide
tacagacataacatttggagtcgaggacactgctgatcgggacaacaagaac

SEQ ID NO: 10796 - DNA, 60 bp, Artificial
  Synthetic oligonucleotide
cacactgtacgcaaacacatcacgtgttaatcccaccataatgtactcaaatacctcaga

SEQ ID NO: 10797 - DNA, 60 bp, Artificial
  Synthetic oligonucleotide
agcgattgcagttggagctgttgccctagctacgtctgcacagataacagcggggattgc

SEQ ID NO: 10798 - DNA, 60 bp, Artificial
  Synthetic oligonucleotide
tgcccagagtagctcacgagatcttagataactcacttacaggtgtaagagaagctatag

SEQ ID NO: 10799 - DNA, 60 bp, Artificial
  Synthetic oligonucleotide
tggtcttacatgaacattatagtgtgatcaggattgcataccttgttggggataaggacg

SEQ ID NO: 10800 - DNA, 60 bp, Artificial
  Synthetic oligonucleotide
gatctagacaattgacacatcaccgacctagccatagctacacaacaatcacaaactggg

SEQ ID NO: 10801 - DNA, 50 bp, Artificial
  Synthetic oligonucleotide
tgcctgggaggaacgacacaaagcatccaacactagggggaaagagacca

SEQ ID NO: 10802 - DNA, 51 bp, Artificial
  Synthetic oligonucleotide
gacgaccacctggagatgggaattggagtacgctagcagcagatccttatg

SEQ ID NO: 10803 - DNA, 60 bp, Artificial
  Synthetic oligonucleotide
ttctccttgtcaccgtaatcttacaaatttctggtcacattgacacgactgctctaacca

SEQ ID NO: 10804 - DNA, 57 bp, Artificial
  Synthetic oligonucleotide
ccctgccgttgattgggcaagaattcgtcgagaggagaataggcttagtgatcgcct

SEQ ID NO: 10805 - DNA, 60 bp, Artificial
  Synthetic oligonucleotide
gcaagtcatgcagggaagttgttcaaggagaacggagtgaccctagatcagctgagtctc

SEQ ID NO: 10806 - DNA, 60 bp, Artificial
  Synthetic oligonucleotide
gcatgtgagagggttagcacccgatgaaaaatgcagggctcttacagatgcaatcttgca

SEQ ID NO: 10807 - DNA, 60 bp, Artificial
  Synthetic oligonucleotide
acaccctatcagcatggttgcactatcacctctcggtgctttggtagcttgctacaaggg

SEQ ID NO: 10808 - DNA, 60 bp, Artificial
  Synthetic oligonucleotide
cgatatccttgttagatgtagtatctgttaagactcgttgtcagatgacctctctattaa

SEQ ID NO: 10809 - DNA, 59 bp, Artificial
  Synthetic oligonucleotide
agggtaatagatggtggtgaaggactatcaatggagaccacagatgcaactcaaaagac

SEQ ID NO: 10810 - DNA, 60 bp, Artificial
  Synthetic oligonucleotide
tggatactgatcgctaaagcagttacagctcccgacactgccgaggaaagtgaaactaga

SEQ ID NO: 10811 - DNA, 60 bp, Artificial
  Synthetic oligonucleotide
cctccatatcattggagcatcgagaggtcaataagcccggataaaactgagatcgtcaac

SEQ ID NO: 10812 - DNA, 60 bp, Artificial
  Synthetic oligonucleotide
ccttacggagatcaagctatgtgccaagctccagaatgtacatctgctacacaagagggg

SEQ ID NO: 10813 - DNA, 54 bp, Artificial
  Synthetic oligonucleotide
aagatagcaactccaatcccctcaaattcaagcggcacaccagtcgttataaga

SEQ ID NO: 10814 - DNA, 56 bp, Artificial
  Synthetic oligonucleotide
attatgaacacccaattgaacaatatgtcttgtcagatccttgataaccagcttgc

SEQ ID NO: 10815 - DNA, 60 bp, Artificial
  Synthetic oligonucleotide
tctgtaccaacaaatgggtgaactggctccttatatggttatcttagagaactcgatcca

SEQ ID NO: 10816 - DNA, 55 bp, Artificial
  Synthetic oligonucleotide
gcctgtgagtggggactatgtccaggggttcatgaactatgtggtaccttattac

SEQ ID NO: 10817 - DNA, 60 bp, Artificial
  Synthetic oligonucleotide
ccaatcaactcgagacagcctccaaattaagggcaacaagccagcagatgcaccaggagc

SEQ ID NO: 10818 - DNA, 59 bp, Artificial
  Synthetic oligonucleotide
ctgtgagatcagccgagtggcagctgtgttgcagccttctgttccgagagagttcatga

SEQ ID NO: 10819 - DNA, 60 bp, Artificial
  Synthetic oligonucleotide
tagggccgaaagtatcactgattgatacatccagtactatcactatcccagctaatattg

SEQ ID NO: 10820 - DNA, 60 bp, Artificial
  Synthetic oligonucleotide
ctatgatagaacccttagttcttgcactactccaactcaaggacgaagctagaattctga

SEQ ID NO: 10821 - DNA, 60 bp, Artificial
  Synthetic oligonucleotide
ggaccccccgggcatcataacgcaacattatggagaagctgtgtccttaatagataggca

SEQ ID NO: 10822 - DNA, 60 bp, Artificial
  Synthetic oligonucleotide
ggctcattcctaggatcaatgacttagcatgtgaagtctgggctacccgcctccaagcaa

SEQ ID NO: 10823 - DNA, 60 bp, Artificial
  Synthetic oligonucleotide
ctatatctgtcggcctatgaggtaggagtcaggatcagttcagtggtgcaaggtgataat

SEQ ID NO: 10824 - DNA, 60 bp, Artificial
  Synthetic oligonucleotide
catacgagatattgcccgcactatgtcagagttaagctcctaaaatctgatatcaagaga

SEQ ID NO: 10825 - DNA, 60 bp, Artificial
  Synthetic oligonucleotide
acacaagagagccgggatcaggatgggttagccaatgagaaacatgagactgttgcgtca

SEQ ID NO: 10826 - DNA, 60 bp, Artificial
  Synthetic oligonucleotide
agagataccgaacccagagcatccaatgcatcacgtctgcttccatcaagagagaagcct

SEQ ID NO: 10827 - DNA, 60 bp, Artificial
  Synthetic oligonucleotide
ttaagaccagcattccgaagttatgcaaggccgagtcgtgaatttcaccgatcaacaggc

SEQ ID NO: 10828 - DNA, 50 bp, Artificial
  Synthetic oligonucleotide
cagtagcacttgacgagtacagtaggttggaattcgggacattgactgtg

SEQ ID NO: 10829 - DNA, 57 bp, Artificial
  Synthetic oligonucleotide
cacatcgaagactgggacacacaaatcagggcccccccaagccttgccggggagcaa

SEQ ID NO: 10830 - DNA, 60 bp, Artificial
  Synthetic oligonucleotide
tacttgagtctggacctatcactgacacaatagatctgaggagcaacaatcggattcttt

SEQ ID NO: 10831 - DNA, 50 bp, Artificial
  Synthetic oligonucleotide
gaggtgatagaaaacacatacccagacatggtgaagctattggacaactt

SEQ ID NO: 10832 - DNA, 60 bp, Artificial
  Synthetic oligonucleotide
cagccgaggacgccaaacttgtctccgagattgctgcgcaggctaatgacgacagagcta

SEQ ID NO: 10833 - DNA, 60 bp, Artificial
  Synthetic oligonucleotide
tgtcccaactgatgatctgccgtctcggagtgtgcttcgctccatgattaagtccagcaa

SEQ ID NO: 10834 - DNA, 60 bp, Artificial
  Synthetic oligonucleotide
caagtcccctagtcgctccctcaaatctgccgtgagaattgctacagtgtactcttgggc

SEQ ID NO: 10835 - DNA, 60 bp, Artificial
  Synthetic oligonucleotide
gtttcacgcttatccggttcttgcagatagtaggcaaagagaattagtatccagaatcgc

SEQ ID NO: 10836 - DNA, 50 bp, Artificial
  Synthetic oligonucleotide
tcccctagggcctccaatcgggcgagcatttgggtccctgcccttaggtg

SEQ ID NO: 10837 - DNA, 55 bp, Artificial
  Synthetic oligonucleotide
gggatcgtagcactcaagtgaaatactcaggtacatcccttgtccgagtggcaag

SEQ ID NO: 10838 - DNA, 60 bp, Artificial
  Synthetic oligonucleotide
ccctgcaagtagcgagctgtatgtcatatgtgatggtgtcaagacacgtattagggttaa

SEQ ID NO: 10839 - DNA, 58 bp, Artificial
  Synthetic oligonucleotide
cggctaccttatcaaacgccacgagtcttgtgctatctgtgagacgggctcaagtcac

SEQ ID NO: 10840 - DNA, 60 bp, Artificial
  Synthetic oligonucleotide
gtaccggccatcctgcatcgagtcaagagcataacagaccagagcttaacggtggtgacc

SEQ ID NO: 10841 - DNA, 59 bp, Artificial
  Synthetic oligonucleotide
ggttcatgtctaccagccgaacagcaatcatccccatatctcagctcaatcctatgctg

SEQ ID NO: 10842 - DNA, 52 bp, Artificial
  Synthetic oligonucleotide
ctaacctgacggagctggaatgactgacctctaatcgagactacaccgccgc

SEQ ID NO: 10843 - DNA, 60 bp, Artificial
  Synthetic oligonucleotide
gccattaagtctcttcaaaccagtgacaagctagaacagaactgctcgtggagtgctgca

SEQ ID NO: 10844 - DNA, 60 bp, Artificial
  Synthetic oligonucleotide
taccctccaactacagctcttaagaggcacacccaacaagctctgatggaactcagtacg

SEQ ID NO: 10845 - DNA, 55 bp, Artificial
  Synthetic oligonucleotide
tagatggaattttgcggtattctgtcttcggattgctgttagcgaggatgccaac

SEQ ID NO: 10846 - DNA, 53 bp, Artificial
  Synthetic oligonucleotide
ggtgtaatccagtctgctcaagaattcgagtcatcccgagacgcgagttatgt

SEQ ID NO: 10847 - DNA, 60 bp, Artificial
  Synthetic oligonucleotide
cgaaacaaacaaccaatctagagagcgtatctgacttgacagagccgaccagctactcaa

SEQ ID NO: 10848 - DNA, 60 bp, Artificial
  Synthetic oligonucleotide
tgccatccggatagctatggtgtatacgtgggcctacgggactgatgagatatcgtggat

SEQ ID NO: 10849 - DNA, 56 bp, Artificial
  Synthetic oligonucleotide
atacgctatcagatgctttgcttttgcttacgaattatcgctagtaattctgcgag

SEQ ID NO: 10850 - DNA, 60 bp, Artificial
  Synthetic oligonucleotide
aggactctgacaccaatgccaaccagtaccaacttaacccacaggcttgatgatggatta

SEQ ID NO: 10851 - DNA, 60 bp, Artificial
  Synthetic oligonucleotide
tacgccatttcctaatcactgagatcaaacgtgctacttcaatgggctccaacaccacta

SEQ ID NO: 10852 - DNA, 60 bp, Artificial
  Synthetic oligonucleotide
acaggaaacatgcccagtctgagtgtacgccttatcttgctcctactcccccatattatc

SEQ ID NO: 10853 - DNA, 60 bp, Artificial
  Synthetic oligonucleotide
taaccaaatcactactcgcaatgtctcaattagcacctcgggtctcagaatatcaagggc

SEQ ID NO: 10854 - DNA, 60 bp, Artificial
  Synthetic oligonucleotide
attagtgcaaccgtgaattactccgctgcagtgtgtgaacttatattgtggggctatgat

SEQ ID NO: 10855 - DNA, 60 bp, Artificial
  Synthetic oligonucleotide
cctgatatttgtcatgggctatttaggcgggcctacattcgtgcatgaagtagtgaggat

SEQ ID NO: 10856 - DNA, 60 bp, Artificial
  Synthetic oligonucleotide
tctctctgagaatgcgcaaccagttacccccagacctcaacagtcccagctctctccccc

SEQ ID NO: 10857 - DNA, 60 bp, Artificial
  Synthetic oligonucleotide
tatggctcggacacctgtctcattaatgcagactacaccgtcgttttttccgcacaggac

SEQ ID NO: 10858 - DNA, 60 bp, Artificial
  Synthetic oligonucleotide
cagcatgatattggggatgttaaagaccctgagcatagccaccgcagggccaaccgcagc

SEQ ID NO: 10859 - DNA, 60 bp, Artificial
  Synthetic oligonucleotide
gtcaatcgggaacctgcaacatagaggttccaaaatgttccacttatgggcatgcttgta

SEQ ID NO: 10860 - DNA, 60 bp, Artificial
  Synthetic oligonucleotide
taggactgttagggaggatactagagtcaggacctgtcacagacaccattgagttgcgtc

SEQ ID NO: 10861 - DNA, 57 bp, Artificial
  Synthetic oligonucleotide
ccttggatagtaaatgcagaaggagacattgtggaacagaggcccgtcacggagtac

SEQ ID NO: 10862 - DNA, 60 bp, Artificial
  Synthetic oligonucleotide
gcggggggcattgcatagcgggtcatcttactatgctatgattggagacatgcaggcata

SEQ ID NO: 10863 - DNA, 60 bp, Artificial
  Synthetic oligonucleotide
cacagtataatcctcatgttggacagcttatctgggcacacgatgtatccatcacggggt

SEQ ID NO: 10864 - DNA, 60 bp, Artificial
  Synthetic oligonucleotide
caatccacaacctgatactaccagacagtggctccgcacgatggcagcagcccacaacgt

SEQ ID NO: 10865 - DNA, 60 bp, Artificial
  Synthetic oligonucleotide
cccctttaaccctccacatagcaatgcacgtgaggcactcgatgacaacttaaatagcga

SEQ ID NO: 10866 - DNA, 59 bp, Artificial
  Synthetic oligonucleotide
atcttctctcgccactaccggaaagtgctattgagaactctacggctgttatccctcta

SEQ ID NO: 10867 - DNA, 59 bp, Artificial
  Synthetic oligonucleotide
cccagaagatatcagtgccgttgtggggaatgccctagaatctgcaaacagtgtgaggg

SEQ ID NO: 10868 - DNA, 60 bp, Artificial
  Synthetic oligonucleotide
gagattgttctgtccaattgattccgccggataacatgacacttggagcagaatcaaggc

SEQ ID NO: 10869 - DNA, 60 bp, Artificial
  Synthetic oligonucleotide
cttgactctccaccagaagacaacccgccaatgagagtgccttatgtcgggtcgcgcact

SEQ ID NO: 10870 - DNA, 60 bp, Artificial
  Synthetic oligonucleotide
gacataactatccgaaattggacactcctcggattccctctcagaaagctggttgctgcc

SEQ ID NO: 10871 - DNA, 58 bp, Artificial
  Synthetic oligonucleotide
tcacggaaaggatgctggtaatgagctggagacgtctatggctactcatggcaacaag

SEQ ID NO: 10872 - DNA, 50 bp, Artificial
  Synthetic oligonucleotide
tagtcctaggcaatgctgcaggactaggtataatgggtgagtatagaggt

SEQ ID NO: 10873 - DNA, 51 bp, Artificial
  Synthetic oligonucleotide
aacatctgcttaactaggacagatcgtgggtggtattgtgacaatgcaggc

SEQ ID NO: 10874 - DNA, 59 bp, Artificial
  Synthetic oligonucleotide
atcaaatagagtgttctgtgacacaatgaacagtttaactctgcctactgacgttaact

SEQ ID NO: 10875 - DNA, 51 bp, Artificial
  Synthetic oligonucleotide
ttgctatgagtaaactattagccgagattaacaatgatgacataaagagat

SEQ ID NO: 10876 - DNA, 54 bp, Artificial
  Synthetic oligonucleotide
accgagacctgggtgaacaggcacgatacttggcactcttagaggctccccagg

SEQ ID NO: 10877 - DNA, 60 bp, Artificial
  Synthetic oligonucleotide
tgccacaattgagggactgattaccacagtccgcattatggatccaggtgtccccagtaa

SEQ ID NO: 10878 - DNA, 60 bp, Artificial
  Synthetic oligonucleotide
agaatggtacagtggttttgtctcagaagtgactccgaagcacctgcgaatgtcccgtca

SEQ ID NO: 10879 - DNA, 55 bp, Artificial
  Synthetic oligonucleotide
tatgcactccgtgttgcgacgcatccctggccttgtgttcggtggcatgtccgct

SEQ ID NO: 10880 - DNA, 60 bp, Artificial
  Synthetic oligonucleotide
ctccgctggcttgtaagtgaatcgtctacaactcctatgagacagggtgccatcatatca

SEQ ID NO: 10881 - DNA, 60 bp, Artificial
  Synthetic oligonucleotide
accaatatttctggatccatcagacgactatatttccaaccaatactcagagctcctact

SEQ ID NO: 10882 - DNA, 60 bp, Artificial
  Synthetic oligonucleotide
gcagagtatgtgatcttctaacatcaatctactctggattaagccctgaccaaagtgcag

SEQ ID NO: 10883 - DNA, 59 bp, Artificial
  Synthetic oligonucleotide
caaacactacatttgcatactggacaatcatgttgcccgagagagatagatgggagtat

SEQ ID NO: 10884 - DNA, 54 bp, Artificial
  Synthetic oligonucleotide
gtgtcaccttaactctcctatcgttaaaggtaaaatagcacaattacacacgat

SEQ ID NO: 10885 - DNA, 60 bp, Artificial
  Synthetic oligonucleotide
gttcctgatggacaggaaggtaattctccctagagttgcacatgatattctagataattc

SEQ ID NO: 10886 - DNA, 56 bp, Artificial
  Synthetic oligonucleotide
catcgagagtagtgacttcaggggggtgcatattgtccgcggaagaagctgtgaag

SEQ ID NO: 10887 - DNA, 60 bp, Artificial
  Synthetic oligonucleotide
cagcgaaccactccctctgagcaagttcccgcggccaacctggactccaggagtatgtca

SEQ ID NO: 10888 - DNA, 59 bp, Artificial
  Synthetic oligonucleotide
tatagcgctgacaatctcacatccactcatttgggcaagactccaggcatctacagtac

SEQ ID NO: 10889 - DNA, 59 bp, Artificial
  Synthetic oligonucleotide
gtcttagtagatcagcaacccattaaatcatatctctcgacatcgggctcttgtaagtc

SEQ ID NO: 10890 - DNA, 60 bp, Artificial
  Synthetic oligonucleotide
ccggatagggagtacgacttcagagatctcacttggtgcatcaacccgccagagaggatc

SEQ ID NO: 10891 - DNA, 60 bp, Artificial
  Synthetic oligonucleotide
ctcccttagcccacctgcacatgcattaatgactaagcctgggatgtatctagagactag

SEQ ID NO: 10892 - DNA, 60 bp, Artificial
  Synthetic oligonucleotide
cgagaaccaacaactgtgaacttgtcgagtatcgtcctccatttgcatactgacgtgtcc

SEQ ID NO: 10893 - DNA, 58 bp, Artificial
  Synthetic oligonucleotide
tacatacttccctgccgatcagagtccggctcaacgcaactttataccccagcctacg

SEQ ID NO: 10894 - DNA, 60 bp, Artificial
  Synthetic oligonucleotide
tgtggtctgataggagtcaacgggatagaactgtatgctaacaggaagggggatgatgcc

SEQ ID NO: 10895 - DNA, 54 bp, Artificial
  Synthetic oligonucleotide
tgcagtacgagacactgactagaactctcagaaagccggtgaaagataacattg

SEQ ID NO: 10896 - DNA, 60 bp, Artificial
  Synthetic oligonucleotide
ctagtccattgcgacatggagggaggggaccataaggatgatcaagttgtactgcatgag

SEQ ID NO: 10897 - DNA, 60 bp, Artificial
  Synthetic oligonucleotide
atgaggtctcagcaaagtttggttacgcttatggtcgagacactgataacaatgaacaca

SEQ ID NO: 10898 - DNA, 60 bp, Artificial
  Synthetic oligonucleotide
gaaaactgtctatcagggaatatcacgcagtgtccgaagaccgtcgttacatcagacata

SEQ ID NO: 10899 - DNA, 52 bp, Artificial
  Synthetic oligonucleotide
atataacatttgacaaaccatatgcagcactgtacccatcagtaggaccggg

SEQ ID NO: 10900 - DNA, 60 bp, Artificial
  Synthetic oligonucleotide
ggaggcatcacagattgcacagacacgcgcaaatttcacgttagatagcttaaagattct

SEQ ID NO: 10901 - DNA, 60 bp, Artificial
  Synthetic oligonucleotide
ttcaagcatgggtagctgcaataaagagtatgacggcaccagatactgctgcggagagtg

SEQ ID NO: 10902 - DNA, 60 bp, Artificial
  Synthetic oligonucleotide
ggtactgctgactcggcttccaattattcagtttgcaccgcttgcgttgacaatatcaca

SEQ ID NO: 10903 - DNA, 58 bp, Artificial
  Synthetic oligonucleotide
cttcgagcttagatcttgtactgctaatgtctccttacaatctggcacttggagggaa

SEQ ID NO: 10904 - DNA, 55 bp, Artificial
  Synthetic oligonucleotide
cttcgaagtttcatagtttacccaagatacagcaattttgtgtcaacagaggcct

SEQ ID NO: 10905 - DNA, 55 bp, Artificial
  Synthetic oligonucleotide
gtttcatagtttacccaagatacagcaattttgtgtcaacagaggcttacctcgt

SEQ ID NO: 10906 - DNA, 60 bp, Artificial
  Synthetic oligonucleotide
ctaggtcctggtcctgacattaagaacgcaaacagagtcttggccgcactgaatggattc

SEQ ID NO: 10907 - DNA, 60 bp, Artificial
  Synthetic oligonucleotide
atcagccactcctgacattgagaggatgataaaactagggcgagctgtacaccaggtcct

SEQ ID NO: 10908 - DNA, 60 bp, Artificial
  Synthetic oligonucleotide
tcaatgctggcagcggccatcaaagacctctctccattagatctttcagcccagttggcc

SEQ ID NO: 10909 - DNA, 60 bp, Artificial
  Synthetic oligonucleotide
aacacgacgaatagcccaattacgggctacacgatggagatcagagattgcagtcctatt

SEQ ID NO: 10910 - DNA, 54 bp, Artificial
  Synthetic oligonucleotide
ttctgcaggtccgtcgaaaggtgcctctccctacccatatgttcggcaagagta

SEQ ID NO: 10911 - DNA, 55 bp, Artificial
  Synthetic oligonucleotide
agtctacactgacttgtttcctctcggtgtctcatacgagtactcagtgactgcc

SEQ ID NO: 10912 - DNA, 57 bp, Artificial
  Synthetic oligonucleotide
gggtacacctctaacggcataacagacttatcagttgtgacacctaaccaggaccca

SEQ ID NO: 10913 - DNA, 60 bp, Artificial
  Synthetic oligonucleotide
tggccaggcgactaagaaatacgatgtgggtgcatctaacacatggaaggcctatatatg

SEQ ID NO: 10914 - DNA, 60 bp, Artificial
  Synthetic oligonucleotide
ctacgtgacgcaaggaggagagattgctcttaacaagctgtcgcagccagtaccccaccc

SEQ ID NO: 10915 - DNA, 60 bp, Artificial
  Synthetic oligonucleotide
gcacgagctagacttaagcgctccagcacgatacgatgcatacacgttagagcaagcccg

SEQ ID NO: 10916 - DNA, 60 bp, Artificial
  Synthetic oligonucleotide
tgcgtgatcatgactgagacattttacgacgaccgcaactcccttgatacaggcaagctg

SEQ ID NO: 10917 - DNA, 60 bp, Artificial
  Synthetic oligonucleotide
caggctcgcccgaggaaggcccatatatggcttagaggtgccggacgtgctagaatcaat

SEQ ID NO: 10918 - DNA, 57 bp, Artificial
  Synthetic oligonucleotide
gtttgcaatgcagtcaacctagtcccacttgatactccccagagattcagggttgtg

SEQ ID NO: 10919 - DNA, 60 bp, Artificial
  Synthetic oligonucleotide
accacagtcagaagggctaaccgtgtactaagtgatgcactcaagagataccctagaatg

SEQ ID NO: 10920 - DNA, 52 bp, Artificial
  Synthetic oligonucleotide
gtgttgttctcggaaatgcctcaggcttaggcataatcggtatgtatcgagg

SEQ ID NO: 10921 - DNA, 60 bp, Artificial
  Synthetic oligonucleotide
gacatcctatcagtatggttgcactatctcctcttggggctttggttgcttgctacaagg

SEQ ID NO: 10922 - DNA, 55 bp, Artificial
  Synthetic oligonucleotide
atggttgcactatctcctcttggggctttggttgcttgctacaagggagtgagct

SEQ ID NO: 10923 - DNA, 60 bp, Artificial
  Synthetic oligonucleotide
gggcttgttgacacaacaaacaccgtgattaagattgcgctgactaggaggccactcggc

SEQ ID NO: 10924 - DNA, 60 bp, Artificial
  Synthetic oligonucleotide
acgctgactcataagataggccaagtctttgttactcctgagcttgtcatcgtgacacat

SEQ ID NO: 10925 - DNA, 57 bp, Artificial
  Synthetic oligonucleotide
atattgcgtagctcattcaaactcccttccccgagagttgctgcaaatcttactgaa

SEQ ID NO: 10926 - DNA, 56 bp, Artificial
  Synthetic oligonucleotide
ctcacaccagatcaccctcgagatcaacatgaccagcagccgtattggcacacaca

SEQ ID NO: 10927 - DNA, 60 bp, Artificial
  Synthetic oligonucleotide
aataaaccgagtctcttgtgatgtgcacgacatcactgccgtcattagattccaacagct

SEQ ID NO: 10928 - DNA, 60 bp, Artificial
  Synthetic oligonucleotide
gattcagggttactcagctaacatcagttcagtcctatcaatcccatacaactatcctga

SEQ ID NO: 10929 - DNA, 55 bp, Artificial
  Synthetic oligonucleotide
ggtccaaggggataaccaagtcatagctgtcactagagaggtccgaccggatgac

SEQ ID NO: 10930 - DNA, 55 bp, Artificial
  Synthetic oligonucleotide
ggggataaccaagtcatagctgtcactagagaggtccgaccagatgactctcctg

SEQ ID NO: 10931 - DNA, 55 bp, Artificial
  Synthetic oligonucleotide
ttcaggctcgggcaagaaatggttagaagatccgccggcaaagtaagctctgcac

SEQ ID NO: 10932 - DNA, 55 bp, Artificial
  Synthetic oligonucleotide
atacttaagtcaatggacaaaagcatagacactttgtcggaaataagtggagctg

SEQ ID NO: 10933 - DNA, 60 bp, Artificial
  Synthetic oligonucleotide
cgggtcgagcacagggacgagggaggcagccagtcaccacatggaagggagccgacagtc

SEQ ID NO: 10934 - DNA, 60 bp, Artificial
  Synthetic oligonucleotide
catcagctctatataaagtgcaactggaagtcgggttcaagcttgacgtggccaaggatc

SEQ ID NO: 10935 - DNA, 60 bp, Artificial
  Synthetic oligonucleotide
cgcacaggagtggcaactggcggcatatacgacgaccctcacagggaccatcgcagtgag

SEQ ID NO: 10936 - DNA, 60 bp, Artificial
  Synthetic oligonucleotide
aagtcatcagttagttggaaacgccacactgttctgtgcacaagactctagcaccgtgaa

SEQ ID NO: 10937 - DNA, 55 bp, Artificial
  Synthetic oligonucleotide
ggcgtcaggaggacgagagtcgctctcggatgttatcggattcctcgatgcagtc

SEQ ID NO: 10938 - DNA, 52 bp, Artificial
  Synthetic oligonucleotide
ttcgatcggtgctccactcctaccatggtcgggcaggctgagacagggaatg

SEQ ID NO: 10939 - DNA, 57 bp, Artificial
  Synthetic oligonucleotide
catacaattaagtgatcctgttatacctctacgtggagcatttatgaggcatgtgtt

SEQ ID NO: 10940 - DNA, 54 bp, Artificial
  Synthetic oligonucleotide
ggaagagggaccaggagacaagtcatctgacatctcatcggccctcgacatcat

SEQ ID NO: 10941 - DNA, 60 bp, Artificial
  Synthetic oligonucleotide
caggagactatacagggaggaaataggggaggaagcagctcagatagtagagctgagact

SEQ ID NO: 10942 - DNA, 55 bp, Artificial
  Synthetic oligonucleotide
ggaggaaataggggaggaagcagctcagatagtagagctgagactatggtcactc

SEQ ID NO: 10943 - DNA, 53 bp, Artificial
  Synthetic oligonucleotide
cctgagttagtactcatgtactgtgatgtagttgaaggaaggtggaatataag

SEQ ID NO: 10944 - DNA, 51 bp, Artificial
  Synthetic oligonucleotide
cagctgaaacaggagtagcatcattgagggtcccttactttggatcggtta

SEQ ID NO: 10945 - DNA, 59 bp, Artificial
  Synthetic oligonucleotide
ttagaatgcattggcattaagcctacaaagcatactcccataatatacaagtatgatct

SEQ ID NO: 10946 - DNA, 52 bp, Artificial
  Synthetic oligonucleotide
catccaacggagcacaggagatagtattgatactcctaattatgatgtgcag

SEQ ID NO: 10947 - DNA, 60 bp, Artificial
  Synthetic oligonucleotide
ggcataacccagatgacatttacccctgcatctctctacagagtgtcgccttatgttcac

SEQ ID NO: 10948 - DNA, 60 bp, Artificial
  Synthetic oligonucleotide
gtactggaatcgatgaacggctaccttatcaaacgccacgagtcttgtgccatctgcgaa

SEQ ID NO: 10949 - DNA, 57 bp, Artificial
  Synthetic oligonucleotide
agaggtacgtgcatgaagtcatagaacgagtcaggcagcaaggggactacactggaa

SEQ ID NO: 10950 - DNA, 60 bp, Artificial
  Synthetic oligonucleotide
ttggacgtacacgcaatttgtatcagagcggcacactgcatcagtccagcctgtagtcac

SEQ ID NO: 10951 - DNA, 60 bp, Artificial
  Synthetic oligonucleotide
tagatttgttgtcccagctaggtaagattaactcatcactctctgacgcaattgagcacc

SEQ ID NO: 10952 - DNA, 56 bp, Artificial
  Synthetic oligonucleotide
cggtcactgatcaggtcactcaaatgattcgccaatgcaatacagtctgcaagggt

SEQ ID NO: 10953 - DNA, 60 bp, Artificial
  Synthetic oligonucleotide
acttttgccctatgatctgcgtgtcaggagtttaccaggatgtctggcctgtcacaaacc

SEQ ID NO: 10954 - DNA, 55 bp, Artificial
  Synthetic oligonucleotide
agaagcttggagccggaactcaagttatagtagaactaggagcatatgtccaggc

SEQ ID NO: 10955 - DNA, 52 bp, Artificial
  Synthetic oligonucleotide
ttcagttcataagcaaggtgattcaatctgaaggagtaatgcaccctacccc

SEQ ID NO: 10956 - DNA, 54 bp, Artificial
  Synthetic oligonucleotide
tcaactattgagagacctccagctgaaacctattgacaaagagtctagctcggc

SEQ ID NO: 10957 - DNA, 60 bp, Artificial
  Synthetic oligonucleotide
cagttgccatcttatgggcggttgacattacctctagatgcaagtgttgaccttcaactt

SEQ ID NO: 10958 - DNA, 60 bp, Artificial
  Synthetic oligonucleotide
caaaaactctggtgccgtcacttctgtgtgcttgcggactcagaatccggtggacttatc

SEQ ID NO: 10959 - DNA, 60 bp, Artificial
  Synthetic oligonucleotide
atgctccatacattagtagttgcaagtgcaggacccacttcagctcgcgatggaataaga

SEQ ID NO: 10960 - DNA, 60 bp, Artificial
  Synthetic oligonucleotide
gcagatctctacgcccaaaggaccttcactacgagtcacgattaactcaagaagtgctgt

SEQ ID NO: 10961 - DNA, 60 bp, Artificial
  Synthetic oligonucleotide
tgacaggtccacatatatcctcaaactacacactatatccaaacatcatgaacatctaca

SEQ ID NO: 10962 - DNA, 56 bp, Artificial
  Synthetic oligonucleotide
atatcaaacttagagagcttgtcttatgctattctccagttatctgatcccgttcc

SEQ ID NO: 10963 - DNA, 60 bp, Artificial
  Synthetic oligonucleotide
gagatactgaacagcgatacagtgggaaaacatatgcagcattccccctgggtgtcggaa

SEQ ID NO: 10964 - DNA, 60 bp, Artificial
  Synthetic oligonucleotide
gcctgactatattgccattgctacatatacgtatgatctggtcccgaatctacgagactg

SEQ ID NO: 10965 - DNA, 55 bp, Artificial
  Synthetic oligonucleotide
ctcctagcagggctctaaaagctgccattaggatagcaacagtttacacctgggc

SEQ ID NO: 10966 - DNA, 60 bp, Artificial
  Synthetic oligonucleotide
atgcctgcttaggccctgctatgacatactataactcaggagtaacaaaagatgacgtgt

SEQ ID NO: 10967 - DNA, 57 bp, Artificial
  Synthetic oligonucleotide
taggatcgcaagagtggtacaccacagtaccgcgatatgtggcaacccaaggttacc

SEQ ID NO: 10968 - DNA, 55 bp, Artificial
  Synthetic oligonucleotide
gggtcacaggagtggtacaccacagtaccgcgatatgtggcaacccagggttacc

SEQ ID NO: 10969 - DNA, 52 bp, Artificial
  Synthetic oligonucleotide
acacagaagcgaatctggaaatcagtgggttccgtgattttggagtacaccc

SEQ ID NO: 10970 - DNA, 54 bp, Artificial
  Synthetic oligonucleotide
gtccaattgttttggcacatctctacctgtgagggtgaactgcacggtactaag

SEQ ID NO: 10971 - DNA, 60 bp, Artificial
  Synthetic oligonucleotide
ggtagtgtcccttgccaggcttcagcaagatgccctaactcatgtgttaccggagtctat

SEQ ID NO: 10972 - DNA, 60 bp, Artificial
  Synthetic oligonucleotide
ataagatagtagccatcctggagtatgctcgagtccctcacgcttacagcctggaggacc

SEQ ID NO: 10973 - DNA, 60 bp, Artificial
  Synthetic oligonucleotide
ctatagtgtgcccagaagaatgctggagttccgctcagccaatgcagtagccttcaacat

SEQ ID NO: 10974 - DNA, 58 bp, Artificial
  Synthetic oligonucleotide
ggcttagaacaaaatcaagcagctgagatgctatgtctgttgcgtctatggggccatc

SEQ ID NO: 10975 - DNA, 60 bp, Artificial
  Synthetic oligonucleotide
cacctttgcaaggcctttcttgaatcctgcatatttccaacttggagtcgagacagcaaa

SEQ ID NO: 10976 - DNA, 60 bp, Artificial
  Synthetic oligonucleotide
atactcaacaacagcgcttggagcccgactctgatactctgcagccctctccaattacgc

SEQ ID NO: 10977 - DNA, 60 bp, Artificial
  Synthetic oligonucleotide
attgtatgtcagggaatagaaagtacacctggttcttcgtgccagcagggatagacataa

SEQ ID NO: 10978 - DNA, 56 bp, Artificial
  Synthetic oligonucleotide
agggcacagacgcgaagtctcaatatgttgggacggaagacgtgcctgggtcgaag

SEQ ID NO: 10979 - DNA, 50 bp, Artificial
  Synthetic oligonucleotide
acggcacaatggacatcaagaaaattaacgatgggttattagatagtaag

SEQ ID NO: 10980 - DNA, 60 bp, Artificial
  Synthetic oligonucleotide
gtgttccagccttcaacaataggagcggtgtcacagaggaacgagctcagcgtttcgcta

SEQ ID NO: 10981 - DNA, 55 bp, Artificial
  Synthetic oligonucleotide
ggttagggaggtcctgtattagaggtcacgtgagtgttttgcgacattttgcgac

SEQ ID NO: 10982 - DNA, 60 bp, Artificial
  Synthetic oligonucleotide
acaaaataagaccgtgactgcagcatacatactgcattacctgattcctaaaaagcaacc

SEQ ID NO: 10983 - DNA, 60 bp, Artificial
  Synthetic oligonucleotide
tgcccgtgctgaaatgctattaacaaagactgcaactgattacctgataggaaaagaccc

SEQ ID NO: 10984 - DNA, 50 bp, Artificial
  Synthetic oligonucleotide
gccaggacctaaattcctggatcagagagttagggcctacccaggaggaa

SEQ ID NO: 10985 - DNA, 54 bp, Artificial
  Synthetic oligonucleotide
tctcggaggatttggcctgcacaatccaccaccacaggtcttcatcaagaatac

SEQ ID NO: 10986 - DNA, 58 bp, Artificial
  Synthetic oligonucleotide
ctcgtaagataatgacatcgctgatatatgcgctggaaggtttaatactttgcccagt

SEQ ID NO: 10987 - DNA, 60 bp, Artificial
  Synthetic oligonucleotide
gattgcacggattactatgagtgtgaacagcaagagcacaaaattagccgtagatcagat

SEQ ID NO: 10988 - DNA, 60 bp, Artificial
  Synthetic oligonucleotide
ataatgtcagtccagtaaactgcgcacgctctggattcgataagataggattagcctatg

SEQ ID NO: 10989 - DNA, 60 bp, Artificial
  Synthetic oligonucleotide
cgcgcaaatagatgtctccactgcaaccaaagtacaagtagatacatcgacactatacaa

SEQ ID NO: 10990 - DNA, 60 bp, Artificial
  Synthetic oligonucleotide
cactatacaatacatgtcctagatcaggatacatgtcaactgtttcacagggaggggcac

SEQ ID NO: 10991 - DNA, 55 bp, Artificial
  Synthetic oligonucleotide
catgtcctagatcaggatacatgtcaactgtttcacagggaggggcacccgcacc

SEQ ID NO: 10992 - DNA, 60 bp, Artificial
  Synthetic oligonucleotide
attgggtacattagcataaggaaattctgttggagtatgttcaacgacattcattgtagc

SEQ ID NO: 10993 - DNA, 55 bp, Artificial
  Synthetic oligonucleotide
cagcgattccttcagccacgtaatttccggcctccgtaagaaattgtctatccgc

SEQ ID NO: 10994 - DNA, 51 bp, Artificial
  Synthetic oligonucleotide
aggtccaaccggagcttcagtgggcgtggacaaacctggacgagtataaat

SEQ ID NO: 10995 - DNA, 57 bp, Artificial
  Synthetic oligonucleotide
tacattcggcatattcagcaaaagatcgtgagtaaagtctactgcggacacgaaccc

SEQ ID NO: 10996 - DNA, 52 bp, Artificial
  Synthetic oligonucleotide
cgctagaccggctgatgaatcccctcgtcgatcagtacctctgggccttcag

SEQ ID NO: 10997 - DNA, 51 bp, Artificial
  Synthetic oligonucleotide
gcgaacgagccggaggagcctcctaagatctgggctcctcctactagggag

SEQ ID NO: 10998 - DNA, 56 bp, Artificial
  Synthetic oligonucleotide
atggctggaaacgcgtactctgatgaagttttgggaacaactaactggttgaagga

SEQ ID NO: 10999 - DNA, 60 bp, Artificial
  Synthetic oligonucleotide
gcgaacgccatctagtgagcaaactatatactgatgacatgcggccagaaacggttgaga

SEQ ID NO: 11000 - DNA, 52 bp, Artificial
  Synthetic oligonucleotide
cgcatggtacacttgaacatgcctaaatcagaaaactactgtagggtgcgcg

SEQ ID NO: 11001 - DNA, 55 bp, Artificial
  Synthetic oligonucleotide
ccgtgacaacctagcgggtaagactgacatacattttaccaacgcatttaacagt

SEQ ID NO: 11002 - DNA, 60 bp, Artificial
  Synthetic oligonucleotide
cgcgcagagcgggagcgtcagtcgacagaataacatcaacaagtgcacatcaaccaacac

SEQ ID NO: 11003 - DNA, 55 bp, Artificial
  Synthetic oligonucleotide
gtgttatccaataggatgaaagcgcgcgcatgagttctcgcgagacttccggggt

SEQ ID NO: 11004 - DNA, 56 bp, Artificial
  Synthetic oligonucleotide
agccttcacaacctgctaaccgcggagggggaagctaccaaactcactttgctata

SEQ ID NO: 11005 - DNA, 60 bp, Artificial
  Synthetic oligonucleotide
atagcttaactgatcctaatactcctgtgtacgaggtgccctctaatcagtgggtcgcgc

SEQ ID NO: 11006 - DNA, 50 bp, Artificial
  Synthetic oligonucleotide
ctaacggttactaggggcggagttacgggcggtatataagcagctgcgtt

SEQ ID NO: 11007 - DNA, 52 bp, Artificial
  Synthetic oligonucleotide
gttatctgaccacccccatgccttatcatccagtaacagtagtgcagaacct

SEQ ID NO: 11008 - DNA, 50 bp, Artificial
  Synthetic oligonucleotide
acggtggcttcagttcgctaaagtgggagggtccgtggtcggattaccgt

SEQ ID NO: 11009 - DNA, 55 bp, Artificial
  Synthetic oligonucleotide
ggggtacctgacacattaggaggggaccctaaatttagatcattgacacacgaag

SEQ ID NO: 11010 - DNA, 60 bp, Artificial
  Synthetic oligonucleotide
tacatgcctgtacttggtacaaccaagaatgtcggtgcctctcaaggcattttgacgtca

SEQ ID NO: 11011 - DNA, 55 bp, Artificial
  Synthetic oligonucleotide
cttggtacaaccaagaatgtcggtgcctctcaaggcattttgacgtcaatccgag

SEQ ID NO: 11012 - DNA, 57 bp, Artificial
  Synthetic oligonucleotide
cgcaagagtcaccacccgtaatgtctcaagaaaacgtaccaatggatacagaaggag

SEQ ID NO: 11013 - DNA, 50 bp, Artificial
  Synthetic oligonucleotide
gagtttggatcgcttgatgaatcctcttattgatcagtatctgtactacc

SEQ ID NO: 11014 - DNA, 57 bp, Artificial
  Synthetic oligonucleotide
tcgttgaccttcattcattgattcccaattaggacgttcataaggaggtgtattacg

SEQ ID NO: 11015 - DNA, 60 bp, Artificial
  Synthetic oligonucleotide
tccagcgcatatatcagcgatgtcattatcttacgagatattcagctacgtaatcaatgt

SEQ ID NO: 11016 - DNA, 55 bp, Artificial
  Synthetic oligonucleotide
cagcgatgtcattatcttacgagatattcagctacgtaatcaatgtctggacatc

SEQ ID NO: 11017 - DNA, 56 bp, Artificial
  Synthetic oligonucleotide
tgtgtaggttgagcttccattacagtacaactggacattacatctatatatcccat

SEQ ID NO: 11018 - DNA, 55 bp, Artificial
  Synthetic oligonucleotide
gtgcacatcttctgcgacgggagccatcagtacccgtacgcgcagcatccttggg

SEQ ID NO: 11019 - DNA, 54 bp, Artificial
  Synthetic oligonucleotide
atgacaaacaaaatggtggagacggctaaatgtatactggggggatctgctgta

SEQ ID NO: 11020 - DNA, 50 bp, Artificial
  Synthetic oligonucleotide
cggaacgtacaacagggccaacaccttcaacgaatgcatgccaactaagt

SEQ ID NO: 11021 - DNA, 50 bp, Artificial
  Synthetic oligonucleotide
atgctgcagctgatttctaccatttggaaagcggtcctcctcgtcctaag

SEQ ID NO: 11022 - DNA, 60 bp, Artificial
  Synthetic oligonucleotide
atttccgtctcctgtcgttattcagtcacatgatgcggcattacctcaccggagtgctgg

SEQ ID NO: 11023 - DNA, 56 bp, Artificial
  Synthetic oligonucleotide
atcacatggtttgtgaacgtgatgtcctgtccgttggacccgtggactgtcgaatg

SEQ ID NO: 11024 - DNA, 51 bp, Artificial
  Synthetic oligonucleotide
gcgtattgatgactctctaaccaggtatgttaacaatattgatgagtcagc

SEQ ID NO: 11025 - DNA, 50 bp, Artificial
  Synthetic oligonucleotide
actctagaactaatccatacactgtattcagccagcataaagcctcacat

SEQ ID NO: 11026 - DNA, 55 bp, Artificial
  Synthetic oligonucleotide
ccgatgatcctaagagaaagccaacattagtccgggatccccgtgtgagccgata

SEQ ID NO: 11027 - DNA, 56 bp, Artificial
  Synthetic oligonucleotide
aactatacacatcattggggaaaagtaccagaatgggatgaaaactgggcggagcc

SEQ ID NO: 11028 - DNA, 53 bp, Artificial
  Synthetic oligonucleotide
acagacagctttcaggtcctcaaggtgctattgccttaccattcactgacgca

SEQ ID NO: 11029 - DNA, 60 bp, Artificial
  Synthetic oligonucleotide
gtacccctgacgagtctgacccggccttgcttctgcagcctcataccaatacaatgtccg

SEQ ID NO: 11030 - DNA, 50 bp, Artificial
  Synthetic oligonucleotide
gggtacctcctggctacaagtacctgggaccaggaaacagccttgaccaa

SEQ ID NO: 11031 - DNA, 50 bp, Artificial
  Synthetic oligonucleotide
ctatggatgcgttaactggaccaacgagaactttccgttcaacgactgcg

SEQ ID NO: 11032 - DNA, 58 bp, Artificial
  Synthetic oligonucleotide
cctcatagtgctgacgactctgtgtacactgacgtggctagcgagacatcaatcagca

SEQ ID NO: 11033 - DNA, 60 bp, Artificial
  Synthetic oligonucleotide
ctttgggcatccatcttggtcctacgtcatcaagctacgtcatggtcacgtgaccatgat

SEQ ID NO: 11034 - DNA, 60 bp, Artificial
  Synthetic oligonucleotide
agtgtataaggagagctttttccggttgcattcattcgttgctctgctctcacagagaac

SEQ ID NO: 11035 - DNA, 60 bp, Artificial
  Synthetic oligonucleotide
catcgacgagtcacactccagctaccaaaagagctcgcgtggaggaaggtgagccgtggg

SEQ ID NO: 11036 - DNA, 60 bp, Artificial
  Synthetic oligonucleotide
gcaggcgcggtacaaaacgcagacgtcatgcagacgagattcaatcaccacaaagtcctg

SEQ ID NO: 11037 - DNA, 53 bp, Artificial
  Synthetic oligonucleotide
accgtgagtgatgtctacgcttccaatcgcgtctttagacgaccttactcaat

SEQ ID NO: 11038 - DNA, 51 bp, Artificial
  Synthetic oligonucleotide
acactattcgatagctccgatggaactctgcctatgtcacatccgccggga

SEQ ID NO: 11039 - DNA, 60 bp, Artificial
  Synthetic oligonucleotide
ctgactccgagaagtacgcctctcagccaaaactacgctcttactccacttgcatcggac

SEQ ID NO: 11040 - DNA, 58 bp, Artificial
  Synthetic oligonucleotide
aacatgggccttgcccacctataacaaccacctctacaagcaaatctccagtgcttca

SEQ ID NO: 11041 - DNA, 55 bp, Artificial
  Synthetic oligonucleotide
acgttgatttcactgtggacaacaatggactttatactgagcctcgccccattgg

SEQ ID NO: 11042 - DNA, 60 bp, Artificial
  Synthetic oligonucleotide
attatcttatctggtcaccatagcaaccggttacacattaactgcttagttgcgcttcgc

SEQ ID NO: 11043 - DNA, 60 bp, Artificial
  Synthetic oligonucleotide
tagtcagggagtagttatagacaacgaatatccagacaatcagatgggttgttacaacat

SEQ ID NO: 11044 - DNA, 53 bp, Artificial
  Synthetic oligonucleotide
caagcagtgtagcgcaacagttagaccaggagagaactccagcagtcaagaga

SEQ ID NO: 11045 - DNA, 59 bp, Artificial
  Synthetic oligonucleotide
cactagagccatgaacccagttaaatatgacagtgcggtagaaagatcattcggatacg

SEQ ID NO: 11046 - DNA, 55 bp, Artificial
  Synthetic oligonucleotide
cgcctctcagccaaaactacgctcttactccacttgcatcggaccttgcggacct

SEQ ID NO: 11047 - DNA, 59 bp, Artificial
  Synthetic oligonucleotide
tcagcgctgacgtaaattacgtcataggggagtggtcctgtattagctgtcacgtgagt

SEQ ID NO: 11048 - DNA, 53 bp, Artificial
  Synthetic oligonucleotide
aaaatgcgtggaagtgtagctgtgcctggagtacctgtggttataaccagcaa

SEQ ID NO: 11049 - DNA, 60 bp, Artificial
  Synthetic oligonucleotide
accagggtagatcaaaaaatgcgtggcagtgtggcagtgcctggtgtgccagtggtaata

SEQ ID NO: 11050 - DNA, 60 bp, Artificial
  Synthetic oligonucleotide
ctacagggcgtttatgcatgttagtagatcatgagtacaagtacccatatgtgttaggtc

SEQ ID NO: 11051 - DNA, 55 bp, Artificial
  Synthetic oligonucleotide
gttagtagatcatgagtacaagtacccatatgtgttaggtcagggacaggatacc

SEQ ID NO: 11052 - DNA, 59 bp, Artificial
  Synthetic oligonucleotide
cgaagaccatgcaattcagccacaaaactttatgcctggcccattagtaaactcagtgt

SEQ ID NO: 11053 - DNA, 52 bp, Artificial
  Synthetic oligonucleotide
gagcatacattcctccaggcttaatgtttaatccactagtacctactagaag

SEQ ID NO: 11054 - DNA, 51 bp, Artificial
  Synthetic oligonucleotide
tttgcgttttggagaccgtcgcgagcagaactccgtcgttttcggcctgta

SEQ ID NO: 11055 - DNA, 53 bp, Artificial
  Synthetic oligonucleotide
attttgggtgccggcagacatattggattccaagatggcgtctgtacaaccac

SEQ ID NO: 11056 - DNA, 56 bp, Artificial
  Synthetic oligonucleotide
aggactaagcaagaggaatgctaaatcatcctgtgctcagttctatggtttaatac

SEQ ID NO: 11057 - DNA, 55 bp, Artificial
  Synthetic oligonucleotide
acccaaatgcatctcatccatgggatgaggacgtcatgcctgatcttccatacaa

SEQ ID NO: 11058 - DNA, 54 bp, Artificial
  Synthetic oligonucleotide
cgcctacataccacgtggatccaacaggagcatacatccagcccacgtcatatg

SEQ ID NO: 11059 - DNA, 55 bp, Artificial
  Synthetic oligonucleotide
ctccacaaatcactgagctaccatcttctgacaacgaagatgctactttagtagc

SEQ ID NO: 11060 - DNA, 50 bp, Artificial
  Synthetic oligonucleotide
ccttggtcactaatagatgctaacgcatggggagtgtggttcaatccagc

SEQ ID NO: 11061 - DNA, 60 bp, Artificial
  Synthetic oligonucleotide
ttgttagacttgcaccaaaccttactgatcagtatgatcctaacagtagcactctttcta

SEQ ID NO: 11062 - DNA, 51 bp, Artificial
  Synthetic oligonucleotide
gaccttcagctctactccggtaaactccttcattactcagtacagcactgg

SEQ ID NO: 11063 - DNA, 59 bp, Artificial
  Synthetic oligonucleotide
gctacagtttcaaggctacgacccagtagtagcaggatacattatatacgcttggagca

SEQ ID NO: 11064 - DNA, 60 bp, Artificial
  Synthetic oligonucleotide
actttgctgctacacagggacgatcactacgaactgccatacgtgattggcggtggacaa

SEQ ID NO: 11065 - DNA, 58 bp, Artificial
  Synthetic oligonucleotide
gggactggtacaagctgccacaatactgctacacaaccgtaggcatggaaagtccatg

SEQ ID NO: 11066 - DNA, 54 bp, Artificial
  Synthetic oligonucleotide
cacacttacctatggcatacactacacaatacccgtggagcacaagacggcaag

SEQ ID NO: 11067 - DNA, 55 bp, Artificial
  Synthetic oligonucleotide
ctgcgcacgctctggattcgataagataggattagcctatgactctgctccggaa

SEQ ID NO: 11068 - DNA, 60 bp, Artificial
  Synthetic oligonucleotide
cttgcagacgactggccaattcaggagctgcgtgagtccgttccactttttgatcacgct

SEQ ID NO: 11069 - DNA, 53 bp, Artificial
  Synthetic oligonucleotide
caagctccttttgtttgcaagaacaatgctccaagtcaacttcttgttaggct

SEQ ID NO: 11070 - DNA, 57 bp, Artificial
  Synthetic oligonucleotide
ctcctcaaattggaactgtcaacagccagggggccttacccggtatggtctggcaga

SEQ ID NO: 11071 - DNA, 57 bp, Artificial
  Synthetic oligonucleotide
gatacgaacgaccacccaatggcaatcaatacctagtccgtcattatttggatcttc

SEQ ID NO: 11072 - DNA, 57 bp, Artificial
  Synthetic oligonucleotide
actacgacaacatgcagtggataaagtacatgttagccaacaacgacatccgtgtac

SEQ ID NO: 11073 - DNA, 60 bp, Artificial
  Synthetic oligonucleotide
gacaggatgaacacccaagtacgacatcaaccctccaccagacaagatctcccgcgacga

SEQ ID NO: 11074 - DNA, 53 bp, Artificial
  Synthetic oligonucleotide
tcttatgagtttccagattctaccccgtggtgtaataaccgcgtatctactgt

SEQ ID NO: 11075 - DNA, 55 bp, Artificial
  Synthetic oligonucleotide
gatctccttggtatccaggaccttatatttacttaagcgatactactgccgccgg

SEQ ID NO: 11076 - DNA, 55 bp, Artificial
  Synthetic oligonucleotide
acttgtaccgtcgcgattgaatgggaacttgaacactttactactcaccgctgga

SEQ ID NO: 11077 - DNA, 52 bp, Artificial
  Synthetic oligonucleotide
ctctacctgtatgctatgtaagtactgaaactggttgggggaacggtggggg

SEQ ID NO: 11078 - DNA, 60 bp, Artificial
  Synthetic oligonucleotide
ggggcacccgcacctattgtctggtcagggtgtgtacctggcatgatatgggacaatagg

SEQ ID NO: 11079 - DNA, 60 bp, Artificial
  Synthetic oligonucleotide
ctagctgaaaaaacatacgctcacactattgttaatgggcttccgctgctagaacataac

SEQ ID NO: 11080 - DNA, 60 bp, Artificial
  Synthetic oligonucleotide
gcgctactgcccagatcacattctaccgtggtgcttcatagggaacagacccgttctcta

SEQ ID NO: 11081 - DNA, 57 bp, Artificial
  Synthetic oligonucleotide
gccaaataattcggaagaagcttatcaatcacatattagaagtgtacgaagacgatt

SEQ ID NO: 11082 - DNA, 53 bp, Artificial
  Synthetic oligonucleotide
caattcctgtgggaccggaaccttcaagtcaagccaaccgcggaggggggcca

SEQ ID NO: 11083 - DNA, 50 bp, Artificial
  Synthetic oligonucleotide
atggtatccagggccttacatttacctaaccgatacatccgcagcatcac

SEQ ID NO: 11084 - DNA, 57 bp, Artificial
  Synthetic oligonucleotide
gccactaatatgtgcttggttggtaaagaaaggttaccaatcaacaatggctagcta

SEQ ID NO: 11085 - DNA, 53 bp, Artificial
  Synthetic oligonucleotide
gtctactgaccgaattgctaaagaacacgacgtacagtacggtctcatctccg

SEQ ID NO: 11086 - DNA, 57 bp, Artificial
  Synthetic oligonucleotide
atacaggtataatgatgggtcctatacaacgaccgattgttaatcgcgatggtgatt

SEQ ID NO: 11087 - DNA, 55 bp, Artificial
  Synthetic oligonucleotide
gctcacactattgttaatgggcttccgctgctagaacataacagaaaggcctatc

SEQ ID NO: 11088 - DNA, 56 bp, Artificial
  Synthetic oligonucleotide
cacgctgaccaggactttatagatagcctccaagacgaccagtcattcggaggtaa

SEQ ID NO: 11089 - DNA, 60 bp, Artificial
  Synthetic oligonucleotide
agtcgatgggtcgtgtatatctaccgtggacatacaaagcaattgtattattaacgcatg

SEQ ID NO: 11090 - DNA, 55 bp, Artificial
  Synthetic oligonucleotide
ctaccgtggacatacaaagcaattgtattattaacgcatgtagcccaaaacaagg

SEQ ID NO: 11091 - DNA, 54 bp, Artificial
  Synthetic oligonucleotide
agcagtgtggcttctaagcttgactttaccggggggccactagcaggatgcttg

SEQ ID NO: 11092 - DNA, 50 bp, Artificial
  Synthetic oligonucleotide
gcaatactgtatctcatgttcatgcagcgcccttaaaagagcgaatcctt

SEQ ID NO: 11093 - DNA, 55 bp, Artificial
  Synthetic oligonucleotide
tgtgctaaatggggcaaagtacctgattggtcagaaaactgggcagagccgaagg

SEQ ID NO: 11094 - DNA, 54 bp, Artificial
  Synthetic oligonucleotide
aactcccagccggagacatcgaacgtggataatcgtccatccaagaagagacgt

SEQ ID NO: 11095 - DNA, 60 bp, Artificial
  Synthetic oligonucleotide
tcctctagtgaacaatgtagcgtggtggcagctccatctagaaaacgtgagtggtcacat

SEQ ID NO: 11096 - DNA, 55 bp, Artificial
  Synthetic oligonucleotide
gtgtgaacagcaagagcacaaaattagccgtagatcagatgctggcagtactaac

SEQ ID NO: 11097 - DNA, 50 bp, Artificial
  Synthetic oligonucleotide
tccagacgaagttccagaaccggttccaggtaatgacatggccattgtaa

SEQ ID NO: 11098 - DNA, 56 bp, Artificial
  Synthetic oligonucleotide
gggggaactgctttgcgaatcgaccgcaagtgcatgcaatctattgaggttaacag

SEQ ID NO: 11099 - DNA, 59 bp, Artificial
  Synthetic oligonucleotide
ctagaagatgtgttctctcagcgtttcctgacacttactgttctatgatgtccggagac

SEQ ID NO: 11100 - DNA, 60 bp, Artificial
  Synthetic oligonucleotide
aggacagcaatagtgtgcgagtgagatagcactatagcaactgttagagcgagatagcaa

SEQ ID NO: 11101 - DNA, 55 bp, Artificial
  Synthetic oligonucleotide
cactgctactagtgcaccaaaatatgaacctataactggtacgactggttataga

SEQ ID NO: 11102 - DNA, 60 bp, Artificial
  Synthetic oligonucleotide
tactcatattgctatctcgctctaacagttgctatagtgctatctcactcgcacactatt

SEQ ID NO: 11103 - DNA, 60 bp, Artificial
  Synthetic oligonucleotide
aggatgcctagtacaggatttagtgcagttgaaggagccaattctagaaaggaagatgct

SEQ ID NO: 11104 - DNA, 60 bp, Artificial
  Synthetic oligonucleotide
tcaaatgtattggacagtagaatgtagacttagatgcgtttcaacagaaccatttacgta

SEQ ID NO: 11105 - DNA, 57 bp, Artificial
  Synthetic oligonucleotide
tcgtctagccagtgcattagctcgttcagatgattcgcaggcatatacatcgctaat

SEQ ID NO: 11106 - DNA, 60 bp, Artificial
  Synthetic oligonucleotide
gcgatagtgctgcgaagaacgatcagagcaatccggagacgcagggagctaatgaggtca

SEQ ID NO: 11107 - DNA, 60 bp, Artificial
  Synthetic oligonucleotide
aagagccatgcatccagttaagtatgacagtgcaatagacagaacattcggatacgacga

SEQ ID NO: 11108 - DNA, 53 bp, Artificial
  Synthetic oligonucleotide
agtggcgggaactgagagggcggagacttctagaaaacgcccactggatgacg

SEQ ID NO: 11109 - DNA, 55 bp, Artificial
  Synthetic oligonucleotide
gggcccatttgggccaaaattccacacacggatggacactttcacccgtctcctc

SEQ ID NO: 11110 - DNA, 55 bp, Artificial
  Synthetic oligonucleotide
cagaggtccagttcacgtccaactacggagcacaggactcgcttctctgggctcc

SEQ ID NO: 11111 - DNA, 57 bp, Artificial
  Synthetic oligonucleotide
cgtagatcttgtaaggtgcatgcgcaatagaggtgaacacgaagaatatacagactt

SEQ ID NO: 11112 - DNA, 60 bp, Artificial
  Synthetic oligonucleotide
ctcaactatatggactgatactaggggaattaatccaacgctgcaaaactcttctggcta

SEQ ID NO: 11113 - DNA, 51 bp, Artificial
  Synthetic oligonucleotide
cttatcttatcggttaccatggttatagcttacacattaactgcttggttg

SEQ ID NO: 11114 - DNA, 60 bp, Artificial
  Synthetic oligonucleotide
actcaggtatgttgttcgctgcagtagaagcgcctccagcatgtacgttcgaacctcgtt

SEQ ID NO: 11115 - DNA, 55 bp, Artificial
  Synthetic oligonucleotide
cgctgcagtagaagcgcctccagcatgtacgttcgaacctcgttcattgcaacag

SEQ ID NO: 11116 - DNA, 50 bp, Artificial
  Synthetic oligonucleotide
tcatttgtaggtagtctgtcgtaggggtgactacgattccaccatctccc

SEQ ID NO: 11117 - DNA, 51 bp, Artificial
  Synthetic oligonucleotide
gaaatcacgcaacgtgagatctgtaaagacgccagacatttaatactacga

SEQ ID NO: 11118 - DNA, 59 bp, Artificial
  Synthetic oligonucleotide
gctcaagggagcagacatggagcaacacagatggaggttaactgggtgagtgaagcaat

SEQ ID NO: 11119 - DNA, 60 bp, Artificial
  Synthetic oligonucleotide
caccggatcagagacaactaggacgtgatagtaacaaccagttagcattggtacagagag

SEQ ID NO: 11120 - DNA, 60 bp, Artificial
  Synthetic oligonucleotide
tactcaattctatggactaattctagctgaactagtccaacgctgcaaaacactcttagc

SEQ ID NO: 11121 - DNA, 60 bp, Artificial
  Synthetic oligonucleotide
agagtaaacgttcctgcagagaatggtgtaatatatgacgaagctcatgtaacaagaaca

SEQ ID NO: 11122 - DNA, 55 bp, Artificial
  Synthetic oligonucleotide
cctgcagagaatggtgtaatatatgacgaagctcatgtaacaagaacatcagact

SEQ ID NO: 11123 - DNA, 60 bp, Artificial
  Synthetic oligonucleotide
cagcgaggagcgatacaagatatcgtcataaacttcgacctaacactacaaattatggtc

SEQ ID NO: 11124 - DNA, 55 bp, Artificial
  Synthetic oligonucleotide
ccatccatggcagtcaataccttcgcaggaaaccgttacaacctatgacgtcata

SEQ ID NO: 11125 - DNA, 53 bp, Artificial
  Synthetic oligonucleotide
taccgaagagaagaggacaccatagacggaccatgtccatacatgtccagcac

SEQ ID NO: 11126 - DNA, 60 bp, Artificial
  Synthetic oligonucleotide
tgaacacggaaaactgcgacacaccaaaaaggggtgcgagcagtgtgcctccgaagcagc

SEQ ID NO: 11127 - DNA, 55 bp, Artificial
  Synthetic oligonucleotide
ctaattctagctgaactagtccaacgctgcaaaacactcttagctacgcgtccat

SEQ ID NO: 11128 - DNA, 53 bp, Artificial
  Synthetic oligonucleotide
cagcgtgggttagcatggaagctgttgataggcgtatcactaagatgtttgat

SEQ ID NO: 11129 - DNA, 60 bp, Artificial
  Synthetic oligonucleotide
aggtatatctgcggaggatgtaatgcaatcatactcgcgccacggtctcgatatgaacct

SEQ ID NO: 11130 - DNA, 60 bp, Artificial
  Synthetic oligonucleotide
tcaaccatgcgggcgttaggcaggttggctatgcaagagcgctactatgacccagacgta

SEQ ID NO: 11131 - DNA, 60 bp, Artificial
  Synthetic oligonucleotide
cgctggtgaggcccagaaggctatcgacatgatgccagatttccttggctacaccaagtc

SEQ ID NO: 11132 - DNA, 55 bp, Artificial
  Synthetic oligonucleotide
ctgttgcaagcgctactgagtggtctaagtacgtagatactagcctgaccattcc

SEQ ID NO: 11133 - DNA, 60 bp, Artificial
  Synthetic oligonucleotide
tcctgcaagtatgacttattatgagcgtcacgcgtggatgtccaatggtctgtacgtgga

SEQ ID NO: 11134 - DNA, 55 bp, Artificial
  Synthetic oligonucleotide
cagctctacctgacgtatggtattgctcaggagtcgtttggtccctttgctcagc

SEQ ID NO: 11135 - DNA, 60 bp, Artificial
  Synthetic oligonucleotide
catagggttgcagtctagttgcgttttgtgcataccgtggatcagtcagacgcattaccg

SEQ ID NO: 11136 - DNA, 54 bp, Artificial
  Synthetic oligonucleotide
aaagggtatggcttgatcatgacgccagccgacaagggagagtgtttcaacgaa

SEQ ID NO: 11137 - DNA, 60 bp, Artificial
  Synthetic oligonucleotide
tggcagtccttgaaacgtgtggtgcgacgtctaaccattatggcagtgggtggagtactg

SEQ ID NO: 11138 - DNA, 50 bp, Artificial
  Synthetic oligonucleotide
ccctgacactgaacacatggacggatatcacggccagtttgcaatgatca

SEQ ID NO: 11139 - DNA, 60 bp, Artificial
  Synthetic oligonucleotide
caatcaccgtgacagtggcgccgatgtgcgctgaatataatggactgcgtctagccggca

SEQ ID NO: 11140 - DNA, 60 bp, Artificial
  Synthetic oligonucleotide
tgtacgtcggcaactacaaagtattgaatagacatctcgcgacgcgtgtggattggcaga

SEQ ID NO: 11141 - DNA, 59 bp, Artificial
  Synthetic oligonucleotide
acacgaatccattaggtggactaaagatcctaagaacacacaagaccatgtgcgctcgt

SEQ ID NO: 11142 - DNA, 60 bp, Artificial
  Synthetic oligonucleotide
acgggcagtgcagtcggttgtgatcccgatctgttctggagcaaaatacccgtaatgcta

SEQ ID NO: 11143 - DNA, 60 bp, Artificial
  Synthetic oligonucleotide
acacaaggagactaattacatcgattatctatgcaactcccaccacctgtacagggataa

SEQ ID NO: 11144 - DNA, 60 bp, Artificial
  Synthetic oligonucleotide
catcacacacgcaagggaacgtgtctgttaagtacaagtacactcatccaggtgaacaag

SEQ ID NO: 11145 - DNA, 60 bp, Artificial
  Synthetic oligonucleotide
cactggtcaggttctatcaggatctccctaatgtacacaggtcctgcactatcaagtgcc

SEQ ID NO: 11146 - DNA, 60 bp, Artificial
  Synthetic oligonucleotide
aggaattgatagcagtgctgatctggtcatcccctacgtggctccctatgattttacccc

SEQ ID NO: 11147 - DNA, 55 bp, Artificial
  Synthetic oligonucleotide
gcagtgctgatctggtcatcccctacgtggctccctatgattttacccctgtgag

SEQ ID NO: 11148 - DNA, 53 bp, Artificial
  Synthetic oligonucleotide
gatgcctaagaacacgtccagtacaatttgcatggatggtttgactattaaca

SEQ ID NO: 11149 - DNA, 52 bp, Artificial
  Synthetic oligonucleotide
gcatttgtggcatccactcacttggcgatggtgctataggtgcagcaactgt

SEQ ID NO: 11150 - DNA, 60 bp, Artificial
  Synthetic oligonucleotide
acggactaacaactgtgctacattggtgctcccgtatgtgaactccctctccatagacag

SEQ ID NO: 11151 - DNA, 50 bp, Artificial
  Synthetic oligonucleotide
ggtggtaactaaccaagttactaaaggtcaagcacttctgtttccccggc

SEQ ID NO: 11152 - DNA, 60 bp, Artificial
  Synthetic oligonucleotide
ccgtggattagatccactgctgtgagcggtgcaaccccagcaccctgattcgatggtcat

SEQ ID NO: 11153 - DNA, 50 bp, Artificial
  Synthetic oligonucleotide
tggaccgctttcgcctttcaacttttacaatacaagtatgtctacgatgt

SEQ ID NO: 11154 - DNA, 60 bp, Artificial
  Synthetic oligonucleotide
cgctcagctataccccatagtagacctggcagatgaggctagaaactccccactggcgac

SEQ ID NO: 11155 - DNA, 56 bp, Artificial
  Synthetic oligonucleotide
tagaagctcaccacatacggtcaataggtgactcagtatgccaattgggtcttgac

SEQ ID NO: 11156 - DNA, 60 bp, Artificial
  Synthetic oligonucleotide
agttgtaacggcaagtgcacttacaagcggggagcgagctagcacattccaagcaaccat

SEQ ID NO: 11157 - DNA, 60 bp, Artificial
  Synthetic oligonucleotide
tgcatggcagacgtctacgaacccgagtatattctggactgagggaaacgcaccagcgcg

SEQ ID NO: 11158 - DNA, 60 bp, Artificial
  Synthetic oligonucleotide
cgtctgtcaatatgggtgcaaacaatagcaaggagtctgtgtcaagcaatggcaatcaag

SEQ ID NO: 11159 - DNA, 57 bp, Artificial
  Synthetic oligonucleotide
gcatcctcatactttggcatgtgtggatccgctgtggttaccagatttggagacagt

SEQ ID NO: 11160 - DNA, 56 bp, Artificial
  Synthetic oligonucleotide
caaacttggctcagctgtcggatgtgaccctgatgtggcgtgggcgaactatggat

SEQ ID NO: 11161 - DNA, 60 bp, Artificial
  Synthetic oligonucleotide
tagtaccaccttggaatcttcgatgcgttgcgctcagcactctaccccgagtgtagctta

SEQ ID NO: 11162 - DNA, 60 bp, Artificial
  Synthetic oligonucleotide
atggtcacaccaggatctggtcagtttatgacaacagatgattaccagtctcctagtgct

SEQ ID NO: 11163 - DNA, 60 bp, Artificial
  Synthetic oligonucleotide
cctgaggatatgattgaaactagatatgttcagacatcacaaacacgtgatgagatgagt

SEQ ID NO: 11164 - DNA, 55 bp, Artificial
  Synthetic oligonucleotide
ctagatatgttcagacatcacaaacacgtgatgagatgagtcttgagagcttctt

SEQ ID NO: 11165 - DNA, 60 bp, Artificial
  Synthetic oligonucleotide
tgtgcataaactccgcttatggcatgttctatgatggattcgctgggttcgaaaagacgg

SEQ ID NO: 11166 - DNA, 55 bp, Artificial
  Synthetic oligonucleotide
gcttatggcatgttctatgatggattcgctgggttcgaaaagacggccaatggcc

SEQ ID NO: 11167 - DNA, 60 bp, Artificial
  Synthetic oligonucleotide
gacgcactgaatgacatgggactgtttggacaaaacatgctataccactacctcgggagg

SEQ ID NO: 11168 - DNA, 60 bp, Artificial
  Synthetic oligonucleotide
tgacaatcacagattgttatcataaagcgaattggattagccatccggtgaaagtgagac

SEQ ID NO: 11169 - DNA, 55 bp, Artificial
  Synthetic oligonucleotide
aagtggatctcaacaatttctcacaactgaggacgagcagtcggctaatcttcta

SEQ ID NO: 11170 - DNA, 55 bp, Artificial
  Synthetic oligonucleotide
cacagattgttatcataaagcgaattggattggccatccggtgatagtgaaactc

SEQ ID NO: 11171 - DNA, 60 bp, Artificial
  Synthetic oligonucleotide
ctattcaggactatgtgacacaattagggagtgcctttggtagcggtttcactgacacac

SEQ ID NO: 11172 - DNA, 60 bp, Artificial
  Synthetic oligonucleotide
acatccactccatccgccattcacaccacgtctatggcaaccacatgtacgacatgatcg

SEQ ID NO: 11173 - DNA, 55 bp, Artificial
  Synthetic oligonucleotide
gcctagtatcaccctagaaggtgtgtggttggtcgctcagccgtgaacccgacgg

SEQ ID NO: 11174 - DNA, 60 bp, Artificial
  Synthetic oligonucleotide
acaagtgatagatgtcatgtctgccatatttcaaggaccaatcagtctacaaaatccacc

SEQ ID NO: 11175 - DNA, 60 bp, Artificial
  Synthetic oligonucleotide
ttgatgttgcttcacacccattagcaaccacctatcttggggaaatgagtagttgcttta

SEQ ID NO: 11176 - DNA, 53 bp, Artificial
  Synthetic oligonucleotide
atccaaatatggttccgtagtaaccaatgacatgggaaccatatgtgttagac

SEQ ID NO: 11177 - DNA, 56 bp, Artificial
  Synthetic oligonucleotide
tatggagatagccgttgcgcattatgcagcacagttatcaacattggatataaatc

SEQ ID NO: 11178 - DNA, 60 bp, Artificial
  Synthetic oligonucleotide
gtatcagaattttgtcaaaggtatacgcagtgtgtccgctggtcgcgcattgtatatacc

SEQ ID NO: 11179 - DNA, 60 bp, Artificial
  Synthetic oligonucleotide
ctaacgggtgtgaagcccagtattggacaaggtgtgaagagccccgtgtgctcatcttga

SEQ ID NO: 11180 - DNA, 57 bp, Artificial
  Synthetic oligonucleotide
tgtcagcgcaggtcgcgcactgtacatcccgccttatgagctgttactgcatgagtg

SEQ ID NO: 11181 - DNA, 55 bp, Artificial
  Synthetic oligonucleotide
ggtttcacccctagcacgccaccggtagtccctgcgtcgcactccacacttacgt

SEQ ID NO: 11182 - DNA, 60 bp, Artificial
  Synthetic oligonucleotide
gctataccactacttaggtagggcggggtacactatacatgtccagtgtaatgcatccaa

SEQ ID NO: 11183 - DNA, 57 bp, Artificial
  Synthetic oligonucleotide
atttttccgtgcgtatgctacgtgacactccattcatcggacagacagcgttactgc

SEQ ID NO: 11184 - DNA, 59 bp, Artificial
  Synthetic oligonucleotide
tgtacatcccagtaggacaagtcacagactatggctttctaaatctgggtggcaccccc

SEQ ID NO: 11185 - DNA, 60 bp, Artificial
  Synthetic oligonucleotide
ctagaggggtaacactttgtactgtgcttgactccacgctcggtccactagcgagtgtga

SEQ ID NO: 11186 - DNA, 60 bp, Artificial
  Synthetic oligonucleotide
gcacaatggagagcgcgagtatgaggaattcatccgtaaaatcagaagcgtgccagtcgg

SEQ ID NO: 11187 - DNA, 60 bp, Artificial
  Synthetic oligonucleotide
cttagaactcaatactgcaaaatgggagcgcaagtgtcaacgcagaaaacgggcgcgcac

SEQ ID NO: 11188 - DNA, 60 bp, Artificial
  Synthetic oligonucleotide
cggcttgcaacgacttctccgtgaggctacttaaagacacacccttcatatcgcagcaaa

SEQ ID NO: 11189 - DNA, 50 bp, Artificial
  Synthetic oligonucleotide
agtcaaggtgaaattcagtggatgagaccctcaagggaggttggataccc

SEQ ID NO: 11190 - DNA, 50 bp, Artificial
  Synthetic oligonucleotide
tttcatcggcacaaaataaacagggctaagttgttggagaaagcggccac

SEQ ID NO: 11191 - DNA, 59 bp, Artificial
  Synthetic oligonucleotide
cacactgaaccaactccaaggtatttcaagtgctcgtgaattggcagccagactacagc

SEQ ID NO: 11192 - DNA, 60 bp, Artificial
  Synthetic oligonucleotide
agttatcacatgcactggcaaggttattgggatgcatgttggagggaacggttcacatgg

SEQ ID NO: 11193 - DNA, 55 bp, Artificial
  Synthetic oligonucleotide
ctggcaaggtgattgggatgcatgttggagggaacggttcacacgggttcgcagc

SEQ ID NO: 11194 - DNA, 58 bp, Artificial
  Synthetic oligonucleotide
gatctagatcaattgtaccacaggggttgccgactacaactctgccaggttcaggtca

SEQ ID NO: 11195 - DNA, 55 bp, Artificial
  Synthetic oligonucleotide
cctcacaggccaaaagccctgtccgaaaggacccacacagtggagcaaccccagc

SEQ ID NO: 11196 - DNA, 51 bp, Artificial
  Synthetic oligonucleotide
ttggctcaaacacctacacaagctgtccgaaatctgatatcacctcagtag

SEQ ID NO: 11197 - DNA, 60 bp, Artificial
  Synthetic oligonucleotide
atgaaggctgtgtcccccatgtgcttccatataaggctgtgacagcgcatggttattgtg

SEQ ID NO: 11198 - DNA, 55 bp, Artificial
  Synthetic oligonucleotide
ccccatgtgcttccatataaggctgtgacagcgcatggttattgtggttctgtta

SEQ ID NO: 11199 - DNA, 55 bp, Artificial
  Synthetic oligonucleotide
cccagatctggcttggactcaaatcttttatacagcccctagccgcaatgtgctg

SEQ ID NO: 11200 - DNA, 60 bp, Artificial
  Synthetic oligonucleotide
gtagtatgggatgtggggttgcaatctagctgcgtcttgtgcgttccgtggataagccaa

SEQ ID NO: 11201 - DNA, 60 bp, Artificial
  Synthetic oligonucleotide
cacctttgtaatcactagctcccaagaccaatctacatccctgagtcaggacacgccagt

SEQ ID NO: 11202 - DNA, 60 bp, Artificial
  Synthetic oligonucleotide
cctgagtaccacatctttactcgcagaaatactgctaagcggactaagattgattgcagc

SEQ ID NO: 11203 - DNA, 60 bp, Artificial
  Synthetic oligonucleotide
tgcaagtgctgtcaaatgaatccaatcttactgtgaatttgctggtccgtcctctccaag

SEQ ID NO: 11204 - DNA, 57 bp, Artificial
  Synthetic oligonucleotide
ttagttatgcctccatgaacctggagagagtgctgactcaagagaagctggaccgca

SEQ ID NO: 11205 - DNA, 52 bp, Artificial
  Synthetic oligonucleotide
gttccggacccagacaaaccctggttgattcaccctctcatagacccgaacg

SEQ ID NO: 11206 - DNA, 52 bp, Artificial
  Synthetic oligonucleotide
ttatctggtcgaaggcacttgcaataagactggttaaccctccatgcgtgat

SEQ ID NO: 11207 - DNA, 60 bp, Artificial
  Synthetic oligonucleotide
ctctttacagaggtctgcgcaggtggctttcacctctcgacagcgcccctcaatcctgcc

SEQ ID NO: 11208 - DNA, 60 bp, Artificial
  Synthetic oligonucleotide
atccgctgtaaagacctaatggatttggcacgcatgccatcatgcttgcgtggtgaaaga

SEQ ID NO: 11209 - DNA, 58 bp, Artificial
  Synthetic oligonucleotide
cagtaggcatgaatccatggactgattgggatccaatgattaatacccttcttcccta

SEQ ID NO: 11210 - DNA, 59 bp, Artificial
  Synthetic oligonucleotide
ttacccatggtagacctggcagatgaggctagaaattccccactggtgacagtgttcta

SEQ ID NO: 11211 - DNA, 55 bp, Artificial
  Synthetic oligonucleotide
cgattcattttagtaaccctacctcagtcgaattggattgggttatactgttgta

SEQ ID NO: 11212 - DNA, 55 bp, Artificial
  Synthetic oligonucleotide
cataaaaacctatggattaggaccaagatttggaggggtgtacacatctaatgcg

SEQ ID NO: 11213 - DNA, 52 bp, Artificial
  Synthetic oligonucleotide
atccagcacactccaagcttaaagccccgaccctacgtccagtaattgtgca

SEQ ID NO: 11214 - DNA, 54 bp, Artificial
  Synthetic oligonucleotide
ttcacccagtgatgcctatgaaggatattcatgaatccatcagatggaccaagg

SEQ ID NO: 11215 - DNA, 60 bp, Artificial
  Synthetic oligonucleotide
gaggagcgaatacgtagtgtaagcgctggtcgtgcactatatatccctccttatgatctg

SEQ ID NO: 11216 - DNA, 60 bp, Artificial
  Synthetic oligonucleotide
catatgagaagcacaacggaaagttccagactactaccgtcctgtttgtgcgtgatcgga

SEQ ID NO: 11217 - DNA, 51 bp, Artificial
  Synthetic oligonucleotide
taacccagatttagcctggactcaaatcttttatacagcccccagccgcaa

SEQ ID NO: 11218 - DNA, 54 bp, Artificial
  Synthetic oligonucleotide
tctgcacccaatatggtttgaggcattagggaaggttttagatcagatagggta

SEQ ID NO: 11219 - DNA, 60 bp, Artificial
  Synthetic oligonucleotide
ctcagctattccccaccgggagctaaaccaccaaccaatcgcaaggatgcaatgctaggc

SEQ ID NO: 11220 - DNA, 57 bp, Artificial
  Synthetic oligonucleotide
atgtgagatggctagcagtccagtcccgtcggtttgcaccattatacgctgtggagg

SEQ ID NO: 11221 - DNA, 60 bp, Artificial
  Synthetic oligonucleotide
ggagcacaagtgtcaacgcagaaaactggagcacatgaaaccagtataagcgccagcggt

SEQ ID NO: 11222 - DNA, 52 bp, Artificial
  Synthetic oligonucleotide
aacaacgttcaagataaccttaggaagatggacgtatatcgagtgcaagtgt

SEQ ID NO: 11223 - DNA, 54 bp, Artificial
  Synthetic oligonucleotide
tacaatctagttgcgtgttgtgcgtaccatggattagccaaacacattacaggt

SEQ ID NO: 11224 - DNA, 60 bp, Artificial
  Synthetic oligonucleotide
ggtgcatacgggcaacaatccggagcagtgtatgttggtaattacagggtggtgaatcga

SEQ ID NO: 11225 - DNA, 60 bp, Artificial
  Synthetic oligonucleotide
tatgtcgagcaacttggcaacgcctttggatcggggttcactaaccagatatgtgaacag

SEQ ID NO: 11226 - DNA, 60 bp, Artificial
  Synthetic oligonucleotide
gaggagtgcggatatagcgacagggtgcgttcacttacattgggtaactcaaccatcacc

SEQ ID NO: 11227 - DNA, 60 bp, Artificial
  Synthetic oligonucleotide
ttaccacggctagacagaacataagggatacaagcaagctagggagccgaactatgcaga

SEQ ID NO: 11228 - DNA, 51 bp, Artificial
  Synthetic oligonucleotide
cttcctcaacttaggaggaacccccaccaagcgtatgctaatgtataactt

SEQ ID NO: 11229 - DNA, 60 bp, Artificial
  Synthetic oligonucleotide
cagcacggaacctatgaaacttgaggacgctgtctatggcactgaaggtctggaggcgct

SEQ ID NO: 11230 - DNA, 60 bp, Artificial
  Synthetic oligonucleotide
gattgcgacatggtgtgaagacccgcgtgtgcttaactgtgagtcctccggcccctgaat

SEQ ID NO: 11231 - DNA, 60 bp, Artificial
  Synthetic oligonucleotide
gctcccagcgcacttcaaccacatacgcatcggactcccctccactaacacaccaggtga

SEQ ID NO: 11232 - DNA, 60 bp, Artificial
  Synthetic oligonucleotide
gaagggcatcctattcacatcccccttcgtgctggcctcaacaaacgcaggatccattaa

SEQ ID NO: 11233 - DNA, 56 bp, Artificial
  Synthetic oligonucleotide
ccaaccaacacaacctgatgtcgcaacatgccgattttacactcttgactcggtgc

SEQ ID NO: 11234 - DNA, 58 bp, Artificial
  Synthetic oligonucleotide
accttttagttaccaccgtccaagcacatggatgtcatcaggttgctcgttgttcctg

SEQ ID NO: 11235 - DNA, 55 bp, Artificial
  Synthetic oligonucleotide
aatcccagattgctacattggaacaaagtgctccatcacagagcgatcaagaaca

SEQ ID NO: 11236 - DNA, 55 bp, Artificial
  Synthetic oligonucleotide
cgcagcgtgcctgtgggaaaatgccttctactcccagcctactctacattacgta

SEQ ID NO: 11237 - DNA, 53 bp, Artificial
  Synthetic oligonucleotide
catgttcaatgtaatgctagcaagtttcaccaaggcaccttaatagttgcaat

SEQ ID NO: 11238 - DNA, 56 bp, Artificial
  Synthetic oligonucleotide
tttcaccctactaaagaaatctcaataccaggtcaagtgagaaacctcattgaact

SEQ ID NO: 11239 - DNA, 54 bp, Artificial
  Synthetic oligonucleotide
gaaccagtagcagttgtcatacatggtgagcccggaactggaaaatccatgaca

SEQ ID NO: 11240 - DNA, 55 bp, Artificial
  Synthetic oligonucleotide
cttacacactagcacaagtgtacaatcgtatccttgatgaggacaaaaggcgcag

SEQ ID NO: 11241 - DNA, 51 bp, Artificial
  Synthetic oligonucleotide
caatcagttagaaccccagaggttattaaatactgtgaggggaataagtgg

SEQ ID NO: 11242 - DNA, 55 bp, Artificial
  Synthetic oligonucleotide
ggggacgcagatgtttgggacgtcaccttgcagtattaacttggctctcatgaag

SEQ ID NO: 11243 - DNA, 59 bp, Artificial
  Synthetic oligonucleotide
tggtaggagtgtttggactcttgaaatggatgctggggtgcttactggtagattggtta

SEQ ID NO: 11244 - DNA, 54 bp, Artificial
  Synthetic oligonucleotide
acgctatccggcttggggtcaatcacgctattttgctgcagtccgatgtggctt

SEQ ID NO: 11245 - DNA, 60 bp, Artificial
  Synthetic oligonucleotide
cagattaggaatgagatgtcccctggtgactcaattggccgcattctcgatccaatggag

SEQ ID NO: 11246 - DNA, 55 bp, Artificial
  Synthetic oligonucleotide
cacgagcctcacaggccaaaagccctgtccgaaaggacccacacagtggggttgc

SEQ ID NO: 11247 - DNA, 60 bp, Artificial
  Synthetic oligonucleotide
agagctgcatgtgtcaaagtgagacaatatagcatggggagattggctgcggaggaagac

SEQ ID NO: 11248 - DNA, 60 bp, Artificial
  Synthetic oligonucleotide
tccggttgaggatgcgataacatcagctattggaagggtcgccgacacaatgggtgctgg

SEQ ID NO: 11249 - DNA, 60 bp, Artificial
  Synthetic oligonucleotide
tttgctgacgtgcgcgacctcttgtggttggaagatgacgcaatggaacagggcgttagg

SEQ ID NO: 11250 - DNA, 55 bp, Artificial
  Synthetic oligonucleotide
cagtcatgcttgacggtcatctcattgcttttgactacagtgggtatgacgccag

SEQ ID NO: 11251 - DNA, 60 bp, Artificial
  Synthetic oligonucleotide
tgtgaagcctagaattggacagggtgcgaagagtcgagtgtgctcatcttgagtcctccg

SEQ ID NO: 11252 - DNA, 60 bp, Artificial
  Synthetic oligonucleotide
tcctactcatctgatttagtcatctaccgaacaaacactataggtgatgactacattcca

SEQ ID NO: 11253 - DNA, 60 bp, Artificial
  Synthetic oligonucleotide
ggaagttcaagagagtgaatattaccccaaaaggtaccagtcgcatgtgctgctagccgc

SEQ ID NO: 11254 - DNA, 60 bp, Artificial
  Synthetic oligonucleotide
tggagtaagataccagtcatgcttgacggtcatctcattgcttttgactacagtgggtat

SEQ ID NO: 11255 - DNA, 60 bp, Artificial
  Synthetic oligonucleotide
agtaagataccagtcatgcttgacggtcacctatttgcctttgactatactggttatgat

SEQ ID NO: 11256 - DNA, 51 bp, Artificial
  Synthetic oligonucleotide
tggtgtagtactctgtcattccggtgactttgtacgccagtttttacaccc

SEQ ID NO: 11257 - DNA, 50 bp, Artificial
  Synthetic oligonucleotide
agttgttggatacggggtgtggcctcattacttgactccacaagatgcta

SEQ ID NO: 11258 - DNA, 55 bp, Artificial
  Synthetic oligonucleotide
gctaaccgaactagataacggcgcagtaggggtaaatcttccgcattcggtgcgg

SEQ ID NO: 11259 - DNA, 53 bp, Artificial
  Synthetic oligonucleotide
gcttggtacaacccagatatgatgtacggtgcttggtactatagccatgtgta

SEQ ID NO: 11260 - DNA, 59 bp, Artificial
  Synthetic oligonucleotide
ataccatgttagggtctgttacccggatgtttacacaatggcgtggatccatagtcata

SEQ ID NO: 11261 - DNA, 52 bp, Artificial
  Synthetic oligonucleotide
aagaaaggcttgcgccggactgacctgtggaactcaaagactggtccttcat

SEQ ID NO: 11262 - DNA, 57 bp, Artificial
  Synthetic oligonucleotide
cacttacaccatgatctcctatggggacgacatcgtggttgcaagtgattacgacct

SEQ ID NO: 11263 - DNA, 60 bp, Artificial
  Synthetic oligonucleotide
tcatcacatgtactggcaaggtgattgggatgcatgttggagggaacggttcacacgggt

SEQ ID NO: 11264 - DNA, 60 bp, Artificial
  Synthetic oligonucleotide
ctgcccacattgaagtctccgagtgctgaagcgtgtggttatagtgaccgtgttgcgcaa

SEQ ID NO: 11265 - DNA, 58 bp, Artificial
  Synthetic oligonucleotide
tctatggcaccgagggcctagaagcgctggatctaaccacaagtgcggggtaccccta

SEQ ID NO: 11266 - DNA, 54 bp, Artificial
  Synthetic oligonucleotide
ttcaacggactacgcaatgccatcacccaaggattacccgtcctcaatacgccc

SEQ ID NO: 11267 - DNA, 59 bp, Artificial
  Synthetic oligonucleotide
atgccaatatgtatgccactttctatgatggatatccgtcttttggaaacataaacgga

SEQ ID NO: 11268 - DNA, 55 bp, Artificial
  Synthetic oligonucleotide
atgatggtcagtgagttactaagggagttcacgcaccgacacaacacacagaacc

SEQ ID NO: 11269 - DNA, 60 bp, Artificial
  Synthetic oligonucleotide
acctacacaagctgcccaaagtctgacgtcacctcagtagctgatgagagcacatccggt

SEQ ID NO: 11270 - DNA, 53 bp, Artificial
  Synthetic oligonucleotide
cttatgctcacacagccatcctctagtaagtttgtgagatgtccgatgacgtg

SEQ ID NO: 11271 - DNA, 60 bp, Artificial
  Synthetic oligonucleotide
ctgatgtgactgtgcactgcccgtgggccattgtggttgttgtcttgagagaactgacag

SEQ ID NO: 11272 - DNA, 57 bp, Artificial
  Synthetic oligonucleotide
attccggggacagaaactggtcggctttcagctgccatgacaaccatgtcactccag

SEQ ID NO: 11273 - DNA, 60 bp, Artificial
  Synthetic oligonucleotide
gaaggctgtgttcctcacgtgctaccatacaaagctgtgacagcccatggctactgcggc

SEQ ID NO: 11274 - DNA, 60 bp, Artificial
  Synthetic oligonucleotide
gtgctgataagactggacctattttccatatgccattgagacctactgacacccaaaccg

SEQ ID NO: 11275 - DNA, 56 bp, Artificial
  Synthetic oligonucleotide
gacctggaacactacaagctaaattactgtctattgcccagttggcttttcacctc

SEQ ID NO: 11276 - DNA, 53 bp, Artificial
  Synthetic oligonucleotide
ccagcaaattgtagtgatgctttctgccggggaagacttctcttacaggttgc

SEQ ID NO: 11277 - DNA, 56 bp, Artificial
  Synthetic oligonucleotide
gcccgcggtaccacgaaagttagcgcagtggtcccgttctgtgcacctacatctct

SEQ ID NO: 11278 - DNA, 60 bp, Artificial
  Synthetic oligonucleotide
cgacactctcaagtgccgactaggacaatggcttgctggacggcccccacaggatgtgca

SEQ ID NO: 11279 - DNA, 59 bp, Artificial
  Synthetic oligonucleotide
ttgtgcacgttccacggaaaaccaaattgcgcagaacagtagcacacccttgcttccaa

SEQ ID NO: 11280 - DNA, 60 bp, Artificial
  Synthetic oligonucleotide
cctgaatattgtagtgactcagatgcaactgctgtcgacaaaccaacaagaccagacgtt

SEQ ID NO: 11281 - DNA, 60 bp, Artificial
  Synthetic oligonucleotide
tcctccggcccctgaatgcggctaatcttaccccgcagctgttgcacacaatccagtgtg

SEQ ID NO: 11282 - DNA, 53 bp, Artificial
  Synthetic oligonucleotide
gaccaacccagcattgatgagtccaagtatagaggcttgtgggttttccgata

SEQ ID NO: 11283 - DNA, 60 bp, Artificial
  Synthetic oligonucleotide
atattagtcacatgctctgcatgtccagatatggcagttcgcatgttacgtgacaccccc

SEQ ID NO: 11284 - DNA, 60 bp, Artificial
  Synthetic oligonucleotide
tgtgctgactggatcggctgtaggatgcgatcctgatgtcttttggtcacagatgaaagc

SEQ ID NO: 11285 - DNA, 60 bp, Artificial
  Synthetic oligonucleotide
agtgtggcccacttatttatctgatgacgaggccactgcggaggatcagccaacacaacc

SEQ ID NO: 11286 - DNA, 60 bp, Artificial
  Synthetic oligonucleotide
ttgggtgacatatacatcaggcacgtgagtggtgagagcccattgccaataactagcact

SEQ ID NO: 11287 - DNA, 60 bp, Artificial
  Synthetic oligonucleotide
ggctaccaatccgttggtgccttcggacaccgtgcaaacgcgccatgtcatccagagacg

SEQ ID NO: 11288 - DNA, 60 bp, Artificial
  Synthetic oligonucleotide
agcgcataaagttctcaacagtgtcaatagtgggtcaaccagtacaggagctgacactag

SEQ ID NO: 11289 - DNA, 58 bp, Artificial
  Synthetic oligonucleotide
gattttaagcttaggctgatgaaagatactcaaactatctcacagactgttgcactca

SEQ ID NO: 11290 - DNA, 54 bp, Artificial
  Synthetic oligonucleotide
ctagtttagataacaagggcatgttattcaccagtaattttgttctagcctcca

SEQ ID NO: 11291 - DNA, 51 bp, Artificial
  Synthetic oligonucleotide
acaaagtccgattagggaaaagtagattaattgaagcctccagtttgaatg

SEQ ID NO: 11292 - DNA, 53 bp, Artificial
  Synthetic oligonucleotide
gtcatcggttcccactcccgaagttgtcgccgtcaaaagcaacgacatcggac

SEQ ID NO: 11293 - DNA, 60 bp, Artificial
  Synthetic oligonucleotide
tccattagcgtgtccaagcacgtttttggcgatcgggcgtatctgatgaccggtggcaac

SEQ ID NO: 11294 - DNA, 60 bp, Artificial
  Synthetic oligonucleotide
caccaggcgcccccgcaccaactgccagagactcatttgcatggcagtccgccacaaatc

SEQ ID NO: 11295 - DNA, 60 bp, Artificial
  Synthetic oligonucleotide
gagccttgtgacataatccaatgtcattaaggtcgtaatgagcaattctgggacgggacc

SEQ ID NO: 11296 - DNA, 50 bp, Artificial
  Synthetic oligonucleotide
cctttgatacacatcccaggtagagtcactaatttgttggaactaataca

SEQ ID NO: 11297 - DNA, 56 bp, Artificial
  Synthetic oligonucleotide
gttgatttcataccaccaatggcaaacttagacaacaagggcatgttattcacaag

SEQ ID NO: 11298 - DNA, 52 bp, Artificial
  Synthetic oligonucleotide
caggacacaaccaaaatggaggaatgcctagacaaatacggcatagacctac

SEQ ID NO: 11299 - DNA, 55 bp, Artificial
  Synthetic oligonucleotide
gtactaagtatggtttgactataacaccaccagacaagtccacacaattccacaa

SEQ ID NO: 11300 - DNA, 52 bp, Artificial
  Synthetic oligonucleotide
aatcgaggaattgttaccatatagctattggattggccatccggtgtctaac

SEQ ID NO: 11301 - DNA, 60 bp, Artificial
  Synthetic oligonucleotide
ctacattcttgactccggcatcccactgtctcaagctctgatcttccctcatcagtggat

SEQ ID NO: 11302 - DNA, 60 bp, Artificial
  Synthetic oligonucleotide
ctagatgctgctagagctgccaaactttgttcagagaacaacactgctaacttcaaaaag

SEQ ID NO: 11303 - DNA, 54 bp, Artificial
  Synthetic oligonucleotide
accaccaggcggagccgcacccaccacacggaaagatgccatgttaggcacaca

SEQ ID NO: 11304 - DNA, 60 bp, Artificial
  Synthetic oligonucleotide
ttgtttccaggacgaatgcacacggctgtgacagaattgctagatgcaattgcagcactg

SEQ ID NO: 11305 - DNA, 56 bp, Artificial
  Synthetic oligonucleotide
atttctgcctacgcatggcaagagatactaacttacacaagcaaagtggacctatt

SEQ ID NO: 11306 - DNA, 52 bp, Artificial
  Synthetic oligonucleotide
catgaatgtgggtatccaactatacacacccctgcaaaaacaaagttacagc

SEQ ID NO: 11307 - DNA, 59 bp, Artificial
  Synthetic oligonucleotide
atgaatcaattaggtggactaagaagccctcacaaatgcaggaacacgtactatccttg

SEQ ID NO: 11308 - DNA, 60 bp, Artificial
  Synthetic oligonucleotide
gaatgcggctaatcccaactgcggagcaaatacccacatgccagtgggcagtctgtcgta

SEQ ID NO: 11309 - DNA, 53 bp, Artificial
  Synthetic oligonucleotide
gcatggatggcttaacaattaacatgttgtacgtgcccccaggtagctcatgg

SEQ ID NO: 11310 - DNA, 54 bp, Artificial
  Synthetic oligonucleotide
aataggcaatcgctcctaaaactagttgagatgcaaggaccaaaaggacaagcc

SEQ ID NO: 11311 - DNA, 60 bp, Artificial
  Synthetic oligonucleotide
tgtcattgacgtggcagggtttggacatgcaatagtcggccgaatgctgtttggtcgatt

SEQ ID NO: 11312 - DNA, 59 bp, Artificial
  Synthetic oligonucleotide
tggcaacgaacttgattgggcgctcgctcgctgagaaactcaacagctcggtgtactca

SEQ ID NO: 11313 - DNA, 55 bp, Artificial
  Synthetic oligonucleotide
cgtagggcgctgcttgtccctccctgcgttttcaacgctgcgcaggaagtggttg

SEQ ID NO: 11314 - DNA, 60 bp, Artificial
  Synthetic oligonucleotide
tctgtttccccggtgacattgcatagactgctcacgcggttgaaagtgatcgatccgtta

SEQ ID NO: 11315 - DNA, 60 bp, Artificial
  Synthetic oligonucleotide
accctactatgccaatgagggagatccatgagtccattcgatggaccaaggacgcacgaa

SEQ ID NO: 11316 - DNA, 57 bp, Artificial
  Synthetic oligonucleotide
caatatacccacatcaacttatcaacttaagaagtaacaattcagccacaatcatag

SEQ ID NO: 11317 - DNA, 52 bp, Artificial
  Synthetic oligonucleotide
gtgctcgtagccaaggtctaccagccatgctaacccctgggtctggacaatt

SEQ ID NO: 11318 - DNA, 55 bp, Artificial
  Synthetic oligonucleotide
ggtgcgaagagtctattgagctagttagtggtcctccggcccctgaatgcggcta

SEQ ID NO: 11319 - DNA, 59 bp, Artificial
  Synthetic oligonucleotide
ggttcagagtgcagccagaaattttgggatggaagtgacctcatcagataaatctggtc

SEQ ID NO: 11320 - DNA, 55 bp, Artificial
  Synthetic oligonucleotide
caagaagattctgggcttccattcagccggctccatgggcgttgcagccgcgtcg

SEQ ID NO: 11321 - DNA, 56 bp, Artificial
  Synthetic oligonucleotide
tgcttgccgtgcattctggcaaacaggagtacgatcgactctttgccccgtttcgc

SEQ ID NO: 11322 - DNA, 55 bp, Artificial
  Synthetic oligonucleotide
aacacttgtgcatgctccggactgataaggactatatttgtgaacacaccactcg

SEQ ID NO: 11323 - DNA, 60 bp, Artificial
  Synthetic oligonucleotide
ttgccatacggcatcctactgccagcggatccacacctggtaacaggtgcccctggggcc

SEQ ID NO: 11324 - DNA, 60 bp, Artificial
  Synthetic oligonucleotide
agtcgtgctttgcggggtgatatggctaatttggcaaatcggagtccgtatgaccagcaa

SEQ ID NO: 11325 - DNA, 60 bp, Artificial
  Synthetic oligonucleotide
gaatgcggctaatcctaactgcggagcaggcacctacaagccagtgggcagcctgtcgta

SEQ ID NO: 11326 - DNA, 60 bp, Artificial
  Synthetic oligonucleotide
gaatgcggctaatcctaactgcggagcaggtgcacacaaaccagtgagtagcctgtcgta

SEQ ID NO: 11327 - DNA, 60 bp, Artificial
  Synthetic oligonucleotide
cgaactattgattgcctacacaccaccaggtgcttcacaacctacaactagaacacaagc

SEQ ID NO: 11328 - DNA, 60 bp, Artificial
  Synthetic oligonucleotide
agtggcaggcactatttacatagtgtaccggctcttctcaggcatgcaaggcccatactc

SEQ ID NO: 11329 - DNA, 57 bp, Artificial
  Synthetic oligonucleotide
ggcattgttccaaggtccaccaaagttcaagcctctcacaatctcactagatacacc

SEQ ID NO: 11330 - DNA, 60 bp, Artificial
  Synthetic oligonucleotide
tatccacccagtcatgcctatgtcagagatccacgagtccatccgttggaccaaggatgc

SEQ ID NO: 11331 - DNA, 55 bp, Artificial
  Synthetic oligonucleotide
cctccggcccctgaatgcggctaatcctaactgcggagcacataccctcgaccca

SEQ ID NO: 11332 - DNA, 54 bp, Artificial
  Synthetic oligonucleotide
atgacaaaggagggtgctacctgcggtatcgttttccgcgcgccaacatgtatt

SEQ ID NO: 11333 - DNA, 52 bp, Artificial
  Synthetic oligonucleotide
gatgggactgtaatgcccaatgtcttgtcctatgccgctcagacctcacgcg

SEQ ID NO: 11334 - DNA, 53 bp, Artificial
  Synthetic oligonucleotide
atgttaatgattccagcccaggcggtttaaccagtaccattcgcatctacttc

SEQ ID NO: 11335 - DNA, 60 bp, Artificial
  Synthetic oligonucleotide
agtccctttatggctgcaagatggctacccacctcggatcactgaactggagctcgaccc

SEQ ID NO: 11336 - DNA, 55 bp, Artificial
  Synthetic oligonucleotide
ccgaactagacaacggtgcagtaggggtaaattctccgcattcggtgcggaggag

SEQ ID NO: 11337 - DNA, 60 bp, Artificial
  Synthetic oligonucleotide
aactgccaaagtgcaaggaccagggtttgactatgcagttgcgatggccaagagaaacat

SEQ ID NO: 11338 - DNA, 60 bp, Artificial
  Synthetic oligonucleotide
cccatggggaaacccatgggacgctcttatatagacatggtgcgaagagtctattgagct

SEQ ID NO: 11339 - DNA, 55 bp, Artificial
  Synthetic oligonucleotide
ccctacagctggacccacggcaccgcgtggccattttagctggattgtgcggact

SEQ ID NO: 11340 - DNA, 60 bp, Artificial
  Synthetic oligonucleotide
gacctaccatccccttgacgaattcacactggagacgcacctctcacttgccgctcttca

SEQ ID NO: 11341 - DNA, 60 bp, Artificial
  Synthetic oligonucleotide
ccaaacacaccaccaacctggagagtctgcctcctatctttgacatcgtgtgtggtgagt

SEQ ID NO: 11342 - DNA, 60 bp, Artificial
  Synthetic oligonucleotide
cagtaacgccatggaggttgcgcagtgtttcgctccacacaaccccagtgtagatcaggt

SEQ ID NO: 11343 - DNA, 60 bp, Artificial
  Synthetic oligonucleotide
cagtgaatgatgagacaatgaataccatgcttggatcagtcactaggatgtttacacagt

SEQ ID NO: 11344 - DNA, 55 bp, Artificial
  Synthetic oligonucleotide
aataccatgcttggatcagtcactaggatgtttacacagtggcgaggttcccttg

SEQ ID NO: 11345 - DNA, 60 bp, Artificial
  Synthetic oligonucleotide
caaatacgccagttgttgtagccacaccctactggtcgaaaggctatgtgactgtgtggc

SEQ ID NO: 11346 - DNA, 60 bp, Artificial
  Synthetic oligonucleotide
ctatatgtgcctcctggtagtggttggaacatcgagaatgtgcaacaagctactcctatt

SEQ ID NO: 11347 - DNA, 50 bp, Artificial
  Synthetic oligonucleotide
gttgcccgtgcagcagctagctatgctgccgaaggacctgttggcatcct

SEQ ID NO: 11348 - DNA, 60 bp, Artificial
  Synthetic oligonucleotide
acggaagtccgtgacacagctaattatcaacctagtgatgatgcatggctcaattttgat

SEQ ID NO: 11349 - DNA, 55 bp, Artificial
  Synthetic oligonucleotide
gacacagctaattatcaacctagtgatgatgcatggctcaattttgatggcaccc

SEQ ID NO: 11350 - DNA, 55 bp, Artificial
  Synthetic oligonucleotide
gagggaccatgtaaacctggggactgcggtggcaagttattatgcaagcatggtg

SEQ ID NO: 11351 - DNA, 56 bp, Artificial
  Synthetic oligonucleotide
cctcattatcttacaccccaagatgccactgctatagacaaaccctccagacctga

SEQ ID NO: 11352 - DNA, 50 bp, Artificial
  Synthetic oligonucleotide
aagtctggatactgtggtggagttctatacaaaatagggcagatcatagg

SEQ ID NO: 11353 - DNA, 60 bp, Artificial
  Synthetic oligonucleotide
attccagttatgcttgatggagagtgcattatggcatttgattacactaattatgatggt

SEQ ID NO: 11354 - DNA, 60 bp, Artificial
  Synthetic oligonucleotide
atgctgctaatcccaacctccgagcgtgtgcgcacaatccagtgttgctacgtcgtaacg

SEQ ID NO: 11355 - DNA, 60 bp, Artificial
  Synthetic oligonucleotide
acatcatagtcggttatggtgagtggccttcctactgctcggattctgacgctacagcag

SEQ ID NO: 11356 - DNA, 60 bp, Artificial
  Synthetic oligonucleotide
gacgctctaatgtggacatggtgcgaagagtctattgagctagttagtagtcctccggcc

SEQ ID NO: 11357 - DNA, 55 bp, Artificial
  Synthetic oligonucleotide
ctggaaattcggccgtaaacacccaatcatcagtaggccgactatgcggttatgg

SEQ ID NO: 11358 - DNA, 53 bp, Artificial
  Synthetic oligonucleotide
gcttgttcacacccatacatttaattcggcctcttgtgacaagcccctcggtg

SEQ ID NO: 11359 - DNA, 60 bp, Artificial
  Synthetic oligonucleotide
gaactccgggcgctttccatccgctgtgatgggctcactcctgtacaccgtgagtccgcg

SEQ ID NO: 11360 - DNA, 60 bp, Artificial
  Synthetic oligonucleotide
cactataccacacttacactaattttgagcgggatgacatcagtatgttagcctatggcg

SEQ ID NO: 11361 - DNA, 55 bp, Artificial
  Synthetic oligonucleotide
actacccagtatccttcgttggcccaacgttccagtacatggaggctaatgacta

SEQ ID NO: 11362 - DNA, 55 bp, Artificial
  Synthetic oligonucleotide
gtgggataccctagagtacacgtaaaacacccaccggtttggcaggacatcgcag

SEQ ID NO: 11363 - DNA, 60 bp, Artificial
  Synthetic oligonucleotide
cgggtgtgaagccataatattgacagggtgtgaagagcctactgtgctcaccttgagtcc

SEQ ID NO: 11364 - DNA, 60 bp, Artificial
  Synthetic oligonucleotide
tccccggtgacattgcatagactgctcacgcggttgaaagcgatcgatccgttacccgct

SEQ ID NO: 11365 - DNA, 60 bp, Artificial
  Synthetic oligonucleotide
agttacccacataagattgatccgggtctactggcagaggcaggcaaacattatggatta

SEQ ID NO: 11366 - DNA, 59 bp, Artificial
  Synthetic oligonucleotide
ttggatcgcgcacgcttgacgtgtcgcgtgttacgcgggtggatgacggtgagttatct

SEQ ID NO: 11367 - DNA, 51 bp, Artificial
  Synthetic oligonucleotide
tacctctcttacactactacttcttaccatgtctatgactccctgtggtat

SEQ ID NO: 11368 - DNA, 55 bp, Artificial
  Synthetic oligonucleotide
cactttgagtcctccggcccctgaatgtggctaaccttaaccctgcagctggtgc

SEQ ID NO: 11369 - DNA, 60 bp, Artificial
  Synthetic oligonucleotide
aatctacatgaggctgaaacatatcagggcttgggttccacgacctattagatcacaacc

SEQ ID NO: 11370 - DNA, 60 bp, Artificial
  Synthetic oligonucleotide
taaatcaccatcagcagaggcgtgtggttatagtgacagggttgcgcaactaactctggg

SEQ ID NO: 11371 - DNA, 60 bp, Artificial
  Synthetic oligonucleotide
atgtacccaagaacatgtgaggtcattgtgtgaattggcatggcacaacggtgaggaagt

SEQ ID NO: 11372 - DNA, 52 bp, Artificial
  Synthetic oligonucleotide
tagggctgggtacaccatacatgtgcagtgtaatgctagtaaattccaccag

SEQ ID NO: 11373 - DNA, 60 bp, Artificial
  Synthetic oligonucleotide
tcagacgatttccaatcaccctctgctatgccacagttcgaccctacaccgttaatgcac

SEQ ID NO: 11374 - DNA, 60 bp, Artificial
  Synthetic oligonucleotide
gctgccaagacccgagcacccgtttagatcaagacatgccagtgctaacccaccagatca

SEQ ID NO: 11375 - DNA, 56 bp, Artificial
  Synthetic oligonucleotide
caataaagtggatgggtacgagtggcagacatcgacaaacccaagtgtgttttgga

SEQ ID NO: 11376 - DNA, 51 bp, Artificial
  Synthetic oligonucleotide
actaaccagatatgtgagcaggttaacctcctcaaggagtccctcgtaggc

SEQ ID NO: 11377 - DNA, 58 bp, Artificial
  Synthetic oligonucleotide
cattaccatagtgagcttccaggttgggaaacctggactgggtctatactgcctgata

SEQ ID NO: 11378 - DNA, 60 bp, Artificial
  Synthetic oligonucleotide
gacaagatagttccatgtattatcctgcaacccagacagggccttatgaggtgtgccaaa

SEQ ID NO: 11379 - DNA, 60 bp, Artificial
  Synthetic oligonucleotide
gcagaggtgctttgacttcggaatggatacacacttcaatctgggaatgcatgactgggt

SEQ ID NO: 11380 - DNA, 60 bp, Artificial
  Synthetic oligonucleotide
atatcattggcacaggattaataattaggctaattggcaatagaccctaatccgcctata

SEQ ID NO: 11381 - DNA, 54 bp, Artificial
  Synthetic oligonucleotide
cacaatcacattatggcaccacagtagttaatgacatgggcacattatgcttta

SEQ ID NO: 11382 - DNA, 60 bp, Artificial
  Synthetic oligonucleotide
gcacccatgttgtggacgtcatgactgctatatttcaaggaccaatttcaatggaagtcc

SEQ ID NO: 11383 - DNA, 60 bp, Artificial
  Synthetic oligonucleotide
taagtctgtgaccagccaaattattgcccaatccgtgtctaagatggcctttggtcgtca

SEQ ID NO: 11384 - DNA, 55 bp, Artificial
  Synthetic oligonucleotide
ttgcttggtaaagaatcgggaaatccgtgtttctagtgcagagaagacccagccc

SEQ ID NO: 11385 - DNA, 60 bp, Artificial
  Synthetic oligonucleotide
cgattgaacatctcggacattctgcgggaccctgtcatacgccagtctttacatgccact

SEQ ID NO: 11386 - DNA, 60 bp, Artificial
  Synthetic oligonucleotide
ctagagcttgtaagaaggaagggtgttgctgtagtaataagcacaattaccctgatgagc

SEQ ID NO: 11387 - DNA, 52 bp, Artificial
  Synthetic oligonucleotide
cccagatttggcctggacccagatcttctatacagctcccagccgtaatgtg

SEQ ID NO: 11388 - DNA, 50 bp, Artificial
  Synthetic oligonucleotide
ctaggaaacaagctatgttaggaacacacgtagtgtgggatgtgggatta

SEQ ID NO: 11389 - DNA, 60 bp, Artificial
  Synthetic oligonucleotide
tgccatgggttagcgctagccattttagaaacacaaccccagatacctattcacttgcag

SEQ ID NO: 11390 - DNA, 51 bp, Artificial
  Synthetic oligonucleotide
cacaaacaatcattgctactctaaccttgattggctgttcaggatcaccat

SEQ ID NO: 11391 - DNA, 54 bp, Artificial
  Synthetic oligonucleotide
ccattattcagcccaactaatgactctagatatccaaacaagtagtgtctcact

SEQ ID NO: 11392 - DNA, 60 bp, Artificial
  Synthetic oligonucleotide
ccccatgcggcgtctcctcatacctgtgagtgttcaatcagctgtagaccaactgtgcgc

SEQ ID NO: 11393 - DNA, 50 bp, Artificial
  Synthetic oligonucleotide
cgttcctgatccccaagtcggcataacaaccatgagggacttaaaaggga

SEQ ID NO: 11394 - DNA, 60 bp, Artificial
  Synthetic oligonucleotide
accatacttctatgcaggaattgtgaccatgtggtaccagacaaattttgtagtcccaga

SEQ ID NO: 11395 - DNA, 60 bp, Artificial
  Synthetic oligonucleotide
ccaccactacagcccatggttgtgacgtaattgcccgatgcaattgtaacactggtgtgt

SEQ ID NO: 11396 - DNA, 55 bp, Artificial
  Synthetic oligonucleotide
tacccctacccaattgatgcaggtctacttgctaaggcggggaaggagtatggcc

SEQ ID NO: 11397 - DNA, 60 bp, Artificial
  Synthetic oligonucleotide
gtggacacaaagccagcctacgggcagaccaggtacttcagattcattcgctgtggctac

SEQ ID NO: 11398 - DNA, 60 bp, Artificial
  Synthetic oligonucleotide
cagacccagatgctctagaaaggaggttcccaattcggctcaatattcgcccattgcaga

SEQ ID NO: 11399 - DNA, 60 bp, Artificial
  Synthetic oligonucleotide
ctgtgttggccacacttggctatgacatcagccagtgctatgttgtcagttatggcgacg

SEQ ID NO: 11400 - DNA, 55 bp, Artificial
  Synthetic oligonucleotide
tcgagtcaattttctgtcatcgaacggtgtaataactgtaccagccggagagcag

SEQ ID NO: 11401 - DNA, 50 bp, Artificial
  Synthetic oligonucleotide
ggttacgagtagtcgtgcactacggggtgatatggcaaaccttacaaatc

SEQ ID NO: 11402 - DNA, 54 bp, Artificial
  Synthetic oligonucleotide
atgtggttagaacactaattaattaggacactaacttggaacattggacatgac

SEQ ID NO: 11403 - DNA, 55 bp, Artificial
  Synthetic oligonucleotide
gttggacgaaagaccccaggcatactgaagaccacgttcgttcgctgtgcctatt

SEQ ID NO: 11404 - DNA, 53 bp, Artificial
  Synthetic oligonucleotide
tgtgacatcagtagctgatgaagggacaaccggtggaccagcagtttcccgtt

SEQ ID NO: 11405 - DNA, 55 bp, Artificial
  Synthetic oligonucleotide
tctagttgtgccttatgtggccccctatgatttttcccctgtgagaaccccatgg

SEQ ID NO: 11406 - DNA, 51 bp, Artificial
  Synthetic oligonucleotide
acactccttattggtccaaaggttatgttactgtttggcaatattcaaact

SEQ ID NO: 11407 - DNA, 60 bp, Artificial
  Synthetic oligonucleotide
acgccttaagtatgacatggtgtgaagacccgcatgtgcttaactgtgagtcctccggcc

SEQ ID NO: 11408 - DNA, 55 bp, Artificial
  Synthetic oligonucleotide
ggcgtgactaagcccaaacaagtgattaaattggatgcagatccagtagagtccc

SEQ ID NO: 11409 - DNA, 60 bp, Artificial
  Synthetic oligonucleotide
tggtctgagacgatcgcaccccttactgtcttctctggacccaaggctctcacccctggc

SEQ ID NO: 11410 - DNA, 60 bp, Artificial
  Synthetic oligonucleotide
gaactggatttacagagtctatcaccagagaagtccaagcattgaaagatcatctcttag

SEQ ID NO: 11411 - DNA, 60 bp, Artificial
  Synthetic oligonucleotide
tacgcgtcacgcctgcacagtgtgctgggtacggcaaatgccccactgagcatttacgag

SEQ ID NO: 11412 - DNA, 59 bp, Artificial
  Synthetic oligonucleotide
tacgcgtcgcgtctgcatagcgtgctaggcacggcaaatgccccactgagcatttacga

SEQ ID NO: 11413 - DNA, 60 bp, Artificial
  Synthetic oligonucleotide
tatggtgacaaacgaagagttgttaccatatagctattggattggccatccggtgtgcaa

SEQ ID NO: 11414 - DNA, 60 bp, Artificial
  Synthetic oligonucleotide
taccctgtgagtgtaacaaaacaccagtggtatgagatacaggaatcagattattatcct

SEQ ID NO: 11415 - DNA, 60 bp, Artificial
  Synthetic oligonucleotide
gccgatgtctgaaattcacgagtctatcaggtggactagagatgcacgaaacactcaaga

SEQ ID NO: 11416 - DNA, 56 bp, Artificial
  Synthetic oligonucleotide
tacatcccatttacccagaaagtgaagtttgggagtccattagatggacgaagaac

SEQ ID NO: 11417 - DNA, 60 bp, Artificial
  Synthetic oligonucleotide
tccggcccctgaatgtggctaaccttaaccctgcagctagtgtgtacaatccagtacata

SEQ ID NO: 11418 - DNA, 60 bp, Artificial
  Synthetic oligonucleotide
gcttgtggaccttatgctcacacagccatcctctaataagtttgtaagacgtctgatgac

SEQ ID NO: 11419 - DNA, 60 bp, Artificial
  Synthetic oligonucleotide
gcttgtggaccttatgctcacacagccatcctctagtaagtttgtgagacgtctggagac

SEQ ID NO: 11420 - DNA, 60 bp, Artificial
  Synthetic oligonucleotide
taactctattagtgagataccacgcttgtggaccttatgctcacacagccatcctctagt

SEQ ID NO: 11421 - DNA, 51 bp, Artificial
  Synthetic oligonucleotide
gcagtcgtaatgggcaactatgggatgggaccaactactttgggtgtccgt

SEQ ID NO: 11422 - DNA, 60 bp, Artificial
  Synthetic oligonucleotide
tggtgacaatctaagattgttatcatatagctattggattggccatccggtgatttgtcg

SEQ ID NO: 11423 - DNA, 60 bp, Artificial
  Synthetic oligonucleotide
gacgccaatttactgacatggtgtgaagacttgcatgtgcttgattgtgactcctccggc

SEQ ID NO: 11424 - DNA, 60 bp, Artificial
  Synthetic oligonucleotide
ggagtgtacgatcagatttgtgtcctgcccacacatgctcaacctacagacaatgttctc

SEQ ID NO: 11425 - DNA, 60 bp, Artificial
  Synthetic oligonucleotide
aagtctcaaagaggcactatatggagttgatggtcttgaacctattgacattacaacaag

SEQ ID NO: 11426 - DNA, 56 bp, Artificial
  Synthetic oligonucleotide
ttcaatgcttcgacataataactggagcctggtcatcataccaattagtccattac

SEQ ID NO: 11427 - DNA, 60 bp, Artificial
  Synthetic oligonucleotide
ccatggcagaccttccggataagggcaaacccttctcatccagatatgttttatgctcca

SEQ ID NO: 11428 - DNA, 60 bp, Artificial
  Synthetic oligonucleotide
tgttcgggatagatggacttgaagccctggacttacataccagtgcaggatacccttaca

SEQ ID NO: 11429 - DNA, 59 bp, Artificial
  Synthetic oligonucleotide
ttcctgagtattgtctggcgggtgacagtgacaagcaaaggtacactagttatgcaaat

SEQ ID NO: 11430 - DNA, 60 bp, Artificial
  Synthetic oligonucleotide
atctgatccgcgcttgtcacacaccatgcttggggaagtactgaactattatactcattg

SEQ ID NO: 11431 - DNA, 60 bp, Artificial
  Synthetic oligonucleotide
tgatactaaggccagtggcccggcgcattccaaggaggtacctgcactcactgcagtcga

SEQ ID NO: 11432 - DNA, 60 bp, Artificial
  Synthetic oligonucleotide
gtaccatccgacacagttcaaacgcgccacgtagtccaacgacgcagcaggtcagagtcc

SEQ ID NO: 11433 - DNA, 60 bp, Artificial
  Synthetic oligonucleotide
caagctacagatcactttacctgcgttgggtgaacgccgtgtgtggtgacgcataatccc

SEQ ID NO: 11434 - DNA, 60 bp, Artificial
  Synthetic oligonucleotide
cttctgggtgtgaagccaaatactagacaaggtgtgaagagccccgtgtgttcatcttga

SEQ ID NO: 11435 - DNA, 60 bp, Artificial
  Synthetic oligonucleotide
tgacgctcggtaacagtaccattaccacccaggaggcagccaacatttgtgtcgcctatg

SEQ ID NO: 11436 - DNA, 55 bp, Artificial
  Synthetic oligonucleotide
agacagaagcacgaccatgctacagcgcgttgtgagccagtcgtgattgtgctcc

SEQ ID NO: 11437 - DNA, 60 bp, Artificial
  Synthetic oligonucleotide
tagtggctcaagctcctgtggatgaggtcagcttccactctgtagtacagcagttgaagg

SEQ ID NO: 11438 - DNA, 56 bp, Artificial
  Synthetic oligonucleotide
tgtataccctactggagtgagcacacagacctgtctcttggtgaaaggtcgcactc

SEQ ID NO: 11439 - DNA, 59 bp, Artificial
  Synthetic oligonucleotide
tgaggagaagcgctacttgataactgggggtctgccctctggttgtgcagcgacctcga

SEQ ID NO: 11440 - DNA, 60 bp, Artificial
  Synthetic oligonucleotide
taggcactatgagggagtcgagctgtcgcactacaccatgatttcctacggggatgacat

SEQ ID NO: 11441 - DNA, 54 bp, Artificial
  Synthetic oligonucleotide
cggagacgccctcattcaggttaccgtcaacagttcaccacaagccagtggtgt

SEQ ID NO: 11442 - DNA, 55 bp, Artificial
  Synthetic oligonucleotide
acagacacggtgtgaagagtctattgagctagttagtagtcctccggcccctgaa

SEQ ID NO: 11443 - DNA, 60 bp, Artificial
  Synthetic oligonucleotide
tcaccgtgggaaccgcgtgagagacatcacgaagcactttcgtgacacagcaagaatgaa

SEQ ID NO: 11444 - DNA, 51 bp, Artificial
  Synthetic oligonucleotide
tacggtcgtaacgcgcaagtgtgggatgggaccaactactttgggtgtccg

SEQ ID NO: 11445 - DNA, 57 bp, Artificial
  Synthetic oligonucleotide
agttaccttagttccttgcatagctggcaagggagctgacattggacacattgtcat

SEQ ID NO: 11446 - DNA, 60 bp, Artificial
  Synthetic oligonucleotide
acctcagtcactaatcacatgggcactttgtgttcaagagtagttactggcaaacaagaa

SEQ ID NO: 11447 - DNA, 60 bp, Artificial
  Synthetic oligonucleotide
gggacgccaattcattgacatggtgtgaagacctgcatgtgcttggttgtgattcctccg

SEQ ID NO: 11448 - DNA, 58 bp, Artificial
  Synthetic oligonucleotide
tcctccggcccctgaatgtggctaatcctaaccccgctgctattgcacacgaaccagt

SEQ ID NO: 11449 - DNA, 53 bp, Artificial
  Synthetic oligonucleotide
tgttgacatcactgtatctgtgcaacccgttaaacctgtcttcaacggtctta

SEQ ID NO: 11450 - DNA, 60 bp, Artificial
  Synthetic oligonucleotide
tataacgcacaagcaattcttgttccccggagctggatatagactgctaacgtggttgaa

SEQ ID NO: 11451 - DNA, 58 bp, Artificial
  Synthetic oligonucleotide
gtgcctggtccccaccagtcgaaggcatctagcaataagataggtggaacaaggacgc

SEQ ID NO: 11452 - DNA, 60 bp, Artificial
  Synthetic oligonucleotide
agggactcttatgcagcagctgctactcggcaagacttcacgcaagatcctagcaagttc

SEQ ID NO: 11453 - DNA, 59 bp, Artificial
  Synthetic oligonucleotide
aggtgtgtggtcaacagacatggagtcatggaaactagcattgaacacttcttttcacg

SEQ ID NO: 11454 - DNA, 57 bp, Artificial
  Synthetic oligonucleotide
cgtatctcgcacatttctgccgcaagttccaaccgttgtacgccactgaagccaaaa

SEQ ID NO: 11455 - DNA, 60 bp, Artificial
  Synthetic oligonucleotide
cgccaccctagtgatcaacacagagcacatgccatccatgttcgtgccagtaggtgatgt

SEQ ID NO: 11456 - DNA, 53 bp, Artificial
  Synthetic oligonucleotide
aactgctcactgagcgtagtgctctcatattccggtatgcttgcacgccagtt

SEQ ID NO: 11457 - DNA, 60 bp, Artificial
  Synthetic oligonucleotide
aagcacacctgatcaataggagataacttgccaggttatctaagatcaagcacttctgtt

SEQ ID NO: 11458 - DNA, 59 bp, Artificial
  Synthetic oligonucleotide
gcatttgtgtgaaccggaacacctaaatgatagtgtgctcatttgttacagctcggact

SEQ ID NO: 11459 - DNA, 60 bp, Artificial
  Synthetic oligonucleotide
cagatcccctgaccattgtagcaacacttgcaatgctaggatgtaatggttcaccctggc

SEQ ID NO: 11460 - DNA, 60 bp, Artificial
  Synthetic oligonucleotide
ttggaattcggagcatttactaatctgccacatgtgttgatgaatttagccgaaaccaca

SEQ ID NO: 11461 - DNA, 50 bp, Artificial
  Synthetic oligonucleotide
gccaccaaggtagctagccagactaggaaggcagccaaggatgtcgtaga

SEQ ID NO: 11462 - DNA, 55 bp, Artificial
  Synthetic oligonucleotide
gggttgcacccacccacactgtctacggacgtagtgctctcatattacggtatgc

SEQ ID NO: 11463 - DNA, 58 bp, Artificial
  Synthetic oligonucleotide
ccatcttgtctgggatgttggcctacaatccacagtatctatggttgttccgtgggtc

SEQ ID NO: 11464 - DNA, 60 bp, Artificial
  Synthetic oligonucleotide
atcggaagctccactatcacgacacaagattctgtcaacaccatagtagcctatggtgag

SEQ ID NO: 11465 - DNA, 60 bp, Artificial
  Synthetic oligonucleotide
caaccagttcatgacaacagaggatgagcaatcaggtaatatattacccaactttagccc

SEQ ID NO: 11466 - DNA, 60 bp, Artificial
  Synthetic oligonucleotide
cttatgttagatttgacttagagatcactatagtcaccaacaatgcaggcttaatgcaga

SEQ ID NO: 11467 - DNA, 52 bp, Artificial
  Synthetic oligonucleotide
taggcactatgagggagtcgagctggacacttacaccatgatctcttatgga

SEQ ID NO: 11468 - DNA, 60 bp, Artificial
  Synthetic oligonucleotide
gatcaatcttctgttcatacggctgaagttggctcacaccaacctgaacctttgagaact

SEQ ID NO: 11469 - DNA, 55 bp, Artificial
  Synthetic oligonucleotide
gttcatacggctgaagttggctcacaccaacctgaacctttgagaacttcggttg

SEQ ID NO: 11470 - DNA, 54 bp, Artificial
  Synthetic oligonucleotide
agatcatgttggacggcagagccatgacagacagtgactacagagtgtttgagt

SEQ ID NO: 11471 - DNA, 60 bp, Artificial
  Synthetic oligonucleotide
gtggtgctgaaatattgcaagcgtcgttgctcgattaacggagtggtacaatcctatgaa

SEQ ID NO: 11472 - DNA, 60 bp, Artificial
  Synthetic oligonucleotide
atcctatgaacccaagtgcattcatgcgaaagccccggaggggtgagtagcatggactcg

SEQ ID NO: 11473 - DNA, 60 bp, Artificial
  Synthetic oligonucleotide
tgagctacttgccatgtctagaagtgcgcgagggaatgcatggcgcgtcctatgcataca

SEQ ID NO: 11474 - DNA, 60 bp, Artificial
  Synthetic oligonucleotide
cgtgtacgctccattactttgggcaactccacgatcaccacacaagagtgtgccaatgta

SEQ ID NO: 11475 - DNA, 55 bp, Artificial
  Synthetic oligonucleotide
tgggcaactccacgatcaccacacaagagtgtgccaatgtagtggtcgcatatgg

SEQ ID NO: 11476 - DNA, 60 bp, Artificial
  Synthetic oligonucleotide
gtggactattcggcctttgatgctaaccactgcagtgacgccatgaacatcatgtttgag

SEQ ID NO: 11477 - DNA, 55 bp, Artificial
  Synthetic oligonucleotide
ccaactgcggagcagatacccacgcgccagtgggcagtctgtcgtaatgggcaac

SEQ ID NO: 11478 - DNA, 59 bp, Artificial
  Synthetic oligonucleotide
aatgtacctcattccacgcacctgtggaaatgatgcctcgatgcatgcaacactctgca

SEQ ID NO: 11479 - DNA, 60 bp, Artificial
  Synthetic oligonucleotide
gcgacactggtgttgccttatgtaaatttgtgcccacaatcttgtccagttatacacagt

SEQ ID NO: 11480 - DNA, 55 bp, Artificial
  Synthetic oligonucleotide
cccatcattctaattcggcccctgtgttgagccccttgttgaagtgtttccctcc

SEQ ID NO: 11481 - DNA, 60 bp, Artificial
  Synthetic oligonucleotide
cgttgggtgaacgccgtgtgcggtgacgcataatccctcagagactacaattggcacaat

SEQ ID NO: 11482 - DNA, 57 bp, Artificial
  Synthetic oligonucleotide
tgtacagcctgaggacatgatcgaaacacgctatgttcaaacgtcccagactaggga

SEQ ID NO: 11483 - DNA, 52 bp, Artificial
  Synthetic oligonucleotide
cggaggattcgcagtgttagcgctggacgtgcgctgtacattcctccatacg

SEQ ID NO: 11484 - DNA, 55 bp, Artificial
  Synthetic oligonucleotide
ggttgtacccacccgcagggcccactgggcgctagtacactgatatcacggtacc

SEQ ID NO: 11485 - DNA, 51 bp, Artificial
  Synthetic oligonucleotide
tcaagtgcagagcttcccggctttaagggttactgctcgtaatgagagcac

SEQ ID NO: 11486 - DNA, 53 bp, Artificial
  Synthetic oligonucleotide
ggtgtgaagtggactaagtggatctccaatttggcctgttctgaactacacca

SEQ ID NO: 11487 - DNA, 60 bp, Artificial
  Synthetic oligonucleotide
aacaggtaaggttgactggtcttcacaattatgacaacacatgctggctaaatgccctga

SEQ ID NO: 11488 - DNA, 60 bp, Artificial
  Synthetic oligonucleotide
acactgctgcgccaaaaacgcgcgacgaagctatggcatgcattcatgctgtgtgggatg

SEQ ID NO: 11489 - DNA, 60 bp, Artificial
  Synthetic oligonucleotide
agaccagctttgttgcagccaccacctgtacatggacaagcattactatgttgtgggcgg

SEQ ID NO: 11490 - DNA, 57 bp, Artificial
  Synthetic oligonucleotide
gcacttcggcaatagaggtctgttcactcggaaaacaattgattgggtgagtgacca

SEQ ID NO: 11491 - DNA, 51 bp, Artificial
  Synthetic oligonucleotide
cccgttgtgtgtgtccttcggggcgcatcagggcaaggcaaatcttatttg

SEQ ID NO: 11492 - DNA, 60 bp, Artificial
  Synthetic oligonucleotide
gtttcagagcgctccattttattacatgaagagtatctcaaatgggagtcatacatgacc

SEQ ID NO: 11493 - DNA, 53 bp, Artificial
  Synthetic oligonucleotide
agtccgttgataggactgcagtgactggagcttcttacttcacttctgtggac

SEQ ID NO: 11494 - DNA, 55 bp, Artificial
  Synthetic oligonucleotide
cttctccctccaatgtggcttctcatgttagagttaatgtttatctctcagctat

SEQ ID NO: 11495 - DNA, 60 bp, Artificial
  Synthetic oligonucleotide
cacaaccatacacggctgcccccgtttatggtaagatccctgcaagcagcccatcttata

SEQ ID NO: 11496 - DNA, 55 bp, Artificial
  Synthetic oligonucleotide
gcttggtgaagaaccgtgagattcgtgtctccagtgcggagagaaccaagcccat

SEQ ID NO: 11497 - DNA, 60 bp, Artificial
  Synthetic oligonucleotide
ctgtttgtgcgtgatcggatttctctgatcaacactcacattctaacatccatcaagaac

SEQ ID NO: 11498 - DNA, 55 bp, Artificial
  Synthetic oligonucleotide
ccccggtgacattgtatagactgtatccacggttgaaaacgattgatccgttatc

SEQ ID NO: 11499 - DNA, 54 bp, Artificial
  Synthetic oligonucleotide
cggtgatgtcgtatagactgtaaccacggttgaaaacgattgatccgttatccg

SEQ ID NO: 11500 - DNA, 60 bp, Artificial
  Synthetic oligonucleotide
actgagctagttggtggtcctccggcccctgaatgcggctaatcctaactgcggagcaca

SEQ ID NO: 11501 - DNA, 55 bp, Artificial
  Synthetic oligonucleotide
ccaggctattggcctaattggtactattctcttaaccgctgggctcatgtcaacc

SEQ ID NO: 11502 - DNA, 60 bp, Artificial
  Synthetic oligonucleotide
actccaggactccggagcactcaaaagaaggtttccttacatcatgcatattagggctgc

SEQ ID NO: 11503 - DNA, 53 bp, Artificial
  Synthetic oligonucleotide
tggtgaaaggacctctcttgttttgacgtggttggaattaacatcaattccga

SEQ ID NO: 11504 - DNA, 55 bp, Artificial
  Synthetic oligonucleotide
tcccacatcctcactctagtttcgggcggagacgattttacgttgagaatgcccg

SEQ ID NO: 11505 - DNA, 55 bp, Artificial
  Synthetic oligonucleotide
ataccacgcttgtggaccttatgctcacacagccatcctctagtaagtttgtgag

SEQ ID NO: 11506 - DNA, 55 bp, Artificial
  Synthetic oligonucleotide
tggcacctcttttgcgtcttgagccatctgacacaaagacgcgcagaattgagtg

SEQ ID NO: 11507 - DNA, 59 bp, Artificial
  Synthetic oligonucleotide
ggtatataactatatggcagtacacaaatttggcctcccctcccggctcaccatcacaa

SEQ ID NO: 11508 - DNA, 51 bp, Artificial
  Synthetic oligonucleotide
gattcgaaggatgcaactgccgtggataagcccacacagcccgatgtagcc

SEQ ID NO: 11509 - DNA, 50 bp, Artificial
  Synthetic oligonucleotide
aactaccctgatgagctgaacccattttcagagagcggcttctggagccg

SEQ ID NO: 11510 - DNA, 59 bp, Artificial
  Synthetic oligonucleotide
gcactttacggtgtagatggactcgagcccatagacataacaacaagtgctggttaccc

SEQ ID NO: 11511 - DNA, 55 bp, Artificial
  Synthetic oligonucleotide
gggactctatctgagaaactcacttcgatcactatgcttgccgttcattctggca

SEQ ID NO: 11512 - DNA, 60 bp, Artificial
  Synthetic oligonucleotide
tgccaataacaggctcgcccatgagtagagcatggactgcggtgcatgtgacttcggtca

SEQ ID NO: 11513 - DNA, 55 bp, Artificial
  Synthetic oligonucleotide
ggacaccttggttgtgtcggttagcgccggcaaggactttgagctacgcctcccg

SEQ ID NO: 11514 - DNA, 55 bp, Artificial
  Synthetic oligonucleotide
gacactctggttgtgtcggttagcgccggcaaggactttgagttgcgtctcccgg

SEQ ID NO: 11515 - DNA, 55 bp, Artificial
  Synthetic oligonucleotide
tacatacgggtattccactgcggaggaccacgttgccgggcccaacacatcgggc

SEQ ID NO: 11516 - DNA, 60 bp, Artificial
  Synthetic oligonucleotide
aattggaggcaatttactaaccaaggttgcagatgacgcatctaatgtgcttggaccaaa

SEQ ID NO: 11517 - DNA, 60 bp, Artificial
  Synthetic oligonucleotide
gagcccagtctatggtgcagtggaagttaagatgggtccagcagtcctgagcaaatcaga

SEQ ID NO: 11518 - DNA, 56 bp, Artificial
  Synthetic oligonucleotide
tggtagggttcttggcatacatgtagggggtaatggagcacagggttttgcagcta

SEQ ID NO: 11519 - DNA, 50 bp, Artificial
  Synthetic oligonucleotide
ctctattggctgggagtggaagttaccggatgccctgactgagctcgggg

SEQ ID NO: 11520 - DNA, 60 bp, Artificial
  Synthetic oligonucleotide
tgttcaactacaggttatgtatttgccaccaggagcaacggagcctacagatcaaggcgg

SEQ ID NO: 11521 - DNA, 55 bp, Artificial
  Synthetic oligonucleotide
atttgccaccaggagcaacggagcctacagatcaaggcggataccagtggcagac

SEQ ID NO: 11522 - DNA, 52 bp, Artificial
  Synthetic oligonucleotide
acccgtacagattggaccctgcagaattggccaaagcagggtctaagcttgg

SEQ ID NO: 11523 - DNA, 55 bp, Artificial
  Synthetic oligonucleotide
ggcgagttcaccatgttgggcatctatgacaggtgggctgtcttaccacgccacg

SEQ ID NO: 11524 - DNA, 52 bp, Artificial
  Synthetic oligonucleotide
atcatatacaagttgctgtagcccactattcagcccagttagctactctaga

SEQ ID NO: 11525 - DNA, 60 bp, Artificial
  Synthetic oligonucleotide
tgtatttggaatggatggtttggaggctctagacctcaatactagtgctggttatccata

SEQ ID NO: 11526 - DNA, 54 bp, Artificial
  Synthetic oligonucleotide
tgcatatccgggctgcaaaggcttatagtaaggctggaaagcttaatgtaagtc

SEQ ID NO: 11527 - DNA, 52 bp, Artificial
  Synthetic oligonucleotide
gtcatgactcaccagatcttgtgatgcaactccataaaccagtgattgactc

SEQ ID NO: 11528 - DNA, 52 bp, Artificial
  Synthetic oligonucleotide
aaaattgacattgcagaaggaccaggttctatgaacatggcgaatgtcttga

SEQ ID NO: 11529 - DNA, 60 bp, Artificial
  Synthetic oligonucleotide
tgtaaggcacttatgcagtgcctaatggatggcgacgttaagaaattggcagaagttgta

SEQ ID NO: 11530 - DNA, 55 bp, Artificial
  Synthetic oligonucleotide
gcagtgcctaatggatggcgacgttaagaaattggcagaagttgtagctgagtca

SEQ ID NO: 11531 - DNA, 60 bp, Artificial
  Synthetic oligonucleotide
gattagcttagaggagaaacccgcacctgatgctattagtgacctattagctagtgttga

SEQ ID NO: 11532 - DNA, 52 bp, Artificial
  Synthetic oligonucleotide
tccacccgaacgccgagtggatcctgaagactcttgtgaatacggaacatgc

SEQ ID NO: 11533 - DNA, 55 bp, Artificial
  Synthetic oligonucleotide
ccatgaaggttgcgcagtgtttcgctccgcacaaacccagtgtagatcaggtcga

SEQ ID NO: 11534 - DNA, 60 bp, Artificial
  Synthetic oligonucleotide
ggaacgacctacgtgcccattacagtcaccattgctcccatgtgcgcagaatataacggt

SEQ ID NO: 11535 - DNA, 58 bp, Artificial
  Synthetic oligonucleotide
agtatccctggccctgacaacatacccacctgtgattgcactacaggcacctactatt

SEQ ID NO: 11536 - DNA, 57 bp, Artificial
  Synthetic oligonucleotide
gcgtcttgtcaccaatgtgcccaaatttcccatgctagacatagagataggtgatgt

SEQ ID NO: 11537 - DNA, 52 bp, Artificial
  Synthetic oligonucleotide
cagggttgcttgcttgtggtgtgtgtacccgaagccgaaatggggtgcgccg

SEQ ID NO: 11538 - DNA, 60 bp, Artificial
  Synthetic oligonucleotide
ggatggcagcgtcacaaggactgccggtgctcaacacaccagggagcaaccaattcctaa

SEQ ID NO: 11539 - DNA, 60 bp, Artificial
  Synthetic oligonucleotide
ggacctcttagtcagtacgaccacggcgcacgggtgtgacaccatagccagatgtcagtg

SEQ ID NO: 11540 - DNA, 53 bp, Artificial
  Synthetic oligonucleotide
caatgtccaatactttgcgcactactgtagaaagtatgcccccttgtacgctg

SEQ ID NO: 11541 - DNA, 60 bp, Artificial
  Synthetic oligonucleotide
taagacattccatctgaacccgggtatagtgacgggcagcgcggttgggtgtgatcctga

SEQ ID NO: 11542 - DNA, 60 bp, Artificial
  Synthetic oligonucleotide
ggcgagtggccttcctactgctcggattctgacgctacagcagtggataaaccaacgcgc

SEQ ID NO: 11543 - DNA, 60 bp, Artificial
  Synthetic oligonucleotide
tccggcccctgaatgcggctaatcctaactgcggagcagatacccacatgccagtgggca

SEQ ID NO: 11544 - DNA, 55 bp, Artificial
  Synthetic oligonucleotide
cgggaagttccaaactaccacagtcctgtttgtgcgtgatcggatcttcctgatc

SEQ ID NO: 11545 - DNA, 60 bp, Artificial
  Synthetic oligonucleotide
ggacacccatctgatgtaactgcagtccaattcactgttgggcggcaataccgtgacatc

SEQ ID NO: 11546 - DNA, 58 bp, Artificial
  Synthetic oligonucleotide
tcgtggttgcagatgctggagtctggaaaggcatttgtggtatacactccttaggaga

SEQ ID NO: 11547 - DNA, 60 bp, Artificial
  Synthetic oligonucleotide
gggcaaactatacgtgaggcatgtgggggccaccaagcggcctatagtcagcaaggtgcg

SEQ ID NO: 11548 - DNA, 60 bp, Artificial
  Synthetic oligonucleotide
cagacttggcctggacacaaatcttttacactgcccctagccgcaatgtattggccatgg

SEQ ID NO: 11549 - DNA, 55 bp, Artificial
  Synthetic oligonucleotide
gcatgtggttacagtgatcgtgtggctcagcttaccattgggaactccaccatca

SEQ ID NO: 11550 - DNA, 56 bp, Artificial
  Synthetic oligonucleotide
ttgaattctcccaacgtcgaggcatgtggatatagtgatagggtgcaacaaattac

SEQ ID NO: 11551 - DNA, 55 bp, Artificial
  Synthetic oligonucleotide
cctgagtagtgttccaacaaaccgcatgatacgctacgagtaccctaccaggaca

SEQ ID NO: 11552 - DNA, 54 bp, Artificial
  Synthetic oligonucleotide
tgcagttcaagagcaaacaccgtattgaacctgtgtgtttaatcatcaggggat

SEQ ID NO: 11553 - DNA, 60 bp, Artificial
  Synthetic oligonucleotide
tccgcaagatgcctacgcaaagcctagtaatgctttcgaagatacttggttggtcgctca

SEQ ID NO: 11554 - DNA, 55 bp, Artificial
  Synthetic oligonucleotide
agcctagtaatgctttcgaagatacttggttggtcgctcagctgtgcacccgaca

SEQ ID NO: 11555 - DNA, 60 bp, Artificial
  Synthetic oligonucleotide
acatctttttaactcagacatgcacgactctatcttggtttcatactcatcggatttagt

SEQ ID NO: 11556 - DNA, 55 bp, Artificial
  Synthetic oligonucleotide
cagacatgcacgactctatcttggtttcatactcatcggatttagtcatataccg

SEQ ID NO: 11557 - DNA, 60 bp, Artificial
  Synthetic oligonucleotide
ttccgctgttccccacagtagacctggcagatgaggctagagattccccactggtaacag

SEQ ID NO: 11558 - DNA, 55 bp, Artificial
  Synthetic oligonucleotide
ggctgtaccccacagtagacctggcagatgaggctagatgttccccactggcgac

SEQ ID NO: 11559 - DNA, 55 bp, Artificial
  Synthetic oligonucleotide
actgtgtctcagcctgcgtggcggccaacccgactcatgtcgggacgcctactaa

SEQ ID NO: 11560 - DNA, 55 bp, Artificial
  Synthetic oligonucleotide
gtatgacatggtgtgaagactcgcgtgtgcttagctgtgagtcctccggcccctg

SEQ ID NO: 11561 - DNA, 55 bp, Artificial
  Synthetic oligonucleotide
tgagtagaattgcagctggagacttggagtcatcagtggatgatcctagatcaga

SEQ ID NO: 11562 - DNA, 60 bp, Artificial
  Synthetic oligonucleotide
aggagaagactatgttctgaagggcccatctaacattgctgctagttatcagggtaatga

SEQ ID NO: 11563 - DNA, 55 bp, Artificial
  Synthetic oligonucleotide
tgttctgaagggcccatctaacattgctgctagttatcagggtaatgagaactcg

SEQ ID NO: 11564 - DNA, 55 bp, Artificial
  Synthetic oligonucleotide
cccaacactagacctggcagatgaggctagaaactccccactggcgacagtgttc

SEQ ID NO: 11565 - DNA, 60 bp, Artificial
  Synthetic oligonucleotide
acatctcagcttgtggtggcaactaccaatctgcctgagtttagacctgtcacaatagcc

SEQ ID NO: 11566 - DNA, 60 bp, Artificial
  Synthetic oligonucleotide
cagacttgcctccttgtgagaggccgcaccttggcagtaaatagacacatggccgagtct

SEQ ID NO: 11567 - DNA, 60 bp, Artificial
  Synthetic oligonucleotide
ttgtcatactatcgtccagggactctatctgagaaactcacttcgatcactatgcttgcc

SEQ ID NO: 11568 - DNA, 55 bp, Artificial
  Synthetic oligonucleotide
gtatatggtatcagacgaattatgtagttccaattggggcacccaacacagccta

SEQ ID NO: 11569 - DNA, 55 bp, Artificial
  Synthetic oligonucleotide
gcacaacgaccaataggaggcaattgaccaaattgctaaaggtcaagcacttctg

SEQ ID NO: 11570 - DNA, 53 bp, Artificial
  Synthetic oligonucleotide
tagaccggatttcaaccatttctgcggctggtacggccatagctgtacaacag

SEQ ID NO: 11571 - DNA, 52 bp, Artificial
  Synthetic oligonucleotide
cctactggatggtatccctggatccaactgactgggcgaccagctctctttt

SEQ ID NO: 11572 - DNA, 60 bp, Artificial
  Synthetic oligonucleotide
tgacctcccgtgctgagttcctcgatatgctattgaatattgatggttgctcccctcaaa

SEQ ID NO: 11573 - DNA, 55 bp, Artificial
  Synthetic oligonucleotide
agtattggacaaggtgtgaagagccccgtgtgctcatcttgagtcctccggcccc

SEQ ID NO: 11574 - DNA, 56 bp, Artificial
  Synthetic oligonucleotide
taccaatgtgggagaggatggtgaacccggtgagacagagcctcgtcatgctttgt

SEQ ID NO: 11575 - DNA, 52 bp, Artificial
  Synthetic oligonucleotide
gctataacggacaggctgtggtgattatggatgcattgggccaggatccgaa

SEQ ID NO: 11576 - DNA, 60 bp, Artificial
  Synthetic oligonucleotide
gagattccaagctacagatcactttacctgcgttgggtgaacgccgtgtgtggtgacgca

SEQ ID NO: 11577 - DNA, 60 bp, Artificial
  Synthetic oligonucleotide
acacatgtagtgtgggatatagggctgcaatcaacagtggtattgaacatcccatggaca

SEQ ID NO: 11578 - DNA, 55 bp, Artificial
  Synthetic oligonucleotide
agggctgcaatcaacagtggtattgaacatcccatggacatctggagtgcagtat

SEQ ID NO: 11579 - DNA, 57 bp, Artificial
  Synthetic oligonucleotide
cccatggacatctggagtgcagtatagatacacagatccggacacatacaccagtgc

SEQ ID NO: 11580 - DNA, 55 bp, Artificial
  Synthetic oligonucleotide
cctagtagataccagcagggtgttatgagaggtgtgggtcccgctgaaccaggtg

SEQ ID NO: 11581 - DNA, 55 bp, Artificial
  Synthetic oligonucleotide
cggattctgacgctacggcggtggacaaaccgacgcgcccagatgtgtcggtgaa

SEQ ID NO: 11582 - DNA, 60 bp, Artificial
  Synthetic oligonucleotide
tgacagcccatggctattgcggttctgttatggttgcagatgctggagtttggaaaggcg

SEQ ID NO: 11583 - DNA, 60 bp, Artificial
  Synthetic oligonucleotide
gcgtggcggccaacccagcttatgctgggacgccctttcaatgacatggtgtgaagactc

SEQ ID NO: 11584 - DNA, 57 bp, Artificial
  Synthetic oligonucleotide
aaaatcagtgactagtcaaattatcgcccaggcagtgtcaaaactcgcttttggacg

SEQ ID NO: 11585 - DNA, 60 bp, Artificial
  Synthetic oligonucleotide
ttggacagggtgcgaagagcctactgtgctcaccttgagtcctccggcccctgaatgtgg

SEQ ID NO: 11586 - DNA, 60 bp, Artificial
  Synthetic oligonucleotide
acggtcaaaggacccagttcttgtggccatcatgctagctgacaccggtctcgagattct

SEQ ID NO: 11587 - DNA, 55 bp, Artificial
  Synthetic oligonucleotide
cccagtccttgtggctatcatgctagctgacaccggtctcgagattctggacagc

SEQ ID NO: 11588 - DNA, 60 bp, Artificial
  Synthetic oligonucleotide
actcacccacagttggactcacgacaccgcgtggccattttagctggattgtgcggacga

SEQ ID NO: 11589 - DNA, 55 bp, Artificial
  Synthetic oligonucleotide
gaatgcggctaatcccaactgcggagcacacgccctcaagccagcgggtagtgtg

SEQ ID NO: 11590 - DNA, 60 bp, Artificial
  Synthetic oligonucleotide
ctcatacaagtatgcagagaagattcgtgccatgttgccaccagactttttagaacctct

SEQ ID NO: 11591 - DNA, 58 bp, Artificial
  Synthetic oligonucleotide
gacgcgttgcgctcagcactctaacccgggtgtagcttaggtcgatgagtctgggcat

SEQ ID NO: 11592 - DNA, 60 bp, Artificial
  Synthetic oligonucleotide
tgcactaaagaggagctatttcactgaggaacaaggagaaattcagtggatgaggccaag

SEQ ID NO: 11593 - DNA, 60 bp, Artificial
  Synthetic oligonucleotide
ttgtgccctacatcaactgtacacctatggatagcatgctacgtcacaacaatgtatcac

SEQ ID NO: 11594 - DNA, 55 bp, Artificial
  Synthetic oligonucleotide
cacgtcgtgtgggatttaggtcttcagtcatcatgtcacctcgttgtaccgtgga

SEQ ID NO: 11595 - DNA, 56 bp, Artificial
  Synthetic oligonucleotide
cacaatattgtatcaattgtgtgggtagtatagtattaattctaggaactgtttat

SEQ ID NO: 11596 - DNA, 60 bp, Artificial
  Synthetic oligonucleotide
taaagtgcaggatgttggtctcaaacccatcaacacaccagaacattcaaaactgcaccc

SEQ ID NO: 11597 - DNA, 55 bp, Artificial
  Synthetic oligonucleotide
gtatttctagtcgtaatgagcaattgcgggatgggaccaactactttgggtgtcc

SEQ ID NO: 11598 - DNA, 60 bp, Artificial
  Synthetic oligonucleotide
caggtgctcggaacacagccagaccacaaggtctaccagttatgctcaccccaggttcag

SEQ ID NO: 11599 - DNA, 55 bp, Artificial
  Synthetic oligonucleotide
tgatcctccgcacagctaagaggactgaaccagttggggtgctctttcatggtga

SEQ ID NO: 11600 - DNA, 55 bp, Artificial
  Synthetic oligonucleotide
gcatcaaatgagaaccccatccccttgccagttgagaacattggttcatccaggg

SEQ ID NO: 11601 - DNA, 60 bp, Artificial
  Synthetic oligonucleotide
tgcctcaacaaacgcggggtcaatcaatgctcccacggtttcagacagcagggcgcttgc

SEQ ID NO: 11602 - DNA, 60 bp, Artificial
  Synthetic oligonucleotide
tgcccacggcctgggatccatgaccccttggcctattctaggagccatccccagacaggc

SEQ ID NO: 11603 - DNA, 56 bp, Artificial
  Synthetic oligonucleotide
agaatgctttcctacactctggttggcaagtcctcatattatgcattcaactcagc

SEQ ID NO: 11604 - DNA, 50 bp, Artificial
  Synthetic oligonucleotide
gagagatggttgattcatggaggtatgccatcagggtccccatgtactac

SEQ ID NO: 11605 - DNA, 50 bp, Artificial
  Synthetic oligonucleotide
gtggtgttatgcacaaacacttctgtttccccggagcgaggtatagacgg

SEQ ID NO: 11606 - DNA, 59 bp, Artificial
  Synthetic oligonucleotide
ccctccaacagttcttaacccagaagctctagcacgcagatttggctttgatttagaca

SEQ ID NO: 11607 - DNA, 55 bp, Artificial
  Synthetic oligonucleotide
gctaactagtagtcctccggcccctgaatgcggataatcttaactgcggagcagg

SEQ ID NO: 11608 - DNA, 60 bp, Artificial
  Synthetic oligonucleotide
ttagaatggacatcgaaacagctgtagcgacctcacagtagcagcggactcccctcttgg

SEQ ID NO: 11609 - DNA, 60 bp, Artificial
  Synthetic oligonucleotide
gctcaataatcaaacacaacacatgtgtggttactactgacaatggcaaattcactggat

SEQ ID NO: 11610 - DNA, 55 bp, Artificial
  Synthetic oligonucleotide
cacaacacatgtgtggttactactgacaatggcaaattcactggattgggaatct

SEQ ID NO: 11611 - DNA, 53 bp, Artificial
  Synthetic oligonucleotide
atttcctatgggaacatcctacttagtggtaatcagacagcacggatgcttaa

SEQ ID NO: 11612 - DNA, 55 bp, Artificial
  Synthetic oligonucleotide
cactgagactggtactcggtttctagtgacaggctaaggatgcccttcaggtacc

SEQ ID NO: 11613 - DNA, 60 bp, Artificial
  Synthetic oligonucleotide
ctattgagctagttagtactcctccggcccctgaatgcggctaatcctaactgcggagca

SEQ ID NO: 11614 - DNA, 60 bp, Artificial
  Synthetic oligonucleotide
gatgtggcataatggtagagatgtgtatactcaatttgaaaggaggatacgtagtgtcag

SEQ ID NO: 11615 - DNA, 55 bp, Artificial
  Synthetic oligonucleotide
gtagagatgtgtatactcaatttgaaaggaggatacgtagtgtcagcgctggtcg

SEQ ID NO: 11616 - DNA, 50 bp, Artificial
  Synthetic oligonucleotide
agaggcccacgtggcggctagcactctggtatcacggtacctttgtgcgc

SEQ ID NO: 11617 - DNA, 60 bp, Artificial
  Synthetic oligonucleotide
tgatgaacaatgcacttttgacaccactcccaagcaaccgtctcgatgactcaacgtatg

SEQ ID NO: 11618 - DNA, 55 bp, Artificial
  Synthetic oligonucleotide
gacaccactcccaagcaaccgtctcgatgactcaacgtatggtcttgcggaacag

SEQ ID NO: 11619 - DNA, 60 bp, Artificial
  Synthetic oligonucleotide
tcttgaagatactctagtgaacccttgaatggcaatctcaagcgcctctgtagggaagcc

SEQ ID NO: 11620 - DNA, 55 bp, Artificial
  Synthetic oligonucleotide
acccttgaatggcaatctcaagcgcctctgcagggaagccaagaatgtccaggag

SEQ ID NO: 11621 - DNA, 55 bp, Artificial
  Synthetic oligonucleotide
agtgtgcttcctccggcccctgaatgtggctaaccttaaccctgcagccgttgcc

SEQ ID NO: 11622 - DNA, 60 bp, Artificial
  Synthetic oligonucleotide
atccgcaaagtggcccccgacggcagtgccaagcagatctcgctatctcgcagcgggata

SEQ ID NO: 11623 - DNA, 60 bp, Artificial
  Synthetic oligonucleotide
cagacacctctcaccctgttccagtccaacacggtccgcctggatcgcgactccatctgg

SEQ ID NO: 11624 - DNA, 55 bp, Artificial
  Synthetic oligonucleotide
ggtgtgaagacctgcatgtgcttgattgtgagtcctccggcccctgaatgcggct

SEQ ID NO: 11625 - DNA, 55 bp, Artificial
  Synthetic oligonucleotide
cgcgtctgcacagtgtgctgggtacggcaaatgccccactgagcatttacgaggc

SEQ ID NO: 11626 - DNA, 55 bp, Artificial
  Synthetic oligonucleotide
gctactagcgttgtcacacttggcttctggatacgtgggattaattgcattctgt

SEQ ID NO: 11627 - DNA, 60 bp, Artificial
  Synthetic oligonucleotide
ccgccacaataattgtcccatatgtcaatgcagtccccatggactcgatgcggagtcaca

SEQ ID NO: 11628 - DNA, 60 bp, Artificial
  Synthetic oligonucleotide
cactcatggtgctacaccgtgggaatcgcgtgagagacatcacgaagcactttcgtgaca

SEQ ID NO: 11629 - DNA, 55 bp, Artificial
  Synthetic oligonucleotide
ggtaccaactctaaggcaagccaaggtgcaaggccctgcctttgagttcgcagtg

SEQ ID NO: 11630 - DNA, 51 bp, Artificial
  Synthetic oligonucleotide
cgacgggaaaccgtacgtcgttacgcggacagatgacacacgactcttagc

SEQ ID NO: 11631 - DNA, 60 bp, Artificial
  Synthetic oligonucleotide
ctcaggtctcatctcagaaagttggagctcacgaaaactcgaacagagcgtatggtggtt

SEQ ID NO: 11632 - DNA, 60 bp, Artificial
  Synthetic oligonucleotide
caagagtccaccaaaagctcaagaatcttggatctataaatcaggcaatggtgacaagat

SEQ ID NO: 11633 - DNA, 60 bp, Artificial
  Synthetic oligonucleotide
tttaatgacatggtgtgaagacctgcatgtgcttgattgtgagtcctccggcccctgaat

SEQ ID NO: 11634 - DNA, 60 bp, Artificial
  Synthetic oligonucleotide
ttcctccggggccgtgaatgctgctaatcccaacctccgagcgtgtgcgcacaatccagt

SEQ ID NO: 11635 - DNA, 50 bp, Artificial
  Synthetic oligonucleotide
gcagatccagtagagtcccagtcaactctagaaatagcaggattagttag

SEQ ID NO: 11636 - DNA, 60 bp, Artificial
  Synthetic oligonucleotide
gagaatcccatccctctaccagttgagaccattggttcatcccgagtatcattcttctgg

SEQ ID NO: 11637 - DNA, 60 bp, Artificial
  Synthetic oligonucleotide
atccacatcctattgatgcctcactgctagctgaagccgggaaagggtatggtttgatca

SEQ ID NO: 11638 - DNA, 52 bp, Artificial
  Synthetic oligonucleotide
gtggacaattatgccttaccttcttttacttgcaagccagcgcaaactccgg

SEQ ID NO: 11639 - DNA, 53 bp, Artificial
  Synthetic oligonucleotide
ctcttctgcccacgacctggaattcatgatcccactgcttactcgaggagcca

SEQ ID NO: 11640 - DNA, 58 bp, Artificial
  Synthetic oligonucleotide
gggaccctatgaggccactgccacaaaaccagcaaagcctaataggcaatctctgttg

SEQ ID NO: 11641 - DNA, 50 bp, Artificial
  Synthetic oligonucleotide
gctgatgagagcactactggcggaccagcagtctcccgctttgttacgct

SEQ ID NO: 11642 - DNA, 60 bp, Artificial
  Synthetic oligonucleotide
aggacaaattcatcagctaccttgtgcataccatttgttgactgtggaccaataactgat

SEQ ID NO: 11643 - DNA, 55 bp, Artificial
  Synthetic oligonucleotide
ccttgtgcataccatttgttgactgtggaccaataactgatgtgactgtccactg

SEQ ID NO: 11644 - DNA, 60 bp, Artificial
  Synthetic oligonucleotide
atttcatcttccgcgctcggcgtatgaccgccttatgctcccctttgaagaggctggata

SEQ ID NO: 11645 - DNA, 55 bp, Artificial
  Synthetic oligonucleotide
aaacgcagaaaccacaagcaaaaacctgtagcgtcagtaaaacgcgcacattcac

SEQ ID NO: 11646 - DNA, 54 bp, Artificial
  Synthetic oligonucleotide
catagcgtttgactattcaggctatgacgccagcctcagcccagtgtggtttac

SEQ ID NO: 11647 - DNA, 55 bp, Artificial
  Synthetic oligonucleotide
ttcccggaatccctcttgggagtccatggtgaggggacttgatacctcaccgccg

SEQ ID NO: 11648 - DNA, 50 bp, Artificial
  Synthetic oligonucleotide
gcttctcatgttagagttaatgtttatctctcagctattaatctagaatg

SEQ ID NO: 11649 - DNA, 60 bp, Artificial
  Synthetic oligonucleotide
acttacttgagtgatcacgaagccactgcggtggaccaaccgacacaacctgatgtcgca

SEQ ID NO: 11650 - DNA, 60 bp, Artificial
  Synthetic oligonucleotide
tgaaagttgcggggtgtttcgctcagcacaaccccagtgtagatcaggtcgatgagtcac

SEQ ID NO: 11651 - DNA, 56 bp, Artificial
  Synthetic oligonucleotide
tccaacatgttgctagtcgtaatgagcaattgcgggacgggaccaactactttggg

SEQ ID NO: 11652 - DNA, 60 bp, Artificial
  Synthetic oligonucleotide
gtgtgggatgtggactattcggcctttgatgctaaccactgcagtgacgcgatgaacatc

SEQ ID NO: 11653 - DNA, 55 bp, Artificial
  Synthetic oligonucleotide
gtgccaacgccctgtgcgggatgaaacctctactgccctaggaatgccaggcagg

SEQ ID NO: 11654 - DNA, 57 bp, Artificial
  Synthetic oligonucleotide
cacccacttccttcgggtgagcccctaagccatggttgtactgcactatcatcctaa

SEQ ID NO: 11655 - DNA, 60 bp, Artificial
  Synthetic oligonucleotide
cacccaaacgctgagtggatcctgaagactctcgtgaacacggagcacgcctatgagaac

SEQ ID NO: 11656 - DNA, 56 bp, Artificial
  Synthetic oligonucleotide
gcacattcgcagtcgtaatgggtaactgcgggatggaaccaactactttgggtgtc

SEQ ID NO: 11657 - DNA, 60 bp, Artificial
  Synthetic oligonucleotide
tacggatatagttgtcatcatgggcgctcaagtctcaaggcagaatgttggtacccactc

SEQ ID NO: 11658 - DNA, 60 bp, Artificial
  Synthetic oligonucleotide
ttggcgttacgctcaacacactaccccgtgtgtagttttggctgatgagtcacggcattc

SEQ ID NO: 11659 - DNA, 60 bp, Artificial
  Synthetic oligonucleotide
gatgccaatgagggagattcacgaatccattcgttggaccaaagatgcacgaagtactca

SEQ ID NO: 11660 - DNA, 55 bp, Artificial
  Synthetic oligonucleotide
catggtgtgaagatcctattgcgcttaactgtgagtcctccggcccctgaatgcg

SEQ ID NO: 11661 - DNA, 60 bp, Artificial
  Synthetic oligonucleotide
gatgaagcacgtcagggcgtggatacctcgcccaatgcgtaaccagaactatctattcaa

SEQ ID NO: 11662 - DNA, 55 bp, Artificial
  Synthetic oligonucleotide
gggcgtggatacctcgcccaatgcgtaaccagaactatctattcaaagccaaccc

SEQ ID NO: 11663 - DNA, 60 bp, Artificial
  Synthetic oligonucleotide
cagctgagatcgttatccgcaaagcgcctacgcaaagcctagtaactatctggaagttgc

SEQ ID NO: 11664 - DNA, 60 bp, Artificial
  Synthetic oligonucleotide
atgttgtccactgagtccatgatgagtagaattgcagctggagacttggagtcatcggtg

SEQ ID NO: 11665 - DNA, 60 bp, Artificial
  Synthetic oligonucleotide
tagtagtcctccggcccctgaatgcggctaatcccaactgcggagcacacgccctcaagc

SEQ ID NO: 11666 - DNA, 60 bp, Artificial
  Synthetic oligonucleotide
cctccggcccctgaatgcggctaatcctaactgcggagcatgtgccctcaatccagaggg

SEQ ID NO: 11667 - DNA, 54 bp, Artificial
  Synthetic oligonucleotide
ccacagggttttaacgcaccaatgccagagactatggctgaggcaatgcaaggc

SEQ ID NO: 11668 - DNA, 55 bp, Artificial
  Synthetic oligonucleotide
cccacaatatttacgactgaacatctcggatattttacgggaccctgtcatacgc

SEQ ID NO: 11669 - DNA, 51 bp, Artificial
  Synthetic oligonucleotide
acgttccttaagcggggatttgtactggatggaagccttgtgcgcccagtt

SEQ ID NO: 11670 - DNA, 60 bp, Artificial
  Synthetic oligonucleotide
gagctacaagagagtcctccggcccctgaatgcggctaatcccaaccacggagcaggtga

SEQ ID NO: 11671 - DNA, 60 bp, Artificial
  Synthetic oligonucleotide
acgtcatatgggatttgggtctacaatcaagttgcaccatggttgcaccatggatctcaa

SEQ ID NO: 11672 - DNA, 54 bp, Artificial
  Synthetic oligonucleotide
ttatatcccagattgcgattgcctagagggttgttattactgcaagagtcaaga

SEQ ID NO: 11673 - DNA, 60 bp, Artificial
  Synthetic oligonucleotide
tacactaattatgatggtagtctgcaccctgtttggtttaaagctctaggcagagtcctg

SEQ ID NO: 11674 - DNA, 60 bp, Artificial
  Synthetic oligonucleotide
tgactattagagtttggtctgagctaaacattggaactggtacctctgcttatacatcat

SEQ ID NO: 11675 - DNA, 55 bp, Artificial
  Synthetic oligonucleotide
ggtctgagctaaacattggaactggtacctcggcttacacatcactgaatgtgct

SEQ ID NO: 11676 - DNA, 60 bp, Artificial
  Synthetic oligonucleotide
gagattacattcgtaatcaccagctcccagcgtacttccaacaggtatgcgtcagactcc

SEQ ID NO: 11677 - DNA, 55 bp, Artificial
  Synthetic oligonucleotide
ggtctgagctaaacattggaactggtacctctgcttatacatcattgaatgtact

SEQ ID NO: 11678 - DNA, 60 bp, Artificial
  Synthetic oligonucleotide
ctaaatctgctggctgcctgatagttagggaacacagtgcctcggcacgcttagttagtt

SEQ ID NO: 11679 - DNA, 60 bp, Artificial
  Synthetic oligonucleotide
ggagtgggtatacagtgcatgtgcagtgtaatgctactaaatttcatcaaggcacactgg

SEQ ID NO: 11680 - DNA, 57 bp, Artificial
  Synthetic oligonucleotide
tatcttggtgtcttactcttcagatctaatcatttaccgaacaaacactataggtga

SEQ ID NO: 11681 - DNA, 53 bp, Artificial
  Synthetic oligonucleotide
tctttttagtaaccctacctcagtcgaattggattgggtcatactgttgtagg

SEQ ID NO: 11682 - DNA, 60 bp, Artificial
  Synthetic oligonucleotide
tatggtgacaatcacagattgttatcataaagcgaattggattggccatccggtgatagt

SEQ ID NO: 11683 - DNA, 60 bp, Artificial
  Synthetic oligonucleotide
gaccatgtgaaccaggtgattgtggaggcaagttgttgtgtaaacatggagtaattggaa

SEQ ID NO: 11684 - DNA, 60 bp, Artificial
  Synthetic oligonucleotide
tttgaaagcggctgtggtgtagatcattttctggcgcttggctcagccagtatggtctca

SEQ ID NO: 11685 - DNA, 60 bp, Artificial
  Synthetic oligonucleotide
tcttatgaggtgtgaagccaaagattggacagggtgtgaagagccgcgtgtgctcacttt

SEQ ID NO: 11686 - DNA, 55 bp, Artificial
  Synthetic oligonucleotide
ccaaagatcggacagggtgtgaagagccgcgtgtgctcactttgagtcctccggc

SEQ ID NO: 11687 - DNA, 56 bp, Artificial
  Synthetic oligonucleotide
actgagggtcttgaagctctcgatttaacaacaagtgcaggttacccctatgtcgc

SEQ ID NO: 11688 - DNA, 60 bp, Artificial
  Synthetic oligonucleotide
gcgcagttggctgcgatcccgacttgttctggagcaagatcccagttatgcttgacggcc

SEQ ID NO: 11689 - DNA, 55 bp, Artificial
  Synthetic oligonucleotide
gaattggacagggtgcgaagagtcgagtgtgctcatcttgagtcctccggcccct

SEQ ID NO: 11690 - DNA, 55 bp, Artificial
  Synthetic oligonucleotide
ggtgcatgtaatccaacatgttgctagtcgtaatgagcaattgcgggatgggacc

SEQ ID NO: 11691 - DNA, 60 bp, Artificial
  Synthetic oligonucleotide
tgattcaactgtcaacgctgtaactgaaggtgtatctaagattggaaatgattcgggtgg

SEQ ID NO: 11692 - DNA, 54 bp, Artificial
  Synthetic oligonucleotide
ccctagtaaacttattaggctagacaccacaacctggcaacacacttggcctag

SEQ ID NO: 11693 - DNA, 60 bp, Artificial
  Synthetic oligonucleotide
tcttaagtactacaggagctcaatcaatcgccttagtaggtgagagagctttttatgacc

SEQ ID NO: 11694 - DNA, 60 bp, Artificial
  Synthetic oligonucleotide
ttcagtcactcaggttacacttggtggcaagccaatggacctcgccatcttaaagtgcaa

SEQ ID NO: 11695 - DNA, 59 bp, Artificial
  Synthetic oligonucleotide
actaggaacttcacatgtcaactcaatggatcttagtacttcagctggttatagtttgg

SEQ ID NO: 11696 - DNA, 50 bp, Artificial
  Synthetic oligonucleotide
tccagattatctaaggtcaagcacttctgtttccccggtctaaactgata

SEQ ID NO: 11697 - DNA, 60 bp, Artificial
  Synthetic oligonucleotide
cccacttccggggacaagattgatatgaccccgagagctggagtcttgatgctagagagt

SEQ ID NO: 11698 - DNA, 60 bp, Artificial
  Synthetic oligonucleotide
gccttgcacctggtccccactagttgaaggcatctagcaataagatgagtggaacaagga

SEQ ID NO: 11699 - DNA, 56 bp, Artificial
  Synthetic oligonucleotide
cattgtccccaaatgaactaggcttgacatccgctcaagatgatgggccacttggc

SEQ ID NO: 11700 - DNA, 57 bp, Artificial
  Synthetic oligonucleotide
attgatgagtccaagtatagaggcttgtgggttctccgataggctaaaacaaatcac

SEQ ID NO: 11701 - DNA, 52 bp, Artificial
  Synthetic oligonucleotide
caccgcacggaaccagtatgtgttttaatacatggtggtccagggtgtggta

SEQ ID NO: 11702 - DNA, 55 bp, Artificial
  Synthetic oligonucleotide
gcctttgactacaccaactatgatggtagtttagacccaatatggtttgatgctc

SEQ ID NO: 11703 - DNA, 53 bp, Artificial
  Synthetic oligonucleotide
gtatggcattaacactctaaacaacatgggaaccctatacgcaaggcacgtca

SEQ ID NO: 11704 - DNA, 55 bp, Artificial
  Synthetic oligonucleotide
gagcccactgagctacctgagaatcctccggcccctgaatgcggctaatcccaac

SEQ ID NO: 11705 - DNA, 60 bp, Artificial
  Synthetic oligonucleotide
tccccactgaacacaaaggtgtgtacggcagtctcatggactcgtacgcctacatgagaa

SEQ ID NO: 11706 - DNA, 60 bp, Artificial
  Synthetic oligonucleotide
cagttcaagagcaaacaccgtattgaaccagtatgtctgttagtgcatggcagcccaggg

SEQ ID NO: 11707 - DNA, 60 bp, Artificial
  Synthetic oligonucleotide
cgatgctaaccactgcagtgacgccatgaacatcatgtttgaggaggtgtttcgcacgga

SEQ ID NO: 11708 - DNA, 60 bp, Artificial
  Synthetic oligonucleotide
cggctacagtgacagagtggcgcaactcacagttgggaactccactattaccacacaaga

SEQ ID NO: 11709 - DNA, 50 bp, Artificial
  Synthetic oligonucleotide
tagcacaagtgtacaacataatgcttgaagaagacaaacggaggagacaa

SEQ ID NO: 11710 - DNA, 52 bp, Artificial
  Synthetic oligonucleotide
gtgtgacccagaaactttctggtcaaagataccagcaatgttagatgataag

SEQ ID NO: 11711 - DNA, 55 bp, Artificial
  Synthetic oligonucleotide
tgcgttgcgctcaacactctgccccgagtgtagcttaggctgatgagtctgggca

SEQ ID NO: 11712 - DNA, 60 bp, Artificial
  Synthetic oligonucleotide
gtaggtaacaagtgacactatggatctgatctggggccaggtacctctatcttggtgacc

SEQ ID NO: 11713 - DNA, 60 bp, Artificial
  Synthetic oligonucleotide
ccagatttagcctggactcaaatcttttatacagcccccagccgtaatgtgctggccatg

SEQ ID NO: 11714 - DNA, 57 bp, Artificial
  Synthetic oligonucleotide
cttgattgtcactgagagtggtgccccaccgaccgacttgcaaaagatggttatggg

SEQ ID NO: 11715 - DNA, 60 bp, Artificial
  Synthetic oligonucleotide
gctacagcagtggataaaccaacgcgcccagatgtttcggtgaataggttctatacattg

SEQ ID NO: 11716 - DNA, 57 bp, Artificial
  Synthetic oligonucleotide
tcaagcagcacatttgccctatgctcttgttgctcagaaaacacccttcaggtctct

SEQ ID NO: 11717 - DNA, 51 bp, Artificial
  Synthetic oligonucleotide
tttcaaagggggccctggggtctttgtcgcggagatgcgctagcatcttcg

SEQ ID NO: 11718 - DNA, 52 bp, Artificial
  Synthetic oligonucleotide
tgggttatgaatgccttaggagtgaaggatgattggttattagtaccttctc

SEQ ID NO: 11719 - DNA, 59 bp, Artificial
  Synthetic oligonucleotide
tcactccgcaggaggtaatggagttggatactgctcgtgcgtttccaggtccatgctcc

SEQ ID NO: 11720 - DNA, 53 bp, Artificial
  Synthetic oligonucleotide
gagcctcgcagcataatccaatgttgtagaggtcgtaacgagtaattctggga

SEQ ID NO: 11721 - DNA, 60 bp, Artificial
  Synthetic oligonucleotide
gtgatagggtgcaacaaattacactgggcaattccacgattactacacaagaggctgcaa

SEQ ID NO: 11722 - DNA, 55 bp, Artificial
  Synthetic oligonucleotide
acactgggcaattccacgattactacacaagaggctgcaaatgccgttgtgtgtt

SEQ ID NO: 11723 - DNA, 52 bp, Artificial
  Synthetic oligonucleotide
gacaatcacccagtgcattgccaaactatgaacctacccccagaatacatat

SEQ ID NO: 11724 - DNA, 54 bp, Artificial
  Synthetic oligonucleotide
tgcaaaactcatattggcttataccccccctggagctcaaggaccaacatctag

SEQ ID NO: 11725 - DNA, 56 bp, Artificial
  Synthetic oligonucleotide
ccagttcctataacgatctctataagtccaatgtgtactgaattctcaggtgctcg

SEQ ID NO: 11726 - DNA, 60 bp, Artificial
  Synthetic oligonucleotide
acgcgaagtgctgccccctcatatgtggaaaggctgttctctttagagataggaatacag

SEQ ID NO: 11727 - DNA, 52 bp, Artificial
  Synthetic oligonucleotide
acagatggattgtacctgttgattgtagattggagagagatcttaactatgc

SEQ ID NO: 11728 - DNA, 55 bp, Artificial
  Synthetic oligonucleotide
cgcgcttacacagtgtgctgggtacggcaaatgccccactgagcatttacgaggc

SEQ ID NO: 11729 - DNA, 60 bp, Artificial
  Synthetic oligonucleotide
ccagtacctctatgaacaagcacttctgtttccccggtgacattgcatagactgctcacg

SEQ ID NO: 11730 - DNA, 60 bp, Artificial
  Synthetic oligonucleotide
atgtgctcccgtacaaagccgtgacagcccatggctattgcggctctgttatggttgcag

SEQ ID NO: 11731 - DNA, 60 bp, Artificial
  Synthetic oligonucleotide
ctacggggcaactcgtaggacgcttcaatacagacatggtgcgaagagtctattgagcta

SEQ ID NO: 11732 - DNA, 60 bp, Artificial
  Synthetic oligonucleotide
cgcgaaactcagagcatatacagcttgcatgatgatctgaacttttggtctgcaggtacc

SEQ ID NO: 11733 - DNA, 58 bp, Artificial
  Synthetic oligonucleotide
gcactgccttacacggctccacaccgtgtcttagcgaccgtctacaacgggagcagca

SEQ ID NO: 11734 - DNA, 60 bp, Artificial
  Synthetic oligonucleotide
actgcattgcatatccctaggtacctattgagatttctctggggcccaccagcgtggagt

SEQ ID NO: 11735 - DNA, 60 bp, Artificial
  Synthetic oligonucleotide
caatgacaactagcgcatccaatgagaatcccataccccttgcagtggaaaacattggct

SEQ ID NO: 11736 - DNA, 54 bp, Artificial
  Synthetic oligonucleotide
ggaccaaagatccgcgtaacacacaggatcatgtccgatcattgtgcttattgg

SEQ ID NO: 11737 - DNA, 60 bp, Artificial
  Synthetic oligonucleotide
atgctgggacgccttaagtatgacatggtgtgaagactcgcgtgtgcttagctgtgagtc

SEQ ID NO: 11738 - DNA, 55 bp, Artificial
  Synthetic oligonucleotide
gccgcgtttgctaattgtgagtcctccggcccctgaatgcggctaatcttacccc

SEQ ID NO: 11739 - DNA, 60 bp, Artificial
  Synthetic oligonucleotide
tgacactgatactggtactcaaatactggtgacaggctaaggatgcccttcaggtacccc

SEQ ID NO: 11740 - DNA, 51 bp, Artificial
  Synthetic oligonucleotide
ccctcttggaagtccactgtgagggacctgatacctcaccgccgtttgcct

SEQ ID NO: 11741 - DNA, 57 bp, Artificial
  Synthetic oligonucleotide
actaggggtgcatatcatttcaaggatccacaatatcctgtttgggagttgacaatt

SEQ ID NO: 11742 - DNA, 60 bp, Artificial
  Synthetic oligonucleotide
tgtccctgatccacaggttggcataacaacgatgagagatttgaagggcagagctaatag

SEQ ID NO: 11743 - DNA, 60 bp, Artificial
  Synthetic oligonucleotide
gagctaatagagggaagatggatgtttcaggagtacaggcccctgtgggtgcaattacaa

SEQ ID NO: 11744 - DNA, 50 bp, Artificial
  Synthetic oligonucleotide
accatatagctattggattggccatccggtgactaacaaatcgctcatat

SEQ ID NO: 11745 - DNA, 60 bp, Artificial
  Synthetic oligonucleotide
tatggagtctggccctcctatctcaatgaccaggatgctaacccagtagaccaaccaact

SEQ ID NO: 11746 - DNA, 60 bp, Artificial
  Synthetic oligonucleotide
cgcagtgtttcgctccgcacaaccccagtgtagatcaggtcgatgagccaccgcattccc

SEQ ID NO: 11747 - DNA, 60 bp, Artificial
  Synthetic oligonucleotide
catataatggacaaggtgtgaagagccccgtgtgctcactttgagtcctccggcccctga

SEQ ID NO: 11748 - DNA, 53 bp, Artificial
  Synthetic oligonucleotide
tgcacagaattgttgttaatctagcccaatttccaaacttgaccctgttcatg

SEQ ID NO: 11749 - DNA, 59 bp, Artificial
  Synthetic oligonucleotide
gtctagaatgctcatcgaaacagctgtagcgacctcacagtagcagcggactcctctct

SEQ ID NO: 11750 - DNA, 50 bp, Artificial
  Synthetic oligonucleotide
ccatgggacgcttcaatattgacatggtgcgaagagtctattgagctaac

SEQ ID NO: 11751 - DNA, 60 bp, Artificial
  Synthetic oligonucleotide
ctcaacctgctagcagcctgatagttagggaacacagtgcttcggcacgcttagttagtt

SEQ ID NO: 11752 - DNA, 55 bp, Artificial
  Synthetic oligonucleotide
tttatagacatggtgtgaagactcgcatgtgcttggttgtgattcctccggcccc

SEQ ID NO: 11753 - DNA, 55 bp, Artificial
  Synthetic oligonucleotide
gaccaaccaacgcagccggatgttgccacgtgtaggttttacacgcttgattccg

SEQ ID NO: 11754 - DNA, 55 bp, Artificial
  Synthetic oligonucleotide
aaatcccctggccttccatacgttaagaaaggcctgcgtcggactgacctgtgga

SEQ ID NO: 11755 - DNA, 55 bp, Artificial
  Synthetic oligonucleotide
gcaggcatggcacaccagctatgtcttgatcaagcacttctgtttccccggaccg

SEQ ID NO: 11756 - DNA, 50 bp, Artificial
  Synthetic oligonucleotide
cagctgtagcgacctcacagtagcagcggactcccctcttggtaacaaga

SEQ ID NO: 11757 - DNA, 56 bp, Artificial
  Synthetic oligonucleotide
ctaactgcggagcacacacccttaatccaaagggcagtgtgtcgtaacgggcaact

SEQ ID NO: 11758 - DNA, 60 bp, Artificial
  Synthetic oligonucleotide
ctagcctattgccatgattcacctgatctcgttatgcaactacacaaaccagtgattgac

SEQ ID NO: 11759 - DNA, 55 bp, Artificial
  Synthetic oligonucleotide
acctgatctcgttatgcaactacacaaaccagtgattgactctgatcacgtggtc

SEQ ID NO: 11760 - DNA, 60 bp, Artificial
  Synthetic oligonucleotide
ttacatacagttcaagagcaaacaccgtattgaaccagtatgtctgttagtgcatggtag

SEQ ID NO: 11761 - DNA, 53 bp, Artificial
  Synthetic oligonucleotide
tctggtatcacggtacctttgtacgcctgttttatactcccttcccgcaactt

SEQ ID NO: 11762 - DNA, 55 bp, Artificial
  Synthetic oligonucleotide
tcctccggcccctgaatgcggctaatcctaactgcggagcacgtgcttccaatcc

SEQ ID NO: 11763 - DNA, 60 bp, Artificial
  Synthetic oligonucleotide
atatgggatgtgggtctgcagtcctcatgcgtgctatgcatcccttggatcagccagact

SEQ ID NO: 11764 - DNA, 55 bp, Artificial
  Synthetic oligonucleotide
ctttacctgcgttgggtgaacgccgtgtgcggtgacgcataatcccttagaagtc

SEQ ID NO: 11765 - DNA, 55 bp, Artificial
  Synthetic oligonucleotide
tgaagagtctattgagctactatagagtcctccggcccctgaatgcggctaatct

SEQ ID NO: 11766 - DNA, 60 bp, Artificial
  Synthetic oligonucleotide
gctctacgctctgcgtaggcactatgagggagtcgagctggacacttacaccatgatctc

SEQ ID NO: 11767 - DNA, 53 bp, Artificial
  Synthetic oligonucleotide
ccagtggcaatgtttcactacgactgtgcccttctcaacggcatggctgttga

SEQ ID NO: 11768 - DNA, 60 bp, Artificial
  Synthetic oligonucleotide
tcggttatggtgagtggccttcctactgctcggattctgacgctacagcagtggataaac

SEQ ID NO: 11769 - DNA, 57 bp, Artificial
  Synthetic oligonucleotide
cacgacagataagcactggtacaaaccagaacctgagcaatatggtggggtgtcccc

SEQ ID NO: 11770 - DNA, 60 bp, Artificial
  Synthetic oligonucleotide
cttggatggcttgacaattaacatgctttatgtcccaccaggtagctcatgggccataga

SEQ ID NO: 11771 - DNA, 60 bp, Artificial
  Synthetic oligonucleotide
gggccatagacaaaataaaccaggagacgcccatagagcgagcacaagattcaactggta

SEQ ID NO: 11772 - DNA, 55 bp, Artificial
  Synthetic oligonucleotide
ccaggagacgcccatagagcgagcacaagattcaactggtaattatgcactgccc

SEQ ID NO: 11773 - DNA, 53 bp, Artificial
  Synthetic oligonucleotide
gtgctaccatacaaagctgtgacggctcacggctattgtggctctgttatggt

SEQ ID NO: 11774 - DNA, 55 bp, Artificial
  Synthetic oligonucleotide
tgagtggacagggtgtgaagagccgcgtgtgctaccaatgagtcctccggcccct

SEQ ID NO: 11775 - DNA, 53 bp, Artificial
  Synthetic oligonucleotide
ggattggtctgatttctgtcaattagtgtctggatgtccaatgaggttaaata

SEQ ID NO: 11776 - DNA, 55 bp, Artificial
  Synthetic oligonucleotide
ttgcgtagcgtttcgctccacacaaccccagtgtagatcaggtcgatgagtcacc

SEQ ID NO: 11777 - DNA, 58 bp, Artificial
  Synthetic oligonucleotide
gggaacgtgacattggtgggttgggccttgaacactggaatccaatcaatggagacat

SEQ ID NO: 11778 - DNA, 60 bp, Artificial
  Synthetic oligonucleotide
tgacataccccaccaatttaaagatgtgtctaagctcatagccacagatgattaccgagg

SEQ ID NO: 11779 - DNA, 55 bp, Artificial
  Synthetic oligonucleotide
attactcttgttaccatgggcgctcaggtatccagacagagtgttgggagtcacg

SEQ ID NO: 11780 - DNA, 51 bp, Artificial
  Synthetic oligonucleotide
gccttacatcaactgcacacccatggacagcatgttgcgacacaacaatgt

SEQ ID NO: 11781 - DNA, 60 bp, Artificial
  Synthetic oligonucleotide
atacacacccccaggtgcaagcattccagagtcccggcgtgacgcgatgctaggcacgca

SEQ ID NO: 11782 - DNA, 50 bp, Artificial
  Synthetic oligonucleotide
tcgacaatgaatggtacccaactgacctattgactgtaaacttagacgat

SEQ ID NO: 11783 - DNA, 59 bp, Artificial
  Synthetic oligonucleotide
ttgggttggcagtagacaccccatgggttgagaaggagtcagctctttccattgattac

SEQ ID NO: 11784 - DNA, 55 bp, Artificial
  Synthetic oligonucleotide
ttcacccctagcacgccaccggcagtccctgcgttgcactccacactcacgttgt

SEQ ID NO: 11785 - DNA, 55 bp, Artificial
  Synthetic oligonucleotide
ccacgaacaagcacttctgtttccccggtgacattgcatagactgctcacgcggt

SEQ ID NO: 11786 - DNA, 60 bp, Artificial
  Synthetic oligonucleotide
cgacagaaccagatgtcgctgcatgcaggttttacacgctagataccgtgtcttggacaa

SEQ ID NO: 11787 - DNA, 50 bp, Artificial
  Synthetic oligonucleotide
atctcgataccgtatgtcggtattgcgaacgcctattcacacttctacga

SEQ ID NO: 11788 - DNA, 56 bp, Artificial
  Synthetic oligonucleotide
tcggccacaaacacacaatctactgttggtcggctctgtggttacggaaagtccca

SEQ ID NO: 11789 - DNA, 60 bp, Artificial
  Synthetic oligonucleotide
gagaagtatgacaagatcatgttggacggtagagccttaacagacagcgactacagagtg

SEQ ID NO: 11790 - DNA, 55 bp, Artificial
  Synthetic oligonucleotide
gcggctaatcccaaccacggagcaggtagttgcaaaccagcagccggcctgtcgt

SEQ ID NO: 11791 - DNA, 54 bp, Artificial
  Synthetic oligonucleotide
ctagctagaataccatctaggattagcactcagaatgatttgattagagtggaa

SEQ ID NO: 11792 - DNA, 56 bp, Artificial
  Synthetic oligonucleotide
acatagaggcttgcgggtatagcgatagagtactgcaattaacactgggaaactcc

SEQ ID NO: 11793 - DNA, 54 bp, Artificial
  Synthetic oligonucleotide
gcttacacacccccagggggccctttgcctaaagatagagccacagctatgctg

SEQ ID NO: 11794 - DNA, 51 bp, Artificial
  Synthetic oligonucleotide
ctgaattcgcaggccttagacaagcagttacgcaagggtttcctactgagc

SEQ ID NO: 11795 - DNA, 55 bp, Artificial
  Synthetic oligonucleotide
cattcgttggactaaagacgcacgaagtactcaagatcatgtgcgctccctctgc

SEQ ID NO: 11796 - DNA, 55 bp, Artificial
  Synthetic oligonucleotide
cgctctacctgcgttgggtgaacgccgtgtgcggtgacgcataatccctcagatg

SEQ ID NO: 11797 - DNA, 55 bp, Artificial
  Synthetic oligonucleotide
gcacttctgtttccccggtgacattgcatagactgctcacgcggttgaaagcgat

SEQ ID NO: 11798 - DNA, 55 bp, Artificial
  Synthetic oligonucleotide
gcgaatttacaatgttgggtgtctatgacaggtgggctgtcttaccacgccatgc

SEQ ID NO: 11799 - DNA, 55 bp, Artificial
  Synthetic oligonucleotide
gggggttttacaagcactatggcattatagtaggagacattgtgtatcaattgga

SEQ ID NO: 11800 - DNA, 55 bp, Artificial
  Synthetic oligonucleotide
ccacgcttgtggaccttatgctcacacagccatcctctggtaagtttgtaagacg

SEQ ID NO: 11801 - DNA, 54 bp, Artificial
  Synthetic oligonucleotide
aattgagagattgttaccatatagctattggattggccatccggtgacaaacag

SEQ ID NO: 11802 - DNA, 60 bp, Artificial
  Synthetic oligonucleotide
tagtgatcttgtcatttaccgcacaaatactacaggtgatgacatagtcccaacatgtga

SEQ ID NO: 11803 - DNA, 55 bp, Artificial
  Synthetic oligonucleotide
accgcacaaatactacaggtgatgacataatcccaacatgcgactgtacactagg

SEQ ID NO: 11804 - DNA, 60 bp, Artificial
  Synthetic oligonucleotide
ttgtgaacaaggtgtgaagagtctattgagctaccaaagagtcctccggcccctgaatgc

SEQ ID NO: 11805 - DNA, 60 bp, Artificial
  Synthetic oligonucleotide
gccaatcagttgacagggtgtgaagagccccgtgtgctcatcttgagtcctccggcccct

SEQ ID NO: 11806 - DNA, 57 bp, Artificial
  Synthetic oligonucleotide
aatgcgcagtcacaacaactggagcctggtgataatcccaatatgtcctcttgaaac

SEQ ID NO: 11807 - DNA, 53 bp, Artificial
  Synthetic oligonucleotide
cccctagtagacctggcagatgaggctagaaataccccactggtaacagtgtt

SEQ ID NO: 11808 - DNA, 55 bp, Artificial
  Synthetic oligonucleotide
ttggcctgtcgtaatgcgtaagtctgtggcggaaccgactactttgggtgtccgt

SEQ ID NO: 11809 - DNA, 50 bp, Artificial
  Synthetic oligonucleotide
catccgttaactcggagcatatcttctcagtagaccacaattgtgagact

SEQ ID NO: 11810 - DNA, 60 bp, Artificial
  Synthetic oligonucleotide
tagtaaattccaccaaggagcactcctagtcgctgtcctaccagagtatgtcattgggac

SEQ ID NO: 11811 - DNA, 60 bp, Artificial
  Synthetic oligonucleotide
ttctatgctattgtgggaggctgtggaagtcttggcttattgtcatgattcacctgatct

SEQ ID NO: 11812 - DNA, 55 bp, Artificial
  Synthetic oligonucleotide
tgggaggctgtggaagtcttggcttattgtcatgattcacctgatcttgttatgc

SEQ ID NO: 11813 - DNA, 52 bp, Artificial
  Synthetic oligonucleotide
acatcctctcgatcggatcgcaacgtgttacccaggaacccacttgggtgta

SEQ ID NO: 11814 - DNA, 55 bp, Artificial
  Synthetic oligonucleotide
tgatctagggcgtctaagggtttatgtttgggctccgttaacaataccatctggg

SEQ ID NO: 11815 - DNA, 60 bp, Artificial
  Synthetic oligonucleotide
caggctcttgatttcccaaagaaaggccatggcgcactgacccaattgtttgcatactat

SEQ ID NO: 11816 - DNA, 50 bp, Artificial
  Synthetic oligonucleotide
agactcagatgatatctttaaaaccgccttaactgggaaagcaaggttca

SEQ ID NO: 11817 - DNA, 53 bp, Artificial
  Synthetic oligonucleotide
gtataccatccatgtacaatgtaacgccacaaaatttcacagtggcactttac

SEQ ID NO: 11818 - DNA, 58 bp, Artificial
  Synthetic oligonucleotide
tctcaatttagatatacagacccagacacttacacacacccaggctttatatcatgct

SEQ ID NO: 11819 - DNA, 55 bp, Artificial
  Synthetic oligonucleotide
tgagagtcctccggcccctgaatgcggctaatcctaaccacggagcaggcagtgg

SEQ ID NO: 11820 - DNA, 54 bp, Artificial
  Synthetic oligonucleotide
tagtactaatcactcactcttggcacccccaactatatcgtcgctcccagcaat

SEQ ID NO: 11821 - DNA, 55 bp, Artificial
  Synthetic oligonucleotide
cccggttagattgatacgctccaacagggcgaaaacaactctaatcgttatccgc

SEQ ID NO: 11822 - DNA, 55 bp, Artificial
  Synthetic oligonucleotide
acatggtgcgaagagcctattgagctagttagtagtcctccggcccctgaatgcg

SEQ ID NO: 11823 - DNA, 60 bp, Artificial
  Synthetic oligonucleotide
gacatgctctcagatgccgcgctcatggtgttacaccgtgggaaccgcgtgagagacatc

SEQ ID NO: 11824 - DNA, 60 bp, Artificial
  Synthetic oligonucleotide
cttgtacaaacacgatctatgcaggtttccacaactgacacaaaccgtgcaatctggaac

SEQ ID NO: 11825 - DNA, 56 bp, Artificial
  Synthetic oligonucleotide
acttgagactaaccagggtgcaaatgggcttactgcgacagttccggtcaactcaa

SEQ ID NO: 11826 - DNA, 60 bp, Artificial
  Synthetic oligonucleotide
tccaaagaacactcaagatcatgtgcgctccctgtgcttattggcttggcacaatggaga

SEQ ID NO: 11827 - DNA, 60 bp, Artificial
  Synthetic oligonucleotide
tgctgggacgcccttttatagacatggtgtgaagactcgcatgtgcttggttgtgattcc

SEQ ID NO: 11828 - DNA, 58 bp, Artificial
  Synthetic oligonucleotide
ttagtacggagcctatgaagctagaggatgcagtgtacggcacagaaggattggaagc

SEQ ID NO: 11829 - DNA, 55 bp, Artificial
  Synthetic oligonucleotide
gcaacaatttgccgtacggcatcctactgccagcggattcacacctggtaacagg

SEQ ID NO: 11830 - DNA, 58 bp, Artificial
  Synthetic oligonucleotide
catggcatttggacaactaatcagcacagacaggcattggtcgcatcaattactctac

SEQ ID NO: 11831 - DNA, 60 bp, Artificial
  Synthetic oligonucleotide
tcggaacccattttgctcagtacagaaatgtgtgggatgtggactattcggcctttgatg

SEQ ID NO: 11832 - DNA, 57 bp, Artificial
  Synthetic oligonucleotide
tacaaacacgatctatgcaggtttccccaactgacacaaaccgtgcaactcggaact

SEQ ID NO: 11833 - DNA, 57 bp, Artificial
  Synthetic oligonucleotide
caccgatcctgatgcgttagagcgtaggtttccaatccgactcaatattaggcccct

SEQ ID NO: 11834 - DNA, 55 bp, Artificial
  Synthetic oligonucleotide
cactagcggggataaaaaccctagtaagttgataaggctggagacaggtgattgg

SEQ ID NO: 11835 - DNA, 60 bp, Artificial
  Synthetic oligonucleotide
ggacgctagttgtgaacaaggtgcgaagagcctattgagctacctgagagtcctccggcc

SEQ ID NO: 11836 - DNA, 55 bp, Artificial
  Synthetic oligonucleotide
gtgaatcctccggcccctgaatgtggctaaccttaaccccgcagccgttactcac

SEQ ID NO: 11837 - DNA, 58 bp, Artificial
  Synthetic oligonucleotide
atgaggatggtccagtgaaagatcctgtctatagcatgaatggcactctattaggtaa

SEQ ID NO: 11838 - DNA, 52 bp, Artificial
  Synthetic oligonucleotide
ttgtacaaagcatttcatcagaacccggggataataactggctcagcagtgg

SEQ ID NO: 11839 - DNA, 54 bp, Artificial
  Synthetic oligonucleotide
tcacctgcgagtgcttaccagtggttttacgacgggtaccccacgtttggagaa

SEQ ID NO: 11840 - DNA, 55 bp, Artificial
  Synthetic oligonucleotide
ctagtatcatcttggaatcttcgatgcgttgcgttcagcactcaaccccagagtg

SEQ ID NO: 11841 - DNA, 60 bp, Artificial
  Synthetic oligonucleotide
taggacgctctaatacagacatggtgcgaagagtctattgagctagctggtattcctccg

SEQ ID NO: 11842 - DNA, 57 bp, Artificial
  Synthetic oligonucleotide
agagttggttctgagagagatcggttactcggaggaggctgtgtcactcatagaagg

SEQ ID NO: 11843 - DNA, 59 bp, Artificial
  Synthetic oligonucleotide
gttagcatggagctgtaggagtctaaattggggacgcagatgctaggaacgtcgccctg

SEQ ID NO: 11844 - DNA, 51 bp, Artificial
  Synthetic oligonucleotide
aaaaccgcatatatgaagtcacctgtctatgaggactcaccctatgagccc

SEQ ID NO: 11845 - DNA, 56 bp, Artificial
  Synthetic oligonucleotide
gcaggagacgtcgagtccaaccctgggcccttcttcttctccgatgtcaggtcaaa

SEQ ID NO: 11846 - DNA, 60 bp, Artificial
  Synthetic oligonucleotide
gcgtgccaatcggaagagctttattgctccctgagtactctacattgtaccgccgctggc

SEQ ID NO: 11847 - DNA, 50 bp, Artificial
  Synthetic oligonucleotide
cactctggtatcacggtacctttgtgcgcctgttttaaaaccctctcccc

SEQ ID NO: 11848 - DNA, 60 bp, Artificial
  Synthetic oligonucleotide
cgactacgcgtcgcgcttgcacagtgttctgggtacggcaaatgccccactgagcattta

SEQ ID NO: 11849 - DNA, 54 bp, Artificial
  Synthetic oligonucleotide
ccgaatcggcagatccagtcacaaccacggttgagaactacggaggagagactc

SEQ ID NO: 11850 - DNA, 56 bp, Artificial
  Synthetic oligonucleotide
cccccaagcgtgtgcgcacattccagtgttgctacgtcgtaacgcgtaagttggag

SEQ ID NO: 11851 - DNA, 60 bp, Artificial
  Synthetic oligonucleotide
atgctgggacgccttaattgtgacatggtgcgaagacccacgtgtgcttaattgtgagtc

SEQ ID NO: 11852 - DNA, 60 bp, Artificial
  Synthetic oligonucleotide
cgcgtgtgctcagtgtgcttcctccggcccctgaatgtggctaaccttaaccctgcagcc

SEQ ID NO: 11853 - DNA, 55 bp, Artificial
  Synthetic oligonucleotide
acaagtgacactatggatctgatctggggccaactacctctatctaggtgagttg

SEQ ID NO: 11854 - DNA, 60 bp, Artificial
  Synthetic oligonucleotide
aatttgtactgtgtttgactccacgctcggtccactggcgagtgttagtagcagcactgt

SEQ ID NO: 11855 - DNA, 57 bp, Artificial
  Synthetic oligonucleotide
ttggccgttgcagggatgtcccccactgttgtgtttaagattgcaggctctcgttca

SEQ ID NO: 11856 - DNA, 60 bp, Artificial
  Synthetic oligonucleotide
atggtgacaatctaagattgttatcatatagctattggattggccatccggtgactaaca

SEQ ID NO: 11857 - DNA, 56 bp, Artificial
  Synthetic oligonucleotide
ccgacagtagacctggcagatgaggctagaaattccccactggtaacagtgttcta

SEQ ID NO: 11858 - DNA, 55 bp, Artificial
  Synthetic oligonucleotide
cacctgtttgggaggcaatggttagttaggactgtgcaacacgccccaactgtgc

SEQ ID NO: 11859 - DNA, 54 bp, Artificial
  Synthetic oligonucleotide
tgcgctcagcactctaccccgagtgtagcttaggctgatgagtctgggcatacc

SEQ ID NO: 11860 - DNA, 53 bp, Artificial
  Synthetic oligonucleotide
ttcccacccatagggcccactgggcgccagcactctggtattccggtaccttt

SEQ ID NO: 11861 - DNA, 53 bp, Artificial
  Synthetic oligonucleotide
ggtttgacgtctaaccattatggcagtgggtggagtactgcaaagatgtcacc

SEQ ID NO: 11862 - DNA, 55 bp, Artificial
  Synthetic oligonucleotide
ccacggctaaaagcggctgatccgttatccgctcatgtacttcgagaagcctagt

SEQ ID NO: 11863 - DNA, 60 bp, Artificial
  Synthetic oligonucleotide
atcaatagcaggcataacgctccagttatgtcttgatcaagcacttctgtttccccggac

SEQ ID NO: 11864 - DNA, 57 bp, Artificial
  Synthetic oligonucleotide
tcgtagaggccagtgagtattacccggctagataccagtcacacctcatgcttgcag

SEQ ID NO: 11865 - DNA, 60 bp, Artificial
  Synthetic oligonucleotide
ctgatgtagatggtatggcctggttcactccagtaggccttgcagttgacaccccttggg

SEQ ID NO: 11866 - DNA, 60 bp, Artificial
  Synthetic oligonucleotide
actatgctggacagctaatgtcactggatatcagtactgagcagatgtgtctagaggatg

SEQ ID NO: 11867 - DNA, 57 bp, Artificial
  Synthetic oligonucleotide
aattgagagattgttaccatatagctattggattggccatccggtgacgaatagagc

SEQ ID NO: 11868 - DNA, 55 bp, Artificial
  Synthetic oligonucleotide
ctccggcccctgaatgcggctaatcccaaccacggagcaggtgacttcaagccag

SEQ ID NO: 11869 - DNA, 55 bp, Artificial
  Synthetic oligonucleotide
ttcaaagacatggtgtgaagacctgcatgtgcttggttgtgagtcctccggcccc

SEQ ID NO: 11870 - DNA, 58 bp, Artificial
  Synthetic oligonucleotide
atgcagctcacactgatacaccaatcttgtgtctctcgttgtcccccgcttcagatcc

SEQ ID NO: 11871 - DNA, 55 bp, Artificial
  Synthetic oligonucleotide
ctcaatagcagacctggcagatgaggctagaaactccccactggcgacagtgttc

SEQ ID NO: 11872 - DNA, 60 bp, Artificial
  Synthetic oligonucleotide
cggctgcttatggtgacaatcgaagagttgttaccatatagctattggattggccatccg

SEQ ID NO: 11873 - DNA, 60 bp, Artificial
  Synthetic oligonucleotide
ctaaactcgccaaacatagaggcttgcgggtatagcgatagagtactgcaattaacactg

SEQ ID NO: 11874 - DNA, 51 bp, Artificial
  Synthetic oligonucleotide
cacgatctatgcaggtttccacaactgacacacatcgtgcaacttgaagct

SEQ ID NO: 11875 - DNA, 60 bp, Artificial
  Synthetic oligonucleotide
ggtgtgacacaccagtcataccttgatcaagcacttctgtttccccggactgagtatcaa

SEQ ID NO: 11876 - DNA, 51 bp, Artificial
  Synthetic oligonucleotide
tgttaccatatagctattggattggccatccagtgactaacagagcgatta

SEQ ID NO: 11877 - DNA, 58 bp, Artificial
  Synthetic oligonucleotide
cacttacaccatgatttcctacggggatgacatcgtggtcgcaagtgattacgatctg

SEQ ID NO: 11878 - DNA, 60 bp, Artificial
  Synthetic oligonucleotide
tgcttatggtgacaattgagagattgttaccatatagctattggattggccatccggtgt

SEQ ID NO: 11879 - DNA, 60 bp, Artificial
  Synthetic oligonucleotide
acctagtaacaccatgaaggttgcgcagtgtttcgctccgcacaaccccagtgtagatca

SEQ ID NO: 11880 - DNA, 60 bp, Artificial
  Synthetic oligonucleotide
ctattcggcctttgatgctaaccactgcagtgatgcaatgaacatcatgtttgaggaggt

SEQ ID NO: 11881 - DNA, 60 bp, Artificial
  Synthetic oligonucleotide
gcaagcgcagcactccagctgtgtttcggtcaagcacttctgtttccccggactgagtat

SEQ ID NO: 11882 - DNA, 60 bp, Artificial
  Synthetic oligonucleotide
attagagtttggtctgagctaaatattggaactggcacctccgcttacacatcactgaat

SEQ ID NO: 11883 - DNA, 54 bp, Artificial
  Synthetic oligonucleotide
attcattagaacactaatttgattagaactctaatttggaatattggacataac

SEQ ID NO: 11884 - DNA, 60 bp, Artificial
  Synthetic oligonucleotide
gctaggtactcatttgatctgggacataggcctgcagtctagcgcaactatggtagcacc

SEQ ID NO: 11885 - DNA, 60 bp, Artificial
  Synthetic oligonucleotide
acatgctcttaggacatgggttcgcaaacccaggtgactgtggtgacatcctgcgttgca

SEQ ID NO: 11886 - DNA, 60 bp, Artificial
  Synthetic oligonucleotide
atgctgggacgcctttttaaagacatggtgtgaagacctgcatgtgcttgattgtgagtc

SEQ ID NO: 11887 - DNA, 60 bp, Artificial
  Synthetic oligonucleotide
caagccacatatgcgatttgggacttgggcctcaactctagctacaatttcaccgtccca

SEQ ID NO: 11888 - DNA, 60 bp, Artificial
  Synthetic oligonucleotide
acctatccctgctgctactgtggtccgccctaagggccgctcccgcattgtgcgccaatg

SEQ ID NO: 11889 - DNA, 58 bp, Artificial
  Synthetic oligonucleotide
caccatgggacgctcgcgccgttcactctttgtccaacagaatgggatttggttgccg

SEQ ID NO: 11890 - DNA, 60 bp, Artificial
  Synthetic oligonucleotide
ggttaaacctcttggcagcgtgagacaccagatgcacctttgctctgtatcgccctgtgt

SEQ ID NO: 11891 - DNA, 60 bp, Artificial
  Synthetic oligonucleotide
catttatggctactggtaagatgttgattgcttatacaccaccgggaggtgcgcagccta

SEQ ID NO: 11892 - DNA, 54 bp, Artificial
  Synthetic oligonucleotide
acaccattcaaggcccttatgtccaaacaccagctgcttaaatgtggttggata

SEQ ID NO: 11893 - DNA, 54 bp, Artificial
  Synthetic oligonucleotide
cactatgttgggatctgttacaaggatgttcacgcaatggcgtggttctttagt

SEQ ID NO: 11894 - DNA, 60 bp, Artificial
  Synthetic oligonucleotide
ggaccaaggacgcaaaatccacccaggaccatgtgagatcactgtgcctattggcttggc

SEQ ID NO: 11895 - DNA, 60 bp, Artificial
  Synthetic oligonucleotide
taatgttgacccgcaatacttgcggttgaacatctcagacatcctgcgggaccctgtaat

SEQ ID NO: 11896 - DNA, 60 bp, Artificial
  Synthetic oligonucleotide
ttatgcgctaccctcattcacatggaaaccagcgcaaactccagtattcacatgctcagt

SEQ ID NO: 11897 - DNA, 60 bp, Artificial
  Synthetic oligonucleotide
gagggacatgtagcatttatcgatcttagacactttcactgtgctgaggaacaaggcata

SEQ ID NO: 11898 - DNA, 60 bp, Artificial
  Synthetic oligonucleotide
tgttaggcacccacattgtctgggacataggattgcagtcgagttgtgtgctctgtgtgc

SEQ ID NO: 11899 - DNA, 56 bp, Artificial
  Synthetic oligonucleotide
tactctggatatgatgccagtttgagccccgtgtggtttgcttgtctgaagctatt

SEQ ID NO: 11900 - DNA, 60 bp, Artificial
  Synthetic oligonucleotide
ccgcaaacttgcagagtatgaaggctctgacgtttactcactcccgcccgacccagatca

SEQ ID NO: 11901 - DNA, 58 bp, Artificial
  Synthetic oligonucleotide
gaggcttgaacgtaacgtcaatagagccctatcagtagtccagagcatttcactggtt

SEQ ID NO: 11902 - DNA, 60 bp, Artificial
  Synthetic oligonucleotide
gcgagtttactgcccttggagtatacgacaccgccatagtcctcccgcgtcacgctatgc

SEQ ID NO: 11903 - DNA, 54 bp, Artificial
  Synthetic oligonucleotide
gagtaaataggtacacgaagtcggcacatcaaaaaggtgagtacactgccattg

SEQ ID NO: 11904 - DNA, 60 bp, Artificial
  Synthetic oligonucleotide
ctaacgggtgtgaagccaatgagtggacagggtgtgaagagccgcgtgtgctaccaatga

SEQ ID NO: 11905 - DNA, 55 bp, Artificial
  Synthetic oligonucleotide
tggatagtaccaatgttccaggccccgatgtgattccgtgttgtgattgcactgc

SEQ ID NO: 11906 - DNA, 60 bp, Artificial
  Synthetic oligonucleotide
cagtctatggcatagagcatctggaaccactagacctcaccaccagtgcaggattcccct

SEQ ID NO: 11907 - DNA, 59 bp, Artificial
  Synthetic oligonucleotide
tcagttgactcagaggaggttagacactactgtgaatcaaaaggatggataatacctgc

SEQ ID NO: 11908 - DNA, 57 bp, Artificial
  Synthetic oligonucleotide
aaagaagactagagacctgtccaagttaagagagtgtatggacaagtacggtctcaa

SEQ ID NO: 11909 - DNA, 58 bp, Artificial
  Synthetic oligonucleotide
atggtgtatctgtgaggggggggctcctcacacttagtctagtgctacctgacagggc

SEQ ID NO: 11910 - DNA, 60 bp, Artificial
  Synthetic oligonucleotide
tcatgagtccattagatggactaggagtgctgcaacaacacaggaacatgtgacatcgtt

SEQ ID NO: 11911 - DNA, 55 bp, Artificial
  Synthetic oligonucleotide
ggactaggagtgctgcaacaacacaggaacatgtgacatcgttgtgcttattggc

SEQ ID NO: 11912 - DNA, 60 bp, Artificial
  Synthetic oligonucleotide
cataataactggagcctggtaatcatacctatctgtgaactcaagtgcaataacactgcc

SEQ ID NO: 11913 - DNA, 60 bp, Artificial
  Synthetic oligonucleotide
cggtatccctgcccttagtatgcatgtttgtatgaatggaatctgtagtgatgccccgct

SEQ ID NO: 11914 - DNA, 52 bp, Artificial
  Synthetic oligonucleotide
accttctttcatcagggggctatagctgtggttgcaatcccagaggctcaga

SEQ ID NO: 11915 - DNA, 60 bp, Artificial
  Synthetic oligonucleotide
tcgaggagatgcagagccagccgggtctttatggttcggcagttggctgtgatccagaag

SEQ ID NO: 11916 - DNA, 60 bp, Artificial
  Synthetic oligonucleotide
ggacattacaggagtgcaatcaaccttgagatttcgtgttccttggatttctgatacacc

SEQ ID NO: 11917 - DNA, 60 bp, Artificial
  Synthetic oligonucleotide
gtacccattcctggtccatcctgttatgccaatgaaggacatacacgagtccattagagg

SEQ ID NO: 11918 - DNA, 60 bp, Artificial
  Synthetic oligonucleotide
gatgaacagtacccattcctggtccatcctgttatgccaatgaaggacatacatgagtcc

SEQ ID NO: 11919 - DNA, 60 bp, Artificial
  Synthetic oligonucleotide
gttccatcaggtgtttgagggcaataaggaacccgcagtgctcagaaatggtgatccgcg

SEQ ID NO: 11920 - DNA, 60 bp, Artificial
  Synthetic oligonucleotide
cctatgacaaccctgatctaattcctcagactattaagttcctaacagaatatacaggca

SEQ ID NO: 11921 - DNA, 60 bp, Artificial
  Synthetic oligonucleotide
tgaccgagatgtttagggagtacaaccataggcacagcgttggagctactcttgaggcac

SEQ ID NO: 11922 - DNA, 60 bp, Artificial
  Synthetic oligonucleotide
cctgaggcggagatgggtggtgctaaagtcggacaggcattcgaggcagatgcactagcc

SEQ ID NO: 11923 - DNA, 60 bp, Artificial
  Synthetic oligonucleotide
cagacatcactaccactcagtctaccgttggaatcacccacgggtacgcacactccgagc

SEQ ID NO: 11924 - DNA, 60 bp, Artificial
  Synthetic oligonucleotide
gaccccgatctgttctggagcaagattccagtcatgcttgacggtcacctcattgctttc

SEQ ID NO: 11925 - DNA, 58 bp, Artificial
  Synthetic oligonucleotide
ggaaatctaggctaattgaggcatccagtttgaatgactccgtggcaatgagacaaac

SEQ ID NO: 11926 - DNA, 60 bp, Artificial
  Synthetic oligonucleotide
caacttccaccctacagcggtggcagacgtgagagccgacataaacgctgtgccatcact

SEQ ID NO: 11927 - DNA, 60 bp, Artificial
  Synthetic oligonucleotide
gcaacccttgatatcagcacagagcctatgaagcttgaggacgcagtttacggtactgat

SEQ ID NO: 11928 - DNA, 55 bp, Artificial
  Synthetic oligonucleotide
ctaggttgttcccacctagacctcctacatggagttgtactctattatttcggta

SEQ ID NO: 11929 - DNA, 60 bp, Artificial
  Synthetic oligonucleotide
ctagtgcatacaatccagtgtgtggctagtcgtaacgagcaattacgggatgggaccaac

SEQ ID NO: 11930 - DNA, 60 bp, Artificial
  Synthetic oligonucleotide
aatttcgtgtttccacctaacacaccaaatagcgctgatatgttgtgctttgtgtctgct

SEQ ID NO: 11931 - DNA, 50 bp, Artificial
  Synthetic oligonucleotide
ccgttgcaatggtgggcacgcgttgggactactctgccactaacaactgt

SEQ ID NO: 11932 - DNA, 60 bp, Artificial
  Synthetic oligonucleotide
tcacattaggcctcacacgtgtggtcgaagctgcacccatccacgctatcatcgctggta

SEQ ID NO: 11933 - DNA, 60 bp, Artificial
  Synthetic oligonucleotide
ggaagtcttggcctattgtcatgattcacctgatctcgttatgcagttacataaaccagt

SEQ ID NO: 11934 - DNA, 55 bp, Artificial
  Synthetic oligonucleotide
gagaagcctagtaatgccgttgaagttttattgacgttacgctcagcacactacc

SEQ ID NO: 11935 - DNA, 60 bp, Artificial
  Synthetic oligonucleotide
tccgggtctcacatttattgaggccaatgagtactacccagcgcgatatcagtcccacgt

SEQ ID NO: 11936 - DNA, 55 bp, Artificial
  Synthetic oligonucleotide
acgtatctggacgtgacaaaacgtgacaggggtaaatttagcacatccagagtgc

SEQ ID NO: 11937 - DNA, 60 bp, Artificial
  Synthetic oligonucleotide
tcgctccgctgttccccacagtagacctggcagatgaggctagaaataccccactggtga

SEQ ID NO: 11938 - DNA, 60 bp, Artificial
  Synthetic oligonucleotide
gggcccataccggacaaagtcaacagctatgcatggcagacatccacgaaccctagtgta

SEQ ID NO: 11939 - DNA, 59 bp, Artificial
  Synthetic oligonucleotide
agttattgtggtgagaaaccatgatgacctcattaccgtgacagccactcttgctctta

SEQ ID NO: 11940 - DNA, 54 bp, Artificial
  Synthetic oligonucleotide
aaattacttggttggtcgctccgccataccccatggtagacctggcagatgagg

SEQ ID NO: 11941 - DNA, 60 bp, Artificial
  Synthetic oligonucleotide
acctcatggtagcagagagtcgagcccagggaattgacaccattgctaggtgttcttgca

SEQ ID NO: 11942 - DNA, 60 bp, Artificial
  Synthetic oligonucleotide
gcaaaacccataagtagaagagatgcaatgttaggtacccatgtagtgtgggatgttggc

SEQ ID NO: 11943 - DNA, 60 bp, Artificial
  Synthetic oligonucleotide
cgtgctgatgaacaattcccatacctagtgcacccagttatgccaatgtcagaaatatac

SEQ ID NO: 11944 - DNA, 57 bp, Artificial
  Synthetic oligonucleotide
tggacgaacacttaatggctcaagggtagatggcaattcaaagcaacccaccgaaga

SEQ ID NO: 11945 - DNA, 60 bp, Artificial
  Synthetic oligonucleotide
gcttagacacaacaactggagtctagtaattatacctgtgtcacccctggcttctgaatc

SEQ ID NO: 11946 - DNA, 58 bp, Artificial
  Synthetic oligonucleotide
gtggtcccctggatatccgctagccactatagatttactaccccagatacatactcac

SEQ ID NO: 11947 - DNA, 60 bp, Artificial
  Synthetic oligonucleotide
tcaggaactaatgcttcagtattctggcaacatggacaaccataccctagatttacaatc

SEQ ID NO: 11948 - DNA, 60 bp, Artificial
  Synthetic oligonucleotide
ctccaaacacactaccaacatggaaagcttgcccccaatctttgatgtcgtctgcggtga

SEQ ID NO: 11949 - DNA, 54 bp, Artificial
  Synthetic oligonucleotide
gtaccctccgggcgccacgattgacactgtcacggttcacttagccacggaagc

SEQ ID NO: 11950 - DNA, 60 bp, Artificial
  Synthetic oligonucleotide
acaactgactgccaaatactgcatactactggcctgactttgaaggacatacgcaaaggt

SEQ ID NO: 11951 - DNA, 60 bp, Artificial
  Synthetic oligonucleotide
cataccctgcaacctctaaatatggacctgctgctttgacccgcaatgaccctcggctca

SEQ ID NO: 11952 - DNA, 53 bp, Artificial
  Synthetic oligonucleotide
ggttaaaagcgattgatccgttatccgctcatgtacttcgagaagcctagtac

SEQ ID NO: 11953 - DNA, 55 bp, Artificial
  Synthetic oligonucleotide
gccactagcgtcgttatgcttagcctctggatacatgggattaattgcattctgt

SEQ ID NO: 11954 - DNA, 55 bp, Artificial
  Synthetic oligonucleotide
cggctacttgagtgccagcggattacccctagtggtaacactagcctctgggccc

SEQ ID NO: 11955 - DNA, 55 bp, Artificial
  Synthetic oligonucleotide
ccttaagcgactatggatctgatcaggggcccaccatgtaacacatgggtagaag

SEQ ID NO: 11956 - DNA, 60 bp, Artificial
  Synthetic oligonucleotide
atgcgcgcttatacatggatcccctggaactgggaagtcactagccaccatgattgtagg

SEQ ID NO: 11957 - DNA, 60 bp, Artificial
  Synthetic oligonucleotide
cgtgacacccatgcctgaaagagatctagccattatcaacataggtgctcatggctcaga

SEQ ID NO: 11958 - DNA, 60 bp, Artificial
  Synthetic oligonucleotide
gaatcgagtgtgcagaagttgagtatgactcatggtatcctaatcctttggaccctacct

SEQ ID NO: 11959 - DNA, 60 bp, Artificial
  Synthetic oligonucleotide
aacatgttgtatgttcctccagggagctcttgggctattagcaacaccaatgagacaacg

SEQ ID NO: 11960 - DNA, 55 bp, Artificial
  Synthetic oligonucleotide
tatggataaatcaccaggacttccatacgttaagaaaggcttgcgccggactgac

SEQ ID NO: 11961 - DNA, 60 bp, Artificial
  Synthetic oligonucleotide
tggttatggaaccttacagctatcctacattgattctttgtgctactctaagcaccactg

SEQ ID NO: 11962 - DNA, 60 bp, Artificial
  Synthetic oligonucleotide
atttgtctgtcacagaacaatcagagttctattttcctagagctccactaaattcaaatg

SEQ ID NO: 11963 - DNA, 60 bp, Artificial
  Synthetic oligonucleotide
tctaccaggttcaggacaatttctgactactgatgaccatagctcagcaccagtcctccc

SEQ ID NO: 11964 - DNA, 60 bp, Artificial
  Synthetic oligonucleotide
tcgggcgctcccttgctgaaaagctcaatagctcagtgtattccctaccaccagatcctg

SEQ ID NO: 11965 - DNA, 60 bp, Artificial
  Synthetic oligonucleotide
gcacaccgatcaatagtgggcgtggcacaccagctacgtcttgatcaagtacttctgttc

SEQ ID NO: 11966 - DNA, 60 bp, Artificial
  Synthetic oligonucleotide
atcccatggattagtcaggcacactacaggtttgtggagaaggacccatactcggctgcg

SEQ ID NO: 11967 - DNA, 60 bp, Artificial
  Synthetic oligonucleotide
accatttcaaacccagacacgccaattctgacacaccagatcatgtatgtgccaccgggg

SEQ ID NO: 11968 - DNA, 60 bp, Artificial
  Synthetic oligonucleotide
ttgcgatgtgtacatggcccaatcggcctgttaacagcaggcgggagcgggtatgtatgc

SEQ ID NO: 11969 - DNA, 55 bp, Artificial
  Synthetic oligonucleotide
atggatggctgactgtttggcagctaacgccgctcacttatccacttggagtgcc

SEQ ID NO: 11970 - DNA, 51 bp, Artificial
  Synthetic oligonucleotide
acaatcacctggtaatgacatggactatgtgttgacttgcttgagacagac

SEQ ID NO: 11971 - DNA, 55 bp, Artificial
  Synthetic oligonucleotide
gttcacactgtccaagctcctttggttgttcgcttccacttgccactgtcaactc

SEQ ID NO: 11972 - DNA, 52 bp, Artificial
  Synthetic oligonucleotide
gtggcggagacccgtcttcgctacgaccaccttcctcacagttctaggcttt

SEQ ID NO: 11973 - DNA, 53 bp, Artificial
  Synthetic oligonucleotide
cgctacggaatgccaatccctgatcataccaggtccggaaacccatccgggcg

SEQ ID NO: 11974 - DNA, 54 bp, Artificial
  Synthetic oligonucleotide
tggcttcgctccaactttcctaccctatgaatacctccagcttcgctggctcaa

SEQ ID NO: 11975 - DNA, 60 bp, Artificial
  Synthetic oligonucleotide
ggactggcaatcagatgttctagtcacccccattgccgctcatggtagacatcaaatagc

SEQ ID NO: 11976 - DNA, 60 bp, Artificial
  Synthetic oligonucleotide
gtcaacccatccagcgcccaagacactccaagcaagcacgagcagtcagtagagtgcggc

SEQ ID NO: 11977 - DNA, 50 bp, Artificial
  Synthetic oligonucleotide
acgtgggcgggaatggagctcagggattcgcagcaatgttgctccactct

SEQ ID NO: 11978 - DNA, 54 bp, Artificial
  Synthetic oligonucleotide
cgcccggacttccctacacgacagcggggatcccgagagaggcgctgtttgacc

SEQ ID NO: 11979 - DNA, 60 bp, Artificial
  Synthetic oligonucleotide
tcccatccctagcatgccaacgactgctcctgcgttgcactccacacttacgtctgtgtg

SEQ ID NO: 11980 - DNA, 60 bp, Artificial
  Synthetic oligonucleotide
cactaatcaatttctcacgactgacaatgaggtctcagtgcccatactgcccgggtttca

SEQ ID NO: 11981 - DNA, 60 bp, Artificial
  Synthetic oligonucleotide
gctccgagtttgcaggccttagacaagcagttacgcaagggtttcctactgagctgaagc

SEQ ID NO: 11982 - DNA, 60 bp, Artificial
  Synthetic oligonucleotide
tacatgaggttcaacgccgagttcacattcgtatccacactcgcggatggcacaactccc

SEQ ID NO: 11983 - DNA, 51 bp, Artificial
  Synthetic oligonucleotide
tgccaacacggtgtcgtagggatagtctcgaccgggggaaatggcctcgtg

SEQ ID NO: 11984 - DNA, 60 bp, Artificial
  Synthetic oligonucleotide
gaggttcgccaatactgcagagatcaggggtggatcgtgcccgatactcccaccaacgta

SEQ ID NO: 11985 - DNA, 60 bp, Artificial
  Synthetic oligonucleotide
attctgctcccgggatcgctttttgcatttgactactcagggtatgatgctagtctcagt

SEQ ID NO: 11986 - DNA, 53 bp, Artificial
  Synthetic oligonucleotide
agcggtgcaaccccagcaccctgattcgatgaacgttctttacggaaccagag

SEQ ID NO: 11987 - DNA, 60 bp, Artificial
  Synthetic oligonucleotide
ccactgagtccatgatgagtagaattgcagctggagacttggagtcatcagtggatgatc

SEQ ID NO: 11988 - DNA, 55 bp, Artificial
  Synthetic oligonucleotide
atacagcaagatgggagcacaagtgtcaacgcagaaaactggcgcacacgaaact

SEQ ID NO: 11989 - DNA, 60 bp, Artificial
  Synthetic oligonucleotide
tgaacccggagactgtggcggcatcttgaggtgtgagcacggagttattggcattgtgac

SEQ ID NO: 11990 - DNA, 60 bp, Artificial
  Synthetic oligonucleotide
gaatgcggctaatcctaactgtggagcaagtgcccacaacccagtgggtggcttgtcgta

SEQ ID NO: 11991 - DNA, 60 bp, Artificial
  Synthetic oligonucleotide
gtgcgctacagtggcgaatgaggttaacgcagccgctctctcatctggtgaaacggcaaa

SEQ ID NO: 11992 - DNA, 51 bp, Artificial
  Synthetic oligonucleotide
aggctattcagttcattgacagaagaacccaagtcagatattcactggata

SEQ ID NO: 11993 - DNA, 50 bp, Artificial
  Synthetic oligonucleotide
tggatcactacgcagggcaactggctactcttgacattagcactgaaccc

SEQ ID NO: 11994 - DNA, 60 bp, Artificial
  Synthetic oligonucleotide
cctatggggaaacccataggacgctcaaatacagacatggtgcgaagagtctattgagct

SEQ ID NO: 11995 - DNA, 60 bp, Artificial
  Synthetic oligonucleotide
aggttgcggagagcttcgttcagcactcccccagtgtagatcaggtcgatgagtcaccgc

SEQ ID NO: 11996 - DNA, 60 bp, Artificial
  Synthetic oligonucleotide
tctactgcgagaagcctagtaacgccttagaaatgctcaagcgttgcgctcagcacaacc

SEQ ID NO: 11997 - DNA, 60 bp, Artificial
  Synthetic oligonucleotide
ctagttgggtttgctgacttgagggacctattgtggctagaagatgatgtcatggagcaa

SEQ ID NO: 11998 - DNA, 60 bp, Artificial
  Synthetic oligonucleotide
gggtggataataccagacgttccaaccaatgtagaacgacatgtgaacagagcagttgcc

SEQ ID NO: 11999 - DNA, 60 bp, Artificial
  Synthetic oligonucleotide
acccatttgggtgggaagcctaactattgacatggtgtgaagagccgcgtgtgctcaatg

SEQ ID NO: 12000 - DNA, 60 bp, Artificial
  Synthetic oligonucleotide
gtgtgggatgttggtctacagtctactgcttcactagttgtaccatgggttagtgctagt

SEQ ID NO: 12001 - DNA, 60 bp, Artificial
  Synthetic oligonucleotide
cactatgcagcacaattatctacactagatataagcacccaacccctttcactagaagag

SEQ ID NO: 12002 - DNA, 59 bp, Artificial
  Synthetic oligonucleotide
atactgtagagaccagggatggattgtacctgactcccccaccaatgttgagcgccacc

SEQ ID NO: 12003 - DNA, 60 bp, Artificial
  Synthetic oligonucleotide
tagacaatacaccatcgagcgaagaattgctagggggtgacaccgcaaaggagttcgcag

SEQ ID NO: 12004 - DNA, 60 bp, Artificial
  Synthetic oligonucleotide
tcaacgcccccacagtgtcggacagtagggcgctcgctaggaggttccactttgacatga

SEQ ID NO: 12005 - DNA, 54 bp, Artificial
  Synthetic oligonucleotide
cgcagagcaatagcccaaggtattcctactacaaacacgccaggttcctaccag

SEQ ID NO: 12006 - DNA, 60 bp, Artificial
  Synthetic oligonucleotide
atgctaatcagcttttggcactagacataccaactgagccacttagcatggaggaagcca

SEQ ID NO: 12007 - DNA, 60 bp, Artificial
  Synthetic oligonucleotide
aagatcagatcagtaccagttggcagagctcttcacttaccatcatactcttcactgctg

SEQ ID NO: 12008 - DNA, 60 bp, Artificial
  Synthetic oligonucleotide
ctcgccaaatatagaggcttgcgggtatagtgatagagtactgcaattaacactgggaaa

SEQ ID NO: 12009 - DNA, 52 bp, Artificial
  Synthetic oligonucleotide
tttaccccagatttccgtaatgtagacatgtttcactcaatggcttatgacg

SEQ ID NO: 12010 - DNA, 50 bp, Artificial
  Synthetic oligonucleotide
cagaagtgtgtggactcttgaaatggatgctggggttctaactgggagat

SEQ ID NO: 12011 - DNA, 60 bp, Artificial
  Synthetic oligonucleotide
taggtgtgccattcaaatccagggagtactctggctctaacattggcacatttgatgtaa

SEQ ID NO: 12012 - DNA, 55 bp, Artificial
  Synthetic oligonucleotide
gaccattcagagggtattgagtgcttgaagttagttaggtcaatacagtcagtca

SEQ ID NO: 12013 - DNA, 60 bp, Artificial
  Synthetic oligonucleotide
gggctccatgaggtactatgtccatggttctatgccatctggcacacctgctacatcggt

SEQ ID NO: 12014 - DNA, 60 bp, Artificial
  Synthetic oligonucleotide
acggaagatggcccgcttacctgagagatgacgaagcaactgcagaggatcaacctacac

SEQ ID NO: 12015 - DNA, 57 bp, Artificial
  Synthetic oligonucleotide
gcctcagtatttatcatcacaggacgccacagctatagacaaacccactcaaccaga

SEQ ID NO: 12016 - DNA, 60 bp, Artificial
  Synthetic oligonucleotide
ctatgtgtgctgaattttctggagcacgagctaaaccagtggctgtgggccaaggattgc

SEQ ID NO: 12017 - DNA, 58 bp, Artificial
  Synthetic oligonucleotide
aacgctaacatcaagaatgtgagtatgtacactgtccaactaactagtcaaacagatc

SEQ ID NO: 12018 - DNA, 52 bp, Artificial
  Synthetic oligonucleotide
tctcttgggtgaaatatgtagttactacacacactggactggtagtttgcgt

SEQ ID NO: 12019 - DNA, 57 bp, Artificial
  Synthetic oligonucleotide
catagagggcctagaagctttagacctcaacactagtgcagggttcccatatgtgtc

SEQ ID NO: 12020 - DNA, 60 bp, Artificial
  Synthetic oligonucleotide
acagtgatagggtcgcgcagctcacagtaggtaactcgacaattacaacgcaagaagcgg

SEQ ID NO: 12021 - DNA, 60 bp, Artificial
  Synthetic oligonucleotide
agaattggattggacagtgcagcatcaaatttaaatgacccaatattctgtctgtcttta

SEQ ID NO: 12022 - DNA, 60 bp, Artificial
  Synthetic oligonucleotide
cacagggtttagaggacatcattgagacagtagcccaaaatgcactccaattgtcacaac

SEQ ID NO: 12023 - DNA, 60 bp, Artificial
  Synthetic oligonucleotide
tagcctagaggaaaagggtatactgttcacatcagattatgtgcttgcctcaaccaactc

SEQ ID NO: 12024 - DNA, 60 bp, Artificial
  Synthetic oligonucleotide
tgggctctctatagttgtgagagtgatgcctaagaacacgtccagtacaatttgcatgga

SEQ ID NO: 12025 - DNA, 55 bp, Artificial
  Synthetic oligonucleotide
gttgtgtcccgcatgttctcccctacaaagctgtgacagctcatggttattgtgg

SEQ ID NO: 12026 - DNA, 55 bp, Artificial
  Synthetic oligonucleotide
agtgcgacctcgaagtgacccttagtcctcacacctcgggcaaccatgggctgtt

SEQ ID NO: 12027 - DNA, 55 bp, Artificial
  Synthetic oligonucleotide
cacggtacagactctagtggctcaagctccagtggatgaggtcagtttccactcc

SEQ ID NO: 12028 - DNA, 59 bp, Artificial
  Synthetic oligonucleotide
acatatggccgagtccgactggacttccatcgtggtgcgtggagtgtctcacacccgtg

SEQ ID NO: 12029 - DNA, 60 bp, Artificial
  Synthetic oligonucleotide
gtcccaggagatgattcgagcggtggtgaatgctttcgagccccagggagcccttgagag

SEQ ID NO: 12030 - DNA, 60 bp, Artificial
  Synthetic oligonucleotide
aaccattggcagtggttttgcagcccctggggactgtggtggtatcatcaggtgccaaca

SEQ ID NO: 12031 - DNA, 60 bp, Artificial
  Synthetic oligonucleotide
gacgtgacgccgtgcatggacatccccggtgaggtgcacaacttaatggagatcgctgag

SEQ ID NO: 12032 - DNA, 60 bp, Artificial
  Synthetic oligonucleotide
ggtgcgcaagtttcatcacagaaagtgggtgcacacgagaacactaatgttgcaaccggc

SEQ ID NO: 12033 - DNA, 60 bp, Artificial
  Synthetic oligonucleotide
gtggtatcctcagatgtcaacacggtgtcatcggaatcataacagctggtggggagggtt

SEQ ID NO: 12034 - DNA, 60 bp, Artificial
  Synthetic oligonucleotide
tgcctagaggacgcaatgtacggcactgatggcttagaggccctcgatctatcaactagt

SEQ ID NO: 12035 - DNA, 59 bp, Artificial
  Synthetic oligonucleotide
ggacgaccccatcctggcgctcactcttagtagtatggcttagtacgcattaggtggta

SEQ ID NO: 12036 - DNA, 60 bp, Artificial
  Synthetic oligonucleotide
aagggcgctctgcgtgactgtcaacgaacaaatcgcagtggcgcgcgagtgcttaacctg

SEQ ID NO: 12037 - DNA, 50 bp, Artificial
  Synthetic oligonucleotide
ggaaattgctggtggtctaggagcccttgtatcaggggaaggactggcta

SEQ ID NO: 12038 - DNA, 58 bp, Artificial
  Synthetic oligonucleotide
gttaagggtatgtcatattcattacaggtaacaattccaggtgggaagatctgagtca

SEQ ID NO: 12039 - DNA, 50 bp, Artificial
  Synthetic oligonucleotide
taactgccgccattcggtgggctaaatgctcctccccccgagcgccaaac

SEQ ID NO: 12040 - DNA, 52 bp, Artificial
  Synthetic oligonucleotide
ctagcagctagtaattgctccctagtcatttgggccacagttaacctcctct

SEQ ID NO: 12041 - DNA, 55 bp, Artificial
  Synthetic oligonucleotide
gctacagtgtggctagaattcctttgcctaatttaaatgaggacttaacctgtgg

SEQ ID NO: 12042 - DNA, 55 bp, Artificial
  Synthetic oligonucleotide
gggagtgtctccaattatttggacccaccattgcagagtttcttcagttaggtct

SEQ ID NO: 12043 - DNA, 60 bp, Artificial
  Synthetic oligonucleotide
gtggtataggctctctaataactgtgggggtgaggttgtcacgcgagcaagtgtcacttg

SEQ ID NO: 12044 - DNA, 50 bp, Artificial
  Synthetic oligonucleotide
ctgaaggattagtggcacaattaggccattccttgcaataaagagtatca

SEQ ID NO: 12045 - DNA, 57 bp, Artificial
  Synthetic oligonucleotide
cccaccattgcagagtttcttcagttaggtctaagccaaaccactgtgcgaagcagt

SEQ ID NO: 12046 - DNA, 55 bp, Artificial
  Synthetic oligonucleotide
gagattctaagtgcgcctgtattagctgtaagctgtcgcggcagcactgcagcct

SEQ ID NO: 12047 - DNA, 58 bp, Artificial
  Synthetic oligonucleotide
agtgcacaaaccaattcacgccccctactcaggaatggcattggtacctatccctgaa

SEQ ID NO: 12048 - DNA, 55 bp, Artificial
  Synthetic oligonucleotide
ggccataagtgcatgcctcaaaacctcattactacctacccacgaaacatccctc

SEQ ID NO: 12049 - DNA, 60 bp, Artificial
  Synthetic oligonucleotide
gtcaggctcattctcatcgtcccagacttcagactcccagtccagaggacccaatttatc

SEQ ID NO: 12050 - DNA, 53 bp, Artificial
  Synthetic oligonucleotide
atgtagccaagcaacccctgccatatattgttctagtacagcatttccatgag

SEQ ID NO: 12051 - DNA, 60 bp, Artificial
  Synthetic oligonucleotide
taagtaatctcttaagcaatctaggttgcttatgccatgccctgaaggtaaatcccttga

SEQ ID NO: 12052 - DNA, 58 bp, Artificial
  Synthetic oligonucleotide
ggtcatcctcagggtgtgtccccgtgcagggcactacctatcacatgtttgctgttgg

SEQ ID NO: 12053 - DNA, 52 bp, Artificial
  Synthetic oligonucleotide
gaattccactacccaatctaaatgaggatctaacctgtggaaatatactaat

SEQ ID NO: 12054 - DNA, 58 bp, Artificial
  Synthetic oligonucleotide
cagctagaattaatctacccatgttgaatgaggacctaacctgtaatactctaactat

SEQ ID NO: 12055 - DNA, 56 bp, Artificial
  Synthetic oligonucleotide
ggagaagccctagctgctttagaagcggaagttttttctctcatgacagtagaagg

SEQ ID NO: 12056 - DNA, 50 bp, Artificial
  Synthetic oligonucleotide
cagcatatccccggacccccccagaactcctgtatccagaaagcgaccaa

SEQ ID NO: 12057 - DNA, 60 bp, Artificial
  Synthetic oligonucleotide
agagctcattcaatgcaacgccacctaagaaggctagggaggaccctgctcctagtgact

SEQ ID NO: 12058 - DNA, 57 bp, Artificial
  Synthetic oligonucleotide
ggctactgaaagtgcaacatggtatgtggttgagacacccgttagtacttataggtt

SEQ ID NO: 12059 - DNA, 55 bp, Artificial
  Synthetic oligonucleotide
cctctctgtaaaggtgatgggctgtatatttctgctgtagatatagtgggtcttt

SEQ ID NO: 12060 - DNA, 51 bp, Artificial
  Synthetic oligonucleotide
cacaatgtgtaatgtacactctgcaagcatccggatgaacgggggttatgg

SEQ ID NO: 12061 - DNA, 51 bp, Artificial
  Synthetic oligonucleotide
acactggaggtcaacaaaccccacccgtgcttccattcacaaacactgtaa

SEQ ID NO: 12062 - DNA, 53 bp, Artificial
  Synthetic oligonucleotide
cattcagtagagcatagttaaattgcctgtctgaacaactgtcagcactcagc

SEQ ID NO: 12063 - DNA, 53 bp, Artificial
  Synthetic oligonucleotide
aattcagtaaggcctatatatttgtctaacagttctttccaatacacaacttt

SEQ ID NO: 12064 - DNA, 60 bp, Artificial
  Synthetic oligonucleotide
ctctgtttgtttggagctatatacctaacatcagcagatatgttggggatggtagggtat

SEQ ID NO: 12065 - DNA, 58 bp, Artificial
  Synthetic oligonucleotide
ctatgtctggcaccgatgctcaggttgaagaagtccggatttatgaaggtacagaggg

SEQ ID NO: 12066 - DNA, 60 bp, Artificial
  Synthetic oligonucleotide
ttctcgctgctatcagggtgtagagtattcttcatcgggtgcaaaatacgcttttccctc

SEQ ID NO: 12067 - DNA, 50 bp, Artificial
  Synthetic oligonucleotide
gcactccttgataggtgttgcaaacctcttgtacacagctaggagcaaaa

SEQ ID NO: 12068 - DNA, 60 bp, Artificial
  Synthetic oligonucleotide
ttctagactgtatatcttgtgcaaaatcagctacaggcctgaaccaaattagcagtagca

SEQ ID NO: 12069 - DNA, 55 bp, Artificial
  Synthetic oligonucleotide
tgtgcaaaatcagctacaggcctgaaccaaattagcagtagcagcaaggtcattc

SEQ ID NO: 12070 - DNA, 54 bp, Artificial
  Synthetic oligonucleotide
tacctaacatcagcagatatgttggggatggtagggtatgctggtaaccccact

SEQ ID NO: 12071 - DNA, 53 bp, Artificial
  Synthetic oligonucleotide
ctaacaaagcaggtatagcatttattaccaagagttgcatggcttagataatc

SEQ ID NO: 12072 - DNA, 60 bp, Artificial
  Synthetic oligonucleotide
cagtcgatatacgcgtcggtttttctagctgaagcacgagcaacgcgatcccagtccaat

SEQ ID NO: 12073 - DNA, 56 bp, Artificial
  Synthetic oligonucleotide
agccgctctcttcaggttcgggatcggagtcctctagggtctcatctgcacgtagg

SEQ ID NO: 12074 - DNA, 58 bp, Artificial
  Synthetic oligonucleotide
agttaaggccccagtagcagtgaattcggtagcagcaagagcgcccaaagcctgtggg

SEQ ID NO: 12075 - DNA, 51 bp, Artificial
  Synthetic oligonucleotide
cctaaacccagaaatgggggatccagatgaaaaccttaggggctatagtct

SEQ ID NO: 12076 - DNA, 51 bp, Artificial
  Synthetic oligonucleotide
ctgcccaatctaaatgaggacctaacctgtggaaatctactaatgtgggag

SEQ ID NO: 12077 - DNA, 60 bp, Artificial
  Synthetic oligonucleotide
ccgagtccagaggagccagtgtacctccccaatactctgatgacacctccgatgcaacag

SEQ ID NO: 12078 - DNA, 55 bp, Artificial
  Synthetic oligonucleotide
gagcctgcccacgaaacatctctattaacttgtgacacttgctctcgtgccaatc

SEQ ID NO: 12079 - DNA, 53 bp, Artificial
  Synthetic oligonucleotide
taattagcaaaagccattccagggcgggaaatagcagtataaaagccactcct

SEQ ID NO: 12080 - DNA, 60 bp, Artificial
  Synthetic oligonucleotide
gcctcaatatagttgtgcaagagttcaattacctatgttgaacacggacatgacctgtga

SEQ ID NO: 12081 - DNA, 60 bp, Artificial
  Synthetic oligonucleotide
tctgtcttacaaatctagcctgcagagttttagggacaggatactcattcattgtaacta

SEQ ID NO: 12082 - DNA, 55 bp, Artificial
  Synthetic oligonucleotide
caaatctagcttgcagggttttagggacaggatactcattcattgtaaccaagcc

SEQ ID NO: 12083 - DNA, 50 bp, Artificial
  Synthetic oligonucleotide
agcaaactctgcaacaggcctataccatattaacataagcagcaaggtaa

SEQ ID NO: 12084 - DNA, 52 bp, Artificial
  Synthetic oligonucleotide
tgcagccaggcaactcctgccatatattgctctagtacagcatttccatgag

SEQ ID NO: 12085 - DNA, 50 bp, Artificial
  Synthetic oligonucleotide
aacctttgttcacagtgttcagtatcttgaccccagacattggggtccaa

SEQ ID NO: 12086 - DNA, 60 bp, Artificial
  Synthetic oligonucleotide
gtgtcacttgtaaagagggatgtttcgtgggcaggtagtaatgaggttttgaggcatgca

SEQ ID NO: 12087 - DNA, 56 bp, Artificial
  Synthetic oligonucleotide
cagccaagggaacatgttttgcgagccagagctgttttggcttgtcaccagctggc

SEQ ID NO: 12088 - DNA, 50 bp, Artificial
  Synthetic oligonucleotide
gttcagagcctagatctggacactatgtacaacattatgctgctccagga

SEQ ID NO: 12089 - DNA, 60 bp, Artificial
  Synthetic oligonucleotide
caacttatacttgtcagctgttgatgtttgtggcatgtttactaacaggtctggtaccca

SEQ ID NO: 12090 - DNA, 55 bp, Artificial
  Synthetic oligonucleotide
caatctaaatgaggatcttacctgtggaaatatactaatgtgggaggctgtgacc

SEQ ID NO: 12091 - DNA, 59 bp, Artificial
  Synthetic oligonucleotide
gcccacgaaacatctctattaacttgtgacacttgctcgcgtgccaatcttacccctac

SEQ ID NO: 12092 - DNA, 60 bp, Artificial
  Synthetic oligonucleotide
ttatcaggtgagcatcaggacagctttgcacggactttgcagttagcaggcacgcttcta

SEQ ID NO: 12093 - DNA, 55 bp, Artificial
  Synthetic oligonucleotide
gacagctttgcacggactttgcagttagcaggcacgcttctatggatgcaggcag

SEQ ID NO: 12094 - DNA, 60 bp, Artificial
  Synthetic oligonucleotide
cacgcttctatggatgcaggcagatcaatatgcggcggaccccgcttggggggcgtgccg

SEQ ID NO: 12095 - DNA, 50 bp, Artificial
  Synthetic oligonucleotide
ctgggtcagacaggatatgattagcataatattagcccgccaaaagctgt

SEQ ID NO: 12096 - DNA, 50 bp, Artificial
  Synthetic oligonucleotide
gttggagggggagtaacccctccagttgtgtcctatgggaatcagagtac

SEQ ID NO: 12097 - DNA, 52 bp, Artificial
  Synthetic oligonucleotide
cagtgaaatacaagcaatagcaataaagtcaatccactttgcaatactctat

SEQ ID NO: 12098 - DNA, 53 bp, Artificial
  Synthetic oligonucleotide
gagacctactacagtaaactttcgcccctaaatcctattagggcaagacaatt

SEQ ID NO: 12099 - DNA, 51 bp, Artificial
  Synthetic oligonucleotide
agggcatgcctcgagagacctagcaactacagttgggggtacagtacagga

SEQ ID NO: 12100 - DNA, 52 bp, Artificial
  Synthetic oligonucleotide
tgttatagccttggaaaagtgcaattacctatgcttaatgaggatatgactg

SEQ ID NO: 12101 - DNA, 60 bp, Artificial
  Synthetic oligonucleotide
tgtatgcttaagcagcaaagagattctaagtgcgcctgtattagctgtaagctgtcgcgg

SEQ ID NO: 12102 - DNA, 54 bp, Artificial
  Synthetic oligonucleotide
tgcaaaactgaggtcgttggtgttaacactttaacaacctgtcatggatataag

SEQ ID NO: 12103 - DNA, 51 bp, Artificial
  Synthetic oligonucleotide
actctcaggaagagactggtgaagaacccataccccattgccagcatactc

SEQ ID NO: 12104 - DNA, 54 bp, Artificial
  Synthetic oligonucleotide
gttgctagggctgtctccgaactcattacaccctccaaagtcagagctgtaatt

SEQ ID NO: 12105 - DNA, 55 bp, Artificial
  Synthetic oligonucleotide
tcgacgagacctacgttgatgttagagcagctcgggtactgcgacggagtcagag

SEQ ID NO: 12106 - DNA, 55 bp, Artificial
  Synthetic oligonucleotide
cacacacgtcgcggaccacatgaacgagatacgtataaacatatctagcggccga

SEQ ID NO: 12107 - DNA, 55 bp, Artificial
  Synthetic oligonucleotide
ggagacattggaccgtatcgcgtggcgactttaaatatttgtccggtggcgttcg

SEQ ID NO: 12108 - DNA, 60 bp, Artificial
  Synthetic oligonucleotide
gcatgcgaatgaattaaaactaagggatgagtgctcttaacagacatgctggagttagtt

SEQ ID NO: 12109 - DNA, 53 bp, Artificial
  Synthetic oligonucleotide
acgtaggtacaatcttcgcgtgttacaggacagcattctcgcacaccgtcgga

SEQ ID NO: 12110 - DNA, 55 bp, Artificial
  Synthetic oligonucleotide
ccggtctagatcgttgacctaacatcgcacacactacatcgttagtacctcgctt

SEQ ID NO: 12111 - DNA, 55 bp, Artificial
  Synthetic oligonucleotide
gagctgatgtcaacgctacatgctcggaagggaacacgcctttacatgatgcggc

SEQ ID NO: 12112 - DNA, 55 bp, Artificial
  Synthetic oligonucleotide
aatactcgcagacttcaaggatctaacacacagagtgaagtctctgtccactgta

SEQ ID NO: 12113 - DNA, 55 bp, Artificial
  Synthetic oligonucleotide
ccgctaacaactctgggtaacacacacacccttaaaggaatctcgttagccgaca

SEQ ID NO: 12114 - DNA, 55 bp, Artificial
  Synthetic oligonucleotide
gagatcctataggcgctcccgatggtctggccccgatcgtacgcgttcccgaatc

SEQ ID NO: 12115 - DNA, 55 bp, Artificial
  Synthetic oligonucleotide
aggacagtaaccgttacacgtaagtcctcttagagcgtcaccgatcagaccccac

SEQ ID NO: 12116 - DNA, 60 bp, Artificial
  Synthetic oligonucleotide
gcatctcgcacatgtgtttgttgcggaaacagtgcatttaagtccgggaccacattcaca

SEQ ID NO: 12117 - DNA, 54 bp, Artificial
  Synthetic oligonucleotide
gacatttttgccgcaatctataagaagaggaataggcgacggatggatgatacg

SEQ ID NO: 12118 - DNA, 60 bp, Artificial
  Synthetic oligonucleotide
cgcgctgcagatccccgtaccgctacgcggaccctgttcccgccaacatcatgctcccga

SEQ ID NO: 12119 - DNA, 56 bp, Artificial
  Synthetic oligonucleotide
aaaaatagccgcatatggcaccacgggggcacatgataaatgcgcagctacacgtc

SEQ ID NO: 12120 - DNA, 60 bp, Artificial
  Synthetic oligonucleotide
tcgtggcgactcaaaatgagcaagtgttcaggttccagcagcgtccagactctcgaggat

SEQ ID NO: 12121 - DNA, 60 bp, Artificial
  Synthetic oligonucleotide
atagacagtgcttgctaacgctaaagcgggcctcgtgtcccgtagcgtctctcgtgtctg

SEQ ID NO: 12122 - DNA, 52 bp, Artificial
  Synthetic oligonucleotide
gttgcgctattagttgctaccgatcctgacaaagacgctattcgaagatgta

SEQ ID NO: 12123 - DNA, 53 bp, Artificial
  Synthetic oligonucleotide
cacccatggtaagactcacgactagttactcaggcccacttaacgagtataca

SEQ ID NO: 12124 - DNA, 60 bp, Artificial
  Synthetic oligonucleotide
agcgagtaggatatacggagattgtaatagtcttaacaaagatccgtgcatatgtatgga

SEQ ID NO: 12125 - DNA, 57 bp, Artificial
  Synthetic oligonucleotide
tcattcggaatatccgcatatcagatatcgtatgattcagaatataaggatgaaaac

SEQ ID NO: 12126 - DNA, 58 bp, Artificial
  Synthetic oligonucleotide
ccagtatactgttagcaacggtatatcgaatagattactcatgtaacctactagaatg

SEQ ID NO: 12127 - DNA, 57 bp, Artificial
  Synthetic oligonucleotide
gtacacgaactatcattctagtaggttacatgagtaatctattcgatataccgttgc

SEQ ID NO: 12128 - DNA, 50 bp, Artificial
  Synthetic oligonucleotide
ttgtctagcccctgctgagataatatcgtcggatgttgcaaaatttgata

SEQ ID NO: 12129 - DNA, 53 bp, Artificial
  Synthetic oligonucleotide
gcattatttccattagttgtagcattatttccattagttgtagcattatttcc

SEQ ID NO: 12130 - DNA, 53 bp, Artificial
  Synthetic oligonucleotide
tttcgttatgtacattatctactggattatgtgtactataaaactgccaaaac

SEQ ID NO: 12131 - DNA, 55 bp, Artificial
  Synthetic oligonucleotide
ctagacgtggagatctagaaacacttggatattgtatgattagatggttgggagg

SEQ ID NO: 12132 - DNA, 52 bp, Artificial
  Synthetic oligonucleotide
gtccgttaaatgtagaatccgttgctaaacattacgaagataacaatccaag

SEQ ID NO: 12133 - DNA, 60 bp, Artificial
  Synthetic oligonucleotide
acacagggatgtactatagaggtaagaaatttatgtagtgcgcaagctgtagcacaagtt

SEQ ID NO: 12134 - DNA, 55 bp, Artificial
  Synthetic oligonucleotide
gaggtaagaaatttatgtagtgcgcaagctgtagcacaagttgacgctgtagtaa

SEQ ID NO: 12135 - DNA, 60 bp, Artificial
  Synthetic oligonucleotide
ctaatataatggctagaagagccgataacacagctagatgtgtagctggtccaactatgg

SEQ ID NO: 12136 - DNA, 54 bp, Artificial
  Synthetic oligonucleotide
ttaagtggaaagttcaaaaaaacagacggtagttacaggacgcactcacattat

SEQ ID NO: 12137 - DNA, 55 bp, Artificial
  Synthetic oligonucleotide
gtacaggtgcctccgtcgttaggagatgatagctatttgactaatccgttattgt

SEQ ID NO: 12138 - DNA, 55 bp, Artificial
  Synthetic oligonucleotide
ggtacctccgtcgttaggagatgatagctatttgactaatccgttattgtctccg

SEQ ID NO: 12139 - DNA, 55 bp, Artificial
  Synthetic oligonucleotide
ggggaagtagaccatgtccccggagatgagcacgttcccgctagcgtttacgtag

SEQ ID NO: 12140 - DNA, 53 bp, Artificial
  Synthetic oligonucleotide
ccacgctgttgtagcgcccgtcggggtccatgcacgaaaacatgacgccgttt

SEQ ID NO: 12141 - DNA, 55 bp, Artificial
  Synthetic oligonucleotide
ctatcgggcttcgtaaacgcgcagacatgccgctgttccggaagctcatggtttc

SEQ ID NO: 12142 - DNA, 55 bp, Artificial
  Synthetic oligonucleotide
ccggataggtatcggtctctactgaatctactaacatgtctcgtatgttagcttc

SEQ ID NO: 12143 - DNA, 55 bp, Artificial
  Synthetic oligonucleotide
ttgattcttattcactatatctaagaaacggatagcgtctctaggacgaactacg

SEQ ID NO: 12144 - DNA, 60 bp, Artificial
  Synthetic oligonucleotide
cgcatcttacgtttcaaaaaccgatgcaggatcaagggtttgtatgatgccagattcaga

SEQ ID NO: 12145 - DNA, 55 bp, Artificial
  Synthetic oligonucleotide
ggcacggatcctaacggatacgtaggttgtatgtggtctatttgcggattacacg

SEQ ID NO: 12146 - DNA, 55 bp, Artificial
  Synthetic oligonucleotide
gacgtcaaggatccggctatagacattactcctccgatgctctctaacgaagcgc

SEQ ID NO: 12147 - DNA, 55 bp, Artificial
  Synthetic oligonucleotide
ctgccgggattaaagtagaggtttgtggagtcggaagctttacaactgacgcact

SEQ ID NO: 12148 - DNA, 50 bp, Artificial
  Synthetic oligonucleotide
aagagtcatgttaccatcttctaactcattacccgttactttcactgtag

SEQ ID NO: 12149 - DNA, 58 bp, Artificial
  Synthetic oligonucleotide
tgtccatttcctgaccagtggttgcgtgacttttatattccatacggtaatgaaatgc

SEQ ID NO: 12150 - DNA, 50 bp, Artificial
  Synthetic oligonucleotide
gtgcataatctagttcctcagaagtagacactctgttaacgtgatcaggc

SEQ ID NO: 12151 - DNA, 55 bp, Artificial
  Synthetic oligonucleotide
ggtgcctccgttaatcatccgcccggccattagtttctggatcgatagtataccc

SEQ ID NO: 12152 - DNA, 55 bp, Artificial
  Synthetic oligonucleotide
caatcgttatcgcggttaatatttgtcggattggattcgaaaggacgtcgtcagt

SEQ ID NO: 12153 - DNA, 55 bp, Artificial
  Synthetic oligonucleotide
cgttcatacatcgacggaaattaacaaacgactggcgatcgtgaattacgcgagt

SEQ ID NO: 12154 - DNA, 56 bp, Artificial
  Synthetic oligonucleotide
ttatggcgaatcgtttatccgtgaaaatccaaacgccacgttgatggacattgtca

SEQ ID NO: 12155 - DNA, 55 bp, Artificial
  Synthetic oligonucleotide
gggtcggtgacgccttatcgtattacgttgactacaaccgtagccatagagttgt

SEQ ID NO: 12156 - DNA, 60 bp, Artificial
  Synthetic oligonucleotide
tacgatctcacgtcagttgccgtcgtttggatatgtggatgatggatcgtccgtgacggg

SEQ ID NO: 12157 - DNA, 60 bp, Artificial
  Synthetic oligonucleotide
tcacgtcagttgccgtcgtttggatatgtggatggtggatcgtccgtgacggggattgag

SEQ ID NO: 12158 - DNA, 60 bp, Artificial
  Synthetic oligonucleotide
gaaccgtcggaagtaactgcatctatgtgagaggttgagttgccgtcatcagtctttggg

SEQ ID NO: 12159 - DNA, 55 bp, Artificial
  Synthetic oligonucleotide
ctgcatctatgtgagaggttgagttgccgtcatcagtctttgggagcggcggaac

SEQ ID NO: 12160 - DNA, 60 bp, Artificial
  Synthetic oligonucleotide
ggacccgatggttgactgagaagccacagtcaatcatttctcgtgtagcacagccctaat

SEQ ID NO: 12161 - DNA, 60 bp, Artificial
  Synthetic oligonucleotide
gaactacgggacgatttatgcagcatcattaatgacagtgcttccggctgttagattgtt

SEQ ID NO: 12162 - DNA, 60 bp, Artificial
  Synthetic oligonucleotide
aatgaagcgaactattaaggaagatgcgatgtatcgcgacagaaagtttgattcgaacga

SEQ ID NO: 12163 - DNA, 55 bp, Artificial
  Synthetic oligonucleotide
attaaggaagatgcgatgtatcgcgacagaaagtttgattcgaacgatgaggatg

SEQ ID NO: 12164 - DNA, 60 bp, Artificial
  Synthetic oligonucleotide
gttggcgatatacgcgacatggtcaattctcttaatgctacggcgctaccaggacttacg

SEQ ID NO: 12165 - DNA, 50 bp, Artificial
  Synthetic oligonucleotide
aatggatatcaatgggacagtcttgtacaataaaagtatgcccattgaat

SEQ ID NO: 12166 - DNA, 60 bp, Artificial
  Synthetic oligonucleotide
tgactggtggcgcggtatctttacattctgctggcgttactttatcaacacaattcactg

SEQ ID NO: 12167 - DNA, 60 bp, Artificial
  Synthetic oligonucleotide
tacagatatctcctagcactttaccagatatagtgacagaagcttctgagaagtttatac

SEQ ID NO: 12168 - DNA, 60 bp, Artificial
  Synthetic oligonucleotide
cctggacgtatttcgagaaccatgatgcatagtgctcttctgaaggaatcaagtgctagg

SEQ ID NO: 12169 - DNA, 55 bp, Artificial
  Synthetic oligonucleotide
ctggacgtatttcgagaaccatgatgcatagtgctcttctgaaggaatctagcgc

SEQ ID NO: 12170 - DNA, 60 bp, Artificial
  Synthetic oligonucleotide
acatctcccactgctcaggatatcgctaggtctattcgtgcaaacaaacacgtcgtgtgc

SEQ ID NO: 12171 - DNA, 60 bp, Artificial
  Synthetic oligonucleotide
ctgcgattccgtacatgtctgttatggttgcggtgtcccgcagaggctttggcacgtgga

SEQ ID NO: 12172 - DNA, 51 bp, Artificial
  Synthetic oligonucleotide
acactctattattcaagatccaggaatggcgtattttccatatatcgcatc

SEQ ID NO: 12173 - DNA, 52 bp, Artificial
  Synthetic oligonucleotide
gtccgtcttaagtgttcgaagaccccttcgtctaatgtcgtctatatgatga

SEQ ID NO: 12174 - DNA, 53 bp, Artificial
  Synthetic oligonucleotide
agagcatatacatgatgccgatagttcgcctttaaacgtgatctcagaatcgc

SEQ ID NO: 12175 - DNA, 54 bp, Artificial
  Synthetic oligonucleotide
acagtactatcgcaccaatgttggccgagccacttaatacacgaaatgtactag

SEQ ID NO: 12176 - DNA, 60 bp, Artificial
  Synthetic oligonucleotide
ttagcgagagttgtcaatctgtctatccctgactcgtggatgactatggacttcgaccgt

SEQ ID NO: 12177 - DNA, 51 bp, Artificial
  Synthetic oligonucleotide
gttggagatcgggaaagatcaatcagaacgcattacaaagctatatcgcgc

SEQ ID NO: 12178 - DNA, 52 bp, Artificial
  Synthetic oligonucleotide
gtcgtaacaattacggaactagcttcgagctttccttgtgtcaactgggaca

SEQ ID NO: 12179 - DNA, 57 bp, Artificial
  Synthetic oligonucleotide
aggtcgattcagcgtggaatactgttgctatctaatagacttggacaattagttgac

SEQ ID NO: 12180 - DNA, 60 bp, Artificial
  Synthetic oligonucleotide
gtcatcaaatgtcttggaattcgcaatcactgatgaccctagtggccataatacctaaga

SEQ ID NO: 12181 - DNA, 55 bp, Artificial
  Synthetic oligonucleotide
cgagcattccatgttacggtacattaatggtcagtttacagcattcgagctgatt

SEQ ID NO: 12182 - DNA, 55 bp, Artificial
  Synthetic oligonucleotide
tgtttaacggggtccgacggtaggaatgtgggataaataggctctctgctggtcg

SEQ ID NO: 12183 - DNA, 53 bp, Artificial
  Synthetic oligonucleotide
gcgagattggctcagcggctattgatgggttagttcaggggagcgtacattcg

SEQ ID NO: 12184 - DNA, 60 bp, Artificial
  Synthetic oligonucleotide
agtgttgatatgcaccgtgtcgcgtcaatctacgttgaggttgatagtgtaacatacgac

SEQ ID NO: 12185 - DNA, 56 bp, Artificial
  Synthetic oligonucleotide
aacatacgacggttcacagtatacaatacgtggctatagagatagaaacctaacag

SEQ ID NO: 12186 - DNA, 55 bp, Artificial
  Synthetic oligonucleotide
acggagatggaattaccctacatttcaaaggttaacacactgactaaggaattca

SEQ ID NO: 12187 - DNA, 60 bp, Artificial
  Synthetic oligonucleotide
acacgaattaaaagcatgctagtgaagatgagttaatggcaatggtgacgcacacataaa

SEQ ID NO: 12188 - DNA, 59 bp, Artificial
  Synthetic oligonucleotide
aactgtgtagatgtgcgaccaatctatgcacttggtagcggcagcggaaacacacttac

SEQ ID NO: 12189 - DNA, 53 bp, Artificial
  Synthetic oligonucleotide
tgattaggtgcaatttcacatatgattatattgacgacgttgtttaccttcat

SEQ ID NO: 12190 - DNA, 56 bp, Artificial
  Synthetic oligonucleotide
cacgatgtaaaacaatactctaatctaaaatttgagacgtgggacccattggatac

SEQ ID NO: 12191 - DNA, 57 bp, Artificial
  Synthetic oligonucleotide
tgtgcagaataagggatcacgctatatgtcagcgagtgtttacagatcacgtcagaa

SEQ ID NO: 12192 - DNA, 60 bp, Artificial
  Synthetic oligonucleotide
ttcacgaaggacggtcttagctactctcagatagtcgacgctctaaatgccaagcgtaat

SEQ ID NO: 12193 - DNA, 60 bp, Artificial
  Synthetic oligonucleotide
attaccgactccagctacacatcctctctgctgacgatagccagtttcattaagaacaga

SEQ ID NO: 12194 - DNA, 60 bp, Artificial
  Synthetic oligonucleotide
cagtatcaagtgttgacgtcgcgaatcgaatcgcagttgacaaagggttcgacacgctta

SEQ ID NO: 12195 - DNA, 58 bp, Artificial
  Synthetic oligonucleotide
gctagataatactgtgggagcgttcgaattacttagacctgttatgtcgataccgacc

SEQ ID NO: 12196 - DNA, 60 bp, Artificial
  Synthetic oligonucleotide
ggataggacccataaccaacatatccgctagcgcatccatagtgacgtcctcaaataatg

SEQ ID NO: 12197 - DNA, 60 bp, Artificial
  Synthetic oligonucleotide
acacaatacgtatcaactgtccgataaggccacatcgtgaggataatctcgtagcaggtg

SEQ ID NO: 12198 - DNA, 60 bp, Artificial
  Synthetic oligonucleotide
cagattaaggctccattggagaagtttgtgttggcactattagtggctgaagctggaggg

SEQ ID NO: 12199 - DNA, 51 bp, Artificial
  Synthetic oligonucleotide
attggagaagtttgtgttggcactattagtggccgaagcaggggggtcttt

SEQ ID NO: 12200 - DNA, 52 bp, Artificial
  Synthetic oligonucleotide
cccttcaatcgtcctgtcaacaataagtcgcagacttccttacatgccgcac

SEQ ID NO: 12201 - DNA, 55 bp, Artificial
  Synthetic oligonucleotide
cctttttgaaatactgatgatgttcgtctttactcctggtgttgcgaagttggca

SEQ ID NO: 12202 - DNA, 60 bp, Artificial
  Synthetic oligonucleotide
tcgggacggagtacgtgcgatttaacgatatcaatgctattcaggcttcgtggaaagtgc

SEQ ID NO: 12203 - DNA, 60 bp, Artificial
  Synthetic oligonucleotide
caatcgattaccaggcacgtgatcgctcgagggctgttttgtgaagataacgttccagat

SEQ ID NO: 12204 - DNA, 60 bp, Artificial
  Synthetic oligonucleotide
attagaagcatgcttgtcaaatgaggaccaagctaacaacttggtatccgactttggtga

SEQ ID NO: 12205 - DNA, 55 bp, Artificial
  Synthetic oligonucleotide
gcatgcttgtcaaatgaggaccaagctaactacttggtatccaaccttggtaagc

SEQ ID NO: 12206 - DNA, 60 bp, Artificial
  Synthetic oligonucleotide
cgtacaccatgccgacttctgcaatgatgacacactggggcaccgttatatctcacctca

SEQ ID NO: 12207 - DNA, 55 bp, Artificial
  Synthetic oligonucleotide
cagacccggacgcgtatgagaagctctattctgaaacgatctctaagcacgtctc

SEQ ID NO: 12208 - DNA, 60 bp, Artificial
  Synthetic oligonucleotide
gtgacaggcacaatggcgtgtatgacattcagttcatggcccaatttcctcctacgtatt

SEQ ID NO: 12209 - DNA, 60 bp, Artificial
  Synthetic oligonucleotide
ctacgttgactgcgacggattttactgatgtgaagcattggttggatctgggaactggac

SEQ ID NO: 12210 - DNA, 60 bp, Artificial
  Synthetic oligonucleotide
tctctccctaggggcagcctgcgctgacgctaacatgactctacatgagggcgtgcgtca

SEQ ID NO: 12211 - DNA, 56 bp, Artificial
  Synthetic oligonucleotide
gcaggcgctctggtcggattttcatctggtgtaagtgtcacctcatccaacaatca

SEQ ID NO: 12212 - DNA, 60 bp, Artificial
  Synthetic oligonucleotide
gcgactactcaatcaacataatgtccaagccttccaacgcttcgcctacgcagtgccatt

SEQ ID NO: 12213 - DNA, 60 bp, Artificial
  Synthetic oligonucleotide
gtctacaacattttccaagagtacgcgctcattgacccaagtactgatatgccaactgca

SEQ ID NO: 12214 - DNA, 55 bp, Artificial
  Synthetic oligonucleotide
cagtttgctttagcagatgagtgtaatagtgcagatagattcctagtcagcgaga

SEQ ID NO: 12215 - DNA, 60 bp, Artificial
  Synthetic oligonucleotide
gagattgaatatggcgtaccactgtacattagagattccctagcaccacgtattaagagg

SEQ ID NO: 12216 - DNA, 60 bp, Artificial
  Synthetic oligonucleotide
acaaccgttgacaaccccatgttacataagcattcatgtactataggactacacgcacta

SEQ ID NO: 12217 - DNA, 59 bp, Artificial
  Synthetic oligonucleotide
ccagacgcgcgacttgcactcactatgtatgcccactcctgatgcgccaatgtcaaatc

SEQ ID NO: 12218 - DNA, 60 bp, Artificial
  Synthetic oligonucleotide
tgctagactgttcactatgggtatggctggactgcacatcactactgagccatcttacaa

SEQ ID NO: 12219 - DNA, 55 bp, Artificial
  Synthetic oligonucleotide
cactatgggtatggctggactgcacatcactactgagccatcttacaaacgcgtg

SEQ ID NO: 12220 - DNA, 53 bp, Artificial
  Synthetic oligonucleotide
ttaaggggttagcgtgcatggatatctcatatggatgtgaggtagatgctaac

SEQ ID NO: 12221 - DNA, 60 bp, Artificial
  Synthetic oligonucleotide
gcgtgtaatgggtgagtgagcttatgtggtcgccaagacatgtgccgatgtcttggtggt

SEQ ID NO: 12222 - DNA, 60 bp, Artificial
  Synthetic oligonucleotide
agacagaatctctttatggacgcgagaggatacaaaggatatcgggcggcttaatcttgc

SEQ ID NO: 12223 - DNA, 58 bp, Artificial
  Synthetic oligonucleotide
cgaggtaaacgtctcaagatggttctacatccagggttgatagcgtatgtcagaggca

SEQ ID NO: 12224 - DNA, 60 bp, Artificial
  Synthetic oligonucleotide
ggcgacacctgaggtgccatttacaacggagtgcgctaatgaagtcgcacgagtcacggg

SEQ ID NO: 12225 - DNA, 60 bp, Artificial
  Synthetic oligonucleotide
cgtcagcattggtggcgtgaatattagagcaggaaggataacagcctgggatggtcaagc

SEQ ID NO: 12226 - DNA, 55 bp, Artificial
  Synthetic oligonucleotide
cgtctgaaatttataacgtttatagttttagagatcccacttggcacgcgctgcg

SEQ ID NO: 12227 - DNA, 50 bp, Artificial
  Synthetic oligonucleotide
agttattactgcatggatctagtacatgatggatgttaggaataaacgac

SEQ ID NO: 12228 - DNA, 60 bp, Artificial
  Synthetic oligonucleotide
tgttagagattgggagcaatcagaagatcagctatcagagtggcatccatcagtattcta

SEQ ID NO: 12229 - DNA, 55 bp, Artificial
  Synthetic oligonucleotide
gggagcaatcagaagatcagctatcagagtggcatccatcagtattctatcccaa

SEQ ID NO: 12230 - DNA, 60 bp, Artificial
  Synthetic oligonucleotide
ttagagacgtgagagcggaagcagctgaatacccaagagaagcaagagcgccacatcatt

SEQ ID NO: 12231 - DNA, 60 bp, Artificial
  Synthetic oligonucleotide
gtcactgaaaacgcaactttactgtctatactatcgtattcgtatgacaagtataacgca

SEQ ID NO: 12232 - DNA, 55 bp, Artificial
  Synthetic oligonucleotide
ttactgtctatactatcgtattcgtatgacaagtataacgcagtagaacggaagc

SEQ ID NO: 12233 - DNA, 60 bp, Artificial
  Synthetic oligonucleotide
aaccatgtcgcttgatttcgtgactacaaattacatgtcattaatctcaggtatgtggct

SEQ ID NO: 12234 - DNA, 60 bp, Artificial
  Synthetic oligonucleotide
caaaattgcacagggtgttattattgcataccgtgatatgcaattggaaagagacgcaat

SEQ ID NO: 12235 - DNA, 51 bp, Artificial
  Synthetic oligonucleotide
aatatgcgcatcatgaacgaattataaacgccaaccccactgtggagtatg

SEQ ID NO: 12236 - DNA, 53 bp, Artificial
  Synthetic oligonucleotide
agcatatgattggtaagaacacactggaactgacgcagggggaggcgcgggga

SEQ ID NO: 12237 - DNA, 56 bp, Artificial
  Synthetic oligonucleotide
gcggtattaatagtgagtgcgtgtgattctaaaaaacgagctatttggtatgacga

SEQ ID NO: 12238 - DNA, 51 bp, Artificial
  Synthetic oligonucleotide
cccatggattagaaggattcccattagctatgatgcatgccttatctcacg

SEQ ID NO: 12239 - DNA, 52 bp, Artificial
  Synthetic oligonucleotide
aagcggaacaggcgtcagcaatttaataaattcggtgacgctagtcaagtcg

SEQ ID NO: 12240 - DNA, 55 bp, Artificial
  Synthetic oligonucleotide
cgtcggcgcgcacacattagacggagtcgtcgtgacgaaaacatgtgatacggat

SEQ ID NO: 12241 - DNA, 52 bp, Artificial
  Synthetic oligonucleotide
gtctagccatggctgagctagcatgcttatgttatcctcatttggagaagga

SEQ ID NO: 12242 - DNA, 60 bp, Artificial
  Synthetic oligonucleotide
agtatatgggattgcgccacctccacaattcaagaagcgttataacactaatgacaactc

SEQ ID NO: 12243 - DNA, 55 bp, Artificial
  Synthetic oligonucleotide
gcgccacctccacaattcaagaagcgttataacactaatgacaactcaagaggga

SEQ ID NO: 12244 - DNA, 52 bp, Artificial
  Synthetic oligonucleotide
aggagcttgtagctgaactgaggtggcaatataataggttcgctgtaataac

SEQ ID NO: 12245 - DNA, 60 bp, Artificial
  Synthetic oligonucleotide
atcacctccgtgcggcggaagactcaattagctagaagactgagggagcgcttagacagg

SEQ ID NO: 12246 - DNA, 60 bp, Artificial
  Synthetic oligonucleotide
cttggagctataggcagctaaggggacatgggtttgtattcgtgagcacgaagaagactg

SEQ ID NO: 12247 - DNA, 52 bp, Artificial
  Synthetic oligonucleotide
attgtcgtcccttcttatctaaatcatctagacgaagctgtcttaactaaat

SEQ ID NO: 12248 - DNA, 52 bp, Artificial
  Synthetic oligonucleotide
tgcaattgttatcagacttagatataactcaaactaaatgtatgatcttgcc

SEQ ID NO: 12249 - DNA, 57 bp, Artificial
  Synthetic oligonucleotide
aaaggtatggacgcagcaattcaaccaacaacgcgggatgtaatacatacgttcgaa

SEQ ID NO: 12250 - DNA, 54 bp, Artificial
  Synthetic oligonucleotide
aggtatggaatcaatgtgtagtggggaaagaccaagttgcagagcgatggtaag

SEQ ID NO: 12251 - DNA, 55 bp, Artificial
  Synthetic oligonucleotide
tgcatttagatacgatgatcctacatttatgatcggatatcaaatttggaggtcg

SEQ ID NO: 12252 - DNA, 60 bp, Artificial
  Synthetic oligonucleotide
cggcaatagatgggttgatacaaggcaccgtacaatcagtcattacaggagaatcgtatg

SEQ ID NO: 12253 - DNA, 55 bp, Artificial
  Synthetic oligonucleotide
caaggcaccgtacaatcagtcattacaggagaatcgtatggagagaccgttaagc

SEQ ID NO: 12254 - DNA, 51 bp, Artificial
  Synthetic oligonucleotide
ttgagttagaatatgtcttttatgaggatctgacacgccattggcatgcac

SEQ ID NO: 12255 - DNA, 60 bp, Artificial
  Synthetic oligonucleotide
tagactcgctcgttcacggggtgcgcatccgatttacttaggtgccactcactatgaagt

SEQ ID NO: 12256 - DNA, 58 bp, Artificial
  Synthetic oligonucleotide
gacggcctaaaggatctgattgaagggcgattgcccgtttgcccttatactggagcga

SEQ ID NO: 12257 - DNA, 60 bp, Artificial
  Synthetic oligonucleotide
aaagttgcctgaactaacaggaggcacagatgtactttatacacgtgcgtatgtacatgc

SEQ ID NO: 12258 - DNA, 51 bp, Artificial
  Synthetic oligonucleotide
tctgataacacgtctgaactgttgcgaattcccccagtaaatgttgtctgt

SEQ ID NO: 12259 - DNA, 59 bp, Artificial
  Synthetic oligonucleotide
gactactcaacctttccctatgacagacgtacttctgactgcttacgtttcatggttca

SEQ ID NO: 12260 - DNA, 54 bp, Artificial
  Synthetic oligonucleotide
ccgttgatactaccgtcgctccaaccatcgctagtgcagacgccgcccaacatg

SEQ ID NO: 12261 - DNA, 60 bp, Artificial
  Synthetic oligonucleotide
ctatcagctgaggatgcaacctatgagccgaagatgagtggagccgaagatgtcgtgata

SEQ ID NO: 12262 - DNA, 60 bp, Artificial
  Synthetic oligonucleotide
cgttaatcatccgatctgtcacaccggttgggcgagcaaggattcagtgtcgcgccactt

SEQ ID NO: 12263 - DNA, 60 bp, Artificial
  Synthetic oligonucleotide
tatcatagcccagtgcgtgccagatggattccaagtcccaagacctttacaagacttcaa

SEQ ID NO: 12264 - DNA, 60 bp, Artificial
  Synthetic oligonucleotide
atgattacttaacgagggagcatgagaataacttcgacttgtcgcagttaggactcgcac

SEQ ID NO: 12265 - DNA, 53 bp, Artificial
  Synthetic oligonucleotide
tattcaccgtctagggaggacaatttgcaacgcgtatttacagtggcttccat

SEQ ID NO: 12266 - DNA, 50 bp, Artificial
  Synthetic oligonucleotide
actgtattagacactaatgtaacatttgatcaagaatcagcggttgtacg

SEQ ID NO: 12267 - DNA, 60 bp, Artificial
  Synthetic oligonucleotide
tacctagcgttgtttgtgatcatgactaatgttgatggtactccacgtaatgccaacgat

SEQ ID NO: 12268 - DNA, 50 bp, Artificial
  Synthetic oligonucleotide
atccaacagaagctaaaaacgaaatctcagataccgagtgggaaagtact

SEQ ID NO: 12269 - DNA, 55 bp, Artificial
  Synthetic oligonucleotide
gtaccgtaaaagtatgtccacttaatacgcagacgttaggaataggatgcaaaac

SEQ ID NO: 12270 - DNA, 55 bp, Artificial
  Synthetic oligonucleotide
gtgtttgatatgactgagtgagctaaaaacttaacacactagtcatgatgtgacc

SEQ ID NO: 12271 - DNA, 60 bp, Artificial
  Synthetic oligonucleotide
aggtgttctatacagtcgtggactatgtcaatcagataattcaggcaatgtccaaaagat

SEQ ID NO: 12272 - DNA, 55 bp, Artificial
  Synthetic oligonucleotide
cagtcgtggattacgtcaatcagataattcaggcaatgtccaaaagatctagatc

SEQ ID NO: 12273 - DNA, 55 bp, Artificial
  Synthetic oligonucleotide
gtcgtggactatgtcaatcagataattcaggcaatgtccaaaagatctaggtcgc

SEQ ID NO: 12274 - DNA, 60 bp, Artificial
  Synthetic oligonucleotide
ttcctaaagtctgcgtattcaatggacatacttttatggtacaagactgtcccattgata

SEQ ID NO: 12275 - DNA, 51 bp, Artificial
  Synthetic oligonucleotide
ccctcttcttacgaaatgcatgaacgcagcgagggagatgcttacacttac

SEQ ID NO: 12276 - DNA, 60 bp, Artificial
  Synthetic oligonucleotide
tatgatgatacagggtatgactgttggtgcgcttactgtgcaaccaatgcgctctatccg

SEQ ID NO: 12277 - DNA, 60 bp, Artificial
  Synthetic oligonucleotide
cacttaaatccatattcgtcattgaatgtaggtggacggacacagcattctgtaacgtat

SEQ ID NO: 12278 - DNA, 60 bp, Artificial
  Synthetic oligonucleotide
taatgcattacaacctaagaaatcgtcagacacgttagcattatccgaggctgtatatcg

SEQ ID NO: 12279 - DNA, 55 bp, Artificial
  Synthetic oligonucleotide
aatcgtcagacacgttagcattatccgaggctgtatatcgtacaatatggaactc

SEQ ID NO: 12280 - DNA, 58 bp, Artificial
  Synthetic oligonucleotide
gacgagcagtatgctacgttgttccgtgtttggttgatgtcactagcgaagatgcgtc

SEQ ID NO: 12281 - DNA, 57 bp, Artificial
  Synthetic oligonucleotide
cagattgaggcaagcagttcgggagtaccgatatgatgagttaacgattatttggta

SEQ ID NO: 12282 - DNA, 60 bp, Artificial
  Synthetic oligonucleotide
tgctgttaactaaccgacatgatgaagtgctggtgtctgatattggtggacgtaatggcg

SEQ ID NO: 12283 - DNA, 55 bp, Artificial
  Synthetic oligonucleotide
gtcgacgcagtctaaacctgtggcgttgcaggttcctgtctcgacaatagttcta

SEQ ID NO: 12284 - DNA, 50 bp, Artificial
  Synthetic oligonucleotide
attccgaaacgatttctaagcacgtctctgacggatcgtacgggaatagg

SEQ ID NO: 12285 - DNA, 60 bp, Artificial
  Synthetic oligonucleotide
agctctgtctggtaatggcttggtgacagacagtaatatttccatgctccacgacaagat

SEQ ID NO: 12286 - DNA, 56 bp, Artificial
  Synthetic oligonucleotide
atgcacgtccttcatgctcatagacaacgtcccagcctcccatctgtcacctgagc

SEQ ID NO: 12287 - DNA, 60 bp, Artificial
  Synthetic oligonucleotide
caacgctccactaccgcgtatgaccgtagccgccacatttgactccgccatgtcccagtg

SEQ ID NO: 12288 - DNA, 60 bp, Artificial
  Synthetic oligonucleotide
tgacaatgctggtgtgccacgcgacattgccggggactggatctatcccattgacgttct

SEQ ID NO: 12289 - DNA, 60 bp, Artificial
  Synthetic oligonucleotide
tgtggcgtggattgggatctgcatgtgctgagtcaagcgtaatgattaaaatgtcgggta

SEQ ID NO: 12290 - DNA, 58 bp, Artificial
  Synthetic oligonucleotide
ttccgctgagtaaccggagatcttaggagacgtgtcccgcggggtggatacattcatc

SEQ ID NO: 12291 - DNA, 55 bp, Artificial
  Synthetic oligonucleotide
ttgtgtttccgctcgcgtcacgtctgtgcgttccgggcccgccacctacctgaat

SEQ ID NO: 12292 - DNA, 60 bp, Artificial
  Synthetic oligonucleotide
acagtcgaccaagccattcgtgtagctcttgcaacgtgtcctactgcagatgagacggct

SEQ ID NO: 12293 - DNA, 60 bp, Artificial
  Synthetic oligonucleotide
tatcatcctaatcgagtacgctccaccgttaccactgatcactctcccacctagtgtgtt

SEQ ID NO: 12294 - DNA, 55 bp, Artificial
  Synthetic oligonucleotide
gtacacacaatagtgcagaaagatgtatgtaaacttgtagaatggtatcatggtc

SEQ ID NO: 12295 - DNA, 51 bp, Artificial
  Synthetic oligonucleotide
tgccgccaagagcagactcgacccaacgatgacttcgttcgtacttgatca

SEQ ID NO: 12296 - DNA, 55 bp, Artificial
  Synthetic oligonucleotide
gccagcgttttcgagctttgcgtctcctcatattcgtacgggtagacctgctccg

SEQ ID NO: 12297 - DNA, 53 bp, Artificial
  Synthetic oligonucleotide
ttgcgtaatattgagggaaggccttctctaacctacctggataaccgttagct

SEQ ID NO: 12298 - DNA, 60 bp, Artificial
  Synthetic oligonucleotide
gaccgtagaggactcagttgctgaacggatgatgcgtgcaggatccggggtattaatgcc

SEQ ID NO: 12299 - DNA, 55 bp, Artificial
  Synthetic oligonucleotide
agttgctgaacggatgatgcgtgcaggatccggggtattaatgccgagaccagtc

SEQ ID NO: 12300 - DNA, 60 bp, Artificial
  Synthetic oligonucleotide
tatatgcgattacttttatatagcgcgtaattgcggatgggtagctagaggatcgagtga

SEQ ID NO: 12301 - DNA, 55 bp, Artificial
  Synthetic oligonucleotide
tagcgcgtaattgcggatgggtagctagaggatcgagtgaatcaataatagcggc

SEQ ID NO: 12302 - DNA, 55 bp, Artificial
  Synthetic oligonucleotide
agggtacgtgctgaacgttccaggacctggtgcatacagaattcaggatgggcaa

SEQ ID NO: 12303 - DNA, 60 bp, Artificial
  Synthetic oligonucleotide
gccgttctgacattgaatcaactaacttcagtctgagtatagaacctgttccagtcgact

SEQ ID NO: 12304 - DNA, 58 bp, Artificial
  Synthetic oligonucleotide
ctgtttgctataggtgggcctgagatgttggttggagctccagaaataagaggcatgg

SEQ ID NO: 12305 - DNA, 54 bp, Artificial
  Synthetic oligonucleotide
ataaacgtcaactgcagaatctaatccccgagaattgtaaggtacgactgctta

SEQ ID NO: 12306 - DNA, 60 bp, Artificial
  Synthetic oligonucleotide
tgaacgtaatgtcacatcaacctctctgtatgataatacctcaaggacttatgacgtatc

SEQ ID NO: 12307 - DNA, 60 bp, Artificial
  Synthetic oligonucleotide
taagcctcgtagacggcgagctgctattgctccgcaaatccaagacccagctgttcccgc

SEQ ID NO: 12308 - DNA, 60 bp, Artificial
  Synthetic oligonucleotide
tcagtttgaaactagccttgcgggtgtctcatccgtagtgaatgaggtgcagggattacg

SEQ ID NO: 12309 - DNA, 60 bp, Artificial
  Synthetic oligonucleotide
cagaatgatgtggtggctctttcgtctcgaattgataggctgactcaggaagtagtagct

SEQ ID NO: 12310 - DNA, 52 bp, Artificial
  Synthetic oligonucleotide
cattgatggactcacatcgtgaaagcggaggtacattacatggtgactgtac

SEQ ID NO: 12311 - DNA, 60 bp, Artificial
  Synthetic oligonucleotide
actctgcatcctacgcactcatacgccactatatcttacgactacgttctgcctaaaaca

SEQ ID NO: 12312 - DNA, 55 bp, Artificial
  Synthetic oligonucleotide
gcccaaatcgtaagttacacacttataattggatgatgggtaccaacttgtcaag

SEQ ID NO: 12313 - DNA, 60 bp, Artificial
  Synthetic oligonucleotide
gtaacaacaatttagtcaacatcattgatatagattgttgtggtcgcgcattcggcaaag

SEQ ID NO: 12314 - DNA, 55 bp, Artificial
  Synthetic oligonucleotide
tagtcaacatcattgatatagattgttgtggtcgcgcattcggcaaagctccttt

SEQ ID NO: 12315 - DNA, 60 bp, Artificial
  Synthetic oligonucleotide
acttatcagagcggaaaccaatcttatgtctcggctttgcgaagcatgtttactggagac

SEQ ID NO: 12316 - DNA, 60 bp, Artificial
  Synthetic oligonucleotide
ccacatcagtggagcactcgctaacggactctttaatgtcgcaccagtcgtctacaaaac

SEQ ID NO: 12317 - DNA, 60 bp, Artificial
  Synthetic oligonucleotide
ccatagtgcgcgcaccccttgtggaagtaacatatgaatctgtcttggatgggacttaca

SEQ ID NO: 12318 - DNA, 53 bp, Artificial
  Synthetic oligonucleotide
cggcgaatctgtgaaacaagctgtattgttaaatgtgttggggagtggcgagg

SEQ ID NO: 12319 - DNA, 55 bp, Artificial
  Synthetic oligonucleotide
tcgtataacaaaattcttacggaagaagatctacagatgcgccggttagctacgg

SEQ ID NO: 12320 - DNA, 60 bp, Artificial
  Synthetic oligonucleotide
aacgctactgacgcaatgttgcttgaatcctgtctagaacagttttcagctaatgtgcgt

SEQ ID NO: 12321 - DNA, 60 bp, Artificial
  Synthetic oligonucleotide
gagtaccgcacaaaggagattcctgataacgctctagctgttagtgttctatcgaagaat

SEQ ID NO: 12322 - DNA, 55 bp, Artificial
  Synthetic oligonucleotide
gcagagaagtgacccgtgtccctcactctagatttaatgttggcacatttccgtc

SEQ ID NO: 12323 - DNA, 51 bp, Artificial
  Synthetic oligonucleotide
gcatgttttacattgacggtgaagtatgagatgagacttccgtgtggccat

SEQ ID NO: 12324 - DNA, 58 bp, Artificial
  Synthetic oligonucleotide
cttcatgcacaattaaagtgtgtccgttaaatacacaaactcttggaataggatgctt

SEQ ID NO: 12325 - DNA, 60 bp, Artificial
  Synthetic oligonucleotide
tgtccaagcgatcacgttccctaaattccgctgctttctataatcgagtctagatttgtc

SEQ ID NO: 12326 - DNA, 60 bp, Artificial
  Synthetic oligonucleotide
tactatcgtgaccacagcgtgcgtgtttggaagttgaccaatcctgtgtccatatcggaa

SEQ ID NO: 12327 - DNA, 55 bp, Artificial
  Synthetic oligonucleotide
cacagcgtgcgtgtttggaagttgaccaatcctgtgtccatatcggaaaccctcg

SEQ ID NO: 12328 - DNA, 60 bp, Artificial
  Synthetic oligonucleotide
tgattgcgccatgcgtacgcgaaatccgtcatcacgcacattattaaccgtgcgcttgat

SEQ ID NO: 12329 - DNA, 54 bp, Artificial
  Synthetic oligonucleotide
tgcgcttgatgctgagatctgttgggctattgtctcatatagggctctcacgaa

SEQ ID NO: 12330 - DNA, 53 bp, Artificial
  Synthetic oligonucleotide
gttatccttgctggctaccaatggatatcaattagctagaccgattccaagac

SEQ ID NO: 12331 - DNA, 60 bp, Artificial
  Synthetic oligonucleotide
caagcggaagcaatgtaccagctggaacagtccaagatagcgcagaatctgaagcgaaac

SEQ ID NO: 12332 - DNA, 58 bp, Artificial
  Synthetic oligonucleotide
agtccgcacacagaaatatggtgcaagatctggttagctgtacacaagtatatgttac

SEQ ID NO: 12333 - DNA, 56 bp, Artificial
  Synthetic oligonucleotide
gcgtgcacgaagatatagtgtttccgagtggagttgaaaattacgagagtcaccta

SEQ ID NO: 12334 - DNA, 60 bp, Artificial
  Synthetic oligonucleotide
gccaccactttcacaatcgcaggtccgcaatatgatggagtacgtatcacaacgacttgg

SEQ ID NO: 12335 - DNA, 55 bp, Artificial
  Synthetic oligonucleotide
ttataccttgactcctctgtaactcactgcccctcgtgagcgcgcctaattcatc

SEQ ID NO: 12336 - DNA, 60 bp, Artificial
  Synthetic oligonucleotide
cgtggtcgacttagtcttgcgcatcatcgacagtggtcggtaccagcctaattggaatca

SEQ ID NO: 12337 - DNA, 60 bp, Artificial
  Synthetic oligonucleotide
gtctgatccacgtgcaacgcaactagccatttcttacgttcgctataatggagacagtga

SEQ ID NO: 12338 - DNA, 51 bp, Artificial
  Synthetic oligonucleotide
atgtggcgcgaacagaagcgcgtattacgagtaagccaaattgcaacgatg

SEQ ID NO: 12339 - DNA, 55 bp, Artificial
  Synthetic oligonucleotide
cccaggaccatttgctcaaactggatacgctccagtgaactggggtcctggtgag

SEQ ID NO: 12340 - DNA, 57 bp, Artificial
  Synthetic oligonucleotide
catgcgttcgaggtctacatcaattcgattttaccgtggagtgaacttgatccggag

SEQ ID NO: 12341 - DNA, 60 bp, Artificial
  Synthetic oligonucleotide
ccaagtcgcatacactacgcctcttttattcgagatgtgctgtatggagtcgattctaga

SEQ ID NO: 12342 - DNA, 60 bp, Artificial
  Synthetic oligonucleotide
gggatttgacacactcgttgcagcgacggatggtagtgatctagcgttgatcgatacaca

SEQ ID NO: 12343 - DNA, 60 bp, Artificial
  Synthetic oligonucleotide
atcattccgttagtgacctcgttaccgtgttcacactcatgaatattgagacgcgtgttg

SEQ ID NO: 12344 - DNA, 60 bp, Artificial
  Synthetic oligonucleotide
gtggagcagtggcaggatggagtactacggttgcgtgttgaaggagggggcttgatcacg

SEQ ID NO: 12345 - DNA, 58 bp, Artificial
  Synthetic oligonucleotide
aatttattcaaccattgggaaagcagcggagcgatttgctgagagtgaaatcggtgcg

SEQ ID NO: 12346 - DNA, 51 bp, Artificial
  Synthetic oligonucleotide
acgtgttaggtacaggtgaggagttgccagatccactgagccccggcgaac

SEQ ID NO: 12347 - DNA, 60 bp, Artificial
  Synthetic oligonucleotide
cgtatcgtgaatttctcaatctatcgatttcaagcacgtatagtagcacgatacatgcga

SEQ ID NO: 12348 - DNA, 55 bp, Artificial
  Synthetic oligonucleotide
ctcaatctatcgatttcaagcacgtatagtagcacgatacatgcgagacgcatga

SEQ ID NO: 12349 - DNA, 60 bp, Artificial
  Synthetic oligonucleotide
ccaactcagcactggattcaagcttggaacaacgcctctgattcgatgcgtttgcgaatg

SEQ ID NO: 12350 - DNA, 60 bp, Artificial
  Synthetic oligonucleotide
ttcttgcgagatggagcggtgttttctacgggtggtcaggggtgtacagctgcagtgtgc

SEQ ID NO: 12351 - DNA, 55 bp, Artificial
  Synthetic oligonucleotide
cggtgttttctacgggtggtcaggggtgtacagctgcagtgtgcgttgtcgcggc

SEQ ID NO: 12352 - DNA, 60 bp, Artificial
  Synthetic oligonucleotide
tgcagtgtgcgttgtcgcggcaagtcgagcgaatgtcgtctcagtcactatggcttgtgt

SEQ ID NO: 12353 - DNA, 55 bp, Artificial
  Synthetic oligonucleotide
acgactgtccattgggtggattaccacagtcttttgtcgcccacaaaacgctttg

SEQ ID NO: 12354 - DNA, 55 bp, Artificial
  Synthetic oligonucleotide
ctataccgagaggacgttactgtagattcaccaagtgacgttggtagccggggaa

SEQ ID NO: 12355 - DNA, 60 bp, Artificial
  Synthetic oligonucleotide
gttacgagaacctgcctatggacgaccctaattttactcagcagagactggctgcagcgt

SEQ ID NO: 12356 - DNA, 60 bp, Artificial
  Synthetic oligonucleotide
ggatttcgaatctcgaatagccacattagagcgtacagcggtcactagcgcagcggcacc

SEQ ID NO: 12357 - DNA, 60 bp, Artificial
  Synthetic oligonucleotide
catagatagctcgactcttgaaattaactctagcggacaattagccgtgaagtcgacatc

SEQ ID NO: 12358 - DNA, 60 bp, Artificial
  Synthetic oligonucleotide
tgaagcaacatccgctatagtatcaaaacaccccgcacgtgttggactcccgcctacagc

SEQ ID NO: 12359 - DNA, 51 bp, Artificial
  Synthetic oligonucleotide
gtcagaatgggtggacgtcttcgagacttcagatgcattgaccgtctccat

SEQ ID NO: 12360 - DNA, 60 bp, Artificial
  Synthetic oligonucleotide
gatcctcctcttcagaccaatgtttggtacgtgaacactctcacacctctatattccaat

SEQ ID NO: 12361 - DNA, 53 bp, Artificial
  Synthetic oligonucleotide
gatcggtccctgttttgcactaactcgtcatctccccagactattgctgggcc

SEQ ID NO: 12362 - DNA, 60 bp, Artificial
  Synthetic oligonucleotide
atactacatccgaattagatgcatctgaacttgcggacttaattctaaatgaatggttgt

SEQ ID NO: 12363 - DNA, 55 bp, Artificial
  Synthetic oligonucleotide
gatgcatctgaacttgcggacttaattctaaatgaatggttgtgcaaccctatgg

SEQ ID NO: 12364 - DNA, 54 bp, Artificial
  Synthetic oligonucleotide
ctgtaacaagctaggaccacgagagaatgttgctatcattcaagttggtgggcc

SEQ ID NO: 12365 - DNA, 55 bp, Artificial
  Synthetic oligonucleotide
ggctgatctgtacgctgctggcttccgctattccgtctctgacgctttctccagc

SEQ ID NO: 12366 - DNA, 60 bp, Artificial
  Synthetic oligonucleotide
ctgatctgtacgctgctggcttccgctattccgtctctgacgctttctctagtggcaata

SEQ ID NO: 12367 - DNA, 54 bp, Artificial
  Synthetic oligonucleotide
tccccaacactagccgccaccctccggtcggtaaagaatacgcggctcctcaga

SEQ ID NO: 12368 - DNA, 53 bp, Artificial
  Synthetic oligonucleotide
tcagtggtaacttgcgggtctggatgcgtgatgtttagtggttgacttttggc

SEQ ID NO: 12369 - DNA, 60 bp, Artificial
  Synthetic oligonucleotide
tggaatcgatttgactcatctgagtgtgcctaaagttcagcccaaaacgttggaggcgat

SEQ ID NO: 12370 - DNA, 60 bp, Artificial
  Synthetic oligonucleotide
gcatggttactcattacatctggtccactgaatacaatgacgggtcactcttcgccacga

SEQ ID NO: 12371 - DNA, 55 bp, Artificial
  Synthetic oligonucleotide
atctgagtgtgcctaaagttcagcccaaaacgttggaggcgattctagatactcc

SEQ ID NO: 12372 - DNA, 53 bp, Artificial
  Synthetic oligonucleotide
aatgtggctggacaaggagcgattcatcaaaaaaggttattgaggtcgaggag

SEQ ID NO: 12373 - DNA, 60 bp, Artificial
  Synthetic oligonucleotide
gagaagatgatatcccgatcgaaacattgattcgttactgcgactcgctgacgacatttg

SEQ ID NO: 12374 - DNA, 60 bp, Artificial
  Synthetic oligonucleotide
aataatgtccgagggtgcgaatgagacgcctctttggcctcaggagcgttacgtgcagat

SEQ ID NO: 12375 - DNA, 60 bp, Artificial
  Synthetic oligonucleotide
actaaggtacctgccccttattgatccgagatctctggaagtgcaatcgcggactatcat

SEQ ID NO: 12376 - DNA, 60 bp, Artificial
  Synthetic oligonucleotide
ttcccactaatgaggacttattcttgagtgcaccagatatgcgagagtgggctgtcaagg

SEQ ID NO: 12377 - DNA, 53 bp, Artificial
  Synthetic oligonucleotide
aaacgtcagatattagtaaaagattgcgactacgcgaaattactacacaaact

SEQ ID NO: 12378 - DNA, 60 bp, Artificial
  Synthetic oligonucleotide
gtggtattttcttggtgagaacgcccactgaaacagtactgcaagaatatacacagagtc

SEQ ID NO: 12379 - DNA, 57 bp, Artificial
  Synthetic oligonucleotide
aatcgccgagtgaagcgtgactcatacgcaggagtggtcaaacgtgggtacacacgt

SEQ ID NO: 12380 - DNA, 53 bp, Artificial
  Synthetic oligonucleotide
caaattacatgctgctgatactaggggctttgaacacagtgagggatatgggt

SEQ ID NO: 12381 - DNA, 50 bp, Artificial
  Synthetic oligonucleotide
ttaggtatgaatgaggtggttggctcaagtttccttgatgccgtgtctca

SEQ ID NO: 12382 - DNA, 60 bp, Artificial
  Synthetic oligonucleotide
ggctcgatatgctcagaacgataagctgtttgaggatatgatggctaatcttccattcat

SEQ ID NO: 12383 - DNA, 55 bp, Artificial
  Synthetic oligonucleotide
cgataagctgtttgaggatatgatggctaatcttccattcatggagggtgtagtg

SEQ ID NO: 12384 - DNA, 55 bp, Artificial
  Synthetic oligonucleotide
gctccgggagtccagagatactaccatcagccattgatctaaggacgtttgcgag

SEQ ID NO: 12385 - DNA, 60 bp, Artificial
  Synthetic oligonucleotide
gtggataacgaaggtggtagtaatcagaagccaatgtctactaggatagctgaggcgaca

SEQ ID NO: 12386 - DNA, 57 bp, Artificial
  Synthetic oligonucleotide
cgtacgctattcagtctccgtttcctgaggctgcagtgtctaggattgtggtgcata

SEQ ID NO: 12387 - DNA, 50 bp, Artificial
  Synthetic oligonucleotide
gtgaaaccgaattacattttttccagccatgaatcatgcgcattaaacgt

SEQ ID NO: 12388 - DNA, 51 bp, Artificial
  Synthetic oligonucleotide
acgtctcctcaattcacaagcgaatttagttataacggcaaaccattgaaa

SEQ ID NO: 12389 - DNA, 60 bp, Artificial
  Synthetic oligonucleotide
gatctattggtagtacgtctcatgatgataacctcaattacaagttatcgtgtaataatc

SEQ ID NO: 12390 - DNA, 60 bp, Artificial
  Synthetic oligonucleotide
gcttcttaacgctgagtgtcccagtgatgcagttgatagagatacaggaaccctcgtacc

SEQ ID NO: 12391 - DNA, 55 bp, Artificial
  Synthetic oligonucleotide
gggagctagcggcacttctgggaccgacgggagccgatcctcaacctactgctgt

SEQ ID NO: 12392 - DNA, 60 bp, Artificial
  Synthetic oligonucleotide
cgctgtcccaatctgctgttggtaattctactggattcctaccaacttcgggcatgtatg

SEQ ID NO: 12393 - DNA, 60 bp, Artificial
  Synthetic oligonucleotide
cgtgatattcgtgaattgcttactatcatacccacttctactaccgctggcaagttatca

SEQ ID NO: 12394 - DNA, 60 bp, Artificial
  Synthetic oligonucleotide
cacttcgtgtggaagaagcgttatggctgcgtgagagtcaggctactgctggtttcgacg

SEQ ID NO: 12395 - DNA, 60 bp, Artificial
  Synthetic oligonucleotide
agccgaggtgacagtgcacgcagctgatagttctacgcctagccgtaagatcatagggga

SEQ ID NO: 12396 - DNA, 60 bp, Artificial
  Synthetic oligonucleotide
gagccgatcctcaacctactgctgtccagatagccgagtctttcacggacaaaggccgaa

SEQ ID NO: 12397 - DNA, 60 bp, Artificial
  Synthetic oligonucleotide
gagatggcatccgtactaaatcattgtccgcgggagtgagatctgtttataataacgtca

SEQ ID NO: 12398 - DNA, 60 bp, Artificial
  Synthetic oligonucleotide
tcaatggctctgttaacacgattgatcgtttactggttaacggatgtgactgagagaagc

SEQ ID NO: 12399 - DNA, 60 bp, Artificial
  Synthetic oligonucleotide
tcagcgaacctggcatctagtattcccaacactaacttggccacaaccatcattgttcac

SEQ ID NO: 12400 - DNA, 55 bp, Artificial
  Synthetic oligonucleotide
gctgtccagatagccgagtctttcacggacaaaggccgaaccacgtacgcagtgg

SEQ ID NO: 12401 - DNA, 60 bp, Artificial
  Synthetic oligonucleotide
atcactcttcagcttggcacaccctcaatggaccgtattacaggtctggtactcactttc

SEQ ID NO: 12402 - DNA, 55 bp, Artificial
  Synthetic oligonucleotide
gatgaatcgcataactgagagaaatgatctacatgccgcttataggctagcagag

SEQ ID NO: 12403 - DNA, 60 bp, Artificial
  Synthetic oligonucleotide
tccagaatgtgatgaaggcgcggttatgaacatcgcacaggcaatggctaacatgtggga

SEQ ID NO: 12404 - DNA, 55 bp, Artificial
  Synthetic oligonucleotide
tgaaggcgcggttatgaacatcgcacaggcaatggctaacatgtgggacaactga

SEQ ID NO: 12405 - DNA, 60 bp, Artificial
  Synthetic oligonucleotide
tatctgagaaaattgttcgtgatgcatacactgacttttctgaactattgacttgtttta

SEQ ID NO: 12406 - DNA, 55 bp, Artificial
  Synthetic oligonucleotide
gatgcatacactgacttttctgaactattgacttgttttaagcgtattcgatcgg

SEQ ID NO: 12407 - DNA, 60 bp, Artificial
  Synthetic oligonucleotide
ctgggcactatcgtggaattctgtcaagctgttggtttgaatcgaacacctgaggaacca

SEQ ID NO: 12408 - DNA, 55 bp, Artificial
  Synthetic oligonucleotide
ctgtcaagctgttggtttgaatcgaacacctgaggaaccatggcgtcagctagct

SEQ ID NO: 12409 - DNA, 60 bp, Artificial
  Synthetic oligonucleotide
gagatgagccacctgaggacgaaggaaaccgtgcaagtgctcgacccaaatctagtccat

SEQ ID NO: 12410 - DNA, 60 bp, Artificial
  Synthetic oligonucleotide
ccttgctcagtacagattgggttacttcggtcagtacacctcttcatggccctacactgc

SEQ ID NO: 12411 - DNA, 57 bp, Artificial
  Synthetic oligonucleotide
gaatgttttgccgttccctggtactcagttgacgcgagagactgttttacgcaaggc

SEQ ID NO: 12412 - DNA, 53 bp, Artificial
  Synthetic oligonucleotide
atcaacctgcctcgacctgaaatcaagatccctatcgaaatactctcgccacc

SEQ ID NO: 12413 - DNA, 55 bp, Artificial
  Synthetic oligonucleotide
gtgggttctcggagggattagtttggtatcttccaatcacgcatcctacaaagtg

SEQ ID NO: 12414 - DNA, 60 bp, Artificial
  Synthetic oligonucleotide
tgtgacagagagaagcgctatctttcggctgacttgtttcgcaatcttcggatgtaagcc

SEQ ID NO: 12415 - DNA, 60 bp, Artificial
  Synthetic oligonucleotide
tgagagaagcgctatctttcggctgacttgtttcgcaatcttcggatgtaagccaacagc

SEQ ID NO: 12416 - DNA, 52 bp, Artificial
  Synthetic oligonucleotide
gcacgactactcatattacactaacaacgaaatacgaaccgatcagcattgg

SEQ ID NO: 12417 - DNA, 55 bp, Artificial
  Synthetic oligonucleotide
tattgaaggtgggaagtattacgaacacgctcctatagagttaatatatgcttgc

SEQ ID NO: 12418 - DNA, 52 bp, Artificial
  Synthetic oligonucleotide
taaatagatcacaacctgcgcatgataatttaatgggtacgatgtggttgaa

SEQ ID NO: 12419 - DNA, 60 bp, Artificial
  Synthetic oligonucleotide
gcgccattaatgcaccagccaatatacagcaatttgaacatatagtccaactccgcaggg

SEQ ID NO: 12420 - DNA, 56 bp, Artificial
  Synthetic oligonucleotide
gacattttgttcctgaccgcaacagccgtagtcgttaaggcagcaatgtccgcccg

SEQ ID NO: 12421 - DNA, 50 bp, Artificial
  Synthetic oligonucleotide
aaggtttcgtgtaaggtgggtggtgagtcgttgacgggcattggactctc

SEQ ID NO: 12422 - DNA, 60 bp, Artificial
  Synthetic oligonucleotide
tcccaatgacaggaatcaaggacctcaggaccgtcatgcactgacgactctttctaattt

SEQ ID NO: 12423 - DNA, 60 bp, Artificial
  Synthetic oligonucleotide
tggagagcggtcaattgaacatagactgcgaggtgactaccgtgtgtattaccctagacc

SEQ ID NO: 12424 - DNA, 60 bp, Artificial
  Synthetic oligonucleotide
tgcggaaagaacatgctatcgtttggttcccaaacctgcgaggtatattgcaccatcatg

SEQ ID NO: 12425 - DNA, 53 bp, Artificial
  Synthetic oligonucleotide
agattccaaggcaacgaaatcaagacgttaagcagcagcataacgccgaccga

SEQ ID NO: 12426 - DNA, 55 bp, Artificial
  Synthetic oligonucleotide
gctaagggaataatcatcgtcggaattgttccacacgtagtctcaaatgctcagg

SEQ ID NO: 12427 - DNA, 60 bp, Artificial
  Synthetic oligonucleotide
acttagcacagacagcctaccgcttcgccggccaactgccacaatcacccgattcaacta

SEQ ID NO: 12428 - DNA, 56 bp, Artificial
  Synthetic oligonucleotide
gcgcaatttcgattcaatacgcatttcgtttcaacttgttagaccaccgaatatga

SEQ ID NO: 12429 - DNA, 60 bp, Artificial
  Synthetic oligonucleotide
gtagtggacgtaagcatttgcgctacccatgcaaggatttgaaacagtatagtgagagga

SEQ ID NO: 12430 - DNA, 55 bp, Artificial
  Synthetic oligonucleotide
ctggaccagtatcacttgcactcgaacaatctggaatgggtcgaccgggatctct

SEQ ID NO: 12431 - DNA, 55 bp, Artificial
  Synthetic oligonucleotide
agcatttgcgctacccatgcaaggatttgaaacagtatagtgagaggatgtgacc

SEQ ID NO: 12432 - DNA, 60 bp, Artificial
  Synthetic oligonucleotide
acacacacctttccggcgagaattcgactctcatcgctaactcgatgcacaacatggcta

SEQ ID NO: 12433 - DNA, 60 bp, Artificial
  Synthetic oligonucleotide
ttcaccacaggaaggtagattgttagctagtatggctggtattcgcgttatagatgccat

SEQ ID NO: 12434 - DNA, 55 bp, Artificial
  Synthetic oligonucleotide
atcgggttacgcgtagagtcctctttaatgcgggtacgtaatcctcgcgtgcacc

SEQ ID NO: 12435 - DNA, 55 bp, Artificial
  Synthetic oligonucleotide
agattaattgggaagttagaggtgtaatttcacagtgcatgaatggaagcatccc

SEQ ID NO: 12436 - DNA, 60 bp, Artificial
  Synthetic oligonucleotide
gatactacgtatgcaaattcaacgcagagtgaatcattcttaacgtcaactttatgcctg

SEQ ID NO: 12437 - DNA, 55 bp, Artificial
  Synthetic oligonucleotide
tcaacgcagagtgaatcattcttaacgtcaactttatgcctgtactatccagtcg

SEQ ID NO: 12438 - DNA, 53 bp, Artificial
  Synthetic oligonucleotide
tcgtacggcgaatcggtgaaacaagctgtactgctgaacgttttgggggcggg

SEQ ID NO: 12439 - DNA, 60 bp, Artificial
  Synthetic oligonucleotide
ttagcgcgtgcgctacagagggaagcggctgaaaggactgaagctgaatcaacaatggtt

SEQ ID NO: 12440 - DNA, 55 bp, Artificial
  Synthetic oligonucleotide
gcgaattcttaaatttagcgatcagtagcacctatacttctccaatgcatgcccg

SEQ ID NO: 12441 - DNA, 55 bp, Artificial
  Synthetic oligonucleotide
cgacactttgaagtcgaatgcacagaggatcgtatatgatgatgagttgcaaatg

SEQ ID NO: 12442 - DNA, 55 bp, Artificial
  Synthetic oligonucleotide
cccgcagtgatgtctacgaggcgctagacgaaatacctttctctgatgacgcgat

SEQ ID NO: 12443 - DNA, 59 bp, Artificial
  Synthetic oligonucleotide
acatgggagttgtgcccttgtccactaagtatgctaggtcggctccgtccaatgataag

SEQ ID NO: 12444 - DNA, 51 bp, Artificial
  Synthetic oligonucleotide
agttgagcgaacatatacgttatttggacaacaagttcaagtaacggtatc

SEQ ID NO: 12445 - DNA, 60 bp, Artificial
  Synthetic oligonucleotide
cacacagacatcaacgataagcagaaggttaaggctaaaagagatggcgactcaaacgga

SEQ ID NO: 12446 - DNA, 60 bp, Artificial
  Synthetic oligonucleotide
ctgcgatatcaatcccagcttgaatgggtgtatcctcatctatggatagccgacaggaat

SEQ ID NO: 12447 - DNA, 55 bp, Artificial
  Synthetic oligonucleotide
cccagcttgaatgggtgtatcctcatctatggatagccgacaggaatttggcagg

SEQ ID NO: 12448 - DNA, 60 bp, Artificial
  Synthetic oligonucleotide
aacaaagcatatcgagacgctcctccgtttagtcgacatcactggtactgaagaatcatc

SEQ ID NO: 12449 - DNA, 60 bp, Artificial
  Synthetic oligonucleotide
aagaatcatctgcgataacacaagagcagttaactcgtgtattaaagctactttctgagg

SEQ ID NO: 12450 - DNA, 57 bp, Artificial
  Synthetic oligonucleotide
tccacaaggattattaaaagatgatcgacgtgccattaatgccgagtttccgagata

SEQ ID NO: 12451 - DNA, 55 bp, Artificial
  Synthetic oligonucleotide
cgcaggacgttcactgtttgatagttatttagctcacgttgaaacacgattcacg

SEQ ID NO: 12452 - DNA, 52 bp, Artificial
  Synthetic oligonucleotide
gcgctcggttcatctattacacgcacgctcagaagataattccttgcgctat

SEQ ID NO: 12453 - DNA, 60 bp, Artificial
  Synthetic oligonucleotide
tgactcaaggtagtttagaccacttgactttatgtgctgcggtcgattcggacatcactt

SEQ ID NO: 12454 - DNA, 57 bp, Artificial
  Synthetic oligonucleotide
catactcacccggtctgttctgcggatgcgtcgacgtccaatcagccccactcgcgc

SEQ ID NO: 12455 - DNA, 59 bp, Artificial
  Synthetic oligonucleotide
atgactggctgagaagccacagtcagtcatatcgcgtgtggcttaagccttaatcccgt

SEQ ID NO: 12456 - DNA, 53 bp, Artificial
  Synthetic oligonucleotide
cgctaccttgttgctgtgggacgtacgtagcgatcgagggacccaggctgatc

SEQ ID NO: 12457 - DNA, 55 bp, Artificial
  Synthetic oligonucleotide
cgtgacagggtttactacatgcttggtgatgcacatcatgcaaacttatcaggta

SEQ ID NO: 12458 - DNA, 60 bp, Artificial
  Synthetic oligonucleotide
tgtgcgaaacttcgtccagcattcatgcaagtaggcagcatgcgtaaattgttgagacca

SEQ ID NO: 12459 - DNA, 55 bp, Artificial
  Synthetic oligonucleotide
cgtccagcattcatgcaagtaggcagcatgcgtaaattgttgagaccagtgcgta

SEQ ID NO: 12460 - DNA, 60 bp, Artificial
  Synthetic oligonucleotide
tgttctatggtaacagacgtgctacagctagaatgattgagcattcaccactaggttgag

SEQ ID NO: 12461 - DNA, 55 bp, Artificial
  Synthetic oligonucleotide
cagacgtgctacagctagaatgattgagcattcaccactaggttgagaaatcccg

SEQ ID NO: 12462 - DNA, 55 bp, Artificial
  Synthetic oligonucleotide
cggaacatggagcgtctcattaattcgtaccgaaccatctcacactcactgcgtc

SEQ ID NO: 12463 - DNA, 55 bp, Artificial
  Synthetic oligonucleotide
atattaacacaccagatacacatggattaattgttgagtgctatgagcaggtcgg

SEQ ID NO: 12464 - DNA, 51 bp, Artificial
  Synthetic oligonucleotide
cgaaaaggtatgagttgcagtgtgtaggtgcgtgtgagcgtgttgcttttg

SEQ ID NO: 12465 - DNA, 60 bp, Artificial
  Synthetic oligonucleotide
cacattttgtctctgtgatccccgcacagacgttccactatgccggctcttgctataatc

SEQ ID NO: 12466 - DNA, 60 bp, Artificial
  Synthetic oligonucleotide
cctcaagcaatgctcaaaaccaaggatttacaacatacgtgcactctgttaaacctctga

SEQ ID NO: 12467 - DNA, 55 bp, Artificial
  Synthetic oligonucleotide
gctcaaaaccaaggatttacaacatacgtgcactctgttaaacctctgattcccc

SEQ ID NO: 12468 - DNA, 59 bp, Artificial
  Synthetic oligonucleotide
tcgtgatgggcgaaactactccattcgtctcaatgctcgtaatcctcagttaggcggtg

SEQ ID NO: 12469 - DNA, 52 bp, Artificial
  Synthetic oligonucleotide
agcctttaaggtgtagtgtgaacggggctaaggcctggatacaaatgcagtg

SEQ ID NO: 12470 - DNA, 60 bp, Artificial
  Synthetic oligonucleotide
ttgctcagacctagatgctaatccggggagagaaccatggaaaccgcttcgtaatcagcg

SEQ ID NO: 12471 - DNA, 60 bp, Artificial
  Synthetic oligonucleotide
tagtcggcttacgcaactcccattacgtcctgattatggtaatatctgggtcggcgatgc

SEQ ID NO: 12472 - DNA, 60 bp, Artificial
  Synthetic oligonucleotide
caactttcgccctacgcatgacatcatccggtcaccttgttcgacgttcgtatgcatccc

SEQ ID NO: 12473 - DNA, 55 bp, Artificial
  Synthetic oligonucleotide
gacgtggtgcttctaccaacaagtcgtctgttaaaagtgtttacacggcaggcgc

SEQ ID NO: 12474 - DNA, 52 bp, Artificial
  Synthetic oligonucleotide
tggcacgctaagaacgtgaccgccgataaggctcgctttcttaacggagccg

SEQ ID NO: 12475 - DNA, 60 bp, Artificial
  Synthetic oligonucleotide
accgcattcactcgtgatgcgcctatggccttcacccctgaatctcgtactcagtttctt

SEQ ID NO: 12476 - DNA, 54 bp, Artificial
  Synthetic oligonucleotide
tgttgcatccagcaggggttacattatcaacacagttcacagactacgtgtcac

SEQ ID NO: 12477 - DNA, 52 bp, Artificial
  Synthetic oligonucleotide
tcccgtccatctgggaggggaaaagtcgtcgttcatccatctaccatgactg

SEQ ID NO: 12478 - DNA, 60 bp, Artificial
  Synthetic oligonucleotide
atgggatgtatcgtcagatcgatcgcagatggacgatgatgagtgggagtcgaccagatt

SEQ ID NO: 12479 - DNA, 60 bp, Artificial
  Synthetic oligonucleotide
ccggaactcaccagatagagtgaagctccaagatcactatgtcgtgggattggcaggtcc

SEQ ID NO: 12480 - DNA, 55 bp, Artificial
  Synthetic oligonucleotide
gaagctccaagatcactatgtcgtgggattggcaggtcccggagtagtgattccc

SEQ ID NO: 12481 - DNA, 55 bp, Artificial
  Synthetic oligonucleotide
ggaaaacgtagcagttatacaggttggtgggccaaaatgtgcttgacataacagc

SEQ ID NO: 12482 - DNA, 55 bp, Artificial
  Synthetic oligonucleotide
gtctgccatgagtggcgcagatgtcgagtcatacatatttccgcgtatccgggag

SEQ ID NO: 12483 - DNA, 60 bp, Artificial
  Synthetic oligonucleotide
ccaaggcgcacatagaatcgtatattacaccaaactcagctgggataggtaatctacgat

SEQ ID NO: 12484 - DNA, 55 bp, Artificial
  Synthetic oligonucleotide
tatattacaccaaactcagctgggataggtaatctacgattggatgtggacgtcg

SEQ ID NO: 12485 - DNA, 53 bp, Artificial
  Synthetic oligonucleotide
agtttaaaatcctcagcgggattaaaacaccaagatgcacggactagacgacg

SEQ ID NO: 12486 - DNA, 53 bp, Artificial
  Synthetic oligonucleotide
gtttaccgttacagagtaggagcgaccaacgaaatgggtggagagagcgcgcg

SEQ ID NO: 12487 - DNA, 60 bp, Artificial
  Synthetic oligonucleotide
ggcttttaaagcacatgagactagtagtgtgtagcgatgagcagtctaagactccattgg

SEQ ID NO: 12488 - DNA, 50 bp, Artificial
  Synthetic oligonucleotide
atcgatattagacaggaacccgggcatcaaattgatccgatcatacaagc

SEQ ID NO: 12489 - DNA, 60 bp, Artificial
  Synthetic oligonucleotide
cgggaagcttattattatacgaacatgcgagattctttaccaccaaatgagagatgtgta

SEQ ID NO: 12490 - DNA, 55 bp, Artificial
  Synthetic oligonucleotide
cgaacatgcgagattctttaccaccaaatgagagatgtgtatacttgaataagtc

SEQ ID NO: 12491 - DNA, 57 bp, Artificial
  Synthetic oligonucleotide
ttggttacttcgaacagtatctctgtcgagctatagagcctactaatcgtacggtcc

SEQ ID NO: 12492 - DNA, 60 bp, Artificial
  Synthetic oligonucleotide
gacagtattcactcagattccatgtctaacgacatgcactttgatcacgttgctatgctt

SEQ ID NO: 12493 - DNA, 60 bp, Artificial
  Synthetic oligonucleotide
cttcggacattctcgttccccttggacacgtcaatagagcacacagtactcacacgctag

SEQ ID NO: 12494 - DNA, 55 bp, Artificial
  Synthetic oligonucleotide
cgttccccttggacacgtcaatagagcacacagtactcacacgctagcgttgaag

SEQ ID NO: 12495 - DNA, 60 bp, Artificial
  Synthetic oligonucleotide
caatcatacacactactctactagtggctgctgtggttgcgttactgacatcagtttgca

SEQ ID NO: 12496 - DNA, 59 bp, Artificial
  Synthetic oligonucleotide
gagcaatcatacacactactctactagtggctgctgtggttgcgttgttgacatcagtc

SEQ ID NO: 12497 - DNA, 55 bp, Artificial
  Synthetic oligonucleotide
caggatgaaccaatctcgaagctttgttacggggagaggacgcgacttgtctcgg

SEQ ID NO: 12498 - DNA, 55 bp, Artificial
  Synthetic oligonucleotide
accaatctcgaagctttgttacggggagaggacgcgacttgtctcggactccttc

SEQ ID NO: 12499 - DNA, 51 bp, Artificial
  Synthetic oligonucleotide
ctgcgctgggccaatcgcaggggttgccatcccataaatgttcagctttgg

SEQ ID NO: 12500 - DNA, 58 bp, Artificial
  Synthetic oligonucleotide
aatttgactgatgtgaagccgacgaccgttgtgctgactgagtgtgccgctaacgcta

SEQ ID NO: 12501 - DNA, 60 bp, Artificial
  Synthetic oligonucleotide
aacctcggagacggtaggctgtggtacagtcactcaggtgatgattggagagcacgtaga

SEQ ID NO: 12502 - DNA, 55 bp, Artificial
  Synthetic oligonucleotide
ggcataataccaccagtaaacgttgacaaaccaataccattagggaggagagacg

SEQ ID NO: 12503 - DNA, 60 bp, Artificial
  Synthetic oligonucleotide
tcgcgaatttcttaatctggcgattagcaatacgtatacatctccaatgcatgctagacg

SEQ ID NO: 12504 - DNA, 55 bp, Artificial
  Synthetic oligonucleotide
ggcgattagcaatacgtatacatctccaatgcatgctagacgtatgataaggtcg

SEQ ID NO: 12505 - DNA, 54 bp, Artificial
  Synthetic oligonucleotide
atgctagacgtatgataaggtcgaaaacagtacaccccatttacttgggttcga

SEQ ID NO: 12506 - DNA, 60 bp, Artificial
  Synthetic oligonucleotide
gccaactcatacgcatcacggggtctctgtactcaaccctgacgcggtcggaattgacta

SEQ ID NO: 12507 - DNA, 60 bp, Artificial
  Synthetic oligonucleotide
gacattatttatcggatacacactgctgtaaccaatgatatcctctcggccaacgatgtt

SEQ ID NO: 12508 - DNA, 60 bp, Artificial
  Synthetic oligonucleotide
tcccccacgacagcttatggagatagatatccccaccccttaccatgcgattggctggag

SEQ ID NO: 12509 - DNA, 50 bp, Artificial
  Synthetic oligonucleotide
aaatacgacgctttacaacactcgtatgctggaggcgattctgcacatcg

SEQ ID NO: 12510 - DNA, 54 bp, Artificial
  Synthetic oligonucleotide
gcgttatggcgttgaacaattgtgaattgttcggtggtgggcacgtgtgtcctg

SEQ ID NO: 12511 - DNA, 60 bp, Artificial
  Synthetic oligonucleotide
atcaacgggtgatgtttggcttggagcgttggtgattcatgatccccgaagtcatgtctc

SEQ ID NO: 12512 - DNA, 55 bp, Artificial
  Synthetic oligonucleotide
gatggtccttatcaaccaactacatttacaccacctactgattactggatactta

SEQ ID NO: 12513 - DNA, 59 bp, Artificial
  Synthetic oligonucleotide
cggtgagaagattcattgcggaaatgaggcaacgcgtacaggctgacagaaacgttgtc

SEQ ID NO: 12514 - DNA, 54 bp, Artificial
  Synthetic oligonucleotide
tatagactaagagatagattgcggttattgccagtggaagtaagacgactagac

SEQ ID NO: 12515 - DNA, 52 bp, Artificial
  Synthetic oligonucleotide
acacaattgtacaagcaatgactcccagacatcgtgcgatttatccagaagg

SEQ ID NO: 12516 - DNA, 60 bp, Artificial
  Synthetic oligonucleotide
gctgcaaacgcaacgatgtctgccgacaagcaaattccgatgatccgaaagccctttacc

SEQ ID NO: 12517 - DNA, 60 bp, Artificial
  Synthetic oligonucleotide
cagctatagatggattagtgcagggtagtgtacactcgataataacgggtgaatcatatg

SEQ ID NO: 12518 - DNA, 52 bp, Artificial
  Synthetic oligonucleotide
gcgcaccatgggactcagatgacgtgttcttctttcattgcgtttcacacca

SEQ ID NO: 12519 - DNA, 60 bp, Artificial
  Synthetic oligonucleotide
ttgtgtatgatgacgaactacagatgcatatactacgtgggccgctccattttcagagac

SEQ ID NO: 12520 - DNA, 55 bp, Artificial
  Synthetic oligonucleotide
cagatgcatatactacgtgggccgctccattttcagagacgagcaatattgggtg

SEQ ID NO: 12521 - DNA, 55 bp, Artificial
  Synthetic oligonucleotide
ctctaggtgagttagtaagagatggcacggtcgcaatttcattcggacctgggat

SEQ ID NO: 12522 - DNA, 60 bp, Artificial
  Synthetic oligonucleotide
gtagctcaggcgcagattaggcacgttgtttcagggcagggcgtatggtgggagcatatg

SEQ ID NO: 12523 - DNA, 60 bp, Artificial
  Synthetic oligonucleotide
agagatggcacatctgacggcacgcccaggtcattttgagttacgcaacgttatcgacga

SEQ ID NO: 12524 - DNA, 60 bp, Artificial
  Synthetic oligonucleotide
atggacggatgtttcaacgagtgtaagcgacatatcgtcaactgtaagcagcgtttcatc

SEQ ID NO: 12525 - DNA, 52 bp, Artificial
  Synthetic oligonucleotide
ggctggaactgatggcttgttttacgcatataaagttagtacgttcaacgaa

SEQ ID NO: 12526 - DNA, 58 bp, Artificial
  Synthetic oligonucleotide
actaacgtgaatgtcaagtggtacggcggatccggtcccactcgctgtgatcttcgat

SEQ ID NO: 12527 - DNA, 60 bp, Artificial
  Synthetic oligonucleotide
gtcgttaagtctatcacctggaatgctgaatcctggaggtgtgccatggatcgcgattgg

SEQ ID NO: 12528 - DNA, 60 bp, Artificial
  Synthetic oligonucleotide
ccgcctcacagattggtcaagccacggtggttaactatgtccagctatatgctgaggaca

SEQ ID NO: 12529 - DNA, 60 bp, Artificial
  Synthetic oligonucleotide
gatgaaagagttccggctagcattagagcggggcgtataaggctaagatttccgctgagc

SEQ ID NO: 12530 - DNA, 55 bp, Artificial
  Synthetic oligonucleotide
ccggctagcattagagcggggcgtataaggctaagatttccgctgagcgcgcgac

SEQ ID NO: 12531 - DNA, 55 bp, Artificial
  Synthetic oligonucleotide
acaaaggacgaaccattcttaacgtcgacactatgtctatactatccgactgagg

SEQ ID NO: 12532 - DNA, 50 bp, Artificial
  Synthetic oligonucleotide
ttcgatgggattagcgaaattgcgtttggaggcttactactttgtttagg

SEQ ID NO: 12533 - DNA, 60 bp, Artificial
  Synthetic oligonucleotide
ttggcgaggccagagggcgatgagtggagtggccacgatgttacgcatatcccagatagg

SEQ ID NO: 12534 - DNA, 57 bp, Artificial
  Synthetic oligonucleotide
ctcagtttctaacgctaaggcgcaatcagcagatatttctaggtgatgacgcgtata

SEQ ID NO: 12535 - DNA, 60 bp, Artificial
  Synthetic oligonucleotide
agggcacgctacatgacgtttcgcaggttatggttcatctattcgacaggttctttgaga

SEQ ID NO: 12536 - DNA, 60 bp, Artificial
  Synthetic oligonucleotide
acgatttcgaatggtggcattcagacaagcatcgtctctacgaaagcgttgctttacgaa

SEQ ID NO: 12537 - DNA, 55 bp, Artificial
  Synthetic oligonucleotide
cgcggcgtatatggagatcgaacccgtacccatgtttacgtggaacgttgatcgc

SEQ ID NO: 12538 - DNA, 60 bp, Artificial
  Synthetic oligonucleotide
gtttacgtggaacgttgatcgctacagaatgcgtactcggagatgcatataaaacgcttc

SEQ ID NO: 12539 - DNA, 60 bp, Artificial
  Synthetic oligonucleotide
gcgagacttacatccagatcggaagttgaatatccgtactactacgatcgatggatttat

SEQ ID NO: 12540 - DNA, 60 bp, Artificial
  Synthetic oligonucleotide
tttacgaaatgtcgctccatccactccaaagttcttgtacgatgtatggcgtgatgcggc

SEQ ID NO: 12541 - DNA, 60 bp, Artificial
  Synthetic oligonucleotide
cgcaagccgcacgtgtcggtatatcggggatgtgtgcgaatgttggcaatgcacgtaagt

SEQ ID NO: 12542 - DNA, 52 bp, Artificial
  Synthetic oligonucleotide
ctacgctacacgcctgcagtattcacgtcgtagtgcgttcgtggtccgaagt

SEQ ID NO: 12543 - DNA, 60 bp, Artificial
  Synthetic oligonucleotide
acgacacatcactccgcatgccgtgctctccgtgcgtactccggcttacggccgcatgcc

SEQ ID NO: 12544 - DNA, 60 bp, Artificial
  Synthetic oligonucleotide
cccgcctcatggttcgacggactgctccgctcacccatctaccccgatgaggcacccata

SEQ ID NO: 12545 - DNA, 60 bp, Artificial
  Synthetic oligonucleotide
acgcttacacagaggggatcgtctctcatcgtatatgtaagaagaacgtattaggatata

SEQ ID NO: 12546 - DNA, 60 bp, Artificial
  Synthetic oligonucleotide
gttgatgcctacacagaggggatcgtctctcatcgtatatgcaagaagaacgtattaggg

SEQ ID NO: 12547 - DNA, 60 bp, Artificial
  Synthetic oligonucleotide
taaataggtatgcccaaatggcggttcagcaatatctacgagtcggatacatcgaggaac

SEQ ID NO: 12548 - DNA, 54 bp, Artificial
  Synthetic oligonucleotide
aaacttcgagtatgtgaggggattcatgcagggtcgacataagtgccaactgtg

SEQ ID NO: 12549 - DNA, 60 bp, Artificial
  Synthetic oligonucleotide
gatgcctatcgcctcttgccgctcactgtgctgatagaacccttcgccgtgacaacgtga

SEQ ID NO: 12550 - DNA, 53 bp, Artificial
  Synthetic oligonucleotide
gttaaaacatgccggagccacatgcagtgatctatgttacggaggaattggtg

SEQ ID NO: 12551 - DNA, 60 bp, Artificial
  Synthetic oligonucleotide
gtcaggataccgcgtgaagtgacaaagaacatagacgtcaaagcattcgaatcgattgtt

SEQ ID NO: 12552 - DNA, 55 bp, Artificial
  Synthetic oligonucleotide
gcgtgaagtgacaaagaacatagacgtcaaagcattcgaatcgattgttgggcgc

SEQ ID NO: 12553 - DNA, 60 bp, Artificial
  Synthetic oligonucleotide
gtgccggttcatcggactgcgagtcgaatcctccttaatgagaatacagaatccgagagt

SEQ ID NO: 12554 - DNA, 57 bp, Artificial
  Synthetic oligonucleotide
gtgtcgggacatctgtatgtcacgttgctgagtggatcatatgtcacggatctattg

SEQ ID NO: 12555 - DNA, 60 bp, Artificial
  Synthetic oligonucleotide
ttacaacccggattctcactggcatatctcggagcgtccgctgcacatgctaagtccgat

SEQ ID NO: 12556 - DNA, 60 bp, Artificial
  Synthetic oligonucleotide
tcacatttatcctactggttcagcgacatactgtcctggtgcaatcgcaaatgctatttc

SEQ ID NO: 12557 - DNA, 54 bp, Artificial
  Synthetic oligonucleotide
acattataccaagagcacaagaatcaaagtgcacagaatacgtaaataatggat

SEQ ID NO: 12558 - DNA, 50 bp, Artificial
  Synthetic oligonucleotide
taggatcgaagatctattcacaagataaatatcgcatactagagtcatac

SEQ ID NO: 12559 - DNA, 50 bp, Artificial
  Synthetic oligonucleotide
atccctacctcgctgatccttctggagctaggcgcgtctatgctgccacg

SEQ ID NO: 12560 - DNA, 54 bp, Artificial
  Synthetic oligonucleotide
ctcaggtcacttcgccctccctcccctcacttgaatgatggagacgtggagagg

SEQ ID NO: 12561 - DNA, 52 bp, Artificial
  Synthetic oligonucleotide
atactcgctacgtagagtaactgtctgaatgatgtagtgagaggatgtgacc

SEQ ID NO: 12562 - DNA, 55 bp, Artificial
  Synthetic oligonucleotide
cagcgacatactgtcctggtgcaatcgcaaatgctatttctcgccttatggctgg

SEQ ID NO: 12563 - DNA, 60 bp, Artificial
  Synthetic oligonucleotide
gagtcaagattgggtgagatggataatcgacttgtgggtatctcgagtcaggtcacgcaa

SEQ ID NO: 12564 - DNA, 60 bp, Artificial
  Synthetic oligonucleotide
ctcgagtcaggtcacgcaattatctaactcagttagccagaacactcagagcatatccct

SEQ ID NO: 12565 - DNA, 60 bp, Artificial
  Synthetic oligonucleotide
catacaccggtcatactcaagtatattgggctccgtggacgatcatgtatccatgcaatg

SEQ ID NO: 12566 - DNA, 60 bp, Artificial
  Synthetic oligonucleotide
gttagccaatattgatgatcattcaagggttaagatgcacggtaattcacgtgatggctt

SEQ ID NO: 12567 - DNA, 57 bp, Artificial
  Synthetic oligonucleotide
gctactaactgcagtaccaaacgacatgttcataagggaatcactagtcgcatgtca

SEQ ID NO: 12568 - DNA, 52 bp, Artificial
  Synthetic oligonucleotide
acctctaaagggtccagggtaccttcttgacgtagtgcgattttacacttac

SEQ ID NO: 12569 - DNA, 60 bp, Artificial
  Synthetic oligonucleotide
gcttttctccacatggcctatctagccacacctgtgctaggagtcggttctcgtattacc

SEQ ID NO: 12570 - DNA, 60 bp, Artificial
  Synthetic oligonucleotide
cctccaagatgtgcacacaattgatcctacactgactctgcgccagatagagttaatctc

SEQ ID NO: 12571 - DNA, 57 bp, Artificial
  Synthetic oligonucleotide
gttactaactgtggtaccaaacgacatgttcataagggaatcgttagttgcatgtca

SEQ ID NO: 12572 - DNA, 54 bp, Artificial
  Synthetic oligonucleotide
cacgtcctcagtcactggcggctaatgcgtccgggcggatagattccattggac

SEQ ID NO: 12573 - DNA, 57 bp, Artificial
  Synthetic oligonucleotide
cgtagtgtggagtttcggtctcttacttacgcgcatgctgactctgaatttcttaac

SEQ ID NO: 12574 - DNA, 60 bp, Artificial
  Synthetic oligonucleotide
tgttagatctgtttgactggtctcgattccgcgcgactataaacgtagacacgtctctag

SEQ ID NO: 12575 - DNA, 59 bp, Artificial
  Synthetic oligonucleotide
tgatgtccatagtacctacaaccatgttcattcgagaatcattagtagcatgtcagcta

SEQ ID NO: 12576 - DNA, 57 bp, Artificial
  Synthetic oligonucleotide
ttggcacgcgacgtcaacggttatcaacagattaacttggaagagctaatgcgttct

SEQ ID NO: 12577 - DNA, 55 bp, Artificial
  Synthetic oligonucleotide
gtcgacaacgaaagtgtttaagcaagtaccgcagacttttgactttcgtgcagcg

SEQ ID NO: 12578 - DNA, 57 bp, Artificial
  Synthetic oligonucleotide
aatggttggtatcaactatgtgttaagatacaacgcgctatcgataacggattggag

SEQ ID NO: 12579 - DNA, 60 bp, Artificial
  Synthetic oligonucleotide
ggcttagaggtgcatttggcgatctaaatcaacatgtgtttgcgaggacggattcacctg

SEQ ID NO: 12580 - DNA, 60 bp, Artificial
  Synthetic oligonucleotide
acgcaactcaacaggataagaacagaatggataggcgcgtcatatgatagaactcggatt

SEQ ID NO: 12581 - DNA, 53 bp, Artificial
  Synthetic oligonucleotide
gccgtgttaaaatgggctctaggttagtgcgtggtacgcgtgataaacgtata

SEQ ID NO: 12582 - DNA, 57 bp, Artificial
  Synthetic oligonucleotide
actactggcgtagaatcaccatacttaggagcttgtgagggtgttaggatggtgcat

SEQ ID NO: 12583 - DNA, 60 bp, Artificial
  Synthetic oligonucleotide
catcttggtactcagtcattgattactcaatgtttacgcgaacagcattagttggatttg

SEQ ID NO: 12584 - DNA, 54 bp, Artificial
  Synthetic oligonucleotide
taaagcagcaactcagcgtcctaacatcatggcgtatgtgcacgaaggggaagg

SEQ ID NO: 12585 - DNA, 60 bp, Artificial
  Synthetic oligonucleotide
ttcagtcggagtaatgatcccttagctttgcaggctcgttatgctcaaatgtatgatgat

SEQ ID NO: 12586 - DNA, 60 bp, Artificial
  Synthetic oligonucleotide
ggacctacaaagaatgttctattacgtcggatttgtctactatgcacagagacttatatg

SEQ ID NO: 12587 - DNA, 60 bp, Artificial
  Synthetic oligonucleotide
agcgaccttcatagattcggctgctataacgccgacgaatatgacgcagcctgacgtctg

SEQ ID NO: 12588 - DNA, 60 bp, Artificial
  Synthetic oligonucleotide
caactagcaatagtaaacacaataatatatccagcgtttggaatgcagcgtatgcactat

SEQ ID NO: 12589 - DNA, 55 bp, Artificial
  Synthetic oligonucleotide
aacacaataatatatccagcgtttggaatgcagcgtatgcactatagaaacggtg

SEQ ID NO: 12590 - DNA, 60 bp, Artificial
  Synthetic oligonucleotide
gaacgtgcttcagataaaattgcgcagggtgttatcatcgcatatcgtgatatgcagtta

SEQ ID NO: 12591 - DNA, 55 bp, Artificial
  Synthetic oligonucleotide
tgcgcagggtgttatcatcgcatatcgtgatatgcagttagagagagatgaaatg

SEQ ID NO: 12592 - DNA, 60 bp, Artificial
  Synthetic oligonucleotide
atactgacacaagctgggttcagtggatgattaaagatagtatggatcaacagccgctta

SEQ ID NO: 12593 - DNA, 60 bp, Artificial
  Synthetic oligonucleotide
gtatgcaattaagccgacgtatcagttaatagtgcattcggagagagcgtcgacttcaga

SEQ ID NO: 12594 - DNA, 60 bp, Artificial
  Synthetic oligonucleotide
cgaagctggtccatcgagcaaggttatacattgggagtatcaattatataaacgagagcg

SEQ ID NO: 12595 - DNA, 60 bp, Artificial
  Synthetic oligonucleotide
tgactgatgatcccgtcgagctacagagatatactttagccagatactatgatatccgtc

SEQ ID NO: 12596 - DNA, 55 bp, Artificial
  Synthetic oligonucleotide
gacatttgttcctgtccgctatagtcaagatcgcgaccgtagctatgtccacgcg

SEQ ID NO: 12597 - DNA, 60 bp, Artificial
  Synthetic oligonucleotide
tgctccggaacgaccttgttagacgtcgtgagattcgagacatcatgtaccgtccatatg

SEQ ID NO: 12598 - DNA, 59 bp, Artificial
  Synthetic oligonucleotide
ggccaacagctctgattaagcttaatgttgtccagacaaccaatgttcgagggggaatg

SEQ ID NO: 12599 - DNA, 56 bp, Artificial
  Synthetic oligonucleotide
tgttgaagcttaccgacgttcacaagattcgaagtacaaacgcaacgtttgtaaga

SEQ ID NO: 12600 - DNA, 60 bp, Artificial
  Synthetic oligonucleotide
tatatatggctagtcagtccaacggacgcccaagccactataacgataggaagcgtcatg

SEQ ID NO: 12601 - DNA, 60 bp, Artificial
  Synthetic oligonucleotide
tcagtccaacggatgctcaagccactataacgataggaagcgtcatggagagtgagtctt

SEQ ID NO: 12602 - DNA, 60 bp, Artificial
  Synthetic oligonucleotide
gccactataacgataggaagcgtcatggagagtgagtcttctgacgatttccccgatatc

SEQ ID NO: 12603 - DNA, 59 bp, Artificial
  Synthetic oligonucleotide
catgtgtcgtcacgacgacggaatgactctagagatgattcgacagtacgcaatgtctc

SEQ ID NO: 12604 - DNA, 53 bp, Artificial
  Synthetic oligonucleotide
tacaccctcacattatgacaactccgcatttccatcacatttcgtcagtatcg

SEQ ID NO: 12605 - DNA, 60 bp, Artificial
  Synthetic oligonucleotide
cgcggcatagttattaataacgtgacatatccactcagcgaatcgggcccaccaatcgaa

SEQ ID NO: 12606 - DNA, 60 bp, Artificial
  Synthetic oligonucleotide
gacgcttttcattacagactctggccccgacttgcttcaattccttggagatatagtgac

SEQ ID NO: 12607 - DNA, 53 bp, Artificial
  Synthetic oligonucleotide
ggaaattgtacaaccctcgacgacatgtgcaaaacaatgatcacgaacatggg

SEQ ID NO: 12608 - DNA, 51 bp, Artificial
  Synthetic oligonucleotide
ccctctattgttccgaaagtcgatcaaactagcccaataccattgggtaga

SEQ ID NO: 12609 - DNA, 55 bp, Artificial
  Synthetic oligonucleotide
tcgcaggggggagtgaacgtacctgttgtgacatccaagttggacacattgaaga

SEQ ID NO: 12610 - DNA, 55 bp, Artificial
  Synthetic oligonucleotide
tgctatagttgagaaaatgttgcagtacgccaaacatacacgagaatacgctgag

SEQ ID NO: 12611 - DNA, 60 bp, Artificial
  Synthetic oligonucleotide
taccagcaaacgtgcaatatgtcttacgatgtataggttcacgtacatatcaaattgagg

SEQ ID NO: 12612 - DNA, 50 bp, Artificial
  Synthetic oligonucleotide
gtcactgggagtaccaaatattgactcgtcagcatatatagaatctaaag

SEQ ID NO: 12613 - DNA, 55 bp, Artificial
  Synthetic oligonucleotide
caatcacgaccttcaagcaacgttggatgcgatcaattggatttctccttgacca

SEQ ID NO: 12614 - DNA, 60 bp, Artificial
  Synthetic oligonucleotide
atgtggattaatgccggatcagaaatccaagtagccggatttgattactcatgtgctctt

SEQ ID NO: 12615 - DNA, 59 bp, Artificial
  Synthetic oligonucleotide
actaagacgtgcccttacaacggctacaattactctgctaccagatgccgaaagattca

SEQ ID NO: 12616 - DNA, 54 bp, Artificial
  Synthetic oligonucleotide
gttagcggttagctccttttaatgtatgggatcgaatatacaacggctctaacc

SEQ ID NO: 12617 - DNA, 60 bp, Artificial
  Synthetic oligonucleotide
aggaagtactgtcgatttaatgcaatcagacgaatcggagaggatgtttggacgcatgct

SEQ ID NO: 12618 - DNA, 58 bp, Artificial
  Synthetic oligonucleotide
tgactcctcctctaatttggccctgtgttatatcgagagaagttaacgtcactggcct

SEQ ID NO: 12619 - DNA, 60 bp, Artificial
  Synthetic oligonucleotide
accaaacaacgcactaccattggatctccgagactatgtcgaagttgagtactcgcacga

SEQ ID NO: 12620 - DNA, 55 bp, Artificial
  Synthetic oligonucleotide
tagaactcggattagggcgttggagttgtgtaatatattatccgctattggacgt

SEQ ID NO: 12621 - DNA, 52 bp, Artificial
  Synthetic oligonucleotide
tgcctatgtcaacggaaaaccctactgaagtcgacacaatcgccaggttagg

SEQ ID NO: 12622 - DNA, 51 bp, Artificial
  Synthetic oligonucleotide
caagagggccagttacaggtgtattcctccggtatagtaagacatcgtata

SEQ ID NO: 12623 - DNA, 60 bp, Artificial
  Synthetic oligonucleotide
ttctcgagttgagagggatccccttaggcatggaatcattagtgggagtcatggttgttc

SEQ ID NO: 12624 - DNA, 60 bp, Artificial
  Synthetic oligonucleotide
tgttcgtactgctgcaccttctattgctcggagagcgacccccagctgatgaactagctc

SEQ ID NO: 12625 - DNA, 60 bp, Artificial
  Synthetic oligonucleotide
ggacgttcatttgtcgagacagtcctacgtgctcagcgtacaaaggacatctattctctc

SEQ ID NO: 12626 - DNA, 52 bp, Artificial
  Synthetic oligonucleotide
tagactcccactgctgtataacgggggagggtgcgcggccctacacacttac

SEQ ID NO: 12627 - DNA, 51 bp, Artificial
  Synthetic oligonucleotide
caatatctacgagttggctatctcgaggagagacgttatgtcacgcaacta

SEQ ID NO: 12628 - DNA, 55 bp, Artificial
  Synthetic oligonucleotide
agtggatatctatgggtgaggaatgtactgtaaaggtgtgcccactggatacaca

SEQ ID NO: 12629 - DNA, 57 bp, Artificial
  Synthetic oligonucleotide
ctagatatcacagctgatccaacaactgcgccacaaattgaaaggatgatgcgtgtc

SEQ ID NO: 12630 - DNA, 60 bp, Artificial
  Synthetic oligonucleotide
gtgcaaggtgcacagctcatcaagcgagtggtcgaacgcttttacccagggatagtattt

SEQ ID NO: 12631 - DNA, 55 bp, Artificial
  Synthetic oligonucleotide
caacggatggaagcgatttagccctaattgatacgcacctctccggcgagaactc

SEQ ID NO: 12632 - DNA, 60 bp, Artificial
  Synthetic oligonucleotide
atggattcacgctaatacagatccgaaatcccttagcattatatgtcccaataggttgga

SEQ ID NO: 12633 - DNA, 60 bp, Artificial
  Synthetic oligonucleotide
aagagatgtatgttgattcaatcatgatctcaaagctggacgagattatggcgccgataa

SEQ ID NO: 12634 - DNA, 57 bp, Artificial
  Synthetic oligonucleotide
taagaagtaatctgtttgaaacgctacgatcagaaaattctgagataccaagggaac

SEQ ID NO: 12635 - DNA, 60 bp, Artificial
  Synthetic oligonucleotide
cataacgctaattagtagtgtagagttaagtcatggagaagtgttatcacgacagcagaa

SEQ ID NO: 12636 - DNA, 57 bp, Artificial
  Synthetic oligonucleotide
atggaattatgtgatcgcgaagcttctagtgtacagttgtatggatgtagagcgtac

SEQ ID NO: 12637 - DNA, 53 bp, Artificial
  Synthetic oligonucleotide
aataagcttaccttcggaggatacgttcctgtatcaacaatagacatggacgc

SEQ ID NO: 12638 - DNA, 60 bp, Artificial
  Synthetic oligonucleotide
taggattgcaacgcttgagagaacagccgtgacgagtgcggccgctccgttatcgatctc

SEQ ID NO: 12639 - DNA, 60 bp, Artificial
  Synthetic oligonucleotide
ataacgcattcaagtagcaagtggcctgcaatgaccatttcctatccacgcagcttcacg

SEQ ID NO: 12640 - DNA, 60 bp, Artificial
  Synthetic oligonucleotide
aagatcagaagaagcaacatgtacagaatacattaacaatggtctacctccaatccagaa

SEQ ID NO: 12641 - DNA, 55 bp, Artificial
  Synthetic oligonucleotide
gtacagaatacattaacaatggtctacctccaatccagaacacgcggaatgtggt

SEQ ID NO: 12642 - DNA, 55 bp, Artificial
  Synthetic oligonucleotide
gtagagttaagtcatggagaagtgttatcacgacagcagaaccattggatagcgt

SEQ ID NO: 12643 - DNA, 51 bp, Artificial
  Synthetic oligonucleotide
cttttaggtgttccttacgtccagggagcttttagacatggcgtaatttca

SEQ ID NO: 12644 - DNA, 56 bp, Artificial
  Synthetic oligonucleotide
gtaatgtgtacgggaggtgattacagctttgcattaccagttggtcaatggccagt

SEQ ID NO: 12645 - DNA, 55 bp, Artificial
  Synthetic oligonucleotide
ggatgagggccgaaagacagagcactgtgaaactacgtccatcccttcaagctgt

SEQ ID NO: 12646 - DNA, 60 bp, Artificial
  Synthetic oligonucleotide
tccccctgcgccaaacgtgattgcacagcgtcagagggaacaggcgttggcacgacaggt

SEQ ID NO: 12647 - DNA, 55 bp, Artificial
  Synthetic oligonucleotide
catgttttaccacgaccgagacaagagttaatagagaggcttgaacaaattcgag

SEQ ID NO: 12648 - DNA, 53 bp, Artificial
  Synthetic oligonucleotide
gtaatatcgatcctgagatctacaatgagggacggttcatgtttatgcagcac

SEQ ID NO: 12649 - DNA, 60 bp, Artificial
  Synthetic oligonucleotide
gcttttcagcgagtgctctctcagggatacgcatcattaatgtgctattatcacccttca

SEQ ID NO: 12650 - DNA, 60 bp, Artificial
  Synthetic oligonucleotide
gcgatccagtgacatggtagacgggattaaactacagttggacgcatctagacagtgtca

SEQ ID NO: 12651 - DNA, 60 bp, Artificial
  Synthetic oligonucleotide
gacagcagaaccattggatagcgtatgcctgctttgattcttccgatgcgcttttagtca

SEQ ID NO: 12652 - DNA, 60 bp, Artificial
  Synthetic oligonucleotide
cgactccagatggagttaagtcggactcagtccctgaatgctcagttggaagcggatgct

SEQ ID NO: 12653 - DNA, 59 bp, Artificial
  Synthetic oligonucleotide
tctcatatcgttaagagtggatttctgccgatatggagactgactggagatgagagtct

SEQ ID NO: 12654 - DNA, 60 bp, Artificial
  Synthetic oligonucleotide
ggaccgaaatcgctgaacttaataggataagagatgagtggaaaaacgctgcatatgata

SEQ ID NO: 12655 - DNA, 50 bp, Artificial
  Synthetic oligonucleotide
cagactagatatgctccagttgattggggacacggagagattaatgattc

SEQ ID NO: 12656 - DNA, 60 bp, Artificial
  Synthetic oligonucleotide
gaattacgaacgattggacccgagtttacatgaggggagggagcatgagacatacacgca

SEQ ID NO: 12657 - DNA, 60 bp, Artificial
  Synthetic oligonucleotide
cgatttgcgtgagccagggtggacaactgagggtgcattctatggggataacgaaacatc

SEQ ID NO: 12658 - DNA, 60 bp, Artificial
  Synthetic oligonucleotide
aaacactcattgcgtagccacagggtcccagagccacgtgtacgtcgcactagcctcagt

SEQ ID NO: 12659 - DNA, 55 bp, Artificial
  Synthetic oligonucleotide
gcgtagccacagggtcccagagccacgtgtacgtcgcactagcctcagtgattct

SEQ ID NO: 12660 - DNA, 60 bp, Artificial
  Synthetic oligonucleotide
tagcctcagtgattctagtgactctagctatatcactgatttggaactgtctcggcaccg

SEQ ID NO: 12661 - DNA, 55 bp, Artificial
  Synthetic oligonucleotide
actctagctatatcactgatttggaactgtctcggcaccggtctaatcctgtggc

SEQ ID NO: 12662 - DNA, 52 bp, Artificial
  Synthetic oligonucleotide
tcatatcgctgatgcgtcctccccccaatgcgtccgtcatcgtgttagaatg

SEQ ID NO: 12663 - DNA, 60 bp, Artificial
  Synthetic oligonucleotide
tcaagagatagcttacgctctgaagcctacatatgatatcgttgtgcacgctgaaaggag

SEQ ID NO: 12664 - DNA, 60 bp, Artificial
  Synthetic oligonucleotide
cgaatcaaacatggcgaaattgcacaacgacggaatgatgacccaatggtgaaacgtaca

SEQ ID NO: 12665 - DNA, 60 bp, Artificial
  Synthetic oligonucleotide
cctattgtgttgcagaggttaacattagcgcgtttctatgacatccgtcctgctataatg

SEQ ID NO: 12666 - DNA, 56 bp, Artificial
  Synthetic oligonucleotide
ggaggcgaacggtcagaggagtatacgaatcacgatacatggtgacacgtataagg

SEQ ID NO: 12667 - DNA, 54 bp, Artificial
  Synthetic oligonucleotide
ggttacgcaagcgtatagttcgggattgtcacagaacagtatcattagtctaac

SEQ ID NO: 12668 - DNA, 56 bp, Artificial
  Synthetic oligonucleotide
gactgatctaattaacaggattcgtgagaatgaagtcaccgttaatggtattctag

SEQ ID NO: 12669 - DNA, 60 bp, Artificial
  Synthetic oligonucleotide
caactgaatatgcttcatggcaattatacgtcatacatcccgttcaaggttcattaggtt

SEQ ID NO: 12670 - DNA, 50 bp, Artificial
  Synthetic oligonucleotide
caacacttcattgcaaactagaaggtaagcaaaatatcgctggatataca

SEQ ID NO: 12671 - DNA, 57 bp, Artificial
  Synthetic oligonucleotide
gagctacaaatccgcttgtcaggggaaactggatgtactaatgggatttgacccgac

SEQ ID NO: 12672 - DNA, 60 bp, Artificial
  Synthetic oligonucleotide
cttcaattactgagtatgctgaacagatatcagacgaatttgctaaggctcgaaaaccga

SEQ ID NO: 12673 - DNA, 55 bp, Artificial
  Synthetic oligonucleotide
atgctgaacagatatcagacgaatttgctaaggctcgaaaaccgattttagtccc

SEQ ID NO: 12674 - DNA, 60 bp, Artificial
  Synthetic oligonucleotide
tcccgacctgtggcgtaattgatgtacgcgcatcagagctaacggggtgctcgccattca

SEQ ID NO: 12675 - DNA, 58 bp, Artificial
  Synthetic oligonucleotide
ctcccccggaatttacatacaatccagctcagaatcggatcgctctaacagacacatc

SEQ ID NO: 12676 - DNA, 60 bp, Artificial
  Synthetic oligonucleotide
gtcgtgccttacagatgtggcaaccaaacatacgccgaagacggagcgaacattctacat

SEQ ID NO: 12677 - DNA, 55 bp, Artificial
  Synthetic oligonucleotide
ggcaaccaaacatacgccgaagacggagcgaacattctacatccgaaggctcatc

SEQ ID NO: 12678 - DNA, 51 bp, Artificial
  Synthetic oligonucleotide
cattctacatccgaaggctcatctgttaaagcaggcttacgcagttcaaaa

SEQ ID NO: 12679 - DNA, 54 bp, Artificial
  Synthetic oligonucleotide
ccgctctgtacgttgtcaacgtgtgactttgggtttcatagtcccgcacttcca

SEQ ID NO: 12680 - DNA, 60 bp, Artificial
  Synthetic oligonucleotide
gatagatggtttgcttgcgtattagttgaaccaaatgtgcaaagtacacaaagacagtac

SEQ ID NO: 12681 - DNA, 60 bp, Artificial
  Synthetic oligonucleotide
tggcggtgagtgagccatcattttctatttcgcgaactagaatgagtggcatatacggat

SEQ ID NO: 12682 - DNA, 58 bp, Artificial
  Synthetic oligonucleotide
tatctctgcagccgtactaaaaacgaaactagacaaatcaacgcaaatttcacagcag

SEQ ID NO: 12683 - DNA, 59 bp, Artificial
  Synthetic oligonucleotide
cgtatcgaataattgatgaggataccgcattcgagactgggattgatggaacgttttat

SEQ ID NO: 12684 - DNA, 55 bp, Artificial
  Synthetic oligonucleotide
gcgaacagatatgatgtggcaactgcgatcaaattatttagatacgtgtcctcgt

SEQ ID NO: 12685 - DNA, 51 bp, Artificial
  Synthetic oligonucleotide
atttagatacgtgtcctcgtatctgtgatagaagaaagtatctaatgtgcc

SEQ ID NO: 12686 - DNA, 58 bp, Artificial
  Synthetic oligonucleotide
ttcgaacagtatggccgcatttgacgaagtattggttaaatatcgaattcccacgcag

SEQ ID NO: 12687 - DNA, 52 bp, Artificial
  Synthetic oligonucleotide
ttcattgagcacgttatttggtactcccttcgtccagggagcatatcggcag

SEQ ID NO: 12688 - DNA, 60 bp, Artificial
  Synthetic oligonucleotide
atccaaagtggtagatcttaatacagcgatgataagtgaaacttcactcccatctgcatc

SEQ ID NO: 12689 - DNA, 55 bp, Artificial
  Synthetic oligonucleotide
gcgattacattacaagcggttaaagcgatcaaagataagactggtgcgacgacac

SEQ ID NO: 12690 - DNA, 53 bp, Artificial
  Synthetic oligonucleotide
tgggaggacaccgatcacaggttaggtttatgtgaggtcgaacatactgtgtc

SEQ ID NO: 12691 - DNA, 60 bp, Artificial
  Synthetic oligonucleotide
acaaacttgatttggatctcgctgtatatattgcaaagtttgatccaagtacgcgtgtta

SEQ ID NO: 12692 - DNA, 60 bp, Artificial
  Synthetic oligonucleotide
gtcagcgaactatgtcgttagactttgtgactaccaactacatgtcgctaatttcaggta

SEQ ID NO: 12693 - DNA, 60 bp, Artificial
  Synthetic oligonucleotide
gacgttgatgttacgcgatatcggcataacacatgagataataagaccatcgacgcctga

SEQ ID NO: 12694 - DNA, 55 bp, Artificial
  Synthetic oligonucleotide
catgtaaattgtttcggtctgttgcggggcagactgggaacataccactaatggg

SEQ ID NO: 12695 - DNA, 60 bp, Artificial
  Synthetic oligonucleotide
tgggtaacgctcgtaagtcgattgccatttatgaatcgcatggggccagagtattgacca

SEQ ID NO: 12696 - DNA, 56 bp, Artificial
  Synthetic oligonucleotide
aactttatagtaggacagaactgttcactagtgattcctggctttaacgcgcagga

SEQ ID NO: 12697 - DNA, 60 bp, Artificial
  Synthetic oligonucleotide
gccgctaagcctatgaggaatgacgggatcgtggttcctagactgcttgatattactctt

SEQ ID NO: 12698 - DNA, 60 bp, Artificial
  Synthetic oligonucleotide
ctgatcacaaattctgagaggaatagtaccgaagaaacttacgcgcctggagtgcacaat

SEQ ID NO: 12699 - DNA, 60 bp, Artificial
  Synthetic oligonucleotide
tgggcgatcaagtagtacattggatgtatgaagttgacggcccagctgagacaacgtatg

SEQ ID NO: 12700 - DNA, 60 bp, Artificial
  Synthetic oligonucleotide
ctactcacccatgtttaacgcgcggttgcgaataactcatggagagattgcgactagaaa

SEQ ID NO: 12701 - DNA, 56 bp, Artificial
  Synthetic oligonucleotide
atagtgtaaacccttttctgtcgggtacggagctaaagaatgatgatggtccattg

SEQ ID NO: 12702 - DNA, 58 bp, Artificial
  Synthetic oligonucleotide
gggagtctcaactacgcggccaaattgcaggacaggaaatcgaaaccgcagcgccgga

SEQ ID NO: 12703 - DNA, 52 bp, Artificial
  Synthetic oligonucleotide
agattctgaagaagccaccggtttcatatagatatataagtgcccagtctga

SEQ ID NO: 12704 - DNA, 50 bp, Artificial
  Synthetic oligonucleotide
cgctcctataccactgtgatgaagttgcgtggcagtgtttggacactcca

SEQ ID NO: 12705 - DNA, 51 bp, Artificial
  Synthetic oligonucleotide
gtcactatagagtcgttaaatactcatcagttgctaatcacgccgatagag

SEQ ID NO: 12706 - DNA, 60 bp, Artificial
  Synthetic oligonucleotide
cgaattgggttcagtggatgattgatgacgcaatggatgtccaacctcttaaggtagata

SEQ ID NO: 12707 - DNA, 60 bp, Artificial
  Synthetic oligonucleotide
cagatgcttgacggagacagcgcagtatgtattcgagaaaacatgcttatacgtactaga

SEQ ID NO: 12708 - DNA, 55 bp, Artificial
  Synthetic oligonucleotide
gccctcggaggattctgaagtaacgtttgaacacccaacaattgatcccagcgtc

SEQ ID NO: 12709 - DNA, 51 bp, Artificial
  Synthetic oligonucleotide
gtgggagtgtgatgagtaacgtgataacgaccaagcggctattgtatgaaa

SEQ ID NO: 12710 - DNA, 60 bp, Artificial
  Synthetic oligonucleotide
gttcgtgatatcatccgttggtgtgatagtcgtgcgttgcaaagatcattggcttacgag

SEQ ID NO: 12711 - DNA, 55 bp, Artificial
  Synthetic oligonucleotide
atccgttggtgtgatagtcgtgcgttgcaaagatcattggcttacgagttggaac

SEQ ID NO: 12712 - DNA, 59 bp, Artificial
  Synthetic oligonucleotide
ataatcgtgatgggcgtagtgttacctcgtgcttcgacggacgtattaagaacagcata

SEQ ID NO: 12713 - DNA, 60 bp, Artificial
  Synthetic oligonucleotide
agaacagaccgatagatgcattgccttggaatgatccggcccaattgaggaatgaactgc

SEQ ID NO: 12714 - DNA, 60 bp, Artificial
  Synthetic oligonucleotide
tcgaacgtccagaagaagcgcctatcatgtcatacgttaatgggatgtctcgtgtcattg

SEQ ID NO: 12715 - DNA, 60 bp, Artificial
  Synthetic oligonucleotide
tagcggtcggcgaccagataattcattggcgttatgaggttaaagcatcggcggagacga

SEQ ID NO: 12716 - DNA, 55 bp, Artificial
  Synthetic oligonucleotide
attcattggcgttatgaggttaaagcatcggcggagacgacctatgacagcggat

SEQ ID NO: 12717 - DNA, 54 bp, Artificial
  Synthetic oligonucleotide
gtgatattagtgaggatgccggggtacgttttcggaaatgatgaattaatgacg

SEQ ID NO: 12718 - DNA, 53 bp, Artificial
  Synthetic oligonucleotide
caccagaggatctagaccgtgtgcgtactgagggaggttcactagtggagtta

SEQ ID NO: 12719 - DNA, 60 bp, Artificial
  Synthetic oligonucleotide
gacagatcctctgcaggtagtggatgatcttgacactaagctggatcaatactggacggc

SEQ ID NO: 12720 - DNA, 60 bp, Artificial
  Synthetic oligonucleotide
aggactatgcagcaggcccccattgtactaactcccgctgctctcacaatgttctcagac

SEQ ID NO: 12721 - DNA, 60 bp, Artificial
  Synthetic oligonucleotide
tccaaaattgatagttagacagtcggctgtgatgcgtggctctgacacgccatataccac

SEQ ID NO: 12722 - DNA, 55 bp, Artificial
  Synthetic oligonucleotide
gacagtcggctgtgatgcgtggctctgacacgccatataccaccccaatcgaacc

SEQ ID NO: 12723 - DNA, 60 bp, Artificial
  Synthetic oligonucleotide
caaaggcgctagaccaattcgatctaagtatgtattttcgacttgcatatgcagcgccct

SEQ ID NO: 12724 - DNA, 58 bp, Artificial
  Synthetic oligonucleotide
tttgaaacccgtagatggtagcacattctttgagtcacccacactcgatgtattttac

SEQ ID NO: 12725 - DNA, 60 bp, Artificial
  Synthetic oligonucleotide
gaagaatccgacataccctccgagaccgcagccttatggtatggggccgatgaatggtga

SEQ ID NO: 12726 - DNA, 60 bp, Artificial
  Synthetic oligonucleotide
tagagccataatgaagcgcgctgacttccgacttgtaatgcatgagacggatgaggttcg

SEQ ID NO: 12727 - DNA, 60 bp, Artificial
  Synthetic oligonucleotide
cgtctgggcgtgatcttgtgtcttccgtgtactccgcgactggtatgtctgccgcagctc

SEQ ID NO: 12728 - DNA, 60 bp, Artificial
  Synthetic oligonucleotide
gcgtggctatggtttgcgctggtcttgattgtgacgacatccacgagattgcccctgctc

SEQ ID NO: 12729 - DNA, 59 bp, Artificial
  Synthetic oligonucleotide
gaccctttcatcaaccgcttgcaaagctacgcgactctctcctctcgcctgatgcatct

SEQ ID NO: 12730 - DNA, 60 bp, Artificial
  Synthetic oligonucleotide
taaatatgtggcatacaacgtgcacttcctcgaatcacgtgatattcggtctcttgatct

SEQ ID NO: 12731 - DNA, 55 bp, Artificial
  Synthetic oligonucleotide
ctgcctgttggtgagatgttgaacattgtccctagaagagttgctctttccgacg

SEQ ID NO: 12732 - DNA, 53 bp, Artificial
  Synthetic oligonucleotide
gacagccgtctaagttagttgggagagatcaaataagcagacgtcaaagggct

SEQ ID NO: 12733 - DNA, 54 bp, Artificial
  Synthetic oligonucleotide
cattggataccctgatcgagtgagtttatttactgcagaacgtcctcgtgaagg

SEQ ID NO: 12734 - DNA, 54 bp, Artificial
  Synthetic oligonucleotide
cgcgtctagccatctacttaatcttacaacaggtacgtgcctcaaggacgttac

SEQ ID NO: 12735 - DNA, 60 bp, Artificial
  Synthetic oligonucleotide
gcgatttgtccggtgccgtcttgtttattgcttggaactcatacgactagtagagatgct

SEQ ID NO: 12736 - DNA, 50 bp, Artificial
  Synthetic oligonucleotide
gagtgatcggtgaactgctgtcagtatacatgaacgcaactctaaatcta

SEQ ID NO: 12737 - DNA, 60 bp, Artificial
  Synthetic oligonucleotide
tgcagcgtttagcggcgataggcgcattatatcccaatgaattcactgagaacgtattgg

SEQ ID NO: 12738 - DNA, 60 bp, Artificial
  Synthetic oligonucleotide
gggtcgactgaaagtggcgaattatgtacccgtagatacactcgtcgaggcagatgtgac

SEQ ID NO: 12739 - DNA, 58 bp, Artificial
  Synthetic oligonucleotide
aacgtatatcgactagagacattctgcagacacgcgatttacactcactatgtatgcc

SEQ ID NO: 12740 - DNA, 60 bp, Artificial
  Synthetic oligonucleotide
aatgactgtttcaagaccctgattgcagcaatgctaagtcagcgaactatgtcgcttgat

SEQ ID NO: 12741 - DNA, 55 bp, Artificial
  Synthetic oligonucleotide
caagaccctgattgcagcaatgctaagtcagcgaactatgtcgcttgatttcgtg

SEQ ID NO: 12742 - DNA, 60 bp, Artificial
  Synthetic oligonucleotide
gatgcagaggagattcccggatgttctgatccaagcgagaccctctcatttttggaaggc

SEQ ID NO: 12743 - DNA, 60 bp, Artificial
  Synthetic oligonucleotide
gacaccatttcagatagcagagcaacaaatacagaactttcaggtagcgaattggctgca

SEQ ID NO: 12744 - DNA, 60 bp, Artificial
  Synthetic oligonucleotide
gcgctccagcctggtgagcttgaagaccgaaaggagttggtcagacgtactctcgagacc

SEQ ID NO: 12745 - DNA, 54 bp, Artificial
  Synthetic oligonucleotide
ttcggcgttctagaggcagagtagagtgtttcgcatttgcgggctatcggttaa

SEQ ID NO: 12746 - DNA, 60 bp, Artificial
  Synthetic oligonucleotide
tttcagccctagcagatgcatttagtgtactggctccagatttcaatctattcggcgttg

SEQ ID NO: 12747 - DNA, 60 bp, Artificial
  Synthetic oligonucleotide
cgcgccaatagaattaatttatgcgcgcagatcagcaaaagagttcgctacattgcagga

SEQ ID NO: 12748 - DNA, 60 bp, Artificial
  Synthetic oligonucleotide
tggttgggcgattgtcgatgtagaatttagagatccagcgccgtacgcgcatgttcaacg

SEQ ID NO: 12749 - DNA, 60 bp, Artificial
  Synthetic oligonucleotide
ccgttaattgagtccgtgtatgcttcggagctctcagttatgaaggctgatatgagacac

SEQ ID NO: 12750 - DNA, 50 bp, Artificial
  Synthetic oligonucleotide
gatatgcttccggaacccaggctagacgatgtagagagatttagacagga

SEQ ID NO: 12751 - DNA, 57 bp, Artificial
  Synthetic oligonucleotide
gaaagggtaagagtgggtcaaattctcgcggtgctgaataaaagattcgtcgcatat

SEQ ID NO: 12752 - DNA, 60 bp, Artificial
  Synthetic oligonucleotide
tgacgaagtattggctaaatatcgaattcccacgcagggagatcaccgatttaacattga

SEQ ID NO: 12753 - DNA, 57 bp, Artificial
  Synthetic oligonucleotide
tgagccagcgattgatcttcgggttcctatatgtgccgggtatgatccagagaatgc

SEQ ID NO: 12754 - DNA, 55 bp, Artificial
  Synthetic oligonucleotide
gaaggattaaccacttggattggctcaaattgtggtggagttcgcgattatgtcg

SEQ ID NO: 12755 - DNA, 53 bp, Artificial
  Synthetic oligonucleotide
ccacttggatcggctcaaattgtggtggagttcgcgattatgtcgtccaagct

SEQ ID NO: 12756 - DNA, 50 bp, Artificial
  Synthetic oligonucleotide
tctatgtgagaggttgagttgccgtcgtctgtcttcggaagcggcggctc

SEQ ID NO: 12757 - DNA, 58 bp, Artificial
  Synthetic oligonucleotide
actttagatgggccatatgcgccagatagctcgaacttgccgtctaactattggtatt

SEQ ID NO: 12758 - DNA, 51 bp, Artificial
  Synthetic oligonucleotide
cacaagcgtatgggtcgaggaactatctgaatactgcacatagattgcaag

SEQ ID NO: 12759 - DNA, 60 bp, Artificial
  Synthetic oligonucleotide
cactgacatatcgattgggggtgttatccttgctggctaccaatggatatcaattagcta

SEQ ID NO: 12760 - DNA, 60 bp, Artificial
  Synthetic oligonucleotide
gtcacatgcgtggacatacggcctacagcgcagcctagtggatgttggaacgttcgtacc

SEQ ID NO: 12761 - DNA, 58 bp, Artificial
  Synthetic oligonucleotide
cccaataacgatgtatgagctacgaaatctcatgcgtttggacggattttcacatgtc

SEQ ID NO: 12762 - DNA, 50 bp, Artificial
  Synthetic oligonucleotide
tggtccgctcctacgcttgatggattagttgtagccccacctcaggtctt

SEQ ID NO: 12763 - DNA, 53 bp, Artificial
  Synthetic oligonucleotide
tgataacaactcggtgcccgcggtatcacgtaacattcatggttggactggca

SEQ ID NO: 12764 - DNA, 56 bp, Artificial
  Synthetic oligonucleotide
cgtacgaaaccattcacaaacgcgcaatggggacgaggtaatactggagcgaccag

SEQ ID NO: 12765 - DNA, 50 bp, Artificial
  Synthetic oligonucleotide
cgacggaggcgatacaaacgtatattaaacccttttgtgcggctttcggg

SEQ ID NO: 12766 - DNA, 55 bp, Artificial
  Synthetic oligonucleotide
gcgagctgctcaggttgttacaccagtggtttgtggaccagatatggttcaggtt

SEQ ID NO: 12767 - DNA, 60 bp, Artificial
  Synthetic oligonucleotide
gcgagcgtattcaaataaaacgaaaggcgtgattaaagatccagcattgctaggcgcaat

SEQ ID NO: 12768 - DNA, 55 bp, Artificial
  Synthetic oligonucleotide
cgaaaggcgtgattaaagatccagcattgctaggcgcaataatatccactggttc

SEQ ID NO: 12769 - DNA, 60 bp, Artificial
  Synthetic oligonucleotide
gaatcgaagagtttgtggtatattaaagacgagcgttacagcatgctaattccatcttat

SEQ ID NO: 12770 - DNA, 60 bp, Artificial
  Synthetic oligonucleotide
tggctatggacgggcgtgggtggtcaatgcgagcgatgatcccgagaggatgctacagcc

SEQ ID NO: 12771 - DNA, 60 bp, Artificial
  Synthetic oligonucleotide
tccggcgtggaatgatcgcgggcattcgaagcgctatcgcgcgacaccacgcattacggt

SEQ ID NO: 12772 - DNA, 52 bp, Artificial
  Synthetic oligonucleotide
gtgtcgagtagtctttcaggtacgacccgagcatcgatcggccctaagacgc

SEQ ID NO: 12773 - DNA, 60 bp, Artificial
  Synthetic oligonucleotide
accaggctattcgagtagcgctcgcgacatgtcctaccgctgatgagacggctcttcagc

SEQ ID NO: 12774 - DNA, 55 bp, Artificial
  Synthetic oligonucleotide
ggcgcaacgtaaccgcgtgccgatactgacgcaacaaggccgtaccttggtgttc

SEQ ID NO: 12775 - DNA, 52 bp, Artificial
  Synthetic oligonucleotide
tgctagccgccaatgtgccgatacaagtcatccgcggggcaatcccaatcga

SEQ ID NO: 12776 - DNA, 57 bp, Artificial
  Synthetic oligonucleotide
aagcgaaacattgctagcaaacgtgacatctgttagacaagaatacgcaataccagt

SEQ ID NO: 12777 - DNA, 60 bp, Artificial
  Synthetic oligonucleotide
acatatcaaccgatgctgagtacggaaccgtagcgcattgggtggattgggtcgttgata

SEQ ID NO: 12778 - DNA, 60 bp, Artificial
  Synthetic oligonucleotide
tgctacgcgtattgtttgatcctcgcactgtacgattttcatgggcgtgacgtagacggc

SEQ ID NO: 12779 - DNA, 55 bp, Artificial
  Synthetic oligonucleotide
cccagaaagtaacggttgactatgtctattcggatggctacaaactgaactttgc

SEQ ID NO: 12780 - DNA, 60 bp, Artificial
  Synthetic oligonucleotide
gatgctgtccgcggctgggataaacgttggaccgatatctccagattatacccaacatat

SEQ ID NO: 12781 - DNA, 60 bp, Artificial
  Synthetic oligonucleotide
taatgacggtcaacattatagtcatgggactcaaatcattaatggattcacatcgtgaaa

SEQ ID NO: 12782 - DNA, 55 bp, Artificial
  Synthetic oligonucleotide
gtcatgggactcaaatcattaatggattcacatcgtgaaagcggaggtacgttac

SEQ ID NO: 12783 - DNA, 55 bp, Artificial
  Synthetic oligonucleotide
gtaagaggttatcgatctctgaaagtttggaagtgtttggtagcctgattgataa

SEQ ID NO: 12784 - DNA, 59 bp, Artificial
  Synthetic oligonucleotide
gtctatcatggtgctgtgactatgttgcaacgaatggttaagctacgaggatctaccat

SEQ ID NO: 12785 - DNA, 60 bp, Artificial
  Synthetic oligonucleotide
ggtcggcggcctagagtgatacagatggttggtactgagggtcaattgtccgcatttgta

SEQ ID NO: 12786 - DNA, 51 bp, Artificial
  Synthetic oligonucleotide
cgaatgtcataatttacgagtcgcattaacaccgagatatgattacactgg

SEQ ID NO: 12787 - DNA, 51 bp, Artificial
  Synthetic oligonucleotide
gagatagactacataactttacgttagacttcagtgataagtccgatagac

SEQ ID NO: 12788 - DNA, 60 bp, Artificial
  Synthetic oligonucleotide
gcttcaggcctacattgtcgaaatcagttgaagatccaagacttaagaatgagttcagat

SEQ ID NO: 12789 - DNA, 50 bp, Artificial
  Synthetic oligonucleotide
ctgagggagctatcgaatgggaacggatggtacatgaagacaacaaccta

SEQ ID NO: 12790 - DNA, 60 bp, Artificial
  Synthetic oligonucleotide
aatgggacggaggtttatgatgttacatatgatgacttagtcaggatgtcaaacgaagtg

SEQ ID NO: 12791 - DNA, 52 bp, Artificial
  Synthetic oligonucleotide
agaaatcgtagattagccagcttaagcggtgttgggttcacggtgacaaaga

SEQ ID NO: 12792 - DNA, 60 bp, Artificial
  Synthetic oligonucleotide
acagtcagttggatcagagaagaaccagcgcgttacagtgaatccaggaccatttgcgca

SEQ ID NO: 12793 - DNA, 60 bp, Artificial
  Synthetic oligonucleotide
ctatgtgcgatcattggcagcgaatttgaatgacgtaatgtgttctggcggagattacag

SEQ ID NO: 12794 - DNA, 55 bp, Artificial
  Synthetic oligonucleotide
gcgaatttgaatgacgtaatgtgttctggcggagattacagcttcgcgctacctg

SEQ ID NO: 12795 - DNA, 60 bp, Artificial
  Synthetic oligonucleotide
tacactggagcggaggctttgattacaaccgcaattcacattcaccgctggattagaggg

SEQ ID NO: 12796 - DNA, 55 bp, Artificial
  Synthetic oligonucleotide
ccaacctgtggcgtgattgatgtacgtgcgtcagaactgactgggtgttcgccat

SEQ ID NO: 12797 - DNA, 50 bp, Artificial
  Synthetic oligonucleotide
tttttatgcttgggcgcgtgctgttgagatgggagctgacgaaggcacaa

SEQ ID NO: 12798 - DNA, 60 bp, Artificial
  Synthetic oligonucleotide
gtgagattgggtccgcggcaattgatggactagttcaaggtagcgttcactcaatcatga

SEQ ID NO: 12799 - DNA, 55 bp, Artificial
  Synthetic oligonucleotide
cgcggcaattgatggactagttcaaggtagcgttcactcaatcatgaccggggag

SEQ ID NO: 12800 - DNA, 54 bp, Artificial
  Synthetic oligonucleotide
ccggcatatctgacgttgaataatgaattagaggtcacatttgccactacaaga

SEQ ID NO: 12801 - DNA, 55 bp, Artificial
  Synthetic oligonucleotide
agctcgccatccccagtggacctccggacgttatcgttcagaccgatgccatgcc

SEQ ID NO: 12802 - DNA, 60 bp, Artificial
  Synthetic oligonucleotide
atcgttcagaccgatgccatgcccgttccaatactgtaccgacccgctatggagatgatc

SEQ ID NO: 12803 - DNA, 55 bp, Artificial
  Synthetic oligonucleotide
gccatgcccgttccaatactgtaccgacccgctatggagatgatcgaacccgtcg

SEQ ID NO: 12804 - DNA, 58 bp, Artificial
  Synthetic oligonucleotide
gatattttcctggtacatgcccactggggatctgggaatgtatagttggattagtcta

SEQ ID NO: 12805 - DNA, 60 bp, Artificial
  Synthetic oligonucleotide
gtttacttcggctgcgtgcacttggagctccccgtgatgcgataataggtcagcttatga

SEQ ID NO: 12806 - DNA, 52 bp, Artificial
  Synthetic oligonucleotide
tcccgggtggaaattaacatatgtgggctataatggaaaggacacgcgaggc

SEQ ID NO: 12807 - DNA, 50 bp, Artificial
  Synthetic oligonucleotide
ctgattgcagcaatgttaagtcaaagaaccatgtcgcttgatttcgtgac

SEQ ID NO: 12808 - DNA, 60 bp, Artificial
  Synthetic oligonucleotide
gctccaattaagtataatctcacgtcatatctacgatctatcttcaattgtactagttac

SEQ ID NO: 12809 - DNA, 60 bp, Artificial
  Synthetic oligonucleotide
atgatgggttattagtcgaaatgagtggcgcatatggcatggtccagttgtctgttaatt

SEQ ID NO: 12810 - DNA, 55 bp, Artificial
  Synthetic oligonucleotide
cgcgttggaagtgggattagtctggagatagggtagctcgcaggagacatacctg

SEQ ID NO: 12811 - DNA, 60 bp, Artificial
  Synthetic oligonucleotide
gacagcctaccgcttcgccggccaactgccacaatcacccgattcaactatggtctctac

SEQ ID NO: 12812 - DNA, 55 bp, Artificial
  Synthetic oligonucleotide
cgaagccagcgctcaatccagatcaagccgtgcttaagtggaacgatggtgccag

SEQ ID NO: 12813 - DNA, 55 bp, Artificial
  Synthetic oligonucleotide
cgaagccggcactcaatcccgatcaagccgtgcttaagtggaacgatggtgctag

SEQ ID NO: 12814 - DNA, 53 bp, Artificial
  Synthetic oligonucleotide
gctaatcacactgactgaacaaacggcatctagcaagttgtatgctatacctg

SEQ ID NO: 12815 - DNA, 60 bp, Artificial
  Synthetic oligonucleotide
cccttccgatgacacttctgaggagatggtggcgcttgacggatcttgggtccgaagtga

SEQ ID NO: 12816 - DNA, 57 bp, Artificial
  Synthetic oligonucleotide
tacacaatccttggtcttaggaataacgataaacctggcaagttaactcacattgag

SEQ ID NO: 12817 - DNA, 52 bp, Artificial
  Synthetic oligonucleotide
aatggagatcaggctgtccgaccatcagtgatatgtccacgccctcagattt

SEQ ID NO: 12818 - DNA, 51 bp, Artificial
  Synthetic oligonucleotide
aaagaggtatggtgatactctgatggagtataccgaaaccataccgagacc

SEQ ID NO: 12819 - DNA, 55 bp, Artificial
  Synthetic oligonucleotide
gttgtacttagtctcaatcccggaactcagcagggtaaagggatcacaaccgcgc

SEQ ID NO: 12820 - DNA, 55 bp, Artificial
  Synthetic oligonucleotide
gctcttcgagagtactatctcaaacgatttacgagatctacacttcaacagcgaa

SEQ ID NO: 12821 - DNA, 55 bp, Artificial
  Synthetic oligonucleotide
tctgccactcatatggctattccttgctaagggaggtgagctaccttggccatct

SEQ ID NO: 12822 - DNA, 51 bp, Artificial
  Synthetic oligonucleotide
taatgcgtatcggataacgtttgacacatcagttcctaggttggacaatct

SEQ ID NO: 12823 - DNA, 51 bp, Artificial
  Synthetic oligonucleotide
tgtatccgttagacgatagtgagacgatgttcgctgatgaccatgacatag

SEQ ID NO: 12824 - DNA, 53 bp, Artificial
  Synthetic oligonucleotide
atgcgtattttaggtgacgacgttcgattaacttatcacggctctgaagatct

SEQ ID NO: 12825 - DNA, 57 bp, Artificial
  Synthetic oligonucleotide
tcatcactaactgctacacctggactccgagcaccgagcatgtcttcacctgtcgat

SEQ ID NO: 12826 - DNA, 54 bp, Artificial
  Synthetic oligonucleotide
aggcgatcaatacacgcctagaggcagacgtgaagtcagcacaatcttgcagcc

SEQ ID NO: 12827 - DNA, 52 bp, Artificial
  Synthetic oligonucleotide
cgtattacgtccagtctcctatcggccacacctatcgacgctgtagatggcg

SEQ ID NO: 12828 - DNA, 60 bp, Artificial
  Synthetic oligonucleotide
agctacgagacatatcaacgatagccgtatctgaaagtacccacaattttgaagtgttca

SEQ ID NO: 12829 - DNA, 55 bp, Artificial
  Synthetic oligonucleotide
atagccgtatctgaaagtacccacaattttgaagtgttcagtggacctgaaggag

SEQ ID NO: 12830 - DNA, 60 bp, Artificial
  Synthetic oligonucleotide
cagcaaaagaattcgccctgttacaggatgatcttacagtattacgctatgctaatgaga

SEQ ID NO: 12831 - DNA, 55 bp, Artificial
  Synthetic oligonucleotide
ttcgccctgttacaggatgatcttacagtattacgctatgctaatgagatcgaac

SEQ ID NO: 12832 - DNA, 52 bp, Artificial
  Synthetic oligonucleotide
taaattcccactgctgtataacgggggagggtgcgcgatactacacacttac

SEQ ID NO: 12833 - DNA, 60 bp, Artificial
  Synthetic oligonucleotide
tgcaagctgattatatgaccgcgacacgagaggttgatttcacggtgccggatgtacaaa

SEQ ID NO: 12834 - DNA, 60 bp, Artificial
  Synthetic oligonucleotide
caccgtccgctttagatgtgttgattcgggcgtatgatagaaagcacaagattgcgttag

SEQ ID NO: 12835 - DNA, 58 bp, Artificial
  Synthetic oligonucleotide
agtaagggagccgttagctgaaccagacgtcaagtccggtcgtgtgtgtatgacgtca

SEQ ID NO: 12836 - DNA, 56 bp, Artificial
  Synthetic oligonucleotide
cgagagcaaaacgtagattccgtgggacgcgcgaatacgtaaatgatgtaatcgta

SEQ ID NO: 12837 - DNA, 55 bp, Artificial
  Synthetic oligonucleotide
cgtaatgccgcattcttaacgcagatagataccaagttaatgtcggttcagagcg

SEQ ID NO: 12838 - DNA, 57 bp, Artificial
  Synthetic oligonucleotide
ttcctaacgcagatagataccaagttaatgtcggttcagagcgtcttaaacgacgta

SEQ ID NO: 12839 - DNA, 60 bp, Artificial
  Synthetic oligonucleotide
ccatttatgacgaactctagggtgacgaaggagcaaagcaccgctcacatacgtggagag

SEQ ID NO: 12840 - DNA, 55 bp, Artificial
  Synthetic oligonucleotide
ctctagggtgacgaaggagcaaagcaccgctcacatacgtggagagtggtggaac

SEQ ID NO: 12841 - DNA, 60 bp, Artificial
  Synthetic oligonucleotide
aagctacggggtcgcgcgtgatggacgcagctgattgtttccgtaactctgccgatcgca

SEQ ID NO: 12842 - DNA, 55 bp, Artificial
  Synthetic oligonucleotide
cttaactgtctaaatgaatgtaaagtttgtccatgtgattattgtggaatacggc

SEQ ID NO: 12843 - DNA, 60 bp, Artificial
  Synthetic oligonucleotide
attggatgtaatcactctaatgaacagcacattgcatacaatactagaagatccaggaat

SEQ ID NO: 12844 - DNA, 60 bp, Artificial
  Synthetic oligonucleotide
ttgagtgtaatcactctaatgaacagcacattgcacacaatactagaagatccaggaatg

SEQ ID NO: 12845 - DNA, 60 bp, Artificial
  Synthetic oligonucleotide
tcgatcaatggtacaaacatcaagtaaccttatgcaattcggtaatcacacagctctccc

SEQ ID NO: 12846 - DNA, 55 bp, Artificial
  Synthetic oligonucleotide
caagtaaccttatgcaattcggtaatcacacagctctccccgactcgtatctcga

SEQ ID NO: 12847 - DNA, 50 bp, Artificial
  Synthetic oligonucleotide
aatgaagatgagaacccctagtccttccgtccatgacccaactcacatct

SEQ ID NO: 12848 - DNA, 55 bp, Artificial
  Synthetic oligonucleotide
gcgctatctttcggctgacttgttatgcaatctttggatgtaagccaacagctcg

SEQ ID NO: 12849 - DNA, 50 bp, Artificial
  Synthetic oligonucleotide
attgcagcctccgatacttttaatacacgagtgtggtggtcgaacccata

SEQ ID NO: 12850 - DNA, 60 bp, Artificial
  Synthetic oligonucleotide
gtcagaaacgaagctaggtgacgtttattcgatgatgcgttcatggtatgattggagtgt

SEQ ID NO: 12851 - DNA, 60 bp, Artificial
  Synthetic oligonucleotide
acggatcgagaatttctctatgccgcagggtaactcacagcgtacgctggctggtgtcac

SEQ ID NO: 12852 - DNA, 60 bp, Artificial
  Synthetic oligonucleotide
cacagccgttcagtttgatgaaccatgtttcgttctaccagcccgagccgccatcatagt

SEQ ID NO: 12853 - DNA, 55 bp, Artificial
  Synthetic oligonucleotide
ccacaggtaagcgtacattcgttagaacgtcaaacactgatatcatcggttcagc

SEQ ID NO: 12854 - DNA, 56 bp, Artificial
  Synthetic oligonucleotide
tggtgaaccaactactcttggaggcatcatcactcgtggtgttaatttgagcgctc

SEQ ID NO: 12855 - DNA, 60 bp, Artificial
  Synthetic oligonucleotide
cgcgatcactagattctgcagcgttttactacagaatctaaatgtcattgaggttagagt

SEQ ID NO: 12856 - DNA, 56 bp, Artificial
  Synthetic oligonucleotide
cagcgttttactacagaatctaaatgtcattgaggttagagttgtatgatgtgacc

SEQ ID NO: 12857 - DNA, 55 bp, Artificial
  Synthetic oligonucleotide
ccccgaggtttacgtcgtgcagggtggttgatctcgcggcgtacattcccactgc

SEQ ID NO: 12858 - DNA, 60 bp, Artificial
  Synthetic oligonucleotide
tgttagcgtgacgccaatggctacgcgggtacagtataatggtgtgatggttgacgctga

SEQ ID NO: 12859 - DNA, 59 bp, Artificial
  Synthetic oligonucleotide
atggcgagagctagtatgacctcgcgagcggaaaatccatcgtgttggatggatggaac

SEQ ID NO: 12860 - DNA, 60 bp, Artificial
  Synthetic oligonucleotide
taatctgctgaccgtcactctgcaaagatggggaacgcttcctctatcgttcagacgatc

SEQ ID NO: 12861 - DNA, 60 bp, Artificial
  Synthetic oligonucleotide
atacccatgtctgcgtggagcactgatagcatccgaatgtgagttaggagacgtatatta

SEQ ID NO: 12862 - DNA, 60 bp, Artificial
  Synthetic oligonucleotide
ggagaagtgggagattgatctgagagtggctcagacgctactgcctacgaacgttccgat

SEQ ID NO: 12863 - DNA, 55 bp, Artificial
  Synthetic oligonucleotide
gccacggtggttaactatgtccagctatatgctgaggacagctcatttaccgcac

SEQ ID NO: 12864 - DNA, 56 bp, Artificial
  Synthetic oligonucleotide
caacttacgtgcgcttatggaagcaaatgtaaccgccgatgacagaataaaggcat

SEQ ID NO: 12865 - DNA, 60 bp, Artificial
  Synthetic oligonucleotide
acgaacaatttctcaggtaatcacgcgacgttcaagccagaccaatatgtcatcacgtca

SEQ ID NO: 12866 - DNA, 55 bp, Artificial
  Synthetic oligonucleotide
agccaagcgcgtttgatccaccagcttcaggagaggatatgagattaatctaccc

SEQ ID NO: 12867 - DNA, 54 bp, Artificial
  Synthetic oligonucleotide
cacctgacaacttaattgcgcaagtttcggaaggaacacgcgacaattttatac

SEQ ID NO: 12868 - DNA, 60 bp, Artificial
  Synthetic oligonucleotide
agttcctgcggtggtggattcacgctcaagtgaagctattggactgctagaatcgtttgg

SEQ ID NO: 12869 - DNA, 55 bp, Artificial
  Synthetic oligonucleotide
gctcggagaatgatacggtcgaagactgtacaccccatatacttaggctcactcc

SEQ ID NO: 12870 - DNA, 59 bp, Artificial
  Synthetic oligonucleotide
atacttaggctcactccactatgatatttcgttttcgacattacgaagcaatgcgcaga

SEQ ID NO: 12871 - DNA, 55 bp, Artificial
  Synthetic oligonucleotide
cgatattaacatggagtgcgcttgaaccagaggaggaattcttacggaattatag

SEQ ID NO: 12872 - DNA, 51 bp, Artificial
  Synthetic oligonucleotide
tccgagttgcgtacactacgccattactgttcgagatgtgttgcatggaat

SEQ ID NO: 12873 - DNA, 54 bp, Artificial
  Synthetic oligonucleotide
ggggtgttggtgcggacccgattgtagttctacggtctgtagcgggggatgatc

SEQ ID NO: 12874 - DNA, 60 bp, Artificial
  Synthetic oligonucleotide
ttggtccgagagtaagcacacggattcggaattcctatgtggatcgaattgatgtcattt

SEQ ID NO: 12875 - DNA, 57 bp, Artificial
  Synthetic oligonucleotide
atgcctgagccacatgcagtgttgttcgtcaccagtgagctctctcatatcgttaaa

SEQ ID NO: 12876 - DNA, 60 bp, Artificial
  Synthetic oligonucleotide
aaatcatcgattgccacggcgtgggtagggcggacgccattatatgattatgatgatttc

SEQ ID NO: 12877 - DNA, 54 bp, Artificial
  Synthetic oligonucleotide
ttggactacgcgtggagtcgtccgtgctgcgggtacgaaatccaacattacatg

SEQ ID NO: 12878 - DNA, 55 bp, Artificial
  Synthetic oligonucleotide
atcttagaatggtcggcacaaggacgagaacagaagatacatgacttgactaggt

SEQ ID NO: 12879 - DNA, 53 bp, Artificial
  Synthetic oligonucleotide
gtgttactctgtccacacaatttaccgattttgtatcacttaattcgttgcgc

SEQ ID NO: 12880 - DNA, 60 bp, Artificial
  Synthetic oligonucleotide
tatcactcgtgccatctaatgatgactatcagacaccaatcatgaattcagttacagtaa

SEQ ID NO: 12881 - DNA, 55 bp, Artificial
  Synthetic oligonucleotide
ccatctaatgatgactatcagacaccaatcatgaattcagttacagtaaggcagg

SEQ ID NO: 12882 - DNA, 60 bp, Artificial
  Synthetic oligonucleotide
aatgccctacagacattgacggtcgatcggatatcaatgtgtagtacgcgaccgcatata

SEQ ID NO: 12883 - DNA, 60 bp, Artificial
  Synthetic oligonucleotide
cgctgtaatggtgtcatgtctgaatgagattttcgaggatgtagacagccctgaaaacgt

SEQ ID NO: 12884 - DNA, 58 bp, Artificial
  Synthetic oligonucleotide
tgtaacctctccgcatagatccattatcgtcgttaccctgtattcatatgttctgcca

SEQ ID NO: 12885 - DNA, 55 bp, Artificial
  Synthetic oligonucleotide
ggaggctttgattacaactgcaatccacattcatcgctggattagagggtgtggc

SEQ ID NO: 12886 - DNA, 55 bp, Artificial
  Synthetic oligonucleotide
ccgggtgattatacgtcgacacctctgtaactcattacccctcgtgagcgtgcct

SEQ ID NO: 12887 - DNA, 56 bp, Artificial
  Synthetic oligonucleotide
attatactctgacacctctgtaactcattacccctcgtgagcgtgcctaattcatc

SEQ ID NO: 12888 - DNA, 60 bp, Artificial
  Synthetic oligonucleotide
actcttcaccgtaagccccattggacctgatgattgactgagaagccacagtcaatcata

SEQ ID NO: 12889 - DNA, 60 bp, Artificial
  Synthetic oligonucleotide
tcaccgcaagtcccattggacctgatgattgactgagaagccacagtcaatcatatcgcg

SEQ ID NO: 12890 - DNA, 53 bp, Artificial
  Synthetic oligonucleotide
gtttatttgagcgatggtcatcaccgtgcaaggtgcagatctagtcaggaggg

SEQ ID NO: 12891 - DNA, 60 bp, Artificial
  Synthetic oligonucleotide
ttggactcacattacgtattgaatctgctgtctgtgaatcagtgcttgcggacgcgaatg

SEQ ID NO: 12892 - DNA, 55 bp, Artificial
  Synthetic oligonucleotide
gaatctgctgtctgtgaatcagtgcttgcggacgcgaatgaaactctgttagcga

SEQ ID NO: 12893 - DNA, 55 bp, Artificial
  Synthetic oligonucleotide
ccttcaagtactacagatgttactcactacggtggttacgaccgattttcgcgtg

SEQ ID NO: 12894 - DNA, 60 bp, Artificial
  Synthetic oligonucleotide
agcgcgactagatcagtgcttagggtcttcggttcattatcgacgccgagtgacgacggc

SEQ ID NO: 12895 - DNA, 55 bp, Artificial
  Synthetic oligonucleotide
atcagtgcttagggtcttcggttcattatcgacgccgagtgacgacggctagggg

SEQ ID NO: 12896 - DNA, 60 bp, Artificial
  Synthetic oligonucleotide
agctagttatgagaagctgagtcctgaaatgcacgaaggcttagaacatcagacgtatgt

SEQ ID NO: 12897 - DNA, 50 bp, Artificial
  Synthetic oligonucleotide
gcgaaattgtggcgatccaaagagttgaacacggactcaccaaacgaatt

SEQ ID NO: 12898 - DNA, 56 bp, Artificial
  Synthetic oligonucleotide
taacggcgacgtacacatcgaacgttaacagagaaatgtatgattcatactactac

SEQ ID NO: 12899 - DNA, 55 bp, Artificial
  Synthetic oligonucleotide
ccaggatttggagccactcagcttacaacaatcccacttgacgtaacatcagcgg

SEQ ID NO: 12900 - DNA, 51 bp, Artificial
  Synthetic oligonucleotide
atcgaaggacgtgggtttagacaagcttatagcgaattcatgggggtcgcg

SEQ ID NO: 12901 - DNA, 60 bp, Artificial
  Synthetic oligonucleotide
tcatatggtgacgtaacgcgatttttgtcagatgatgcacttgtattatatactgatgtg

SEQ ID NO: 12902 - DNA, 57 bp, Artificial
  Synthetic oligonucleotide
tcacttggtgtaccagacatagactcatctgcttatatagaatcgcgtgtttacaac

SEQ ID NO: 12903 - DNA, 56 bp, Artificial
  Synthetic oligonucleotide
gactattgggacgattcgcaagcatttagaaatatggtgtacgtccgttcgttggc

SEQ ID NO: 12904 - DNA, 60 bp, Artificial
  Synthetic oligonucleotide
tcgctctaccagtaggacattacccagttatgtccggaggtgctgtaatattacactcag

SEQ ID NO: 12905 - DNA, 55 bp, Artificial
  Synthetic oligonucleotide
gacattacccagttatgtccggaggtgctgtaatattacactcagcaggggtcac

SEQ ID NO: 12906 - DNA, 58 bp, Artificial
  Synthetic oligonucleotide
tttgagtgatgaaaagaacacctctgagactacacaattgcacgaattaataacttcg

SEQ ID NO: 12907 - DNA, 55 bp, Artificial
  Synthetic oligonucleotide
gtttggaatggttctatgtcatccaagttcgccgcaagctaacgtctctggagta

SEQ ID NO: 12908 - DNA, 56 bp, Artificial
  Synthetic oligonucleotide
cgctatttcgaccttttcaaacagaactttctacgcgacattgaacttgagactac

SEQ ID NO: 12909 - DNA, 60 bp, Artificial
  Synthetic oligonucleotide
gactctagtccggtcaacgatatctggtgccgactctcaagtacgcatagattacgatta

SEQ ID NO: 12910 - DNA, 60 bp, Artificial
  Synthetic oligonucleotide
gaactgtccgcattaacgacaaggataactacggaagtagcgaggctagatgctctgatt

SEQ ID NO: 12911 - DNA, 55 bp, Artificial
  Synthetic oligonucleotide
aaggataactacggaagtagcgaggctagatgctctgattagcgctggacaagcg

SEQ ID NO: 12912 - DNA, 60 bp, Artificial
  Synthetic oligonucleotide
accggtggtgctgtttcactacattcagctggagttacattgtcgacacaatttactgac

SEQ ID NO: 12913 - DNA, 59 bp, Artificial
  Synthetic oligonucleotide
tgtactgaatacattaataatggattgcctccaattcaaaatactaggaatgtagtacc

SEQ ID NO: 12914 - DNA, 60 bp, Artificial
  Synthetic oligonucleotide
ttacacgttgccggtcgcgcatccgaagaaatgtatcgttctaatcgtcgtaggagatga

SEQ ID NO: 12915 - DNA, 60 bp, Artificial
  Synthetic oligonucleotide
ttatatcactagttccgtcgaatgatgactatcagacaccaatcgcgaattcagttactg

SEQ ID NO: 12916 - DNA, 57 bp, Artificial
  Synthetic oligonucleotide
tggtcttgtatacggatgtatctcagtgggattcgtctcagcataatacacagccat

SEQ ID NO: 12917 - DNA, 53 bp, Artificial
  Synthetic oligonucleotide
tccaaaagatctaggtcgctaaactcatcagcattctactacagagtgtagat

SEQ ID NO: 12918 - DNA, 59 bp, Artificial
  Synthetic oligonucleotide
gccagtcgtgctccactcttgcgggggccacagtactaccgtgcctgtgccaactaaga

SEQ ID NO: 12919 - DNA, 56 bp, Artificial
  Synthetic oligonucleotide
agtagagtcgtgggtccacctggcgtggccgcgtagacccgatgtcggtattcatc

SEQ ID NO: 12920 - DNA, 56 bp, Artificial
  Synthetic oligonucleotide
tagaacgtgcatcggataaaattgctcagggtgtcattattgcataccgtgacatg

SEQ ID NO: 12921 - DNA, 55 bp, Artificial
  Synthetic oligonucleotide
cacaattgatgtgccgcgcagctctatcgccaacttaatcatgaatatagcaacg

SEQ ID NO: 12922 - DNA, 60 bp, Artificial
  Synthetic oligonucleotide
cggtagcgaagtgtggacatgaagcatcgccaagcaaaacgatgataacgccttactcgg

SEQ ID NO: 12923 - DNA, 57 bp, Artificial
  Synthetic oligonucleotide
tcacaggtgcaaacgatggtcactaaagtgagtagaggtttttgtcacgatctagcg

SEQ ID NO: 12924 - DNA, 55 bp, Artificial
  Synthetic oligonucleotide
catcgtacaagggatatcccggataatacgttggcggtaagcgttctatcgaaga

SEQ ID NO: 12925 - DNA, 55 bp, Artificial
  Synthetic oligonucleotide
gcgtataaggagtttcttaacctggcgatttctaacgcctacggcacacatatgc

SEQ ID NO: 12926 - DNA, 55 bp, Artificial
  Synthetic oligonucleotide
gtggctggaaacgctactctgtccgcactctgccctgaaatgtctgaagcgtctg

SEQ ID NO: 12927 - DNA, 60 bp, Artificial
  Synthetic oligonucleotide
aaaagaatgctatctgattccgcatcaactaagagtgacagtgaatcttcaagccgcggt

SEQ ID NO: 12928 - DNA, 55 bp, Artificial
  Synthetic oligonucleotide
ctgattccgcatcaactaagagtgacagtgaatcttcaagccgcggtgacgtaac

SEQ ID NO: 12929 - DNA, 53 bp, Artificial
  Synthetic oligonucleotide
tagagattggtgcatataacaaccgatttggctttacatcctacttggagtat

SEQ ID NO: 12930 - DNA, 51 bp, Artificial
  Synthetic oligonucleotide
cacacttagcgtctttatgtggtgggtattcggatgggttgttatggtatg

SEQ ID NO: 12931 - DNA, 60 bp, Artificial
  Synthetic oligonucleotide
ttaaggaatatcgcgagggacaacacaacgactcttacgatgagtatgaagtgaatcaga

SEQ ID NO: 12932 - DNA, 55 bp, Artificial
  Synthetic oligonucleotide
cgcgagggacaacacaacgactcttacgatgagtatgaagtgaatcagagcatct

SEQ ID NO: 12933 - DNA, 60 bp, Artificial
  Synthetic oligonucleotide
gtgaatcagagcatctactatcctaacggcggtgacgctcgcaaattctactcaaatgct

SEQ ID NO: 12934 - DNA, 56 bp, Artificial
  Synthetic oligonucleotide
acagcgatctcacccatgggaagcgaccggaatcaagtaccgcaagattaagagag

SEQ ID NO: 12935 - DNA, 53 bp, Artificial
  Synthetic oligonucleotide
gtgcgcgcatcagaactaacggggtgctcaccattcaagacggtgaagatcga

SEQ ID NO: 12936 - DNA, 60 bp, Artificial
  Synthetic oligonucleotide
atgtaatgaggaacacatcggtgacctacgcgccatcgttcgtagtgctggaatcgcaac

SEQ ID NO: 12937 - DNA, 60 bp, Artificial
  Synthetic oligonucleotide
tagacatgcgacatctttcgttgatgcagaggagattcccagacgtcctaattcaagcaa

SEQ ID NO: 12938 - DNA, 60 bp, Artificial
  Synthetic oligonucleotide
atgcggcttctttcgttgatgcagaggagattcccagatgtcctaattcaagcaagaccg

SEQ ID NO: 12939 - DNA, 60 bp, Artificial
  Synthetic oligonucleotide
gcggagaaggctgcattcgcatcatacgcagaagcgtttcgtgatgatgtaagactgaga

SEQ ID NO: 12940 - DNA, 60 bp, Artificial
  Synthetic oligonucleotide
agtgccctataatgatgagccattggtagtggtgacggagcacgctatcgcaaacttcac

SEQ ID NO: 12941 - DNA, 55 bp, Artificial
  Synthetic oligonucleotide
cattggtagtggtgacggagcacgctatcgcaaacttcaccaaagccgagatggc

SEQ ID NO: 12942 - DNA, 60 bp, Artificial
  Synthetic oligonucleotide
caaacttcaccaaagccgagatggcacttgagttcaatcgtgagttcctcgataaattgc

SEQ ID NO: 12943 - DNA, 55 bp, Artificial
  Synthetic oligonucleotide
ccgagatggcacttgagttcaatcgtgagttcctcgataaattgcgcgtgctgtc

SEQ ID NO: 12944 - DNA, 55 bp, Artificial
  Synthetic oligonucleotide
cctaagccagccgactataatgtgcgtactttgaagatcgatgaggccacatggt

SEQ ID NO: 12945 - DNA, 55 bp, Artificial
  Synthetic oligonucleotide
tcagacggcacagaagactcggaatttgcatctatatggcgtatccaaaggtgtc

SEQ ID NO: 12946 - DNA, 55 bp, Artificial
  Synthetic oligonucleotide
agtggaggttcgccagtcccttcagcaaggattggaccacgaaagcgcgaaggca

SEQ ID NO: 12947 - DNA, 53 bp, Artificial
  Synthetic oligonucleotide
gagaaggatgcttaccttggcgcgcgttctgaattagtattcccaccctacta

SEQ ID NO: 12948 - DNA, 60 bp, Artificial
  Synthetic oligonucleotide
ggattcgcggcacctgcgtgtgagagcggggaagttatcaatctcgctgcgcgtatgtct

SEQ ID NO: 12949 - DNA, 57 bp, Artificial
  Synthetic oligonucleotide
tccggtctaggatacatcctcttacttatgtgggaaggttcagttcccacttcgctg

SEQ ID NO: 12950 - DNA, 60 bp, Artificial
  Synthetic oligonucleotide
tttggacgtgttcaatcactactctcccgtgatcaaacttgtacgctcgtaatgctgagt

SEQ ID NO: 12951 - DNA, 60 bp, Artificial
  Synthetic oligonucleotide
gacacaatcgttgcgcgagcgctcactgtaataagatcatgtgttacattacaagatgca

SEQ ID NO: 12952 - DNA, 57 bp, Artificial
  Synthetic oligonucleotide
tagcttcagagaccccacatggcatgccttgcgtacggcgattttgaatcgaacagc

SEQ ID NO: 12953 - DNA, 57 bp, Artificial
  Synthetic oligonucleotide
tcgttgggcagatcactagagcgatcgcacgcgctgcgtatgtctagccgcgtttgc

SEQ ID NO: 12954 - DNA, 52 bp, Artificial
  Synthetic oligonucleotide
cgatgatcttactgcttccctcgtggctttagggaaaatcctgcctcctcaa

SEQ ID NO: 12955 - DNA, 60 bp, Artificial
  Synthetic oligonucleotide
cactatcgcagcaagagctctcactgtgatgcgggtatgtgctaccttacaagaggcccg

SEQ ID NO: 12956 - DNA, 60 bp, Artificial
  Synthetic oligonucleotide
ccgactccgtacccgcatgtgagacgtcgtattcagtatctcggctatgtcccagaagat

SEQ ID NO: 12957 - DNA, 56 bp, Artificial
  Synthetic oligonucleotide
aatttttgacctcacaggtcagcattcgttcgtgacgggacgtgacatcggattat

SEQ ID NO: 12958 - DNA, 60 bp, Artificial
  Synthetic oligonucleotide
tagctggtaatctgctacggattcaggacactattcaacgcaccgtccaagatgggttcc

SEQ ID NO: 12959 - DNA, 55 bp, Artificial
  Synthetic oligonucleotide
ggattcaggacactattcaacgcaccgtccaagatgggttcctcgccctacgcag

SEQ ID NO: 12960 - DNA, 60 bp, Artificial
  Synthetic oligonucleotide
ccgcccatcaatggagatgattgaaccggtcgtatccaagggcgctcgcgctatttgggc

SEQ ID NO: 12961 - DNA, 60 bp, Artificial
  Synthetic oligonucleotide
tagcaaatctgtcgcttgcatgtgccaataggagcggcgctacccgttgtatgaaggggt

SEQ ID NO: 12962 - DNA, 50 bp, Artificial
  Synthetic oligonucleotide
aacgaggagcatctcacgtagacgtttacagggtggatgtcgtaaacgta

SEQ ID NO: 12963 - DNA, 56 bp, Artificial
  Synthetic oligonucleotide
actactaagacgtatatacgataaattgacggtacaaaagactgacgaaatagata

SEQ ID NO: 12964 - DNA, 55 bp, Artificial
  Synthetic oligonucleotide
ctctccggtcatctcagccattatagactttaagacactcaagaatctaaacgac

SEQ ID NO: 12965 - DNA, 60 bp, Artificial
  Synthetic oligonucleotide
gattcacggcgtaaatccgatgcctgggccgctcacacgtgctattgcacgcgccgccta

SEQ ID NO: 12966 - DNA, 60 bp, Artificial
  Synthetic oligonucleotide
aatccacggcgtaaaccaaatgcctgggccgctcacacgtgctattgcacgcgccgccta

SEQ ID NO: 12967 - DNA, 60 bp, Artificial
  Synthetic oligonucleotide
cgtcagcggagtctctagggtatgtgttagggccatattatgacctacgtctgcaattat

SEQ ID NO: 12968 - DNA, 55 bp, Artificial
  Synthetic oligonucleotide
cagcggaatctttagagtatgcgttagggccatattatgacctacgtctgcagtt

SEQ ID NO: 12969 - DNA, 60 bp, Artificial
  Synthetic oligonucleotide
gtcaaaatgttagaagtgccagttaaacatgatgaccatttactacgtgattctgagtta

SEQ ID NO: 12970 - DNA, 60 bp, Artificial
  Synthetic oligonucleotide
taccgtatgagtactttatcgcgcaacacgctgtagtagagaaaatgttatcatatgcaa

SEQ ID NO: 12971 - DNA, 55 bp, Artificial
  Synthetic oligonucleotide
cgcgcaacacgctgtagtagagaaaatgttatcatatgcaaagcatactagagag

SEQ ID NO: 12972 - DNA, 50 bp, Artificial
  Synthetic oligonucleotide
caaagccaggtacatcgcatgcaccaagaaaaatactcgaagttaatcct

SEQ ID NO: 12973 - DNA, 59 bp, Artificial
  Synthetic oligonucleotide
aatcatggcaatattgtacgagggatttgcgaattcacaaatgagttagttgcagcaca

SEQ ID NO: 12974 - DNA, 60 bp, Artificial
  Synthetic oligonucleotide
ccatctggtatccaatcttagttagcatgtagctatatcaagtcattcagactcttcaag

SEQ ID NO: 12975 - DNA, 55 bp, Artificial
  Synthetic oligonucleotide
cgggcatgttcgaccctgcaagaggctaggatcgtattagaggcaaacgttatgg

SEQ ID NO: 12976 - DNA, 60 bp, Artificial
  Synthetic oligonucleotide
tctacagatgcgccggctagctacggcgttacagaaagagatcggagaaagaacacatgc

SEQ ID NO: 12977 - DNA, 58 bp, Artificial
  Synthetic oligonucleotide
gatgaagttcaagattccgagagctcaacagccgcagattcatgtatacagtgctcca

SEQ ID NO: 12978 - DNA, 57 bp, Artificial
  Synthetic oligonucleotide
ctgttctcgaaatgtatcaacagattgacttcaacgcagttgactacagcgtactct

SEQ ID NO: 12979 - DNA, 53 bp, Artificial
  Synthetic oligonucleotide
caatgttgccttacactgccgtaccgaccgtcacttcaatgatggaccatctg

SEQ ID NO: 12980 - DNA, 60 bp, Artificial
  Synthetic oligonucleotide
tgtaggtgacgagactcgttacttcaaaccactcaagtgttctggaccatatgccatatt

SEQ ID NO: 12981 - DNA, 53 bp, Artificial
  Synthetic oligonucleotide
atgccatattcgaacgattaccatgtgagaaggattatcgtgttaacggccta

SEQ ID NO: 12982 - DNA, 60 bp, Artificial
  Synthetic oligonucleotide
gtccacgagtttcaaaccattagcgcccttgtgcattacatgattgagaacgttcgtaca

SEQ ID NO: 12983 - DNA, 51 bp, Artificial
  Synthetic oligonucleotide
aactgatgtctttagtttaagtgagattgcgcgccgtgatcatttgaatgc

SEQ ID NO: 12984 - DNA, 50 bp, Artificial
  Synthetic oligonucleotide
cccatttacgactgaggctgcaaatgagatagcgcgtgtgactggcgaga

SEQ ID NO: 12985 - DNA, 60 bp, Artificial
  Synthetic oligonucleotide
tatagtgcatgtcctctgttctcgtatcagcgagtagcgtaagttattcgcaggtgtgtg

SEQ ID NO: 12986 - DNA, 59 bp, Artificial
  Synthetic oligonucleotide
ttgagaggaatggatattggcgtttcatgacaatgcgcggtatttttaatggacgtaca

SEQ ID NO: 12987 - DNA, 60 bp, Artificial
  Synthetic oligonucleotide
ttcaattagcttgcggatttgtgactacattaaatagccctacgattcattggcattcat

SEQ ID NO: 12988 - DNA, 52 bp, Artificial
  Synthetic oligonucleotide
tgcaactgggtggaatgcgtaagagaagcccggttatgtcgaaatgatttgc

SEQ ID NO: 12989 - DNA, 51 bp, Artificial
  Synthetic oligonucleotide
gtcagagctgtttaaatcggctgaagaatacacggattcattgatggatcc

SEQ ID NO: 12990 - DNA, 59 bp, Artificial
  Synthetic oligonucleotide
ttacgtgtccagactatcagatcaattactggtatctaagaataatatagtgtctagag

SEQ ID NO: 12991 - DNA, 58 bp, Artificial
  Synthetic oligonucleotide
gatgctgatacgtatgttggctcaaagatttattcgcaagacaaatatagaatacttg

SEQ ID NO: 12992 - DNA, 55 bp, Artificial
  Synthetic oligonucleotide
taattcacagcaaacaatggctggtgtgaccgtaagtgtgggcggagtcgacatg

SEQ ID NO: 12993 - DNA, 60 bp, Artificial
  Synthetic oligonucleotide
ctagaagactaaacatcttctatgcggcctacataccatgtagcatgaatcacgactggg

SEQ ID NO: 12994 - DNA, 50 bp, Artificial
  Synthetic oligonucleotide
tcgtccttctctgtagatccgcagttatattgtgattacaatattgtgtt

SEQ ID NO: 12995 - DNA, 57 bp, Artificial
  Synthetic oligonucleotide
ttactcagcgtacgagtcaaatggagaccgtgtcgcttgggatacttaaccaagcca

SEQ ID NO: 12996 - DNA, 55 bp, Artificial
  Synthetic oligonucleotide
cacgttcaagtgaggctattggactgctggaatcgtttggagtagacgttggggc

SEQ ID NO: 12997 - DNA, 55 bp, Artificial
  Synthetic oligonucleotide
gcgcgtcaggagtgttcacgccaacatactgaatgacatatcacctcagatcatc

SEQ ID NO: 12998 - DNA, 55 bp, Artificial
  Synthetic oligonucleotide
cgtcaagaggatgggatgttcacagattggttcttgcttctgactatgctgtccg

SEQ ID NO: 12999 - DNA, 60 bp, Artificial
  Synthetic oligonucleotide
gcttttatgtggccatagcacaggacggggggctgcgtataatgcgagactagctttccg

SEQ ID NO: 13000 - DNA, 50 bp, Artificial
  Synthetic oligonucleotide
aactataggttaggattgtgcgaaatagagaatacgatgtcaatcagtga

SEQ ID NO: 13001 - DNA, 55 bp, Artificial
  Synthetic oligonucleotide
gacgtaaacgtatgaccttttcgcaggagtttctcacagactttagacgggcgga

SEQ ID NO: 13002 - DNA, 53 bp, Artificial
  Synthetic oligonucleotide
tcagcaagcttcccacggctactccatccaacagtacctccactcccacacgt

SEQ ID NO: 13003 - DNA, 55 bp, Artificial
  Synthetic oligonucleotide
ccggatcagaaatccaagtagccggatttgattactcatgtgctcttaatgcacc

SEQ ID NO: 13004 - DNA, 54 bp, Artificial
  Synthetic oligonucleotide
ctttgacagcttacgatattggatgtcgcgactacgaatgcgcttacatgacgg

SEQ ID NO: 13005 - DNA, 60 bp, Artificial
  Synthetic oligonucleotide
atgcgttttggagggatgtgagaatttgttacatgcgtcgcctactgacctttcgacaga

SEQ ID NO: 13006 - DNA, 55 bp, Artificial
  Synthetic oligonucleotide
gagaatttgttacatgcgtcgcctactgacctttcgacagaccgagttacgacgg

SEQ ID NO: 13007 - DNA, 57 bp, Artificial
  Synthetic oligonucleotide
gctcgtgtgtaatgagatcgctggtccggatctcaatacccgaacgttcccagtttt

SEQ ID NO: 13008 - DNA, 58 bp, Artificial
  Synthetic oligonucleotide
cagcatgaataccaacctacatctctttggttcactggagatgatctaggggttgggt

SEQ ID NO: 13009 - DNA, 60 bp, Artificial
  Synthetic oligonucleotide
gcagagcgacgagcaaatgtgattgatcgccaggctatccgttgggataggttaatcagc

SEQ ID NO: 13010 - DNA, 60 bp, Artificial
  Synthetic oligonucleotide
tcgatctgagtatcgacttagttcactatgaggatttaacggctcattggcatgcattgg

SEQ ID NO: 13011 - DNA, 55 bp, Artificial
  Synthetic oligonucleotide
gttcactatgaggatttaacggctcattggcatgcattgggagcggctcagatgg

SEQ ID NO: 13012 - DNA, 60 bp, Artificial
  Synthetic oligonucleotide
gctgctggaattaacgttggaccaatatcgccggattatacccagcatatggctaccatc

SEQ ID NO: 13013 - DNA, 55 bp, Artificial
  Synthetic oligonucleotide
gaccaatatcgccggattatacccagcatatggctaccatcggtgttctagcgac

SEQ ID NO: 13014 - DNA, 56 bp, Artificial
  Synthetic oligonucleotide
gtcgtaagtgagcttgacgctgaagtaatcgaatacacaattgatacaagtaatag

SEQ ID NO: 13015 - DNA, 58 bp, Artificial
  Synthetic oligonucleotide
aatccgttcgtattgctagtggtcacatcaatcatccgtctgttacatttgttactga

SEQ ID NO: 13016 - DNA, 51 bp, Artificial
  Synthetic oligonucleotide
caccaacccctctgtctccagttctaagagtttgagcgatctaccaacctc

SEQ ID NO: 13017 - DNA, 50 bp, Artificial
  Synthetic oligonucleotide
aacaagaacaacccgtatataacggtccaggtatccgaactctcgttccc

SEQ ID NO: 13018 - DNA, 55 bp, Artificial
  Synthetic oligonucleotide
gaacgtggatttggcagtcgtgtttggcatggataccacagtcataggatggccg

SEQ ID NO: 13019 - DNA, 60 bp, Artificial
  Synthetic oligonucleotide
gtacgatcgggaaagcagctgagaggttcgcagagagtgagatcggttcagccgcgattg

SEQ ID NO: 13020 - DNA, 55 bp, Artificial
  Synthetic oligonucleotide
cacttacgaatttcggggtttcgaggcgtcaggactgttgctggatctcatcgtg

SEQ ID NO: 13021 - DNA, 54 bp, Artificial
  Synthetic oligonucleotide
ggccaaactatacactagcaatgtctccaagtttgaaaggatcatccgtcttta

SEQ ID NO: 13022 - DNA, 60 bp, Artificial
  Synthetic oligonucleotide
aacgccctattcacaatcgcatctgagtacttcaacgctccggctgtcaaagagatagtc

SEQ ID NO: 13023 - DNA, 60 bp, Artificial
  Synthetic oligonucleotide
acagagctgtattgtatcagttgctggacatgctatcgatgttggcccggactattatcg

SEQ ID NO: 13024 - DNA, 60 bp, Artificial
  Synthetic oligonucleotide
ggctttgaacttgtccggtcttctggagcataggctgctacatttcggatctcttggtac

SEQ ID NO: 13025 - DNA, 60 bp, Artificial
  Synthetic oligonucleotide
gccaacggtgatcaatattcgcattattcacagatgtcaaagccaagtgggagtgaaatc

SEQ ID NO: 13026 - DNA, 60 bp, Artificial
  Synthetic oligonucleotide
agctaaagtgtgttgcgttaaaatgactgccatggatttagaactaccgatatctgcgaa

SEQ ID NO: 13027 - DNA, 55 bp, Artificial
  Synthetic oligonucleotide
aaaatgactgccatggatttagaactaccgatatctgcgaaattactacaccacc

SEQ ID NO: 13028 - DNA, 60 bp, Artificial
  Synthetic oligonucleotide
tatgggctaacccataaggattggcgtctgtcacgcaataacgcacctgaccctattcat

SEQ ID NO: 13029 - DNA, 55 bp, Artificial
  Synthetic oligonucleotide
gactgttaaatggtttaccggtgagcgtcaggctattaactggttcactcaagag

SEQ ID NO: 13030 - DNA, 51 bp, Artificial
  Synthetic oligonucleotide
aacaattcaatctgaaacacaattcttaacgggtatcaattcacaagccgc

SEQ ID NO: 13031 - DNA, 52 bp, Artificial
  Synthetic oligonucleotide
gtcacgtagttaaccagttgatggaggctctaatgcagttgtcgagacaaca

SEQ ID NO: 13032 - DNA, 60 bp, Artificial
  Synthetic oligonucleotide
tggaaaagggcacttatacttatgcggtgatggtcatgctccaagaacattgacatgtgc

SEQ ID NO: 13033 - DNA, 55 bp, Artificial
  Synthetic oligonucleotide
tgttgcagagtactcttcccgatgttgaaaagttggtatggttgtgtgctatgtc

SEQ ID NO: 13034 - DNA, 56 bp, Artificial
  Synthetic oligonucleotide
gtgtagattcggacgcttttgggaaatgggtaaccatgatggtatcgaatagtacg

SEQ ID NO: 13035 - DNA, 60 bp, Artificial
  Synthetic oligonucleotide
acggtctaagaataggcacttacagatcggtcctagcatgcgagttactgcgggttgcag

SEQ ID NO: 13036 - DNA, 56 bp, Artificial
  Synthetic oligonucleotide
cgggttgcagaggttgggcctcccgtcgagggatagtcggacatttcactagcgcg

SEQ ID NO: 13037 - DNA, 59 bp, Artificial
  Synthetic oligonucleotide
tcccaacttgtagtgtgattgacgtacgtgcatctgaactgactgggtgctcaccgttt

SEQ ID NO: 13038 - DNA, 51 bp, Artificial
  Synthetic oligonucleotide
agattgctggaatgaccgctgatgtcttagaggcagcatcggaggaggtgc

SEQ ID NO: 13039 - DNA, 60 bp, Artificial
  Synthetic oligonucleotide
gttaaaacatgccggagccacatgcggttatctatgtcacggaggaactgacgcacctga

SEQ ID NO: 13040 - DNA, 55 bp, Artificial
  Synthetic oligonucleotide
ctgaggggacacggatttatatttgtaagcacgaggaagactgtacaactgagtg

SEQ ID NO: 13041 - DNA, 60 bp, Artificial
  Synthetic oligonucleotide
gtcatgtggatcgaacgaggcatcaagatgctcaggtacacacaatagtgcagaaagatg

SEQ ID NO: 13042 - DNA, 60 bp, Artificial
  Synthetic oligonucleotide
agagagaacgtagcagttatacaggttggtggctcaaatatactcgacataacggctgat

SEQ ID NO: 13043 - DNA, 60 bp, Artificial
  Synthetic oligonucleotide
tagcgataccaagcctaccgtctcagatgattttatcactacgtacattaggccacgtct

SEQ ID NO: 13044 - DNA, 55 bp, Artificial
  Synthetic oligonucleotide
ccgactgacgcgaacaacctccccgtccaaacggattcacgcttgtcgttctcac

SEQ ID NO: 13045 - DNA, 60 bp, Artificial
  Synthetic oligonucleotide
gcgggaattaacctcggtcctatatcgccagattatcaacagcatatgggtacaatcgga

SEQ ID NO: 13046 - DNA, 60 bp, Artificial
  Synthetic oligonucleotide
ttaacgagggtgcaacgcagcgctttgctcaggctattttgtttcgtgtgttatggacat

SEQ ID NO: 13047 - DNA, 60 bp, Artificial
  Synthetic oligonucleotide
taacctcggccctatatcgccagattatcaacagcatatgggtacaatcggagtgttagc

SEQ ID NO: 13048 - DNA, 51 bp, Artificial
  Synthetic oligonucleotide
agtatactggtacgcaggaactacaccggatgcttcagaaagctattatct

SEQ ID NO: 13049 - DNA, 60 bp, Artificial
  Synthetic oligonucleotide
caatggcggatgcatcaacacaaatctcaaatgttagtaggagtttacgattgcgtgaat

SEQ ID NO: 13050 - DNA, 56 bp, Artificial
  Synthetic oligonucleotide
atatcagccgcagtattaaagacgaaattggataaatcaacacaaatctcgcaaag

SEQ ID NO: 13051 - DNA, 55 bp, Artificial
  Synthetic oligonucleotide
attttgtgtattttcaagaagtaacacacggtgggacacgtctgcataaaggtcc

SEQ ID NO: 13052 - DNA, 52 bp, Artificial
  Synthetic oligonucleotide
gtgggacacgtctgcataaaggtcccaaaactagtggacagcctaactttcg

SEQ ID NO: 13053 - DNA, 60 bp, Artificial
  Synthetic oligonucleotide
cgtcacatgctggtagtactaaaatgcactcagaacgcttgacgcgtagcgcaggaaatg

SEQ ID NO: 13054 - DNA, 58 bp, Artificial
  Synthetic oligonucleotide
gcaggaaatgaacccatctatgtaacgtcgatgtactatccctatagttatgtgcaaa

SEQ ID NO: 13055 - DNA, 55 bp, Artificial
  Synthetic oligonucleotide
cgcagcgctttgctcaggctattttgtttcgtgtgttatggacatgcgccacgcg

SEQ ID NO: 13056 - DNA, 60 bp, Artificial
  Synthetic oligonucleotide
tatgtctctaaaactcaggcattggatggcgaaggaagtgctgtgatcgggggcgcatgt

SEQ ID NO: 13057 - DNA, 55 bp, Artificial
  Synthetic oligonucleotide
aacggaggaaacgtatcagcccggtcgttggtttatgcgagctgcgcaggctgtg

SEQ ID NO: 13058 - DNA, 60 bp, Artificial
  Synthetic oligonucleotide
caacgttagctgatgtatatactgtactgcgaccggagttcgctatccatggtgtgaatc

SEQ ID NO: 13059 - DNA, 50 bp, Artificial
  Synthetic oligonucleotide
gttgcaggattcgattactcttgtgctattaatgctcccgctaacactca

SEQ ID NO: 13060 - DNA, 56 bp, Artificial
  Synthetic oligonucleotide
caactaatgcggcctccaaatatgacgccagctgtcgccgcactatttccaaatgc

SEQ ID NO: 13061 - DNA, 60 bp, Artificial
  Synthetic oligonucleotide
tcacgtgaagataacctacaacgtgtgtttactgtggcctccattagaagcatgcttgtt

SEQ ID NO: 13062 - DNA, 55 bp, Artificial
  Synthetic oligonucleotide
ccaagctagcaccttggtatccaatcttatcacgcatgtagctatatcaagctgc

SEQ ID NO: 13063 - DNA, 51 bp, Artificial
  Synthetic oligonucleotide
gttaaaaatcattacgagtttgccagaactatggagcatttcattcgattc

SEQ ID NO: 13064 - DNA, 60 bp, Artificial
  Synthetic oligonucleotide
tatcactctaatgaactccacattgcatacgattcttgaggaccccgggatggcgtactt

SEQ ID NO: 13065 - DNA, 56 bp, Artificial
  Synthetic oligonucleotide
ttccgttgaccggatttcaatgtgcacacaacgaccacatttagacggaattgatc

SEQ ID NO: 13066 - DNA, 55 bp, Artificial
  Synthetic oligonucleotide
gaagggcggagccgcgtatgagtttcaaaatggagggcataacaacgtggattgg

SEQ ID NO: 13067 - DNA, 55 bp, Artificial
  Synthetic oligonucleotide
ttcaaaatggagggcataacaacgtggattggatcaaactgcggtggggttcagg

SEQ ID NO: 13068 - DNA, 60 bp, Artificial
  Synthetic oligonucleotide
gcaggggatgtagattgggtaacacggatgctttacgatgtgtgtcgactagagggtagc

SEQ ID NO: 13069 - DNA, 55 bp, Artificial
  Synthetic oligonucleotide
gggtaacacggatgctttacgatgtgtgtcgactagagggtagcttgggcttcat

SEQ ID NO: 13070 - DNA, 55 bp, Artificial
  Synthetic oligonucleotide
gaactccacattgcatacgattcttgaggaccccgggatggcgtacttcccatat

SEQ ID NO: 13071 - DNA, 57 bp, Artificial
  Synthetic oligonucleotide
cacctaaggactcctagaattgaacctcagacgctagaagtgatcctacgaacgcca

SEQ ID NO: 13072 - DNA, 60 bp, Artificial
  Synthetic oligonucleotide
catgtgttgcgaggcccaaagcactttcaaagacgtgcaataatgggtgcgattaaagtg

SEQ ID NO: 13073 - DNA, 60 bp, Artificial
  Synthetic oligonucleotide
gcccgccccgattgtcaaatcaaatctcaatactctgatgtcgttccaatcatcgcaaac

SEQ ID NO: 13074 - DNA, 60 bp, Artificial
  Synthetic oligonucleotide
cgatgccaactcttgctaatctgaacccttcattccaacgtgtacacgagcttctaatgg

SEQ ID NO: 13075 - DNA, 55 bp, Artificial
  Synthetic oligonucleotide
gtagcatataaccaaaattcacaagtcatcggagtagtgcttgaaggctcacctt

SEQ ID NO: 13076 - DNA, 60 bp, Artificial
  Synthetic oligonucleotide
tcgcaacgacgtatggtagaatcgctgaatctcaagctcgacagattaaggctccattgg

SEQ ID NO: 13077 - DNA, 60 bp, Artificial
  Synthetic oligonucleotide
acaacgtatggtagaatcgctgaatctcaagctcgacagattaaggctccattggagaag

SEQ ID NO: 13078 - DNA, 58 bp, Artificial
  Synthetic oligonucleotide
agtgtcacgcttcgagataatgctatgacatttggcgatcacgaaccctcaccggtgc

SEQ ID NO: 13079 - DNA, 55 bp, Artificial
  Synthetic oligonucleotide
gtgttcgatatgactgagtgagctaaaaacttaacacactggtcacatcgtgacc

SEQ ID NO: 13080 - DNA, 60 bp, Artificial
  Synthetic oligonucleotide
gtcatgctgagatcatctgtgacaaccaaagttgttcgtaacgtggttgagtaccaaatt

SEQ ID NO: 13081 - DNA, 60 bp, Artificial
  Synthetic oligonucleotide
taaagacatgtctgatacttaactgcatgcagtttaagttagagatggacgacctggcac

SEQ ID NO: 13082 - DNA, 60 bp, Artificial
  Synthetic oligonucleotide
ctataccagttggaccagtatttccaccaggcatgaattggactgagctgattactaact

SEQ ID NO: 13083 - DNA, 60 bp, Artificial
  Synthetic oligonucleotide
caaacatagagtatatcagcaacttagtgcgattaccctgcttaatctgactggcttcgg

SEQ ID NO: 13084 - DNA, 60 bp, Artificial
  Synthetic oligonucleotide
ctaagccatttaccaatgctcaatggggccggggaaatacagcagcgactagcgcagcga

SEQ ID NO: 13085 - DNA, 55 bp, Artificial
  Synthetic oligonucleotide
gctcaatggggccggggaaatacagcagcgactagcgcagcgattgcggctctca

SEQ ID NO: 13086 - DNA, 60 bp, Artificial
  Synthetic oligonucleotide
cgtctgctatagtgtcgaaacatcctgcgcgtgttgggttaccacctaccgctagcagtg

SEQ ID NO: 13087 - DNA, 60 bp, Artificial
  Synthetic oligonucleotide
tgagtatctgatccagaaagcacatgaagcgtggtcggtttattgcggagtattaaacga

SEQ ID NO: 13088 - DNA, 60 bp, Artificial
  Synthetic oligonucleotide
tgtgggtctaagaagacattcgacaatgttgagactaaattcagatcaggtacatcgtag

SEQ ID NO: 13089 - DNA, 60 bp, Artificial
  Synthetic oligonucleotide
gacatgcctttattgcgtaaatctgattacactcgctggatggatatgctgcgatagctg

SEQ ID NO: 13090 - DNA, 55 bp, Artificial
  Synthetic oligonucleotide
gcgtaaatctgattacactcgctggatggatatgctgcgatagctgaacaatgtg

SEQ ID NO: 13091 - DNA, 55 bp, Artificial
  Synthetic oligonucleotide
gggctgcatacaacgcgagactagcttttcgatctgacttggcgtgatccgtgac

SEQ ID NO: 13092 - DNA, 60 bp, Artificial
  Synthetic oligonucleotide
gtgaattaggtgatgtctactactctttacgtcacacttatcaatggagtctgcgcccgg

SEQ ID NO: 13093 - DNA, 58 bp, Artificial
  Synthetic oligonucleotide
gctaacccatggagagattgcgtcgcgtaagactgacgacccgtggaacaaccgagtc

SEQ ID NO: 13094 - DNA, 60 bp, Artificial
  Synthetic oligonucleotide
tagtcaacgagacgatttccagacgcttactcactacgtaaaggatgatgcaatatgtcc

SEQ ID NO: 13095 - DNA, 60 bp, Artificial
  Synthetic oligonucleotide
taatgtagggtctcagcggttgggagtattgagtagtgcattcccaaatctcgctaatcg

SEQ ID NO: 13096 - DNA, 60 bp, Artificial
  Synthetic oligonucleotide
acctcgcttcactatgcgcgggattagctgattcgattgtctacactttgccggtcgcac

SEQ ID NO: 13097 - DNA, 50 bp, Artificial
  Synthetic oligonucleotide
aggtatgtcgagtcctggatacaatatttgcgtaacgcttaaaggtgaca

SEQ ID NO: 13098 - DNA, 54 bp, Artificial
  Synthetic oligonucleotide
tccgcatggtaccaggagtcaatgctattcagtgcgctgttacctccagttctc

SEQ ID NO: 13099 - DNA, 55 bp, Artificial
  Synthetic oligonucleotide
tggtcgctgctcctgatccacctcgtgcgcctccctacgtcccagtctctggtgc

SEQ ID NO: 13100 - DNA, 56 bp, Artificial
  Synthetic oligonucleotide
agatcgcaatggtgctagctcagtcctgctctaatatgccgttcgctccagagtct

SEQ ID NO: 13101 - DNA, 51 bp, Artificial
  Synthetic oligonucleotide
tatccggtcgtgagtcttatctgctttcgagagatcacgtattatatcaac

SEQ ID NO: 13102 - DNA, 60 bp, Artificial
  Synthetic oligonucleotide
cgcagtgaattgatgtccttacgttcaacagtcggtgatctgtcttcccagtttgcgtca

SEQ ID NO: 13103 - DNA, 52 bp, Artificial
  Synthetic oligonucleotide
gattgctacgctggtctcgactgccacctctcattccgataagatgtctgaa

SEQ ID NO: 13104 - DNA, 58 bp, Artificial
  Synthetic oligonucleotide
agtatccgattcggtcgaccaactgtctctcaactataagactttagagactgacgtc

SEQ ID NO: 13105 - DNA, 60 bp, Artificial
  Synthetic oligonucleotide
gtgcgtctcttagtgttccctgctcgtgtgtaatgggtgagtgatgctaggcgatcgtca

SEQ ID NO: 13106 - DNA, 60 bp, Artificial
  Synthetic oligonucleotide
gaaatttatgttatgtaccgcactcaacatattacgcactgagagggcatttggtggcaa

SEQ ID NO: 13107 - DNA, 55 bp, Artificial
  Synthetic oligonucleotide
accgcactcaacatattacgcactgagagggcatttggtggcaaagatgttctcc

SEQ ID NO: 13108 - DNA, 55 bp, Artificial
  Synthetic oligonucleotide
gaccttaggaattggctgtctgaccaccgatgtatcgacgtttgaagaggttgca

SEQ ID NO: 13109 - DNA, 51 bp, Artificial
  Synthetic oligonucleotide
tactaactatcaaaacgtgtctaatcctgaaccgtttctaacatcaacact

SEQ ID NO: 13110 - DNA, 56 bp, Artificial
  Synthetic oligonucleotide
cctatttccgcaagcaccaccattcatatttcatgccacagttggacttacattac

SEQ ID NO: 13111 - DNA, 53 bp, Artificial
  Synthetic oligonucleotide
gctggcgtgcggtcatagtactggacggggggctgcatacaacgcgagactag

SEQ ID NO: 13112 - DNA, 60 bp, Artificial
  Synthetic oligonucleotide
gagagtaatccctttaaaggactgtcaactgatagaaagatggatgaagtctctcaagta

SEQ ID NO: 13113 - DNA, 58 bp, Artificial
  Synthetic oligonucleotide
ctggtacatctggcaccatccggccgtatagttcgatcgtttctggaaactctgcatc

SEQ ID NO: 13114 - DNA, 60 bp, Artificial
  Synthetic oligonucleotide
acagtagcatgcccgatacatagtgacgttatgctaaggtcgctgtctcctagtgacccg

SEQ ID NO: 13115 - DNA, 58 bp, Artificial
  Synthetic oligonucleotide
taccaattattcaccttcaagagaagataacttgcaacgtgttttcacagtagcttcc

SEQ ID NO: 13116 - DNA, 57 bp, Artificial
  Synthetic oligonucleotide
acattatctaagtctaaagggcttatggcgatacattcctctcacaaatttagacag

SEQ ID NO: 13117 - DNA, 51 bp, Artificial
  Synthetic oligonucleotide
ggcgagaaatgtcgattacggaaccaattgggcagatagaattgctaagaa

SEQ ID NO: 13118 - DNA, 55 bp, Artificial
  Synthetic oligonucleotide
gcgtattactagggtaacagaacggctcgtggtactagctggatccgaacgtgct

SEQ ID NO: 13119 - DNA, 51 bp, Artificial
  Synthetic oligonucleotide
attacatgcgaagtgatgttgaggatcttagtccacaattacctgtaatat

SEQ ID NO: 13120 - DNA, 60 bp, Artificial
  Synthetic oligonucleotide
tagagtcgtgtgcgtacgccacttagttcgactaatgcgtgcccccacactgcgcaggga

SEQ ID NO: 13121 - DNA, 50 bp, Artificial
  Synthetic oligonucleotide
gctcggacgcgtactactgagatgggaactaacgaaggcacaacgcagtg

SEQ ID NO: 13122 - DNA, 60 bp, Artificial
  Synthetic oligonucleotide
atgtctcaatcacgcgagttcctcacgaaggcaattgagcaggggtccatgtctatacct

SEQ ID NO: 13123 - DNA, 60 bp, Artificial
  Synthetic oligonucleotide
tattgtcggaatgccttcgaaagctagggcagctttgaccaggcgaaccgatgaacatta

SEQ ID NO: 13124 - DNA, 57 bp, Artificial
  Synthetic oligonucleotide
tataacgaagggaggttcatgtttatgcagcacaagccgttagcggcagatcagtcg

SEQ ID NO: 13125 - DNA, 57 bp, Artificial
  Synthetic oligonucleotide
aaatgtggacgtgtttagagcggcgatgtcggacccaatctatcggatacacaatgt

SEQ ID NO: 13126 - DNA, 50 bp, Artificial
  Synthetic oligonucleotide
gttaaaaacgttagcctagagatggaggagctagttataccagtcataac

SEQ ID NO: 13127 - DNA, 60 bp, Artificial
  Synthetic oligonucleotide
gatgttctcaaacacgttacacatcgattcgaggaaagcggataccacgtcatatcatac

SEQ ID NO: 13128 - DNA, 55 bp, Artificial
  Synthetic oligonucleotide
aactataatggaaaagcattattgggatttagacgatagtgatgttacgtatgag

SEQ ID NO: 13129 - DNA, 60 bp, Artificial
  Synthetic oligonucleotide
tgaggaggatgtgcacgcgtgtgcgagcgcgatcctggatttctatctaacgacaactat

SEQ ID NO: 13130 - DNA, 55 bp, Artificial
  Synthetic oligonucleotide
cgtatctatcctcggtgtgtggcggtttttctgaggcgattctgtggtacctccc

SEQ ID NO: 13131 - DNA, 60 bp, Artificial
  Synthetic oligonucleotide
tcgcaagtgttcagaaacatggtctacgtacgatcattggcagcaaatttgaatgacgta

SEQ ID NO: 13132 - DNA, 55 bp, Artificial
  Synthetic oligonucleotide
catggtctacgtacgatcattggcagcaaatttgaatgacgtaatgtgttctggc

SEQ ID NO: 13133 - DNA, 60 bp, Artificial
  Synthetic oligonucleotide
gctcgcaaaacacgccgtaaggcataacggcaccctaatcaacccacgtatgtatgctga

SEQ ID NO: 13134 - DNA, 55 bp, Artificial
  Synthetic oligonucleotide
ggcataacggcaccctaatcaacccacgtatgtatgctgacatgatcacgctagg

SEQ ID NO: 13135 - DNA, 55 bp, Artificial
  Synthetic oligonucleotide
cgaggaatgatgggatagtaataccaaggttgttggatataacactgcacgcgta

SEQ ID NO: 13136 - DNA, 60 bp, Artificial
  Synthetic oligonucleotide
atgtcgatacggtgtactacgattatcatccgcttgagagtgaggcgactaagtgtaatc

SEQ ID NO: 13137 - DNA, 60 bp, Artificial
  Synthetic oligonucleotide
gacagagatatgacgcagcaggggtaagatggtccagactatcacgagatcaaaggatag

SEQ ID NO: 13138 - DNA, 60 bp, Artificial
  Synthetic oligonucleotide
tttactcgtatggattaagatatatggagctgttatgtaatacaatcgcacgtgggaata

SEQ ID NO: 13139 - DNA, 52 bp, Artificial
  Synthetic oligonucleotide
ctgtgaaggaaacgggattaccagtattagcaaaattctgcgagacgttagt

SEQ ID NO: 13140 - DNA, 60 bp, Artificial
  Synthetic oligonucleotide
caggtaaggcgctatcagtattagcggattgttcatcatgggatcagacatatctcactg

SEQ ID NO: 13141 - DNA, 55 bp, Artificial
  Synthetic oligonucleotide
tgtgctttgagtataacaagcgtgcaataggtagtttgagggtgaatagcctgta

SEQ ID NO: 13142 - DNA, 54 bp, Artificial
  Synthetic oligonucleotide
caccaatcgttcaagcaattggccgtagacaaggacgtagctagactgactagc

SEQ ID NO: 13143 - DNA, 60 bp, Artificial
  Synthetic oligonucleotide
gtagttgactcggatgaggtgggcgagcaaatggagcctacgtttgagcatgcggttatg

SEQ ID NO: 13144 - DNA, 55 bp, Artificial
  Synthetic oligonucleotide
tacaacaggatggcgagggaaccaaatctcgccgttcttccgccgaccttacctc

SEQ ID NO: 13145 - DNA, 52 bp, Artificial
  Synthetic oligonucleotide
agtcatcggtatagatagacctgaactgtactctgagctgaaccgtatcgtt

SEQ ID NO: 13146 - DNA, 60 bp, Artificial
  Synthetic oligonucleotide
tcgaccaatgttacagttaatccaggtccatttgctcaaacagactatgcaccagttgat

SEQ ID NO: 13147 - DNA, 55 bp, Artificial
  Synthetic oligonucleotide
tccaggtccatttgctcaaacagactatgcaccagttgattggggttcaggtgaa

SEQ ID NO: 13148 - DNA, 60 bp, Artificial
  Synthetic oligonucleotide
tccttcacagtaagtcccatcggacctgatggctggctgagaagccacagtcagtcatat

SEQ ID NO: 13149 - DNA, 60 bp, Artificial
  Synthetic oligonucleotide
cggattacaatggcagcggtggatacgttattcatgggctttatgctgtgctttctcacg

SEQ ID NO: 13150 - DNA, 54 bp, Artificial
  Synthetic oligonucleotide
gtaaaaatcttccaacgatgctagctgcacttgagatgaagtcgtcaccaactg

SEQ ID NO: 13151 - DNA, 53 bp, Artificial
  Synthetic oligonucleotide
cgggatggaaattaacgtatgttggatacaacggaagtgatacaaggggacac

SEQ ID NO: 13152 - DNA, 60 bp, Artificial
  Synthetic oligonucleotide
cgatcttaaacgatggatatatttacactcgacaggcaaagctagtattgaaggtggcag

SEQ ID NO: 13153 - DNA, 60 bp, Artificial
  Synthetic oligonucleotide
atcgtgttcttaagacttgcgccgataacttatggataccggatgtagcaggatcgccca

SEQ ID NO: 13154 - DNA, 55 bp, Artificial
  Synthetic oligonucleotide
atttacactcgacaggcaaagctagtattgaaggtggcagatattatgaacatgc

SEQ ID NO: 13155 - DNA, 55 bp, Artificial
  Synthetic oligonucleotide
cggtaggttcagatacaggtcggagttatatcgggaacgtgatgtaaattcgtcg

SEQ ID NO: 13156 - DNA, 57 bp, Artificial
  Synthetic oligonucleotide
gctcctcaattggctgtgacttccagtgatgacgtctcaaaggtttgtgttgcaaag

SEQ ID NO: 13157 - DNA, 57 bp, Artificial
  Synthetic oligonucleotide
cgtcaatcctaatggagggggtatccatatatctgaaggacttaaacgtctaatgcc

SEQ ID NO: 13158 - DNA, 57 bp, Artificial
  Synthetic oligonucleotide
taatagacgtggttttcagattgaagctatgaagcatgttatatatatggctagacg

SEQ ID NO: 13159 - DNA, 57 bp, Artificial
  Synthetic oligonucleotide
gctactagagtggctgacaacatgtttgactacataaacatcggttttgcaaaggac

SEQ ID NO: 13160 - DNA, 60 bp, Artificial
  Synthetic oligonucleotide
agcattcgatttcgcccaatttgactcaagtcaatatggtcgtatatccgatgctcatgc

SEQ ID NO: 13161 - DNA, 58 bp, Artificial
  Synthetic oligonucleotide
tgtgattacgcttatgaatgacacgctacatactataatggaagatcctggaatggcg

SEQ ID NO: 13162 - DNA, 51 bp, Artificial
  Synthetic oligonucleotide
tgtaagagattgggctgccgttgtctgtccacggaagcgacggagtcctta

SEQ ID NO: 13163 - DNA, 60 bp, Artificial
  Synthetic oligonucleotide
taactacgtactgcaactcatgtgcgcgtcttacgacattccaacaaactgggaatcact

SEQ ID NO: 13164 - DNA, 55 bp, Artificial
  Synthetic oligonucleotide
agtatgagcgcgtacattgggatgctataatgcggaccattctacctccaacacc

SEQ ID NO: 13165 - DNA, 59 bp, Artificial
  Synthetic oligonucleotide
tcgtaccgctattgaccatgagaatccagctagatattcgatgggtgacagtggatcat

SEQ ID NO: 13166 - DNA, 60 bp, Artificial
  Synthetic oligonucleotide
gcgcgtatatgactatgggcgtcggataccttggatgcacctctcagaaacggtaacatt

SEQ ID NO: 13167 - DNA, 54 bp, Artificial
  Synthetic oligonucleotide
tgcgggacggatttcgtaatggctgagtccttgcgcggttcgtgacgtatgggg

SEQ ID NO: 13168 - DNA, 60 bp, Artificial
  Synthetic oligonucleotide
gctgacactaagagctaatgactctggaaattgagcttcgaaaggtaccgggcaaccatg

SEQ ID NO: 13169 - DNA, 55 bp, Artificial
  Synthetic oligonucleotide
taatgactctggaaattgagcttcgaaaggtaccgggcaaccatgctttccgagg

SEQ ID NO: 13170 - DNA, 60 bp, Artificial
  Synthetic oligonucleotide
tgggtcgatgcattatgatatatcctacgctaccttgaagagtaacgcacagcggatagt

SEQ ID NO: 13171 - DNA, 60 bp, Artificial
  Synthetic oligonucleotide
gatttacgttggttactgtaacattatctgccttgacgagagctcagaattatggactta

SEQ ID NO: 13172 - DNA, 51 bp, Artificial
  Synthetic oligonucleotide
actccggtcgttctagtgacgaacgacccccaatacgtccaacgtgcccac

SEQ ID NO: 13173 - DNA, 50 bp, Artificial
  Synthetic oligonucleotide
tggggatctatcctggaaggagaccgctcggaaggctacgcagcgccgcg

SEQ ID NO: 13174 - DNA, 60 bp, Artificial
  Synthetic oligonucleotide
cgtattaagtcctactcgtgccattgcgaatcagatgttacacagcttctatgaacgcta

SEQ ID NO: 13175 - DNA, 60 bp, Artificial
  Synthetic oligonucleotide
ggtttgtgcacctctttcatgctactagacaacattccatctgcgcatctgacaaaggag

SEQ ID NO: 13176 - DNA, 55 bp, Artificial
  Synthetic oligonucleotide
cgggagtaggaaaggtgagtgtacgcgaagaagacggcatattaggttacgagtg

SEQ ID NO: 13177 - DNA, 50 bp, Artificial
  Synthetic oligonucleotide
atttcggcgatatgtatttctcccccgagtattacccggcaactttcgtt

SEQ ID NO: 13178 - DNA, 53 bp, Artificial
  Synthetic oligonucleotide
gcccgccaaatatgacaccagctgttaatgcactatttccgcaagcacaacct

SEQ ID NO: 13179 - DNA, 55 bp, Artificial
  Synthetic oligonucleotide
tcgggttgaagactggaaaatatcgtttcgcaagggttaatgcaactgaagttgg

SEQ ID NO: 13180 - DNA, 54 bp, Artificial
  Synthetic oligonucleotide
caagggttaatgcaactgaagttgggttatcatccgtgtgtcgtcgagtgctgg

SEQ ID NO: 13181 - DNA, 50 bp, Artificial
  Synthetic oligonucleotide
gaggggtacaatgtagctacctatttgccaggaggattattgataggaac

SEQ ID NO: 13182 - DNA, 60 bp, Artificial
  Synthetic oligonucleotide
gtatgtacgttcattggctgctaatctgaattctgtgatgtgtacggggggcgattatag

SEQ ID NO: 13183 - DNA, 60 bp, Artificial
  Synthetic oligonucleotide
ccctagtggaagccctctccacgctattgcgctccgtgactcctctagtccttgatccca

SEQ ID NO: 13184 - DNA, 59 bp, Artificial
  Synthetic oligonucleotide
taggatagagaatctaattatgcaatgtcgtttgtaagtaactgacgcaggttgtgacc

SEQ ID NO: 13185 - DNA, 55 bp, Artificial
  Synthetic oligonucleotide
tcgtgatgtgaatttgattacctatactgtgacgcgaactaacgccggagatacg

SEQ ID NO: 13186 - DNA, 50 bp, Artificial
  Synthetic oligonucleotide
gtgtgaaaagatgctacgcattgctgcacgctccgtcacctacacaccga

SEQ ID NO: 13187 - DNA, 60 bp, Artificial
  Synthetic oligonucleotide
agtcaacatacacatgtgacgatcacttttatacgtggacagatgcaagatttacagtat

SEQ ID NO: 13188 - DNA, 55 bp, Artificial
  Synthetic oligonucleotide
cgatcacttttatacgtggacagatgcaagatttacagtatttggatggtaagga

SEQ ID NO: 13189 - DNA, 52 bp, Artificial
  Synthetic oligonucleotide
gcgtggttttcagaggcatgagcagaacgttagatttgatagactccacagc

SEQ ID NO: 13190 - DNA, 58 bp, Artificial
  Synthetic oligonucleotide
tgaatgatctaactgacgaagtagctgattttatcccatcgagtgtcgaaattgtaag

SEQ ID NO: 13191 - DNA, 60 bp, Artificial
  Synthetic oligonucleotide
cgatgagggatggcaggagggtattttcatgctcggacgcgtactactgagatgggagct

SEQ ID NO: 13192 - DNA, 55 bp, Artificial
  Synthetic oligonucleotide
gccctcatggtttaagagccttaacccaatgcttggtgttgtcaacttgggagca

SEQ ID NO: 13193 - DNA, 59 bp, Artificial
  Synthetic oligonucleotide
gtaatgactacgcagcgttctggaaatgtatcgccagttgggcgtacaatggtctcgtt

SEQ ID NO: 13194 - DNA, 60 bp, Artificial
  Synthetic oligonucleotide
atttaccgatcacacatccgaacaaatgcattgtagcgatcgaggtatctgatgaaagag

SEQ ID NO: 13195 - DNA, 55 bp, Artificial
  Synthetic oligonucleotide
ccgaacaaatgcattgtagcgatcgaggtatctgatgaaagagttccggctagcg

SEQ ID NO: 13196 - DNA, 52 bp, Artificial
  Synthetic oligonucleotide
cgagaaggctgcctggagtatctgaacccgcgaagtatgaggcgtacgtagt

SEQ ID NO: 13197 - DNA, 60 bp, Artificial
  Synthetic oligonucleotide
ttttcacccttgacagagcgtggagttgtgtatcaagtagaggctgctcattacggtatg

SEQ ID NO: 13198 - DNA, 60 bp, Artificial
  Synthetic oligonucleotide
ctttcacttgcatcgtgtcaacatgatgtgacacaccctcatatagggatcccttgcagt

SEQ ID NO: 13199 - DNA, 51 bp, Artificial
  Synthetic oligonucleotide
gatgcacatactccgtgggccaatacactttcagagacgtgcaatactagg

SEQ ID NO: 13200 - DNA, 57 bp, Artificial
  Synthetic oligonucleotide
acgcttcgctcaataaggtcattaccgctctgggtaaggaatcagccgaaagaacgc

SEQ ID NO: 13201 - DNA, 54 bp, Artificial
  Synthetic oligonucleotide
agtaaaccggctttacttgagaccgtattcacactcgatatatggtacagaagg

SEQ ID NO: 13202 - DNA, 55 bp, Artificial
  Synthetic oligonucleotide
gaccggcttgcaacctgatccttaagcgaacgtgtaaatggtatcaacagacgtt

SEQ ID NO: 13203 - DNA, 58 bp, Artificial
  Synthetic oligonucleotide
ctgacaacctaccgtcacttgcccaatacttgatggctggaactatggatgccgtctc

SEQ ID NO: 13204 - DNA, 50 bp, Artificial
  Synthetic oligonucleotide
cgacgtaaagggttgctggttcacgcccctggcgaacgtttcgaggatct

SEQ ID NO: 13205 - DNA, 53 bp, Artificial
  Synthetic oligonucleotide
ctagatggacacgtgatggtgtacaagacgctgctattctgatggacgacaag

SEQ ID NO: 13206 - DNA, 60 bp, Artificial
  Synthetic oligonucleotide
tgtaccgatacaacttcacgtatcccactctcgatggcataatgtacgtgcgcagcgcga

SEQ ID NO: 13207 - DNA, 60 bp, Artificial
  Synthetic oligonucleotide
agatcttctcgctcgttgtaacgtgtcgagtgattcaatcagcgctgtcatctcccagag

SEQ ID NO: 13208 - DNA, 60 bp, Artificial
  Synthetic oligonucleotide
caatacctctctgagcgtgacgaattggcccaagagctagatgatttgaaacgggagatt

SEQ ID NO: 13209 - DNA, 60 bp, Artificial
  Synthetic oligonucleotide
tggacctacagtgtttagtgagttactagatttgtctcaccataataagacatcttggta

SEQ ID NO: 13210 - DNA, 60 bp, Artificial
  Synthetic oligonucleotide
cgtatacatgacaagctaattatcagaccagttgatgctatagacatgtcgaaagaattc

SEQ ID NO: 13211 - DNA, 56 bp, Artificial
  Synthetic oligonucleotide
ggatcgatgataaaaagatacatccgagggtgatgatgaggttcaaggtcccacga

SEQ ID NO: 13212 - DNA, 51 bp, Artificial
  Synthetic oligonucleotide
gcgcatgattagatcaaaaacggttcacccaatctacctagggtccatgca

SEQ ID NO: 13213 - DNA, 53 bp, Artificial
  Synthetic oligonucleotide
gatgcacatattaagagggcctctacactttcagcgacgtgcgatattaggtg

SEQ ID NO: 13214 - DNA, 57 bp, Artificial
  Synthetic oligonucleotide
tcgactagaccaatgattacattggacatttctgcaaatgcggaatcaattccagtg

SEQ ID NO: 13215 - DNA, 52 bp, Artificial
  Synthetic oligonucleotide
ggcttttaaagcgcgacagggatgtatctaagcatagacgtaacgagtcttc

SEQ ID NO: 13216 - DNA, 53 bp, Artificial
  Synthetic oligonucleotide
tcccacagcctgatacaactgacgatgaaagtcccgtcactaagcctggcgct

SEQ ID NO: 13217 - DNA, 60 bp, Artificial
  Synthetic oligonucleotide
acgattttctcgactaaaaagaacatgcacgtgatggatgacatggctaatggaagatat

SEQ ID NO: 13218 - DNA, 55 bp, Artificial
  Synthetic oligonucleotide
cggtgaaacaggcggtcctactgaatgtattgggtacgggcgaagagctgcctga

SEQ ID NO: 13219 - DNA, 55 bp, Artificial
  Synthetic oligonucleotide
gaacatgcacgtgatggatgacatggctaatggaagatatacgccaggtataata

SEQ ID NO: 13220 - DNA, 52 bp, Artificial
  Synthetic oligonucleotide
gagtcgtatgtgtataacttgttgtctattaattatggatgttatcaactat

SEQ ID NO: 13221 - DNA, 60 bp, Artificial
  Synthetic oligonucleotide
ggtttatcacgcaatgcgaacagatatgatgtggcaactgcgatcaagttatctagatac

SEQ ID NO: 13222 - DNA, 60 bp, Artificial
  Synthetic oligonucleotide
atataatggttgggcaacaattgatgttgagtatagagaacccgcgccttacgtacatgc

SEQ ID NO: 13223 - DNA, 60 bp, Artificial
  Synthetic oligonucleotide
ctcaccgttatgagatcttgcgtcacgctacaggatgcgagaatagtgttggaagcaaat

SEQ ID NO: 13224 - DNA, 55 bp, Artificial
  Synthetic oligonucleotide
ggaatggcacaagaagctagtggacggactttaacggaggcctatagagagttcc

SEQ ID NO: 13225 - DNA, 60 bp, Artificial
  Synthetic oligonucleotide
tgtgcttagatatgatgctgtcggcagcggggattaatctagggccaatatctccagact

SEQ ID NO: 13226 - DNA, 55 bp, Artificial
  Synthetic oligonucleotide
atatgggtacgatcggtgttttagcaacgcctgaggttccgtttactactgagtg

SEQ ID NO: 13227 - DNA, 60 bp, Artificial
  Synthetic oligonucleotide
cgatccgatgatgatttacatcatctggagacggattgaaatcttcgcaaatgctcaggg

SEQ ID NO: 13228 - DNA, 55 bp, Artificial
  Synthetic oligonucleotide
ggtcacatttgccactacaagactccctgtactagagtagcgcctaggcagcata

SEQ ID NO: 13229 - DNA, 53 bp, Artificial
  Synthetic oligonucleotide
gctataaccggatcactaagactattcccgtcagaacgagtactaactactaa

SEQ ID NO: 13230 - DNA, 50 bp, Artificial
  Synthetic oligonucleotide
gaatatggaacaactgacgatgaggtatacatacagagagcattcatgtc

SEQ ID NO: 13231 - DNA, 59 bp, Artificial
  Synthetic oligonucleotide
gtctcactaggagttccactaattgacgcaagcacgtacgttggatcaagaatatattc

SEQ ID NO: 13232 - DNA, 60 bp, Artificial
  Synthetic oligonucleotide
gagagttcctcaatctttcgatttcgagtacgtttagcagcgcgatacatgcgaggcgta

SEQ ID NO: 13233 - DNA, 50 bp, Artificial
  Synthetic oligonucleotide
agttggggctcgcaccctcagtttgactttatgctggagtagacgaatgc

SEQ ID NO: 13234 - DNA, 54 bp, Artificial
  Synthetic oligonucleotide
ttggatcgtggcgtacgaacgacacatcactccgcatgccgtgctctccgtgcg

SEQ ID NO: 13235 - DNA, 57 bp, Artificial
  Synthetic oligonucleotide
gtcgctccagcagtcaaccgttcccctgatctccgctaccccgtcacctgctctgtc

SEQ ID NO: 13236 - DNA, 55 bp, Artificial
  Synthetic oligonucleotide
cccagtcatgatacgccacggcactcaggccctatcactcttcgccatcctaacg

SEQ ID NO: 13237 - DNA, 57 bp, Artificial
  Synthetic oligonucleotide
ctcacactcacgctgccatgtccctccgcctagcgatgcagttcgtagagtccccgc

SEQ ID NO: 13238 - DNA, 55 bp, Artificial
  Synthetic oligonucleotide
ccgacacttaagctaactgatgatacctggaatccatacgacgtaaattcgtacg

SEQ ID NO: 13239 - DNA, 52 bp, Artificial
  Synthetic oligonucleotide
gacgtaaattcgtacgttagcaaccgagatgacttatcacttattgcaacta

SEQ ID NO: 13240 - DNA, 60 bp, Artificial
  Synthetic oligonucleotide
ctcaagaatcaacgtaatagtacatataatcacatcgttcaattcaatggactacatcct

SEQ ID NO: 13241 - DNA, 57 bp, Artificial
  Synthetic oligonucleotide
cgtaatagtacatataatcacatcgttcaattcaatggactacatcctccgaacatc

SEQ ID NO: 13242 - DNA, 53 bp, Artificial
  Synthetic oligonucleotide
ctcgttaacgatgacgcctcagctattgctgtaccgaccgctcgcgttgagga

SEQ ID NO: 13243 - DNA, 50 bp, Artificial
  Synthetic oligonucleotide
atggagcaaagacagcgtagattcacgaagaacatttttgttttcgacgt

SEQ ID NO: 13244 - DNA, 60 bp, Artificial
  Synthetic oligonucleotide
ccggagctaccaggcgtcatgaagtcgcattatgatatacgagagctgcgccaaaaaatt

SEQ ID NO: 13245 - DNA, 56 bp, Artificial
  Synthetic oligonucleotide
cttgagcactagtcttgcgggtcactgccaagttgactacagcgagggatcgcccc

SEQ ID NO: 13246 - DNA, 60 bp, Artificial
  Synthetic oligonucleotide
gcgaggcgtatgataaggtcacgcgcggtacaccccatctttctaggctcaatgcattac

SEQ ID NO: 13247 - DNA, 60 bp, Artificial
  Synthetic oligonucleotide
aatgcctttatgtcctggtgtcagtatgcggcagtctgtaggtatgaatatggacttctg

SEQ ID NO: 13248 - DNA, 60 bp, Artificial
  Synthetic oligonucleotide
gttattagtctcccagagctaggtgagtcagtactacgtggatcgagcactgattatcta

SEQ ID NO: 13249 - DNA, 60 bp, Artificial
  Synthetic oligonucleotide
tcttggcacgcgatccgagatttaagcatcgagtgtatcaacaattgagcgccgtaactc

SEQ ID NO: 13250 - DNA, 55 bp, Artificial
  Synthetic oligonucleotide
cgtgacccgagatttaagcatcgagtgtatcaacaattgagcgccgtaactctgc

SEQ ID NO: 13251 - DNA, 58 bp, Artificial
  Synthetic oligonucleotide
aaccactccgcccagattagaccgggtaatcgcagtctattcgtcatgccaacaagtc

SEQ ID NO: 13252 - DNA, 60 bp, Artificial
  Synthetic oligonucleotide
agaatccatatgaaccgaaggaagtgactgcatctttgtgagaggttgaactgtcgtcgt

SEQ ID NO: 13253 - DNA, 60 bp, Artificial
  Synthetic oligonucleotide
acgacacgatttcccaaccgccgagatatgctccgagtgcgcccatgccatcatcgatgc

SEQ ID NO: 13254 - DNA, 60 bp, Artificial
  Synthetic oligonucleotide
ccgaacacggaggctgtctaaatctaagtaggattgacgccgatcatgttgtgttgactg

SEQ ID NO: 13255 - DNA, 60 bp, Artificial
  Synthetic oligonucleotide
caattggaaaagtcgctgtggaaggtggaagatattacgaacatgcaccaatcgaattga

SEQ ID NO: 13256 - DNA, 51 bp, Artificial
  Synthetic oligonucleotide
gcgactcaggcttccgttgaatggatctttaacgtagctggatcaggtgcg

SEQ ID NO: 13257 - DNA, 58 bp, Artificial
  Synthetic oligonucleotide
cttactatactgcttcagaagacgttgcttatctgaccggattcataaagcctgacga

SEQ ID NO: 13258 - DNA, 55 bp, Artificial
  Synthetic oligonucleotide
cgagggagcatgagaacaacttcgacttgacgcagttggggctcgcaccctcagt

SEQ ID NO: 13259 - DNA, 55 bp, Artificial
  Synthetic oligonucleotide
tccgtctggcgtggaagttttgacagcgaacctgtgtcctaacgcggatgcggga

SEQ ID NO: 13260 - DNA, 55 bp, Artificial
  Synthetic oligonucleotide
ccaggcataataccaccagtgaatgttgataaaccaataccattagggagaaggg

SEQ ID NO: 13261 - DNA, 56 bp, Artificial
  Synthetic oligonucleotide
tagagccagtactcgatggtccttatcgaccaacaagttttaagccaccaagcgat

SEQ ID NO: 13262 - DNA, 51 bp, Artificial
  Synthetic oligonucleotide
gatgattcgaatacgataataccatacagttatgctaaaccaccaaattat

SEQ ID NO: 13263 - DNA, 60 bp, Artificial
  Synthetic oligonucleotide
gcttggtgtcaatttgcaatagtagccaggtataaatatggaatcatgacgcttaatgat

SEQ ID NO: 13264 - DNA, 60 bp, Artificial
  Synthetic oligonucleotide
tatacgatgacctgtagagtagggcagatccgcagcttcactaacatgcgtgtatgtgga

SEQ ID NO: 13265 - DNA, 60 bp, Artificial
  Synthetic oligonucleotide
caattatggctgacaagaaacgagtgaataacgcagtcggattaatgcaagagtacgcaa

SEQ ID NO: 13266 - DNA, 50 bp, Artificial
  Synthetic oligonucleotide
gtacacaatgggatcaagcagctgtcctatattcgaactatattgtgaat

SEQ ID NO: 13267 - DNA, 53 bp, Artificial
  Synthetic oligonucleotide
tatgaagacgtcggttttgagggtccacctcacaaccgaagtttcaccatcgt

SEQ ID NO: 13268 - DNA, 60 bp, Artificial
  Synthetic oligonucleotide
gatccgtctacgcgtagatgtgtttttacgcttgcgtgcgaattagcttcggagaagata

SEQ ID NO: 13269 - DNA, 55 bp, Artificial
  Synthetic oligonucleotide
taaactttgtcgcaatacaacctatgattacggagctgacctattgattgagctg

SEQ ID NO: 13270 - DNA, 60 bp, Artificial
  Synthetic oligonucleotide
ccacaattttgtggacgcgctttgaatgcgccacatcgtgaggggtaagcacacagtatc

SEQ ID NO: 13271 - DNA, 55 bp, Artificial
  Synthetic oligonucleotide
tatgcggcctacataccatgtagcatgaatcacgactgggtttagtccatgcttg

SEQ ID NO: 13272 - DNA, 60 bp, Artificial
  Synthetic oligonucleotide
cttactcttagtgtgctggatgccacgacagaatctgttttgtgcgactctcattcagtc

SEQ ID NO: 13273 - DNA, 55 bp, Artificial
  Synthetic oligonucleotide
cgcggtagcaaagttcgcaactacttacgctaaattaggcaacgcctcgactccg

SEQ ID NO: 13274 - DNA, 55 bp, Artificial
  Synthetic oligonucleotide
agttagcatgtagctatatcaagtcattcagactctacaagtaagggcatggctc

SEQ ID NO: 13275 - DNA, 52 bp, Artificial
  Synthetic oligonucleotide
ttaaattatcccttgtcatgaatctagctgcaatcgccaagaactacagtat

SEQ ID NO: 13276 - DNA, 60 bp, Artificial
  Synthetic oligonucleotide
tcgcggacgaagcgtgacattgcgaagagagagtcttatgtatcagcagccagtatgtcg

SEQ ID NO: 13277 - DNA, 55 bp, Artificial
  Synthetic oligonucleotide
gacattgcgaagagagagtcttatgtatcagcagccagtatgtcgtggagcggag

SEQ ID NO: 13278 - DNA, 60 bp, Artificial
  Synthetic oligonucleotide
taatggaagatacactccaggcataattccacctgtgaacgctgataaaccaataccatt

SEQ ID NO: 13279 - DNA, 55 bp, Artificial
  Synthetic oligonucleotide
ggcataattccacctgtgaacgctgataaaccaataccattaggaagaagagacg

SEQ ID NO: 13280 - DNA, 56 bp, Artificial
  Synthetic oligonucleotide
aactccatagcaaatctagcgctaattaagactgtcttatcacgtatctctaacaa

SEQ ID NO: 13281 - DNA, 58 bp, Artificial
  Synthetic oligonucleotide
ctgcttctgaattgtattggaattgatacacatgaaactcgttgatcggactagccaa

SEQ ID NO: 13282 - DNA, 60 bp, Artificial
  Synthetic oligonucleotide
gggtggaaacggccctaacaaagccacgaagcctgacatcgtatatctgccatcacagca

SEQ ID NO: 13283 - DNA, 60 bp, Artificial
  Synthetic oligonucleotide
gtgcacgaaagacttaatccgcatgcgaggtgaaagatcaatgaatgagatacgtgattt

SEQ ID NO: 13284 - DNA, 55 bp, Artificial
  Synthetic oligonucleotide
ccgcatgcgaggtgaaagatcaatgaatgagatacgtgattttgttcgcgtcaca

SEQ ID NO: 13285 - DNA, 60 bp, Artificial
  Synthetic oligonucleotide
ttaatgacctcgtcaaccgttgttgatgacgtacttcttaacatgcattccgccgctcta

SEQ ID NO: 13286 - DNA, 51 bp, Artificial
  Synthetic oligonucleotide
cgccgctctatactgggatgacttctcggtatacacggcattctcgagccc

SEQ ID NO: 13287 - DNA, 50 bp, Artificial
  Synthetic oligonucleotide
ttcggtgcagagttagaggagatttaccaatttatgaatggcgaaatgcg

SEQ ID NO: 13288 - DNA, 52 bp, Artificial
  Synthetic oligonucleotide
aaaaattactcgtcgcggagaatgatcagatgcgcgcgttagcacgagcgtt

SEQ ID NO: 13289 - DNA, 54 bp, Artificial
  Synthetic oligonucleotide
tgcatcgaacatgactctgcctatgaaccgagtctgacgatgcatagagtgcgg

SEQ ID NO: 13290 - DNA, 60 bp, Artificial
  Synthetic oligonucleotide
tcacgactgttgaggggcaaaattcgatctccatcgaaatcttgaggcataagacgggct

SEQ ID NO: 13291 - DNA, 60 bp, Artificial
  Synthetic oligonucleotide
aagacgggcttgatacgtgctatgtatctgaacggcttcgtcacgcaacctccagcgtgg

SEQ ID NO: 13292 - DNA, 60 bp, Artificial
  Synthetic oligonucleotide
gttcgcttggatcctaatggagatcagccgcctctgtgacgccccggatggcatagctct

SEQ ID NO: 13293 - DNA, 60 bp, Artificial
  Synthetic oligonucleotide
gagctagaaaaacaacgaatgtcacagttaatccaggtccgtttgcacagactggatatg

SEQ ID NO: 13294 - DNA, 51 bp, Artificial
  Synthetic oligonucleotide
atatggtatacgttagatcattatcggctaatttgaatgatgtaatctgta

SEQ ID NO: 13295 - DNA, 50 bp, Artificial
  Synthetic oligonucleotide
tcaacacaaatctcaaatgtcagtagaagcttacgattgcgtgagtttac

SEQ ID NO: 13296 - DNA, 60 bp, Artificial
  Synthetic oligonucleotide
tggggaattactcttcaatagtgcagaactacaatatacgtggtgatggtaatgtgtttc

SEQ ID NO: 13297 - DNA, 52 bp, Artificial
  Synthetic oligonucleotide
aaattttctgcgaagtgtaccgacgactactcgtagtagaaccactgcatat

SEQ ID NO: 13298 - DNA, 52 bp, Artificial
  Synthetic oligonucleotide
aggtgttagcttcagctttgcccaacgatgcgggggagattatgacggctcg

SEQ ID NO: 13299 - DNA, 58 bp, Artificial
  Synthetic oligonucleotide
gaagcaagctagccgtgcgttgcaaatgtttttgggtaatcccaagagtatattgagt

SEQ ID NO: 13300 - DNA, 51 bp, Artificial
  Synthetic oligonucleotide
aggatttagacaagcttatagtgagttcatgaacgcggcttggtctatgcc

SEQ ID NO: 13301 - DNA, 53 bp, Artificial
  Synthetic oligonucleotide
cggaccaatctcacctgattacacgcaacatatggctactataggtgtgctag

SEQ ID NO: 13302 - DNA, 55 bp, Artificial
  Synthetic oligonucleotide
acgcttccaaatatgttacctccaatcttcccgccgaatgatcgggatagtgtac

SEQ ID NO: 13303 - DNA, 60 bp, Artificial
  Synthetic oligonucleotide
ccgccgaatgatcgggatagtgtacttacgatcctactactgtcgacgctcgcagatgtt

SEQ ID NO: 13304 - DNA, 60 bp, Artificial
  Synthetic oligonucleotide
gatataagactcgacatagcgcccgatcttatccataatggtgtaccacagagactttcc

SEQ ID NO: 13305 - DNA, 60 bp, Artificial
  Synthetic oligonucleotide
cgcggtaaaattactgctggctgcgtagatgattatttcgcatttatgcatgccgcttac

SEQ ID NO: 13306 - DNA, 55 bp, Artificial
  Synthetic oligonucleotide
gtgacatctgttagacaagaatacgcgataccagttggaccggttttcccaccag

SEQ ID NO: 13307 - DNA, 60 bp, Artificial
  Synthetic oligonucleotide
cctacgtgatggtctgagctacctagttcttccagtcagtggatctgtccactagtcgac

SEQ ID NO: 13308 - DNA, 57 bp, Artificial
  Synthetic oligonucleotide
gacgcttccaaagcgttttcagctcgtcctataaatatagcaccattggttggcaat

SEQ ID NO: 13309 - DNA, 60 bp, Artificial
  Synthetic oligonucleotide
tatggagtgaatttgccaattacgggttcgatggatactgcgtatgcgaattctacgcaa

SEQ ID NO: 13310 - DNA, 55 bp, Artificial
  Synthetic oligonucleotide
gatgttgtagatggtgtcaaccataagttaaacgtcacaacaacaacgtgcacca

SEQ ID NO: 13311 - DNA, 56 bp, Artificial
  Synthetic oligonucleotide
tgaaaccagcccgctcttgaaggtcgttcgtgtgggacgcaccacggatatggttc

SEQ ID NO: 13312 - DNA, 55 bp, Artificial
  Synthetic oligonucleotide
ggcatgaatcggactgagctgattactaactattcaccatccagggaagataact

SEQ ID NO: 13313 - DNA, 60 bp, Artificial
  Synthetic oligonucleotide
caggtccgttcgcacagactggatatgctccagttaattggggacacggtgaattgtctg

SEQ ID NO: 13314 - DNA, 52 bp, Artificial
  Synthetic oligonucleotide
tgtcacgtgaaggaactatagtcacgtcatatgatggatacatagcgatgca

SEQ ID NO: 13315 - DNA, 60 bp, Artificial
  Synthetic oligonucleotide
cgcgaactatggtcagattgattcatactgtactcatatgggtatatcgaggagatcaca

SEQ ID NO: 13316 - DNA, 55 bp, Artificial
  Synthetic oligonucleotide
gattgattcatactgtactcatatgggtatatcgaggagatcacactcagtccgg

SEQ ID NO: 13317 - DNA, 50 bp, Artificial
  Synthetic oligonucleotide
gattaaagtgggcctaagcttaattggagagattgacttgcccgagttta

SEQ ID NO: 13318 - DNA, 60 bp, Artificial
  Synthetic oligonucleotide
agagaatcacaaagaaacggaattgcaccgcaatcagactcgctaagaaagctgtcaggt

SEQ ID NO: 13319 - DNA, 50 bp, Artificial
  Synthetic oligonucleotide
ttacgtttccatggataagacacttaaccagtaccctgcactaacggcgg

SEQ ID NO: 13320 - DNA, 60 bp, Artificial
  Synthetic oligonucleotide
gtcttctatgaagatacctcggttgagggtcacattatgcatgggggagcggtgtcgatt

SEQ ID NO: 13321 - DNA, 60 bp, Artificial
  Synthetic oligonucleotide
gttacaacgtagtctgggctcacatccgatttatatgggatcgatggattataccataag

SEQ ID NO: 13322 - DNA, 51 bp, Artificial
  Synthetic oligonucleotide
tagttcaattgcgccgtgtgttgaccatagctactattactctacttcctg

SEQ ID NO: 13323 - DNA, 60 bp, Artificial
  Synthetic oligonucleotide
atctgaagttgtacgctctgtttggtgctcggatacccaacatcagtcgacacccgccag

SEQ ID NO: 13324 - DNA, 55 bp, Artificial
  Synthetic oligonucleotide
tacctgtaggcaatcatccggtgatgagtggtggcgcagtgaccttaacgtctgc

SEQ ID NO: 13325 - DNA, 59 bp, Artificial
  Synthetic oligonucleotide
gaattgtctgattcaacattagttcaaccgacgttagacggcccatatcagccaaccac

SEQ ID NO: 13326 - DNA, 54 bp, Artificial
  Synthetic oligonucleotide
atacgcagagagagtacgttttagatggacagacggtgcagctacaagtttcaa

SEQ ID NO: 13327 - DNA, 50 bp, Artificial
  Synthetic oligonucleotide
atcgcaaactgaattgtgtgcgcaatatataaataatgggctgcctccaa

SEQ ID NO: 13328 - DNA, 54 bp, Artificial
  Synthetic oligonucleotide
tgagtaagcaaacgcaggatggtaactattcacagcatgggccgttactgtcaa

SEQ ID NO: 13329 - DNA, 60 bp, Artificial
  Synthetic oligonucleotide
aactgactccctgtcagatgcagcgtcatcagtgtctagaagcgcatcaataagatcaat

SEQ ID NO: 13330 - DNA, 60 bp, Artificial
  Synthetic oligonucleotide
taagatcaataggatcgactacatcagcatggacagaagtatcaacgacaacttccggta

SEQ ID NO: 13331 - DNA, 55 bp, Artificial
  Synthetic oligonucleotide
cgactacatcagcatggacagaagtatcaacgacaacttccggtattagtggact

SEQ ID NO: 13332 - DNA, 50 bp, Artificial
  Synthetic oligonucleotide
aagttcttcgcttatagagtagaaactttcgaggaggtgccatttgacgt

SEQ ID NO: 13333 - DNA, 50 bp, Artificial
  Synthetic oligonucleotide
tcatcatatgaacgagtccttttttatcggtttcgacttagagctagatt

SEQ ID NO: 13334 - DNA, 60 bp, Artificial
  Synthetic oligonucleotide
acgctaccttgaagagtaacgcacagcggatagtttatgatgatgagttgcagatgcacg

SEQ ID NO: 13335 - DNA, 60 bp, Artificial
  Synthetic oligonucleotide
agcggatagtttatgatgatgagttgcagatgcacgtgctgcgtgggccgatacactttc

SEQ ID NO: 13336 - DNA, 55 bp, Artificial
  Synthetic oligonucleotide
gagttgcagatgcacgtgctgcgtgggccgatacactttcagcgcagggcaatct

SEQ ID NO: 13337 - DNA, 60 bp, Artificial
  Synthetic oligonucleotide
tcctgacccagcatctacttcaaagtacgctgagatgtatgcatccgctggcctccgtaa

SEQ ID NO: 13338 - DNA, 60 bp, Artificial
  Synthetic oligonucleotide
taaccgctggaccaaacgttcattgcccagttgcgtgtcagcggcctgtgagatgcgtac

SEQ ID NO: 13339 - DNA, 55 bp, Artificial
  Synthetic oligonucleotide
cattgcccagttgcgtgtcagcggcctgtgagatgcgtacagaccctgttcccac

SEQ ID NO: 13340 - DNA, 60 bp, Artificial
  Synthetic oligonucleotide
gaatctaaatacggtacgaagattgatgtttacagagatgaggtcccagcacaaatcatc

SEQ ID NO: 13341 - DNA, 59 bp, Artificial
  Synthetic oligonucleotide
ggcgaatatgggacagtttagagcagcgatcaggcgtacattggatgataacggttgga

SEQ ID NO: 13342 - DNA, 55 bp, Artificial
  Synthetic oligonucleotide
agaggggtctaagattgatatgcaaccgtaccattcctacggtggacctggtgag

SEQ ID NO: 13343 - DNA, 60 bp, Artificial
  Synthetic oligonucleotide
cgggagtgtctggctcgtcattctcacatctatgctgatggaacacgtttaattggagcg

SEQ ID NO: 13344 - DNA, 54 bp, Artificial
  Synthetic oligonucleotide
gctcgagcgttcccacgactatggctagaatgttacgtgatcggggagcacatg

SEQ ID NO: 13345 - DNA, 60 bp, Artificial
  Synthetic oligonucleotide
tgccgcacttgatcaacttaaaacggaatacactgaaaacgtggatgatgaaatgtacag

SEQ ID NO: 13346 - DNA, 55 bp, Artificial
  Synthetic oligonucleotide
ccgggtgtgataccaccagtgaatgtagacaaaccaattccattaggcagaaggg

SEQ ID NO: 13347 - DNA, 59 bp, Artificial
  Synthetic oligonucleotide
caggagaatcatatggtgaatccgtaaagcaggcggtactattgaatgtattgagcgca

SEQ ID NO: 13348 - DNA, 56 bp, Artificial
  Synthetic oligonucleotide
aaatggctgtcttagcgcgcgctctacagcgagaggcttcggagagaagcgaggat

SEQ ID NO: 13349 - DNA, 53 bp, Artificial
  Synthetic oligonucleotide
cgttaagtgggattgatttatcacacatgaggaccccaaaaatcgagcctact

SEQ ID NO: 13350 - DNA, 55 bp, Artificial
  Synthetic oligonucleotide
tctcgcagacgtgccgtcgctattgtcggacttaggtgtgtatcgtggctactgg

SEQ ID NO: 13351 - DNA, 50 bp, Artificial
  Synthetic oligonucleotide
atagacgtagtacattttgaggatcttaccagtcattggcatgcattagg

SEQ ID NO: 13352 - DNA, 60 bp, Artificial
  Synthetic oligonucleotide
agcgtatcgtttatgatgatgagctacagatgcatattctgagaggaccattgcattttc

SEQ ID NO: 13353 - DNA, 60 bp, Artificial
  Synthetic oligonucleotide
ccatcttactataccttgagttcactaacaattcagacaagcgtaatcgatgacttcgga

SEQ ID NO: 13354 - DNA, 55 bp, Artificial
  Synthetic oligonucleotide
ccttgagttcactaacaattcagacaagcgtaatcgatgatttcggattatccgc

SEQ ID NO: 13355 - DNA, 60 bp, Artificial
  Synthetic oligonucleotide
cgacgggtgatgacggcaatcaactcaagagttgaggagtatctcaacgtgctgactcac

SEQ ID NO: 13356 - DNA, 57 bp, Artificial
  Synthetic oligonucleotide
gcgcgacccaaggtttaaacatagagtatatcagcaactgagtgctgtaactctgct

SEQ ID NO: 13357 - DNA, 52 bp, Artificial
  Synthetic oligonucleotide
gaacgaagccgttcacaaatgcgcaatgggggcggggtaatactggggctac

SEQ ID NO: 13358 - DNA, 60 bp, Artificial
  Synthetic oligonucleotide
atctgatcgtcttggagtggagggatccccccacacccttcacgactgaccacacattca

SEQ ID NO: 13359 - DNA, 52 bp, Artificial
  Synthetic oligonucleotide
gaaggaatgttgggaccaaattcacagcagtcaatgaatacttcgcagttag

SEQ ID NO: 13360 - DNA, 60 bp, Artificial
  Synthetic oligonucleotide
gcctgagataccgttcacgactgaggccgcgaatgagattgcgcgtgttaccggagagac

SEQ ID NO: 13361 - DNA, 55 bp, Artificial
  Synthetic oligonucleotide
cgactgaggccgcgaatgagattgcgcgtgttaccggagagacttcaacttgggg

SEQ ID NO: 13362 - DNA, 55 bp, Artificial
  Synthetic oligonucleotide
gctacacgagacgtcgacgtattcataggtgcttgttctgaaccgatctatcgca

SEQ ID NO: 13363 - DNA, 55 bp, Artificial
  Synthetic oligonucleotide
taacctaagatcagtaggtagagtggcgccccgaggtctgcatcgtgtagagtgg

SEQ ID NO: 13364 - DNA, 54 bp, Artificial
  Synthetic oligonucleotide
ggaatcgtgaatcgatggtgcaacgtaaacgaattggatgacttgcctttatgc

SEQ ID NO: 13365 - DNA, 59 bp, Artificial
  Synthetic oligonucleotide
ccgagcaaagatccctctcatgctgacgtacagctgctatacgagagcatagttcggga

SEQ ID NO: 13366 - DNA, 57 bp, Artificial
  Synthetic oligonucleotide
cgatgcattaaataagagctttgacactattgattcagacggtgctacgcttgacct

SEQ ID NO: 13367 - DNA, 60 bp, Artificial
  Synthetic oligonucleotide
tagtacggctgataatcgcattaacgagtgataatggaatatcactgtcaatagggcttg

SEQ ID NO: 13368 - DNA, 58 bp, Artificial
  Synthetic oligonucleotide
catgtggataggaattgtctcctattctggcagtgggctgaattggagggtgcaggtg

SEQ ID NO: 13369 - DNA, 60 bp, Artificial
  Synthetic oligonucleotide
tatgacactaacgaaagaggtgggttagcgtatgcaacaattaagtatgctactgagaca

SEQ ID NO: 13370 - DNA, 51 bp, Artificial
  Synthetic oligonucleotide
caacgtgcgataactggtgcggtggaaggcatgatcacatccgcaacgacg

SEQ ID NO: 13371 - DNA, 53 bp, Artificial
  Synthetic oligonucleotide
cggtcaagcgtgccgtaatcctgaacgttgcgggggtccaccagaccgtacca

SEQ ID NO: 13372 - DNA, 60 bp, Artificial
  Synthetic oligonucleotide
cacatcggctcaatcccctacgaaacgtcctatggacagatgcttgataacgcgcgtagc

SEQ ID NO: 13373 - DNA, 60 bp, Artificial
  Synthetic oligonucleotide
cgcgcgtagcttttcctccacaccgcagctccagcaggcgttacttcgtggcccaatctc

SEQ ID NO: 13374 - DNA, 56 bp, Artificial
  Synthetic oligonucleotide
gggtggctccagacatataccccatgcgaagaccaagaatggagatgtgccgtcga

SEQ ID NO: 13375 - DNA, 55 bp, Artificial
  Synthetic oligonucleotide
acaccgcagctccagcaggcgttacttcgtggcccaatctctatgcagcggcgga

SEQ ID NO: 13376 - DNA, 55 bp, Artificial
  Synthetic oligonucleotide
cgcgtgggatgggcaggcggtgctacaaattcacaatccaacccagcaaaacgct

SEQ ID NO: 13377 - DNA, 51 bp, Artificial
  Synthetic oligonucleotide
ctaagggatggcctactggatccgtttattttagagagtacacggacatag

SEQ ID NO: 13378 - DNA, 60 bp, Artificial
  Synthetic oligonucleotide
caccaatgcatgcgaggcgtatgattagatcaaagacggtccatcccatctacctaggat

SEQ ID NO: 13379 - DNA, 55 bp, Artificial
  Synthetic oligonucleotide
gcgaggcgtatgattagatcaaagacggtccatcccatctacctaggatccatgc

SEQ ID NO: 13380 - DNA, 54 bp, Artificial
  Synthetic oligonucleotide
tgccatcatgataccggttggtgaatcgtaccatatctgtgtcaccgccattac

SEQ ID NO: 13381 - DNA, 60 bp, Artificial
  Synthetic oligonucleotide
caaactttgagtatgtgagaggattcgtgcaaggcaggcacaaatgtcaactgtgcttcc

SEQ ID NO: 13382 - DNA, 60 bp, Artificial
  Synthetic oligonucleotide
gactttgttggcgcagcaatttgaacgtgagatcaatgctgcggttgcaagggatgactg

SEQ ID NO: 13383 - DNA, 57 bp, Artificial
  Synthetic oligonucleotide
cggatacgatttatgatagtgcgaaaaattcagactcaacggtaactccagaaattc

SEQ ID NO: 13384 - DNA, 60 bp, Artificial
  Synthetic oligonucleotide
atcgggagaatcaaataagtggatatcgatgggatcatcatgtaccgtgaaagtgtgtcc

SEQ ID NO: 13385 - DNA, 55 bp, Artificial
  Synthetic oligonucleotide
ggatatcgatgggatcatcatgtaccgtgaaagtgtgtccgctaaatacacaaac

SEQ ID NO: 13386 - DNA, 51 bp, Artificial
  Synthetic oligonucleotide
ggtactacagtaatgattaatgacagactagtctcagttagcggacatatg

SEQ ID NO: 13387 - DNA, 55 bp, Artificial
  Synthetic oligonucleotide
ggattcgtgcaaggcaggcacaaatgtcaactgtgcttcctaaggaatgggtgcg

SEQ ID NO: 13388 - DNA, 50 bp, Artificial
  Synthetic oligonucleotide
ggagcccgaagattgagcccactattatcgccacaacattagagcatcga

SEQ ID NO: 13389 - DNA, 60 bp, Artificial
  Synthetic oligonucleotide
ctatgtcttctcgtgtggccagtgaggtgctgcgtaatgatgtggctatttccggtgact

SEQ ID NO: 13390 - DNA, 55 bp, Artificial
  Synthetic oligonucleotide
gtgtggccagtgaggtgctgcgtaatgatgtggctatttccggtgacttttggcg

SEQ ID NO: 13391 - DNA, 60 bp, Artificial
  Synthetic oligonucleotide
cagtacttaacatctatgatcagttggataacgcccgtcgttcagtgctctccgctacag

SEQ ID NO: 13392 - DNA, 55 bp, Artificial
  Synthetic oligonucleotide
cgcgccctcatgtacgaattgtggattggcgtatgaatcgagagtgtccgcgatt

SEQ ID NO: 13393 - DNA, 60 bp, Artificial
  Synthetic oligonucleotide
ctgtgcttcctaaggaatgggtgcgaccggcagactttttatcatatcgatgtgagaaca

SEQ ID NO: 13394 - DNA, 55 bp, Artificial
  Synthetic oligonucleotide
gagagattagctagtgacttagaagcgttaggcaatgctgatgctcgcgtacgat

SEQ ID NO: 13395 - DNA, 58 bp, Artificial
  Synthetic oligonucleotide
agcattgcggctaatatggaaccattttcggatggatgggcgctacttggttatctcg

SEQ ID NO: 13396 - DNA, 50 bp, Artificial
  Synthetic oligonucleotide
gttcactcaataatgacaggtgattcgtatggtgaaagtgtgaagcaagc

SEQ ID NO: 13397 - DNA, 50 bp, Artificial
  Synthetic oligonucleotide
aaggcgcatataagattaaggctgtaattagtgcattaaccggcatagat

SEQ ID NO: 13398 - DNA, 56 bp, Artificial
  Synthetic oligonucleotide
tagcaatgaggatttgcagatgcacatattgcgtggacccatacactttcaaagac

SEQ ID NO: 13399 - DNA, 55 bp, Artificial
  Synthetic oligonucleotide
ccgatagtaagggtgttacctatgatcggaacctacaaaccgacatcttcagccc

SEQ ID NO: 13400 - DNA, 57 bp, Artificial
  Synthetic oligonucleotide
gacagcgcatatattggatagagcctgtagcgactttctaacgagttatagtcagca

SEQ ID NO: 13401 - DNA, 52 bp, Artificial
  Synthetic oligonucleotide
aatggcaggaaggtgtttatctattggccagagtgttgctgcgatgggagtt

SEQ ID NO: 13402 - DNA, 52 bp, Artificial
  Synthetic oligonucleotide
attcgcgcaatgatggatctagcgggacaacattggttcataacagcgtatg

SEQ ID NO: 13403 - DNA, 51 bp, Artificial
  Synthetic oligonucleotide
taacaagctgccatcaagggaagtgttagagcgcttgccttacagttatca

SEQ ID NO: 13404 - DNA, 60 bp, Artificial
  Synthetic oligonucleotide
tggaattatccctatacaatatggcacttcagatgctggatctgcaatactgccaccctt

SEQ ID NO: 13405 - DNA, 53 bp, Artificial
  Synthetic oligonucleotide
attagcgaaagctttgtgatacttgaacgtgagtatattgagttgtaccttac

SEQ ID NO: 13406 - DNA, 55 bp, Artificial
  Synthetic oligonucleotide
gcattgaacttagctgttggtcaagagataaagttggacgtagcaactcagcacc

SEQ ID NO: 13407 - DNA, 53 bp, Artificial
  Synthetic oligonucleotide
aaagcagatcatgaacgtgagactgaactgactgacttaattaatagaattcg

SEQ ID NO: 13408 - DNA, 50 bp, Artificial
  Synthetic oligonucleotide
acgaagagatgcataagtggcttgatggccgcaagactacaaattatgat

SEQ ID NO: 13409 - DNA, 60 bp, Artificial
  Synthetic oligonucleotide
tgatacgctcaacgaggagactaagtggtattgtgaggtcatcgggatagatggtcatct

SEQ ID NO: 13410 - DNA, 53 bp, Artificial
  Synthetic oligonucleotide
gagtattcccctaactctgtgccaatccaaggccaattggcgatatctcagct

SEQ ID NO: 13411 - DNA, 60 bp, Artificial
  Synthetic oligonucleotide
gcggagtagacatgcgggcgggacgtattatagcgtgggacggacaggccgctctacatg

SEQ ID NO: 13412 - DNA, 55 bp, Artificial
  Synthetic oligonucleotide
gcggagtagacatgcgggcgggacgtattatagcgtgggatggacaaactgctct

SEQ ID NO: 13413 - DNA, 52 bp, Artificial
  Synthetic oligonucleotide
aacgtttatggtagtatggtggggggtcgtcatgtgttagcccttcctccaa

SEQ ID NO: 13414 - DNA, 58 bp, Artificial
  Synthetic oligonucleotide
atgtttgaattgacacgcgactgggcacttgtcaaacttggatgtggttacgagatgt

SEQ ID NO: 13415 - DNA, 60 bp, Artificial
  Synthetic oligonucleotide
gtacgaacgatgataattcgtccatgtctcgagagtcagcgaacccgaaggctagagatg

SEQ ID NO: 13416 - DNA, 60 bp, Artificial
  Synthetic oligonucleotide
ctaatctatgccgtcggttcgctaatggtgatgagtggacgtgtgttgttgatggtaggc

SEQ ID NO: 13417 - DNA, 60 bp, Artificial
  Synthetic oligonucleotide
ggatacggcagtacgattcgcggagagcgatatcggctcggcagcaattgatggactaat

SEQ ID NO: 13418 - DNA, 55 bp, Artificial
  Synthetic oligonucleotide
gcggagagcgatatcggctcggcagcaattgatggactaatccagggcagtgttg

SEQ ID NO: 13419 - DNA, 54 bp, Artificial
  Synthetic oligonucleotide
gttagtccagttaggagttgagttcggcgagtgtattatagtgcctagaggatt

SEQ ID NO: 13420 - DNA, 54 bp, Artificial
  Synthetic oligonucleotide
ttattctatcgtgagcatgctgcatcaggaactgtagctagagcggttaattgg

SEQ ID NO: 13421 - DNA, 60 bp, Artificial
  Synthetic oligonucleotide
agaattagctaaaccagagcaggatgagtggacgaatcacgacgttacacagataccagg

SEQ ID NO: 13422 - DNA, 60 bp, Artificial
  Synthetic oligonucleotide
gtgcacatcgattctagaaaagcggacaccacatcgtaccacgcaatcgctgttgagacg

SEQ ID NO: 13423 - DNA, 60 bp, Artificial
  Synthetic oligonucleotide
tgttgagacgaaagccgagcgtaaatgttgccatgtgcgtacagaagtgtggaatagtgt

SEQ ID NO: 13424 - DNA, 60 bp, Artificial
  Synthetic oligonucleotide
ttttatcttcagacgacgatctcaaatggaggtgtacagacaagtatcgtgtcgactaag

SEQ ID NO: 13425 - DNA, 53 bp, Artificial
  Synthetic oligonucleotide
gtcacactagatagggtatttagtgttagcacgtccagggggtatacgcttac

SEQ ID NO: 13426 - DNA, 60 bp, Artificial
  Synthetic oligonucleotide
gatgacatggctaatggaagatacacgccaggtataataccgctagtaaacgttgacaaa

SEQ ID NO: 13427 - DNA, 60 bp, Artificial
  Synthetic oligonucleotide
atgcaactgtagctgtgtctgaggcccctctggatgtggtgagtgcatggtctgaattga

SEQ ID NO: 13428 - DNA, 60 bp, Artificial
  Synthetic oligonucleotide
cagagcaggtggacccgctacagatgacggtagattctacgctttaatcgcaatcgcggc

SEQ ID NO: 13429 - DNA, 60 bp, Artificial
  Synthetic oligonucleotide
cctaacagtaggagatcagatcgtacattggcgctatgagttatatcccccggttgagac

SEQ ID NO: 13430 - DNA, 55 bp, Artificial
  Synthetic oligonucleotide
gcttacgccggacttacatgaagggctggaacatcagacttacacgcacccgaag

SEQ ID NO: 13431 - DNA, 51 bp, Artificial
  Synthetic oligonucleotide
gacgggggaatcctatggtgaatcagttaagcaggcggtgctgttgaatgt

SEQ ID NO: 13432 - DNA, 60 bp, Artificial
  Synthetic oligonucleotide
ggcattgacttatcgcatttacgtactccaaagattgagccaaccatggttgcgacaacg

SEQ ID NO: 13433 - DNA, 60 bp, Artificial
  Synthetic oligonucleotide
tctgaattgattagtccgttgactgtgtatttgcctctgatggttaatgagttacgagct

SEQ ID NO: 13434 - DNA, 52 bp, Artificial
  Synthetic oligonucleotide
actagctgtgagcgtcttagcgaaaaacgatgcgatagtagcgaatactaag

SEQ ID NO: 13435 - DNA, 57 bp, Artificial
  Synthetic oligonucleotide
attcgcatcgtacgcagaagcgtttcgtgatgatgtgagattgaggcagattaaacg

SEQ ID NO: 13436 - DNA, 50 bp, Artificial
  Synthetic oligonucleotide
gaaccatcattcagaattattaggactagagtgaacagtttatatggact

SEQ ID NO: 13437 - DNA, 58 bp, Artificial
  Synthetic oligonucleotide
taaagcgcaaatagatacgttaaagatgaatggcttaacagtcgtatccaagagcaga

SEQ ID NO: 13438 - DNA, 60 bp, Artificial
  Synthetic oligonucleotide
gtccgacacaacggcaagcactgacgaaactactgatgacgttgtcacgtacaaagcact

SEQ ID NO: 13439 - DNA, 50 bp, Artificial
  Synthetic oligonucleotide
tgacgaatacaatcaattagtccgggcctttaaactctccgatgtgtata

SEQ ID NO: 13440 - DNA, 60 bp, Artificial
  Synthetic oligonucleotide
ctgacagagtgattggcgcgagaatcagtttatatgctcctcgcaaatattattcggcta

SEQ ID NO: 13441 - DNA, 60 bp, Artificial
  Synthetic oligonucleotide
tatcacgtgaaacggggtgctacccatgtagatgtatacagagtcgatgtggtggacgtc

SEQ ID NO: 13442 - DNA, 60 bp, Artificial
  Synthetic oligonucleotide
gccactagcgcgcagccaatgtggtttggttcactgttaagactgatgatatgcccgtgg

SEQ ID NO: 13443 - DNA, 55 bp, Artificial
  Synthetic oligonucleotide
gttccgaccatctcacaacgtggtgaagctccggttaacggaaagatgatcgtcg

SEQ ID NO: 13444 - DNA, 55 bp, Artificial
  Synthetic oligonucleotide
ggaaactgacatacttggagcataagctaatgccaatattagaccaaaacttcgt

SEQ ID NO: 13445 - DNA, 54 bp, Artificial
  Synthetic oligonucleotide
tatagagggtatgctggaatatttgggtatgcaataacaaaagatctgaagtcc

SEQ ID NO: 13446 - DNA, 59 bp, Artificial
  Synthetic oligonucleotide
ctacattcaacttacctattaactattggatgctgatcgcaccaactcaagcgggtagg

SEQ ID NO: 13447 - DNA, 55 bp, Artificial
  Synthetic oligonucleotide
gcggtatctatggattaccagcggcgaacccaaataataacgtggagtattatga

SEQ ID NO: 13448 - DNA, 60 bp, Artificial
  Synthetic oligonucleotide
gaatttaacgcactctcgcaagaaatagcgttatcgcaactgatcgatctagcgactcta

SEQ ID NO: 13449 - DNA, 51 bp, Artificial
  Synthetic oligonucleotide
agcggacgcatcaacgcaaatatctaacgttagcagaagtctgcggttacg

SEQ ID NO: 13450 - DNA, 58 bp, Artificial
  Synthetic oligonucleotide
ctcaattacacattgaatgtgatcactctaatgaacagtacattgcatacaatactag

SEQ ID NO: 13451 - DNA, 59 bp, Artificial
  Synthetic oligonucleotide
tggacgagatggttagagagtctcagcgtaatggaattgcaccacagtctgatgctcta

SEQ ID NO: 13452 - DNA, 52 bp, Artificial
  Synthetic oligonucleotide
accgaaatagccaatctgttagcagatgtattgaatatggtatctatgccga

SEQ ID NO: 13453 - DNA, 53 bp, Artificial
  Synthetic oligonucleotide
caaaatgttactcgctttgtcattatacgccatcactcttccttcgtgtgtta

SEQ ID NO: 13454 - DNA, 60 bp, Artificial
  Synthetic oligonucleotide
caatattcggaatggacatgtcattaaccaattaatggaggctctaatgcagctatcacg

SEQ ID NO: 13455 - DNA, 56 bp, Artificial
  Synthetic oligonucleotide
tcggttgattcgtcaaccttggtaagtaagcttgagaacttggtatcgtttgctcc

SEQ ID NO: 13456 - DNA, 60 bp, Artificial
  Synthetic oligonucleotide
gtccacgatttacgaacataactcagaatatggcgaggcagttagatatcgcgttggccg

SEQ ID NO: 13457 - DNA, 52 bp, Artificial
  Synthetic oligonucleotide
agcgaatatggtggcaggcgcgcaagagagagttgacccggtgatattggac

SEQ ID NO: 13458 - DNA, 60 bp, Artificial
  Synthetic oligonucleotide
gctaattgagtcggtttatgcctcagaattgacggttatgaagacagatatgcagcagat

SEQ ID NO: 13459 - DNA, 55 bp, Artificial
  Synthetic oligonucleotide
cggtttatgcctcagaattgacggttatgaagacagatatgcagcagatggctct

SEQ ID NO: 13460 - DNA, 60 bp, Artificial
  Synthetic oligonucleotide
ggtcctcaaagatcagagtgcgcgctcccttctcgcacctgcgtatgagagagatgtatt

SEQ ID NO: 13461 - DNA, 60 bp, Artificial
  Synthetic oligonucleotide
tcgacgttctcacacattcttttcagcagagttccttcagttgctctcgaatgctcactt

SEQ ID NO: 13462 - DNA, 60 bp, Artificial
  Synthetic oligonucleotide
gatctaaacaatctctatgtggactacacaccatgtagcatgattcacgaatgggtttag

SEQ ID NO: 13463 - DNA, 60 bp, Artificial
  Synthetic oligonucleotide
gaatgcgtgttaggacctgatcgattaattaatccgcctaattcgcgatcgcatgcaaac

SEQ ID NO: 13464 - DNA, 55 bp, Artificial
  Synthetic oligonucleotide
ggactactcaccatgtagcatgattcacgaatgggtttagtccatgcttgcgtag

SEQ ID NO: 13465 - DNA, 60 bp, Artificial
  Synthetic oligonucleotide
atatttaggcgcttgttcagagtctgtatatcgcatatacaatcggcttcagggatatgt

SEQ ID NO: 13466 - DNA, 59 bp, Artificial
  Synthetic oligonucleotide
ctcgcacggcaagcttagaggcggtaaagatagatgcggtagctccgccgctagtcgtc

SEQ ID NO: 13467 - DNA, 50 bp, Artificial
  Synthetic oligonucleotide
atctaatggtattaagcttagaaaactcgaacgtgggatgttcttgcgtg

SEQ ID NO: 13468 - DNA, 55 bp, Artificial
  Synthetic oligonucleotide
gaatacaaccgataccgtcgttgagctaccatccattccgccagaggactcgtca

SEQ ID NO: 13469 - DNA, 53 bp, Artificial
  Synthetic oligonucleotide
gactcatattagtcaagtgttttgtcttctgatgggaatatgctatggtggct

SEQ ID NO: 13470 - DNA, 51 bp, Artificial
  Synthetic oligonucleotide
gtgtcgatggtttgagtggcccgccgtatctaacgttccagtcacttctag

SEQ ID NO: 13471 - DNA, 60 bp, Artificial
  Synthetic oligonucleotide
gtggtgtaattgcacagtatcgtggactaacgtggcgcgacaacataatgtcctcactag

SEQ ID NO: 13472 - DNA, 60 bp, Artificial
  Synthetic oligonucleotide
aatctcgatgtgcacataatgactatgtgggctctatccgactacgggcctctgtacgaa

SEQ ID NO: 13473 - DNA, 60 bp, Artificial
  Synthetic oligonucleotide
caaatagctagcttagctgttggttaatatgacctgttcagggtgtgacgtgtgaaccca

SEQ ID NO: 13474 - DNA, 55 bp, Artificial
  Synthetic oligonucleotide
gttggttaatatgacctgttcagggtgtgacgtgtgaacccatattcgtggcctg

SEQ ID NO: 13475 - DNA, 55 bp, Artificial
  Synthetic oligonucleotide
gttcaatacgaatcagcagaaaaattacgtgatataatcgctcagttatcccgtc

SEQ ID NO: 13476 - DNA, 60 bp, Artificial
  Synthetic oligonucleotide
atctacgatgagatgggtacggaagcgttcactagactacggccttgtgatgtatggaaa

SEQ ID NO: 13477 - DNA, 60 bp, Artificial
  Synthetic oligonucleotide
tcgcagagagcgagatcggttcagccgcgattgatggtctagtacaagggagcgtacact

SEQ ID NO: 13478 - DNA, 56 bp, Artificial
  Synthetic oligonucleotide
gtacattatatcgggccagtttcatctcacggtctattaagtcataccggtttacc

SEQ ID NO: 13479 - DNA, 55 bp, Artificial
  Synthetic oligonucleotide
atggatggaaggcgtaaagttacggatatcatttcaacatgtgcatcgcttaaca

SEQ ID NO: 13480 - DNA, 53 bp, Artificial
  Synthetic oligonucleotide
gaaacctgatgcgttccctatattggacggaaggaatcaagtacgatgctgag

SEQ ID NO: 13481 - DNA, 51 bp, Artificial
  Synthetic oligonucleotide
tagctaacaatttcgaagaacagattaagtttgacaacgctacggaccgag

SEQ ID NO: 13482 - DNA, 60 bp, Artificial
  Synthetic oligonucleotide
aaaggctcgatgagcacaatacctggttctagcggcttactggtggatagaaggctatta

SEQ ID NO: 13483 - DNA, 57 bp, Artificial
  Synthetic oligonucleotide
actactatagcatccgtatattataacactatcactaaccaaaataagacgcatgac

SEQ ID NO: 13484 - DNA, 53 bp, Artificial
  Synthetic oligonucleotide
agagctgttatttgggaggtacatactcattctgaaataggcctcttacctcc

SEQ ID NO: 13485 - DNA, 52 bp, Artificial
  Synthetic oligonucleotide
gggtaacggtctgtatcatactaatccagggtatgagatgttggcactccag

SEQ ID NO: 13486 - DNA, 55 bp, Artificial
  Synthetic oligonucleotide
gatttagcagcctgaccacctggtgaatcgttctagcgggcagaattacacttac

SEQ ID NO: 13487 - DNA, 53 bp, Artificial
  Synthetic oligonucleotide
acctggtgcgtacagaattcaggatgggcaagatatcattagcctgatgttga

SEQ ID NO: 13488 - DNA, 55 bp, Artificial
  Synthetic oligonucleotide
ccgcgagtgcccgatgatcaaatgtatagactaagggatagacttagattgctgc

SEQ ID NO: 13489 - DNA, 60 bp, Artificial
  Synthetic oligonucleotide
gtagcgttcactcaatcatgactggggagtcatacggcgaatcagtgaaacaagccgtgc

SEQ ID NO: 13490 - DNA, 60 bp, Artificial
  Synthetic oligonucleotide
taagtggaattgatttatctcatctacgtacaccaaagatagaacctacgatggttgcga

SEQ ID NO: 13491 - DNA, 52 bp, Artificial
  Synthetic oligonucleotide
gctatgagcattctagccaaaaataacgcgataacggctaacacgagagaga

SEQ ID NO: 13492 - DNA, 56 bp, Artificial
  Synthetic oligonucleotide
tgaaggagtggctgagcaaacggaaagattaagagacctgcggcgaaaagagaaga

SEQ ID NO: 13493 - DNA, 60 bp, Artificial
  Synthetic oligonucleotide
gaaagatggctccaataggtgcgcgagagagtgcagttatgttagtttcgaatagcatta

SEQ ID NO: 13494 - DNA, 55 bp, Artificial
  Synthetic oligonucleotide
gcgcgagagagtgcagttatgttagtttcgaatagcattaaagatgtggcgcgag

SEQ ID NO: 13495 - DNA, 60 bp, Artificial
  Synthetic oligonucleotide
aatagcattaaagatgtggcgcgagctacagcatattttacggcgccaactggagatccg

SEQ ID NO: 13496 - DNA, 55 bp, Artificial
  Synthetic oligonucleotide
gtggcgcgagctacagcatattttacggcgccaactggagatccgcattggaagg

SEQ ID NO: 13497 - DNA, 52 bp, Artificial
  Synthetic oligonucleotide
gtagcgcgtgcaacagcatactttacctcgcctacgggagacccaaattgga

SEQ ID NO: 13498 - DNA, 51 bp, Artificial
  Synthetic oligonucleotide
taatgggtacgatgtggttgaatgcaggttcggagattcaagttgctgggt

SEQ ID NO: 13499 - DNA, 60 bp, Artificial
  Synthetic oligonucleotide
cttcccgaatgcacaaccattcgagcatcatgccacagtaggcctaacgttgcgtatcga

SEQ ID NO: 13500 - DNA, 60 bp, Artificial
  Synthetic oligonucleotide
ccatctagagaggataacctacaacgtgtgttcacagtggcttccattagaagcatgctt

SEQ ID NO: 13501 - DNA, 60 bp, Artificial
  Synthetic oligonucleotide
tggtgtttagattgttgtcaatatacaaatctgacatactgtagggggtgtgctctatac

SEQ ID NO: 13502 - DNA, 60 bp, Artificial
  Synthetic oligonucleotide
cgcaggaaatagcgatgtctcaactaatcgatctagcactacttccattagacatgttct

SEQ ID NO: 13503 - DNA, 60 bp, Artificial
  Synthetic oligonucleotide
gggagcctcgattgattcgtggctagaattactgcgtcacttataacgcgtgactgctag

SEQ ID NO: 13504 - DNA, 60 bp, Artificial
  Synthetic oligonucleotide
ctcgatcattgataaggcgtactgcgaacctgtcagcttcatgatcgtagcttgtggtga

SEQ ID NO: 13505 - DNA, 55 bp, Artificial
  Synthetic oligonucleotide
gcgtactgcgaacctgtcagcttcatgatcgtagcttgtggtgatgttgacatcc

SEQ ID NO: 13506 - DNA, 53 bp, Artificial
  Synthetic oligonucleotide
cttgtggtgatgttgacatccagacgattgaagtgaacatccagggatatgac

SEQ ID NO: 13507 - DNA, 55 bp, Artificial
  Synthetic oligonucleotide
cgaacttgagtaccgtgcctggcgatttagcgacgatacgtagtaggttagatca

SEQ ID NO: 13508 - DNA, 52 bp, Artificial
  Synthetic oligonucleotide
tgactcccccttacgctattactgctaccaaattcgagcgaaagactagcgg

SEQ ID NO: 13509 - DNA, 55 bp, Artificial
  Synthetic oligonucleotide
atgagaccaccaaatatgacaccagcggtagcggcgttatttccaaatgcgcagc

SEQ ID NO: 13510 - DNA, 56 bp, Artificial
  Synthetic oligonucleotide
gtgcttttagcgtactggggccagattttaatctattcggcgtcgtaccgatacaa

SEQ ID NO: 13511 - DNA, 50 bp, Artificial
  Synthetic oligonucleotide
ttttgccatcacgagaccttctggactagagtagcgcctagccagcaaaa

SEQ ID NO: 13512 - DNA, 57 bp, Artificial
  Synthetic oligonucleotide
tgcgccaaacatataagtggagtttgcgttcagaatatggtcaacgtgagaggccgc

SEQ ID NO: 13513 - DNA, 52 bp, Artificial
  Synthetic oligonucleotide
cccaactttcttaggcacgttatgaatttacgcgatgtcaaacgcatatgcg

SEQ ID NO: 13514 - DNA, 60 bp, Artificial
  Synthetic oligonucleotide
actcaaactggagcccttatcaccgcgtgccaatgaggtacttcccaagcttcatgacgc

SEQ ID NO: 13515 - DNA, 60 bp, Artificial
  Synthetic oligonucleotide
tccgtcagtactctagcattaaatcttcagagtgtggttgatcgtgtgaccgctcttgag

SEQ ID NO: 13516 - DNA, 60 bp, Artificial
  Synthetic oligonucleotide
tcatggttcgacggactgcttcgctcacccatctaccccgatgaggtgcccataggcctg

SEQ ID NO: 13517 - DNA, 55 bp, Artificial
  Synthetic oligonucleotide
gggtagggttgcagagggaacaaacacaacggatagatggttcgcctgcgtactc

SEQ ID NO: 13518 - DNA, 51 bp, Artificial
  Synthetic oligonucleotide
aaatatctaacgttagcagaagtttgcggttacgtgaattcacaacgcaga

SEQ ID NO: 13519 - DNA, 60 bp, Artificial
  Synthetic oligonucleotide
tctaagtcatatgacaactccaaagatccaacctaaaacgttagaagccatattggatgc

SEQ ID NO: 13520 - DNA, 55 bp, Artificial
  Synthetic oligonucleotide
gacaactccaaagatccaacctaaaacgttagaagccatattggatgcgccgggg

SEQ ID NO: 13521 - DNA, 60 bp, Artificial
  Synthetic oligonucleotide
ttagccgtccagggagtgcaatccgagagtgctattccggctattcctaccatgtccgat

SEQ ID NO: 13522 - DNA, 57 bp, Artificial
  Synthetic oligonucleotide
gccaattccccgccgcatagttcagtttggctacgacgttgtccatggttctttgct

SEQ ID NO: 13523 - DNA, 57 bp, Artificial
  Synthetic oligonucleotide
tcaatatccgacctacactcttcctgccggcgtgtacgaatacgtgattgagtaacg

SEQ ID NO: 13524 - DNA, 53 bp, Artificial
  Synthetic oligonucleotide
ttattatgaacatagcgacgtgtttaccaacgggggaatatatagcaccgaat

SEQ ID NO: 13525 - DNA, 54 bp, Artificial
  Synthetic oligonucleotide
tattgtggcattgactcgcgagaattaatcaatccaaccacttatggaatcggt

SEQ ID NO: 13526 - DNA, 55 bp, Artificial
  Synthetic oligonucleotide
gcaacgcgtgatgtcgacgtatatttaggcgcatgttcagagtccgtatatcaca

SEQ ID NO: 13527 - DNA, 53 bp, Artificial
  Synthetic oligonucleotide
acaactacgaaacactaatggcatgtgttacgatgaatatgcaacatgttcag

SEQ ID NO: 13528 - DNA, 54 bp, Artificial
  Synthetic oligonucleotide
cagttgttggcgcaccattttacgatcttagtgatccggtcgtagtgtcacaca

SEQ ID NO: 13529 - DNA, 55 bp, Artificial
  Synthetic oligonucleotide
cggctccgggaaatacaccgctcaggacacatgtgaatttcggttccagacgggt

SEQ ID NO: 13530 - DNA, 60 bp, Artificial
  Synthetic oligonucleotide
gcttatcatgcggcccttgtgaaggagagggattacgaagacatactgacacgtcgaggt

SEQ ID NO: 13531 - DNA, 60 bp, Artificial
  Synthetic oligonucleotide
ctatcttaacacgacgatattctctggcggcgtacaaagtagcgtggtctcgactaagca

SEQ ID NO: 13532 - DNA, 60 bp, Artificial
  Synthetic oligonucleotide
ggtgcagcggattcgtatctgcacaaatgaccactcgaatgtgcgagaggagcggcatgc

SEQ ID NO: 13533 - DNA, 60 bp, Artificial
  Synthetic oligonucleotide
tggcgccccgaggtctgtatcgtgtagagtggttgatctcacgatgcagactcctactgc

SEQ ID NO: 13534 - DNA, 60 bp, Artificial
  Synthetic oligonucleotide
ccaaggtctgtatcgtgtagagtggttgatctcacgatgcagactcctactgctgtctaa

SEQ ID NO: 13535 - DNA, 55 bp, Artificial
  Synthetic oligonucleotide
catcgtgtagagtggttgatctcacgatgcagactcctactgctgtctaacgggg

SEQ ID NO: 13536 - DNA, 53 bp, Artificial
  Synthetic oligonucleotide
ctacaagctctgaccgcctacttaacctatttgggtgctaaagtaggtcaagt

SEQ ID NO: 13537 - DNA, 55 bp, Artificial
  Synthetic oligonucleotide
aagcgtacgctaacttcgagtacaaaactcgtcggtattctaaagcatggcggga

SEQ ID NO: 13538 - DNA, 50 bp, Artificial
  Synthetic oligonucleotide
gtcggtattctaaagcatggcgggagattgtggacatatcatggtgaaac

SEQ ID NO: 13539 - DNA, 60 bp, Artificial
  Synthetic oligonucleotide
tggtataacgcgatctcaagcgttagacttaatcagatctgatcccagagttttacgcga

SEQ ID NO: 13540 - DNA, 56 bp, Artificial
  Synthetic oligonucleotide
tggacggaagtatctaacattacatcagatattaatgtgacaacgagctcgatctc

SEQ ID NO: 13541 - DNA, 60 bp, Artificial
  Synthetic oligonucleotide
ttgccgacgcgagcgaaacaatgctagcaaacgtgacatctgttagacaagaatacgcga

SEQ ID NO: 13542 - DNA, 60 bp, Artificial
  Synthetic oligonucleotide
gaacgtggccgtaatacaagttggtggtgctgacatccttgatataacatctgatcctac

SEQ ID NO: 13543 - DNA, 60 bp, Artificial
  Synthetic oligonucleotide
cgtaatacaagttggtggtgctgacatccttgatataacatctgatcctacgactactcc

SEQ ID NO: 13544 - DNA, 55 bp, Artificial
  Synthetic oligonucleotide
ggtggtgctgacatccttgatataacatctgatcctacgactactccacaaacag

SEQ ID NO: 13545 - DNA, 60 bp, Artificial
  Synthetic oligonucleotide
gcggctgaggaggtaccaatctttggcgctggccaggcaaatgttgttgcgacgacacgc

SEQ ID NO: 13546 - DNA, 55 bp, Artificial
  Synthetic oligonucleotide
atctttggcgctggccaggcaaatgttgttgcgacgacacgcgcaatccaagggg

SEQ ID NO: 13547 - DNA, 55 bp, Artificial
  Synthetic oligonucleotide
cgatgcttacactattcgagggctcatcaactgttttacgaatccgccatttatg

SEQ ID NO: 13548 - DNA, 56 bp, Artificial
  Synthetic oligonucleotide
tcaccactctgcgatgttcacttctgtggtacacggtcacaacttttaccgtttcc

SEQ ID NO: 13549 - DNA, 60 bp, Artificial
  Synthetic oligonucleotide
ggaccgatatcgccagattatactcaacatatggctacaattggtgtactagcaacgccg

SEQ ID NO: 13550 - DNA, 60 bp, Artificial
  Synthetic oligonucleotide
gagtacgcagaattttactcgcagtcaaatcaattgctatcatatggtgatgttacaaga

SEQ ID NO: 13551 - DNA, 53 bp, Artificial
  Synthetic oligonucleotide
acattgagcgtaatcactctaatgaacagcacattgcacacgatacttgaaga

SEQ ID NO: 13552 - DNA, 55 bp, Artificial
  Synthetic oligonucleotide
gtgcctcacgctacttactacgctttacgcggggtattcgttgagcgactgctga

SEQ ID NO: 13553 - DNA, 60 bp, Artificial
  Synthetic oligonucleotide
gaatgtgcacatggctatgttacagtgacgagtccgtacgcccctagtgttaatcgcctc

SEQ ID NO: 13554 - DNA, 60 bp, Artificial
  Synthetic oligonucleotide
tgcacgggtgtgggttacatatgcggtgtgtcggttgtgggatatgtgacccattcaaac

SEQ ID NO: 13555 - DNA, 60 bp, Artificial
  Synthetic oligonucleotide
actttgctatgccccaaggtaattcgcagcaaacgctagctggcgttactgtgagcgttg

SEQ ID NO: 13556 - DNA, 51 bp, Artificial
  Synthetic oligonucleotide
gctttttgagtcctagcgtggatcatggcgtcaaccaagtggggagacaag

SEQ ID NO: 13557 - DNA, 60 bp, Artificial
  Synthetic oligonucleotide
tcacgatggatcatctatccgcagtgctgcctcacaattcttatcggttcctctgtctca

SEQ ID NO: 13558 - DNA, 55 bp, Artificial
  Synthetic oligonucleotide
ctatccgcagtgctgcctcacaattcttatcggttcctctgtctcactcaacgcc

SEQ ID NO: 13559 - DNA, 54 bp, Artificial
  Synthetic oligonucleotide
aagctaccctcagcaggtcgtgcgcgtatggcgttgcggacattgcttctcgct

SEQ ID NO: 13560 - DNA, 58 bp, Artificial
  Synthetic oligonucleotide
tatcatgagaggccgataatctacatggtaggatcagcaccttcatattggatacacg

SEQ ID NO: 13561 - DNA, 55 bp, Artificial
  Synthetic oligonucleotide
aaggatacatcagctggctgattaagaccataatgataccatatctccgcagata

SEQ ID NO: 13562 - DNA, 60 bp, Artificial
  Synthetic oligonucleotide
cgccatttatgccgattgcgtatatattcaccacaagcgctgctcgtgtcgacatcatgc

SEQ ID NO: 13563 - DNA, 53 bp, Artificial
  Synthetic oligonucleotide
cgcatgcccgctaatatgatgaatacacgtgatcagaatgctcgtaagtttgt

SEQ ID NO: 13564 - DNA, 60 bp, Artificial
  Synthetic oligonucleotide
cgaaaatcataagagtagatggagatgacaactatgctgtactacaatttaatacggaag

SEQ ID NO: 13565 - DNA, 60 bp, Artificial
  Synthetic oligonucleotide
gacgtgtcaaatgacgttagagatacgtatgcaagaatgaatgcgaaagtaaaagcgcta

SEQ ID NO: 13566 - DNA, 53 bp, Artificial
  Synthetic oligonucleotide
tcactctaatgaatgacacattgcattctataattcaggatcctggaatggcg

SEQ ID NO: 13567 - DNA, 60 bp, Artificial
  Synthetic oligonucleotide
tggcattgggatgacttatcattgctacaacgagatgttacgaatgttggttgccgcggg

SEQ ID NO: 13568 - DNA, 54 bp, Artificial
  Synthetic oligonucleotide
tcccgctcttcctaaaaaacgcgtgactgcggtaatctcgggactttcacttac

SEQ ID NO: 13569 - DNA, 60 bp, Artificial
  Synthetic oligonucleotide
agcagcatttgaactgtggtatggaaaatctggaactactatagcatccgtatattataa

SEQ ID NO: 13570 - DNA, 60 bp, Artificial
  Synthetic oligonucleotide
ccactacggagcctggcacatctaaccgagagcaatacagagcccgaccaggtattgcat

SEQ ID NO: 13571 - DNA, 60 bp, Artificial
  Synthetic oligonucleotide
atgtcgaaaataagaagactgctcaactgcttcacgctgacactcctcgactcgtcactt

SEQ ID NO: 13572 - DNA, 55 bp, Artificial
  Synthetic oligonucleotide
ctcgtcaatgcgcggaacgctagacaaattgaagttgattaaatcgatgacaccc

SEQ ID NO: 13573 - DNA, 60 bp, Artificial
  Synthetic oligonucleotide
tcacaagacaatcacgcgataccatcacacaaccagctttgtcattgtcgaccactaaca

SEQ ID NO: 13574 - DNA, 59 bp, Artificial
  Synthetic oligonucleotide
tctggaacgtatatcgactagggatatccttcagactcgtgatttacactcactatgta

SEQ ID NO: 13575 - DNA, 50 bp, Artificial
  Synthetic oligonucleotide
tataagcgtgttccgattatgcacttagctgcggacttggactgtatgac

SEQ ID NO: 13576 - DNA, 51 bp, Artificial
  Synthetic oligonucleotide
gatgatacccttcagtgagcgtgtttttaggatggcctcgtcctttgcgac

SEQ ID NO: 13577 - DNA, 60 bp, Artificial
  Synthetic oligonucleotide
gtgaaacgacgagactgtggactcgttcagcatcagatgattctgtggccacgtcatctt

SEQ ID NO: 13578 - DNA, 59 bp, Artificial
  Synthetic oligonucleotide
ctggatcactagacgctgtatacataaattcaactagtggagaatcatttctaacttca

SEQ ID NO: 13579 - DNA, 55 bp, Artificial
  Synthetic oligonucleotide
ctccatctctcgcccctcgttcttatcgacccgccttcattaaacctgaggatgc

SEQ ID NO: 13580 - DNA, 60 bp, Artificial
  Synthetic oligonucleotide
ccgtgcactggtgtacctaattcgcgcctacttcaaatcacgagcgggactgcagaagag

SEQ ID NO: 13581 - DNA, 60 bp, Artificial
  Synthetic oligonucleotide
ctccagacatatatcctatgcggagacctagaatggaaatatgccgtcgagtgatggaag

SEQ ID NO: 13582 - DNA, 55 bp, Artificial
  Synthetic oligonucleotide
cctatgcggagacctagaatggaaatatgccgtcgagtgatggaagcggttggaa

SEQ ID NO: 13583 - DNA, 52 bp, Artificial
  Synthetic oligonucleotide
gtcggcatggattaagtaacttgagagaggttctaagtgacgtaacgaatga

SEQ ID NO: 13584 - DNA, 54 bp, Artificial
  Synthetic oligonucleotide
cttattgggggccatggatttgagttatggtacagaagtgagtagtgatcagag

SEQ ID NO: 13585 - DNA, 52 bp, Artificial
  Synthetic oligonucleotide
ggtggatgggattaagttacagttagacgcgtctaggcaatgtcatgagtgc

SEQ ID NO: 13586 - DNA, 50 bp, Artificial
  Synthetic oligonucleotide
gttataccgacatagcgtctttctctgtagatccgcagctatactgtgat

SEQ ID NO: 13587 - DNA, 50 bp, Artificial
  Synthetic oligonucleotide
agtgaaccctgctcttttaacaagtggacctatagtacgaccaggagaca

SEQ ID NO: 13588 - DNA, 60 bp, Artificial
  Synthetic oligonucleotide
gttaacagcagctaaagatgacaccactcttagattgggaatatcaaatgcgtcagccga

SEQ ID NO: 13589 - DNA, 55 bp, Artificial
  Synthetic oligonucleotide
gacaccactcttagattgggaatatcaaatgcgtcagccgacatactcaacgaag

SEQ ID NO: 13590 - DNA, 51 bp, Artificial
  Synthetic oligonucleotide
cgtcagccgacatactcaacgaagattggacagcattagcacaatggaaga

SEQ ID NO: 13591 - DNA, 60 bp, Artificial
  Synthetic oligonucleotide
agcggctgaacgatttgcagagagtgaaattggctcagcggctattgatgggttagttca

SEQ ID NO: 13592 - DNA, 55 bp, Artificial
  Synthetic oligonucleotide
gcagagagtgaaattggctcagcggctattgatgggttagttcaggggagcgtac

SEQ ID NO: 13593 - DNA, 52 bp, Artificial
  Synthetic oligonucleotide
aggtgcggggatggcgacagccgtagccacgggtagggctatcgaaggagcc

SEQ ID NO: 13594 - DNA, 55 bp, Artificial
  Synthetic oligonucleotide
cgggaaaagccaaggtgtgttgtgttaagttgactgctatggacttagaactacc

SEQ ID NO: 13595 - DNA, 56 bp, Artificial
  Synthetic oligonucleotide
taaaggtcactatagagttgtgaaatactcgtcagttgcaaatcatgcagatcgag

SEQ ID NO: 13596 - DNA, 60 bp, Artificial
  Synthetic oligonucleotide
actgggtggattatctgtacgcgtgtcagccattgaatcgggagttagtgagaacggcaa

SEQ ID NO: 13597 - DNA, 55 bp, Artificial
  Synthetic oligonucleotide
ggtccaagagagaatgtagctgtaatacaagttggtggctctaatgtgttagaca

SEQ ID NO: 13598 - DNA, 52 bp, Artificial
  Synthetic oligonucleotide
tggctctaatgtgttagacataacagcagatccaacgactaatccacaaact

SEQ ID NO: 13599 - DNA, 55 bp, Artificial
  Synthetic oligonucleotide
tttaacaccgatgtcactaaacaaatggtccaagatgtgtcaaacgatgtgagac

SEQ ID NO: 13600 - DNA, 57 bp, Artificial
  Synthetic oligonucleotide
agtttaattccagtgcatttatcttacgtcaaaatggctcttttcaattctcgtgag

SEQ ID NO: 13601 - DNA, 60 bp, Artificial
  Synthetic oligonucleotide
tctagtgaaccaagtcatgagtcaggaagaggatactccgactaacatcctggtagacca

SEQ ID NO: 13602 - DNA, 60 bp, Artificial
  Synthetic oligonucleotide
tgaagtatcaacatctggaaagcgcaaacattatggcgttgtgcgaaggggacaatgttc

SEQ ID NO: 13603 - DNA, 60 bp, Artificial
  Synthetic oligonucleotide
aatacaacttgtttgggattgcgagaggggacattatcatcggacgcgtgcagtcgacac

SEQ ID NO: 13604 - DNA, 55 bp, Artificial
  Synthetic oligonucleotide
ctggaaagcgcaaacattatggcgttgtgcgaaggggacaatgttctaaggcggc

SEQ ID NO: 13605 - DNA, 60 bp, Artificial
  Synthetic oligonucleotide
tctgacgctatggatgttcagccactaaaaattgatttgagtgcgcgaaatggatttgtt

SEQ ID NO: 13606 - DNA, 60 bp, Artificial
  Synthetic oligonucleotide
cgatagatcctatgatggatgaccctgtcatgttgcaattgagtactatagggaatctgt

SEQ ID NO: 13607 - DNA, 55 bp, Artificial
  Synthetic oligonucleotide
gaccaggattgggagtcacttaaacagtataaacatcctagtattctgtccgact

SEQ ID NO: 13608 - DNA, 55 bp, Artificial
  Synthetic oligonucleotide
gtgtgcggtccggatatgattcaagtgtcacttaatgctggagcgagaggagatg

SEQ ID NO: 13609 - DNA, 50 bp, Artificial
  Synthetic oligonucleotide
tgacggagcgactacgtggtatttcaacccagtgattcttagaccaaaca

SEQ ID NO: 13610 - DNA, 55 bp, Artificial
  Synthetic oligonucleotide
ggttattgaccgttataccaaacgatatgtttcttcgtgaatcgttggtcgcatg

SEQ ID NO: 13611 - DNA, 60 bp, Artificial
  Synthetic oligonucleotide
tgtataaacaagtgccacaaccttttgactttagagcgtcgatgcatatgctaacgtcta

SEQ ID NO: 13612 - DNA, 55 bp, Artificial
  Synthetic oligonucleotide
gccacaaccttttgactttagagcgtcgatgcatatgctaacgtctaatcttacc

SEQ ID NO: 13613 - DNA, 60 bp, Artificial
  Synthetic oligonucleotide
tcagcagccagtatgtcgtggagtggagatactgacatgttattacacggaattaagtat

SEQ ID NO: 13614 - DNA, 55 bp, Artificial
  Synthetic oligonucleotide
gtcgtggagtggagatactgagatgttattacacggaattaagtatggcgaaagc

SEQ ID NO: 13615 - DNA, 57 bp, Artificial
  Synthetic oligonucleotide
ggaggtcattatcattttgcacatccagttggccaatggccatacatgacaggtgga

SEQ ID NO: 13616 - DNA, 60 bp, Artificial
  Synthetic oligonucleotide
attcgaaatagaattgagcagttgataatgcaatgtagattgtaagcaatttctagagga

SEQ ID NO: 13617 - DNA, 54 bp, Artificial
  Synthetic oligonucleotide
caccacaattcggaaatgttatgggactaagatattatacagccagtaatatat

SEQ ID NO: 13618 - DNA, 60 bp, Artificial
  Synthetic oligonucleotide
caaacattatacgtacaaagagaatctttatgcgagcgtggtatgcatatagagaatctt

SEQ ID NO: 13619 - DNA, 60 bp, Artificial
  Synthetic oligonucleotide
ttgaatcccatcctcccaacgggtgctagagcaacgcgctcgatgctagttgggccaact

SEQ ID NO: 13620 - DNA, 55 bp, Artificial
  Synthetic oligonucleotide
gtacaaagagaatctttatgcgagcgtggtatgcatatagagaatcttgacaggc

SEQ ID NO: 13621 - DNA, 56 bp, Artificial
  Synthetic oligonucleotide
agtgaaagccataacttcgaacatgatgactagtagaacacctgataggagcaaac

SEQ ID NO: 13622 - DNA, 50 bp, Artificial
  Synthetic oligonucleotide
gcgggagcaaattagatgggcatcaagtgcacataattggcttagtaaat

SEQ ID NO: 13623 - DNA, 60 bp, Artificial
  Synthetic oligonucleotide
cggtgttaggcgagtagaagggacacgactcacatggcgacgggcgctcaggagtgataa

SEQ ID NO: 13624 - DNA, 60 bp, Artificial
  Synthetic oligonucleotide
tgaacggtttatgagtctatcaagcgctatgcctcaagcgagcggtggatttgatcgtat

SEQ ID NO: 13625 - DNA, 60 bp, Artificial
  Synthetic oligonucleotide
ctagctataataaatactatcgtttatccagcattcggaatgcaaagaatgcactatagg

SEQ ID NO: 13626 - DNA, 55 bp, Artificial
  Synthetic oligonucleotide
ctatcgtttatccagcattcggaatgcaaagaatgcactataggaacggtgatcc

SEQ ID NO: 13627 - DNA, 55 bp, Artificial
  Synthetic oligonucleotide
ccaaagatccaacctaaaacgttagaggctatattggatgcgccaggagggaatg

SEQ ID NO: 13628 - DNA, 52 bp, Artificial
  Synthetic oligonucleotide
tcgaatgcaaacgccatcgattcatatttatgcagctccatgggattcggac

SEQ ID NO: 13629 - DNA, 60 bp, Artificial
  Synthetic oligonucleotide
tggatagaaacttgccatcaacggctagatatataaggccgaatttgcttcaggacagac

SEQ ID NO: 13630 - DNA, 54 bp, Artificial
  Synthetic oligonucleotide
ctcctgctacaggtacgtacggaaccatatatgcctccagatcattaccccgac

SEQ ID NO: 13631 - DNA, 52 bp, Artificial
  Synthetic oligonucleotide
gaggccctgcgtagagtttaagttgcgattagtgccacggcgcagccactct

SEQ ID NO: 13632 - DNA, 60 bp, Artificial
  Synthetic oligonucleotide
catagcactggacggggggctgcatacaacgcgagactagctttccgatctgacttggtg

SEQ ID NO: 13633 - DNA, 60 bp, Artificial
  Synthetic oligonucleotide
aagcgtacatgtggcacctaatgatgttatcaagccagccgctgtagtggctggcacaag

SEQ ID NO: 13634 - DNA, 56 bp, Artificial
  Synthetic oligonucleotide
actgagtatgctccatggcagttatatgttatacatcccgtccaagggtcgttggg

SEQ ID NO: 13635 - DNA, 60 bp, Artificial
  Synthetic oligonucleotide
gtatacgagtacatgattggaccttgggcgcattatggtgatatcgattattcagtggta

SEQ ID NO: 13636 - DNA, 60 bp, Artificial
  Synthetic oligonucleotide
gaataaatgttggaccgatatcaccagattatactcaacatatggctacaattggtgtac

SEQ ID NO: 13637 - DNA, 60 bp, Artificial
  Synthetic oligonucleotide
catctaagtacatattgctcgtatatgtcggaagtctacagctttgcgttacccattgtg

SEQ ID NO: 13638 - DNA, 55 bp, Artificial
  Synthetic oligonucleotide
ctcaaagcttatgaactagatccttgaccggatctactggggacaataaccttac

SEQ ID NO: 13639 - DNA, 60 bp, Artificial
  Synthetic oligonucleotide
gagcgtgcttcagataaaattgcgcaaggtgtgattatagcatatcgtgacatgcagtta

SEQ ID NO: 13640 - DNA, 60 bp, Artificial
  Synthetic oligonucleotide
gatgacatggctaatggaagatacacaccaggcataataccaccagtgaacgtcgacaga

SEQ ID NO: 13641 - DNA, 55 bp, Artificial
  Synthetic oligonucleotide
ggctaatggaagatacacaccaggcataataccaccagtaaatgttgacaaaccg

SEQ ID NO: 13642 - DNA, 55 bp, Artificial
  Synthetic oligonucleotide
attacttctagccgaaaatgacgagatgcgtacgctagcgcgggcactacaacgt

SEQ ID NO: 13643 - DNA, 57 bp, Artificial
  Synthetic oligonucleotide
agactattgggatgactcgcaagcatttagaaacatggtttatgtgagatcattagc

SEQ ID NO: 13644 - DNA, 53 bp, Artificial
  Synthetic oligonucleotide
gttagtaccatccaacgacgactatcagacgccgattgcgaactccgtcacag

SEQ ID NO: 13645 - DNA, 55 bp, Artificial
  Synthetic oligonucleotide
tgcgcaaggtgtgattatagcatatcgtgacatgcagttagaacgcgatgagatg

SEQ ID NO: 13646 - DNA, 53 bp, Artificial
  Synthetic oligonucleotide
gaatgtacaaagatgattctacaccagattactgttatagcgagataagcgtc

SEQ ID NO: 13647 - DNA, 51 bp, Artificial
  Synthetic oligonucleotide
atcatttcagcttatgagaccaccaaatatgacaccagctgttgcggcact

SEQ ID NO: 13648 - DNA, 60 bp, Artificial
  Synthetic oligonucleotide
ctgtgtactttaaagaatacactgacatagcagctttttcagtggatcctcagttgtatt

SEQ ID NO: 13649 - DNA, 56 bp, Artificial
  Synthetic oligonucleotide
cagttgtattgtgattacaatttagtcctgatgaaatacgattcaactctagaatt

SEQ ID NO: 13650 - DNA, 52 bp, Artificial
  Synthetic oligonucleotide
atcgagtattgtttaaaatacgaattaccaagtgatgcacgcatgttaaagt

SEQ ID NO: 13651 - DNA, 60 bp, Artificial
  Synthetic oligonucleotide
agtgtaagaatgcgaaatgtagtgtcgtaggacatataagcccagctatacaatccgctt

SEQ ID NO: 13652 - DNA, 55 bp, Artificial
  Synthetic oligonucleotide
agtgtcgtaggacatataagcccagctatacaatccgctttggcgaaacgctaca

SEQ ID NO: 13653 - DNA, 55 bp, Artificial
  Synthetic oligonucleotide
tttccaccaggcatgaattggactgagctgattactaactattccccatctaggg

SEQ ID NO: 13654 - DNA, 60 bp, Artificial
  Synthetic oligonucleotide
gcattgcgccgcatcaccaacagaagagttttatgataggtttcgatctggagatcgaat

SEQ ID NO: 13655 - DNA, 58 bp, Artificial
  Synthetic oligonucleotide
catgcagttagaacgcgatgagatgtatggttatgtaaacatagctaggaatctagac

SEQ ID NO: 13656 - DNA, 55 bp, Artificial
  Synthetic oligonucleotide
cagggtagcgttcactcgattatgacgggcgaatcctatggtgagtcggtcaaac

SEQ ID NO: 13657 - DNA, 55 bp, Artificial
  Synthetic oligonucleotide
taggtagagtagcggaaggtacaaacacaactgatagatggttcgcttgcgtact

SEQ ID NO: 13658 - DNA, 53 bp, Artificial
  Synthetic oligonucleotide
gtaatccgatggacattactctgtactattatcaacagacagatgaggctaat

SEQ ID NO: 13659 - DNA, 52 bp, Artificial
  Synthetic oligonucleotide
actgttgctgcgaacgcgtgtttgttaaattggcgggatgggcagctgataa

SEQ ID NO: 13660 - DNA, 55 bp, Artificial
  Synthetic oligonucleotide
ggattcatcagcacaatcacgaccttcaagtaatgtcggatgcgatcaagtggat

SEQ ID NO: 13661 - DNA, 60 bp, Artificial
  Synthetic oligonucleotide
tcggaagtaactgcatctatgtgagaggttgagttaccctcgtctgtatttgggagcggc

SEQ ID NO: 13662 - DNA, 51 bp, Artificial
  Synthetic oligonucleotide
taaattcaaccgcttatgatattggttgtcgtgattatgaatgtgcttaca

SEQ ID NO: 13663 - DNA, 53 bp, Artificial
  Synthetic oligonucleotide
agtgtggacggatgtttccgaacagatagcgagttcttcagactctgtaagga

SEQ ID NO: 13664 - DNA, 55 bp, Artificial
  Synthetic oligonucleotide
tcgtagctacaactgggaccaactcgtgttacccaattatcgtatcaacgacgag

SEQ ID NO: 13665 - DNA, 54 bp, Artificial
  Synthetic oligonucleotide
agagggcaatcgtaccgtatgttccgcccccttatacgtatgcaaatgctccga

SEQ ID NO: 13666 - DNA, 60 bp, Artificial
  Synthetic oligonucleotide
gctagaatgacctccatttgtgggagatccacagtgttgggtggatcaaacacctagatc

SEQ ID NO: 13667 - DNA, 50 bp, Artificial
  Synthetic oligonucleotide
cgaacgggtaaagcgaaggtgtgttgtgttaagatgacagctatggattt

SEQ ID NO: 13668 - DNA, 57 bp, Artificial
  Synthetic oligonucleotide
ggcaagtgcaagctgattatatgacagcaacacgagaggttgatttcacggtaccgg

SEQ ID NO: 13669 - DNA, 57 bp, Artificial
  Synthetic oligonucleotide
aatcatgaatatagcaacgtgcttacccacaggagaatacattgcgccaaaccccag

SEQ ID NO: 13670 - DNA, 60 bp, Artificial
  Synthetic oligonucleotide
acgtatgattaggtcgaaaacagtacatcctatatatctcggttcgatgcactatgatat

SEQ ID NO: 13671 - DNA, 50 bp, Artificial
  Synthetic oligonucleotide
ataccgtcgtcatgtctggttatgtcggtgcttcagtgagtgacgctttc

SEQ ID NO: 13672 - DNA, 55 bp, Artificial
  Synthetic oligonucleotide
gaggaacatggttatacgatcgtaccgcctgaatcaatgtatagtgccctgctac

SEQ ID NO: 13673 - DNA, 51 bp, Artificial
  Synthetic oligonucleotide
gtacgtcctagtttcaccatgggatggcagtgacctagctaaagtatcgac

SEQ ID NO: 13674 - DNA, 60 bp, Artificial
  Synthetic oligonucleotide
aaagccccgagattattaactgtcgaatctgaaacgtatgtgggcgatgacatgttgatg

SEQ ID NO: 13675 - DNA, 60 bp, Artificial
  Synthetic oligonucleotide
gcgcgacgtccggtctctactgtattgcaacatccagaggcgcgagcgaaggttcaaatg

SEQ ID NO: 13676 - DNA, 60 bp, Artificial
  Synthetic oligonucleotide
gctattcgctggtcagttatggcacgcgctgcgttcctattcaagaccgttggattcggt

SEQ ID NO: 13677 - DNA, 60 bp, Artificial
  Synthetic oligonucleotide
cttgatgcgaggctactcacgagagacgagcctatgtatgacaccctatgcgctattcga

SEQ ID NO: 13678 - DNA, 55 bp, Artificial
  Synthetic oligonucleotide
cggattacacacagcacatggcgacgattggagtgctagcaacgccagagatccc

SEQ ID NO: 13679 - DNA, 55 bp, Artificial
  Synthetic oligonucleotide
taggtataatggtttaacaaatcattcggtatcgatgaggccacaaacccaagca

SEQ ID NO: 13680 - DNA, 50 bp, Artificial
  Synthetic oligonucleotide
ctgcgggacaggtcaatgcgctgctagccccaaggaggggggacgcagtc

SEQ ID NO: 13681 - DNA, 56 bp, Artificial
  Synthetic oligonucleotide
gctcacaagatgttatgcgtatgtctctcccacttggcacgcattacgcgctgtca

SEQ ID NO: 13682 - DNA, 60 bp, Artificial
  Synthetic oligonucleotide
gtttagagagcctcgatatcgttcgtattgagcccaggcgggaggcgcgagtgcaatacg

SEQ ID NO: 13683 - DNA, 51 bp, Artificial
  Synthetic oligonucleotide
aagtttttttcaccgacctgcatgaccctacatacacatggtggaacaaag

SEQ ID NO: 13684 - DNA, 52 bp, Artificial
  Synthetic oligonucleotide
attctcatcatttggcgattattccagtagactagtacggtttgacgtgatt

SEQ ID NO: 13685 - DNA, 55 bp, Artificial
  Synthetic oligonucleotide
cagttcgagcatattgtgccactccgaagagtgttgactacagctacgataactc

SEQ ID NO: 13686 - DNA, 50 bp, Artificial
  Synthetic oligonucleotide
gttgtagatggagtcaatcataaattgaacgtgacaacaaacacttgtac

SEQ ID NO: 13687 - DNA, 60 bp, Artificial
  Synthetic oligonucleotide
atgcgaactgtaatacataaccaagaccaacttgctatcgtgggtataccagcttacaga

SEQ ID NO: 13688 - DNA, 55 bp, Artificial
  Synthetic oligonucleotide
ccaagaccaacttgctatcgtgggtataccagcttacagattaactcaatccaca

SEQ ID NO: 13689 - DNA, 52 bp, Artificial
  Synthetic oligonucleotide
agcttacagattaactcaatccacagaactgtcaattcgtgacgacaacgcc

SEQ ID NO: 13690 - DNA, 60 bp, Artificial
  Synthetic oligonucleotide
gtcatcgctttcagtagaggcaatcacgctgtgcccgcctatcagaataccttcagacga

SEQ ID NO: 13691 - DNA, 55 bp, Artificial
  Synthetic oligonucleotide
gtcgattgttccattgagaaattcccactaatggctaaaatatactcatggtcgt

SEQ ID NO: 13692 - DNA, 60 bp, Artificial
  Synthetic oligonucleotide
tgaatcagtgcttgcggatgcgaatgaaactctgttagcgaatgtgaccgcagtgcgtca

SEQ ID NO: 13693 - DNA, 56 bp, Artificial
  Synthetic oligonucleotide
cctggcccgcttacacgtgcgattgctcgcgccgcttacgcatagtccactttgca

SEQ ID NO: 13694 - DNA, 50 bp, Artificial
  Synthetic oligonucleotide
actacaagtgcggtaaaatatgcgttgaaccttatgtaggctctatttca

SEQ ID NO: 13695 - DNA, 57 bp, Artificial
  Synthetic oligonucleotide
gattggggtatgtatcttgaaggatttatgtctgaggaatctggagaaacacttcta

SEQ ID NO: 13696 - DNA, 60 bp, Artificial
  Synthetic oligonucleotide
ctccaaattcggtaacaaacacatgattgcgaagcttatgaacgatattgcgtagtgtga

SEQ ID NO: 13697 - DNA, 55 bp, Artificial
  Synthetic oligonucleotide
acatgattgcgaagcttatgaacgatattgcgtagtgtgacaactacgtgttgcg

SEQ ID NO: 13698 - DNA, 60 bp, Artificial
  Synthetic oligonucleotide
gcatatgtcgtatctgatctcgctagccggactgttgaaactagcgacatcgttaaagct

SEQ ID NO: 13699 - DNA, 55 bp, Artificial
  Synthetic oligonucleotide
cgctagccggactgttgaaactagcgacatcgttaaagctgtgatattcactccc

SEQ ID NO: 13700 - DNA, 55 bp, Artificial
  Synthetic oligonucleotide
cggtttacgcatgtggataggggctgtggccaaccacgcagttaatcaccgctgg

SEQ ID NO: 13701 - DNA, 60 bp, Artificial
  Synthetic oligonucleotide
ggcaagtatacgcattttcaatacagcatgtccggaacataagatagcaattcccgtaat

SEQ ID NO: 13702 - DNA, 53 bp, Artificial
  Synthetic oligonucleotide
atgatgatttacctagtttggaggcggatcgagaacttttctatgccgcaggg

SEQ ID NO: 13703 - DNA, 57 bp, Artificial
  Synthetic oligonucleotide
gtaaacaggggaagagagctcaaggtgacgcgcagaaggaaggtactgaggaagaca

SEQ ID NO: 13704 - DNA, 55 bp, Artificial
  Synthetic oligonucleotide
tggggtattggatgtccgagagtgaaggttttaacatcgattggaggtgaggatc

SEQ ID NO: 13705 - DNA, 60 bp, Artificial
  Synthetic oligonucleotide
agttcgcagctacttatgctaagttaggcaacgcttcgaccccgagatatagagcggaca

SEQ ID NO: 13706 - DNA, 60 bp, Artificial
  Synthetic oligonucleotide
agagcggacatgatcgatatttacgcgcacgttggattggagttagcgggtacagacgcg

SEQ ID NO: 13707 - DNA, 51 bp, Artificial
  Synthetic oligonucleotide
tccattgaacggtcgtgcctatagaaaggagttggtgacgccagctcgaga

SEQ ID NO: 13708 - DNA, 58 bp, Artificial
  Synthetic oligonucleotide
aacagctaagttgaagacagtgcgtaaactagtggatgcggtaaaccacgcatggggc

SEQ ID NO: 13709 - DNA, 55 bp, Artificial
  Synthetic oligonucleotide
ggtaatcttcctatcagaaattggaacttcgattttgggctactcggaacaacgc

SEQ ID NO: 13710 - DNA, 60 bp, Artificial
  Synthetic oligonucleotide
gcaccagccaacacgcagcagtttgagcatatagtgcagctccgtagagtgctgaccacc

SEQ ID NO: 13711 - DNA, 55 bp, Artificial
  Synthetic oligonucleotide
cacgcagcagtttgagcatatagtgcagctccgtagagtgctgaccaccgctacc

SEQ ID NO: 13712 - DNA, 57 bp, Artificial
  Synthetic oligonucleotide
cttggtcgattctggactgtacttgatgaccatagaccatttattgcgatcaaaacc

SEQ ID NO: 13713 - DNA, 60 bp, Artificial
  Synthetic oligonucleotide
ctaatatccgatgacgtgctaggtcttggacgattctagttacctgtgcaaaaatcagct

SEQ ID NO: 13714 - DNA, 60 bp, Artificial
  Synthetic oligonucleotide
cggcttcgatctttgatacggtggcgaagtgtggacatgaagcctcacctagtaagacaa

SEQ ID NO: 13715 - DNA, 51 bp, Artificial
  Synthetic oligonucleotide
acgggtttacgctgatacagattcgaaatccattagcattatatgttccta

SEQ ID NO: 13716 - DNA, 59 bp, Artificial
  Synthetic oligonucleotide
atgcgaggcgtatgataagatcacgcgctgtacaccctatctttttaggttcaatgcat

SEQ ID NO: 13717 - DNA, 60 bp, Artificial
  Synthetic oligonucleotide
aacagatgtgactgagagaagcgctatctttcggctgacttgttatgcaatctttggatg

SEQ ID NO: 13718 - DNA, 60 bp, Artificial
  Synthetic oligonucleotide
gatcaatcacacactccaatagcgcatggcctgcgatgactctttcatatccgcgaagtt

SEQ ID NO: 13719 - DNA, 55 bp, Artificial
  Synthetic oligonucleotide
agcgcatggcctgcgatgactctttcatatccgcgaagtttcacgtgaggaccgg

SEQ ID NO: 13720 - DNA, 50 bp, Artificial
  Synthetic oligonucleotide
attgactgagaagccacagtcaatcatatcgcgtgtggctcagctttaat

SEQ ID NO: 13721 - DNA, 51 bp, Artificial
  Synthetic oligonucleotide
taattcacgatggctcactcttttttggtactcgcgatcaagctacaggtc

SEQ ID NO: 13722 - DNA, 54 bp, Artificial
  Synthetic oligonucleotide
gatgatcgaagagtggagagccaggaatctgagggaagcggatcagccgattgt

SEQ ID NO: 13723 - DNA, 60 bp, Artificial
  Synthetic oligonucleotide
tcgcgaatcacatgagtatatcgcggcgatcacaccagatacgattttcggaatcagcta

SEQ ID NO: 13724 - DNA, 59 bp, Artificial
  Synthetic oligonucleotide
gcaaatcatatgagtatatcacggcgatcacaccagatacgattttcggagtcagctac

SEQ ID NO: 13725 - DNA, 60 bp, Artificial
  Synthetic oligonucleotide
aggcaacgcctcgactccgagatatagagcggacatgatcgatatttacgcacacgttgg

SEQ ID NO: 13726 - DNA, 57 bp, Artificial
  Synthetic oligonucleotide
acgaacaagcgttacctcagcaggtgaaagcgcattagtgcgacacaatcgctacat

SEQ ID NO: 13727 - DNA, 56 bp, Artificial
  Synthetic oligonucleotide
cggctcggtcagattacgtcgtttacactccaatcatgcgggttgatgctccagct

SEQ ID NO: 13728 - DNA, 60 bp, Artificial
  Synthetic oligonucleotide
gtatcgattcgggctctgacttcacgaaggcggaacgtggatatcagagagcgaaggctg

SEQ ID NO: 13729 - DNA, 56 bp, Artificial
  Synthetic oligonucleotide
gatatgtcagagttagctgacttgatacttaatgagtggctctgtaatccaatgga

SEQ ID NO: 13730 - DNA, 55 bp, Artificial
  Synthetic oligonucleotide
acctaagatcagtaggtagagtggcgccccaaggtttgcaccggatggagtggtt

SEQ ID NO: 13731 - DNA, 53 bp, Artificial
  Synthetic oligonucleotide
cggaagcctacgtagccaaagctgctacattgacttatggaattctagctgag

SEQ ID NO: 13732 - DNA, 51 bp, Artificial
  Synthetic oligonucleotide
tacgtcaattttgtcatgttcactggcgatactttcagagcggtgtgcatt

SEQ ID NO: 13733 - DNA, 60 bp, Artificial
  Synthetic oligonucleotide
gcactgcttggagctcacgtcgccccttactcagccggagctattaaccagtttgatggc

SEQ ID NO: 13734 - DNA, 53 bp, Artificial
  Synthetic oligonucleotide
gtttgatggcgttgcttggagagatgcggtactcagttcatttgtcacggtaa

SEQ ID NO: 13735 - DNA, 59 bp, Artificial
  Synthetic oligonucleotide
cgatgtggcctcagaatcaggatcttcacatgatgactatgtggtcgctcactgataag

SEQ ID NO: 13736 - DNA, 50 bp, Artificial
  Synthetic oligonucleotide
cgctgattggtgcctcggtcgctcagatagctatcagagcttaccgttac

SEQ ID NO: 13737 - DNA, 60 bp, Artificial
  Synthetic oligonucleotide
tcgatgcttgattatatcatctatagcgcagaagaggtgcactacgttgggtgtggtgac

SEQ ID NO: 13738 - DNA, 60 bp, Artificial
  Synthetic oligonucleotide
taccgtatgaatatatttccgcgcaacacgctgtggtagaaaaaatgttatcatatgcaa

SEQ ID NO: 13739 - DNA, 60 bp, Artificial
  Synthetic oligonucleotide
taggtgagattgcctgcgttatgaatgcagctagtgcgtccgtgggtctgatgagcggtt

SEQ ID NO: 13740 - DNA, 55 bp, Artificial
  Synthetic oligonucleotide
ttacttggttacaacctcacggtgtgacaaggtgaagcatgacccatcttcgtgt

SEQ ID NO: 13741 - DNA, 60 bp, Artificial
  Synthetic oligonucleotide
tcttcctactcgccaattgtcatgtgtcacttgattgctcgtgtaatgtctgggttcgtg

SEQ ID NO: 13742 - DNA, 55 bp, Artificial
  Synthetic oligonucleotide
catgtgtcacttgattgctcgtgtaatgtctgggttcgtgccaatgcgaggtaac

SEQ ID NO: 13743 - DNA, 60 bp, Artificial
  Synthetic oligonucleotide
tcgattatattaacacgatcatacaaacaatgacgcctagacatcgggccatatatcctg

SEQ ID NO: 13744 - DNA, 55 bp, Artificial
  Synthetic oligonucleotide
cacgatcatacaaacaatgacgcctagacatcgggccatatatcctgaaggttgg

SEQ ID NO: 13745 - DNA, 52 bp, Artificial
  Synthetic oligonucleotide
ccaattcacgaacggacggacttaaacgtagctcataatgaaggttctacca

SEQ ID NO: 13746 - DNA, 55 bp, Artificial
  Synthetic oligonucleotide
gtgagaggttgagttaccctcgtctgtatttgggagcggcgggactcttcatcgc

SEQ ID NO: 13747 - DNA, 59 bp, Artificial
  Synthetic oligonucleotide
tgggagcggcgggactcttcatcgcaaaccacattggacacgatggtttactgacaaac

SEQ ID NO: 13748 - DNA, 55 bp, Artificial
  Synthetic oligonucleotide
gcggtaaatggagtgtattacaccattaaaatcgggagaactgtacaatgtgggg

SEQ ID NO: 13749 - DNA, 60 bp, Artificial
  Synthetic oligonucleotide
atcacaggctccatggacattgcatacgctaattcaacgcaagaagaaacattcctcact

SEQ ID NO: 13750 - DNA, 54 bp, Artificial
  Synthetic oligonucleotide
attcctcacttctacactttgcctatattatccgactgaggctgcgactgaaat

SEQ ID NO: 13751 - DNA, 59 bp, Artificial
  Synthetic oligonucleotide
acatcctcgatataactgctgatccaactactgcaccacagacagaacggatgatgcga

SEQ ID NO: 13752 - DNA, 56 bp, Artificial
  Synthetic oligonucleotide
gctgttgtcgcagtgtcaaagaatgtgaactcaagcgtaacgtatgaagtgaagcg

SEQ ID NO: 13753 - DNA, 55 bp, Artificial
  Synthetic oligonucleotide
acatagtgtggctcaggtatatgcagacactcaggtttacacacacgataactcc

SEQ ID NO: 13754 - DNA, 53 bp, Artificial
  Synthetic oligonucleotide
tatacatgataggatcagcgccctcgtattggatatatgatgtcaaacaatac

SEQ ID NO: 13755 - DNA, 53 bp, Artificial
  Synthetic oligonucleotide
tgatgtacccacactattatgttttgcatagtgattactgtattgtaccaaat

SEQ ID NO: 13756 - DNA, 54 bp, Artificial
  Synthetic oligonucleotide
aatcagatcgtttagggactacaagtgtggtaaaatatgcgttgaaccttatgt

SEQ ID NO: 13757 - DNA, 55 bp, Artificial
  Synthetic oligonucleotide
tgatagtcatcgccttagtcctagaaaataatgggtgtttggaatatggtcgtaa

SEQ ID NO: 13758 - DNA, 55 bp, Artificial
  Synthetic oligonucleotide
ggaactgacacattcctacaggaacgagcgtaagagaatggcagaccaagagcgg

SEQ ID NO: 13759 - DNA, 55 bp, Artificial
  Synthetic oligonucleotide
gtgactttaacgttgcatctatttatgtccgcgagaattttgaattatgcactga

SEQ ID NO: 13760 - DNA, 55 bp, Artificial
  Synthetic oligonucleotide
gacagctgcagaggaggtaccggtgttgggcgctggcgcagcgaatgcgattgcg

SEQ ID NO: 13761 - DNA, 54 bp, Artificial
  Synthetic oligonucleotide
gataatgactcgcccaaattttctcacgaacgacgcgcaatcgagtgattagtc

SEQ ID NO: 13762 - DNA, 60 bp, Artificial
  Synthetic oligonucleotide
atggcttacatcgcagttcctgcggtggtggattcacgttcaagtgaggctattggactg

SEQ ID NO: 13763 - DNA, 54 bp, Artificial
  Synthetic oligonucleotide
tagtgcgcagcctaaatggtttggatcattgttgcgattgctcatatgtccctg

SEQ ID NO: 13764 - DNA, 51 bp, Artificial
  Synthetic oligonucleotide
taacttgcagcgtgtattcacagtggcttccattagaagcatgcttgtcaa

SEQ ID NO: 13765 - DNA, 55 bp, Artificial
  Synthetic oligonucleotide
gcatatggcgacgattggagtgctagcgacgccagagattcctttcacaacggag

SEQ ID NO: 13766 - DNA, 55 bp, Artificial
  Synthetic oligonucleotide
tgagtctagctacgatcgccgaaaattatatgatgcataatgaaactcagagagc

SEQ ID NO: 13767 - DNA, 60 bp, Artificial
  Synthetic oligonucleotide
tgatgcataatgaaactcagagagcaattgtaccgtatgttccacccccttatgcgtatg

SEQ ID NO: 13768 - DNA, 60 bp, Artificial
  Synthetic oligonucleotide
gagttggcgtcaatgagacgtaggtatgcgatactacgtgtagtgatcttaatgagcggg

SEQ ID NO: 13769 - DNA, 60 bp, Artificial
  Synthetic oligonucleotide
ggagatctcacgcacaaagcgggatatagcgaagatagaatcatatgtttccgcggctag

SEQ ID NO: 13770 - DNA, 57 bp, Artificial
  Synthetic oligonucleotide
attcgcttcgattcaagaatgagatacgaagcaagaatagaaagcgcttatgtgacc

SEQ ID NO: 13771 - DNA, 60 bp, Artificial
  Synthetic oligonucleotide
attcagatgtaccgttcgttcaggcatatagcaagttcgctgatgataatccacgtcatc

SEQ ID NO: 13772 - DNA, 59 bp, Artificial
  Synthetic oligonucleotide
gtaccgttcgttcaggcatatagcaagttcgctgatgataatccacgtcatcttcgtgt

SEQ ID NO: 13773 - DNA, 60 bp, Artificial
  Synthetic oligonucleotide
cgttaacatgatgaagcttgaaaagctttgctgacattaagagttaatgactctggaaat

SEQ ID NO: 13774 - DNA, 55 bp, Artificial
  Synthetic oligonucleotide
gaaaagctttgctgacattaagagttaatgactctggaaattgagcttcgaaagg

SEQ ID NO: 13775 - DNA, 55 bp, Artificial
  Synthetic oligonucleotide
ctgatgagttatatagaaacgggacagacagcagcgttcagggaatcattaacgt

SEQ ID NO: 13776 - DNA, 60 bp, Artificial
  Synthetic oligonucleotide
attgaccgcgctcgttgtccagtactcgcgagatgggctgatatgatttaccaatactgg

SEQ ID NO: 13777 - DNA, 60 bp, Artificial
  Synthetic oligonucleotide
tcgatgatgaagcttgctactagaagattgaagcagttcgttgatgcgaaccccgacaat

SEQ ID NO: 13778 - DNA, 59 bp, Artificial
  Synthetic oligonucleotide
cgtatcggagtaaagtcagactcgttgatcttactgattcgttacaagcaggaactcag

SEQ ID NO: 13779 - DNA, 60 bp, Artificial
  Synthetic oligonucleotide
aaggctgttgattcatatgaaaacctactcgtcacagagaatgaacaaatgcgcacgtta

SEQ ID NO: 13780 - DNA, 55 bp, Artificial
  Synthetic oligonucleotide
aaacctactcgtcacagagaatgaacaaatgcgcacgttagcacgcgcgttacag

SEQ ID NO: 13781 - DNA, 55 bp, Artificial
  Synthetic oligonucleotide
tagtgggatcgggaatggcaacggctattgcaacaggtagagcgatcgagggcgc

SEQ ID NO: 13782 - DNA, 60 bp, Artificial
  Synthetic oligonucleotide
gcacgcgcggcgtatgattagatcaaaaactgtgcaccccatttacttaggctcgatgca

SEQ ID NO: 13783 - DNA, 53 bp, Artificial
  Synthetic oligonucleotide
ataccattaggaaggagagatgtaccaggaagacggactagaataatattcat

SEQ ID NO: 13784 - DNA, 60 bp, Artificial
  Synthetic oligonucleotide
aaacatactagagagtatgctgaattctactcacagtcaaatcagttattgtcttatggt

SEQ ID NO: 13785 - DNA, 55 bp, Artificial
  Synthetic oligonucleotide
ggtcatcggaccaccaagtggttttatggatacgccaatgtatcgtacagtcaat

SEQ ID NO: 13786 - DNA, 55 bp, Artificial
  Synthetic oligonucleotide
tacaatcgaagggttctctccctccggctgtggccgcttgcttaaacactcccat

SEQ ID NO: 13787 - DNA, 60 bp, Artificial
  Synthetic oligonucleotide
acaactgcaattcacattcaccgctggattagagggtgtggcatctggaacgatgaggga

SEQ ID NO: 13788 - DNA, 55 bp, Artificial
  Synthetic oligonucleotide
cacattcaccgctggattagagggtgtggcatctggaacgatgagggatggcagg

SEQ ID NO: 13789 - DNA, 60 bp, Artificial
  Synthetic oligonucleotide
tatgaccgcaacgcgagaggttgactttacagtgccggatgtacaaaagattctagatga

SEQ ID NO: 13790 - DNA, 60 bp, Artificial
  Synthetic oligonucleotide
gagatttatgctgctgccggtgaagtatatccgagcaaagatccctctcatgctgacgta

SEQ ID NO: 13791 - DNA, 55 bp, Artificial
  Synthetic oligonucleotide
gctgccggtgaagtatatccgagtaaagatccctctcatgctgacgtacagctgc

SEQ ID NO: 13792 - DNA, 60 bp, Artificial
  Synthetic oligonucleotide
aaggatgcgtctacgcattcgctacacagagtaatcactcagatggcgtagtgagaggat

SEQ ID NO: 13793 - DNA, 54 bp, Artificial
  Synthetic oligonucleotide
cagtaggtagagtggcgccccaaggtttgcatcatgtggagtggttgatcccat

SEQ ID NO: 13794 - DNA, 60 bp, Artificial
  Synthetic oligonucleotide
gacggaaggtgacccttgatgttgacaatatgtcaacggaagcgctcatacaaaagctgt

SEQ ID NO: 13795 - DNA, 60 bp, Artificial
  Synthetic oligonucleotide
gggtagcatatgtcataccaaaaaccactgtcgagactttgataaatgatgccttggatt

SEQ ID NO: 13796 - DNA, 54 bp, Artificial
  Synthetic oligonucleotide
gcatgtcggagtgagggaagctaagtatagttcaacgagttggcagcgcatacc

SEQ ID NO: 13797 - DNA, 60 bp, Artificial
  Synthetic oligonucleotide
gcgcaatatatgttccgggctaataaggttcgagcgagaaaaccagcacatgcttgggga

SEQ ID NO: 13798 - DNA, 55 bp, Artificial
  Synthetic oligonucleotide
ttccgggctaataaggttcgagcgagaaaaccagcacatgcttggggatcattag

SEQ ID NO: 13799 - DNA, 60 bp, Artificial
  Synthetic oligonucleotide
ttagtatcgatgcttgattatatcgtttatagcgcagaagaggtgcactacgttggatgc

SEQ ID NO: 13800 - DNA, 60 bp, Artificial
  Synthetic oligonucleotide
acagcaacttaatgatgttaggaagatctatttagcgctaatgtttcctggacagattat

SEQ ID NO: 13801 - DNA, 52 bp, Artificial
  Synthetic oligonucleotide
ttcatgactatcgattttaatgagatggaaactttgtgcagttacgtcactc

SEQ ID NO: 13802 - DNA, 60 bp, Artificial
  Synthetic oligonucleotide
cccaggacagattatacttgatcttaagattgaccccggcgagaggatggatccagcagt

SEQ ID NO: 13803 - DNA, 56 bp, Artificial
  Synthetic oligonucleotide
attggattttcagatcggcaggaatcaatatgattgcaacgtatttcgagcggatt

SEQ ID NO: 13804 - DNA, 60 bp, Artificial
  Synthetic oligonucleotide
cccgcgccttacgtgcacgctcagcgctatatacgatattgtggcatcgactcgcgagag

SEQ ID NO: 13805 - DNA, 60 bp, Artificial
  Synthetic oligonucleotide
tacgtacacgctcagcgctatatacgatattgtggcattgactcacgagagttgatcaat

SEQ ID NO: 13806 - DNA, 60 bp, Artificial
  Synthetic oligonucleotide
ttgacgattatacacctaatgagccatctctcggttaacgttacaggaactaatctggca

SEQ ID NO: 13807 - DNA, 55 bp, Artificial
  Synthetic oligonucleotide
gagccatctctcggttaacgttacaggaactaatctggcaagataccacgtcggt

SEQ ID NO: 13808 - DNA, 52 bp, Artificial
  Synthetic oligonucleotide
gttcggagaaaagggattgtacgtcagacccaccgggtccaaggatctgtca

SEQ ID NO: 13809 - DNA, 58 bp, Artificial
  Synthetic oligonucleotide
aggtctaccgtcatgctaaacgggtcgtatcgtgatataagagtcttggatggcaacg

SEQ ID NO: 13810 - DNA, 55 bp, Artificial
  Synthetic oligonucleotide
gtatcagcccggtcgttggtttatgcgagctgcgcaggctgtaaccgctgtggtg

SEQ ID NO: 13811 - DNA, 59 bp, Artificial
  Synthetic oligonucleotide
gcgcccaaacattatcgtcaagtacgttctagagatgactcaaacgtaagagagattat

SEQ ID NO: 13812 - DNA, 55 bp, Artificial
  Synthetic oligonucleotide
cacaaccggttaatggatacatcgcataaagtatacaatttcgaatgtcccttcg

SEQ ID NO: 13813 - DNA, 56 bp, Artificial
  Synthetic oligonucleotide
cgaacaccagacagataagaaattatgctgcgatagtcaaccttgcttattcttgt

SEQ ID NO: 13814 - DNA, 60 bp, Artificial
  Synthetic oligonucleotide
agctgactattgcctatacgaattatgtgggtgatgtgcgaagtctgactccagttatac

SEQ ID NO: 13815 - DNA, 55 bp, Artificial
  Synthetic oligonucleotide
cccgtgtagtaatatgaatctcgcgataggaccttatcctatggtgtaccagaag

SEQ ID NO: 13816 - DNA, 55 bp, Artificial
  Synthetic oligonucleotide
tactaggtactacgcttttaaatcttgatgctaattacgttgagactgccagaac

SEQ ID NO: 13817 - DNA, 60 bp, Artificial
  Synthetic oligonucleotide
tccgattactggatcaatggacacactatatacgaactcaacacgagagggagtgttcct

SEQ ID NO: 13818 - DNA, 60 bp, Artificial
  Synthetic oligonucleotide
tgggccgctcacacgtgctattgcacgcgccgcctatgtgtagtccactttgcacgggtg

SEQ ID NO: 13819 - DNA, 60 bp, Artificial
  Synthetic oligonucleotide
cctcgatcgattcgtggctagaattactgcgtcacttataatgcgtgactgctaggtaag

SEQ ID NO: 13820 - DNA, 53 bp, Artificial
  Synthetic oligonucleotide
atggggcaactatacgttcttttcatacattgataggtttagccggacttaca

SEQ ID NO: 13821 - DNA, 60 bp, Artificial
  Synthetic oligonucleotide
aaccgggctactagcttataactacgaaacactaattgcatgtgtaacgatgaatatgca

SEQ ID NO: 13822 - DNA, 55 bp, Artificial
  Synthetic oligonucleotide
gatgtcgcgccaagcttggatcgagactagtgcactgattgaatgcatttcggag

SEQ ID NO: 13823 - DNA, 60 bp, Artificial
  Synthetic oligonucleotide
ccgaagccgctgggaaatatggcgcattcagttacgaatgtgaataaactcagactcgca

SEQ ID NO: 13824 - DNA, 58 bp, Artificial
  Synthetic oligonucleotide
cgtgaaatggcatataatccgcccgatttcaagtataatttacttaatcgcaattgtc

SEQ ID NO: 13825 - DNA, 60 bp, Artificial
  Synthetic oligonucleotide
gggatactagagtgcacgatagattaatgcgtggcaagacgatttcaattcagaatgata

SEQ ID NO: 13826 - DNA, 55 bp, Artificial
  Synthetic oligonucleotide
tggtgactgagttctgtgataggctaagacgtgacggtgttatgactcaggctca

SEQ ID NO: 13827 - DNA, 60 bp, Artificial
  Synthetic oligonucleotide
gtgacggtgttatgactcaggctcagcagaatcaagtcgaggcgttagcagaccgaactc

SEQ ID NO: 13828 - DNA, 60 bp, Artificial
  Synthetic oligonucleotide
gcgcaatggggacgaggtaatactggagcgacgagtgccgcgattgcagcccttatctaa

SEQ ID NO: 13829 - DNA, 55 bp, Artificial
  Synthetic oligonucleotide
ctccagctactgtgtttggacctgataaaagcatacccttagaacgttactcagt

SEQ ID NO: 13830 - DNA, 58 bp, Artificial
  Synthetic oligonucleotide
cgcaggatcagaaattcaggtcgctggattcgactattcgtgtgcaattaatgcgcca

SEQ ID NO: 13831 - DNA, 60 bp, Artificial
  Synthetic oligonucleotide
gctgaacgcgggatcagaaattcaggtcgctggattcgactattcatgtgcaattaatgc

SEQ ID NO: 13832 - DNA, 55 bp, Artificial
  Synthetic oligonucleotide
aagcgtatacatgataacctgataactagaacagttgacgttatagatatgtcga

SEQ ID NO: 13833 - DNA, 50 bp, Artificial
  Synthetic oligonucleotide
gacgcaaatgctaaaacattatgcggagcgatcgcaaagttgagttcgca

SEQ ID NO: 13834 - DNA, 55 bp, Artificial
  Synthetic oligonucleotide
cgaaatttgcacagatcaattggacttggctaactacgttcgacaaccgaacatc

SEQ ID NO: 13835 - DNA, 51 bp, Artificial
  Synthetic oligonucleotide
ggctattaaaggttcaatggcgtacaggaaacgtggagcacgccgtgaggc

SEQ ID NO: 13836 - DNA, 53 bp, Artificial
  Synthetic oligonucleotide
ccgagacagctaccaatttatagagcgaatggagaaaaagagttgcgtaacag

SEQ ID NO: 13837 - DNA, 50 bp, Artificial
  Synthetic oligonucleotide
tggtgcgttgagtgttgccaactaactgaattaactttctgtcacgggtg

SEQ ID NO: 13838 - DNA, 55 bp, Artificial
  Synthetic oligonucleotide
atagtttggcgccggattgagattttttcgaacgcacaagggaactcaatgcaga

SEQ ID NO: 13839 - DNA, 60 bp, Artificial
  Synthetic oligonucleotide
ctatcgccaacctttcaattcatctggagcactacctccggatggccaatctctcttcga

SEQ ID NO: 13840 - DNA, 60 bp, Artificial
  Synthetic oligonucleotide
caaatatgttagaggcgccaccggagatagatcgtgtggttcagtacacctatgaaatcg

SEQ ID NO: 13841 - DNA, 54 bp, Artificial
  Synthetic oligonucleotide
ccctcggatctatatgctcggttcagcgccgtcatattggttgtacgatctatt

SEQ ID NO: 13842 - DNA, 60 bp, Artificial
  Synthetic oligonucleotide
taatacagggaagtgtacattcaatcatgacaggagagtcgtatggcgagagtgtcaagc

SEQ ID NO: 13843 - DNA, 60 bp, Artificial
  Synthetic oligonucleotide
gcatgattacgaagtttcatacgagcagatcaaaatgaacgcgatggcattggttagcaa

SEQ ID NO: 13844 - DNA, 56 bp, Artificial
  Synthetic oligonucleotide
ataacggtcagctagttgacatggtcaggaacatgggagtggtcaccgttagaaca

SEQ ID NO: 13845 - DNA, 55 bp, Artificial
  Synthetic oligonucleotide
ttcacattcagttgactactcaattgttgctaacgttagaagagactcagcaatg

SEQ ID NO: 13846 - DNA, 55 bp, Artificial
  Synthetic oligonucleotide
tgacacatacgcaattggaaaaattgagcaatggtcggtgcggcagctacgcgcg

SEQ ID NO: 13847 - DNA, 52 bp, Artificial
  Synthetic oligonucleotide
aataccacagcccggggctccaataacgatgtatgagctgcgaaatctcatg

SEQ ID NO: 13848 - DNA, 60 bp, Artificial
  Synthetic oligonucleotide
taacaccgcataagttatgcgcgtggatgaagagagataacagggtgtattggtatcaag

SEQ ID NO: 13849 - DNA, 60 bp, Artificial
  Synthetic oligonucleotide
aatttataacgtatatagcttcagagatcctacatggcacgccttgcgtacagcgatttt

SEQ ID NO: 13850 - DNA, 55 bp, Artificial
  Synthetic oligonucleotide
tatgcgcgtggatgaagagagataacagggtgtattggtatcaaggagctacgcc

SEQ ID NO: 13851 - DNA, 60 bp, Artificial
  Synthetic oligonucleotide
cgcgtatggattatgtagtttgacttcatcaacgcatgacaatgccacaactgaaatgct

SEQ ID NO: 13852 - DNA, 57 bp, Artificial
  Synthetic oligonucleotide
cgtggatatcagagagcgaaggctgacggattgatcgtcaatactatcttgtaccct

SEQ ID NO: 13853 - DNA, 56 bp, Artificial
  Synthetic oligonucleotide
ttactgcgtcacttataatgcgtgactgctaggtgaggggggcatgtacaacttac

SEQ ID NO: 13854 - DNA, 56 bp, Artificial
  Synthetic oligonucleotide
gtgactgttagcgttggtggagtagatatgcgggcggggcgtatcatagcgtggga

SEQ ID NO: 13855 - DNA, 58 bp, Artificial
  Synthetic oligonucleotide
ttgtacctatcggtgttactgctggagcggagcagtcgtcagaatacgtcagtggatt

SEQ ID NO: 13856 - DNA, 60 bp, Artificial
  Synthetic oligonucleotide
tcgctgttctccgatgtgccattagctggcgcgaacactataattgcgatcatgcgttta

SEQ ID NO: 13857 - DNA, 60 bp, Artificial
  Synthetic oligonucleotide
taaggatgacaacatacgaccagtatctctcacatatacgcgagcgtttacatattacga

SEQ ID NO: 13858 - DNA, 55 bp, Artificial
  Synthetic oligonucleotide
aggatgttcccgggaggttctatggtagttcctcattcatacacgaccgttagcc

SEQ ID NO: 13859 - DNA, 60 bp, Artificial
  Synthetic oligonucleotide
gcgggatagatctaacacatttgcgtacgccgaaaattgagccgagtgtagtctctacaa

SEQ ID NO: 13860 - DNA, 60 bp, Artificial
  Synthetic oligonucleotide
gacggctcattggcacgcattaggggcggctcaaatggctgtgggacgtacactagtcga

SEQ ID NO: 13861 - DNA, 60 bp, Artificial
  Synthetic oligonucleotide
gattggacgtacccctcttcttacgaaatgcatgaacgcagcgacgggcagcacttacac

SEQ ID NO: 13862 - DNA, 60 bp, Artificial
  Synthetic oligonucleotide
cactacgcagtcgagattccctctctaagaccctgtcaggcgccggaaatcagatgactg

SEQ ID NO: 13863 - DNA, 52 bp, Artificial
  Synthetic oligonucleotide
gtcttaacattgcgaatctatctttgtcctgtgcaaatcgcagcagtgctac

SEQ ID NO: 13864 - DNA, 50 bp, Artificial
  Synthetic oligonucleotide
aacctccgaatgattattggatactaattaactcgaattctaatggtgta

SEQ ID NO: 13865 - DNA, 50 bp, Artificial
  Synthetic oligonucleotide
aagagcgaatttgcaggtaaaagcttgataaccgataaccgtactgggca

SEQ ID NO: 13866 - DNA, 60 bp, Artificial
  Synthetic oligonucleotide
tcgaaaattatcgtgctggagatgtgtttgcaaagaagcgtagtatcagcgagggtgcaa

SEQ ID NO: 13867 - DNA, 57 bp, Artificial
  Synthetic oligonucleotide
tggactggtattatgcagaccctgatttagcggacatgcgagagattgggatggcgt

SEQ ID NO: 13868 - DNA, 60 bp, Artificial
  Synthetic oligonucleotide
ggaagaacgctgccaatcatttattgccgagtgaggtccgccgatcgagtttgtatgcca

SEQ ID NO: 13869 - DNA, 60 bp, Artificial
  Synthetic oligonucleotide
cgcaatctgatgttgctaatgtactttcgagagtagtttctgtgagacatcttgaaaatt

SEQ ID NO: 13870 - DNA, 60 bp, Artificial
  Synthetic oligonucleotide
agtggccgcaatatcccatggtatacgcagaaagatacaatgttcgcaatcgatccactc

SEQ ID NO: 13871 - DNA, 60 bp, Artificial
  Synthetic oligonucleotide
agtaagattccgcaatatcccatggtatacgcagaaagatacaatgttcgcaatcgatcc

SEQ ID NO: 13872 - DNA, 55 bp, Artificial
  Synthetic oligonucleotide
cccatggtatacgcagaaagatacaatgttcgcaatcgatccactcaagcatcca

SEQ ID NO: 13873 - DNA, 60 bp, Artificial
  Synthetic oligonucleotide
cgagcgaaacaatgctagctaatgtaacgtctgttaggcaggaatacgcaataccagttg

SEQ ID NO: 13874 - DNA, 55 bp, Artificial
  Synthetic oligonucleotide
gctagctaatgtaacgtctgttaggcaggaatacgcaataccagttggaccagta

SEQ ID NO: 13875 - DNA, 60 bp, Artificial
  Synthetic oligonucleotide
attgagcgcatcagcaggatacgcaagatcaaagatgagcggctatcgatgttagcgagc

SEQ ID NO: 13876 - DNA, 60 bp, Artificial
  Synthetic oligonucleotide
gtgggccgctccattttcagaggcgagcgatattgggtgcgttgaaattcggatgcaaaa

SEQ ID NO: 13877 - DNA, 50 bp, Artificial
  Synthetic oligonucleotide
gtgtcccaatgggactcatctcaacacaatacgcagccatttaggaaagg

SEQ ID NO: 13878 - DNA, 60 bp, Artificial
  Synthetic oligonucleotide
gatatactccaggtgttattcctccagtaaatgttgataggccgattccactaggacgca

SEQ ID NO: 13879 - DNA, 60 bp, Artificial
  Synthetic oligonucleotide
gacgtgtaaatgaacaggttctgcctaaaatgcgggtggagttgtctgcaatgaagagac

SEQ ID NO: 13880 - DNA, 55 bp, Artificial
  Synthetic oligonucleotide
ctgcctaaaatgcgggtggagttgtctgcaatgaagagacgacgtgcaatagcac

SEQ ID NO: 13881 - DNA, 54 bp, Artificial
  Synthetic oligonucleotide
acgcatataacgaggcggtgaggatgagcatatcggagtttagtgaagtgccgc

SEQ ID NO: 13882 - DNA, 53 bp, Artificial
  Synthetic oligonucleotide
tgaaccgtcagaggtgactgcatccatgtgagaggttgagttaccgtcgtctg

SEQ ID NO: 13883 - DNA, 53 bp, Artificial
  Synthetic oligonucleotide
ggagttccaccagttgacgcaggtacgtacgttgggtcaagaatatattcgca

SEQ ID NO: 13884 - DNA, 60 bp, Artificial
  Synthetic oligonucleotide
agtcgaaaagatgttaatctacgcaaaacataccagagaatacgctgagttctactcaca

SEQ ID NO: 13885 - DNA, 55 bp, Artificial
  Synthetic oligonucleotide
ttgcacacagtactagaagatccaggaatggcgtattttccttatatagcatctg

SEQ ID NO: 13886 - DNA, 59 bp, Artificial
  Synthetic oligonucleotide
tcgcgtatgcatcatatgcagaagcatttagagatgatctacgactgcgacagataaag

SEQ ID NO: 13887 - DNA, 56 bp, Artificial
  Synthetic oligonucleotide
caatgactatgtattcatcgatttacgaaatcgggggaagccaccccctgagagta

SEQ ID NO: 13888 - DNA, 60 bp, Artificial
  Synthetic oligonucleotide
gcgcacttaatgctccagctaatacccaacaatttgagcacatagttcaattgcgccgtg

SEQ ID NO: 13889 - DNA, 55 bp, Artificial
  Synthetic oligonucleotide
taactgtaaatccaggtccgttcgctcaaaccaggtatgctccagttaattgggg

SEQ ID NO: 13890 - DNA, 60 bp, Artificial
  Synthetic oligonucleotide
ttccagatatcgtcagattgcgtattacttttacaacccggatgcagctgatgattggat

SEQ ID NO: 13891 - DNA, 52 bp, Artificial
  Synthetic oligonucleotide
cttctagaatatatggataggaaacacacatgccagctctgctatctaaaac

SEQ ID NO: 13892 - DNA, 51 bp, Artificial
  Synthetic oligonucleotide
gtagcgtaatagatgttcgcgcctcagagttgatcggttgctcacctttca

SEQ ID NO: 13893 - DNA, 56 bp, Artificial
  Synthetic oligonucleotide
acgctacaatgtttgagacggttagatgtattattaccttgtgctatgctgagaaa

SEQ ID NO: 13894 - DNA, 57 bp, Artificial
  Synthetic oligonucleotide
cgacgatctcaaatggaggtgtacagacaagtatcgtgtcgactaaggcgctgcttt

SEQ ID NO: 13895 - DNA, 56 bp, Artificial
  Synthetic oligonucleotide
cggtgactattcagctataacgaatgcattacttcgggatactccaatcatattga

SEQ ID NO: 13896 - DNA, 55 bp, Artificial
  Synthetic oligonucleotide
ccgtcgactgtcctggaagcggcggagtccttcacagtaagtcccatcggacctg

SEQ ID NO: 13897 - DNA, 52 bp, Artificial
  Synthetic oligonucleotide
tcattgcgagtcatttgtgtaataagctatcagcggcggactaccgttagcc

SEQ ID NO: 13898 - DNA, 60 bp, Artificial
  Synthetic oligonucleotide
aaccaaaccatatatcagtcagtctggttgggtcactactgtgttatcagctgataatgt

SEQ ID NO: 13899 - DNA, 55 bp, Artificial
  Synthetic oligonucleotide
aggtcgttcaagactgtctggcccttatcaggttttggacgtgcgtttgagttgc

SEQ ID NO: 13900 - DNA, 60 bp, Artificial
  Synthetic oligonucleotide
gagagtcgggggcgattgtcccttatgtgccaccgccatataatttcgcgagcgctccga

SEQ ID NO: 13901 - DNA, 57 bp, Artificial
  Synthetic oligonucleotide
cggatgacttagcaatagcagcgaacttccctagggcatcacgaaacccgcaaacgt

SEQ ID NO: 13902 - DNA, 60 bp, Artificial
  Synthetic oligonucleotide
ccaaccggggagatggttcatgcgtgccgctcaagcagtaactgcggtagtgtgtggtcc

SEQ ID NO: 13903 - DNA, 60 bp, Artificial
  Synthetic oligonucleotide
gcgatggtgcagatacaagtggtcttctacatctcaatggataagactttgaatcaatac

SEQ ID NO: 13904 - DNA, 60 bp, Artificial
  Synthetic oligonucleotide
tggagatcgattggacgtgcccctcttcttacgaaatgcttgaacgcagcgacgggcagc

SEQ ID NO: 13905 - DNA, 60 bp, Artificial
  Synthetic oligonucleotide
ctcactggaaacgaggtatgctgtcattcatcgctcaaatgcatgcaatgatgaacgatg

SEQ ID NO: 13906 - DNA, 60 bp, Artificial
  Synthetic oligonucleotide
atgaacgatgtgtcaccggaagatttggatcgtgttcgcactgaaggtggatctctggtg

SEQ ID NO: 13907 - DNA, 55 bp, Artificial
  Synthetic oligonucleotide
gtcaccggaagatttggatcgtgttcgcactgaaggtggatctctggtggagttg

SEQ ID NO: 13908 - DNA, 50 bp, Artificial
  Synthetic oligonucleotide
tgagatggcagtacaatagatttgctgtaataacacatggtaaaggtcac

SEQ ID NO: 13909 - DNA, 55 bp, Artificial
  Synthetic oligonucleotide
agaggctcctccagaaatcgatcgtgttgttcagtacacatacgagattgcacga

SEQ ID NO: 13910 - DNA, 60 bp, Artificial
  Synthetic oligonucleotide
gttaaacgcaggttcggagattcaagttgcaggatttgactactcatgtgcacttaatgc

SEQ ID NO: 13911 - DNA, 60 bp, Artificial
  Synthetic oligonucleotide
atcagcatgtagctatatcaagctactcagactctataagtaagggtgtgatttcacatt

SEQ ID NO: 13912 - DNA, 60 bp, Artificial
  Synthetic oligonucleotide
tgaattctatttgataccaagatcacaaaccgatttatgtgcgcagtacataaataacgg

SEQ ID NO: 13913 - DNA, 60 bp, Artificial
  Synthetic oligonucleotide
gctgagcggaattgatttgactcatctacgcactccgaagatcgaaccgagcgttgtatc

SEQ ID NO: 13914 - DNA, 60 bp, Artificial
  Synthetic oligonucleotide
gcacacgcggaggatgataagatctaagacggtgcaccccatttatttgggatcgctcca

SEQ ID NO: 13915 - DNA, 54 bp, Artificial
  Synthetic oligonucleotide
gagtggttaatctgggtgcaactttcataatgatggtttgtgcgaagagtgaaa

SEQ ID NO: 13916 - DNA, 55 bp, Artificial
  Synthetic oligonucleotide
ggagtagtaaatctaggagcgactttcataatgatggtttgtgcgaagagtgaga

SEQ ID NO: 13917 - DNA, 50 bp, Artificial
  Synthetic oligonucleotide
gatatttaacacgctactgaagttggcgggttacaaagaacaaataacta

SEQ ID NO: 13918 - DNA, 51 bp, Artificial
  Synthetic oligonucleotide
gtataaaatttgtatccgatagtagcacatagattcacgatcacatccccg

SEQ ID NO: 13919 - DNA, 52 bp, Artificial
  Synthetic oligonucleotide
ggttacgtctatcgtgagttaaatcaagggtcattacttccattagttgacg

SEQ ID NO: 13920 - DNA, 50 bp, Artificial
  Synthetic oligonucleotide
tagtgaaggcttcattctgtacgatgcatatttcaacttctcgtatgaca

SEQ ID NO: 13921 - DNA, 60 bp, Artificial
  Synthetic oligonucleotide
acatgcgagcgcaacatgattatgtgagtccaagttcatctagagtatacattaaagacc

SEQ ID NO: 13922 - DNA, 59 bp, Artificial
  Synthetic oligonucleotide
cgcatcgtacgcagaagcgtttcgtgatgatgtgaggctaagacaaatcaaacgtcatg

SEQ ID NO: 13923 - DNA, 59 bp, Artificial
  Synthetic oligonucleotide
tgattattgggatgactcacaagcattcaggaatatggtgtacgtcagatcattagcgg

SEQ ID NO: 13924 - DNA, 55 bp, Artificial
  Synthetic oligonucleotide
tatacaggttggtggttcagacgtacttgacataacagctgatccaacgacaacg

SEQ ID NO: 13925 - DNA, 53 bp, Artificial
  Synthetic oligonucleotide
attactaagtttagaaccgagaagagaaacgaacgtatgatgatgtccagcgc

SEQ ID NO: 13926 - DNA, 60 bp, Artificial
  Synthetic oligonucleotide
cacttatggcaagtagtgcagactatcctgatcaattcctcggactctcaaaccgtgacg

SEQ ID NO: 13927 - DNA, 60 bp, Artificial
  Synthetic oligonucleotide
attgcaaaggcaaagaacgagcgcaaatatgatgatactgtggatctaatcacccccgtt

SEQ ID NO: 13928 - DNA, 57 bp, Artificial
  Synthetic oligonucleotide
ttggacatgtccgaactagcagatttgttacttaatgagtggttatgtaatcctatg

SEQ ID NO: 13929 - DNA, 60 bp, Artificial
  Synthetic oligonucleotide
cagtataatggaagagattgtgtaccctgatcctggcacgacgctatctcagtcactttc

SEQ ID NO: 13930 - DNA, 51 bp, Artificial
  Synthetic oligonucleotide
ctgacgttgtagatggggtcaatcataaattgaaagtgacgacagacactt

SEQ ID NO: 13931 - DNA, 54 bp, Artificial
  Synthetic oligonucleotide
gtatgcaccatatcttgacggagcgagcgtatcaacggataatgggcccatttt

SEQ ID NO: 13932 - DNA, 51 bp, Artificial
  Synthetic oligonucleotide
caatcgtaccgtatgttccaccccttatgcgtatgcaaagtgctccgacgc

SEQ ID NO: 13933 - DNA, 60 bp, Artificial
  Synthetic oligonucleotide
accatacggagtgatggctgcagcgattgtttacgtaccagagacaattacgatacttga

SEQ ID NO: 13934 - DNA, 55 bp, Artificial
  Synthetic oligonucleotide
cgatacttgatagtatccagttttacggtgagaaccatgtgtcacgtccatactc

SEQ ID NO: 13935 - DNA, 57 bp, Artificial
  Synthetic oligonucleotide
gtacgaatagtcacgtaatgtaactaacaaattaccatctacacatgaccctctatg

SEQ ID NO: 13936 - DNA, 60 bp, Artificial
  Synthetic oligonucleotide
caagaatctaaatgataattacggaataagcagacaacaagcactaaatcttctaagatc

SEQ ID NO: 13937 - DNA, 54 bp, Artificial
  Synthetic oligonucleotide
agttagtggactatatggactgcctgcagctaatccaaataacgggagagaata

SEQ ID NO: 13938 - DNA, 60 bp, Artificial
  Synthetic oligonucleotide
ttggttggtaggtgcagagaacatgttaatataccaagtgaccagtacaagcgaggcgcc

SEQ ID NO: 13939 - DNA, 58 bp, Artificial
  Synthetic oligonucleotide
ggtactatatacggacgtatctcagtgggactcgtctcaacacaatacgcagccattt

SEQ ID NO: 13940 - DNA, 60 bp, Artificial
  Synthetic oligonucleotide
acgcagtattgcagttcaatacagaagtaactaagcagatggttcaagatgtatcaaacg

SEQ ID NO: 13941 - DNA, 55 bp, Artificial
  Synthetic oligonucleotide
acagaagtaactaagcagatggttcaagatgtatcaaacgacgtgagagaaacgt

SEQ ID NO: 13942 - DNA, 60 bp, Artificial
  Synthetic oligonucleotide
actacacgagaatgaaatacaactatatctgatctcactaggcataccgaaaatagacgc

SEQ ID NO: 13943 - DNA, 55 bp, Artificial
  Synthetic oligonucleotide
aactatatctgatctcactaggcataccgaaaatagacgctgatacgtacgtcgg

SEQ ID NO: 13944 - DNA, 60 bp, Artificial
  Synthetic oligonucleotide
tcgtcccaaccatcgatggggagacatcagattcctgcggctagtgtggtcagctcctac

SEQ ID NO: 13945 - DNA, 55 bp, Artificial
  Synthetic oligonucleotide
ggggagacatcagattcctgcggctagtgtggtcagctcctactctcgacgggtt

SEQ ID NO: 13946 - DNA, 51 bp, Artificial
  Synthetic oligonucleotide
ttaatctgacaggcttcggtccgatctcttacgttcgcgtggacgaagata

SEQ ID NO: 13947 - DNA, 53 bp, Artificial
  Synthetic oligonucleotide
ggacgttaggataccgcgtgaagtgacgaagaatatagacgtcaaggcgtttg

SEQ ID NO: 13948 - DNA, 54 bp, Artificial
  Synthetic oligonucleotide
tcaggacatctgtatgtgacactgttgagtggatcatacgtcacggatctattg

SEQ ID NO: 13949 - DNA, 50 bp, Artificial
  Synthetic oligonucleotide
gagatccaggatggaaagacctagcgagggaagcgacgaaacgtgcgaat

SEQ ID NO: 13950 - DNA, 60 bp, Artificial
  Synthetic oligonucleotide
caatccacggcgtgaatccaatgcctggcccgcttacacgtgcgattgctcgcgccgctt

SEQ ID NO: 13951 - DNA, 60 bp, Artificial
  Synthetic oligonucleotide
agtgggctatacggactgcctgcagctaatccaaataacgggagagaatattatgagata

SEQ ID NO: 13952 - DNA, 55 bp, Artificial
  Synthetic oligonucleotide
ggactgcctgcagctaatccaaataacgggagagaatattatgagatagctggca

SEQ ID NO: 13953 - DNA, 55 bp, Artificial
  Synthetic oligonucleotide
gtactctgaagggcataggttcatcacgaactacaacgcaacgagcagacttaac

SEQ ID NO: 13954 - DNA, 55 bp, Artificial
  Synthetic oligonucleotide
gagcggttgggtcataggaagagaattacttattcgcaagaggtacttactgact

SEQ ID NO: 13955 - DNA, 60 bp, Artificial
  Synthetic oligonucleotide
gagaacccgcaccctacgtacatgctcagcgttatatacgatactgcggcattgattcgc

SEQ ID NO: 13956 - DNA, 54 bp, Artificial
  Synthetic oligonucleotide
cagacggttgccaacttaaacattgcgtatagatacctatcgacggggaaagct

SEQ ID NO: 13957 - DNA, 51 bp, Artificial
  Synthetic oligonucleotide
tccacgtgactcacgagtgccatgattcgcacggggcaagacgtactggac

SEQ ID NO: 13958 - DNA, 55 bp, Artificial
  Synthetic oligonucleotide
gtaccgtccagccatggggatggttgagcctgtcgtctctaaaggtgcacgtgcc

SEQ ID NO: 13959 - DNA, 57 bp, Artificial
  Synthetic oligonucleotide
ctctaaaggtgcacgtgccatttgggcgcacgcgattctaaatcagagctgtacgaa

SEQ ID NO: 13960 - DNA, 60 bp, Artificial
  Synthetic oligonucleotide
gtctgaacctggcgaacctctctctaacttgcgccaataaaagcagcgctacgcgttgta

SEQ ID NO: 13961 - DNA, 60 bp, Artificial
  Synthetic oligonucleotide
ggctcaaccacgtacgtgggatccattgtttcaggcgattatgagatctcaatacgtgac

SEQ ID NO: 13962 - DNA, 60 bp, Artificial
  Synthetic oligonucleotide
tagattcggctgacgaaactcatctgccaattgggtctgttgatagtattgcagctcttt

SEQ ID NO: 13963 - DNA, 55 bp, Artificial
  Synthetic oligonucleotide
gggatcaagtgcaacaaggatcaaattttacagctgatttggcgaacgttcgctc

SEQ ID NO: 13964 - DNA, 60 bp, Artificial
  Synthetic oligonucleotide
taccccctacagccaatatcagtcgcgcgttctatgcgtgcaatagtcaaccataacgaa

SEQ ID NO: 13965 - DNA, 60 bp, Artificial
  Synthetic oligonucleotide
ggtcgttgtatgaagcttggagacattgatcaagtgcggaatgatatgaatcagacgacg

SEQ ID NO: 13966 - DNA, 58 bp, Artificial
  Synthetic oligonucleotide
tataagttagtagcgtgtactattcagacggtgcatttagatagaggcacaatgatac

SEQ ID NO: 13967 - DNA, 60 bp, Artificial
  Synthetic oligonucleotide
cgagagatcgggtgtcacctgtcgactatatcgaagtttatgaggtagcgagttctggtg

SEQ ID NO: 13968 - DNA, 55 bp, Artificial
  Synthetic oligonucleotide
ggtatacgcctattactccgacggatcggtactcgtgcgcaactgtaattcgcag

SEQ ID NO: 13969 - DNA, 60 bp, Artificial
  Synthetic oligonucleotide
ccaccaatgcagaatactagaaatgtggtaccagtcgcactatcagctcgggaagtagta

SEQ ID NO: 13970 - DNA, 60 bp, Artificial
  Synthetic oligonucleotide
aatcgctgtttgacgttctagccgcagctattagaactgagggatctagacagaatagag

SEQ ID NO: 13971 - DNA, 55 bp, Artificial
  Synthetic oligonucleotide
cgttctagccgcagctattagaactgagggatctagacagaatagagctgttgtc

SEQ ID NO: 13972 - DNA, 60 bp, Artificial
  Synthetic oligonucleotide
ccgaagcatacgtgtctgccatgagtggcgcagatgtcgagtcatacatatttccgcgta

SEQ ID NO: 13973 - DNA, 60 bp, Artificial
  Synthetic oligonucleotide
aggcatgaattggactgagctaattactaattattcaccatctagggaagataatttgca

SEQ ID NO: 13974 - DNA, 55 bp, Artificial
  Synthetic oligonucleotide
gagcagtagatggagtgtattacaccattaaaattgggagaaccgtacaatgtgg

SEQ ID NO: 13975 - DNA, 60 bp, Artificial
  Synthetic oligonucleotide
ggactaggctaactacctggtatccgatcttaattagcatgtagctatgtcaagtcaatc

SEQ ID NO: 13976 - DNA, 60 bp, Artificial
  Synthetic oligonucleotide
catatttgattatactcccacaattagttcatggggtgtcatcttgcgttcggttgtgga

SEQ ID NO: 13977 - DNA, 56 bp, Artificial
  Synthetic oligonucleotide
ccgtgtcgcttgggatacttaaccaagccatgtcaagcacaactggtgcgagtggg

SEQ ID NO: 13978 - DNA, 59 bp, Artificial
  Synthetic oligonucleotide
acggtaagcaccatcggacctgatggctggctgagaagccccagtcagtcatatcgcgt

SEQ ID NO: 13979 - DNA, 60 bp, Artificial
  Synthetic oligonucleotide
ccattggacccgatgattgactgagaagccacagtcaatcatatcgcgtgtggcttagcc

SEQ ID NO: 13980 - DNA, 56 bp, Artificial
  Synthetic oligonucleotide
gagtaccgcgcaaaggagattcctgataacgctctggctgttagtgttctgatcaa

SEQ ID NO: 13981 - DNA, 55 bp, Artificial
  Synthetic oligonucleotide
cgagctgctataccggagctgaagcgttggttacaactgctatccatatacaccg

SEQ ID NO: 13982 - DNA, 55 bp, Artificial
  Synthetic oligonucleotide
cgccaggagtgattccaccagttaatgttgataaaccaatcccattgggaagacg

SEQ ID NO: 13983 - DNA, 56 bp, Artificial
  Synthetic oligonucleotide
cgccaccatgagactctctgcactagagtagcgcctaggcagcataaaatgtgacc

SEQ ID NO: 13984 - DNA, 52 bp, Artificial
  Synthetic oligonucleotide
agcaatattctaacttaaagtttgagacgtgggacccattggacacaccata

SEQ ID NO: 13985 - DNA, 60 bp, Artificial
  Synthetic oligonucleotide
atatctgtttgtccattagatacgacaatgaatggaatcggctgttcaccagctagtaca

SEQ ID NO: 13986 - DNA, 55 bp, Artificial
  Synthetic oligonucleotide
tacgacaatgaatggaatcggctgttcaccagctagtacagaaacatatgaggtg

SEQ ID NO: 13987 - DNA, 52 bp, Artificial
  Synthetic oligonucleotide
aagatgaagcggtgtggagtgcaactccttgaggattaccgcaaaagtggaa

SEQ ID NO: 13988 - DNA, 60 bp, Artificial
  Synthetic oligonucleotide
ctgttagcgttggcggagtagatatgcgggcagggcgcatcattgcgtgggatggacagg

SEQ ID NO: 13989 - DNA, 60 bp, Artificial
  Synthetic oligonucleotide
gaaggcggagaaagctgcattcgcatcgtacgcagaagcgtttcgtgatgatgtgaggct

SEQ ID NO: 13990 - DNA, 60 bp, Artificial
  Synthetic oligonucleotide
ttatcggcgtctagcagcatcatacaaattgatttggttcgacgtcgagcttaaagttcc

SEQ ID NO: 13991 - DNA, 60 bp, Artificial
  Synthetic oligonucleotide
acatgactcaaagtgtcactagtgacgtatctaatgaaaacgattggtacgaggtgtcta

SEQ ID NO: 13992 - DNA, 60 bp, Artificial
  Synthetic oligonucleotide
tgtcggatactcaaccgtcatcaagtggcgttgctgcagtggagtcagtggatgctgggt

SEQ ID NO: 13993 - DNA, 60 bp, Artificial
  Synthetic oligonucleotide
gcgcactctgaagatcgatgaagccacgtggctgcgaatgattccaaaatcaatgaacac

SEQ ID NO: 13994 - DNA, 55 bp, Artificial
  Synthetic oligonucleotide
gcggagatagtagtgaatcgtctaatcgccgagtgaagcgtgactcatacgcagg

SEQ ID NO: 13995 - DNA, 60 bp, Artificial
  Synthetic oligonucleotide
ggcgatagatggagtaatgcaaggaacaattcagagcataatacaaggtgaaaacttggg

SEQ ID NO: 13996 - DNA, 60 bp, Artificial
  Synthetic oligonucleotide
agaattttcacccggacgtatttcaaggaccatgatgcatagcgctctcctcaaggaatc

SEQ ID NO: 13997 - DNA, 58 bp, Artificial
  Synthetic oligonucleotide
cgtgaacaagggttctgtgtctccttagatgcgggggggagtgaatacagctaatgtc

SEQ ID NO: 13998 - DNA, 55 bp, Artificial
  Synthetic oligonucleotide
cgccatgcttcttatgctactaggatgtaaggtttagatcggaaggacgtcccac

SEQ ID NO: 13999 - DNA, 58 bp, Artificial
  Synthetic oligonucleotide
ttatggacgcgagtgatacttttaggaacacaggggatcccacgattattacattcgc

SEQ ID NO: 14000 - DNA, 52 bp, Artificial
  Synthetic oligonucleotide
aatcggacttctactaggatgagaatgtcctacgttgataagatagactcaa

SEQ ID NO: 14001 - DNA, 55 bp, Artificial
  Synthetic oligonucleotide
aacacaatagtatatccagcgtttggaatgcaacgaatgcactatagaaatgggg

SEQ ID NO: 14002 - DNA, 60 bp, Artificial
  Synthetic oligonucleotide
tccagatgatcaaatgtatagattgagggacagactacgactactgccagtagaagtaag

SEQ ID NO: 14003 - DNA, 60 bp, Artificial
  Synthetic oligonucleotide
tacatcgtgtatctaattcaaagtctcactgggacacaacggctggatgttctgaaatcg

SEQ ID NO: 14004 - DNA, 52 bp, Artificial
  Synthetic oligonucleotide
acagattcgccagcaagactatgttgacgtgcagtttgcagaccgtgttaca

SEQ ID NO: 14005 - DNA, 60 bp, Artificial
  Synthetic oligonucleotide
gccgaatttcgtgatgagagatccttcacatgcgttcaatggtgtgaggctggagggcga

SEQ ID NO: 14006 - DNA, 55 bp, Artificial
  Synthetic oligonucleotide
gagagatccttcacatgcgttcaatggtgtgaggctggagggcgacgctcgtcaa

SEQ ID NO: 14007 - DNA, 51 bp, Artificial
  Synthetic oligonucleotide
tgtcgagaagatcaggtacgcacttggaccgggtggtatgacaggatggta

SEQ ID NO: 14008 - DNA, 55 bp, Artificial
  Synthetic oligonucleotide
ccgcgtatcagtggagtcctacgcaaacgacagaagcgttcctacggttgcgtgg

SEQ ID NO: 14009 - DNA, 56 bp, Artificial
  Synthetic oligonucleotide
gtacgatctgagcttgtaaacaaacgtgagaccaatgtaggtaaacgcactcacaa

SEQ ID NO: 14010 - DNA, 60 bp, Artificial
  Synthetic oligonucleotide
cagtgacttggagtcatggggaagtgaatgattcgacaacgatagagccagtactagatg

SEQ ID NO: 14011 - DNA, 55 bp, Artificial
  Synthetic oligonucleotide
ctagacgtcgtcgcaatggaggtgtgcttgccaaacggtcaccagatcgtggatc

SEQ ID NO: 14012 - DNA, 60 bp, Artificial
  Synthetic oligonucleotide
aacggtcaccagatcgtggatctaatcaacaacgcatttgagggcagggtatcgatctac

SEQ ID NO: 14013 - DNA, 60 bp, Artificial
  Synthetic oligonucleotide
tacgcaaatcgtcaagcacatttatgtacatggcgttggaatcaaccattttagaagcgg

SEQ ID NO: 14014 - DNA, 55 bp, Artificial
  Synthetic oligonucleotide
ggagctcgaaagcgatccactaaaaggccgcgtgtatcgtcgtgagcttgtcact

SEQ ID NO: 14015 - DNA, 58 bp, Artificial
  Synthetic oligonucleotide
attcatttgaccttaaacgatggatatatttacactcaacaggcaaagctagcattga

SEQ ID NO: 14016 - DNA, 60 bp, Artificial
  Synthetic oligonucleotide
ttacgccttccggtgctcttcagaggtggcactctcgcgaggaggtcttattggcagcgg

SEQ ID NO: 14017 - DNA, 55 bp, Artificial
  Synthetic oligonucleotide
cgcttagtaagtccgcgctcgagactaactcatgggagcccctcttcgctgtgac

SEQ ID NO: 14018 - DNA, 50 bp, Artificial
  Synthetic oligonucleotide
gtccaagacgcactgtcaatcctccgcgcacgtaacagtgtgacgaagtt

SEQ ID NO: 14019 - DNA, 60 bp, Artificial
  Synthetic oligonucleotide
agattgaggagctatggccagtactcgatggctagacgtgtggtttgtccacgtcacgcc

SEQ ID NO: 14020 - DNA, 60 bp, Artificial
  Synthetic oligonucleotide
cgacaattatggcataacgcggtctcaagcgttagacttaatcagatctgatcccagagt

SEQ ID NO: 14021 - DNA, 53 bp, Artificial
  Synthetic oligonucleotide
acaattaaagtgtgtcctttaaatactcagactcttgggataggatgcttaac

SEQ ID NO: 14022 - DNA, 60 bp, Artificial
  Synthetic oligonucleotide
tagatcatattatagtatcaatgcaccagctattgtaccacaagtcgaaattgatcgctt

SEQ ID NO: 14023 - DNA, 60 bp, Artificial
  Synthetic oligonucleotide
gtagcggatcacaaattgtattcccatcgtactataataaatggacgtatgctccgatgt

SEQ ID NO: 14024 - DNA, 60 bp, Artificial
  Synthetic oligonucleotide
gcgttaagtggaatcgatttgtcgcatatgaggagtccaaagatcgaaccaactattatc

SEQ ID NO: 14025 - DNA, 55 bp, Artificial
  Synthetic oligonucleotide
gtcgcatatgaggagtccaaagatcgaaccaactattatcgctacaacactggag

SEQ ID NO: 14026 - DNA, 57 bp, Artificial
  Synthetic oligonucleotide
gacgcatgatcaggtcacgagcagtacatccgatctttttaggatcaatgcactacg

SEQ ID NO: 14027 - DNA, 60 bp, Artificial
  Synthetic oligonucleotide
agaaagctgcattcgcatcgtacgcagaagcgtttcgtgatgatgtgaggctaagacaga

SEQ ID NO: 14028 - DNA, 60 bp, Artificial
  Synthetic oligonucleotide
atcagcaacgaacgtgaacacgcgaatgtagttcgtattgaccgtattgaacatgaactc

SEQ ID NO: 14029 - DNA, 55 bp, Artificial
  Synthetic oligonucleotide
cacgtcgggttagttattcgttgcatggattgtttggagaactggattctttcgg

SEQ ID NO: 14030 - DNA, 60 bp, Artificial
  Synthetic oligonucleotide
catgagggacaacggatcaattcggtagttaattcatctgagtcaccgatcagactggag

SEQ ID NO: 14031 - DNA, 54 bp, Artificial
  Synthetic oligonucleotide
ctagacagttgatataatcgcgttctgatagttacaggaccctgaccaaagttc

SEQ ID NO: 14032 - DNA, 56 bp, Artificial
  Synthetic oligonucleotide
acataacgactatactcaagctgataccaacagaccaaatcatgcgaacattttac

SEQ ID NO: 14033 - DNA, 57 bp, Artificial
  Synthetic oligonucleotide
tatgagatactgtcacatgcgctcttccctagccttttaacataccgtgttgtggcg

SEQ ID NO: 14034 - DNA, 54 bp, Artificial
  Synthetic oligonucleotide
gatgctcgacttaagcgcggaagtaattgagactgcgtcggaggaggtaccaat

SEQ ID NO: 14035 - DNA, 55 bp, Artificial
  Synthetic oligonucleotide
gaagattgatgtttacagagatgaggtcccagcacaaatcatcgaagtagatcgc

SEQ ID NO: 14036 - DNA, 53 bp, Artificial
  Synthetic oligonucleotide
cgtcttgcacagtaaaagtatgtccattaaacacacaaacgctcggtattgga

SEQ ID NO: 14037 - DNA, 52 bp, Artificial
  Synthetic oligonucleotide
acacatcatgtagcatgattcacgaatgggtttagttcacgcttgcgtaggg

SEQ ID NO: 14038 - DNA, 55 bp, Artificial
  Synthetic oligonucleotide
ctaaaactgcccgagcttcccatagggtgggttagagtcgtgtgcgtacgccact

SEQ ID NO: 14039 - DNA, 50 bp, Artificial
  Synthetic oligonucleotide
actttagtatacctgtaggtgcatggccagttatgaatggaggtgctgtt

SEQ ID NO: 14040 - DNA, 60 bp, Artificial
  Synthetic oligonucleotide
gatatgtcacagctagctgacttgatacccaacgagtggccttgtaatccaatgggtata

SEQ ID NO: 14041 - DNA, 55 bp, Artificial
  Synthetic oligonucleotide
gctagctgacttgatacccaacgagtggccttgtaatccaatgggtataacgttg

SEQ ID NO: 14042 - DNA, 51 bp, Artificial
  Synthetic oligonucleotide
aatgggtataacgttgtattattatcgacagacggacgaggcgaataaatg

SEQ ID NO: 14043 - DNA, 55 bp, Artificial
  Synthetic oligonucleotide
agaatccggaacctaaaggatacgtgctgaatgttccaggacctggtgcgtacag

SEQ ID NO: 14044 - DNA, 55 bp, Artificial
  Synthetic oligonucleotide
ccggaacctaagggatacgtgctgaatgttccaggacctggtgcgtacagaattc

SEQ ID NO: 14045 - DNA, 55 bp, Artificial
  Synthetic oligonucleotide
tcaagaaacgatcaccaggacggtttagaagggtgttatggcacgtatatgaccc

SEQ ID NO: 14046 - DNA, 57 bp, Artificial
  Synthetic oligonucleotide
agacgcaggatccgtatgcgcaagggatttggtgatgcattgagaaattacgccttt

SEQ ID NO: 14047 - DNA, 60 bp, Artificial
  Synthetic oligonucleotide
catttggaatgcaacgaatgcattatagaaacggggatccacaaacaccatttcagatag

SEQ ID NO: 14048 - DNA, 56 bp, Artificial
  Synthetic oligonucleotide
gtgcccctcttcttacgaaatgcttgaacgcagcgacgggcagcacttacacttac

SEQ ID NO: 14049 - DNA, 52 bp, Artificial
  Synthetic oligonucleotide
tcaatgcgggatcagaaatacaggtcgctggattcgactattcatgtgcaat

SEQ ID NO: 14050 - DNA, 60 bp, Artificial
  Synthetic oligonucleotide
tatctacacacgcgagtaatacggcatacacgctatcgactacagctttagccacaaaac

SEQ ID NO: 14051 - DNA, 55 bp, Artificial
  Synthetic oligonucleotide
gtaaattagggtacagtggttataatgtgtatgctgacagaaataaatctgatgc

SEQ ID NO: 14052 - DNA, 54 bp, Artificial
  Synthetic oligonucleotide
ccttagcgtgcaaggagcggttatcggtcaggattaccatgtgtgtttaggacg

SEQ ID NO: 14053 - DNA, 60 bp, Artificial
  Synthetic oligonucleotide
tacggaataagcagacaacaagcactaaatcttctaagatctgatccgcgagtattacgt

SEQ ID NO: 14054 - DNA, 60 bp, Artificial
  Synthetic oligonucleotide
ttggggtgtcgagaagattagatatgctcttgggccaggtggcatgacgggatggtacaa

SEQ ID NO: 14055 - DNA, 50 bp, Artificial
  Synthetic oligonucleotide
gcgtgtgcaggttaattatggccctacgggggaaccgttggattttcaga

SEQ ID NO: 14056 - DNA, 57 bp, Artificial
  Synthetic oligonucleotide
gggcatagtaaacgtaagaacagagtccaactgttaacgtagtcactcgcagttgtc

SEQ ID NO: 14057 - DNA, 60 bp, Artificial
  Synthetic oligonucleotide
gatttgaagggtcaggtatgatagcaaagatcgacggcacgtacttcatgtataacagca

SEQ ID NO: 14058 - DNA, 55 bp, Artificial
  Synthetic oligonucleotide
attatatactaaacatggaccgtaatttgccttcaacggctagatacattaggcc

SEQ ID NO: 14059 - DNA, 57 bp, Artificial
  Synthetic oligonucleotide
tgttaactgttatacctaatgatatgtttatacgtgaatctttagtggcatgtcagt

SEQ ID NO: 14060 - DNA, 58 bp, Artificial
  Synthetic oligonucleotide
gaaatacggagcaagactatttacattcactggaaacacaccgaatgcagcgccacaa

SEQ ID NO: 14061 - DNA, 55 bp, Artificial
  Synthetic oligonucleotide
tgtagccattactggatcactaaggttgttcccgtcagaacgagtattaactact

SEQ ID NO: 14062 - DNA, 60 bp, Artificial
  Synthetic oligonucleotide
gtcagagttctgcgtgcatttggattatcgggctacgcgatgcttagcaaacgttcttgt

SEQ ID NO: 14063 - DNA, 55 bp, Artificial
  Synthetic oligonucleotide
gtgcatttggattatcgggctacgcgatgcttagcaaacgttcttgtgtaccacc

SEQ ID NO: 14064 - DNA, 56 bp, Artificial
  Synthetic oligonucleotide
tgtggagagaaagatggctccaattggcgcgcgggagagcgcagttatgttagttt

SEQ ID NO: 14065 - DNA, 60 bp, Artificial
  Synthetic oligonucleotide
gtgtaatcactttaatgaatgacacactacactctattattcaagatccaggaatggcgt

SEQ ID NO: 14066 - DNA, 58 bp, Artificial
  Synthetic oligonucleotide
ccactgcgcttggacgtgtctcgaccttgataaatggtggtgacctatcaatgttacg

SEQ ID NO: 14067 - DNA, 60 bp, Artificial
  Synthetic oligonucleotide
acacattgagtgtaatcactttaatgaatgacacactacactctattattcaagatccag

SEQ ID NO: 14068 - DNA, 60 bp, Artificial
  Synthetic oligonucleotide
ccagccccattggacctgatggctgactgagaagccccagtcagccatatcgcgtgtggc

SEQ ID NO: 14069 - DNA, 51 bp, Artificial
  Synthetic oligonucleotide
gagctatttccaacagcgggagaatacactgattcgctaatggatccagcg

SEQ ID NO: 14070 - DNA, 60 bp, Artificial
  Synthetic oligonucleotide
ggacaaccgacgatgaagtgtatatacaaagagcgttcatgtcattatcgggtcagagat

SEQ ID NO: 14071 - DNA, 50 bp, Artificial
  Synthetic oligonucleotide
tgttagcgagggtgctactacgctgggagctatcaatgcaagcacgctct

SEQ ID NO: 14072 - DNA, 60 bp, Artificial
  Synthetic oligonucleotide
catacaacgcgagactagccttccgatctgacttggcgtgatccgtgacatgcgtagtgt

SEQ ID NO: 14073 - DNA, 52 bp, Artificial
  Synthetic oligonucleotide
cgtaacagttctacagggtggtggcccagatgtacttgacataacagctgat

SEQ ID NO: 14074 - DNA, 51 bp, Artificial
  Synthetic oligonucleotide
taccaggttggaaattgacgtatgtaggatataatggaaacgacacacgag

SEQ ID NO: 14075 - DNA, 58 bp, Artificial
  Synthetic oligonucleotide
gcactcctactgttccggtccctgcccaatctacgtctgtcagtgatgatcgcgagct

SEQ ID NO: 14076 - DNA, 54 bp, Artificial
  Synthetic oligonucleotide
ccacgatacgcgacgcgcacacgttccgacaggttgtgcgacccagacatttcc

SEQ ID NO: 14077 - DNA, 60 bp, Artificial
  Synthetic oligonucleotide
tggtggatctgggagtgatctaggtcagtgcaggagtagcgaccaaggcgtatatgcaga

SEQ ID NO: 14078 - DNA, 60 bp, Artificial
  Synthetic oligonucleotide
gttgcatgtcaactagccatagtaaatacgatagtgtatccagcgtttggaatgcaacga

SEQ ID NO: 14079 - DNA, 60 bp, Artificial
  Synthetic oligonucleotide
aatagagttaatctatgcatgcagatcagctaaggaatttgcaaagttacaggatgactt

SEQ ID NO: 14080 - DNA, 55 bp, Artificial
  Synthetic oligonucleotide
atgcagatcagctaaggaatttgcaaagttacaggatgacttaacggtactaagg

SEQ ID NO: 14081 - DNA, 60 bp, Artificial
  Synthetic oligonucleotide
agcatgcttgttaagtgaggactgaactaatcattcggtatccaatcttagccagcatgt

SEQ ID NO: 14082 - DNA, 60 bp, Artificial
  Synthetic oligonucleotide
aagtaagattgtgatttcacattcgctacgtagagtaactgtatagataatatagtgaga

SEQ ID NO: 14083 - DNA, 55 bp, Artificial
  Synthetic oligonucleotide
caactacgccgtactacaatttaatacagaagtgactaaacagatggtccaagat

SEQ ID NO: 14084 - DNA, 51 bp, Artificial
  Synthetic oligonucleotide
gcgtattttccttatatagcatctgtcctaacagttttgttcacgttgcac

SEQ ID NO: 14085 - DNA, 60 bp, Artificial
  Synthetic oligonucleotide
agtctgcaccttatcgagtgatatgagcgtggcgtttaagctaaacggtacatcagctga

SEQ ID NO: 14086 - DNA, 54 bp, Artificial
  Synthetic oligonucleotide
ccttatgaaccgaaagaagtgactgcagcaatgtaagaggttgagctgccgtcg

SEQ ID NO: 14087 - DNA, 60 bp, Artificial
  Synthetic oligonucleotide
ttgaattcgtacgcgccaatatcacttgagaagaggcgtgcgcaaatatcagctttattg

SEQ ID NO: 14088 - DNA, 60 bp, Artificial
  Synthetic oligonucleotide
tagaacgcgcatcagataaaattgcgcaaggggttattattgcgtaccgcgatatgcaat

SEQ ID NO: 14089 - DNA, 60 bp, Artificial
  Synthetic oligonucleotide
gatatgcaattggaaagagacgaaatgtatggctacgtgaatatagctagaaatttagat

SEQ ID NO: 14090 - DNA, 50 bp, Artificial
  Synthetic oligonucleotide
ctttaatgaacagcacattgcatacaatactagaagatccaggaatggcg

SEQ ID NO: 14091 - DNA, 60 bp, Artificial
  Synthetic oligonucleotide
gataaactaagacggttgtgtacagaaccaaagactgtcgactatgattctggcatatct

SEQ ID NO: 14092 - DNA, 51 bp, Artificial
  Synthetic oligonucleotide
aatattgcgtataagtatctatcaacagggaaagctaaggtgtgctgcgtt

SEQ ID NO: 14093 - DNA, 55 bp, Artificial
  Synthetic oligonucleotide
cgccgcatcaagtcaccactatacctgagggttattctttcggagtagtaaagga

SEQ ID NO: 14094 - DNA, 55 bp, Artificial
  Synthetic oligonucleotide
tgggcgacgatcgatgttgagtatagagaacccgcaccctacgtacatgctcagc

SEQ ID NO: 14095 - DNA, 60 bp, Artificial
  Synthetic oligonucleotide
ggagaaggctgcatacgcatcgtacgcagaagcgtttcgtgatgatgtaagattaaggca

SEQ ID NO: 14096 - DNA, 55 bp, Artificial
  Synthetic oligonucleotide
tacgcattcgctacacagagtaatcactcagatgatgtagtgagaggatgtgacc

SEQ ID NO: 14097 - DNA, 56 bp, Artificial
  Synthetic oligonucleotide
ggattacagccacttaacaccgcaacctatacgcaaccaacagctaccgctccaag

SEQ ID NO: 14098 - DNA, 58 bp, Artificial
  Synthetic oligonucleotide
tatcatggcccaaactgtgatgagaatgtacatccgatcattcaaccgacgttcattg

SEQ ID NO: 14099 - DNA, 57 bp, Artificial
  Synthetic oligonucleotide
cgtgagagaaacttacgcacgaatgaacgctaaagtcaaagctctagtatccacagt

SEQ ID NO: 14100 - DNA, 60 bp, Artificial
  Synthetic oligonucleotide
gtaactgcagtagtgtgcggtccggatatgattcaagtgtcacttaatgctggagcgaga

SEQ ID NO: 14101 - DNA, 60 bp, Artificial
  Synthetic oligonucleotide
gatgctagcaaatgtgacatctgttagacaagaatacgcgataccagttggaccggtttt

SEQ ID NO: 14102 - DNA, 51 bp, Artificial
  Synthetic oligonucleotide
atgcttaggctgaagctcagcgtacgccatccggcacgatggatattcatc

SEQ ID NO: 14103 - DNA, 55 bp, Artificial
  Synthetic oligonucleotide
cgcagttcctgcggtggtggattcacgttcaagtgaggctattggactgctggaa

SEQ ID NO: 14104 - DNA, 60 bp, Artificial
  Synthetic oligonucleotide
aaccaacgctagacgtttagcttacactaacgctgtcgtgcgttatgtcgatcacatgtg

SEQ ID NO: 14105 - DNA, 55 bp, Artificial
  Synthetic oligonucleotide
gttacctcgcaaccgttagtgcaaacctctacgtaagcatgtggtagtgcttacg

SEQ ID NO: 14106 - DNA, 60 bp, Artificial
  Synthetic oligonucleotide
tatacgtccttggatagatcgctagacacggttccggaattggctccaacgctcacaaga

SEQ ID NO: 14107 - DNA, 60 bp, Artificial
  Synthetic oligonucleotide
tgggttttagcattacagttaccagttaatccgcaggtagtgtgggatgtgccgcgcagc

SEQ ID NO: 14108 - DNA, 55 bp, Artificial
  Synthetic oligonucleotide
ttagagaatcacaaagaaacggaattgcaccgcagtcagaatcacttagaaaact

SEQ ID NO: 14109 - DNA, 60 bp, Artificial
  Synthetic oligonucleotide
aacacgtttaggacctgatgacactgtgattaatgagttcaaccttccacagtcaatgac

SEQ ID NO: 14110 - DNA, 50 bp, Artificial
  Synthetic oligonucleotide
acatagtgtggctcaggtgtatgcggacactcaagtgtatactcacgatg

SEQ ID NO: 14111 - DNA, 51 bp, Artificial
  Synthetic oligonucleotide
ggcgtatcgagagtttttaggtcgtgcgatgatggatccctcgagcggagc

SEQ ID NO: 14112 - DNA, 55 bp, Artificial
  Synthetic oligonucleotide
aaacgtatacatgacaacctgacaaccagaccagttgacgttatagatatgtcga

SEQ ID NO: 14113 - DNA, 60 bp, Artificial
  Synthetic oligonucleotide
agtgctcttgttgagtccatatcctcctatatcgtagacagttttggtgaatcctttagc

SEQ ID NO: 14114 - DNA, 55 bp, Artificial
  Synthetic oligonucleotide
gtccatatcctcctatatcgtagacagttttggtgaatcctttagcggattaacc

SEQ ID NO: 14115 - DNA, 53 bp, Artificial
  Synthetic oligonucleotide
ccggaaactacacaagacgtagggctctggctactgtgttaggtggaggagca

SEQ ID NO: 14116 - DNA, 55 bp, Artificial
  Synthetic oligonucleotide
ccaatgattatagtgcgggaaggattggaccaaccggagagatgggagtggcttc

SEQ ID NO: 14117 - DNA, 60 bp, Artificial
  Synthetic oligonucleotide
cacaacccgcctctggagaatcatttgcgcttgcatcatcactagttaatctagttgaca

SEQ ID NO: 14118 - DNA, 60 bp, Artificial
  Synthetic oligonucleotide
cgaattgttacacaggcgctgaagcattggtcacgactgctattcacatgcatcgatgga

SEQ ID NO: 14119 - DNA, 55 bp, Artificial
  Synthetic oligonucleotide
gcgctgaagcattggtcacgactgctattcacatgcatcgatggataagagggtg

SEQ ID NO: 14120 - DNA, 50 bp, Artificial
  Synthetic oligonucleotide
ataccaaaaatagacgctgatacgtatgtaggatcaaagatctattctca

SEQ ID NO: 14121 - DNA, 59 bp, Artificial
  Synthetic oligonucleotide
ggtgtaatcactctaatgaacagtacactacacacaatactagaggatccaggaatggc

SEQ ID NO: 14122 - DNA, 55 bp, Artificial
  Synthetic oligonucleotide
ctagctttaagacgcagtgtggctcaggtatatgcagacactcaagtctacactc

SEQ ID NO: 14123 - DNA, 60 bp, Artificial
  Synthetic oligonucleotide
atcgtctgaattcatccatcctcagaagttcgtcatgactgaatacgttcaaaagtccat

SEQ ID NO: 14124 - DNA, 60 bp, Artificial
  Synthetic oligonucleotide
tgccggtgttatctaccttccaaagtcacattgggatgcatttacatcaaaaactcacgc

SEQ ID NO: 14125 - DNA, 60 bp, Artificial
  Synthetic oligonucleotide
atgagggcgggacggataatcgcgtgggatggacaagcggttctgcagatacataatcct

SEQ ID NO: 14126 - DNA, 60 bp, Artificial
  Synthetic oligonucleotide
cgcactttactcatgccgctataaatcctacgcattttggtaattacgcattgctacaat

SEQ ID NO: 14127 - DNA, 50 bp, Artificial
  Synthetic oligonucleotide
tgcgccagctaatacacagcaatttgaacacgttgtacagctccgaagag

SEQ ID NO: 14128 - DNA, 55 bp, Artificial
  Synthetic oligonucleotide
ctggtaattcgacagtaagtaaagatgaggtactcacgctcgcctattctgacgg

SEQ ID NO: 14129 - DNA, 60 bp, Artificial
  Synthetic oligonucleotide
tgcacacagagcttttcagcgagtcctctctcaaggatacacatcgctaatgtgctacta

SEQ ID NO: 14130 - DNA, 60 bp, Artificial
  Synthetic oligonucleotide
ttgtaccatacattccgccaccgtatcatccgacggctccggcgcttgctgtatccgcca

SEQ ID NO: 14131 - DNA, 55 bp, Artificial
  Synthetic oligonucleotide
gccaccgtatcatccgacggctccggcgcttgctgtatccgccagtcaaatggag

SEQ ID NO: 14132 - DNA, 60 bp, Artificial
  Synthetic oligonucleotide
tggtgcttagattgttgtcagtatacggatttgacttactgccaaggatgtctaatatat

SEQ ID NO: 14133 - DNA, 60 bp, Artificial
  Synthetic oligonucleotide
cctataccatgtatgtcagtggtgcagccagtataacaggtgtttcttagatgaagaacc

SEQ ID NO: 14134 - DNA, 55 bp, Artificial
  Synthetic oligonucleotide
gtcagtggtgcagccagtataacaggtgtttcttagatgaagaacctcatttgct

SEQ ID NO: 14135 - DNA, 60 bp, Artificial
  Synthetic oligonucleotide
gacatagtcccacatcactaatgcaagtagtacgcaactgtatcagtacacatatgaatg

SEQ ID NO: 14136 - DNA, 60 bp, Artificial
  Synthetic oligonucleotide
cttatcattgctacaacgagatgttacgaatgctggttgctgcagggaaagattctgaag

SEQ ID NO: 14137 - DNA, 60 bp, Artificial
  Synthetic oligonucleotide
aacagcaagtcccatcggacctgatgatcagttgagaagccacaactgatcatatcgcgt

SEQ ID NO: 14138 - DNA, 54 bp, Artificial
  Synthetic oligonucleotide
ggtgcgcactgccagattaaacgtgaagtggaaagacagatcacgacgtgtccc

SEQ ID NO: 14139 - DNA, 51 bp, Artificial
  Synthetic oligonucleotide
gcgtatgcgactatgttggagatggttcgttgcataataacgttgcactgc

SEQ ID NO: 14140 - DNA, 55 bp, Artificial
  Synthetic oligonucleotide
gttttctatctaataactctatggtactgtatacagacgtatcccagtgggactc

SEQ ID NO: 14141 - DNA, 51 bp, Artificial
  Synthetic oligonucleotide
ccgatttagttccaatgcctggtattaacctaagcattactacttcagatg

SEQ ID NO: 14142 - DNA, 50 bp, Artificial
  Synthetic oligonucleotide
ggacctttgactttggattactcggtactactttacttaatctagatgcg

SEQ ID NO: 14143 - DNA, 57 bp, Artificial
  Synthetic oligonucleotide
tgcggttccaccttatatccgcaatatttgaacgatatcagcatgatgcacgacgga

SEQ ID NO: 14144 - DNA, 50 bp, Artificial
  Synthetic oligonucleotide
atgctgggtgtttcttatagcggctggatcccatacttagagaggatctg

SEQ ID NO: 14145 - DNA, 52 bp, Artificial
  Synthetic oligonucleotide
ttttaataggtatgcttcgatggcgatacagcaatatttaagagttggttat

SEQ ID NO: 14146 - DNA, 54 bp, Artificial
  Synthetic oligonucleotide
acgttggaccgatatcacgagattacacacagcatatggcgacgattggagtgc

SEQ ID NO: 14147 - DNA, 60 bp, Artificial
  Synthetic oligonucleotide
ttgagcgatcgttgaattcagttgaggggcgagagtcctgtcctgatgtcgaacgttcag

SEQ ID NO: 14148 - DNA, 60 bp, Artificial
  Synthetic oligonucleotide
atgagtcacgtggtgcttttctaggtcatgtcgtgcacacgttgcctgagggtcatccac

SEQ ID NO: 14149 - DNA, 57 bp, Artificial
  Synthetic oligonucleotide
ctgcgtttttcgtacatcaaactacgaacggtatcacatctagtgacaacgctcata

SEQ ID NO: 14150 - DNA, 50 bp, Artificial
  Synthetic oligonucleotide
cacttcgtcaaatgtgacacaagctcgtattaacagcgtacagcaggtga

SEQ ID NO: 14151 - DNA, 60 bp, Artificial
  Synthetic oligonucleotide
ctctgcgcttgactcatttcattcaggatccaggtttacgctcgatagtgtatgcgatgt

SEQ ID NO: 14152 - DNA, 60 bp, Artificial
  Synthetic oligonucleotide
tacattttatgagactacttagaatgcggtttgctgtaccattcgatcagttgtcaaata

SEQ ID NO: 14153 - DNA, 55 bp, Artificial
  Synthetic oligonucleotide
agaatgcggtttgctgtaccattcgatcagttgtcaaatagagtcacacgatctc

SEQ ID NO: 14154 - DNA, 60 bp, Artificial
  Synthetic oligonucleotide
ggttcttacgcttagtgtggtcagctcctactctcgatggattagtcgtagctccaccac

SEQ ID NO: 14155 - DNA, 56 bp, Artificial
  Synthetic oligonucleotide
ctaagaaacagctgcagattcaggtatccgcttaagtagccatggagccgtcggta

SEQ ID NO: 14156 - DNA, 60 bp, Artificial
  Synthetic oligonucleotide
agcgtgtgtttacagtggcctccattagaagcatgcttgttaagtgaggactgaactaac

SEQ ID NO: 14157 - DNA, 59 bp, Artificial
  Synthetic oligonucleotide
gtctatatcgattactgggatgattcacaagcatttcgtaacgtggtgtatgtccgatc

SEQ ID NO: 14158 - DNA, 60 bp, Artificial
  Synthetic oligonucleotide
atgttggaccaatatcaccggattacacacagcacatggcgacgattggagtgctagcaa

SEQ ID NO: 14159 - DNA, 55 bp, Artificial
  Synthetic oligonucleotide
gtaatacacttcaatttggcagacaagtaactgaaggagtaacacatctacggtt

SEQ ID NO: 14160 - DNA, 50 bp, Artificial
  Synthetic oligonucleotide
gtataaaatttcagcacctgtccaatttaggaaacattcgtttaagagtc

SEQ ID NO: 14161 - DNA, 55 bp, Artificial
  Synthetic oligonucleotide
gctctacatgtacataatcccacgcaacagaatgcgatggttcagatacaagtcg

SEQ ID NO: 14162 - DNA, 60 bp, Artificial
  Synthetic oligonucleotide
tatctatgtccgatcgaccaaggttattggcgctcctctctgtctagctgcccccgccaa

SEQ ID NO: 14163 - DNA, 52 bp, Artificial
  Synthetic oligonucleotide
tcaagctacgtctagtggcctcggcccctgctaaggtgttacgagccgcggg

SEQ ID NO: 14164 - DNA, 60 bp, Artificial
  Synthetic oligonucleotide
atatttaacgtctatagcttcagagatcatacttggcatggactaagaaccgctatatta

SEQ ID NO: 14165 - DNA, 54 bp, Artificial
  Synthetic oligonucleotide
cgtagcagtaatccaagtaggcggcgcgaacattctagacattacagctgatcc

SEQ ID NO: 14166 - DNA, 60 bp, Artificial
  Synthetic oligonucleotide
tatcccgatcgaaacattggctcgttactgcgactcgctgacgacatttgttcatcgaaa

SEQ ID NO: 14167 - DNA, 60 bp, Artificial
  Synthetic oligonucleotide
acgacatttgttcatcgaaagaagagagaacgaggcgatgataccacagcgcgtgacgtc

SEQ ID NO: 14168 - DNA, 60 bp, Artificial
  Synthetic oligonucleotide
gcttctattacacgaatatgttagaggcgccaccggagatagatcgtgtagttcagtaca

SEQ ID NO: 14169 - DNA, 60 bp, Artificial
  Synthetic oligonucleotide
atggacactatcgctgcaagagcactcactgtgatgcgagcatgtgctacgctccaagaa

SEQ ID NO: 14170 - DNA, 50 bp, Artificial
  Synthetic oligonucleotide
gttaaaaatctcatgatgcatgccgccctttcaatgacgaaacacgaaaa

SEQ ID NO: 14171 - DNA, 54 bp, Artificial
  Synthetic oligonucleotide
aggttgaagctttatgatctacaagtgatacgggaagcgtcttgggaagatttg

SEQ ID NO: 14172 - DNA, 55 bp, Artificial
  Synthetic oligonucleotide
gtgcgtggggaccctcgcttcgacatgctccacctgcatgccatgttcgaaaggg

SEQ ID NO: 14173 - DNA, 57 bp, Artificial
  Synthetic oligonucleotide
atgacgatagaaaagcgatgaaaagcgcacgaggtgtcgaatttatgacgaatgcca

SEQ ID NO: 14174 - DNA, 55 bp, Artificial
  Synthetic oligonucleotide
ctacaagctctaaccgcctacctaacgtattttgacgctaaagtgggtcaagcta

SEQ ID NO: 14175 - DNA, 50 bp, Artificial
  Synthetic oligonucleotide
aatgtatcacattggatcggcaacgcggtttgcagagtgttcggttgtat

SEQ ID NO: 14176 - DNA, 60 bp, Artificial
  Synthetic oligonucleotide
gtataagaagatcaattcatagatactgcttatacggtcagtcatagacgtacgattaag

SEQ ID NO: 14177 - DNA, 55 bp, Artificial
  Synthetic oligonucleotide
atagatactgcttatacggtcagtcatagacgtacgattaagacgcgaggatgac

SEQ ID NO: 14178 - DNA, 55 bp, Artificial
  Synthetic oligonucleotide
ataattcctcgcacacaggaggaaacttgtacaaattacattaaccatggacttc

SEQ ID NO: 14179 - DNA, 53 bp, Artificial
  Synthetic oligonucleotide
cttccaaccccgcgctagctctccaagtaggcgtgccagtcctcgcagactcg

SEQ ID NO: 14180 - DNA, 60 bp, Artificial
  Synthetic oligonucleotide
tcggctttgtactgtattcacagctcggggaatgaagccttatacattggactgtcagtt

SEQ ID NO: 14181 - DNA, 55 bp, Artificial
  Synthetic oligonucleotide
ttaacggagtgaacgactttagctacaacggtggtacattgccaacagatttcgc

SEQ ID NO: 14182 - DNA, 60 bp, Artificial
  Synthetic oligonucleotide
gcaatgactagaccacggaggacgcatcataacacgattactgcgcctgatgagactatt

SEQ ID NO: 14183 - DNA, 55 bp, Artificial
  Synthetic oligonucleotide
ccacggaggacgcatcataacacgattactgcgcctgatgagactattcacgatg

SEQ ID NO: 14184 - DNA, 60 bp, Artificial
  Synthetic oligonucleotide
tgagactattcacgatgatatacttttgcccccagcttacaagagcttagcaagtgcacc

SEQ ID NO: 14185 - DNA, 60 bp, Artificial
  Synthetic oligonucleotide
tttgatgtaccacgagtgccagatgaccaaatgtacaggctgagagatagacttagatta

SEQ ID NO: 14186 - DNA, 55 bp, Artificial
  Synthetic oligonucleotide
gtgccagatgaccaaatgtacaggctgagagatagacttagattattgccagtcg

SEQ ID NO: 14187 - DNA, 51 bp, Artificial
  Synthetic oligonucleotide
tcgatggatactgcatacgcaaattctacacagaacgagccatttttgaca

SEQ ID NO: 14188 - DNA, 60 bp, Artificial
  Synthetic oligonucleotide
ttcaattgtcctgcaagcactacagatgttacacactatggtggttatgaccaattttcg

SEQ ID NO: 14189 - DNA, 57 bp, Artificial
  Synthetic oligonucleotide
acttgtgaaggtaacacttcggccaataaacagtaatacacgatctgaggtatcgag

SEQ ID NO: 14190 - DNA, 57 bp, Artificial
  Synthetic oligonucleotide
atgcgctaacgtatgtcgtttgatatgtcaaggcatgtagttctgactcttgtgaat

SEQ ID NO: 14191 - DNA, 60 bp, Artificial
  Synthetic oligonucleotide
acaaccaattagcaatggcacattttcaagatactacgatcacacgagcttataatctga

SEQ ID NO: 14192 - DNA, 58 bp, Artificial
  Synthetic oligonucleotide
accgtatttgatatgtctgagtgagctagcaacttaacacactagtcatgatgtgacc

SEQ ID NO: 14193 - DNA, 55 bp, Artificial
  Synthetic oligonucleotide
taccattaacctaagatcagtaggtagagtggcgccccaaggtttgcaccgcgtg

SEQ ID NO: 14194 - DNA, 60 bp, Artificial
  Synthetic oligonucleotide
tcgcgatgaacaaattggcaggatcggagatcattattatacaactaattgttacactgg

SEQ ID NO: 14195 - DNA, 55 bp, Artificial
  Synthetic oligonucleotide
ggcaggatcggagatcattattatacaactaattgttacactggagcggaggcct

SEQ ID NO: 14196 - DNA, 57 bp, Artificial
  Synthetic oligonucleotide
gaattgagcagttgataatgcaatgtagattgtaagcaatttctagaggatgtgacc

SEQ ID NO: 14197 - DNA, 55 bp, Artificial
  Synthetic oligonucleotide
gacacactacactctattattcaagatccaggaatggcgtactttccatatattg

SEQ ID NO: 14198 - DNA, 60 bp, Artificial
  Synthetic oligonucleotide
atagatgggttggtgcagggtagcgttcattccataatcacaggtgaatcgtatggagag

SEQ ID NO: 14199 - DNA, 58 bp, Artificial
  Synthetic oligonucleotide
cgtttatttgcacgactattcatactataccaacaatgaaatccgaactgaccagcat

SEQ ID NO: 14200 - DNA, 54 bp, Artificial
  Synthetic oligonucleotide
caggtcgctggattcgactactcatgtgcaataaacgcgccagctagtacgcaa

SEQ ID NO: 14201 - DNA, 60 bp, Artificial
  Synthetic oligonucleotide
cacggccagtaatgtctgtcagatcgcagcttttgattcaactctcgctgaaaatgctcc

SEQ ID NO: 14202 - DNA, 60 bp, Artificial
  Synthetic oligonucleotide
ccagctaatactcaacaatttgagcacatagttcaattgcgccgagtactgacaacagct

SEQ ID NO: 14203 - DNA, 53 bp, Artificial
  Synthetic oligonucleotide
gttaacttcagtcacgtcgttgtgtatgcttattggaaatgcaaccgttatac

SEQ ID NO: 14204 - DNA, 56 bp, Artificial
  Synthetic oligonucleotide
tagctactaaagattataggggtgcagagatcgcagatccagagataatcggggtt

SEQ ID NO: 14205 - DNA, 60 bp, Artificial
  Synthetic oligonucleotide
cagctcgcatgcggtagatccagttttgcgaatggttgcgggagtattgggccatgtaat

SEQ ID NO: 14206 - DNA, 57 bp, Artificial
  Synthetic oligonucleotide
gtgacatgtataattcgtatgctatattcaacagtgttccaattgttgaagtactca

SEQ ID NO: 14207 - DNA, 58 bp, Artificial
  Synthetic oligonucleotide
tattcgagcgttgtagggtggcccttgggagtgagccattagctcccaagtcctacga

SEQ ID NO: 14208 - DNA, 52 bp, Artificial
  Synthetic oligonucleotide
acaggtataatggattgactttgcgtggagttacgatgagacccacctctct

SEQ ID NO: 14209 - DNA, 56 bp, Artificial
  Synthetic oligonucleotide
aacaattttactactgtcgacgctcgcggatgtttattcggtgttgagacctgagt

SEQ ID NO: 14210 - DNA, 50 bp, Artificial
  Synthetic oligonucleotide
tgctggcgctagaggtgatgtgcaacagatttttcagggccgtaatgatc

SEQ ID NO: 14211 - DNA, 60 bp, Artificial
  Synthetic oligonucleotide
caaggtacgataagttcggcttatatcaatgaatggccatcggaatatgagtcatgggtt

SEQ ID NO: 14212 - DNA, 51 bp, Artificial
  Synthetic oligonucleotide
cacattgagcttgagaactcgattggccataatggtgctattaactacggt

SEQ ID NO: 14213 - DNA, 50 bp, Artificial
  Synthetic oligonucleotide
tttatttacgattgtagcttcaacagtaaacaaatatggagtgcctagac

SEQ ID NO: 14214 - DNA, 54 bp, Artificial
  Synthetic oligonucleotide
ggtattatacactgacgtgtcccaatgggattcatctcagcacaatactcagcc

SEQ ID NO: 14215 - DNA, 55 bp, Artificial
  Synthetic oligonucleotide
gttggtgtttccaattcgcgtgtaatgggtgagtgagctgatgtggtcgccagga

SEQ ID NO: 14216 - DNA, 60 bp, Artificial
  Synthetic oligonucleotide
gagtgagctgatgtggtcgccaggacatgtgccgatgtcttggtggtgggtgacgtttaa

SEQ ID NO: 14217 - DNA, 56 bp, Artificial
  Synthetic oligonucleotide
accagttatacttatatgctatctgatggtatacatgtagcgaatgctagtggtgt

SEQ ID NO: 14218 - DNA, 60 bp, Artificial
  Synthetic oligonucleotide
gcccgagcagttgaataagagtgaccccgagatgaattactatctcttggcgacattcat

SEQ ID NO: 14219 - DNA, 56 bp, Artificial
  Synthetic oligonucleotide
tcaaagtcgttttaactaagatgcgcatatcatcgtgagctatttacatggccggc

SEQ ID NO: 14220 - DNA, 52 bp, Artificial
  Synthetic oligonucleotide
ttttgcggtgtattctaatggtcgtccacaaccggtaaaaccagctgatgtc

SEQ ID NO: 14221 - DNA, 60 bp, Artificial
  Synthetic oligonucleotide
acatcagtttgcacgttatcgagtgatatgagcgtggcgtttaagttgaatggtacatca

SEQ ID NO: 14222 - DNA, 60 bp, Artificial
  Synthetic oligonucleotide
tcgattcgtggctagaattactgcgtcacttataatgcgtgactgctaggtgaggggggc

SEQ ID NO: 14223 - DNA, 60 bp, Artificial
  Synthetic oligonucleotide
acaacgagatgttacgaatgctggttgctgcagggaaagattctgaagcggcgtactttc

SEQ ID NO: 14224 - DNA, 53 bp, Artificial
  Synthetic oligonucleotide
cgaaaacttaatatcgcagtgtaggttgtagctgtctattttaagatgtgacc

SEQ ID NO: 14225 - DNA, 58 bp, Artificial
  Synthetic oligonucleotide
tagatttatacgcgggaaaggatccttcatattacacgacatcccaactagggatcat

SEQ ID NO: 14226 - DNA, 60 bp, Artificial
  Synthetic oligonucleotide
ggacgttcctcggagctcgattgctaacctcatcatgaacatagcgacgtgtttaccgac

SEQ ID NO: 14227 - DNA, 51 bp, Artificial
  Synthetic oligonucleotide
gaacagtattaacttgtatgtaactacgcacaccaatagttacaatgagta

SEQ ID NO: 14228 - DNA, 55 bp, Artificial
  Synthetic oligonucleotide
ggcgacgattgatgttgagtatagagaacccgcgccttacgtacacgctcagcgc

SEQ ID NO: 14229 - DNA, 60 bp, Artificial
  Synthetic oligonucleotide
ctctcagcggaatcgatttgactcacttaagaacaccgaagattgagcctacgatagtat

SEQ ID NO: 14230 - DNA, 60 bp, Artificial
  Synthetic oligonucleotide
acggtgatgagagaacgagagcggatctcttttacttaacgaatatgcggaatgctgcgt

SEQ ID NO: 14231 - DNA, 60 bp, Artificial
  Synthetic oligonucleotide
caattacgtaacaatcagcttgcttcgctaagtcaacaattttcacgattggatgaatgc

SEQ ID NO: 14232 - DNA, 53 bp, Artificial
  Synthetic oligonucleotide
atggacactatcgcagcaagagcgctcactgtgatgcgagcatgtgtctctca

SEQ ID NO: 14233 - DNA, 57 bp, Artificial
  Synthetic oligonucleotide
agctgaagttcgattgttttggcgaggaattagaccacatgagtgatagcgatatcg

SEQ ID NO: 14234 - DNA, 60 bp, Artificial
  Synthetic oligonucleotide
acatgacgccgtgatgaattacgcgcccggtcttcggatagggtgacgctctacctgcgc

SEQ ID NO: 14235 - DNA, 51 bp, Artificial
  Synthetic oligonucleotide
gtagttctaacggaagagattgctcgcgcgattgaatctaagtacggtacg

SEQ ID NO: 14236 - DNA, 59 bp, Artificial
  Synthetic oligonucleotide
atccagagtgcggcgccaagggaggagtcgcgttggatggacgaagatgaagcgagggt

SEQ ID NO: 14237 - DNA, 60 bp, Artificial
  Synthetic oligonucleotide
tccgatctatatgggatcgatggattacgctataagctacgaacagctggtttctaacgc

SEQ ID NO: 14238 - DNA, 55 bp, Artificial
  Synthetic oligonucleotide
cctcggagttcgattgctaaccttattatgaacatagcgacgtgtttacctacgg

SEQ ID NO: 14239 - DNA, 55 bp, Artificial
  Synthetic oligonucleotide
tggggacctggtgaaacgaatgactcaactacagttgaaccagtgcttgatggac

SEQ ID NO: 14240 - DNA, 55 bp, Artificial
  Synthetic oligonucleotide
gatactaacgaaagaggtgggttagcgtatgcgacaattaagtacgctaccgaga

SEQ ID NO: 14241 - DNA, 52 bp, Artificial
  Synthetic oligonucleotide
acaattattcagagagtcaagtcagtaagcctagtggaggtactatcaaacc

SEQ ID NO: 14242 - DNA, 57 bp, Artificial
  Synthetic oligonucleotide
gatcggaacgagatgcccgatttaccaggtgtgatgaggtcaaattacgatgttcgt

SEQ ID NO: 14243 - DNA, 60 bp, Artificial
  Synthetic oligonucleotide
gtatgtccactaaacacacagaccttaggaattggctgtctgaccaccgatgtatcgacg

SEQ ID NO: 14244 - DNA, 60 bp, Artificial
  Synthetic oligonucleotide
gagagtcgggggcgatcgtcccttatgtgccaccaccatacaatgttgcgagtgctccga

SEQ ID NO: 14245 - DNA, 60 bp, Artificial
  Synthetic oligonucleotide
cagattggaaagctctatcggagccctccaaacagttgtcaatggacttgattcgagtgt

SEQ ID NO: 14246 - DNA, 60 bp, Artificial
  Synthetic oligonucleotide
ggagtccaaagattgaacccactattatcgccacgacattggagcatcgatttaaagaga

SEQ ID NO: 14247 - DNA, 55 bp, Artificial
  Synthetic oligonucleotide
cccactattatcgccacgacattggagcatcgatttaaagagataccggacgagc

SEQ ID NO: 14248 - DNA, 60 bp, Artificial
  Synthetic oligonucleotide
atagcagcgctatacatgcgaggcgtatgatcaggtcgcgagcagtacacccaatttttc

SEQ ID NO: 14249 - DNA, 60 bp, Artificial
  Synthetic oligonucleotide
acacagtaaactaaatctggtagtgagtgtgaatgccgacacactaactactagcaatag

SEQ ID NO: 14250 - DNA, 60 bp, Artificial
  Synthetic oligonucleotide
tgtagcatgctctaccatggatggaaacatagcttggtagaggctctcccatgctcaatg

SEQ ID NO: 14251 - DNA, 60 bp, Artificial
  Synthetic oligonucleotide
cactgcctctgtagttagtaggttagcgattgccgaaacttcggctctgaggcagcggtc

SEQ ID NO: 14252 - DNA, 60 bp, Artificial
  Synthetic oligonucleotide
taacgctcacatgcgcccgtgtcgctgtcatggataacgtgtcatccatttgtacgtctt

SEQ ID NO: 14253 - DNA, 60 bp, Artificial
  Synthetic oligonucleotide
acctatgctacggttaagtatgctaacgatacgacgatatactatctgatatacaacgta

SEQ ID NO: 14254 - DNA, 55 bp, Artificial
  Synthetic oligonucleotide
ctaattggcgcgggtatggccacagctgtagcgaccggtagagcaatagaaggcg

SEQ ID NO: 14255 - DNA, 54 bp, Artificial
  Synthetic oligonucleotide
gtggttaactatgactagtaccattgtttctaacttcggaatctataataagac

SEQ ID NO: 14256 - DNA, 50 bp, Artificial
  Synthetic oligonucleotide
aacctactctatcgaaagagttaaaaggcatttccaacgctagagttatt

SEQ ID NO: 14257 - DNA, 50 bp, Artificial
  Synthetic oligonucleotide
actgtgcagttagcgtgcgttgagtgtctatggcgggaacagctgatgtc

SEQ ID NO: 14258 - DNA, 58 bp, Artificial
  Synthetic oligonucleotide
cgcttgttcacgtcaaccaaatgaagccattcgctcattagtcgaagtgagtgacaaa

SEQ ID NO: 14259 - DNA, 57 bp, Artificial
  Synthetic oligonucleotide
acgcggatgacggccatcaagcacgttccgcttgctacggtccagcgtttaacaacc

SEQ ID NO: 14260 - DNA, 54 bp, Artificial
  Synthetic oligonucleotide
gtgtgaccgatgcgtcagaaaaactacgtgcgcgccaaagcttgacggttgcga

SEQ ID NO: 14261 - DNA, 55 bp, Artificial
  Synthetic oligonucleotide
cctccctgtccaaacggattcacgtttgtcgttctcacttggtggtgggaacatc

SEQ ID NO: 14262 - DNA, 60 bp, Artificial
  Synthetic oligonucleotide
ataatttgatgggcacgatgtggttgaatgcaggttcagagattcaagttgcaggatttg

SEQ ID NO: 14263 - DNA, 56 bp, Artificial
  Synthetic oligonucleotide
cgaagcgaataaatggatatcaatgggttcgtcttgcacggttaaggtgtgtccat

SEQ ID NO: 14264 - DNA, 54 bp, Artificial
  Synthetic oligonucleotide
gttgtagattacgttaaccagataattcaagcgatgtccaagagatctagatca

SEQ ID NO: 14265 - DNA, 54 bp, Artificial
  Synthetic oligonucleotide
ggaagaataccgtatcacagttgttcttgacgaaaggttggcctacgggttcag

SEQ ID NO: 14266 - DNA, 60 bp, Artificial
  Synthetic oligonucleotide
ataaacctggcggcgatgttagcctccaagaggcactcgctacactgctagatgtagttt

SEQ ID NO: 14267 - DNA, 58 bp, Artificial
  Synthetic oligonucleotide
ttcgcatcgtacgcggaagcgtttcgtgatgatgtaaggttgagacaaatcaaacgcc

SEQ ID NO: 14268 - DNA, 59 bp, Artificial
  Synthetic oligonucleotide
atagaccaagcgattatcgatctggagaacgcgagaagggacctagtgacggaggaaga

SEQ ID NO: 14269 - DNA, 60 bp, Artificial
  Synthetic oligonucleotide
atatcaccagattacacacagcatatggcgacgattggagtgctagcgacgccagagatt

SEQ ID NO: 14270 - DNA, 57 bp, Artificial
  Synthetic oligonucleotide
tctcacgtcgacgtttacaaggtggatgttgtagacgtgttgttcgagatagtggat

SEQ ID NO: 14271 - DNA, 55 bp, Artificial
  Synthetic oligonucleotide
caccgatgtcactaaacaaatggtccaagatgtgtcaaacgatgtgaggtatata

SEQ ID NO: 14272 - DNA, 58 bp, Artificial
  Synthetic oligonucleotide
atgactggctgagaagccacagtcagtcatatcgcgtgtggctcgagccttatcccgt

SEQ ID NO: 14273 - DNA, 52 bp, Artificial
  Synthetic oligonucleotide
cgaatcgcggttgacaaagggttcgacacgcttatcgcggcaacggatggaa

SEQ ID NO: 14274 - DNA, 60 bp, Artificial
  Synthetic oligonucleotide
gtaactatgtacgatcggtatacgaggcgagatacattatatctaggataaggtcgtcta

SEQ ID NO: 14275 - DNA, 60 bp, Artificial
  Synthetic oligonucleotide
gtgtcctaaaggagatttgcgcgcaattttgcatcagactagattgattcactacaaacc

SEQ ID NO: 14276 - DNA, 60 bp, Artificial
  Synthetic oligonucleotide
gtgcgatctggaaacgtggtaaggcattagctgctccctgcatcgattacatcaaacttg

SEQ ID NO: 14277 - DNA, 56 bp, Artificial
  Synthetic oligonucleotide
cttcacgcctagcgcgtctcatccagcgtatgtgaatttcgcgtcctcgagcagac

SEQ ID NO: 14278 - DNA, 56 bp, Artificial
  Synthetic oligonucleotide
gttatcggtttgagaatgggtgtagtgaagcaagaatagaaagcgcttatgtgacc

SEQ ID NO: 14279 - DNA, 51 bp, Artificial
  Synthetic oligonucleotide
ttaatgttcgaaatgacatgctactccggtttattcaatggaaatagattt

SEQ ID NO: 14280 - DNA, 60 bp, Artificial
  Synthetic oligonucleotide
tccagagctccaaactttctaaggttggatgatcaagtatcgctgaaacttacatccgct

SEQ ID NO: 14281 - DNA, 60 bp, Artificial
  Synthetic oligonucleotide
gagatgtcgacgtattcataggtgcttgttctgaaccgatctatcgcatatataataggt

SEQ ID NO: 14282 - DNA, 55 bp, Artificial
  Synthetic oligonucleotide
cgccaaccattcggctacttcttaacggcagcagaagttacgcagcatggacggt

SEQ ID NO: 14283 - DNA, 60 bp, Artificial
  Synthetic oligonucleotide
atcgcgagagaactgatagtactatcatattctaatagatcaactctggcgaaattagtc

SEQ ID NO: 14284 - DNA, 60 bp, Artificial
  Synthetic oligonucleotide
agtgtgacagagttcagtgggatcccgctagatggatttgacataccaccggaactcacc

SEQ ID NO: 14285 - DNA, 57 bp, Artificial
  Synthetic oligonucleotide
atgctcaatatggagtctactcagcagatggccagttcaatcattaacacttctttt

SEQ ID NO: 14286 - DNA, 50 bp, Artificial
  Synthetic oligonucleotide
atgttcgcaatcgatccactcaagcattcaaagttatacgaagaatatgg

SEQ ID NO: 14287 - DNA, 60 bp, Artificial
  Synthetic oligonucleotide
ggaatccatatgagccttcagaagtgactgcatctatgtgagaggttgagttgccgtcgt

SEQ ID NO: 14288 - DNA, 55 bp, Artificial
  Synthetic oligonucleotide
ttaggagatcgtttagacgtaccactcttcttacgaaatgcttgaacgcagcgac

SEQ ID NO: 14289 - DNA, 60 bp, Artificial
  Synthetic oligonucleotide
tcgcagatgcacgctcggagaatgatacggtcgaagactgtacaccccatatacttaggc

SEQ ID NO: 14290 - DNA, 60 bp, Artificial
  Synthetic oligonucleotide
gctctctcatatcgtcaagagtggatttttgccaatatggagattaactggagatgagag

SEQ ID NO: 14291 - DNA, 60 bp, Artificial
  Synthetic oligonucleotide
gattaactgagagcgctgagcttctgctccggcgttggggttatggtcttcgattgagga

SEQ ID NO: 14292 - DNA, 55 bp, Artificial
  Synthetic oligonucleotide
gcttctgctccggcgttggggttatggtcttcgattgaggaggccgagggaagcc

SEQ ID NO: 14293 - DNA, 54 bp, Artificial
  Synthetic oligonucleotide
ttggagcaggtatggccaccgcagtagcgacgggaagggcgattgagggagctt

SEQ ID NO: 14294 - DNA, 55 bp, Artificial
  Synthetic oligonucleotide
gatgcgtgatgcagtgttgccctaatcccttaagccttcccgacccctattcatc

SEQ ID NO: 14295 - DNA, 60 bp, Artificial
  Synthetic oligonucleotide
ttcgtctacattgactattgggatgattctcaagcctttaggaatatggtgtatgtacgt

SEQ ID NO: 14296 - DNA, 55 bp, Artificial
  Synthetic oligonucleotide
gggatgattctcaagcctttaggaatatggtgtatgtacgttcattggctgctaa

SEQ ID NO: 14297 - DNA, 58 bp, Artificial
  Synthetic oligonucleotide
atctacgagttggctatcttgaagaaagacgttatgtcacgcaactatttggggagtg

SEQ ID NO: 14298 - DNA, 60 bp, Artificial
  Synthetic oligonucleotide
tctgttgacatcagtctgcaccttatcgagtgatatgagcgtggcgtttaagttaaacgg

SEQ ID NO: 14299 - DNA, 56 bp, Artificial
  Synthetic oligonucleotide
cagggatggaggcgttaattcgtactgcaatacaaattcataggtggataagaggg

SEQ ID NO: 14300 - DNA, 60 bp, Artificial
  Synthetic oligonucleotide
caacctggaagatggtttatgcgagctgctcaggttgttacaccagtggtttgtggacca

SEQ ID NO: 14301 - DNA, 55 bp, Artificial
  Synthetic oligonucleotide
atcgacacaatcacgaccttcaagtaacgttggatgcgatcaagtggatttctcc

SEQ ID NO: 14302 - DNA, 55 bp, Artificial
  Synthetic oligonucleotide
attctgtcggagccctccaaacaactgtcaatggacttgattcgagtgttaccca

SEQ ID NO: 14303 - DNA, 53 bp, Artificial
  Synthetic oligonucleotide
ctactacaacatgtaccgttagaaattgtaaaaagctgggacctagagagaac

SEQ ID NO: 14304 - DNA, 59 bp, Artificial
  Synthetic oligonucleotide
gcaactccggaaccgaaaggatatgtgctggaaatcagcgatgttggtgcataccgaat

SEQ ID NO: 14305 - DNA, 51 bp, Artificial
  Synthetic oligonucleotide
cccgacttcaccatagactgcaaaccgtagaaactagcaccttacccaaca

SEQ ID NO: 14306 - DNA, 52 bp, Artificial
  Synthetic oligonucleotide
gcatcggaaaaacgagggtagattgccagtggaacggctagaagataagcac

SEQ ID NO: 14307 - DNA, 60 bp, Artificial
  Synthetic oligonucleotide
ctcatgattacacggattgcatggggaaagaagaagtgttggtcgggatgagatctatat

SEQ ID NO: 14308 - DNA, 52 bp, Artificial
  Synthetic oligonucleotide
tgagagcgaatcaagacggtcacagttcgttcgcccccgaaaatatgcgcaa

SEQ ID NO: 14309 - DNA, 60 bp, Artificial
  Synthetic oligonucleotide
ggcccggatatgattcaagtatcgttgaatgctggcgctagaggtgatgtgcaacagatt

SEQ ID NO: 14310 - DNA, 56 bp, Artificial
  Synthetic oligonucleotide
cgaactgtggacccgataattgcagtcgctagtgacaaccgaaggattatcttaag

SEQ ID NO: 14311 - DNA, 55 bp, Artificial
  Synthetic oligonucleotide
tcaccagattatactcaacatatggctacaattggtgtactagcaacaccggaaa

SEQ ID NO: 14312 - DNA, 55 bp, Artificial
  Synthetic oligonucleotide
ctgatacagattcgaaatcccttggcactatatgtccctataggttggaatgggt

SEQ ID NO: 14313 - DNA, 60 bp, Artificial
  Synthetic oligonucleotide
tgtctatggattcatcgacacaatcacgaccttcaagcaacgttggatgcgatcaattgg

SEQ ID NO: 14314 - DNA, 57 bp, Artificial
  Synthetic oligonucleotide
ttctaacagatcgacgctagcaaagctagtgtcatcaccaatgtcaattctagtagc

SEQ ID NO: 14315 - DNA, 51 bp, Artificial
  Synthetic oligonucleotide
cacaaatctgactgcgaagaaagaatgtccgcgtatcacaaacgcgttgta

SEQ ID NO: 14316 - DNA, 58 bp, Artificial
  Synthetic oligonucleotide
aacagttatacataagagagcacaagttaatgaagatatcataatttcgaaagcctcg

SEQ ID NO: 14317 - DNA, 50 bp, Artificial
  Synthetic oligonucleotide
gtaatccgtgtgctttcaaagttcaagatcgtgaaacgacaactcacttc

SEQ ID NO: 14318 - DNA, 52 bp, Artificial
  Synthetic oligonucleotide
cgaactgagtatagaattaaatcacatccctttagggatgcaagttatggct

SEQ ID NO: 14319 - DNA, 59 bp, Artificial
  Synthetic oligonucleotide
gcatggccagtaatgaatggtggcgctgtttcgttgcattttgccggagttacattatc

SEQ ID NO: 14320 - DNA, 52 bp, Artificial
  Synthetic oligonucleotide
ctagatattacagcggatccaactactgcaccacagactgaacgcatgatgc

SEQ ID NO: 14321 - DNA, 60 bp, Artificial
  Synthetic oligonucleotide
tcactcttatgaatgacacgttgcataccataatggaggatcctggaatggcgtactttc

SEQ ID NO: 14322 - DNA, 60 bp, Artificial
  Synthetic oligonucleotide
tgtgattgatgtacgcgcatcagagctaacggggtgctcgccattcaagacggtgaagat

SEQ ID NO: 14323 - DNA, 53 bp, Artificial
  Synthetic oligonucleotide
catatcttaagaggtccactgcattttcaaaggcgcgcgatcttaggtgcgct

SEQ ID NO: 14324 - DNA, 58 bp, Artificial
  Synthetic oligonucleotide
agctcaagtatatggtaagttcttcagacggtacattgtcgaaagagagtcatcagta

SEQ ID NO: 14325 - DNA, 54 bp, Artificial
  Synthetic oligonucleotide
ggtgtaagcttaattggagagattgacttgcccgagtttatgcgttacgcgtga

SEQ ID NO: 14326 - DNA, 60 bp, Artificial
  Synthetic oligonucleotide
tgggtgcggcaagatatatcctacagtgcgttagatgagtttcctacttatatggcacct

SEQ ID NO: 14327 - DNA, 52 bp, Artificial
  Synthetic oligonucleotide
tgtcgatcctccgcgctcgcaacagcgtgactaagttgaggcagggattctt

SEQ ID NO: 14328 - DNA, 60 bp, Artificial
  Synthetic oligonucleotide
tctgatgttctcgatataacagctgatccaactacagcaccacaaactgaacgaatgatg

SEQ ID NO: 14329 - DNA, 55 bp, Artificial
  Synthetic oligonucleotide
aaaacgaagtcttcaacatggatgtcctatactccttgtcgaaaactcttaacga

SEQ ID NO: 14330 - DNA, 57 bp, Artificial
  Synthetic oligonucleotide
ggcagatcggggagaggatggtttagatgacgcattaaagaagtttgtgcgattgac

SEQ ID NO: 14331 - DNA, 55 bp, Artificial
  Synthetic oligonucleotide
gtagctgagccaaatgtccataaggtgcgtgggctcacaatgggtccaccaacac

SEQ ID NO: 14332 - DNA, 51 bp, Artificial
  Synthetic oligonucleotide
atggcttctttctagaaacggaggaaacgtatcagcccggtcgttggttta

SEQ ID NO: 14333 - DNA, 51 bp, Artificial
  Synthetic oligonucleotide
aaatcacaagttgaatgtaacaacagctacttgcactatacgcaattgtaa

SEQ ID NO: 14334 - DNA, 59 bp, Artificial
  Synthetic oligonucleotide
gacttaaatctgggaagagtaaaagctgatatttttgagcttggacatcactgtaagcc

SEQ ID NO: 14335 - DNA, 57 bp, Artificial
  Synthetic oligonucleotide
caatcaaaacgcatcaccaacttatacaaagcattgcagacggaggaacaactgagg

SEQ ID NO: 14336 - DNA, 51 bp, Artificial
  Synthetic oligonucleotide
tttgagaggggggactcgtgtagtgaatttggatcaaatcgctccgatgag

SEQ ID NO: 14337 - DNA, 50 bp, Artificial
  Synthetic oligonucleotide
tacgaacacaactgacagatggttcgcttgtgtacttgttgaaccaaacg

SEQ ID NO: 14338 - DNA, 51 bp, Artificial
  Synthetic oligonucleotide
aatccggatgcggccgatgattggatcgatccaaatttgtttggcattcgt

SEQ ID NO: 14339 - DNA, 57 bp, Artificial
  Synthetic oligonucleotide
cgatttactaacctgactcagaacatggctcgtcaattagacatcgcgttgaacgat

SEQ ID NO: 14340 - DNA, 54 bp, Artificial
  Synthetic oligonucleotide
taaagctagtccttggaaaagacctcgtatgatttcctacagtggctataacgt

SEQ ID NO: 14341 - DNA, 60 bp, Artificial
  Synthetic oligonucleotide
ggatgcaaatgacactctattggcgaatgtgaccgcagtgcgtcaagagtacgccatacc

SEQ ID NO: 14342 - DNA, 60 bp, Artificial
  Synthetic oligonucleotide
caagggactaatgaggcaatgcaactacgaatacacgtatgaatagttacgtaatatagc

SEQ ID NO: 14343 - DNA, 57 bp, Artificial
  Synthetic oligonucleotide
tcaatgctgtcgaaccacgagttgacagtctggatacagtcacgtctaatctcactg

SEQ ID NO: 14344 - DNA, 60 bp, Artificial
  Synthetic oligonucleotide
atggcaggagggtattttcatgctcggacgcgtactgctgagatgggagctgacgaaggc

SEQ ID NO: 14345 - DNA, 54 bp, Artificial
  Synthetic oligonucleotide
tcgtggaatctacaggaccagacagggttcgtagatccccgaaagttttggcga

SEQ ID NO: 14346 - DNA, 60 bp, Artificial
  Synthetic oligonucleotide
gacgtttcgagagttccagatgaccagatgtatagacttagagacagattgaggttactt

SEQ ID NO: 14347 - DNA, 52 bp, Artificial
  Synthetic oligonucleotide
tgtttatacaacctccttttaaattgaaagcgtcacctactgattatatagt

SEQ ID NO: 14348 - DNA, 58 bp, Artificial
  Synthetic oligonucleotide
cacgagcacgggaggggatgtgaaaacggagtttctgcatttgatcgatcacctctaa

SEQ ID NO: 14349 - DNA, 60 bp, Artificial
  Synthetic oligonucleotide
aacagtaagcctcatcggacctgatggctggctgagaagccacagtcagtcatatcgcgt

SEQ ID NO: 14350 - DNA, 60 bp, Artificial
  Synthetic oligonucleotide
ttcaattcttcggacgctgagactaacagacttgttgacttatgcattacagacgtcatc

SEQ ID NO: 14351 - DNA, 56 bp, Artificial
  Synthetic oligonucleotide
tctataagcaagtaccacaaccttttgattttagagcatcaatgtacatgttaacg

SEQ ID NO: 14352 - DNA, 60 bp, Artificial
  Synthetic oligonucleotide
ggtactatatacagatgtgtcccaatgggactcatctcaacacaatacgcagccatttag

SEQ ID NO: 14353 - DNA, 56 bp, Artificial
  Synthetic oligonucleotide
gagtgaacttgatccggaggaagaattcttacgtaactatagagtttcaagggaga

SEQ ID NO: 14354 - DNA, 53 bp, Artificial
  Synthetic oligonucleotide
tactattcggttatcatttcaattagtacgaccaccaaatatgacaccagcag

SEQ ID NO: 14355 - DNA, 52 bp, Artificial
  Synthetic oligonucleotide
ttaggggcgggggatgagattccggatccgttaagtccaggtgagcgtggca

SEQ ID NO: 14356 - DNA, 58 bp, Artificial
  Synthetic oligonucleotide
gatggcagtataacaggtttgctgtaataacacatggtaaaggtcactatagagtcgt

SEQ ID NO: 14357 - DNA, 60 bp, Artificial
  Synthetic oligonucleotide
gataaacgcgtcatatgatagaactcggattagggcgttggagttgtgtaatatattatc

SEQ ID NO: 14358 - DNA, 60 bp, Artificial
  Synthetic oligonucleotide
aaccgaacattttcccttattcagcgtcattcacactgaacagatctcaaccggcgcatg

SEQ ID NO: 14359 - DNA, 60 bp, Artificial
  Synthetic oligonucleotide
cccagccgatgtgaattcgatgtcagcgcacaactcagcggttgagaccctcatgttcaa

SEQ ID NO: 14360 - DNA, 59 bp, Artificial
  Synthetic oligonucleotide
agcaatgtaagaggttgagctgccgtcgactgtcctcggaagcggcggggttcttcaca

SEQ ID NO: 14361 - DNA, 52 bp, Artificial
  Synthetic oligonucleotide
tcatcggactgcgtgttgagtcatctgtgttgagggtccgaaatccgacatt

SEQ ID NO: 14362 - DNA, 50 bp, Artificial
  Synthetic oligonucleotide
gttaaaaaatcgcatatgtcactagcgatacttcttgcacccggtgacgt

SEQ ID NO: 14363 - DNA, 50 bp, Artificial
  Synthetic oligonucleotide
ctgatagcagctatgctaagtcaacgtacaatgtcattagattttgtaac

SEQ ID NO: 14364 - DNA, 60 bp, Artificial
  Synthetic oligonucleotide
actcatgcaggtgtaaagcagcgacactggatgttcgcataaagtccgcggaggtttacg

SEQ ID NO: 14365 - DNA, 60 bp, Artificial
  Synthetic oligonucleotide
tccagatccaccaatctgggtcccagctggcgacgtacgtattgactcgaatcagtaccc

SEQ ID NO: 14366 - DNA, 60 bp, Artificial
  Synthetic oligonucleotide
aacagacggatgaggcaaacaagtggatatcaatgggagactcatgtacgatcaaggtat

SEQ ID NO: 14367 - DNA, 54 bp, Artificial
  Synthetic oligonucleotide
atttgggcagtcaagaatgtttattcctcatgtaacgttgagttttagtaatga

SEQ ID NO: 14368 - DNA, 54 bp, Artificial
  Synthetic oligonucleotide
gcgtcaacacagatatcaaacgttagtagaagtttacgattacgtgaatttacc

SEQ ID NO: 14369 - DNA, 60 bp, Artificial
  Synthetic oligonucleotide
ccaactcgccaccatgcaacgagagtacgatcagaccacccgagccctgctccaagacaa

SEQ ID NO: 14370 - DNA, 60 bp, Artificial
  Synthetic oligonucleotide
tatctaacaatgccatggtgctatacacagatgtatctcaatgggattcatcccagcaca

SEQ ID NO: 14371 - DNA, 58 bp, Artificial
  Synthetic oligonucleotide
gattgtcatttcagttgatgagaccaccaaatatgacaccagcggtagcggcgttatt

SEQ ID NO: 14372 - DNA, 60 bp, Artificial
  Synthetic oligonucleotide
ggctataaaatggcttcgctcatttatagacagctcctcactaattcatatgccctagac

SEQ ID NO: 14373 - DNA, 60 bp, Artificial
  Synthetic oligonucleotide
ttaccgcagtacgtcaagaatatgctataccagttggaccagtatttccaccaggcatga

SEQ ID NO: 14374 - DNA, 60 bp, Artificial
  Synthetic oligonucleotide
gtttgccgatggtatcatcgatgcgcccactcaagctgtctacgatgctgccacgaatgc

SEQ ID NO: 14375 - DNA, 55 bp, Artificial
  Synthetic oligonucleotide
cgatgcgcccactcaagctgtctacgatgctgccacgaatgcccggttcgcgaca

SEQ ID NO: 14376 - DNA, 60 bp, Artificial
  Synthetic oligonucleotide
gtgatgacgtagcgatatttgagactgctcaggttgtggccgctgcacttcggatgttcc

SEQ ID NO: 14377 - DNA, 53 bp, Artificial
  Synthetic oligonucleotide
tggagggacctttggacccggtgcagccagagtaggaggggatcatatgctcg

SEQ ID NO: 14378 - DNA, 60 bp, Artificial
  Synthetic oligonucleotide
gcatatcgcagtagggacggatgcgtttcagtgtgttcgcctaggaagattgatgccaga

SEQ ID NO: 14379 - DNA, 60 bp, Artificial
  Synthetic oligonucleotide
tgtagggacggagtactcaatggaggctacagcggagaggccaatgtttccaatgacgca

SEQ ID NO: 14380 - DNA, 60 bp, Artificial
  Synthetic oligonucleotide
gtggagaagatggtagctagaccggatgaggtgcggggaacatcatttccgatacacact

SEQ ID NO: 14381 - DNA, 50 bp, Artificial
  Synthetic oligonucleotide
cagccaaaggacttaagtgggcggctgatcgtgagattatggggtaggta

SEQ ID NO: 14382 - DNA, 60 bp, Artificial
  Synthetic oligonucleotide
cgtaagcacacgtatcgatgagcccacgggacgtcatgatgtcactcaaattccaaattc

SEQ ID NO: 14383 - DNA, 52 bp, Artificial
  Synthetic oligonucleotide
aatttgattttaagttcgacgttgacagggtgcttgtgttcgggctctcagt

SEQ ID NO: 14384 - DNA, 60 bp, Artificial
  Synthetic oligonucleotide
gtcaacatcgaaatgcttcattgctctcaggaggttgcttatacgctgaagcctacatac

SEQ ID NO: 14385 - DNA, 60 bp, Artificial
  Synthetic oligonucleotide
tttacgtgttagtcatgatagcagcctctgacacttataagggccgtatatggtggagta

SEQ ID NO: 14386 - DNA, 60 bp, Artificial
  Synthetic oligonucleotide
tatcaagacgtttaggatatgtcgagcgtgagaaacgatgtctaactgaaacggcgcagt

SEQ ID NO: 14387 - DNA, 60 bp, Artificial
  Synthetic oligonucleotide
tccatagtggagggattatgcgcaatgtagtgacaacgaaacgcttgctatatgaaacac

SEQ ID NO: 14388 - DNA, 52 bp, Artificial
  Synthetic oligonucleotide
gttaggtcaatgttgtataacccgattcctgttccgccccctcaacctcttg

SEQ ID NO: 14389 - DNA, 60 bp, Artificial
  Synthetic oligonucleotide
attgtctgataacgcgctacgaggtgtaggaatgatgccaagacctagtggaggtgtgta

SEQ ID NO: 14390 - DNA, 50 bp, Artificial
  Synthetic oligonucleotide
gcaatgatcccgagtctcgtttacttcaatcgactgagtgggagcacatg

SEQ ID NO: 14391 - DNA, 60 bp, Artificial
  Synthetic oligonucleotide
ttcctgcctatgacgcattggttgaatcgctacgtaacagaactaacgctcacatcaaac

SEQ ID NO: 14392 - DNA, 60 bp, Artificial
  Synthetic oligonucleotide
cacatcaaactcgaactacccgctaccgaacagattcatatggtatgggtgcgagccgga

SEQ ID NO: 14393 - DNA, 54 bp, Artificial
  Synthetic oligonucleotide
ccgacagtgatggaccagatactgcgtagtggggtagatgttattggtagaggg

SEQ ID NO: 14394 - DNA, 57 bp, Artificial
  Synthetic oligonucleotide
ctgacggaggttctttggctgagcttaactggctacaagtggatcctggctcaatgt

SEQ ID NO: 14395 - DNA, 60 bp, Artificial
  Synthetic oligonucleotide
tgactcatcagacttggtgccgaactttatgatgcgtgatccatcgcatgcttttaatgg

SEQ ID NO: 14396 - DNA, 60 bp, Artificial
  Synthetic oligonucleotide
tcgcattactctcgcgctacaacgccgattcttggcaagatgccagccgtcttttccggg

SEQ ID NO: 14397 - DNA, 60 bp, Artificial
  Synthetic oligonucleotide
tcatacgtggggctctgagaagattagatacgcgttgggtcctggcggaatgacaggatg

SEQ ID NO: 14398 - DNA, 52 bp, Artificial
  Synthetic oligonucleotide
taaagatagtatggatcaacagccgcttaagatatcgattgacgaggaacat

SEQ ID NO: 14399 - DNA, 55 bp, Artificial
  Synthetic oligonucleotide
tacgaggcgagatacattatatctaggataaggtcgtctaccggtgcggcgcgta

SEQ ID NO: 14400 - DNA, 53 bp, Artificial
  Synthetic oligonucleotide
gtgcgacgatagagtgcccgcgcgcttacgttgtgatagattgaggttgcgtt

SEQ ID NO: 14401 - DNA, 60 bp, Artificial
  Synthetic oligonucleotide
agccacacgagatgtcgacgtattcataggcgcttgttctgaaccgatttatcgcatata

SEQ ID NO: 14402 - DNA, 60 bp, Artificial
  Synthetic oligonucleotide
agcaatatggtcgtagcttgttctctttagcgcggaagattggtgatcgatccttggtca

SEQ ID NO: 14403 - DNA, 60 bp, Artificial
  Synthetic oligonucleotide
atacttccgtccaatcccgtcctatttgataacattaatggcgcgtcgcctcatgtatgc

SEQ ID NO: 14404 - DNA, 59 bp, Artificial
  Synthetic oligonucleotide
gcgcatatgccgtgctgcgtggccaaactgctctatcacatgggtaccactgtcatatg

SEQ ID NO: 14405 - DNA, 60 bp, Artificial
  Synthetic oligonucleotide
tcctgaatgtgttaccccaaaccatacagatatcggcacatcactcggccaagttaccac

SEQ ID NO: 14406 - DNA, 55 bp, Artificial
  Synthetic oligonucleotide
ccccaaaccatacagatatcggcacatcactcggccaagttaccactaaaggtaa

SEQ ID NO: 14407 - DNA, 50 bp, Artificial
  Synthetic oligonucleotide
gggatcgtgaatcttatagtatgttttgttatatgatccatggatacgca

SEQ ID NO: 14408 - DNA, 60 bp, Artificial
  Synthetic oligonucleotide
acaagtgatgcatctcgtcaatatttcctctaacaccgcggctgctctgcccctagtgga

SEQ ID NO: 14409 - DNA, 53 bp, Artificial
  Synthetic oligonucleotide
cgcgatgtttacccgtaaccaacgcgcggtcatcacacgtgaggcattcgtct

SEQ ID NO: 14410 - DNA, 54 bp, Artificial
  Synthetic oligonucleotide
ctaagcagggaatatatgtccctcaggatcggatgatgctagtttcgtctgaac

SEQ ID NO: 14411 - DNA, 52 bp, Artificial
  Synthetic oligonucleotide
ctgcaccgtataggtgtttactctccgaaccaccacttttccgcagtcatct

SEQ ID NO: 14412 - DNA, 60 bp, Artificial
  Synthetic oligonucleotide
gcggatacccagagtggagcaacaaaatcgattagtgatgatctacgattcaacgcaatt

SEQ ID NO: 14413 - DNA, 56 bp, Artificial
  Synthetic oligonucleotide
tacgagatgtacgctatgcagacgtctgtcaccttagaaacgtcgacatttggtga

SEQ ID NO: 14414 - DNA, 60 bp, Artificial
  Synthetic oligonucleotide
ctgttattccaaacgatatgttcataagagaatccttagttgcatgtcaattagcgatag

SEQ ID NO: 14415 - DNA, 57 bp, Artificial
  Synthetic oligonucleotide
tgccagttgactacaaaaggtcgattcagcgtggaatattgtcgttatctattaggc

SEQ ID NO: 14416 - DNA, 60 bp, Artificial
  Synthetic oligonucleotide
ggcgttagttggagctcttccatttatcacggattcgtcagttatatcactgatagcgaa

SEQ ID NO: 14417 - DNA, 55 bp, Artificial
  Synthetic oligonucleotide
ccatttatcacggattcgtcagttatatcactgatagcgaagcttgatgccacag

SEQ ID NO: 14418 - DNA, 60 bp, Artificial
  Synthetic oligonucleotide
tgtcgctcagtcggagtgaatttcactgaactaaataagaggctaagacgtgaggcactt

SEQ ID NO: 14419 - DNA, 60 bp, Artificial
  Synthetic oligonucleotide
tcctccagcaaacggctgggctagatccgtctttagttaagatgggtgtgcaggtatgtc

SEQ ID NO: 14420 - DNA, 60 bp, Artificial
  Synthetic oligonucleotide
atgcgatcacagtatgtgacggcaagaggtggatcaggagctgcactgcgtgagtcactg

SEQ ID NO: 14421 - DNA, 60 bp, Artificial
  Synthetic oligonucleotide
gacctggatgcgacaggaaggacggtcagcatgagtctaccgtgggctgtcgtacgttaa

SEQ ID NO: 14422 - DNA, 50 bp, Artificial
  Synthetic oligonucleotide
catgggagacgttgttcttcccttcgctgttgttcaggggatggatcgcg

SEQ ID NO: 14423 - DNA, 60 bp, Artificial
  Synthetic oligonucleotide
ttgtggtcgcctctggctcctccacctgacttggtgtttgatcgtgatactcctggcgtt

SEQ ID NO: 14424 - DNA, 60 bp, Artificial
  Synthetic oligonucleotide
gttaaaatcaatagggtgggctttccgcgcagctgtagctgacttcagagatacatcacg

SEQ ID NO: 14425 - DNA, 55 bp, Artificial
  Synthetic oligonucleotide
ggtgggctttccgcgcagctgtagctgacttcagagatacatcacgagaagatcc

SEQ ID NO: 14426 - DNA, 60 bp, Artificial
  Synthetic oligonucleotide
cacaatggcgaaagtattcaaagcgtaggagctcaagataggtgttagtgtcattagacc

SEQ ID NO: 14427 - DNA, 55 bp, Artificial
  Synthetic oligonucleotide
ttcaaagcgtaggagctcaagataggtgttagtgtcattagaccacggtgatacg

SEQ ID NO: 14428 - DNA, 55 bp, Artificial
  Synthetic oligonucleotide
gcggctattgatgggttagttcaggggagcgtacattcgttgatgacgggagagt

SEQ ID NO: 14429 - DNA, 51 bp, Artificial
  Synthetic oligonucleotide
acgaaccaccgatttggattgtgtgaggtggaacacgatatgtcaatatcg

SEQ ID NO: 14430 - DNA, 55 bp, Artificial
  Synthetic oligonucleotide
gggccgacaaacatatttcgaattgggcacccgcgaatgtcggccatcgttcacc

SEQ ID NO: 14431 - DNA, 58 bp, Artificial
  Synthetic oligonucleotide
aagttactcgcaaagacggaatagcaacgtgactgttgctccatgtgaatacacatac

SEQ ID NO: 14432 - DNA, 51 bp, Artificial
  Synthetic oligonucleotide
aagtcacacgcatattagttgagcaaatgtttaccgtttatacccagttac

SEQ ID NO: 14433 - DNA, 55 bp, Artificial
  Synthetic oligonucleotide
catccgaggcacacttccgattccgtcagattcgtcaggggcgtgctcagtctga

SEQ ID NO: 14434 - DNA, 55 bp, Artificial
  Synthetic oligonucleotide
cgcactcgtatccaagacaacccggcataagtgactcatccactctagtccgaga

SEQ ID NO: 14435 - DNA, 56 bp, Artificial
  Synthetic oligonucleotide
tggacggaagtgtcaaattcgatcgcagatgtttctacgacagttgatacagtatc

SEQ ID NO: 14436 - DNA, 54 bp, Artificial
  Synthetic oligonucleotide
gcgaggtttagttggggagggccaacggcatttttccgcgagattcgtctcata

SEQ ID NO: 14437 - DNA, 55 bp, Artificial
  Synthetic oligonucleotide
cgacgtgcttaccgacaggagatatgtttcgccccaatcctcgcatagcttcaat

SEQ ID NO: 14438 - DNA, 56 bp, Artificial
  Synthetic oligonucleotide
acggatggtggcaggagtcgttgggcatttaatgtttacggcaggcccacgattta

SEQ ID NO: 14439 - DNA, 58 bp, Artificial
  Synthetic oligonucleotide
acgtatgaggtggcaagattcgaggcaaatatgggacaactacgagcggcgttacgga

SEQ ID NO: 14440 - DNA, 50 bp, Artificial
  Synthetic oligonucleotide
gggaagagcagaggggaacgagtgaaagacgcgaaggaattggtgtggat

SEQ ID NO: 14441 - DNA, 54 bp, Artificial
  Synthetic oligonucleotide
taatggaatttagtacctttaaacagatggtgggatcaacacgtttattggata

SEQ ID NO: 14442 - DNA, 51 bp, Artificial
  Synthetic oligonucleotide
cgagcggaacctcgaatgagtttcaagagcgaggctttgatcacgtggatc

SEQ ID NO: 14443 - DNA, 59 bp, Artificial
  Synthetic oligonucleotide
tgactaagtgcatcattccgtttggcaaagaggtgggtcgtgtacctcactctagattt

SEQ ID NO: 14444 - DNA, 52 bp, Artificial
  Synthetic oligonucleotide
ctcgatgacctttacgccaatacgcaggttgtttcaatcacctctgctgctc

SEQ ID NO: 14445 - DNA, 60 bp, Artificial
  Synthetic oligonucleotide
gtcaaatcggctcaatcatgtagtctagacatgtatctgagacaccacacctgcattaat

SEQ ID NO: 14446 - DNA, 60 bp, Artificial
  Synthetic oligonucleotide
ccagactgttattgatgacttgactcagatgaatggtaagcaagcacgagagataacaga

SEQ ID NO: 14447 - DNA, 60 bp, Artificial
  Synthetic oligonucleotide
ctgacctgatagacttctccgttccgactgatgaactgtaaatgacacgtgatgcagtgt

SEQ ID NO: 14448 - DNA, 56 bp, Artificial
  Synthetic oligonucleotide
gagtgttgaggaggactatgtcgttgggcagcgtgtgtttttcgaagtgccatacg

SEQ ID NO: 14449 - DNA, 55 bp, Artificial
  Synthetic oligonucleotide
ggggttgcaaactatccccgatacagactagacacattgacgttgaaatggcagg

SEQ ID NO: 14450 - DNA, 58 bp, Artificial
  Synthetic oligonucleotide
aatcgatggagttgaacctattgttcaggctcgtaaccaaccactgctggcacgctta

SEQ ID NO: 14451 - DNA, 57 bp, Artificial
  Synthetic oligonucleotide
gcgcatgcattagcgtcgcaccattacactagaatcaaccctaatactaggcgtatc

SEQ ID NO: 14452 - DNA, 51 bp, Artificial
  Synthetic oligonucleotide
gccaggatggaagctgacgtatgttggatataacggaagtgacacaagagg

SEQ ID NO: 14453 - DNA, 60 bp, Artificial
  Synthetic oligonucleotide
tatcacgagaaaccaataatctatatggtagggtcagcaccttcgtattggatatacgat

SEQ ID NO: 14454 - DNA, 60 bp, Artificial
  Synthetic oligonucleotide
gctcgcgcgtgctttcaagatatcggatgtctacgcacctctcatttcatccacgacgtc

SEQ ID NO: 14455 - DNA, 60 bp, Artificial
  Synthetic oligonucleotide
taggagaggctgatccggtatctacgtcggctgaaattggatggcatatccctcgtgaac

SEQ ID NO: 14456 - DNA, 60 bp, Artificial
  Synthetic oligonucleotide
acggcgaagtatgaaatgaggctttcgtgcggccatagcactggacggggggctgcatac

SEQ ID NO: 14457 - DNA, 58 bp, Artificial
  Synthetic oligonucleotide
agtggaattaggactgctatgatgaaacacagtacgctaagatatgaagggcatacgc

SEQ ID NO: 14458 - DNA, 56 bp, Artificial
  Synthetic oligonucleotide
gagtcacgtgtggctgatagacttgcggaatatatttcagctgagaggttacgttt

SEQ ID NO: 14459 - DNA, 55 bp, Artificial
  Synthetic oligonucleotide
caaaccgaacgattgtcagcacgcatggttcagaatcaatttgtttagcgtcacc

SEQ ID NO: 14460 - DNA, 55 bp, Artificial
  Synthetic oligonucleotide
accaattacccgattttgccgttggtcagcctcatgtacgaattgtggattggcg

SEQ ID NO: 14461 - DNA, 60 bp, Artificial
  Synthetic oligonucleotide
tctcacgatgcggactcctactgctgtctaacgggggagggtatgcggcgctacacactt

SEQ ID NO: 14462 - DNA, 56 bp, Artificial
  Synthetic oligonucleotide
gcttatcacctggaatgctgaatcccggaggggtaccatggattgctgttggagat

SEQ ID NO: 14463 - DNA, 51 bp, Artificial
  Synthetic oligonucleotide
gtgattacacctactaggcagacgatgtatgtcgactcgatacaagcggcc

SEQ ID NO: 14464 - DNA, 60 bp, Artificial
  Synthetic oligonucleotide
tctgagagtggctcaaacgttgctgcctacgaacgttccgattggagaagtctcttgtcc

SEQ ID NO: 14465 - DNA, 52 bp, Artificial
  Synthetic oligonucleotide
cttggctgcgaatgattccaaaatcaatgaacacaccttttcaaatccaggt

SEQ ID NO: 14466 - DNA, 60 bp, Artificial
  Synthetic oligonucleotide
ggaattagccagctggttactaggacggacgatctcactagcagaacatcaactttggaa

SEQ ID NO: 14467 - DNA, 60 bp, Artificial
  Synthetic oligonucleotide
caaatgagaggtgttggattcgaaggatcaggtatgatagcaaagatcgacggcacgtat

SEQ ID NO: 14468 - DNA, 57 bp, Artificial
  Synthetic oligonucleotide
aattcaattcgtaaatggatcaagtcgcgttgacgcctttcgaatattaggagtcac

SEQ ID NO: 14469 - DNA, 60 bp, Artificial
  Synthetic oligonucleotide
tccaggagagcgagggatacaagctaagttgaaagagttagaggacgagcaacgcaatga

SEQ ID NO: 14470 - DNA, 57 bp, Artificial
  Synthetic oligonucleotide
tatgagagacattcttgaagttgttcgtggatctaaaaattcgtatgcttggcgtga

SEQ ID NO: 14471 - DNA, 60 bp, Artificial
  Synthetic oligonucleotide
atgagtttgcccgtagtctccatcgcctgatgccggttgtcaaggagcataagttagacg

SEQ ID NO: 14472 - DNA, 53 bp, Artificial
  Synthetic oligonucleotide
cacccgcgttgccaaagttgacgatatatctgtgctcatgcgtgatatcggcg

SEQ ID NO: 14473 - DNA, 60 bp, Artificial
  Synthetic oligonucleotide
agagtatagaccagatgacgtggttacaccagctgacattttaacacaagacaccgcgat

SEQ ID NO: 14474 - DNA, 60 bp, Artificial
  Synthetic oligonucleotide
agacattatcagactttattatgccgacagagtaagcactgtcagcggaataggagcaca

SEQ ID NO: 14475 - DNA, 60 bp, Artificial
  Synthetic oligonucleotide
taggagcacaagctgtctcacatctgagagcgcatattggtgacacaccaacgctcgctc

SEQ ID NO: 14476 - DNA, 60 bp, Artificial
  Synthetic oligonucleotide
catcaaatagtgctaactgtgaaggacagagtcggttcagtcgtatatgtgaccgtattt

SEQ ID NO: 14477 - DNA, 60 bp, Artificial
  Synthetic oligonucleotide
gaattgagtcgtgagtgtcgtaacatgagtcaatgatactagtcctgcctgttacagggt

SEQ ID NO: 14478 - DNA, 60 bp, Artificial
  Synthetic oligonucleotide
cgctgactctcagtacgaacagttgacatgcatgcctatgagctgtgtctttgagtagcc

SEQ ID NO: 14479 - DNA, 55 bp, Artificial
  Synthetic oligonucleotide
cagttgacatgcatgcctatgagctgtgtctttgagtagccgcgtcacagaggtt

SEQ ID NO: 14480 - DNA, 54 bp, Artificial
  Synthetic oligonucleotide
ttgagtagccgcgtcacagaggttagcactcaggctgtagtctcgcgtttcatc

SEQ ID NO: 14481 - DNA, 55 bp, Artificial
  Synthetic oligonucleotide
ggtggaggcgattcaatagctgaccccttaagtccgggtgagaacgacatggtgc

SEQ ID NO: 14482 - DNA, 54 bp, Artificial
  Synthetic oligonucleotide
cgactcggacgatctaggtgactcattggaccccactttcgagacccaaatcat

SEQ ID NO: 14483 - DNA, 60 bp, Artificial
  Synthetic oligonucleotide
ctactggatcattgctaccgcctgatgggcgctacgaccacgcctcagttcgctggcatc

SEQ ID NO: 14484 - DNA, 60 bp, Artificial
  Synthetic oligonucleotide
aagttgccctctcgagtccaatcccgcgcgtctatcgtagtcaatagtgccactgacctc

SEQ ID NO: 14485 - DNA, 60 bp, Artificial
  Synthetic oligonucleotide
tatgagtacgtaatagagttagctgaaccggagcaggatgagtggacgaatcatgacgtt

SEQ ID NO: 14486 - DNA, 60 bp, Artificial
  Synthetic oligonucleotide
tggaatggagtacctcctttgcgcttgttaaatggatcaggaagtaatgctgatgttaca

SEQ ID NO: 14487 - DNA, 60 bp, Artificial
  Synthetic oligonucleotide
cgatcaaagcggattgcgttgatttgttacgataccatatgtctcattactatgatttaa

SEQ ID NO: 14488 - DNA, 52 bp, Artificial
  Synthetic oligonucleotide
tcagaatatctcagggtagggaaaggttagaggtgattgagaggttcttccc

SEQ ID NO: 14489 - DNA, 60 bp, Artificial
  Synthetic oligonucleotide
gggcaggaagcaacccctgaggataaactccaggcctacatggatgcgtatatgaaccca

SEQ ID NO: 14490 - DNA, 55 bp, Artificial
  Synthetic oligonucleotide
cgaaacattttgagataaacgaggggtatgtcgagtcctggatacaatatttgcg

SEQ ID NO: 14491 - DNA, 60 bp, Artificial
  Synthetic oligonucleotide
agagcgatcctcgtatgggatacgcgcctcaggtccttaacgatggcacagtgggatggg

SEQ ID NO: 14492 - DNA, 56 bp, Artificial
  Synthetic oligonucleotide
ggactgagctaattactaattattcaccatctagggaagataatttgcaacgtgtc

SEQ ID NO: 14493 - DNA, 60 bp, Artificial
  Synthetic oligonucleotide
tgtatacgatgatgagctgcagatgcacatactacggggaccactgcacttccaaagacg

SEQ ID NO: 14494 - DNA, 55 bp, Artificial
  Synthetic oligonucleotide
gcagatgcacatactacggggaccactgcacttccaaagacgcgcaatcctgggg

SEQ ID NO: 14495 - DNA, 60 bp, Artificial
  Synthetic oligonucleotide
gataaatctccatgactctattagtgatcaccgagcagaccatacattcactgtgtctcg

SEQ ID NO: 14496 - DNA, 51 bp, Artificial
  Synthetic oligonucleotide
gtgtctagtatttggcgtcagtgtgtagcagcatgcctagcgttcgagcct

SEQ ID NO: 14497 - DNA, 60 bp, Artificial
  Synthetic oligonucleotide
aagaggaattcatagcgttcctaacatcatcgagctcaggcaaagacttcgaagacgcag

SEQ ID NO: 14498 - DNA, 54 bp, Artificial
  Synthetic oligonucleotide
gtgaggatactcaatacgttaagaattgaagtaatagggtcggaatatgattcc

SEQ ID NO: 14499 - DNA, 60 bp, Artificial
  Synthetic oligonucleotide
atatcgcatagagcatctgagcggttaaagaatgccggagtagagttgcctgatagcgtg

SEQ ID NO: 14500 - DNA, 52 bp, Artificial
  Synthetic oligonucleotide
tagaaacatgaatacctatgcagagaggttacctcgagatatagaggtgtat

SEQ ID NO: 14501 - DNA, 60 bp, Artificial
  Synthetic oligonucleotide
tttagtcgtcaacgaccaaattgggttagagatgctcagcgctggggatggagagttgct

SEQ ID NO: 14502 - DNA, 57 bp, Artificial
  Synthetic oligonucleotide
gtgggaacgtttcatcgcaagacaagttggtgaggagctaccacctctatacagaac

SEQ ID NO: 14503 - DNA, 60 bp, Artificial
  Synthetic oligonucleotide
cgtgagatctaacgaacgtggagaatctgagccacattttactgatgtggaagcgataag

SEQ ID NO: 14504 - DNA, 60 bp, Artificial
  Synthetic oligonucleotide
atccgtgaactacgcacaatttctagtcaatcaactgtctacggatatgacctcacagtg

SEQ ID NO: 14505 - DNA, 58 bp, Artificial
  Synthetic oligonucleotide
tatactgattaacgctactattgctgatgtgccatatgatatgcaaggaaaatttgtg

SEQ ID NO: 14506 - DNA, 52 bp, Artificial
  Synthetic oligonucleotide
gtcgtagcattccgagaatgtcatgattacgtagttcgtatagtcaaattat

SEQ ID NO: 14507 - DNA, 60 bp, Artificial
  Synthetic oligonucleotide
acacgaaatcgctccttcccgcatgggattaacctacgccatgacatcacatatgatcag

SEQ ID NO: 14508 - DNA, 60 bp, Artificial
  Synthetic oligonucleotide
tgttcataagagaatcactagtcgcatgtcagctagccatagtgaatacaatagtgtatc

SEQ ID NO: 14509 - DNA, 55 bp, Artificial
  Synthetic oligonucleotide
gtcgcatgtcagctagccatagtgaatacaatagtgtatccagcgtttggaatgc

SEQ ID NO: 14510 - DNA, 60 bp, Artificial
  Synthetic oligonucleotide
gttgactataagagatcaatccagcgcggaatactactgttatctaatagacttggtcaa

SEQ ID NO: 14511 - DNA, 53 bp, Artificial
  Synthetic oligonucleotide
cacttttgaggagggggtagtctatcttcagtatagatggtggactccttatg

SEQ ID NO: 14512 - DNA, 55 bp, Artificial
  Synthetic oligonucleotide
ccagcgcggaatactactgttatctaatagacttggtcaactggttgacttgacc

SEQ ID NO: 14513 - DNA, 54 bp, Artificial
  Synthetic oligonucleotide
gtcctctcgtctatgtggagacgtggcctaatatgttatcgggctccttggtca

SEQ ID NO: 14514 - DNA, 60 bp, Artificial
  Synthetic oligonucleotide
cgcggatgacgctctatacaatcaaaaccctgagtatgctaggcgtctcaaaccttttca

SEQ ID NO: 14515 - DNA, 52 bp, Artificial
  Synthetic oligonucleotide
gcaatgactcccagacatcgggcaatttatccagaaggatggatgttgaggt

SEQ ID NO: 14516 - DNA, 52 bp, Artificial
  Synthetic oligonucleotide
gaccgatcgtcccatctcgcaaacacctagtactcaagatgaacaccgctcg

SEQ ID NO: 14517 - DNA, 60 bp, Artificial
  Synthetic oligonucleotide
acgcgcgtatcagtggacagatcatgaaagacgattatgagaggtatccccattacatgg

SEQ ID NO: 14518 - DNA, 55 bp, Artificial
  Synthetic oligonucleotide
tgggaacacctgctacattgaacgccaatatgacgcgaacccgagacagccacaa

SEQ ID NO: 14519 - DNA, 60 bp, Artificial
  Synthetic oligonucleotide
tacgatctctgagcagattcggaaagaaagtaggtagcgcgctcacgtctaacacggcaa

SEQ ID NO: 14520 - DNA, 50 bp, Artificial
  Synthetic oligonucleotide
gaggatgcgttcgaagaattaatacgtagctcaagcgcaaatgtgaagtt

SEQ ID NO: 14521 - DNA, 60 bp, Artificial
  Synthetic oligonucleotide
tatttccgaatgcgcagccgtttgaacatcatgctacagtaggactcacgcttagaattg

SEQ ID NO: 14522 - DNA, 55 bp, Artificial
  Synthetic oligonucleotide
tgatgtacgcgcatcggagctaactgggtgttcgccattcaagacggtgaaaatt

SEQ ID NO: 14523 - DNA, 52 bp, Artificial
  Synthetic oligonucleotide
tgacgaaggcacaacgcagcgctctactcaggttattctgctttgtgtgcta

SEQ ID NO: 14524 - DNA, 60 bp, Artificial
  Synthetic oligonucleotide
cccattcttagcacgtgatccaagatttaagcaccgagtgtaccagcaattgagtgccgt

SEQ ID NO: 14525 - DNA, 60 bp, Artificial
  Synthetic oligonucleotide
ttccgcacggattaggccgggtaatcgcagcttattcgtcatgccgacgagtccagactg

SEQ ID NO: 14526 - DNA, 53 bp, Artificial
  Synthetic oligonucleotide
acggttcaagcgggataaacttgaaacatgggctagggaagacgatcaataca

SEQ ID NO: 14527 - DNA, 51 bp, Artificial
  Synthetic oligonucleotide
gaatccccgcatgtggcgggtgagtcgatcttaatcgaagatgtgtgtcca

SEQ ID NO: 14528 - DNA, 60 bp, Artificial
  Synthetic oligonucleotide
atatctgattacagcggcgaagactcaaatggacaccaacttcaagcaacaattaagata

SEQ ID NO: 14529 - DNA, 60 bp, Artificial
  Synthetic oligonucleotide
gtgcgagggaatgaactgaagagggcatcagatggtaagaattcatgcctcgctacaatt

SEQ ID NO: 14530 - DNA, 59 bp, Artificial
  Synthetic oligonucleotide
tccttcggtagtgatggttggtttgctttcgcactgttgggaggtctagataggtctgc

SEQ ID NO: 14531 - DNA, 55 bp, Artificial
  Synthetic oligonucleotide
caaaacgtaactgtaaatccaggtccgttcgcccaaaccaggtatgctccagtca

SEQ ID NO: 14532 - DNA, 60 bp, Artificial
  Synthetic oligonucleotide
acatcagtttgcaccctttcaagcgatatgagtgtggccttcaagataaatgggactaag

SEQ ID NO: 14533 - DNA, 60 bp, Artificial
  Synthetic oligonucleotide
agtctgcaccctttcaagcgatatgagtgtggccttcaagataaatggaactaagacgga

SEQ ID NO: 14534 - DNA, 60 bp, Artificial
  Synthetic oligonucleotide
tttcaaagacgagctatactaggtgcgctaaagtttgggtgcaagatacttggagatcga

SEQ ID NO: 14535 - DNA, 60 bp, Artificial
  Synthetic oligonucleotide
gacaaagcgatgtcaaatacaacgggtgctacgcaaacacaaaaagcggagaaggctgca

SEQ ID NO: 14536 - DNA, 60 bp, Artificial
  Synthetic oligonucleotide
tctatattatctaagcgtgcggaccctgttgtagaattaatgttgcatgcgtattattat

SEQ ID NO: 14537 - DNA, 55 bp, Artificial
  Synthetic oligonucleotide
cgtgcggaccctgttgtagaattaatgttgcatgcgtattattatatgaatcagg

SEQ ID NO: 14538 - DNA, 60 bp, Artificial
  Synthetic oligonucleotide
gcgtatatcgaccagggatattctccagactcgtgatttacactcactatgtatgccgac

SEQ ID NO: 14539 - DNA, 55 bp, Artificial
  Synthetic oligonucleotide
ggatattctccagactcgtgatttacactcactatgtatgccgactcccgacgcg

SEQ ID NO: 14540 - DNA, 50 bp, Artificial
  Synthetic oligonucleotide
ttcagtgaacgtgtttttaggatggcctcgtcctttgcgactattgacgc

SEQ ID NO: 14541 - DNA, 60 bp, Artificial
  Synthetic oligonucleotide
caaatacgtatagtagcgctatacatgcgaggcgtatgatcaggtcgcgggcagtacacc

SEQ ID NO: 14542 - DNA, 59 bp, Artificial
  Synthetic oligonucleotide
tgctctaggaataccttctcaaattgatacaccttatagtagtgaccatccaactgatg

SEQ ID NO: 14543 - DNA, 60 bp, Artificial
  Synthetic oligonucleotide
ctatattcgcaagaactcggaatgcatcattatagcttacccgtgtttcaatcaatgtta

SEQ ID NO: 14544 - DNA, 58 bp, Artificial
  Synthetic oligonucleotide
gcgcagcgttaattttagcggcagagttacacctcccagctgtttgtgcgtcagatta

SEQ ID NO: 14545 - DNA, 60 bp, Artificial
  Synthetic oligonucleotide
atatttcggggcatcagctggtcattcgggcgcggatcaacccttagtaattgagccatg

SEQ ID NO: 14546 - DNA, 60 bp, Artificial
  Synthetic oligonucleotide
caggctgcacgtgtcgggatatcagggctatgtgcgaacgtcggcaatgcacgtaaatcc

SEQ ID NO: 14547 - DNA, 60 bp, Artificial
  Synthetic oligonucleotide
tgtggacatgaagcagcgccgagtaaaacgatgataacgccgtactcggtagaaaagaca

SEQ ID NO: 14548 - DNA, 60 bp, Artificial
  Synthetic oligonucleotide
ccgcacttgctttctccactgaggacgtcaattccgcgatgataccgcaagtaacggctc

SEQ ID NO: 14549 - DNA, 60 bp, Artificial
  Synthetic oligonucleotide
caggcgagaattcgactctaattgcgaactcaatgcataacaaagcgattggaggtctta

SEQ ID NO: 14550 - DNA, 60 bp, Artificial
  Synthetic oligonucleotide
gcgtggtcagaagagcgagtgatggtcgctatgcgcgaagagccgggagtgatatcaact

SEQ ID NO: 14551 - DNA, 60 bp, Artificial
  Synthetic oligonucleotide
tatgtcaagcttcagccaatagaccttgggagtatgatggtacgtatgcgaggatgactc

SEQ ID NO: 14552 - DNA, 54 bp, Artificial
  Synthetic oligonucleotide
cggatcaattgttacggcgttaccccattgcgtctcaccatgggcgactggtta

SEQ ID NO: 14553 - DNA, 50 bp, Artificial
  Synthetic oligonucleotide
tggactccttatctaaagccacgacgctaccgcttcgcgcaaaattttcg

SEQ ID NO: 14554 - DNA, 55 bp, Artificial
  Synthetic oligonucleotide
ggctactaccaatgatcatagtacgggagggattggaccgatcggagagatggga

SEQ ID NO: 14555 - DNA, 51 bp, Artificial
  Synthetic oligonucleotide
ggcgcaacgtagcgcgttgcttagactcttctgcttcgtatgttacggata

SEQ ID NO: 14556 - DNA, 55 bp, Artificial
  Synthetic oligonucleotide
gacgaaatggttagggaatcgcaaagaaacggaattgcaccgcaatcggattcac

SEQ ID NO: 14557 - DNA, 60 bp, Artificial
  Synthetic oligonucleotide
gcatgatgaccatttactacaagattcggagctagcgggcctactatccatgtcgtcagc

SEQ ID NO: 14558 - DNA, 55 bp, Artificial
  Synthetic oligonucleotide
ctacaagattcggagctagcgggcctactatccatgtcgtcagcatcaaatggtg

SEQ ID NO: 14559 - DNA, 54 bp, Artificial
  Synthetic oligonucleotide
tgtcgtcagcatcaaatggtgaatctagacaattaaagtttggtcgaaagacta

SEQ ID NO: 14560 - DNA, 54 bp, Artificial
  Synthetic oligonucleotide
tatgttgggtcgaaaatatattctcaagataagtatcgcatacttgaatcatac

SEQ ID NO: 14561 - DNA, 56 bp, Artificial
  Synthetic oligonucleotide
ccacctaatgacgattatcagacgccgatagctaattctgtgacagtaagacagga

SEQ ID NO: 14562 - DNA, 60 bp, Artificial
  Synthetic oligonucleotide
gcagtataggcaagccaccgtgaataagaacaatgctcaggattcgtacgagcttaacgt

SEQ ID NO: 14563 - DNA, 59 bp, Artificial
  Synthetic oligonucleotide
gtacctcgtgcgacagccaacgatgtccgtgctccaggagtactcacaagttccagaca

SEQ ID NO: 14564 - DNA, 60 bp, Artificial
  Synthetic oligonucleotide
aactggcgtgaatggttacgtttcagctgggcgttcgcatgctacgcgtcacgaggtgcg

SEQ ID NO: 14565 - DNA, 60 bp, Artificial
  Synthetic oligonucleotide
tgaccaaaacggagctggacgcagtagtgttatattgttcgcaaatagtgatgttgagag

SEQ ID NO: 14566 - DNA, 56 bp, Artificial
  Synthetic oligonucleotide
ccacccccatcggcgatcgtgtacatgtttaagtcactgaaccggaccatcaggcg

SEQ ID NO: 14567 - DNA, 60 bp, Artificial
  Synthetic oligonucleotide
cgttggaggtgttgacatgagagcgggacgtataatcgcgtgggatgggcaagccgcact

SEQ ID NO: 14568 - DNA, 60 bp, Artificial
  Synthetic oligonucleotide
gtgttgacatgagggcgggacgcataatcgcgtgggatgggcaagccgcactacaaattc

SEQ ID NO: 14569 - DNA, 55 bp, Artificial
  Synthetic oligonucleotide
tctatcaagcgctatgcctcaagcgagcggtggatttgatcgtatgattgtcacg

SEQ ID NO: 14570 - DNA, 55 bp, Artificial
  Synthetic oligonucleotide
cttgttaccgcaactggtgatttacgtaattctgttcgaagtgggcagcgttcac

SEQ ID NO: 14571 - DNA, 60 bp, Artificial
  Synthetic oligonucleotide
acaatcgatgtcatgcctgacatatatgacttcgttaaacccattggcgctgtgctgcct

SEQ ID NO: 14572 - DNA, 51 bp, Artificial
  Synthetic oligonucleotide
cagatgagcccggaacgataactctggcagacgaaacgccacctactatca

SEQ ID NO: 14573 - DNA, 53 bp, Artificial
  Synthetic oligonucleotide
atgatcctaaccaaggctggaatggtacaccggttcacggtagtcgtgagatc

SEQ ID NO: 14574 - DNA, 60 bp, Artificial
  Synthetic oligonucleotide
cgacttacgctgtcactattgagcgtggaaatccaaatttgatcgtaacgcagtctctga

SEQ ID NO: 14575 - DNA, 60 bp, Artificial
  Synthetic oligonucleotide
agcctaagcggagcatgccatgctacaaagtcgtattgctaccttcaaattgtcgcttat

SEQ ID NO: 14576 - DNA, 60 bp, Artificial
  Synthetic oligonucleotide
caccatttgcatctttcaagtgttacagtgccgtccctcatgaaatgccacgacctccaa

SEQ ID NO: 14577 - DNA, 60 bp, Artificial
  Synthetic oligonucleotide
ggcaaaatcgagcgaacaatcctttatcctcgtgagctatggacagtaccggccgagcat

SEQ ID NO: 14578 - DNA, 60 bp, Artificial
  Synthetic oligonucleotide
gacagaaatatggatgctttagctgaacatctcttgtttgagcacgacgttgtgaatgcg

SEQ ID NO: 14579 - DNA, 60 bp, Artificial
  Synthetic oligonucleotide
tcgttttggaggcaaatgtgatggaaatactgggcattgcaattaacaggtataatggat

SEQ ID NO: 14580 - DNA, 60 bp, Artificial
  Synthetic oligonucleotide
gtccgcttggatccgaatggagatcagccgcctctatgagcgcccggatggcatagctct

SEQ ID NO: 14581 - DNA, 50 bp, Artificial
  Synthetic oligonucleotide
aagtgaaaagtatcaacgtatagtgaacattggaccaagaaatgagtcaa

SEQ ID NO: 14582 - DNA, 50 bp, Artificial
  Synthetic oligonucleotide
gcaaaagaattcgctttattgcaagatgatctaactgtactgcgttatgc

SEQ ID NO: 14583 - DNA, 60 bp, Artificial
  Synthetic oligonucleotide
gcttcgcaggtgagaggttaactcatgcaccaggtggtaacagaggtggtttgagaactg

SEQ ID NO: 14584 - DNA, 59 bp, Artificial
  Synthetic oligonucleotide
gtgagttcgctcaaagtcaatacgcaccagtttcgtggggatcaggagagacgttaagc

SEQ ID NO: 14585 - DNA, 53 bp, Artificial
  Synthetic oligonucleotide
tcgcaacaagagatgtgtacagagtatataaggagaggattgccagccataca

SEQ ID NO: 14586 - DNA, 60 bp, Artificial
  Synthetic oligonucleotide
ggtcgctgaatgcagaattaaatcaagtgcaatgtgtaggaggtcattactcgttcgcgt

SEQ ID NO: 14587 - DNA, 50 bp, Artificial
  Synthetic oligonucleotide
gctaccacaaattataactgaagcgtcggagaaatttataccgaaccgtg

SEQ ID NO: 14588 - DNA, 58 bp, Artificial
  Synthetic oligonucleotide
caagggagaacgtagcagttatacaggttggtggcccagatgtacttgacataactgc

SEQ ID NO: 14589 - DNA, 54 bp, Artificial
  Synthetic oligonucleotide
cctttcacaacagaagctgcgaatgagatcgcacgtgtaactggagagacgtca

SEQ ID NO: 14590 - DNA, 55 bp, Artificial
  Synthetic oligonucleotide
aaacgctggccggcgtgacagttaacgtcggaggtgttgacatgagggcgggacg

SEQ ID NO: 14591 - DNA, 55 bp, Artificial
  Synthetic oligonucleotide
tgaatacgcagacgttaggaattgggtgtctaactactgatacgagtacgtttga

SEQ ID NO: 14592 - DNA, 60 bp, Artificial
  Synthetic oligonucleotide
gctagtgattactgacgttgtagatggagtcaatcataaattgaacgtgacgacaaatac

SEQ ID NO: 14593 - DNA, 57 bp, Artificial
  Synthetic oligonucleotide
tatgcctcccggttcgtgtaacggtgcgactgctgtatttggtaacgttcattgtca

SEQ ID NO: 14594 - DNA, 54 bp, Artificial
  Synthetic oligonucleotide
ttatctcaaccttgtagggtccacgtgcggctgattcgccggttcgctctctat

SEQ ID NO: 14595 - DNA, 60 bp, Artificial
  Synthetic oligonucleotide
ttgacgccgatctatgaacggctgaccaatctagaagcgtctacggagttattacatcgc

SEQ ID NO: 14596 - DNA, 60 bp, Artificial
  Synthetic oligonucleotide
cagctgcggggattaatgtgggaccaatatcaccagattacacacagcatatggcgacca

SEQ ID NO: 14597 - DNA, 58 bp, Artificial
  Synthetic oligonucleotide
gaacggtttagctattacagatctgcaggatcgtgttaaatcattggagtctaccgcg

SEQ ID NO: 14598 - DNA, 50 bp, Artificial
  Synthetic oligonucleotide
cgtcgttccctgtggacgtatcattcacccgcgattctgcgactcatgcg

SEQ ID NO: 14599 - DNA, 54 bp, Artificial
  Synthetic oligonucleotide
ctcttcgcgcgactgtggcgtccaagcatccctcctctgacgtctacaattaca

SEQ ID NO: 14600 - DNA, 50 bp, Artificial
  Synthetic oligonucleotide
atgtacgccaatgcggtatgccttaccttgcctaaaggctcatataagtc

SEQ ID NO: 14601 - DNA, 55 bp, Artificial
  Synthetic oligonucleotide
ttaacgccctctaccgagaggtcatgacccctgctcaacgctctcggttaccgct

SEQ ID NO: 14602 - DNA, 54 bp, Artificial
  Synthetic oligonucleotide
agcgcgtgctactgaatggtggtaacgtgtcctttactagtgggcttgagtgga

SEQ ID NO: 14603 - DNA, 55 bp, Artificial
  Synthetic oligonucleotide
ggtaattcgcagcaaacgctagccggcgttactgtgagcgttggtggcgtcgaca

SEQ ID NO: 14604 - DNA, 60 bp, Artificial
  Synthetic oligonucleotide
ctccggtatgtgcgaattggcagaacgactgagcatctgttggaccaatatgctgttgcg

SEQ ID NO: 14605 - DNA, 54 bp, Artificial
  Synthetic oligonucleotide
cacgtagtctcactcttccaaattgtcttgtgtccccgtctttgcattctcgtt

SEQ ID NO: 14606 - DNA, 60 bp, Artificial
  Synthetic oligonucleotide
tcgcatgcgctacaggaatggagccagctgaatgtgaatctcgtctgaggggacatgctc

SEQ ID NO: 14607 - DNA, 60 bp, Artificial
  Synthetic oligonucleotide
tagcagatgtgtatactgttcttcgacccgaattcgcaatacacggcgtaaatccaatgc

SEQ ID NO: 14608 - DNA, 60 bp, Artificial
  Synthetic oligonucleotide
gtgctattgcacgcgccgcctatgtgtagtccactttgcacgggtgtgggttacatatgc

SEQ ID NO: 14609 - DNA, 60 bp, Artificial
  Synthetic oligonucleotide
tgcacgcgccgcctatgtgtagtccacttagcacgggtgtgggttacatatgcggtgtgt

SEQ ID NO: 14610 - DNA, 60 bp, Artificial
  Synthetic oligonucleotide
gcgttgcaaggtgccgcatacagcattaaatcaagctacgagctagtggcgaactccgaa

SEQ ID NO: 14611 - DNA, 55 bp, Artificial
  Synthetic oligonucleotide
cttcgacccgaattcgcaatacacggcgtaaatccaatgcccggcccgctaacac

SEQ ID NO: 14612 - DNA, 52 bp, Artificial
  Synthetic oligonucleotide
tcggtataattactcacgtaagcatatttgtggaattgtatccgtagcaatc

SEQ ID NO: 14613 - DNA, 57 bp, Artificial
  Synthetic oligonucleotide
tatcgatatatcgaatacgtcgtcaaaagcacttcacccccctcataatcagcccgg

SEQ ID NO: 14614 - DNA, 60 bp, Artificial
  Synthetic oligonucleotide
gcgactaggatggttaaacatctcatgcgtctcacatctcaattgtatggagtcacttgt

SEQ ID NO: 14615 - DNA, 55 bp, Artificial
  Synthetic oligonucleotide
tctcatgcgtctcacatctcaattgtatggagtcacttgtaccacaacacttgga

SEQ ID NO: 14616 - DNA, 60 bp, Artificial
  Synthetic oligonucleotide
gagagtgtactttcaacaatcggtcaaattgcgtgcgcttggattggttcagtcaactct

SEQ ID NO: 14617 - DNA, 52 bp, Artificial
  Synthetic oligonucleotide
ttggatagaacggcgctcgccagggttagagattgtgtgcactactcaattg

SEQ ID NO: 14618 - DNA, 51 bp, Artificial
  Synthetic oligonucleotide
attctgattgtgttggagacgcactgtttagagcgatgattgctctatcct

SEQ ID NO: 14619 - DNA, 60 bp, Artificial
  Synthetic oligonucleotide
gcgtccgaagcattagctcgatatattggaagcatccctcacagtcctcaggtcggtttg

SEQ ID NO: 14620 - DNA, 60 bp, Artificial
  Synthetic oligonucleotide
tgcaagagcctctggagatcagattttcgacgttgtcactccaaaccaagtgcaagtata

SEQ ID NO: 14621 - DNA, 60 bp, Artificial
  Synthetic oligonucleotide
gacgttccatctcatatgtcgttgcaggaagcgtgggaagagataggcgcacactccaga

SEQ ID NO: 14622 - DNA, 60 bp, Artificial
  Synthetic oligonucleotide
tgattccactatggtgcgttgtgatagggcagtgggtaagtccctcagagaataagcgaa

SEQ ID NO: 14623 - DNA, 55 bp, Artificial
  Synthetic oligonucleotide
acacctgtgctaggagtcggttctcgcattaccgccttagatcgtactattgatg

SEQ ID NO: 14624 - DNA, 60 bp, Artificial
  Synthetic oligonucleotide
acagccgatagaagctcgagccgcacgatcagttggcatccgcgtacaagcgatgacacc

SEQ ID NO: 14625 - DNA, 60 bp, Artificial
  Synthetic oligonucleotide
atctgccccactgttagctagtctcacgccaaacgaatcttctcgtgtgctagcatggta

SEQ ID NO: 14626 - DNA, 51 bp, Artificial
  Synthetic oligonucleotide
tagcatggtatatcccttcctcgtactggagcgacaatggctggtgcactt

SEQ ID NO: 14627 - DNA, 60 bp, Artificial
  Synthetic oligonucleotide
gtgcgactataaacgtagacacatctctagtggagttgggcgctgatatccgtgcagtta

SEQ ID NO: 14628 - DNA, 52 bp, Artificial
  Synthetic oligonucleotide
ctggctaagttattgtcttctctcgagcttgataatcccaggattgtctagc

SEQ ID NO: 14629 - DNA, 58 bp, Artificial
  Synthetic oligonucleotide
ggaggacagtacaaatcctgggacagaacatcaacaagggactgcaactgttgaatga

SEQ ID NO: 14630 - DNA, 60 bp, Artificial
  Synthetic oligonucleotide
aggcggagttaaggagtggctaaccctcagatgctgcatataagcaggctgctttctgct

SEQ ID NO: 14631 - DNA, 60 bp, Artificial
  Synthetic oligonucleotide
tgaggcaactgtgtaaactccttaggggagccaaagcattaacagacatagtaccactga

SEQ ID NO: 14632 - DNA, 60 bp, Artificial
  Synthetic oligonucleotide
ccctgattggcataactacacaccagggccagggatcagatacccactgtgttttggatg

SEQ ID NO: 14633 - DNA, 60 bp, Artificial
  Synthetic oligonucleotide
tagtagctgccgcaggggcttctctgggagtcgcaaacgcgattcagcagtcttacacca

SEQ ID NO: 14634 - DNA, 60 bp, Artificial
  Synthetic oligonucleotide
gcttacagtagtgtgtgcccgtctgttgtgtgactctggtaactagagatccctcagacc

SEQ ID NO: 14635 - DNA, 60 bp, Artificial
  Synthetic oligonucleotide
cccgacgcgcaggactcaaaggtaagcagtgcactgtaattgattgagagagagtccagg

SEQ ID NO: 14636 - DNA, 55 bp, Artificial
  Synthetic oligonucleotide
ctgcagactgggatcttagacacccccctgtgggacctatgccccaaggagtgct

SEQ ID NO: 14637 - DNA, 57 bp, Artificial
  Synthetic oligonucleotide
tcaggactttaacctaccccccatagtggcaaaagagatagttgcacaatgtccaaa

SEQ ID NO: 14638 - DNA, 60 bp, Artificial
  Synthetic oligonucleotide
atggcttcatgacttaggacagcatatctatgacacctatggggacacttgggagggagt

SEQ ID NO: 14639 - DNA, 51 bp, Artificial
  Synthetic oligonucleotide
tggtatcaactcaattgctattaaatggcagcctagcagaagataggatag

SEQ ID NO: 14640 - DNA, 60 bp, Artificial
  Synthetic oligonucleotide
aatgcatgaggatataatcagtttatgggatgaaagcctaaagccatgtgtaaagttgac

SEQ ID NO: 14641 - DNA, 55 bp, Artificial
  Synthetic oligonucleotide
gggactatggcatgtataggcgcaaagcggggtttcggttgtacgcgattaggag

SEQ ID NO: 14642 - DNA, 60 bp, Artificial
  Synthetic oligonucleotide
ggaaagccatattaggacacatagttattcctaggtgtgactatcaagcaggacataata

SEQ ID NO: 14643 - DNA, 60 bp, Artificial
  Synthetic oligonucleotide
gactcctccgacgcacgggctcggctcagcggagtgcacccgctgagaggcgagaggaag

SEQ ID NO: 14644 - DNA, 50 bp, Artificial
  Synthetic oligonucleotide
tatcaaatgcggctcggcaggcatggaaaaaacttcctagttccagtacc

SEQ ID NO: 14645 - DNA, 60 bp, Artificial
  Synthetic oligonucleotide
ccctcagatgctgcatataagcagctgcttttcgcctgtactgggtctctctaggtagac

SEQ ID NO: 14646 - DNA, 60 bp, Artificial
  Synthetic oligonucleotide
taacatctatcggagatggatccaattgggcctacaaaaatgtgttagaatgtacaatcc

SEQ ID NO: 14647 - DNA, 54 bp, Artificial
  Synthetic oligonucleotide
gctcgcgcttttgtgaagctcagggccaaggctatagtgaaggagagttcatga

SEQ ID NO: 14648 - DNA, 60 bp, Artificial
  Synthetic oligonucleotide
gacagttccctagcacgagtgcaccaagcccgagtgctgcatccggagtactacaaagac

SEQ ID NO: 14649 - DNA, 60 bp, Artificial
  Synthetic oligonucleotide
ggaccaggggtcagatttccactgacctttggatggtgcttcaagtcagtgccagtcgat

SEQ ID NO: 14650 - DNA, 55 bp, Artificial
  Synthetic oligonucleotide
gcagtaaggtcagccaaaattaccctatagtgcagaacctccaggggcaaatggt

SEQ ID NO: 14651 - DNA, 60 bp, Artificial
  Synthetic oligonucleotide
cagtaggactgggaatgctgttctttggggtactaagtgcagcaggtagcactatgggcg

SEQ ID NO: 14652 - DNA, 51 bp, Artificial
  Synthetic oligonucleotide
gtgttttggatggtgcttcaagctagtaccagttgacccaacagaagtaga

SEQ ID NO: 14653 - DNA, 59 bp, Artificial
  Synthetic oligonucleotide
atattgctgacactgcgggactttccagactgctgacactgtggggactttccagcgtg

SEQ ID NO: 14654 - DNA, 60 bp, Artificial
  Synthetic oligonucleotide
agactacatgggttccagagatagaggcggtgcacacacctcacctgttgagacaatggt

SEQ ID NO: 14655 - DNA, 60 bp, Artificial
  Synthetic oligonucleotide
tgtcctattccaatttgagaatgacaccagacaaattcacaattccaatattgatactgt

SEQ ID NO: 14656 - DNA, 60 bp, Artificial
  Synthetic oligonucleotide
tgtcacaccagggtgccatggaataactcttgggctaatcatacccagccagaatgggat

SEQ ID NO: 14657 - DNA, 60 bp, Artificial
  Synthetic oligonucleotide
tggagtggggtcttatccctggatggctgatgtacacagaaggccctggtgttcgctacc

SEQ ID NO: 14658 - DNA, 50 bp, Artificial
  Synthetic oligonucleotide
tccctttttgtggatggggtatgagctccatccagacaaatggacagtac

SEQ ID NO: 14659 - DNA, 54 bp, Artificial
  Synthetic oligonucleotide
ataaactagtcagtgctggaatcaggaaagtactattcttggatggaatagaca

SEQ ID NO: 14660 - DNA, 60 bp, Artificial
  Synthetic oligonucleotide
gctcctgtaaaggcgcaggcgggtaccaagcagcgtgaggagcgagaggataagaggcct

SEQ ID NO: 14661 - DNA, 57 bp, Artificial
  Synthetic oligonucleotide
gataatctgtaatgcagaagggttgtgggtcacagtatattatggggtacctgtgtg

SEQ ID NO: 14662 - DNA, 51 bp, Artificial
  Synthetic oligonucleotide
ggaagattagtgaatggattcttaccactcatctgggacgatctgaggagt

SEQ ID NO: 14663 - DNA, 52 bp, Artificial
  Synthetic oligonucleotide
cagaagagttcgggtaccagtcagggctaccagaggaggagtggaaggctag

SEQ ID NO: 14664 - DNA, 60 bp, Artificial
  Synthetic oligonucleotide
atcgagaaatacctaaaggatcaggcacaactaaattcatggggatgtgctttcagacag

SEQ ID NO: 14665 - DNA, 55 bp, Artificial
  Synthetic oligonucleotide
tgggatgaaagcctcaagccatgtgtaaagctaacccctctctgtgttactttag

SEQ ID NO: 14666 - DNA, 55 bp, Artificial
  Synthetic oligonucleotide
cagcagagatccactttggaaaagaccagcaaagctcctctggaaaggtgaaggg

SEQ ID NO: 14667 - DNA, 55 bp, Artificial
  Synthetic oligonucleotide
gcccgaacaggggcttgaaagcgaaagtaagaccagaggagatctctcgacgcag

SEQ ID NO: 14668 - DNA, 55 bp, Artificial
  Synthetic oligonucleotide
gcgcccgaaaggggactcgaaagcgaaagtaagaccagaggagatctctcgacgc

SEQ ID NO: 14669 - DNA, 60 bp, Artificial
  Synthetic oligonucleotide
tttgacagtgccttagcacgaaaacacatagcccgagaactgcatccagaatactataaa

SEQ ID NO: 14670 - DNA, 60 bp, Artificial
  Synthetic oligonucleotide
gtccatgcaaaaacgtcagcacagtacagtgtacacatgggattaggccagtagtgtcaa

SEQ ID NO: 14671 - DNA, 55 bp, Artificial
  Synthetic oligonucleotide
cgtcagcacagtacagtgtacacatgggattaagccagtagtgtcaactcaattg

SEQ ID NO: 14672 - DNA, 60 bp, Artificial
  Synthetic oligonucleotide
ctatgcaacagacataataggggatataagacaagcacattgtaatgttactagaacagc

SEQ ID NO: 14673 - DNA, 60 bp, Artificial
  Synthetic oligonucleotide
ggacacatagttattcctaggtgtaactatcaagcaggacataataaggtaggatctcta

SEQ ID NO: 14674 - DNA, 52 bp, Artificial
  Synthetic oligonucleotide
cagaaatagtacctatgttcatagccctatcagaaggatgcctcccatatga

SEQ ID NO: 14675 - DNA, 56 bp, Artificial
  Synthetic oligonucleotide
acccatctagaaggaaaggttatcatagtagcagtccatgtggccagtggatatct

SEQ ID NO: 14676 - DNA, 60 bp, Artificial
  Synthetic oligonucleotide
gctgccgctgtgagaaaggtgctgtacggagaaagaatagtagcgtgttacagcccctgg

SEQ ID NO: 14677 - DNA, 55 bp, Artificial
  Synthetic oligonucleotide
aggcagggttatcgccctcttccttatgtcttaaagggagactatctccgacctc

SEQ ID NO: 14678 - DNA, 57 bp, Artificial
  Synthetic oligonucleotide
ccatattaggacaaacagttaggcctagttgtgaatatccagcagggcataataagg

SEQ ID NO: 14679 - DNA, 60 bp, Artificial
  Synthetic oligonucleotide
tagacgacttacttattgcggctgatacacaagccgcatgcctgagtgccacccgagact

SEQ ID NO: 14680 - DNA, 51 bp, Artificial
  Synthetic oligonucleotide
ttccaggtctggcagaggtcctggggatactggcatgatgaacaagggatg

SEQ ID NO: 14681 - DNA, 60 bp, Artificial
  Synthetic oligonucleotide
gcatacccgcgtggaagaatgcatccattcccctcttttgtgcaaccagaaatagggata

SEQ ID NO: 14682 - DNA, 54 bp, Artificial
  Synthetic oligonucleotide
gtactcacgtgatgtggattgtgaaccagatagcaccacaaactcgagaaagtg

SEQ ID NO: 14683 - DNA, 52 bp, Artificial
  Synthetic oligonucleotide
gataagcactattgggatgatataaggtttagatattgtgcaccaccgggtt

SEQ ID NO: 14684 - DNA, 60 bp, Artificial
  Synthetic oligonucleotide
aagtgagtgcagttcggatcatggtacttagacagcagtaccaaggccttccaagctaag

SEQ ID NO: 14685 - DNA, 60 bp, Artificial
  Synthetic oligonucleotide
agatggggggcctgagaacaacgagactgagatcttcagacctggaggaggcgatatgag

SEQ ID NO: 14686 - DNA, 60 bp, Artificial
  Synthetic oligonucleotide
atctgtgggtctaccatacacaaggctacttccctgattggcagaactacacaccagggc

SEQ ID NO: 14687 - DNA, 53 bp, Artificial
  Synthetic oligonucleotide
atcacttagggtataacattagcagtaacccagagggagggatatgtaacttt

SEQ ID NO: 14688 - DNA, 51 bp, Artificial
  Synthetic oligonucleotide
cacatatggtgttgtagaaatgccacaatcgtatatggaggagcgagggga

SEQ ID NO: 14689 - DNA, 51 bp, Artificial
  Synthetic oligonucleotide
agcatgttactagtctgcagtgggaggtgtagcttaaccgcaaaccgcatc

SEQ ID NO: 14690 - DNA, 55 bp, Artificial
  Synthetic oligonucleotide
aaaggcatttcccagcagcaatagttgcccaagtcttgcaatactgtgcggactc

SEQ ID NO: 14691 - DNA, 60 bp, Artificial
  Synthetic oligonucleotide
gtcaatggaaacaagtatgccatactaatgtgccctggaattataatatcacgcccaatt

SEQ ID NO: 14692 - DNA, 60 bp, Artificial
  Synthetic oligonucleotide
ttcgactgctctcagctagggagcaattactggccgcctagtgatccggggctgacggct

SEQ ID NO: 14693 - DNA, 60 bp, Artificial
  Synthetic oligonucleotide
gcaggagccaccagtacccttcaggaacaaataggatggatgaccagtaatccacctatc

SEQ ID NO: 14694 - DNA, 58 bp, Artificial
  Synthetic oligonucleotide
cccgtctgttgtgtgactctggtaactagagatccctcagacccctttagtcagagtg

SEQ ID NO: 14695 - DNA, 57 bp, Artificial
  Synthetic oligonucleotide
cgaatgcggctcggcaggcatggaaaaaacttcctagctccagtactaagacagagg

SEQ ID NO: 14696 - DNA, 60 bp, Artificial
  Synthetic oligonucleotide
cacaaggatacttccctgattggcagaactacacaaaagggccagggatcagatatccac

SEQ ID NO: 14697 - DNA, 60 bp, Artificial
  Synthetic oligonucleotide
gggtgtcgacatagcagaataggaatcattcaacagaggagagcaagaaatggagccggt

SEQ ID NO: 14698 - DNA, 55 bp, Artificial
  Synthetic oligonucleotide
tcattcaacagaggagagcaagaaatggagccggtagatcctaaattagagccct

SEQ ID NO: 14699 - DNA, 58 bp, Artificial
  Synthetic oligonucleotide
gaaagcctaaagccatgtgtaaagttgaccccactctgcgtcactttatattgtacac

SEQ ID NO: 14700 - DNA, 58 bp, Artificial
  Synthetic oligonucleotide
agtgtcccttcgactacacttctctaagtgcggctcctccatgaccctcctagtagat

SEQ ID NO: 14701 - DNA, 58 bp, Artificial
  Synthetic oligonucleotide
tggaagggttagtttactccaggagaagacaagagatccttgacctctgggtctatca

SEQ ID NO: 14702 - DNA, 51 bp, Artificial
  Synthetic oligonucleotide
ggttgtactctagtgttcccaattagttcaattgaaactgtcccagtcaaa

SEQ ID NO: 14703 - DNA, 50 bp, Artificial
  Synthetic oligonucleotide
cttttgtgcctcagacgctaaggcacatagtacagaggctcataatattt

SEQ ID NO: 14704 - DNA, 59 bp, Artificial
  Synthetic oligonucleotide
agtagtcaggagagttaggcagggctactcacctctctcgttgcagacccttatcccag

SEQ ID NO: 14705 - DNA, 60 bp, Artificial
  Synthetic oligonucleotide
ggatttggagctaccagagcttgacaagcttagcctgcaatgtgtggagacaactcaaga

SEQ ID NO: 14706 - DNA, 60 bp, Artificial
  Synthetic oligonucleotide
tggagagagaccctggtatggagatttgaccctgaattagcctggtgttataaagcaggc

SEQ ID NO: 14707 - DNA, 55 bp, Artificial
  Synthetic oligonucleotide
cagctccaggcgagagtcctggctgtagaaggatacctaaaggaccaacagctcc

SEQ ID NO: 14708 - DNA, 55 bp, Artificial
  Synthetic oligonucleotide
cctcagacaacttgtgggttacagtttattaaggggttcctgtgtggagagatgc

SEQ ID NO: 14709 - DNA, 55 bp, Artificial
  Synthetic oligonucleotide
agacataggtgtgaatatcaagcgggacataacaaggtaggatctctacagtatc

SEQ ID NO: 14710 - DNA, 60 bp, Artificial
  Synthetic oligonucleotide
ggcaatgttgggagaaccaggtcggacatcggcgtattgagccacataagatagccactg

SEQ ID NO: 14711 - DNA, 60 bp, Artificial
  Synthetic oligonucleotide
ctaggccatggctccatagcttaggacagtatatctatagcacctatggggatacttggg

SEQ ID NO: 14712 - DNA, 60 bp, Artificial
  Synthetic oligonucleotide
ccagggcaagcgttctatgcaacaggtgacataataggagatataagacaagctcattgt

SEQ ID NO: 14713 - DNA, 60 bp, Artificial
  Synthetic oligonucleotide
ccccttggaccagggcaagcgttctatgcaacaggtgacataataggagatataagacaa

SEQ ID NO: 14714 - DNA, 55 bp, Artificial
  Synthetic oligonucleotide
tcaatggctataaagtgttatatagatccctcccttttcgtgaaagactcgccag

SEQ ID NO: 14715 - DNA, 60 bp, Artificial
  Synthetic oligonucleotide
cgtgataagtgtcagctaaaaggggaagccatacatggacaagtagattgtagcccagag

SEQ ID NO: 14716 - DNA, 54 bp, Artificial
  Synthetic oligonucleotide
tgcataatgtctgggctacacatgcctgtgtaccgacagaccccaacccacaag

SEQ ID NO: 14717 - DNA, 60 bp, Artificial
  Synthetic oligonucleotide
ccaaagtttagacagtatacagcatttactgtgccatccattaatcatcaggaaccagat

SEQ ID NO: 14718 - DNA, 60 bp, Artificial
  Synthetic oligonucleotide
gcatcccagtgtttgagcccgaaggcggagtgtggagtctggaaaccctgagccgatctc

SEQ ID NO: 14719 - DNA, 50 bp, Artificial
  Synthetic oligonucleotide
ggctacccaggatgtctgggaagtgcaaacagggatcccgcacccctcgg

SEQ ID NO: 14720 - DNA, 56 bp, Artificial
  Synthetic oligonucleotide
ctgggaggcggtgcataccccacaactagtcaggctatggtatgagcttgtatcag

SEQ ID NO: 14721 - DNA, 59 bp, Artificial
  Synthetic oligonucleotide
ataggggatatggcagcaatagagagactagtaaacatgataactacagacttggaaac

SEQ ID NO: 14722 - DNA, 55 bp, Artificial
  Synthetic oligonucleotide
cagagcaagttaaatgaatggggatgtgcctttaaacaaatctgtcacactacgg

SEQ ID NO: 14723 - DNA, 55 bp, Artificial
  Synthetic oligonucleotide
ccctatcaaagaaaacttatgctccgccaagagaaggacatttgcaatgcaggtc

SEQ ID NO: 14724 - DNA, 56 bp, Artificial
  Synthetic oligonucleotide
ctttacacagtatatggatgtatagtgagggttaggcagggatatgttcctctatc

SEQ ID NO: 14725 - DNA, 54 bp, Artificial
  Synthetic oligonucleotide
gacaacgccgacgagccaggagaaggtggagacaacagcaggatcaaattagag

SEQ ID NO: 14726 - DNA, 51 bp, Artificial
  Synthetic oligonucleotide
acaagcagtccacctatcccagtgggagacatctataagaggtggataatc

SEQ ID NO: 14727 - DNA, 57 bp, Artificial
  Synthetic oligonucleotide
ggcaatagcagtagcagggtggacagatagggttatagaagtagtacagggagcttg

SEQ ID NO: 14728 - DNA, 50 bp, Artificial
  Synthetic oligonucleotide
gagaagtactgaggtggcagtttgacagtgccctagcacgaagacacata

SEQ ID NO: 14729 - DNA, 54 bp, Artificial
  Synthetic oligonucleotide
cccgcgcttattgctgcccagctctataaaaagggtaagaaccccacactcggc

SEQ ID NO: 14730 - DNA, 54 bp, Artificial
  Synthetic oligonucleotide
accgatgaattggcaactcttgtggacatgggggactttgatcattgggttggg

SEQ ID NO: 14731 - DNA, 55 bp, Artificial
  Synthetic oligonucleotide
ctcttggacatcacttagaataccccaaactagactccgtgtgatagctggttgg

SEQ ID NO: 14732 - DNA, 55 bp, Artificial
  Synthetic oligonucleotide
cccgatatggtggaggaccaaatccctataggaatcgtgagccattaaacaaccc

SEQ ID NO: 14733 - DNA, 50 bp, Artificial
  Synthetic oligonucleotide
ctcttctttatctatgggatcaagatttgttagccttttatagagcatgg

SEQ ID NO: 14734 - DNA, 55 bp, Artificial
  Synthetic oligonucleotide
tacagggaaaaggagactattacgagattcctgtgaagagcttgtacatcccggt

SEQ ID NO: 14735 - DNA, 56 bp, Artificial
  Synthetic oligonucleotide
cccgatctcactagcctaccaacagccttgccccacctacagaccatagaccttac

SEQ ID NO: 14736 - DNA, 54 bp, Artificial
  Synthetic oligonucleotide
tgttgattggtggaagtaaggtggtacgatcatggtatgatcgtgccttatttg

SEQ ID NO: 14737 - DNA, 60 bp, Artificial
  Synthetic oligonucleotide
acattattgtgccccagctggttttgcgatcctaaagtgtaatgatgaacagttcaatgg

SEQ ID NO: 14738 - DNA, 55 bp, Artificial
  Synthetic oligonucleotide
ccagctggttttgcgatcctaaagtgtaatgatgaacagttcaatggaacagggg

SEQ ID NO: 14739 - DNA, 52 bp, Artificial
  Synthetic oligonucleotide
tatccatttagaaggacgctggcggcctaaagtagtaggaggtataggaggg

SEQ ID NO: 14740 - DNA, 55 bp, Artificial
  Synthetic oligonucleotide
ggtggggacaagtagagcacacaacagggatcccctataacccacaatcacaagg

SEQ ID NO: 14741 - DNA, 60 bp, Artificial
  Synthetic oligonucleotide
taattacacaccagggccagggatcagatacccactaacatttggatggtgcttcaagct

SEQ ID NO: 14742 - DNA, 55 bp, Artificial
  Synthetic oligonucleotide
gggcaaacacctcagcctacccaagcgctacttgacacaggagccgaccgtacgg

SEQ ID NO: 14743 - DNA, 60 bp, Artificial
  Synthetic oligonucleotide
cgacccctggacgcaggactcggcttgtgacagcgcaatcacaagaggcgaggcggactc

SEQ ID NO: 14744 - DNA, 51 bp, Artificial
  Synthetic oligonucleotide
ttgtgacagcgcaatcacaagaggcgaggcggactccggaggtgagtacaa

SEQ ID NO: 14745 - DNA, 60 bp, Artificial
  Synthetic oligonucleotide
gccgcctagcatttcatcacatggcccgagagctgcatccggattactacaaggactgct

SEQ ID NO: 14746 - DNA, 52 bp, Artificial
  Synthetic oligonucleotide
cgagagcgtcaatattacgagggggaaaattagatgcatgggaaagaattag

SEQ ID NO: 14747 - DNA, 55 bp, Artificial
  Synthetic oligonucleotide
gaggtttgacaaccgcctagcatttcatcacatggcccgagagctgcgtccggag

SEQ ID NO: 14748 - DNA, 50 bp, Artificial
  Synthetic oligonucleotide
taggccaaggagtctccatagaatggaggaaagagagatacatcacacaa

SEQ ID NO: 14749 - DNA, 60 bp, Artificial
  Synthetic oligonucleotide
cattagtaactggattcttagcactcgtctgggacgacctccggagcctgtgtctcttca

SEQ ID NO: 14750 - DNA, 57 bp, Artificial
  Synthetic oligonucleotide
acgcaatagcagtactctggtgcgttcacaacagatttgaggttcaaaatacacagc

SEQ ID NO: 14751 - DNA, 60 bp, Artificial
  Synthetic oligonucleotide
ggagggccattctagggcagagagtgctgaccaggtgtgaatactctgcaggacatagtc

SEQ ID NO: 14752 - DNA, 58 bp, Artificial
  Synthetic oligonucleotide
aagttctctacattttaactgtcatggagaattcttttattgtgacacatctcggctg

SEQ ID NO: 14753 - DNA, 60 bp, Artificial
  Synthetic oligonucleotide
cttaccacctcttgagcaacttagcatcagggatccagaggctgatcagctacctgggac

SEQ ID NO: 14754 - DNA, 60 bp, Artificial
  Synthetic oligonucleotide
actctgtgttactctaaattgcactgatgagttgaggaatgacacttgtaggaatgacac

SEQ ID NO: 14755 - DNA, 50 bp, Artificial
  Synthetic oligonucleotide
aaaacaacaggagtctataaaagcgtggagacagttcaggaaggggctcg

SEQ ID NO: 14756 - DNA, 60 bp, Artificial
  Synthetic oligonucleotide
tacatccactctccttatagaggattcaaccccatatacgcctgcctatttccattatac

SEQ ID NO: 14757 - DNA, 60 bp, Artificial
  Synthetic oligonucleotide
gagagtgatggggacgcagaggaactgtcagcacttgtggaaatgggggaccataatcct

SEQ ID NO: 14758 - DNA, 50 bp, Artificial
  Synthetic oligonucleotide
acatggggcaatcacaagcagtaatacatcattcaccaatcctgattgtg

SEQ ID NO: 14759 - DNA, 55 bp, Artificial
  Synthetic oligonucleotide
cccgaccgctggctttccaacgcccggatgactcactatcaggccttgcttttgg

SEQ ID NO: 14760 - DNA, 52 bp, Artificial
  Synthetic oligonucleotide
gctctcaaaacagggtcagacagcctgcactcactctggaacacaataacag

SEQ ID NO: 14761 - DNA, 60 bp, Artificial
  Synthetic oligonucleotide
cacttgtggagatggggcaccatgctccttgggatattgatgatatgtagtgttacagga

SEQ ID NO: 14762 - DNA, 58 bp, Artificial
  Synthetic oligonucleotide
ggcctgtagcaccaggccagatgagagacccaaggggaagtgacatagcaggaactac

SEQ ID NO: 14763 - DNA, 60 bp, Artificial
  Synthetic oligonucleotide
ttgggcagtattggggtctggagctaaaaaagagtgctagtagtctgcttgataccatag

SEQ ID NO: 14764 - DNA, 60 bp, Artificial
  Synthetic oligonucleotide
gtatgggcaagcagggagctagaacgatttgcagttaatcctggtcttttagaaacagca

SEQ ID NO: 14765 - DNA, 55 bp, Artificial
  Synthetic oligonucleotide
agaatctgtagcggacaattggcttacccctacagattggaatacacttgttagg

SEQ ID NO: 14766 - DNA, 51 bp, Artificial
  Synthetic oligonucleotide
aggaactagctgacactgcacaagagggaaactagctgacaccgcagggac

SEQ ID NO: 14767 - DNA, 53 bp, Artificial
  Synthetic oligonucleotide
cgcagcctctcaataccagacccagacaggcttggtgctggtttaagggaaac

SEQ ID NO: 14768 - DNA, 60 bp, Artificial
  Synthetic oligonucleotide
tcggctgcgccgtgagagatctgacttccaggctgtggtaagacttaatttggacttgac

SEQ ID NO: 14769 - DNA, 60 bp, Artificial
  Synthetic oligonucleotide
cagccaggtcagccaaaattaccctatagtgcagaacatccaggggcaaatggtacatca

SEQ ID NO: 14770 - DNA, 55 bp, Artificial
  Synthetic oligonucleotide
atacttgccaattcatcacggacaaatgtaagacgcaaacgaagcgtctcgcact

SEQ ID NO: 14771 - DNA, 60 bp, Artificial
  Synthetic oligonucleotide
tctcgacgcaggactcggcttgctgaggtgcacacagcaagaggcgagagcggcgactgg

SEQ ID NO: 14772 - DNA, 57 bp, Artificial
  Synthetic oligonucleotide
agactgtaagagaggctagtctggagagctccggctaacaggctgcccctcaggtag

SEQ ID NO: 14773 - DNA, 52 bp, Artificial
  Synthetic oligonucleotide
tcggcgagggaagtaccaacaggtaagagaacacattgctgtctgtcatggg

SEQ ID NO: 14774 - DNA, 53 bp, Artificial
  Synthetic oligonucleotide
cacctagggctgtctctgttaaacaggggcctaaagagccatattcagaattt

SEQ ID NO: 14775 - DNA, 58 bp, Artificial
  Synthetic oligonucleotide
ggggtggatcttgagtcccttaatataccagagcactttagataatattctacagcca

SEQ ID NO: 14776 - DNA, 54 bp, Artificial
  Synthetic oligonucleotide
ccctcccctttcgtgaaaggctcgccagagctagacctccttggtgtacgttgt

SEQ ID NO: 14777 - DNA, 60 bp, Artificial
  Synthetic oligonucleotide
tgctacagcagttagaaccagctctcaagacagggtcaaaagacctgcagtcactctgga

SEQ ID NO: 14778 - DNA, 59 bp, Artificial
  Synthetic oligonucleotide
ctgaggtgcacacagcaagaggcgagagcggcgactggtgagtacgccaattttgacta

SEQ ID NO: 14779 - DNA, 55 bp, Artificial
  Synthetic oligonucleotide
catgatagtacttaacctagtgagaaacattaggcagggatatcaacccctctcg

SEQ ID NO: 14780 - DNA, 58 bp, Artificial
  Synthetic oligonucleotide
cacatcccactaggggatactggtgctaaattggtaataacaacatattggggtctgc

SEQ ID NO: 14781 - DNA, 51 bp, Artificial
  Synthetic oligonucleotide
cgtgcgcttagtgagcggattcttagcacttgcttgggacgatctacggag

SEQ ID NO: 14782 - DNA, 57 bp, Artificial
  Synthetic oligonucleotide
gccctcaaacatctggggagtctcctgcagtattggagtcaggaactaaggaatagt

SEQ ID NO: 14783 - DNA, 57 bp, Artificial
  Synthetic oligonucleotide
gcccttcgagccctcagatgctgcatataagcagctactttctgcccgtactgggtc

SEQ ID NO: 14784 - DNA, 60 bp, Artificial
  Synthetic oligonucleotide
ccctgcatgccaacatggaatggatgacctagagaaagaagtgctagtgtggaaatttga

SEQ ID NO: 14785 - DNA, 52 bp, Artificial
  Synthetic oligonucleotide
ggaaatttgacagcagactagcatttgagcacaaggccagaacaatgcatcc

SEQ ID NO: 14786 - DNA, 53 bp, Artificial
  Synthetic oligonucleotide
gccctgttagtattctggacataagacaaggaccaaaggaaccctttagagat

SEQ ID NO: 14787 - DNA, 52 bp, Artificial
  Synthetic oligonucleotide
gcctgtgcctcttcagttaccaccgcttgaaagacttcgtctcgattgcagc

SEQ ID NO: 14788 - DNA, 51 bp, Artificial
  Synthetic oligonucleotide
atatgagctccatccagacaaatggacagtccagcccatacagctgccaga

SEQ ID NO: 14789 - DNA, 60 bp, Artificial
  Synthetic oligonucleotide
cagtggcttcatgatttaggacagcacatttataacacatatggagacacttgggcgggg

SEQ ID NO: 14790 - DNA, 52 bp, Artificial
  Synthetic oligonucleotide
gatcagtgcgcttagtgagcggattcttagcacttgcctgggacgacttgag

SEQ ID NO: 14791 - DNA, 60 bp, Artificial
  Synthetic oligonucleotide
agcgaaagtaagaccagagaagatctctcgacgcaggactcggcttgctgaaagtgcact

SEQ ID NO: 14792 - DNA, 51 bp, Artificial
  Synthetic oligonucleotide
ggaccgggggtcagactcccactgtgttttggatggtgcttcaagctagta

SEQ ID NO: 14793 - DNA, 55 bp, Artificial
  Synthetic oligonucleotide
ggaaaggtgaaggggcagtagtaatacaagacaatagtgacataaaggtagtacc

SEQ ID NO: 14794 - DNA, 60 bp, Artificial
  Synthetic oligonucleotide
gtcaaccctcggatgctgcatataagcagctgcttttcgcctgtactgggtccctctagg

SEQ ID NO: 14795 - DNA, 60 bp, Artificial
  Synthetic oligonucleotide
gtacaatgcacacatggaatcaagccagtagtatcaactcaattgctgttaaatggcagt

SEQ ID NO: 14796 - DNA, 54 bp, Artificial
  Synthetic oligonucleotide
aagttatacacactgataatggatccaatttcactagtgccactgtaaaagcag

SEQ ID NO: 14797 - DNA, 51 bp, Artificial
  Synthetic oligonucleotide
catagcgttaggagcagcagttagcatagcagtaatagtctgggcattact

SEQ ID NO: 14798 - DNA, 60 bp, Artificial
  Synthetic oligonucleotide
agggagcactatgggcgcagcgtcaataacgctgacggtacaggcccggacattattatc

SEQ ID NO: 14799 - DNA, 50 bp, Artificial
  Synthetic oligonucleotide
gagcgattagtgaacggattcttgacacttatctgggaggatctacggag

SEQ ID NO: 14800 - DNA, 60 bp, Artificial
  Synthetic oligonucleotide
agcgagggaacccactgcttaagcctcaataaagcttgccttgagggcgcatgcaagccg

SEQ ID NO: 14801 - DNA, 60 bp, Artificial
  Synthetic oligonucleotide
gaaggagtgagagtcctttgaacacggcagagtgaaggcagtaagggcggcaggatccaa

SEQ ID NO: 14802 - DNA, 56 bp, Artificial
  Synthetic oligonucleotide
ggacagactattggcaagtaacttggatcccagattgggactttgtgtctacaccg

SEQ ID NO: 14803 - DNA, 60 bp, Artificial
  Synthetic oligonucleotide
cactagccagtgcttaatgtacgataattgtacaggtatacagtcagaatccatggttgg

SEQ ID NO: 14804 - DNA, 60 bp, Artificial
  Synthetic oligonucleotide
gctaaagtggtgtgtgcccatccattcggtaactctggtacctagagatccctcagacca

SEQ ID NO: 14805 - DNA, 50 bp, Artificial
  Synthetic oligonucleotide
tgtaattagtttatgggaccaaagcctaaagccatgtgtaaagttgactc

SEQ ID NO: 14806 - DNA, 60 bp, Artificial
  Synthetic oligonucleotide
gggccagggatcagatacccactgtgttttggatggtgcttcaagctagtaccagttgac

SEQ ID NO: 14807 - DNA, 60 bp, Artificial
  Synthetic oligonucleotide
gatttgtccaatggattctgggcccatccaatcaccaaagattcacagtggataacagct

SEQ ID NO: 14808 - DNA, 50 bp, Artificial
  Synthetic oligonucleotide
ttgtcattttggacaatcagggacaacgaagaacagtgagtatagataat

SEQ ID NO: 14809 - DNA, 60 bp, Artificial
  Synthetic oligonucleotide
ccttatatggtgaatgcatacaagccacaaagacctatactatagatcaagtattagtag

SEQ ID NO: 14810 - DNA, 50 bp, Artificial
  Synthetic oligonucleotide
ggattaaaatagctgttgggtggctctactcactaggaatcagacttgta

SEQ ID NO: 14811 - DNA, 57 bp, Artificial
  Synthetic oligonucleotide
cacttgcctgggaagacctacggaacctgtgccttttcagctgccaccgattgagag

SEQ ID NO: 14812 - DNA, 60 bp, Artificial
  Synthetic oligonucleotide
aaccctcagatgctgcatataagcagccgcttaccgcttgtaccgggtctcggttagaga

SEQ ID NO: 14813 - DNA, 55 bp, Artificial
  Synthetic oligonucleotide
aagcagctgcttaccgcttgtaccgggtctcggttagagaaccaggtctgagccc

SEQ ID NO: 14814 - DNA, 55 bp, Artificial
  Synthetic oligonucleotide
gtgagtcagagctagcttaaccacaaaccgcaagtgcgaacggttgaataaccac

SEQ ID NO: 14815 - DNA, 56 bp, Artificial
  Synthetic oligonucleotide
ctcacaatacgcgttaggaatcattcaggcacaaccagacaggagtgaatcagaat

SEQ ID NO: 14816 - DNA, 57 bp, Artificial
  Synthetic oligonucleotide
cggactcacaatatgcattagggatcattcaggcacaaccagacaggagtgagtcag

SEQ ID NO: 14817 - DNA, 51 bp, Artificial
  Synthetic oligonucleotide
gctgggtgcacacagcaagaggcgagagcggcgactggtgagtacgccata

SEQ ID NO: 14818 - DNA, 60 bp, Artificial
  Synthetic oligonucleotide
tgtgcccgtctgttgtgtgactctggtaactagagatccctcagaccaactttggtagtg

SEQ ID NO: 14819 - DNA, 60 bp, Artificial
  Synthetic oligonucleotide
ggaactccctaacgcatcaaatgcgtcgcatgacattgagcgagcctacgagtgagctgc

SEQ ID NO: 14820 - DNA, 55 bp, Artificial
  Synthetic oligonucleotide
caaatgcgtcgcatgacattgagcgagcctacgagtgagctgcctactcagaggc

SEQ ID NO: 14821 - DNA, 53 bp, Artificial
  Synthetic oligonucleotide
tgtcctgctgcaattatccccaggcccataaatctcaggtaccgacacttcaa

SEQ ID NO: 14822 - DNA, 51 bp, Artificial
  Synthetic oligonucleotide
tgcaacctccagtgacaccgagtaacatactgatcatgctattgttattgc

SEQ ID NO: 14823 - DNA, 56 bp, Artificial
  Synthetic oligonucleotide
aatcctaggggaacaagttcagagcattaactttcgcatgaaaattcaatgccatg

SEQ ID NO: 14824 - DNA, 51 bp, Artificial
  Synthetic oligonucleotide
tgccagggtctagggaaagtacctaaagttccctgtcccgccaccctcagg

SEQ ID NO: 14825 - DNA, 60 bp, Artificial
  Synthetic oligonucleotide
aggtactaggcacatctggattccgtggcgtctcctgaaacgaggtgcatgcccaagacc

SEQ ID NO: 14826 - DNA, 60 bp, Artificial
  Synthetic oligonucleotide
ccgaatcgtcaaggccttggttattactctgcctcctactcagatccctgtgctatcaag

SEQ ID NO: 14827 - DNA, 60 bp, Artificial
  Synthetic oligonucleotide
attttgaccgcagcttgctaactgctcttggcagacatatctatactagacatggagata

SEQ ID NO: 14828 - DNA, 60 bp, Artificial
  Synthetic oligonucleotide
atgtggggaagcaccatcgtgtgcttatacctctaccaactcacacctccaatgacctgg

SEQ ID NO: 14829 - DNA, 57 bp, Artificial
  Synthetic oligonucleotide
gctgaggggacagatagggttatagaagtagtacaaagattctgtagagctatcctc

SEQ ID NO: 14830 - DNA, 55 bp, Artificial
  Synthetic oligonucleotide
gacagccgcctagcatttcatcacatggcccgagagctgcatccggagttttaca

SEQ ID NO: 14831 - DNA, 60 bp, Artificial
  Synthetic oligonucleotide
catttgggacaccttaacatggcaggaatgggatcggcagataagcaacataagctccac

SEQ ID NO: 14832 - DNA, 60 bp, Artificial
  Synthetic oligonucleotide
caggctacatccagtacaggcagggcctattgcaccaggccagatgagagacccaagggg

SEQ ID NO: 14833 - DNA, 60 bp, Artificial
  Synthetic oligonucleotide
agctatatgttgagacattgtaacacctcagtcattacacaggcctgtccaaaggtatcc

SEQ ID NO: 14834 - DNA, 53 bp, Artificial
  Synthetic oligonucleotide
caagagatgggagtaacatcacaaacgggtccaagtctgacaccttcagacgt

SEQ ID NO: 14835 - DNA, 56 bp, Artificial
  Synthetic oligonucleotide
tacgtattggaccagggcaatcattctatgcaacaggtgacataataggagacata

SEQ ID NO: 14836 - DNA, 56 bp, Artificial
  Synthetic oligonucleotide
gcggaaaacagggagattttaaaagaaccagtacatggagcatattatgacccatc

SEQ ID NO: 14837 - DNA, 60 bp, Artificial
  Synthetic oligonucleotide
gtacacatcccactaggggctgctatgttagtaataagaacatattggggcctacactca

SEQ ID NO: 14838 - DNA, 55 bp, Artificial
  Synthetic oligonucleotide
ggggctgctatgttagtaataagaacatattggggcctacactcaggagaacgag

SEQ ID NO: 14839 - DNA, 55 bp, Artificial
  Synthetic oligonucleotide
gggtagcagtcaaccacttgccccgagaactcattttccaggtctggcaaaggtg

SEQ ID NO: 14840 - DNA, 55 bp, Artificial
  Synthetic oligonucleotide
cagtcaaccacttgccccgagaactcattttccaggtctggcagaggtgttgggc

SEQ ID NO: 14841 - DNA, 60 bp, Artificial
  Synthetic oligonucleotide
aagttccagagaagttctctcgacgcaggactcggcttgctgaggtgcacacagcaagag

SEQ ID NO: 14842 - DNA, 60 bp, Artificial
  Synthetic oligonucleotide
gcttaggcatttcctatggcaggaagaagcggagacagcgacgaagcactcctctgcgca

SEQ ID NO: 14843 - DNA, 50 bp, Artificial
  Synthetic oligonucleotide
gagcttcaggttcgaagaggcaacccctgccccgaagcaggagccgagag

SEQ ID NO: 14844 - DNA, 51 bp, Artificial
  Synthetic oligonucleotide
cgtgagatttgtgagcggattcttgccacttatctgggaagacctacggag

SEQ ID NO: 14845 - DNA, 50 bp, Artificial
  Synthetic oligonucleotide
accctggccttttagaaacatcagaaggctgtaaacagataataagacag

SEQ ID NO: 14846 - DNA, 60 bp, Artificial
  Synthetic oligonucleotide
cctattctgtgcatcggatgctaaggcacatgatccagaagtgcataatgtctgggctac

SEQ ID NO: 14847 - DNA, 50 bp, Artificial
  Synthetic oligonucleotide
taatggaagtaactttaccagtagtactgtcaaggcagcttgttggtggg

SEQ ID NO: 14848 - DNA, 60 bp, Artificial
  Synthetic oligonucleotide
ccagacaacgtcagatcaattcgcttagtgagcggattcttagcacttgcctggaacgac

SEQ ID NO: 14849 - DNA, 60 bp, Artificial
  Synthetic oligonucleotide
gggctatagaggcgcaacagcaatctgttcaactcacagtctggggcattaagcagctcc

SEQ ID NO: 14850 - DNA, 60 bp, Artificial
  Synthetic oligonucleotide
acagtgccctagcacgaaaacacatagcccgagaactgcatccagataactataaagact

SEQ ID NO: 14851 - DNA, 56 bp, Artificial
  Synthetic oligonucleotide
aagacaagcacattgtaacattagtgaagggaactggactaaaactctacacaggg

SEQ ID NO: 14852 - DNA, 60 bp, Artificial
  Synthetic oligonucleotide
acacatagttatccctaggtgtgactatcaagcaggacataataaggtaggatcgttaca

SEQ ID NO: 14853 - DNA, 60 bp, Artificial
  Synthetic oligonucleotide
tccctatgttgagcctacagccccccaagtccttccagtcatgcacccacatggtgcccc

SEQ ID NO: 14854 - DNA, 58 bp, Artificial
  Synthetic oligonucleotide
cgccatactacccatgtcccctacaatccaaccagctccggacttgtagaacgctcta

SEQ ID NO: 14855 - DNA, 55 bp, Artificial
  Synthetic oligonucleotide
tgataatcccatgtttgagctctaatctgtatgcaacagtctatgctggggtacc

SEQ ID NO: 14856 - DNA, 53 bp, Artificial
  Synthetic oligonucleotide
gcagggatactcacctttgtcgtttcagacccttgccccaaacccagggggtc

SEQ ID NO: 14857 - DNA, 51 bp, Artificial
  Synthetic oligonucleotide
cgtgagattagtgaacagattcttagcacttgcctaggacgatctgcggag

SEQ ID NO: 14858 - DNA, 52 bp, Artificial
  Synthetic oligonucleotide
ccagaacctattagttcccacgtcagccattacgggtcagactccagccaag

SEQ ID NO: 14859 - DNA, 60 bp, Artificial
  Synthetic oligonucleotide
atacatgttgattggtggaagtaaggtggtatgatcatgccttattaggaaggtaacaga

SEQ ID NO: 14860 - DNA, 55 bp, Artificial
  Synthetic oligonucleotide
ggtggaagtaaggtggtatgatcatgccttattaggaaggtaacagacgggtcta

SEQ ID NO: 14861 - DNA, 60 bp, Artificial
  Synthetic oligonucleotide
tctgccataaggaaagccatattaggacacatagttattcctaggtgtgactatccagca

SEQ ID NO: 14862 - DNA, 60 bp, Artificial
  Synthetic oligonucleotide
ggtatcagtcaaaattaccccatagtgcaaaatgcacaagggcaaatggtacatcaagcc

SEQ ID NO: 14863 - DNA, 60 bp, Artificial
  Synthetic oligonucleotide
agtaagtagtaataattagtatatgtaatgagctcattggaaatatatgcaatagtagga

SEQ ID NO: 14864 - DNA, 55 bp, Artificial
  Synthetic oligonucleotide
tcttgattgcagcgaggacagtggaactcttgggacgccacagtctcaagggact

SEQ ID NO: 14865 - DNA, 52 bp, Artificial
  Synthetic oligonucleotide
atcttaacaagagacggggggcttgagcttaacaatacgaataatgagacct

SEQ ID NO: 14866 - DNA, 54 bp, Artificial
  Synthetic oligonucleotide
agatcatctgcaccactactgtgccctggaactctagttggagtaataaatcct

SEQ ID NO: 14867 - DNA, 60 bp, Artificial
  Synthetic oligonucleotide
tgagagtgttaacagtgtgtgcccatttcataccgcgtctgccctggggtagagatccct

SEQ ID NO: 14868 - DNA, 55 bp, Artificial
  Synthetic oligonucleotide
gcccatttcataccgcgtctgccctggggtagagatccctcagatttgtagtggc

SEQ ID NO: 14869 - DNA, 60 bp, Artificial
  Synthetic oligonucleotide
gaagcagggaacgcggcccctggacgcaggactcggcttgtgacagcgcaatcacaagag

SEQ ID NO: 14870 - DNA, 56 bp, Artificial
  Synthetic oligonucleotide
acatttagtatgggcaagcagggagctggacagattcgcgcttaaccctggccttt

SEQ ID NO: 14871 - DNA, 60 bp, Artificial
  Synthetic oligonucleotide
gtgtctgtgttagatggatgctggggccagttacatgcgcttaactggggaggaaaactg

SEQ ID NO: 14872 - DNA, 55 bp, Artificial
  Synthetic oligonucleotide
agatggatgctggggccagttacatgcgcttaactggggaggaaaactgggctga

SEQ ID NO: 14873 - DNA, 60 bp, Artificial
  Synthetic oligonucleotide
acacaggcctgtccaaaggtatcttgggatccaattcccatacattattgtgctccagct

SEQ ID NO: 14874 - DNA, 60 bp, Artificial
  Synthetic oligonucleotide
acagaagctgagtggtgtcggaggaagctctactgcagggagccaacataccctaccgag

SEQ ID NO: 14875 - DNA, 59 bp, Artificial
  Synthetic oligonucleotide
caattagattgcacacatctagaagggaaagtcatcctggtagcagtccatgaggccag

SEQ ID NO: 14876 - DNA, 54 bp, Artificial
  Synthetic oligonucleotide
tagatattaggcagggaccaaaagagccatttagagactatgtagatcggttct

SEQ ID NO: 14877 - DNA, 60 bp, Artificial
  Synthetic oligonucleotide
cttcagaggagcgcaatctaacttgtagaattagacaggtggtaaggtcatggatgaaga

SEQ ID NO: 14878 - DNA, 56 bp, Artificial
  Synthetic oligonucleotide
acctggagtaggagaactctccagagaattagcagctagaggagggataccaggct

SEQ ID NO: 14879 - DNA, 60 bp, Artificial
  Synthetic oligonucleotide
taggggctggatagtacagagtctggaaaaggtaatccagattgcaagaccatcctctgt

SEQ ID NO: 14880 - DNA, 60 bp, Artificial
  Synthetic oligonucleotide
ccatgtgctaagttgacagcatactgtgctccaatgatttgcaccaaagtaaataggact

SEQ ID NO: 14881 - DNA, 55 bp, Artificial
  Synthetic oligonucleotide
cagcatactgtgctccaatgatttgcaccaaagtaaataggactgaaaatggcac

SEQ ID NO: 14882 - DNA, 56 bp, Artificial
  Synthetic oligonucleotide
tgttatgtgatgtctcgactgccagtacgacaggcgaccattaagctactggtgga

SEQ ID NO: 14883 - DNA, 60 bp, Artificial
  Synthetic oligonucleotide
gcgttaggaatcattcaggcacaaccagacaggagtgaatcagaggtagttaatcacata

SEQ ID NO: 14884 - DNA, 52 bp, Artificial
  Synthetic oligonucleotide
gtcagttctggaatcaggaaagtgctatttttagatgggatagataaggctc

SEQ ID NO: 14885 - DNA, 52 bp, Artificial
  Synthetic oligonucleotide
tagctactcatggagcagtcacaagcagtaatacagcagctactaatcctga

SEQ ID NO: 14886 - DNA, 51 bp, Artificial
  Synthetic oligonucleotide
tgcaccactgttgtgccttggaatgctagttggagtaatagaactcatgat

SEQ ID NO: 14887 - DNA, 60 bp, Artificial
  Synthetic oligonucleotide
caatagatccacacccatttacattggacatgttagagctcattctggactacctggacc

SEQ ID NO: 14888 - DNA, 55 bp, Artificial
  Synthetic oligonucleotide
agggacagcagagatccactttggaaaggaccagcaaagctcctctggaaaggtg

SEQ ID NO: 14889 - DNA, 60 bp, Artificial
  Synthetic oligonucleotide
cttgcctctcatctgggacgatctcagaaccctggttgtgtggatctaccggacattagt

SEQ ID NO: 14890 - DNA, 60 bp, Artificial
  Synthetic oligonucleotide
gtggaagtttgacagctccctagcacggagacacatagcccgagagctacatccggagtt

SEQ ID NO: 14891 - DNA, 60 bp, Artificial
  Synthetic oligonucleotide
agtgcaaaatgcacaagggcaaatggtacatcagtccatgtcacctaggactttgaatgc

SEQ ID NO: 14892 - DNA, 60 bp, Artificial
  Synthetic oligonucleotide
ttaagcagcttcaggcaagagtcctggctatagaaagatacctgaaggatcaacagctcc

SEQ ID NO: 14893 - DNA, 60 bp, Artificial
  Synthetic oligonucleotide
ctatgggcgcagcgtcaataacgctgacggtacaagccagacaattgttgtctggtatag

SEQ ID NO: 14894 - DNA, 51 bp, Artificial
  Synthetic oligonucleotide
gcagtatctcgagacctggaaaaacagggagcgatcacaagtagcaataca

SEQ ID NO: 14895 - DNA, 55 bp, Artificial
  Synthetic oligonucleotide
cagctaaaaggggaagccatacatggacaagtggattgtagtccaggggtatggc

SEQ ID NO: 14896 - DNA, 50 bp, Artificial
  Synthetic oligonucleotide
atagtgaatagagttaggcagggatactcacccttgtctttccagatccc

SEQ ID NO: 14897 - DNA, 55 bp, Artificial
  Synthetic oligonucleotide
agcctcaataaagcttgccttgagagctaaagtggtgtgtgcccatccattcggt

SEQ ID NO: 14898 - DNA, 60 bp, Artificial
  Synthetic oligonucleotide
agccctcaaatattggtggaatctcctccagtattggagacaggaactacagaagagtgc

SEQ ID NO: 14899 - DNA, 55 bp, Artificial
  Synthetic oligonucleotide
gcaactgtgtaaactcctcaggggagctaaagcactaaccgaagtagtaccactg

SEQ ID NO: 14900 - DNA, 55 bp, Artificial
  Synthetic oligonucleotide
aggcaattatgtagactccttaggggagccaaggcactaacagacatagtgccac

SEQ ID NO: 14901 - DNA, 60 bp, Artificial
  Synthetic oligonucleotide
agtactaatgtaaatcaccctagctgcgtctggctagaagcgcaagaggacgaggaggta

SEQ ID NO: 14902 - DNA, 55 bp, Artificial
  Synthetic oligonucleotide
caccctagctgcgtctggctagaagcgcaagaggacgaggaggtaggctttccag

SEQ ID NO: 14903 - DNA, 60 bp, Artificial
  Synthetic oligonucleotide
agagagaagtgctaatgtggaagtttgacagccgcttagcattccatcacgtggcccgag

SEQ ID NO: 14904 - DNA, 60 bp, Artificial
  Synthetic oligonucleotide
agtgctaatgtggaagtttgacagccgcttagcaatccatcacatggcccgagagatgca

SEQ ID NO: 14905 - DNA, 55 bp, Artificial
  Synthetic oligonucleotide
ggttaccattgacggtagctaaacagataactcaagaatgccctcattgtactaa

SEQ ID NO: 14906 - DNA, 60 bp, Artificial
  Synthetic oligonucleotide
tgcaccactactgtgccttggaatgctagttggagtaataaatctctggattacatttgg

SEQ ID NO: 14907 - DNA, 60 bp, Artificial
  Synthetic oligonucleotide
ctgctcacactaatgatgtaagacaattagtagaagtagtgcaaaaggtggtcacagaaa

SEQ ID NO: 14908 - DNA, 57 bp, Artificial
  Synthetic oligonucleotide
tctggggcattaagcagctccaggcacgagtcctggctctagaaagatacctaaggg

SEQ ID NO: 14909 - DNA, 51 bp, Artificial
  Synthetic oligonucleotide
caagcaagtaaagcagatcagatatacacaggtaacagtggtgatagaagc

SEQ ID NO: 14910 - DNA, 60 bp, Artificial
  Synthetic oligonucleotide
aataaggtaggatcgctgcaatatttggcactgaaagcattagtgacaccaataaggaaa

SEQ ID NO: 14911 - DNA, 60 bp, Artificial
  Synthetic oligonucleotide
gagagaccaactgcttgttacaccctatcaaccagcatggaatggaggacccggagagac

SEQ ID NO: 14912 - DNA, 53 bp, Artificial
  Synthetic oligonucleotide
tgctgatatcaagttatacaagactgctgacaccgagctttgtacaagggact

SEQ ID NO: 14913 - DNA, 56 bp, Artificial
  Synthetic oligonucleotide
ccccgcttgctaactgcgcttggtaattttatctacggtaggcatggggataccat

SEQ ID NO: 14914 - DNA, 60 bp, Artificial
  Synthetic oligonucleotide
caaaacagtcgtgccagtaacaattatgtcaggtctaatcttccattcacagcctattaa

SEQ ID NO: 14915 - DNA, 55 bp, Artificial
  Synthetic oligonucleotide
gccgcctggtcactcggtgctcaactgagataaagaccctggtctgttaggaccc

SEQ ID NO: 14916 - DNA, 54 bp, Artificial
  Synthetic oligonucleotide
tctgttgtgtgactctggtaactagagatccctcagaccaaaagcggtagtgtg

SEQ ID NO: 14917 - DNA, 55 bp, Artificial
  Synthetic oligonucleotide
gggtggcaagtggtcaaagtgtggtatgggtggatggcctagtgtaagggaaaga

SEQ ID NO: 14918 - DNA, 55 bp, Artificial
  Synthetic oligonucleotide
actcccagaggagagccagaaatggatccagtagatcctagactagagccctgga

SEQ ID NO: 14919 - DNA, 60 bp, Artificial
  Synthetic oligonucleotide
ctcctgggtcacaggccattggtggggattgcgcctatacgtctctggacatgacccagg

SEQ ID NO: 14920 - DNA, 60 bp, Artificial
  Synthetic oligonucleotide
ctatagaggcgcaacagcatatgttgcaactcacggtctggggcattaagcagctccaga

SEQ ID NO: 14921 - DNA, 51 bp, Artificial
  Synthetic oligonucleotide
agtaaatagagttaggcagggatactcacctctatcgatgcagaccctctt

SEQ ID NO: 14922 - DNA, 51 bp, Artificial
  Synthetic oligonucleotide
tgacatggtggaccagatgcatgaggatataatcagtttatgggatcaatt

SEQ ID NO: 14923 - DNA, 53 bp, Artificial
  Synthetic oligonucleotide
catatcccactaggggaagctagattggtaataaaaacatattggggtctgca

SEQ ID NO: 14924 - DNA, 60 bp, Artificial
  Synthetic oligonucleotide
tggcaagtagacagacagaaagtgaaagcgtggaacagcctggtgaaataccataagtac

SEQ ID NO: 14925 - DNA, 55 bp, Artificial
  Synthetic oligonucleotide
cagaaagtgaaagcgtggaacagcctggtgaaataccataagtacaggtctagga

SEQ ID NO: 14926 - DNA, 60 bp, Artificial
  Synthetic oligonucleotide
cacggaggccccatgaatatggcaccgattataagtgcggacagttatgccctgccgact

SEQ ID NO: 14927 - DNA, 55 bp, Artificial
  Synthetic oligonucleotide
gtgcccgtctgttgtgtgactctggtaactagagatccctcagaccacgctaggc

SEQ ID NO: 14928 - DNA, 59 bp, Artificial
  Synthetic oligonucleotide
gactttccagagaaggcgtgacctgggcgggactggggagtggcgagccctcagatgct

SEQ ID NO: 14929 - DNA, 57 bp, Artificial
  Synthetic oligonucleotide
gtactacaaagactgctgacatcgagacttctacaagggactttccgctggggactt

SEQ ID NO: 14930 - DNA, 60 bp, Artificial
  Synthetic oligonucleotide
gacctatggatggtgcttcaagctagtgccagttgacccaagggaagtagaagaggccaa

SEQ ID NO: 14931 - DNA, 59 bp, Artificial
  Synthetic oligonucleotide
attgggtgtcgacatagcagaataggcatccttcgacagaggagagcaagaaatggagc

SEQ ID NO: 14932 - DNA, 53 bp, Artificial
  Synthetic oligonucleotide
cccaacgccaattagccgaagattgctggctgtgcttgcggtcaggtgatccc

SEQ ID NO: 14933 - DNA, 51 bp, Artificial
  Synthetic oligonucleotide
cctccagtcccttatgcgccccaaatagctcagtttttgtatgcggtaata

SEQ ID NO: 14934 - DNA, 58 bp, Artificial
  Synthetic oligonucleotide
atcaagataaacctttgcgatggatatatttgtctgctactccaactaaacatctgct

SEQ ID NO: 14935 - DNA, 56 bp, Artificial
  Synthetic oligonucleotide
aatccggaacacccaagacggatcctactcgtcctgcaacatcttatagcctatgc

SEQ ID NO: 14936 - DNA, 60 bp, Artificial
  Synthetic oligonucleotide
ttgtcgggggacacgttggagcatacaccctggctgcatgtgactggttgttaggatcgc

SEQ ID NO: 14937 - DNA, 55 bp, Artificial
  Synthetic oligonucleotide
ggatgttcctggcccactccttccaattctgagtccgtatgtgatggcttgggac

SEQ ID NO: 14938 - DNA, 50 bp, Artificial
  Synthetic oligonucleotide
cagattacatccagtgcatgcaggacctatcgcaccaggtcagatgagag

SEQ ID NO: 14939 - DNA, 50 bp, Artificial
  Synthetic oligonucleotide
cagattacatccagtgcatgcaggacctatcccaccaaaccaaatgaggg

SEQ ID NO: 14940 - DNA, 51 bp, Artificial
  Synthetic oligonucleotide
cctgtgcatcttcagctaccaccgcttgagagacttcgtcttgattgcaac

SEQ ID NO: 14941 - DNA, 55 bp, Artificial
  Synthetic oligonucleotide
gattgcacacatttagaagggaaagttatcctggtagcagtccatgtagccagtg

SEQ ID NO: 14942 - DNA, 54 bp, Artificial
  Synthetic oligonucleotide
tgccagacaatgatgattatcaggagataactttgaatgtgacagaggctttcg

SEQ ID NO: 14943 - DNA, 51 bp, Artificial
  Synthetic oligonucleotide
ggcctcttttccttttcagcggcgttcgtgcctgattaggagaggtagact

SEQ ID NO: 14944 - DNA, 60 bp, Artificial
  Synthetic oligonucleotide
gggtctattacagagacagcagagaccctatttggaaaggaccggcacagctcctgtgga

SEQ ID NO: 14945 - DNA, 51 bp, Artificial
  Synthetic oligonucleotide
ctgtgtaaactcctcaggggagctaaagcactgacagacatagtaccattg

SEQ ID NO: 14946 - DNA, 52 bp, Artificial
  Synthetic oligonucleotide
ctttagagattatgtagatcggttctataagactctaagagccgagcaagct

SEQ ID NO: 14947 - DNA, 60 bp, Artificial
  Synthetic oligonucleotide
aacactgcaggttccaaaagaaccattgcagacctctgtcgagccacaagaggcagcgcg

SEQ ID NO: 14948 - DNA, 60 bp, Artificial
  Synthetic oligonucleotide
accgattgacagacttagtcttaatagcgaggaggacattggagattgtgggacaataca

SEQ ID NO: 14949 - DNA, 55 bp, Artificial
  Synthetic oligonucleotide
cttaatagcgaggaggacattggagattgtgggacaatacactctgaagggactg

SEQ ID NO: 14950 - DNA, 50 bp, Artificial
  Synthetic oligonucleotide
atatgacagccagctcgccctaagacacatagctcgagagctgcattcgg

SEQ ID NO: 14951 - DNA, 60 bp, Artificial
  Synthetic oligonucleotide
gtgcagtctaccacagggatgggtattaagcccactaatatatcaaagtacactggataa

SEQ ID NO: 14952 - DNA, 54 bp, Artificial
  Synthetic oligonucleotide
aactcacctccaggaacgttgcaaagacttgctatgttggcatgtggacggaaa

SEQ ID NO: 14953 - DNA, 60 bp, Artificial
  Synthetic oligonucleotide
agtaggtgtgagaattatcatgatagtacttaacctagtgagaaacattaggcagggata

SEQ ID NO: 14954 - DNA, 52 bp, Artificial
  Synthetic oligonucleotide
ggtcgagcctgggagctctctgactagcaagggaacccactgcttaagcctc

SEQ ID NO: 14955 - DNA, 53 bp, Artificial
  Synthetic oligonucleotide
cgagagcgtcagtactaactgggggaaaattagatgcatgggaaagaattcgg

SEQ ID NO: 14956 - DNA, 53 bp, Artificial
  Synthetic oligonucleotide
tcaaacttctggggaatctcgtgcagtattggatccaggaactaaagaatagt

SEQ ID NO: 14957 - DNA, 53 bp, Artificial
  Synthetic oligonucleotide
aaagggctatggtagattgtacgggagctcttctcacagacttggctgcgtcc

SEQ ID NO: 14958 - DNA, 60 bp, Artificial
  Synthetic oligonucleotide
ggtcagtcaaaattatcctatagtgcagaatctccaagggcaaatggtacacaatcccat

SEQ ID NO: 14959 - DNA, 60 bp, Artificial
  Synthetic oligonucleotide
tagcagacgctgctaaacagtgagtatctctagtgaagcagactcgagctcataatcaag

SEQ ID NO: 14960 - DNA, 60 bp, Artificial
  Synthetic oligonucleotide
gactttacaaaggctcgctatgttggcatgtggagtacaggctaagagctggcgaggatg

SEQ ID NO: 14961 - DNA, 50 bp, Artificial
  Synthetic oligonucleotide
acaatctcatcatggagacaaaagaatagatgggaatggagaccagactt

SEQ ID NO: 14962 - DNA, 57 bp, Artificial
  Synthetic oligonucleotide
tccctgtagtacgaaacgctcagggacagttgacgcataatccaatatcacccagaa

SEQ ID NO: 14963 - DNA, 60 bp, Artificial
  Synthetic oligonucleotide
gtgttagaagcaacctatgccatggtacagcatgtggctaaaggcgtgcggatcttggaa

SEQ ID NO: 14964 - DNA, 58 bp, Artificial
  Synthetic oligonucleotide
gacaggacacaccctacccatgcagggcctatagctccaggacaaatgagggaaccaa

SEQ ID NO: 14965 - DNA, 60 bp, Artificial
  Synthetic oligonucleotide
cgatgctaagagttatagtacagaagctcataacatctgggccacccaagcttgtgtacc

SEQ ID NO: 14966 - DNA, 55 bp, Artificial
  Synthetic oligonucleotide
cagaagctcataacatctgggccacccaagcttgtgtacctactgatcccactcc

SEQ ID NO: 14967 - DNA, 58 bp, Artificial
  Synthetic oligonucleotide
gagcagtgagtataattagttagtgctgtaatgataactttgcgaacagttaagcata

SEQ ID NO: 14968 - DNA, 54 bp, Artificial
  Synthetic oligonucleotide
gaggattgtggaaactctgggacgcagggggtgggagagtctcaaatacctggg

SEQ ID NO: 14969 - DNA, 60 bp, Artificial
  Synthetic oligonucleotide
gtggcaggaggtaggacgagcaatgtatgcccctcccattgcaggaaacataacatgtac

SEQ ID NO: 14970 - DNA, 50 bp, Artificial
  Synthetic oligonucleotide
ctcggtctcttagataccggggcagacaaaacttgcatagcaggtaagga

SEQ ID NO: 14971 - DNA, 51 bp, Artificial
  Synthetic oligonucleotide
cctatggtagaacagatgcatgaggatataatcagtttatgggatgaaagc

SEQ ID NO: 14972 - DNA, 60 bp, Artificial
  Synthetic oligonucleotide
cccgtctgttgtgtgactctggtagctagagatccctcagaccataagtcagtgtggaaa

SEQ ID NO: 14973 - DNA, 55 bp, Artificial
  Synthetic oligonucleotide
gatcttttaatcgcagccgcctcaaaagagctatgtcaacaggggactgagagac

SEQ ID NO: 14974 - DNA, 55 bp, Artificial
  Synthetic oligonucleotide
gacagtgccctagcacgaagacacatagcccgagaacgatatccagattactata

SEQ ID NO: 14975 - DNA, 60 bp, Artificial
  Synthetic oligonucleotide
cagttccctagcacgaagacacatagcccgagaacaacatcctgagtactataaagactg

SEQ ID NO: 14976 - DNA, 51 bp, Artificial
  Synthetic oligonucleotide
tgagagtaggcatccaagagtaagctcagaagtacacatcccactagggga

SEQ ID NO: 14977 - DNA, 60 bp, Artificial
  Synthetic oligonucleotide
gctaaaacatttagtatgggcaagcagggagctggaaagatacgcatgtaatcctggtct

SEQ ID NO: 14978 - DNA, 55 bp, Artificial
  Synthetic oligonucleotide
tctacgggtaccctgtctacgttttcggcgactgtgtacaggccgattggtgccc

SEQ ID NO: 14979 - DNA, 50 bp, Artificial
  Synthetic oligonucleotide
caacaaggtccttacggaacaggcccccccagttgcaccggctcccccga

SEQ ID NO: 14980 - DNA, 54 bp, Artificial
  Synthetic oligonucleotide
gggatcagcagtaaacatagtaacagactcacaatatgcattaggaatcattca

SEQ ID NO: 14981 - DNA, 55 bp, Artificial
  Synthetic oligonucleotide
cttgtccaaaggtatcttgggatccaatccctatacattattgtgctccagctgg

SEQ ID NO: 14982 - DNA, 60 bp, Artificial
  Synthetic oligonucleotide
ggtggcgagcaaggcagagacaggtccgtgcgcttagtgagcggattcttcgcacttatc

SEQ ID NO: 14983 - DNA, 50 bp, Artificial
  Synthetic oligonucleotide
tgaagggtcctcaggcacaataaattttgctcgtgtgatttgaaccctgc

SEQ ID NO: 14984 - DNA, 55 bp, Artificial
  Synthetic oligonucleotide
acacagtagtagttctctattgtgtacacgaaaagatagaggtccgagacaccaa

SEQ ID NO: 14985 - DNA, 51 bp, Artificial
  Synthetic oligonucleotide
atagacacagtatgggcttgcaatacaggtctcactccttgtatatctatg

SEQ ID NO: 14986 - DNA, 60 bp, Artificial
  Synthetic oligonucleotide
ttctaggtgtgactatcaagcaggacatactaaggtaggatctctacaatacttagcact

SEQ ID NO: 14987 - DNA, 54 bp, Artificial
  Synthetic oligonucleotide
tgtaaagttaaccccactctgtgttactctaaattgtactaatgccaagggcaa

SEQ ID NO: 14988 - DNA, 55 bp, Artificial
  Synthetic oligonucleotide
ttccagagggcggttcagagggcgggacaagggagtggctaaccctcagatgctg

SEQ ID NO: 14989 - DNA, 51 bp, Artificial
  Synthetic oligonucleotide
gtactggaaccgctgccttaatccagaccccccgatactttgaggaattac

SEQ ID NO: 14990 - DNA, 60 bp, Artificial
  Synthetic oligonucleotide
ggataattacacaccagggccaggggtcagatatccactgacctttggatggtgcttcaa

SEQ ID NO: 14991 - DNA, 55 bp, Artificial
  Synthetic oligonucleotide
gggagctagaacgatttgcagttaatcctggtcttttagaaacagcagagggctg

SEQ ID NO: 14992 - DNA, 56 bp, Artificial
  Synthetic oligonucleotide
caaatactagaacagctacagccatcccttcagacaggatcagaagaacttagatc

SEQ ID NO: 14993 - DNA, 55 bp, Artificial
  Synthetic oligonucleotide
gagggagctattccctatgatattaataccatgttaaatgccataggaggccatc

SEQ ID NO: 14994 - DNA, 56 bp, Artificial
  Synthetic oligonucleotide
ggaaataagtgtgtgacagctaaactcctgcatccagcttgcaaccatggttctga

SEQ ID NO: 14995 - DNA, 60 bp, Artificial
  Synthetic oligonucleotide
aagatctctcgacgcaggactcggcttgctgaaagtgcactcggcaagaggcgagggggg

SEQ ID NO: 14996 - DNA, 60 bp, Artificial
  Synthetic oligonucleotide
cttgtattagagtagatgagtcagagctagcttagccgcaaaccgcaagtgcgaacagct

SEQ ID NO: 14997 - DNA, 55 bp, Artificial
  Synthetic oligonucleotide
tgcacaagggcaaatggtacatcagagcatgtcacctagaactttgaatgcatgg

SEQ ID NO: 14998 - DNA, 55 bp, Artificial
  Synthetic oligonucleotide
gagtcagagctagcttagccgcaaaccgcaagtgcgaacagctgtataaccacat

SEQ ID NO: 14999 - DNA, 60 bp, Artificial
  Synthetic oligonucleotide
tgctgagggctattgaggcgcaacagcatatgttgcaactcacagtctggggcattaagc

SEQ ID NO: 15000 - DNA, 55 bp, Artificial
  Synthetic oligonucleotide
ccttggaatgttgatgatctgtagcactactaagtgggtcacagtctattatggg

SEQ ID NO: 15001 - DNA, 54 bp, Artificial
  Synthetic oligonucleotide
cacaaggctacttccctgattggcataattacacaccagggccaggggtcagat

SEQ ID NO: 15002 - DNA, 60 bp, Artificial
  Synthetic oligonucleotide
cctgttacatcctataaacttgcatgggatggatgacccggagagagaagtgctagagtg

SEQ ID NO: 15003 - DNA, 55 bp, Artificial
  Synthetic oligonucleotide
aacttgcatgggatggatgacccggagagagaagtgctagagtggagatttgaca

SEQ ID NO: 15004 - DNA, 58 bp, Artificial
  Synthetic oligonucleotide
agatagattctacaaaagcttacgggcagaacaagcagacacggccgtgagagcatgg

SEQ ID NO: 15005 - DNA, 57 bp, Artificial
  Synthetic oligonucleotide
agtgagagtcttcgggacacggctgagtgaaggcagtaagggcggcaggaatcaacc

SEQ ID NO: 15006 - DNA, 56 bp, Artificial
  Synthetic oligonucleotide
cacagtagaagaacagatccagtggatgttcaggccacggaatcctgtgccagtag

SEQ ID NO: 15007 - DNA, 57 bp, Artificial
  Synthetic oligonucleotide
gtatgggccggaagcgagctgcaacgtttcgcgatgaatcccggtctcatggagaac

SEQ ID NO: 15008 - DNA, 60 bp, Artificial
  Synthetic oligonucleotide
agtggtgtcacaatacttatgctagtttaagagcttcgctgatacatgcaatagacagac

SEQ ID NO: 15009 - DNA, 60 bp, Artificial
  Synthetic oligonucleotide
acaactaaattcatggggatgtgctttcagacaggtctgtcacacgactgtaccatgggt

SEQ ID NO: 15010 - DNA, 60 bp, Artificial
  Synthetic oligonucleotide
cctatagtgcaaaatgcacaagggcaaatggtacatcagagcatttcacctagaactttg

SEQ ID NO: 15011 - DNA, 60 bp, Artificial
  Synthetic oligonucleotide
gcaggaactactagtaacctgcaggaacaaatagcatggatgactggcaacccagctatc

SEQ ID NO: 15012 - DNA, 58 bp, Artificial
  Synthetic oligonucleotide
gcattaggaatcatccaagcacaaccagataagagtgaatcagagttagttacccaga

SEQ ID NO: 15013 - DNA, 50 bp, Artificial
  Synthetic oligonucleotide
agtgaaagtagaaccagaggagctctctcgacgcaggactcggcttgctg

SEQ ID NO: 15014 - DNA, 60 bp, Artificial
  Synthetic oligonucleotide
catgctccttgggatgttaatgatctgtagtgctgcagagcagttgtgggttacagtcta

SEQ ID NO: 15015 - DNA, 55 bp, Artificial
  Synthetic oligonucleotide
gataaatgtcaggtaaaaggagaagccatgcatgggcaagtagactgtagtccag

SEQ ID NO: 15016 - DNA, 60 bp, Artificial
  Synthetic oligonucleotide
ttagccaaaattatcctatagtgcagaatgtacaagggcaaatggtacatcagcccctat

SEQ ID NO: 15017 - DNA, 60 bp, Artificial
  Synthetic oligonucleotide
tggccagctgtgataaatgtcagttaaaaggggaggccatgcatggacaggtagactgta

SEQ ID NO: 15018 - DNA, 60 bp, Artificial
  Synthetic oligonucleotide
ccgacatagcagaataggcatcaatctacggaggagagtaagggatggatccggtagatc

SEQ ID NO: 15019 - DNA, 53 bp, Artificial
  Synthetic oligonucleotide
agtacaatgcacacatggaattaaaccagtggtatcaactcaattactactaa

SEQ ID NO: 15020 - DNA, 60 bp, Artificial
  Synthetic oligonucleotide
cctggcatattcatatgaggccttcaacaggttcccagaagagtttgggtatcagtcagg

SEQ ID NO: 15021 - DNA, 52 bp, Artificial
  Synthetic oligonucleotide
atataagacaagcatattgtaacattactaaagcaaactggactgatacttt

SEQ ID NO: 15022 - DNA, 60 bp, Artificial
  Synthetic oligonucleotide
gtgataagtgtcaactaaaaggggaggccatgcatggacaagtagattgtagtccaggga

SEQ ID NO: 15023 - DNA, 50 bp, Artificial
  Synthetic oligonucleotide
agatgggtggcaagtggtcaaaacgtagtgtgcctgggtggtctgctata

SEQ ID NO: 15024 - DNA, 55 bp, Artificial
  Synthetic oligonucleotide
cagcacagtacagtgtacacatgggattaggccagtagtgtcaactcagctgctg

SEQ ID NO: 15025 - DNA, 52 bp, Artificial
  Synthetic oligonucleotide
gattgtggaacttctaggacgcagggggagggaagtcctcagctattggtag

SEQ ID NO: 15026 - DNA, 50 bp, Artificial
  Synthetic oligonucleotide
cgtggcgcaggcagagtttgttgcaaggcttgatgtaagactcgttacta

SEQ ID NO: 15027 - DNA, 60 bp, Artificial
  Synthetic oligonucleotide
ggacatgggagtggtcaaccctcagatgctgcatataagcagctgcttttcgcctgtact

SEQ ID NO: 15028 - DNA, 55 bp, Artificial
  Synthetic oligonucleotide
ggtggaagtaaggtggtatgatcttggtatgaccgtaccttattaggaaggcaac

SEQ ID NO: 15029 - DNA, 51 bp, Artificial
  Synthetic oligonucleotide
ggttccgaacgcaatatagcgggaggctgcgagggatattcgagaggacta

SEQ ID NO: 15030 - DNA, 60 bp, Artificial
  Synthetic oligonucleotide
cagaagtacacatcccactaggggatgctagattagtaataacaacatattggggtctgc

SEQ ID NO: 15031 - DNA, 55 bp, Artificial
  Synthetic oligonucleotide
gtaaacctccttacaggtactttgaagcacgggtgacacctttggatcatcggat

SEQ ID NO: 15032 - DNA, 60 bp, Artificial
  Synthetic oligonucleotide
tgtctagggcagaaagtgctgaccaggtgtgaattccataaaggacatagtcaggtaggg

SEQ ID NO: 15033 - DNA, 55 bp, Artificial
  Synthetic oligonucleotide
aaagctcctctggaaaggtgaaggggcagtagtaatacaagacaagagtgacata

SEQ ID NO: 15034 - DNA, 51 bp, Artificial
  Synthetic oligonucleotide
gacagcatgttagcacgcagacacatggcccgcgagctacatccggacttt

SEQ ID NO: 15035 - DNA, 60 bp, Artificial
  Synthetic oligonucleotide
cacatgacccgcgagctacatccggagttttacaaggactgctgacatcgctacaagaac

SEQ ID NO: 15036 - DNA, 57 bp, Artificial
  Synthetic oligonucleotide
gttattcctaggtgtaactatcaagcaggacataataaggtaggatctctacaatac

SEQ ID NO: 15037 - DNA, 55 bp, Artificial
  Synthetic oligonucleotide
atttacaggggcaaatggtacaccagcccttaacacctagaactttgaatgcgtg

SEQ ID NO: 15038 - DNA, 60 bp, Artificial
  Synthetic oligonucleotide
atgctaaagcctacaaagcagaggcacataatatctgggctacacatgcctgcgtaccta

SEQ ID NO: 15039 - DNA, 59 bp, Artificial
  Synthetic oligonucleotide
ctattgtaatacatcaggcctgtttaatcacacttacctgcctaagagcacttacctgc

SEQ ID NO: 15040 - DNA, 60 bp, Artificial
  Synthetic oligonucleotide
tattgtaacacaacacgactgttcaatagtacctggagggccaatagcagctatgacata

SEQ ID NO: 15041 - DNA, 52 bp, Artificial
  Synthetic oligonucleotide
gctataagacatgccctattaggacatagagttagtcctagttgtgaatatc

SEQ ID NO: 15042 - DNA, 55 bp, Artificial
  Synthetic oligonucleotide
cacatgggattaggccagtagtatctactcacctgttgttaaatggcagcctagc

SEQ ID NO: 15043 - DNA, 60 bp, Artificial
  Synthetic oligonucleotide
gttgtcccggtgaatgcaacacgatctcatatgattctgtacatgcctcttgctataacc

SEQ ID NO: 15044 - DNA, 60 bp, Artificial
  Synthetic oligonucleotide
tgtggatggggtatgagctccatccagacaaatggacagtacagcccatccaattaccta

SEQ ID NO: 15045 - DNA, 60 bp, Artificial
  Synthetic oligonucleotide
ccttgatctgtggatctaccacacacaaggctacttccctgattggcagaactacacacc

SEQ ID NO: 15046 - DNA, 53 bp, Artificial
  Synthetic oligonucleotide
attgtaaacctccttacagattttttgaagcgcgagtgactcctttggatcat

SEQ ID NO: 15047 - DNA, 53 bp, Artificial
  Synthetic oligonucleotide
gccgaacaagctacacaggaggttaaaaattggatgacagaaaccttgttggt

SEQ ID NO: 15048 - DNA, 55 bp, Artificial
  Synthetic oligonucleotide
tactgtgccctggaactctagttggagtaataaatcttacgatgagatatgggat

SEQ ID NO: 15049 - DNA, 51 bp, Artificial
  Synthetic oligonucleotide
caggaacaaataggctggatgacaagtaacccacctatcccagtgggagac

SEQ ID NO: 15050 - DNA, 60 bp, Artificial
  Synthetic oligonucleotide
cggacaggtcagtcaaaattatcctatagtgcagaatctccaagggcaaatggtacatca

SEQ ID NO: 15051 - DNA, 60 bp, Artificial
  Synthetic oligonucleotide
tgcgagtgcgtcagtgttgacaggaagtaaattggatgcatgggaacaaattaggctaaa

SEQ ID NO: 15052 - DNA, 60 bp, Artificial
  Synthetic oligonucleotide
acagtggtggctcatatttgaccttaacataggccacctcccctgtgagctagactggac

SEQ ID NO: 15053 - DNA, 53 bp, Artificial
  Synthetic oligonucleotide
ccaaaattatcctatagtgcaaaacctacagggccaaatggtacaccaggcca

SEQ ID NO: 15054 - DNA, 56 bp, Artificial
  Synthetic oligonucleotide
tagcagaagaagaggtggtaattagatctgccaatttctcggacaatgctaaaacc

SEQ ID NO: 15055 - DNA, 51 bp, Artificial
  Synthetic oligonucleotide
cgttcacaagttgtaacacctcagtcattacacaggcctgtccaaaggtat

SEQ ID NO: 15056 - DNA, 50 bp, Artificial
  Synthetic oligonucleotide
tgacatcttaatagctagtgatagaacagatttagaacatgacagggtag

SEQ ID NO: 15057 - DNA, 54 bp, Artificial
  Synthetic oligonucleotide
acaagggcccaaggaaccattcaaagattatgttgacaggttctataagacctt

SEQ ID NO: 15058 - DNA, 57 bp, Artificial
  Synthetic oligonucleotide
aagcttaccaagctatacgttgacacattgtaacacctcagtcattacacaggcctg

SEQ ID NO: 15059 - DNA, 56 bp, Artificial
  Synthetic oligonucleotide
cccagtcagtatcctagacattaagcagggacctaaggagcctttcagggactatg

SEQ ID NO: 15060 - DNA, 59 bp, Artificial
  Synthetic oligonucleotide
ttgtgggcaacagtgtactatggagtacctgtgtggaaagatgcggagacaacactctt

SEQ ID NO: 15061 - DNA, 54 bp, Artificial
  Synthetic oligonucleotide
tatcatgtccttaatagcaaaggttaggcagggatattctcccctctcgttgca

SEQ ID NO: 15062 - DNA, 60 bp, Artificial
  Synthetic oligonucleotide
catcaacaaaggactgcagtggctgagggacatcagcagacacctgtggggagtgatagc

SEQ ID NO: 15063 - DNA, 55 bp, Artificial
  Synthetic oligonucleotide
aagcttgtccaaaggtatcctttgagccaattcctatacattattgcaccccggc

SEQ ID NO: 15064 - DNA, 55 bp, Artificial
  Synthetic oligonucleotide
ggcgcaacagcatatgttgcagctcacggtctggggtattaaacaactccaggca

SEQ ID NO: 15065 - DNA, 60 bp, Artificial
  Synthetic oligonucleotide
tagctgaggggacagatagggttatagaagtagtacaaggagcttatagagctattcgcc

SEQ ID NO: 15066 - DNA, 51 bp, Artificial
  Synthetic oligonucleotide
cacccatctgagacagaacataagatagtagaaaaggtaatacaggccttg

SEQ ID NO: 15067 - DNA, 60 bp, Artificial
  Synthetic oligonucleotide
ggctgtgcagactaggacatggtcatcgtatgggagcatgcgattaccgtaaagtagatc

SEQ ID NO: 15068 - DNA, 55 bp, Artificial
  Synthetic oligonucleotide
ggctagggagtggctaaccctcagatgctgcatataagcagctgcttttcgcctg

SEQ ID NO: 15069 - DNA, 50 bp, Artificial
  Synthetic oligonucleotide
caacttagagaccccagaggatcagatatagcgggaaccaccagcacagt

SEQ ID NO: 15070 - DNA, 60 bp, Artificial
  Synthetic oligonucleotide
gggagtggctcaccctcagatgctgcatataagcagctgcttttcgcctgtactgggtct

SEQ ID NO: 15071 - DNA, 55 bp, Artificial
  Synthetic oligonucleotide
ggcaagtaacctggataccagaatgggactttgtgtcaacacctcccttagtcag

SEQ ID NO: 15072 - DNA, 60 bp, Artificial
  Synthetic oligonucleotide
taataaatctctaccagatatttgggataacatgacctggatgcagtgggatagagaaat

SEQ ID NO: 15073 - DNA, 54 bp, Artificial
  Synthetic oligonucleotide
tctgttgtgtgactctggtaactagagatccctcagactacttgtggtcgtgtg

SEQ ID NO: 15074 - DNA, 51 bp, Artificial
  Synthetic oligonucleotide
ctgccacaacaaatcagaagaccgagttacaagcagtttatctagctttgc

SEQ ID NO: 15075 - DNA, 60 bp, Artificial
  Synthetic oligonucleotide
gcagacggctgtaaacaaataatagcacagctacaaccatcccttcagacaggatcagaa

SEQ ID NO: 15076 - DNA, 60 bp, Artificial
  Synthetic oligonucleotide
tagcattccatcacgtggcccgagagatgcatccggaatattacaagaactgatgacagc

SEQ ID NO: 15077 - DNA, 52 bp, Artificial
  Synthetic oligonucleotide
tcgctccctccgcagtgagaaggtacgagggaccggagtcggtaagacacaa

SEQ ID NO: 15078 - DNA, 56 bp, Artificial
  Synthetic oligonucleotide
gagagcagtggaacttctgggacgcagcagtctcaagggactgcagagggggtgga

SEQ ID NO: 15079 - DNA, 60 bp, Artificial
  Synthetic oligonucleotide
acgagaactgatgacaccgagctttccacactgctgacaacgagctctacagggactttc

SEQ ID NO: 15080 - DNA, 55 bp, Artificial
  Synthetic oligonucleotide
accgagctttccacactgctgacaacgagctctacagggactttccgctggggac

SEQ ID NO: 15081 - DNA, 53 bp, Artificial
  Synthetic oligonucleotide
cagaaaccttgttggtccaaaatgcaaacccagattgtaagactattctcaaa

SEQ ID NO: 15082 - DNA, 60 bp, Artificial
  Synthetic oligonucleotide
caaccatatcacaagcctgtccaaagatcagttttgacccaattcctatacattattgtg

SEQ ID NO: 15083 - DNA, 59 bp, Artificial
  Synthetic oligonucleotide
accattgtccagtgtgctttctgacaaaaggcttaggcatttactatggcaggaagaag

SEQ ID NO: 15084 - DNA, 60 bp, Artificial
  Synthetic oligonucleotide
ggcataactacacaccagggccagggatcagatacccactgtgttttggatggtgcttca

SEQ ID NO: 15085 - DNA, 50 bp, Artificial
  Synthetic oligonucleotide
ggccacaggtacctttaagaccaatgacctacaagggagcgtttgatctc

SEQ ID NO: 15086 - DNA, 60 bp, Artificial
  Synthetic oligonucleotide
aggattcttcagtctcatctgggaggatctccaacaactgctgacgtggctctaccagac

SEQ ID NO: 15087 - DNA, 60 bp, Artificial
  Synthetic oligonucleotide
aggctactgagggagagaccaacagcttgttacaccctatatgccaacatggaatagagg

SEQ ID NO: 15088 - DNA, 50 bp, Artificial
  Synthetic oligonucleotide
gttgtcaaaacgcagcataagtggatggcctgctataagggaaagaatga

SEQ ID NO: 15089 - DNA, 60 bp, Artificial
  Synthetic oligonucleotide
ttacaccccatctgtcaacatggaatagaggacgaagacagagaagtgctggtctggaga

SEQ ID NO: 15090 - DNA, 55 bp, Artificial
  Synthetic oligonucleotide
gcttaaagccatgtgtaaagttaacccctctctgcgtcacgttagattgccatag

SEQ ID NO: 15091 - DNA, 59 bp, Artificial
  Synthetic oligonucleotide
gtaaactcattaggggggctaaagcactaacagacatagtaccattgactagagaagca

SEQ ID NO: 15092 - DNA, 55 bp, Artificial
  Synthetic oligonucleotide
aagactaaacagcctgcaatcctcgtccacaccccagggcccaagatgcccgggc

SEQ ID NO: 15093 - DNA, 60 bp, Artificial
  Synthetic oligonucleotide
gtagccaactgtaataaatgtcagctaaaaggggaagccatgcatgggcaagtagactgc

SEQ ID NO: 15094 - DNA, 60 bp, Artificial
  Synthetic oligonucleotide
gccaaaactacccaatagtgcaaaatgcacaagggcaaatggtacatcaggccatatcac

SEQ ID NO: 15095 - DNA, 60 bp, Artificial
  Synthetic oligonucleotide
cagccaaaattttcctatagtgcagaatctccaagggcaaatggtacaccaggccatatc

SEQ ID NO: 15096 - DNA, 60 bp, Artificial
  Synthetic oligonucleotide
cacttgtggagatggggcaccatgctccttggaatgttgatgatctgtagtgctgcagac

SEQ ID NO: 15097 - DNA, 56 bp, Artificial
  Synthetic oligonucleotide
acactttcctagaccatggctccataacctaggacagtacattcatgaaacctatg

SEQ ID NO: 15098 - DNA, 55 bp, Artificial
  Synthetic oligonucleotide
gggatatgaactccatcctgacagatggacagtccagcctatagaactgcccgaa

SEQ ID NO: 15099 - DNA, 55 bp, Artificial
  Synthetic oligonucleotide
agttaggcagggatactcaccattatcgttccagacccgcctcccagctcagagg

SEQ ID NO: 15100 - DNA, 57 bp, Artificial
  Synthetic oligonucleotide
ggcaccttccctattgtgcccttagactattcaagttgcctctgtggattaggactg

SEQ ID NO: 15101 - DNA, 60 bp, Artificial
  Synthetic oligonucleotide
ggagctctctcgacgcaggactcggcttgctgaaagtgcactcggcaagaggcgagagcg

SEQ ID NO: 15102 - DNA, 55 bp, Artificial
  Synthetic oligonucleotide
ccagcgctgcattcaaagcagcctgttggtgggcaagtgtccaacaggaatttgg

SEQ ID NO: 15103 - DNA, 58 bp, Artificial
  Synthetic oligonucleotide
ccctggctccatagcttaggacagcatatctatgacacctatggggatacttgggagg

SEQ ID NO: 15104 - DNA, 50 bp, Artificial
  Synthetic oligonucleotide
gttcgagacacccggccgcaaccctgggagacgtcccaaggacttcgggg

SEQ ID NO: 15105 - DNA, 60 bp, Artificial
  Synthetic oligonucleotide
tggcattgtcagagggagctattccctatgatattaataccatgttaaatgccataggag

SEQ ID NO: 15106 - DNA, 59 bp, Artificial
  Synthetic oligonucleotide
ccaggagaagcatccggagtacttcaaagactgctgacacagactgcgtagacatagaa

SEQ ID NO: 15107 - DNA, 52 bp, Artificial
  Synthetic oligonucleotide
tacgaattaatggtaagcttttccgcggagtacttgatacaggggccgatat

SEQ ID NO: 15108 - DNA, 60 bp, Artificial
  Synthetic oligonucleotide
ttcccatctctcctagtcgccgcctggtcactcggtgctcaactgagataaagaccctgg

SEQ ID NO: 15109 - DNA, 57 bp, Artificial
  Synthetic oligonucleotide
gccggaacagggacttgagagcgaaagtagaaccagaggagacctctcgacgcagga

SEQ ID NO: 15110 - DNA, 51 bp, Artificial
  Synthetic oligonucleotide
gtatactgcattcactatacctagtataaataatgagacaccagggactag

SEQ ID NO: 15111 - DNA, 53 bp, Artificial
  Synthetic oligonucleotide
gtcctaccagcatcctggacataagacaagggccaaaggaaccctttagagat

SEQ ID NO: 15112 - DNA, 50 bp, Artificial
  Synthetic oligonucleotide
tcgattcgattagtcaacggattcttagcacttgcctgggaggacctccg

SEQ ID NO: 15113 - DNA, 53 bp, Artificial
  Synthetic oligonucleotide
taatacttagtctagtgaagaacattaggcagggatatcaacccctctcgtta

SEQ ID NO: 15114 - DNA, 52 bp, Artificial
  Synthetic oligonucleotide
cctttgcctagtgttaggatattagcagaggatagatggaacaagtcccgga

SEQ ID NO: 15115 - DNA, 51 bp, Artificial
  Synthetic oligonucleotide
gttttctaccagggactttccgctggggactttccagggaggtgtggcttg

SEQ ID NO: 15116 - DNA, 55 bp, Artificial
  Synthetic oligonucleotide
ggtgcttcaagctagtgccagttgacccaagggaagtagaagaggccaacgaagg

SEQ ID NO: 15117 - DNA, 60 bp, Artificial
  Synthetic oligonucleotide
tatcacaagcctgtccaaagatctcttttgacccaattcctatacattattgtgctccag

SEQ ID NO: 15118 - DNA, 60 bp, Artificial
  Synthetic oligonucleotide
gatgctgcatataggcagctgcttttcgcttgtactgggtctctctaggtagaccagatc

SEQ ID NO: 15119 - DNA, 52 bp, Artificial
  Synthetic oligonucleotide
gacaagcacactgtaacattagtggacaagattggaacagaaccttaacacg

SEQ ID NO: 15120 - DNA, 55 bp, Artificial
  Synthetic oligonucleotide
aatgacatggtagaacagatgcatgaggatataattgggttatgggatgaaagcc

SEQ ID NO: 15121 - DNA, 60 bp, Artificial
  Synthetic oligonucleotide
ctaaccctcagatgctgcatataagcagctgctttgcgcctgtactgggtctctccttgt

SEQ ID NO: 15122 - DNA, 52 bp, Artificial
  Synthetic oligonucleotide
tggaccgcaccaggcgcggttccggttgctctgcgtgattccgatcgcccgg

SEQ ID NO: 15123 - DNA, 60 bp, Artificial
  Synthetic oligonucleotide
gcaggaactactagtaccctgcaggaacaaataggatggatgacacataatccacctatc

SEQ ID NO: 15124 - DNA, 55 bp, Artificial
  Synthetic oligonucleotide
tttccaggaggcgtggactgggcgggactggggagtggcgagccctcagatgctg

SEQ ID NO: 15125 - DNA, 55 bp, Artificial
  Synthetic oligonucleotide
ccatcacatggcccgacagaaacatccggagtactacaaagactgctgacatcga

SEQ ID NO: 15126 - DNA, 60 bp, Artificial
  Synthetic oligonucleotide
tcctggccatagaaagatacctacaggatcaacggctcctagggatgtggggatgctctg

SEQ ID NO: 15127 - DNA, 56 bp, Artificial
  Synthetic oligonucleotide
catttagtatgggcaagcagggagctggacagatttgcactcaaccctgacctctt

SEQ ID NO: 15128 - DNA, 58 bp, Artificial
  Synthetic oligonucleotide
cctgtggcagatgactaccagagaggtgccttactccggcgaacctcagtacgtgcag

SEQ ID NO: 15129 - DNA, 57 bp, Artificial
  Synthetic oligonucleotide
tgactctggtaactagagatccctcagaccacttagacagagtgaaaaatctctagc

SEQ ID NO: 15130 - DNA, 60 bp, Artificial
  Synthetic oligonucleotide
aggtggaagtttgacagccacctagcacacagacatgtggcccgcgagatacatccggag

SEQ ID NO: 15131 - DNA, 60 bp, Artificial
  Synthetic oligonucleotide
tattgtgccctggaactctagttggagtaataagactcagaatgagatttgggacaacat

SEQ ID NO: 15132 - DNA, 60 bp, Artificial
  Synthetic oligonucleotide
ggtctaagaatagtttttgctgtgctttctatagtgaatagagttaggcagggatactca

SEQ ID NO: 15133 - DNA, 60 bp, Artificial
  Synthetic oligonucleotide
gaccggggagtggccagccctcagatgctgcatataagcagctgcttttcgcctgtactg

SEQ ID NO: 15134 - DNA, 60 bp, Artificial
  Synthetic oligonucleotide
tctctagcagtggcgcccgaacaggggcttgaaagcgaaagtaagaccagaggagatctc

SEQ ID NO: 15135 - DNA, 60 bp, Artificial
  Synthetic oligonucleotide
aagcaatgcatggtcaggtcgactgcagtccagaagtatggcaaatagattgcacacatt

SEQ ID NO: 15136 - DNA, 55 bp, Artificial
  Synthetic oligonucleotide
gcaactcatggtcaggtagactacagtccagaagtatggcaaatagattgcacac

SEQ ID NO: 15137 - DNA, 57 bp, Artificial
  Synthetic oligonucleotide
atctagtgaagaacattaggcagggatatcaacccctctcgttacagatccctaccc

SEQ ID NO: 15138 - DNA, 60 bp, Artificial
  Synthetic oligonucleotide
cctatggggctgtaagggaaagctaatctgctacacatcagtaaaatggaacacgacatg

SEQ ID NO: 15139 - DNA, 55 bp, Artificial
  Synthetic oligonucleotide
tctgtatctggcggacccgtggtggaactgacgagttcggaacacccggccgcaa

SEQ ID NO: 15140 - DNA, 54 bp, Artificial
  Synthetic oligonucleotide
cctatacattattgtgctccagctggttatgcgattctaaggtgtaataatgag

SEQ ID NO: 15141 - DNA, 52 bp, Artificial
  Synthetic oligonucleotide
gtttaccctcagaagctgcatataagcagccgctctgcgcttgtactgggtc

SEQ ID NO: 15142 - DNA, 60 bp, Artificial
  Synthetic oligonucleotide
gttacaccctatgagcctacataggatagataacccagagaaagaagtgctagtatggaa

SEQ ID NO: 15143 - DNA, 53 bp, Artificial
  Synthetic oligonucleotide
tttccggagttctaccaagatgactgaggccgctgacacagagattgctgaca

SEQ ID NO: 15144 - DNA, 55 bp, Artificial
  Synthetic oligonucleotide
agtgcagaatctccaagggcaaatggtacaccaggccatatcaccgagaactctg

SEQ ID NO: 15145 - DNA, 60 bp, Artificial
  Synthetic oligonucleotide
tgacagtcaactagcacgcagacacctggcccgcgagctacatccggagttttacaagga

SEQ ID NO: 15146 - DNA, 60 bp, Artificial
  Synthetic oligonucleotide
tttgacagccgcctagcatttcatcacatggcccgagagctacatccggagtactacaaa

SEQ ID NO: 15147 - DNA, 60 bp, Artificial
  Synthetic oligonucleotide
tgtcagcacagtacaatgtacacatgggattaggccagtagtatctactcacctgttgtt

SEQ ID NO: 15148 - DNA, 50 bp, Artificial
  Synthetic oligonucleotide
cgagagaaacatccggagtactacaaagactgctgacatcgagtgtttta

SEQ ID NO: 15149 - DNA, 60 bp, Artificial
  Synthetic oligonucleotide
gtgtgagtatcctgcaggacataataaggtaggatctctacaatatttggcactgaaagc

SEQ ID NO: 15150 - DNA, 60 bp, Artificial
  Synthetic oligonucleotide
ggactcggcttgctgaggtgcacacagcaagaggcgagagcggcgactggtgagtacgcc

SEQ ID NO: 15151 - DNA, 54 bp, Artificial
  Synthetic oligonucleotide
gaactttgctataacatgggtggcaagtggtcaaaaagtagcatagtggggtgg

SEQ ID NO: 15152 - DNA, 54 bp, Artificial
  Synthetic oligonucleotide
agaagctctgctagatacaggagctgatgatacagtaatagataatgtacaact

SEQ ID NO: 15153 - DNA, 60 bp, Artificial
  Synthetic oligonucleotide
ggcatggagtgtccatagaatggagatgtgggtcatatagtacacaagtagaccctgaga

SEQ ID NO: 15154 - DNA, 59 bp, Artificial
  Synthetic oligonucleotide
agtgataacctactggggaagggagctacaaactagtgccataagcttattagatgcaa

SEQ ID NO: 15155 - DNA, 52 bp, Artificial
  Synthetic oligonucleotide
tggatcacgggtactatcacacacagggcttcttccctgattggcagaacta

SEQ ID NO: 15156 - DNA, 55 bp, Artificial
  Synthetic oligonucleotide
ccgtctggtatttgactctggtagctagagatccctcagacccctttagtcagtg

SEQ ID NO: 15157 - DNA, 50 bp, Artificial
  Synthetic oligonucleotide
ctatacctagtataaataatgagacaccagggactagatatcagtacaac

SEQ ID NO: 15158 - DNA, 60 bp, Artificial
  Synthetic oligonucleotide
tgggataactactggcaagtgacatggatcccagactgggacttcgtgtctaccccacca

SEQ ID NO: 15159 - DNA, 60 bp, Artificial
  Synthetic oligonucleotide
cagtggtgggataactactggcaagtgacatggatcccagagtgggactttgtatctacc

SEQ ID NO: 15160 - DNA, 55 bp, Artificial
  Synthetic oligonucleotide
gggatcaaagcctgaagccatgtgtgaagttaaccccactctgtgttactttacg

SEQ ID NO: 15161 - DNA, 50 bp, Artificial
  Synthetic oligonucleotide
acacagagcccgagagatgcatccggagtactacaaagactgctgactaa

SEQ ID NO: 15162 - DNA, 60 bp, Artificial
  Synthetic oligonucleotide
tatacgccagggccagggatcagatatccactgacctttggatggtgcttcaagctagta

SEQ ID NO: 15163 - DNA, 53 bp, Artificial
  Synthetic oligonucleotide
catttgagcacaaggcccgacagctacatccggagtactacaaagactgctga

SEQ ID NO: 15164 - DNA, 58 bp, Artificial
  Synthetic oligonucleotide
cgagggcagtggaacttctgggacgcagcagcctcaagggactgagactggggtggga

SEQ ID NO: 15165 - DNA, 58 bp, Artificial
  Synthetic oligonucleotide
ccaacatagcagaataggcattcttccacggagaagagtaagggatggatccagtaga

SEQ ID NO: 15166 - DNA, 50 bp, Artificial
  Synthetic oligonucleotide
tggcaggcggtaggaaaagcaatgtatgcccctcccatccaaggactaat

SEQ ID NO: 15167 - DNA, 52 bp, Artificial
  Synthetic oligonucleotide
agattcccactaacctttggatggtgctacaagctagtaccaatggagccat

SEQ ID NO: 15168 - DNA, 55 bp, Artificial
  Synthetic oligonucleotide
gttttacaaggactgctgacatcgagatttctacaagggactttccgctggggac

SEQ ID NO: 15169 - DNA, 55 bp, Artificial
  Synthetic oligonucleotide
caaggactgctgacatcgagatttctacaagggactttccgctggggacctttcc

SEQ ID NO: 15170 - DNA, 60 bp, Artificial
  Synthetic oligonucleotide
tgcaaactacacaccgggaccaggggtcagatatccactgacctttggatggtgcttcaa

SEQ ID NO: 15171 - DNA, 59 bp, Artificial
  Synthetic oligonucleotide
gggcgcggcgtcaataacgctgacggtacaggtcagacaattgttgtctggtatagtgc

SEQ ID NO: 15172 - DNA, 55 bp, Artificial
  Synthetic oligonucleotide
cgattcggagaactcgaccttcctcctgaggcaaggaccacagccaacttcctct

SEQ ID NO: 15173 - DNA, 55 bp, Artificial
  Synthetic oligonucleotide
ctaaattttgataggtgggtcacagtcaatggctataaagtgttatacaggtccc

SEQ ID NO: 15174 - DNA, 60 bp, Artificial
  Synthetic oligonucleotide
ggatgcatatttttcagtccctctagatgtagacttcaggaagtacactgcattcactat

SEQ ID NO: 15175 - DNA, 56 bp, Artificial
  Synthetic oligonucleotide
agaatgaaacatctagtatgggcaagcagggaactggagagatttgcacttaaccc

SEQ ID NO: 15176 - DNA, 57 bp, Artificial
  Synthetic oligonucleotide
ggataggaccctatgaaggagaggccctactggactggcaagtccttgccagtctgg

SEQ ID NO: 15177 - DNA, 55 bp, Artificial
  Synthetic oligonucleotide
ggaccaggaaccagatacccactaacatttggatggtgcttcaagctagtaccag

SEQ ID NO: 15178 - DNA, 56 bp, Artificial
  Synthetic oligonucleotide
aagggatggacccggtagatcctaatctagagccctggaatcatccggggagtcag

SEQ ID NO: 15179 - DNA, 51 bp, Artificial
  Synthetic oligonucleotide
tgacacagaaactgctgacagagactttccgctggggactttccaggggag

SEQ ID NO: 15180 - DNA, 51 bp, Artificial
  Synthetic oligonucleotide
aacgttataggctaaaacatttagtatgggcaagcagggagctggacagat

SEQ ID NO: 15181 - DNA, 60 bp, Artificial
  Synthetic oligonucleotide
tactggcaggtgacatggatcccagactgggacttcgtatctaccccaccactggtcaga

SEQ ID NO: 15182 - DNA, 60 bp, Artificial
  Synthetic oligonucleotide
ccgattgagagacttcatattgattgcagcgagagtggtggaccttctgggacacagcag

SEQ ID NO: 15183 - DNA, 50 bp, Artificial
  Synthetic oligonucleotide
cagacaatgaggtgctggtatggagatttgacagtagcctagcacggaga

SEQ ID NO: 15184 - DNA, 60 bp, Artificial
  Synthetic oligonucleotide
tctgccataaggaaagccatattaggagagatagttagccccaggtgtgattatcccgca

SEQ ID NO: 15185 - DNA, 60 bp, Artificial
  Synthetic oligonucleotide
tcagcacttgtggacatggggcaccatgctccttggaatgttgatgatctgtagtagtgc

SEQ ID NO: 15186 - DNA, 55 bp, Artificial
  Synthetic oligonucleotide
ggacatggggcaccatgctccttggaatgttgatgatctgtagtagtgctgaaca

SEQ ID NO: 15187 - DNA, 55 bp, Artificial
  Synthetic oligonucleotide
ggaagtgttagagtggaggtttgacagcaagctagcatttcatcacgtggcccga

SEQ ID NO: 15188 - DNA, 60 bp, Artificial
  Synthetic oligonucleotide
gctgaggtgcacacagcaagaggcgagagcggcgactggtgagtacgccaaatcttgact

SEQ ID NO: 15189 - DNA, 56 bp, Artificial
  Synthetic oligonucleotide
tccatgggaggcgtgacctgggcgggactggggagtggcgagccctcagatgctgc

SEQ ID NO: 15190 - DNA, 56 bp, Artificial
  Synthetic oligonucleotide
gcctcctggcatttcgtcacatggcccgagagaagcatccggagtactacaaggac

SEQ ID NO: 15191 - DNA, 55 bp, Artificial
  Synthetic oligonucleotide
ggaactcctcaaatattggtggaatctcctacagtattggggtcaggaactgagg

SEQ ID NO: 15192 - DNA, 52 bp, Artificial
  Synthetic oligonucleotide
gtggtcaaaaagtagcatagtgggatggcctcagatcagggaaagactaaga

SEQ ID NO: 15193 - DNA, 51 bp, Artificial
  Synthetic oligonucleotide
tggcagcaagtaggaaaagcaatgtatgcccctcccatcagcggattaatt

SEQ ID NO: 15194 - DNA, 50 bp, Artificial
  Synthetic oligonucleotide
gtgatatcaactcaactactgctaaatggtagcctagcagaaggagacat

SEQ ID NO: 15195 - DNA, 57 bp, Artificial
  Synthetic oligonucleotide
tattagtatggaggtttgacagtagcctagcacgcagacatatggcccgcgagctac

SEQ ID NO: 15196 - DNA, 51 bp, Artificial
  Synthetic oligonucleotide
ggcacagttaaattcatgggggtgtgcgtttaggcaggtctgccacactac

SEQ ID NO: 15197 - DNA, 60 bp, Artificial
  Synthetic oligonucleotide
gctccttgggatgttgatgacatatagtgttgcagagaagaagtgggtcacagtgtatta

SEQ ID NO: 15198 - DNA, 60 bp, Artificial
  Synthetic oligonucleotide
atgttccttgggttcttaggaacagcaggaagcactatgggcgcagcgtcaataacgctg

SEQ ID NO: 15199 - DNA, 55 bp, Artificial
  Synthetic oligonucleotide
aaggaatagtgctatcagcttgctcaacgccacagctatagcagtagctgagggg

SEQ ID NO: 15200 - DNA, 55 bp, Artificial
  Synthetic oligonucleotide
gtgaatacactgcaggacatagtcaggtagggacactgcaactattagctctaag

SEQ ID NO: 15201 - DNA, 55 bp, Artificial
  Synthetic oligonucleotide
taagaaaatccgccatggtgagtctagatagagacatggcgaggcaagtctccgg

SEQ ID NO: 15202 - DNA, 50 bp, Artificial
  Synthetic oligonucleotide
cacacacaaagctcgagagatgcatccggagttttacaaagactgctgac

SEQ ID NO: 15203 - DNA, 51 bp, Artificial
  Synthetic oligonucleotide
taatgtgccgtggaactccagttggagtaataaatctctaccagaaatttg

SEQ ID NO: 15204 - DNA, 55 bp, Artificial
  Synthetic oligonucleotide
tgcacaagggcaaatggtacaccaggccttatcacctaggactttgaatgcatgg

SEQ ID NO: 15205 - DNA, 60 bp, Artificial
  Synthetic oligonucleotide
cagtcaaaattaccccatagtgcaaaacgcacaagggcaaatggtacatcaggccatatc

SEQ ID NO: 15206 - DNA, 51 bp, Artificial
  Synthetic oligonucleotide
gaaagacaagcgggttttttagggcttggcccatggggaaagaagccccgc

SEQ ID NO: 15207 - DNA, 59 bp, Artificial
  Synthetic oligonucleotide
gagatgtagaagaccaggaaataagacagtcttaccagtcaccattatgtcagggttgg

SEQ ID NO: 15208 - DNA, 60 bp, Artificial
  Synthetic oligonucleotide
caactccggacaagagtcctggctatagaaagatacctacaggatcaacagctcctagga

SEQ ID NO: 15209 - DNA, 50 bp, Artificial
  Synthetic oligonucleotide
tgtaaactcctcaagggaactaaagcactaacagacatagtaccactgac

SEQ ID NO: 15210 - DNA, 60 bp, Artificial
  Synthetic oligonucleotide
ggaccagggagagcattttatgcacaagacataataggagatataagacaagcacattgt

SEQ ID NO: 15211 - DNA, 52 bp, Artificial
  Synthetic oligonucleotide
ttaatgcttcaagtagtgtgtgcccgtctgttgtgtgactctcgtatactag

SEQ ID NO: 15212 - DNA, 60 bp, Artificial
  Synthetic oligonucleotide
ctgtcatccttgggttcttaggaacagcaggaagcactatgggcgcggcgtcaataacgc

SEQ ID NO: 15213 - DNA, 60 bp, Artificial
  Synthetic oligonucleotide
tgcttcaaggtaaggggtgcccgtctgttgtgtgactctggtaactagagatccctcaga

SEQ ID NO: 15214 - DNA, 60 bp, Artificial
  Synthetic oligonucleotide
tggaagtttgacagcaaactagcattccatcacgtggcccgagagaaacatccggagtac

SEQ ID NO: 15215 - DNA, 55 bp, Artificial
  Synthetic oligonucleotide
aattagattgcacacatttagaagggaaagtcatcctggtagcagtccacgtggc

SEQ ID NO: 15216 - DNA, 55 bp, Artificial
  Synthetic oligonucleotide
ttccggggaggtgtggtttgggcggagttggggagtggcaaaccctcagatgctg

SEQ ID NO: 15217 - DNA, 52 bp, Artificial
  Synthetic oligonucleotide
gcaatacctcgaccatcacacaagcttgtccaaaggtatcctttgagccaat

SEQ ID NO: 15218 - DNA, 60 bp, Artificial
  Synthetic oligonucleotide
agtcaaaattaccctatagtgcagaatcttcaagggcaaatggtacatcaggccatatca

SEQ ID NO: 15219 - DNA, 54 bp, Artificial
  Synthetic oligonucleotide
actcgttaaaagcaaccttggcggggatagtctgtgtgcaaatgggaatgcagc

SEQ ID NO: 15220 - DNA, 56 bp, Artificial
  Synthetic oligonucleotide
cattggcaggtagactatacacattacaaagaacacataatattagtatgggtaga

SEQ ID NO: 15221 - DNA, 52 bp, Artificial
  Synthetic oligonucleotide
ctatagaaaggcggatcagcagttctggttcgcttggagaatagtgtcgtgt

SEQ ID NO: 15222 - DNA, 60 bp, Artificial
  Synthetic oligonucleotide
catggaatcaagccagtagtatcaactcaattgctgttaaatggcagtctagcaatagga

SEQ ID NO: 15223 - DNA, 55 bp, Artificial
  Synthetic oligonucleotide
cggcaggaaccaaccacgacggagtgctcctataaaggcgcgggtcggtaccaga

SEQ ID NO: 15224 - DNA, 54 bp, Artificial
  Synthetic oligonucleotide
acgtgtagttagacctaggtgtgattatcaagcaggacacaacaaggtagggtc

SEQ ID NO: 15225 - DNA, 54 bp, Artificial
  Synthetic oligonucleotide
ataattatgggtgtactctctatagtgcgtagagttaggcagggatactcacct

SEQ ID NO: 15226 - DNA, 55 bp, Artificial
  Synthetic oligonucleotide
gtaaagcaactgtgtaaactcctcaggggagccaaggcattaacagaggtagtag

SEQ ID NO: 15227 - DNA, 52 bp, Artificial
  Synthetic oligonucleotide
acagcaagaggcgagagcggcgactggtgagtacgccgaaaatttttgacta

SEQ ID NO: 15228 - DNA, 55 bp, Artificial
  Synthetic oligonucleotide
tgggaacagcaggaagtactatgggcgcagcgtcaataacgctgacggtacaggt

SEQ ID NO: 15229 - DNA, 60 bp, Artificial
  Synthetic oligonucleotide
tgagagacttcatcttgattgcagcgaggacagtggaactcttgggacgccacagtctca

SEQ ID NO: 15230 - DNA, 60 bp, Artificial
  Synthetic oligonucleotide
ttgctgtgctttctatagtgaatagagttaggcagggatactcacctttgtcgttgcaga

SEQ ID NO: 15231 - DNA, 59 bp, Artificial
  Synthetic oligonucleotide
attgggatggtgacacactatcagcaagttttggctacccatcagcaggcattggacaa

SEQ ID NO: 15232 - DNA, 60 bp, Artificial
  Synthetic oligonucleotide
aaagaagtgctagtatggaagtttgacagccgcctagcatttcatcacgtggcccgagag

SEQ ID NO: 15233 - DNA, 60 bp, Artificial
  Synthetic oligonucleotide
tagtgtgtgcccgtctgttgtgtgactctggtaactagagatccctcagacccttcgcgg

SEQ ID NO: 15234 - DNA, 60 bp, Artificial
  Synthetic oligonucleotide
gagtgagagactcctgagtacggctgagtgaaggcagtaagggcggcaggaaccaaccac

SEQ ID NO: 15235 - DNA, 60 bp, Artificial
  Synthetic oligonucleotide
tactgggtctctcttggtagaccaggtctgagcccgggagctctctggctagcaagggaa

SEQ ID NO: 15236 - DNA, 60 bp, Artificial
  Synthetic oligonucleotide
gtgctgttagcttgcttaacgccacatccatagcagtagctgaggggacagatagggtta

SEQ ID NO: 15237 - DNA, 57 bp, Artificial
  Synthetic oligonucleotide
ggaccaggggtcagatatccactgacctttggatggtgcttcaagctagtaccaatt

SEQ ID NO: 15238 - DNA, 60 bp, Artificial
  Synthetic oligonucleotide
ctggaaaactcatttgcaccactactgtgccttggaatgctagttggagtaataaatctc

SEQ ID NO: 15239 - DNA, 60 bp, Artificial
  Synthetic oligonucleotide
tggatctaccacacacaaggctacttccctgattgccagaactacacaccagggccaggg

SEQ ID NO: 15240 - DNA, 60 bp, Artificial
  Synthetic oligonucleotide
ccaaagatatcttgggatccaattcccatacattattgtgctccagctggttatgcgatt

SEQ ID NO: 15241 - DNA, 52 bp, Artificial
  Synthetic oligonucleotide
aaggttggatgacagacaccttgttggtccaaaatgcaaacccagattgtaa

SEQ ID NO: 15242 - DNA, 60 bp, Artificial
  Synthetic oligonucleotide
caacccctgatgctgcatataagcagctgctttgcgcctgtactgggtctctctaggtag

SEQ ID NO: 15243 - DNA, 50 bp, Artificial
  Synthetic oligonucleotide
cgacgacatctgttgcaactcacagtctggggcattaagcagctccagac

SEQ ID NO: 15244 - DNA, 53 bp, Artificial
  Synthetic oligonucleotide
cccatttcagaattgggtgtcgacatagcagaataggcgttactcgacagagg

SEQ ID NO: 15245 - DNA, 53 bp, Artificial
  Synthetic oligonucleotide
cttgatagaaccagtttcccgatccaggcagaacagtggcgttatcctcaggc

SEQ ID NO: 15246 - DNA, 60 bp, Artificial
  Synthetic oligonucleotide
ccacttgagagacttcatcttgattgcagcgaggacagtggaactcttgggacgcagcag

SEQ ID NO: 15247 - DNA, 60 bp, Artificial
  Synthetic oligonucleotide
gacagccgcctagcatttcatcatgtagcccgagagaaacatccggagtacttcaagaac

SEQ ID NO: 15248 - DNA, 60 bp, Artificial
  Synthetic oligonucleotide
ggaagtttgacagccgcctagcatttcatcacgtggcccgagaggtgcatccggagtact

SEQ ID NO: 15249 - DNA, 52 bp, Artificial
  Synthetic oligonucleotide
tgatagtctcctagcacgtagacacatggcccgcgagctacatccggagtac

SEQ ID NO: 15250 - DNA, 58 bp, Artificial
  Synthetic oligonucleotide
tcacagtctactatggggtacctgtgtggaagacggcagacaccaccctattttgtgc

SEQ ID NO: 15251 - DNA, 59 bp, Artificial
  Synthetic oligonucleotide
aggtgtgactacccagcaggacataaccaggtaggatctctacaatacttagcactgac

SEQ ID NO: 15252 - DNA, 60 bp, Artificial
  Synthetic oligonucleotide
gggacgggtccatgcaaaaacgtcagcacagtacagtgtacacatgggattaagccagta

SEQ ID NO: 15253 - DNA, 60 bp, Artificial
  Synthetic oligonucleotide
gtagacaggatgaggattagaacatggaacagtctagtaaaacatcatatgtatatctca

SEQ ID NO: 15254 - DNA, 60 bp, Artificial
  Synthetic oligonucleotide
gcttgctgaggtgcacacagcaagaggcgagagcggcgactggtgagtacgccaaatttt

SEQ ID NO: 15255 - DNA, 55 bp, Artificial
  Synthetic oligonucleotide
cctggtagcagtccatgtagccagtggctacatagaggcagaggtcatcccagcg

SEQ ID NO: 15256 - DNA, 55 bp, Artificial
  Synthetic oligonucleotide
gggatactcaccattatcgttccagacccgcctcccagcacagaggggacccgac

SEQ ID NO: 15257 - DNA, 58 bp, Artificial
  Synthetic oligonucleotide
tgttactttacattgcaataatactgataagaatgtcactagtatcactgggggtaac

SEQ ID NO: 15258 - DNA, 60 bp, Artificial
  Synthetic oligonucleotide
gagttaggcagggatactcacccttgtcattacagacccttacccatcatcagagggatc

SEQ ID NO: 15259 - DNA, 56 bp, Artificial
  Synthetic oligonucleotide
agatacccactgtgttttggatggtgcttcaagctagtaccagttgacacaggaga

SEQ ID NO: 15260 - DNA, 60 bp, Artificial
  Synthetic oligonucleotide
gtcagccaaaattaccctatagtgcagaacatccaggggcaaatggtacatcaggccatc

SEQ ID NO: 15261 - DNA, 55 bp, Artificial
  Synthetic oligonucleotide
atagtatgggcaagcagggagctagaacgatttgcagttaatcccggcctgttag

SEQ ID NO: 15262 - DNA, 55 bp, Artificial
  Synthetic oligonucleotide
gtcctaaatgtcatattaaaggggaagcaattcatggtcaggtagattacagtcc

SEQ ID NO: 15263 - DNA, 60 bp, Artificial
  Synthetic oligonucleotide
gtctggcagaggtcttgggcatattggcgtgaggaacagggcatgtcaagtagctacacc

SEQ ID NO: 15264 - DNA, 59 bp, Artificial
  Synthetic oligonucleotide
actgctaaatggcagtctagcagaagaagaggtggtaattagatctgaaaatctcacgg

SEQ ID NO: 15265 - DNA, 60 bp, Artificial
  Synthetic oligonucleotide
gtagtatcaactcaattgctgttaaatggcagtctagcagaagaagatgtagtaattaga

SEQ ID NO: 15266 - DNA, 60 bp, Artificial
  Synthetic oligonucleotide
agctgtgataagtgtcagcaaaaaggggaagccatgcatggacaagtagattgtagtcca

SEQ ID NO: 15267 - DNA, 60 bp, Artificial
  Synthetic oligonucleotide
gaagaattatcgacacttgtggatgtggggcaccatgctccttggaatattaatgatctg

SEQ ID NO: 15268 - DNA, 56 bp, Artificial
  Synthetic oligonucleotide
cccgtctgttgtgtgactctggtaactagagatccctcagaccactttagactgtg

SEQ ID NO: 15269 - DNA, 57 bp, Artificial
  Synthetic oligonucleotide
ctatagtgcagaacatacaggggcaaatggtacatcagcccatatcacctagaactc

SEQ ID NO: 15270 - DNA, 59 bp, Artificial
  Synthetic oligonucleotide
gctcagagctgagcaggctacacaggaggtaaaaaattggatgacagaaaccttactgg

SEQ ID NO: 15271 - DNA, 60 bp, Artificial
  Synthetic oligonucleotide
attatcagcacttgtggagatggggcaccatgctccttgggatggtgatgatctgtagtg

SEQ ID NO: 15272 - DNA, 60 bp, Artificial
  Synthetic oligonucleotide
ccatattgggacacatagttactcctaggtgtgactatccagcaggacataatagggtag

SEQ ID NO: 15273 - DNA, 60 bp, Artificial
  Synthetic oligonucleotide
tgatgtggaagtttgacagacacctagcatctaagcacgtagcccgagagctacatccgg

SEQ ID NO: 15274 - DNA, 50 bp, Artificial
  Synthetic oligonucleotide
gtcaaagctcttttacaacttatatgtgctcataatgttacagaattaca

SEQ ID NO: 15275 - DNA, 52 bp, Artificial
  Synthetic oligonucleotide
agcatccggagtactataaagattgctgacacagatgttgctgacaagggac

SEQ ID NO: 15276 - DNA, 55 bp, Artificial
  Synthetic oligonucleotide
ctggggtgggaagccctcaaatatctgtggaaccttctagcatactggggccagg

SEQ ID NO: 15277 - DNA, 50 bp, Artificial
  Synthetic oligonucleotide
aaattatcctatagtgcaaaacacacagggacaaatggtgtatcagtcca

SEQ ID NO: 15278 - DNA, 55 bp, Artificial
  Synthetic oligonucleotide
gccttggaatgctagttggagtaataaatctctgagtgacatctgggataacatg

SEQ ID NO: 15279 - DNA, 60 bp, Artificial
  Synthetic oligonucleotide
aaaatgcacaagggcaaatggtacatcagcctgtgtcacctagaactctgaatgcctggg

SEQ ID NO: 15280 - DNA, 60 bp, Artificial
  Synthetic oligonucleotide
ttatgtaacgatgaaacagcaatatgccttataaggagtaaaaaggcactatacatgttg

SEQ ID NO: 15281 - DNA, 60 bp, Artificial
  Synthetic oligonucleotide
tttggaataccccttctagtagcaagacagatagtaaactcatgtgcccaatgccaacag

SEQ ID NO: 15282 - DNA, 60 bp, Artificial
  Synthetic oligonucleotide
aggtgtgattatcaagcaggacataataaggtaggatctctacaatacttggcactgata

SEQ ID NO: 15283 - DNA, 59 bp, Artificial
  Synthetic oligonucleotide
tcctaacctagagccctggaatcatccaggaagtcagcctaggactgcttgtaaccagt

SEQ ID NO: 15284 - DNA, 51 bp, Artificial
  Synthetic oligonucleotide
gcctgttacaccctatgagcctgcatgggatggaggacccggagggagaag

SEQ ID NO: 15285 - DNA, 60 bp, Artificial
  Synthetic oligonucleotide
aaagcggcggttccagagaagttctctcgacgcaagactcggcttgctgagtgcacacgg

SEQ ID NO: 15286 - DNA, 50 bp, Artificial
  Synthetic oligonucleotide
actcctataccaaagcagtaagtattgcatgtaatgaaaccacctttagt

SEQ ID NO: 15287 - DNA, 54 bp, Artificial
  Synthetic oligonucleotide
tccactcgattagtgcacggattcttagcacttttctgggacgacctgaggagt

SEQ ID NO: 15288 - DNA, 60 bp, Artificial
  Synthetic oligonucleotide
acagggttatgcaagaatgtcagcacagtccaatgcacacatggaatcaagccagtagta

SEQ ID NO: 15289 - DNA, 53 bp, Artificial
  Synthetic oligonucleotide
acaggcgctcggtgagtcaactctcgcctgactgcagtgacgagctacagctg

SEQ ID NO: 15290 - DNA, 60 bp, Artificial
  Synthetic oligonucleotide
gccaagtctcccagatacaccttggactctgtaaatggctatcctaagatctactggccc

SEQ ID NO: 15291 - DNA, 60 bp, Artificial
  Synthetic oligonucleotide
tccattcctttggatgggatatgaactccatcctgacagatggacagtccagcctataga

SEQ ID NO: 15292 - DNA, 52 bp, Artificial
  Synthetic oligonucleotide
tgcttagtatattgtagccagtatgtgactgttttctatggcatacccgcgt

SEQ ID NO: 15293 - DNA, 53 bp, Artificial
  Synthetic oligonucleotide
ctctagaaaactcatttgcaccactactgtgccttagaactctagctggagta

SEQ ID NO: 15294 - DNA, 60 bp, Artificial
  Synthetic oligonucleotide
taatgtggaagtttgacagccgcttagcattccatcacgtggcccgagagacacatccgg

SEQ ID NO: 15295 - DNA, 58 bp, Artificial
  Synthetic oligonucleotide
atggaaaacagatggcaggggctgattgtgtggcaggtagacaggatgaagattagaa

SEQ ID NO: 15296 - DNA, 55 bp, Artificial
  Synthetic oligonucleotide
taagcagctgcttttcgcctgtactgggtctctctaggtagaccagatctgagcc

SEQ ID NO: 15297 - DNA, 55 bp, Artificial
  Synthetic oligonucleotide
ttgggatccaattcccatacattattgtgctccagctggttatgcgattctaaag

SEQ ID NO: 15298 - DNA, 56 bp, Artificial
  Synthetic oligonucleotide
tatcctttgatccaattcccatacattattgtgctccagctggttatgcgattcta

SEQ ID NO: 15299 - DNA, 54 bp, Artificial
  Synthetic oligonucleotide
acgaaaccgggagcaggctcagacccggaagtggcatttatgtggactaactgc

SEQ ID NO: 15300 - DNA, 60 bp, Artificial
  Synthetic oligonucleotide
tcaaaattaccctatagtgcagaacctccaggggcaaatggtacatcagcccatatcgcc

SEQ ID NO: 15301 - DNA, 55 bp, Artificial
  Synthetic oligonucleotide
gacatggatcccagactgggacttcgtatctaccccaccactggtcagactagca

SEQ ID NO: 15302 - DNA, 56 bp, Artificial
  Synthetic oligonucleotide
agctgccagacaaagacagctggactgtcaatgacatacagaagttagtgggaaaa

SEQ ID NO: 15303 - DNA, 55 bp, Artificial
  Synthetic oligonucleotide
gtgccagttgacccaagggaagtagaagaggccaatgaaggagataccaactgtt

SEQ ID NO: 15304 - DNA, 60 bp, Artificial
  Synthetic oligonucleotide
tcggcaagaggcgagagcggcgactggtgagtacgccaaattttatttgactagcagagg

SEQ ID NO: 15305 - DNA, 60 bp, Artificial
  Synthetic oligonucleotide
tagcatttcagcacgtagcccgagaaatacatccggagttttacaaggactgttgacatc

SEQ ID NO: 15306 - DNA, 50 bp, Artificial
  Synthetic oligonucleotide
gcaagtgacatggatcccagactgggacttcgtatccaccccaccgttgg

SEQ ID NO: 15307 - DNA, 57 bp, Artificial
  Synthetic oligonucleotide
ttataggctaataaattgtaattcctcagtcgttacacaagcctgcccaaaggtgtc

SEQ ID NO: 15308 - DNA, 54 bp, Artificial
  Synthetic oligonucleotide
cgaagacagagaagtgctggtctggagatttgacagtcgcctggcatttgaaca

SEQ ID NO: 15309 - DNA, 51 bp, Artificial
  Synthetic oligonucleotide
gacttcgggggccgtttttgtggcccgacctgagtccaaaaatcccgatcg

SEQ ID NO: 15310 - DNA, 60 bp, Artificial
  Synthetic oligonucleotide
atgagtcaacatggagtagatgacccggagagagaagtgctaatgtggaagtttgacagc

SEQ ID NO: 15311 - DNA, 60 bp, Artificial
  Synthetic oligonucleotide
ggatcataaacatcttgtaccaaagcagtaagtaacgctaatgcatcatagggacctgct

SEQ ID NO: 15312 - DNA, 58 bp, Artificial
  Synthetic oligonucleotide
cactagctacacgttgataagttgtaacacctcagtccttacacaggcctgtccaaag

SEQ ID NO: 15313 - DNA, 55 bp, Artificial
  Synthetic oligonucleotide
cacgaaaacacatagcccgagaaaagtacccacagttctataaagactgctgaca

SEQ ID NO: 15314 - DNA, 60 bp, Artificial
  Synthetic oligonucleotide
agcatatgttgcagctcacagtctggggcattaagcagctccagacaagagtcctggcta

SEQ ID NO: 15315 - DNA, 55 bp, Artificial
  Synthetic oligonucleotide
tttccagggaggcgtgacatgggcgggaccggggagtggcgagcccgtagatgct

SEQ ID NO: 15316 - DNA, 60 bp, Artificial
  Synthetic oligonucleotide
ttgtggaaatggggcatcatgctccttgggatgttgatgatgacctatagtgctgcagat

SEQ ID NO: 15317 - DNA, 55 bp, Artificial
  Synthetic oligonucleotide
gggtctattacagagacagcagagaccctatttggaaaggaccagcgacgctcct

SEQ ID NO: 15318 - DNA, 60 bp, Artificial
  Synthetic oligonucleotide
aatttgctgagagctatagaggcgcaacagcatatgttgcaactcacggtctggggcatt

SEQ ID NO: 15319 - DNA, 60 bp, Artificial
  Synthetic oligonucleotide
gcttaaagtggtgtgtgcccgtctgtgttaggactctggtaactagagatccctcagaca

SEQ ID NO: 15320 - DNA, 60 bp, Artificial
  Synthetic oligonucleotide
acatgggaggcaagtggtcaaaaagtagcatagtgggatggcctcaggtcagggagagaa

SEQ ID NO: 15321 - DNA, 60 bp, Artificial
  Synthetic oligonucleotide
tataaaaggggaagcaactcatggtcaggtagactacagtccagaagtatggcaaataga

SEQ ID NO: 15322 - DNA, 50 bp, Artificial
  Synthetic oligonucleotide
tctgccccctaatacgtttgggttaatactaggcagaggcagtaccacag

SEQ ID NO: 15323 - DNA, 55 bp, Artificial
  Synthetic oligonucleotide
aggctacttccctgattggcagtgttacacaccagggccagggatcagatacccc

SEQ ID NO: 15324 - DNA, 60 bp, Artificial
  Synthetic oligonucleotide
ctagacatggagacacccttgaaggcgccagagggctcattaggatcctacaacgagccc

SEQ ID NO: 15325 - DNA, 54 bp, Artificial
  Synthetic oligonucleotide
tacaagacaaagtacacatctaggaccagggcgagcattatttacaacaaacat

SEQ ID NO: 15326 - DNA, 60 bp, Artificial
  Synthetic oligonucleotide
tggaaattaagtccatcggtatatcaatccaccatgcaggaaatcttacgggaatggata

SEQ ID NO: 15327 - DNA, 60 bp, Artificial
  Synthetic oligonucleotide
gaatattaaggcctgcaacactagcgcaatgagatgccacgatacgaaagtgaatccagg

SEQ ID NO: 15328 - DNA, 58 bp, Artificial
  Synthetic oligonucleotide
caagggaatacgcatcttggaggctcgagtagcccgagttgaggcactcgtagacaga

SEQ ID NO: 15329 - DNA, 56 bp, Artificial
  Synthetic oligonucleotide
gtctcaaaaggaacccccattctccgcaaacacctgcagtgcttatactccgccct

SEQ ID NO: 15330 - DNA, 60 bp, Artificial
  Synthetic oligonucleotide
taaacagagccggtgcacgcttacggtaggtgtctcctcgtatcactctagtccctgcag

SEQ ID NO: 15331 - DNA, 60 bp, Artificial
  Synthetic oligonucleotide
tgtgtgaaacctgtcaaaggctcaacccaactggaggcggaaagatgcggactattcaga

SEQ ID NO: 15332 - DNA, 59 bp, Artificial
  Synthetic oligonucleotide
gtaggacataggagaattaaaccacataacattgcaactggtacattggctcctaggcc

SEQ ID NO: 15333 - DNA, 52 bp, Artificial
  Synthetic oligonucleotide
tcacgaaggagactttcctgactggctgaaacaagtcgcctctgcaaccagg

SEQ ID NO: 15334 - DNA, 50 bp, Artificial
  Synthetic oligonucleotide
gacaagcacattgtaatcttagtagcacaatatggaatgacactttagga

SEQ ID NO: 15335 - DNA, 60 bp, Artificial
  Synthetic oligonucleotide
ctcaaggtaagcggtgcaccgaacagttgtgtgtgtgagtccagggtccgctagagcaag

SEQ ID NO: 15336 - DNA, 60 bp, Artificial
  Synthetic oligonucleotide
tccacaagtcaaaacctggatgacacaaactttgctcatccagaatgctaacccagattg

SEQ ID NO: 15337 - DNA, 51 bp, Artificial
  Synthetic oligonucleotide
ctccacaccttatcgggttgtggtataacctgttgagagaacctgtgccag

SEQ ID NO: 15338 - DNA, 55 bp, Artificial
  Synthetic oligonucleotide
gagctatctcctccatgatagacgcagtattaaaaccttgtgtgaaactgacccc

SEQ ID NO: 15339 - DNA, 60 bp, Artificial
  Synthetic oligonucleotide
agtcacagcccatattgagggtcagcctgtagaagtactattggacacaggggctgacga

SEQ ID NO: 15340 - DNA, 60 bp, Artificial
  Synthetic oligonucleotide
gtaagtatggcctgccctggaaatcaactgcttatcgctatcttgctattaagtgcttgc

SEQ ID NO: 15341 - DNA, 60 bp, Artificial
  Synthetic oligonucleotide
acattgcaataccagtgtaattcaagaatcctgtgacaaacattattgggatgccttaag

SEQ ID NO: 15342 - DNA, 60 bp, Artificial
  Synthetic oligonucleotide
tagtacgcctcttgacttggctgtacaacaacttcagggcttgtctatccaggatctacc

SEQ ID NO: 15343 - DNA, 60 bp, Artificial
  Synthetic oligonucleotide
agaagaactccttgcccagctacaccgacccctagaggcatgcactaacccatgctattg

SEQ ID NO: 15344 - DNA, 60 bp, Artificial
  Synthetic oligonucleotide
ccacccaagaacagatatggacagcagcggagcaacttaacagagagcagtttccgagtg

SEQ ID NO: 15345 - DNA, 60 bp, Artificial
  Synthetic oligonucleotide
caattgtggacagccggggcatcaagcaagaaactgtcccctaccacagactgacagtca

SEQ ID NO: 15346 - DNA, 60 bp, Artificial
  Synthetic oligonucleotide
ttcatggacaattgtcagccaccagtcttatggcatttcaaaatcgcattgctgtggata

SEQ ID NO: 15347 - DNA, 55 bp, Artificial
  Synthetic oligonucleotide
catggtccgggaccgaagggttatacgataccttggtctatacaggattgctggg

SEQ ID NO: 15348 - DNA, 55 bp, Artificial
  Synthetic oligonucleotide
cttagagcacgagaaaagaacatcccctcgcagttttatccagatatggagggca

SEQ ID NO: 15349 - DNA, 58 bp, Artificial
  Synthetic oligonucleotide
ttataaacatgtggcagcaagtaggaaaagcaatgtatgcccctcccatcagcggacc

SEQ ID NO: 15350 - DNA, 60 bp, Artificial
  Synthetic oligonucleotide
tccattagtggatggattcttagcactcatctgggtcgacctacggagcctgtgcatctt

SEQ ID NO: 15351 - DNA, 55 bp, Artificial
  Synthetic oligonucleotide
ggattcttagcactcatctgggtcgacctacggagcctgtgcatcttcagctacc

SEQ ID NO: 15352 - DNA, 60 bp, Artificial
  Synthetic oligonucleotide
cacgaaaacacatagcccgagaactgcatccagagtactataaagactgctgacaaagaa

SEQ ID NO: 15353 - DNA, 60 bp, Artificial
  Synthetic oligonucleotide
accgccgtggtgagctagctaaagacatggcgaagcaaggctcagatgggagaaagggat

SEQ ID NO: 15354 - DNA, 58 bp, Artificial
  Synthetic oligonucleotide
tgtagtactgccacaaagcccagtagaagtcttaggacgcgataatatgcaaaaggtg

SEQ ID NO: 15355 - DNA, 60 bp, Artificial
  Synthetic oligonucleotide
ctcgggatacagcacagcacgggaataccatggaatccgcagtcacaggccttagtagaa

SEQ ID NO: 15356 - DNA, 60 bp, Artificial
  Synthetic oligonucleotide
ggtcagtcagaattatcctatagtgcagaatctccaagggcaaatggtacaccaagccat

SEQ ID NO: 15357 - DNA, 60 bp, Artificial
  Synthetic oligonucleotide
cggggggatcagatatagcagggaccactagtacagtgcaagagcagctagagtggatct

SEQ ID NO: 15358 - DNA, 60 bp, Artificial
  Synthetic oligonucleotide
tggcgagctttgcacgcaacgcggcacaccagatatggcttgcttgcagatccgcttatc

SEQ ID NO: 15359 - DNA, 60 bp, Artificial
  Synthetic oligonucleotide
tgtctagcttgctttcagacaaaaggcttaggcatttcctatggcaggaagaagcggaga

SEQ ID NO: 15360 - DNA, 60 bp, Artificial
  Synthetic oligonucleotide
gcaactcacggtctggggcattaagcagctccagacaagagtcctggctatagaaagata

SEQ ID NO: 15361 - DNA, 60 bp, Artificial
  Synthetic oligonucleotide
cagacatagaggcggtgtattccccacacctgctcagacagtggtatactctggtacaag

SEQ ID NO: 15362 - DNA, 60 bp, Artificial
  Synthetic oligonucleotide
ttccgacgcacggactcggcttactgagtgcacgcagtaagaggcgaggcgactcctgag

SEQ ID NO: 15363 - DNA, 56 bp, Artificial
  Synthetic oligonucleotide
ctgccccgtcagtattctagatatcaaacagggacctaaagagccattcagggatt

SEQ ID NO: 15364 - DNA, 51 bp, Artificial
  Synthetic oligonucleotide
aatgacataagacaattagcagaggtggtgcaaaaaatagccactgaaagt

SEQ ID NO: 15365 - DNA, 60 bp, Artificial
  Synthetic oligonucleotide
attggggactgacaacagggcaacatgcttggcacctgggacatggagtgtccatagaat

SEQ ID NO: 15366 - DNA, 55 bp, Artificial
  Synthetic oligonucleotide
gggagctggaacgatttgcacttaaccctggccttttagaaacatcagaaggccg

SEQ ID NO: 15367 - DNA, 60 bp, Artificial
  Synthetic oligonucleotide
atcctctgctttcgtgactgggctgcaggaacatattcggaggggtttgattatagcgag

SEQ ID NO: 15368 - DNA, 53 bp, Artificial
  Synthetic oligonucleotide
gtatccttttcagcgcatacaaatcgaccatatacagatgcccagatgcggta

SEQ ID NO: 15369 - DNA, 56 bp, Artificial
  Synthetic oligonucleotide
attcgcacctcaattggatacatttgcgttaccgacacctactatgggcgggactg

SEQ ID NO: 15370 - DNA, 60 bp, Artificial
  Synthetic oligonucleotide
ccaccgattgagagacttcatcttgattgcagcgaggactgtggaaactctgggacgcag

SEQ ID NO: 15371 - DNA, 51 bp, Artificial
  Synthetic oligonucleotide
acaagaacaagtgtaagtataggaccaggacaagtattattctatagagca

SEQ ID NO: 15372 - DNA, 51 bp, Artificial
  Synthetic oligonucleotide
gactcgattggcgaacggattcttagcacttgtctgggacgacctacggaa

SEQ ID NO: 15373 - DNA, 50 bp, Artificial
  Synthetic oligonucleotide
tgctacatcctatatgccagcatggaatggaggacggagacggagaagta

SEQ ID NO: 15374 - DNA, 60 bp, Artificial
  Synthetic oligonucleotide
aatgccgtgcagcaatcctacacaaggacggctgtccagtcacttgctaacgcaactgcg

SEQ ID NO: 15375 - DNA, 55 bp, Artificial
  Synthetic oligonucleotide
gctacatcctggacctgtgtaccaacgaacttagcaaccatgctaatggactggg

SEQ ID NO: 15376 - DNA, 60 bp, Artificial
  Synthetic oligonucleotide
tctgaatagcagagatgggttcagggaatagtgtctcgctagcaccacatatttgcgagg

SEQ ID NO: 15377 - DNA, 55 bp, Artificial
  Synthetic oligonucleotide
gagatgggttcagggaatagtgtctcgctagcaccacatatttgcgagggtctcc

SEQ ID NO: 15378 - DNA, 52 bp, Artificial
  Synthetic oligonucleotide
gactcatagttaaagcgctagcagctgcttaaccgcaaaaccacatcctatg

SEQ ID NO: 15379 - DNA, 51 bp, Artificial
  Synthetic oligonucleotide
gctccaaggaggagtaaatagcgctatgctatacatatctagactacctcc

SEQ ID NO: 15380 - DNA, 50 bp, Artificial
  Synthetic oligonucleotide
tcacagacagccggcgctcaggtagtatggagacttccaccattagtagt

SEQ ID NO: 15381 - DNA, 60 bp, Artificial
  Synthetic oligonucleotide
atgtcctagcaatcgaggcatcttaaggaattggtataacccagtagcaggattacgaca

SEQ ID NO: 15382 - DNA, 60 bp, Artificial
  Synthetic oligonucleotide
gacttgtggatctaccacacacaaggctacttccctgattggcaaggctacacaccaggg

SEQ ID NO: 15383 - DNA, 60 bp, Artificial
  Synthetic oligonucleotide
acagccgcttagcattccatcacatggctcgagagaaacatccggagtactacaaagact

SEQ ID NO: 15384 - DNA, 53 bp, Artificial
  Synthetic oligonucleotide
agcctagtagttataggaatgccacatcactgttaccagaaagcgtagtcagg

SEQ ID NO: 15385 - DNA, 57 bp, Artificial
  Synthetic oligonucleotide
ccatattaggacaaatagttagccctaggtgtgactatcaagcaggacataataagg

SEQ ID NO: 15386 - DNA, 60 bp, Artificial
  Synthetic oligonucleotide
caggctacacccagtgcatgcagggcctatcgcaccaggccagatgagagaaccgagagg

SEQ ID NO: 15387 - DNA, 60 bp, Artificial
  Synthetic oligonucleotide
gtctggtatagtgcagcagcaaagcgatttgctgagagctatagaagcgcaacagcattt

SEQ ID NO: 15388 - DNA, 55 bp, Artificial
  Synthetic oligonucleotide
caaagcgatttgctgagagctatagaagcgcaacagcatttgttgcagctcacag

SEQ ID NO: 15389 - DNA, 55 bp, Artificial
  Synthetic oligonucleotide
cattgtgccacagagaagagtaagggatggacccggtagatcctaacctagagcc

SEQ ID NO: 15390 - DNA, 58 bp, Artificial
  Synthetic oligonucleotide
agggtcagaaagcctgtagtcactctggaacgctatagcagtgctctggtgtgttcat

SEQ ID NO: 15391 - DNA, 60 bp, Artificial
  Synthetic oligonucleotide
gtcagcaattaggagagccactctagggcagagagtgctaccccagtgtgaataccctga

SEQ ID NO: 15392 - DNA, 60 bp, Artificial
  Synthetic oligonucleotide
gataacctgctaagagcaatacaggcccagcaacacttgctgaggctatctgtatggggt

SEQ ID NO: 15393 - DNA, 55 bp, Artificial
  Synthetic oligonucleotide
tctacaagggactttccgctggggactttccagggaggcgtgacatgggcgggac

SEQ ID NO: 15394 - DNA, 60 bp, Artificial
  Synthetic oligonucleotide
tacacagactcgcttattattatagcccccctcattcccctaacgcctcaggatctgcac

SEQ ID NO: 15395 - DNA, 60 bp, Artificial
  Synthetic oligonucleotide
ctcacaatatgcattaggaatcatccaagcacaaccagataagagtgaatcagagttagt

SEQ ID NO: 15396 - DNA, 55 bp, Artificial
  Synthetic oligonucleotide
cccgacttccctcagctgaacagtgactgggttccctctgtcagatcatgggccc

SEQ ID NO: 15397 - DNA, 56 bp, Artificial
  Synthetic oligonucleotide
ctctggaagggacctggtgaactattgtggaagggggaaggagcagtcatcataaa

SEQ ID NO: 15398 - DNA, 60 bp, Artificial
  Synthetic oligonucleotide
ccagctctccaaccactcaggctcctgtttgcgtacctccaatatgggatcggctggttc

SEQ ID NO: 15399 - DNA, 55 bp, Artificial
  Synthetic oligonucleotide
accccatagtgcaaaatgcacaagggcaaatggtacatcaggccatgtcaccacg

SEQ ID NO: 15400 - DNA, 60 bp, Artificial
  Synthetic oligonucleotide
ataggatatataatccctgctttagattgtacgggagctcaccactgctcgctgcgtcga

SEQ ID NO: 15401 - DNA, 53 bp, Artificial
  Synthetic oligonucleotide
taagctgaaagctcattgggatagtggagccacaataacttgtgtcccacaag

SEQ ID NO: 15402 - DNA, 60 bp, Artificial
  Synthetic oligonucleotide
agtagtgcatacatgtagaagacattatgagagatgtatgtctgcccttcctagctcggg

SEQ ID NO: 15403 - DNA, 50 bp, Artificial
  Synthetic oligonucleotide
cagaatgccaacccagattgtaagcaaatacttagggcactaggaccagg

SEQ ID NO: 15404 - DNA, 60 bp, Artificial
  Synthetic oligonucleotide
tgagagatatcatagcaactggagagccatggctgatgaattccaactcccaccggtagt

SEQ ID NO: 15405 - DNA, 60 bp, Artificial
  Synthetic oligonucleotide
tctcaggatttagcaaggcgtggagcaataacttccagacatacccctcagactaatcaa

SEQ ID NO: 15406 - DNA, 59 bp, Artificial
  Synthetic oligonucleotide
gcaataatgtcagtacagtacaatgcacacatggaatcaagccagtagtatcaactcag

SEQ ID NO: 15407 - DNA, 54 bp, Artificial
  Synthetic oligonucleotide
caccagggccaggaactagatatccactgacctttggatggtgcttcaagttag

SEQ ID NO: 15408 - DNA, 59 bp, Artificial
  Synthetic oligonucleotide
aaattatcctatagtgcagaatcttcaagggcaaatggtacaccaggccatatcaccta

SEQ ID NO: 15409 - DNA, 60 bp, Artificial
  Synthetic oligonucleotide
acaggagaaaaggactggcaattgggtcatggagtctccatagaatggaggcaaagaaca

SEQ ID NO: 15410 - DNA, 60 bp, Artificial
  Synthetic oligonucleotide
ggtcctggagatactggcatgatgaacaaggaatgtcaataagttacacaaagtatagat

SEQ ID NO: 15411 - DNA, 60 bp, Artificial
  Synthetic oligonucleotide
cagggcccagactaaggctctgacgtctccccccggagggcagctcagcaccggctcaga

SEQ ID NO: 15412 - DNA, 60 bp, Artificial
  Synthetic oligonucleotide
tcacttatgatgcagtccccacggtgcctatacggtcccgctgggcgctacctgaacttc

SEQ ID NO: 15413 - DNA, 60 bp, Artificial
  Synthetic oligonucleotide
gcaagacaagtgtgtgttcccatctctcctagtcgccgcctggtcattcggtgctccact

SEQ ID NO: 15414 - DNA, 50 bp, Artificial
  Synthetic oligonucleotide
aacagcacaaccctcacctatcagaaggtttcgtgcttgttgttaaagct

SEQ ID NO: 15415 - DNA, 60 bp, Artificial
  Synthetic oligonucleotide
cccgtctgttatgtgactctggtaactagagatccctcagatccttttaggcaatgtaga

SEQ ID NO: 15416 - DNA, 60 bp, Artificial
  Synthetic oligonucleotide
gtcagtgacggctcgccccagtggatcccttggcggctcctgaagaagactgtatgccca

SEQ ID NO: 15417 - DNA, 59 bp, Artificial
  Synthetic oligonucleotide
tgactacccctggcctgatatggacctttaatgatgggtctcctatgatttcaggacct

SEQ ID NO: 15418 - DNA, 54 bp, Artificial
  Synthetic oligonucleotide
tacagttcattatggggttcctgtgtggagagatgcagataccaccctattttg

SEQ ID NO: 15419 - DNA, 60 bp, Artificial
  Synthetic oligonucleotide
ttcccagaaatagatgagtcaacagcagtttccagcaaggacagagggttcccagaaata

SEQ ID NO: 15420 - DNA, 60 bp, Artificial
  Synthetic oligonucleotide
gggatccacacggagaaatactgaaatggcagtttgatagctcactaggccgcacccacg

SEQ ID NO: 15421 - DNA, 60 bp, Artificial
  Synthetic oligonucleotide
gacactagtctggaagtttgaccccatgctggctcatgagtacacgacctttattctata

SEQ ID NO: 15422 - DNA, 60 bp, Artificial
  Synthetic oligonucleotide
ttgcttcaagtagtgtgtgcccgtctgttgtgtgactctggtaactagagatccctcaga

SEQ ID NO: 15423 - DNA, 60 bp, Artificial
  Synthetic oligonucleotide
cctagttgtgaatatcacacaggacatagcaaggtaggatccctacaatatttggcgttg

SEQ ID NO: 15424 - DNA, 53 bp, Artificial
  Synthetic oligonucleotide
gcacggagacatgttgccagagagatgcatccggagtactacaaagattgctg

SEQ ID NO: 15425 - DNA, 60 bp, Artificial
  Synthetic oligonucleotide
cgggctgatcgctctgtgagcgacgtgtgagtagcgagcagacgtgttcggggggctcac

SEQ ID NO: 15426 - DNA, 60 bp, Artificial
  Synthetic oligonucleotide
taacgagtctgctctcattcattgggtcgaggtcgggcttgagtccgggtggacaccaga

SEQ ID NO: 15427 - DNA, 51 bp, Artificial
  Synthetic oligonucleotide
acacagatccgtgagattagtgaccggattcttagcgcttgcctgggacga

SEQ ID NO: 15428 - DNA, 60 bp, Artificial
  Synthetic oligonucleotide
cctcgacagccttgctatcttcacgtggaactggacagaggccgtacttcacgcttgtag

SEQ ID NO: 15429 - DNA, 55 bp, Artificial
  Synthetic oligonucleotide
agtacggctgagtgaaggcagtaagggcggcaggaaccaaccacggcggagtgct

SEQ ID NO: 15430 - DNA, 60 bp, Artificial
  Synthetic oligonucleotide
gtggacagacagggttatagaagtagtacaaagagcttcgagagccattctccacatacc

SEQ ID NO: 15431 - DNA, 55 bp, Artificial
  Synthetic oligonucleotide
aggtgctaccccaaggatggaagggttcgcccaccatcttccaacatacctcgga

SEQ ID NO: 15432 - DNA, 60 bp, Artificial
  Synthetic oligonucleotide
gttaggctatggtataacctagtgcaggagcccatagaaggagcagacacgtattacgta

SEQ ID NO: 15433 - DNA, 60 bp, Artificial
  Synthetic oligonucleotide
tgtttagcaccagaccatggatatacgtccgattgggacacaatatccattgagtggtca

SEQ ID NO: 15434 - DNA, 60 bp, Artificial
  Synthetic oligonucleotide
tggaccacatagcagaagacatggatagcctctttttgacagccacaagaccatgtacta

SEQ ID NO: 15435 - DNA, 51 bp, Artificial
  Synthetic oligonucleotide
taccccaccactggtcaggctagcatttaacctagtaaaagatcctatact

SEQ ID NO: 15436 - DNA, 60 bp, Artificial
  Synthetic oligonucleotide
ccaggctaagctaaattcatgggggtgcgcatggaaacagatctgctacacctcggtacc

SEQ ID NO: 15437 - DNA, 53 bp, Artificial
  Synthetic oligonucleotide
gggaccagatatccactgaccttcgggtggtgcttcaagctagtaccagttga

SEQ ID NO: 15438 - DNA, 55 bp, Artificial
  Synthetic oligonucleotide
cgtcggatggccacgagacggcacttttaacccagacattattacacaggttaag

SEQ ID NO: 15439 - DNA, 57 bp, Artificial
  Synthetic oligonucleotide
agatccccctggtttaccacgttgatatccaccatcatggggcctctcattatactc

SEQ ID NO: 15440 - DNA, 60 bp, Artificial
  Synthetic oligonucleotide
attcaggctttgcacccaattgctctaaagtagtagctgctacatgcacaaggatgatgg

SEQ ID NO: 15441 - DNA, 60 bp, Artificial
  Synthetic oligonucleotide
cagctactgcctctccataatccccaaggagaaaatagcgcattggactaatacacatag

SEQ ID NO: 15442 - DNA, 57 bp, Artificial
  Synthetic oligonucleotide
aacgcctactcatgcactctttatccctgaccttaaccataaggattaggcaaggag

SEQ ID NO: 15443 - DNA, 55 bp, Artificial
  Synthetic oligonucleotide
gcacccaattgctctaaagtagtagctgctacatgcacaaggatgatggagacgc

SEQ ID NO: 15444 - DNA, 58 bp, Artificial
  Synthetic oligonucleotide
acataggccacttaatccattcagctggacaattgactcacgtaactattgatcaccc

SEQ ID NO: 15445 - DNA, 55 bp, Artificial
  Synthetic oligonucleotide
ggataggttacacccagtacatgcggggcctattgcaccaggccaaatgagagaa

SEQ ID NO: 15446 - DNA, 51 bp, Artificial
  Synthetic oligonucleotide
gacagggacctgatgaaccatatcaagattttgtggcacgacttttggata

SEQ ID NO: 15447 - DNA, 60 bp, Artificial
  Synthetic oligonucleotide
gctaatgcgctacgcctggaatgaggcacatgtacaacctccggtgacacctactaacat

SEQ ID NO: 15448 - DNA, 54 bp, Artificial
  Synthetic oligonucleotide
ggagtcttcagagagcgctgacaacaatcagggactggctgagacttaaagcag

SEQ ID NO: 15449 - DNA, 55 bp, Artificial
  Synthetic oligonucleotide
gcatttcctatggcaggaagaagcggagacagcgacgaagcactcctcttggcag

SEQ ID NO: 15450 - DNA, 56 bp, Artificial
  Synthetic oligonucleotide
cgagggacgtgctaacaggtaggaaaatacattgctgtctgtcatggggaatgagt

SEQ ID NO: 15451 - DNA, 55 bp, Artificial
  Synthetic oligonucleotide
gggcaacgtatacagcttttaatcctagaacagtcgccatttggatggaaaaggc

SEQ ID NO: 15452 - DNA, 56 bp, Artificial
  Synthetic oligonucleotide
tctgctgtgcctacagctcccccactggaggagactccactacttcaactttaggg

SEQ ID NO: 15453 - DNA, 57 bp, Artificial
  Synthetic oligonucleotide
aaccatagtgaatgtctactatcagaagaatggggacggtggtccactccattcaat

SEQ ID NO: 15454 - DNA, 52 bp, Artificial
  Synthetic oligonucleotide
agcttggatacacgccgcacatgtaaaggctgccgaccctgggagtagacca

SEQ ID NO: 15455 - DNA, 60 bp, Artificial
  Synthetic oligonucleotide
cctgcgagtctagccctcatctgtgtggcgtctaagagtagacggttgccggcacagccc

SEQ ID NO: 15456 - DNA, 53 bp, Artificial
  Synthetic oligonucleotide
cctccggaccgtcagactaatcaagcgcctctaccaaagcagtgagtagtata

SEQ ID NO: 15457 - DNA, 55 bp, Artificial
  Synthetic oligonucleotide
cagccaagaggtaggtggcttggacgggtctgggaagggtggcagacttcctcag

SEQ ID NO: 15458 - DNA, 60 bp, Artificial
  Synthetic oligonucleotide
gagaacccaaatcaggacaggtaaacgcagaagtaggagtatggcagatggactgcaccc

SEQ ID NO: 15459 - DNA, 60 bp, Artificial
  Synthetic oligonucleotide
tgtagccgcagggaacggtcatagggaagatcaatggagacccctgacagtcacagaatt

SEQ ID NO: 15460 - DNA, 58 bp, Artificial
  Synthetic oligonucleotide
actttcgatacgcaacagtatacatggaccaggctaccacagggatttcatgcttcac

SEQ ID NO: 15461 - DNA, 56 bp, Artificial
  Synthetic oligonucleotide
ttaagcataactcaacagcaggatacagtgggaggatcttatgactcatggaacgg

SEQ ID NO: 15462 - DNA, 60 bp, Artificial
  Synthetic oligonucleotide
tccccacgcctctcgcttctgtgcgcgcgctttctgctataaaacgagccatcagccccc

SEQ ID NO: 15463 - DNA, 53 bp, Artificial
  Synthetic oligonucleotide
cgtgggcagaaacaggaggtatgggaacggctcattgtcaagcccccgttctc

SEQ ID NO: 15464 - DNA, 60 bp, Artificial
  Synthetic oligonucleotide
gcagccccacaaaatagagagatagacatggtgcattacgagaccttcctagacccagaa

SEQ ID NO: 15465 - DNA, 58 bp, Artificial
  Synthetic oligonucleotide
agtcaaggatgcagggaagctaaccctaggacagccgctaactatcctgacctcccac

SEQ ID NO: 15466 - DNA, 60 bp, Artificial
  Synthetic oligonucleotide
ttaaaggtagacggagttgctgcctggattcacgcctctcacgtgaaagctgcaggacca

SEQ ID NO: 15467 - DNA, 60 bp, Artificial
  Synthetic oligonucleotide
aataatgtaaccgctaggcactgcactcatgacatattaccgctaattgctacttggcta

SEQ ID NO: 15468 - DNA, 59 bp, Artificial
  Synthetic oligonucleotide
ccagcagggggacctaataggcatggcccactacatgatggtcaatttcaagttggtga

SEQ ID NO: 15469 - DNA, 55 bp, Artificial
  Synthetic oligonucleotide
cagaatgtcaacaagatcagagaggccatacctgatgtgcagatagatttgcctg

SEQ ID NO: 15470 - DNA, 56 bp, Artificial
  Synthetic oligonucleotide
ttggatggggtatgagctccatcctgacaagtggacagtccagcctatagtgctac

SEQ ID NO: 15471 - DNA, 60 bp, Artificial
  Synthetic oligonucleotide
ctccatagaatggaggctaagaaggtatagcacacaagtagatcctgaccaggcagacca

SEQ ID NO: 15472 - DNA, 50 bp, Artificial
  Synthetic oligonucleotide
gtcagaccgcaagtacctctaagaccaatgacttacaagggagctctgga

SEQ ID NO: 15473 - DNA, 60 bp, Artificial
  Synthetic oligonucleotide
cattcaatgggacgggtccatgcagaaacgtcagcacagtacagtgtacacatgggatta

SEQ ID NO: 15474 - DNA, 60 bp, Artificial
  Synthetic oligonucleotide
cctatagtgcaaaatgcacaagggcaaatgatacaccaggccctctcacctaggactttg

SEQ ID NO: 15475 - DNA, 60 bp, Artificial
  Synthetic oligonucleotide
gtgctaatgtggaagtttgacagccgcctagcatttcatcacatggcccgagagaaacat

SEQ ID NO: 15476 - DNA, 51 bp, Artificial
  Synthetic oligonucleotide
tattgaaggggtatttcccatagtggaccaaattacccgtatgagggtagt

SEQ ID NO: 15477 - DNA, 60 bp, Artificial
  Synthetic oligonucleotide
agccttatatccagtgtgcaacttgccttaaataacactcatgttgtcagtaccaagtat

SEQ ID NO: 15478 - DNA, 60 bp, Artificial
  Synthetic oligonucleotide
gaaattaccctatagtgcaaaatgcacaagggcaaatgatataccaggcagtatcaccta

SEQ ID NO: 15479 - DNA, 60 bp, Artificial
  Synthetic oligonucleotide
gcgccaatatttcccgccttagactacgtggcatttcctgacttagctactgagcatgcg

SEQ ID NO: 15480 - DNA, 55 bp, Artificial
  Synthetic oligonucleotide
cccgccttagactacgtggcatttcctgacttagctactgagcatgcgctcagtg

SEQ ID NO: 15481 - DNA, 51 bp, Artificial
  Synthetic oligonucleotide
cctcttctggcaaaataatcctgtcatgtggattcacttgcctgcatcgcc

SEQ ID NO: 15482 - DNA, 60 bp, Artificial
  Synthetic oligonucleotide
taactacacaccagggccagggatcagatatccactgacctttggttggtgcttcgagct

SEQ ID NO: 15483 - DNA, 54 bp, Artificial
  Synthetic oligonucleotide
cagaatccagtagatgtggggtccatatacaagaggtgggtcatcataggctta

SEQ ID NO: 15484 - DNA, 60 bp, Artificial
  Synthetic oligonucleotide
cgcttaaccgcaaaccgcatcctctagaactctgctagagaccttccagtcaccatgact

SEQ ID NO: 15485 - DNA, 56 bp, Artificial
  Synthetic oligonucleotide
caggcgaacaagcatgggctgcttcagtcatagattttgctcggaagggtaacgag

SEQ ID NO: 15486 - DNA, 54 bp, Artificial
  Synthetic oligonucleotide
catccaagagaaccaatgacaccaatgtgtggtggggaaacaatgccacagaac

SEQ ID NO: 15487 - DNA, 55 bp, Artificial
  Synthetic oligonucleotide
gcagaactacacaccagggccagggcctagatggccactgacctttgggtggtgc

SEQ ID NO: 15488 - DNA, 59 bp, Artificial
  Synthetic oligonucleotide
gacagctttaggcctactggagttagcatcactatggcctgcgacacaaatccatacag

SEQ ID NO: 15489 - DNA, 60 bp, Artificial
  Synthetic oligonucleotide
ccaggacatcccaagggtcatcagaggacagcacactctaggggattgtgaacatccaga

SEQ ID NO: 15490 - DNA, 58 bp, Artificial
  Synthetic oligonucleotide
atggaacgagccccagaagaccaggggccacagagggagccattcaacgaatggacac

SEQ ID NO: 15491 - DNA, 60 bp, Artificial
  Synthetic oligonucleotide
gctgatgtatacagatggcccagggactcggtatcccaagataccaggcttcctatggtg

SEQ ID NO: 15492 - DNA, 60 bp, Artificial
  Synthetic oligonucleotide
tagtcagagcactaatagagggtcagcccctagaggttctactggacacaggggcagacg

SEQ ID NO: 15493 - DNA, 60 bp, Artificial
  Synthetic oligonucleotide
ccatggcttcatagtttaggacagtatatctatagcacttatggagatacatgggaagga

SEQ ID NO: 15494 - DNA, 60 bp, Artificial
  Synthetic oligonucleotide
cccgctttgccgctctgtattcagtcgctctacggagaggctgccagatagagccccgag

SEQ ID NO: 15495 - DNA, 60 bp, Artificial
  Synthetic oligonucleotide
tgtgcccgtctgttgtgtgactctggtaactagagatccctcagacctttgtgttagtgt

SEQ ID NO: 15496 - DNA, 51 bp, Artificial
  Synthetic oligonucleotide
tgaaactgtcccagtcaaattgaaaccaggaatggacgggccaagaataaa

SEQ ID NO: 15497 - DNA, 50 bp, Artificial
  Synthetic oligonucleotide
tctgccatcagaagagctatattagggcatattgtagaaccccggtgtgc

SEQ ID NO: 15498 - DNA, 57 bp, Artificial
  Synthetic oligonucleotide
ggctttgctaatcccttgtttgacatctgatgaatgggtaacagtgtattatggagt

SEQ ID NO: 15499 - DNA, 54 bp, Artificial
  Synthetic oligonucleotide
gattggatagtacaactaagcacagcagtgaatctgacgtgtaagagggtaggg

SEQ ID NO: 15500 - DNA, 51 bp, Artificial
  Synthetic oligonucleotide
gtgtatgggatgaaagcttaaagccatgtgtaaagataacccctctatgtg

SEQ ID NO: 15501 - DNA, 53 bp, Artificial
  Synthetic oligonucleotide
attacttgctgtagaaagatacctacaggatcagcagattctaggcctttggg

SEQ ID NO: 15502 - DNA, 60 bp, Artificial
  Synthetic oligonucleotide
tgtgcccgtctgttgtgtgactctggtaactagagatccctcagaccactgtagcgagtg

SEQ ID NO: 15503 - DNA, 60 bp, Artificial
  Synthetic oligonucleotide
gtatgatcgtacccatcctcctgatgggcctagaccgctgccctatttcactgccgcaga

SEQ ID NO: 15504 - DNA, 58 bp, Artificial
  Synthetic oligonucleotide
ggtccagggattagatatccactgacctttggatggtgcttcgaactagtaccagttg

SEQ ID NO: 15505 - DNA, 54 bp, Artificial
  Synthetic oligonucleotide
gcaaagggagcagattacagtgttggacataggagatgcctattttagctgccc

SEQ ID NO: 15506 - DNA, 56 bp, Artificial
  Synthetic oligonucleotide
cgggtctattacagggaaggcagagaccctgtgtggaaaggtccggctaagctcat

SEQ ID NO: 15507 - DNA, 53 bp, Artificial
  Synthetic oligonucleotide
ctaaatggcagtatagcagaaggagacataataattagatctgaaaacatctc

SEQ ID NO: 15508 - DNA, 55 bp, Artificial
  Synthetic oligonucleotide
aggtgggacatcagccaacagggcaagtaccatcattacagtatttagcacttag

SEQ ID NO: 15509 - DNA, 60 bp, Artificial
  Synthetic oligonucleotide
attggcagaactacacgccaggaccaggggtcagatattcactgacctttggatggtgct

SEQ ID NO: 15510 - DNA, 60 bp, Artificial
  Synthetic oligonucleotide
gtgtgtggctcagcacgtagagtgacaagtaaatctactgtaataggacacaacacctct

SEQ ID NO: 15511 - DNA, 59 bp, Artificial
  Synthetic oligonucleotide
ttggtcttcacaagctgtatatggtcaagctagattaggaagcttttatgtccctaaag

SEQ ID NO: 15512 - DNA, 53 bp, Artificial
  Synthetic oligonucleotide
ccaatgagtcaggaccactatgcaccaacactttttggactcctggaccggta

SEQ ID NO: 15513 - DNA, 51 bp, Artificial
  Synthetic oligonucleotide
ctgaggccgccatccgtgctggttgagtcgaggtctatcgtctcccgctct

SEQ ID NO: 15514 - DNA, 60 bp, Artificial
  Synthetic oligonucleotide
aatactggccgcggctccttggttattgtctagtctgtgttgtctggtctgtgtcgacat

SEQ ID NO: 15515 - DNA, 51 bp, Artificial
  Synthetic oligonucleotide
gggagctcaacactcggtcttaaccaaggcaaatgggcccctgtcctcgcg

SEQ ID NO: 15516 - DNA, 56 bp, Artificial
  Synthetic oligonucleotide
gagagacttactctttattgcagcgaggattgtggaccttctgggacgcagggggt

SEQ ID NO: 15517 - DNA, 60 bp, Artificial
  Synthetic oligonucleotide
gaggtagaagaggccactgagggagagaccaactgcttgttacaccctatgaaccagcat

SEQ ID NO: 15518 - DNA, 54 bp, Artificial
  Synthetic oligonucleotide
ggaaaggccaccggaggatgaaggaccgccaagggaaccctatgatgagtggct

SEQ ID NO: 15519 - DNA, 60 bp, Artificial
  Synthetic oligonucleotide
gggtggtcagaactccaagaagcgggaagaggcatatgcacgcttctacaagaggttgcg

SEQ ID NO: 15520 - DNA, 55 bp, Artificial
  Synthetic oligonucleotide
gaagcgggaagaggcatatgcacgcttctacaagaggttgcgcagaggatatggc

SEQ ID NO: 15521 - DNA, 57 bp, Artificial
  Synthetic oligonucleotide
acagctccctagcacgaagacacatagcccgagaaaagcacccagagttctataaag

SEQ ID NO: 15522 - DNA, 52 bp, Artificial
  Synthetic oligonucleotide
acccagcaagagcaagttcactgggttactaggaaccccaaccctatcccag

SEQ ID NO: 15523 - DNA, 59 bp, Artificial
  Synthetic oligonucleotide
taggagaagtctccaggcaattagcagctagaggaggaataccaagttcctatactcct

SEQ ID NO: 15524 - DNA, 55 bp, Artificial
  Synthetic oligonucleotide
ccctcaagagcaactagcatggatgacaagtaacccacctatcccagtgggagac

SEQ ID NO: 15525 - DNA, 60 bp, Artificial
  Synthetic oligonucleotide
tctactatggggtacctgtgtggagagatgcagagactaccttattttgtgcatcagatg

SEQ ID NO: 15526 - DNA, 60 bp, Artificial
  Synthetic oligonucleotide
gtttcaagctagtaccagttgatccagatgaggtagaagaggctactgagggagagaaca

SEQ ID NO: 15527 - DNA, 60 bp, Artificial
  Synthetic oligonucleotide
gtacacatcccactaggggatgctagattagtagtaagaacatattggggtctgcataca

SEQ ID NO: 15528 - DNA, 50 bp, Artificial
  Synthetic oligonucleotide
aggtcggggaacaaatccgaactcattatactttgcatggccctgaaaag

SEQ ID NO: 15529 - DNA, 60 bp, Artificial
  Synthetic oligonucleotide
tttgctttcagacaaaaggcttaggcatttcctatggcaggaagaagcggagacagcgac

SEQ ID NO: 15530 - DNA, 55 bp, Artificial
  Synthetic oligonucleotide
ccctcgagcacccacgggggttctctatcaagataaacctttgcgatggatatat

SEQ ID NO: 15531 - DNA, 51 bp, Artificial
  Synthetic oligonucleotide
actggcagaaactacaaaacctcaagagccaatcgaacccactcaggataa

SEQ ID NO: 15532 - DNA, 60 bp, Artificial
  Synthetic oligonucleotide
agtggatccaagaagcattccaagcattcgcaaagactacgagagagactcttgcgagcg

SEQ ID NO: 15533 - DNA, 60 bp, Artificial
  Synthetic oligonucleotide
gcaacgtgtctgctctcatcattcagatccttagtgtgggggcctgaacggcttgggttg

SEQ ID NO: 15534 - DNA, 55 bp, Artificial
  Synthetic oligonucleotide
acaattaggggctaggtggcccatacaacaagttcacacagacaatggacccaac

SEQ ID NO: 15535 - DNA, 56 bp, Artificial
  Synthetic oligonucleotide
aaagttaagggtgcccgtctgttgtgtgactctggtaactagagatccctcagacc

SEQ ID NO: 15536 - DNA, 60 bp, Artificial
  Synthetic oligonucleotide
tatccactgacctttggatggtgcttcaagctagtaccagttgacccctcagaagtagaa

SEQ ID NO: 15537 - DNA, 60 bp, Artificial
  Synthetic oligonucleotide
ctaggggaggaagatgggtgcgagagcgtctgtattgacagggagcaaattggatgcatg

SEQ ID NO: 15538 - DNA, 60 bp, Artificial
  Synthetic oligonucleotide
tagtccagtacatggatgacattcttgtggcaagtgacagaagtgatctagagcatgaca

SEQ ID NO: 15539 - DNA, 60 bp, Artificial
  Synthetic oligonucleotide
atggaatggaggatgcagacaatgaggtgctgatatggagatttgacagtagcctagcac

SEQ ID NO: 15540 - DNA, 55 bp, Artificial
  Synthetic oligonucleotide
cattactccacggagaagagtaagggatggacccggtagatcctaacctagagcc

SEQ ID NO: 15541 - DNA, 60 bp, Artificial
  Synthetic oligonucleotide
catcagggccagggatcagatatccactgacctttggatggtgcttcaagctagtaccag

SEQ ID NO: 15542 - DNA, 60 bp, Artificial
  Synthetic oligonucleotide
tgtagtgttatgcaatactcttatgtaacgatgaaacagcaatatgccttataaggagaa

SEQ ID NO: 15543 - DNA, 60 bp, Artificial
  Synthetic oligonucleotide
tgcaatactcttatgtaacgatgaaacagcaatatgccttataaggagaaaaaggcactg

SEQ ID NO: 15544 - DNA, 58 bp, Artificial
  Synthetic oligonucleotide
cagttttacggtgaactgcacagctagtaatttacgtaatgccagtgggtgctgcgga

SEQ ID NO: 15545 - DNA, 60 bp, Artificial
  Synthetic oligonucleotide
cccatagtgcaaaatgcacaagggcaaatggtacaccaggccatatcacctaggacttta

SEQ ID NO: 15546 - DNA, 60 bp, Artificial
  Synthetic oligonucleotide
gccatctgaaacaggtagtcatgtcctggatgagagtaggctcaggcctatttgctccgc

SEQ ID NO: 15547 - DNA, 60 bp, Artificial
  Synthetic oligonucleotide
tggcagctagattgtacacacttggaaggaaaagttatcctggtagcagttcatgtagcc

SEQ ID NO: 15548 - DNA, 55 bp, Artificial
  Synthetic oligonucleotide
actcaccactatcattccagacccgcctcccagttccaaggggacccgacaggcc

SEQ ID NO: 15549 - DNA, 60 bp, Artificial
  Synthetic oligonucleotide
actggatccactcgcttagtgcatggattcttagcactcgtctgggacgatctacggagc

SEQ ID NO: 15550 - DNA, 60 bp, Artificial
  Synthetic oligonucleotide
tagtgtgtgcccgtctgttgtgtgactctggtaactagagatccctcagaccaatttggt

SEQ ID NO: 15551 - DNA, 57 bp, Artificial
  Synthetic oligonucleotide
ctccaggaccaggcgtcagataccccctgacctttggatggtgcttcaagctagtac

SEQ ID NO: 15552 - DNA, 60 bp, Artificial
  Synthetic oligonucleotide
aaggagagaccaacaacttgctaagccctatgagcctgcatgggatggaggacccggaga

SEQ ID NO: 15553 - DNA, 56 bp, Artificial
  Synthetic oligonucleotide
gcagggacccccactctataatcattccatacacccaggaccaattaacctggctc

SEQ ID NO: 15554 - DNA, 60 bp, Artificial
  Synthetic oligonucleotide
catgaggctactcaagctcacaccctacatcacctcaatgcacacaccctacgattactc

SEQ ID NO: 15555 - DNA, 60 bp, Artificial
  Synthetic oligonucleotide
atgcactcctcctgctattctagtttctcacagtgtactcaaggcaataatacttatttt

SEQ ID NO: 15556 - DNA, 60 bp, Artificial
  Synthetic oligonucleotide
cattgatgcacaaatgcttgatattctgtcagccacccaccaggccctcaatatctccaa

SEQ ID NO: 15557 - DNA, 55 bp, Artificial
  Synthetic oligonucleotide
cttgatattctgtcagccacccaccaggccctcaatatctccaaccccagcctag

SEQ ID NO: 15558 - DNA, 60 bp, Artificial
  Synthetic oligonucleotide
gcataaaagcagccgctctctgcttgtactgggtctcttcgctagaccagataagagccc

SEQ ID NO: 15559 - DNA, 60 bp, Artificial
  Synthetic oligonucleotide
tggtttggcttcaatggtacaagagcagaaaacaggacatatatgtattggcatggtaga

SEQ ID NO: 15560 - DNA, 60 bp, Artificial
  Synthetic oligonucleotide
gagtttcgtctgcactgtaatcacagccaaacagagcgagaaatggccttggttgggatc

SEQ ID NO: 15561 - DNA, 60 bp, Artificial
  Synthetic oligonucleotide
ctaggaacaagcgtagattctacagattgatcatgttccgttgtgcgttagaactcaagc

SEQ ID NO: 15562 - DNA, 55 bp, Artificial
  Synthetic oligonucleotide
cctagagagaacccactacatgttcaggaacgtcccctctagtcccgccacaacc

SEQ ID NO: 15563 - DNA, 55 bp, Artificial
  Synthetic oligonucleotide
ctacagattgatcatgttccgttgtgcgttagaactcaagcatgtgtcgggaaca

SEQ ID NO: 15564 - DNA, 52 bp, Artificial
  Synthetic oligonucleotide
tagatctaatcgtccattcagaacatactcagatgtggcagccgctgtatct

SEQ ID NO: 15565 - DNA, 60 bp, Artificial
  Synthetic oligonucleotide
tttcgaataactcacatagacaagctagtagaagatccaacctctctgaacatcgctatg

SEQ ID NO: 15566 - DNA, 55 bp, Artificial
  Synthetic oligonucleotide
ggtgatggactcccgaaagatacccgaatttcagactccttggccccaatcggga

SEQ ID NO: 15567 - DNA, 52 bp, Artificial
  Synthetic oligonucleotide
tgtacgaatctaatcaatcaatgacagttaacaggcctaaagatgcttaccc

SEQ ID NO: 15568 - DNA, 60 bp, Artificial
  Synthetic oligonucleotide
taatgctttaaccgttggacatttcagtgaaagaccccatgatgcaatcaatggacactt

SEQ ID NO: 15569 - DNA, 60 bp, Artificial
  Synthetic oligonucleotide
tgcataggttcaagtctgccagatacagcgaaggagggtattcttctgtctgcccgaacc

SEQ ID NO: 15570 - DNA, 59 bp, Artificial
  Synthetic oligonucleotide
ccttacataggttcaagtctgccagatacagcgagggagggtattcttctgtctgcccg

SEQ ID NO: 15571 - DNA, 51 bp, Artificial
  Synthetic oligonucleotide
gtggagtaacaggagggggaaatcctcgaatatcagtgtctgtgcttccgt

SEQ ID NO: 15572 - DNA, 60 bp, Artificial
  Synthetic oligonucleotide
ggctcaagttatgtggagttcttggacttagacttatggatggaacatgggtcgcgatgc

SEQ ID NO: 15573 - DNA, 53 bp, Artificial
  Synthetic oligonucleotide
ggtccattagttccctacttcgggacccaaaccaagccactgatcgcaaaagc

SEQ ID NO: 15574 - DNA, 60 bp, Artificial
  Synthetic oligonucleotide
atgtgtaaatggtgaaacatgttgggaacatccatctgacttatgtgacccaaggacttg

SEQ ID NO: 15575 - DNA, 60 bp, Artificial
  Synthetic oligonucleotide
ggacggaacgtgggtcgcgattcagacgtcagatgagaccaaatggtgcccccctgatca

SEQ ID NO: 15576 - DNA, 60 bp, Artificial
  Synthetic oligonucleotide
gttagagagcatatcaaggaatgctctttcaatataccgagctatcgaggaaggagcgtc

SEQ ID NO: 15577 - DNA, 55 bp, Artificial
  Synthetic oligonucleotide
catcgggaaggcaggggatacaatcggaatatttgaccttgtatccgtgaaagct

SEQ ID NO: 15578 - DNA, 60 bp, Artificial
  Synthetic oligonucleotide
gtatacatctcttactacagcaggtttgttgtatgcttatgcagtaggatcctctgccga

SEQ ID NO: 15579 - DNA, 60 bp, Artificial
  Synthetic oligonucleotide
tatcaacatgaacccgagagcatgtcaactatggtctgacatgtctcttcagacacaaag

SEQ ID NO: 15580 - DNA, 56 bp, Artificial
  Synthetic oligonucleotide
gcaagatagtgaaaaactgtagggatgaggacacccagaagcccccccctgtatcg

SEQ ID NO: 15581 - DNA, 55 bp, Artificial
  Synthetic oligonucleotide
tgaggccaaatggtgccctcctgatcagttggtgaatatacatgattttcgctcg

SEQ ID NO: 15582 - DNA, 50 bp, Artificial
  Synthetic oligonucleotide
acacgacttagtctttgtgtatggctgttacaggcattggggacatcctt

SEQ ID NO: 15583 - DNA, 50 bp, Artificial
  Synthetic oligonucleotide
cagaagtccagaagctgtttatgctcgaatcatgatgaatggaggtcgac

SEQ ID NO: 15584 - DNA, 52 bp, Artificial
  Synthetic oligonucleotide
agtgtgtcaacaacaaagtgagtgctcatttgttcggggtcattctgggagc

SEQ ID NO: 15585 - DNA, 55 bp, Artificial
  Synthetic oligonucleotide
ggagagcatatcaagaaatgcgctttcaatataccgagctatcgaggaaggggca

SEQ ID NO: 15586 - DNA, 54 bp, Artificial
  Synthetic oligonucleotide
ctcgagagcttcactcgccttctagaagatcctaccaccttaaatataaaggga

SEQ ID NO: 15587 - DNA, 60 bp, Artificial
  Synthetic oligonucleotide
ttcgtcaagatcgtagaacaccacactctgatgacaactcacaagatgtgcgctaactgg

SEQ ID NO: 15588 - DNA, 60 bp, Artificial
  Synthetic oligonucleotide
tggagttcttggacttagacttatggatggaacatgggtcgcgatgcaaacatcagatga

SEQ ID NO: 15589 - DNA, 55 bp, Artificial
  Synthetic oligonucleotide
cccggagacaggtcaggtcgcagggaatccttcttcagaagggggagtccacaat

SEQ ID NO: 15590 - DNA, 55 bp, Artificial
  Synthetic oligonucleotide
tccgttcggacttggagcgagatcatcccctcaaaagggtgtttgagagtagggg

SEQ ID NO: 15591 - DNA, 50 bp, Artificial
  Synthetic oligonucleotide
cccttgcattgcttatctctcgatacaaaagacatccagttagatcatac

SEQ ID NO: 15592 - DNA, 60 bp, Artificial
  Synthetic oligonucleotide
catcagatgagaccaaatggtgccctcctgatcagttggtgaatctgcacgactttcgct

SEQ ID NO: 15593 - DNA, 60 bp, Artificial
  Synthetic oligonucleotide
caccagatgcatgtagagcctcgtataactggaagatggcaggtgaccccagatatgaag

SEQ ID NO: 15594 - DNA, 58 bp, Artificial
  Synthetic oligonucleotide
tcgaagcagtagagccgtgaaacaaaccaccctcggactctgtagcatgactgtgagt

SEQ ID NO: 15595 - DNA, 55 bp, Artificial
  Synthetic oligonucleotide
gagcatatcgaggaatgcactctcaatataccgagctatcgaggaaggagcatct

SEQ ID NO: 15596 - DNA, 60 bp, Artificial
  Synthetic oligonucleotide
ttagggggatatcagatgttcacacagagcgttttctggtacacattggggcgactctgg

SEQ ID NO: 15597 - DNA, 60 bp, Artificial
  Synthetic oligonucleotide
gagcgcttcctatcggatgggcgggtgataagaaactcagaatttcgagatctaatgacg

SEQ ID NO: 15598 - DNA, 60 bp, Artificial
  Synthetic oligonucleotide
atgactactcataagatgtgcgctaactggagcactatacctaacttcagattcctggtg

SEQ ID NO: 15599 - DNA, 56 bp, Artificial
  Synthetic oligonucleotide
aggcctccaaatcagagtgagcgccagacaatgtcacatccagggtcgtctctggt

SEQ ID NO: 15600 - DNA, 60 bp, Artificial
  Synthetic oligonucleotide
tgatgctaaaagacttgttcctgtcaagattcaactcattgctcatacttgtgtccccgc

SEQ ID NO: 15601 - DNA, 60 bp, Artificial
  Synthetic oligonucleotide
tttacatcgattcaaatctgctaggtatagtgagggcggttactcagccgtgtgtcccaa

SEQ ID NO: 15602 - DNA, 60 bp, Artificial
  Synthetic oligonucleotide
ccatgctcaatgtaccagagcacttcagaagaccattcaatataggtctttacaagggaa

SEQ ID NO: 15603 - DNA, 60 bp, Artificial
  Synthetic oligonucleotide
tctggggatacctgagtcaattatcgggctaattcaaaactctagaacaatcagacggca

SEQ ID NO: 15604 - DNA, 60 bp, Artificial
  Synthetic oligonucleotide
tgaggcgcatgtagaccgttccaccaaggtttgcgccgagcttgagttgaggactcagac

SEQ ID NO: 15605 - DNA, 60 bp, Artificial
  Synthetic oligonucleotide
cagtgcatatggccagggactggacgactacagtgcagtgtgtattgccaaccacattga

SEQ ID NO: 15606 - DNA, 60 bp, Artificial
  Synthetic oligonucleotide
ggagataacgtccatggtgcggttgtgcacaatcgagaggcaaaggctgggcaatgacat

SEQ ID NO: 15607 - DNA, 60 bp, Artificial
  Synthetic oligonucleotide
ccggcattacactgggaagggctccagacttgaacacagcatacaagtcaatattgtctg

SEQ ID NO: 15608 - DNA, 54 bp, Artificial
  Synthetic oligonucleotide
gtctctgcatacgccttaccctgacagtagttggttaagaacggtcaccacaac

SEQ ID NO: 15609 - DNA, 57 bp, Artificial
  Synthetic oligonucleotide
ggggagacgacatagtatcaagagttatagactttgagtcaatttgggagaagcctt

SEQ ID NO: 15610 - DNA, 60 bp, Artificial
  Synthetic oligonucleotide
taagcgcaagacaatgtcatattcagggcaggatttggcgtattaacatgaactcgagag

SEQ ID NO: 15611 - DNA, 60 bp, Artificial
  Synthetic oligonucleotide
tcaatgtattcccgtctctatgtcttgtagttggggatggatcaggggggatatcaagag

SEQ ID NO: 15612 - DNA, 60 bp, Artificial
  Synthetic oligonucleotide
cagttattgccgcatgtgctcctcatgagatgtctgttctcgggggctacctaggggagg

SEQ ID NO: 15613 - DNA, 60 bp, Artificial
  Synthetic oligonucleotide
gtctctaaaaggcgcatgcaaactcaagttgtgtggagttcttggacttagacttatgga

SEQ ID NO: 15614 - DNA, 60 bp, Artificial
  Synthetic oligonucleotide
ttatgcgcagacatggacatccgaattggtacaaagagacacaaggctgaaggactctac

SEQ ID NO: 15615 - DNA, 55 bp, Artificial
  Synthetic oligonucleotide
ccgaattggtacaaagagacacaaggctgaaggactctacgttccactggcacct

SEQ ID NO: 15616 - DNA, 57 bp, Artificial
  Synthetic oligonucleotide
ccctcttcagatagagttcgtggagggggtagtcttgtacttcacagatcgaggatc

SEQ ID NO: 15617 - DNA, 56 bp, Artificial
  Synthetic oligonucleotide
tgctaacaccatgcagaccatactcggagaccccagacccatgaacctcgtgcatc

SEQ ID NO: 15618 - DNA, 60 bp, Artificial
  Synthetic oligonucleotide
atgtgagatgcttggctgcgtttgggggatcctccaatgcagggttaacgatcatgccga

SEQ ID NO: 15619 - DNA, 60 bp, Artificial
  Synthetic oligonucleotide
ctctccccgtgcaagctcattccctccctcatcgacaatctgcatggaccatcattctta

SEQ ID NO: 15620 - DNA, 60 bp, Artificial
  Synthetic oligonucleotide
attacgcatgatttgttccgagagagtgtgatttatctgtgttctggggagggcgatctt

SEQ ID NO: 15621 - DNA, 60 bp, Artificial
  Synthetic oligonucleotide
tcttcatgttctcgcataaccgctcaacagtatcgggatctgtcttggaggaagcccata

SEQ ID NO: 15622 - DNA, 60 bp, Artificial
  Synthetic oligonucleotide
tgtcctgtccttatatgctcattgcgtggacaatatgctggaggcgtctggaagactggt

SEQ ID NO: 15623 - DNA, 55 bp, Artificial
  Synthetic oligonucleotide
gggagtgtgacttactatggcccgttcgtgtttgcggatgaccacgttggaggga

SEQ ID NO: 15624 - DNA, 60 bp, Artificial
  Synthetic oligonucleotide
tacgaggcagctgaattgactaagactgacattgctttggctgatgacggaaccgtcaac

SEQ ID NO: 15625 - DNA, 60 bp, Artificial
  Synthetic oligonucleotide
cgtcctccgcgagatgatcacacacaggctcacattcgacccaagtaactacctcaactg

SEQ ID NO: 15626 - DNA, 60 bp, Artificial
  Synthetic oligonucleotide
gacagcgtgtgcaacctcacttctgttcacaccatccgagagaccggacctcgacaattc

SEQ ID NO: 15627 - DNA, 60 bp, Artificial
  Synthetic oligonucleotide
tatcaaccggataactctgttgatgtctgatttcgcattgtctatagatggaccacttta

SEQ ID NO: 15628 - DNA, 60 bp, Artificial
  Synthetic oligonucleotide
acaatagctctgaagttccggttgccaacatatggagcccagtgagcatgtcgtggggat

SEQ ID NO: 15629 - DNA, 54 bp, Artificial
  Synthetic oligonucleotide
tgacgcattaggtaagatagaatcgagctactgtgaggcgtcctgcgatttgac

SEQ ID NO: 15630 - DNA, 60 bp, Artificial
  Synthetic oligonucleotide
ctaggggaattgttcggcatgaaagacctctatgataggacccatgatctgttcaggact

SEQ ID NO: 15631 - DNA, 60 bp, Artificial
  Synthetic oligonucleotide
taataaatcttctgtaccgggcaatggtcttcagaggatctagcttatcaacgtctcctg

SEQ ID NO: 15632 - DNA, 60 bp, Artificial
  Synthetic oligonucleotide
tcagtgtagcgtgagtaagcgggtctgagcacgctcacgtgtcactacccagatggtatc

SEQ ID NO: 15633 - DNA, 60 bp, Artificial
  Synthetic oligonucleotide
aacacccgatgcgtgtagggccgcatacaactggaaaatggctggcgaccccagatatga

SEQ ID NO: 15634 - DNA, 52 bp, Artificial
  Synthetic oligonucleotide
ggggtagtagatatgtccaagcaagtaggtcccacgttggctgtcgcattgg

SEQ ID NO: 15635 - DNA, 56 bp, Artificial
  Synthetic oligonucleotide
ctcgacgaaaatgtaccactacaacagatgtagcttagctggtcataaaggggtac

SEQ ID NO: 15636 - DNA, 60 bp, Artificial
  Synthetic oligonucleotide
cagacgatgtttgttcttacttggcagctgctatgcatctcttcgagggggtctgtcccg

SEQ ID NO: 15637 - DNA, 60 bp, Artificial
  Synthetic oligonucleotide
ggccttatcgctcaaggagtccatcaactggtttgtgtctcgagaatctaacttggcaaa

SEQ ID NO: 15638 - DNA, 60 bp, Artificial
  Synthetic oligonucleotide
tcaacactcctcaaatccagagccagagatagtattcgttccggaacccacttcgtcaga

SEQ ID NO: 15639 - DNA, 60 bp, Artificial
  Synthetic oligonucleotide
ctgtatggggaattcgatctatggctgatgatcccgcactatttccattgagtttccgga

SEQ ID NO: 15640 - DNA, 56 bp, Artificial
  Synthetic oligonucleotide
cggagggggtgttgagttgtcttgagagggtcgactatgacaaggcattcgggagg

SEQ ID NO: 15641 - DNA, 55 bp, Artificial
  Synthetic oligonucleotide
cctccataacactcgggagggctcccgatctgagcattgcctacaggtcgattct

SEQ ID NO: 15642 - DNA, 51 bp, Artificial
  Synthetic oligonucleotide
aggatgataggtttggtcaaggtggtcatcgggctaaccctgtctgggagt

SEQ ID NO: 15643 - DNA, 57 bp, Artificial
  Synthetic oligonucleotide
agatgcaataccataagccatccacacgacacattgcacgagcggaaattgcacctt

SEQ ID NO: 15644 - DNA, 60 bp, Artificial
  Synthetic oligonucleotide
ccgctatctctgtgaggttatccaacactgggacgaagttaacaataatgagatctggac

SEQ ID NO: 15645 - DNA, 60 bp, Artificial
  Synthetic oligonucleotide
gtgccttgggctggatgatagacgattggctgcaagtagacatcggggcggaaacagacg

SEQ ID NO: 15646 - DNA, 60 bp, Artificial
  Synthetic oligonucleotide
atctcagatgttgtcgtcagtaatgagaagcaggcagtcccttcagaaacagtcaagcag

SEQ ID NO: 15647 - DNA, 55 bp, Artificial
  Synthetic oligonucleotide
tcatttcagaaagcttgtcccgggttttggaaaggcatataccatcgccaatggg

SEQ ID NO: 15648 - DNA, 52 bp, Artificial
  Synthetic oligonucleotide
gagattacttatttcacctcgagtgattgtctcagttcttgaacctttaggg

SEQ ID NO: 15649 - DNA, 53 bp, Artificial
  Synthetic oligonucleotide
caccgatcaggttttacgcaatacatctgatgtagttgatccaaatgatactg

SEQ ID NO: 15650 - DNA, 60 bp, Artificial
  Synthetic oligonucleotide
agagatctagctcgtctagctcctctcggagtaaaactggagatgaagatagctcgttga

SEQ ID NO: 15651 - DNA, 60 bp, Artificial
  Synthetic oligonucleotide
atacgtaatacacaccacattaatgtgctggatatgagttatctgacacctaaacatcct

SEQ ID NO: 15652 - DNA, 52 bp, Artificial
  Synthetic oligonucleotide
tacccagtttaggaactctcttagcatcggtttctaccaatgctatgacagt

SEQ ID NO: 15653 - DNA, 52 bp, Artificial
  Synthetic oligonucleotide
tgacatgaagttacgttgtgtcaatttcgattcagtatggcaagaacccagt

SEQ ID NO: 15654 - DNA, 60 bp, Artificial
  Synthetic oligonucleotide
gtggtatgccgattatcaagtgaccggcctgtgcgactctgctcttgtctcgacagaagt

SEQ ID NO: 15655 - DNA, 56 bp, Artificial
  Synthetic oligonucleotide
gacaaaggctatgcggcggcgttagcaagtgatctggcacggattgttttgcagca

SEQ ID NO: 15656 - DNA, 55 bp, Artificial
  Synthetic oligonucleotide
acagagcttataagtccattctgtccggaataaatgctgctaggttggatcctga

SEQ ID NO: 15657 - DNA, 60 bp, Artificial
  Synthetic oligonucleotide
tggaagctgatgctcattacaagtctatcagagaatggaccgatgtgatcccctccaagg

SEQ ID NO: 15658 - DNA, 59 bp, Artificial
  Synthetic oligonucleotide
cgacagagtcacgggacaaggtctgcaagattattcgagggtgacatatgctttccacc

SEQ ID NO: 15659 - DNA, 60 bp, Artificial
  Synthetic oligonucleotide
ccacgatatacagtctcgatgatcttggaccgagtgatttggttgcagcgtggactagaa

SEQ ID NO: 15660 - DNA, 60 bp, Artificial
  Synthetic oligonucleotide
cgggggaattcaccagaagtatcatcaatgacacctcagaaatgggcagggcatatgtcg

SEQ ID NO: 15661 - DNA, 59 bp, Artificial
  Synthetic oligonucleotide
atcacagcccctccaagaaaacatctaggaaagtcgggtgctctgagtggatatgctcg

SEQ ID NO: 15662 - DNA, 60 bp, Artificial
  Synthetic oligonucleotide
gagtcgagaaatgtgccaggtgtgactcgtttggcccatgacggatccaaaatccctctg

SEQ ID NO: 15663 - DNA, 60 bp, Artificial
  Synthetic oligonucleotide
ggtactcaacatgtttccggatgccaggcttgtattcaatagcctcttagaagtgaatga

SEQ ID NO: 15664 - DNA, 60 bp, Artificial
  Synthetic oligonucleotide
tacatgggtcaaatcagatcattaaacgctacagttatccaaagttgtgccccgcatgag

SEQ ID NO: 15665 - DNA, 60 bp, Artificial
  Synthetic oligonucleotide
gtacaaatctttgaagggagcttgtagattaagactctgtgggatcagcggactgagact

SEQ ID NO: 15666 - DNA, 60 bp, Artificial
  Synthetic oligonucleotide
ccagagactatctcagagggctagcgagaggtgtcttgatagggtcctccatttgcttct

SEQ ID NO: 15667 - DNA, 52 bp, Artificial
  Synthetic oligonucleotide
aacacagctaattacaagaccaatgtggcagataggatggagcagatcttcg

SEQ ID NO: 15668 - DNA, 53 bp, Artificial
  Synthetic oligonucleotide
ctgaagggagcatgcaagttgaccttgtgtgggaaaccaggcctacggttata

SEQ ID NO: 15669 - DNA, 50 bp, Artificial
  Synthetic oligonucleotide
gtgttgtgctatcttcaacaggtcttaaggtatgagagagacagcatgtg

SEQ ID NO: 15670 - DNA, 60 bp, Artificial
  Synthetic oligonucleotide
cctcggtctttatcgcgtgtccagggcgacacaggtcgaatacaagaagactctgatgac

SEQ ID NO: 15671 - DNA, 59 bp, Artificial
  Synthetic oligonucleotide
tgcgaccccctccaagtcagatggatttctctgtcatgcagccaagtgggtgacaacat

SEQ ID NO: 15672 - DNA, 60 bp, Artificial
  Synthetic oligonucleotide
ctgactcagatcaccgctgcaatggtgctttgcggaatgatcgcaaactacactttggat

SEQ ID NO: 15673 - DNA, 60 bp, Artificial
  Synthetic oligonucleotide
acttcagctctgtgccgatccaagagagcactaaatgcacgacagccggacgagatagat

SEQ ID NO: 15674 - DNA, 60 bp, Artificial
  Synthetic oligonucleotide
cgtctggtcttattcagatgtgctttagatctgcatagctcaggatcatattcggccgat

SEQ ID NO: 15675 - DNA, 60 bp, Artificial
  Synthetic oligonucleotide
cacgaatgatcagattccaacattggcaggagtaatgtcttctgtgtcaacaaatgcact

SEQ ID NO: 15676 - DNA, 60 bp, Artificial
  Synthetic oligonucleotide
tatcgtcaattgtctcaactgcggacgtcatctacggaggagcattgtacttaactaatc

SEQ ID NO: 15677 - DNA, 60 bp, Artificial
  Synthetic oligonucleotide
cagagtgcaagactctcgtatacgttgctgcgtctgtcagtaagaaggtctctgctcagg

SEQ ID NO: 15678 - DNA, 60 bp, Artificial
  Synthetic oligonucleotide
tcgaggccacaagtgtagcagtgctcaggagggttaaaggacctgcattcataggctgca

SEQ ID NO: 15679 - DNA, 60 bp, Artificial
  Synthetic oligonucleotide
ctcttccagactatcatctccaaaaccccctatatgctataaccgatcagttatcaatgt

SEQ ID NO: 15680 - DNA, 60 bp, Artificial
  Synthetic oligonucleotide
acatctacgttactggatactggtgatgccataccgcaagtgtatcctaattgtgataag

SEQ ID NO: 15681 - DNA, 60 bp, Artificial
  Synthetic oligonucleotide
tcaatttgatgttgagcctcgcagatcgatcccacttagatgaaatgtggacatgctcgg

SEQ ID NO: 15682 - DNA, 60 bp, Artificial
  Synthetic oligonucleotide
tctgacgacacctcagtgttcaaaagggtggcttgcaattctagtttgagcctctcggct

SEQ ID NO: 15683 - DNA, 60 bp, Artificial
  Synthetic oligonucleotide
acagatcccctaagtttggatgctgagctagcgcggtagtgtattggtgagtccttctcc

SEQ ID NO: 15684 - DNA, 60 bp, Artificial
  Synthetic oligonucleotide
ggcacgagggggaatccctggatgtatacatattgcatagagggaatggatgacgccccg

SEQ ID NO: 15685 - DNA, 60 bp, Artificial
  Synthetic oligonucleotide
cctcatcacaacatgtgtctcgttttgtcattgggataatgtcaggtagcggcagtgagc

SEQ ID NO: 15686 - DNA, 60 bp, Artificial
  Synthetic oligonucleotide
gcctttgtgtgagcggcgggtgtggtgtgtcttatctatgatatagtgacgatgtatgtt

SEQ ID NO: 15687 - DNA, 60 bp, Artificial
  Synthetic oligonucleotide
agtgaaacctgcaatagtggagtgagcactatagttagaggacgaaaagccatcaacatg

SEQ ID NO: 15688 - DNA, 56 bp, Artificial
  Synthetic oligonucleotide
taaaatgtctagcaactcccaactgatacaatctacagcccgttcaatctcctacc

SEQ ID NO: 15689 - DNA, 56 bp, Artificial
  Synthetic oligonucleotide
aatgacgaggaccgtgtctcaaccatcctgacggagggcactctcaccatcacagg

SEQ ID NO: 15690 - DNA, 58 bp, Artificial
  Synthetic oligonucleotide
gaggctgtggtgtatcaatatgaactctaaggcatgtcaactctgggcagatatgggc

SEQ ID NO: 15691 - DNA, 60 bp, Artificial
  Synthetic oligonucleotide
ccaaccagccagccgagtgtcctgggatctgtcaacttccacatcgagggaattgccatc

SEQ ID NO: 15692 - DNA, 60 bp, Artificial
  Synthetic oligonucleotide
ctgacaaggatggacagcgtgtgcaacctcacatccgttcacaccattagagagactgga

SEQ ID NO: 15693 - DNA, 52 bp, Artificial
  Synthetic oligonucleotide
acatcaggacaaacgcactacttgttgcatatgtcttcagtgaaaatataga

SEQ ID NO: 15694 - DNA, 53 bp, Artificial
  Synthetic oligonucleotide
cgcaaatcaaccgactcagtgttgtccattgtataaagaggtgctagaagatc

SEQ ID NO: 15695 - DNA, 56 bp, Artificial
  Synthetic oligonucleotide
tcgatgttggtaccaactgaaggcctgaggaaaagattggttggagatttcatggg

SEQ ID NO: 15696 - DNA, 55 bp, Artificial
  Synthetic oligonucleotide
ttatcgacatgataaaggccatcgaacagttcttcccaccaattgtcatgcaaca

SEQ ID NO: 15697 - DNA, 60 bp, Artificial
  Synthetic oligonucleotide
accgcaagtgcctgcagagaggcgtacaactggaaagctacaggtgatcccagatacgag

SEQ ID NO: 15698 - DNA, 60 bp, Artificial
  Synthetic oligonucleotide
tgattggcctgtgggaagatcagatctactgtcttgacatgaccaacggaccaacctgct

SEQ ID NO: 15699 - DNA, 59 bp, Artificial
  Synthetic oligonucleotide
aagcggactggctcggctcttcatagattcaagtctgccagatatagtgagggaggtta

SEQ ID NO: 15700 - DNA, 59 bp, Artificial
  Synthetic oligonucleotide
ccgaagacaactctgatgactggacctcgttcggagttcaaatcctcagtaggactgaa

SEQ ID NO: 15701 - DNA, 54 bp, Artificial
  Synthetic oligonucleotide
cctccccagctacgactcagagacgacaactcctggagctctgtcaacttatcg

SEQ ID NO: 15702 - DNA, 60 bp, Artificial
  Synthetic oligonucleotide
gactccaaggcagtcttgccggtataggatctgctatcaggtctctaaggcgtgctgtcc

SEQ ID NO: 15703 - DNA, 56 bp, Artificial
  Synthetic oligonucleotide
cctgaaccgttatgcgttcccctgactacacccccgagcttagtcacactatgcaa

SEQ ID NO: 15704 - DNA, 60 bp, Artificial
  Synthetic oligonucleotide
tgagtcatcccctccacaccactcgtttagatgaccgcctctctttgagatctgagggat

SEQ ID NO: 15705 - DNA, 60 bp, Artificial
  Synthetic oligonucleotide
gcaaattacatcttgccactttttgacgcactgactatgacagacaatttgaacaaggtg

SEQ ID NO: 15706 - DNA, 56 bp, Artificial
  Synthetic oligonucleotide
gcgccatgctgcaagaactatgacagggagttacagcccccacaggagggtgtcac

SEQ ID NO: 15707 - DNA, 60 bp, Artificial
  Synthetic oligonucleotide
cagacagatcagacctcatcgggttatgggaggatcaaatatactgcttggatatttcca

SEQ ID NO: 15708 - DNA, 55 bp, Artificial
  Synthetic oligonucleotide
tccgaccttatcgggttatgggaggatcaaatatactgtctggacatgtcagacg

SEQ ID NO: 15709 - DNA, 60 bp, Artificial
  Synthetic oligonucleotide
ttcctgcaaatcaaggggatcatttctcagggcactgtaagtgactcaggggaggtggta

SEQ ID NO: 15710 - DNA, 55 bp, Artificial
  Synthetic oligonucleotide
tatgaggttcctaatatctcgtttccctgaccctgtttgcgaatcccttgcctgg

SEQ ID NO: 15711 - DNA, 60 bp, Artificial
  Synthetic oligonucleotide
atctgtctactgctttaggcgatgtccccagcttcgcaagactccatgacctgtacaaca

SEQ ID NO: 15712 - DNA, 54 bp, Artificial
  Synthetic oligonucleotide
tgacgtatacatcaacatcagtcaatttgaggccacaatgacaggccaaaggga

SEQ ID NO: 15713 - DNA, 60 bp, Artificial
  Synthetic oligonucleotide
gttggccaacaatcgctcagatcatcaaaaagcataagatcaggctcaatcagtgtacca

SEQ ID NO: 15714 - DNA, 60 bp, Artificial
  Synthetic oligonucleotide
cgatcatacttcactggaatcctgcgttgagggacaagccggcagatttagtcaagcatc

SEQ ID NO: 15715 - DNA, 60 bp, Artificial
  Synthetic oligonucleotide
gaaccaccaaggagtctctcgttatcatatccccaagtgcggcagatttggacccatatg

SEQ ID NO: 15716 - DNA, 60 bp, Artificial
  Synthetic oligonucleotide
aacggcacgactgttcaagcacaccaactcccaaagagagacgctccagcagttagcaaa

SEQ ID NO: 15717 - DNA, 60 bp, Artificial
  Synthetic oligonucleotide
gggcctgcggcagaaatattggaccatcatgactgcgtgtgacttaatgtatgtagctag

SEQ ID NO: 15718 - DNA, 60 bp, Artificial
  Synthetic oligonucleotide
gtatccggtttatatgggctcatacacgagggagaagttcaagcctactgagatggcggc

SEQ ID NO: 15719 - DNA, 60 bp, Artificial
  Synthetic oligonucleotide
aagggacgggcccatagcagtgtcaagaccattgggcagtgccggattgtcaagcatcct

SEQ ID NO: 15720 - DNA, 60 bp, Artificial
  Synthetic oligonucleotide
catggtcctgtctcatgggtccctcgctgatttggacaggaggctagacaacgcccctaa

SEQ ID NO: 15721 - DNA, 60 bp, Artificial
  Synthetic oligonucleotide
tgctgagtacttgacctcctccacccttcgggaaatgagccttgtgttattcaattgcag

SEQ ID NO: 15722 - DNA, 60 bp, Artificial
  Synthetic oligonucleotide
gttgatagtggttctgtaacgtgcaacaatggcactcttgtctgggctacatgtggagga

SEQ ID NO: 15723 - DNA, 54 bp, Artificial
  Synthetic oligonucleotide
tagttatagatccatattcagggaagatcaaggacccattgatagataatgact

SEQ ID NO: 15724 - DNA, 60 bp, Artificial
  Synthetic oligonucleotide
gacatccctgatatgatcgacttatctagcttatatgcagataaatctcacagtatgagg

SEQ ID NO: 15725 - DNA, 51 bp, Artificial
  Synthetic oligonucleotide
tctagcttatatgcagataaatctcacagtatgaggttgtcggatgtcatc

SEQ ID NO: 15726 - DNA, 60 bp, Artificial
  Synthetic oligonucleotide
cagtatgaggttgtcggatgtcatcaaccatgttagacaattcccaaataagcctattcc

SEQ ID NO: 15727 - DNA, 55 bp, Artificial
  Synthetic oligonucleotide
ccttttaggccctatctgggttccggcacaagcgagggtacaagcatcctgcaac

SEQ ID NO: 15728 - DNA, 60 bp, Artificial
  Synthetic oligonucleotide
taactctgaatcatctaggagtaggaggtgcctaactgacttgtctgccttttatcgccg

SEQ ID NO: 15729 - DNA, 60 bp, Artificial
  Synthetic oligonucleotide
cattggcacttaagatgtcagaaatgcattagacccatagaggaggttactctggatgca

SEQ ID NO: 15730 - DNA, 60 bp, Artificial
  Synthetic oligonucleotide
cctacaacaaatggatcagcataagggacataaggtctagaacttccatcatggactact

SEQ ID NO: 15731 - DNA, 60 bp, Artificial
  Synthetic oligonucleotide
cttgtcatcatatctccgagcgttgcagatttggacccgtacgataaatcccttcactcg

SEQ ID NO: 15732 - DNA, 58 bp, Artificial
  Synthetic oligonucleotide
ggcctccaagtcccaccggagggggtcctctccagtctgaagaaggtgagctatgatc

SEQ ID NO: 15733 - DNA, 50 bp, Artificial
  Synthetic oligonucleotide
tacgttagtggacatcaatcggacgaacactgagggcaactgggctcaaa

SEQ ID NO: 15734 - DNA, 60 bp, Artificial
  Synthetic oligonucleotide
tgagagaggtcaaaggaatccccggggtgacaagaatggctcgggatggcatgaagttgc

SEQ ID NO: 15735 - DNA, 60 bp, Artificial
  Synthetic oligonucleotide
cgggtcaatgcgggcaggaggtctaggcgcacaagccatgataaccttgtggctacacgg

SEQ ID NO: 15736 - DNA, 60 bp, Artificial
  Synthetic oligonucleotide
tgactcagacacaatgaacaccatagagcggtcactaaaaggaagccaactcaccacagc

SEQ ID NO: 15737 - DNA, 60 bp, Artificial
  Synthetic oligonucleotide
atgacaatcatcggaaaccaacacccgatatgctgcagtatgctaagcgtgcagtcatgt

SEQ ID NO: 15738 - DNA, 55 bp, Artificial
  Synthetic oligonucleotide
ccaacacccgatatgctgcagtatgctaagcgtgcagtcatgtctcttcaagggc

SEQ ID NO: 15739 - DNA, 51 bp, Artificial
  Synthetic oligonucleotide
acctactgggcttgtacagagtcggccgcactcagatgaccgattaccgga

SEQ ID NO: 15740 - DNA, 52 bp, Artificial
  Synthetic oligonucleotide
cacacgtgcgaggaatgccagacagccggatgatattgagtacacatctcta

SEQ ID NO: 15741 - DNA, 53 bp, Artificial
  Synthetic oligonucleotide
tgggctcatcagcggatttgtctcaacagttctacgtcggtgacgataagtac

SEQ ID NO: 15742 - DNA, 60 bp, Artificial
  Synthetic oligonucleotide
tggcagcaactgtagcatccgactggactaatttggcgactgcattaaccaacgggacat

SEQ ID NO: 15743 - DNA, 60 bp, Artificial
  Synthetic oligonucleotide
tcactcaatggaatgggggactaccaccttaagtcagcactcaggtcgtacacagatatg

SEQ ID NO: 15744 - DNA, 53 bp, Artificial
  Synthetic oligonucleotide
cgttgagcatgaatcgtgtgttggcaggttctagactcgggacccgggggata

SEQ ID NO: 15745 - DNA, 55 bp, Artificial
  Synthetic oligonucleotide
gagtgggcacagttgtcactgcttatgaagactgctcagggttggtatcgttcac

SEQ ID NO: 15746 - DNA, 60 bp, Artificial
  Synthetic oligonucleotide
atggacccatcagaaatactagatgacaagtcacactccttcaccagaacgaggctagcg

SEQ ID NO: 15747 - DNA, 52 bp, Artificial
  Synthetic oligonucleotide
gggactccagatcacagccacccctcggagagtagatagaaaaaaacggcac

SEQ ID NO: 15748 - DNA, 60 bp, Artificial
  Synthetic oligonucleotide
gataggaaggtgattgtggatgcactctccgcactcgggggaccccagactgtacaggcg

SEQ ID NO: 15749 - DNA, 60 bp, Artificial
  Synthetic oligonucleotide
tccctaaaagtgggaagtctcggtgcacagtccatgacaactctatggctacatggatca

SEQ ID NO: 15750 - DNA, 55 bp, Artificial
  Synthetic oligonucleotide
gtctcggtgcacagtccatgacaactctatggctacatggatcacatgcagagtc

SEQ ID NO: 15751 - DNA, 60 bp, Artificial
  Synthetic oligonucleotide
gtcctccttggacttcttgcaacagggtagattcaggggtcatgagacttccattaatca

SEQ ID NO: 15752 - DNA, 55 bp, Artificial
  Synthetic oligonucleotide
gcaacagggtagattcaagggtcatgagacttccattaatcatctcaaccgacca

SEQ ID NO: 15753 - DNA, 60 bp, Artificial
  Synthetic oligonucleotide
ggctgaaggattccacatttcactggcaccttcgatgtaacaagtgtgtaaggcccatcg

SEQ ID NO: 15754 - DNA, 60 bp, Artificial
  Synthetic oligonucleotide
ggcattgacgggaggacaagacttgaccagggatcccacagtagcagaacatgcttctct

SEQ ID NO: 15755 - DNA, 60 bp, Artificial
  Synthetic oligonucleotide
tcgggagcctcggtcccttcgattttctgctccactaatcatgattacacattgtggatg

SEQ ID NO: 15756 - DNA, 60 bp, Artificial
  Synthetic oligonucleotide
ccatagcccttccaagaagacatctcggaaggctggttgttctgagtggatatgttcagc

SEQ ID NO: 15757 - DNA, 60 bp, Artificial
  Synthetic oligonucleotide
gaggtctggagaaagattcctcaagatatggtcacagactgtagaggagattatatccta

SEQ ID NO: 15758 - DNA, 55 bp, Artificial
  Synthetic oligonucleotide
cgattcctcaagatatggtcacagactgtagaggagattatatcctatgtcacgg

SEQ ID NO: 15759 - DNA, 60 bp, Artificial
  Synthetic oligonucleotide
agatctccccacccaggaataaacgatgtctacgccatgcatgacgggtccatataccac

SEQ ID NO: 15760 - DNA, 60 bp, Artificial
  Synthetic oligonucleotide
gcagtcacgagaaaacccatgctctgaagagctctgttcggtcttcaatgatcaacctcc

SEQ ID NO: 15761 - DNA, 60 bp, Artificial
  Synthetic oligonucleotide
gaatcggcactcgcgatcccatcaaagcgctcaacgccgtattctactgtatcgaacgtc

SEQ ID NO: 15762 - DNA, 60 bp, Artificial
  Synthetic oligonucleotide
aagttcgccctcaagtacagacgacgcgcagatgaaaacaacaccatctctcacaccgta

SEQ ID NO: 15763 - DNA, 60 bp, Artificial
  Synthetic oligonucleotide
gtcacgtattgcatcgaacgtcactggttctccgctggtctctcactctcctgcgcatct

SEQ ID NO: 15764 - DNA, 60 bp, Artificial
  Synthetic oligonucleotide
agacgaattcacttactctccttccgaacactctatcgactgcaacagatgctatccctc

SEQ ID NO: 15765 - DNA, 56 bp, Artificial
  Synthetic oligonucleotide
catgagaccattccaactccccgcggttatactcctagcgttgttgtctgtggcac

SEQ ID NO: 15766 - DNA, 60 bp, Artificial
  Synthetic oligonucleotide
tctatgcggtccatgcaccgacttctttgtacttccaggcaatgaaaggagtacgcacag

SEQ ID NO: 15767 - DNA, 60 bp, Artificial
  Synthetic oligonucleotide
catggtggatggagcatcgtgttgccttgatacggccacgttctgtccggctaaactacg

SEQ ID NO: 15768 - DNA, 60 bp, Artificial
  Synthetic oligonucleotide
atgcggtaagaaaacaacatgcgacgcggagtgtaagcccccatcagaccacatcatagg

SEQ ID NO: 15769 - DNA, 57 bp, Artificial
  Synthetic oligonucleotide
tacaatgccaaactacctactacccatagtggctcaagcgttctccagatgggcgcg

SEQ ID NO: 15770 - DNA, 60 bp, Artificial
  Synthetic oligonucleotide
tcacgcagtacaaacttgctcgcccatacatagccgattgttctaattgcggccacggta

SEQ ID NO: 15771 - DNA, 60 bp, Artificial
  Synthetic oligonucleotide
tcgtgcctgaccccttatcgcttgactccaaatgcccgcatgcctctgtgcttagccgtc

SEQ ID NO: 15772 - DNA, 60 bp, Artificial
  Synthetic oligonucleotide
cttagacatggtcgaggggtctgtatcgtgtttagatactgctacattctgcccagcgaa

SEQ ID NO: 15773 - DNA, 58 bp, Artificial
  Synthetic oligonucleotide
cccatgtgaccgaccgccaacttgctataatcgtaatcctgacttgaccctaaccatg

SEQ ID NO: 15774 - DNA, 60 bp, Artificial
  Synthetic oligonucleotide
gcgctctgcgaagaaagaacagttcgccgtatgctcatcattcccgttgccgaagtacag

SEQ ID NO: 15775 - DNA, 59 bp, Artificial
  Synthetic oligonucleotide
cctatgcggtactttcaccccaggctgtccttcggagtgagaaactctcctgcatacac

SEQ ID NO: 15776 - DNA, 60 bp, Artificial
  Synthetic oligonucleotide
acggcttacctgtgcggaatccatcgagagctagtgcgcaggctgaatgcggtcctattg

SEQ ID NO: 15777 - DNA, 60 bp, Artificial
  Synthetic oligonucleotide
tgtgacaaaatctgacgactgctcagctgatcacgctctagcttacaaagcccacaccgc

SEQ ID NO: 15778 - DNA, 60 bp, Artificial
  Synthetic oligonucleotide
attgggagcgcgcctgtaaggcacacgcattccaagcataagtaccactgtatctgcccg

SEQ ID NO: 15779 - DNA, 60 bp, Artificial
  Synthetic oligonucleotide
taagtgctgtggagcgcaggaatgccctaaggtatataggcccgatgagcagtgcaaggt

SEQ ID NO: 15780 - DNA, 60 bp, Artificial
  Synthetic oligonucleotide
gtacactgcctgtaacagccatcgtgtcctcgttgcattacgagagcaagatgcgcacta

SEQ ID NO: 15781 - DNA, 59 bp, Artificial
  Synthetic oligonucleotide
tcttgtttgatcacaacgtaccgtctcgagtgagcccgagaacgtacaggcctgcggac

SEQ ID NO: 15782 - DNA, 60 bp, Artificial
  Synthetic oligonucleotide
ccgccagatacccctgactacacgctgatgacacagcaagcgggaaacgttaagatcaca

SEQ ID NO: 15783 - DNA, 56 bp, Artificial
  Synthetic oligonucleotide
atgcggtcactatccgcgaacctaacgtagatgtcaagggaacagcacaattgcaa

SEQ ID NO: 15784 - DNA, 60 bp, Artificial
  Synthetic oligonucleotide
cgaccacacatgtgactgccacaggcagcataacactacattttagcacatcgagcccac

SEQ ID NO: 15785 - DNA, 60 bp, Artificial
  Synthetic oligonucleotide
accgctgcccaaaagcgggccatcgtagctgtgatacccagacctgttttcacgcagatg

SEQ ID NO: 15786 - DNA, 51 bp, Artificial
  Synthetic oligonucleotide
cgggccccgcctgtggacacgcgattgcgccgtggctgagctctcgtggga

SEQ ID NO: 15787 - DNA, 60 bp, Artificial
  Synthetic oligonucleotide
aagattgaccgacgcgcctgtaatctctgagttgacgtgcactgtgtctacatgcacgca

SEQ ID NO: 15788 - DNA, 60 bp, Artificial
  Synthetic oligonucleotide
ggctatgggactgcggacagagccaccgagaacattatctctgcagtcgcccgctcattc

SEQ ID NO: 15789 - DNA, 55 bp, Artificial
  Synthetic oligonucleotide
gcaatggacactacggatgcagatgttactatatactgcctggataagacctggg

SEQ ID NO: 15790 - DNA, 60 bp, Artificial
  Synthetic oligonucleotide
taacgtgcctctgctgctgggcatttaagcgaaacaaacgccacgccatttacaagagac

SEQ ID NO: 15791 - DNA, 55 bp, Artificial
  Synthetic oligonucleotide
cggcagatccccttgccaccgcatacctctgtggcatccatagagagctggtacg

SEQ ID NO: 15792 - DNA, 58 bp, Artificial
  Synthetic oligonucleotide
tccctcactcactcgtagccacacacgagtataggcgagctgcacgggccgaggaatt

SEQ ID NO: 15793 - DNA, 60 bp, Artificial
  Synthetic oligonucleotide
gattgcgtagctttccaaaaacacactcatacttggacccacagatcaacagtgcggtac

SEQ ID NO: 15794 - DNA, 60 bp, Artificial
  Synthetic oligonucleotide
gtctgtggagcactgtacaagagatggccgggagcttttgataagttaccaatcgcgact

SEQ ID NO: 15795 - DNA, 60 bp, Artificial
  Synthetic oligonucleotide
ctgctcttatgaacatgtttccatatccgactcctagtttccaagcgatgtaccccgctc

SEQ ID NO: 15796 - DNA, 60 bp, Artificial
  Synthetic oligonucleotide
cttgcatccagagcaccccacgctattgacaacaagggcgctcggaagtcaagcacaacc

SEQ ID NO: 15797 - DNA, 58 bp, Artificial
  Synthetic oligonucleotide
acgccgagactccatccctatgtatgcacacagacgccacgtgtagttattttggaag

SEQ ID NO: 15798 - DNA, 60 bp, Artificial
  Synthetic oligonucleotide
tcttcggagtggacctggacagcgggttgttctcatctccaatcgttgcccttacatata

SEQ ID NO: 15799 - DNA, 60 bp, Artificial
  Synthetic oligonucleotide
tcccaaaccgcgcagaactaagtatcagcagccaccgggagtcgccagagcaatctcgga

SEQ ID NO: 15800 - DNA, 60 bp, Artificial
  Synthetic oligonucleotide
gtgctgcgggattctagagtgttcggctcaacagcgagccgactatgcctgtagagtttt

SEQ ID NO: 15801 - DNA, 60 bp, Artificial
  Synthetic oligonucleotide
ggcgtgcggacactttactggattgggtttgacaccactcagttcatgttctcggctatg

SEQ ID NO: 15802 - DNA, 60 bp, Artificial
  Synthetic oligonucleotide
atggcggacgtgtgacatcaccgttcgctctttctaggatcctttgctactccacatagt

SEQ ID NO: 15803 - DNA, 55 bp, Artificial
  Synthetic oligonucleotide
ctacaccacatagcgctatacgggccagccttgaataccgacgaggaaagctacg

SEQ ID NO: 15804 - DNA, 60 bp, Artificial
  Synthetic oligonucleotide
tgcaaactccgatcgtccaggcccaacagatgcagcagctaatcagtgcagtttctgccc

SEQ ID NO: 15805 - DNA, 60 bp, Artificial
  Synthetic oligonucleotide
attgcattacccccgaatacgacgcatacctagatatggtggacggcgctacttgctgcc

SEQ ID NO: 15806 - DNA, 60 bp, Artificial
  Synthetic oligonucleotide
catttgggtgtgaaatcaaagtgaaccccatccgagctgagaattgcgctgtaggctcta

SEQ ID NO: 15807 - DNA, 55 bp, Artificial
  Synthetic oligonucleotide
ggctcgtaacataggcctgtgcagctccgacgtcatggagcggtcacgtagaggg

SEQ ID NO: 15808 - DNA, 60 bp, Artificial
  Synthetic oligonucleotide
tccaattccagacttccaagcgctgagcgagagtgcaaccatcgtctacaatgaacggga

SEQ ID NO: 15809 - DNA, 60 bp, Artificial
  Synthetic oligonucleotide
gccctggcccgaacagatacggcttgtgcatgcgtactgccaaagaactggcccgtcgct

SEQ ID NO: 15810 - DNA, 60 bp, Artificial
  Synthetic oligonucleotide
taaccactgagcgactactgtcaggactacgactgtataactctgccacagatcagccag

SEQ ID NO: 15811 - DNA, 60 bp, Artificial
  Synthetic oligonucleotide
cactgagcgattgctatcagggctacgactgtataactctgccacagatcagccagaatg

SEQ ID NO: 15812 - DNA, 60 bp, Artificial
  Synthetic oligonucleotide
ccgaacgctgcctttatcaggacatcagatgcaccactggtctcaacagtcaaatgtgaa

SEQ ID NO: 15813 - DNA, 60 bp, Artificial
  Synthetic oligonucleotide
gaatgtattccgagcacaagtaccattgcgtctgccccatgcgcagtcccgaggatccgg

SEQ ID NO: 15814 - DNA, 60 bp, Artificial
  Synthetic oligonucleotide
tattactctgacactagactccgccgtggcgactaggtacgaggtggataacatcgcacc

SEQ ID NO: 15815 - DNA, 60 bp, Artificial
  Synthetic oligonucleotide
ccatgctaatgctagagcgttttcgcatctagcttccaaattaatcgaaacggaggttga

SEQ ID NO: 15816 - DNA, 60 bp, Artificial
  Synthetic oligonucleotide
cgcctcgcgttctgagagcctcggtatgcagtgtgaccactagcgctggggtagagttcc

SEQ ID NO: 15817 - DNA, 60 bp, Artificial
  Synthetic oligonucleotide
agtgcatgttccattccctttgactaacgtcacctgccgagtgccgttggcacgagcgcc

SEQ ID NO: 15818 - DNA, 55 bp, Artificial
  Synthetic oligonucleotide
ctactctaaccaggtcatcacccaccgttgttttgccgcttctggtgggtactcc

SEQ ID NO: 15819 - DNA, 55 bp, Artificial
  Synthetic oligonucleotide
caagttccatacagaaaccaggaccgtctggcagctctccgtagccggcgtgtcg

SEQ ID NO: 15820 - DNA, 51 bp, Artificial
  Synthetic oligonucleotide
agagacttgagaacccatcatggatcccgtgtacgtggacatagacgccga

SEQ ID NO: 15821 - DNA, 60 bp, Artificial
  Synthetic oligonucleotide
atggctagcgttcggtttttcagagcggatctgcactccatcgtacaggaaacggcagag

SEQ ID NO: 15822 - DNA, 60 bp, Artificial
  Synthetic oligonucleotide
attcagactccctacgcgcgcgccaatctccacgacgctgactaatgcccccgcacgtag

SEQ ID NO: 15823 - DNA, 50 bp, Artificial
  Synthetic oligonucleotide
cgcaagccacgccgacgcctctctcgacggcactggagaccccctcgacc

SEQ ID NO: 15824 - DNA, 60 bp, Artificial
  Synthetic oligonucleotide
gcaataccaccccactgcgtgcgacgtcgaacctgcctttgggcatagcgacgcagcgtg

SEQ ID NO: 15825 - DNA, 60 bp, Artificial
  Synthetic oligonucleotide
tctacgcacaaataccactgcgtatgccctatgcgcagcgcagaagaccccgaaaggctc

SEQ ID NO: 15826 - DNA, 55 bp, Artificial
  Synthetic oligonucleotide
gtctttggggttccgggatcaggcaagtctgctattatcaagagcctcgtgacca

SEQ ID NO: 15827 - DNA, 55 bp, Artificial
  Synthetic oligonucleotide
cccgccccgtgtactcccctaccgtgatcgaaagattctcaagccccgatgtagc

SEQ ID NO: 15828 - DNA, 60 bp, Artificial
  Synthetic oligonucleotide
tcgggcaccgcactatcatgggtgcagaaaatctcgggtggtctgggggccttcgcaatc

SEQ ID NO: 15829 - DNA, 58 bp, Artificial
  Synthetic oligonucleotide
cccgcctgtggacacgcgattgcgccgtagccgaactttcatgggaggtcgcccaaca

SEQ ID NO: 15830 - DNA, 54 bp, Artificial
  Synthetic oligonucleotide
gaagtctactacaagcttgttgacgccgctaaggcgagggacgaatacgtttac

SEQ ID NO: 15831 - DNA, 58 bp, Artificial
  Synthetic oligonucleotide
tgtggcggcttcctgttactcgacacggtaacaggcactgtaagccgagtgtcggacc

SEQ ID NO: 15832 - DNA, 60 bp, Artificial
  Synthetic oligonucleotide
gttacactcgaggtagagatctgttcggcaatagtgaagtgcgccagtgagtgcactcca

SEQ ID NO: 15833 - DNA, 55 bp, Artificial
  Synthetic oligonucleotide
acgtccagcaccctcacaagaccgtcagggtcaagttccacacggagaccaggac

SEQ ID NO: 15834 - DNA, 53 bp, Artificial
  Synthetic oligonucleotide
tacaatcaacccgccggcgacgtcaggggcgtttggggtaaaggcgagcgcac

SEQ ID NO: 15835 - DNA, 56 bp, Artificial
  Synthetic oligonucleotide
ggccttataacttaaccgtcggcagttgggtcagagaccatgtccgctcaattgtt

SEQ ID NO: 15836 - DNA, 60 bp, Artificial
  Synthetic oligonucleotide
actgagggcgaacgagaagtgcggtatatgcgcatctcgcgtcacctgctcaacaagaat

SEQ ID NO: 15837 - DNA, 55 bp, Artificial
  Synthetic oligonucleotide
cgcgtaactgagggcgaacgagaagtgcggtatatgcgcatctcgcgtcacctgc

SEQ ID NO: 15838 - DNA, 55 bp, Artificial
  Synthetic oligonucleotide
gcggtatatgcgcatctcgcgtcacctgctcaacaagaatcacaccgagatgccc

SEQ ID NO: 15839 - DNA, 56 bp, Artificial
  Synthetic oligonucleotide
catcgcaatcaacggaggagcgctaaacaccgacgaagagtactataagactgtaa

SEQ ID NO: 15840 - DNA, 52 bp, Artificial
  Synthetic oligonucleotide
acagtctgcccggttccgttagctcacacgcctacagtcacgaagtggttta

SEQ ID NO: 15841 - DNA, 55 bp, Artificial
  Synthetic oligonucleotide
gagttgcgacgggtacgtcgttaaacggatcgctatcagtccaggcctgtacggg

SEQ ID NO: 15842 - DNA, 54 bp, Artificial
  Synthetic oligonucleotide
tcgaaatataggcctgtgcagctccgacgttatggagcggtcacgcagaggtat

SEQ ID NO: 15843 - DNA, 60 bp, Artificial
  Synthetic oligonucleotide
gcaccggctcgtagaatgttttccgagcaccagtatcactgcgtttgccccatgcgtagt

SEQ ID NO: 15844 - DNA, 60 bp, Artificial
  Synthetic oligonucleotide
ggcggctggggttgctacaacctgagcgactggcaccagggcacccatgtttgccacacc

SEQ ID NO: 15845 - DNA, 60 bp, Artificial
  Synthetic oligonucleotide
aggttccaatggatagattcgtcatggacatgaagcgcgatgtgaaggttacaccaggga

SEQ ID NO: 15846 - DNA, 60 bp, Artificial
  Synthetic oligonucleotide
tgagagcgccacgctagtgtacaacgaaagagagtttgtgaaccgcaagctgtaccatat

SEQ ID NO: 15847 - DNA, 60 bp, Artificial
  Synthetic oligonucleotide
gccataaccactgagcgactgctttcagggctacgactgtataactctgccacagatcag

SEQ ID NO: 15848 - DNA, 60 bp, Artificial
  Synthetic oligonucleotide
tgccattgtgtcgtcgttgcattacgaaggcaaaatgcgcactacgaatgagtacaacat

SEQ ID NO: 15849 - DNA, 55 bp, Artificial
  Synthetic oligonucleotide
gtcatcgttgcattacgaaggcaaaatgcgcactacgaatgagtacaacaagccg

SEQ ID NO: 15850 - DNA, 60 bp, Artificial
  Synthetic oligonucleotide
ttttagccgtactgagcgtcggtgcccacactgtgagcgcgtacgaacacgtaacagtga

SEQ ID NO: 15851 - DNA, 50 bp, Artificial
  Synthetic oligonucleotide
agttgagccataccatggtaaggtcattgtaccagaagggacggcggtcc

SEQ ID NO: 15852 - DNA, 55 bp, Artificial
  Synthetic oligonucleotide
cagctacctgagaggggcctctataactctctacggctaacctgaatggactacg

SEQ ID NO: 15853 - DNA, 57 bp, Artificial
  Synthetic oligonucleotide
tggagaaagttcacgttgatatcgaggaggatagccccttcctcagagctttgcaac

SEQ ID NO: 15854 - DNA, 57 bp, Artificial
  Synthetic oligonucleotide
cagtgtgctcaagcccgcggaggtcaggcccccgcgaggcatgtgcgggagtgacat

SEQ ID NO: 15855 - DNA, 60 bp, Artificial
  Synthetic oligonucleotide
tcacgcaccgacttctttgtacttccaggcaatgaaaggagtacgcacagcgtactggat

SEQ ID NO: 15856 - DNA, 55 bp, Artificial
  Synthetic oligonucleotide
tatagttagttgcgacgggtacgtcgtcaaaaggatagctattagtccgggcctg

SEQ ID NO: 15857 - DNA, 60 bp, Artificial
  Synthetic oligonucleotide
gctagcagtgttaaatcattcagctacctgagaggggcctctataactctctacggctaa

SEQ ID NO: 15858 - DNA, 60 bp, Artificial
  Synthetic oligonucleotide
ctactctagctagcagtgttaaatcattcagctacctgagaggggcccctataactctct

SEQ ID NO: 15859 - DNA, 58 bp, Artificial
  Synthetic oligonucleotide
caggtcactgacaatgaccatgctaatgctagagcgttttcgcatctggctactaaac

SEQ ID NO: 15860 - DNA, 60 bp, Artificial
  Synthetic oligonucleotide
taccctgcaccacttaccagctaacgaccgccgaaacctctgaagagatagacatgcaca

SEQ ID NO: 15861 - DNA, 60 bp, Artificial
  Synthetic oligonucleotide
acagaaagtggcctggcgcctttgacaaccaaccgatcgctgtaggagcagcacgattga

SEQ ID NO: 15862 - DNA, 56 bp, Artificial
  Synthetic oligonucleotide
actaacgtggtattggcactcccgtctcgacccaagcccgatagccgccaggatac

SEQ ID NO: 15863 - DNA, 53 bp, Artificial
  Synthetic oligonucleotide
ctttcggccacagttcccactgtttctcctccccttacaaacagtaacaactc

SEQ ID NO: 15864 - DNA, 56 bp, Artificial
  Synthetic oligonucleotide
acctggcgttaccaggaaaccaacgcagtggcctctaatgccttaacatttatgcc

SEQ ID NO: 15865 - DNA, 59 bp, Artificial
  Synthetic oligonucleotide
gggatactagcaaacagtgccacgtggggttatcgacaaggacagtctgccaacactaa

SEQ ID NO: 15866 - DNA, 54 bp, Artificial
  Synthetic oligonucleotide
ccaatagccttctttcaaactaacaatacggcttacttacaacctggagctact

SEQ ID NO: 15867 - DNA, 55 bp, Artificial
  Synthetic oligonucleotide
gggccttatcctcctggaaccgttatgtctattttagttagtccctctgataata

SEQ ID NO: 15868 - DNA, 56 bp, Artificial
  Synthetic oligonucleotide
gcctgttgtttataataaccccttctcagaatctatgagtgtatttccgaaagaat

SEQ ID NO: 15869 - DNA, 55 bp, Artificial
  Synthetic oligonucleotide
cctataacgtcatttacgactctaacaaccgtcccgtgaccgcttatcgctcctg

SEQ ID NO: 15870 - DNA, 59 bp, Artificial
  Synthetic oligonucleotide
aaaacaaatctatcagtttgagtacgaaagtctgttgcgccgtagtgcgctagcggcca

SEQ ID NO: 15871 - DNA, 59 bp, Artificial
  Synthetic oligonucleotide
tgagcggtggcgccttcagttggggctctctgtggagcggcattaaaagtatcgggtcg

SEQ ID NO: 15872 - DNA, 55 bp, Artificial
  Synthetic oligonucleotide
ttccgcggctaacgagggcgtggctgccccgtcgtttccaagacccctagccagc

SEQ ID NO: 15873 - DNA, 55 bp, Artificial
  Synthetic oligonucleotide
ggctcgttggtccaacacaatcgccccccttttctggagcagaacggaggcaggg

SEQ ID NO: 15874 - DNA, 57 bp, Artificial
  Synthetic oligonucleotide
accgtctgtcgcgttgcatcgtagaccagggaccgacgcacttcctcgtacttgtag

SEQ ID NO: 15875 - DNA, 54 bp, Artificial
  Synthetic oligonucleotide
acttggaagggaatgcgtggaagaatttggagacgcccttgtgcccgcccaggt

SEQ ID NO: 15876 - DNA, 55 bp, Artificial
  Synthetic oligonucleotide
aaggtccgcaggagtccaccgctccgctgaaactcacgccggggttgtggacttc

SEQ ID NO: 15877 - DNA, 52 bp, Artificial
  Synthetic oligonucleotide
cgacgaaaagtccgcggctccggggttgaaactcactccggggctgtggact

SEQ ID NO: 15878 - DNA, 54 bp, Artificial
  Synthetic oligonucleotide
ggctccggggttgaaactcactccggggctgtggacttccgcctacctacgcaa

SEQ ID NO: 15879 - DNA, 56 bp, Artificial
  Synthetic oligonucleotide
taaaactcactccggggctgtggacttccgcctacctgcgcaaatttgtacctgaa

SEQ ID NO: 15880 - DNA, 58 bp, Artificial
  Synthetic oligonucleotide
acgatgggaatcataatccgaaaacgggatcgggcgattgtgtctcatcaaacccaca

SEQ ID NO: 15881 - DNA, 57 bp, Artificial
  Synthetic oligonucleotide
ggacctgattgtctcaagatccacgggatctgaaaacctttcgacgaaagcgtctaa

SEQ ID NO: 15882 - DNA, 58 bp, Artificial
  Synthetic oligonucleotide
taatccgagaacgggatcgggcggttgtgtcttaaacctcgaagcagtcgctgtctgc

SEQ ID NO: 15883 - DNA, 55 bp, Artificial
  Synthetic oligonucleotide
tggggccgtaaatgaccccgattacgggttgcagatggtagtttagggagcggca

SEQ ID NO: 15884 - DNA, 56 bp, Artificial
  Synthetic oligonucleotide
cgtaaatgaccccaattacgggttgcagatggtagtttagggagcgacagctgccg

SEQ ID NO: 15885 - DNA, 58 bp, Artificial
  Synthetic oligonucleotide
ttgacgtcctggatctgtcgcctctgggtgaaagctaccggccccgtgagcttgaacc

SEQ ID NO: 15886 - DNA, 55 bp, Artificial
  Synthetic oligonucleotide
aatgacgggttcctgtgggacgatgtggacagcagcgtgttctccccccgaccgg

SEQ ID NO: 15887 - DNA, 56 bp, Artificial
  Synthetic oligonucleotide
gttagcgtcaggcactactttagagacagtggggggcaaaggaacggaagagcgac

SEQ ID NO: 15888 - DNA, 56 bp, Artificial
  Synthetic oligonucleotide
accgtagaccccatgaacgagcctacctacttgctactcttgttcggtgtgtttga

SEQ ID NO: 15889 - DNA, 58 bp, Artificial
  Synthetic oligonucleotide
gaccgagcaacctaggatgcccagaacagaaggaatgaccccgtaccagttttctgca

SEQ ID NO: 15890 - DNA, 55 bp, Artificial
  Synthetic oligonucleotide
ttacgtgccaccgcggtacctggcgcctacggaggggcgaaacagcattcgttac

SEQ ID NO: 15891 - DNA, 57 bp, Artificial
  Synthetic oligonucleotide
gggggcaacatctcattcacccggcgctacctgctctttcaccgcggggtgaacttc

SEQ ID NO: 15892 - DNA, 58 bp, Artificial
  Synthetic oligonucleotide
tccgctacctttttatgcgccacgcacctctattgtcggtcacacattaactcgcccc

SEQ ID NO: 15893 - DNA, 57 bp, Artificial
  Synthetic oligonucleotide
cctcatttcctctgtaactgcacgtccattttccctgggcctaagctcgaaggctcc

SEQ ID NO: 15894 - DNA, 55 bp, Artificial
  Synthetic oligonucleotide
acaccgagctaagtaagtggctaaacacctctgaccccgaggccttagaaaagca

SEQ ID NO: 15895 - DNA, 55 bp, Artificial
  Synthetic oligonucleotide
gatggcaagttaggtgtaaatgtgggccttgggttagcggtttctaatgggtcat

SEQ ID NO: 15896 - DNA, 58 bp, Artificial
  Synthetic oligonucleotide
ctcctgcggcgcccctgcagcctccctacgtgcctcctcggtacctgcaacctacagg

SEQ ID NO: 15897 - DNA, 53 bp, Artificial
  Synthetic oligonucleotide
cgccgctccttcgtaccagcccgttacccgtttgtagaactcgcctgcccgta

SEQ ID NO: 15898 - DNA, 56 bp, Artificial
  Synthetic oligonucleotide
cctacaagtatttcctccgcactcaaggacccagccaagtggtctcagaaccgggc

SEQ ID NO: 15899 - DNA, 54 bp, Artificial
  Synthetic oligonucleotide
cgcgagaccagcgttctacgcgggaggcgtctttcttcacgtagttggggtttg

SEQ ID NO: 15900 - DNA, 55 bp, Artificial
  Synthetic oligonucleotide
aatacaagtttagcattcgcggtttcgaccctgttacagacaacatcgaccctac

SEQ ID NO: 15901 - DNA, 53 bp, Artificial
  Synthetic oligonucleotide
ccagggttacagaggcgggcccggaggtgtacggggagagcgcgaggtcgtcc

SEQ ID NO: 15902 - DNA, 56 bp, Artificial
  Synthetic oligonucleotide
ccgcgcgaggcataaagttgcgtgtgatgcggaagggtcccggcacctcggaacgg

SEQ ID NO: 15903 - DNA, 58 bp, Artificial
  Synthetic oligonucleotide
cgtaggtggcgccctcttcctcccatgcgtgtgaccccgaagcccctcatcggctgaa

SEQ ID NO: 15904 - DNA, 55 bp, Artificial
  Synthetic oligonucleotide
cctgaggactaccacgcccacgagattaggttctacgaagaccaatcccgcccgc

SEQ ID NO: 15905 - DNA, 56 bp, Artificial
  Synthetic oligonucleotide
aaagtgcgacccatcaaggaagtgggcccgggcctaggcgtgcagacggtggacat

SEQ ID NO: 15906 - DNA, 53 bp, Artificial
  Synthetic oligonucleotide
cgcttaaaaccgcccggcctataattacaaactctaataacgagcttacactc

SEQ ID NO: 15907 - DNA, 57 bp, Artificial
  Synthetic oligonucleotide
acaatatgcggaggtaaatcaggtgccgccccctaatacaaacgctccccatataca

SEQ ID NO: 15908 - DNA, 57 bp, Artificial
  Synthetic oligonucleotide
accgcgaacaaaaggctcacagtacacagttactcaacccacacgccacacagtatt

SEQ ID NO: 15909 - DNA, 57 bp, Artificial
  Synthetic oligonucleotide
tctccggagggagcgtcccgtcgtagcagtacgagagaccgccgttcggcagacgta

SEQ ID NO: 15910 - DNA, 55 bp, Artificial
  Synthetic oligonucleotide
ggaaattgcggacgggtcggaagacgtcgaccgtgtaaatctgttgaccgcagag

SEQ ID NO: 15911 - DNA, 58 bp, Artificial
  Synthetic oligonucleotide
caaagtccattacgccaacgatcagtggactaacgtgcccaaccagtcggataacatg

SEQ ID NO: 15912 - DNA, 57 bp, Artificial
  Synthetic oligonucleotide
gtcgcacttgattgacgccacgagtcgttgccaaaggatcgcccccgttagcgaaaa

SEQ ID NO: 15913 - DNA, 59 bp, Artificial
  Synthetic oligonucleotide
gcgaaccgactatgagtctagcgatgaagacaactaaggtaagtgggcggagttatgtg

SEQ ID NO: 15914 - DNA, 59 bp, Artificial
  Synthetic oligonucleotide
cgctcttgccagaatacgtgctacatccttccattgtgcccacgccggggtatcgcggg

SEQ ID NO: 15915 - DNA, 57 bp, Artificial
  Synthetic oligonucleotide
tttccatcttccggctcccttcgttgtcccttctagcaacgcgctaaccctatctgc

SEQ ID NO: 15916 - DNA, 58 bp, Artificial
  Synthetic oligonucleotide
tgttccaattgggaaaaacggtattcaatggatgatcttctatcttgactttccatcc

SEQ ID NO: 15917 - DNA, 56 bp, Artificial
  Synthetic oligonucleotide
tcggcgaggggagagttttggacatggggagcacttactttgatattaggggaata

SEQ ID NO: 15918 - DNA, 56 bp, Artificial
  Synthetic oligonucleotide
cggtgttgtaattttcgagtcatcacaactgaccttgtcgtccgtgcggggtaaga

SEQ ID NO: 15919 - DNA, 55 bp, Artificial
  Synthetic oligonucleotide
cacttgtattgaggtgggggcgggagcttacattcggggttgtgagtttgtgggc

SEQ ID NO: 15920 - DNA, 54 bp, Artificial
  Synthetic oligonucleotide
tttcgtccgagtggtcagactcccgccactttcccggtggtttccactgagccg

SEQ ID NO: 15921 - DNA, 58 bp, Artificial
  Synthetic oligonucleotide
tgaaagcagtgcccgtgattaagccggctcaaccttttaccccagctgtgcacgaaac

SEQ ID NO: 15922 - DNA, 58 bp, Artificial
  Synthetic oligonucleotide
cacatacacgcttcccacataggccaaaaaaacagaggacaactttgacagctcccgc

SEQ ID NO: 15923 - DNA, 57 bp, Artificial
  Synthetic oligonucleotide
atcgtgcctaggattcatattgtgtaaaacgactataacggtatagccgctacattt

SEQ ID NO: 15924 - DNA, 56 bp, Artificial
  Synthetic oligonucleotide
agatcttggggcgcttttagaggttggagctttaacagagttaaagcatcggagac

SEQ ID NO: 15925 - DNA, 57 bp, Artificial
  Synthetic oligonucleotide
cgtctaggtgggcgagagttttgtctttccagggtcgcaaggtgcgcttgagagttg

SEQ ID NO: 15926 - DNA, 55 bp, Artificial
  Synthetic oligonucleotide
tactttgcccccggtttctacgcattgtttcagtaacggcttgttgattgtctcg

SEQ ID NO: 15927 - DNA, 58 bp, Artificial
  Synthetic oligonucleotide
atcccccacaaccagtatatgccgacaagacatatcaacccgaacctcaagtaggcga

SEQ ID NO: 15928 - DNA, 58 bp, Artificial
  Synthetic oligonucleotide
tcggtaccttcgagctgcaaggtccggagaagtccaccgctccgctgaaactcacgcc

SEQ ID NO: 15929 - DNA, 57 bp, Artificial
  Synthetic oligonucleotide
cgcttacattgggtttcacactcaaccagccaggttagttgtggagagtttggatta

SEQ ID NO: 15930 - DNA, 54 bp, Artificial
  Synthetic oligonucleotide
caaagcataccttatggaagacccgttctccaccctggcaccacgacgggggac

SEQ ID NO: 15931 - DNA, 57 bp, Artificial
  Synthetic oligonucleotide
agaggcagtgtacctgcgctccccgttttcagccggcaacgcaaccacctaatcgta

SEQ ID NO: 15932 - DNA, 59 bp, Artificial
  Synthetic oligonucleotide
gaagaacccacctccagaactcccacagcctacgccctagctcaagaactgcaattagc

SEQ ID NO: 15933 - DNA, 54 bp, Artificial
  Synthetic oligonucleotide
caaattgttccacctccctcaccatttgctccgttattcttacttcccccacaa

SEQ ID NO: 15934 - DNA, 59 bp, Artificial
  Synthetic oligonucleotide
ttggacttatcatgtgcacctttgcttggatctttaagttggcaatgtttcccccctga

SEQ ID NO: 15935 - DNA, 58 bp, Artificial
  Synthetic oligonucleotide
ccccgacactccaggcgacaacatcacaccactactacaagactccaaggcgaggtcc

SEQ ID NO: 15936 - DNA, 56 bp, Artificial
  Synthetic oligonucleotide
cgacccaccactttggaactaaagccctccgatcagccgcctccatactccccgca

SEQ ID NO: 15937 - DNA, 57 bp, Artificial
  Synthetic oligonucleotide
tagtgccggccccgagcttagaggaaaagtcgtacaactcaatgaggcaagaaacgc

SEQ ID NO: 15938 - DNA, 59 bp, Artificial
  Synthetic oligonucleotide
gtggggctttacacgcgtggcccgttctggagcaactcaactttacggatcacatgaga

SEQ ID NO: 15939 - DNA, 57 bp, Artificial
  Synthetic oligonucleotide
catgttcttacacgcctttgtcaactggccccacacaccaatggaccgcaaccctac

SEQ ID NO: 15940 - DNA, 57 bp, Artificial
  Synthetic oligonucleotide
taatgaccaggaggtatttgcagccgtagtccagtaggaactaaggccttatcccgc

SEQ ID NO: 15941 - DNA, 58 bp, Artificial
  Synthetic oligonucleotide
tgtcgtcgggtcaaatatttctggtggcgttgtcgactccccggagacgcttctggca

SEQ ID NO: 15942 - DNA, 56 bp, Artificial
  Synthetic oligonucleotide
tcccatgtccccgggcacaccgccaagtcccatgtccccgggcacaccgccaagtc

SEQ ID NO: 15943 - DNA, 54 bp, Artificial
  Synthetic oligonucleotide
cctacggccgatcccctggctaccgcgtatcgaagttggtacgtggcttataac

SEQ ID NO: 15944 - DNA, 56 bp, Artificial
  Synthetic oligonucleotide
ggccagaaatgaagggagcggaccgtcacttctatatagtacctgtgggcggggaa

SEQ ID NO: 15945 - DNA, 55 bp, Artificial
  Synthetic oligonucleotide
tagcggagttatttgcggagtcgggggtatttcattaagctcggtagccagggag

SEQ ID NO: 15946 - DNA, 58 bp, Artificial
  Synthetic oligonucleotide
accctagaacctgactgttgggatacgcgttcctggtggctgttcaacttcgcagtgc

SEQ ID NO: 15947 - DNA, 56 bp, Artificial
  Synthetic oligonucleotide
tctgattaatttcgcgttagtcataccgcgtaatatttgtcgagggccgagggact

SEQ ID NO: 15948 - DNA, 53 bp, Artificial
  Synthetic oligonucleotide
agttaggggttgccaatttgtggggaccgtgtgtgctgtccgctcccgagggt

SEQ ID NO: 15949 - DNA, 52 bp, Artificial
  Synthetic oligonucleotide
agcgtgagcccccaagcttccgtcaactggtctaacccagaaaccgggggtc

SEQ ID NO: 15950 - DNA, 58 bp, Artificial
  Synthetic oligonucleotide
aacataggtaggacacgggcgaatatcctgagaacgaataacagcgaaaatgagtcgc

SEQ ID NO: 15951 - DNA, 59 bp, Artificial
  Synthetic oligonucleotide
tggtcgggtcgttccaaggccggatcactctcgccagttgcttctctaccactgtgaac

SEQ ID NO: 15952 - DNA, 56 bp, Artificial
  Synthetic oligonucleotide
gatacatgggacccactatcagagaggggcagccgtaccccgccaactacccctac

SEQ ID NO: 15953 - DNA, 56 bp, Artificial
  Synthetic oligonucleotide
cgtctcgcttgtacatagccacgaaaacccgaataaagatcgcaacgaccgaacgc

SEQ ID NO: 15954 - DNA, 55 bp, Artificial
  Synthetic oligonucleotide
ttcgtccccaacgcgcaaatgagcgacggcaattcctacctagggcttccggacg

SEQ ID NO: 15955 - DNA, 51 bp, Artificial
  Synthetic oligonucleotide
aaattcggacctcgcccgatcgtaaacagggcccctcgccctctaaacaaa

SEQ ID NO: 15956 - DNA, 55 bp, Artificial
  Synthetic oligonucleotide
gcgtggctgccccgtcgtttccaagaccccttagccagccgacttctccagttac

SEQ ID NO: 15957 - DNA, 58 bp, Artificial
  Synthetic oligonucleotide
agtatgatgaggcgaaccgtgctaggaggagcggtggtgtatccggagggtcctcctc

SEQ ID NO: 15958 - DNA, 55 bp, Artificial
  Synthetic oligonucleotide
acgcaacaaatcgggcaagttggtggtctaggactttctttgggggcagactcgc

SEQ ID NO: 15959 - DNA, 54 bp, Artificial
  Synthetic oligonucleotide
acttccgcgccgcaagaacacctgcgtctaccccaaagaacccgacgaccacga

SEQ ID NO: 15960 - DNA, 51 bp, Artificial
  Synthetic oligonucleotide
gaacgtacactatcgcgaacgagtaaacccacggtggaccccccgaacctc

SEQ ID NO: 15961 - DNA, 59 bp, Artificial
  Synthetic oligonucleotide
tgcacgttggccgtgggactctcacttagcggtgtctacctcttaaggtcaccaagcac

SEQ ID NO: 15962 - DNA, 57 bp, Artificial
  Synthetic oligonucleotide
aacctaactttataagacgctgctacatcatagggtacttaccacttatattctgcg

SEQ ID NO: 15963 - DNA, 56 bp, Artificial
  Synthetic oligonucleotide
aaactaggccgtgggagtttcacttgtcggtgtctacctctataagtcactaagca

SEQ ID NO: 15964 - DNA, 57 bp, Artificial
  Synthetic oligonucleotide
actttactaaacagactccgaggtgccattggacactgagggggcgtacagcaacga

SEQ ID NO: 15965 - DNA, 58 bp, Artificial
  Synthetic oligonucleotide
cgttccagtgacgtcacagccgccattttaagtagctgacgtcaaggattgacgtaaa

SEQ ID NO: 15966 - DNA, 53 bp, Artificial
  Synthetic oligonucleotide
gtggggacccgctgtaacccggaagtaggccccgtcacgtgatttgtcacgtg

SEQ ID NO: 15967 - DNA, 55 bp, Artificial
  Synthetic oligonucleotide
cgggggctatttggaaaggacgctattaagcgagtgtcagaaaaaccgacagatc

SEQ ID NO: 15968 - DNA, 54 bp, Artificial
  Synthetic oligonucleotide
acggacactggttccgtacctgtctccctatgagaaggctaaacggactcattt

SEQ ID NO: 15969 - DNA, 57 bp, Artificial
  Synthetic oligonucleotide
tacataagacgtgggcgacgcaaaaagaaactcgtactgactcagtggaacccggca

SEQ ID NO: 15970 - DNA, 57 bp, Artificial
  Synthetic oligonucleotide
tatgtggagaccccccgtgcgaaatgacttcactattcaacgtaactggttctacag

SEQ ID NO: 15971 - DNA, 56 bp, Artificial
  Synthetic oligonucleotide
ctatcctgtccggatgggaggagcagttacacaccccaaatacgccggtcaaggag

SEQ ID NO: 15972 - DNA, 57 bp, Artificial
  Synthetic oligonucleotide
ggcgactttgttggccatcttaatcatctggcaactactttgggtcgccctccacgt

SEQ ID NO: 15973 - DNA, 59 bp, Artificial
  Synthetic oligonucleotide
ggctctacgtacacttcctggggtgtgtcttcgaagagtatataagcagaggcggtgac

SEQ ID NO: 15974 - DNA, 57 bp, Artificial
  Synthetic oligonucleotide
gggagtccactggaaccccgagctcacatagagcccccaccttacataccagaccta

SEQ ID NO: 15975 - DNA, 51 bp, Artificial
  Synthetic oligonucleotide
gcgattcggacctgcggcctcggggggggtcgggggctttactaaacagac

SEQ ID NO: 15976 - DNA, 55 bp, Artificial
  Synthetic oligonucleotide
acgtttgagacacgtgatgggggcgtgcctaaacccggaagcatccctggtcacg

SEQ ID NO: 15977 - DNA, 54 bp, Artificial
  Synthetic oligonucleotide
aaactgtctagcgactgggcgggtgccggaggatccctggtccggagtcaaggg

SEQ ID NO: 15978 - DNA, 53 bp, Artificial
  Synthetic oligonucleotide
ttatttactaaacagactccgagtcgccatttggtcccccctaagctccgccc

SEQ ID NO: 15979 - DNA, 56 bp, Artificial
  Synthetic oligonucleotide
tactgtaaactttgacttaaacgcgccgcaataaactcaaggcctgcaaaatttca

SEQ ID NO: 15980 - DNA, 55 bp, Artificial
  Synthetic oligonucleotide
ataaactcaaggcctgcaaaatttcactctcggtgtccatttatataagtttaaa

SEQ ID NO: 15981 - DNA, 57 bp, Artificial
  Synthetic oligonucleotide
ggctcgaccctcgcacaacactgcaggtagggggcgcaattgggatcgttagaaaac

SEQ ID NO: 15982 - DNA, 58 bp, Artificial
  Synthetic oligonucleotide
caccccaccgtagactttatagtcaggataaacacacagcctccatttctagacacta

SEQ ID NO: 15983 - DNA, 58 bp, Artificial
  Synthetic oligonucleotide
accaaactaccccacaattatgtccacagacctgtatgagtaccactcgggcatatac

SEQ ID NO: 15984 - DNA, 58 bp, Artificial
  Synthetic oligonucleotide
gcctcctgtgtccaatctattattcctacaccacttcaaaatggcggcgggtcacaaa

SEQ ID NO: 15985 - DNA, 53 bp, Artificial
  Synthetic oligonucleotide
cattggatagtgtcaggggtcgccataacgcggaccccgttttcaccccttcc

SEQ ID NO: 15986 - DNA, 59 bp, Artificial
  Synthetic oligonucleotide
ttcaggtcaaaggtcgtgcatacgtcataagtcacatgacaggggtccacttaaacacg

SEQ ID NO: 15987 - DNA, 58 bp, Artificial
  Synthetic oligonucleotide
gtcatacaatggcaccctcctagccggagaacgtgcactataactgggttctggccgt

SEQ ID NO: 15988 - DNA, 59 bp, Artificial
  Synthetic oligonucleotide
ctaggcggcttctgattatgtggcagccccccgtgcacaaagtacccgggatcgagaga

SEQ ID NO: 15989 - DNA, 56 bp, Artificial
  Synthetic oligonucleotide
ggggtgtacagcaacgaaagtgagtggggccagacttcgccataaggcctttatct

SEQ ID NO: 15990 - DNA, 55 bp, Artificial
  Synthetic oligonucleotide
tacaagtggcggacccggaatcaatgggaccccgctgggtgttccactcctttga

SEQ ID NO: 15991 - DNA, 53 bp, Artificial
  Synthetic oligonucleotide
cggacccggaacaaatgggaccccgctgggtgttccactcctttgactggcga

SEQ ID NO: 15992 - DNA, 53 bp, Artificial
  Synthetic oligonucleotide
ttctggccgttgaactacggacactggttccgtacctgtctcccctttaggcg

SEQ ID NO: 15993 - DNA, 55 bp, Artificial
  Synthetic oligonucleotide
gcccccccactctgttagaggacaagtggtacacccagcaagacctggcgcccgt

SEQ ID NO: 15994 - DNA, 57 bp, Artificial
  Synthetic oligonucleotide
ccagagaggactcaacaggtggtctttccctaacgaccaactggacctagctcgcta

SEQ ID NO: 15995 - DNA, 54 bp, Artificial
  Synthetic oligonucleotide
aggacccaccagaagcaacaaactatttgcaaccgcctaccaggacgttactta

SEQ ID NO: 15996 - DNA, 53 bp, Artificial
  Synthetic oligonucleotide
aaacaaagcctttatgtttgagccccagggtcccaaacccatacagggctaca

SEQ ID NO: 15997 - DNA, 53 bp, Artificial
  Synthetic oligonucleotide
gaccccatttttaggccttccggactacaaaaatcgccattttagtgacgtca

SEQ ID NO: 15998 - DNA, 57 bp, Artificial
  Synthetic oligonucleotide
tttcgctttcagtggggaggacacggcacagaaaccttcaaaacaagcatcggagac

SEQ ID NO: 15999 - DNA, 58 bp, Artificial
  Synthetic oligonucleotide
cgtgacacccacaggccaaccgaatgctatgtcatccatttcctgggccgggtctacg

SEQ ID NO: 16000 - DNA, 56 bp, Artificial
  Synthetic oligonucleotide
taagctgggttaccgcactaactccctgccaagtgaaactcggggacgagtgagta

SEQ ID NO: 16001 - DNA, 55 bp, Artificial
  Synthetic oligonucleotide
tgggcgggagcccgaggtgagtgaaaccaccgaggtctaggggcaactcgggcta

SEQ ID NO: 16002 - DNA, 56 bp, Artificial
  Synthetic oligonucleotide
ctggccgttgagctacggacactggttccgtacctgtctccccttccgacgaatga

SEQ ID NO: 16003 - DNA, 55 bp, Artificial
  Synthetic oligonucleotide
ataccctttcagtttagagcaaagtggtaccccacagtactacaccagcaacagg

SEQ ID NO: 16004 - DNA, 50 bp, Artificial
  Synthetic oligonucleotide
tacgcaggcgcagtagggggctccgccccctaaaacccccgagggggggc

SEQ ID NO: 16005 - DNA, 59 bp, Artificial
  Synthetic oligonucleotide
cagaattaaggccttcccaatacactgtatataagtaagtgcagttccgaatggctgag

SEQ ID NO: 16006 - DNA, 54 bp, Artificial
  Synthetic oligonucleotide
agtgaaaccaccgaggtctaggggcaattcgggctagggcagtctagcggaacg

SEQ ID NO: 16007 - DNA, 53 bp, Artificial
  Synthetic oligonucleotide
acgaaagtgagtggggccagacttcgccataaggcctttaacttccgggtgcg

SEQ ID NO: 16008 - DNA, 53 bp, Artificial
  Synthetic oligonucleotide
aactgttcgaggccccgggtgtttcacttagcggtgtctacctctaaaggtca

SEQ ID NO: 16009 - DNA, 55 bp, Artificial
  Synthetic oligonucleotide
gtcaggaagtattacacaccccaaattcgccggaaaaggaggaatgctcacggaa

SEQ ID NO: 16010 - DNA, 53 bp, Artificial
  Synthetic oligonucleotide
cacaccccaaattcgccggaaaaggaggaatgctcacggaaacagaccgttgg

SEQ ID NO: 16011 - DNA, 51 bp, Artificial
  Synthetic oligonucleotide
gaccgaaccaagctcgatgacccccccgtcggaggaaccggacccaaccaa

SEQ ID NO: 16012 - DNA, 59 bp, Artificial
  Synthetic oligonucleotide
gaagacgaggcttatgaacgaattactagagataatccatgccctaagcggcccagacc

SEQ ID NO: 16013 - DNA, 57 bp, Artificial
  Synthetic oligonucleotide
tttacacaccgaagtcaaggggcaattcgggcacgggactggctgggctatgggcaa

SEQ ID NO: 16014 - DNA, 49 bp, Artificial
  Synthetic oligonucleotide
ccgtacctgtctcccctttaggcggttaaacggactagtgttcccggga

SEQ ID NO: 16015 - DNA, 57 bp, Artificial
  Synthetic oligonucleotide
ctctgagggggcgtacagcaacgaaagtgagtggggccagacttcgccataaggcct

SEQ ID NO: 16016 - DNA, 57 bp, Artificial
  Synthetic oligonucleotide
cgtagagtggtaattagagggtggtggccaatactgcagtgcctaaaaggtcaggaa

SEQ ID NO: 16017 - DNA, 58 bp, Artificial
  Synthetic oligonucleotide
gtaacactggaggggctgtatcaggagcacctactatggagaaactcgtggtcaaaag

SEQ ID NO: 16018 - DNA, 55 bp, Artificial
  Synthetic oligonucleotide
aggggtccacttaaacacggaagtaggccccgacatgtgactcgtcacgtgtgta

SEQ ID NO: 16019 - DNA, 57 bp, Artificial
  Synthetic oligonucleotide
ttaaacacggaagtaggccccgacatgtgactcgtcacgtgtgtacacgtcacggcc

SEQ ID NO: 16020 - DNA, 56 bp, Artificial
  Synthetic oligonucleotide
cctcgcagaacacaagtcattgacccgaaattcctcggtccccactattccttcca

SEQ ID NO: 16021 - DNA, 57 bp, Artificial
  Synthetic oligonucleotide
tgtcaaggggcaattcgggctcgtacaagtcgttgaccgggctatgggcaaggctct

SEQ ID NO: 16022 - DNA, 57 bp, Artificial
  Synthetic oligonucleotide
acagagactatgttactaaggctctccacgaccccggactcagtaaagaggtcagag

SEQ ID NO: 16023 - DNA, 54 bp, Artificial
  Synthetic oligonucleotide
caccgaccccatgttattcaaaccccaggatccaaagttcggattcgtaccata

SEQ ID NO: 16024 - DNA, 52 bp, Artificial
  Synthetic oligonucleotide
cctcggggggggcgggaactttactaaacagactccgaggtgccattggaca

SEQ ID NO: 16025 - DNA, 53 bp, Artificial
  Synthetic oligonucleotide
gtgtgaagaacgaaccactagaattccaactactacccccaacaccgactaac

SEQ ID NO: 16026 - DNA, 57 bp, Artificial
  Synthetic oligonucleotide
aggtggagactttaaaactatataaccatgtgatgtgacgaatggctgagtttaccc

SEQ ID NO: 16027 - DNA, 59 bp, Artificial
  Synthetic oligonucleotide
cactttagtgactgcagactgatcttgggcgggagccgaaggtgagtgaaaccaccgta

SEQ ID NO: 16028 - DNA, 51 bp, Artificial
  Synthetic oligonucleotide
gacatttcttagaagacccccccatttatccctgggtacccccaacaccca

SEQ ID NO: 16029 - DNA, 57 bp, Artificial
  Synthetic oligonucleotide
tgggaaactctctggtaccctatggtctttaaccaggagccagccttagaggccatc

SEQ ID NO: 16030 - DNA, 56 bp, Artificial
  Synthetic oligonucleotide
tagcaacgtgggttacgatttagcaagatacatggggacacacctctacttccccc

SEQ ID NO: 16031 - DNA, 59 bp, Artificial
  Synthetic oligonucleotide
gtggagtcctcccactgacgatgaacgtgtccgcgagcgaaaatggtttctcgcaactg

SEQ ID NO: 16032 - DNA, 51 bp, Artificial
  Synthetic oligonucleotide
gcggcgcggctaggacacaaaatggcggcgtagcgggggggggaccccccc

SEQ ID NO: 16033 - DNA, 57 bp, Artificial
  Synthetic oligonucleotide
aaaggtcatgcctacgtcataagtcacgtggggacggctgctgtaaacacggaagta

SEQ ID NO: 16034 - DNA, 55 bp, Artificial
  Synthetic oligonucleotide
gggctgtccttaaaaacctatataaccaactacagtgacgaatggctgagtttac

SEQ ID NO: 16035 - DNA, 56 bp, Artificial
  Synthetic oligonucleotide
aagcactccgagcgacagcgaggagtgcgaccctccccccggtagcaacttcttcg

SEQ ID NO: 16036 - DNA, 52 bp, Artificial
  Synthetic oligonucleotide
ctgtcgcctggctactctctctaaccgtccggagaacccgggaccctccggg

SEQ ID NO: 16037 - DNA, 59 bp, Artificial
  Synthetic oligonucleotide
caatggattaacacaatttggaacacccacgacttaatgtgcggatgcaacaacgccat

SEQ ID NO: 16038 - DNA, 59 bp, Artificial
  Synthetic oligonucleotide
gaacaggcccatttgaagttacactagaatcatacttaagcacacaacctagtagacac

SEQ ID NO: 16039 - DNA, 53 bp, Artificial
  Synthetic oligonucleotide
cttgggcgggagccgaaggtgagtgaaaccaccgaagtctaggggcaattcgg

SEQ ID NO: 16040 - DNA, 53 bp, Artificial
  Synthetic oligonucleotide
aggccttccggactacaaaaatggcggatttcgtgacgtcacggccgccattt

SEQ ID NO: 16041 - DNA, 51 bp, Artificial
  Synthetic oligonucleotide
taaaatcggaaccactggagtttcaactaggaccccctgaacctgttaacc

SEQ ID NO: 16042 - DNA, 56 bp, Artificial
  Synthetic oligonucleotide
gctaggcctccaataaaacaaggccgtgggcgtttcacttgtcggtgtctgcttat

SEQ ID NO: 16043 - DNA, 55 bp, Artificial
  Synthetic oligonucleotide
gcttccaataaaacaaggccgtgggagtttcacttgtcggtgtctgcttattaag

SEQ ID NO: 16044 - DNA, 52 bp, Artificial
  Synthetic oligonucleotide
cctacaggtacaaagctaggacagttacctttaaactatgggaggtacaacc

SEQ ID NO: 16045 - DNA, 57 bp, Artificial
  Synthetic oligonucleotide
ttagttgggttctcgcactcccgcctgccaagtgaaactcggggaggagtgagtgcg

SEQ ID NO: 16046 - DNA, 57 bp, Artificial
  Synthetic oligonucleotide
cacaaaatggccgccaatttcttccgggtcaaaggtcacgcctacgtcatagatgac

SEQ ID NO: 16047 - DNA, 56 bp, Artificial
  Synthetic oligonucleotide
cggtggcggtaacgtccctcgcagaatacaagtcatcaatccgaaattcctcgggc

SEQ ID NO: 16048 - DNA, 57 bp, Artificial
  Synthetic oligonucleotide
accgaatgctatgtcatccatttcctgggccgggtttacgtcctcatataagtaagc

SEQ ID NO: 16049 - DNA, 53 bp, Artificial
  Synthetic oligonucleotide
cccggctgcccgtgggcgggagcccgaggtgagtgaaaccaccgaggtctagg

SEQ ID NO: 16050 - DNA, 58 bp, Artificial
  Synthetic oligonucleotide
ctttattaaacagactccgagttgccattggacactgtagctgtaaatcagtaacgaa

SEQ ID NO: 16051 - DNA, 59 bp, Artificial
  Synthetic oligonucleotide
catgggctgctggcttaatagaactgcaacgaccctttgactttaatggcggcttccga

SEQ ID NO: 16052 - DNA, 57 bp, Artificial
  Synthetic oligonucleotide
ttcagtggggcggacacgggaccgaacaattcaaaaccagcatcggagaccctagca

SEQ ID NO: 16053 - DNA, 55 bp, Artificial
  Synthetic oligonucleotide
ccgaaggtgagtgaaaccaccgtagtctaggggcaattcgggctagttcagtctg

SEQ ID NO: 16054 - DNA, 55 bp, Artificial
  Synthetic oligonucleotide
gtccctctttggctaggcttctggggatactataactacttaaaacagacaagaa

SEQ ID NO: 16055 - DNA, 53 bp, Artificial
  Synthetic oligonucleotide
aaaagactactaccagtcctccgcgacccacaaaagaggtggagactcttaaa

SEQ ID NO: 16056 - DNA, 56 bp, Artificial
  Synthetic oligonucleotide
acggtggccgtgggagcttcacttgtcggtgtctacctcttaaggtcactaagcac

SEQ ID NO: 16057 - DNA, 55 bp, Artificial
  Synthetic oligonucleotide
aggccttccggactacaaaaaccgccatattagtgacgtcacagccgccatttta

SEQ ID NO: 16058 - DNA, 52 bp, Artificial
  Synthetic oligonucleotide
accccccctcgacccgaatcgctcgcgcgattcggacctgcggcctcggggg

SEQ ID NO: 16059 - DNA, 56 bp, Artificial
  Synthetic oligonucleotide
aggtgagtgaaaccaccgaagtctaggggcaattcgggctgagttagtctagcgga

SEQ ID NO: 16060 - DNA, 55 bp, Artificial
  Synthetic oligonucleotide
agacaatatagacgaaggagacctcgaccgtttattcgaagaagattttggagac

SEQ ID NO: 16061 - DNA, 51 bp, Artificial
  Synthetic oligonucleotide
gttcctttaagtctcaacttatttaaacagtctccgcctccctaaattagg

SEQ ID NO: 16062 - DNA, 53 bp, Artificial
  Synthetic oligonucleotide
cacacgtcataagtcacgtggtggggacccgctgtaacccggaagtaggcccc

SEQ ID NO: 16063 - DNA, 59 bp, Artificial
  Synthetic oligonucleotide
caataaccgtcttagacacgcaatactactttatgcaacctaactggggaaatgcagca

SEQ ID NO: 16064 - DNA, 50 bp, Artificial
  Synthetic oligonucleotide
tatttactaaacatacaccgaggggggaggcccggtgcccgggcccctcc

SEQ ID NO: 16065 - DNA, 50 bp, Artificial
  Synthetic oligonucleotide
gggaggcccggtgcccgggcccctcccctgtgacgtcatttccttaaacg

SEQ ID NO: 16066 - DNA, 55 bp, Artificial
  Synthetic oligonucleotide
tcgaggccccgggagtttcacttagcggtgtctacctctaaaggtcactaagcac

SEQ ID NO: 16067 - DNA, 59 bp, Artificial
  Synthetic oligonucleotide
tactaaacagactccgagttgccattggacactgagggggcgtacagcacgaaagtgag

SEQ ID NO: 16068 - DNA, 54 bp, Artificial
  Synthetic oligonucleotide
gtacaagtcgttgacccgaagcacgttaccccggaagtcacctggcactcgtgg

SEQ ID NO: 16069 - DNA, 58 bp, Artificial
  Synthetic oligonucleotide
ttttaactggggactcagaggactttgtgtattaagagataacatgaaactaggagca

SEQ ID NO: 16070 - DNA, 51 bp, Artificial
  Synthetic oligonucleotide
gcggagtcaaggggcctatcgggcgggcggtaacctgcggaaccgggcccc

SEQ ID NO: 16071 - DNA, 56 bp, Artificial
  Synthetic oligonucleotide
gggagggcggcgtgtaacccggaagtcatcctcgtcacgtgacctgacgtcacggc

SEQ ID NO: 16072 - DNA, 56 bp, Artificial
  Synthetic oligonucleotide
actgccggctgatcttgggcgggagccgaaggtgagtgaaaccaccgaagtctagg

SEQ ID NO: 16073 - DNA, 59 bp, Artificial
  Synthetic oligonucleotide
cgctattcctgggaggagacacactactataaaactaagtacactgacgaatggctgag

SEQ ID NO: 16074 - DNA, 56 bp, Artificial
  Synthetic oligonucleotide
aaactactaatagtaatgtggaccccacctcgcaatgatcaacagtaccttaactg

SEQ ID NO: 16075 - DNA, 54 bp, Artificial
  Synthetic oligonucleotide
acccactgtacaccggagccggtggtctcaccgcagaggtcggtccttccggtc

SEQ ID NO: 16076 - DNA, 57 bp, Artificial
  Synthetic oligonucleotide
cctaagattcaaggccgtgggtgtttcacttcatcggtgtgtacctctataagtcac

SEQ ID NO: 16077 - DNA, 53 bp, Artificial
  Synthetic oligonucleotide
cggcctcctgtgtccaatctatttttcctacacccctacaaaatggcgggcgg

SEQ ID NO: 16078 - DNA, 58 bp, Artificial
  Synthetic oligonucleotide
acttcctgggctgggtcttcgaatctatataaccaagtgcacttccgaatggctgagt

SEQ ID NO: 16079 - DNA, 54 bp, Artificial
  Synthetic oligonucleotide
ggcttcggggggtccttttccctgaccacatttaacctcagagcgctgtacgac

SEQ ID NO: 16080 - DNA, 51 bp, Artificial
  Synthetic oligonucleotide
tgacgtggggggggacctacttaaacacggaagtaggccccgacacgtcac

SEQ ID NO: 16081 - DNA, 54 bp, Artificial
  Synthetic oligonucleotide
gtaccaagtccaacaaacgcacagaaacagctttatacaccccctattgttacc

SEQ ID NO: 16082 - DNA, 56 bp, Artificial
  Synthetic oligonucleotide
ggctaacaccaggcagaatatcccctgaaaccccaggactttacacagacgtgact

SEQ ID NO: 16083 - DNA, 50 bp, Artificial
  Synthetic oligonucleotide
aacaacccaacagggggtccacaaaaacccattgttagagtaggccccga

SEQ ID NO: 16084 - DNA, 55 bp, Artificial
  Synthetic oligonucleotide
cctacggagggggacacgccacttttagattctccctacaagtactgtgcgagga

SEQ ID NO: 16085 - DNA, 58 bp, Artificial
  Synthetic oligonucleotide
aagtgcctcttcgagcagttagtcagaacccaacagggagtccacgtagatccctgcc

SEQ ID NO: 16086 - DNA, 57 bp, Artificial
  Synthetic oligonucleotide
cttgcaaggccgtgggagtttcacttgtcggtgtctacctctaaaggtcactaagca

SEQ ID NO: 16087 - DNA, 53 bp, Artificial
  Synthetic oligonucleotide
actagattcggaccattttgtgtaaaaaacccaccgtgcgaattccgtaatga

SEQ ID NO: 16088 - DNA, 55 bp, Artificial
  Synthetic oligonucleotide
cagaattaaggcgttcccacgaaagcgaatataagtaggtgaggttccgaatggc

SEQ ID NO: 16089 - DNA, 57 bp, Artificial
  Synthetic oligonucleotide
tagaaagagacgctatgggtggagaagacgttactaccgctacagaccgcgttacta

SEQ ID NO: 16090 - DNA, 58 bp, Artificial
  Synthetic oligonucleotide
taatgcggagggtggtgattagaggttggtggccaatattacagtgtctaaaaggaca

SEQ ID NO: 16091 - DNA, 55 bp, Artificial
  Synthetic oligonucleotide
acgggaatccaagatccctgcacttctaacccgacctatcctgtccgaatggtcg

SEQ ID NO: 16092 - DNA, 59 bp, Artificial
  Synthetic oligonucleotide
atgtgactcaggcggactggtgccttccgactccagtagattcaagcgggacgtacaag

SEQ ID NO: 16093 - DNA, 55 bp, Artificial
  Synthetic oligonucleotide
tccgggttaaaggtcacctatacgtcatcagtcacgtgggggaaggcgtgcctaa

SEQ ID NO: 16094 - DNA, 59 bp, Artificial
  Synthetic oligonucleotide
caaaaagatagtcctcactcagtggaacccccagaccgtacgcagatgctacataagag

SEQ ID NO: 16095 - DNA, 53 bp, Artificial
  Synthetic oligonucleotide
agtaacctgcggtcccttcgcctaccgagacgatgagaaaaactcccaactgg

SEQ ID NO: 16096 - DNA, 51 bp, Artificial
  Synthetic oligonucleotide
agtgtcctttcaactaaaagccccccaataaaatgtcaaggccgtgggagt

SEQ ID NO: 16097 - DNA, 57 bp, Artificial
  Synthetic oligonucleotide
aactcctctgacactcgttgacctgtgtttttggagtgcaatctttttcaccacaag

SEQ ID NO: 16098 - DNA, 58 bp, Artificial
  Synthetic oligonucleotide
attgctgcaccccgtgaggggtgcagcaatggaggccctcttgggtttagaggacaac

SEQ ID NO: 16099 - DNA, 58 bp, Artificial
  Synthetic oligonucleotide
ccatgagttccaaagtatcactctaaacttcacacagtttttgggctacgcacccagc

SEQ ID NO: 16100 - DNA, 56 bp, Artificial
  Synthetic oligonucleotide
caggtttgcactaattttaagctccagttagtgttatcctctatgataagtcccct

SEQ ID NO: 16101 - DNA, 59 bp, Artificial
  Synthetic oligonucleotide
agcagtgataaaagaggccgtaaagaagttagatcccactaatacactgtggcttgaca

SEQ ID NO: 16102 - DNA, 56 bp, Artificial
  Synthetic oligonucleotide
ggtctcaagaagtccccctccttacaaagtttgttgctgcggccttacacaatata

SEQ ID NO: 16103 - DNA, 59 bp, Artificial
  Synthetic oligonucleotide
agcaagtcactagccatgggtcaaggtaaatccaagggggaaagagaaatcagcagtgc

SEQ ID NO: 16104 - DNA, 55 bp, Artificial
  Synthetic oligonucleotide
cttgaacgttaggttgacaaggaggagtacctctttagccttattcagaacacga

SEQ ID NO: 16105 - DNA, 54 bp, Artificial
  Synthetic oligonucleotide
atgacctacctttgttgtgtgccttaaacaagagccatctttacattaaggggg

SEQ ID NO: 16106 - DNA, 58 bp, Artificial
  Synthetic oligonucleotide
agtctcagttctaatcgccttcatgacattaaagggagcccaaagggactccaatgta

SEQ ID NO: 16107 - DNA, 55 bp, Artificial
  Synthetic oligonucleotide
ttgcaaactaaacaagacttacttccttgtgaggggacccttccaggctcactgg

SEQ ID NO: 16108 - DNA, 55 bp, Artificial
  Synthetic oligonucleotide
ttgcgtcggggaaagctcgcccaagtatcctacacctctttgaatccggccggga

SEQ ID NO: 16109 - DNA, 58 bp, Artificial
  Synthetic oligonucleotide
caagaccttccgagtatttgtgaccttgatccaatgtatggccaaccttccccagaca

SEQ ID NO: 16110 - DNA, 59 bp, Artificial
  Synthetic oligonucleotide
ctgatctacaaagggacttacgagctgcaaacccttgagttgaatatggagactcttaa

SEQ ID NO: 16111 - DNA, 59 bp, Artificial
  Synthetic oligonucleotide
attgaatctgccctctatatcaatccatgtgggggcgttagggtcgatccctcccataa

SEQ ID NO: 16112 - DNA, 59 bp, Artificial
  Synthetic oligonucleotide
ggtgtagtgccttctcacgttagttcaatacttgatatgggtcaagggatactacataa

SEQ ID NO: 16113 - DNA, 59 bp, Artificial
  Synthetic oligonucleotide
tgttctgggacctcacgcctctgtttggtttgtattgatctaacactctttccacagag

SEQ ID NO: 16114 - DNA, 55 bp, Artificial
  Synthetic oligonucleotide
cccaacagccctaaaccttcggactcaggcaatgaggacttgtgtgggaaccaag

SEQ ID NO: 16115 - DNA, 55 bp, Artificial
  Synthetic oligonucleotide
aagggtttctctcacctggagtgtctgacacaaacatccctaggctccttttaac

SEQ ID NO: 16116 - DNA, 54 bp, Artificial
  Synthetic oligonucleotide
taggtgggttaggaaaggtaagtaaaccaggcactcctggcctcgacgtcacac

SEQ ID NO: 16117 - DNA, 56 bp, Artificial
  Synthetic oligonucleotide
gggaggttgtcaggggtggagagtttaaatgtactattggacaatcgctcaaacca

SEQ ID NO: 16118 - DNA, 57 bp, Artificial
  Synthetic oligonucleotide
aagagccactacgtggattgatattgaggggacaccaaatgacccggtggaaatggc

SEQ ID NO: 16119 - DNA, 53 bp, Artificial
  Synthetic oligonucleotide
aaaacccctagttccctccttagagattgagtccagcggaagctcgggatttc

SEQ ID NO: 16120 - DNA, 56 bp, Artificial
  Synthetic oligonucleotide
agtttgacagtcctctcctaagagattgagtccaacgaaaggatgggattggttgg

SEQ ID NO: 16121 - DNA, 57 bp, Artificial
  Synthetic oligonucleotide
ttttagttggtcactctctgacccaaggggcgttgacatgccaggtggttactgtct

SEQ ID NO: 16122 - DNA, 50 bp, Artificial
  Synthetic oligonucleotide
cctccagaagactaaatcgtgtccgggtacacccccggggggccccacag

SEQ ID NO: 16123 - DNA, 55 bp, Artificial
  Synthetic oligonucleotide
gggttcctaagagggggtcttgcatgactgccagaagtttaagttacggttctgc

SEQ ID NO: 16124 - DNA, 59 bp, Artificial
  Synthetic oligonucleotide
actctccagcaatctttaattgcggatctttgaacactaccactgtaagttacatcaag

SEQ ID NO: 16125 - DNA, 54 bp, Artificial
  Synthetic oligonucleotide
aaattagaggataacttgctttgcaatgttttcaccaaggtaggcagtttttct

SEQ ID NO: 16126 - DNA, 58 bp, Artificial
  Synthetic oligonucleotide
cttcgtctaagatgagtaaaagtcaacccaatgctcaacactaattggctttccagag

SEQ ID NO: 16127 - DNA, 59 bp, Artificial
  Synthetic oligonucleotide
ttaaaaccgagtctagctctgcttctatgatcaaacctaccaactctgttatcacaacc

SEQ ID NO: 16128 - DNA, 58 bp, Artificial
  Synthetic oligonucleotide
aatcacccaatccggtattgcctcaacataatagttactcctcccatcaataacagga

SEQ ID NO: 16129 - DNA, 56 bp, Artificial
  Synthetic oligonucleotide
acatcggcatcagcatttaacaagaaggggtctaaaggaaagtttgcgtacttcaa

SEQ ID NO: 16130 - DNA, 59 bp, Artificial
  Synthetic oligonucleotide
catagaaggagaccagatggccctccaacccttgaattgaataacatctagaggactcc

SEQ ID NO: 16131 - DNA, 57 bp, Artificial
  Synthetic oligonucleotide
ttaacattgtgtagtgccgcagacacaaatttcgtgaggagagggacctcctccccc

SEQ ID NO: 16132 - DNA, 54 bp, Artificial
  Synthetic oligonucleotide
gacaaaacaatctgaaggtggtgtagtccttttgtgttcttgaattctcccccc

SEQ ID NO: 16133 - DNA, 58 bp, Artificial
  Synthetic oligonucleotide
ttttcctggaaccgatgactaatctagagacaagctttgagaccttatattcgtaatc

SEQ ID NO: 16134 - DNA, 57 bp, Artificial
  Synthetic oligonucleotide
gttaatgaggaatcatctaagagacctaatgggggtaccctactgcaattattcaaa

SEQ ID NO: 16135 - DNA, 57 bp, Artificial
  Synthetic oligonucleotide
ccgactcatccggaaaggacacccctgggggctattgtctggaagagtggatgctcg

SEQ ID NO: 16136 - DNA, 55 bp, Artificial
  Synthetic oligonucleotide
ctgaccgttcttttccggttgtctaggaccagcaactggtttccttgtcaggtca

SEQ ID NO: 16137 - DNA, 54 bp, Artificial
  Synthetic oligonucleotide
ggactttacaggattagtccaattagaaagaccacgtcttaaagcctgggtcca

SEQ ID NO: 16138 - DNA, 58 bp, Artificial
  Synthetic oligonucleotide
ggatgcacaagacgctctgaggcagtgtaaaacctttaggggtagggttctggacatg

SEQ ID NO: 16139 - DNA, 56 bp, Artificial
  Synthetic oligonucleotide
cctacccatagacatattgtcggtgagggctgtcccaaaccacataggctaaaaag

SEQ ID NO: 16140 - DNA, 59 bp, Artificial
  Synthetic oligonucleotide
tctgggtttctaacatcccagattcttacaatgccatctctaggtggctccctacccag

SEQ ID NO: 16141 - DNA, 58 bp, Artificial
  Synthetic oligonucleotide
agttttctcgcccatctcctattggttacttaggactattgtcacagagaactagaga

SEQ ID NO: 16142 - DNA, 51 bp, Artificial
  Synthetic oligonucleotide
cccacccatgggcccccgtgacccaccgccaataggcggtgggtcacgggg

SEQ ID NO: 16143 - DNA, 56 bp, Artificial
  Synthetic oligonucleotide
cgcacggaggatcctaggcgattttggttacgctataattgtgactgtttactgtt

SEQ ID NO: 16144 - DNA, 57 bp, Artificial
  Synthetic oligonucleotide
cgccagagtcagtaaatcgtccgaacttagggtcccaactctcagcacacttttctg

SEQ ID NO: 16145 - DNA, 56 bp, Artificial
  Synthetic oligonucleotide
ctaagccgaacctcatcctttagtttcagaacttcactggaaaagcccaatctaga

SEQ ID NO: 16146 - DNA, 58 bp, Artificial
  Synthetic oligonucleotide
attggatataagccaacactttggtagtgatgttctcccgctactagtatgattaagg

SEQ ID NO: 16147 - DNA, 58 bp, Artificial
  Synthetic oligonucleotide
ccttgacagcttagaaccatcccctgcggaagagcacctataactgacgaggtcaacc

SEQ ID NO: 16148 - DNA, 59 bp, Artificial
  Synthetic oligonucleotide
agggtctgttctcaataagtggaggcactcatctaacaatctcctgtccacttcgcctt

SEQ ID NO: 16149 - DNA, 57 bp, Artificial
  Synthetic oligonucleotide
aatagcccttattacttcatcttccttagccttaggtatctgtttcaagtctggtga

SEQ ID NO: 16150 - DNA, 59 bp, Artificial
  Synthetic oligonucleotide
aggattcaattgcctcagaacaaagggattgtacggtgtccgaaagtgacacattctca

SEQ ID NO: 16151 - DNA, 57 bp, Artificial
  Synthetic oligonucleotide
caaacctctccttaaggactgagtccatctaaagcttgggacctccttggagtgtgc

SEQ ID NO: 16152 - DNA, 58 bp, Artificial
  Synthetic oligonucleotide
accgcctaaccaataaaggtatctgcagctgtggtgcatttaaggtgcctggcgtaaa

SEQ ID NO: 16153 - DNA, 59 bp, Artificial
  Synthetic oligonucleotide
agactagacaagagtttcttcaccagtgctgctctaaggaacttgtgcttttattcgga

SEQ ID NO: 16154 - DNA, 58 bp, Artificial
  Synthetic oligonucleotide
attggaatttcccttatcaggcttagtcacctgtggtgtctcaccacttaagtcgaca

SEQ ID NO: 16155 - DNA, 56 bp, Artificial
  Synthetic oligonucleotide
atccacatgacctacctttgttatgtaccttaaacaagagccatctttacattaag

SEQ ID NO: 16156 - DNA, 59 bp, Artificial
  Synthetic oligonucleotide
acaccctgtcctcggttcatccagccctaccatattcgacaactatactcaatgtataa

SEQ ID NO: 16157 - DNA, 58 bp, Artificial
  Synthetic oligonucleotide
acacagcaaagtatcccaacacctcagacctggatagactaacccagagccaccctat

SEQ ID NO: 16158 - DNA, 59 bp, Artificial
  Synthetic oligonucleotide
cgcacagtggatcctaggcgtttttactcacgcaattatttgtccacactattgttgag

SEQ ID NO: 16159 - DNA, 57 bp, Artificial
  Synthetic oligonucleotide
cctgtggcatgtatggtctaagtgggcctgacatttacaagggggtttaccaattca

SEQ ID NO: 16160 - DNA, 59 bp, Artificial
  Synthetic oligonucleotide
tgtggacacagtctctgaggagggagttgtcgggttactgctctaacataaagttacaa

SEQ ID NO: 16161 - DNA, 56 bp, Artificial
  Synthetic oligonucleotide
gtgtcctctataaatttcttttcgaagctggcgggtgtgctcctaacaaaacactc

SEQ ID NO: 16162 - DNA, 58 bp, Artificial
  Synthetic oligonucleotide
tccggacaaacacagcttgtagagaagattctcataagggtttctattgcccggtctc

SEQ ID NO: 16163 - DNA, 59 bp, Artificial
  Synthetic oligonucleotide
agggtccccatgaccctcaatctaccacagggcctgtatggcaggttcaactgcaaatc

SEQ ID NO: 16164 - DNA, 59 bp, Artificial
  Synthetic oligonucleotide
gcttgttgctagcgaattaaagtgttttgggaacactgcaattgccaagtgcaaccaaa

SEQ ID NO: 16165 - DNA, 59 bp, Artificial
  Synthetic oligonucleotide
ttggcatctagacccaccattcctgtgtaggaaccgtacaaagacagaaggcttcatct

SEQ ID NO: 16166 - DNA, 59 bp, Artificial
  Synthetic oligonucleotide
tgtttactcgatctccactgactcattgtcctcaaacaactttcgacacctgattccct

SEQ ID NO: 16167 - DNA, 55 bp, Artificial
  Synthetic oligonucleotide
atgtcttgtgtggaaaccacgtgaaggaccccaacgttcttgtagtcgcaacaaa

SEQ ID NO: 16168 - DNA, 55 bp, Artificial
  Synthetic oligonucleotide
cctattttcccaatccagtaagtgtaagaaactagaaaagttcacataaatgtca

SEQ ID NO: 16169 - DNA, 58 bp, Artificial
  Synthetic oligonucleotide
tcaatgatacacccagtgcttttgacgactagtcaatttaagaggtacttttggtaca

SEQ ID NO: 16170 - DNA, 57 bp, Artificial
  Synthetic oligonucleotide
ctccatcaattagaaatgttctagtctttagacaaccaaaatgcctaggatcctcgg

SEQ ID NO: 16171 - DNA, 54 bp, Artificial
  Synthetic oligonucleotide
cctacagtccttaaaggtgaaccagtcgggtacaaacgacaatggtgtcagtag

SEQ ID NO: 16172 - DNA, 57 bp, Artificial
  Synthetic oligonucleotide
caagctccgttaagaagaccctcatgtctttagtctccaacttcacaagaatatttc

SEQ ID NO: 16173 - DNA, 56 bp, Artificial
  Synthetic oligonucleotide
ctagagtattccaagagtctgaatagaaggtctctaaatttgaagtttacccattc

SEQ ID NO: 16174 - DNA, 59 bp, Artificial
  Synthetic oligonucleotide
tcctataacctctagagccatccaaccaatccttaacatcagtatcggtgttcagtaaa

SEQ ID NO: 16175 - DNA, 57 bp, Artificial
  Synthetic oligonucleotide
gagccttgtaaacatctttgttctaagatcaccaatatatagttccctgttaccgcc

SEQ ID NO: 16176 - DNA, 57 bp, Artificial
  Synthetic oligonucleotide
aggttgccgacgtactgtatcgtgacggttgcttagcccctcgacacctccgtgagc

SEQ ID NO: 16177 - DNA, 58 bp, Artificial
  Synthetic oligonucleotide
gggtccactcattggggagctgacctcgcagtcaccccttatgattacggtgccaaaa

SEQ ID NO: 16178 - DNA, 55 bp, Artificial
  Synthetic oligonucleotide
gtcttgaaggctctacaagtttatgaacggggttgccgctggtaccccattgttg

SEQ ID NO: 16179 - DNA, 59 bp, Artificial
  Synthetic oligonucleotide
tggaacttgtgccctgtcagattcagggaggataagttacactgtggagtttagtttgc

SEQ ID NO: 16180 - DNA, 57 bp, Artificial
  Synthetic oligonucleotide
agggcgctggaacttgtaccctgtcagattcagggaggataagttacactgtggagt

SEQ ID NO: 16181 - DNA, 58 bp, Artificial
  Synthetic oligonucleotide
gcggaggctgcaagttaatggtctccgagcagtaactgacctaaacggacctatcgtc

SEQ ID NO: 16182 - DNA, 58 bp, Artificial
  Synthetic oligonucleotide
ctcctactatacctccctctctaacatttccgggtgtgcatcctatccgccatccacc

SEQ ID NO: 16183 - DNA, 59 bp, Artificial
  Synthetic oligonucleotide
ggccccattcttcccaaacgtctcaattgatcctgagtgctacatcgtggttgaccctg

SEQ ID NO: 16184 - DNA, 59 bp, Artificial
  Synthetic oligonucleotide
ccagtgactcttacaaccgcatgcatacctttagggccaacggtgattatgcctggtcc

SEQ ID NO: 16185 - DNA, 59 bp, Artificial
  Synthetic oligonucleotide
gtccaggaaaggccgcaaaagggctgtgtactgtgactgatgtctacctaccagaattg

SEQ ID NO: 16186 - DNA, 55 bp, Artificial
  Synthetic oligonucleotide
tttgtggacacacccagtggacccgtttccatcccccgctcaactactcaggtag

SEQ ID NO: 16187 - DNA, 53 bp, Artificial
  Synthetic oligonucleotide
gtgcctctaagtcacctattcaattagggcgaccgtgtgggggtaaagtttaa

SEQ ID NO: 16188 - DNA, 59 bp, Artificial
  Synthetic oligonucleotide
accctgtcagattcagggaggataagttacactgtggagtttagtttgcctacgcatca

SEQ ID NO: 16189 - DNA, 55 bp, Artificial
  Synthetic oligonucleotide
accaccgtgtggactgtttcgcagttcttagcccgccacaacggagggaatcacc

SEQ ID NO: 16190 - DNA, 55 bp, Artificial
  Synthetic oligonucleotide
agtgtctgtaccgttgtgtccaacacacccgtagacgccttaaccggcatcccac

SEQ ID NO: 16191 - DNA, 58 bp, Artificial
  Synthetic oligonucleotide
tcatcgagtttgaccggacaaaagatgctccggtggttgacgcccctgtcgacttgac

SEQ ID NO: 16192 - DNA, 58 bp, Artificial
  Synthetic oligonucleotide
tgattgacactgtgcctctaagtcacctattcaattagggcggccgtgtgggggtaaa

SEQ ID NO: 16193 - DNA, 59 bp, Artificial
  Synthetic oligonucleotide
ctgtggcgaaggccctagagacgggtccatctcgatttcgagtatcagacccaaggtgc

SEQ ID NO: 16194 - DNA, 57 bp, Artificial
  Synthetic oligonucleotide
tgaggtacaaacacacctgggggtttgaatcggatacagcgtacttgtacgagttca

SEQ ID NO: 16195 - DNA, 58 bp, Artificial
  Synthetic oligonucleotide
cgtcccacaattcgcattcaagcacccgttgggtatgttttggcacatgcgggtctcc

SEQ ID NO: 16196 - DNA, 55 bp, Artificial
  Synthetic oligonucleotide
accccttgcaccctcaagaagcagtattgcgggaagaagaaaaccaggaccatac

SEQ ID NO: 16197 - DNA, 55 bp, Artificial
  Synthetic oligonucleotide
gtaccctcaagaagcagtattgcgggaagaagaaaaccaggaccatactcggtac

SEQ ID NO: 16198 - DNA, 56 bp, Artificial
  Synthetic oligonucleotide
gactcgccgcggattagtctccgttaggcgcggcatcagggggaacgaagtcgacc

SEQ ID NO: 16199 - DNA, 56 bp, Artificial
  Synthetic oligonucleotide
ctttgcaacagaagggttgtcgggtccacccattggggggctgacctcgcagtcac

SEQ ID NO: 16200 - DNA, 57 bp, Artificial
  Synthetic oligonucleotide
cgatcgcggcaaatgataaccacgcatttgtcgtccggcgtcccggctccactacgg

SEQ ID NO: 16201 - DNA, 56 bp, Artificial
  Synthetic oligonucleotide
tttggggacgtgccggttcaacgttccagcaggtacaacgctgcaattccctgccc

SEQ ID NO: 16202 - DNA, 59 bp, Artificial
  Synthetic oligonucleotide
atcactgtatctaccgccggatactaccacgggcggtatgtcttgagtagcatttacgc

SEQ ID NO: 16203 - DNA, 51 bp, Artificial
  Synthetic oligonucleotide
acctattcaattagggcgaccgtgtgggggtaaagtttaattggcgagaac

SEQ ID NO: 16204 - DNA, 58 bp, Artificial
  Synthetic oligonucleotide
cttacgtttatgcatgcttgcggatttggccctttctcttgtttatgtggtgtcccag

SEQ ID NO: 16205 - DNA, 55 bp, Artificial
  Synthetic oligonucleotide
ggtcgggccgtccacctttcttggtacccctggcgtggtgtcatactatcttaca

SEQ ID NO: 16206 - DNA, 53 bp, Artificial
  Synthetic oligonucleotide
acctggggcgtcaaacaccctttgggggtgctttggcaccataaggtgtcaac

SEQ ID NO: 16207 - DNA, 51 bp, Artificial
  Synthetic oligonucleotide
aaaattggtctcccttataagttgtaccctgttaggggcaaccctgagcgg

SEQ ID NO: 16208 - DNA, 56 bp, Artificial
  Synthetic oligonucleotide
atgtctgggacgttctcccggtgcatgtgcaccccggctgcccgggtattttggaa

SEQ ID NO: 16209 - DNA, 56 bp, Artificial
  Synthetic oligonucleotide
gggcccttcccggagcaacaacccataccggacatcccaaagagcgtgcttgacaa

SEQ ID NO: 16210 - DNA, 58 bp, Artificial
  Synthetic oligonucleotide
ccactggtggcttgggatttgcagaccctccttaaccatgttctgtgagtgccctcgt

SEQ ID NO: 16211 - DNA, 57 bp, Artificial
  Synthetic oligonucleotide
tgcggaaatacctgtttgcccatgtaggtaagtgcccacccgttcatcggccttcta

SEQ ID NO: 16212 - DNA, 58 bp, Artificial
  Synthetic oligonucleotide
agtgctctccccatcgccgttcgaggatttgtcccgacagggcccatactccgtcatg

SEQ ID NO: 16213 - DNA, 59 bp, Artificial
  Synthetic oligonucleotide
gctcggcgaacgtcatgctaccaattgcctccggttttagctcgccagaaattagctta

SEQ ID NO: 16214 - DNA, 59 bp, Artificial
  Synthetic oligonucleotide
gtatgtggtatcgtgctttaaccagtgttggaccaagatcagatgttttgacccttcat

SEQ ID NO: 16215 - DNA, 56 bp, Artificial
  Synthetic oligonucleotide
cagtagataccatcaaagcaagaccccatgttgaagttcccattgggtcgaaaacc

SEQ ID NO: 16216 - DNA, 56 bp, Artificial
  Synthetic oligonucleotide
gcaggccgtataggcttaaactaagtgcccgtgaacttgctggaccccgtgaaggc

SEQ ID NO: 16217 - DNA, 55 bp, Artificial
  Synthetic oligonucleotide
acacacgacagtccggtttaatcagggtagttggtacctactcacaagcaccgta

SEQ ID NO: 16218 - DNA, 58 bp, Artificial
  Synthetic oligonucleotide
tgagatctatgactttacagactttggagtcttctttggtacgggaagctacctctcg

SEQ ID NO: 16219 - DNA, 54 bp, Artificial
  Synthetic oligonucleotide
aactcctgccccgagaacaagtaagccacaacaagccaacacttctcaaaaacc

SEQ ID NO: 16220 - DNA, 59 bp, Artificial
  Synthetic oligonucleotide
cacgtagtttctacgtctatcctagctatcaggacgccctctcaaataaaccagctcta

SEQ ID NO: 16221 - DNA, 54 bp, Artificial
  Synthetic oligonucleotide
ttatgcattatagacacccctgaagggaaaggaacgggtttcttctctggtaac

SEQ ID NO: 16222 - DNA, 59 bp, Artificial
  Synthetic oligonucleotide
aaaggaacaggcttcttttctggtaacgacatagtaacagcagcacatgtcgttggcaa

SEQ ID NO: 16223 - DNA, 58 bp, Artificial
  Synthetic oligonucleotide
aaacgggcaggtggcaacgccactgacaataagagcatcacaatacaacctttggagg

SEQ ID NO: 16224 - DNA, 56 bp, Artificial
  Synthetic oligonucleotide
tggagccccaatgagccctaatgcaaataacaaacagacttgggtcaataaacccc

SEQ ID NO: 16225 - DNA, 55 bp, Artificial
  Synthetic oligonucleotide
ggagcctgctaaaacctacgctcctgtgcgctaaagttggttctcccgaaagtgg

SEQ ID NO: 16226 - DNA, 58 bp, Artificial
  Synthetic oligonucleotide
agataagctatgcccttgtgtataccatcggctttgttttatggtcccttggactagc

SEQ ID NO: 16227 - DNA, 54 bp, Artificial
  Synthetic oligonucleotide
tcccatagggtcgaaaaccgtttggaaagtgcaccctagaagtgctctaggacc

SEQ ID NO: 16228 - DNA, 59 bp, Artificial
  Synthetic oligonucleotide
caccaagcctcagaagagtgagccccaaccatactcacaaacctatggtaaggcaccaa

SEQ ID NO: 16229 - DNA, 59 bp, Artificial
  Synthetic oligonucleotide
cacccggttatatggtgaacataggtactatgtcgaacttgattggactagatttgatg

SEQ ID NO: 16230 - DNA, 58 bp, Artificial
  Synthetic oligonucleotide
ggttggtgggtcattcggaaaatctttggagcagcaaatacgacatccacttacgcta

SEQ ID NO: 16231 - DNA, 54 bp, Artificial
  Synthetic oligonucleotide
caaatagtcactaccgtggttgtttgtacggctgggttcggcttccgttatcta

SEQ ID NO: 16232 - DNA, 53 bp, Artificial
  Synthetic oligonucleotide
acttctggttacaggcttttgagtttgcttactttaatggcccaaacaaggac

SEQ ID NO: 16233 - DNA, 58 bp, Artificial
  Synthetic oligonucleotide
aatccggtacttgttaaggatgctacagggagtactcaatttgggccagtgcaagcgc

SEQ ID NO: 16234 - DNA, 57 bp, Artificial
  Synthetic oligonucleotide
gttcacttacgcgaaaccgcgagactcgattaagcgtgatttcccacgtgagtggaa

SEQ ID NO: 16235 - DNA, 59 bp, Artificial
  Synthetic oligonucleotide
gtgctttcctgcggctaacgcgtccgtggtagagatcaaggacagcactggtaaagtag

SEQ ID NO: 16236 - DNA, 58 bp, Artificial
  Synthetic oligonucleotide
tgaaggttgtagtggtacgggctttaggttgggtaatgatatagtgaccgctgcacac

SEQ ID NO: 16237 - DNA, 53 bp, Artificial
  Synthetic oligonucleotide
gcggggaagaggttaaacttcaaacatgttaagatacacccagataagacttt

SEQ ID NO: 16238 - DNA, 52 bp, Artificial
  Synthetic oligonucleotide
aggaaacgtcggtttattcctaataggaatcgccgtcgtaggcaaaatacta

SEQ ID NO: 16239 - DNA, 58 bp, Artificial
  Synthetic oligonucleotide
atatgatggtacaataccgaatgaagtgtttatggcaattaaacagtttaggtactca

SEQ ID NO: 16240 - DNA, 59 bp, Artificial
  Synthetic oligonucleotide
cctagtaagtcatctactactggtttgtggtctcgtgcacttaattcagttggtccatc

SEQ ID NO: 16241 - DNA, 58 bp, Artificial
  Synthetic oligonucleotide
atactacagttctaagcctgacaaggactttaactttgggagcacgatggcacgtaga

SEQ ID NO: 16242 - DNA, 54 bp, Artificial
  Synthetic oligonucleotide
ccagacacacgacagtccggtttaaccagggtagttggtacctactcacaagta

SEQ ID NO: 16243 - DNA, 58 bp, Artificial
  Synthetic oligonucleotide
tcacatttggagccccaatgagccctaacgcaaacaacaaacagacatgggttaataa

SEQ ID NO: 16244 - DNA, 57 bp, Artificial
  Synthetic oligonucleotide
aactgttgaggtcagtaacaatggccgcaacaggagtaaatcaagggcccgttcaca

SEQ ID NO: 16245 - DNA, 58 bp, Artificial
  Synthetic oligonucleotide
ccagaagcatatgttaagtcctttgagaagttcacttacgcgaaaccgcgagactcga

SEQ ID NO: 16246 - DNA, 58 bp, Artificial
  Synthetic oligonucleotide
gcctaatgtcggcccatctgactctaggccctcctaccacgctggggtatcaccttac

SEQ ID NO: 16247 - DNA, 56 bp, Artificial
  Synthetic oligonucleotide
ggttaagccagaaaaggttaaagtctcagagtccttggaggggctctcattctgtg

SEQ ID NO: 16248 - DNA, 58 bp, Artificial
  Synthetic oligonucleotide
ccagtcaacaccggtgggctaaaggcagtcagcaatgccctcaagaccggccggtata

SEQ ID NO: 16249 - DNA, 55 bp, Artificial
  Synthetic oligonucleotide
ttaaagcctaccctatctctccattggagaccaggagtacttcccaaagtactac

SEQ ID NO: 16250 - DNA, 57 bp, Artificial
  Synthetic oligonucleotide
aagtccaaagttgggatcgagcaaggatataaggtagtcaggtatgaggcgttgagg

SEQ ID NO: 16251 - DNA, 58 bp, Artificial
  Synthetic oligonucleotide
gacgatccatggtggcaactatccaggggccctccgtcccgtcacgctagtggcctac

SEQ ID NO: 16252 - DNA, 57 bp, Artificial
  Synthetic oligonucleotide
gtggcacccgacataccacgactgtttacgtatgcacgcaagtgccctttaacaaaa

SEQ ID NO: 16253 - DNA, 57 bp, Artificial
  Synthetic oligonucleotide
tccaggggccctccgtcccgtcacactagtagcctacgaaagagtggcaacaggatc

SEQ ID NO: 16254 - DNA, 58 bp, Artificial
  Synthetic oligonucleotide
acggcaacatcgtagtggagaaaatattcgctggccctgcgatgggaccgtcggccca

SEQ ID NO: 16255 - DNA, 57 bp, Artificial
  Synthetic oligonucleotide
caagcacactccctggtggcgtttatgcattaaacggaaccataagcgccgtgacct

SEQ ID NO: 16256 - DNA, 56 bp, Artificial
  Synthetic oligonucleotide
ttcaacccgtttagaggtgggctaaacaggatcgtggagtggataatggctccgga

SEQ ID NO: 16257 - DNA, 52 bp, Artificial
  Synthetic oligonucleotide
gaggggtgtccgtcactctacaagttcaacccgtttaggggtgggctaaaca

SEQ ID NO: 16258 - DNA, 59 bp, Artificial
  Synthetic oligonucleotide
aattaacgtggctactaggggtgatgctcaccgctagctgccacgttagtggctcctct

SEQ ID NO: 16259 - DNA, 58 bp, Artificial
  Synthetic oligonucleotide
tttcaactacgggaggctgatatccaggaaatacgacgttcaaagctccacgctgccg

SEQ ID NO: 16260 - DNA, 57 bp, Artificial
  Synthetic oligonucleotide
tagacgaggtaacagccgccataacatcggggacctacaaggaccccaagagcgcag

SEQ ID NO: 16261 - DNA, 59 bp, Artificial
  Synthetic oligonucleotide
ggttaccgtgacaagctccacgctagtcacagtggacaaccacaggggggcgtcagcca

SEQ ID NO: 16262 - DNA, 55 bp, Artificial
  Synthetic oligonucleotide
tactacccaacacaccgcccgagcaaggaaaagcccaatgcgtacccgcccgata

SEQ ID NO: 16263 - DNA, 56 bp, Artificial
  Synthetic oligonucleotide
ggaaagagagtgttgaccaagggtgactcccctaggtcacccttgattggtgccta

SEQ ID NO: 16264 - DNA, 58 bp, Artificial
  Synthetic oligonucleotide
cccgacgtgcgagactcatatgccctaacaggagacgaccacaaggtttggggagcaa

SEQ ID NO: 16265 - DNA, 55 bp, Artificial
  Synthetic oligonucleotide
tctaccaacagggttcgacaaaccatacgtccgcctagaggacgagacaccccag

SEQ ID NO: 16266 - DNA, 56 bp, Artificial
  Synthetic oligonucleotide
aggagggcgctacaaagacgtgctcgagtcctgggcaagcggagggcccgacggaa

SEQ ID NO: 16267 - DNA, 56 bp, Artificial
  Synthetic oligonucleotide
acagcccaaacaacgtgttgaacattgaggggtgtccgtcactctacaagttcaac

SEQ ID NO: 16268 - DNA, 55 bp, Artificial
  Synthetic oligonucleotide
ataggagcggccgaccaattcattggggacctcaccaagaccaactcagccgggg

SEQ ID NO: 16269 - DNA, 56 bp, Artificial
  Synthetic oligonucleotide
tcaagtactacatgataacgggcagagtcccaaaccccggagaagagtacgaggac

SEQ ID NO: 16270 - DNA, 58 bp, Artificial
  Synthetic oligonucleotide
ccgtcacactagtggcctacgaaagagtggcaacaggatctgtcgttacggtcgctgg

SEQ ID NO: 16271 - DNA, 53 bp, Artificial
  Synthetic oligonucleotide
gaacattgaggggtgtccgtcactctacaagttcaacccgtttagaggtgggt

SEQ ID NO: 16272 - DNA, 54 bp, Artificial
  Synthetic oligonucleotide
caccgggcccaactgggcgacgttcatcaaacgtttcccccacaatccacgcga

SEQ ID NO: 16273 - DNA, 54 bp, Artificial
  Synthetic oligonucleotide
ggaaagagagtttcaacgttagtggtaacccacgagcggagagctcttacggag

SEQ ID NO: 16274 - DNA, 56 bp, Artificial
  Synthetic oligonucleotide
ctagacaagagaaagcgtctagaggtaaagggcattgacgtcacggggttcctgga

SEQ ID NO: 16275 - DNA, 55 bp, Artificial
  Synthetic oligonucleotide
cggagtacctacagcggaaccagtacaggatgctaaagccccgggcaatacccga

SEQ ID NO: 16276 - DNA, 56 bp, Artificial
  Synthetic oligonucleotide
catagtggaacaacaatacgggtccggaaccagtcaggggcaactagccaggctag

SEQ ID NO: 16277 - DNA, 59 bp, Artificial
  Synthetic oligonucleotide
tggtccagagaccctaagacaagtcagagaagcaatcgcaaccctgcaatacgggtccg

SEQ ID NO: 16278 - DNA, 56 bp, Artificial
  Synthetic oligonucleotide
ccgcagtgtacagccgacaactcgagatgttcgtccccgtccttgaaaacgaaaga

SEQ ID NO: 16279 - DNA, 59 bp, Artificial
  Synthetic oligonucleotide
gtactgtcaaaagaacgactattcaaatcaatagcctgcccacaaccaccaagtagcac

SEQ ID NO: 16280 - DNA, 54 bp, Artificial
  Synthetic oligonucleotide
cctggttaccaaactctatccgcgggaggctacaggagagaaccaaaagtctag

SEQ ID NO: 16281 - DNA, 59 bp, Artificial
  Synthetic oligonucleotide
acggccgatttgacccaggagccatgaactacacaaaattgatactgagtgagagggac

SEQ ID NO: 16282 - DNA, 54 bp, Artificial
  Synthetic oligonucleotide
ggcaactacccaggggccctccgtcccgtcacactagtagcctacgaaagagtg

SEQ ID NO: 16283 - DNA, 56 bp, Artificial
  Synthetic oligonucleotide
acactccctggtggcgtttatgcactaaacggaaccataaacgcagtgaccttcca

SEQ ID NO: 16284 - DNA, 57 bp, Artificial
  Synthetic oligonucleotide
caagccctgggtaccactcacaagggtgccgtcaaggatgttggttctgacgggcga

SEQ ID NO: 16285 - DNA, 58 bp, Artificial
  Synthetic oligonucleotide
tcataagggacctcggaaaagctgcaacatcagccgacccagaggcggacgttaagaa

SEQ ID NO: 16286 - DNA, 56 bp, Artificial
  Synthetic oligonucleotide
ctacatgataacgggcagagtcccaaaccccggagtagagtacgaggactacgtgc

SEQ ID NO: 16287 - DNA, 53 bp, Artificial
  Synthetic oligonucleotide
tcctccacgggggggtacctcgcgagtcttacctctcaacacccgttacacgc

SEQ ID NO: 16288 - DNA, 59 bp, Artificial
  Synthetic oligonucleotide
tacctccggccgtcatgcaagacgagtcactgttaacgacactatgcctagtgggaccg

SEQ ID NO: 16289 - DNA, 58 bp, Artificial
  Synthetic oligonucleotide
agcctgcgaacctcagtacaagggggccgagtggcttatttcgaagcctgtcactatc

SEQ ID NO: 16290 - DNA, 58 bp, Artificial
  Synthetic oligonucleotide
atgcttccctcgcatcctgggccttctagaatttacccaactttgccgacagctccta

SEQ ID NO: 16291 - DNA, 54 bp, Artificial
  Synthetic oligonucleotide
cacgaaacgaaccctattaatcacgcatttggtacacaatctaatttactcccc

SEQ ID NO: 16292 - DNA, 59 bp, Artificial
  Synthetic oligonucleotide
cagtgcctcactagcgcttggtgtgttgataggaaaatccctcttagtagacataaggt

SEQ ID NO: 16293 - DNA, 57 bp, Artificial
  Synthetic oligonucleotide
tccttacgagctgctgggagataattgctcttcgggaaattaacgtgacgtttaaca

SEQ ID NO: 16294 - DNA, 57 bp, Artificial
  Synthetic oligonucleotide
tgtcgtatggccacacccttttgtcaatgttccgagctgagttcattaagggttacg

SEQ ID NO: 16295 - DNA, 59 bp, Artificial
  Synthetic oligonucleotide
acaatgcactccctttaatctggaggggcctaattgatttaacaggatactatgaggca

SEQ ID NO: 16296 - DNA, 58 bp, Artificial
  Synthetic oligonucleotide
tatgccaagttactcatagatttagggatgacttaaagaagacagtaactccccagaa

SEQ ID NO: 16297 - DNA, 56 bp, Artificial
  Synthetic oligonucleotide
caggccagggagggatacacaagtatttgcctctttgtactaggaagtatcctgtt

SEQ ID NO: 16298 - DNA, 58 bp, Artificial
  Synthetic oligonucleotide
aaagggttactgcacatggagatacaccacagttagatctgaaggtaagaccaaccta

SEQ ID NO: 16299 - DNA, 59 bp, Artificial
  Synthetic oligonucleotide
tctcccggatgggccacctccgaggtgtagaagaccttgctggcttcactcgtagtgtg

SEQ ID NO: 16300 - DNA, 58 bp, Artificial
  Synthetic oligonucleotide
caacccaattggtaacaacgatcttaccttgcaccggatttcaggatatctagctaga

SEQ ID NO: 16301 - DNA, 52 bp, Artificial
  Synthetic oligonucleotide
cctcaaaatattgggccaggttgttaccgtacactaaatctttttaggtaca

SEQ ID NO: 16302 - DNA, 59 bp, Artificial
  Synthetic oligonucleotide
tataaagtatgccaggttactcacaggttcagggatgatcttaaaaagactgtcactcc

SEQ ID NO: 16303 - DNA, 56 bp, Artificial
  Synthetic oligonucleotide
gttttcacaaggtgatacactattgtttttcgggccacttgaaggcggtggattga

SEQ ID NO: 16304 - DNA, 56 bp, Artificial
  Synthetic oligonucleotide
tggtcggtaatttactgcgacaagttcttaagtcccgaaagtatgaggagtcatta

SEQ ID NO: 16305 - DNA, 58 bp, Artificial
  Synthetic oligonucleotide
tccgtgaacgttataaactggtcccatgaacccccaaaatcaatgacacaagcgcaca

SEQ ID NO: 16306 - DNA, 58 bp, Artificial
  Synthetic oligonucleotide
ggatacaactggaccagaggattattgtgctctttatggttgcctggggtaaagaggc

SEQ ID NO: 16307 - DNA, 54 bp, Artificial
  Synthetic oligonucleotide
ggtgcatttatgggcgggaattactacttaaagggtgggtcagttaatctgttg

SEQ ID NO: 16308 - DNA, 57 bp, Artificial
  Synthetic oligonucleotide
gggaagccagagcctatttcccagtaattctttggatgtaacctcgtattgtagctc

SEQ ID NO: 16309 - DNA, 58 bp, Artificial
  Synthetic oligonucleotide
ttattcaagctggtagagctacaatacgaggttacatccaaagaattactgggaaata

SEQ ID NO: 16310 - DNA, 57 bp, Artificial
  Synthetic oligonucleotide
cgacatatataactcttgatcaaacttgcgaacaccttaaagtttcctgcggcccaa

SEQ ID NO: 16311 - DNA, 55 bp, Artificial
  Synthetic oligonucleotide
ctgtttcaaagttctcacaaggtgacaccctggtgtttcttggtcccatggaggg

SEQ ID NO: 16312 - DNA, 57 bp, Artificial
  Synthetic oligonucleotide
caatgattatacagaagtttccgggagaatcctgaattaccaggtagattcagaacg

SEQ ID NO: 16313 - DNA, 56 bp, Artificial
  Synthetic oligonucleotide
ggtagtgttaagtcatatgtatgggggttgtttagtgttaagtcatatgtatgggg

SEQ ID NO: 16314 - DNA, 56 bp, Artificial
  Synthetic oligonucleotide
attgtgatatgggtctgccccactataccaaaccctacaggaaaacttgtggttgc

SEQ ID NO: 16315 - DNA, 59 bp, Artificial
  Synthetic oligonucleotide
cagtacttttgacccagaggcagcatacgctaactttaagcgtgtccacaccactgggc

SEQ ID NO: 16316 - DNA, 59 bp, Artificial
  Synthetic oligonucleotide
tacgcattttcctggaacccagtccattccactgcctgactacggacttaccatacata

SEQ ID NO: 16317 - DNA, 59 bp, Artificial
  Synthetic oligonucleotide
acatgttgtcaacacgtgggaggcagactgtgaaagaaaataagggaacaaggatcaga

SEQ ID NO: 16318 - DNA, 56 bp, Artificial
  Synthetic oligonucleotide
cggaatgcagctacatttaacccggaggttgggtatgtggcatttattggtaagta

SEQ ID NO: 16319 - DNA, 58 bp, Artificial
  Synthetic oligonucleotide
ctggtgaggcatccagaaatacttgactgcgggtctaaagaggattgtaggctccctt

SEQ ID NO: 16320 - DNA, 56 bp, Artificial
  Synthetic oligonucleotide
cctacagaagtaactgacatagttgttggagctataagtactcaaaaggttaggag

SEQ ID NO: 16321 - DNA, 57 bp, Artificial
  Synthetic oligonucleotide
tgtaagctaatgataccaaagggaattggagggaagcaactatcgaaccaaattaga

SEQ ID NO: 16322 - DNA, 59 bp, Artificial
  Synthetic oligonucleotide
atccgaagaactgggttagcatctctgaagtaaccgaaacaacaagtatagttgcatca

SEQ ID NO: 16323 - DNA, 57 bp, Artificial
  Synthetic oligonucleotide
ttcatgtcgacttttgaattctaccctttaacgattggtatgtatagggtgcgacga

SEQ ID NO: 16324 - DNA, 59 bp, Artificial
  Synthetic oligonucleotide
aggagtgatcccgaaggtgagcggagacaccacatccctttctagacttgtcgagctac

SEQ ID NO: 16325 - DNA, 59 bp, Artificial
  Synthetic oligonucleotide
agtgagagaggtccagtcaataactttggaacggctagctactcttaaagctactagca

SEQ ID NO: 16326 - DNA, 55 bp, Artificial
  Synthetic oligonucleotide
gggacactatcccctttcggtagactgttcgtcccaacatactcaggtctggtta

SEQ ID NO: 16327 - DNA, 56 bp, Artificial
  Synthetic oligonucleotide
cctaaaactggcaggtgggacctctccagttgggcatctggtttagtggactggct

SEQ ID NO: 16328 - DNA, 56 bp, Artificial
  Synthetic oligonucleotide
atgtcaactttcgcattctacccgcttacgattggtatgtatagggtacgaaggtg

SEQ ID NO: 16329 - DNA, 54 bp, Artificial
  Synthetic oligonucleotide
ctcctctaccttaggctgttgaactcaaaatgttgactcttttcggtaataagg

SEQ ID NO: 16330 - DNA, 57 bp, Artificial
  Synthetic oligonucleotide
ggccaataaaaaccacagcataatgggtgggtggtaggggacaccaagataagcaga

SEQ ID NO: 16331 - DNA, 56 bp, Artificial
  Synthetic oligonucleotide
gacactctactgttcctagggcctatggaaggaggtggtataatctttaaacactg

SEQ ID NO: 16332 - DNA, 57 bp, Artificial
  Synthetic oligonucleotide
aactgtgcggtctagggaagactaacggaccacacaatgggactgaacacaataata

SEQ ID NO: 16333 - DNA, 58 bp, Artificial
  Synthetic oligonucleotide
cctcaccagggaagaagactccgagggtctgcttgagtggtgtacacggatcttggga

SEQ ID NO: 16334 - DNA, 59 bp, Artificial
  Synthetic oligonucleotide
acatcatctacttgcctccacaaggcgtggccccattcaaggaactggaggtgcaaccc

SEQ ID NO: 16335 - DNA, 58 bp, Artificial
  Synthetic oligonucleotide
accaccaagggtttgtctctgccggaggccacatctgagccccctgcgactaccagcg

SEQ ID NO: 16336 - DNA, 56 bp, Artificial
  Synthetic oligonucleotide
ggacacaactaaccatttcgagatagcagggaccatagttaaatctgggtggttta

SEQ ID NO: 16337 - DNA, 59 bp, Artificial
  Synthetic oligonucleotide
agagctgcaaaaggattacgataagacacaagacattggtcacttttgcctaagtcctg

SEQ ID NO: 16338 - DNA, 59 bp, Artificial
  Synthetic oligonucleotide
gaggggtctgacaacataaatgacggcctagaattcttatctgatgaccctatgaactt

SEQ ID NO: 16339 - DNA, 58 bp, Artificial
  Synthetic oligonucleotide
tgattagaaggaggaacttaattctcaacagaggtggcgatgaaaatccacgaggccc

SEQ ID NO: 16340 - DNA, 59 bp, Artificial
  Synthetic oligonucleotide
gggggcttaattctcaagcaatggtgtactacaacatgtaattttggagatccaggtga

SEQ ID NO: 16341 - DNA, 56 bp, Artificial
  Synthetic oligonucleotide
tccaccacggccaatctagttcgagggcaaaataccattcatatcgtcggtaaggg

SEQ ID NO: 16342 - DNA, 57 bp, Artificial
  Synthetic oligonucleotide
acgaacacctctcctccggtcaccacacaaggcttgactttgccagaaaccacactg

SEQ ID NO: 16343 - DNA, 53 bp, Artificial
  Synthetic oligonucleotide
atgaaagggctggttgacagtgacggtaacagttttttccctggtttgtccat

SEQ ID NO: 16344 - DNA, 56 bp, Artificial
  Synthetic oligonucleotide
atgtaggaccagacgactggaccttcaaaagaacggaagctttcatcaggaccaaa

SEQ ID NO: 16345 - DNA, 58 bp, Artificial
  Synthetic oligonucleotide
aaaaagagactccctaatatggtattggccactatcagcacagtactattcttcactt

SEQ ID NO: 16346 - DNA, 54 bp, Artificial
  Synthetic oligonucleotide
ccaatggaggtgttaagttataccagcgaccaaataaacctctaacacttgtag

SEQ ID NO: 16347 - DNA, 58 bp, Artificial
  Synthetic oligonucleotide
cgattccgtactattgtatgtgggttattccctgcacagattaaagcacggaatatta

SEQ ID NO: 16348 - DNA, 59 bp, Artificial
  Synthetic oligonucleotide
ccattgatatgggaagggtacatagatctacctggctattatgaaacagttcacccgtg

SEQ ID NO: 16349 - DNA, 58 bp, Artificial
  Synthetic oligonucleotide
tcattcctgtaacatgatgaaaagctgtcttgtggggttaggaccttaccgagttcaa

SEQ ID NO: 16350 - DNA, 57 bp, Artificial
  Synthetic oligonucleotide
accagcttaaacctgttggaagtgcctataaactgataacagttcgctatagtcgaa

SEQ ID NO: 16351 - DNA, 58 bp, Artificial
  Synthetic oligonucleotide
acctatgctatataagagctcaaagtcaagggttgttattgttcaaggaaatgtggag

SEQ ID NO: 16352 - DNA, 59 bp, Artificial
  Synthetic oligonucleotide
cagccaaatgttactcaggaacatctaattcagggcttcaattgattaatattacccga

SEQ ID NO: 16353 - DNA, 54 bp, Artificial
  Synthetic oligonucleotide
gaaccttgtctccctttggtaggctatttgtaccgacctattctggattagtta

SEQ ID NO: 16354 - DNA, 59 bp, Artificial
  Synthetic oligonucleotide
gagttttctcaaagacgacttgaactcgactatccaatacactagccatacaactccta

SEQ ID NO: 16355 - DNA, 57 bp, Artificial
  Synthetic oligonucleotide
cggtcttagtccagatttgcaacaagtcgcaagatactccaatcatttaaccttact

SEQ ID NO: 16356 - DNA, 54 bp, Artificial
  Synthetic oligonucleotide
cctagacactgacggagcaatacgcctcccgaaagtcgcatacaacggggtttt

SEQ ID NO: 16357 - DNA, 59 bp, Artificial
  Synthetic oligonucleotide
gcctggttgggcttgggccttatagaatccaaatcgtctatgagagaacctactgtaca

SEQ ID NO: 16358 - DNA, 56 bp, Artificial
  Synthetic oligonucleotide
ggtttcgcaccatagtctgtggccttttcccgacacaaattcaagttcggaatata

SEQ ID NO: 16359 - DNA, 56 bp, Artificial
  Synthetic oligonucleotide
cttgtctgtacaagagtgggtcaaaaacgagaaacaaccacaaattctacacttca

SEQ ID NO: 16360 - DNA, 56 bp, Artificial
  Synthetic oligonucleotide
agtccattccactgcctgactacggtctcacgatccaccggatttcgggttacttc

SEQ ID NO: 16361 - DNA, 52 bp, Artificial
  Synthetic oligonucleotide
ataccttattgttttttggaccgcttgaaggtggtggtctaatatttaaaca

SEQ ID NO: 16362 - DNA, 54 bp, Artificial
  Synthetic oligonucleotide
gaacttacttaaagaccgctttaagataatgcagtttttcccttcagtgttcac

SEQ ID NO: 16363 - DNA, 53 bp, Artificial
  Synthetic oligonucleotide
taaccggtagaataattaccaagtacactcactggttggacacctttctaggt

SEQ ID NO: 16364 - DNA, 59 bp, Artificial
  Synthetic oligonucleotide
tagccgtttcacaaactggggttcagttagcctctcactggacgcagagggcatttcag

SEQ ID NO: 16365 - DNA, 57 bp, Artificial
  Synthetic oligonucleotide
aaaaacactcaccgtttctgttatggatctgtctcaaatgtattctcctgttttcga

SEQ ID NO: 16366 - DNA, 59 bp, Artificial
  Synthetic oligonucleotide
tgttaacgggattcggaaaccaaagcatttgtatgtgtcaatgcctaatgcccaatcta

SEQ ID NO: 16367 - DNA, 57 bp, Artificial
  Synthetic oligonucleotide
tggacttatgagttggtttggagggcctcttaagactatactcctaatttgcctgta

SEQ ID NO: 16368 - DNA, 58 bp, Artificial
  Synthetic oligonucleotide
gatgtgattccagactcgttgttttcctttagacatactatggtcctattacgccggc

SEQ ID NO: 16369 - DNA, 57 bp, Artificial
  Synthetic oligonucleotide
tgtttttcggaccacttgaaggtggtggtctaatatttaaacactggtgcacatcca

SEQ ID NO: 16370 - DNA, 56 bp, Artificial
  Synthetic oligonucleotide
cctaatgacctctccaacacagatagtccacccacaaagtgccacccccataaccg

SEQ ID NO: 16371 - DNA, 58 bp, Artificial
  Synthetic oligonucleotide
cctacttcgccaaaggattcctctcgatagattcaggttactactcagccaaatgtta

SEQ ID NO: 16372 - DNA, 58 bp, Artificial
  Synthetic oligonucleotide
aagggaggggccacgtaaaattatctaggggctcagaggttgtcttagatgcatgcga

SEQ ID NO: 16373 - DNA, 55 bp, Artificial
  Synthetic oligonucleotide
ccactatgaaagggattaccaatatgagacaagttggggttgtaacccttcagac

SEQ ID NO: 16374 - DNA, 56 bp, Artificial
  Synthetic oligonucleotide
acagtggagatataagcttggattacgggtttccagtcatgggaaagacgacgtct

SEQ ID NO: 16375 - DNA, 54 bp, Artificial
  Synthetic oligonucleotide
ttggattacgggtttccagtcatgggaaagacgacgtcttattggagggagaac

SEQ ID NO: 16376 - DNA, 58 bp, Artificial
  Synthetic oligonucleotide
gccaaaccgggaagactagataacaatggcaaaggtcctccaatgcaaagcattagtc

SEQ ID NO: 16377 - DNA, 58 bp, Artificial
  Synthetic oligonucleotide
gccgaagagaacggtattacatggcgtgacggagtggagatgtacctagcgtttttgc

SEQ ID NO: 16378 - DNA, 56 bp, Artificial
  Synthetic oligonucleotide
attctaccctttaacgatcgggatgtatagggtgcgacgatggtctatggacccga

SEQ ID NO: 16379 - DNA, 57 bp, Artificial
  Synthetic oligonucleotide
aagtggtcaaacagcggactggtatacaattggggtgtatgttataggcttcacact

SEQ ID NO: 16380 - DNA, 59 bp, Artificial
  Synthetic oligonucleotide
cgtgcacaaggtgcacagattgacacccctttcagctcgttttactggctttacaaggc

SEQ ID NO: 16381 - DNA, 58 bp, Artificial
  Synthetic oligonucleotide
ctgcgtatctcaaagtagataggaatttaatacctatccccttaggtggtgatggctc

SEQ ID NO: 16382 - DNA, 55 bp, Artificial
  Synthetic oligonucleotide
aacgggtacctggataaacacaaggacgaagttgacaaagcaagtgccgacaaca

SEQ ID NO: 16383 - DNA, 55 bp, Artificial
  Synthetic oligonucleotide
ggtgtgactccagaaaccttcccgactgtctcacagttccttttcgaactgggga

SEQ ID NO: 16384 - DNA, 53 bp, Artificial
  Synthetic oligonucleotide
actccagaaaccttcccgactgtctcacagttccttttcgaactagggaaaca

SEQ ID NO: 16385 - DNA, 56 bp, Artificial
  Synthetic oligonucleotide
aggtgtacattaatcaccaattgtgtcataaagggaagagaagtccgaaaagggca

SEQ ID NO: 16386 - DNA, 57 bp, Artificial
  Synthetic oligonucleotide
taataacatcgggagtacttttgacccagagtcaggatacactaactttcagcgtaa

SEQ ID NO: 16387 - DNA, 52 bp, Artificial
  Synthetic oligonucleotide
ctgctaaggaattggggtttagatattaaggggagggggggctaacaacagc

SEQ ID NO: 16388 - DNA, 59 bp, Artificial
  Synthetic oligonucleotide
tcagtgctgattctatcctttgtaacacccatagaagggactctcacaaactaccctac

SEQ ID NO: 16389 - DNA, 56 bp, Artificial
  Synthetic oligonucleotide
ccagtttacaaatatattactgcacaaggagtcgaaaactcagacggtatagaagg

SEQ ID NO: 16390 - DNA, 54 bp, Artificial
  Synthetic oligonucleotide
tttggggattacgggttcagttattatcatatcagggtttactaatcattaggt

SEQ ID NO: 16391 - DNA, 59 bp, Artificial
  Synthetic oligonucleotide
gcagtcggaagtcaataacctgttacgacctttcttgcaatagtacttattgcaagcca

SEQ ID NO: 16392 - DNA, 58 bp, Artificial
  Synthetic oligonucleotide
ctttcttttagtccttgagtcaatcctatgggctgcaagtgcgtcagaaacaccctta

SEQ ID NO: 16393 - DNA, 59 bp, Artificial
  Synthetic oligonucleotide
cacagagccgactcataccaggccaccaacagttgaacccttcaaatcctacttcgcta

SEQ ID NO: 16394 - DNA, 57 bp, Artificial
  Synthetic oligonucleotide
agtcatacctccggagaactcaatcgatgggaatacaactggaccaaaggatcattt

SEQ ID NO: 16395 - DNA, 58 bp, Artificial
  Synthetic oligonucleotide
aacagaccaacaggattgacactgcccaccggtttagaacaggcaatgcgcaaaggat

SEQ ID NO: 16396 - DNA, 58 bp, Artificial
  Synthetic oligonucleotide
tttgaccgtatgtaactcaaggtgcgaaagtgcaactctgtatcccgcagtcgtttct

SEQ ID NO: 16397 - DNA, 58 bp, Artificial
  Synthetic oligonucleotide
taagaacctaagaaacgactgcgggatacagagttgcactttcgcaccttgagttaca

SEQ ID NO: 16398 - DNA, 58 bp, Artificial
  Synthetic oligonucleotide
ccactgggcttacttatgaccacatacgaatcttctacattaaagggagcgagattaa

SEQ ID NO: 16399 - DNA, 54 bp, Artificial
  Synthetic oligonucleotide
agaagtagctgggtctttcattaggtttattacggtgttcagaataggacctgg

SEQ ID NO: 16400 - DNA, 58 bp, Artificial
  Synthetic oligonucleotide
cgagattagcgagggatggacattaatggtcgaaagggtgcaagaccagagggaattc

SEQ ID NO: 16401 - DNA, 59 bp, Artificial
  Synthetic oligonucleotide
gaacttaataaaggacaaagagtggtacacagtccactacttgaagcagatattgtctg

SEQ ID NO: 16402 - DNA, 58 bp, Artificial
  Synthetic oligonucleotide
ccaaatgtaccgtgcattgtttataagaactgtgtcctccgtacaagcttgcggacaa

SEQ ID NO: 16403 - DNA, 55 bp, Artificial
  Synthetic oligonucleotide
taactgacatagttgttggagctataagtactcaaaaggttaggagttacctaaa

SEQ ID NO: 16404 - DNA, 57 bp, Artificial
  Synthetic oligonucleotide
gagtagggacaggttgtacagcctgtggggtatacttagacaagctccgttcagttg

SEQ ID NO: 16405 - DNA, 58 bp, Artificial
  Synthetic oligonucleotide
atacagtgccctcattcagtaaactttggggaaacaagtgtgtcaggatatacagagt

SEQ ID NO: 16406 - DNA, 57 bp, Artificial
  Synthetic oligonucleotide
aggtttatgatgacggtgcaccgccctgtacaattaaatgttggttcacaaggtcag

SEQ ID NO: 16407 - DNA, 58 bp, Artificial
  Synthetic oligonucleotide
tagttgcagggacagtagggaaaaagttcaaacagtatagagagttgagacctcagac

SEQ ID NO: 16408 - DNA, 56 bp, Artificial
  Synthetic oligonucleotide
gtatcaacacagggaagtcaggggttccgtatatcactttgcataaggtggaaaaa

SEQ ID NO: 16409 - DNA, 59 bp, Artificial
  Synthetic oligonucleotide
tggttcaaaagcacgacatatattagcctagaccagacttgcgaacatttgaaggtttc

SEQ ID NO: 16410 - DNA, 56 bp, Artificial
  Synthetic oligonucleotide
cgaagggttgtccataaaaaatcctcgtaacttagatccataatcatttactcaca

SEQ ID NO: 16411 - DNA, 58 bp, Artificial
  Synthetic oligonucleotide
gaaaggtggccatagtggttcaacatttaagtgttgccatggggaggactgttcacaa

SEQ ID NO: 16412 - DNA, 59 bp, Artificial
  Synthetic oligonucleotide
attcatccttttagcccatgtccaacaatatgtatctgcggtatggtttataattctag

SEQ ID NO: 16413 - DNA, 57 bp, Artificial
  Synthetic oligonucleotide
tatactaaccctatatatcagctttacctggacttttgttcctgcggagtctactac

SEQ ID NO: 16414 - DNA, 56 bp, Artificial
  Synthetic oligonucleotide
ctagttctagtgacaccttacaaggaacggcattttctggtgtaccaatgtacagt

SEQ ID NO: 16415 - DNA, 58 bp, Artificial
  Synthetic oligonucleotide
ctggaaggcaagagtcattggctagtgctacccctgggagtaagtccaaggagtgtgg

SEQ ID NO: 16416 - DNA, 59 bp, Artificial
  Synthetic oligonucleotide
gatgtacgctagtcaccaactgtgtgataaaggggagagaagttcgtaagggccaatca

SEQ ID NO: 16417 - DNA, 59 bp, Artificial
  Synthetic oligonucleotide
gcagccttaagccacaaggtccttgcagagtacaaagtccctggcgaaattgtaatgtc

SEQ ID NO: 16418 - DNA, 58 bp, Artificial
  Synthetic oligonucleotide
tagttgcacagaagctcttaaggtacatagaatgggaaaggactgcttaggttataag

SEQ ID NO: 16419 - DNA, 59 bp, Artificial
  Synthetic oligonucleotide
gatttcgatcactaacgaaacagtatattgcttgttccaatggaggtgttaagctatac

SEQ ID NO: 16420 - DNA, 55 bp, Artificial
  Synthetic oligonucleotide
aagagggaaggggccacgtaaaattatctagaggctcagaggttgtcttggacgc

SEQ ID NO: 16421 - DNA, 58 bp, Artificial
  Synthetic oligonucleotide
aactctagatcagacctgtgaacacctcaaagtttcctgcgccccaaaatctgtacag

SEQ ID NO: 16422 - DNA, 58 bp, Artificial
  Synthetic oligonucleotide
taggccgctaagtaatataccacatgtaaagcctaatttcaagtcgataaatgttcaa

SEQ ID NO: 16423 - DNA, 58 bp, Artificial
  Synthetic oligonucleotide
gagttaagcctatgggggaaatatgtcctgcttgcgttagctataattattggtgtcc

SEQ ID NO: 16424 - DNA, 59 bp, Artificial
  Synthetic oligonucleotide
tacagagttggccactttccattccgatggggtccaggttgcttcaactcacgagttga

SEQ ID NO: 16425 - DNA, 59 bp, Artificial
  Synthetic oligonucleotide
attgttgtatactgtaatggccagagaaaagtgatactaactaagacaatggtcattgg

SEQ ID NO: 16426 - DNA, 59 bp, Artificial
  Synthetic oligonucleotide
tcgagcacgtttcagtacatcaccggggatagaaccgtctctgagtggccaaaagccac

SEQ ID NO: 16427 - DNA, 52 bp, Artificial
  Synthetic oligonucleotide
gacaacaagggggaggcaaactaccaaggataataaagggacccggattcga

SEQ ID NO: 16428 - DNA, 55 bp, Artificial
  Synthetic oligonucleotide
tagtgcaattaaggatcacttaaatgtcgttgttaaccgggacctatcctttcaa

SEQ ID NO: 16429 - DNA, 55 bp, Artificial
  Synthetic oligonucleotide
gatttaaggatgatagctcgttcgaggatgttaacggtatccggaaaccaaaaca

SEQ ID NO: 16430 - DNA, 55 bp, Artificial
  Synthetic oligonucleotide
cgtgtgttatcctgtattgaaagtagtatttatgttactcagggtgggtttgtaa

SEQ ID NO: 16431 - DNA, 57 bp, Artificial
  Synthetic oligonucleotide
aggcgggcacaaggttcaatttaggtcctgtaaccatcacattgtcagaaccgagga

SEQ ID NO: 16432 - DNA, 59 bp, Artificial
  Synthetic oligonucleotide
cataataacagatcttttcgaagtccaattcaaaacagtagagtcatatacactaccta

SEQ ID NO: 16433 - DNA, 55 bp, Artificial
  Synthetic oligonucleotide
agcaatagagtcgttggtgctacaaggtttggtaagggttcactcaaaacggcat

SEQ ID NO: 16434 - DNA, 56 bp, Artificial
  Synthetic oligonucleotide
ggggtaaaccaaatgtgccgtgtatagtcttcaagcattgtgctttacgtacaggt

SEQ ID NO: 16435 - DNA, 52 bp, Artificial
  Synthetic oligonucleotide
aaccaggggcctatttaagtacagacacctcaaggacgatgaagaaaccggt

SEQ ID NO: 16436 - DNA, 58 bp, Artificial
  Synthetic oligonucleotide
aggtctagggttgttatagtagagggtaatgtggagggtacagctgagtcaatttgca

SEQ ID NO: 16437 - DNA, 55 bp, Artificial
  Synthetic oligonucleotide
aggtatgttttcccgtcaatacaactggaggtacaccccagaagacattaagcca

SEQ ID NO: 16438 - DNA, 55 bp, Artificial
  Synthetic oligonucleotide
aggtggttttcgggcaatggcacaacttgacgaggagaatcccaggttcttattg

SEQ ID NO: 16439 - DNA, 58 bp, Artificial
  Synthetic oligonucleotide
tcttctacattaaaggacgcgagattaaaactagtctcgcaaagagaagtgaatggga

SEQ ID NO: 16440 - DNA, 57 bp, Artificial
  Synthetic oligonucleotide
aggttcgcttgcgattctctgatttctacaatgtcggagaattcccctaccgagtcg

SEQ ID NO: 16441 - DNA, 56 bp, Artificial
  Synthetic oligonucleotide
cagctacatttaacccggacacggggtatgtggcgtttatcagtaagtatgggcaa

SEQ ID NO: 16442 - DNA, 59 bp, Artificial
  Synthetic oligonucleotide
tgttaaaggtgttcacaatgtctaagagggtactgatcatagccgtagtggtttatctg

SEQ ID NO: 16443 - DNA, 58 bp, Artificial
  Synthetic oligonucleotide
cggaaatttccaaggttctatgtcaatgtgaggatgggagagtttgacccatcaagaa

SEQ ID NO: 16444 - DNA, 55 bp, Artificial
  Synthetic oligonucleotide
gagttgcatttggtgaaagaccccggaaggttgatgtgactaagggtttggctag

SEQ ID NO: 16445 - DNA, 57 bp, Artificial
  Synthetic oligonucleotide
ccggcatcaaagaatgccaaactccgctgtttattacatgtactgggaaaagatttc

SEQ ID NO: 16446 - DNA, 56 bp, Artificial
  Synthetic oligonucleotide
tggcaaccggaaccacccaattcctgacgacggtcttaccatccaccgactcagtg

SEQ ID NO: 16447 - DNA, 59 bp, Artificial
  Synthetic oligonucleotide
gcacgtcagtacgtaagtgttaactttgagtgtgcattaagggcaacttgtaggcaaca

SEQ ID NO: 16448 - DNA, 55 bp, Artificial
  Synthetic oligonucleotide
cctagaacggttagaataacaggagctcctgtaaagaagaggtcaggggttagca

SEQ ID NO: 16449 - DNA, 59 bp, Artificial
  Synthetic oligonucleotide
gcctccatggaggccctgcaacaaacagggattacctacggcaacgacaggtggcattg

SEQ ID NO: 16450 - DNA, 56 bp, Artificial
  Synthetic oligonucleotide
tggtgttcattgttggtttaagaagtctggtgagtggttattggggatattaagtg

SEQ ID NO: 16451 - DNA, 55 bp, Artificial
  Synthetic oligonucleotide
tgttagtcttgttaagtttgacctatgtgtaagattgtagtaatacttgtccggt

SEQ ID NO: 16452 - DNA, 54 bp, Artificial
  Synthetic oligonucleotide
actaactgattattcctgttacaacaacctacctcattatccaactcccctttc

SEQ ID NO: 16453 - DNA, 52 bp, Artificial
  Synthetic oligonucleotide
cactaagccccacgggaccagcccgaactgggtcaccaacagtggaaccttt

SEQ ID NO: 16454 - DNA, 56 bp, Artificial
  Synthetic oligonucleotide
ggttggactcgggccttatcgaattcaagttgtctacgagagaacctactgtacaa

SEQ ID NO: 16455 - DNA, 59 bp, Artificial
  Synthetic oligonucleotide
cagtactcctagcgcgccaactacaccacagggtacacaccatactgcaaggggtctac

SEQ ID NO: 16456 - DNA, 59 bp, Artificial
  Synthetic oligonucleotide
gtcccatacccaggattgttggccagtgtgggcggaagaattgggattcacctctcaca

SEQ ID NO: 16457 - DNA, 59 bp, Artificial
  Synthetic oligonucleotide
tgatgatttccaggattgtgatatgggtctgccccactataccaaaccctacagggaaa

SEQ ID NO: 16458 - DNA, 59 bp, Artificial
  Synthetic oligonucleotide
cagtacacagacagtcaaggacacccccacaccgacagtccaaacaagtccacctagca

SEQ ID NO: 16459 - DNA, 56 bp, Artificial
  Synthetic oligonucleotide
gacttaaaatctcaataccgcgtttcgtttcatggcatccaagaggagggtgcttt

SEQ ID NO: 16460 - DNA, 50 bp, Artificial
  Synthetic oligonucleotide
atttagggatgacttaaagaagacagtaactccccagaattttaccccgg

SEQ ID NO: 16461 - DNA, 59 bp, Artificial
  Synthetic oligonucleotide
gtctttgaccaaaggcccatccaccaatcgtgactacttgaatcaaagacaaggagcgc

SEQ ID NO: 16462 - DNA, 54 bp, Artificial
  Synthetic oligonucleotide
gaggataagatttctctcgtaaagggtcctcctcacaaaaagcgggtggggata

SEQ ID NO: 16463 - DNA, 58 bp, Artificial
  Synthetic oligonucleotide
atgccgtcccttcgtggaggttcctggtctccgcgtgattacacgccgcagactcaag

SEQ ID NO: 16464 - DNA, 58 bp, Artificial
  Synthetic oligonucleotide
gtgaggttacggtcaagcgtggtctcccctctgggcaacctgggacctcgatgatcaa

SEQ ID NO: 16465 - DNA, 57 bp, Artificial
  Synthetic oligonucleotide
aagcgcgcaggtgcattctaccgaagggttacgataattgacgtgaccaacccactg

SEQ ID NO: 16466 - DNA, 53 bp, Artificial
  Synthetic oligonucleotide
gcctaagaggtttaaaccgcaccaacccatcccaacgtggatggtacggtgtg

SEQ ID NO: 16467 - DNA, 56 bp, Artificial
  Synthetic oligonucleotide
aaattttgtggtcaacatggttaacaccaaccccatggtcctaaactgtgatctga

SEQ ID NO: 16468 - DNA, 58 bp, Artificial
  Synthetic oligonucleotide
atccctgaacgagcaaccatgaccaatggcaagtactcgtacacggttcaaccaggac

SEQ ID NO: 16469 - DNA, 58 bp, Artificial
  Synthetic oligonucleotide
ggccctcctggtataggcaagacgaaggctgccgagtacctagccaaacggcttgcca

SEQ ID NO: 16470 - DNA, 58 bp, Artificial
  Synthetic oligonucleotide
ggttaccagggccgattggatagaaactccatagaaagacagctatggtggactcgtg

SEQ ID NO: 16471 - DNA, 59 bp, Artificial
  Synthetic oligonucleotide
cgacttttccgaggaacacgttgtcactcagttcattgctcccggaggcaccatcatcc

SEQ ID NO: 16472 - DNA, 59 bp, Artificial
  Synthetic oligonucleotide
tacaaaagactcgagagaccaaagcacgatcggtattgtgttgactactcaaaatggga

SEQ ID NO: 16473 - DNA, 58 bp, Artificial
  Synthetic oligonucleotide
caaaggcttgctgagggaaactacaatcttccccccgattcacttgctgtctacagga

SEQ ID NO: 16474 - DNA, 56 bp, Artificial
  Synthetic oligonucleotide
tggtacgcggtactacaccgctaaccagccagttacgggcttctcaggtggcttta

SEQ ID NO: 16475 - DNA, 58 bp, Artificial
  Synthetic oligonucleotide
aattaacgcccctctcactgtattggagacctgtgtacacgcctcagtaccttatatc

SEQ ID NO: 16476 - DNA, 59 bp, Artificial
  Synthetic oligonucleotide
ccacaagacacaattggtccaaacgcggcacttctccttcccacgcagattgagacacc

SEQ ID NO: 16477 - DNA, 55 bp, Artificial
  Synthetic oligonucleotide
aacaaggacttctctcacctaagcttgtcgctgaggggaaccgaaccgtactcta

SEQ ID NO: 16478 - DNA, 58 bp, Artificial
  Synthetic oligonucleotide
atggtgaacaatctccaaccctacactgaagcctcccctggacccgacacagcaacac

SEQ ID NO: 16479 - DNA, 54 bp, Artificial
  Synthetic oligonucleotide
cccatgcgagccaatcctccccccgttcacaattacggggacccaccactacta

SEQ ID NO: 16480 - DNA, 58 bp, Artificial
  Synthetic oligonucleotide
ccccaaacggtattcgcgcacttctggacagaaactcattgcttcgtcaattctacta

SEQ ID NO: 16481 - DNA, 52 bp, Artificial
  Synthetic oligonucleotide
ggctcgccttggacaaccgacccgcgaaccctgttacctggtacactaaact

SEQ ID NO: 16482 - DNA, 54 bp, Artificial
  Synthetic oligonucleotide
aacaagttaaccaccactttgccgctaattccaccacgctcggttggtcgacac

SEQ ID NO: 16483 - DNA, 55 bp, Artificial
  Synthetic oligonucleotide
taagcacaaagaccaagttttggagatcctccacggccccactcccccctggcac

SEQ ID NO: 16484 - DNA, 57 bp, Artificial
  Synthetic oligonucleotide
ccatctcaaaggacgccattgggtaccaggggcggcttgaccgcaattccattgaaa

SEQ ID NO: 16485 - DNA, 53 bp, Artificial
  Synthetic oligonucleotide
cttgaatggctctcccccccaagcgggggtgctccaaaggttaacccatgggc

SEQ ID NO: 16486 - DNA, 58 bp, Artificial
  Synthetic oligonucleotide
aaagtgggacgagactctgcgcaaccacattaatgcccgatggtccctcgccacccaa

SEQ ID NO: 16487 - DNA, 59 bp, Artificial
  Synthetic oligonucleotide
ttccgcgcggaatccgatagttcacacccgcctgacataacgactgaggatcaaggaac

SEQ ID NO: 16488 - DNA, 52 bp, Artificial
  Synthetic oligonucleotide
cccacacgcgttcgggtgggttttagacaattaagcgattgtcaccgttccc

SEQ ID NO: 16489 - DNA, 57 bp, Artificial
  Synthetic oligonucleotide
tccggagggtactggtttgacttaggcatttctgcagacgggtttagctatgtggga

SEQ ID NO: 16490 - DNA, 59 bp, Artificial
  Synthetic oligonucleotide
ccctgcacccctcgattatgtgaacttcgaggcttgctccaggaggattgatttccttg

SEQ ID NO: 16491 - DNA, 57 bp, Artificial
  Synthetic oligonucleotide
ccattgaggaataccttcaagaccgtgaccgctactacgaagaagtagcagttgccc

SEQ ID NO: 16492 - DNA, 57 bp, Artificial
  Synthetic oligonucleotide
acaccccccggatgagacttgtggccatgttgtatacaccccttagagcaaactctg

SEQ ID NO: 16493 - DNA, 53 bp, Artificial
  Synthetic oligonucleotide
tggcttaaggagagccctgggggcgaggccaaaacagcccgtccccagggtcc

SEQ ID NO: 16494 - DNA, 58 bp, Artificial
  Synthetic oligonucleotide
gccatgcttggctttccattggtgctcagaataagggtccattgttccccgggatacc

SEQ ID NO: 16495 - DNA, 56 bp, Artificial
  Synthetic oligonucleotide
acacagcttatagtgtacccccacttagccaaagagaggtcggcgaagctaaagaa

SEQ ID NO: 16496 - DNA, 55 bp, Artificial
  Synthetic oligonucleotide
cgtgattacacgccacagacccaaggcacctacacgaacggtcggttcgtgtcct

SEQ ID NO: 16497 - DNA, 58 bp, Artificial
  Synthetic oligonucleotide
atccaccggaaacgaacccgaattcatcgctgaggcttgccctagttgcgcactctac

SEQ ID NO: 16498 - DNA, 53 bp, Artificial
  Synthetic oligonucleotide
tccctgagaggaactgaggcgtactctaaggagtacgttttggacccctccgg

SEQ ID NO: 16499 - DNA, 58 bp, Artificial
  Synthetic oligonucleotide
aggtcgcaatcgggaagcgtaggcttatctggggatgcgatgttggcgttagcacggt

SEQ ID NO: 16500 - DNA, 58 bp, Artificial
  Synthetic oligonucleotide
cactaccaggtgccctgaggattgtgggtggtacgtgggtcgctgctcctgccccaac

SEQ ID NO: 16501 - DNA, 57 bp, Artificial
  Synthetic oligonucleotide
caaaggggagaggattgtgctttgggacgactacggtatgagcaaccctgtgaccga

SEQ ID NO: 16502 - DNA, 57 bp, Artificial
  Synthetic oligonucleotide
aatcatagtgttgtgtggaccccccggtcacggcaaatctgtcgcggcccataagct

SEQ ID NO: 16503 - DNA, 58 bp, Artificial
  Synthetic oligonucleotide
taccgatctcaggcgggcgcatgccgtcccttcgtgggggttcctggtctccgcgtga

SEQ ID NO: 16504 - DNA, 57 bp, Artificial
  Synthetic oligonucleotide
ttgtagacgacatcccgtacaaccaagtccacatttcgaaagcgagcgacccaaaga

SEQ ID NO: 16505 - DNA, 56 bp, Artificial
  Synthetic oligonucleotide
gacatcccgtacaaccaagtccacatttcgaaggcgagcgacccaaagattgacgg

SEQ ID NO: 16506 - DNA, 57 bp, Artificial
  Synthetic oligonucleotide
gccaagtagcaagcgtgcaggtgccttttaccggagggttactatcatcgacgttac

SEQ ID NO: 16507 - DNA, 59 bp, Artificial
  Synthetic oligonucleotide
tccgcaggattgcggccaagtgtgggaactctgctaccacgggcactaccaacgccctg

SEQ ID NO: 16508 - DNA, 53 bp, Artificial
  Synthetic oligonucleotide
cccacacttgaggccctagaattccaaggtccccccatgctcccccgcccttc

SEQ ID NO: 16509 - DNA, 51 bp, Artificial
  Synthetic oligonucleotide
cgggtccgcctacgtccctggtgatagggcggcccctcttggttaccccga

SEQ ID NO: 16510 - DNA, 58 bp, Artificial
  Synthetic oligonucleotide
acgtggaccaagcgccctaccagggcagggtatacgctagcctgacggctgcggcctc

SEQ ID NO: 16511 - DNA, 59 bp, Artificial
  Synthetic oligonucleotide
ccgacttctccgaggaccatgttgtcacacagttcgtagcccctggtggaaccatcatc

SEQ ID NO: 16512 - DNA, 56 bp, Artificial
  Synthetic oligonucleotide
ggacagtctgctcagtcctaattaaacgggattcgggtgaactacttccgctagcc

SEQ ID NO: 16513 - DNA, 55 bp, Artificial
  Synthetic oligonucleotide
gaccactgggacgcgtacaagggagagagggtcgtcctttgggatgactacggta

SEQ ID NO: 16514 - DNA, 58 bp, Artificial
  Synthetic oligonucleotide
atgttggtggaccctgttgtttgtgtaacaagcagtacatacgcgcgtgtggtcggta

SEQ ID NO: 16515 - DNA, 57 bp, Artificial
  Synthetic oligonucleotide
caggggcaaccagggcattgactgtttaacaaaccccaacttgattgcaggcttcag

SEQ ID NO: 16516 - DNA, 53 bp, Artificial
  Synthetic oligonucleotide
caatggcaccccgtacgtggggaccgttcaggcgtacgagttggggtttgcaa

SEQ ID NO: 16517 - DNA, 56 bp, Artificial
  Synthetic oligonucleotide
gttctatacctttggatcctatgtgtgttttgcttcaccagctagggtcccgtttg

SEQ ID NO: 16518 - DNA, 56 bp, Artificial
  Synthetic oligonucleotide
gtcaatggtttgaaaccatacacagagacgacaccaggtattcccccccaactgct

SEQ ID NO: 16519 - DNA, 54 bp, Artificial
  Synthetic oligonucleotide
cagcccgctcccccccataggtgcaccgtttggtgccccgaggattgcgggtgg

SEQ ID NO: 16520 - DNA, 57 bp, Artificial
  Synthetic oligonucleotide
agggtccactgttccctggtctacctaaccactttccagactcctgcgcatcaacta

SEQ ID NO: 16521 - DNA, 56 bp, Artificial
  Synthetic oligonucleotide
atgagcctgcctacctaggcggaaaagacccaagagtcaaggggggaccatcacta

SEQ ID NO: 16522 - DNA, 58 bp, Artificial
  Synthetic oligonucleotide
tcccgtgttgtccaatttggcacgggatggggcttctgggttagcggccatgtgttca

SEQ ID NO: 16523 - DNA, 54 bp, Artificial
  Synthetic oligonucleotide
gaaacgaagacccgacgacttccaacctaaagggaaactgtgggcagatgattc

SEQ ID NO: 16524 - DNA, 58 bp, Artificial
  Synthetic oligonucleotide
tactgtggagccccaatactggcccctggtaaagcgccgaagcttagcacaaagacca

SEQ ID NO: 16525 - DNA, 58 bp, Artificial
  Synthetic oligonucleotide
gttgttgggcacaatgggacaaccccgttgccgcgagccaagcgcacgtcgctggagg

SEQ ID NO: 16526 - DNA, 55 bp, Artificial
  Synthetic oligonucleotide
cttctctagaccagaccacctcctctggctacccaaattacaccaacaaggaccc

SEQ ID NO: 16527 - DNA, 53 bp, Artificial
  Synthetic oligonucleotide
gccaacgcggcccgtcgccctcatgacaaaccccaggtttcccgttggtccga

SEQ ID NO: 16528 - DNA, 56 bp, Artificial
  Synthetic oligonucleotide
gcagaacaactccagaaccaacagggaccgctggtccaccgcccaaacaacagagg

SEQ ID NO: 16529 - DNA, 58 bp, Artificial
  Synthetic oligonucleotide
ctcaacgcgtaactaagacatcacgtgttgagaacgcttttgcgtggaaaggtctggc

SEQ ID NO: 16530 - DNA, 58 bp, Artificial
  Synthetic oligonucleotide
tgaccaacccagtggacgcctatggatccctggtcaggaccctcaccggggctgccac

SEQ ID NO: 16531 - DNA, 58 bp, Artificial
  Synthetic oligonucleotide
gcgtggtgagggtcaaggttcctgggcttgagacgcagcgtgggtactgcggcctccc

SEQ ID NO: 16532 - DNA, 59 bp, Artificial
  Synthetic oligonucleotide
aattggagccattcgggatagggtggtgcgtatcagtgtgttacctgaaactggcgcac

SEQ ID NO: 16533 - DNA, 56 bp, Artificial
  Synthetic oligonucleotide
ggtctggtggcgacaagtgtccttcgcggaaactcattgttccctacgtcaaggtg

SEQ ID NO: 16534 - DNA, 58 bp, Artificial
  Synthetic oligonucleotide
cggccattggccggatggaactccttgcgagcccattcttcctccgtttgtcattgag

SEQ ID NO: 16535 - DNA, 56 bp, Artificial
  Synthetic oligonucleotide
gttctaatgacatcccagaagttggcggagaaccactacaccctaccccctgactc

SEQ ID NO: 16536 - DNA, 56 bp, Artificial
  Synthetic oligonucleotide
gtgctaaaaactcgcaacgttagaaatgactttgtgcaatccgtcaaggaaactct

SEQ ID NO: 16537 - DNA, 55 bp, Artificial
  Synthetic oligonucleotide
accagggataccagacggttggccggacacaaccattccaggagagctcgtcccc

SEQ ID NO: 16538 - DNA, 57 bp, Artificial
  Synthetic oligonucleotide
atgaaccttgggccagtctgtcggcgcgttgacttcctcgtgtactgtaactcccag

SEQ ID NO: 16539 - DNA, 59 bp, Artificial
  Synthetic oligonucleotide
ctgcagtgaagcgtttggagtaccgatcgctgaagtggccgtcacctcaagtggggagt

SEQ ID NO: 16540 - DNA, 54 bp, Artificial
  Synthetic oligonucleotide
gtcaatccctcgacaagaccaccagttccggacacccccattacgtccgaaaga

SEQ ID NO: 16541 - DNA, 57 bp, Artificial
  Synthetic oligonucleotide
ctcctagacctcacctcgcttgcccgtcagcccgtttgggtgaatggtccgcggcgc

SEQ ID NO: 16542 - DNA, 58 bp, Artificial
  Synthetic oligonucleotide
cgaccttcaaacatacaactttgacaccaacagggtctccgcattcaggaagctggcc

SEQ ID NO: 16543 - DNA, 52 bp, Artificial
  Synthetic oligonucleotide
aactcagggagtacggtctggtccccacccgacctgataaaactgaaggtcc

SEQ ID NO: 16544 - DNA, 53 bp, Artificial
  Synthetic oligonucleotide
tgcttttaaaccttgagttgggcccagaacttaacccctatttgagtcatttg

SEQ ID NO: 16545 - DNA, 56 bp, Artificial
  Synthetic oligonucleotide
cgtactgccaccttgtccctagagggcccccccagagaacacaaatgcagggtcca

SEQ ID NO: 16546 - DNA, 50 bp, Artificial
  Synthetic oligonucleotide
aacccgcctacctcgggggccgggaccctagggtgactgtcggtccctca

SEQ ID NO: 16547 - DNA, 58 bp, Artificial
  Synthetic oligonucleotide
ttccaggatgtgatccctgagtataatgatggtcttcttgttccccttgcccccccta

SEQ ID NO: 16548 - DNA, 58 bp, Artificial
  Synthetic oligonucleotide
acgcgttcaccgtgcagtctgaggccttgctccttaggtacaggaacaccctgactgg

SEQ ID NO: 16549 - DNA, 59 bp, Artificial
  Synthetic oligonucleotide
agttagcccaacatctcgcagcgggctttggtaaggtgtcgaatttctctgtcacactg

SEQ ID NO: 16550 - DNA, 54 bp, Artificial
  Synthetic oligonucleotide
gcctaaagccctactctgagccgaccccggggatcccaccagccctgttacaac

SEQ ID NO: 16551 - DNA, 55 bp, Artificial
  Synthetic oligonucleotide
tttgctggtagggctatcaccgccgtcctacctcctggggtcaacccagctaacg

SEQ ID NO: 16552 - DNA, 57 bp, Artificial
  Synthetic oligonucleotide
cattccacgcaatggcgttgaccactgggacgcatacaagggggagagggtcgtcct

SEQ ID NO: 16553 - DNA, 59 bp, Artificial
  Synthetic oligonucleotide
accatgatccggtgtgcacgagcgttcggaggtctgatggacgaacttaaagcccactg

SEQ ID NO: 16554 - DNA, 58 bp, Artificial
  Synthetic oligonucleotide
ggactagtgagtgggtgcgtagtcaaaatagggcactggagccttacatgaggggggc

SEQ ID NO: 16555 - DNA, 57 bp, Artificial
  Synthetic oligonucleotide
atcttggtggtaaggaccccagagtcaagggtggcccttcattgcaacaagttatga

SEQ ID NO: 16556 - DNA, 58 bp, Artificial
  Synthetic oligonucleotide
acactcattgacctgactgaactcattgacgtacgccccgtgggacccaggccgtcca

SEQ ID NO: 16557 - DNA, 52 bp, Artificial
  Synthetic oligonucleotide
ggttagtcacaggttccgacattcgaaaaaggaaaccaatcgattggacccc

SEQ ID NO: 16558 - DNA, 58 bp, Artificial
  Synthetic oligonucleotide
gccggcgtgggtccgcaagggcccaacgtgcccatcggcttcgctgggaccatgccaa

SEQ ID NO: 16559 - DNA, 58 bp, Artificial
  Synthetic oligonucleotide
aacaatgcggttggtagctatgttgtacactcccctccgcactggtggtggctccgga

SEQ ID NO: 16560 - DNA, 56 bp, Artificial
  Synthetic oligonucleotide
gtttacagtgtcccctagaaacgctccaggtgaaatactatggagcgcgcccttgg

SEQ ID NO: 16561 - DNA, 58 bp, Artificial
  Synthetic oligonucleotide
ttaattcggtgtttgatttggcctgggctcttcgtcgtcactctacactaactggtca

SEQ ID NO: 16562 - DNA, 56 bp, Artificial
  Synthetic oligonucleotide
aggtcagtgggtagaggacctcatagctatggggtctaacagcccgtttgtaccca

SEQ ID NO: 16563 - DNA, 59 bp, Artificial
  Synthetic oligonucleotide
gcgtgggacacgaccccgcaaccataccaactcgctgtgacctggcagggctcaaactc

SEQ ID NO: 16564 - DNA, 55 bp, Artificial
  Synthetic oligonucleotide
gtacgtaagtgttccctgcctctaaacattgggtctgtcaacgagctcgccccgt

SEQ ID NO: 16565 - DNA, 59 bp, Artificial
  Synthetic oligonucleotide
tcctttctacgccgcgcaatagttggtgatcagtttggctggtatggtcgcctagaccg

SEQ ID NO: 16566 - DNA, 56 bp, Artificial
  Synthetic oligonucleotide
gtccaattacatacctcttgtggacattctaacaggaccaaaggacctcaccccac

SEQ ID NO: 16567 - DNA, 56 bp, Artificial
  Synthetic oligonucleotide
caccgggcattggtaaaactcggctggtggaggccctagccaagcaactgggagag

SEQ ID NO: 16568 - DNA, 57 bp, Artificial
  Synthetic oligonucleotide
ctacccgaacacagtcgcagacaacatacccctttctgaggtcagagaccccacgtg

SEQ ID NO: 16569 - DNA, 59 bp, Artificial
  Synthetic oligonucleotide
gggccacacctgcgcgctttccaatagttacgccaggagaggcgtcagttggcaaggag

SEQ ID NO: 16570 - DNA, 58 bp, Artificial
  Synthetic oligonucleotide
cctattgccacgctagtgttgacagcccacaacttggcctacttgaacacccgtgaaa

SEQ ID NO: 16571 - DNA, 55 bp, Artificial
  Synthetic oligonucleotide
ttgtctgaggttcctctccaaggtttcactcaaggtgctcacaaaagttaaaccc

SEQ ID NO: 16572 - DNA, 56 bp, Artificial
  Synthetic oligonucleotide
aaaccagaacgtgtaattggacgtgtgctttcgacagctgacgtcttggttgaggg

SEQ ID NO: 16573 - DNA, 58 bp, Artificial
  Synthetic oligonucleotide
tcggacctggcaaccatgatccggtgtgcccgggctttcggaggcctaatggatgaac

SEQ ID NO: 16574 - DNA, 56 bp, Artificial
  Synthetic oligonucleotide
gcaccagcaattacccaacctctgtgttacctgacaacccacgagcgggggctttc

SEQ ID NO: 16575 - DNA, 55 bp, Artificial
  Synthetic oligonucleotide
gttaccacaatcccctggacaactcgacaggccgctaacactttccttggggcta

SEQ ID NO: 16576 - DNA, 56 bp, Artificial
  Synthetic oligonucleotide
ctaactcccgatgaaccatttaacgggaagaagtacgttgtatcgcgatgcaacga

SEQ ID NO: 16577 - DNA, 58 bp, Artificial
  Synthetic oligonucleotide
accactactccgtgtatgtcagcgatggcaaagctctgggggtccacaaaccaccggc

SEQ ID NO: 16578 - DNA, 55 bp, Artificial
  Synthetic oligonucleotide
ctgggaaaggtgggtcaaaccaaccgagacccaggatgtgaatgagtccgagaag

SEQ ID NO: 16579 - DNA, 57 bp, Artificial
  Synthetic oligonucleotide
ggacaagggggcctaaccatgagaacccgtacgagagcatggtccctcattcccagc

SEQ ID NO: 16580 - DNA, 55 bp, Artificial
  Synthetic oligonucleotide
cagtgtttcaacttcaacccttgagcaatgggcccctttaccctaacatcgtcaa

SEQ ID NO: 16581 - DNA, 57 bp, Artificial
  Synthetic oligonucleotide
cacagcagagtgtgattttctttccctggttacgcgtaccggaccttacacagtgtg

SEQ ID NO: 16582 - DNA, 57 bp, Artificial
  Synthetic oligonucleotide
aaaaccctcacatctggctccctcgttgcccgtgcttcaggactcctccacgaaaga

SEQ ID NO: 16583 - DNA, 54 bp, Artificial
  Synthetic oligonucleotide
ccttgacatggaggaggaacgggtccgggagctctcctcgaaatcttccgaccc

SEQ ID NO: 16584 - DNA, 59 bp, Artificial
  Synthetic oligonucleotide
tggaggttcctggtctccgcgcgattacacgccgcagactcaaggcacctacacgaacg

SEQ ID NO: 16585 - DNA, 57 bp, Artificial
  Synthetic oligonucleotide
cagagttcaatacttaggcaaatgtattggactaggggccctaaccatgaagaccca

SEQ ID NO: 16586 - DNA, 59 bp, Artificial
  Synthetic oligonucleotide
gttcacagtatctcctaggaacgctccaggtgaaatactatggagcgctcccttaggcc

SEQ ID NO: 16587 - DNA, 57 bp, Artificial
  Synthetic oligonucleotide
aatgcgtcgcaccccggtggtcaaccccgctttcagtgcggaggggctcctagatgc

SEQ ID NO: 16588 - DNA, 53 bp, Artificial
  Synthetic oligonucleotide
cacgggttccatttgtcggggacccaccaaaaaccgtccactccaacatcaca

SEQ ID NO: 16589 - DNA, 57 bp, Artificial
  Synthetic oligonucleotide
ctttcaggtgcgggtcacaatctcaggttccgggctctttgctggtcgggccattac

SEQ ID NO: 16590 - DNA, 56 bp, Artificial
  Synthetic oligonucleotide
cccaaactttcgacgcagcagggctatgggtttggatgccatggacccgaaacaaa

SEQ ID NO: 16591 - DNA, 57 bp, Artificial
  Synthetic oligonucleotide
cggaaatgactactacgatgaaccagacgattggtactcagaaggggtcaatgacgg

SEQ ID NO: 16592 - DNA, 53 bp, Artificial
  Synthetic oligonucleotide
gatcctccccccgttcgtcataacggggacccaccactactacgccacaagac

SEQ ID NO: 16593 - DNA, 57 bp, Artificial
  Synthetic oligonucleotide
cttggtagtggtgatccccgatgtccaaaatcgttaacagctattgttgtggactcc

SEQ ID NO: 16594 - DNA, 58 bp, Artificial
  Synthetic oligonucleotide
aggaagatacttgcagatcgtaagagagtcgtctcggtagtacctgacgacgaatttg

SEQ ID NO: 16595 - DNA, 58 bp, Artificial
  Synthetic oligonucleotide
agggacatagcaaaccacaaagttgccctccaatcactggttgcttccgcgcagaggg

SEQ ID NO: 16596 - DNA, 56 bp, Artificial
  Synthetic oligonucleotide
caccgagcgttgtttcgacctactaaggagactgttcgacacattcgaggactccg

SEQ ID NO: 16597 - DNA, 56 bp, Artificial
  Synthetic oligonucleotide
cggaaccacaaccgacggtatggaccctggcgttgtggccactaccagtgtggtca

SEQ ID NO: 16598 - DNA, 58 bp, Artificial
  Synthetic oligonucleotide
gccccccatgcttccccgcccctctggcacctatgcgggtctccccatcgctgattac

SEQ ID NO: 16599 - DNA, 55 bp, Artificial
  Synthetic oligonucleotide
cgtaagagggtcgtctcggtagtacctgacgacgaatttgtgaatgttatggagg

SEQ ID NO: 16600 - DNA, 58 bp, Artificial
  Synthetic oligonucleotide
cggctgagttgaggaagtgcgttggcatgaccgttccctacgtagcaactaccgtcaa

SEQ ID NO: 16601 - DNA, 56 bp, Artificial
  Synthetic oligonucleotide
ccccacgaccaacgtggaccaggtgccctatcaggggagggtgtacgctagcctga

SEQ ID NO: 16602 - DNA, 54 bp, Artificial
  Synthetic oligonucleotide
ctaagcagccgcccccgagggagataccacaaagacccccacgaccgcccactc

SEQ ID NO: 16603 - DNA, 56 bp, Artificial
  Synthetic oligonucleotide
atcttcaagtgacggagtactaagtagtatggctgtcacttttaaacgagccctcg

SEQ ID NO: 16604 - DNA, 54 bp, Artificial
  Synthetic oligonucleotide
cggagtactatctagtatggctgtcacttttaaacgagcccttggggcccggcc

SEQ ID NO: 16605 - DNA, 58 bp, Artificial
  Synthetic oligonucleotide
cacctacaatgtcagctgtattaaaggagcccccatggttgagaaggtcagggagccc

SEQ ID NO: 16606 - DNA, 58 bp, Artificial
  Synthetic oligonucleotide
gacctccaccctgattgagcaggatgggtccgcctacgtccctggcgagagggcggcc

SEQ ID NO: 16607 - DNA, 51 bp, Artificial
  Synthetic oligonucleotide
acgtactaacccctgatgaaccgtttaacggaagaaggtttatcgtgtcgc

SEQ ID NO: 16608 - DNA, 57 bp, Artificial
  Synthetic oligonucleotide
agcccccctatcgccatctttaatggtgtggctgtcaaggtcgcctctggtttacca

SEQ ID NO: 16609 - DNA, 56 bp, Artificial
  Synthetic oligonucleotide
aattgatcataaccgaactcaaagaaggtgggatggacttttacgtgccaagacag

SEQ ID NO: 16610 - DNA, 56 bp, Artificial
  Synthetic oligonucleotide
tgatagacccctggattagattaaattttgtacaagcccccaatggtgagttcacg

SEQ ID NO: 16611 - DNA, 57 bp, Artificial
  Synthetic oligonucleotide
gtcgaccactgggacgcatacaagggggagagggtcgtcctatgggacgactatgga

SEQ ID NO: 16612 - DNA, 55 bp, Artificial
  Synthetic oligonucleotide
aagccctcgtctaagcgcgctggtgcattttaccggagggtaacaataattgacg

SEQ ID NO: 16613 - DNA, 56 bp, Artificial
  Synthetic oligonucleotide
actgaaccattaccaccaggcgtgtacgagccagcctaccttggaggtcgtgaccc

SEQ ID NO: 16614 - DNA, 57 bp, Artificial
  Synthetic oligonucleotide
gacggggacaaacttggtaccggtgtggccacagactatattgtgcctggcatcccc

SEQ ID NO: 16615 - DNA, 58 bp, Artificial
  Synthetic oligonucleotide
cacacttgaaggcggtgacaacaagggaacctattgcggtgcacccatcttaggtcca

SEQ ID NO: 16616 - DNA, 59 bp, Artificial
  Synthetic oligonucleotide
ggtgggcgcatgccgtcccttcgtggaggttcctggtctccgcgtgactacacgccgca

SEQ ID NO: 16617 - DNA, 58 bp, Artificial
  Synthetic oligonucleotide
acaaatgtataatggttgggttggtaacatgcgagtcagggtcatcctggcaggtaac

SEQ ID NO: 16618 - DNA, 59 bp, Artificial
  Synthetic oligonucleotide
tcggtgtttgatttggcctgggctcttcgccgacacctgacactaactggacagtttca

SEQ ID NO: 16619 - DNA, 58 bp, Artificial
  Synthetic oligonucleotide
ggttactatgttcccccacataatagtagatgttaggcaattggaacctgtgttgatc

SEQ ID NO: 16620 - DNA, 57 bp, Artificial
  Synthetic oligonucleotide
acttgaaggtggtgacagtaagggaacatactgtggtgcaccaatcctaggcccagg

SEQ ID NO: 16621 - DNA, 57 bp, Artificial
  Synthetic oligonucleotide
ctgtacaattcagatccactcctgcgggggactacttgtcaggtactcaagggaccc

SEQ ID NO: 16622 - DNA, 59 bp, Artificial
  Synthetic oligonucleotide
gctcctcactggctccaacgccaaggcccaagatctcgggaccatcccgggcgattgtg

SEQ ID NO: 16623 - DNA, 58 bp, Artificial
  Synthetic oligonucleotide
cctctagttcaggcacagtctcaaccgtgcccaaaaatgttttggactcctggacatc

SEQ ID NO: 16624 - DNA, 57 bp, Artificial
  Synthetic oligonucleotide
gcttattgacttgactgaactcattgacgtacgccccgtgggacccaggccgtccaa

SEQ ID NO: 16625 - DNA, 56 bp, Artificial
  Synthetic oligonucleotide
gttcccccacataatagtagatgttaggcaattggaacctgtgttgatccccttac

SEQ ID NO: 16626 - DNA, 59 bp, Artificial
  Synthetic oligonucleotide
ttcccccacataatagtagatgttaggcaattggaacctgtgttgatccccttgcctga

SEQ ID NO: 16627 - DNA, 59 bp, Artificial
  Synthetic oligonucleotide
ttccaacaatggtccttacccgactattctggtcagttcactcacaacatgaacttagc

SEQ ID NO: 16628 - DNA, 56 bp, Artificial
  Synthetic oligonucleotide
cgtacaaccaagtccacatttcgaaagcgagcgacccaaagattgacgggtgtgta

SEQ ID NO: 16629 - DNA, 55 bp, Artificial
  Synthetic oligonucleotide
ccgtccaggattggaacatcgatccccaagagcccttcatcccttccaaacttag

SEQ ID NO: 16630 - DNA, 58 bp, Artificial
  Synthetic oligonucleotide
gtcttcgcttgacctggtagatgggagagttagggcggttcctcgctctgtttactca

SEQ ID NO: 16631 - DNA, 58 bp, Artificial
  Synthetic oligonucleotide
agcccaggctatcgactgtgcccttccacaagagttcgtctcgtggtttgcgagtaac

SEQ ID NO: 16632 - DNA, 58 bp, Artificial
  Synthetic oligonucleotide
aggctcgaacgaccaaagcacgatcggtattgtgttgactactcaaagtgggactcaa

SEQ ID NO: 16633 - DNA, 57 bp, Artificial
  Synthetic oligonucleotide
atgcgtacaagggggagagggtcgtcctatgggacgactatggaatgagcaacccca

SEQ ID NO: 16634 - DNA, 58 bp, Artificial
  Synthetic oligonucleotide
aatgatacaccctcagtcatgtttgccacttatgacccacttacgtcaggcacggggg

SEQ ID NO: 16635 - DNA, 56 bp, Artificial
  Synthetic oligonucleotide
gtcttggaaaacggctgccaggagggcgttgttgcctcggtcctcgtcaagagggc

SEQ ID NO: 16636 - DNA, 59 bp, Artificial
  Synthetic oligonucleotide
ccaagggcgcaccgttggaggccaaatgggcatgcttctgacaggatccaacgccaaaa

SEQ ID NO: 16637 - DNA, 59 bp, Artificial
  Synthetic oligonucleotide
actgcgacacacctcctccctgttggcacagtccaaggctactcctacaacctccttgc

SEQ ID NO: 16638 - DNA, 58 bp, Artificial
  Synthetic oligonucleotide
attggacgacttttatgggtggctaccttattgcgagatgctccgcctatgcgaccgt

SEQ ID NO: 16639 - DNA, 51 bp, Artificial
  Synthetic oligonucleotide
atttgctgagagttaccgaccgttacccgctacgggttgaatttaaaggcg

SEQ ID NO: 16640 - DNA, 54 bp, Artificial
  Synthetic oligonucleotide
tgtgggtttgggacggcttgtaggaagtcgtccaacgcaaaggttatgtagtcg

SEQ ID NO: 16641 - DNA, 57 bp, Artificial
  Synthetic oligonucleotide
tggtgcaaggaggactgtgacccgaagccactgttccggaggttcacacgtgtttgg

SEQ ID NO: 16642 - DNA, 57 bp, Artificial
  Synthetic oligonucleotide
gccccgtcaaagtccatgagggggtctgtgagtaggcctgtattcttcgcgaaagtg

SEQ ID NO: 16643 - DNA, 55 bp, Artificial
  Synthetic oligonucleotide
gtaggcggaagaggtaaacgcggttagctctgtgccgacgtggccggtagaggcg

SEQ ID NO: 16644 - DNA, 56 bp, Artificial
  Synthetic oligonucleotide
ataatgtggacaagttggaacaagtccggcctgatttcctcgcccaccccatcaat

SEQ ID NO: 16645 - DNA, 55 bp, Artificial
  Synthetic oligonucleotide
ggttaaggttagaacaagatctcgtttatgcctagaagcccgtgaattgtccaaa

SEQ ID NO: 16646 - DNA, 58 bp, Artificial
  Synthetic oligonucleotide
gcaaggccatagtgtttgaccttcgttcctgctgtgttgggtcctccttgtagtggga

SEQ ID NO: 16647 - DNA, 51 bp, Artificial
  Synthetic oligonucleotide
cccccgattttatgcttccgttcccaataaactactagagtcctggttaag

SEQ ID NO: 16648 - DNA, 56 bp, Artificial
  Synthetic oligonucleotide
agtagtttacataggggtcataggtgagggctgtggcctttgttacaaagttatca

SEQ ID NO: 16649 - DNA, 55 bp, Artificial
  Synthetic oligonucleotide
tgccgaggtgcccgcccctagggaggagtaaatggcggcgttatacgccgccgta

SEQ ID NO: 16650 - DNA, 56 bp, Artificial
  Synthetic oligonucleotide
cgctttcggcaatgttatcttgtccttgcgacgtagacggaagtagtaaatgcggt

SEQ ID NO: 16651 - DNA, 59 bp, Artificial
  Synthetic oligonucleotide
ggaagctgaatgcaaggccgtagtgcctgaccttcgttcctgctgtgttgggtcctcct

SEQ ID NO: 16652 - DNA, 57 bp, Artificial
  Synthetic oligonucleotide
gtgtttggtggtacacggacaagttggaacaagtccggcctgatttcctcgctcatc

SEQ ID NO: 16653 - DNA, 52 bp, Artificial
  Synthetic oligonucleotide
ccctagggaggagtaaatggcgccgttatacggcgccgtaatttccggagga

SEQ ID NO: 16654 - DNA, 59 bp, Artificial
  Synthetic oligonucleotide
tgaactgctccgcctctgtgaccgttacccacacaaggtgcccgttaagggcagctatg

SEQ ID NO: 16655 - DNA, 55 bp, Artificial
  Synthetic oligonucleotide
ccttaggatcgaaggtcggccgaaggccgaccgagcacacttattctcgagggaa

SEQ ID NO: 16656 - DNA, 55 bp, Artificial
  Synthetic oligonucleotide
cttacataacctctcgctattggtcggttcccgcccacgtgacttcaaaactgag

SEQ ID NO: 16657 - DNA, 56 bp, Artificial
  Synthetic oligonucleotide
ccaacgggatatattataagccaaggggacaatggtgggacggctacgaacagcaa

SEQ ID NO: 16658 - DNA, 55 bp, Artificial
  Synthetic oligonucleotide
caacgaagtcggatacgaagtggcgggtaatactataccgccacttcgtttcata

SEQ ID NO: 16659 - DNA, 58 bp, Artificial
  Synthetic oligonucleotide
gagcgggagtctggtgaccgttgcagagcaccaccctgtcacggtcgtaagaaattta

SEQ ID NO: 16660 - DNA, 56 bp, Artificial
  Synthetic oligonucleotide
tacgcgttggaaggggttaaatgcgggacgcagttcgacttttaccatgcgtatca

SEQ ID NO: 16661 - DNA, 55 bp, Artificial
  Synthetic oligonucleotide
tgcaaaggttacgtagtcagaattccaaattaggttgccagtactggtggtttgt

SEQ ID NO: 16662 - DNA, 59 bp, Artificial
  Synthetic oligonucleotide
gaaatttacgcaggctgcctgaacttttgaaagggagcgggtcaatgctgaagcgtgat

SEQ ID NO: 16663 - DNA, 54 bp, Artificial
  Synthetic oligonucleotide
ggaagtagtaaatccggctactcctcctgtggccacgtaggttccgggagaggc

SEQ ID NO: 16664 - DNA, 59 bp, Artificial
  Synthetic oligonucleotide
cctggattgggactgtgtgtccaaatcccttccatgtagttactggcactcctagaggc

SEQ ID NO: 16665 - DNA, 56 bp, Artificial
  Synthetic oligonucleotide
gtatcggagaattaatcagtacctgatattaaccccggatggttatgcgcccgccc

SEQ ID NO: 16666 - DNA, 55 bp, Artificial
  Synthetic oligonucleotide
tcggagaattaatcagtacctgatattaaccccggacggatacgcgctcgccccc

SEQ ID NO: 16667 - DNA, 57 bp, Artificial
  Synthetic oligonucleotide
aagcgtgattggaagactaatgtacacgtcattgtggggccacctgggtgtggtaaa

SEQ ID NO: 16668 - DNA, 58 bp, Artificial
  Synthetic oligonucleotide
cagactggttcgctgtggtgaggtcggttaatgttatttgtggcttaggtctgaggag

SEQ ID NO: 16669 - DNA, 56 bp, Artificial
  Synthetic oligonucleotide
tgacccgaagccacttttccggagattcacccgtgtgtggtggtacactgacaagt

SEQ ID NO: 16670 - DNA, 58 bp, Artificial
  Synthetic oligonucleotide
gcgttgagtccaacggttagtacatccgctagtttgaatgtaaatatgccagttccga

SEQ ID NO: 16671 - DNA, 57 bp, Artificial
  Synthetic oligonucleotide
cgccgttaggcgccgtaagctccggaggatcacactcgcccggaactatgccgtcca

SEQ ID NO: 16672 - DNA, 56 bp, Artificial
  Synthetic oligonucleotide
acactgacaagttggaacaagtccggcctgatttcctcgcccaccccatcaatttc

SEQ ID NO: 16673 - DNA, 58 bp, Artificial
  Synthetic oligonucleotide
ttgacgttcgtgcctgccgagttgggtcctccttgtagtgggatccagccggttctga

SEQ ID NO: 16674 - DNA, 57 bp, Artificial
  Synthetic oligonucleotide
atacccgtcacttcgttgtgaaatggcaaaccgtacagtgcgccgattctgctttac

SEQ ID NO: 16675 - DNA, 54 bp, Artificial
  Synthetic oligonucleotide
gcggcctatggtgggacgggtacgaacaacaagactccgttattatagacgact

SEQ ID NO: 16676 - DNA, 59 bp, Artificial
  Synthetic oligonucleotide
gcactgagggaacgtaggtctgtgatccaacttgagtacctctaaatattttagctcga

SEQ ID NO: 16677 - DNA, 52 bp, Artificial
  Synthetic oligonucleotide
cggttacgaagtgacggttacgaagtgacggggtaatactatgcccgtcact

SEQ ID NO: 16678 - DNA, 57 bp, Artificial
  Synthetic oligonucleotide
gtcacctgccgtagtggtgtctaaggttatcttgtccttgcgacgtaggcggaagta

SEQ ID NO: 16679 - DNA, 55 bp, Artificial
  Synthetic oligonucleotide
acctacaggggtatgttaacctcattaaacccacacgcttcagtaccatcaagaa

SEQ ID NO: 16680 - DNA, 57 bp, Artificial
  Synthetic oligonucleotide
tgccgctgtcggacctgtttgtgagccgaaaaagccgaatacggtgttccttgtgac

SEQ ID NO: 16681 - DNA, 56 bp, Artificial
  Synthetic oligonucleotide
cttgtccttgcgacgtagacggaagtagtaaatccggctactcctcctgtggccac

SEQ ID NO: 16682 - DNA, 58 bp, Artificial
  Synthetic oligonucleotide
tccgaatccggctgaactaatggtgtagtggccccatgtgggcctgagttccatttta

SEQ ID NO: 16683 - DNA, 59 bp, Artificial
  Synthetic oligonucleotide
gggtcttatgtggagttcacgtctaagaagattgtcataacgagcaacacgcacccgga

SEQ ID NO: 16684 - DNA, 52 bp, Artificial
  Synthetic oligonucleotide
ggtcgtcgtctcctagcaacctggttaaaggttaaccacatccgggttaata

SEQ ID NO: 16685 - DNA, 57 bp, Artificial
  Synthetic oligonucleotide
tgccgaggtgcccgcccttagggaggagtatatggcgccgttaggcgccgtaatctc

SEQ ID NO: 16686 - DNA, 53 bp, Artificial
  Synthetic oligonucleotide
cgaccgttacccacacaaggtgccagttaagggcgcctttgtggagtttacga

SEQ ID NO: 16687 - DNA, 57 bp, Artificial
  Synthetic oligonucleotide
ttgactttcgctcctgccgcgttgggtcctccttgtagtgggatccagccggttctg

SEQ ID NO: 16688 - DNA, 56 bp, Artificial
  Synthetic oligonucleotide
cctaggcggagtaaatggcgccgttatacggcgccgtaatctccggaggatcacac

SEQ ID NO: 16689 - DNA, 56 bp, Artificial
  Synthetic oligonucleotide
tgagtggtgttcaaggttatcttgtccttgcgacgtaggcggaagtagtaaacgcg

SEQ ID NO: 16690 - DNA, 54 bp, Artificial
  Synthetic oligonucleotide
ggttatcttgtccttgcgacgtaggcggaagtagtaaacgcggccactggaacg

SEQ ID NO: 16691 - DNA, 59 bp, Artificial
  Synthetic oligonucleotide
tacgtcaggcatgggcgtggcttgcataacctctcgctattggttggttcccgcccacg

SEQ ID NO: 16692 - DNA, 56 bp, Artificial
  Synthetic oligonucleotide
tgacccgaagccactgttccggaggttcacacgtgtttggtggtacaacgtggaca

SEQ ID NO: 16693 - DNA, 59 bp, Artificial
  Synthetic oligonucleotide
tgttattctagatgataactttgtaacaaaggccacagccctcacctatgacccctatg

SEQ ID NO: 16694 - DNA, 51 bp, Artificial
  Synthetic oligonucleotide
caacagggacgcctcacctacaagggttttgtaacttacgtaaacccacac

SEQ ID NO: 16695 - DNA, 58 bp, Artificial
  Synthetic oligonucleotide
ggcgttggaggaagcacgtactctgggaggaagcatctactacaaaccacgaggtctc

SEQ ID NO: 16696 - DNA, 55 bp, Artificial
  Synthetic oligonucleotide
atgcccagcaagaaaagcggcccgcaaccccataagaggtgggtgttcaccctta

SEQ ID NO: 16697 - DNA, 55 bp, Artificial
  Synthetic oligonucleotide
cgttgggaagttgatcggagtagtaggcgtcggtttgtggtacgggagcaagcaa

SEQ ID NO: 16698 - DNA, 57 bp, Artificial
  Synthetic oligonucleotide
cagtgttgggtggtacaacagcctgaacggtacgcgtcaatttacaatacaatacag

SEQ ID NO: 16699 - DNA, 52 bp, Artificial
  Synthetic oligonucleotide
tatagcggggtcgggcggttagagtgggggacgttacgaagtgtgttacgaa

SEQ ID NO: 16700 - DNA, 58 bp, Artificial
  Synthetic oligonucleotide
gggtctattgaccatcccgtcgtggaggtcttcactatttgcccgtccttgtctatca

SEQ ID NO: 16701 - DNA, 51 bp, Artificial
  Synthetic oligonucleotide
ccgtacaggggggtacgtcatccgtacaggggggtacgtcacaaagaggcg

SEQ ID NO: 16702 - DNA, 58 bp, Artificial
  Synthetic oligonucleotide
aacgtacatcagatactttcgcggcattcgagaactacaacgattggtcaacccgatc

SEQ ID NO: 16703 - DNA, 51 bp, Artificial
  Synthetic oligonucleotide
cgacgaactactaaaaatttgcgaccgttatccttacaaagtacaaataaa

SEQ ID NO: 16704 - DNA, 57 bp, Artificial
  Synthetic oligonucleotide
gttgccatacgatgaccttttaaggatatgtgatcgttatcctttaagggttgagta

SEQ ID NO: 16705 - DNA, 56 bp, Artificial
  Synthetic oligonucleotide
tcgtactctcgtgaaggggttatatgcggggcggagttctaccttcaccattctaa

SEQ ID NO: 16706 - DNA, 57 bp, Artificial
  Synthetic oligonucleotide
ttctaatcatgtagtagtcgaacgggtaatggtattggttccctgttcctggcagtc

SEQ ID NO: 16707 - DNA, 59 bp, Artificial
  Synthetic oligonucleotide
gagtcttggattattgccgtgtgtccgaatccggctgaactaatagagtagtggcccca

SEQ ID NO: 16708 - DNA, 59 bp, Artificial
  Synthetic oligonucleotide
tttgcccgtccttgtctatcaccgttgagccttgagtcttgctcttctggtaaatgttg

SEQ ID NO: 16709 - DNA, 57 bp, Artificial
  Synthetic oligonucleotide
ttgtatggcgggaggagtagtttacataggggtcataggttagagctgtggccttag

SEQ ID NO: 16710 - DNA, 54 bp, Artificial
  Synthetic oligonucleotide
atggcgggaggagtagtttacataggggtcataggttagggcattggcctttgt

SEQ ID NO: 16711 - DNA, 57 bp, Artificial
  Synthetic oligonucleotide
tgctgccctgtgttcgtactcttgtgaaggggttaaatgcggggcgtagctctacct

SEQ ID NO: 16712 - DNA, 53 bp, Artificial
  Synthetic oligonucleotide
cccggtggcccccctccaacgagtggagcatgtacaggggggtacgtcatccg

SEQ ID NO: 16713 - DNA, 53 bp, Artificial
  Synthetic oligonucleotide
ccccctccaacgagtggagcatgtacaggggggtacgtcatccgtacaggggg

SEQ ID NO: 16714 - DNA, 57 bp, Artificial
  Synthetic oligonucleotide
gagtataagggtgggatgacgcagttcgttgctaagacccttattatcacgtctaac

SEQ ID NO: 16715 - DNA, 49 bp, Artificial
  Synthetic oligonucleotide
agaccgaccagcccggagggcccagtcagtgtcggggggggggccccgg

SEQ ID NO: 16716 - DNA, 59 bp, Artificial
  Synthetic oligonucleotide
cgcttgttgcaatgtgatcttgtccttgcgacgtaggcggaagtagtaaatacggctac

SEQ ID NO: 16717 - DNA, 57 bp, Artificial
  Synthetic oligonucleotide
ccgcgttgggtcctccttgtagtgggatccagccggttctggcactgtttagccaca

SEQ ID NO: 16718 - DNA, 59 bp, Artificial
  Synthetic oligonucleotide
tataaatgtgaggtggattgtaccgccctctaccgtcgtatcgatcggtatttggtgca

SEQ ID NO: 16719 - DNA, 55 bp, Artificial
  Synthetic oligonucleotide
aacggtatgttctgtgtctgtttaacgtggaatactgtaaagcggcgtcttattc

SEQ ID NO: 16720 - DNA, 54 bp, Artificial
  Synthetic oligonucleotide
ggggtcggggggacattgagggccgtccaagcgaactgtctgaacttgacgtag

SEQ ID NO: 16721 - DNA, 59 bp, Artificial
  Synthetic oligonucleotide
cgcctgtgtcaatgtgatcttgtccttgcgacgtaggcggaagtagtaaatacggctac

SEQ ID NO: 16722 - DNA, 59 bp, Artificial
  Synthetic oligonucleotide
tagccgtgcccattgggagaaagctcgcggttcggacagcgacaacgaggcgtactgta

SEQ ID NO: 16723 - DNA, 59 bp, Artificial
  Synthetic oligonucleotide
ctgtgacccgaagccactgttccggagatttactcgtgtatggtggtacaacattgaca

SEQ ID NO: 16724 - DNA, 56 bp, Artificial
  Synthetic oligonucleotide
gtcctggtcgtatttactgttttcgaacgcagtgccaaggcctacgtggtccacat

SEQ ID NO: 16725 - DNA, 53 bp, Artificial
  Synthetic oligonucleotide
gccgttaggcccgagagaccgaccagcccggagggcgtagtcagtgtcggggg

SEQ ID NO: 16726 - DNA, 54 bp, Artificial
  Synthetic oligonucleotide
cttctatgggtggatccctttctgtgagttgctccgcctaaccgaccggtaccc

SEQ ID NO: 16727 - DNA, 56 bp, Artificial
  Synthetic oligonucleotide
ggaagacgaatgtacacgtcattgtggggccacctgggtgtggtaaaagcaaatgg

SEQ ID NO: 16728 - DNA, 58 bp, Artificial
  Synthetic oligonucleotide
ccaatgtacacgtcattgtggggccacctgggtgtggtaaaagcaaatgggctgctaa

SEQ ID NO: 16729 - DNA, 58 bp, Artificial
  Synthetic oligonucleotide
gtccccccgatgcctggtacagcgaggaaaagtgctgtgtccaagcgctcttccggcg

SEQ ID NO: 16730 - DNA, 58 bp, Artificial
  Synthetic oligonucleotide
tgcgtcaaggttatcttgtccttgcgacgtagacggaagtagtatatccggctactcc

SEQ ID NO: 16731 - DNA, 54 bp, Artificial
  Synthetic oligonucleotide
ctggattacgggtatactacaaacctagaggagactggtgggacggatacaacg

SEQ ID NO: 16732 - DNA, 58 bp, Artificial
  Synthetic oligonucleotide
gctcgccagtagacctgacggttcattttacgttccagcaactcaacatggtaactcc

SEQ ID NO: 16733 - DNA, 58 bp, Artificial
  Synthetic oligonucleotide
cggaagtgtatagtgagcacagcactccttgcaccgagcctagtacggataaaacccc

SEQ ID NO: 16734 - DNA, 58 bp, Artificial
  Synthetic oligonucleotide
cacagttttgggtactttagcttgcactgttaggttacatgcaggttcggctacagaa

SEQ ID NO: 16735 - DNA, 55 bp, Artificial
  Synthetic oligonucleotide
acttgcactgaacccgtccctgccaaaatacctcctggtgaacaatttcgtcacc

SEQ ID NO: 16736 - DNA, 56 bp, Artificial
  Synthetic oligonucleotide
gtgaaacttttaagcgcgttggtgattacgttcttcttggtaatgcagtggctaag

SEQ ID NO: 16737 - DNA, 57 bp, Artificial
  Synthetic oligonucleotide
cttcaatttggagggtgttaacggtggttcactctacgtcaacaatcatgcgtttca

SEQ ID NO: 16738 - DNA, 53 bp, Artificial
  Synthetic oligonucleotide
gtaccccttaagtcaaacgtttgtataacacgctgtaatttaggtggtgcagt

SEQ ID NO: 16739 - DNA, 57 bp, Artificial
  Synthetic oligonucleotide
tccccaacaagtctgaaagcgtcactgcctgtttcggcccgcgtgatgtttcccgta

SEQ ID NO: 16740 - DNA, 58 bp, Artificial
  Synthetic oligonucleotide
gtgtggcgctgacgggaaacctgttcttcaggaatccgagtgggagtatacagatttc

SEQ ID NO: 16741 - DNA, 56 bp, Artificial
  Synthetic oligonucleotide
accacactttctggcataggcggccgtaatgtttattgttacagagaaggcgtagt

SEQ ID NO: 16742 - DNA, 58 bp, Artificial
  Synthetic oligonucleotide
tgttgcggactgggaaaaggtccatatgtactcggcttcacttgtcggtggtatgacc

SEQ ID NO: 16743 - DNA, 51 bp, Artificial
  Synthetic oligonucleotide
actcctaggaacggggttgagagaacggcgcaccagggttccgtccctgtt

SEQ ID NO: 16744 - DNA, 56 bp, Artificial
  Synthetic oligonucleotide
aacactttgaggcgcggtgctgttttgggttatatcggagccaccatacgtttaca

SEQ ID NO: 16745 - DNA, 59 bp, Artificial
  Synthetic oligonucleotide
caccacgcaccatgtaccaaccaagagttgctaccagtgccgattttgttcaaatagtg

SEQ ID NO: 16746 - DNA, 59 bp, Artificial
  Synthetic oligonucleotide
ataggcaatttagcgactaatcacgaccgctactgtagtgttcatcagggagcccacgt

SEQ ID NO: 16747 - DNA, 53 bp, Artificial
  Synthetic oligonucleotide
ccgccctccggaacggtcataaccccctcccgaacgtgcgcttgacgtgactg

SEQ ID NO: 16748 - DNA, 51 bp, Artificial
  Synthetic oligonucleotide
gttaacggttactagggttgagggtaagagtttttacacctctaatggaca

SEQ ID NO: 16749 - DNA, 59 bp, Artificial
  Synthetic oligonucleotide
aactacaccttacgcaactatcacaggacaactattccagttatgaatgtaccaattga

SEQ ID NO: 16750 - DNA, 57 bp, Artificial
  Synthetic oligonucleotide
cccctcaggttgtcgccatacctatgcagtacccatcaggttttcctcctggattcc

SEQ ID NO: 16751 - DNA, 57 bp, Artificial
  Synthetic oligonucleotide
gcgtacccgaagaatatcccgtagtcgtagagactgtgaaggagggtgtgcctcagt

SEQ ID NO: 16752 - DNA, 55 bp, Artificial
  Synthetic oligonucleotide
caattcgcacaccttttgcctttacttaaacgcggccaaccatgggatgtggttc

SEQ ID NO: 16753 - DNA, 59 bp, Artificial
  Synthetic oligonucleotide
cctagtgtgtggagtcctggttttaatatgcctgagctgtataaagtccaaaattgcca

SEQ ID NO: 16754 - DNA, 59 bp, Artificial
  Synthetic oligonucleotide
ctccttaaagagtttcttgtgagactgtgtggaggcgatgtctctgacggtcaatggtt

SEQ ID NO: 16755 - DNA, 58 bp, Artificial
  Synthetic oligonucleotide
gggattttgtgacttgaagggtaagtatgtccaaatacctaccacatgcactaatgac

SEQ ID NO: 16756 - DNA, 58 bp, Artificial
  Synthetic oligonucleotide
tgaagggtatactgttgtaattggcgatgtggcgtactttgttagtgacggctacttc

SEQ ID NO: 16757 - DNA, 59 bp, Artificial
  Synthetic oligonucleotide
caaacgtgatggtgtgcaagttggttattgtgtccatggtattaagtactattcacgtg

SEQ ID NO: 16758 - DNA, 58 bp, Artificial
  Synthetic oligonucleotide
tgcctacccattgtctaagcatcctaaacctgagtacaggaaggtgttttacgcattg

SEQ ID NO: 16759 - DNA, 56 bp, Artificial
  Synthetic oligonucleotide
tggtggttatataccctccgactttgcattcaataattggttccttctaactaata

SEQ ID NO: 16760 - DNA, 57 bp, Artificial
  Synthetic oligonucleotide
atgggttgtgcaaattacgcggcaagtttgtacaagtgcctgtaggtataaaagatc

SEQ ID NO: 16761 - DNA, 54 bp, Artificial
  Synthetic oligonucleotide
actacctcggaacaggacctcacggcgacctccgttataggactcgtactgagg

SEQ ID NO: 16762 - DNA, 54 bp, Artificial
  Synthetic oligonucleotide
aatggttccacattagtggacggggtctctagactttatcaaccactccgttta

SEQ ID NO: 16763 - DNA, 58 bp, Artificial
  Synthetic oligonucleotide
ctatgttctgcgtcaacctaacttggttctttattctgataatggtgtctttcgtgta

SEQ ID NO: 16764 - DNA, 54 bp, Artificial
  Synthetic oligonucleotide
ctaaagggtatgttatgggcttgttccgttcatacaagactaaacgttatgttg

SEQ ID NO: 16765 - DNA, 57 bp, Artificial
  Synthetic oligonucleotide
gatatgttacgtcatcttataaaggatgttgacaaccctgttcttatgggttgggat

SEQ ID NO: 16766 - DNA, 56 bp, Artificial
  Synthetic oligonucleotide
aacagtcgtgtaagctataaacacatagtttatgtaggagacccacaacagttacc

SEQ ID NO: 16767 - DNA, 57 bp, Artificial
  Synthetic oligonucleotide
acggtcagtgtactggtgcttatgaagccagggtttatgtaactagtggtagttgtc

SEQ ID NO: 16768 - DNA, 58 bp, Artificial
  Synthetic oligonucleotide
taaacgttgtgtctttcctggttacatctatcaggctaaggaccatgtggattacagg

SEQ ID NO: 16769 - DNA, 59 bp, Artificial
  Synthetic oligonucleotide
agatgttgatgggttgtgcaaattacgcggcaggtttgtacaagtgcctgtaggtataa

SEQ ID NO: 16770 - DNA, 59 bp, Artificial
  Synthetic oligonucleotide
agcttatgtgttgcttagggccagacatttttcttggtacatgttatagatgtcctaag

SEQ ID NO: 16771 - DNA, 54 bp, Artificial
  Synthetic oligonucleotide
aaacaaaccgagtggcgcggacaccgtattgttgagaatctaatctaaacttta

SEQ ID NO: 16772 - DNA, 56 bp, Artificial
  Synthetic oligonucleotide
tgttaaagtggccactaagtatgttaagaaggttactggcaaactggccgtgcgct

SEQ ID NO: 16773 - DNA, 59 bp, Artificial
  Synthetic oligonucleotide
tgacgtgttccgtcacgtacttgtgtccttagttgccccacgctgttctgtcagtgtgg

SEQ ID NO: 16774 - DNA, 59 bp, Artificial
  Synthetic oligonucleotide
gcacacgtgattttgcgatgcgtaacgttagaggctggattggtatggacgtagagggg

SEQ ID NO: 16775 - DNA, 59 bp, Artificial
  Synthetic oligonucleotide
gcacacttaccgcaatttgtgactgtcgccaaacctggcacgactataatttatactcg

SEQ ID NO: 16776 - DNA, 58 bp, Artificial
  Synthetic oligonucleotide
acttcgttgtggagactgtcttaggagaccacttttatgtacgaaatgtgcttatgac

SEQ ID NO: 16777 - DNA, 57 bp, Artificial
  Synthetic oligonucleotide
caatttaaacacctcgtgccactaatgaataagggtgcgacttggcctattgtacga

SEQ ID NO: 16778 - DNA, 55 bp, Artificial
  Synthetic oligonucleotide
tgtgtgaaacacggggtcacctccccccacatacctctaagggcttttgagccta

SEQ ID NO: 16779 - DNA, 52 bp, Artificial
  Synthetic oligonucleotide
cggggttgagagaacgacgcgccagggttccgtccctgtttggtaagtcgtc

SEQ ID NO: 16780 - DNA, 53 bp, Artificial
  Synthetic oligonucleotide
cggggtcacctccccccacatacctctaagggcttttgagcctagcgttgggc

SEQ ID NO: 16781 - DNA, 58 bp, Artificial
  Synthetic oligonucleotide
cggcttactaagtatactatgatggacttttgctacgctttgaggcattttgacccaa

SEQ ID NO: 16782 - DNA, 55 bp, Artificial
  Synthetic oligonucleotide
cgtacagagagccttgaaccgagccattaccggagcccacaaggtaatccggttg

SEQ ID NO: 16783 - DNA, 54 bp, Artificial
  Synthetic oligonucleotide
ctagcgttgggctacgttctcgcataaggtcggctatacgacgtttgtaggggg

SEQ ID NO: 16784 - DNA, 57 bp, Artificial
  Synthetic oligonucleotide
tctagatctaaccagggtacaagggaccctgacaagtttgaacaatatccactacga

SEQ ID NO: 16785 - DNA, 55 bp, Artificial
  Synthetic oligonucleotide
ggcttttgagcctagcgttgggctacgttctcgcgtaaggtcggctatacgacgt

SEQ ID NO: 16786 - DNA, 56 bp, Artificial
  Synthetic oligonucleotide
cccacatacctctaagggcttttgagcctagcgttgggctacgttctcgcataagg

SEQ ID NO: 16787 - DNA, 55 bp, Artificial
  Synthetic oligonucleotide
tttacgtgaaatcaacctacaggctagggatgagtgctttttaaacgagtcaggg

SEQ ID NO: 16788 - DNA, 55 bp, Artificial
  Synthetic oligonucleotide
gatgagtgctttttaaacgagtcaggggtactagtggagtagcccgtctagtacc

SEQ ID NO: 16789 - DNA, 53 bp, Artificial
  Synthetic oligonucleotide
caggggtactagtggagtagcccgtctagtacccctaggttctggtgtagaac

SEQ ID NO: 16790 - DNA, 56 bp, Artificial
  Synthetic oligonucleotide
atgactttaatgtagaggatgcttgtgaggaggttcatcttaacccgaagggtaag

SEQ ID NO: 16791 - DNA, 57 bp, Artificial
  Synthetic oligonucleotide
ctgtcgttgtgtgcgttttctgtagatcctaagaaaacgtacctggattatatacaa

SEQ ID NO: 16792 - DNA, 56 bp, Artificial
  Synthetic oligonucleotide
cagctagttccgtctagttgttacgtggatcctagttccgtctaggtgaaacctca

SEQ ID NO: 16793 - DNA, 57 bp, Artificial
  Synthetic oligonucleotide
acttccacaggagcgttatactaagctcgtaggtttgtacccagctatgaatgtacc

SEQ ID NO: 16794 - DNA, 57 bp, Artificial
  Synthetic oligonucleotide
tttttacggctcggttgtgttggatgatttgtacgcacctgttagcgtggtgtgccc

SEQ ID NO: 16795 - DNA, 58 bp, Artificial
  Synthetic oligonucleotide
taatggatcctttacctctcctcctatgctcttcttataagtcactcaaccggtgaaa

SEQ ID NO: 16796 - DNA, 53 bp, Artificial
  Synthetic oligonucleotide
gggactggttggggtctgggtggtaaatggtggacatccgactggggtgttct

SEQ ID NO: 16797 - DNA, 53 bp, Artificial
  Synthetic oligonucleotide
cgactgccttcccagacccaaaaacacggccccccggactcgcaacacccaga

SEQ ID NO: 16798 - DNA, 58 bp, Artificial
  Synthetic oligonucleotide
acagagtttttgagtgatgtgccggtagcaacattgccagcggattttttagtaccta

SEQ ID NO: 16799 - DNA, 58 bp, Artificial
  Synthetic oligonucleotide
cctctagaaggtcaaagtcctagtccgatcaacagttttctacaccacgtcatcgcat

SEQ ID NO: 16800 - DNA, 56 bp, Artificial
  Synthetic oligonucleotide
actcgtgttaatatggggtttctagtggaagtcaggcgaattgacattgaaccttg

SEQ ID NO: 16801 - DNA, 57 bp, Artificial
  Synthetic oligonucleotide
tactttccgacatgaattagtgctcacccggctagcccaccacataccgttaatttc

SEQ ID NO: 16802 - DNA, 58 bp, Artificial
  Synthetic oligonucleotide
attcatcatactcccttaatccgcaactacgcaactgtaaactcccgaaacatatcta

SEQ ID NO: 16803 - DNA, 54 bp, Artificial
  Synthetic oligonucleotide
accagttggagagtttaactgatagggaattactcctactaatcgcccgtaaga

SEQ ID NO: 16804 - DNA, 56 bp, Artificial
  Synthetic oligonucleotide
gcctattggaggagccggcacaaaggacggcccaaaaatcgatcgaccgaagaaca

SEQ ID NO: 16805 - DNA, 56 bp, Artificial
  Synthetic oligonucleotide
ggtacttgtgttgcggtaaacgaagaattcaacggctccaaattgatttctcagac

SEQ ID NO: 16806 - DNA, 58 bp, Artificial
  Synthetic oligonucleotide
tcctagaggtaacgtcggcaatccatattagccccaatctgttgggaatctatttgac

SEQ ID NO: 16807 - DNA, 57 bp, Artificial
  Synthetic oligonucleotide
cccaccacattgcgtaacagaagataaccgaaataacccaccggattgtgctaatgc

SEQ ID NO: 16808 - DNA, 59 bp, Artificial
  Synthetic oligonucleotide
aacgggagctagagcaaggagttgtatttagcgacctatgcaacttcctagtgactcca

SEQ ID NO: 16809 - DNA, 56 bp, Artificial
  Synthetic oligonucleotide
cttccctgtaccttcaccactatgccggccctttccaccgggttgatacacctgca

SEQ ID NO: 16810 - DNA, 55 bp, Artificial
  Synthetic oligonucleotide
ccatatgggcgagacctgattataacccacctttactggagacttggaaagcccc

SEQ ID NO: 16811 - DNA, 58 bp, Artificial
  Synthetic oligonucleotide
gtcgggtccctggctcactccccgctgcatggtagactacccctaccggctgtggcac

SEQ ID NO: 16812 - DNA, 55 bp, Artificial
  Synthetic oligonucleotide
ttgcccggaattccctttgtgtcctgccaacgcgggtataggggagtctggcgag

SEQ ID NO: 16813 - DNA, 55 bp, Artificial
  Synthetic oligonucleotide
gaggggccgcactggtagggggaggttaggcatataccggtatgtcaccccagga

SEQ ID NO: 16814 - DNA, 57 bp, Artificial
  Synthetic oligonucleotide
ggagaggggctgttccagtcaacgctaggctgtgtgggtcggctagaccggacccaa

SEQ ID NO: 16815 - DNA, 57 bp, Artificial
  Synthetic oligonucleotide
gtacttggtcaaaacggaatcgtggatcttgagaaaccctgggtatgctctagtggc

SEQ ID NO: 16816 - DNA, 59 bp, Artificial
  Synthetic oligonucleotide
acgttgtggggtgatggagtgatcgagagtgagctcattatcccagttactttggccgg

SEQ ID NO: 16817 - DNA, 58 bp, Artificial
  Synthetic oligonucleotide
actggggtagtgtgaaagaggaccgcctatgttatggagggccatggaagcttgggca

SEQ ID NO: 16818 - DNA, 59 bp, Artificial
  Synthetic oligonucleotide
catcatatccagggaagatcagcgggggagcggacaagtggtaacctacgcgctaaaca

SEQ ID NO: 16819 - DNA, 59 bp, Artificial
  Synthetic oligonucleotide
actcacagtgctcgcaacggccactccccctggctcagtaacggtccctcatccaaaca

SEQ ID NO: 16820 - DNA, 59 bp, Artificial
  Synthetic oligonucleotide
gcgaggccctactgctggcattacccgcctaaaccgtgcggcatagtgtcagcccggtc

SEQ ID NO: 16821 - DNA, 58 bp, Artificial
  Synthetic oligonucleotide
ggagtgttggccctctttgtgttattggatctcattgtctacaaacggctctctcccc

SEQ ID NO: 16822 - DNA, 57 bp, Artificial
  Synthetic oligonucleotide
ctcttcggggcatgggcttaaacgcagttgcttactacagagggctcgacgtctccg

SEQ ID NO: 16823 - DNA, 59 bp, Artificial
  Synthetic oligonucleotide
ttgcctgcaccggagttcttctcctgggtggatggggtgcaaatccacaggttcgctcc

SEQ ID NO: 16824 - DNA, 57 bp, Artificial
  Synthetic oligonucleotide
gtggtatcggcgaaggaggtctgtggcccggtatattgtttcacacccagtcctgtg

SEQ ID NO: 16825 - DNA, 58 bp, Artificial
  Synthetic oligonucleotide
tgggcgaaacacatgtggaactttgtcagtggtatccaatacctggcggggttatcta

SEQ ID NO: 16826 - DNA, 58 bp, Artificial
  Synthetic oligonucleotide
cacgcccccgactgcaagcctttgctgagagacgaggttaccttcacggtgggcctca

SEQ ID NO: 16827 - DNA, 58 bp, Artificial
  Synthetic oligonucleotide
atttggggcctatatgtcaaaagcacacggaatcaaccccaacatcagaacaggagtc

SEQ ID NO: 16828 - DNA, 57 bp, Artificial
  Synthetic oligonucleotide
gcaaacgaacatactcagatagaggctggggtaatggttgtgggctctttggaaagg

SEQ ID NO: 16829 - DNA, 58 bp, Artificial
  Synthetic oligonucleotide
ccttggctctcgttggggcagcgatacatccatttgccctattactggtcctaggagg

SEQ ID NO: 16830 - DNA, 57 bp, Artificial
  Synthetic oligonucleotide
cagagaagagggcgcattggacgaaacccaaacagggatggagattcctactactat

SEQ ID NO: 16831 - DNA, 56 bp, Artificial
  Synthetic oligonucleotide
aataatgcgaccagacgaaagctacgtgatttccacgccgaacggacttcttgagt

SEQ ID NO: 16832 - DNA, 57 bp, Artificial
  Synthetic oligonucleotide
acggaccggatggagtggaattcacgaacttgacggacaacagtagagtgtcgacag

SEQ ID NO: 16833 - DNA, 58 bp, Artificial
  Synthetic oligonucleotide
tgcgtttgacaagtaccgatcccgaggagtgaacgagacagacaagggtgatttcgtc

SEQ ID NO: 16834 - DNA, 58 bp, Artificial
  Synthetic oligonucleotide
actacgtctcaggtccgcgagcgaacatcgtcggctcagtttttcacgtcttaggagc

SEQ ID NO: 16835 - DNA, 53 bp, Artificial
  Synthetic oligonucleotide
gtagggccatcgcaagggaggattttcctcgggtactgaccataccccgaccc

SEQ ID NO: 16836 - DNA, 59 bp, Artificial
  Synthetic oligonucleotide
aaacagagtgtggaactctttccagattgaggagtttggcatgggagtgttcacaacac

SEQ ID NO: 16837 - DNA, 58 bp, Artificial
  Synthetic oligonucleotide
ttatcccagcgggacctctggttcacccattgtaaatcgcagtggtgaagtggtggga

SEQ ID NO: 16838 - DNA, 58 bp, Artificial
  Synthetic oligonucleotide
gtgctttgaaggacccgaagagcacgagatacttaatgacaacggtgaaactgtgaag

SEQ ID NO: 16839 - DNA, 58 bp, Artificial
  Synthetic oligonucleotide
ggagtgttgtgcgcgttagtaggagccctagggaatgtgcaaagtaccccactagcag

SEQ ID NO: 16840 - DNA, 58 bp, Artificial
  Synthetic oligonucleotide
atatatcacagcgtgtcgcgagcccgaccccgcctcttactcttaagcctacaactac

SEQ ID NO: 16841 - DNA, 58 bp, Artificial
  Synthetic oligonucleotide
tgggcagcgtggtagtggtcgggagggtggtgttgtcgggacgtcctgctatcatacc

SEQ ID NO: 16842 - DNA, 58 bp, Artificial
  Synthetic oligonucleotide
aggaggggtaacctcgtgctcctaggccccgctgatgatatgaagagtggaggttggc

SEQ ID NO: 16843 - DNA, 55 bp, Artificial
  Synthetic oligonucleotide
cccgagcctcggagcggtcacggctcctcttcggagggccgttgactacttagcg

SEQ ID NO: 16844 - DNA, 57 bp, Artificial
  Synthetic oligonucleotide
cgaggccccctactggcaactggtttggctgcacctggatgaattccacagggtttg

SEQ ID NO: 16845 - DNA, 58 bp, Artificial
  Synthetic oligonucleotide
aaggtcatcacgtggggggctgacacggccgcatgtggggacatacttgccggccttc

SEQ ID NO: 16846 - DNA, 55 bp, Artificial
  Synthetic oligonucleotide
ggttgcgaactgggctaaagtcctcgctgtcttggtcctttttgctggggtcgac

SEQ ID NO: 16847 - DNA, 58 bp, Artificial
  Synthetic oligonucleotide
ggcacgacctgactacaatccgcccctctgtgagacttggaagaagccggactacacc

SEQ ID NO: 16848 - DNA, 57 bp, Artificial
  Synthetic oligonucleotide
ataggttcgcgcccccttgcaagcctttgctacgagacgaggtgtcgttcagagtag

SEQ ID NO: 16849 - DNA, 59 bp, Artificial
  Synthetic oligonucleotide
gaccccgcggtctgaagtgcacggcccagcctggctgaagctgtaggtcaggggaagga

SEQ ID NO: 16850 - DNA, 55 bp, Artificial
  Synthetic oligonucleotide
ctaggctcgtcgtcttggcaacggccactccccccggaagtgtcacagtccccca

SEQ ID NO: 16851 - DNA, 59 bp, Artificial
  Synthetic oligonucleotide
ccggatgtgcctggtatgagcttacccctgctgagacaaccgttaggttgcgcgcttac

SEQ ID NO: 16852 - DNA, 56 bp, Artificial
  Synthetic oligonucleotide
ggaactttcccgataaacggcagcacgacgggccctagcgtccctgtgccagcgcc

SEQ ID NO: 16853 - DNA, 57 bp, Artificial
  Synthetic oligonucleotide
cccattcagcgcgttccaagtacggctatggggccaaggaagtccgctcccttagca

SEQ ID NO: 16854 - DNA, 57 bp, Artificial
  Synthetic oligonucleotide
cgggtgggcccctcatagctgaatgggcagggtacgcggattggaaatccaatgcct

SEQ ID NO: 16855 - DNA, 58 bp, Artificial
  Synthetic oligonucleotide
cccagtggagaatttttgacctcgacatctgcccaatggtaagttggagcttgtatgt

SEQ ID NO: 16856 - DNA, 57 bp, Artificial
  Synthetic oligonucleotide
tcaccttctccgtgggcctcaactcgtttgtggtgggatcccaactgccctgtgaac

SEQ ID NO: 16857 - DNA, 59 bp, Artificial
  Synthetic oligonucleotide
atgattgccctaactcgagtattgtgtacgagacggccgataccattctacactctccg

SEQ ID NO: 16858 - DNA, 55 bp, Artificial
  Synthetic oligonucleotide
atcctggtataacaggatacccgggtactcagaacaagtgaaaggaccatggaag

SEQ ID NO: 16859 - DNA, 58 bp, Artificial
  Synthetic oligonucleotide
aggttcactacgaggcataggaaacccacctatgagaaggatgtagaccttggagctg

SEQ ID NO: 16860 - DNA, 55 bp, Artificial
  Synthetic oligonucleotide
aacgacagcctacacacggggtttatcgctggcctcctctacgcccacaagttta

SEQ ID NO: 16861 - DNA, 55 bp, Artificial
  Synthetic oligonucleotide
gtcgcccatgacggtgctggaaagagggtctactaccttacccgtgaccccacaa

SEQ ID NO: 16862 - DNA, 59 bp, Artificial
  Synthetic oligonucleotide
ggtgtcgccaaggggagccgcgccatctggtatatgtggttggggagccggtatctgga

SEQ ID NO: 16863 - DNA, 57 bp, Artificial
  Synthetic oligonucleotide
gggcgccaccctctgctcggccctctatgtgggggacctgtgcgggtctgtctttct

SEQ ID NO: 16864 - DNA, 56 bp, Artificial
  Synthetic oligonucleotide
agcgcaactgcacgtgtgggttccccccctcaacgtccgaggggggcgtgatgcca

SEQ ID NO: 16865 - DNA, 54 bp, Artificial
  Synthetic oligonucleotide
gtggtgaactcggagctttttcttccggcgagtctccgaggacccaggtcctgg

SEQ ID NO: 16866 - DNA, 59 bp, Artificial
  Synthetic oligonucleotide
gagtggccatcaagtccctcactgagaggctttatgttgggggccctcttaccaattca

SEQ ID NO: 16867 - DNA, 57 bp, Artificial
  Synthetic oligonucleotide
caaagtgtcgaccttcaatggtacttgggattgcccgaccgattgcttcaggaaaca

SEQ ID NO: 16868 - DNA, 58 bp, Artificial
  Synthetic oligonucleotide
cttgagacgaccatgaggtctcccgtgttctcagacaattccacccctccggctgttc

SEQ ID NO: 16869 - DNA, 50 bp, Artificial
  Synthetic oligonucleotide
tcggcctaattggggccccacggacccccggcgtaggtcgcgtaatttgg

SEQ ID NO: 16870 - DNA, 58 bp, Artificial
  Synthetic oligonucleotide
atttactcctgtgcctactcctactttccgtaggggtaggcatcttcctgctgcctgc

SEQ ID NO: 16871 - DNA, 55 bp, Artificial
  Synthetic oligonucleotide
tgggaagtgaagaaacaacgggctggagtattgtgggatgtcccttcacccccac

SEQ ID NO: 16872 - DNA, 57 bp, Artificial
  Synthetic oligonucleotide
tatgacgctaacaaaattgtgtacacagttaaagtagagccgcatacgggggattac

SEQ ID NO: 16873 - DNA, 54 bp, Artificial
  Synthetic oligonucleotide
acgagtcttcatggaggctatgactaggtactctgccccccccggggacccgcc

SEQ ID NO: 16874 - DNA, 59 bp, Artificial
  Synthetic oligonucleotide
gatgctatgtggacgagggcatgcccaagacacaccttaaccctagcgggggtcgctag

SEQ ID NO: 16875 - DNA, 50 bp, Artificial
  Synthetic oligonucleotide
accgggatacaaaccacgggtggagaaccggactccccacaattgaaaac

SEQ ID NO: 16876 - DNA, 57 bp, Artificial
  Synthetic oligonucleotide
ggatggcttaagccctgagtacagggtagtcgtcagtggttcgacgcctcggtataa

SEQ ID NO: 16877 - DNA, 58 bp, Artificial
  Synthetic oligonucleotide
ggatgaggtctcgttctgcgttgggcttaattcatttgtcgtcgggtctcagcttcct

SEQ ID NO: 16878 - DNA, 58 bp, Artificial
  Synthetic oligonucleotide
tctttagtctcagcagggagtggaaaggtggacaacttcacaatgggagtcctgtgtt

SEQ ID NO: 16879 - DNA, 57 bp, Artificial
  Synthetic oligonucleotide
acctgaaaggctcctcagggggcccactgctgtgccccgcgggacacgccgtaggca

SEQ ID NO: 16880 - DNA, 59 bp, Artificial
  Synthetic oligonucleotide
caagacggtgtctgaaaccggtaatactaaaagatggtccagagcgtgtcattctagca

SEQ ID NO: 16881 - DNA, 58 bp, Artificial
  Synthetic oligonucleotide
gtccaggaagaccttcgtggaactcatgaggaggggtgacctcccagtctggctagcc

SEQ ID NO: 16882 - DNA, 57 bp, Artificial
  Synthetic oligonucleotide
acggttgcctagtcccctattgggctagtgtaagagaggacttgatatcgtatggag

SEQ ID NO: 16883 - DNA, 58 bp, Artificial
  Synthetic oligonucleotide
acgtgcaagtcggagacgagtaccacttttctgggccaacaagcgaggacgaccatga

SEQ ID NO: 16884 - DNA, 51 bp, Artificial
  Synthetic oligonucleotide
caccggccgtaccgcagacctaccaagtagggtacctccacgcccccaccg

SEQ ID NO: 16885 - DNA, 57 bp, Artificial
  Synthetic oligonucleotide
tgtcctggattgtccctttggctggactaatggggggagagggttctggaatcaggc

SEQ ID NO: 16886 - DNA, 58 bp, Artificial
  Synthetic oligonucleotide
aggaacagcgcacgttacgcgtcctggaaatgacttctgactggctgcaccggggacc

SEQ ID NO: 16887 - DNA, 54 bp, Artificial
  Synthetic oligonucleotide
ccctcaaaggatcatccggcggacccgtgctttgccctagggggcacgccgtgg

SEQ ID NO: 16888 - DNA, 57 bp, Artificial
  Synthetic oligonucleotide
accctcaaaggatcatccggcggacccgtgctctgccctaggggacatgccgtgggc

SEQ ID NO: 16889 - DNA, 58 bp, Artificial
  Synthetic oligonucleotide
tctcaacggaggatgcctgcagcttgacccctccccactcggctcgttccaagttcgg

SEQ ID NO: 16890 - DNA, 56 bp, Artificial
  Synthetic oligonucleotide
caatacccagaaatttgggcgtgcccccgcgagatcactagccgagtagtgttggg

SEQ ID NO: 16891 - DNA, 58 bp, Artificial
  Synthetic oligonucleotide
aatttaccaatgttgtgacctggcccccgaagccagacaggccataaggtcgctcaca

SEQ ID NO: 16892 - DNA, 59 bp, Artificial
  Synthetic oligonucleotide
cctttgtgacgaggggcacgcagtaggaatgctcgtgtcagtgcttcattcggggggta

SEQ ID NO: 16893 - DNA, 59 bp, Artificial
  Synthetic oligonucleotide
ctgctagccgagtagcgttgggttgcgaaaggccttgtggtactgcctgatagggcgct

SEQ ID NO: 16894 - DNA, 54 bp, Artificial
  Synthetic oligonucleotide
acaccaagccttgggaaacccttccaagagaggccatcacccatacggaggccc

SEQ ID NO: 16895 - DNA, 54 bp, Artificial
  Synthetic oligonucleotide
caggctccactcggtgttgccgaggggtactccccctgtctggccggacccgtc

SEQ ID NO: 16896 - DNA, 59 bp, Artificial
  Synthetic oligonucleotide
aggcccaagttccggacaaggcgtggagcactgggtatgagtggatcaccaacttcaca

SEQ ID NO: 16897 - DNA, 53 bp, Artificial
  Synthetic oligonucleotide
gcctgggattccctttgtgtcctgccaacgcgggtataggggggtctggcggg

SEQ ID NO: 16898 - DNA, 55 bp, Artificial
  Synthetic oligonucleotide
cgtactggggtagtgtgaaagaagaccgcatagcttacggaggcccatggaggtt

SEQ ID NO: 16899 - DNA, 55 bp, Artificial
  Synthetic oligonucleotide
agggttcgccctgtgcaaaacctggaggtttgaacggattgtcggcatggttgct

SEQ ID NO: 16900 - DNA, 58 bp, Artificial
  Synthetic oligonucleotide
atacacccgcaatcaaccctcaaattaccacacaacagaggtatagccgaggtcagga

SEQ ID NO: 16901 - DNA, 53 bp, Artificial
  Synthetic oligonucleotide
ttggccacaggaccaatcttgaccttgtgggaaggcaacccgggaaggttttg

SEQ ID NO: 16902 - DNA, 52 bp, Artificial
  Synthetic oligonucleotide
gtgaacggggtagttaaactgctgacaaaaccctgggacgtggttccaatgg

SEQ ID NO: 16903 - DNA, 55 bp, Artificial
  Synthetic oligonucleotide
gagaaagcgcacggtccacaggtgttggccctaccggtgtgaataagggcccgac

SEQ ID NO: 16904 - DNA, 55 bp, Artificial
  Synthetic oligonucleotide
aagcacccaatagaggaattcatagcccccgaggtaatgaaaggggaggatcttg

SEQ ID NO: 16905 - DNA, 56 bp, Artificial
  Synthetic oligonucleotide
gcacagggtaactgggagcccctcggttgcggggtgcacctaggtaccataccagc

SEQ ID NO: 16906 - DNA, 58 bp, Artificial
  Synthetic oligonucleotide
ccctcatgtgggggcaattctcggtgacgactgttcgtgtgaggaatccttcggagga

SEQ ID NO: 16907 - DNA, 53 bp, Artificial
  Synthetic oligonucleotide
gggccggcaatgtgaggacgcgcctccttagaggaggtaaaggttgggggcgt

SEQ ID NO: 16908 - DNA, 55 bp, Artificial
  Synthetic oligonucleotide
cagtcaggaacccccatattccaagagattaatggaacccttaaaccagtggcat

SEQ ID NO: 16909 - DNA, 50 bp, Artificial
  Synthetic oligonucleotide
ccccccccattcaagacttttagtgcattagttttagggtaaagggcaag

SEQ ID NO: 16910 - DNA, 59 bp, Artificial
  Synthetic oligonucleotide
gtacgtgcggttgcacacggagttcctgaggttaacgtggccatgctcataacacctaa

SEQ ID NO: 16911 - DNA, 59 bp, Artificial
  Synthetic oligonucleotide
gcaaggcgctcaacgcctcgtgtcgctaggagacaccgcgtgggactttggctccgtcg

SEQ ID NO: 16912 - DNA, 55 bp, Artificial
  Synthetic oligonucleotide
cccgtatggagagacgcccgtatgtttagagagggccgtgacataagggagtttg

SEQ ID NO: 16913 - DNA, 54 bp, Artificial
  Synthetic oligonucleotide
acccggaaagacaccggtgagtgggagccctcaaccggattcgctagctgggaa

SEQ ID NO: 16914 - DNA, 55 bp, Artificial
  Synthetic oligonucleotide
ccggagacgacgtatagcaggtgcgggtcgggaccttggttgactcccaggtgcc

SEQ ID NO: 16915 - DNA, 57 bp, Artificial
  Synthetic oligonucleotide
gcactaaggtccctgcggcttacgccagtcagggatataaggtgttagtgctaaacc

SEQ ID NO: 16916 - DNA, 54 bp, Artificial
  Synthetic oligonucleotide
cccgctctccctgtgtgggcccgtccggactacaaccccccgctcttagagcca

SEQ ID NO: 16917 - DNA, 53 bp, Artificial
  Synthetic oligonucleotide
ttccgcccgctctccctgtgtgggcccgtccggactacaaccccccactctta

SEQ ID NO: 16918 - DNA, 59 bp, Artificial
  Synthetic oligonucleotide
caacagacgcccttatgaccggctacacaggcgatttcgattccgtcatcgactgtaac

SEQ ID NO: 16919 - DNA, 53 bp, Artificial
  Synthetic oligonucleotide
tactcctactttccgtaggggtaggcatcttccttcttcccgctcggtaagcg

SEQ ID NO: 16920 - DNA, 58 bp, Artificial
  Synthetic oligonucleotide
cggccgctaagtgcatttgaccaaggttggggccctctgacatacgcgtccatgaaag

SEQ ID NO: 16921 - DNA, 57 bp, Artificial
  Synthetic oligonucleotide
actcacccaaacagcgggtggaccgtctgctcaaggtgtggcgctccaagaagaccc

SEQ ID NO: 16922 - DNA, 53 bp, Artificial
  Synthetic oligonucleotide
agtccgagtacggagttaaaactgactccggatgcccggaaggagctaggtgt

SEQ ID NO: 16923 - DNA, 53 bp, Artificial
  Synthetic oligonucleotide
gggtaatagacccaaggcggtgcttgaaaccggtaatactaaaagatggtcca

SEQ ID NO: 16924 - DNA, 56 bp, Artificial
  Synthetic oligonucleotide
gggggtaaggcggccatatgcggccgctacctcttcaactgggcggtgaagacaaa

SEQ ID NO: 16925 - DNA, 59 bp, Artificial
  Synthetic oligonucleotide
atggactgtctaccacggagctggcaacaagactctagccggctcacggggtccggtca

SEQ ID NO: 16926 - DNA, 57 bp, Artificial
  Synthetic oligonucleotide
gaacggtcccagcccagaggcaggcgccagcccataccaaaggcgcgcccgccaacg

SEQ ID NO: 16927 - DNA, 53 bp, Artificial
  Synthetic oligonucleotide
ctgacccccccgcattcagctcgttccaagtttggatacggggcgaaggacgt

SEQ ID NO: 16928 - DNA, 54 bp, Artificial
  Synthetic oligonucleotide
accggacttttctccgggaaaggacccttacggatggtgctagcattcatcacg

SEQ ID NO: 16929 - DNA, 55 bp, Artificial
  Synthetic oligonucleotide
atcggactgttttccgggaaaggacccttacggatggtgctagcattcatcacgt

SEQ ID NO: 16930 - DNA, 53 bp, Artificial
  Synthetic oligonucleotide
actataaccccccactgattgagacgtggaaaaagcctgactacgaaccaccc

SEQ ID NO: 16931 - DNA, 56 bp, Artificial
  Synthetic oligonucleotide
atccgtgatgaggtgagggaaatccaggttaccacccccctgacagacacagtggg

SEQ ID NO: 16932 - DNA, 56 bp, Artificial
  Synthetic oligonucleotide
taggggggatagccgcgcagcacttttaagcccacggccgattagcacgctaaagg

SEQ ID NO: 16933 - DNA, 59 bp, Artificial
  Synthetic oligonucleotide
tggacggagcaatataaattccaaccagactccccttcaaagttagcttctgccatcca

SEQ ID NO: 16934 - DNA, 59 bp, Artificial
  Synthetic oligonucleotide
aatgttgtgacttggcccccgaagccagacaggccataaagtcgctcacagagcggctt

SEQ ID NO: 16935 - DNA, 54 bp, Artificial
  Synthetic oligonucleotide
gcctacgagtcttcacggaggctatgactaggtattctgccccccccggggacc

SEQ ID NO: 16936 - DNA, 59 bp, Artificial
  Synthetic oligonucleotide
tatcacagcgtgtcccaggctcgaccccgtctcttactccttggcctactcctactcac

SEQ ID NO: 16937 - DNA, 54 bp, Artificial
  Synthetic oligonucleotide
tcccaggctcgaccccgtctcttactccttggcctactcctactcaccgtaggg

SEQ ID NO: 16938 - DNA, 56 bp, Artificial
  Synthetic oligonucleotide
ctaaaagtcaggtcggattaagccatagtacgggaaaaactatgctacctgtgagc

SEQ ID NO: 16939 - DNA, 58 bp, Artificial
  Synthetic oligonucleotide
aggcgtcgccagagctctggcacacggtgttagagtcctggaagacgggataaactac

SEQ ID NO: 16940 - DNA, 58 bp, Artificial
  Synthetic oligonucleotide
caccacaatctggtgtatgccaccacctcacgtagtgcttcccttcgtcaacggaagg

SEQ ID NO: 16941 - DNA, 57 bp, Artificial
  Synthetic oligonucleotide
acgagcttacgcctgctgagactacggtgaggctccgggcttatttcaacacgcccg

SEQ ID NO: 16942 - DNA, 54 bp, Artificial
  Synthetic oligonucleotide
ataaccccccgctgatagagacgtggaaaaagcctgactacgaaccacctgtgg

SEQ ID NO: 16943 - DNA, 55 bp, Artificial
  Synthetic oligonucleotide
cggaaaggtgctgagcgacttaaagctaccgggtttggcagtccaccgcaagaag

SEQ ID NO: 16944 - DNA, 52 bp, Artificial
  Synthetic oligonucleotide
agtcccttttttctcatgccaacgtgggtacaagggagtctggcggggggac

SEQ ID NO: 16945 - DNA, 55 bp, Artificial
  Synthetic oligonucleotide
taggcttatcgcccagggggggaaggccgctatatgcggcaagtacctctttaac

SEQ ID NO: 16946 - DNA, 56 bp, Artificial
  Synthetic oligonucleotide
gggtatctgccgaggactacgttgaggtacggaggttgggcgactgccactacgtg

SEQ ID NO: 16947 - DNA, 53 bp, Artificial
  Synthetic oligonucleotide
tagttggggccccacagacccccggcgtaggtcgcgcaatttgggtaaggtca

SEQ ID NO: 16948 - DNA, 59 bp, Artificial
  Synthetic oligonucleotide
gttgaaccggctttggccactctgccctatgccgccacagctctcaaattattcgcccc

SEQ ID NO: 16949 - DNA, 57 bp, Artificial
  Synthetic oligonucleotide
aggactagcggacggggggactagccatcgtggtgagatccctgagcggtctaagtc

SEQ ID NO: 16950 - DNA, 54 bp, Artificial
  Synthetic oligonucleotide
gattacccggtggggtcgcaattaccttgcgagcctgaaccggacgtggccgtg

SEQ ID NO: 16951 - DNA, 57 bp, Artificial
  Synthetic oligonucleotide
agaaggggtctagaggttagaggagaccctcccgagcactatagcggaccatattga

SEQ ID NO: 16952 - DNA, 57 bp, Artificial
  Synthetic oligonucleotide
actcctggacaggggccctcataacaccatgtgggcccgaggaggagaagttgccta

SEQ ID NO: 16953 - DNA, 56 bp, Artificial
  Synthetic oligonucleotide
cacccaggaggtccttcgcaagaggtggacggccagattgacgattcctgcggttt

SEQ ID NO: 16954 - DNA, 56 bp, Artificial
  Synthetic oligonucleotide
aaaagggatacaggggtgtatgggctggcacgggagttatgactactcggtgtcca

SEQ ID NO: 16955 - DNA, 54 bp, Artificial
  Synthetic oligonucleotide
cctcagaaccgtctcggaagaaggtccctgcttactggaggttggaagaccgtg

SEQ ID NO: 16956 - DNA, 54 bp, Artificial
  Synthetic oligonucleotide
gtctcctgagatcgcaacgacgccccacgtacgggaacgccgccaaaaccttcg

SEQ ID NO: 16957 - DNA, 59 bp, Artificial
  Synthetic oligonucleotide
ggcataggtcgcgcaatgtgggtaaggtcatcgataccctaacgtgcggctttgccgac

SEQ ID NO: 16958 - DNA, 57 bp, Artificial
  Synthetic oligonucleotide
ggtgaaatgtgtgaggacaccgtcacgtacaaatgccccctactggtcaataccgaa

SEQ ID NO: 16959 - DNA, 59 bp, Artificial
  Synthetic oligonucleotide
gaacccaacgaccttgacagcatccttagtcatgcttttagtccattacgcaataatag

SEQ ID NO: 16960 - DNA, 50 bp, Artificial
  Synthetic oligonucleotide
aggtactctgccccccccggggacccgccccaaccagaatacgacctgga

SEQ ID NO: 16961 - DNA, 52 bp, Artificial
  Synthetic oligonucleotide
caaggctagggaactcctaaggagaggggaaaccaacatggggttggcggtc

SEQ ID NO: 16962 - DNA, 56 bp, Artificial
  Synthetic oligonucleotide
cgtgtctagtgtgacaagtcggaattggacgtgggaaggtcctgaggagaacaccg

SEQ ID NO: 16963 - DNA, 54 bp, Artificial
  Synthetic oligonucleotide
cttatcgtatacccagacttaggggttcgtgtgtgcgagaaaatggccctttac

SEQ ID NO: 16964 - DNA, 58 bp, Artificial
  Synthetic oligonucleotide
gcaacggtgacctcccagtgtggttagcttacaaagtagcttctaacgggcacagcta

SEQ ID NO: 16965 - DNA, 53 bp, Artificial
  Synthetic oligonucleotide
gggtcgcgtatccctactggggagaaggtgtgggaccgtgggaacgtcacgct

SEQ ID NO: 16966 - DNA, 56 bp, Artificial
  Synthetic oligonucleotide
ccctgggtggtctaagtcctgagtacaggacagtcgtcagtagttcgacgtaagcg

SEQ ID NO: 16967 - DNA, 59 bp, Artificial
  Synthetic oligonucleotide
tagcagatggagggactaaccgtagtggcgagctccctgggtggtctaagtcctgagta

SEQ ID NO: 16968 - DNA, 58 bp, Artificial
  Synthetic oligonucleotide
cctactcctactttccgtaggggtaggcatcttcctgctgcctgcacggtaggcagct

SEQ ID NO: 16969 - DNA, 58 bp, Artificial
  Synthetic oligonucleotide
ttgagcaaaccgtgctgcctgtggctccatcgtggggatgtaaaaacccgggaggctg

SEQ ID NO: 16970 - DNA, 55 bp, Artificial
  Synthetic oligonucleotide
tcgattgggttagggagccctcctagcgacggccgaaccgtgttagccatacacg

SEQ ID NO: 16971 - DNA, 54 bp, Artificial
  Synthetic oligonucleotide
ccgtggctctcggcctagttggggccccacagacccccggcgtaggtcgcgcaa

SEQ ID NO: 16972 - DNA, 55 bp, Artificial
  Synthetic oligonucleotide
gtcggattaagccatagtacgggaaaaactatgctacctgtgagccccgtccaag

SEQ ID NO: 16973 - DNA, 52 bp, Artificial
  Synthetic oligonucleotide
actacaaccccccgctaatagagacgtggaaaaagcctgactacgaaccacc

SEQ ID NO: 16974 - DNA, 55 bp, Artificial
  Synthetic oligonucleotide
gtgagtccttcggacctcccagccataattgaaaggttacacgggcttgacgcct

SEQ ID NO: 16975 - DNA, 59 bp, Artificial
  Synthetic oligonucleotide
catcagtcgtgggcttttggatcacgctccagtacacaaaaagaggaggtgttctatgg

SEQ ID NO: 16976 - DNA, 58 bp, Artificial
  Synthetic oligonucleotide
cgactacaccagtgggtaagctcggagtgcactactccatgctccggttcctggttaa

SEQ ID NO: 16977 - DNA, 56 bp, Artificial
  Synthetic oligonucleotide
actacagttaggctacgagcgtacatgaacaccccggggcttcccgtgtgccagga

SEQ ID NO: 16978 - DNA, 50 bp, Artificial
  Synthetic oligonucleotide
cctgtccccccgtggctctcggcctagttggggccccacggacccccggc

SEQ ID NO: 16979 - DNA, 51 bp, Artificial
  Synthetic oligonucleotide
agcttgacccccccccactcggctcgttctagattcgggtacggggcaaag

SEQ ID NO: 16980 - DNA, 54 bp, Artificial
  Synthetic oligonucleotide
agaagcgcaactgcacgtgtgggttccccccctcaacgtccgaggggggcgcga

SEQ ID NO: 16981 - DNA, 58 bp, Artificial
  Synthetic oligonucleotide
gtacgcaactcctcgggcctttaccatgtcaccaatgattgccctaactcgagtattg

SEQ ID NO: 16982 - DNA, 57 bp, Artificial
  Synthetic oligonucleotide
aaaggaggaccaggacacgaagaacctatccctatgtcaacatatgggtggaatcta

SEQ ID NO: 16983 - DNA, 57 bp, Artificial
  Synthetic oligonucleotide
tgccccctctcgagggggagcctggtgaccctgacctaagctcaggttcttggtcca

SEQ ID NO: 16984 - DNA, 54 bp, Artificial
  Synthetic oligonucleotide
tttataggaatggagaccaggccactcctcaacccgtggtgcaggtccccccgg

SEQ ID NO: 16985 - DNA, 59 bp, Artificial
  Synthetic oligonucleotide
tgggagagttgagctcacagggaccagacgggtgaccacggcttctgcggcccaacgcc

SEQ ID NO: 16986 - DNA, 56 bp, Artificial
  Synthetic oligonucleotide
ctgcctgggatcccctttgtgtcctgccagcgcgggtacaagggggtctggcgagg

SEQ ID NO: 16987 - DNA, 57 bp, Artificial
  Synthetic oligonucleotide
ctcccctggcgcgagccgcgtgggaaacagtccgacacactccagtcaattcctggt

SEQ ID NO: 16988 - DNA, 59 bp, Artificial
  Synthetic oligonucleotide
cgggacacgccgtaggcatattcagagccgcggtgtgcacccgtggagtggctaaggcg

SEQ ID NO: 16989 - DNA, 57 bp, Artificial
  Synthetic oligonucleotide
atcacagggcctaaaacctgcatgaacacttggcaggggacctttcctatcaattgt

SEQ ID NO: 16990 - DNA, 58 bp, Artificial
  Synthetic oligonucleotide
taactacggatatttcagagatgggagccaactttggggcgagccgggtcattgacag

SEQ ID NO: 16991 - DNA, 57 bp, Artificial
  Synthetic oligonucleotide
ggtagaatgctcggagaaatttggaaggcccaactcaatcaactaacacggcaggaa

SEQ ID NO: 16992 - DNA, 56 bp, Artificial
  Synthetic oligonucleotide
gtgcccgaccccgctggttcatgttgtgcctactcctactttccgtaggagtaggc

SEQ ID NO: 16993 - DNA, 54 bp, Artificial
  Synthetic oligonucleotide
acccggggcgtggcgaaggctgtagactttgtaccagttgagtccctcgaaaca

SEQ ID NO: 16994 - DNA, 54 bp, Artificial
  Synthetic oligonucleotide
caagaggttccccagtccgctaccaatttgggcgcgcccggactacaatcctcc

SEQ ID NO: 16995 - DNA, 56 bp, Artificial
  Synthetic oligonucleotide
aacccgctcaatgcccggaaatttgggcgtgcccccgcgagactgctagccgagta

SEQ ID NO: 16996 - DNA, 55 bp, Artificial
  Synthetic oligonucleotide
ccgccaccttaggttttggggcgtatatgtctaaggcacatggtgtcgaccctaa

SEQ ID NO: 16997 - DNA, 59 bp, Artificial
  Synthetic oligonucleotide
gtagacggtgctgcctgcgcctcagtcccaggaggactgggttaacaaatctgacaacg

SEQ ID NO: 16998 - DNA, 58 bp, Artificial
  Synthetic oligonucleotide
gctgcgggccctctgccccgtcgtgtcactaccactgtggcattgcggggaggggtgg

SEQ ID NO: 16999 - DNA, 59 bp, Artificial
  Synthetic oligonucleotide
cctccccggatggggcacagtgcactgtgatctgaaggggtgcaccccggtaagagctc

SEQ ID NO: 17000 - DNA, 56 bp, Artificial
  Synthetic oligonucleotide
aggagtcaatttaccagtgttgtgacttagcccccgaagccagacaggccataagg

SEQ ID NO: 17001 - DNA, 57 bp, Artificial
  Synthetic oligonucleotide
gtgggtaaagtcatcgacaccctaacgtgcggctttgccgacctcatggggtacatc

SEQ ID NO: 17002 - DNA, 57 bp, Artificial
  Synthetic oligonucleotide
gagggcccgtgcaatttcaacgtttccgtggaggacatcttatacggagaccatgag

SEQ ID NO: 17003 - DNA, 59 bp, Artificial
  Synthetic oligonucleotide
gcaacaccacagggctttaccacgtcaccaatgattgccctaactcgagtattgtgtta

SEQ ID NO: 17004 - DNA, 57 bp, Artificial
  Synthetic oligonucleotide
tgccccgcgggacacgccgtaggcatatttagggccgcggtgtgcacccgtggagtg

SEQ ID NO: 17005 - DNA, 54 bp, Artificial
  Synthetic oligonucleotide
ccctctgttcggccctctacgtgggggacctatgcgggtctgtctttcttgtcg

SEQ ID NO: 17006 - DNA, 53 bp, Artificial
  Synthetic oligonucleotide
tggggcccaaacgacccccggcgtaggtctcgcaacttgggtaaggtcatcga

SEQ ID NO: 17007 - DNA, 56 bp, Artificial
  Synthetic oligonucleotide
acgagtcttcacggaggctatgactaggtactctgctccccccggggatccgcctc

SEQ ID NO: 17008 - DNA, 51 bp, Artificial
  Synthetic oligonucleotide
ctacttctaaaggaaaggggggcggtccccctaagcgaaagctgaaagtga

SEQ ID NO: 17009 - DNA, 59 bp, Artificial
  Synthetic oligonucleotide
cacagcactttagctgtatgaggatacgcccgacgtctatagttggactagggaagacc

SEQ ID NO: 17010 - DNA, 57 bp, Artificial
  Synthetic oligonucleotide
acgtggctctttccgtattaaaagccttgtttccacagagcgatgccaccaggaagc

SEQ ID NO: 17011 - DNA, 52 bp, Artificial
  Synthetic oligonucleotide
gcggttctcggcctagttggggccccacggacccccggcgtaggtcgcgcaa

SEQ ID NO: 17012 - DNA, 55 bp, Artificial
  Synthetic oligonucleotide
gggaggttggggatctaccggtatgtcacgccaggggagagaccgtcgggcatgt

SEQ ID NO: 17013 - DNA, 57 bp, Artificial
  Synthetic oligonucleotide
agctcacacccgccgagaccacagttaggctacgagcgtacatgaacaccccgggac

SEQ ID NO: 17014 - DNA, 56 bp, Artificial
  Synthetic oligonucleotide
aggcaggtgatcccttatttggtgaaaggggagcagtccaccctcaatcgacgtta

SEQ ID NO: 17015 - DNA, 54 bp, Artificial
  Synthetic oligonucleotide
gggatctacttgaagccagggccactattttaccaggactataagggtcccgtc

SEQ ID NO: 17016 - DNA, 57 bp, Artificial
  Synthetic oligonucleotide
gtacaccggaattgccaggatgaccgggtcctttcttggatcaacccgctcgatgcc

SEQ ID NO: 17017 - DNA, 57 bp, Artificial
  Synthetic oligonucleotide
ctctgatgaataaccaacgaaaaaaggcgagaagtacgcctttcaatatgctgaaac

SEQ ID NO: 17018 - DNA, 57 bp, Artificial
  Synthetic oligonucleotide
ggtggtttacgtcaggctacagcgggggggacatttatcacagcgtgtcccgagctc

SEQ ID NO: 17019 - DNA, 59 bp, Artificial
  Synthetic oligonucleotide
aagctgtacgcgtggcatattggactagcggttagaggagacccctcccatcactaaca

SEQ ID NO: 17020 - DNA, 58 bp, Artificial
  Synthetic oligonucleotide
ctatgtcgtcacaacagacatttccgaaatgggagcaaacttccgagccgacagggta

SEQ ID NO: 17021 - DNA, 59 bp, Artificial
  Synthetic oligonucleotide
ctgggactatgttgtcacaacagacatttccgaaatgggagcaaactttcgagccgaca

SEQ ID NO: 17022 - DNA, 56 bp, Artificial
  Synthetic oligonucleotide
agcccgcgtggccattaagtccctcactgagaggctttatgttgggggccctctta

SEQ ID NO: 17023 - DNA, 57 bp, Artificial
  Synthetic oligonucleotide
ggggactagcggtagcagtgagttcattggatggccgaacccctgagtacaggggag

SEQ ID NO: 17024 - DNA, 56 bp, Artificial
  Synthetic oligonucleotide
cacactggcaacaaagaacacgccatggttggacaccgtgaaaaccaccaaatact

SEQ ID NO: 17025 - DNA, 58 bp, Artificial
  Synthetic oligonucleotide
ttcagtactttctgaccagagtagaagcgcaactgcacgtgtgggttccccccctcaa

SEQ ID NO: 17026 - DNA, 58 bp, Artificial
  Synthetic oligonucleotide
taccgggtcaaaggactaccactatgacctcttgcaggcacaaagatacgggattgag

SEQ ID NO: 17027 - DNA, 56 bp, Artificial
  Synthetic oligonucleotide
ccactctctgttcggccctctacgtgggggacctgtgcgggtctgtcttccttgtc

SEQ ID NO: 17028 - DNA, 59 bp, Artificial
  Synthetic oligonucleotide
gggaacatgtcctttagagacctgggaagagtgatggttatggtgggcgctactatgac

SEQ ID NO: 17029 - DNA, 59 bp, Artificial
  Synthetic oligonucleotide
tggggtgaccctatcactcattggagccacggacaacatcagtggcccctttcttgtcc

SEQ ID NO: 17030 - DNA, 57 bp, Artificial
  Synthetic oligonucleotide
atggatgaatggcactgggttcaccaagacgtgtgggggccccccgtgcaagatcgg

SEQ ID NO: 17031 - DNA, 58 bp, Artificial
  Synthetic oligonucleotide
gaggttttctgcgttcagcctgagaaggggggtcgtaagccagctcgcctcatcgtgt

SEQ ID NO: 17032 - DNA, 58 bp, Artificial
  Synthetic oligonucleotide
cttggatcaacccgctcaatgcccggaaatttgggcgtgcccccgcgagactgctagc

SEQ ID NO: 17033 - DNA, 59 bp, Artificial
  Synthetic oligonucleotide
atgacgggctttaccggcgactttgactcagtgatcgactgtaatacatgtgttaccca

SEQ ID NO: 17034 - DNA, 53 bp, Artificial
  Synthetic oligonucleotide
gtcgtggccgtacgggccgaggtagactcggtacgtaccgatatgtcaccccg

SEQ ID NO: 17035 - DNA, 54 bp, Artificial
  Synthetic oligonucleotide
ccttacctggtagcgtaccaagccaccgtgtgcgctagggctcaagcccccccc

SEQ ID NO: 17036 - DNA, 57 bp, Artificial
  Synthetic oligonucleotide
tgtcctccgtcacacaatctttcttggggacatctatttcgggggtcctctggacag

SEQ ID NO: 17037 - DNA, 56 bp, Artificial
  Synthetic oligonucleotide
caaagcagagtggggagaaccttccttacctggtagcgtaccaagccaccgtgtgc

SEQ ID NO: 17038 - DNA, 56 bp, Artificial
  Synthetic oligonucleotide
gatgtacaccagcgcagagggggacctcgtgggatggcctagtccccccgggacta

SEQ ID NO: 17039 - DNA, 57 bp, Artificial
  Synthetic oligonucleotide
acccctgaaggcgaagttggagccatagctctagactttaaacccggcacatctgga

SEQ ID NO: 17040 - DNA, 53 bp, Artificial
  Synthetic oligonucleotide
gattccctttgtgtcctgccaacgcgggtataagggggtctggcgaggggacg

SEQ ID NO: 17041 - DNA, 54 bp, Artificial
  Synthetic oligonucleotide
agatgtggacctcaaagaaaacccccttggggttctcgtatgacacccgctgct

SEQ ID NO: 17042 - DNA, 58 bp, Artificial
  Synthetic oligonucleotide
actcaagtcgtagacttcagcctggaccccaccttcactataaccacacagactgtcc

SEQ ID NO: 17043 - DNA, 57 bp, Artificial
  Synthetic oligonucleotide
gagtctagctggtcctatttcgcaacacaactacaggcccgggtatcacacccaaac

SEQ ID NO: 17044 - DNA, 53 bp, Artificial
  Synthetic oligonucleotide
ctgccgtgtgcacccggggggttgcgaaggcggtggactttatacccgttgag

SEQ ID NO: 17045 - DNA, 52 bp, Artificial
  Synthetic oligonucleotide
caagtgctttctacggctacccagaccttcctaggtacaacattaggggggg

SEQ ID NO: 17046 - DNA, 57 bp, Artificial
  Synthetic oligonucleotide
tctttggcgggtatctgccgaggactacgttgaagtacggaggttgggcgactgcca

SEQ ID NO: 17047 - DNA, 54 bp, Artificial
  Synthetic oligonucleotide
cctgcgtgtggggttccgtgtcttggtttgcttccacgggggggcgcgattcga

SEQ ID NO: 17048 - DNA, 57 bp, Artificial
  Synthetic oligonucleotide
ggctacagcgggggggacatttatcacagcgtgtcccgagctcgaccccgcatttta

SEQ ID NO: 17049 - DNA, 53 bp, Artificial
  Synthetic oligonucleotide
cccgtgcccgaccccgctatttactcctgtgcctactcctactgtccgtaggg

SEQ ID NO: 17050 - DNA, 57 bp, Artificial
  Synthetic oligonucleotide
ctccggatgtggcgctccaagaagacccctatggggttttcttatgataccagatgt

SEQ ID NO: 17051 - DNA, 58 bp, Artificial
  Synthetic oligonucleotide
agatgggctggcgtctgttggccccgattacagcatacgcccagcaaactaggggcct

SEQ ID NO: 17052 - DNA, 49 bp, Artificial
  Synthetic oligonucleotide
aacgacccccggcgtcggtcccgtaatttgggtaaggtcatcgataccc

SEQ ID NO: 17053 - DNA, 54 bp, Artificial
  Synthetic oligonucleotide
ccgctcgccatggctcccccggtaccgacctcctcgaggctaacctcttgtggg

SEQ ID NO: 17054 - DNA, 56 bp, Artificial
  Synthetic oligonucleotide
agatcaatagggtggctagttgcctcaggaagcttggggtaccccctttgagagct

SEQ ID NO: 17055 - DNA, 55 bp, Artificial
  Synthetic oligonucleotide
accttcgtggaactcatgaggaggggtgacctcccagtttggctagcccataaag

SEQ ID NO: 17056 - DNA, 52 bp, Artificial
  Synthetic oligonucleotide
acccccggcgtaggtcacgcaatttgggtaaggtcatcgatacccttacgtg

SEQ ID NO: 17057 - DNA, 57 bp, Artificial
  Synthetic oligonucleotide
tgtggagggaagtctccgagtggtacgacaactacgcatactacccagaaacgccag

SEQ ID NO: 17058 - DNA, 55 bp, Artificial
  Synthetic oligonucleotide
tggctcctgtctccccgtggctctcggcctagttggggccccacagacccccggc

SEQ ID NO: 17059 - DNA, 53 bp, Artificial
  Synthetic oligonucleotide
cccccctcccgggagagccatagtagtctgcggaaccggtgagtacaccggaa

SEQ ID NO: 17060 - DNA, 57 bp, Artificial
  Synthetic oligonucleotide
ggtgtcattcagagtaggactccacgagtacccggtggggtcgcaattaccttgcga

SEQ ID NO: 17061 - DNA, 59 bp, Artificial
  Synthetic oligonucleotide
tcctccttcgtgggacgtgatgtggaagtgtctaactaggctcaaacctacactgactg

SEQ ID NO: 17062 - DNA, 55 bp, Artificial
  Synthetic oligonucleotide
caaggtaggactacacgagtacccggtggggtcgcaattaccttgcgagcctgaa

SEQ ID NO: 17063 - DNA, 56 bp, Artificial
  Synthetic oligonucleotide
cacgcccgccgagactacagttaggctacgagcgtacatgaacaccccggggctcc

SEQ ID NO: 17064 - DNA, 51 bp, Artificial
  Synthetic oligonucleotide
ccaggaaaacccggtaggaaccgggttgtcaatatgctaaaacgcggtgtg

SEQ ID NO: 17065 - DNA, 52 bp, Artificial
  Synthetic oligonucleotide
ccgggttgtcaatatgctaaaacgcggtgtatcccgcgtaaaccccttgacg

SEQ ID NO: 17066 - DNA, 54 bp, Artificial
  Synthetic oligonucleotide
attacaaccccccgctaatagagacgtggaagaagcctgactacgaaccacctg

SEQ ID NO: 17067 - DNA, 52 bp, Artificial
  Synthetic oligonucleotide
atagtacgggaaaaactatgctacctgtgagccccgtccaaggacgttaaaa

SEQ ID NO: 17068 - DNA, 58 bp, Artificial
  Synthetic oligonucleotide
atgtctctcttgaccaataggctttgccggcgagttgacaaggaccagtgggggctgg

SEQ ID NO: 17069 - DNA, 58 bp, Artificial
  Synthetic oligonucleotide
cttagtaggactagcataatgaggggggtagcaacagtggtgagttcgttggatggct

SEQ ID NO: 17070 - DNA, 58 bp, Artificial
  Synthetic oligonucleotide
gggcgtgcccccgcgagactgctagccgagtagtgttggatcgcgaaaggccttgtgg

SEQ ID NO: 17071 - DNA, 52 bp, Artificial
  Synthetic oligonucleotide
agactacagtaagactccgggcttatttcaacacgcccggtttacccgtgtg

SEQ ID NO: 17072 - DNA, 59 bp, Artificial
  Synthetic oligonucleotide
tcattcagagtaggactccacgactacccggtggggtcgcaattaccttgcgagcctga

SEQ ID NO: 17073 - DNA, 58 bp, Artificial
  Synthetic oligonucleotide
accccaggaggactgggtgaacaaagctgcgaagtgatccatgtaagccctcagaacc

SEQ ID NO: 17074 - DNA, 55 bp, Artificial
  Synthetic oligonucleotide
ggagtcaatttaccaaagttgtgacttggcccccgaagccagacaggctataaaa

SEQ ID NO: 17075 - DNA, 58 bp, Artificial
  Synthetic oligonucleotide
taaaaaacaacagagccgtccatgccgatatgggttattggatagaaagcgcacttaa

SEQ ID NO: 17076 - DNA, 58 bp, Artificial
  Synthetic oligonucleotide
gcatgttactcctgtgcctactcctactttccgtaggggtaggcatcttcctgcttcc

SEQ ID NO: 17077 - DNA, 59 bp, Artificial
  Synthetic oligonucleotide
ttgagtccttagagaccaccatgaggtccccagtgtttactgacaattccagccctcta

SEQ ID NO: 17078 - DNA, 53 bp, Artificial
  Synthetic oligonucleotide
cctatccccaaggcacgtcggcccgagggtaggacctgggctcagcccgggta

SEQ ID NO: 17079 - DNA, 55 bp, Artificial
  Synthetic oligonucleotide
ccccatggggttctcttatgatacccgctgctttgactccactgtaaccgaaaag

SEQ ID NO: 17080 - DNA, 57 bp, Artificial
  Synthetic oligonucleotide
gtgttgaggagtcaatttaccaatgttgtgacttggcccccgaagccaaattggcca

SEQ ID NO: 17081 - DNA, 56 bp, Artificial
  Synthetic oligonucleotide
aggcataggaaacccacttatgagaaggacgtagatcttggggcaggaacgagaag

SEQ ID NO: 17082 - DNA, 56 bp, Artificial
  Synthetic oligonucleotide
cgaggtgatccacgtaagccctcagaaccgtctcggaagcaggaccccacgtgctt

SEQ ID NO: 17083 - DNA, 58 bp, Artificial
  Synthetic oligonucleotide
taaagtcgctcacagagcggctctatatcgggggtcccctgactaattcaaaagggca

SEQ ID NO: 17084 - DNA, 55 bp, Artificial
  Synthetic oligonucleotide
gccatggagcgatccacgtaagccctcaataccgtttcggaacgaggaccccacg

SEQ ID NO: 17085 - DNA, 59 bp, Artificial
  Synthetic oligonucleotide
ctctggcactaccacttggttgaaccgtctgctgactacgttaccaaggtcttcatgta

SEQ ID NO: 17086 - DNA, 56 bp, Artificial
  Synthetic oligonucleotide
acgcggcaagcctacgagtcttcacggaggctatgactaggtattctgcccccccc

SEQ ID NO: 17087 - DNA, 53 bp, Artificial
  Synthetic oligonucleotide
ggcgtcgatcccggaatttgggtaaggtcatcgataccctaacgtgtgggttc

SEQ ID NO: 17088 - DNA, 54 bp, Artificial
  Synthetic oligonucleotide
gtattcccagacttgggggttcgtgtgtgcgagaaaatggccctttacgacgtg

SEQ ID NO: 17089 - DNA, 52 bp, Artificial
  Synthetic oligonucleotide
agctgtataagggtaaacccgacgtccatggttggactagggaagaccctta

SEQ ID NO: 17090 - DNA, 58 bp, Artificial
  Synthetic oligonucleotide
tctggcggggcccagatcctggtataacaggatacctgggtactcagaacaagtgaaa

SEQ ID NO: 17091 - DNA, 59 bp, Artificial
  Synthetic oligonucleotide
tgctctgcccctcggggcacgctgttggcatcttccgggctgccgtgtgcacccggggg

SEQ ID NO: 17092 - DNA, 54 bp, Artificial
  Synthetic oligonucleotide
taagtccctcactgagaggctttatgttgggggccctcttaccaattcaagggg

SEQ ID NO: 17093 - DNA, 57 bp, Artificial
  Synthetic oligonucleotide
gacaccctaaccatgcacatgtcagaagtacccgtaattagtgccgacggggaggtg

SEQ ID NO: 17094 - DNA, 49 bp, Artificial
  Synthetic oligonucleotide
tggggatggccaaaggagccgtccttaaaggaaaggggggcggtccccc

SEQ ID NO: 17095 - DNA, 59 bp, Artificial
  Synthetic oligonucleotide
agccgtgccatctggtacatgtggttggggagccggtatctggaatttgaggcactggg

SEQ ID NO: 17096 - DNA, 58 bp, Artificial
  Synthetic oligonucleotide
ccaagattgggtgtgcgcgcgactcggaagacttcggagcggtcacaacctcgtggaa

SEQ ID NO: 17097 - DNA, 52 bp, Artificial
  Synthetic oligonucleotide
gggtcgcgcgtgcctacgggggagcgggtttgggaccgagggaacgtcacac

SEQ ID NO: 17098 - DNA, 56 bp, Artificial
  Synthetic oligonucleotide
ggctaacctcttgtgggggtccgccgctaccagggttgagacagacgagaaggtga

SEQ ID NO: 17099 - DNA, 56 bp, Artificial
  Synthetic oligonucleotide
ctttctgactagagtagaagcgcaactgcacgtgtgggttccccccctcgacgtcc

SEQ ID NO: 17100 - DNA, 57 bp, Artificial
  Synthetic oligonucleotide
acaggccataaggtcgctcacagagcggctttatatcgggggtcccctgaccaattc

SEQ ID NO: 17101 - DNA, 58 bp, Artificial
  Synthetic oligonucleotide
caccccatcacacggtgggtcatcatccctcacgtgctaacctgcgcgtttaggggtg

SEQ ID NO: 17102 - DNA, 59 bp, Artificial
  Synthetic oligonucleotide
aagaagtcaggccggattaagccatagtacggtaagagctatgctgcctgtgagccccg

SEQ ID NO: 17103 - DNA, 58 bp, Artificial
  Synthetic oligonucleotide
cgtggaagtgaggcgagtgggggatttccactacgtgacgggcatgaccactgacaac

SEQ ID NO: 17104 - DNA, 59 bp, Artificial
  Synthetic oligonucleotide
cattgtggacgtgcagtacttgtacggggtggggtcaagcatcgcgtcctgggctgtta

SEQ ID NO: 17105 - DNA, 54 bp, Artificial
  Synthetic oligonucleotide
cggaacaaccatctcgggggttttgtggactgtttaccacggagctggcaacaa

SEQ ID NO: 17106 - DNA, 54 bp, Artificial
  Synthetic oligonucleotide
ggcccttcagacccccggcgtaggtcgcgcaatttgggtaaggtcatcgatacc

SEQ ID NO: 17107 - DNA, 56 bp, Artificial
  Synthetic oligonucleotide
gaacgaagttttctgcgttcaacctgagaaggggggtcgtaagccagctcgtctca

SEQ ID NO: 17108 - DNA, 59 bp, Artificial
  Synthetic oligonucleotide
gaaacagtccgacacactccagtcaattcctggttgggaaacatcatagtctacgcgcc

SEQ ID NO: 17109 - DNA, 54 bp, Artificial
  Synthetic oligonucleotide
acggtccacaggtgttggccctaccggtgtgaataagggcccgacgtcaggctc

SEQ ID NO: 17110 - DNA, 53 bp, Artificial
  Synthetic oligonucleotide
ctggaccgtctaccacggggccggaacgaggaccctcgcatcacccaagggcc

SEQ ID NO: 17111 - DNA, 56 bp, Artificial
  Synthetic oligonucleotide
ggtgtagtggactagcggttagaggagacccctcccttaagaatcgcagcaaaatg

SEQ ID NO: 17112 - DNA, 55 bp, Artificial
  Synthetic oligonucleotide
gagcgccaccctctgttcggccctttacgtgggggacctgtgcgggtctgtcttc

SEQ ID NO: 17113 - DNA, 56 bp, Artificial
  Synthetic oligonucleotide
gcggggggttggtccgcgtccctttctcccgcaattccacgcatgagatgtacttc

SEQ ID NO: 17114 - DNA, 58 bp, Artificial
  Synthetic oligonucleotide
agtatacttgctgccgcgcaggggcccgagattgggtgtgcgcgcggcgaggaaaact

SEQ ID NO: 17115 - DNA, 57 bp, Artificial
  Synthetic oligonucleotide
ggttgggtgtgcgcgcgactcggaagacttcggagcggtcgcaacctcgtgaaagac

SEQ ID NO: 17116 - DNA, 56 bp, Artificial
  Synthetic oligonucleotide
gatatccgtacggaggaggcaatctaccaatgttgtgacctagacccccaagcccg

SEQ ID NO: 17117 - DNA, 56 bp, Artificial
  Synthetic oligonucleotide
agaaggacccaatggggttctcgtatgacacccgctgctttgactcaaccgtcacg

SEQ ID NO: 17118 - DNA, 59 bp, Artificial
  Synthetic oligonucleotide
taaggtcatcgatactctgacttgcggcctagccgacctcatggggtacatccccgtct

SEQ ID NO: 17119 - DNA, 59 bp, Artificial
  Synthetic oligonucleotide
agcaatcggctggggcgaccctatcactcattggagccacggacaaaatcagtggcccc

SEQ ID NO: 17120 - DNA, 57 bp, Artificial
  Synthetic oligonucleotide
ccttgggttggtgctgtactcagctaacaactctggcactaccacttggttgaaccg

SEQ ID NO: 17121 - DNA, 58 bp, Artificial
  Synthetic oligonucleotide
gtgagccccgtccaaggacgttaaaagaagtcaggccactacaagtgccatagctcga

SEQ ID NO: 17122 - DNA, 59 bp, Artificial
  Synthetic oligonucleotide
ttggctatgtggggtaccagaccctctcaaaaaggcatatacccatgattaccgacatc

SEQ ID NO: 17123 - DNA, 58 bp, Artificial
  Synthetic oligonucleotide
cccttacggatggtgctagcattcatcacgtttttgcgagtcctttccatcccaccga

SEQ ID NO: 17124 - DNA, 57 bp, Artificial
  Synthetic oligonucleotide
tggtcaaatcacaggtaacggccggacagggtacatcagaaactttctctatgggcc

SEQ ID NO: 17125 - DNA, 55 bp, Artificial
  Synthetic oligonucleotide
ggaaacacccggacacaacctacgccaagtgcgggtcaggaccctggctcacgcc

SEQ ID NO: 17126 - DNA, 56 bp, Artificial
  Synthetic oligonucleotide
ggcattctacagaggcttggacgtttcggtaataccaacatccggagacgtcgtag

SEQ ID NO: 17127 - DNA, 56 bp, Artificial
  Synthetic oligonucleotide
aggcactgcgggcaaggcagttcaagggtttactagcctgttccgacttggggcca

SEQ ID NO: 17128 - DNA, 59 bp, Artificial
  Synthetic oligonucleotide
gtacgagctaacacctgccgagacaacagctaggctacgggcttatctcaacacacccg

SEQ ID NO: 17129 - DNA, 57 bp, Artificial
  Synthetic oligonucleotide
gtgaggacgtcgtgtgttgctccatgtcctactcttggacgggggccttggttacgc

SEQ ID NO: 17130 - DNA, 53 bp, Artificial
  Synthetic oligonucleotide
aagagggtacccatggggttttcatatgacacccgctgttttgactccacggt

SEQ ID NO: 17131 - DNA, 57 bp, Artificial
  Synthetic oligonucleotide
cactccatgggtactctccaggcgaactcaatcgggtggccgcaaccctcagaaaac

SEQ ID NO: 17132 - DNA, 59 bp, Artificial
  Synthetic oligonucleotide
tttcctctcatgccaacgtgggtacaagggagtctggcggggggacggcatcatgcaaa

SEQ ID NO: 17133 - DNA, 56 bp, Artificial
  Synthetic oligonucleotide
aatgggtaggcttccaacctttatgactcagaaagcaaggaacgcactggacaact

SEQ ID NO: 17134 - DNA, 56 bp, Artificial
  Synthetic oligonucleotide
tgtctcgtgcccgaccccgctggttcatgttgtgcctactcctactttccgtaggg

SEQ ID NO: 17135 - DNA, 59 bp, Artificial
  Synthetic oligonucleotide
cattcttggcagtgggaggagtccttgtgtttctcgctacttctgtgaacgcggattcc

SEQ ID NO: 17136 - DNA, 58 bp, Artificial
  Synthetic oligonucleotide
attgaaagaacgagaagagaccatggtaaagagccacgtgagtgccggcagaggggac

SEQ ID NO: 17137 - DNA, 59 bp, Artificial
  Synthetic oligonucleotide
gacacctgggaaagactaggggatttgctgctctggacttccggctctcggcacagaac

SEQ ID NO: 17138 - DNA, 58 bp, Artificial
  Synthetic oligonucleotide
gtctctaaatgatctcacgcctgttggtagactggtcactgttaaccccttcgtgtcg

SEQ ID NO: 17139 - DNA, 57 bp, Artificial
  Synthetic oligonucleotide
cccttgggccattctgccatcggttattgggttttggatcactctccagtacactaa

SEQ ID NO: 17140 - DNA, 59 bp, Artificial
  Synthetic oligonucleotide
ctggtctccgcaagctccctggtgaatggcgtggtcaggctcctttcaaagccgtggga

SEQ ID NO: 17141 - DNA, 57 bp, Artificial
  Synthetic oligonucleotide
ggatgcggcgaacctacgagtcttcacggaggctatgactaggtactctgccccccc

SEQ ID NO: 17142 - DNA, 58 bp, Artificial
  Synthetic oligonucleotide
ccaggagtataccgtatcatgagccgttacattctagggacctaccaggctggagtgg

SEQ ID NO: 17143 - DNA, 57 bp, Artificial
  Synthetic oligonucleotide
gccgttacattttggggacctaccaggctggagtgggcgtcatgtatgaaggagttc

SEQ ID NO: 17144 - DNA, 52 bp, Artificial
  Synthetic oligonucleotide
gggtggcccccctgggaagagacccaaagtggccataagaaagacggggcag

SEQ ID NO: 17145 - DNA, 57 bp, Artificial
  Synthetic oligonucleotide
ctcgcacgtttagagagggtagagacgtgaaggagttcgtgttatatgcgtccggac

SEQ ID NO: 17146 - DNA, 58 bp, Artificial
  Synthetic oligonucleotide
aacgtctctggcaatgtccgcttgggttcgatgaggataacagggccaaaaacttgca

SEQ ID NO: 17147 - DNA, 54 bp, Artificial
  Synthetic oligonucleotide
ccggaccaaaaagccaccacaacatgcgcccagggtacaagactcaaaccaaag

SEQ ID NO: 17148 - DNA, 58 bp, Artificial
  Synthetic oligonucleotide
acaagcgtggaggggtcatgtgggacgttccagctcccaagcaatttggcaagacgga

SEQ ID NO: 17149 - DNA, 53 bp, Artificial
  Synthetic oligonucleotide
aggcaaccaggccgggattctgttcggaatggggacgggagtccccttctaca

SEQ ID NO: 17150 - DNA, 59 bp, Artificial
  Synthetic oligonucleotide
ggtcagtgacagtcccgcacccgaacatcacagagacggccttgcccagtacgggagag

SEQ ID NO: 17151 - DNA, 55 bp, Artificial
  Synthetic oligonucleotide
ggactcttcaaaaccaacacaggaacaataggagccgtatccttagacttctccc

SEQ ID NO: 17152 - DNA, 59 bp, Artificial
  Synthetic oligonucleotide
aaagcgatcacgtgaacccccgaaagcggatttgctagctgaaatggagatcattgcgt

SEQ ID NO: 17153 - DNA, 58 bp, Artificial
  Synthetic oligonucleotide
aatggtggcgggaggtttactcctagcggcttacgtgatgagcggtagttcagcagac

SEQ ID NO: 17154 - DNA, 59 bp, Artificial
  Synthetic oligonucleotide
aagctgtacgcgtggcatattggactagtggttagaggagacccctcccattatcaaca

SEQ ID NO: 17155 - DNA, 59 bp, Artificial
  Synthetic oligonucleotide
cattgtggacgtgcagtacttgtacggggtggggtcaagcattgcgtcctgggccgtca

SEQ ID NO: 17156 - DNA, 56 bp, Artificial
  Synthetic oligonucleotide
ggtagtgggggttgttcgtgctgccattttgcggcgccacgtgggccccagcgaag

SEQ ID NO: 17157 - DNA, 57 bp, Artificial
  Synthetic oligonucleotide
cacgcccgccgagactacagtcaggctacgagcgtacatgaacaccccggggcttcc

SEQ ID NO: 17158 - DNA, 55 bp, Artificial
  Synthetic oligonucleotide
tgtgcacccggggggttgcgaaggcggtggactttatacccgtagagtctatgga

SEQ ID NO: 17159 - DNA, 56 bp, Artificial
  Synthetic oligonucleotide
acgcagcagcggggcccaacaccagggaaagctgtaccctggtggtaaggactagc

SEQ ID NO: 17160 - DNA, 59 bp, Artificial
  Synthetic oligonucleotide
ggaaggaatagtattgtcatctgccgcccttggacctctcattgaggggaacactagtc

SEQ ID NO: 17161 - DNA, 52 bp, Artificial
  Synthetic oligonucleotide
cactgagaggctttacgttgggggccctcttaccaattcaaggggggagaac

SEQ ID NO: 17162 - DNA, 56 bp, Artificial
  Synthetic oligonucleotide
ggggtagcagactagtggttagaggagacccctcccgaaacataacgcagcagcgg

SEQ ID NO: 17163 - DNA, 55 bp, Artificial
  Synthetic oligonucleotide
cctagggttggttttgtactcagccaacaactctggcactaccacttggttgaac

SEQ ID NO: 17164 - DNA, 56 bp, Artificial
  Synthetic oligonucleotide
ggaaatttgggcgtgcccccgcgagactgctagccgagtagtgttgggtcgcgaaa

SEQ ID NO: 17165 - DNA, 55 bp, Artificial
  Synthetic oligonucleotide
cacaactgcccgggatcccattcgtatcctgccaacgcgggtaccgtggggtctg

SEQ ID NO: 17166 - DNA, 58 bp, Artificial
  Synthetic oligonucleotide
ctaagaagaccattttattcgtcccatcgcacaaccaagctaacaccctggctagtgc

SEQ ID NO: 17167 - DNA, 58 bp, Artificial
  Synthetic oligonucleotide
acttcatggtgcatcgggaatggttcaatgacctggctctcccatggacccccccctc

SEQ ID NO: 17168 - DNA, 59 bp, Artificial
  Synthetic oligonucleotide
acgacccgggagtaccatggaaggtatggctactgcggatgacgtgcataggattggct

SEQ ID NO: 17169 - DNA, 59 bp, Artificial
  Synthetic oligonucleotide
tcagccatggggtttgtggaggtcctaggaagaatgccagaacacttcgctgggaagac

SEQ ID NO: 17170 - DNA, 56 bp, Artificial
  Synthetic oligonucleotide
tgctaaacagcactcgacctccgcgggggggttggtttgggtgcacctggatgaac

SEQ ID NO: 17171 - DNA, 56 bp, Artificial
  Synthetic oligonucleotide
actggtggtcatatccgttctcaccctcagcccgacttacaaagtccttattggcc

SEQ ID NO: 17172 - DNA, 57 bp, Artificial
  Synthetic oligonucleotide
agctgtgatggaggaaacggtgtcctccgctctcgggttcacaataggtggggcgga

SEQ ID NO: 17173 - DNA, 57 bp, Artificial
  Synthetic oligonucleotide
cctcgtacgggaacgtcgcccttttaataccactctggtcagtagcatgtgcggcga

SEQ ID NO: 17174 - DNA, 55 bp, Artificial
  Synthetic oligonucleotide
agtcgagatcacgagccacataacggaagggttgaacacccgccaggaaacgtgg

SEQ ID NO: 17175 - DNA, 57 bp, Artificial
  Synthetic oligonucleotide
cgccatggtgaccaggcaactccattaccagtcgtgcaggttcccccggaagaacac

SEQ ID NO: 17176 - DNA, 58 bp, Artificial
  Synthetic oligonucleotide
acgaaagctacgtgatttccacgccgaacggacttcttgagttccgcactggagcagc

SEQ ID NO: 17177 - DNA, 58 bp, Artificial
  Synthetic oligonucleotide
cggagctccgatgtccaaagccaaccacataccgggctacaagacgcaaacagagttc

SEQ ID NO: 17178 - DNA, 51 bp, Artificial
  Synthetic oligonucleotide
agttccgaagcggaacagtttttgacgtcgtttcacggacggaccaacgcg

SEQ ID NO: 17179 - DNA, 58 bp, Artificial
  Synthetic oligonucleotide
aatggggtatgctggactgtctaccacggggccggaacgaggaccatcgcatcgccca

SEQ ID NO: 17180 - DNA, 57 bp, Artificial
  Synthetic oligonucleotide
aggacgccggggctctgcgagtcttcacggaggctatgaccagatactcggcccccc

SEQ ID NO: 17181 - DNA, 57 bp, Artificial
  Synthetic oligonucleotide
tccaaggtagtagaaccagccttggcatacctcccctacgctaccagtgcactaaaa

SEQ ID NO: 17182 - DNA, 57 bp, Artificial
  Synthetic oligonucleotide
agaggaccaaggctgacttaggccagcttctctggaaacccacggaggaagccgata

SEQ ID NO: 17183 - DNA, 56 bp, Artificial
  Synthetic oligonucleotide
agtgtgaaggcatacaccatcggagggaaaggacacgaggaaccccgtatggtcac

SEQ ID NO: 17184 - DNA, 59 bp, Artificial
  Synthetic oligonucleotide
gtccgagccacttccattgaacccctgtacacgataacggccactggaacatcaatgag

SEQ ID NO: 17185 - DNA, 58 bp, Artificial
  Synthetic oligonucleotide
tgaggggcacactggcaacacaccattggtgacgggaattaggtcgaccccgccagtg

SEQ ID NO: 17186 - DNA, 56 bp, Artificial
  Synthetic oligonucleotide
agtggaatcttggcccaaggaaagaaaatgattaggccacaacccatggaacacaa

SEQ ID NO: 17187 - DNA, 59 bp, Artificial
  Synthetic oligonucleotide
ggacggttggaaaactgatcaatggcgttggtccgcttagacttgtcttagccatgcta

SEQ ID NO: 17188 - DNA, 56 bp, Artificial
  Synthetic oligonucleotide
ctactacgcggctacactgcccagggtgatggaagtcaaaggctacacaaaagggg

SEQ ID NO: 17189 - DNA, 58 bp, Artificial
  Synthetic oligonucleotide
ccccacggccagaatcagagtggcgcgactgaggaagggactagaggttagaggagac

SEQ ID NO: 17190 - DNA, 56 bp, Artificial
  Synthetic oligonucleotide
cccagcgacggccgaactgggttagccatacccatagtaggactagcagacgggag

SEQ ID NO: 17191 - DNA, 58 bp, Artificial
  Synthetic oligonucleotide
actggtgagcagtaagacgggtaagacctacttgccgagtggaggatacaccttgcag

SEQ ID NO: 17192 - DNA, 50 bp, Artificial
  Synthetic oligonucleotide
ctaccccccccggttcggtcacggtccctcaccccaacataacagaagaa

SEQ ID NO: 17193 - DNA, 58 bp, Artificial
  Synthetic oligonucleotide
gctaggcctgactacaacccgcctcttgtggagccgtggaagtctccggactacgatc

SEQ ID NO: 17194 - DNA, 56 bp, Artificial
  Synthetic oligonucleotide
gaggcgcattcaacagcgtcttcgggggggtgggattcctaccgaggattctgttg

SEQ ID NO: 17195 - DNA, 58 bp, Artificial
  Synthetic oligonucleotide
cagagctctttctgccggccagcctagccggacctcggtcttggtacaacagaatacc

SEQ ID NO: 17196 - DNA, 57 bp, Artificial
  Synthetic oligonucleotide
agacctggtgacattcaagagcccgaacggagcggaaagaaccctgagaccagtctg

SEQ ID NO: 17197 - DNA, 55 bp, Artificial
  Synthetic oligonucleotide
ctttgccgagttcctagtgatagcagtggtcgccttattaggggggaggtacgta

SEQ ID NO: 17198 - DNA, 58 bp, Artificial
  Synthetic oligonucleotide
ctgaggggatggtcaggtctacccatatttgaagcctctagtggtagagtagtcggta

SEQ ID NO: 17199 - DNA, 56 bp, Artificial
  Synthetic oligonucleotide
acaagtaacggtcttgagagatataacttgggacctatagtgaacttagtcctgag

SEQ ID NO: 17200 - DNA, 56 bp, Artificial
  Synthetic oligonucleotide
gtctttacgggtctcacccatatagacggtcatttcctatcccagaccaaacaggc

SEQ ID NO: 17201 - DNA, 54 bp, Artificial
  Synthetic oligonucleotide
cccaaattgacggtcatttcctatcccagaccaaacaagcgggcgagaacttcc

SEQ ID NO: 17202 - DNA, 59 bp, Artificial
  Synthetic oligonucleotide
tgtggctgggagcgcggtatcttgagtttgaggccctagggttcctgaatgaggaccat

SEQ ID NO: 17203 - DNA, 59 bp, Artificial
  Synthetic oligonucleotide
gcccacaaaattgtaacacaatctctctcaaagaacaccatggtcgatggtgaaaccat

SEQ ID NO: 17204 - DNA, 57 bp, Artificial
  Synthetic oligonucleotide
ttgttgcgggggggcgtcccggggacatagcgccgaatgaggttgctgactccacga

SEQ ID NO: 17205 - DNA, 58 bp, Artificial
  Synthetic oligonucleotide
agagtggagagatggctttgattggataacggaatttgagggccgaacagcctggttc

SEQ ID NO: 17206 - DNA, 55 bp, Artificial
  Synthetic oligonucleotide
ttgagtttggcttatgtccctgtgactcgacacctataataagggggaaatttaa

SEQ ID NO: 17207 - DNA, 54 bp, Artificial
  Synthetic oligonucleotide
aggtggatactaaggaaagtgaagcaccaagggaacttaagaacgaggtacatc

SEQ ID NO: 17208 - DNA, 57 bp, Artificial
  Synthetic oligonucleotide
ggggttggctcatgaaaccccgtcttcaagacactggatccacggtgcctgttggaa

SEQ ID NO: 17209 - DNA, 59 bp, Artificial
  Synthetic oligonucleotide
ggggcacctatgcaaccttggtgacttttatgcgaccacaaatgctccacaaccttaga

SEQ ID NO: 17210 - DNA, 59 bp, Artificial
  Synthetic oligonucleotide
ggcctagtagctcagctgtacggtcccgaaagagataaaacttacaccatggatggaga

SEQ ID NO: 17211 - DNA, 59 bp, Artificial
  Synthetic oligonucleotide
ttccgtagaacaactgattcggtatgctgtttccgtgggcataacattcgccctacagc

SEQ ID NO: 17212 - DNA, 58 bp, Artificial
  Synthetic oligonucleotide
attggagtccggaaggtcaccacagcgtcagcggcccagaggagaggcagggtgggac

SEQ ID NO: 17213 - DNA, 56 bp, Artificial
  Synthetic oligonucleotide
gactagaggttagaggagaccccgcgtcaaaaaagtgcacggcccaacttggctga

SEQ ID NO: 17214 - DNA, 57 bp, Artificial
  Synthetic oligonucleotide
cttgacccccgaagccagacaggctataaggtcgctcacggagcggctttacatcgg

SEQ ID NO: 17215 - DNA, 59 bp, Artificial
  Synthetic oligonucleotide
tactctccccacgaactctcacgggtggcagcaactctcagaaaacttggagcgcctcc

SEQ ID NO: 17216 - DNA, 59 bp, Artificial
  Synthetic oligonucleotide
gccacgttggcccctctgaaggcgctaaccagtggatgaacaggctaatagcctttgcc

SEQ ID NO: 17217 - DNA, 58 bp, Artificial
  Synthetic oligonucleotide
tgccatgcgagccctcggagctatggcccctttcagtaaatttcgcgccctagaaaag

SEQ ID NO: 17218 - DNA, 54 bp, Artificial
  Synthetic oligonucleotide
ataacggtggtggccctaaagacaacttgggtgaataatggtccagggatagac

SEQ ID NO: 17219 - DNA, 55 bp, Artificial
  Synthetic oligonucleotide
cttacctggtagcgtaccaagccaccgtgtgcgctagggctcaagcccttccccc

SEQ ID NO: 17220 - DNA, 54 bp, Artificial
  Synthetic oligonucleotide
ggccccgtgtactgtttcacccctagtcctgtagtggtcgggaccacggatcgc

SEQ ID NO: 17221 - DNA, 58 bp, Artificial
  Synthetic oligonucleotide
ctatcgtctcttggcctaaacgctgtagcctactataggggcttggacgtctcagtaa

SEQ ID NO: 17222 - DNA, 58 bp, Artificial
  Synthetic oligonucleotide
gggctaggccagattacaacccacccttggttgacaggtggaagcagccgagctacga

SEQ ID NO: 17223 - DNA, 53 bp, Artificial
  Synthetic oligonucleotide
gagtgggtgcccgacctacgggttaggggtggtagggactccatcatcttact

SEQ ID NO: 17224 - DNA, 58 bp, Artificial
  Synthetic oligonucleotide
agtgttactgaaggctctcgctggggtccctgtggcacacattgagggaaccaagtac

SEQ ID NO: 17225 - DNA, 55 bp, Artificial
  Synthetic oligonucleotide
accaccaaatgcccctatcttatcaacacttccggaaactactgttgttagacga

SEQ ID NO: 17226 - DNA, 59 bp, Artificial
  Synthetic oligonucleotide
tcctctaattccaggatctacaacaacgagtacgggaccttgcaagacctgcacgactc

SEQ ID NO: 17227 - DNA, 55 bp, Artificial
  Synthetic oligonucleotide
cacctgggtgggtggtaatttggaagatccaacatccagggacctagtagtcact

SEQ ID NO: 17228 - DNA, 56 bp, Artificial
  Synthetic oligonucleotide
gggctttcgcaaaatacctatgggagtgggcctcagtccgtttctcttggctcagt

SEQ ID NO: 17229 - DNA, 53 bp, Artificial
  Synthetic oligonucleotide
aggattcctaggacccctgctcgtgttacaggcggggtttttctcgttgacaa

SEQ ID NO: 17230 - DNA, 58 bp, Artificial
  Synthetic oligonucleotide
tcagtccgtttctcttggctcagtttactagtgccatttgttcagtggttcgtagggc

SEQ ID NO: 17231 - DNA, 58 bp, Artificial
  Synthetic oligonucleotide
gggaccgacaactctgttgtcctctctcggaaatacacctcctttccatggctgctag

SEQ ID NO: 17232 - DNA, 56 bp, Artificial
  Synthetic oligonucleotide
ttgatgaatctagccacctgggtgggaagtaatttggaagaccccgcatcccggga

SEQ ID NO: 17233 - DNA, 54 bp, Artificial
  Synthetic oligonucleotide
cgcgggacgtcctttgtctacgtcccgtcagcgctgaatcccgcggacgacccg

SEQ ID NO: 17234 - DNA, 58 bp, Artificial
  Synthetic oligonucleotide
gaggactcttggactcccagcaatgtcaacgaccgaccttgaggcctacttcaaagac

SEQ ID NO: 17235 - DNA, 57 bp, Artificial
  Synthetic oligonucleotide
gacattatcggcactgacaactccgttgtcctttctcggaagtacacctccttccca

SEQ ID NO: 17236 - DNA, 59 bp, Artificial
  Synthetic oligonucleotide
tggctgctcgcctgtgttgccaactggattcttcgcgggacgtccttctgttacgtccc

SEQ ID NO: 17237 - DNA, 58 bp, Artificial
  Synthetic oligonucleotide
acctctctttacgcggtctccccgtctgtgccttcacatctgccgggccgtgtgcact

SEQ ID NO: 17238 - DNA, 57 bp, Artificial
  Synthetic oligonucleotide
acgaatctagccacctgggtgggtggtaatttggatgatccaacatccagggaccta

SEQ ID NO: 17239 - DNA, 52 bp, Artificial
  Synthetic oligonucleotide
tgggagcatttgggccggggttcactcccccacacggaggccttttggggtg

SEQ ID NO: 17240 - DNA, 57 bp, Artificial
  Synthetic oligonucleotide
tttccgtcggttcgcgatctccttgacacagcttcagcgctttaccgggaagcctta

SEQ ID NO: 17241 - DNA, 57 bp, Artificial
  Synthetic oligonucleotide
caatgttagtattccttggactcataaggtgggaaactttactgggctctattctgc

SEQ ID NO: 17242 - DNA, 58 bp, Artificial
  Synthetic oligonucleotide
ggaagagaaactgttcttgagtatttggtgtcttttggagtgtggattcgcactcctc

SEQ ID NO: 17243 - DNA, 57 bp, Artificial
  Synthetic oligonucleotide
tggccaaaattcgcagtccccaacctccaatcactcaccaacctcctgtcctccaat

SEQ ID NO: 17244 - DNA, 54 bp, Artificial
  Synthetic oligonucleotide
aagcggatatctaaacatttggttacatttaaaggtcagccttataattgggaa

SEQ ID NO: 17245 - DNA, 56 bp, Artificial
  Synthetic oligonucleotide
ccgcctccgtacttggttgtcaactcctgaaaagtatagaggcagggatgccccga

SEQ ID NO: 17246 - DNA, 53 bp, Artificial
  Synthetic oligonucleotide
tggttaccaaaacctcgcaaaggcatggggacgaatctttctgttcccaaccc

SEQ ID NO: 17247 - DNA, 55 bp, Artificial
  Synthetic oligonucleotide
cctgcgcgggacgtcctttgtttacgtcccgtcagcgctgaatcccgcggacgac

SEQ ID NO: 17248 - DNA, 59 bp, Artificial
  Synthetic oligonucleotide
cacacggaggccttttggggtggagccctcaggctcaaggcatgctaaaaacattgcca

SEQ ID NO: 17249 - DNA, 54 bp, Artificial
  Synthetic oligonucleotide
gaacctcaatgttgatattccttggactcataaggtgggaaattttacggggct

SEQ ID NO: 17250 - DNA, 56 bp, Artificial
  Synthetic oligonucleotide
aaatgcccctatcttatcaacacttccggaaactactgttgttagacgacgacgca

SEQ ID NO: 17251 - DNA, 54 bp, Artificial
  Synthetic oligonucleotide
aggcatggggacgaatctttctgttcccaaccctctgggattctttcccgaaca

SEQ ID NO: 17252 - DNA, 54 bp, Artificial
  Synthetic oligonucleotide
tggaaactgcaacccggggacgatcctctcctgggaaccaagtcgttactagaa

SEQ ID NO: 17253 - DNA, 59 bp, Artificial
  Synthetic oligonucleotide
gctcagtttactagtgcaatttgttcagtggtgcgtaggactttcccccactgtctggc

SEQ ID NO: 17254 - DNA, 56 bp, Artificial
  Synthetic oligonucleotide
aacctagatgtatactctccgattctacctttgtttgccacaaacgttatcagacg

SEQ ID NO: 17255 - DNA, 55 bp, Artificial
  Synthetic oligonucleotide
attaacgagtgcccttcccgaaattggaaatatctgactccagccaagttttggc

SEQ ID NO: 17256 - DNA, 58 bp, Artificial
  Synthetic oligonucleotide
ttaatgaatctggctacctgggtgggaagtaatttggaagatccagcatccagggaat

SEQ ID NO: 17257 - DNA, 58 bp, Artificial
  Synthetic oligonucleotide
catacctccgacatcaccaacgcagtggaaactgcaacccggggacgatccactcctg

SEQ ID NO: 17258 - DNA, 59 bp, Artificial
  Synthetic oligonucleotide
ttcggacggaaattgcacttgtattcccatcccatcatcttgggctttcgcaagattcc

SEQ ID NO: 17259 - DNA, 58 bp, Artificial
  Synthetic oligonucleotide
gagaaaccgtcatagagtatttggtgtcttttggagtgtggattcgcactcctaccgc

SEQ ID NO: 17260 - DNA, 57 bp, Artificial
  Synthetic oligonucleotide
attcgcactcctcccgcttacagaccaccaaatgcccctatcttatcaacacttccg

SEQ ID NO: 17261 - DNA, 57 bp, Artificial
  Synthetic oligonucleotide
cggaactcctagccgcttgttttgctcgcagccggtctggagcgaaacttatcggga

SEQ ID NO: 17262 - DNA, 56 bp, Artificial
  Synthetic oligonucleotide
cttagcccgtttctcttggctcagtttactagtgcccttgcttcaatggttaggag

SEQ ID NO: 17263 - DNA, 58 bp, Artificial
  Synthetic oligonucleotide
gtgggcctcagtccgtttctcttggctcagtttactagtgccatttgttcagtggttc

SEQ ID NO: 17264 - DNA, 59 bp, Artificial
  Synthetic oligonucleotide
cggagtgtggattcgcactcctccaccctatagaccaccaaatgcccctatcttatcaa

SEQ ID NO: 17265 - DNA, 58 bp, Artificial
  Synthetic oligonucleotide
tttgctggggggatgtaatgaatctagctacctgggtgggtgcaaatttggaagatcc

SEQ ID NO: 17266 - DNA, 59 bp, Artificial
  Synthetic oligonucleotide
acctcctttccatggctgctagggtgtgctgccaactggatcctgcgcgggacgtcctt

SEQ ID NO: 17267 - DNA, 57 bp, Artificial
  Synthetic oligonucleotide
tcccgcttacagaccatcaaatgcccctatcttatcaacacttccggaaactactgt

SEQ ID NO: 17268 - DNA, 52 bp, Artificial
  Synthetic oligonucleotide
tgggccggggttcactcccccacacggaggccttttggggtggagccctcag

SEQ ID NO: 17269 - DNA, 58 bp, Artificial
  Synthetic oligonucleotide
cagttactctcgtttttgcctgctgacttctttccttcggtacgagatcttctagata

SEQ ID NO: 17270 - DNA, 56 bp, Artificial
  Synthetic oligonucleotide
gggaactaccgtgtgtcctggccaaaattcgcagtccccaacctccaatcactcac

SEQ ID NO: 17271 - DNA, 51 bp, Artificial
  Synthetic oligonucleotide
aggttctatcctaacctcaccaaatacttaccgttagacaagggtattaaa

SEQ ID NO: 17272 - DNA, 58 bp, Artificial
  Synthetic oligonucleotide
tactctcgtttttgcctgctgacttctttcctaacgttagagatctcctagacaccgc

SEQ ID NO: 17273 - DNA, 57 bp, Artificial
  Synthetic oligonucleotide
agcgtatagaccaccaaatgcccctatcttatcaacacttccggagactactgttat

SEQ ID NO: 17274 - DNA, 57 bp, Artificial
  Synthetic oligonucleotide
attaagagacttgacaacaacggaacgccaacacaatgcctatggagatccttttac

SEQ ID NO: 17275 - DNA, 56 bp, Artificial
  Synthetic oligonucleotide
attgtgtgttggggtgagttaatgaatctagccacctgggtgggaagtaatttgga

SEQ ID NO: 17276 - DNA, 58 bp, Artificial
  Synthetic oligonucleotide
tccagacgcgacattatttacacactctttggaaggcggggatcttatataaaagaga

SEQ ID NO: 17277 - DNA, 59 bp, Artificial
  Synthetic oligonucleotide
agagtattggtgtctttcggagtgtggattcgcactcctccagcttatagaccaccaaa

SEQ ID NO: 17278 - DNA, 59 bp, Artificial
  Synthetic oligonucleotide
attcccatcccatcatcttgggctttcgcaagattcctatgggagtgggcctcagtccg

SEQ ID NO: 17279 - DNA, 58 bp, Artificial
  Synthetic oligonucleotide
cggaactcctagccgcttgttttgctcgcagcaggtctggagcaaccgttctcgggac

SEQ ID NO: 17280 - DNA, 57 bp, Artificial
  Synthetic oligonucleotide
cttttggaagagaaaccgtcatagagtatttggtgtcttttggagtgtggattcgca

SEQ ID NO: 17281 - DNA, 54 bp, Artificial
  Synthetic oligonucleotide
aaatgagtgcccttcccgaaattggaaatatctgactccggccaaattttggcc

SEQ ID NO: 17282 - DNA, 57 bp, Artificial
  Synthetic oligonucleotide
tctcttggctcagtttactagtgccatttgttcagtggttcgtagggctttccccca

SEQ ID NO: 17283 - DNA, 59 bp, Artificial
  Synthetic oligonucleotide
caactcagtggaaattacagccaggagacgatccactcctgggaaacaagtctctgttg

SEQ ID NO: 17284 - DNA, 54 bp, Artificial
  Synthetic oligonucleotide
agatggggatattcccttaatttcatgggatatgtaattgggggttggggctcc

SEQ ID NO: 17285 - DNA, 52 bp, Artificial
  Synthetic oligonucleotide
caatgttagtattccttggactcataaggtgggaaactttaccggtctttac

SEQ ID NO: 17286 - DNA, 56 bp, Artificial
  Synthetic oligonucleotide
ctgtcaccaaccctttgggattcttccccgagcatcaattggacccgctgttccga

SEQ ID NO: 17287 - DNA, 58 bp, Artificial
  Synthetic oligonucleotide
actggatcctgcgcgggacgtcctttgtctacgtcccgtcagcgctgaatcccgcgga

SEQ ID NO: 17288 - DNA, 54 bp, Artificial
  Synthetic oligonucleotide
atgggagtgggccttagcccgtttctcttggctcagtttactagtgcccttact

SEQ ID NO: 17289 - DNA, 58 bp, Artificial
  Synthetic oligonucleotide
ggtactgacaactctgttgtcctttctcggaaatacacctcctttccatggctgctag

SEQ ID NO: 17290 - DNA, 54 bp, Artificial
  Synthetic oligonucleotide
aacctttcgggctcctctaccgatccatactgcggaactcctagccgcttgttt

SEQ ID NO: 17291 - DNA, 56 bp, Artificial
  Synthetic oligonucleotide
ccctatcttatcaacacttccggaaactactgttgttagacgacgaggcaggtcca

SEQ ID NO: 17292 - DNA, 54 bp, Artificial
  Synthetic oligonucleotide
tgttagtattccttggactcataaggtgggaaactttactgggctttattcctc

SEQ ID NO: 17293 - DNA, 56 bp, Artificial
  Synthetic oligonucleotide
ttatagaccaccaaatgcccctatcttgtcaacacttccggaaactactgttgtta

SEQ ID NO: 17294 - DNA, 58 bp, Artificial
  Synthetic oligonucleotide
gcgggctcccctctcccacgtagttcgagcagccaccctagatctccctcgcctagga

SEQ ID NO: 17295 - DNA, 53 bp, Artificial
  Synthetic oligonucleotide
ccaggtaggagtgggagcattcgggccggggttcactcccccacacggaggcc

SEQ ID NO: 17296 - DNA, 54 bp, Artificial
  Synthetic oligonucleotide
ctccacggtattccaccgaactttacaagatcccagagtgaggggcctgtattt

SEQ ID NO: 17297 - DNA, 59 bp, Artificial
  Synthetic oligonucleotide
gcgtggaacctttgaggctcctctgccgatccatactgcggaactcctagccgcttgtt

SEQ ID NO: 17298 - DNA, 57 bp, Artificial
  Synthetic oligonucleotide
ggggtcggcctcagtccgtttctcttggctcagtttactagtgccatttgttcagtg

SEQ ID NO: 17299 - DNA, 54 bp, Artificial
  Synthetic oligonucleotide
gccaacaaggtaggagtgggagcatttgggccggggttcactcccccacacgga

SEQ ID NO: 17300 - DNA, 57 bp, Artificial
  Synthetic oligonucleotide
caactcaaacaatccagattgggacttcaaccccatcaaggaccactggccaaaagc

SEQ ID NO: 17301 - DNA, 58 bp, Artificial
  Synthetic oligonucleotide
tcagaatacctgtgttggggtgagttgatgaatctggccacctgggtgggaagtaatt

SEQ ID NO: 17302 - DNA, 56 bp, Artificial
  Synthetic oligonucleotide
atacctatgggagtgggcctcagtccgtttctcttggctcagtttactagtgccgt

SEQ ID NO: 17303 - DNA, 56 bp, Artificial
  Synthetic oligonucleotide
ggcccaaccaggcacaaacctcctgattggacggccgttacatacacccctctctc

SEQ ID NO: 17304 - DNA, 55 bp, Artificial
  Synthetic oligonucleotide
taattccacctactaccgtaccagtaccggagggttttctcattactcatagtga

SEQ ID NO: 17305 - DNA, 58 bp, Artificial
  Synthetic oligonucleotide
acggtcctagagtatttggtgtctttcggagtgtggattcgcactcctccagcttata

SEQ ID NO: 17306 - DNA, 51 bp, Artificial
  Synthetic oligonucleotide
acgttcaaagtcccggggaaggagagcccctacaccccaacgtgcgggctc

SEQ ID NO: 17307 - DNA, 56 bp, Artificial
  Synthetic oligonucleotide
ctgctattactaaccaagtaaactttagcttctcttcatcctataggactttgtta

SEQ ID NO: 17308 - DNA, 54 bp, Artificial
  Synthetic oligonucleotide
ccaagtaaactttagcttctcttcatcctataggactttgttatataaactaac

SEQ ID NO: 17309 - DNA, 54 bp, Artificial
  Synthetic oligonucleotide
caatgctagtattccttggactcataaggtgggaaactttacggggctttattc

SEQ ID NO: 17310 - DNA, 57 bp, Artificial
  Synthetic oligonucleotide
tactagtgcaatttgttcagtggtgcgtagggctttcccccactgtctggcttttag

SEQ ID NO: 17311 - DNA, 55 bp, Artificial
  Synthetic oligonucleotide
cggaaacttcctataaatagacctattgattggaaagtatgtcaaagaattgtgg

SEQ ID NO: 17312 - DNA, 56 bp, Artificial
  Synthetic oligonucleotide
aagctattctgtgttggggtgagttgatgaatttagccacctgggtgggaagtaat

SEQ ID NO: 17313 - DNA, 59 bp, Artificial
  Synthetic oligonucleotide
gagaaaccgtcatagagtatttggtgtcttttggagtgtggattcgcactcctctagct

SEQ ID NO: 17314 - DNA, 57 bp, Artificial
  Synthetic oligonucleotide
cccaacctccaatcactcaccaaccttctgtcctccaacttgtcctggttatcgctg

SEQ ID NO: 17315 - DNA, 53 bp, Artificial
  Synthetic oligonucleotide
aatctcgggaatcccaatgttagtatcccctggactcataaggtgggaaactt

SEQ ID NO: 17316 - DNA, 53 bp, Artificial
  Synthetic oligonucleotide
agaatcaaacaatgtttccgaaaactccctgttaaccgtcccattgattggaa

SEQ ID NO: 17317 - DNA, 54 bp, Artificial
  Synthetic oligonucleotide
tgtttccgaaaactccctgttaaccgtcccattgattggaaagtctgtcaaaga

SEQ ID NO: 17318 - DNA, 51 bp, Artificial
  Synthetic oligonucleotide
ctcgccaacttacaaggcctttctgggtaaacaatccttgaacctttaccc

SEQ ID NO: 17319 - DNA, 56 bp, Artificial
  Synthetic oligonucleotide
gcccctacaccccaacgtgcgggctcccctctcccacgtagttcgagcagccacca

SEQ ID NO: 17320 - DNA, 57 bp, Artificial
  Synthetic oligonucleotide
ccatcatcttgggctttcgcaaaatacctatgggagtgggcctcagtccgtttctct

SEQ ID NO: 17321 - DNA, 57 bp, Artificial
  Synthetic oligonucleotide
aaattcctatgggagtgggcctcagtccgtttctcttggctcagtttactagcgcca

SEQ ID NO: 17322 - DNA, 58 bp, Artificial
  Synthetic oligonucleotide
ggattcgcactcctccaccctatagacctccaaatgcccctatcttatcaacacttcc

SEQ ID NO: 17323 - DNA, 59 bp, Artificial
  Synthetic oligonucleotide
atctcctatacaattgtactttgtaccgagtaaatataatcctgctgacggcccatcca

SEQ ID NO: 17324 - DNA, 57 bp, Artificial
  Synthetic oligonucleotide
gtacacaaccttcggacggaaattgcacttgtattcccatcccatcatcttgggctt

SEQ ID NO: 17325 - DNA, 51 bp, Artificial
  Synthetic oligonucleotide
gtgaacaatttgtaggtcctctaacagtaaacgaaaaacgaagattaaact

SEQ ID NO: 17326 - DNA, 56 bp, Artificial
  Synthetic oligonucleotide
caatcctcaagagattccccaacctgtattcttggccgaagacgatcaaaaagccc

SEQ ID NO: 17327 - DNA, 56 bp, Artificial
  Synthetic oligonucleotide
taggacccctgctcgtgttacaggcggggtttttctcgttgacaagaatcctcaca

SEQ ID NO: 17328 - DNA, 58 bp, Artificial
  Synthetic oligonucleotide
gatccatacggcggaactcctagccgcttgttttgctcgctgccggtcgggagcaaaa

SEQ ID NO: 17329 - DNA, 55 bp, Artificial
  Synthetic oligonucleotide
gaggttggtcctcaaaacctcgcaaaggcatggggacgaatctttctgttcccaa

SEQ ID NO: 17330 - DNA, 59 bp, Artificial
  Synthetic oligonucleotide
cgctgtctgctcttttctacaagaattaggtatacgcataaactttgataagactactc

SEQ ID NO: 17331 - DNA, 57 bp, Artificial
  Synthetic oligonucleotide
gtgtcctggccaaaattcgcagtccccaacctccaatcactcactaacctcttgtcc

SEQ ID NO: 17332 - DNA, 59 bp, Artificial
  Synthetic oligonucleotide
tcccccgggcatgtttgggagtcggctaatccattctgtggcgagagcacactttacac

SEQ ID NO: 17333 - DNA, 54 bp, Artificial
  Synthetic oligonucleotide
aaccatcccctatgccttatgtgccttacccccggtccaccgaggtctatgtcc

SEQ ID NO: 17334 - DNA, 56 bp, Artificial
  Synthetic oligonucleotide
gtcctttatgctgcccctcttagcccgcttttgccccttcaggacggcaccaatac

SEQ ID NO: 17335 - DNA, 56 bp, Artificial
  Synthetic oligonucleotide
ggtttacttgacatcgccctccaggttgaatatcgcaatttgacccctggtaacac

SEQ ID NO: 17336 - DNA, 57 bp, Artificial
  Synthetic oligonucleotide
tacgaattccgtgatttgagagtggcagcgtttaaaggggatgattcagtggttctt

SEQ ID NO: 17337 - DNA, 55 bp, Artificial
  Synthetic oligonucleotide
caaccggtgagaccattgcccacggtaaggttggccagggtatatcggcctggag

SEQ ID NO: 17338 - DNA, 59 bp, Artificial
  Synthetic oligonucleotide
actttcacggagaccacgattatagctacggctgacgccaggggccttatccagtcatc

SEQ ID NO: 17339 - DNA, 59 bp, Artificial
  Synthetic oligonucleotide
gcttatgaggggtctgaggtcgaccctgctgagcccgccccgtctgatgtatcggggac

SEQ ID NO: 17340 - DNA, 59 bp, Artificial
  Synthetic oligonucleotide
gcatagccccgacgttgtttaacttagctgatacacttctcggtggtctgccgacagaa

SEQ ID NO: 17341 - DNA, 59 bp, Artificial
  Synthetic oligonucleotide
ccgcgtcccgtcacctcgatgtctccactagactctgcaccagggcaggccgccccgtg

SEQ ID NO: 17342 - DNA, 59 bp, Artificial
  Synthetic oligonucleotide
gaccctaaccaaatccctgccatcgacttcgagcataccggccttgtgccagcgattag

SEQ ID NO: 17343 - DNA, 53 bp, Artificial
  Synthetic oligonucleotide
cccctccgctcctggggaagtgtccgcgttttgttcagctctttacaggttta

SEQ ID NO: 17344 - DNA, 54 bp, Artificial
  Synthetic oligonucleotide
acttgagcttgagttccgtaatttgacacctgggaacactaacacccgcgtttc

SEQ ID NO: 17345 - DNA, 58 bp, Artificial
  Synthetic oligonucleotide
ctagaggccaatgggccggaacagtacgtgctgtcatttgacccggctaagcaaacca

SEQ ID NO: 17346 - DNA, 58 bp, Artificial
  Synthetic oligonucleotide
tcccccggtcatagttgggagtctgccaatcccttctgcggtgagagcaccctttaca

SEQ ID NO: 17347 - DNA, 59 bp, Artificial
  Synthetic oligonucleotide
cgtctgctccgccttcattacatattctagaccgccgacccgtaggtgatcccaggcac

SEQ ID NO: 17348 - DNA, 59 bp, Artificial
  Synthetic oligonucleotide
gtataatttatccacgtccccgcttacatcatctgttgcctcgggcaccaatctggtcc

SEQ ID NO: 17349 - DNA, 56 bp, Artificial
  Synthetic oligonucleotide
aagcggcccattctgatgttcgcgagtctttagggaggtttatccctactatcgga

SEQ ID NO: 17350 - DNA, 59 bp, Artificial
  Synthetic oligonucleotide
ggcttgagtgccgtacgaccctgggcaataataccttccgcactatgttcactgacggc

SEQ ID NO: 17351 - DNA, 56 bp, Artificial
  Synthetic oligonucleotide
tcggaccgagctaggtcgggcttgtgccggctgtactattagccctggggtagtcc

SEQ ID NO: 17352 - DNA, 58 bp, Artificial
  Synthetic oligonucleotide
cccggcctagcctccgaactcgtcataccaagtgagcgtctccactatcgtaatcagg

SEQ ID NO: 17353 - DNA, 57 bp, Artificial
  Synthetic oligonucleotide
tgtctcgacttaccctacaagtttgggtgctggccctgcgtctatttccgcagtcgg

SEQ ID NO: 17354 - DNA, 54 bp, Artificial
  Synthetic oligonucleotide
ggctgttggaagaagcactctggggaacccggcaccctgttatggaatacggtt

SEQ ID NO: 17355 - DNA, 58 bp, Artificial
  Synthetic oligonucleotide
cggggaccgtgctgtgattacatatgagggggactctagtgccgggtataatcacgac

SEQ ID NO: 17356 - DNA, 56 bp, Artificial
  Synthetic oligonucleotide
aagacgccctgccgccttgacaccacccgagggtcaggccggattagggctcgcac

SEQ ID NO: 17357 - DNA, 57 bp, Artificial
  Synthetic oligonucleotide
ttacaccttgactccccggcctattatccatgctgttgcccctgactaccgggtcga

SEQ ID NO: 17358 - DNA, 59 bp, Artificial
  Synthetic oligonucleotide
gctccttggactggtctaaggtcacccttgatgggcgtccgttgacaactgtccagcaa

SEQ ID NO: 17359 - DNA, 59 bp, Artificial
  Synthetic oligonucleotide
cgtgttgctatttctacctataccactagcctgggtgctggtcccacgtcaatttctgc

SEQ ID NO: 17360 - DNA, 58 bp, Artificial
  Synthetic oligonucleotide
gagtcttttgaccccgctgagtttatcatgtccgacgggtttgctgcctacaccctga

SEQ ID NO: 17361 - DNA, 59 bp, Artificial
  Synthetic oligonucleotide
actacctacggctcttctaccaatcccatgtatgtttctgatactgtgacgttcgtcaa

SEQ ID NO: 17362 - DNA, 55 bp, Artificial
  Synthetic oligonucleotide
atttcgtcggctggaggtcaactgttttactcccgcccggttgtctcagccaatg

SEQ ID NO: 17363 - DNA, 54 bp, Artificial
  Synthetic oligonucleotide
tttcggcctggagtaaaaccttttgtgctctatttggaccgtggttccgtgcca

SEQ ID NO: 17364 - DNA, 55 bp, Artificial
  Synthetic oligonucleotide
gcccgctcccttgactggtctaaggttactttggatggtcgtcccctcaccacta

SEQ ID NO: 17365 - DNA, 54 bp, Artificial
  Synthetic oligonucleotide
ggagggggcgtgtgcggcgcgttttacggacgctttccagaggcctttgaccga

SEQ ID NO: 17366 - DNA, 55 bp, Artificial
  Synthetic oligonucleotide
tatgccttatgttccttacccccggtctaccgaggtctatgttcggtcaatcttc

SEQ ID NO: 17367 - DNA, 57 bp, Artificial
  Synthetic oligonucleotide
gagggttgacgaatgttgcgcaggtttgtgttgatgttgtgtcccgtgtttacggag

SEQ ID NO: 17368 - DNA, 54 bp, Artificial
  Synthetic oligonucleotide
tgcccgttttatcccgaccattggccccgtacaagttacaacctgtgaattgta

SEQ ID NO: 17369 - DNA, 59 bp, Artificial
  Synthetic oligonucleotide
tacccacttcttggctcaggtatataccaggtccctgtcagtcttagttttgatgcctg

SEQ ID NO: 17370 - DNA, 59 bp, Artificial
  Synthetic oligonucleotide
atgggccagagcagtacgttttgtcacttgacctggcgaaacaaactatggcagcgggc

SEQ ID NO: 17371 - DNA, 58 bp, Artificial
  Synthetic oligonucleotide
gtccgcatccttgtccaacccggtatagcttccgagttggtgatccccagtgagcgcc

SEQ ID NO: 17372 - DNA, 59 bp, Artificial
  Synthetic oligonucleotide
catgtctgggagtcggctaaaccattctgtggcgagagcacactttacacccgtacttg

SEQ ID NO: 17373 - DNA, 54 bp, Artificial
  Synthetic oligonucleotide
atggtgcccccattaattcgtttaccaattcagcctacaccggtgcattaggtt

SEQ ID NO: 17374 - DNA, 58 bp, Artificial
  Synthetic oligonucleotide
gcatccacggtgctcccattaattcgtttaccaattcagcctacaccggtgcattagg

SEQ ID NO: 17375 - DNA, 59 bp, Artificial
  Synthetic oligonucleotide
gccatgggatgacacgcttatacgcagcccttcatctaccccctgaggttttgttacca

SEQ ID NO: 17376 - DNA, 54 bp, Artificial
  Synthetic oligonucleotide
acttttgatgagaggctgcccccgggtaccccctcttctcttagtggcgtctgg

SEQ ID NO: 17377 - DNA, 55 bp, Artificial
  Synthetic oligonucleotide
aattgatttcgtcggctgggggtcagttgttctactcccgccctgttgtctcggc

SEQ ID NO: 17378 - DNA, 59 bp, Artificial
  Synthetic oligonucleotide
gaacagggtctactttatatgcctcaggaattgaccacgtctgatagtgtgcttacgtt

SEQ ID NO: 17379 - DNA, 59 bp, Artificial
  Synthetic oligonucleotide
tcccgttattcgagtagcgcgcgccacaagctacgtcgtgggcccgacggtactgctga

SEQ ID NO: 17380 - DNA, 57 bp, Artificial
  Synthetic oligonucleotide
cccacccgaggtccatcaatgacaaccctaatgtcttgcaccggtgcttcctacgcc

SEQ ID NO: 17381 - DNA, 56 bp, Artificial
  Synthetic oligonucleotide
tctgaggggtcggcgattgtcccactgcccgaggccccggttagtaagcctgctaa

SEQ ID NO: 17382 - DNA, 58 bp, Artificial
  Synthetic oligonucleotide
ttacatccctggtcgtcagttggagttctacgtccagtgtaggcgctggctttcggac

SEQ ID NO: 17383 - DNA, 58 bp, Artificial
  Synthetic oligonucleotide
cgcttacgtcatctgttgcttcgggtaccaatttggtcctttatgctgccccgctgaa

SEQ ID NO: 17384 - DNA, 59 bp, Artificial
  Synthetic oligonucleotide
tacacggagaccactattattgccacggcagatgcccggggccttattcagtcgtcacg

SEQ ID NO: 17385 - DNA, 59 bp, Artificial
  Synthetic oligonucleotide
gcatgaccccatgccagggtaagaatggacgtctcgcagtttgcagagtccaagggggt

SEQ ID NO: 17386 - DNA, 56 bp, Artificial
  Synthetic oligonucleotide
ttgtacctgaccgagccagctatagcttggtttgaggctaaccggcctaccctccc

SEQ ID NO: 17387 - DNA, 58 bp, Artificial
  Synthetic oligonucleotide
gtctctcgctccctggattggtctaaagttactcttgatgggcgcccgcttactacta

SEQ ID NO: 17388 - DNA, 59 bp, Artificial
  Synthetic oligonucleotide
acacttctcggcgggctgccgacagaattgatttcgtcggctggaggtcaactattcta

SEQ ID NO: 17389 - DNA, 59 bp, Artificial
  Synthetic oligonucleotide
gccgtcacctatgccttatgtcccctaccctcgttcaactgaggtgtatgtccgatcta

SEQ ID NO: 17390 - DNA, 57 bp, Artificial
  Synthetic oligonucleotide
acagaattgatttcgtcggctgggggccagttgttctactcccgccctgtcgtctca

SEQ ID NO: 17391 - DNA, 59 bp, Artificial
  Synthetic oligonucleotide
cccgccatcaggcctgacttagcccctacttcctggtggcatgttacccatcgctgccc

SEQ ID NO: 17392 - DNA, 56 bp, Artificial
  Synthetic oligonucleotide
ttttactcccgccccgtcgtctcagccaatggcgagccgacagttaagttgtacac

SEQ ID NO: 17393 - DNA, 54 bp, Artificial
  Synthetic oligonucleotide
attatgcccagtaccgggttgcccgtgccacaatccgttaccgcccgcttgttc

SEQ ID NO: 17394 - DNA, 58 bp, Artificial
  Synthetic oligonucleotide
tcaccaatgccttatgtcccgtacccccggtcgacagaggtgtatgtccgctctatat

SEQ ID NO: 17395 - DNA, 56 bp, Artificial
  Synthetic oligonucleotide
cagaattgatttcgtcggctggaggtcaactattttactcccgcccggttgtctca

SEQ ID NO: 17396 - DNA, 56 bp, Artificial
  Synthetic oligonucleotide
gcttccgacagaattgatttcgtcggctggaggtcaattattctactcccgccccg

SEQ ID NO: 17397 - DNA, 55 bp, Artificial
  Synthetic oligonucleotide
ggtcatagctgggagtctgctaaccccttttgcggggagagtactctttataccc

SEQ ID NO: 17398 - DNA, 56 bp, Artificial
  Synthetic oligonucleotide
ggtttgtgattttcttcgagggttaacgaatgttgcgcaggtttgtgttgatgttg

SEQ ID NO: 17399 - DNA, 56 bp, Artificial
  Synthetic oligonucleotide
tcggtgggctaccgacagaattgatttcgtcggccggaggtcaattattctactcc

SEQ ID NO: 17400 - DNA, 54 bp, Artificial
  Synthetic oligonucleotide
gtggccaccggtacaaacttggttctttacgccgctcctcttagcccgcttcta

SEQ ID NO: 17401 - DNA, 59 bp, Artificial
  Synthetic oligonucleotide
gcgggtctatggtgttagccccggcttagtacataacctgattggaatgcttcagacta

SEQ ID NO: 17402 - DNA, 54 bp, Artificial
  Synthetic oligonucleotide
acagaattgatttcgtcggccggaggccaattgttttactcacgccccgtcgtc

SEQ ID NO: 17403 - DNA, 56 bp, Artificial
  Synthetic oligonucleotide
acctatgccttatgtcccctaccctcgttcaacggaggtgtatgttcgatccatat

SEQ ID NO: 17404 - DNA, 59 bp, Artificial
  Synthetic oligonucleotide
agctcatacgcggggcctatcctaaaatccagaccacgagtcgtgtgttacgatctctg

SEQ ID NO: 17405 - DNA, 58 bp, Artificial
  Synthetic oligonucleotide
gcagtataatctgtccacgtccccgcttacgtcatctgtcgcttcgggtactaatttg

SEQ ID NO: 17406 - DNA, 54 bp, Artificial
  Synthetic oligonucleotide
acgcttctcggtggtttaccgacagaattgatttcgtcggctgggggtcaactg

SEQ ID NO: 17407 - DNA, 59 bp, Artificial
  Synthetic oligonucleotide
cagcctacacacctcataccgcagcccgtgttactcgtggccgtagagttgttattgac

SEQ ID NO: 17408 - DNA, 58 bp, Artificial
  Synthetic oligonucleotide
ttactcccgccccgtcgtctcagccaatggcgagccgactgtgaaactttacacctca

SEQ ID NO: 17409 - DNA, 55 bp, Artificial
  Synthetic oligonucleotide
ctatgccctacgtcccttaccctcgttcgacggaggtgtatgttcgatccatatt

SEQ ID NO: 17410 - DNA, 56 bp, Artificial
  Synthetic oligonucleotide
tatgccttatgtcccttaccctcgttcgacggaggtgtacgtccgatctatattcg

SEQ ID NO: 17411 - DNA, 55 bp, Artificial
  Synthetic oligonucleotide
gatgttcgcgagtctttagggaggtttatccctactatcggtccggtccaggcta

SEQ ID NO: 17412 - DNA, 55 bp, Artificial
  Synthetic oligonucleotide
cggtggctaggtcaagactgtacctgttttcttcagcccatagaagggagggtcg

SEQ ID NO: 17413 - DNA, 58 bp, Artificial
  Synthetic oligonucleotide
gtcatagctgggagtccaccaatcctttttgcggtgagagcaccctttatacccgcac

SEQ ID NO: 17414 - DNA, 57 bp, Artificial
  Synthetic oligonucleotide
gcctaccgacagaattgatttcgtcggccggtggccaactgttctattcacgcccag

SEQ ID NO: 17415 - DNA, 57 bp, Artificial
  Synthetic oligonucleotide
ggtttcgcgttccctggactggtctaaggtcactcttgatgggcgcccactgactac

SEQ ID NO: 17416 - DNA, 59 bp, Artificial
  Synthetic oligonucleotide
cgaacggtcctgagcaatatgttctatcgtttgacgcctcccgccagtctatgggagcc

SEQ ID NO: 17417 - DNA, 51 bp, Artificial
  Synthetic oligonucleotide
tttcccgtgtttacggggtttcccctgggctcgttcataacctgattggta

SEQ ID NO: 17418 - DNA, 59 bp, Artificial
  Synthetic oligonucleotide
cctcgctgtttgtgacttccttcgagggttgacgaatgttgcgcaggtttgtgttgatg

SEQ ID NO: 17419 - DNA, 57 bp, Artificial
  Synthetic oligonucleotide
ccctataattacaatacgactgctagtgaccaaattttaattgagaacgcagccggc

SEQ ID NO: 17420 - DNA, 52 bp, Artificial
  Synthetic oligonucleotide
aaatttgacccctgggaacactaacacccgtgtgtcccgttacactagtaca

SEQ ID NO: 17421 - DNA, 55 bp, Artificial
  Synthetic oligonucleotide
ttccccctgaggtgctgctaccacccggcacctaccacacaacctcgtaccttct

SEQ ID NO: 17422 - DNA, 57 bp, Artificial
  Synthetic oligonucleotide
gcggccaactctgccttggcgaatgctgtggtggttcggccctttttatcccgccaa

SEQ ID NO: 17423 - DNA, 54 bp, Artificial
  Synthetic oligonucleotide
gcgggctgccgacagaattaatttcgtcggccgggggtcaactgttctactccc

SEQ ID NO: 17424 - DNA, 52 bp, Artificial
  Synthetic oligonucleotide
ccgacagaattaatttcgtcggccgggggtcagatattctactcccgccccg

SEQ ID NO: 17425 - DNA, 55 bp, Artificial
  Synthetic oligonucleotide
ctatgccttatgtcccttacccccgttcgacagaggtgtatgttcggtctatatt

SEQ ID NO: 17426 - DNA, 55 bp, Artificial
  Synthetic oligonucleotide
atacgcggggcctatcccaaaatccagaccacgagtcgtgtgttacggtctctgt

SEQ ID NO: 17427 - DNA, 57 bp, Artificial
  Synthetic oligonucleotide
gcgggtctatggtgttagtcccggtttggtacataacctgatcgggatgctccagac

SEQ ID NO: 17428 - DNA, 59 bp, Artificial
  Synthetic oligonucleotide
cacgctgtcccggttcatatctgggaccggcttatgctttttggtgccaccctagatga

SEQ ID NO: 17429 - DNA, 56 bp, Artificial
  Synthetic oligonucleotide
tcggcgggttgccgacagaattgatttcgtcggctggaggtcaactgttttactcc

SEQ ID NO: 17430 - DNA, 58 bp, Artificial
  Synthetic oligonucleotide
ctgttttactctcgccccgtcgtctcagccaatggcgagccgactgtgaaactttaca

SEQ ID NO: 17431 - DNA, 56 bp, Artificial
  Synthetic oligonucleotide
gggttttggaagaaacactccggtgagcccggcactcttctatggaatactgtctg

SEQ ID NO: 17432 - DNA, 57 bp, Artificial
  Synthetic oligonucleotide
agctggttatttgagaagtctggtcgtgattacatccccggccgccaacttcagttc

SEQ ID NO: 17433 - DNA, 59 bp, Artificial
  Synthetic oligonucleotide
ggtcctggcggttcaccatcccttttcccatctgcctgctctaccaagtccacatttca

SEQ ID NO: 17434 - DNA, 59 bp, Artificial
  Synthetic oligonucleotide
ccggcgattcggcccgagcttgttccaacgaattggtggcacctcacgcacagatgccc

SEQ ID NO: 17435 - DNA, 54 bp, Artificial
  Synthetic oligonucleotide
tatgctggtgttgttgtggccccgggccttggtaccctccccgatgtcgttagg

SEQ ID NO: 17436 - DNA, 54 bp, Artificial
  Synthetic oligonucleotide
gtcggccgggggtcaattgttttactcccgccctgttgtctcggccaatggcga

SEQ ID NO: 17437 - DNA, 52 bp, Artificial
  Synthetic oligonucleotide
cctcccggaggcctaggtcaaattatgcgtcgttgtttcgctccccgtcccc

SEQ ID NO: 17438 - DNA, 54 bp, Artificial
  Synthetic oligonucleotide
taaaaccctgcgtccaagccgctccactcgggacttactccaggcgggtcgccc

SEQ ID NO: 17439 - DNA, 52 bp, Artificial
  Synthetic oligonucleotide
ggacattgcgcgttctcgggtacaaaggtgacggaaaagtaacgggaccgtc

SEQ ID NO: 17440 - DNA, 52 bp, Artificial
  Synthetic oligonucleotide
ccccattcggtggcttttctaggttcgggacattttcgcggcggttctagac

SEQ ID NO: 17441 - DNA, 54 bp, Artificial
  Synthetic oligonucleotide
atccccaactgtgcgcacagggttcgcgagtgttaccaccccgccttccgtccg

SEQ ID NO: 17442 - DNA, 52 bp, Artificial
  Synthetic oligonucleotide
ctaaagacccgatccagaagcctaaccccgaccctaaagacccgatccagaa

SEQ ID NO: 17443 - DNA, 58 bp, Artificial
  Synthetic oligonucleotide
tggcaaagacttaattttctgcctgtaccagcctagcacaaagagggttgactgggac

SEQ ID NO: 17444 - DNA, 50 bp, Artificial
  Synthetic oligonucleotide
accccctgacgcccctccgaccccctgacgcccctccgaccccctgacgc

SEQ ID NO: 17445 - DNA, 53 bp, Artificial
  Synthetic oligonucleotide
gcacacaccccccaccccgcgcgtaaccccatttctttcatggtcccgtaata

SEQ ID NO: 17446 - DNA, 58 bp, Artificial
  Synthetic oligonucleotide
tcgcccccccgtactgtctgaatgccacgtggcaggccgaaaacgccctgcacacgac

SEQ ID NO: 17447 - DNA, 59 bp, Artificial
  Synthetic oligonucleotide
gtcaacaagcaagccatccactgataatcagggtaccagtacccccactattccaactg

SEQ ID NO: 17448 - DNA, 59 bp, Artificial
  Synthetic oligonucleotide
gagtcctccaggcatctgaaaagtctataagcgactagggggctaacgcgaggttcaca

SEQ ID NO: 17449 - DNA, 53 bp, Artificial
  Synthetic oligonucleotide
acccctgcaacaagtgaccgtaccagggcacgcgtccaggcaaccggggtccc

SEQ ID NO: 17450 - DNA, 52 bp, Artificial
  Synthetic oligonucleotide
attcgtacgaggggaggagcgaaggtacgaggggaggagcgaaggtacgagg

SEQ ID NO: 17451 - DNA, 54 bp, Artificial
  Synthetic oligonucleotide
acccagacgtccgcactcttttaccgcctggtgtgaggcaccccggttcaataa

SEQ ID NO: 17452 - DNA, 53 bp, Artificial
  Synthetic oligonucleotide
tcggggcgatgtccccagaggggtccacggggggcctcacgagcgagcggggg

SEQ ID NO: 17453 - DNA, 46 bp, Artificial
  Synthetic oligonucleotide
ccgggggtcgggggtgcgccgggggtcgggggtgcgccgggggtcg

SEQ ID NO: 17454 - DNA, 53 bp, Artificial
  Synthetic oligonucleotide
attcgtgaacctcccgaggggagcgcgtctgcccggaaacctcatcaaccccg

SEQ ID NO: 17455 - DNA, 57 bp, Artificial
  Synthetic oligonucleotide
tagctacgaggatgagccaacctaccctaccagccctaaaactgcctctacggcgtc

SEQ ID NO: 17456 - DNA, 57 bp, Artificial
  Synthetic oligonucleotide
cgaccaacagaaattcggtccgtggcgtgcagacgtacacgtacatccgaccgctaa

SEQ ID NO: 17457 - DNA, 52 bp, Artificial
  Synthetic oligonucleotide
cgttttggcgcggaccgtagatagaacacgccccggtcgtctcggacttccc

SEQ ID NO: 17458 - DNA, 54 bp, Artificial
  Synthetic oligonucleotide
cccgaagccttataaagaccgctaccgcccgccagagagtcgaccgtcgtcctc

SEQ ID NO: 17459 - DNA, 51 bp, Artificial
  Synthetic oligonucleotide
tccaaagccccgacggaagcccggaggaaactccaccgagccctcccgtcc

SEQ ID NO: 17460 - DNA, 55 bp, Artificial
  Synthetic oligonucleotide
cttttcggtgactgagacgcgcgctaagggtcccgggccacaaacagccgtcgga

SEQ ID NO: 17461 - DNA, 48 bp, Artificial
  Synthetic oligonucleotide
gtcccccctcgcgcccctcggtcccccctcgcgcccctcggtcccccc

SEQ ID NO: 17462 - DNA, 53 bp, Artificial
  Synthetic oligonucleotide
cccccgactccaacctcattcaaaatcccgcttgagttccgtaggggaagtga

SEQ ID NO: 17463 - DNA, 58 bp, Artificial
  Synthetic oligonucleotide
cccaactcctcgccctacctcaagatctatgtggccacgaccgctatctcgcccgtgt

SEQ ID NO: 17464 - DNA, 56 bp, Artificial
  Synthetic oligonucleotide
acacggcccctcgcgcattggcccgcgggtcgctcaatgaacccgcattggtcccc

SEQ ID NO: 17465 - DNA, 55 bp, Artificial
  Synthetic oligonucleotide
agtccctcgcgcctccgggtgacaagatagtgtacctgtgccccgtcctggtgtt

SEQ ID NO: 17466 - DNA, 55 bp, Artificial
  Synthetic oligonucleotide
gttgatttatgacaccgcacgcaaacgtgtccacagaacggtttttatttgaggt

SEQ ID NO: 17467 - DNA, 56 bp, Artificial
  Synthetic oligonucleotide
ggtaaaagcggtctgctagcggggcctcatcctcgtagcactcgtccggaaagttg

SEQ ID NO: 17468 - DNA, 54 bp, Artificial
  Synthetic oligonucleotide
ggaagcacggcgagaggacggtagacgggtaggcggtgggggtaggcgacgcga

SEQ ID NO: 17469 - DNA, 54 bp, Artificial
  Synthetic oligonucleotide
gtgtcccaaccgcccgctccgtctagtcttttcgccgcgacgaacgtctttgcc

SEQ ID NO: 17470 - DNA, 54 bp, Artificial
  Synthetic oligonucleotide
acggccggtgttgtctcgtgggacctcgcgtgccgaggggtggttctccggtca

SEQ ID NO: 17471 - DNA, 56 bp, Artificial
  Synthetic oligonucleotide
cgccgcgtcttgggggcccagtcccaggccaccgtgaagtgcggcgtgcgtagaaa

SEQ ID NO: 17472 - DNA, 56 bp, Artificial
  Synthetic oligonucleotide
aaaacactaataaagcgttgagacactagcgcgcgcctccggccgtcatccttggg

SEQ ID NO: 17473 - DNA, 52 bp, Artificial
  Synthetic oligonucleotide
gcgggtgggtacccaacccctcccctcaggacgcgaccgaccggtgtgaaga

SEQ ID NO: 17474 - DNA, 55 bp, Artificial
  Synthetic oligonucleotide
tccgcctctcgacgtatcgtcccgctcctcggaccccgtcaacgtgaccgtcgcc

SEQ ID NO: 17475 - DNA, 57 bp, Artificial
  Synthetic oligonucleotide
ccggtggtgtaactttcccctggagcttgctatctgtaggttcgcttggcgtggata

SEQ ID NO: 17476 - DNA, 56 bp, Artificial
  Synthetic oligonucleotide
gactaagttttactgtgcaaatagcttcagatccccccttagtaaaaacatgcggc

SEQ ID NO: 17477 - DNA, 59 bp, Artificial
  Synthetic oligonucleotide
cacgtggcttaatagttttaatgcatggtatagctttgcggggccgcttctgttgactc

SEQ ID NO: 17478 - DNA, 57 bp, Artificial
  Synthetic oligonucleotide
gctgccgtgggtaggcgtcttggaggtaaaaatctgcccggcgctcagggggtgctc

SEQ ID NO: 17479 - DNA, 58 bp, Artificial
  Synthetic oligonucleotide
aacctgtcaaacatctatacacgtgaaaataagctcctgaacgcctcaaagcaggtgg

SEQ ID NO: 17480 - DNA, 58 bp, Artificial
  Synthetic oligonucleotide
tgtattcatagacggtagtgaaaagggactaaagtctgacttggcagagcaccccgcc

SEQ ID NO: 17481 - DNA, 55 bp, Artificial
  Synthetic oligonucleotide
atacaggatggcacacaccaacgggaccctccattctataaacccacgccccctc

SEQ ID NO: 17482 - DNA, 53 bp, Artificial
  Synthetic oligonucleotide
acatggatggtcccggttccccaaataacgcaacgtggcccaggatcgtcttt

SEQ ID NO: 17483 - DNA, 55 bp, Artificial
  Synthetic oligonucleotide
aggcaacctgggcccggcagcagagatatttaacggcggtttgaggggcgtggcg

SEQ ID NO: 17484 - DNA, 55 bp, Artificial
  Synthetic oligonucleotide
cgcgtgtgtgcgggcttgtgggcgctcgcgtacgcttttaaaacgtaccagcggt

SEQ ID NO: 17485 - DNA, 59 bp, Artificial
  Synthetic oligonucleotide
gattgtgctccccggagacctctctcacggcgacctagccgccctccagaagtgcgagg

SEQ ID NO: 17486 - DNA, 57 bp, Artificial
  Synthetic oligonucleotide
cgcggaagcactgcgggccagggggctatgcaaattaaaccgggcaggggcgagcca

SEQ ID NO: 17487 - DNA, 57 bp, Artificial
  Synthetic oligonucleotide
agcccgtcggatacgtacgcaacagagccgcgccttcagacctgaactcgttacgcg

SEQ ID NO: 17488 - DNA, 58 bp, Artificial
  Synthetic oligonucleotide
acatggttactgtggtccaaaacgcggtatccgaatcgcaatccacaatacacagtcc

SEQ ID NO: 17489 - DNA, 55 bp, Artificial
  Synthetic oligonucleotide
ctatcgccgcagccccgtttctgtggtggttcaataaaagggccggctcctcgga

SEQ ID NO: 17490 - DNA, 55 bp, Artificial
  Synthetic oligonucleotide
cgccacacacacgcaataaagaacccagggccgcaattcgcaaaaccggagtccg

SEQ ID NO: 17491 - DNA, 54 bp, Artificial
  Synthetic oligonucleotide
tgggccgtcgggaagggggtccacggcacggtctctcccagcgcgagtccgtcc

SEQ ID NO: 17492 - DNA, 57 bp, Artificial
  Synthetic oligonucleotide
ctaagctccgcccctatataccaggtgggtggagctaggtaggattcagctaggttc

SEQ ID NO: 17493 - DNA, 54 bp, Artificial
  Synthetic oligonucleotide
ataccaggtgggtggagctaggtaggattcagctaggttcctactggggtaccc

SEQ ID NO: 17494 - DNA, 54 bp, Artificial
  Synthetic oligonucleotide
ctggtcggtcgcttggctgtttgtcgtctgaacgcccgtgggaacccgcgcttt

SEQ ID NO: 17495 - DNA, 53 bp, Artificial
  Synthetic oligonucleotide
tcccttacggtcgtactcgctactcccttacggtcgtactcgctactccctta

SEQ ID NO: 17496 - DNA, 54 bp, Artificial
  Synthetic oligonucleotide
caaagtatcaggatttatggacgggaaacgaccgcccaagtgagtggaaacgac

SEQ ID NO: 17497 - DNA, 59 bp, Artificial
  Synthetic oligonucleotide
aactacagcatctgctattactctcggttccggtcttgttatgagtgccggaggtcaat

SEQ ID NO: 17498 - DNA, 55 bp, Artificial
  Synthetic oligonucleotide
ccgtgttgagcgttaattcagcaacactaaccgttcccccggctactgctacaac

SEQ ID NO: 17499 - DNA, 57 bp, Artificial
  Synthetic oligonucleotide
acggcgggaccatctaatctagcaacggcgggacctgctattgatttaacggcaggc

SEQ ID NO: 17500 - DNA, 59 bp, Artificial
  Synthetic oligonucleotide
aagatgaaacgttaatcttatttcgttataaggaagtgctgcactaggcaatgcaacac

SEQ ID NO: 17501 - DNA, 49 bp, Artificial
  Synthetic oligonucleotide
ctaccgacaggggtgacgcggggtacgggtccaccggggtgggtaactg

SEQ ID NO: 17502 - DNA, 52 bp, Artificial
  Synthetic oligonucleotide
taagcctacacctctttgcgatggggcccgtggtcccaccctttaggaaaaa

SEQ ID NO: 17503 - DNA, 55 bp, Artificial
  Synthetic oligonucleotide
ttagtaggtcctcctagcccaatgggtcctcctggtatagatggtaaaaatggtc

SEQ ID NO: 17504 - DNA, 54 bp, Artificial
  Synthetic oligonucleotide
ctgcccctgattttagtgtggatcccggtaagggtattccggacaattttcatg

SEQ ID NO: 17505 - DNA, 55 bp, Artificial
  Synthetic oligonucleotide
ctgctagctcccggaggtggtactgatacaacgctcaccggtttgggtaacgtaa

SEQ ID NO: 17506 - DNA, 58 bp, Artificial
  Synthetic oligonucleotide
gagccgtccgtgacgcagctcgtagattaatcaacgagtcgatcgagacggttggggg

SEQ ID NO: 17507 - DNA, 58 bp, Artificial
  Synthetic oligonucleotide
gagctcaaagtggaacgatacaacccagagataggtctttgctttctctcacgtgttt

SEQ ID NO: 17508 - DNA, 56 bp, Artificial
  Synthetic oligonucleotide
cttattagcgagtattgtaggatggtgcaacgactatacgggcccaaaacttcaac

SEQ ID NO: 17509 - DNA, 56 bp, Artificial
  Synthetic oligonucleotide
aattactggtttgtctagttattgggaacgctataagtggttatcagctgtagccc

SEQ ID NO: 17510 - DNA, 59 bp, Artificial
  Synthetic oligonucleotide
gctccaagcaactcgtggtgcagtcgtcgccaaatggtgggaaagtcgaacagtccggc

SEQ ID NO: 17511 - DNA, 56 bp, Artificial
  Synthetic oligonucleotide
gctggcacgctcttcacccgtgttgactcggaaaactaaccgggtcatccggatcc

SEQ ID NO: 17512 - DNA, 59 bp, Artificial
  Synthetic oligonucleotide
accacccgtccactggccaatagcatccgagatcgatattccgacaacgtccttcagga

SEQ ID NO: 17513 - DNA, 58 bp, Artificial
  Synthetic oligonucleotide
agagcacagggttacgatggttaataataccaaggtaccaaatgttcgcatcgctcga

SEQ ID NO: 17514 - DNA, 55 bp, Artificial
  Synthetic oligonucleotide
caaccaatttctgcgagttctttccttggtaccagaatttctggtttatcgcaat

SEQ ID NO: 17515 - DNA, 51 bp, Artificial
  Synthetic oligonucleotide
agggttgactcggaaaactaaccgggtcatccggttccctagtgcgtatcg

SEQ ID NO: 17516 - DNA, 59 bp, Artificial
  Synthetic oligonucleotide
gtggagggaaccgagttacacgcgcattgcaacgggctgtcattgacacaacgaagacc

SEQ ID NO: 17517 - DNA, 59 bp, Artificial
  Synthetic oligonucleotide
gtctaaggcctcgactgtaactggatttggacgtgggaccaatgacgtccatctctcag

SEQ ID NO: 17518 - DNA, 53 bp, Artificial
  Synthetic oligonucleotide
gtcgtatccaacgccgaggaagtccctctttgggctgttgggttaccgttagc

SEQ ID NO: 17519 - DNA, 52 bp, Artificial
  Synthetic oligonucleotide
cctcgaaggaagggcccccgaggaggcaaaaccaacaatcgaagaacgcctc

SEQ ID NO: 17520 - DNA, 58 bp, Artificial
  Synthetic oligonucleotide
tatactggtcccgtgagcggacttccccgtctgacaacatcactcgacttggaaccga

SEQ ID NO: 17521 - DNA, 55 bp, Artificial
  Synthetic oligonucleotide
tctccagtgtaggcgagtcacctgcccgctcctaccccccccggaccattggtcc

SEQ ID NO: 17522 - DNA, 59 bp, Artificial
  Synthetic oligonucleotide
ataacttggttgccaatcgagatgaacgcacgtgaattgggtagggtcaactatcagtg

SEQ ID NO: 17523 - DNA, 56 bp, Artificial
  Synthetic oligonucleotide
cgcctggtagttcccgaagcaaatgtaggtgtaccttacagtttggaagatgcgcg

SEQ ID NO: 17524 - DNA, 56 bp, Artificial
  Synthetic oligonucleotide
taccgtgacgcctaagcgtgtcgcagacaacgggcacgccgtttcaggggccgtac

SEQ ID NO: 17525 - DNA, 58 bp, Artificial
  Synthetic oligonucleotide
aactagtgcacgctatcactggtctcgaaagcgcacttaaggttggtgacgaaaatta

SEQ ID NO: 17526 - DNA, 54 bp, Artificial
  Synthetic oligonucleotide
gtttggggacgattccctcttcgagcgacgtttcgctaagaactatgcgaaggt

SEQ ID NO: 17527 - DNA, 53 bp, Artificial
  Synthetic oligonucleotide
ccccgttaattatccgggttttacatcgatgttcggaacaacttcaacatcta

SEQ ID NO: 17528 - DNA, 58 bp, Artificial
  Synthetic oligonucleotide
gtggagtcacctaacggtgactaggccgaaacgtgtgtcagagcgcgaacactccaac

SEQ ID NO: 17529 - DNA, 51 bp, Artificial
  Synthetic oligonucleotide
aaggtggctccggaaaactaagcgggtcgtccggttccctagtgcgtatcg

SEQ ID NO: 17530 - DNA, 58 bp, Artificial
  Synthetic oligonucleotide
gagcagccgtggtacggcccaggtaagaccccaaagcaagtaggacgcaggcttcaga

SEQ ID NO: 17531 - DNA, 48 bp, Artificial
  Synthetic oligonucleotide
gtaatctttgcccccaacttaaacgttgggaggttttaagtaattctt

SEQ ID NO: 17532 - DNA, 57 bp, Artificial
  Synthetic oligonucleotide
cgaaagtgtaactcgaaggagacaacgcaaggattgtgaccgtgagaaaccatactg

SEQ ID NO: 17533 - DNA, 56 bp, Artificial
  Synthetic oligonucleotide
gcaattgcgccctacccccaaagtggagggaaccgagttacacgcgcattgcaacg

SEQ ID NO: 17534 - DNA, 58 bp, Artificial
  Synthetic oligonucleotide
atgggtgagcaccgtaacatcgtgtcgattgtgccctttgcaacttgccgttcaaacc

SEQ ID NO: 17535 - DNA, 57 bp, Artificial
  Synthetic oligonucleotide
acacctgaagatacattcgctccaatcctaaccttgggaccactctacaacgactcc

SEQ ID NO: 17536 - DNA, 53 bp, Artificial
  Synthetic oligonucleotide
cgctcttcacccgtgctgactcgggaaactaaccgggtcatccggttccctgg

SEQ ID NO: 17537 - DNA, 55 bp, Artificial
  Synthetic oligonucleotide
cccaaggagggtacaattgctattgttggtaccattgacggcgtacctggtacag

SEQ ID NO: 17538 - DNA, 57 bp, Artificial
  Synthetic oligonucleotide
gccgacccgcgatggccctacaaagggccatggttgatttgacacgacgggacgtgc

SEQ ID NO: 17539 - DNA, 51 bp, Artificial
  Synthetic oligonucleotide
aaacgttgggaggttttaagtaattctttagaacatcgtgttaccatggtg

SEQ ID NO: 17540 - DNA, 54 bp, Artificial
  Synthetic oligonucleotide
ttgggaggttttaagtaattctttagaacatcgtgttaccatggtggctaatag

SEQ ID NO: 17541 - DNA, 53 bp, Artificial
  Synthetic oligonucleotide
cgcaacaaccctgactcccggaaaatccgttgtttcactcctcataaccccgc

SEQ ID NO: 17542 - DNA, 58 bp, Artificial
  Synthetic oligonucleotide
actcaaagaaattcgagtgcgagataacgaatgaacctaaggtccacatagaaggtca

SEQ ID NO: 17543 - DNA, 59 bp, Artificial
  Synthetic oligonucleotide
cagaatcgacggtcaacgtggtgggttacgtagatgctaacataatcaactcagttgta

SEQ ID NO: 17544 - DNA, 53 bp, Artificial
  Synthetic oligonucleotide
aagcgttagatgcactaccaaataacaactactccggttcttttatcgagggt

SEQ ID NO: 17545 - DNA, 58 bp, Artificial
  Synthetic oligonucleotide
tcaaatggtaccacccacgatagaacagccttcagaggacttatctctaccccattag

SEQ ID NO: 17546 - DNA, 58 bp, Artificial
  Synthetic oligonucleotide
gggaattcccactgatgtaatcaactcctgggcaggagacattctaagaacccaggaa

SEQ ID NO: 17547 - DNA, 55 bp, Artificial
  Synthetic oligonucleotide
cggggaaacgtactattgtcacccgaagaagtcagcgagacacaaggaacggaga

SEQ ID NO: 17548 - DNA, 57 bp, Artificial
  Synthetic oligonucleotide
catgctttatggtctggcggttaaggggcaatctcatttgcggggggacacggatgt

SEQ ID NO: 17549 - DNA, 59 bp, Artificial
  Synthetic oligonucleotide
tcgaaacgctagcaagaagcatatgtgagaaacttgaacaatccggtcttccagttggg

SEQ ID NO: 17550 - DNA, 55 bp, Artificial
  Synthetic oligonucleotide
ataccccagttcacgattgtaatacgacttgtcaaacacccaaaggtgctataaa

SEQ ID NO: 17551 - DNA, 54 bp, Artificial
  Synthetic oligonucleotide
ggtccttgcaactggacccaggaacgttcctcaaagggagacaagaggtctatt

SEQ ID NO: 17552 - DNA, 59 bp, Artificial
  Synthetic oligonucleotide
aacctttttcctcacacagggctcattactcaatgacaaacattctaacggcacagtga

SEQ ID NO: 17553 - DNA, 59 bp, Artificial
  Synthetic oligonucleotide
atacagaagaccagtcggaatatccagtatggtggaggctatggtttcaagagcccgaa

SEQ ID NO: 17554 - DNA, 55 bp, Artificial
  Synthetic oligonucleotide
aggatcttgccctaacgttaccaatgggaaaggattcttcgcaacaatggcttgg

SEQ ID NO: 17555 - DNA, 56 bp, Artificial
  Synthetic oligonucleotide
cccctttgctgccgccccaccggaacaaagtaggatgcagttctcctccttgactg

SEQ ID NO: 17556 - DNA, 58 bp, Artificial
  Synthetic oligonucleotide
ggatggtttcggaatgtcctaagcattgcccccataatgttctcaaacaaaatggcga

SEQ ID NO: 17557 - DNA, 54 bp, Artificial
  Synthetic oligonucleotide
tgttctcaaacaaaatggcgaaattaggaaaaggatacatgttcgaaagtaagg

SEQ ID NO: 17558 - DNA, 50 bp, Artificial
  Synthetic oligonucleotide
aacctttggtcccgttcatttccgaaaccaagttaagatacgccgccgag

SEQ ID NO: 17559 - DNA, 58 bp, Artificial
  Synthetic oligonucleotide
aggttatgagactttcaaggtcattggtggttggaccactgctaattccaagtcacag

SEQ ID NO: 17560 - DNA, 57 bp, Artificial
  Synthetic oligonucleotide
accagagaatccataacagaagtgtgttcctacaatcccgaaattttagtggcaatg

SEQ ID NO: 17561 - DNA, 50 bp, Artificial
  Synthetic oligonucleotide
aggttgaaacatggaaccttcggtcccgttcatttccgaaaccaagttaa

SEQ ID NO: 17562 - DNA, 59 bp, Artificial
  Synthetic oligonucleotide
gtatttatgctcaaagatcctaaccgatacaagtcgtcccaatgatcccactaatggaa

SEQ ID NO: 17563 - DNA, 57 bp, Artificial
  Synthetic oligonucleotide
gcggaaactaggatatactatttcaaagaggggagaatcctcaaatgggagcctcta

SEQ ID NO: 17564 - DNA, 58 bp, Artificial
  Synthetic oligonucleotide
gtggacgacaaacacagaaactggagcaccccagcttaacccaattgatgggccacta

SEQ ID NO: 17565 - DNA, 59 bp, Artificial
  Synthetic oligonucleotide
ccacacctaattccaagtcacaggtcaatagacaggtcatagttgacagtaataactgg

SEQ ID NO: 17566 - DNA, 55 bp, Artificial
  Synthetic oligonucleotide
agagtggtcgtgagtattgaccgtttcttaagggttcgagatcaacgtgggaatg

SEQ ID NO: 17567 - DNA, 56 bp, Artificial
  Synthetic oligonucleotide
agcaaaagcagggtgacaaaaacataatggattccaatacgataacctcgtttcag

SEQ ID NO: 17568 - DNA, 54 bp, Artificial
  Synthetic oligonucleotide
agggaaccaccaaacagtgattcacccaacaataacgacccctgcaataccgaa

SEQ ID NO: 17569 - DNA, 56 bp, Artificial
  Synthetic oligonucleotide
agaggaaggccacaggagactagggtatggtggacctcaaacagtatcgtcgtatt

SEQ ID NO: 17570 - DNA, 57 bp, Artificial
  Synthetic oligonucleotide
atcacccttcaacagacacggagcagaccaatttgtacaagaacaaccctggaagag

SEQ ID NO: 17571 - DNA, 55 bp, Artificial
  Synthetic oligonucleotide
gagggccaaacttatacaatatccggaatctccacattccggaagtttgcctaaa

SEQ ID NO: 17572 - DNA, 54 bp, Artificial
  Synthetic oligonucleotide
cattgcggggtggctccttggaaatccggaatgtgaccggttcttaagtgtacc

SEQ ID NO: 17573 - DNA, 59 bp, Artificial
  Synthetic oligonucleotide
atagcatctgcaacacaacaggagtcgataaacccaaatttcttccggatctatacgac

SEQ ID NO: 17574 - DNA, 55 bp, Artificial
  Synthetic oligonucleotide
caacgctacagcaacggtttattataacggaaggctgaccactaccattaagacc

SEQ ID NO: 17575 - DNA, 59 bp, Artificial
  Synthetic oligonucleotide
aaagtagggccagaatcaaaactagactattcaccataagacaagaaatggccagcaga

SEQ ID NO: 17576 - DNA, 58 bp, Artificial
  Synthetic oligonucleotide
tcgagctaaagaagctgtgggagcaaacccgctcaaaggcaggacttttggtgtcgga

SEQ ID NO: 17577 - DNA, 56 bp, Artificial
  Synthetic oligonucleotide
agatcaacggcccggaatcggtactggtcaacacataccaatgggtcattaggaac

SEQ ID NO: 17578 - DNA, 59 bp, Artificial
  Synthetic oligonucleotide
atatacaacagaatgggaacagtaaccacagaagtggcttttggtctagtgtgtgccac

SEQ ID NO: 17579 - DNA, 55 bp, Artificial
  Synthetic oligonucleotide
aaatagcatttgcaacaccacaggggtcgagaagcccaaattcctcccggacttg

SEQ ID NO: 17580 - DNA, 55 bp, Artificial
  Synthetic oligonucleotide
ggtaactcccctgcatttaactacaacaagacaactaagaggcttacaatacttg

SEQ ID NO: 17581 - DNA, 58 bp, Artificial
  Synthetic oligonucleotide
gtgaaacctggagatgtcttaatgataaacagtaatggcaacttaattgcaccgcggg

SEQ ID NO: 17582 - DNA, 56 bp, Artificial
  Synthetic oligonucleotide
acactatagaggtcttcaggttgaacagtttaacagctaatgaatcggggaggtta

SEQ ID NO: 17583 - DNA, 52 bp, Artificial
  Synthetic oligonucleotide
tggaaccttcggtcccgttcatttccgaaaccaagttataatacgccgccga

SEQ ID NO: 17584 - DNA, 58 bp, Artificial
  Synthetic oligonucleotide
cagttcatacaggaggccggttggaatttccagtatggtggaggccatggtgtctagg

SEQ ID NO: 17585 - DNA, 58 bp, Artificial
  Synthetic oligonucleotide
cagaaagaggcgaattgaagaggcgggcaattgcaacacccggaatgcaaatcagggg

SEQ ID NO: 17586 - DNA, 59 bp, Artificial
  Synthetic oligonucleotide
acggagatgcgtaccctcttcagaatttgacaaaggtgaacaacggtgattatgcaaga

SEQ ID NO: 17587 - DNA, 58 bp, Artificial
  Synthetic oligonucleotide
acccgctcaaaggcaggactgctagtttcagatggaggacccaatttatacaatatcc

SEQ ID NO: 17588 - DNA, 57 bp, Artificial
  Synthetic oligonucleotide
gagggagccaactgcaagacataaaggggtttttgtgcagggcactggaatgggttg

SEQ ID NO: 17589 - DNA, 54 bp, Artificial
  Synthetic oligonucleotide
acgggacctttggccctgtacacttcagaaatcaagtcaagataagacgaaggg

SEQ ID NO: 17590 - DNA, 59 bp, Artificial
  Synthetic oligonucleotide
atcatggaagttgtctttccaaatgaagtgggagcgagaatactgacgtcggagttaca

SEQ ID NO: 17591 - DNA, 55 bp, Artificial
  Synthetic oligonucleotide
actcagttaaaaatggcacgtatgactacccaaaataccaagacgagagcaaact

SEQ ID NO: 17592 - DNA, 58 bp, Artificial
  Synthetic oligonucleotide
tactcagaaaagggaaagtggacgacaaacacagagactggtgcaccccagctcaacc

SEQ ID NO: 17593 - DNA, 56 bp, Artificial
  Synthetic oligonucleotide
gagttctaactaccagcaatcctttgtaccgagtccgggagcaagaccacaagtaa

SEQ ID NO: 17594 - DNA, 59 bp, Artificial
  Synthetic oligonucleotide
tcgagaatatcaatcggggactgccccaagtatgtcaaacagggatctttgaaactagc

SEQ ID NO: 17595 - DNA, 58 bp, Artificial
  Synthetic oligonucleotide
gttggcaacaggaatgcggaatgtaccagagaaacaaactaggggcctattcggtgca

SEQ ID NO: 17596 - DNA, 57 bp, Artificial
  Synthetic oligonucleotide
ggtgtgacttcaacaacgctagccggcaattcctctctttgcccaataagtgggtgg

SEQ ID NO: 17597 - DNA, 54 bp, Artificial
  Synthetic oligonucleotide
actagacaatgaacctggatcggggaattggccggatggttctaatattgggtt

SEQ ID NO: 17598 - DNA, 56 bp, Artificial
  Synthetic oligonucleotide
tgaggagtcccaccccggtatctttgaaaactcgtgtcttgagacgatggaagtcg

SEQ ID NO: 17599 - DNA, 59 bp, Artificial
  Synthetic oligonucleotide
ctattactggacactagtagagcctggagacacaataacattcgaggcaactggaaacc

SEQ ID NO: 17600 - DNA, 57 bp, Artificial
  Synthetic oligonucleotide
tgcgagtatcaagaaaatctgcacccaagggaaaaggccaaccgacctgggacaatg

SEQ ID NO: 17601 - DNA, 59 bp, Artificial
  Synthetic oligonucleotide
aagccagtgatagggccaaggccccttgtcaatggacagcaggggagaattgactatta

SEQ ID NO: 17602 - DNA, 58 bp, Artificial
  Synthetic oligonucleotide
ctcttagatcaatagttgcctcgtcaggcaccctggagttcattacggagggtttcac

SEQ ID NO: 17603 - DNA, 53 bp, Artificial
  Synthetic oligonucleotide
aaagggagttgggacgatggtgatggaactaattcggatgataaaacgagggg

SEQ ID NO: 17604 - DNA, 52 bp, Artificial
  Synthetic oligonucleotide
ttcggtcccgttcatttccgaaaccaagttaaaatacgccgccgagtggata

SEQ ID NO: 17605 - DNA, 59 bp, Artificial
  Synthetic oligonucleotide
gacctattgctgggaggaagagaatggtcctacatcgtcgaaagaccatcggctgttaa

SEQ ID NO: 17606 - DNA, 59 bp, Artificial
  Synthetic oligonucleotide
ccttcctttgacatgagtaatgaggggtcttatttcttcggagacaatgcagaggagta

SEQ ID NO: 17607 - DNA, 57 bp, Artificial
  Synthetic oligonucleotide
agtgacacggagggaggtccacatatactacctagagaaggccaacaagataaaatc

SEQ ID NO: 17608 - DNA, 56 bp, Artificial
  Synthetic oligonucleotide
cctaaagttggcaactgggatgcggaatgtacctgagaaacagaccaggggtctgt

SEQ ID NO: 17609 - DNA, 55 bp, Artificial
  Synthetic oligonucleotide
ctacacgaaagtaatgtactttcacaagggattagtgattaaagaggaaccgcta

SEQ ID NO: 17610 - DNA, 53 bp, Artificial
  Synthetic oligonucleotide
aattataacaggagattcaccccggaaatagcagaaagacccaaagtaagagg

SEQ ID NO: 17611 - DNA, 56 bp, Artificial
  Synthetic oligonucleotide
cactatcggtagtaagcctcctagtaggaatcgccaatttaggtctaaacatcgga

SEQ ID NO: 17612 - DNA, 54 bp, Artificial
  Synthetic oligonucleotide
tactgtgtgaaaaatcccttaactagaaaacgtccaaattgcgattgggcctat

SEQ ID NO: 17613 - DNA, 51 bp, Artificial
  Synthetic oligonucleotide
cccttaactagaaaacgtccaaattgcgattgggcctattaccctccaacc

SEQ ID NO: 17614 - DNA, 58 bp, Artificial
  Synthetic oligonucleotide
gcacctataatgttctcgaataaaatggcaagactaggaaaaggatacatgttcgaaa

SEQ ID NO: 17615 - DNA, 56 bp, Artificial
  Synthetic oligonucleotide
actgtttgggggttccactctgatgacgaaaccctaatggtaatactctatggaga

SEQ ID NO: 17616 - DNA, 59 bp, Artificial
  Synthetic oligonucleotide
tcatggaggtcgttttcccaaatgaagtgggggctagaatattgacgtcagagtcacag

SEQ ID NO: 17617 - DNA, 58 bp, Artificial
  Synthetic oligonucleotide
acaaaaagcactagttccagaagcggctttgagatgatttgggatccgaatgggtgga

SEQ ID NO: 17618 - DNA, 57 bp, Artificial
  Synthetic oligonucleotide
tagaccctgggtaaggggtctgtctagtagaataagcatctattggacaatagttaa

SEQ ID NO: 17619 - DNA, 58 bp, Artificial
  Synthetic oligonucleotide
acttgtaaggggcaattctcctgtgttcaactacaacaggaccactaagagactcaca

SEQ ID NO: 17620 - DNA, 58 bp, Artificial
  Synthetic oligonucleotide
agccattcatttcatgctcccacttggaatgcaggactttttttctaacccaaggagc

SEQ ID NO: 17621 - DNA, 54 bp, Artificial
  Synthetic oligonucleotide
cctacatcgtcgaaagaccatcggccgttaatggaatgtgttaccccgggaatg

SEQ ID NO: 17622 - DNA, 52 bp, Artificial
  Synthetic oligonucleotide
tgaccgatttttgagggttcgggaccaacgagggaacgtactattgtctccc

SEQ ID NO: 17623 - DNA, 59 bp, Artificial
  Synthetic oligonucleotide
cgtgataaactggaccagagactccataacagaagtgtggtcctataatgccgaactcc

SEQ ID NO: 17624 - DNA, 58 bp, Artificial
  Synthetic oligonucleotide
aacggttcatgttttaccataatgaccgatggcccgagtaatggggctgcatcgtaca

SEQ ID NO: 17625 - DNA, 59 bp, Artificial
  Synthetic oligonucleotide
gatgtttctggcaatgataacatacattacgagaaaccaacctgaatggtttaggaatg

SEQ ID NO: 17626 - DNA, 53 bp, Artificial
  Synthetic oligonucleotide
accaaagacgctgagagggggaaactaaaacgtagagcaattgcaaccccagg

SEQ ID NO: 17627 - DNA, 59 bp, Artificial
  Synthetic oligonucleotide
ccggtcctatgtgaaacggaactagggtcaccactagtgcttgatgactgttcactaga

SEQ ID NO: 17628 - DNA, 57 bp, Artificial
  Synthetic oligonucleotide
aggtctgcctgaagtgggaactaatggatgaagattaccagggtaggttgtgtaatc

SEQ ID NO: 17629 - DNA, 54 bp, Artificial
  Synthetic oligonucleotide
cttcttgagaatgtacataacggaaagctatgtaaactaggggggatagccccg

SEQ ID NO: 17630 - DNA, 59 bp, Artificial
  Synthetic oligonucleotide
ggcctcatatacaacaggatgggaacggtgaccacagaagtggctttcggtctagtgtg

SEQ ID NO: 17631 - DNA, 56 bp, Artificial
  Synthetic oligonucleotide
cgggacgatggtaatggaactaattcggatgataaagcgagggattaacgatcgga

SEQ ID NO: 17632 - DNA, 59 bp, Artificial
  Synthetic oligonucleotide
ggaatgttttgagcattgcacctataatgttctcgaataaaatggcaagactagggaaa

SEQ ID NO: 17633 - DNA, 59 bp, Artificial
  Synthetic oligonucleotide
ataccgctatatgatgcgatcaagtgcatgaaaacgttctttgggtggaaggaacccat

SEQ ID NO: 17634 - DNA, 57 bp, Artificial
  Synthetic oligonucleotide
ggacgatggtaatggaactaattcggatgataaagcggggaatcaatgatcgaaact

SEQ ID NO: 17635 - DNA, 57 bp, Artificial
  Synthetic oligonucleotide
cttctgggttgaattaatcagggggctacctgaggaggacgcaatctggactagtgg

SEQ ID NO: 17636 - DNA, 57 bp, Artificial
  Synthetic oligonucleotide
acaatgttcatccccttaccattggggagtgccccaagtatgtcaaatcagacaaac

SEQ ID NO: 17637 - DNA, 53 bp, Artificial
  Synthetic oligonucleotide
gagagggtggtagtgagcattgaccgatttttaagagtccgggaccaacgggg

SEQ ID NO: 17638 - DNA, 59 bp, Artificial
  Synthetic oligonucleotide
gaaaacgggactctagcatacttactgacagtcagacagcgaccaaaagaattcggatg

SEQ ID NO: 17639 - DNA, 56 bp, Artificial
  Synthetic oligonucleotide
aaggatgatggaaaatgccagacccgaagatgtgtctttccaggggcggggagtct

SEQ ID NO: 17640 - DNA, 55 bp, Artificial
  Synthetic oligonucleotide
aaacagtatttgcaacactacaggggctgagaaaccgaagtttctaccagatttg

SEQ ID NO: 17641 - DNA, 57 bp, Artificial
  Synthetic oligonucleotide
aggattgtaagattgctcccttaatggttgcatacatgttagaaagggaactggtcc

SEQ ID NO: 17642 - DNA, 59 bp, Artificial
  Synthetic oligonucleotide
attcaaatggcacaatacacgatagaacccctcatcgaacccttttgatgaatgagtta

SEQ ID NO: 17643 - DNA, 59 bp, Artificial
  Synthetic oligonucleotide
gcaggaggctagggtatggtggacctcaaatagtattgtcgtattttgtggcacttcag

SEQ ID NO: 17644 - DNA, 59 bp, Artificial
  Synthetic oligonucleotide
ttcaatggtcccaagaccctacaatgctatacaataagatggagtttgagccctttcaa

SEQ ID NO: 17645 - DNA, 58 bp, Artificial
  Synthetic oligonucleotide
attgtaaaattgcccccttaatggtagcatacatgctagaaagagagttggtccgcaa

SEQ ID NO: 17646 - DNA, 57 bp, Artificial
  Synthetic oligonucleotide
cacattctgtgggctaaacaatgaacctggatcgggtaattggccggatggttccaa

SEQ ID NO: 17647 - DNA, 57 bp, Artificial
  Synthetic oligonucleotide
ggctacaggattaaggaatatcccgtctattcaatctaggggcctgttcggagccat

SEQ ID NO: 17648 - DNA, 55 bp, Artificial
  Synthetic oligonucleotide
aggagtccctttcgtacattaatgagttgtcctatgggagttgccccctctccta

SEQ ID NO: 17649 - DNA, 58 bp, Artificial
  Synthetic oligonucleotide
atctttggtgcctaaagctgccagaggccagtatagtgggtttgtaagaacgctattc

SEQ ID NO: 17650 - DNA, 59 bp, Artificial
  Synthetic oligonucleotide
agctgtgggatcaaacccaatcgaaggcaggactattagtatctgatggaggaccaaac

SEQ ID NO: 17651 - DNA, 56 bp, Artificial
  Synthetic oligonucleotide
atggacaatgctaccttcaactatacaaacgttaaccctatttctcacatcagggg

SEQ ID NO: 17652 - DNA, 59 bp, Artificial
  Synthetic oligonucleotide
acttgagggtgtcaagtttcatccgaggcgcacgagtactgccgagggggcaactgtca

SEQ ID NO: 17653 - DNA, 57 bp, Artificial
  Synthetic oligonucleotide
ctcccttttgaaagatcaaccgttatggcagctttcagcgggaacaatgagggacga

SEQ ID NO: 17654 - DNA, 52 bp, Artificial
  Synthetic oligonucleotide
gtcgaaaggttaaagcatggaaccttcggtcccgttcactttcgaaatcagg

SEQ ID NO: 17655 - DNA, 58 bp, Artificial
  Synthetic oligonucleotide
agcctgaatggaatatcccccttacaattggggaattgcaacgtagcaggatggatcc

SEQ ID NO: 17656 - DNA, 57 bp, Artificial
  Synthetic oligonucleotide
tacaccaaaacgacatactggtgggacggacttcaatcctccgacgactttgctcta

SEQ ID NO: 17657 - DNA, 56 bp, Artificial
  Synthetic oligonucleotide
tttgtataaacggctcgtgttttactataatgaccgacggtccaagcaatgggcaa

SEQ ID NO: 17658 - DNA, 58 bp, Artificial
  Synthetic oligonucleotide
caggactgttagtttcagatggagggccaaacttatacaatatccggaatctccacat

SEQ ID NO: 17659 - DNA, 54 bp, Artificial
  Synthetic oligonucleotide
accgacacagaacaaaccaacctatataagaacaaccccggaagagtgactgtc

SEQ ID NO: 17660 - DNA, 58 bp, Artificial
  Synthetic oligonucleotide
attggggtcctcatcggaggacttgaatggagtgataacactgttcgagtctctaaaa

SEQ ID NO: 17661 - DNA, 59 bp, Artificial
  Synthetic oligonucleotide
gcaacaaacctggggcaccctctcatcctagacacctgcaccatcgaagggttggtgta

SEQ ID NO: 17662 - DNA, 54 bp, Artificial
  Synthetic oligonucleotide
gacaaaaagcttggagtccagaagtgggtttgagatggtttgggacgcaaacgg

SEQ ID NO: 17663 - DNA, 58 bp, Artificial
  Synthetic oligonucleotide
caaatgggaaaagtactgtgtccttgaaataggggacatgcttctaagaactgctata

SEQ ID NO: 17664 - DNA, 59 bp, Artificial
  Synthetic oligonucleotide
attgcaacacccggaatgcaaatcagaggatttgtatacttcgttgaaacattagcgag

SEQ ID NO: 17665 - DNA, 58 bp, Artificial
  Synthetic oligonucleotide
aggagtacacgaagacttcttattggtgggacggtctccaatcgtctgatgattttgc

SEQ ID NO: 17666 - DNA, 58 bp, Artificial
  Synthetic oligonucleotide
caccacaacttaacccaattgacggaccattacctgaggacaatgagccaagtggata

SEQ ID NO: 17667 - DNA, 56 bp, Artificial
  Synthetic oligonucleotide
gggcaattcctctctctgtcccgttagtgggtgggctatatacagtaaggacaacg

SEQ ID NO: 17668 - DNA, 59 bp, Artificial
  Synthetic oligonucleotide
acgctgttgccacaacgcactcctgggttcctaaaagaaatcgatccatcttgaacaca

SEQ ID NO: 17669 - DNA, 55 bp, Artificial
  Synthetic oligonucleotide
tctttccaggggcggggagtcttcgagctctcggacgaaaaggcaacgaacacga

SEQ ID NO: 17670 - DNA, 59 bp, Artificial
  Synthetic oligonucleotide
aattctgaatactgcagttcctataggatcctgcgttagtaaatgccacaccgacaggg

SEQ ID NO: 17671 - DNA, 53 bp, Artificial
  Synthetic oligonucleotide
aaaaatggtacctatgactatcccaaataccaggatgagagtaaattaaaccg

SEQ ID NO: 17672 - DNA, 58 bp, Artificial
  Synthetic oligonucleotide
gtgatggtgtctcccctagctgtaacttggtggaataggaatgggccaacaacaagta

SEQ ID NO: 17673 - DNA, 57 bp, Artificial
  Synthetic oligonucleotide
gatgagaatacttgtgaggggtaactcccctgtgttcaactataacaaggcaaccaa

SEQ ID NO: 17674 - DNA, 54 bp, Artificial
  Synthetic oligonucleotide
cactcctgggttcccaaaaggaatcgatccattttgaatacgagccaaagggga

SEQ ID NO: 17675 - DNA, 57 bp, Artificial
  Synthetic oligonucleotide
gttttcggagacaatccacgccccaatgatggggcaggcagttgcggtccggtgtcc

SEQ ID NO: 17676 - DNA, 56 bp, Artificial
  Synthetic oligonucleotide
catagcccctataatgttctcaaacaaaatggcaaggttagggaaaggatatatgt

SEQ ID NO: 17677 - DNA, 58 bp, Artificial
  Synthetic oligonucleotide
ctggttgggatagatccttttcgcttactccagaacagccaggtatttagtcttatca

SEQ ID NO: 17678 - DNA, 55 bp, Artificial
  Synthetic oligonucleotide
cttcggagacaatgcagaggagtacgacaactaaggaaaaatacccttgtttcta

SEQ ID NO: 17679 - DNA, 53 bp, Artificial
  Synthetic oligonucleotide
tggggagttcatcaccccgcaaccctaaaggaacaccaagacttgtacaaaaa

SEQ ID NO: 17680 - DNA, 59 bp, Artificial
  Synthetic oligonucleotide
ggcaagtgttatcaatttgcactcgggcaggggaccacactagacaacaaacattcaaa

SEQ ID NO: 17681 - DNA, 59 bp, Artificial
  Synthetic oligonucleotide
acatactagtcagtatatatgtagccctgttctcacagataacccccgaccgaatgacc

SEQ ID NO: 17682 - DNA, 58 bp, Artificial
  Synthetic oligonucleotide
agatctggacgtggccctaggcagaccaaaatgcatggggaacacaccctccgcaaaa

SEQ ID NO: 17683 - DNA, 57 bp, Artificial
  Synthetic oligonucleotide
atctaatggatgaagattaccagggtaggctgtgtaaccctctgaacccgtttgtca

SEQ ID NO: 17684 - DNA, 57 bp, Artificial
  Synthetic oligonucleotide
tggagcctttgtggccccagatcgtgtgagtttctttagaggggaatctacagggat

SEQ ID NO: 17685 - DNA, 58 bp, Artificial
  Synthetic oligonucleotide
tctgcagcctgaatggaatagcccctttacaactagggaaatgcaacgtggcggggtg

SEQ ID NO: 17686 - DNA, 59 bp, Artificial
  Synthetic oligonucleotide
gtccctaagaggaaggagcagcactcttggtctggacaccgaaacagccactcgtgcgg

SEQ ID NO: 17687 - DNA, 56 bp, Artificial
  Synthetic oligonucleotide
agggacaacctggaacctgggacctttgatcttggggggctatatgaagcagttga

SEQ ID NO: 17688 - DNA, 55 bp, Artificial
  Synthetic oligonucleotide
gcaaactttagtgtgattttcgaaaggctggagacactaatactacttagggctt

SEQ ID NO: 17689 - DNA, 54 bp, Artificial
  Synthetic oligonucleotide
cagcgaccaaaagaattcggatggccattaattagtgtcgaatagtttaaaaac

SEQ ID NO: 17690 - DNA, 55 bp, Artificial
  Synthetic oligonucleotide
aatggtcctacatcgtcgaaaggccatcggctgttaatggattgtgttaccccgg

SEQ ID NO: 17691 - DNA, 57 bp, Artificial
  Synthetic oligonucleotide
gtggcatatatgttagaaagggaactggtccgcaaaaccaggttcctacctgtagca

SEQ ID NO: 17692 - DNA, 55 bp, Artificial
  Synthetic oligonucleotide
tttggacaatactaaggccgaacgactcaatcacctttgagagtactgggaactt

SEQ ID NO: 17693 - DNA, 53 bp, Artificial
  Synthetic oligonucleotide
tccgtgggcggggagtcttcgagctctcggacgaaaaggcaacgaacccggtc

SEQ ID NO: 17694 - DNA, 58 bp, Artificial
  Synthetic oligonucleotide
gaccttgttagcaaaatctgtgtttaacagtttatatgcatctccacaactcgaaggg

SEQ ID NO: 17695 - DNA, 57 bp, Artificial
  Synthetic oligonucleotide
tttgaaatcaggacaattcccagtgcaaaccgatgagtacaaaaacactagggattc

SEQ ID NO: 17696 - DNA, 57 bp, Artificial
  Synthetic oligonucleotide
agccctgttctcacagataaccctcgaccgaatgatccaactgtaggtaagtgtaac

SEQ ID NO: 17697 - DNA, 57 bp, Artificial
  Synthetic oligonucleotide
cagacccttggtgagagggcagagcggccgaataagtttttactggaccattgtaga

SEQ ID NO: 17698 - DNA, 57 bp, Artificial
  Synthetic oligonucleotide
cacttagggacaacctggaacctgggacctttgatcttgggggactatatgatgcaa

SEQ ID NO: 17699 - DNA, 57 bp, Artificial
  Synthetic oligonucleotide
attgtaccagaatgtgggaacctatgtttccgtagccacatcaacattgtacaaaag

SEQ ID NO: 17700 - DNA, 55 bp, Artificial
  Synthetic oligonucleotide
gaaatcctattgatagaagacggttggaccaaaacaagcaaaactgtcgtcaaaa

SEQ ID NO: 17701 - DNA, 58 bp, Artificial
  Synthetic oligonucleotide
acttatgtctccgtcggaacatcaacactgaaccagagatccgttccaaaaatagcca

SEQ ID NO: 17702 - DNA, 58 bp, Artificial
  Synthetic oligonucleotide
gttcgggatcaacgaggaaatgtactattgtcacctgaagaggtcagcgaaacacaag

SEQ ID NO: 17703 - DNA, 53 bp, Artificial
  Synthetic oligonucleotide
taactcccccgtgttcaactataacaaggcaaccaaaagacttacagtcctcg

SEQ ID NO: 17704 - DNA, 59 bp, Artificial
  Synthetic oligonucleotide
acatgaccccaagtactgagatgtcgctgaggggaataagagttagcaaaatgggagta

SEQ ID NO: 17705 - DNA, 56 bp, Artificial
  Synthetic oligonucleotide
aaaagggaaatcacattccatggggccaaagaagtagcgctcagttactctactgg

SEQ ID NO: 17706 - DNA, 57 bp, Artificial
  Synthetic oligonucleotide
gtaagattgcccctttgatggttgcatacatgctagaaagggagttggttcgtaaaa

SEQ ID NO: 17707 - DNA, 56 bp, Artificial
  Synthetic oligonucleotide
aacaaccctggaagagtcactgtgtccactaagactagtcaaacaagtgtggttcc

SEQ ID NO: 17708 - DNA, 58 bp, Artificial
  Synthetic oligonucleotide
aaccacacaaatggggaaagtactgcgttcttgaagtgggagatatgctcctgaggac

SEQ ID NO: 17709 - DNA, 53 bp, Artificial
  Synthetic oligonucleotide
cgaaaccaagttaaaatacgccgccgagtggatataaacccgggccacgcaga

SEQ ID NO: 17710 - DNA, 57 bp, Artificial
  Synthetic oligonucleotide
gtgggtgctataaattcaagtatgcctttccacaatgttcaccccctcactattggg

SEQ ID NO: 17711 - DNA, 57 bp, Artificial
  Synthetic oligonucleotide
caaggcaggctgtgtaatcctctaaacccgtttgtcagtcataaggaaattgagtcc

SEQ ID NO: 17712 - DNA, 57 bp, Artificial
  Synthetic oligonucleotide
aatgtaagaggatcgggaatgaggatacttgtaagaggcaattccccagtgttcaac

SEQ ID NO: 17713 - DNA, 58 bp, Artificial
  Synthetic oligonucleotide
caaacacagaaactggagcaccccagctaaacccgatcgatggaccactacctgagga

SEQ ID NO: 17714 - DNA, 58 bp, Artificial
  Synthetic oligonucleotide
gcagggtgacaaagacataatggattccaacacgataacctcgtttcaggtagattgt

SEQ ID NO: 17715 - DNA, 57 bp, Artificial
  Synthetic oligonucleotide
ccggggcgatttaaatttcgtgaacagagcgaaccaacgactgaaccccatgcatca

SEQ ID NO: 17716 - DNA, 52 bp, Artificial
  Synthetic oligonucleotide
tcgctttaaatacggtctaaaaagagggccttctacggaaggagtgccggaa

SEQ ID NO: 17717 - DNA, 57 bp, Artificial
  Synthetic oligonucleotide
catacatgctagaaagagagttggtccgaaaaacgaggttcctcccagtagctggtg

SEQ ID NO: 17718 - DNA, 58 bp, Artificial
  Synthetic oligonucleotide
gacatgactccaagcacagaaatgtcactaagaggggtgagagttagtaaaatggggg

SEQ ID NO: 17719 - DNA, 59 bp, Artificial
  Synthetic oligonucleotide
cacagtagtgaaaggggaccagatatgcattgggtaccatgccaataactctaccgaaa

SEQ ID NO: 17720 - DNA, 59 bp, Artificial
  Synthetic oligonucleotide
ctccaagaggggaagatgcccaatttactgggtcatgcactagccccatggggaatcag

SEQ ID NO: 17721 - DNA, 59 bp, Artificial
  Synthetic oligonucleotide
cagtatgcctttccacaatgttcatccccttaccattggggaatgccccaagtatgtca

SEQ ID NO: 17722 - DNA, 54 bp, Artificial
  Synthetic oligonucleotide
ctcccttactgacccgaggctggaaccacacaagtgggaaaagtactgcgttct

SEQ ID NO: 17723 - DNA, 59 bp, Artificial
  Synthetic oligonucleotide
cgatcttggagggctatatgaagcaatcgaggagtgcctgattaacgatccctgggttt

SEQ ID NO: 17724 - DNA, 56 bp, Artificial
  Synthetic oligonucleotide
accctgaacacaatgaccaaagatgctgaaagggggaaactaaaacgcagagcaat

SEQ ID NO: 17725 - DNA, 53 bp, Artificial
  Synthetic oligonucleotide
cgtcaggtactttggagtttaccaatgaaggtttcaattggactggagttacc

SEQ ID NO: 17726 - DNA, 58 bp, Artificial
  Synthetic oligonucleotide
agcactctaaagttggcaactggaatgcggaatgtacctgagaaacagaccaggggtc

SEQ ID NO: 17727 - DNA, 56 bp, Artificial
  Synthetic oligonucleotide
gggtacccccggggacacaatatgtataggctaccatgcgaacaactcaaccgaca

SEQ ID NO: 17728 - DNA, 49 bp, Artificial
  Synthetic oligonucleotide
ctacccaaaggtgtataaaacttacttcgaaaaagtcgaaaggttgaaa

SEQ ID NO: 17729 - DNA, 54 bp, Artificial
  Synthetic oligonucleotide
aacggccagaattgagccctttcttaaaacaacaccacgccctctcagattacc

SEQ ID NO: 17730 - DNA, 59 bp, Artificial
  Synthetic oligonucleotide
tgttacccgtatgatgtgccggagtatacctcccttagatcactaattgcctcgtcagg

SEQ ID NO: 17731 - DNA, 58 bp, Artificial
  Synthetic oligonucleotide
tgcggaacaaagaacactgtaccagaacgtgggaacgtatgtttctgtgggcacgtca

SEQ ID NO: 17732 - DNA, 54 bp, Artificial
  Synthetic oligonucleotide
actttcaaaagaacgagcgggtcgtcagttaggagagaagaagaagtgcttacg

SEQ ID NO: 17733 - DNA, 51 bp, Artificial
  Synthetic oligonucleotide
aacgttaatggaggacccggagtgaagggatttggtttcaaagccggcaac

SEQ ID NO: 17734 - DNA, 54 bp, Artificial
  Synthetic oligonucleotide
tgaccgtttcttaagggttagagatcagagggggaacgtactcttatccccaga

SEQ ID NO: 17735 - DNA, 55 bp, Artificial
  Synthetic oligonucleotide
ttcagtcactacaatcaggtaacccaaacaaccgggaaaccatgttcgaacgaca

SEQ ID NO: 17736 - DNA, 58 bp, Artificial
  Synthetic oligonucleotide
gcgaacttcagtgtgatttttgaccggctggagactctaatattactaagggccttca

SEQ ID NO: 17737 - DNA, 59 bp, Artificial
  Synthetic oligonucleotide
gaatcaaaaccaggctgttcaccataagacaagaaatggccagcaggggtctatgggat

SEQ ID NO: 17738 - DNA, 59 bp, Artificial
  Synthetic oligonucleotide
taaggacagaagcccttatagggccttaatgagctgtcctataggtgaagctccgtgtc

SEQ ID NO: 17739 - DNA, 59 bp, Artificial
  Synthetic oligonucleotide
tacgactttgagagagagggatactccctagtcggaattgatcctttccgtctgctcca

SEQ ID NO: 17740 - DNA, 57 bp, Artificial
  Synthetic oligonucleotide
ttatacgattacaaagagaatcgcttcattgaaattggagtgacccgaagggaggtc

SEQ ID NO: 17741 - DNA, 57 bp, Artificial
  Synthetic oligonucleotide
gaactggggaattgaacccatcgacaatgtaatgggaatgatcggaatattacccga

SEQ ID NO: 17742 - DNA, 54 bp, Artificial
  Synthetic oligonucleotide
agttaataacagttgggagctccaattatcaacagtcctttgtaccaagtccgg

SEQ ID NO: 17743 - DNA, 59 bp, Artificial
  Synthetic oligonucleotide
tgcttctgggttgaactaatcagagggcgacccaaagagaacacaatctggactagcgg

SEQ ID NO: 17744 - DNA, 54 bp, Artificial
  Synthetic oligonucleotide
cccgtaacgttatcaacgcagaaagggcaccaggaggaccctacataattggaa

SEQ ID NO: 17745 - DNA, 57 bp, Artificial
  Synthetic oligonucleotide
ggaggaataaggatggtggacatccttagacagaatccaacggaggaacaagccgta

SEQ ID NO: 17746 - DNA, 56 bp, Artificial
  Synthetic oligonucleotide
tagtagaatcgcaacatctaccggaattgtgtcctagccctttaaggttggtagac

SEQ ID NO: 17747 - DNA, 59 bp, Artificial
  Synthetic oligonucleotide
taaggacagaagcccttatagggccttgatgagctgccctgtcggtgaagctccgtccc

SEQ ID NO: 17748 - DNA, 58 bp, Artificial
  Synthetic oligonucleotide
tagcgaaacccaaatgggaagactctatggagactcaaatcctcaaaagttcacctca

SEQ ID NO: 17749 - DNA, 59 bp, Artificial
  Synthetic oligonucleotide
agtaaccccatgtgagccgatagcggaatatagaaattggtcaaagccgcagtgtcaaa

SEQ ID NO: 17750 - DNA, 57 bp, Artificial
  Synthetic oligonucleotide
cacgttcaggttatgagaccttcaaggtcattggtggttggtccacacctaactcca

SEQ ID NO: 17751 - DNA, 57 bp, Artificial
  Synthetic oligonucleotide
gttatcaacgcagaaacggcaccaggaggaccctacatagttggaacctcaggatct

SEQ ID NO: 17752 - DNA, 49 bp, Artificial
  Synthetic oligonucleotide
atcgttttttaagggttcgggatcaacggggaaacgtactattgtcacc

SEQ ID NO: 17753 - DNA, 52 bp, Artificial
  Synthetic oligonucleotide
agagagggagttggtccgtaaaacgaggttcctcccagtggtcggtggaaca

SEQ ID NO: 17754 - DNA, 58 bp, Artificial
  Synthetic oligonucleotide
tattattggtcggtattaaaaccaggtcagacattgcgagtaagatccaatgggaatc

SEQ ID NO: 17755 - DNA, 59 bp, Artificial
  Synthetic oligonucleotide
gaagagaccaacgggcattaaagggaagaggcagcacacttgggctcgatctaagagtg

SEQ ID NO: 17756 - DNA, 54 bp, Artificial
  Synthetic oligonucleotide
cgattattactggactgttttgaaaccaggggaaaccttgaatgtggagtccaa

SEQ ID NO: 17757 - DNA, 59 bp, Artificial
  Synthetic oligonucleotide
gcttcgaagagaccaaaaggcattaaaggggagaggcagcacacttggactcgatctaa

SEQ ID NO: 17758 - DNA, 58 bp, Artificial
  Synthetic oligonucleotide
tgcctaaaactactttcacatacgaagtagcaacaaaccttgccagatttgactttga

SEQ ID NO: 17759 - DNA, 58 bp, Artificial
  Synthetic oligonucleotide
agagagaggggtactctctggtcggaatagatcctttccgtctgctccaaaacagcca

SEQ ID NO: 17760 - DNA, 59 bp, Artificial
  Synthetic oligonucleotide
gagcacgtggaccggggtagatactaatagcggagttacgagcgcttgctcctacaatg

SEQ ID NO: 17761 - DNA, 55 bp, Artificial
  Synthetic oligonucleotide
gaattggttctaggggacatgtttttgtcataagggagcccttcgtctcctgttc

SEQ ID NO: 17762 - DNA, 59 bp, Artificial
  Synthetic oligonucleotide
acaactggaaagggaccaatcggcctgtactggtgatctcgcctgatctctcttacaaa

SEQ ID NO: 17763 - DNA, 54 bp, Artificial
  Synthetic oligonucleotide
aaagggagggatactccctagtcggaattgatcctttccgtctgctccaaaaca

SEQ ID NO: 17764 - DNA, 59 bp, Artificial
  Synthetic oligonucleotide
cttaatagcaccgtggtacgctttcgcactgaataagggctctggttctggaattatga

SEQ ID NO: 17765 - DNA, 59 bp, Artificial
  Synthetic oligonucleotide
ctatcaaccagatcaatgggaaactgaatagagtaatcgagaagacgaacgagaaattc

SEQ ID NO: 17766 - DNA, 58 bp, Artificial
  Synthetic oligonucleotide
ataacggtggcctcgttgattctaatactggttgtaatgctaggctactgcattaccc

SEQ ID NO: 17767 - DNA, 57 bp, Artificial
  Synthetic oligonucleotide
aatagatcctttccgtctgttgcaaaacagccaggtcttcagtctaattagaccaaa

SEQ ID NO: 17768 - DNA, 58 bp, Artificial
  Synthetic oligonucleotide
caagcagatacttgtgttcaaagattctaactgacacaagtcggcctaatgaccccgg

SEQ ID NO: 17769 - DNA, 50 bp, Artificial
  Synthetic oligonucleotide
aacattcggccccgttcatttccgaaaccaagttaaaatacgtcgccgag

SEQ ID NO: 17770 - DNA, 59 bp, Artificial
  Synthetic oligonucleotide
cccatacgagcaaatacttgtgttcaaagattctaactgacacaagtcggcctaatgac

SEQ ID NO: 17771 - DNA, 58 bp, Artificial
  Synthetic oligonucleotide
cgaagaggctaaatacgtatggtggacaagtaatagtctaattgccctgtgtggaagc

SEQ ID NO: 17772 - DNA, 54 bp, Artificial
  Synthetic oligonucleotide
aagtacggttttgggagtctcaatcctaaatctaggacagaagaagtacaccaa

SEQ ID NO: 17773 - DNA, 58 bp, Artificial
  Synthetic oligonucleotide
aaacttctccagtcttgaaaactttagagcctatgtggatggattcgagccgaatggc

SEQ ID NO: 17774 - DNA, 58 bp, Artificial
  Synthetic oligonucleotide
ggatactccctagttgggattgatcctttccgtctgctccaaaacagccaagtcttca

SEQ ID NO: 17775 - DNA, 53 bp, Artificial
  Synthetic oligonucleotide
cggggtttttggagacaacccgcgccccaatgacggaacaggcagttgtggtc

SEQ ID NO: 17776 - DNA, 55 bp, Artificial
  Synthetic oligonucleotide
ggtgtttggataggaagaactaaaagtactagttcaaggagtgggtttgagatga

SEQ ID NO: 17777 - DNA, 58 bp, Artificial
  Synthetic oligonucleotide
tgacatcttacttggggaccaaagttggtcctacatagtggagagacctggagcccaa

SEQ ID NO: 17778 - DNA, 59 bp, Artificial
  Synthetic oligonucleotide
aggtgtatatcagatccttgctatttatagtacggtatcgagcagtctagttttggtgg

SEQ ID NO: 17779 - DNA, 57 bp, Artificial
  Synthetic oligonucleotide
agtatgtcaaacagagtactttaaagctggctaccgggatgaggaatgtaccagaaa

SEQ ID NO: 17780 - DNA, 59 bp, Artificial
  Synthetic oligonucleotide
tctgcaacactacaggagccgagaagcctaaattccttccggatttgtatgattacaag

SEQ ID NO: 17781 - DNA, 59 bp, Artificial
  Synthetic oligonucleotide
tcgcgaatatcaattggggactgtcccaaatatgtcaaacagggatccttgaaacttgc

SEQ ID NO: 17782 - DNA, 56 bp, Artificial
  Synthetic oligonucleotide
attgtaccaggaagtgggaacctatgtttccgcaagcacttcaacattgaacaaaa

SEQ ID NO: 17783 - DNA, 57 bp, Artificial
  Synthetic oligonucleotide
tccacccactgacaataggcgaatgccccaaatatgtaaaatcggagaaattggtcc

SEQ ID NO: 17784 - DNA, 57 bp, Artificial
  Synthetic oligonucleotide
ttggtcagtattaaaaccaggtcaaacgttgcgagtgagatccaatgggaatctaat

SEQ ID NO: 17785 - DNA, 58 bp, Artificial
  Synthetic oligonucleotide
ccttgtgagaggcaactctcctgtgtttaactataacaaggcaactaagaggcttaca

SEQ ID NO: 17786 - DNA, 56 bp, Artificial
  Synthetic oligonucleotide
ctagtaattaacagtaatggtaacctaatcgctcctcgagggtacttcaagatgcg

SEQ ID NO: 17787 - DNA, 59 bp, Artificial
  Synthetic oligonucleotide
gaacattaatgagctgtcctgttggtgaagccccttccccatacaattcgagatttgaa

SEQ ID NO: 17788 - DNA, 58 bp, Artificial
  Synthetic oligonucleotide
gaatgtaagaggatcagggatgagaatactcgtaagaggtaactctcctgtgtttaac

SEQ ID NO: 17789 - DNA, 56 bp, Artificial
  Synthetic oligonucleotide
tgtttaactacaacaaggcaaccaagaggcttacggtcctcggaaaggatgcaggc

SEQ ID NO: 17790 - DNA, 58 bp, Artificial
  Synthetic oligonucleotide
cttaccattggagagtgtcccaaatatgtcaaatcggataaactggtccttgcaacag

SEQ ID NO: 17791 - DNA, 52 bp, Artificial
  Synthetic oligonucleotide
caacgggaacctaattgctcctcggggttacttcaaaatacgcactgggaaa

SEQ ID NO: 17792 - DNA, 54 bp, Artificial
  Synthetic oligonucleotide
acctaattgctcctcggggttacttcaaaatacgcactgggaaaagctcaataa

SEQ ID NO: 17793 - DNA, 58 bp, Artificial
  Synthetic oligonucleotide
tttctagaccggcttcgccgggatcagaagtccctaagagggagaggcagcactcttg

SEQ ID NO: 17794 - DNA, 58 bp, Artificial
  Synthetic oligonucleotide
gaccggagtagacactaatagcggagttacgagcgcttgcccctacaatggtggatcg

SEQ ID NO: 17795 - DNA, 57 bp, Artificial
  Synthetic oligonucleotide
tgtcccaaatatgttaaaagtaagagcctgaaactagcaactggtttgaggaatgtc

SEQ ID NO: 17796 - DNA, 57 bp, Artificial
  Synthetic oligonucleotide
acacggtctgaaaagagggccttctacggaaggagtgccagagtctatgagggaaga

SEQ ID NO: 17797 - DNA, 59 bp, Artificial
  Synthetic oligonucleotide
aaacatactacggacacaagaatctgaatgcgtatgccacaacggtgtctgcccggtag

SEQ ID NO: 17798 - DNA, 57 bp, Artificial
  Synthetic oligonucleotide
attggtccgcaaaacgaggttcctcccagtggctggtggaacgagcagtgtctatat

SEQ ID NO: 17799 - DNA, 58 bp, Artificial
  Synthetic oligonucleotide
gtaacacggttcgagtctctgaaaatctacagagattcgcttggggaagccgtaatga

SEQ ID NO: 17800 - DNA, 52 bp, Artificial
  Synthetic oligonucleotide
aaggattggttccaggggacatgtttttgttataagggagcccttcgtctct

SEQ ID NO: 17801 - DNA, 57 bp, Artificial
  Synthetic oligonucleotide
tcctaaaacaccggtttgagataatcgaagggagagatcgtactatggcctggacag

SEQ ID NO: 17802 - DNA, 59 bp, Artificial
  Synthetic oligonucleotide
gacaagggttcagtctctacaactaagccctttcagaacatctcgagaatatcaattgg

SEQ ID NO: 17803 - DNA, 59 bp, Artificial
  Synthetic oligonucleotide
ggggggttcaccatccgagcacggacagtgaacaaaccagcctatatgttcaagcaata

SEQ ID NO: 17804 - DNA, 59 bp, Artificial
  Synthetic oligonucleotide
agaacgcacccctactagaacccctacttgacatctgctactatggatccttcatagaa

SEQ ID NO: 17805 - DNA, 56 bp, Artificial
  Synthetic oligonucleotide
gtacttatgttcaaaggtcctaaccgatacgagtcgccccaatgatcccactaatg

SEQ ID NO: 17806 - DNA, 56 bp, Artificial
  Synthetic oligonucleotide
ggctatcgcaacacccgggatgcaaattagagggttcgtgtactttgttgagactt

SEQ ID NO: 17807 - DNA, 58 bp, Artificial
  Synthetic oligonucleotide
tgcctagctgctttaaatacaccttgtctcggaatagaaccattcaggacaaacccca

SEQ ID NO: 17808 - DNA, 57 bp, Artificial
  Synthetic oligonucleotide
gcggacaagagaataattgaaacaatccccgagaggaatgagcaaggacaaacccta

SEQ ID NO: 17809 - DNA, 59 bp, Artificial
  Synthetic oligonucleotide
caatacagtgggttcgtgagggcactattccagcaaatgcgggatgtgcttggaacgtt

SEQ ID NO: 17810 - DNA, 58 bp, Artificial
  Synthetic oligonucleotide
ccaagaggggaagatagtcagtttacgggatcatgcactagccccatggggaatcagg

SEQ ID NO: 17811 - DNA, 58 bp, Artificial
  Synthetic oligonucleotide
cgatacccaaatgtcagatgtgtatgtagggacaattggaagggctctaataggcccg

SEQ ID NO: 17812 - DNA, 54 bp, Artificial
  Synthetic oligonucleotide
ttggaagcaatggctttccttgaggagtcccaccccggtatctttgaaaactcg

SEQ ID NO: 17813 - DNA, 59 bp, Artificial
  Synthetic oligonucleotide
gctgaaacgaagagcaattgcaacccctggaatgcaaatacgaggatttgtgtactttg

SEQ ID NO: 17814 - DNA, 58 bp, Artificial
  Synthetic oligonucleotide
actggtggaatcacagaatctcccggaattatgcccgagccctctaagattagtagac

SEQ ID NO: 17815 - DNA, 51 bp, Artificial
  Synthetic oligonucleotide
ccgtttcttaagggttcgggatcagcgggggaatgtactcttatcccccga

SEQ ID NO: 17816 - DNA, 57 bp, Artificial
  Synthetic oligonucleotide
gccggaacccaggaaacgccgaaattgaagatctcattttcctggcacggtcagcac

SEQ ID NO: 17817 - DNA, 54 bp, Artificial
  Synthetic oligonucleotide
acctacttgaggacagtcacaacggaaaactatgccgactaaaaggaacagccc

SEQ ID NO: 17818 - DNA, 59 bp, Artificial
  Synthetic oligonucleotide
taacaatcggggtagtgaataccactctgtcaacgatagcccttctcatcggaatagga

SEQ ID NO: 17819 - DNA, 57 bp, Artificial
  Synthetic oligonucleotide
acatcactttttcacataacggtggactaatagcacctagtagagtaagcaaattaa

SEQ ID NO: 17820 - DNA, 52 bp, Artificial
  Synthetic oligonucleotide
ttattttgagaaagtcgaaaggttaaaacatggaacctttggccctgtccat

SEQ ID NO: 17821 - DNA, 52 bp, Artificial
  Synthetic oligonucleotide
aaaagggtcccctctattttcctacaatccacaaacagaagtcctaactata

SEQ ID NO: 17822 - DNA, 58 bp, Artificial
  Synthetic oligonucleotide
gggaatggttgatgggtggtatggattccgatatcagaattcggaagggacagggcaa

SEQ ID NO: 17823 - DNA, 58 bp, Artificial
  Synthetic oligonucleotide
ccgaggtgatttgaatttcgtgaacagagcgaaccaacgactaaatcccatgcaccaa

SEQ ID NO: 17824 - DNA, 58 bp, Artificial
  Synthetic oligonucleotide
atgctaagtacagttttgggagtctcgattctcaatctggggcaaaagaggtacacca

SEQ ID NO: 17825 - DNA, 56 bp, Artificial
  Synthetic oligonucleotide
cggaaggacaattagcaaagactccagatcgggctacgagatgttaaaagtcccga

SEQ ID NO: 17826 - DNA, 57 bp, Artificial
  Synthetic oligonucleotide
gatgtattaatggtatggggagtccaccaccctgcaactctaaaggaacaccaagac

SEQ ID NO: 17827 - DNA, 59 bp, Artificial
  Synthetic oligonucleotide
caagtaatagtgacaagggaaccgtatgtatcatgtgacccattagggtgtagaatgta

SEQ ID NO: 17828 - DNA, 59 bp, Artificial
  Synthetic oligonucleotide
atcgccccaaggagtagaggaaggctccatcgggaaggtatgcaggaccttgctagcaa

SEQ ID NO: 17829 - DNA, 58 bp, Artificial
  Synthetic oligonucleotide
gctcaatagggaaggtttgcaggaccttactggcaaaatccgtgttcaacagtctgta

SEQ ID NO: 17830 - DNA, 59 bp, Artificial
  Synthetic oligonucleotide
ctaccatgcgaataactcaaccgacactgttgacacagtactcgaaaagaatgtgaccg

SEQ ID NO: 17831 - DNA, 56 bp, Artificial
  Synthetic oligonucleotide
gccttgcttctgggttgaattaatcaggggacgacctaaagaaaatacaatctgga

SEQ ID NO: 17832 - DNA, 59 bp, Artificial
  Synthetic oligonucleotide
acaggattagattgcatgagaccttgcttttgggttgaactaatcagagggcggcccaa

SEQ ID NO: 17833 - DNA, 58 bp, Artificial
  Synthetic oligonucleotide
gactggattgtatgagaccttgcttttgggttgaactaatcagagggcgacccaaaga

SEQ ID NO: 17834 - DNA, 53 bp, Artificial
  Synthetic oligonucleotide
tcccgtgcacttccgaaaccaagttaaaatacgccgacgggttgatatgaacc

SEQ ID NO: 17835 - DNA, 52 bp, Artificial
  Synthetic oligonucleotide
cctgtccacttccgaaaccaagttaaaatacgccgacgggttgatgtgaacc

SEQ ID NO: 17836 - DNA, 59 bp, Artificial
  Synthetic oligonucleotide
aaatccccgatgtgataacttactcggtgatcgaagttggtcatacatagtagagaggc

SEQ ID NO: 17837 - DNA, 51 bp, Artificial
  Synthetic oligonucleotide
ctgttttaaaaccaggggaaaccttgaatgtggaatccaacggaaatctaa

SEQ ID NO: 17838 - DNA, 56 bp, Artificial
  Synthetic oligonucleotide
acactaaaatagatctatggtcttacaatgcggacgttcttgtggccctggaaaac

SEQ ID NO: 17839 - DNA, 59 bp, Artificial
  Synthetic oligonucleotide
gaccttactagcaaaatccgtattcaacagtctatatgcatctccacaactcgaggggt

SEQ ID NO: 17840 - DNA, 55 bp, Artificial
  Synthetic oligonucleotide
tatggaagtgggagcaaactaataacagttgggagttccaattaccaacagtctt

SEQ ID NO: 17841 - DNA, 52 bp, Artificial
  Synthetic oligonucleotide
aataacagttgggagttccaattaccaacagtcttttgtaccgagtccggga

SEQ ID NO: 17842 - DNA, 58 bp, Artificial
  Synthetic oligonucleotide
cactatagaggtcttcagatcgaacggtctaacagccaacgagtcggggaggctaata

SEQ ID NO: 17843 - DNA, 58 bp, Artificial
  Synthetic oligonucleotide
tgtaatcatggaagtcgttttcccaaatgaagtgggagccaggatattaacatcggaa

SEQ ID NO: 17844 - DNA, 58 bp, Artificial
  Synthetic oligonucleotide
ccctgaaactaagcattgaagacccgagtcatgagggagaggggataccgctacacga

SEQ ID NO: 17845 - DNA, 57 bp, Artificial
  Synthetic oligonucleotide
ctagggaaagggtacatgttcgaaagtaagagcatgaagcttcggacacagataccg

SEQ ID NO: 17846 - DNA, 59 bp, Artificial
  Synthetic oligonucleotide
tattgtaggagtactaaggaccaacaaaacattccagaatgtgagcccgctgtggatag

SEQ ID NO: 17847 - DNA, 59 bp, Artificial
  Synthetic oligonucleotide
acattggatctagaccctgggtaaggggccagtccggcagaataagcatctactggaca

SEQ ID NO: 17848 - DNA, 56 bp, Artificial
  Synthetic oligonucleotide
caggggcggggagtcttcgagctctcggacgaaaaggcagcgaacccgatcgtgcc

SEQ ID NO: 17849 - DNA, 58 bp, Artificial
  Synthetic oligonucleotide
ggtgaagctctcttctgggtacaaagatgttatactatggtttagcttcggggcgtca

SEQ ID NO: 17850 - DNA, 55 bp, Artificial
  Synthetic oligonucleotide
gccaaccaaagtctcccaccaaacttctccagccttgaaaactttagagcctatg

SEQ ID NO: 17851 - DNA, 59 bp, Artificial
  Synthetic oligonucleotide
cagctacaggaatgacactatcggtagtaagcctcctgataggaattgccaacttaggt

SEQ ID NO: 17852 - DNA, 59 bp, Artificial
  Synthetic oligonucleotide
attggggaagacgctcacatattagtcacaagggagccctacttatcctgcgacccaca

SEQ ID NO: 17853 - DNA, 59 bp, Artificial
  Synthetic oligonucleotide
tagcgatggtgttctcacaggaggactgtatgataaaggccgttcggggcgatttgaat

SEQ ID NO: 17854 - DNA, 59 bp, Artificial
  Synthetic oligonucleotide
attgaacccatcgacaatgtgatgggaatgatcggaatattacccgacatgaccccaag

SEQ ID NO: 17855 - DNA, 57 bp, Artificial
  Synthetic oligonucleotide
atccgtagtaagtctgctaatagggttggccaacttgggtctgaacattggacttca

SEQ ID NO: 17856 - DNA, 54 bp, Artificial
  Synthetic oligonucleotide
cgtttcttaagggttcgagatcagcgagggaacgtactcctatctcccgaagag

SEQ ID NO: 17857 - DNA, 59 bp, Artificial
  Synthetic oligonucleotide
agaagcacctaattatcactacgaggaatgctcctgttaccctgattcagggaaagtga

SEQ ID NO: 17858 - DNA, 59 bp, Artificial
  Synthetic oligonucleotide
taggtggacacagcatacaacaactgggggttcacgggcctgtgcagtatctggtaacc

SEQ ID NO: 17859 - DNA, 58 bp, Artificial
  Synthetic oligonucleotide
tgaccattggtgagtgccccaaatatgtaaaatcggagaggttagtcttagcaacagg

SEQ ID NO: 17860 - DNA, 55 bp, Artificial
  Synthetic oligonucleotide
aatacgattgggcgaaaacaaggacgtcatagtcacaagagaaccctatgttagt

SEQ ID NO: 17861 - DNA, 59 bp, Artificial
  Synthetic oligonucleotide
cacaaggggcactactagggactaaacatagcaatggaaccatcaaagatagaacacca

SEQ ID NO: 17862 - DNA, 56 bp, Artificial
  Synthetic oligonucleotide
acaatgttcatccccttaccattggagaatgccccaagtatgtcaaatcgggaaaa

SEQ ID NO: 17863 - DNA, 58 bp, Artificial
  Synthetic oligonucleotide
ctgacatgacccccagcacggaaatgtcattaagaggagtgagagttagtaaaatggg

SEQ ID NO: 17864 - DNA, 57 bp, Artificial
  Synthetic oligonucleotide
aaaatgggggtggatgaatattctagcactgaaagggtggtcgtgagcattgaccgt

SEQ ID NO: 17865 - DNA, 56 bp, Artificial
  Synthetic oligonucleotide
gggtggactggaacggacagtaatttttcggtgaagcaagatatcgtagctataac

SEQ ID NO: 17866 - DNA, 57 bp, Artificial
  Synthetic oligonucleotide
tgccaccccaggaatgcaaataagggggttcgtatatttcgttgagacactagcgag

SEQ ID NO: 17867 - DNA, 59 bp, Artificial
  Synthetic oligonucleotide
aaggcattaaagggaagaggcagcacacttgggctcgacctaagaatggctacaatgga

SEQ ID NO: 17868 - DNA, 52 bp, Artificial
  Synthetic oligonucleotide
accgtttcttaagggttcgagatcaacgggggaatgtactactgtcacccga

SEQ ID NO: 17869 - DNA, 58 bp, Artificial
  Synthetic oligonucleotide
taataacaattcctcggcagtggtctggtacaatggaaggccagtcaccgaaattgct

SEQ ID NO: 17870 - DNA, 58 bp, Artificial
  Synthetic oligonucleotide
tatatgtagccctgttctcacagataatccccgaccgaatgacccaactgtaggtaag

SEQ ID NO: 17871 - DNA, 56 bp, Artificial
  Synthetic oligonucleotide
tttgaaccctttcaatcgttggtacctaaggctgctagaggccaatatagtggatt

SEQ ID NO: 17872 - DNA, 58 bp, Artificial
  Synthetic oligonucleotide
ccctttcaatctttggtacctaaggctgctagaggccaatatagtggatttgtgagaa

SEQ ID NO: 17873 - DNA, 59 bp, Artificial
  Synthetic oligonucleotide
gagaatttgcacaaaagggaagagatcaacagacctgggtcaatgcggaattctgggaa

SEQ ID NO: 17874 - DNA, 58 bp, Artificial
  Synthetic oligonucleotide
cctagtgatactccaagaggggaagatgcccaatttactggttcgtgcactagtccca

SEQ ID NO: 17875 - DNA, 55 bp, Artificial
  Synthetic oligonucleotide
atagccccattacaactagggaaatgcaacgtggcggggtggctccttggcaacc

SEQ ID NO: 17876 - DNA, 58 bp, Artificial
  Synthetic oligonucleotide
ctgacccgaggctagagccacacaagtgggaaaagtactgcgttcttcggataggaga

SEQ ID NO: 17877 - DNA, 56 bp, Artificial
  Synthetic oligonucleotide
ccgcttcttaagagttcgagatcagagggggaatgtactcttatctcccgaagagg

SEQ ID NO: 17878 - DNA, 55 bp, Artificial
  Synthetic oligonucleotide
acatacttttgattaccagcacaggaaatctaattgcccctcggggttacttcaa

SEQ ID NO: 17879 - DNA, 57 bp, Artificial
  Synthetic oligonucleotide
tgacaaaagacgccgaaagaggcaaactaaagagaagagcaattgcaacacccggaa

SEQ ID NO: 17880 - DNA, 59 bp, Artificial
  Synthetic oligonucleotide
gactgttaaggacagaagcccttatagggccttaatgagctgccctgtcggtgaagctc

SEQ ID NO: 17881 - DNA, 59 bp, Artificial
  Synthetic oligonucleotide
caaactgtataggaagctcaaaagggagattacattccatggggccagagaagtagcac

SEQ ID NO: 17882 - DNA, 57 bp, Artificial
  Synthetic oligonucleotide
cggggaagacccgaaaatcgacacgaacaagtttgcggcaatatgcactcacttgga

SEQ ID NO: 17883 - DNA, 51 bp, Artificial
  Synthetic oligonucleotide
ggatacggtataaaaggtttcgggtttcgacaagggaatgacgtgtgggcc

SEQ ID NO: 17884 - DNA, 52 bp, Artificial
  Synthetic oligonucleotide
cgggtttcgacaagggaatgacgtgtgggccggaaggacaattagtaggacc

SEQ ID NO: 17885 - DNA, 56 bp, Artificial
  Synthetic oligonucleotide
gtttgagacttgcgactggactaagaaacgttccacaaattgagactagaggcctt

SEQ ID NO: 17886 - DNA, 58 bp, Artificial
  Synthetic oligonucleotide
ggcctttttggagccatagcagggtttattgaggggggatggactggaatgatagatg

SEQ ID NO: 17887 - DNA, 57 bp, Artificial
  Synthetic oligonucleotide
atatcatgtgactccccaagcaatgtcaatggaggacccggagtaaagggatttggt

SEQ ID NO: 17888 - DNA, 53 bp, Artificial
  Synthetic oligonucleotide
cccaagcaatgtcaatggaggacccggagtaaagggatttggtttcaaagccg

SEQ ID NO: 17889 - DNA, 59 bp, Artificial
  Synthetic oligonucleotide
tctagggcccggattgatgccagaatcgacttcgagtctggacggattaagaaagaaga

SEQ ID NO: 17890 - DNA, 55 bp, Artificial
  Synthetic oligonucleotide
ggacaactcaattaggctttccgcaggtggggatattcgggtgaacagagaacct

SEQ ID NO: 17891 - DNA, 58 bp, Artificial
  Synthetic oligonucleotide
ttgatggttgcatatatgctagagagggagttggtccgtaaaacgaggttcctcccag

SEQ ID NO: 17892 - DNA, 59 bp, Artificial
  Synthetic oligonucleotide
gagtccagagtgatgctcctttggattctagttgtggagggaattgttttcacaatggg

SEQ ID NO: 17893 - DNA, 52 bp, Artificial
  Synthetic oligonucleotide
gggggaagtggacaacaaacacggaaactggagcgccccaactcaacccaat

SEQ ID NO: 17894 - DNA, 59 bp, Artificial
  Synthetic oligonucleotide
cacccaaacaatggagctcgtggaaacagagaaacatcccgcttattgcaatactgatt

SEQ ID NO: 17895 - DNA, 59 bp, Artificial
  Synthetic oligonucleotide
cagactccaatgggtgctataaattccagtatgcctttccacaatgttcatccccttac

SEQ ID NO: 17896 - DNA, 59 bp, Artificial
  Synthetic oligonucleotide
cttgcgacttgcagttgggcttagaaatacaccatctgttgaacccagagggctgttcg

SEQ ID NO: 17897 - DNA, 57 bp, Artificial
  Synthetic oligonucleotide
cggaagtccagatccgggggtcaagggatttgcattcctagacggagataattcatg

SEQ ID NO: 17898 - DNA, 58 bp, Artificial
  Synthetic oligonucleotide
tgggtgctataaattccagtatgcctttccacaatgttcatccccttaccattgggaa

SEQ ID NO: 17899 - DNA, 50 bp, Artificial
  Synthetic oligonucleotide
gacttacttcgaaaaagtcgaaaggttaaagcatgggacctttggccccg

SEQ ID NO: 17900 - DNA, 58 bp, Artificial
  Synthetic oligonucleotide
ctttcaaaacatctcgaggatatcaatcggggactgtcccaagtatgtcaaacaggga

SEQ ID NO: 17901 - DNA, 58 bp, Artificial
  Synthetic oligonucleotide
tgagatggctgactaaaaaggacaacgcttaccctgttcaagacgcccaatacacaaa

SEQ ID NO: 17902 - DNA, 58 bp, Artificial
  Synthetic oligonucleotide
acccattgacaatgtgatgggaatgatcggaatattacccgatatgaccccaagtacg

SEQ ID NO: 17903 - DNA, 53 bp, Artificial
  Synthetic oligonucleotide
ggaatctgttatggataacaaagaagggaacttcctaccctaaactcagtaaa

SEQ ID NO: 17904 - DNA, 58 bp, Artificial
  Synthetic oligonucleotide
tagggccgccagaggccaatacagcggtttcgtaaggaccctgtttcagcaaatgcga

SEQ ID NO: 17905 - DNA, 58 bp, Artificial
  Synthetic oligonucleotide
ctaggctgttcaccataagacaggaactggctagcaggggtctatgggattcctttcg

SEQ ID NO: 17906 - DNA, 59 bp, Artificial
  Synthetic oligonucleotide
gtggtaaactatgtgagcatggagttctcccttactgacccgagactggagccacgtaa

SEQ ID NO: 17907 - DNA, 59 bp, Artificial
  Synthetic oligonucleotide
caaatgggtggactggaacggacagtagcttttcggtgaagcaagatatcgtagcaata

SEQ ID NO: 17908 - DNA, 54 bp, Artificial
  Synthetic oligonucleotide
caaatacctggaagagcatcctagcgctgggaaggaccctaagaaaaccggagg

SEQ ID NO: 17909 - DNA, 59 bp, Artificial
  Synthetic oligonucleotide
tgaactattactggacactagtagaacctggggatactataacattcgaagcaactgga

SEQ ID NO: 17910 - DNA, 59 bp, Artificial
  Synthetic oligonucleotide
agaatcctgaagaccgatttaaatagtggcaactgcgtagtacagtgccaaactgagaa

SEQ ID NO: 17911 - DNA, 57 bp, Artificial
  Synthetic oligonucleotide
agaggaaggccggaggaagccaagtatgtttggtggacgagcaacagtttagttgca

SEQ ID NO: 17912 - DNA, 49 bp, Artificial
  Synthetic oligonucleotide
aacatggaacctttggccccgttcacttccgaaaccaagttaaaatacg

SEQ ID NO: 17913 - DNA, 59 bp, Artificial
  Synthetic oligonucleotide
cacactcttggatccccaagaggaatcggtccatactgaacacgagccaaagaggaata

SEQ ID NO: 17914 - DNA, 57 bp, Artificial
  Synthetic oligonucleotide
ccaggtagactgctttctttggcatgtccgcaaacggtttgcagaccaagggctggg

SEQ ID NO: 17915 - DNA, 56 bp, Artificial
  Synthetic oligonucleotide
ggaagatggtactcccgaacgatgtctaaaactaacagaatggggatggaactgta

SEQ ID NO: 17916 - DNA, 55 bp, Artificial
  Synthetic oligonucleotide
acccgctcaaaggcaggattgttggtttcggatggagggccaaacttatacaata

SEQ ID NO: 17917 - DNA, 59 bp, Artificial
  Synthetic oligonucleotide
gaggttcctcccagtggccggtggaacaagcagtgtttacattgaggtgctgcatttaa

SEQ ID NO: 17918 - DNA, 58 bp, Artificial
  Synthetic oligonucleotide
aagtccctaagaggaagaggcagcactcttggtctggacattgaaacagctacccgtg

SEQ ID NO: 17919 - DNA, 55 bp, Artificial
  Synthetic oligonucleotide
cttaggggtctcaatcctgaatcttgggcaaaagaggtacaccaaaaccacatat

SEQ ID NO: 17920 - DNA, 56 bp, Artificial
  Synthetic oligonucleotide
ccaacaaaccataataccgaatattggatccaggccttgggtcaggggccaatcag

SEQ ID NO: 17921 - DNA, 58 bp, Artificial
  Synthetic oligonucleotide
ttcatgaggcaaacgtcaagagcctttacgacaaggttcgactacagcttaaggataa

SEQ ID NO: 17922 - DNA, 57 bp, Artificial
  Synthetic oligonucleotide
gtccgagaccagcgaggaaacgtactcctatcccctgaagaagttagtgagacacag

SEQ ID NO: 17923 - DNA, 55 bp, Artificial
  Synthetic oligonucleotide
caggtagttgttgataatttaaactggtcgggatacagtgggtctttcaccttgc

SEQ ID NO: 17924 - DNA, 54 bp, Artificial
  Synthetic oligonucleotide
cccacaacgttatcaacgcagaaacggcaccaggaggaccctacaaaattggaa

SEQ ID NO: 17925 - DNA, 59 bp, Artificial
  Synthetic oligonucleotide
aattggagtgacacggagagaagttcacatgtactatctagaaaaggccaacaagataa

SEQ ID NO: 17926 - DNA, 59 bp, Artificial
  Synthetic oligonucleotide
aattcgagcagctgaaactgcggtgggagtcttatcccaatttggtcaagagcaccgat

SEQ ID NO: 17927 - DNA, 59 bp, Artificial
  Synthetic oligonucleotide
agtttcgttcaacatcctgagctaacagggctagactgtatgaggccttgcttctgggt

SEQ ID NO: 17928 - DNA, 58 bp, Artificial
  Synthetic oligonucleotide
catgggcaggagtagacaccagcagtggggtaacaaaagcttgcccttataacagtgg

SEQ ID NO: 17929 - DNA, 55 bp, Artificial
  Synthetic oligonucleotide
gtcaagaacctttacgacaaggttcgactacagcttaaggataatgcaagggaac

SEQ ID NO: 17930 - DNA, 59 bp, Artificial
  Synthetic oligonucleotide
gggtctggggaaatagccattataacagaaagcgatccaatatctgatgttaccactac

SEQ ID NO: 17931 - DNA, 58 bp, Artificial
  Synthetic oligonucleotide
cccacaacaagtaacggagcattagatcctgttatagtaggcgagcctgatttaggcc

SEQ ID NO: 17932 - DNA, 55 bp, Artificial
  Synthetic oligonucleotide
aatccttattatgaggtcaaggaacctgggactaacaagatcctagtgccaaagg

SEQ ID NO: 17933 - DNA, 57 bp, Artificial
  Synthetic oligonucleotide
cctccaaagggcgcctgccccccaatagagcttaaatctgtgctaattcaagacggc

SEQ ID NO: 17934 - DNA, 57 bp, Artificial
  Synthetic oligonucleotide
ttattgtttgtccactttgtcctgcgtgttccgtcttttgtgtctcttcccgcgcgc

SEQ ID NO: 17935 - DNA, 51 bp, Artificial
  Synthetic oligonucleotide
cgtgtcctggcaattatccgcgtaccgttttcggtcgggtaaaaaaggcgc

SEQ ID NO: 17936 - DNA, 55 bp, Artificial
  Synthetic oligonucleotide
tacacagacccgcccttactgcacgcaggggtaccgtccggtacagccgtctggg

SEQ ID NO: 17937 - DNA, 48 bp, Artificial
  Synthetic oligonucleotide
cgtcccctagcctttaatacccccggaccgatttcggtcgctcccggt

SEQ ID NO: 17938 - DNA, 56 bp, Artificial
  Synthetic oligonucleotide
cctagtgacaaccaggtttatgtgcctcctcccgcccctgtatccaaggtcattac

SEQ ID NO: 17939 - DNA, 57 bp, Artificial
  Synthetic oligonucleotide
aagactgcaacagttgcgtgtatcgtcccaaggatccagtaaaagacggctggtatt

SEQ ID NO: 17940 - DNA, 56 bp, Artificial
  Synthetic oligonucleotide
cccccccacggagcgacccgaggcctactggatcttctgccatcacctatgaaact

SEQ ID NO: 17941 - DNA, 49 bp, Artificial
  Synthetic oligonucleotide
gtaggggctggggggggtagggttacgtcccagggtactgtactacgtc

SEQ ID NO: 17942 - DNA, 53 bp, Artificial
  Synthetic oligonucleotide
ccacggaccagtacccctcgtgtatttcaaagggcctttcaacgtgcacggga

SEQ ID NO: 17943 - DNA, 58 bp, Artificial
  Synthetic oligonucleotide
acagcagggggcctatacaacggtccttttgcgaccgcctgtgtgcatgtactgggag

SEQ ID NO: 17944 - DNA, 56 bp, Artificial
  Synthetic oligonucleotide
ctccctcgggcctactattcgaccgcggcccccattgataacattggaggagtcca

SEQ ID NO: 17945 - DNA, 57 bp, Artificial
  Synthetic oligonucleotide
cgagtgttgaggacacttataggtttattacgtcctctgccacccgctgtccggaca

SEQ ID NO: 17946 - DNA, 56 bp, Artificial
  Synthetic oligonucleotide
tgggggggactggaggcccatagtgcaattcctaaggtaccaaggtatagagttca

SEQ ID NO: 17947 - DNA, 52 bp, Artificial
  Synthetic oligonucleotide
caaacgccgaccaagaaacggaaacgacccctccggatctcatcccctagaa

SEQ ID NO: 17948 - DNA, 54 bp, Artificial
  Synthetic oligonucleotide
gcaaggattatcgagaccgctaccggtgttggcgcacttcccggaccgaaaagg

SEQ ID NO: 17949 - DNA, 58 bp, Artificial
  Synthetic oligonucleotide
ccaacgacctgcagctagtgtttggagacagaagggctcagcaaccgatttcggtccc

SEQ ID NO: 17950 - DNA, 52 bp, Artificial
  Synthetic oligonucleotide
acggggggtttgaaatttccacgtcagaggttagtacccctgcagtcttgga

SEQ ID NO: 17951 - DNA, 57 bp, Artificial
  Synthetic oligonucleotide
agaccgctaccggtgttggcagacatcccggaacgaaagagttgctcatcgaccgga

SEQ ID NO: 17952 - DNA, 56 bp, Artificial
  Synthetic oligonucleotide
gcttatggtaaagagtcctggacacttacacaaactagtttggagaccgtgaggag

SEQ ID NO: 17953 - DNA, 58 bp, Artificial
  Synthetic oligonucleotide
gtagacctactgttgctgaaacaccacaagcgtatttaagagtaagcagattaggacg

SEQ ID NO: 17954 - DNA, 58 bp, Artificial
  Synthetic oligonucleotide
ggaacctatgcctatagacactgccggtaacccagagtattccttctctaatagacat

SEQ ID NO: 17955 - DNA, 57 bp, Artificial
  Synthetic oligonucleotide
cactacagaaccttgtcaacctttaagtgtcggtgattgtccagctatagaattaaa

SEQ ID NO: 17956 - DNA, 53 bp, Artificial
  Synthetic oligonucleotide
agcaggcttgggcaacgggccaccttaaccacccgcagcggaaaacaaatagg

SEQ ID NO: 17957 - DNA, 52 bp, Artificial
  Synthetic oligonucleotide
ggggagtctgggaattagtagtactgggcgagggacggggggctcctatggg

SEQ ID NO: 17958 - DNA, 53 bp, Artificial
  Synthetic oligonucleotide
acttaaaacgaaagtatttaggtagtccatatgttagtcctttaggccatata

SEQ ID NO: 17959 - DNA, 57 bp, Artificial
  Synthetic oligonucleotide
atatgttcctttagagtctgccccacgccctgccataccctttgggcctactgcacg

SEQ ID NO: 17960 - DNA, 56 bp, Artificial
  Synthetic oligonucleotide
ggccggctataacatctaggcgtggtgttgttaggtttagtagaattggtcaacga

SEQ ID NO: 17961 - DNA, 53 bp, Artificial
  Synthetic oligonucleotide
acatcctctggcacgggtggccgtacgggctatataccccttggtacccggcc

SEQ ID NO: 17962 - DNA, 58 bp, Artificial
  Synthetic oligonucleotide
ggtgacggcaaggtatatctgccccccactcccgtgtctaaggttatcagcacggatc

SEQ ID NO: 17963 - DNA, 55 bp, Artificial
  Synthetic oligonucleotide
gtccatttgtgagacgaagaccgttttcggtaagtttcatagccgccaggtattg

SEQ ID NO: 17964 - DNA, 59 bp, Artificial
  Synthetic oligonucleotide
cgaaagtttgcacccagtccttatttcagccctgtgtgtgaacaagccagcgtagaaca

SEQ ID NO: 17965 - DNA, 59 bp, Artificial
  Synthetic oligonucleotide
acataccgggcctgacattatattacccacctcagcgcagtggccttatgtgcccttaa

SEQ ID NO: 17966 - DNA, 58 bp, Artificial
  Synthetic oligonucleotide
tcatagcagtactagcacagacccctttagtagtacccctttgcctggtgttcgtcgc

SEQ ID NO: 17967 - DNA, 57 bp, Artificial
  Synthetic oligonucleotide
ggcactaccagccagtttatatcttaaaggtgcctcgggtagcgacagggtgacacc

SEQ ID NO: 17968 - DNA, 54 bp, Artificial
  Synthetic oligonucleotide
gacttggatcagtttcctttagggcgcaagtttctgttacaggttggttctagg

SEQ ID NO: 17969 - DNA, 57 bp, Artificial
  Synthetic oligonucleotide
ctagaaacgaccgagagcccatcgagggaatctggacgagtgacgggcgccgagaaa

SEQ ID NO: 17970 - DNA, 53 bp, Artificial
  Synthetic oligonucleotide
gctcccggaaccacaagagttactcatagaccggagtcggtcaaccgtttaag

SEQ ID NO: 17971 - DNA, 56 bp, Artificial
  Synthetic oligonucleotide
aagcctggggctgttctttggacggcttggcattggtacgtcctctggcaccggtg

SEQ ID NO: 17972 - DNA, 55 bp, Artificial
  Synthetic oligonucleotide
gtgagtcgtgttggccaaagggctaccttgcgtacccgtagtggcaaacaaatcg

SEQ ID NO: 17973 - DNA, 51 bp, Artificial
  Synthetic oligonucleotide
gtcccgtgctattacctgccaaaagggtccttccgcccctgcccctaaaaa

SEQ ID NO: 17974 - DNA, 59 bp, Artificial
  Synthetic oligonucleotide
gtgcacccgtccaaactaaatgtccgccattgctgctaaccagtaactatgaccctcga

SEQ ID NO: 17975 - DNA, 57 bp, Artificial
  Synthetic oligonucleotide
ggcacgtgaagtaaaagtgagggagctgcgacattgggaccattcctgttacggacc

SEQ ID NO: 17976 - DNA, 58 bp, Artificial
  Synthetic oligonucleotide
ctgacccggactttttagatattgtgtccttacacaggcccgcgctcacatcccgcca

SEQ ID NO: 17977 - DNA, 51 bp, Artificial
  Synthetic oligonucleotide
ccgtgtgcttaatagggctgtacacggtagcaacccccagggggggttaag

SEQ ID NO: 17978 - DNA, 57 bp, Artificial
  Synthetic oligonucleotide
tcaagcatctcggaatacctgcaggggtaaacaaccgcacccggttgcctatatctt

SEQ ID NO: 17979 - DNA, 59 bp, Artificial
  Synthetic oligonucleotide
gggtcgcacggggtatgttcctatcagtacacgacctggcactgttgtggatgttagtg

SEQ ID NO: 17980 - DNA, 52 bp, Artificial
  Synthetic oligonucleotide
aggtgtttgcatctaatactagttccgggtcaaaacctattagtagtacccc

SEQ ID NO: 17981 - DNA, 51 bp, Artificial
  Synthetic oligonucleotide
agttccgggtcaaaacctattagtagtacccctatacctggcatacgtagg

SEQ ID NO: 17982 - DNA, 59 bp, Artificial
  Synthetic oligonucleotide
gcggcgtactagtgacagcaaggtatatctgcctcctacccctgtgtcccgggttgtca

SEQ ID NO: 17983 - DNA, 59 bp, Artificial
  Synthetic oligonucleotide
ttgacctgagcctcctacctgactcaccggtccacgagtccactcgtataggactaaca

SEQ ID NO: 17984 - DNA, 57 bp, Artificial
  Synthetic oligonucleotide
tggggttatattctagagcaacgcaacaacgtccagttactaccagtgcatttttaa

SEQ ID NO: 17985 - DNA, 58 bp, Artificial
  Synthetic oligonucleotide
tgatttatccgttgtggaccacccatgggacagtaccccaacgtctgtaatgcctcag

SEQ ID NO: 17986 - DNA, 57 bp, Artificial
  Synthetic oligonucleotide
taggccgtcccacagtcgctgaaacacctcaaggttatttaagagtcagtcggcttg

SEQ ID NO: 17987 - DNA, 54 bp, Artificial
  Synthetic oligonucleotide
acctcgctctgtaaggacatctgttaaggtctctaagggtaccaaacgcaaacg

SEQ ID NO: 17988 - DNA, 59 bp, Artificial
  Synthetic oligonucleotide
cctactgaactaatacctttggacacagtcaaccctattgatccagcagcaccctcaat

SEQ ID NO: 17989 - DNA, 58 bp, Artificial
  Synthetic oligonucleotide
gcgagtatcggaccccgcgttcctgtcctcccctgcacgcctcataacatttgacaac

SEQ ID NO: 17990 - DNA, 59 bp, Artificial
  Synthetic oligonucleotide
tctctgtggcggcctagcgatgcaaaggtgtacctgccacccgcccccgtgtccaaagc

SEQ ID NO: 17991 - DNA, 53 bp, Artificial
  Synthetic oligonucleotide
aaacggtgcgaccgaaaacggtgcatataaaaggtgccccgggtctttgcaca

SEQ ID NO: 17992 - DNA, 59 bp, Artificial
  Synthetic oligonucleotide
ggctttcgagttcgaggagcacatacgcactacaaagcgaaagttaaatcttgcatccc

SEQ ID NO: 17993 - DNA, 58 bp, Artificial
  Synthetic oligonucleotide
gtacagtcggggagcgtatacttggggggaactgccagattggatagctcgtcaaaca

SEQ ID NO: 17994 - DNA, 58 bp, Artificial
  Synthetic oligonucleotide
gagggaacggccatttcgcttgcctggatcaagcctccctgtaacggtcgatgtgtcc

SEQ ID NO: 17995 - DNA, 58 bp, Artificial
  Synthetic oligonucleotide
tacacaggggacaaagcgacgacgactcgatttaccagactccagagacaacacccag

SEQ ID NO: 17996 - DNA, 53 bp, Artificial
  Synthetic oligonucleotide
taccccaccgtctgaggctatacctttacagcccatacgtcccccagttaccg

SEQ ID NO: 17997 - DNA, 55 bp, Artificial
  Synthetic oligonucleotide
gacatagcagagaaccgaaagtacacaggatgtatagttccgggggtaaggaaaa

SEQ ID NO: 17998 - DNA, 54 bp, Artificial
  Synthetic oligonucleotide
gcccttcggtttttacatcaggggaagccggcgttacgagatcgcaacgagtcc

SEQ ID NO: 17999 - DNA, 57 bp, Artificial
  Synthetic oligonucleotide
agtgttgtcgtgaatcctcaggctgggaatactactgtggacgtttccgtacaaggc

SEQ ID NO: 18000 - DNA, 55 bp, Artificial
  Synthetic oligonucleotide
actaggaaacgcacctcaggtggtccctcctctaagctccccactaagcgcaaac

SEQ ID NO: 18001 - DNA, 53 bp, Artificial
  Synthetic oligonucleotide
atttaaggggcctgtaaacttcagctttattcatggaactaccaaaacctcaa

SEQ ID NO: 18002 - DNA, 52 bp, Artificial
  Synthetic oligonucleotide
acctaaaacgaaagtatttaggtagtccctatgttagtccattaggccatat

SEQ ID NO: 18003 - DNA, 59 bp, Artificial
  Synthetic oligonucleotide
gcgtctgactttgtgcctcctattcgtgagggatttgaaataagcacctctgaaactac

SEQ ID NO: 18004 - DNA, 59 bp, Artificial
  Synthetic oligonucleotide
ggcacgtccacgacttggcctttatagtaaagcgttgcagcaagtgcaggttactaatc

SEQ ID NO: 18005 - DNA, 57 bp, Artificial
  Synthetic oligonucleotide
acgaacactgaaagactactgtttgtggggcatccatactttgacattaaacgtgag

SEQ ID NO: 18006 - DNA, 55 bp, Artificial
  Synthetic oligonucleotide
gggctgggcattagcacaggtcgtggcacgggtggggcaacaggttatttccctt

SEQ ID NO: 18007 - DNA, 56 bp, Artificial
  Synthetic oligonucleotide
tgtcccccggtttgaaacacctagggacactggcttttacatacatgacactcagg

SEQ ID NO: 18008 - DNA, 53 bp, Artificial
  Synthetic oligonucleotide
ggcccagaactattcggacctctgtaaaagtgcccaagggtattaaacgcaaa

SEQ ID NO: 18009 - DNA, 59 bp, Artificial
  Synthetic oligonucleotide
ggggttaatcccaccatagccgagggctttcatacactgctgaaaaggcaggcattata

SEQ ID NO: 18010 - DNA, 57 bp, Artificial
  Synthetic oligonucleotide
gttgaccatgtactttttgtgtctaaatcctccattttgtactgcgcgaccgctttc

SEQ ID NO: 18011 - DNA, 58 bp, Artificial
  Synthetic oligonucleotide
tggatatgtaagggttagccgtgtgggacagagacgaactataaccacacggtctgga

SEQ ID NO: 18012 - DNA, 57 bp, Artificial
  Synthetic oligonucleotide
tcctgttaccagctcctcaaaacaatcctccgacgactacacttccaaagccgggca

SEQ ID NO: 18013 - DNA, 50 bp, Artificial
  Synthetic oligonucleotide
gtctacacctggaacagttataaaacccacacgaccgttttcggttcctt

SEQ ID NO: 18014 - DNA, 58 bp, Artificial
  Synthetic oligonucleotide
tagatccaataggttctggaattccatcgcaacctgtaggaggtcggttacctgtgga

SEQ ID NO: 18015 - DNA, 59 bp, Artificial
  Synthetic oligonucleotide
acgtttcgatgtgttacaagatcaactaatgaacatttatgaagttgctagtgataccc

SEQ ID NO: 18016 - DNA, 58 bp, Artificial
  Synthetic oligonucleotide
agggacggtggcatatctcctggggacgtgggaagatcagttcagacagttagtggac

SEQ ID NO: 18017 - DNA, 53 bp, Artificial
  Synthetic oligonucleotide
aactggatacgtccccttaagtgaagggcctgtaagagtgggtagtacaccca

SEQ ID NO: 18018 - DNA, 57 bp, Artificial
  Synthetic oligonucleotide
agcactcctttacaaagacttagacaagctgtaaggggcagatctttaacaaataga

SEQ ID NO: 18019 - DNA, 58 bp, Artificial
  Synthetic oligonucleotide
attgaactcacactgtttggtcagccaaagactagcactcctgagggccctattaacc

SEQ ID NO: 18020 - DNA, 53 bp, Artificial
  Synthetic oligonucleotide
agacacatttggaccccgtggggtactgacaaagaactcccacccgaggccta

SEQ ID NO: 18021 - DNA, 56 bp, Artificial
  Synthetic oligonucleotide
aagttcaatgcctatagaaccgtcctcggtgctgtacaaggcgctaaaccgttcgc

SEQ ID NO: 18022 - DNA, 57 bp, Artificial
  Synthetic oligonucleotide
cagtgctcttcccgattcccacactgcttggcccgtgccccctacccctcctggtca

SEQ ID NO: 18023 - DNA, 59 bp, Artificial
  Synthetic oligonucleotide
acagacgatgggggagactggaggcccatagtgcaattccttaggtatcaaaatgtgga

SEQ ID NO: 18024 - DNA, 56 bp, Artificial
  Synthetic oligonucleotide
caaggatatgttagagtaagtagactgggacgacgagccacaattagaacccgtag

SEQ ID NO: 18025 - DNA, 56 bp, Artificial
  Synthetic oligonucleotide
ctagatcagtttcctttaggacgcaaatttttactacaagcaggattgaaggccaa

SEQ ID NO: 18026 - DNA, 56 bp, Artificial
  Synthetic oligonucleotide
gtttaaacttctaaggccaactaaatgtcaccctagttcatacatgaactgtgtaa

SEQ ID NO: 18027 - DNA, 58 bp, Artificial
  Synthetic oligonucleotide
acaataggattgttgatcaagttgccactaggaacatagattttctaggtcaaccttc

SEQ ID NO: 18028 - DNA, 56 bp, Artificial
  Synthetic oligonucleotide
ccagctatacaatctcggcgtggtcgtgtgcggtttagtagaataggacaacgggg

SEQ ID NO: 18029 - DNA, 55 bp, Artificial
  Synthetic oligonucleotide
cacaacagtataggaaaattcagttattatccagttcctagtggttctttagtaa

SEQ ID NO: 18030 - DNA, 54 bp, Artificial
  Synthetic oligonucleotide
agcggcggtcgggataaaattggtagtgctgtgtactgtcctacccctagtggg

SEQ ID NO: 18031 - DNA, 56 bp, Artificial
  Synthetic oligonucleotide
gagttggttatctacaacgggtaaagtctacttacctccagctcaacctgtggcaa

SEQ ID NO: 18032 - DNA, 55 bp, Artificial
  Synthetic oligonucleotide
ccggcattcgtgttgggggcactccaaatgttattcggcctagtgtaatacccga

SEQ ID NO: 18033 - DNA, 55 bp, Artificial
  Synthetic oligonucleotide
agggtaagccgcttaggtaatagggcttctattagaacacgtagtggagctacag

SEQ ID NO: 18034 - DNA, 53 bp, Artificial
  Synthetic oligonucleotide
aggaacttaatgctttaaaacgaaagttactttacagtcctcaggcgagaagc

SEQ ID NO: 18035 - DNA, 56 bp, Artificial
  Synthetic oligonucleotide
ctcgtccaactccagtaaggcctacaatacctgtggaaacagtaggccccagtgaa

SEQ ID NO: 18036 - DNA, 53 bp, Artificial
  Synthetic oligonucleotide
cgtcgcgagcaaatgtataccaggcacttttttactcgcgggggttcggtggg

SEQ ID NO: 18037 - DNA, 53 bp, Artificial
  Synthetic oligonucleotide
acttatctggtcgtgctccaacgggtttcctgccaagcacctaaaacggtagg

SEQ ID NO: 18038 - DNA, 57 bp, Artificial
  Synthetic oligonucleotide
gcctacgacctcttctattgttccactcacggattccacaggaccagaccttttgcc

SEQ ID NO: 18039 - DNA, 57 bp, Artificial
  Synthetic oligonucleotide
ccgagttagtcgtcttgggcaaaggcggactatacgcactcgttctggagcacaaat

SEQ ID NO: 18040 - DNA, 54 bp, Artificial
  Synthetic oligonucleotide
cgccccagtataggtgcgggcattcctttagacacccttgaaactcttggggcc

SEQ ID NO: 18041 - DNA, 55 bp, Artificial
  Synthetic oligonucleotide
ctattccaactaccggacagtgggtatggccaaacacaggtggatacggacacgg

SEQ ID NO: 18042 - DNA, 58 bp, Artificial
  Synthetic oligonucleotide
gccacccttaaaatacccagtgtgcattttggtagtcccagtggctcactagtctcaa

SEQ ID NO: 18043 - DNA, 59 bp, Artificial
  Synthetic oligonucleotide
gtctctatggtttttggaggattagacggggccaccagtaatggtgcatagcggatgtc

SEQ ID NO: 18044 - DNA, 57 bp, Artificial
  Synthetic oligonucleotide
accccccacgtcggagcccctatatgacatatatgccgagtcggatttcttgcaacc

SEQ ID NO: 18045 - DNA, 57 bp, Artificial
  Synthetic oligonucleotide
cagcatcactctacctaagaaaccgaccgcacccggtacataaaggtgagtagttgc

SEQ ID NO: 18046 - DNA, 57 bp, Artificial
  Synthetic oligonucleotide
acagttaaccccgtggaacctacagcatcatccgtggtccctctaactgagtccaca

SEQ ID NO: 18047 - DNA, 59 bp, Artificial
  Synthetic oligonucleotide
gatgacactgaaaactctaacatagcacatggggacataggtaaagattcccgggacaa

SEQ ID NO: 18048 - DNA, 59 bp, Artificial
  Synthetic oligonucleotide
cgtaagggcactgtgcgctttagcaggttaggtcaacgtgccacgttgcagacccgcag

SEQ ID NO: 18049 - DNA, 59 bp, Artificial
  Synthetic oligonucleotide
gcctcccacagctacagatacacttgctcctgtaagaccccctttaacagtagatcctg

SEQ ID NO: 18050 - DNA, 56 bp, Artificial
  Synthetic oligonucleotide
acatttattgttagcacaaaccctaacacagtaactagtagcacacccataccagg

SEQ ID NO: 18051 - DNA, 54 bp, Artificial
  Synthetic oligonucleotide
aagtaggttaggtcaaagggcttccattcaaacacgcagtggaacacgtgttgg

SEQ ID NO: 18052 - DNA, 56 bp, Artificial
  Synthetic oligonucleotide
aggtatttgcaatcccaagcgataacatgtcagaagcccacaccccctaagacccc

SEQ ID NO: 18053 - DNA, 56 bp, Artificial
  Synthetic oligonucleotide
aacgaaagtatttaggtagtccatatgttagtcctttgggtaatattgagcagtca

SEQ ID NO: 18054 - DNA, 59 bp, Artificial
  Synthetic oligonucleotide
tattagtagtacacctattcctggtatacaacgagtgtcagctcctcgtttgtatagta

SEQ ID NO: 18055 - DNA, 58 bp, Artificial
  Synthetic oligonucleotide
ggagccccctacatcttctatttattctgctacacctagtggctctatggttacttcg

SEQ ID NO: 18056 - DNA, 55 bp, Artificial
  Synthetic oligonucleotide
ccaggcgagcccttgtggtagggggaaatcgagggaatctcaaccgacctccaca

SEQ ID NO: 18057 - DNA, 58 bp, Artificial
  Synthetic oligonucleotide
tggacattagttgacaccagtatagaaacttttagaagcgctccagacggtcacttta

SEQ ID NO: 18058 - DNA, 55 bp, Artificial
  Synthetic oligonucleotide
gtacccctattccaggttttagacgccttgctgctcccaggttatatagtagggc

SEQ ID NO: 18059 - DNA, 56 bp, Artificial
  Synthetic oligonucleotide
ggtcgtccccaatattctacaactcctgcagggtatgtgagggttagtagattagg

SEQ ID NO: 18060 - DNA, 56 bp, Artificial
  Synthetic oligonucleotide
ccagataaagaacggttggtgtggagctgtaggggccttgaaataggtagaggaca

SEQ ID NO: 18061 - DNA, 55 bp, Artificial
  Synthetic oligonucleotide
ctattagtagtacacctatacctggggttagtcgtgtggcagggccacgtttata

SEQ ID NO: 18062 - DNA, 56 bp, Artificial
  Synthetic oligonucleotide
actaattacttctccacacctagtggctctctggtttctagtgagggacaactgtt

SEQ ID NO: 18063 - DNA, 56 bp, Artificial
  Synthetic oligonucleotide
tgtgttacgtcctagatctgtaaaagtacgttctacctcgcacgtttctgtcaaac

SEQ ID NO: 18064 - DNA, 59 bp, Artificial
  Synthetic oligonucleotide
gggctgggtattagcactggtcgtggtacaggcggtgctacaggctatgtgcctttggg

SEQ ID NO: 18065 - DNA, 58 bp, Artificial
  Synthetic oligonucleotide
cgactcctctgtgtctagcacccaggacaccgagcaagaccaagtacccactattaaa

SEQ ID NO: 18066 - DNA, 55 bp, Artificial
  Synthetic oligonucleotide
ggggtgattactacttgctgccaagttatgttctgtggcctaaacgacgtaaacg

SEQ ID NO: 18067 - DNA, 54 bp, Artificial
  Synthetic oligonucleotide
gtctagtttgggcctgtagaggtattgaaataggcagaggacaacctttagggg

SEQ ID NO: 18068 - DNA, 56 bp, Artificial
  Synthetic oligonucleotide
actggccttcgtgttagtcgcctggggcaacgtcggggtactatatccacgcgctc

SEQ ID NO: 18069 - DNA, 57 bp, Artificial
  Synthetic oligonucleotide
gggctgtaataggggttcaagtatctcgtggccaaccactaggaggcacagttactg

SEQ ID NO: 18070 - DNA, 50 bp, Artificial
  Synthetic oligonucleotide
agtggggcgggctgggtatttatttggggggtctggggattggtaccgga

SEQ ID NO: 18071 - DNA, 56 bp, Artificial
  Synthetic oligonucleotide
gtggcctaggtattggtactgggtctggatctggggggcgtactggatatatccct

SEQ ID NO: 18072 - DNA, 55 bp, Artificial
  Synthetic oligonucleotide
caacggtcaccatccaccaaccgccgatacggccgaaaagcgtctagccctacaa

SEQ ID NO: 18073 - DNA, 53 bp, Artificial
  Synthetic oligonucleotide
atttcaatacagggtatttagggtacagttaccagatcctaacaagtttggac

SEQ ID NO: 18074 - DNA, 52 bp, Artificial
  Synthetic oligonucleotide
cgggtgtatgtgggtattacattatccccgtaggtcaagggtggtgtttcgg

SEQ ID NO: 18075 - DNA, 54 bp, Artificial
  Synthetic oligonucleotide
ctaacccatcctttactgaacctgccttagtggagccccctcaaacaggtgagg

SEQ ID NO: 18076 - DNA, 57 bp, Artificial
  Synthetic oligonucleotide
cggatactagcatgcccgggacttcccccggtgtgtttcctactgctgcgcgtgccg

SEQ ID NO: 18077 - DNA, 52 bp, Artificial
  Synthetic oligonucleotide
taaccctgcctttacggatccttccttaattgaggttccccaaacaggtgaa

SEQ ID NO: 18078 - DNA, 55 bp, Artificial
  Synthetic oligonucleotide
acgtgcaaaccccggtagttctgtatactgcccctctcccagcggttccatggta

SEQ ID NO: 18079 - DNA, 57 bp, Artificial
  Synthetic oligonucleotide
tgtggccttacatcgccctgcccttacgtctcgcaaaggcactgtacgttttagtcg

SEQ ID NO: 18080 - DNA, 56 bp, Artificial
  Synthetic oligonucleotide
agtacccaattggatatgcaacccctaattaaattgtcatccgtatccgttgtgtc

SEQ ID NO: 18081 - DNA, 54 bp, Artificial
  Synthetic oligonucleotide
agtggcgttgcatcgtcccgccctcacgtccagaaggggtactgtccgttttag

SEQ ID NO: 18082 - DNA, 53 bp, Artificial
  Synthetic oligonucleotide
ccctccaatttactaacacaactattgaggacggggatatggttgaaacaggg

SEQ ID NO: 18083 - DNA, 57 bp, Artificial
  Synthetic oligonucleotide
acgtgtcacacctgtatcgcctcctgtcccccaccgtagacgaaacgtatctgcagg

SEQ ID NO: 18084 - DNA, 53 bp, Artificial
  Synthetic oligonucleotide
cgtgttgtgccgagtgggtggtggggacgtttggggtatcaccggacgtggta

SEQ ID NO: 18085 - DNA, 54 bp, Artificial
  Synthetic oligonucleotide
cgggtcgtatcgggtgtacgggtctataaggtctcattgtccggaatataagga

SEQ ID NO: 18086 - DNA, 59 bp, Artificial
  Synthetic oligonucleotide
atatgcaacagcgtccttcggaacacggttgcaggtatctagaccgggacagctccctg

SEQ ID NO: 18087 - DNA, 57 bp, Artificial
  Synthetic oligonucleotide
tacatgcctgttcctgtattcattgtaccctcgtcaaccccttagttgacagcccct

SEQ ID NO: 18088 - DNA, 59 bp, Artificial
  Synthetic oligonucleotide
cgccagggcactgtacgccttagtcgtgttggccagcgtgcgtcattacgcacccgtag

SEQ ID NO: 18089 - DNA, 50 bp, Artificial
  Synthetic oligonucleotide
gtaccgaaaacggtcgaccgggaagggtacatataaaagcaaaccgtgtg

SEQ ID NO: 18090 - DNA, 58 bp, Artificial
  Synthetic oligonucleotide
cagcctatctgaaacgaaagtattgtactccaagccctaaatctgcctccgtaaatga

SEQ ID NO: 18091 - DNA, 53 bp, Artificial
  Synthetic oligonucleotide
gactcggtatctgggtccgggggggccaagcctgtataccctcagcctagggt

SEQ ID NO: 18092 - DNA, 52 bp, Artificial
  Synthetic oligonucleotide
accccaattatttcgctattactagtcccatctataaccccgagaaggaaag

SEQ ID NO: 18093 - DNA, 54 bp, Artificial
  Synthetic oligonucleotide
ttgttagtacaacgtggtcgtgggttgggggtaattctaatgacagaatagggc

SEQ ID NO: 18094 - DNA, 54 bp, Artificial
  Synthetic oligonucleotide
tattttttgaagggggcgtcgtctggccctagggcctctttaagcagttatgtg

SEQ ID NO: 18095 - DNA, 58 bp, Artificial
  Synthetic oligonucleotide
gtgtggctgtacacattcaagtgaaccgtagaaatggacggcgtagataaaggtacta

SEQ ID NO: 18096 - DNA, 58 bp, Artificial
  Synthetic oligonucleotide
gtcacaagagctagaccaatacccacttggccgtaagtttattttccagactgcagta

SEQ ID NO: 18097 - DNA, 56 bp, Artificial
  Synthetic oligonucleotide
attgtaggacccccaaatagtgggaagtctcttctgtgcaataccctcatgtcgtt

SEQ ID NO: 18098 - DNA, 57 bp, Artificial
  Synthetic oligonucleotide
tacaagaggaaccacattaaccattacggtgcctacatccgggtccccactcactga

SEQ ID NO: 18099 - DNA, 51 bp, Artificial
  Synthetic oligonucleotide
atttcctctaccgctgccggttgttaaagcgcccttcctgtaccgttcccg

SEQ ID NO: 18100 - DNA, 56 bp, Artificial
  Synthetic oligonucleotide
cggaacccgtgtggaaatcagactacgccagtaatacacttacaaggtgatcctaa

SEQ ID NO: 18101 - DNA, 59 bp, Artificial
  Synthetic oligonucleotide
aggcctctgggacatgcccacccgatgtaattcctaagattgaaggtcgcacgtgggca

SEQ ID NO: 18102 - DNA, 57 bp, Artificial
  Synthetic oligonucleotide
cactgtccgtgtcagtcgtattgggcaacgggcttccttgcaaacacgtagtggggc

SEQ ID NO: 18103 - DNA, 56 bp, Artificial
  Synthetic oligonucleotide
aacattgaattacaggatatcccctccacaagcactcctaagtcccctttgcgtgg

SEQ ID NO: 18104 - DNA, 55 bp, Artificial
  Synthetic oligonucleotide
gggtctactactggacgtaagcgtcgtgcctccccagccatttcacggtctaaag

SEQ ID NO: 18105 - DNA, 57 bp, Artificial
  Synthetic oligonucleotide
gagggtcctcatgttccttggcctggtcttaatgcgggtagggggaatagcactaca

SEQ ID NO: 18106 - DNA, 56 bp, Artificial
  Synthetic oligonucleotide
cgctgcaccttgtttgccctttcgttattacccgtataaggcatatatcgaaacta

SEQ ID NO: 18107 - DNA, 59 bp, Artificial
  Synthetic oligonucleotide
atggagacataccgaccctcgaatgtggctgaatattgcgcattttataacctgaactt

SEQ ID NO: 18108 - DNA, 59 bp, Artificial
  Synthetic oligonucleotide
aacttagcaggccacggttaactgagtatgctccaggggtggttcgagtgagcagattg

SEQ ID NO: 18109 - DNA, 53 bp, Artificial
  Synthetic oligonucleotide
caggtgaggggagcgaatgttccgagtcggaacgggcgggagggtggtttata

SEQ ID NO: 18110 - DNA, 53 bp, Artificial
  Synthetic oligonucleotide
gtttactggaagattggaactttgggttaactttgccaccgtctactagcttg

SEQ ID NO: 18111 - DNA, 58 bp, Artificial
  Synthetic oligonucleotide
gaggcctacatgatccatgccaaatagattagtttgtaccgatttgggataagaaggg

SEQ ID NO: 18112 - DNA, 58 bp, Artificial
  Synthetic oligonucleotide
gggtgaataacgaattaagcccacgtttggatgcaatatgtttacagcaaaggcacga

SEQ ID NO: 18113 - DNA, 59 bp, Artificial
  Synthetic oligonucleotide
ggcctgccttaactgcacgtaggtcaggtgttagatatagtcgcataggtcaaagggcc

SEQ ID NO: 18114 - DNA, 59 bp, Artificial
  Synthetic oligonucleotide
aatgctttggctaccaactttcccttaagtgcatagttggcagtctgtactacattgta

SEQ ID NO: 18115 - DNA, 59 bp, Artificial
  Synthetic oligonucleotide
tgtccactgctgtacaaacccacggcaccctaccagagtgggtgacacgacaaacacta

SEQ ID NO: 18116 - DNA, 56 bp, Artificial
  Synthetic oligonucleotide
acgtaacagggtgacccttgacctaccaacaaggaatctggctatgcctgggcctc

SEQ ID NO: 18117 - DNA, 55 bp, Artificial
  Synthetic oligonucleotide
atctgcaaagggtaaagtgtacctacctcccgctcaacctgtggcaagagttttg

SEQ ID NO: 18118 - DNA, 59 bp, Artificial
  Synthetic oligonucleotide
taccttggcactagcctactccaggtgtgccgggttcggtacatacttgtcaatgggca

SEQ ID NO: 18119 - DNA, 55 bp, Artificial
  Synthetic oligonucleotide
ccggcgcgaccacctattgttgtggaatccgtagggcctacagacccttccattg

SEQ ID NO: 18120 - DNA, 54 bp, Artificial
  Synthetic oligonucleotide
ccggaccaggaacggttagtgtgggcatgtgtaggtttggaggtaggccgcgga

SEQ ID NO: 18121 - DNA, 59 bp, Artificial
  Synthetic oligonucleotide
cgctatgggtgaacattggactaaaggtgctgtgtgtaagtccacacaagttaccacag

SEQ ID NO: 18122 - DNA, 58 bp, Artificial
  Synthetic oligonucleotide
gtgccttggtggagctacatgttacaacacagaagtcgacggtggttataaaactaca

SEQ ID NO: 18123 - DNA, 57 bp, Artificial
  Synthetic oligonucleotide
tctcacctatccattgctacaccgtcccggttgcctaccaacactgttcctttgtcc

SEQ ID NO: 18124 - DNA, 56 bp, Artificial
  Synthetic oligonucleotide
ggggattgtcctcccttggaacttgttaattctcctatacaggatggcgacatggt

SEQ ID NO: 18125 - DNA, 53 bp, Artificial
  Synthetic oligonucleotide
ggcatttaggtagcaatttaggtggcgtccctatgtcctccaccctttttggt

SEQ ID NO: 18126 - DNA, 54 bp, Artificial
  Synthetic oligonucleotide
gcagcggggaggaaatggcgcgtaacggaagtagctcgaaccttaaccttagaa

SEQ ID NO: 18127 - DNA, 53 bp, Artificial
  Synthetic oligonucleotide
agaattaagttgcctgacccaaataggtttggcctacccgacaatacaattta

SEQ ID NO: 18128 - DNA, 49 bp, Artificial
  Synthetic oligonucleotide
gggtgtaaccgaaaacggtcagaccgaaaacggtcgtataaaaacagga

SEQ ID NO: 18129 - DNA, 58 bp, Artificial
  Synthetic oligonucleotide
agggaatcattgttacatcttattaggccgttcggtgtagcggcagaggacgtgcatt

SEQ ID NO: 18130 - DNA, 59 bp, Artificial
  Synthetic oligonucleotide
gttcctaaatctctttcgcgtagagggtgatgggatcacggtgcgactttgctcattta

SEQ ID NO: 18131 - DNA, 56 bp, Artificial
  Synthetic oligonucleotide
ggcgtacatagggaacaaagggtaacactacaagagctcccggtaaacatatgcaa

SEQ ID NO: 18132 - DNA, 57 bp, Artificial
  Synthetic oligonucleotide
gtcctgtaacctaagttcacctacatacttggcactactaacagttttagtggcgca

SEQ ID NO: 18133 - DNA, 56 bp, Artificial
  Synthetic oligonucleotide
ttgcttacgtaccgggacaccgttggaggaattgacattaccatgcgtattttgcg

SEQ ID NO: 18134 - DNA, 55 bp, Artificial
  Synthetic oligonucleotide
actgggtagtttgtgtttacggtgtgtctgggccggtgagtcttacagctcccag

SEQ ID NO: 18135 - DNA, 58 bp, Artificial
  Synthetic oligonucleotide
ctgtacggtcccccaaatacagggaaatccatgttcgcaatgagcttaattcagtgtc

SEQ ID NO: 18136 - DNA, 55 bp, Artificial
  Synthetic oligonucleotide
tgcggtcgttggctacttttacaaaccctgcctacgacggggatctcacggtcac

SEQ ID NO: 18137 - DNA, 56 bp, Artificial
  Synthetic oligonucleotide
accaaacgtcctgcacccagtgatgacacggtttattattcggccggtgtgttaga

SEQ ID NO: 18138 - DNA, 58 bp, Artificial
  Synthetic oligonucleotide
gcagctgtaagggtgagtaacaccggaagccttgggagggctcctgcaccgctgccgg

SEQ ID NO: 18139 - DNA, 58 bp, Artificial
  Synthetic oligonucleotide
cttacaaagatgaaccttggacattgattaacaccagtttagaaacatatagagctcc

SEQ ID NO: 18140 - DNA, 55 bp, Artificial
  Synthetic oligonucleotide
gttttaacggggaaactatctttgctcctgttaccagctcctcgccgtcctcata

SEQ ID NO: 18141 - DNA, 58 bp, Artificial
  Synthetic oligonucleotide
aagagccgacgctcagagactatgtgctaaccttgcaaccagaacctagaagtttaac

SEQ ID NO: 18142 - DNA, 57 bp, Artificial
  Synthetic oligonucleotide
cgttacatagacctgcattaacatctagacgtggtcttgttagatttagtagggtgg

SEQ ID NO: 18143 - DNA, 58 bp, Artificial
  Synthetic oligonucleotide
cggaccgttatgttacacgcaccagcctattttattatggtggcagctccagacttct

SEQ ID NO: 18144 - DNA, 59 bp, Artificial
  Synthetic oligonucleotide
tgaaacagggtacggtgccatggattttgccaatttacaggaatctaagtcagaggtgc

SEQ ID NO: 18145 - DNA, 54 bp, Artificial
  Synthetic oligonucleotide
ggcataaacgggacttggaacagttaaaacgtagacatgtgaggcgaccgaaac

SEQ ID NO: 18146 - DNA, 56 bp, Artificial
  Synthetic oligonucleotide
gacccgcacccactaccaccggagacctatccgagccatcccctggatccatcccc

SEQ ID NO: 18147 - DNA, 56 bp, Artificial
  Synthetic oligonucleotide
aataccctttcacaatcgtggggtaataccacagtcccattgtcaatccctagtga

SEQ ID NO: 18148 - DNA, 52 bp, Artificial
  Synthetic oligonucleotide
aagtatcgggtaaccagtaccgtgtatttcgtatccaacttccggatcctaa

SEQ ID NO: 18149 - DNA, 59 bp, Artificial
  Synthetic oligonucleotide
ctagtatggggtattagaggccttgaagtagagagaggtcagcctcttaatgttggcag

SEQ ID NO: 18150 - DNA, 54 bp, Artificial
  Synthetic oligonucleotide
ggtatctgcctttcagtatagggtgtttagggtacagttacctgaccccaacaa

SEQ ID NO: 18151 - DNA, 52 bp, Artificial
  Synthetic oligonucleotide
cagtatagggtgtttagggtacagttacctgaccccaacaaatttggtcttc

SEQ ID NO: 18152 - DNA, 58 bp, Artificial
  Synthetic oligonucleotide
gtcgtggaaccggaggcagtactggctatgtgccattaggtgagggccccgccattcg

SEQ ID NO: 18153 - DNA, 54 bp, Artificial
  Synthetic oligonucleotide
gtataccgaagccaccaccgtgtgcacccaaaagagcgggggttcggcgccgac

SEQ ID NO: 18154 - DNA, 58 bp, Artificial
  Synthetic oligonucleotide
tggggaacattgggctaagggtactgcctgtaagcccggtgctgtgcaaacaggtgac

SEQ ID NO: 18155 - DNA, 49 bp, Artificial
  Synthetic oligonucleotide
gtttcctttaggacgtaagtttttattacaggctgggttacgacctaaa

SEQ ID NO: 18156 - DNA, 59 bp, Artificial
  Synthetic oligonucleotide
tcacaaattgaacactggcaaattttgcgaaaagaagctgtactactatattttgctag

SEQ ID NO: 18157 - DNA, 56 bp, Artificial
  Synthetic oligonucleotide
gccccccgttggaacttattaccagtgttatacaggatggggacatggttgataca

SEQ ID NO: 18158 - DNA, 56 bp, Artificial
  Synthetic oligonucleotide
cctacacctccacgccaaagtagtactccaattcaaagacttagaactgcatttag

SEQ ID NO: 18159 - DNA, 56 bp, Artificial
  Synthetic oligonucleotide
gtatgggcttgcaagggtctggaaattggtcgaggtcaacctttaggaataggcag

SEQ ID NO: 18160 - DNA, 58 bp, Artificial
  Synthetic oligonucleotide
cattgcatgtccatttgccacacctggcttttagtatttggcttccgtccttttcgga

SEQ ID NO: 18161 - DNA, 51 bp, Artificial
  Synthetic oligonucleotide
taacccccgacacggcttccattgttcccctggaggtacccccaacgccca

SEQ ID NO: 18162 - DNA, 56 bp, Artificial
  Synthetic oligonucleotide
gttacctccatccggtaaattatatttgccaccctctcagcctgtggctaaaatac

SEQ ID NO: 18163 - DNA, 59 bp, Artificial
  Synthetic oligonucleotide
gcagaatacagcctcctcgtctatttactataccacacctagtgggtctttggtgtcta

SEQ ID NO: 18164 - DNA, 58 bp, Artificial
  Synthetic oligonucleotide
cagcaaaggctaaacgtcgtctgtttgagctaccggacagtgggtatggccaaacaca

SEQ ID NO: 18165 - DNA, 57 bp, Artificial
  Synthetic oligonucleotide
catggttacgaggaaatcccaatggacacttttgcttcgtcgggcactggcacggaa

SEQ ID NO: 18166 - DNA, 56 bp, Artificial
  Synthetic oligonucleotide
actctggcgccctagtgacaacttggtgtacctgcctcctactcccgtgtccaaag

SEQ ID NO: 18167 - DNA, 58 bp, Artificial
  Synthetic oligonucleotide
tgccgccgtccactagcttggaggacacttataggttcttgtcgtcctccgcaataac

SEQ ID NO: 18168 - DNA, 57 bp, Artificial
  Synthetic oligonucleotide
gcctgaacctacacgaactgtggctactaaaaatggtgcttaccccacactcaacta

SEQ ID NO: 18169 - DNA, 54 bp, Artificial
  Synthetic oligonucleotide
acgtctgaaaaatggctgaaggtacagaccctttagagggtagcagtgggtggt

SEQ ID NO: 18170 - DNA, 54 bp, Artificial
  Synthetic oligonucleotide
aagtttaaattctagcgcgcgggagaccattactgattctttgtcttccgttac

SEQ ID NO: 18171 - DNA, 52 bp, Artificial
  Synthetic oligonucleotide
ggcggtaccaacaaattcaagtgagcgacccgctctttttaggacaaccccg

SEQ ID NO: 18172 - DNA, 59 bp, Artificial
  Synthetic oligonucleotide
ctattggcaggcggtgcgaaaggagaatgtactgctgtactacgccagggagaagggcc

SEQ ID NO: 18173 - DNA, 54 bp, Artificial
  Synthetic oligonucleotide
cagtagtgccggaggttctgggggtcgactagggtacaccccattatctggagg

SEQ ID NO: 18174 - DNA, 57 bp, Artificial
  Synthetic oligonucleotide
cagaaaacacgggcggagagctaatagagatggtccccctcagacacccccctcgca

SEQ ID NO: 18175 - DNA, 55 bp, Artificial
  Synthetic oligonucleotide
ccaccgaacatctgggtggacaataacaaatcaggggccgacggttaccctcaca

SEQ ID NO: 18176 - DNA, 54 bp, Artificial
  Synthetic oligonucleotide
tattgtacattaactattggtacccaaggaaagcgttccactattcccaaggtg

SEQ ID NO: 18177 - DNA, 59 bp, Artificial
  Synthetic oligonucleotide
gtatcctctgattcccagctgtttaataagccttattggctacaacgggcacagggcca

SEQ ID NO: 18178 - DNA, 56 bp, Artificial
  Synthetic oligonucleotide
aaactgagttcacaactagtacaccaagaaccacacaagtacaggaaaggcctaca

SEQ ID NO: 18179 - DNA, 58 bp, Artificial
  Synthetic oligonucleotide
cgaattttgaagttaccactgttccaacttgttctgagacgtctggatctgatcccga

SEQ ID NO: 18180 - DNA, 52 bp, Artificial
  Synthetic oligonucleotide
tttgtggtttccctggggctagcagaaactctttaggttgcgaccgttttcg

SEQ ID NO: 18181 - DNA, 53 bp, Artificial
  Synthetic oligonucleotide
cagtgtggtttactttgggggtctgggtataggcacaggtaagggtactggtg

SEQ ID NO: 18182 - DNA, 56 bp, Artificial
  Synthetic oligonucleotide
gtaacatcacagggtactgtagtacgtccgggtgttgtggtagatcctattgggcc

SEQ ID NO: 18183 - DNA, 57 bp, Artificial
  Synthetic oligonucleotide
actaagcaggttgggtcaacgtggcactattcgtacaagaagtggcctgcaaatagg

SEQ ID NO: 18184 - DNA, 47 bp, Artificial
  Synthetic oligonucleotide
acccctacccgcccagtacggtctgctaaaaaacgtagacggggggt

SEQ ID NO: 18185 - DNA, 53 bp, Artificial
  Synthetic oligonucleotide
actggctacgttcccctgggtgctcgtccgtcagtagttcccgaagttcttcc

SEQ ID NO: 18186 - DNA, 56 bp, Artificial
  Synthetic oligonucleotide
gtggcggcctagtgactccaaggtctacctgccaccggccccagtgtctaaggtgg

SEQ ID NO: 18187 - DNA, 59 bp, Artificial
  Synthetic oligonucleotide
gagccgtacaatagacgtgtgcgacaggtcatgacccgtaacactgacttccttacgcg

SEQ ID NO: 18188 - DNA, 54 bp, Artificial
  Synthetic oligonucleotide
taaaagggctattccgtcagggtcttctactaaggtcaaacgaaagcgcagaac

SEQ ID NO: 18189 - DNA, 53 bp, Artificial
  Synthetic oligonucleotide
cggccccgccttgcgatacgttcaaaaagggagggtacgttgtcgaggtgctc

SEQ ID NO: 18190 - DNA, 55 bp, Artificial
  Synthetic oligonucleotide
tacgcgggcgggggtaggcaccagaagcggtgtagtactcagggaaccggtgcac

SEQ ID NO: 18191 - DNA, 59 bp, Artificial
  Synthetic oligonucleotide
tatcaggtttctataaaagctcacaccgcacaaggttagggataccatccctggagaga

SEQ ID NO: 18192 - DNA, 59 bp, Artificial
  Synthetic oligonucleotide
tcccatttgtattgatagaaagcacaaatctgcagtccaaatgaaagcacctccccttt

SEQ ID NO: 18193 - DNA, 59 bp, Artificial
  Synthetic oligonucleotide
atacctcctcacgtgtgctcgctaaatccgtacaaccgcgcttctgactgccaagggag

SEQ ID NO: 18194 - DNA, 56 bp, Artificial
  Synthetic oligonucleotide
ccgggaggttatgttcctctacgcggtggcgggtcctctgcatctttacctagcaa

SEQ ID NO: 18195 - DNA, 58 bp, Artificial
  Synthetic oligonucleotide
ctgtgacaacccagtcgtccgtttgcatccaggcaacaacccgcgacggcacatccct

SEQ ID NO: 18196 - DNA, 57 bp, Artificial
  Synthetic oligonucleotide
gcagaacagggtacatacctttaggggggcgtacaaacactatagtagatgtatcgc

SEQ ID NO: 18197 - DNA, 55 bp, Artificial
  Synthetic oligonucleotide
gacgcagcactgtaaggtttagtaggctaggacaacgggcaaccatgtttacccg

SEQ ID NO: 18198 - DNA, 57 bp, Artificial
  Synthetic oligonucleotide
ggcgttctagtgacaacaaggtgtatctacctccaccttcggtagctaaggttgtca

SEQ ID NO: 18199 - DNA, 59 bp, Artificial
  Synthetic oligonucleotide
acacggcaaaaggagattactggacagttatccggacagtggatatggcaatacacaag

SEQ ID NO: 18200 - DNA, 56 bp, Artificial
  Synthetic oligonucleotide
tggatacaccgaagaatacagggtatagacgaggagggtgactggaaagaaatcgg

SEQ ID NO: 18201 - DNA, 56 bp, Artificial
  Synthetic oligonucleotide
ggcaattattaacgcaggggcgcctgaaattgtgccccctgcacacggtgggttta

SEQ ID NO: 18202 - DNA, 54 bp, Artificial
  Synthetic oligonucleotide
tgggacgcaagtttttgttacaaagtggatataggggacggtcctctattcgta

SEQ ID NO: 18203 - DNA, 59 bp, Artificial
  Synthetic oligonucleotide
ttatataaccctgatacgcagcgattggtatgggcctgtgttggtgttgaaataggtag

SEQ ID NO: 18204 - DNA, 55 bp, Artificial
  Synthetic oligonucleotide
ccccctcgcctagtgggtctatggtatcctcagactcccagttatttaacaagcc

SEQ ID NO: 18205 - DNA, 58 bp, Artificial
  Synthetic oligonucleotide
ctggggctgtagaggtatagaaataggtagaggacagccattaggcgttggaagtgta

SEQ ID NO: 18206 - DNA, 57 bp, Artificial
  Synthetic oligonucleotide
ggcgggctatgtgcctttgtccactcgtcctcccactagtagtattaccacgtccac

SEQ ID NO: 18207 - DNA, 57 bp, Artificial
  Synthetic oligonucleotide
ctggggggtcctatacatctattggcaaccggtccagcctacccagcaatgccaccg

SEQ ID NO: 18208 - DNA, 58 bp, Artificial
  Synthetic oligonucleotide
ttggtacacttggcattagcagtggtaaaggcactggaggccctacaggttacacacc

SEQ ID NO: 18209 - DNA, 59 bp, Artificial
  Synthetic oligonucleotide
gtatattagagacctggaacttgggattcattcagcccccaactaatatagaagatcag

SEQ ID NO: 18210 - DNA, 57 bp, Artificial
  Synthetic oligonucleotide
cttgggctatgtgccattaggctctggacagggggtgcgtttggggactcgggtgac

SEQ ID NO: 18211 - DNA, 58 bp, Artificial
  Synthetic oligonucleotide
gccctacttttcgcgcacgcaagagggtagagtgaggataagcaggctaggtaccaaa

SEQ ID NO: 18212 - DNA, 49 bp, Artificial
  Synthetic oligonucleotide
accgtaaccgctaccggtgttggctgttttcccggaccgaaagagttac

SEQ ID NO: 18213 - DNA, 52 bp, Artificial
  Synthetic oligonucleotide
taaaacgaaagtttgtaggcagtccggcagttagtccgttgggaaactacaa

SEQ ID NO: 18214 - DNA, 57 bp, Artificial
  Synthetic oligonucleotide
cgcctatagtgcacctaaaaggtgaatctaactgtttgaagtgtttgcggttcagac

SEQ ID NO: 18215 - DNA, 58 bp, Artificial
  Synthetic oligonucleotide
tcacgtaagggcaccgtgcgctttagccgattaggccagagggcaacactaaccacac

SEQ ID NO: 18216 - DNA, 56 bp, Artificial
  Synthetic oligonucleotide
cttttatgaccctaacacacagcgccttgtgtgggcctgtttaggcgtggaggtgg

SEQ ID NO: 18217 - DNA, 58 bp, Artificial
  Synthetic oligonucleotide
cctctgggtcgtaagtttttggcacagtctaacctgtctacgcagcgatctgtccgta

SEQ ID NO: 18218 - DNA, 55 bp, Artificial
  Synthetic oligonucleotide
gttatatagcgaccgttacagttaaaccggggtacagaatggctcgaccgacatc

SEQ ID NO: 18219 - DNA, 59 bp, Artificial
  Synthetic oligonucleotide
accagaatgcagaggatgtgtggcaaaaaactaagggacacgttgatgatacagggttg

SEQ ID NO: 18220 - DNA, 59 bp, Artificial
  Synthetic oligonucleotide
tactggctatggacctattaatccggcagggggcagaataacaggcacaggcacggtta

SEQ ID NO: 18221 - DNA, 59 bp, Artificial
  Synthetic oligonucleotide
ccggatagcacacaggatcagaaggttgctgggccatctgtgtactttgggacccctag

SEQ ID NO: 18222 - DNA, 55 bp, Artificial
  Synthetic oligonucleotide
agagacagtgccccgtccccctattgctgtagagcctgttaggcctttggaccct

SEQ ID NO: 18223 - DNA, 56 bp, Artificial
  Synthetic oligonucleotide
tttgcagtaccgtgtatttagagtgaagctacctgaccctaacaaatttgggttgc

SEQ ID NO: 18224 - DNA, 57 bp, Artificial
  Synthetic oligonucleotide
caaaaatcagcgtttgctttggagccttggaccttagtggacactagtacagagact

SEQ ID NO: 18225 - DNA, 58 bp, Artificial
  Synthetic oligonucleotide
gagtcagacgggagtctcctaaataccgtggcgtgtctcctagcgaggtgggaaagca

SEQ ID NO: 18226 - DNA, 59 bp, Artificial
  Synthetic oligonucleotide
ccagcaggttatattagggtaagcagactaggaactcgaggcaccattcgcactcgttc

SEQ ID NO: 18227 - DNA, 57 bp, Artificial
  Synthetic oligonucleotide
atgttattaaaagagcataccctatacctacatacccagtgggtgacctgtagatgg

SEQ ID NO: 18228 - DNA, 58 bp, Artificial
  Synthetic oligonucleotide
gacccctctgtgtctagcacccaggacaccgagcaagaacccctatccactactagac

SEQ ID NO: 18229 - DNA, 57 bp, Artificial
  Synthetic oligonucleotide
ccaagcggaggctattccaactaccggacagtgggtatggccaaacacaggtggata

SEQ ID NO: 18230 - DNA, 58 bp, Artificial
  Synthetic oligonucleotide
agggagtagcgggcgtgagactcccggcagtgctatatacagccccacacctagtggg

SEQ ID NO: 18231 - DNA, 56 bp, Artificial
  Synthetic oligonucleotide
gcaacccttattttgccatacgaccagcaaacaagacacttgtgcctaaggtttcg

SEQ ID NO: 18232 - DNA, 57 bp, Artificial
  Synthetic oligonucleotide
ctaaggtcacacacctgcgaccggtatcggttgacacacaccctgtacacttcctta

SEQ ID NO: 18233 - DNA, 53 bp, Artificial
  Synthetic oligonucleotide
gcacttacaactcgtaggggggttgtacgttatagtagggtgggcgacagggc

SEQ ID NO: 18234 - DNA, 52 bp, Artificial
  Synthetic oligonucleotide
ctcttacaactcgcaggggggttgtacgttatagtagggtgggcgaaagggc

SEQ ID NO: 18235 - DNA, 57 bp, Artificial
  Synthetic oligonucleotide
gatccagtgacaaacagtcacaacaagccgaccccaggaggaaaggatacggacgac

SEQ ID NO: 18236 - DNA, 53 bp, Artificial
  Synthetic oligonucleotide
gttacaacttccaccgttaccgaccccgctgtcttggatatcaccccctcagg

SEQ ID NO: 18237 - DNA, 59 bp, Artificial
  Synthetic oligonucleotide
acttgccaacttgtcttgccgcgcattccaagaaacacacctattccggtcgcaatgtc

SEQ ID NO: 18238 - DNA, 58 bp, Artificial
  Synthetic oligonucleotide
cgatcgcctaggcaggaccccgacacaggggctatacacgcgcgggggatcacagacc

SEQ ID NO: 18239 - DNA, 55 bp, Artificial
  Synthetic oligonucleotide
cgtttcagggacattgtacgcctgtcctctgcacggtttgaacgcgccccgtccg

SEQ ID NO: 18240 - DNA, 59 bp, Artificial
  Synthetic oligonucleotide
ttatgactctgaccatgaaaggttagtatggcgtctaagaggaattgaaataggccgag

SEQ ID NO: 18241 - DNA, 56 bp, Artificial
  Synthetic oligonucleotide
ttttggaactcctagcggttctcttgtatcaagtgaatctcagctttttaaccgac

SEQ ID NO: 18242 - DNA, 55 bp, Artificial
  Synthetic oligonucleotide
catgggggcataatcttaacacaccttcttaaataccgtctcctgttgtccactt

SEQ ID NO: 18243 - DNA, 54 bp, Artificial
  Synthetic oligonucleotide
atacctaatgacttatatattaagggtagtaatggcagggacccgcccccaagc

SEQ ID NO: 18244 - DNA, 59 bp, Artificial
  Synthetic oligonucleotide
cattacgtggagcctgctgctataggtgaaacctcaacgttcgagaatgtactggtagg

SEQ ID NO: 18245 - DNA, 54 bp, Artificial
  Synthetic oligonucleotide
aatggaagattcacaaggtacagacggggagggtacgggatgtaatggctggtt

SEQ ID NO: 18246 - DNA, 55 bp, Artificial
  Synthetic oligonucleotide
aaccgatatcggttccaaatctcattaagccaagccctcaggtctttccagactt

SEQ ID NO: 18247 - DNA, 52 bp, Artificial
  Synthetic oligonucleotide
tcacgaaggaaacgacgtagagcgtccccccaacaaaaggaacaggggcaac

SEQ ID NO: 18248 - DNA, 58 bp, Artificial
  Synthetic oligonucleotide
ggcatacgtgttagtagattgggacaacgtgcaacactttctactagaagtggcaaac

SEQ ID NO: 18249 - DNA, 56 bp, Artificial
  Synthetic oligonucleotide
ccgttgattcaacgctacctgcccgcaggttcacaacgattatttgtaggtgaagg

SEQ ID NO: 18250 - DNA, 55 bp, Artificial
  Synthetic oligonucleotide
acactacgatgtttgtaggagaccctttcaatcctccaagtgacccgaccgactg

SEQ ID NO: 18251 - DNA, 57 bp, Artificial
  Synthetic oligonucleotide
caccacgaaatctgaattaccaagttgccagacctatccttaagttcagatcacgtt

SEQ ID NO: 18252 - DNA, 54 bp, Artificial
  Synthetic oligonucleotide
cggccgtgtctggttcccagtctacggagggcttaaacccaattcgcctagtga

SEQ ID NO: 18253 - DNA, 58 bp, Artificial
  Synthetic oligonucleotide
gtttgtggacaatcaatcccaagtgtcaaggaaggatcatcggtccctggcaggggga

SEQ ID NO: 18254 - DNA, 59 bp, Artificial
  Synthetic oligonucleotide
tggatctcagagttccgatggggtgaccctcgtattatccaagtaacggcaggctacga

SEQ ID NO: 18255 - DNA, 59 bp, Artificial
  Synthetic oligonucleotide
tagaggaggatgaagggttagctgaattcctaatggatcgtagaataattctcccaaga

SEQ ID NO: 18256 - DNA, 58 bp, Artificial
  Synthetic oligonucleotide
tgtgagatgggcctcgaagtgcttgacccaccaggacttgtaaccttactatccttag

SEQ ID NO: 18257 - DNA, 59 bp, Artificial
  Synthetic oligonucleotide
tatccgagagggccgcatatttggtgccatccttgggggagttgccttaggtgtagcca

SEQ ID NO: 18258 - DNA, 58 bp, Artificial
  Synthetic oligonucleotide
gcctcacaaatagcacaaacgcgcgcaaatttcacactaaacagtcttaaaattctaa

SEQ ID NO: 18259 - DNA, 56 bp, Artificial
  Synthetic oligonucleotide
cctaatttgttatatcgaagcttttataggagaactccagacttccttacagaagc

SEQ ID NO: 18260 - DNA, 58 bp, Artificial
  Synthetic oligonucleotide
cggatatggaggtctagagcatgaagaaaacggagacgtaatatgtaatacaactggt

SEQ ID NO: 18261 - DNA, 55 bp, Artificial
  Synthetic oligonucleotide
tcttgttgttagacagtaccttaccttcgaactccagttggcaagacggcagggg

SEQ ID NO: 18262 - DNA, 58 bp, Artificial
  Synthetic oligonucleotide
cttggtgtgcttcggacatctgcaacagggagggtattcttttctactctacgttcca

SEQ ID NO: 18263 - DNA, 54 bp, Artificial
  Synthetic oligonucleotide
cccccacagcgacatttcggaccgaccccgacacagttcctgaattcagtcgtt

SEQ ID NO: 18264 - DNA, 58 bp, Artificial
  Synthetic oligonucleotide
acagtgacccgagttacaaagtttgtggctctggatcattaccaatcggactggccaa

SEQ ID NO: 18265 - DNA, 57 bp, Artificial
  Synthetic oligonucleotide
tggtacatggaaggttagggttcgacggccaataccatgagaaggacctagacgtca

SEQ ID NO: 18266 - DNA, 57 bp, Artificial
  Synthetic oligonucleotide
ttagctactggccagatccactggggcaacctttcaaaaattggagtcgtagggaca

SEQ ID NO: 18267 - DNA, 57 bp, Artificial
  Synthetic oligonucleotide
gcaacaaaactctatacccaaagtcatcgaaggcacctcgtggaatttgtaacatgg

SEQ ID NO: 18268 - DNA, 57 bp, Artificial
  Synthetic oligonucleotide
tcaagttgatctagtagaaaaggacctgttacctgcaagcctaacaatatggttccc

SEQ ID NO: 18269 - DNA, 57 bp, Artificial
  Synthetic oligonucleotide
cgtaatcaacacattggagtggataccgagattcaaggttagtcccaacctcttcac

SEQ ID NO: 18270 - DNA, 56 bp, Artificial
  Synthetic oligonucleotide
aatttcaacatccaccaacctcgcacataggcttagggatcggagtacccaggtta

SEQ ID NO: 18271 - DNA, 59 bp, Artificial
  Synthetic oligonucleotide
tggggcacaggaatggtacactactatccctaaatatgtagccactcaggggtatttga

SEQ ID NO: 18272 - DNA, 59 bp, Artificial
  Synthetic oligonucleotide
ctgataggggtctacgggagctccgtaatttacatggtgcagctgccaatctttggcgt

SEQ ID NO: 18273 - DNA, 58 bp, Artificial
  Synthetic oligonucleotide
atcccaccctatcattcactcaaggttgaatgcagtaggcctaattaaccatgacggg

SEQ ID NO: 18274 - DNA, 55 bp, Artificial
  Synthetic oligonucleotide
cctaaataatatgcgtgccacctacttggaaaccttatccgtaagcacaaccagg

SEQ ID NO: 18275 - DNA, 53 bp, Artificial
  Synthetic oligonucleotide
ttcggaccgaccccaacacagtttctaaattcggtcgtttataggaatctaca

SEQ ID NO: 18276 - DNA, 58 bp, Artificial
  Synthetic oligonucleotide
ccctacatcaatggtgcatggaaggttagggtttgacggtcaataccatgagaaggac

SEQ ID NO: 18277 - DNA, 57 bp, Artificial
  Synthetic oligonucleotide
gatgtttgtgggcgaccctttcaaccctccgagtgatccgactgactgtgacctaac

SEQ ID NO: 18278 - DNA, 55 bp, Artificial
  Synthetic oligonucleotide
gtaaatttaccctcagtcgggaacctaaataatatgcgtgccacctacttggaga

SEQ ID NO: 18279 - DNA, 56 bp, Artificial
  Synthetic oligonucleotide
tcatgggggataaagtatacggtattgtctcttcacttgagagttttgtttacgcc

SEQ ID NO: 18280 - DNA, 56 bp, Artificial
  Synthetic oligonucleotide
gagtttaaaggatgaccttgatcaccattacccattagaatatcaaagggtaatag

SEQ ID NO: 18281 - DNA, 58 bp, Artificial
  Synthetic oligonucleotide
atgggagtcggtacagtcctggatgtccaaatgcgaaattacacttatgcacgacctt

SEQ ID NO: 18282 - DNA, 55 bp, Artificial
  Synthetic oligonucleotide
aaactcaaggatactacgatgtttgtaggagaccctttcaatcctccaagtgacc

SEQ ID NO: 18283 - DNA, 54 bp, Artificial
  Synthetic oligonucleotide
tgaaccccccacagcgacatttcggaccgaccccaacacagttcctgaattcgg

SEQ ID NO: 18284 - DNA, 54 bp, Artificial
  Synthetic oligonucleotide
ggccgtaacacggcaggtgggacctctacctattacaacttggtaggggatgta

SEQ ID NO: 18285 - DNA, 57 bp, Artificial
  Synthetic oligonucleotide
agagattaccagggaatttagtgttaatgcaggtgtaactacacctgtaagcactta

SEQ ID NO: 18286 - DNA, 56 bp, Artificial
  Synthetic oligonucleotide
aggttccgtgttgtctatatgagcatcacccgtctttcggataacgggtattacac

SEQ ID NO: 18287 - DNA, 56 bp, Artificial
  Synthetic oligonucleotide
agggggactgagtaaccttcaatactcaaggctctacactagaaatatcggtgacc

SEQ ID NO: 18288 - DNA, 54 bp, Artificial
  Synthetic oligonucleotide
ctaagggcagttacttcgaataagtttatgtatgaccctagccctgtaccggag

SEQ ID NO: 18289 - DNA, 57 bp, Artificial
  Synthetic oligonucleotide
acagactcaactcttgggcatacaagtgaatttgccctcagtcgggaacttaaataa

SEQ ID NO: 18290 - DNA, 59 bp, Artificial
  Synthetic oligonucleotide
cggatcaaccaggtcatgtgctcgtacactagtctctgggtctatagggaataggttta

SEQ ID NO: 18291 - DNA, 59 bp, Artificial
  Synthetic oligonucleotide
tcgcagccagtaccccacccatcggaccttataaagcatgcaacttctggcggcccgga

SEQ ID NO: 18292 - DNA, 58 bp, Artificial
  Synthetic oligonucleotide
gatttctctagaggacctaatcccactgagaacgtacttaaaacggagcacatgtcca

SEQ ID NO: 18293 - DNA, 56 bp, Artificial
  Synthetic oligonucleotide
ccgagttatcaagtttcccgacttattcgtaaggtcaaacaaggctgatgcactct

SEQ ID NO: 18294 - DNA, 58 bp, Artificial
  Synthetic oligonucleotide
taggacgaactcagttacgggtagggtcattgatgtagacctggttgggatgaacatc

SEQ ID NO: 18295 - DNA, 59 bp, Artificial
  Synthetic oligonucleotide
tgggattttggtgtagtcaagccgaacagaggagcgaatctcaaagcgcaggactttaa

SEQ ID NO: 18296 - DNA, 59 bp, Artificial
  Synthetic oligonucleotide
cgagataagacctgcaataggagaactaaggtgtgagactacggcattgaaactaggga

SEQ ID NO: 18297 - DNA, 55 bp, Artificial
  Synthetic oligonucleotide
gcatgttaccctttgggcctggtcctaacatagggtccccccaaaagatgctaga

SEQ ID NO: 18298 - DNA, 59 bp, Artificial
  Synthetic oligonucleotide
caatcaattgaccaatcctgcattagaatcaattagtattcaggctcttaaaagtcttt

SEQ ID NO: 18299 - DNA, 56 bp, Artificial
  Synthetic oligonucleotide
cgaactgtggtcctgtgaaggacagaaccgtctcgggtcccgctccaggccacctc

SEQ ID NO: 18300 - DNA, 57 bp, Artificial
  Synthetic oligonucleotide
gctacaagggggttagctgctcgattggcagtaatcgggttggaataatcaaacaac

SEQ ID NO: 18301 - DNA, 58 bp, Artificial
  Synthetic oligonucleotide
aaacaactacctaaaggctgctcatacataactaaccaggacgcagacactgtaacaa

SEQ ID NO: 18302 - DNA, 58 bp, Artificial
  Synthetic oligonucleotide
ctggtccggatctctaatgatgacccgtctagctgtgaaacccaagagtaatggtggg

SEQ ID NO: 18303 - DNA, 58 bp, Artificial
  Synthetic oligonucleotide
ccagaccccgtttcagaaatagattgcagccgtctttctaatcaggagtccaaatcaa

SEQ ID NO: 18304 - DNA, 52 bp, Artificial
  Synthetic oligonucleotide
acttaaggttgaacgaatgaacctacagtttgggcttgggggagtcggtggc

SEQ ID NO: 18305 - DNA, 55 bp, Artificial
  Synthetic oligonucleotide
atcccagtaagttactctagtgttagtggtgatgactaaagaaaaacgtaggatc

SEQ ID NO: 18306 - DNA, 59 bp, Artificial
  Synthetic oligonucleotide
ggacaatagccactatcccgttcctatacttgtctgcgtatgaaacaggcctaaggata

SEQ ID NO: 18307 - DNA, 59 bp, Artificial
  Synthetic oligonucleotide
aatctatattccgtggttcagcaacccagactcaacagaggtatacgtcataggaatag

SEQ ID NO: 18308 - DNA, 59 bp, Artificial
  Synthetic oligonucleotide
agatgaccaattgagaatgggaaagtgccgcttagaggcctgtcgagacaaaccgccac

SEQ ID NO: 18309 - DNA, 57 bp, Artificial
  Synthetic oligonucleotide
tccaactaacagacccatgaccccgcatgcttctcttcccgaaagaccaacagggta

SEQ ID NO: 18310 - DNA, 58 bp, Artificial
  Synthetic oligonucleotide
gttggccaaaggctagtcacttacttaacctactcacatctcccgcacaatcaggtcc

SEQ ID NO: 18311 - DNA, 59 bp, Artificial
  Synthetic oligonucleotide
agtgtcccgtagtcgaggtggatggagtgacaatacaggtcggcagtcgagagtaccca

SEQ ID NO: 18312 - DNA, 59 bp, Artificial
  Synthetic oligonucleotide
aggcaaagggtgcacccacattcccaacaacgaagctgacacgataaccattgataaca

SEQ ID NO: 18313 - DNA, 54 bp, Artificial
  Synthetic oligonucleotide
ggaggcactgtcgcaaacgtgtccaaacaccccctaaagcaactcccggattaa

SEQ ID NO: 18314 - DNA, 59 bp, Artificial
  Synthetic oligonucleotide
gcataggttgagggatcgtaccactcaagtgaaatactcaggtacatcccttgtccgag

SEQ ID NO: 18315 - DNA, 57 bp, Artificial
  Synthetic oligonucleotide
ctaggaccagcggcaggtcagataggcacaaggaagatcccaataaagaacccgtaa

SEQ ID NO: 18316 - DNA, 56 bp, Artificial
  Synthetic oligonucleotide
ttgcttcgggctgaaatacccgtgtgtgtcacgttgtcacaagacccgaccgaccg

SEQ ID NO: 18317 - DNA, 58 bp, Artificial
  Synthetic oligonucleotide
ttgctcgcccagtgacagcccaagcccacaaagagaccaaacctaaagatgagccggg

SEQ ID NO: 18318 - DNA, 55 bp, Artificial
  Synthetic oligonucleotide
gcccgtcactgattgaacaccccagctttatcccgggtcccactacagcaaaggg

SEQ ID NO: 18319 - DNA, 57 bp, Artificial
  Synthetic oligonucleotide
tagcggggccaacgtatatacccgacccaggcctgaccggatctaagatgagagtac

SEQ ID NO: 18320 - DNA, 57 bp, Artificial
  Synthetic oligonucleotide
tcaccacaagatcacgccttctggaccgtcttgttaaaatggtaggggacccagaca

SEQ ID NO: 18321 - DNA, 58 bp, Artificial
  Synthetic oligonucleotide
gcactataactgagggatatctcagtgttctgaggacaggttggtataccaacgtttt

SEQ ID NO: 18322 - DNA, 56 bp, Artificial
  Synthetic oligonucleotide
agcctgctttctaacaactgacctcacaaaatactgcttaaattggaggtaccaag

SEQ ID NO: 18323 - DNA, 58 bp, Artificial
  Synthetic oligonucleotide
gaagatctacctgacacactaaaccatgcaacacctttcgttgattccgaagtcgagg

SEQ ID NO: 18324 - DNA, 57 bp, Artificial
  Synthetic oligonucleotide
gttcatcgaggaacccagagagaatcctatcgcaaccagttcccccatcgattttaa

SEQ ID NO: 18325 - DNA, 56 bp, Artificial
  Synthetic oligonucleotide
acatcttaataacgggtgctgtataatggagtccccacaggaggcgaatatccccc

SEQ ID NO: 18326 - DNA, 59 bp, Artificial
  Synthetic oligonucleotide
ccactttgtcacactacatggggctgaacggttagaggaggaaaccaatgatgaggatg

SEQ ID NO: 18327 - DNA, 59 bp, Artificial
  Synthetic oligonucleotide
ctgattccttacccagtgtcactgcctgtacattaccctttggtgcaggcccgaacatc

SEQ ID NO: 18328 - DNA, 58 bp, Artificial
  Synthetic oligonucleotide
actaagaatgtcagaatacaagaggtcagacaggaggtagacccagtgccaggtccgg

SEQ ID NO: 18329 - DNA, 54 bp, Artificial
  Synthetic oligonucleotide
accgggagaatttttgctaaacttactaagaagatgagatcctgtcaagtaatt

SEQ ID NO: 18330 - DNA, 58 bp, Artificial
  Synthetic oligonucleotide
agaggacctgttcaacgcatacatgcccgggaaaatcgcagggtcgttgtgggctcag

SEQ ID NO: 18331 - DNA, 57 bp, Artificial
  Synthetic oligonucleotide
cttggtcgtcactacatcctgcgaccccttgggctttactcgtctgcatggtaccgg

SEQ ID NO: 18332 - DNA, 57 bp, Artificial
  Synthetic oligonucleotide
aagatagtgacactccctgcagaaggtcccatacgaaagcgggaagtacttaacatc

SEQ ID NO: 18333 - DNA, 58 bp, Artificial
  Synthetic oligonucleotide
gaacccatacacgatagaccccacagccaaagaactgtccattatagttaaatgaaca

SEQ ID NO: 18334 - DNA, 59 bp, Artificial
  Synthetic oligonucleotide
gaaagccatattgacttacatggagttgactactatggggttagtccatgtagacaaac

SEQ ID NO: 18335 - DNA, 59 bp, Artificial
  Synthetic oligonucleotide
ccgaatcgagtcctagaattaggcagcgaggtactcggatatgggggttcagagtgtgc

SEQ ID NO: 18336 - DNA, 59 bp, Artificial
  Synthetic oligonucleotide
atgtatggccgctcaccgaccctaggagtggagtgggcgggacctcacttgttgcggca

SEQ ID NO: 18337 - DNA, 59 bp, Artificial
  Synthetic oligonucleotide
cccgctatgcaacatatgtcgtgtgaattagttgggcagagattagggttaaaactgct

SEQ ID NO: 18338 - DNA, 59 bp, Artificial
  Synthetic oligonucleotide
cgtccctgctatgcaacatatgtcgtgtgaattagttgggcagagattagggttaaaac

SEQ ID NO: 18339 - DNA, 54 bp, Artificial
  Synthetic oligonucleotide
ccttaattgaacaccctagtttcatcccgggcccaactactataggaggttgca

SEQ ID NO: 18340 - DNA, 57 bp, Artificial
  Synthetic oligonucleotide
agtgtcaatttaccgccaacacaggaacccttgaatcgagatacgctgttataggag

SEQ ID NO: 18341 - DNA, 59 bp, Artificial
  Synthetic oligonucleotide
gtatttagcacttggtgtgcttcggacatctgcaacagggagggtattcttttctactc

SEQ ID NO: 18342 - DNA, 59 bp, Artificial
  Synthetic oligonucleotide
cagtccctcccctgaaccaagcacctctactaccggtgacttcctctcacagctatcag

SEQ ID NO: 18343 - DNA, 57 bp, Artificial
  Synthetic oligonucleotide
cgcagaatgggctttcggattggactctacgatctttggggccctacaatagtggtc

SEQ ID NO: 18344 - DNA, 59 bp, Artificial
  Synthetic oligonucleotide
aagcctattgtctggttcgacaacgatctctggatgtgttaggctcccctcactttcaa

SEQ ID NO: 18345 - DNA, 59 bp, Artificial
  Synthetic oligonucleotide
actcgagcctttatcacttgctcttatacagttaagtgatcctgttatacctctacgtg

SEQ ID NO: 18346 - DNA, 59 bp, Artificial
  Synthetic oligonucleotide
tggatcgtggtgttctttatcgaattatgaatcaagaaccaggtgaatcttcgtttcta

SEQ ID NO: 18347 - DNA, 53 bp, Artificial
  Synthetic oligonucleotide
caacccggaatccttcacagcggaactataaaccagaaccacgggtattcacg

SEQ ID NO: 18348 - DNA, 56 bp, Artificial
  Synthetic oligonucleotide
ctcctcgtggtgtaacccaacttgcgccccaatcagaccctatcctacagtcgaac

SEQ ID NO: 18349 - DNA, 57 bp, Artificial
  Synthetic oligonucleotide
gacgtcgacgaatattctattttgcgcagaaaatccgacaactccccccatctccga

SEQ ID NO: 18350 - DNA, 57 bp, Artificial
  Synthetic oligonucleotide
ctcccacattttcttcgaagtttcatagtttacccaagatacagcaattttgtgtca

SEQ ID NO: 18351 - DNA, 57 bp, Artificial
  Synthetic oligonucleotide
ccatataccaacccatttgtgtacgaccctaatcctttagcagactacgaaatagca

SEQ ID NO: 18352 - DNA, 59 bp, Artificial
  Synthetic oligonucleotide
ctcaatcttatggcccaggatctccctgacacttactctaatgataccccgttcctcaa

SEQ ID NO: 18353 - DNA, 53 bp, Artificial
  Synthetic oligonucleotide
ctacaatagttcctggaccaccaatacaccatgtactacggcccttaggggtt

SEQ ID NO: 18354 - DNA, 58 bp, Artificial
  Synthetic oligonucleotide
atggagcacgagggttaccagcattacctagaagatgtaagacggctaatacctatag

SEQ ID NO: 18355 - DNA, 52 bp, Artificial
  Synthetic oligonucleotide
ccaagttttctccgggttcgtacccgttgctctggagctacgccatgggggt

SEQ ID NO: 18356 - DNA, 57 bp, Artificial
  Synthetic oligonucleotide
gcgctaatcagaaaaaacttagggtgaatgcatacgccctacctatcatcctaacct

SEQ ID NO: 18357 - DNA, 56 bp, Artificial
  Synthetic oligonucleotide
agtcaatatcgggatacatgaacggacgttctggggggatagacgaggtgtcaggg

SEQ ID NO: 18358 - DNA, 59 bp, Artificial
  Synthetic oligonucleotide
attaatggtcctaagctcattaagcaggttactggacatgacgtgggttcaggttctca

SEQ ID NO: 18359 - DNA, 55 bp, Artificial
  Synthetic oligonucleotide
taacatccttactctccccatcaggtcggggggaggtgactgttacactcccact

SEQ ID NO: 18360 - DNA, 59 bp, Artificial
  Synthetic oligonucleotide
taagctagcccggggaagacccatatatggcttagaggtgccggacgtgcttgagtcaa

SEQ ID NO: 18361 - DNA, 59 bp, Artificial
  Synthetic oligonucleotide
agttcagggttgcaaggcccttacaaaccattcgatcacccatcatgaggagtgtccaa

SEQ ID NO: 18362 - DNA, 59 bp, Artificial
  Synthetic oligonucleotide
gccgctactcgagttccctttagtacaagatattggtgctcgagtgaaggatccattta

SEQ ID NO: 18363 - DNA, 57 bp, Artificial
  Synthetic oligonucleotide
ttccacataaccaactttgataggtcagatttggaaactatcctaagaggtgctagg

SEQ ID NO: 18364 - DNA, 56 bp, Artificial
  Synthetic oligonucleotide
aaaacttcatgttaaacaagatacttaagtcaatggacaaaagcatagacactttg

SEQ ID NO: 18365 - DNA, 54 bp, Artificial
  Synthetic oligonucleotide
taacttagacaaagggcggaagatagttaccctagcaaaggctactacccgcca

SEQ ID NO: 18366 - DNA, 58 bp, Artificial
  Synthetic oligonucleotide
cctgtagatagttgcttcctgaatccaccctgggtagcagtgcccgaacttaatgtcc

SEQ ID NO: 18367 - DNA, 59 bp, Artificial
  Synthetic oligonucleotide
ggttcggaatcctgataggggtctacgggagctccgtaatttacatggtgcagctgcca

SEQ ID NO: 18368 - DNA, 57 bp, Artificial
  Synthetic oligonucleotide
gtttgccccaggtaattactcgttactctggagctttgcaatgggcgttggaactgc

SEQ ID NO: 18369 - DNA, 57 bp, Artificial
  Synthetic oligonucleotide
gtatggtctcaaagtttgtcaactcagccaaagcagtcggaaagaaaacacacgatt

SEQ ID NO: 18370 - DNA, 55 bp, Artificial
  Synthetic oligonucleotide
gggctttacaggtttcacatgggagggattgaggggtggtgccaaaagttgtgga

SEQ ID NO: 18371 - DNA, 56 bp, Artificial
  Synthetic oligonucleotide
ataccccgcagaggttccgtgttgtttatatgagcatcacccgtctttcggataac

SEQ ID NO: 18372 - DNA, 57 bp, Artificial
  Synthetic oligonucleotide
gtaatatccctacctctagtgtggggtttatccattcagatatagagaccttaccta

SEQ ID NO: 18373 - DNA, 57 bp, Artificial
  Synthetic oligonucleotide
agagtgtggaatcgtggatatgtggggtcccacacttgttgtaaaggcacacggaaa

SEQ ID NO: 18374 - DNA, 58 bp, Artificial
  Synthetic oligonucleotide
acttaggcctgtcgggttgtcatcaacttcatggtataaaggattgagtgtaatcaag

SEQ ID NO: 18375 - DNA, 58 bp, Artificial
  Synthetic oligonucleotide
aatacgggccaatcatgaaagcacacgcagtcttttgtggtacaattataaatgggta

SEQ ID NO: 18376 - DNA, 59 bp, Artificial
  Synthetic oligonucleotide
cagtacctcgaggcaatagtcagggcagagattccgaattttccaataacacagagaaa

SEQ ID NO: 18377 - DNA, 58 bp, Artificial
  Synthetic oligonucleotide
ccggtgacgtgtctcctgtcacgtgacttccggtgacgcacttcctttgatgacgtat

SEQ ID NO: 18378 - DNA, 55 bp, Artificial
  Synthetic oligonucleotide
cgtgaattacgtcatagggttagggaggtcctgtattagaggtcacgtgagtgtt

SEQ ID NO: 18379 - DNA, 49 bp, Artificial
  Synthetic oligonucleotide
gaaaattacgtatttccggttccgggacacgtccgcttaaaagcggaag

SEQ ID NO: 18380 - DNA, 57 bp, Artificial
  Synthetic oligonucleotide
cactacgtacaacaacgacctaacagctggtgtccacattttttgtgacggcgaaca

SEQ ID NO: 18381 - DNA, 56 bp, Artificial
  Synthetic oligonucleotide
ggtcacggacgagcaggaagtagcacctacaaacggcgtagggtggaaaccatatg

SEQ ID NO: 18382 - DNA, 54 bp, Artificial
  Synthetic oligonucleotide
aaagaaaacactcctcctgctaaaagagtggccggaaacagtagacaagatagg

SEQ ID NO: 18383 - DNA, 56 bp, Artificial
  Synthetic oligonucleotide
taatgaccgggcatactgcccactacaagcggactttaatccactggttaaaacca

SEQ ID NO: 18384 - DNA, 56 bp, Artificial
  Synthetic oligonucleotide
tcgggtggaccaactgtatcatcttggtggggtttcccgacacgcgaaagcgcatt

SEQ ID NO: 18385 - DNA, 55 bp, Artificial
  Synthetic oligonucleotide
agaccaactcctctacagaggaaaccaaacaacatacaacctaaatgcagacgtt

SEQ ID NO: 18386 - DNA, 52 bp, Artificial
  Synthetic oligonucleotide
aggacgattctagaggtctcgtgttcccgggttacaagtatctaggcccttt

SEQ ID NO: 18387 - DNA, 55 bp, Artificial
  Synthetic oligonucleotide
gtgtcccctggaaatcgcacaggtgtcaacaaccaaggggcgcttcccgggatgg

SEQ ID NO: 18388 - DNA, 58 bp, Artificial
  Synthetic oligonucleotide
actacgaggtcatcgttcaactgccgaacgacgtcgagagtcaggtacctggaatctc

SEQ ID NO: 18389 - DNA, 54 bp, Artificial
  Synthetic oligonucleotide
ggcgcgaacaaggtccgggccgagtcgtatattcccgcctacctgattccgaaa

SEQ ID NO: 18390 - DNA, 55 bp, Artificial
  Synthetic oligonucleotide
tggacaacggagtcgttacccgaaccactcgaacctgggtcctgcccagctacaa

SEQ ID NO: 18391 - DNA, 56 bp, Artificial
  Synthetic oligonucleotide
atgcaaaacacgctggcctttagtcggacggtctacgaccagacaaccagtacgac

SEQ ID NO: 18392 - DNA, 54 bp, Artificial
  Synthetic oligonucleotide
aaatacttactaaccgtgacaacctagcgggtaagactgacatacattttacca

SEQ ID NO: 18393 - DNA, 59 bp, Artificial
  Synthetic oligonucleotide
gtttactctgagcctcgccctattggcactcgttacctcacccgtaatctgtaattgca

SEQ ID NO: 18394 - DNA, 56 bp, Artificial
  Synthetic oligonucleotide
aaaatcatgagtctgacaaaaagcgcggtggactacctcgtggggagctccgttcc

SEQ ID NO: 18395 - DNA, 58 bp, Artificial
  Synthetic oligonucleotide
cactaccatttagttgtcaaccaagcagatatggttggccgcgaatttagtaactggc

SEQ ID NO: 18396 - DNA, 58 bp, Artificial
  Synthetic oligonucleotide
aggggcgtatacagttcctcagtctaacttaaatcagtatgcaatctttcacttacac

SEQ ID NO: 18397 - DNA, 59 bp, Artificial
  Synthetic oligonucleotide
gttagcatacaattacccggtactaactatgttgggcctggcaatgagctacaagctgg

SEQ ID NO: 18398 - DNA, 51 bp, Artificial
  Synthetic oligonucleotide
tttgtacggttctcgtttaggggtacctgacacattaggaggggaccctaa

SEQ ID NO: 18399 - DNA, 49 bp, Artificial
  Synthetic oligonucleotide
ccgtcggggtcttgtgcttccgggttacaaatacctcggacccggtaac

SEQ ID NO: 18400 - DNA, 55 bp, Artificial
  Synthetic oligonucleotide
caacggaagtcaagcggtgggacgctcatccttttactgcctggagtacttccct

SEQ ID NO: 18401 - DNA, 59 bp, Artificial
  Synthetic oligonucleotide
tcagggggccttacctggcatggtgtggcaagatcgtgacgtgtaccttcaaggaccta

SEQ ID NO: 18402 - DNA, 52 bp, Artificial
  Synthetic oligonucleotide
accggggctgcctccgaaaaaaagggactatcgccgtcggagtggggagaga

SEQ ID NO: 18403 - DNA, 58 bp, Artificial
  Synthetic oligonucleotide
agaacgatctaaccgcgggggtgcacatcttctgcgacgggagccatcagtacccgta

SEQ ID NO: 18404 - DNA, 58 bp, Artificial
  Synthetic oligonucleotide
tgacgggacaagtcacctacacagtcgaatgggaagtgcaacggtaccagaccaagaa

SEQ ID NO: 18405 - DNA, 55 bp, Artificial
  Synthetic oligonucleotide
gagattcgaactcattgggggacgatggccaaagaaccggactttcactatttta

SEQ ID NO: 18406 - DNA, 54 bp, Artificial
  Synthetic oligonucleotide
gggcgactaaaaccaacatggcggctcaatataggaactggttacctgggcctt

SEQ ID NO: 18407 - DNA, 59 bp, Artificial
  Synthetic oligonucleotide
gcaaggcaacggaactaacgggtaacatgcattattcctctgatcgcgttgctattacc

SEQ ID NO: 18408 - DNA, 58 bp, Artificial
  Synthetic oligonucleotide
ccaaaaccatacaacaggaagtgtttcgcaggatgaccaagatggagtacaagataac

SEQ ID NO: 18409 - DNA, 55 bp, Artificial
  Synthetic oligonucleotide
gtgggcagacggagcgggtaaacgattagttctatggaacgaaccaaactatgaa

SEQ ID NO: 18410 - DNA, 57 bp, Artificial
  Synthetic oligonucleotide
ataccgacatgaggcttgtacgaataattaagtacagtggtgccgacagtaaacgaa

SEQ ID NO: 18411 - DNA, 57 bp, Artificial
  Synthetic oligonucleotide
aaccatggctaactatacacatcattggggaaaagtaccagaatgggatgaaaactg

SEQ ID NO: 18412 - DNA, 58 bp, Artificial
  Synthetic oligonucleotide
tggcctcgtatactgtctataaggtgaactaaccttaccataagtatcaatctgtctt

SEQ ID NO: 18413 - DNA, 58 bp, Artificial
  Synthetic oligonucleotide
acattcacctgacacgtacactacctggtgactttggtttggtggataagcacgaatg

SEQ ID NO: 18414 - DNA, 56 bp, Artificial
  Synthetic oligonucleotide
aagtgtgtgctcgggggaactcacgtcagggtggacgtgaaacacaaagattctag

SEQ ID NO: 18415 - DNA, 58 bp, Artificial
  Synthetic oligonucleotide
ggtgaccatggtaactaacggagcagacgtctccggggtgagagccgtgcgagtagga

SEQ ID NO: 18416 - DNA, 55 bp, Artificial
  Synthetic oligonucleotide
gacaaacgtaggaggaactcagggctacatgttaggacccgaacagttggacgat

SEQ ID NO: 18417 - DNA, 57 bp, Artificial
  Synthetic oligonucleotide
atgtggctcagagagtttataaggtagaagctgagtgtaaactggtaggggacaagt

SEQ ID NO: 18418 - DNA, 59 bp, Artificial
  Synthetic oligonucleotide
gcaacccaccagggtagatcaaaaaatgcgtggaagtgtagctgtgcctggagtacctg

SEQ ID NO: 18419 - DNA, 57 bp, Artificial
  Synthetic oligonucleotide
gagtacctgtggttataaccagcaatggtgacattacttttgttgtaagcgggaaca

SEQ ID NO: 18420 - DNA, 56 bp, Artificial
  Synthetic oligonucleotide
gtgggccaattggaggtattaaatcaatgggaattactaccttagttcagtatgcg

SEQ ID NO: 18421 - DNA, 55 bp, Artificial
  Synthetic oligonucleotide
gggagcttggtataatggatggaagtttcgagaatttactccagatttggtacgg

SEQ ID NO: 18422 - DNA, 56 bp, Artificial
  Synthetic oligonucleotide
aggtgatgagtttacaactggcacctacatctttaacactgacccacttaaactta

SEQ ID NO: 18423 - DNA, 57 bp, Artificial
  Synthetic oligonucleotide
actaccacgcaaccctagataacgaagtcattccagggcctcaaacaatggcctatg

SEQ ID NO: 18424 - DNA, 54 bp, Artificial
  Synthetic oligonucleotide
ccgaggacacctccgaccccggacaacgagatgtttccacacttggctaaacga

SEQ ID NO: 18425 - DNA, 58 bp, Artificial
  Synthetic oligonucleotide
agagaacaacatacctattaacattctcagaacgggagataactttcatacaggcttg

SEQ ID NO: 18426 - DNA, 59 bp, Artificial
  Synthetic oligonucleotide
catacctattaacattctcagaacgggagataactttcatacaggcttgtatgagttta

SEQ ID NO: 18427 - DNA, 55 bp, Artificial
  Synthetic oligonucleotide
caggcttgtatgagtttaacagtaaaccatgtaaactaaccttaagctatcaaag

SEQ ID NO: 18428 - DNA, 59 bp, Artificial
  Synthetic oligonucleotide
cttggggcctaatctgactgaccaatttgacccaaacagcacaactgtttctcgcattg

SEQ ID NO: 18429 - DNA, 53 bp, Artificial
  Synthetic oligonucleotide
atgagtttaacagtaaaccatgtaaactaaccttaagctatcaaagtacacgt

SEQ ID NO: 18430 - DNA, 56 bp, Artificial
  Synthetic oligonucleotide
atatacgatccatggagacactagaaactggtacggcggagaaataccaacaaccg

SEQ ID NO: 18431 - DNA, 55 bp, Artificial
  Synthetic oligonucleotide
cacaatggcctacgtgacttggtatacgtgacctaaaacaacaaagtggcgtacg

SEQ ID NO: 18432 - DNA, 57 bp, Artificial
  Synthetic oligonucleotide
atgacacgtggaacgtaggtggccgaggggatgatgctaaaagaggtaatttcgcta

SEQ ID NO: 18433 - DNA, 57 bp, Artificial
  Synthetic oligonucleotide
cgtacctactccggttacttggtctggatgtgtacctggcatgatctgggataaccg

SEQ ID NO: 18434 - DNA, 57 bp, Artificial
  Synthetic oligonucleotide
ggatttccaacacgcgaaagcgcattttactgtctagacgaaagcccctcgcaaatg

SEQ ID NO: 18435 - DNA, 59 bp, Artificial
  Synthetic oligonucleotide
acggatactccaagatacagttactattagtaacgatctgttagatctgtatcttggag

SEQ ID NO: 18436 - DNA, 55 bp, Artificial
  Synthetic oligonucleotide
gtcacatattaagttaacggtttctgcgaagcgcttcgcaggaaaccgttacaac

SEQ ID NO: 18437 - DNA, 58 bp, Artificial
  Synthetic oligonucleotide
acaacctatgacgtcataggtcctatataagagatgacggactcaccggtctcccagt

SEQ ID NO: 18438 - DNA, 52 bp, Artificial
  Synthetic oligonucleotide
ctttttggcgcagccggactcttaggtaaacggacatttgaacgtacctttg

SEQ ID NO: 18439 - DNA, 58 bp, Artificial
  Synthetic oligonucleotide
gtttatacgtaaccaaagctacaactcctcctggtagtgttgctcgagcatctgtacc

SEQ ID NO: 18440 - DNA, 57 bp, Artificial
  Synthetic oligonucleotide
cacatggtccacccctatataaggagtacaaaaggagaggcgaatcgagtaatgaat

SEQ ID NO: 18441 - DNA, 57 bp, Artificial
  Synthetic oligonucleotide
ctttacgctttttcaaacactacctgctgccaaaaaatcgattgatctctccttcca

SEQ ID NO: 18442 - DNA, 56 bp, Artificial
  Synthetic oligonucleotide
ccgggatccccgtgtgagccgataggctaggatggcgaagcttaggtttaatgacg

SEQ ID NO: 18443 - DNA, 58 bp, Artificial
  Synthetic oligonucleotide
ctttaaactgaccaactgtctttgcgtatggtgacgtgtgacgcgcgtccttcggcag

SEQ ID NO: 18444 - DNA, 55 bp, Artificial
  Synthetic oligonucleotide
aactctaccaggtacaatacttggtccaggaaactcactagaccaaggagaacca

SEQ ID NO: 18445 - DNA, 58 bp, Artificial
  Synthetic oligonucleotide
acccctggaaaccaaccatagcatcaccatacaggtactatttttgcgttgacagaga

SEQ ID NO: 18446 - DNA, 59 bp, Artificial
  Synthetic oligonucleotide
ctaccatggcaagctactgtgctaaatggggcaaagtacctgattggtcagaaaactgg

SEQ ID NO: 18447 - DNA, 53 bp, Artificial
  Synthetic oligonucleotide
cccgaacgaaaagataataatcggggctttgtacttcctggctataagtatct

SEQ ID NO: 18448 - DNA, 57 bp, Artificial
  Synthetic oligonucleotide
tccctacgaatgaacaaaccaaacttactgagcccgttcctgaacgagcgaatgagc

SEQ ID NO: 18449 - DNA, 56 bp, Artificial
  Synthetic oligonucleotide
gggcgggaaacacgtggagtcgttagtatgtctacgtccggcttagagtcagtgcc

SEQ ID NO: 18450 - DNA, 59 bp, Artificial
  Synthetic oligonucleotide
ataattcagtgccttgggaattacgtcgtttaccatttgcagagagagatagacttata

SEQ ID NO: 18451 - DNA, 56 bp, Artificial
  Synthetic oligonucleotide
gcgggaagcaatttgattggacgggaacttaagtcctaatttgcattgacgtggac

SEQ ID NO: 18452 - DNA, 55 bp, Artificial
  Synthetic oligonucleotide
gtcggcagacccctatatattggtaaacctcgggggtgtgacaagagtcctctcc

SEQ ID NO: 18453 - DNA, 58 bp, Artificial
  Synthetic oligonucleotide
tactgctaagacattagaggacggtgagaacgaaaacataaggttgagcagttctagg

SEQ ID NO: 18454 - DNA, 51 bp, Artificial
  Synthetic oligonucleotide
ccccctacctaccccctgagagtcgctccttttgaagggtaaaccacgcac

SEQ ID NO: 18455 - DNA, 57 bp, Artificial
  Synthetic oligonucleotide
acactagaatatccttacgcccggggccagtgtctcagccgtaccaccactgggaca

SEQ ID NO: 18456 - DNA, 56 bp, Artificial
  Synthetic oligonucleotide
acagagacatttactaccaagggcccatttgggccaaaattccacacacggatgga

SEQ ID NO: 18457 - DNA, 53 bp, Artificial
  Synthetic oligonucleotide
cagacagaaaaccccaacgaaaagacaataataggggctttgtacttcctggc

SEQ ID NO: 18458 - DNA, 58 bp, Artificial
  Synthetic oligonucleotide
ccaagagatggaacccagaggtccagttcacgtccaactacggagcacaggactcgct

SEQ ID NO: 18459 - DNA, 55 bp, Artificial
  Synthetic oligonucleotide
aactcgttggaagaattgtacgaaacagtggacgagccgaaattggtacattcaa

SEQ ID NO: 18460 - DNA, 54 bp, Artificial
  Synthetic oligonucleotide
aaactcctatcgaacgagaaagaagcctcgaccaattctttcgagcggtggaac

SEQ ID NO: 18461 - DNA, 58 bp, Artificial
  Synthetic oligonucleotide
gagttcaagacatataaatactactcggaaaagaaagtctatcacaacatcgaagggc

SEQ ID NO: 18462 - DNA, 58 bp, Artificial
  Synthetic oligonucleotide
agactcactggacttcaatctactagggaatgggttgctagaacggatagaattccgc

SEQ ID NO: 18463 - DNA, 58 bp, Artificial
  Synthetic oligonucleotide
cgttgtggtcacgtcgtctcctgaacacggtcgcagagtgctggacttccttaataag

SEQ ID NO: 18464 - DNA, 55 bp, Artificial
  Synthetic oligonucleotide
ggaacctactactttgacacaaacccagttaaacttacacacacatggcaaacta

SEQ ID NO: 18465 - DNA, 56 bp, Artificial
  Synthetic oligonucleotide
gcatgcgtggtttaaatctctagaggagcaaccctcagggggtaggtagggggatc

SEQ ID NO: 18466 - DNA, 56 bp, Artificial
  Synthetic oligonucleotide
caccgccagattcagcaatacggacaccaagtccaacttggtcggaaatagaaacc

SEQ ID NO: 18467 - DNA, 59 bp, Artificial
  Synthetic oligonucleotide
gatacgaataaccatccatggcagtcaataccttcgcaggaaaccgttacaacctatga

SEQ ID NO: 18468 - DNA, 55 bp, Artificial
  Synthetic oligonucleotide
gggtataattatgttggtcctggtaatcctctggatagtggtccccctcagggac

SEQ ID NO: 18469 - DNA, 58 bp, Artificial
  Synthetic oligonucleotide
cgcagttgaaaaggaaacgtctcgtcacaatgtcgttaccgaaactgagacacgcaga

SEQ ID NO: 18470 - DNA, 56 bp, Artificial
  Synthetic oligonucleotide
ggatcaggttcccttcgatacaaaggctattagcgcggccaaatcggagtggaaag

SEQ ID NO: 18471 - DNA, 58 bp, Artificial
  Synthetic oligonucleotide
cagctatgttcggaaaatccttgccatttccaagttatatacgcctgtgaacaagtat

SEQ ID NO: 18472 - DNA, 56 bp, Artificial
  Synthetic oligonucleotide
ctaacatagtggtcccgcccgaaaccccatctgactgtgtggtattatgtttcgtg

SEQ ID NO: 18473 - DNA, 57 bp, Artificial
  Synthetic oligonucleotide
gtgaatctcacactcttgttaaacacctgtttgggaggcaatggttagttaggactg

SEQ ID NO: 18474 - DNA, 53 bp, Artificial
  Synthetic oligonucleotide
attgtgagtcctccggcccccgaatgcggctaacctaaaccccggagccttga

SEQ ID NO: 18475 - DNA, 59 bp, Artificial
  Synthetic oligonucleotide
cgattgtgtcagtataagaacaaggcaaacgtgaactttgaagccacggcggtcactga

SEQ ID NO: 18476 - DNA, 55 bp, Artificial
  Synthetic oligonucleotide
aacacagggtccatactcaggcaatccctcacatgttaaactaaaaccacctacc

SEQ ID NO: 18477 - DNA, 55 bp, Artificial
  Synthetic oligonucleotide
cttggagtgccgaatgattcccacatcctcactttagtttcgggtggggacgatt

SEQ ID NO: 18478 - DNA, 59 bp, Artificial
  Synthetic oligonucleotide
aactggactgtttcaacactgactgtaggcttctccacaagagaggtgtgcggttcgtc

SEQ ID NO: 18479 - DNA, 57 bp, Artificial
  Synthetic oligonucleotide
cacactggtatcacggtacctttgtgcgcctgttttatcctccctccccaagtgcaa

SEQ ID NO: 18480 - DNA, 57 bp, Artificial
  Synthetic oligonucleotide
tgcaggtttccaaggcgcctacacagggatgcccaacaagaaacctaaggtgcccac

SEQ ID NO: 18481 - DNA, 58 bp, Artificial
  Synthetic oligonucleotide
ccggtgtctactattgtgcatcaagaaataagcactacccagtcacttttgaaggacc

SEQ ID NO: 18482 - DNA, 58 bp, Artificial
  Synthetic oligonucleotide
cattggatttgactactagtgcaggatacccctatgttgccctcggtataaagaagag

SEQ ID NO: 18483 - DNA, 54 bp, Artificial
  Synthetic oligonucleotide
tttaaacagcggatgggttccccaccatccgacccactgggtgtagtactctgg

SEQ ID NO: 18484 - DNA, 55 bp, Artificial
  Synthetic oligonucleotide
gtacggtgttgccccagctaatggatttggaaatattgtggtaaagagtaacact

SEQ ID NO: 18485 - DNA, 59 bp, Artificial
  Synthetic oligonucleotide
actcagcaacaaagctcggtagggtgaacattgcttcatacttccgttctttcacctca

SEQ ID NO: 18486 - DNA, 53 bp, Artificial
  Synthetic oligonucleotide
gagttgtactctgttatttcggtaaccttgtacgccagttttatctcccctcc

SEQ ID NO: 18487 - DNA, 57 bp, Artificial
  Synthetic oligonucleotide
actgctacgagcaagtacttctgttaccccggtgaagttgcatagactgtacccacg

SEQ ID NO: 18488 - DNA, 55 bp, Artificial
  Synthetic oligonucleotide
acccacggttgaaagtgactgatccgttatccgctttagtacttcgagaagccta

SEQ ID NO: 18489 - DNA, 59 bp, Artificial
  Synthetic oligonucleotide
cctggaatccagtgggttgaagagaatgagtactacccagcacgctatcaaaccaacac

SEQ ID NO: 18490 - DNA, 54 bp, Artificial
  Synthetic oligonucleotide
ggccaccacgactgtgcccctacatcaatgcgggggacgtaaactttaaaccaa

SEQ ID NO: 18491 - DNA, 56 bp, Artificial
  Synthetic oligonucleotide
gaaactggaaccaagcgtcttccaccatgtgtttgaaggcaacaaggaacccgcag

SEQ ID NO: 18492 - DNA, 52 bp, Artificial
  Synthetic oligonucleotide
ggctcaaccctactacacccaccgaacttgacaacggtgtggtaggggtaaa

SEQ ID NO: 18493 - DNA, 58 bp, Artificial
  Synthetic oligonucleotide
tggcgtggtgctcttgtatcccggtacacttgcacgccagtttgcctctccttacccc

SEQ ID NO: 18494 - DNA, 59 bp, Artificial
  Synthetic oligonucleotide
agtgtcaatgatacagtgtactttagaacaacttttggcaatctatacagtacttttca

SEQ ID NO: 18495 - DNA, 59 bp, Artificial
  Synthetic oligonucleotide
caaaatgcctacgcaaagcctagtatcaccctagaaggtgtgtggttggtcgctcagcc

SEQ ID NO: 18496 - DNA, 59 bp, Artificial
  Synthetic oligonucleotide
cgctcagccgtgaacccgacggtagacctggcagatgaggctagaaataccccactggc

SEQ ID NO: 18497 - DNA, 56 bp, Artificial
  Synthetic oligonucleotide
ctcagccagtatggtctcaccacagtctgcttggggttattcccaaaccccttaat

SEQ ID NO: 18498 - DNA, 56 bp, Artificial
  Synthetic oligonucleotide
ttaaaactgggagtgggtgttcccactcactccacccacgtggtgctgtacactgt

SEQ ID NO: 18499 - DNA, 55 bp, Artificial
  Synthetic oligonucleotide
tatggtctcaccacagtctgcttggggttattcccaaaccccttaattcaacgcc

SEQ ID NO: 18500 - DNA, 59 bp, Artificial
  Synthetic oligonucleotide
tcgcgtagactcagataaagctggaaattcggccgtaaacacccaatcatcagtaggcc

SEQ ID NO: 18501 - DNA, 58 bp, Artificial
  Synthetic oligonucleotide
agactcagataaagctggaaattcggccgtaaacactcaatcgtcagtaggccgacta

SEQ ID NO: 18502 - DNA, 54 bp, Artificial
  Synthetic oligonucleotide
cacagtctgcttggggttattcccaaaccccttaattcaacgcctagtcctagc

SEQ ID NO: 18503 - DNA, 58 bp, Artificial
  Synthetic oligonucleotide
ctttgagtcctccggcccctgaatgtggctaaccttaaccctgcagctagagcacgta

SEQ ID NO: 18504 - DNA, 59 bp, Artificial
  Synthetic oligonucleotide
tgatgtcaacaggtaaagtgctcgggatacacgttggtggcaatggacaccaagggttc

SEQ ID NO: 18505 - DNA, 54 bp, Artificial
  Synthetic oligonucleotide
cctcggagcggagtatagatggtccccaccgtcaaaagctcttaaccgttatcc

SEQ ID NO: 18506 - DNA, 56 bp, Artificial
  Synthetic oligonucleotide
accccagtgtcttcttcaaggtaggagatacagctaggtttagtgttccattcgtg

SEQ ID NO: 18507 - DNA, 58 bp, Artificial
  Synthetic oligonucleotide
agtgtggatacagcgatagagtgaggtctataaccctcggaaactccaccattacaac

SEQ ID NO: 18508 - DNA, 58 bp, Artificial
  Synthetic oligonucleotide
caagattagtattgcaccagagacccccccccctccagcgattgctgacctgttgaaa

SEQ ID NO: 18509 - DNA, 57 bp, Artificial
  Synthetic oligonucleotide
cccgtgtgctcaccttgagtcctccggcccctgaatgtggctaaccttaaccctgca

SEQ ID NO: 18510 - DNA, 59 bp, Artificial
  Synthetic oligonucleotide
tgtgtgctgagttctcaggggctagagcaaaaaaccagggcttaccagttatgttaaca

SEQ ID NO: 18511 - DNA, 57 bp, Artificial
  Synthetic oligonucleotide
cagtactataatttcacagaatagtgtagggtctaacacttatgttaactgtcctaa

SEQ ID NO: 18512 - DNA, 58 bp, Artificial
  Synthetic oligonucleotide
ccttatgtggactgtggccccataactgatgttaccgtccactgtccttgggccattg

SEQ ID NO: 18513 - DNA, 51 bp, Artificial
  Synthetic oligonucleotide
ggcttaaccctaccgcactaaccgaactagataacggtgcggtaggggtaa

SEQ ID NO: 18514 - DNA, 52 bp, Artificial
  Synthetic oligonucleotide
actcaccgaacttgataacggtgcggtaggggtaaattctccgcttccggtg

SEQ ID NO: 18515 - DNA, 56 bp, Artificial
  Synthetic oligonucleotide
gactcggctagttcaggattgaccaaacaagatttctcccaggacccatcaaagtt

SEQ ID NO: 18516 - DNA, 58 bp, Artificial
  Synthetic oligonucleotide
acgttacacccgtcctccgcataccaggggaagtacacaatctgatggagatagccga

SEQ ID NO: 18517 - DNA, 52 bp, Artificial
  Synthetic oligonucleotide
aatcttaacacaacaaaatgggggcgcaggtgtcaacacaaaaaaccggggc

SEQ ID NO: 18518 - DNA, 58 bp, Artificial
  Synthetic oligonucleotide
tttcccactagggcaggtcagtgtggcggtgtcctcatgtccactggtaaggtgttgg

SEQ ID NO: 18519 - DNA, 53 bp, Artificial
  Synthetic oligonucleotide
gccgttggcttgactcgttttagtaaccctacctcagtcgaattggattgggt

SEQ ID NO: 18520 - DNA, 58 bp, Artificial
  Synthetic oligonucleotide
gaagcccagtaactacattgaaactttgaggcgttacactcagcacataaccccaatg

SEQ ID NO: 18521 - DNA, 55 bp, Artificial
  Synthetic oligonucleotide
ttggacgcgggacctgcgagagtgccaacccacgtctttcccgctcctaacccga

SEQ ID NO: 18522 - DNA, 59 bp, Artificial
  Synthetic oligonucleotide
gagctgtaggagtctaaattggggacgcagatgtttgggacgtcaccttgcagtattaa

SEQ ID NO: 18523 - DNA, 58 bp, Artificial
  Synthetic oligonucleotide
gttcatgcaataaccactttttgtaatctttacatctaagcttaattcacccactaga

SEQ ID NO: 18524 - DNA, 58 bp, Artificial
  Synthetic oligonucleotide
agaatgccatcagtctataagggggagagaactgaacctggaggaactaatggctatt

SEQ ID NO: 18525 - DNA, 55 bp, Artificial
  Synthetic oligonucleotide
tggctattttcaatggtctcatacgcactcccctataaattgggtttttgacggg

SEQ ID NO: 18526 - DNA, 56 bp, Artificial
  Synthetic oligonucleotide
agtgatccgttatccgcttaggtacttcgagaagcctagtatcaccctgggatctt

SEQ ID NO: 18527 - DNA, 55 bp, Artificial
  Synthetic oligonucleotide
ctggatttcctacatggagttgtactctgttattccggtaaccttgtacgccagt

SEQ ID NO: 18528 - DNA, 54 bp, Artificial
  Synthetic oligonucleotide
ttagtggtaaccaaacagcacggatgcttaaataccattaccccaccaaatccg

SEQ ID NO: 18529 - DNA, 57 bp, Artificial
  Synthetic oligonucleotide
aacatagaagcataccactaaaggtcaataggcgatccagtactccaactgggtttg

SEQ ID NO: 18530 - DNA, 55 bp, Artificial
  Synthetic oligonucleotide
gtagtccgactccgcaccgatacgtcgcaccagtagaccggttcgcttaggaccc

SEQ ID NO: 18531 - DNA, 57 bp, Artificial
  Synthetic oligonucleotide
agcaccatacaagaagaggtacaacctggtattcagtggggattccgacaggatttg

SEQ ID NO: 18532 - DNA, 54 bp, Artificial
  Synthetic oligonucleotide
cctctttttgatttcggcgtctccctacttaagaagaacattaggacagtcaaa

SEQ ID NO: 18533 - DNA, 55 bp, Artificial
  Synthetic oligonucleotide
cccggaccgagtatcaatagactgtgcacacggttgaaggagaaaacgtccgtta

SEQ ID NO: 18534 - DNA, 59 bp, Artificial
  Synthetic oligonucleotide
gctacgaccatcgttgtccccagcaaacaagatagtagtatcagtgtgggtgaagttta

SEQ ID NO: 18535 - DNA, 59 bp, Artificial
  Synthetic oligonucleotide
tcctccggcccctgaatgcggctaatcccaaccacggagcaggtagttgcaaaccagca

SEQ ID NO: 18536 - DNA, 59 bp, Artificial
  Synthetic oligonucleotide
gcccctgaatgcggctaatcccaaccacggagcaggtaatcgcaaaccagcggtcagcc

SEQ ID NO: 18537 - DNA, 59 bp, Artificial
  Synthetic oligonucleotide
attcagacgtacgcctttgggtgacgtgtgcaggtactatacacaatggtcaggtagta

SEQ ID NO: 18538 - DNA, 58 bp, Artificial
  Synthetic oligonucleotide
ggcccactgggcgctagcacactggtattacggtacctttgtgcgcctgttttatcta

SEQ ID NO: 18539 - DNA, 59 bp, Artificial
  Synthetic oligonucleotide
gacctactgatacacaaactatgaacaccatgttgggttctgtgacccggatgtttaca

SEQ ID NO: 18540 - DNA, 59 bp, Artificial
  Synthetic oligonucleotide
taatcagatgcagaactgtaggatccttatggcctggaccccacagggttttaatacca

SEQ ID NO: 18541 - DNA, 59 bp, Artificial
  Synthetic oligonucleotide
gacttgccgttgatacgagacgtcgtaatggaaccacagggtaactccacctcatctga

SEQ ID NO: 18542 - DNA, 58 bp, Artificial
  Synthetic oligonucleotide
gctgagtccccccactataaccattccagaagcaattacacgtagattcttcctagac

SEQ ID NO: 18543 - DNA, 55 bp, Artificial
  Synthetic oligonucleotide
acaatttgacgtaacgcccccacttaacatcccgggagaggtgcgcaacctcatg

SEQ ID NO: 18544 - DNA, 57 bp, Artificial
  Synthetic oligonucleotide
gaatctacgacagatgggcggtgctaccccgtcacgccaaacctgggcccaccatcc

SEQ ID NO: 18545 - DNA, 54 bp, Artificial
  Synthetic oligonucleotide
ttcatcacgtgttcgagggaaataaagaaccggcggtgttgaggaatggggacc

SEQ ID NO: 18546 - DNA, 56 bp, Artificial
  Synthetic oligonucleotide
ccgtggagacaggggctaccaatccgttggtgccttcggacaccgtgcaaacgcgc

SEQ ID NO: 18547 - DNA, 54 bp, Artificial
  Synthetic oligonucleotide
caggtaccccgaggtaacacgcgacactcgggatctgagaaggggaccgaggct

SEQ ID NO: 18548 - DNA, 56 bp, Artificial
  Synthetic oligonucleotide
cccactgggcgctagcacactggtatcccggtacctttgtgcgcctgttttatacc

SEQ ID NO: 18549 - DNA, 58 bp, Artificial
  Synthetic oligonucleotide
gaggtggtcatccagatcactaagggtcaagcacttctgtttccccggtcaaggttga

SEQ ID NO: 18550 - DNA, 55 bp, Artificial
  Synthetic oligonucleotide
gatcttggatacccgactatacacacccctaacaagactaaactacacccaagtg

SEQ ID NO: 18551 - DNA, 59 bp, Artificial
  Synthetic oligonucleotide
tacacacagtacaccgggacaatcaacctacacttcatgttcactgggccgaccgacgc

SEQ ID NO: 18552 - DNA, 53 bp, Artificial
  Synthetic oligonucleotide
aattgaccccatctctctcaccaccccgatctctgggaccctaacccccctag

SEQ ID NO: 18553 - DNA, 52 bp, Artificial
  Synthetic oligonucleotide
agtactctggtatcacggtacctttgtacgcctattttacatcccttccccg

SEQ ID NO: 18554 - DNA, 57 bp, Artificial
  Synthetic oligonucleotide
tacggggtgctgccacccaacatgtttggaacgttagctttcaggatggtcggctcc

SEQ ID NO: 18555 - DNA, 55 bp, Artificial
  Synthetic oligonucleotide
cttacactggcctccccttcaacaaaccaaaagtgcccaccattagacaggccaa

SEQ ID NO: 18556 - DNA, 57 bp, Artificial
  Synthetic oligonucleotide
gaaccctggtgtggttactggaagtgcagtagggtgcaacccagacactttctggag

SEQ ID NO: 18557 - DNA, 56 bp, Artificial
  Synthetic oligonucleotide
actggcaatcctactccggtgttggtagacaccccatattggtcacggggatacat

SEQ ID NO: 18558 - DNA, 58 bp, Artificial
  Synthetic oligonucleotide
ggatgaagtccaacaaggaaactggccgctacaatatcaatggtccaacccagaccaa

SEQ ID NO: 18559 - DNA, 59 bp, Artificial
  Synthetic oligonucleotide
cagtaccactaccttgggagagccgggtacacgatacacgtgcagtgcaacgcgtccaa

SEQ ID NO: 18560 - DNA, 56 bp, Artificial
  Synthetic oligonucleotide
cagggtcctataactatgaactcaccacccccccctgccatagccgacttgttaca

SEQ ID NO: 18561 - DNA, 59 bp, Artificial
  Synthetic oligonucleotide
cagtggctagtaaacaagggaataacgggcacgtggtgatacaatacatgtatgtacca

SEQ ID NO: 18562 - DNA, 56 bp, Artificial
  Synthetic oligonucleotide
acactgccggcaacacggtcacaaacacccaatcaaccgttggtcgtcttgtcgga

SEQ ID NO: 18563 - DNA, 59 bp, Artificial
  Synthetic oligonucleotide
ctccaacccacttccgcatggtgggaactgatcaagctaacattactaatgtggatggt

SEQ ID NO: 18564 - DNA, 51 bp, Artificial
  Synthetic oligonucleotide
tcccgggcctttcacgtttaaaccaagacaacggccggtttttcagactca

SEQ ID NO: 18565 - DNA, 59 bp, Artificial
  Synthetic oligonucleotide
ggtgatattttgactagggttgcggatgatgcatccaacgtattagggcctaattgtta

SEQ ID NO: 18566 - DNA, 57 bp, Artificial
  Synthetic oligonucleotide
actggtactcaatcactggtgacaggctaaggatgcccttcaggtaccccgaggtaa

SEQ ID NO: 18567 - DNA, 59 bp, Artificial
  Synthetic oligonucleotide
ctcacatgctgatagggtgcggatttgcagaacccggggactgtggtgggatattaagg

SEQ ID NO: 18568 - DNA, 58 bp, Artificial
  Synthetic oligonucleotide
ttattggtgtggtctgcgagttctagcctactcgtttctcccccgaccattcactcac

SEQ ID NO: 18569 - DNA, 59 bp, Artificial
  Synthetic oligonucleotide
caaacacagtgtagcggaaacatccataaccaacttctatgcccgtgctggattagtag

SEQ ID NO: 18570 - DNA, 58 bp, Artificial
  Synthetic oligonucleotide
ctgacgaattcgcgttggaaaaacacctctcacttgccgctcttcacacccatcaatt

SEQ ID NO: 18571 - DNA, 58 bp, Artificial
  Synthetic oligonucleotide
ttaaaacagcctgtgggttgctcccacccgcagggcccactgggcgctagcacactgg

SEQ ID NO: 18572 - DNA, 55 bp, Artificial
  Synthetic oligonucleotide
aacctgcttattggtgagggaccatgtaaacctggggactgcggtggcaagttat

SEQ ID NO: 18573 - DNA, 54 bp, Artificial
  Synthetic oligonucleotide
ttaaaactgggtctgggttgtccccacctagatcacccaagtggtgtagtacac

SEQ ID NO: 18574 - DNA, 54 bp, Artificial
  Synthetic oligonucleotide
gagaacctctacctcggtagacataaacgtcccatacatcggggagacccccac

SEQ ID NO: 18575 - DNA, 56 bp, Artificial
  Synthetic oligonucleotide
agctggttacatcacctgctggtatcaaactaagttagtagcccccccaaatacac

SEQ ID NO: 18576 - DNA, 56 bp, Artificial
  Synthetic oligonucleotide
ttatcccgttatgaccccagaacggaaaaggatgtagatcaagttgccttctctaa

SEQ ID NO: 18577 - DNA, 57 bp, Artificial
  Synthetic oligonucleotide
aggtacccccgtcgttggcgtgatcaacaacgctgatgttgggagactgattttctc

SEQ ID NO: 18578 - DNA, 52 bp, Artificial
  Synthetic oligonucleotide
gtgggataccctagagtacacgtaaaacacccaccggtttggcaggacaccg

SEQ ID NO: 18579 - DNA, 54 bp, Artificial
  Synthetic oligonucleotide
accagtgtgtctatggtcgtaatgggtaactacgggatggaaccaactactttg

SEQ ID NO: 18580 - DNA, 57 bp, Artificial
  Synthetic oligonucleotide
tgtgtacccgaagcagaaatggggtgcgccaaggtggataggaccgtagtggaagaa

SEQ ID NO: 18581 - DNA, 58 bp, Artificial
  Synthetic oligonucleotide
gtgtatttctgcgcctcgaggaacaaacactatccagtcagctttgaagggccgggac

SEQ ID NO: 18582 - DNA, 56 bp, Artificial
  Synthetic oligonucleotide
accttcgtcgtcccctacatctcgcccagtgactaccgtgaaactcgagccattac

SEQ ID NO: 18583 - DNA, 59 bp, Artificial
  Synthetic oligonucleotide
gggaaacacgcttcatgaacccgatgagtttgtcaaggaggcggccttacattatgcca

SEQ ID NO: 18584 - DNA, 59 bp, Artificial
  Synthetic oligonucleotide
tcatgagcaagcactcctgtctccccggtgcggttgtataaactgttcccacggttgaa

SEQ ID NO: 18585 - DNA, 59 bp, Artificial
  Synthetic oligonucleotide
ggctcagacacgctatcactcaaggtgttccaacataccttttaccaggctcgggacaa

SEQ ID NO: 18586 - DNA, 59 bp, Artificial
  Synthetic oligonucleotide
agcttaaacgcagttgaaacaggcgcgagttctaacactgaaccagaagaagccataca

SEQ ID NO: 18587 - DNA, 55 bp, Artificial
  Synthetic oligonucleotide
agaccctcagagaaagtccgagcgggaaaaacccgcattgttgatgtgccctccc

SEQ ID NO: 18588 - DNA, 54 bp, Artificial
  Synthetic oligonucleotide
tccaatgttgtttgggtcgtaatgagcaattccgggacgggaccgactactttg

SEQ ID NO: 18589 - DNA, 57 bp, Artificial
  Synthetic oligonucleotide
ggttcatagaagtgactccccgagtagatttagccagttctattaagttagcttgtg

SEQ ID NO: 18590 - DNA, 58 bp, Artificial
  Synthetic oligonucleotide
tactcatacggacagcctttcatggtccgtaatttggttgccccagaaggattggcca

SEQ ID NO: 18591 - DNA, 51 bp, Artificial
  Synthetic oligonucleotide
ctcgtgggacctggggtcgcctttctggctccgggtggggtaccctggtgg

SEQ ID NO: 18592 - DNA, 59 bp, Artificial
  Synthetic oligonucleotide
cattacgcaagctcgcgtttacatgccccgagttattggtcgcgtgggcggcctacaga

SEQ ID NO: 18593 - DNA, 57 bp, Artificial
  Synthetic oligonucleotide
acacccctgaactccttggacaggtacgtccaggcgccgctcccacacatttgtgga

SEQ ID NO: 18594 - DNA, 53 bp, Artificial
  Synthetic oligonucleotide
ttggtctgagacaaccccaccccttactgtcttctccggacccaaggccctta

SEQ ID NO: 18595 - DNA, 55 bp, Artificial
  Synthetic oligonucleotide
cccatggctgacgttaacgacaagggacggttctacacctcccgcgttgtgatcg

SEQ ID NO: 18596 - DNA, 55 bp, Artificial
  Synthetic oligonucleotide
accagcagtgagagtgtcgtaacgcgaaagtccgaggcggaaccgactactttgg

SEQ ID NO: 18597 - DNA, 59 bp, Artificial
  Synthetic oligonucleotide
agccatcaaaccgcactactgccatgctagggacacatgttatttgggacttcgggtta

SEQ ID NO: 18598 - DNA, 59 bp, Artificial
  Synthetic oligonucleotide
ttaatgtacaacttcccaaccaaatcaggccagtgtggtggcatcctaatggccactgg

SEQ ID NO: 18599 - DNA, 59 bp, Artificial
  Synthetic oligonucleotide
cccgttcctggttcaccccgttatgcccatgaaagacatccatgagtccattagatgga

SEQ ID NO: 18600 - DNA, 54 bp, Artificial
  Synthetic oligonucleotide
cctcttaagaatgtgtccgcttttggatttcttaacctatccatgacccccacc

SEQ ID NO: 18601 - DNA, 53 bp, Artificial
  Synthetic oligonucleotide
gcggtgttgtacactgttattccggtaaccttgtacgccagttttatatccct

SEQ ID NO: 18602 - DNA, 57 bp, Artificial
  Synthetic oligonucleotide
gctaattggcgaaggtccctgtgaacctggagattgtggaggtaaactactatgtaa

SEQ ID NO: 18603 - DNA, 59 bp, Artificial
  Synthetic oligonucleotide
acgcactggtgacaggctaaggatgcccttcaggtaccccgaggcaacaagcgacactc

SEQ ID NO: 18604 - DNA, 58 bp, Artificial
  Synthetic oligonucleotide
acggcctccatccagcccgtaaaccccgtgttcaatggtcttagacatgagactgtga

SEQ ID NO: 18605 - DNA, 58 bp, Artificial
  Synthetic oligonucleotide
ccccatggagaaggacacctctcctggattgccctacactcaacaaggacttagacga

SEQ ID NO: 18606 - DNA, 55 bp, Artificial
  Synthetic oligonucleotide
agagtgcaggatgtcgtaacgcgtaagtctgggacggaaccgactactttgggtg

SEQ ID NO: 18607 - DNA, 52 bp, Artificial
  Synthetic oligonucleotide
ttgggaatctttataagacattccaccggaacccaggaacggttactggtag

SEQ ID NO: 18608 - DNA, 59 bp, Artificial
  Synthetic oligonucleotide
gtgaacaatggaacaacacctttgatggttgcccacaactaccaccttgataatctcac

SEQ ID NO: 18609 - DNA, 55 bp, Artificial
  Synthetic oligonucleotide
aatctccactttcggtgtgtgaccctaagccattagacttctttactttactatc

SEQ ID NO: 18610 - DNA, 54 bp, Artificial
  Synthetic oligonucleotide
ttgaaagggggcgctagggtttcacccctagcacgccaacgacagtccctgcgt

SEQ ID NO: 18611 - DNA, 59 bp, Artificial
  Synthetic oligonucleotide
ctaggcacctatcgagatttctctggggcccaccagcgtggagttcctgtatgggaata

SEQ ID NO: 18612 - DNA, 59 bp, Artificial
  Synthetic oligonucleotide
gttcattgcccttggacacttgtgattgttgtcctacgacagcttacagtggccgttgg

SEQ ID NO: 18613 - DNA, 59 bp, Artificial
  Synthetic oligonucleotide
aaggggtttatcatggagtgactaagcccaaacaagtgattaaattggatgcagatcca

SEQ ID NO: 18614 - DNA, 57 bp, Artificial
  Synthetic oligonucleotide
cattgactcagctttctatggcctcaggttccccgtccctttcccggcaccccagca

SEQ ID NO: 18615 - DNA, 59 bp, Artificial
  Synthetic oligonucleotide
aaacggcggagatgcaggtaacctccactccaacacatggggtactctcatcctctatg

SEQ ID NO: 18616 - DNA, 59 bp, Artificial
  Synthetic oligonucleotide
accattgtccgttgtctccgtgacctgcggtccactcagggtgcatacagtgggactcc

SEQ ID NO: 18617 - DNA, 53 bp, Artificial
  Synthetic oligonucleotide
gagttcatccgtaaaattagaagcgtcccagtcggacgttgtttgaccctccc

SEQ ID NO: 18618 - DNA, 52 bp, Artificial
  Synthetic oligonucleotide
gttccccggagctggatataaactgctaacgtggttgaaagtccttaaccgt

SEQ ID NO: 18619 - DNA, 59 bp, Artificial
  Synthetic oligonucleotide
gtgattggttaagatttggtgtaaggttcatgtgccaacgccctgtgcgggatgaaatc

SEQ ID NO: 18620 - DNA, 58 bp, Artificial
  Synthetic oligonucleotide
acttggcgtaaggttcatgtgccaacgccctgtgcgggatgaaacctctactgcccta

SEQ ID NO: 18621 - DNA, 58 bp, Artificial
  Synthetic oligonucleotide
gttgttcctatgggaatattttactgagtggtaatcaaactgctaggatgattaaata

SEQ ID NO: 18622 - DNA, 59 bp, Artificial
  Synthetic oligonucleotide
ccaggatcgggacaatttctaactactgatgacaggcaatcacccagtgctttaccaaa

SEQ ID NO: 18623 - DNA, 52 bp, Artificial
  Synthetic oligonucleotide
taggggattacattaccagtttaggaagggctttcggtgtggggtttacaga

SEQ ID NO: 18624 - DNA, 57 bp, Artificial
  Synthetic oligonucleotide
aggcaactctccaggttgtctaaggtcaagcacttctgtttccccggttgatgttga

SEQ ID NO: 18625 - DNA, 58 bp, Artificial
  Synthetic oligonucleotide
ttgcggcacagcaaacacgacattaaaactacttatagcttacaccccaccaggagtc

SEQ ID NO: 18626 - DNA, 59 bp, Artificial
  Synthetic oligonucleotide
ccccaggttctctataccattttctagtattgcctcagcttattacatgttttatgatg

SEQ ID NO: 18627 - DNA, 58 bp, Artificial
  Synthetic oligonucleotide
tgccccaatgtgtagcgagttcaacggccttcgtaacgtgactgcacctaaatttcaa

SEQ ID NO: 18628 - DNA, 58 bp, Artificial
  Synthetic oligonucleotide
tggcaagcgcggaaagaggaaacgttaatactggctataattatacacaccctggtga

SEQ ID NO: 18629 - DNA, 59 bp, Artificial
  Synthetic oligonucleotide
ctcatgttttgtggtacagctggcactacacttaaattgctagtagcctacacaccccc

SEQ ID NO: 18630 - DNA, 57 bp, Artificial
  Synthetic oligonucleotide
ggctgggtccgtgactacccactcctactttcaacgtgaaggctacgatagtgccag

SEQ ID NO: 18631 - DNA, 56 bp, Artificial
  Synthetic oligonucleotide
ccgcaactcgttactttgccaacgactgccccatgctccggttcgaagcgtttcgc

SEQ ID NO: 18632 - DNA, 59 bp, Artificial
  Synthetic oligonucleotide
gagtcctccggcccctgaatgtggctaaccttaaccctgcagctagagcgcgcaaacca

SEQ ID NO: 18633 - DNA, 59 bp, Artificial
  Synthetic oligonucleotide
taggtacacatatagtgtgggatgtgggattgcaatcaacagtttccttagtcgtccct

SEQ ID NO: 18634 - DNA, 59 bp, Artificial
  Synthetic oligonucleotide
gtaggccgtttgtttgcattcggttcgagacacaagggtaaacatccagcttcatgtgc

SEQ ID NO: 18635 - DNA, 54 bp, Artificial
  Synthetic oligonucleotide
gctaacaatacggtgggagaccaaccccttgccacgtaccaagttacactgtcg

SEQ ID NO: 18636 - DNA, 59 bp, Artificial
  Synthetic oligonucleotide
actgaacacaaaggcgtgtacggcagtctcatggcctcgtacgcctacatgagaaacgg

SEQ ID NO: 18637 - DNA, 51 bp, Artificial
  Synthetic oligonucleotide
accctactgtactaaccgaactagataacggtacagtaggggtaaattctc

SEQ ID NO: 18638 - DNA, 58 bp, Artificial
  Synthetic oligonucleotide
ctcaatacaaggtgaatctcacactcttgttaaacacctgtttgggaggcaatggtta

SEQ ID NO: 18639 - DNA, 58 bp, Artificial
  Synthetic oligonucleotide
ttaaaactgggtgtgggttgcacccacccacactgtctacggacgtagtgctctcata

SEQ ID NO: 18640 - DNA, 56 bp, Artificial
  Synthetic oligonucleotide
gcctttgattactccaactatgatggtagtttgaacccagtatggtttaagctact

SEQ ID NO: 18641 - DNA, 58 bp, Artificial
  Synthetic oligonucleotide
acaacccagtgcgtatgcggtcgtaatgagcaattgcgggatggaaccaactactttg

SEQ ID NO: 18642 - DNA, 58 bp, Artificial
  Synthetic oligonucleotide
cttacagccatattccagggcctaggagatgacactacaccagggtttattatagacc

SEQ ID NO: 18643 - DNA, 56 bp, Artificial
  Synthetic oligonucleotide
cacaggcgctgttcccaaacgccagttccaaccagtagactacttgtttgggtgtg

SEQ ID NO: 18644 - DNA, 59 bp, Artificial
  Synthetic oligonucleotide
gaccaagggggtatggctataggtgggggcctatagcttgtccagtgctggttgacaga

SEQ ID NO: 18645 - DNA, 58 bp, Artificial
  Synthetic oligonucleotide
ccccgtaatgtgtatgatgttgctcgccgtgtattctcttcccgccccactcaacaag

SEQ ID NO: 18646 - DNA, 54 bp, Artificial
  Synthetic oligonucleotide
agcacttctgtttcccccggttagattgatacgctccaacagggcgaaaacaac

SEQ ID NO: 18647 - DNA, 52 bp, Artificial
  Synthetic oligonucleotide
ccaggagggggtacaaaccagtaccaccacgaacaagcacttctgtttcccc

SEQ ID NO: 18648 - DNA, 55 bp, Artificial
  Synthetic oligonucleotide
cgttcactggtgacaggctaaggatgcccttcaggtaccccgaggtaacacggga

SEQ ID NO: 18649 - DNA, 58 bp, Artificial
  Synthetic oligonucleotide
cacttatgcctacccaactaaaacaggacaatgtggtggtgtcatttgtaaagcagga

SEQ ID NO: 18650 - DNA, 58 bp, Artificial
  Synthetic oligonucleotide
ccgctcttcacacccatcattctaattcggcccctgtgttgagccccttgttgaagtg

SEQ ID NO: 18651 - DNA, 55 bp, Artificial
  Synthetic oligonucleotide
cgcagtcctttcacgttacgaccccagaaccactaaagatgtggaccaggtcgct

SEQ ID NO: 18652 - DNA, 59 bp, Artificial
  Synthetic oligonucleotide
cgttgggtgaacgccgtgtgcggtgacgcataatcccttagagtacacaattggcagaa

SEQ ID NO: 18653 - DNA, 58 bp, Artificial
  Synthetic oligonucleotide
gctcaagtacaaacccagtactagacctggcagatgaggctagaaaacccccactggc

SEQ ID NO: 18654 - DNA, 57 bp, Artificial
  Synthetic oligonucleotide
cacaacaactggagtttagttataattcctatctgcccacttgaatcacagggtacg

SEQ ID NO: 18655 - DNA, 57 bp, Artificial
  Synthetic oligonucleotide
tcaagagagtgaatattaccctaaacacatccaatacaatcttttaattggtgaggg

SEQ ID NO: 18656 - DNA, 57 bp, Artificial
  Synthetic oligonucleotide
ccggttgtgcactagtagtatatgaacccaagccaatagtaacccatggtagtcatt

SEQ ID NO: 18657 - DNA, 55 bp, Artificial
  Synthetic oligonucleotide
ttgcacggagcagctggtatccccccccgtaacttagaagcctggacaaaccgac

SEQ ID NO: 18658 - DNA, 59 bp, Artificial
  Synthetic oligonucleotide
aatggctggggagcaccaactaaagaggagtccacttacaattggctgcccggtgctca

SEQ ID NO: 18659 - DNA, 56 bp, Artificial
  Synthetic oligonucleotide
cagcgtgggcgttacatacgggtattccactgcggaggaccacgttgccgggccca

SEQ ID NO: 18660 - DNA, 54 bp, Artificial
  Synthetic oligonucleotide
tgtgggggtcacctacgggtactccactgcggaggaccacgttgccgggcctaa

SEQ ID NO: 18661 - DNA, 55 bp, Artificial
  Synthetic oligonucleotide
ccaaattacagcctccctacaacctgtcaatcccgtgtttaatggtttgagacac

SEQ ID NO: 18662 - DNA, 59 bp, Artificial
  Synthetic oligonucleotide
ttacaacagactaacttctccctccaatgtggcttctcatgttagagttaatgtttatc

SEQ ID NO: 18663 - DNA, 55 bp, Artificial
  Synthetic oligonucleotide
ccagtgtattattggtcgtaatgagtaattgcgggatgggaccaactactttggg

SEQ ID NO: 18664 - DNA, 57 bp, Artificial
  Synthetic oligonucleotide
caccctgagtcaacaccaggctattggcctaattggtactattctcttaaccgctgg

SEQ ID NO: 18665 - DNA, 53 bp, Artificial
  Synthetic oligonucleotide
atctggggtcgtcaactgttgggacgttttgcgtctagattccaaacaaaccc

SEQ ID NO: 18666 - DNA, 56 bp, Artificial
  Synthetic oligonucleotide
taccgccgttggcttgactcattttagcaaccctacctcagtcgaattggattggg

SEQ ID NO: 18667 - DNA, 58 bp, Artificial
  Synthetic oligonucleotide
acagtggcgcgggtccatagttataaggtgtgtctttgtgggcaaccagatgcaaaat

SEQ ID NO: 18668 - DNA, 57 bp, Artificial
  Synthetic oligonucleotide
tgttcgcctgtgtcacctccaacgggtggtacgcgattgatgacgaggacttttacc

SEQ ID NO: 18669 - DNA, 58 bp, Artificial
  Synthetic oligonucleotide
cctccggcccctgaatgtggctaaccttaaccctgcagccgctgcccataatccaatg

SEQ ID NO: 18670 - DNA, 55 bp, Artificial
  Synthetic oligonucleotide
ggggtgtctaatgctgatagggcatcctttaatctaacaaaccccgataagaacg

SEQ ID NO: 18671 - DNA, 56 bp, Artificial
  Synthetic oligonucleotide
gggaaggctcaaaacgacactctggttgtgtcggttagcgccggcaaggactttga

SEQ ID NO: 18672 - DNA, 58 bp, Artificial
  Synthetic oligonucleotide
gccgtttacgagacttgcgctcccttacaccgcgccgcaccgagtgttggcaacagtg

SEQ ID NO: 18673 - DNA, 59 bp, Artificial
  Synthetic oligonucleotide
gggcgctagtactctggtacgctagtacactagcacgttagtgcttttgtacgccagta

SEQ ID NO: 18674 - DNA, 58 bp, Artificial
  Synthetic oligonucleotide
cgtgtgggaacttatcggaagcaacaatttgccgtacggcatcctactgccagcggat

SEQ ID NO: 18675 - DNA, 56 bp, Artificial
  Synthetic oligonucleotide
gtgcaaaccattcctcacaggaacgacaagagggaaaatagaggtctatcttagtt

SEQ ID NO: 18676 - DNA, 56 bp, Artificial
  Synthetic oligonucleotide
attatcaattcacaaggatctgttggaacaacctactgttactccaaaccggatgg

SEQ ID NO: 18677 - DNA, 54 bp, Artificial
  Synthetic oligonucleotide
tccccggcacccttgtatacgcttcacccgaggcgaaaaatgaggttgtcgtta

SEQ ID NO: 18678 - DNA, 58 bp, Artificial
  Synthetic oligonucleotide
ttggaggtgataacacccgggttaaatacaagcatacacatccaggtgaattgggcca

SEQ ID NO: 18679 - DNA, 58 bp, Artificial
  Synthetic oligonucleotide
cagcaactagcctgtcgtaacgcgcaagtctgtggcggaaccgactactttgggtgtc

SEQ ID NO: 18680 - DNA, 57 bp, Artificial
  Synthetic oligonucleotide
acttttgctggcctaataaacctgagtagtgttccaacaaaccgcatgatacgctac

SEQ ID NO: 18681 - DNA, 58 bp, Artificial
  Synthetic oligonucleotide
gccccgtgcgacgttgagtaccacgggctacgccagaattcaatgtatcagggcccta

SEQ ID NO: 18682 - DNA, 56 bp, Artificial
  Synthetic oligonucleotide
cccactggtggcaccaatcaggtcctagtcaataccccgtattggtctcgagggta

SEQ ID NO: 18683 - DNA, 58 bp, Artificial
  Synthetic oligonucleotide
gaatgcggctaatcctaactgcggagcacatacccccaacccagggggcagtgtgtcg

SEQ ID NO: 18684 - DNA, 57 bp, Artificial
  Synthetic oligonucleotide
ccccaacaaagtacattgtattgtgcaagggagacttgggaatgacgcaagatttta

SEQ ID NO: 18685 - DNA, 58 bp, Artificial
  Synthetic oligonucleotide
cactgggcgctagcacactggtatcacggtacccttgtgcgcctgttttattcacccc

SEQ ID NO: 18686 - DNA, 56 bp, Artificial
  Synthetic oligonucleotide
ctggagacaggctaaggatgcccttcaggtaccccgaggtaacaagcgacactcgg

SEQ ID NO: 18687 - DNA, 57 bp, Artificial
  Synthetic oligonucleotide
taccgccagccggcactaataatccagtgctagttaacaccccatattggtccaggg

SEQ ID NO: 18688 - DNA, 56 bp, Artificial
  Synthetic oligonucleotide
gtaacttagaagttaagcacaacgaccaataggaggcaattgaccaaattgctaaa

SEQ ID NO: 18689 - DNA, 58 bp, Artificial
  Synthetic oligonucleotide
tgttaaatcttaccaccagcagtgggtccttgttatctgggttatggctcccctgcaa

SEQ ID NO: 18690 - DNA, 53 bp, Artificial
  Synthetic oligonucleotide
tatcccgtaggtcccttttcacctggaaccctgacggacattgggatcccgta

SEQ ID NO: 18691 - DNA, 56 bp, Artificial
  Synthetic oligonucleotide
actacaaggaccatactcaggtgagcctaaacccaaaaccaagatgcctgaaagga

SEQ ID NO: 18692 - DNA, 58 bp, Artificial
  Synthetic oligonucleotide
gagggcaacaattactaccctagtagataccagcagggtgttatgagaggtgtgggtc

SEQ ID NO: 18693 - DNA, 57 bp, Artificial
  Synthetic oligonucleotide
agtggccctcctactgctcggattctgacgctacggcggtggacaaaccgacgcgcc

SEQ ID NO: 18694 - DNA, 52 bp, Artificial
  Synthetic oligonucleotide
cgggttgatataccttgaatccttcatccttggacctcccggtcccccggtc

SEQ ID NO: 18695 - DNA, 59 bp, Artificial
  Synthetic oligonucleotide
cagtgaatagatctggaatggaagtagatctgacctttataaaggtgactaaaggacca

SEQ ID NO: 18696 - DNA, 52 bp, Artificial
  Synthetic oligonucleotide
ggtcttgtattacggtacatttccataccagttttatacaccctaccccgaa

SEQ ID NO: 18697 - DNA, 59 bp, Artificial
  Synthetic oligonucleotide
agcaaacaccgtattgaacctgtatgtctaatcatcaggggctcgcctggtactgggaa

SEQ ID NO: 18698 - DNA, 55 bp, Artificial
  Synthetic oligonucleotide
tcttacctcggcgagccgttcagacctggccctcaggtcgaccgtttctgggagg

SEQ ID NO: 18699 - DNA, 59 bp, Artificial
  Synthetic oligonucleotide
ctgacatccagtcgtcggttcccactcccgaagtcgtcgctgtcaaaagcaacgacatc

SEQ ID NO: 18700 - DNA, 56 bp, Artificial
  Synthetic oligonucleotide
caccaccctaatcgtgacccctgccactaaggctggtgatttcccggaccactcca

SEQ ID NO: 18701 - DNA, 58 bp, Artificial
  Synthetic oligonucleotide
caatgttgagtaccatgggctccgtcaaagctctgtgtaccaaagtccaataccaaag

SEQ ID NO: 18702 - DNA, 56 bp, Artificial
  Synthetic oligonucleotide
ttaaaacagcggatgggtatcccaccatccggcccactgggcgtagtacactggta

SEQ ID NO: 18703 - DNA, 55 bp, Artificial
  Synthetic oligonucleotide
gtactggaaattccctgacgtattgactgaaaccggggtctttggtcaaaatgca

SEQ ID NO: 18704 - DNA, 59 bp, Artificial
  Synthetic oligonucleotide
ggtgcgaagagtctattgagctaactagtagtcctccggcccctgaatgcggataatct

SEQ ID NO: 18705 - DNA, 56 bp, Artificial
  Synthetic oligonucleotide
agtctattgcgctgggacggttttcctccggggccgtgaatgctgctaatcccaac

SEQ ID NO: 18706 - DNA, 57 bp, Artificial
  Synthetic oligonucleotide
agtggataaaccaacgcgcccagatgtttcggtgaataggttctatacattggacac

SEQ ID NO: 18707 - DNA, 58 bp, Artificial
  Synthetic oligonucleotide
gttggtattcctccggcccctgaatgcggctaatcctaactgcggagcaggcacccac

SEQ ID NO: 18708 - DNA, 59 bp, Artificial
  Synthetic oligonucleotide
aactatcccctatactccatcactctcagacacccgcgacccacatatgtgggttgtag

SEQ ID NO: 18709 - DNA, 58 bp, Artificial
  Synthetic oligonucleotide
agcgtggacttggttgttccttacgtagcaccatatgatttcacgcccgtgcggactc

SEQ ID NO: 18710 - DNA, 58 bp, Artificial
  Synthetic oligonucleotide
caagctgggaaaacccgtgtcattgatgtagcagggtttgggcacgcaatagtcggcc

SEQ ID NO: 18711 - DNA, 56 bp, Artificial
  Synthetic oligonucleotide
acatcctggcgtacggtgacgacgtcatctacgctacggagccccccatccaccct

SEQ ID NO: 18712 - DNA, 59 bp, Artificial
  Synthetic oligonucleotide
cccctcatggcaacatgagcctcacaggccaaaagccctgtccgaaaggacccacacag

SEQ ID NO: 18713 - DNA, 52 bp, Artificial
  Synthetic oligonucleotide
aatagactgctaacgcggttgaaggagaaaacgttcgttacccggccaatta

SEQ ID NO: 18714 - DNA, 58 bp, Artificial
  Synthetic oligonucleotide
aatatcttgcttagtgggaatcaaactgccagaatgcttaaatacaattacccaacta

SEQ ID NO: 18715 - DNA, 59 bp, Artificial
  Synthetic oligonucleotide
cggtgaagttagaaacttgctagagctatgccaggtggagaccattttagaggtcaaca

SEQ ID NO: 18716 - DNA, 55 bp, Artificial
  Synthetic oligonucleotide
gcaattttgacctgtgaggtgctccctaccagataccccagatttacccgttacc

SEQ ID NO: 18717 - DNA, 59 bp, Artificial
  Synthetic oligonucleotide
agtgtggatatcaatgtttccctggctccttgtaatgtcgaataccacgggcttcgtca

SEQ ID NO: 18718 - DNA, 52 bp, Artificial
  Synthetic oligonucleotide
cggctagtactccggtattgcggtacccttgtacgcctgttttatactccct

SEQ ID NO: 18719 - DNA, 59 bp, Artificial
  Synthetic oligonucleotide
acagatcactttacctgcgttgggtgaacgccgtgtgcggtgacgcgtaatccctcaga

SEQ ID NO: 18720 - DNA, 58 bp, Artificial
  Synthetic oligonucleotide
tatccaaccttagatgcttttgtcatggacaaccgttggtccaaggataacctgccta

SEQ ID NO: 18721 - DNA, 59 bp, Artificial
  Synthetic oligonucleotide
gaagcctagtaccaccttggaatcttcgacgcgttgcgctcagcactctaccccgagtg

SEQ ID NO: 18722 - DNA, 58 bp, Artificial
  Synthetic oligonucleotide
attagtctttggacttctgttgtgtttaaacacagaaatttgattgcctggctatgaa

SEQ ID NO: 18723 - DNA, 53 bp, Artificial
  Synthetic oligonucleotide
cttggccgtcgggccttataccccgacttgccgagtttctctaggagagtccc

SEQ ID NO: 18724 - DNA, 54 bp, Artificial
  Synthetic oligonucleotide
ttcaagaggggcctccgggattcccggaatccctcttgggagtccatggtgagg

SEQ ID NO: 18725 - DNA, 58 bp, Artificial
  Synthetic oligonucleotide
caggctaaggatgcccttcaggtaccccgaggtaacacgagacactcgggatctgaga

SEQ ID NO: 18726 - DNA, 53 bp, Artificial
  Synthetic oligonucleotide
gagagtgccaacccacgtctttcccgctcctaacccgactcccacctcgggtc

SEQ ID NO: 18727 - DNA, 57 bp, Artificial
  Synthetic oligonucleotide
ttggtcgttccactaaaccccatagtagacctggcagatgaggctagaaatacccca

SEQ ID NO: 18728 - DNA, 51 bp, Artificial
  Synthetic oligonucleotide
tccggtattgcggtacccttgtacgcctgttttacactcccttccccgtaa

SEQ ID NO: 18729 - DNA, 59 bp, Artificial
  Synthetic oligonucleotide
cacccacacttttcgggtgagcccctaagccatggttgtactgcactatcaatctaaga

SEQ ID NO: 18730 - DNA, 55 bp, Artificial
  Synthetic oligonucleotide
acttgggtgctctaattccccgtggcggttcctgaaacagaaggtgtgtacatgg

SEQ ID NO: 18731 - DNA, 59 bp, Artificial
  Synthetic oligonucleotide
aggtgtgaagagccccgtgtgctcatcctgagtcctccggcccctgaatgtggctaacc

SEQ ID NO: 18732 - DNA, 58 bp, Artificial
  Synthetic oligonucleotide
ctgagatcgttatccgcaaagcgcctacgcaaagcctagtaactatctggaaattact

SEQ ID NO: 18733 - DNA, 53 bp, Artificial
  Synthetic oligonucleotide
ccctctagggcgtagtgttgtgggataccctagagtacacgtaaaacacccac

SEQ ID NO: 18734 - DNA, 57 bp, Artificial
  Synthetic oligonucleotide
aagatgactaatgttgacccacaatatttacgactgaacatctcggatattttacgg

SEQ ID NO: 18735 - DNA, 54 bp, Artificial
  Synthetic oligonucleotide
tgtcttctaccaaccaaagagtggtttcccacggttcactatccctttcacagg

SEQ ID NO: 18736 - DNA, 58 bp, Artificial
  Synthetic oligonucleotide
gccactatcattagaacaggctgtatgtggcataaaaaatttggaacccttggacctc

SEQ ID NO: 18737 - DNA, 58 bp, Artificial
  Synthetic oligonucleotide
gctaagaacttgattgtcactgagagtggtgcccccccgaccgacttgcaaaagatgg

SEQ ID NO: 18738 - DNA, 56 bp, Artificial
  Synthetic oligonucleotide
actggtacccacgtgctggtgacaggctaaggatgcccttcaggtaccccgaggta

SEQ ID NO: 18739 - DNA, 57 bp, Artificial
  Synthetic oligonucleotide
ggatggtagaccaccgtccacagtgtcagacccagttaccagacttggaccctcgct

SEQ ID NO: 18740 - DNA, 53 bp, Artificial
  Synthetic oligonucleotide
ttggggttattcccaaaccccttaattcaacgcctagtcctagcgatatagga

SEQ ID NO: 18741 - DNA, 56 bp, Artificial
  Synthetic oligonucleotide
ggaactgaaggccttgaagctctcgatttaacaacaagtgcaggctacccctacgt

SEQ ID NO: 18742 - DNA, 58 bp, Artificial
  Synthetic oligonucleotide
aagacatctggagagttggattctttagtgagagcctgtggggggcgtatagctaaat

SEQ ID NO: 18743 - DNA, 58 bp, Artificial
  Synthetic oligonucleotide
ctggagagttggactctttagtgagagcctgtggggggcgtatagctaaatttcatcg

SEQ ID NO: 18744 - DNA, 58 bp, Artificial
  Synthetic oligonucleotide
tcaaatcacagcctccctgcaacctgttaatcccgtgtttaatggtttgagacacgaa

SEQ ID NO: 18745 - DNA, 59 bp, Artificial
  Synthetic oligonucleotide
cacaatccagtgtatttctagtcgtaatgagcaattgcgggatgggaccaactactttg

SEQ ID NO: 18746 - DNA, 54 bp, Artificial
  Synthetic oligonucleotide
gcgctagggtctagccctagtgtcgcgtaacgaccgtccccggttgaaacgcta

SEQ ID NO: 18747 - DNA, 59 bp, Artificial
  Synthetic oligonucleotide
gcgttgcactccacacttacgcttatgtgtacgcgggaaccgatggactgttgttcacc

SEQ ID NO: 18748 - DNA, 54 bp, Artificial
  Synthetic oligonucleotide
gaaagggcatataatccaacactgccagtcgccaaaccaaagggaactttcccc

SEQ ID NO: 18749 - DNA, 53 bp, Artificial
  Synthetic oligonucleotide
ggggtacaaaccagtaccaccacgaacaagcacttctgtttccccggtgaagc

SEQ ID NO: 18750 - DNA, 56 bp, Artificial
  Synthetic oligonucleotide
aagccagtgtgtatctagtcgtaatgagtaattgcgggacgggaccgactactttg

SEQ ID NO: 18751 - DNA, 55 bp, Artificial
  Synthetic oligonucleotide
ggggtgtactactgcgagtctagaaggaaatactacccagtatccttcgttggcc

SEQ ID NO: 18752 - DNA, 58 bp, Artificial
  Synthetic oligonucleotide
ggtcgctcaggtgtttccccaacactagacctggcagatgaggctagaaactccccac

SEQ ID NO: 18753 - DNA, 52 bp, Artificial
  Synthetic oligonucleotide
tgggttactgtttggcaattgactcccctaacctacccctctggaaccccca

SEQ ID NO: 18754 - DNA, 58 bp, Artificial
  Synthetic oligonucleotide
tgctcctaccggagtattctactcttcgcaggcgctggctcgattctttttagggtaa

SEQ ID NO: 18755 - DNA, 58 bp, Artificial
  Synthetic oligonucleotide
cttgtacaaacacgatctatgcaggtttccccaactgacacaaaacgtgcaacttgaa

SEQ ID NO: 18756 - DNA, 57 bp, Artificial
  Synthetic oligonucleotide
caagccagcaatcgacctgtcgtaacgcgtaagtctgtggcggaaccgactactttg

SEQ ID NO: 18757 - DNA, 54 bp, Artificial
  Synthetic oligonucleotide
cgcacttcctacgtggagtagtacactattattacggtaattttgtacgccagt

SEQ ID NO: 18758 - DNA, 54 bp, Artificial
  Synthetic oligonucleotide
tcccacgtggagttgtacactattattacggtaattttgtacgccagttttata

SEQ ID NO: 18759 - DNA, 53 bp, Artificial
  Synthetic oligonucleotide
actgcttgggggtgtccctgacccccttaattcaacgtctagcccacgatacg

SEQ ID NO: 18760 - DNA, 54 bp, Artificial
  Synthetic oligonucleotide
tacaccgactgcttgggggtgtccctgacccccttaattcaacgtctagcccac

SEQ ID NO: 18761 - DNA, 59 bp, Artificial
  Synthetic oligonucleotide
gttatccgcacatttactacgcaaagcctattagcgttctggaagttcactggctggtc

SEQ ID NO: 18762 - DNA, 55 bp, Artificial
  Synthetic oligonucleotide
ggttatacagttcatgttcagtgtaacgctagtaagtttcaccagggaactttag

SEQ ID NO: 18763 - DNA, 58 bp, Artificial
  Synthetic oligonucleotide
ctacattaccagtggccaagccgaaaggtgcctttcctgtcacacaaagagagttcaa

SEQ ID NO: 18764 - DNA, 53 bp, Artificial
  Synthetic oligonucleotide
gcagaccccgtctacgggaaagtgttcaacccaccccgcaacctgttgccagg

SEQ ID NO: 18765 - DNA, 53 bp, Artificial
  Synthetic oligonucleotide
aactcccccatggtaacatggacccgtcgggccaaaagccacgcctcacggcc

SEQ ID NO: 18766 - DNA, 56 bp, Artificial
  Synthetic oligonucleotide
caacattagtctttggacttctgttgtgtttaaacacagaaattttgttatctggc

SEQ ID NO: 18767 - DNA, 57 bp, Artificial
  Synthetic oligonucleotide
cctaatgctcccgtttgaaggggctgggtatgagataccttgccacgaacgcctcaa

SEQ ID NO: 18768 - DNA, 57 bp, Artificial
  Synthetic oligonucleotide
ccaacgacagtccctgcgttgcactccacacttacgttgtgcgtacgcggggcccaa

SEQ ID NO: 18769 - DNA, 54 bp, Artificial
  Synthetic oligonucleotide
tgcgtacagtgggactcctgttccgaaaccacggaaaaaggatctccctaaaca

SEQ ID NO: 18770 - DNA, 54 bp, Artificial
  Synthetic oligonucleotide
gagcgaggtatagatggtccccaccgtcaaaagcctttaaccgttatccgccaa

SEQ ID NO: 18771 - DNA, 56 bp, Artificial
  Synthetic oligonucleotide
agggcccaccgggcgctagcacactggtatcacggtacctttgtgcgcctgtttta

SEQ ID NO: 18772 - DNA, 58 bp, Artificial
  Synthetic oligonucleotide
gttaagacctccagagaattggactccttagtgagagcctgtggggggcgtatagcta

SEQ ID NO: 18773 - DNA, 59 bp, Artificial
  Synthetic oligonucleotide
tccaaggagatacccgcattgacagccgtggagacaggggctaccaatccgttggtgcc

SEQ ID NO: 18774 - DNA, 56 bp, Artificial
  Synthetic oligonucleotide
gcctgcgtcacctctaacgggtggtacgcgattgatgacgaggatttttacccctg

SEQ ID NO: 18775 - DNA, 54 bp, Artificial
  Synthetic oligonucleotide
agaacaagggagtgttcgtggcggggtacaaaatcataaactaccacctagcca

SEQ ID NO: 18776 - DNA, 58 bp, Artificial
  Synthetic oligonucleotide
cccaacctccgagcgtgtgcgcacaatccagtgttgctacgtcgtaacgcgtaagttg

SEQ ID NO: 18777 - DNA, 59 bp, Artificial
  Synthetic oligonucleotide
tgtgaagccaaattacggacaaggtgtgaagagccccgtgtgctcactttgagtcctcc

SEQ ID NO: 18778 - DNA, 57 bp, Artificial
  Synthetic oligonucleotide
ttctactcttcgcaggcgctggctcgattctttttagagtaaccctacctcacccga

SEQ ID NO: 18779 - DNA, 59 bp, Artificial
  Synthetic oligonucleotide
gagctacgcgagagtcctccggcccctgaatgcggctaatcctaaccacggagcaagcg

SEQ ID NO: 18780 - DNA, 57 bp, Artificial
  Synthetic oligonucleotide
agttagtagtcctccggcccctgaatgcggctaatcctaactgtggagcgcgcaccc

SEQ ID NO: 18781 - DNA, 56 bp, Artificial
  Synthetic oligonucleotide
aaccagtaccaccacgaacaagcacttctgttcccccggtgatctcgtataggctg

SEQ ID NO: 18782 - DNA, 54 bp, Artificial
  Synthetic oligonucleotide
cccgtgtgcttaatgtgaatcctccggcccctgaatgtggctaaccttaacccc

SEQ ID NO: 18783 - DNA, 53 bp, Artificial
  Synthetic oligonucleotide
gtatcaatagaccgctaacgcggttgaaggagaaaacgttcgttacccggcca

SEQ ID NO: 18784 - DNA, 52 bp, Artificial
  Synthetic oligonucleotide
aaccctactgcgctaaccgaactagataacggcgtggtaggggtaaattctc

SEQ ID NO: 18785 - DNA, 58 bp, Artificial
  Synthetic oligonucleotide
cgggtatagcgatagagtactgcaattaacactgggaaactccactataaccacacag

SEQ ID NO: 18786 - DNA, 57 bp, Artificial
  Synthetic oligonucleotide
cagttgctatggccaaaaggaacatcgttaccgccactactagtaaaggtgagttca

SEQ ID NO: 18787 - DNA, 53 bp, Artificial
  Synthetic oligonucleotide
gctagcacactggtattccggtacctttgtgcgcctgttttataacccccccc

SEQ ID NO: 18788 - DNA, 54 bp, Artificial
  Synthetic oligonucleotide
gatacaacttctacccacacaaccaacacccagaacaacgactggttttccaaa

SEQ ID NO: 18789 - DNA, 54 bp, Artificial
  Synthetic oligonucleotide
acgtcgatgaacctttcttcgactgggtctacaactcgcccgaaaacctcacgc

SEQ ID NO: 18790 - DNA, 52 bp, Artificial
  Synthetic oligonucleotide
aatagaagggggtacaaaccagtaccaccacgaacaagcacttctgtttccc

SEQ ID NO: 18791 - DNA, 56 bp, Artificial
  Synthetic oligonucleotide
acctctacgaacaagcacttctgtttccccggtgaaatcatatagactgtacccac

SEQ ID NO: 18792 - DNA, 56 bp, Artificial
  Synthetic oligonucleotide
tacactgtatcgccgttggctcgactcgttttagtaaccctacctcagtcgaattg

SEQ ID NO: 18793 - DNA, 53 bp, Artificial
  Synthetic oligonucleotide
ttcacccgaggcgaaaaccgaggttatcgttacccgcaaagtgcctacgagaa

SEQ ID NO: 18794 - DNA, 59 bp, Artificial
  Synthetic oligonucleotide
gtacgcggggcctgatgaactgtcgttcacccacctacagctggactcacgacaccgcg

SEQ ID NO: 18795 - DNA, 57 bp, Artificial
  Synthetic oligonucleotide
tagggcaattgcgggtctatgtttggacacctctttcagtacctacaggggcttcta

SEQ ID NO: 18796 - DNA, 57 bp, Artificial
  Synthetic oligonucleotide
caatgagaatggccttcggtaacctatatgccgcttttcacaagaaccctggtgtaa

SEQ ID NO: 18797 - DNA, 58 bp, Artificial
  Synthetic oligonucleotide
caagccagtgattagcctgtcgtaacgcgcaagtctgtggcggaaccgactactttgg

SEQ ID NO: 18798 - DNA, 59 bp, Artificial
  Synthetic oligonucleotide
ccagtacatagctagtcgtaatgagcaattgcgggatgggaccaactactttgggtgtc

SEQ ID NO: 18799 - DNA, 55 bp, Artificial
  Synthetic oligonucleotide
acccgtggtgacaggctaaggatgcccttcaggtaccccgaggtaacacgcgaca

SEQ ID NO: 18800 - DNA, 57 bp, Artificial
  Synthetic oligonucleotide
gttggactacgttacgggagcgtcctcttacatccctatcacagtgacagttgcccc

SEQ ID NO: 18801 - DNA, 59 bp, Artificial
  Synthetic oligonucleotide
agtgacactatggatctgatctggggccaggtacctctatcttggtgacctggttaaaa

SEQ ID NO: 18802 - DNA, 59 bp, Artificial
  Synthetic oligonucleotide
ctcaatcactggagacaggctaaggatgcccttcaggtaccccgaggtaacacgcgaca

SEQ ID NO: 18803 - DNA, 55 bp, Artificial
  Synthetic oligonucleotide
gtgtcaacgggatgcaaccgcaagatgaaccttcacccggaagtaaaacggcaac

SEQ ID NO: 18804 - DNA, 58 bp, Artificial
  Synthetic oligonucleotide
aaggtgtgaagagccgcgtttgctaattgtgagtcctccggcccctgaatgcggctaa

SEQ ID NO: 18805 - DNA, 53 bp, Artificial
  Synthetic oligonucleotide
cctccaacgggtggtacgcgattgatgacgaggacttttacccttggacaccg

SEQ ID NO: 18806 - DNA, 55 bp, Artificial
  Synthetic oligonucleotide
actgcatcaaccgaactagataacggtgcagtaggggtaaattctccgctttcgg

SEQ ID NO: 18807 - DNA, 52 bp, Artificial
  Synthetic oligonucleotide
acgggtggtacgcgattgatgacgaggacttttacccctggacgccggaccc

SEQ ID NO: 18808 - DNA, 56 bp, Artificial
  Synthetic oligonucleotide
ccacggggccgaaagccacgtccgaatggacccgtcatgtgtgcaaccccagcacg

SEQ ID NO: 18809 - DNA, 57 bp, Artificial
  Synthetic oligonucleotide
gttatccgcaaagcgcctacgcaaagcttagtagcacctttgagattgtttggttgg

SEQ ID NO: 18810 - DNA, 56 bp, Artificial
  Synthetic oligonucleotide
gcatgaaccgaacttgacaaaagtgcggtaggggtaaattctccgcattcggtgcg

SEQ ID NO: 18811 - DNA, 55 bp, Artificial
  Synthetic oligonucleotide
gttaaacacctgtttgggaggcaatggttagttaggactgtacaacacacttcaa

SEQ ID NO: 18812 - DNA, 52 bp, Artificial
  Synthetic oligonucleotide
acgcggttgaaggagaaaacgttcgttacccggctgactacttcgagaagct

SEQ ID NO: 18813 - DNA, 55 bp, Artificial
  Synthetic oligonucleotide
tgtaacggattcgtctgatctagggcgtctaagggtttatgtttgggctccgtta

SEQ ID NO: 18814 - DNA, 58 bp, Artificial
  Synthetic oligonucleotide
cacacttgccagtaagacgtggagtcgtgagtctaagggctggtgttggaaattgccg

SEQ ID NO: 18815 - DNA, 58 bp, Artificial
  Synthetic oligonucleotide
ataatacggctacaatagtaaccccatacataaactcagtcccaatggattcaatgac

SEQ ID NO: 18816 - DNA, 51 bp, Artificial
  Synthetic oligonucleotide
ctctctacagggcccttactcgggggagcccaaacctaagacaaaagttcc

SEQ ID NO: 18817 - DNA, 54 bp, Artificial
  Synthetic oligonucleotide
accgaactagacaacggcgcagtaggggtaaattctccgcattcggtgcgggag

SEQ ID NO: 18818 - DNA, 54 bp, Artificial
  Synthetic oligonucleotide
cggctagtacactggtatcacggtacctttgtacgcctgttttatactcccttc

SEQ ID NO: 18819 - DNA, 59 bp, Artificial
  Synthetic oligonucleotide
atggttggtcgctcagctattccccctagtagacctggcagatgaggctagaaataccc

SEQ ID NO: 18820 - DNA, 56 bp, Artificial
  Synthetic oligonucleotide
acctggtttccactggccgaaggcaactagcaataaggcaggtgggttcagacgct

SEQ ID NO: 18821 - DNA, 58 bp, Artificial
  Synthetic oligonucleotide
ctaaatacaagtggactagacaaaaaattgacattgcagaaggaccaggttctatgaa

SEQ ID NO: 18822 - DNA, 54 bp, Artificial
  Synthetic oligonucleotide
ccgcactaaccgaactagataacggtgcagtgggggtaaattctccgcattcgg

SEQ ID NO: 18823 - DNA, 58 bp, Artificial
  Synthetic oligonucleotide
cagtgagtggcttgtcgtaacgcgcaagtctgtggcggaaccgactactttgggtgtc

SEQ ID NO: 18824 - DNA, 55 bp, Artificial
  Synthetic oligonucleotide
cgggcgttagcacactggtatcacggtacccttgtgcgcctgttttataacccca

SEQ ID NO: 18825 - DNA, 55 bp, Artificial
  Synthetic oligonucleotide
tcgaccctactgcgctaaccgaactagacaacggtgcagtaggggtaaattctcc

SEQ ID NO: 18826 - DNA, 54 bp, Artificial
  Synthetic oligonucleotide
ggggccgttcgacgctccacgggttcccctgtgcggcaactacggtgatgggac

SEQ ID NO: 18827 - DNA, 50 bp, Artificial
  Synthetic oligonucleotide
cctctatcttggtggcctggttaaaaaacgtctagtgggccaaacccggg

SEQ ID NO: 18828 - DNA, 59 bp, Artificial
  Synthetic oligonucleotide
gcaatcaaccttgagatttcgtgttccttggatttctgatacaccctatcgagtaaata

SEQ ID NO: 18829 - DNA, 59 bp, Artificial
  Synthetic oligonucleotide
tttggtttccacccaaacgctgagtggatcctgaagactctcgtgaacacggagcacgc

SEQ ID NO: 18830 - DNA, 50 bp, Artificial
  Synthetic oligonucleotide
ggatggtactggaagttcccggatgtgttaactgaaaccggggtttttgg

SEQ ID NO: 18831 - DNA, 53 bp, Artificial
  Synthetic oligonucleotide
gggggtacaaaccagtaccaccacgaacaagcacttctgtttccccggtgatc

SEQ ID NO: 18832 - DNA, 52 bp, Artificial
  Synthetic oligonucleotide
ttaaaacagcctgggggttgtacccacccctgggacccacgtggtgtcagta

SEQ ID NO: 18833 - DNA, 54 bp, Artificial
  Synthetic oligonucleotide
ccagaagttggcctgtcgtaacgcgtaagtctgtggcggaaccgactactttgg

SEQ ID NO: 18834 - DNA, 50 bp, Artificial
  Synthetic oligonucleotide
acgcggttgaaggagaaaacgttcgttacccggccagttacttcgagaaa

SEQ ID NO: 18835 - DNA, 55 bp, Artificial
  Synthetic oligonucleotide
atctgatctggggccaggtacctctatctaggtgacctggttaaaaaacgtctag

SEQ ID NO: 18836 - DNA, 59 bp, Artificial
  Synthetic oligonucleotide
gttatggcgagtggccttcctactgctcggattctgacgctacggcggtggacaaacca

SEQ ID NO: 18837 - DNA, 58 bp, Artificial
  Synthetic oligonucleotide
caaatactggtgacaggctaaggatgcccttcaggtaccccgaggtaacatgcgacac

SEQ ID NO: 18838 - DNA, 54 bp, Artificial
  Synthetic oligonucleotide
gcttaaccctactgcgctaaccgaactagataacggcgcagtaggggtaaatct

SEQ ID NO: 18839 - DNA, 55 bp, Artificial
  Synthetic oligonucleotide
agtaccaccacgaacaagcacttctgtttccccggtgacgttgtatagactgttc

SEQ ID NO: 18840 - DNA, 54 bp, Artificial
  Synthetic oligonucleotide
tttaaaacagcctgtgggttgtacccactcacagggcccacgtggcgttagtac

SEQ ID NO: 18841 - DNA, 56 bp, Artificial
  Synthetic oligonucleotide
agcctagtaactacctcgaaagtacttgactggtcgctccgccataccccatggta

SEQ ID NO: 18842 - DNA, 50 bp, Artificial
  Synthetic oligonucleotide
ggggtggtactggaaattcccggatgtgttaactgaaaccggggtctttg

SEQ ID NO: 18843 - DNA, 56 bp, Artificial
  Synthetic oligonucleotide
ggtcgtttgcctccgtggcaaatctggccagggtaagagtttccttgcgaacgtgc

SEQ ID NO: 18844 - DNA, 58 bp, Artificial
  Synthetic oligonucleotide
cctactgagctaattgagagtcctccggcccctgaatgcggctaatcccaaccacgga

SEQ ID NO: 18845 - DNA, 56 bp, Artificial
  Synthetic oligonucleotide
gtcactggcacaacgcgttacccggtaagccaatcgggtgtacacggtcgtcatac

SEQ ID NO: 18846 - DNA, 54 bp, Artificial
  Synthetic oligonucleotide
ttgaacgcgggacctgcgatagtgccaacccacgtcttttcccactcctaaccc

SEQ ID NO: 18847 - DNA, 57 bp, Artificial
  Synthetic oligonucleotide
ttaaaactggatctaggttgttcccacctagatctcccatgtggagtagtactctat

SEQ ID NO: 18848 - DNA, 54 bp, Artificial
  Synthetic oligonucleotide
gaagggggtacaaaccagtaccaccacgaacaagcacttctgtcaccccggtga

SEQ ID NO: 18849 - DNA, 56 bp, Artificial
  Synthetic oligonucleotide
aaggatgcccttcaggtaccccgaggtaacatgtgacactcgggatctgagaaggg

SEQ ID NO: 18850 - DNA, 57 bp, Artificial
  Synthetic oligonucleotide
caggttgtttgctggacaacaaggagcatacaccggcttacctaacaagaggccaaa

SEQ ID NO: 18851 - DNA, 55 bp, Artificial
  Synthetic oligonucleotide
aattcccctctgtccgtcctgcccgctgcttggttcaacggatggtccgattttg

SEQ ID NO: 18852 - DNA, 56 bp, Artificial
  Synthetic oligonucleotide
gttttgcctccaaatttcagaccaaacccggactcgaactcggatctgccattgga

SEQ ID NO: 18853 - DNA, 55 bp, Artificial
  Synthetic oligonucleotide
accagtgaactggtacgctagtacctttgcacggagtagatggtacacccacccc

SEQ ID NO: 18854 - DNA, 55 bp, Artificial
  Synthetic oligonucleotide
tacttttgagtcacagtacaaccccgggagtaccatcgaaacagcacgcaagttt

SEQ ID NO: 18855 - DNA, 57 bp, Artificial
  Synthetic oligonucleotide
ataccagtagggtcagttaccgagcaggggatgcttaacctagccggcaaagctaca

SEQ ID NO: 18856 - DNA, 56 bp, Artificial
  Synthetic oligonucleotide
aagagccccgtgtgctcactttgagtcctccggcccctgaatgtggctaaccttaa

SEQ ID NO: 18857 - DNA, 56 bp, Artificial
  Synthetic oligonucleotide
cggacttttcacccttctgttcgacaatgaatggtacccaactgacctattgactg

SEQ ID NO: 18858 - DNA, 58 bp, Artificial
  Synthetic oligonucleotide
ctgtggctaggccagaacccgtggttgttgtgttgcgagggaatgctggacaaggaaa

SEQ ID NO: 18859 - DNA, 56 bp, Artificial
  Synthetic oligonucleotide
gcggaaaaagcacaagtgtgttgcaggctaccaaactcctacccgacaaaggtgcg

SEQ ID NO: 18860 - DNA, 57 bp, Artificial
  Synthetic oligonucleotide
ctagcgcgggatacatctcagggtggtatcaaaccagcatcgttgtcccccccaaaa

SEQ ID NO: 18861 - DNA, 58 bp, Artificial
  Synthetic oligonucleotide
attcttaacaactgatgactttcagtccccctgcatgctaccaaaattccaacccaca

SEQ ID NO: 18862 - DNA, 53 bp, Artificial
  Synthetic oligonucleotide
cctacggggaaacccgtaggacgctttaatgttaacatggtgcgaagagtcta

SEQ ID NO: 18863 - DNA, 58 bp, Artificial
  Synthetic oligonucleotide
ttactgtagaaagttccaaccactgtacgccgctgaggcaaagagggtctttgcactg

SEQ ID NO: 18864 - DNA, 56 bp, Artificial
  Synthetic oligonucleotide
acaaaccaactgaacctggcgtatcagctgaacggttctacaccctcccatcggtc

SEQ ID NO: 18865 - DNA, 56 bp, Artificial
  Synthetic oligonucleotide
tacagccggaggtagtaacctagtggcttttgctgacgttagggaccttctctgga

SEQ ID NO: 18866 - DNA, 56 bp, Artificial
  Synthetic oligonucleotide
aggaagccatttacggcactgaagggttagaggcccttgatcttgggaccagcgcg

SEQ ID NO: 18867 - DNA, 56 bp, Artificial
  Synthetic oligonucleotide
ttatcactcccggtccgaatccaccatagaaaacttcctgtgtagggcggcttgtg

SEQ ID NO: 18868 - DNA, 57 bp, Artificial
  Synthetic oligonucleotide
gtatggcgagtttacaatgttgggtatctacgacaggtgggccgtgttaccacgcca

SEQ ID NO: 18869 - DNA, 58 bp, Artificial
  Synthetic oligonucleotide
agcacttctgtctccccggtcaaagttgatatgctctccccagggcaaaaacaattga

SEQ ID NO: 18870 - DNA, 56 bp, Artificial
  Synthetic oligonucleotide
gccagtgggcagtctgtcgtaacgggcaactctgcggcggaaccgactactttggg

SEQ ID NO: 18871 - DNA, 57 bp, Artificial
  Synthetic oligonucleotide
ctgtatgtttactattgcacgggagccccggagcgggaaagtcagtggccactaatc

SEQ ID NO: 18872 - DNA, 56 bp, Artificial
  Synthetic oligonucleotide
gatttcgtgttccttggatttctgatacaccctatcgagtaaacaggtacacgaag

SEQ ID NO: 18873 - DNA, 56 bp, Artificial
  Synthetic oligonucleotide
ctagctgttggatcccccgggcacccagacaggccccatacaagaagaggtacaac

SEQ ID NO: 18874 - DNA, 58 bp, Artificial
  Synthetic oligonucleotide
cggcggtttgttgcgctgtgaacacggtgtgatggggattcttactgttggaggtagc

SEQ ID NO: 18875 - DNA, 57 bp, Artificial
  Synthetic oligonucleotide
gattcgcaccgttccggtcggaagagccctacacctaccttcattcaaggcgctcga

SEQ ID NO: 18876 - DNA, 59 bp, Artificial
  Synthetic oligonucleotide
gcaccacccccgtggtgacacggttgcttgcccgcgtgtgctctcgggttcagtcgcga

SEQ ID NO: 18877 - DNA, 58 bp, Artificial
  Synthetic oligonucleotide
ctgatacaccctatcgagtaaataggtacacgaagtcggcacatcaaaaaggtgagta

SEQ ID NO: 18878 - DNA, 57 bp, Artificial
  Synthetic oligonucleotide
gctcctgtattccggtacacttgcacgccagtttgccctcccttcctgtaacgtaga

SEQ ID NO: 18879 - DNA, 53 bp, Artificial
  Synthetic oligonucleotide
gttaaccggctacctacttcgagaagtctagtaataccattgaagttttgttg

SEQ ID NO: 18880 - DNA, 59 bp, Artificial
  Synthetic oligonucleotide
cctacagatcgaaagagtgctatgttaggcacccacataatttgggattttgggctaca

SEQ ID NO: 18881 - DNA, 57 bp, Artificial
  Synthetic oligonucleotide
ctgcctaagacgtcctaggtctacgctgtgcgggccgaagtaagcttaggaataaca

SEQ ID NO: 18882 - DNA, 55 bp, Artificial
  Synthetic oligonucleotide
ttatccatgactcccacatataacacccttaaatataattacccaacgaaagttg

SEQ ID NO: 18883 - DNA, 55 bp, Artificial
  Synthetic oligonucleotide
ccccctctacgtccgcatctccgacaaccggatcctggatctcgactttcccgga

SEQ ID NO: 18884 - DNA, 55 bp, Artificial
  Synthetic oligonucleotide
acagcggttgagacgggggcaactaaccctttggaaccatccgacactgttcaga

SEQ ID NO: 18885 - DNA, 58 bp, Artificial
  Synthetic oligonucleotide
catggagggcctggacatgggacaggctgcagggtacccctggaacacccttgggcgc

SEQ ID NO: 18886 - DNA, 52 bp, Artificial
  Synthetic oligonucleotide
acctttctcgcaagacctgggggcgcctttcaggttcagggtggggtactct

SEQ ID NO: 18887 - DNA, 57 bp, Artificial
  Synthetic oligonucleotide
ctataaacccaatagtagacctggcagatgaggctagaaattccccactggtaacag

SEQ ID NO: 18888 - DNA, 58 bp, Artificial
  Synthetic oligonucleotide
aaggaggccgcagtgccgttgaaaagcccgtccgctgaggcgtgtggttatagtgaca

SEQ ID NO: 18889 - DNA, 59 bp, Artificial
  Synthetic oligonucleotide
tccgttggactaaggacgcaaaatctacccaggaccacgtgagatcactgtgcttattg

SEQ ID NO: 18890 - DNA, 58 bp, Artificial
  Synthetic oligonucleotide
acctaggtcggactgggtatactatacacgtacagtgcaacgcatcaaagtttcacca

SEQ ID NO: 18891 - DNA, 57 bp, Artificial
  Synthetic oligonucleotide
ttacgtagagcaacttggaaacgcctttgggtcaggattcactaaccaagtctgtga

SEQ ID NO: 18892 - DNA, 50 bp, Artificial
  Synthetic oligonucleotide
tagtgccaccccccgtcctccctattccaactacccgaccctaacccagg

SEQ ID NO: 18893 - DNA, 56 bp, Artificial
  Synthetic oligonucleotide
aggtaggtacaagatcttggatgcaactcaacaaaacggacactcggctaacacct

SEQ ID NO: 18894 - DNA, 58 bp, Artificial
  Synthetic oligonucleotide
tacctctggatatgagtactggggcttcctccgtcgttccaataacggtcacagtggc

SEQ ID NO: 18895 - DNA, 58 bp, Artificial
  Synthetic oligonucleotide
cgtcgcaagtggaacctagtgatacggtgcaaacacgtcacgtttgtaactatcacac

SEQ ID NO: 18896 - DNA, 56 bp, Artificial
  Synthetic oligonucleotide
aagcaaggagccacgaatttcgaacttttacaacaagctggtgacgtggagaccaa

SEQ ID NO: 18897 - DNA, 56 bp, Artificial
  Synthetic oligonucleotide
ggccgtcagagagtactgtaaggaaaaaggatggttggtgcccgagattaactcta

SEQ ID NO: 18898 - DNA, 54 bp, Artificial
  Synthetic oligonucleotide
cgccacttgttgtgctcttggcgtttttggaaccacctatttagttccctacca

SEQ ID NO: 18899 - DNA, 55 bp, Artificial
  Synthetic oligonucleotide
gttgctgtcgtaatacatggcgaaccgggtacgggtaaatctatgactacaaact

SEQ ID NO: 18900 - DNA, 59 bp, Artificial
  Synthetic oligonucleotide
agaagatagtgtcttcggtacagagggtctggaagcacttgaccttaccaccagtgctg

SEQ ID NO: 18901 - DNA, 56 bp, Artificial
  Synthetic oligonucleotide
ctcccgtggcgttgacaaagcgctcgacgggattgagggcgccggcaaacttgccg

SEQ ID NO: 18902 - DNA, 58 bp, Artificial
  Synthetic oligonucleotide
tctaaacctgtctctactactctttccttcgagcgggctgtttcacagaacgctcctc

SEQ ID NO: 18903 - DNA, 51 bp, Artificial
  Synthetic oligonucleotide
tccgccttggtaacaaggacccacggggccgaaagccacgtcctaacggac

SEQ ID NO: 18904 - DNA, 58 bp, Artificial
  Synthetic oligonucleotide
aggtacacatgtcatttgggattttggtcttcaatcctcagccacccttctaatccca

SEQ ID NO: 18905 - DNA, 58 bp, Artificial
  Synthetic oligonucleotide
ccttccaaactctcgaaccatgatgctacgtccgtggacaagccgactgagccgggag

SEQ ID NO: 18906 - DNA, 57 bp, Artificial
  Synthetic oligonucleotide
ggtatccacgcagaagactggggcacacgagaccggtttgaacgccagtaataattc

SEQ ID NO: 18907 - DNA, 56 bp, Artificial
  Synthetic oligonucleotide
acggaaagatcaacatgccaatgtccgtaaaaacctgtgacgaggagtgttgcccg

SEQ ID NO: 18908 - DNA, 53 bp, Artificial
  Synthetic oligonucleotide
ttagcccccttcggttataagattactcctgccaacaagaccactacttttcc

SEQ ID NO: 18909 - DNA, 56 bp, Artificial
  Synthetic oligonucleotide
ctcaacagtcgccacacccccagtgtggttccgagcaagcacttctgttccccggt

SEQ ID NO: 18910 - DNA, 51 bp, Artificial
  Synthetic oligonucleotide
accaacatgtatttggtcgtaacgggtaactgtgggacggaaccgactact

SEQ ID NO: 18911 - DNA, 58 bp, Artificial
  Synthetic oligonucleotide
cctgtcgctttgaaagtgaaagctaagaacttgattgtcactgagagtggtgcccccc

SEQ ID NO: 18912 - DNA, 55 bp, Artificial
  Synthetic oligonucleotide
ctacctactctctaccaccggaccctagccatttcgacgggtacaagcagcaagg

SEQ ID NO: 18913 - DNA, 59 bp, Artificial
  Synthetic oligonucleotide
tatggtagtaacccccctcaaatatgctgacggggcatcccctacagtgcaaatgactc

SEQ ID NO: 18914 - DNA, 58 bp, Artificial
  Synthetic oligonucleotide
gtaggcgtagcggctacttgagtgccagcggactacccctagtggtaacactagcctc

SEQ ID NO: 18915 - DNA, 57 bp, Artificial
  Synthetic oligonucleotide
aaggtacccataggtaaccttaagcgactatggatctgatcaggggcccaccatgta

SEQ ID NO: 18916 - DNA, 52 bp, Artificial
  Synthetic oligonucleotide
agcacttctgtttccccggcgcaacgcgtcgttacccgcccaacctactacg

SEQ ID NO: 18917 - DNA, 58 bp, Artificial
  Synthetic oligonucleotide
aaccgctatagtacttcgagaaacctagtattgccttcggagtgttgatgcgttgcgc

SEQ ID NO: 18918 - DNA, 59 bp, Artificial
  Synthetic oligonucleotide
acccactgcacgaatgattcgctatgagttccctaccaaaacaggacaatgtggtggtg

SEQ ID NO: 18919 - DNA, 56 bp, Artificial
  Synthetic oligonucleotide
ggaaaacccgtgtcattgacgtggcggggtttgggcatgcaatagttggccggatg

SEQ ID NO: 18920 - DNA, 57 bp, Artificial
  Synthetic oligonucleotide
tttgaaagtgaaagctaagaacttgattgtcactgagagtggtgcccccccgaccga

SEQ ID NO: 18921 - DNA, 57 bp, Artificial
  Synthetic oligonucleotide
cttactcgccccctggagcaaaccccccaacagacagaaagcaggcgatgctaggaa

SEQ ID NO: 18922 - DNA, 55 bp, Artificial
  Synthetic oligonucleotide
gtttaccaaccatgctgaccccgggcagtaatcagtttctcacctccgacgactt

SEQ ID NO: 18923 - DNA, 59 bp, Artificial
  Synthetic oligonucleotide
acacagtgtcggcgcaaccctcgaggcactgttccaaggccctccaatatacagggaga

SEQ ID NO: 18924 - DNA, 54 bp, Artificial
  Synthetic oligonucleotide
cgttatccgccaattaactacgcaacggctagtaatatcatgtaacttttaggg

SEQ ID NO: 18925 - DNA, 56 bp, Artificial
  Synthetic oligonucleotide
attcaaccagttaagccagtattcaacgggctccgacacacagtggttaacccgca

SEQ ID NO: 18926 - DNA, 59 bp, Artificial
  Synthetic oligonucleotide
taccccacaggtaactgtgtctcagcctgcgtggcggccaacccgactcatgtcgggac

SEQ ID NO: 18927 - DNA, 59 bp, Artificial
  Synthetic oligonucleotide
ccccacaggtaactgtgtctcagcctgcgtggcggccaacccagcttttgctgggacgc

SEQ ID NO: 18928 - DNA, 51 bp, Artificial
  Synthetic oligonucleotide
cgcttttggcaacttccgtggtttcgttcctcgcaacccgcccaaacttac

SEQ ID NO: 18929 - DNA, 57 bp, Artificial
  Synthetic oligonucleotide
cgatctacggtcttgactggaggcttctgcccggtggtacattctgttaagggccaa

SEQ ID NO: 18930 - DNA, 59 bp, Artificial
  Synthetic oligonucleotide
ttaactcgattgcagccgcttggaaggatttggcaaacaagtgctacgcctactcccgc

SEQ ID NO: 18931 - DNA, 54 bp, Artificial
  Synthetic oligonucleotide
attcgtcactcaaactggacacttgccataattcccgtggcccccctaaagtac

SEQ ID NO: 18932 - DNA, 55 bp, Artificial
  Synthetic oligonucleotide
tcgtgtcgggtggggatgactttaccctcagaatgccaatttccccaaccaagta

SEQ ID NO: 18933 - DNA, 52 bp, Artificial
  Synthetic oligonucleotide
ggacgttcccccctttcaccactgtatttggggacgccaactgttaggacgc

SEQ ID NO: 18934 - DNA, 54 bp, Artificial
  Synthetic oligonucleotide
aggatgcccttcaggtaccccgaggtaacacgcgaaactcgggatctgagaagg

SEQ ID NO: 18935 - DNA, 59 bp, Artificial
  Synthetic oligonucleotide
ggatccaaagaacactcaagaccacgttcgatcgttgtgcttattggcttggcataacg

SEQ ID NO: 18936 - DNA, 59 bp, Artificial
  Synthetic oligonucleotide
caggctcctttatggccacaggcaaaatgttgatcgcttacacaccgccaggtggggcc

SEQ ID NO: 18937 - DNA, 54 bp, Artificial
  Synthetic oligonucleotide
gcaaacccaggtaccgtcaccggttctgctgtggggtgtaacccagatactttc

SEQ ID NO: 18938 - DNA, 57 bp, Artificial
  Synthetic oligonucleotide
agagctccagaaagaagagtggtcacccaaggtccagaggaagagtttggtcgttca

SEQ ID NO: 18939 - DNA, 54 bp, Artificial
  Synthetic oligonucleotide
gcagggcgtcgtaacgggcaactctgtggcggaaccgactactttgggtgtccg

SEQ ID NO: 18940 - DNA, 54 bp, Artificial
  Synthetic oligonucleotide
ccaagttaaagacgtacgtgcttggtgtccacgcgccccgcgaatggcccctta

SEQ ID NO: 18941 - DNA, 50 bp, Artificial
  Synthetic oligonucleotide
acttcctgtcgcaaagccaaaaggaacgttcccggtgacccaaagggagt

SEQ ID NO: 18942 - DNA, 57 bp, Artificial
  Synthetic oligonucleotide
aagtacagagtcaacaagttccaagtcaataatgaactatggcagggtgttaaggcc

SEQ ID NO: 18943 - DNA, 56 bp, Artificial
  Synthetic oligonucleotide
attcttggagtgctcgttgggggatggtttgtgtataagcatttctcccgaaaaga

SEQ ID NO: 18944 - DNA, 59 bp, Artificial
  Synthetic oligonucleotide
cagtagttggcggaggattcctgacaacggtagaccagagttcagttagcacggctaca

SEQ ID NO: 18945 - DNA, 55 bp, Artificial
  Synthetic oligonucleotide
tgaactacaaaacatcggtaggtgccattaggtttaatactggacaaactacaaa

SEQ ID NO: 18946 - DNA, 53 bp, Artificial
  Synthetic oligonucleotide
cagtaacattagggtcgtaatgagcaatttcgggacgggaccgactactttgg

SEQ ID NO: 18947 - DNA, 53 bp, Artificial
  Synthetic oligonucleotide
gtattaggtctaaaaccattgttccacagggcttaccaactaccaccctacca

SEQ ID NO: 18948 - DNA, 55 bp, Artificial
  Synthetic oligonucleotide
aggcaatccttctcacaacaagttgaaaccccccagcttacgaccagttatggta

SEQ ID NO: 18949 - DNA, 59 bp, Artificial
  Synthetic oligonucleotide
cactggacattcccactgaagaattaacactcaaagaggcactctacggagtggatggg

SEQ ID NO: 18950 - DNA, 59 bp, Artificial
  Synthetic oligonucleotide
ctctatggtaccagacaaatttcgtcgtccctataggtgcgccaactactgcttatata

SEQ ID NO: 18951 - DNA, 57 bp, Artificial
  Synthetic oligonucleotide
gttttcgtggaagctagtgagtactacccggcaaggtaccaatctcacctcatgtta

SEQ ID NO: 18952 - DNA, 59 bp, Artificial
  Synthetic oligonucleotide
aaattcagtggatgaagcccaataaggagactggcaggttgaacatcaatgggcccacc

SEQ ID NO: 18953 - DNA, 57 bp, Artificial
  Synthetic oligonucleotide
aactacccaagaggctgctaacgccgtggttggttatggtgaatggccctcatacat

SEQ ID NO: 18954 - DNA, 59 bp, Artificial
  Synthetic oligonucleotide
atcactcctgttaccgcaatgactacatacgggtttggacatcaaaataaggcagtgta

SEQ ID NO: 18955 - DNA, 58 bp, Artificial
  Synthetic oligonucleotide
gtggttccctgggtttccgcaagtcactataggcttaccacacctgatacatactcaa

SEQ ID NO: 18956 - DNA, 56 bp, Artificial
  Synthetic oligonucleotide
cggggaaaaagcacctgtagtactatcaccaaaagatcccagattacttgtagatc

SEQ ID NO: 18957 - DNA, 58 bp, Artificial
  Synthetic oligonucleotide
tccagccgactggcaaagaatcccagtccccgttgttgaggcaagaccacaacatcct

SEQ ID NO: 18958 - DNA, 57 bp, Artificial
  Synthetic oligonucleotide
cccgtttgaggaggccgggtatgaaataccctgccacgagcgcctcaatgaggagtg

SEQ ID NO: 18959 - DNA, 58 bp, Artificial
  Synthetic oligonucleotide
ccgcgtcatgtgctgatgccgcgtcggaaaaaatcctggcggtagaaaggtattacac

SEQ ID NO: 18960 - DNA, 55 bp, Artificial
  Synthetic oligonucleotide
cagtttttacgtcattgtctactagtggttattctactaagcttgtttctgaacc

SEQ ID NO: 18961 - DNA, 57 bp, Artificial
  Synthetic oligonucleotide
acaacaacgtcacctggactaccctacacgacagcggggattccaagagaggcgctg

SEQ ID NO: 18962 - DNA, 59 bp, Artificial
  Synthetic oligonucleotide
aaattacagcaaaatatccacaggctaaggagtgaattttcaatctatgatgaggttag

SEQ ID NO: 18963 - DNA, 59 bp, Artificial
  Synthetic oligonucleotide
cacttccaggcccaaatcctataagggcaagacagctagctaggtctcttggacaagag

SEQ ID NO: 18964 - DNA, 59 bp, Artificial
  Synthetic oligonucleotide
gctttagatctctgaagggagtgtctccaattatttggacccaccattgcagagtttct

SEQ ID NO: 18965 - DNA, 59 bp, Artificial
  Synthetic oligonucleotide
ctaggctaaaggccataagtgcatgcctcaaaacctcattactacctgcccacgaaaca

SEQ ID NO: 18966 - DNA, 58 bp, Artificial
  Synthetic oligonucleotide
ataagtgacaaacaactgttctgcggtctagttgctaggtggcgcttagcaacctact

SEQ ID NO: 18967 - DNA, 58 bp, Artificial
  Synthetic oligonucleotide
gaacaccccaacaggaagtgcaagtggactccatcccacctcaggatacaatccccag

SEQ ID NO: 18968 - DNA, 58 bp, Artificial
  Synthetic oligonucleotide
acatgttttgcgatcctgaaatatttggctacctacccagttgatactggctgggggc

SEQ ID NO: 18969 - DNA, 59 bp, Artificial
  Synthetic oligonucleotide
cagggctctccccctagaacgcggagcgaggaactgaggagagcggccacagtccacta

SEQ ID NO: 18970 - DNA, 58 bp, Artificial
  Synthetic oligonucleotide
gtggagaccccttggaaatgcagggagtgctaatgaattacaggacaaagtacccaga

SEQ ID NO: 18971 - DNA, 53 bp, Artificial
  Synthetic oligonucleotide
tccatgggtaggtttacatttaaggctttacctccacacaaatctaataaccc

SEQ ID NO: 18972 - DNA, 54 bp, Artificial
  Synthetic oligonucleotide
tagcacatacccttaaccctgatgtcccccctaaaaaacagcttcctacctata

SEQ ID NO: 18973 - DNA, 57 bp, Artificial
  Synthetic oligonucleotide
atattctgtttacaagcgtaatcattgagtaatgcataattaaaaggtcccgccaaa

SEQ ID NO: 18974 - DNA, 54 bp, Artificial
  Synthetic oligonucleotide
tggataaatcccttagaatgggggccaaccctctttcagagggttgggcaagcc

SEQ ID NO: 18975 - DNA, 54 bp, Artificial
  Synthetic oligonucleotide
aagtttggtcttggggaggcgcgggtagaggtctccccgactggcttatcaaca

SEQ ID NO: 18976 - DNA, 53 bp, Artificial
  Synthetic oligonucleotide
caatactggtgccctttgtaagtgttttacaggtaagtaaggcctacaacagg

SEQ ID NO: 18977 - DNA, 56 bp, Artificial
  Synthetic oligonucleotide
gaaaaccgaggtggtgggtgtctcttccctgacaaatgtgcattcggggggtctga

SEQ ID NO: 18978 - DNA, 57 bp, Artificial
  Synthetic oligonucleotide
tgggttgggggtaaaatcaacgacctgcctacatctcactctcacagtgtggggtat

SEQ ID NO: 18979 - DNA, 55 bp, Artificial
  Synthetic oligonucleotide
gcgcgcgaaagctaacaatgcctaacggaacgcctaccctaaacaggcccttagc

SEQ ID NO: 18980 - DNA, 54 bp, Artificial
  Synthetic oligonucleotide
gtccaccgagacaaccggccctagcgtcgcgactaacgcaaccgaaccgtccga

SEQ ID NO: 18981 - DNA, 58 bp, Artificial
  Synthetic oligonucleotide
agagttcctgaatgttacgtagcacagtccggaagcgttctttgagacgctcatccct

SEQ ID NO: 18982 - DNA, 57 bp, Artificial
  Synthetic oligonucleotide
ctaaaatctatttgtcttacaaatctagcttgcagggttttagggacaggatactca

SEQ ID NO: 18983 - DNA, 57 bp, Artificial
  Synthetic oligonucleotide
ctgaggagcattagaaaccacccaccgggtgttttcaagtagccttgctaggccatc

SEQ ID NO: 18984 - DNA, 55 bp, Artificial
  Synthetic oligonucleotide
accttaaagttttaaatctctgtaggtagtttgtccaattatgtcacaccacaga

SEQ ID NO: 18985 - DNA, 55 bp, Artificial
  Synthetic oligonucleotide
atgttttgcgagcctaggaatcttggccttgtccccagttaaactggacaaaggc

SEQ ID NO: 18986 - DNA, 58 bp, Artificial
  Synthetic oligonucleotide
cacgaaacatccctctttacaagtgacacttgctcgcgtgacaacctcacccccacag

SEQ ID NO: 18987 - DNA, 57 bp, Artificial
  Synthetic oligonucleotide
gggtgtctccaagaaccttctcccagcaatgaagagcttcttgggttaagtcacacc

SEQ ID NO: 18988 - DNA, 54 bp, Artificial
  Synthetic oligonucleotide
tacctgagaatcaagttaattaagtttcaaataggtggagaacttcttacctta

SEQ ID NO: 18989 - DNA, 58 bp, Artificial
  Synthetic oligonucleotide
gaggaaactgtggtatctgtggtatctacctgctccacttgactgcctggggactttt

SEQ ID NO: 18990 - DNA, 58 bp, Artificial
  Synthetic oligonucleotide
ccactacccaatctaaatgaggatctaacttgtggaaatatactaatgtgggaggctg

SEQ ID NO: 18991 - DNA, 58 bp, Artificial
  Synthetic oligonucleotide
acgaaacatctctattaacttgtgacacttgctcgcgtgccagtctaaccccaacact

SEQ ID NO: 18992 - DNA, 58 bp, Artificial
  Synthetic oligonucleotide
cttgcaaagccgtcattgtggtgaaactcgaccaccgcccttgtccttgcaaggactg

SEQ ID NO: 18993 - DNA, 59 bp, Artificial
  Synthetic oligonucleotide
aggtacagagccctctaaatgatccctgaggttatcgagattcatcatccctaatcccg

SEQ ID NO: 18994 - DNA, 59 bp, Artificial
  Synthetic oligonucleotide
tttggacacagttcagctccgggtggagaccatttggctgacgtcccagatggatttgt

SEQ ID NO: 18995 - DNA, 59 bp, Artificial
  Synthetic oligonucleotide
cctcagtagtcgatataaccgtgtttccgcttacgcatatgtctgtctctccaccgtcc

SEQ ID NO: 18996 - DNA, 56 bp, Artificial
  Synthetic oligonucleotide
ccgcattccgattccatcagctgattaacttcaacgtttatacaacccgctttaac

SEQ ID NO: 18997 - DNA, 57 bp, Artificial
  Synthetic oligonucleotide
tgttggaagacgttcaagcttcgtctgtgtctaggcagtttacgtccctgggtaaga

SEQ ID NO: 18998 - DNA, 55 bp, Artificial
  Synthetic oligonucleotide
gttggaaagatattcgctagttggtaacgaaacggtaaagtgcatagatggaaag

SEQ ID NO: 18999 - DNA, 52 bp, Artificial
  Synthetic oligonucleotide
ctagaagcccccccacccgtcggaacgtacacacccagatttggaccttcca

SEQ ID NO: 19000 - DNA, 54 bp, Artificial
  Synthetic oligonucleotide
gaaccgcttaaaaggaaacaagtcgcacacgttagacggtagctttcggagcga

SEQ ID NO: 19001 - DNA, 55 bp, Artificial
  Synthetic oligonucleotide
acgtttttgttgagcgttactaagtcggacaggacctccgtccagcagaccgcgc

SEQ ID NO: 19002 - DNA, 59 bp, Artificial
  Synthetic oligonucleotide
gtgggacccgcacgacaaaggaagcgagctcatgattcgcctgtatcccaacgcgtcct

SEQ ID NO: 19003 - DNA, 53 bp, Artificial
  Synthetic oligonucleotide
gggtttgctataatcgtcgtgggtttgaaaaatgtatgcggcgtaaaattaaa

SEQ ID NO: 19004 - DNA, 55 bp, Artificial
  Synthetic oligonucleotide
cgaaaggtgatttgacaacggaaagacttccttcatcaaccagggcactaatagg

SEQ ID NO: 19005 - DNA, 55 bp, Artificial
  Synthetic oligonucleotide
actcaaccgaggatctggacgtccccgtctctagccgaacggcgttgtctttgtc

SEQ ID NO: 19006 - DNA, 55 bp, Artificial
  Synthetic oligonucleotide
ctcaacttcgtggcttagtcaaaaatgtcgggtctattcactaccgtccgttgcg

SEQ ID NO: 19007 - DNA, 58 bp, Artificial
  Synthetic oligonucleotide
taaaagacctttgtgtgtataacactcaagttatgaccaatcttacgttggcgagaga

SEQ ID NO: 19008 - DNA, 59 bp, Artificial
  Synthetic oligonucleotide
gttggtctattagcaagagccgcatcctattggggtggtgacgaacgtcctacaagcgc

SEQ ID NO: 19009 - DNA, 56 bp, Artificial
  Synthetic oligonucleotide
tcgctgtaaatccgtacgatgaacctacatgaatggcgccctttgaaaaaccgtta

SEQ ID NO: 19010 - DNA, 56 bp, Artificial
  Synthetic oligonucleotide
cctttactcgctggagaatcgttatatgtctcataaggtccgtaaattttagctag

SEQ ID NO: 19011 - DNA, 55 bp, Artificial
  Synthetic oligonucleotide
ggaatatgtgcaataaaaacgttaatggatgtaaccacaaaggcgagtacaaaaa

SEQ ID NO: 19012 - DNA, 59 bp, Artificial
  Synthetic oligonucleotide
aggagctattctaccataacaacattctggtatttcgaggcttatatctgttcttacaa

SEQ ID NO: 19013 - DNA, 57 bp, Artificial
  Synthetic oligonucleotide
gttatctctagtagtcgctatatcttgtactaagttatccgcctcgttttgtaaaga

SEQ ID NO: 19014 - DNA, 51 bp, Artificial
  Synthetic oligonucleotide
cggatgggattcttcggtaacttggaggtaggtattactttagttagggat

SEQ ID NO: 19015 - DNA, 59 bp, Artificial
  Synthetic oligonucleotide
atgtaagtctgtctcgacgctcgtaatagtttctgcttatattgtacgcgtctccgtac

SEQ ID NO: 19016 - DNA, 52 bp, Artificial
  Synthetic oligonucleotide
taaacataggtaattccgtaaatattagtagtttgcctggttgggtaacacc

SEQ ID NO: 19017 - DNA, 59 bp, Artificial
  Synthetic oligonucleotide
gtattgaaccttagagacatccacaaatagttaggaagcatgagtagttcaagtaacga

SEQ ID NO: 19018 - DNA, 58 bp, Artificial
  Synthetic oligonucleotide
cgacgagtagccgccaaaactgaataactatcggacttcgtaaactcgcagacatgcc

SEQ ID NO: 19019 - DNA, 58 bp, Artificial
  Synthetic oligonucleotide
gaaaaaatactaggtctatgtggcataatatctgaaaaggttgttagtgaaacatata

SEQ ID NO: 19020 - DNA, 51 bp, Artificial
  Synthetic oligonucleotide
ctaaagtaatacctacctccaagttaccgaagaatcccatccgttttctac

SEQ ID NO: 19021 - DNA, 52 bp, Artificial
  Synthetic oligonucleotide
gttcggtaatatttgaaacgtcaagggaatttgtcgttgttgaaaggataaa

SEQ ID NO: 19022 - DNA, 54 bp, Artificial
  Synthetic oligonucleotide
gaatattggaagccaggttttaattcgtggaaacgtctacctccattaaatgaa

SEQ ID NO: 19023 - DNA, 58 bp, Artificial
  Synthetic oligonucleotide
ctttcggcaacttgaatcaacatgtatttgctagaactaaaagtgaagggttatcatg

SEQ ID NO: 19024 - DNA, 57 bp, Artificial
  Synthetic oligonucleotide
cgtgtatatgatgaattaacgtcgaaatataagtacgccgatttcgaacgtgttgtc

SEQ ID NO: 19025 - DNA, 59 bp, Artificial
  Synthetic oligonucleotide
tgcactgttctgcggaccggattggcacggcttgttccaaaggcgtagtctcggtgtct

SEQ ID NO: 19026 - DNA, 58 bp, Artificial
  Synthetic oligonucleotide
ctaaaggatatcgataacaaatccatacctgttatcagcgacgtttcgcaattaggat

SEQ ID NO: 19027 - DNA, 58 bp, Artificial
  Synthetic oligonucleotide
ggaaaaatcgtacgtcatgacgactctgaggtgttaatccaatatcctatgtggtcct

SEQ ID NO: 19028 - DNA, 59 bp, Artificial
  Synthetic oligonucleotide
acaaccccagagctccataaacgcaagctacaaaagagtatgggaactcatccgatcta

SEQ ID NO: 19029 - DNA, 50 bp, Artificial
  Synthetic oligonucleotide
actgtaccgaagtaataagttgtttaacggggtccgacggtaggaatgtg

SEQ ID NO: 19030 - DNA, 58 bp, Artificial
  Synthetic oligonucleotide
cgtttcagttgatgagaccaccaaatatgacaccagcggtagcggcgttatttccgaa

SEQ ID NO: 19031 - DNA, 51 bp, Artificial
  Synthetic oligonucleotide
cgttagcgggaataaccaataagggcggaaaagttaaatataggtatataa

SEQ ID NO: 19032 - DNA, 59 bp, Artificial
  Synthetic oligonucleotide
gcaccttcatattggatacacgatgtaaaacaatactctaatctaaaatttgagacgtg

SEQ ID NO: 19033 - DNA, 59 bp, Artificial
  Synthetic oligonucleotide
acagtataaagatgtagctggtccacagcccgcagatagagataacgccgttaaggagg

SEQ ID NO: 19034 - DNA, 59 bp, Artificial
  Synthetic oligonucleotide
attcaagttgtttcctatttcttgtctctgagtcccttgagtatgacacctagtctgta

SEQ ID NO: 19035 - DNA, 59 bp, Artificial
  Synthetic oligonucleotide
gctagattcgataacgtgttcagacggtctccattcgtagccactatgcccgtcgaaac

SEQ ID NO: 19036 - DNA, 57 bp, Artificial
  Synthetic oligonucleotide
tgtacgtgaactcaattctgccgtggagtgaacttgatccggaggaggaatttttac

SEQ ID NO: 19037 - DNA, 56 bp, Artificial
  Synthetic oligonucleotide
tcttacgcgaaactctttgacgtatacttcgaaggtgagttagacggcgctcccta

SEQ ID NO: 19038 - DNA, 59 bp, Artificial
  Synthetic oligonucleotide
catgtccgaggttatgtgcgaatttcttaaacaacgcgcgtatggcaacacaccccaca

SEQ ID NO: 19039 - DNA, 59 bp, Artificial
  Synthetic oligonucleotide
atcaccatctagtgtatctactacggtaagtacagcactaataggaggtaacacaatac

SEQ ID NO: 19040 - DNA, 59 bp, Artificial
  Synthetic oligonucleotide
agatcggcggtaggtaatacaatgtccccagttagatttgtgaccgtgaatgatggcga

SEQ ID NO: 19041 - DNA, 59 bp, Artificial
  Synthetic oligonucleotide
tcttggtagcacatgatagggtaacgtaccctcagaagatacccgtggagatccgagcg

SEQ ID NO: 19042 - DNA, 59 bp, Artificial
  Synthetic oligonucleotide
aaccaaaccttggcgctctttaaaatcacgcggcaatgactcaatcacagcagtccggc

SEQ ID NO: 19043 - DNA, 59 bp, Artificial
  Synthetic oligonucleotide
aaccgagcgatacaactaagtaagactcagaatgatgttgctaattactacgccgcctg

SEQ ID NO: 19044 - DNA, 59 bp, Artificial
  Synthetic oligonucleotide
gtatccatcaggccgtgcggacacttcgactcaccataccgtattgctccaaggtttag

SEQ ID NO: 19045 - DNA, 56 bp, Artificial
  Synthetic oligonucleotide
agtccgacgcgacactattaaacgatttcttcactgccatttcagcgggtccaaag

SEQ ID NO: 19046 - DNA, 57 bp, Artificial
  Synthetic oligonucleotide
gaatcaatatccggcgctagcgtctgaaatttataacgtttatagttttagagatcc

SEQ ID NO: 19047 - DNA, 58 bp, Artificial
  Synthetic oligonucleotide
tacgatcgagggaattgatgaacaccatggacggtcaattaaggtcattggggctggt

SEQ ID NO: 19048 - DNA, 59 bp, Artificial
  Synthetic oligonucleotide
gtacacaatgggatcaagcggcagttttatattcgaattatattgttaatagactaaga

SEQ ID NO: 19049 - DNA, 59 bp, Artificial
  Synthetic oligonucleotide
ccttaccttcgttcatattttagacgaccattcgaactaactgcatcaaatctagcatc

SEQ ID NO: 19050 - DNA, 57 bp, Artificial
  Synthetic oligonucleotide
gttaaattgttccaggatggatagcgtcgagttcgccataataaacgaacaacgtca

SEQ ID NO: 19051 - DNA, 56 bp, Artificial
  Synthetic oligonucleotide
aagcttcctggggacgcgcgtacatacgttgcggtttatcgtcaggcttctcgtgt

SEQ ID NO: 19052 - DNA, 58 bp, Artificial
  Synthetic oligonucleotide
aagtgggatttggttccgatagagcgagatgtaaacacgacgtggatggatgggtatc

SEQ ID NO: 19053 - DNA, 58 bp, Artificial
  Synthetic oligonucleotide
aaacgtgatggtgatttacgtcggcgcgcacacattagacggagtcgtcgtgacgaaa

SEQ ID NO: 19054 - DNA, 57 bp, Artificial
  Synthetic oligonucleotide
tgacgaaaacatgtgatacggatattacgttgtgtttagtagttgggccctatgaaa

SEQ ID NO: 19055 - DNA, 55 bp, Artificial
  Synthetic oligonucleotide
aacaaacgctggctggtgtaacggttagtgtcggaggtgttgacatgagggcggg

SEQ ID NO: 19056 - DNA, 54 bp, Artificial
  Synthetic oligonucleotide
tgcacgaacctatatccttacgacccacgaaacccaaatgtaatacggaagaac

SEQ ID NO: 19057 - DNA, 58 bp, Artificial
  Synthetic oligonucleotide
attatgaagtgatcgaagatgtgtttaataataggactaacgaagttgtgtctaacta

SEQ ID NO: 19058 - DNA, 52 bp, Artificial
  Synthetic oligonucleotide
tacttattagcatacaaggaaaaaacgttaagtacactaaacaacgttaggc

SEQ ID NO: 19059 - DNA, 53 bp, Artificial
  Synthetic oligonucleotide
aacgttagtgaccgaaatgataaaggaattaagccgtatagttccggcccatg

SEQ ID NO: 19060 - DNA, 55 bp, Artificial
  Synthetic oligonucleotide
acaaagcgccgaaactcatcccgtacccgcagttggtctacttggaagtccgtca

SEQ ID NO: 19061 - DNA, 53 bp, Artificial
  Synthetic oligonucleotide
cctacccctggccgactcaacccttacctcgcatcaccgtcggtcctacctac

SEQ ID NO: 19062 - DNA, 53 bp, Artificial
  Synthetic oligonucleotide
ccccgtcggcctacccatcttcgctcgtgggggtcccaacgtacatgtggttg

SEQ ID NO: 19063 - DNA, 58 bp, Artificial
  Synthetic oligonucleotide
gtgccactccgaagagtgttaactacagctacgataactcttctaccagacgcggaaa

SEQ ID NO: 19064 - DNA, 58 bp, Artificial
  Synthetic oligonucleotide
attcagctgacggggcaactacatggtttttcaacccagtgattctcaggccgaataa

SEQ ID NO: 19065 - DNA, 58 bp, Artificial
  Synthetic oligonucleotide
aattcgcttattgggaccaccgatattctcatcaacccgtgtctgcggttagctactc

SEQ ID NO: 19066 - DNA, 59 bp, Artificial
  Synthetic oligonucleotide
cgaatgtttacgctcagtctgagatacctggggctgcgttatcgaccgagattagggat

SEQ ID NO: 19067 - DNA, 58 bp, Artificial
  Synthetic oligonucleotide
cagacgaaagagccatctcagcaaaatttccccgttttaaagatgcatcgcacttaaa

SEQ ID NO: 19068 - DNA, 57 bp, Artificial
  Synthetic oligonucleotide
gctttaggagaattaattcgcgacggtacagttgcaatatcatttggtcctgggatt

SEQ ID NO: 19069 - DNA, 56 bp, Artificial
  Synthetic oligonucleotide
gattacgaggaaggtccgattagggttgcgatacgtgttcggttactgaatgttca

SEQ ID NO: 19070 - DNA, 57 bp, Artificial
  Synthetic oligonucleotide
atcgtcgtagccatgttatgcggccagaccccgaccaacctgataccgtcccaccac

SEQ ID NO: 19071 - DNA, 54 bp, Artificial
  Synthetic oligonucleotide
acccaagttaaaattctacgttgtgtttccgctcgcgtcacgtctgtgcgttcc

SEQ ID NO: 19072 - DNA, 59 bp, Artificial
  Synthetic oligonucleotide
ctagtgtgttactaccagccacctacaccgccatatggcttgaaccctcacgcatttta

SEQ ID NO: 19073 - DNA, 57 bp, Artificial
  Synthetic oligonucleotide
agaacagaaagtagcgccagcgttttcgagctttgcgtctcctcatattcgtacggg

SEQ ID NO: 19074 - DNA, 53 bp, Artificial
  Synthetic oligonucleotide
cacccgacggttgcgcttgaatttttaaggcgtcgggccccgccattcttgac

SEQ ID NO: 19075 - DNA, 51 bp, Artificial
  Synthetic oligonucleotide
acctgtcaagaatccggaacctaaagggtacgtactgaacgttccaggacc

SEQ ID NO: 19076 - DNA, 56 bp, Artificial
  Synthetic oligonucleotide
aggctctcgattagttagaggaactagggctaaacgtataatcactcctaattatg

SEQ ID NO: 19077 - DNA, 57 bp, Artificial
  Synthetic oligonucleotide
tggtactacaccgaactgtgtactagttccccattagatgttggtggctcagggtta

SEQ ID NO: 19078 - DNA, 56 bp, Artificial
  Synthetic oligonucleotide
aacttgtagacagaaagcccaaatcgtaagttacacacttataattggatgatggg

SEQ ID NO: 19079 - DNA, 55 bp, Artificial
  Synthetic oligonucleotide
agcgagcatggttacctcttaccaggttatggaacacgtattacccgtcgtcaac

SEQ ID NO: 19080 - DNA, 55 bp, Artificial
  Synthetic oligonucleotide
aagcgaaatatatacccgtcagcctcagtgaagagggttacagggtcgttacgcc

SEQ ID NO: 19081 - DNA, 59 bp, Artificial
  Synthetic oligonucleotide
gtgcatcctaccttttggcagagaagtgacccgtgtccctcactctagatttaatgttg

SEQ ID NO: 19082 - DNA, 58 bp, Artificial
  Synthetic oligonucleotide
ttataaaggataggaggaaagttttgccagagcattatgacgccatattgggcggaat

SEQ ID NO: 19083 - DNA, 56 bp, Artificial
  Synthetic oligonucleotide
gtcaagctacaacatcactaccccctttccacaggcgactgtcgtacgaatcgttt

SEQ ID NO: 19084 - DNA, 59 bp, Artificial
  Synthetic oligonucleotide
gctatcttgtcaaagcttaaacctgtggcctctgatttttccgacttcagattggcgtg

SEQ ID NO: 19085 - DNA, 57 bp, Artificial
  Synthetic oligonucleotide
agtttcgcattgcctttaggaaatttcccagttatgtcaggaggcgctgtgtcgtta

SEQ ID NO: 19086 - DNA, 59 bp, Artificial
  Synthetic oligonucleotide
tcggtccaaggttaaaagataaggatctaatcaagatcaattctaggatcaaagctcta

SEQ ID NO: 19087 - DNA, 58 bp, Artificial
  Synthetic oligonucleotide
acgtatggcgcacggactatagctatagggttgtcgtcgggcggtacgcctcagtata

SEQ ID NO: 19088 - DNA, 56 bp, Artificial
  Synthetic oligonucleotide
gctactcaatacgggtgcgactccagaaggcactttcaaccccaacacccttcgta

SEQ ID NO: 19089 - DNA, 54 bp, Artificial
  Synthetic oligonucleotide
aatacccccgtccgcgcttccctcccctacactggcggtggagctcatttaaca

SEQ ID NO: 19090 - DNA, 58 bp, Artificial
  Synthetic oligonucleotide
agtaaacgtgcgacatagaatagggacaaactgtgaaatagtggcgtgttgtcaagga

SEQ ID NO: 19091 - DNA, 57 bp, Artificial
  Synthetic oligonucleotide
gtcaaccggagtatcggaactataccgagaggacgttactgtagattcaccaagtga

SEQ ID NO: 19092 - DNA, 57 bp, Artificial
  Synthetic oligonucleotide
tgtagttacgtatggggcacggactatagctatagggttgtcgtcaggtggtacgcc

SEQ ID NO: 19093 - DNA, 57 bp, Artificial
  Synthetic oligonucleotide
gagattgagtgggcgttaaccgagtgtgctcaagggtatgtcaccgttacaagtccc

SEQ ID NO: 19094 - DNA, 54 bp, Artificial
  Synthetic oligonucleotide
atgggttgccgcatccccaacactagccgacatcccccggtcggtaaagaatac

SEQ ID NO: 19095 - DNA, 59 bp, Artificial
  Synthetic oligonucleotide
attgaagatctaaggtatccatttgatataagatgcgacttcgaagaaacttcgttcca

SEQ ID NO: 19096 - DNA, 59 bp, Artificial
  Synthetic oligonucleotide
tcccatgtccgttcagatcgatggggtttatatccgaacagatgtgccgtatggaacgg

SEQ ID NO: 19097 - DNA, 59 bp, Artificial
  Synthetic oligonucleotide
acgtactttgatggggatgagcaatatggtcggagtcttttctcactagcacgacgtat

SEQ ID NO: 19098 - DNA, 57 bp, Artificial
  Synthetic oligonucleotide
acgtcttatatgatcataaagccctttgtcacgaataacgtggaggtgttctttgta

SEQ ID NO: 19099 - DNA, 58 bp, Artificial
  Synthetic oligonucleotide
acacggtgaattgtctgactcaacactggttcaaccgacgttagatggaccataccaa

SEQ ID NO: 19100 - DNA, 57 bp, Artificial
  Synthetic oligonucleotide
caagtttgaacagaataagtgatagacgtagttacacaactaactacattaatgcct

SEQ ID NO: 19101 - DNA, 59 bp, Artificial
  Synthetic oligonucleotide
tactggcctaatccctctcagattcgttatggcgccccgaatgtcttcggctcggctaa

SEQ ID NO: 19102 - DNA, 58 bp, Artificial
  Synthetic oligonucleotide
acgatcttcgaacgtgctaaacattagacgcagaattgaagaatctagaaggcgttta

SEQ ID NO: 19103 - DNA, 59 bp, Artificial
  Synthetic oligonucleotide
gtgcagtgaaagcagacttggtagaacttcaagatgcgtcgtcgaaaaaacggaatgac

SEQ ID NO: 19104 - DNA, 59 bp, Artificial
  Synthetic oligonucleotide
cggaatgaccccgcagatggtgagggaatacgcaatgtttcgaagacatcgcttcttaa

SEQ ID NO: 19105 - DNA, 59 bp, Artificial
  Synthetic oligonucleotide
ttcagaagtgtcatacaacgaaggaagcgattaccgtaactgcaattcaaatccagagg

SEQ ID NO: 19106 - DNA, 57 bp, Artificial
  Synthetic oligonucleotide
tcattaccggttcagaagatcaaacttaccggggcagaacacttaggtcgagcgagc

SEQ ID NO: 19107 - DNA, 54 bp, Artificial
  Synthetic oligonucleotide
aaaggccgaaccacgtacgcagtgggtcaggacggccctgtatacatagaaggg

SEQ ID NO: 19108 - DNA, 59 bp, Artificial
  Synthetic oligonucleotide
aaagatgggacgataccagattggaaagacttgggtgcattcttggatacgattctgaa

SEQ ID NO: 19109 - DNA, 57 bp, Artificial
  Synthetic oligonucleotide
ccgtttcagctggttggacagaattacgtttcgatcgggagaaatcatcgattggta

SEQ ID NO: 19110 - DNA, 58 bp, Artificial
  Synthetic oligonucleotide
agctggttggacagaattacgtttcgatcgggagaaatcatcgattggtattaggaga

SEQ ID NO: 19111 - DNA, 59 bp, Artificial
  Synthetic oligonucleotide
tcttcattatgtggtgggttctcggagggattagtttggtatcttccaatcacgcatcc

SEQ ID NO: 19112 - DNA, 54 bp, Artificial
  Synthetic oligonucleotide
acaataaagttagcgcggtttataggtgcaatagattacgcgcgaggttccctt

SEQ ID NO: 19113 - DNA, 52 bp, Artificial
  Synthetic oligonucleotide
acaattctcaaatgggccgtatttagttaaaaacactattaagttgaaacaa

SEQ ID NO: 19114 - DNA, 56 bp, Artificial
  Synthetic oligonucleotide
tagaaaaggctaatattgaaggtgggaagtattacgaacacgctcctatagagtta

SEQ ID NO: 19115 - DNA, 58 bp, Artificial
  Synthetic oligonucleotide
tatttcgtgaaatgtttaatcgaagaggatcaataaccatgcttaaatctcgtgtcgt

SEQ ID NO: 19116 - DNA, 59 bp, Artificial
  Synthetic oligonucleotide
gatcggagaggtcggttcttatgcccgcgatcatacggacgcattaggaaggttacatc

SEQ ID NO: 19117 - DNA, 56 bp, Artificial
  Synthetic oligonucleotide
aaccgaggaagatattcgaaccgtatggccatatttgactaagtactggcttaatc

SEQ ID NO: 19118 - DNA, 58 bp, Artificial
  Synthetic oligonucleotide
ttacccatagtacatccagctaagggaataatcatcgtcggaattgttccacacgtag

SEQ ID NO: 19119 - DNA, 59 bp, Artificial
  Synthetic oligonucleotide
atacacaaaagggcagagtgtggagaacgaatccgtatccatgcttgcggggtgcttta

SEQ ID NO: 19120 - DNA, 53 bp, Artificial
  Synthetic oligonucleotide
attgagaaactaggaactaatcactcggtgggagatttagttacggtctttac

SEQ ID NO: 19121 - DNA, 58 bp, Artificial
  Synthetic oligonucleotide
ggattgccactggttaaggtattcgggtcagacccgtggatattctcctggtacatgc

SEQ ID NO: 19122 - DNA, 57 bp, Artificial
  Synthetic oligonucleotide
ccggagttaaagtcgcgtgtgctacgtggtcgtggcgagtgggagaagtatggagcg

SEQ ID NO: 19123 - DNA, 58 bp, Artificial
  Synthetic oligonucleotide
aggtggaggcatattaaaagcgcaggacgttcactgtttgatagttatttagctcacg

SEQ ID NO: 19124 - DNA, 59 bp, Artificial
  Synthetic oligonucleotide
ataacgtacgcatttggtacgcacctactatgacggaggtcaatcatatcctgacgtta

SEQ ID NO: 19125 - DNA, 58 bp, Artificial
  Synthetic oligonucleotide
cgaatggtctcggttttaaagtacggaagacacgagagtttagatacatgcatcgtga

SEQ ID NO: 19126 - DNA, 59 bp, Artificial
  Synthetic oligonucleotide
gacgcgattggacgttaaacgacctatggcgtgagaatggacgttacgctacagatgtg

SEQ ID NO: 19127 - DNA, 59 bp, Artificial
  Synthetic oligonucleotide
acccgcaggggcacggttcccgatgcgcgatgcagttctttcacccgatgtgataatac

SEQ ID NO: 19128 - DNA, 58 bp, Artificial
  Synthetic oligonucleotide
ctgttctatctgacgaatcgtcggaatacgccggaatccgtcttccgtgtagtgtcgc

SEQ ID NO: 19129 - DNA, 58 bp, Artificial
  Synthetic oligonucleotide
ggggatagacttgtctgggcatctgtacgtgtcactggttacggacaaatacgtggcg

SEQ ID NO: 19130 - DNA, 59 bp, Artificial
  Synthetic oligonucleotide
tgacatagcaccaggtccatttgcagttagtgcgtttttaggttgtgtaccaggttcag

SEQ ID NO: 19131 - DNA, 59 bp, Artificial
  Synthetic oligonucleotide
aatggccattaactaaaacatcttatcacttcccccaagctattggagtgccatgtaca

SEQ ID NO: 19132 - DNA, 57 bp, Artificial
  Synthetic oligonucleotide
gggtggatctgcctatgttggacgtggtgcttctaccaacaagtcgtctgttaaaag

SEQ ID NO: 19133 - DNA, 53 bp, Artificial
  Synthetic oligonucleotide
cgagtcgtttggctcgtacccctggttcccttgcaacaaagcgtgaatccccc

SEQ ID NO: 19134 - DNA, 55 bp, Artificial
  Synthetic oligonucleotide
cccgcgcgatgttgagcctacttgggtagggcacctaggcggacttagtaaagaa

SEQ ID NO: 19135 - DNA, 55 bp, Artificial
  Synthetic oligonucleotide
catttaatgtttacagcgggacccaggtttacgaatataacccagaatatggcac

SEQ ID NO: 19136 - DNA, 55 bp, Artificial
  Synthetic oligonucleotide
tacaaacggaaaatggggataagagagggggcctcgatcgattcgtggctggaat

SEQ ID NO: 19137 - DNA, 58 bp, Artificial
  Synthetic oligonucleotide
tggacgattacgaatcacggcacgtcatgaattacgaattgaacagcttacccctaag

SEQ ID NO: 19138 - DNA, 56 bp, Artificial
  Synthetic oligonucleotide
tcctcacataaatgcaacggtcggtcgccaacgtacaccacctaaaggtctgtggt

SEQ ID NO: 19139 - DNA, 56 bp, Artificial
  Synthetic oligonucleotide
cggttgattcgtcaactttggtgaataagctcgagaatttggtatcgtttgctcct

SEQ ID NO: 19140 - DNA, 59 bp, Artificial
  Synthetic oligonucleotide
ctttgaagtccctcatgaatgtgggccactggtatttgaggcgtcaactgacgtgaacg

SEQ ID NO: 19141 - DNA, 56 bp, Artificial
  Synthetic oligonucleotide
agcgcccgatcttatccataatggtgtaccccagagactttccgatacaataattt

SEQ ID NO: 19142 - DNA, 59 bp, Artificial
  Synthetic oligonucleotide
gggactagacgctggattgcaaggtgatagttcgaaagcgacttacaacattggcctag

SEQ ID NO: 19143 - DNA, 55 bp, Artificial
  Synthetic oligonucleotide
attcaatctggtagtagacgtccaaacacagggaagattgttactaacgactaac

SEQ ID NO: 19144 - DNA, 59 bp, Artificial
  Synthetic oligonucleotide
ctaagcaatagaccggcttgcaacttgatccttaagcgaacgtgtaagtggtatcaaca

SEQ ID NO: 19145 - DNA, 59 bp, Artificial
  Synthetic oligonucleotide
tcccgaggtagtgtgtccatagctagtcagaactctgaaccattaatcgttcccgcaag

SEQ ID NO: 19146 - DNA, 57 bp, Artificial
  Synthetic oligonucleotide
gtcataaccggaaactttgggtcctctggaccaactaatgctcactacaatcagaac

SEQ ID NO: 19147 - DNA, 58 bp, Artificial
  Synthetic oligonucleotide
tacagtgtattcaggatgaaccaatctcgaagctttgttacggggagaggacgcgact

SEQ ID NO: 19148 - DNA, 54 bp, Artificial
  Synthetic oligonucleotide
aataccaccagtaaatgttgacaaaccaataccattagggaggagagacgtacc

SEQ ID NO: 19149 - DNA, 56 bp, Artificial
  Synthetic oligonucleotide
attccgggaaccagcagattggagaggctgcgtgaaacgagaagcaacgtttttaa

SEQ ID NO: 19150 - DNA, 58 bp, Artificial
  Synthetic oligonucleotide
gctctgggcgccgcacaagaagtgaaaggacgtaccttgaacgaggcgtatcgcgaat

SEQ ID NO: 19151 - DNA, 58 bp, Artificial
  Synthetic oligonucleotide
acgctacaccctaccctcatgtcacacggtccgtgcactacggaggcttcgagcctat

SEQ ID NO: 19152 - DNA, 59 bp, Artificial
  Synthetic oligonucleotide
caacttagtggcgacagacgtgtgtacgttcattcattaacccttgaggacgcagcaag

SEQ ID NO: 19153 - DNA, 56 bp, Artificial
  Synthetic oligonucleotide
gtacggaggttattagggctgtgcgttttaccacgtgtgaaggcatgcccagtaat

SEQ ID NO: 19154 - DNA, 55 bp, Artificial
  Synthetic oligonucleotide
gcacgacccgctaaaaggccgcgcttatagaagagagttggttacaccaccccga

SEQ ID NO: 19155 - DNA, 54 bp, Artificial
  Synthetic oligonucleotide
tcagaagctagcgcccccccccgtcgcggagtcagcgggacccacgttcggggc

SEQ ID NO: 19156 - DNA, 58 bp, Artificial
  Synthetic oligonucleotide
aagggtgtgcgggatacatggattaagttgcggctcggttatgaggagggaggagtga

SEQ ID NO: 19157 - DNA, 57 bp, Artificial
  Synthetic oligonucleotide
tcattttcgcttcgcggggtggtttgagctggatgtcccgggggatgatattggtcg

SEQ ID NO: 19158 - DNA, 58 bp, Artificial
  Synthetic oligonucleotide
ccattcctaaaggtcaacgcgttaggctgccgggtgggagagcgatatgggatatagc

SEQ ID NO: 19159 - DNA, 56 bp, Artificial
  Synthetic oligonucleotide
ggctaaacggttgaaaagactgctaactggacccaagaagaataagccgaatgtca

SEQ ID NO: 19160 - DNA, 55 bp, Artificial
  Synthetic oligonucleotide
gcaacaaggaaggaaaaaggacgtgtgacgtcaacacaaacacgagtccatttag

SEQ ID NO: 19161 - DNA, 57 bp, Artificial
  Synthetic oligonucleotide
cgatgaaagacgggcggttgttgaaagtacgagacacaagagtttccatacgaatga

SEQ ID NO: 19162 - DNA, 59 bp, Artificial
  Synthetic oligonucleotide
cgatcgaggtatctgatgaaagggttccggctagcattagagcggggcgtataaggcta

SEQ ID NO: 19163 - DNA, 58 bp, Artificial
  Synthetic oligonucleotide
atgtgaacgctacaaaggacgaaccattcttaacgtcgacactatgtctatactatcc

SEQ ID NO: 19164 - DNA, 57 bp, Artificial
  Synthetic oligonucleotide
tacccctgcttgcgaggcgcgttaattgcggctgagtgtaaattaggtgacgtttat

SEQ ID NO: 19165 - DNA, 59 bp, Artificial
  Synthetic oligonucleotide
cgcaacggatgcatatacgcggcgtatatggagatcgaacccgtacccatgtttacgtg

SEQ ID NO: 19166 - DNA, 59 bp, Artificial
  Synthetic oligonucleotide
gttgaagaggcaaggtacgtcatttattcaatacgcgtggcgaggggtgctgatagact

SEQ ID NO: 19167 - DNA, 57 bp, Artificial
  Synthetic oligonucleotide
cagaatacacgcctgaggcgtttcagtagcgcccccgagtacaccagacccggttca

SEQ ID NO: 19168 - DNA, 57 bp, Artificial
  Synthetic oligonucleotide
caggaatcagtgccggtccaacagctctcgaacacttcgactccccaacgtacggtc

SEQ ID NO: 19169 - DNA, 59 bp, Artificial
  Synthetic oligonucleotide
gacaacgtgaaacagattcttactcgtgaactgccattttcctcggatctaatcaacta

SEQ ID NO: 19170 - DNA, 58 bp, Artificial
  Synthetic oligonucleotide
ctgccgcccggagacttctacgcagcatacagagtggcgaacttccccttcacctccg

SEQ ID NO: 19171 - DNA, 58 bp, Artificial
  Synthetic oligonucleotide
cctaccacccacgtgtgaatggttagactacattatcggagccggctcgtcactggac

SEQ ID NO: 19172 - DNA, 54 bp, Artificial
  Synthetic oligonucleotide
agtaggccaaccgacctacactctccccgccggtgcgtaccgttacgtgcttga

SEQ ID NO: 19173 - DNA, 57 bp, Artificial
  Synthetic oligonucleotide
tgttactgaagcgtcggagaagtttataccaaatagaacgtatagagtaattgacga

SEQ ID NO: 19174 - DNA, 58 bp, Artificial
  Synthetic oligonucleotide
tacgtcacgacggttggacgtaacgtgcatttgtatctttgtgtcgataggacgaggc

SEQ ID NO: 19175 - DNA, 58 bp, Artificial
  Synthetic oligonucleotide
gaagcttacggacagaactagcagcgctaacaacacgggtgacaactgaggttacaag

SEQ ID NO: 19176 - DNA, 57 bp, Artificial
  Synthetic oligonucleotide
gtactgtcgttacggtcacgtttgactcttccgacatacaggtaccctctggagctc

SEQ ID NO: 19177 - DNA, 59 bp, Artificial
  Synthetic oligonucleotide
tcacgcctgaatacagaatccactactactaataacgctcagagtcccgtttctgaccc

SEQ ID NO: 19178 - DNA, 57 bp, Artificial
  Synthetic oligonucleotide
tgacgaactctcgttcggagtccattgttttgttagaggtgttgtagcgcctaggta

SEQ ID NO: 19179 - DNA, 54 bp, Artificial
  Synthetic oligonucleotide
tgggtaccaacgtcgacaacgaaagtgtttaagcaagtaccgcagacttttgac

SEQ ID NO: 19180 - DNA, 58 bp, Artificial
  Synthetic oligonucleotide
cgtatggtacttggtttatgtggttatacgggttcgcatggtaattctgctgtggtga

SEQ ID NO: 19181 - DNA, 59 bp, Artificial
  Synthetic oligonucleotide
tagtaaaacgatgatgacgccatactctgtggaaaaaacacaaacgcatgcaaaacagg

SEQ ID NO: 19182 - DNA, 52 bp, Artificial
  Synthetic oligonucleotide
aatacccgaacgttcccagttttatttggacgtgacggttcattcgtgggca

SEQ ID NO: 19183 - DNA, 58 bp, Artificial
  Synthetic oligonucleotide
tcaaaacggaaccgcggatataatcgctccagctatcgaagcgtcctctactggtaaa

SEQ ID NO: 19184 - DNA, 53 bp, Artificial
  Synthetic oligonucleotide
acacttcgaaatttacgaatgaacggttactggtttcactcctcgagtataaa

SEQ ID NO: 19185 - DNA, 58 bp, Artificial
  Synthetic oligonucleotide
ggattctgaacacgtgaacatattccgaacgagtggggctgccacaaacgagggtaga

SEQ ID NO: 19186 - DNA, 59 bp, Artificial
  Synthetic oligonucleotide
tcaagactttaatgtcttctcgccagctcttagagggtttacgtctagtggctgagttg

SEQ ID NO: 19187 - DNA, 57 bp, Artificial
  Synthetic oligonucleotide
acgatttaacgttctcctcatttcacgagatccccccgattcaggttgagatgacag

SEQ ID NO: 19188 - DNA, 59 bp, Artificial
  Synthetic oligonucleotide
atgggctcgcgcattgttgaagcttaccgacgttcacaagattcgaagtacaaacgcaa

SEQ ID NO: 19189 - DNA, 53 bp, Artificial
  Synthetic oligonucleotide
acagatacccagaaaggtcgggtttggcgaacaaatccatacccgtgtttgcg

SEQ ID NO: 19190 - DNA, 54 bp, Artificial
  Synthetic oligonucleotide
gactactcggatttgagttaagcccaaccgctcgacgccttatttttagacgaa

SEQ ID NO: 19191 - DNA, 58 bp, Artificial
  Synthetic oligonucleotide
atatagtgacactacttggtacgagttcgaatcaacgcgtgtgtagcgcgattaagtt

SEQ ID NO: 19192 - DNA, 57 bp, Artificial
  Synthetic oligonucleotide
aaggattacgtattcacaagaagttctgactgactttaggagacaggacacgatttg

SEQ ID NO: 19193 - DNA, 56 bp, Artificial
  Synthetic oligonucleotide
gtacaaacgttaacctggtagtcacgaaagataactcggctcgatttgcgtctgaa

SEQ ID NO: 19194 - DNA, 53 bp, Artificial
  Synthetic oligonucleotide
ttactagtagtggacgttttcttggggtggtacgtggtcttgacacgaggggc

SEQ ID NO: 19195 - DNA, 58 bp, Artificial
  Synthetic oligonucleotide
cggggtcggagaagctaggcgcatcatttacctaattcagaactcgataggattacaa

SEQ ID NO: 19196 - DNA, 57 bp, Artificial
  Synthetic oligonucleotide
ctcactccctcgcgtctattgcggtatcaggaagttgtccttctgggcgggtactct

SEQ ID NO: 19197 - DNA, 59 bp, Artificial
  Synthetic oligonucleotide
gtgacgtcgtgggcggtatacgcgcgcgtgtacttcccgtagatgacgacgtcatgaag

SEQ ID NO: 19198 - DNA, 56 bp, Artificial
  Synthetic oligonucleotide
acgctaccgatgcttttaattcgtggatatctatttgggtattactcccagtcgaa

SEQ ID NO: 19199 - DNA, 59 bp, Artificial
  Synthetic oligonucleotide
cgagttagctcgcgggtgcggaattcctatgtagaccggattgatgtgatattaagaaa

SEQ ID NO: 19200 - DNA, 56 bp, Artificial
  Synthetic oligonucleotide
agattggcggcgtaacttttcgtatctacacgtaccacctacggctttatgcgcta

SEQ ID NO: 19201 - DNA, 58 bp, Artificial
  Synthetic oligonucleotide
tggactatggttccgacaacctaccactaggcatgactttcaccgcaccaaataagct

SEQ ID NO: 19202 - DNA, 59 bp, Artificial
  Synthetic oligonucleotide
catcccgtaattaacaaagagcgtgctactcaggagcgctcggaattatggcccgctac

SEQ ID NO: 19203 - DNA, 59 bp, Artificial
  Synthetic oligonucleotide
attactagaactagagtcagtagactatatggactaccagctgctaatccaaacaacgg

SEQ ID NO: 19204 - DNA, 55 bp, Artificial
  Synthetic oligonucleotide
cacgacaggtaccaaatttacatgttttaccacgaccgagacaagagttaataga

SEQ ID NO: 19205 - DNA, 58 bp, Artificial
  Synthetic oligonucleotide
cgggtgagatggtttatcatcattcggttagtatgacaacgccacatttaatttactc

SEQ ID NO: 19206 - DNA, 53 bp, Artificial
  Synthetic oligonucleotide
attgagaaccgttcgagttaagtttttcgattcgcggccccctgaggagatac

SEQ ID NO: 19207 - DNA, 52 bp, Artificial
  Synthetic oligonucleotide
tgggattaatcttaacgttgtaacgacaaagcaacttctttacgaaacgtac

SEQ ID NO: 19208 - DNA, 59 bp, Artificial
  Synthetic oligonucleotide
agttgagacaccaacatcgtcaggtgagcggaaacaagtcgatcgtcggggcagagtta

SEQ ID NO: 19209 - DNA, 59 bp, Artificial
  Synthetic oligonucleotide
gattcaaatggaacaagtcgtcgtgagcggattgcagccccaattgaggtttttcgcgc

SEQ ID NO: 19210 - DNA, 52 bp, Artificial
  Synthetic oligonucleotide
ccttccgtaaagggaagagaggatcttttacgttcaaattggaaatcgatta

SEQ ID NO: 19211 - DNA, 53 bp, Artificial
  Synthetic oligonucleotide
agaatttttcgccgaccatggaaactttacagagacccgacggtggattcacc

SEQ ID NO: 19212 - DNA, 57 bp, Artificial
  Synthetic oligonucleotide
tctggcaaagtttttagcgattacattacaagcggttaaagcgatcaaagataagac

SEQ ID NO: 19213 - DNA, 55 bp, Artificial
  Synthetic oligonucleotide
gttgatggggtcagtttatcaaccggtgaattctacggtacggttgaacattgga

SEQ ID NO: 19214 - DNA, 57 bp, Artificial
  Synthetic oligonucleotide
aacttacaaatatctggatctattagcggggcgtaatcgcggagagaaagtgaagga

SEQ ID NO: 19215 - DNA, 59 bp, Artificial
  Synthetic oligonucleotide
cgctacgtgatatactttcgctagagggatcgttagggataattattgtgagtgacggc

SEQ ID NO: 19216 - DNA, 58 bp, Artificial
  Synthetic oligonucleotide
tgaacctattgaaccatgtaaattgtttcggtctgttgcggggcagactgggaacata

SEQ ID NO: 19217 - DNA, 56 bp, Artificial
  Synthetic oligonucleotide
tgacgcgaacaacctccctgtccaaacggattcacgtttgtcgttctcacttggtg

SEQ ID NO: 19218 - DNA, 59 bp, Artificial
  Synthetic oligonucleotide
aacacgaacacgtcagtataccttacacgatctctgttcagacctagatgctactccgg

SEQ ID NO: 19219 - DNA, 58 bp, Artificial
  Synthetic oligonucleotide
agctaggagaaagtccaggttgagatatctgccgttagtagaccccagatcgttagag

SEQ ID NO: 19220 - DNA, 57 bp, Artificial
  Synthetic oligonucleotide
acgaggacttatttttaagcgcgcctgacatgagagagtgggcggtgaaggaaagtg

SEQ ID NO: 19221 - DNA, 59 bp, Artificial
  Synthetic oligonucleotide
taattattacgcaagtactaagattgcgcagggaggggtgcatacgccagtagttacaa

SEQ ID NO: 19222 - DNA, 56 bp, Artificial
  Synthetic oligonucleotide
taacgagcgtaccaacatcatggggggcggagtacatcggaaaaacgaggacagat

SEQ ID NO: 19223 - DNA, 59 bp, Artificial
  Synthetic oligonucleotide
attgatggcagcgttagctatcagagaagtcccacgtaatacggatccgattttgggaa

SEQ ID NO: 19224 - DNA, 59 bp, Artificial
  Synthetic oligonucleotide
tcgaatgatagtttgcttggagaacgatctcgttgactaccggtgtgttctatggggcc

SEQ ID NO: 19225 - DNA, 59 bp, Artificial
  Synthetic oligonucleotide
tccgaacgctctggctactggactcgactattcgagaggtggttacaaagtgtcctcta

SEQ ID NO: 19226 - DNA, 56 bp, Artificial
  Synthetic oligonucleotide
caaattggaaccgcatacgcgttcagaacaaatagttagtcggtataattactcac

SEQ ID NO: 19227 - DNA, 57 bp, Artificial
  Synthetic oligonucleotide
gcacgagacttcggtcattttggattatcccactactctagggcgactaccccaatc

SEQ ID NO: 19228 - DNA, 55 bp, Artificial
  Synthetic oligonucleotide
ttgttggcacaactacaaataccaacggttgggtacatgtccgatccgaaggtac

SEQ ID NO: 19229 - DNA, 57 bp, Artificial
  Synthetic oligonucleotide
ttgacccccgctatacctgttaacatcgccctgaaaggagctgccctagaggtatcg

SEQ ID NO: 19230 - DNA, 59 bp, Artificial
  Synthetic oligonucleotide
cgcaactgacgtcccagggactagcacaaacggcgagtggttcagtgcgtcttacgtgc

SEQ ID NO: 19231 - DNA, 57 bp, Artificial
  Synthetic oligonucleotide
ccgacgtccgacgtaccgtgtgctcgagatgttctttgattccctatctactacgta

SEQ ID NO: 19232 - DNA, 57 bp, Artificial
  Synthetic oligonucleotide
cgcctaagtatccgtcacccccacaatcgattgcggtgtcccaatttatagtcgatg

SEQ ID NO: 19233 - DNA, 59 bp, Artificial
  Synthetic oligonucleotide
agccagcgctgacgctagacaaagcagtcaaaccgaagttatgttcaacgattacaccg

SEQ ID NO: 19234 - DNA, 59 bp, Artificial
  Synthetic oligonucleotide
ttttggcaaatcgtagtcaagcctactatacattgaactcgataactcagaccccgaca

SEQ ID NO: 19235 - DNA, 52 bp, Artificial
  Synthetic oligonucleotide
tcactaaaatgactttaagggttaaggggtagtattaagtttctatctcttc

SEQ ID NO: 19236 - DNA, 59 bp, Artificial
  Synthetic oligonucleotide
agtccatctactgcacgtacgttcggaagacaacactctacgttacaactggatgctag

SEQ ID NO: 19237 - DNA, 59 bp, Artificial
  Synthetic oligonucleotide
ttgtccctcttaacatgaagtacgtagtaatagatccagccacacgtatcgaaacacta

SEQ ID NO: 19238 - DNA, 57 bp, Artificial
  Synthetic oligonucleotide
atgttcaacgttacatacggtactgcggaattgactcacgtgggttgattaatccta

SEQ ID NO: 19239 - DNA, 59 bp, Artificial
  Synthetic oligonucleotide
aaatcggatgcatctcggagtaattaatgatgctggcgcggagaggttactaatttttc

SEQ ID NO: 19240 - DNA, 59 bp, Artificial
  Synthetic oligonucleotide
tggatccagcagtaagaatggttgcgggtgttgtaggccatctacttttcacggcggga

SEQ ID NO: 19241 - DNA, 54 bp, Artificial
  Synthetic oligonucleotide
aatcgtcttttaaggtaagacgggtagagattacgcaaggtaagagaccagatc

SEQ ID NO: 19242 - DNA, 56 bp, Artificial
  Synthetic oligonucleotide
aatatggtccaacgggagaaccgctagatttccgaatagggcgtgggcagtatgat

SEQ ID NO: 19243 - DNA, 57 bp, Artificial
  Synthetic oligonucleotide
gctttacggagaatcatggatgacgaaggttgggttaggttcggaggtgtattgaga

SEQ ID NO: 19244 - DNA, 55 bp, Artificial
  Synthetic oligonucleotide
acgaacgttcggataccactaaacgtcataccttagatatgattaagatagtact

SEQ ID NO: 19245 - DNA, 59 bp, Artificial
  Synthetic oligonucleotide
attctaacatttgatggtgtaacgttatcaacgcaatttactgactatgtgtcgttgaa

SEQ ID NO: 19246 - DNA, 59 bp, Artificial
  Synthetic oligonucleotide
cgagacgcgtgcctactgtgagcagtttggttttacaacgctgccaagataccatacgg

SEQ ID NO: 19247 - DNA, 55 bp, Artificial
  Synthetic oligonucleotide
acgaacggttcgcgttaaattctatgacgcacgacctccggatgatgttttacag

SEQ ID NO: 19248 - DNA, 54 bp, Artificial
  Synthetic oligonucleotide
caaacaaagtccggaataccaattcaatgttagagtaactacgagtaaaactgc

SEQ ID NO: 19249 - DNA, 57 bp, Artificial
  Synthetic oligonucleotide
cccgttccaccagagtacgcgagacctctcgaaaatctcagacgaggtgaggtctag

SEQ ID NO: 19250 - DNA, 58 bp, Artificial
  Synthetic oligonucleotide
atgacggacttctttaattacttatcggctgacatgctaagtaccaaatttgcgtcac

SEQ ID NO: 19251 - DNA, 57 bp, Artificial
  Synthetic oligonucleotide
cgtcgccgcaacttccactcccatgaagacgggtacacgttatgccgtgtgtacgac

SEQ ID NO: 19252 - DNA, 55 bp, Artificial
  Synthetic oligonucleotide
gtttaaccaatccggtcggcaccagacgttaatggaaggaatggtcttagtgtga

SEQ ID NO: 19253 - DNA, 59 bp, Artificial
  Synthetic oligonucleotide
ctgtatgactgaggcgcaacgtaaccgcgtgccgatactgacgcaacaaggccgtacct

SEQ ID NO: 19254 - DNA, 54 bp, Artificial
  Synthetic oligonucleotide
gttagaaaggagagcggagccgcgtatgagctttaagttcgaagggttaaccac

SEQ ID NO: 19255 - DNA, 55 bp, Artificial
  Synthetic oligonucleotide
ctggacttatgaacccccagaaagtaacggttgactatgtctattcggatggtta

SEQ ID NO: 19256 - DNA, 55 bp, Artificial
  Synthetic oligonucleotide
cgtcacccaattgtggttcggttcagaaaaattgtttccaagtctacaaatctca

SEQ ID NO: 19257 - DNA, 53 bp, Artificial
  Synthetic oligonucleotide
gctaaagtcggaagcgaatacggcgacctatttgtcaaaaagttaccaactct

SEQ ID NO: 19258 - DNA, 59 bp, Artificial
  Synthetic oligonucleotide
tcttccgatcaacattcactctactaactatgtgttcggtaagtactcagttttcgctc

SEQ ID NO: 19259 - DNA, 56 bp, Artificial
  Synthetic oligonucleotide
ttacgagtcaaccctgatacggtaattcatgtttggtcacccgaccttgtacgcac

SEQ ID NO: 19260 - DNA, 59 bp, Artificial
  Synthetic oligonucleotide
tgggtgtgttgtgagtggtatgacagggcgagagttggtttgttttccgagatgtttga

SEQ ID NO: 19261 - DNA, 56 bp, Artificial
  Synthetic oligonucleotide
aacgggctagaggaagcacgatttgccctaaatcctcgtaagacatttctgtttga

SEQ ID NO: 19262 - DNA, 58 bp, Artificial
  Synthetic oligonucleotide
gtgtcttactattctggacgaagtcaacttgagagacgatgtctatttggtaccactt

SEQ ID NO: 19263 - DNA, 55 bp, Artificial
  Synthetic oligonucleotide
agaagttagcccgagttcagctcgccatccccagtggacctccggacgttatcgt

SEQ ID NO: 19264 - DNA, 59 bp, Artificial
  Synthetic oligonucleotide
tttgctctttacagcgggcggtagatttacgaatttaacacagaatatggcgagacagc

SEQ ID NO: 19265 - DNA, 58 bp, Artificial
  Synthetic oligonucleotide
gcggaccaactggactatctaggcgccaaacggaagagtactctctggatcgtatccg

SEQ ID NO: 19266 - DNA, 56 bp, Artificial
  Synthetic oligonucleotide
actaccaacttacgtagtacctccgggtgactatactctgacacctctgtaactca

SEQ ID NO: 19267 - DNA, 54 bp, Artificial
  Synthetic oligonucleotide
ctaagttaagtccgttaggttggttgtgtgactaatcgtaactatcggagattg

SEQ ID NO: 19268 - DNA, 58 bp, Artificial
  Synthetic oligonucleotide
cctaatttactacaagacagactgaatttgcacgataattttgaatccttgtgggata

SEQ ID NO: 19269 - DNA, 56 bp, Artificial
  Synthetic oligonucleotide
gggacaatcttgtaccataaaagtgtgcccattaaatacgcagactttgggaatag

SEQ ID NO: 19270 - DNA, 56 bp, Artificial
  Synthetic oligonucleotide
tctgttaatttaggcagacgcgatttgggtttaaaggtcggcgatctattcattac

SEQ ID NO: 19271 - DNA, 59 bp, Artificial
  Synthetic oligonucleotide
cgaattattgcgatcgattacgcgttggaagtgggattagtctggagatagggtagctc

SEQ ID NO: 19272 - DNA, 58 bp, Artificial
  Synthetic oligonucleotide
ggactcaagcgcaacacctcagtggaacgacaagttttggggtttgattgatatggga

SEQ ID NO: 19273 - DNA, 58 bp, Artificial
  Synthetic oligonucleotide
gattcaactatggtctctaccatccgttggttgtccgcaatatggttcgggtccctga

SEQ ID NO: 19274 - DNA, 58 bp, Artificial
  Synthetic oligonucleotide
gtgagtttgtacaaagcgacggttatagatattttaacaggctaggcggagatgagga

SEQ ID NO: 19275 - DNA, 56 bp, Artificial
  Synthetic oligonucleotide
tcggttgcaaggtattaggagatcgtttagacgtaccactcttcttacgaaatgct

SEQ ID NO: 19276 - DNA, 55 bp, Artificial
  Synthetic oligonucleotide
tcgaaccaaatgtacctcgagaattaagaacgtacactatatttggtcaacaagt

SEQ ID NO: 19277 - DNA, 55 bp, Artificial
  Synthetic oligonucleotide
cgagtaagtcgattatacggattaccagccgtaaacccgaataatgctagagact

SEQ ID NO: 19278 - DNA, 52 bp, Artificial
  Synthetic oligonucleotide
acggattaccagccgtaaacccgaataatgctagagacttttacgaaataac

SEQ ID NO: 19279 - DNA, 58 bp, Artificial
  Synthetic oligonucleotide
tgaaacattcgaggaggtacctttcgatgtgcaaaaattcgcagacttagttacagac

SEQ ID NO: 19280 - DNA, 55 bp, Artificial
  Synthetic oligonucleotide
ggcttttaaagcagtaccagtagtgtgttttacctctaatggtgtaaacatgaaa

SEQ ID NO: 19281 - DNA, 58 bp, Artificial
  Synthetic oligonucleotide
ggacacgagtatagtttatgcgtttaacattgaaacacggataaagaacgctctcatg

SEQ ID NO: 19282 - DNA, 55 bp, Artificial
  Synthetic oligonucleotide
acgttcaaacattgggtatcggttgccaaactactaatgtaaacacgtttgagca

SEQ ID NO: 19283 - DNA, 59 bp, Artificial
  Synthetic oligonucleotide
agggattctccgccaacactgtaccagtctctaagactaggaaggatacctcatcacta

SEQ ID NO: 19284 - DNA, 58 bp, Artificial
  Synthetic oligonucleotide
atgggtcatcaaacatggagtgtccgatggtatagttaacagaaagaacgttaagata

SEQ ID NO: 19285 - DNA, 54 bp, Artificial
  Synthetic oligonucleotide
gaaggagtttccgacaccgtcgcaaacctaaagtccgaaaatgtagagatcaac

SEQ ID NO: 19286 - DNA, 55 bp, Artificial
  Synthetic oligonucleotide
gtccgaaaatgtagagatcaacgttttagggcacaatcctgggtccctaaatatc

SEQ ID NO: 19287 - DNA, 57 bp, Artificial
  Synthetic oligonucleotide
agcgaagaagcagactaagctattccgaattttcgaaccgagacagctaccaattta

SEQ ID NO: 19288 - DNA, 56 bp, Artificial
  Synthetic oligonucleotide
tgtgtcgaagttggaggaaactcggggaattttcgttcgtgctgagggcatacgag

SEQ ID NO: 19289 - DNA, 56 bp, Artificial
  Synthetic oligonucleotide
aaatggattcttaggcgaccatgtggagacgtttaatttagggtgcaaccacatat

SEQ ID NO: 19290 - DNA, 59 bp, Artificial
  Synthetic oligonucleotide
ggtgttgcaacaccataaaacggtcatgttaccaggtcaaatcgaagcatttgaacatc

SEQ ID NO: 19291 - DNA, 57 bp, Artificial
  Synthetic oligonucleotide
gatattaccctgaaggcttacgatgatagaaagtcggttaagaacgcacgcggcgtg

SEQ ID NO: 19292 - DNA, 59 bp, Artificial
  Synthetic oligonucleotide
acgctggatggaagctatacccaagattgttgcgacaacgttttgcgatcggagacgct

SEQ ID NO: 19293 - DNA, 55 bp, Artificial
  Synthetic oligonucleotide
gagtttttgaggttgacgccacaggtaagcgtacattcgttagaacgtcaaacac

SEQ ID NO: 19294 - DNA, 56 bp, Artificial
  Synthetic oligonucleotide
agtaggtagagtggcgccccgaggtttacgtcgtgcagggtggttgatctcgcggc

SEQ ID NO: 19295 - DNA, 56 bp, Artificial
  Synthetic oligonucleotide
actgaaccaaacctacttaccatcgatttcgagaaggatgcttaccttggcgcgcg

SEQ ID NO: 19296 - DNA, 56 bp, Artificial
  Synthetic oligonucleotide
cggttactaacgaattcgcatcccggttcagaacgatcgtggctacactggctaac

SEQ ID NO: 19297 - DNA, 59 bp, Artificial
  Synthetic oligonucleotide
aatggacccgcgtcgacatacttgcgtgagaacgaagtattagtagttatgccagacta

SEQ ID NO: 19298 - DNA, 58 bp, Artificial
  Synthetic oligonucleotide
cgcatgagtgtacgccgtctagaaaaccaattcgtttagagtgcacccgcattacact

SEQ ID NO: 19299 - DNA, 59 bp, Artificial
  Synthetic oligonucleotide
gagtccgggtgaacgcggaatgcaaacgaagatccgtgagttagaagatgaacagcgta

SEQ ID NO: 19300 - DNA, 54 bp, Artificial
  Synthetic oligonucleotide
atcccgtttaaccaatccagcgagtgttggacgttaatggaaggaatggtctta

SEQ ID NO: 19301 - DNA, 59 bp, Artificial
  Synthetic oligonucleotide
aagtttatatcaattcgatattaacatggagtgcgcttgaaccagaggaggaattctta

SEQ ID NO: 19302 - DNA, 58 bp, Artificial
  Synthetic oligonucleotide
gcggggtgttttcatgcgcgttagttaagcatagaattccgaaacagcgaggagaata

SEQ ID NO: 19303 - DNA, 54 bp, Artificial
  Synthetic oligonucleotide
acgtggtacctccgggtgattatacgtcgacacctctgtaactcattacccctc

SEQ ID NO: 19304 - DNA, 57 bp, Artificial
  Synthetic oligonucleotide
ggttatgattacaattgtccttcaagtactacagatgttactcactacggtggttac

SEQ ID NO: 19305 - DNA, 59 bp, Artificial
  Synthetic oligonucleotide
acgacttgtattcaacaccaggatttggagccactcagcttacaacaatcccacttgac

SEQ ID NO: 19306 - DNA, 57 bp, Artificial
  Synthetic oligonucleotide
ccacttgacgtaacatcagcggagaaggtcttttcgataagacttggtttgccacca

SEQ ID NO: 19307 - DNA, 59 bp, Artificial
  Synthetic oligonucleotide
tactacaagacagactaaatttacatgacaacttcgaatctttatgggatacgataaca

SEQ ID NO: 19308 - DNA, 56 bp, Artificial
  Synthetic oligonucleotide
acacgttttcgatgtggctagagttccagacgaccaaatgtataggttaagggata

SEQ ID NO: 19309 - DNA, 58 bp, Artificial
  Synthetic oligonucleotide
catcaccatagtttgcccgtatttcaatcaatgttacgaaatgtgtatatacgacctt

SEQ ID NO: 19310 - DNA, 56 bp, Artificial
  Synthetic oligonucleotide
aagtctgtcagaggcggagagagtgcaaggagattttaagacacccaagggggtat

SEQ ID NO: 19311 - DNA, 56 bp, Artificial
  Synthetic oligonucleotide
gtatgagtgttcgtcgtttggaaaaccaattcgtttagagcgcacccgcattacac

SEQ ID NO: 19312 - DNA, 57 bp, Artificial
  Synthetic oligonucleotide
tccactatattagaacatcgtacaagggatatcccggataatacgttggcggtaagc

SEQ ID NO: 19313 - DNA, 56 bp, Artificial
  Synthetic oligonucleotide
gacgcacgctaactgaagcgtataaggagtttcttaacctggcgatttctaacgcc

SEQ ID NO: 19314 - DNA, 58 bp, Artificial
  Synthetic oligonucleotide
aggggatactccttccttttcgtcgtatatgagggagatcgtgtgcgatgtttagatg

SEQ ID NO: 19315 - DNA, 59 bp, Artificial
  Synthetic oligonucleotide
ggaataaaagagacaggtagtggctggaaacgctactctgtccgcactctgccctgaaa

SEQ ID NO: 19316 - DNA, 55 bp, Artificial
  Synthetic oligonucleotide
attgtggtttccaccggatattgacaggggtcaacccttagtgctggaataatac

SEQ ID NO: 19317 - DNA, 56 bp, Artificial
  Synthetic oligonucleotide
tgatagcggcttccgatacttataagggtcgtatatggtggagtaacccttaccca

SEQ ID NO: 19318 - DNA, 58 bp, Artificial
  Synthetic oligonucleotide
ccaacttataccccgtacgataggagcagagagagcgacaaatacgtatatagccgag

SEQ ID NO: 19319 - DNA, 57 bp, Artificial
  Synthetic oligonucleotide
tagctaggacagctaaatcgtttgatcatgaccccttcaacttacaacggtactgtt

SEQ ID NO: 19320 - DNA, 55 bp, Artificial
  Synthetic oligonucleotide
accgctactgggccgaactcgaattggtgaaccactacatttcgccgaacgccta

SEQ ID NO: 19321 - DNA, 55 bp, Artificial
  Synthetic oligonucleotide
agcttttaaacctgtcaagaatccggaacctaaaggatacgtgctgaatgttcca

SEQ ID NO: 19322 - DNA, 58 bp, Artificial
  Synthetic oligonucleotide
gacgggaacaggatataatggttgggcgacgatcgacgttgagtacagagaacccgca

SEQ ID NO: 19323 - DNA, 59 bp, Artificial
  Synthetic oligonucleotide
gtactgagttattgacaaagttgaccggcatctcccagcctacggaatcaaagtatata

SEQ ID NO: 19324 - DNA, 57 bp, Artificial
  Synthetic oligonucleotide
gctcccgaagattgatgttcagtcgatgattaactttaatccgtggtaccaaggagt

SEQ ID NO: 19325 - DNA, 57 bp, Artificial
  Synthetic oligonucleotide
cgtaggacactgaccgtataagtggaggttcgccagtcccttcagcaaggattggac

SEQ ID NO: 19326 - DNA, 59 bp, Artificial
  Synthetic oligonucleotide
gcggatgacacccataaagaattcggctcgatatgtttcgagtattacactacgacaaa

SEQ ID NO: 19327 - DNA, 58 bp, Artificial
  Synthetic oligonucleotide
tcaactcacaacgacgatcacacacgttacgactactagggccttttcagtacttcaa

SEQ ID NO: 19328 - DNA, 59 bp, Artificial
  Synthetic oligonucleotide
ctcggtgcagagagagaacccgctgtaagtatattgcgaagatttaatcgtagcgtttc

SEQ ID NO: 19329 - DNA, 54 bp, Artificial
  Synthetic oligonucleotide
aacgctatgtaccaaatggactcggctttaaagggcggaagacgcgagagttta

SEQ ID NO: 19330 - DNA, 56 bp, Artificial
  Synthetic oligonucleotide
aatgcgttaagcggaatagatctttcgcacttacgaaccccgaagatagagccgac

SEQ ID NO: 19331 - DNA, 58 bp, Artificial
  Synthetic oligonucleotide
agagtcggtctcagagctaaatgttgataacaggtaagattcatccccttcatttggg

SEQ ID NO: 19332 - DNA, 59 bp, Artificial
  Synthetic oligonucleotide
gaaggactagcgacgtgggttggatcgaactgcggtggtgttagagactatattatcca

SEQ ID NO: 19333 - DNA, 56 bp, Artificial
  Synthetic oligonucleotide
gtcgtaaaccctcatttatctattgatacgcgccgtgactggtttgggatggtgtt

SEQ ID NO: 19334 - DNA, 57 bp, Artificial
  Synthetic oligonucleotide
catggggagcggtccttcaaacttcgtgaataaggtggacggagcgagtgcacctat

SEQ ID NO: 19335 - DNA, 55 bp, Artificial
  Synthetic oligonucleotide
gtcacggttagaccctagtgttatatgttcgttaggtggttctgctccaaattta

SEQ ID NO: 19336 - DNA, 54 bp, Artificial
  Synthetic oligonucleotide
accctttagttatgatactaacgaaagaggtgggttagcgtatgcgacaattaa

SEQ ID NO: 19337 - DNA, 54 bp, Artificial
  Synthetic oligonucleotide
agtacattaataacgggttacctccgattcagaatacacgaaacattgttccat

SEQ ID NO: 19338 - DNA, 59 bp, Artificial
  Synthetic oligonucleotide
ctaaccgtaatgcgggcatgttcgaccctgcaagaggctaggatcgtattagaggcaaa

SEQ ID NO: 19339 - DNA, 57 bp, Artificial
  Synthetic oligonucleotide
acaactacgcagtattacaatttaacactgatgtcactaaacaaatggtccaggaag

SEQ ID NO: 19340 - DNA, 59 bp, Artificial
  Synthetic oligonucleotide
cacggattgatactctctatcgtttaaagatcaaacaacccagctctcatcctttaata

SEQ ID NO: 19341 - DNA, 59 bp, Artificial
  Synthetic oligonucleotide
gtatacctgtctgatccatttgttaacgatcacgcccggtatactgacggcgccactcg

SEQ ID NO: 19342 - DNA, 58 bp, Artificial
  Synthetic oligonucleotide
cttaacgtactagtgcccggcgaagtgatatcaattgagtactcggagtatccaacca

SEQ ID NO: 19343 - DNA, 56 bp, Artificial
  Synthetic oligonucleotide
ttaggtatggtttatgtcctcgcaattacccaaactcgaggaatctaaaatgcaaa

SEQ ID NO: 19344 - DNA, 53 bp, Artificial
  Synthetic oligonucleotide
gaaatacacaccgggtgtgataccaccggtaaacgtagataaaccaattccat

SEQ ID NO: 19345 - DNA, 59 bp, Artificial
  Synthetic oligonucleotide
gcgaagttagaagttataaatcacgcgattaaacatggatcgtggattagcctgttctg

SEQ ID NO: 19346 - DNA, 59 bp, Artificial
  Synthetic oligonucleotide
tggcttgaaagactgggaagacgtaaacgcatgaccttttcgcaggagtttctcacaga

SEQ ID NO: 19347 - DNA, 59 bp, Artificial
  Synthetic oligonucleotide
atgtgagaggttgagttactgtcgtctgtcttcggaagcgacggaattcttcaccgcaa

SEQ ID NO: 19348 - DNA, 58 bp, Artificial
  Synthetic oligonucleotide
aatcgatggtgttagcatactcacgagtgaaaaatatggtaccgttggtcattgggtc

SEQ ID NO: 19349 - DNA, 56 bp, Artificial
  Synthetic oligonucleotide
ttgtggttaagtatatgtggtcgggacgactggacactttctttatgaattccgtc

SEQ ID NO: 19350 - DNA, 57 bp, Artificial
  Synthetic oligonucleotide
ggatagagacacttcgaaatttacgaatgaacggctactggtttcactccttgagta

SEQ ID NO: 19351 - DNA, 57 bp, Artificial
  Synthetic oligonucleotide
ggaggtgcccctaatcggagcgggtatggcgacagccgtcgcaacgggaagagcgat

SEQ ID NO: 19352 - DNA, 57 bp, Artificial
  Synthetic oligonucleotide
tgtaactacgatcttgcacttacgaatttcggggtttcgaggcgtcaggactgttgc

SEQ ID NO: 19353 - DNA, 53 bp, Artificial
  Synthetic oligonucleotide
acggttaaacataagactgttaaatggtttaccggtgagcgtcaggctattaa

SEQ ID NO: 19354 - DNA, 53 bp, Artificial
  Synthetic oligonucleotide
acaaggtctagtactgcctaccgaaatgggcgggaagaataagcgaaattatt

SEQ ID NO: 19355 - DNA, 57 bp, Artificial
  Synthetic oligonucleotide
aatatgcaccgagttgtttgatacacagaggcgaagaggtattctcctttcgtttac

SEQ ID NO: 19356 - DNA, 59 bp, Artificial
  Synthetic oligonucleotide
caatttcgcaagtgctccggcgtttactcagcgtacgagtcaaatggagtccgtgtcgc

SEQ ID NO: 19357 - DNA, 59 bp, Artificial
  Synthetic oligonucleotide
gctataggcaactgaggggacacggatttatatttgtaagcacgaggaagactgtacaa

SEQ ID NO: 19358 - DNA, 55 bp, Artificial
  Synthetic oligonucleotide
tgctactacatttactgttccgactgacgcgaacaacctccccgtccaaacggat

SEQ ID NO: 19359 - DNA, 58 bp, Artificial
  Synthetic oligonucleotide
atgcgtagatttcgctatagattttgtgtattttcaagaagtaacacacggtgggaca

SEQ ID NO: 19360 - DNA, 52 bp, Artificial
  Synthetic oligonucleotide
gggttctttcttgaaacggaggaaacgtatcagcccggtcgttggtttatgc

SEQ ID NO: 19361 - DNA, 59 bp, Artificial
  Synthetic oligonucleotide
gctctatacaatcaaaaccctgagtatgctaggcgtctcaaaccttttcaggcccgctc

SEQ ID NO: 19362 - DNA, 56 bp, Artificial
  Synthetic oligonucleotide
ggacctgaccgacaaccatttggttacttcttgacggcagcggaagttacacaaca

SEQ ID NO: 19363 - DNA, 57 bp, Artificial
  Synthetic oligonucleotide
caaatgtgtcacagtggaaggatttaactcgtttgccaattcgtgttcgtggaatta

SEQ ID NO: 19364 - DNA, 52 bp, Artificial
  Synthetic oligonucleotide
gtcaacgtctgataggttacgggttaaagggttaggtccaatgtctacgaaa

SEQ ID NO: 19365 - DNA, 59 bp, Artificial
  Synthetic oligonucleotide
ggagccgcgtatgagtttcaaaatggagggcataacaacgtggattggatcaaactgcg

SEQ ID NO: 19366 - DNA, 57 bp, Artificial
  Synthetic oligonucleotide
agtctgtaatcacgggggaatcttatggtgagactgtcaaacaagcggtattattaa

SEQ ID NO: 19367 - DNA, 56 bp, Artificial
  Synthetic oligonucleotide
tactttcgttacgagtccgatgtaagaatggtgttacaaagttcggtcacacacgc

SEQ ID NO: 19368 - DNA, 59 bp, Artificial
  Synthetic oligonucleotide
gcctgtattagatggtccataccaaccagttgcatttaaacctccgaatgattattgga

SEQ ID NO: 19369 - DNA, 53 bp, Artificial
  Synthetic oligonucleotide
gataaatcttcccgaagcaaccacgtttgacgtaacctactgaagagtccccc

SEQ ID NO: 19370 - DNA, 55 bp, Artificial
  Synthetic oligonucleotide
ctacgcgagtatacacaagtttagttaaggtagcgacacaaaatccatttacaaa

SEQ ID NO: 19371 - DNA, 59 bp, Artificial
  Synthetic oligonucleotide
tcatagatggggagacgtacgatttctacgtctggtatggtctgctcctaccctcgacg

SEQ ID NO: 19372 - DNA, 58 bp, Artificial
  Synthetic oligonucleotide
agcgcagcgattgcggctctcatctaaccgtctggaagcgtgggggtccccccacacc

SEQ ID NO: 19373 - DNA, 58 bp, Artificial
  Synthetic oligonucleotide
agcgctccgacgttttctcagcgtacgagtcaaatggagtccgtgtcgcttgggatac

SEQ ID NO: 19374 - DNA, 59 bp, Artificial
  Synthetic oligonucleotide
cgcaagtgctccgacgttttctcagcgtacgagtcaaatggagtccgtgtcgcttggga

SEQ ID NO: 19375 - DNA, 59 bp, Artificial
  Synthetic oligonucleotide
ttagcgaatcgggattggatacatatggcttgtattaaatttcgaattccgactagcga

SEQ ID NO: 19376 - DNA, 56 bp, Artificial
  Synthetic oligonucleotide
accgggtatgaattggacggaattgattcccaattattcaccttcaagagaagata

SEQ ID NO: 19377 - DNA, 59 bp, Artificial
  Synthetic oligonucleotide
tgagcttaacgtcctccactatatcaacgcctcagcaaccttttccaggttccgcatgg

SEQ ID NO: 19378 - DNA, 57 bp, Artificial
  Synthetic oligonucleotide
ttttcgcacgatcccgatgcaaagtacggagtatgttttgcaagtgaacacgtttta

SEQ ID NO: 19379 - DNA, 59 bp, Artificial
  Synthetic oligonucleotide
gtaatccatttaagggtctgtcaactgatagaaagatggatgaagtttctcaagtagga

SEQ ID NO: 19380 - DNA, 58 bp, Artificial
  Synthetic oligonucleotide
gaattggacggaattgattaccaattattcaccttcaagagaagataacttgcaacgc

SEQ ID NO: 19381 - DNA, 58 bp, Artificial
  Synthetic oligonucleotide
ctggtgagggattgcgtattactagggtaacagaacggctcgtggtactagctggatc

SEQ ID NO: 19382 - DNA, 57 bp, Artificial
  Synthetic oligonucleotide
ccgagcttcccatagggtgggttagagtcgtgtgcgcacgccacttagttctactaa

SEQ ID NO: 19383 - DNA, 58 bp, Artificial
  Synthetic oligonucleotide
aaaggctaaacgcgatatttcatctctcgccgccacccctggacttcgctcacaacca

SEQ ID NO: 19384 - DNA, 57 bp, Artificial
  Synthetic oligonucleotide
acgaggagatgatacgtaaaaaggtagagacttcgaaagatgctccacctaaggcag

SEQ ID NO: 19385 - DNA, 53 bp, Artificial
  Synthetic oligonucleotide
actgtccggtgaagttactaggttacaaatggagttaagtcgggctcagtccc

SEQ ID NO: 19386 - DNA, 52 bp, Artificial
  Synthetic oligonucleotide
gcgtgttaaccacgaactctacgtttaaagtatttgactcggaggactttat

SEQ ID NO: 19387 - DNA, 54 bp, Artificial
  Synthetic oligonucleotide
acgtttaaagtatttgactcggaggactttattatagagtatgggacaactgac

SEQ ID NO: 19388 - DNA, 58 bp, Artificial
  Synthetic oligonucleotide
agattatcgtccttcgaggaatgatgggatagtaataccaaggttgttggatataaca

SEQ ID NO: 19389 - DNA, 57 bp, Artificial
  Synthetic oligonucleotide
gcggttcatgtgttacaacaggatggcgagggaaccaaatctcgccgttcttccgcc

SEQ ID NO: 19390 - DNA, 54 bp, Artificial
  Synthetic oligonucleotide
ggccgtttccacccctgaggtatcggaatatctgaatcgagcgtttaaccttaa

SEQ ID NO: 19391 - DNA, 56 bp, Artificial
  Synthetic oligonucleotide
accagttgattggggttcaggtgaagtaaatgactcaacaacagttgaaccgactc

SEQ ID NO: 19392 - DNA, 58 bp, Artificial
  Synthetic oligonucleotide
catgctactgttaacggtaggttcagatacaggtcggagttatatcgggaacgtgatg

SEQ ID NO: 19393 - DNA, 56 bp, Artificial
  Synthetic oligonucleotide
gatatcgagtcaaccaatttcactttaagtttggaacctgtacctgtggactactc

SEQ ID NO: 19394 - DNA, 54 bp, Artificial
  Synthetic oligonucleotide
catacaacgtggtaaattgactaagtactccaaaccgaaataccattacgtcaa

SEQ ID NO: 19395 - DNA, 59 bp, Artificial
  Synthetic oligonucleotide
gtatgtggagggattgtctactagctctcgactttagggaggatatcatccaacccttg

SEQ ID NO: 19396 - DNA, 56 bp, Artificial
  Synthetic oligonucleotide
gtgactaagtcttaatcccgtttaaccaatccagtcagtgctggacgttaatggaa

SEQ ID NO: 19397 - DNA, 53 bp, Artificial
  Synthetic oligonucleotide
cccgtttaaccaatccagtcagtgctggacgttaatggaaagaacggtcttta

SEQ ID NO: 19398 - DNA, 52 bp, Artificial
  Synthetic oligonucleotide
gtagtcgaattccttttaccgaagcggattccggtccaccgtatataacgga

SEQ ID NO: 19399 - DNA, 54 bp, Artificial
  Synthetic oligonucleotide
gataaaactctcgaagcaaacacattcccccacgcgaccaccgtaaaaccaatg

SEQ ID NO: 19400 - DNA, 56 bp, Artificial
  Synthetic oligonucleotide
cgattatccggagttgtacctggtaccagagaatggagacccggaggcaaggagtc

SEQ ID NO: 19401 - DNA, 54 bp, Artificial
  Synthetic oligonucleotide
cgtccctactttgtttatgaagtaggagaaggcatattgttaacacccggaatg

SEQ ID NO: 19402 - DNA, 54 bp, Artificial
  Synthetic oligonucleotide
aattgtgacgttattattacgggagtaggaaaggtgagtgtacgcgaagaagac

SEQ ID NO: 19403 - DNA, 59 bp, Artificial
  Synthetic oligonucleotide
gagccctggtttgacgaattattcatgtgtgtcggtttaacatctgccgcgtaccgtgc

SEQ ID NO: 19404 - DNA, 57 bp, Artificial
  Synthetic oligonucleotide
tgtgatatgtgttcaagaagtcgggttgaagactggaaaatatcgtttcgcaagggt

SEQ ID NO: 19405 - DNA, 58 bp, Artificial
  Synthetic oligonucleotide
acgttcattgactgctaatttgaactctgtgatgtgtacggggggcgattatagtttc

SEQ ID NO: 19406 - DNA, 59 bp, Artificial
  Synthetic oligonucleotide
taccggtttgatattagtcgtgatgtgaatttgattacctatactgtgacgcgaactaa

SEQ ID NO: 19407 - DNA, 59 bp, Artificial
  Synthetic oligonucleotide
tcagtatatgagtaaaaacttgtgggtggagcagtggcaggatggggtactacggttgc

SEQ ID NO: 19408 - DNA, 59 bp, Artificial
  Synthetic oligonucleotide
acctgtgtcctaacgcggatgcgggagagtcatttacttccatgtcacacgatttatac

SEQ ID NO: 19409 - DNA, 59 bp, Artificial
  Synthetic oligonucleotide
tttacagtatttggatggtaaggattggcgtaaatatcgtgctagaattactgtacatc

SEQ ID NO: 19410 - DNA, 59 bp, Artificial
  Synthetic oligonucleotide
gactaagactgaagtgccctcatggtttaagagccttaacccaatgcttggtgttgtca

SEQ ID NO: 19411 - DNA, 55 bp, Artificial
  Synthetic oligonucleotide
cgaattacaaagattgactttggcgcgattttacgacattcgtcccgctttaaga

SEQ ID NO: 19412 - DNA, 57 bp, Artificial
  Synthetic oligonucleotide
ttttgcctgagttatccatggtgtcctacgtccccgaagatgtaattctgggcttta

SEQ ID NO: 19413 - DNA, 59 bp, Artificial
  Synthetic oligonucleotide
tctactcgaacgagcaggtgaggcactttcgactgccgttcaaagagaaaacgcttcgc

SEQ ID NO: 19414 - DNA, 58 bp, Artificial
  Synthetic oligonucleotide
cgggttggccttatacggggatccacgtattgccgatctctctgctgcttacctacaa

SEQ ID NO: 19415 - DNA, 59 bp, Artificial
  Synthetic oligonucleotide
ttcgcgctcatggttgaccttgagtacggaagggtcgcttatcaagaggtgtacgtcta

SEQ ID NO: 19416 - DNA, 59 bp, Artificial
  Synthetic oligonucleotide
actgctatattgaatgctctacaacacggcgtcgcacttgttccgaaaaaccgagtcta

SEQ ID NO: 19417 - DNA, 59 bp, Artificial
  Synthetic oligonucleotide
tttgatctaagcaatagaccggcttgcaacctgatccttaagcgaacgtgtaaatggta

SEQ ID NO: 19418 - DNA, 55 bp, Artificial
  Synthetic oligonucleotide
gggctccaaaccttgaacgtgttaagtacatgcgtgaaagaggtgtattgcccgg

SEQ ID NO: 19419 - DNA, 56 bp, Artificial
  Synthetic oligonucleotide
ggggaatcatatggggaatcggtgaaacaggcggtcctactgaatgtattgggtac

SEQ ID NO: 19420 - DNA, 59 bp, Artificial
  Synthetic oligonucleotide
cgcatctacgaaccccaaagatagagccgacaatggtcgcgaccactctagaacatagg

SEQ ID NO: 19421 - DNA, 59 bp, Artificial
  Synthetic oligonucleotide
gacaaaccaaatgagtataagtggctaagatacgtaacatgtgtaattggtccagacac

SEQ ID NO: 19422 - DNA, 57 bp, Artificial
  Synthetic oligonucleotide
cgattgttcaaacaatgaccccgagacatcgggcaatttatccggaaggttggatgc

SEQ ID NO: 19423 - DNA, 59 bp, Artificial
  Synthetic oligonucleotide
ttcaagacgtatcaaacgacgtgagagaaacgtatgcgcgaatgaatgctaaagttaag

SEQ ID NO: 19424 - DNA, 54 bp, Artificial
  Synthetic oligonucleotide
aggtaagacgggtagagattacgcaaggtaagagaccagatccttggacccaaa

SEQ ID NO: 19425 - DNA, 55 bp, Artificial
  Synthetic oligonucleotide
aaggcgtcgctaacttgaccggtaatggccaaggtgtggtaccctgcctcgatta

SEQ ID NO: 19426 - DNA, 59 bp, Artificial
  Synthetic oligonucleotide
tctccagactatcaacaacatatgggtacgatcggtgttttagcaacgcctgaggttcc

SEQ ID NO: 19427 - DNA, 56 bp, Artificial
  Synthetic oligonucleotide
atggcgtacgctatcttgagaagctttgtaaaacaatatctaaaggggaacgcagt

SEQ ID NO: 19428 - DNA, 56 bp, Artificial
  Synthetic oligonucleotide
cggttcacgcttgtccaccgctagtaccaatcccttcgtctaacatgaacgccgac

SEQ ID NO: 19429 - DNA, 57 bp, Artificial
  Synthetic oligonucleotide
tcccattcaccaatgtacggtagtggacgtgagagtcactttgaagaggcgtttttc

SEQ ID NO: 19430 - DNA, 59 bp, Artificial
  Synthetic oligonucleotide
gtaacacatatccgacacttaagctaactgatgatacctggaatccatacgacgtaaat

SEQ ID NO: 19431 - DNA, 54 bp, Artificial
  Synthetic oligonucleotide
cggtgtctcgagaaacgctgcgggtactgggtcccagaccatactacgtgggtt

SEQ ID NO: 19432 - DNA, 53 bp, Artificial
  Synthetic oligonucleotide
ggggggatgagtttaagaaagtggaattaggcgacaactggagtttacacaag

SEQ ID NO: 19433 - DNA, 56 bp, Artificial
  Synthetic oligonucleotide
ggctacaaactgaactttgcttcggtggttgcccctgacgcgcctttctggattaa

SEQ ID NO: 19434 - DNA, 59 bp, Artificial
  Synthetic oligonucleotide
ggctaacggaagatatacgccaggcataataccaccagtgaatgttgataaaccaatac

SEQ ID NO: 19435 - DNA, 57 bp, Artificial
  Synthetic oligonucleotide
agccatagtcagccatatcgcgtgtggcttaagccttaatcccgtttaactaatccg

SEQ ID NO: 19436 - DNA, 59 bp, Artificial
  Synthetic oligonucleotide
atccagcctggtagtaatgaacccacgctggggactcagttatatctcttcgggagtga

SEQ ID NO: 19437 - DNA, 57 bp, Artificial
  Synthetic oligonucleotide
ggagtggtggtcgttagatccgtctggcgtggaagttttgacagcgaacctgtgtcc

SEQ ID NO: 19438 - DNA, 55 bp, Artificial
  Synthetic oligonucleotide
tttcctgacagtatggggacccgaacatactgacgaccccgacgtcttacgtcta

SEQ ID NO: 19439 - DNA, 55 bp, Artificial
  Synthetic oligonucleotide
ctaaatactgatattcctcctcgaatgggatggttacgggccattttacgattct

SEQ ID NO: 19440 - DNA, 56 bp, Artificial
  Synthetic oligonucleotide
gtcgttgacatttgtacttaccgcaggtcaaacgttgtcttataattacttcacca

SEQ ID NO: 19441 - DNA, 59 bp, Artificial
  Synthetic oligonucleotide
gtagccgtaccgtggactatcacgaattggatgtgaaagctggattcgtcgccccaaca

SEQ ID NO: 19442 - DNA, 58 bp, Artificial
  Synthetic oligonucleotide
gccccaacagcagatgagacagtcgccccctccaaggacatcgtcgaacttccgtttc

SEQ ID NO: 19443 - DNA, 57 bp, Artificial
  Synthetic oligonucleotide
ttctacgatcctgtcgcggtagcaaagttcgcaactacttacgctaaattaggcaac

SEQ ID NO: 19444 - DNA, 54 bp, Artificial
  Synthetic oligonucleotide
gcccgcgtattgagtggacggaaccccgctcgtcgtatcggtttaagtggattg

SEQ ID NO: 19445 - DNA, 58 bp, Artificial
  Synthetic oligonucleotide
aatgtgtttcgtccgacggcggatcaacgatctagtgctgttccaacgttgcaattaa

SEQ ID NO: 19446 - DNA, 58 bp, Artificial
  Synthetic oligonucleotide
cagtactacaatttaacaccgatgtcactaaacaaatggtccaagatgtgtcaaacga

SEQ ID NO: 19447 - DNA, 55 bp, Artificial
  Synthetic oligonucleotide
ccgctatactaaacagaacaacgcttccaaatatgttacctccaatcttcccgcc

SEQ ID NO: 19448 - DNA, 59 bp, Artificial
  Synthetic oligonucleotide
agcgaatgtcacatctgttagacaagaatacgcgataccggttggaccagtctttccgc

SEQ ID NO: 19449 - DNA, 59 bp, Artificial
  Synthetic oligonucleotide
atgttagaggccccgccggaaatagatcgtgtggttcagtacacttatgagatcgcacg

SEQ ID NO: 19450 - DNA, 59 bp, Artificial
  Synthetic oligonucleotide
gagcacaccgctaacaatggggctatggccgacttcttcctccgtgagtacgtccctca

SEQ ID NO: 19451 - DNA, 58 bp, Artificial
  Synthetic oligonucleotide
aatcgtaggccaagtgacaattatctttgactacccggatgcgggactcagaggtgtg

SEQ ID NO: 19452 - DNA, 56 bp, Artificial
  Synthetic oligonucleotide
gaggcccgaaacatttccaaagacgtgcaataatgggtgcgattaaggtaggtgta

SEQ ID NO: 19453 - DNA, 57 bp, Artificial
  Synthetic oligonucleotide
aacgaatagatggttcgcctgcgtactcgttgaaccaagcgtacaaagcacacgccg

SEQ ID NO: 19454 - DNA, 58 bp, Artificial
  Synthetic oligonucleotide
gatggttcgcctgcgtactcattgaaccaagcgtacaaagcacacgccgggaatacgt

SEQ ID NO: 19455 - DNA, 59 bp, Artificial
  Synthetic oligonucleotide
gatcaatggacacaccatgtacgaactcaacacgagaggaagtattcctaacttcgact

SEQ ID NO: 19456 - DNA, 59 bp, Artificial
  Synthetic oligonucleotide
gttactccagattatatgaaagaggggtctaagattgatatgcaaccgtaccattccta

SEQ ID NO: 19457 - DNA, 55 bp, Artificial
  Synthetic oligonucleotide
cttggttatacaacgaacttcggtcggtttgtcgtcgctatggacccgcgaatga

SEQ ID NO: 19458 - DNA, 56 bp, Artificial
  Synthetic oligonucleotide
ggctaacggaaaatacacaccgggtgtgataccaccagtgaatgtagacaaaccaa

SEQ ID NO: 19459 - DNA, 59 bp, Artificial
  Synthetic oligonucleotide
aatgaacccacgctggggactcagttatatctcttcgggagtgatataccgagtactgc

SEQ ID NO: 19460 - DNA, 55 bp, Artificial
  Synthetic oligonucleotide
actttgacaccctaatacgatcccattcgtatccaagacaacccggtataagcga

SEQ ID NO: 19461 - DNA, 56 bp, Artificial
  Synthetic oligonucleotide
gagtttcgatgtgctcccgagattactccgggaggcgtccccatcgtttttgtaga

SEQ ID NO: 19462 - DNA, 56 bp, Artificial
  Synthetic oligonucleotide
cttacgttgtcggggaataatctcgccattcggttgccaggcaatacgggtctgaa

SEQ ID NO: 19463 - DNA, 52 bp, Artificial
  Synthetic oligonucleotide
acggtggagatctatcgttgaactttgttaccggattattaccaccgttact

SEQ ID NO: 19464 - DNA, 59 bp, Artificial
  Synthetic oligonucleotide
actacatacgctaattccacacgagaagagacattccttacgtcaactttatgcctgta

SEQ ID NO: 19465 - DNA, 58 bp, Artificial
  Synthetic oligonucleotide
gatgagagttgaatacaccaaacagtccaagtacagaacgtgcgtttgtccctccgct

SEQ ID NO: 19466 - DNA, 55 bp, Artificial
  Synthetic oligonucleotide
gaccttcaagtaacgttggatgcgatcaagtggatttctccttaactaaaggtat

SEQ ID NO: 19467 - DNA, 55 bp, Artificial
  Synthetic oligonucleotide
cttcaagcaacgttgggtgcgatcaagtggatttctccttaactaaaggtattaa

SEQ ID NO: 19468 - DNA, 59 bp, Artificial
  Synthetic oligonucleotide
agcattatatattcaaggctttggtgatcgtggaataggaagagataggtttcggacaa

SEQ ID NO: 19469 - DNA, 58 bp, Artificial
  Synthetic oligonucleotide
gagcacaacgttatcagtttacagaaagtatacccaatcacactttactattagctaa

SEQ ID NO: 19470 - DNA, 58 bp, Artificial
  Synthetic oligonucleotide
aattgtaagaagttaggtccaagagagaatgtagctgtaatacaagttggtggctcta

SEQ ID NO: 19471 - DNA, 55 bp, Artificial
  Synthetic oligonucleotide
tattggcgccagactttaacttatttggtgtagtacctatacaaggtccgattaa

SEQ ID NO: 19472 - DNA, 57 bp, Artificial
  Synthetic oligonucleotide
atggcctaaccagtcagccgaaacttactcataacgcttttagggcgatgccgatta

SEQ ID NO: 19473 - DNA, 59 bp, Artificial
  Synthetic oligonucleotide
cgatacatcaactcaccatacagtactgttgcaagcaattttaaggggtaacgaattgc

SEQ ID NO: 19474 - DNA, 55 bp, Artificial
  Synthetic oligonucleotide
gacggggatacaacggctaccgagcaaatgacctacgaaacgaaccaacttgcta

SEQ ID NO: 19475 - DNA, 55 bp, Artificial
  Synthetic oligonucleotide
tgccaccctttgattgtatacaaataccttcaggacagggctcctccctttttag

SEQ ID NO: 19476 - DNA, 55 bp, Artificial
  Synthetic oligonucleotide
ggggaataagtcttccatacttgtttggggacgcgattacggagatgcggccgga

SEQ ID NO: 19477 - DNA, 50 bp, Artificial
  Synthetic oligonucleotide
aattacgttcaaacgggtaaccacgaggtgctaattgacccgttaccaaa

SEQ ID NO: 19478 - DNA, 58 bp, Artificial
  Synthetic oligonucleotide
actctcaacgattcgtcttacctactagtcacagaacaaccgctttatatgaggcatt

SEQ ID NO: 19479 - DNA, 57 bp, Artificial
  Synthetic oligonucleotide
gttagcgataaagtacgttaatgcacttcgtggggatttatcccttatatgacaggc

SEQ ID NO: 19480 - DNA, 59 bp, Artificial
  Synthetic oligonucleotide
gccctaaggattcttggacaggctacgaggagcacattttcgtggatggttgacattaa

SEQ ID NO: 19481 - DNA, 58 bp, Artificial
  Synthetic oligonucleotide
actggccgaggattacaacgcattgaacttagctgttggtcaagagataaagttggac

SEQ ID NO: 19482 - DNA, 59 bp, Artificial
  Synthetic oligonucleotide
agtggtgacgggtctgctagacggctgaagcgggactcatacgcaggagtggttaagcg

SEQ ID NO: 19483 - DNA, 55 bp, Artificial
  Synthetic oligonucleotide
atcttggtggaattcgtaccgcagtttgtaaccgaagtggatatgttacaatgtt

SEQ ID NO: 19484 - DNA, 54 bp, Artificial
  Synthetic oligonucleotide
tggtaagagaagcttttgccggtactgtttctcagaattacccaacgttacgct

SEQ ID NO: 19485 - DNA, 57 bp, Artificial
  Synthetic oligonucleotide
atggactaatccagggcagtgttgaatcggtattaacgggtgaatcgtatggtgaaa

SEQ ID NO: 19486 - DNA, 54 bp, Artificial
  Synthetic oligonucleotide
ctcacgcggagcgggagaatacgggtgagagttatccgataggggaaaggttgt

SEQ ID NO: 19487 - DNA, 58 bp, Artificial
  Synthetic oligonucleotide
cacgctaaccggctacgcaaaagatcaagttgtatgccctcattccggcggtgcgttc

SEQ ID NO: 19488 - DNA, 59 bp, Artificial
  Synthetic oligonucleotide
ggttcggccgcgattgatgggctggttcaaggaagcgttcattcaatcatgacggggga

SEQ ID NO: 19489 - DNA, 59 bp, Artificial
  Synthetic oligonucleotide
acgtacactaaatgaggcgtacagagaatttcttaatctgtccattggaagcacgttca

SEQ ID NO: 19490 - DNA, 55 bp, Artificial
  Synthetic oligonucleotide
atcccgtttaaccaatccggcgaatgttggacgttaatggaaggaatggtctgca

SEQ ID NO: 19491 - DNA, 55 bp, Artificial
  Synthetic oligonucleotide
gggacagtcttgtaccataaaagtatgtccactaaatacacaaactttaggaata

SEQ ID NO: 19492 - DNA, 58 bp, Artificial
  Synthetic oligonucleotide
atgtagctcctataggacacgctagatttaacatcgggacctttccttcgttggcatc

SEQ ID NO: 19493 - DNA, 57 bp, Artificial
  Synthetic oligonucleotide
agtttcattatagcaagggtgttccgaccatctcacaacgtggtgaagctccggtta

SEQ ID NO: 19494 - DNA, 54 bp, Artificial
  Synthetic oligonucleotide
ccggttaacggaaagatgatcgtcgtttggacgcctgtgttgtcgggttcctca

SEQ ID NO: 19495 - DNA, 56 bp, Artificial
  Synthetic oligonucleotide
cacgaactagattaagcggtatctatggattaccagcggcgaacccaaataataac

SEQ ID NO: 19496 - DNA, 58 bp, Artificial
  Synthetic oligonucleotide
atccaacggggcgtcgttggagggactacggatatagtcaatcagagttgtatgacgc

SEQ ID NO: 19497 - DNA, 58 bp, Artificial
  Synthetic oligonucleotide
ccaactggagagcccttagactttagaatcggtcgtggacagtatgactgcaacgtat

SEQ ID NO: 19498 - DNA, 56 bp, Artificial
  Synthetic oligonucleotide
ccagatcaccctttcacatcgtttatacgcttccgagagggaagggaaagcgccac

SEQ ID NO: 19499 - DNA, 59 bp, Artificial
  Synthetic oligonucleotide
tggtacatcagctgagatacctcaatggtttaagagtttgaacccaatgttaggcgtgg

SEQ ID NO: 19500 - DNA, 56 bp, Artificial
  Synthetic oligonucleotide
actatggtcatctcttctttactccagacgaactacgacgtacgtacaatacgccg

SEQ ID NO: 19501 - DNA, 53 bp, Artificial
  Synthetic oligonucleotide
cgcggaaacttccgactcttctgaacccttcacacgaggtaccacccacccga

SEQ ID NO: 19502 - DNA, 59 bp, Artificial
  Synthetic oligonucleotide
tggagtatcaggcgcccaatctgacgtggagggtacccgtgacggtaaatctgatgagg

SEQ ID NO: 19503 - DNA, 59 bp, Artificial
  Synthetic oligonucleotide
attgataagaccgatcaactgaatacaaccgataccgtcgttgagctaccatccattcc

SEQ ID NO: 19504 - DNA, 59 bp, Artificial
  Synthetic oligonucleotide
ctatgatccagcgcctaaacggtatcgtcaccagatacaacacgaccaattacgtggta

SEQ ID NO: 19505 - DNA, 58 bp, Artificial
  Synthetic oligonucleotide
tacgcttaaatatttcgttggattattggttagttgtgctcatggcctttcgatggag

SEQ ID NO: 19506 - DNA, 57 bp, Artificial
  Synthetic oligonucleotide
ttattcacagatactggcctaacccttcacagattcgttatggtgcaccgaacgttt

SEQ ID NO: 19507 - DNA, 55 bp, Artificial
  Synthetic oligonucleotide
aaactacgatatggcctaaccgatgaaatgttacaaaaactgtcgagcctattac

SEQ ID NO: 19508 - DNA, 55 bp, Artificial
  Synthetic oligonucleotide
gtagttggagacgatacagtaaaccttaagcttatatgtcgtaaaagtacgagtg

SEQ ID NO: 19509 - DNA, 58 bp, Artificial
  Synthetic oligonucleotide
gtatcccgcacacccccagtaataggagcagtcgcacgtgctttacgtaaagtatgtg

SEQ ID NO: 19510 - DNA, 56 bp, Artificial
  Synthetic oligonucleotide
ccctaaccccggccgaacgtgctacactgcgatcaagaattgttccaaggaatgga

SEQ ID NO: 19511 - DNA, 55 bp, Artificial
  Synthetic oligonucleotide
ggggtagccgtggcgagggacttatcaccccaagtgacggagcgacgatagaggt

SEQ ID NO: 19512 - DNA, 59 bp, Artificial
  Synthetic oligonucleotide
gttcaactcgcgcgaccaacgatttagcagcctgaccacctggtgaatcgttctagcgg

SEQ ID NO: 19513 - DNA, 52 bp, Artificial
  Synthetic oligonucleotide
cgtttcggcaagaaggttgggaacgcgttaacgtctaacacagcgaagaaaa

SEQ ID NO: 19514 - DNA, 57 bp, Artificial
  Synthetic oligonucleotide
tacgcatgttaccgaccccttcgtcaacgtgagccgacagttgcaggttggtaacta

SEQ ID NO: 19515 - DNA, 56 bp, Artificial
  Synthetic oligonucleotide
gtagctttctagacgttgaggtctctacaactagtacttcccgtgttgtggttcac

SEQ ID NO: 19516 - DNA, 54 bp, Artificial
  Synthetic oligonucleotide
agactacatacaaaatttcgctacaatcggggtttcggcgacacctgaaatacc

SEQ ID NO: 19517 - DNA, 58 bp, Artificial
  Synthetic oligonucleotide
taatacttaattgaaccaactcagtttttgccatcacgagaccttctggactagagta

SEQ ID NO: 19518 - DNA, 57 bp, Artificial
  Synthetic oligonucleotide
cctgagtacaccagacctggttcacgtctgcccaccgctagtactaatcccttcgtc

SEQ ID NO: 19519 - DNA, 55 bp, Artificial
  Synthetic oligonucleotide
cgcaccaactcaaacgggtagggttgcagagggaacaaacacaacggatagatgg

SEQ ID NO: 19520 - DNA, 59 bp, Artificial
  Synthetic oligonucleotide
gcgaccgctagctttgtcggctccgggaaatacaccgctcaggacacatgtgaatttcg

SEQ ID NO: 19521 - DNA, 54 bp, Artificial
  Synthetic oligonucleotide
aattctgtattggcccgagtccccattcgtgcccccgataggcccgttctacgc

SEQ ID NO: 19522 - DNA, 53 bp, Artificial
  Synthetic oligonucleotide
aacggttcgcgttaaattctatgacgcgcgacccccggatgacgttttgcaag

SEQ ID NO: 19523 - DNA, 56 bp, Artificial
  Synthetic oligonucleotide
ctataaatacctatcaacgggaaaagccaaggtgtgttgtgttaagttgactgcta

SEQ ID NO: 19524 - DNA, 58 bp, Artificial
  Synthetic oligonucleotide
gaatatgtaccttgggtaactaggaacatgtcatataggtcactaccggtccagatta

SEQ ID NO: 19525 - DNA, 57 bp, Artificial
  Synthetic oligonucleotide
ctattagctggtctccttcgctcccaacttatgtggtacctccgggtgattatactc

SEQ ID NO: 19526 - DNA, 59 bp, Artificial
  Synthetic oligonucleotide
gagggcctctactgatgtaccatttcagttggtaggacagaattatgtttcgatcggaa

SEQ ID NO: 19527 - DNA, 57 bp, Artificial
  Synthetic oligonucleotide
gctaatcgtcaggatgaagcggattccaaggaaaacgcgtggtaagtccagtggtaa

SEQ ID NO: 19528 - DNA, 59 bp, Artificial
  Synthetic oligonucleotide
gagcgagagttaggtagtggagtacgagatgcgaacttagaaatgatcgttgggaagtg

SEQ ID NO: 19529 - DNA, 54 bp, Artificial
  Synthetic oligonucleotide
cgtcaacttacaagtatcaggatttattagcggggcgtaatcgcggagaaaaag

SEQ ID NO: 19530 - DNA, 55 bp, Artificial
  Synthetic oligonucleotide
gtaatgccgaattccaacataagcgtacgctaacttcgagtacaaaactcgtcgg

SEQ ID NO: 19531 - DNA, 55 bp, Artificial
  Synthetic oligonucleotide
tattggatgttgttagcaccaacgaacgcgggggtagtagttgaaggtacgaaca

SEQ ID NO: 19532 - DNA, 59 bp, Artificial
  Synthetic oligonucleotide
actactgggacgattcacaagcatttagaaacatggtaaatgtacgctcgttggcagcc

SEQ ID NO: 19533 - DNA, 57 bp, Artificial
  Synthetic oligonucleotide
gtcagttgctataaccggatcgctaagactattcccttctgaacgcgtgttaaccac

SEQ ID NO: 19534 - DNA, 54 bp, Artificial
  Synthetic oligonucleotide
ccggatcgctaagactattcccttctgaacgcgtgttaaccacgaactctacgt

SEQ ID NO: 19535 - DNA, 58 bp, Artificial
  Synthetic oligonucleotide
ttcaacgcattattacccgacctaattgctggggcgcatcagaacgccgacccagtcg

SEQ ID NO: 19536 - DNA, 55 bp, Artificial
  Synthetic oligonucleotide
attagaaatttgtgttatgtgcctcacgctacttactacgctttacgcggggtat

SEQ ID NO: 19537 - DNA, 53 bp, Artificial
  Synthetic oligonucleotide
cttaacgtccgatttacccggagtacaaccgtttatggacatgtactacgcca

SEQ ID NO: 19538 - DNA, 59 bp, Artificial
  Synthetic oligonucleotide
aatcgacgtgctatcaaccgctactgagttctaccgattaatcgaagaacatgacgtaa

SEQ ID NO: 19539 - DNA, 58 bp, Artificial
  Synthetic oligonucleotide
gagatcgttaaacccgaggatttatacacatcgatgttacgattagcgagaaatacaa

SEQ ID NO: 19540 - DNA, 59 bp, Artificial
  Synthetic oligonucleotide
ctaaggccactccagtacgctaagcgtgagcgtttgcttggtcagaggaatctggaacg

SEQ ID NO: 19541 - DNA, 57 bp, Artificial
  Synthetic oligonucleotide
ccgtgagcgtatttactccatctctcgcccctcgttcttatcgacccgccttcatta

SEQ ID NO: 19542 - DNA, 59 bp, Artificial
  Synthetic oligonucleotide
caaacgtctgaggaggtcgcctctgccttagccaacgacgcgatcgtgttagtgtcgaa

SEQ ID NO: 19543 - DNA, 55 bp, Artificial
  Synthetic oligonucleotide
ttttcgtcagtcccgctagatggtttcgaactgccgttaacctaagatcagtagg

SEQ ID NO: 19544 - DNA, 56 bp, Artificial
  Synthetic oligonucleotide
gttaagtctggagggttgggatacaaatgggcagagttatcgtttaagccgatgaa

SEQ ID NO: 19545 - DNA, 56 bp, Artificial
  Synthetic oligonucleotide
ggactagcacagtaacgaatgaagtaccggaagtttctaatacaatttcaactcaa

SEQ ID NO: 19546 - DNA, 59 bp, Artificial
  Synthetic oligonucleotide
aacgtaggaccgatatctccagattatacccaacatatggctacaattggtgtactagc

SEQ ID NO: 19547 - DNA, 55 bp, Artificial
  Synthetic oligonucleotide
agatggtttcgaattaccattaacctaagatcagtaggtagagtggcgccccgag

SEQ ID NO: 19548 - DNA, 57 bp, Artificial
  Synthetic oligonucleotide
acgagagacaccggttctggaagctgtatgcggttttaacaccaatccctcacctga

SEQ ID NO: 19549 - DNA, 56 bp, Artificial
  Synthetic oligonucleotide
tggacagttccaacttcaacgtatccaatgaagtacgataattttccttgcgttaa

SEQ ID NO: 19550 - DNA, 56 bp, Artificial
  Synthetic oligonucleotide
tttttaaaggtgggatgttacagattacggtaagtggtgagataccgaatgacata

SEQ ID NO: 19551 - DNA, 58 bp, Artificial
  Synthetic oligonucleotide
ggcacgttgattgcagcggaatgtgtcttaggtgacccgtataaaactttgcgacgga

SEQ ID NO: 19552 - DNA, 59 bp, Artificial
  Synthetic oligonucleotide
cactcatatctggtatgtggttattgaccgttataccaaacgatatgtttcttcgtgaa

SEQ ID NO: 19553 - DNA, 57 bp, Artificial
  Synthetic oligonucleotide
ccggaaataatctcaaagcttatgaactagatccttgaccggatctactggggacaa

SEQ ID NO: 19554 - DNA, 54 bp, Artificial
  Synthetic oligonucleotide
acgtcattgccggttcaaaagatcaaacttaccggagcagaacatttgggtcgg

SEQ ID NO: 19555 - DNA, 54 bp, Artificial
  Synthetic oligonucleotide
gctaagccgttttggcaaaaaagtaggcaacgctttaacctcaaatacagcgaa

SEQ ID NO: 19556 - DNA, 59 bp, Artificial
  Synthetic oligonucleotide
gcggttaactcgtatgagaaattacttctagccgaaaatgacgagatgcgtacgctagc

SEQ ID NO: 19557 - DNA, 56 bp, Artificial
  Synthetic oligonucleotide
gataaatcccggaccattcgcacaaaccggatatgcaccagttaattggggaccag

SEQ ID NO: 19558 - DNA, 57 bp, Artificial
  Synthetic oligonucleotide
taccaatcgttggctagctaccattttagtagaaccaggagtagcgtcgacaacgag

SEQ ID NO: 19559 - DNA, 58 bp, Artificial
  Synthetic oligonucleotide
gagatcgaattcgttttttatgaggatacatcggtagagggacacataatgcacgggg

SEQ ID NO: 19560 - DNA, 54 bp, Artificial
  Synthetic oligonucleotide
cacggtgtaacaataagatatatcgagaaggagattccaaacccaaagggtaag

SEQ ID NO: 19561 - DNA, 59 bp, Artificial
  Synthetic oligonucleotide
attgatgggttagttcagggtagcgttcactcgattatgacgggcgaatcctatggtga

SEQ ID NO: 19562 - DNA, 58 bp, Artificial
  Synthetic oligonucleotide
gtattgatctttcgcatctacgaacaccgaaaatagaacccacgatggtcgcaaccac

SEQ ID NO: 19563 - DNA, 58 bp, Artificial
  Synthetic oligonucleotide
gttaattgcgcctactcaaataggtagagtagcggaaggtacaaacacaactgataga

SEQ ID NO: 19564 - DNA, 57 bp, Artificial
  Synthetic oligonucleotide
accttacggtataatacgaccggacaacgcgtgcgtccattggctcctaatcagcaa

SEQ ID NO: 19565 - DNA, 58 bp, Artificial
  Synthetic oligonucleotide
atgttgggtatgacagagcttcagtattagacgtcaaacgaggtattacaatagtaaa

SEQ ID NO: 19566 - DNA, 58 bp, Artificial
  Synthetic oligonucleotide
ctacaatggggagaacatttacaagaccctgattcgtctgaacgactcgcccgatctg

SEQ ID NO: 19567 - DNA, 55 bp, Artificial
  Synthetic oligonucleotide
cgggtttgaggagtcacgacctcttatacgctggtctgcggattggttaggtccc

SEQ ID NO: 19568 - DNA, 54 bp, Artificial
  Synthetic oligonucleotide
ccgggaccattcgcgcagactgggtacgctccggttaactggggacacggtgaa

SEQ ID NO: 19569 - DNA, 54 bp, Artificial
  Synthetic oligonucleotide
cggaggcattacgtgatccagaaccaatacgtcaaattaagaaaaccgttggat

SEQ ID NO: 19570 - DNA, 59 bp, Artificial
  Synthetic oligonucleotide
ggattaaggacacttaagcatttaaagatagagttggcgtcgatgagacgtaggtatgc

SEQ ID NO: 19571 - DNA, 54 bp, Artificial
  Synthetic oligonucleotide
gggtaaggttcggtggtgttttacgcactgtacgcgttaagttcttcgatgcgc

SEQ ID NO: 19572 - DNA, 57 bp, Artificial
  Synthetic oligonucleotide
agcgggttcgtcagactccgtcaagaacatttccacgcaaacgtcagctattagtaa

SEQ ID NO: 19573 - DNA, 56 bp, Artificial
  Synthetic oligonucleotide
caaaaggtatcgtagttataggtatcattccggatactatctcgaatgcccaaggt

SEQ ID NO: 19574 - DNA, 56 bp, Artificial
  Synthetic oligonucleotide
aaggatgggatcgaaagcgttgaaaagacggcagtatcggagtttatgtgccaatt

SEQ ID NO: 19575 - DNA, 59 bp, Artificial
  Synthetic oligonucleotide
cagcactcaccaaatctacgttcccgcaatccgacgtgaagcttgtagagtctactccc

SEQ ID NO: 19576 - DNA, 58 bp, Artificial
  Synthetic oligonucleotide
acgttagggattgcaatcaataggtataatggtttaacaaatcattcggtatcgatga

SEQ ID NO: 19577 - DNA, 53 bp, Artificial
  Synthetic oligonucleotide
tcctggggacgtgcgttgtacggttgactaaggcgggcgtccccctagtccga

SEQ ID NO: 19578 - DNA, 56 bp, Artificial
  Synthetic oligonucleotide
cgagtgccggagggtgtccgaaggatcgtggaggcctacctgtgggggtcaactca

SEQ ID NO: 19579 - DNA, 56 bp, Artificial
  Synthetic oligonucleotide
tctaacgactgatccaaatacgtttgaaacagttgcgacgactgaaaaactggtaa

SEQ ID NO: 19580 - DNA, 56 bp, Artificial
  Synthetic oligonucleotide
ctatgttggatgcggtgacttacgtaccttgatgcagtttaaaaaacgttcaccag

SEQ ID NO: 19581 - DNA, 53 bp, Artificial
  Synthetic oligonucleotide
attcgtggtttgttaagaattggggtattggatgtccgagagtgaaggtttta

SEQ ID NO: 19582 - DNA, 52 bp, Artificial
  Synthetic oligonucleotide
cccaacgcgaagggtggacgtggggaaaagattcaaataacgtcgcggatta

SEQ ID NO: 19583 - DNA, 56 bp, Artificial
  Synthetic oligonucleotide
tgtactatacgcaactgtaaaaaattaggaccaagggaaaacgtagcagtcataca

SEQ ID NO: 19584 - DNA, 53 bp, Artificial
  Synthetic oligonucleotide
aaaattaggaccaagggaaaacgtagcagtcatacaagtaggcggcgcgaacg

SEQ ID NO: 19585 - DNA, 57 bp, Artificial
  Synthetic oligonucleotide
tcaaaagcgagatcgagtacggtatacctttgtttgttagagacgcgctagtaccac

SEQ ID NO: 19586 - DNA, 58 bp, Artificial
  Synthetic oligonucleotide
cagtaaactggggctctggcgaaacgaatgattctacaacagttgaaccagtactgga

SEQ ID NO: 19587 - DNA, 56 bp, Artificial
  Synthetic oligonucleotide
gactggaggtattggtaatcttcctatcagaaattggaacttcgattttgggctac

SEQ ID NO: 19588 - DNA, 58 bp, Artificial
  Synthetic oligonucleotide
cccaccgagacggtactgcaagaatatacacagagtccggagatcaaagttcctatcc

SEQ ID NO: 19589 - DNA, 58 bp, Artificial
  Synthetic oligonucleotide
ccgcgcagttgttaatggtgggacttcaggagtcagaagcggacgcattggccgggaa

SEQ ID NO: 19590 - DNA, 58 bp, Artificial
  Synthetic oligonucleotide
agccccaagatcgaacctactattatcgccacaactcttgagcataggtttaaagata

SEQ ID NO: 19591 - DNA, 57 bp, Artificial
  Synthetic oligonucleotide
gcgttagggatggcacaagaggccagtggacggactttaacggaggcttatagagag

SEQ ID NO: 19592 - DNA, 58 bp, Artificial
  Synthetic oligonucleotide
tattaggcgataagatagatgttcccctcttcttacgaaatgcttgaacgcagcgggg

SEQ ID NO: 19593 - DNA, 54 bp, Artificial
  Synthetic oligonucleotide
gtgcaggggaataatttggccatccggctacccggtagtacaggtttaaacata

SEQ ID NO: 19594 - DNA, 54 bp, Artificial
  Synthetic oligonucleotide
ggccatccggctacccggtagtacaggtttaaacatacagaatggcgggttaca

SEQ ID NO: 19595 - DNA, 57 bp, Artificial
  Synthetic oligonucleotide
ctgtgaaagtatgtccactgaatacacaaacgttgggaataggttgtcaaacaacga

SEQ ID NO: 19596 - DNA, 57 bp, Artificial
  Synthetic oligonucleotide
tacgtgccataacacccttctaaaccgtcctggtgatcgtttcttgaactgcattag

SEQ ID NO: 19597 - DNA, 55 bp, Artificial
  Synthetic oligonucleotide
ccgataacgggatcaatggatacgaactatcaaaacgtgtctaatcctgaaccgt

SEQ ID NO: 19598 - DNA, 52 bp, Artificial
  Synthetic oligonucleotide
agaacggaaattaatcaactatgccaagggaaaacccttagaagcggattta

SEQ ID NO: 19599 - DNA, 56 bp, Artificial
  Synthetic oligonucleotide
agtcaataacgccgatttacaagctcatgtattgaggggtccgaaacatttccaac

SEQ ID NO: 19600 - DNA, 57 bp, Artificial
  Synthetic oligonucleotide
gcataaagtcccagtgtagttagaagctaacttgatgttaaaaccgtgaataacgca

SEQ ID NO: 19601 - DNA, 59 bp, Artificial
  Synthetic oligonucleotide
cacgtccatcgccactttacttggttacaacctcacggtgtgacaaggtgaagcatgac

SEQ ID NO: 19602 - DNA, 57 bp, Artificial
  Synthetic oligonucleotide
cgcactggctgatcaacgttcggaactacaatcccaggcacacgtaacttcctttgg

SEQ ID NO: 19603 - DNA, 54 bp, Artificial
  Synthetic oligonucleotide
gtaaagtggttagagcggtaaatggagtgtattacaccattaaaatcgggagaa

SEQ ID NO: 19604 - DNA, 58 bp, Artificial
  Synthetic oligonucleotide
gcttggaagatcgtgttggtagatttgaccgtagtcaaacattttcgggcgcgatgtc

SEQ ID NO: 19605 - DNA, 54 bp, Artificial
  Synthetic oligonucleotide
aggtgagatgtacttttcgccggaatgttatccgagcgtttttcttcggaggga

SEQ ID NO: 19606 - DNA, 57 bp, Artificial
  Synthetic oligonucleotide
aaccatgccaagtgtcgatcgatggagtaaacgtcttgactaacgtagattacggta

SEQ ID NO: 19607 - DNA, 59 bp, Artificial
  Synthetic oligonucleotide
gggtcacagcgactaacagtcgaagctttattttacgtgacgcatgcagttgataaggt

SEQ ID NO: 19608 - DNA, 57 bp, Artificial
  Synthetic oligonucleotide
ggagaacgttccgatctacaattacgatgaagctagcggaaactatcgttttgtgtc

SEQ ID NO: 19609 - DNA, 52 bp, Artificial
  Synthetic oligonucleotide
aatttagtcttaaacgcggccttaggatttccgacgggaatttacatatctc

SEQ ID NO: 19610 - DNA, 56 bp, Artificial
  Synthetic oligonucleotide
tgttatttaggctatgactccgaagaggtgttggacgaacgatatacggggtcgac

SEQ ID NO: 19611 - DNA, 58 bp, Artificial
  Synthetic oligonucleotide
atcggaagaagttcctctagtgggatcgggaatggcaacggctattgcaacaggtaga

SEQ ID NO: 19612 - DNA, 57 bp, Artificial
  Synthetic oligonucleotide
cgtgtcggttggaatttagtagaactggattctatgggatcagacgaaaatattgga

SEQ ID NO: 19613 - DNA, 59 bp, Artificial
  Synthetic oligonucleotide
gatctaagagctgaagttgaacgacttaccgctgaaaataatatgttacgttctcatgt

SEQ ID NO: 19614 - DNA, 55 bp, Artificial
  Synthetic oligonucleotide
gaaaaggactaccgtgtcaacgggctccttcatcactttggagtcgttccgatta

SEQ ID NO: 19615 - DNA, 59 bp, Artificial
  Synthetic oligonucleotide
gaaagttgtgtcccgtgatgtgcgtagagtggtcgagatgtttcacggtaaggatcgtg

SEQ ID NO: 19616 - DNA, 58 bp, Artificial
  Synthetic oligonucleotide
gtacgatcctgcgtgggcgatgaactttgccgtatcattgaaggaacccataccggac

SEQ ID NO: 19617 - DNA, 58 bp, Artificial
  Synthetic oligonucleotide
gcgtccgtggcacgttagaaatgatttaattgctgcgctaagggagtataagcgtaaa

SEQ ID NO: 19618 - DNA, 58 bp, Artificial
  Synthetic oligonucleotide
atttatatctacacaaccggttaatggatacatcgcataaagtatacaatttcgaatg

SEQ ID NO: 19619 - DNA, 59 bp, Artificial
  Synthetic oligonucleotide
gtagggggtccaaatatacttgacataacagctgatccaactactgcaccgcaaaccga

SEQ ID NO: 19620 - DNA, 56 bp, Artificial
  Synthetic oligonucleotide
ttacgtcctttctaacaacccgtgtagtaatatgaatctcgcgataggaccttatc

SEQ ID NO: 19621 - DNA, 58 bp, Artificial
  Synthetic oligonucleotide
attcatctacctaatactagggttgcttggatttgcttgacgtgttctttgaatttga

SEQ ID NO: 19622 - DNA, 57 bp, Artificial
  Synthetic oligonucleotide
ctatgaaagtgtgtccactgaatacacaaacgttaggaataggttgccaaacgacga

SEQ ID NO: 19623 - DNA, 57 bp, Artificial
  Synthetic oligonucleotide
gttcagaattgaacgcacgacgcacgtaaagggagggcgaagagtagatattcggga

SEQ ID NO: 19624 - DNA, 57 bp, Artificial
  Synthetic oligonucleotide
tcaagagtaccaactattgttagtggcgcccctgatctaagattaatcccggaacta

SEQ ID NO: 19625 - DNA, 59 bp, Artificial
  Synthetic oligonucleotide
gggcagagcatacgtgaaatggcatataatccgcccgatttcaagtataatttacttaa

SEQ ID NO: 19626 - DNA, 58 bp, Artificial
  Synthetic oligonucleotide
tatgtacgtgaaaatttcgaaatttgcacagatcaattggacttggctaactacgttc

SEQ ID NO: 19627 - DNA, 59 bp, Artificial
  Synthetic oligonucleotide
tttcgaagaaccatagcgacgaatttgcgagatcagcgccaaggtaaggaggtactgaa

SEQ ID NO: 19628 - DNA, 54 bp, Artificial
  Synthetic oligonucleotide
ccgaacaaagggtttattgcgtgtgtgatttctagtaagggcggaatgggagcg

SEQ ID NO: 19629 - DNA, 54 bp, Artificial
  Synthetic oligonucleotide
cgtgtgtgatttctagtaagggcggaatgggagcgttaaacgaggacgacgtaa

SEQ ID NO: 19630 - DNA, 57 bp, Artificial
  Synthetic oligonucleotide
ataatgatgcggtgaggatgagttttacggaattttcgtcagtcccgctagatggtt

SEQ ID NO: 19631 - DNA, 58 bp, Artificial
  Synthetic oligonucleotide
tatgtctcgatggacaaaaccttaaatcaataccccgcgttggcagcagaaatttata

SEQ ID NO: 19632 - DNA, 59 bp, Artificial
  Synthetic oligonucleotide
gttaacggatggcgacgagagaacgagagcggatctcttttacttgacaaatatgcgga

SEQ ID NO: 19633 - DNA, 58 bp, Artificial
  Synthetic oligonucleotide
atctactctatatgtataacactagagtccaagttaattatggtccaacaggtgaacc

SEQ ID NO: 19634 - DNA, 54 bp, Artificial
  Synthetic oligonucleotide
taggaggcaggatacaatttgggttttagctttacagctaccggttaacccaca

SEQ ID NO: 19635 - DNA, 58 bp, Artificial
  Synthetic oligonucleotide
catcacttttgtgggtaatagaatgatagcaccgttagctgaagggtacgttcctaga

SEQ ID NO: 19636 - DNA, 59 bp, Artificial
  Synthetic oligonucleotide
acttgtacgctcgtaatgctgagtcttaagcacgtgagttgaggagctccgtcccggga

SEQ ID NO: 19637 - DNA, 57 bp, Artificial
  Synthetic oligonucleotide
cgaacgaacgttttggttcactggcgaacggcactcatttcatgattggaactgtcc

SEQ ID NO: 19638 - DNA, 55 bp, Artificial
  Synthetic oligonucleotide
gttgcatcttcccaaactaccgttaatttgtacattcgtaagcattcgttgaccc

SEQ ID NO: 19639 - DNA, 58 bp, Artificial
  Synthetic oligonucleotide
accctaaaggctatctgacttatagtgtgaagtatgaggaccagtttgcaaagaagga

SEQ ID NO: 19640 - DNA, 57 bp, Artificial
  Synthetic oligonucleotide
gattatctgtgggcttacgattgatcgctaacccacgtatcgctagacgttttaacg

SEQ ID NO: 19641 - DNA, 52 bp, Artificial
  Synthetic oligonucleotide
gcggtacgagagagggtttttgtagacggtaagctcccaggggatccgaaac

SEQ ID NO: 19642 - DNA, 59 bp, Artificial
  Synthetic oligonucleotide
aatacaacgggtgctacgcaaacacaaaaagcggagaaggctgcattcgcatcgtacgc

SEQ ID NO: 19643 - DNA, 57 bp, Artificial
  Synthetic oligonucleotide
gttaaacctgaggacttatatacatcgatgttacgattagcgagaaatacaagttcg

SEQ ID NO: 19644 - DNA, 55 bp, Artificial
  Synthetic oligonucleotide
aacccgaggatttatacacatcgatgttacgattagcgagaaatacaagttcggg

SEQ ID NO: 19645 - DNA, 58 bp, Artificial
  Synthetic oligonucleotide
ggaagtatctgaactatggtgggacgtacaccgctcacactggggttgattgggcacc

SEQ ID NO: 19646 - DNA, 57 bp, Artificial
  Synthetic oligonucleotide
aggcaatacagaattacgtgaaacctttttgtgcagcgtttggcattatcaacctgg

SEQ ID NO: 19647 - DNA, 58 bp, Artificial
  Synthetic oligonucleotide
acctggagtaactgtaacaaccagtgcatcatcgggttcattaccacttactactatc

SEQ ID NO: 19648 - DNA, 58 bp, Artificial
  Synthetic oligonucleotide
gactaacgtagcgtggttgaaccatgcgctacgtgatatactttcgctagaggggtcg

SEQ ID NO: 19649 - DNA, 59 bp, Artificial
  Synthetic oligonucleotide
ccaagggaaaacgtagcagttatacaggttggtggctcagatatacttgacataacagc

SEQ ID NO: 19650 - DNA, 58 bp, Artificial
  Synthetic oligonucleotide
gaggttggactgccgtcgactgtcctggaagcggcggagtccttcacagtaagtccca

SEQ ID NO: 19651 - DNA, 58 bp, Artificial
  Synthetic oligonucleotide
gttcgactagcttcatgttaggtcgttcaagactgtctggcccttatcaggttttgga

SEQ ID NO: 19652 - DNA, 58 bp, Artificial
  Synthetic oligonucleotide
tcacaggtcaacaaacgtttagtcgcatacaaaggtaagatgcgtttaatggatgtaa

SEQ ID NO: 19653 - DNA, 59 bp, Artificial
  Synthetic oligonucleotide
ttccggcgtcaagaataatctattgggtaaggcggcaactattgatcaggcactgaacg

SEQ ID NO: 19654 - DNA, 54 bp, Artificial
  Synthetic oligonucleotide
atcgactaagactcaaaacgttaccgttaatccaggaccattcgcgcaaacaaa

SEQ ID NO: 19655 - DNA, 56 bp, Artificial
  Synthetic oligonucleotide
gggggattgggatataaatggtcagaagtgtcatttaaaccagcgttttatcagta

SEQ ID NO: 19656 - DNA, 54 bp, Artificial
  Synthetic oligonucleotide
tccccttcaaccattcaggtcagcaccggacgttaatggaaggaacggtcttaa

SEQ ID NO: 19657 - DNA, 57 bp, Artificial
  Synthetic oligonucleotide
tattctaacgtcgcggctcgtttcgtttatgccaatgctcaaatgaataacaaccgg

SEQ ID NO: 19658 - DNA, 59 bp, Artificial
  Synthetic oligonucleotide
ttattcggcgccccgtgcgttactcatgttagaatgctcgtatcccgacgtgcgtatat

SEQ ID NO: 19659 - DNA, 58 bp, Artificial
  Synthetic oligonucleotide
gtgatcgtggcttatgacggtcaagctcccgtgaatgtaaacaatccgggagcgggac

SEQ ID NO: 19660 - DNA, 57 bp, Artificial
  Synthetic oligonucleotide
gctttttctccgaacgccgaaatgagttcgcgcaaagtggctagacgtcgtcataag

SEQ ID NO: 19661 - DNA, 58 bp, Artificial
  Synthetic oligonucleotide
cactactaatacgccgcatcaagtcaccactatacctgagggttattctttcggagta

SEQ ID NO: 19662 - DNA, 58 bp, Artificial
  Synthetic oligonucleotide
taaagtctttattaacaagaggattgttgagcgagttagagttgggcagattctagcc

SEQ ID NO: 19663 - DNA, 58 bp, Artificial
  Synthetic oligonucleotide
tgatggactggttcaaggaagcgttcattcgattatcacgggggaatcctacggtgaa

SEQ ID NO: 19664 - DNA, 58 bp, Artificial
  Synthetic oligonucleotide
ccagtccctgtcctgtaccgtccagccatggggatggttgagcctgtcgtctctaaag

SEQ ID NO: 19665 - DNA, 59 bp, Artificial
  Synthetic oligonucleotide
attattacccgacctaattgctggggcgcatcagaacgccgacccagttgtgctagatg

SEQ ID NO: 19666 - DNA, 55 bp, Artificial
  Synthetic oligonucleotide
gactcgtatttaagtgacttaacaccattcgttggtccagtatcttacgtcggcc

SEQ ID NO: 19667 - DNA, 54 bp, Artificial
  Synthetic oligonucleotide
gcgtttactaccctaatggtggtgagccgacgaaatttcactcaaacgctaaac

SEQ ID NO: 19668 - DNA, 56 bp, Artificial
  Synthetic oligonucleotide
ggaagagttgttggaaacgccaacaaacttggaacactcaactttcctctatgtga

SEQ ID NO: 19669 - DNA, 57 bp, Artificial
  Synthetic oligonucleotide
ttattgcggtaaagtggttagagcagtagatggagtgtattacaccattaaaattgg

SEQ ID NO: 19670 - DNA, 59 bp, Artificial
  Synthetic oligonucleotide
agtgaggactaggctaactacctggtatccgatcttaaccaacatgtagctatgtcaag

SEQ ID NO: 19671 - DNA, 58 bp, Artificial
  Synthetic oligonucleotide
agcgggacgtataatcgcgtgggatgggcaggcggtgctacaaattcacaatccaacc

SEQ ID NO: 19672 - DNA, 59 bp, Artificial
  Synthetic oligonucleotide
ggctaatggaagatacacgccaggagtgattccaccagttaatgttgataaaccaatcc

SEQ ID NO: 19673 - DNA, 56 bp, Artificial
  Synthetic oligonucleotide
tgactattgaccaggcactaaatggaaagtttggttcagttatacggaataggaac

SEQ ID NO: 19674 - DNA, 57 bp, Artificial
  Synthetic oligonucleotide
cttcgtgtacaattaaagtatgtccactaaacacacagactttaggaattggctgtc

SEQ ID NO: 19675 - DNA, 58 bp, Artificial
  Synthetic oligonucleotide
tcatatcgcgtgtggcttagccttaatcccgtttaaccaatccagcgagtgttggacg

SEQ ID NO: 19676 - DNA, 57 bp, Artificial
  Synthetic oligonucleotide
ggaagatacacaccaggcataataccaccagtaaacgttgacaaaccaataccatta

SEQ ID NO: 19677 - DNA, 59 bp, Artificial
  Synthetic oligonucleotide
caaggtcagctcgctatctcgcaacttgaaactgggtacggtgtgcgaatattcaaccc

SEQ ID NO: 19678 - DNA, 59 bp, Artificial
  Synthetic oligonucleotide
aaacctgattgtccgactagcggagatagtagtgaatcgtctaatcgccgagtgaagcg

SEQ ID NO: 19679 - DNA, 53 bp, Artificial
  Synthetic oligonucleotide
gaggtgtctaataaacctacgttttccgaagtgacgcgcaacgggactaagag

SEQ ID NO: 19680 - DNA, 57 bp, Artificial
  Synthetic oligonucleotide
cagaaagtttgattcgaacgatgaggatgggtttacgctaatacagatccggaatcc

SEQ ID NO: 19681 - DNA, 58 bp, Artificial
  Synthetic oligonucleotide
cgttgggactaggtcgccatgcttcttatgctactaggatgtaaggtttagatcggaa

SEQ ID NO: 19682 - DNA, 59 bp, Artificial
  Synthetic oligonucleotide
tgtaccaacatcgaaactcctctgaaatctaaactaagcagtatagtacaatcaaccga

SEQ ID NO: 19683 - DNA, 58 bp, Artificial
  Synthetic oligonucleotide
agacttggtcaactagttgatttaactagattgttagcttataattatgaaacgctga

SEQ ID NO: 19684 - DNA, 56 bp, Artificial
  Synthetic oligonucleotide
ccctcaagtagtttgggacgttcctcggagctcgattgctaaccttattatgaaca

SEQ ID NO: 19685 - DNA, 53 bp, Artificial
  Synthetic oligonucleotide
cgagattttggtcactttgggccttcccactattctagggcgaccacccctat

SEQ ID NO: 19686 - DNA, 56 bp, Artificial
  Synthetic oligonucleotide
accctttattgtgttccgcgtatcagtggagtcctacgcaaacgacagaagcgttc

SEQ ID NO: 19687 - DNA, 59 bp, Artificial
  Synthetic oligonucleotide
gctatttttgcctcttcctagacgtcgtcgcaatggaggtgtgcttgccaaacggtcac

SEQ ID NO: 19688 - DNA, 59 bp, Artificial
  Synthetic oligonucleotide
ccctcaatctaatgattgattcatccgacctggtacccaactttcttatgcgagatcct

SEQ ID NO: 19689 - DNA, 59 bp, Artificial
  Synthetic oligonucleotide
tagtagggaaccacgaggcatacagctctagttgttggaacggcgtagtgaagcgatcc

SEQ ID NO: 19690 - DNA, 55 bp, Artificial
  Synthetic oligonucleotide
ggcaaaagctccgaaggcgacgaaaaatgtcgaacccggactattgcatacctaa

SEQ ID NO: 19691 - DNA, 54 bp, Artificial
  Synthetic oligonucleotide
aggatccgaaggcgacgaaaaatgtcgaacccggactattgcatacctaatttc

SEQ ID NO: 19692 - DNA, 59 bp, Artificial
  Synthetic oligonucleotide
ctagcaacacctgggacacgcttagtaagtccgcgctcgagactaactcatgggagccc

SEQ ID NO: 19693 - DNA, 59 bp, Artificial
  Synthetic oligonucleotide
catcacaacaggacgatacgtcgtgtgcgccctttgcctggccacggtatccgactccc

SEQ ID NO: 19694 - DNA, 59 bp, Artificial
  Synthetic oligonucleotide
gcgctaatcaaccaatgccagcagcacgttttacgtataaacttcgaccactggacgga

SEQ ID NO: 19695 - DNA, 58 bp, Artificial
  Synthetic oligonucleotide
ggaacaaacacaacgaatagatggttcgcttgcgtgctcgttgaaccaagcgttcaaa

SEQ ID NO: 19696 - DNA, 57 bp, Artificial
  Synthetic oligonucleotide
caacggtcgaggcgatacagaactatgtgaaacctttttgtgcagcgttcggtatta

SEQ ID NO: 19697 - DNA, 59 bp, Artificial
  Synthetic oligonucleotide
tgaaagctagttgtcggtttacgcatgtggataggggctgtggccaaccacgcagttaa

SEQ ID NO: 19698 - DNA, 57 bp, Artificial
  Synthetic oligonucleotide
aaggcttcaattggatcacgtcgggttagttattcgttgcatggattgtttggagaa

SEQ ID NO: 19699 - DNA, 57 bp, Artificial
  Synthetic oligonucleotide
ccagttgatctccatgttctaaaactgcccgagcttcccatagggtgggttagagtc

SEQ ID NO: 19700 - DNA, 56 bp, Artificial
  Synthetic oligonucleotide
aaagatgggaggagtggaaatttgagggtgtaagcgtgacgccactggctactcgg

SEQ ID NO: 19701 - DNA, 56 bp, Artificial
  Synthetic oligonucleotide
cccgtaattgtcgtatcgtccactttgaaacgtctccgtacgcatatacgtctgtc

SEQ ID NO: 19702 - DNA, 58 bp, Artificial
  Synthetic oligonucleotide
gcgtgcgagttattcttacaaccggtggaagtcagcagatgtctacaaccggtggaag

SEQ ID NO: 19703 - DNA, 57 bp, Artificial
  Synthetic oligonucleotide
cccttcgtcaaatgaatgtacttacggtcggtaataaatctctacatataatgagcg

SEQ ID NO: 19704 - DNA, 59 bp, Artificial
  Synthetic oligonucleotide
ggtcaatggatgcaccatatacaaactcaacgcaagaagaagtatttctaacttcgact

SEQ ID NO: 19705 - DNA, 57 bp, Artificial
  Synthetic oligonucleotide
atgaaacgagaggggcggaattatgcaatccgtttgaacgcgcgtcctccacaaatg

SEQ ID NO: 19706 - DNA, 55 bp, Artificial
  Synthetic oligonucleotide
aatacgaaatgacgtcaattatatactaaacatggaccgtaatttgccttcaacg

SEQ ID NO: 19707 - DNA, 54 bp, Artificial
  Synthetic oligonucleotide
gcggtaactggaattacgcaacaatcctcaagtggtagtggtaccggagttacc

SEQ ID NO: 19708 - DNA, 57 bp, Artificial
  Synthetic oligonucleotide
ccagttgaccgcatgtggagttttaacaacctctgaggctcgggaaatgttggtgga

SEQ ID NO: 19709 - DNA, 58 bp, Artificial
  Synthetic oligonucleotide
tcatatgcggaggcatttagggatgacttacgattaaggcagattaagaaacgggtaa

SEQ ID NO: 19710 - DNA, 59 bp, Artificial
  Synthetic oligonucleotide
agaatctaaatcctatgcttggagtagtaaatctaggagcgactttcataatgatggtt

SEQ ID NO: 19711 - DNA, 56 bp, Artificial
  Synthetic oligonucleotide
acttcacgatagactacaaaccgtagaaactagcactttgcccaacattacacaac

SEQ ID NO: 19712 - DNA, 57 bp, Artificial
  Synthetic oligonucleotide
actgaatcgaggacggaagaacagagtttggtacgtgttggagaacggctctcgctc

SEQ ID NO: 19713 - DNA, 55 bp, Artificial
  Synthetic oligonucleotide
aaacctgtcaagaatccggaacctaagggatacgtgctgaatgttccaggacctg

SEQ ID NO: 19714 - DNA, 57 bp, Artificial
  Synthetic oligonucleotide
accgcaagccccattggacacgatggtttactgacaaaccccagtcaatcatttcgc

SEQ ID NO: 19715 - DNA, 57 bp, Artificial
  Synthetic oligonucleotide
atttcgcgtgtagcacatccctaatcccgaataaccaatccagcgaatgttggacgt

SEQ ID NO: 19716 - DNA, 53 bp, Artificial
  Synthetic oligonucleotide
gtcagaaaaaactcaaaacgtaactgtaaatccaggtccgttcgctcaaacca

SEQ ID NO: 19717 - DNA, 57 bp, Artificial
  Synthetic oligonucleotide
gatttccgaataggacgtgggcagtatgattgtaacgcttttcgcaccaatttccaa

SEQ ID NO: 19718 - DNA, 58 bp, Artificial
  Synthetic oligonucleotide
agaacccaactctcatggacggtctactgaccattacgcctatcctcctacgcgacac

SEQ ID NO: 19719 - DNA, 51 bp, Artificial
  Synthetic oligonucleotide
acgaacttaataaaggttgttacctcgcaaccgttagtgcaaacctctacg

SEQ ID NO: 19720 - DNA, 59 bp, Artificial
  Synthetic oligonucleotide
ttggagtgctcgaaattcatttggatttacgatcgcggaacatttcaacgcttttcatc

SEQ ID NO: 19721 - DNA, 52 bp, Artificial
  Synthetic oligonucleotide
atgccgttaacctaaggacagtaggtagagtggcgccccaaggtttacgtcg

SEQ ID NO: 19722 - DNA, 58 bp, Artificial
  Synthetic oligonucleotide
tcattcagtggtgggattgttacagttgtaaccaacgttcccttgactggattcgcca

SEQ ID NO: 19723 - DNA, 58 bp, Artificial
  Synthetic oligonucleotide
tggcaaagctggttattaccaatgattatagtgcgggaaggattggaccaaccggaga

SEQ ID NO: 19724 - DNA, 56 bp, Artificial
  Synthetic oligonucleotide
catcggaattggttgggtgttcaccctttagaacggttaagatcgaagagcatgtg

SEQ ID NO: 19725 - DNA, 57 bp, Artificial
  Synthetic oligonucleotide
aaactagacatcgttagcgcgcttaactataaaccaacgaggaatgatggtatagtg

SEQ ID NO: 19726 - DNA, 57 bp, Artificial
  Synthetic oligonucleotide
agtaaatgacctacctggtaattcgacagtaagtaaagatgaggtactcacgctcgc

SEQ ID NO: 19727 - DNA, 55 bp, Artificial
  Synthetic oligonucleotide
gttttaaagactcacaggctcactccacgatggggaacgtacaaacttcaaccaa

SEQ ID NO: 19728 - DNA, 56 bp, Artificial
  Synthetic oligonucleotide
tttagacggtccttatcaacctactacatttacaccacctattgattattggatac

SEQ ID NO: 19729 - DNA, 59 bp, Artificial
  Synthetic oligonucleotide
cttatggtgatgttacacgttttctatctaataactctatggtactgtatacagacgta

SEQ ID NO: 19730 - DNA, 58 bp, Artificial
  Synthetic oligonucleotide
agtggcgtagcttgctcgaattcgcccaagacatcctccccctggataacctgtgccg

SEQ ID NO: 19731 - DNA, 56 bp, Artificial
  Synthetic oligonucleotide
tggcactctccagattccgttccgtcctaaccaccgatggggagacattaggttct

SEQ ID NO: 19732 - DNA, 57 bp, Artificial
  Synthetic oligonucleotide
tcccgctagatggtttcgaattaccattaacctaagatcagtaggtggagtggcgcc

SEQ ID NO: 19733 - DNA, 56 bp, Artificial
  Synthetic oligonucleotide
atcgtgttggatggatggaacgcctagatcgttttctagggagcgggataacgact

SEQ ID NO: 19734 - DNA, 55 bp, Artificial
  Synthetic oligonucleotide
gtattataaccacgtaccagtcgacagactacaccgtgcagttaggccccggacc

SEQ ID NO: 19735 - DNA, 58 bp, Artificial
  Synthetic oligonucleotide
cgcattactccgtgatactccaatcatactgaagggcgctattccgtacgttaccaat

SEQ ID NO: 19736 - DNA, 52 bp, Artificial
  Synthetic oligonucleotide
ttcccccgctatgtacgccaacgcggtatgccttaccctacctaagggttcg

SEQ ID NO: 19737 - DNA, 58 bp, Artificial
  Synthetic oligonucleotide
ggtttggcggtgtgctacgcactgtacgcgttaaattcttcgatgcacggcccccaga

SEQ ID NO: 19738 - DNA, 58 bp, Artificial
  Synthetic oligonucleotide
ccgctaagacgttatgcggggtgattgcgaagttgagttcgcagccgtattgtcaaat

SEQ ID NO: 19739 - DNA, 56 bp, Artificial
  Synthetic oligonucleotide
caacagcgttagaggtattgtcaagtgcattaggaaacggaagtggaacggacgaa

SEQ ID NO: 19740 - DNA, 56 bp, Artificial
  Synthetic oligonucleotide
gaacccttagttaagttgattgatcaatctcctcccttgtggaacgaaacgagcgc

SEQ ID NO: 19741 - DNA, 54 bp, Artificial
  Synthetic oligonucleotide
acgaagctattaaatgtttaggtcccttgacacggaccgatggcctcttatact

SEQ ID NO: 19742 - DNA, 55 bp, Artificial
  Synthetic oligonucleotide
tagcgcataccacgtgttcagttaacggagtgaataatttcaattacaacggggg

SEQ ID NO: 19743 - DNA, 57 bp, Artificial
  Synthetic oligonucleotide
agtaatttccccgtcacttaaaggttctacgatacagacacatagcatctttgacga

SEQ ID NO: 19744 - DNA, 54 bp, Artificial
  Synthetic oligonucleotide
caggacacgatttgggttttagctttacagctaccggttaatccgcaagtagtg

SEQ ID NO: 19745 - DNA, 54 bp, Artificial
  Synthetic oligonucleotide
cgatttgggttttagctttacagctaccggttaatccgcaagtagtgtgggatg

SEQ ID NO: 19746 - DNA, 56 bp, Artificial
  Synthetic oligonucleotide
cccttagattttagaatcggtcgtggacagtatgattgtaacgtatttcgcgccaa

SEQ ID NO: 19747 - DNA, 51 bp, Artificial
  Synthetic oligonucleotide
taagccttaatcccgtttaactaatccggtccgcaccggacgttaatggaa

SEQ ID NO: 19748 - DNA, 58 bp, Artificial
  Synthetic oligonucleotide
aacaggatataatggttgggcgacgattgatgttgagtatagagaacccgcaccctac

SEQ ID NO: 19749 - DNA, 57 bp, Artificial
  Synthetic oligonucleotide
gaacacccaccgaaacagtactgcaagaatatacacagagtccggagattaaggttc

SEQ ID NO: 19750 - DNA, 57 bp, Artificial
  Synthetic oligonucleotide
agtcgacggtgtgaatcataaactagatgtaactactacgacttgtactattcggaa

SEQ ID NO: 19751 - DNA, 58 bp, Artificial
  Synthetic oligonucleotide
ccgggtactgacgctagattgttggtgtttccaattcgcgtgtaatgggtgagtgagc

SEQ ID NO: 19752 - DNA, 52 bp, Artificial
  Synthetic oligonucleotide
attgtgcggtttaggacacgtcttcgcttttaattcttattacatgggtttt

SEQ ID NO: 19753 - DNA, 56 bp, Artificial
  Synthetic oligonucleotide
gttcgcgttaaattctatgacgcacgacctccggatgatgttttgcaaggtttacc

SEQ ID NO: 19754 - DNA, 57 bp, Artificial
  Synthetic oligonucleotide
ttgttcgatgtgtctagctttttgcggtgtattctaatggtcgtccacaaccggtaa

SEQ ID NO: 19755 - DNA, 53 bp, Artificial
  Synthetic oligonucleotide
acgtagtttgggttcacacccgatttatatggggtcgatggattataccgtaa

SEQ ID NO: 19756 - DNA, 58 bp, Artificial
  Synthetic oligonucleotide
ctacgcaaacacaaaaagcggagaaggctgcattcgcatcgtacgcggaagcgtttcg

SEQ ID NO: 19757 - DNA, 55 bp, Artificial
  Synthetic oligonucleotide
actaagctgcttgaactctacaagtaagggtacgtttacgtattcgctacgtaga

SEQ ID NO: 19758 - DNA, 56 bp, Artificial
  Synthetic oligonucleotide
cggcattaatttaccgataacgggatcaatggatacgaactatcaaaacgtgtcta

SEQ ID NO: 19759 - DNA, 58 bp, Artificial
  Synthetic oligonucleotide
gcagaggtttagaacgcacgtacctaagatcaaagttcttaagaagttgatcgatcca

SEQ ID NO: 19760 - DNA, 57 bp, Artificial
  Synthetic oligonucleotide
ccgcggagggtatctgctaaagcggtgatcaagggtaatcacttaccagtcaagtta

SEQ ID NO: 19761 - DNA, 53 bp, Artificial
  Synthetic oligonucleotide
agttctcgtcagtcccgttagacggtttcgaactaccattaacctaagatcag

SEQ ID NO: 19762 - DNA, 58 bp, Artificial
  Synthetic oligonucleotide
ggctattaaaggctcaatggcgtacaggaagcgcggagctaaacgtgaagacttacca

SEQ ID NO: 19763 - DNA, 54 bp, Artificial
  Synthetic oligonucleotide
acgattggataccaacttcaactacgaaagtgtataaacaagtgccacaaccgt

SEQ ID NO: 19764 - DNA, 54 bp, Artificial
  Synthetic oligonucleotide
aacttcaactacgaaagtgtataaacaagtgccacaaccgtttgactttagagc

SEQ ID NO: 19765 - DNA, 56 bp, Artificial
  Synthetic oligonucleotide
ttctgactgattttaggaggcaggatacaatttgggttttagccttacagctaccg

SEQ ID NO: 19766 - DNA, 59 bp, Artificial
  Synthetic oligonucleotide
ggatgcaaatgaaactttattggcgaatgttaccgcggtacgtcaagagtatgctatac

SEQ ID NO: 19767 - DNA, 58 bp, Artificial
  Synthetic oligonucleotide
gcgtaactttaacatgggattcgaaatgtaatctgccaagcgtacatggttattcaac

SEQ ID NO: 19768 - DNA, 59 bp, Artificial
  Synthetic oligonucleotide
aggcgcaactgagcaaagttacgtggcgtcggcagtgactcccttgagattaaacagta

SEQ ID NO: 19769 - DNA, 55 bp, Artificial
  Synthetic oligonucleotide
aggatccaagttcagtatggtccaacgggagaaccactagatttccgaataggac

SEQ ID NO: 19770 - DNA, 59 bp, Artificial
  Synthetic oligonucleotide
tggccaaccaaacttctgaggaggtcgcttctgccttagctaacgacgcaatcgtgtta

SEQ ID NO: 19771 - DNA, 52 bp, Artificial
  Synthetic oligonucleotide
attctaaaacataatacgacaacggaggcgatacaaacgtatattaaaccct

SEQ ID NO: 19772 - DNA, 53 bp, Artificial
  Synthetic oligonucleotide
ctggtgtaatgagggtattggggctttttgaacgcgggaacaacttgaatttc

SEQ ID NO: 19773 - DNA, 53 bp, Artificial
  Synthetic oligonucleotide
cttaatcccgtttaaccaatccagcgagcgctggacgttaatggaaggaacgg

SEQ ID NO: 19774 - DNA, 56 bp, Artificial
  Synthetic oligonucleotide
ggagccctccaaacagttgtcaatggacttaattcgagtgttacccaattgggtgc

SEQ ID NO: 19775 - DNA, 58 bp, Artificial
  Synthetic oligonucleotide
taaccgcacacaccacttgttcagtaaatggagtgaacaattttagctataatggagg

SEQ ID NO: 19776 - DNA, 58 bp, Artificial
  Synthetic oligonucleotide
cttcagaccgtgtcagtcgcccttaccatcctagttgccctactgacgttgatcttta

SEQ ID NO: 19777 - DNA, 58 bp, Artificial
  Synthetic oligonucleotide
cagactggatatgctccagttaattggggacacggtgaattatccgactcaacgttag

SEQ ID NO: 19778 - DNA, 57 bp, Artificial
  Synthetic oligonucleotide
gaacgtggggaccagatcgccaaccattcggctacttcttaacggcagcagaagtta

SEQ ID NO: 19779 - DNA, 59 bp, Artificial
  Synthetic oligonucleotide
gatggattggtacaggggagcgtacattcaatcataacgggcgaatcttacggcgaatc

SEQ ID NO: 19780 - DNA, 55 bp, Artificial
  Synthetic oligonucleotide
atcccgtttaaccaatccagcgagtgttggacgttaatggaaggaatggtcttga

SEQ ID NO: 19781 - DNA, 55 bp, Artificial
  Synthetic oligonucleotide
attttacaccatagtagactatgtgaaccaaattgtacaagtaatgtctaaaagg

SEQ ID NO: 19782 - DNA, 57 bp, Artificial
  Synthetic oligonucleotide
ctagtcacagattttaacgaccttatactcgaggtgaactcttgtcgcgggaacatg

SEQ ID NO: 19783 - DNA, 58 bp, Artificial
  Synthetic oligonucleotide
gacgaattgcgaggacgtatagggtcggtattcgtggaaccaccagatcctgcgatta

SEQ ID NO: 19784 - DNA, 59 bp, Artificial
  Synthetic oligonucleotide
aataaacgtaggaccgatatctccagattatacccaacatatggctacaattggtgtgc

SEQ ID NO: 19785 - DNA, 55 bp, Artificial
  Synthetic oligonucleotide
gctccgtagggtgttaacgacggctacaataactcttttaccagatgctgaaagg

SEQ ID NO: 19786 - DNA, 52 bp, Artificial
  Synthetic oligonucleotide
atcccgtttaactaatccggtcagcaccggacgttaatggaaggaatggtct

SEQ ID NO: 19787 - DNA, 56 bp, Artificial
  Synthetic oligonucleotide
aggaccgagctaattacttggtatccaactttgacaagtatgtagctacgttaagc

SEQ ID NO: 19788 - DNA, 59 bp, Artificial
  Synthetic oligonucleotide
ggagaagttggtgattacagatgttgtagatggtgtcaaccataagttaaacgtcacaa

SEQ ID NO: 19789 - DNA, 59 bp, Artificial
  Synthetic oligonucleotide
agttcgagggtgtcagtgtaacgccaatggctactagggtacaacataatggtgtgatg

SEQ ID NO: 19790 - DNA, 55 bp, Artificial
  Synthetic oligonucleotide
aatgacgcggtgaggatgaatttaccagagttttcgtcaatccccttagatgggt

SEQ ID NO: 19791 - DNA, 54 bp, Artificial
  Synthetic oligonucleotide
atcgcgtgtggcttaagccttaatcccggttaactaatccggtcagcaccggac

SEQ ID NO: 19792 - DNA, 58 bp, Artificial
  Synthetic oligonucleotide
ggatgcaaaatactaggggatcgattggacgtaccactcttcttacgaaatgcttgaa

SEQ ID NO: 19793 - DNA, 56 bp, Artificial
  Synthetic oligonucleotide
aatacccaaacgctgggaataggatgtcagactacgaatactggaacgtttgaaga

SEQ ID NO: 19794 - DNA, 55 bp, Artificial
  Synthetic oligonucleotide
ttggttacttcttgacggcagcggaagttacacaacacggacgtttcagattacg

SEQ ID NO: 19795 - DNA, 59 bp, Artificial
  Synthetic oligonucleotide
atgcgccaccgaattcttttcgcacgatcccgatgcaaagtacggagtatgttttgcaa

SEQ ID NO: 19796 - DNA, 59 bp, Artificial
  Synthetic oligonucleotide
gacgttcccgcaatcagatgtgaagttaatagagacgactcccttgcctaacgatgaaa

SEQ ID NO: 19797 - DNA, 54 bp, Artificial
  Synthetic oligonucleotide
actacgttggatgcggtgacctacgtaccttgatgcagtttaaaaaacgttcac

SEQ ID NO: 19798 - DNA, 58 bp, Artificial
  Synthetic oligonucleotide
tacgctcaaactttacgactcccaattccaaggatattctcagcacctaatcgtccag

SEQ ID NO: 19799 - DNA, 59 bp, Artificial
  Synthetic oligonucleotide
taccaagcgcgatttggaaccatcatagctagaaattttgatactattcggttatcatt

SEQ ID NO: 19800 - DNA, 49 bp, Artificial
  Synthetic oligonucleotide
cgaaggttgggttaggttcggaggtgtattaagaaccgttcgagttaag

SEQ ID NO: 19801 - DNA, 54 bp, Artificial
  Synthetic oligonucleotide
aagtagaagtcgtagcacagtgggggctactcctgacttacgtaagattttaag

SEQ ID NO: 19802 - DNA, 54 bp, Artificial
  Synthetic oligonucleotide
aatcatattgccggtcggtgtttaggcgcttgtgaccgcgtggttaggggggga

SEQ ID NO: 19803 - DNA, 56 bp, Artificial
  Synthetic oligonucleotide
attactaactattccccatctagggaagataatttgcaacgcgtctttacagtagc

SEQ ID NO: 19804 - DNA, 58 bp, Artificial
  Synthetic oligonucleotide
cgtgcaaggtgctgaactcattaaacgagtggttgaaaggatatacccaggaacgtca

SEQ ID NO: 19805 - DNA, 57 bp, Artificial
  Synthetic oligonucleotide
ttcatcgattacgttgactcaaagaattacgacaacggggccgttcgctattctgac

SEQ ID NO: 19806 - DNA, 59 bp, Artificial
  Synthetic oligonucleotide
cacatgtactattcgaaattgtaagaagttaggtccaagagagaatgtgggctgttata

SEQ ID NO: 19807 - DNA, 57 bp, Artificial
  Synthetic oligonucleotide
ggactaggttataagtggtcggaaatatcatttaagcccatgaactatcaatatacg

SEQ ID NO: 19808 - DNA, 56 bp, Artificial
  Synthetic oligonucleotide
gtgtggtgacctgcgtaccttaatgcagtttaagaaacgatcaccaggacggttta

SEQ ID NO: 19809 - DNA, 57 bp, Artificial
  Synthetic oligonucleotide
attgaacgttacaacgttcccgacttagcagtgcgttgtcacgcagcctggtttgcc

SEQ ID NO: 19810 - DNA, 59 bp, Artificial
  Synthetic oligonucleotide
aggttcgaaatcaggtgtcgtcacttggaccgtgactacaccatgccactaccaaatgc

SEQ ID NO: 19811 - DNA, 58 bp, Artificial
  Synthetic oligonucleotide
cccttgaatgagtatttcgcgagagcaggagggagtactttgccagaaacacaacgta

SEQ ID NO: 19812 - DNA, 57 bp, Artificial
  Synthetic oligonucleotide
gcgagccggacttctattcttcatacccacctcgacccaccctgcgtacatcaactt

SEQ ID NO: 19813 - DNA, 55 bp, Artificial
  Synthetic oligonucleotide
actttccccacttcggactctagtctcgttgaacgtactccactcccatctggta

SEQ ID NO: 19814 - DNA, 56 bp, Artificial
  Synthetic oligonucleotide
cttttaatggggtgaagttggaaggtgaggcacgacagactcagttttctcgtaca

SEQ ID NO: 19815 - DNA, 58 bp, Artificial
  Synthetic oligonucleotide
gcggagacaaaattaggcgatgtttactttactctacgatcttggtatgactggagtg

SEQ ID NO: 19816 - DNA, 58 bp, Artificial
  Synthetic oligonucleotide
ctacggatggaagcgatctagcgttgatcaatacccatttatccggagaaaattccac

SEQ ID NO: 19817 - DNA, 57 bp, Artificial
  Synthetic oligonucleotide
cctatgttgtgccaccgggtgattataccctgacacctctgtaactcactacccctc

SEQ ID NO: 19818 - DNA, 59 bp, Artificial
  Synthetic oligonucleotide
tcgatgaaagtgactcctatcgttaatccctcctcttacgtgtgtaatgtctgtaacgc

SEQ ID NO: 19819 - DNA, 54 bp, Artificial
  Synthetic oligonucleotide
attgggcatcccttggagacgaaggccgtggtctggaggtacgcttaccgcccc

SEQ ID NO: 19820 - DNA, 56 bp, Artificial
  Synthetic oligonucleotide
cttatacaattccttgtatcggtacaacttcacgtaccccaccctcgatggcataa

SEQ ID NO: 19821 - DNA, 58 bp, Artificial
  Synthetic oligonucleotide
taccgcggtgggatggtcataacaacatttttggctatcagacgcgcgatttaaaaga

SEQ ID NO: 19822 - DNA, 55 bp, Artificial
  Synthetic oligonucleotide
taccagcttaattgactccttacggcgaaataagtattatcaaccccaagtgtac

SEQ ID NO: 19823 - DNA, 58 bp, Artificial
  Synthetic oligonucleotide
gcccgaatggatttaagattgacgcgaggcatacacggacattttagatttgacgacc

SEQ ID NO: 19824 - DNA, 54 bp, Artificial
  Synthetic oligonucleotide
aaatcgtaccctaacattaacgaacgtttgtactatgcacttggtgacgcttac

SEQ ID NO: 19825 - DNA, 59 bp, Artificial
  Synthetic oligonucleotide
gtaggcgaagagtctaccgacagtaagactgcgtatctgaggcgcgcgtttgtacgtgg

SEQ ID NO: 19826 - DNA, 58 bp, Artificial
  Synthetic oligonucleotide
aaatttgtatgttgcccaacatattatgttagatgcggcgacggggttaacgccatca

SEQ ID NO: 19827 - DNA, 59 bp, Artificial
  Synthetic oligonucleotide
attgtataagctacgatcctagagacttaagttatagcagcttgaccacccactacaaa

SEQ ID NO: 19828 - DNA, 59 bp, Artificial
  Synthetic oligonucleotide
tgtaattccgctcacgctcagggtttaaacgtattagtcagaatagacattaggtctga

SEQ ID NO: 19829 - DNA, 54 bp, Artificial
  Synthetic oligonucleotide
ggtccagcatttatccaagttatataagcggggtttttcctaccgtgtcaacga

SEQ ID NO: 19830 - DNA, 59 bp, Artificial
  Synthetic oligonucleotide
gcgccttttcgcgtcagcgtactatgattggtgaggaagttagatacttacaataccca

SEQ ID NO: 19831 - DNA, 58 bp, Artificial
  Synthetic oligonucleotide
ttagaatctcttgtgggccgacaaacatatttcgaattgggcacccgcgaatgtcggc

SEQ ID NO: 19832 - DNA, 59 bp, Artificial
  Synthetic oligonucleotide
tattgtattgtaccaaacaaaggcggcacaagtatcggatcatggcatataagaaaacg

SEQ ID NO: 19833 - DNA, 59 bp, Artificial
  Synthetic oligonucleotide
acgtggattatggaacggttaatcattggatcgattgggtaacagatatgattatggtc

SEQ ID NO: 19834 - DNA, 56 bp, Artificial
  Synthetic oligonucleotide
gacgttgaagttggaccgcagagcggagccacgtatgagtttcaaattcgaagggt

SEQ ID NO: 19835 - DNA, 53 bp, Artificial
  Synthetic oligonucleotide
acaccggagctgtttggtggattccccctcccggtcggactaactgcgtgacg

SEQ ID NO: 19836 - DNA, 58 bp, Artificial
  Synthetic oligonucleotide
gacgcccccccgtaccgtgatcaacgtggacattaaggcttgtgacgcctccatcaca

SEQ ID NO: 19837 - DNA, 53 bp, Artificial
  Synthetic oligonucleotide
acgattaaccgacacccatccaggcaggttgccctctcgtgttccctcccttt

SEQ ID NO: 19838 - DNA, 57 bp, Artificial
  Synthetic oligonucleotide
agaaagacccgttattgagagcgtcataagattcggttccttatataacgcgcacgc

SEQ ID NO: 19839 - DNA, 57 bp, Artificial
  Synthetic oligonucleotide
cgcgtatgagctttaagttcgaaggattaaccacttggattggctcaaattgtggtg

SEQ ID NO: 19840 - DNA, 50 bp, Artificial
  Synthetic oligonucleotide
gaccgattatgtcgtacaacttctacccgttcgaaagccgaaaccggggt

SEQ ID NO: 19841 - DNA, 58 bp, Artificial
  Synthetic oligonucleotide
cccttcgggacaacgctaacgccagcgcctctactgccgtgacacgcttagaccaatc

SEQ ID NO: 19842 - DNA, 59 bp, Artificial
  Synthetic oligonucleotide
aatgtggaattggacacgctgaaccaacgtcaggctaagtcgctacgtatcactccttc

SEQ ID NO: 19843 - DNA, 56 bp, Artificial
  Synthetic oligonucleotide
ttacgtttatatacgagtatgatagaacgatgaaccaaaaagcattccctaggttg

SEQ ID NO: 19844 - DNA, 55 bp, Artificial
  Synthetic oligonucleotide
ttactgagaacgtgttcatacagcaaccgtttaaattgaaaacgttaaggaatga

SEQ ID NO: 19845 - DNA, 54 bp, Artificial
  Synthetic oligonucleotide
cagcaaccgtttaaattgaaaacgttaaggaatgaatacgtggttgcattgtac

SEQ ID NO: 19846 - DNA, 57 bp, Artificial
  Synthetic oligonucleotide
acatctttcgaaaagtcaactcaagcgaggtggattaactaagaatgttctcacaag

SEQ ID NO: 19847 - DNA, 56 bp, Artificial
  Synthetic oligonucleotide
cgatactctcgttatacaagtccataccctacctgaagcgactcaatttctcgggg

SEQ ID NO: 19848 - DNA, 59 bp, Artificial
  Synthetic oligonucleotide
aattcgtagattaatacaaaccgaacgattgtcagcacgcatggttcagaatcaatttg

SEQ ID NO: 19849 - DNA, 55 bp, Artificial
  Synthetic oligonucleotide
acaaccaaagtttcgcaccaattacccgattttgccgttggtcagcctcatgtac

SEQ ID NO: 19850 - DNA, 58 bp, Artificial
  Synthetic oligonucleotide
agagtggttgatctcacgatgcggactcctactgctgtctaacgggggagggtacgcg

SEQ ID NO: 19851 - DNA, 52 bp, Artificial
  Synthetic oligonucleotide
attggttaggtcgaaaacggtacatccgatttacttaggttccttgcactac

SEQ ID NO: 19852 - DNA, 58 bp, Artificial
  Synthetic oligonucleotide
caaggcttacgcattcaatggggtttcgaaatccgagcacgcgcgcatgggttacttg

SEQ ID NO: 19853 - DNA, 56 bp, Artificial
  Synthetic oligonucleotide
attcagcgttgacgggcgagtcgtatggggagagcgtaaaacaggcggtaattcta

SEQ ID NO: 19854 - DNA, 56 bp, Artificial
  Synthetic oligonucleotide
cgtgactgttttacacggaagtgaggcggagacgttaagttatgcggatccgaaga

SEQ ID NO: 19855 - DNA, 56 bp, Artificial
  Synthetic oligonucleotide
attctaaatgtagtgggtggaggcgattcaatagctgaccccttaagtccgggtga

SEQ ID NO: 19856 - DNA, 55 bp, Artificial
  Synthetic oligonucleotide
ctctacttaaatacattgacacccgactttaccgaactcgcatacctaaagacac

SEQ ID NO: 19857 - DNA, 59 bp, Artificial
  Synthetic oligonucleotide
ctctcaacgcgctattgaaccctcatgccgtcacagtcaggtccgggacgataaaagac

SEQ ID NO: 19858 - DNA, 55 bp, Artificial
  Synthetic oligonucleotide
gtttgagtttatgtactttgcgaaacattttgagataaacgaggggtatgtcgag

SEQ ID NO: 19859 - DNA, 58 bp, Artificial
  Synthetic oligonucleotide
agagatctggaacgcgagagagagaagtacgtcgttggacgtgtcaatttgtttgacc

SEQ ID NO: 19860 - DNA, 58 bp, Artificial
  Synthetic oligonucleotide
actttaacaacatacctcgcatcgttctaactcctatcccagataggcgtggactaca

SEQ ID NO: 19861 - DNA, 59 bp, Artificial
  Synthetic oligonucleotide
ggactacatggtcgtctcgcgaacttcattaggcgacagttaaccaaaccagcatatgg

SEQ ID NO: 19862 - DNA, 59 bp, Artificial
  Synthetic oligonucleotide
ggaaaggagacctatctttcgtcgcaattcagtgctattctaacgaatgagagttcgta

SEQ ID NO: 19863 - DNA, 58 bp, Artificial
  Synthetic oligonucleotide
ggtactggagaggagttgccggaccctctaagtccaggagagcgtggattgcaagtta

SEQ ID NO: 19864 - DNA, 59 bp, Artificial
  Synthetic oligonucleotide
gcgcgttaagtggcatcgatttgtctcatatgcgcaccccaagggttgaaccgacaacc

SEQ ID NO: 19865 - DNA, 56 bp, Artificial
  Synthetic oligonucleotide
ccgacaacccttgcaactacgttagatcggcggttcggcgagatatcggacaaaga

SEQ ID NO: 19866 - DNA, 58 bp, Artificial
  Synthetic oligonucleotide
tcacacttcggaatatttacaacagcgtgtttcatgtggtacctttgtcggataccca

SEQ ID NO: 19867 - DNA, 56 bp, Artificial
  Synthetic oligonucleotide
caccgttggctctaaacaacctcgggtccttgttgatgtctaggattaagacgtca

SEQ ID NO: 19868 - DNA, 58 bp, Artificial
  Synthetic oligonucleotide
gttggactcaagtagaactggtgtgctcgcgactaacgtcccaattgaaccattaatc

SEQ ID NO: 19869 - DNA, 53 bp, Artificial
  Synthetic oligonucleotide
agaacgctgcttaccttacgcgtacctaccctagcccgtatccgttaccaaca

SEQ ID NO: 19870 - DNA, 57 bp, Artificial
  Synthetic oligonucleotide
tcattaatagcgaagcttgacgctacggttttcgcccaaatagttaagctgagaaaa

SEQ ID NO: 19871 - DNA, 57 bp, Artificial
  Synthetic oligonucleotide
acgtcagtttaccatgcgtatacccggacaagcatccactccgttggccgagaattc

SEQ ID NO: 19872 - DNA, 59 bp, Artificial
  Synthetic oligonucleotide
gccccgcccaggtgccgactggcgatcgtacccctctatgtgtgaagaccctgatgcgt

SEQ ID NO: 19873 - DNA, 57 bp, Artificial
  Synthetic oligonucleotide
aggagaggttgttgttcacggaaggagacgagacgcatatgttacattcccattcgg

SEQ ID NO: 19874 - DNA, 55 bp, Artificial
  Synthetic oligonucleotide
agtggtactcttcagataccatttcggcctaaccaccgatggggggatatcaggt

SEQ ID NO: 19875 - DNA, 59 bp, Artificial
  Synthetic oligonucleotide
ccttgcgacattaaccgaattatccttagatgctgcggtattccctaggatagaacagc

SEQ ID NO: 19876 - DNA, 59 bp, Artificial
  Synthetic oligonucleotide
atcttctcttatctacacatcctacggagtatcacaagtcatgagggtaagcgtttaaa

SEQ ID NO: 19877 - DNA, 54 bp, Artificial
  Synthetic oligonucleotide
ctgggaagggtggtatacttgttaccgcaactggtgatttacgtaattctgttc

SEQ ID NO: 19878 - DNA, 55 bp, Artificial
  Synthetic oligonucleotide
actgacactactaatgagattgaaagctatccggtttacgtccaaagtgttttaa

SEQ ID NO: 19879 - DNA, 52 bp, Artificial
  Synthetic oligonucleotide
gagattgaaagctatccggtttacgtccaaagtgttttaaaccgaatgaaac

SEQ ID NO: 19880 - DNA, 53 bp, Artificial
  Synthetic oligonucleotide
aaaaacgctttgaacgtgtaacttggttttgtattgatcctatagtaggtgag

SEQ ID NO: 19881 - DNA, 59 bp, Artificial
  Synthetic oligonucleotide
ccagtctaattgtacctcaaccaaatgctccgatcacaatgtttgaacttaggtcaata

SEQ ID NO: 19882 - DNA, 57 bp, Artificial
  Synthetic oligonucleotide
atttagctccagacgtctcactatgcaggtttttaggtttaaggcgatattcaacta

SEQ ID NO: 19883 - DNA, 57 bp, Artificial
  Synthetic oligonucleotide
cctttgcgtaaccagcgaacgaatgacattgttgccgtccaattattcaggccgtta

SEQ ID NO: 19884 - DNA, 57 bp, Artificial
  Synthetic oligonucleotide
tgaatacgacacgcatttaactcgctataattttcggaagggcatgttagaaggtat

SEQ ID NO: 19885 - DNA, 59 bp, Artificial
  Synthetic oligonucleotide
ctgacttcgacaaacagatgaaaccaacacccgacaacctaatcgcgcaagtctcagaa

SEQ ID NO: 19886 - DNA, 58 bp, Artificial
  Synthetic oligonucleotide
ggaattataccaaacaaagggttcaagagatgtgccaatcaaagcaacaaggacgatc

SEQ ID NO: 19887 - DNA, 58 bp, Artificial
  Synthetic oligonucleotide
atcgggataatcactccccactctcgtaacgtattggataggctggcgtacataccgc

SEQ ID NO: 19888 - DNA, 55 bp, Artificial
  Synthetic oligonucleotide
cgttcacagattttcttagttacgattacctaaccacaaatgttattctctcgac

SEQ ID NO: 19889 - DNA, 55 bp, Artificial
  Synthetic oligonucleotide
gttaagttcacccgtgtggcctgaagacgttcgcacctttctatcgctacctttc

SEQ ID NO: 19890 - DNA, 58 bp, Artificial
  Synthetic oligonucleotide
atgtatgtatggacgaaatggttagggaatcgcaaagaaacggaattgcaccgcaatc

SEQ ID NO: 19891 - DNA, 57 bp, Artificial
  Synthetic oligonucleotide
acgtcttcgttcctcaaccagcggccgatcgatggctatctcccgttcctatttcta

SEQ ID NO: 19892 - DNA, 57 bp, Artificial
  Synthetic oligonucleotide
tggttagaagatcaagttacggtagcaatgcgtgaagagccgggagttatttcgacg

SEQ ID NO: 19893 - DNA, 56 bp, Artificial
  Synthetic oligonucleotide
tgttccccacgaaccctgccccggtgactcagctcctttggctagcgcgtacaacc

SEQ ID NO: 19894 - DNA, 56 bp, Artificial
  Synthetic oligonucleotide
atagatacgcggactggacaatatattttcaacggcggacaacggaccgagcccta

SEQ ID NO: 19895 - DNA, 57 bp, Artificial
  Synthetic oligonucleotide
caccatcggacctctagctgtcgtgtgggacccggtcttgtcacgatgggatttaac

SEQ ID NO: 19896 - DNA, 56 bp, Artificial
  Synthetic oligonucleotide
ccctactctcacccttatttagcatacccacttacggtacgctccacccatcaatc

SEQ ID NO: 19897 - DNA, 58 bp, Artificial
  Synthetic oligonucleotide
aatttccgcgaatggatgagggcagcgtagtggtcccctaggcgcgttctctacgtgc

SEQ ID NO: 19898 - DNA, 54 bp, Artificial
  Synthetic oligonucleotide
caccatatacgaactcaacgcgaggggaagtattcctaacttcgactttatgtt

SEQ ID NO: 19899 - DNA, 57 bp, Artificial
  Synthetic oligonucleotide
ctgtcacccgactgtagtgtataactatttgagttccagagctccaaactttctaag

SEQ ID NO: 19900 - DNA, 55 bp, Artificial
  Synthetic oligonucleotide
agacactttaggtaacgatagttcgttgcgtaaatttgctcgcacaacgaagtac

SEQ ID NO: 19901 - DNA, 53 bp, Artificial
  Synthetic oligonucleotide
tcgttaccaactgatttcacgatccgaaattacgacgttttgaaagaaagttc

SEQ ID NO: 19902 - DNA, 59 bp, Artificial
  Synthetic oligonucleotide
tcaagggaattcacagcaaacgctggccggcgtgacagttaacgtcggaggtgttgaca

SEQ ID NO: 19903 - DNA, 56 bp, Artificial
  Synthetic oligonucleotide
ctcccggaacctcggcttgacgacatcgagagatttagacaggagggtttctatta

SEQ ID NO: 19904 - DNA, 59 bp, Artificial
  Synthetic oligonucleotide
taccactgtgctcgatgtttttaacgccctctaccgagaggtcatgacccctgctcaac

SEQ ID NO: 19905 - DNA, 59 bp, Artificial
  Synthetic oligonucleotide
gtaattagagttggcaatgcgtattgttgctctcaatgttgtggtgtactttattacgg

SEQ ID NO: 19906 - DNA, 57 bp, Artificial
  Synthetic oligonucleotide
tgacattgtaacgcgtactgaatctatccgaagtgataagacggttgacccggactt

SEQ ID NO: 19907 - DNA, 55 bp, Artificial
  Synthetic oligonucleotide
ggttatgctaccttcgttacaaccgtcgcttaaactggcattagaagaagaagct

SEQ ID NO: 19908 - DNA, 59 bp, Artificial
  Synthetic oligonucleotide
gcgccgcctatgtgtaatccactttgcacgggtgtgggttacatatgcggtgtgtcggt

SEQ ID NO: 19909 - DNA, 59 bp, Artificial
  Synthetic oligonucleotide
ccagcgagaaacgatgggatcgttgtacctagattactcgatataacgttgcgcgctta

SEQ ID NO: 19910 - DNA, 56 bp, Artificial
  Synthetic oligonucleotide
agcatggtccaagtaatcgtaaatgggagggttccgaacgagatagcgaacgagat

SEQ ID NO: 19911 - DNA, 58 bp, Artificial
  Synthetic oligonucleotide
cccgtggaacaaacgcgtagtacatggatacattaagtctcctgcagagtcgttagat

SEQ ID NO: 19912 - DNA, 57 bp, Artificial
  Synthetic oligonucleotide
agtcacttgtaccacaacacttggacaagtaaacatgcctggtgcgaagtttacttc

SEQ ID NO: 19913 - DNA, 58 bp, Artificial
  Synthetic oligonucleotide
atctttggagatataacccagtacccgtgcggggatatgactagctccaataatccga

SEQ ID NO: 19914 - DNA, 56 bp, Artificial
  Synthetic oligonucleotide
gctattccgtgtctgctacctaggaaagtgaactttcacgatagctggttacccgg

SEQ ID NO: 19915 - DNA, 55 bp, Artificial
  Synthetic oligonucleotide
tacggtaacatatgggtcggtgacgccttatcgtattacgttgactacaaccgta

SEQ ID NO: 19916 - DNA, 58 bp, Artificial
  Synthetic oligonucleotide
ctgtccaaactcaaacgaacagacccggacgcgtatgagaagctctattctgaaacga

SEQ ID NO: 19917 - DNA, 57 bp, Artificial
  Synthetic oligonucleotide
cccccagagaaatttcaggatgactacccggtgcaatggttagggtatgagctacac

SEQ ID NO: 19918 - DNA, 54 bp, Artificial
  Synthetic oligonucleotide
cccctcgtaaaactttggtataagttagagacagaggccatagagggggcagaa

SEQ ID NO: 19919 - DNA, 58 bp, Artificial
  Synthetic oligonucleotide
aactagcacccagcaagagcaagtccactggattaccagggctaacgcccctatccca

SEQ ID NO: 19920 - DNA, 51 bp, Artificial
  Synthetic oligonucleotide
acacggcggggactttccagcgtgggagggataagggcggtccggggagtg

SEQ ID NO: 19921 - DNA, 58 bp, Artificial
  Synthetic oligonucleotide
cggcacaactcctgtggaaaggtgagggggcagtagtcatacaagataaaggagacat

SEQ ID NO: 19922 - DNA, 58 bp, Artificial
  Synthetic oligonucleotide
aacgcaacagtaataacacaggaccgtaacaaagcttccacagatagaatgacattta

SEQ ID NO: 19923 - DNA, 55 bp, Artificial
  Synthetic oligonucleotide
acctttatgcacaaaacgagtggggactaatacctaattggcagaactacacaaa

SEQ ID NO: 19924 - DNA, 56 bp, Artificial
  Synthetic oligonucleotide
cggggcatggcttaactaaggggactatggcatgtataggcgcaaagcggggtttc

SEQ ID NO: 19925 - DNA, 56 bp, Artificial
  Synthetic oligonucleotide
atgggcaagcagggagctggaaagattcgcagttaaccctggccttttagaaacaa

SEQ ID NO: 19926 - DNA, 55 bp, Artificial
  Synthetic oligonucleotide
gttagcattttggacataagacaagggccaaaggaaccctttagagactatgtag

SEQ ID NO: 19927 - DNA, 53 bp, Artificial
  Synthetic oligonucleotide
cgagctttggccaagggtgacctaccattcccctagttatgtttaccaccaat

SEQ ID NO: 19928 - DNA, 59 bp, Artificial
  Synthetic oligonucleotide
cagactctgccataaggaaagccatattaggacatagagttagccctaggtgtaactac

SEQ ID NO: 19929 - DNA, 53 bp, Artificial
  Synthetic oligonucleotide
agggactttccgctggggactttccagggaggcgtgatctgggtgggactggg

SEQ ID NO: 19930 - DNA, 57 bp, Artificial
  Synthetic oligonucleotide
cccatctctcctagtcgccgcctggtcattcggagattcaccttataaaccctggta

SEQ ID NO: 19931 - DNA, 59 bp, Artificial
  Synthetic oligonucleotide
gccagtagaaagagaggtctgggaacaatggtggactgactattggcaggtcacctggg

SEQ ID NO: 19932 - DNA, 57 bp, Artificial
  Synthetic oligonucleotide
aaacgtcaagggagagacataaaaggaactatgtgccttgccatattaggcaggtaa

SEQ ID NO: 19933 - DNA, 53 bp, Artificial
  Synthetic oligonucleotide
atgtataggcgcaaagcggggtttcggttgtacgcgattaggagtccccttag

SEQ ID NO: 19934 - DNA, 52 bp, Artificial
  Synthetic oligonucleotide
ccaagacttctacaaggaactttccgttggggactttccaggggaggcgtga

SEQ ID NO: 19935 - DNA, 57 bp, Artificial
  Synthetic oligonucleotide
aggcaaccccagtatgcaaaggtaatgagtggtgcaactccttaactatccggttca

SEQ ID NO: 19936 - DNA, 59 bp, Artificial
  Synthetic oligonucleotide
ggcaaaaggcctcccacacaaatgatataaggcaattggcagaagtactccagaaggtg

SEQ ID NO: 19937 - DNA, 56 bp, Artificial
  Synthetic oligonucleotide
agcgtgaagaggtaaggtgtcgggcgagtctagaggggtggcagacctctaggcgg

SEQ ID NO: 19938 - DNA, 59 bp, Artificial
  Synthetic oligonucleotide
atgacgtggcaacaatgggagaaacaaatccgctacctagaggcaaatatcagtgtaag

SEQ ID NO: 19939 - DNA, 54 bp, Artificial
  Synthetic oligonucleotide
cctcatagagacttaaaaaagtgggtaaatttcgccctaccttatggatggagc

SEQ ID NO: 19940 - DNA, 54 bp, Artificial
  Synthetic oligonucleotide
ccatcccggcgctctcccccggaccgccagaccttaccgctatccctacacacc

SEQ ID NO: 19941 - DNA, 56 bp, Artificial
  Synthetic oligonucleotide
cactaaatgtttttgtaaacggtgttgctttcattgttaccactgctttgcaacga

SEQ ID NO: 19942 - DNA, 57 bp, Artificial
  Synthetic oligonucleotide
gctcaacagggtagcggtcaaccatttgccccgagaacttattttccaggtctggca

SEQ ID NO: 19943 - DNA, 54 bp, Artificial
  Synthetic oligonucleotide
ggtctacaataggtaggtttaggcagggttatcgccctcttccttatgtcttaa

SEQ ID NO: 19944 - DNA, 57 bp, Artificial
  Synthetic oligonucleotide
atggatccggtagatcctaaactagagccctggaagcatccggggagtcagcctaaa

SEQ ID NO: 19945 - DNA, 56 bp, Artificial
  Synthetic oligonucleotide
cagctactaagtaccgccctacctgtgagggtaagacagtatcctattaccctgga

SEQ ID NO: 19946 - DNA, 58 bp, Artificial
  Synthetic oligonucleotide
gtgacaagcttgccagcataaccaaccaaaccttgcttaagtccctacaggccctcca

SEQ ID NO: 19947 - DNA, 59 bp, Artificial
  Synthetic oligonucleotide
ggtaccaccaggaaacagcggcgaagagactatcggagaggccttcgcttggctagaca

SEQ ID NO: 19948 - DNA, 57 bp, Artificial
  Synthetic oligonucleotide
gcggggcctagtggccgccccggtggggcaaaaactgcaggcttgtgcacattgggc

SEQ ID NO: 19949 - DNA, 58 bp, Artificial
  Synthetic oligonucleotide
cctgatccccctcaacccgacttccctcagctgaacagtgactgggttccctctgtca

SEQ ID NO: 19950 - DNA, 59 bp, Artificial
  Synthetic oligonucleotide
agggcatggaaagagtagttagactccatcagactacctcagtagtagaaattagacag

SEQ ID NO: 19951 - DNA, 51 bp, Artificial
  Synthetic oligonucleotide
tgacaccgagttttctacaagggactttccgttggggactttccaggggag

SEQ ID NO: 19952 - DNA, 51 bp, Artificial
  Synthetic oligonucleotide
cccaggtatgctgttcccgagggagttgaaggcgaccctccgttttttaaa

SEQ ID NO: 19953 - DNA, 57 bp, Artificial
  Synthetic oligonucleotide
tagacaacaacagattacttattgggattaccaacgatcatggggtttgtatatact

SEQ ID NO: 19954 - DNA, 56 bp, Artificial
  Synthetic oligonucleotide
actgctggtacagaatgccaacccagactgtaagttagtactaaaagggctgggaa

SEQ ID NO: 19955 - DNA, 56 bp, Artificial
  Synthetic oligonucleotide
tggacgtgggggactttgatcattgggttggggataatttgtagtgcctcgaataa

SEQ ID NO: 19956 - DNA, 56 bp, Artificial
  Synthetic oligonucleotide
gtgataatgtgtagtgcctcagacaacttgtgggttacagtttattaaggggttcc

SEQ ID NO: 19957 - DNA, 57 bp, Artificial
  Synthetic oligonucleotide
acccggggagtggcttgccctctcgtttcacataaaagcagacgccctgtagctatc

SEQ ID NO: 19958 - DNA, 56 bp, Artificial
  Synthetic oligonucleotide
ttgggataggtgggttacagtcaatggctataaagtgttatatagatccctccctt

SEQ ID NO: 19959 - DNA, 57 bp, Artificial
  Synthetic oligonucleotide
gtaaatgaaagactatctatcgctcgggtaaagaggctagatttatcacggccttgg

SEQ ID NO: 19960 - DNA, 55 bp, Artificial
  Synthetic oligonucleotide
ggattaaggtaaagcaactgtgtaaactcctcaggggaactaaagcactaacaga

SEQ ID NO: 19961 - DNA, 55 bp, Artificial
  Synthetic oligonucleotide
ggattaaggtaaagcaactgtgtaaactcctcaggggagctaaagcactaaccga

SEQ ID NO: 19962 - DNA, 55 bp, Artificial
  Synthetic oligonucleotide
atagtgaatagagttaggcagggatactcacctttgtcgttccagacccttaccc

SEQ ID NO: 19963 - DNA, 59 bp, Artificial
  Synthetic oligonucleotide
aatgattggtataccctatcaaagaaaacttatgctccgccaagagaaggacatttgca

SEQ ID NO: 19964 - DNA, 58 bp, Artificial
  Synthetic oligonucleotide
tacacaccagggccgggggtcagatttccactgacctttggatggtgcttcaagctag

SEQ ID NO: 19965 - DNA, 53 bp, Artificial
  Synthetic oligonucleotide
aaaaattcaaaattttcgggtttattacagggacagcagagatccactttgga

SEQ ID NO: 19966 - DNA, 58 bp, Artificial
  Synthetic oligonucleotide
gcggctcttaacgaaactgttggcaggacggcccacaaagtggtatccattgattcca

SEQ ID NO: 19967 - DNA, 58 bp, Artificial
  Synthetic oligonucleotide
cctaagtgttcctatcaaacaggacataacaaggtaggatctctacaatacttagcgc

SEQ ID NO: 19968 - DNA, 58 bp, Artificial
  Synthetic oligonucleotide
ggaactctcgtgcataggaactcttggacatcacttagaataccccaaactagactcc

SEQ ID NO: 19969 - DNA, 55 bp, Artificial
  Synthetic oligonucleotide
gtgcaagcaaatttttaggaaggataataccctagggactttctgtacgcagaaa

SEQ ID NO: 19970 - DNA, 57 bp, Artificial
  Synthetic oligonucleotide
gtaaatcaacctccccgatatggtggaggaccaaatccctataggaatcgtgagcca

SEQ ID NO: 19971 - DNA, 57 bp, Artificial
  Synthetic oligonucleotide
atgagagacccaaggggaagtgacatagcaggaaccactagtacccttcaggaacaa

SEQ ID NO: 19972 - DNA, 56 bp, Artificial
  Synthetic oligonucleotide
cctcaaccataacacaagcctgtccaaaggtcacttttgacccgattcctatacat

SEQ ID NO: 19973 - DNA, 58 bp, Artificial
  Synthetic oligonucleotide
caccgaggctgagacccgcgggatggcaggctataaccccatggcagggcccctaaga

SEQ ID NO: 19974 - DNA, 56 bp, Artificial
  Synthetic oligonucleotide
tacctacattccctcgccattggagccttcctcggcacttccgcccatcaaaccct

SEQ ID NO: 19975 - DNA, 59 bp, Artificial
  Synthetic oligonucleotide
gatataggttgataagttgtaacacctcagtcattacacaggcctgtccaaaagtatcc

SEQ ID NO: 19976 - DNA, 55 bp, Artificial
  Synthetic oligonucleotide
ggaggtacaaactatttgttggtggggacaagtagagcacacaacagggatcccc

SEQ ID NO: 19977 - DNA, 57 bp, Artificial
  Synthetic oligonucleotide
caagcagcactacggatccctgtccaaataccgacgaaagtagctgtaacgccacct

SEQ ID NO: 19978 - DNA, 56 bp, Artificial
  Synthetic oligonucleotide
agtccggatttccgttatggggcaaacacctcagcctacccaagcgctacttgaca

SEQ ID NO: 19979 - DNA, 56 bp, Artificial
  Synthetic oligonucleotide
tggccccgggaccagatatgcatggactgtccttccacaggggtttaaaaacagcc

SEQ ID NO: 19980 - DNA, 58 bp, Artificial
  Synthetic oligonucleotide
acaatgttccagcccgtaagggctccctgtatccagactgcctggtgtacaggacttc

SEQ ID NO: 19981 - DNA, 57 bp, Artificial
  Synthetic oligonucleotide
atcacaagaggcgaggcggactccggaggtgagtacaatttttgttgtcggtgggca

SEQ ID NO: 19982 - DNA, 52 bp, Artificial
  Synthetic oligonucleotide
tacaggggactttccgctggggactttcccaggggaggcgtggactgggcgg

SEQ ID NO: 19983 - DNA, 59 bp, Artificial
  Synthetic oligonucleotide
taatgtgccttggaatgctagttggagtaatagaactctaactgagatttgggataacc

SEQ ID NO: 19984 - DNA, 53 bp, Artificial
  Synthetic oligonucleotide
cctcaggaggggacccagaaattgtaacgcacagttttacttgtggaggggaa

SEQ ID NO: 19985 - DNA, 58 bp, Artificial
  Synthetic oligonucleotide
aatccactgcctggggcatcaaaaaggagatagtgccgaggctaggggcaaccgccta

SEQ ID NO: 19986 - DNA, 57 bp, Artificial
  Synthetic oligonucleotide
gaatagagttaggcagggatactcaccattatcgtttcagacccgcctcccagtccc

SEQ ID NO: 19987 - DNA, 55 bp, Artificial
  Synthetic oligonucleotide
agtcaaacaaccccccgaccgctggctttccaacgcccggatgactcactatcag

SEQ ID NO: 19988 - DNA, 58 bp, Artificial
  Synthetic oligonucleotide
actactctggaaaggtgaaggggcagtagtgatacaagataacagtgacataaaagta

SEQ ID NO: 19989 - DNA, 55 bp, Artificial
  Synthetic oligonucleotide
aggaatggggaaaatggtcaacatcctttaattggagcttcacaactccactaaa

SEQ ID NO: 19990 - DNA, 55 bp, Artificial
  Synthetic oligonucleotide
agtgtggaaaatctctagcagtggaacccgaacagggacttgaaagcgaaagtaa

SEQ ID NO: 19991 - DNA, 58 bp, Artificial
  Synthetic oligonucleotide
cgggttcgcaagtatggatacaaacactacgacttgcaatcctgcaggccgaccctac

SEQ ID NO: 19992 - DNA, 55 bp, Artificial
  Synthetic oligonucleotide
ccgtcaagggcgacgatgggcgccctacccagttacccaacgaggtcaacgcagc

SEQ ID NO: 19993 - DNA, 55 bp, Artificial
  Synthetic oligonucleotide
ggcctcaccccgtacgagatcttatatggagcacctccgccccttgtaaacttcc

SEQ ID NO: 19994 - DNA, 57 bp, Artificial
  Synthetic oligonucleotide
tacaaataggtggggataatactagttataggttgataagttgtaacacctcagtca

SEQ ID NO: 19995 - DNA, 53 bp, Artificial
  Synthetic oligonucleotide
ctgtgtaacgttaactcctctctgcgttactttaaattgtaccgaggctaagt

SEQ ID NO: 19996 - DNA, 59 bp, Artificial
  Synthetic oligonucleotide
atacagaggtacataatgtttgggccacacatgcctgcgtacccacagaccccaaccca

SEQ ID NO: 19997 - DNA, 58 bp, Artificial
  Synthetic oligonucleotide
agtatgggcaagcagggagctggaaagattcgcagttaaccctagcctcttagaaaca

SEQ ID NO: 19998 - DNA, 58 bp, Artificial
  Synthetic oligonucleotide
acaccgggaccaggggtcagatatccactgacctttggatggtgctacaagttagtgc

SEQ ID NO: 19999 - DNA, 54 bp, Artificial
  Synthetic oligonucleotide
tacagaaagtagccctggaaagtatagtcatctggggaaaaacacccaagttta

SEQ ID NO: 20000 - DNA, 56 bp, Artificial
  Synthetic oligonucleotide
gccacaaccattaaacaggcttgtccaaaggtgtcttttgaaccaatccccataca

SEQ ID NO: 20001 - DNA, 56 bp, Artificial
  Synthetic oligonucleotide
cttgtcagaaggggcaacgccctcagatctaaatactatgttaaatacagtagggg

SEQ ID NO: 20002 - DNA, 59 bp, Artificial
  Synthetic oligonucleotide
tccagactctccaaccgctgttccaaagaatctccaggaccctccaagcaattagagaa

SEQ ID NO: 20003 - DNA, 54 bp, Artificial
  Synthetic oligonucleotide
ttccccgaccctgggctccggccccaaaacgtctacaccatatggggctgctcc

SEQ ID NO: 20004 - DNA, 52 bp, Artificial
  Synthetic oligonucleotide
ggcggacccgtggtggaactgacgagttcggaacacccggccgcaaccctgg

SEQ ID NO: 20005 - DNA, 49 bp, Artificial
  Synthetic oligonucleotide
gaacacccggccgcaaccctgggagacgtcccggggacttcgggggccg

SEQ ID NO: 20006 - DNA, 58 bp, Artificial
  Synthetic oligonucleotide
ggacgcagggggtgggaggtcctcaaacattggtggaatctcctgcaatattggagcc

SEQ ID NO: 20007 - DNA, 59 bp, Artificial
  Synthetic oligonucleotide
agacccagtagtaggttgtacttttaatcaggcttcaagagtgtttgatcagatagaca

SEQ ID NO: 20008 - DNA, 57 bp, Artificial
  Synthetic oligonucleotide
tcaagtatctggggaatcttgccctatattgggggagggaactaaagaatagtgcta

SEQ ID NO: 20009 - DNA, 59 bp, Artificial
  Synthetic oligonucleotide
ctttagacaggtagaagattgtgggagatgggcgcgagaagctccgtcttgagagggaa

SEQ ID NO: 20010 - DNA, 59 bp, Artificial
  Synthetic oligonucleotide
gacaactagcacccagcaagagcaagttcactggattactaggcccaaccaacctatcc

SEQ ID NO: 20011 - DNA, 58 bp, Artificial
  Synthetic oligonucleotide
cttgtattagaataggtgagtcagagctagcttaaccacaaaccgcaagtgcgaacgg

SEQ ID NO: 20012 - DNA, 57 bp, Artificial
  Synthetic oligonucleotide
ccctgacctaaaattacaagacaccactgtccttggagccagcgggccaagcaccga

SEQ ID NO: 20013 - DNA, 52 bp, Artificial
  Synthetic oligonucleotide
attctctcgttccaaaaagtctatataacccgtcaacaaatcgcaaaacccc

SEQ ID NO: 20014 - DNA, 58 bp, Artificial
  Synthetic oligonucleotide
gacaacgggcctaattttacaagtacaactatgaaggctgcatgttggtgggccaaca

SEQ ID NO: 20015 - DNA, 53 bp, Artificial
  Synthetic oligonucleotide
tccgctggggactttccaggggaggcgtaacctgggcgggactggggagtggc

SEQ ID NO: 20016 - DNA, 57 bp, Artificial
  Synthetic oligonucleotide
cgaattgggaggggaatactcgcggtcccaagaaggatcagacaaggggcagagatc

SEQ ID NO: 20017 - DNA, 55 bp, Artificial
  Synthetic oligonucleotide
tgtcagttccccgagggacacaagaaaacaggacaggtaccctctttgcaatact

SEQ ID NO: 20018 - DNA, 55 bp, Artificial
  Synthetic oligonucleotide
ggactcccagtcaagagtaaggcttggtagggctcctttggtagggctctggaaa

SEQ ID NO: 20019 - DNA, 54 bp, Artificial
  Synthetic oligonucleotide
ggcttggtagggctcctttggtagggctctggaaagagaccccatcggagaccc

SEQ ID NO: 20020 - DNA, 55 bp, Artificial
  Synthetic oligonucleotide
aataaggtaggatccttacaatatctggcactaacagtattagtaactccaaaac

SEQ ID NO: 20021 - DNA, 55 bp, Artificial
  Synthetic oligonucleotide
agcaactctctattgggtacataaaaacgtagaggtaagagacaccaaagaagcc

SEQ ID NO: 20022 - DNA, 52 bp, Artificial
  Synthetic oligonucleotide
ggccccggcactagatacgcctggagagtactaccccaagggtttaaaaata

SEQ ID NO: 20023 - DNA, 56 bp, Artificial
  Synthetic oligonucleotide
ttaattttaacagtcattccatgactccttttggagggccctcaggaatgacaccc

SEQ ID NO: 20024 - DNA, 56 bp, Artificial
  Synthetic oligonucleotide
aggaggcttgatagggttaagaatagtttttactgtagtgtctatagtgaatagag

SEQ ID NO: 20025 - DNA, 58 bp, Artificial
  Synthetic oligonucleotide
tcctaccactgtattatctaacctcgctccgtcactacattggtttacggtgatcgac

SEQ ID NO: 20026 - DNA, 57 bp, Artificial
  Synthetic oligonucleotide
agatgggtggcaagtggtcaaaacgtagtgtgcctggatggaatactataagggaaa

SEQ ID NO: 20027 - DNA, 53 bp, Artificial
  Synthetic oligonucleotide
gagtttttaggagagttccctcctagacttctcctctccgaggaggtacccga

SEQ ID NO: 20028 - DNA, 57 bp, Artificial
  Synthetic oligonucleotide
gaaagggagcaaattggatgcatgggaacaaattaagttgaagccaggatctaaaaa

SEQ ID NO: 20029 - DNA, 53 bp, Artificial
  Synthetic oligonucleotide
aaggggcttaccctggaatccttgtgatttccaggtaggacacctaggagtgt

SEQ ID NO: 20030 - DNA, 58 bp, Artificial
  Synthetic oligonucleotide
cagagtttaatggaacgggcccatgcaacaacattacagtagttacttgtacacatgg

SEQ ID NO: 20031 - DNA, 59 bp, Artificial
  Synthetic oligonucleotide
cccgtctgttgttagactctggtaactagaagatccctcagactactcgagacagtgaa

SEQ ID NO: 20032 - DNA, 55 bp, Artificial
  Synthetic oligonucleotide
gtaaatagagttaggcagggatactcacctttgtcgtttcagacccttgtcccaa

SEQ ID NO: 20033 - DNA, 56 bp, Artificial
  Synthetic oligonucleotide
tcctacccttacttaaaacagacaaccttgcacaacaatcctatagaggacaagga

SEQ ID NO: 20034 - DNA, 57 bp, Artificial
  Synthetic oligonucleotide
tattctgcccttactaggtcctttactttgcttgctactcataatctcttttggacc

SEQ ID NO: 20035 - DNA, 57 bp, Artificial
  Synthetic oligonucleotide
cagggccagggactaggtttccactgacctttggatggtgcttcaagctagtaccaa

SEQ ID NO: 20036 - DNA, 58 bp, Artificial
  Synthetic oligonucleotide
agtttgacagctccctagcacggagacacttggcccgagagctacatccggagtttta

SEQ ID NO: 20037 - DNA, 58 bp, Artificial
  Synthetic oligonucleotide
gtgttgccatatgtcctattggaaatgcgtgcaaccccaaagaaacacggactaagtc

SEQ ID NO: 20038 - DNA, 53 bp, Artificial
  Synthetic oligonucleotide
tttgaacaagggactttccgctggggactttccaggggaggcgtggtctgggc

SEQ ID NO: 20039 - DNA, 59 bp, Artificial
  Synthetic oligonucleotide
agcaaccaggtcagccagaattaccctatagtgcagaacctccaggggcaaatggtaca

SEQ ID NO: 20040 - DNA, 51 bp, Artificial
  Synthetic oligonucleotide
tttccgctggggactttccaggggaggtgtggtttgggcggagttggggag

SEQ ID NO: 20041 - DNA, 57 bp, Artificial
  Synthetic oligonucleotide
attaattgtaccagacctaacaacaatacaagacaaagtgtacagataggaccagga

SEQ ID NO: 20042 - DNA, 56 bp, Artificial
  Synthetic oligonucleotide
aaggactgctgacaccgagctttctacaagggactttccgctggggactttccatg

SEQ ID NO: 20043 - DNA, 58 bp, Artificial
  Synthetic oligonucleotide
atggcgggctagaaggggcagtaccatagatttcccttggtgcagggatacaacagga

SEQ ID NO: 20044 - DNA, 58 bp, Artificial
  Synthetic oligonucleotide
actctgggcaagtagggcaggcggtgggtacgcaatgggggcggctacctcagcacta

SEQ ID NO: 20045 - DNA, 55 bp, Artificial
  Synthetic oligonucleotide
acaagagtaagattaaaagagggatgtaagggaccccacatagcgcaatggcctt

SEQ ID NO: 20046 - DNA, 56 bp, Artificial
  Synthetic oligonucleotide
acaccggctcggatctgtcccattaactactccctcctagccagcctactcccaaa

SEQ ID NO: 20047 - DNA, 59 bp, Artificial
  Synthetic oligonucleotide
gtagtgttccagtccaaggagcagtggccacttgtctggctacatgcccccctacccca

SEQ ID NO: 20048 - DNA, 59 bp, Artificial
  Synthetic oligonucleotide
gctttactataagatgggtggcaagtggtcaaagtgtggtatgggtggatggcctagtg

SEQ ID NO: 20049 - DNA, 56 bp, Artificial
  Synthetic oligonucleotide
gctaccagtaggacaggtaataatgccggagataacagccccccctatattgaacc

SEQ ID NO: 20050 - DNA, 54 bp, Artificial
  Synthetic oligonucleotide
tccccacgagaattagacaggggtttgaacgaagcttgttataacatgggaaac

SEQ ID NO: 20051 - DNA, 51 bp, Artificial
  Synthetic oligonucleotide
ccaaggaccaccaggaccaaacccgtaccgacgattcggagacggcggtaa

SEQ ID NO: 20052 - DNA, 59 bp, Artificial
  Synthetic oligonucleotide
cctcttttgtgcaaccaagaatagggatacttggggaaccatacagtgcttgccagaca

SEQ ID NO: 20053 - DNA, 57 bp, Artificial
  Synthetic oligonucleotide
gagaccgtcaagataaaggtttcggatcctctgacgcctattgggtgcaaaatgtta

SEQ ID NO: 20054 - DNA, 59 bp, Artificial
  Synthetic oligonucleotide
ctaggattcttgaaagctcttaaggttcggatgtttgctgccggcattacttcacagaa

SEQ ID NO: 20055 - DNA, 56 bp, Artificial
  Synthetic oligonucleotide
gactttccgctggggactttccaggggaggcgtgacatgggcgggacatgggagtg

SEQ ID NO: 20056 - DNA, 57 bp, Artificial
  Synthetic oligonucleotide
ctatagtgaatagagttaggcagggatactcacccttatcgttccagacccgcctcc

SEQ ID NO: 20057 - DNA, 58 bp, Artificial
  Synthetic oligonucleotide
gatgcatccggagttctacaaaaactgatgacaccgagctttctacaagggactttcc

SEQ ID NO: 20058 - DNA, 55 bp, Artificial
  Synthetic oligonucleotide
cttcgcggaccttcaagccaggagattcgtcgggggacagccaacaaggtaggaa

SEQ ID NO: 20059 - DNA, 57 bp, Artificial
  Synthetic oligonucleotide
tccaagaagaacgattaagtgcttcaactgtggcaaggaaggacacctagctaaaaa

SEQ ID NO: 20060 - DNA, 57 bp, Artificial
  Synthetic oligonucleotide
cccactgacctttgggtggcccttcaaactagaaccaatagatccagcagaggtaga

SEQ ID NO: 20061 - DNA, 57 bp, Artificial
  Synthetic oligonucleotide
ctggcaagtaacatgggtcccagagtgggacttcgtatctaccccaccactggtcag

SEQ ID NO: 20062 - DNA, 59 bp, Artificial
  Synthetic oligonucleotide
gctcgatagggagtaaaggattggatgtattaggaggggtaatagatgaaggatatcga

SEQ ID NO: 20063 - DNA, 55 bp, Artificial
  Synthetic oligonucleotide
catttacttaaatggaaggagattcctcggtctcttagataccggggcagacaaa

SEQ ID NO: 20064 - DNA, 57 bp, Artificial
  Synthetic oligonucleotide
ctatcttagaaaaggcagtcctccctaagtgtgaattcccagaagggcacagcaagg

SEQ ID NO: 20065 - DNA, 57 bp, Artificial
  Synthetic oligonucleotide
tagtatgggcaagcagggaactagaacgattcgcaattaaccctggcctgttagaaa

SEQ ID NO: 20066 - DNA, 59 bp, Artificial
  Synthetic oligonucleotide
cctcaaccattacacaggcttgtccaaagatatcttgggatccaattcccatacattat

SEQ ID NO: 20067 - DNA, 58 bp, Artificial
  Synthetic oligonucleotide
aatgtgccctggaactctagttggagtaataaaacttataatgacatatgggataaca

SEQ ID NO: 20068 - DNA, 59 bp, Artificial
  Synthetic oligonucleotide
acaagtgctgcgcagccaagaggtaggtggcttggacgggtctgggaagggtggcagac

SEQ ID NO: 20069 - DNA, 55 bp, Artificial
  Synthetic oligonucleotide
gagaagagttaggcagggatactcacctttgtcgtttcagacccttgccccaaac

SEQ ID NO: 20070 - DNA, 59 bp, Artificial
  Synthetic oligonucleotide
caggcttgtccaaaggtatcctttgatccaattcccatacattattgtgccccagctgg

SEQ ID NO: 20071 - DNA, 56 bp, Artificial
  Synthetic oligonucleotide
ccctatgagcctgcatgggatggaggacccggggaaagaagtgttagtatggaagt

SEQ ID NO: 20072 - DNA, 59 bp, Artificial
  Synthetic oligonucleotide
tacctaagggaccaacagctcctagggatttggggttgctctggcagactcatttgcac

SEQ ID NO: 20073 - DNA, 59 bp, Artificial
  Synthetic oligonucleotide
ccggtagatcctaacctagagccctggaatcatccaggaagtcagcctacaactgcttg

SEQ ID NO: 20074 - DNA, 58 bp, Artificial
  Synthetic oligonucleotide
aagcctgtccaaaggtctcttttgacccaatccctatacattattgtgctccagctgg

SEQ ID NO: 20075 - DNA, 57 bp, Artificial
  Synthetic oligonucleotide
aatatggacgggattctttatacataaaagtctagccttaaagatagcattggatcc

SEQ ID NO: 20076 - DNA, 58 bp, Artificial
  Synthetic oligonucleotide
ggaacttaagtcattatataacacagtagtagttctctattgtgtacacgaaaagata

SEQ ID NO: 20077 - DNA, 59 bp, Artificial
  Synthetic oligonucleotide
atccgtgcgattagtgagcggattcttggcgcttatctgggaggacctcaggaacctgt

SEQ ID NO: 20078 - DNA, 55 bp, Artificial
  Synthetic oligonucleotide
caacacctctaaagttgcccgtgggaaggtgaagtgagatcgaatctttccttaa

SEQ ID NO: 20079 - DNA, 55 bp, Artificial
  Synthetic oligonucleotide
ggacgcagggggtgggaactcctcaaatattggtggaatctcctacagtattggg

SEQ ID NO: 20080 - DNA, 54 bp, Artificial
  Synthetic oligonucleotide
cgctggggactttccagagggcggttcagagggcgggacaagggagtggctaac

SEQ ID NO: 20081 - DNA, 57 bp, Artificial
  Synthetic oligonucleotide
cccctgcgggagaggcaccggacccctccccaatggcatctcgcctgcgtgggagac

SEQ ID NO: 20082 - DNA, 56 bp, Artificial
  Synthetic oligonucleotide
cagaatgccaacccagactgtaaattagtactaaagggattagggatgaatcctac

SEQ ID NO: 20083 - DNA, 59 bp, Artificial
  Synthetic oligonucleotide
accctatagtgcaaaatgcacaagggcaaatggtacatcagcctttatcgcctagaact

SEQ ID NO: 20084 - DNA, 57 bp, Artificial
  Synthetic oligonucleotide
acccagcaagagcaagttcactggactaccagggccaacaaccctatcccagtagga

SEQ ID NO: 20085 - DNA, 59 bp, Artificial
  Synthetic oligonucleotide
catgggcaaacggcactaatctaaatacaatttgggacaacctaacatggcagcaatgg

SEQ ID NO: 20086 - DNA, 59 bp, Artificial
  Synthetic oligonucleotide
caccagggccagggatcaggtacccactaacatttggatggtgctacaagctagtacca

SEQ ID NO: 20087 - DNA, 56 bp, Artificial
  Synthetic oligonucleotide
gtgtaaggttgcaggaaacttgtgggtcacggtatactatggggtacctgtgtgga

SEQ ID NO: 20088 - DNA, 56 bp, Artificial
  Synthetic oligonucleotide
gggtttattacagagacagcagagaccctatttggaaagggccagccaaactactc

SEQ ID NO: 20089 - DNA, 59 bp, Artificial
  Synthetic oligonucleotide
ttagggaacccactgcttaagcctcaataaagcttgccttgagcgcttcaagtagtgtg

SEQ ID NO: 20090 - DNA, 58 bp, Artificial
  Synthetic oligonucleotide
gcaggaactactagtaacctgcaggaacaaatagcatggatgacgggtaacccacctg

SEQ ID NO: 20091 - DNA, 59 bp, Artificial
  Synthetic oligonucleotide
gcatgaggatataatcagtttatgggatgaaagcctaaagccatgtgtaaaactaaccc

SEQ ID NO: 20092 - DNA, 59 bp, Artificial
  Synthetic oligonucleotide
ccttattaggacatatagttactcctaggtgtgactatcaagcaggacataataaggta

SEQ ID NO: 20093 - DNA, 52 bp, Artificial
  Synthetic oligonucleotide
agtggggaaattaaattgggcaagccagatttacccaggaattaaagtaaga

SEQ ID NO: 20094 - DNA, 56 bp, Artificial
  Synthetic oligonucleotide
ttccgcaagagggaaccatagatattaaacggtggcgtagagtaggcgactgtttc

SEQ ID NO: 20095 - DNA, 58 bp, Artificial
  Synthetic oligonucleotide
gcactgtacacgttgattggtggaagtaaggtggtatgatcttggtatgaccgtacct

SEQ ID NO: 20096 - DNA, 59 bp, Artificial
  Synthetic oligonucleotide
atggctccatagcttaggacaacacatctataacacctatggggatacttgggagggag

SEQ ID NO: 20097 - DNA, 51 bp, Artificial
  Synthetic oligonucleotide
aaactcactactggagacttaaaacccttattcgacacccttaaaggagac

SEQ ID NO: 20098 - DNA, 56 bp, Artificial
  Synthetic oligonucleotide
cagaaaccttgttggtccaaaatgcaaacccagattgtaagactatcttaaaagca

SEQ ID NO: 20099 - DNA, 55 bp, Artificial
  Synthetic oligonucleotide
aaattatcctatagtgcaaaatttacaggggcaaatggtacaccagcccttaaca

SEQ ID NO: 20100 - DNA, 54 bp, Artificial
  Synthetic oligonucleotide
aaggcctcaagtacctgtggaatctcctactgtattggggtcgggagctaaaaa

SEQ ID NO: 20101 - DNA, 52 bp, Artificial
  Synthetic oligonucleotide
aaagtcccgatcgtcttggactctttggcgcaccccccttagaggaggggta

SEQ ID NO: 20102 - DNA, 55 bp, Artificial
  Synthetic oligonucleotide
tgtggaacttctgggacgcagggggtgggaaaccctcaaatattggtggaatctc

SEQ ID NO: 20103 - DNA, 58 bp, Artificial
  Synthetic oligonucleotide
gagaactgcacccagagtactataaagactgctgacaaagaagtttctaactaggact

SEQ ID NO: 20104 - DNA, 57 bp, Artificial
  Synthetic oligonucleotide
ggcctgtccaaaagtatcgtttgagccaattcccatacattattgtgccccggctgg

SEQ ID NO: 20105 - DNA, 51 bp, Artificial
  Synthetic oligonucleotide
gactaacccccctttagacttagattgctcggaaatacctgggactccttt

SEQ ID NO: 20106 - DNA, 52 bp, Artificial
  Synthetic oligonucleotide
cctagcgggaaaggaggaaacttccccgtacaacaagtaggcggcaattata

SEQ ID NO: 20107 - DNA, 54 bp, Artificial
  Synthetic oligonucleotide
gtcagatttatccagggattaaggtaaggcaattatgtaaactccttaggggaa

SEQ ID NO: 20108 - DNA, 59 bp, Artificial
  Synthetic oligonucleotide
tgtgtgacgggatggggcacaacgctaaacagtgtaggagacgggatagcaaccaggga

SEQ ID NO: 20109 - DNA, 57 bp, Artificial
  Synthetic oligonucleotide
taaggtttggtgtatgggattatttggtaaaggggtaacatggtcagcattgcattc

SEQ ID NO: 20110 - DNA, 58 bp, Artificial
  Synthetic oligonucleotide
tttggtgtatgggattatttggtaaaggggtaacatggtcagcattgcattctatggg

SEQ ID NO: 20111 - DNA, 55 bp, Artificial
  Synthetic oligonucleotide
cctatttggaaaggaccggcacaactcctgtggaaaggtgagggggcagtagtca

SEQ ID NO: 20112 - DNA, 58 bp, Artificial
  Synthetic oligonucleotide
acaccagggccagggatcagatacccactgtgtttcgggtggtgcttcaagctagtac

SEQ ID NO: 20113 - DNA, 57 bp, Artificial
  Synthetic oligonucleotide
gccctattaagacgtatagttagacctagttgtgagtaccaagcaggacacaacaag

SEQ ID NO: 20114 - DNA, 55 bp, Artificial
  Synthetic oligonucleotide
cgcagagaggattttacaataagatgggtggtaggtggtcaaaaggtagtctggt

SEQ ID NO: 20115 - DNA, 55 bp, Artificial
  Synthetic oligonucleotide
ggatcaaagtttaaagccatgtgtgaagttaaccccactctgtgttactctaaat

SEQ ID NO: 20116 - DNA, 56 bp, Artificial
  Synthetic oligonucleotide
cgatctccggaacctcctactcttcctttaccaccgattgatagacttactctcaa

SEQ ID NO: 20117 - DNA, 58 bp, Artificial
  Synthetic oligonucleotide
cgggaccaggggtcagattgccactgacctttggatggtgctacaagctagtaccagt

SEQ ID NO: 20118 - DNA, 59 bp, Artificial
  Synthetic oligonucleotide
tggacagattattggcaagtaacctggataccagaatgggactttgtgtcaacacctcc

SEQ ID NO: 20119 - DNA, 55 bp, Artificial
  Synthetic oligonucleotide
cagaggtggtgcaaaaagtggttacagaaagcatagtaatatggggaaaggcccc

SEQ ID NO: 20120 - DNA, 53 bp, Artificial
  Synthetic oligonucleotide
tgacagggactttccgctggggactttccaggggaggtgtggtttgggcggag

SEQ ID NO: 20121 - DNA, 58 bp, Artificial
  Synthetic oligonucleotide
ctatcatgggtaccagcacacaaagggattggagaaaatgaacaggtagacaaattag

SEQ ID NO: 20122 - DNA, 51 bp, Artificial
  Synthetic oligonucleotide
acccccccaactactgctacgacccccaaggttcctccatccttcttccac

SEQ ID NO: 20123 - DNA, 50 bp, Artificial
  Synthetic oligonucleotide
ccggtataaccgggggatgcgtaggtttcagaccacaaggggttccttgg

SEQ ID NO: 20124 - DNA, 54 bp, Artificial
  Synthetic oligonucleotide
ggggatgcgtaggtttcagaccacaaggggttccttggtatctaggttggtcta

SEQ ID NO: 20125 - DNA, 57 bp, Artificial
  Synthetic oligonucleotide
tatgtataagtcaagaaaaactaggggatgggtttatagacatcactacgaaagcac

SEQ ID NO: 20126 - DNA, 59 bp, Artificial
  Synthetic oligonucleotide
tgtgcacactgggcccccaagactaaacagcctgcaatcctcgtccacaccccagggcc

SEQ ID NO: 20127 - DNA, 52 bp, Artificial
  Synthetic oligonucleotide
cgagagcgtcagtattaagcgggggaaaattagattcctgggaaaaaattcg

SEQ ID NO: 20128 - DNA, 57 bp, Artificial
  Synthetic oligonucleotide
tttaaaccctatattctgccccatcttccagttaatctatgggggcgtgatatatta

SEQ ID NO: 20129 - DNA, 57 bp, Artificial
  Synthetic oligonucleotide
tattaagcaggaagtctcccaagcagcccccgggagcccccagtttatgcagaccat

SEQ ID NO: 20130 - DNA, 57 bp, Artificial
  Synthetic oligonucleotide
tgtggaaagatacctaagggatcaacagctcctagggatttggggttgctctggaaa

SEQ ID NO: 20131 - DNA, 57 bp, Artificial
  Synthetic oligonucleotide
ctatgggatgaaagcctaaagccatgtgtaaagttaaccccactctgtgttactcta

SEQ ID NO: 20132 - DNA, 58 bp, Artificial
  Synthetic oligonucleotide
ttaggacaacatatctataacacctatggggatacttgggagggagttgaagctatag

SEQ ID NO: 20133 - DNA, 56 bp, Artificial
  Synthetic oligonucleotide
ctatcctcaacgtacctagaagaatcagacagggcctagaaaggtcgttgttataa

SEQ ID NO: 20134 - DNA, 57 bp, Artificial
  Synthetic oligonucleotide
gatgggtgcgagagcgtcagtattaagcgggggaaaattagattcatgggaaaagat

SEQ ID NO: 20135 - DNA, 59 bp, Artificial
  Synthetic oligonucleotide
ttttcagaccttgccataaggaaagccatattaggacatagagttagtcctaggtgtga

SEQ ID NO: 20136 - DNA, 56 bp, Artificial
  Synthetic oligonucleotide
acaaggactgctgacatcgaactttctacaagggactttccgctggggactttcca

SEQ ID NO: 20137 - DNA, 58 bp, Artificial
  Synthetic oligonucleotide
tgtaatacctcaaccattacacaggcttgtccaaaggtatcttgggatccaattccca

SEQ ID NO: 20138 - DNA, 54 bp, Artificial
  Synthetic oligonucleotide
tgtcccatcgactactccctcctagctagtctactcccgaaaggtaccccggcc

SEQ ID NO: 20139 - DNA, 54 bp, Artificial
  Synthetic oligonucleotide
acccgagtcggattgtttgaagcttctccgctatccgagggatacgtggttctt

SEQ ID NO: 20140 - DNA, 58 bp, Artificial
  Synthetic oligonucleotide
gcatgaagatataattagtctatgggaccaaagcttaaaaccatgtgtagagttaacc

SEQ ID NO: 20141 - DNA, 57 bp, Artificial
  Synthetic oligonucleotide
attaagacaaggcacatatgcaaactaattaggggaaagatgaccctaacagaagaa

SEQ ID NO: 20142 - DNA, 55 bp, Artificial
  Synthetic oligonucleotide
ttgtttaacagatccccctggtttaccacgttaatatccaccatcatggggcctc

SEQ ID NO: 20143 - DNA, 59 bp, Artificial
  Synthetic oligonucleotide
agcagggaacccactgcttaagcctcaataaagcttgccttgagagctaaagtggtgtg

SEQ ID NO: 20144 - DNA, 59 bp, Artificial
  Synthetic oligonucleotide
gggttcttaggaacagcaggaagcactatgggcgcggcgtcaataacgctgacggtaca

SEQ ID NO: 20145 - DNA, 59 bp, Artificial
  Synthetic oligonucleotide
taaagcttgccttgagtgctaaagtggtgtgtgcccatccattcggtaactctggtacc

SEQ ID NO: 20146 - DNA, 56 bp, Artificial
  Synthetic oligonucleotide
cgtaaaattgacccccctctgtgtcactttaaattgtacaaatgctagtgatagta

SEQ ID NO: 20147 - DNA, 56 bp, Artificial
  Synthetic oligonucleotide
acaaagactgctgacaccaagctttctacaagggactttccgctggggactttcca

SEQ ID NO: 20148 - DNA, 58 bp, Artificial
  Synthetic oligonucleotide
cttgcctagtcgatactaaaaacaactgggccatcataggtcgtgacgccttacaaca

SEQ ID NO: 20149 - DNA, 57 bp, Artificial
  Synthetic oligonucleotide
tggtaggtttaagaatagtttgtgctgtactttctatagtgaatagagttaggcagg

SEQ ID NO: 20150 - DNA, 54 bp, Artificial
  Synthetic oligonucleotide
ggaggtggggtttccagtcagacctcaggtccccttaagaccaatgactttcaa

SEQ ID NO: 20151 - DNA, 54 bp, Artificial
  Synthetic oligonucleotide
atgcctagtgtctggacccccctattacgagggggttgcggtcctaggcactaa

SEQ ID NO: 20152 - DNA, 56 bp, Artificial
  Synthetic oligonucleotide
tacaacaactctcggagaccacaatggcttccctaaaatctcataagttacccgtg

SEQ ID NO: 20153 - DNA, 59 bp, Artificial
  Synthetic oligonucleotide
cattgtcaagtttgctttctgacaaagggcttaggcatttcctatggcaggaagaagcg

SEQ ID NO: 20154 - DNA, 56 bp, Artificial
  Synthetic oligonucleotide
attggcagaactacacaccagggccagggacaagacttccactgacctttggttgg

SEQ ID NO: 20155 - DNA, 57 bp, Artificial
  Synthetic oligonucleotide
cttggaaaacaggccacctcctgggtcacaggccattggtggggattgcgcctatac

SEQ ID NO: 20156 - DNA, 53 bp, Artificial
  Synthetic oligonucleotide
ttggcgtggggtggccgaaggaagggactctagactttagggtggtagccgcg

SEQ ID NO: 20157 - DNA, 57 bp, Artificial
  Synthetic oligonucleotide
ctgggaatgttgggactatgtaagtcaaagagtacctgacgaaagactacaacgatg

SEQ ID NO: 20158 - DNA, 59 bp, Artificial
  Synthetic oligonucleotide
ccatatccctatgctttactacgatgtgaggaatggtgttggtaccctgaatctattaa

SEQ ID NO: 20159 - DNA, 54 bp, Artificial
  Synthetic oligonucleotide
atagagttaggcagggatactcacctttgtcgtttcagacccataccccgaacc

SEQ ID NO: 20160 - DNA, 58 bp, Artificial
  Synthetic oligonucleotide
cgggaccaggggtcagatatccactgacctttggatggccattcaaaccagtgccagt

SEQ ID NO: 20161 - DNA, 50 bp, Artificial
  Synthetic oligonucleotide
cgtaaaggccctcacgccagtgtttacccttcccccgtaattataaatac

SEQ ID NO: 20162 - DNA, 58 bp, Artificial
  Synthetic oligonucleotide
caaggatccttccctgattggcagaactacacaccagggccaggggtcagatttccac

SEQ ID NO: 20163 - DNA, 57 bp, Artificial
  Synthetic oligonucleotide
accctggccttttagaaacatcagaaggctgtaaacaaatactgtcacagctacaac

SEQ ID NO: 20164 - DNA, 59 bp, Artificial
  Synthetic oligonucleotide
acacatccggagtactacaaagactgctgacatcgagtgttctacaagggactttccgc

SEQ ID NO: 20165 - DNA, 56 bp, Artificial
  Synthetic oligonucleotide
tagcgaggatagtggaacttctgggacgcagggggtgggaagccctcaaatattgg

SEQ ID NO: 20166 - DNA, 54 bp, Artificial
  Synthetic oligonucleotide
acacagaagttgttgactgggactttccgctggggactttccaggggaggtgtg

SEQ ID NO: 20167 - DNA, 54 bp, Artificial
  Synthetic oligonucleotide
gactgctgacaccgagttttgaacaagggactttccgctggggactttccaggg

SEQ ID NO: 20168 - DNA, 52 bp, Artificial
  Synthetic oligonucleotide
aggcagggatactcacccctatcgtttcagacccataccccgaacccaaggg

SEQ ID NO: 20169 - DNA, 59 bp, Artificial
  Synthetic oligonucleotide
tctccgggggactatgttcagcccgcctacatcgtcacgccctactggccacctgccca

SEQ ID NO: 20170 - DNA, 59 bp, Artificial
  Synthetic oligonucleotide
cttcctgttaaaactagctgcaagatggcctattaaagtattacatacagacaatgggc

SEQ ID NO: 20171 - DNA, 58 bp, Artificial
  Synthetic oligonucleotide
gcaagattacaatctaaacgattcggagaactcgaccttcctcctgaggcaaggacca

SEQ ID NO: 20172 - DNA, 59 bp, Artificial
  Synthetic oligonucleotide
gtatacaggaagatatgacctaaattttgataggtgggtcacagtcaatggctataaag

SEQ ID NO: 20173 - DNA, 58 bp, Artificial
  Synthetic oligonucleotide
ttgagtggctcttggaagccttcaggcggtacaccccttttgatcccacctcagaggc

SEQ ID NO: 20174 - DNA, 55 bp, Artificial
  Synthetic oligonucleotide
agagaatatcaaaacctgtggttatcggccttttccgcactcccagggaacacta

SEQ ID NO: 20175 - DNA, 59 bp, Artificial
  Synthetic oligonucleotide
gtatagttagacctaggtgtgattatcaagcaggacataataaggtagggtctctacag

SEQ ID NO: 20176 - DNA, 57 bp, Artificial
  Synthetic oligonucleotide
acgaccccccagattctgatccacagatcccccctccctatgttgagcctacagccc

SEQ ID NO: 20177 - DNA, 57 bp, Artificial
  Synthetic oligonucleotide
aatcagtttatgggatgaaagcctaaagccatgtgtaaagttgaccccactctgtgt

SEQ ID NO: 20178 - DNA, 58 bp, Artificial
  Synthetic oligonucleotide
gacagggcctcgaaagagctttgctataagatgggtggcaagtggtcaaagtttagtg

SEQ ID NO: 20179 - DNA, 53 bp, Artificial
  Synthetic oligonucleotide
atgggaccaaagcctaaagccatgtgtaaagttaacccctctctgcgttactt

SEQ ID NO: 20180 - DNA, 54 bp, Artificial
  Synthetic oligonucleotide
agggggggggaagtcctcaaatattggtggaatctcctacagtattggagtcag

SEQ ID NO: 20181 - DNA, 55 bp, Artificial
  Synthetic oligonucleotide
aaactgggcaagtcagatttacccagggattaaggtaaggcaattgtgtagactc

SEQ ID NO: 20182 - DNA, 57 bp, Artificial
  Synthetic oligonucleotide
atagggggggggaaaatgtagtgttatgcaatactcttatgtaacgatgaaacagca

SEQ ID NO: 20183 - DNA, 55 bp, Artificial
  Synthetic oligonucleotide
gtgaatagagttaggaagggatactcaccattatcgtttcagacccgccccccaa

SEQ ID NO: 20184 - DNA, 59 bp, Artificial
  Synthetic oligonucleotide
aaggctacacaccagggccaggggtcagatatccactgacctttggatggtgcttcaag

SEQ ID NO: 20185 - DNA, 57 bp, Artificial
  Synthetic oligonucleotide
ttttccagtcagacctcaggtgcctttaagaccaatgacttttaagggagcattcga

SEQ ID NO: 20186 - DNA, 52 bp, Artificial
  Synthetic oligonucleotide
accccaccattagtaagactagcctacaacctagtcaaagaccccctagaaa

SEQ ID NO: 20187 - DNA, 56 bp, Artificial
  Synthetic oligonucleotide
ggcaaccccagtcgatgcaccctgttcataggggcctcttcctaccactccgaccc

SEQ ID NO: 20188 - DNA, 59 bp, Artificial
  Synthetic oligonucleotide
gcaatcccagtcgatgcaccctgttcataggggcctcttcctaccattccgacccctgc

SEQ ID NO: 20189 - DNA, 59 bp, Artificial
  Synthetic oligonucleotide
gtagtttccctaactgagacaacaaatcagaagactgaattacaggcgatctatttagc

SEQ ID NO: 20190 - DNA, 58 bp, Artificial
  Synthetic oligonucleotide
aggacaacatatctataacacctatggggatacttgggtgggagttgaggctataata

SEQ ID NO: 20191 - DNA, 54 bp, Artificial
  Synthetic oligonucleotide
ttaggctacggagaacaagaagggatggacccggtagatcctaacctagagccc

SEQ ID NO: 20192 - DNA, 56 bp, Artificial
  Synthetic oligonucleotide
ccgagacttcggggacgcctgaagtaaggtaagtgactctgctgtacgcggggcga

SEQ ID NO: 20193 - DNA, 51 bp, Artificial
  Synthetic oligonucleotide
gaaagcctaaaaccatgtgtaaagttaacccctctctgcgttactttaaat

SEQ ID NO: 20194 - DNA, 53 bp, Artificial
  Synthetic oligonucleotide
aacattactaattcccacgtttccatactacaagaaagaccaccccttgagaa

SEQ ID NO: 20195 - DNA, 57 bp, Artificial
  Synthetic oligonucleotide
attattgggaagagataacatgattaagttcaacataaggttggtaatggctcaaat

SEQ ID NO: 20196 - DNA, 53 bp, Artificial
  Synthetic oligonucleotide
aggaaccaaccacggcggagtgctcctagaaaggcgcgggtcggtaccagacg

SEQ ID NO: 20197 - DNA, 57 bp, Artificial
  Synthetic oligonucleotide
ccctatagtgcagaatctccaagggcaaatggtacaccaggccccgtcacctagaac

SEQ ID NO: 20198 - DNA, 56 bp, Artificial
  Synthetic oligonucleotide
gcttcgcaggaggtaaaaaattggatgacagaaaccttgttggtccaaaatgcaaa

SEQ ID NO: 20199 - DNA, 59 bp, Artificial
  Synthetic oligonucleotide
ctcaacatacctacaagaatcagacaggccctcgaaagggctttgctataagatgggtg

SEQ ID NO: 20200 - DNA, 57 bp, Artificial
  Synthetic oligonucleotide
ccaaaagtaagctcagaagtacacatcccactaggggaagctagattagtagtaaga

SEQ ID NO: 20201 - DNA, 55 bp, Artificial
  Synthetic oligonucleotide
aaagactgctgacatcgagttttctacaagggactttccgctggggactttccag

SEQ ID NO: 20202 - DNA, 55 bp, Artificial
  Synthetic oligonucleotide
agacagaaatatcagaccctagataacgaggaaaacctttaatttcgctctaaga

SEQ ID NO: 20203 - DNA, 59 bp, Artificial
  Synthetic oligonucleotide
ccgagagaagcatccggagtactacaaagactgctgacatcgagttttctacaagggac

SEQ ID NO: 20204 - DNA, 59 bp, Artificial
  Synthetic oligonucleotide
ttggtcaccatacgttggccagctagtccaggagagggtgtacaggtcgtcacaattaa

SEQ ID NO: 20205 - DNA, 55 bp, Artificial
  Synthetic oligonucleotide
tctctgggaccaaagcctaaagccatgtgtaaagttaacccctctctgcgttact

SEQ ID NO: 20206 - DNA, 57 bp, Artificial
  Synthetic oligonucleotide
gggacagatagggttatagaagtagtacaaagaatttggagggctattctccacata

SEQ ID NO: 20207 - DNA, 55 bp, Artificial
  Synthetic oligonucleotide
tactcacccttgtcattccagacccctacccaccaccagagggaacccgacaggc

SEQ ID NO: 20208 - DNA, 59 bp, Artificial
  Synthetic oligonucleotide
gtagaccagatcagagcccgggagctctctggctacctagggaacccactgcttaagcc

SEQ ID NO: 20209 - DNA, 56 bp, Artificial
  Synthetic oligonucleotide
ctggggcttacgtttgtatgtctccggacaagatccagggcttacatttgggatcc

SEQ ID NO: 20210 - DNA, 59 bp, Artificial
  Synthetic oligonucleotide
gcctaaagtagtgtgtgcccgtctgttgtgtgactctggtaactagagatccctcaaac

SEQ ID NO: 20211 - DNA, 57 bp, Artificial
  Synthetic oligonucleotide
ccactttcgtggctctctatgactacgagtcccggactgaaacggacttgtccttca

SEQ ID NO: 20212 - DNA, 48 bp, Artificial
  Synthetic oligonucleotide
aaaaaactcctcagggggggaggactaacctccccccgaaccatacta

SEQ ID NO: 20213 - DNA, 58 bp, Artificial
  Synthetic oligonucleotide
gtccaaaggtcagttttgacccaattcctatacattattgtgctccagcgggttatgc

SEQ ID NO: 20214 - DNA, 54 bp, Artificial
  Synthetic oligonucleotide
gaaactgctgacagggactttccactggggactttccaggggaggtgtggtttg

SEQ ID NO: 20215 - DNA, 56 bp, Artificial
  Synthetic oligonucleotide
cgagagtagtggaacttctgggacggaacagtctcaggggactgcagaggggttgg

SEQ ID NO: 20216 - DNA, 59 bp, Artificial
  Synthetic oligonucleotide
tggtggggaacgcccattaattctctgtataaatgtacccgcttcttgcattgtattca

SEQ ID NO: 20217 - DNA, 59 bp, Artificial
  Synthetic oligonucleotide
attgcaccaggccaaatgagggagcctaggggaagtgacatagcaggaaccactagtac

SEQ ID NO: 20218 - DNA, 51 bp, Artificial
  Synthetic oligonucleotide
cccctcctctagtaaaattatggtaccaattagaaaaagaccccatagtag

SEQ ID NO: 20219 - DNA, 55 bp, Artificial
  Synthetic oligonucleotide
actagtacccttcaggaacaaataggatggatgacaagtaacccacctatcccag

SEQ ID NO: 20220 - DNA, 56 bp, Artificial
  Synthetic oligonucleotide
ggtaaaaaattggatgacagaaaccttgttggtccagaatgcgaacccagattgta

SEQ ID NO: 20221 - DNA, 58 bp, Artificial
  Synthetic oligonucleotide
gggagatcctcaagtattggtggaatcttctacagtattggactcaggaactaaagaa

SEQ ID NO: 20222 - DNA, 58 bp, Artificial
  Synthetic oligonucleotide
ccacttgagagacttagtcttaattgcaacgaggattgtgggacttctgggacgcagg

SEQ ID NO: 20223 - DNA, 55 bp, Artificial
  Synthetic oligonucleotide
gggactttccaggagacgtggcctgagtgactaagccccgctggggactttccga

SEQ ID NO: 20224 - DNA, 57 bp, Artificial
  Synthetic oligonucleotide
gcaagcagggagctggaaagattcgcgcttaaccctggccttttagaaacagcggaa

SEQ ID NO: 20225 - DNA, 59 bp, Artificial
  Synthetic oligonucleotide
agctaccattgtctagtttgctttcagacaaaaggcttaggcatttcctatggcaggaa

SEQ ID NO: 20226 - DNA, 56 bp, Artificial
  Synthetic oligonucleotide
gggactttccagcgtgggagggataagggcggatcagggagtggctaaccctcaga

SEQ ID NO: 20227 - DNA, 57 bp, Artificial
  Synthetic oligonucleotide
acaccccgggaccaggggtcagattgccactgacctttggatggtgcttcaagctag

SEQ ID NO: 20228 - DNA, 57 bp, Artificial
  Synthetic oligonucleotide
cacctgacgttaccatttaactggacccactgctttgacccccagattcaagctata

SEQ ID NO: 20229 - DNA, 58 bp, Artificial
  Synthetic oligonucleotide
taatacctcagtcgttacacaagcttgtccaaaggtatccttcgagccaattcccata

SEQ ID NO: 20230 - DNA, 56 bp, Artificial
  Synthetic oligonucleotide
ctgtgcgacttaacttgagactacacaaccttggccgaatctccgaacggtttggc

SEQ ID NO: 20231 - DNA, 58 bp, Artificial
  Synthetic oligonucleotide
gggaagccctcaagtatctgtggaatctcacgcagtattggagtcgggaactaaagaa

SEQ ID NO: 20232 - DNA, 55 bp, Artificial
  Synthetic oligonucleotide
tttgaccccacgctagcttttagctacgaggcctttattcgatacccagaggagt

SEQ ID NO: 20233 - DNA, 57 bp, Artificial
  Synthetic oligonucleotide
acattattgtgccccagctgggtttgcgattctaaaatgtaacgataagaagttcaa

SEQ ID NO: 20234 - DNA, 51 bp, Artificial
  Synthetic oligonucleotide
gggactttccgaggggactttccagaagaggcgtaacctgggcgggactgg

SEQ ID NO: 20235 - DNA, 59 bp, Artificial
  Synthetic oligonucleotide
tactgccgagtggagagtgattactgagcggccggtgtatcgggagtcgtcccttaatc

SEQ ID NO: 20236 - DNA, 57 bp, Artificial
  Synthetic oligonucleotide
atgccgggaggtagaatctagtacgtataaaatgcagttgttagcgcaggccttaag

SEQ ID NO: 20237 - DNA, 59 bp, Artificial
  Synthetic oligonucleotide
actcgggaactaacacactatataagccttgagattgtacttgggagtcagacgcttca

SEQ ID NO: 20238 - DNA, 51 bp, Artificial
  Synthetic oligonucleotide
cccagggggttatcaacccaccattggttaaacttcctccaagccgcctac

SEQ ID NO: 20239 - DNA, 52 bp, Artificial
  Synthetic oligonucleotide
cgcctttttccaatccatgcgtaaactctccccctaccggaacgggtgccta

SEQ ID NO: 20240 - DNA, 55 bp, Artificial
  Synthetic oligonucleotide
gggacacggggcttttaccctaccactctctcataactactccaggcctaatatg

SEQ ID NO: 20241 - DNA, 58 bp, Artificial
  Synthetic oligonucleotide
aagcctacagctattttggaggtcgtgaatcctcggacagtgataattttggaccatc

SEQ ID NO: 20242 - DNA, 59 bp, Artificial
  Synthetic oligonucleotide
aacacttcagtcattacacaagcttgtccaaaggtatcctttgagccaattcctataca

SEQ ID NO: 20243 - DNA, 58 bp, Artificial
  Synthetic oligonucleotide
aagaagatgaacagatcataatcaccatcctgtggaacttaaccccagaaaaaggatg

SEQ ID NO: 20244 - DNA, 57 bp, Artificial
  Synthetic oligonucleotide
ttggccccaacgaatgtgaagagatacacaactagtacctcaagaactaagagaggg

SEQ ID NO: 20245 - DNA, 59 bp, Artificial
  Synthetic oligonucleotide
gaggagtcgagagctatttttgtgcccggtggggttgcgagacaacaggcgatgcctac

SEQ ID NO: 20246 - DNA, 57 bp, Artificial
  Synthetic oligonucleotide
atgtaagcctgaacgtctctcacttccccgtcaccatggaaaaccttattctgacca

SEQ ID NO: 20247 - DNA, 56 bp, Artificial
  Synthetic oligonucleotide
aaattcggttcggtctataagccgcaatcgcagggacttgtggaacgctgtaacca

SEQ ID NO: 20248 - DNA, 59 bp, Artificial
  Synthetic oligonucleotide
agttactttacaactgcgctagcctggttattatcgggattcgtcactaattctgtgca

SEQ ID NO: 20249 - DNA, 54 bp, Artificial
  Synthetic oligonucleotide
tgcaaaggttcccatggtccgggaccgaagggttatacgataccttggtctata

SEQ ID NO: 20250 - DNA, 57 bp, Artificial
  Synthetic oligonucleotide
gttccagtggctcagaaaacttagagcacgagaaaagaacatcccctcgcagtttta

SEQ ID NO: 20251 - DNA, 58 bp, Artificial
  Synthetic oligonucleotide
cgcacggcagcggaggacattgtaaaaaattgcgaggtttgccagaacggacaaatgc

SEQ ID NO: 20252 - DNA, 54 bp, Artificial
  Synthetic oligonucleotide
ggttaagctggctaacttgacaggatgggttaacgggactccaccctattggga

SEQ ID NO: 20253 - DNA, 58 bp, Artificial
  Synthetic oligonucleotide
gctgaaccagcaacagtttctaggatgccccaccgttgtttcaagggttcccagatga

SEQ ID NO: 20254 - DNA, 55 bp, Artificial
  Synthetic oligonucleotide
ggagagcgaggagagtaacagtgcaaaggtttccctggtgtagggacccaacagg

SEQ ID NO: 20255 - DNA, 56 bp, Artificial
  Synthetic oligonucleotide
aaaaggtcagtcaaaattatcctatagtgcagaacctccaagggcaaatggtacac

SEQ ID NO: 20256 - DNA, 54 bp, Artificial
  Synthetic oligonucleotide
aaagctcgagcctagttagaggactaggaagggccgtagccgtaactactctgg

SEQ ID NO: 20257 - DNA, 58 bp, Artificial
  Synthetic oligonucleotide
caaggctgcggtgtcaggaggtagaaaagagcccagggggatgtatgcagggataccc

SEQ ID NO: 20258 - DNA, 54 bp, Artificial
  Synthetic oligonucleotide
aggactaggaagggccgtagccgtaactactctgggcaagtagggcaggcggac

SEQ ID NO: 20259 - DNA, 57 bp, Artificial
  Synthetic oligonucleotide
ctgggcaagtagggcaggcggacgggtacgtaatgggggcggctacctcagcactga

SEQ ID NO: 20260 - DNA, 55 bp, Artificial
  Synthetic oligonucleotide
ttagtacatacctaaagggagtactaacatactggggaagagagatacaaattag

SEQ ID NO: 20261 - DNA, 51 bp, Artificial
  Synthetic oligonucleotide
ttagtagtgtttactccggggggagggacagaggtatcccgaacaaacgtg

SEQ ID NO: 20262 - DNA, 57 bp, Artificial
  Synthetic oligonucleotide
tcccgcatccctcctgtcctatggtcgcagggcccggaagacattggacgtttacgc

SEQ ID NO: 20263 - DNA, 59 bp, Artificial
  Synthetic oligonucleotide
tttaccacacataaacgagagtaggcaatggacatgtagcgcaagagtagggggaacca

SEQ ID NO: 20264 - DNA, 58 bp, Artificial
  Synthetic oligonucleotide
ggcaagcagggagctagaacgattcgcagttaaccctggccttttagaaacatcagaa

SEQ ID NO: 20265 - DNA, 58 bp, Artificial
  Synthetic oligonucleotide
ccagtctacgtgtttggagactgtgtacaaggcgactggtgccccatctctgggggac

SEQ ID NO: 20266 - DNA, 58 bp, Artificial
  Synthetic oligonucleotide
gttttgtggttacgctacatcctggacctgtgtaccaacgaacttagcaaccatgcta

SEQ ID NO: 20267 - DNA, 57 bp, Artificial
  Synthetic oligonucleotide
tgcgggaccaggaaggagatttgtgtggtgtagtctaccacaaggctggattttaag

SEQ ID NO: 20268 - DNA, 57 bp, Artificial
  Synthetic oligonucleotide
aggggaagccgtacacggacaagtagattgtagtccagggatatggcagttagattg

SEQ ID NO: 20269 - DNA, 59 bp, Artificial
  Synthetic oligonucleotide
cctagagcaactggtgcttacccatacttgcgcctacaccactgagtggccggaaccta

SEQ ID NO: 20270 - DNA, 56 bp, Artificial
  Synthetic oligonucleotide
gaagagcttaggtcactatttaatacagtagtaaccctctattgggtacatcaaag

SEQ ID NO: 20271 - DNA, 55 bp, Artificial
  Synthetic oligonucleotide
tgatccaaaacgcaaatccagattgtaagaccattttaaaggcgttgggaccagg

SEQ ID NO: 20272 - DNA, 53 bp, Artificial
  Synthetic oligonucleotide
cccttgcattcctaggaagccaccagggtaaaggaatagggttcccagtaaga

SEQ ID NO: 20273 - DNA, 55 bp, Artificial
  Synthetic oligonucleotide
tgaggctccctgaccctccggccgcgcacgttaggctctggtttgtaaccctact

SEQ ID NO: 20274 - DNA, 52 bp, Artificial
  Synthetic oligonucleotide
ggctcctccggaaccccatacgccccccccctatatagagcctcccgctacc

SEQ ID NO: 20275 - DNA, 57 bp, Artificial
  Synthetic oligonucleotide
acgttcaggtctccattgcaggcgccccccctcgacctacccaggcactcttagaca

SEQ ID NO: 20276 - DNA, 53 bp, Artificial
  Synthetic oligonucleotide
cattccccccacaaacacgtccgctccccttccaagacaccgatataaccctc

SEQ ID NO: 20277 - DNA, 56 bp, Artificial
  Synthetic oligonucleotide
gtaaatagagttaggcagggatactcacctttgtcgttgcagacccttaccccaga

SEQ ID NO: 20278 - DNA, 54 bp, Artificial
  Synthetic oligonucleotide
acccgtaccgacgattcggagacggcggtaatcctcaacagcagggaccaccac

SEQ ID NO: 20279 - DNA, 53 bp, Artificial
  Synthetic oligonucleotide
accacaaacttcccgtagaggttaacatctcagggatcccacaaggtcttttc

SEQ ID NO: 20280 - DNA, 55 bp, Artificial
  Synthetic oligonucleotide
agggcgttccaggaggagtggtctgggcgggactagggagtggctaaccctcaga

SEQ ID NO: 20281 - DNA, 58 bp, Artificial
  Synthetic oligonucleotide
ccctgacatctgcctgagagtgtttctcttatgtgggtctaagggatccgggacttag

SEQ ID NO: 20282 - DNA, 55 bp, Artificial
  Synthetic oligonucleotide
agtactataaagactgctgacaaagaagtttctaactaggacttccgctggggac

SEQ ID NO: 20283 - DNA, 58 bp, Artificial
  Synthetic oligonucleotide
cacgggctgttgttattttggaccatcttggcaacagaagaactgtaagtgtggacaa

SEQ ID NO: 20284 - DNA, 59 bp, Artificial
  Synthetic oligonucleotide
gaccatgcggccccttcaatatggaccctcctggatgcttactggagagggtaccagga

SEQ ID NO: 20285 - DNA, 58 bp, Artificial
  Synthetic oligonucleotide
atgggtgcgagagcgtctatattaaccggcgggcgattagatgcctgggagaaaatta

SEQ ID NO: 20286 - DNA, 59 bp, Artificial
  Synthetic oligonucleotide
aagtgtgtgttcccatctctcctagtcgccgcctggtcattcggtgttctcctgagtaa

SEQ ID NO: 20287 - DNA, 57 bp, Artificial
  Synthetic oligonucleotide
tattgccctgttagcatcttggacataaaacaagggccgaaggagccttttagagac

SEQ ID NO: 20288 - DNA, 56 bp, Artificial
  Synthetic oligonucleotide
cgagagcgtcagtattaagcgggggacaattagatcgatgggaaagaattcggtta

SEQ ID NO: 20289 - DNA, 57 bp, Artificial
  Synthetic oligonucleotide
cgagagcgtcagtattaagcgggggacaattagatagatgggaacacattcggttaa

SEQ ID NO: 20290 - DNA, 52 bp, Artificial
  Synthetic oligonucleotide
cctagcgggaaagggggaaacttccccgtgcaacaaataggcggcaactatg

SEQ ID NO: 20291 - DNA, 53 bp, Artificial
  Synthetic oligonucleotide
ttacaggttataaccccttagccggtcccctccgtgttcaagccaacaatcca

SEQ ID NO: 20292 - DNA, 58 bp, Artificial
  Synthetic oligonucleotide
cgtctacgtgtttggcgattgtgtacaggccgattggtgtcccgtctcaggtggtcta

SEQ ID NO: 20293 - DNA, 58 bp, Artificial
  Synthetic oligonucleotide
gagacctcaataaaaccatgtgttaaattaaccccactgtgtgtgacaatgaagtgta

SEQ ID NO: 20294 - DNA, 55 bp, Artificial
  Synthetic oligonucleotide
ggggtccgtgtaagacccggggtcccactgaggccaatgacattcaaactagcag

SEQ ID NO: 20295 - DNA, 52 bp, Artificial
  Synthetic oligonucleotide
agttaagacgattccttaagctagcgctccaaaccccagtctggttaaaccc

SEQ ID NO: 20296 - DNA, 51 bp, Artificial
  Synthetic oligonucleotide
ggtaaaacccactcccagtttaaactcctacggtgtccggtacatgtatac

SEQ ID NO: 20297 - DNA, 57 bp, Artificial
  Synthetic oligonucleotide
aaggcacactggaccctgactgaactgcaaaccctcctgggggagctccagtgggtc

SEQ ID NO: 20298 - DNA, 55 bp, Artificial
  Synthetic oligonucleotide
catctacccggcaacagacgacttactcctcctctctgaacccacgcccccgccc

SEQ ID NO: 20299 - DNA, 58 bp, Artificial
  Synthetic oligonucleotide
ggtaaacggagagcaggggccccgatcgtagatggcaagcggacggtatgggctagca

SEQ ID NO: 20300 - DNA, 57 bp, Artificial
  Synthetic oligonucleotide
ccccttggacttggtggcccacacttaaacctgatgtatgtgccttggcggctagtc

SEQ ID NO: 20301 - DNA, 58 bp, Artificial
  Synthetic oligonucleotide
ggacccaaggaaagctcaccctcactgaggtctcaggacacgggttgtgcataggaaa

SEQ ID NO: 20302 - DNA, 53 bp, Artificial
  Synthetic oligonucleotide
aaaagggctagcaatccaccattggttaaacttcctacaagccgcctatcggt

SEQ ID NO: 20303 - DNA, 58 bp, Artificial
  Synthetic oligonucleotide
tgtccaggcttaattacctactcacaataccacaagccctactccctgtatatatttc

SEQ ID NO: 20304 - DNA, 55 bp, Artificial
  Synthetic oligonucleotide
ccggtctatcctgcgacctgccttagccattcccgccagtaatatcacccccccg

SEQ ID NO: 20305 - DNA, 55 bp, Artificial
  Synthetic oligonucleotide
tttgcccctccgagccataggacccccggccgagcccaacggcctagtgcctcta

SEQ ID NO: 20306 - DNA, 55 bp, Artificial
  Synthetic oligonucleotide
cctaggcaaccgggcaaggaagacacctagggatggaagacctcctctagacaaa

SEQ ID NO: 20307 - DNA, 57 bp, Artificial
  Synthetic oligonucleotide
tatgaagggtggttcaatagctccccttggttcactaccctactatcaaccatcgcc

SEQ ID NO: 20308 - DNA, 52 bp, Artificial
  Synthetic oligonucleotide
atcccgggtttgaagtgtgaaaattggacgacagtgtactatggggtaccgg

SEQ ID NO: 20309 - DNA, 57 bp, Artificial
  Synthetic oligonucleotide
ctgagtgaaggcagtaagggcggcaggaaccaaccacgacggagtgctcctataaag

SEQ ID NO: 20310 - DNA, 55 bp, Artificial
  Synthetic oligonucleotide
aaccgccaggacagccaaaattaccctatagtgcagaacctccagggacaaatgg

SEQ ID NO: 20311 - DNA, 56 bp, Artificial
  Synthetic oligonucleotide
gccaaccttcaacgtcggatggccacgagacggcacttttaacccagacattatta

SEQ ID NO: 20312 - DNA, 57 bp, Artificial
  Synthetic oligonucleotide
tctcccctctcgttgcagacccttatcccaacaaccaggggaccagacaggccagaa

SEQ ID NO: 20313 - DNA, 59 bp, Artificial
  Synthetic oligonucleotide
tgactcccaaccagaccggcggtcacagggcagttcccagaataataggccgtctgcgc

SEQ ID NO: 20314 - DNA, 56 bp, Artificial
  Synthetic oligonucleotide
ttgcacgccctgcttccttacgaccccggtggcataaacctgttaagatcttggaa

SEQ ID NO: 20315 - DNA, 54 bp, Artificial
  Synthetic oligonucleotide
cctaggattctccaccccagatgagaagttccaaaaagaccccccatacaaatg

SEQ ID NO: 20316 - DNA, 59 bp, Artificial
  Synthetic oligonucleotide
tgaccgggctatacagcgtctgcaaggacttactatccaggagcttcccgaccctccaa

SEQ ID NO: 20317 - DNA, 59 bp, Artificial
  Synthetic oligonucleotide
tatagtagctgggccaatgggggcaacgtatacagcttttaatcctagaacagtcgcca

SEQ ID NO: 20318 - DNA, 55 bp, Artificial
  Synthetic oligonucleotide
gacaaaggggtcagtcaaaattaccctatagtgcagaacctccaggggcaaatgg

SEQ ID NO: 20319 - DNA, 58 bp, Artificial
  Synthetic oligonucleotide
ggacagccattagtcattctggccccccatgccgtagaggcactagttaagcaacccc

SEQ ID NO: 20320 - DNA, 54 bp, Artificial
  Synthetic oligonucleotide
ctataccggctccacagccacctagccccctcaataccagttaccccccttcca

SEQ ID NO: 20321 - DNA, 57 bp, Artificial
  Synthetic oligonucleotide
gccaggatatcccgagggtcatcagaggacaaccacccttaggggattgtgaacacc

SEQ ID NO: 20322 - DNA, 57 bp, Artificial
  Synthetic oligonucleotide
agtgggtcacagtgttctatggggtaccggtatggaaagatgcaactccaccactct

SEQ ID NO: 20323 - DNA, 56 bp, Artificial
  Synthetic oligonucleotide
ccgcaaaccgcatcctatagaactttgcccgggactttccagtcaccatgactacg

SEQ ID NO: 20324 - DNA, 58 bp, Artificial
  Synthetic oligonucleotide
aagcagcacggaaggctacgccttagcccaacaataccatcatctgtacggtcacccc

SEQ ID NO: 20325 - DNA, 56 bp, Artificial
  Synthetic oligonucleotide
ggatttagagacaggaaattcactaaaggaccttcagaattagtacggcatttagc

SEQ ID NO: 20326 - DNA, 57 bp, Artificial
  Synthetic oligonucleotide
cactaactgttgccctcatgttgggaggactcactgtagggggcatagccgcggggg

SEQ ID NO: 20327 - DNA, 55 bp, Artificial
  Synthetic oligonucleotide
ttcgatccctgtttagcctgatacgatagccgctaacctgggacgaactcccctt

SEQ ID NO: 20328 - DNA, 55 bp, Artificial
  Synthetic oligonucleotide
ataggtgtcccaacctaccccttgatgttcgttctagtcttcagcttacaaagtg

SEQ ID NO: 20329 - DNA, 51 bp, Artificial
  Synthetic oligonucleotide
ttcgttcccgctacctaatcccctacccaaacctgccaagtctccccccgc

SEQ ID NO: 20330 - DNA, 56 bp, Artificial
  Synthetic oligonucleotide
ggacgcagggggtgggaagccctcaaatattgttggaatctcctacagtattggat

SEQ ID NO: 20331 - DNA, 56 bp, Artificial
  Synthetic oligonucleotide
atataattagtctatgggaccaaagcctaaagccatgtgtgaagttaacccctctc

SEQ ID NO: 20332 - DNA, 55 bp, Artificial
  Synthetic oligonucleotide
aacgtcaaaaaacaggatgttcctggcccactccttccaattctgagtccgtatg

SEQ ID NO: 20333 - DNA, 53 bp, Artificial
  Synthetic oligonucleotide
ttttccagttagacctcaggtacctttaaggccaatgacttacaagggagcgt

SEQ ID NO: 20334 - DNA, 51 bp, Artificial
  Synthetic oligonucleotide
aaagcgatttgcttttagtctcccgtctaccaactttaaacaaccaataaa

SEQ ID NO: 20335 - DNA, 58 bp, Artificial
  Synthetic oligonucleotide
tctatgggatcaaagcttaaagccatgtgtaaagttaacccctctctgcgtcacgtta

SEQ ID NO: 20336 - DNA, 54 bp, Artificial
  Synthetic oligonucleotide
cttagagccctccttaacaaggtagggatccagacaccggaggccaaattccag

SEQ ID NO: 20337 - DNA, 57 bp, Artificial
  Synthetic oligonucleotide
actatagaaagggtgctaatcctctttggcagggaccagctcacctcgtgtggaaag

SEQ ID NO: 20338 - DNA, 58 bp, Artificial
  Synthetic oligonucleotide
ccaccggagaacaagtgctgcgcagccataaggtaggtgacttggacgggtctgggaa

SEQ ID NO: 20339 - DNA, 57 bp, Artificial
  Synthetic oligonucleotide
gacggactcggctgagtgaaggcagtaagggcggcaggaatcaaccgcgacggagtt

SEQ ID NO: 20340 - DNA, 54 bp, Artificial
  Synthetic oligonucleotide
taggagggaacaatgaggtagaccgtttagttagtcaaggaataagacaggtcc

SEQ ID NO: 20341 - DNA, 59 bp, Artificial
  Synthetic oligonucleotide
gtggggactcatatgggagactctgggacgggttggaagagggatcgcagcaatcccaa

SEQ ID NO: 20342 - DNA, 58 bp, Artificial
  Synthetic oligonucleotide
ctaaagacgtcccggccgcagagtagaccagcctgaggactcctttgactgagtaaga

SEQ ID NO: 20343 - DNA, 53 bp, Artificial
  Synthetic oligonucleotide
tggaaaaatagttcagtccaagccttttgtaagacccccaatacgaacctatg

SEQ ID NO: 20344 - DNA, 58 bp, Artificial
  Synthetic oligonucleotide
aggggtccgatacccactgtgttttggatggtgcttcaagctagtaccagtggatcca

SEQ ID NO: 20345 - DNA, 58 bp, Artificial
  Synthetic oligonucleotide
ctatctgtagtaaatagagttaggcagggatactcgcctttgtcgttgcagaccctta

SEQ ID NO: 20346 - DNA, 58 bp, Artificial
  Synthetic oligonucleotide
ggaggaaatttaggactatctctaactcccggagattgtattacatgggactcagcag

SEQ ID NO: 20347 - DNA, 57 bp, Artificial
  Synthetic oligonucleotide
gaaagtccccagccgctacgcaacccgggccccgagttgcatcagccgcttcgcaac

SEQ ID NO: 20348 - DNA, 57 bp, Artificial
  Synthetic oligonucleotide
gataccgaaaacaactgggtcataattggccgcgacgccctacagcaatgccaaggg

SEQ ID NO: 20349 - DNA, 53 bp, Artificial
  Synthetic oligonucleotide
gtccccattctactccatcacttccaccggtttaaaaacctgggtgcccagac

SEQ ID NO: 20350 - DNA, 54 bp, Artificial
  Synthetic oligonucleotide
acaacccccttgtcctaacctgataggctactcaaactaccatgccacttaccc

SEQ ID NO: 20351 - DNA, 55 bp, Artificial
  Synthetic oligonucleotide
gccctgtagcctgctctagttctcccttaaggaggtcgttccacctcccccgcca

SEQ ID NO: 20352 - DNA, 57 bp, Artificial
  Synthetic oligonucleotide
taaaaccatgtgtaaagttaacccctctttgcgtcacgttaaattgcactgatatca

SEQ ID NO: 20353 - DNA, 52 bp, Artificial
  Synthetic oligonucleotide
caggggaccccctccaaaaaaccctagatgtccaaactgcgggcagtttgga

SEQ ID NO: 20354 - DNA, 56 bp, Artificial
  Synthetic oligonucleotide
cccatttcgaacctttccaagggcgaaccaacaattgtaatacatgctggtgcaaa

SEQ ID NO: 20355 - DNA, 58 bp, Artificial
  Synthetic oligonucleotide
atcaatgaggaggcatcggagtgggatagaactcacccaccaccgatagggccgttac

SEQ ID NO: 20356 - DNA, 56 bp, Artificial
  Synthetic oligonucleotide
cataactttagctgtaccggaaccacctgtagttataccggaatcctctataatca

SEQ ID NO: 20357 - DNA, 58 bp, Artificial
  Synthetic oligonucleotide
atccactgacctttggatggtgctacaagttagtgccagttgacccaagggaagtaga

SEQ ID NO: 20358 - DNA, 59 bp, Artificial
  Synthetic oligonucleotide
gaaccccaccttcccatgactcaggccctttctcgagccctctggactcacaatcagat

SEQ ID NO: 20359 - DNA, 59 bp, Artificial
  Synthetic oligonucleotide
ggaggtgtggtttgggcggagttggggagtggttaaccctcagatgctgcatataagca

SEQ ID NO: 20360 - DNA, 55 bp, Artificial
  Synthetic oligonucleotide
gggacgcgatatcttaagtaaaatgggtgtctatttatataatccttcacccacc

SEQ ID NO: 20361 - DNA, 57 bp, Artificial
  Synthetic oligonucleotide
ctcccgttcggcaatgttttccgcagttatacttggttcattacatggacgatatat

SEQ ID NO: 20362 - DNA, 57 bp, Artificial
  Synthetic oligonucleotide
ttacgggattcttatatccacgagcatgtgtcccttacccatttatgttaatacaag

SEQ ID NO: 20363 - DNA, 55 bp, Artificial
  Synthetic oligonucleotide
gtcggtctaactgtccttttgagtgcgcgcattttggtttcggtctgttccgggc

SEQ ID NO: 20364 - DNA, 57 bp, Artificial
  Synthetic oligonucleotide
ggtaacatgggaagaacgccccactatgtgcctggtcctaagcctagaagaagaata

SEQ ID NO: 20365 - DNA, 56 bp, Artificial
  Synthetic oligonucleotide
cgtcatgtcacaatgcccagatagacaggtgggttttttaggattcggaccctggg

SEQ ID NO: 20366 - DNA, 56 bp, Artificial
  Synthetic oligonucleotide
gggtgcagctaccctcgggctaggaccaggatggcaaattcccccttctacgtgtg

SEQ ID NO: 20367 - DNA, 57 bp, Artificial
  Synthetic oligonucleotide
tttattcctgttacaattaggggctaggtggcccatacaacaagttcacacagacaa

SEQ ID NO: 20368 - DNA, 54 bp, Artificial
  Synthetic oligonucleotide
cgaggggactataacatgtataggcgaaaagcggggtctcggttgtaacgcgct

SEQ ID NO: 20369 - DNA, 54 bp, Artificial
  Synthetic oligonucleotide
tgtataggcgaaaagcggggtctcggttgtaacgcgcttaggaagtcccctcga

SEQ ID NO: 20370 - DNA, 58 bp, Artificial
  Synthetic oligonucleotide
gaatagagttaggaagggatactcaccactatcattccagacccgcctcccagttcca

SEQ ID NO: 20371 - DNA, 56 bp, Artificial
  Synthetic oligonucleotide
agtacaatgtacccatggaattaagccagtggtgtcaacccaactactgttaaatg

SEQ ID NO: 20372 - DNA, 59 bp, Artificial
  Synthetic oligonucleotide
tttggaagagtgccgtctgcatggaattgaggcccctcacgtctgggcggacggagtat

SEQ ID NO: 20373 - DNA, 56 bp, Artificial
  Synthetic oligonucleotide
ccagaacaaacaaggccctcctcctgctaagtgtccgggagtccctggtcaagaca

SEQ ID NO: 20374 - DNA, 58 bp, Artificial
  Synthetic oligonucleotide
cttaggataccctcgactgtttgaaaggacacatgaattctttgagtcaagtctcatt

SEQ ID NO: 20375 - DNA, 56 bp, Artificial
  Synthetic oligonucleotide
gaagtggagtactagaggtgatggactcccgaaagatacccgaatttcagactcct

SEQ ID NO: 20376 - DNA, 56 bp, Artificial
  Synthetic oligonucleotide
ggagtactagaggtgatgggctcccaaaagatacccgaatttcagactccttggcc

SEQ ID NO: 20377 - DNA, 59 bp, Artificial
  Synthetic oligonucleotide
gctgccccctggaagaaggttgcccatatacgatcacgatatcaactaagctagaaggg

SEQ ID NO: 20378 - DNA, 51 bp, Artificial
  Synthetic oligonucleotide
aagtattaaaggagggttgtcgagttaggtttatgtgggaccagaagggaa

SEQ ID NO: 20379 - DNA, 56 bp, Artificial
  Synthetic oligonucleotide
aaacaaaataaggttcactcattgttcacaatcgccgagagagttaaagtttgcga

SEQ ID NO: 20380 - DNA, 57 bp, Artificial
  Synthetic oligonucleotide
catcggaaacaaaataaggttcactcattgttcacaatcgccgcgagagctaaagtt

SEQ ID NO: 20381 - DNA, 58 bp, Artificial
  Synthetic oligonucleotide
aactgaagctgtgtggggttcttggacttagacttatggatggaacatgggtcgcgat

SEQ ID NO: 20382 - DNA, 54 bp, Artificial
  Synthetic oligonucleotide
tccactctagttcacaaggaaccggaaactaacccagagaaacgcaccctcgaa

SEQ ID NO: 20383 - DNA, 55 bp, Artificial
  Synthetic oligonucleotide
aaccatactggaaaagagcgagatcccccaaaaccgtactcaagcagaaattcgc

SEQ ID NO: 20384 - DNA, 58 bp, Artificial
  Synthetic oligonucleotide
aatctttcctagtccacaagatggtggatgatcttgagttacagaggggaaccttgtc

SEQ ID NO: 20385 - DNA, 57 bp, Artificial
  Synthetic oligonucleotide
ctacgcaagatagtgaaaaactgtagggatgaggacacccagaagccctctcttgtt

SEQ ID NO: 20386 - DNA, 57 bp, Artificial
  Synthetic oligonucleotide
tagtggaggacgaaggatgcaccaacctgtcagggttctcctacatggaacttaaag

SEQ ID NO: 20387 - DNA, 59 bp, Artificial
  Synthetic oligonucleotide
gaactcaagcatgtatcgggaacatactctgttgacgggtcggctttgtactctaacaa

SEQ ID NO: 20388 - DNA, 56 bp, Artificial
  Synthetic oligonucleotide
acccgtttagctcatgatggatctaaactccctctaagatgtgtactggggtgggt

SEQ ID NO: 20389 - DNA, 59 bp, Artificial
  Synthetic oligonucleotide
tgtgtagttatgactttctcatatatgggaagacccccttatttcgaggcaacatattg

SEQ ID NO: 20390 - DNA, 55 bp, Artificial
  Synthetic oligonucleotide
ggagtatgtgggactaaccttatgaggttcctaatatctcgtttccctgaccctg

SEQ ID NO: 20391 - DNA, 56 bp, Artificial
  Synthetic oligonucleotide
cgtccacacataagttgagtccagggaagaccaatttgaccctgtcacctcggttg

SEQ ID NO: 20392 - DNA, 53 bp, Artificial
  Synthetic oligonucleotide
accccggttactagatggtatgggatgacagggttcttttcttggcctagttc

SEQ ID NO: 20393 - DNA, 59 bp, Artificial
  Synthetic oligonucleotide
gcactcaccctttaccgccgtctgcccttatgagaggaggtgacgacataacctctcga

SEQ ID NO: 20394 - DNA, 57 bp, Artificial
  Synthetic oligonucleotide
tccgacacaattacgatgggggctggcagaactacacctcccttgacacccggattg

SEQ ID NO: 20395 - DNA, 57 bp, Artificial
  Synthetic oligonucleotide
actggacgccaagatggccaacgtgggtcactggataaggacctggagccggcttaa

SEQ ID NO: 20396 - DNA, 56 bp, Artificial
  Synthetic oligonucleotide
taccgggggtggacaaactagctgaaagaggggggaagctgccactaagatgtatc

SEQ ID NO: 20397 - DNA, 58 bp, Artificial
  Synthetic oligonucleotide
gagttactggtcaagggttgcgggattattcgagagttacctatgccttccatctaga

SEQ ID NO: 20398 - DNA, 57 bp, Artificial
  Synthetic oligonucleotide
acatccgtttccactcaactatttcatgcgtgggagaaagttacaaacgtccatgtg

SEQ ID NO: 20399 - DNA, 58 bp, Artificial
  Synthetic oligonucleotide
agccgcctgtcaatccccgagagtttttgaaatctatagacctcggaggattgccaga

SEQ ID NO: 20400 - DNA, 53 bp, Artificial
  Synthetic oligonucleotide
agggggtcctaagctgtcttgaaagggtcgattacgataaggcattcgggcgg

SEQ ID NO: 20401 - DNA, 56 bp, Artificial
  Synthetic oligonucleotide
ggcgcaccttggtgtttcagtgggccgaatcccgtggtccgctagacggagaagag

SEQ ID NO: 20402 - DNA, 58 bp, Artificial
  Synthetic oligonucleotide
ccatcgtgatagttttctccaacagagtcttcaacatttctaagcccttggctgaccc

SEQ ID NO: 20403 - DNA, 57 bp, Artificial
  Synthetic oligonucleotide
gtgcccttggattcggaattgggtatcgaacggccctcaatgtattcgaccgaatca

SEQ ID NO: 20404 - DNA, 54 bp, Artificial
  Synthetic oligonucleotide
gcggacggggtcttctcggggttgaagggagggatcgaagggctctgtcaatac

SEQ ID NO: 20405 - DNA, 58 bp, Artificial
  Synthetic oligonucleotide
gggccccagaatcccttctacagagctcgctccaagacctattcgagaaactggacaa

SEQ ID NO: 20406 - DNA, 54 bp, Artificial
  Synthetic oligonucleotide
cgtagtgtgggtcaagttaactggcgggaccgtgtacaaattagaccgagcctg

SEQ ID NO: 20407 - DNA, 58 bp, Artificial
  Synthetic oligonucleotide
gggagcatgtctaccccctgtttattccagatacggtacactagacactaaggctcaa

SEQ ID NO: 20408 - DNA, 56 bp, Artificial
  Synthetic oligonucleotide
aacggcccgacttgctggaatggtcaagatggtgggctggaggggttaaggcagaa

SEQ ID NO: 20409 - DNA, 58 bp, Artificial
  Synthetic oligonucleotide
cactcagaccaccccctagtgattgagactcccgtaggcccttggttgccagcctcta

SEQ ID NO: 20410 - DNA, 58 bp, Artificial
  Synthetic oligonucleotide
ggtgtgatctcccaagagtgtccaccctcccctcactagaccagaaggacgcaacctg

SEQ ID NO: 20411 - DNA, 55 bp, Artificial
  Synthetic oligonucleotide
tcatcttatggcaacaagtttcgaacgacggaacaaaccaaacgttacgtgtcac

SEQ ID NO: 20412 - DNA, 59 bp, Artificial
  Synthetic oligonucleotide
gaatcccgacatgaggtaataccacaggaggatagtgtcatcgtctccttagatcggtt

SEQ ID NO: 20413 - DNA, 55 bp, Artificial
  Synthetic oligonucleotide
gacgggggaggattggagtggctcacaggttaggggtcgaaagaccggttctgca

SEQ ID NO: 20414 - DNA, 58 bp, Artificial
  Synthetic oligonucleotide
acagagtctcctttcacctacttcgagctcaagagtggttacctagcccatcagaagg

SEQ ID NO: 20415 - DNA, 59 bp, Artificial
  Synthetic oligonucleotide
aaagctgtcaagttggttgtctgaacacagaggaggacctgtaccaagtgagaaagtga

SEQ ID NO: 20416 - DNA, 54 bp, Artificial
  Synthetic oligonucleotide
actccggacctcaaccctgttcctaagatctctcgtaaaatcgggtcttcagaa

SEQ ID NO: 20417 - DNA, 59 bp, Artificial
  Synthetic oligonucleotide
caaaacatccgaatcgctacattcttgaccaactctaaatcacttgtagaccatccaaa

SEQ ID NO: 20418 - DNA, 58 bp, Artificial
  Synthetic oligonucleotide
agcagagcaccaactgggcacccacgtcccgttgagctttcctcctgaggactgttct

SEQ ID NO: 20419 - DNA, 59 bp, Artificial
  Synthetic oligonucleotide
ggatctcgggttatcagactggaagagatatctactaattggatctttggccgtaggag

SEQ ID NO: 20420 - DNA, 59 bp, Artificial
  Synthetic oligonucleotide
gggagataggagtctagaaagcttcaccaggttaatcgaggatcctaccactctgaaca

SEQ ID NO: 20421 - DNA, 57 bp, Artificial
  Synthetic oligonucleotide
ttataaggcattgaggaacctgtctagggcattcccagaggtaacagggtatataac

SEQ ID NO: 20422 - DNA, 58 bp, Artificial
  Synthetic oligonucleotide
acaacccgcaaacactggcaaggtggcaatgtctcaccataatccgggcgtggttata

SEQ ID NO: 20423 - DNA, 56 bp, Artificial
  Synthetic oligonucleotide
ttgcggaaaagcgaaacaggggaagccagacgcagacatcgcgtttatagaagggg

SEQ ID NO: 20424 - DNA, 56 bp, Artificial
  Synthetic oligonucleotide
cgggagagtatgtaccggtgatctcaaacaaccaactgacggcacaaagtccttgg

SEQ ID NO: 20425 - DNA, 52 bp, Artificial
  Synthetic oligonucleotide
cccagttttcaaaagaacagggtcggccttacataggttcaagtccgccagg

SEQ ID NO: 20426 - DNA, 59 bp, Artificial
  Synthetic oligonucleotide
gacaacagggacatgtgcggtcaagtaccaagctccccacttccgaatatgtacacgac

SEQ ID NO: 20427 - DNA, 57 bp, Artificial
  Synthetic oligonucleotide
cctacgttgatctcccaggcgattggttacccactgtttgttccgatcagacttcaa

SEQ ID NO: 20428 - DNA, 59 bp, Artificial
  Synthetic oligonucleotide
gatagtcaatggacctctattcaatgggaatcggatggacaatgggactcttagggtcg

SEQ ID NO: 20429 - DNA, 55 bp, Artificial
  Synthetic oligonucleotide
tagttttagacgactgagtcatttcagaaagcttgtcccgggttttggaaaggca

SEQ ID NO: 20430 - DNA, 58 bp, Artificial
  Synthetic oligonucleotide
gtacacacaaccgggacagagtactcatgttgcaaggttatattggacagaaacaccg

SEQ ID NO: 20431 - DNA, 56 bp, Artificial
  Synthetic oligonucleotide
cccaaccaccatgaaggaaggtaacagatcagttttatgttatcttcaacaggtac

SEQ ID NO: 20432 - DNA, 54 bp, Artificial
  Synthetic oligonucleotide
cgccgggagtaacccctcagtccacacccttgtccacctgatcggttccttgct

SEQ ID NO: 20433 - DNA, 58 bp, Artificial
  Synthetic oligonucleotide
gtccctaacacggactggaccaatccggttggagctcgagactgtcccacataagata

SEQ ID NO: 20434 - DNA, 59 bp, Artificial
  Synthetic oligonucleotide
tcaagacccgataatccctatttgtacgtagaacaagagaagatagccctggtgcacaa

SEQ ID NO: 20435 - DNA, 58 bp, Artificial
  Synthetic oligonucleotide
aacattccggtggggaacgattgtatcacggttcaaagactgtgctgcactcgccacc

SEQ ID NO: 20436 - DNA, 58 bp, Artificial
  Synthetic oligonucleotide
ttgatcaggaacatcacctccttgacgggtccacagttccccctcgaggagactcctg

SEQ ID NO: 20437 - DNA, 57 bp, Artificial
  Synthetic oligonucleotide
gggagattctacgggatgcagtcagcggaagtcaccaatttttcggcaccgcttaac

SEQ ID NO: 20438 - DNA, 59 bp, Artificial
  Synthetic oligonucleotide
attggtccgataataccagagtaggcaatatctttactatggatacagatgtttggtcc

SEQ ID NO: 20439 - DNA, 53 bp, Artificial
  Synthetic oligonucleotide
gtgggctaagattatgtatctaccctccgttatggggggacccggggtagcca

SEQ ID NO: 20440 - DNA, 56 bp, Artificial
  Synthetic oligonucleotide
tatactccgcaattcgggtaggcacggtagtaacggcttatgaagactgttccgga

SEQ ID NO: 20441 - DNA, 57 bp, Artificial
  Synthetic oligonucleotide
attgcaggtgaccccagatatgaggagtccttacacaacccttacccggattatcac

SEQ ID NO: 20442 - DNA, 56 bp, Artificial
  Synthetic oligonucleotide
gggtttgacaagtactctaagtggtatctagaccccaaattattagctccagacca

SEQ ID NO: 20443 - DNA, 55 bp, Artificial
  Synthetic oligonucleotide
cagacgacaattcagacgaagcctttctaggtctttagaagagtctttttacaac

SEQ ID NO: 20444 - DNA, 58 bp, Artificial
  Synthetic oligonucleotide
gggttgccagatgtgttcgatttcacattgtacacgagaaacttcgggcccttgagta

SEQ ID NO: 20445 - DNA, 59 bp, Artificial
  Synthetic oligonucleotide
ggctctaacagggggcatggagttaacaagggaccctactgtttcagagcacgcatctc

SEQ ID NO: 20446 - DNA, 59 bp, Artificial
  Synthetic oligonucleotide
acggtttcctccacctactgctcaaccaaccatgactacaccatctggatgcccgagga

SEQ ID NO: 20447 - DNA, 59 bp, Artificial
  Synthetic oligonucleotide
cgtccctgaagatctccaactagacgccacaaaggcccttggacagctcctgagacgta

SEQ ID NO: 20448 - DNA, 58 bp, Artificial
  Synthetic oligonucleotide
tccaccatggacttctttgaaacgaccctccccaggatcctaaatgatctgagggcca

SEQ ID NO: 20449 - DNA, 55 bp, Artificial
  Synthetic oligonucleotide
ttgttagagccgtacatagtaaacaagttagtacaaagggcagagaagttccgtc

SEQ ID NO: 20450 - DNA, 58 bp, Artificial
  Synthetic oligonucleotide
gatacacaacccagcattgcgtggaccagtgtcctctatagaaggggtaaccggacaa

SEQ ID NO: 20451 - DNA, 58 bp, Artificial
  Synthetic oligonucleotide
gctagaagatgacaatccccgtatctctgtgtcagtccttccgtccttcgaccaaact

SEQ ID NO: 20452 - DNA, 58 bp, Artificial
  Synthetic oligonucleotide
aggtattctgatgaacttgtagccaacctatgtcgcctttatattgcgggggataaga

SEQ ID NO: 20453 - DNA, 55 bp, Artificial
  Synthetic oligonucleotide
acagggggggtcctgttcctagcgaaaaggtcatcattacagccttgtcacgacc

SEQ ID NO: 20454 - DNA, 57 bp, Artificial
  Synthetic oligonucleotide
gatcgactctcaattccccaacgggaaatgtgaaaccgaagagtgcgagaccgtcca

SEQ ID NO: 20455 - DNA, 59 bp, Artificial
  Synthetic oligonucleotide
tcaacgcaaggaatccaatgggcctgtatttcgtgtgatgggacagttcctaggatacc

SEQ ID NO: 20456 - DNA, 56 bp, Artificial
  Synthetic oligonucleotide
agcacacggggaacgagggatgggatagagttcactgtaagagaaacgccttgcgt

SEQ ID NO: 20457 - DNA, 56 bp, Artificial
  Synthetic oligonucleotide
aaagttgcgatgttgtacttggacccttcaataggaggagtgtgtggtacagccct

SEQ ID NO: 20458 - DNA, 58 bp, Artificial
  Synthetic oligonucleotide
gggtctccatccaaaatcacgaagaggccaagtggtgccctcccgatcaactggtgaa

SEQ ID NO: 20459 - DNA, 59 bp, Artificial
  Synthetic oligonucleotide
ggaatgcgaccaacacatcgaggaaacaacagggaccatgtatggaaatgctcggaggg

SEQ ID NO: 20460 - DNA, 55 bp, Artificial
  Synthetic oligonucleotide
caatgtaaggggcgccctagtgggaggagacgggtcaggggggctgactgcctta

SEQ ID NO: 20461 - DNA, 58 bp, Artificial
  Synthetic oligonucleotide
cttagttggggcttgtcaaggtctgcagaagtccaccacagggttgatctacaagtgg

SEQ ID NO: 20462 - DNA, 58 bp, Artificial
  Synthetic oligonucleotide
gttcccatatcacagaagcaacccgctagattggactccccgggctattgaattccag

SEQ ID NO: 20463 - DNA, 57 bp, Artificial
  Synthetic oligonucleotide
ttattctccaagggcacatcaaagtctcggagacaaaaaagactgggatctacaaag

SEQ ID NO: 20464 - DNA, 57 bp, Artificial
  Synthetic oligonucleotide
actgttgcaccgaagaatgtctaccggcacttacaagaccaggtggccgacaaattg

SEQ ID NO: 20465 - DNA, 56 bp, Artificial
  Synthetic oligonucleotide
acaaggggtgccgactcgattgagacctactttagattccgaaatccaggtcctga

SEQ ID NO: 20466 - DNA, 58 bp, Artificial
  Synthetic oligonucleotide
ttggagcacaatccccaacttcagatttttggcagggacttacgacatgttttttgca

SEQ ID NO: 20467 - DNA, 55 bp, Artificial
  Synthetic oligonucleotide
ttacccgcttggcccatgaagggtctaaactccctctaagatgtgtacttgggtg

SEQ ID NO: 20468 - DNA, 57 bp, Artificial
  Synthetic oligonucleotide
tacttgcggcgtaacaggagggggaaatcctcgaatatcagtgtctgtactcccgtc

SEQ ID NO: 20469 - DNA, 55 bp, Artificial
  Synthetic oligonucleotide
ggtccctcattcgacatgccacctccccctcctaagaggaaacacccggattcac

SEQ ID NO: 20470 - DNA, 58 bp, Artificial
  Synthetic oligonucleotide
tgtctactcttcacaggtccaacgctagggacgaggtcagggagacggcaagtcgtag

SEQ ID NO: 20471 - DNA, 57 bp, Artificial
  Synthetic oligonucleotide
tcactatctgttccgagaccttcccaggggtacacttctgtcccgagggataagcca

SEQ ID NO: 20472 - DNA, 59 bp, Artificial
  Synthetic oligonucleotide
tatttggtctccacaccgatagggccgtggctagccgtctctacggagtcccatcgcac

SEQ ID NO: 20473 - DNA, 54 bp, Artificial
  Synthetic oligonucleotide
ggtgaaggtaaaagtaactttatcgtgggacccggccaatgacaggcctagcaa

SEQ ID NO: 20474 - DNA, 58 bp, Artificial
  Synthetic oligonucleotide
aaccccctggttcacctattccagagtgccatgatctttggagaaaccagtgagaaga

SEQ ID NO: 20475 - DNA, 59 bp, Artificial
  Synthetic oligonucleotide
agatctggttgtgttcttcaactcaggccgattatttaagacgccaatcatggggacag

SEQ ID NO: 20476 - DNA, 57 bp, Artificial
  Synthetic oligonucleotide
atatgtggccgtcaacttcccagttccgccggggaaatctctagcagataagtctac

SEQ ID NO: 20477 - DNA, 59 bp, Artificial
  Synthetic oligonucleotide
ggcaacacctctattccggaagaactccacaaaatgatcgaccctctggaggtctatga

SEQ ID NO: 20478 - DNA, 56 bp, Artificial
  Synthetic oligonucleotide
cttaagcgggtagggcaggccaaggtaaagggctatctctgtatgaagaacaggtg

SEQ ID NO: 20479 - DNA, 59 bp, Artificial
  Synthetic oligonucleotide
aatacttatatctccccctgaatctagatactctgatgacttggttggaaacttgtgtc

SEQ ID NO: 20480 - DNA, 57 bp, Artificial
  Synthetic oligonucleotide
atccaggtttttaattcgtgcatttcctgatcctgttactgagggtctcagcttttg

SEQ ID NO: 20481 - DNA, 57 bp, Artificial
  Synthetic oligonucleotide
caatatgagtacaagtacccggcaatcaaagactcgaggaagcccagtataacctta

SEQ ID NO: 20482 - DNA, 58 bp, Artificial
  Synthetic oligonucleotide
ggtccttatcccgtcagtatcaaaatccacttatgtctgggctacgagtggttcagtg

SEQ ID NO: 20483 - DNA, 58 bp, Artificial
  Synthetic oligonucleotide
ggggactaaggtgaaccccttgcattgcttatctctcgatacaaaggacatccagtta

SEQ ID NO: 20484 - DNA, 54 bp, Artificial
  Synthetic oligonucleotide
accccttttattggaccctcccaggaggactcactccctcagaagtcagtgaaa

SEQ ID NO: 20485 - DNA, 58 bp, Artificial
  Synthetic oligonucleotide
cgaattggagggagttgtggattcctttttcgatcagtacaatgggagctacattctc

SEQ ID NO: 20486 - DNA, 59 bp, Artificial
  Synthetic oligonucleotide
gaccaccccctgactccttatatcaaaactcagacatggccacccaaacatgtagtaga

SEQ ID NO: 20487 - DNA, 57 bp, Artificial
  Synthetic oligonucleotide
tcattgcgaagtcaaattccgtgatgggtccgtctttcctagaataagggaaggata

SEQ ID NO: 20488 - DNA, 55 bp, Artificial
  Synthetic oligonucleotide
aagaaggactaggactaggtcccggaggtgcaactgggtcacaccggagtcgcaa

SEQ ID NO: 20489 - DNA, 59 bp, Artificial
  Synthetic oligonucleotide
cctaccgtggctgcctgtcgcgatgcttacaactggaaggtgtctggagacccgaggta

SEQ ID NO: 20490 - DNA, 58 bp, Artificial
  Synthetic oligonucleotide
tcattgggggttttggctgttgatcggggcgacggcagtcgcatttgtggtcttggtg

SEQ ID NO: 20491 - DNA, 56 bp, Artificial
  Synthetic oligonucleotide
tctgaactagtacaaagggacaccaggctaaaggattctacttttcactggcacct

SEQ ID NO: 20492 - DNA, 58 bp, Artificial
  Synthetic oligonucleotide
caccaggattatgatgaacggagggaggttaaaaaggtctcacataaagagatatgtc

SEQ ID NO: 20493 - DNA, 57 bp, Artificial
  Synthetic oligonucleotide
ggacacacgagttcttccaaaaatcgtgggtttactactcagatagatctgacttaa

SEQ ID NO: 20494 - DNA, 58 bp, Artificial
  Synthetic oligonucleotide
gttatccttactggactatgacaaaagtcaactcaggggacatcaagacactaggaaa

SEQ ID NO: 20495 - DNA, 59 bp, Artificial
  Synthetic oligonucleotide
gtctctggagctgtgccccactttcagaaacttcctgatatccgcctaaagcccggtga

SEQ ID NO: 20496 - DNA, 59 bp, Artificial
  Synthetic oligonucleotide
gacctaattcaagtgtctccgggaatttatgtaaccttatctggcacatcaacagtaga

SEQ ID NO: 20497 - DNA, 56 bp, Artificial
  Synthetic oligonucleotide
ggagtactcctgcgaatttcacactgcaaggaaaatcccccaactggtatttgtcc

SEQ ID NO: 20498 - DNA, 56 bp, Artificial
  Synthetic oligonucleotide
ttgacgggtgttgtgtatggtgggactcgtagcacgacgctcccttttaccaggcc

SEQ ID NO: 20499 - DNA, 56 bp, Artificial
  Synthetic oligonucleotide
atgagaaccaggtgcggttttacaatgtcaaaaccaaggactctctgacgggcgaa

SEQ ID NO: 20500 - DNA, 59 bp, Artificial
  Synthetic oligonucleotide
ttatctcgagacttcttgatgaacacgaccctggcagccaacacccatcttaagtccct

SEQ ID NO: 20501 - DNA, 56 bp, Artificial
  Synthetic oligonucleotide
catccttggggggagtgtctgggatgtccctggggaggttccatatacgtcagttc

SEQ ID NO: 20502 - DNA, 52 bp, Artificial
  Synthetic oligonucleotide
aacccccagccactgctttgaagacacattcgcccccgttaaaccggagaaa

SEQ ID NO: 20503 - DNA, 58 bp, Artificial
  Synthetic oligonucleotide
gacaatccagaaggattaccaaagtactcagggaaagacacaacggatacaggctcca

SEQ ID NO: 20504 - DNA, 58 bp, Artificial
  Synthetic oligonucleotide
gattgacgcaccacacacctggggagatggagtgttctccgggctaatgggggggatc

SEQ ID NO: 20505 - DNA, 56 bp, Artificial
  Synthetic oligonucleotide
aacactttttagtgaacgagagcgaatctcagaagacggggacctgatcatacccc

SEQ ID NO: 20506 - DNA, 52 bp, Artificial
  Synthetic oligonucleotide
aatcgagggctccaaaccccggccgagggagtcctatctagcctaaacaaag

SEQ ID NO: 20507 - DNA, 56 bp, Artificial
  Synthetic oligonucleotide
ggccccccgtcaatcctagagagttcctcaggtctatagatgtgggggggctgccc

SEQ ID NO: 20508 - DNA, 59 bp, Artificial
  Synthetic oligonucleotide
cgtcaatccaagagagttcctcaggtctatagatgtgggggggctgcccgacgatgacc

SEQ ID NO: 20509 - DNA, 56 bp, Artificial
  Synthetic oligonucleotide
ggaaggtgatcccttcttgggaatcctacaaaattgaagccggaggtcatttcaga

SEQ ID NO: 20510 - DNA, 57 bp, Artificial
  Synthetic oligonucleotide
ggacttgggagatagaagcttagagagtttcactcgcttgttggaagacccgactac

SEQ ID NO: 20511 - DNA, 59 bp, Artificial
  Synthetic oligonucleotide
ttggagaaaccagtgagaagattgacttcgggactcgcagtaagaccctgataacaagc

SEQ ID NO: 20512 - DNA, 55 bp, Artificial
  Synthetic oligonucleotide
tttcaccccccttccgaaagctggcaaccgagattgctcgccttctggtcaaaaa

SEQ ID NO: 20513 - DNA, 56 bp, Artificial
  Synthetic oligonucleotide
aatctactcgtgcggcccacttcgccttgaatttgtggaaggcacggtactgtact

SEQ ID NO: 20514 - DNA, 59 bp, Artificial
  Synthetic oligonucleotide
acatgaggttcgtacaggtaacgccaccacggtcgaagatctcaacaagcacccataca

SEQ ID NO: 20515 - DNA, 59 bp, Artificial
  Synthetic oligonucleotide
cacctcccagggcagaacattcgatcgtggtatcgtcgtcagctatcgtaacaccgcct

SEQ ID NO: 20516 - DNA, 55 bp, Artificial
  Synthetic oligonucleotide
cccaacgaccccattctgcctaaacgttccactcaaaagaccatcgttcctgatc

SEQ ID NO: 20517 - DNA, 58 bp, Artificial
  Synthetic oligonucleotide
aggaccactttcttcaatgaaagtgcacgacgcccgctctattggaccagccccgcca

SEQ ID NO: 20518 - DNA, 56 bp, Artificial
  Synthetic oligonucleotide
gacagaaacggagcattacggacgatttcaccttgacaagcccgtacttaggccac

SEQ ID NO: 20519 - DNA, 59 bp, Artificial
  Synthetic oligonucleotide
gccctggtccaaacaggtacggtctatgtatgcgcactgccaaggaactagcgcgacgt

SEQ ID NO: 20520 - DNA, 59 bp, Artificial
  Synthetic oligonucleotide
ggatagattcgtgatggacctcaagcgtgacgtcaaagtgaccccagggaccaaacaca

SEQ ID NO: 20521 - DNA, 56 bp, Artificial
  Synthetic oligonucleotide
aacgacgttacgttggcagacagcggttcatttacattccatttctccacggccag

SEQ ID NO: 20522 - DNA, 56 bp, Artificial
  Synthetic oligonucleotide
ccagcctacgccccgtcccagctcctagaagatacgtgccaagaccggtggtcgag

SEQ ID NO: 20523 - DNA, 58 bp, Artificial
  Synthetic oligonucleotide
ccccagagggctcatcaaggtcaccagttacgcaggagaagacaaaatcggctcttac

SEQ ID NO: 20524 - DNA, 58 bp, Artificial
  Synthetic oligonucleotide
cagtgggatcttctctcgtcctgagatacctctaacgttccatcccgcggacgtcggc

SEQ ID NO: 20525 - DNA, 58 bp, Artificial
  Synthetic oligonucleotide
ctcctaacaaagcggacgcctacgaacatacgatcactgtcccaaatgcgccgttgaa

SEQ ID NO: 20526 - DNA, 55 bp, Artificial
  Synthetic oligonucleotide
tcttccccaaacggagaaccctgtggatccacctgaacttccggagccttcagcc

SEQ ID NO: 20527 - DNA, 57 bp, Artificial
  Synthetic oligonucleotide
accagcaccctttcgcaatccttatgctgcgcctagaagaccgtggttcccgaggac

SEQ ID NO: 20528 - DNA, 57 bp, Artificial
  Synthetic oligonucleotide
tttacgcagtggacggaccaaccagcctttaccatcaagcaaataagggtgtgcgag

SEQ ID NO: 20529 - DNA, 53 bp, Artificial
  Synthetic oligonucleotide
caccgggactttgcgtagctacgacccgagtgtcaacctcgtgccggttaacc

SEQ ID NO: 20530 - DNA, 56 bp, Artificial
  Synthetic oligonucleotide
cctatgcaaccaatgcctcttcgcaacccctacgcgccacctagaagaccgtggtt

SEQ ID NO: 20531 - DNA, 58 bp, Artificial
  Synthetic oligonucleotide
cggacctgccggatagcctaccaccatgaacagaggttaatagggcgagaaagattca

SEQ ID NO: 20532 - DNA, 57 bp, Artificial
  Synthetic oligonucleotide
acgcaacagtgatcccgaacacggtgggagtaccgtataagactcttgttagcagac

SEQ ID NO: 20533 - DNA, 59 bp, Artificial
  Synthetic oligonucleotide
aggtcacgacgtacccaggagaagaaatgatcggctcgtacgcagtgctttcaccacaa

SEQ ID NO: 20534 - DNA, 51 bp, Artificial
  Synthetic oligonucleotide
ccaggggacacggttacagttgggtttcacgacgggcctaaccgccatacg

SEQ ID NO: 20535 - DNA, 58 bp, Artificial
  Synthetic oligonucleotide
gccatgacaccagagagagtgtaccgacttaaatgcacgaacactacccaatttacgg

SEQ ID NO: 20536 - DNA, 57 bp, Artificial
  Synthetic oligonucleotide
agtcgctcgaaccaaatgccttacaccctatcaattagcaccaggcgcccaattacc

SEQ ID NO: 20537 - DNA, 55 bp, Artificial
  Synthetic oligonucleotide
aaaccggaggggtactacaactggcaccacggagcagtacagtactcaggaggcc

SEQ ID NO: 20538 - DNA, 55 bp, Artificial
  Synthetic oligonucleotide
agcggccaccaaacggaactgtaacgtcactcaaatgagagaactccccgtgttg

SEQ ID NO: 20539 - DNA, 56 bp, Artificial
  Synthetic oligonucleotide
gcccctgtaggttgatcaactattcagggtacttcctcttagtgcactgtcccccg

SEQ ID NO: 20540 - DNA, 59 bp, Artificial
  Synthetic oligonucleotide
accattgccggtcgatgatacacaagactgtgaccgccgccgggcattgtacgacgagg

SEQ ID NO: 20541 - DNA, 57 bp, Artificial
  Synthetic oligonucleotide
acatcccgttccgtttgacaccatcagtttgcccggtcccactggctcacacaccta

SEQ ID NO: 20542 - DNA, 52 bp, Artificial
  Synthetic oligonucleotide
accgtttgggatccccccgaaggttctgaaccgtggtcactagttacagcgc

SEQ ID NO: 20543 - DNA, 52 bp, Artificial
  Synthetic oligonucleotide
aggtactacgaagccgaagcccggggacctcgttttgacgtgcttccgcgga

SEQ ID NO: 20544 - DNA, 52 bp, Artificial
  Synthetic oligonucleotide
gtagtcctgtttaacccgcacactcctacttttgtcccggcccgtaaatatg

SEQ ID NO: 20545 - DNA, 54 bp, Artificial
  Synthetic oligonucleotide
ccgaaacctttgtattccagcagtgtaccagcaagttactccgacccgaagttc

SEQ ID NO: 20546 - DNA, 56 bp, Artificial
  Synthetic oligonucleotide
ggtctggctacgccccgcttaacttagagatcaccgtcgtgtcgtcgcaggtttta

SEQ ID NO: 20547 - DNA, 57 bp, Artificial
  Synthetic oligonucleotide
cgagtgaccagataatgttctcggtaggttccacattgtatacggaaagccgacgtc

SEQ ID NO: 20548 - DNA, 55 bp, Artificial
  Synthetic oligonucleotide
cgcggaccgcacgtacgacttggacctagggttacctatggatgcaggccgttac

SEQ ID NO: 20549 - DNA, 52 bp, Artificial
  Synthetic oligonucleotide
agggtaccggttgaattaccgtgggagccggaagacctagacatccaattcg

SEQ ID NO: 20550 - DNA, 58 bp, Artificial
  Synthetic oligonucleotide
catgagttcgcgtacgaaagcctgaagactagacctgccgcaccccaccaagtaccta

SEQ ID NO: 20551 - DNA, 56 bp, Artificial
  Synthetic oligonucleotide
atcgtaggacacgcacccacaacccgtataaactctcctctacgctaacaaacatc

SEQ ID NO: 20552 - DNA, 56 bp, Artificial
  Synthetic oligonucleotide
tccgagaccgtcagtaccgtaaaaaagttcaaccagtgcacgcagaccaacaggtg

SEQ ID NO: 20553 - DNA, 55 bp, Artificial
  Synthetic oligonucleotide
cacagcgaggtatttcaagtccgtctcggtcgaaaaacccgtctcctcccgcata

SEQ ID NO: 20554 - DNA, 58 bp, Artificial
  Synthetic oligonucleotide
accgtgttaacggctcgtaacataggcctgtgcagctccgacgttatggagcggtcac

SEQ ID NO: 20555 - DNA, 59 bp, Artificial
  Synthetic oligonucleotide
ataactctctacggctaacctgaatggactacgacatagtctagtccgccaagatgttc

SEQ ID NO: 20556 - DNA, 59 bp, Artificial
  Synthetic oligonucleotide
gctataagtccaggcctgtacgggaaaccttcgggctacgccgcaacgatgcatcgcga

SEQ ID NO: 20557 - DNA, 58 bp, Artificial
  Synthetic oligonucleotide
gagggacgggtcgagtgctatcggaccttgcatccggtgccgttgtactccgcgtgtg

SEQ ID NO: 20558 - DNA, 58 bp, Artificial
  Synthetic oligonucleotide
cctagttaagcatacgcccaacattatccatgcagtcgggccgaatttctcccgcgta

SEQ ID NO: 20559 - DNA, 54 bp, Artificial
  Synthetic oligonucleotide
attactgtaagtgccccgacgtaaaggagggaacaaccggcagcgactacacga

SEQ ID NO: 20560 - DNA, 56 bp, Artificial
  Synthetic oligonucleotide
cacaaccaggagtagtccatacgccttatacccaggcgccatccgggttcgaacgc

SEQ ID NO: 20561 - DNA, 53 bp, Artificial
  Synthetic oligonucleotide
agaacaacggcacccgttctacaggggacggtgggcttctgggcaggtgttgg

SEQ ID NO: 20562 - DNA, 58 bp, Artificial
  Synthetic oligonucleotide
ctgagaggggcccctataactctctacggctaacctgaatggactacgacatagtcta

SEQ ID NO: 20563 - DNA, 55 bp, Artificial
  Synthetic oligonucleotide
cccgtctatcaaatggcagggaaaggtacgcagctcgacttacaaacgggaagaa

SEQ ID NO: 20564 - DNA, 55 bp, Artificial
  Synthetic oligonucleotide
tgcacaaaagtggtgctttttaacccacaaacccctacattcgttcctgcccgca

SEQ ID NO: 20565 - DNA, 59 bp, Artificial
  Synthetic oligonucleotide
ttcccttgagtgccaacccgcttcgcatgccgactacaactgcaaagtatttggcggcg

SEQ ID NO: 20566 - DNA, 53 bp, Artificial
  Synthetic oligonucleotide
cccggttgaccgctacgacggacgggtgttggtcccgacgggcgcagcgatcc

SEQ ID NO: 20567 - DNA, 53 bp, Artificial
  Synthetic oligonucleotide
gaactgaaaaccggctggtgtggaaaacactgtcgggagacccgtggataaag

SEQ ID NO: 20568 - DNA, 57 bp, Artificial
  Synthetic oligonucleotide
gcgggggcgtacatcttctcgtctgataccggaccggggcacttacaacagaagtca

SEQ ID NO: 20569 - DNA, 57 bp, Artificial
  Synthetic oligonucleotide
cccctccaatgctcacgccgccctgtgccgtacaggcgtaccccctcgggtgagcac

SEQ ID NO: 20570 - DNA, 54 bp, Artificial
  Synthetic oligonucleotide
ggcctttaatcttactactctaaccaggtcatcacccaccgttgttttgccgct

SEQ ID NO: 20571 - DNA, 59 bp, Artificial
  Synthetic oligonucleotide
tacagcactacagaaggttcactgtactcctacttggaagggacacggttccatcagac

SEQ ID NO: 20572 - DNA, 57 bp, Artificial
  Synthetic oligonucleotide
ggtgcacatgaagtctgatgcctcgaagtttacccacgagaaacccgaggggtacta

SEQ ID NO: 20573 - DNA, 59 bp, Artificial
  Synthetic oligonucleotide
gtttgcctacgaggcgctgcgtaaaaggccggctcacacacacgacgtccacacgattg

SEQ ID NO: 20574 - DNA, 58 bp, Artificial
  Synthetic oligonucleotide
attaaaccattatagtgtgctcaagcccgcggaggtcaggcccccgcggggcatgtgc

SEQ ID NO: 20575 - DNA, 59 bp, Artificial
  Synthetic oligonucleotide
aggttctgaaccgtggtcactggttacagcgctgtgcgtgctttcgaatgtcacgttcc

SEQ ID NO: 20576 - DNA, 53 bp, Artificial
  Synthetic oligonucleotide
gtccgcgcgtacaatcaacccgccggcgacgtcaggggtatctggggtaaggg

SEQ ID NO: 20577 - DNA, 58 bp, Artificial
  Synthetic oligonucleotide
tgtcggtgtgagactatagttagttgcgacgggtacgtcgtcaaaaggatagctatta

SEQ ID NO: 20578 - DNA, 58 bp, Artificial
  Synthetic oligonucleotide
gtgccgtcccgtcaccctttcagaacacactacagaacgtgctagcggccgccaccaa

SEQ ID NO: 20579 - DNA, 59 bp, Artificial
  Synthetic oligonucleotide
acgtctatgctgtacacgcacccacgtcgctataccaccaggcgattaaaggagtccga

SEQ ID NO: 20580 - DNA, 53 bp, Artificial
  Synthetic oligonucleotide
ccgacccgggaaggaggtaaggatctccgtaaagtgtgcccgacagagcacct

SEQ ID NO: 20581 - DNA, 59 bp, Artificial
  Synthetic oligonucleotide
ctgccacgcgcgttagcgccaccccgcaatgtgcgtgtgaccgggtgttaccagtgcgg

SEQ ID NO: 20582 - DNA, 56 bp, Artificial
  Synthetic oligonucleotide
ttacacttgtcggtgtgagactatagttagttgcgacgggtacgtcgtcaaaagga

SEQ ID NO: 20583 - DNA, 58 bp, Artificial
  Synthetic oligonucleotide
cagcccaggactatacggtaaagttgagaacttggcgtccacaatgcatcgcgagggt

SEQ ID NO: 20584 - DNA, 58 bp, Artificial
  Synthetic oligonucleotide
cccacaagaccgtcagggtcaagttccatacagaaaccaggaccgtctggcagctctc

SEQ ID NO: 20585 - DNA, 57 bp, Artificial
  Synthetic oligonucleotide
ggctgatgagggaacacgaactgccctttcggtcgtcacctggaatagcaaagggaa

SEQ ID NO: 20586 - DNA, 55 bp, Artificial
  Synthetic oligonucleotide
actaaaccactacagtgtgcttaagcccgcggaagtcaggcccccgcgaggtatg

SEQ ID NO: 20587 - DNA, 51 bp, Artificial
  Synthetic oligonucleotide
aaactgtcacggccccgactgggcctccccggtttgccaacgccactcccc

SEQ ID NO: 20588 - DNA, 57 bp, Artificial
  Synthetic oligonucleotide
ggtgtgagactatagttagttgcgacgggtacgtcgttaaaagaatagctatcagtc

SEQ ID NO: 20589 - DNA, 59 bp, Artificial
  Synthetic oligonucleotide
caaatatggagaaagttcacgttgacatcgaggaggatagccccttcctcagagcttta

SEQ ID NO: 20590 - DNA, 56 bp, Artificial
  Synthetic oligonucleotide
catctggtgggtacccaacttgccattcgggagagccccagggtgcccgaatggct

SEQ ID NO: 20591 - DNA, 57 bp, Artificial
  Synthetic oligonucleotide
ccacactgtgagcgcgtacgaacacgtaacagtgatcccgaacacggtgggagtacc

SEQ ID NO: 20592 - DNA, 59 bp, Artificial
  Synthetic oligonucleotide
accagcgaattgtcgtcaatggtaggacgcaacgtaacactaataccatgcagaactac

SEQ ID NO: 20593 - DNA, 60 bp, Artificial
  Synthetic oligonucleotide
ccctatacgataccaccaagttgtatctggtggacaacaagtcggcggacattgcctccc

SEQ ID NO: 20594 - DNA, 60 bp, Artificial
  Synthetic oligonucleotide
ccctgtacgataccaccaagttgtatctggtggacaacaagtcggcggacattgcctccc

SEQ ID NO: 20595 - DNA, 60 bp, Artificial
  Synthetic oligonucleotide
ctgtacgataccaccaagttgtatctggtggacaacaagtcggcggacattgcctccctg

SEQ ID NO: 20596 - DNA, 60 bp, Artificial
  Synthetic oligonucleotide
ccgcaccactgacagtaagcaacaaccagcttagtattaacgcgggcagaggtttagtta

SEQ ID NO: 20597 - DNA, 60 bp, Artificial
  Synthetic oligonucleotide
ctccaccggcccaccgagttcctgcgctgctactcaacagaaacctcttccttttggctg

SEQ ID NO: 20598 - DNA, 60 bp, Artificial
  Synthetic oligonucleotide
tcagatactagtgcgtccgcccgctccgaccattaccaccgtcagtgaaaacgttcccgc

SEQ ID NO: 20599 - DNA, 60 bp, Artificial
  Synthetic oligonucleotide
tcagcgcgtgaccatcactgacgcccgccgtcggacctgcccctacgtgcacaaagctct

SEQ ID NO: 20600 - DNA, 60 bp, Artificial
  Synthetic oligonucleotide
ttcagggcaacgttcagccactcctgcagtccacttaacagctcctcagcccgtggagat

SEQ ID NO: 20601 - DNA, 60 bp, Artificial
  Synthetic oligonucleotide
cgcaccgactacgaatccagcgatgaggattaagggtaaggggcggagcttattacaggt

SEQ ID NO: 20602 - DNA, 60 bp, Artificial
  Synthetic oligonucleotide
aaaggggcgcgctccgggttgggcgcttgccagggttctcttcaggctcatcctgctggt

SEQ ID NO: 20603 - DNA, 60 bp, Artificial
  Synthetic oligonucleotide
gaccattctgagacaaaagcccgggtccaggccagaacaaaggaggcaatttgggagggg

SEQ ID NO: 20604 - DNA, 60 bp, Artificial
  Synthetic oligonucleotide
gaaagtagaagtttctccggcggaccgtgcattcgtgctgatatttgtaaaagcgggcgc

SEQ ID NO: 20605 - DNA, 60 bp, Artificial
  Synthetic oligonucleotide
ccgttggggttaacccgccttttaccatcactgactctggattagctatggacttaggag

SEQ ID NO: 20606 - DNA, 60 bp, Artificial
  Synthetic oligonucleotide
aatcccgaagccttcaggcagcagccccaggccaaccgcttttcggccattttggaagcc

SEQ ID NO: 20607 - DNA, 60 bp, Artificial
  Synthetic oligonucleotide
ccatttggtctatctcgcctacgcctaactgctccatttatgaaacccaagatgcaaacc

SEQ ID NO: 20608 - DNA, 60 bp, Artificial
  Synthetic oligonucleotide
tagttgttaagcttgggaacggtcttcgctttgatagctggggaagcataactgtctcgc

SEQ ID NO: 20609 - DNA, 60 bp, Artificial
  Synthetic oligonucleotide
ctagcaaacagtgccacatggggttatcgacaaggacagtctgccaacactaacgtttcc

SEQ ID NO: 20610 - DNA, 60 bp, Artificial
  Synthetic oligonucleotide
agctgtggttaaatttaatggcaggcaaagcaacttctaccattatgttagcgaaaacgg

SEQ ID NO: 20611 - DNA, 60 bp, Artificial
  Synthetic oligonucleotide
cctgcttgtctgtctgccaattatctacgcctccaccaccttcgccgcagtctcccacct

SEQ ID NO: 20612 - DNA, 60 bp, Artificial
  Synthetic oligonucleotide
cgcctctgttgtagtctgccaacgtaaacgggcagtaccgctccatcaagccccgcagta

SEQ ID NO: 20613 - DNA, 60 bp, Artificial
  Synthetic oligonucleotide
catgtcccaccacattggccactcctgcaatactacaaaaggcgcacaagatggaataga

SEQ ID NO: 20614 - DNA, 60 bp, Artificial
  Synthetic oligonucleotide
cttcaccgggaactgggatgacatgttccaggggctgctggaggctgagcatccgtttga

SEQ ID NO: 20615 - DNA, 60 bp, Artificial
  Synthetic oligonucleotide
cgccccacttaatgctgacacgggcactcttcgccttcaaagtgctgcacctcttggact

SEQ ID NO: 20616 - DNA, 60 bp, Artificial
  Synthetic oligonucleotide
cggttgtaaagccagccaaagtgcaagtcacgaagatcacacctctccccaccgctgcgt

SEQ ID NO: 20617 - DNA, 60 bp, Artificial
  Synthetic oligonucleotide
ggtcagccgaaccgggaaaaccttttcacccacccaccgctgtattttgctacataactg

SEQ ID NO: 20618 - DNA, 60 bp, Artificial
  Synthetic oligonucleotide
tcaaccccgtctacccttacgaacactacaatccccttgacatcccatttattacacccc

SEQ ID NO: 20619 - DNA, 60 bp, Artificial
  Synthetic oligonucleotide
cccggtccatacttgtgcattggcacaggaagagggcctagctgctttaatcgctggact

SEQ ID NO: 20620 - DNA, 60 bp, Artificial
  Synthetic oligonucleotide
tccgtttacttcaaccccttctcgggcgctcctggtctttacccagacgacttcatcccg

SEQ ID NO: 20621 - DNA, 60 bp, Artificial
  Synthetic oligonucleotide
ctccacccaaatgacatgcgctccaacactatagccgcgtgcccatcatacagcaggcga

SEQ ID NO: 20622 - DNA, 60 bp, Artificial
  Synthetic oligonucleotide
gtcatcgaggccgtctacctccgtacgccgttctcggccggtaacgccaccacataagaa

SEQ ID NO: 20623 - DNA, 60 bp, Artificial
  Synthetic oligonucleotide
tttggagtgagctacaaagttatcagagcctccgacgcttgctggagttggcttctgcca

SEQ ID NO: 20624 - DNA, 60 bp, Artificial
  Synthetic oligonucleotide
ccgcctactcttacaaagtgcgctttacgctggccgtgggcgacaaccgggttttggaca

SEQ ID NO: 20625 - DNA, 60 bp, Artificial
  Synthetic oligonucleotide
gcagcggtgtttgcgtggattcctggggtagggtgtctgccagaggttgtacgtttgtgg

SEQ ID NO: 20626 - DNA, 59 bp, Artificial
  Synthetic oligonucleotide
gtctaccacttctattgcacttaactgttcttgtcgtaaccaactcgttcagtggcgcg

SEQ ID NO: 20627 - DNA, 60 bp, Artificial
  Synthetic oligonucleotide
actttcaaaggcacacacagccccactgctaattccatggcccgctgccaagcaacttcg

SEQ ID NO: 20628 - DNA, 60 bp, Artificial
  Synthetic oligonucleotide
cccctgtcttgtcgcgccaaccgcacccacacagacaccatcatgcacctctactcgggg

SEQ ID NO: 20629 - DNA, 60 bp, Artificial
  Synthetic oligonucleotide
gcgggcagtagggtgcgatcaaaatagtcaatgggtctgtgcaactgggttaggcggtct

SEQ ID NO: 20630 - DNA, 60 bp, Artificial
  Synthetic oligonucleotide
atcaggccgacgacgcaagcaccgagggccgcgacaagcttcgggagctgatctttccca

SEQ ID NO: 20631 - DNA, 60 bp, Artificial
  Synthetic oligonucleotide
aggagctgaacggacccgcaccctccgcagctaggaatgaaaccccgcagcatgtcggca

SEQ ID NO: 20632 - DNA, 60 bp, Artificial
  Synthetic oligonucleotide
aacgacttgtgtcaccaaggtggaggacccgccgtatgccaacgacccggcctcgcctgt

SEQ ID NO: 20633 - DNA, 60 bp, Artificial
  Synthetic oligonucleotide
gcctcttgacttaaaacccgtggacgtaaagccgaccccgaccttcgtgcttcccagctt

SEQ ID NO: 20634 - DNA, 60 bp, Artificial
  Synthetic oligonucleotide
gaccgatggctcctggatctctgttcttttccgtcacaacggctcctcaactgcagcccc

SEQ ID NO: 20635 - DNA, 60 bp, Artificial
  Synthetic oligonucleotide
cagctgcgttcctgagactcgtgtgcgtgagagcaaaggtatctcggaccatgaacttca

SEQ ID NO: 20636 - DNA, 60 bp, Artificial
  Synthetic oligonucleotide
cagcctcactctcaacatccgggcgcccctacaattttctggacccgccttgactgctag

SEQ ID NO: 20637 - DNA, 60 bp, Artificial
  Synthetic oligonucleotide
gcagaaccccggcagcaagacccttacggcccaagtctttctcatcgtgcagcacttgca

SEQ ID NO: 20638 - DNA, 60 bp, Artificial
  Synthetic oligonucleotide
cgccgcccaacttcaaatttccagccgacccaatccagtggtctctcaactcacgcgcac

SEQ ID NO: 20639 - DNA, 60 bp, Artificial
  Synthetic oligonucleotide
ggcattgtgacgccgcaagtgctatctagccgcacgttttaagcagacaggggcacagca

SEQ ID NO: 20640 - DNA, 60 bp, Artificial
  Synthetic oligonucleotide
gctcgcatcactaccgctcctaacatggtcactgaaactctgtggaccggaacaggcagt

SEQ ID NO: 20641 - DNA, 60 bp, Artificial
  Synthetic oligonucleotide
gaggcggctgtttcgaaccgaagagactgagcatccacgggatcgctgaagcgttgcaca

SEQ ID NO: 20642 - DNA, 60 bp, Artificial
  Synthetic oligonucleotide
cgagcaaagacggggctgaggcggaggtggtggtgcagataattgagagtggtggctatg

SEQ ID NO: 20643 - DNA, 60 bp, Artificial
  Synthetic oligonucleotide
agcgtgcagtgtgtccatgtgagcggttgcccgtggaagaggatgagtgtctgaatgccg

SEQ ID NO: 20644 - DNA, 60 bp, Artificial
  Synthetic oligonucleotide
tgtgacacgtcctccgccagagcgtgattgattgaccgagatggctaccccgtcgatgct

SEQ ID NO: 20645 - DNA, 60 bp, Artificial
  Synthetic oligonucleotide
ccggtcaaacaacacaggctctcgaaaacgggctaaccgctccaagaatctgtcacgcag

SEQ ID NO: 20646 - DNA, 60 bp, Artificial
  Synthetic oligonucleotide
gccgcagcgtttcatcaaagttttccaagtcaatgaagcggtcgtaggggcccgcgttta

SEQ ID NO: 20647 - DNA, 60 bp, Artificial
  Synthetic oligonucleotide
tgggtgtttatgtggtgaaagtaaaagtcccggcggcgagtgctgcaggtgtgcgtctgc

SEQ ID NO: 20648 - DNA, 60 bp, Artificial
  Synthetic oligonucleotide
ccgccgccgggtttctttactcaggagtttgactttccggagcccaacgaaggcttcctg

SEQ ID NO: 20649 - DNA, 60 bp, Artificial
  Synthetic oligonucleotide
tgaggcgctgccagaagccgaggagcccgtggttagtgaccctgaacttgctcgctggtt

SEQ ID NO: 20650 - DNA, 60 bp, Artificial
  Synthetic oligonucleotide
aaagtaggtcccgggctgtccctcgactccaataatgctctccaggtccacacaggcgac

SEQ ID NO: 20651 - DNA, 60 bp, Artificial
  Synthetic oligonucleotide
gacgcccaaaaccgcatccttatgactcagtcggccattaccgccactcccaggaatctg

SEQ ID NO: 20652 - DNA, 60 bp, Artificial
  Synthetic oligonucleotide
cctgttcccacgccgagtgcctccccgtcctcctcaagaccctctgtgcctttaactttt

SEQ ID NO: 20653 - DNA, 60 bp, Artificial
  Synthetic oligonucleotide
tgtgcagtcctcaccgctgcttggcgaccaaccccgccctgctcagcgagacccaagtta

SEQ ID NO: 20654 - DNA, 58 bp, Artificial
  Synthetic oligonucleotide
cccgtcttcagtctgaccgtgcagccgtagggtactgcgtttggcgaccaggggcccc

SEQ ID NO: 20655 - DNA, 60 bp, Artificial
  Synthetic oligonucleotide
aggattaaaagtgggcggggccaagaggggtataaataggtggggaggttgaggggagcc

SEQ ID NO: 20656 - DNA, 60 bp, Artificial
  Synthetic oligonucleotide
gccagaatgctcacgtcgaaaggcggtgggtctcgcagaggcaggttcggagctctaatt

SEQ ID NO: 20657 - DNA, 60 bp, Artificial
  Synthetic oligonucleotide
cggctaacatgttgtatcccattccgcccaatgccacccaactgcccatcccctcacgca

SEQ ID NO: 20658 - DNA, 60 bp, Artificial
  Synthetic oligonucleotide
tcgtctcggtgaccgtgaagggctgctgatgcgtctgtctgctgaccagcgagcgcctca

SEQ ID NO: 20659 - DNA, 60 bp, Artificial
  Synthetic oligonucleotide
acgcggcaccctacagcctaggggcgatgctccagcccgaactgcagccaattccgctgt

SEQ ID NO: 20660 - DNA, 60 bp, Artificial
  Synthetic oligonucleotide
acccagtataaggtgcgtcattagacccgccttgtggcgcggttgtagccctgccctttg

SEQ ID NO: 20661 - DNA, 60 bp, Artificial
  Synthetic oligonucleotide
tcctctgcccgatgacggctttgaggacgacgagccccacatagaatttgtgtctgcgcc

SEQ ID NO: 20662 - DNA, 60 bp, Artificial
  Synthetic oligonucleotide
cccagcggcactcctattgagcccagactgactgccccactgactcagacagagaatgga

SEQ ID NO: 20663 - DNA, 60 bp, Artificial
  Synthetic oligonucleotide
tctgggcagtttgtggagcgggatcaggaatgtgggcagcgcgttaagaactggggctct

SEQ ID NO: 20664 - DNA, 60 bp, Artificial
  Synthetic oligonucleotide
cgccccaggtcttccatgcattcgtccataataatagcaataggcccggttttggctgcc

SEQ ID NO: 20665 - DNA, 60 bp, Artificial
  Synthetic oligonucleotide
gaccgcaacactgagctttcctatcagatgcttcttgcaaacacgacggacagatcccgc

SEQ ID NO: 20666 - DNA, 60 bp, Artificial
  Synthetic oligonucleotide
acaagagcaagacggttcgagctttgcgggaggaccccaaggggcgcagttatcacgtgg

SEQ ID NO: 20667 - DNA, 60 bp, Artificial
  Synthetic oligonucleotide
agcacttcgcagccttcctcgtcgcccgacaagacgacccagactaccagccagtagacg

SEQ ID NO: 20668 - DNA, 60 bp, Artificial
  Synthetic oligonucleotide
ccccacagttacgtcagcacgccacgctcgccgtcgttgcgtcataaatgacgtggcaaa

SEQ ID NO: 20669 - DNA, 59 bp, Artificial
  Synthetic oligonucleotide
ccccgtatctttcagctggtcagtcggcaagagaccgtagccatggccgaagcgccccg

SEQ ID NO: 20670 - DNA, 60 bp, Artificial
  Synthetic oligonucleotide
ccggggttcatctccaaagaccgaatgagctgtgccatagtcaacactgccggacgcgaa

SEQ ID NO: 20671 - DNA, 60 bp, Artificial
  Synthetic oligonucleotide
tgtggtgattggcgacgcagatggagacaggaccttgcattctgaagaccactgcaacag

SEQ ID NO: 20672 - DNA, 60 bp, Artificial
  Synthetic oligonucleotide
ctgctcacaccaaacacccgcttgctcttgctcctcattgcgccctttacggacagcgtg

SEQ ID NO: 20673 - DNA, 60 bp, Artificial
  Synthetic oligonucleotide
agggcctcaactttgcaaacaacagcctcgccgtggagctgggctcgggcctgcattttc

SEQ ID NO: 20674 - DNA, 60 bp, Artificial
  Synthetic oligonucleotide
gggaggcagatgaaaacctctcaagtctggcaaatttaattgaaagtgtaacctagccaa

SEQ ID NO: 20675 - DNA, 60 bp, Artificial
  Synthetic oligonucleotide
acctccacgaagcacattatgcactgtcaaatgacatttagctgttggatacgtctctcg

SEQ ID NO: 20676 - DNA, 60 bp, Artificial
  Synthetic oligonucleotide
ggagcatatcatgattaggatctgccacgcttttcaaacacattataaacttgttcagca

SEQ ID NO: 20677 - DNA, 60 bp, Artificial
  Synthetic oligonucleotide
cctgagggcaagtaatcatcacaggcacaccaccaggtacccacttttaaaggggcgtga

SEQ ID NO: 20678 - DNA, 60 bp, Artificial
  Synthetic oligonucleotide
caaagctaaccaggttgcttaaatattcaattttcccgccatgcagcccgtcacgccata

SEQ ID NO: 20679 - DNA, 60 bp, Artificial
  Synthetic oligonucleotide
cccctataaatctaaaacccatcctaaaaggaccctttgcccaataagctaaagacttgg

SEQ ID NO: 20680 - DNA, 60 bp, Artificial
  Synthetic oligonucleotide
gtccatggcagcagctggcttctgataacgtagcaggcaagtcaatatcttacacggcct

SEQ ID NO: 20681 - DNA, 60 bp, Artificial
  Synthetic oligonucleotide
cttcctccacttctccaaaaggatttgcttcgacatcttcttcaattgagggcaacactg

SEQ ID NO: 20682 - DNA, 60 bp, Artificial
  Synthetic oligonucleotide
agcctctttcttttcttaacactcaattcaggaactccacactccggccacttccaaccg

SEQ ID NO: 20683 - DNA, 60 bp, Artificial
  Synthetic oligonucleotide
ttgttctcccctcacaatgatccacgtctaacttcaagtaaaactttgcaatacgttcca

SEQ ID NO: 20684 - DNA, 60 bp, Artificial
  Synthetic oligonucleotide
cagcggcagcttgaactttagaaacatcttgcgcgtcaattccctccacgccagtaatag

SEQ ID NO: 20685 - DNA, 60 bp, Artificial
  Synthetic oligonucleotide
ggcactaagccaatttgcttacaaattgcactgtacagcatgcgacctcccactatagcc

SEQ ID NO: 20686 - DNA, 60 bp, Artificial
  Synthetic oligonucleotide
ttgatcaagtggtaattaatcagccaactcgcagtggcattagtgttgcttatctacgcc

SEQ ID NO: 20687 - DNA, 60 bp, Artificial
  Synthetic oligonucleotide
ctggagtacttgcagttgataccgtacaaagattaaaccccgattgtcattatgccgaat

SEQ ID NO: 20688 - DNA, 60 bp, Artificial
  Synthetic oligonucleotide
agattgtcctctttgacgcctcattgattcagttactgcccttctgttttccctacctct

SEQ ID NO: 20689 - DNA, 60 bp, Artificial
  Synthetic oligonucleotide
ctttaagcaggatacccttaaagcaggacaaagtcgaccccgtccgtgacaacgaaacac

SEQ ID NO: 20690 - DNA, 60 bp, Artificial
  Synthetic oligonucleotide
tagattccgccgaagcttcaacccaagatataaagcttgatgaaagatcacgatggggag

SEQ ID NO: 20691 - DNA, 60 bp, Artificial
  Synthetic oligonucleotide
gacaaatggcaatataccaccacttttggatatagaaaagctaccgagcattgaacccct

SEQ ID NO: 20692 - DNA, 60 bp, Artificial
  Synthetic oligonucleotide
caaaatatctactggcccacttgattcctctttctgagctggtgcggctttggacaatgg

SEQ ID NO: 20693 - DNA, 60 bp, Artificial
  Synthetic oligonucleotide
gataaaagcagttttcctggaccgtctcgttggtatatagaagaggcatgaagctggttt

SEQ ID NO: 20694 - DNA, 60 bp, Artificial
  Synthetic oligonucleotide
tctatggaattacttatggaatgccagatgctggatgtataaccatatccccagaattag

SEQ ID NO: 20695 - DNA, 60 bp, Artificial
  Synthetic oligonucleotide
ctgctcgttcgcatatattactgcctgtggatgctgatccagaagtatatttcaacaagt

SEQ ID NO: 20696 - DNA, 60 bp, Artificial
  Synthetic oligonucleotide
gaacatcctctctgtatgcatttcccctccttacacattcttctaatgttaagtgtcacc

SEQ ID NO: 20697 - DNA, 60 bp, Artificial
  Synthetic oligonucleotide
ttttgagcatagcggcggcaacacatctaagtattctaatgtgggaggctcacagtcagc

SEQ ID NO: 20698 - DNA, 60 bp, Artificial
  Synthetic oligonucleotide
ccacggtcttccccgtaaagaatatcagcccactcactcatgaatgctctcgtccatgcc

SEQ ID NO: 20699 - DNA, 60 bp, Artificial
  Synthetic oligonucleotide
gttgaaggccagcccacacttaaacttactccacagtgctttgctaatgcttatctttcg

SEQ ID NO: 20700 - DNA, 60 bp, Artificial
  Synthetic oligonucleotide
tatgcagcagaagacaaaggcttagaaacaagccagttggtattcctgtttccggctact

SEQ ID NO: 20701 - DNA, 60 bp, Artificial
  Synthetic oligonucleotide
ctgcattggaaaactattaaaaggctgtctccgcccttattccaagcaagtctcatcctg

SEQ ID NO: 20702 - DNA, 60 bp, Artificial
  Synthetic oligonucleotide
cttttcatactgatactaatggaaatttagctctagcatctcctaaccctccactctctg

SEQ ID NO: 20703 - DNA, 60 bp, Artificial
  Synthetic oligonucleotide
caggatcaaacaacttaacctcttatcccatgcttacagaaaacataccgcctttgatgc

SEQ ID NO: 20704 - DNA, 60 bp, Artificial
  Synthetic oligonucleotide
gcaccagacaaggatctcgggttgttggctttatggactttatcattgcgctgggttggc

SEQ ID NO: 20705 - DNA, 60 bp, Artificial
  Synthetic oligonucleotide
gtgcaaatgggatgatagccttggaaatgtagctgctatcgaagaactagaatcaaacca

SEQ ID NO: 20706 - DNA, 60 bp, Artificial
  Synthetic oligonucleotide
cttctacggttgttgttaatgttccggatagatcttggggcgcttttagaggttggagct

SEQ ID NO: 20707 - DNA, 60 bp, Artificial
  Synthetic oligonucleotide
gcctccatacaatacagtaacatggataagtgaaaatatcccctttgttgcagatcacgg

SEQ ID NO: 20708 - DNA, 60 bp, Artificial
  Synthetic oligonucleotide
ctgatgagggaactgcaatgacaatccaagagggaaaccaacaagcacaaaagttaacaa

SEQ ID NO: 20709 - DNA, 60 bp, Artificial
  Synthetic oligonucleotide
atcgcgcaacttcttgctgctataaattcttctaaaccgatgtctcagactcctactgtt

SEQ ID NO: 20710 - DNA, 60 bp, Artificial
  Synthetic oligonucleotide
ggcctttgcaagattagctccccattgcgggctaacacctgtatatggtcacaccgttgg

SEQ ID NO: 20711 - DNA, 60 bp, Artificial
  Synthetic oligonucleotide
gacactctcatattcatttgctccttcattttatgaggataacggggctttcataagacg

SEQ ID NO: 20712 - DNA, 60 bp, Artificial
  Synthetic oligonucleotide
ctagatagatgaagtaatatcttcgaccacaactcaacgggcaaaatagctaaaggttca

SEQ ID NO: 20713 - DNA, 60 bp, Artificial
  Synthetic oligonucleotide
gcaaatatccttcgctcaactggatcccctttcttaatgtcatgtctttccagggtctca

SEQ ID NO: 20714 - DNA, 60 bp, Artificial
  Synthetic oligonucleotide
aaatgtttaaacctgatttccctggcacaaatgcagcacagagacatattgaggcagcag

SEQ ID NO: 20715 - DNA, 60 bp, Artificial
  Synthetic oligonucleotide
ttgtagtaagtgggtttccttgagcatcatagttcccttcagcacaatgagcttcccaag

SEQ ID NO: 20716 - DNA, 60 bp, Artificial
  Synthetic oligonucleotide
tctgcaaaacttagtgaatgatattagagccagtcaatcggatgcaatacgatccacaga

SEQ ID NO: 20717 - DNA, 59 bp, Artificial
  Synthetic oligonucleotide
ttttgtggattccagtgcacctactgggttgaactttatctgctcccaccagtgctttg

SEQ ID NO: 20718 - DNA, 60 bp, Artificial
  Synthetic oligonucleotide
gccgcttgtcttgctctttcaaagcttcttaggacgattggatttgtgctgtaagcaaca

SEQ ID NO: 20719 - DNA, 60 bp, Artificial
  Synthetic oligonucleotide
gggcaatgaccttttgatacatttaattgataagcagcagcagcgttgcgtaaagaacaa

SEQ ID NO: 20720 - DNA, 60 bp, Artificial
  Synthetic oligonucleotide
ggataataatgctgctaacgttcgcataaagcctcctcctagctgttcttctgctgcacg

SEQ ID NO: 20721 - DNA, 60 bp, Artificial
  Synthetic oligonucleotide
cccacggacctccaagtaaagcatctattattagaccaagggtggcgccaaataagcttg

SEQ ID NO: 20722 - DNA, 60 bp, Artificial
  Synthetic oligonucleotide
ctgcaagcgccgttgataattaaacacatggactgtgaatgggtagaagaattgcatcgc

SEQ ID NO: 20723 - DNA, 60 bp, Artificial
  Synthetic oligonucleotide
aagatggccactccgtcgatgatgccgcagtggtcgtacatgcacatcgccgggcaggac

SEQ ID NO: 20724 - DNA, 60 bp, Artificial
  Synthetic oligonucleotide
ccccaaccctctccgccaatcaccacgccacaaaaggggcaataaaagtgtgcggtatat

SEQ ID NO: 20725 - DNA, 60 bp, Artificial
  Synthetic oligonucleotide
agctcaacaccgccgccccgtccaccgcccaccatgccgcccctccggaggaagcccatc

SEQ ID NO: 20726 - DNA, 60 bp, Artificial
  Synthetic oligonucleotide
tggaagaggttggccagggcgctgtcccagtggcggtggtaggtgatgctccagctctcc

SEQ ID NO: 20727 - DNA, 60 bp, Artificial
  Synthetic oligonucleotide
aggtaggcgaagtacagatagagcacggcgagaacagtcagcaccgcggccagcagcagt

SEQ ID NO: 20728 - DNA, 60 bp, Artificial
  Synthetic oligonucleotide
gcaactttgagcccatgtgccgccaggtgcccgactacgccaaccacaaagatgagtacc

SEQ ID NO: 20729 - DNA, 60 bp, Artificial
  Synthetic oligonucleotide
ggcacctgctgacactctaccgcgagacgctggccaacttgcatgtggacgagcgcacgt

SEQ ID NO: 20730 - DNA, 59 bp, Artificial
  Synthetic oligonucleotide
cccagcctgcagccgctcaccgagcccatgcccctggtgtcccctcgcacggccgtcaa

SEQ ID NO: 20731 - DNA, 60 bp, Artificial
  Synthetic oligonucleotide
atcccggccaacgtcaccaacctgcccatctccattcccagccgcaactgggccgccttc

SEQ ID NO: 20732 - DNA, 60 bp, Artificial
  Synthetic oligonucleotide
aaccttctaaccgacagccctacccgtcacaggggagacagagaaaagacagccagcccc

SEQ ID NO: 20733 - DNA, 60 bp, Artificial
  Synthetic oligonucleotide
aaaagccagcaagagatccgtgggcacatgcaccgaagctcccgcaggaatctccaccca

SEQ ID NO: 20734 - DNA, 60 bp, Artificial
  Synthetic oligonucleotide
gcgccccagttgagccggcaccgacgcgctcggccatggccatctcgcgccgcgtgaaaa

SEQ ID NO: 20735 - DNA, 60 bp, Artificial
  Synthetic oligonucleotide
ctcgtagcgtcagcccctacacctcccctcgcgtccaatttctgtccgacatagaaccag

SEQ ID NO: 20736 - DNA, 60 bp, Artificial
  Synthetic oligonucleotide
aggctggtgtgcgtgagggcgaaggtgtcccggaccatgaacttgacgtactggtgctgg

SEQ ID NO: 20737 - DNA, 60 bp, Artificial
  Synthetic oligonucleotide
agctcggcgaggtctgggttgtgggccagcaggtgctgccagagggtgtcggtgaggcgg

SEQ ID NO: 20738 - DNA, 60 bp, Artificial
  Synthetic oligonucleotide
tgcggtgcctgctactaccactaccccgaagcggctcagctacggcgcgagcaagaggag

SEQ ID NO: 20739 - DNA, 60 bp, Artificial
  Synthetic oligonucleotide
acccacttgcgccaccctctccgtttgtgttggactgccccgaggtacctggtgtgaact

SEQ ID NO: 20740 - DNA, 60 bp, Artificial
  Synthetic oligonucleotide
cgagcaccttctttgacatccggggaacgctggaccggggaccctccttcaaaccgtact

SEQ ID NO: 20741 - DNA, 60 bp, Artificial
  Synthetic oligonucleotide
atcagccacaatctgggcgtgccgccggtgcctccgtcgattactccacccgcatgaatt

SEQ ID NO: 20742 - DNA, 59 bp, Artificial
  Synthetic oligonucleotide
ccttggagctgcgtcccgagaccaaactgcccgccgtggcccacaataagatgcgcccc

SEQ ID NO: 20743 - DNA, 60 bp, Artificial
  Synthetic oligonucleotide
tgtagcgccaggggaccacaatctccaaacagggaacaaaacataccgcggcccggctgt

SEQ ID NO: 20744 - DNA, 60 bp, Artificial
  Synthetic oligonucleotide
tccggcatcctgcccgccgtctgcaacgcgctcccctctgactttgtgcccaccgtctac

SEQ ID NO: 20745 - DNA, 60 bp, Artificial
  Synthetic oligonucleotide
ggactggcgcctcacccacagcaaatgtcattctaacaaacaccaccactcccaacggca

SEQ ID NO: 20746 - DNA, 60 bp, Artificial
  Synthetic oligonucleotide
acaaccaaaagatccccgtcagctgccgcgccaaccgcccacgagccgacgcgcactggc

SEQ ID NO: 20747 - DNA, 60 bp, Artificial
  Synthetic oligonucleotide
gagcacggtgcacatcgctccctcgtctcgcctgccctaccctgagttccgcaagaatgt

SEQ ID NO: 20748 - DNA, 60 bp, Artificial
  Synthetic oligonucleotide
agctggaccgggagcgagtgctccagcccgaggactttgaggggcgcgtggaggaggcgg

SEQ ID NO: 20749 - DNA, 60 bp, Artificial
  Synthetic oligonucleotide
tggcggccatcaactactcggtggcgaccctggccaagcactacgcgcgcaagatctcca

SEQ ID NO: 20750 - DNA, 60 bp, Artificial
  Synthetic oligonucleotide
aggtgctggtagcccacgagcaggtggggcggagggtagaggtagaggggccagtgttcc

SEQ ID NO: 20751 - DNA, 60 bp, Artificial
  Synthetic oligonucleotide
gcttgaagatggcgtgggagttggagctgatggtgggcctctggaagacattgaaggcgg

SEQ ID NO: 20752 - DNA, 60 bp, Artificial
  Synthetic oligonucleotide
aaagcgggagggaggggactcgctcgcctactcgccggccacgcccacctatggctctcg

SEQ ID NO: 20753 - DNA, 60 bp, Artificial
  Synthetic oligonucleotide
actttgaccccgcccctcggactttgaccgttcccacgccacgtcattttcccacgcgac

SEQ ID NO: 20754 - DNA, 60 bp, Artificial
  Synthetic oligonucleotide
accccgacgtggtgctggcaccgggctgcgccatcgacttcaccttctcccgcctaaaca

SEQ ID NO: 20755 - DNA, 60 bp, Artificial
  Synthetic oligonucleotide
aggcggcccatcgtgctgcccggggtgcgctatcatcccagtcaggccatggctcccacc

SEQ ID NO: 20756 - DNA, 60 bp, Artificial
  Synthetic oligonucleotide
tcgatccagtctacccctatgacgtcccgcagctgcagatcaatccacccttcgtcagcg

SEQ ID NO: 20757 - DNA, 60 bp, Artificial
  Synthetic oligonucleotide
cgcacttcatcctgcacggctgcaacttcctgggctttctgggctcggtaataacggcga

SEQ ID NO: 20758 - DNA, 60 bp, Artificial
  Synthetic oligonucleotide
ggagcgtcgcctccgccgtcctacgagagtgtggtggggtcttcgctcacggagcctctt

SEQ ID NO: 20759 - DNA, 60 bp, Artificial
  Synthetic oligonucleotide
atgctgttgcccagtgggtcatccggcagtggcagcggggccgggatgcgggaccaggtg

SEQ ID NO: 20760 - DNA, 60 bp, Artificial
  Synthetic oligonucleotide
attgtcgaggcgtgtggcgaaactgccgtagagggcgttggagagaagcttggcgatgct

SEQ ID NO: 20761 - DNA, 60 bp, Artificial
  Synthetic oligonucleotide
gtacaagttttccccgcccaacgtccccatcgaccccaacacgcactcctatgactacat

SEQ ID NO: 20762 - DNA, 60 bp, Artificial
  Synthetic oligonucleotide
tgaacccggacccgccgtcggctcccctccatcccctcttctctcaaaacaggctctcat

SEQ ID NO: 20763 - DNA, 60 bp, Artificial
  Synthetic oligonucleotide
tgtttctcgggttggggttgctgcgtgagtacggaacgaggcggtgggcgtcgagcgggt

SEQ ID NO: 20764 - DNA, 60 bp, Artificial
  Synthetic oligonucleotide
acctcctacgggaccttctgctacgtgccccagagtgcctagagaaccctggccgtcagc

SEQ ID NO: 20765 - DNA, 60 bp, Artificial
  Synthetic oligonucleotide
gatgactcagtggaaagtaccgcacctgttaaccgtaaacgccgtcatcaggagactttg

SEQ ID NO: 20766 - DNA, 60 bp, Artificial
  Synthetic oligonucleotide
gctgaatcgcgctactatgagcattaatgggttggagcagcgggtgtctgaaattgaacg

SEQ ID NO: 20767 - DNA, 60 bp, Artificial
  Synthetic oligonucleotide
agcttcaggggcatctgtcagggtccagcgtgggttccacttgccattcgcgagaggaaa

SEQ ID NO: 20768 - DNA, 60 bp, Artificial
  Synthetic oligonucleotide
cccagatacgggtcaaggcccatgcttagcagttggtctgacatcggcaccagctccatg

SEQ ID NO: 20769 - DNA, 60 bp, Artificial
  Synthetic oligonucleotide
agtttcggcgacgcctagagcaatcatgaacccgcctgcttggccagccagccgcctgtt

SEQ ID NO: 20770 - DNA, 60 bp, Artificial
  Synthetic oligonucleotide
tccagccgcgccagtcgtgaccgtcactaagcccgccgctagtgcttctactgccactga

SEQ ID NO: 20771 - DNA, 60 bp, Artificial
  Synthetic oligonucleotide
gcccagcacagccttccgccttttctggagcaaaacggaggcagttcatcaagaaacaac

SEQ ID NO: 20772 - DNA, 60 bp, Artificial
  Synthetic oligonucleotide
caagcctcaagcaattggccaagcatcttatgactgtgcgattaacgatgacaccggcgc

SEQ ID NO: 20773 - DNA, 60 bp, Artificial
  Synthetic oligonucleotide
gggtgtgctcttcgttttcatcactttcatctaactcggcagaaggtgcaggtgggtaag

SEQ ID NO: 20774 - DNA, 60 bp, Artificial
  Synthetic oligonucleotide
ggtaaaagactttaacgtgcgtgccgtcttctaaagtgccatgagcggccagagtggcgc

SEQ ID NO: 20775 - DNA, 60 bp, Artificial
  Synthetic oligonucleotide
cccagcattaacactctgctaactcttcaacctgctgcttctgtgccgcgctccggtggc

SEQ ID NO: 20776 - DNA, 60 bp, Artificial
  Synthetic oligonucleotide
cacacaccagtggcatcaacagcatctcgccggcctttggcatctgcggatacatggctt

SEQ ID NO: 20777 - DNA, 60 bp, Artificial
  Synthetic oligonucleotide
gcccatagagtttaaagaatgtcctccgccgctctgggctcattgctacctgctaaagct

SEQ ID NO: 20778 - DNA, 60 bp, Artificial
  Synthetic oligonucleotide
tcactagcgtgagtagagcagttagcaatgacaatggcgcggccaacttgcaggccacat

SEQ ID NO: 20779 - DNA, 60 bp, Artificial
  Synthetic oligonucleotide
cacgctccacaataaaggctgattgtgtctaaccattaaagctagatccccatcccactc

SEQ ID NO: 20780 - DNA, 60 bp, Artificial
  Synthetic oligonucleotide
acagctcgttagtggaactggcgcacgactcgcctcgcctagcgattataaagcgggcca

SEQ ID NO: 20781 - DNA, 60 bp, Artificial
  Synthetic oligonucleotide
ccgggcaagtccactgacgtagcgaaactgaactccgcctgtgtaaaggtcaataattcc

SEQ ID NO: 20782 - DNA, 60 bp, Artificial
  Synthetic oligonucleotide
gtccgcccaaagccacgcatcggcctgattagggccagatctgccacaatcttttctgct

SEQ ID NO: 20783 - DNA, 60 bp, Artificial
  Synthetic oligonucleotide
gccgtccacccagatattattttggctcctggctgcgccgtagactttactacgagccgc

SEQ ID NO: 20784 - DNA, 60 bp, Artificial
  Synthetic oligonucleotide
aaacgaagaaggcgcgtggctcgacgcagcaagagcactgggcggtttgtcgcagcgcca

SEQ ID NO: 20785 - DNA, 60 bp, Artificial
  Synthetic oligonucleotide
taagcccgcgccttcgagctcttgggccgaggacgaggcggaactaccgccgattcaaga

SEQ ID NO: 20786 - DNA, 60 bp, Artificial
  Synthetic oligonucleotide
cttgcaagcgtgggaaacttgacctttgaacgggcgcggtgaagtggcacgtgatgacgc

SEQ ID NO: 20787 - DNA, 60 bp, Artificial
  Synthetic oligonucleotide
tgcaagaatagggcagggattggcttttaacaactctgacattcaaattaatgccgcacc

SEQ ID NO: 20788 - DNA, 60 bp, Artificial
  Synthetic oligonucleotide
ccgacattccacaagagctgcctactgacgccgctgctgaagagttgctcggctgtgatg

SEQ ID NO: 20789 - DNA, 60 bp, Artificial
  Synthetic oligonucleotide
ctgttgtgtatgacttgcgcggccaacacgatctcatcaaaaccgcagatgttgtggcca

SEQ ID NO: 20790 - DNA, 60 bp, Artificial
  Synthetic oligonucleotide
gtggaagcgaagaagtgtttatgtggcggagtgcatccctggcctgtgttggagcagctc

SEQ ID NO: 20791 - DNA, 60 bp, Artificial
  Synthetic oligonucleotide
tgaaaccgtgtacctgagaactccgttctctgctggcaacgccactacataatcgccgcg

SEQ ID NO: 20792 - DNA, 60 bp, Artificial
  Synthetic oligonucleotide
gccagaccgcccaatgacacgaaaccccacaatggatttgctaactggcgttcctaatgc

SEQ ID NO: 20793 - DNA, 60 bp, Artificial
  Synthetic oligonucleotide
cagtagttgcatgacccttcgcccgcagtttacctttacccacatgcccacagcaagtac

SEQ ID NO: 20794 - DNA, 60 bp, Artificial
  Synthetic oligonucleotide
ggacgttgtaaacccatttatcaccaccgcaacgctgggctgcgctatagatctcaactc

SEQ ID NO: 20795 - DNA, 60 bp, Artificial
  Synthetic oligonucleotide
gccaggcaatgacagattgctcacacctaacgagtttgaaattaagcgagcagtagacgg

SEQ ID NO: 20796 - DNA, 60 bp, Artificial
  Synthetic oligonucleotide
cggcaagcaataatccaacagaggcagagtttagattagaagacgcactgtcgcctactg

SEQ ID NO: 20797 - DNA, 60 bp, Artificial
  Synthetic oligonucleotide
cagctctcccctgtagtcgcagtcgatcacgccagctcccacattaaagcctgagtaaca

SEQ ID NO: 20798 - DNA, 60 bp, Artificial
  Synthetic oligonucleotide
cctctagctctccgcatgctttctgtcactgctctgtttccttcgcgcggccgcagtgta

SEQ ID NO: 20799 - DNA, 60 bp, Artificial
  Synthetic oligonucleotide
ccgcctccttcttatgaaagcgtggttgggaatatggagccactttacgtgcctccgcga

SEQ ID NO: 20800 - DNA, 60 bp, Artificial
  Synthetic oligonucleotide
cttgtgggactttgtggaagcttttgtgggcaacccgtcgtctaaggctctcacggccca

SEQ ID NO: 20801 - DNA, 60 bp, Artificial
  Synthetic oligonucleotide
ccgccgcgacaaggccaagcagcctaaatctgacaaaccccaagctgaagaagcccaagc

SEQ ID NO: 20802 - DNA, 60 bp, Artificial
  Synthetic oligonucleotide
cctcaaaagcggctatgttaaagccacttgtcggtgtagtgtccaggcgcacacttggcc

SEQ ID NO: 20803 - DNA, 60 bp, Artificial
  Synthetic oligonucleotide
taattctaaatacacgttgtatgctttacttattcacaaaggcgccgatgcagccgagtt

SEQ ID NO: 20804 - DNA, 60 bp, Artificial
  Synthetic oligonucleotide
ttcccacacgacgcacccgttagggttccaatcggcagggcaaatttcagccgctcttag

SEQ ID NO: 20805 - DNA, 60 bp, Artificial
  Synthetic oligonucleotide
ttcttgcggccgccagagtctactatcaccagcatcagtgaaaacgtgccaacgcagaca

SEQ ID NO: 20806 - DNA, 60 bp, Artificial
  Synthetic oligonucleotide
gcttctagcacagtggcgaccatcccgtgctctctgcagctgcaattgatgaacgtagac

SEQ ID NO: 20807 - DNA, 60 bp, Artificial
  Synthetic oligonucleotide
aaggcacaacccgccgccgacgcagagcagagcgccgccgcaggcgtcgtcaagcaacga

SEQ ID NO: 20808 - DNA, 60 bp, Artificial
  Synthetic oligonucleotide
tttcaccatctccaccttgcaaagcggggtgcccttcggatcacgagctccgcacgtcta

SEQ ID NO: 20809 - DNA, 60 bp, Artificial
  Synthetic oligonucleotide
ccctaacgctttggctcggctgcagtctcaagcaactggagatgtggagtgggcagatgc

SEQ ID NO: 20810 - DNA, 60 bp, Artificial
  Synthetic oligonucleotide
ccccatatatcatacggcagaccaatcaaactagaaacagaccccatgccataatatcca

SEQ ID NO: 20811 - DNA, 60 bp, Artificial
  Synthetic oligonucleotide
cgcctggcgtccgcagccgtgaaagggcaagcaagcgctcttcagatgaaatctttgcag

SEQ ID NO: 20812 - DNA, 60 bp, Artificial
  Synthetic oligonucleotide
gtggcccagtgcaacatgaccaaggactggttcctggtccagatgctggcccactacaac

SEQ ID NO: 20813 - DNA, 60 bp, Artificial
  Synthetic oligonucleotide
agacgttggcgcggatgggatctcccttggccgccttgaagtgggtcttggcatcgtttt

SEQ ID NO: 20814 - DNA, 60 bp, Artificial
  Synthetic oligonucleotide
tcccgcttcgctagtagggttgagctcgacggtgcgcggcttcaagaacatggcattacc

SEQ ID NO: 20815 - DNA, 60 bp, Artificial
  Synthetic oligonucleotide
agatctggggcaagagccgcacaacagtccacctgaatctgagacagcttaccggcgact

SEQ ID NO: 20816 - DNA, 60 bp, Artificial
  Synthetic oligonucleotide
ttcctccgcactcaaggacccagccaagtggtctcagaaccgggcgtatactctcaacgg

SEQ ID NO: 20817 - DNA, 60 bp, Artificial
  Synthetic oligonucleotide
ggccagagtgctaacgaaacatctcgccatggtctccgcaggttcctcggcgttcactct

SEQ ID NO: 20818 - DNA, 60 bp, Artificial
  Synthetic oligonucleotide
tctcaggtcgaacatcgtgaggcaaatcaacagcgtcaaatgacaagcacaagaaccgcc

SEQ ID NO: 20819 - DNA, 60 bp, Artificial
  Synthetic oligonucleotide
gagctgttgtggcaagtgcacgagagtctgcggtccgccttggagaagacggtcggtgtc

SEQ ID NO: 20820 - DNA, 60 bp, Artificial
  Synthetic oligonucleotide
tggtctgggcgcggcagcttgttgagtcgcacgacgcacttcacttcttcgatttcgacg

SEQ ID NO: 20821 - DNA, 60 bp, Artificial
  Synthetic oligonucleotide
ggccccgactttaccctcacatactttgcacatctacaactgactacggaatacagggac

SEQ ID NO: 20822 - DNA, 60 bp, Artificial
  Synthetic oligonucleotide
gccggctccactgcacttactattaatattccagcgcgtacatgggaggggatgaggggt

SEQ ID NO: 20823 - DNA, 60 bp, Artificial
  Synthetic oligonucleotide
ggaacccgaccacaatcccaatggagacgagggaggagctgattctgatgcggatagcgg

SEQ ID NO: 20824 - DNA, 60 bp, Artificial
  Synthetic oligonucleotide
gccgctccttcgtaccagcccgttacccgtttgtagaactcgcctgcccgtagatactct

SEQ ID NO: 20825 - DNA, 60 bp, Artificial
  Synthetic oligonucleotide
acgattacgatagggaggcgatgtaccggtcggggcaggcgatcagcgttaaccggggtc

SEQ ID NO: 20826 - DNA, 60 bp, Artificial
  Synthetic oligonucleotide
tgcctctgccagcagcgttccagcgtgtcgtatataagctccgcctgtctgtgtcccttg

SEQ ID NO: 20827 - DNA, 60 bp, Artificial
  Synthetic oligonucleotide
gcgtgggtgttgctgggaatggtgggtcgcaggaaaatgttaaagtcgccgtgcatgccg

SEQ ID NO: 20828 - DNA, 60 bp, Artificial
  Synthetic oligonucleotide
tgagcgtattgatctctccgttgagccaccgtttgatggtgagggcgcacagagccgcgt

SEQ ID NO: 20829 - DNA, 60 bp, Artificial
  Synthetic oligonucleotide
agcggctcctcgcactcgcatacgtagctcgcgacccattctcccatccatttccgacct

SEQ ID NO: 20830 - DNA, 60 bp, Artificial
  Synthetic oligonucleotide
agcacccgggaatacctgtccgaggaccttcagcagtttatcgcggcgactggaagctac

SEQ ID NO: 20831 - DNA, 60 bp, Artificial
  Synthetic oligonucleotide
aagtcgtgcagaggggccagagggttcaggatgtagtcgagtcgtcccgtatcgtcgtcg

SEQ ID NO: 20832 - DNA, 60 bp, Artificial
  Synthetic oligonucleotide
gcaccagtctcacctatccggacagcttgttaatccctccgccctcggactactcaaccg

SEQ ID NO: 20833 - DNA, 60 bp, Artificial
  Synthetic oligonucleotide
atcccgttacccgccagtccctccgatcaatcgatggcttcgagccggcgtagctccctg

SEQ ID NO: 20834 - DNA, 60 bp, Artificial
  Synthetic oligonucleotide
cgcgtcatattcaaaggccacacccaccggatgttccacgcccagcttaggatccgtagc

SEQ ID NO: 20835 - DNA, 60 bp, Artificial
  Synthetic oligonucleotide
cactccgacatgtacaaacccgaattccagagcattttgcaccggaaccaggagcgaatg

SEQ ID NO: 20836 - DNA, 60 bp, Artificial
  Synthetic oligonucleotide
ctaccgcccttatcttccaccattaaatcttccgaagccgtgtacccaccagtgatccac

SEQ ID NO: 20837 - DNA, 60 bp, Artificial
  Synthetic oligonucleotide
atccctcaggaccgctcacttcctctggtaccggactatctgtggttacagcagccgagg

SEQ ID NO: 20838 - DNA, 60 bp, Artificial
  Synthetic oligonucleotide
tcacccggggcaaaggagtctacaaagacccacaaaccggggaaacgctagccacttcgg

SEQ ID NO: 20839 - DNA, 60 bp, Artificial
  Synthetic oligonucleotide
cccaccctctatacggatcgctacaatgactcatctgccatacgcctcacatgccaagct

SEQ ID NO: 20840 - DNA, 60 bp, Artificial
  Synthetic oligonucleotide
ctcacgactgccatctgccggacaaacgcggtactacacttaacacataaacacccgcct

SEQ ID NO: 20841 - DNA, 60 bp, Artificial
  Synthetic oligonucleotide
tgtcatggattacgccgcgctttctccgcacgtcggtggttgggccctgcgagacggata

SEQ ID NO: 20842 - DNA, 60 bp, Artificial
  Synthetic oligonucleotide
ttgcctcgacctgcgactctggaggggaagacaggggttcgaagacggttagtttagggc

SEQ ID NO: 20843 - DNA, 60 bp, Artificial
  Synthetic oligonucleotide
gggttccgatgcgtttagagttatcattatcgcgtctgcgttcgtagccgtctcgttcca

SEQ ID NO: 20844 - DNA, 60 bp, Artificial
  Synthetic oligonucleotide
gccgatgaaaacgataaaggcgaaggaccaaaaccgtgcgtgagtgatgaggaactgcgt

SEQ ID NO: 20845 - DNA, 60 bp, Artificial
  Synthetic oligonucleotide
cggctcgcgaagggaaggccacggtcattctgaatctcgtcatcaataccgcgaaggaaa

SEQ ID NO: 20846 - DNA, 60 bp, Artificial
  Synthetic oligonucleotide
aacagaggttggggcatgcgtcgccgctcgtctatgcgtggggtcgggattcgtcgtcga

SEQ ID NO: 20847 - DNA, 60 bp, Artificial
  Synthetic oligonucleotide
ttctaagcggctccacaaataaactcccagacctgtcccgtcgggctgacaacacacccc

SEQ ID NO: 20848 - DNA, 60 bp, Artificial
  Synthetic oligonucleotide
tcgagcgcttcctgcagttggtgatcgacttccgccagggacgcttcgcgagcggtaagt

SEQ ID NO: 20849 - DNA, 60 bp, Artificial
  Synthetic oligonucleotide
gcgtaactctccaccttccaaaactaatatacggctcatgttatgcacctcaaccgtcgc

SEQ ID NO: 20850 - DNA, 60 bp, Artificial
  Synthetic oligonucleotide
ttgggcaggtggaagaggacgtcgttaaagaggaggcggcctacgcgcggcatgaagaag

SEQ ID NO: 20851 - DNA, 60 bp, Artificial
  Synthetic oligonucleotide
gcgacatcgacacgttcaaccccgaggcgaatcacagcaatttccgaaccaccgtgatcc

SEQ ID NO: 20852 - DNA, 60 bp, Artificial
  Synthetic oligonucleotide
ggagacgccgtgatggagttgggcgaagcgggagccaacctaaatctgcagttcaacgag

SEQ ID NO: 20853 - DNA, 60 bp, Artificial
  Synthetic oligonucleotide
cgtgaaagtgcatcaaaacggggcgggcgacaaaggaaacgagattaacacgggaggtgc

SEQ ID NO: 20854 - DNA, 60 bp, Artificial
  Synthetic oligonucleotide
cctacatgaatgacgctgctgtcacctcgcactaccgctcccgcccgctagatggcaaaa

SEQ ID NO: 20855 - DNA, 59 bp, Artificial
  Synthetic oligonucleotide
gcccggaccggcgcctccgtcatcacgacccacttacccgcatctccgagcgccacccc

SEQ ID NO: 20856 - DNA, 60 bp, Artificial
  Synthetic oligonucleotide
taacgtgcccgcactgctagacgtggaatccgcgcagatgaccggcgtcgatcaagacgt

SEQ ID NO: 20857 - DNA, 60 bp, Artificial
  Synthetic oligonucleotide
cgttttggacatcagccgtttgcccgtggtgccggagcgcattttgctgcacgactttcc

SEQ ID NO: 20858 - DNA, 60 bp, Artificial
  Synthetic oligonucleotide
tgagaaggggttcgagtctttgctgttttggtgggacggcgggcacgtgccgcaccgctg

SEQ ID NO: 20859 - DNA, 60 bp, Artificial
  Synthetic oligonucleotide
attcgggaaagacggtggtgcgctcgtcgggcaccaggtgcacgcgccaaccgcggttgt

SEQ ID NO: 20860 - DNA, 57 bp, Artificial
  Synthetic oligonucleotide
ttttcggtgcggtaaacgatctgacggaagatggcgtgggagttggaggagatggtg

SEQ ID NO: 20861 - DNA, 60 bp, Artificial
  Synthetic oligonucleotide
agccagccgtccggcattaactcctcggacgattggagccaggccatgcaacgcatcatg

SEQ ID NO: 20862 - DNA, 60 bp, Artificial
  Synthetic oligonucleotide
tccggcattaactcctcggacgattggacccaggccatgcaacgcatcatggcgctgacg

SEQ ID NO: 20863 - DNA, 51 bp, Artificial
  Synthetic oligonucleotide
ggaggacgccgaggctctcttcaacaagtactgcgcgctgactcttaaaga

SEQ ID NO: 20864 - DNA, 53 bp, Artificial
  Synthetic oligonucleotide
aggacgccgaggctctcttcaacaagtactgcgcgctcactcttaaagagtag

SEQ ID NO: 20865 - DNA, 60 bp, Artificial
  Synthetic oligonucleotide
gctcgctcaccagaagttgtttgtatcacaagagcgaagaccaacttcagcgcactctcg

SEQ ID NO: 20866 - DNA, 60 bp, Artificial
  Synthetic oligonucleotide
caacttcagcgcactctcgaggacgccgaggctctcttcaacaagtactgcgcgctcact

SEQ ID NO: 20867 - DNA, 60 bp, Artificial
  Synthetic oligonucleotide
cttcagcgcactctcgaggacgccgaggctctcttcaacaagtactgcgcgctgactctt

SEQ ID NO: 20868 - DNA, 59 bp, Artificial
  Synthetic oligonucleotide
cgcactcttgaggacgccgaggctctcttcaacaagtactgcgcgctgactcttaaaga

SEQ ID NO: 20869 - DNA, 55 bp, Artificial
  Synthetic oligonucleotide
ctctcgaggacgccgaggctctcttcaacaagtactgcgcgctgactcttaaaga

SEQ ID NO: 20870 - DNA, 55 bp, Artificial
  Synthetic oligonucleotide
ctcttgaggacgccgaggctctcttcaacaagtactgcgcgctgactcttaaaga

SEQ ID NO: 20871 - DNA, 55 bp, Artificial
  Synthetic oligonucleotide
cgaggacgccgaggctctcttcaacaagtactgcgcgctcactcttaaagagtag

SEQ ID NO: 20872 - DNA, 51 bp, Artificial
  Synthetic oligonucleotide
cgaggacgccgaggctctcttcaacaagtactgcgcgctgactcttaaaga

SEQ ID NO: 20873 - DNA, 60 bp, Artificial
  Synthetic oligonucleotide
aaaactgggagttgcgcgccgacacggttaactcctcctccagaagacggatgagctcgg

SEQ ID NO: 20874 - DNA, 60 bp, Artificial
  Synthetic oligonucleotide
aaaactgggagttgcgtgccgagacggtcaactcctcctccagaagacggatgagctcgg

SEQ ID NO: 20875 - DNA, 60 bp, Artificial
  Synthetic oligonucleotide
ttcgggacgagcgagacgatcccaatgcctccgttcatcgaagctgggtcaggtctagca

SEQ ID NO: 20876 - DNA, 60 bp, Artificial
  Synthetic oligonucleotide
ctgtgaccccttacctttggcgctaccaaccagaaacaggaaccgcggcaggagcaagac

SEQ ID NO: 20877 - DNA, 60 bp, Artificial
  Synthetic oligonucleotide
gcatgagtcgcctgaagtctttcatcggtggaatgcttttatttgtgctgtgccgtttcg

SEQ ID NO: 20878 - DNA, 60 bp, Artificial
  Synthetic oligonucleotide
tctggagagagcgcaagaagtacaggacgacgatgccatagtgagcagcgacgagggaat

SEQ ID NO: 20879 - DNA, 60 bp, Artificial
  Synthetic oligonucleotide
cctggcgacgggcggcgcagcaacctcaactattgattccgaaaacagataacgagggcg

SEQ ID NO: 20880 - DNA, 60 bp, Artificial
  Synthetic oligonucleotide
gggctcttgcttatcataataagggtcctatacgcacgactactcttctgacagttcctg

SEQ ID NO: 20881 - DNA, 60 bp, Artificial
  Synthetic oligonucleotide
atctgccggctggtattgtgatcgttgtagacctgtatacgaaactgagttgagagacgc

SEQ ID NO: 20882 - DNA, 60 bp, Artificial
  Synthetic oligonucleotide
cggactgtgtccctctaacatttaaagagtcgcatcctatactgtggggccatgtgttac

SEQ ID NO: 20883 - DNA, 60 bp, Artificial
  Synthetic oligonucleotide
tctcgggactttcgactgtacatttcctggttttattaacaaacataaacgccaaacggc

SEQ ID NO: 20884 - DNA, 60 bp, Artificial
  Synthetic oligonucleotide
cattgctatcaccgttgcaggattgacatctcgcacaagccgaaccaattggtctagcac

SEQ ID NO: 20885 - DNA, 60 bp, Artificial
  Synthetic oligonucleotide
ccacaggactatgtggcctccttcgcaggttgatctggtggacatcggtattaaacagcg

SEQ ID NO: 20886 - DNA, 60 bp, Artificial
  Synthetic oligonucleotide
gtgggttggattgatgggtggtagactgggttgggtagctgcactcctctccatatggcg

SEQ ID NO: 20887 - DNA, 60 bp, Artificial
  Synthetic oligonucleotide
agaccacctgctcttccacccgtgccggctttgcctgctctcccgccgccaatacctctt

SEQ ID NO: 20888 - DNA, 60 bp, Artificial
  Synthetic oligonucleotide
gggtgtgtgctatacccaactaacccagaacatttcatgcgaaaagccaattccacagag

SEQ ID NO: 20889 - DNA, 60 bp, Artificial
  Synthetic oligonucleotide
gagcttttattcgccgccttatcagctacatgcgtttggctttggaaaattctcccagtt

SEQ ID NO: 20890 - DNA, 60 bp, Artificial
  Synthetic oligonucleotide
gcgggatgacagggttccagtgtcagcggcaccgccagtagatgtatttaggtcaccgtc

SEQ ID NO: 20891 - DNA, 60 bp, Artificial
  Synthetic oligonucleotide
acctcctgcaaggcgtgtaatgactactctggcaaaagctaccatccctcccttagcgtc

SEQ ID NO: 20892 - DNA, 60 bp, Artificial
  Synthetic oligonucleotide
taactggctgtcgtatagggttggctcttggctcggttagtcgtaattctgtggccagcc

SEQ ID NO: 20893 - DNA, 60 bp, Artificial
  Synthetic oligonucleotide
ggctcgtttgtccaacaaagtcttccgcttttgcgggaacacaggggaggtagcacgtca

SEQ ID NO: 20894 - DNA, 60 bp, Artificial
  Synthetic oligonucleotide
ggtctcagttgttcatcgggtgagtaatatgcccatctaaatgcttcacaaatagggacg

SEQ ID NO: 20895 - DNA, 60 bp, Artificial
  Synthetic oligonucleotide
ggttggtccgtgagccgtcctccaatttctacgcatttcgacgcagctgcggaatggttg

SEQ ID NO: 20896 - DNA, 60 bp, Artificial
  Synthetic oligonucleotide
cggtgcacacgtcgcagctaggaagcaaggtattcttaacctgcagagctggcgaccact

SEQ ID NO: 20897 - DNA, 60 bp, Artificial
  Synthetic oligonucleotide
ccttggtgaagttggatggacctggaccgagtttgaccatcagcggcggcagtggtctgc

SEQ ID NO: 20898 - DNA, 60 bp, Artificial
  Synthetic oligonucleotide
caagcgaagcgtgcgactttgagccgctaccagaacgagcaacaccgtaatcaggcatca

SEQ ID NO: 20899 - DNA, 60 bp, Artificial
  Synthetic oligonucleotide
ggaggaaaccgaattgccgggttacactcgtcattctttctgccctaccgggaccaccgg

SEQ ID NO: 20900 - DNA, 60 bp, Artificial
  Synthetic oligonucleotide
ttttccagcgcccaccacctgagattgccccacagcaccacgtcactacatccagccaac

SEQ ID NO: 20901 - DNA, 60 bp, Artificial
  Synthetic oligonucleotide
tacttcgccgcgctcgaggggatagttcctcttctaaggcctccaataagctcactatac

SEQ ID NO: 20902 - DNA, 60 bp, Artificial
  Synthetic oligonucleotide
gccgcatactaaattctacgattttctcagcaactttgagccgatgacgcgccaaattcc

SEQ ID NO: 20903 - DNA, 60 bp, Artificial
  Synthetic oligonucleotide
ctccgaagttgaagcctgaggttgtacgcgagaacgctaaacaggcagtagtgtatgggg

SEQ ID NO: 20904 - DNA, 60 bp, Artificial
  Synthetic oligonucleotide
ccctgggagcgactggtcagacatgctttccatggaggttttgggttggggtctgcagtg

SEQ ID NO: 20905 - DNA, 60 bp, Artificial
  Synthetic oligonucleotide
tgatggacggctcactctacttaccgcttcgacctctccgatagctgtagggccaaccgg

SEQ ID NO: 20906 - DNA, 60 bp, Artificial
  Synthetic oligonucleotide
cgctggcgcgtatacctgtattttcaatgtatttcccgatggcgcgatttctggacacgg

SEQ ID NO: 20907 - DNA, 60 bp, Artificial
  Synthetic oligonucleotide
ggccaggacaacagttgcaagggtctgggtttcaccgcccatcacctgctttacttacag

SEQ ID NO: 20908 - DNA, 58 bp, Artificial
  Synthetic oligonucleotide
acacattcacttcccgccgctgtggccattacacccaggccggcctaataggaagaga

SEQ ID NO: 20909 - DNA, 60 bp, Artificial
  Synthetic oligonucleotide
agctgtatatcccaccatttcggcctctgcttttgctaagtctattagcgtttcctctcc

SEQ ID NO: 20910 - DNA, 60 bp, Artificial
  Synthetic oligonucleotide
gctggggatacggtagaatggaatgctcctgatgctcattatgttaattacgttagtgac

SEQ ID NO: 20911 - DNA, 60 bp, Artificial
  Synthetic oligonucleotide
tgaaatcgtattcccaccagcgcaccggctcccagactactgcgctatccagccctgcaa

SEQ ID NO: 20912 - DNA, 60 bp, Artificial
  Synthetic oligonucleotide
gagcccaatggggtcaactaaatggcagaaagtcggcgcggcaattgagacgtggctata

SEQ ID NO: 20913 - DNA, 60 bp, Artificial
  Synthetic oligonucleotide
gccgtcgccgtttactatcaatgtgttctgtgctttaatggcatggttggggccgatgtg

SEQ ID NO: 20914 - DNA, 60 bp, Artificial
  Synthetic oligonucleotide
gcagagtacgcttggcaatgacttgagagcagatggagcctctgtaacttatactagcat

SEQ ID NO: 20915 - DNA, 60 bp, Artificial
  Synthetic oligonucleotide
ggctttcgcaagactagccccgcattgcggtttgacacccgtctatggcctgcgtattgg

SEQ ID NO: 20916 - DNA, 60 bp, Artificial
  Synthetic oligonucleotide
cgcgatgtcagtgttgtaattgccttccacgcactgcgcttcccaagctaaccgttcttc

SEQ ID NO: 20917 - DNA, 60 bp, Artificial
  Synthetic oligonucleotide
gggaatatagagggacggactttcgtttacccgagatcttaccctccgccgtaaatgtgc

SEQ ID NO: 20918 - DNA, 60 bp, Artificial
  Synthetic oligonucleotide
ccgggtttggcgtagatcttctggacagatcatgctattttcttgcacgatacgcactac

SEQ ID NO: 20919 - DNA, 60 bp, Artificial
  Synthetic oligonucleotide
cccgtcatctttgacagatggagtcttttgtgccgccgcctcgtgtgtttgctccgacgg

SEQ ID NO: 20920 - DNA, 60 bp, Artificial
  Synthetic oligonucleotide
aatagctcttgttgccttgggttggggtgcttcttgtcgtaggggaatagcaagtatccg

SEQ ID NO: 20921 - DNA, 60 bp, Artificial
  Synthetic oligonucleotide
catttcttaactcattgcatccgaccgtgcctttggggcaggaaaactttgaagcgttta

SEQ ID NO: 20922 - DNA, 60 bp, Artificial
  Synthetic oligonucleotide
cccgtagccttttattcggtgtttcccttttgttatcatgagttcatgcccgtgttgcgt

SEQ ID NO: 20923 - DNA, 60 bp, Artificial
  Synthetic oligonucleotide
ccccgtcattaaatactcgttgacagcttcataagggcagcaacctttacttattgggag

SEQ ID NO: 20924 - DNA, 60 bp, Artificial
  Synthetic oligonucleotide
ctcacaggcccctgcaaaatacaatggaggcgtcaaaagccaaggaggtaccagccagcg

SEQ ID NO: 20925 - DNA, 60 bp, Artificial
  Synthetic oligonucleotide
ccaagcaacatcagtatgacctcttttgaacccgccagaaaccccatctcacctcccgtg

SEQ ID NO: 20926 - DNA, 60 bp, Artificial
  Synthetic oligonucleotide
cgcccacatagccacgaagtacacccctgccacattcaagtcatcctccaacctggccca

SEQ ID NO: 20927 - DNA, 60 bp, Artificial
  Synthetic oligonucleotide
tggagactttcacgtaaatgttgtctggatggtcgatgttgagatgttcgggtgcggtgg

SEQ ID NO: 20928 - DNA, 60 bp, Artificial
  Synthetic oligonucleotide
gtgtgccacctcctcttgaccgcagccacgaatccccagaagagttcttcccgccacaaa

SEQ ID NO: 20929 - DNA, 60 bp, Artificial
  Synthetic oligonucleotide
ccccagtgaggccctcattatgatggagaaggcggtccgtggcgcgttcgcggttcctga

SEQ ID NO: 20930 - DNA, 60 bp, Artificial
  Synthetic oligonucleotide
tcgtcggtccgtcgtcctccttcaccaccccgatatcccgcacaacatgcctatcccggc

SEQ ID NO: 20931 - DNA, 60 bp, Artificial
  Synthetic oligonucleotide
ttaaagttgatgacggtgacctgggcgggcttaaagtcggggagggagcgttcggggtct

SEQ ID NO: 20932 - DNA, 60 bp, Artificial
  Synthetic oligonucleotide
acacttgtccgtgacggcctacgtcgattcccctacctcgcagatgcgcccggcccatgt

SEQ ID NO: 20933 - DNA, 60 bp, Artificial
  Synthetic oligonucleotide
ccgagaacgcatcgcggttcgcatccactctaaaagcatgcgtcacgcagagccccgaaa

SEQ ID NO: 20934 - DNA, 60 bp, Artificial
  Synthetic oligonucleotide
gcagcattgccttccataaagtgcagcatcaacgggtccggcttctcgtctacgaagggc

SEQ ID NO: 20935 - DNA, 60 bp, Artificial
  Synthetic oligonucleotide
gcgcagataagccaactgagcagaacagaacagagagagaggttgccgcgtcgaacactg

SEQ ID NO: 20936 - DNA, 60 bp, Artificial
  Synthetic oligonucleotide
cgagccgcgatggaccccagaccacttgttctgctcctcctcctagcgtcccatataagt

SEQ ID NO: 20937 - DNA, 60 bp, Artificial
  Synthetic oligonucleotide
tttcgccgcgcagaagttggaaggatgtaccggagcctgcgaccgccgacgtcgattcct

SEQ ID NO: 20938 - DNA, 60 bp, Artificial
  Synthetic oligonucleotide
tgcgccgctgcgtaagtgaagttggacctccgccagagcctctagaatagcgatggagtc

SEQ ID NO: 20939 - DNA, 60 bp, Artificial
  Synthetic oligonucleotide
cgataggttgcgaccgccttccggagtttgacgtagtatgcccgcgagactggatcggat

SEQ ID NO: 20940 - DNA, 60 bp, Artificial
  Synthetic oligonucleotide
tgaacccgccccaagtcacgtaagtcaactcaccgaaagaggacacagagccatatccgc

SEQ ID NO: 20941 - DNA, 60 bp, Artificial
  Synthetic oligonucleotide
cgatccaggcccacgaccgtcagtaaccgtttggtggttgtgagcacccgccgccgctct

SEQ ID NO: 20942 - DNA, 60 bp, Artificial
  Synthetic oligonucleotide
cagaccttcccgaacccaagctctatttcgtccgcttgtcaccccatgcagtgcctccag

SEQ ID NO: 20943 - DNA, 60 bp, Artificial
  Synthetic oligonucleotide
atcagaccaggaacgacaagacggccacgcttcagcaggtcaatagcatctccggggtgg

SEQ ID NO: 20944 - DNA, 60 bp, Artificial
  Synthetic oligonucleotide
aagtccgccacgtcttcgtcgctgctgatcgtctctgggtgaagcgtttctgccatcgtg

SEQ ID NO: 20945 - DNA, 60 bp, Artificial
  Synthetic oligonucleotide
gagcggacccctcaccagcggcaacaacggtctcagcttagcggccgtcacacccctagc

SEQ ID NO: 20946 - DNA, 60 bp, Artificial
  Synthetic oligonucleotide
acgctctctacaacgttccggccggctccacgctgctgaccatcaatattcccgccagaa

SEQ ID NO: 20947 - DNA, 60 bp, Artificial
  Synthetic oligonucleotide
tccgttgtccctcatcccttcgacagcaccaaccccggcgatttccccgcgcagtacagt

SEQ ID NO: 20948 - DNA, 60 bp, Artificial
  Synthetic oligonucleotide
agaagtcgttggcaaacctgaagagttcgtgtctccgggcggccccgctgagctcgtctt

SEQ ID NO: 20949 - DNA, 60 bp, Artificial
  Synthetic oligonucleotide
cgggtaccaacttcttcgatcccaatgcctcctccgatctatcctttctgacaccaccga

SEQ ID NO: 20950 - DNA, 60 bp, Artificial
  Synthetic oligonucleotide
ggtgcgtgactgtagaagccacacccctacctgtaccgataaggcacaccctgagcaaac

SEQ ID NO: 20951 - DNA, 60 bp, Artificial
  Synthetic oligonucleotide
aaccggttcttctcgattacgccgttctgttcggccagagccctctttcccgcctcgcta

SEQ ID NO: 20952 - DNA, 60 bp, Artificial
  Synthetic oligonucleotide
tgagttcggactgcctgtgtcccttcgatctgattttcccgggtcctaccgtgcggcact

SEQ ID NO: 20953 - DNA, 60 bp, Artificial
  Synthetic oligonucleotide
ttaaaaggcgcgaagaccaccgacagcggcacctacaagtccacggtgaacctcgaccag

SEQ ID NO: 20954 - DNA, 60 bp, Artificial
  Synthetic oligonucleotide
tgtaaatgtgctgaaccgcaaccccgtagaccgcgcccaccccagcatcaaaggtaacgc

SEQ ID NO: 20955 - DNA, 60 bp, Artificial
  Synthetic oligonucleotide
attgctgctgccaccaggcgcaacttcatcatgagcaacattgccgactacctgcccgac

SEQ ID NO: 20956 - DNA, 60 bp, Artificial
  Synthetic oligonucleotide
gggttcggggacggagggagggcatgtcgcacgctgttcgcggacgtaattggaaaaggt

SEQ ID NO: 20957 - DNA, 60 bp, Artificial
  Synthetic oligonucleotide
ggtgtgagtccggaaacacgtaaactccgtcacttcctgtgtcgtcattgccctcgcccc

SEQ ID NO: 20958 - DNA, 60 bp, Artificial
  Synthetic oligonucleotide
caaccgtacgctagccctcacgagaccaatgttatcgcggccaatgtcctcgactcgggt

SEQ ID NO: 20959 - DNA, 60 bp, Artificial
  Synthetic oligonucleotide
gctatctttaccatccaataccccgagccgccgcatttgactgacaacccaggggccgtc

SEQ ID NO: 20960 - DNA, 60 bp, Artificial
  Synthetic oligonucleotide
catcatcctcctccccggctgcgcggtcgactttacgttcagcaggcttagtcttctgct

SEQ ID NO: 20961 - DNA, 60 bp, Artificial
  Synthetic oligonucleotide
tatgctcgcaaactctctccctcatttctcgctcctctctccagccacaccgcacccctc

SEQ ID NO: 20962 - DNA, 60 bp, Artificial
  Synthetic oligonucleotide
tcaggacaacgtgcgtaacaactccggctttatcgcccctcgcagctggcccgtatggac

SEQ ID NO: 20963 - DNA, 60 bp, Artificial
  Synthetic oligonucleotide
tccaccataccttccaccacggcttcgtcgccctggtacgcgaaaccgcaaaagtcaacc

SEQ ID NO: 20964 - DNA, 60 bp, Artificial
  Synthetic oligonucleotide
cgccctaccgcgacatcctgcaccgtaaccaagagcgcacctattactggtggaccaaga

SEQ ID NO: 20965 - DNA, 60 bp, Artificial
  Synthetic oligonucleotide
cccaaggccatcgcgagctatcacatctttgccgtcaccgcttccatccctctaagctgc

SEQ ID NO: 20966 - DNA, 60 bp, Artificial
  Synthetic oligonucleotide
tatcggcgccattccgggcatcgcaggcaccgccgtgggcatcgccaatctgaaggagca

SEQ ID NO: 20967 - DNA, 60 bp, Artificial
  Synthetic oligonucleotide
catccaggcgctggtcaacgacgtgatccacggacagaaccggacattgcaagacgagct

SEQ ID NO: 20968 - DNA, 60 bp, Artificial
  Synthetic oligonucleotide
ctcgtcctcaacaccaacgggctcagcatcaacgcagacccgcaaaccctcgcattcaac

SEQ ID NO: 20969 - DNA, 60 bp, Artificial
  Synthetic oligonucleotide
ttgcgtggccccaacccgtgctctgaactcttcaggaccccagtcttgatgtacagccag

SEQ ID NO: 20970 - DNA, 60 bp, Artificial
  Synthetic oligonucleotide
gcgcccagtgactgtactttattgcgccaattcaccacgcccgggagatttcgaaattgc

SEQ ID NO: 20971 - DNA, 60 bp, Artificial
  Synthetic oligonucleotide
acatttcggccccaccggttcttcacgatcttggccttgctagactgctccttcagcgcg

SEQ ID NO: 20972 - DNA, 60 bp, Artificial
  Synthetic oligonucleotide
agtccaagcagccgccgccgttagcccaagagcaacaacagcgccaaggctaccgctcgt

SEQ ID NO: 20973 - DNA, 60 bp, Artificial
  Synthetic oligonucleotide
gccgtgatccatgcggttaccgcccgcgtgtcgaacccaggtgtgcgacgtcagacaacg

SEQ ID NO: 20974 - DNA, 60 bp, Artificial
  Synthetic oligonucleotide
gagcccacccttctttatgttttgtttgaagtctttgacgtggtccgtgtgcaccagccg

SEQ ID NO: 20975 - DNA, 60 bp, Artificial
  Synthetic oligonucleotide
actaaagcaaggcctgcccaccacccgtcccatcgcgcccatggctaccggagtgctggg

SEQ ID NO: 20976 - DNA, 60 bp, Artificial
  Synthetic oligonucleotide
ccgaacggtaagagcctagcatgtagaactggttgacggcctggtaggcgcagcatccct

SEQ ID NO: 20977 - DNA, 60 bp, Artificial
  Synthetic oligonucleotide
cggcctggcgcaaaatctcctgcacgtctcctgagttgtcttgataggcgatctcggcca

SEQ ID NO: 20978 - DNA, 60 bp, Artificial
  Synthetic oligonucleotide
ccggctctccgcaattctggaagcggtggtcccggcgcgcgcaaaccccacgcacgagaa

SEQ ID NO: 20979 - DNA, 60 bp, Artificial
  Synthetic oligonucleotide
gccactgggtcgtcttcattcagccgccgcaccgtgcgcttacctcccttgccgtgctta

SEQ ID NO: 20980 - DNA, 60 bp, Artificial
  Synthetic oligonucleotide
cagcccgagcagccggagcagagagccttgggtccggtttctatgccaaaccttgtgccg

SEQ ID NO: 20981 - DNA, 60 bp, Artificial
  Synthetic oligonucleotide
gtgcagcttcccgttcatccgcccgcgatgacaagttgacggctcttttggcacaattgg

SEQ ID NO: 20982 - DNA, 60 bp, Artificial
  Synthetic oligonucleotide
gttgctacatttctgggaacggggccgaggtggagatagatacggaggatagggtggcct

SEQ ID NO: 20983 - DNA, 60 bp, Artificial
  Synthetic oligonucleotide
acctgctctacggcatctcgatccagcatatctcctcgtttcgcgggttggggcggcttt

SEQ ID NO: 20984 - DNA, 60 bp, Artificial
  Synthetic oligonucleotide
agcctgtgatgctggatgtgaccgaggagctgaggcccgatcacttggtgctggcctgca

SEQ ID NO: 20985 - DNA, 60 bp, Artificial
  Synthetic oligonucleotide
cgcgtccaagacctctacggaggtgcaaacggacccgtggatgtttcgcgtttcagcccc

SEQ ID NO: 20986 - DNA, 60 bp, Artificial
  Synthetic oligonucleotide
ccctcccgctccagaacaacatacagcgcttccacagcggcagccataacagtcagcctt

SEQ ID NO: 20987 - DNA, 60 bp, Artificial
  Synthetic oligonucleotide
aacacatacaagttactccgccctaaaacctacgtcacccgccccgttcccacgccccgc

SEQ ID NO: 20988 - DNA, 60 bp, Artificial
  Synthetic oligonucleotide
cactgcagggaaccgggactggaacaatgacagtggagagcccaggactcgtaaccatgg

SEQ ID NO: 20989 - DNA, 60 bp, Artificial
  Synthetic oligonucleotide
gcgcgctggagcaaaacccaaatagcaagccgctcatggcgcagctgttccttatagtgc

SEQ ID NO: 20990 - DNA, 60 bp, Artificial
  Synthetic oligonucleotide
cggctattaccaccacacctcgtaataaccttaatccccgtagttggcccgctgccctgg

SEQ ID NO: 20991 - DNA, 60 bp, Artificial
  Synthetic oligonucleotide
ccttctgcagctagccaactaccttgcctaccactccgacatcatggaagacgtgagcgg

SEQ ID NO: 20992 - DNA, 60 bp, Artificial
  Synthetic oligonucleotide
gtggctgttgatgtggtgaaagtagaagtccctgcgacgggccgaacactcgtgctggct

SEQ ID NO: 20993 - DNA, 60 bp, Artificial
  Synthetic oligonucleotide
ctccacgcctttgccaactggccccaaactcccatggatcacaaccccaccatgaacctt

SEQ ID NO: 20994 - DNA, 60 bp, Artificial
  Synthetic oligonucleotide
gcccagtctgcaagatgagggttggaagcgacgaatgagctccacaggtcacgggccatt

SEQ ID NO: 20995 - DNA, 60 bp, Artificial
  Synthetic oligonucleotide
acgttgcgatactggtgtttagtgctccacttaaactcaggcacaaccatccgcggcagc

SEQ ID NO: 20996 - DNA, 60 bp, Artificial
  Synthetic oligonucleotide
cgacgcaaactaatgatggccgcagtgctcgttaccgtggagcttgagtgcatgcagcgg

SEQ ID NO: 20997 - DNA, 60 bp, Artificial
  Synthetic oligonucleotide
taggtggcgccctcttcctcccatgcgtgtgaccccgaagcccctcatcggctgaagcag

SEQ ID NO: 20998 - DNA, 60 bp, Artificial
  Synthetic oligonucleotide
agaaaggcgtctaaccagtcacagtcgcaaggtaggctgagcaccgtggcgggcggcagc

SEQ ID NO: 20999 - DNA, 60 bp, Artificial
  Synthetic oligonucleotide
cgaggacttgcttaacgagtctgggcaacctttggacttgagctgtaaacgccccaggcc

SEQ ID NO: 21000 - DNA, 60 bp, Artificial
  Synthetic oligonucleotide
gccgccgcagccctatcagcagcagccgcgggcccttgcttcccaggatggcacccaaaa

SEQ ID NO: 21001 - DNA, 60 bp, Artificial
  Synthetic oligonucleotide
ggggcgcgttcgtcctcactctcttccgcatcgctgtctgcgagggccagctgttggggt

SEQ ID NO: 21002 - DNA, 60 bp, Artificial
  Synthetic oligonucleotide
agcgatgtgcccctcgccatagcggatgtcagccttgcctacgaacgccacctgttctca

SEQ ID NO: 21003 - DNA, 60 bp, Artificial
  Synthetic oligonucleotide
cctctataaacattccagcaccttcaaccatgcccaaataattctcatctcgccaccttc

SEQ ID NO: 21004 - DNA, 60 bp, Artificial
  Synthetic oligonucleotide
aaaaccaggtgcgggcgtgacaaacagatctgcgtctccggtctcgtcgcttagctcgct

SEQ ID NO: 21005 - DNA, 60 bp, Artificial
  Synthetic oligonucleotide
tacaacatggcagtggtctcctcagcgatgattcgcaccgcccgcagcatgagacgcctt

SEQ ID NO: 21006 - DNA, 60 bp, Artificial
  Synthetic oligonucleotide
aacaatggttcaaatgctggaaccttatcttctcaaactcaacaactgaatgtagtgcta

SEQ ID NO: 21007 - DNA, 60 bp, Artificial
  Synthetic oligonucleotide
gtcctaattatattggatttcgtgataactttattggtattatgttctataacaatggtt

SEQ ID NO: 21008 - DNA, 51 bp, Artificial
  Synthetic oligonucleotide
aaaattcagggatccctttgtggctccatcgtctggagttactacagatcg

SEQ ID NO: 21009 - DNA, 60 bp, Artificial
  Synthetic oligonucleotide
gttactacagatcgatctcaaaagcttcaactacgcattgtcccaattcaaacagaagat

SEQ ID NO: 21010 - DNA, 60 bp, Artificial
  Synthetic oligonucleotide
ttaatctcggagaaaaattcagggatccctttgtggctccatcgtctggagttactacag

SEQ ID NO: 21011 - DNA, 60 bp, Artificial
  Synthetic oligonucleotide
ttagatagaggtccttcatttaaaccttatggagggacggcttataatcctttagcacca

SEQ ID NO: 21012 - DNA, 60 bp, Artificial
  Synthetic oligonucleotide
tcatttaaaccttatggagggacggcttataatcctttagcaccaaaatcagctatgccg

SEQ ID NO: 21013 - DNA, 60 bp, Artificial
  Synthetic oligonucleotide
ctacagatcgatctcaaaagcttcaactacgcattgtcccaattcaaacagaagataatg

SEQ ID NO: 21014 - DNA, 60 bp, Artificial
  Synthetic oligonucleotide
aacagaagataatgaaaatttttataaagctagattcactttaaatgtgggagataatcg

SEQ ID NO: 21015 - DNA, 60 bp, Artificial
  Synthetic oligonucleotide
actatttacattgcgcagctacctcaaacctacgcagcaaatgataaaggagttcctgaa

SEQ ID NO: 21016 - DNA, 60 bp, Artificial
  Synthetic oligonucleotide
cgcagctacctcaaacctacgcagcaaatgataaaggagttcctgaagcgatcgctgtgc

SEQ ID NO: 21017 - DNA, 60 bp, Artificial
  Synthetic oligonucleotide
aatctggccaaacagaagattttgctggggttgataaagtagatccaaccacaacaggag

SEQ ID NO: 21018 - DNA, 60 bp, Artificial
  Synthetic oligonucleotide
ccaaacagaagattttgctggggttgataaagtagatccaaccacaacaggaggtcaggg

SEQ ID NO: 21019 - DNA, 60 bp, Artificial
  Synthetic oligonucleotide
catggggagcttttcgaggatggagttttaatagaataaaagcaacagaaactccaatga

SEQ ID NO: 21020 - DNA, 60 bp, Artificial
  Synthetic oligonucleotide
agatcatggggagcttttcgaggatggagttttaatagaataaaagcaacagaaactcca

SEQ ID NO: 21021 - DNA, 61 bp, Artificial
  Synthetic oligonucleotide
cagaaatctattgctgttgccaggaacatataattatgaatggtactttagaaaagatccc

SEQ ID NO: 21022 - DNA, 60 bp, Artificial
  Synthetic oligonucleotide
catcagaaatctattgctgttgccaggaacatataattatgaatggtactttagaaaaga

SEQ ID NO: 21023 - DNA, 55 bp, Artificial
  Synthetic oligonucleotide
gttgatcttcctgccaacacaaattcttatggttatattaatggaagaattccaa

SEQ ID NO: 21024 - DNA, 60 bp, Artificial
  Synthetic oligonucleotide
catagggtatggtaatataccttctttagaaatgaatctttcagcaaacctacaaaggac

SEQ ID NO: 21025 - DNA, 60 bp, Artificial
  Synthetic oligonucleotide
aagccttcatagggtatggtaatataccttctttagaaatgaatctttcagcaaacctac

SEQ ID NO: 21026 - DNA, 52 bp, Artificial
  Synthetic oligonucleotide
cctccagctaaagggaatgctatgactgttgacaccggccgcaatacagcag

SEQ ID NO: 21027 - DNA, 60 bp, Artificial
  Synthetic oligonucleotide
tgtagtgctagatctcaatgatagaaatagtgaattgagttatcaatatttattggcaga

SEQ ID NO: 21028 - DNA, 60 bp, Artificial
  Synthetic oligonucleotide
ggttcaaatgctggaaccttatcttctcaaactcaacaactgaatgtagtgctagatctc

SEQ ID NO: 21029 - DNA, 55 bp, Artificial
  Synthetic oligonucleotide
tgtaaatcaacctactcgaagtggaattagtgttgcatacctgcggctgcccttc

SEQ ID NO: 21030 - DNA, 60 bp, Artificial
  Synthetic oligonucleotide
aaaatgtactttatgcaaattctagtcattcactaaatatggtttttacagtagacagta

SEQ ID NO: 21031 - DNA, 60 bp, Artificial
  Synthetic oligonucleotide
agttcctgaagcgatcgctgtgcaaacgacagctataaaaccaaatcctcaatctggcca

SEQ ID NO: 21032 - DNA, 60 bp, Artificial
  Synthetic oligonucleotide
ctgaagcgatcgctgtgcaaacgacagctataaaaccaaatcctcaatctggccaaacag

SEQ ID NO: 21033 - DNA, 50 bp, Artificial
  Synthetic oligonucleotide
aaattggccttatccactagtaggaagagatgcagtagaaaatcaaacta

SEQ ID NO: 21034 - DNA, 53 bp, Artificial
  Synthetic oligonucleotide
gataaatatatgtggcaaattccattctctagtaattttctcaatatggggaa

SEQ ID NO: 21035 - DNA, 60 bp, Artificial
  Synthetic oligonucleotide
acaacaggaggtcagggaagaatattaagcgcaactagtgtaggagatgtatttcctgct

SEQ ID NO: 21036 - DNA, 60 bp, Artificial
  Synthetic oligonucleotide
ggaggtcagggaagaatattaagcgcaactagtgtaggagatgtatttcctgcttatggt

SEQ ID NO: 21037 - DNA, 60 bp, Artificial
  Synthetic oligonucleotide
atttcaactgaagctgttactagagtatacctcaatactacaaccactgaagatagagta

SEQ ID NO: 21038 - DNA, 60 bp, Artificial
  Synthetic oligonucleotide
ctgaagctgttactagagtatacctcaatactacaaccactgaagatagagtaagtggca

SEQ ID NO: 21039 - DNA, 60 bp, Artificial
  Synthetic oligonucleotide
ttccaaattggtttgaaattaaacgagaaccaaattatgatccagaagggtataacataa

SEQ ID NO: 21040 - DNA, 61 bp, Artificial
  Synthetic oligonucleotide
ggtttgaaattaaacgagaaccaaattatgatccagaagggtataacataagtcagtctac

SEQ ID NO: 21041 - DNA, 60 bp, Artificial
  Synthetic oligonucleotide
catccaatgggattctagtgttccatggcctggagatgataggctactgattccaaattg

SEQ ID NO: 21042 - DNA, 60 bp, Artificial
  Synthetic oligonucleotide
ccaatgggattctagtgttccatggcctggagatgataggctactgattccaaattggtt

SEQ ID NO: 21043 - DNA, 57 bp, Artificial
  Synthetic oligonucleotide
ataaacattatggctttatagaaaactttgaaccaatgagtagacaagtccctgtat

SEQ ID NO: 21044 - DNA, 60 bp, Artificial
  Synthetic oligonucleotide
acttgtataatgcttatttgcaagatcccactaatatgcaaatttggaataattgcggtt

SEQ ID NO: 21045 - DNA, 60 bp, Artificial
  Synthetic oligonucleotide
tataacataagtcagtctactttaactaaagatttttttatggtgcaaatggcagcaaat

SEQ ID NO: 21046 - DNA, 60 bp, Artificial
  Synthetic oligonucleotide
ggcagcaaattataatcaagcatatcaaggttacaaattgccttcaacatataaacatta

SEQ ID NO: 21047 - DNA, 60 bp, Artificial
  Synthetic oligonucleotide
agctgtggagggcatggctgaagaggagggtttgcatttactcgctggcgcggcctttga

SEQ ID NO: 21048 - DNA, 60 bp, Artificial
  Synthetic oligonucleotide
agcgacactatcaccgccgccgatggtattaaagttggaacagacaccgcccaggcaggc

SEQ ID NO: 21049 - DNA, 60 bp, Artificial
  Synthetic oligonucleotide
cgagctgccaccgtcaattcttcttccaacagacgaataagctcggccaccgtctcgcgc

SEQ ID NO: 21050 - DNA, 60 bp, Artificial
  Synthetic oligonucleotide
gccccacttcctcatccgcccaaacttacaagcacgccaaagccacacctccacccaatc

SEQ ID NO: 21051 - DNA, 60 bp, Artificial
  Synthetic oligonucleotide
gtggaattccgcagtggacagttacgaccctgacgttcgcgttattgagaatcacggggt

SEQ ID NO: 21052 - DNA, 60 bp, Artificial
  Synthetic oligonucleotide
ggccacggccggatgcagaggaaaccttagtaacgcacacaacagaaccgccgtcctatg

SEQ ID NO: 21053 - DNA, 60 bp, Artificial
  Synthetic oligonucleotide
cgcagcaacgctcaaagaaacagcagcaacggcaggaaatctgggaggaagaatcttggg

SEQ ID NO: 21054 - DNA, 60 bp, Artificial
  Synthetic oligonucleotide
acgagatgggctttccctgtagcgattcggaagacgagcaagacgagaacggaatggcgc

SEQ ID NO: 21055 - DNA, 60 bp, Artificial
  Synthetic oligonucleotide
tacactttccgccatggctacgtgcgccaagcctgtaaaatttctaatgtggagctgagc

SEQ ID NO: 21056 - DNA, 57 bp, Artificial
  Synthetic oligonucleotide
ctccatacgaccctctgacactgtggacaactcctgacccaccaccaaactgcagcc

SEQ ID NO: 21057 - DNA, 60 bp, Artificial
  Synthetic oligonucleotide
gctactgcagaccccataagtgttcgcaacaacgctcttaccctacctacggcagatccg

SEQ ID NO: 21058 - DNA, 60 bp, Artificial
  Synthetic oligonucleotide
ggtagcacgtctttaagaaacgtcaccacctcaaaatctaagccatgcaaatagttccgt

SEQ ID NO: 21059 - DNA, 60 bp, Artificial
  Synthetic oligonucleotide
gcggcccactagaatcggcaacagcagcaacaaggaaagtcctgaggcgcgcgagttaag

SEQ ID NO: 21060 - DNA, 60 bp, Artificial
  Synthetic oligonucleotide
cagcgcgcaagttgacttcgcacaggcgggtaagagcaggctggaggtgcaggtaatact

SEQ ID NO: 21061 - DNA, 60 bp, Artificial
  Synthetic oligonucleotide
ggtacgagcccggcgtaaccaaatactgctagaacaagccgctctcaccgctacaccacg

SEQ ID NO: 21062 - DNA, 60 bp, Artificial
  Synthetic oligonucleotide
acagcccctagccgtagacgaggtccatcacgccgtagacgtcgacgcaaagccacttta

SEQ ID NO: 21063 - DNA, 60 bp, Artificial
  Synthetic oligonucleotide
ccccagtgccgccttagacatgacagcgcgcaatatggagccgtccttctacgcttccaa

SEQ ID NO: 21064 - DNA, 60 bp, Artificial
  Synthetic oligonucleotide
tatggctttaacggcgcgcagtcctgatgcttttcgccagcagccccaagctaaccgctt

SEQ ID NO: 21065 - DNA, 60 bp, Artificial
  Synthetic oligonucleotide
gggaggaaagacagccaagaccagttcgccctcctaggcaacgttggcagcgacgcaaaa

SEQ ID NO: 21066 - DNA, 60 bp, Artificial
  Synthetic oligonucleotide
tactggtatttaaaatcttggtcgtcacaccctccgtgttcccacagtaggaagttagtt

SEQ ID NO: 21067 - DNA, 60 bp, Artificial
  Synthetic oligonucleotide
gccgtggttggtgggcagggatatgtttctgtactgcaaacgctgatgccacttgaattc

SEQ ID NO: 21068 - DNA, 60 bp, Artificial
  Synthetic oligonucleotide
ccctaaagcgcgagtacgacgaagtgtacgcagacgatgacattttggagcaagcggcac

SEQ ID NO: 21069 - DNA, 60 bp, Artificial
  Synthetic oligonucleotide
gcggccactaaagaccgatgcgttaccctagaaaagtcaacccaaactgtacaaggaccg

SEQ ID NO: 21070 - DNA, 60 bp, Artificial
  Synthetic oligonucleotide
acattaagcgacgatcttggagtgtaccgcaatgaccgaatccacaaagcagtaagcgcc

SEQ ID NO: 21071 - DNA, 60 bp, Artificial
  Synthetic oligonucleotide
gcacactgggaaatgatcttcgggtggacggagccagcgttcgctttgacaacattgccc

SEQ ID NO: 21072 - DNA, 60 bp, Artificial
  Synthetic oligonucleotide
cggacgcggatgttttgcttggccagttcccctaacagacgctctccgcctaaggaaagt

SEQ ID NO: 21073 - DNA, 60 bp, Artificial
  Synthetic oligonucleotide
ttctcacgacacgtcacatccggcgcgcccggctcccacgccgcgccccacttcctcatc

SEQ ID NO: 21074 - DNA, 60 bp, Artificial
  Synthetic oligonucleotide
gccttgcagcggttgtaataaagctaaatctgccactacccgttccgcaagcactgcctg

SEQ ID NO: 21075 - DNA, 60 bp, Artificial
  Synthetic oligonucleotide
agtacctgagtcccggtctggtgcaattcgcccgcgccacggacacctacttcaccctgg

SEQ ID NO: 21076 - DNA, 60 bp, Artificial
  Synthetic oligonucleotide
ggcagcggtagttgttgctcgcataaattcgcgggctcggttccaaatattgcgcagggg

SEQ ID NO: 21077 - DNA, 60 bp, Artificial
  Synthetic oligonucleotide
gcgctacggctgtcatggagaaggacaaaagtctactcataccccaagacgcaccggttg

SEQ ID NO: 21078 - DNA, 60 bp, Artificial
  Synthetic oligonucleotide
gtcgagctaaccgcagccgcgcagatgagcttcttgctttaagggctggcgcttccatac

SEQ ID NO: 21079 - DNA, 60 bp, Artificial
  Synthetic oligonucleotide
tcctgcgacaaatgcgacctcagcccagggcaaccacggcctcagcagcggtggcgcttt

SEQ ID NO: 21080 - DNA, 60 bp, Artificial
  Synthetic oligonucleotide
agttcagcgagtcaccatcactgacgcccgccgccggacctgtccctacgtttacaaagc

SEQ ID NO: 21081 - DNA, 60 bp, Artificial
  Synthetic oligonucleotide
acactcaggccataaagaattttccgaagtactcaacgtagcttttgactgttcctcaca

SEQ ID NO: 21082 - DNA, 60 bp, Artificial
  Synthetic oligonucleotide
tcaaccccgtttacccttttgacccatttgacacatcagacgtaccctttgttacacccc

SEQ ID NO: 21083 - DNA, 60 bp, Artificial
  Synthetic oligonucleotide
ggcttttcatccagatatagtactgcttccaggttgcggggttgattttacagagagcag

SEQ ID NO: 21084 - DNA, 60 bp, Artificial
  Synthetic oligonucleotide
ggggcgggtccttggtcttcatcgctttcttctgcttcgctgtttacgagcgccaactgg

SEQ ID NO: 21085 - DNA, 60 bp, Artificial
  Synthetic oligonucleotide
agaccactgtcgccaacctcactgctttgctcgagacatctgtgtctttacctactttga

SEQ ID NO: 21086 - DNA, 60 bp, Artificial
  Synthetic oligonucleotide
ttttcctgagacaccacctccctcttacgaaaccgtgatggcagcggcgccaccctacgt

SEQ ID NO: 21087 - DNA, 60 bp, Artificial
  Synthetic oligonucleotide
cccctgggctttggacttctgcctacctgcgcaaatttgaaccccaagattaccacgccc

SEQ ID NO: 21088 - DNA, 60 bp, Artificial
  Synthetic oligonucleotide
tccatcagccgcccaaggattctctcgttgattataatctccaaataaaattgctcgatg

SEQ ID NO: 21089 - DNA, 60 bp, Artificial
  Synthetic oligonucleotide
tgccaccttttgttgccggtcgttacttttgcataggagctgcacgtactagcccctgtc

SEQ ID NO: 21090 - DNA, 60 bp, Artificial
  Synthetic oligonucleotide
cgcgctcggtacacttatgctcccacacgcagcaaccggtgggttcccaggaattctgtt

SEQ ID NO: 21091 - DNA, 60 bp, Artificial
  Synthetic oligonucleotide
tacgcattcaccagccacaccgcggcgtcattgaagcggtctacctgcgcacgcccttct

SEQ ID NO: 21092 - DNA, 60 bp, Artificial
  Synthetic oligonucleotide
ctacgctggtaactacttcaccgcgcaagctttcattggtccaggctaaacgaccgcctt

SEQ ID NO: 21093 - DNA, 60 bp, Artificial
  Synthetic oligonucleotide
gaggagctgagaagtgaccaccttaccctgtcttgcctgcggactgactatgagtcaagt

SEQ ID NO: 21094 - DNA, 60 bp, Artificial
  Synthetic oligonucleotide
cgactgctgcgtgaggaggactttgagccagatgaacattcggggattagttctgcacgg

SEQ ID NO: 21095 - DNA, 60 bp, Artificial
  Synthetic oligonucleotide
ccgggctgggcgcttgcgagggtgcgcttcaggctcatccggctggtcgagaaccgctcc

SEQ ID NO: 21096 - DNA, 60 bp, Artificial
  Synthetic oligonucleotide
gtcaagaggccactcttgagtgccagcgagaagagttttctcctccgcgccgtgagtcaa

SEQ ID NO: 21097 - DNA, 54 bp, Artificial
  Synthetic oligonucleotide
gtcaagaggccactcttgagtgccagcgagaagagttttctcctctgcgccggc

SEQ ID NO: 21098 - DNA, 60 bp, Artificial
  Synthetic oligonucleotide
gtcaagaggccactcttgagtgccagcgagaagagttttctcctccgcgccgcaagtcag

SEQ ID NO: 21099 - DNA, 60 bp, Artificial
  Synthetic oligonucleotide
atgcaacgcatcatggcgctgacgacccgcaaccccgaagcctttagacagcagccccag

SEQ ID NO: 21100 - DNA, 60 bp, Artificial
  Synthetic oligonucleotide
attgagcggcgagccccacggcatgggatgggtaagcgcggaggcgtacatgccacatat

SEQ ID NO: 21101 - DNA, 60 bp, Artificial
  Synthetic oligonucleotide
gcgcgggtgtcaaagatgtaatcgttgcaggtgcgcaccaggtactggtagccgatgaga

SEQ ID NO: 21102 - DNA, 60 bp, Artificial
  Synthetic oligonucleotide
ccgtacgtgcccatagacaaggaggtgaagattgacgggttttacatgcgcatgaccctg

SEQ ID NO: 21103 - DNA, 60 bp, Artificial
  Synthetic oligonucleotide
ttcacgctggccgtgggcgacaaccgggtgctagacatggccagtacctactttgacatc

SEQ ID NO: 21104 - DNA, 60 bp, Artificial
  Synthetic oligonucleotide
actctggccgtgggcgacaaccgggtgctagacatggccagcacttactttgacattcgc

SEQ ID NO: 21105 - DNA, 60 bp, Artificial
  Synthetic oligonucleotide
gcatggtctggttcttttccttgtcggcgcgctccttggcggcgatgttgagctgcacgt

SEQ ID NO: 21106 - DNA, 55 bp, Artificial
  Synthetic oligonucleotide
gagagaatgcattcatgcccgcctcgttccagacgcggctgtagaccacagcccc

SEQ ID NO: 21107 - DNA, 55 bp, Artificial
  Synthetic oligonucleotide
gagagaaagcattcatgcccgcctcgttccagacgcggctgtagaccacagcccc

SEQ ID NO: 21108 - DNA, 60 bp, Artificial
  Synthetic oligonucleotide
catgggatgcgtcagggccgaggcgtacatgccgcagatgtcgtagacgtaaaggggctc

SEQ ID NO: 21109 - DNA, 60 bp, Artificial
  Synthetic oligonucleotide
gtttgtatcacaagagcgaagaccaacttcagcgcactctcgaggacgccgaggctctct

SEQ ID NO: 21110 - DNA, 60 bp, Artificial
  Synthetic oligonucleotide
tatcacaagagcgaagaccaacttcagcgcactctcgaggacgccgaggctctcttcaac

SEQ ID NO: 21111 - DNA, 60 bp, Artificial
  Synthetic oligonucleotide
tcacaagagcgaagaccaacttcagcgcactctcgaggacgccgaggctctcttcaacaa

SEQ ID NO: 21112 - DNA, 60 bp, Artificial
  Synthetic oligonucleotide
ccccgggctgggcgcttgcgagggtgcgcttcaggctcatcctgctggtgctgaagcgga

SEQ ID NO: 21113 - DNA, 60 bp, Artificial
  Synthetic oligonucleotide
tcaagaggccactcttgagtgccagcgagtagagttttctcctccgagccgctccgacac

SEQ ID NO: 21114 - DNA, 60 bp, Artificial
  Synthetic oligonucleotide
accgcggcgtcatcgaggccgtctacctgcgcacgccgttctccgccggaaacgccacca

SEQ ID NO: 21115 - DNA, 60 bp, Artificial
  Synthetic oligonucleotide
gcacaacaccgcttccaccttggaggctatgctgcgcaacgacaccaacgaccagtcctt

SEQ ID NO: 21116 - DNA, 60 bp, Artificial
  Synthetic oligonucleotide
actaccgtggtgcagaacaatgacttcaccccgacggaggcgggcacgcagaccattaac

SEQ ID NO: 21117 - DNA, 60 bp, Artificial
  Synthetic oligonucleotide
gactgctggtgtccgaggtgccccagagcgaggtgtaccagtctgggccggattactttt

SEQ ID NO: 21118 - DNA, 60 bp, Artificial
  Synthetic oligonucleotide
agcgctctggcctccacgcccgaccactgcgtcaccctggaaaagtccacccaaacggtc

SEQ ID NO: 21119 - DNA, 60 bp, Artificial
  Synthetic oligonucleotide
agcacgtctccacgtaacgccggtccctgcgtcgctcacgctccctcctcaatgcaaagt

SEQ ID NO: 21120 - DNA, 60 bp, Artificial
  Synthetic oligonucleotide
tataaaggggcatgaggggtgggcgcggtgtttcaaaatgagcgggacgacggacggcaa

SEQ ID NO: 21121 - DNA, 60 bp, Artificial
  Synthetic oligonucleotide
agatcacggaaccctgccgctgcgcagcagtatcagtggagttcagcgcgtgaccatcac

SEQ ID NO: 21122 - DNA, 60 bp, Artificial
  Synthetic oligonucleotide
ccgctcctaccattaccaccgtcagtgaaaacgttcccgccctcacagatcacggaaccc

SEQ ID NO: 21123 - DNA, 60 bp, Artificial
  Synthetic oligonucleotide
aacgttcccgccctcacagatcacggaaccctgccgctgcgcagcagtatcagtggagtt

SEQ ID NO: 21124 - DNA, 50 bp, Artificial
  Synthetic oligonucleotide
gtgagatccgcgaagactctgtaagcctgaaattgagcccctgacgtttt

SEQ ID NO: 21125 - DNA, 60 bp, Artificial
  Synthetic oligonucleotide
tctcaggaattcccgccggcgcgcaacagaattacggagcgaccataaactgggtggtgc

SEQ ID NO: 21126 - DNA, 60 bp, Artificial
  Synthetic oligonucleotide
gtttcctcggtgtgtgataaccaacccgccgtcgttcagcagggtgtgctaccgctgaag

SEQ ID NO: 21127 - DNA, 51 bp, Artificial
  Synthetic oligonucleotide
gctcgccatggcttacttccgtacgcctttcgctacaggcaacgcggtgta

SEQ ID NO: 21128 - DNA, 51 bp, Artificial
  Synthetic oligonucleotide
tatgagcaaagaaattcccacgccttacatgtggagctaccagccccagat

SEQ ID NO: 21129 - DNA, 59 bp, Artificial
  Synthetic oligonucleotide
agttgggagaatgcattcatgcccgcctcgttccagacgcggctgtaaaccacggcccc

SEQ ID NO: 21130 - DNA, 59 bp, Artificial
  Synthetic oligonucleotide
ttttcggcccggtagaggatctgcctgaagatggcgtgggagttggaagagatggtggg

SEQ ID NO: 21131 - DNA, 60 bp, Artificial
  Synthetic oligonucleotide
ggaagacgtaagcggagagggtttactggagtgccactgccgctgcaacctgtgcacccc

SEQ ID NO: 21132 - DNA, 60 bp, Artificial
  Synthetic oligonucleotide
agatcatcaagaggccactcttgagtgccggcgagtagagttttctcctccgcgctgccg

SEQ ID NO: 21133 - DNA, 60 bp, Artificial
  Synthetic oligonucleotide
ttttcggcccggtagaggatctgcctgaagatggcgtgggagttggaagagatagtgggg

SEQ ID NO: 21134 - DNA, 60 bp, Artificial
  Synthetic oligonucleotide
actgtcttccggatcgctgtccacgagcgccagctgttggggtaggtattccctctcgaa

SEQ ID NO: 21135 - DNA, 60 bp, Artificial
  Synthetic oligonucleotide
cccagggcatgggatgggtaagcgcggaggcgtacatgccgcagatgtcgtagacgtaga

SEQ ID NO: 21136 - DNA, 60 bp, Artificial
  Synthetic oligonucleotide
aactcctcggacgattggacccaggccatgcaacgtataatggcgctgacgacccgcaac

SEQ ID NO: 21137 - DNA, 60 bp, Artificial
  Synthetic oligonucleotide
tataaaagggtgcgggtccctgctcgtcctcactgtcttccggatcgctgtccaggagcg

SEQ ID NO: 21138 - DNA, 60 bp, Artificial
  Synthetic oligonucleotide
gccagctgttggggtaggtattccctctcgaaggctggcataacctcggcactcaggttg

SEQ ID NO: 21139 - DNA, 60 bp, Artificial
  Synthetic oligonucleotide
cgcttcggagtacctgagtccgggtctggtgcagttcgcccgcgccacagacacctactt

SEQ ID NO: 21140 - DNA, 60 bp, Artificial
  Synthetic oligonucleotide
tgcttcggagtacctgagtccgggtctggtgcagttcgcccgcgccacagacacctactt

SEQ ID NO: 21141 - DNA, 60 bp, Artificial
  Synthetic oligonucleotide
agtggaacttccgcaaggatgtcaacatgatcctgcagagttccctcggcaacgacctgc

SEQ ID NO: 21142 - DNA, 60 bp, Artificial
  Synthetic oligonucleotide
tcaaccccttctccggatctcctgggcactacccggacgagttcataccgaacttcgacg

SEQ ID NO: 21143 - DNA, 55 bp, Artificial
  Synthetic oligonucleotide
ttttcacattgcgggtagaaatgcaagggaatatttgtctgaaaatctggtgcag

SEQ ID NO: 21144 - DNA, 60 bp, Artificial
  Synthetic oligonucleotide
atggagccccagcgggagttttttcacattgcgggtagaaatgcaagggaatatttgtct

SEQ ID NO: 21145 - DNA, 60 bp, Artificial
  Synthetic oligonucleotide
acgccaccaacgtgcccatctccatcccctcgcgcaactgggccgccttccgcggatggt

SEQ ID NO: 21146 - DNA, 60 bp, Artificial
  Synthetic oligonucleotide
atgatgccgcagtggtcttacatgcacatcgccggccaggacgcctcggagtacctgagt

SEQ ID NO: 21147 - DNA, 60 bp, Artificial
  Synthetic oligonucleotide
gatgatgccgcagtggtcttacatgcacatcgccggtcaggatgcctcggagtacctgag

SEQ ID NO: 21148 - DNA, 60 bp, Artificial
  Synthetic oligonucleotide
cccagggcatggggtgggtgagcgcggaggcgtacatgccgcagatgtcgtagacgtaga

SEQ ID NO: 21149 - DNA, 65 bp, Artificial
  Synthetic oligonucleotide
ctgcatttacagaaaggaatttgtactgtgttttgcttgactttaatttaagatggtatcagcag

SEQ ID NO: 21150 - DNA, 60 bp, Artificial
  Synthetic oligonucleotide
ctccagcaagtattacaaaacgatacctgtatgaaagagatctgaagaaactgttccagt

SEQ ID NO: 21151 - DNA, 60 bp, Artificial
  Synthetic oligonucleotide
accgcaaacgtgctcccgtaccacaacgtcacacgccacacccactgggaaaacccacac

SEQ ID NO: 21152 - DNA, 60 bp, Artificial
  Synthetic oligonucleotide
ggcagcggatgaagcagcaacgcaagatattaaactggatgaaagatctagatggggcgg

SEQ ID NO: 21153 - DNA, 60 bp, Artificial
  Synthetic oligonucleotide
cggcagtatgacacagaaggagaggaactaagtccaggaaacttcgcccggtgcgataaa

SEQ ID NO: 21154 - DNA, 60 bp, Artificial
  Synthetic oligonucleotide
ttatcgccattaaatctaaaagccatcctaaatggacctctagcccagtagtttaagtac

SEQ ID NO: 21155 - DNA, 60 bp, Artificial
  Synthetic oligonucleotide
gggccaaacttcactccctgctccttctgtgtcagaatacagtagcgtgcctcggtcagc

SEQ ID NO: 21156 - DNA, 60 bp, Artificial
  Synthetic oligonucleotide
gccgcttcccgtactcgctcaaagcttcttaaaacaacttcatttgtactatagccaaca

SEQ ID NO: 21157 - DNA, 60 bp, Artificial
  Synthetic oligonucleotide
cctcctgctaaagctgtgttatttgtgacgtacatcctgttagctacacgattttcccgg

SEQ ID NO: 21158 - DNA, 60 bp, Artificial
  Synthetic oligonucleotide
gtgtcttagtgtgttggcttgcttctttctgtaaaggttctaatttagctgaaactcgcc

SEQ ID NO: 21159 - DNA, 59 bp, Artificial
  Synthetic oligonucleotide
aaaattaaacggttcaaccccttctctgatcccatgtgaaccacatctattacatgaaa

SEQ ID NO: 21160 - DNA, 60 bp, Artificial
  Synthetic oligonucleotide
cagcaccgtaacatggataagtgaaaatgtcccctttgttgcagatcacgggattcagcc

SEQ ID NO: 21161 - DNA, 60 bp, Artificial
  Synthetic oligonucleotide
ccaacactggtcatctttatgtagctaactggccataccctttgattggaccaaatgcta

SEQ ID NO: 21162 - DNA, 60 bp, Artificial
  Synthetic oligonucleotide
cgcgcctccctcgctctggaggattaactccccaacaatttgtaaaagaatttccgcctg

SEQ ID NO: 21163 - DNA, 60 bp, Artificial
  Synthetic oligonucleotide
gagatgacatcgcggttaacatcaacaactggcctgcagaggatttaatgcaacctccta

SEQ ID NO: 21164 - DNA, 65 bp, Artificial
  Synthetic oligonucleotide
ccactcaaatgaacgttttggtaatgatttactaatcacagttgtgtatgatgtaatttcagctg

SEQ ID NO: 21165 - DNA, 60 bp, Artificial
  Synthetic oligonucleotide
taaggtttacccatatcttccccatataaaatttctgcccactcactcatgaaagctctg

SEQ ID NO: 21166 - DNA, 60 bp, Artificial
  Synthetic oligonucleotide
tacgcccattactaagaacacccctcccttcctttagggcttgcacccctgcttccgatg

SEQ ID NO: 21167 - DNA, 60 bp, Artificial
  Synthetic oligonucleotide
catttgtgaagctcccagaaacattaacggacagcaaatccaagtattacaacaaacagg

SEQ ID NO: 21168 - DNA, 60 bp, Artificial
  Synthetic oligonucleotide
gagggacagcttataatccattagccccaaaatcagcttttcccaatgcagcttttatgg

SEQ ID NO: 21169 - DNA, 60 bp, Artificial
  Synthetic oligonucleotide
ctactgctacagatgacagggtcagtggagttactgcagttgacaccgcaaccagattgc

SEQ ID NO: 21170 - DNA, 60 bp, Artificial
  Synthetic oligonucleotide
gcacgctgggacccggtttatcccttttctgaagagagactggttcctctgcctcctttt

SEQ ID NO: 21171 - DNA, 60 bp, Artificial
  Synthetic oligonucleotide
caagcactgctccaaaagtcaaagttcccctgactgtctcagatgaaacattgcaactgc

SEQ ID NO: 21172 - DNA, 60 bp, Artificial
  Synthetic oligonucleotide
gccctgtaaggacaataacctttgctaacactcaactgatatgcagtagcagcgtctctt

SEQ ID NO: 21173 - DNA, 60 bp, Artificial
  Synthetic oligonucleotide
gagatccttttgtagctccatcgacgggtgtaactactgaccgttctcagaaacttcaac

SEQ ID NO: 21174 - DNA, 60 bp, Artificial
  Synthetic oligonucleotide
ctatttaacacacacttttcaacgagtttctattcagtgggattctagcgttccatggcc

SEQ ID NO: 21175 - DNA, 60 bp, Artificial
  Synthetic oligonucleotide
ggttcttgcggtcttggatttgggtgtctcttgtcgtacgggtaaagtaagtatcctttc

SEQ ID NO: 21176 - DNA, 60 bp, Artificial
  Synthetic oligonucleotide
cgattagcccattttattcccctttcatgtatagtccttgacctggcaatacttcgatta

SEQ ID NO: 21177 - DNA, 64 bp, Artificial
  Synthetic oligonucleotide
gcaaactttaacaggagacattaaatcacttcaatccgatataattagaagttccgatattccc

SEQ ID NO: 21178 - DNA, 60 bp, Artificial
  Synthetic oligonucleotide
caactgcattacatacaggccaagcatcaaactttcttctgtatttcttcctagaccaca

SEQ ID NO: 21179 - DNA, 60 bp, Artificial
  Synthetic oligonucleotide
gatgcagaacagttgactttagaaaccactgagcccttggaagtggccgataacgctcta

SEQ ID NO: 21180 - DNA, 60 bp, Artificial
  Synthetic oligonucleotide
cggagaatacaacaataaatggggattaacaaggcacgcaacacaatgacccgaaggtaa

SEQ ID NO: 21181 - DNA, 60 bp, Artificial
  Synthetic oligonucleotide
tttcttaactgatttaactgccctaacaggaactccacattccggccaccgccacccagg

SEQ ID NO: 21182 - DNA, 60 bp, Artificial
  Synthetic oligonucleotide
ccctccggccttatcatttccttctcaaggtatccaaaattatttcatgcctactgcggc

SEQ ID NO: 21183 - DNA, 60 bp, Artificial
  Synthetic oligonucleotide
ccattgcggcttaacacctgtttatggccacaccgttggaatctgtgatatgagaggagg

SEQ ID NO: 21184 - DNA, 60 bp, Artificial
  Synthetic oligonucleotide
aagtgtgttcctgctgatgccgctgcagaaaggatagatgctatcgtacgcataaacccc

SEQ ID NO: 21185 - DNA, 60 bp, Artificial
  Synthetic oligonucleotide
ggcctctggtatgtcgtcagaacactttggccataaactactcagccccactagtgtcat

SEQ ID NO: 21186 - DNA, 60 bp, Artificial
  Synthetic oligonucleotide
ctgaaaagatctattctgattttgagctgaaatagcggagccaaaaccttgcatgtctgc

SEQ ID NO: 21187 - DNA, 60 bp, Artificial
  Synthetic oligonucleotide
gcgaatttgtaactttccatggtttaacacacaggaacagactcaataatccgcagcaac

SEQ ID NO: 21188 - DNA, 60 bp, Artificial
  Synthetic oligonucleotide
gttagtggattagagaatgcatcgtagtttccttcaacacactgtgctttccacgcaatt

SEQ ID NO: 21189 - DNA, 60 bp, Artificial
  Synthetic oligonucleotide
ccctccaaacttttgctaatgcctatcttaacaaatttaactcagcagaattctaccatg

SEQ ID NO: 21190 - DNA, 60 bp, Artificial
  Synthetic oligonucleotide
ggtttaaatcaaaatgcaaacaacttcaaagtttcagctatccctcactcagtctgcccc

SEQ ID NO: 21191 - DNA, 56 bp, Artificial
  Synthetic oligonucleotide
gatgtaatttctatggtaatacacatgcagctaacgatgctggtcaagttcaggtt

SEQ ID NO: 21192 - DNA, 60 bp, Artificial
  Synthetic oligonucleotide
gcctattcacatttacggtcaaggagctacagtacaacttgtcggacctggacctgtgtt

SEQ ID NO: 21193 - DNA, 60 bp, Artificial
  Synthetic oligonucleotide
gagtgcgaccttattacagagctcagtggggacagcttaatgctcgtacttcacttgaga

SEQ ID NO: 21194 - DNA, 60 bp, Artificial
  Synthetic oligonucleotide
ctgccagataggctgaaaacaacaccacccaacataaatctacctgatgacaccaactct

SEQ ID NO: 21195 - DNA, 60 bp, Artificial
  Synthetic oligonucleotide
cttgcagatgaaggtagttcacgtgcttaaatctcctcatcgtcgaagacatacacgtcg

SEQ ID NO: 21196 - DNA, 60 bp, Artificial
  Synthetic oligonucleotide
caaagaagttagccctccttcattttcatctgaatcttcacattcatattctcacccaag

SEQ ID NO: 21197 - DNA, 60 bp, Artificial
  Synthetic oligonucleotide
ctgttggggtaggtattccctctcgaaggcgggcatgacctcggcactcaggttgtcagt

SEQ ID NO: 21198 - DNA, 60 bp, Artificial
  Synthetic oligonucleotide
acgtactcgtacaaggcgcgcttcactctggccgtgggcgacaaccgggtgctagacatg

SEQ ID NO: 21199 - DNA, 60 bp, Artificial
  Synthetic oligonucleotide
gttcctctgcgacagggtcatgtggcgcatccccttctccagcaacttcatgtccatggg

SEQ ID NO: 21200 - DNA, 60 bp, Artificial
  Synthetic oligonucleotide
ttcctgtgcgacaggaccacgtggcgcattcccttctccagcaacttcatgtccatgggg

SEQ ID NO: 21201 - DNA, 60 bp, Artificial
  Synthetic oligonucleotide
ttcctgtgtgacaggaccatgtggcgcattcccttctccagcaacttcatgtccatgggg

SEQ ID NO: 21202 - DNA, 60 bp, Artificial
  Synthetic oligonucleotide
ttcctgtgcgacaggaccatgtggcgcattcccttctccagcaacttcatgtccatgggg

SEQ ID NO: 21203 - DNA, 58 bp, Artificial
  Synthetic oligonucleotide
tcatctgcgacagggtcatgtggcgcatccccttctccagcaacttcatgtccatggg

SEQ ID NO: 21204 - DNA, 60 bp, Artificial
  Synthetic oligonucleotide
atctgcgacagggtcatgtggcgcattcccttctccagcaacttcatgtccatgggcgcg

SEQ ID NO: 21205 - DNA, 53 bp, Artificial
  Synthetic oligonucleotide
gcaaggagattcccaccccttacatgtggagctatcagccccagatgggcctg

SEQ ID NO: 21206 - DNA, 53 bp, Artificial
  Synthetic oligonucleotide
gcaaggagattcccaccccttacatgtggagctatcagccccaaatgggcctg

SEQ ID NO: 21207 - DNA, 60 bp, Artificial
  Synthetic oligonucleotide
cgtgttgatggtgtaggtgcagttggccatgacggaccagttcacgacttgcatgccggg

SEQ ID NO: 21208 - DNA, 60 bp, Artificial
  Synthetic oligonucleotide
cgtgttgatggtgtaggtgcagttggccatgacggaccagttgacgacttgcatgccggg

SEQ ID NO: 21209 - DNA, 60 bp, Artificial
  Synthetic oligonucleotide
gcgcgcaagatttacaagacgccgtacgtgcccatagacaaggaggtgaagatagacagc

SEQ ID NO: 21210 - DNA, 60 bp, Artificial
  Synthetic oligonucleotide
tacgtgcccatagacaaggaggtgaagatagacagcttttacatgcgcatggcgctcaag

SEQ ID NO: 21211 - DNA, 60 bp, Artificial
  Synthetic oligonucleotide
ccgttcgtccccatcgacaaggaggtgaagatagacagcttttacatgcgcatggcgctc

SEQ ID NO: 21212 - DNA, 60 bp, Artificial
  Synthetic oligonucleotide
caccagcacggtgtatccggtgcacttggggaatttgtcatgcaacttggaagggaaggc

SEQ ID NO: 21213 - DNA, 60 bp, Artificial
  Synthetic oligonucleotide
gcacggtgtatccggtgcacttggggaatttgtcatgcaacttggaagggaaggcatgaa

SEQ ID NO: 21214 - DNA, 60 bp, Artificial
  Synthetic oligonucleotide
cgccagcatgagcaaggagattcccaccccttacatgtggagctatcagccccagatggg

SEQ ID NO: 21215 - DNA, 60 bp, Artificial
  Synthetic oligonucleotide
taactcctcggacgattggacccaggccatgcaacgcatcatggcgctgacgacccgcaa

SEQ ID NO: 21216 - DNA, 60 bp, Artificial
  Synthetic oligonucleotide
ttgaaataggcggttctgagacggcggatggtggcgaggagcaccaggtctttgggcccg

SEQ ID NO: 21217 - DNA, 60 bp, Artificial
  Synthetic oligonucleotide
atgcaacgcatcatggcgctgacgacccgcaaccccgaagcctttagacagcaaccccag

SEQ ID NO: 21218 - DNA, 60 bp, Artificial
  Synthetic oligonucleotide
gcgtcatcgaggccgtctacctgcgcacacctttctctgccggtaacgccaccacctaaa

SEQ ID NO: 21219 - DNA, 60 bp, Artificial
  Synthetic oligonucleotide
gccaggcctgcaagatctccaacgtggagctgaccaacctggtctcctacatgggcatct

SEQ ID NO: 21220 - DNA, 60 bp, Artificial
  Synthetic oligonucleotide
aagcgccagcccaacggcacctgcgagcccaacccgcgcctcaacttctacccggtcttc

SEQ ID NO: 21221 - DNA, 60 bp, Artificial
  Synthetic oligonucleotide
aggggttggccggcggggaaggggtgggtgagggcgctggcatacatgccgcagatgtca

SEQ ID NO: 21222 - DNA, 60 bp, Artificial
  Synthetic oligonucleotide
ggttcaaaggttttcccgctgggaaaggatgggtgagggcgctggcatacatgccgcaga

SEQ ID NO: 21223 - DNA, 60 bp, Artificial
  Synthetic oligonucleotide
atgagctgcgagaaggcgttgaggcctccctcgttccagacgcggctgtagaccacgccc

SEQ ID NO: 21224 - DNA, 60 bp, Artificial
  Synthetic oligonucleotide
ttcaaccccttctccggctctcctggccagtacccggacgagttcataccgaacttcgac

SEQ ID NO: 21225 - DNA, 60 bp, Artificial
  Synthetic oligonucleotide
cctgccgcagaatctcttgcacgtcgcccgagttgtcctggtaggcaatctcggtcatga

SEQ ID NO: 21226 - DNA, 60 bp, Artificial
  Synthetic oligonucleotide
gccgcaggatctcttgcacgtcgcccgagttgtcctggtaggcgatctcggtcatgaact

SEQ ID NO: 21227 - DNA, 60 bp, Artificial
  Synthetic oligonucleotide
gcctctaccctggaagccatgctgcgcaacgacaccaatgaccagtccttcaacgactac

SEQ ID NO: 21228 - DNA, 60 bp, Artificial
  Synthetic oligonucleotide
tgagctgaacatattcgcgcgcgacacacttccattcgggaaagacggtggtgcgctcgt

SEQ ID NO: 21229 - DNA, 60 bp, Artificial
  Synthetic oligonucleotide
aagcgccagcccaacggcacctgcgagcccaaccctcgcctcaacttctacccggtcttc

SEQ ID NO: 21230 - DNA, 60 bp, Artificial
  Synthetic oligonucleotide
tcgtcttccaggagccggatgagctcggcgatggtggcgcgcacctcgcgctcgaaatcc

SEQ ID NO: 21231 - DNA, 60 bp, Artificial
  Synthetic oligonucleotide
agccgcaccgaggcgtcatcgaggccgtctacctgcgcacgcccttctccgccgggaacg

SEQ ID NO: 21232 - DNA, 60 bp, Artificial
  Synthetic oligonucleotide
gccagctgttggggtaggtattccctctcgaatgcgggcatgacctctgcactcaggttg

SEQ ID NO: 21233 - DNA, 60 bp, Artificial
  Synthetic oligonucleotide
acagtcgggacaacgagacgttcagggaggcgctgctgaatatcaccgagcccgagggcc

SEQ ID NO: 21234 - DNA, 60 bp, Artificial
  Synthetic oligonucleotide
cagctagattcacaattgcggtcggcgaggggagagttttggacatggggagcacttact

SEQ ID NO: 21235 - DNA, 60 bp, Artificial
  Synthetic oligonucleotide
cagcggcaacaactacagcagctactttcagtggtacagttccaaatccaggaggtggtg

SEQ ID NO: 21236 - DNA, 60 bp, Artificial
  Synthetic oligonucleotide
caaatggagttagtttgctaatttgtctgccgacctgcacattgtcatgtccaaaattgc

SEQ ID NO: 21237 - DNA, 60 bp, Artificial
  Synthetic oligonucleotide
gctcactcaagtcgctggcaaaggactctgagaggtattactttcagtccccaggaaacg

SEQ ID NO: 21238 - DNA, 60 bp, Artificial
  Synthetic oligonucleotide
gcggggcagcttattatggtggcaaagccagaaggtactcaagataacattttggagaga

SEQ ID NO: 21239 - DNA, 60 bp, Artificial
  Synthetic oligonucleotide
gtggagacatacccgtgccgtaagtatttacaaatctggaaagctggaaaggagcatttt

SEQ ID NO: 21240 - DNA, 60 bp, Artificial
  Synthetic oligonucleotide
ctgcggtttcgaagtcaatttccacaaaatctacagaaaatacagaggtaatcgggcaga

SEQ ID NO: 21241 - DNA, 60 bp, Artificial
  Synthetic oligonucleotide
catgcacttctttattgagcgtttcatctccaaagatagtgaagcaaagaaggactggac

SEQ ID NO: 21242 - DNA, 60 bp, Artificial
  Synthetic oligonucleotide
cagctagctgtattgtgtcctcgcctgcaggggtggaattgaaaacaggaaaaggactgg

SEQ ID NO: 21243 - DNA, 60 bp, Artificial
  Synthetic oligonucleotide
gggtggccgtcatggtgtgatgctgcaaagatcagtggcttttctaactgcaacttatgg

SEQ ID NO: 21244 - DNA, 60 bp, Artificial
  Synthetic oligonucleotide
ttggttgtcttcaagccgtacgcttccgcggccagtctaagtgaacagtgagtaagttgg

SEQ ID NO: 21245 - DNA, 60 bp, Artificial
  Synthetic oligonucleotide
gtcatgtcgttcttagcatgccctttagctctgagttttccttccgtttccgtgttacag

SEQ ID NO: 21246 - DNA, 60 bp, Artificial
  Synthetic oligonucleotide
tacccgcccatagatgttataaatttgaggcaaacattaccatcgacacttcacaatgct

SEQ ID NO: 21247 - DNA, 60 bp, Artificial
  Synthetic oligonucleotide
cgacctcctctaacagattctcttacgaattcatacatttcagctgatggggccataatg

SEQ ID NO: 21248 - DNA, 60 bp, Artificial
  Synthetic oligonucleotide
gtttgaagaacatcttggaagctaacacagacgatggatactaaggaatttcttgcacac

SEQ ID NO: 21249 - DNA, 60 bp, Artificial
  Synthetic oligonucleotide
caaactatctgcaacatcttaaaactgaaagagaagaacaacattaaagagaggctgcac

SEQ ID NO: 21250 - DNA, 60 bp, Artificial
  Synthetic oligonucleotide
ctagaactaggttagtgccagatgattttagagaagagtttcctggattttctgcagccg

SEQ ID NO: 21251 - DNA, 60 bp, Artificial
  Synthetic oligonucleotide
gcccggatggcaaccagttcaccaataccggctggattagtcagagttttccgccgaatc

SEQ ID NO: 21252 - DNA, 60 bp, Artificial
  Synthetic oligonucleotide
gaacagcatcaaacagcattacaaactctgcagcttgccaaagactcttataacagacct

SEQ ID NO: 21253 - DNA, 60 bp, Artificial
  Synthetic oligonucleotide
cggtaccaagattctgtgtctccggctcctcttcctgctttgccctctccgtctccacag

SEQ ID NO: 21254 - DNA, 60 bp, Artificial
  Synthetic oligonucleotide
ggcaacaactacagttaccccagtagtcggtgctgttggtccactgtggacaggcagtcg

SEQ ID NO: 21255 - DNA, 60 bp, Artificial
  Synthetic oligonucleotide
acatgtgttccccatagtgttgaaatatggcgcagagcagtaagcgactgagacgcgacg

SEQ ID NO: 21256 - DNA, 60 bp, Artificial
  Synthetic oligonucleotide
gggcgctttaggttcttccatttcaaatgcttttaagacgactggacgttttattggttc

SEQ ID NO: 21257 - DNA, 60 bp, Artificial
  Synthetic oligonucleotide
agatcctggttgctctttggttagtcaattgatttgcagctgtaatttgtgcgctcctca

SEQ ID NO: 21258 - DNA, 60 bp, Artificial
  Synthetic oligonucleotide
gcgtgtaccgaaggactggtgagaatggcgtctttccgtggcgtcttttccgtgttgtgg

SEQ ID NO: 21259 - DNA, 60 bp, Artificial
  Synthetic oligonucleotide
cctggggagacaaacaatgccccttggtgcctgctgctttcgtgccaaaggccaggtttc

SEQ ID NO: 21260 - DNA, 60 bp, Artificial
  Synthetic oligonucleotide
agtaatgcagcaacagccgtggccaattccaaagcactaatcggatttggagctgtacca

SEQ ID NO: 21261 - DNA, 60 bp, Artificial
  Synthetic oligonucleotide
acctaataagaactctgtttctgcagcttacttcagaaccccttttgctactggaactgc

SEQ ID NO: 21262 - DNA, 60 bp, Artificial
  Synthetic oligonucleotide
gctctcacaaaaccatcccgctgcatcaagctggttaaaagtaaagaagctgtgcagtgc

SEQ ID NO: 21263 - DNA, 60 bp, Artificial
  Synthetic oligonucleotide
ctcttattgccagggacctacacgtatgagtggtggtttagaaaggacccaaacatggtg

SEQ ID NO: 21264 - DNA, 60 bp, Artificial
  Synthetic oligonucleotide
cccaacacagagaacttgcaaattgaaatacctagccgtacttgggaagctttcagaggg

SEQ ID NO: 21265 - DNA, 60 bp, Artificial
  Synthetic oligonucleotide
gcacaaatgtgaacctcggccttccagtacaaatcattcaaggagcagccacgcagggaa

SEQ ID NO: 21266 - DNA, 60 bp, Artificial
  Synthetic oligonucleotide
ttcaacatgtgctcgaacactatcatactgttgtcttcctttgtggcaaatgaaccgtac

SEQ ID NO: 21267 - DNA, 61 bp, Artificial
  Synthetic oligonucleotide
gaatagtcctgtaaatttgaatgaatggagagatgttattgttatgccagtttctgtgtag

SEQ ID NO: 21268 - DNA, 60 bp, Artificial
  Synthetic oligonucleotide
ctgccatgaaggcacgagtccaggataacacaaagctagctaattgggttggataccgct

SEQ ID NO: 21269 - DNA, 60 bp, Artificial
  Synthetic oligonucleotide
gggtggactcatcgtgtgaaatttagctacaaaactatttaaccaatcataatcgcaagg

SEQ ID NO: 21270 - DNA, 60 bp, Artificial
  Synthetic oligonucleotide
tccaattaatagatgtggaggcggtagattgttgaacggaggcatagctacattcggatt

SEQ ID NO: 21271 - DNA, 60 bp, Artificial
  Synthetic oligonucleotide
gcgcgttgaatttcttagttactaatcaggagaagaaatttgtgccagaggttcagtctc

SEQ ID NO: 21272 - DNA, 60 bp, Artificial
  Synthetic oligonucleotide
ccaaaccattagcactgcactgccaaacaaaacaagccaatactggcggccaagatctag

SEQ ID NO: 21273 - DNA, 60 bp, Artificial
  Synthetic oligonucleotide
agcagtcagttcttcagtgttagccagaataaggagtgtggtgcgtcaaatggggttgcg

SEQ ID NO: 21274 - DNA, 60 bp, Artificial
  Synthetic oligonucleotide
gtgttaattcctcaggatttagctttgccagattctcctccagcatctaggcggggtttg

SEQ ID NO: 21275 - DNA, 60 bp, Artificial
  Synthetic oligonucleotide
caacactgattggaatgcaaccaggtgaagttccagatatgccaactgaaaatgctgagt

SEQ ID NO: 21276 - DNA, 60 bp, Artificial
  Synthetic oligonucleotide
gcgctctttaatatgattggacttaacttacccacagctgggcgtttctcgctcatgctc

SEQ ID NO: 21277 - DNA, 65 bp, Artificial
  Synthetic oligonucleotide
ggattagaaaacgtgatagttatacagatggctttattttgacttatgaagatttacagtctggc

SEQ ID NO: 21278 - DNA, 60 bp, Artificial
  Synthetic oligonucleotide
attttgtagtctctcgcgctctttctgtttcctgttattcatgtgttctctttgggacac

SEQ ID NO: 21279 - DNA, 60 bp, Artificial
  Synthetic oligonucleotide
cgccagtcagaactttggagctcgtataaatactcttcatgcatcccctcagctttgggc

SEQ ID NO: 21280 - DNA, 60 bp, Artificial
  Synthetic oligonucleotide
gtacacttcccattcatacagtaattcccggcgtacaaagagtaattttgaccgatgatc

SEQ ID NO: 21281 - DNA, 60 bp, Artificial
  Synthetic oligonucleotide
gggagatgtttgttgtttcagacacccttggctccgaggttgaaccagaaacactgcagg

SEQ ID NO: 21282 - DNA, 60 bp, Artificial
  Synthetic oligonucleotide
accataccggtcatccttatccctgtaactggccatatcctttaataggtagccaagctg

SEQ ID NO: 21283 - DNA, 60 bp, Artificial
  Synthetic oligonucleotide
ctgagttcaaggttctctccttcctcccaattgtggacccagatttcggaccccaagata

SEQ ID NO: 21284 - DNA, 60 bp, Artificial
  Synthetic oligonucleotide
ccctggcccctcacggtacaccagcaaagcctcgggtaaagcagccatgccaagctctta

SEQ ID NO: 21285 - DNA, 60 bp, Artificial
  Synthetic oligonucleotide
cctcctcgtcactctcttccggttcgctgtcgccaaaggccagctgttggggtacgtata

SEQ ID NO: 21286 - DNA, 60 bp, Artificial
  Synthetic oligonucleotide
ccgctaccgctcgatgttgctgggaaatggtcgcgtcgtgcctttccacattcaagtgcc

SEQ ID NO: 21287 - DNA, 60 bp, Artificial
  Synthetic oligonucleotide
cgtcttcgttgcgcaactgcaccacgcttcggccccaccgattttgaaccaccttggctc

SEQ ID NO: 21288 - DNA, 60 bp, Artificial
  Synthetic oligonucleotide
ccaccatcaccaccgtcagcgagaacgtgcccgctctaaccgatcacgggacgctgcctt

SEQ ID NO: 21289 - DNA, 60 bp, Artificial
  Synthetic oligonucleotide
ggcgtggccagcgagagggtgggctataaaggggaggtgtcggctgacgctgtcttctgt

SEQ ID NO: 21290 - DNA, 60 bp, Artificial
  Synthetic oligonucleotide
cattgggagctctgggcgtggatgtgatggaagtaaaagtcccggcggcgcgtggaacat

SEQ ID NO: 21291 - DNA, 60 bp, Artificial
  Synthetic oligonucleotide
gtcctggaagtcgtcgaggtccacgaagcggtggtacgcgccggtgttgatagtgtaggt

SEQ ID NO: 21292 - DNA, 60 bp, Artificial
  Synthetic oligonucleotide
gctcttacctggccaagaccacgagctccagtacacggttgaccaacagcgtcaaacctg

SEQ ID NO: 21293 - DNA, 60 bp, Artificial
  Synthetic oligonucleotide
tgcctcgtcccgaacccagcaaccgcgtgcctcccgttcccatcgctccgccggtttctc

SEQ ID NO: 21294 - DNA, 60 bp, Artificial
  Synthetic oligonucleotide
cccggacgagttcatccccaactttgacgcggtgagtgactctgtggacggttatgactg

SEQ ID NO: 21295 - DNA, 60 bp, Artificial
  Synthetic oligonucleotide
tggggaacccgaagcagaggcggtgttggacgtggaggagggccaggggttggctcggct

SEQ ID NO: 21296 - DNA, 60 bp, Artificial
  Synthetic oligonucleotide
acatgacggcggccaacatggagccctcgttctacgccgccaaccgcccctttgtcaacc

SEQ ID NO: 21297 - DNA, 60 bp, Artificial
  Synthetic oligonucleotide
tttctgagcgccctccgcctgatggtggccgaggtgccgcagagcgaggtgtaccagtct

SEQ ID NO: 21298 - DNA, 60 bp, Artificial
  Synthetic oligonucleotide
caccctacaagtgcaaaacaatgccctacaaacatccttacaagctcaagccccgctaac

SEQ ID NO: 21299 - DNA, 60 bp, Artificial
  Synthetic oligonucleotide
tcgggaattttgccggccactagctgcgcccttcccacagactttgtgcccctccactac

SEQ ID NO: 21300 - DNA, 60 bp, Artificial
  Synthetic oligonucleotide
ctaactcagcgctgcagacctaatattctgagaccctcggcccagcgtgtgtcatcccgg

SEQ ID NO: 21301 - DNA, 60 bp, Artificial
  Synthetic oligonucleotide
cagtacgcgcggaacagccactcacgcaggcccaaaagacaattctcagcagacgtcgac

SEQ ID NO: 21302 - DNA, 60 bp, Artificial
  Synthetic oligonucleotide
cggttgagttgggaggggtgcatgcggggactgatgaggtgcattttggcctggatcttg

SEQ ID NO: 21303 - DNA, 59 bp, Artificial
  Synthetic oligonucleotide
tctcggcatcgttaaccgcggcctggcgcaggatttcggccacgtccccggagttgtct

SEQ ID NO: 21304 - DNA, 60 bp, Artificial
  Synthetic oligonucleotide
ccggtttcgtgtctcctcgcaaactcgcatgtgcaatcgtgaacaccgccggccgagaaa

SEQ ID NO: 21305 - DNA, 60 bp, Artificial
  Synthetic oligonucleotide
tgtggaaatgagggtgggcggcaaagtgcgcgggtgttccttttacgcttgctggaaggg

SEQ ID NO: 21306 - DNA, 60 bp, Artificial
  Synthetic oligonucleotide
cccgagacaaaggtcgcgtaactccgcccacctcatttgcatgttaactcggtcgccatc

SEQ ID NO: 21307 - DNA, 60 bp, Artificial
  Synthetic oligonucleotide
taaagtgggcgtaggactcttgcagcttttccaccagggaggcggtgaccagcacgtcca

SEQ ID NO: 21308 - DNA, 60 bp, Artificial
  Synthetic oligonucleotide
gactttgaccgtctgacgtcaccagctgcccgccaaaatgagtaaagagattcccacgcc

SEQ ID NO: 21309 - DNA, 60 bp, Artificial
  Synthetic oligonucleotide
acgacagcagcgtgttggatctgggagggagcgggaacccctttgcccacctgcagcctc

SEQ ID NO: 21310 - DNA, 60 bp, Artificial
  Synthetic oligonucleotide
aagcagcgccgcacaggcggtagaggccatgcagaccgacgtggggatgatgacagagct

SEQ ID NO: 21311 - DNA, 60 bp, Artificial
  Synthetic oligonucleotide
accggcgaggaactcaacggaccctcctcagtcgcaggttgtttgccccatgccgcccaa

SEQ ID NO: 21312 - DNA, 59 bp, Artificial
  Synthetic oligonucleotide
caacagcacgcccgccttagttcctaaaaccttttaccactggttaacctacgctggtc

SEQ ID NO: 21313 - DNA, 60 bp, Artificial
  Synthetic oligonucleotide
agcgccgaggcggccgactactttgacgccggagcggacttgcgctggcagccatcccga

SEQ ID NO: 21314 - DNA, 60 bp, Artificial
  Synthetic oligonucleotide
ctcgtgttgttattccgcctccgcctttccacttcattttgtaaaccacccgctccacct

SEQ ID NO: 21315 - DNA, 60 bp, Artificial
  Synthetic oligonucleotide
ttccaaaatcacaaaatcccgctctcctgccgcgccaaccgcactaaagccgatcgcgtg

SEQ ID NO: 21316 - DNA, 60 bp, Artificial
  Synthetic oligonucleotide
ttcgtccagcaggccgttagtctttacatgatgcagacggggtcggacgcttctgcggct

SEQ ID NO: 21317 - DNA, 57 bp, Artificial
  Synthetic oligonucleotide
cccctcccgcctcaggctccgcccaccagaccccgtcgtctgccacggtctcgcatc

SEQ ID NO: 21318 - DNA, 59 bp, Artificial
  Synthetic oligonucleotide
cgtacaagggtcacacggctccgccccttacgtacgccgtctacgtcatcacgcatttt

SEQ ID NO: 21319 - DNA, 60 bp, Artificial
  Synthetic oligonucleotide
gcagagttgaccgcctgtgtcatcactcaagccgccatcctcgcccaattacatgacatt

SEQ ID NO: 21320 - DNA, 60 bp, Artificial
  Synthetic oligonucleotide
cgtttcttgttgctttcatcgtgggacttggccgctccatcaagtttgtctccgtcggcc

SEQ ID NO: 21321 - DNA, 60 bp, Artificial
  Synthetic oligonucleotide
tcctccaaggctctgacggcgcagttgttcttgattgtgcaacactgccgcgacgacggt

SEQ ID NO: 21322 - DNA, 60 bp, Artificial
  Synthetic oligonucleotide
ccagccacacagaggcgtcatcgagaccgtgtacctcagaaccccattctctgccggtaa

SEQ ID NO: 21323 - DNA, 60 bp, Artificial
  Synthetic oligonucleotide
gttcctctttgcaccgttcacatctgtgggactatgaaagttccttggccgtctgtgaag

SEQ ID NO: 21324 - DNA, 60 bp, Artificial
  Synthetic oligonucleotide
ccgcgaaaacactggtcacgaggacgccgtgtgtgggctatgttacatgagaaagacggc

SEQ ID NO: 21325 - DNA, 60 bp, Artificial
  Synthetic oligonucleotide
agtgttgcgccagatgaaaactccaaaccctagcgccgccgcttacgaggacacgtacgc

SEQ ID NO: 21326 - DNA, 60 bp, Artificial
  Synthetic oligonucleotide
cgtggtaagcgacgaggaactctcccgctggttgggctctaacgacgccgccctattgga

SEQ ID NO: 21327 - DNA, 60 bp, Artificial
  Synthetic oligonucleotide
aaactaaaatgacctcccctgcgtcctgatagttagccaagcatatgaagccatgcgagc

SEQ ID NO: 21328 - DNA, 60 bp, Artificial
  Synthetic oligonucleotide
ggagtgttggcaggtcaggcttctcaacttaacgccgttgttgacttgcaggacagaaac

SEQ ID NO: 21329 - DNA, 60 bp, Artificial
  Synthetic oligonucleotide
gtgtagcttggaggggaatgcgtgaaagaatttggcgatgcctttgtggtttcccatgtc

SEQ ID NO: 21330 - DNA, 60 bp, Artificial
  Synthetic oligonucleotide
tgagcacggatgtcacgtgtggggcggagcaggtgtactggagcgtccccggcatgtata

SEQ ID NO: 21331 - DNA, 60 bp, Artificial
  Synthetic oligonucleotide
ggtctggcattcttccggcctgctgcaacgcctttcccacggactttgtacccatcacct

SEQ ID NO: 21332 - DNA, 60 bp, Artificial
  Synthetic oligonucleotide
ctcatccattgcaagttactcagcaagttcagcatctactcccacatcgacatcgcccac

SEQ ID NO: 21333 - DNA, 60 bp, Artificial
  Synthetic oligonucleotide
ccccagaaatgtggaatacgagcaggaagggcaccagctgtttaccgtgtttaccgtgcc

SEQ ID NO: 21334 - DNA, 60 bp, Artificial
  Synthetic oligonucleotide
atcagtctgttctggtctatctgggtcagagtcttgtccttccacggcctcagtgttctg

SEQ ID NO: 21335 - DNA, 60 bp, Artificial
  Synthetic oligonucleotide
cggtggacagagaagacacgcagtacacatacaagacgaggttccagctggcggttggcg

SEQ ID NO: 21336 - DNA, 60 bp, Artificial
  Synthetic oligonucleotide
ttcgcccggctcgagcgtcggcgctactgtggagagtgtcagcaagaagcgcccgtctga

SEQ ID NO: 21337 - DNA, 60 bp, Artificial
  Synthetic oligonucleotide
tgcaccctctgcttcctctccaaccactgcttccacagcaactcgcccatcttagcgcgt

SEQ ID NO: 21338 - DNA, 60 bp, Artificial
  Synthetic oligonucleotide
ccatcccagagaaacggccactgttgacattcgagaccactgcaaatttccaccgaccgt

SEQ ID NO: 21339 - DNA, 60 bp, Artificial
  Synthetic oligonucleotide
tcacgcctcgccaggccgctaagaggggtgccagcgccgtaaccacggtacaggtgttgg

SEQ ID NO: 21340 - DNA, 60 bp, Artificial
  Synthetic oligonucleotide
acgccagacttgctgtcaccgctctctcatccctgcatcaagagacctgcaagagaagcc

SEQ ID NO: 21341 - DNA, 60 bp, Artificial
  Synthetic oligonucleotide
tctctcagggaggcgctggcaggcggagatgattcagacgaggaggggcagggcccgcct

SEQ ID NO: 21342 - DNA, 60 bp, Artificial
  Synthetic oligonucleotide
gggtcgtcaatcaggtttctgtcgatgttgcccgccgtagacatggcaaacggggtcacc

SEQ ID NO: 21343 - DNA, 60 bp, Artificial
  Synthetic oligonucleotide
tttggtgtttgttagagagtgggagaacgctgggattcgaggcaaaggtggtgccgtggt

SEQ ID NO: 21344 - DNA, 60 bp, Artificial
  Synthetic oligonucleotide
catcttatcgggacaatgacaatgaagttcccagctcgctatacacctgccacagtcttg

SEQ ID NO: 21345 - DNA, 60 bp, Artificial
  Synthetic oligonucleotide
agttctgtgcgcgaatgcggtcagccagtccccaggccctgtcttggcagactccgatgt

SEQ ID NO: 21346 - DNA, 60 bp, Artificial
  Synthetic oligonucleotide
ccggagactatcggatacggacgcaccagagccggggccactcttatcactctgaggaat

SEQ ID NO: 21347 - DNA, 60 bp, Artificial
  Synthetic oligonucleotide
gaggccaggcgcaggttgtggtggagataattcagcgtggtggctatgtgctcggtcaca

SEQ ID NO: 21348 - DNA, 60 bp, Artificial
  Synthetic oligonucleotide
cacgcgttgtctttctacctcccttccgctgggtctgatgtctaacaaatcacacgcatc

SEQ ID NO: 21349 - DNA, 60 bp, Artificial
  Synthetic oligonucleotide
tccgcccctcgtcgcagcgccagaatcgccgctcgtagtgtcgctgggtcgggcaacatc

SEQ ID NO: 21350 - DNA, 60 bp, Artificial
  Synthetic oligonucleotide
tccgatcctcctccctcttacgagagtgtggtgggaagcctggatcctctgtttgtgccg

SEQ ID NO: 21351 - DNA, 60 bp, Artificial
  Synthetic oligonucleotide
ggagacgtcggcgacaggtgggtaggctacgacaaattctggcatgatgtccgcgctgaa

SEQ ID NO: 21352 - DNA, 60 bp, Artificial
  Synthetic oligonucleotide
ctttcccacgttgtatgccatcttccagcagagccgcggagtagacagcaacctcaaggt

SEQ ID NO: 21353 - DNA, 60 bp, Artificial
  Synthetic oligonucleotide
ggcgcttccatcagaatagacagcgtgaacttgtacgccagcttcttccccatggcccac

SEQ ID NO: 21354 - DNA, 60 bp, Artificial
  Synthetic oligonucleotide
gttgcttcatatcctgcaccgccatgcttcccctctcccactcttgaaactcctttctct

SEQ ID NO: 21355 - DNA, 60 bp, Artificial
  Synthetic oligonucleotide
ccccagtccacttcacgcggtaaacaatccgatcaaaaggaagtccgtgcgtcaacgtcc

SEQ ID NO: 21356 - DNA, 60 bp, Artificial
  Synthetic oligonucleotide
gagaacggaacgtgcgagcccaaccccagaatcaatttctaccctcccttcctgatcgcc

SEQ ID NO: 21357 - DNA, 60 bp, Artificial
  Synthetic oligonucleotide
ttaaacgccttcctcagcactctgccggcgaatgtggagcgtgggcaggagaactacacg

SEQ ID NO: 21358 - DNA, 60 bp, Artificial
  Synthetic oligonucleotide
cgcgtgactgtgtcccagactcattcttatatttctttgtgcgccagcgtcggagcgtcc

SEQ ID NO: 21359 - DNA, 60 bp, Artificial
  Synthetic oligonucleotide
actaccgcgcctcatggggcagcaggaaggggcgagctcctagcgcgcgcatgacgatca

SEQ ID NO: 21360 - DNA, 60 bp, Artificial
  Synthetic oligonucleotide
ggtttcctgtactccaacatcgccctttacttgcctgatgacctgaagttcacacctccg

SEQ ID NO: 21361 - DNA, 60 bp, Artificial
  Synthetic oligonucleotide
cgtggccacttctcctctcaatggctcgttggtccagcatagtcgacctccctttcgcga

SEQ ID NO: 21362 - DNA, 60 bp, Artificial
  Synthetic oligonucleotide
actttgcttcggaactccagtatatgcagtcgtattggctgccacaggggcagaagcctc

SEQ ID NO: 21363 - DNA, 60 bp, Artificial
  Synthetic oligonucleotide
cagcccatgggtgcgccgcaaacagtggaacttccgcgtaatgagttactcgaaaccgtc

SEQ ID NO: 21364 - DNA, 60 bp, Artificial
  Synthetic oligonucleotide
ccaggaggtatttgcagccgtagtccagtaggaactaaggccttatcccgcgccctcacg

SEQ ID NO: 21365 - DNA, 60 bp, Artificial
  Synthetic oligonucleotide
gagaagatggacataagcacagctcccgcgtcacgaatcacctatgggcccgccagcaag

SEQ ID NO: 21366 - DNA, 60 bp, Artificial
  Synthetic oligonucleotide
cttaagacgggtgctgtactacgcctcagccagaccaggttggtggacacgcactctctg

SEQ ID NO: 21367 - DNA, 60 bp, Artificial
  Synthetic oligonucleotide
ggaacagtttgaaagtggagatggcgagtttagatacggaaagcgtggccggtctgaggc

SEQ ID NO: 21368 - DNA, 60 bp, Artificial
  Synthetic oligonucleotide
ctaccagtgcattttagacgcggacctccacgccgactgcgtgccagactccctgcaagc

SEQ ID NO: 21369 - DNA, 60 bp, Artificial
  Synthetic oligonucleotide
tctgttgtgtctgatactagcgacatgagccgcggtagggtgcgcagccgcagtcgtgta

SEQ ID NO: 21370 - DNA, 60 bp, Artificial
  Synthetic oligonucleotide
aaacgcccagactcgtccgcaacccgccaacgtggcctgcccaatacctatttcagccaa

SEQ ID NO: 21371 - DNA, 60 bp, Artificial
  Synthetic oligonucleotide
cctcatttgcttctggctcgacgtgcggtgcaggtgggtaggctacggtaaattctggca

SEQ ID NO: 21372 - DNA, 60 bp, Artificial
  Synthetic oligonucleotide
tcagcgcctcgccccgccgctcgcacgcacacggacactccccgcccctcccagaaactc

SEQ ID NO: 21373 - DNA, 60 bp, Artificial
  Synthetic oligonucleotide
cctatgcaaaacaccgccccttcaaacctaagattacgaattcgtggcacatcgccccag

SEQ ID NO: 21374 - DNA, 60 bp, Artificial
  Synthetic oligonucleotide
tgcggccccagcggttggtgacaatcttcgcgcgctcaggtgtatccttcaatgctcgct

SEQ ID NO: 21375 - DNA, 60 bp, Artificial
  Synthetic oligonucleotide
ttccttctcttggtcgtagctggaaagcgcctccactcatggctgtgccgtggcaactgg

SEQ ID NO: 21376 - DNA, 60 bp, Artificial
  Synthetic oligonucleotide
tgcatccatggcaccggcagttccaagcacatagcaaaacaggcagcagtgcgcggtgag

SEQ ID NO: 21377 - DNA, 60 bp, Artificial
  Synthetic oligonucleotide
tagtaagatgttatcttggttacagccgccatgtttcgctcccgcaacaccgtgtctgcg

SEQ ID NO: 21378 - DNA, 60 bp, Artificial
  Synthetic oligonucleotide
tgtccgtgtgcgtgcgagcggcggggcgaggcgctgagtcactgcccttttgcactgtct

SEQ ID NO: 21379 - DNA, 60 bp, Artificial
  Synthetic oligonucleotide
tggccggtgtttgcatttctccccaacctcgatattaattggaggcgtgctcattctgaa

SEQ ID NO: 21380 - DNA, 60 bp, Artificial
  Synthetic oligonucleotide
gctgctcacgccttagacatgacctttgaagtggacgcgatggacgagcccacgctgctt

SEQ ID NO: 21381 - DNA, 60 bp, Artificial
  Synthetic oligonucleotide
cagcacgtactgcacaacacactccgcgatgaacagaggcgggactacattagagacacc

SEQ ID NO: 21382 - DNA, 60 bp, Artificial
  Synthetic oligonucleotide
gccgcagcggtacttcgtcatcctcactttgcagatcggagtccctctcgcaatcgctag

SEQ ID NO: 21383 - DNA, 60 bp, Artificial
  Synthetic oligonucleotide
ggggttttggcggggcaggcttcgcaattgaatgccgtcgtggacctgcaagacagaaat

SEQ ID NO: 21384 - DNA, 60 bp, Artificial
  Synthetic oligonucleotide
aaaaccaccaaaatccgagccatctgcctgcatcatcacgcaagccgccattctcgccca

SEQ ID NO: 21385 - DNA, 60 bp, Artificial
  Synthetic oligonucleotide
cacacatgcataatttctgccacttgcagcccacacagcgcccagtacaggtcagtgatc

SEQ ID NO: 21386 - DNA, 60 bp, Artificial
  Synthetic oligonucleotide
agacgcgactgtagaccagcctgccgtcctgagaccttgctctcatgaccacttgtgcca

SEQ ID NO: 21387 - DNA, 60 bp, Artificial
  Synthetic oligonucleotide
tttcgacgtgggtcccatcctccattgtcccactgcttgttagcgtggcgcgtttggcca

SEQ ID NO: 21388 - DNA, 60 bp, Artificial
  Synthetic oligonucleotide
gccgcccagatacgaagacattttccccaataactccgcggttccaataagcctgcgccc

SEQ ID NO: 21389 - DNA, 60 bp, Artificial
  Synthetic oligonucleotide
taagcgggagtaaaagcgtggggtggtatttgcacaatgactgatcaaggtgacattcgt

SEQ ID NO: 21390 - DNA, 60 bp, Artificial
  Synthetic oligonucleotide
cacccagacatcatactcgcccctggctgtgcggtagactttacaacgagccgcctaaac

SEQ ID NO: 21391 - DNA, 60 bp, Artificial
  Synthetic oligonucleotide
gagctaggcaacggattacaagtgtcaaatgaccaactgacgctcaacacacagccacta

SEQ ID NO: 21392 - DNA, 60 bp, Artificial
  Synthetic oligonucleotide
acagcgtagatgggaccaaactccaacatcggcccctggtaagcagaactcgtcggtggg

SEQ ID NO: 21393 - DNA, 60 bp, Artificial
  Synthetic oligonucleotide
ctacacgccgcaggaggctagcacgcaaactataaactttgatgataggtcgcggtgggg

SEQ ID NO: 21394 - DNA, 60 bp, Artificial
  Synthetic oligonucleotide
ctcagtggttgcgtgccctttagctcttagcttgcctttccccacgtgaccgcagttagg

SEQ ID NO: 21395 - DNA, 60 bp, Artificial
  Synthetic oligonucleotide
aggcggtgatattggtagacgtgtcttgacagccatccgagcccggctggtgtgacagca

SEQ ID NO: 21396 - DNA, 60 bp, Artificial
  Synthetic oligonucleotide
tgatgcagcaactgcgcgctcgaatgggttcagcggctgccccgctggaaatggatgagt

SEQ ID NO: 21397 - DNA, 60 bp, Artificial
  Synthetic oligonucleotide
tgagagcagtggaagccatcgcacgcgcaaacccacgccgtcgaagcgctaggttgatgg

SEQ ID NO: 21398 - DNA, 60 bp, Artificial
  Synthetic oligonucleotide
gttgactggtgtgcctaaccataacattatgtcacctagcgcccagcccacactgcgaga

SEQ ID NO: 21399 - DNA, 60 bp, Artificial
  Synthetic oligonucleotide
gccgcaccattagaagctcttttaggaggcacagccgagtcagacacacgcacaaagagc

SEQ ID NO: 21400 - DNA, 60 bp, Artificial
  Synthetic oligonucleotide
gtgtccggctaatgacatcagttgctggaaagaggagaacgtgtgaagaggttttaggcc

SEQ ID NO: 21401 - DNA, 60 bp, Artificial
  Synthetic oligonucleotide
taatgttcgaacactggtggccagggaagaagtggcagtggggctcatgcatttgtggga

SEQ ID NO: 21402 - DNA, 60 bp, Artificial
  Synthetic oligonucleotide
gcttttgaaaacctgagctctttgtggggagtgaatgcgccagtggccgaacgaagtgcc

SEQ ID NO: 21403 - DNA, 60 bp, Artificial
  Synthetic oligonucleotide
aattggacgaacgcttagccgacacccctgtggactgtgtggaaggaaggcgccgcacaa

SEQ ID NO: 21404 - DNA, 60 bp, Artificial
  Synthetic oligonucleotide
gacagagtcgcatcctcaaagatagcctcgccgaccgctttgaagtgcctacagacgcgc

SEQ ID NO: 21405 - DNA, 60 bp, Artificial
  Synthetic oligonucleotide
ctactccggacccctctccaaacgctaccatcagcgcagaattagatgccaagctggtgc

SEQ ID NO: 21406 - DNA, 60 bp, Artificial
  Synthetic oligonucleotide
gccctgtacttgccagacgaccttaagttcacaccgccaaatgtcacacttcctaacaac

SEQ ID NO: 21407 - DNA, 60 bp, Artificial
  Synthetic oligonucleotide
ggctggaaacaacaacgccaaagcttttgcgcaagcccctcagtcggcaacagtagacgg

SEQ ID NO: 21408 - DNA, 60 bp, Artificial
  Synthetic oligonucleotide
gccgccattttacagccaagacggttttcaagaagcaccaaccgccaccctctcactcaa

SEQ ID NO: 21409 - DNA, 60 bp, Artificial
  Synthetic oligonucleotide
atgccactaacctgccaatttccatcccatctcgcaactgggccgccttccgcggatgga

SEQ ID NO: 21410 - DNA, 60 bp, Artificial
  Synthetic oligonucleotide
caggtggtgccattatactccagtagatccaaatccgccttcccctcgctcagtgtcgtc

SEQ ID NO: 21411 - DNA, 60 bp, Artificial
  Synthetic oligonucleotide
cgtgtggttcagagcaagtatactggagtgttccggacatgtatgtagagcctgtgacgt

SEQ ID NO: 21412 - DNA, 60 bp, Artificial
  Synthetic oligonucleotide
cgcaaatgtgtctctgaccatgaacttaacgaactgcattttgtagtctcctgctgtcat

SEQ ID NO: 21413 - DNA, 60 bp, Artificial
  Synthetic oligonucleotide
gtataaagtggcatgaggggtgggcgcggtgtttcaaaatgagcgggacgacggacggca

SEQ ID NO: 21414 - DNA, 60 bp, Artificial
  Synthetic oligonucleotide
cgccgtacgtgcccatagacaaggaggtgaagatagacagcttttacatgcgcatggcgc

SEQ ID NO: 21415 - DNA, 60 bp, Artificial
  Synthetic oligonucleotide
ccttacgtgcccatagacaaggaggtgaagatagacagcttttacatgcgcatggcgctg

SEQ ID NO: 21416 - DNA, 60 bp, Artificial
  Synthetic oligonucleotide
ttagccctgacggccagaaacccttcggcgtttgctaatcagccccgcgccaatcgcttt

SEQ ID NO: 21417 - DNA, 60 bp, Artificial
  Synthetic oligonucleotide
cgaggctgccgatgcgttatttcctgactgtttgttggaggaggtcgaggccgcttcagg

SEQ ID NO: 21418 - DNA, 60 bp, Artificial
  Synthetic oligonucleotide
cactactgccggccacttatcgttgcgaacccacgccaacgtgccaccaacacattggct

SEQ ID NO: 21419 - DNA, 60 bp, Artificial
  Synthetic oligonucleotide
tctgagtcctttgttctggtaaaatggcaatggctgtttccttgtgggccaggcgcgggt

SEQ ID NO: 21420 - DNA, 60 bp, Artificial
  Synthetic oligonucleotide
ggggactgagtgtggcggagaaagtggcggcgattaactactcggtgatcacgctgggaa

SEQ ID NO: 21421 - DNA, 60 bp, Artificial
  Synthetic oligonucleotide
cccaacgaatttgagattaagcgcgcagtggacggggaaggctactctacggcccagagc

SEQ ID NO: 21422 - DNA, 60 bp, Artificial
  Synthetic oligonucleotide
ctccaccatgctgacgtgtccgaaaatctttacttcctccccgctctcccaactagtcat

SEQ ID NO: 21423 - DNA, 60 bp, Artificial
  Synthetic oligonucleotide
cagactcggccaaggctccgagagttaacgccgcttctgaagaatcgccgcgaaccaaag

SEQ ID NO: 21424 - DNA, 60 bp, Artificial
  Synthetic oligonucleotide
aataccgctgtcatgcaaagctaaccgcaccaatgccgaccgcacgctccgcttacgcga

SEQ ID NO: 21425 - DNA, 60 bp, Artificial
  Synthetic oligonucleotide
accctcaggggcgcagctaccacgtcgggcaagaccctacggccgatcccctggctaccg

SEQ ID NO: 21426 - DNA, 60 bp, Artificial
  Synthetic oligonucleotide
ttcgaacaaggagccgaccgccttgacggcgcgttctagcggagttatttgcggagtcgg

SEQ ID NO: 21427 - DNA, 60 bp, Artificial
  Synthetic oligonucleotide
gcaactttgactttccagatgccgccgaggggctgctttgggatgactcggatagcgcgt

SEQ ID NO: 21428 - DNA, 60 bp, Artificial
  Synthetic oligonucleotide
ctgactgttgggatacgcgttcctggtggctgttcaacttcgcagtgcgctgctacgcag

SEQ ID NO: 21429 - DNA, 60 bp, Artificial
  Synthetic oligonucleotide
cgcgaactccagtagtgttcatccggaaagccaacctcgtctacttggtaagagccgaac

SEQ ID NO: 21430 - DNA, 60 bp, Artificial
  Synthetic oligonucleotide
gccggcaaaggggcgtcaaactgacaacacatggcgtcttcgttgcgcacttgaaccacg

SEQ ID NO: 21431 - DNA, 60 bp, Artificial
  Synthetic oligonucleotide
cagcctgccagtgctggattttgttcttcgacgcgcacaccatgaattcgtctcgacaga

SEQ ID NO: 21432 - DNA, 60 bp, Artificial
  Synthetic oligonucleotide
cccaactcctctctaaataagctcaaactaatgccaaataccaacgcctaccctcccggc

SEQ ID NO: 21433 - DNA, 60 bp, Artificial
  Synthetic oligonucleotide
gcccttccgccttcgcgcggtctgagctcaaacgcccctcctcgcaaaccttccgaggtt

SEQ ID NO: 21434 - DNA, 60 bp, Artificial
  Synthetic oligonucleotide
ccctcttcgttccacactcgactgtacactacaccgccgtcgccatttctagctctcatg

SEQ ID NO: 21435 - DNA, 60 bp, Artificial
  Synthetic oligonucleotide
gacacgtcatactccggatcgtcctcccaaagttccagctttaataccacacacccggta

SEQ ID NO: 21436 - DNA, 60 bp, Artificial
  Synthetic oligonucleotide
ttggtccaacgccgtcatggtcttgtccttccacggccttagagttcgcgtcagcgtcgt

SEQ ID NO: 21437 - DNA, 60 bp, Artificial
  Synthetic oligonucleotide
gggagaagacaataccggagcggacattttggccgaccccaactatcagccagagcccac

SEQ ID NO: 21438 - DNA, 60 bp, Artificial
  Synthetic oligonucleotide
cccaccctcctctatgttttgtttgaagtcttcgacgtcgctcgagtgcatcagccgcat

SEQ ID NO: 21439 - DNA, 60 bp, Artificial
  Synthetic oligonucleotide
tctccttttgttgcctagccacaatggacgagatcaatttcttggccctggctccgcgtc

SEQ ID NO: 21440 - DNA, 60 bp, Artificial
  Synthetic oligonucleotide
tgcttcagttgcgccttcctgttgtgggtggagcagcgtgtctggtgagtacgctacgac

SEQ ID NO: 21441 - DNA, 60 bp, Artificial
  Synthetic oligonucleotide
gggcggtatcttttactgattgtgtctttcagcgcagggattcttataatggcaaagtgt

SEQ ID NO: 21442 - DNA, 60 bp, Artificial
  Synthetic oligonucleotide
gcgggcacacttcgctgccagaaggtttaaaacgcgagctgctctttggttcgggcattc

SEQ ID NO: 21443 - DNA, 60 bp, Artificial
  Synthetic oligonucleotide
ggcaagtagagagacagggtagcgcctctcccgaaaatatagccacgttttccttcagcg

SEQ ID NO: 21444 - DNA, 60 bp, Artificial
  Synthetic oligonucleotide
gccacagtgctcctcaccgaaccaacgacgtggccgctgttagtcggagttctgctcata

SEQ ID NO: 21445 - DNA, 60 bp, Artificial
  Synthetic oligonucleotide
acaagtttagaaaccccaccgtggcgcccacccatgacgtcactacagagcggtctcagc

SEQ ID NO: 21446 - DNA, 60 bp, Artificial
  Synthetic oligonucleotide
gtgcagttggccatcatggaccagttaacaaattgagaacccgggctgacaaactcgtgg

SEQ ID NO: 21447 - DNA, 60 bp, Artificial
  Synthetic oligonucleotide
tcaaaccgcccaccgtgccgcctctgtctctggtcgacaccccgaccactttggatctgc

SEQ ID NO: 21448 - DNA, 60 bp, Artificial
  Synthetic oligonucleotide
tcgatgccgccgtctcagtgtctcggccccgaatgcccagacgtcgctccagatggggtc

SEQ ID NO: 21449 - DNA, 60 bp, Artificial
  Synthetic oligonucleotide
tttcgtgctggaacgctcgggaatcttgcccgccgtctgcagcgcccttccttccgactt

SEQ ID NO: 21450 - DNA, 60 bp, Artificial
  Synthetic oligonucleotide
tcgcccaacgctcccgctactttcgctcccaccgcgaggaaattatgcacaacacggctt

SEQ ID NO: 21451 - DNA, 60 bp, Artificial
  Synthetic oligonucleotide
tcgcaacgggtcgcaaactgtgaacctcagccgggcctttgacaccctgcgtcctctgtg

SEQ ID NO: 21452 - DNA, 60 bp, Artificial
  Synthetic oligonucleotide
acctgccttccgtcgttaaaacgccagccgcacgagtagccgctgtgggccccgtcaatg

SEQ ID NO: 21453 - DNA, 60 bp, Artificial
  Synthetic oligonucleotide
gacttcaccgttacacccagtttcgatttcctccacaccctacgttatctcgcacgcaca

SEQ ID NO: 21454 - DNA, 60 bp, Artificial
  Synthetic oligonucleotide
tcatcctcctcgcgcttgtggggcctgtggttggaaatgatggtcttgagcaacctgtga

SEQ ID NO: 21455 - DNA, 60 bp, Artificial
  Synthetic oligonucleotide
ctgcgaataatttccaccggcgggttgctaaaacccacacgcatgaccgacgggccctgc

SEQ ID NO: 21456 - DNA, 56 bp, Artificial
  Synthetic oligonucleotide
gggcattgcgcgcgtcggagcccgtcccgaaactcaccctcgagtgcagctgaaaa

SEQ ID NO: 21457 - DNA, 60 bp, Artificial
  Synthetic oligonucleotide
ctaacgccacaagctcccctcagtctcaacaattccactctctccctcaatgtaggcgcg

SEQ ID NO: 21458 - DNA, 60 bp, Artificial
  Synthetic oligonucleotide
aattgggccgccgacaatgacgccgcagccagccaaatcgccgtcggcaatgtgcacgcc

SEQ ID NO: 21459 - DNA, 60 bp, Artificial
  Synthetic oligonucleotide
ttgcctaattcttccatacactcgtccatgataatagcaatgggcccctttgaagccgcc

SEQ ID NO: 21460 - DNA, 60 bp, Artificial
  Synthetic oligonucleotide
ctgagcgttaatgtggtgaaaataaaagtctcgtcgcctggccgagcaagtgtgtgtgcc

SEQ ID NO: 21461 - DNA, 60 bp, Artificial
  Synthetic oligonucleotide
agtcgcgtctgtctcttttctggctagatgctgagaggagcggcagttccggacagccca

SEQ ID NO: 21462 - DNA, 60 bp, Artificial
  Synthetic oligonucleotide
ccgtccaactctatgcagattcgctcgagagccgcgaccacagatgccgctactgaacct

SEQ ID NO: 21463 - DNA, 58 bp, Artificial
  Synthetic oligonucleotide
aacacttccagcccgtcttctctccacaatgcctcccaagaatcaggctccgccaaag

SEQ ID NO: 21464 - DNA, 60 bp, Artificial
  Synthetic oligonucleotide
ccccgaacgtgcactgcttgtccgagatttccacgtttaaagacagtcatggcatcggtc

SEQ ID NO: 21465 - DNA, 60 bp, Artificial
  Synthetic oligonucleotide
aatccgaccccgtctttagagcccgtgactaagcaggaaccgctgccagatctgaagccc

SEQ ID NO: 21466 - DNA, 60 bp, Artificial
  Synthetic oligonucleotide
taagacggcggatggtggcgaggagcaccaggtctttgggtccggcttgctggatacgca

SEQ ID NO: 21467 - DNA, 60 bp, Artificial
  Synthetic oligonucleotide
gctgcttgccgaaggaccccatccaggtgtaggtttccacatcgtaggtgaggaagagcc

SEQ ID NO: 21468 - DNA, 60 bp, Artificial
  Synthetic oligonucleotide
ggccgaggtattcagctcaacgacgagtcggttagctcttcgcttggtctgcgaccagac

SEQ ID NO: 21469 - DNA, 60 bp, Artificial
  Synthetic oligonucleotide
gagtggaacttccgcaaggatgtcaacatgatcctgcagagctcgctgggtaatgacctg

SEQ ID NO: 21470 - DNA, 60 bp, Artificial
  Synthetic oligonucleotide
tacatgcacatcgccggacaggatgcttcggagtacctgagtccgggtctggtgcagttc

SEQ ID NO: 21471 - DNA, 60 bp, Artificial
  Synthetic oligonucleotide
ggaccgcatgtactccttctttagaaacttccagcccatgagccgtcaggtggtggacga

SEQ ID NO: 21472 - DNA, 60 bp, Artificial
  Synthetic oligonucleotide
aagcaccggatcccgcaacgcgggcggcgctgcagagccagccgtccggcattaactcct

SEQ ID NO: 21473 - DNA, 60 bp, Artificial
  Synthetic oligonucleotide
aagcgccagcccaacggcacctgcgagcccaacccacgcctcaacttctacccggtcttt

SEQ ID NO: 21474 - DNA, 60 bp, Artificial
  Synthetic oligonucleotide
aaacgccagcccaacggcacctgcgagcccaacccgcgtctcaacttctatcccgttttc

SEQ ID NO: 21475 - DNA, 60 bp, Artificial
  Synthetic oligonucleotide
aagcgccagcccaacggcacctgcgagcccaacccacgcctcaacttctacccggtcttc

SEQ ID NO: 21476 - DNA, 60 bp, Artificial
  Synthetic oligonucleotide
ttcgatgatgccccagtggtcgtacatgcacatcgccggccaggacgcctccgagtacct

SEQ ID NO: 21477 - DNA, 55 bp, Artificial
  Synthetic oligonucleotide
tcgataaaggatttcaactttttgaaggaaaactatcactttatttagacaactc

SEQ ID NO: 21478 - DNA, 60 bp, Artificial
  Synthetic oligonucleotide
tccattagaacctttaaatattgaatcttcagggcaactatctctcaatttcgataaagg

SEQ ID NO: 21479 - DNA, 60 bp, Artificial
  Synthetic oligonucleotide
aactttaaccaatcctacaactcctatagttattaaacctaccggagaaataagtttaaa

SEQ ID NO: 21480 - DNA, 60 bp, Artificial
  Synthetic oligonucleotide
ctacaactcctatagttattaaacctaccggagaaataagtttaaatataggagagggac

SEQ ID NO: 21481 - DNA, 60 bp, Artificial
  Synthetic oligonucleotide
ctcgatctggaggtttatctcctgaacagttcatcagcgaatttcccccaattgtatata

SEQ ID NO: 21482 - DNA, 60 bp, Artificial
  Synthetic oligonucleotide
ataccaaagacctggtcaacaattacaaggaactggggtttttccatccaataaatctct

SEQ ID NO: 21483 - DNA, 60 bp, Artificial
  Synthetic oligonucleotide
aaagtgaaggaatgatattatctttaaactttaccgatcctatcactatcaacccaactg

SEQ ID NO: 21484 - DNA, 60 bp, Artificial
  Synthetic oligonucleotide
tacttacactaacttgtctctttttctttcatcgccgtaaaacagcaacaaggatccata

SEQ ID NO: 21485 - DNA, 60 bp, Artificial
  Synthetic oligonucleotide
atatcttctcctctcatttttaattcttctggagagataacaacttcaaccactcaaggg

SEQ ID NO: 21486 - DNA, 58 bp, Artificial
  Synthetic oligonucleotide
ttttaattcttctggagagataacaacttcaaccactcaagggtctcaaattattccg

SEQ ID NO: 21487 - DNA, 60 bp, Artificial
  Synthetic oligonucleotide
ttaatctcggacaagggctagaaataaaacaaggtgctttgactcctaagatatcttctc

SEQ ID NO: 21488 - DNA, 60 bp, Artificial
  Synthetic oligonucleotide
ctcggacaagggctagaaataaaacaaggtgctttgactcctaagatatcttctcctctc

SEQ ID NO: 21489 - DNA, 60 bp, Artificial
  Synthetic oligonucleotide
ggagccattaaatttggaaatgggacaactagtattaaatgtagataatgtttttaaagt

SEQ ID NO: 21490 - DNA, 60 bp, Artificial
  Synthetic oligonucleotide
ttaaccacaagacatgcaatatatgtacttcattgtacctcattcatacctgacacaagt

SEQ ID NO: 21491 - DNA, 60 bp, Artificial
  Synthetic oligonucleotide
ttcttgacctctgaaagttataaatctaagcatgcagggctgactgtgaaatcctgctgt

SEQ ID NO: 21492 - DNA, 60 bp, Artificial
  Synthetic oligonucleotide
atatctttcttgatattcttgacctctgaaagttataaatctaagcatgcagggctgact

SEQ ID NO: 21493 - DNA, 50 bp, Artificial
  Synthetic oligonucleotide
tcagatacagaagtacagataaaatattctcaaatgcttacaacacaagt

SEQ ID NO: 21494 - DNA, 60 bp, Artificial
  Synthetic oligonucleotide
tgtggcaaaaatttttaaccacaagacatgcaatatatgtacttcattgtacctcattca

SEQ ID NO: 21495 - DNA, 60 bp, Artificial
  Synthetic oligonucleotide
cactcaagggtctcaaattattccgtttgatgcatatgagctcgtattaatgtggcaaaa

SEQ ID NO: 21496 - DNA, 58 bp, Artificial
  Synthetic oligonucleotide
tttttaaagtggaaaatggaaaattaggattaaatgttaattctccaatgtctataaa

SEQ ID NO: 21497 - DNA, 60 bp, Artificial
  Synthetic oligonucleotide
ttcgacagcgtcaacctctacgccaccttcttccccatggcgcacaacaccgcctccacc

SEQ ID NO: 21498 - DNA, 60 bp, Artificial
  Synthetic oligonucleotide
caccaacgtgcccatctccatcccctcgcgcaactgggccgccttccgcggctggtcctt

SEQ ID NO: 21499 - DNA, 56 bp, Artificial
  Synthetic oligonucleotide
aacgtgcccatctccatcccctcgcgcaactgggccgcctttcgcggctggtcctt

SEQ ID NO: 21500 - DNA, 51 bp, Artificial
  Synthetic oligonucleotide
gcccatctccatcccctcgcgcaactgggccgcctttcgcggctggtcctt

SEQ ID NO: 21501 - DNA, 60 bp, Artificial
  Synthetic oligonucleotide
gcaacatgaccaaagactggttcttggtacagatgctagccaactacaacataggctacc

SEQ ID NO: 21502 - DNA, 60 bp, Artificial
  Synthetic oligonucleotide
ggctacaacgtagcccaatgcaacatgaccaaagactggttcttggtacagatgctcgcc

SEQ ID NO: 21503 - DNA, 60 bp, Artificial
  Synthetic oligonucleotide
tctgttcgtcctcactgtcttccggatcgctgtccaggagcgccagctgttggggtaggt

SEQ ID NO: 21504 - DNA, 60 bp, Artificial
  Synthetic oligonucleotide
atcgctgtccaggagcgccagctgttggggtaggtattccctctcgaaggcgggcatgac

SEQ ID NO: 21505 - DNA, 60 bp, Artificial
  Synthetic oligonucleotide
cctgctcgtcctcactgtcttccggatcgctgtccaggagcgccagctgttggggtaggt

SEQ ID NO: 21506 - DNA, 60 bp, Artificial
  Synthetic oligonucleotide
ccgggttcctacacctacgagtggaacttcaggaaggacgttaacatgatcctccagagc

SEQ ID NO: 21507 - DNA, 60 bp, Artificial
  Synthetic oligonucleotide
gcgccagctgttggggtaggtattccctctcaaaggcgggcataacctctgcacttaggt

SEQ ID NO: 21508 - DNA, 56 bp, Artificial
  Synthetic oligonucleotide
gtccgagtgcaccagccccaccgcggcgtcatcgaggccgtctacctgcgcacccc

SEQ ID NO: 21509 - DNA, 59 bp, Artificial
  Synthetic oligonucleotide
tatcagaacgaccacagcaacttcctgaccacggtggtgcagaacaatgactttacccc

SEQ ID NO: 21510 - DNA, 60 bp, Artificial
  Synthetic oligonucleotide
ccaccctggaagccatgctgcgcaacgacaccaatgaccagtccttcaacgactacctgt

SEQ ID NO: 21511 - DNA, 60 bp, Artificial
  Synthetic oligonucleotide
taaagtaggcagttctaagacggcggatggtggcgaggagcaccaggtctttgggtccgg

SEQ ID NO: 21512 - DNA, 60 bp, Artificial
  Synthetic oligonucleotide
ggaccaccagcacggtgtagccggtgcatttggggaatttgtcatgcaacttggaaggga

SEQ ID NO: 21513 - DNA, 60 bp, Artificial
  Synthetic oligonucleotide
cacttggggaatttgtcatgcaacttggaagggaaggcatgaaagaatttggagacgccc

SEQ ID NO: 21514 - DNA, 60 bp, Artificial
  Synthetic oligonucleotide
ctcccagagctggaagtccgtgcgcttcttgtaggcggggttgggcaaagcgaaagtaac

SEQ ID NO: 21515 - DNA, 60 bp, Artificial
  Synthetic oligonucleotide
ccatggcccacaacactgcctccacccttgaagccatgctgcgcaacgacaccaatgatc

SEQ ID NO: 21516 - DNA, 60 bp, Artificial
  Synthetic oligonucleotide
ggtagacgatctggcggaagatggcgtgggagttggaggagatggtgggcctttggaaga

SEQ ID NO: 21517 - DNA, 60 bp, Artificial
  Synthetic oligonucleotide
agatgaaaagaaccagagttgatgaagacttcaaccccgtctacccctatgacaccacaa

SEQ ID NO: 21518 - DNA, 59 bp, Artificial
  Synthetic oligonucleotide
tttgtgtcaagaggccactcttgagtgccagcgagaagagttttctcctctgcgccggc

SEQ ID NO: 21519 - DNA, 60 bp, Artificial
  Synthetic oligonucleotide
gtttgtgtcaagaggccactcttgagtgccagcgagaagagttttctcctctgcgccggc

SEQ ID NO: 21520 - DNA, 60 bp, Artificial
  Synthetic oligonucleotide
atgctctcccactacaacatcggctaccagggcttccacgtgcccgagggctacaaggac

SEQ ID NO: 21521 - DNA, 60 bp, Artificial
  Synthetic oligonucleotide
agttcctctgcgaccgggtcatgtggcgcatccccttctccagcaacttcatgtccatgg

SEQ ID NO: 21522 - DNA, 60 bp, Artificial
  Synthetic oligonucleotide
atccacagggtatttaaaccagtcgagcccgtcaagaggccactcttgagtgccagcgag

SEQ ID NO: 21523 - DNA, 60 bp, Artificial
  Synthetic oligonucleotide
atccgcagggtatttaaaccagtcgagtccgtcaagaggccactcttgagtgccagcgag

SEQ ID NO: 21524 - DNA, 60 bp, Artificial
  Synthetic oligonucleotide
tgaagaccgcgtagttgcagaggcgctggtagaggtagttgagcgtggtggcgatgtgct

SEQ ID NO: 21525 - DNA, 60 bp, Artificial
  Synthetic oligonucleotide
cccgctgggaaaaggatgcgttagagcactggcatacatgccgcagatgtcatacacata

SEQ ID NO: 21526 - DNA, 60 bp, Artificial
  Synthetic oligonucleotide
atttgccacagccggtggggccgtagatgaccccgatgacgggttgcagctggtagttga

SEQ ID NO: 21527 - DNA, 52 bp, Artificial
  Synthetic oligonucleotide
ttttccccatggctcacaacaccgcttccacccttgaagccatgctgcggaa

SEQ ID NO: 21528 - DNA, 60 bp, Artificial
  Synthetic oligonucleotide
ccctctcgaaggcgggcatgacctcggcactcaggttgtcagtttctagaaacgaggagg

SEQ ID NO: 21529 - DNA, 60 bp, Artificial
  Synthetic oligonucleotide
tccaagacccggtagaggtgggattggatattgaggtacatgggcatgagcccgtcccgg

SEQ ID NO: 21530 - DNA, 60 bp, Artificial
  Synthetic oligonucleotide
ttccaagacccggtagaggtgggattggatgttgaggtacatgggcatgagcccgtcccg

SEQ ID NO: 21531 - DNA, 60 bp, Artificial
  Synthetic oligonucleotide
ggtccccggagagtttcatgaccagcatgaaggggacgagctgcttgccgaaggacccca

SEQ ID NO: 21532 - DNA, 60 bp, Artificial
  Synthetic oligonucleotide
cgaaggcgggcatgacctcggcactcaggttgtcagtttctagaaacgaggaggatttga

SEQ ID NO: 21533 - DNA, 60 bp, Artificial
  Synthetic oligonucleotide
ccgagaatttcatgaccagcatgaaggggacgagctgcttgccgaaggaccccatccagg

SEQ ID NO: 21534 - DNA, 60 bp, Artificial
  Synthetic oligonucleotide
cggagaatttcatgaccagcatgaaggggacgagctgcttgccgaaggaccccatccagg

SEQ ID NO: 21535 - DNA, 60 bp, Artificial
  Synthetic oligonucleotide
gtttcatgaccagcatgaaggggacgagctgcttgccgaaggaccccatccaggtgtagg

SEQ ID NO: 21536 - DNA, 60 bp, Artificial
  Synthetic oligonucleotide
gagagtttcatgaccagcatgaaggggacgagctgcttgccgaaggaccccatccaggtg

SEQ ID NO: 21537 - DNA, 60 bp, Artificial
  Synthetic oligonucleotide
tgcgcaccctgatcgcgcgcgaggaggtggccctgggcctgatgcacctgtgggacctgg

SEQ ID NO: 21538 - DNA, 60 bp, Artificial
  Synthetic oligonucleotide
gaccagcatgaaggggacgagctgcttgccgaaggaccccatccaggtgtaggtttctac

SEQ ID NO: 21539 - DNA, 60 bp, Artificial
  Synthetic oligonucleotide
gctcctacacctacgagtggaacttccgcaaggacgtcaacatgatcctgcagagttccc

SEQ ID NO: 21540 - DNA, 60 bp, Artificial
  Synthetic oligonucleotide
ccccgtacgtgcccatagacaaggaggtgaagatcgacgggttttacatgcgcatgaccc

SEQ ID NO: 21541 - DNA, 60 bp, Artificial
  Synthetic oligonucleotide
atgctggcccactacaacatcggctaccagggcttctacgtgcccgagggctacaaggac

SEQ ID NO: 21542 - DNA, 60 bp, Artificial
  Synthetic oligonucleotide
gaagagacagcccaacggcacctgcgagcccaacccgcgactcaacttctaccccgtgtt

SEQ ID NO: 21543 - DNA, 60 bp, Artificial
  Synthetic oligonucleotide
gaagagacagcccaacggcacctgcgagcccaacccgcgactcaacttctaccccgtatt

SEQ ID NO: 21544 - DNA, 60 bp, Artificial
  Synthetic oligonucleotide
tcctacacctacgagtggaacttccgcaaggatgtcaacatgatcctgcagagttccctc

SEQ ID NO: 21545 - DNA, 60 bp, Artificial
  Synthetic oligonucleotide
agtggaacttccgcaaggacgtcaacatgatcctgcagagttccctcggcaacgacctgc

SEQ ID NO: 21546 - DNA, 60 bp, Artificial
  Synthetic oligonucleotide
caagacccggtagaggtgggattggatgttgaggtacatgggcatgagcccgtcccgggg

SEQ ID NO: 21547 - DNA, 60 bp, Artificial
  Synthetic oligonucleotide
caggacccggtagaggtgggcttggatgttgaggtacatgggcatgagcccgtcccgggg

SEQ ID NO: 21548 - DNA, 60 bp, Artificial
  Synthetic oligonucleotide
ccaccctggaagccatgctgcgcaacgacaccaacgaccagtccttcaacgactacctct

SEQ ID NO: 21549 - DNA, 57 bp, Artificial
  Synthetic oligonucleotide
ccctggaagccatgctgcgcaacgacaccaacgaccaatctttcaacgactacctgt

SEQ ID NO: 21550 - DNA, 60 bp, Artificial
  Synthetic oligonucleotide
gcctccaccctggaagccatgctgcgcaacgacaccaacgaccagtccttcaacgactac

SEQ ID NO: 21551 - DNA, 60 bp, Artificial
  Synthetic oligonucleotide
tcgggctccatcccctacctcgacggcaccttctacctcaaccacaccttcaagaaggtc

SEQ ID NO: 21552 - DNA, 60 bp, Artificial
  Synthetic oligonucleotide
aaaatccttcaacaaccacgtgcgcaccctgatcgcgcgcgaggaggtgaccctgggcct

SEQ ID NO: 21553 - DNA, 57 bp, Artificial
  Synthetic oligonucleotide
ctacaaggccctgggcatagtcgcgccgcgcgtcctctcgagccgcaccttctaaaa

SEQ ID NO: 21554 - DNA, 60 bp, Artificial
  Synthetic oligonucleotide
tccgagtgcaccagccccaccgcggcgtcatcgaggccgtctacctgcgcacgcccttct

SEQ ID NO: 21555 - DNA, 60 bp, Artificial
  Synthetic oligonucleotide
atacccgccaacgccaccaacgtgcccatctccatcccatcgcgcaactgggcagcattt

SEQ ID NO: 21556 - DNA, 53 bp, Artificial
  Synthetic oligonucleotide
cccatggcatggggtgggtgagcgcggaggcgtacatgccgcaaatgtcgtaa

SEQ ID NO: 21557 - DNA, 60 bp, Artificial
  Synthetic oligonucleotide
gctcctccccgctcattatcatattggcacgtttccagttttaaggtatattattgatga

SEQ ID NO: 21558 - DNA, 60 bp, Artificial
  Synthetic oligonucleotide
aaagagggtgatcattcgaggccgaggtatccagctcaacgacgaggcggtgagctcctc

SEQ ID NO: 21559 - DNA, 60 bp, Artificial
  Synthetic oligonucleotide
aaaccccacgcacgagaaggtgctggcgatcgtaaacgcgctggccgaaaacagggccat

SEQ ID NO: 21560 - DNA, 60 bp, Artificial
  Synthetic oligonucleotide
agttttcgacgtggtcagagtgcaccagccgcaccgcggcgtcatcgaggccgtctacct

SEQ ID NO: 21561 - DNA, 60 bp, Artificial
  Synthetic oligonucleotide
agttttcgacgtggtcagagtacaccagccgcaccgcggcgtcatcgaggccgtctacct

SEQ ID NO: 21562 - DNA, 60 bp, Artificial
  Synthetic oligonucleotide
actacaccttccgccagggctacgtccgccaggcctgcaagatctccaacgtggagctca

SEQ ID NO: 21563 - DNA, 60 bp, Artificial
  Synthetic oligonucleotide
atcaggggtaccctagacagaggcccctccttcaagccttacagcggcaccgcctacaat

SEQ ID NO: 21564 - DNA, 60 bp, Artificial
  Synthetic oligonucleotide
aactgcacgtccattttccctgggcctaagctcgaaggctcctcccgatagtggggtgca

SEQ ID NO: 21565 - DNA, 60 bp, Artificial
  Synthetic oligonucleotide
cctgtggtaagctccagtgttaatggtgtatgagcagttggccatcaccgtccagtttag

SEQ ID NO: 21566 - DNA, 60 bp, Artificial
  Synthetic oligonucleotide
cctatggtaagccccagtgttaatggtgtatgagcagttggccatcaccgtccaatttag

SEQ ID NO: 21567 - DNA, 59 bp, Artificial
  Synthetic oligonucleotide
tccatgccagccctacagaggtggtggaagctctggtgtactctcgaacccggttaaaa

SEQ ID NO: 21568 - DNA, 60 bp, Artificial
  Synthetic oligonucleotide
ttctgagaggcctgaacacctcaacggtgtatggggtttgtccggttaggcgggcgcagt

SEQ ID NO: 21569 - DNA, 60 bp, Artificial
  Synthetic oligonucleotide
ctcaacggtgtatggggtttgtccggttaggcgggcacagtccagcgcgttctgcaaaac

SEQ ID NO: 21570 - DNA, 60 bp, Artificial
  Synthetic oligonucleotide
gcccttactctgcaagagggagattgcttacctgactatgaaacaatggacactgtgagc

SEQ ID NO: 21571 - DNA, 60 bp, Artificial
  Synthetic oligonucleotide
taagcgtggaagacatttccggcagcgaggaggacctagaaagcctcccagagcccatgc

SEQ ID NO: 21572 - DNA, 60 bp, Artificial
  Synthetic oligonucleotide
accccactaaagggcccaaagccagccgccggtgaggacaaccaccagacaaggcagctg

SEQ ID NO: 21573 - DNA, 60 bp, Artificial
  Synthetic oligonucleotide
gcagcttgggcaatgacctccgagtggatggggccaccatcaacattcagagcatcaacc

SEQ ID NO: 21574 - DNA, 54 bp, Artificial
  Synthetic oligonucleotide
caaaagcaatgaaaccattcagggtcccaatagcgccgcctgtggactgttttg

SEQ ID NO: 21575 - DNA, 60 bp, Artificial
  Synthetic oligonucleotide
ggcggttctgtgaaaagaccactggtcccgtgactttgaacctaaaagaaagttccatag

SEQ ID NO: 21576 - DNA, 60 bp, Artificial
  Synthetic oligonucleotide
gcagcttgggcaatgacctccgagtggatggagcctctatcaacattcaaagcatcaacc

SEQ ID NO: 21577 - DNA, 60 bp, Artificial
  Synthetic oligonucleotide
cgggcagaaactgtaagttcctcttgcaggaggcggatagcttctactatagtgtctcgg

SEQ ID NO: 21578 - DNA, 60 bp, Artificial
  Synthetic oligonucleotide
gaggcggatagcttctactatagtgtctcggacttcttcttcaaaggaacggcgaggagg

SEQ ID NO: 21579 - DNA, 60 bp, Artificial
  Synthetic oligonucleotide
gttttccttgcacaaggatggccggcagaaatgtcacccttcgtctgagagtcccagtgc

SEQ ID NO: 21580 - DNA, 60 bp, Artificial
  Synthetic oligonucleotide
acccttcgtctgagagtcccagtgcgcaccaaaattacaggcgcaggtcgtcggcgcgga

SEQ ID NO: 21581 - DNA, 60 bp, Artificial
  Synthetic oligonucleotide
gggcctacaacctccgtcgagcgcgcaagctaaccccagctgggcgtgccatggcagcca

SEQ ID NO: 21582 - DNA, 60 bp, Artificial
  Synthetic oligonucleotide
actgaagcctcatcgccatggcagcaatcagtcgcgccatcaagcaggaactgctggaag

SEQ ID NO: 21583 - DNA, 60 bp, Artificial
  Synthetic oligonucleotide
cctggggtacagcgggtaaccattacagatgcaagaagaagagtgtgtccctacgtgtac

SEQ ID NO: 21584 - DNA, 60 bp, Artificial
  Synthetic oligonucleotide
gtatgaggatgatttgactacataggcaccagaagcaatttctttagcaatgtttgactc

SEQ ID NO: 21585 - DNA, 58 bp, Artificial
  Synthetic oligonucleotide
agaaactgagaccactctgagacaaaggcccgggtccatgctagaacaaaggaggcaa

SEQ ID NO: 21586 - DNA, 60 bp, Artificial
  Synthetic oligonucleotide
gcgcgttctgcaaaacaaacaaggagtcgatggcactttcattcgctccattgcagatgc

SEQ ID NO: 21587 - DNA, 58 bp, Artificial
  Synthetic oligonucleotide
gcctgataggggcaacaccctttggaaaccgttaggctgtatgctttggcagcatttt

SEQ ID NO: 21588 - DNA, 51 bp, Artificial
  Synthetic oligonucleotide
ttgcatgaaaaccgcctgggtcaaaccaccctgcatcatacgatacaaggt

SEQ ID NO: 21589 - DNA, 60 bp, Artificial
  Synthetic oligonucleotide
gaaaccctaagcgtggaagacatttccggcagcgaggaggacctagaaagcctcccagag

SEQ ID NO: 21590 - DNA, 60 bp, Artificial
  Synthetic oligonucleotide
gttttggaggctgcaagatttacacttaagcaccagccagtaattataagtacttttaaa

SEQ ID NO: 21591 - DNA, 60 bp, Artificial
  Synthetic oligonucleotide
ccggttaggcgggcgcagtccagcgcgttctgcaaaacaaacaaggagtcgatggcactt

SEQ ID NO: 21592 - DNA, 60 bp, Artificial
  Synthetic oligonucleotide
cctagatgtcagaagagcccgtcagtgggactaccgtggagatagaggaggacactcaca

SEQ ID NO: 21593 - DNA, 60 bp, Artificial
  Synthetic oligonucleotide
cctagatgtcagaagagcccgtcagtgggactaccgtggagacaaaggaggacattcaca

SEQ ID NO: 21594 - DNA, 60 bp, Artificial
  Synthetic oligonucleotide
gagggagattgcttacctgactatgaaacaatggacacagtcagccgggtgtttgagggt

SEQ ID NO: 21595 - DNA, 60 bp, Artificial
  Synthetic oligonucleotide
tttacacttaagcaccagccagtaattataagtgcttttaagaactacccctagctcagg

SEQ ID NO: 21596 - DNA, 60 bp, Artificial
  Synthetic oligonucleotide
cggtggcttgacgggctatttcgaccatggcttggtggccccttggctcctcaacggctt

SEQ ID NO: 21597 - DNA, 56 bp, Artificial
  Synthetic oligonucleotide
aaaagtaatgaaacaattcagggacccaatagcgccgcctgtggactgttttgttg

SEQ ID NO: 21598 - DNA, 60 bp, Artificial
  Synthetic oligonucleotide
caggaacctcttcatcgctggagctttcagagattgcaacaaccttcttgtggctcatct

SEQ ID NO: 21599 - DNA, 56 bp, Artificial
  Synthetic oligonucleotide
catggcttggtggccccttggctcctcaacggctttccgctggcgcttctttgggg

SEQ ID NO: 21600 - DNA, 60 bp, Artificial
  Synthetic oligonucleotide
cggggtgcagcgggtgaccattacggatgcaagaagaagagtgtgtccctacgtgtacaa

SEQ ID NO: 21601 - DNA, 60 bp, Artificial
  Synthetic oligonucleotide
ggaatgcaggactccgctaccgttcacaactgcttggcaatggccgctattgctcgttcc

SEQ ID NO: 21602 - DNA, 60 bp, Artificial
  Synthetic oligonucleotide
atttactggagcctgccagatatggcggtggacccagtaacttttacctctagccacaat

SEQ ID NO: 21603 - DNA, 60 bp, Artificial
  Synthetic oligonucleotide
cccgcggtacaaaggggctacagaaggaagaaacagtatccgttattcccagctgccgcc

SEQ ID NO: 21604 - DNA, 60 bp, Artificial
  Synthetic oligonucleotide
gccggacaagtttctcaagtttgaggggagtggaaacccatttgcccatttgcgtcccaa

SEQ ID NO: 21605 - DNA, 58 bp, Artificial
  Synthetic oligonucleotide
tacagtcgacgacagttgggccgcttctattagtcgcattatgtccctaacagcgggg

SEQ ID NO: 21606 - DNA, 60 bp, Artificial
  Synthetic oligonucleotide
ggcctgtgttgcatcctgagctgggaggctagggccactactctcctgttgattgattga

SEQ ID NO: 21607 - DNA, 60 bp, Artificial
  Synthetic oligonucleotide
actgttcattgcgagcagacactgtgagttcctcttgcaggaggcggatagcttctacta

SEQ ID NO: 21608 - DNA, 60 bp, Artificial
  Synthetic oligonucleotide
ctcctgttgattgattggatttggcggttctgtgaaaagaccactggtcccgtgaccttg

SEQ ID NO: 21609 - DNA, 60 bp, Artificial
  Synthetic oligonucleotide
ggcctgtgctgcatcctgagctgggaggctagggccactactctcctgttgattgattgg

SEQ ID NO: 21610 - DNA, 60 bp, Artificial
  Synthetic oligonucleotide
atagctgccgccattggggcagtaccaggaatagcttcggtagcgctccaagctgcccgg

SEQ ID NO: 21611 - DNA, 58 bp, Artificial
  Synthetic oligonucleotide
atatcaccgtctaacaacaccggctggggcctaggcactcacaagctatttggaggag

SEQ ID NO: 21612 - DNA, 58 bp, Artificial
  Synthetic oligonucleotide
atatcaccgactaacaacaccggctggggcctaggcactcacaagctctttggaggag

SEQ ID NO: 21613 - DNA, 60 bp, Artificial
  Synthetic oligonucleotide
tgccctggtgtaccaggaaagtcccgctcccaccactgtggtacttcccagagacgccca

SEQ ID NO: 21614 - DNA, 60 bp, Artificial
  Synthetic oligonucleotide
gatcccgcaatgcgggcggcgctgcagagccagccgtccggcattaactcctcggacgat

SEQ ID NO: 21615 - DNA, 60 bp, Artificial
  Synthetic oligonucleotide
accggatcccgcaatgcgggcggcgctgcagagccagccgtccggcattaactcctcgga

SEQ ID NO: 21616 - DNA, 60 bp, Artificial
  Synthetic oligonucleotide
atcccggccaacgccaccaacgtgcccatctccatcccctcgcgcaactgggccgccttc

SEQ ID NO: 21617 - DNA, 50 bp, Artificial
  Synthetic oligonucleotide
agacggcggatggtggcgaggagcaccaggtctttgggtccggcttgttg

SEQ ID NO: 21618 - DNA, 52 bp, Artificial
  Synthetic oligonucleotide
tgagacggcggatggtggcgaggagcaccaggtctttgggtccggcttgttg

SEQ ID NO: 21619 - DNA, 60 bp, Artificial
  Synthetic oligonucleotide
atatttgtctgaaaatctggtgcagttcatcactgcaacacaaagcttttttaatctcgg

SEQ ID NO: 21620 - DNA, 60 bp, Artificial
  Synthetic oligonucleotide
ccatggtgggcacgctctgccccgtgaggcgggcgcaatcttgtacgctctagatggaaa

SEQ ID NO: 21621 - DNA, 60 bp, Artificial
  Synthetic oligonucleotide
ctgaccgacctggggcagaacatgctgtacgccaattccgcccacgccctcgacatgact

SEQ ID NO: 21622 - DNA, 60 bp, Artificial
  Synthetic oligonucleotide
caccgacctggggcagaacatgctgtacgccaactccgctcacgccttggacatgacttt

SEQ ID NO: 21623 - DNA, 60 bp, Artificial
  Synthetic oligonucleotide
tgctcccagagctggaagtccgtgcgcttcttgtaggcggggttgggcaaagcgaaagta

SEQ ID NO: 21624 - DNA, 60 bp, Artificial
  Synthetic oligonucleotide
cagagttggaagtctacccgtttcttgtaggcggggttgggcaaagcgaaagtaacatcg

SEQ ID NO: 21625 - DNA, 60 bp, Artificial
  Synthetic oligonucleotide
ccagagttggaagtctacccgtttcttgtaggcggggttgggcaaagcgaaagtaacatc

SEQ ID NO: 21626 - DNA, 60 bp, Artificial
  Synthetic oligonucleotide
gcgtcatcatcactttccacctcgtgttgagccacaatagcttgcttaaaagaatgcttt

SEQ ID NO: 21627 - DNA, 60 bp, Artificial
  Synthetic oligonucleotide
gatagaggtagactagaagcagcaacacccatgtcttcaccggctatttctggagaacct

SEQ ID NO: 21628 - DNA, 60 bp, Artificial
  Synthetic oligonucleotide
gctttattagaaccgcaaacgagatatttgttgcttttactgtctcccatagctatcgag

SEQ ID NO: 21629 - DNA, 60 bp, Artificial
  Synthetic oligonucleotide
ccctgacagcaaattttatagagaagacctcccctagtcacctgaccaagcttggcgggc

SEQ ID NO: 21630 - DNA, 60 bp, Artificial
  Synthetic oligonucleotide
cgggagataacttaagtgatgctaaaattgtttcacagcccagaagaggcagcagtggcg

SEQ ID NO: 21631 - DNA, 60 bp, Artificial
  Synthetic oligonucleotide
ggtaatattccaccactgttggatgttgctaactataagtctacaagtcaagctaaacca

SEQ ID NO: 21632 - DNA, 60 bp, Artificial
  Synthetic oligonucleotide
ccgcggatcctgcttgtgattctttaaaatggcgattatccgccttcttttccggttctc

SEQ ID NO: 21633 - DNA, 60 bp, Artificial
  Synthetic oligonucleotide
cgcaagtacacaaggccagtagtcaatgttttccaagtcatacagtgcaatccgacgctc

SEQ ID NO: 21634 - DNA, 60 bp, Artificial
  Synthetic oligonucleotide
tggagacgtaaaaggaggccaactgctcaaactggaaattctgctgtaaccccacgacgt

SEQ ID NO: 21635 - DNA, 60 bp, Artificial
  Synthetic oligonucleotide
cgggttttggatatgggaagtacgtattttgatattaggggtaacattgatcggggacct

SEQ ID NO: 21636 - DNA, 60 bp, Artificial
  Synthetic oligonucleotide
cttacccattgccgccttcgcctgcagatttacctgcttcagcttgtgttgcaacagcgc

SEQ ID NO: 21637 - DNA, 60 bp, Artificial
  Synthetic oligonucleotide
ccaggagtacagagagtggttgtggaagacgataggagaagaactgtaccctacgttacc

SEQ ID NO: 21638 - DNA, 60 bp, Artificial
  Synthetic oligonucleotide
ccaagcacaggcatgggcaactatcctaatactgtcatgtcggttgggacattagtggat

SEQ ID NO: 21639 - DNA, 60 bp, Artificial
  Synthetic oligonucleotide
cctaagtgtgttgggtaacaacgtccacctctaacggactgacggatgaaactgtacatt

SEQ ID NO: 21640 - DNA, 60 bp, Artificial
  Synthetic oligonucleotide
ctgcatttattgcccatggctactcctggaaagcgttctgcagaggaaccagatcaacag

SEQ ID NO: 21641 - DNA, 60 bp, Artificial
  Synthetic oligonucleotide
cctggcacagtggttcctgttggctgggatggtactgataagcctgttactgtcactaga

SEQ ID NO: 21642 - DNA, 60 bp, Artificial
  Synthetic oligonucleotide
gttgaagcattcttccaggatttcaaaagttatgtctgcggtacagtgaccctttgctcg

SEQ ID NO: 21643 - DNA, 61 bp, Artificial
  Synthetic oligonucleotide
ggtttgcaatatagaagtcaaattttgggtaatggtagaaatgtccgttttcatattcagg

SEQ ID NO: 21644 - DNA, 60 bp, Artificial
  Synthetic oligonucleotide
gcgccactcgctcataaaggctcttgtccacgctaatacgaagcttgctagttgagttgg

SEQ ID NO: 21645 - DNA, 60 bp, Artificial
  Synthetic oligonucleotide
cattgcagcgtgtctgcctgctcttatctgtagattgtgttttagaccgggaggcatttt

SEQ ID NO: 21646 - DNA, 60 bp, Artificial
  Synthetic oligonucleotide
gggcacaacctgggaaacgcttcctggggatagcactttaaaagtttggcttggcgtttc

SEQ ID NO: 21647 - DNA, 60 bp, Artificial
  Synthetic oligonucleotide
tggaccctgaatatgactttgtgcacgtcacgtctgaggatggcgggatcacttggagtg

SEQ ID NO: 21648 - DNA, 60 bp, Artificial
  Synthetic oligonucleotide
cgtgacttgggtgagtttgaaacaaattcttttagcatccacttaaggagacaagcacaa

SEQ ID NO: 21649 - DNA, 60 bp, Artificial
  Synthetic oligonucleotide
cacctatgtctaattcagcaggaggattagcattgcaatttaaaagccctttgtcagcag

SEQ ID NO: 21650 - DNA, 60 bp, Artificial
  Synthetic oligonucleotide
tcaactattgattcaagtatacagcaaattcagttagatgaaaggtctagatggggagga

SEQ ID NO: 21651 - DNA, 66 bp, Artificial
  Synthetic oligonucleotide
ctgcatgacatatgagaataacaataacaatccaaatcttcacacaacattggatttgaatgatgg

SEQ ID NO: 21652 - DNA, 60 bp, Artificial
  Synthetic oligonucleotide
ctactttgcctggatataatgttaatttgggttttcctgttactatcgaaggttctgcga

SEQ ID NO: 21653 - DNA, 60 bp, Artificial
  Synthetic oligonucleotide
gtagatcttaagtcattgcaggtatgaattgcggagtagattctaccacatgagctgcat

SEQ ID NO: 21654 - DNA, 60 bp, Artificial
  Synthetic oligonucleotide
gcaacctgtatggaatttcgttttgagtggtataaatgtatttgctcatcttggttgtct

SEQ ID NO: 21655 - DNA, 60 bp, Artificial
  Synthetic oligonucleotide
ggagaaatgtttgtgttagtccaaactctgtgaaggttaacatttccttcatgatctcgt

SEQ ID NO: 21656 - DNA, 60 bp, Artificial
  Synthetic oligonucleotide
cttctggttgtaatgtaacacctgttccttgcatgttacttctagattcaatgtcagctc

SEQ ID NO: 21657 - DNA, 60 bp, Artificial
  Synthetic oligonucleotide
cccaagtttgaatcagatatgtttgtgatttcagactgtcttgggtccgaagtctcagca

SEQ ID NO: 21658 - DNA, 60 bp, Artificial
  Synthetic oligonucleotide
cgtcttgaaggatttgtgttgctaatagaatttcatcgaatgactgaatgttgtgtccga

SEQ ID NO: 21659 - DNA, 60 bp, Artificial
  Synthetic oligonucleotide
caaactaatgttcagattgaaataccttctagagcttggacagcatttagaggctggagt

SEQ ID NO: 21660 - DNA, 60 bp, Artificial
  Synthetic oligonucleotide
cctctcgtgttgctggtggccacgcaagatgaaccgaattttcgtgaaatacctggacca

SEQ ID NO: 21661 - DNA, 60 bp, Artificial
  Synthetic oligonucleotide
ggcccagtaatcagaagtaggtaaaatattcgcttcagcttggcatgcaaacaatgcttg

SEQ ID NO: 21662 - DNA, 60 bp, Artificial
  Synthetic oligonucleotide
gggtgaattgactgaccttggacagagtttgctgtatactgagtctgcacatagtttgca

SEQ ID NO: 21663 - DNA, 60 bp, Artificial
  Synthetic oligonucleotide
gcgggaaaatgcttggtcgagccaaagaacttaaatagttagtttgtggccatggtttga

SEQ ID NO: 21664 - DNA, 60 bp, Artificial
  Synthetic oligonucleotide
cggtagttattgttcacattgaatagataagcgtagccaatcagcaaatgaggaggcggc

SEQ ID NO: 21665 - DNA, 60 bp, Artificial
  Synthetic oligonucleotide
ccagatgataggcatgagtggttgagagatttaattaccctattagctgccatttgtagg

SEQ ID NO: 21666 - DNA, 60 bp, Artificial
  Synthetic oligonucleotide
cgacttggacacacatcattttcaactgtatctgttgggtctgctgaactgcgtggagga

SEQ ID NO: 21667 - DNA, 58 bp, Artificial
  Synthetic oligonucleotide
agttccagcgcccaggactaaatttaaaatgccacaacctgtgtccaggccttcaaaa

SEQ ID NO: 21668 - DNA, 60 bp, Artificial
  Synthetic oligonucleotide
tggttattgacacccctgctttgtctactgttcctgctatacctgcacctcctcctactg

SEQ ID NO: 21669 - DNA, 60 bp, Artificial
  Synthetic oligonucleotide
gtaacatattctaagcagcaagtgttccacgttgggaatactgtgtttagcttgtgggga

SEQ ID NO: 21670 - DNA, 60 bp, Artificial
  Synthetic oligonucleotide
cttgtcgtccgtgcggggtaagaccatggagtttcccttttctgttactcctgatagccc

SEQ ID NO: 21671 - DNA, 60 bp, Artificial
  Synthetic oligonucleotide
cgcagaccacaggattgacattgcagttgccatcagtgacgatggaggacttacctggcc

SEQ ID NO: 21672 - DNA, 60 bp, Artificial
  Synthetic oligonucleotide
ccctccctcgagtattgctgaccattgaaatgattcccttgttggacaagtattaaacat

SEQ ID NO: 21673 - DNA, 60 bp, Artificial
  Synthetic oligonucleotide
gaagggaggaagcacattgccgactattgcagaagatgaacctgcccagttgaactcggc

SEQ ID NO: 21674 - DNA, 60 bp, Artificial
  Synthetic oligonucleotide
ggcttttcccgcaacctgtaggtccgattactaaactaataagtggatcagagttcatat

SEQ ID NO: 21675 - DNA, 60 bp, Artificial
  Synthetic oligonucleotide
cgagtctgagtctgtagataatgaattggttgacatgtactcatttatagctttgaacgg

SEQ ID NO: 21676 - DNA, 60 bp, Artificial
  Synthetic oligonucleotide
aagtcctcctccagaagacggatgagctcggcgatggtggcgcgcacctcgcgctcgaag

SEQ ID NO: 21677 - DNA, 60 bp, Artificial
  Synthetic oligonucleotide
ctcttttgttcgaaactttgaacccctggcccggcaagtggtggatgatgctgctgcggc

SEQ ID NO: 21678 - DNA, 60 bp, Artificial
  Synthetic oligonucleotide
ataattgcgcacaaactgctccatctctctcaccatttcctcagttacctccgtctcccc

SEQ ID NO: 21679 - DNA, 60 bp, Artificial
  Synthetic oligonucleotide
atgtccccgggcacaccgccaagtcccatgtccccgggcacaccgccaagtcccatgtcc

SEQ ID NO: 21680 - DNA, 60 bp, Artificial
  Synthetic oligonucleotide
gcgctaccatcccaccatacactaagtactcgtgccgtcattgttgccgtttcagccgcc

SEQ ID NO: 21681 - DNA, 60 bp, Artificial
  Synthetic oligonucleotide
caggagcagacagcaaaactatgaccatagctcaggccaacattgtcggctcgaccatag

SEQ ID NO: 21682 - DNA, 60 bp, Artificial
  Synthetic oligonucleotide
aaaaggggcggggtgggagcctcgaggtgatagttcggcggaatctgcgacgtgcggagg

SEQ ID NO: 21683 - DNA, 60 bp, Artificial
  Synthetic oligonucleotide
gtacctgcgctccccgttttcagccggcaacgcaaccacctaatcgtatgggttcgtctg

SEQ ID NO: 21684 - DNA, 60 bp, Artificial
  Synthetic oligonucleotide
ctcccggatagcaaaacgacaggcctcaagcatttcatcatggagcttggtccactgagc

SEQ ID NO: 21685 - DNA, 60 bp, Artificial
  Synthetic oligonucleotide
cgccctttggctgcctgcccggttcaaaacaaccctttggcggtacgcccagaacacaaa

SEQ ID NO: 21686 - DNA, 60 bp, Artificial
  Synthetic oligonucleotide
gccacaggacaaaaccacgtacgcttacatgaaccaaagaattgctcctgccgggcttat

SEQ ID NO: 21687 - DNA, 60 bp, Artificial
  Synthetic oligonucleotide
gaacctgctgcgtttcatgcccaataccttggtgtaccccaccgcggccacaattgctgc

SEQ ID NO: 21688 - DNA, 60 bp, Artificial
  Synthetic oligonucleotide
gctctttccgtccgtggttcatatcactcctactgtggtgccggatcgcacgcggtttac

SEQ ID NO: 21689 - DNA, 60 bp, Artificial
  Synthetic oligonucleotide
tagagacgacccatggctgccttatcacctactgtcagggcggctctgcaaagccaagcg

SEQ ID NO: 21690 - DNA, 60 bp, Artificial
  Synthetic oligonucleotide
gcgctgacattaccgatctcaacatgcaaaacgaccacagccattttgccaccaccgttg

SEQ ID NO: 21691 - DNA, 60 bp, Artificial
  Synthetic oligonucleotide
cagttgagggtaattgtagacaaagcgactaagccaagttacgcctggcgcgctgacggc

SEQ ID NO: 21692 - DNA, 60 bp, Artificial
  Synthetic oligonucleotide
ccggttccctgaaaacgctatccttatgcggcctccccaaccgtttatggtccaagtgcc

SEQ ID NO: 21693 - DNA, 60 bp, Artificial
  Synthetic oligonucleotide
cgtagagttccataactagcatgaagggaaccaactgctttccgcaactgccatgccagc

SEQ ID NO: 21694 - DNA, 60 bp, Artificial
  Synthetic oligonucleotide
gttttcagtgggatgacaccgaagacggggcttggagccgccctctcgccgaacaagtca

SEQ ID NO: 21695 - DNA, 60 bp, Artificial
  Synthetic oligonucleotide
tcttccggaggctgtgcgggcggcggcgaacggcaaaattgcgcaaagccccaagatgac

SEQ ID NO: 21696 - DNA, 60 bp, Artificial
  Synthetic oligonucleotide
ggtagaggggctttcaacaggcattcacggggcagtagacatagctcggcaggaagtgga

SEQ ID NO: 21697 - DNA, 60 bp, Artificial
  Synthetic oligonucleotide
gggcacacaacctctactaagcaactgggcaaccattggcatcagcgagctacacggtgg

SEQ ID NO: 21698 - DNA, 60 bp, Artificial
  Synthetic oligonucleotide
cgggtcattacacctatgagtattttcacccagacattgtgctcatgaaaggctgcgcgg

SEQ ID NO: 21699 - DNA, 60 bp, Artificial
  Synthetic oligonucleotide
aaccttgtcttccgcagtggcaatgcaggctccaaacttcatccccggtcacgtaggagg

SEQ ID NO: 21700 - DNA, 56 bp, Artificial
  Synthetic oligonucleotide
aaaacgccgccgacgtctgtctactccagcagcatccgatcctctacaagcgctac

SEQ ID NO: 21701 - DNA, 60 bp, Artificial
  Synthetic oligonucleotide
gccgctctctgtacacagaaacaaatgagcgccttcttgccgctgaactgcgccgtctgg

SEQ ID NO: 21702 - DNA, 60 bp, Artificial
  Synthetic oligonucleotide
ctgcctgagtgtgacgcatgctgcctatcccgccctcggtttgccgccaaaagtttccaa

SEQ ID NO: 21703 - DNA, 60 bp, Artificial
  Synthetic oligonucleotide
ttgagccaaaccaaagttacactcacaacggaggcacagcaacattctttctcccacccc

SEQ ID NO: 21704 - DNA, 60 bp, Artificial
  Synthetic oligonucleotide
tactggtgacaaagattcgtgagcctccaccgccttacgatgctgtgtttggtcccgcgc

SEQ ID NO: 21705 - DNA, 60 bp, Artificial
  Synthetic oligonucleotide
gtgcggaaacaaagtagtcagggcttcgggcaagatgttaactttccaaccccgattgtg

SEQ ID NO: 21706 - DNA, 60 bp, Artificial
  Synthetic oligonucleotide
cccattcctgcaggtcaaacccaagtgccagtatcaattccagccagaaactgggcagcc

SEQ ID NO: 21707 - DNA, 60 bp, Artificial
  Synthetic oligonucleotide
gtttccctgttccggggattggggtgggcagtggagtatggaattagacgaccgtcctcc

SEQ ID NO: 21708 - DNA, 60 bp, Artificial
  Synthetic oligonucleotide
ggactcactgctggtcccaccgtcctcctcccaccacatatcctgcatatcttcagctcc

SEQ ID NO: 21709 - DNA, 60 bp, Artificial
  Synthetic oligonucleotide
atggaggaccgtcaagctctcgaggaggcgggagaggagatgggtttcccagttgtcaac

SEQ ID NO: 21710 - DNA, 60 bp, Artificial
  Synthetic oligonucleotide
ccaggggcaaagaataggcctcggcagctttacgaagagaggtgtgggtcaaagcgaatg

SEQ ID NO: 21711 - DNA, 60 bp, Artificial
  Synthetic oligonucleotide
ttgcccgcctggtcttttctggggttcatgttgtgcagcactacgaaaacagagtaaccg

SEQ ID NO: 21712 - DNA, 60 bp, Artificial
  Synthetic oligonucleotide
tcactgccgctgcaacttgtgcagtccccaccgcagcctggtccacaacactgctttact

SEQ ID NO: 21713 - DNA, 60 bp, Artificial
  Synthetic oligonucleotide
gcttccacgccgccacaccggtaacattacccaaggtatgggcagcaaaatccacaggcg

SEQ ID NO: 21714 - DNA, 60 bp, Artificial
  Synthetic oligonucleotide
cctatgacttggctttactccccgaagactatgaaaagaccaccgcgcccgacgccgtcc

SEQ ID NO: 21715 - DNA, 60 bp, Artificial
  Synthetic oligonucleotide
gtggagagttttgaggacatggatctgcggtgttatgaacagttgtctcccagccccgag

SEQ ID NO: 21716 - DNA, 60 bp, Artificial
  Synthetic oligonucleotide
gtctgagagttttgtaccagcacagaacgtacttagggaagaccacagtcagggacgggg

SEQ ID NO: 21717 - DNA, 60 bp, Artificial
  Synthetic oligonucleotide
ccaaggtcagctggaggcgctagcaatggttcacagcacttccgcgcccttgaaagttac

SEQ ID NO: 21718 - DNA, 60 bp, Artificial
  Synthetic oligonucleotide
ggggcgctccgtcagctaattgcagaggtaccccaaacattagtgtatagaacgggacca

SEQ ID NO: 21719 - DNA, 60 bp, Artificial
  Synthetic oligonucleotide
gcatcgggcgtcgttgttgacgaagacgagtcgcctcctgtgatactcgacgggttaagg

SEQ ID NO: 21720 - DNA, 60 bp, Artificial
  Synthetic oligonucleotide
gctggtggcggattcacacaaggggacgtagaaaggcctctgtgcgtcgtcgtcgtactt

SEQ ID NO: 21721 - DNA, 60 bp, Artificial
  Synthetic oligonucleotide
gcgcttcctgtgcctgcttctactcgtattgggttggtgtttgcccgtgaccggtcatcc

SEQ ID NO: 21722 - DNA, 60 bp, Artificial
  Synthetic oligonucleotide
atcctgcccatcccgacacctttgacgccgccctaacaagcaacggagcgcaattagctg

SEQ ID NO: 21723 - DNA, 60 bp, Artificial
  Synthetic oligonucleotide
acgtggcacaagctcccgcaacagtcccaattgttaggaggcataggagaagagtagggg

SEQ ID NO: 21724 - DNA, 60 bp, Artificial
  Synthetic oligonucleotide
ctctcagactcagacagccatgcagaagacagggaaggacagccaactgcgggtgcagga

SEQ ID NO: 21725 - DNA, 60 bp, Artificial
  Synthetic oligonucleotide
ttgcaaatttccctgaaacagcaggagcaagcggggaactgcgcgggccaagagcagctc

SEQ ID NO: 21726 - DNA, 60 bp, Artificial
  Synthetic oligonucleotide
ggtctgccacaaccctgtctcatatgctggaaagagagctgtttacccgctccaacgcaa

SEQ ID NO: 21727 - DNA, 60 bp, Artificial
  Synthetic oligonucleotide
atgtcatggacaacgtcaaccccttcaaccaccaccgcaactacggcctgcgctaccgct

SEQ ID NO: 21728 - DNA, 60 bp, Artificial
  Synthetic oligonucleotide
atctgaggtgccccagagcgaggtgtaccagtccgggccagattacttcttccagaccag

SEQ ID NO: 21729 - DNA, 60 bp, Artificial
  Synthetic oligonucleotide
cgctagggtatttaaacctgacgagttccgtcaagaggccactcttgagtgccagcgaga

SEQ ID NO: 21730 - DNA, 60 bp, Artificial
  Synthetic oligonucleotide
cgctagagtatttaaacctgacgagttccgtcaagaggccactcttgagtgccagcgaga

SEQ ID NO: 21731 - DNA, 52 bp, Artificial
  Synthetic oligonucleotide
gaggccgtctacctgcgcacgcccttctccgccggcaacgccaccacataag

SEQ ID NO: 21732 - DNA, 52 bp, Artificial
  Synthetic oligonucleotide
gaggccgtctacctgcgcacgcccttctccgccggaaacgccaccacataag

SEQ ID NO: 21733 - DNA, 52 bp, Artificial
  Synthetic oligonucleotide
gaggccgtctacctgcgcacgcccttctccgccggcaacgccaccacctaag

SEQ ID NO: 21734 - DNA, 60 bp, Artificial
  Synthetic oligonucleotide
ggcatgtcctttcctgaggagtctgtcagagaccatgagaagaatgctttcaaagacctc

SEQ ID NO: 21735 - DNA, 60 bp, Artificial
  Synthetic oligonucleotide
atgctttcaaagacctctcaaagttgagatgtgttttacttctcacaaggaagtgaaggg

SEQ ID NO: 21736 - DNA, 60 bp, Artificial
  Synthetic oligonucleotide
tctgagtcaattcactcacactgtgaaaacagatgtgttgaaagatgccaagcttatagc

SEQ ID NO: 21737 - DNA, 60 bp, Artificial
  Synthetic oligonucleotide
gagcacgaatgcttacaaattgtgactaaggacgagagctccatcaacatctctggctat

SEQ ID NO: 21738 - DNA, 60 bp, Artificial
  Synthetic oligonucleotide
ctcacactgtgaaaacagatgtgttgaaagatgccaagcttatagctgacagcattgact

SEQ ID NO: 21739 - DNA, 60 bp, Artificial
  Synthetic oligonucleotide
gtaataggtttactaccacaagatatggtgattacaactcaaggttctgacgacataagg

SEQ ID NO: 21740 - DNA, 60 bp, Artificial
  Synthetic oligonucleotide
ccagccaacaaacattacattcactgttttagaaagccacatgatgagaagggcttcaag

SEQ ID NO: 21741 - DNA, 60 bp, Artificial
  Synthetic oligonucleotide
ggaatattgaattgaggatttgattcttactcaaacactgggaggactgtgtgattctag

SEQ ID NO: 21742 - DNA, 60 bp, Artificial
  Synthetic oligonucleotide
gcgcacctcgagtgaaagtggaagacaacttattttggattgttttgacaatggtaggaa

SEQ ID NO: 21743 - DNA, 60 bp, Artificial
  Synthetic oligonucleotide
gaaattgtcaacagcatcactagtgctcactactctttcttccaccatgggttcatgtgt

SEQ ID NO: 21744 - DNA, 60 bp, Artificial
  Synthetic oligonucleotide
gcatcactagtgctcactactctttcttccaccatgggttcatgtgtcctactgtgagac

SEQ ID NO: 21745 - DNA, 60 bp, Artificial
  Synthetic oligonucleotide
ttcacagttaacatccaacgctacacagagatctagaaattttattctgggtgaccactt

SEQ ID NO: 21746 - DNA, 60 bp, Artificial
  Synthetic oligonucleotide
gctacccaatgttctgcacaatcctacaaagccagatgcaatggaactttggaatgcaga

SEQ ID NO: 21747 - DNA, 60 bp, Artificial
  Synthetic oligonucleotide
aatggaactttggaatgcagatttgttgatagcttcagataataatttctgtgcacctcg

SEQ ID NO: 21748 - DNA, 60 bp, Artificial
  Synthetic oligonucleotide
taaactctccacccctgataatctacccgaagtcatggataaagattcacagagtctgct

SEQ ID NO: 21749 - DNA, 60 bp, Artificial
  Synthetic oligonucleotide
ccactcctgataatctccccgaagtcatggataaagattcacagagtctgctatactctg

SEQ ID NO: 21750 - DNA, 60 bp, Artificial
  Synthetic oligonucleotide
caatgagaactcttgacaatatgcttctttgcatctgaccacttgataccttgcgggtcc

SEQ ID NO: 21751 - DNA, 60 bp, Artificial
  Synthetic oligonucleotide
gcgggtccaaattcattctgtctcagctttacggtagaagaagttttcatagagttcacc

SEQ ID NO: 21752 - DNA, 60 bp, Artificial
  Synthetic oligonucleotide
gtggtccacactgatcccaacatcctttaaagcagtggtggccttcaagatggttttctg

SEQ ID NO: 21753 - DNA, 60 bp, Artificial
  Synthetic oligonucleotide
ccaacatcctttaaagcagtggtggccttcaaaatggttttctggaatattgaattgagg

SEQ ID NO: 21754 - DNA, 60 bp, Artificial
  Synthetic oligonucleotide
ttgttcattgtagaatgatgttctcccgtctataagtggtattaaattgatgtcgacact

SEQ ID NO: 21755 - DNA, 60 bp, Artificial
  Synthetic oligonucleotide
gaggatttgattcttactcaaacactgggaggactgtgtgattctagatctttcagcctg

SEQ ID NO: 21756 - DNA, 60 bp, Artificial
  Synthetic oligonucleotide
cacttcctcataatgattggagcgattgtccatcagaacatttaaactctccactcctga

SEQ ID NO: 21757 - DNA, 60 bp, Artificial
  Synthetic oligonucleotide
ggacacatcattgggccccacttactatgatccatgctataggagacatgtgccaatgag

SEQ ID NO: 21758 - DNA, 60 bp, Artificial
  Synthetic oligonucleotide
gccacataagtagggttgagaggtagtccctcccttttatgtcagcttgcaagtcctttg

SEQ ID NO: 21759 - DNA, 56 bp, Artificial
  Synthetic oligonucleotide
acataagtagggttgagagatagtccctcccttttatgtcagcttgcaagtccttt

SEQ ID NO: 21760 - DNA, 60 bp, Artificial
  Synthetic oligonucleotide
cacatatacaactgatagcgtaattaatgaacctctctgaaatgagggcataaaagtctg

SEQ ID NO: 21761 - DNA, 60 bp, Artificial
  Synthetic oligonucleotide
caaagagagaaatctgatcatcactagaggtataagcatctatcgtaccaccgcatatac

SEQ ID NO: 21762 - DNA, 60 bp, Artificial
  Synthetic oligonucleotide
ctgatcatcactagaggtataagcatctatcgtaccaccacatatacaactgatagcgta

SEQ ID NO: 21763 - DNA, 60 bp, Artificial
  Synthetic oligonucleotide
cacaaattctttaacattgctgtggtacagtttgtcagtgacagagccttactaagtgcc

SEQ ID NO: 21764 - DNA, 60 bp, Artificial
  Synthetic oligonucleotide
ttctttaacattgcagtggtacagtttgtcagtgacagagccttactaagtgcttctgaa

SEQ ID NO: 21765 - DNA, 60 bp, Artificial
  Synthetic oligonucleotide
attcacagagtctgctatactctgactcttcaaaaagtgaattactctcctgagcatatt

SEQ ID NO: 21766 - DNA, 60 bp, Artificial
  Synthetic oligonucleotide
tgaataaagattcacagagtctgctatactctgactcttcaaaaagtgaattactctcct

SEQ ID NO: 21767 - DNA, 60 bp, Artificial
  Synthetic oligonucleotide
tggtcgagtgcaacaaccactatctgtgtctcaactgtcttaccttacttctgagtgtca

SEQ ID NO: 21768 - DNA, 60 bp, Artificial
  Synthetic oligonucleotide
gattacataagtgaacagggacaccattcgcaaccgactgatcaatgattgtgtcaattg

SEQ ID NO: 21769 - DNA, 60 bp, Artificial
  Synthetic oligonucleotide
gagttgatcactcatataatagtggaactctattagagtcctaaattcttctgggtctct

SEQ ID NO: 21770 - DNA, 60 bp, Artificial
  Synthetic oligonucleotide
aaaatctagatttaaactctgcaacaaacctgccaataacacttttagggctcacaaatt

SEQ ID NO: 21771 - DNA, 60 bp, Artificial
  Synthetic oligonucleotide
gtcaattgtttctgccagttggtgtggctctttacactttatattgtgaagggcagctgc

SEQ ID NO: 21772 - DNA, 60 bp, Artificial
  Synthetic oligonucleotide
gactgatcaatgattgtgtcaattgtttctgccagttggtgtggctctttacactttata

SEQ ID NO: 21773 - DNA, 60 bp, Artificial
  Synthetic oligonucleotide
gggacaccattcgcaaccgactgatcaatgattgtgtcaattgtttctgccagttggtgt

SEQ ID NO: 21774 - DNA, 60 bp, Artificial
  Synthetic oligonucleotide
ctgagtacataacggttacatcatgtactagatacttggcctgttgattcattgagccag

SEQ ID NO: 21775 - DNA, 60 bp, Artificial
  Synthetic oligonucleotide
ggtgctcactagacaaatagtttgttgtgaactcttcatggagttgcccagtcttcaacc

SEQ ID NO: 21776 - DNA, 60 bp, Artificial
  Synthetic oligonucleotide
ccaccacttgattgtaccatcacctttccccttgacttactataacagagagcataaccc

SEQ ID NO: 21777 - DNA, 60 bp, Artificial
  Synthetic oligonucleotide
ctctggaactgatgtcttgtgtggaaaccacgtgaaggaccccaatgttcttgtagtcgc

SEQ ID NO: 21778 - DNA, 60 bp, Artificial
  Synthetic oligonucleotide
gtaacccttcaccctctggaactgatgtcttgtgtggaaaccacgtgaaggaccccaacg

SEQ ID NO: 21779 - DNA, 60 bp, Artificial
  Synthetic oligonucleotide
gaggagaggtgctcactagacaaatagtttgttgtgaactcttcatggagttgcccagtc

SEQ ID NO: 21780 - DNA, 55 bp, Artificial
  Synthetic oligonucleotide
agtcctaaattcttctgggtctctttgcaaaagctctgtgagagattgatcaaag

SEQ ID NO: 21781 - DNA, 60 bp, Artificial
  Synthetic oligonucleotide
tacttctctttccttaaatagtgaaccattgttaaaagaggacgtgaggagggataaata

SEQ ID NO: 21782 - DNA, 60 bp, Artificial
  Synthetic oligonucleotide
aaacactgaaagtattcatggttaaagtatgtccttgttgacactgcctttgtcaactct

SEQ ID NO: 21783 - DNA, 60 bp, Artificial
  Synthetic oligonucleotide
acataagccattataaagtatctaagattttggaggagcttttgagaacgtttactaggg

SEQ ID NO: 21784 - DNA, 60 bp, Artificial
  Synthetic oligonucleotide
caccaggccttttataatctggtccctcgatacttgtgcatccatctttacttaaaaact

SEQ ID NO: 21785 - DNA, 60 bp, Artificial
  Synthetic oligonucleotide
gcttacccatatcaaacttgaaattaaggttccttgacttataatgggtgtacctcccca

SEQ ID NO: 21786 - DNA, 60 bp, Artificial
  Synthetic oligonucleotide
ccagtcgggtatttgctcattatagaatgatgttctcccgtctataagtggtattaaatt

SEQ ID NO: 21787 - DNA, 60 bp, Artificial
  Synthetic oligonucleotide
gagtatggatttaaaacactgaaagtattcatggttaaagtatgtccttgttgacactgc

SEQ ID NO: 21788 - DNA, 60 bp, Artificial
  Synthetic oligonucleotide
atcaagagtatggatttaaaacactgaaagtattcatggttaaagtatgtccttgttgac

SEQ ID NO: 21789 - DNA, 60 bp, Artificial
  Synthetic oligonucleotide
gcacttcgagcactcccctgtcttttgataaatcagttgtaattcagtgttacccaatga

SEQ ID NO: 21790 - DNA, 60 bp, Artificial
  Synthetic oligonucleotide
gcatagcacttcgagcactcccctgtcttttgataaatcaattgaaactcaatattaccc

SEQ ID NO: 21791 - DNA, 60 bp, Artificial
  Synthetic oligonucleotide
ctctctgatttccgatcagctactaatgagaaaccacctgagggatttaatgggagtgcc

SEQ ID NO: 21792 - DNA, 60 bp, Artificial
  Synthetic oligonucleotide
gtctttagatcagggagtcttgctttggaggcactctcaaaaatgatgcagtccataagt

SEQ ID NO: 21793 - DNA, 60 bp, Artificial
  Synthetic oligonucleotide
gtcctctaaagattagatcatgtggcaagatgttgtgaatggtctttagatcagggagtc

SEQ ID NO: 21794 - DNA, 60 bp, Artificial
  Synthetic oligonucleotide
aagacttgcaggcacattcacttggaccttgtctgattcctcaggagtagaaaatccagg

SEQ ID NO: 21795 - DNA, 60 bp, Artificial
  Synthetic oligonucleotide
gaagaggtggagagtcagggaggcccagcgggtctcaaagtgtcacaacatttggtcctc

SEQ ID NO: 21796 - DNA, 60 bp, Artificial
  Synthetic oligonucleotide
tgccttgacaaagttcaaagaagatgtggaatccgccctacacctattcaagacaacagt

SEQ ID NO: 21797 - DNA, 60 bp, Artificial
  Synthetic oligonucleotide
ctcaaaaccatcccctgtgggagagcacctataactgaagaggtcagtccaggttgtgcg

SEQ ID NO: 21798 - DNA, 60 bp, Artificial
  Synthetic oligonucleotide
gaggcctcctcatcccaaccatgtgcaggatctgtgatctttggtcaagctgctgtgcag

SEQ ID NO: 21799 - DNA, 59 bp, Artificial
  Synthetic oligonucleotide
ccatgtgcaggatctgtgatctttggtcaagctgctgtgcagtcaagtttcccatatag

SEQ ID NO: 21800 - DNA, 60 bp, Artificial
  Synthetic oligonucleotide
cagtagcaccttgttgaggcctcctcatcccaaccatgtgcaggatctgtgatctttggt

SEQ ID NO: 21801 - DNA, 60 bp, Artificial
  Synthetic oligonucleotide
gtgatgaatctttcacatcccacactctcaccacaccagtagcaccttgttgaggcctcc

SEQ ID NO: 21802 - DNA, 60 bp, Artificial
  Synthetic oligonucleotide
ccacactctcaccacaccagtagcaccttgttgaggcctcctcatcccaaccatgtgcag

SEQ ID NO: 21803 - DNA, 60 bp, Artificial
  Synthetic oligonucleotide
ttgattgtttaaaagtgatgaatctttcacatcccacactctcaccacaccagtagcacc

SEQ ID NO: 21804 - DNA, 60 bp, Artificial
  Synthetic oligonucleotide
gtaaagtaagccaagatctgtgagtgcttgcacaacgtcattgagtggggtctgtgactg

SEQ ID NO: 21805 - DNA, 60 bp, Artificial
  Synthetic oligonucleotide
gggataaccactgcacgtatgcaggcccttttggaatgtctagaatcctctttgcccaag

SEQ ID NO: 21806 - DNA, 60 bp, Artificial
  Synthetic oligonucleotide
ggaccttcaggggcagagtgctagacatgtttagaactgccttcgggggaaagtacatga

SEQ ID NO: 21807 - DNA, 60 bp, Artificial
  Synthetic oligonucleotide
caggttcagatggcaaaaccacatggtgtagtcagacaaactatcaatacttgatcatac

SEQ ID NO: 21808 - DNA, 60 bp, Artificial
  Synthetic oligonucleotide
cttctgcctttaacaagaaaacccttgatcacacacttatgagcataatttctagcctac

SEQ ID NO: 21809 - DNA, 60 bp, Artificial
  Synthetic oligonucleotide
ggcagtttcctgtgatttcaacaatggcatcaccatccaatacaacctgacattctctga

SEQ ID NO: 21810 - DNA, 60 bp, Artificial
  Synthetic oligonucleotide
cattctctgatgcacagagtgctctgagccaatgcaggaccttcaggggcagagtgctag

SEQ ID NO: 21811 - DNA, 60 bp, Artificial
  Synthetic oligonucleotide
tttttggattgcgctttcctttaggtcaactgaggatcgagtttaccttgtggaaggatg

SEQ ID NO: 21812 - DNA, 60 bp, Artificial
  Synthetic oligonucleotide
tctgtgaatctaggagctttctgatgtcatcggagccttgacaactcaaaaccatcccct

SEQ ID NO: 21813 - DNA, 60 bp, Artificial
  Synthetic oligonucleotide
tacacacagacatataaaaggtggatcatgtccaaaaccgcaccgtttaaccagcaaagg

SEQ ID NO: 21814 - DNA, 60 bp, Artificial
  Synthetic oligonucleotide
ccaggttgtgcgttgaaaaggtcagtaaggtccattccatgtgagtatttagagtcctgc

SEQ ID NO: 21815 - DNA, 60 bp, Artificial
  Synthetic oligonucleotide
agtatttagagtcctgcttaaactgcttttgatcagtgggctctctgtaaaaatgtatga

SEQ ID NO: 21816 - DNA, 60 bp, Artificial
  Synthetic oligonucleotide
ctcttgaggcttccttagtcatttcaacatcaatgagttttatatctctcctattctgtg

SEQ ID NO: 21817 - DNA, 60 bp, Artificial
  Synthetic oligonucleotide
gaactgcccattttgtggttggaaaattgctatttccaccggatcattgaatctgccctc

SEQ ID NO: 21818 - DNA, 60 bp, Artificial
  Synthetic oligonucleotide
gggagtgccatattgtaactactcaaagttctggtatttggaacatgcgaagactggtga

SEQ ID NO: 21819 - DNA, 60 bp, Artificial
  Synthetic oligonucleotide
ccaacggctcctacttaaatgagacccattttagcgatcagattgagcaggaagcagaca

SEQ ID NO: 21820 - DNA, 60 bp, Artificial
  Synthetic oligonucleotide
tccacatctgcatatttaatcagcatttttatgcatctcatgaagatacctacacacaga

SEQ ID NO: 21821 - DNA, 60 bp, Artificial
  Synthetic oligonucleotide
gcgaagactggtgaaactagtgttccgaagtgttggcttgtcaccaacggctcctactta

SEQ ID NO: 21822 - DNA, 60 bp, Artificial
  Synthetic oligonucleotide
atcacaagcatcaaagctgtgtataactttgccacttgtgggatattcacactggttagc

SEQ ID NO: 21823 - DNA, 60 bp, Artificial
  Synthetic oligonucleotide
acccctaaaactgggtgcttgtcttttagcttttcaaggtcactgagatttgggtacttt

SEQ ID NO: 21824 - DNA, 60 bp, Artificial
  Synthetic oligonucleotide
ccagaaatgtttatgctagactgctgctcagtgatgacccctaaaactgggtgcttgtct

SEQ ID NO: 21825 - DNA, 60 bp, Artificial
  Synthetic oligonucleotide
atcattgaatctgccctctatatcaatccatgtgggggcgttagggtcgatccctcccat

SEQ ID NO: 21826 - DNA, 60 bp, Artificial
  Synthetic oligonucleotide
atggccatccttcacctgaaagacagactttgtagaggatgttttcatatgggtttctat

SEQ ID NO: 21827 - DNA, 60 bp, Artificial
  Synthetic oligonucleotide
tggctgtagctcagacccacttgaggtggacctgctgacccaggcactggcctgggtgag

SEQ ID NO: 21828 - DNA, 60 bp, Artificial
  Synthetic oligonucleotide
ttctcaccactacattagcatggggaaatctgggctagaactaaccttcaccaatgactc

SEQ ID NO: 21829 - DNA, 60 bp, Artificial
  Synthetic oligonucleotide
ttcacgtctgatgtgaagctctgcagctccctcctcagggcttgtgtccactggaagctc

SEQ ID NO: 21830 - DNA, 60 bp, Artificial
  Synthetic oligonucleotide
gggcttgtgtccactggaagctcttaacctccttggacagagacatcctgttgctcaatg

SEQ ID NO: 21831 - DNA, 60 bp, Artificial
  Synthetic oligonucleotide
agaaatccagcccattcaacagactagttgcatctttgatgacagctgccttcacgtctg

SEQ ID NO: 21832 - DNA, 60 bp, Artificial
  Synthetic oligonucleotide
actggttagctttctccttctagctggcaggtcctgtggtatgtacggccttaagggacc

SEQ ID NO: 21833 - DNA, 60 bp, Artificial
  Synthetic oligonucleotide
tagatccacaagagaatacacagtttgattaagacttctgagtctctgcaggtctttgtc

SEQ ID NO: 21834 - DNA, 52 bp, Artificial
  Synthetic oligonucleotide
ggctgcaagagacattagttcttctgcactgagccttcccactttgagaaca

SEQ ID NO: 21835 - DNA, 60 bp, Artificial
  Synthetic oligonucleotide
gggacctgacatttacaagggagtctaccaactcaagtcagtggaatttgacatgtcaca

SEQ ID NO: 21836 - DNA, 60 bp, Artificial
  Synthetic oligonucleotide
cacaacctaccagttggcctctccaatgtccactcgaccacgttaacacattacacttcc

SEQ ID NO: 21837 - DNA, 56 bp, Artificial
  Synthetic oligonucleotide
cattttggctggcagaagttgtgacagcatgatgattgatagaaggcacaatctca

SEQ ID NO: 21838 - DNA, 60 bp, Artificial
  Synthetic oligonucleotide
gtctggcagaagttgtgacagcatgatgattgatagaaggcacaatctcacccatgttga

SEQ ID NO: 21839 - DNA, 60 bp, Artificial
  Synthetic oligonucleotide
tcggcttcgaatctaaatccacagtggtgttgtcccaagccctcccttgaacttgagacc

SEQ ID NO: 21840 - DNA, 60 bp, Artificial
  Synthetic oligonucleotide
gctttgagtccaaatccacagtggtgttgtcccaagccctcccttgaacttgggatcttg

SEQ ID NO: 21841 - DNA, 60 bp, Artificial
  Synthetic oligonucleotide
cccggttgagcatcagccaagtcctttaaaaggagaccatgtgaatacttgctctgctct

SEQ ID NO: 21842 - DNA, 60 bp, Artificial
  Synthetic oligonucleotide
ctggatagcacttggctttgagtccaaatccacagtggtgttgtcccaagccctcccttg

SEQ ID NO: 21843 - DNA, 60 bp, Artificial
  Synthetic oligonucleotide
actcttgcaactcagtcaagtgggagagtctaatgttctgacctgccttttctggtgttc

SEQ ID NO: 21844 - DNA, 60 bp, Artificial
  Synthetic oligonucleotide
ttaacagctgcagaaagactatagttatatcctgagatgttcaagccgctctcatcttta

SEQ ID NO: 21845 - DNA, 60 bp, Artificial
  Synthetic oligonucleotide
cacgggtttgaagataccatccttcaaagactaggggttctattcggttcaagaattgca

SEQ ID NO: 21846 - DNA, 60 bp, Artificial
  Synthetic oligonucleotide
cttggtgtcttgaggtgtctgtgactgatgttaccctgctcatggctgaacatgatcgtc

SEQ ID NO: 21847 - DNA, 60 bp, Artificial
  Synthetic oligonucleotide
cagatcttaagtgctttggaaacacagcactagcaaaatgtaaccttgaccacgattcgg

SEQ ID NO: 21848 - DNA, 60 bp, Artificial
  Synthetic oligonucleotide
ccagtgtgaagagcaatgcatcaggcaataaaccttccagtttggtttgaggtggttggc

SEQ ID NO: 21849 - DNA, 52 bp, Artificial
  Synthetic oligonucleotide
actcattgccacggtgctggcttgttagaaataatagctacttgaatgaaag

SEQ ID NO: 21850 - DNA, 60 bp, Artificial
  Synthetic oligonucleotide
tcgacttaaagaattgttgaacactccttattgtaattacaccaaattttggtatgtcaa

SEQ ID NO: 21851 - DNA, 60 bp, Artificial
  Synthetic oligonucleotide
tgagttcaacaaaaaagcgatagagacattgaatgacaatacaaaaaacaaggtaaactt

SEQ ID NO: 21852 - DNA, 60 bp, Artificial
  Synthetic oligonucleotide
ggctttccaactcatagacacatacgtggtgaaccctgcccactaccccataggctcaac

SEQ ID NO: 21853 - DNA, 60 bp, Artificial
  Synthetic oligonucleotide
tcacctggtaggctttccaactcatagacacatacgtggtgaaccctgcccactacccca

SEQ ID NO: 21854 - DNA, 60 bp, Artificial
  Synthetic oligonucleotide
gtggatatctgtttctggagcactttgtttttcacaacaacactgtttcttcacctggta

SEQ ID NO: 21855 - DNA, 60 bp, Artificial
  Synthetic oligonucleotide
acatagatagacagggaaagacaccgttgactttggtggatatctgtttctggagcactt

SEQ ID NO: 21856 - DNA, 60 bp, Artificial
  Synthetic oligonucleotide
tgggtcaatcttacccattgcctctctcacaactgactcttgcaactcagtcaagtggga

SEQ ID NO: 21857 - DNA, 60 bp, Artificial
  Synthetic oligonucleotide
ccatgttgtcagagttgggtcaatcttacccattgcctctctcacaactgactcttgcaa

SEQ ID NO: 21858 - DNA, 60 bp, Artificial
  Synthetic oligonucleotide
tcaagtgggagagtctaatgttctgacctgccttttctggtgttctcggcccttgttggg

SEQ ID NO: 21859 - DNA, 60 bp, Artificial
  Synthetic oligonucleotide
gctcatggctgaacatgatcgtcaagtcctcaacaatctgtcaaactgtgtgcaccctgc

SEQ ID NO: 21860 - DNA, 60 bp, Artificial
  Synthetic oligonucleotide
ctcatcatgtggtttcctataacagaggatataattacctgtgtctggttggtacaatgc

SEQ ID NO: 21861 - DNA, 60 bp, Artificial
  Synthetic oligonucleotide
tcaaccggatcattactggtaccctcaatgtcaatccatgttgtcagagttgggtcaatc

SEQ ID NO: 21862 - DNA, 60 bp, Artificial
  Synthetic oligonucleotide
tggtacaatgctaattcaaccggatcattactggtaccctcaatgtcaatccatgttgtc

SEQ ID NO: 21863 - DNA, 59 bp, Artificial
  Synthetic oligonucleotide
ttgtggaaaagacttgctgaccagtaaaggtagacaatttgcctaggatccactgtgcg

SEQ ID NO: 21864 - DNA, 60 bp, Artificial
  Synthetic oligonucleotide
gagcacagaattgcaaaacataacgtttgatatgttgaaggtattcgaggaccaccccac

SEQ ID NO: 21865 - DNA, 60 bp, Artificial
  Synthetic oligonucleotide
cttaattgctgccttgaaagggatgattaacttgtggaagagtggccttttccaattgat

SEQ ID NO: 21866 - DNA, 60 bp, Artificial
  Synthetic oligonucleotide
gatccatcagttcagatttgttgagatcaccaagttttaagattgtgtctctttgggaac

SEQ ID NO: 21867 - DNA, 60 bp, Artificial
  Synthetic oligonucleotide
tcccatgacctacccttgatctgggatctggagccaatgtaaggccaaccttctcctgaa

SEQ ID NO: 21868 - DNA, 60 bp, Artificial
  Synthetic oligonucleotide
ttaaaagatcagaccttttggtgagctgtgattgggaaaggtttcccaggtacacacctc

SEQ ID NO: 21869 - DNA, 60 bp, Artificial
  Synthetic oligonucleotide
accaccccacatcttgcatggtgaatcattccacctactatgtccatgaaaacaaaaatg

SEQ ID NO: 21870 - DNA, 60 bp, Artificial
  Synthetic oligonucleotide
gacaatctttaagtctttgcgaccgtgtgtatctactaagcgccttatatcatctgaacc

SEQ ID NO: 21871 - DNA, 56 bp, Artificial
  Synthetic oligonucleotide
gttgtgaactcactgagccctcttctcagggattgagtccatctgaagctggggat

SEQ ID NO: 21872 - DNA, 60 bp, Artificial
  Synthetic oligonucleotide
gttccgaatatcatccatgaggctatcaacatagctctgatagcagtgagcttaattgct

SEQ ID NO: 21873 - DNA, 60 bp, Artificial
  Synthetic oligonucleotide
gcgcaccggggatcctaggcgttttttagtcacgcttaaatctttgattgcgtcaatcat

SEQ ID NO: 21874 - DNA, 60 bp, Artificial
  Synthetic oligonucleotide
gaccatcaagtatcattttggcatccctcagaacatcggtcttcaccggtgttgtgaact

SEQ ID NO: 21875 - DNA, 60 bp, Artificial
  Synthetic oligonucleotide
aggagccctataacatagctgagcaagcctggctgtgcagattctaggtcctttagcaac

SEQ ID NO: 21876 - DNA, 60 bp, Artificial
  Synthetic oligonucleotide
tagctgagcaagcctggctgtgcagattctaggtcctttagcaacatcccatgtgaatgc

SEQ ID NO: 21877 - DNA, 60 bp, Artificial
  Synthetic oligonucleotide
aacaaaaatgccacttggtgtcttgaggtgtctgtgactgatgttaccctgctcatggct

SEQ ID NO: 21878 - DNA, 60 bp, Artificial
  Synthetic oligonucleotide
agcgccttatatcatctgaaccttgggtggtgaggaccatgttttgaggaaggagcccta

SEQ ID NO: 21879 - DNA, 60 bp, Artificial
  Synthetic oligonucleotide
ctgaaccttgggtggtgaggaccatgttttgaggaaggagccctataacatagctgagca

SEQ ID NO: 21880 - DNA, 60 bp, Artificial
  Synthetic oligonucleotide
ggtggttggcctgctatggctgactgaaacattagacaatcaagtagggcacagtgtggc

SEQ ID NO: 21881 - DNA, 60 bp, Artificial
  Synthetic oligonucleotide
gaccagattggctcctcaaactttctcgcctgttcagatgccaatttaatgtcgacaatc

SEQ ID NO: 21882 - DNA, 60 bp, Artificial
  Synthetic oligonucleotide
ctaggtcaatcaggttggggaacttaactgtataaagaagtcccaaagatgttagtgcct

SEQ ID NO: 21883 - DNA, 60 bp, Artificial
  Synthetic oligonucleotide
gatgttcaagccgctctcatctttagtcactatttgaagacagtcatgttctgctgtaag

SEQ ID NO: 21884 - DNA, 60 bp, Artificial
  Synthetic oligonucleotide
gtcagtgcagggacagatccaaattgattattcagcctgttcggatcagctacgtcccaa

SEQ ID NO: 21885 - DNA, 60 bp, Artificial
  Synthetic oligonucleotide
gtcaggagtgatccttatggtttccagcatgttaccaccatccagaagcgttgcaccagc

SEQ ID NO: 21886 - DNA, 60 bp, Artificial
  Synthetic oligonucleotide
cacgtgtgcagataaacatcactgaggggtttgggtctcacgggtttgaagataccatcc

SEQ ID NO: 21887 - DNA, 60 bp, Artificial
  Synthetic oligonucleotide
tagaaattcaacttggaaaaatcaatgcgaaatgaatcatgtaaactccatgcatttaat

SEQ ID NO: 21888 - DNA, 60 bp, Artificial
  Synthetic oligonucleotide
tgcatttaatgttggcgaatgctggtcgctcttctggttctagaagaccactcggcattt

SEQ ID NO: 21889 - DNA, 60 bp, Artificial
  Synthetic oligonucleotide
ctcggcattttctcctggacaataactgatgcagtgggcaatgacatgcctggtggttat

SEQ ID NO: 21890 - DNA, 56 bp, Artificial
  Synthetic oligonucleotide
tgttcggatcagctacgtcccaaatccttacaacccctggagacctcacttgctgc

SEQ ID NO: 21891 - DNA, 60 bp, Artificial
  Synthetic oligonucleotide
aaactctcacaatgccatcactggcaccctttccccctccacttactccagtcatgccaa

SEQ ID NO: 21892 - DNA, 60 bp, Artificial
  Synthetic oligonucleotide
aagggttcctttcacccggtgtgtctgatacaaacattcccagactcttcttaactttca

SEQ ID NO: 21893 - DNA, 60 bp, Artificial
  Synthetic oligonucleotide
ttcagaattggatgactctgagacaatctgtcgagatcagatgagttggggtatttggct

SEQ ID NO: 21894 - DNA, 60 bp, Artificial
  Synthetic oligonucleotide
tccttcaatatccatccaggtttttgcgttgggaatcaagttgaagcacttgaaatcttt

SEQ ID NO: 21895 - DNA, 60 bp, Artificial
  Synthetic oligonucleotide
tctggtgacttttgatttcagtttttctaaatcagcggccaggattagtagatcgtctga

SEQ ID NO: 21896 - DNA, 55 bp, Artificial
  Synthetic oligonucleotide
gcttgaacggcatcattcaggtccacttgcccctgtttggtcaggcatgctaaag

SEQ ID NO: 21897 - DNA, 60 bp, Artificial
  Synthetic oligonucleotide
ttgcttcaaatctgttggctccctaaagaaatgtacatagcaacccgagctcggttgata

SEQ ID NO: 21898 - DNA, 60 bp, Artificial
  Synthetic oligonucleotide
ggaagggcttctatcactgcactggttaacccaggttgggcagcaaacaaatcagtcaca

SEQ ID NO: 21899 - DNA, 60 bp, Artificial
  Synthetic oligonucleotide
aactgctgcatcaaacataatgcaatccatcagtgcacaatgaggagttatttcctcttt

SEQ ID NO: 21900 - DNA, 60 bp, Artificial
  Synthetic oligonucleotide
tctgctttactaagagtgatgtcaatcagttttatgtctctcctcccttgtgactcaagg

SEQ ID NO: 21901 - DNA, 53 bp, Artificial
  Synthetic oligonucleotide
caactaccccagtgtgcatgtgacatagatccttgaattgatcccaaacagca

SEQ ID NO: 21902 - DNA, 60 bp, Artificial
  Synthetic oligonucleotide
catcatgaagaaccacttgagagacatcatgggcataccatattgtaactacagcagata

SEQ ID NO: 21903 - DNA, 60 bp, Artificial
  Synthetic oligonucleotide
caacaaacaggccataaggaggctcaaaacagaggcccaaatgagcatacagctgatcaa

SEQ ID NO: 21904 - DNA, 60 bp, Artificial
  Synthetic oligonucleotide
aaggttgttcgatttcaacaaacaggccataaggaggctcaaaacagaggcccaaatgag

SEQ ID NO: 21905 - DNA, 60 bp, Artificial
  Synthetic oligonucleotide
ctagatggatgttgattgaggccgaattaaagtgctttggaaacactgcagtagccaagt

SEQ ID NO: 21906 - DNA, 60 bp, Artificial
  Synthetic oligonucleotide
ggggatactgccttactagatggatgttgattgaggccgaattaaagtgctttggaaaca

SEQ ID NO: 21907 - DNA, 60 bp, Artificial
  Synthetic oligonucleotide
gctaccttgggcttctctcacaaagaactagagacatatacattagcagaaggttgttgg

SEQ ID NO: 21908 - DNA, 60 bp, Artificial
  Synthetic oligonucleotide
caggaaggtcatgctcactgatctacaaagggacttacgagctgcaaacccttgagttga

SEQ ID NO: 21909 - DNA, 60 bp, Artificial
  Synthetic oligonucleotide
gaatacaacctgggatgaccactgccaattttccagaccatcacctattggctaccttgg

SEQ ID NO: 21910 - DNA, 60 bp, Artificial
  Synthetic oligonucleotide
cccttgagttgaatatggagactcttaatatgaccatgccgctatcctgcacaaagaaca

SEQ ID NO: 21911 - DNA, 60 bp, Artificial
  Synthetic oligonucleotide
ttctgctgtgtggatttgagctcaacaagattgttgactgcttgattgagatctctcagt

SEQ ID NO: 21912 - DNA, 60 bp, Artificial
  Synthetic oligonucleotide
acagcagatattggtaccttaaccacacatcaacaggaaagacctcactaccaaggtgtt

SEQ ID NO: 21913 - DNA, 60 bp, Artificial
  Synthetic oligonucleotide
tcatcaactgagagtaagttaatcctgcagcaaagcctgcagactgtaatgacttgttgg

SEQ ID NO: 21914 - DNA, 60 bp, Artificial
  Synthetic oligonucleotide
tgtgaactcaaattccccatataaactcctgaactcaaaggcctttctgttctggtgact

SEQ ID NO: 21915 - DNA, 54 bp, Artificial
  Synthetic oligonucleotide
ccacatgggcatctgctcctgtggtctatacaaacagccaggtgtgcctgtcag

SEQ ID NO: 21916 - DNA, 60 bp, Artificial
  Synthetic oligonucleotide
caacccatagacacattgtaggtaaaccttgcccaaaaccccacaggctgaaccacatgg

SEQ ID NO: 21917 - DNA, 58 bp, Artificial
  Synthetic oligonucleotide
tgagaatggcttggggagggagttatattgctcttgattctggacgcggtaactggga

SEQ ID NO: 21918 - DNA, 60 bp, Artificial
  Synthetic oligonucleotide
ggcgtccatctacaggacgactttaggtgttgaagttctgaacaccatgtctctagggag

SEQ ID NO: 21919 - DNA, 60 bp, Artificial
  Synthetic oligonucleotide
gtcttgctcaaggtccaccacagtattttcccatgctcttcccacaatcgaggtccttga

SEQ ID NO: 21920 - DNA, 60 bp, Artificial
  Synthetic oligonucleotide
cacaaagaacaacagtcatcattatataagggtggggaatgagacaggacttgagctcac

SEQ ID NO: 21921 - DNA, 60 bp, Artificial
  Synthetic oligonucleotide
tagcacaagtttctatctgataagcatctttctccacctggtcaaaataccaacccatag

SEQ ID NO: 21922 - DNA, 60 bp, Artificial
  Synthetic oligonucleotide
caaattctgtaacctctctgatgcccacaaaaggaatctttatgatcacagcctcatgag

SEQ ID NO: 21923 - DNA, 60 bp, Artificial
  Synthetic oligonucleotide
ttgtaggtaaaccttgcccaaaaccccacaggctgaaccacatgggcatctgctcctgtg

SEQ ID NO: 21924 - DNA, 60 bp, Artificial
  Synthetic oligonucleotide
ggggggaaaatcactgtgcaatacaacctgagtcatagcttcgcagtggatgcagcaggt

SEQ ID NO: 21925 - DNA, 60 bp, Artificial
  Synthetic oligonucleotide
ctaacatgttaccaccatcaagcatgcaggcccctgctttgacagcagcacccaaactga

SEQ ID NO: 21926 - DNA, 60 bp, Artificial
  Synthetic oligonucleotide
ctgcggcacacttgcaaatggtgtcttacaaacatttatgagaatggcttggggagggag

SEQ ID NO: 21927 - DNA, 60 bp, Artificial
  Synthetic oligonucleotide
ggtgttggcttatctcaaatggatcatatctcaatgagaccaagttttcagatgacatcg

SEQ ID NO: 21928 - DNA, 60 bp, Artificial
  Synthetic oligonucleotide
atctctcagtcgttttaggtcgccatcatctcttttctgcttgcgcatcaatctctgaac

SEQ ID NO: 21929 - DNA, 60 bp, Artificial
  Synthetic oligonucleotide
ctcattgtcgtgatggttgtctgacccttgagtgggtcttgaatgtggtcactccaaagg

SEQ ID NO: 21930 - DNA, 59 bp, Artificial
  Synthetic oligonucleotide
tcactccaaaggtttgattagtgcaaagcgcaatccaatagcctaggatccactgtgcg

SEQ ID NO: 21931 - DNA, 60 bp, Artificial
  Synthetic oligonucleotide
ctgacctcggagaagtcaagaccatgaaggagagcttgagcgtctttaactacctgcaac

SEQ ID NO: 21932 - DNA, 60 bp, Artificial
  Synthetic oligonucleotide
tgagcgtctttaactacctgcaactttatgttggaacagtagccagatagttcccttctt

SEQ ID NO: 21933 - DNA, 60 bp, Artificial
  Synthetic oligonucleotide
taggtcgccatcatctcttttctgcttgcgcatcaatctctgaacattactgacctcgga

SEQ ID NO: 21934 - DNA, 60 bp, Artificial
  Synthetic oligonucleotide
gggattgagtccacaagaatgacctcacttccttggaagcactcattgtcgtgatggttg

SEQ ID NO: 21935 - DNA, 60 bp, Artificial
  Synthetic oligonucleotide
attgcactatccatcctagcaattctgaagggactatacaatgttgccacgtgtggcttg

SEQ ID NO: 21936 - DNA, 60 bp, Artificial
  Synthetic oligonucleotide
ccacgtgtggcttgatagggcttgtcacattccttctactttcaggaaggtcatgctcac

SEQ ID NO: 21937 - DNA, 60 bp, Artificial
  Synthetic oligonucleotide
gttgacttcagttcaacaagattgttgacagcttgattcagatccctcagtcgctttagg

SEQ ID NO: 21938 - DNA, 60 bp, Artificial
  Synthetic oligonucleotide
acattcttctgttgagttgacttcagttcaacaagattgttgacagcttgattcagatcc

SEQ ID NO: 21939 - DNA, 60 bp, Artificial
  Synthetic oligonucleotide
gcagacctaaagcgactgagggatctgaatcaagctgtcaacaatcttgttgaactgaag

SEQ ID NO: 21940 - DNA, 60 bp, Artificial
  Synthetic oligonucleotide
ctttcctcttattatgtggaaggtcttgctcatccaacctctacaagggggtctatgaac

SEQ ID NO: 21941 - DNA, 61 bp, Artificial
  Synthetic oligonucleotide
ctcttcttggtgtcaatcatgtttaaaatgggatgactttgagttaacctatctaaatctg

SEQ ID NO: 21942 - DNA, 60 bp, Artificial
  Synthetic oligonucleotide
tttcaaccaatacgaagcaatgagttgtgacttcaatgggggcaaaatcagtgtgcagta

SEQ ID NO: 21943 - DNA, 60 bp, Artificial
  Synthetic oligonucleotide
tcggcattgtcccaaattgattgttcaacaattctgcattcttcacatcccagactctta

SEQ ID NO: 21944 - DNA, 60 bp, Artificial
  Synthetic oligonucleotide
cctcctctgatcgagctgctgtgaacttaggtttcccatgtagacacctgaactcaaggg

SEQ ID NO: 21945 - DNA, 60 bp, Artificial
  Synthetic oligonucleotide
caaatttagaagtgccctcctctgatcgagctgctgtgaacttaggtttcccatgtagac

SEQ ID NO: 21946 - DNA, 60 bp, Artificial
  Synthetic oligonucleotide
gaactcaagggcctttctgttcttgtaacttttgatttcagcttttctaaatcagccgcc

SEQ ID NO: 21947 - DNA, 60 bp, Artificial
  Synthetic oligonucleotide
gatcacgcactcatgagcataatctcaactttccacctgtctatacccaatttcaaccaa

SEQ ID NO: 21948 - DNA, 60 bp, Artificial
  Synthetic oligonucleotide
tcagccgccagagtcagtaaatcgtccgaacttagggtcccaactctcagcacacttttc

SEQ ID NO: 21949 - DNA, 60 bp, Artificial
  Synthetic oligonucleotide
ctttaagggtcataagttgggagtaagttagtccagccgagaagcctgcagattggagag

SEQ ID NO: 21950 - DNA, 60 bp, Artificial
  Synthetic oligonucleotide
ccttcctactattgatgtcctagatgcaatgtatggccacccgtcacctgataagcagat

SEQ ID NO: 21951 - DNA, 60 bp, Artificial
  Synthetic oligonucleotide
cccatctgtttcaaggtccactacagtgttttcccaagcccttcctactattgatgtcct

SEQ ID NO: 21952 - DNA, 60 bp, Artificial
  Synthetic oligonucleotide
cggagtatctgagacgaacatcccaagagccctcttgaccttcaagatggattttaaaat

SEQ ID NO: 21953 - DNA, 60 bp, Artificial
  Synthetic oligonucleotide
gtgtgcagtacaatctaagccattcttatgctatagatgcagctaatcattgcggcacag

SEQ ID NO: 21954 - DNA, 60 bp, Artificial
  Synthetic oligonucleotide
ttgcggcttatacaagcagcctggcgtccccgtgagatggaagagataggcctccagcag

SEQ ID NO: 21955 - DNA, 60 bp, Artificial
  Synthetic oligonucleotide
agggaaaacgcctttgggtttagttgatctgtttgtgtttagcacaagtttttatctaat

SEQ ID NO: 21956 - DNA, 60 bp, Artificial
  Synthetic oligonucleotide
gtgggcaaaccatgtcctaagccccacaggttgaaccacatgggcatttgttcttgcggc

SEQ ID NO: 21957 - DNA, 60 bp, Artificial
  Synthetic oligonucleotide
tcttcctccgactagtcaagattccaacccatagacacattgtgggcaaaccatgtccta

SEQ ID NO: 21958 - DNA, 60 bp, Artificial
  Synthetic oligonucleotide
gcgcatcagccgctggacattgctgacctcagagaagtcaagcccatgcaagagagcttg

SEQ ID NO: 21959 - DNA, 60 bp, Artificial
  Synthetic oligonucleotide
gtgttaggatatttagctgtataaatcaagcccagatctgtgagtgcttgtaccacatca

SEQ ID NO: 21960 - DNA, 60 bp, Artificial
  Synthetic oligonucleotide
gcgatgtcaattccatgagaatattttgcatcttgtttaaattgtttgagatcagtgggc

SEQ ID NO: 21961 - DNA, 60 bp, Artificial
  Synthetic oligonucleotide
gggggagcgcctcaataacagcactggtcagacctggttgtgcagcaaacagatctgcga

SEQ ID NO: 21962 - DNA, 60 bp, Artificial
  Synthetic oligonucleotide
aagaagcttctttatgtcttcggacccttggcaagtgataaccatattccgggggagcgc

SEQ ID NO: 21963 - DNA, 60 bp, Artificial
  Synthetic oligonucleotide
catcaaacatgatgcaatccatcaatgcacagtgaggggtgatctcttctttgccacctc

SEQ ID NO: 21964 - DNA, 60 bp, Artificial
  Synthetic oligonucleotide
gcggcacagtcgcgaatggcatcttgcagactttcatgagaatggcatggggtgggagct

SEQ ID NO: 21965 - DNA, 60 bp, Artificial
  Synthetic oligonucleotide
taacacccagagataggctgatagagagcaacttccaccgggtcctctggcctcccttct

SEQ ID NO: 21966 - DNA, 60 bp, Artificial
  Synthetic oligonucleotide
ggctgatagagagcaacttccaccgggtcctctggcctcccttctatgtccatccacgtc

SEQ ID NO: 21967 - DNA, 60 bp, Artificial
  Synthetic oligonucleotide
atgaccatgcccctctcctgcacaaagaacaatagtcatcactacataagggttggcaat

SEQ ID NO: 21968 - DNA, 54 bp, Artificial
  Synthetic oligonucleotide
tagtgacattctttcaagaggtgcctcatgtgatagaagaggtgatgaacattg

SEQ ID NO: 21969 - DNA, 60 bp, Artificial
  Synthetic oligonucleotide
aagaaagatttcacttctttggaggcactcattgttgagttactgaattgtgatgaaggc

SEQ ID NO: 21970 - DNA, 60 bp, Artificial
  Synthetic oligonucleotide
gcccatgcaagagagcttgagcgtccttcaccacttgaagtttgatattggaacagtaac

SEQ ID NO: 21971 - DNA, 60 bp, Artificial
  Synthetic oligonucleotide
tctctcctttgtttgcgcatcagccgctggacattgctgacctcagagaagtcaagccca

SEQ ID NO: 21972 - DNA, 60 bp, Artificial
  Synthetic oligonucleotide
ggttggcaatgacacagggctggaactgaccttgaccaacacgagcatactcaatcacaa

SEQ ID NO: 21973 - DNA, 60 bp, Artificial
  Synthetic oligonucleotide
gattgttgacagcttgattcagatccctaagacgctttaggtcactatcatctctccttt

SEQ ID NO: 21974 - DNA, 60 bp, Artificial
  Synthetic oligonucleotide
cccaactctcagcacacttttctgttgtgtcgatttcagctcaacaagattgttgacagc

SEQ ID NO: 21975 - DNA, 60 bp, Artificial
  Synthetic oligonucleotide
gctgacaatatgatcacagagatgctacaaaaggaatacatggagaggcaagggaaaacg

SEQ ID NO: 21976 - DNA, 60 bp, Artificial
  Synthetic oligonucleotide
gagacatttacattagcaggaggttgctgggcacattcacgtggacactgtcagactctg

SEQ ID NO: 21977 - DNA, 60 bp, Artificial
  Synthetic oligonucleotide
ggacactgtcagactctgagggtaatgctacaccaggaggttattgtctgaccaggtgga

SEQ ID NO: 21978 - DNA, 60 bp, Artificial
  Synthetic oligonucleotide
ctgaccaggtggatgttaattgaagctgagttgaaatgctttggaaacacagcagtagca

SEQ ID NO: 21979 - DNA, 60 bp, Artificial
  Synthetic oligonucleotide
gctttgatcaacgatcaattaattatgaagaaccacttgcgagacatcatggggattcca

SEQ ID NO: 21980 - DNA, 60 bp, Artificial
  Synthetic oligonucleotide
caatcatacaataactggcaaaacctcattacctaaatgttggcttgtatctaatggttc

SEQ ID NO: 21981 - DNA, 60 bp, Artificial
  Synthetic oligonucleotide
ttcagcttttctaaatcagccgccagagtcagtaaatcgtccgaacttagggtcccaact

SEQ ID NO: 21982 - DNA, 60 bp, Artificial
  Synthetic oligonucleotide
ccgagaagcctgcagattggagagatttgttggagttaccactgccaattttctgtggtt

SEQ ID NO: 21983 - DNA, 60 bp, Artificial
  Synthetic oligonucleotide
tcaatcacaaattctgcaacctatcagatgctcacaagaaagacctatatgatcacgcac

SEQ ID NO: 21984 - DNA, 60 bp, Artificial
  Synthetic oligonucleotide
accttctgtataaattgtgtctctcaggtgacgggtggccttacattggttccagatcac

SEQ ID NO: 21985 - DNA, 55 bp, Artificial
  Synthetic oligonucleotide
aaaatttgtgatctggaaccaatgtaaggccacccgtcacctgagagacacaatt

SEQ ID NO: 21986 - DNA, 60 bp, Artificial
  Synthetic oligonucleotide
gcgtcattattccttcatctagtcggaatacccacccatcgacacctcaaaggcgaagct

SEQ ID NO: 21987 - DNA, 60 bp, Artificial
  Synthetic oligonucleotide
cacagcatcattgttccttcatctagtcggaatacccacccatcgacacctcaaaggcga

SEQ ID NO: 21988 - DNA, 60 bp, Artificial
  Synthetic oligonucleotide
cagaaacaaatatcaactaatgtgattggggttttgccttgcctttcagcatattcctta

SEQ ID NO: 21989 - DNA, 60 bp, Artificial
  Synthetic oligonucleotide
gatcacctcatctcagagatgttaagcaaggaatatgctgaaaggcaaggcaaaaccccg

SEQ ID NO: 21990 - DNA, 60 bp, Artificial
  Synthetic oligonucleotide
ggtctgttggaggtccttcaatgtcaagccacagtgtattagtggggtctaacttcttta

SEQ ID NO: 21991 - DNA, 60 bp, Artificial
  Synthetic oligonucleotide
tgttgtcccaagatctcccaagaatttgtgatctggaaccaatgtaaggccacccgtcac

SEQ ID NO: 21992 - DNA, 60 bp, Artificial
  Synthetic oligonucleotide
atattccttacttaacatctctgagatgaggtgatcactctctaaaatccagtcattcct

SEQ ID NO: 21993 - DNA, 60 bp, Artificial
  Synthetic oligonucleotide
cagaagtgttaagataacttccattccttatcaaccaacatcttggaagagtgtgctgcc

SEQ ID NO: 21994 - DNA, 60 bp, Artificial
  Synthetic oligonucleotide
ttgagggtctttattgcattcttgttatagtcgaatagcctcagcatatcacagaactct

SEQ ID NO: 21995 - DNA, 60 bp, Artificial
  Synthetic oligonucleotide
gatctcccaagaatttgtgatctggaaccaatgtaaggccacccgtcacctgagagacac

SEQ ID NO: 21996 - DNA, 60 bp, Artificial
  Synthetic oligonucleotide
gattttagagagtgatcacctcatctcagagatgttaagtaaggaatatgctgaaaggca

SEQ ID NO: 21997 - DNA, 60 bp, Artificial
  Synthetic oligonucleotide
tggctggctgatatagtgccaattccacagggtctgttggaggcccttcaatgtcaagcc

SEQ ID NO: 21998 - DNA, 60 bp, Artificial
  Synthetic oligonucleotide
ccagaaaaacaccatattcaagattggagatctggggagagatgaattgatggagcttgc

SEQ ID NO: 21999 - DNA, 60 bp, Artificial
  Synthetic oligonucleotide
tctgatgcaagctccatcaattcatctctccccagatctccaatcttgaatatggtgttt

SEQ ID NO: 22000 - DNA, 60 bp, Artificial
  Synthetic oligonucleotide
tcggatatttaacagtgtataacaggcccagagatgtcaacgcttggaccacactattca

SEQ ID NO: 22001 - DNA, 60 bp, Artificial
  Synthetic oligonucleotide
acactattcatcgtttctccaccctggacagtcatacaagcgattgtgagagctggcatg

SEQ ID NO: 22002 - DNA, 60 bp, Artificial
  Synthetic oligonucleotide
cagatgtgttgaaagatgccaagctcatagctgacagcatcgacttcaaccaggtttcac

SEQ ID NO: 22003 - DNA, 60 bp, Artificial
  Synthetic oligonucleotide
gaatataatgcttgttggctggctgatatagtgccaattccacagggtctgttggaggcc

SEQ ID NO: 22004 - DNA, 60 bp, Artificial
  Synthetic oligonucleotide
cttgttggctggctgatatagtgccaattccacagggtctgttggaggtccttcaatgtc

SEQ ID NO: 22005 - DNA, 60 bp, Artificial
  Synthetic oligonucleotide
cttttcatcatgtggctttctaaaacaatgaatataatgcttgttggctggctgatatag

SEQ ID NO: 22006 - DNA, 60 bp, Artificial
  Synthetic oligonucleotide
ctttctaaaacaatgaatataatgcttgttggctggctgatatagtgccaattccacagg

SEQ ID NO: 22007 - DNA, 60 bp, Artificial
  Synthetic oligonucleotide
acaatgaatgtaatgcttgttggctggctgatatagtgccaattccacagggtctgttgg

SEQ ID NO: 22008 - DNA, 60 bp, Artificial
  Synthetic oligonucleotide
ggcaaaggacaggcttcgcctttgaggtgtcgatgggtgggtattccgactagatgaagg

SEQ ID NO: 22009 - DNA, 60 bp, Artificial
  Synthetic oligonucleotide
cagcttatgaggcaaaggacaggcttcgcctttgaggtgtcgatgggtgggtattccgac

SEQ ID NO: 22010 - DNA, 60 bp, Artificial
  Synthetic oligonucleotide
actcctggcattgcatcctcgatgtcttgcatcaagatgccatgtgaatgtctgctgcca

SEQ ID NO: 22011 - DNA, 60 bp, Artificial
  Synthetic oligonucleotide
tcatgaaggagcatgatgtatcaatctatgaaccagaagaccttggaaattgtctcaata

SEQ ID NO: 22012 - DNA, 60 bp, Artificial
  Synthetic oligonucleotide
atcaatctatgaaccagaagaccttggaaattgtcttaacaagtctgactcaagctgggc

SEQ ID NO: 22013 - DNA, 60 bp, Artificial
  Synthetic oligonucleotide
ggaaatgaagggtgttcacatggtcaaactgacatttggaaagatgattcacgccacagt

SEQ ID NO: 22014 - DNA, 60 bp, Artificial
  Synthetic oligonucleotide
gtgtatggaaagaagataagaaatggtatgaggcatctcttcaggggcttccatgacccg

SEQ ID NO: 22015 - DNA, 60 bp, Artificial
  Synthetic oligonucleotide
catgactcagagttctgtgatatgctgaggctattcgactataacaagaatgcaataaag

SEQ ID NO: 22016 - DNA, 60 bp, Artificial
  Synthetic oligonucleotide
gtcccaagatctcccaagtatttgtgatctggaaccaatgtaaggccacccgtcacctga

SEQ ID NO: 22017 - DNA, 60 bp, Artificial
  Synthetic oligonucleotide
gctgatatagtgccaattccacagggtctgttggaggtccttcaatgtcaagccacagtg

SEQ ID NO: 22018 - DNA, 60 bp, Artificial
  Synthetic oligonucleotide
aaagtgtctaactcttctactgagctttatttcaaatcctttggttattagccactatgg

SEQ ID NO: 22019 - DNA, 60 bp, Artificial
  Synthetic oligonucleotide
aagtcgatgctgtcagctatgagcttggcatctttcaacacatctgtcttcacagtgtgg

SEQ ID NO: 22020 - DNA, 60 bp, Artificial
  Synthetic oligonucleotide
ctgcaatagctaagtgcaacttggatcacagttcagagttttgtgacatgctcaaattgt

SEQ ID NO: 22021 - DNA, 60 bp, Artificial
  Synthetic oligonucleotide
ctgtctgatgccacagggactgacatgccaggagggtactgtttggagaaatggatgctg

SEQ ID NO: 22022 - DNA, 60 bp, Artificial
  Synthetic oligonucleotide
tgttttgttgttagagccttgagatcattgagatttggatattttgctgtgtacagaagc

SEQ ID NO: 22023 - DNA, 60 bp, Artificial
  Synthetic oligonucleotide
cgcacagtggatcctaggcgttttgacttgcgcaattaattgacttcattcattgcccca

SEQ ID NO: 22024 - DNA, 60 bp, Artificial
  Synthetic oligonucleotide
cccttgcacttcacatgggaagcagaatgtgctaatctccgtcagtaattggaccaatca

SEQ ID NO: 22025 - DNA, 60 bp, Artificial
  Synthetic oligonucleotide
ggcttcaccatggagtggtttttgagtggattggaacatgatcaccatttcactccacag

SEQ ID NO: 22026 - DNA, 60 bp, Artificial
  Synthetic oligonucleotide
caattctgaagggtgttatcaacatttgggggagtggcctactgcagttcattgtgtttc

SEQ ID NO: 22027 - DNA, 60 bp, Artificial
  Synthetic oligonucleotide
cacgaggccctgaacattgcattaatagcagtcagcatcatatcaattctgaagggtgtt

SEQ ID NO: 22028 - DNA, 60 bp, Artificial
  Synthetic oligonucleotide
tctaccttttatctgtgatcgtgaggcaatgtagggccaaccgtcacccgatagacatag

SEQ ID NO: 22029 - DNA, 60 bp, Artificial
  Synthetic oligonucleotide
ttgtcaacaagggggcacccccatttcttataggtatgggctccttaactgtggcagtgt

SEQ ID NO: 22030 - DNA, 60 bp, Artificial
  Synthetic oligonucleotide
cagaaatattgatctgtgactcctcctgagtgattatattcaaggatggatgttttgttg

SEQ ID NO: 22031 - DNA, 60 bp, Artificial
  Synthetic oligonucleotide
ctttattgtttcaagcatgttgccaccatcaataagacaagcaccagctttcacagcagc

SEQ ID NO: 22032 - DNA, 60 bp, Artificial
  Synthetic oligonucleotide
gagtttaacagaaatgcaatcaaaacacttcagaatgacagcaagcatcaactagacatg

SEQ ID NO: 22033 - DNA, 60 bp, Artificial
  Synthetic oligonucleotide
ctccgtcagtaattggaccaatcaatgctcagggaaccacttaagttccatgcaccttat

SEQ ID NO: 22034 - DNA, 60 bp, Artificial
  Synthetic oligonucleotide
ccacaaacattagcaagtgttttgcaaacaaccaggatgagaggttgttaggcttcacca

SEQ ID NO: 22035 - DNA, 60 bp, Artificial
  Synthetic oligonucleotide
acaatactctaatgaaaaacagacttaaagaactcatcaacattccttattgtaattata

SEQ ID NO: 22036 - DNA, 60 bp, Artificial
  Synthetic oligonucleotide
agcctcaaaggacgactgttgtttcaggctccctgaagagcaggtcaatgggaagcattc

SEQ ID NO: 22037 - DNA, 60 bp, Artificial
  Synthetic oligonucleotide
cattgccccacaatggggcagctgatctcgtttttcggggaaattccatcaataatacac

SEQ ID NO: 22038 - DNA, 60 bp, Artificial
  Synthetic oligonucleotide
gccttgagatcattgagatttggatattttgctgtgtacagaagcccaaggtcagtaaga

SEQ ID NO: 22039 - DNA, 60 bp, Artificial
  Synthetic oligonucleotide
ggtaaactcctaattattgatgaaataagacctggtcgcgcattctcaacatctttcaat

SEQ ID NO: 22040 - DNA, 60 bp, Artificial
  Synthetic oligonucleotide
atagacatagtttgtagagcacattctcgtaaggatttctctgcccaggggtgggactaa

SEQ ID NO: 22041 - DNA, 60 bp, Artificial
  Synthetic oligonucleotide
tgtgattccggctggtagatggcaaactcaacggggtcatttggtggcccctcaatgtca

SEQ ID NO: 22042 - DNA, 60 bp, Artificial
  Synthetic oligonucleotide
tgtcattgggtctcctgtaacagtgtatatatctctgtgattccggctggtagatggcaa

SEQ ID NO: 22043 - DNA, 60 bp, Artificial
  Synthetic oligonucleotide
gactccacactcctcttcacttgattctcaatctcaggtttaagtgttgtcaacaagggg

SEQ ID NO: 22044 - DNA, 60 bp, Artificial
  Synthetic oligonucleotide
cgcattctcaacatctttcaataatattccatggcaatatttactctgatctttgaagga

SEQ ID NO: 22045 - DNA, 60 bp, Artificial
  Synthetic oligonucleotide
tgagaatacccacccacagacacataattggtgaaggctgtcccaaaccacatagacttt

SEQ ID NO: 22046 - DNA, 60 bp, Artificial
  Synthetic oligonucleotide
ccttgttagctgtgtgtttgaaaggtttccttggtactgtcctgtgccgttgcccaccct

SEQ ID NO: 22047 - DNA, 60 bp, Artificial
  Synthetic oligonucleotide
tgtaattatactaagttctggtatgtgaaccacactggatttaatgtccattcactgcca

SEQ ID NO: 22048 - DNA, 60 bp, Artificial
  Synthetic oligonucleotide
ctttaggaatcaatggcttttagaaagtgaccatttgatctctgaaatcttaagtagaga

SEQ ID NO: 22049 - DNA, 60 bp, Artificial
  Synthetic oligonucleotide
atgcttctggagcaccttgttttatgtttcatcgatatttttacacctactgagaatacc

SEQ ID NO: 22050 - DNA, 60 bp, Artificial
  Synthetic oligonucleotide
gattactgatgtgacaactcttgtggtggacactgacaacgttgctaatcccacaaacat

SEQ ID NO: 22051 - DNA, 60 bp, Artificial
  Synthetic oligonucleotide
gtacagaagcccaaggtcagtaagaccctggaccacatcattgagggactctcccccttg

SEQ ID NO: 22052 - DNA, 60 bp, Artificial
  Synthetic oligonucleotide
ctcccccttgctcagtcatacaggagattgtcacagctggcacagatccaaactgattga

SEQ ID NO: 22053 - DNA, 60 bp, Artificial
  Synthetic oligonucleotide
ccaatgccctgcatgatcaatgacacacatttcttactgaggggtccttttgaggccagt

SEQ ID NO: 22054 - DNA, 60 bp, Artificial
  Synthetic oligonucleotide
aactgattgaccaagagtgatgggtcttttatatcccatatctttactacacctccggtt

SEQ ID NO: 22055 - DNA, 60 bp, Artificial
  Synthetic oligonucleotide
caacacataattctgaatgcatcctacatcacaccctatgtaccaatgccctgcatgatc

SEQ ID NO: 22056 - DNA, 60 bp, Artificial
  Synthetic oligonucleotide
acctccggttggtgccaagcctgctctttgtataccgacaagttgtaggatttcagatct

SEQ ID NO: 22057 - DNA, 60 bp, Artificial
  Synthetic oligonucleotide
attgtgtttctgctgttggctgggcgatcctgctcatacaagattggccatcatgttgaa

SEQ ID NO: 22058 - DNA, 60 bp, Artificial
  Synthetic oligonucleotide
aagagattgagtccagcggaaggatggcactgattggtcactcattcttgattatctttt

SEQ ID NO: 22059 - DNA, 60 bp, Artificial
  Synthetic oligonucleotide
tttcagatctccttgttagctgtgtgtttgaaaggtttccttggtactgtcctgtgccgt

SEQ ID NO: 22060 - DNA, 60 bp, Artificial
  Synthetic oligonucleotide
ccagcggaaggatggcactgattggtcactcattcttgattatcttttgcgctgatatcc

SEQ ID NO: 22061 - DNA, 60 bp, Artificial
  Synthetic oligonucleotide
ctatccccttatgtttgtcacaaaggtgctcaaatcttttccaaacaaggtcttcaaaaa

SEQ ID NO: 22062 - DNA, 60 bp, Artificial
  Synthetic oligonucleotide
aacagcactgaacatcacgccgtccagcagcgcacagtgtgcattggttgttgcaggtgt

SEQ ID NO: 22063 - DNA, 60 bp, Artificial
  Synthetic oligonucleotide
cttaaggtgggccgggaaagtgtagaatgtcaaccgaggtggcctccaacgctgcacccc

SEQ ID NO: 22064 - DNA, 56 bp, Artificial
  Synthetic oligonucleotide
agcttttccaagtcactggagagttccatcagttcatccttggataaagaacccac

SEQ ID NO: 22065 - DNA, 60 bp, Artificial
  Synthetic oligonucleotide
ggtttgacttcataatcatcagtgagtccacttctttgtttagatctctcaaaccaacaa

SEQ ID NO: 22066 - DNA, 60 bp, Artificial
  Synthetic oligonucleotide
catgcatatcaaaaagtttccttatatcgtctgcaccttgtgcagtgaagaccattgatt

SEQ ID NO: 22067 - DNA, 60 bp, Artificial
  Synthetic oligonucleotide
gcgacctttgcaaagtccaggccagacaaaagtgctcttgtatcattgagaacgtctgcc

SEQ ID NO: 22068 - DNA, 60 bp, Artificial
  Synthetic oligonucleotide
gggaggcccttaaggtgggccgggaaagtgtagaatgtcaaccgaggtggcctccaacgc

SEQ ID NO: 22069 - DNA, 60 bp, Artificial
  Synthetic oligonucleotide
ccttgacactagtcgtccaggcagagagccctctcctaagagattgagtccagcggaagg

SEQ ID NO: 22070 - DNA, 60 bp, Artificial
  Synthetic oligonucleotide
ataggcagactgcacagggtcagacccgaccccccggggggcccccatggggaccccccg

SEQ ID NO: 22071 - DNA, 60 bp, Artificial
  Synthetic oligonucleotide
caacagagagctggggtgatgttgagataaaaagatgtccctttggtatgctagctcctg

SEQ ID NO: 22072 - DNA, 60 bp, Artificial
  Synthetic oligonucleotide
gggcttgaagataacacctctctacagcatcaatagatatagaattctcatctgactggc

SEQ ID NO: 22073 - DNA, 60 bp, Artificial
  Synthetic oligonucleotide
ccccaactgcttgtcaaaaatctccttcttaaaccaaaaccttaactttatgagttcttc

SEQ ID NO: 22074 - DNA, 60 bp, Artificial
  Synthetic oligonucleotide
cgcacagtggatcctaggcgtaacttcatcattaaaatctcagattctgctctgagtgtg

SEQ ID NO: 22075 - DNA, 60 bp, Artificial
  Synthetic oligonucleotide
ctgtgaagaggcagacaaatgggcaactgcaacggggcatccaagtcaaaccagccagac

SEQ ID NO: 22076 - DNA, 60 bp, Artificial
  Synthetic oligonucleotide
aatgatcactacctttgtttaaggtgccatcagggtatgttaaggaattcagatctctgc

SEQ ID NO: 22077 - DNA, 60 bp, Artificial
  Synthetic oligonucleotide
atggtctctgacagttgtgttggagttttacacttaacgttgtgtagagcagcagacaca

SEQ ID NO: 22078 - DNA, 60 bp, Artificial
  Synthetic oligonucleotide
cagtaatcagcccatataaatctgatgtgttgtgcaagattccctgccccatgtccaaga

SEQ ID NO: 22079 - DNA, 60 bp, Artificial
  Synthetic oligonucleotide
atgtcattaaacactttcctcgcgcaattccttataaacattgtctccttatcatcagaa

SEQ ID NO: 22080 - DNA, 60 bp, Artificial
  Synthetic oligonucleotide
gagagaaatgcagaaggacaaaatctctttacacactcctggaatttgagtatctgagga

SEQ ID NO: 22081 - DNA, 60 bp, Artificial
  Synthetic oligonucleotide
agctagaaactacataacccattgcaatgtcttcaacaaacattgctcttgatactttat

SEQ ID NO: 22082 - DNA, 60 bp, Artificial
  Synthetic oligonucleotide
ggcaagcaacattgcgcaacacagtgtgcaggtccatcatgtcttcctgaggcaacaagg

SEQ ID NO: 22083 - DNA, 60 bp, Artificial
  Synthetic oligonucleotide
taagacaacttgcaccatgaagttcctgcaaacttgctgtgggctgatgccaacttccca

SEQ ID NO: 22084 - DNA, 60 bp, Artificial
  Synthetic oligonucleotide
tcattgaaccaaaagaaggatttgagacacgatgttgacatgactagtgggtttatcatc

SEQ ID NO: 22085 - DNA, 60 bp, Artificial
  Synthetic oligonucleotide
tcactggaaaagcccaatctagatctacttctatgctcataactacccaatttctgatca

SEQ ID NO: 22086 - DNA, 60 bp, Artificial
  Synthetic oligonucleotide
ataacttttgtctagcttatcagcaatggcctcagaattgctttccctggtactaagccg

SEQ ID NO: 22087 - DNA, 60 bp, Artificial
  Synthetic oligonucleotide
tagcctctctggaaaagaatctgtccaatcctcttatcatggtgtcctcttgttccagtg

SEQ ID NO: 22088 - DNA, 60 bp, Artificial
  Synthetic oligonucleotide
gccttgtcattgtcatgagttcgtggctaaaatccaaccggctggtcatttcctcacaca

SEQ ID NO: 22089 - DNA, 60 bp, Artificial
  Synthetic oligonucleotide
gccaacctgctccttataacttagtccaaatttcaagttccctgtatttgagctgatgct

SEQ ID NO: 22090 - DNA, 60 bp, Artificial
  Synthetic oligonucleotide
cgtatagaatgcaatacatggttcatgcctaatcggtcttctatctgtcgtactgctttg

SEQ ID NO: 22091 - DNA, 60 bp, Artificial
  Synthetic oligonucleotide
ccgcctttaccatccctaacacacttactccccatactcttacaaaacccaataaagcct

SEQ ID NO: 22092 - DNA, 60 bp, Artificial
  Synthetic oligonucleotide
cgatcagcaaccaccgaactctttcaacaacccaatcagcaaggaatctattgctgtagc

SEQ ID NO: 22093 - DNA, 60 bp, Artificial
  Synthetic oligonucleotide
gtgggctgatgccaacttcccaatttgtatactctgactgtctaacatgggctgaagcgc

SEQ ID NO: 22094 - DNA, 60 bp, Artificial
  Synthetic oligonucleotide
gctagatctgccatcaactacaggaaccaacgtaatccctgcccttagtaggtcggactt

SEQ ID NO: 22095 - DNA, 60 bp, Artificial
  Synthetic oligonucleotide
ccctgccctcaatagatcggactttaggtttaagagctttgacatgtcactcttccattt

SEQ ID NO: 22096 - DNA, 60 bp, Artificial
  Synthetic oligonucleotide
catcaacaaacttctgatctgaattgatctgacaggcgtgtgcctcacaggactcaagct

SEQ ID NO: 22097 - DNA, 60 bp, Artificial
  Synthetic oligonucleotide
ccatctttcttctaagtttaaattttgtcgaaactcgtgtgtgttccacttgaatgatca

SEQ ID NO: 22098 - DNA, 60 bp, Artificial
  Synthetic oligonucleotide
aacgaccttatgaagatgccatttgagaatgttcattactggttcaagattcacctttgt

SEQ ID NO: 22099 - DNA, 60 bp, Artificial
  Synthetic oligonucleotide
tcaagcatgtgtatctcattgaactacccacagcttctgagaagtcttcaactaacctgg

SEQ ID NO: 22100 - DNA, 60 bp, Artificial
  Synthetic oligonucleotide
agtgtttctcctggtgttgaaaacttttagacctttcactttgttacacacggaaagggc

SEQ ID NO: 22101 - DNA, 60 bp, Artificial
  Synthetic oligonucleotide
aaggtttccacactatcaatgtcctctagtgctccaattgccttgactatgacatcccca

SEQ ID NO: 22102 - DNA, 60 bp, Artificial
  Synthetic oligonucleotide
ctgccaagatcttcttcacgccttttgtgaaatttcttgacagcctggactgtattgtct

SEQ ID NO: 22103 - DNA, 60 bp, Artificial
  Synthetic oligonucleotide
gtcatcagcttagtgttgaggtctcccacatacagttctctatttgagccaacctgctcc

SEQ ID NO: 22104 - DNA, 56 bp, Artificial
  Synthetic oligonucleotide
cctgggttatctggcccaatgaggtcatatgcatacttgttacttagttcagaata

SEQ ID NO: 22105 - DNA, 60 bp, Artificial
  Synthetic oligonucleotide
gtcacagcgtagcctgcatcaataaacaagccagctaggtcaaagctctcatggcctgtg

SEQ ID NO: 22106 - DNA, 60 bp, Artificial
  Synthetic oligonucleotide
agctctcatggcctgtgaacaatggtaggctagcaataactagtgcaccatctaacaatg

SEQ ID NO: 22107 - DNA, 60 bp, Artificial
  Synthetic oligonucleotide
acacatgttgaaacaagtttctccttatcataaacagagagaatatttccaagttcgtcg

SEQ ID NO: 22108 - DNA, 54 bp, Artificial
  Synthetic oligonucleotide
tcactacacccggcatattgcaggaatccggataaagcctcatcccctcccctg

SEQ ID NO: 22109 - DNA, 60 bp, Artificial
  Synthetic oligonucleotide
gctagtgtcatttgcacgtcatttctgataccctcaaaggcccttacttgatcctctgtt

SEQ ID NO: 22110 - DNA, 60 bp, Artificial
  Synthetic oligonucleotide
ggagatagataaacagcatcacataactctttatacacatcagacctgagcacatctgga

SEQ ID NO: 22111 - DNA, 60 bp, Artificial
  Synthetic oligonucleotide
cagacctgagcacatctggatcaaaatccttcacctcatgcattgacacctctgctttaa

SEQ ID NO: 22112 - DNA, 60 bp, Artificial
  Synthetic oligonucleotide
caactattcccgcatttcttagccttacaattgcatcatcatgcgttttgaaaagatcac

SEQ ID NO: 22113 - DNA, 60 bp, Artificial
  Synthetic oligonucleotide
cgcctccagaatatctagaagtctgtcattgactaacattaacatttgtccaacaactat

SEQ ID NO: 22114 - DNA, 60 bp, Artificial
  Synthetic oligonucleotide
ggcaacagaagactgaaatgcagatttgttgattgactctgccaagatcttcttcacgcc

SEQ ID NO: 22115 - DNA, 60 bp, Artificial
  Synthetic oligonucleotide
tcctcacacatttcgattaacacatcctccgaaaatataggcaggaaaaatctctttgga

SEQ ID NO: 22116 - DNA, 60 bp, Artificial
  Synthetic oligonucleotide
tcagatgaaatctttgtacataacactctcttagtctaacattcccaaaatatctagaat

SEQ ID NO: 22117 - DNA, 60 bp, Artificial
  Synthetic oligonucleotide
gcttgaacccacttggggctggtcatcaatttcttccttattagtttaatcgcctccaga

SEQ ID NO: 22118 - DNA, 60 bp, Artificial
  Synthetic oligonucleotide
aacgttggcatctcttctttctctaacactcttcgacttgtcatgagtttggtcctcaag

SEQ ID NO: 22119 - DNA, 60 bp, Artificial
  Synthetic oligonucleotide
gccagaggcggtgggtcgtggaggtgtcccttcttacaggacaactctgggaggacctgt

SEQ ID NO: 22120 - DNA, 60 bp, Artificial
  Synthetic oligonucleotide
gcgttacaatccccgtatgcattctacaaaggtgtttgtattcatcccagatcttatcct

SEQ ID NO: 22121 - DNA, 60 bp, Artificial
  Synthetic oligonucleotide
tgttttctccactagcttttatttgatctccgtgttcctccacctaatcaaaattccaac

SEQ ID NO: 22122 - DNA, 60 bp, Artificial
  Synthetic oligonucleotide
ccactagcttttatttgatctccgtgttcctccacctaatcaaaattccaacacatagac

SEQ ID NO: 22123 - DNA, 60 bp, Artificial
  Synthetic oligonucleotide
aacatgagacaatccagcaatgcacagtgtggtgtcacttcttctttgccacctctcttc

SEQ ID NO: 22124 - DNA, 60 bp, Artificial
  Synthetic oligonucleotide
caatgcacagtgtggtgtcacttcttctttgccacctctcttcttcttttgcgttacaat

SEQ ID NO: 22125 - DNA, 60 bp, Artificial
  Synthetic oligonucleotide
ggactccctatgactgctgcttcaaacatgagacaatccagcaatgcacagtgtggtgtc

SEQ ID NO: 22126 - DNA, 60 bp, Artificial
  Synthetic oligonucleotide
gccacctctcttcttcttttgcgttacaatccccgtatgcattctacaaaggtgtttgta

SEQ ID NO: 22127 - DNA, 60 bp, Artificial
  Synthetic oligonucleotide
cacagtgtggtgtcacttcttctttgccacctctcttcttcttttgcgttacaatccccg

SEQ ID NO: 22128 - DNA, 60 bp, Artificial
  Synthetic oligonucleotide
cacttcttctttgccacctctcttcttcttttgcgttacaatccccgtatgcattctaca

SEQ ID NO: 22129 - DNA, 60 bp, Artificial
  Synthetic oligonucleotide
ctccagcatgtttccgccgtctattagacaagcaccagctttcaccgcagctgacaggct

SEQ ID NO: 22130 - DNA, 60 bp, Artificial
  Synthetic oligonucleotide
gtttatggcacttttcttgggctcaatgatccccaagattgggtgggtctgagagagttt

SEQ ID NO: 22131 - DNA, 60 bp, Artificial
  Synthetic oligonucleotide
ggcaacttcagagaagtccagcccatgaagaagtgcttgagcatccttgatgacttggat

SEQ ID NO: 22132 - DNA, 60 bp, Artificial
  Synthetic oligonucleotide
tccctcttctcctttctcatcaacctttgaacattggcaacttcagagaagtccagccca

SEQ ID NO: 22133 - DNA, 60 bp, Artificial
  Synthetic oligonucleotide
ttcaggtcagagtcatccctcttctcctttctcatcaacctttgaacattggcaacttca

SEQ ID NO: 22134 - DNA, 60 bp, Artificial
  Synthetic oligonucleotide
gtcaaaccagcaggcatgccttgggcctgagcgagtctgttggagttacctttgtcaggc

SEQ ID NO: 22135 - DNA, 60 bp, Artificial
  Synthetic oligonucleotide
tgttggagttacctttgtcaggctttgcattctgttgcacatcaccactcagatcaacag

SEQ ID NO: 22136 - DNA, 60 bp, Artificial
  Synthetic oligonucleotide
tgtcaggctttgcattctgttgcacatcaccactcagatcaacagttgtgttatcccaag

SEQ ID NO: 22137 - DNA, 60 bp, Artificial
  Synthetic oligonucleotide
gctgctgagctgttaggttgcccatatagactccagcagcaagaggcctctcacctctga

SEQ ID NO: 22138 - DNA, 60 bp, Artificial
  Synthetic oligonucleotide
gttatcccaagccctgccgacgatcgatgttcttgatgctatgtaaggccaaccctctcc

SEQ ID NO: 22139 - DNA, 51 bp, Artificial
  Synthetic oligonucleotide
aagggttcctttcccctggcgtgtcagagacaaacattcccaaagaacgct

SEQ ID NO: 22140 - DNA, 60 bp, Artificial
  Synthetic oligonucleotide
agtcagacatgtttggatactttgcagtgtacacaagccccaagtctgacaacgattgga

SEQ ID NO: 22141 - DNA, 57 bp, Artificial
  Synthetic oligonucleotide
atcttatcctcaaattttcttgcatcgtctttctgcatggacacatcaatcagtttt

SEQ ID NO: 22142 - DNA, 60 bp, Artificial
  Synthetic oligonucleotide
gattgttcactgcctggtttaggtccctcaatcttttcaggtcagagtcatccctcttct

SEQ ID NO: 22143 - DNA, 60 bp, Artificial
  Synthetic oligonucleotide
aaaatgaatatactgaccattattaggttgatagatagctatctccacggggtcttcagg

SEQ ID NO: 22144 - DNA, 60 bp, Artificial
  Synthetic oligonucleotide
agatcaacagttgtgttatcccaagccctgccgacgatcgatgttcttgatgctatgtaa

SEQ ID NO: 22145 - DNA, 60 bp, Artificial
  Synthetic oligonucleotide
gtcatcagaggttagtgtccccactctcaaaacattcttctgttggactgactttaactc

SEQ ID NO: 22146 - DNA, 60 bp, Artificial
  Synthetic oligonucleotide
tcacaaggtctatgctaatagggcttgatctgaaatgctttgggaacactgccattgcga

SEQ ID NO: 22147 - DNA, 60 bp, Artificial
  Synthetic oligonucleotide
ctcggaagggaacgacatgccaggtggttactgtctcacaaggtctatgctaatagggct

SEQ ID NO: 22148 - DNA, 60 bp, Artificial
  Synthetic oligonucleotide
ccggaacccgccacccattccgaccatctgtagcaaaaccctcctctgttctagctgctg

SEQ ID NO: 22149 - DNA, 60 bp, Artificial
  Synthetic oligonucleotide
ggactcaatgcatacagaccgattataagtatttgattattcagaacacatcatgggagg

SEQ ID NO: 22150 - DNA, 60 bp, Artificial
  Synthetic oligonucleotide
ggagcacctccctttcggttgcctctgacataagtgggactcaatgcatacagaccgatt

SEQ ID NO: 22151 - DNA, 60 bp, Artificial
  Synthetic oligonucleotide
tagaagaatgtattggagcacctccctttcggttgcctctgacataagtgggactcaatg

SEQ ID NO: 22152 - DNA, 60 bp, Artificial
  Synthetic oligonucleotide
atggactttgagtgactcggaagggaacgacatgccaggtggttactgtctcacaaggtc

SEQ ID NO: 22153 - DNA, 60 bp, Artificial
  Synthetic oligonucleotide
ttcagaacacatcatgggaggatcattgcatgttctcaagaccctcacccatgggatttt

SEQ ID NO: 22154 - DNA, 60 bp, Artificial
  Synthetic oligonucleotide
tgcccggaacccgccacccattccgaccatctgtagcaaaaccctcctctgttctagctg

SEQ ID NO: 22155 - DNA, 60 bp, Artificial
  Synthetic oligonucleotide
gcaagcaatcgtcaggcttggcattgtcccaaactgattgtttaaaagctctgggtttcg

SEQ ID NO: 22156 - DNA, 60 bp, Artificial
  Synthetic oligonucleotide
gagtatgagaaaaggcagagcacaacacctctggggttagtagatctttttgttttctcc

SEQ ID NO: 22157 - DNA, 60 bp, Artificial
  Synthetic oligonucleotide
agccccaagtctgacaacgattggatcacatcattcagatctgcctgcccttgtttgcac

SEQ ID NO: 22158 - DNA, 60 bp, Artificial
  Synthetic oligonucleotide
ggtgtttgtattcatcccagatcttatcctcaaattttcttgcatcgtctttctgcatgg

SEQ ID NO: 22159 - DNA, 60 bp, Artificial
  Synthetic oligonucleotide
gagagagtttgtctaagtcagacatgtttggatactttgcagtgtacacaagccccaagt

SEQ ID NO: 22160 - DNA, 60 bp, Artificial
  Synthetic oligonucleotide
gggtattccttattgcaactactctaagttttggtacttgaatgatactaggacagggag

SEQ ID NO: 22161 - DNA, 60 bp, Artificial
  Synthetic oligonucleotide
tagctatctccacggggtcttcaggtctcccttctatgtcaatccatgtcttagcatttg

SEQ ID NO: 22162 - DNA, 60 bp, Artificial
  Synthetic oligonucleotide
cgccctcatcaatgatcaactggtcatgaggaaccatttgagagatctaatgggtattcc

SEQ ID NO: 22163 - DNA, 60 bp, Artificial
  Synthetic oligonucleotide
gctaatagggcttgatctgaaatgctttgggaacactgccattgcgaagtgtaatcaggc

SEQ ID NO: 22164 - DNA, 60 bp, Artificial
  Synthetic oligonucleotide
gggtcatacctaaatgaaacccagttctcaacagaaattgagcaagaagccaataacatg

SEQ ID NO: 22165 - DNA, 60 bp, Artificial
  Synthetic oligonucleotide
atgatactaggacagggagaacatccctcccaaagtgttggcttgtgaccaatgggtcat

SEQ ID NO: 22166 - DNA, 60 bp, Artificial
  Synthetic oligonucleotide
actttaactcaactagattgttcactgcctggtttaggtccctcaatcttttcaggtcag

SEQ ID NO: 22167 - DNA, 60 bp, Artificial
  Synthetic oligonucleotide
gcttttcggtgcagagctgattccaaaggcgcaatcaattagcctaggatccactgtgcg

SEQ ID NO: 22168 - DNA, 60 bp, Artificial
  Synthetic oligonucleotide
tgtctgagagtaggtcaaaccagcaggcatgccttgggcctgagcgagtctgttggagtt

SEQ ID NO: 22169 - DNA, 60 bp, Artificial
  Synthetic oligonucleotide
gatagacaaggaaagaccccactaggcttggttgacttgtttgtgttcagcacaagcttc

SEQ ID NO: 22170 - DNA, 60 bp, Artificial
  Synthetic oligonucleotide
tatctctgcttgcaatcttgaagggtgtgtacaatttggccacgtgtggccttattggtc

SEQ ID NO: 22171 - DNA, 60 bp, Artificial
  Synthetic oligonucleotide
ttaatcaagataccaactcatagacacattgtaggtgggccatgccccaaacctcacagg

SEQ ID NO: 22172 - DNA, 60 bp, Artificial
  Synthetic oligonucleotide
cgaagcgctcattgttgtcaccaaactgtgggtcttagtgcacttgggctcacaaggatg

SEQ ID NO: 22173 - DNA, 55 bp, Artificial
  Synthetic oligonucleotide
cccaggctctaccagtgattgaggtccttgacgcaatgtaaggccacccatctcc

SEQ ID NO: 22174 - DNA, 60 bp, Artificial
  Synthetic oligonucleotide
gaggctttttgatttcaacaaacaagccattcagagattgaaggctgaggctcaaatgag

SEQ ID NO: 22175 - DNA, 60 bp, Artificial
  Synthetic oligonucleotide
ctcaaatgagtattcagcttattaacaaagcagtcaatgccctcataaatgaccagctta

SEQ ID NO: 22176 - DNA, 60 bp, Artificial
  Synthetic oligonucleotide
agaatacaacctgggaggaccattgtcaattttcaagaccatcacccattggctatcttg

SEQ ID NO: 22177 - DNA, 60 bp, Artificial
  Synthetic oligonucleotide
gctaggaacatttacatggacattgtcagattctgaaggcaatgaaaatccagggggtta

SEQ ID NO: 22178 - DNA, 60 bp, Artificial
  Synthetic oligonucleotide
gggaggaccattgtcaattttcaagaccatcacccattggctatcttgggctcctctctc

SEQ ID NO: 22179 - DNA, 58 bp, Artificial
  Synthetic oligonucleotide
acaagggcatttgctcttgtgggctatataaacggccaggagtgtctgtgaggtggaa

SEQ ID NO: 22180 - DNA, 60 bp, Artificial
  Synthetic oligonucleotide
gaccagcttataatgaaaaatcatctcagagacattatgggcataccatattgcaactat

SEQ ID NO: 22181 - DNA, 60 bp, Artificial
  Synthetic oligonucleotide
ttgggtacttcgcggtgtaaatcagtcccaaatctgtcagggcctgaacagcatcattca

SEQ ID NO: 22182 - DNA, 60 bp, Artificial
  Synthetic oligonucleotide
ctaagtcagatgaatttgggtacttcgcggtgtaaatcagtcccaaatctgtcagggcct

SEQ ID NO: 22183 - DNA, 60 bp, Artificial
  Synthetic oligonucleotide
actgctttagatcagtcggttctctgaagaagtggatgtaacaacctgagtttggctggt

SEQ ID NO: 22184 - DNA, 60 bp, Artificial
  Synthetic oligonucleotide
acttggcattgtcccaaactgattatttaatagttctggatttctcacgtcccagaccct

SEQ ID NO: 22185 - DNA, 60 bp, Artificial
  Synthetic oligonucleotide
cgtcccagacccttacgataccatcccttccggcacttgttccttgactgctaccaacca

SEQ ID NO: 22186 - DNA, 60 bp, Artificial
  Synthetic oligonucleotide
ctggatttctcacgtcccagacccttacgataccatcccttccggcacttgttccttgac

SEQ ID NO: 22187 - DNA, 60 bp, Artificial
  Synthetic oligonucleotide
ctaagtcagcagccaaggtcagcagatcatcagaactgagagttccaacttttagaatgc

SEQ ID NO: 22188 - DNA, 52 bp, Artificial
  Synthetic oligonucleotide
ggtgctcaggttccccatgtaaactcctgaactcaacggcctttcagtgcga

SEQ ID NO: 22189 - DNA, 60 bp, Artificial
  Synthetic oligonucleotide
ttccatcgaatccacccatcacagctgcatcaaacatgatacagtccattagtgcacaat

SEQ ID NO: 22190 - DNA, 60 bp, Artificial
  Synthetic oligonucleotide
cgtggaagtgcttctatcactgcacttgtcagaccaggttgtgcggcaaacaaatcacct

SEQ ID NO: 22191 - DNA, 60 bp, Artificial
  Synthetic oligonucleotide
gataaccatatttcgtggaagtgcttctatcactgcacttgtcagaccaggttgtgcggc

SEQ ID NO: 22192 - DNA, 60 bp, Artificial
  Synthetic oligonucleotide
ctcccttgcgactctaggagtttcttgatatcctccgacccctggcatgtgataaccata

SEQ ID NO: 22193 - DNA, 60 bp, Artificial
  Synthetic oligonucleotide
cggatagctctcttctcagagactgagtccataggaatgacttcacttctttcgaagcgc

SEQ ID NO: 22194 - DNA, 60 bp, Artificial
  Synthetic oligonucleotide
ggagttatcaacttgaaacccttgagctgaacatggagacgcttaacatgactatgcctc

SEQ ID NO: 22195 - DNA, 60 bp, Artificial
  Synthetic oligonucleotide
cgcttaacatgactatgcctctgtcctgcacaaaaaatactagtcaccactacataaggg

SEQ ID NO: 22196 - DNA, 60 bp, Artificial
  Synthetic oligonucleotide
ggtctgataacattccttttcctctgtggaaggtcatgttcgatgacctacaaagggagt

SEQ ID NO: 22197 - DNA, 60 bp, Artificial
  Synthetic oligonucleotide
gtcagggcctgaacagcatcattcaagtctacctgtccttgtttagttaaacaagctaga

SEQ ID NO: 22198 - DNA, 52 bp, Artificial
  Synthetic oligonucleotide
aagcatcataaaccacaagttctgcaatctctctgatgcacacaaaaagaat

SEQ ID NO: 22199 - DNA, 60 bp, Artificial
  Synthetic oligonucleotide
atctgtccatccctaactttaatcagtatgaagccatgagttgtgacttcaatggaggta

SEQ ID NO: 22200 - DNA, 60 bp, Artificial
  Synthetic oligonucleotide
gggtgggtaatgaaacagggcttgagctgaccttaaccaatacaagcatcataaaccaca

SEQ ID NO: 22201 - DNA, 60 bp, Artificial
  Synthetic oligonucleotide
tcgaggaaactgggattgtataatgactagctaccaatacttaatcattcagaatacaac

SEQ ID NO: 22202 - DNA, 60 bp, Artificial
  Synthetic oligonucleotide
tgttgaagttctaaagaccatgtctctgggcaacacagccctcaagactcttccatcgaa

SEQ ID NO: 22203 - DNA, 60 bp, Artificial
  Synthetic oligonucleotide
gaccatgtctctgggcaacacagccctcaagactcttccatcgaatccacccatcacagc

SEQ ID NO: 22204 - DNA, 60 bp, Artificial
  Synthetic oligonucleotide
ttcacttctttcgaagcgctcattgttgtcaccaaactgtgggtcttagtgcacttgggc

SEQ ID NO: 22205 - DNA, 60 bp, Artificial
  Synthetic oligonucleotide
ccctaggctccttttaacctttaggatcgatttcaagatcccatctatagattggggtga

SEQ ID NO: 22206 - DNA, 60 bp, Artificial
  Synthetic oligonucleotide
ttctgcttgcgcatcaatcgttgcacattgctgacttcagaaaagtcaaggccatgtaag

SEQ ID NO: 22207 - DNA, 60 bp, Artificial
  Synthetic oligonucleotide
gccatgtaagagggcttgagcatccttgaccacttgtaattttatgttggagcagtagcc

SEQ ID NO: 22208 - DNA, 60 bp, Artificial
  Synthetic oligonucleotide
ctttttggtgtcaatcatgtttagtataggatgactctgggaaagtctatctaagtcaga

SEQ ID NO: 22209 - DNA, 60 bp, Artificial
  Synthetic oligonucleotide
gggcttgagcatccttgaccacttgtaattttatgttggagcagtagccggatagctctc

SEQ ID NO: 22210 - DNA, 60 bp, Artificial
  Synthetic oligonucleotide
atagcaaatattggtatcttaatcatacgaccacgggtagaacttcactaccaagatgct

SEQ ID NO: 22211 - DNA, 58 bp, Artificial
  Synthetic oligonucleotide
tcctatctcaatgaaactcgtttctcagacgacatagaacaacaagctgacaacatga

SEQ ID NO: 22212 - DNA, 60 bp, Artificial
  Synthetic oligonucleotide
aaagagtacatcgatagacaaggaaagaccccactaggcttggttgacttgtttgtgttc

SEQ ID NO: 22213 - DNA, 60 bp, Artificial
  Synthetic oligonucleotide
cataagggtttctctcacctggagtgtctgacacaaacatccctaggctccttttaacct

SEQ ID NO: 22214 - DNA, 60 bp, Artificial
  Synthetic oligonucleotide
gcttgttatctgactctaaatccactacagtgttttcccaggctctaccagtgattgagg

SEQ ID NO: 22215 - DNA, 60 bp, Artificial
  Synthetic oligonucleotide
actcatagacacattgtaggtgggccatgccccaaacctcacaggctaaaccacaagggc

SEQ ID NO: 22216 - DNA, 60 bp, Artificial
  Synthetic oligonucleotide
ctttgagagtcatgagctgggagtaggtcagtcctgctgggaagccagctgactgtagag

SEQ ID NO: 22217 - DNA, 60 bp, Artificial
  Synthetic oligonucleotide
cccgggttttttgggcttgttatctgactctaaatccactacagtgttttcccaggctct

SEQ ID NO: 22218 - DNA, 60 bp, Artificial
  Synthetic oligonucleotide
tcctagaatctgctttactgagagaaatgtctaccaaccttatatcctttctcccttgcg

SEQ ID NO: 22219 - DNA, 56 bp, Artificial
  Synthetic oligonucleotide
attaactcctctgcattgagtctgcccacttttagaatgttcttcttagacgtgga

SEQ ID NO: 22220 - DNA, 60 bp, Artificial
  Synthetic oligonucleotide
tcagggaggccctttgagggttcagagggtcacaacatttggacctctgaagaccaggtc

SEQ ID NO: 22221 - DNA, 60 bp, Artificial
  Synthetic oligonucleotide
tgatcatacacttatgagcatagtgtcaagcctgcacctgagcattagaggaaataccat

SEQ ID NO: 22222 - DNA, 59 bp, Artificial
  Synthetic oligonucleotide
gaaaatctggcctggaactaacctttacaaatgactccatcattcaacacaacttctgc

SEQ ID NO: 22223 - DNA, 60 bp, Artificial
  Synthetic oligonucleotide
cagtccgtagagttcaacatgtcacaattgaatttaacaatgcccaatgcgtgctcagcc

SEQ ID NO: 22224 - DNA, 60 bp, Artificial
  Synthetic oligonucleotide
agaacagcttttggggggaaatacatgaggtctggctatggttggaaagactccaatggg

SEQ ID NO: 22225 - DNA, 60 bp, Artificial
  Synthetic oligonucleotide
gtgccatcaatcaatgtggaaccttcagaggtagagttttagatatgtttagaacagctt

SEQ ID NO: 22226 - DNA, 60 bp, Artificial
  Synthetic oligonucleotide
atacctaatcatacagaacaggacatgggaaaatcactgtgagtatgccggtccttttgg

SEQ ID NO: 22227 - DNA, 60 bp, Artificial
  Synthetic oligonucleotide
gaaaccctgtagctctctcctcagtgcctgtgtccactggaaactcttgatctccttgga

SEQ ID NO: 22228 - DNA, 60 bp, Artificial
  Synthetic oligonucleotide
acattgtggtgatgctcactgtgtctccaacaaaagcgcaatcaaatgcctaggatccac

SEQ ID NO: 22229 - DNA, 60 bp, Artificial
  Synthetic oligonucleotide
agtgtactgtctggttcaggctcctcagtctctgcagatctttgtcatctctcctatcct

SEQ ID NO: 22230 - DNA, 60 bp, Artificial
  Synthetic oligonucleotide
ggcatccttgatgacagcagccttaacatttgaggtgaaaccctgtagctctctcctcag

SEQ ID NO: 22231 - DNA, 60 bp, Artificial
  Synthetic oligonucleotide
ttgagaagactagtggcatccttgatgacagcagccttaacatttgaggtgaaaccctgt

SEQ ID NO: 22232 - DNA, 60 bp, Artificial
  Synthetic oligonucleotide
gcactcctttggcattaatggatcttttgatgttttccacatcagcatatttgatcagca

SEQ ID NO: 22233 - DNA, 60 bp, Artificial
  Synthetic oligonucleotide
cattttccttcatctgatgaaaatcccaacccacagacacattaaaggcggcacatgccc

SEQ ID NO: 22234 - DNA, 58 bp, Artificial
  Synthetic oligonucleotide
gatgtcctacaggcaatgtagggccaaccttcccctgacaggcagatcttgtacaaga

SEQ ID NO: 22235 - DNA, 59 bp, Artificial
  Synthetic oligonucleotide
acattaaaggcggcacatgccctaaaccacacagactaactagcaaaggcatttgtagt

SEQ ID NO: 22236 - DNA, 60 bp, Artificial
  Synthetic oligonucleotide
cttggggtggccctgctgctcctggtgaaggtcttggtaagtcggtcataggcttgtcac

SEQ ID NO: 22237 - DNA, 60 bp, Artificial
  Synthetic oligonucleotide
ggtcatggggcagtatattgtgtacagtcttcaggtctggcagcctagcctttgaagcac

SEQ ID NO: 22238 - DNA, 60 bp, Artificial
  Synthetic oligonucleotide
tcgcaccggggatcctaggcttattatattgcgctttgtattgaagtctgttctgtgtgg

SEQ ID NO: 22239 - DNA, 60 bp, Artificial
  Synthetic oligonucleotide
ccagttgttgatgaggaatcatctaagggatctgatgggcgtaccctattgcaactactc

SEQ ID NO: 22240 - DNA, 60 bp, Artificial
  Synthetic oligonucleotide
ggcagggacttttacctggacattgtcggattcttcgggaactgaaaccccaggtgggta

SEQ ID NO: 22241 - DNA, 60 bp, Artificial
  Synthetic oligonucleotide
gtagagtctgcccttcacttgttcaaaacaactgtgaattccttaatatctgaccagttg

SEQ ID NO: 22242 - DNA, 60 bp, Artificial
  Synthetic oligonucleotide
gtccttttggtctctcaagaattctttttgctcaggagaaaacaaagtttctcactagaa

SEQ ID NO: 22243 - DNA, 60 bp, Artificial
  Synthetic oligonucleotide
aataacaagcataaaggctgtgtacaactttgctacctgtggcatcattgcattgatcag

SEQ ID NO: 22244 - DNA, 60 bp, Artificial
  Synthetic oligonucleotide
gtggcttgtatggtgtctctggctctgacatttacaagggactctaccagttccagtccg

SEQ ID NO: 22245 - DNA, 60 bp, Artificial
  Synthetic oligonucleotide
gaattgctgggcttaattaggattgattccaacatattgcccccatccagcaatgcggct

SEQ ID NO: 22246 - DNA, 60 bp, Artificial
  Synthetic oligonucleotide
cagacaatatgattactgaaatgcttagaaaagactacattaagaggcaaggaagcactc

SEQ ID NO: 22247 - DNA, 60 bp, Artificial
  Synthetic oligonucleotide
ttgcacaacatcgtttaaaggggtctgtgcctgtttggcaatacaagccattgtcaagct

SEQ ID NO: 22248 - DNA, 60 bp, Artificial
  Synthetic oligonucleotide
atgagtgctcctaagtgctggttggtcaccaatggctcatacctgaatgagacccatttt

SEQ ID NO: 22249 - DNA, 60 bp, Artificial
  Synthetic oligonucleotide
cggctcctgctttgacagctgcacccaaactgaagttgtacccagatatattgatgctgg

SEQ ID NO: 22250 - DNA, 51 bp, Artificial
  Synthetic oligonucleotide
ttgtctttcagcctgtcaagatccgacaaattggggtatttgactgtgtag

SEQ ID NO: 22251 - DNA, 60 bp, Artificial
  Synthetic oligonucleotide
ctgctgtgttgtcagattgcccatatagacccctgatgcttgtggtctctctgatctcat

SEQ ID NO: 22252 - DNA, 60 bp, Artificial
  Synthetic oligonucleotide
ccggatcattgtatctaccctcaatgtctatccatgtgggtgcatttggatcaatcccgc

SEQ ID NO: 22253 - DNA, 56 bp, Artificial
  Synthetic oligonucleotide
ttgtcaagctgggcattgtgccaaattgattgttcaaaagtgatgagtccttcaca

SEQ ID NO: 22254 - DNA, 60 bp, Artificial
  Synthetic oligonucleotide
ggggcctcctcatcccaaccatttgtagaatttgagatctttggtcgagctgctgtgttg

SEQ ID NO: 22255 - DNA, 60 bp, Artificial
  Synthetic oligonucleotide
catcagacccttgacagctgagcaccattccctggggaagggcgccaattactgaggaag

SEQ ID NO: 22256 - DNA, 60 bp, Artificial
  Synthetic oligonucleotide
gggcgccaattactgaggaagttaatcccggttgtgcattgaagagatcggccagatcca

SEQ ID NO: 22257 - DNA, 60 bp, Artificial
  Synthetic oligonucleotide
gccagatccatcccatgtgagtactttgaatcttgtttaaattgtttttgatcagtaggt

SEQ ID NO: 22258 - DNA, 60 bp, Artificial
  Synthetic oligonucleotide
atcagtaggttccctgtaaaaatgtatgaactgcccattctgtggctgaaagatagcaac

SEQ ID NO: 22259 - DNA, 60 bp, Artificial
  Synthetic oligonucleotide
cgtacttgtcccaaactttatcctcatattctcgtgaagcttccttgttcatctcgacat

SEQ ID NO: 22260 - DNA, 60 bp, Artificial
  Synthetic oligonucleotide
gagcttgatatcccttctattctgtgagtctaagagtttcctgatatcatcagacccttg

SEQ ID NO: 22261 - DNA, 60 bp, Artificial
  Synthetic oligonucleotide
gcgttttgccccgagaactgcttttaggagttcctcagaattgctgggcttaattaggat

SEQ ID NO: 22262 - DNA, 60 bp, Artificial
  Synthetic oligonucleotide
ggactgacctcagcacaagtgttatggggcagatcataacaatgtttgaggccctgcctc

SEQ ID NO: 22263 - DNA, 60 bp, Artificial
  Synthetic oligonucleotide
tggctttcagcttttctagatcagctgctaaagacattaactcctctgcattgagtctgc

SEQ ID NO: 22264 - DNA, 60 bp, Artificial
  Synthetic oligonucleotide
ataagggtttctgtctcccacttggtctgagacaaacatattaaacttgcgttttgcccc

SEQ ID NO: 22265 - DNA, 60 bp, Artificial
  Synthetic oligonucleotide
catgaggagtggctggggctggacaggttcagatggcaaaaccacatggtgtagtcagac

SEQ ID NO: 22266 - DNA, 60 bp, Artificial
  Synthetic oligonucleotide
ggcccagagatgttaacgcttggaccacactgttcatcgtttctccaccctggacagtca

SEQ ID NO: 22267 - DNA, 60 bp, Artificial
  Synthetic oligonucleotide
ccacccgtcacctgaaagacacaatttatacaaaaggttttcataaggatttcgatttcc

SEQ ID NO: 22268 - DNA, 60 bp, Artificial
  Synthetic oligonucleotide
cccgtcacctgaaagacacaatttatacaaaaggttttcataaggatttcgatttccagg

SEQ ID NO: 22269 - DNA, 60 bp, Artificial
  Synthetic oligonucleotide
cattgtgccaaattgattgttcagaagtgatgaatccttcacatcccagaccctcaccac

SEQ ID NO: 22270 - DNA, 60 bp, Artificial
  Synthetic oligonucleotide
gcttggcattgtgccaaattgattgttcagaagtgatgagtctctcacatcccagaccct

SEQ ID NO: 22271 - DNA, 60 bp, Artificial
  Synthetic oligonucleotide
gaggcccagagggtcttagagtgttactacatttggacctctgaagatcaggtcatgtgg

SEQ ID NO: 22272 - DNA, 60 bp, Artificial
  Synthetic oligonucleotide
cctcaaggatgcaatgctgcaacttgacccaaatgctaagacctggatggacattgaagg

SEQ ID NO: 22273 - DNA, 60 bp, Artificial
  Synthetic oligonucleotide
ggctcaataaacttctcaaaacactttatttgatctgtcagccgatcaggtgtctctttg

SEQ ID NO: 22274 - DNA, 60 bp, Artificial
  Synthetic oligonucleotide
gagaagccaccacaagctgcagaatttagaagaacggcagagcccagtctatatgggagg

SEQ ID NO: 22275 - DNA, 60 bp, Artificial
  Synthetic oligonucleotide
gcccacaccgatatttgtgaccagatatcttgttgagacctcctcaagattttagagcaa

SEQ ID NO: 22276 - DNA, 60 bp, Artificial
  Synthetic oligonucleotide
ctcgaacatcgcctttgactccaacaaataatgatttggccagtctatcatcatactcca

SEQ ID NO: 22277 - DNA, 60 bp, Artificial
  Synthetic oligonucleotide
gatcctctccaccacccattcaggagtgaacctattagaataattagttctaccgtcaac

SEQ ID NO: 22278 - DNA, 59 bp, Artificial
  Synthetic oligonucleotide
gcccgtccaacatcattccttcttgagcttctgtcagttgaccatttaaagatgggttg

SEQ ID NO: 22279 - DNA, 60 bp, Artificial
  Synthetic oligonucleotide
tacttgaacctcctagcaaaataggggtccgaatcaacaccttcaccaagaaggcattgg

SEQ ID NO: 22280 - DNA, 60 bp, Artificial
  Synthetic oligonucleotide
tccatcaggtatcactttagggagagtgggacatgggattccatgatcactgaggatcac

SEQ ID NO: 22281 - DNA, 60 bp, Artificial
  Synthetic oligonucleotide
ctatgacttcagagccagacatacactccacttttaatttggacagtagatccacgtggt

SEQ ID NO: 22282 - DNA, 60 bp, Artificial
  Synthetic oligonucleotide
cgctcttattgctagagaggtctaaagcagtgctagtaatgtttggcttgaatgggtcgt

SEQ ID NO: 22283 - DNA, 60 bp, Artificial
  Synthetic oligonucleotide
aatgagatgcaataactcaacagttcattgctgacccctggtaatttggtgtcagaacag

SEQ ID NO: 22284 - DNA, 60 bp, Artificial
  Synthetic oligonucleotide
cttgttatcagcttagtgttaagatccccaacgtaaagttccctattggaacccacttgc

SEQ ID NO: 22285 - DNA, 60 bp, Artificial
  Synthetic oligonucleotide
ccactcccctatttcgcaggcattggtcaaaactaaagaaaagtaatcccaaagaatagg

SEQ ID NO: 22286 - DNA, 60 bp, Artificial
  Synthetic oligonucleotide
cagggaagccatattaaaagtgccttgacctgtgaatatcggaagtcctgcaatcatgga

SEQ ID NO: 22287 - DNA, 60 bp, Artificial
  Synthetic oligonucleotide
atgtaaaggaaaccgccctcaccatctctgacacatttgctgcctatacttttacaaaaa

SEQ ID NO: 22288 - DNA, 60 bp, Artificial
  Synthetic oligonucleotide
catggttggtccccatttagagtgatcaagagaacatgataggtcaccattgttcactgc

SEQ ID NO: 22289 - DNA, 60 bp, Artificial
  Synthetic oligonucleotide
gactgcaatgtcttaatcagtgttggcacctcttctctctcaagaacccttctgctcgtc

SEQ ID NO: 22290 - DNA, 60 bp, Artificial
  Synthetic oligonucleotide
gccatctcagcacatttaagactggttcaagattaataatgttcctttcttttggggtcc

SEQ ID NO: 22291 - DNA, 60 bp, Artificial
  Synthetic oligonucleotide
cccctcgtcccatccacccaatcttttacatcttgtttctcaacagcaccaaaaggggtt

SEQ ID NO: 22292 - DNA, 60 bp, Artificial
  Synthetic oligonucleotide
atcttcagggtcgtccagtgcgccaattgccttcactattatatcaccagtcaactccac

SEQ ID NO: 22293 - DNA, 60 bp, Artificial
  Synthetic oligonucleotide
gttgacaaattcaacccagtccccgatcaactccagggacctgatcaagccagatctatg

SEQ ID NO: 22294 - DNA, 60 bp, Artificial
  Synthetic oligonucleotide
ccgtcagaattaggttgtcatttgtctccacaagatctgcatccatcatcagggaagcca

SEQ ID NO: 22295 - DNA, 57 bp, Artificial
  Synthetic oligonucleotide
aaaagtggccgtctcttaacaccaatggctccccttgatcgactggcccattgagtg

SEQ ID NO: 22296 - DNA, 60 bp, Artificial
  Synthetic oligonucleotide
gtcattttcctcttaaacctgtacttagttgatgttctagaatgctccacctggatcaaa

SEQ ID NO: 22297 - DNA, 60 bp, Artificial
  Synthetic oligonucleotide
tttctgaactgagacatgtatatctcatggaactgccaactgcctctgcaaagtcttcaa

SEQ ID NO: 22298 - DNA, 57 bp, Artificial
  Synthetic oligonucleotide
aaaagaatctctgttggtagcactcccttagtctcacattgccaaaataccttgagt

SEQ ID NO: 22299 - DNA, 60 bp, Artificial
  Synthetic oligonucleotide
gccaagttgtcatctcatcacacatctcaaccaacacctcttgtgaaaagattggcagaa

SEQ ID NO: 22300 - DNA, 59 bp, Artificial
  Synthetic oligonucleotide
gcagtgaccctgaatgacagtgtgacaggaaggcatctttctggtgggcaaactcatgc

SEQ ID NO: 22301 - DNA, 60 bp, Artificial
  Synthetic oligonucleotide
gtctttgagttcagacacagtttcatccatggtcaagtgccgcctaggatccactgtgcg

SEQ ID NO: 22302 - DNA, 60 bp, Artificial
  Synthetic oligonucleotide
aatttcaccgcctccaaaaaatccaaggccctgtcattgactagtgtgaccatttgaccc

SEQ ID NO: 22303 - DNA, 60 bp, Artificial
  Synthetic oligonucleotide
cccaggatgagaccagaccttctcaaagagtccagtgcttcgggtttggctgtaaatagg

SEQ ID NO: 22304 - DNA, 60 bp, Artificial
  Synthetic oligonucleotide
gtccatgaatttgttgacacaaaagggacaatctgaggtggtgttatcctcatgtttccc

SEQ ID NO: 22305 - DNA, 60 bp, Artificial
  Synthetic oligonucleotide
cctataaaaccagatgccactgaagactggaatgcagatttgtttatggactccgctaag

SEQ ID NO: 22306 - DNA, 60 bp, Artificial
  Synthetic oligonucleotide
ctctcatgctaagtcttacttcatctttcactctcagtgcttcattagtgaaaccaagcc

SEQ ID NO: 22307 - DNA, 60 bp, Artificial
  Synthetic oligonucleotide
aactgatactggtaaactcagtaggagaatcatcagagtaaaagcacaggttccttagtg

SEQ ID NO: 22308 - DNA, 60 bp, Artificial
  Synthetic oligonucleotide
cccaaaaggaccccaaagttcctcaagtgtacctgtgctgcttttaaccctgccttcctt

SEQ ID NO: 22309 - DNA, 60 bp, Artificial
  Synthetic oligonucleotide
cacatagttctttatacaagtctgaagcgagtacatcaggatcaaagtctttcacctcat

SEQ ID NO: 22310 - DNA, 60 bp, Artificial
  Synthetic oligonucleotide
ggtctctccaagaaatactctggtttgcttgaggagtaatagaccacatcacatagttct

SEQ ID NO: 22311 - DNA, 60 bp, Artificial
  Synthetic oligonucleotide
cctagctagaggtctgcacataatgcctctcaacctcaaggacccctggttgtcagatac

SEQ ID NO: 22312 - DNA, 60 bp, Artificial
  Synthetic oligonucleotide
gctaccacaacccatcaaccctaagcttctctttagattgccagtacagtaagcctcagc

SEQ ID NO: 22313 - DNA, 60 bp, Artificial
  Synthetic oligonucleotide
cttggcccatatctagaacagacattatgtgacttggtatctctccttggactggcatga

SEQ ID NO: 22314 - DNA, 60 bp, Artificial
  Synthetic oligonucleotide
cccagttgatcttctaattgacgaacaattctaggcttaacagcccagaacaaattcctg

SEQ ID NO: 22315 - DNA, 60 bp, Artificial
  Synthetic oligonucleotide
gcacaaggcaatttgataagtgtgacctggtcatcgctagaagtgtaggaagttggaatg

SEQ ID NO: 22316 - DNA, 60 bp, Artificial
  Synthetic oligonucleotide
ctcattcatcaaatccaatgctatgcaaacatctaagaacttcagcttcctcccatccag

SEQ ID NO: 22317 - DNA, 60 bp, Artificial
  Synthetic oligonucleotide
gggcaactgcaatcgaactcagaaacccagttcgtcttctaacaacctcgagaagccacc

SEQ ID NO: 22318 - DNA, 60 bp, Artificial
  Synthetic oligonucleotide
gtcaccaaatcatgctgagaaactcagagctgtgcaacatctgctggaagcccctgccaa

SEQ ID NO: 22319 - DNA, 60 bp, Artificial
  Synthetic oligonucleotide
gaagatccagcaagtcattgatgtgtctccctggagccagtggttgctctccaattgtga

SEQ ID NO: 22320 - DNA, 60 bp, Artificial
  Synthetic oligonucleotide
cccctgccaacatccataagagtcccgctagaggcaagtgctccggatctgtaaccaacg

SEQ ID NO: 22321 - DNA, 60 bp, Artificial
  Synthetic oligonucleotide
ctcaagtcacaatcctcatggtcatcaaagttcccaagaagatccagcaagtcattgatg

SEQ ID NO: 22322 - DNA, 60 bp, Artificial
  Synthetic oligonucleotide
ctgcttgctcttctgtcaacccttcaaacatcattgacagctcttcacaatctctctggg

SEQ ID NO: 22323 - DNA, 60 bp, Artificial
  Synthetic oligonucleotide
ggcaagaagttgacatcactaaagggttcaccatcgatgataggatgatttgaaccatga

SEQ ID NO: 22324 - DNA, 60 bp, Artificial
  Synthetic oligonucleotide
agaatgttcaacaacctcccaatgtcctgtagcaaaaacaacactcaccattactacaag

SEQ ID NO: 22325 - DNA, 60 bp, Artificial
  Synthetic oligonucleotide
ggacaacattgtgctgagtagatctcattgacatcaaggcgtccacctctttgttcatgt

SEQ ID NO: 22326 - DNA, 60 bp, Artificial
  Synthetic oligonucleotide
ctcttctcttttctcataatcctttggacttgtgcaacctgattgaaatcaagagcagat

SEQ ID NO: 22327 - DNA, 60 bp, Artificial
  Synthetic oligonucleotide
gagcagatattattgcccttgcatcctttatcacatctaccttaacaggctctgtccagt

SEQ ID NO: 22328 - DNA, 60 bp, Artificial
  Synthetic oligonucleotide
gctccctgttctttacttgtagaacagcttttattatggagctaaacataggtggactca

SEQ ID NO: 22329 - DNA, 60 bp, Artificial
  Synthetic oligonucleotide
ttactacaaggggccagagggaacaaactgggggattgagttgaccttgaccaatgaatc

SEQ ID NO: 22330 - DNA, 60 bp, Artificial
  Synthetic oligonucleotide
tcatctttgaatagaaggtcaatggggatgagctgtcgaggtttcacatcccgtatgtag

SEQ ID NO: 22331 - DNA, 60 bp, Artificial
  Synthetic oligonucleotide
gtgtttctcacagagtggattgaacctatcccaaactggatcctcaaagaccctcgcatg

SEQ ID NO: 22332 - DNA, 60 bp, Artificial
  Synthetic oligonucleotide
aatcagctgttctatatcatcactgccttgggcagtgagcaccatcccctttggtagtgc

SEQ ID NO: 22333 - DNA, 58 bp, Artificial
  Synthetic oligonucleotide
acccactttaggaatgattggctgctagaaagtcaacaactatacaatgacatgctag

SEQ ID NO: 22334 - DNA, 60 bp, Artificial
  Synthetic oligonucleotide
tcccaatgtcctgtagcaaaaacaacactcaccattactacaaggggccagagggaacaa

SEQ ID NO: 22335 - DNA, 60 bp, Artificial
  Synthetic oligonucleotide
cataggtggactcatctttatggtctccaacatgtttcccccatcaatcatacaagctcc

SEQ ID NO: 22336 - DNA, 60 bp, Artificial
  Synthetic oligonucleotide
gagggaacaaactgggggattgagttgaccttgaccaatgaatctgttgctaattactct

SEQ ID NO: 22337 - DNA, 60 bp, Artificial
  Synthetic oligonucleotide
atggattcctttgaacacccacagatcccacaaacatctgctccctgttctttacttgta

SEQ ID NO: 22338 - DNA, 60 bp, Artificial
  Synthetic oligonucleotide
cgatcaatgtgttgtcccaggctctcccaacaatctgagatctcgacccaatgtaaggcc

SEQ ID NO: 22339 - DNA, 60 bp, Artificial
  Synthetic oligonucleotide
agatctcgacccaatgtaaggccaaccctctccactcagacaaagtttgtaaagtagatt

SEQ ID NO: 22340 - DNA, 60 bp, Artificial
  Synthetic oligonucleotide
gtcagccataaggagccttgcatatggaaacataaccaactgtgataagactaatgaagc

SEQ ID NO: 22341 - DNA, 60 bp, Artificial
  Synthetic oligonucleotide
accaactgtgataagactaatgaagcaggtcataccttaaaatggttgctaaatgagcta

SEQ ID NO: 22342 - DNA, 60 bp, Artificial
  Synthetic oligonucleotide
ctgagaattccatcaatcttctgaaaaggagtattaacggtttgatatccgattctcttg

SEQ ID NO: 22343 - DNA, 60 bp, Artificial
  Synthetic oligonucleotide
gagactctttgacttcaaccaaaatgctataaaaactttacaattgaacactgagaattc

SEQ ID NO: 22344 - DNA, 60 bp, Artificial
  Synthetic oligonucleotide
gctggctgacatacaacggaagttatctaaatgaaacccactttaggaatgattggctgc

SEQ ID NO: 22345 - DNA, 60 bp, Artificial
  Synthetic oligonucleotide
cctgggtaattgatttaagacacgggtgttgttcactcagcttctccaagtcatcaagat

SEQ ID NO: 22346 - DNA, 60 bp, Artificial
  Synthetic oligonucleotide
tcatcaagatttggaaatttcactgtgtaaaccagtcccaatgcagaaagaccctgaaca

SEQ ID NO: 22347 - DNA, 60 bp, Artificial
  Synthetic oligonucleotide
gaagcaagccatgtgaatacctactttggtctttgaatgcactttcattatgaggtgctc

SEQ ID NO: 22348 - DNA, 56 bp, Artificial
  Synthetic oligonucleotide
tcactgtagttactcaccaatgtctactatcagaatggcactaaacaaagttgctt

SEQ ID NO: 22349 - DNA, 60 bp, Artificial
  Synthetic oligonucleotide
gggacaacttgtgaccctcttccaatcgatcccagagatcatagaggaggcagtcaacat

SEQ ID NO: 22350 - DNA, 60 bp, Artificial
  Synthetic oligonucleotide
caggcatcgatccaaactgatttatcattaatgagctgtctttgaacatcccacaccctc

SEQ ID NO: 22351 - DNA, 60 bp, Artificial
  Synthetic oligonucleotide
atgggttaggaaaggcaaataaactaaattggcctctgccgccctgatgtctcaccccct

SEQ ID NO: 22352 - DNA, 60 bp, Artificial
  Synthetic oligonucleotide
tgtggatattataacatcccaatgaaaccagtgagatgggttaggaaaggcaaataaact

SEQ ID NO: 22353 - DNA, 60 bp, Artificial
  Synthetic oligonucleotide
accctgaacaacatcattttcatagtctcccccccttgttccgtcatacatgctattgtg

SEQ ID NO: 22354 - DNA, 60 bp, Artificial
  Synthetic oligonucleotide
aatttcactgtgtaaaccagtcccaatgcagaaagaccctgaacaacatcattcatagtc

SEQ ID NO: 22355 - DNA, 60 bp, Artificial
  Synthetic oligonucleotide
agtttattttacagtctcagtcttcttacaacttgtagggattccatctcaccgacacat

SEQ ID NO: 22356 - DNA, 60 bp, Artificial
  Synthetic oligonucleotide
aggcagggaaaaaccccaattgcattgacagacatctgcttttggagcctagtttatttt

SEQ ID NO: 22357 - DNA, 60 bp, Artificial
  Synthetic oligonucleotide
ccgacacattgtgggtcaaggctgtccaaaaccccatagaatctctagaaatggattatg

SEQ ID NO: 22358 - DNA, 60 bp, Artificial
  Synthetic oligonucleotide
ttctccaaatctgctgaaagttccaaaagttcatcctttgagaggccaccagctctcagg

SEQ ID NO: 22359 - DNA, 60 bp, Artificial
  Synthetic oligonucleotide
tttagttgtgttgctgttaagttaccctggtaaacaccagggttacccccttcagctctt

SEQ ID NO: 22360 - DNA, 60 bp, Artificial
  Synthetic oligonucleotide
catgtgccaggtggctactgtcttgaacaatgggcacttgtctgggcaggtataaaatgc

SEQ ID NO: 22361 - DNA, 60 bp, Artificial
  Synthetic oligonucleotide
tcaagttgattggacctccatttttcacaggcggaggactcactgcaggcttcccttcta

SEQ ID NO: 22362 - DNA, 60 bp, Artificial
  Synthetic oligonucleotide
tgctctataacagtgtaagtagttcccgctttcaggttggtaaatggcaagttccacagg

SEQ ID NO: 22363 - DNA, 51 bp, Artificial
  Synthetic oligonucleotide
ccctgattcagccagaagcgtaatccaattcagcctaggatccactgtgcg

SEQ ID NO: 22364 - DNA, 60 bp, Artificial
  Synthetic oligonucleotide
taattgcacttattaaaccaggtctggcagcctttagatcctttagaagcaagccatgtg

SEQ ID NO: 22365 - DNA, 60 bp, Artificial
  Synthetic oligonucleotide
ttaacaggctctgtccagttagacaggcccctcctgagggcttgagtccaccggaagctg

SEQ ID NO: 22366 - DNA, 60 bp, Artificial
  Synthetic oligonucleotide
ctggagtcagttgagttcaacctcaccagaatgttcaacaacctcccaatgtcctgtagc

SEQ ID NO: 22367 - DNA, 60 bp, Artificial
  Synthetic oligonucleotide
cttaaaatggttgctaaatgagctacactttaatgtactacatgtgacacggcacattgg

SEQ ID NO: 22368 - DNA, 60 bp, Artificial
  Synthetic oligonucleotide
aatgtactacatgtgacacggcacattggtgcaaggtgcctaactacagactcagcgggc

SEQ ID NO: 22369 - DNA, 60 bp, Artificial
  Synthetic oligonucleotide
attctggtatgttaatgacacaatcactaaaagacatagtcttcctcaatgctggctgac

SEQ ID NO: 22370 - DNA, 60 bp, Artificial
  Synthetic oligonucleotide
ttcccttctaagtcgatcaatgtgttgtcccaggctctcccaacaatctgagatctcgac

SEQ ID NO: 22371 - DNA, 54 bp, Artificial
  Synthetic oligonucleotide
ttttcacaggcggaggactcactgcaggcttcccttctaagtcgatcaatgtgt

SEQ ID NO: 22372 - DNA, 60 bp, Artificial
  Synthetic oligonucleotide
cgcacagtggatcctaggctattgagaatctctgcgcattggaatctccaagatgggaca

SEQ ID NO: 22373 - DNA, 60 bp, Artificial
  Synthetic oligonucleotide
gacacttaattgcttcactagcacaaattataggggatgacaaagcagcgtgggtgggca

SEQ ID NO: 22374 - DNA, 60 bp, Artificial
  Synthetic oligonucleotide
ttgcatttgacactctttaatggtttgatcactcttctcattggcttccttcccgacatt

SEQ ID NO: 22375 - DNA, 60 bp, Artificial
  Synthetic oligonucleotide
gaacggaggcaacaggctgagatgtccaagaccatgcagtcttcccaatgttcaaacaag

SEQ ID NO: 22376 - DNA, 60 bp, Artificial
  Synthetic oligonucleotide
tccactgtgaaattgaggcagaatgagtttgggcctgcaaggtaccaggtggtcaggtgc

SEQ ID NO: 22377 - DNA, 60 bp, Artificial
  Synthetic oligonucleotide
gatgaacagggacaccattcgccactgactgatcaatgattgtatcaattgtttctgcca

SEQ ID NO: 22378 - DNA, 60 bp, Artificial
  Synthetic oligonucleotide
aggagaggtgttcactagataggtaatttgttgtgaattcttcatggagttgtccggttt

SEQ ID NO: 22379 - DNA, 60 bp, Artificial
  Synthetic oligonucleotide
gagctgatcgctcatataatagtggaagtccattagggtcttgaattcatccgggtctct

SEQ ID NO: 22380 - DNA, 60 bp, Artificial
  Synthetic oligonucleotide
cctgttaccaccaacctgctccttatatgacaaggagaactttagcctccctgtgtcagg

SEQ ID NO: 22381 - DNA, 60 bp, Artificial
  Synthetic oligonucleotide
agtaaatttgccgcatgaaattgtcaacagcatcactagtactcaccaccctttcttcca

SEQ ID NO: 22382 - DNA, 60 bp, Artificial
  Synthetic oligonucleotide
caaattccttctcgttgttcaaacaactccctgacaattgcaaactcagtgcctcaaagt

SEQ ID NO: 22383 - DNA, 60 bp, Artificial
  Synthetic oligonucleotide
ggaaactggagtaaaagaagtcctctgttattgattgtgtggttttctttctcagcccca

SEQ ID NO: 22384 - DNA, 60 bp, Artificial
  Synthetic oligonucleotide
aacttgcatcttgactcttaatacggaacctcactgtttggcttagtctcgtggaccctg

SEQ ID NO: 22385 - DNA, 60 bp, Artificial
  Synthetic oligonucleotide
ttcaaattcatcttgaacatttcctacatgtgccatttcattacaaaagagacaccagac

SEQ ID NO: 22386 - DNA, 60 bp, Artificial
  Synthetic oligonucleotide
gccagaattaaaaccagtatcatcttagtcaatgacctgatattatgcagttgcccttcc

SEQ ID NO: 22387 - DNA, 60 bp, Artificial
  Synthetic oligonucleotide
tcagtcttatgctgtcgaggtcccaggactaaattgctcatcgcctgttgcactttatat

SEQ ID NO: 22388 - DNA, 60 bp, Artificial
  Synthetic oligonucleotide
gccacatgagaagagtagagaggtaatcccttccttttatatcagcctgcaagtcctttg

SEQ ID NO: 22389 - DNA, 60 bp, Artificial
  Synthetic oligonucleotide
actgatcaacgatcttttcaacagtctcccttagctgatcaaaataaacacttgcacccc

SEQ ID NO: 22390 - DNA, 60 bp, Artificial
  Synthetic oligonucleotide
tgagggacacactcttctcattactgagatatgctcaggaaagtaactcactcttcgaag

SEQ ID NO: 22391 - DNA, 60 bp, Artificial
  Synthetic oligonucleotide
gctcatccctttcaattagctcctcacatgttctgcccttcaatctcagcttgccaccac

SEQ ID NO: 22392 - DNA, 60 bp, Artificial
  Synthetic oligonucleotide
ggaactggctctcgatctcccccttcctcagtctgtttctgaacacctggtattcttctt

SEQ ID NO: 22393 - DNA, 60 bp, Artificial
  Synthetic oligonucleotide
ggtccacactgatccccacatccttcagggcagtggtggccttcaagatggtcttctgca

SEQ ID NO: 22394 - DNA, 60 bp, Artificial
  Synthetic oligonucleotide
agcaacaggtgccccatctgcaaaatgccactccccacaaaactgagaccgtcggccgtc

SEQ ID NO: 22395 - DNA, 60 bp, Artificial
  Synthetic oligonucleotide
ggggagtgtagaattgctggaaactgttgacctggagagactttcttcactgagccttgc

SEQ ID NO: 22396 - DNA, 60 bp, Artificial
  Synthetic oligonucleotide
gtgcttgaagaattccaatgctttggtcatcttgggttctcctaagacccatgcacccag

SEQ ID NO: 22397 - DNA, 60 bp, Artificial
  Synthetic oligonucleotide
ctgggtgaccacttcattttggttgatgctaagtcgctcataaatggcagtatgtgtttt

SEQ ID NO: 22398 - DNA, 60 bp, Artificial
  Synthetic oligonucleotide
gtccttgttgccactgcctttgttagttctccaatgggacactgagacatatgtccgcag

SEQ ID NO: 22399 - DNA, 60 bp, Artificial
  Synthetic oligonucleotide
ggccatgtgagcatcaatcctgcagacatagctacggaagaagagttggatgacatgatc

SEQ ID NO: 22400 - DNA, 60 bp, Artificial
  Synthetic oligonucleotide
cccgaccactgcatctttaaccccagtctatccaacatcatggcactcagtgtctcagtc

SEQ ID NO: 22401 - DNA, 60 bp, Artificial
  Synthetic oligonucleotide
caagggtgttgaaaggccaatgttcaaacatgatctgatgatgggttatgcctggataga

SEQ ID NO: 22402 - DNA, 60 bp, Artificial
  Synthetic oligonucleotide
cggccctcggacacatttactacccaatgttctacacaaccctacaaaaccggaggcaat

SEQ ID NO: 22403 - DNA, 60 bp, Artificial
  Synthetic oligonucleotide
ggacattaggatctttcacatggttcccacacaagacatcaatcccagagggtgaaggat

SEQ ID NO: 22404 - DNA, 60 bp, Artificial
  Synthetic oligonucleotide
ggtaggtcctgacataaccagcctccaacagtccaacaggacacatggattaactgcccc

SEQ ID NO: 22405 - DNA, 60 bp, Artificial
  Synthetic oligonucleotide
aagaagttaagaaggacatcaaagatcccctcatcactagtggctgtgctacagccttgg

SEQ ID NO: 22406 - DNA, 60 bp, Artificial
  Synthetic oligonucleotide
accagaagacaggggaatgttcaaagtgttatgctatcaatgacaacagagttggtgaga

SEQ ID NO: 22407 - DNA, 60 bp, Artificial
  Synthetic oligonucleotide
ttctggtggagacagcttgggttatacatgttataggacaagactctaaagattctaagt

SEQ ID NO: 22408 - DNA, 60 bp, Artificial
  Synthetic oligonucleotide
cacctcatcctcaaatagacattcaatacaatagtttatgaacctttcactcacgagacc

SEQ ID NO: 22409 - DNA, 60 bp, Artificial
  Synthetic oligonucleotide
ccggtgtcaaggccagctagactctctaacatctctcccattgttgtgaatattctctgc

SEQ ID NO: 22410 - DNA, 60 bp, Artificial
  Synthetic oligonucleotide
gagtctacctgtgtctggacctagagatgtgtatgattgtggagattcctgactgtaaaa

SEQ ID NO: 22411 - DNA, 60 bp, Artificial
  Synthetic oligonucleotide
tcaggaaccacaaaaggcaagccagggcacaacactccttgcctttgtaacaggatctca

SEQ ID NO: 22412 - DNA, 60 bp, Artificial
  Synthetic oligonucleotide
tgtttggagagcctcttatcttccaaaagatacttgctgataaggtctttgctctcagac

SEQ ID NO: 22413 - DNA, 60 bp, Artificial
  Synthetic oligonucleotide
cttcaggtccaacatgtatgaagtcaaactcctccaaatccaaaatctcctcatgcagcc

SEQ ID NO: 22414 - DNA, 60 bp, Artificial
  Synthetic oligonucleotide
acgatgggtttccgacagctcacctatgaaaacactcatatcctggtccaagattcgagg

SEQ ID NO: 22415 - DNA, 60 bp, Artificial
  Synthetic oligonucleotide
tgactcaccttgactcttgacctggaagttcactgtgatggacatttgaacactcccggt

SEQ ID NO: 22416 - DNA, 60 bp, Artificial
  Synthetic oligonucleotide
ctcctcatgcagccacacaggtaatgaagtgacactaggtatagaagaaccacttcgtag

SEQ ID NO: 22417 - DNA, 60 bp, Artificial
  Synthetic oligonucleotide
tctataataagttccaccatgctgacaaccagacaaaacttttcttaaatcaacaagtga

SEQ ID NO: 22418 - DNA, 66 bp, Artificial
  Synthetic oligonucleotide
ccttgtcccatgtcaattattgaacttaaatgtgaaggtattgtgttttgcttaaagtgttcaaag

SEQ ID NO: 22419 - DNA, 60 bp, Artificial
  Synthetic oligonucleotide
cttaagaatgaagagcctagccattctgattctagtaaactcccatagcagtgcaggtct

SEQ ID NO: 22420 - DNA, 60 bp, Artificial
  Synthetic oligonucleotide
cttcgtagataatcataaatgttctcagtggacaagaaccagctagatttacagcctgtc

SEQ ID NO: 22421 - DNA, 60 bp, Artificial
  Synthetic oligonucleotide
gcaacaaaggtacgggccacacttttggggctgatgaatttattcaaccggtcactaagg

SEQ ID NO: 22422 - DNA, 59 bp, Artificial
  Synthetic oligonucleotide
cttcagaagggttcacatttatactgttgaaatccaacttgggctcaaggtacttttca

SEQ ID NO: 22423 - DNA, 60 bp, Artificial
  Synthetic oligonucleotide
gctaagtcgagcgcggttgcacacccagcagtgactaaagggtctttaaaaccacccagg

SEQ ID NO: 22424 - DNA, 60 bp, Artificial
  Synthetic oligonucleotide
gcactctctcaccatcagtgtatttatttacaaccacacttttattactagctaagtcga

SEQ ID NO: 22425 - DNA, 60 bp, Artificial
  Synthetic oligonucleotide
cctctggaaagtttctgacagttgacacacagaagctgccacaagtttgtcatgatcata

SEQ ID NO: 22426 - DNA, 60 bp, Artificial
  Synthetic oligonucleotide
ggatgtgtgccctcggacttattttccttcccaataacaagatcactgattgttctctgc

SEQ ID NO: 22427 - DNA, 60 bp, Artificial
  Synthetic oligonucleotide
ggtgagcgataatgctttccctagtgcctctgaattgctctctctttcactaatcctaac

SEQ ID NO: 22428 - DNA, 60 bp, Artificial
  Synthetic oligonucleotide
ctgctcagtcatacctgaagctattaactgtcctaaattcaagaccgctgggctgcagtc

SEQ ID NO: 22429 - DNA, 60 bp, Artificial
  Synthetic oligonucleotide
tgttcctctcttttccacttcacaacatgggaaatcaatgacatcgcctcacagttgaca

SEQ ID NO: 22430 - DNA, 60 bp, Artificial
  Synthetic oligonucleotide
ttgagtataaatttgaatctgttggttaacatagtacttacattcttactcagaactgta

SEQ ID NO: 22431 - DNA, 60 bp, Artificial
  Synthetic oligonucleotide
ggccctcagattcagggatggaggtcctgtgagggaaccaggtaaaagaccccagagtcc

SEQ ID NO: 22432 - DNA, 60 bp, Artificial
  Synthetic oligonucleotide
gcttgtttctgaatgcctggaattctgtgatgacctccttcttcacatcaagaattgaca

SEQ ID NO: 22433 - DNA, 60 bp, Artificial
  Synthetic oligonucleotide
aaccactgcaacttttgatccagtctagactttagcatccttcctaaagattcctccaag

SEQ ID NO: 22434 - DNA, 60 bp, Artificial
  Synthetic oligonucleotide
ggcacgcaactatggaaatgttccttagccactctttgtctataactactgtaatccccg

SEQ ID NO: 22435 - DNA, 60 bp, Artificial
  Synthetic oligonucleotide
tttaacattgtgaagggcagcagcaacaaattttgttagtaaagggacctcatcacccca

SEQ ID NO: 22436 - DNA, 60 bp, Artificial
  Synthetic oligonucleotide
gtcctttcttggatgacattgcagagtgacacaggcacaccattggccactgactgatca

SEQ ID NO: 22437 - DNA, 60 bp, Artificial
  Synthetic oligonucleotide
tgaagcaaaggttgacagaggatagcacttctttcgcctttgtgaacagatggcttatca

SEQ ID NO: 22438 - DNA, 60 bp, Artificial
  Synthetic oligonucleotide
ccagatgtgaactctgtttgttcctcccaagtgcgttagctaatcttctatcaatccact

SEQ ID NO: 22439 - DNA, 60 bp, Artificial
  Synthetic oligonucleotide
cccgaggcaccaaggcatccagtgattccagatgccagaggcacaggtcctgagttttgc

SEQ ID NO: 22440 - DNA, 60 bp, Artificial
  Synthetic oligonucleotide
tttgaaggaataccaaaaaaagataaggagacatcattggtccccacttgctgtggtcca

SEQ ID NO: 22441 - DNA, 52 bp, Artificial
  Synthetic oligonucleotide
tacacaccctagacaccaatccaccaaaacccatccccaatgcccaccctcc

SEQ ID NO: 22442 - DNA, 60 bp, Artificial
  Synthetic oligonucleotide
gctcttaatgtcctcaatgtcatctcctgaatcccatctaaggttttgaaggaataccaa

SEQ ID NO: 22443 - DNA, 60 bp, Artificial
  Synthetic oligonucleotide
cctggatagtaccttgaacaagaaattttcatgatcttcgggaaagcattgttccgttac

SEQ ID NO: 22444 - DNA, 60 bp, Artificial
  Synthetic oligonucleotide
cccatccacaaggggcagtagaataacatcaatggacaaaagatctgatttaagggactc

SEQ ID NO: 22445 - DNA, 56 bp, Artificial
  Synthetic oligonucleotide
ctaatgttctcactcctgcctttgtcaaagactcgcagagtcttgagtactcagac

SEQ ID NO: 22446 - DNA, 57 bp, Artificial
  Synthetic oligonucleotide
gtctgaactgtctcaccctgcttcacacagtgtccgacagatgcccaatctgcaagc

SEQ ID NO: 22447 - DNA, 60 bp, Artificial
  Synthetic oligonucleotide
ggcggtgtgcacagactgcctagtcgatgtcaaggggaggcctcctctcttcaaagagag

SEQ ID NO: 22448 - DNA, 60 bp, Artificial
  Synthetic oligonucleotide
gtcctgagaataacatcatgcgaaaatatggcagggaagaatctctttgggtccgcataa

SEQ ID NO: 22449 - DNA, 60 bp, Artificial
  Synthetic oligonucleotide
actctggttaaaagcctccttgcagcggactcttttgtatcttgcagcaccatgctcatt

SEQ ID NO: 22450 - DNA, 60 bp, Artificial
  Synthetic oligonucleotide
accaatgccaaggaaatgcttgagagcctttctagatcctcagatgaatcagggttcgga

SEQ ID NO: 22451 - DNA, 60 bp, Artificial
  Synthetic oligonucleotide
caactggatctccagacaggtagatggctgtgaactcttcgtgaagctcacccaacttta

SEQ ID NO: 22452 - DNA, 60 bp, Artificial
  Synthetic oligonucleotide
gttaaacacaatccgaagaactttcctgactttgagggtactttctggaagaattgcttc

SEQ ID NO: 22453 - DNA, 60 bp, Artificial
  Synthetic oligonucleotide
gcaccccttgtgaaacttgatgagagcttgttttgtaatgtcttaactaaagttggcagc

SEQ ID NO: 22454 - DNA, 60 bp, Artificial
  Synthetic oligonucleotide
tacacaactttttgtctcatgaccatctttaatgggtgatgagttgtcaaattgagccaa

SEQ ID NO: 22455 - DNA, 51 bp, Artificial
  Synthetic oligonucleotide
gagacgggtaaagtcttctaaatgagtgaatgatatgattgaagcccactt

SEQ ID NO: 22456 - DNA, 58 bp, Artificial
  Synthetic oligonucleotide
tacttttcaatccccataaatcaatcccctttatcttcaagtgagtcacagagtccga

SEQ ID NO: 22457 - DNA, 60 bp, Artificial
  Synthetic oligonucleotide
ttgtgtggcaagtcttgttccctaacccttaaagggggatatgagctgcaaaccttagaa

SEQ ID NO: 22458 - DNA, 60 bp, Artificial
  Synthetic oligonucleotide
ccaagctctcccagtaattgatgttcttgatgcaatatacggccaaccttcacctgaaag

SEQ ID NO: 22459 - DNA, 60 bp, Artificial
  Synthetic oligonucleotide
gaacatcacaacactgagggcagtacttcccagagacatggtcttcaggaccagcacccc

SEQ ID NO: 22460 - DNA, 60 bp, Artificial
  Synthetic oligonucleotide
acccgggctgacaagtgctgtcatagaggcacttccccgcaatatggtgttgacctgcca

SEQ ID NO: 22461 - DNA, 60 bp, Artificial
  Synthetic oligonucleotide
ggaatctgacaacaaaccaccgaaactaaatagcgctggttccaataaaagcttgcaggc

SEQ ID NO: 22462 - DNA, 60 bp, Artificial
  Synthetic oligonucleotide
gttacaacttcagtctgggggctgcagttaaagctggtgcttgcatgcttgatgggggca

SEQ ID NO: 22463 - DNA, 60 bp, Artificial
  Synthetic oligonucleotide
gaagaaccatttaagagacatcatgggcattccctactgcaattacagcaagtattggta

SEQ ID NO: 22464 - DNA, 60 bp, Artificial
  Synthetic oligonucleotide
gcacacgggagtagtcgttgagaagaaaaagaggggtggaaaagaggaaatcaccccaca

SEQ ID NO: 22465 - DNA, 60 bp, Artificial
  Synthetic oligonucleotide
tttcttgcatttaattaaaatccctacacatcgacacatcgttgggaaaccctgtcccaa

SEQ ID NO: 22466 - DNA, 60 bp, Artificial
  Synthetic oligonucleotide
atctccactgggtcttcaggcctgccctcaatatctatccatgttttgctacttgggtcc

SEQ ID NO: 22467 - DNA, 60 bp, Artificial
  Synthetic oligonucleotide
gatgctaagtactcacatgggatagatgttacagatcttttttccacacaacccgggctg

SEQ ID NO: 22468 - DNA, 60 bp, Artificial
  Synthetic oligonucleotide
tgcctcaccaaacaagggcaagtggacctcaatgatgctgtgcaagctttaacagattta

SEQ ID NO: 22469 - DNA, 60 bp, Artificial
  Synthetic oligonucleotide
ccgctgccaaagttattagatcatctgaactcaaggtgccgacccttaagacattcttct

SEQ ID NO: 22470 - DNA, 60 bp, Artificial
  Synthetic oligonucleotide
cagaaccacttgtcactccacctttaggttgctccaagcacatcagcaatgagcaactcc

SEQ ID NO: 22471 - DNA, 60 bp, Artificial
  Synthetic oligonucleotide
gcaagttgtcaaagatgctcaggctctcctgcatggccttgacttttctgaggtcagcaa

SEQ ID NO: 22472 - DNA, 60 bp, Artificial
  Synthetic oligonucleotide
gatttacacagcaaagtacccgaactcttcagatctagacatgctcactcagagtcaccc

SEQ ID NO: 22473 - DNA, 60 bp, Artificial
  Synthetic oligonucleotide
atttaggattgcgcttttagagattcactactagttaggaattcctaaatcatggggcag

SEQ ID NO: 22474 - DNA, 60 bp, Artificial
  Synthetic oligonucleotide
gggacctcacgcctctgtttggtttgtattgatctaacactctttccacagaggctttta

SEQ ID NO: 22475 - DNA, 60 bp, Artificial
  Synthetic oligonucleotide
gctccagctttaaattccctatctgacttcaataatgaccagcagtcaatcacaaagtgc

SEQ ID NO: 22476 - DNA, 60 bp, Artificial
  Synthetic oligonucleotide
cctataaccaggctggataaaacctcttgaatcttatagtcataatcttctttgttcagc

SEQ ID NO: 22477 - DNA, 54 bp, Artificial
  Synthetic oligonucleotide
ctatttccaccaacttgctctttatatgatagagagaatttcatcctgccagtg

SEQ ID NO: 22478 - DNA, 60 bp, Artificial
  Synthetic oligonucleotide
caactctgtcgacttttgtccaacacctccattggccttcaacctacgctttaaccactt

SEQ ID NO: 22479 - DNA, 60 bp, Artificial
  Synthetic oligonucleotide
attcccctgacatgtatgtccttgttgctaatgcttgtgtcatcttttctattggacaga

SEQ ID NO: 22480 - DNA, 60 bp, Artificial
  Synthetic oligonucleotide
caaatgagaccccataggattcaaagctgagaccaacatcccctaaagctttgcttgact

SEQ ID NO: 22481 - DNA, 60 bp, Artificial
  Synthetic oligonucleotide
aatatcttgatccagaatgacagggttgatgatggctaccttttctttgagttctaacag

SEQ ID NO: 22482 - DNA, 60 bp, Artificial
  Synthetic oligonucleotide
cggagtcactcccacaatcttgaatctcatgatttcttctaggccaactttgtttaggaa

SEQ ID NO: 22483 - DNA, 60 bp, Artificial
  Synthetic oligonucleotide
ctccttacactgcaccactctgtacctttctctccccattgcattctgtcttgtcttgac

(The sequence listing continues in the following parts.)

What is claimed is:

1. A computer-based method to obtain a plurality of oligonucleotide probes for detection of targets of a target group comprising the following computer-operated steps wherein a computer performs the steps in single-processor mode or multiple-processor mode:
providing an initial genomic collection;
identifying group-specific candidate probes from the initial genomic collection by eliminating from the initial collection regions with matches to non-group targets above a match threshold and by selecting regions satisfying probe characteristics, said probe characteristics including at least one criterion selected from length, Tₘ, GC %, maximum homopolymer length, homodimer free energy prediction, hairpin free energy prediction, probe-target free energy prediction, and minimum trimer frequency entropy condition;
ranking the group-specific candidate probes in decreasing order of number of targets of the target group represented by each group-specific candidate probe; and
selecting probes from the ranked group-specific candidate probes, thus obtaining the plurality of oligonucleotide probes for detection of targets of a target group, wherein a target is represented if a candidate probe matches with at least 85% sequence similarity over the total candidate probe length and has a perfectly matching subsequence of at least 29 contiguous bases spanning the middle of the probe.

2. A computer-based method to obtain a plurality of oligonucleotide probes for detection of targets of a target group comprising the following computer-operated steps wherein a computer performs the steps in single-processor mode or multiple-processor mode:
providing an initial genomic collection;
identifying group-specific candidate probes from the initial genomic collection by eliminating from the initial collection regions with matches to non-group targets above a match threshold and by selecting regions satisfying probe characteristics, said probe characteristics including at least one criterion selected from length, Tₘ, GC %, maximum homopolymer length, homodimer free energy prediction, hairpin free energy prediction, probe-target free energy prediction, and minimum trimer frequency entropy condition;
ranking the group-specific candidate probes in decreasing order of number of targets of the target group represented by each group-specific candidate probe;
selecting probes from the ranked group-specific candidate probes;
thus obtaining the plurality of oligonucleotide probes for detection of targets of a target group, wherein a target is represented if a candidate probe matches an at least 85% sequence identity to the target over the length of the probe and a detection probability of at least 85% derived from an alignment score, a predicted Tₘ, and the start position of the match on the probe.

3. The method of claim 2, wherein selecting probes from the ranked group-specific candidate probes comprises, for each target, selecting the most conserved or least conserved probes representing that target until each target genome is represented by a predetermined number of probes.

4. The method of claim 2, further comprising clustering together candidate probes sharing at least 90% identity and selecting one candidate probe from each cluster.

5. The method of claim 2, wherein the at least one criterion is relaxed to obtain at least a minimum number of candidate probes for each target.

6. The method of claim 2, wherein the group is selected between a viral family, a bacterial family, a viral sequence group classified under a taxonomic node other than family, a bacterial sequence group classified under a taxonomic node other than family, a fungal group, a protozoan group, or an archaeal group.

7. The method of claim 2, wherein the probes are at least 30 per target.

8. The method of claim 7, wherein the probes are at least 30 conserved probes and at least 5 discriminating probes.

9. The method of claim 2, wherein the probes are at least 40 bases long.

10. The method of claim 2, wherein group-specific regions are identified for probe selection that do not have a match of an oligonucleotide of x or more nucleotides long with sequences not part of the group, x being an integer.

11. The method of claim 10, wherein x is 19, 20, 21, or 22 nucleotides for a group.

12. The method of claim 2, wherein the alignment score is a BLAST bit score.

13. A method to obtain and synthesize a plurality of oligonucleotide probes for detection of targets of a target group, comprising:
performing the method of claim 2; and
synthesizing the obtained plurality of oligonucleotide probes for detection of targets of a target group.

14. A plurality of oligonucleotide probes for detection of targets of a target group, the plurality obtained with the method of claim 13.

15. An array comprising the plurality of oligonucleotide probes according to claim 14.

16. The array of claim 14, wherein the number of probes of the array differs according to the target.

17. A computer-based method to obtain a plurality of oligonucleotide probes for detection of targets of a target group comprising the following computer-operated steps wherein a computer performs the steps in single-processor mode or multiple-processor mode:
providing an initial genomic collection;
identifying group-specific candidate probes from the initial genomic collection by k-mer analysis, wherein k-mer analysis comprises:
compiling sequences of targets independent of any alignment,
enumerating all k-mers of a desired probelength range of the compiled sequences, wherein k is the desired number of bases in a family-unique region,
ranking k-mers by the number of target sequences in which they occur,
picking conserved k-mers from the ranked k-mers,
filtering conserved k-mers for desired characteristics,
aligning filtered conserved k-mers to targets,
recording detected targets from the alignment as probes, wherein the recording is iterated to find another k-mer for remaining targets,
aligning probes against target sequences, and
selecting probes from the matches of the alignments that satisfy at least a minimum desired oligo length, thus obtaining the plurality of oligonucleotide probes for detection of targets of a target group.

18. The method of claim 17, wherein the desired characteristics include length of a probe, homopolymer length, trimer entropy, Tₘ, hairpin avoidance, and/or GC %.

19. The method of claim 17, wherein aligning filtered conserved k-mers to targets further comprises recalculating conservation to allow mismatches.

20. The method of claim 19, wherein the mismatches are degenerate bases thus providing degenerate probes.

21. The method of claim 20, further comprising calculating degenerate probes, wherein a degenerate probe comprises up to a maximum number of degenerate bases.

22. The method of claim 21, wherein the maximum number of degenerate bases is no more than 6 bases.

23. The method of claim 22, further comprises replacing degenerate bases with the most common non-degenerate base for each degenerate base position after aligning probes against target sequences.

24. The method of claim 15, wherein aligning against target sequencing is performed by BLAST.

25. A method to obtain and synthesize a plurality of oligonucleotide probes for detection of targets of a target group, comprising:
performing the method of claim 17; and
synthesizing the obtained plurality of oligonucleotide probes for detection of targets of a target group.

26. A plurality of oligonucleotide probes for detection of targets of a target group, the plurality obtained with the method of claim 25.

27. An array comprising the plurality of oligonucleotide probes according to claim 26.

28. The array of claim 27, wherein the number of probes of the array differs according to the target.
